United States Patent Application Publication US 2021/0199660 A1 - sequence listing, part 63

SEQ ID NO: 907419 - DNA, 120 bp, Artificial Sequence
  ENSG00000273302_5 (sequence is synthesized)
acatgtaacctcaacgttcaaatgattaaagatataaccaatttaaacttacccttttcatttcttgttgccaaatataatttcttgaagaaattatacaaattaaaattctctaccaac

SEQ ID NO: 907420 - DNA, 120 bp, Artificial Sequence
  ENSG00000254571_0 (sequence is synthesized)
atattactgacagcatgtgacagagatatggagcatttagagaaaattaaccacaagatacacagaaagccagacaactaaaaaatgaggtctgttgggattactatcttaatgaatttc

SEQ ID NO: 907421 - DNA, 120 bp, Artificial Sequence
  ENSG00000254571_1 (sequence is synthesized)
tccactcatatagaaaaacctaaaagaaaaatatttctttaagaatgttttcaaatctgtttccactatttttaaaagccaacgattagttttacaatttattctaaatcaataaataga

SEQ ID NO: 907422 - DNA, 120 bp, Artificial Sequence
  ENSG00000273308_0 (sequence is synthesized)
agctcttccccgagctaaaacacctctcccacctggatctccagctccacgagtctcacagaacagccacactggctccttcgttgtcttcagctccacaacctaagacatcagtgggag

SEQ ID NO: 907423 - DNA, 120 bp, Artificial Sequence
  ENSG00000273308_1 (sequence is synthesized)
agcaccacctcctctccaggtcttcagccccacgtccctccctgaacaatcccttctcatgaaattcagcagtcaagaaatctgcagcggaagtaaatgaataaatgttttgttttcaaa

SEQ ID NO: 907424 - DNA, 120 bp, Artificial Sequence
  ENSG00000226281_0 (sequence is synthesized)
gcacacaagcctctggacgtcaagaggaacacaccggtgtaagagcagactgatagtggcccacggcaggctggcaggccatcgacaggcagaaccactcagtgcagctggaggacagcc

SEQ ID NO: 907425 - DNA, 120 bp, Artificial Sequence
  ENSG00000226281_1 (sequence is synthesized)
actcagtgcagctggaggacagcctggccacggagcggtccgacttcagaggggaaaaccacctccccactccgtctcccttctggctcccccatctgagagctacttccactcaataaa

SEQ ID NO: 907426 - DNA, 120 bp, Artificial Sequence
  ENSG00000226281_2 (sequence is synthesized)
atgtgtgatctgattcttttggtgcacggaggcaagaaacctcaggatacagaaagcctctgtccttggaataaggcaggaggtctaacagctgactagggatggctcaactgaaacagc

SEQ ID NO: 907427 - DNA, 120 bp, Artificial Sequence
  ENSG00000226281_3 (sequence is synthesized)
atcctgtaacacaggcccattgggacctcaggagctgtaaacattcacccttagacattgctgtggggttggagccccaccacctgcccatctgcatgctccccctacaggtttgagcag

SEQ ID NO: 907428 - DNA, 120 bp, Artificial Sequence
  ENSG00000226281_4 (sequence is synthesized)
cggggcacagaagaagccagccacacctccatcgcaagccctgccacggggataagggaacttttcccgttttgccaccagctcaagccccgccttcctgtcactccacactcttcatct

SEQ ID NO: 907429 - DNA, 120 bp, Artificial Sequence
  ENSG00000226281_5 (sequence is synthesized)
ctgtgtatgggtgtggtcttcctcagttccttctctggcctcacacagtgccctgaataatgctttgcaaggcctttgccaggagcctaggtgaaaggcagaagaggtgcccctgcagca

SEQ ID NO: 907430 - DNA, 120 bp, Artificial Sequence
  ENSG00000226281_6 (sequence is synthesized)
tcgcaaggtagagatcgtggttacaagatggggactagactcccagtttgcccttggactgggcagccccttggattttgttttccctgacgttgctgttctgatccaaggccttgtggc

SEQ ID NO: 907431 - DNA, 120 bp, Artificial Sequence
  ENSG00000226281_7 (sequence is synthesized)
aggactatgagtgggttttttgcatagactgcagtaaaggtcctcagaaaagaccctcaagagctatgggggggtctggtcaaatgccacttctagactggactccaaaactggtgctga

SEQ ID NO: 907432 - DNA, 120 bp, Artificial Sequence
  ENSG00000226281_8 (sequence is synthesized)
ttattttcactcctaccccacccaccagcctgataggcgattcctgaagtagcagtggggcgctcagtggtgctcaccaggcccagagctcagtccttcccccattctgcctgatggggc

SEQ ID NO: 907433 - DNA, 120 bp, Artificial Sequence
  ENSG00000226281_9 (sequence is synthesized)
ttgtgtaaccaaggatgacagatgggacaatccctgttggtaaagactgagttgattctgaccaggaccagagataaaacccagcacctttatctttcccctttgtaccttcttcagaaa

SEQ ID NO: 907434 - DNA, 120 bp, Artificial Sequence
  ENSG00000226281_10 (sequence is synthesized)
gaccttcttctgcagcagttctggaactgtgatctgtgaggtatctcacagaatctctgaccaatggagagctaatcaaagacaagtttaataggtgaagaaaatacttggattgggagg

SEQ ID NO: 907435 - DNA, 120 bp, Artificial Sequence
  ENSG00000226281_11 (sequence is synthesized)
atggctgaaaagtcccattgaacaaggccctcaaatggagttcctgtggagtggtcacctttttgatgacttcaactgggaacatcagtacggaaccatcgctgggtgttcattccatca

SEQ ID NO: 907436 - DNA, 120 bp, Artificial Sequence
  ENSG00000226281_12 (sequence is synthesized)
ccccttcctatgtccctgctcaggacaccctgcgtctgtctatatgcattgctaccagtttagacagtgagttacatttagtccatttgtgcattgttctttattgtatccatggtatct

SEQ ID NO: 907437 - DNA, 120 bp, Artificial Sequence
  ENSG00000226281_13 (sequence is synthesized)
agcacaattcttgttcttattagagcttggtaaatgtcattgattaatccagggcagattatctctctcattttcgtgaatcctctgcataaacaatttgattaaaaatttatgacaaaa

SEQ ID NO: 907438 - DNA, 120 bp, Artificial Sequence
  ENSG00000226281_14 (sequence is synthesized)
ggtaagaatgatctgagaaagtggtgaaagtggcaatgtgttttgtgatctgacctcagaaatgacgtattgtcatcttctatttggtagaggagagctgttatgtctagctcacgctca

SEQ ID NO: 907439 - DNA, 120 bp, Artificial Sequence
  ENSG00000226281_15 (sequence is synthesized)
aggaaatgacttactgcaaagaaccactcttccccacgagacttcgagaagacccgctgtcacggactgagttgtgtcctcttaaaattcagatgttggagtccaaacccccagtaactc

SEQ ID NO: 907440 - DNA, 120 bp, Artificial Sequence
  ENSG00000226281_16 (sequence is synthesized)
agagtgtgaacgtatttgaagaggtctttaaagaggtgatgaagggagagagaccccatgagctcgtcaagctccttctgtgactgatcagagatcccaccgtgagtccagctcctggtc

SEQ ID NO: 907441 - DNA, 120 bp, Artificial Sequence
  ENSG00000226281_17 (sequence is synthesized)
ccatgctctggatatatcggtccctggcagcgtggctccatctccgtagcctgcttttgacaaaagtggatacataaatctaggggccacctagctagttctaataagactttggaagtc

SEQ ID NO: 907442 - DNA, 120 bp, Artificial Sequence
  ENSG00000226281_18 (sequence is synthesized)
ttccagagggaatgccattccacccaatcacctagccacaacggttcccttccttcaagatgctgcatgcctcttcaggcgaatggattaccttgtaagagtgacctgaaaaagcgttag

SEQ ID NO: 907443 - DNA, 120 bp, Artificial Sequence
  ENSG00000226281_19 (sequence is synthesized)
cccagccacaccgaggcttaactgagccatttgattctcactgcctctctctgttgcttcctcttgctttcaactacagggtctttctgtttaggtggtgaaaaaaatgatcgttaaaaa

SEQ ID NO: 907444 - DNA, 120 bp, Artificial Sequence
  ENSG00000226281_20 (sequence is synthesized)
caataaacctggggacctctgataccatgagcccagccagagatctgtgtcaagcaaatccttgcagacagttctgccagcctgcagatggctgtttgcctctcgtggatttgataagtg

SEQ ID NO: 907445 - DNA, 120 bp, Artificial Sequence
  ENSG00000226281_21 (sequence is synthesized)
ctcatttatgcccagaggcctctgggagatagtgctcatgctgagcttacaaactgaaaaccattatctgttccttacctgagaccctggggagcagtcagctcactccctgccgatggc

SEQ ID NO: 907446 - DNA, 120 bp, Artificial Sequence
  ENSG00000226281_22 (sequence is synthesized)
ctaagataggtactgatgttacagttgaggaatatctaggagtaacaaacttaagtagctggaatatgccaattttgacaatttgacaacatcattataaacattctgaagtacttacaa

SEQ ID NO: 907447 - DNA, 120 bp, Artificial Sequence
  ENSG00000226281_23 (sequence is synthesized)
agagtgtgaacgtatttgaagaggtctttaaagaggtgatgaaggtctttgtctctgacaatttgcctctgtgacgtggatgggactggaagtccatttggagccctgtcttctccacct

SEQ ID NO: 907448 - DNA, 120 bp, Artificial Sequence
  ENSG00000243321_0 (sequence is synthesized)
ggctttgtaaccagaagaaggaggtggacgtttcttctaagtgggagtcctaagggatctgattgctgatttttaagagatctcaaacattttgtgggccattacaaagctcatgtcccc

SEQ ID NO: 907449 - DNA, 120 bp, Artificial Sequence
  ENSG00000243321_1 (sequence is synthesized)
tatgtctgtggggcctaatgattcaaacagccgtgaccaggcctgcctgtgtggcccagcctggctggcattcaagtgaataacatcatctccatctcactgcacagaagtatgaactgc

SEQ ID NO: 907450 - DNA, 120 bp, Artificial Sequence
  ENSG00000243321_2 (sequence is synthesized)
ggtgtcagcaggtttccatgacaccaccggtgatgtagagcacacatctctcccacactctgctggttaccaggccctggcagtacagaccaggcctcctgggttgccttcctccttccg

SEQ ID NO: 907451 - DNA, 120 bp, Artificial Sequence
  ENSG00000243321_3 (sequence is synthesized)
gctcacaggttcctcttcactcccatgctctgctccccagacctctggcccagaaggagtgacccagagcctgaggcaggagaaattttgaggcggagactggagctgaggatgaggccc

SEQ ID NO: 907452 - DNA, 120 bp, Artificial Sequence
  ENSG00000243321_4 (sequence is synthesized)
aggcccggctagagagaaaacactgagaagggactgaggcccccacatgctggaatcttgtgaaaagaggtgaaggcaaagctggggatgagagagagaagacggagcaggagattagca

SEQ ID NO: 907453 - DNA, 120 bp, Artificial Sequence
  ENSG00000243321_5 (sequence is synthesized)
aggaaataaggtggggaaacagctgggaagacagacatgcatctggaagattccagaaaaggccatttcatccagccctgctccagcagtttgtatttcagcagcctcacgggacacctg

SEQ ID NO: 907454 - DNA, 120 bp, Artificial Sequence
  ENSG00000243321_6 (sequence is synthesized)
gcctttcctttctgacatcgttctccatccatccagcacctcttggagatcacaaggggctctccacatgagacttttgaaactaagaaatagatttgggtgttgcacgtgtttgctctg

SEQ ID NO: 907455 - DNA, 120 bp, Artificial Sequence
  ENSG00000243321_7 (sequence is synthesized)
gagccacattgcttgggctcaaatcccagatccatggcttcatcacctatgaaccttgggcacatttccccacatgcctgtgcctcagtttcctcagctgtgaaatggagtgataatagt

SEQ ID NO: 907456 - DNA, 120 bp, Artificial Sequence
  ENSG00000243321_8 (sequence is synthesized)
atatgaaaagcactccataaatgtttagctattattatttcaaggaattgtaaaaacaggatcacaaaattgtggaatatcattaatgtttacatttaacaaattataccctttaattca

SEQ ID NO: 907457 - DNA, 120 bp, Artificial Sequence
  ENSG00000243321_9 (sequence is synthesized)
gaaaatgcaatggcatataactgtggtatttacaggtaatatagaagttaaggttttttctatataattaacttatagcaccctagaggtaggatggttcagtcatgggacgtgagttta

SEQ ID NO: 907458 - DNA, 120 bp, Artificial Sequence
  ENSG00000243321_10 (sequence is synthesized)
gagctgaatgagaagtatctgtgttatgactgtatttataacctcatttggaagcaacgttaaaagcctaaatttgagatcctttgtaaatgtttgtctccaagccaaatgctttttcct

SEQ ID NO: 907459 - DNA, 120 bp, Artificial Sequence
  ENSG00000243321_11 (sequence is synthesized)
ggtccccttcctgactcatgctcccacccccgttcatatcttaaaatgattagggcagaaaagggtgggggagttggaatagactctacttcctgcctctctgattttacaattagatta

SEQ ID NO: 907460 - DNA, 87 bp, Artificial Sequence
  ENSG00000243321_12 (sequence is synthesized)
agactctacttcctgcctctctgattttacaattagattaacagggcataaggcctttacctctacaactggatgatttatagtttt

SEQ ID NO: 907461 - DNA, 120 bp, Artificial Sequence
  ENSG00000243321_13 (sequence is synthesized)
tcagcctaatatgtcagtatagatccttttgcaattcatgagcatgatgatgtggtatcacacttacgtgtgagatgtgcctccctcaaaccttcttcctacaggttggcactttgccca

SEQ ID NO: 907462 - DNA, 120 bp, Artificial Sequence
  ENSG00000243321_14 (sequence is synthesized)
cctgacatgaaaaaagaagtcaatgtagaaggagaggtaatacaaggctaaaactcacttgtcctgtaaacaactgaagacaagccagtctttgagatgaaagcctgcaggtgctagcca

SEQ ID NO: 907463 - DNA, 120 bp, Artificial Sequence
  ENSG00000243321_15 (sequence is synthesized)
aaagagaagggtggggaggacaggtaaactttccctaccttacaatttggtttttactcacatatgcccaatagaagctgtgtgtaatgcaagcaataaaatgaatgactttctaccaaa

SEQ ID NO: 907464 - DNA, 120 bp, Artificial Sequence
  ENSG00000204802_0 (sequence is synthesized)
ccgggcggcctcaaagttctgacatcacagggcggttcctgaagtggacgtagttatcaaatgctgttttccatgactgtctctgttcttcccatacgcgaatggcaggcatccagatct

SEQ ID NO: 907465 - DNA, 120 bp, Artificial Sequence
  ENSG00000204802_1 (sequence is synthesized)
aggagagactccaccacctatgtcctcacagttaattatcgatttgtgtcagttgcccattttctcacttcctgtttgtgtgtcaaggagtattaataaatctttgcctatttaaagata

SEQ ID NO: 907466 - DNA, 120 bp, Artificial Sequence
  ENSG00000204802_2 (sequence is synthesized)
actgactgggtcactggtgaagttccccgcaggaactgagtcagaccccatctcagggccctgcacaagataggtgcctgctctaaggcgtggaccctcgccacagccctggcccgtctt

SEQ ID NO: 907467 - DNA, 120 bp, Artificial Sequence
  ENSG00000204802_3 (sequence is synthesized)
gacgggcgagggttactgtacttgtcccaaccgtacagatgagaaagctgagactcagggcgagcaacccgggtcccagcggagcgcccggcacacgccgacacttcagcaccagtcgcg

SEQ ID NO: 907468 - DNA, 120 bp, Artificial Sequence
  ENSG00000204802_4 (sequence is synthesized)
gtggccaccactgtgcgcggagatggctgcgacgcgtgcgcagatctcgatcccaaactccctcctgccagaatctggacccgaatccacccattgcccgttttctgctgccgctggaga

SEQ ID NO: 907469 - DNA, 120 bp, Artificial Sequence
  ENSG00000204802_5 (sequence is synthesized)
gttgtattttttccatataactttctattgaatttctttttccatatgataggtggtgaaggtttagcccagtaaagcagagaggttaagaggttagattgggggctctggagccagacc

SEQ ID NO: 907470 - DNA, 120 bp, Artificial Sequence
  ENSG00000204802_6 (sequence is synthesized)
tatgtagatctgagtcctggctctggcacttgaaagccgtgtgaccttggttaagatacttagtccctctctgccaaatggagaaataagggcacctaccccatagggtagttgtgtgat

SEQ ID NO: 907471 - DNA, 120 bp, Artificial Sequence
  ENSG00000204802_7 (sequence is synthesized)
tacacaagttaatacacttcaatcagtagcaagaaagtgaatgtcaagctgtatttgttcaggcagccatatggtagccccacgtccttagtaaactgaggtattgaagtatcttctttt

SEQ ID NO: 907472 - DNA, 120 bp, Artificial Sequence
  ENSG00000204802_8 (sequence is synthesized)
tctttcagaaaatatttgtcaagcaccttctgtgttctaagaactgttctagagctttgcatgctatggaggtctagaaattcacattatggtggcaggtgacagacaatacaaagagat

SEQ ID NO: 907473 - DNA, 120 bp, Artificial Sequence
  ENSG00000204802_9 (sequence is synthesized)
aaagcaatttcatatagtgataagctagggaggagtgctaaaaggagccaaggtgtagtggtgactggaaggtgaccagggaaaccactgtagggtttctaagtgatgagatctgtgaca

SEQ ID NO: 907474 - DNA, 120 bp, Artificial Sequence
  ENSG00000204802_10 (sequence is synthesized)
aatccctgtggtcagcagcaggcattggatatgtaactttattctgtcccattgatcttgtagtcaaccctggtctgttctgtattgttttaattacataatctttgtaataatctttaa

SEQ ID NO: 907475 - DNA, 120 bp, Artificial Sequence
  ENSG00000204802_11 (sequence is synthesized)
gcttcagggagccatgtttgttactggcgggcgccgacctcactgagcatgtgcagccctggccgggcggcctcaaagttctgacatcacagggcggttcctgaagtggacgtagttgta

SEQ ID NO: 907476 - DNA, 120 bp, Artificial Sequence
  ENSG00000204802_12 (sequence is synthesized)
agagctagttattttagacaatgcctctgggatcagggactctaatctggaaataggtagtaggagaggtcggtgatgcagtctctggatcagagacctgagctatatggggttagagag

SEQ ID NO: 907477 - DNA, 120 bp, Artificial Sequence
  ENSG00000204802_13 (sequence is synthesized)
gggccctgggcaggcgagtctctggggagtgtggtgagaatccttgtgtaagatgctgggaggaggtggggtcagggctggggtccgtgggccgacgggttgggggatggccagcgtcag

SEQ ID NO: 907478 - DNA, 120 bp, Artificial Sequence
  ENSG00000204802_14 (sequence is synthesized)
ggatcagtagtagagattctatgtgccctgatcgccagtggaggttttaaatacagagtattcatgagtttagcaatgttattcgcctctcattatttaaataatttgaaattttcccca

SEQ ID NO: 907479 - DNA, 120 bp, Artificial Sequence
  ENSG00000204802_15 (sequence is synthesized)
ataactagtgtcttagaagtcatgaaaatttcagaaaatgacaggtctcctgagttcgtgatgggagttgggcagcagtcgcatacgagcacctggagagtccttgccagttctttgggg

SEQ ID NO: 907480 - DNA, 120 bp, Artificial Sequence
  ENSG00000204802_16 (sequence is synthesized)
ttagccttggattttcaaatattgcatattttgacatgtaaaaatttgttagttttattttttcaaccgatctgacctgtatagttgggcttgaggaagcttcctcattctacatgttac

SEQ ID NO: 907481 - DNA, 120 bp, Artificial Sequence
  ENSG00000204802_17 (sequence is synthesized)
tttctaggtggttctgcatggggcctctcacatgtgctacagtcaaacattagccggggccacagtcatctgaaactcacttacatggctgacaattgatgttggctgttgcctggagaa

SEQ ID NO: 907482 - DNA, 120 bp, Artificial Sequence
  ENSG00000204802_18 (sequence is synthesized)
gacatatgtggcgtggtggaatggaatggtgactagattcaagaaagagcttcccaggaggaaggctaccaagagaccgaagtagaggcttcagtttcttaaaaaaaaaaaaaaaaaaaa

SEQ ID NO: 907483 - DNA, 120 bp, Artificial Sequence
  ENSG00000285399_0 (sequence is synthesized)
gagagattgctgattttacagatctgaacagaattaagacgaacgagctttcacaattgcagcagatgaagatccattggtaaattgatcaggatttttggcctaccctccaaagaaaag

SEQ ID NO: 907484 - DNA, 120 bp, Artificial Sequence
  ENSG00000285399_1 (sequence is synthesized)
gcacccaattccaccacagagtcgggatttcgtcggtgatcgtgatggggtggtgagaggtggatgaggaaacaggcaccagtgcagctgatttgacctccagtgggatagatacgatta

SEQ ID NO: 907485 - DNA, 120 bp, Artificial Sequence
  ENSG00000285399_2 (sequence is synthesized)
gatgtgacttgctctcccctaagacagatctttatgggcagaaacacagaaatggaagtagcagattttaagaaaactgattcagactttgaacttgtatgaccttatatttattgattt

SEQ ID NO: 907486 - DNA, 120 bp, Artificial Sequence
  ENSG00000285399_3 (sequence is synthesized)
atttgagtcataagatttctgggtttttttttttttgagaatatgaaagactagttaagaaaatttgtgtgtttatttgatatttgctttctgaaaatataaaaaattatgagagagcta

SEQ ID NO: 907487 - DNA, 120 bp, Artificial Sequence
  ENSG00000285399_4 (sequence is synthesized)
actcgcagttcaaggcctcattgccatcgactccactgtctgtggtgagaggtggatgaggaaacaggcaccagtgcagctgatttgacctccagtgggatagatacgattagcaccagg

SEQ ID NO: 907488 - DNA, 120 bp, Artificial Sequence
  ENSG00000285399_5 (sequence is synthesized)
atcgtgtctcattttgaacccagacagatctttatgggcagaaacacagaaatggaagtagcagattttaagaaaactgattcagactttgaacttatctgaacagaattaagacgaacg

SEQ ID NO: 907489 - DNA, 120 bp, Artificial Sequence
  ENSG00000285399_6 (sequence is synthesized)
agctttcacaattgcagcagatgaagatccattggtaaattgatcaggatttttggcctaccctccaaagaaaaggtgccagagaagagagaaacaggctttcctgtgtggtgtccaatc

SEQ ID NO: 907490 - DNA, 120 bp, Artificial Sequence
  ENSG00000285399_7 (sequence is synthesized)
actgacaatggaggggtatggggagaagttaagaggaaacatgtttggcagaatgccagaggagctctttagtgcctgtttatggagtttctactgtgtgcatggggattgtccctggga

SEQ ID NO: 907491 - DNA, 120 bp, Artificial Sequence
  ENSG00000285399_8 (sequence is synthesized)
ggaaaaggagaagaataggaggtgatttacatggactgcagtgatgacctaatgcttttttgaatattataccaatgaaaagattaatatgatgccaggaagtaagtgaccaagaagcag

SEQ ID NO: 907492 - DNA, 120 bp, Artificial Sequence
  ENSG00000285399_9 (sequence is synthesized)
agaaagaagaggaggcacaagttcaaaagtctgtagaggccagagagaccagagaggggaataaagtgagccaggtggaactgtgagaaaccatccggtccatgatccatctaatgtggc

SEQ ID NO: 907493 - DNA, 120 bp, Artificial Sequence
  ENSG00000285399_10 (sequence is synthesized)
aatcccttctcagcagcagattgtaggcccgatatctgttcattcaacaaacatttattgggtgccaacctatgtgctatgttctcttatggtcactggggataaattagtaaatcgaaa

SEQ ID NO: 907494 - DNA, 120 bp, Artificial Sequence
  ENSG00000285399_11 (sequence is synthesized)
ggacaaatatccctgccattgaattggcacttacctttttttcttaattaacaagtaaaaattggatatgtttatcatgtacaatgtattcttttaaaatatgtattcattgtggaatgg

SEQ ID NO: 907495 - DNA, 120 bp, Artificial Sequence
  ENSG00000285399_12 (sequence is synthesized)
tacttctcatacttatgttttggttgtgagaacctttatctagtctctttgcaatttgcaagaatacaatacattgttattaactatagtaagcatgttttgcagctgagttcttgaact

SEQ ID NO: 907496 - DNA, 120 bp, Artificial Sequence
  ENSG00000285399_13 (sequence is synthesized)
cattcttcctaactgaaattttgtaccttttgactaactttccctaaacccctcacctctatcctctggtaaccaccattctattctctacttctatgaattcaactttttaagattcca

SEQ ID NO: 907497 - DNA, 120 bp, Artificial Sequence
  ENSG00000285399_14 (sequence is synthesized)
catataagtgagattgtgtgctgtttgtctttctgggcctggctgatttcacttaacataatatcctccaggttcatctatgttgctgcaaatgacaggagttctctttaaaaaaaaaca

SEQ ID NO: 907498 - DNA, 120 bp, Artificial Sequence
  ENSG00000285399_15 (sequence is synthesized)
aaaatagagataggggtctcgctatgtgtcctaggctagtctggaactcctgaaccctggcctcaagtgtttctcccaccttggccttccctccagagtgcttggattacagttgtgagc

SEQ ID NO: 907499 - DNA, 120 bp, Artificial Sequence
  ENSG00000285399_16 (sequence is synthesized)
taccatatctggctggattgccttctttttaaagattgaatagtattccattgtgtgtgtgtataacacagtggaatattatttagccataaaaaagaaggaagtattgataacatgttc

SEQ ID NO: 907500 - DNA, 120 bp, Artificial Sequence
  ENSG00000285399_17 (sequence is synthesized)
caacatggataaaccttgaaaatgttttattaaatgaaggaaaccaaacacaaagaccacatattatgtggtttcatttaatattcagaataggcaaatccatagagacagaaagcagat

SEQ ID NO: 907501 - DNA, 120 bp, Artificial Sequence
  ENSG00000285399_18 (sequence is synthesized)
gtggttttcgggggttggggagggaatgtgggcagtgattgcttgatgaatacagggtttccttttggagtgatgaaaatgttctggaactagatagtaatgttggttgtactacactgt

SEQ ID NO: 907502 - DNA, 120 bp, Artificial Sequence
  ENSG00000285399_19 (sequence is synthesized)
gaatgtactaaatgtcatcaaattgcacacttaaaatggttaaaggccagttgcagtggctcatacctgtaaatccagcacttagggagggcgaagcagaaagactacttgagtccagga

SEQ ID NO: 907503 - DNA, 120 bp, Artificial Sequence
  ENSG00000285399_20 (sequence is synthesized)
gcacccaattccaccacagagtcgggatttcgtcggtgatcgtgatggggtgcttttatttttctctttgattttcaaaaaatgtctatgtgactgtccctatcttaaggggaagttgaa

SEQ ID NO: 907504 - DNA, 120 bp, Artificial Sequence
  ENSG00000285399_21 (sequence is synthesized)
agtgggggcgggggtgctcaatgagaaacgttgccttgtgtgtagttgtttggagcacactgcaaattatattggcatctctttccaaaagtcactttgattcaacttcgatagctttct

SEQ ID NO: 907505 - DNA, 120 bp, Artificial Sequence
  ENSG00000285399_22 (sequence is synthesized)
cgtaaatggcacgtttaggtggtgagaggtggatgaggaaacaggcaccagtgcagctgatttgacctccagtgggatagatacgattagcaccaggatcgtgtctcattttgaacccag

SEQ ID NO: 907506 - DNA, 120 bp, Artificial Sequence
  ENSG00000285399_23 (sequence is synthesized)
gtttgttattttattcagccataccgttgttttccaattttcctgtcccccaagtagatcttgcatcttcatatccgggatgaagaagttgtgtaggataaacttggttgtttcactttc

SEQ ID NO: 907507 - DNA, 120 bp, Artificial Sequence
  ENSG00000285399_24 (sequence is synthesized)
cttactaaatttaggtacattctccctgttttcccccagttctttcaaagaggagaagttgcagatgcaaatgtattaaagtgaagtgtgtttaacctctagcaagaaatatgtacaatt

SEQ ID NO: 907508 - DNA, 120 bp, Artificial Sequence
  ENSG00000285399_25 (sequence is synthesized)
ttttgtcacaaagacaaaaattactttacatgaagattctgagatgtgacttgctctcccctaaggtatgaagtttccgactttgaaaaaatactgacctaaacgctggctgtaggtggg

SEQ ID NO: 907509 - DNA, 120 bp, Artificial Sequence
  ENSG00000285399_26 (sequence is synthesized)
catcatcagaccctgttcatttccttggttttaggagacagggcactctaagagaagaattgttttaaatcttaagtactacagattgtaaactgaaattgtcaattgattggggttcac

SEQ ID NO: 907510 - DNA, 86 bp, Artificial Sequence
  ENSG00000285399_27 (sequence is synthesized)
acagattgtaaactgaaattgtcaattgattggggttcacaataccaagttgcattttggtggggatagttattgtttagaaagta

SEQ ID NO: 907511 - DNA, 120 bp, Artificial Sequence
  ENSG00000285399_28 (sequence is synthesized)
gcagttcaaggcctcattgccatcgactccactgtctgtcgcgcggttccggcccctgcggccgcccccttccttcctgggctcggcgggtgcgggaaaaagggtgaaagagaaacttgg

SEQ ID NO: 907512 - DNA, 120 bp, Artificial Sequence
  ENSG00000285399_29 (sequence is synthesized)
acaattgcagcagatgaagatccattggtaaattgatcaggatttttggcctaccctccaaagaaaagaggagctaactgaggtacagatgaaaaaattatcctgccaacgtccagagtt

SEQ ID NO: 907513 - DNA, 120 bp, Artificial Sequence
  ENSG00000285399_30 (sequence is synthesized)
aggtggtggcagagatgggttccaggaccagcttcatctccaactcatgttcctatgaggaatgctgtggctggtggtgtcagattttacttaggattttttcaagataagtcaatctgg

SEQ ID NO: 907514 - DNA, 120 bp, Artificial Sequence
  ENSG00000285399_31 (sequence is synthesized)
aattttttgtgaaattttccaagttttaatgttggcttaaaaaatagctttattgagatgtaattcaaatgccataaatttacccctttaaactgtacatttaatggtttttagtgtatt

SEQ ID NO: 907515 - DNA, 120 bp, Artificial Sequence
  ENSG00000285399_32 (sequence is synthesized)
cacagtattgattgtataactgtttcttctatctaggtcaaaaacatttttagcacccacattggagaccccatcgcattcctaagcagtcactctccatcttctcttccttcagcctct

SEQ ID NO: 907516 - DNA, 120 bp, Artificial Sequence
  ENSG00000285399_33 (sequence is synthesized)
ggaaaccactaatctgctctctgtctgtatggatttgcctattctggctaattcacctaaatgaaatcaaataatatgtgacctatttgtcttctttcatttagcataatgtttttaaga

SEQ ID NO: 907517 - DNA, 85 bp, Artificial Sequence
  ENSG00000285399_34 (sequence is synthesized)
acctatttgtcttctttcatttagcataatgtttttaagatttattcatgttggagcatgtatcagtgcttcattttatggctga

SEQ ID NO: 907518 - DNA, 88 bp, Artificial Sequence
  ENSG00000285399_35 (sequence is synthesized)
aataatattctttgtagagatatatcacaatttgtttattcatttgttgatgtacatatgggttgtttccaccttttggcttttagga

SEQ ID NO: 907519 - DNA, 120 bp, Artificial Sequence
  ENSG00000285399_36 (sequence is synthesized)
gatgtacatatgggttgtttccaccttttggcttttaggaattacactgctaatgaatattagtgctcaggtatctgagtctctgctttcagttcttttgagtgtatacctagaagtgga

SEQ ID NO: 907520 - DNA, 120 bp, Artificial Sequence
  ENSG00000285399_37 (sequence is synthesized)
attgctggatcatatgctaattctgtgtttaaccttttaagtaactaccactgttttccacaatggctgcactgttttacattcctgccagcaatgtatgaggattccagttttttcata

SEQ ID NO: 907521 - DNA, 120 bp, Artificial Sequence
  ENSG00000285399_38 (sequence is synthesized)
tccttgctaacactcttcattttctgttcttttgttgttgtttattacagccatcctagtgggtgagaggtggtatctctgatttagatttgcatttccctaatgactaatgatattgac

SEQ ID NO: 907522 - DNA, 120 bp, Artificial Sequence
  ENSG00000285399_39 (sequence is synthesized)
cttctttttttgttgttgttgttaatttactgggctgcgttctttcttttctacattctagttcaagtcccttatcagataaatgatttgcaaaaatgtgtaggttctgtgggttttcat

SEQ ID NO: 907523 - DNA, 120 bp, Artificial Sequence
  ENSG00000285399_40 (sequence is synthesized)
tttcttgatggcatcctttgaagcacagaagtttaattttgatgaagttcaatttacccatttggctctgttttcattcttttttaatttaatttaatttaatttttttttgagacggag

SEQ ID NO: 907524 - DNA, 78 bp, Artificial Sequence
  ENSG00000285399_41 (sequence is synthesized)
tttttaatttaatttaatttaatttttttttgagacggagtcttattctgtcgccagactccctagttcaagagattc

SEQ ID NO: 907525 - DNA, 120 bp, Artificial Sequence
  ENSG00000285399_42 (sequence is synthesized)
acaagtgtgagccaccgcacccggccttggctctgtttttaaaaagaaatacctggtaagtcagattccaacccactaattgcccgcttgtgattgctgctttgctgccactgccccaga

SEQ ID NO: 907526 - DNA, 120 bp, Artificial Sequence
  ENSG00000285399_43 (sequence is synthesized)
cagaaaccatttggaaaaatcctcatgctttttgaaaataccggttttctgaagagatggagcaagctctggaaggcaggaaaggcagatttctcaccaggagcaattttgttttggttc

SEQ ID NO: 907527 - DNA, 120 bp, Artificial Sequence
  ENSG00000285399_44 (sequence is synthesized)
cccttttctactcctgaagttccttcacttagaacaccttgatgtagacgtgggggcatagtaggaagtggacagaggatcaaggtctccaggtcttgaaaattttatgtttatcaaaag

SEQ ID NO: 907528 - DNA, 120 bp, Artificial Sequence
  ENSG00000177993_0 (sequence is synthesized)
ctgcctcaccaagggccctgttttccgacagaaacttttcattccataggaaatgaggtcacacaccaagagcacacgggtaaccgggcatttggctagcttactttcaagacttggagc

SEQ ID NO: 907529 - DNA, 120 bp, Artificial Sequence
  ENSG00000177993_1 (sequence is synthesized)
cccttaatctacggcctacaggagaccaacacacaggagaatggcccaactgctttctcagctacatttctggttttcaagaaacccacttatgctactctacctcagacttaaggaaag

SEQ ID NO: 907530 - DNA, 120 bp, Artificial Sequence
  ENSG00000177993_2 (sequence is synthesized)
cgcttgttgaagagaaaatgtgtcttcgaggcaataaacaattgagctttttgtgatgtctggggaaagatacccccaaagcagaagtctgggtccctcacaatcaaaagcctccaaaca

SEQ ID NO: 907531 - DNA, 120 bp, Artificial Sequence
  ENSG00000177993_3 (sequence is synthesized)
acaatgatcacagacatcctctggtcaccaggtcttggcatggcacctggaacccagcaggcacaaaaatgctgggtggacacagccatgggcacaagagcaaccatttatacggggcaa

SEQ ID NO: 907532 - DNA, 120 bp, Artificial Sequence
  ENSG00000177993_4 (sequence is synthesized)
gcttttggggtttgtggcagaagtcctcctgacttttgggtccaggcctttggcctccatgccacaggagtcccagggtcttgcataggagcctctgccttgagtaggagacagcaatgg

SEQ ID NO: 907533 - DNA, 120 bp, Artificial Sequence
  ENSG00000177993_5 (sequence is synthesized)
aatgcaagttccagatgggtcttctgcgataacaggataaaaatagagaacgatgagaatctcaaggacaccattttcaggtttaagacctatttttaaaaaatgaaacacatgctttct

SEQ ID NO: 907534 - DNA, 120 bp, Artificial Sequence
  ENSG00000177993_6 (sequence is synthesized)
tgaagtaagccctcaaacatactctgaactgagctaaccaagtcacagaacttgtatgtcaactgcccaactaatatccacttatctgtgataagtggtgacggttctgccactagaagg

SEQ ID NO: 907535 - DNA, 120 bp, Artificial Sequence
  ENSG00000177993_7 (sequence is synthesized)
aattttagtgatggggtctgggggtgtggagaagggatattggccatagcagtcatgagttaggctgtaaaacataagttaaacgcagagtgtcctatattgaattagaccctaaaatgt

SEQ ID NO: 907536 - DNA, 120 bp, Artificial Sequence
  ENSG00000177993_8 (sequence is synthesized)
gctatattttcgggtctaattcaagtaacaagtgctataatcacctttccataggctaacagaatgaaggctgtgtcaaatctatgcttttatttctcccaaatgcgttccagtcctggt

SEQ ID NO: 907537 - DNA, 120 bp, Artificial Sequence
  ENSG00000177993_9 (sequence is synthesized)
tagtcatcacaatggtgctgatgatggagggggaaggagaaaagtggcagagtcatcaagctagccttcctcagcccgacagctaatgctagctggagaataaaggtgctcccaagcatc

SEQ ID NO: 907538 - DNA, 120 bp, Artificial Sequence
  ENSG00000177993_10 (sequence is synthesized)
cctaccacgcatccggggtgtaacaataatcattaatactactttctgtcctgtgttcacaatcccatcaatgcccctttcgggctggaaagcagtgaggggcttgcaatccactaggtt

SEQ ID NO: 907539 - DNA, 60 bp, Artificial Sequence
  ENSG00000177993_11 (sequence is synthesized)
cgggctggaaagcagtgaggggcttgcaatccactaggttaaagaaatggaactagaggc

SEQ ID NO: 907540 - DNA, 120 bp, Artificial Sequence
  ENSG00000177993_12 (sequence is synthesized)
cgtctcaaaaaaaaaaaagaaagaaagagaaatggaactagaccaacaagggaaacaaatggattaagagtttaattgggtgggattattttgaaggatgctcaatacacttctgcaatg

SEQ ID NO: 907541 - DNA, 120 bp, Artificial Sequence
  ENSG00000177993_13 (sequence is synthesized)
atacacttctgcaatggagcatcctggatgggggtgatgtgtgccataggctggtgtggtcaggaaagacttcatggaggccaagctgccagaatgaagaggaagagaaggccagccagc

SEQ ID NO: 907542 - DNA, 120 bp, Artificial Sequence
  ENSG00000177993_14 (sequence is synthesized)
aggccagccagcagctggatatcaaaggtgctggtggaggcagcagacacaccaagtataggggagaggttagcaaaaggtggcatagaggctgggtatggtggctcacatctgtaatcc

SEQ ID NO: 907543 - DNA, 120 bp, Artificial Sequence
  ENSG00000231718_0 (sequence is synthesized)
gatacataggaaaccaaataacctagagaaaacaatacccatgaatgattagcaaatttcttacatataaaggaaatgatttaacttcaagagactagaataaatgaaaacatattcaaa

SEQ ID NO: 907544 - DNA, 120 bp, Artificial Sequence
  ENSG00000231718_1 (sequence is synthesized)
attgaaaacgttaatggaagcatgaaatcagctctgtgctgaatgcctcagggaaggaatgtggcagagaacagaaaacaaaaatggtgtttcgctctgctacccaggctgaagtgcagt

SEQ ID NO: 907545 - DNA, 120 bp, Artificial Sequence
  ENSG00000231718_2 (sequence is synthesized)
ggtgtcattatttctcactgcagcctcaaacttctggcctccagcgatcctcctacctcagtctccagactgtcactttagcagtactactcttcggatatgcaatcaactgtttggaaa

SEQ ID NO: 907546 - DNA, 120 bp, Artificial Sequence
  ENSG00000231718_3 (sequence is synthesized)
gaagagataaaagtcaaatttttactatactaaaacataagtctcaaaagatggagtggacatactttaccctattcctctcattaagtacagatcaaaacctcagacattatatgtaaa

SEQ ID NO: 907547 - DNA, 120 bp, Artificial Sequence
  ENSG00000231718_4 (sequence is synthesized)
agaaacataagaagactctgaaagtggagacaagactggctagggaccgtgggaccaaagaatgacagcagtgtgtttcctgagtttcccttttatctcatatatcctggattgggtgct

SEQ ID NO: 907548 - DNA, 120 bp, Artificial Sequence
  ENSG00000231718_5 (sequence is synthesized)
aaagaatccagcaacccagaaatatcatcggctgcagctaagagatttttctcatgaaaagcctgctctctctaaccaaaagaggacgaaaagggcgcctagcaagacagaaaactttta

SEQ ID NO: 907549 - DNA, 120 bp, Artificial Sequence
  ENSG00000231718_6 (sequence is synthesized)
gataataacagcacaactccagtcaaacattaatggaaatgcataacgcagtctccctcccaaccccatcagcaaaggctagacgggagcttggactccaccctcattagatggaaacat

SEQ ID NO: 907550 - DNA, 120 bp, Artificial Sequence
  ENSG00000231718_7 (sequence is synthesized)
ggtacccaaattcccccacatgataatatcagagaaggtggagtaagaaaccaagaccttcattcctgtcccaaggtaactcctgtcacaccttcgtagtgtcagtggagaccatgcagg

SEQ ID NO: 907551 - DNA, 120 bp, Artificial Sequence
  ENSG00000231718_8 (sequence is synthesized)
caatcaatctacatgctgacctggctgttacaagacacccagttccctccttgccatgttagtgtctgtattagtcagggttctctagaggcacagaacgaataggatgaatatataaaa

SEQ ID NO: 907552 - DNA, 120 bp, Artificial Sequence
  ENSG00000231718_9 (sequence is synthesized)
gtattaactcacatgatcacaaggttccacaataggccatctgcaagcaaagaggccagtctgagtcccaaagctgaagaacttggattctgatgtttgaggacaggaagcattcaacac

SEQ ID NO: 907553 - DNA, 120 bp, Artificial Sequence
  ENSG00000231718_10 (sequence is synthesized)
taggctgggaggctaagccagtctagtctctccacgttcttctgcccactttctattctggccgcactggcagctgattagatggcacccacccagattgacggtgggtctgcctctccc

SEQ ID NO: 907554 - DNA, 72 bp, Artificial Sequence
  ENSG00000231718_11 (sequence is synthesized)
ggcagctgattagatggcacccacccagattgacggtgggtctgcctctcccagtacactgcatcaaatact

SEQ ID NO: 907555 - DNA, 120 bp, Artificial Sequence
  ENSG00000231718_12 (sequence is synthesized)
cagtgtccaaagagaatgaataggaaaaataaaggacatttatgacctcaagcaataatgaagactgccttgtccttctgcctagtatcagtagaggtcatgtggtacaaagtaacaagg

SEQ ID NO: 907556 - DNA, 120 bp, Artificial Sequence
  ENSG00000231718_13 (sequence is synthesized)
tacttctcctcctcccagataggatgatgccatcatagacctagtgagagcctaaactcccatccctgccgatcagtaacaaagtacaacttcccctttgtgtatcagtgaaggccacac

SEQ ID NO: 907557 - DNA, 120 bp, Artificial Sequence
  ENSG00000231718_14 (sequence is synthesized)
ttacctggcagtaatgaggtagcacttctgccagtgtggtattagaggaggcctgctgaaacagaagatttaaataagatctggattctcatagcctaatacgcaatatgtccagaatac

SEQ ID NO: 907558 - DNA, 120 bp, Artificial Sequence
  ENSG00000231718_15 (sequence is synthesized)
agtagaaatttacttatcataccaagaaccaggacaatcaagttgaatgagaaaagacaatcactgctcaactgaaacgaatctcagggatatgcgaacctgtagcaaagaatcaaacac

SEQ ID NO: 907559 - DNA, 120 bp, Artificial Sequence
  ENSG00000231718_16 (sequence is synthesized)
ctgtgtcattggagtcccatgagaagataaagaaggtgagactaaaacagtacttaaaacaatgtctgcaaatttaccaattttggcaaaaggtacaaattacagatataagaagcttag

SEQ ID NO: 907560 - DNA, 120 bp, Artificial Sequence
  ENSG00000231718_17 (sequence is synthesized)
tgtaagcataatagaacttgcggcccatttctttgctgtcaaacttttcattatctcctcattcatgcaaagaaggaggaggtgaagaagaaaaagaaaaagaaggagagcacagaagta

SEQ ID NO: 907561 - DNA, 120 bp, Artificial Sequence
  ENSG00000231718_18 (sequence is synthesized)
ggaggaggaaaaggagatgaagaataagaagcagcaacagtttagtgtaccttaaacaggatgaacccaacaaattccatgccaagacgcatcatatcatacctatgaaaactaaagcat

SEQ ID NO: 907562 - DNA, 120 bp, Artificial Sequence
  ENSG00000231714_0 (sequence is synthesized)
actaaagcaagctcttcaaggaaagtaaaaatagtcaacgggagtacaagagaaatacaggaataaaccttggcgtattttcccgagcattaatgggttgacagtgaagatgaatcacct

SEQ ID NO: 907563 - DNA, 85 bp, Artificial Sequence
  ENSG00000231714_1 (sequence is synthesized)
agacattatccttacacataggtgaaaaaaccgagttcagtggcgcgatcttggcttactgtaacctctgcctcccaggttcaag

SEQ ID NO: 907564 - DNA, 120 bp, Artificial Sequence
  ENSG00000236024_0 (sequence is synthesized)
gggcccaagttcaaggtcccagtggagtcattgttggtggaaggatctgaacccaccaatcggccagctctgtatgagaagacaaggacctttctccatgatcctttcgtccctgtagcc

SEQ ID NO: 907565 - DNA, 120 bp, Artificial Sequence
  ENSG00000236024_1 (sequence is synthesized)
aggaggacccaggcagcacctccccgcggaccagaactcgaacccacagctctggacttagccgggggctctggcgctcgcctccgcctccgagcggatgtgccggatatttgttgccct

SEQ ID NO: 907566 - DNA, 120 bp, Artificial Sequence
  ENSG00000236024_2 (sequence is synthesized)
aagttcctgaatcacctcctgagaaatgcattgtggtgggcgtgtgtgttcctctggggactccgtgcttgggcttaaagcatttaggaaatcaataaaataaatactctctaagcctca

SEQ ID NO: 907567 - DNA, 120 bp, Artificial Sequence
  ENSG00000231711_0 (sequence is synthesized)
gcaaaagtggccaagccacatctctcgagactgcaagggccctggaggcgctgggaggcacagatctggctgccagctgggcctgaggcctccctttgtccgtccttcctgttcttcctc

SEQ ID NO: 907568 - DNA, 120 bp, Artificial Sequence
  ENSG00000231711_1 (sequence is synthesized)
accaggtgtgtttacggagaagacactccgggccaggccagctcctccagagcactatttcaggctggggagaatgcggattttttttttgttgttgttttttaaagaaaaatgaacaag

SEQ ID NO: 907569 - DNA, 120 bp, Artificial Sequence
  ENSG00000231711_2 (sequence is synthesized)
gagcctggttggggattggggtgggaggaatatttgtcttttgtcccacaaacgtgtgtgatgctccaaagggctggagaacctctctcttaagtggatatttttcccctcaaacgactt

SEQ ID NO: 907570 - DNA, 120 bp, Artificial Sequence
  ENSG00000231711_3 (sequence is synthesized)
ctcagacatgatcctctctgaggttggtcctgggcttccatacgtgattcatggaagaggtctcagccccaagagcccctgagggtactgtccactccccctggaaacttccagaacctg

SEQ ID NO: 907571 - DNA, 120 bp, Artificial Sequence
  ENSG00000231711_4 (sequence is synthesized)
acgtggggctgaagacatagaggtaatggggatgggctggtggggcgctggctgggacaatgtgtggagcccttgttttcagagctacagatgcttgtcagctgacagttcgtttccagc

SEQ ID NO: 907572 - DNA, 120 bp, Artificial Sequence
  ENSG00000231711_5 (sequence is synthesized)
atccacagtggacctcctttgggggagcatttacctgccaatgaaccccaagatcctttctcagaggcggcgggatgaagttttccttttttttttttttagttaatatattttatttaa

SEQ ID NO: 907573 - DNA, 120 bp, Artificial Sequence
  ENSG00000231711_6 (sequence is synthesized)
accaatatatccaaaatattatcagttcaacatacgatcaagataaagattaatgagatactttacattttcatactaaatctttttttaaatttttgtgagtacatagtaggtataaac

SEQ ID NO: 907574 - DNA, 120 bp, Artificial Sequence
  ENSG00000231711_7 (sequence is synthesized)
atttagggatgaagtttcttactgtgttttcccagtaacaagcactggcatcagctgtcatgatttctccccaaggcctaggatggtcagcctcgcacgctccacagcagagtgactgaa

SEQ ID NO: 907575 - DNA, 120 bp, Artificial Sequence
  ENSG00000231711_8 (sequence is synthesized)
gctctatcgaggtgtggcacgagcgtgttgtcatttcaagagaatctgcagcctccctggtttttaatgaaagctcctatgcagggcctggccctttcctggggagggaaggctggctgt

SEQ ID NO: 907576 - DNA, 120 bp, Artificial Sequence
  ENSG00000231711_9 (sequence is synthesized)
gtctcccgctgcatcctcactgggaacttcattcctgagctgcgaccgctattttttggattggaaaatgccttgggaacggctcatcttcctgcggcttgagcccatttgttttctgac

SEQ ID NO: 907577 - DNA, 120 bp, Artificial Sequence
  ENSG00000231711_10 (sequence is synthesized)
tggtggtcactggtgattagagtgtgtcccaaagggaaccgtcaccttagttctatcatacactatcaataacttgtccagggctgactttgtggctgtgtggcttgcccagtggtagag

SEQ ID NO: 907578 - DNA, 120 bp, Artificial Sequence
  ENSG00000231711_11 (sequence is synthesized)
ggccggtgtgcagaagggccccacactcaatgtttggctgtccccggtcttaaaattcttagtcattcttgaacaagggaacccatattttcattttgttctaggctctgagagttacat

SEQ ID NO: 907579 - DNA, 120 bp, Artificial Sequence
  ENSG00000231711_12 (sequence is synthesized)
gctctgagagttacataattgattctgactttggctgttggtcaacagtgtcataaggtaaaataaggtaaaaatctatgatttttatatttctttttttctttctttctttttcctttt

SEQ ID NO: 907580 - DNA, 120 bp, Artificial Sequence
  ENSG00000231711_13 (sequence is synthesized)
attacaggcgtgagccaacgtgcccagctgatttttatatttcttttactaaattctgtttacagaaataattccagattctatgtaagatacaaatattttaactgaagatcattgtat

SEQ ID NO: 907581 - DNA, 120 bp, Artificial Sequence
  ENSG00000231711_14 (sequence is synthesized)
tacagaaataattccagattctatgtaagatacaaatattttaactgaagatcattgtatttagggaaaatgttcacctttaagagacaggggctgggcgttgtggctcacgcctgtaat

SEQ ID NO: 907582 - DNA, 120 bp, Artificial Sequence
  ENSG00000231711_15 (sequence is synthesized)
atgggggtgtgcacctgtaactcccagctactccagaggctgaggtgggaagactgctcaagcccgggaggtcaaagctgcagtgagagaccttgtcttaaatacaaacaggcaggaagt

SEQ ID NO: 907583 - DNA, 120 bp, Artificial Sequence
  ENSG00000231711_16 (sequence is synthesized)
cgttataagcataatacaatcctggatgttggaatcatccctgtccagccttggctctgccacgtgggtgctgaatgctgcctcagggaccctggtgcccagctcccacctgcagggtgt

SEQ ID NO: 907584 - DNA, 120 bp, Artificial Sequence
  ENSG00000231711_17 (sequence is synthesized)
tctgaggagccagcacgctgggagggcctagcaggagatgtggcatgaaccaggtattcgataaataaaaagtgcctttgattgtcacgtttatcatttgacatgtaggcacaggtgcag

SEQ ID NO: 907585 - DNA, 120 bp, Artificial Sequence
  ENSG00000231711_18 (sequence is synthesized)
tttgattatttttaatgtaagtctattttatctcttcccgttataaaagcaatacacactgtgatagacggtttggagaattcaggaaagaaaaagaaaaagaaaaaaaattcctcctag

SEQ ID NO: 907586 - DNA, 120 bp, Artificial Sequence
  ENSG00000231711_19 (sequence is synthesized)
gccctctgctccagagcctccagccgtcacatgacagtgtatttctttacaattacagaaatagatacgtgactgttacattttgaaactttttcttttaccttgacttatttttaaata

SEQ ID NO: 907587 - DNA, 120 bp, Artificial Sequence
  ENSG00000231711_20 (sequence is synthesized)
gaaacactagtgaggccccacagaactgagcagaactaatggccccccatgtggtggaatagttctgagctggccccactttggatgcagccttccccggcaagtctaaacccagtctct

SEQ ID NO: 907588 - DNA, 120 bp, Artificial Sequence
  ENSG00000231711_21 (sequence is synthesized)
gtggctgcctgttcacagggaccgtggactgtgatgtttacagtacgaaagcactgggagagaacgctacatcacaaagtgtccttaacctgctgccgcctcagctttcccatttgtgac

SEQ ID NO: 907589 - DNA, 120 bp, Artificial Sequence
  ENSG00000231711_22 (sequence is synthesized)
ttggttaaaaaaaatttttttgacagttttaagctcttattttaatttccacaggctgttgtagaatctgctcagccagggaggggaaaggagtcggcaatcaggtctcctcctgggcac

SEQ ID NO: 907590 - DNA, 120 bp, Artificial Sequence
  ENSG00000231711_23 (sequence is synthesized)
ctttgtgaggccagctggcgagagtggggggtgacactgaggtcccagcagctccaaatgcaggcagagccctgtcctcagagaaggtcacagcctagccaagcccagccaggtggatgg

SEQ ID NO: 907591 - DNA, 120 bp, Artificial Sequence
  ENSG00000231711_24 (sequence is synthesized)
gcccacggaacgcacaggaacctggaacggaggttgaaagcaggaagcacagtctgtgactccccagcccactctgcattcgaccacttggggcccagaagcttcaggaaaggtgcacaa

SEQ ID NO: 907592 - DNA, 120 bp, Artificial Sequence
  ENSG00000231711_25 (sequence is synthesized)
ggtcactgggtcccagtactcccaacaggaaggtctggtccagggacagggctcttcccgactccccttagccacacgcaccagaagttctgcagtgcccagtgggcatagcagtcccca

SEQ ID NO: 907593 - DNA, 120 bp, Artificial Sequence
  ENSG00000231711_26 (sequence is synthesized)
agaatgacccagcactgaagctgagccaaagaacttggggagcgagccacaccccctcactccctcttcgcctgctccagacttgccaggcggttgcttttcgtgggaaccgggatgtcc

SEQ ID NO: 907594 - DNA, 120 bp, Artificial Sequence
  ENSG00000231711_27 (sequence is synthesized)
tcaccaccctgtccagggcccagccccatgtccctggcctgctacagctggaaaaaaaaaagagagatgtttgtttttatttgtttataaaaagaaaagtgttatatatataacatatta

SEQ ID NO: 907595 - DNA, 120 bp, Artificial Sequence
  ENSG00000231711_28 (sequence is synthesized)
tacctcatgaatacatacaattatttgtcaattaacaataaagaaaaatacagcaagcaaaaaagactctcttccacaaaaatagtgttcattacagaaaagtacaaaaaaaaaaaaaaa

SEQ ID NO: 907596 - DNA, 120 bp, Artificial Sequence
  ENSG00000231711_29 (sequence is synthesized)
aaactaagaggatatttagaattaagaaaaaactaagagggtatttagaattaaaaaataaaaagaaaacaattacccatgaggtaattactgaatgcatttggttgaaagtccttctgc

SEQ ID NO: 907597 - DNA, 120 bp, Artificial Sequence
  ENSG00000231711_30 (sequence is synthesized)
tatattttccaaactgtatgtgtatatatgtgcgcatgcatatatgtgtttgtgtgtgtgtacacatatctatatgaatggaccatatcgtaagttataaatgcatacatatattcatgt

SEQ ID NO: 907598 - DNA, 120 bp, Artificial Sequence
  ENSG00000231711_31 (sequence is synthesized)
atatataatcattagatcatactataggttattttacagtctttttgttgaatacgttgtgagcattttatgtcattattttctacaagatttgaaaaataaagtataaataccagttaa

SEQ ID NO: 907599 - DNA, 120 bp, Artificial Sequence
  ENSG00000231711_32 (sequence is synthesized)
cgctgctgtcaccccggccgcgccccccaactttctgcacagtcgcggagctggaagtttccgggcttcgcggacacgctgggctgggtttcagtcgcggctccgaggttggcaacaaag

SEQ ID NO: 907600 - DNA, 120 bp, Artificial Sequence
  ENSG00000231711_33 (sequence is synthesized)
agggaaagaaggaggaaaagcaggccggggaggggaggaagagaaccgcgcggaggccgcggcgccgagagccccagaacttccaattctacccagaagcttttttcgtcgtgtttttct

SEQ ID NO: 907601 - DNA, 120 bp, Artificial Sequence
  ENSG00000231711_34 (sequence is synthesized)
gacatagaggctctgagagttacataattgattctgactttggctgttggtcaacagtgtcataaggtaaaataaggctgttgtagaatctgctcagccagggaggggaaaggagtcggc

SEQ ID NO: 907602 - DNA, 120 bp, Artificial Sequence
  ENSG00000231711_35 (sequence is synthesized)
aggtaaacaagcaagttccacgccccagtcctgctggggccttcgccagccaccgctctgggctcatctcccggcgcctcctcggggcacctgagcgttttaagccccactgccaagtgt

SEQ ID NO: 907603 - DNA, 120 bp, Artificial Sequence
  ENSG00000231711_36 (sequence is synthesized)
tttggacacaggtttttttgcggggtggtgaggttgggcacaagatgcttcctaaaaggttgttggcacgcagaccatggccccagtgacggagcggtaggcaggggcttgaggaacacg

SEQ ID NO: 907604 - DNA, 120 bp, Artificial Sequence
  ENSG00000231711_37 (sequence is synthesized)
ctgtctttgtctcgtccccaaagcacccggccgtgggtcacccgtgatccctggagtggagggactgttgtgacccctggtgctccaggagaaggggttccatgctgggtcccgggccca

SEQ ID NO: 907605 - DNA, 120 bp, Artificial Sequence
  ENSG00000231711_38 (sequence is synthesized)
ggcccacggtgccctcagcctgcagttctccaccttgcggaatgatttgctggcccggcccagctccccggcaccaccattttctgccctcttttccctgcctggcttcaaaccctccca

SEQ ID NO: 907606 - DNA, 120 bp, Artificial Sequence
  ENSG00000231713_0 (sequence is synthesized)
gttccgtggttaagtcgctgcatgctcacagaggcttacttcaagcacgggctgcaaggttttactttcttcatcaggattcctctcatgccacgaatggggaaagttcacagttgttgg

SEQ ID NO: 907607 - DNA, 120 bp, Artificial Sequence
  ENSG00000231713_1 (sequence is synthesized)
agctgatattcctagagaaaaatgctgaaagctacatatggggcagtcctgctcctcagggcccacagaagctcagattcctcctgtctacttgctctgccaagtgttgtttttggtggc

SEQ ID NO: 907608 - DNA, 120 bp, Artificial Sequence
  ENSG00000231713_2 (sequence is synthesized)
cagaatttccaccatgaccatgcctagattcaaggggtgaggtgaggggaggagctgggaaatgcagtctgcattctgtgcccagctaaaatgtagggatgcggttgccatagaatcggg

SEQ ID NO: 907609 - DNA, 120 bp, Artificial Sequence
  ENSG00000231713_3 (sequence is synthesized)
gaaagtggatatgggggcatggcagctggtgctcacggggcactctttgcctttgacagtggatcaggcattatgcagagcacgaagaggagcacattgtagtctctgacttcagaagaa

SEQ ID NO: 907610 - DNA, 120 bp, Artificial Sequence
  ENSG00000231713_4 (sequence is synthesized)
gcagacagcaaaggtggtttccttcctggtggagattgccgattggactacagaatggcgagaatactgtgaaaggaggagcatagaaatccaagtgtgatcagtcagcaggtcttggcc

SEQ ID NO: 907611 - DNA, 120 bp, Artificial Sequence
  ENSG00000231713_5 (sequence is synthesized)
tgttaagactgttcaagacttggaatacagctctcctaaaaagcagtcctttgaagtcttgggatactacagaaagatcccaacaaccactgagcctggtttcgatttttggaggaaaca

SEQ ID NO: 907612 - DNA, 120 bp, Artificial Sequence
  ENSG00000231713_6 (sequence is synthesized)
tgagtccagccaacagtgtggatcagtttcctaggctgccataacaaagcaccataacctggtggcttagaacaatggaaaggcatttgctcacggttccagaagctgtaggttagaaac

SEQ ID NO: 907613 - DNA, 120 bp, Artificial Sequence
  ENSG00000231713_7 (sequence is synthesized)
taagtgtggcagggtcatggcccctctgaaacctaggagggaaggatgcttccctgcttcttcctgcttctgctatcccctgatgttcctgggttagtggcagcataattctggcctctg

SEQ ID NO: 907614 - DNA, 120 bp, Artificial Sequence
  ENSG00000231713_8 (sequence is synthesized)
cctctgtcttaacgtggtgttttttcctgtgtctcttcatattgccttttgtctctgtgcctctacctctgagtccaaattgcccctttttataaggacaatcacattgtccttagtcac

SEQ ID NO: 907615 - DNA, 120 bp, Artificial Sequence
  ENSG00000231713_9 (sequence is synthesized)
attggattggattagggcccactatacagaccttgttttaacttgattcttctatcaagaccctgagaatctccaaataaggccacattctgaggaactgtgggtttggacttcaacatg

SEQ ID NO: 907616 - DNA, 120 bp, Artificial Sequence
  ENSG00000231713_10 (sequence is synthesized)
tcttttttgggggccacaactcaacccataccagcttgcttgatggatattcatagctgatgtcaaagtaaatttaattctcatcctcagaagcaagaaagattccacgactaaggccaa

SEQ ID NO: 907617 - DNA, 120 bp, Artificial Sequence
  ENSG00000231713_11 (sequence is synthesized)
caataacatccagggagttcgtttcttgagcaacgaccagctctttgcatagcacgaattgccaaaaaaggccagcgtagtcatttctcggccatgcacacctgtgatgtggcaagccat

SEQ ID NO: 907618 - DNA, 120 bp, Artificial Sequence
  ENSG00000273877_0 (sequence is synthesized)
cagagagtgtgggtgctagagccttctgcagggctcaggacacattccccaacacacccagggccaataatttgcactgggatacagagaggaggctcggggcctctgtcaacagattgc

SEQ ID NO: 907619 - DNA, 120 bp, Artificial Sequence
  ENSG00000273877_1 (sequence is synthesized)
catccacttagatgagtaaatggtgctggccccgtggtgtggtgacatctgtctgtctgtctggtctagcatccagcacagtcctgggcacatgaattggtgctgatgctgctgaaggag

SEQ ID NO: 907620 - DNA, 120 bp, Artificial Sequence
  ENSG00000273877_2 (sequence is synthesized)
tgaatgcaggccagaaggaaggagtgctggggaagaagtgagccatggagcaggcaggaaccacggacagaggcctcccagttcactcggggacatatccgcagatgtgagaactcagag

SEQ ID NO: 907621 - DNA, 120 bp, Artificial Sequence
  ENSG00000273877_3 (sequence is synthesized)
agatgttcaagtttcctaagagggcttcaatcatggctcacagactactaatttccagtttcttctctaccagtctggatgcccatggtgaactttagagatatccatcagctccatcaa

SEQ ID NO: 907622 - DNA, 120 bp, Artificial Sequence
  ENSG00000273877_4 (sequence is synthesized)
ttccctcaactacatctacctagcttttgagcccagaagaacccaatcatgtgtgttctcctcagctcccaggctgctgagcaatgctggagaaaaatcacaaaactatacagtttggta

SEQ ID NO: 907623 - DNA, 120 bp, Artificial Sequence
  ENSG00000273877_5 (sequence is synthesized)
agcttgagttggaaattcagaattacttcaaaatgtttaaatttgtttctggtcagtttcctccttcatttcccagtttcatttatcactctatttaacttgttacccatcgctgtctgc

SEQ ID NO: 907624 - DNA, 120 bp, Artificial Sequence
  ENSG00000273877_6 (sequence is synthesized)
tattaaccttgcctccttttacacgagaaaacagaggccatcaaatggcatttcccatcactccatcactccacctctgtcaatgaatccaccagtaacatctcagagatccttctgtct

SEQ ID NO: 907625 - DNA, 120 bp, Artificial Sequence
  ENSG00000273877_7 (sequence is synthesized)
agcactgatgatcttattgtatcagttactccttcttccttttgtattttcaatgctcctattggccaccaacatgctttagctgttctcatctaaagaaacaataacaaccacaataaa

SEQ ID NO: 907626 - DNA, 120 bp, Artificial Sequence
  ENSG00000273877_8 (sequence is synthesized)
ctaacaaacaataaaccatctttaacagaccttaccttttcctcttttgcgccaccttcaagcttcctaaactcagatttattcctcaatccattacaatctggtttctaattaaacaat

SEQ ID NO: 907627 - DNA, 120 bp, Artificial Sequence
  ENSG00000273877_9 (sequence is synthesized)
tttttgccagcatcaccaaaaacttctgaattgctagtctccaaggtcctttcttcaacctcattgttttctttcttttaaaagtcaagttcactgaagtataatttacgtacaataaaa

SEQ ID NO: 907628 - DNA, 120 bp, Artificial Sequence
  ENSG00000237714_0 (sequence is synthesized)
agggaactcaaaataggtgtgtggcctctagtcaccaaatggcttcttggctctgctttaaatttaggcccactcagccacttaagatccatcttgaaggactggctctttcagggtcac

SEQ ID NO: 907629 - DNA, 120 bp, Artificial Sequence
  ENSG00000237714_1 (sequence is synthesized)
atttgttcatgcaaactattgatattgcatgctatttaccactatttcagatgaaattgccacaggatataaatcattggactatttaagagagcaaaggcttttggaagctgccacagt

SEQ ID NO: 907630 - DNA, 120 bp, Artificial Sequence
  ENSG00000237714_2 (sequence is synthesized)
ttcattcccaggtcctccacttaccagcaatgagacttcatgtgacctcaggtgctcctgctcaccttcatatttttttaagtatacatctgtgtatcatgaacaattcttatctcaaaa

SEQ ID NO: 907631 - DNA, 120 bp, Artificial Sequence
  ENSG00000237714_3 (sequence is synthesized)
gggaacacaagtgttgaaaccaggtctgaaatccaagacccaagatgcttttttgctgctaaagcattcattatccagactctgcctgcatgaaggtgatgcataggaaatgatgaacct

SEQ ID NO: 907632 - DNA, 120 bp, Artificial Sequence
  ENSG00000237714_4 (sequence is synthesized)
ggtaaaagcttccagtcttaaaaatactccaagtaaggctctttaaggcttctggtagggacattttattttttggtaaagccacaatagatagaaatgccataaaaacaaacatgtaaa

SEQ ID NO: 907633 - DNA, 120 bp, Artificial Sequence
  ENSG00000237714_5 (sequence is synthesized)
caaggtatcagaactttggttcactgaaacatctcacacctaaaacacctgaggtacaaaggcaccttgctaggcgctagacagctaactctgctgcagccactttgatcctagccttgg

SEQ ID NO: 907634 - DNA, 120 bp, Artificial Sequence
  ENSG00000237718_0 (sequence is synthesized)
caaacatccatgtctaatatgctgtgatcattctgaatgtcaattcatccaatataaaacatgaataatatactctctacatttcttgtctttcactgaaggaatcttagagacaaaact

SEQ ID NO: 907635 - DNA, 120 bp, Artificial Sequence
  ENSG00000237718_1 (sequence is synthesized)
gagagcacaatgcagtgctagtttcacagactagtgaccatctgtaattgtgggcagcaggtaaggggtgacagcaaggtagtatcaaacactaaaaccaaaggaaggctgcctttgagg

SEQ ID NO: 907636 - DNA, 120 bp, Artificial Sequence
  ENSG00000237718_2 (sequence is synthesized)
atacaattaggaagagccacaatgtaatgaatagaaccagccatctgcagaaatgattctctttgagaatgaagagaatgctggagaggaagagtgactggagtataataaaaactaagc

SEQ ID NO: 907637 - DNA, 120 bp, Artificial Sequence
  ENSG00000237718_3 (sequence is synthesized)
aattccaaggaatgttcatttgttcattcgattctttagaaccactatggatctaacggtaaagcacagagttcttcctgtgaaagtgtatagtctggtggtatggataagaagtaaaac

SEQ ID NO: 907638 - DNA, 120 bp, Artificial Sequence
  ENSG00000237718_4 (sequence is synthesized)
aattaacaagagaagaaaagtggcatccaattttcttttcgttttttgtttttgagccagggtcttcctctgttacccagtgggagtgcagtgataggatcaaggctcactgcagccttg

SEQ ID NO: 907639 - DNA, 90 bp, Artificial Sequence
  ENSG00000237718_5 (sequence is synthesized)
tgacttcccaggctcaagtgatcctcctacttcagcctctccagtagctgagactacaggcttgcagtagagatggagtcttgccacgtt

SEQ ID NO: 907640 - DNA, 120 bp, Artificial Sequence
  ENSG00000237718_6 (sequence is synthesized)
ctcaaactcctgggctcaagcaatcctccggcctcggcctcacaaagtcctgagattacaggttgtgagccaccatgcttggtcttcttttagaacaaagtaagctaaaaaataaatgct

SEQ ID NO: 907641 - DNA, 120 bp, Artificial Sequence
  ENSG00000237718_7 (sequence is synthesized)
tgctcgtgtttacctagtactatccagggcagagaaaggcctgcataagcgtggcaattagcaaagaagtggacactgctgtggggcagggagttccattaggctgtgccacatgaccac

SEQ ID NO: 907642 - DNA, 120 bp, Artificial Sequence
  ENSG00000237718_8 (sequence is synthesized)
ctacatcccttcactcaaggcccatcctcttttttttgagacggagtctcttgctctgtcgcccaggttgtagtgcagtagcatgattttggctcactgcaacctctaccttccaggttg

SEQ ID NO: 907643 - DNA, 64 bp, Artificial Sequence
  ENSG00000237718_9 (sequence is synthesized)
acaggtacatgccaccacacctggctaacattttttttttccccttgtgatccgcctgcttcag

SEQ ID NO: 907644 - DNA, 79 bp, Artificial Sequence
  ENSG00000237718_10 (sequence is synthesized)
atgttggccaggatggtctcgatctcctgcccttgtgatccgcctgcttcagcctcccgcaaggctcatcctcaccaag

SEQ ID NO: 907645 - DNA, 120 bp, Artificial Sequence
  ENSG00000248318_0 (sequence is synthesized)
aagacaacagggaccccctaaaaacaaggacaccagcagaaattttagcctctgacacctacagttacagcaaacaataaacacagactaacttctaggcaaataaacaaacaagagatg

SEQ ID NO: 907646 - DNA, 120 bp, Artificial Sequence
  ENSG00000248318_1 (sequence is synthesized)
gagcacattcaagtcacagcagtggccatgatagctagagtttcagaagccattctgtgacctggagcatggaaagaaagtgctaagatgttgaaagagagagaggatgacgtcctgtga

SEQ ID NO: 907647 - DNA, 120 bp, Artificial Sequence
  ENSG00000248318_2 (sequence is synthesized)
atgtgcttcaagtccttatcagcttgttactctggaaacgtggtgaatctattccgagcctcagttttcttctctgcaaaagatggccaataatcctggagttttggatggtatggggaa

SEQ ID NO: 907648 - DNA, 120 bp, Artificial Sequence
  ENSG00000248318_3 (sequence is synthesized)
gaagaaaatgcctgatgcatccctgccctcctcacatttttagaagagacagagacttgatctacttcttaggaaagggcaagactgaaagaaaattcaggtccatctcagtggctcccc

SEQ ID NO: 907649 - DNA, 120 bp, Artificial Sequence
  ENSG00000248318_4 (sequence is synthesized)
accacaggtggagaggctactactaatcagactgatgcacactaccagtgggtgccttaaaagaacgacagactcccagcctctctcttggcctgtggacatagacctgtttgcctcacc

SEQ ID NO: 907650 - DNA, 120 bp, Artificial Sequence
  ENSG00000248318_5 (sequence is synthesized)
tggcaggtccagccaggcgtcttctctctcagttccagacaaggcatctgacggtgtggatcagccagtttagacccagggtccctctatttgaaattcagggcaaaaggggtagaacaa

SEQ ID NO: 907651 - DNA, 120 bp, Artificial Sequence
  ENSG00000248318_6 (sequence is synthesized)
gcccccatttcagctggaggaagtgtggcttttggcacagttttagcaccaatagagttgattattttgatcatcatttggcaatagttccttatatccttttttcaagcagatttctgg

SEQ ID NO: 907652 - DNA, 120 bp, Artificial Sequence
  ENSG00000248318_7 (sequence is synthesized)
acaagaggaacccagtcagaaccttttccagaagtattaagtaacatagtaaatatgaccgcacctgctttgacactcctcctattgacaagtgagtcaatttctcctcttctttaatct

SEQ ID NO: 907653 - DNA, 120 bp, Artificial Sequence
  ENSG00000248318_8 (sequence is synthesized)
gctccagtttctaggcccagactttcagagactagcagcttccacttcctgtctcctggatgctcattctgggttgggggggcggtggtgccagcagctatgtaagaagtctcactatct

SEQ ID NO: 907654 - DNA, 120 bp, Artificial Sequence
  ENSG00000248318_9 (sequence is synthesized)
gagatcaccatgctggaggaagcccaggtcaaccacatggagacactgtacagagggagctgctccaagaatcctcaactgatccagccatctcagcctaggggttgcagtcaggctttg

SEQ ID NO: 907655 - DNA, 120 bp, Artificial Sequence
  ENSG00000248318_10 (sequence is synthesized)
aatcccagcgacattcattccgcaacatactaaccacatcctggtgatcccagcttcagagaggagaacacggggacttgagttcactgttgcggtgaagtcctgctctggccccaggca

SEQ ID NO: 907656 - DNA, 120 bp, Artificial Sequence
  ENSG00000248318_11 (sequence is synthesized)
gaagtcaagatcaaagctcacactgcaaatattgtgctgattaaaaccaaactttctgcttttgatgtgggccaacctccattgctggtaggaacaaaggaggagtatagcaaaaagata

SEQ ID NO: 907657 - DNA, 120 bp, Artificial Sequence
  ENSG00000248318_12 (sequence is synthesized)
ctagcaatgttttcttatcctgggttaccacctacattgtttcttggggagaaggatgcctgactcctacagagtaatgagacacaaggagggtgcctgagccatttctacagactccaa

SEQ ID NO: 907658 - DNA, 120 bp, Artificial Sequence
  ENSG00000248318_13 (sequence is synthesized)
gaggttctaaccagcccaggtcacttccacttttgagacctgtggacacgttatgatgttatgaaatgccagagcaggattaccaaaactctcacatatttgtaaatgcttgtattttgc

SEQ ID NO: 907659 - DNA, 120 bp, Artificial Sequence
  ENSG00000248318_14 (sequence is synthesized)
aaatgacccttatttacaaccaaaataaaacttcgtttgggaacaatgtcaagagtcttaatgtgaggccttttatgaatacaaggcctcctgctaaatggcccacctgcttccccctca

SEQ ID NO: 907660 - DNA, 120 bp, Artificial Sequence
  ENSG00000248318_15 (sequence is synthesized)
taagcctggtcatatcagtacccccaggagcttggcacatggttttcacatggtgaataatgaaaaagtacttcctaaatgaataagtgcacacatggatgaataaacaatctacatgtc

SEQ ID NO: 907661 - DNA, 120 bp, Artificial Sequence
  ENSG00000248319_0 (sequence is synthesized)
ttacttgctgtgcttctctgagtgcctcgtggcctctttatcaccacctgttgaaggaaatgttagatccagatatggatggaaggttctaggggctaagtgcatgtttgagtgaaagct

SEQ ID NO: 907662 - DNA, 120 bp, Artificial Sequence
  ENSG00000248319_1 (sequence is synthesized)
gtaagagagctaatgagcacagaatctagaaaaaaaaataggcatccaggtatacacacagctgcatcgtgtcactgcaagcggctcccagagttgttcctgttcatccaggaagaaaga

SEQ ID NO: 907663 - DNA, 120 bp, Artificial Sequence
  ENSG00000248319_2 (sequence is synthesized)
acgttaacggccagcacaaattccattccaagccatggagcgggaagggcacatgataccaagtgtcccaccagacggccatcttgctaactaatacacctcgggattacatttgcattt

SEQ ID NO: 907664 - DNA, 120 bp, Artificial Sequence
  ENSG00000248319_3 (sequence is synthesized)
acacaaaatgtgagctttgggagccagacgtattattttggttaatagtttggcacgttctcagcttggaagcctgagcatatgtgatgggtcagtaacacaataaaagtaacggggaag

SEQ ID NO: 907665 - DNA, 120 bp, Artificial Sequence
  ENSG00000248319_4 (sequence is synthesized)
catttctttccccagtggtgaatttctaccctattcaggaaacagacttcccaactcagccattacagctgtctggatcgttcataccatttgctgttaaatatacccaagtaggaaaaa

SEQ ID NO: 907666 - DNA, 120 bp, Artificial Sequence
  ENSG00000248319_5 (sequence is synthesized)
tctttgtatttgctgttaaatgtaatcagagacaatctttacggtcattcgggatcattactatcagcataattactgctttagagaacaataatcatacatatgtgtggtatagatatg

SEQ ID NO: 907667 - DNA, 120 bp, Artificial Sequence
  ENSG00000248319_6 (sequence is synthesized)
cggggagtccaatgcagaaatgcagaagagacaaaagtgcctgttaatattttacgaaagctgtaattttattgaaaattaactaatttacctaaaggaacaacttcgtataggattttt

SEQ ID NO: 907668 - DNA, 120 bp, Artificial Sequence
  ENSG00000248319_7 (sequence is synthesized)
tagctcaatgtgttcaacaaagtagaaaaaattacaggggggaaaagaaacccttacccagtacattgatgcctgacatgacgtgattagaagtaatctatattttgcaagtttaagaac

SEQ ID NO: 907669 - DNA, 120 bp, Artificial Sequence
  ENSG00000248319_8 (sequence is synthesized)
tatctctagttaagatgtaatacctttatatgagaatgtgcagcgactcctcgagtcaataactgtgtaagtgtctgtgtgtgtccatttattttgtaaaagagagatgatatgttaaaa

SEQ ID NO: 907670 - DNA, 120 bp, Artificial Sequence
  ENSG00000248319_9 (sequence is synthesized)
ctacttacttgctgtgcttctctgagtgcctcgtggcctctttatcaccacctgttgaaggaaatgttagatccagatatggatggaaggtattatgtgacacgggaactttcagaaaat

SEQ ID NO: 907671 - DNA, 120 bp, Artificial Sequence
  ENSG00000248319_10 (sequence is synthesized)
gaagacccaaaggaacaggagatctgtggattttcatggacagtcatctgtggattttcaaggacagtcatgcagaagcatacttggagaacagggattatcttgaggttctaggggcta

SEQ ID NO: 907672 - DNA, 120 bp, Artificial Sequence
  ENSG00000248319_11 (sequence is synthesized)
gaaatgcaaagagaaagaaagtttttgactgccagcataggattttgaaacccatagaaacaacagtcttgaaagcctataaatttgagagagaaaagggatttctaaagcctcaaaaat

SEQ ID NO: 907673 - DNA, 120 bp, Artificial Sequence
  ENSG00000248319_12 (sequence is synthesized)
ttcctttacatctaacaagcaaaactagcaggactgatcataaattcacactaagccattgccaggaagaatttagaatgtgccataaagtttcaaccacagaaataaaactgaaaaagg

SEQ ID NO: 907674 - DNA, 120 bp, Artificial Sequence
  ENSG00000248319_13 (sequence is synthesized)
caacaaaaaagccaatataaataaaaaataaacagaccaaaacaaacaaacaaaaaaaccaaaactacaaaacaataagttccaaccagaaagaaaaggttgcactcaaagggttttttt

SEQ ID NO: 907675 - DNA, 64 bp, Artificial Sequence
  ENSG00000248319_14 (sequence is synthesized)
tccaaccagaaagaaaaggttgcactcaaagggtttttttgcaatcataagtttgtgactgtca

SEQ ID NO: 907676 - DNA, 61 bp, Artificial Sequence
  ENSG00000248319_15 (sequence is synthesized)
ggggcaggaacaaatcacaatggtgaaatgtcatcagttaatgcaatacatgcaggtcaca

SEQ ID NO: 907677 - DNA, 120 bp, Artificial Sequence
  ENSG00000248319_16 (sequence is synthesized)
aggtcacaggggatatgatggcttaggttgggctcaacggcccgacagtgacaagggagttgtgagaatgaatgggataatatgcctgaagcacttagcacaattattgtcgctgaaaag

SEQ ID NO: 907678 - DNA, 120 bp, Artificial Sequence
  ENSG00000248319_17 (sequence is synthesized)
tctgagccaaatatgagtgaccatggcctctggcacatccatcaggagatcctgagaacatgtacccaaggtggtcaggaagtcatgagacatcaatcagatacattaagaaatatattg

SEQ ID NO: 907679 - DNA, 120 bp, Artificial Sequence
  ENSG00000248319_18 (sequence is synthesized)
gacatcaatcagatacattaagaaatatattggcttggtccagaacagcgggacaactcgtggggtggggcaggcttccaggctataggtcaatttcatgttcaggttaagattctggag

SEQ ID NO: 907680 - DNA, 120 bp, Artificial Sequence
  ENSG00000248319_19 (sequence is synthesized)
tcatagtggctgcccttagagacaacagaagacaaacgtttcctattcagacctttaaaaggtgctagactctccgttaacctcttcaggactgggagggcctggaagaaaaagatctag

SEQ ID NO: 907681 - DNA, 120 bp, Artificial Sequence
  ENSG00000248319_20 (sequence is synthesized)
aaaaagatctagctatgttaatagagtttctttacagatgcaaattttctgccacaaaggacagctttgcacggccatttcaaaatacagcaaagaaacatgttttgggataaaatattt

SEQ ID NO: 907682 - DNA, 120 bp, Artificial Sequence
  ENSG00000248319_21 (sequence is synthesized)
aacatgttttgggataaaatatttttattttcttgtttgtcacataatgttatgcaagagtcagattggaaagtaaatcacgatatataggcttaaataaaacccatctgatgagaattt

SEQ ID NO: 907683 - DNA, 120 bp, Artificial Sequence
  ENSG00000248319_22 (sequence is synthesized)
gactctccagacccctttagataggaatttggctaagataagaaaaaaatcagagcttagtcctcaattcccagcatttgataaatactctcatgtttataaaaaacgttactacagtta

SEQ ID NO: 907684 - DNA, 120 bp, Artificial Sequence
  ENSG00000248319_23 (sequence is synthesized)
acacattacctggtaaatattacctctctacttgtctgctcccatcccactagactcaaatggattgagggcagggattccactttattcattccttcatccttagctcctatcacagag

SEQ ID NO: 907685 - DNA, 120 bp, Artificial Sequence
  ENSG00000248319_24 (sequence is synthesized)
cttggtacttgataaatttttgtggagcaaatgaacctcactggttctctgagacaaagaaggcatgcagtaagaaggtcgagtggtccctgctctttgttgttcatttacaagacacca

SEQ ID NO: 907686 - DNA, 120 bp, Artificial Sequence
  ENSG00000248319_25 (sequence is synthesized)
tcatcataagcaccagtttgtggctggttgtgtaaaagaaaataaaaacctaaccaatctgagttttagattgggtaaggatgagatttttttaaccttctgatgataaaataatcagat

SEQ ID NO: 907687 - DNA, 120 bp, Artificial Sequence
  ENSG00000248319_26 (sequence is synthesized)
gggctaccccaaaatgtggaggactctttatgcttaatgagctttttgagatgtcaacaatatctgtcctggatgatttagacattcccttgcctgcagagagagagctgggccggatca

SEQ ID NO: 907688 - DNA, 120 bp, Artificial Sequence
  ENSG00000248319_27 (sequence is synthesized)
tctctgaaagtgccttcagctctctattatcactacatgattctattaaccagttaatatttttcctgtaatttgcccttagcaactgcctaacaacattacaggtccttccataggatg

SEQ ID NO: 907689 - DNA, 120 bp, Artificial Sequence
  ENSG00000248319_28 (sequence is synthesized)
caatgatgtgacattaatctaatatcacgtcccctctctgcctgtttcaccaacacctctcattccttgaccctgaataatgattcaaggacatcttctttccttttcttcaactaaact

SEQ ID NO: 907690 - DNA, 120 bp, Artificial Sequence
  ENSG00000248319_29 (sequence is synthesized)
aagaccacccttagggctttaaaccagtacccatcataggctccgtgcttactaaaaatctacctggaggttcagatacttcattcaccaggccttaagttcttctgttggttacagtga

SEQ ID NO: 907691 - DNA, 83 bp, Artificial Sequence
  ENSG00000248319_30 (sequence is synthesized)
ccttaagttcttctgttggttacagtgagttctagttttttgtcccccattttaaagttaggctgggcgcggtggctcacgcc

SEQ ID NO: 907692 - DNA, 120 bp, Artificial Sequence
  ENSG00000259976_0 (sequence is synthesized)
tttttccaaaaaaagtaaaaccagagtttcaggaactctttatccacagaggctaatagaaatagaatttggaaatatctatctgagacatttttaaatctgaggaatccgtaaaatggt

SEQ ID NO: 907693 - DNA, 120 bp, Artificial Sequence
  ENSG00000259976_1 (sequence is synthesized)
ggctcttgggtatccagccctcaggatctccatttacctgttaaagtgaggatttggtgcctttcttctttagttgggccatcaagaaaacttcagaaatcaggcattctgtcttcctat

SEQ ID NO: 907694 - DNA, 120 bp, Artificial Sequence
  ENSG00000259976_2 (sequence is synthesized)
acaataaatattttcagatcatattttcagataagagtcttcagcttccctcagctattcaacccaatgcatggaaagcctcagttgaataaacttttccaccatcccaggtgcctgaaa

SEQ ID NO: 907695 - DNA, 120 bp, Artificial Sequence
  ENSG00000259976_3 (sequence is synthesized)
ctagtgtccttcttcacttctacattcaggacaaaatgaagtcaggtttttaaaacctcagtataaaagaccccctcacactggtccaatatgaagacttctcagcgtgaacactgggga

SEQ ID NO: 907696 - DNA, 120 bp, Artificial Sequence
  ENSG00000259976_4 (sequence is synthesized)
attccttcctttcatctttcctaatagattgttgttttctaatcccatcccattctgctgtacctctccagcaagtcccttttcaccttagccaagctccctgcaatgctcttcagttgt

SEQ ID NO: 907697 - DNA, 120 bp, Artificial Sequence
  ENSG00000259976_5 (sequence is synthesized)
gaagccttgtattcactaaggaactacgtactcttagtctgctttgaaagggctaatgtctagtgtaatggcaaaattaccaatctgttctccaaagtgttccagcagatatatttctac

SEQ ID NO: 907698 - DNA, 120 bp, Artificial Sequence
  ENSG00000259976_6 (sequence is synthesized)
tagacaaacataattgtgaattgactgttagtgaggctgtttcttctctaatgatcacataatatccaaattatatcaacttcattatttccctctttccttttcctaaccctttccctt

SEQ ID NO: 907699 - DNA, 120 bp, Artificial Sequence
  ENSG00000259976_7 (sequence is synthesized)
tatttcttgtttctcttgaagactacttcaaattacctatttgtcttcattactgcccccaaaactctaataattgtgacccctaactgttcatttctcttcctttctccaccccattct

SEQ ID NO: 907700 - DNA, 120 bp, Artificial Sequence
  ENSG00000259976_8 (sequence is synthesized)
gaacatccttctttaagttttatttaatgaaagaacactaaagtgagtgagttcataaacttgagactcgtaggcagagtgaagcatgtcttcattttagcttcagagtttaaaagttat

SEQ ID NO: 907701 - DNA, 120 bp, Artificial Sequence
  ENSG00000259976_9 (sequence is synthesized)
caatattcttttgagagtgggaggacctgagtcacagttttaaatgtcaactgtactagctgaggtcattaattccccttaccttcacgtttggccaaaaatgaagagaaaaatattttc

SEQ ID NO: 907702 - DNA, 120 bp, Artificial Sequence
  ENSG00000259976_10 (sequence is synthesized)
tgttttttttttaaataccacagtgttcaggttcttcatatgagtaaatcacttttgacggagaaaaaaagaatcattaatgttgactgtttccactagtcaaattacttgtttatcaga

SEQ ID NO: 907703 - DNA, 120 bp, Artificial Sequence
  ENSG00000259976_11 (sequence is synthesized)
ctttagattataggaatctaaagaaaagagtaacatttcaaaataattttgataactgttcaagccttagtgagctcttctcaaacaagaaaagccacatccacttgaacacattgtagg

SEQ ID NO: 907704 - DNA, 120 bp, Artificial Sequence
  ENSG00000259976_12 (sequence is synthesized)
aaaaattaggaagagtttttttatttattgcctttttgaaaaaaaaatcattgatttgtttagaactttgagcagtaacttactaatggatgaaaagatccataaagttttgaaagtgtc

SEQ ID NO: 907705 - DNA, 120 bp, Artificial Sequence
  ENSG00000259976_13 (sequence is synthesized)
tgtttttgcaaccagagattgcctaaacataaacttaatatatacttaaataaaataataacagagctaaatggatacctaaagagccatgcagtgcactccccagcacctaaatacgcc

SEQ ID NO: 907706 - DNA, 120 bp, Artificial Sequence
  ENSG00000259976_14 (sequence is synthesized)
ccatataatttggttgtcatgctagatctccctgcagtggattacaactgtctggtcaccagagcattgcccaaaagactgactgataccattctgggtgtatccttttcaggatgctta

SEQ ID NO: 907707 - DNA, 120 bp, Artificial Sequence
  ENSG00000259976_15 (sequence is synthesized)
taatatcacattcacaacaacttcgtaacacagtctttcctgacttctggtccaatattcttgccatgataccacatcgcctctcagctttaatgaagacaagtcctgtgacatttagag

SEQ ID NO: 907708 - DNA, 120 bp, Artificial Sequence
  ENSG00000259976_16 (sequence is synthesized)
tactatgtggttttgagtgcataggcggtatgctttcagttcttgctttaccctttgacaaaaagaatcaacatttaatatcagaaatgtatttttatttgacttgagatttgacccagc

SEQ ID NO: 907709 - DNA, 120 bp, Artificial Sequence
  ENSG00000259976_17 (sequence is synthesized)
ttttatcttaatcaaaccagtttataacatcaactcacaccatagagaacaatgaaataaatagcagttttgaaagcctttatgaggcatgcatctagtaggaaaacaacatctcttaaa

SEQ ID NO: 907710 - DNA, 120 bp, Artificial Sequence
  ENSG00000259976_18 (sequence is synthesized)
ggcaatatttacattgcttaggactatgatcttcacttggaatgttctcccaatcaatcctatatccttctttttctttgtccattctaactcctggtattttttttttcttaaagtact

SEQ ID NO: 907711 - DNA, 120 bp, Artificial Sequence
  ENSG00000259976_19 (sequence is synthesized)
ctttatctaaagtaatcctctccttaggcactggcttccaaaggaagaaagactcttttaaatcctaaaatgctgtcatttaaagtataatatggaggaggagaggctctggttctgata

SEQ ID NO: 907712 - DNA, 120 bp, Artificial Sequence
  ENSG00000259976_20 (sequence is synthesized)
gatcttacttggtcctcaatctgggatgccttcttgatgctgttctttctagttccccaagaagtattccaaccccaagacccagaatttctcaccacaacctctgtgttagtctcagat

SEQ ID NO: 907713 - DNA, 120 bp, Artificial Sequence
  ENSG00000259976_21 (sequence is synthesized)
taatgtctaaatcctgtttgatattctagagactccagggtgtgaatttattattgcttatgagcctcctgtctttccaagctgacacctgtcaggagcatcaatagccctaacagtaac

SEQ ID NO: 907714 - DNA, 120 bp, Artificial Sequence
  ENSG00000259976_22 (sequence is synthesized)
taatgcatcaaaataatagacagaaacactatagtatatattcgtgaggataggaagatttttttttcttcttttctccaggaaaagcttgctttgctcccctctccctctgcaacacac

SEQ ID NO: 907715 - DNA, 120 bp, Artificial Sequence
  ENSG00000259976_23 (sequence is synthesized)
acacatacaatgcatttcagaaagtctgcatcttattttacagatatgtagctctagaatttacaaatatagcttaggaaatgttctgagattgaggctggtagcaaacaagtttatttt

SEQ ID NO: 907716 - DNA, 120 bp, Artificial Sequence
  ENSG00000259976_24 (sequence is synthesized)
ctgcactggacttcaggataagtgtgcatagatgcaattccttcaaagaaagtgaaacatggtagagcaaagggataatactttcacacattcaaacagttgtttgctatctataaacct

SEQ ID NO: 907717 - DNA, 120 bp, Artificial Sequence
  ENSG00000259976_25 (sequence is synthesized)
tgatttaagcataattattactttttagaaatctgaaactggaggaatgtgtattttagtaaggtttttttgttgatttatttgtttccctttctttcttctcaagatagtaaaggattt

SEQ ID NO: 907718 - DNA, 120 bp, Artificial Sequence
  ENSG00000259976_26 (sequence is synthesized)
ttatttcttaatttgttactgtccatggacagtcaaataactgctcacccttactgtattattttccccttagaaagaaaagccttccatcctaccatgaaggaatttttcctccaaaaa

SEQ ID NO: 907719 - DNA, 120 bp, Artificial Sequence
  ENSG00000259976_27 (sequence is synthesized)
atcttatcttccatttcaaatagcactcatgagcttttaagagagaaattctctctttactttgaggatagaacagttaaaacaaaaacctgttccttgagaaagaaaccgtatttacct

SEQ ID NO: 907720 - DNA, 120 bp, Artificial Sequence
  ENSG00000259976_28 (sequence is synthesized)
aaactaacaggtctggggccaaagaatagatttttttattgattgcagatgaagaccatgcattttgtactacaaatccttattgcctcctcaaatcctttttggaataaggctgggaat

SEQ ID NO: 907721 - DNA, 120 bp, Artificial Sequence
  ENSG00000259976_29 (sequence is synthesized)
aaattagtttaattaaattctttgggtatttctaattaatatctactgcaagatacccaggaaagaaaaggaaggggtgctgccgaaatgccaaaatcaattgatctgttgatttttatc

SEQ ID NO: 907722 - DNA, 120 bp, Artificial Sequence
  ENSG00000259976_30 (sequence is synthesized)
attgtagttgttgcttttctagccatttcaagactgtatgtgttcatgaagtcttaagtagagaaacacctgtttccccattgcttctctctccttccccacacccctgcacctgcccca

SEQ ID NO: 907723 - DNA, 120 bp, Artificial Sequence
  ENSG00000259976_31 (sequence is synthesized)
accccaggcactagagggaacagtaacagagggagattggcactgcattgccagtacttcacccatctatacccctccaccacaaaagaaggaaaaaacaaattagaaactattttttta

SEQ ID NO: 907724 - DNA, 120 bp, Artificial Sequence
  ENSG00000259976_32 (sequence is synthesized)
aaaaaggaaattgtagtacttcatttgaaagcatactgttttcaactcaactcgattaacagatagcctgacaacgtttttgtaacctttcttttgtgctataattgacattcttggctc

SEQ ID NO: 907725 - DNA, 120 bp, Artificial Sequence
  ENSG00000259976_33 (sequence is synthesized)
aatctttaaaataattgcaatttcaattaagtgaacagagaaaaacaaagagagggaacaggacaatgtgatgggaccaaatttgatacaggtctggattcctaaagccagttgtcaagg

SEQ ID NO: 907726 - DNA, 120 bp, Artificial Sequence
  ENSG00000259976_34 (sequence is synthesized)
ttaccggagaaagttagcactactcaccccttgttgttcttgcctatctctcattattacaattcaaagaattagtaagttaactatacttctttgtgattaaagatttctcttcatgct

SEQ ID NO: 907727 - DNA, 120 bp, Artificial Sequence
  ENSG00000259976_35 (sequence is synthesized)
gccaaacacttctagagaaattgtagaaactcctgacttctatacctaatgtgctatccgggcccgagaggagtgtacagagagatcactgaaaataaaataatagttcaaatttgagat

SEQ ID NO: 907728 - DNA, 120 bp, Artificial Sequence
  ENSG00000259976_36 (sequence is synthesized)
aagattttcctgtagttcaaagtgctttatgcatgttcacaactaggggaatctttgaaaacaaaggctagttactctgctcttgctctccttgggacaaactttaatttggaaccagct

SEQ ID NO: 907729 - DNA, 120 bp, Artificial Sequence
  ENSG00000259976_37 (sequence is synthesized)
gtagatttacaggagaaaattctcaaaggtattttcagctgctaaacttcttctttaggcccgttgatttgaacctcagttttcctgaggagcctattgagatataaattaagggtaatt

SEQ ID NO: 907730 - DNA, 120 bp, Artificial Sequence
  ENSG00000259976_38 (sequence is synthesized)
tgcatatatctaattaaaattgttcctacactattgttgaaagaattatggttttcagagtagatgaaagcagggtgtcttagtaatcttcatcatggcaaacaaaggtgagaagctgat

SEQ ID NO: 907731 - DNA, 120 bp, Artificial Sequence
  ENSG00000259976_39 (sequence is synthesized)
atgatagagaaaatctatggtaacttgatattttaaggtaatttgagtgtgctgaccccactatgcttaattcctttcccacaatctattttaaactacactttgattctcttgagactt

SEQ ID NO: 907732 - DNA, 120 bp, Artificial Sequence
  ENSG00000259976_40 (sequence is synthesized)
acagcatgcatgtgtgggtatgagcagacaagcagacttacctttggagggtgaagacccagacaaactgaagaaacggattcctgaggatgatcaaatacaaatcatttttccagaatc

SEQ ID NO: 907733 - DNA, 120 bp, Artificial Sequence
  ENSG00000259976_41 (sequence is synthesized)
actcaatattgccacatcccaaactaattctagactaatctttagaaagaagtaagctccttaagaaatcctactatgaatgttttttcttcttatggaataacacaagaagaggtacaa

SEQ ID NO: 907734 - DNA, 120 bp, Artificial Sequence
  ENSG00000259976_42 (sequence is synthesized)
tgcagactcttaattttgctgtaataattcacttttgtatttaataattgtacttctgtgtgagtgtgtcactgagctatttgtaccaattttcaattgatcattctgagaggggccttg

SEQ ID NO: 907735 - DNA, 120 bp, Artificial Sequence
  ENSG00000259976_43 (sequence is synthesized)
agaatttctgtgtatgtgtatgtatatctgtatttatgtgtagtcagaaaaaaaaaagaataggagactaatgaggtgagggaaaaagtgatcaatgtagaaaagtgagtgctcctagtg

SEQ ID NO: 907736 - DNA, 120 bp, Artificial Sequence
  ENSG00000259976_44 (sequence is synthesized)
tacctatttatgttatgttaggtggctgctgcctgtagcccttgaggaatagctgattgcactattcaaaaataaaagcccagcactgttaaatttaggaccgtgtttcaagaaacagga

SEQ ID NO: 907737 - DNA, 120 bp, Artificial Sequence
  ENSG00000259976_45 (sequence is synthesized)
aagctttatctttttctgaacccattccccttagcattagagccatctgacatgatgaaaactattaagtaaaaaccactactgacctttacattaaatagctgttttcctcttctaaat

SEQ ID NO: 907738 - DNA, 120 bp, Artificial Sequence
  ENSG00000259976_46 (sequence is synthesized)
aatacccttgattttaactagactacttccttttattttctgcctattggcttaatgttttacagaaaatacataggtgcatgctagtttctctactttgagctgaaacaaacaggagca

SEQ ID NO: 907739 - DNA, 120 bp, Artificial Sequence
  ENSG00000259976_47 (sequence is synthesized)
acaaaagagatgactcacataagtgtgagatagactgaatttcccaccttcgtagcactggtaacctttgtaagagctgtttagagttgagctttgggttataatagggcttttttttgc

SEQ ID NO: 907740 - DNA, 120 bp, Artificial Sequence
  ENSG00000259976_48 (sequence is synthesized)
actaaatatgactgcactgcattgcactactgaaatgtacttacttgtgctgggagagagtgtgttacgtatgggaaagaaaaaggcaaattatggaagtaggagcatcactaaaatgca

SEQ ID NO: 907741 - DNA, 120 bp, Artificial Sequence
  ENSG00000259976_49 (sequence is synthesized)
gagttattttcatcatgcttgatcttagcagggttggcgagaatctgtggaatctctgtcaactcttgatcaggcctaggaaccaccatgctgataggatctgttttcttactgtaaaga

SEQ ID NO: 907742 - DNA, 120 bp, Artificial Sequence
  ENSG00000259976_50 (sequence is synthesized)
agctgagttagtacagcaattaagaacatttaagaaaaagtttacccaatcttgtttctgactgagctctcagtaagagttttaacagtgaagaagccaattgatatgatgtagaagtct

SEQ ID NO: 907743 - DNA, 120 bp, Artificial Sequence
  ENSG00000259976_51 (sequence is synthesized)
ttgccttggcctcctccacaaagccccttgcttgtgcacattttagtgtggcagagggcagtaggatgtgctcctttcaaaaacacatagccttgtccatattggaattacttttcagcc

SEQ ID NO: 907744 - DNA, 120 bp, Artificial Sequence
  ENSG00000259976_52 (sequence is synthesized)
tgattatgcttctccatccctgggtgaaacctagatcaggctaaccaaagaggaaggctatgcatgtggtaaagtcctttaagatgacagatagggaacagtgcaataaacactgaaaac

SEQ ID NO: 907745 - DNA, 120 bp, Artificial Sequence
  ENSG00000259976_53 (sequence is synthesized)
cagtgaagtgaaaggtttattttgaaacaagctaggccaacttggacattggaggatggattagaacatactagctgctccatcatagactatccttactaagcagaagaccttaatagt

SEQ ID NO: 907746 - DNA, 120 bp, Artificial Sequence
  ENSG00000259976_54 (sequence is synthesized)
gcctaaaagtttagttttgaaattggttttttcctaacttttctttgttaaatttatttttattatcttttttaatcttagaagtaatcagagtttgacagctctttagtaactgttaat

SEQ ID NO: 907747 - DNA, 120 bp, Artificial Sequence
  ENSG00000259976_55 (sequence is synthesized)
aaaagaatctttcatcacaggataagcaatagattgtgtgggaaataataacacaagagtaaagatgctgaaggactcttctggaactcaaagtgacagttttgaaggttctggcacagt

SEQ ID NO: 907748 - DNA, 120 bp, Artificial Sequence
  ENSG00000259976_56 (sequence is synthesized)
aggaaaggatcacaacccatataaatggctaatgttgaatttctctgaacactgtcacatatggggcatcaatttggaaaattctcaattgaggccccttccctaagattacaacattga

SEQ ID NO: 907749 - DNA, 120 bp, Artificial Sequence
  ENSG00000259976_57 (sequence is synthesized)
taacctgtctttttctctctcttctttactatccgtccaagtctactattccaagtttaaatattgttcagaaagttgtcagccttgttagtcagaaaaactccatttagagccatccaa

SEQ ID NO: 907750 - DNA, 120 bp, Artificial Sequence
  ENSG00000259976_58 (sequence is synthesized)
actagcataagaaattccttaagcactcaaagcattatctctgttttaagtaagaaactaaatccagagcttttaacaggtacttagaaataagtattgggtaatcactaagaggacatt

SEQ ID NO: 907751 - DNA, 120 bp, Artificial Sequence
  ENSG00000259976_59 (sequence is synthesized)
gactgcaccaaaccaaagctatagaaagaaatgattgactttttaaaatatattcacattaactgtcctaggatacttctcttgaggctttggaaaacttcttccttgaaatttgcatat

SEQ ID NO: 907752 - DNA, 120 bp, Artificial Sequence
  ENSG00000259976_60 (sequence is synthesized)
ccactccagttctgtcaccaaagattttaatcttcagatcgcaatttcctctctcccagaaaaaagtactacaacaggctcaagggatatgctttggtggtcaagggattacactatggt

SEQ ID NO: 907753 - DNA, 120 bp, Artificial Sequence
  ENSG00000259976_61 (sequence is synthesized)
tttccttctgttcacaatggtatttacaggagaccttgtcatcagaggacgtactgaactatctttatgactttggatttgatcagaggtttaaaaaatagaaaaaaataaacaacacta

SEQ ID NO: 907754 - DNA, 120 bp, Artificial Sequence
  ENSG00000259976_62 (sequence is synthesized)
cttgacactgtaaatgatctttaatagagtcatgacctggagactgatggagagaaagaaacttccatggaagagagtgagctaaatcatttagaaccaaacaaaggtcactggtgaaac

SEQ ID NO: 907755 - DNA, 120 bp, Artificial Sequence; identical to SEQ ID NO: 641304
  ENSG00000259976_63 (sequence is synthesized)

SEQ ID NO: 907756 - DNA, 120 bp, Artificial Sequence; identical to SEQ ID NO: 641305
  ENSG00000259976_64 (sequence is synthesized)

SEQ ID NO: 907757 - DNA, 120 bp, Artificial Sequence; identical to SEQ ID NO: 641306
  ENSG00000259976_65 (sequence is synthesized)

SEQ ID NO: 907758 - DNA, 120 bp, Artificial Sequence; identical to SEQ ID NO: 641307
  ENSG00000259976_66 (sequence is synthesized)

SEQ ID NO: 907759 - DNA, 120 bp, Artificial Sequence; identical to SEQ ID NO: 641308
  ENSG00000259976_67 (sequence is synthesized)

SEQ ID NO: 907760 - DNA, 120 bp, Artificial Sequence; identical to SEQ ID NO: 641309
  ENSG00000259976_68 (sequence is synthesized)

SEQ ID NO: 907761 - DNA, 120 bp, Artificial Sequence; identical to SEQ ID NO: 641310
  ENSG00000259976_69 (sequence is synthesized)

SEQ ID NO: 907762 - DNA, 120 bp, Artificial Sequence; identical to SEQ ID NO: 641311
  ENSG00000259976_70 (sequence is synthesized)

SEQ ID NO: 907763 - DNA, 120 bp, Artificial Sequence; identical to SEQ ID NO: 641312
  ENSG00000259976_71 (sequence is synthesized)

SEQ ID NO: 907764 - DNA, 120 bp, Artificial Sequence; identical to SEQ ID NO: 641313
  ENSG00000259976_72 (sequence is synthesized)

SEQ ID NO: 907765 - DNA, 120 bp, Artificial Sequence; identical to SEQ ID NO: 641314
  ENSG00000259976_73 (sequence is synthesized)

SEQ ID NO: 907766 - DNA, 120 bp, Artificial Sequence; identical to SEQ ID NO: 641315
  ENSG00000259976_74 (sequence is synthesized)

SEQ ID NO: 907767 - DNA, 120 bp, Artificial Sequence; identical to SEQ ID NO: 641316
  ENSG00000259976_75 (sequence is synthesized)

SEQ ID NO: 907768 - DNA, 120 bp, Artificial Sequence; identical to SEQ ID NO: 641317
  ENSG00000259976_76 (sequence is synthesized)

SEQ ID NO: 907769 - DNA, 120 bp, Artificial Sequence; identical to SEQ ID NO: 641318
  ENSG00000259976_77 (sequence is synthesized)

SEQ ID NO: 907770 - DNA, 120 bp, Artificial Sequence; identical to SEQ ID NO: 641319
  ENSG00000259976_78 (sequence is synthesized)

SEQ ID NO: 907771 - DNA, 120 bp, Artificial Sequence; identical to SEQ ID NO: 641320
  ENSG00000259976_79 (sequence is synthesized)

SEQ ID NO: 907772 - DNA, 120 bp, Artificial Sequence; identical to SEQ ID NO: 641321
  ENSG00000259976_80 (sequence is synthesized)

SEQ ID NO: 907773 - DNA, 120 bp, Artificial Sequence; identical to SEQ ID NO: 641322
  ENSG00000259976_81 (sequence is synthesized)

SEQ ID NO: 907774 - DNA, 120 bp, Artificial Sequence; identical to SEQ ID NO: 641323
  ENSG00000259976_82 (sequence is synthesized)

SEQ ID NO: 907775 - DNA, 120 bp, Artificial Sequence; identical to SEQ ID NO: 641324
  ENSG00000259976_83 (sequence is synthesized)

SEQ ID NO: 907776 - DNA, 120 bp, Artificial Sequence; identical to SEQ ID NO: 641325
  ENSG00000259976_84 (sequence is synthesized)

SEQ ID NO: 907777 - DNA, 120 bp, Artificial Sequence; identical to SEQ ID NO: 641326
  ENSG00000259976_85 (sequence is synthesized)

SEQ ID NO: 907778 - DNA, 120 bp, Artificial Sequence; identical to SEQ ID NO: 641327
  ENSG00000259976_86 (sequence is synthesized)

SEQ ID NO: 907779 - DNA, 120 bp, Artificial Sequence; identical to SEQ ID NO: 641328
  ENSG00000259976_87 (sequence is synthesized)

SEQ ID NO: 907780 - DNA, 120 bp, Artificial Sequence; identical to SEQ ID NO: 641329
  ENSG00000259976_88 (sequence is synthesized)

SEQ ID NO: 907781 - DNA, 120 bp, Artificial Sequence; identical to SEQ ID NO: 641330
  ENSG00000259976_89 (sequence is synthesized)

SEQ ID NO: 907782 - DNA, 120 bp, Artificial Sequence; identical to SEQ ID NO: 641331
  ENSG00000259976_90 (sequence is synthesized)

SEQ ID NO: 907783 - DNA, 120 bp, Artificial Sequence; identical to SEQ ID NO: 641332
  ENSG00000259976_91 (sequence is synthesized)

SEQ ID NO: 907784 - DNA, 120 bp, Artificial Sequence; identical to SEQ ID NO: 641333
  ENSG00000259976_92 (sequence is synthesized)

SEQ ID NO: 907785 - DNA, 120 bp, Artificial Sequence; identical to SEQ ID NO: 641334
  ENSG00000259976_93 (sequence is synthesized)

SEQ ID NO: 907786 - DNA, 120 bp, Artificial Sequence; identical to SEQ ID NO: 641335
  ENSG00000259976_94 (sequence is synthesized)

SEQ ID NO: 907787 - DNA, 120 bp, Artificial Sequence; identical to SEQ ID NO: 641336
  ENSG00000259976_95 (sequence is synthesized)

SEQ ID NO: 907788 - DNA, 120 bp, Artificial Sequence; identical to SEQ ID NO: 641337
  ENSG00000259976_96 (sequence is synthesized)

SEQ ID NO: 907789 - DNA, 120 bp, Artificial Sequence; identical to SEQ ID NO: 641338
  ENSG00000259976_97 (sequence is synthesized)

SEQ ID NO: 907790 - DNA, 120 bp, Artificial Sequence; identical to SEQ ID NO: 641339
  ENSG00000259976_98 (sequence is synthesized)

SEQ ID NO: 907791 - DNA, 120 bp, Artificial Sequence; identical to SEQ ID NO: 641340
  ENSG00000259976_99 (sequence is synthesized)

SEQ ID NO: 907792 - DNA, 120 bp, Artificial Sequence; identical to SEQ ID NO: 641341
  ENSG00000259976_100 (sequence is synthesized)

SEQ ID NO: 907793 - DNA, 120 bp, Artificial Sequence; identical to SEQ ID NO: 641342
  ENSG00000259976_101 (sequence is synthesized)

SEQ ID NO: 907794 - DNA, 120 bp, Artificial Sequence; identical to SEQ ID NO: 641343
  ENSG00000259976_102 (sequence is synthesized)

SEQ ID NO: 907795 - DNA, 120 bp, Artificial Sequence; identical to SEQ ID NO: 641344
  ENSG00000259976_103 (sequence is synthesized)

SEQ ID NO: 907796 - DNA, 120 bp, Artificial Sequence; identical to SEQ ID NO: 641345
  ENSG00000259976_104 (sequence is synthesized)

SEQ ID NO: 907797 - DNA, 120 bp, Artificial Sequence; identical to SEQ ID NO: 641346
  ENSG00000259976_105 (sequence is synthesized)

SEQ ID NO: 907798 - DNA, 120 bp, Artificial Sequence; identical to SEQ ID NO: 641347
  ENSG00000259976_106 (sequence is synthesized)

SEQ ID NO: 907799 - DNA, 120 bp, Artificial Sequence; identical to SEQ ID NO: 641348
  ENSG00000259976_107 (sequence is synthesized)

SEQ ID NO: 907800 - DNA, 120 bp, Artificial Sequence; identical to SEQ ID NO: 641349
  ENSG00000259976_108 (sequence is synthesized)

SEQ ID NO: 907801 - DNA, 120 bp, Artificial Sequence; identical to SEQ ID NO: 641350
  ENSG00000259976_109 (sequence is synthesized)

SEQ ID NO: 907802 - DNA, 120 bp, Artificial Sequence; identical to SEQ ID NO: 641351
  ENSG00000259976_110 (sequence is synthesized)

SEQ ID NO: 907803 - DNA, 120 bp, Artificial Sequence; identical to SEQ ID NO: 641352
  ENSG00000259976_111 (sequence is synthesized)

SEQ ID NO: 907804 - DNA, 120 bp, Artificial Sequence; identical to SEQ ID NO: 641353
  ENSG00000259976_112 (sequence is synthesized)

SEQ ID NO: 907805 - DNA, 120 bp, Artificial Sequence; identical to SEQ ID NO: 641354
  ENSG00000259976_113 (sequence is synthesized)

SEQ ID NO: 907806 - DNA, 120 bp, Artificial Sequence; identical to SEQ ID NO: 641355
  ENSG00000259976_114 (sequence is synthesized)

SEQ ID NO: 907807 - DNA, 120 bp, Artificial Sequence; identical to SEQ ID NO: 641356
  ENSG00000259976_115 (sequence is synthesized)

SEQ ID NO: 907808 - DNA, 120 bp, Artificial Sequence; identical to SEQ ID NO: 641357
  ENSG00000259976_116 (sequence is synthesized)

SEQ ID NO: 907809 - DNA, 120 bp, Artificial Sequence; identical to SEQ ID NO: 641358
  ENSG00000259976_117 (sequence is synthesized)

SEQ ID NO: 907810 - DNA, 120 bp, Artificial Sequence; identical to SEQ ID NO: 641359
  ENSG00000259976_118 (sequence is synthesized)

SEQ ID NO: 907811 - DNA, 120 bp, Artificial Sequence; identical to SEQ ID NO: 641360
  ENSG00000259976_119 (sequence is synthesized)

SEQ ID NO: 907812 - DNA, 120 bp, Artificial Sequence; identical to SEQ ID NO: 641361
  ENSG00000259976_120 (sequence is synthesized)

SEQ ID NO: 907813 - DNA, 120 bp, Artificial Sequence; identical to SEQ ID NO: 641362
  ENSG00000259976_121 (sequence is synthesized)

SEQ ID NO: 907814 - DNA, 120 bp, Artificial Sequence; identical to SEQ ID NO: 641363
  ENSG00000259976_122 (sequence is synthesized)

SEQ ID NO: 907815 - DNA, 120 bp, Artificial Sequence; identical to SEQ ID NO: 641364
  ENSG00000259976_123 (sequence is synthesized)

SEQ ID NO: 907816 - DNA, 120 bp, Artificial Sequence; identical to SEQ ID NO: 641365
  ENSG00000259976_124 (sequence is synthesized)

SEQ ID NO: 907817 - DNA, 120 bp, Artificial Sequence; identical to SEQ ID NO: 641366
  ENSG00000259976_125 (sequence is synthesized)

SEQ ID NO: 907818 - DNA, 120 bp, Artificial Sequence
  ENSG00000259977_0 (sequence is synthesized)
gccaggcaagtttctcgtcttctgatgcttactgtttgggggactcgcggggagggggtcttccagcctgtgtctgtctgcctttgcttcctccctctggctctctccattggagacaga

SEQ ID NO: 907819 - DNA, 120 bp, Artificial Sequence
  ENSG00000259977_1 (sequence is synthesized)
aagttagatttaaaaaacgcaacagagaatataaaatctatgctcagaccccagataaacaaaactctggggccatattcttaatttaccgggtaccttcacatgtccgaatgcggcgtt

SEQ ID NO: 907820 - DNA, 120 bp, Artificial Sequence
  ENSG00000259977_2 (sequence is synthesized)
atcctttgccagagtggcttcttcattctctgcgaggtagcagatgttttactgtagcctgagttgggatcttggaacaaccctctccagcccaggacatgccagcgcttaaggtgcact

SEQ ID NO: 907821 - DNA, 120 bp, Artificial Sequence
  ENSG00000259977_3 (sequence is synthesized)
ggctgagcgccatcaattatacacattaatgcaattagtcaagatacagaagcttgtattccaaatgaaaatttcctacatctgaggcatctgtgtaaaagctaggaagagcatcttgaa

SEQ ID NO: 907822 - DNA, 120 bp, Artificial Sequence
  ENSG00000259977_4 (sequence is synthesized)
accatgaagcaaccattcaaagaacaaaatcccatatgctaaggatggtcaaacataacagcagaaaaagcctatgtccttcatgacatgggtgagccaccaaaccaacctgacattgag

SEQ ID NO: 907823 - DNA, 120 bp, Artificial Sequence
  ENSG00000259974_0 (sequence is synthesized)
agtcggcctcctccctccgcgagctggacgctccgcagcccgcccgccagccggcccgccggccgccgcaggaatccctggataaagaccagctcaaccatcgctgagaaaacagaccta

SEQ ID NO: 907824 - DNA, 120 bp, Artificial Sequence
  ENSG00000259974_1 (sequence is synthesized)
ggcttcccagggcggttaacccgccggcctctgggcagagactaaaagacaaaacaaaataaaacaacaacaaaaaactcccagtgtgtttcctactcttctttgtcttggaggaaagca

SEQ ID NO: 907825 - DNA, 120 bp, Artificial Sequence
  ENSG00000259974_2 (sequence is synthesized)
aagggagagaaatggacttcaccagtggtctttggcttcatcaattcacaggaaatggcatcaagatggttcaactaagacatgatcactaaaaacattataataatacctttttgaaaa

SEQ ID NO: 907826 - DNA, 120 bp, Artificial Sequence
  ENSG00000259974_3 (sequence is synthesized)
tctgcatgtgggtggagcactgttccagcctgagaagatggttctgaggccacttagcaagacattttccagcatgagcaggtttctctgtggaaatagtgacacctgttctggtgtgtt

SEQ ID NO: 907827 - DNA, 120 bp, Artificial Sequence
  ENSG00000259974_4 (sequence is synthesized)
gtctttcctcagggaacttaaggggtacaaagctcctgaaaatgttctttatgctggttgaagctcttatgtcgctgtactgattccctacgatgcagatttgaatcacagagtaattaa

SEQ ID NO: 907828 - DNA, 120 bp, Artificial Sequence
  ENSG00000259974_5 (sequence is synthesized)
aatatggatcaaataaggctggggctcaccaaggctgaaagctgtagccattcaaggcatcatttctgtcatgaaaatataggaccttttcaaaacatgccttcaggaaggtgttctctt

SEQ ID NO: 907829 - DNA, 120 bp, Artificial Sequence
  ENSG00000259974_6 (sequence is synthesized)
ttcaaacaaaagtctaatgactgcataactcttcttgaccacatcttacactttctctagacttgcttatttacagctactggaacaaaaagatgaaatgaataaagcacactgattgtc

SEQ ID NO: 907830 - DNA, 120 bp, Artificial Sequence
  ENSG00000259974_7 (sequence is synthesized)
ggcaggcgaggggccgcaagcatcccccacagccaccgagagggcatccctgcagggaaatcatatccgacatgcctgtgcccacagcagacttaagactgcctctaaaatgtccatgaa

SEQ ID NO: 907831 - DNA, 76 bp, Artificial Sequence
  ENSG00000259974_8 (sequence is synthesized)
cccacagcagacttaagactgcctctaaaatgtccatgaagccattgtccagtagagctgttagttttaacaccag

SEQ ID NO: 907832 - DNA, 120 bp, Artificial Sequence
  ENSG00000259974_9 (sequence is synthesized)
tcagcagcatgaaaacggactaatatagcacctctgctgacagctataggaccaaggactgtagacccaaatgcagcagccacacgtattttcctgtcatgaagattttctttaataaag

SEQ ID NO: 907833 - DNA, 120 bp, Artificial Sequence
  ENSG00000259974_10 (sequence is synthesized)
tgattcccgaaggctagctgcaaaccacgactgggaaagaagcaggatgggcccagactttgcggtggctgctgtccaccagaacattcaggttcagaagggtcgtgggggtccccgagc

SEQ ID NO: 907834 - DNA, 120 bp, Artificial Sequence
  ENSG00000259974_11 (sequence is synthesized)
ctgctgaaagatgaggcccagtcctggctccactcaacttaccgcacccatgcttcattgctcctcaaagcactcacgactctgatattttgcttctatatttgcttcttatttgtctcc

SEQ ID NO: 907835 - DNA, 120 bp, Artificial Sequence
  ENSG00000259974_12 (sequence is synthesized)
catcactaggatgaaatcttccagagagcaatggttttctctgtcttattcactgttgtaaatagtgcctggcacatagtaggcactgaataaatatttgttgaatcaatgcatgaatga

SEQ ID NO: 907836 - DNA, 120 bp, Artificial Sequence
  ENSG00000259974_13 (sequence is synthesized)
gggaaggaggtctgtgaacatcaggaattgcaaaatcttgctgaaccaatagaccaacagccattaacatttgtcaatgcaaagatcctaaaatatacaagtgtggagttgtcctgccct

SEQ ID NO: 907837 - DNA, 120 bp, Artificial Sequence
  ENSG00000259974_14 (sequence is synthesized)
gctgaagctgtgacaatcacgctgccatggtagatatttaagctcccctgaggttactgaatctaacaatgaataaacaatgaagagtagctaatttttggaaatctctttctatgaccg

SEQ ID NO: 907838 - DNA, 120 bp, Artificial Sequence
  ENSG00000259974_15 (sequence is synthesized)
gaaaatattcacaaactcagagtgattgtttggggtgaaagatggtcccatgccttgtgggcctctctttgctatctatacaacgttggaaatgaacccctcccttacaggaaagtgaac

SEQ ID NO: 907839 - DNA, 120 bp, Artificial Sequence
  ENSG00000259974_16 (sequence is synthesized)
agcaaccaaggtgagcccaccctgggagggcagagtgggtgtactttcctcgaagagccctgaacacaacagggcacacaaacagccacagcaccctcaacaatgccccaccatctgccc

SEQ ID NO: 907840 - DNA, 120 bp, Artificial Sequence
  ENSG00000259974_17 (sequence is synthesized)
accagggcacacagattcacgcagattcagtgacacattccaaaaaaagggaattaaggaggacccatggcatggctaatggggagagagctttactacttttagcaccattgctaatta

SEQ ID NO: 907841 - DNA, 120 bp, Artificial Sequence
  ENSG00000259974_18 (sequence is synthesized)
ttggagcaaagaaaggcatacaaggaatggaacccaacctgtttaaagtaataaatgtcaaccctaaagtgcatggaaccatctctccttcccttttgaggactgtgtgcttcacaagct

SEQ ID NO: 907842 - DNA, 120 bp, Artificial Sequence
  ENSG00000259974_19 (sequence is synthesized)
gggcgtttgctgcatggggttttctaatgtaatgtgaattttcaatgtgctttgtctctgtagagtggctttaaaaagcccttgaagtcctcagctttaaatccatgctaataggggaag

SEQ ID NO: 907843 - DNA, 120 bp, Artificial Sequence
  ENSG00000259974_20 (sequence is synthesized)
tcttttttttttttttttggaggtgaggagctttggttgggagaaacattgacccagactgcactctgggtaaactagggcaaaagacctgatatcgtctgcagggtacttattaaccac

SEQ ID NO: 907844 - DNA, 120 bp, Artificial Sequence
  ENSG00000259974_21 (sequence is synthesized)
tgttcatttgcaggatcaatatttccagcaaaggagtccacactcaagatacactgctacgtctcactttttccttgacacaacaatttattttataaatgcatctgctggagaagaaaa

SEQ ID NO: 907845 - DNA, 120 bp, Artificial Sequence
  ENSG00000259974_22 (sequence is synthesized)
ggcagtaccaaggattgtgtcttttatctccaggatatgcaaagcgcatttattttcagcttttatctctggaattgtatgttgatcccatacatatagattgattttgttcaggtagat

SEQ ID NO: 907846 - DNA, 120 bp, Artificial Sequence
  ENSG00000259974_23 (sequence is synthesized)
ggaaaacttcaaaatgcattgtgttgtcagcctcactgaattttcttttggaggaggaggtagggaggggaagccaaagccccgatttctcctgctccttttgctaattgtattggctaa

SEQ ID NO: 907847 - DNA, 120 bp, Artificial Sequence
  ENSG00000259974_24 (sequence is synthesized)
atgagctttcacagaggggggtcctggctgctttttgctctcccccagaccacttgtaggttgcacacagggcttctataactctttctgagtcaggacaaagatatccgccgtgcacac

SEQ ID NO: 907848 - DNA, 120 bp, Artificial Sequence
  ENSG00000259974_25 (sequence is synthesized)
cctgtgacataggtggatatttatttcatcccgggcaattctaaattttgtcatgatgactgaaagaggcaatcccctcctgagcattaagaggccaggggtgagagggtggcagcatag

SEQ ID NO: 907849 - DNA, 120 bp, Artificial Sequence
  ENSG00000259974_26 (sequence is synthesized)
aaaagccaccacccagagacagcttggagccatgatcctggaggaaatgttattaataaacatcttttggacatttggtagcccgtggagcttgctccagcttaaagcaattaattcagg

SEQ ID NO: 907850 - DNA, 120 bp, Artificial Sequence
  ENSG00000259974_27 (sequence is synthesized)
acactgacataaactctccagatctttgacagcttggagccgaaataaaaatgctagttctccggggaagagaagaggatggctagcccttttctggactgtttgcttataggcccagag

SEQ ID NO: 907851 - DNA, 120 bp, Artificial Sequence
  ENSG00000259974_28 (sequence is synthesized)
agcaaccttccttgcagaatgaaatgcaagggcacaaacaatgtaccagggagagaatagaagatgggaatgaacagtttgaactatttgctcagcagaagggcaccacaatgctggggt

SEQ ID NO: 907852 - DNA, 120 bp, Artificial Sequence
  ENSG00000259974_29 (sequence is synthesized)
agtggttttcccatgcgtccactgtcccttctttgggatcttttgttgtcccctgtctcctttggccagataaaagcacagctgcagcattgcagataacaagtaggccgtacttatccc

SEQ ID NO: 907853 - DNA, 120 bp, Artificial Sequence
  ENSG00000259974_30 (sequence is synthesized)
cctaaatctcggggtgcctttactgtaacaagttatgctcggctctcttttattttacaagaggatggtgagggagagaatggaagaacagagggggcggacgtataagacatttgacac

SEQ ID NO: 907854 - DNA, 82 bp, Artificial Sequence
  ENSG00000259974_31 (sequence is synthesized)
gcaagctgtgatcggatgcaatctttgtgggacatttaaatggaagggttcattgatgtgtattgcttgccaagccaaaatg

SEQ ID NO: 907855 - DNA, 120 bp, Artificial Sequence
  ENSG00000259974_32 (sequence is synthesized)
gaagggttcattgatgtgtattgcttgccaagccaaaatgttgcctttggggaaaagggagagaggtgttcatggagtgcagggaaaggaggttttggggcagagattttgacttaaaat

SEQ ID NO: 907856 - DNA, 120 bp, Artificial Sequence
  ENSG00000259974_33 (sequence is synthesized)
aaccagacttcttctggctgctgaaaagaggcaaaagttttaaattgtcaagtttaaaactatgttcagttatgatttgccacttctgaatattattttggatttcccctttcatgctta

SEQ ID NO: 907857 - DNA, 120 bp, Artificial Sequence
  ENSG00000259974_34 (sequence is synthesized)
ttttgttcagaatcctaatgaatagaggttgctggactcagggtaaaagcaggatgaactggagatgggacatacaaggtacttttggaattgccatagattacacctataatcagagta

SEQ ID NO: 907858 - DNA, 120 bp, Artificial Sequence
  ENSG00000259974_35 (sequence is synthesized)
aatgtcatcaacaaataatcaaaatattttttacatttgctcttctaaaatcagagcctattttaaatataaaagaaagtagatgtgataataatataaactacagtcacattaagttga

SEQ ID NO: 907859 - DNA, 120 bp, Artificial Sequence
  ENSG00000259974_36 (sequence is synthesized)
tattaaattcaaaatctaacatagatttgcactgttgggtgtgtgttccgaatcagtgggttttcccactgatgttgatttcgggagccaggcttcaatgtttaattctattgtaatgtg

SEQ ID NO: 907860 - DNA, 120 bp, Artificial Sequence
  ENSG00000259974_37 (sequence is synthesized)
gttatttagcctgaatggttttataaggtggaaaggcaaaaaatttaattccgaagaaaactagtgttttactatgactgtggtaaacatttccaaagcccacctgtgggaaatacaaag

SEQ ID NO: 907861 - DNA, 120 bp, Artificial Sequence
  ENSG00000259974_38 (sequence is synthesized)
ttttaatgctgtgtgtttttttgtttttgtattttgtctcatcgacaaaactggcagaaaaaaacgctttcgtatatttttcctgctgggtggtcagaaggaaaggccgtgaagctaaag

SEQ ID NO: 907862 - DNA, 120 bp, Artificial Sequence
  ENSG00000259974_39 (sequence is synthesized)
tagagctgttagttttaacaccagtgagtattacctttggttaaaaggatgcatgtgtataggtgtatgtgtgtgcgtgtgtgtttgtgtttttggacttgtgtggagaatgaagaaagg

SEQ ID NO: 907863 - DNA, 120 bp, Artificial Sequence
  ENSG00000259974_40 (sequence is synthesized)
gttccatttaggcatttgcaaatattcgatggcatcatgaaaagacaaaaaaatcctataaaatatatcatattttgctatgattttgtgtgtacatgtaataaaattattaagtataaa

SEQ ID NO: 907864 - DNA, 120 bp, Artificial Sequence
  ENSG00000248317_0 (sequence is synthesized)
gacagttgagccgagagacattttggatgccatcttgcaaaatgattccttgcctagctctactcctatcaggataccaccttgctccccagacaccgcacccatatttgcagagatgaa

SEQ ID NO: 907865 - DNA, 120 bp, Artificial Sequence
  ENSG00000248317_1 (sequence is synthesized)
ttgaatgtgtttccatgacaacaccagaggaggaagaggggctctgaggccccgtatgattttcctctcctctccactgaggctagcatcacaggctgtggaagcttccccctgagagct

SEQ ID NO: 907866 - DNA, 120 bp, Artificial Sequence
  ENSG00000248317_2 (sequence is synthesized)
ctcagcaggatgtggaaatcaggatggtgaatttcagcattgattttaggagatgataactaccgccgccttaacttcaactgttttctggactactttcttgatttagtagagactgga

SEQ ID NO: 907867 - DNA, 120 bp, Artificial Sequence
  ENSG00000248317_3 (sequence is synthesized)
ccagaaaggcctgagttgtgtgtaggcttgcagttccagacatttggggatcttgcctcagcaggacaggtaaggatatgctgcaacaacaacaacaacaacaaaacagaattatagttt

SEQ ID NO: 907868 - DNA, 120 bp, Artificial Sequence
  ENSG00000248317_4 (sequence is synthesized)
cttaacacaacccgcttgtatttattgctcatgttacatgttcaacatggcttggcagacaggctgttctcatcgttgtcattcctggacccagataacataggatctgtcatgatatgt

SEQ ID NO: 907869 - DNA, 120 bp, Artificial Sequence
  ENSG00000248317_5 (sequence is synthesized)
gccttctcggtcatctccttaggggaaagggcatgacaaatcttacaccagcttccaaagcctctgcccagaagtgttatatctgttcacatttcattgacaaaacaagtgacatgccac

SEQ ID NO: 907870 - DNA, 120 bp, Artificial Sequence
  ENSG00000248317_6 (sequence is synthesized)
atggaactccaaaatagtgtgaagaccaatcctaccacatgcctggaaggatgaaataattgtaggcaggccacatgactactatagaatccgaaaaaagggtcatgcatgaagagtcaa

SEQ ID NO: 907871 - DNA, 120 bp, Artificial Sequence
  ENSG00000248317_7 (sequence is synthesized)
gtaacctcatgggaaagatacctaactagaagttgagtactgatactgcagggaaaattctgaagaccctaagaacagaagttaatctgaatatttccggtggtgtagcagataaaagga

SEQ ID NO: 907872 - DNA, 120 bp, Artificial Sequence
  ENSG00000248317_8 (sequence is synthesized)
acactcatggagggaagaaaaattcttcagggccaagctggagtgaggtatgggctgggcggtcactgagtacaattgacactccgcaatgaaagaaaccatcagactgccttctttctg

SEQ ID NO: 907873 - DNA, 120 bp, Artificial Sequence
  ENSG00000248317_9 (sequence is synthesized)
gaagaaacaactgttttaaaagtctgaggcaactgcaatgtggttatactagattatgtataaaacaaagggaacaaggagtacttcttgtagttccagcacagagatagttctgagagg

SEQ ID NO: 907874 - DNA, 120 bp, Artificial Sequence
  ENSG00000248317_10 (sequence is synthesized)
agataacatgatcagcgtgggaagacatgacagattctgatggagaagacaatggagagatgaggaaaaaggtggtgtgcctgcctcattctggcctaccagtcacaccctctatgtacc

SEQ ID NO: 907875 - DNA, 120 bp, Artificial Sequence
  ENSG00000248317_11 (sequence is synthesized)
atggcaccagtgtgtaagggcaaaagcaagaggcctcagagcaagacttgtatagttgtgcaggttggggactgcacaatgtctcagttaggctgctataataaagtaccacaagaagta

SEQ ID NO: 907876 - DNA, 120 bp, Artificial Sequence
  ENSG00000259972_0 (sequence is synthesized)
tacagatcactactcccgaagtcaaaaacgactagaacacagcttaaaaatcaagccatttaattgtatctttgaagggcgaccacggaacggatcagcgaggccaagtacactaccacc

SEQ ID NO: 907877 - DNA, 120 bp, Artificial Sequence
  ENSG00000259972_1 (sequence is synthesized)
atctggtcattggtcttcaggtaaaaggccttgacgaactcctgcaggctgacatctggcagcaggttgaagacgtcctgcagctggtagatgatctggtggttgatgggcagcttgcct

SEQ ID NO: 907878 - DNA, 120 bp, Artificial Sequence
  ENSG00000259972_2 (sequence is synthesized)
gagttcagtcccttcaaaccatggacctggtttgtgatccgctgggacagagtgcccaccgtcgtgtctttgatatctctgtaataacccacagttaaaaagggcaggaaaaggcatcag

SEQ ID NO: 907879 - DNA, 120 bp, Artificial Sequence
  ENSG00000259972_3 (sequence is synthesized)
ggtaccatgttatcaggcaagttcttacattctaagaaaattcctagctttgttgggtgaggcaagtttttaaaagaaaaatgtcacttccccatttgataaagatttcgttatcaatta

SEQ ID NO: 907880 - DNA, 120 bp, Artificial Sequence
  ENSG00000259972_4 (sequence is synthesized)
ctctccacatttatccccagtctataactcgcatatttcgtgttttcaaacagaaaaccgtaattcaggagtgaacagcatcctctgtaaggtgtcacaggagcagcctgaaatccatta

SEQ ID NO: 907881 - DNA, 120 bp, Artificial Sequence
  ENSG00000259972_5 (sequence is synthesized)
ggcagtcattctgaagctgtggtgaaatcgaagggaagctaatgttgcagctaggaagatgagatccaggctgaggatcacactttttccagaatacttttttagtgtttccaaagccag

SEQ ID NO: 907882 - DNA, 120 bp, Artificial Sequence
  ENSG00000259972_6 (sequence is synthesized)
caaaagccgtttagaagtctcatctccagaatgccagaatacacaaatgagtcctgtgcacttatcttgggggaaacattgttccattcttagtaacatgcctgtttggcctgtggtctg

SEQ ID NO: 907883 - DNA, 120 bp, Artificial Sequence
  ENSG00000259972_7 (sequence is synthesized)
taccacctcataaatgagggatctgaggtacaaactggaacccgggtcttctgggctcagagaactctcctcactacagcagactgcctgtttccatttaggggaatgagatgctctttc

SEQ ID NO: 907884 - DNA, 120 bp, Artificial Sequence
  ENSG00000259972_8 (sequence is synthesized)
ataaatgataccaagtgcaagagaacttaaggcagctccaatcgaagactgtcttggctgcttctggaaactacagatcactactcccgaagtcaaaaacgactagaacacagcttaaaa

SEQ ID NO: 907885 - DNA, 120 bp, Artificial Sequence
  ENSG00000259972_9 (sequence is synthesized)
atcaagccatttaattgtatctttgaaggtaaacaatatatggagctggatcacaacccctgaggatgccagagctatgggtccagaacatggtgtggtattatcaacagagttcagaag

SEQ ID NO: 907886 - DNA, 120 bp, Artificial Sequence
  ENSG00000259972_10 (sequence is synthesized)
ggtctgaactctacgtgttaccagagaacataatgcaattcatgcattccacttagcaattttgtaaaataccagaaacagaccccaagagtctttcaagatgaggaaaattcaactcct

SEQ ID NO: 907887 - DNA, 120 bp, Artificial Sequence
  ENSG00000259972_11 (sequence is synthesized)
caagacccagtctcgaggaaaaaaaaaaaattagaagagtaataccagcagtaagggaaatcgaagcacatactatctgcttgtattaatgtattcatcccccagcagcagtgtgcaaga

SEQ ID NO: 907888 - DNA, 120 bp, Artificial Sequence
  ENSG00000259972_12 (sequence is synthesized)
ggacagtaagggtggaggtgtggatgcttaacccagtctttttgcacccatagcctcttcaagttccttcaaaattttgcctgggtggcttcagctgaaagcagaaatggcaggaagtaa

SEQ ID NO: 907889 - DNA, 81 bp, Artificial Sequence
  ENSG00000259972_13 (sequence is synthesized)
gttgggactacaagcaccagccactgcccccaaccctgcattatgttcttaaaggcagacctgaatcctgtgcggtgtcaa

SEQ ID NO: 907890 - DNA, 120 bp, Artificial Sequence
  ENSG00000259972_14 (sequence is synthesized)
tatgttcttaaaggcagacctgaatcctgtgcggtgtcaattcaggtgtgcactggcccctgagccttacatacaggacccgttccttaggatgacgttgcgttcccttgcttagagcct

SEQ ID NO: 907891 - DNA, 120 bp, Artificial Sequence
  ENSG00000259972_15 (sequence is synthesized)
cagcaccatggcacctggctctcccccgatgcctgggtcttgctcttgcccatttcctagccagggtttgtggtccaggcaacctgtcacatcagtgtgttccaaacatggcacccagat

SEQ ID NO: 907892 - DNA, 120 bp, Artificial Sequence
  ENSG00000259972_16 (sequence is synthesized)
ctcaaaagcttcttcaacgctcccatggtttgggatacacctcaagttttaacttacgtacttcaagtttcttttattcaattagatacaaaccgtctgacttttggcttctgaaacagg

SEQ ID NO: 907893 - DNA, 120 bp, Artificial Sequence
  ENSG00000259972_17 (sequence is synthesized)
aaagtcaattttgttgttttcactgtaccatgcttttttatctcagaatcttgatgaactctgaaatgacccctgatgggggcatgcctctatttatgctgaataagagccattttacat

SEQ ID NO: 907894 - DNA, 120 bp, Artificial Sequence
  ENSG00000259972_18 (sequence is synthesized)
tttactacaggttgagtgcccctaatccaaaaatttgaaatgctccaaaatctgaaactttttgagcacttacatggtattgaaaggaaatgctcattggaacatttcctattaggcatg

SEQ ID NO: 907895 - DNA, 120 bp, Artificial Sequence
  ENSG00000259972_19 (sequence is synthesized)
ctcagccgttaagcataatgcaaatattaaaaaaaaaaatttcctaaatcttttaatacttctggttccaagcatttcagataagggatactcaagctctacctattcccaaattcccac

SEQ ID NO: 907896 - DNA, 120 bp, Artificial Sequence
  ENSG00000259972_20 (sequence is synthesized)
taactagctctttggcaggtctatggaataaaaatcgatgcttctgattactttaaggcattataacctcatgaagtggtttctgagatgcaactgagtttttgtgctattttattgtat

SEQ ID NO: 907897 - DNA, 120 bp, Artificial Sequence
  ENSG00000259972_21 (sequence is synthesized)
acaatctgaagcctgagctgactatcatatccccaactcacagcagcgaaagctgcagttcagatttgagatcagtctccattcacttccacgtagcaccacagcaagagtgaccggagg

SEQ ID NO: 907898 - DNA, 120 bp, Artificial Sequence
  ENSG00000259972_22 (sequence is synthesized)
cagagagctcttgttgggtcagctttctaataagcatgtcaagtgaaaaagaaccctctagcagcacactgatttagtttgtaagattttaatttacaaattaaaaaagctatttaatac

SEQ ID NO: 907899 - DNA, 120 bp, Artificial Sequence
  ENSG00000259972_23 (sequence is synthesized)
aaagccgtttagaagtctcatctccagaatgccagaatacacaaatgtaaggctttattttaggggtgggccctgggttttgcagtcaagtcagccgctatttgtatgagcaagacttca

SEQ ID NO: 907900 - DNA, 120 bp, Artificial Sequence
  ENSG00000259972_24 (sequence is synthesized)
tcggtagcactactgggctccccctcttctacatgatggcagcaatttggccttagaaaatatgcctaagtgactccacaggctataagctattttcttcataagtagaaatggaagatt

SEQ ID NO: 907901 - DNA, 120 bp, Artificial Sequence
  ENSG00000259972_25 (sequence is synthesized)
tctgttaggaaggtagaagtcagttttgtccgtatgtgggccaaactattaaaaataataaggcctggggattcctatgttcttagatgctcaataaacatttcagttcatcaaactatg

SEQ ID NO: 907902 - DNA, 120 bp, Artificial Sequence
  ENSG00000259972_26 (sequence is synthesized)
accaacttacaagtctgtggcattgtgctagttcactggaccctgggaaagtcttttaaatccaaatgatactttttgttttttaaagagacaggattttgctctgttgcctaggctgga

SEQ ID NO: 907903 - DNA, 120 bp, Artificial Sequence
  ENSG00000259972_27 (sequence is synthesized)
gtgcagtggcatgtgatcacagctcactgtaaccttgagctcctgggctccagtgtcctacctcagcctcttcagtagctaggactaaggcacatcccaccacacccaggcaattttaga

SEQ ID NO: 907904 - DNA, 120 bp, Artificial Sequence
  ENSG00000259972_28 (sequence is synthesized)
ttgagaggttctatctgttcaagagaggaaatttaatatccgtgactactgtatgtcaaatgatttagtgccttatttaatttgttcctctaggagtcctgtgcacttatcttgggggaa

SEQ ID NO: 907905 - DNA, 120 bp, Artificial Sequence
  ENSG00000259972_29 (sequence is synthesized)
ggatttagcttctctgaatttaaagtctgtatactttttggttgggcagatctccaccgggtactgatttggggttggggcttcttccatcacatagccttgctgggaaaaggaggagaa

SEQ ID NO: 907906 - DNA, 120 bp, Artificial Sequence
  ENSG00000259972_30 (sequence is synthesized)
cgggaattgtgtggggtggttatggccagccctgctgcgttcagcaggccctgttggcagaggtgtattcgccagaatcggggtgcttagcatccatccttggagtgtctaagcaaaggg

SEQ ID NO: 907907 - DNA, 120 bp, Artificial Sequence
  ENSG00000259972_31 (sequence is synthesized)
ggtctctgcacccaggcctggctatagctgagcaagtctgcagtagacctttcccattggctcagctgttcagaaggagagctggacatctcttgttcttttccatttagccctcaatct

SEQ ID NO: 907908 - DNA, 120 bp, Artificial Sequence
  ENSG00000259972_32 (sequence is synthesized)
gattggccctcgagctgtggatgtgctgtctgagttgtcctatgcccctatgactccagaccacttcccaagcctcttttgcaagcctcttcaagttccttcaaaattttgcctgggtgg

SEQ ID NO: 907909 - DNA, 120 bp, Artificial Sequence
  ENSG00000248311_0 (sequence is synthesized)
ggaagaattttcttagaaccaaaaggcatggaattgatgacatgaaactgcctgagcttctcagctgacctgtgatggagtgttgtgcccaagtggaaagttcttctttctttcagagac

SEQ ID NO: 907910 - DNA, 120 bp, Artificial Sequence
  ENSG00000248311_1 (sequence is synthesized)
cttccgtaagagttcaaggacaaaaaactactgatgttgtaataacattgaaacttaatgttttgggcaatccttaagtgatttatttggagtgtcccagtcattttagacctcttcacc

SEQ ID NO: 907911 - DNA, 120 bp, Artificial Sequence
  ENSG00000248311_2 (sequence is synthesized)
ttacaatgtattgtgtgagattatatttccatgcacctaattttaaaataaatttatttaggtagatgtagagacatattactgtgataaagcagttcataccaaataaaatttagctaa

SEQ ID NO: 907912 - DNA, 120 bp, Artificial Sequence
  ENSG00000275092_0 (sequence is synthesized)
ttgaaggtctgtgacacgggtgaattgggtggttgatgtaaacacagaacaaggccgcaggcgggctgctcctctgtcagcagaaggaacactcgagtttctggaggtgatgtctttgcc

SEQ ID NO: 907913 - DNA, 120 bp, Artificial Sequence
  ENSG00000275092_1 (sequence is synthesized)
cccttggttccttgcttggcgagattgttagctgatgtagccagggctgagaaactccactctggcttctgaggagttaacagtctgagtttgaagcgtttaattctgtgctaggatgtc

SEQ ID NO: 907914 - DNA, 120 bp, Artificial Sequence
  ENSG00000275092_2 (sequence is synthesized)
tccataacctggaaatcgcttgtctgtgaagcagttacaagagccgggccctgtggggagcaccacttagcttcattcattcaccgtcagatactgagctcggcctgcctgtgtgtgggc

SEQ ID NO: 907915 - DNA, 120 bp, Artificial Sequence
  ENSG00000275092_3 (sequence is synthesized)
agaacctcgccctttgtcagaaacaggttcagggaggctggttcccatccctgctttgcctctgtgaccttggcctgtcgcctgcctggggttcgattttccatcaaaggagtgaattgc

SEQ ID NO: 907916 - DNA, 120 bp, Artificial Sequence
  ENSG00000275092_4 (sequence is synthesized)
actaggcgatctccaagcccagaaattctctcattctaggagttaggtaatgctgtttgacttatgaatagaagtgtcttaggaaatgagcttcaattccttttcaattaattcggctta

SEQ ID NO: 907917 - DNA, 120 bp, Artificial Sequence
  ENSG00000275092_5 (sequence is synthesized)
acacattcttgactttaataggaaaataaaagattgtgtcagtattttggctttttctgaaaccaaggtgatttatggcctagtttggtttaaagcgtgtttataaaaatcataacagta

SEQ ID NO: 907918 - DNA, 120 bp, Artificial Sequence
  ENSG00000275091_0 (sequence is synthesized)
tattagttccgatgcacgcttttcaacaccctctggacttcccggcgatctgatttatcagtatgaatgtccatcaaaagaaactgaaccctcaaaggcagccgggcccgtcactccggc

SEQ ID NO: 907919 - DNA, 120 bp, Artificial Sequence
  ENSG00000275091_1 (sequence is synthesized)
ttgccgcgctctctggctggaggccgtgcgcatgctcggcacgcaaggccgattgggagttgtagtccgctcttgcgtacactttacatgtcttaccaaattaaaaaggcgagaaaggaa

SEQ ID NO: 907920 - DNA, 120 bp, Artificial Sequence
  ENSG00000275097_0 (sequence is synthesized)
attatcatcctcctgagttatttgaaatgattttttttgtacattttggctgcagtattggtggtagaatatactataatatggatcatctctacttctgtatttatttatttattacta

SEQ ID NO: 907921 - DNA, 120 bp, Artificial Sequence
  ENSG00000275097_1 (sequence is synthesized)
ctttttatactgttggatacttataatcaaaacttttactagggtattgaataaatctagtcttactagaaaataaaaggagctgttttgtggctttgtttgacaggtcttcagtaagaa

SEQ ID NO: 907922 - DNA, 120 bp, Artificial Sequence
  ENSG00000275097_2 (sequence is synthesized)
taatgtttttggctttcacatatactcagtttaagtgcttagtattaataacaagccatgaagggaataaattcctcttcactgagacatagactttggaataaaagacattttaactga

SEQ ID NO: 907923 - DNA, 120 bp, Artificial Sequence
  ENSG00000275329_0 (sequence is synthesized)
ccagggtacagggcaggagcctggacctctttacagttgccttttctctctctctgtcccttctccatcttccgagctcctactcgcccttcaggacccagctcgaatgccccatctctg

SEQ ID NO: 907924 - DNA, 120 bp, Artificial Sequence
  ENSG00000275329_1 (sequence is synthesized)
ggaggcgccttcaatcttgggctgccccttccgtcacaccccctgtcccctgtctcctgcctccccttcctcctcacacaaagccacccccgcctgttggtggcctgtgtctccgctggc

SEQ ID NO: 907925 - DNA, 120 bp, Artificial Sequence
  ENSG00000275329_2 (sequence is synthesized)
ccagggctctcttgccgtggccaccgtgggttttggcctcgtgacccagtccatgcgtgcacagcgcaagtagcttcccaggacaccgatttcctccccggccgcagctgcttctggtcc

SEQ ID NO: 907926 - DNA, 120 bp, Artificial Sequence
  ENSG00000275329_3 (sequence is synthesized)
tctgcccactcccgggttctgcgccttcctgcgcccccggcctggccacagctcggtcaccccagaaccaccgtgtgctggggatttgtcacgggtttgtcctgacgtgtgaggtccagc

SEQ ID NO: 907927 - DNA, 120 bp, Artificial Sequence
  ENSG00000275329_4 (sequence is synthesized)
cggggtccccatagcctccctgtccccgtccctgtccccgtcaggcctcctgctgcgctgtggacagtggcttggcgccatctgctgggctggtgcctgtggtgccgccaagcgcaggag

SEQ ID NO: 907928 - DNA, 120 bp, Artificial Sequence
  ENSG00000275329_5 (sequence is synthesized)
ggacccagcggctccaggtctgtgggagactttaagttggggccgaatgtggtgctcgctgccgacgcagagcccccaagctggacgggacccctggccgtgcggctgggaacacctggg

SEQ ID NO: 907929 - DNA, 120 bp, Artificial Sequence
  ENSG00000275329_6 (sequence is synthesized)
gttgtcctacctttgcagggacagcgagccaacccctgcttggaaggagcactttccccaccgaggccggcccagggcgcgtgctgagcaggtgggttgagtgggtggaaagaatgcaac

SEQ ID NO: 907930 - DNA, 120 bp, Artificial Sequence
  ENSG00000275329_7 (sequence is synthesized)
taccgtccttctgtccctccacttgctggggctgggggccaaggatggggtcactgtggggactttatccagctggttgacttcagggtcctggcagggagtggctcttgctgccaggac

SEQ ID NO: 907931 - DNA, 120 bp, Artificial Sequence
  ENSG00000275329_8 (sequence is synthesized)
agtagaggcctagagagtcctatctctgacaccagccaccttgcagggttcgggccagggaaggggaagggatgggagagaatggaaacctccagagtcattttaactggtcgttggaca

SEQ ID NO: 907932 - DNA, 120 bp, Artificial Sequence
  ENSG00000275329_9 (sequence is synthesized)
gagccagtgcgacttcaagttcaatgacaaaccccctctccatgtctctggggtggggtggggcctgtggccccacagagctgagccacccaggaggccagggaaggagacgcagtacac

SEQ ID NO: 907933 - DNA, 120 bp, Artificial Sequence
  ENSG00000275329_10 (sequence is synthesized)
aggaggccagggaaggagacgcagtacacaggagcccagcatcctctcagctgcatggacatctctacccagacccttctgcagccacctccccacttacccagcaggagaccaagccaa

SEQ ID NO: 907934 - DNA, 120 bp, Artificial Sequence
  ENSG00000275329_11 (sequence is synthesized)
tccttttctgcgaaactgtgctggcttctgtgactgtcctgcaaccagatagaggcctgagggactctgcacagtttctgggctgaggcagaagaagccccatggcttcccctctgcctc

SEQ ID NO: 907935 - DNA, 120 bp, Artificial Sequence
  ENSG00000275329_12 (sequence is synthesized)
ctgcatgctgccttttagctcttagcacctgctgggagaagctggccccagcgtggacaagcctccaggagaccggagcacccaccggaaggaagggagggagggagggaggaagggcca

SEQ ID NO: 907936 - DNA, 120 bp, Artificial Sequence
  ENSG00000275329_13 (sequence is synthesized)
tggaggtaaaacgaagttattagggtgggcccaaatctgactggtgtccgtagacaaaggggagattaggacacagacatgcacagagggatgacaccgtgaggacacagggagaagacg

SEQ ID NO: 907937 - DNA, 120 bp, Artificial Sequence
  ENSG00000275329_14 (sequence is synthesized)
gcatctgcaagcccagaagagaggcctcaggaggacccaaccctgcccacaccttgatcttggacttccagtctccatgactgtgagatggtaaataaatgcatgctgttaaggccacgg

SEQ ID NO: 907938 - DNA, 120 bp, Artificial Sequence
  ENSG00000275327_0 (sequence is synthesized)
atctaagtatgagtacagaaaaatgtttggaggcatttttcatcagcgtttcatgatcatcaaaatggtgcattcacaaagtttctcccaacacatagcaattactagacatggccaaga

SEQ ID NO: 907939 - DNA, 120 bp, Artificial Sequence
  ENSG00000275327_1 (sequence is synthesized)
ttcaggactgagaaatgtgaaaatatgagaaaagttcagtcaataaaatggaattgttcatgaagaagtaggctgtttgcatgttgattcttaatagtttaaataaaatctttaaacaaa

SEQ ID NO: 907940 - DNA, 120 bp, Artificial Sequence
  ENSG00000226087_0 (sequence is synthesized)
acattaaatacccagctcctctgcgcgattacagcagcctccggagctctcccaaattgtcacctaggatgaatatgacagcaaacaatgctttaaaatgactttgagttttatgcaatt

SEQ ID NO: 907941 - DNA, 120 bp, Artificial Sequence
  ENSG00000226087_1 (sequence is synthesized)
tcttgtataaaaggagagcctgagtccatggaagttgggattgaacatcctgaatatgcagttccttggagagccaccaagaaaagacctaagcaagagacatgatgtcaccttcgggga

SEQ ID NO: 907942 - DNA, 120 bp, Artificial Sequence
  ENSG00000226087_2 (sequence is synthesized)
ggaggctcttcaagctgtttggcatgagaagaggaggaatgaggaggatcactggccttgaacccccaaagagaggctagagcacctttctaggacccagtccagggtttgtcttgaaca

SEQ ID NO: 907943 - DNA, 120 bp, Artificial Sequence
  ENSG00000226087_3 (sequence is synthesized)
tccagctccaaaagagatgctgtgcagattcaagctgccaagtcctgaaggacctgagggaaaacccaaccccaagcagcccagatggtatctgagtatcctgtgccctacccacgaaga

SEQ ID NO: 907944 - DNA, 120 bp, Artificial Sequence
  ENSG00000226087_4 (sequence is synthesized)
tcaggagcctaaaggctagagctcactgcagaaccagaccaaagacagtttaagggccattgagccaagccttcctgacctcccatggagaggggaagagagaacaggacctccacttat

SEQ ID NO: 907945 - DNA, 120 bp, Artificial Sequence
  ENSG00000226087_5 (sequence is synthesized)
ccacctacccgctgctgagtccctttagcccttggcatggtaattaacggtcaggaagttatgcatcagcctcagcaagctaacatggcaggagatccctcctgacagcagagctaataa

SEQ ID NO: 907946 - DNA, 120 bp, Artificial Sequence
  ENSG00000226087_6 (sequence is synthesized)
gaaatttgctaatgcaatttatcactttaaaaagccatatgtcggtggggatgagcacttctctgcagcagctagtgtaattgtcagaacagagcagcgagcagctctgagaagggggtg

SEQ ID NO: 907947 - DNA, 120 bp, Artificial Sequence
  ENSG00000226087_7 (sequence is synthesized)
aggatgatgtcttcactaaatcagtggtgcaatgcagcaggcgagggggctgggaggaggggtgtggtgctgggtggagggctcccagctctcaaactcccaggaagccagtgctgcaga

SEQ ID NO: 907948 - DNA, 120 bp, Artificial Sequence
  ENSG00000226087_8 (sequence is synthesized)
cctgttctggggccccattaaaaaccagattccctgaactccagcccctgctgcctttgagctgcatgaacctgcgctttggttcctgccacagtgttaaaaaagaagcgactctgtctg

SEQ ID NO: 907949 - DNA, 120 bp, Artificial Sequence
  ENSG00000226087_9 (sequence is synthesized)
catttggtctttctctcccagacccctgcgataacttcatccaggacaagggccactggtccttagtcagaggcagggaaagattagaaatccacctcaggcccaacaacatctctgctt

SEQ ID NO: 907950 - DNA, 120 bp, Artificial Sequence
  ENSG00000226087_10 (sequence is synthesized)
tcagtttagacaaaaggcaaattgctttgagtacccagtgtttgccaaaataaagagtggtttctgcaaaggggaaaaactgctgttgtgggattttgcttcaaacactcaattgcaaac

SEQ ID NO: 907951 - DNA, 120 bp, Artificial Sequence
  ENSG00000226087_11 (sequence is synthesized)
catttttcccaaagcaaattgatagagaagcaagtaaaacaggtgccccttctgggaatgaagtccagggctgctgggaaggctgtgggaaggaataagaatatccacacggctggatct

SEQ ID NO: 907952 - DNA, 120 bp, Artificial Sequence
  ENSG00000226087_12 (sequence is synthesized)
ccactgctttctggaatagtccccactctcagttatctgtggaatgagaggggctggggagagggatgaggtagggcaagccaccaccaccaacacccagagaaacatcacactcagttt

SEQ ID NO: 907953 - DNA, 120 bp, Artificial Sequence
  ENSG00000226087_13 (sequence is synthesized)
ccaccaactaaacttccctctaaagcaaattttgaccctaattgttctctgtcctttaaattaatgctttttttttttaagacggagtttcactcctgttgcccaagctagagtgcagtg

SEQ ID NO: 907954 - DNA, 120 bp, Artificial Sequence
  ENSG00000226087_14 (sequence is synthesized)
cctaaattaatgctttgaattttgcatggagacactgaaggaagacaaagtacaaggacccaagtaataaccaatagaaagaagaaatcccatgccaggggcctggacagcccaagacgt

SEQ ID NO: 907955 - DNA, 120 bp, Artificial Sequence
  ENSG00000226087_15 (sequence is synthesized)
gtatataagctccacgttgccttcctgtttaagaccttctgctcagctcatactgatggaaatggcatgggtgggcatgggggaagtatagcctcatgactctccagccttcagggtgat

SEQ ID NO: 907956 - DNA, 120 bp, Artificial Sequence
  ENSG00000226087_16 (sequence is synthesized)
tctctccagaagatgaggaaggaatttgtctcagtccacttccacacctgtccacctgagctgggcgttagcctgagcctttgcctctgtatggatccctgactttgagttttatgcaat

SEQ ID NO: 907957 - DNA, 120 bp, Artificial Sequence
  ENSG00000275322_0 (sequence is synthesized)
gtgaaagacgggctgcctggattcagcctctggatcttagaccgggcgctacgaatgtaagatgaatttagtggcgcggctgcctccctgaatccgaacggtaatgatggatttatcaac

SEQ ID NO: 907958 - DNA, 120 bp, Artificial Sequence
  ENSG00000275322_1 (sequence is synthesized)
ggggattcgccttcagcccagcgagggaggtttactcagcaaatatgtcggcgagcacccacccaaatgcaatcatttgaccccctgcggacgatagctgccgtgccccttcccaccgct

SEQ ID NO: 907959 - DNA, 120 bp, Artificial Sequence
  ENSG00000275322_2 (sequence is synthesized)
ggtcctgcttggccagggtcgctgggggccagaggccggcccggatgaccagagaggtggcctcacggatcccttggcctctcgccccctcctctgtttcctcctctcagcttgaggctc

SEQ ID NO: 907960 - DNA, 120 bp, Artificial Sequence
  ENSG00000275322_3 (sequence is synthesized)
tcctggcaagggggatcgatctggcgtgtaggtttggtggggagggagagggtggtggcggtgccagagcacaagatgaagtgtgggctgtcttggcgttgccaggagacatcagtgggt

SEQ ID NO: 907961 - DNA, 120 bp, Artificial Sequence
  ENSG00000275322_4 (sequence is synthesized)
gtgtgagcttaagtgccctgcttttgaccaaatcttagtgtctgggatcgtggctgactcggcccagccctgggccccattgtaggaaacgtggctgtaggacagaagcctgtggtgccc

SEQ ID NO: 907962 - DNA, 120 bp, Artificial Sequence
  ENSG00000275322_5 (sequence is synthesized)
agccccttggaagggctcagatgtgcccagaacgaatgccttgcctgcccatcctcctggggctccctagaccccaagccaaagcagagatacctgttatcaaaggttggggaagagcct

SEQ ID NO: 907963 - DNA, 120 bp, Artificial Sequence
  ENSG00000275322_6 (sequence is synthesized)
ccaaggcaggggcaaaacttccatatctctttcccccaaactgatctagcttctccttcaccttcccccaccgaggccacccggccattttaaagtttagtggctgtggacttttagaat

SEQ ID NO: 907964 - DNA, 120 bp, Artificial Sequence
  ENSG00000275322_7 (sequence is synthesized)
ttggtttggtctgtgatccttaccgcacagacccaatgaccaccacctctttctttttgtcttttatctgctctccttttgagggggaggaaagtgctggcctgttccatcaagcccagt

SEQ ID NO: 907965 - DNA, 120 bp, Artificial Sequence
  ENSG00000275322_8 (sequence is synthesized)
tcgcatttgctttagcctctgatttctctttcttctttggaaatttcattgagatgtctctgtacttcgcttgtcagttatctttgttccttttaaataaagggcttttaaatggactta

SEQ ID NO: 907966 - DNA, 120 bp, Artificial Sequence
  ENSG00000271434_0 (sequence is synthesized)
gaccctcaaaaactagcccctgaactgaattaaacctgacccaaagtgaacagcaaggtccagaaacggcaaggcttgaggtcagcctccgtccccggacactttgaaggacggcagatc

SEQ ID NO: 907967 - DNA, 120 bp, Artificial Sequence
  ENSG00000271434_1 (sequence is synthesized)
cctgaccccttggtggcccgcgaggatcgcgggtgcgcgcggcgggcaggggtgcgctgacacccgcgcacctgcacccccggtggaggagccgagggcacacgacgatgccaatccctc

SEQ ID NO: 907968 - DNA, 120 bp, Artificial Sequence
  ENSG00000271434_2 (sequence is synthesized)
gtgaatcccgcgaaagaggggccagggggctccggattcatagacgcggggcgtagaagggggtcaggtaggaaggcccaaggaacggcgcgaaagggctcccgggggcggcagccgtca

SEQ ID NO: 907969 - DNA, 120 bp, Artificial Sequence
  ENSG00000271434_3 (sequence is synthesized)
gcgggaaggaggcggcggacgggaagaggacattggccgcggagtaggaggggaaagtctggaagtgcagagcgccggtgccgggagggccaggactgccccccgagccgccgccgccgc

SEQ ID NO: 907970 - DNA, 120 bp, Artificial Sequence
  ENSG00000271434_4 (sequence is synthesized)
cgccccccgccgcccctggctggggcgcgccaccccccacctgcgccgcgccgtcggcacccgggttctgcttcttccacttggtcctgcgattctggaaccagattttgacctgcgtct

SEQ ID NO: 907971 - DNA, 120 bp, Artificial Sequence
  ENSG00000271434_5 (sequence is synthesized)
acactgacaggtagcgcgtggcccggaacttgttctccaaggccaccagctgctcgtaggtgaaggcggtgcgcgcgcgccgcggcttggcgcagttgggctccaggcgccggcgcctgg

SEQ ID NO: 907972 - DNA, 80 bp, Artificial Sequence
  ENSG00000271434_6 (sequence is synthesized)
gacgcggggagccgggggatcccgggggggacctcacagggccgcccccgccgtcctcgcagggctccccagacgccaat

SEQ ID NO: 907973 - DNA, 120 bp, Artificial Sequence
  ENSG00000271434_7 (sequence is synthesized)
gcaagcgcgcagcccgctcccgcagccgcggcctcctcggatcctccgcatcctcctcctcttccgcctcggaaccctccaggggggacgcctggccggcgcctgggcccgcagcatcta

SEQ ID NO: 907974 - DNA, 120 bp, Artificial Sequence
  ENSG00000271434_8 (sequence is synthesized)
ggggagaaggggtcggtgaacagaagcctctccaggtccccaaacctcgtcctcgtcctccctagagcaagcagctgtccccccaacccaactctgggtgctgctcctgtccccacatcg

SEQ ID NO: 907975 - DNA, 120 bp, Artificial Sequence
  ENSG00000271434_9 (sequence is synthesized)
cgctccccttaggccggactacacatcctcgccagcgggtttaggggaatggtgtcctcttgccctttacaaatctgccatcaagtaggcgtccaagaaatgtacgccaaatgaatgaat

SEQ ID NO: 907976 - DNA, 120 bp, Artificial Sequence
  ENSG00000271434_10 (sequence is synthesized)
gacaccccgcattaagaaaaaatagtgacattattgggtaaccatactggggggtaggatcattgtattaagacatctagatgtcaaacgcttttagggctgtgccttccccagacccta

SEQ ID NO: 907977 - DNA, 120 bp, Artificial Sequence
  ENSG00000271434_11 (sequence is synthesized)
attaaaggtaaccgggcgcacggcagggagcgctgcgcgggtgaatttctgtgggtccaggatgtccaggacagagaaagaaatcttgtggtgggagggagccgccttggccccgccgtc

SEQ ID NO: 907978 - DNA, 120 bp, Artificial Sequence
  ENSG00000271434_12 (sequence is synthesized)
ctgccatgccagcatgcccgtcgcccacgggccggcggtcggcggcgcggggttggggatggcgccgctcgggcttgccttcggctgtggcttggcggtagctttccagccaggagccgg

SEQ ID NO: 907979 - DNA, 120 bp, Artificial Sequence
  ENSG00000224812_0 (sequence is synthesized)
ggccaatggcaccgccccgtccgccccgctctgggaacgccgctccagcagatgtgacatagactggaagtgatggacccagacaacaatcagaaccaaagcaccagatgagccacctca

SEQ ID NO: 907980 - DNA, 120 bp, Artificial Sequence
  ENSG00000224812_1 (sequence is synthesized)
gaaccaaagcaccagatgagccacctcagccacgtgagccatgccagccaccctacctgtgaccccatctgtggccccagttatcatggagtagagatgccattaagaacattcatgatt

SEQ ID NO: 907981 - DNA, 120 bp, Artificial Sequence
  ENSG00000224812_2 (sequence is synthesized)
aacaggagtttgaaagaagttgatttcaacccttgtggatgactatgagagattcaaggcttcagtggagaatgcacctacagatatggtggaaacagcaaaagaaatagaatcagaagt

SEQ ID NO: 907982 - DNA, 120 bp, Artificial Sequence
  ENSG00000224812_3 (sequence is synthesized)
ctcatgataaaacttgaacagatgaggagttgcttcttacaggtatccacactgcctctgctacctgcccgttggtcactcactcattgttctgatgataagatcgacagatcacaagaa

SEQ ID NO: 907983 - DNA, 120 bp, Artificial Sequence
  ENSG00000224812_4 (sequence is synthesized)
gttctgatgataagatcgacagatcacaagaaggcgagtgtcatgggcaaagcgaggagtccagcaggatggacgctgtgtggtttctcagctggagcgcagcaggagcaagcgtggaaa

SEQ ID NO: 907984 - DNA, 120 bp, Artificial Sequence
  ENSG00000224812_5 (sequence is synthesized)
catccttcttttctcttctcccctcccctccccaagtgcaaatggaacctgtgaaatatggcttgattttgaggcttctaattcttcattgcactcccagacccttcttttatctctggt

SEQ ID NO: 907985 - DNA, 120 bp, Artificial Sequence
  ENSG00000224812_6 (sequence is synthesized)
atgataggaaccagacttcaaatgggtttccaggagctgagggaaggaaaggtttttcctacagtttctccagccaagggattaagaaaaggatggggtcatagagcaacagcagtagaa

SEQ ID NO: 907986 - DNA, 120 bp, Artificial Sequence
  ENSG00000224812_7 (sequence is synthesized)
ggtggcattccaagactttctccaggactccacctaaggtcagtttctcgtcactcatacctgtttgtcttttgcctggccaccatcaatgtagagttaagaaccaggaggcaggaacat

SEQ ID NO: 907987 - DNA, 120 bp, Artificial Sequence
  ENSG00000224812_8 (sequence is synthesized)
gctccccaagtcacagtctgcctcccacatactgcagtttgattacagcatcctgcctctccacaggaggaaagtggtgtcattctccagaaccaggtgtggattgtgatcagacctaga

SEQ ID NO: 907988 - DNA, 120 bp, Artificial Sequence
  ENSG00000224812_9 (sequence is synthesized)
attggctaggtaaaaagcttaagagagagattccatgtcctgcaacactgtccacaattcaaatctgtattcaaaataaaactaaaagcagagaaaatccacagcagacctaccactctc

SEQ ID NO: 907989 - DNA, 120 bp, Artificial Sequence
  ENSG00000224812_10 (sequence is synthesized)
caggcagatagtgccctctccacaatctgcagccatcaactgcctctgctggacgctgcccagagagagacctgctgctgcagagcagctctgtgtcagccactgcggccttagagagag

SEQ ID NO: 907990 - DNA, 120 bp, Artificial Sequence
  ENSG00000224812_11 (sequence is synthesized)
ctgcaggaaatgggacttctcacgtgctctccacagtggaaccacaggtcagcagctgaatggagcctctaccctctggatgcctttcttgtcacttagtattcttttttttctcattct

SEQ ID NO: 907991 - DNA, 120 bp, Artificial Sequence
  ENSG00000224812_12 (sequence is synthesized)
ggtactttatctgctggaaactttcaaatgtattactaatgtccttccaaacagactccacatgggaattttcatgatatcttggctatatttacacaaagattagcttgcaggaaacac

SEQ ID NO: 907992 - DNA, 120 bp, Artificial Sequence
  ENSG00000224812_13 (sequence is synthesized)
cttcctcgcccagctcatgggaacacttattctgttgtatagaatgaagtgttgcttgattctagaatcctttgtcccaggaatggggtctgtaattcagggacctgtagaagttcacag

SEQ ID NO: 907993 - DNA, 120 bp, Artificial Sequence
  ENSG00000224812_14 (sequence is synthesized)
tgtgagaggaatgaagtgtccaatctgcaatctgaatcttccctatgaaatttccacctggtgccctccagcgcagattctcgcacccacagtcctgccttacagggcagaccatttcct

SEQ ID NO: 907994 - DNA, 120 bp, Artificial Sequence
  ENSG00000224812_15 (sequence is synthesized)
ctctgacagtactacctgtctgaatgttctgcttcaaactgagtcaagatatgtgaaccctgggtagaagaattatcaggtctggagggagcacaagcaaactatcccattttatggacg

SEQ ID NO: 907995 - DNA, 120 bp, Artificial Sequence
  ENSG00000224812_16 (sequence is synthesized)
tggaaaccgaggcctgagggagagacgcaccaggaatcaggagatctggctctgatcagctgtacaaattgagaattgtgacctgaccttgtccaacccaagtggcccaactcctaattc

SEQ ID NO: 907996 - DNA, 120 bp, Artificial Sequence
  ENSG00000224812_17 (sequence is synthesized)
tgtgagtgacatgtctctgttactttggaatattgattgaagaaagaaagagcaagagcaggcaggagggcaagacgacagcaagagaacaagaaagaaacctgaagaaaagaagtttta

SEQ ID NO: 907997 - DNA, 120 bp, Artificial Sequence
  ENSG00000224812_18 (sequence is synthesized)
gtgaagatggaaaggcttaaaacataccatggagaatgacctcagccttctgtgtggaggatttgcacttggagataaggaaagagagggacttcagagagttaagcagttcagtttcct

SEQ ID NO: 907998 - DNA, 120 bp, Artificial Sequence
  ENSG00000224812_19 (sequence is synthesized)
ttgcatttcttacatctgagcaggtgaccggagtgaacactctggaagccacagtggagtcctctgcttggggcctctttctggaaaccagatcaattcactgaaaaacaatttgcaaat

SEQ ID NO: 907999 - DNA, 120 bp, Artificial Sequence
  ENSG00000224812_20 (sequence is synthesized)
gactagttcattgagaagcaagtgaccaaaactctaagtcaccgaatgacctgctcattgatttattgaagattttattccaaggtctacttccctctgcatttgtggctgccatttcat

SEQ ID NO: 908000 - DNA, 120 bp, Artificial Sequence
  ENSG00000224812_21 (sequence is synthesized)
atgtgaatgggtgggcagtttgctgtcatgccctttttgtgcatctctatcctgaccctgtatgtggtgctgccttttcccaggccccctgcccctgccctggcctctgtctgcaaagca

SEQ ID NO: 908001 - DNA, 120 bp, Artificial Sequence
  ENSG00000224812_22 (sequence is synthesized)
gttgcagcaacctccctcttgctgttgaagatactcatctgatgtctattgtgaattggctggagcccttctacaggtttgttagcgtccctctgcatccaggctgatggtgcctgccat

SEQ ID NO: 908002 - DNA, 120 bp, Artificial Sequence
  ENSG00000224812_23 (sequence is synthesized)
gcttctacatgctgttctctgccacccacctgagcccagctagagtcagtggggaagtggaggagccacatcaaaacagtgtgtccacctcagtcaccctccagtgtgcattgacgacca

SEQ ID NO: 908003 - DNA, 120 bp, Artificial Sequence
  ENSG00000224812_24 (sequence is synthesized)
ggcagccattagacccaaatgcagccccacagcatagaggcaaatggaaaggccacatatcctcttttcattctccttccatgtgaggccctgcagagcctggcatctgtcttcatcatc

SEQ ID NO: 908004 - DNA, 120 bp, Artificial Sequence
  ENSG00000224812_25 (sequence is synthesized)
gtggcatcctcagactctttcttcttcctggagcgagctgtgctctctgaagccactgcctgtgtgggaagtaccccagcatttcttcgctgttgccaggcatcccttcctgtcctacca

SEQ ID NO: 908005 - DNA, 120 bp, Artificial Sequence
  ENSG00000224812_26 (sequence is synthesized)
cttcaaatgcatcttttcatgtgtccttcctgagcacctctagcagctgcatgttcctgtttcagcctctgcctttccacagctcctccaagattcctctattgcagagcacagcaccac

SEQ ID NO: 908006 - DNA, 120 bp, Artificial Sequence
  ENSG00000224812_27 (sequence is synthesized)
cttgcaggaaacctcccagaggactgtgaggaccatgaagcaaggggctgcatcttattctccttggtgtctggcccagcagtgggcccaggccagatgccattaagaacattcatgatt

SEQ ID NO: 908007 - DNA, 120 bp, Artificial Sequence
  ENSG00000224812_28 (sequence is synthesized)
tgaagttccagagcagagatgcacattactgtctaccgctgaagtgaactgctgcccctctggagtctggatatcatcagaatgaaaaaggacaaggctcatcccaggaggatccatgat

SEQ ID NO: 908008 - DNA, 120 bp, Artificial Sequence
  ENSG00000224812_29 (sequence is synthesized)
gctttatgaagacagtcccaacagcccatctctgtcatcctccagacgtgccaaggctgaatcatggagcaaacacagcacaggctcaagctgagaccctgccatgtgacctcctagttc

SEQ ID NO: 908009 - DNA, 120 bp, Artificial Sequence
  ENSG00000224812_30 (sequence is synthesized)
tatgaaatacccttcaacaatgcagaattgacaaaccctcccagaacctgatatagatacacatatttattatataagtgtctcagtaaagaaacaattttctgtagtgcttagtagcag

SEQ ID NO: 908010 - DNA, 120 bp, Artificial Sequence
  ENSG00000224812_31 (sequence is synthesized)
acttctgactccataagatgtttctaagtaaaggtttcttggtcaaggaatttggaaaatgctcatagtgtatatgattctaggagactttggaaacacattagtgcattcggaagccct

SEQ ID NO: 908011 - DNA, 120 bp, Artificial Sequence
  ENSG00000224812_32 (sequence is synthesized)
gcagtagtctgccgcatgacttattccagcttatccctacattatggaatgcttttgtcactgaataccttcagaacgcattttgggaaaacttttatatattcgtggcaaccctggaga

SEQ ID NO: 908012 - DNA, 120 bp, Artificial Sequence
  ENSG00000224812_33 (sequence is synthesized)
aaaaacttagaggtaaagttccctctccgagaggccataataaatgtgaaagtgtggaaaagagccctcatcctccacctccaaggctggtgttcttgccaggataccatcctatcagtt

SEQ ID NO: 908013 - DNA, 120 bp, Artificial Sequence
  ENSG00000224812_34 (sequence is synthesized)
ctttctaaaactctcctgtccccagtgcaaatactctcatcatgacaatgcctcacttcagcaggccttctcatggagctgcaggagttctttgcaaagtcccccagccctggtctagga

SEQ ID NO: 908014 - DNA, 120 bp, Artificial Sequence
  ENSG00000224812_35 (sequence is synthesized)
attgggagttgcctcacagatgctttattgttattactggttacatgtgtgatatgtagcatacatatcaactacacctttaaccaataacttttacttattttttatttggagaatgat

SEQ ID NO: 908015 - DNA, 120 bp, Artificial Sequence
  ENSG00000224812_36 (sequence is synthesized)
atatgctcattaaagaaaaattggggaaaaagttggtaaataatgaagaagaaaaattcacttcaacctagaaatagcccagtgaacatgctggtgtcaagggtgtacatacacatatac

SEQ ID NO: 908016 - DNA, 120 bp, Artificial Sequence
  ENSG00000224812_37 (sequence is synthesized)
atgtttgcatgttttgggaacaatttgaaacaatatgcatgtttgttacagttttggaactgtaacaaaaatgcacagttatagttatttatcatgaccttcctgtttttcttgccatga

SEQ ID NO: 908017 - DNA, 85 bp, Artificial Sequence
  ENSG00000224812_38 (sequence is synthesized)
atagttatttatcatgaccttcctgtttttcttgccatgataggttgtgaagatgtttacatatcattaaacactctttgggatc

SEQ ID NO: 908018 - DNA, 75 bp, Artificial Sequence
  ENSG00000224812_39 (sequence is synthesized)
ctcgtaatcctcccgcctcggcctcctcatacttttaatggctgcacaatgctgccttgtatgaacgtgtgatgt

SEQ ID NO: 908019 - DNA, 120 bp, Artificial Sequence
  ENSG00000224812_40 (sequence is synthesized)
taatggctgcacaatgctgccttgtatgaacgtgtgatgtttcactcagccattggtggtagagtcaatgccacaggttctccataccatttcctctctctgagcacttggtaagccttc

SEQ ID NO: 908020 - DNA, 120 bp, Artificial Sequence
  ENSG00000224812_41 (sequence is synthesized)
atttccaaatctcccctgcagttttgagttctggacaatggttgtggacagaagttatggatgccacttctgtgcctggagtatctgtcccctcatcagcaactgttggtgacagaacca

SEQ ID NO: 908021 - DNA, 120 bp, Artificial Sequence
  ENSG00000224812_42 (sequence is synthesized)
cagattgggagcagcctggatctaaagaatcactgcttgggagaactctgcttagacatgtccagactacatcagacattaagtgagaaatgaacctttgtgtgctgagtaccgaaattt

SEQ ID NO: 908022 - DNA, 120 bp, Artificial Sequence
  ENSG00000224812_43 (sequence is synthesized)
cgacgtttacttgttactgctggattgcttagcatacactaacatgtcatcactctagttacatctttgggtttgttttcaatttatattttaaaaatagagcttcagtacacatattaa

SEQ ID NO: 908023 - DNA, 120 bp, Artificial Sequence
  ENSG00000224812_44 (sequence is synthesized)
ggccccagttatcatggagtagagccctttctctgtctacaaaaccaacttcctcgcccagctcatgggaacacttattctgttgtatagaatgaagtgttgcttgattctagaatcaaa

SEQ ID NO: 908024 - DNA, 120 bp, Artificial Sequence
  ENSG00000224812_45 (sequence is synthesized)
gaataaccatcagatcttggcctcatcacaattgttcattgttctgaaaaaaacttttgctaattttataggaagcaaatagcatctcgttatgttaatttgcatgtttttgatctctaa

SEQ ID NO: 908025 - DNA, 120 bp, Artificial Sequence
  ENSG00000224812_46 (sequence is synthesized)
tagggttgaaaacattctttcctaaggtctttccaggaaagagtgtgagtgtgataagaaagctgaagctgcggccataagcatatccccacctctctggcttccatgagtcttctggct

SEQ ID NO: 908026 - DNA, 120 bp, Artificial Sequence
  ENSG00000224812_47 (sequence is synthesized)
ccataaggcttctttaattgagccctacccatgaagaaaggtgccccttgcatctgtcttacaattaattgcctttttaatagcctggaagagtatggctgtgtttatacagaaatgaag

SEQ ID NO: 908027 - DNA, 120 bp, Artificial Sequence
  ENSG00000224812_48 (sequence is synthesized)
agggaagaaggggctccaccagcagcacccagcgagcacccggcatgcctgggattcgagtgcaggcctgtctgattctgtagggaggagaaaatcttctttcctctacccctctaggtt

SEQ ID NO: 908028 - DNA, 120 bp, Artificial Sequence
  ENSG00000224812_49 (sequence is synthesized)
ctctggctggggctctgaaagagactgacaaaggcagattaacgagagaaaaacagacacgagtttattaccacgtgcatcacgcacacccatgggaacgtccgcactttgtcccaggaa

SEQ ID NO: 908029 - DNA, 120 bp, Artificial Sequence
  ENSG00000224812_50 (sequence is synthesized)
acaactttctgagtagaggtggggaaagatgggctaagaggcttctgaggtcatgtgttcaccatcactgaggcactgtgatgtgttaggtgggtctgaaccctctggcttcagagagag

SEQ ID NO: 908030 - DNA, 120 bp, Artificial Sequence
  ENSG00000224812_51 (sequence is synthesized)
aatcattagtatttctcagcaatgaagtatttttgaattagggttcctgggcagtgcagtgggatgtctgcttggtttctgctgatcctcacagagcctggtgacttcttcctcccaggt

SEQ ID NO: 908031 - DNA, 120 bp, Artificial Sequence
  ENSG00000224812_52 (sequence is synthesized)
ctgtggatcaacactgtctccctggcctctacccagcgcgcaggaccccttagcagagcaggagaactcaggatccagccagctgccggcacactttcgtcctcctccgcacacgaggat

SEQ ID NO: 908032 - DNA, 120 bp, Artificial Sequence
  ENSG00000224812_53 (sequence is synthesized)
ccccaggcccagcggtgttagcccagagaggagcggcgtttgggatgtgatccacagctgatccctcgtggcccctcctctcccgaatcctgaaacatgaggaggcccttcagctgctgg

SEQ ID NO: 908033 - DNA, 120 bp, Artificial Sequence
  ENSG00000224812_54 (sequence is synthesized)
ctcggagtccgactatgggaactttctccggtctacgggggcagcaagggtctcgcctcagggacttggtttatttatctagctggactccatcccttaatatcctacttacagaggaag

SEQ ID NO: 908034 - DNA, 120 bp, Artificial Sequence
  ENSG00000224812_55 (sequence is synthesized)
tagcagctaaatgcagccccatcccctcctgtggagactgtgagcagaaaaagaacagatatttacagaggcccgagccccccttgttgttttctgcaaggctgtcgagctggtggagct

SEQ ID NO: 908035 - DNA, 120 bp, Artificial Sequence
  ENSG00000224812_56 (sequence is synthesized)
tcaggatcctggtcaggaaccccgaacccagcgctggaggccctgaagatcagggcacccgaccctcttcccagccgccaaaggcctgtgttggtctgattgtggattccaagctctaat

SEQ ID NO: 908036 - DNA, 120 bp, Artificial Sequence
  ENSG00000224812_57 (sequence is synthesized)
ttccatccatcctcccaatccgaattccctttgcagacataaacaccatcagcaatgtagagaatgtgtttcctcatctttgaatattaacactcatctgtttaattgagctacttttta

SEQ ID NO: 908037 - DNA, 120 bp, Artificial Sequence
  ENSG00000224812_58 (sequence is synthesized)
catacatgtaagatgtgctgcaattgcaaaagaaacatgtgcttcgtgttctataagccatatcttccgcaagacctgccatcaaatgattgctcaaacatttgttgaatgggatgagca

SEQ ID NO: 908038 - DNA, 120 bp, Artificial Sequence
  ENSG00000224812_59 (sequence is synthesized)
atggaggttcagacaggtgccctgacctacccaggctggagggtagggagctagaaattcatacaaccatgccttgttctacttgttttgtgaaagaatcatgtgaccagtgacaaagag

SEQ ID NO: 908039 - DNA, 120 bp, Artificial Sequence
  ENSG00000224812_60 (sequence is synthesized)
gctgggcagctgggtcaggcagcagggacagcgactgagctggggggactacagtgctgtgctcctctgcacccgtgctgggatgtctgaggccaagctgacactggccccccacaatcc

SEQ ID NO: 908040 - DNA, 120 bp, Artificial Sequence
  ENSG00000224812_61 (sequence is synthesized)
cttggggctgctcctcctcagggagtggctctccgggtttcctgcttgactcctgctgctcttgtgttgaagggccgtctctgggcagctccccctggcccctggccagagagccaggcc

SEQ ID NO: 908041 - DNA, 120 bp, Artificial Sequence
  ENSG00000224812_62 (sequence is synthesized)
ctgtcaggcacgcacatggaggatgagggaggtgcagttgttttcacaggtgcagactctagagggaccccacgtggactctgtggcttctgccccgacgcactcgcgggaggacacagc

SEQ ID NO: 908042 - DNA, 120 bp, Artificial Sequence
  ENSG00000224812_63 (sequence is synthesized)
tctgcccggaagggagagtgctgagctgggtccctgctgctcatctctgtggcatcaccctgtcagtccttccctgtcacacatatgttccgcaagacctgccgtcaaatatttgctcag

SEQ ID NO: 908043 - DNA, 120 bp, Artificial Sequence
  ENSG00000224812_64 (sequence is synthesized)
tcaaacatttgttgaatgggatgagccatggaggttcagacagatgccgtgacctgaagtgtcaaatgaagggatgcgtgtgtgatggccttcaccatttatattgttttaaacttgcta

SEQ ID NO: 908044 - DNA, 120 bp, Artificial Sequence
  ENSG00000224812_65 (sequence is synthesized)
actccgcaccggccaatggcaccgccccgtccgccccgctctgggaacgccgggattcttctggacaaggatgtggtcatagaggtcacaggctgagaatcaatggagacacgtggtgct

SEQ ID NO: 908045 - DNA, 120 bp, Artificial Sequence
  ENSG00000224812_66 (sequence is synthesized)
agggctggcgagccaggcctggagctggcaggcgtgaggggctccctggaaaagacgaacccatctcccccacttcgctgtgtcacaccaggtgtccactagagttgccaactgtgacag

SEQ ID NO: 908046 - DNA, 120 bp, Artificial Sequence
  ENSG00000224812_67 (sequence is synthesized)
caccctcagacatagggagtgacagggacgagggaggatgcaaacagctgagactgtggagagccggctcgtttccaggcggtgttgctgccttcgccttgccaatgaggacagtcggac

SEQ ID NO: 908047 - DNA, 120 bp, Artificial Sequence
  ENSG00000224812_68 (sequence is synthesized)
cccagcgcgcaggaccccttagcagagcaggagaactcaggttggaactcattattgcatggtgcttgtcttgccatctgtccccataatgccttaagtgacaatgacataggcatctga

SEQ ID NO: 908048 - DNA, 120 bp, Artificial Sequence
  ENSG00000224812_69 (sequence is synthesized)
caatgtatgtggccatcactttttatcattttaagatatatgggccttctttttccaactcttttcccccgccagacagccaggagcccagagaagggttgtgttgtgtcctttactgag

SEQ ID NO: 908049 - DNA, 120 bp, Artificial Sequence
  ENSG00000224812_70 (sequence is synthesized)
ccccacaggcctgtgtgagccaggggcttggcatgcctgggaataagagcgccagcctttggccttcccgcagcctctccttggggcctttagggtccccacaggccctcccctcccctc

SEQ ID NO: 908050 - DNA, 120 bp, Artificial Sequence
  ENSG00000224812_71 (sequence is synthesized)
ctcgcccggcacggccaaaggtgccgccccggtctctccgtcccgccccgagcacgcccctcactccgcaccggccaatggcaccgccccgtccgccccgctctgggaacgccgcccttt

SEQ ID NO: 908051 - DNA, 120 bp, Artificial Sequence
  ENSG00000224812_72 (sequence is synthesized)
ataaaacttgaacagatgaggagttgcttcttacagcaaccactgccctgattaatcaacagccgtcaacatgtcaacatcaagcctagaccctccaccagaaaaagattacaagtctcc

SEQ ID NO: 908052 - DNA, 120 bp, Artificial Sequence
  ENSG00000224812_73 (sequence is synthesized)
tgtgagtgacatgtctctgttactttggaatattgattgaagaaaaatcacaagagtttctatcttatggcctctttgaatctttgagaattggcaaaacccaaagtcaggacaaggctc

SEQ ID NO: 908053 - DNA, 120 bp, Artificial Sequence
  ENSG00000224812_74 (sequence is synthesized)
tgagatgggatctatttcaggtgaaagtgctgtgaacattgtgaaatgacaacaaaggatgaataattttatataaatgtagattacaataaagtagtgggagtgcttgaggggattgac

SEQ ID NO: 908054 - DNA, 120 bp, Artificial Sequence
  ENSG00000224812_75 (sequence is synthesized)
tccaattttgaaagatgttctaatgtgggtaaaatactatcaaacagcatcacatgctacagggaaatctttcatgaaagagtcaatggatgtagtaaacctcattgttgtcttatttta

SEQ ID NO: 908055 - DNA, 120 bp, Artificial Sequence
  ENSG00000224812_76 (sequence is synthesized)
tcggataatcattagtatttctcagcaatgaagtatttttgaattagggtatgtgcactgcttttttagacataatgctattgtacacttcatagactatagtatactataaacataact

SEQ ID NO: 908056 - DNA, 120 bp, Artificial Sequence
  ENSG00000224812_77 (sequence is synthesized)
ggtattcagtgggaaacaaaaaacatgtgacacacttgattgtgatatttgcagtatttgcagacagtagtttgtcactgaacccgcaatgtctccaaggtatgcttgtatgtaactaga

SEQ ID NO: 908057 - DNA, 120 bp, Artificial Sequence
  ENSG00000224812_78 (sequence is synthesized)
ggttttttcagtgggatagactcaataagccaattgcatatccataatcaattaaatattttcttttgtttgacttccctgtttgtattatagaaatctccttcttgcattcctttgatg

SEQ ID NO: 908058 - DNA, 120 bp, Artificial Sequence
  ENSG00000224812_79 (sequence is synthesized)
gaactcacaaaccacttcctctttggagctgcctaattcatgaatccctgtttgctcaaactctttaaaaattttactgtgctttggtttacctttttaaccctgcaatgtgtatcaaag

SEQ ID NO: 908059 - DNA, 120 bp, Artificial Sequence
  ENSG00000224812_80 (sequence is synthesized)
ggtgcttagcacatagtgaatggagatattagtagttcttctctgatgctttccaagttcggcgaaatcttgaggctctccactcacatttgcaaatgctaaacgctcctgtggtggaga

SEQ ID NO: 908060 - DNA, 120 bp, Artificial Sequence
  ENSG00000224812_81 (sequence is synthesized)
gagcaggggggctggtgtgtggacaccctctgaggtgttctcactggccactggctccttttgttgtctccctttcaattcagtaccagaacatcccttcaccggcaactttcgagtggg

SEQ ID NO: 908061 - DNA, 120 bp, Artificial Sequence
  ENSG00000224812_82 (sequence is synthesized)
cctgctgaaacaatcaaggcagtgcctccacttaactttgagaaggtagtgtgtgagagatttagaataagcagctctggaactactcccagtttactcttataattacatacacaaaaa

SEQ ID NO: 908062 - DNA, 120 bp, Artificial Sequence
  ENSG00000224812_83 (sequence is synthesized)
aatcaaaacctcagtttatttgtccaaaaatggggatagtattcttgtcctacatgatgagtgtactaatccttccagccagcattcacctggggctctgtgctccaggcagggtgaggg

SEQ ID NO: 908063 - DNA, 120 bp, Artificial Sequence
  ENSG00000224812_84 (sequence is synthesized)
ttaggactgcatgtaggtgctgccttcacacccggagcaggctggagcgagtggtgtgaagcctcccaaccccacggctgggggcaaaggctgtgctaaggcacccggacatggagctgg

SEQ ID NO: 908064 - DNA, 120 bp, Artificial Sequence
  ENSG00000224812_85 (sequence is synthesized)
cctggcctgaggactcagagtggaaagacaggaaagacactggctgcgctgaagcgctgggacccgggaaggggcgtctaggcaagagcgcctgtgaacaggatttgtaagctgctcttg

SEQ ID NO: 908065 - DNA, 120 bp, Artificial Sequence
  ENSG00000224814_0 (sequence is synthesized)
agctcactggaaccttgaactcctgggctcaaataatcctcccacctcagccttccgagtagttaggtctacaggcacacgctaccatgtccagctaggtttttactttctgtagtgaag

SEQ ID NO: 908066 - DNA, 85 bp, Artificial Sequence
  ENSG00000224814_1 (sequence is synthesized)
gctcaagctatcctcctgcttcggccccgtcagccagttgcatcaattctattaaatgcagaagttgatacctccaatgaagacc

SEQ ID NO: 908067 - DNA, 120 bp, Artificial Sequence
  ENSG00000224814_2 (sequence is synthesized)
atattcaagcacaaagtcatatcttaacagccaaacagagaccttctgatataaggtgattatatccacatctctcttgaggacagctgatgcgagttcttcatactttgaaaacagaca

SEQ ID NO: 908068 - DNA, 120 bp, Artificial Sequence
  ENSG00000224814_3 (sequence is synthesized)
ataaaatagatagggctccaacaaattaacaaggaagttggccactcgttgggaaaaagtcatgtggtctgaaaactttgtgtagcacctgggaatgtaggacacagggtctgggcttct

SEQ ID NO: 908069 - DNA, 120 bp, Artificial Sequence
  ENSG00000224814_4 (sequence is synthesized)
gctgaatgtatgctccagggaacacggaaaacccctgaagaggtacacagatggtaggcccaaatactcagccaggatcaccccacagggtaaggctgggtctgtgaaaagagcatcaaa

SEQ ID NO: 908070 - DNA, 69 bp, Artificial Sequence
  ENSG00000224817_0 (sequence is synthesized)
gagtagctgggactacaggcgcccgccattacgcccggctaattttatttttgtctcctgacctcgtga

SEQ ID NO: 908071 - DNA, 120 bp, Artificial Sequence
  ENSG00000224817_1 (sequence is synthesized)
ggcctcccaaagtgctgggattacaaaatgcgtgagccaccacgcccggctgatggttttattaatataagggactttaaccctttgctcaggacttctacttgctgctgccatgtgaag

SEQ ID NO: 908072 - DNA, 79 bp, Artificial Sequence
  ENSG00000224817_2 (sequence is synthesized)
aaaagcaattttgttaatcactttagcaccaattcttgcatccctggcaatactcagaactgcttccatccaagtcttt

SEQ ID NO: 908073 - DNA, 120 bp, Artificial Sequence
  ENSG00000224817_3 (sequence is synthesized)
agaactgcttccatccaagtctttgatgtgggaaagaaacacacacacactctttcgcatgtaatctgaaaacaattcacctcttgccaatgaatgcacagcactccactttaatagaga

SEQ ID NO: 908074 - DNA, 120 bp, Artificial Sequence
  ENSG00000224817_4 (sequence is synthesized)
gcaagttctgtggaggtttctaatcctttctgccaaagaagagaagagagagaatcactcaggatcccatccagaatacattacctttagtcatcatgtctcctgtggctcttcttggct

SEQ ID NO: 908075 - DNA, 120 bp, Artificial Sequence
  ENSG00000224817_5 (sequence is synthesized)
gtgacagtttctcagctttcccagttttaatgaacttgccattttcatcagattgtaccaagacctactatcaatatgacttatgactagtggtgctgaccttgatcacctggctgaggt

SEQ ID NO: 908076 - DNA, 120 bp, Artificial Sequence
  ENSG00000224817_6 (sequence is synthesized)
agttcttgtcaggcttctccactgtcgagttgctctccccatcccccttttccatattgtactctttgaaagaaagtcactatatgcagcccttccttaaaaatattaaaatgaactagc

SEQ ID NO: 908077 - DNA, 120 bp, Artificial Sequence
  ENSG00000224819_0 (sequence is synthesized)
acacacaagcctaaaagatgaacgatacggtgtttatacttctccctaggaagagccataggccttgggccccatcaaggactcttcagtgtttgaattttaagatttgcctccagtatg

SEQ ID NO: 908078 - DNA, 120 bp, Artificial Sequence
  ENSG00000224819_1 (sequence is synthesized)
aaacgagaggactttgccttcactactcagcttgaagaaagaggaagagatttatttggggtggagaatgtgaagccatcccagtgactgcctcttccacaaattgtctttctgttccaa

SEQ ID NO: 908079 - DNA, 120 bp, Artificial Sequence
  ENSG00000224819_2 (sequence is synthesized)
acctgagctagtaaggagaagccaagcaagagagagatttgcctcatccccactggttaaatagtttgctcataaaaaatttcggaaatatatttattaaggataactatgtgcaacagt

SEQ ID NO: 908080 - DNA, 120 bp, Artificial Sequence
  ENSG00000224819_3 (sequence is synthesized)
ttctaaaatgtcatttgggatgttgcatgagtgatcaatgttagggtggcatgaaaatcctgaactgtagctagcaggctttagcagctgaaggcattttgtttaatactgtaaatacag

SEQ ID NO: 908081 - DNA, 120 bp, Artificial Sequence
  ENSG00000224819_4 (sequence is synthesized)
gagacctaaagcttggtctatgtgcttctgccactcacgtctgagccatagaaaaatgttacaactttacaaagtgactgtgaatttaagttaaaccctctgacaacaaattggaggaca

SEQ ID NO: 908082 - DNA, 120 bp, Artificial Sequence
  ENSG00000224819_5 (sequence is synthesized)
cacaagcctaaaagatgaacgatacggtgtttatacttctccctaggaagagccataggccttgggccccatcaagggtctctcctggagtttcagtcaagaagtcagcttgactggctc

SEQ ID NO: 908083 - DNA, 120 bp, Artificial Sequence
  ENSG00000224819_6 (sequence is synthesized)
tggaatattggcttccacactggctccttgcatggctggcaggctgatgctggctactgatggcaggcctcagtttctctctacacaacccatggctgcttggatgtcttcccatgcaac

SEQ ID NO: 908084 - DNA, 120 bp, Artificial Sequence
  ENSG00000224819_7 (sequence is synthesized)
tctacagaactgacactcgagattagtgatgccatttcctgtatcaaaaattcaaaatcatgaaagtcacgatgactcatgacagagcaggacattgtgacgtggctcatctggtactaa

SEQ ID NO: 908085 - DNA, 120 bp, Artificial Sequence
  ENSG00000224819_8 (sequence is synthesized)
caagtaaaaaacaggtctcaattttaggaaaaacgtaattcattctacaactgacttggcttggccattcctatcataagatgtgaaagaagagctggaaagcacatctggttacctatt

SEQ ID NO: 908086 - DNA, 120 bp, Artificial Sequence
  ENSG00000224819_9 (sequence is synthesized)
ctaatgggtgcagaaatggatctaacaggaaggggaagccatataatactccccaggaatgtttaaaagaggattcttcaggctttcatggaaaacaggagttttaaggggacatcctag

SEQ ID NO: 908087 - DNA, 120 bp, Artificial Sequence
  ENSG00000224819_10 (sequence is synthesized)
aagactctgtctcaaaaaaaaaagaaaaatcagaaggagagtctgaggaaagacacatagcaccttccctggtaatgagttctgtgaaattctgtgcttttaaagctcactgtcacatct

SEQ ID NO: 908088 - DNA, 120 bp, Artificial Sequence
  ENSG00000224819_11 (sequence is synthesized)
tcacatctttcatttatgaaatctctgtaagaatccaggatccaagtcatttgttttagaaattcattaattggcctttcagagccaagacaacaagtatggccaaagaatcatttctga

SEQ ID NO: 908089 - DNA, 120 bp, Artificial Sequence
  ENSG00000224819_12 (sequence is synthesized)
tgagatcagtaatagcaaatctgaagcaatctcattttagaaaatatctaaatgggtctcactcatcaatgtgtttcagattctttcacggcttcaaatataatggacagagctgggttt

SEQ ID NO: 908090 - DNA, 120 bp, Artificial Sequence
  ENSG00000224819_13 (sequence is synthesized)
ctttgagatagcatttcagtgaaacactttttaattcattttacacagctcttattagatttgtaagaggatacacactgaataagcactccatggtcacttgagaggagagtagttacg

SEQ ID NO: 908091 - DNA, 120 bp, Artificial Sequence
  ENSG00000224819_14 (sequence is synthesized)
tgactcatttaacaggcaattacctgtttaaaaagagacaaatatcctgtgtctgacagaggctatgactgcatgacatgaaccaaatgtttgagactattgaaaaatcctacaatgaag

SEQ ID NO: 908092 - DNA, 120 bp, Artificial Sequence
  ENSG00000224819_15 (sequence is synthesized)
gggattctgggctcctatacagaattcactgaccttcaactagtaaaaaatagatgcttgatggaactgttacgaatctcgccatcttaatcatggtaatggttacacagagctacacgt

SEQ ID NO: 908093 - DNA, 120 bp, Artificial Sequence
  ENSG00000224819_16 (sequence is synthesized)
gtgataaaaacgcataaaaatacacacacacatacgagaatgcacataaaactagtaaaatctgaataaggttggtgaattgtgtcaatgtcagtgttctggttgtgatattatactgca

SEQ ID NO: 908094 - DNA, 120 bp, Artificial Sequence
  ENSG00000224819_17 (sequence is synthesized)
atgttaaaagagtttaccattaggggaaagtgggtgaggagtatacagtctctctatatattatatcttacactgcatgtgaatctacaattatctcaagataaaaattcacaaaaccta

SEQ ID NO: 908095 - DNA, 120 bp, Artificial Sequence
  ENSG00000224819_18 (sequence is synthesized)
gcagtttttgactgcatctattgatgcggtatcacccactctaccagatggcttactgtcatcatcccacttatatgtactgtgagataagggtgtggctcttacttctgggcaggtggg

SEQ ID NO: 908096 - DNA, 120 bp, Artificial Sequence
  ENSG00000224819_19 (sequence is synthesized)
cttcacatggaagagcagcttctaaaagactcgtgtgtttcagaatagtattgctgatgctggaatttaggttaagatgtaattcttttttctccctattctcatgcatgctttggaatt

SEQ ID NO: 908097 - DNA, 120 bp, Artificial Sequence
  ENSG00000224819_20 (sequence is synthesized)
tgacatcaagagagttggcatggcaccctgcctttgtttcctatactatatatgctgatggttttgtttagctctggatcagtttgatagagatattagagatggtcacctgacagacag

SEQ ID NO: 908098 - DNA, 120 bp, Artificial Sequence
  ENSG00000224819_21 (sequence is synthesized)
gttattggattcttctgagagtatatttgtgaattgcattaatggtttctttctgtgccctttgccatgtaactttgtagacatccatctacaaatagggctttgtttctaccccttgac

SEQ ID NO: 908099 - DNA, 120 bp, Artificial Sequence
  ENSG00000224819_22 (sequence is synthesized)
tctgggcttggcctcgtgcttgtttggggtaatgttagcagacatgagcaagcagagacttgaaaatcatttgtgcggttgagctttcccttttggacttagaacatcgccaggacaaga

SEQ ID NO: 908100 - DNA, 120 bp, Artificial Sequence
  ENSG00000224819_23 (sequence is synthesized)
atgtgcctggagtagcctatcctttagcaggaggacgatgaaagaaaggtggagcagagctgcccaattaaactgcaccagcaaaagttcagcctgaagcagagtccctggttgacccac

SEQ ID NO: 908101 - DNA, 120 bp, Artificial Sequence
  ENSG00000224819_24 (sequence is synthesized)
agacttataataagcccagtccaaagtagctgccccacggacacatgaattctaattgttgattgttgtttgaaaccatagggttttgaggtgattttatatgcaggagtagttggtaat

SEQ ID NO: 908102 - DNA, 120 bp, Artificial Sequence
  ENSG00000224819_25 (sequence is synthesized)
cattataattgtgaaggatggccttttggatttcagataggcgacggggatctgaaagatcgaaatagaagggcagtgtgtgtggtgggggacatctgttaattctccacacttgtagga

SEQ ID NO: 908103 - DNA, 120 bp, Artificial Sequence
  ENSG00000224819_26 (sequence is synthesized)
actagaataccaaacggcaaccgagttacagaaaatggacagctacccattattacagtgtaggagataaggtctccttaggtcatgaagttaaactgatgctcagatacctgagctttt

SEQ ID NO: 908104 - DNA, 120 bp, Artificial Sequence
  ENSG00000224819_27 (sequence is synthesized)
taattaagttcatttgaacaaagaccaagtggggttgaaccagcaacaacgaattaagtggcctaaactattaggtctatggagaaagaaatcaagcagtatgttgaggttagatctaga

SEQ ID NO: 908105 - DNA, 120 bp, Artificial Sequence
  ENSG00000224819_28 (sequence is synthesized)
tcaggaggtagaattttttttgtgaaggtccagatagcaaatattttacactttgtgggctctacactctctatcacaacttttcaacattcaacattgctaacatgcaaataaatgtga

SEQ ID NO: 908106 - DNA, 120 bp, Artificial Sequence
  ENSG00000224819_29 (sequence is synthesized)
ttgactacattcaataaaattttatttacaaaaacatagagtgtctggaattggcccacaggttatagtttgctcacttctcatctagattcttgtaataatattgtattattgaataaa

SEQ ID NO: 908107 - DNA, 120 bp, Artificial Sequence
  ENSG00000224819_30 (sequence is synthesized)
acatttaaaactaaatatttgtgagaaatttaaggtaaaaatggtaaatatgtggcatgtatactcaaagttctccctttgagccaacaatagacatcacagtctttcctggaattattt

SEQ ID NO: 908108 - DNA, 120 bp, Artificial Sequence
  ENSG00000224819_31 (sequence is synthesized)
ctcccagattggaaatgtcctctgaattcttcatgtctcagcaatccagacagtctttaccaatttgtcatagcttgtaagctacataaaggaaaataataataaccacaactcaaaggc

SEQ ID NO: 908109 - DNA, 120 bp, Artificial Sequence
  ENSG00000224819_32 (sequence is synthesized)
ttctcttttatcagccatagaaaaatgttacaactttacaaagtgactgtgaatttaagttaaaccctctgacaacaaattggaggtaagtgtaatagaataataataaaaacattgaaa

SEQ ID NO: 908110 - DNA, 120 bp, Artificial Sequence
  ENSG00000224819_33 (sequence is synthesized)
ttataagaatttcttaatgttattttatgtcaaagcatttgcttttgatgtatacatatttgcttttgatatatacatatttgcttttgaagctgtgaaacttggattgaagatacagta

SEQ ID NO: 908111 - DNA, 120 bp, Artificial Sequence
  ENSG00000224819_34 (sequence is synthesized)
gggaacatgaagacccatactagggatcatctggttaaggtggagagtagagttgtaaaaaagtagggacattggaggtggagtgaggaaagagttgtttgtaaaattagataggttcct

SEQ ID NO: 908112 - DNA, 120 bp, Artificial Sequence
  ENSG00000224819_35 (sequence is synthesized)
tggtgtgatgctccatgaatgtagctacaccatgtgtctgtggacagtgagatatgatgatgagacagattggataagaattttggtaactaattccctaaactcagtggaggtgaatgt

SEQ ID NO: 908113 - DNA, 120 bp, Artificial Sequence
  ENSG00000224819_36 (sequence is synthesized)
agtctttgccacagagctgtgatggctgcagatggaagaaggtttgaagaaaaacagtgaacactgcaagctattttgaggaaatctgtcaaaattgaaaagtattttctcctcagtggt

SEQ ID NO: 908114 - DNA, 120 bp, Artificial Sequence
  ENSG00000224819_37 (sequence is synthesized)
ccaacataagtccaatatggattattgatcatggttttggtaatttcacttgaactgagcctaaataatcaggcacgtgctgtgctgagtactgccaaggttgtttaattgcaaaatcaa

SEQ ID NO: 908115 - DNA, 120 bp, Artificial Sequence
  ENSG00000224819_38 (sequence is synthesized)
ttccaaggcactgtacctcctagccaaagcctctttgctaatcaggcctgaatgcattggatgggggtagccaataagatgcaacactggccttctgttataacaatgggatttcctttt

SEQ ID NO: 908116 - DNA, 120 bp, Artificial Sequence
  ENSG00000224819_39 (sequence is synthesized)
tacagttctttatggggccctcatcccttggtaatggcttgtgaacagtttgaactcctcaggcaattcttgaataatcttttcccccacacagccataaagaaggccagcctggaaact

SEQ ID NO: 908117 - DNA, 120 bp, Artificial Sequence
  ENSG00000224819_40 (sequence is synthesized)
tgtatcacatgatttgatcagtctgctgagagggctggagagttctcttgatatgacacttgtgaagtggtaataaagctgggtcggatccacagtggcaggtggctcaggcatcagcaa

SEQ ID NO: 908118 - DNA, 120 bp, Artificial Sequence
  ENSG00000224819_41 (sequence is synthesized)
tgagtagagttattctttggagagggtccccccaaagccttggaagaagtaaaaattgtagggctatgactttggagtgagcccataaaactttctaattcttgccaaaacagaaaggat

SEQ ID NO: 908119 - DNA, 120 bp, Artificial Sequence
  ENSG00000224819_42 (sequence is synthesized)
tttaaaatgtcaagttggatgtgattcctcttgaagcaggacttacagttgccctggagtcacagggggttgggctgaggacaactttgacttaatttgcattttcccagccttagtccg

SEQ ID NO: 908120 - DNA, 120 bp, Artificial Sequence
  ENSG00000224819_43 (sequence is synthesized)
ttttcacactgctgtaaagataccacctgagattgggtaatttacaaaaacagaagacatttaatttactcacagttctgcatggctagagaggcctcaggaaacctacaatcatggcag

SEQ ID NO: 908121 - DNA, 120 bp, Artificial Sequence
  ENSG00000224819_44 (sequence is synthesized)
aaggtgaaggggaagaaaggcatgtcttacctggtggcacaagagagagagatgtgggcaaaactgccatttttaaaccatcagatctcatgagaactccctcagtatcacgagaacagc

SEQ ID NO: 908122 - DNA, 120 bp, Artificial Sequence
  ENSG00000224819_45 (sequence is synthesized)
atggtggaaaccaccctaatcgcctctctcccaccaggttcctccctcgacacatggggattacaatttgagatgagacttgagtgggaacacagactcaaaccatgtcaccaacctatg

SEQ ID NO: 908123 - DNA, 120 bp, Artificial Sequence
  ENSG00000224819_46 (sequence is synthesized)
ccctactgaaagacgggtattctgagatcaagtgacactaatcatcctgagctgagatttcccagtattcctctctacctccactcttcctttgacacctctctgaccactcctcaaccg

SEQ ID NO: 908124 - DNA, 120 bp, Artificial Sequence
  ENSG00000224819_47 (sequence is synthesized)
ccaacccccatgcacatcttcgatcatgagaaaaaaaaagaagacgggacctctcctctttatcttgtttttgtgttccagactcagagtctcttgtccaaaatggttggtcagacaact

SEQ ID NO: 908125 - DNA, 120 bp, Artificial Sequence
  ENSG00000224819_48 (sequence is synthesized)
cagagtctcttgtccaaaatggttggtcagacaacttatgagtgaagctgaatctaacagtgtcaagtgtctataaattgttacgctctcagcagatcacaaggtcaagagatcgagacc

SEQ ID NO: 908126 - DNA, 120 bp, Artificial Sequence
  ENSG00000224819_49 (sequence is synthesized)
agtgagactccgtctcaaaaaaaaaaaattgttacgctctcttgtccactaaatctcaggtagaaaatatctgtcaaaagtatagataccctcagtatgtcaaaacatgaagtttctaga

SEQ ID NO: 908127 - DNA, 120 bp, Artificial Sequence
  ENSG00000224819_50 (sequence is synthesized)
atgtcaaaacatgaagtttctagacacaaactccattgacccaattcctaaaattcttccaaaattcttctcttcactctgaatcccctgagggggataaagatgagaggggtgttcaag

SEQ ID NO: 908128 - DNA, 120 bp, Artificial Sequence
  ENSG00000224819_51 (sequence is synthesized)
actatggggccaagaggtagggaagggataaaaaatgttgtaagaccttgaatgtgtgaggcttctgaaggagtctttgcaagacaagagttggtttttatttgccataaaggatttcag

SEQ ID NO: 908129 - DNA, 120 bp, Artificial Sequence
  ENSG00000224819_52 (sequence is synthesized)
taatgctgctcctcatgtgactcatgcacttgtagactggccagctaacaacacatttgtttacagaaaagtgatgaaatatggaaagtatcactgctaattgtatttctattgtacccc

SEQ ID NO: 908130 - DNA, 120 bp, Artificial Sequence
  ENSG00000224819_53 (sequence is synthesized)
tttcattttctttccggactagaagctctggagctttcttcattcttttattaagaacaaaatgaccagcaggagaacaatgtgaaattcactgagacctgaatgaaatgcaagaaaata

SEQ ID NO: 908131 - DNA, 120 bp, Artificial Sequence
  ENSG00000224819_54 (sequence is synthesized)
ttattatgaaatggtctacctaattaataatgttggtaaattgaacttcagtgtctggttgacagctgacttaatataacctaaataggaagacaataaaactcatctagggaaactcat

SEQ ID NO: 908132 - DNA, 120 bp, Artificial Sequence
  ENSG00000224819_55 (sequence is synthesized)
tttaaagtttattaatgttgttttcctcagtctgtacgcctgctggcaaatcattttattttcagtgatagagtcctgcagaaccccattataggctgtatgacctacattatggtcctt

SEQ ID NO: 908133 - DNA, 120 bp, Artificial Sequence
  ENSG00000224819_56 (sequence is synthesized)
ctgtgttagagtgggagtgacagacagtccatccccatctggaaatatcatttaatgcatgctatgactgattagatggaacaacctctttctacataatgaagtttactacagagaaat

SEQ ID NO: 908134 - DNA, 120 bp, Artificial Sequence
  ENSG00000224819_57 (sequence is synthesized)
ttacaggaaaaatattcagtaaacactaaaataccaaatatttgcatctctatcaatgatcatctggtctctctccctaaaatcctataactgtacattttaacatagctgtaaacacag

SEQ ID NO: 908135 - DNA, 120 bp, Artificial Sequence
  ENSG00000224819_58 (sequence is synthesized)
tgtgtgcacgcggttttgtgtttttactttcttcacctaacatatcgcatgcatatttccataatggaatacacaatacagttttaaagcccacagacggtttaacatattgatgtattt

SEQ ID NO: 908136 - DNA, 120 bp, Artificial Sequence
  ENSG00000224819_59 (sequence is synthesized)
cagagcaggtgtgatgaaagagcacctggttcccttagaatcacagaagtaaagaagtagttgggattcatcagagcatgctgtgccagcttctcagatgagtgtatccttgaataccca

SEQ ID NO: 908137 - DNA, 120 bp, Artificial Sequence
  ENSG00000224819_60 (sequence is synthesized)
gtatccagagcttctctctgcatccctttgacttttaccagtaaggctcttttccctttactcagaatgagcatgccaacctttttccattttttttccaagtcttgctagtaacctttt

SEQ ID NO: 908138 - DNA, 120 bp, Artificial Sequence
  ENSG00000224819_61 (sequence is synthesized)
gtggaacccaccagctaactcttctgagaagagagaaactagagctgtctattgcaactctctcatctttctactctggtctacaaaggcttctgcaatcctactcaacatttcttttct

SEQ ID NO: 908139 - DNA, 120 bp, Artificial Sequence
  ENSG00000224819_62 (sequence is synthesized)
cggtacattttctcagtggaaaacatttctgccttcaatccaagactaaattctctgcctgtgtccctgggcttctgtgatgagtattctctctccctagaactcccttttctcactgcc

SEQ ID NO: 908140 - DNA, 120 bp, Artificial Sequence
  ENSG00000224819_63 (sequence is synthesized)
cttgtaatggaactcagctccagtcttgcctcctctaagtagggtgtcttctctttttctgggcaccattacacactcaggaacctcaaaggaatgcaaacccatggcagcgatttcatc

SEQ ID NO: 908141 - DNA, 120 bp, Artificial Sequence
  ENSG00000224819_64 (sequence is synthesized)
tcccctagcatgttaggttggtgtcctcattagaactattatgccctcaaatgaggaagcttatcttatttgacagatggatatttgtctgaaattttccatatttgttttaatacttat

SEQ ID NO: 908142 - DNA, 120 bp, Artificial Sequence
  ENSG00000224819_65 (sequence is synthesized)
taaaagtgtgataaatctttattgaggaaagttcagaaaacagaaacctataagaacatacaaataattactgatgtcccacttcagaaatggttactcttcagttgtgtaaatttccct

SEQ ID NO: 908143 - DNA, 120 bp, Artificial Sequence
  ENSG00000224819_66 (sequence is synthesized)
ctagtcattttctttaccaaatttatagaaataacattccattttacatttgtaaaatgtttataatttatatctttctttccggctcaacattatattataagcagtagttcacagcat

SEQ ID NO: 908144 - DNA, 120 bp, Artificial Sequence
  ENSG00000224819_67 (sequence is synthesized)
taaaaggccttcaaatatataatatttattcctataacttatttaacctttccagaaatgttttttgttgctgttgcaaatttctacatatatataaagttatggtaaaaaaatttttat

SEQ ID NO: 908145 - DNA, 83 bp, Artificial Sequence
  ENSG00000224818_0 (sequence is synthesized)
tggagggttaaaaggaataatttcaacagggtgaaggcctggcacggtggctcacaactgtaatccaaggactttgggaggct

SEQ ID NO: 908146 - DNA, 120 bp, Artificial Sequence
  ENSG00000224818_1 (sequence is synthesized)
agcctaggtgacaaagcagcaagacgcagtctcaaaacaacaacaacaaaaaaaacgggaaaacaggtacagacaatagctgcctggagttgtacagaaacttgattgggtaaccctgga

SEQ ID NO: 908147 - DNA, 120 bp, Artificial Sequence
  ENSG00000224818_2 (sequence is synthesized)
ggaggctcagtggccccattcagcaattcgaagtccctttaattgttttgtgcttccaacctgttttgttcccgttcagatttctctcgccttccaataaaaacttccctgtcctgtgcc

SEQ ID NO: 908148 - DNA, 120 bp, Artificial Sequence
  ENSG00000224818_3 (sequence is synthesized)
ccagtccctcagagtccacaagaggttcaacttgctcatctgatgtgtgaattacatcacacagttgaatgagaatttgttaattacaacagaacttttataaatatgtcacttactgta

SEQ ID NO: 908149 - DNA, 120 bp, Artificial Sequence
  ENSG00000236394_0 (sequence is synthesized)
cagggacttttccctggggcacaagtttcccaggctcagggagaggaagctcctctgcaagaggagctccctagagtccctcttccttcctcccctcttccttcctcctctgtctccttc

SEQ ID NO: 908150 - DNA, 120 bp, Artificial Sequence
  ENSG00000236394_1 (sequence is synthesized)
cagctcctctgacggcagcccaacctgaggatgcaggaggcagggccccaggtgaagaaggtccaccgaggctggccgtgggcctcagagccagctcctgccccagcatcctggatccac

SEQ ID NO: 908151 - DNA, 120 bp, Artificial Sequence
  ENSG00000236394_2 (sequence is synthesized)
gcatcaacaggtcagcgcgtgcaccgccacatggccgtcctgcagggccgcagagctccctgcttctgactccccatcaggctgggggacttggctctccaccccacccccctacaagcc

SEQ ID NO: 908152 - DNA, 120 bp, Artificial Sequence
  ENSG00000236394_3 (sequence is synthesized)
caataaagggttaaaggggccgaccaggaggtccctgggcctgctggagtggagatccaggctagcctgctccaaccttttgaggaccggccagggctgctccggtcaagccctcctgtc

SEQ ID NO: 908153 - DNA, 120 bp, Artificial Sequence
  ENSG00000236390_0 (sequence is synthesized)
gctcacagaaaatcaagtgaagggaggattgaggccttggcttgctgtggggcatctgggcacctggacacctgggctggccacctgccaggcctggcagcgaggtcttagagcagtggc

SEQ ID NO: 908154 - DNA, 120 bp, Artificial Sequence
  ENSG00000236390_1 (sequence is synthesized)
tggcgcagtccccaacaggactgagaaatgttggcttaggctttcctagtctttggttgccgcttcaaggcactgactgggccctaccttcagatgaagcaccttctccatgactgctgc

SEQ ID NO: 908155 - DNA, 120 bp, Artificial Sequence
  ENSG00000236390_2 (sequence is synthesized)
cagaaatgaaatctgataagtgtgtgcctcccacgaccatcccttatagacgcactctcgctctgctcgtagatgccgcggcccatctgtggggcctgcctgcccacgggccggaagtgt

SEQ ID NO: 908156 - DNA, 120 bp, Artificial Sequence
  ENSG00000236390_3 (sequence is synthesized)
tggactcaaaagcaatccatcaaatgcggagacacatttgcactgtgttctgaaatacatttttaacttttattgcattctcacagagcctaaaacaataaattcattaaagaacagcaa

SEQ ID NO: 908157 - DNA, 120 bp, Artificial Sequence
  ENSG00000236393_0 (sequence is synthesized)
agcctttgatggggagagtctgagatgggacccaggaacatcaccatgaagctgtccaggatggatgtgggaccctctgtcagaccaggccagttctcttaatgtaagatcagcaggcca

SEQ ID NO: 908158 - DNA, 120 bp, Artificial Sequence
  ENSG00000236393_1 (sequence is synthesized)
aggtcctgggatatgggagctcccaggaagtggactgggatgcctgagggatccaagaattagcagtgtcctgtgtggtctcgctgagggaagccaggcaaaatctagcggctcagctgt

SEQ ID NO: 908159 - DNA, 120 bp, Artificial Sequence
  ENSG00000236393_2 (sequence is synthesized)
aacagccggagctcttggctcccaagcaacaggaaacaattctggcttatttaagcagaaaaggactttatcaaaaggatcttggggaactcacaaaataaccaagagggctgaagaata

SEQ ID NO: 908160 - DNA, 120 bp, Artificial Sequence
  ENSG00000236393_3 (sequence is synthesized)
cagttggtgagtcgaccaaggaggctgcacagcagtcaggaccacagccaaagtcaggcaatccagggatgacctcgctgccaaatccaggactccctggcatacactgccaccttggga

SEQ ID NO: 908161 - DNA, 120 bp, Artificial Sequence
  ENSG00000236393_4 (sequence is synthesized)
cgtggatatggtccctgtcgccccaggaactggaatgccattgacttggcgactgccaccatccaccagaatggacttctgtgctccttgcatctctgtattattagttcccaactccaa

SEQ ID NO: 908162 - DNA, 120 bp, Artificial Sequence
  ENSG00000236393_5 (sequence is synthesized)
gcctttgatgggggcatctgatggattgagcctaaggattctgatggtgcctgttggctgcttccgtgatgtctggagttgcaaaatgtgccagaaagcagaaggatacaccgctattca

SEQ ID NO: 908163 - DNA, 120 bp, Artificial Sequence
  ENSG00000236393_6 (sequence is synthesized)
gagaggattttcttagggacttgaagaaattgacctcaaaatttcagtagatgagaggactgtggctggcctgtgtctttggcactggttgttggagcccaatgaaaaattctacattga

SEQ ID NO: 908164 - DNA, 120 bp, Artificial Sequence
  ENSG00000236393_7 (sequence is synthesized)
agactaagggaaaaagaggtttcattatagagctgggactgattgcattttcaaaaggtggctgcaacaatatcccacacacttttctgctgtataatctgccacttctccatcaagtag

SEQ ID NO: 908165 - DNA, 120 bp, Artificial Sequence
  ENSG00000236393_8 (sequence is synthesized)
aggagacaatttctcccctcctttgaatctgagtgagttctgtgactgttttgactgatagaatgatgtggaagacagactgtgtgacctgaaaggtgaggtcacagaaagccttgcaac

SEQ ID NO: 908166 - DNA, 120 bp, Artificial Sequence
  ENSG00000236393_9 (sequence is synthesized)
ttccacctggcctgtgaagaacacttgctcttgggatactccttcttggaacccagccaccatgctgtaagaagcccaatctacatgcagacaccacatataaggcatcgtagtcaacag

SEQ ID NO: 908167 - DNA, 120 bp, Artificial Sequence
  ENSG00000236393_10 (sequence is synthesized)
ccacagttaagttcccagccggcagccaacatcaactaccagtcttgtgagtgagctatcttggacatccagcttggttaaaccttcagatgactccagccccagctgacacctgactgc

SEQ ID NO: 908168 - DNA, 120 bp, Artificial Sequence
  ENSG00000236393_11 (sequence is synthesized)
aaccacatgagaaaccaggaatgaaaatccaccagctgagcccagtcaactcatagaactgtgagagataataataagttgtggtactaagccactaggattggggcaccatgcaataat

SEQ ID NO: 908169 - DNA, 120 bp, Artificial Sequence
  ENSG00000236393_12 (sequence is synthesized)
aggtaaccaagacagtagcaactttggttagacacatgagccatgggatgacacataattaggtatatttttaaaaacttggattcagctttagggcaatgtgtccctaacatagagagg

SEQ ID NO: 908170 - DNA, 120 bp, Artificial Sequence
  ENSG00000236393_13 (sequence is synthesized)
cactatttcagttcacatctgctgcctctgatcaaaacactctcttgcacttccagagagagagagagagagagcaaatgtgtgtatttactgacaggtgtccctttgtgtccccatctg

SEQ ID NO: 908171 - DNA, 120 bp, Artificial Sequence
  ENSG00000236393_14 (sequence is synthesized)
tgtgactgtggagctcagtgtctctcacacattctagtatgatacttggtgccatatttgcaggtcctgaggtaagaacccatgctgttgtcttcagagagtttcatgggttggactgtg

SEQ ID NO: 908172 - DNA, 120 bp, Artificial Sequence
  ENSG00000236393_15 (sequence is synthesized)
ccatatatgggcaaaaatccacccacacgttttcttttaatcacctttatggatgtataatttacatatatacttttttcttattactttttatttatgtaatttattcattttttgaga

SEQ ID NO: 908173 - DNA, 77 bp, Artificial Sequence
  ENSG00000236393_16 (sequence is synthesized)
gctgggaccacaggcacacaccaccactcctggctaatttaaaaagtttcaaggctggtctcaaactcctgggctca

SEQ ID NO: 908174 - DNA, 120 bp, Artificial Sequence
  ENSG00000236393_17 (sequence is synthesized)
attacaagcatgagccaccatgcctggcatcttttgtggatgtgtaatttacatacgtacaataatatgtacctattttaagtatacagtttgatgagctttgacgaatgtagcccacga

SEQ ID NO: 908175 - DNA, 120 bp, Artificial Sequence
  ENSG00000236393_18 (sequence is synthesized)
gtacaataatatgtacctattttaagtatacagtttgatgagctttgacgaatgtagcccacgaaaccaccaccataatcgaagtatagaactttttttttttttttttttgagacgaag

SEQ ID NO: 908176 - DNA, 120 bp, Artificial Sequence
  ENSG00000236393_19 (sequence is synthesized)
acattttaatcaccccagagatgtgccccctgtgcagccagttccctcctctcaccccccagcccctggcaagcattgatttgctttgccactatcaatcaatttttgtcttttctggta

SEQ ID NO: 908177 - DNA, 120 bp, Artificial Sequence
  ENSG00000236393_20 (sequence is synthesized)
tttcatatgaatggaatcatataggatagatttttatgtgactacacactattttagcataatatttttgaagttcttccatgttgttgtgtatatctatagttaatttctttttctcac

SEQ ID NO: 908178 - DNA, 120 bp, Artificial Sequence
  ENSG00000236393_21 (sequence is synthesized)
tgaattgtataccactgtatgatgtatcacaatttgtttattcattctcccgttgctggacatttggactgtttattgtttggggctactatgaataaaactgctatggatgtttatgta

SEQ ID NO: 908179 - DNA, 120 bp, Artificial Sequence
  ENSG00000236393_22 (sequence is synthesized)
ataataactttcccatggacgcaactgtatcctttccctgtgttccttcggggatcccgaaactccatacggttctcatttgcagctcgttcctgaggaggcctcatttcctcgccacac

SEQ ID NO: 908180 - DNA, 120 bp, Artificial Sequence
  ENSG00000236393_23 (sequence is synthesized)
aaagacgaatgcccactttcggattccatcttctgccgcggacgcatccgggacgcgcagccgcccggcgcagaggaagcccgggacgctggggacaccgcctggagcctccgcgcatag

SEQ ID NO: 908181 - DNA, 120 bp, Artificial Sequence
  ENSG00000232675_0 (sequence is synthesized)
ctgagggtcacctcaagccccacctgcccatgattcttctgatggagactcacaacaggctatggtctgggctatctctgtggggtgcaatgtctgctctctgtatcaatacagagggtg

SEQ ID NO: 908182 - DNA, 120 bp, Artificial Sequence
  ENSG00000232675_1 (sequence is synthesized)
tgccatggggtcccgattgcactcaccatccacaccatcatgtaggagaaggctgcgatccacagcgtggaggaagcaaacgtcaccatgaaccatttctcccagcgcggcttgttgcag

SEQ ID NO: 908183 - DNA, 120 bp, Artificial Sequence
  ENSG00000232675_2 (sequence is synthesized)
ttgggtacagtgaagtataagacgaaactcagcggccaggtgaacgcccatttcactgtttccagtttacccgctggaaaaatgaaaaaggccaaaaagaaataaaaaaaaaataacaaa

SEQ ID NO: 908184 - DNA, 120 bp, Artificial Sequence
  ENSG00000232675_3 (sequence is synthesized)
ggtcagttagcccgctggttagggggctgcacagaaaatcatgtagcaccttaaggtcagggacagccaacactgtcccccaaatccagataggaggtggctcttggtgcatatgtcaga

SEQ ID NO: 908185 - DNA, 120 bp, Artificial Sequence
  ENSG00000232675_4 (sequence is synthesized)
tgaaaacattagtgaatgcaggatgagggagaaacccctggctataaaacttgggttttaaaaaaatgtttgtgatattgaggaaagagatgattatgaattagttgtgtcaggtttaca

SEQ ID NO: 908186 - DNA, 120 bp, Artificial Sequence
  ENSG00000232675_5 (sequence is synthesized)
aatttgcaacccatgtagcaaaatttttctgggtatttttgttcttaccaaaatatctttttcataaccttctttttagctcttgagtttaattctccagaatttatattacatttctat

SEQ ID NO: 908187 - DNA, 120 bp, Artificial Sequence
  ENSG00000232675_6 (sequence is synthesized)
ccaacactcaaggcaagattaatttggatttgcatcattttgccatgctttttaatttctgtccaatcctaatgatttggaatttctccccagttaaaaagtatagccataaatgggtaa

SEQ ID NO: 908188 - DNA, 120 bp, Artificial Sequence
  ENSG00000232675_7 (sequence is synthesized)
tgcattctggaaggctgggtttcctaaaatggctttgttaaggtcaaagccactgaatcgatgtcaatcaactaatatcagtcaatgtcaatcaaccaatgtgaatcactgagtcattat

SEQ ID NO: 908189 - DNA, 120 bp, Artificial Sequence
  ENSG00000232675_8 (sequence is synthesized)
ggctgaagaaactaagatgccgatagggattgatcatcatttcccaattctttgtgcctttcctccatgtcctttgccctgtgacatggctgttcttcccactggagcaggtggagtaca

SEQ ID NO: 908190 - DNA, 120 bp, Artificial Sequence
  ENSG00000232675_9 (sequence is synthesized)
cttcccccatgccattgatgtggggcttggccagtaaaatgtgtgtggacgtgatggtaagtcagggccaggcgaagatcctggaggcatttcgtgtttccacgtactctcttgcattct

SEQ ID NO: 908191 - DNA, 120 bp, Artificial Sequence
  ENSG00000232675_10 (sequence is synthesized)
aatgatgcactgtgagaagagcataccccaggtagctagcctctggtacaaagaaaatgagcagacacgtggagtagacatggaccccacctgctgcctgaatcaaacatgaccaccctg

SEQ ID NO: 908192 - DNA, 120 bp, Artificial Sequence
  ENSG00000232675_11 (sequence is synthesized)
acctcagtttaaattcagcacggaatgaagtggggtgggtgacgagaaattacttaatgggtacgatgaacattatttcagtcatggatacactaaagtcaggacttcgtcacttccatc

SEQ ID NO: 908193 - DNA, 120 bp, Artificial Sequence
  ENSG00000232675_12 (sequence is synthesized)
acacaatatatccatgtaacaaatttacttgtaccgcttaaatttatgcaaatatagaaaaagcaaatgcaagcatgcttaaaaaaacaaaagcagttgatgaggcagatgatgagggag

SEQ ID NO: 908194 - DNA, 120 bp, Artificial Sequence
  ENSG00000232675_13 (sequence is synthesized)
catcattttcatgatcatgtttgtggctgggtctggagttcaggggagcagactgctcaggtggctgggaccaggtctccggcttctcctagttttctccctactcctgggcattgattg

SEQ ID NO: 908195 - DNA, 120 bp, Artificial Sequence
  ENSG00000232675_14 (sequence is synthesized)
aatatttgaactacgggtggccctgaggcatccagaatggatggatgctttgcttggaatttgagcgtccatgtcagggaggatgcacaatgggaatttagaagaactgcaaaggggctg

SEQ ID NO: 908196 - DNA, 120 bp, Artificial Sequence
  ENSG00000203711_0 (sequence is synthesized)
gcttctgcctgacgtgtacccggaaggtcgtcagctcaggctccaaatatgtaacagtgagtttctaagtgagtcacacggacgcggttggtttccagtgaggcataactcatcgcttca

SEQ ID NO: 908197 - DNA, 120 bp, Artificial Sequence
  ENSG00000203711_1 (sequence is synthesized)
ctcttctcaacggttccctcttcggaaggaagcgcagtccgcagcgtcgtccgagggcgtgatcgcctgcgtcgcacccgcgtctccagtggccaccccttgtcctacaggaacgcgcat

SEQ ID NO: 908198 - DNA, 120 bp, Artificial Sequence
  ENSG00000203711_2 (sequence is synthesized)
ctgcttagcaggcgctgagcccttgaggaggcctaaaatgaatgaacgcggctgtgcctcctgagcaggctcacagttgtgggtgggggacagaagggtgtccatgcctaaggtcgacgg

SEQ ID NO: 908199 - DNA, 120 bp, Artificial Sequence
  ENSG00000203711_3 (sequence is synthesized)
cgataagacagacgttcttcccaggaggagatcagttccagacggaggtctcgctatgttgcccatactggtctcaaaattcctggcctcgagtgatcctcctgtctcagtccctgaaat

SEQ ID NO: 908200 - DNA, 120 bp, Artificial Sequence
  ENSG00000203711_4 (sequence is synthesized)
cttcctctgcaaaataagggagtgtgtactgaattaccgtttccagctccaacatccaggatttcagcactacctgcagagtagtgggaggagagatagaggaagaagtgaagataagaa

SEQ ID NO: 908201 - DNA, 120 bp, Artificial Sequence
  ENSG00000203711_5 (sequence is synthesized)
accactcgaagccggtgtctggtgctgggaccgtggtggctgggacggcagcagtcgtgctgtccatctgctcttccgaggggtggcacatcctagcctctatcttttccccagagaaga

SEQ ID NO: 908202 - DNA, 120 bp, Artificial Sequence
  ENSG00000203711_6 (sequence is synthesized)
tccccctcgtctgctcttcccccgtctcagccttttagtgtgtgaacagttctggtgttactcagcaacgcttttgttagcgcctttaccagcaagtacttgttaaacacttaaatctta

SEQ ID NO: 908203 - DNA, 120 bp, Artificial Sequence
  ENSG00000203711_7 (sequence is synthesized)
caagtggaaagaaaattccgtggtaaatttaagtacaaaagtcaaccaaaattctgagtctcggacaagactggttaaaaatcgttctacaatgaaactaataaattaaatcatataaaa

SEQ ID NO: 908204 - DNA, 120 bp, Artificial Sequence
  ENSG00000203711_8 (sequence is synthesized)
ggcgcgaccggcggggcggggcggacactcccaccgcgcacctgcttctgcctgacgtgtacccggaaggtcgtcagctcaggctccaaatatgtaacaagacggaggtctcgctatgtt

SEQ ID NO: 908205 - DNA, 120 bp, Artificial Sequence
  ENSG00000203711_9 (sequence is synthesized)
accgcgcacctgcttctgcctgacgtgtacccggaaggtcgtcagctcaggctccaaatatgtaacagtgagtttctaaagacggaggtctcgctatgttgcccatactggtctcaaaat

SEQ ID NO: 908206 - DNA, 120 bp, Artificial Sequence
  ENSG00000203711_10 (sequence is synthesized)
gggggcggggccggcgcgaccggcggggcggggcggacactcccaccgcgcacctgcttctgcctgacgtgtacccggaaggtcgtcagctcaggctccaaatatgtaacagtgaaacag

SEQ ID NO: 908207 - DNA, 120 bp, Artificial Sequence
  ENSG00000203711_11 (sequence is synthesized)
tgtaacgtgccaactctcacatggctcagaggaggaggaccccaggactccaggatgggacagggcagccacttctcaccaagatgaagtcttgctgtcgcccaggttggagtgcagtgg

SEQ ID NO: 908208 - DNA, 120 bp, Artificial Sequence
  ENSG00000203711_12 (sequence is synthesized)
tgggttcaaccaattctgctgcctcagcctccggagtagctgggacgacaggcgcccaccaccacgccctgctgattttcatattttttgtagagatgcggtttcaccatattggccagg

SEQ ID NO: 908209 - DNA, 75 bp, Artificial Sequence
  ENSG00000203711_13 (sequence is synthesized)
tataaaaactggtatcatgtaatacacacattttcactactttaaaaaaatttgtcatgtggtgaagactttttc

SEQ ID NO: 908210 - DNA, 120 bp, Artificial Sequence
  ENSG00000203711_14 (sequence is synthesized)
actactttaaaaaaatttgtcatgtggtgaagactttttctttccaataaatatcaatctatatcattattacatgggtctgtcaaaattggtttaaataaagaaataatttagtttcca

SEQ ID NO: 908211 - DNA, 120 bp, Artificial Sequence
  ENSG00000203711_15 (sequence is synthesized)
tgaggggggcggggccggcgcgaccggcggggcggggcggacactcccaccgcgcacctgcttctgcctgacgtgtacccggaaggtcgtcagctcaggctccaaatatgtaacaaacag

SEQ ID NO: 908212 - DNA, 120 bp, Artificial Sequence
  ENSG00000232671_0 (sequence is synthesized)
ggtgcgtctccgcccctcgctccctactggccgctcgaagcttgaagctgcagttcactttcgcgaatgtaaggaacccagcttctgtgtggtgggcactgagagcagaaccgcattgag

SEQ ID NO: 908213 - DNA, 120 bp, Artificial Sequence
  ENSG00000232671_1 (sequence is synthesized)
tcggagtggagcacagaagtgtaggtccttttgcgctgtttcaagctaaacccgtgtcactgatgccgtacagaagttacagaatgggacgccaccccaaacattacgtcatccgctgac

SEQ ID NO: 908214 - DNA, 120 bp, Artificial Sequence
  ENSG00000232671_2 (sequence is synthesized)
catttccttgcggtcttcccaccgtctaaatcgccatataatctgatggatggggtcctcgcgcggttcagctcctgggcgacagcgtaacccgtcgctcctccctctgcgggagggcgt

SEQ ID NO: 908215 - DNA, 120 bp, Artificial Sequence
  ENSG00000232671_3 (sequence is synthesized)
ggacggggcacgggatttggagcatggaaggaatcgggacctaaaggagtcccaggacaccggaaccaggactccccggcgcacccggagagtttccgagctcctttgaagtatgaatca

SEQ ID NO: 908216 - DNA, 120 bp, Artificial Sequence
  ENSG00000232671_4 (sequence is synthesized)
accacttgccctatggtcgcaatgggcaagtcgctcaacctcccagatcctgttttctcatgagtaaaacggggattataatacccacctgacaatattatttttgtgagaattaaatga

SEQ ID NO: 908217 - DNA, 120 bp, Artificial Sequence
  ENSG00000232671_5 (sequence is synthesized)
gtttagaatgtaaacacgctttgtaaagtaattggcagttgggattagtgtgccctttctcccggagccttgcatcctgtgcatttgctcaggtgctgttccttctctgagcaactaatt

SEQ ID NO: 908218 - DNA, 120 bp, Artificial Sequence
  ENSG00000232671_6 (sequence is synthesized)
aaaggtccctaacccgatgtaaccaaccggcattccatttccacctcctcttctggtctccctatgcggaataacaattactactcatatacacataatattttggggggctcacgcctg

SEQ ID NO: 908219 - DNA, 120 bp, Artificial Sequence
  ENSG00000232671_7 (sequence is synthesized)
taatcccagcactttgagaagtctaggtgggtagctcacttgagccctggagttcgagactagcctgtgcaacacagcaggactctgcctctacagaatatttggaaaaaaaaattagcc

SEQ ID NO: 908220 - DNA, 120 bp, Artificial Sequence
  ENSG00000238258_0 (sequence is synthesized)
gttgaagaacatgtcacaccagcacacgccgccgtcgccagcagcaggaagttgttgatttgcagcatattcacactttctgatgcagtcagagctcactgcttctcagaacagatccac

SEQ ID NO: 908221 - DNA, 120 bp, Artificial Sequence
  ENSG00000238258_1 (sequence is synthesized)
tcagaaggaactccagtttctgatgtttattttactttttcttccccccaaacaaggcacaaaaggggaaaatgaaagggacacaagaaaaaagaatcaagggtcttactgaccccatca

SEQ ID NO: 908222 - DNA, 120 bp, Artificial Sequence
  ENSG00000238258_2 (sequence is synthesized)
cacacctcctctaatgtcatggctggaaggaaataagaagcccttcctcgggagaatgccagaggcccttgattgaagtcaaggacataagggatgacctcctcccagtccccagccctc

SEQ ID NO: 908223 - DNA, 120 bp, Artificial Sequence
  ENSG00000238258_3 (sequence is synthesized)
acccgatcttgaacttcctcatgaacaccttgttctctcggtgcttcccaccctgaatgatgatgcccctcacgatcttctcctcccccaggtctatttggagccactcattgatgtagg

SEQ ID NO: 908224 - DNA, 120 bp, Artificial Sequence
  ENSG00000238258_4 (sequence is synthesized)
aatgaggtgcgggtggaagtgcccagccagagcgactggttaccaggcggatgttttcaggcatccagtttctgtccccttggttggatgatgtgatctgggagtcagaaataagtccag

SEQ ID NO: 908225 - DNA, 120 bp, Artificial Sequence
  ENSG00000238258_5 (sequence is synthesized)
acaccatacccaacattccagagcaaggataatctgggaagtgaaatgaaacagataatgtaaaatgatttcctgggcgactccatgctaagaaataaaatacaacatatggaataaaga

SEQ ID NO: 908226 - DNA, 120 bp, Artificial Sequence
  ENSG00000232679_0 (sequence is synthesized)
agaggacatttcccacttctacactccacatggttttggccttgccggaagaggtcacaaagtggctttggaattcactcacacaacatgagggtactttgcacaggtagagaatggttg

SEQ ID NO: 908227 - DNA, 120 bp, Artificial Sequence
  ENSG00000232679_1 (sequence is synthesized)
aaatacacactacctgaagctggataactcatgaactctgttgacaattatattctttgtctttttaattaactcatttggagttggtgtcctgaggacctaagcctaagaatcttcaag

SEQ ID NO: 908228 - DNA, 120 bp, Artificial Sequence
  ENSG00000232679_2 (sequence is synthesized)
atggaagagtagagtgaacaatgaatgagccagagggctcttgtcctctgtgtgcagctctgggcagccagcaggtggatatgggacttggcctgctggaggggccctggcaagaggagc

SEQ ID NO: 908229 - DNA, 120 bp, Artificial Sequence
  ENSG00000232679_3 (sequence is synthesized)
tggcaggagcagatggcaaagatccttctactataacccggggagatggagaacatctgtttggggcatccttttgttggaacgactaactctgccgtaaggaaaaggatgaaagattag

SEQ ID NO: 908230 - DNA, 120 bp, Artificial Sequence
  ENSG00000232679_4 (sequence is synthesized)
caaaatggttctactcatgatactaaaatcatggtgccattgtgagcattaagtgagatgatgcattgcaaagcactttaacctagttctttaataaatgtgagatggaaagaaaaggag

SEQ ID NO: 908231 - DNA, 120 bp, Artificial Sequence
  ENSG00000232679_5 (sequence is synthesized)
aagtagagaaagataaaaagttagattactctgacattgaaaaatgcaattatttgagaacagataaagtgggagaccctatttggagattttagcaaagagagcaaagatagtcataca

SEQ ID NO: 908232 - DNA, 120 bp, Artificial Sequence
  ENSG00000232679_6 (sequence is synthesized)
tgttgggttgaataataatgtatctatcacactatctttcactacgtgtcatagtctatatcattctaaaattatcttgcccatttgttacttccttattgcctgtctttctccactaga

SEQ ID NO: 908233 - DNA, 120 bp, Artificial Sequence
  ENSG00000232679_7 (sequence is synthesized)
atgtaaaatcctagagggatgggccgtatctgtgtcattcattactatacccccagtacctagaagaatctttggcacatagtaagtattcaataaataattgttcaatggaagaaaaaa

SEQ ID NO: 908234 - DNA, 120 bp, Artificial Sequence
  ENSG00000232679_8 (sequence is synthesized)
tttgtcggggtctgacaccgttgcatcgtatatcacctgtgttgtcatggtcagtgctcaacaaatgcccctactgattcaagtatatgagcaagtcaaataaaaaaataatatggccgg

SEQ ID NO: 908235 - DNA, 120 bp, Artificial Sequence
  ENSG00000232679_9 (sequence is synthesized)
gacactcaagcagccctattcagaggtccatgtggtaaggtacgaaggcctcctgtcaattctagtgagaaacctaggtttcttgctaacagctatgtgagtgagccatcttggaagcag

SEQ ID NO: 908236 - DNA, 120 bp, Artificial Sequence
  ENSG00000232679_10 (sequence is synthesized)
attctcccaccccagatgagccttcggatgactggagttctggctgacatcttgactgcaatctcatcagagacctcaagccaaaattaccccacttccaaattcctgaccctacagaaa

SEQ ID NO: 908237 - DNA, 120 bp, Artificial Sequence
  ENSG00000232679_11 (sequence is synthesized)
ctgtgtgagataatatatgcttattgtttaagccactaagttgttcttttggtgggggggatgggtgatttgttatgcaacaacagaaaactaatacagaaattatacctgccattatca

SEQ ID NO: 908238 - DNA, 120 bp, Artificial Sequence
  ENSG00000232679_12 (sequence is synthesized)
aagaggcctccagtgagggttgatggtatccttgaatatttagggaaactaagcatgttaagtgtaaatacagaaactgtctttgtcaaaactaaataaagcaagggaaatggaacttga

SEQ ID NO: 908239 - DNA, 120 bp, Artificial Sequence
  ENSG00000266955_0 (sequence is synthesized)
ttcaaacatcaccttccacatgaggagcctccagcttctgcgggcagaggggcactcacccaactgtgactacagcacttacacaagccaccaactggcacccacagcacttatcactcc

SEQ ID NO: 908240 - DNA, 89 bp, Artificial Sequence
  ENSG00000266955_1 (sequence is synthesized)
acacaagccaccaactggcacccacagcacttatcactccatgtgtctgctcaaccagcctggacagggtctctctctgttgccccaga

SEQ ID NO: 908241 - DNA, 120 bp, Artificial Sequence
  ENSG00000266955_2 (sequence is synthesized)
tacaagcacgcaccaccacacccggatcatttttatttttattttgtagagctgaggtctcacaatattgccaaggctggtctcaaactccaggcctcaagtgatcctcccgcctcggcc

SEQ ID NO: 908242 - DNA, 120 bp, Artificial Sequence
  ENSG00000266955_3 (sequence is synthesized)
ccactacacctagccttcataatcttttaaaatattaactgttttctgcttttattaatatttattattgcagtttctctgatgactttctttgtgagtgtgtcataaggaaggccatgg

SEQ ID NO: 908243 - DNA, 120 bp, Artificial Sequence
  ENSG00000237675_0 (sequence is synthesized)
attccacctcccacaccttcccaaccctggctgtgctggccctgactgagaggagggggtttccacttccgtcacctggcaagggaacctccacagcccaagaatattaacatttatcag

SEQ ID NO: 908244 - DNA, 120 bp, Artificial Sequence
  ENSG00000237675_1 (sequence is synthesized)
gtgccgggcatgggcctcatgtgttttatgtaattcaatcctcccaacaaaagtatgagaaagaccacactcaggccaagcactgtggttcccgcctgaaatcccagcgctttgggaggt

SEQ ID NO: 908245 - DNA, 120 bp, Artificial Sequence
  ENSG00000237675_2 (sequence is synthesized)
ggaggcaagaggattgcttgagctcagaagttcaagaccaccctgggcaacacaagccagccctgcagcacagccttcaacatgagcaactcctgctctctgtagctccagccccagcct

SEQ ID NO: 908246 - DNA, 120 bp, Artificial Sequence
  ENSG00000237675_3 (sequence is synthesized)
gacagtccctgagtcttggatgaacacaggactcacagtgtctacaccggacagtttctgtttgcacgacgttgagtaaacttcacatccatcggggaagttaccctttgggattactga

SEQ ID NO: 908247 - DNA, 120 bp, Artificial Sequence
  ENSG00000237675_4 (sequence is synthesized)
tgaaggtgaggagaagatgctgttctgagagctgctgataatacgtggatccaaacccacaggcttgagctgcttaattgaaattcacgtcaaaatgaaattctggtttagctcaacttg

SEQ ID NO: 908248 - DNA, 120 bp, Artificial Sequence
  ENSG00000237675_5 (sequence is synthesized)
actactatggatgatgaaaataaatccctgggtcacacaaggatagtgattgagtagagcttgtttgctggcacaggaatgacatttcaactggaattaaattgtcgtcagttaacagaa

SEQ ID NO: 908249 - DNA, 120 bp, Artificial Sequence
  ENSG00000237675_6 (sequence is synthesized)
cctggcaagggaacctccacagcccaagaatattaacatttatcaggtgccgggcatgggcctcatgtgttttatgtaattcaatcctcccaacaaaagtatgagagccagccctgcagc

SEQ ID NO: 908250 - DNA, 120 bp, Artificial Sequence
  ENSG00000270748_0 (sequence is synthesized)
gacattctgttgacccagactccactgtccctgtccatcacccccggagagccggcctccatctcctgcaggtctagtcggagcctcctgcatagtaatggaaacacctatttacattga

SEQ ID NO: 908251 - DNA, 120 bp, Artificial Sequence
  ENSG00000270748_1 (sequence is synthesized)
gggtcccagacaggttcagtggcagtgggtcaggcattgatttcacactgaaaatcagcccggtggaggctgaggatgttggggtttatattactgcatgcaagctacacactggccccc

SEQ ID NO: 908252 - DNA, 120 bp, Artificial Sequence
  ENSG00000225126_0 (sequence is synthesized)
cgcgacccgcagcccacccctgcaccagtggacactgcgggatggcctggcctcggctctgcattttcacttctcttagctctcatctcctccaccacagagacagctctgtctgagtat

SEQ ID NO: 908253 - DNA, 120 bp, Artificial Sequence
  ENSG00000225126_1 (sequence is synthesized)
tttctgatactgttctttatcccccaggactggcccagcccagggcggtgcgtacagcagacacttaatgtaacacagtagcagcttttaatttctcaggccaatgagatacagacagtc

SEQ ID NO: 908254 - DNA, 120 bp, Artificial Sequence
  ENSG00000225126_2 (sequence is synthesized)
actggtatggtagtttttcagtcaagcatcaagggaagaacttattagtttgaattacaaacaacagaagtagaaaactccacaaggaaaaatctcagctggtgaagaagctcaggagct

SEQ ID NO: 908255 - DNA, 120 bp, Artificial Sequence
  ENSG00000216560_0 (sequence is synthesized)
atttacagctggaagggcagacggaggcatcttggtgtatacacagccctgctgggccacatcccgggtctcctccctctgcgatgccatagcaggggcgccttccgaaagccctctgga

SEQ ID NO: 908256 - DNA, 120 bp, Artificial Sequence
  ENSG00000216560_1 (sequence is synthesized)
ttgaggcagcaggatctatggtggaacctgccccggcgtcgccaacgcccctaggaccccagcacactgactggggagcatccctgtgtcgtttctgcccggagaggagcagaggccagg

SEQ ID NO: 908257 - DNA, 120 bp, Artificial Sequence
  ENSG00000216560_2 (sequence is synthesized)
ctgctgctctgggagatgagactttctggtgcacctgcacttccacatgagacttccgggtgcacctgcactcccagatgcagacttcctggtgcacctgcacttcctggtgcagacttc

SEQ ID NO: 908258 - DNA, 120 bp, Artificial Sequence
  ENSG00000216560_3 (sequence is synthesized)
ttggttcatctgcaacttcctggtgagaatcccttgggcatctgcacttcctgatgcacctgcacttctagttattttagagaaaacgttccctgaacatgccacatgcagaggatgctg

SEQ ID NO: 908259 - DNA, 120 bp, Artificial Sequence
  ENSG00000216560_4 (sequence is synthesized)
ggtatcaggctacctttgctggacagctccaggtaactgcatttgctctgccaatgttggctttttaaaaatagaaaacacatatagacaaatccatcacacacacatgcacagacacac

SEQ ID NO: 908260 - DNA, 120 bp, Artificial Sequence
  ENSG00000216560_5 (sequence is synthesized)
acacacacacacacagacaaatccatcacacacacatgcacagacacacacacacagagtcaacgacataggctcacaagtagagctcttcgtctgtttatacttaatgcaattactgat

SEQ ID NO: 908261 - DNA, 120 bp, Artificial Sequence
  ENSG00000216560_6 (sequence is synthesized)
taaattctttcctttcttgccgccttttagatgatttcccccagcttaccttgaggactttcgagcaaacagacacgttgaaagaatagacaaggaccacttgcatgcccctcagttaga

SEQ ID NO: 908262 - DNA, 120 bp, Artificial Sequence
  ENSG00000216560_7 (sequence is synthesized)
ttcaccaactgtcaatattttgcactgtatgtatacacgtacatgtctgtgtatacacatatacacatacagtcacacatcgcccgatggcagggatggttctgaggaaggcgctgttag

SEQ ID NO: 908263 - DNA, 120 bp, Artificial Sequence
  ENSG00000216560_8 (sequence is synthesized)
gcgatttcgtcgctgtgcgagcatcatagtgtgaacttactcaaacctagatggcacagactcatcgcctcccacacgcctgggctgtatggcaggacctcctgctaccgggctacaaac

SEQ ID NO: 908264 - DNA, 120 bp, Artificial Sequence
  ENSG00000216560_9 (sequence is synthesized)
ccaggcagggtggtactgtactgaatggtgcaggtgattgtaacacaatggtaagtatttgtgcatgtaaacatacctaaacatagaaacagtgtagtaaaaatatggtataaaagatca

SEQ ID NO: 908265 - DNA, 120 bp, Artificial Sequence
  ENSG00000216560_10 (sequence is synthesized)
aatacagtacacctgtacaaggtctgctctgttctaatcttatggggccaccactgtatatgccgtctattcttgacagaagtgctttatgtggcacatgactgtacatggaaatacaca

SEQ ID NO: 908266 - DNA, 120 bp, Artificial Sequence
  ENSG00000216560_11 (sequence is synthesized)
cacactcacacacatccacacacaagcatatgcatacacacatatatacatgtatatacacgtgcatataacatatgtagatatctgccaattgctatccaacgtgaattccataaattt

SEQ ID NO: 908267 - DNA, 120 bp, Artificial Sequence
  ENSG00000216560_12 (sequence is synthesized)
catacttcctggtgagaatcccttgagcacctgcacttctaggtggaacttcctggtgcacctgcgcctccaggcacagactctcagttattttagagaaaacgttccctgaacatgcca

SEQ ID NO: 908268 - DNA, 120 bp, Artificial Sequence
  ENSG00000216560_13 (sequence is synthesized)
ggtatcaggctacctttgctggacagctccagtctacagggtctccactcctgagttcccggaaacaagatacagatttcagaatggcacctgaacattgtttactgatttccggctgga

SEQ ID NO: 908269 - DNA, 120 bp, Artificial Sequence
  ENSG00000216560_14 (sequence is synthesized)
agtgagggtccgagggattcttctatggaattgtatgactcagcatctttctgattgcaagcagcagcatcgcagcctaaatgaatctattggcttcttcaacagaccaatccggtggac

SEQ ID NO: 908270 - DNA, 120 bp, Artificial Sequence
  ENSG00000216560_15 (sequence is synthesized)
gtggtggcttcgggtgagggatgctccaggggctctccatgatgtccccaaggtcctttaacctctgggcactgcttctgcaggattggctttgcttagggttggttccccttcattctt

SEQ ID NO: 908271 - DNA, 120 bp, Artificial Sequence
  ENSG00000216560_16 (sequence is synthesized)
gagctggttgtgggcaactcctgccccctgtggggggactggactgccttagatcacatgtgtgtccctgactctctgtggtcaggggatagaatattcagattggaggggagccagctt

SEQ ID NO: 908272 - DNA, 120 bp, Artificial Sequence
  ENSG00000266002_0 (sequence is synthesized)
tcaattctcaacctgattaatgtactgcagagtctgttccactggggaaaaaatgcagagaggcattgcttcaaagccttgatccagattaaagtgatagagaccttaaaaaaaaaaaaa

SEQ ID NO: 908273 - DNA, 120 bp, Artificial Sequence
  ENSG00000227482_0 (sequence is synthesized)
gaagactcactggtccagaagtcagaacacctgagtcacttgacatgcactctcagatgagctgctgcactgctctgtgcctcagccgctttcatctgtagaatgggatggtcatgatgc

SEQ ID NO: 908274 - DNA, 120 bp, Artificial Sequence
  ENSG00000227482_1 (sequence is synthesized)
ctggccagcagggcccatggagcttgtataaaacctgatgggaggggaggttgcagtaaaagccttggagatgaaaacactggacacaggtcccctggagtcattggaatgcaggttcct

SEQ ID NO: 908275 - DNA, 120 bp, Artificial Sequence
  ENSG00000227482_2 (sequence is synthesized)
actcggaggcctgggtttccaacaatctcccagttcctaggcccagatgtccaccctccttcacgagctcagaattgagctcgtatcgccaacatgttttgcggaaatgctcatatcaac

SEQ ID NO: 908276 - DNA, 120 bp, Artificial Sequence
  ENSG00000227482_3 (sequence is synthesized)
acttggtgaaccaggaagactgtaccctcattcctttctcctgctgcctgctaggttgagttagaaagcttactctcgagttttactggcttgcttgtgctttttggcattttcaaaatt

SEQ ID NO: 908277 - DNA, 120 bp, Artificial Sequence
  ENSG00000227482_4 (sequence is synthesized)
ttgtacaatgatcttcaaaaagcaaaaatacattaatttttttaaaggtaggatccatatgagattggatcttcatcttctaacactttggagaacagaaaagtggtatttggagatata

SEQ ID NO: 908278 - DNA, 120 bp, Artificial Sequence
  ENSG00000227482_5 (sequence is synthesized)
gaataaaagagcactggaagaggaaagaaacataaaggaaagaaaggaaaagaaaagaccaaaagaaaagcaaggctccacttgcaaatgagagagcaacttggaaaacctgccactcac

SEQ ID NO: 908279 - DNA, 120 bp, Artificial Sequence
  ENSG00000227482_6 (sequence is synthesized)
taccactgatgcccacaagagggcgtctcagggtcatccggaaggcaaaactcaagtccaagatccgcttcccagcagctggaaatgaccaatgagtaggttctggaatatcagcaatga

SEQ ID NO: 908280 - DNA, 120 bp, Artificial Sequence
  ENSG00000227482_7 (sequence is synthesized)
ccctggctctccagcactttacagtttacattagactctcctccccgacgtcatttgcacctcccaaggccagttctcccggtggtttccagccctggggcgtttgtggttctctctgcc

SEQ ID NO: 908281 - DNA, 120 bp, Artificial Sequence
  ENSG00000227482_8 (sequence is synthesized)
tagtgggatgcaactggcatttagtgtttgtccgtatgtgggtgtggctggggagggcagagaggcaaacagccccgcacaagctgtacagtccccctcatcaagatgtggcactccctc

SEQ ID NO: 908282 - DNA, 120 bp, Artificial Sequence
  ENSG00000227482_9 (sequence is synthesized)
tttgccaatagcaactcctttttgaaacactgggcctgaagcaatcatcttgaagacatttttcatcaatcttgttgaaatcaacctggtttttcaaaatagaggaagcacatcaatgaa

SEQ ID NO: 908283 - DNA, 120 bp, Artificial Sequence
  ENSG00000227480_0 (sequence is synthesized)
atgtgtaggtggtcggtcccattgacaacctcaaatgagctgccagccaacaaccagcatcaactgccagtcagcttttgatgccattgtatctgacatcattctaacaggatcaaattg

SEQ ID NO: 908284 - DNA, 120 bp, Artificial Sequence
  ENSG00000227480_1 (sequence is synthesized)
agcaacaacagcaacctaaaaatgagaaagcatggctacttggaacaagatgaagaaataaagcttacggaggttaagtaaatgacctgtttccagtgccggactccaggctctgctggt

SEQ ID NO: 908285 - DNA, 120 bp, Artificial Sequence
  ENSG00000227480_2 (sequence is synthesized)
tttacttctaatgcttccatcggaggacaacaatggttacattgacttaagatctgatgcaaatgtttaccttttggggtctgtcataccatgaagcaaacagacagaaaagaaggaaac

SEQ ID NO: 908286 - DNA, 120 bp, Artificial Sequence
  ENSG00000227480_3 (sequence is synthesized)
cagggcaaccgcaagggctcatacagtgctgggtgaggaggacccctgacgggagctgagatctttggtgaaggacacaactggtcagtacaaccctgcagggcaaggagctgcagaaac

SEQ ID NO: 908287 - DNA, 120 bp, Artificial Sequence
  ENSG00000227480_4 (sequence is synthesized)
aactatccaaaccccacacctctccctcaccttgatctcccatgttccacttcggctgaaccaaaccaaaagccagagggcaaggaagccatgtgtgaaaactgtgctacagagcagaat

SEQ ID NO: 908288 - DNA, 120 bp, Artificial Sequence
  ENSG00000227480_5 (sequence is synthesized)
ggagagtgatacgactcagggagaagatatccagcactaaagtattaatgccttttattataaattgtttggaagtagatgatgtctatatgcataaataaataacactaatctctttta

SEQ ID NO: 908289 - DNA, 120 bp, Artificial Sequence
  ENSG00000223458_0 (sequence is synthesized)
tacccagaaggatcctgaagctcacagaggttatgtagcctgcctaaggttacccagctagcaactggcaaagctaggagttgctgcagaatagcaagcctatcactcacaatggccaga

SEQ ID NO: 908290 - DNA, 120 bp, Artificial Sequence
  ENSG00000223458_1 (sequence is synthesized)
gccagtaggaagtctacactgaaatcagcattgtgcctgatactgagaggaataaagttgataggaaggagcaatcagaaagctttggctgaaaagaatgatttaaaccactggagaaaa

SEQ ID NO: 908291 - DNA, 120 bp, Artificial Sequence
  ENSG00000236975_0 (sequence is synthesized)
attcatccacaaaaaacacagagactggccaacactgatttgcaggggaatttgaagaatctccaggagggccagagagtagacttggatgccacccagccagcaatagagaagttggga

SEQ ID NO: 908292 - DNA, 120 bp, Artificial Sequence
  ENSG00000236975_1 (sequence is synthesized)
ccacccagccagggacaaggccacacctcagccatcaccacccacaagcaacgcagcatgtatgagctgggacaggacaccagaaactacctcatgattgctccggaagaagcagctgca

SEQ ID NO: 908293 - DNA, 120 bp, Artificial Sequence
  ENSG00000236975_2 (sequence is synthesized)
gcctttggacgaacaggtcctaaagagctatggaaacagcatcgtggaaacagcacgttattgaatgactggtctgggccaagcattattctcggcgctggggatgcagcagggggcctg

SEQ ID NO: 908294 - DNA, 120 bp, Artificial Sequence
  ENSG00000236975_3 (sequence is synthesized)
gatcatactcaaggtcactagatacttgttacatgagtgaatgaagtcattcagtactcattggctccactgggctctgacttgctgggcatgacaagcccaccagggagccctggatat

SEQ ID NO: 908295 - DNA, 120 bp, Artificial Sequence
  ENSG00000236975_4 (sequence is synthesized)
ccctcctctttccaagcagctggggaagctggttgccctggaaacctgttttaggtggcagcatcttcctccaggaggtcgaggtgtctcctggaccttagagactccaggacacaggac

SEQ ID NO: 908296 - DNA, 120 bp, Artificial Sequence
  ENSG00000236975_5 (sequence is synthesized)
agagctctgaactgtggagccgggaaacctggttccagtctcagcccagatttaccagccgtagacttggccaagtcactcacaaaacccaaagggtgaggcagagctggccctgcctgc

SEQ ID NO: 908297 - DNA, 120 bp, Artificial Sequence
  ENSG00000236975_6 (sequence is synthesized)
atggcagggagattttgagaagcatgaagagagtcaggaagtgcctggggatcgaatccacccagcagtgcaaggcattgctctcccaattctccattgggaaaaaaaaatccagacaaa

SEQ ID NO: 908298 - DNA, 120 bp, Artificial Sequence
  ENSG00000236975_7 (sequence is synthesized)
gacagtacagagaatatggtagccaatactgcagcagtcaccacccggaaaaacagacactaatataataacttgtgatttttgcttcatatctctgtggcataaaaccatgacacataa

SEQ ID NO: 908299 - DNA, 120 bp, Artificial Sequence
  ENSG00000236975_8 (sequence is synthesized)
agtttatgtccccctttaaccattcctcaatgctattcccctcctctctccccctcctcaacggcaaccactgatatgttcgctctattctgtgcttttcatattttaaatatattgttt

SEQ ID NO: 908300 - DNA, 120 bp, Artificial Sequence
  ENSG00000236975_9 (sequence is synthesized)
atgggaatgatcatatataagaaatatattatactgtttgttttaaaagtttgcataaataatatcaaagtaaattatttaagtgtccccagcagtccctgtccccgtccacctttccct

SEQ ID NO: 908301 - DNA, 120 bp, Artificial Sequence
  ENSG00000236975_10 (sequence is synthesized)
cagttctcttccatcacagtaaagaaaactgcccaaacctggtcaccgcccctggactttcgaagtggcttcctacttggggtcctgcttccaacattggccctgtgagtgacaaggatc

SEQ ID NO: 908302 - DNA, 120 bp, Artificial Sequence
  ENSG00000236975_11 (sequence is synthesized)
tcattccttttgtgctcaaagctctggcctctctctccctccttggccttgcccagcccagccccacccctgtcctcagaacctcacacctgtcgttccccacctggggtgcccttcccg

SEQ ID NO: 908303 - DNA, 120 bp, Artificial Sequence
  ENSG00000236975_12 (sequence is synthesized)
ctggctggcccctcacctctctcagatttctgctctaatgacagtaactggagaggccttgcctgaagtcccctcctctttctccttaccttgctttttggttatgcatcctcctcctaa

SEQ ID NO: 908304 - DNA, 120 bp, Artificial Sequence
  ENSG00000236975_13 (sequence is synthesized)
atcctggtatctgagccggcagtgattctatacctggcagcagcctgtgcggcagagctgtgtgtaaaggggtccatgcagagccctgggagaaagaaaaatgaaggggaaaaggttgac

SEQ ID NO: 908305 - DNA, 120 bp, Artificial Sequence
  ENSG00000236975_14 (sequence is synthesized)
ctgagctttttcacctggggctggaaagtggaccagagcctatcattccaacctgcaggtgcctaaggcccaacagaaagttcaccaggaaagaccaagagaattggggtgaccctccca

SEQ ID NO: 908306 - DNA, 120 bp, Artificial Sequence
  ENSG00000236975_15 (sequence is synthesized)
cagtatcagagggaaggggagtggggaggagtacagcagtgcagaccagccccacaggtgcttagccaggcctttggttctgccagggaaaggagggtgccttccacagcatgaaaacta

SEQ ID NO: 908307 - DNA, 120 bp, Artificial Sequence
  ENSG00000236975_16 (sequence is synthesized)
caccacgtcccaatgtgtccgggacctgccgccagccgcctgcacagtagtcaggtggatgccaccgggatacagcccacactgactcctgaccccagggggtacagcccacgctgactc

SEQ ID NO: 908308 - DNA, 120 bp, Artificial Sequence
  ENSG00000236975_17 (sequence is synthesized)
ctgaccccagggggtacagcccacgctgactcctgaccccagggggtacagcccacattgactcctgaccccgggggttacagcccacactgactccggaccccggcgtgggaggggctg

SEQ ID NO: 908309 - DNA, 120 bp, Artificial Sequence
  ENSG00000236975_18 (sequence is synthesized)
gcccgagatgaaatctcgaaggtgggtcaggctaggtcctggagtcaggggaagcgtggggttcaggccaggcctgggttctccctgaagtgaggctgactctgagcctttcttgaaacc

SEQ ID NO: 908310 - DNA, 120 bp, Artificial Sequence
  ENSG00000236975_19 (sequence is synthesized)
ccaaatgtcacagcagtgccccgaaggtaggtgaggctctgttgcagggaatgctgaggaaaaagggaacatcagggattggtctggcctgaagcctgcactcccctaaattataccctg

SEQ ID NO: 908311 - DNA, 120 bp, Artificial Sequence
  ENSG00000236975_20 (sequence is synthesized)
gtatgatttgggcttgccctggagttacctcaactaacctggggtccttgggggaaacagagatggacagggttgatgtatatttcgggttgatttggactctaaggattatcccagctc

SEQ ID NO: 908312 - DNA, 120 bp, Artificial Sequence
  ENSG00000236975_21 (sequence is synthesized)
agacctcgctctcaaggaataggagcctggcatctgtctatcacccccttggccctgggtatagtctggatgagcagaggcacgcgtgtggccccaagagtcccaccctctggctctctc

SEQ ID NO: 908313 - DNA, 120 bp, Artificial Sequence
  ENSG00000236975_22 (sequence is synthesized)
ctcccaagacattctggagccatgacatgtctcccaggaagggagaattatttttgtctgtggcataaataaagccaggaatgagttccaataatcacaagcacatgccagcatgtggag

SEQ ID NO: 908314 - DNA, 120 bp, Artificial Sequence
  ENSG00000236975_23 (sequence is synthesized)
gctactctgacagcagcagaaggttccagcactgcctgccctgctggtcctggctgcagggaggtgaccgggatggtcaggggtcgggagcaggagggagcctccaggattttatttaaa

SEQ ID NO: 908315 - DNA, 120 bp, Artificial Sequence
  ENSG00000236975_24 (sequence is synthesized)
atgatcaggtttttcaaacaaatggaaaaataaaaaaatcttgaaaacaaatcttttaaaaatttacccacttcactccagatcttaagaaataaaaataaaacatgactattcctctag

SEQ ID NO: 908316 - DNA, 120 bp, Artificial Sequence
  ENSG00000236975_25 (sequence is synthesized)
aatcctgacccataccatacaactctcttcccagaggtcattgccaacatcgatttctatttatttttctcatgcttgctttaatatttctactatatatgtatgcatctataaataaac

SEQ ID NO: 908317 - DNA, 120 bp, Artificial Sequence
  ENSG00000236975_26 (sequence is synthesized)
tttccttaaaggagaggcctccagtgcacctcgtcagctgcactcagctcttaaatgcagctattcacagagggcccaggctctcccctgccctgtgacactacgtgggacacacacctc

SEQ ID NO: 908318 - DNA, 120 bp, Artificial Sequence
  ENSG00000236975_27 (sequence is synthesized)
gaagacagcaaagcagcctgtggagaggctgctcacagaggcaaccccacccttacttggtgatggcacgtggaactccacctcccaggtggaaaatggaaaaattgtttccttctctga

SEQ ID NO: 908319 - DNA, 120 bp, Artificial Sequence
  ENSG00000236975_28 (sequence is synthesized)
tctactgcctgagctgtcatcaggattttgaggactgacttaatgaataaaatataaaggcttagcgtgagcctgggatatgcatggtggaagagaataaatagccttttgtatatcaaa

SEQ ID NO: 908320 - DNA, 120 bp, Artificial Sequence
  ENSG00000236975_29 (sequence is synthesized)
gagtttcagaggctgagtgcgacatgccgtcactttgtccttatggtttgtacccgcccggcctgagaggtgctgtatttgcacatttcagccccctgagcactgacgggtggtgaatat

SEQ ID NO: 908321 - DNA, 120 bp, Artificial Sequence
  ENSG00000236975_30 (sequence is synthesized)
ggagcagtggggcccaggctgcactctctacttcgtttctccttcaccctgggcaaaaagctagcaggctttcctgtttccgagctgactgtgtgatctgagctgactctgaaacctgtc

SEQ ID NO: 908322 - DNA, 120 bp, Artificial Sequence
  ENSG00000236975_31 (sequence is synthesized)
aagcacaatgcctgctgtgggagccaccttctccaactgacaccgcctgaccccagcttccagctcactccccgctctgtgaaggaagcagctccagggaatttgaagaatctccaggag

SEQ ID NO: 908323 - DNA, 120 bp, Artificial Sequence
  ENSG00000236977_0 (sequence is synthesized)
gtttgggaaagagaatattggaattcatatttctttaaatcattcttttaaacttttaatttttatgtagttttagtacatcttatttgctagtactgtgtcatctttttggctgtattt

SEQ ID NO: 908324 - DNA, 120 bp, Artificial Sequence
  ENSG00000236977_1 (sequence is synthesized)
ttcactggctgccacctggccaaatcaccacttgggttataacagcagcctctgactggtctccttccgtctgaccttggcccctgcactctactctcaacgtagctctcagagtgatgg

SEQ ID NO: 908325 - DNA, 120 bp, Artificial Sequence
  ENSG00000236977_2 (sequence is synthesized)
aactcagaacttgtcactcctgctcaaaaacttccagtttcacccaggggaagtatcaaggtgacatgaggggacaggaaatattgtccctaaatgttctaagagtggatctcccatgta

SEQ ID NO: 908326 - DNA, 120 bp, Artificial Sequence
  ENSG00000236977_3 (sequence is synthesized)
ttcaagcaatcgaggggtgtttaatgagctccatctacatagcaatgatacagcatagctctgctggggctctctgctctccccttctccacaaaagggaaggacaggtaagaacaggca

SEQ ID NO: 908327 - DNA, 65 bp, Artificial Sequence
  ENSG00000236977_4 (sequence is synthesized)
atcctaatatttttatgagaggatggctatcatcatttcattttaaagatgaggaaaatagatgg

SEQ ID NO: 908328 - DNA, 76 bp, Artificial Sequence
  ENSG00000236977_5 (sequence is synthesized)
gggaaggaattaggagcgggaaggagattgactgttagtttcttaggattggactaacaaaagtggaggttgttac

SEQ ID NO: 908329 - DNA, 120 bp, Artificial Sequence
  ENSG00000236977_6 (sequence is synthesized)
agtttcttaggattggactaacaaaagtggaggttgttacttacactgcaaaagaaacaaccagagctgtgtcactcagaaggctgaaaagaatcaggctgacagcataatgcagtgaag

SEQ ID NO: 908330 - DNA, 120 bp, Artificial Sequence
  ENSG00000236977_7 (sequence is synthesized)
atgggtgaagagagatgtgtttcatctgaaatttgaagggctttacaactcttctcctttaactaacttaccatcctttaactaacttaccacccaaaatgaattctgtagcctttgtca

SEQ ID NO: 908331 - DNA, 120 bp, Artificial Sequence
  ENSG00000227486_0 (sequence is synthesized)
gggggcggggaggccgccactagcaaacaacctcagcttcataaatccagcagaaaggtccggggtattgttgaaaaggtcggaaggaccaagattatgtccgccagcctaagtgggacg

SEQ ID NO: 908332 - DNA, 120 bp, Artificial Sequence
  ENSG00000227486_1 (sequence is synthesized)
aacaaccaagttgtgcgatgcagctttaaaggggctggtgattgacagaatggtgtagtagtagatggggtggagccgctgggtggggtcgagactggcagctgagagataccaaaagga

SEQ ID NO: 908333 - DNA, 120 bp, Artificial Sequence
  ENSG00000227486_2 (sequence is synthesized)
agaaaaaagaaaaccattgctcttgatattgctaatgccgggggaggtaagctaacgagaaagtagggaaaaggaaggttttagagttcacctccactccttcccctggctaacactctt

SEQ ID NO: 908334 - DNA, 120 bp, Artificial Sequence
  ENSG00000227486_3 (sequence is synthesized)
tacactcttctgccttcccttgagataattaaaatagactgtacaccggccctagtcggtgcccattccccctaactcttcactcaactacgtgtgtagtccgagggagtgaggaccccg

SEQ ID NO: 908335 - DNA, 120 bp, Artificial Sequence
  ENSG00000227486_4 (sequence is synthesized)
ggtccaagagctcaatcccggccccgccccgtcggcccaggccccggggctgggaggagaggatgccttcggaggcgcagaatccgaaaattttgctgaagttgcttatcagattaagaa

SEQ ID NO: 908336 - DNA, 120 bp, Artificial Sequence
  ENSG00000227486_5 (sequence is synthesized)
gcttttgggctgagatgatgcggttttctagatataggatcacttcatctgcaaacaaagatgatttgacttcctctctttatattcgaatacctttatttctttctcttcctgattgcc

SEQ ID NO: 908337 - DNA, 82 bp, Artificial Sequence
  ENSG00000227486_6 (sequence is synthesized)
agcattggtgagagagtgcattcttgacttgtgccagttttcaagagatgtggttggagctggaagctgttatcctcagcaa

SEQ ID NO: 908338 - DNA, 120 bp, Artificial Sequence
  ENSG00000227486_7 (sequence is synthesized)
aggaggagaaaaccaaatactgcaagttctcacttataagtgggaactgaatgatgagaacatttggacatggtaaggggaggacaacatgcagtggggcctgttggggagtatggcagg

SEQ ID NO: 908339 - DNA, 88 bp, Artificial Sequence
  ENSG00000227486_8 (sequence is synthesized)
aggacaacatgcagtggggcctgttggggagtatggcaggagggaaagcatcaggaaattcactaatagatgctgggcttaataactt

SEQ ID NO: 908340 - DNA, 120 bp, Artificial Sequence
  ENSG00000227486_9 (sequence is synthesized)
acatgtacccctgaacttaaaataaagcaaaataaaaataaaaatataatttttccccattcaacatcatggacttcctgaagttctctagaccttggattaagaagacatatctacagt

SEQ ID NO: 908341 - DNA, 120 bp, Artificial Sequence
  ENSG00000227486_10 (sequence is synthesized)
acgtcagatttgatgtgtcacaaaatacatacatcttttgcctgaatcactctctaaggttgctgtactagctttcattcccatcagcagtattggaaaatctgtattatctcacacact

SEQ ID NO: 908342 - DNA, 120 bp, Artificial Sequence
  ENSG00000227486_11 (sequence is synthesized)
caccaaccatttatattgttttccaacttgatgggttaaaataacatcgcatttttgttataatgtgaatttccttggtaactaatgaggctgaacatcttttcatctgtttgttggcaa

SEQ ID NO: 908343 - DNA, 120 bp, Artificial Sequence
  ENSG00000227486_12 (sequence is synthesized)
ttttggctttctgattctgtgaattgcctttgtacattttctattaggtcactggtggttttccaataggaaaatgacataatctctgccttgctcaatacataggtctcttgtagctct

SEQ ID NO: 908344 - DNA, 120 bp, Artificial Sequence
  ENSG00000227486_13 (sequence is synthesized)
agcactttctgacctgattctagcattttgctaaaagtctaggtgagtgggttcaagcaaggtaaaaaccatacagactgcagtggaggaagggtagaataccaccagggaaaagagtta

SEQ ID NO: 908345 - DNA, 120 bp, Artificial Sequence
  ENSG00000227486_14 (sequence is synthesized)
agaggttgttttaatagttaactagtgtacaaaagggcagaatcaatggtggtgtagagaaggagactaacataagagaccccacaggattttgtttgcgggaaagggaaaaaattagaa

SEQ ID NO: 908346 - DNA, 120 bp, Artificial Sequence
  ENSG00000227486_15 (sequence is synthesized)
gccaaaatggaagccgcagaaatattttgggaacagtggacaattttgtcttctcagtctctattccttttaaataagtaaactcttaaatagcattttctttcccagaccatatgtgtg

SEQ ID NO: 908347 - DNA, 120 bp, Artificial Sequence
  ENSG00000227486_16 (sequence is synthesized)
tatgtgtgtacatatgtgtatgtgtttgtgtgtacaaagtaactaacaaacaataagctctaattgtgaatgcttttttggagcatttgcttctagagattcatacagtttcagcccaat

SEQ ID NO: 908348 - DNA, 120 bp, Artificial Sequence
  ENSG00000227486_17 (sequence is synthesized)
tttagcatgctattgaacctgggttttggaacttgggttcacatcttagctcaagcagtgacaactgtgtgaccttgggcaaatcatttagcctcaatataatgctggcacaacgctagc

SEQ ID NO: 908349 - DNA, 120 bp, Artificial Sequence
  ENSG00000227486_18 (sequence is synthesized)
ttctacacagaagtattgtgaggtaaatataaggtaatgtatgtgaagtatataatatagtgcctggcacagagtgagtattcagcacatttgttgagtagatcaatcaaaattgagatt

SEQ ID NO: 908350 - DNA, 120 bp, Artificial Sequence
  ENSG00000227486_19 (sequence is synthesized)
cccaatgctgaagccctagaagctgtcatagtagtttgcattaatttgttttccttccattttaattgtgattttaaatgtaataactcctggtgatagacatagtaattcttagttaac

SEQ ID NO: 908351 - DNA, 120 bp, Artificial Sequence
  ENSG00000227486_20 (sequence is synthesized)
tagactgtaagattgataagaatctgccattcatttcctataccaaatgaaaacttactggaaacaataacaattcacatttattagacaatataatcatgcactcttagaagtacttca

SEQ ID NO: 908352 - DNA, 120 bp, Artificial Sequence
  ENSG00000227486_21 (sequence is synthesized)
cgttaaataagccatgaatctccactgtaacattataagaactattattatccccatcttatagatgggaaactaaggcataaagcagttatttaacttatccaaggtcaaacaactact

SEQ ID NO: 908353 - DNA, 120 bp, Artificial Sequence
  ENSG00000227486_22 (sequence is synthesized)
gtggttcctgagtctacattttaactactatagtcaaagaggaggagtgacctgcctagtgccacacaatatgttaatattagactaggattcaaattagatttttctattccttctgct

SEQ ID NO: 908354 - DNA, 120 bp, Artificial Sequence
  ENSG00000227486_23 (sequence is synthesized)
gcacatagagacatttggattgtcaaatccattttactatgttactacatttaccttataagtttattttttatagtttttatacaaatatattttaagtgaaataccatgtggatatgt

SEQ ID NO: 908355 - DNA, 120 bp, Artificial Sequence
  ENSG00000227486_24 (sequence is synthesized)
tataaagtaaactttttataataaagccacatttttatatgtccagtagttcactggagaggttagtggtggattgagggaggtgctatatatctatatttaacatttgattttaaaata

SEQ ID NO: 908356 - DNA, 120 bp, Artificial Sequence
  ENSG00000227486_25 (sequence is synthesized)
agagaggttgtttctattatagaaaatactacagaggctggtctagaaatctgtttcctgctcccaaccttggtcaaagtctaacctgaagggaatagtagcaggatctatatgttttta

SEQ ID NO: 908357 - DNA, 120 bp, Artificial Sequence
  ENSG00000227486_26 (sequence is synthesized)
tttgttattaatttttccctgtaacgcagaagctgactgaagagctagtattagggacctggcaaacttgtaggcatgccattgctgtagcagttggtatgtatgctgagagggtggcct

SEQ ID NO: 908358 - DNA, 120 bp, Artificial Sequence
  ENSG00000227486_27 (sequence is synthesized)
aagagaagtaaggtaggcttccaagcacaatggcagccagcctagaacatggcctccttgcttgcctggtcagaggctcctgaccaatgctgaaagcattctttctgccctggaggaggc

SEQ ID NO: 908359 - DNA, 120 bp, Artificial Sequence
  ENSG00000227486_28 (sequence is synthesized)
agagggcacagtcaccctttcagacaaaaccagaagcagtttgtaggaaagagaaaatagtagaacggggaagcgcaatggaggaagatgcagttggtctgagactgacactaatgttca

SEQ ID NO: 908360 - DNA, 120 bp, Artificial Sequence
  ENSG00000227486_29 (sequence is synthesized)
ctgtagggtatggaaaagattgctctgccatgaaaagtgagcaagtattcccccagtgcactggatgtagtgataatggtagtgtatgtttgctagtgggtgtgtgattttttgaggggt

SEQ ID NO: 908361 - DNA, 120 bp, Artificial Sequence
  ENSG00000227486_30 (sequence is synthesized)
agtactgattgtgtcataatcttaagtggaatggatatttcccttcagttgtatatgataaccttttatttagttctctttttagttaaagataaaagaaggatttttgtaaaaaacgat

SEQ ID NO: 908362 - DNA, 120 bp, Artificial Sequence
  ENSG00000227486_31 (sequence is synthesized)
ggacataaagccaaatgaagaaaaattgcattcattttggatcaagactgttttacctcttctcccaatatatctgaccctactcccaaatagcatttgaagtgttttatttatttttat

SEQ ID NO: 908363 - DNA, 120 bp, Artificial Sequence
  ENSG00000227486_32 (sequence is synthesized)
ggtaattgggatatccatcatctcaagcacttatcatttatttgtgttgagagcattccagatctcttctagctgttttgaaatgtacaataaattattgttaactatagtggccctatt

SEQ ID NO: 908364 - DNA, 120 bp, Artificial Sequence
  ENSG00000227486_33 (sequence is synthesized)
gtgttatcaaacactaggacttatttcttctatctaactgtatctttgtacctgttaaccagctcctcttcattctcctatccccattacccttcgcagcctctggcaatcaccattaca

SEQ ID NO: 908365 - DNA, 120 bp, Artificial Sequence
  ENSG00000227486_34 (sequence is synthesized)
aactctctgcctccatgaaatcagttgtgtagcttccacataaaagtgagaacatgcatttgtctctcggtgccttacttatttcacttaacatagttttctcctaatttttattaactt

SEQ ID NO: 908366 - DNA, 120 bp, Artificial Sequence
  ENSG00000227486_35 (sequence is synthesized)
taattcccacattattaactataaataaaaatatactactcagaagaaaaaagaaacctatctttgacatagctctgaatgaaagtcataataaagactttagagttttttctatttatg

SEQ ID NO: 908367 - DNA, 120 bp, Artificial Sequence
  ENSG00000227486_36 (sequence is synthesized)
tgtatgaatgtgtattgggtggaaagaagaatgaaactagtcatagcagctgaattatgccctttgggcaaagtttggttttcatagaaacaagtatggcctaactctctgagggaaaaa

SEQ ID NO: 908368 - DNA, 120 bp, Artificial Sequence
  ENSG00000227486_37 (sequence is synthesized)
tggcctaactctctgagggaaaaatacacacacacacatcaatatgttttattatataatacatgttaatttacacacatatacatattattatataatatatgctaatttgctatacta

SEQ ID NO: 908369 - DNA, 120 bp, Artificial Sequence
  ENSG00000227486_38 (sequence is synthesized)
ccataaaaaattgccatttttgtaggtaaaaattgttaaatattagcaattctatatggttacactgggcatttgtttgtatgtgtgtgtgtgtggtttaaaacaaatgagagagtaaga

SEQ ID NO: 908370 - DNA, 120 bp, Artificial Sequence
  ENSG00000227486_39 (sequence is synthesized)
gattgacaggaagaaggagagggatgtgtgtgtttggtgtgtgtatgtcatgataaaactttcaagctgtaggaatctggctatatttagacaggatctcagaaaagtgactaggacatt

SEQ ID NO: 908371 - DNA, 120 bp, Artificial Sequence
  ENSG00000227486_40 (sequence is synthesized)
cttttcaacatatttttaaggaatgaacttccaccttctttagtagagctctttgatcatctcagggattttaggctctgacagcctttactttccagatgttttggtcatttgtttggg

SEQ ID NO: 908372 - DNA, 120 bp, Artificial Sequence
  ENSG00000227486_41 (sequence is synthesized)
tggaatccccatactgctgtttaagtctgttcaatctgctttgaattctgtatagaaggagaaaggaaagaactcatcagcattataaaaaaaatagtaacagccagttgtatatgatag

SEQ ID NO: 908373 - DNA, 120 bp, Artificial Sequence
  ENSG00000227486_42 (sequence is synthesized)
tctcctgactacaaaggaaaagttagtattggatttcacaaatatgaccagatcttctcagatagtcatttgatataaaaaccagccccctggagattgttatatgttattaagccactc

SEQ ID NO: 908374 - DNA, 120 bp, Artificial Sequence
  ENSG00000227486_43 (sequence is synthesized)
tttagacttctcttggagaatggatctttactaaactatggctgctgttttagaatcttcctttcagagagtgctgagaatacctaggaataaaatgcacttctttcccagaaaattttt

SEQ ID NO: 908375 - DNA, 120 bp, Artificial Sequence
  ENSG00000227486_44 (sequence is synthesized)
cgttgactgtctattttaaaggttattggattatcttcattaacattcagttgatgtattgagcacttgctctatgcagcaaactctgcaaagacctatgttttggatattcacaaatac

SEQ ID NO: 908376 - DNA, 120 bp, Artificial Sequence
  ENSG00000227486_45 (sequence is synthesized)
tttaacatctctgtggcagattactgagagtggacttagtttttggaataaagagtcaaaagcagaggtgggtacataaagttagtgatgagggttatgtggtaagataaagtcctgagg

SEQ ID NO: 908377 - DNA, 120 bp, Artificial Sequence
  ENSG00000227486_46 (sequence is synthesized)
ctgattttcttctatgcatatagaagtaatagtagactttaatggtgtttggctcagaaaaccaagaatagttatcttggagctatcatggtcctctccacaaagtccctgaggaacaca

SEQ ID NO: 908378 - DNA, 120 bp, Artificial Sequence
  ENSG00000227486_47 (sequence is synthesized)
agaaagaatggtaagggaaaggaatgtaacacatagttagacagacttgtttcctagaactctattcagagaactgtggtaggtcaagctagatcttatggttaagtttggaggcctgtg

SEQ ID NO: 908379 - DNA, 120 bp, Artificial Sequence
  ENSG00000227486_48 (sequence is synthesized)
aggccattttcctctacctaaactcaaaccttaatctcagagtcttatttgacagctgactgcaatgtgacagaaggccacaatgataagcttgattaataaaaacagaatagagaattg

SEQ ID NO: 908380 - DNA, 120 bp, Artificial Sequence
  ENSG00000227486_49 (sequence is synthesized)
accacaatcaagtattgatgtgtcgtggcatctgaccagtcagataaaagttaggtggaaggcacaacaaagtttttagttattatatcccttattctagaattctacatacaccaaata

SEQ ID NO: 908381 - DNA, 120 bp, Artificial Sequence
  ENSG00000227486_50 (sequence is synthesized)
tgaaaggagttctaaaacagcattttgaacataatggaaatcagcatgtattcagctggagtgctatttaggacagcacttttatttagagaagataagagctctggggaaaaaaaagga

SEQ ID NO: 908382 - DNA, 120 bp, Artificial Sequence
  ENSG00000227486_51 (sequence is synthesized)
aagattgtgaagggcaatataaggcatgctaaagattttggtgtttagaaacatcctgctacagcagcgtggagcatgcttagaaaagaggagaaactagcagcagaaatactgtctaga

SEQ ID NO: 908383 - DNA, 120 bp, Artificial Sequence
  ENSG00000227486_52 (sequence is synthesized)
ggcttttgtgataagtccatgtgaaacagtgggccttaaagtaaggtagtagacattgggctgtagagaagcaggtagattctaaagttataaatgacatgatatggtatcaccaatatt

SEQ ID NO: 908384 - DNA, 120 bp, Artificial Sequence
  ENSG00000227486_53 (sequence is synthesized)
tggctattgattggttgtgggagaagaggaagtaaaggtgattcacaggattctgatttgggcaatggagtgaagaatggtgccaaggtaccaaaggaagaacaagttttagtctgtgga

SEQ ID NO: 908385 - DNA, 120 bp, Artificial Sequence
  ENSG00000227486_54 (sequence is synthesized)
tgcagtatcagactgaagatattttgttccagagtgtctatgttgaggtgcttccggaacatttagatagacggcctattgtaaatacatatatgcaatatatatggtgagagtagactt

SEQ ID NO: 908386 - DNA, 120 bp, Artificial Sequence
  ENSG00000227486_55 (sequence is synthesized)
aattttgggaataaacaagtcaaaaccatttttaaacactcttactgtattccagaaataaaaggcttgctctacctctccacttttacctataagtatagctgtgctcctgccctactg

SEQ ID NO: 908387 - DNA, 120 bp, Artificial Sequence
  ENSG00000227486_56 (sequence is synthesized)
aactaatcaccattccaataacacagaacacagcatgctcttcacatcacaatacctttgtacatattgttccctttgcctcaaatgcttcctttctctcctcttcagtcagaatatgta

SEQ ID NO: 908388 - DNA, 120 bp, Artificial Sequence
  ENSG00000227486_57 (sequence is synthesized)
tgtttacattctgatttgctgatatttattgtaatacagcatacatatgaaagagtacagaaattatacatgcacagctcagcaagttttcatcaatttaacatacctgtgtaattggca

SEQ ID NO: 908389 - DNA, 120 bp, Artificial Sequence
  ENSG00000227486_58 (sequence is synthesized)
ccagaaatatgaaacattattatttctcacccatcttatagaattatagattagtaccatctgtttttgaaatttgtatgaatgaaaccatatgatatctatttatttgtatgtatctta

SEQ ID NO: 908390 - DNA, 120 bp, Artificial Sequence
  ENSG00000227486_59 (sequence is synthesized)
tttcatgcaacttaatgattttgagattcattgatgctgttgtgtgcagcagtggtttgttcttttttcatttctcagtagtatttcattgtatgactataccataatttatttactctt

SEQ ID NO: 908391 - DNA, 120 bp, Artificial Sequence
  ENSG00000227486_60 (sequence is synthesized)
tctaagactgatggacatttgggtcatgttcagtttttggctattaataataatcatacaattaaaataataaaagctgtatgaatttttttgtaagtaattttttgctacatatgtgca

SEQ ID NO: 908392 - DNA, 120 bp, Artificial Sequence
  ENSG00000227486_61 (sequence is synthesized)
cacccgtttctgttgattatatataaaggggtagaattgcggtgcaagaggttatgcatgtgattagttttagtcagtactgccaaatagatttccaaagtggttatactgacccgctct

SEQ ID NO: 908393 - DNA, 120 bp, Artificial Sequence
  ENSG00000227486_62 (sequence is synthesized)
tttttttttttttacataactccaaaaatacagtttttcccattgaatttttttgaagttaaatagcagagatgtcagaattatgctcatcaggaaatacaaagtacagaaatataattt

SEQ ID NO: 908394 - DNA, 120 bp, Artificial Sequence
  ENSG00000227486_63 (sequence is synthesized)
ctgtgagtagtttttaagtactactagtaagtactgctagtgagtggtaagattgatagcttctagtgaaagtctggaatccaaagcttgatatgtatctaaatatatgtttaccccacc

SEQ ID NO: 908395 - DNA, 120 bp, Artificial Sequence
  ENSG00000227486_64 (sequence is synthesized)
ttggcactgtgctttgctgagggaacagcaggccttgtgcaggtccaagataattctcataaatacttcatagcctcattcagtacatgaaaattgggtaattgatgtcccagaaatgtg

SEQ ID NO: 908396 - DNA, 120 bp, Artificial Sequence
  ENSG00000227486_65 (sequence is synthesized)
taccaaagagagtaacaagtacaaagtacttgatgtttaaaggaatgcagaatatccaatgctacaaaaggaacaatgtatctggaataaaatgagtgaaggggatagtgatacaaggag

SEQ ID NO: 908397 - DNA, 120 bp, Artificial Sequence
  ENSG00000227486_66 (sequence is synthesized)
tgtctattagtgtgatggtaacaaccaactaataaaatttggagactagactgcttgtcatgtctggggttcactggaaatcaatgattcactggaacaattctcctgtcaaaaaaaatg

SEQ ID NO: 908398 - DNA, 120 bp, Artificial Sequence
  ENSG00000227486_67 (sequence is synthesized)
tgaggtttgtaacttgccctaagtataacaagggatatattttaacaaaggatgtattttttcttaagaagcaaccatttctcagcttatacataatagcaataataaagtctttgaccc

SEQ ID NO: 908399 - DNA, 120 bp, Artificial Sequence
  ENSG00000227486_68 (sequence is synthesized)
tgggaagatttaaatattaaatagaaactagctagcttaataaaatctgaacacagttaatgtctgtcataatgctcattttaatacatttctatccttcattctgttgatattatgtat

SEQ ID NO: 908400 - DNA, 120 bp, Artificial Sequence
  ENSG00000227486_69 (sequence is synthesized)
catattgattgatttgcacacaattcaccatcattgcatcccagggattgcacttggtcatgatgaaggatctttctaatgtattgttgaatttggtttgctcatagtttgttgaggatt

SEQ ID NO: 908401 - DNA, 120 bp, Artificial Sequence
  ENSG00000227486_70 (sequence is synthesized)
tttgcatcaatattcattagagatattggcctgtaatttttttatatgtctttgtctgcttttggaatcagggcaatactagccttgtggaatgaattttaaagtattcccttttcacct

SEQ ID NO: 908402 - DNA, 120 bp, Artificial Sequence
  ENSG00000227486_71 (sequence is synthesized)
attttttctgaataatttgagtaggattggtgttagatcttctttaaatgtttggtggaattcaccagtgaagccactgggtcccaggattttctttactgggagactttttaatacagc

SEQ ID NO: 908403 - DNA, 120 bp, Artificial Sequence
  ENSG00000227486_72 (sequence is synthesized)
ttccatctcatgacttattattcatctgtttgtgttttggattttgtattagtctgttttcaggctgctaataaagacatacccaagactggataacttataaaggaaagaggtttaatt

SEQ ID NO: 908404 - DNA, 120 bp, Artificial Sequence
  ENSG00000227486_73 (sequence is synthesized)
tggggagacctcacaatcatggtggaaggctaatgaggagcaaagtcacgtcttacataacagcaggcaagtgagcttgtgcaggggaactcccacttataaaaccatcagatctcatga

SEQ ID NO: 908405 - DNA, 120 bp, Artificial Sequence
  ENSG00000227486_74 (sequence is synthesized)
cagatctcatgagacttatttactaccatgagaacagtgtaggggaaaccacccctatgattcaattatctccacctagcccttcccttgacacatggggattattacaattcgaggtga

SEQ ID NO: 908406 - DNA, 120 bp, Artificial Sequence
  ENSG00000227486_75 (sequence is synthesized)
tgggtggggacacagccaaaccataccatcccacccctggttcctttcacatctcatgtcctcatatttcaaaatcagtcatgccttcacaacagtcccccaaaatcttaaatcatttta

SEQ ID NO: 908407 - DNA, 79 bp, Artificial Sequence
  ENSG00000227486_76 (sequence is synthesized)
tcaaaatcagtcatgccttcacaacagtcccccaaaatcttaaatcattttagtgttaactcaaaagtccacagtccaa

SEQ ID NO: 908408 - DNA, 120 bp, Artificial Sequence
  ENSG00000227486_77 (sequence is synthesized)
tgggagtacgggcattggataaataaacctattcaaaatgggagaaatttgccaaaacaaatgggctacagacctcatgaaagtccaaaatccaatggggcagtcaaatgttaaagctcc

SEQ ID NO: 908409 - DNA, 87 bp, Artificial Sequence
  ENSG00000227486_78 (sequence is synthesized)
ccaggttatgctgatgcaagaggtggactctcatggccttgggcatccctgccactgtggcttcttactggtgttgtgcctgtagct

SEQ ID NO: 908410 - DNA, 120 bp, Artificial Sequence
  ENSG00000227486_79 (sequence is synthesized)
tgctttcatggactggtgttgtgcctgtagcttttccaggtgcattgtgcaagatgttggtgaatctaccattctgatgtctggaggacggtggccctcttgtcatagctccactaggca

SEQ ID NO: 908411 - DNA, 85 bp, Artificial Sequence
  ENSG00000227486_80 (sequence is synthesized)
ctggaggacggtggccctcttgtcatagctccactaggcagtgctccagatgggactctgtgtggggccccattacatgagggct

SEQ ID NO: 908412 - DNA, 120 bp, Artificial Sequence
  ENSG00000227486_81 (sequence is synthesized)
caaggcttggggcttgaaccctctgaggcaacatcctgagctagagctcaacatagatgttggccccttctagccatggctgggacacaatgcatcaagtcccgagactgcacaaagcag

SEQ ID NO: 908413 - DNA, 80 bp, Artificial Sequence
  ENSG00000227486_82 (sequence is synthesized)
tgggacacaatgcatcaagtcccgagactgcacaaagcagcaaggccctgggcccagcccatgatattatttttttcctt

SEQ ID NO: 908414 - DNA, 66 bp, Artificial Sequence
  ENSG00000227486_83 (sequence is synthesized)
acttgttattgcatcatcaggctgcaaatttttcaaaattttatgctctgcttcccttttaaacat

SEQ ID NO: 908415 - DNA, 88 bp, Artificial Sequence
  ENSG00000227486_84 (sequence is synthesized)
cttcccttttaaacataagttccaattgcaaaccatatctttgtgaatacataaaacttaatgcttttaacagtactgaagtcgacta

SEQ ID NO: 908416 - DNA, 120 bp, Artificial Sequence
  ENSG00000227486_85 (sequence is synthesized)
ttgaacactttgctgcttagaaatttctactaccagatgccctatatcatctttctcaatttcaaagttccacagatctctaggacagggggaaaatgccaccagtctctttgctaaagc

SEQ ID NO: 908417 - DNA, 71 bp, Artificial Sequence
  ENSG00000227486_86 (sequence is synthesized)
aagcataacaagagtcacctttgctctagttctcatatccatctgagaccaactgggcttggactttattg

SEQ ID NO: 908418 - DNA, 120 bp, Artificial Sequence
  ENSG00000227486_87 (sequence is synthesized)
acaagtctctaggaagtttcaaactttcccacattttgctgtcttcttctgattcctccaagctgttgccacctctgcttgttacccagttcgaaagttgcttccacatttttgggtatc

SEQ ID NO: 908419 - DNA, 62 bp, Artificial Sequence
  ENSG00000227486_88 (sequence is synthesized)
tttacagccacaccccactctaccaataccagtttactgtattagtctgttctcatgctgct

SEQ ID NO: 908420 - DNA, 90 bp, Artificial Sequence
  ENSG00000227486_89 (sequence is synthesized)
agaaggtgaatgaggagcaaagtcacgtcttacatcgtggtaggcaagagagcttgtacagttaggcgtattattcactatcacaagaac

SEQ ID NO: 908421 - DNA, 120 bp, Artificial Sequence
  ENSG00000227486_90 (sequence is synthesized)
tgggggaaactggccccatgattcaattatatccacatagtcctgcccttgacacatggggattattacaattcaaagtgagatttgagtgaagacacagctaaaccatatcagatttat

SEQ ID NO: 908422 - DNA, 120 bp, Artificial Sequence
  ENSG00000227486_91 (sequence is synthesized)
ttatggttcaatcttggtagtttgtatgtgtctaggaatttgtccatttcttccagactctccaatttattggcatatatttgctcataatagccactaatgatccttagaatttctgca

SEQ ID NO: 908423 - DNA, 120 bp, Artificial Sequence
  ENSG00000227486_92 (sequence is synthesized)
gtatcagttctaatgtctcctttttcatttctgattttatttatttgggtcttatttctttttttcctcatctggctaaaggtttgtcaattttgtttaactttttaaaaagctaacttt

SEQ ID NO: 908424 - DNA, 120 bp, Artificial Sequence
  ENSG00000227486_93 (sequence is synthesized)
ttgtttcactgcttttttatgctttaattttaatttgatttatttctgctctaatccttattttttttctactaagttctggtttggtttgctcttgcttttctagttatttaagatcca

SEQ ID NO: 908425 - DNA, 120 bp, Artificial Sequence
  ENSG00000227486_94 (sequence is synthesized)
ttctagttatttaagatccattattagattgtttatttgaagattttcttgttttttcatgtgagcacttatagctgtaaacttccctattatactgcttttgctgtatcccataggttt

SEQ ID NO: 908426 - DNA, 120 bp, Artificial Sequence
  ENSG00000227486_95 (sequence is synthesized)
atcatttgttctaagaaatttttcaattttaaatttttcattgattcactgatcattgaagagcatattttttaatttccatgtagttgcacagttccaaacttcctcttttcaataatt

SEQ ID NO: 908427 - DNA, 120 bp, Artificial Sequence
  ENSG00000227486_96 (sequence is synthesized)
tctacattcattccattgtgttcagagaaaatacttgatattattttaatttttaaaaaaatttttaagacttgcatgtgatctaacatatggtctatccttgagaattttccacgtgct

SEQ ID NO: 908428 - DNA, 120 bp, Artificial Sequence
  ENSG00000227486_97 (sequence is synthesized)
aaagaataaaaatgtttattctgcagctcttgaataaaatattctgtaaatatctattaaatccatgtggtctacagtgcagattaagtctgctgtttccttgttgattttccgtctaga

SEQ ID NO: 908429 - DNA, 120 bp, Artificial Sequence
  ENSG00000227486_98 (sequence is synthesized)
agatctggccaatcctgaaaggggagtgttgaagtctccagctatgattgcattggggtctttctctttagctctaatatttcctttatatatctgtttgctgtcgtgttgggtgcaaat

SEQ ID NO: 908430 - DNA, 79 bp, Artificial Sequence
  ENSG00000227486_99 (sequence is synthesized)
ttcctttatatatctgtttgctgtcgtgttgggtgcaaatgtatttaaaattcttacattctttatctcttcttatagt

SEQ ID NO: 908431 - DNA, 120 bp, Artificial Sequence
  ENSG00000269583_0 (sequence is synthesized)
attttgttccagctgaggaaactggaacccagaaagtagatgccacctgcccaggaccacacactgattcctgtggtcatcctggacttaatccttgggtctcctttcctctctgctgag

SEQ ID NO: 908432 - DNA, 120 bp, Artificial Sequence
  ENSG00000269583_1 (sequence is synthesized)
gggcacagggattatgctgcccattttccgagtaaggaagctgaggcccagcaaagaaagtgactaaacccactgccagttggctcaggagcagaatctggaaccccggactccagactc

SEQ ID NO: 908433 - DNA, 120 bp, Artificial Sequence
  ENSG00000269583_2 (sequence is synthesized)
ttggctgcccgccattttcggtccctcaccgagtcctggctgctgcaggacacgacatggcggaggcggatctccggcatgtcaacgtcgtgggcttcgcctggccagaaggatgaggta

SEQ ID NO: 908434 - DNA, 120 bp, Artificial Sequence
  ENSG00000269583_3 (sequence is synthesized)
gagtatggggtccgaggggcagggagagtgggagggggcggggtgcgccctgcgctggctaaagtgcgcaagcgcgcgaggctcgggcctttcaaaccccggcgcgccggcgccggcgtc

SEQ ID NO: 908435 - DNA, 120 bp, Artificial Sequence
  ENSG00000180458_0 (sequence is synthesized)
cacaggcaggccgtacctcgaaatcccagcggggacacctgtcagggagacgcaccctcacaccgcccatgcatgcccgacgcatctttgggatccttagggatcacgtggtgcttcctt

SEQ ID NO: 908436 - DNA, 120 bp, Artificial Sequence
  ENSG00000180458_1 (sequence is synthesized)
gaatctccgcttgaggtttcttcaggcaggttcggccttgcccgactcctaggatcgcaggaccatggcgacgatcccgcggagaggggacgcactgccacagacgcctgggggccaagc

SEQ ID NO: 908437 - DNA, 120 bp, Artificial Sequence
  ENSG00000180458_2 (sequence is synthesized)
cgctggggccagtcccccggcaacggtggcggttactgtgacgcgagtcccccctcagcgctagcgcctggtgatcgcgcctgggctcttcctgcgtctccaagctcaggggctcctgct

SEQ ID NO: 908438 - DNA, 120 bp, Artificial Sequence
  ENSG00000180458_3 (sequence is synthesized)
tctcagcactgctgtctggaaaaggcgggaacgaggactaaggcaagcccagtgtggggcagagatggcaacacctggaactagcttttcatgggggcagataatgtggagagtgtccca

SEQ ID NO: 908439 - DNA, 120 bp, Artificial Sequence
  ENSG00000180458_4 (sequence is synthesized)
attacatctccctttattctatcccatactactaaaccccaccagctatttgcctacaaactgtgtatcagtcaggacatcaggacaccaagataaaggactagagtttggtaatcaact

SEQ ID NO: 908440 - DNA, 120 bp, Artificial Sequence
  ENSG00000180458_5 (sequence is synthesized)
actggctcctccagcagctcagaatgtggcctgtatgcatcacttcacttaattcattcaagaaatgctgactgagttcctgctgtgtgttggacactttcttagaagtgggacacactg

SEQ ID NO: 908441 - DNA, 120 bp, Artificial Sequence
  ENSG00000180458_6 (sequence is synthesized)
cagtgtgtgggacaaaggctgggccgctcattgcttatgttctagttgaagagagagtcaatcaacaacattctactttcagacattgataaatgctgtcatgaaaagacaaggaacatg

SEQ ID NO: 908442 - DNA, 120 bp, Artificial Sequence
  ENSG00000180458_7 (sequence is synthesized)
aaaaggtaagaaaagggatggagagagatgggatgaggggtgcctgggcagacaatgcaatgatctggcaaaagagtaggacaatcatgagactgcatgtgttccagtttctgctgctgt

SEQ ID NO: 908443 - DNA, 120 bp, Artificial Sequence
  ENSG00000180458_8 (sequence is synthesized)
aaaacagcatccacaggttacatctttactattctgttacatacatactattatttaaataaaaaatagtactagttaactgtgaaaattgcaattaatagggcagattaaacaaatcct

SEQ ID NO: 908444 - DNA, 120 bp, Artificial Sequence
  ENSG00000180458_9 (sequence is synthesized)
gggcagattaaacaaatcctttaaatttaaacaaatgttttatggttttttatcctctgatacattgtttcaactttaaaaaaccctctttatttgatatttaaactctatattaatgta

SEQ ID NO: 908445 - DNA, 120 bp, Artificial Sequence
  ENSG00000180458_10 (sequence is synthesized)
ttaagatttttttcgagacagggtctcattctgtcacacagtctggagtgctgtggtgcaattatggttcactgcagactccacctctccaggctcagataatcctcctgcctcagactc

SEQ ID NO: 908446 - DNA, 120 bp, Artificial Sequence
  ENSG00000180458_11 (sequence is synthesized)
ctcctgcctcagactcctgagtatctgggaccacaggtgtgcatcaccacacccagctaatttcttgtatttttttgttgggatggggttttgcgatgttgcccaggctggtctcaaact

SEQ ID NO: 908447 - DNA, 120 bp, Artificial Sequence
  ENSG00000180458_12 (sequence is synthesized)
aagtgttgggatcacaggcgtgagccaccacatccagcctaatttaagatttttaaaaagcagaatgtaaatatggtcatgcattgtgtaattctgtggatactttctgagtaatgcatg

SEQ ID NO: 908448 - DNA, 120 bp, Artificial Sequence
  ENSG00000180458_13 (sequence is synthesized)
gacttcatcattatgtgaacattatagagtgtacatacacaaacctagatgatgtagcctgatggtacagcctatcacttcgaggctacaaatccaaattgcctggatactgtaaacaat

SEQ ID NO: 908449 - DNA, 120 bp, Artificial Sequence
  ENSG00000180458_14 (sequence is synthesized)
tatactcaatggtatttgtgtatctaaacatgtctaaacatagaaagggtacagtaaaaatatggtataaaagataagaaatcgtataccggtatacagcacttaccgtggatggagctt

SEQ ID NO: 908450 - DNA, 120 bp, Artificial Sequence
  ENSG00000180458_15 (sequence is synthesized)
gcaagactggaagttactccgggtgagtcagtgactgagcggtgagtgaatgtgaaggctagggcagtactgtatactactgtagactttatatgtactgtatgcttaggctacactaaa

SEQ ID NO: 908451 - DNA, 120 bp, Artificial Sequence
  ENSG00000180458_16 (sequence is synthesized)
tttatttgaatttttttgtcggtaataaattaaccttagcttactataatttctttataaaccttttaatttttaaaaatgttttgactctcttgtaataaattagcttcaaacacattg

SEQ ID NO: 908452 - DNA, 120 bp, Artificial Sequence
  ENSG00000180458_17 (sequence is synthesized)
caggctggagtgcagtggcgtgatcttaactcactgcaacctccgcttcccaggtaatattatttaaataaaaatagtactagttaactgtgaaaattgcaattaatagggcagatcaag

SEQ ID NO: 908453 - DNA, 120 bp, Artificial Sequence
  ENSG00000180458_18 (sequence is synthesized)
caagcaattctcttgcctcagcctccagacttttttgttaaaaactaagacacaaacacattagcctaggtacacacagtgccaggatcatcaaaatgtcattaggcagtataaactttt

SEQ ID NO: 908454 - DNA, 120 bp, Artificial Sequence
  ENSG00000180458_19 (sequence is synthesized)
cagctccataaaagttggaaaaaaaataataataataaatacaattttataaaaagaaaattttcagctctgctataatcttatgggaccactactgtatatgtggtccctcattgacca

SEQ ID NO: 908455 - DNA, 120 bp, Artificial Sequence
  ENSG00000180458_20 (sequence is synthesized)
aaacatcattatgtggcacatgattataacaaatgatggatggcgaggttgtgaagaaactggaacccttgtgcattactggttgtaatataaaaaggtacagccactgtaaaaaaaaaa

SEQ ID NO: 908456 - DNA, 120 bp, Artificial Sequence
  ENSG00000180458_21 (sequence is synthesized)
cacagtttggttatttcttcataagttaatcatagaattaccatataatccagcaatttcacttctaggtatatgcccaaaataattgaataaggtgtttaaacataaacttgtacaaga

SEQ ID NO: 908457 - DNA, 120 bp, Artificial Sequence
  ENSG00000180458_22 (sequence is synthesized)
atgttcatagcagtacatttcacaatactcagataatcctctcattggaagcaactcaaatgtccaccaactgatggtattacccatgcaatggaatattattcagtcataaaaaggaat

SEQ ID NO: 908458 - DNA, 120 bp, Artificial Sequence
  ENSG00000180458_23 (sequence is synthesized)
gaagtactgaggcatgttacaacatgaaggaactttgaggacagtttgttaatacgctatatactgtgtaattctatttatatgaaatatccagaataggtaaatcattagagactagag

SEQ ID NO: 908459 - DNA, 120 bp, Artificial Sequence
  ENSG00000180458_24 (sequence is synthesized)
acagcagattagtggatgccaggagtttggggaaggaaggggtgggaagaatgggaagtgactgcttaatggatacagggtttctttttggggtgatgaaaaatttctggaactagattg

SEQ ID NO: 908460 - DNA, 120 bp, Artificial Sequence
  ENSG00000180458_25 (sequence is synthesized)
tagtgatggttgcacaacaccgtaagtgtaataatgtcactgaattatacactttaaagtgatttaaatggtaaattgtattatttatgtattttaccacaataaagaagtcacctatca

SEQ ID NO: 908461 - DNA, 120 bp, Artificial Sequence
  ENSG00000228016_0 (sequence is synthesized)
cctgtctcccggacgaggacctcaaccccttcccccgctcggggaccccggccacccgcagcccggccgcgctgcgcccagaaacccatgagtcttcctcagcagctgtcgaaacttgcc

SEQ ID NO: 908462 - DNA, 120 bp, Artificial Sequence
  ENSG00000228016_1 (sequence is synthesized)
ggcggttgcttgctcacctttgctgtctccccttcagaaaaggctggaggggagggcgaggaaggcttggcgtggggacgcccgtcgagtctctcagtgaggaatgagaggccagcttct

SEQ ID NO: 908463 - DNA, 120 bp, Artificial Sequence
  ENSG00000228016_2 (sequence is synthesized)
cctgcggggtatgaaggaggaactgtatctcctatatatattaagtttcatttataaagacatcagagagcacctgagaatgtttcaaggtcaccaaaagctttctgaaaatgcctttct

SEQ ID NO: 908464 - DNA, 120 bp, Artificial Sequence
  ENSG00000228016_3 (sequence is synthesized)
gcaaagaaggtttccagagatagaagataactcaggaagcttagaagaggtcaacctgggaagacaggattctttctccccacccgtggctctgcaggaagcaataccctcccctctggg

SEQ ID NO: 908465 - DNA, 120 bp, Artificial Sequence
  ENSG00000228016_4 (sequence is synthesized)
caaggtcgaccctccaagtccagatgagaagagttccctctgtctgctctttcctctgcctgatgacccagaggctttgcagctgtgatcctggcagcccctggccacctcagggagctg

SEQ ID NO: 908466 - DNA, 120 bp, Artificial Sequence
  ENSG00000228016_5 (sequence is synthesized)
cagaattcaaaccctggaaatggagctctgcttgcagctgcacctggggcctgacctgcttaggacaggcctgtctggacctaagagaaccccactgccacccactcagctactccctaa

SEQ ID NO: 908467 - DNA, 120 bp, Artificial Sequence
  ENSG00000228016_6 (sequence is synthesized)
cagactgcagagaccaagtctttttcatttctttatatccattgatttctcgagttattgaaactcaatatttactgagcacctacaatgtgccaggcactgtgataggcactgaagaaa

SEQ ID NO: 908468 - DNA, 120 bp, Artificial Sequence
  ENSG00000228016_7 (sequence is synthesized)
gggcaaaggacgagcagataaatttcctacttgcagggaacaccgtggtagtgagtaaaatgagacattgcaaataaacacataaatatataatatgtcaactggcaataattgatgcga

SEQ ID NO: 908469 - DNA, 120 bp, Artificial Sequence
  ENSG00000228016_8 (sequence is synthesized)
agaatgattaagcaaaacaaggaaatgcagagacagggaaggagcatctatctggtatgaagtagtcagagaaggcctctctggtcagatgacatttgggcagaacctggggcctgtctc

SEQ ID NO: 908470 - DNA, 120 bp, Artificial Sequence
  ENSG00000228016_9 (sequence is synthesized)
agcaccacctgttccttcctcggccacttgctccctgcagccaccaaaggcccctgtggttttcccgcctgaggctcaccagccacaggcctagaatatctggcttctctccccacgtcc

SEQ ID NO: 908471 - DNA, 120 bp, Artificial Sequence
  ENSG00000228016_10 (sequence is synthesized)
aaactcagctgaaatgccaaactgcaggaccttgtttcctgagcaactgccaatggggctgaatgatgcaactcggaaaggaagaggatttcattccccctgaatggactttgcaccagt

SEQ ID NO: 908472 - DNA, 120 bp, Artificial Sequence
  ENSG00000228016_11 (sequence is synthesized)
gggagacaggaaacaggagattggaggatactgggcagctgaactgcctcaccctttccccctgccccgtctggtgcacaatttctccacacagcctgctgtgtgtggccaagcctgtgc

SEQ ID NO: 908473 - DNA, 120 bp, Artificial Sequence
  ENSG00000228016_12 (sequence is synthesized)
gccgactgagtgttatgggttgaactatgttcctcagaaagatatgtcgaagtcctaacccccagtaactgtgaatgtggctttatagtatttggaaacagggtctttgctgatgcaatc

SEQ ID NO: 908474 - DNA, 120 bp, Artificial Sequence
  ENSG00000228016_13 (sequence is synthesized)
aagttaagatgaagtcattaagggggtaggggcctaatccaatctcttgtccttagaaggagaaagacagagacacatcaggggaagatggtgaggtgacaatggaggcagagattggag

SEQ ID NO: 908475 - DNA, 120 bp, Artificial Sequence
  ENSG00000228016_14 (sequence is synthesized)
caatttatctaaatgctaggcaacgccacagagagctgcaaacaccaaggctagaagaggcagggaaggagcctcccctacaggtttcagagggagcatggcctcaccatacctttactt

SEQ ID NO: 908476 - DNA, 120 bp, Artificial Sequence
  ENSG00000228016_15 (sequence is synthesized)
cagacttctagcatccagaactgtgacacaacacatttctgttgttctgagtgacaacagtgtgtggtgtgttattacagctgctctagaaactaacatatcgagcagccagctgtgtgg

SEQ ID NO: 908477 - DNA, 120 bp, Artificial Sequence
  ENSG00000228016_16 (sequence is synthesized)
gattgtacctcccaagtaaccctctaagacttaacctttgcccagggctctgtctctagagaactgtgacaatgataggtagacctgaataaagcgaaggatgatatctgcagggatatt

SEQ ID NO: 908478 - DNA, 120 bp, Artificial Sequence
  ENSG00000228016_17 (sequence is synthesized)
tgaggacagggagtgctgacaagggaggagccagtgcaaaggccccgaggtggcagtatgcttggtgtgttggaggagcaggaaggtgaccagggtgtttggggagtgaataaggggaag

SEQ ID NO: 908479 - DNA, 120 bp, Artificial Sequence
  ENSG00000228016_18 (sequence is synthesized)
agtgctcagaggagaagtcagaggaggggccaaagacatgttctctagggccagaaaggcctttggatcttttcgacattatcttcttgacatgtaatttatatagtagtaaaatgaaca

SEQ ID NO: 908480 - DNA, 120 bp, Artificial Sequence
  ENSG00000228016_19 (sequence is synthesized)
tgttgaacatttccatcaccccagagagttcactcctgctaccttccagtcaatacaacttaccaatcctgaggcaaccagtactctctcttttatcatcataaatttgttttaacctgt

SEQ ID NO: 908481 - DNA, 120 bp, Artificial Sequence
  ENSG00000228016_20 (sequence is synthesized)
tccttaatggcatataaatgaaactacatagcatgcttttgctcaaaatagtgcttgtgaggttcatccaggttgctgtatgtatacttcaattattattattgctgagtagtattccat

SEQ ID NO: 908482 - DNA, 120 bp, Artificial Sequence
  ENSG00000228016_21 (sequence is synthesized)
tgcctggatatatcacaaattatttatccattcttctgctgaatatttgagttatttgcagtttaggcctataataaatgaagccgctaggaacatttatgtgttcctcttattttggtt

SEQ ID NO: 908483 - DNA, 120 bp, Artificial Sequence
  ENSG00000228016_22 (sequence is synthesized)
gcatgcaatcatttctcttggtataaacctagcagtgtattttctgggtcaactggcttaggtttaggttaactgtattcgtttacaccattttatactcccgtcagcaatatatgagtt

SEQ ID NO: 908484 - DNA, 120 bp, Artificial Sequence
  ENSG00000228016_23 (sequence is synthesized)
ccaggtattctgcatcctcaccaacacttggagcctttctggtaggtgtgtagtggcattgcattgtgctttcaatatgcatttttctgctgactaatgcactcctttttatatgcctat

SEQ ID NO: 908485 - DNA, 120 bp, Artificial Sequence
  ENSG00000228016_24 (sequence is synthesized)
tattcacatatctccttttatgaagtaggtattcaagtcttttattcacattttatgttttgttatggccacatctcacttccagaatctgtattggttatctatcgcgcattaaaaaag

SEQ ID NO: 908486 - DNA, 120 bp, Artificial Sequence
  ENSG00000228016_25 (sequence is synthesized)
tactctaaagcttgacagctaaaaacaacaaacattcattctctcacacagtctctgcaggtcaggaacctgggtgcagcttcatggggtggttctggctcagggtctcaggttgcattt

SEQ ID NO: 908487 - DNA, 120 bp, Artificial Sequence
  ENSG00000228016_26 (sequence is synthesized)
gagctgctgtctgaggttacagccctacctatcaaagctgaaccagagccagactccatgtctaaactcacttatgtgagcttcagtgtgagaaatgtatgaattttgtttgatgaaata

SEQ ID NO: 908488 - DNA, 120 bp, Artificial Sequence
  ENSG00000228016_27 (sequence is synthesized)
ttgaaaagcttaacaacttcctcctactctcattggcctcttggtgcccagtatctgagtctgaaaaatctcatctataggaatcaatggcagcaaagacagaaccaaggtcccacggct

SEQ ID NO: 908489 - DNA, 120 bp, Artificial Sequence
  ENSG00000228016_28 (sequence is synthesized)
attggggaggttggcagatgagtgaggaaaaaggggtgtcagcaatctaaaaatattcaggctcacagaaatataactgtttgaaatgactcacttttattaagatcctgccatctcact

SEQ ID NO: 908490 - DNA, 120 bp, Artificial Sequence
  ENSG00000228016_29 (sequence is synthesized)
taccagcttaaaaaaaaatagatcacagcagaatgtttcaaattctccataaatggccatttgatccagcaacctacctgtggaaatttatgccaagattagaatctacaaaatacatac

SEQ ID NO: 908491 - DNA, 120 bp, Artificial Sequence
  ENSG00000228016_30 (sequence is synthesized)
agagatgcacattgaagtattatttattaggaatctaaattgtggaatcattaaagagaatacatattccctcaaaagaataccatggtgttattaaaagtagtcattatgagtggttag

SEQ ID NO: 908492 - DNA, 120 bp, Artificial Sequence
  ENSG00000228016_31 (sequence is synthesized)
gatataatataatattacaggaaattcttaggatataccatcaagtagaaaaacttttcttcccagcttttcaatgtgaaaatgtttaaacctacaggaaagttgtaaggccagaacaat

SEQ ID NO: 908493 - DNA, 120 bp, Artificial Sequence
  ENSG00000228016_32 (sequence is synthesized)
aaatgcttgtatagccttcatctagattctccaacagtgaccacagttgccacatctctttaagtgtaatgctcatcctttgagagtaagtgcagacattttgataccatgctctaagta

SEQ ID NO: 908494 - DNA, 120 bp, Artificial Sequence
  ENSG00000228016_33 (sequence is synthesized)
ctacaacacctatctaaaattgtagaaggaaactcttctatgattttcacactcaagacatttaacactgatataaagtttatattcaaatttctccaaaagatttaaaactatctcttt

SEQ ID NO: 908495 - DNA, 120 bp, Artificial Sequence
  ENSG00000228016_34 (sequence is synthesized)
ggcttgtgttatccaggactcaatggaggattgagcattgcatttagttgttgtgcctctttagttttttttgatctaaaacaatccctcaaccatttttaaaaattctttcatgacatt

SEQ ID NO: 908496 - DNA, 120 bp, Artificial Sequence
  ENSG00000228016_35 (sequence is synthesized)
gacatttttaaaagactctggaacagtcattttacagaatatccttcaatttggatgtgtctgtttcctcaagattagaaattacatgaacttcttggctaacttctccattttattttg

SEQ ID NO: 908497 - DNA, 120 bp, Artificial Sequence
  ENSG00000228016_36 (sequence is synthesized)
tgttcaaaatatattactctttcccatgtcctgtgaaaataaaaaatctctaatgtgtttgtgaaaaagattaagctaagattttgtttggatgcagtgtgatttggacttaggtgtgtg

SEQ ID NO: 908498 - DNA, 120 bp, Artificial Sequence
  ENSG00000228016_37 (sequence is synthesized)
tatctgaacttcatcctttgtcatcaaaagaatagtataataactaagaacatgtagcttaagaaatccaggcacttgagagccactgtaagtaaactctaattcccacagcagaaagaa

SEQ ID NO: 908499 - DNA, 120 bp, Artificial Sequence
  ENSG00000228016_38 (sequence is synthesized)
aggtaccattgtcttaaagaaatctctgcgacagagtcaacatcatacactctaagctctagagctatattttgtaaaaacaaaaaaggtttccctgcttcactttgcctgcggaccccc

SEQ ID NO: 908500 - DNA, 120 bp, Artificial Sequence
  ENSG00000228016_39 (sequence is synthesized)
ttctgatgaactccactcagggtaagcctgccttgttcctggagccctcttcctctggctgcaatccagagcaagttgctgtctggacttgttgaaaagctgttgtcctgagacttctct

SEQ ID NO: 908501 - DNA, 120 bp, Artificial Sequence
  ENSG00000228016_40 (sequence is synthesized)
ctggaagaaaggcttcagcaaataaaggaagtgtatgaagaaagaaagaagcatggcacattgctaccttaactaataaaaatctctgaactttccggtcccatctgaggaagcaaaaat

SEQ ID NO: 908502 - DNA, 120 bp, Artificial Sequence
  ENSG00000228016_41 (sequence is synthesized)
gctacttgctgcaaaaacgacaccatttatcacactgcaacaaaagcaatgtataggcatgccttggggatatgtgagtttgattccagactacttcaataaaatgaatactgcaatgaa

SEQ ID NO: 908503 - DNA, 120 bp, Artificial Sequence
  ENSG00000228010_0 (sequence is synthesized)
gtgcgcaggcgcttgcggcttcgcggggctgaccgtgcgcttcgcctgcggggtcgtgctggggcggcgggtacgctatttgaagaacaggtttccatgctcttagaggagcatcagaaa

SEQ ID NO: 908504 - DNA, 120 bp, Artificial Sequence
  ENSG00000228010_1 (sequence is synthesized)
atgaacaaaccccaggtgagttccttttttagattttttcattttccaggggatttgctggcttttataaaattcgtttattcagatggacatttaaaaagctacttcaggataaatgag

SEQ ID NO: 908505 - DNA, 65 bp, Artificial Sequence
  ENSG00000228010_2 (sequence is synthesized)
aggtggctgcggaaccctgtggtcatgtgatcctacaatcgtcaaaggagaggggcagatttgtc

SEQ ID NO: 908506 - DNA, 66 bp, Artificial Sequence
  ENSG00000228010_3 (sequence is synthesized)
tgatcttggctcactgcaaccttcacctctggggttcaaccaaatctcatgcctcggtctcccgac

SEQ ID NO: 908507 - DNA, 120 bp, Artificial Sequence
  ENSG00000228010_4 (sequence is synthesized)
gcgcctggccttcatttgtcttttatcttcctaatctgcacttcattttcactggccaccagaagaaacgaactagttactcttgggacagaaagatttcctggagtctgaaagaatgtc

SEQ ID NO: 908508 - DNA, 120 bp, Artificial Sequence
  ENSG00000228010_5 (sequence is synthesized)
tgaacatcgtcatggagcaaagaaccttgcagtgaacctccctgttgcctgtaattgttctttgttggaagttggcggtacaactcaggttttattagggggaccagagcaatatggact

SEQ ID NO: 908509 - DNA, 120 bp, Artificial Sequence
  ENSG00000228010_6 (sequence is synthesized)
caatagagactttttggaacatctgttttgatctaaggacaaaacctaaaagcatttggagaaatgaaagaaatggactgcctgtatttgaaataacttttccttacactctataggtgg

SEQ ID NO: 908510 - DNA, 80 bp, Artificial Sequence
  ENSG00000228010_7 (sequence is synthesized)
cctgtatttgaaataacttttccttacactctataggtgggacagcagatggttcaaagtcaaatccaggctagagtgca

SEQ ID NO: 908511 - DNA, 90 bp, Artificial Sequence
  ENSG00000228010_8 (sequence is synthesized)
tcgctgcaacctctgcctcctgggttccactgattctcctgcctcagcgtcctcagtagctaggattacaggtgtgtgtcaccacagcag

SEQ ID NO: 908512 - DNA, 120 bp, Artificial Sequence
  ENSG00000228010_9 (sequence is synthesized)
gtgcctggcctaaagtcatattctttggtgaatgtttctgcactatccattctctttttttgcttgtggtaaaatatacataacatcaaatttgccattttcactcttaatggtacaatt

SEQ ID NO: 908513 - DNA, 120 bp, Artificial Sequence
  ENSG00000228010_10 (sequence is synthesized)
cagtggcattaattatattcacagttgtgcagccatcaccgtttctatttccaaaaggttttcatcactctaaacaaaaagtgtgtctccattaagcaacaactccccatttctccctcc

SEQ ID NO: 908514 - DNA, 120 bp, Artificial Sequence
  ENSG00000228010_11 (sequence is synthesized)
cctcagccccggtaacatgtactttctgcctctgtgaagttccctattctaggtattttatataagtgcaaacatgaaatatttgtccttttgtgtctggcttattccactgaacatgac

SEQ ID NO: 908515 - DNA, 120 bp, Artificial Sequence
  ENSG00000228010_12 (sequence is synthesized)
gtttacagggttcctttatgctgtggcctgggtcagagctgcattcctttcggcgcctgaataatattccattgtgtggatcgaccacattttctttacctcttcatttgcagatggaca

SEQ ID NO: 908516 - DNA, 120 bp, Artificial Sequence
  ENSG00000228010_13 (sequence is synthesized)
tttagactttttccacgttttcattgttgtaaataatgctgctgtgagcattggggtacaggtatctgttcattccttcgcattttagtctgctttgtgtgctcttgccacttccccgcc

SEQ ID NO: 908517 - DNA, 120 bp, Artificial Sequence
  ENSG00000228010_14 (sequence is synthesized)
acctgcccaggacgtcctgataaagcctaacggcagcctctttgcagttcagtccaatgcgtgtttttctgacctggccttcctagaacattctgctgcattggcattgaactgctttca

SEQ ID NO: 908518 - DNA, 120 bp, Artificial Sequence
  ENSG00000228010_15 (sequence is synthesized)
ccttctagaaaggcccctctccctagtgtcttgtgacatgcttcttgtggctttattcctgctgctcagatttattggtgcccctcattgtgtcttcctccagcacattctcatggctta

SEQ ID NO: 908519 - DNA, 120 bp, Artificial Sequence
  ENSG00000228010_16 (sequence is synthesized)
cttatgtccagatgtccatcctttactccctcatctttttactcttccagtctttcccgagtatttcatgccctctgtagtggtagggacgggaggcagggaaattctgggcagaagagg

SEQ ID NO: 908520 - DNA, 89 bp, Artificial Sequence
  ENSG00000228010_17 (sequence is synthesized)
acggggtccctggcgagggccctaccctcaagccgaaaagcctgacactgtggtcgaaagtgagaactggccgggcgcagtggctcaca

SEQ ID NO: 908521 - DNA, 120 bp, Artificial Sequence
  ENSG00000228010_18 (sequence is synthesized)
atgaacaaaccccagaagtccagaaattaagagacctgataaagggaagccaggaaaatcgagatgcatatttgtggtacacttcagttctcagtaacaacacactgactaagaagaggg

SEQ ID NO: 908522 - DNA, 120 bp, Artificial Sequence
  ENSG00000228010_19 (sequence is synthesized)
aaaaatagcctgttagtatgactcatgtggaatgagtttgaatacgtttcagaatcaagtattagtgataaaaattatgccagtaataacactgatgaaattaatataagtgagaagttg

SEQ ID NO: 908523 - DNA, 120 bp, Artificial Sequence
  ENSG00000228010_20 (sequence is synthesized)
ccttttgatagtaatcaggaaaacactcatactgggaagaaatctgttgtatataaccaaagtgggaagtcaccaagtcatagtgaggaccttattaaggaacaggaaattcaagcttta

SEQ ID NO: 908524 - DNA, 120 bp, Artificial Sequence
  ENSG00000228010_21 (sequence is synthesized)
atgaacaaaccccaggttttccaggtctttgcagaagtccctgatggaatcacatgactgagccaggaaaacctcaggactggagtgcctcatgaactgttgaagcccaggcaaagtctc

SEQ ID NO: 908525 - DNA, 120 bp, Artificial Sequence
  ENSG00000228010_22 (sequence is synthesized)
ggtggtagactcgcctcagcttcccaaagtggtgggattacaggcgtgaagcaccgcgctgggctaggaatttggttttatggtctgatcacatggtgatctctgtaatgagattaatgt

SEQ ID NO: 908526 - DNA, 120 bp, Artificial Sequence
  ENSG00000234535_0 (sequence is synthesized)
agtcataagagaaaaagcattttgtttgaactccacccactgaccttttgtggtttggcagggccagctgctggcaggctcccccagtgctgaatgctccgcgctccactgtgctgggcc

SEQ ID NO: 908527 - DNA, 120 bp, Artificial Sequence
  ENSG00000234535_1 (sequence is synthesized)
tctcccccagaatcaggagccaaatgccacaccgattgtgcaacttgtctctggttaccaggaaaacgtaaagaaatgccaatgaagcagaaaggtcgacaaaattctttccaacgcttg

SEQ ID NO: 908528 - DNA, 120 bp, Artificial Sequence
  ENSG00000234535_2 (sequence is synthesized)
aacaaaaaaggtatttttagggccctagatttatggaagtcaattcttccactcctcgccaggctttcaaacctcctattctttgcactacattatttgaataaaccgtaaataccctta

SEQ ID NO: 908529 - DNA, 120 bp, Artificial Sequence
  ENSG00000228452_0 (sequence is synthesized)
tagtcagaatccactactctaccactaatgtctcttccatccggctctgcagcacctgagcaaaagacctctgcagctgagtccaaagagcattcccatgtgaaccgagcaaccaagtat

SEQ ID NO: 908530 - DNA, 120 bp, Artificial Sequence
  ENSG00000228452_1 (sequence is synthesized)
catcggagtggctgagcctgggatttccaacttgggagactacacagtggactctataatgattagtggcagcatccaatgtctcttccaagtctaaaatttgtgagtttcaaagttgac

SEQ ID NO: 908531 - DNA, 120 bp, Artificial Sequence
  ENSG00000228452_2 (sequence is synthesized)
cccaaacctggcctttgctgcctcagattctgtcactctagcaaggcagagagagcaaaaggggcaagacaaacctcatcaacagcacagaaatcccagaatcacacactctctggtcca

SEQ ID NO: 908532 - DNA, 90 bp, Artificial Sequence
  ENSG00000228452_3 (sequence is synthesized)
gccaagccaagtgaaatcaccctccattactcaacattctcgttcccagatgaattttaaactggagttgcaccaactgtgagacagcct

SEQ ID NO: 908533 - DNA, 120 bp, Artificial Sequence
  ENSG00000264699_0 (sequence is synthesized)
atatgaatgggaggtcgattttcactaaatttactcacgatttattcagagtaataggaaaaatgtcaaatataagtgtatcaatattgagtgtaattttggtacacttatacatttttc

SEQ ID NO: 908534 - DNA, 120 bp, Artificial Sequence
  ENSG00000264699_1 (sequence is synthesized)
ctagtactatttccataagtgatagaaaaaatgtcaaatataagtgtatcaatttgagtgtaagagcttgtgagatcttcaatttttcgatttttatgcgataggactatttggaaaaga

SEQ ID NO: 908535 - DNA, 120 bp, Artificial Sequence
  ENSG00000264699_2 (sequence is synthesized)
ttttggtggctgggactgtagttgttttgacattaatggtgatgaggtataagatacaggcatcaaagtgacagttaaggaggactgtttcctatttcctcagtttaatcttctcaggtg

SEQ ID NO: 908536 - DNA, 120 bp, Artificial Sequence
  ENSG00000264699_3 (sequence is synthesized)
agtttgaaggtgccaaataacatagattccaggatttggaaaggccacacaggtgtacagtgaaataatgaaggatttaaaagttgtgttggagagaaatagagtgagcacagacataag

SEQ ID NO: 908537 - DNA, 120 bp, Artificial Sequence
  ENSG00000264699_4 (sequence is synthesized)
atttcaaggaataaggaggagtaaaccacagtcagtgctactggcaacaagaaaagattgactcatgatatgaaagtccaagctgaaggcggagagggaaggctctagaaaaagcaatgc

SEQ ID NO: 908538 - DNA, 120 bp, Artificial Sequence
  ENSG00000264699_5 (sequence is synthesized)
gaggtgtgggggaggaaagcacaggcatccctgagaagcctgttggagaatcagcatcctcaggggagattcgagtttcaatcggagcaagaagcatcccagaggcactttaaccaaacc

SEQ ID NO: 908539 - DNA, 120 bp, Artificial Sequence
  ENSG00000264699_6 (sequence is synthesized)
ctggagagagaagaaataagtatattactgtgtcgtctttgcacagcaagaacttagcatcatcctcttgtattttggattttgtttcctatttcctcagtttaatcttctcagccatag

SEQ ID NO: 908540 - DNA, 120 bp, Artificial Sequence
  ENSG00000264699_7 (sequence is synthesized)
gtcataaagatggcgatggttatttccttcctcatacccatggtttgttacaatgtgactttgcggttcttcccatcagtaaacagaagccattttcttactccttgcctctggatgggc

SEQ ID NO: 908541 - DNA, 120 bp, Artificial Sequence
  ENSG00000264699_8 (sequence is synthesized)
cttgtggcttgctttgagcaatagaacgcatcagaaggtgacctcatgccagtttcatgccttggcttcaggaggccttgaattctctgctgctccttaggaatcttctgagccactgct

SEQ ID NO: 908542 - DNA, 120 bp, Artificial Sequence
  ENSG00000264699_9 (sequence is synthesized)
taacaagctccaacctctccagctggaagatgaggcataatacagaggagaggcaaactgtcctaaagagactaccctaagccaaccagtccagatgacaggaggttgaccttgacacat

SEQ ID NO: 908543 - DNA, 120 bp, Artificial Sequence
  ENSG00000264699_10 (sequence is synthesized)
gtgtaagcccagccaaggtcagccaaacctagtacagatcagaaaaaccatctatcaatgctcagcccaaatttccaacccacagaaatatgaattaaataaatgattgttgtttaaacc

SEQ ID NO: 908544 - DNA, 120 bp, Artificial Sequence
  ENSG00000228933_0 (sequence is synthesized)
aggggtagtccagtgctaaattgtcgcagccttgaaaatattctgcttcgttatttcgggcactccacagattctgttgcgaaggcagccatctttagttcgtctttcctagagaggtaa

SEQ ID NO: 908545 - DNA, 120 bp, Artificial Sequence
  ENSG00000228933_1 (sequence is synthesized)
agttcgtctttcctagagaggtaatgtatctttaattcttacggaattatggaattttgaattcatctttcctagagaggtaatatatctttaatactttttttcttttttctttttttt

SEQ ID NO: 908546 - DNA, 120 bp, Artificial Sequence
  ENSG00000228933_2 (sequence is synthesized)
caaagtgctgggattacaggcccgagccaccacgcccggctctttaattcttatggaattattgaattttgattttgtactctacactaatgtactgtatattttatatagatgcctaat

SEQ ID NO: 908547 - DNA, 120 bp, Artificial Sequence
  ENSG00000228933_3 (sequence is synthesized)
atgtagcttactaataaaatacattaaagtttcaatacctattttgagtagcatttcaatccaaatttttctatatgtgtaaataaaaaggataatttatctgattgataacaataaagc

SEQ ID NO: 908548 - DNA, 120 bp, Artificial Sequence
  ENSG00000228933_4 (sequence is synthesized)
aaagcaaaagataaaaaggtacacatgaaaaataacaaaagccaaacttttatttctcatgaaaacatattaaaatatctgtatagattaactatatacgtgttaaaacaatttagcaca

SEQ ID NO: 908549 - DNA, 120 bp, Artificial Sequence
  ENSG00000228933_5 (sequence is synthesized)
cttacaagcaaagtatctaaattaattgttgttgtaattgttgatgtgatactactgttgaacaggatgagaaattgtatgataacactcttgataaaaaataaagaaatgatacctgtg

SEQ ID NO: 908550 - DNA, 120 bp, Artificial Sequence
  ENSG00000228933_6 (sequence is synthesized)
acttccctcagcctgtagaacttccggcagcaactgcaattaggggtagtccagtgctaaattgtcgcagccttgaaaatattctgcttcgttatttcgggcactccacagattctgttg

SEQ ID NO: 908551 - DNA, 120 bp, Artificial Sequence
  ENSG00000228933_7 (sequence is synthesized)
cgaaggcagccatctttagttcgtctttcctagagagaattttatactgaggagacatcttatttgtaagtaatcagggaaaaaaaccagtcacatgacagcatattattactaatgatt

SEQ ID NO: 908552 - DNA, 120 bp, Artificial Sequence
  ENSG00000228933_8 (sequence is synthesized)
attttggaggacctgtttttgtttttaatatattatagtacatgtaagtagttatgcttaaagccataattaaaacaaagttataaaggaaagaagtaatgaaaaaagtaaataaaattt

SEQ ID NO: 908553 - DNA, 120 bp, Artificial Sequence
  ENSG00000228933_9 (sequence is synthesized)
ttgtggagaaataatttaatttagttgtgaaccatttataagaaacagacctctaattagtgaaatcattaaactaaaggccataagaaaaattgcaaaaaaaaaatcttttattgttcc

SEQ ID NO: 908554 - DNA, 120 bp, Artificial Sequence
  ENSG00000228933_10 (sequence is synthesized)
aaaatgacaacaataaggttaaaatcctctcaattttgatctgaacagtatatggaaaaatactttaaaactctaaccttgttatgtagggttttcatgccatttctcataaagtgtata

SEQ ID NO: 908555 - DNA, 120 bp, Artificial Sequence
  ENSG00000228933_11 (sequence is synthesized)
aactgtttagtgagaattgctattctcagaaaaatgtgttgagctttaactatatggaatcttgctaaatgctgttgttaattctaatgtattacctgtagactgcttttagctactctg

SEQ ID NO: 908556 - DNA, 120 bp, Artificial Sequence
  ENSG00000228933_12 (sequence is synthesized)
gtacataaacataaaatctataaataaggatgggtttatttcttcctttccaatcatcatgcattttttttaacatttccctgaattattgcccaggttatgaactccatgaaaagctga

SEQ ID NO: 908557 - DNA, 120 bp, Artificial Sequence
  ENSG00000228933_13 (sequence is synthesized)
atagaaatggtaatagtaggcattcatgtctcaatccccatctcaggatgaggttttcattattacatcactaatgatgatatttcccatagttttctgagtcattttttaataatcata

SEQ ID NO: 908558 - DNA, 120 bp, Artificial Sequence
  ENSG00000228933_14 (sequence is synthesized)
actggatggtaaatttgccaaatggtttctctatatttgttgtgacagtgacatgattttggtccgttgtgttgttaaggagattatatttcaatatgttaaaccaataataattcaaaa

SEQ ID NO: 908559 - DNA, 120 bp, Artificial Sequence
  ENSG00000228933_15 (sequence is synthesized)
tgtgagctgcaaagttgctttacatctttgccagcagctgataagggtgggccataaacccaatttgtgtcccttgggctggtgattctgctggaaatcctgatcagctgcttagctttt

SEQ ID NO: 908560 - DNA, 85 bp, Artificial Sequence
  ENSG00000228933_16 (sequence is synthesized)
ggtgattctgctggaaatcctgatcagctgcttagcttttcagccgcaactttgttagaggatacactcaccagcagttttgcca

SEQ ID NO: 908561 - DNA, 120 bp, Artificial Sequence
  ENSG00000228933_17 (sequence is synthesized)
ttgagaagattctgctccattttttctgattatggattctgttcagaaggaagccgaattttaagtcatcgttctaggataggtaatatatctttatttctcagaagttttcagttggta

SEQ ID NO: 908562 - DNA, 120 bp, Artificial Sequence
  ENSG00000228933_18 (sequence is synthesized)
tgcatttgttcacttcactgatttttttttttgtatttcatatagatatctaatatgtaggttaataataaaatagttttaaaagtccaatgcctatatggtcaatctaaatatttcatt

SEQ ID NO: 908563 - DNA, 120 bp, Artificial Sequence
  ENSG00000228933_19 (sequence is synthesized)
tctgtaaataaaaatataatttacttgattgacagcaacagcaaaagcaaaagaaaatcatgggataaatgtctaatttttattaaaatgtatacatatctacgaattatatccaaaata

SEQ ID NO: 908564 - DNA, 120 bp, Artificial Sequence
  ENSG00000228933_20 (sequence is synthesized)
atataatttaaacacattcccaagaaaaatataaaaatcgtttttataattgctcatttgttgttaatgttggcatgcatgagaaaatgtgtgagaagaaattaaaactataaagaataa

SEQ ID NO: 908565 - DNA, 120 bp, Artificial Sequence
  ENSG00000228933_21 (sequence is synthesized)
cacaaaggaccttaaaatgtgaaagaggaagataggagagtcagggtcagcgatgatgtgaatacagaagcagaggtcacaatggtgtgagaaagacacatctggctttgaagatagagg

SEQ ID NO: 908566 - DNA, 120 bp, Artificial Sequence
  ENSG00000228933_22 (sequence is synthesized)
cgatgtgccaaggaatgcaggaagcctctaaaagctgaaaaaagcaagaagtagattctttcctgctgcctccagaagaaacaaaccccttcagacgccttgatttttgccccataatac

SEQ ID NO: 908567 - DNA, 120 bp, Artificial Sequence
  ENSG00000228933_23 (sequence is synthesized)
cctttttaaccttttgactcatagaaatataagataataaatttgctttgttgtaagccactaagtttgtggtaagcagtaaggcaaaacccattttttaactaaattatgctgtgtttg

SEQ ID NO: 908568 - DNA, 120 bp, Artificial Sequence
  ENSG00000228933_24 (sequence is synthesized)
tgtgtttgtagtattaatactatgcactatacaattatttaaaatattaaatatttatatatctacaagacaaattgctaatagaaagcaaattctaatttacttacaggcatgtgtaca

SEQ ID NO: 908569 - DNA, 120 bp, Artificial Sequence
  ENSG00000228933_25 (sequence is synthesized)
aatatatgattcatttaaatacatatgtatttttatatacacactatagtgctaatcataattgctttcagaaagcatatgcattggcattttctgaaaattttacaatgagcacatcat

SEQ ID NO: 908570 - DNA, 120 bp, Artificial Sequence
  ENSG00000228933_26 (sequence is synthesized)
atgcaattgtatgcgataaaagatataagtaacaaatagtcatgtgatgacttattactaataatagtttgaaagatctacgctgattttatttcaaagtagtacacaatagcatacgaa

SEQ ID NO: 908571 - DNA, 120 bp, Artificial Sequence
  ENSG00000228933_27 (sequence is synthesized)
agacatctctacatatactgtttttttggaatatgttttagttttaattgtttttcattgtatagccagttgatcctttttgttgttgctgttgtcgttgttttttgagatggaatcttg

SEQ ID NO: 908572 - DNA, 84 bp, Artificial Sequence
  ENSG00000228933_28 (sequence is synthesized)
acaggcacacgccaccacgcccggctaactttttttttgtattttagtaaagacagggtttcactgtgttccctaggctggtcg

SEQ ID NO: 908573 - DNA, 120 bp, Artificial Sequence
  ENSG00000228933_29 (sequence is synthesized)
agccactatgcccagccaatccattctttatgtcaataagattaaaacatcttttaaggcagaaaatcctcctgtagagtgtgtcttttctctcataatttgattagtatcctacaattt

SEQ ID NO: 908574 - DNA, 120 bp, Artificial Sequence
  ENSG00000228933_30 (sequence is synthesized)
agttattttattggttgtctaaatgatctggtttcttacatgtgctgggtatgtaaacacaggtacattattgaggtacagcctaatgcaaaacagacaagtaaatatggagtatattac

SEQ ID NO: 908575 - DNA, 120 bp, Artificial Sequence
  ENSG00000228933_31 (sequence is synthesized)
agaagatacattttgtagtaattatgtttcagtaatggctagaatattatctatacctatttgtattgtgtttgctggttaccctagggattagcataggaatcttttacttaccttggt

SEQ ID NO: 908576 - DNA, 120 bp, Artificial Sequence
  ENSG00000228933_32 (sequence is synthesized)
ctacttacagttaagatagtgccaatttatgtatatgaagcttcacaataggatgaatctatttattctcccttactttttgctcttatgtttaatattttatttaaatattttttaaaa

SEQ ID NO: 908577 - DNA, 120 bp, Artificial Sequence
  ENSG00000228933_33 (sequence is synthesized)
aacttaagttgattacgtataatttatttttgcccattttcttcaattacttttatatgtgtatttgtaatcatgtatcaaatgtgtgtatttatttacaactaaatccaatgtatatac

SEQ ID NO: 908578 - DNA, 120 bp, Artificial Sequence
  ENSG00000228933_34 (sequence is synthesized)
ccatctttagttcgtctttcctagagagcgttgagaagattctgctccattttttctgattatggattctgttcagaaggaagccgaattttaagtcatcgttctaggatagattcagct

SEQ ID NO: 908579 - DNA, 120 bp, Artificial Sequence
  ENSG00000228933_35 (sequence is synthesized)
ccattttctctggtggtagatctccatggatgctattgagaaggtacttctcaaagtccacgaggacaaggacatctttccaccgaatgccacctggtttataacaaaaggtttgtcatc

SEQ ID NO: 908580 - DNA, 120 bp, Artificial Sequence
  ENSG00000228933_36 (sequence is synthesized)
tttaagtcattgttcacctgttggtaatatgtccttatttctctcgcaatattggtagatagacatttgttcacttcattaatattcttcatatttcatgtatatgtcaaatacgtagca

SEQ ID NO: 908581 - DNA, 120 bp, Artificial Sequence
  ENSG00000228933_37 (sequence is synthesized)
agctatttttaattaaaattatttatataaactaattaattcatataaataaaataatttcactgacagtaaaaacaaaattaagcagaggaaaagctagcataaaagtaacagaagcca

SEQ ID NO: 908582 - DNA, 120 bp, Artificial Sequence
  ENSG00000228933_38 (sequence is synthesized)
ctagcataaaagtaacagaagccaaagaaatccaggtttctttcttattataatacagatttgaacaaattatataaaaaatttaaaaatataagcatagttctgaacaaaatatcaaaa

SEQ ID NO: 908583 - DNA, 120 bp, Artificial Sequence
  ENSG00000228933_39 (sequence is synthesized)
ataaacggagaaaatggattgcaggcctgatgctaatcctttaattcccatttatatcttgcatgtgtgattgttttgtattgcaatctgaattatctgtattaaatactatggagataa

SEQ ID NO: 908584 - DNA, 120 bp, Artificial Sequence
  ENSG00000228933_40 (sequence is synthesized)
ctgcacaaacaagtttccattgaatgatagaataaagagatactgacttccccggagcctccaaacttgagtagtcaggtaaggatccttgagtaacaagacagcaaagtaagtattatc

SEQ ID NO: 908585 - DNA, 120 bp, Artificial Sequence
  ENSG00000228933_41 (sequence is synthesized)
cctcctgggattttggttggttacaacattgtgttgagtatttgcattccatttttcccttggggaattacactttctgagacctcaatttaggaggcttaagtgaagataatccatccc

SEQ ID NO: 908586 - DNA, 120 bp, Artificial Sequence
  ENSG00000228933_42 (sequence is synthesized)
cagttacacttggcctgcataaaccaagcagatcaaaaagagtgctatgttcattactcaatgaattggtcgatattggcttccttgatatataaaactccattagtcaaaaatatcttc

SEQ ID NO: 908587 - DNA, 120 bp, Artificial Sequence
  ENSG00000228933_43 (sequence is synthesized)
tctggactattatggcatatttaagccaagaacatggggtcaaggatacctctgcagatgttgttctggatttcaggcaacggtctggaaattttaagtaactctcgtgttatttgaatt

SEQ ID NO: 908588 - DNA, 120 bp, Artificial Sequence
  ENSG00000228933_44 (sequence is synthesized)
aggtaaagcgtgttcacatttggacagcatttattctttggtgtaccagggatccccaagaccactctcaggatagatgatttgttagaagaattcacagaacccagaaaagctattata

SEQ ID NO: 908589 - DNA, 120 bp, Artificial Sequence
  ENSG00000228933_45 (sequence is synthesized)
aacccagaaaagctattataagttggacatgatggcttgcacctataggcctagctacttgggaagctgagatgagaggattcctggagccaaggagtttgaggctgcagtgaactatga

SEQ ID NO: 908590 - DNA, 120 bp, Artificial Sequence
  ENSG00000228933_46 (sequence is synthesized)
ctgagtgacagagcaagaccccatgtgcaaaaataaaaataaataacaaagaataaacaaaagctattatactcataattacagttttttacagcaaaagggtatacattaaaatcagca

SEQ ID NO: 908591 - DNA, 120 bp, Artificial Sequence
  ENSG00000228933_47 (sequence is synthesized)
aagggaaaaggcacatagggagagagtccaaaagaaaccagactgaagcttccagctatcctctccctgcggagttatatgaacagtgtttaattcttccagcacgtgatgtgtgacaca

SEQ ID NO: 908592 - DNA, 120 bp, Artificial Sequence
  ENSG00000228933_48 (sequence is synthesized)
gtacatgcaaagtgttaccagccttggtcatagagccatggagggtctggatcattgacctttgctactcagttccagcccccacagaggtcaaaatgatacaacatgtcctaaagtgcc

SEQ ID NO: 908593 - DNA, 120 bp, Artificial Sequence
  ENSG00000228933_49 (sequence is synthesized)
tgatacaacatgtcctaaagtgccaagcatacaaaagcagatatttagcatgaagcacatatttagcataaactatctggtgtgccccagatagtttctactaaaaatacaaaaaattag

SEQ ID NO: 908594 - DNA, 120 bp, Artificial Sequence
  ENSG00000264695_0 (sequence is synthesized)
tcagccccccgagcaactgaagctacagagctgccttagtgaccagatgtcacaatgtgatacagagccagagaggaagtcatttttgtccatgatgcaaggaacccagcattttgacaa

SEQ ID NO: 908595 - DNA, 120 bp, Artificial Sequence
  ENSG00000264695_1 (sequence is synthesized)
ccacccagaaggtccacgtggtggacaagggcaagtgacaaccagagccacgactcaaaagagggtggctgcttcaggctgatttcctttgacagactggtttatggacgtgtgcaaggg

SEQ ID NO: 908596 - DNA, 120 bp, Artificial Sequence
  ENSG00000264695_2 (sequence is synthesized)
cctctctttgggaactgtcagaaatgacaggagagatacaagaaggtcaacgtctggaaatccgacaaaatgggcttaattcattgtaattttgtttgcttttaaaaaattaaatctctg

SEQ ID NO: 908597 - DNA, 120 bp, Artificial Sequence
  ENSG00000264693_0 (sequence is synthesized)
ggggctgggcggggtctcagctcccgacaaggctgtgaggccatcctgggcacgtggccctggactgtcccaggggaagcccctctccacttcccccaatcccttcccaagccaagccca

SEQ ID NO: 908598 - DNA, 120 bp, Artificial Sequence
  ENSG00000264693_1 (sequence is synthesized)
gcagccaggagccattaggggttagaggaagactgcagaaaaggccaaaggtgcatctggtagtttgccttgcgagcccacacgggtgggtgaagaaattcactgggtactgtgctgagg

SEQ ID NO: 908599 - DNA, 120 bp, Artificial Sequence
  ENSG00000264693_2 (sequence is synthesized)
aacagtaaagggtcctctggatatgtagggccgagtccacggctctgctcacacttggatactcagtctcattcctccctggccagcaggagctttctgttgggtccagttagggtctga

SEQ ID NO: 908600 - DNA, 120 bp, Artificial Sequence
  ENSG00000264693_3 (sequence is synthesized)
ggcgcctgggtcccacaaactagatggccatagggacgtccggattcaacctgctccaattcagcagctgcggcgaaaataacatccagtcgtgttttctcccaggttctactctgagtg

SEQ ID NO: 908601 - DNA, 120 bp, Artificial Sequence
  ENSG00000264693_4 (sequence is synthesized)
ggccccactcgccaagtacacactgaagcctcaccattgtgctcccgtcaaagccctggtttcctccatgggagctggcccttcaggacctctcagctgtgctcctgtggggtctggcag

SEQ ID NO: 908602 - DNA, 120 bp, Artificial Sequence
  ENSG00000267356_0 (sequence is synthesized)
aaaggttaatttgaatttaattacatcaataatactttctcaatcatgaatactgtgattacaaaaataagtgaacattgaatataattatgcctctccatcaatgtcgtccctcttttt

SEQ ID NO: 908603 - DNA, 120 bp, Artificial Sequence
  ENSG00000267356_1 (sequence is synthesized)
aaacatacaatttaattatctaattgagtttgaattatttgttataataaacacactgattcagagtaatttacggaagtgctagcaccttagttctttctaaagtgacacttctaattt

SEQ ID NO: 908604 - DNA, 120 bp, Artificial Sequence
  ENSG00000267356_2 (sequence is synthesized)
cacatatgggatttctatccagtattgattttctaatgttgagtaaggtgtgagctcctggtaaaagctttgccacattctttacatttgaagaatttctctccagtatggactctctga

SEQ ID NO: 908605 - DNA, 90 bp, Artificial Sequence
  ENSG00000267356_3 (sequence is synthesized)
tgttgagtaaggtgtgagccccagaaagacttctctccagtatggattctttgatgtcgagtaaggtgtgagcccctgttaaaggctttg

SEQ ID NO: 908606 - DNA, 120 bp, Artificial Sequence
  ENSG00000267354_0 (sequence is synthesized)
gttcaagtagagtcagggaaggtcctaggggaggtggtctctgaactcaagggcaggttgccaaagaggaggagttgggagagcattgatgaccggcagagaagtcaatgcgcagaggtc

SEQ ID NO: 908607 - DNA, 120 bp, Artificial Sequence
  ENSG00000267354_1 (sequence is synthesized)
agatgagagagtgacaaggaggaaacaaggcaggctggagcagagaggaccacaggagcaccatgtcatgcttcacccagaaatcagtctttgactgcgaaatggagcacaaaggaatca

SEQ ID NO: 908608 - DNA, 120 bp, Artificial Sequence
  ENSG00000267354_2 (sequence is synthesized)
acagaaccagtgggggttaagttcggattgggggcaccaggagacacaatgctctgagaaagaagagatcagcacgtgggctgctgtgagcatagaaagcttcacatggggatgaaactt

SEQ ID NO: 908609 - DNA, 120 bp, Artificial Sequence
  ENSG00000267354_3 (sequence is synthesized)
tgaaagagggcatggctgagaactgctatgagtgcctttggaaggcccaggggaacccacggtggacgtcacggccaaaagattactgccgaggactgcatctcaaggaatgggcaaggg

SEQ ID NO: 908610 - DNA, 120 bp, Artificial Sequence
  ENSG00000267354_4 (sequence is synthesized)
gaagacagaatcaggctaactcagcaatgccagtgtctcaagcataaaagagcatgtaactggactaagggcaatgaggaacttaagaggtgtcaactacatcaagctgcatagagagat

SEQ ID NO: 908611 - DNA, 120 bp, Artificial Sequence
  ENSG00000267354_5 (sequence is synthesized)
ggaaatgaacaatataagataaatcaaaggaagtccttcttcatgtagaagaggaataactcacagacctcattaccaaagaaaagttttcattaataaatgtacccattacaatttgaa

SEQ ID NO: 908612 - DNA, 120 bp, Artificial Sequence
  ENSG00000267353_0 (sequence is synthesized)
gccgccgccatgttgggctggaggtacgcacgctcccaacgctctctggctgcgctcccaacggtatctggctgcaaatcacggcgggagcgcctcgggcctcttgtcttttgaccctgt

SEQ ID NO: 908613 - DNA, 120 bp, Artificial Sequence
  ENSG00000267353_1 (sequence is synthesized)
ccttggaacccgaggagacttgccgttcccgggggagggtgtgtgtgagtcgggcggcggaggccgtctacgccattgtaggggcggggggagccgagattagagcatcagcctgagaga

SEQ ID NO: 908614 - DNA, 120 bp, Artificial Sequence
  ENSG00000267353_2 (sequence is synthesized)
agtggtgcttctggttctccgctctgcctcgcatctttcagcgaggcctcgtacctcagttttcccatccgtgaagtggagctgggcctgcctgactcattcattcatcaggtggaggcc

SEQ ID NO: 908615 - DNA, 120 bp, Artificial Sequence
  ENSG00000267353_3 (sequence is synthesized)
ttgacgctctaggagccctttcaaaggactttgccttacacgaaatagtacctatcgttattcactctgcagtaaccacccggatttgagtggcgggtgtttgcacagtaattcagtttc

SEQ ID NO: 908616 - DNA, 120 bp, Artificial Sequence
  ENSG00000267353_4 (sequence is synthesized)
ctcttcaccctcctgccattcgtcttcccctccagtttatctcctgaaagagtttgaaatcagccttgtctattattgataaactcctgtaggtgtatttggtatttcccttaaaacatg

SEQ ID NO: 908617 - DNA, 120 bp, Artificial Sequence
  ENSG00000267353_5 (sequence is synthesized)
cagaccaaaggaaaggcaatattttccccccacgaagcagttaacttggtagaggccagccgttgtatggaagagaaagagagtctcttcaggacaggcagtttggatcctgctaaacca

SEQ ID NO: 908618 - DNA, 77 bp, Artificial Sequence
  ENSG00000267353_6 (sequence is synthesized)
aatctagaacatggatgtccccttgctttagcagacctagctgatcacacaaggtcctgtattgttaggctgcatca

SEQ ID NO: 908619 - DNA, 120 bp, Artificial Sequence
  ENSG00000267353_7 (sequence is synthesized)
tcacaggccgcaaagacccaggtatctatccagttgttagaaaccatcctgagagttagataccacttttctgttggaaatacagaccatttcctgaagccgtatggttgaggtaaaaca

SEQ ID NO: 908620 - DNA, 120 bp, Artificial Sequence
  ENSG00000267353_8 (sequence is synthesized)
ggccttttgcagtcttatattttgagtaaggccaaaactgcctagtgttacaaaaccagacaaaaagcccaggtacccagtcttgcaggatagaaatgtgtgactaaaatgaagcatcga

SEQ ID NO: 908621 - DNA, 120 bp, Artificial Sequence
  ENSG00000267353_9 (sequence is synthesized)
tctgagaagactacaaatgagcgggaaagattggacaggagcatgctatacattatttagattaatgttgatatttaaggagccaggatattggtttgtttttgaggggtgcccatctac

SEQ ID NO: 908622 - DNA, 120 bp, Artificial Sequence
  ENSG00000267353_10 (sequence is synthesized)
tttatgtaagaagctataaactacacttctttcagtttctgcttaatccttgctcaaacaaggaataatttcttattccaaagtagacattggtacatcttttactaggtacataatttg

SEQ ID NO: 908623 - DNA, 120 bp, Artificial Sequence
  ENSG00000267353_11 (sequence is synthesized)
ggatgaagtctgataaagctccttagaagtacttacagtacaccctcacaagggtgtaccatctacccatggtttaaacagaaattaaaattctaccttcgtggaaaaatttgccaagtt

SEQ ID NO: 908624 - DNA, 120 bp, Artificial Sequence
  ENSG00000267353_12 (sequence is synthesized)
ttaatggattcagtgctcattaaaaacttttagcctgtcttgatctttaacataattattggtgtgaaacaatggcttctgtggaaaattaaagttttagtggtttgctatttgtgaaat

SEQ ID NO: 908625 - DNA, 120 bp, Artificial Sequence
  ENSG00000267353_13 (sequence is synthesized)
acaggctttttcatgtatcatattagcatataagctggcttaatcattagtactgatcttcaagttactaagacaccagatatttgttactttgtaatttgagtttttaaaaaaattccg

SEQ ID NO: 908626 - DNA, 120 bp, Artificial Sequence
  ENSG00000267353_14 (sequence is synthesized)
aaattggcttttcgatgtgtgaaaaggactacttattagatgcttgtttttaaatttacattcaattaattaaagctagactctttatattcttaggcttggtatactatttgtatgttt

SEQ ID NO: 908627 - DNA, 120 bp, Artificial Sequence
  ENSG00000267353_15 (sequence is synthesized)
tgtagtaagtgtataaaaataatacctttgactttgtataaaaaaaatctttcttgctttaaaagccatgttggatttgcattctagaccgtaataaatataactactttaacataaaaa

SEQ ID NO: 908628 - DNA, 120 bp, Artificial Sequence
  ENSG00000239665_0 (sequence is synthesized)
agagggaagccaccaaggtgccattgaggattggtgtctggctctctatgggcaagagcgccaggggacacacagtgggaccggaaccttccagaatgtctcctcagtcaggttttcaag

SEQ ID NO: 908629 - DNA, 120 bp, Artificial Sequence
  ENSG00000239665_1 (sequence is synthesized)
ggggagggaatgcggagacaggagaaaaaaagtgctgagggccaaagctggtgcagggtgacggtgcgtctgggtaaggcaaatgagaggcagtgaggtgatctcagaatggcgttgagg

SEQ ID NO: 908630 - DNA, 120 bp, Artificial Sequence
  ENSG00000239665_2 (sequence is synthesized)
cggtcagattaggccgggctggctcacacgagggtcccgggcttggctttttcctgcccgtaccactggacatcagctagttctggatagagggaggaatccaggaaacagctatcattg

SEQ ID NO: 908631 - DNA, 120 bp, Artificial Sequence
  ENSG00000239665_3 (sequence is synthesized)
tagctcctgtgggaggcccaagaaaggagatgagacagttagttagtggaggaggatgggttcagccaggcctgcactgagaaggatatgttcaccttgacagggccctgtgctaatcac

SEQ ID NO: 908632 - DNA, 120 bp, Artificial Sequence
  ENSG00000239665_4 (sequence is synthesized)
gagtctttcctgttcggagcagtgaggcctgagaccctcaacagtgctgtgtgtacagaaggcccccagaatccacacaaaggggccgcctgaaacctagagcatttgtgaaggaggaaa

SEQ ID NO: 908633 - DNA, 120 bp, Artificial Sequence
  ENSG00000239665_5 (sequence is synthesized)
aatccatgaaagctggaaaatcacaaggcatctgtgcatatactggtggattttaatgagagtcctgtgtttggagcaccagaaataaaccagcttcagaagcaaagatctgaacgtcta

SEQ ID NO: 908634 - DNA, 120 bp, Artificial Sequence
  ENSG00000239665_6 (sequence is synthesized)
tgacactctttcgagctgacacagtgaagaacatagaaggagaactcacccagtctgccagggtcacagaatgatcatactcaagatcttcctggggagtcaatggcaaatttcactggg

SEQ ID NO: 908635 - DNA, 120 bp, Artificial Sequence
  ENSG00000239665_7 (sequence is synthesized)
ctattttacagatgaagaaggaacataaagaaggttctgggaccccgaagtccacggaacacccaccattacctgatctttggagcttgtcatttggccagtggaccctaataaacgtcc

SEQ ID NO: 908636 - DNA, 120 bp, Artificial Sequence
  ENSG00000239665_8 (sequence is synthesized)
acggggatgtggggatagaatgccagagcctggctcgctagggcatccaggttcttccttcctctttgccctgctgtctccaggcaccaagaatctcctacagttccccaaagatgaacc

SEQ ID NO: 908637 - DNA, 120 bp, Artificial Sequence
  ENSG00000239665_9 (sequence is synthesized)
ccccattatctcaggtcactctgtttcccccgatctttaccaaattcctgactcagagttcctcccatttgcttctgactctcattttattcttacctctcattttattcttatgatgtt

SEQ ID NO: 908638 - DNA, 120 bp, Artificial Sequence
  ENSG00000239665_10 (sequence is synthesized)
agaacattcaaaatgtgagttttccctatagtgaaactgcggtggtattttgaattgtgttttaaaagtttaaaaaaaatcaatgatgactttgctttattctaaataacatgcattgtt

SEQ ID NO: 908639 - DNA, 120 bp, Artificial Sequence
  ENSG00000239665_11 (sequence is synthesized)
ttgtgattataaaagtgtgttcatttaaaataggaaagtctatagaagaaaataaaaggcttttttttttttttttaagtattttagggaggtatcaccatttaggttgggtagaagtaa

SEQ ID NO: 908640 - DNA, 120 bp, Artificial Sequence
  ENSG00000239665_12 (sequence is synthesized)
ttcttaaatcttaagaagcaatcatagatatgtggaagccaatagtcattactagggatcatgattcggaaaaacagcctctcttcaatgatcctgaatgagccctttgaattcctctcc

SEQ ID NO: 908641 - DNA, 120 bp, Artificial Sequence
  ENSG00000239665_13 (sequence is synthesized)
ggggagtggtgagggatgggtgacaggaagggaccctaacccaaagtagttcagagcgggtgagttttaggagcatttcggtaccaaacacagcttcacgattgagaatcatcagtcatc

SEQ ID NO: 908642 - DNA, 120 bp, Artificial Sequence
  ENSG00000239665_14 (sequence is synthesized)
ttaagcatttactgtatctgaaccctgcggctgttcctgctttcagccacttctgcattgagaagggccggggatgtggtggaagctagatgtcaccaattagttaatgttccatataaa

SEQ ID NO: 908643 - DNA, 120 bp, Artificial Sequence
  ENSG00000239665_15 (sequence is synthesized)
gaaactgtcatgtgacaccagtacctcctaaaattggtcagtgtggtagatggtttagagaaaaaaggaacctgttccacagggctgtgaccattcgagggaagcacattcaaagatgta

SEQ ID NO: 908644 - DNA, 120 bp, Artificial Sequence
  ENSG00000239665_16 (sequence is synthesized)
gatcccctcagagaagttttccatttccctgaagttaaagatcttcaaatgactgcaaataacatgaggatatatagaaaaatgcccttccccaatttccaaatcgtgaaaatttggctc

SEQ ID NO: 908645 - DNA, 120 bp, Artificial Sequence
  ENSG00000239665_17 (sequence is synthesized)
tgggaatatgaatcccttctgcaccctggaatcaccagtccagccatgcatggagctggggaaagcaggccctgaattgtctagagagacttggtggaggaggccacggcccgccttgtc

SEQ ID NO: 908646 - DNA, 120 bp, Artificial Sequence
  ENSG00000239665_18 (sequence is synthesized)
cccgggctccagtgacatcggctggtacacgcttttgtttgcttacgcttgttgaactgagtttttcatatgtaactaacgaatactggcacatgtaagcccgagaatttgcatttctga

SEQ ID NO: 908647 - DNA, 120 bp, Artificial Sequence
  ENSG00000239665_19 (sequence is synthesized)
caagatcccaggaccaccgcctactttaagagaacacagacaattcacctctataaaggcacagccaggaaaaggagtaggcagaggtgacagcagatcatggggcttctcttgaaagga

SEQ ID NO: 908648 - DNA, 120 bp, Artificial Sequence
  ENSG00000239665_20 (sequence is synthesized)
atcaggcagtagatgaggttaagggttcctgtggtggtttatttgggacactgattactcacagtaaaatgtctacaaatctttgaatgtagatagaacatggtgagactgggcatgatt

SEQ ID NO: 908649 - DNA, 120 bp, Artificial Sequence
  ENSG00000239665_21 (sequence is synthesized)
gcactatgtattgatcataaaggctcaagaaagaccattgagttcaaagcagtgatgtttggatcaggcagtagatgaggttaagggttcctgtggtggtttatttggatctgaacgtct

SEQ ID NO: 908650 - DNA, 120 bp, Artificial Sequence
  ENSG00000239665_22 (sequence is synthesized)
gaatactggcacatgtgagactgggcatgattcagaaaagttggaagatctagagagggatcttgcaatctgaagtttcttgtttagtcactggaggtaagcccgagaatttgcatttct

SEQ ID NO: 908651 - DNA, 120 bp, Artificial Sequence
  ENSG00000239665_23 (sequence is synthesized)
taattgtcaataataaagggaaggagtctaaggactgagcccggggacaccaatgccaagaagccagggaagaaaaactaccaaggagattgaaaaggagagccctggactacgatacca

SEQ ID NO: 908652 - DNA, 120 bp, Artificial Sequence
  ENSG00000239665_24 (sequence is synthesized)
ggtggaaaaccaggacaatgtggcatcctgacatcccagtgaagaaagtgtttcaatgaagtgtcccacttcttcacactccaaagtgtggctggcaagtgatattagatgagaacagag

SEQ ID NO: 908653 - DNA, 120 bp, Artificial Sequence
  ENSG00000239665_25 (sequence is synthesized)
aattaaccattggatttggcattgcagggagtcatcgttgaccttggcaagagtgggtttagtagagtggggaggggtgaaagcataattggagtgggtttgagagaaaatggataaatg

SEQ ID NO: 908654 - DNA, 120 bp, Artificial Sequence
  ENSG00000239665_26 (sequence is synthesized)
attataatcctatgggctcttgaaattactctccacactgtgttattcttctgaatgcagtgcaggttcttcagctttgctggagtacgtatcgactttgctgggagcatgactttgtgc

SEQ ID NO: 908655 - DNA, 120 bp, Artificial Sequence
  ENSG00000239665_27 (sequence is synthesized)
cttaactaccggtatagtggggaaagacagggtttggggtcacagagggcagagctggaattccagctccctccagctgtcagactttgggccaggcacttagttcctctgagcctcatc

SEQ ID NO: 908656 - DNA, 120 bp, Artificial Sequence
  ENSG00000239665_28 (sequence is synthesized)
tatgaaacgaaaacatctgggtatttcccccgcaaggggatgatgaggattgtatgagctcatgtgtgttagaagctgctcgcagcctttgagtacacagcaagcactcagatctgaacg

SEQ ID NO: 908657 - DNA, 120 bp, Artificial Sequence
  ENSG00000239665_29 (sequence is synthesized)
gttgtattggattatttcatttcagatatggctgtttttgttttgcttcttttgatgtgcaagttcatgtgccataaatgtgtggtgtagacactactagttacttacgcaatgttcatt

SEQ ID NO: 908658 - DNA, 120 bp, Artificial Sequence
  ENSG00000239665_30 (sequence is synthesized)
ctctctccttctctactaacagagccctaatttgtttagaactgtaatatgcacagttaaaacaacttgtcctctcaggaccttttgcagttagggttggtcgtatgacatggtcctgcg

SEQ ID NO: 908659 - DNA, 120 bp, Artificial Sequence
  ENSG00000239665_31 (sequence is synthesized)
aagaagatacggatagaagtctgtggatacctttggaatgatgtttaaccaaatatttgggtaccgtcttccccagtgaagttgacacaaaattaaccatcacagctgccttcctgtggg

SEQ ID NO: 908660 - DNA, 120 bp, Artificial Sequence
  ENSG00000239665_32 (sequence is synthesized)
ggctcaagaaagaccattgagttcaaagcagtgatgtttggatcaggcagtagatgaggttaagggttcctgtggtggtttatttggtaagcccgagaatttgcatttctgacaagatcc

SEQ ID NO: 908661 - DNA, 120 bp, Artificial Sequence
  ENSG00000239665_33 (sequence is synthesized)
ggcagagggaagccaccaaggtgccattgaggattggtgtctggctctctatgggcaagagcgccaggggacacacagtgggaccggaaccttccagaatgtctcctcagtcagggccct

SEQ ID NO: 908662 - DNA, 120 bp, Artificial Sequence
  ENSG00000239665_34 (sequence is synthesized)
cttaggggttctgatacttactcatccccaatgtgtgtagttgtggtttttcagtcttgatgctgtgtctcacaatttattctactgatgatggacatagccctaatttgtttagaactg

SEQ ID NO: 908663 - DNA, 120 bp, Artificial Sequence
  ENSG00000239665_35 (sequence is synthesized)
gctgtatgcaaacatgtcaagctatcaaagggagctgcctttcggtttcattaattttgttgtgtgcagcttccactgaaggcttcagggcacctgatctcttttgtgtgttgagaaaga

SEQ ID NO: 908664 - DNA, 120 bp, Artificial Sequence
  ENSG00000239665_36 (sequence is synthesized)
gcaagtgcttggccaggacacagccctttttcttgcaccctgagacatcctaagacactggctgtttcacctgccccagtgtatttgctgtcttcatcagctctctttctccccctgaca

SEQ ID NO: 908665 - DNA, 120 bp, Artificial Sequence
  ENSG00000239665_37 (sequence is synthesized)
ttcttgcctggcattttgagtcagcctgagtataatccaaaccgaaatgaaatgctgtctggaaatcttaccaaagaagcacagtcccacttcgtgcttccatctccccacatcccaagg

SEQ ID NO: 908666 - DNA, 120 bp, Artificial Sequence
  ENSG00000239665_38 (sequence is synthesized)
ctcctcagtgtccctctctgagtggtaagagtatgttaataagccagtgctgagaccggagcacgaggcaactgctcaatgttggtcattgtcactgttattaaatgtaacttaagggaa

SEQ ID NO: 908667 - DNA, 120 bp, Artificial Sequence
  ENSG00000239665_39 (sequence is synthesized)
cttttacgcatccgaagaatccaataggggctttatatcagaccaaggacttcgtatttcaccttattttgttttaaagaaatagggataaagagtttgcaagtgcttgtgtacaataac

SEQ ID NO: 908668 - DNA, 120 bp, Artificial Sequence
  ENSG00000239665_40 (sequence is synthesized)
tacatcatttcccaccacactgatcattaatcatgtcagtctcaaaggactaacgttttatgtacattttgtattaactgaactcagctaaacagtaaaacctgttttacttaatctctg

SEQ ID NO: 908669 - DNA, 120 bp, Artificial Sequence
  ENSG00000239665_41 (sequence is synthesized)
tcttgactaccagactatcatgatgtttgttggaactgtaattcctgctctccatttctctctgtcccccaagttgaaaatataacccaaatctttagaatttttgcctctcattccttg

SEQ ID NO: 908670 - DNA, 120 bp, Artificial Sequence
  ENSG00000239665_42 (sequence is synthesized)
caactccagtgggctagaatcttgatccagttttctccagactagatttcaagctactatgcatgatgtagaacatgtaaccatgtaacctcatcagctaccttttcccttttgactttt

SEQ ID NO: 908671 - DNA, 120 bp, Artificial Sequence
  ENSG00000239665_43 (sequence is synthesized)
tatccatgaatcttctttgggagaaagaaaaatggcccaatgtataatgtttctgaatggggaagggagaaaaaaaaaaaatcactgttctttgtagctctaaccatgaaagtaaaagca

SEQ ID NO: 908672 - DNA, 120 bp, Artificial Sequence
  ENSG00000239665_44 (sequence is synthesized)
acatagaaggagaactcacccagtctgccaggttaggatgtggtgggggctgcttgggggggtggctccaatttcacttgacggtgtcgagcttctctggctttgaggtaaggcagctac

SEQ ID NO: 908673 - DNA, 120 bp, Artificial Sequence
  ENSG00000239665_45 (sequence is synthesized)
atgcaggtggtgcaagaaaggcagagagcagacagggatcagacacaggtgaaagagcttgcgacttgttggctgacaccaacccagtggccagaggtcaccatttccagggatgctggg

SEQ ID NO: 908674 - DNA, 120 bp, Artificial Sequence
  ENSG00000239665_46 (sequence is synthesized)
aaggaccccagagcagggtctcagcatccctatggcatggtcacagtgggcaaccatctctacatgcccccccaacctctgcatcccacccattccattttctacccactaccatgcacc

SEQ ID NO: 908675 - DNA, 120 bp, Artificial Sequence
  ENSG00000239665_47 (sequence is synthesized)
ctgagtcaagctgacctgggatcctaggtccccgctttgccaccaggaggtaggcatagggatggtgacggtttctacagcagcaaagaatctgatgtccccatagtcctttgagcgaga

SEQ ID NO: 908676 - DNA, 120 bp, Artificial Sequence
  ENSG00000239665_48 (sequence is synthesized)
cctgagcagggctcatacagggagggcatatttctctggccccagggcattttcagtgtggccctgttatgaaattgtttctccccattgtgaagagagggcatccagaaaggttctcag

SEQ ID NO: 908677 - DNA, 120 bp, Artificial Sequence
  ENSG00000239665_49 (sequence is synthesized)
agcctgctctctctgctgtttcaggcttatcattgctactgtagggcgctttgaagggagcagggcttttaatagctcatccaaacctgaccactacgcatttactgatgtaggcagcat

SEQ ID NO: 908678 - DNA, 120 bp, Artificial Sequence
  ENSG00000239665_50 (sequence is synthesized)
ggaagtccagctggaaagatttagtaggaagtcaatcctacgtaaatgcatcctttgcttttttggtaaaggaatcctttccatcagtaaacctcagatacagcttaacaattttagtct

SEQ ID NO: 908679 - DNA, 120 bp, Artificial Sequence
  ENSG00000239665_51 (sequence is synthesized)
aaaatatgttccaaaagatctacctcatctctttacataaagcaaatctactagaccagtgctgcagttttgatagaacataaaccctcctgtttgttggagatatttacaaaacgttgg

SEQ ID NO: 908680 - DNA, 120 bp, Artificial Sequence
  ENSG00000239665_52 (sequence is synthesized)
ttctttatctaatagggtcacagaatgatcatactcaagatcttcctggggagtcaatggcaaatttcactgggctattttacagatgaagaaggaacataaagaaggttctgggacccc

SEQ ID NO: 908681 - DNA, 120 bp, Artificial Sequence
  ENSG00000239665_53 (sequence is synthesized)
ggtggcgctggatagcggtaagagcgggggctccaaaggcagaacttccagcttcacatctcagctctgcacctgctcgctgtatgactttagcaagcaactggatctttctaagcgtca

SEQ ID NO: 908682 - DNA, 120 bp, Artificial Sequence
  ENSG00000239665_54 (sequence is synthesized)
cagtagatgaggttaagggttcctgtggtggtttatttggtatgtgaagagcctaactgttggctggcccatggtgttctcctgtggttcattatggaggcttctgggtcacagaaccca

SEQ ID NO: 908683 - DNA, 120 bp, Artificial Sequence
  ENSG00000239665_55 (sequence is synthesized)
catatgagagggcatcgggaggatctggatgatggggtgggagatgctggattggtggtttggttctcaggtggctcctagaggagccgcagtatggaaaccactggcctgctcctgcct

SEQ ID NO: 908684 - DNA, 120 bp, Artificial Sequence
  ENSG00000239665_56 (sequence is synthesized)
ctgagaaaatgaagctggaggaaaagatgtaaagatgtattttttccaaacttgcgatgttttatacagaatctttcttagtgcttccacatagttattgaagtgagactgggcatgatt

SEQ ID NO: 908685 - DNA, 120 bp, Artificial Sequence
  ENSG00000239665_57 (sequence is synthesized)
ctgtctcaaaacaaaacatactctgggggtcttttctgggaagcagtgttaggaatatcataattttgatgtaagaaccttcagctaaaaacatagttccagttccccatgtatctagaa

SEQ ID NO: 908686 - DNA, 120 bp, Artificial Sequence
  ENSG00000239665_58 (sequence is synthesized)
tgtatccttgtggaaatgatgacatggacaaaagcaacacatgtgggaccacagactcatgggcagtaggaacaaaactccccttacggtacctctattcatcagtactttggtgaggtg

SEQ ID NO: 908687 - DNA, 120 bp, Artificial Sequence
  ENSG00000239665_59 (sequence is synthesized)
actggagcgtagagagagctaattctcctttaccccatctttttgatctattcaggccaccagtggattgaatgatgcccgtatgcactgagaagggccatgtgtttactcggtctacca

SEQ ID NO: 908688 - DNA, 120 bp, Artificial Sequence
  ENSG00000239665_60 (sequence is synthesized)
catcaagtgacttgtggcaagtgtgccatggtgctgaggtctttgttcatttcgactggaataaaatcggactttgccacatcctcctaagataaaatagatgtgagagcatttacttga

SEQ ID NO: 908689 - DNA, 120 bp, Artificial Sequence
  ENSG00000239665_61 (sequence is synthesized)
agtggttctgtggatgttggtacattgtgatttcagttacagaaaagccacagatggaactgatgttaaaagcacctcaaggacaaccaggtactggagcagatgccaaaaggagttctt

SEQ ID NO: 908690 - DNA, 120 bp, Artificial Sequence
  ENSG00000239665_62 (sequence is synthesized)
ctgccctgtcatcaagattctgaatcactcaatttattggacaaaagcatttagctctgattcctcttgtgttctctccaaatctccatcagagtaagaagagactttgagagaattagt

SEQ ID NO: 908691 - DNA, 120 bp, Artificial Sequence
  ENSG00000239665_63 (sequence is synthesized)
ctctcttctgagtatctgttatagatgtgaaagatacttcagaaaatacatggctctggtttcatcattttgggaaaagcagcttgatatgctttgacttgttattactacagttccgtc

SEQ ID NO: 908692 - DNA, 120 bp, Artificial Sequence
  ENSG00000239665_64 (sequence is synthesized)
tgagatggcaactcacgttacactaacgtgggccaaaaaaaaaagtgcttgtgtttttgtcctttatagagttttttaaaaattaaaaagctaaaaattagtttgtcttaaatattatag

SEQ ID NO: 908693 - DNA, 120 bp, Artificial Sequence
  ENSG00000239665_65 (sequence is synthesized)
catagattttagaggtctctttgagattttagaacctgttagttcatcctttgattaggaatttctagccaggactcaggataaaggtccaatttctggtcagtaggggcgctggttgtg

SEQ ID NO: 908694 - DNA, 120 bp, Artificial Sequence
  ENSG00000239665_66 (sequence is synthesized)
aggctgttgtctcagctccagacacatcttcatactctgctttgtcatgagactctgcaaaccacatctttcctttgctggagagctttttgttagggtataccaggattggacacgaga

SEQ ID NO: 908695 - DNA, 120 bp, Artificial Sequence
  ENSG00000239665_67 (sequence is synthesized)
gactggaacctggaggcgggaagaagggagctccccccttctatttgctttctgtttctaacaacgatggcacagccgtggttttccagaagctgagcagtggctgttcactcctgaagg

SEQ ID NO: 908696 - DNA, 120 bp, Artificial Sequence
  ENSG00000239665_68 (sequence is synthesized)
aatagtgggttccagggtgcggttttccacacttgtagaaccagcttcatctctccactcaaagatcaccgcaccgtcagccggtggcgcctcttcagaggtttgaatccgagctctgtg

SEQ ID NO: 908697 - DNA, 120 bp, Artificial Sequence
  ENSG00000239665_69 (sequence is synthesized)
gagtccccacatttctgaggtaccagttaccaggagagtggtgtccacgcctgagaggtttcactcccagctcctggaaaagcttccacattttaatgatcccagccttgcctctggttc

SEQ ID NO: 908698 - DNA, 120 bp, Artificial Sequence
  ENSG00000239665_70 (sequence is synthesized)
ccagccctaagcgtggcggcttcctattgcagttatctctgtgatacctgagagtcccctttttgcctcctacctcttcactatctgttgacagttgtttgttcaatcatctctcttaga

SEQ ID NO: 908699 - DNA, 120 bp, Artificial Sequence
  ENSG00000239665_71 (sequence is synthesized)
ataattgctatggtcttggtccgagatataataggcaaccaggttttcagctcctggaaaagagccatgagacccaggtcctcttctacgcaatcccaagctcaggtggatttttcacta

SEQ ID NO: 908700 - DNA, 120 bp, Artificial Sequence
  ENSG00000239665_72 (sequence is synthesized)
gctttcctcaatacaacatagggatccctccctagatgatgtgattcacccccgtggggatagctgcgagattaggggaaactgatgttttacctacaccctggtcatgaagaccttgct

SEQ ID NO: 908701 - DNA, 120 bp, Artificial Sequence
  ENSG00000239665_73 (sequence is synthesized)
ttgctccctccttcattcctaccctgctgttcctcagtctcctcaagacctatgtccaatcagtctgttttctcctacttaatagcaccttctcagcttcccttttctttttagtcagtc

SEQ ID NO: 908702 - DNA, 120 bp, Artificial Sequence
  ENSG00000239665_74 (sequence is synthesized)
tggatcccattaccatcatttcagtcaccttccagtcccttttactctcacatgtttttgttgtcctgccacacctgctgacaaccccaagccagagtcattccaacctctctcctccca

SEQ ID NO: 908703 - DNA, 120 bp, Artificial Sequence
  ENSG00000239665_75 (sequence is synthesized)
tgctctgacatgatagtagctgccctggaggaaattcacaatctaagcatccaatgtcagctggatcctccctgccatagctctcctgatgcctctgctctatcctgatcctaccctgct

SEQ ID NO: 908704 - DNA, 120 bp, Artificial Sequence
  ENSG00000239665_76 (sequence is synthesized)
gcctcctttttatctcacttggagggtggcctaacctacccttctcatacagcttgaatatggaggcaatcttaaggcctctttctacctccaaatctaccagcatcttgtcttacttga

SEQ ID NO: 908705 - DNA, 120 bp, Artificial Sequence
  ENSG00000239665_77 (sequence is synthesized)
tttggagaaaaagctgttcctctttctgtcataggctaaatcttccactatcctgctttcttatctattatgttatctaatttactttctattggccccctctacttccagtgtaattaa

SEQ ID NO: 908706 - DNA, 120 bp, Artificial Sequence
  ENSG00000239665_78 (sequence is synthesized)
gtcttataagggcagggaatttgcatctgttttgtttgtgcagatgtgaggtgtgaggaaaggaaagctgatgaaaaagaaagcttggatgattcccagatttttggcctgaacactgga

SEQ ID NO: 908707 - DNA, 120 bp, Artificial Sequence
  ENSG00000239665_79 (sequence is synthesized)
aggcctggagttgcctgtaactgagctggggagggccattcattggtgaggtttggaggggacagtcaagagtttagttcaggacatgttagcacattagacatccacgtggggatattg

SEQ ID NO: 908708 - DNA, 120 bp, Artificial Sequence
  ENSG00000239665_80 (sequence is synthesized)
tgagagatgccctgttgatctcttatccttgggaataattttaatctcttcctcctgtttaatgctagtgtcctcctttccccataaatgtggttgtgtgcctgtttgtctcgtccatga

SEQ ID NO: 908709 - DNA, 120 bp, Artificial Sequence
  ENSG00000239665_81 (sequence is synthesized)
gagtaagcttttaagaactggaactctgcaccaaatgtgcagtgaaatgactttgttggagacccattgtctgcctgctggccctcatcagtggtgacttcatattcctctttttagaga

SEQ ID NO: 908710 - DNA, 120 bp, Artificial Sequence
  ENSG00000239665_82 (sequence is synthesized)
gttttacatagagcctttttgaaatggtatcctgggaaaataaagagctggctgtttgtaatactttctaccaggagtggggtgttcactttgtgttctctaataattaaatgttcggaa

SEQ ID NO: 908711 - DNA, 120 bp, Artificial Sequence
  ENSG00000239665_83 (sequence is synthesized)
tcaccttttttggcacaatgaaagggcagataaacagattgatagatgaagaggtgaaaagtaggaagcagtgggaaagaaatgggaagaggatcttcctatctaccagttgctttcatg

SEQ ID NO: 908712 - DNA, 120 bp, Artificial Sequence
  ENSG00000239665_84 (sequence is synthesized)
tggtagagcttaatgagaagatgatacgctaatttcctgagctgtgacatatttacatgtagaagacttacgtgagggccctttgtcttttttcaagtgtagatgattttgagatggcct

SEQ ID NO: 908713 - DNA, 120 bp, Artificial Sequence
  ENSG00000239665_85 (sequence is synthesized)
ggttgcttccccaaggagaggaggcttcaggctctcccacgggcagtttttagggtgtaggaagtagagaacactctcttgatgggctcacttccagatgtgattctcagtggattgttt

SEQ ID NO: 908714 - DNA, 120 bp, Artificial Sequence
  ENSG00000239665_86 (sequence is synthesized)
tccttttcggcagcatcaactagctctagtggccaaggcttctgtaaggcttcccatccaggagtttttcatgcagggatgctattggaggccagacttccagttttgctaggaggagat

SEQ ID NO: 908715 - DNA, 120 bp, Artificial Sequence
  ENSG00000239665_87 (sequence is synthesized)
gcctattaagttagggggccagggattcgattgcagcagtcactactcaagtcagtcagtcaccatttcatctgtaagtcagggactctttgtacttgcagtccccataggcgcttggct

SEQ ID NO: 908716 - DNA, 120 bp, Artificial Sequence
  ENSG00000239665_88 (sequence is synthesized)
ctcgtgatgtgatttagagagtcagtggcagggtttgagctgcagtgtgagcacagaggattaacggtagtcacagagagcctgagcagcctgtgtgagtgaccctctgcatcctacatg

SEQ ID NO: 908717 - DNA, 120 bp, Artificial Sequence
  ENSG00000239665_89 (sequence is synthesized)
gaatgagggacaacatggagagactaaagacgatccctcaaagcctagcttccttcattgctcctgccgtggactgtcttgcagggacagtacacatgctggcacatattacacacaggg

SEQ ID NO: 908718 - DNA, 120 bp, Artificial Sequence
  ENSG00000239665_90 (sequence is synthesized)
agccgtttgcagtgaatagtgatgcaaaggctgagatagtatcctcataaagattgacctctaatctcaagtccttttttgtagtagcaggaatacataatttagacaatattatcttgc

SEQ ID NO: 908719 - DNA, 120 bp, Artificial Sequence
  ENSG00000239665_91 (sequence is synthesized)
acagttaacagaaggaaactagaataagagggaattcacctcagctgaacaaaccaagcttctctgtatcatctagcaagctcataaaaatgccatctatagattgactttaataaagga

SEQ ID NO: 908720 - DNA, 120 bp, Artificial Sequence
  ENSG00000239665_92 (sequence is synthesized)
gcccactgaggacacaagcacctgaattacagattcccagtgcacacgcaagcatttatcgctgacagacaaaggaacaaaatctccaggaggcagctgggatcttttcattttgaaaat

SEQ ID NO: 908721 - DNA, 120 bp, Artificial Sequence
  ENSG00000239665_93 (sequence is synthesized)
gctttaataagtgttgacaacactgttttgcaaaatgtaaaggtactatacaaattcttaatacaaaaagaataaattaaaagcagatttctttttttaattctgcaactttgtctacaa

SEQ ID NO: 908722 - DNA, 120 bp, Artificial Sequence
  ENSG00000239665_94 (sequence is synthesized)
cgtacatctttttcattgattacagttgaacagaatccagtaaaatcattttacatgctctacagtcagtttcaggagcaacctaatcttttttcccccattattaaactagagtccatt

SEQ ID NO: 908723 - DNA, 120 bp, Artificial Sequence
  ENSG00000239665_95 (sequence is synthesized)
ttacacaacttgtaataaactattgacattaatgtatatgtaaaactttacacctagttaactaagcagtaactggtcatctgatagcacctggatggggtttgctatatttagaactaa

SEQ ID NO: 908724 - DNA, 120 bp, Artificial Sequence
  ENSG00000239665_96 (sequence is synthesized)
actaatactgaatgaaaacaaattggaattttaacagtttcaacactcacctgcatataataaaataaaaaatcaacctggctcacaacatagtctgatgtatgtgttttcaccagtctt

SEQ ID NO: 908725 - DNA, 120 bp, Artificial Sequence
  ENSG00000239665_97 (sequence is synthesized)
actcatccccaatgtgtgtagttgtggtttttcagtcttgatgctgtgtctcacaatttattctactgatgatggacatgtgagttgtttctggtttttgcatggatgttttatatgtgt

SEQ ID NO: 908726 - DNA, 120 bp, Artificial Sequence
  ENSG00000239665_98 (sequence is synthesized)
ttagtagcttattaatatatccgaaaggcttgctgattagacacctgagttagcaacagatcatacaagtcatgcagtactttcagtccccataattgagtcaaaatacctagtttgtta

SEQ ID NO: 908727 - DNA, 120 bp, Artificial Sequence
  ENSG00000239665_99 (sequence is synthesized)
ggagggacgggccctcttttacccatggcctcattttgtatcacatcatagcaaacagtttatgccaagaaccaaaattgctgtttttcaaatttggcttgagtcctcactagttgtagg

SEQ ID NO: 908728 - DNA, 120 bp, Artificial Sequence
  ENSG00000239665_100 (sequence is synthesized)
caggtttcaagaccatcttaagtgcataggaccctgaggagggcttgtacatttcggagcctgttgacagccaaataatacaatcaatcatatatttggatcaggtgagactgggcatga

SEQ ID NO: 908729 - DNA, 120 bp, Artificial Sequence
  ENSG00000239665_101 (sequence is synthesized)
gagtcctgtgtttggagcaccagaaataaaccagcttcagaagcaaactccctcccacctctattcttcctttagccaagaagtacggatggatgagattctcctcagagttttgggacc

SEQ ID NO: 908730 - DNA, 120 bp, Artificial Sequence
  ENSG00000239665_102 (sequence is synthesized)
gggaagaatgaagctgtggctgtcaaaaatgcctggtggacctagcggatgacacctagacagcatgtttgctgctgtcctctatgctgaccaagcctctcctctgcagattaaaacccc

SEQ ID NO: 908731 - DNA, 120 bp, Artificial Sequence
  ENSG00000239665_103 (sequence is synthesized)
tccggatcagagctagctctaaacagcaccttgtcggttgagattttgagcaacagggtcctgcaaggtgggcatatttggcagcctgaaggagaggtagaatatttgcctaaccccaca

SEQ ID NO: 908732 - DNA, 120 bp, Artificial Sequence
  ENSG00000239665_104 (sequence is synthesized)
gctagtaaacccaggacaaatgcatcggcagcttctcaaggccagggagagagagcacacatcttgccctaggaaattcacagacacgctgaaatttgatgggaactgatctagccaaat

SEQ ID NO: 908733 - DNA, 120 bp, Artificial Sequence
  ENSG00000239665_105 (sequence is synthesized)
caattgtttgctagaatcaacagatcttcctgtttagttgctcagtaaaatatccttgcctctgggcacaatgcaccaagctggaggatgccatcaaggagaagttctttgcctgatctc

SEQ ID NO: 908734 - DNA, 120 bp, Artificial Sequence
  ENSG00000239665_106 (sequence is synthesized)
attgacttttgagcactttaagcctaaagggagcaggaacaagaagcgagaggaaaaggtgaaggttaaagagaactatttcggagataataaactccttctgaatcctgccaaggctgg

SEQ ID NO: 908735 - DNA, 120 bp, Artificial Sequence
  ENSG00000239665_107 (sequence is synthesized)
ctgcgctgttgtctcagagggagaagaatatcaacatggactcctgcctgtggtcttgaaataggcaagtcaccaagggacaaagactgttctgtgagtttgggctccctggggcagctg

SEQ ID NO: 908736 - DNA, 120 bp, Artificial Sequence
  ENSG00000239665_108 (sequence is synthesized)
ttcctgagctgttacaatggccctggcaccagacactgattcagagttttgtggggagcccaggacaaattctcactatttaaactaagacaagtccaaggctgaatgccctgtccatgc

SEQ ID NO: 908737 - DNA, 120 bp, Artificial Sequence
  ENSG00000239665_109 (sequence is synthesized)
aggaaccagaccaggtggtactgttatctgcccctgtgctttgcagatttcgacgtgaatcttgttaaatgcacattaggttcagtaggccagggtggtgcccgggagactagctttcta

SEQ ID NO: 908738 - DNA, 120 bp, Artificial Sequence
  ENSG00000239665_110 (sequence is synthesized)
acgagctcccaggtgatggtggtagtgataaaaatgttggcttatggacatttggaaaagcagtgctcatagcttttggtactcagcacagctgttactcaagaatgctgggggtgcttc

SEQ ID NO: 908739 - DNA, 120 bp, Artificial Sequence
  ENSG00000239665_111 (sequence is synthesized)
gccaacagaggaggaaggtgctggtactgatgtccccacccgagagtctgtcctggccttggttttccacagtgagggctcgttctaatgttgcacaatgtcatactcagatatcactgt

SEQ ID NO: 908740 - DNA, 120 bp, Artificial Sequence
  ENSG00000239665_112 (sequence is synthesized)
gacctgttactatgctttagaacccgagaggcctctgttcacatggcagcatgtgtgagtggatgctcccggagcaggtggagtggtggcgctggatagcgttagttaatgttccatata

SEQ ID NO: 908741 - DNA, 120 bp, Artificial Sequence
  ENSG00000239665_113 (sequence is synthesized)
ccacttctgcattgagaagggccggggatgtggtggaagctagatgtcaccaagtagggggatgtagattcacagcggtctattctggttcctcttgggaggttcaaaccttggggaggt

SEQ ID NO: 908742 - DNA, 120 bp, Artificial Sequence
  ENSG00000239665_114 (sequence is synthesized)
atccttacccttctggtctggtagagcctatggttattcttggattccacatacatgaaaagcgaagatttttctttgtttttatgcttaagctaacttcagttctgctttcccacaaaa

SEQ ID NO: 908743 - DNA, 84 bp, Artificial Sequence
  ENSG00000239665_115 (sequence is synthesized)
gtttagtcactggaggtaagcccgagaatttgcatttctgacaagatcccagataaacctgcaggaacaaaaatgccgaccagg

SEQ ID NO: 908744 - DNA, 88 bp, Artificial Sequence
  ENSG00000239665_116 (sequence is synthesized)
aacgtggtgaaaccctgtctctactagagattagccaggtgtagtgatgcacactagtaatcccggctactatggaggttgcagtgag

SEQ ID NO: 908745 - DNA, 120 bp, Artificial Sequence
  ENSG00000239665_117 (sequence is synthesized)
attgagttcaaagcagtgatgtttggatcaggcagtagatgaggttaagggttcctgtggtggtttatttggtgagactgggcatgattcagaaaagttggaagatctagagagggatct

SEQ ID NO: 908746 - DNA, 120 bp, Artificial Sequence
  ENSG00000239665_118 (sequence is synthesized)
gcagcatagaactgattgtggtcctccgatgcatttctggtgtcgagaacttcctttctcaacctccccttcccccatagccatccccacaagctgtcccatcaaggaatatttcaggtg

SEQ ID NO: 908747 - DNA, 120 bp, Artificial Sequence
  ENSG00000239665_119 (sequence is synthesized)
taaactgaatatgccacgaggcctcctcttcatgaagtgcttggttggcctacgtatgggtggcaggctggacacagctgaatcgtctttctgggtcaccctgtaactcaagtccccttt

SEQ ID NO: 908748 - DNA, 120 bp, Artificial Sequence
  ENSG00000239665_120 (sequence is synthesized)
cccgttctctcccaacgctacttatccgcaggaattggatgccggctggcccccctgatggttcctggcctaggggctgtcatggcagagggaagccaccaagggccctgtgctaatcac

SEQ ID NO: 908749 - DNA, 120 bp, Artificial Sequence
  ENSG00000267359_0 (sequence is synthesized)
tggggtctattaagattgtatagagtaccacggggctgttaactgctatcaggagagcatcacacaggacattctgttctttcctgaagccaacatcaccagcccagcttctagaaaata

SEQ ID NO: 908750 - DNA, 120 bp, Artificial Sequence
  ENSG00000267359_1 (sequence is synthesized)
aaattgtacctcttcctgtgtcactgaaaattcaaggaatagatgttaccaaaacttacaaaagcatgtgagcctccttaaatttgtggacttttatgggatatccgggactttttcgtg

SEQ ID NO: 908751 - DNA, 120 bp, Artificial Sequence
  ENSG00000267359_2 (sequence is synthesized)
ttttcgtgcagatgaagctgatgaaatcaggcaagagttgtagtctgtgaccaaactgggaggagctagacaattacatggaaagttgtttcagacaaaaaataaaaagttaaaaaaaaa

SEQ ID NO: 908752 - DNA, 120 bp, Artificial Sequence
  ENSG00000224101_0 (sequence is synthesized)
agtgccatgggaatgaggaatggagaggatcccaggaagcacaggaggcaacacaagtcaatgcctcagagccagggaacaggatgaacaagaacaatcagaagatgaccttgagctaaa

SEQ ID NO: 908753 - DNA, 120 bp, Artificial Sequence
  ENSG00000224101_1 (sequence is synthesized)
tgaagcaattgcagcagatctacaggtcagctgaggtggctctttcaagctctgtgggctgactggaaaaactgcgctccatatatctcattttgggacctacactgaaggagcagtggc

SEQ ID NO: 908754 - DNA, 120 bp, Artificial Sequence
  ENSG00000224101_2 (sequence is synthesized)
cgtgggtgaagaacatcgggtggaagtcgttgcaggtctcactagctggaggaaagagatggaaaataagagaaaaagttttaaaacagtgaaacacgagaacataaccacaggtatgtg

SEQ ID NO: 908755 - DNA, 120 bp, Artificial Sequence
  ENSG00000224101_3 (sequence is synthesized)
ccccaaagggagacaagcggaggtatctttggttcaggcaataatggtgaaaaagtatttttgaaaaaagcaaccaaaggatggcccccatacaactcggaagtttaaggccagatagtc

SEQ ID NO: 908756 - DNA, 120 bp, Artificial Sequence
  ENSG00000224100_0 (sequence is synthesized)
ttgaggccaggagtttgggaccagcctggacaacatagtaagacccgtctctacaaaaataaaaaaattccacacacaaaaactacagcaacaatagagaaatatgatgagccccagctc

SEQ ID NO: 908757 - DNA, 120 bp, Artificial Sequence
  ENSG00000224100_1 (sequence is synthesized)
gcaagagaaggctccgggtccctgatggacaacggctgcacctgagccaggtgtgctcagacaggccttcagagaaaagactgaggttccctaagaaggaaggaattctgcctccacact

SEQ ID NO: 908758 - DNA, 120 bp, Artificial Sequence
  ENSG00000224100_2 (sequence is synthesized)
gcctttgaattgggactcacgccgcaccgccagcagcatctcttgctagaatttccagactgccctgcaaatttcagacttgccagtctcgattcttaaaataaatctctccctctctca

SEQ ID NO: 908759 - DNA, 120 bp, Artificial Sequence
  ENSG00000264520_0 (sequence is synthesized)
ttgaggcttcaggaggggagggtagagtctgcagcagggagccccaggagtcaccagcccaaagtcacccagggacaactggtgaaggaaacaggctcagaagtccaagagcttgaccaa

SEQ ID NO: 908760 - DNA, 120 bp, Artificial Sequence
  ENSG00000264520_1 (sequence is synthesized)
agctggtatgtagcagaaccagctctcatacaaagatgacctgaggacagagacagtagaggacagtgcagggtagtgcaagaagctgtggctctggggtctggtcaagatgcccctttc

SEQ ID NO: 908761 - DNA, 120 bp, Artificial Sequence
  ENSG00000264520_2 (sequence is synthesized)
ttctgttaggaagctttcccactcctctgcctgctttcgcatctcttccaaaatacaagtgattgcatgtgactcccttgttagagcaggctctcaataaataggctttgcttgatttca

SEQ ID NO: 908762 - DNA, 120 bp, Artificial Sequence
  ENSG00000262202_0 (sequence is synthesized)
aaggctatactttcagggatcatttctatagtgtgttactagagaagtttctttgaacgtgtagagcaccgaaaaccccgaggaagagaggtagcgttttctcctgagcgtgaagccggc

SEQ ID NO: 908763 - DNA, 120 bp, Artificial Sequence
  ENSG00000262202_1 (sequence is synthesized)
tttctggcgttgcttggctgcaactgccgtcagccattgatgatcgttcttctctccgtattggggagtgagagggagagaacgcggtctgagtggtttttccttcttgatggctcaatg

SEQ ID NO: 908764 - DNA, 120 bp, Artificial Sequence
  ENSG00000262202_2 (sequence is synthesized)
ctgttcgctcctgcttggcaatgtcgcgagaaaggttttcgcctcctgtttcagcggtgacggctcttgggttttctcggggtggctttttaattttagtcttggcgcgaggcgggggat

SEQ ID NO: 908765 - DNA, 120 bp, Artificial Sequence
  ENSG00000262202_3 (sequence is synthesized)
gctgtgtggcacctcctattgtctctttttgcgttttctcccattctcgctccctcttttgtcgccgtttcccgcccgccactcccacccccagacggggtctccgggtctcttgttctg

SEQ ID NO: 908766 - DNA, 84 bp, Artificial Sequence
  ENSG00000262202_4 (sequence is synthesized)
tctgccgtagcaacaactgcctcccgggctcaagcgagtctcccgcctaagccctcccgagtagccggggcttaaaggcgcaca

SEQ ID NO: 908767 - DNA, 120 bp, Artificial Sequence
  ENSG00000225470_0 (sequence is synthesized)
tggaagacttaagatggcggcgtttgcacggagtgcaatcactgcgtccttacgggggttgcaaggcgtccgaagtatgagtccactaacaaaagtccagaaactcgccagttaatagta

SEQ ID NO: 908768 - DNA, 120 bp, Artificial Sequence
  ENSG00000225470_1 (sequence is synthesized)
cagttaatagtattgtgtctcttcaaaatatcggagaataatttctttctcgctgatcgcctaacttctactgacgaagcttggaagttgcagaaggttggagtgcaatggcgcgatctc

SEQ ID NO: 908769 - DNA, 68 bp, Artificial Sequence
  ENSG00000225470_2 (sequence is synthesized)
ttagttttaaacttcctaacccttgggagaaggcaaaacacttgatgaaatctacataaagactaaaa

SEQ ID NO: 908770 - DNA, 120 bp, Artificial Sequence
  ENSG00000225470_3 (sequence is synthesized)
gaaggcaaaacacttgatgaaatctacataaagactaaaacattttaccaattttgcattgtttgtttgaaattgcattgacgactgaaatacaaaaaaaattctaaaacttgtatggaa

SEQ ID NO: 908771 - DNA, 120 bp, Artificial Sequence
  ENSG00000225470_4 (sequence is synthesized)
ctacaaaagacattaaataatcaaagtaatcttgagcaacaaggacacagctggaggcatcactctacctgattttgtaatccattatcaaaaaactgtggtaccagcataaaaacagat

SEQ ID NO: 908772 - DNA, 120 bp, Artificial Sequence
  ENSG00000225470_5 (sequence is synthesized)
tcactgaccagtggaacaggaaagcccagacataactcatacatttccatccaattgatttttgacaaaagtggcacacagaatggggagaggacaaataaataaataaattgttttgag

SEQ ID NO: 908773 - DNA, 71 bp, Artificial Sequence
  ENSG00000225470_6 (sequence is synthesized)
tggctcctgtatcacccagctctggagttgaaagagctcttcattcctgagtctcctgtaccactgagaat

SEQ ID NO: 908774 - DNA, 77 bp, Artificial Sequence
  ENSG00000225470_7 (sequence is synthesized)
tacaggtactggctcctgtatcacccagctctggagttgaaagagctcttcattcctgagtctcctgtaccactgag

SEQ ID NO: 908775 - DNA, 120 bp, Artificial Sequence
  ENSG00000225470_8 (sequence is synthesized)
tgattttcaaacttggaaacattcagaagttatcgcctcagtttcagattgagtagtctcaaagagattacagacatctaccacaaattctctacttggtgtggtgcaaaatcagtatga

SEQ ID NO: 908776 - DNA, 120 bp, Artificial Sequence
  ENSG00000225470_9 (sequence is synthesized)
tgtaaactttgtctctcagtttcttcaaaggaaagaagcaactggaacacacatataacactaacccttccagctgcattatgagggaccagtacctgtctcaaggcaaaattatgactt

SEQ ID NO: 908777 - DNA, 120 bp, Artificial Sequence
  ENSG00000225470_10 (sequence is synthesized)
agttcatcctcacctctggaggccagtaaaagtgggttatagaagaacaaagaggcatctagatctttcactgggttatttggagagaaacatctcctaccgaaggccagtttaacaaga

SEQ ID NO: 908778 - DNA, 120 bp, Artificial Sequence
  ENSG00000225470_11 (sequence is synthesized)
ctggtagaggaggttatcttatctaattcacagaaatcaacacattgagtcaagaaaaatgaaacacagaaacactctaaataaaagaagataagtcttcagaaaccaaccctaatgaaa

SEQ ID NO: 908779 - DNA, 69 bp, Artificial Sequence
  ENSG00000225470_12 (sequence is synthesized)
tttcttttcttttttcttttctttttttgatggagtttcacttcacctcccgtgttcaagtgattctcc

SEQ ID NO: 908780 - DNA, 120 bp, Artificial Sequence
  ENSG00000225470_13 (sequence is synthesized)
gagcaaccataaagagtctcatgggagcaatgcatgaacaaactgagaattttcataaagaaataaaagataacaaaaagtataaagttgaagaatacaataactggactcaaaaattta

SEQ ID NO: 908781 - DNA, 120 bp, Artificial Sequence
  ENSG00000225470_14 (sequence is synthesized)
atgtgtccaacagaagaatcgatgaagcagaagaaagggctatcaaacttgtagataggccattggaaatcatgtaatgtgaggagaaaaaagaaaaaagattgaagatagtttaagaga

SEQ ID NO: 908782 - DNA, 120 bp, Artificial Sequence
  ENSG00000225470_15 (sequence is synthesized)
cttttgagacatcctcaaaggggaataatttatacattaccagatggagaagatagagggaaaaggacagaaaacatatttgaagaaataatgtcagaaaacctcataattctggcaagg

SEQ ID NO: 908783 - DNA, 120 bp, Artificial Sequence
  ENSG00000225470_16 (sequence is synthesized)
aaatagaaatttagatctaagaatctcgaacatcaggtatgatgaatccaaggagactcacaccaaaccatattgtaattaaataaaggttaaagacaatcttcagagcagcaagggaat

SEQ ID NO: 908784 - DNA, 120 bp, Artificial Sequence
  ENSG00000225470_17 (sequence is synthesized)
agtctcttcttacatacaaaatgatccacggaagactgtcagcagacttcaccagaaaactttcacgccagaaggcagtcgtgatatatacaaaaagctgaaaggaaaacactgccatcc

SEQ ID NO: 908785 - DNA, 120 bp, Artificial Sequence
  ENSG00000225470_18 (sequence is synthesized)
aggaatactatctccaactatcctgtgtttcaaaaattaaggagaaatataaagttctcaaacaaaagatgtgggagtttaccaccactagacctgcacgggaagaattgctaaagggag

SEQ ID NO: 908786 - DNA, 120 bp, Artificial Sequence
  ENSG00000225470_19 (sequence is synthesized)
gcatatagaaaaatcaactcaaaatggattaaagcctgaaatgttgcctttgaaactgtaaaactactagtagaaaatataggggaaaagctctatgatgttgttctgggcaatgatttc

SEQ ID NO: 908787 - DNA, 120 bp, Artificial Sequence
  ENSG00000225470_20 (sequence is synthesized)
ttggatacatccttaaaagcatgggcagcaaaaacagccagacaactatcagggaacctgcccagatagtcacataggttcttttctattttccctaagcattggccgggttgagaaata

SEQ ID NO: 908788 - DNA, 90 bp, Artificial Sequence
  ENSG00000225470_21 (sequence is synthesized)
atgtcggtaggttccgtgatgccccctgagccgtaaaaccagtaagtttttattagggattttcaaaggggagggagtatacgaatagga

SEQ ID NO: 908789 - DNA, 120 bp, Artificial Sequence
  ENSG00000225470_22 (sequence is synthesized)
ttcaaggtgcctagatttcatattgtttaaacacacatgctctacaatttctgcacttaacacaattatcacagggtcctgaggcgacatacgtcctcctcggcttacgagatgacagga

SEQ ID NO: 908790 - DNA, 73 bp, Artificial Sequence
  ENSG00000225470_23 (sequence is synthesized)
caacttgagttgcatcaaactaaaaagcatctgcactgcaaagggtacagttaacagaatgaagacacgggtt

SEQ ID NO: 908791 - DNA, 120 bp, Artificial Sequence
  ENSG00000225470_24 (sequence is synthesized)
cactgcaaagggtacagttaacagaatgaagacacgggttttgagaaaccattttcaaatcatatatctgataaggggctaatatccaaaatgtattaagaaacccaagcccaatagcaa

SEQ ID NO: 908792 - DNA, 120 bp, Artificial Sequence
  ENSG00000225470_25 (sequence is synthesized)
gaaaacaactgtctttaaaagggggaaaaggacctcaacttaaatttttcagaggaagacatgagtggccaattgattgatacatgaaaaaaatgctcaacatctctaatcattagtgag

SEQ ID NO: 908793 - DNA, 120 bp, Artificial Sequence
  ENSG00000225470_26 (sequence is synthesized)
ttgcaaatcaaaactgcaagatattaccttacaccttttagaatggctattattaaaaggatgaaagacaggtgctggcaaggatgtggataaaaggaagtcccaacattctgttagtgg

SEQ ID NO: 908794 - DNA, 120 bp, Artificial Sequence
  ENSG00000225470_27 (sequence is synthesized)
gaatataaattagtatagccaatttaggaaactatatggtggttccttaagaaactaaaagtacaattactatatgatctagcaatctctacttaggtatatatccaaaggaattgaagc

SEQ ID NO: 908795 - DNA, 120 bp, Artificial Sequence
  ENSG00000225470_28 (sequence is synthesized)
agtatgttgagatcttgcactcccttattttgaaattatttacaaagctaataaatggaaaagacttaagttttcataacagatgaatggacatagaagatgtgttgtatatacatattg

SEQ ID NO: 908796 - DNA, 120 bp, Artificial Sequence
  ENSG00000225470_29 (sequence is synthesized)
gaatattttttatccttggaaaagaaggaaaattgtcatttgtgacaacatggatgaatctgtagtatactatgctaagtgttgtaagacaggcacagagaggcaaatactacattatat

SEQ ID NO: 908797 - DNA, 120 bp, Artificial Sequence
  ENSG00000225470_30 (sequence is synthesized)
ttgtatgtggaatctaagaaaggctaactcatacaagtagaaagttggatgttatggtttccaggatgtgggtgttggagagatgggcaaaggcaagacgttggtcaaagagtaccaatt

SEQ ID NO: 908798 - DNA, 120 bp, Artificial Sequence
  ENSG00000225470_31 (sequence is synthesized)
ttctgttaggaggaataagttttagacatatttcacagcatggtgaccattgtcactgactgtatattttaaaattgttataagtagatattaaagttgtcacaacaaaagtaggtgaag

SEQ ID NO: 908799 - DNA, 120 bp, Artificial Sequence
  ENSG00000225470_32 (sequence is synthesized)
ttatggatatgttaatgtgcttgatttagttattacactatgtatacatacaaaaacatcagatagttccctggaattatatacaattattacttgtcaattataaaaaaaagccctact

SEQ ID NO: 908800 - DNA, 120 bp, Artificial Sequence
  ENSG00000225470_33 (sequence is synthesized)
gcaaccactaaaaaggattttcatataatagagggaaaaatcgttaaagataataatacattattttagaaaatattaacttataaaaagtagtataggagggattctgtaaaagaagat

SEQ ID NO: 908801 - DNA, 120 bp, Artificial Sequence
  ENSG00000225470_34 (sequence is synthesized)
agacatagaattttaaaatgtataatggaaaatttaaatccagctgtactgatggatcaagcaatccaaaccagtctgattgaccaagtggatatttaaaaaacaatcaaactataaggt

SEQ ID NO: 908802 - DNA, 120 bp, Artificial Sequence
  ENSG00000225470_35 (sequence is synthesized)
gtctgttgtaggcagtttataaaatacaaaagtgttgaaagaaataggatggaaatagaaatatccaagtagcaaccacaaaaaaactggaatgtctgcactaacatcatacaaaacaaa

SEQ ID NO: 908803 - DNA, 120 bp, Artificial Sequence
  ENSG00000225470_36 (sequence is synthesized)
atgaaggttaaaaatattgaaattatacaaaatatgttctatgactaaaatttaatgaaattagaaataacacagagataggaactatacatatttgtgcaaatttaaaaagttatgctg

SEQ ID NO: 908804 - DNA, 67 bp, Artificial Sequence
  ENSG00000225470_37 (sequence is synthesized)
gataggaactatacatatttgtgcaaatttaaaaagttagggtggatcacttgaagtcaggagttgg

SEQ ID NO: 908805 - DNA, 120 bp, Artificial Sequence
  ENSG00000225470_38 (sequence is synthesized)
caggcctttagtgatgtggtggtaagatgtatggtactggctcctgtatcacccagctctggagttgaaagagctcttcattcctgagtctcctgtaccactgagaataggctggagtgc

SEQ ID NO: 908806 - DNA, 120 bp, Artificial Sequence
  ENSG00000225470_39 (sequence is synthesized)
gtcacagtttttacaactatcctaatggccacagtgtttgttgcccttcctcccactgagtaaggactttgttttgtagatggagtaggatctgaacagatttctttgaccttcccaaaa

SEQ ID NO: 908807 - DNA, 120 bp, Artificial Sequence
  ENSG00000225470_40 (sequence is synthesized)
ggcacggcaacggctgcggcacggcaacggctggggcacggcaacggctggtgcatgttgccggcggaggcatttaggtagtgcacgacggctgggcgccgggcctgtttggctgtgacg

SEQ ID NO: 908808 - DNA, 73 bp, Artificial Sequence
  ENSG00000225470_41 (sequence is synthesized)
ctactaaaaatacagaaaattagccagactagaatcacttgagcctaggaggcagaggtggcagtgagccgag

SEQ ID NO: 908809 - DNA, 120 bp, Artificial Sequence
  ENSG00000225470_42 (sequence is synthesized)
tatttaaatgggtttttattgacaccatgtcgcgccaaaatggattccatctcctcagagctttcctaggaacagcctaacctcttgggcctaactttattttttttttgttctgccttt

SEQ ID NO: 908810 - DNA, 120 bp, Artificial Sequence
  ENSG00000225470_43 (sequence is synthesized)
catgtccagacttattagttttaattaatttgtttgtaacgtattcattatgcactagattaaacaatttttttctgtgcccactataccccaaatgtggagttttgggcaaaaacttaa

SEQ ID NO: 908811 - DNA, 120 bp, Artificial Sequence
  ENSG00000225470_44 (sequence is synthesized)
attgtttgtttgaaattgcattgacgactggtatgttaattttgtatatatttttatgagaacaatgttggacatcatttaatttttttaggtttttttaattgattattgattggttca

SEQ ID NO: 908812 - DNA, 120 bp, Artificial Sequence
  ENSG00000225470_45 (sequence is synthesized)
tttgcaggaactgactattagtaatcaaggatacaaattgttaagagaatatgttacagagaaaaacttgacaagctagacttagatttttgtcgttaaagataatttgtgggatatgat

SEQ ID NO: 908813 - DNA, 120 bp, Artificial Sequence
  ENSG00000225470_46 (sequence is synthesized)
atttgtgggatatgatttttataaggagttgcattaaatagaatgtcttacacagatttaagaggttaataattataaaattaagatgagttcttataaaatattcttgaggtataataa

SEQ ID NO: 908814 - DNA, 120 bp, Artificial Sequence
  ENSG00000225470_47 (sequence is synthesized)
catcaatcttttgtgtgatctcttgaatgggttagtggagaaaatacctgaatagtctgcagacctctcaattctgtgctgccccaccctgggcttcatacttacttgccagttaacact

SEQ ID NO: 908815 - DNA, 120 bp, Artificial Sequence
  ENSG00000225470_48 (sequence is synthesized)
taccctttgccaattgaccaaccattttagttgatctcttactgatgtctggttgcatctactttcacaggtaagccgggggtgtgtctcatcattcctttggggcaccacaacttagat

SEQ ID NO: 908816 - DNA, 120 bp, Artificial Sequence
  ENSG00000225470_49 (sequence is synthesized)
tttggttggccccagtaagactcctgtctctgggggattcaaggaaagttgtgaacttctttcctattctcctaccctctttatttgtaagggtgaaagtgatgctctctctagctctct

SEQ ID NO: 908817 - DNA, 120 bp, Artificial Sequence
  ENSG00000225470_50 (sequence is synthesized)
aatttaaaaaaatgatttggtttggaatggttttttcataatgcaatccaaagtatcatagtccccatggtttcttagtctttccctgtttctcatgaccttgacagatttaaaaagtgt

SEQ ID NO: 908818 - DNA, 120 bp, Artificial Sequence
  ENSG00000225470_51 (sequence is synthesized)
actggttaggtatttggtagaatatttctcaatttggatttgtctgatatagtctcatgattaaatgatatgaattttggggaagaataccacacagatataccattctcatagcttcat

SEQ ID NO: 908819 - DNA, 120 bp, Artificial Sequence
  ENSG00000225470_52 (sequence is synthesized)
atcaggatatatatgtatacatacacacacacatatacacacatatacatacatgtatacatatacgcacatatatacatatatacatatacacacgtagacatgtatacatatacacac

SEQ ID NO: 908820 - DNA, 120 bp, Artificial Sequence
  ENSG00000225470_53 (sequence is synthesized)
gtagacatgtatacacatacacacgtagacatgtatacacacgtagacatgtatacacatacacacgtagacatgtatacacacacgtagacataaatgcatgcatatacacacgtagac

SEQ ID NO: 908821 - DNA, 120 bp, Artificial Sequence
  ENSG00000225470_54 (sequence is synthesized)
ataaatgcatgcatatacacgcgtatacatatatgcgtgcatatacgcacgtatacatatatgcgtgcatatacgcacgtatacatatatgcgtgcatatacgcacgtatacatatatgt

SEQ ID NO: 908822 - DNA, 120 bp, Artificial Sequence
  ENSG00000225470_55 (sequence is synthesized)
atgtgtgcatatacgcacgtatacctatatgtatgcatatacacatgtatacatatatacacacatatatgtatacatacatatatatatatatatatacacgattttagcattacttat

SEQ ID NO: 908823 - DNA, 120 bp, Artificial Sequence
  ENSG00000225470_56 (sequence is synthesized)
gaggatgttactcttaatcacttagttcaggttgcccggtttctccactgtaaagttactgtttttctgtttccatcctctatgctttggaagtgagttactaaatttagtccacattta

SEQ ID NO: 908824 - DNA, 120 bp, Artificial Sequence
  ENSG00000225470_57 (sequence is synthesized)
agggaagcagaattaacctccatatctggaggggtatctacctgtatatatgtatttatttttgggaaattttctctaaggaagattttttttctctcccttatttatttggtcatctgt

SEQ ID NO: 908825 - DNA, 120 bp, Artificial Sequence
  ENSG00000225470_58 (sequence is synthesized)
ttctatcattctggattcgtgaataattattaatttgttaattatacataatcccacatcttttttttggagctattgcttactttctggtacaaggtagtataggcttatcttgtattc

SEQ ID NO: 908826 - DNA, 120 bp, Artificial Sequence
  ENSG00000225470_59 (sequence is synthesized)
tccctgcaccagccttacttttagccattttaataaggagcccgggtactttttattgaaaaatacatttagaaaccatggtctgagcactgagtgcccttttagttactgaggtagcac

SEQ ID NO: 908827 - DNA, 120 bp, Artificial Sequence
  ENSG00000225470_60 (sequence is synthesized)
tgattctgtacctcctaaacagaaagctagaaaatatatgtatgcatagtaatgtttggatctatttaattatttttacatacacatgtatgtagctatgtgtccattaaagtaaacatg

SEQ ID NO: 908828 - DNA, 76 bp, Artificial Sequence
  ENSG00000225470_61 (sequence is synthesized)
tagaggtactggctcctgtatcacccagctctggagttgaaagagctcttcattcctgagtctcctgtaccactga

SEQ ID NO: 908829 - DNA, 120 bp, Artificial Sequence
  ENSG00000225470_62 (sequence is synthesized)
ctcagcctcccaaagtgctggaattaagaggtgtgagccaccacacctggcctacagcagatttatttcagtagctgaaatagttaaaacataatgattccaaaggctgagaagcatgca

SEQ ID NO: 908830 - DNA, 120 bp, Artificial Sequence
  ENSG00000225470_63 (sequence is synthesized)
acataatgattccaaaggctgagaagcatgcagaaaaaattgaatctttattgctgatgggaatataaaactgtataccacattggaaaataatttggcaatttcttttaaagctaaaca

SEQ ID NO: 908831 - DNA, 120 bp, Artificial Sequence
  ENSG00000225470_64 (sequence is synthesized)
cacacatacagttagttaggcttagcaattgctgtcatggcctatttcatagaaatgaaaatttatgtgtagaccaaacctgcacttgactgttcacagaaattttatttgtaatagtca

SEQ ID NO: 908832 - DNA, 120 bp, Artificial Sequence
  ENSG00000225470_65 (sequence is synthesized)
ccaggtaaacagttaaataagtctgttatttccgtattgtgtaatacaactcaaaaattaaaaggaataaactactactatacaaataagccttagatgattctcaattctgaaggaaaa

SEQ ID NO: 908833 - DNA, 120 bp, Artificial Sequence
  ENSG00000225470_66 (sequence is synthesized)
acccatttcaagttgtaacataatgcttatttttatgtatcttaatgtgatgaagttaaatagtttagagaacattgttcgtattcatctgttagggatggtagaagttagggttgtatg

SEQ ID NO: 908834 - DNA, 120 bp, Artificial Sequence
  ENSG00000225470_67 (sequence is synthesized)
tgattataagactagtggaagggatacgtttttaatgatggatgagttctgcattctgattcatgcagtggttacaaaaatgtatacatgtgataaaatgtcatgtaaatgtgcacattt

SEQ ID NO: 908835 - DNA, 120 bp, Artificial Sequence
  ENSG00000225470_68 (sequence is synthesized)
caccaatgacaatgtgctggttgtgatattgtacaatgttaatggaaaatatcaccactggggaaaattgagtggtatgtgtaaacggtactatatttgcagcattttgtgagtctttat

SEQ ID NO: 908836 - DNA, 120 bp, Artificial Sequence
  ENSG00000225470_69 (sequence is synthesized)
tttaacataatatgtaaatatgtaaagcaactagaagaatggttttaatacaggagagtaacagcttataagcaagagaaagaaaaatgataaataatgtgaacacttaccaaaggaagg

SEQ ID NO: 908837 - DNA, 120 bp, Artificial Sequence
  ENSG00000225470_70 (sequence is synthesized)
gtggaacagagaaataaaggacagggaaaattatctgggatgattcctaaattccaatatttggatggaactatacagaattttaatatatctggaaaataaactgaaaatattaacgga

SEQ ID NO: 908838 - DNA, 120 bp, Artificial Sequence
  ENSG00000225470_71 (sequence is synthesized)
tgaagagattgcaaaagaagagcaggctgctgctgaaaagtgaccaaggaggaatcctgtaatttgcaataacatgaataaattttgaagacagcattttaactgtaataagctagatac

SEQ ID NO: 908839 - DNA, 120 bp, Artificial Sequence
  ENSG00000225470_72 (sequence is synthesized)
tcctaaggtcagagagtagaactgtggttacaatagacaggggaggggcctttgatttggccattaggtacaaagtgacaattagagaagactagtaaattattctgttctttcacacac

SEQ ID NO: 908840 - DNA, 120 bp, Artificial Sequence
  ENSG00000225470_73 (sequence is synthesized)
tatcatgactatggttaaatgtaaaatactgtatatttcaaaagagttagaatagacacttttcaatgttttcaccactaagaaatgataactgcatgtgattggattaatatgcaacct

SEQ ID NO: 908841 - DNA, 120 bp, Artificial Sequence
  ENSG00000225470_74 (sequence is synthesized)
aaatacatacgaaaacatcacactaaattcaataaatatatgcaattataattttgagataatgaaaaagaaaaattaaaaaattatgacaagcagaggccaatatctatgatgaacata

SEQ ID NO: 908842 - DNA, 120 bp, Artificial Sequence
  ENSG00000225470_75 (sequence is synthesized)
gacacacaaatgctctacaacaaactagcaacctgaattcaacactgcattaaacattttatttttcataatcaagcggtattcatcccagtgatgcaaaaatgattgtatatatggaaa

SEQ ID NO: 908843 - DNA, 120 bp, Artificial Sequence
  ENSG00000225470_76 (sequence is synthesized)
ttaatgttatgcattacactaagagaacaaaggattaaaaccatatgatcatctcagtcaatatcataaaagcatttgagaatatttataattttttcatggtaacaactcaaacattta

SEQ ID NO: 908844 - DNA, 120 bp, Artificial Sequence
  ENSG00000225470_77 (sequence is synthesized)
ggcaaagaattgggtctccctattccctgagacagaaccacactgaaaataggacaaacagtaaccctgaaatggcctctaacaatgattgaacttagtgaggaaggaatgttgaaggct

SEQ ID NO: 908845 - DNA, 120 bp, Artificial Sequence
  ENSG00000225470_78 (sequence is synthesized)
gagtggctgaaatctaggccactagtgcaataaatcccatgattttaaaacctagagctaacatgttattcagaggggaaaacataaaagcttttcctcaaataaaaaacacatcacaaa

SEQ ID NO: 908846 - DNA, 120 bp, Artificial Sequence
  ENSG00000225470_79 (sequence is synthesized)
cccacattcttccctcaccctctgcctcctgactgacactggtgctttcctgggtgaaccctgacggtgtggcatgcctcttcttgtgatctattgttcactgttggcatatagaaacac

SEQ ID NO: 908847 - DNA, 120 bp, Artificial Sequence
  ENSG00000225470_80 (sequence is synthesized)
tactgatgcctcagagatgaccatgatggtgttctggtgtcaggagaatagcaatgcctgggagtccaccaccaccataatctcctgtgatcccacggagctgcagtcagaagggagcaa

SEQ ID NO: 908848 - DNA, 120 bp, Artificial Sequence
  ENSG00000225470_81 (sequence is synthesized)
tgacaagaaataagtgctgagcagttgtcatatggtgctggaagacatgctacttttccctgagggcggaagacagcctgatgacggtggtacaatcaatgacatctctgtgctgggagt

SEQ ID NO: 908849 - DNA, 120 bp, Artificial Sequence
  ENSG00000225470_82 (sequence is synthesized)
gacctgcttgggggcccaggctgatcatttcacacagacacccctggatcctggaagccaagtcctggtctgggtagactgggagtggaggtttgaccacatgcagcagcattaaaggca

SEQ ID NO: 908850 - DNA, 120 bp, Artificial Sequence
  ENSG00000225470_83 (sequence is synthesized)
agcagttgctgattatctgtttgagttaaagacaacatcatgggagttagggaaatttcggagtgtgatgctggaaagcccctctgtgaatgcagagaaaataaccgccactgaaaagag

SEQ ID NO: 908851 - DNA, 120 bp, Artificial Sequence
  ENSG00000225470_84 (sequence is synthesized)
tgtcaataaaaatatcagagatcagctgctcaacaaagtatgagaactgagcctgaatgatcctgaggcggagcaggtgagaggctggggcctgccagatgatcatgctgggcccattgg

SEQ ID NO: 908852 - DNA, 120 bp, Artificial Sequence
  ENSG00000225470_85 (sequence is synthesized)
aattgttaccatcaagggtgttgattccaacatgtgctgtgggatccccatgagcaatctccgtgactttccagtcattaagattaggcaccgagaagaggaaaaggaataaaatcaaac

SEQ ID NO: 908853 - DNA, 120 bp, Artificial Sequence
  ENSG00000225470_86 (sequence is synthesized)
tgatatttctggctgggaaccagatgctgaaatggatgaagagaagtcatgaaactgaaagagcactgaatcactctgcttaagtgtggagcagaggatcacatggaagcagtgaaaaag

SEQ ID NO: 908854 - DNA, 68 bp, Artificial Sequence
  ENSG00000225470_87 (sequence is synthesized)
taagtgtggagcagaggatcacatggaagcagtgaaaaagctccagaatgtagccaggcatggtggct

SEQ ID NO: 908855 - DNA, 120 bp, Artificial Sequence
  ENSG00000225470_88 (sequence is synthesized)
ggaactgtacttcacctgccttcctatgtaccagtcttgttccaacaacatattggcctggagattctgtgtgaagtgagtttgtgagacttcaggaagccttaaagggagatgaatgtt

SEQ ID NO: 908856 - DNA, 120 bp, Artificial Sequence
  ENSG00000225470_89 (sequence is synthesized)
cttcgcaatttcttcttcagattgctccagcaataagtccaggcttccaaatccttactggcaggaggttgtgtgacttactgtgccttattgtgagattgggtacttcccatgctttcc

SEQ ID NO: 908857 - DNA, 120 bp, Artificial Sequence
  ENSG00000225470_90 (sequence is synthesized)
ggcgtgagccactgcgcccagcccatatagaggtaatatttctatattatactcatgttagtgtaaatatgaagtcgagtcctttaggatgtgtaagaaaagtcctagagagatgtcagt

SEQ ID NO: 908858 - DNA, 88 bp, Artificial Sequence
  ENSG00000225470_91 (sequence is synthesized)
gagtcctttaggatgtgtaagaaaagtcctagagagatgtcagtgacataatagaattggagctgcctcatatacactatggaatact

SEQ ID NO: 908859 - DNA, 120 bp, Artificial Sequence
  ENSG00000225470_92 (sequence is synthesized)
gaacttaaagtataatttaaaaaaaaaaagaattggaggtacctgttttgtccctcctttcatggatacaccaagtaagtacatgcatgtggatcaattctatccaagagaaagccaaaa

SEQ ID NO: 908860 - DNA, 120 bp, Artificial Sequence
  ENSG00000225470_93 (sequence is synthesized)
agccaaaatgtagttgaaggatgctcacacactggatgactgagaaaatatctacaacaaaatgggaaggataaactgaggtatactgatggttaaacctcaccttgagcacaggctggt

SEQ ID NO: 908861 - DNA, 120 bp, Artificial Sequence
  ENSG00000225470_94 (sequence is synthesized)
ataatttggaaagaatccttaactcccaccctcttcctgaggggtgacgggttgatagcacacatatagtgtcccagttcttacattctctaccagaaggcttggcccttaaatcccatt

SEQ ID NO: 908862 - DNA, 120 bp, Artificial Sequence
  ENSG00000225470_95 (sequence is synthesized)
atatgaggagcacaaggacttggcactagagtatttccttgaagaacagtagaatgggtggggggttgaactgcaggagcacttccaacagctgtatctcctgggatcagtataccctct

SEQ ID NO: 908863 - DNA, 120 bp, Artificial Sequence
  ENSG00000225470_96 (sequence is synthesized)
cacatttctagcagcttcttgtgtttgtgtcttctatcatgcctgcacctaggagcccgtgtagcaaatgaagcataaacctcctcaagtgttaatgggagggatggcactccctacatc

SEQ ID NO: 908864 - DNA, 120 bp, Artificial Sequence
  ENSG00000225470_97 (sequence is synthesized)
ttccctggattgctctagtgattaatccaggtctatagtttcccttgaaagagatttgaggcctcagtgagcaaaaatggaagggtcaaaacccaccatgccttttcccagctttctcca

SEQ ID NO: 908865 - DNA, 120 bp, Artificial Sequence
  ENSG00000225470_98 (sequence is synthesized)
caacatatcaaattctgtgagatgtgtgaaagcaacgcttacagtgaaattaatagctatgaacattgtaatgaaatgagaagtacttcaaattactaacctaactttccaactttagaa

SEQ ID NO: 908866 - DNA, 120 bp, Artificial Sequence
  ENSG00000225470_99 (sequence is synthesized)
aatacagtaaaaaaagaacaaattaaaatcaaagcagaaaggatataaagtttagtgtggaaatagagaattaaaaataattgagaaacacagcacttcgttgacttattcataaaataa

SEQ ID NO: 908867 - DNA, 120 bp, Artificial Sequence
  ENSG00000225470_100 (sequence is synthesized)
agctttattaaaatgagaaatgtaaaacgtgatgttcctaatgaccttattccatacaagggattagtattttgacaaatatctttgtggaagtagacaaattcctagaaagacactgac

SEQ ID NO: 908868 - DNA, 120 bp, Artificial Sequence
  ENSG00000225470_101 (sequence is synthesized)
taccacaactcattcaagaacaaagtgaagacaataaattggtaatttaaaaactctcacccctgcccctgacacacatgtaaattcccagttcaaatgtattcttttgtatattatacc

SEQ ID NO: 908869 - DNA, 120 bp, Artificial Sequence
  ENSG00000225470_102 (sequence is synthesized)
aaacacatgaaaattaccaattcgataaaaatgtcttaaaaacttggaagagcatgtaatattttttactggttctatgatgctattgttatctagataccaaagtgaaacatcatacac

SEQ ID NO: 908870 - DNA, 120 bp, Artificial Sequence
  ENSG00000225470_103 (sequence is synthesized)
agggaaaactctgataatatcgcttatgagtggatctgtgaaatttcctagtaaattttggcaaaccaaatacagtaacatataaacaggaatgtacaccagtacccagtacagtgtatc

SEQ ID NO: 908871 - DNA, 120 bp, Artificial Sequence
  ENSG00000225470_104 (sequence is synthesized)
cctggaatgcaacgttatttcatcagctggaaatgattagtgcaacagactgaaggaagaaaacaacatggtcatctcaatagattgtggacggctggaagtggaggctcacgcctgtaa

SEQ ID NO: 908872 - DNA, 120 bp, Artificial Sequence
  ENSG00000225470_105 (sequence is synthesized)
ggacggctggaagtggaggctcacgcctgtaatcctaatactcctaccaacagtgtataagcattcctttttctctgtaacttcaccagaatctgtttttttgtttgtttgtttgtttgt

SEQ ID NO: 908873 - DNA, 70 bp, Artificial Sequence
  ENSG00000225470_106 (sequence is synthesized)
ttgtttgtttttgactttgtaatagccatgggctgggctcagtgactcacgcctgtaatcctagcactgg

SEQ ID NO: 908874 - DNA, 120 bp, Artificial Sequence
  ENSG00000225470_107 (sequence is synthesized)
tggacctggctgacacagcaagactatgtttaaaaaaaaagagagagaaaaaaaaaatagaaggtggaaaaagtatttggtaaactaagaagtaaaccacaacctagtaaagggcatatt

SEQ ID NO: 908875 - DNA, 120 bp, Artificial Sequence
  ENSG00000225470_108 (sequence is synthesized)
ttaagaattcacaactagaacctggtgccgtggctgtaatcccagcacttggggaagccaaagcaggattacttgaggccagaagtctgagatcagcctaggcaatataaggatactctg

SEQ ID NO: 908876 - DNA, 120 bp, Artificial Sequence
  ENSG00000225470_109 (sequence is synthesized)
tatcttaaaaaaaaaaaaaaaatccagatgtgatgacacatgcctgtacgcctagctacttgggaagctgaggttcatgtttacaatgagctatgatgatgccactgtactcctgactga

SEQ ID NO: 908877 - DNA, 120 bp, Artificial Sequence
  ENSG00000225470_110 (sequence is synthesized)
acaacagagtgagaccctgtctctaaaaagcaaaacaaaacagaaaacccaaaaccctcaaaactaatgttacacttagtatttaaagaatgctttctctgtaagaagaggagcaaggac

SEQ ID NO: 908878 - DNA, 120 bp, Artificial Sequence
  ENSG00000225470_111 (sequence is synthesized)
aggataaaacattcttgccagttctgttcaacagtgtactggaagtatctgtgacattaattgcattgcatatggaaggaaataaaattttttaaataggaagcagcaaaaccttttgca

SEQ ID NO: 908879 - DNA, 120 bp, Artificial Sequence
  ENSG00000225470_112 (sequence is synthesized)
gatgacatggttttgtacatacacaaccccagtggatccaataaatttggattccaataacaagatcatctcagcaagtttttgtgatttaagattacaatccaaaaatcagttgtattt

SEQ ID NO: 908880 - DNA, 120 bp, Artificial Sequence
  ENSG00000225470_113 (sequence is synthesized)
ctatatattattaaagaagtcaaaagtgacatcattgaaacatttttatttacaatattattaaggcaaaatactgtgggataaagtgaaattcagcatgaactgtgaataacacaaaat

SEQ ID NO: 908881 - DNA, 120 bp, Artificial Sequence
  ENSG00000225470_114 (sequence is synthesized)
gtgaataacacaaaatatttgtcagaggagttgaggaatatctacatatgtggaaagacatctcatatttgtggactagaagatttaagcatcgctaggtgcggtggctcacgcctgtaa

SEQ ID NO: 908882 - DNA, 77 bp, Artificial Sequence
  ENSG00000225470_115 (sequence is synthesized)
tctggccctttgttttcaaatctcatatccaacattggacttatggctagaatatttacataattctcaaaagatag

SEQ ID NO: 908883 - DNA, 120 bp, Artificial Sequence
  ENSG00000225470_116 (sequence is synthesized)
gacttatggctagaatatttacataattctcaaaagatagtattaaaaatccaaagctttaaattagaaaatgggcaaaagtcatgaaagaacattcccctgaggatagggaaatgtcaa

SEQ ID NO: 908884 - DNA, 120 bp, Artificial Sequence
  ENSG00000225470_117 (sequence is synthesized)
tgaggatagggaaatgtcaataaggacatgatggaaattaatactatgatgagatattacagaagatttatttttctttgaggcggagtctgcctctgtcaccgaggctggagtgcagtg

SEQ ID NO: 908885 - DNA, 120 bp, Artificial Sequence
  ENSG00000225470_118 (sequence is synthesized)
aaatgttatagggaattcttcaaattgaaagaagcagctcatgcataacacaaaaacatgaatgtataaaactgactggtaaaaggtaagtaactcaaattcacagtactggtatactgt

SEQ ID NO: 908886 - DNA, 120 bp, Artificial Sequence
  ENSG00000225470_119 (sequence is synthesized)
aatggtggtgtacaaataacgtatatctttattgttaaggttaatacacaaaacttttttaatgagatggctgttgctatgttgctcaggctggtctgaaacttctgggctcaagcaatt

SEQ ID NO: 908887 - DNA, 120 bp, Artificial Sequence
  ENSG00000225470_120 (sequence is synthesized)
ttcccccctcagccttctgattagacggtattatgggcacctgccatgatgtccatctacaaaactattaataattacaacaatttgtttagccatatgtgatataaatatatgtaaggt

SEQ ID NO: 908888 - DNA, 120 bp, Artificial Sequence
  ENSG00000225470_121 (sequence is synthesized)
gtgacatcaagaacataatgggtcaccaaaatctcagagtaaaaacactctggttttactcacccccatagaacctcagtaatatatccagcaccaatattatcacaagttatatcccag

SEQ ID NO: 908889 - DNA, 120 bp, Artificial Sequence
  ENSG00000225470_122 (sequence is synthesized)
aactgaaatccgaggctgagacatttcctcagactacagagaagtgaaaaacttggagcagatgataaaaggcttcttctgtatttatgagactcctatgtgcctgccatcatgtgtgga

SEQ ID NO: 908890 - DNA, 120 bp, Artificial Sequence
  ENSG00000225470_123 (sequence is synthesized)
aaattttatcgacattcaccagttcaacatgggataaatgtgagattttggcacacagcttcttcaccatcttggcttctcttgttgaaaagctgttaatagcttaaaacatgggaagta

SEQ ID NO: 908891 - DNA, 120 bp, Artificial Sequence
  ENSG00000225470_124 (sequence is synthesized)
tgtgtgtgtgtgtaatctttgggggacttacattgccaggttgattactcactaagaaaagagctagatttcctgttttcaaatctgttggcgaaattaagtttatgttaagcatagcat

SEQ ID NO: 908892 - DNA, 120 bp, Artificial Sequence
  ENSG00000225470_125 (sequence is synthesized)
gtttactatatatatggggaagacagttaagagtgacatctaatatgttgttaaatgcttatgtgattaaagtaaatttcatgcattaccgcggagtatgaattgctgcaaccttttaga

SEQ ID NO: 908893 - DNA, 120 bp, Artificial Sequence
  ENSG00000225470_126 (sequence is synthesized)
aaagaatctggcaatatttagggaaataaaaaatacagatatcacttgaacaaaaactggaattcaaaagtctgacttttaagaatctatcctacagaaataaaagtaccagtatataat

SEQ ID NO: 908894 - DNA, 120 bp, Artificial Sequence
  ENSG00000225470_127 (sequence is synthesized)
gacgcatgaacaaggatacttttgtactattttgttcttgtgacaactggaaacaacctgtgtatccatcaataggagaatgtttgagtaaattttggtacataaatattatgaaatatt

SEQ ID NO: 908895 - DNA, 120 bp, Artificial Sequence
  ENSG00000225470_128 (sequence is synthesized)
ttgacttttgacctagagaatcttatgatggatggttatgtgagaaaagtaagttgcagaatagtctagtatgagtccttttttttttttgatggggtgatgaaggaatgcaagattaac

SEQ ID NO: 908896 - DNA, 120 bp, Artificial Sequence
  ENSG00000225470_129 (sequence is synthesized)
ttctttatcttttggaggagacgttaaatatattatgaaatacttaagacatatacagatatacaaggaataatacaatgaacctctcttctcaccacccaacgtaaaaaaaaaatcaaa

SEQ ID NO: 908897 - DNA, 120 bp, Artificial Sequence
  ENSG00000225470_130 (sequence is synthesized)
agtacactatcccaaccagactattcacactgttacagtctagatacagaatggtttcatgataaggtagtgagacattttaagatatattccctgtggatttggcattcattgattacc

SEQ ID NO: 908898 - DNA, 120 bp, Artificial Sequence
  ENSG00000225470_131 (sequence is synthesized)
cttttccttgctcattctttaccttggttactttgcaactgtagtactcctgctagatttactagtcaggccttagcaaaatactgtaagcacaagacctcccttctcccttatttgttt

SEQ ID NO: 908899 - DNA, 120 bp, Artificial Sequence
  ENSG00000225470_132 (sequence is synthesized)
ttctccatgttggtcagactggtcttgtaggagaaatagacttcactaaaatattacagccaattagtaaaaataagacagtaaatagtaacaccttgtcctggagtgatagtagccagt

SEQ ID NO: 908900 - DNA, 120 bp, Artificial Sequence
  ENSG00000225470_133 (sequence is synthesized)
acgtgaccttatggggaagaagactggcaaaacatctcaactttgaaggcataagatgtgttactaagcagacaaatatttcaaattggccattataaatatcttaaaagaactagagga

SEQ ID NO: 908901 - DNA, 120 bp, Artificial Sequence
  ENSG00000225470_134 (sequence is synthesized)
caccatacctcaggaggcaatgatataattacaataattttgcaactagagaatataaataaataggtaagaattatagaaaagaaccatatggaaatctggagttgtaaagtataataa

SEQ ID NO: 908902 - DNA, 120 bp, Artificial Sequence
  ENSG00000225470_135 (sequence is synthesized)
cagaaattacaattcattagagaggtttaatactagattttaactggtagaataaacaatcattgaatttgaagatagattgatagaaatcacccagtttaaaaaatacagaataaagaa

SEQ ID NO: 908903 - DNA, 120 bp, Artificial Sequence
  ENSG00000225470_136 (sequence is synthesized)
gtaagtaaaatgcagtttcagagaaatggcagaagccattgagaataccaacatatgtgcagtggtagtgccagaacataaggacaacgagctgagagaaaaaatatttaaagaaataat

SEQ ID NO: 908904 - DNA, 120 bp, Artificial Sequence
  ENSG00000225470_137 (sequence is synthesized)
acctgaaaattttctatattatgaaaaaaaaatccaagaagtgtaaagaatttgaagtataataattgcaaatatattcccccttagacacatcaaagtaaaattatgaaagtaaaaaaa

SEQ ID NO: 908905 - DNA, 120 bp, Artificial Sequence
  ENSG00000225470_138 (sequence is synthesized)
gagactccatctcaaaaagaaaaaaaacacaaaacaaaaaaccaaggagtatgactgccggttcatatggtaagagtatatttagttttgtgagaaaccacgaaactgtcttccaaaatt

SEQ ID NO: 908906 - DNA, 120 bp, Artificial Sequence
  ENSG00000225470_139 (sequence is synthesized)
gctgtactgttgatgcattcccaccagccatgaatgagagttcctgttgctccacaatctcaacagcatttggtgttaccagtgttttggattttcaccattctaataggtgtgcaatgg

SEQ ID NO: 908907 - DNA, 120 bp, Artificial Sequence
  ENSG00000225470_140 (sequence is synthesized)
acaaagttgagcatgttttcatgttcttatttaccatctgtatatgttctctggcgagatttctgttgacatcttttgtccattttaaaaattgggctatttattgagttttaagtgctg

SEQ ID NO: 908908 - DNA, 120 bp, Artificial Sequence
  ENSG00000225470_141 (sequence is synthesized)
tctgtatgttttaggtaacagtcctttatcagttatgtgttttgcagattttttttgacttatcgtttcatattttaatggtgtcttttgtggagtaatttttttttaattttaataaca

SEQ ID NO: 908909 - DNA, 120 bp, Artificial Sequence
  ENSG00000225470_142 (sequence is synthesized)
tttagcttgtcaatgatttcttttatggattatgcttttggtattgtatctagaaagtaattgccatacccagtgatgtctagattttctcaaatgttggagttctatttacagttttgc

SEQ ID NO: 908910 - DNA, 120 bp, Artificial Sequence
  ENSG00000225470_143 (sequence is synthesized)
attttacatttaggtctggcatccattttgaattaatatttgtgaagggtgtaaagtttgtattagattcattttttggcatttggatattcagctattccaacactatttgttgctcca

SEQ ID NO: 908911 - DNA, 120 bp, Artificial Sequence
  ENSG00000225470_144 (sequence is synthesized)
ttgtggtgagtgatgagcctcacgttggctagagaagtggccgttagcgaggctacacactttgggatcgcgtggcctgagtcgggggagtaaccggcctgtattccatttttctctctc

SEQ ID NO: 908912 - DNA, 120 bp, Artificial Sequence
  ENSG00000225470_145 (sequence is synthesized)
ttaaaagcaaactaatactttccaggtaaaataattatcaacataactttttaaaaataattcatagtacttcaggttatttctatgtttgacacattaacttaaaagaaaaaaggaaaa

SEQ ID NO: 908913 - DNA, 120 bp, Artificial Sequence
  ENSG00000225472_0 (sequence is synthesized)
ccagaaccagccgttgtcccctggcaaaaagaggcccagggctgagccctgggcaagtgtctcccgacatcgctacccctcctccctttattagtttccctttcccaacagaaaccattt

SEQ ID NO: 908914 - DNA, 120 bp, Artificial Sequence
  ENSG00000225472_1 (sequence is synthesized)
ccttctgccaccaaaactaggttgcatccaaaagtttttcacaagcttaaaaaagaaaaacgaaaaattgacaagtattacacagaagagcccacaaaagcttcagcaacaccaagggcg

SEQ ID NO: 908915 - DNA, 120 bp, Artificial Sequence
  ENSG00000225472_2 (sequence is synthesized)
aagaagcagcgtcagatccaggtctgcaggacacaccaaagaactcctccaagtcacacaagggagaaaattaacttcattggcttctatcaggaaagctattttttttttcctcttctt

SEQ ID NO: 908916 - DNA, 120 bp, Artificial Sequence
  ENSG00000225472_3 (sequence is synthesized)
tcctgcaagtttcccaaaccccatgactctgatttccaggtcagagactaaggttttatttttcttactctgtatactttatatgtggagagtccctgaaggaacactgtgatgggctga

SEQ ID NO: 908917 - DNA, 120 bp, Artificial Sequence
  ENSG00000225472_4 (sequence is synthesized)
tgtgagccagttgtgggccagacctggcctcaggtgctgcaaagggaattcagtcacccctgtgcagtgatctgtgagccccaagtcagatccaactttttcctgatagacagcaccctc

SEQ ID NO: 908918 - DNA, 120 bp, Artificial Sequence
  ENSG00000225472_5 (sequence is synthesized)
ctcctccctaccaagaaatagcagggttggaggtagtgacccaatattcaagaggtttgaaattctacatgagatatttctgagttaactcctaaatagcagtttccttaatcatgtgga

SEQ ID NO: 908919 - DNA, 120 bp, Artificial Sequence
  ENSG00000225472_6 (sequence is synthesized)
aaataagaacacttactaaagagaccattggtttaagagaaatggaaacttatgtccacgtaaaaacctgtaaatgaatgttcacagcagccttttcataatagccaaaaagggaaagca

SEQ ID NO: 908920 - DNA, 120 bp, Artificial Sequence
  ENSG00000225472_7 (sequence is synthesized)
atccacacgtccatcaaccaatgaatggataaacttaacgtgggatatacgtgtaatggaatgctatttggtgaagaaagaaatgaaatattaatacatgcgttaacaaggatggacctt

SEQ ID NO: 908921 - DNA, 120 bp, Artificial Sequence
  ENSG00000225472_8 (sequence is synthesized)
agaatatgtattgtaccattctacttatatgaaattcctagaataggcaattctatagggacagaaactagactagtgattggctagagcttggggagagtttggggagcctggaggatg

SEQ ID NO: 908922 - DNA, 120 bp, Artificial Sequence
  ENSG00000225472_9 (sequence is synthesized)
acagcaaagtggtgcagagtttctttttaggttgattaaatgttgtaaaattaattgtagtgatggttgtgcaactttgtgattttgttaaaaaccattgcattttgccctttaaatgga

SEQ ID NO: 908923 - DNA, 120 bp, Artificial Sequence
  ENSG00000225472_10 (sequence is synthesized)
aaccattgcattttgccctttaaatggatgaattgcacaatgtgtgaattagacataagtttatttacataattaatatctatttattgatatataactcatatatcaataaatatatac

SEQ ID NO: 908924 - DNA, 120 bp, Artificial Sequence
  ENSG00000225472_11 (sequence is synthesized)
aatgtgaattatatataaatacataaataaaactgctaaaaactaaaaaatatatactttaaaaaaaggctgttcgtttctttcacattttctgagcacaatcactttgggataaatgtg

SEQ ID NO: 908925 - DNA, 120 bp, Artificial Sequence
  ENSG00000225472_12 (sequence is synthesized)
tccaggcttaaaaagccagattttatgggctaactaaaatggaaatgtgaaaaactgtgtttttttccataggaggagagagtctgatttgcaggtacgtgcatacccacagcagtcata

SEQ ID NO: 908926 - DNA, 120 bp, Artificial Sequence
  ENSG00000225473_0 (sequence is synthesized)
gagagagaaaaaaaatgtttcagaggaaggagcccctgccttctggtgaagagtattcaagatgaagataaacttttcaacttaatatcgagactttgatagcagaagggatctactctt

SEQ ID NO: 908927 - DNA, 120 bp, Artificial Sequence
  ENSG00000225473_1 (sequence is synthesized)
gaaagtccaaaaaatgttgttgctataggaacagactcggtgaacaagacatttgagaagagaaggtcaaagacccagctgcacttctgcttcactgctgaacttctgcttcttcctatc

SEQ ID NO: 908928 - DNA, 120 bp, Artificial Sequence
  ENSG00000225473_2 (sequence is synthesized)
agggaatacactgctcctcacattagggatttcctaaaattgttaggtgttttgaacagaactggctataccaatgaggctcaaacaagaatcataaagtgcatggtgcttctctccctc

SEQ ID NO: 908929 - DNA, 120 bp, Artificial Sequence
  ENSG00000225473_3 (sequence is synthesized)
gaggttatatttacaggatagagagatttctcaaacatgaccttttctcgtgtaataccagagtgaaattttagaaaagtctgtgtgtgtgtgatgcgtgcgtgtgtgtgtgtgtgtgtg

SEQ ID NO: 908930 - DNA, 120 bp, Artificial Sequence
  ENSG00000225473_4 (sequence is synthesized)
tgtgtgtgtgtgtgtctcgcaggctgagaagtgggatgggaagaagggaatgtggctagaatcttaccatctcattctcttctccttcattgagcagagcgtgctggcccttctcaaagt

SEQ ID NO: 908931 - DNA, 120 bp, Artificial Sequence
  ENSG00000225473_5 (sequence is synthesized)
gtcccatgaaaaagttattccacacctcctccctgaccttgtcgtgcagacgcttccaggatgaactccaactcgccgagccaccgcagctcctcagctgactaaaagagttaatgatcc

SEQ ID NO: 908932 - DNA, 120 bp, Artificial Sequence
  ENSG00000225473_6 (sequence is synthesized)
ggcaaactgaactcctcccacgagtcgccctctgctaggaggaattgctggctgctccctgcttattgcattctctcagagcagctgtctcaaaggaggctgctcccatgccgatctttt

SEQ ID NO: 908933 - DNA, 120 bp, Artificial Sequence
  ENSG00000229766_0 (sequence is synthesized)
gttggtaaggcgggtccgcggaccccaggtcgagcccagcggcagtgcaggatcgcaagcggcccggcaccggcgccgcaggttacaaaaacctgagacttccattttgctggaaacttc

SEQ ID NO: 908934 - DNA, 120 bp, Artificial Sequence
  ENSG00000229766_1 (sequence is synthesized)
cttcaaacaaccacatgagtgacctagaagcaaatctgtcaccagtgctcttgagacggagaaaagatcatgatctaagagtctacaagaccagagcagcctgaattgctgagctgcctg

SEQ ID NO: 908935 - DNA, 120 bp, Artificial Sequence
  ENSG00000229766_2 (sequence is synthesized)
gtggagaatagcagcattgggtggttcccaggattcttaaaaggactttacaaaggcctggcctaatcacttaagagctcttaaggagtgaatgggctcttcctgaaaaaagagcttctg

SEQ ID NO: 908936 - DNA, 120 bp, Artificial Sequence
  ENSG00000229766_3 (sequence is synthesized)
agggtgacgcccgcgaggacactgcggcgtccggggcgggcgggcacactcacaatttcagcatccactcgccctccatcaccagcgtccagttggaggcggtcatgggctggacccggc

SEQ ID NO: 908937 - DNA, 120 bp, Artificial Sequence
  ENSG00000229766_4 (sequence is synthesized)
cctcggggcctgccgtcgccgccacagccgcgatccaggcggccaggagcgccgttagctgcgggccgcagcgcccacccgccatgttgggcgccgagcgaggcttctcggcggggagtg

SEQ ID NO: 908938 - DNA, 120 bp, Artificial Sequence
  ENSG00000229766_5 (sequence is synthesized)
agcgaggcttctcggcggggagtgtggggaagggcagcggccggcccgcagcctcgctcgcccgccgggtttttcaaggaagcgggagacgcaagggccaccccgcctacgcctagcggc

SEQ ID NO: 908939 - DNA, 120 bp, Artificial Sequence
  ENSG00000229766_6 (sequence is synthesized)
gcagactggcggtgctcgcaatgccgcggaggacgccacctcttatcgccgcttgcccgtcgaggccacgccccctcccgcctccacttgccgttgcccggggtgtcggttacctcagca

SEQ ID NO: 908940 - DNA, 120 bp, Artificial Sequence
  ENSG00000229766_7 (sequence is synthesized)
accaccgccctttcttcctgaccgccaagctgacaataaacagatgacccaacgttgcctaagttagaacatgcaccgctgctgcccaggctccaataagggcagggttggcgcgtgtgg

SEQ ID NO: 908941 - DNA, 120 bp, Artificial Sequence
  ENSG00000229766_8 (sequence is synthesized)
gcttctctaaagggaaacatggccagtaattttaaaatccatcccctcttcaatgatagcaaatataaaagcaacgggctgcaaggtacacgtatgtttaatgaaaaatggagggacgtg

SEQ ID NO: 908942 - DNA, 120 bp, Artificial Sequence
  ENSG00000229766_9 (sequence is synthesized)
gtgagtatctcctgctgaagagagaggaaaatttaagtactctgcatgtgtatattgaagcatcactaatttaggatattgatgaaactagcctatgcaattgcattttttttacaaaaa

SEQ ID NO: 908943 - DNA, 120 bp, Artificial Sequence
  ENSG00000229766_10 (sequence is synthesized)
atgttaatttcatagaaactcttaaaaacatgggtactagccgataaaatgagtcaattaagactattgccacctgcagtaaaatggacctcacatttctcttgactacagttttgtcag

SEQ ID NO: 908944 - DNA, 120 bp, Artificial Sequence
  ENSG00000229766_11 (sequence is synthesized)
atctaaaatgagggtagccttaagtgatttccaaatttctttccaggtcacattagatgaatctgtaccttgggaccaccacaccgttaatatataagactggattacaattaaaggatg

SEQ ID NO: 908945 - DNA, 120 bp, Artificial Sequence
  ENSG00000229766_12 (sequence is synthesized)
aggaagctttctcaaagggtgctttgtatgtgtttactagttgtgcaaaccatgaacctcggtaatgtggttaatagaccatgaaaaggatgtggtttctgccctcggcttaaaacaaag

SEQ ID NO: 908946 - DNA, 120 bp, Artificial Sequence
  ENSG00000229766_13 (sequence is synthesized)
acagcaataagactaaaagtacttcagggcacatgagagcaaatttcaatcaatacttataggagagggaagttaattttgcctgaagagaagatctggcctgcattatgcattaattag

SEQ ID NO: 908947 - DNA, 120 bp, Artificial Sequence
  ENSG00000229766_14 (sequence is synthesized)
tattagctaaaaactatgtggacctagcccttatcattaaaataaaacactcaagggtttacaaactattgaaatttaagaaaatgtctttgcaatgaatgctactaagactcactgtta

SEQ ID NO: 908948 - DNA, 120 bp, Artificial Sequence
  ENSG00000229766_15 (sequence is synthesized)
ttaagtacatacatatcaattccataaactcaatggaaaacattttactgtgcttgtaaaaagaagtgactcataaacaggaattctgtcattttatcactttcatgatagaatgatgtg

SEQ ID NO: 908949 - DNA, 120 bp, Artificial Sequence
  ENSG00000229766_16 (sequence is synthesized)
tagaatttgttttacaatgctccagaaataaaatgtagggaatggaaagaagataggtgaaagaaaagtggtgcaacatcagtcagtgttgaagctaagttcattttgctactttaccta

SEQ ID NO: 908950 - DNA, 120 bp, Artificial Sequence
  ENSG00000229766_17 (sequence is synthesized)
ctcatgcatatgttggaaaatttacaaaatgaaaagctaaaaggagagagagcatcttcagcatgaaagacagccattaccaaagcatttcctatctttaacaaaaactgaagtcttagc

SEQ ID NO: 908951 - DNA, 120 bp, Artificial Sequence
  ENSG00000229766_18 (sequence is synthesized)
cagactaaggatggtaggaagaaagtagcaaggaagtatgggactgaccttgccgtaaggagtcacagaccagggtaagggacctgttgctgtcagaccatgattggcatcttagccctg

SEQ ID NO: 908952 - DNA, 120 bp, Artificial Sequence
  ENSG00000229766_19 (sequence is synthesized)
acacttcctagccatgtgatttggggctaaaactagtccacaccaaagttctcttaaaatgcgggtagtaatagaacctgctccaaaaggtggctgtgaagattatatgagataagaata

SEQ ID NO: 908953 - DNA, 120 bp, Artificial Sequence
  ENSG00000229766_20 (sequence is synthesized)
atgcctagcacatattctaactcaaaaagcttacatattaggttggtgcaaacataattgtggtttttgccacaatattgccaacactaatattattatttggaggcaacaatacgctgt

SEQ ID NO: 908954 - DNA, 120 bp, Artificial Sequence
  ENSG00000229766_21 (sequence is synthesized)
aatgtctatttttcttatactaaagttaacttcacttagcatgatacacaatgcctctcacagcccagcttcagttttgcccactttacattccactattcccagagttccctgtgtcct

SEQ ID NO: 908955 - DNA, 120 bp, Artificial Sequence
  ENSG00000229766_22 (sequence is synthesized)
agtaacacaaagctactccccattcccaaagcacattgtgtacttcagtgtctccttgctccttcattctgattagaacactcttctccagttgtccagtgaatcattcagtctctgtca

SEQ ID NO: 908956 - DNA, 120 bp, Artificial Sequence
  ENSG00000229766_23 (sequence is synthesized)
cagtctctgtcatgtagtccacactgtacctctgatagctcatgcagaatgagctgctgtctcttctcagatccaattgctcttctgtataactgatatggtttggctctgtgtccccat

SEQ ID NO: 908957 - DNA, 120 bp, Artificial Sequence
  ENSG00000229766_24 (sequence is synthesized)
ccaaatcacattttgtagctcccctaattcccacgtgttgtgggagggaccccatgggagataattgaatcatgggggcgggtctttcccatgttgttctcgtgatagtgaataagtctc

SEQ ID NO: 908958 - DNA, 120 bp, Artificial Sequence
  ENSG00000229766_25 (sequence is synthesized)
gatctgatggttttaaaaatggtaatttccctgcacaagctgtctctcttttggcctgctgccatccgcgtaagacatgacttactcctccgtgccttccaccatgattgtgaggcttcc

SEQ ID NO: 908959 - DNA, 120 bp, Artificial Sequence
  ENSG00000229766_26 (sequence is synthesized)
gaggaactaatacccatcccatagatgtacttgggatagacagcttctggcactcctcccaagatctctccctcctggttacaaaaacctgagacttccattttgctggaaacttctttt

SEQ ID NO: 908960 - DNA, 120 bp, Artificial Sequence
  ENSG00000229766_27 (sequence is synthesized)
cacatgagtgacctagaagcaaatctgtcaccagtgctcttgagacgggctgaagtatttaatcaccggcacaaaatgtcccagtgttctgttctcctgctgtggaaattttagagaaaa

SEQ ID NO: 908961 - DNA, 120 bp, Artificial Sequence
  ENSG00000229766_28 (sequence is synthesized)
aggacctcagtcctacaaccacaagaaactgatttctgccaacaacatgaatgaacttggaaaaggcccctgagctccagatgagaacacccaggtcaactcaggtcatgagcagagaac

SEQ ID NO: 908962 - DNA, 120 bp, Artificial Sequence
  ENSG00000229766_29 (sequence is synthesized)
cctgttatattctccttggcttgtgatccataaacaatgagattataaatgtgtggtttttaagccattaggtttgtggtaacttgttacacaagcctcttttagattctttacatacac

SEQ ID NO: 908963 - DNA, 120 bp, Artificial Sequence
  ENSG00000229766_30 (sequence is synthesized)
gcgcatgcgcggcgcgagcggccgggccccacagccgcaggtcgttgctgtctctcttttggcctgctgccatccgcgtaagacatgacttactcctccgtgccttccaccatgattgtg

SEQ ID NO: 908964 - DNA, 120 bp, Artificial Sequence
  ENSG00000229766_31 (sequence is synthesized)
tcttattcttcccttaccgctttaagacctctagtataaagttgactagaaaaggtggtagtggcattattgtgtagttctttatatcaaagggaagattttcaatgttttcatgttaag

SEQ ID NO: 908965 - DNA, 120 bp, Artificial Sequence
  ENSG00000229766_32 (sequence is synthesized)
tatgacatttactgtaggtttttcatagatgctctttaatcagtttaagcaattcttgtctatccctagaattattgtcaggaataaatgttgacttttatcgaacactgtttctgcacc

SEQ ID NO: 908966 - DNA, 120 bp, Artificial Sequence
  ENSG00000229766_33 (sequence is synthesized)
ttttaaaaatatcatattttttccttcaaatggttactgtgttgaattatattagcagacattctaatgttaaagtaacctatcattccagagaaaaggaggtgagaatagcagtttagt

SEQ ID NO: 908967 - DNA, 120 bp, Artificial Sequence
  ENSG00000229766_34 (sequence is synthesized)
tatgatgctgtatcccttttataaattcttggatgcaatttgccaatatttggtctaagatttttgcattatgttaatgactggaaatgagtcttaattttcctttatttttctggcttc

SEQ ID NO: 908968 - DNA, 120 bp, Artificial Sequence
  ENSG00000229766_35 (sequence is synthesized)
tttgtgtttcgatatcaagaatatgcaagtctcatgcaataaattctatggaagagttggttaagattgcatttttttccttacatgtcttatagaaatgagtggtaaaatatctgaaaa

SEQ ID NO: 908969 - DNA, 120 bp, Artificial Sequence
  ENSG00000229766_36 (sequence is synthesized)
tggaggactactgaagaattggatatggtttcttcaggttgtaaagaaaaatatgttaagtatgctaacacttagaaacactcaaatatagcaagctaaaattgtttaatcaattaacca

SEQ ID NO: 908970 - DNA, 120 bp, Artificial Sequence
  ENSG00000229766_37 (sequence is synthesized)
cttttgtggaaacatatctgcagaaatggaatgagactataaattagtgtttcctgaacatatttcactatcaaacacttcttcaatttcagtttgtaaaataaagtgtattttgtttat

SEQ ID NO: 908971 - DNA, 120 bp, Artificial Sequence
  ENSG00000229766_38 (sequence is synthesized)
ttaaaactttcttctttcattcaaagatccaagacaaagaatgtgtttagtctagcgttttataaacatgaaatcctgaatatgacaaatgcatgctgaatttcaatatttaatcggcat

SEQ ID NO: 908972 - DNA, 120 bp, Artificial Sequence
  ENSG00000229766_39 (sequence is synthesized)
tgatgctgtacctttctcagtgcagcctatgaggtggttcatgaagaaaatgtatcatattatcagtgaatgttatcctcgttcccttagtgaaggtggtacctgccagcttctacactg

SEQ ID NO: 908973 - DNA, 120 bp, Artificial Sequence
  ENSG00000229766_40 (sequence is synthesized)
taatgggtattcttattaaatctgattatcactcttctaattgctactgaaaccaggaaaaaaaagctcagaaaagatgtcatatatcttcaaattgtttaaataaaattaatcacagat

SEQ ID NO: 908974 - DNA, 120 bp, Artificial Sequence
  ENSG00000286448_0 (sequence is synthesized)
tgctgcttcctggaggaagacagtcactctgtctctgccaacccagttgaccgcagacatgcaggtctgctcagtttgcgttgtgtttctccaactttgtgcctcatcaggaaaagcttt

SEQ ID NO: 908975 - DNA, 69 bp, Artificial Sequence
  ENSG00000286448_1 (sequence is synthesized)
gaatattttgagccaaatgtgaggactacaacctgtgagaacggaaaataaatcctgggaccccagact

SEQ ID NO: 908976 - DNA, 75 bp, Artificial Sequence
  ENSG00000286448_2 (sequence is synthesized)
aaaaaagctacatccctgcctctacctccatcgcatgtaaaatgtgtattcagtgaacgctgaccaaagacagaa

SEQ ID NO: 908977 - DNA, 89 bp, Artificial Sequence
  ENSG00000286448_3 (sequence is synthesized)
aagataaaaaagctacatccctgcctctacctccatcgcatgtaaaatgtgtattcagtgaacgctgaccaaagacagaagaatgcaac

SEQ ID NO: 908978 - DNA, 72 bp, Artificial Sequence
  ENSG00000286448_4 (sequence is synthesized)
ttccacttcttcccctttccccaatacccacacttttcccctttacttactgaggtccccagaaaatctttg

SEQ ID NO: 908979 - DNA, 120 bp, Artificial Sequence
  ENSG00000286449_0 (sequence is synthesized)
ctttgcaaaatggcgccgacgctgctgctgctgggagtggggtgtcgacggccgcagcagtgttggagatggagtgagcttgtgtctccgaggccgtatggagagatgctgagacggaca

SEQ ID NO: 908980 - DNA, 120 bp, Artificial Sequence
  ENSG00000286449_1 (sequence is synthesized)
gtggtgtcccgggatgcgcccgcggaccactggagacctcctgcacaaagctgaggaaaagcctagcacaccggaaaacctgcgagacagggcctgtgcccgagtccaagccacattcag

SEQ ID NO: 908981 - DNA, 120 bp, Artificial Sequence
  ENSG00000286449_2 (sequence is synthesized)
ggacgcctgccagaggagccgagaggtttcgacaaaatacacctcaccttcacgccgccactggtgtctagatatctcaatgagggcatacggcgagaggagtgagacccatcttctttg

SEQ ID NO: 908982 - DNA, 120 bp, Artificial Sequence
  ENSG00000286449_3 (sequence is synthesized)
aggtcggtgggcacctctcatgcaggtggatattgagcttctgtgagaattttgtcctttgctggagtgtggtcgtcttgatactagcaatgagcccgctcacgatggggagccgattta

SEQ ID NO: 908983 - DNA, 120 bp, Artificial Sequence
  ENSG00000286449_4 (sequence is synthesized)
atcccctgcgggtccgacgcaactccccacgttgtccaggccgtcacgaacccaaactggaaccaccgggaaaacgaatgataaccggccagatgacccaggcagagacgcggggagagg

SEQ ID NO: 908984 - DNA, 120 bp, Artificial Sequence
  ENSG00000286449_5 (sequence is synthesized)
ctcaccagaagaaaggccgtacaagaaactgcccttcagcgcatatgcatccaaacacacacgcacacgagcacacacagacggaaacaggtagagattgatagagaaaggagacagaga

SEQ ID NO: 908985 - DNA, 120 bp, Artificial Sequence
  ENSG00000286449_6 (sequence is synthesized)
gaaacaagagaaagaaagagacagaacccagacatactgcagtggcacagtaacattcatccccaggcagcccctgaagcctcagggttctgctttccgcgacaacgaccctggggtgag

SEQ ID NO: 908986 - DNA, 120 bp, Artificial Sequence
  ENSG00000286449_7 (sequence is synthesized)
agagcagcccttgggcatacaagcagacctgtcctcgagatcgcaaaggcacgacttttggggaaactcactggcacaccgttcgcgcaggcctgagcctggaatcctgcggtgcttccc

SEQ ID NO: 908987 - DNA, 120 bp, Artificial Sequence
  ENSG00000286449_8 (sequence is synthesized)
aggcgctcctcctgaggtttcttcctcctggtcgaccctccgcgaatcctggcctccggataccatcctgtcgaccccgtggcgaggactggccttagcccggagttcgacgtgctgcca

SEQ ID NO: 908988 - DNA, 120 bp, Artificial Sequence
  ENSG00000286449_9 (sequence is synthesized)
cagaaggctcctccttcgcgaagcgttcaaggactcatctccaggcagcggtggcggtctctgtgacttgagcatccgctgatgattcgcgcatgcgctttggcaaggctgactgcgctc

SEQ ID NO: 908989 - DNA, 120 bp, Artificial Sequence
  ENSG00000286449_10 (sequence is synthesized)
tactctgggtcaggctgcagctcctgaaaaaaaattgctggggctgtgtgtgtgaatgggggtgtgcatgtatgtcttcggacgaacgtcccctgttcgctggagggcggtttcttgcac

SEQ ID NO: 908990 - DNA, 120 bp, Artificial Sequence
  ENSG00000286449_11 (sequence is synthesized)
gtcgtcctttttggtgagcctctttctcggtctctgcctgggtcgtgtagccggtcgtgtgaccggaaccggcagtcattttcctggcggctgcacttttagtttctgaaggccttggcg

SEQ ID NO: 908991 - DNA, 120 bp, Artificial Sequence
  ENSG00000286449_12 (sequence is synthesized)
aggtttggtgctgtgtcagacccgcaggcgttcaagtcacctgcccattctgagtggcagaaatcctaaaaatcctccacccaggagcagaggacccggatgtctctcaagaattagaaa

SEQ ID NO: 908992 - DNA, 120 bp, Artificial Sequence
  ENSG00000286449_13 (sequence is synthesized)
ggaagtgcagattattgcaaagcacatggtagctaacactggataaatgagatgaacattggtttgctaattacccatatttacgccccagggaaggagggcccagcacaccatatggga

SEQ ID NO: 908993 - DNA, 120 bp, Artificial Sequence
  ENSG00000286449_14 (sequence is synthesized)
taccgtgttgcacttaggaacagagtaatcaggtggaggctataccaggaggctttgtagtagcaagagtatgggaggtaacccctggttcttgaaggagggtgtgattggcctgtttga

SEQ ID NO: 908994 - DNA, 120 bp, Artificial Sequence
  ENSG00000286449_15 (sequence is synthesized)
ataattctgcaggctggctggaacctgacgcccgctactatgcagtaagcaggtaatgtgccggtcctctgagggaagtgattcggctagggcaccttattcaaaggagtacaacagggc

SEQ ID NO: 908995 - DNA, 120 bp, Artificial Sequence
  ENSG00000286449_16 (sequence is synthesized)
aaggaatttgcagttaatccattcaggcctccttgttttccccccaatgtcagggcacatataatattgagccttaatcttaggtcttataccacacttgaccccttgatgtcttgacat

SEQ ID NO: 908996 - DNA, 120 bp, Artificial Sequence
  ENSG00000286449_17 (sequence is synthesized)
gcgatactgatacttctagagtgtagaactgttactggatggaaggtcttgactgtaagttgtccacgtttctggcttgttgaagaaagcattaaacaaactacacgaagcaacaaaaga

SEQ ID NO: 908997 - DNA, 120 bp, Artificial Sequence
  ENSG00000286449_18 (sequence is synthesized)
acgaagccacgaaagaagaaagaagcaacgaaaccgcagatttatttaagcgaaagtccactctacagagccagagccggctagagcaagcggccgaagagcccagattacaatgttctt

SEQ ID NO: 908998 - DNA, 120 bp, Artificial Sequence
  ENSG00000286449_19 (sequence is synthesized)
tagagtttttattaagccaaagaatttgataacaccaataagtgccctttcgaggcctccaattggttacacactgtgaaggattggcccatggctgaactcagaggctgaactggagac

SEQ ID NO: 908999 - DNA, 120 bp, Artificial Sequence
  ENSG00000286449_20 (sequence is synthesized)
ttctgtgttgttatcacaggagtgaggatgtggcctgtgtgctgcttaacctggcctagaacttgctgcacctgctgttcttttgcttccaccttaacccttagtttatgctaattttct

SEQ ID NO: 909000 - DNA, 120 bp, Artificial Sequence
  ENSG00000286449_21 (sequence is synthesized)
attctcctgcctcagaagtgcctccttaggaggccaagcaggctcttacctgcttcaggtgagcaggtaaccaggagggagcggaccacagttgctatcatgtctatgattagtgtttgg

SEQ ID NO: 909001 - DNA, 120 bp, Artificial Sequence
  ENSG00000286449_22 (sequence is synthesized)
aaacctgtgcagagcctttggctccacttggatgggatagccaagagaacagatatgtggtttttggatcatgatatgtctgaatatttgtgtaaccttatgtattaccatcagttttta

SEQ ID NO: 909002 - DNA, 80 bp, Artificial Sequence
  ENSG00000286449_23 (sequence is synthesized)
tgaatatttgtgtaaccttatgtattaccatcagtttttatttgttaggcatggttattcttgctcgtattattattatt

SEQ ID NO: 909003 - DNA, 81 bp, Artificial Sequence
  ENSG00000286449_24 (sequence is synthesized)
gtagagacggggtttcacggtgttggccaggatgatctcagtctcttgaccttgtgatccacccaatcatgcccagccaaa

SEQ ID NO: 909004 - DNA, 88 bp, Artificial Sequence
  ENSG00000286449_25 (sequence is synthesized)
attacaggcataagccatcatgcccagccaaaaatttttttaataaaataaaatatgtgagtattggccaggtgcagtggcttattag

SEQ ID NO: 909005 - DNA, 90 bp, Artificial Sequence
  ENSG00000286449_26 (sequence is synthesized)
gacataaacaagtgtgggtatatcaatcattgttcaccagttactgatgctgtataacacaccactccaaacttagtagtataagacaac

SEQ ID NO: 909006 - DNA, 120 bp, Artificial Sequence
  ENSG00000286449_27 (sequence is synthesized)
tgtataacacaccactccaaacttagtagtataagacaaccattttactgtgctcactgattctgtgggttaggcatttagagagctcacagaagagatggtgtgcctctgctcctgatg

SEQ ID NO: 909007 - DNA, 120 bp, Artificial Sequence
  ENSG00000286449_28 (sequence is synthesized)
tctctggcctcaaccaggaggattcaaaagctgggaataacctgatgcctgagggctgcaaacctatgaagcctgctttgcacacatgtctggcacatgcagtgggaggactcaaagact

SEQ ID NO: 909008 - DNA, 120 bp, Artificial Sequence
  ENSG00000286449_29 (sequence is synthesized)
cagactagtagcctccccacatgacttggcttcctcatagcatggcagctcacagcacttggaacttcttacatgatagctcgagacttcaaacacaggagtttcagctaatgaggtgaa

SEQ ID NO: 909009 - DNA, 120 bp, Artificial Sequence
  ENSG00000286449_30 (sequence is synthesized)
ggccacagtgcctcttatgactcagccttgggagtcacacagcattggttacaaacaataaacaaatccagattcacgggcagaggagttagactccacccttaaagtgggaattgcaag

SEQ ID NO: 909010 - DNA, 120 bp, Artificial Sequence
  ENSG00000286449_31 (sequence is synthesized)
attctagaacaacatatgagacaagcctattgttgcaaccatctttggagaatacaatctgcagcaatcacctttggagactaggaaaccaatgcagtattctgaaactcgtaattctga

SEQ ID NO: 909011 - DNA, 120 bp, Artificial Sequence
  ENSG00000286449_32 (sequence is synthesized)
aaactaatgaatatgaatggaaagaatcaagcatttatcctccctttcctacacatgctatccctctaagtaatcagatagttgatgtgtggggattttatttttataaaaggattcctg

SEQ ID NO: 909012 - DNA, 120 bp, Artificial Sequence
  ENSG00000286446_0 (sequence is synthesized)
ttttaatctttaaaatgaaaaatctgattgcctgtggatctatgacaaaagagtgatatatttcataaatactttaactaaaaacatatgaatgaattaatattttagtttactaccaag

SEQ ID NO: 909013 - DNA, 120 bp, Artificial Sequence
  ENSG00000286446_1 (sequence is synthesized)
gtaaagaaaacaaatgtagtattgtttcttcatctctgggttaccacattggagaaaaaagatgaatatgaattaatatttgaagaaatatttctcttaagtctctgttaggtagcacgt

SEQ ID NO: 909014 - DNA, 120 bp, Artificial Sequence
  ENSG00000286446_2 (sequence is synthesized)
ggttctcctttggaaaatgtaacatttgcattggttgatgtgaccttctccttactttccagtggcttccaactcgtttctgtacattgcgtctctccagaccacacagctctcttgtgt

SEQ ID NO: 909015 - DNA, 120 bp, Artificial Sequence
  ENSG00000286446_3 (sequence is synthesized)
tactgtgagaatgacaacacctctgttgcagcatcattagcgatatcccacagaggaaaagcactggtaacacgcagcaaaacctgtatattgctcagttcagacacataatgaagcata

SEQ ID NO: 909016 - DNA, 120 bp, Artificial Sequence
  ENSG00000286446_4 (sequence is synthesized)
ccacgaataaagagaattcaataagaccaggatcctgcattacagaattgcaagtttgggcatcaagagacacactcacgcggggaagaacacgtgaagacacagggaggagacagggtt

SEQ ID NO: 909017 - DNA, 120 bp, Artificial Sequence
  ENSG00000286446_5 (sequence is synthesized)
tacataaagtcaaggagaagggcctgaaacattcttctttcacagtctcgcataaggaaccaaccctgccgaaaccttgatctcagacttccagcctcaagaactgtgagaaaataaatt

SEQ ID NO: 909018 - DNA, 120 bp, Artificial Sequence
  ENSG00000286447_0 (sequence is synthesized)
aaagcaggggaggcgctgcagctgtgaagaggcgtgggggccgcgggaactttcctctggccggtgcgatgaaagccgggcggacgaggtggctcaacggggctgagagtggttcggccg

SEQ ID NO: 909019 - DNA, 120 bp, Artificial Sequence
  ENSG00000286447_1 (sequence is synthesized)
aggcgcgggctgagccctcagcacctggcctgagcggcgtgggcagcagcctgcaccgcggacacctccaactctgccgcgtctgcgccgcactctggccgtggcagcgattttccgggc

SEQ ID NO: 909020 - DNA, 120 bp, Artificial Sequence
  ENSG00000286447_2 (sequence is synthesized)
atctctgaggccgcccttagtcccacaagcacttagccgcccatttcagagcagcggcgccgaccgttttaagaggagtcagttcccgacaccgcctcccacttacttctccacatttcc

SEQ ID NO: 909021 - DNA, 120 bp, Artificial Sequence
  ENSG00000286447_3 (sequence is synthesized)
accgctggaggggggacttcggctatcacagtcgagggaggttgaaaaccccacttcaaaacccgtcggaatgttttgagaaaatgtggatggtaatggagaaatgtgaacagaggagag

SEQ ID NO: 909022 - DNA, 120 bp, Artificial Sequence
  ENSG00000286447_4 (sequence is synthesized)
aaagtagcggtcttgtaaaggatatacgatattttccaagtgggcagaaagcacaggagggaaatggcacagtgacaagaggtcaggggagcgggagatggagccaagggtcggcgtttg

SEQ ID NO: 909023 - DNA, 120 bp, Artificial Sequence
  ENSG00000286447_5 (sequence is synthesized)
acgcttacagagttctggaagggaaaggacccttctattccatgcattcctgcgctgcgatgtttttgtgccacacaccatagctgaagaagtttcacttaatgccttacagtaaattgg

SEQ ID NO: 909024 - DNA, 120 bp, Artificial Sequence
  ENSG00000286447_6 (sequence is synthesized)
aaggaaagaaagaatgagagcaagaaatgtcccatgtcaaaaattctgctgcgtggagagaaatggtgaaatacaagcgatttggagaatgtgaggaagggttctgattggtgactatac

SEQ ID NO: 909025 - DNA, 120 bp, Artificial Sequence
  ENSG00000286447_7 (sequence is synthesized)
tctcattctcattaggaattcatacacctctgcctctctttgaaggtgtgtccacaccaacttaaatgtatgcaaatcatttctaaaaagataccatgtgtggagtttatatatcggcac

SEQ ID NO: 909026 - DNA, 120 bp, Artificial Sequence
  ENSG00000286447_8 (sequence is synthesized)
ttaagagtaaaatctgactttgatactcattttgccactcttactgatattgattgaccacatgagcatttgcaaactcattttagagtttataaactcagttacaaaataaaaagacta

SEQ ID NO: 909027 - DNA, 120 bp, Artificial Sequence
  ENSG00000286447_9 (sequence is synthesized)
ccatgaccttttataattaaattttcatttttaaatgttggcttacagtaaatctataaacttcattaataattcactaaaagaaaaatcgttcaagaaagtccttataaattgaaggaa

SEQ ID NO: 909028 - DNA, 120 bp, Artificial Sequence
  ENSG00000286447_10 (sequence is synthesized)
atattattattttaaaaatataaaccatgtgaatctatttctatacttttacttttgaaattaactagacttgcaagggaaacatttttaatggaacatcaccaaaaagaagttatttca

SEQ ID NO: 909029 - DNA, 120 bp, Artificial Sequence
  ENSG00000286447_11 (sequence is synthesized)
gtataattcctaacataaaatattttaaaatcaaagtttaaaatcaagttctgatgttttacttgagtgttgcattttagagaatatgttataaaacaccaagaagtttcacttaaaatt

SEQ ID NO: 909030 - DNA, 120 bp, Artificial Sequence
  ENSG00000286447_12 (sequence is synthesized)
agactagaaggcagtacttttagtggaaggaaggggaaaaggcagaaaaaaaaaaggagaaagaaatagagaggaaaacttagattcatttctaggattcacgcttagttagaaatcata

SEQ ID NO: 909031 - DNA, 120 bp, Artificial Sequence
  ENSG00000286447_13 (sequence is synthesized)
gcacagtgcctgaaacataacctgttacttcaaagtaacaataatccgcttaattaacctgaatttctagtccccccatgcactgtacttacaattcagctacagttcataatttgtatt

SEQ ID NO: 909032 - DNA, 120 bp, Artificial Sequence
  ENSG00000286447_14 (sequence is synthesized)
tgtttaaatgagccaaagtcaagcttgacatatatatctggttagataattgatagtcatattcttgtcttggcttttaagaaaaaaatattacaagatttttctcaatattaaaacata

SEQ ID NO: 909033 - DNA, 120 bp, Artificial Sequence
  ENSG00000286447_15 (sequence is synthesized)
cttcacatgtttacgtatgtttggatgctatctattgcatgcctagaagataatgacatcttaagtaaaaactcatctaaaaaatgagttaaaatatgattatcattgcctttgacaata

SEQ ID NO: 909034 - DNA, 120 bp, Artificial Sequence
  ENSG00000286447_16 (sequence is synthesized)
aatagcaagattccatgagtttgacatgattattaatgttaaaacatgattgtaaaaaagaattaccatgaccgtttgaccatttatatgtttatatatatatgtgatatatatatatat

SEQ ID NO: 909035 - DNA, 120 bp, Artificial Sequence
  ENSG00000286447_17 (sequence is synthesized)
acacacaaagatgcacaaatatatatgtgcatgtctctctaaaatatttgtttagttctttttatgtgctaaattctcttcactcagggaagagttaatggtaaactactttgtgtaaca

SEQ ID NO: 909036 - DNA, 120 bp, Artificial Sequence
  ENSG00000286447_18 (sequence is synthesized)
ataatttcttttattaagctaacattttatttaaaatataatcatggttatctatgtaagctagatgcaattacacttagaaatgtacttcctttttgattttctagcagtgttgatata

SEQ ID NO: 909037 - DNA, 120 bp, Artificial Sequence
  ENSG00000286447_19 (sequence is synthesized)
tttgctgacatgtgacagtttcaaaattataagctactcaatgaaccagatgcaatattcatgtagatttatctgcacttgtctgtttgaatcatacccatactcagaaaagcattcatg

SEQ ID NO: 909038 - DNA, 120 bp, Artificial Sequence
  ENSG00000286447_20 (sequence is synthesized)
tctcatttttcagaactatattgttcagaattcttctgtattctctcagactattgttcttcacgatatatgtggtctggattcaggtaagaaatgatgaaattttttattaaataaagg

SEQ ID NO: 909039 - DNA, 120 bp, Artificial Sequence
  ENSG00000286447_21 (sequence is synthesized)
gctcccgtccggggacagctcagcggcggcagtcagcccgaccctcctccgcgcgggtcgcccaaacttgaccagcagagcgagcggctcagcgcagtagccgccttcgcggcttccagt

SEQ ID NO: 909040 - DNA, 120 bp, Artificial Sequence
  ENSG00000286447_22 (sequence is synthesized)
tgtagaaaagcaaagcgccgggaggaagcagcagagggggggttacatgaggctggaaagtggcgggtgtacggcgcccgggatcgccgaggtccttgcgtcgccttgcggagggacttc

SEQ ID NO: 909041 - DNA, 120 bp, Artificial Sequence
  ENSG00000286447_23 (sequence is synthesized)
ctagcagtccaagggccgagtggcgcgtggccacatccacagcagcgcaggggcgccgtgggctgacggctctccccgcgcgagccgccccctcgcggcacccactccctccccgcgctc

SEQ ID NO: 909042 - DNA, 120 bp, Artificial Sequence
  ENSG00000286447_24 (sequence is synthesized)
gctcgggtctcccggaagccgaggcgcgggccacttggtgggactccgcggcccccgccccagggccggggcaacgcggcgtgctgactgggaggaccctcggcgtccgcggtctccacc

SEQ ID NO: 909043 - DNA, 120 bp, Artificial Sequence
  ENSG00000286447_25 (sequence is synthesized)
gaggcgggcgcccagggcagggacggagcccggagcgctgcagagcccggccaagcccagccttctcccggcctggcagccgcggctcggatgccgccagttcggcgctagaggggggac

SEQ ID NO: 909044 - DNA, 120 bp, Artificial Sequence
  ENSG00000286444_0 (sequence is synthesized)
aggagcggcgcgaggcggtctcgggtccggagagccgaggacaacgcggcgactgggcgcagggtgcacccgaacctgaaagacctggcaggtacatccgccttgtcggagcctgcttcc

SEQ ID NO: 909045 - DNA, 120 bp, Artificial Sequence
  ENSG00000286444_1 (sequence is synthesized)
tcggaaaaatgagtttttcttggggatgaaacgagaggactctgacaacgcgctcggcaccgcatccccaggttactgttactgccgtcgccgctgtccaagagggtcgccctccactcc

SEQ ID NO: 909046 - DNA, 120 bp, Artificial Sequence
  ENSG00000286444_2 (sequence is synthesized)
tagcggcccggctccagcgcccagtctgggagtccgccctacctgccgtccttagcctccggggcctggccatcatcgtctgtgacgacctgcggccgcaggggccggcgctgtcgcagc

SEQ ID NO: 909047 - DNA, 120 bp, Artificial Sequence
  ENSG00000286444_3 (sequence is synthesized)
ccgtccgcctcgctcatggtacgggcgccagcctcacccgcagaaaccacctcacactgagcggcgccggctcagactccaggcccgccctcccccgtacgcggaaatgacgttgcgccc

SEQ ID NO: 909048 - DNA, 120 bp, Artificial Sequence
  ENSG00000286444_4 (sequence is synthesized)
ggtccccggcgcgtcgttgctcggcgctctgaggctaattctgaccgcccggaagtggggctcggaacccgctcagagatagcaccgggagctgccggggtccccgcctgtctcggactc

SEQ ID NO: 909049 - DNA, 120 bp, Artificial Sequence
  ENSG00000286444_5 (sequence is synthesized)
cggggcccagaacgcgagtggttcaacctcgggctcgtctagcccagtgcctgcgcatgccgccttcgtctcacgtttctgaggacggggatgctcatgacgcacttgggaattgctagc

SEQ ID NO: 909050 - DNA, 120 bp, Artificial Sequence
  ENSG00000286444_6 (sequence is synthesized)
acgagatgttggccacttttatcgttggagaggatagcgctgtttattcagtgtcagcgaccctgctcttacaggcagcgtcaaaaataatgcattcacacccttggaacgaagtcacct

SEQ ID NO: 909051 - DNA, 120 bp, Artificial Sequence
  ENSG00000286444_7 (sequence is synthesized)
ctgcctgaaaattacatccttccccgactcagccggttaaggggaaaacttgggctagaaaatgtttccctctggttaaggccagatgttgagtattaaatctttttgtgacgattacaa

SEQ ID NO: 909052 - DNA, 120 bp, Artificial Sequence
  ENSG00000248238_0 (sequence is synthesized)
ggatactccataatcacatactcccagtaggtaggactgtaggtgtgagccaccatgctgggctttatatatatttaatgctttcaaaagccctgagatcaatgttattatacaaatata

SEQ ID NO: 909053 - DNA, 120 bp, Artificial Sequence
  ENSG00000248238_1 (sequence is synthesized)
tcagatgaggaaatcaattcttatagatgttaaccagcttgtccaagatggtggccaccaagcaggtggcagaaatggagaagactcaaggatttgtgactccaaaagttctctcttacc

SEQ ID NO: 909054 - DNA, 120 bp, Artificial Sequence
  ENSG00000248238_2 (sequence is synthesized)
aagagaccctacactgggcttgtgaccagcggaaactgaatcaatgctggagacacattctaacagtcgaatgggcagctcacaggagggtcactggccgctgtgtggaaaagagaatgt

SEQ ID NO: 909055 - DNA, 120 bp, Artificial Sequence
  ENSG00000248238_3 (sequence is synthesized)
gggctcaccagagtgaatgcaaggacactggtagggagactactgaaatcatacaggcaaatgtgatagtgccttgaaataagatggtagtaactatagctgatggttctatttctaaaa

SEQ ID NO: 909056 - DNA, 120 bp, Artificial Sequence
  ENSG00000248238_4 (sequence is synthesized)
aggaatacttttaactaacctatgaattactaacttagttaaaaccatacaaactattcaatcagccctgaagtcaaaacatgacaaagtaatcttaataaaagaaaactagtgagcaaa

SEQ ID NO: 909057 - DNA, 120 bp, Artificial Sequence
  ENSG00000248238_5 (sequence is synthesized)
cgcccgcctcggcctcccaaagtgcgaatgaaagctttaagagggctgcttgtttctggcagctctcaggttcttcctgtctgcctcagaagtggcatattccacatacgggctgcatct

SEQ ID NO: 909058 - DNA, 120 bp, Artificial Sequence
  ENSG00000248238_6 (sequence is synthesized)
actcatcctcttcaagatgagacaggtggagcagagctgccaccaacctccggtgatttccacacaatgtgtcctagaagaagagaccctacactgggcttgtgaccagcggaaactgaa

SEQ ID NO: 909059 - DNA, 120 bp, Artificial Sequence
  ENSG00000248238_7 (sequence is synthesized)
tcaatgctggagacacattctaacagtcgaatgggcagctcacaggaggtgtttaattattatgagtcagccaacccaattttgtgaacaatgcaacacggacaagaatgtttgaaggca

SEQ ID NO: 909060 - DNA, 120 bp, Artificial Sequence
  ENSG00000248238_8 (sequence is synthesized)
ccatgataatgccatcctatgagatttctttttgaaaaattaattagccttcaattgttacatcttaactgccgtcttctgtctccctacaaaatcgtagtcatctcctacttacctaca

SEQ ID NO: 909061 - DNA, 120 bp, Artificial Sequence
  ENSG00000286442_0 (sequence is synthesized)
gggatagaggaagcctatgtgctggaggaagcattggacctgggagttaggaaccctgaggttccaccccagctgggccactaagcagctacataacaatgggcaacctgggtcttctct

SEQ ID NO: 909062 - DNA, 120 bp, Artificial Sequence
  ENSG00000286442_1 (sequence is synthesized)
ctgggctcctgttttttctttattttgaaaatgaaagttggataatatagtccctcccatctctaacatcccccaagtctttcatgggtgccactcattctatattcaggcaggcagagt

SEQ ID NO: 909063 - DNA, 120 bp, Artificial Sequence
  ENSG00000286442_2 (sequence is synthesized)
tggcaaggggtccagatgtgttcggtagagaatggttacatgacagtgtctagcatactaaaggaaagaccagtggcctcaaggcttgtctaaggaattaataaagattgagaattagga

SEQ ID NO: 909064 - DNA, 120 bp, Artificial Sequence
  ENSG00000286442_3 (sequence is synthesized)
ggtgctatggcttgactgtttgtgccccctccaaaattcacatgttgaaattcagtaaccaatgtgatagtattaagaggtgagtccattaggaggtgattaagtaatgagggcagtacc

SEQ ID NO: 909065 - DNA, 120 bp, Artificial Sequence
  ENSG00000286442_4 (sequence is synthesized)
ctcaagaatagtactaacaacattttaaaagggctggagggaactagctacatccatttgctcttttgtcccttctgccatgtgaggacacagtgtttttctcttctagaggatgcagca

SEQ ID NO: 909066 - DNA, 120 bp, Artificial Sequence
  ENSG00000286442_5 (sequence is synthesized)
ctcaaggcaccaccttgggagcagagatcaggccctcaccagacaccaaacttgttggtgccttgatctttgacttcccagcctccagaactgtgaattcctgtaacacaatcttcactt

SEQ ID NO: 909067 - DNA, 120 bp, Artificial Sequence
  ENSG00000286442_6 (sequence is synthesized)
aacatctttacctccactgtcttctcttcataaaaagagctaaacacgtacacctggcccaggagtcagaaaagctgaagccaaactgggaaggtagatcaatttcaggcccacatgctg

SEQ ID NO: 909068 - DNA, 120 bp, Artificial Sequence
  ENSG00000286442_7 (sequence is synthesized)
cttcaggctaatgtggtgaattacgccatcagcaacagggatcagctgcaaaatggccactgcctgccttctgccttctaaatctcaaaatggccactgccttccttctccactccaaat

SEQ ID NO: 909069 - DNA, 120 bp, Artificial Sequence
  ENSG00000286442_8 (sequence is synthesized)
cagataaacactacagattgctacagatgaatgctactgacatgctaaagactatatgacaattccttttaaagtcagacactcaattgtgaaagatgtgtgaacaatccaatgatggat

SEQ ID NO: 909070 - DNA, 120 bp, Artificial Sequence
  ENSG00000286442_9 (sequence is synthesized)
gtccgttagttcagtgctgtcaagctgagttactactccacatctctgatactgatgctgtttttgcagtcatgattgagtcgttgaagaaaaaagcactctacagagttctgcccaact

SEQ ID NO: 909071 - DNA, 120 bp, Artificial Sequence
  ENSG00000286442_10 (sequence is synthesized)
gtgtccaaacaagcagcaacttgaaatatcattggcttactcagcagcatcagaacccacaaagcaaagaggttagatccatccaagagacttttctgcagcagtaaatggatttgccct

SEQ ID NO: 909072 - DNA, 120 bp, Artificial Sequence
  ENSG00000286442_11 (sequence is synthesized)
ctttagagcagggagcacagctccaacacaattattcttattggaacagactaaggaatttacttcaaatgaggttgttggttgtcctgtgaaagctgtgtcagaataaatattcaactg

SEQ ID NO: 909073 - DNA, 120 bp, Artificial Sequence
  ENSG00000286443_0 (sequence is synthesized)
ccttcataaaacaacaagaaggaagatgctgtactccttcccgcagtctcagctgtcccagccccatcccgaagagcatccaccgcggatcctgtgggctccacaacagcaggtggctgc

SEQ ID NO: 909074 - DNA, 120 bp, Artificial Sequence
  ENSG00000286443_1 (sequence is synthesized)
cttcagcatgggacggcatatttcttgtcagcaagtctgatgggtcccccagttccccgctgctgtggagagagaggaggcccacagaggcggcctgaccgcggtactgtgctggcactc

SEQ ID NO: 909075 - DNA, 120 bp, Artificial Sequence
  ENSG00000286443_2 (sequence is synthesized)
cagacgccctgttcccacccgtcatcctgcaggcctctcctctcttctgctgcccccacagtccaggctgcctgcttctcctgctgtggatgccactgcccccaccctagcttccccttg

SEQ ID NO: 909076 - DNA, 120 bp, Artificial Sequence
  ENSG00000286443_3 (sequence is synthesized)
tttcttcctgattactgtttcttgcttttgccaccactggagaatgaggtcatgggagcagtgggggacggcagtgctcaggtggtgaatggactggggaccctggagactgaggtgaat

SEQ ID NO: 909077 - DNA, 120 bp, Artificial Sequence
  ENSG00000286443_4 (sequence is synthesized)
gcagtggagaggactttagccttggtcttcctttcctaccaggaggatgacagctccagccctgcagctccttccttcgcccgactcctgcactggagccggatggtttagaatgagatc

SEQ ID NO: 909078 - DNA, 120 bp, Artificial Sequence
  ENSG00000286443_5 (sequence is synthesized)
caggcctcctcccacgtctccctcccttccttccatcccaggcagatcagggaacttgctcctcctcaggaaagcagctggacagagtgggtgggatgaggagtccaggtggtccccaag

SEQ ID NO: 909079 - DNA, 120 bp, Artificial Sequence
  ENSG00000286443_6 (sequence is synthesized)
gcgagcactgcgcaggtgtgggctttatgagagaggagatgagctacagctgcagagactcagacatatcaggttgagagagcaagggagttaagaagtcaagttggctgtacacctgta

SEQ ID NO: 909080 - DNA, 120 bp, Artificial Sequence
  ENSG00000286440_0 (sequence is synthesized)
gaggaaccagtcatcctctctctccagcccctctcagggaatttctgccaactccatgccaggcgctgcctcctctctctcattgaagcatcactgtatcctttgtgtatttaacaacat

SEQ ID NO: 909081 - DNA, 120 bp, Artificial Sequence
  ENSG00000286440_1 (sequence is synthesized)
atcctctttgaacctcagttttctcatctgcaaactggagatgacgatactggtaccttcctcaccaggccgctgctgaatgaacatgacaaccaccatgcgttattacattgcagatgc

SEQ ID NO: 909082 - DNA, 120 bp, Artificial Sequence
  ENSG00000286440_2 (sequence is synthesized)
ggccccatccacagggccctgcccagtttgtcttcattcactgcactagggagctggtgggcaagaagagcagcctcggtgctgttccacacagagctgggctggaaccaagccgagtcc

SEQ ID NO: 909083 - DNA, 120 bp, Artificial Sequence
  ENSG00000286440_3 (sequence is synthesized)
cacttggctctagcaggtcactggattctctgagcctcggtatctccaatggtgaaaggagcatcgcagtgcctacctgcagggcctgatgtggattgtcccaaaagcgcatgccacatg

SEQ ID NO: 909084 - DNA, 120 bp, Artificial Sequence
  ENSG00000286440_4 (sequence is synthesized)
gtgggggctcaagaaagctgtccccctccccaccttcttctggaccacgaaatcctgtggtacacctagcccctccctcaccaggcagccctctgacatcgcaaaaattcaggctgagca

SEQ ID NO: 909085 - DNA, 120 bp, Artificial Sequence
  ENSG00000286441_0 (sequence is synthesized)
ggtaactaaactcaagcttggtccacccatcaacaggatttcagtttcagagccacctctgggtctgcacctcccctgtggggcctactgtttggccttgtgcagtgctttggatctctg

SEQ ID NO: 909086 - DNA, 120 bp, Artificial Sequence
  ENSG00000286441_1 (sequence is synthesized)
ctttccagatcagattacaacaatccatttaactactatgaaacggttctggagtgacactgttgtgaagaggaaattccagcggagctactggagcaagcctttgatctgccatattga

SEQ ID NO: 909087 - DNA, 120 bp, Artificial Sequence
  ENSG00000286441_2 (sequence is synthesized)
aactcatttcaggattgctttaaatttagcaacatcatctcactggcaatacatgagttgtatttcttgaatacaggaagctacattcacttcagtgaaggcttgacgtcatcaggcagc

SEQ ID NO: 909088 - DNA, 120 bp, Artificial Sequence
  ENSG00000286441_3 (sequence is synthesized)
attagcatcacctgggacttttcaagcctcacctcagacctactaaatccgagtctgcattttaagaagctccccaggtgattaatccccacaataaagtttcagaagcattgatttaaa

SEQ ID NO: 909089 - DNA, 120 bp, Artificial Sequence
  ENSG00000221571_0 (sequence is synthesized)
aaatgtaagctattttcgtaatttttgtataatgattacatgtgaaatgataatagcttatataatattaggttaaagaaagcattagaattaatttcatctgtctcttttcacctctta

SEQ ID NO: 909090 - DNA, 120 bp, Artificial Sequence
  ENSG00000221571_1 (sequence is synthesized)
agaggcctgtacaacactcatataacttcggcattgccaccttctttgtagcatctaaccatggttttgaggatggaaaatgattgtgtaattggtacgaggtttcctttgtgatgatta

SEQ ID NO: 909091 - DNA, 120 bp, Artificial Sequence
  ENSG00000221571_2 (sequence is synthesized)
aaatgttctggaactagatagtggtgtcagttacacaatattgtgaatgcactacatgccactaatagtaaatgttatgtatcttttactgcaataaaaaattatgtgtgtctcacatta

SEQ ID NO: 909092 - DNA, 120 bp, Artificial Sequence
  ENSG00000183562_0 (sequence is synthesized)
tgggcaaaaagatcaaaattctacagaagaatctgatggctaaatggctaatttgcaaaacacaatgccctgtacattttgaggacatcctaaaacatgtgtaaacttttcagaattcag

SEQ ID NO: 909093 - DNA, 120 bp, Artificial Sequence
  ENSG00000183562_1 (sequence is synthesized)
tttaccaaagttatcaaacttaaaaatgattaaaatttatttgctactgcaaagaattcaaccaatttctccaatgactactccatattcattttgaaaaacagtaccggatttaaagct

SEQ ID NO: 909094 - DNA, 120 bp, Artificial Sequence
  ENSG00000183562_2 (sequence is synthesized)
tacacaacaaaattcacaaaagtgttatatgtgcctatatgacatataggcacaaataactgcagacattctgaagctaacactgctcaaccaggaaaaaaaaaagactgcaattggata

SEQ ID NO: 909095 - DNA, 120 bp, Artificial Sequence
  ENSG00000183562_3 (sequence is synthesized)
tgtaataacagctatttaagacggcagtaacgtgttaaaatggttcataaaaatcacatcataaggccctgaaattctagtaaaaatatctctaagtaaacttgtgaactactactaaat

SEQ ID NO: 909096 - DNA, 120 bp, Artificial Sequence
  ENSG00000183562_4 (sequence is synthesized)
aactaattttctctctctctgtagtcactcattttatctttggattactttcccattctatcaccacgttgctttctctgaacttcattttacatttgcatattatttattccattagca

SEQ ID NO: 909097 - DNA, 120 bp, Artificial Sequence
  ENSG00000183562_5 (sequence is synthesized)
attgctcatcccagtctgaatctcaaaattctactataggaggcatttggcattctgtggaataagagaattttgagatggaaatgatcaaccagctcaaaacctcgtaagctagagttc

SEQ ID NO: 909098 - DNA, 120 bp, Artificial Sequence
  ENSG00000183562_6 (sequence is synthesized)
cttctttcattccctctacagaagcagtaaccctgggtacagttaaaactgcctgggtctttaagctttgtcacctcggacaagtcattatacctaacctcccagggcctcagcttccag

SEQ ID NO: 909099 - DNA, 120 bp, Artificial Sequence
  ENSG00000183562_7 (sequence is synthesized)
agtagttaaatggaaaaacaatagcatctatctcaggttattagattatgaaatgagttaacacacgcaaacaggctgaaagagtccctggtgcgcagtgcaggtattagtcatttagag

SEQ ID NO: 909100 - DNA, 120 bp, Artificial Sequence
  ENSG00000183562_8 (sequence is synthesized)
gtatagttactattacaggaaggtagtaacttagaaagacttacctttaaggtccaacaacctaatctacatatttgtatatttctaaggtaagagaatttttaaaagtctattttcacc

SEQ ID NO: 909101 - DNA, 120 bp, Artificial Sequence
  ENSG00000183562_9 (sequence is synthesized)
ccgtaaacctaatgcaggaggataaggcacgggttactacaggaaaaagtaatgcagactgggggatgcgaaccaaagcacagacgaatgtgccccgacgattcctccgagaacataatg

SEQ ID NO: 909102 - DNA, 120 bp, Artificial Sequence
  ENSG00000183562_10 (sequence is synthesized)
aaatggcggaccttcctgccagaggagcgcacagtcacccaggcaggtgatgtgacacacacgttagggtctaaaggtcccaaggctggagtcccctttactggaccctaaacatgtctg

SEQ ID NO: 909103 - DNA, 120 bp, Artificial Sequence
  ENSG00000183562_11 (sequence is synthesized)
cctcctgccccgcaatcagacttagagaactgtggacggtggaaagtcttatcatgaccaggccatccttcgctggggtgaacggaaagcattcagaaggggaaaattgaaaacaacaaa

SEQ ID NO: 909104 - DNA, 120 bp, Artificial Sequence
  ENSG00000240005_0 (sequence is synthesized)
tagtaccgtggggcggctgataacgctttagcgagccgcgaagataggaggcggggaagaagggggacgtgtacctctccctcattcacggtaccaccgcgagggggagtggggggctac

SEQ ID NO: 909105 - DNA, 120 bp, Artificial Sequence
  ENSG00000240005_1 (sequence is synthesized)
aaggggacggagagaagagtccagacgtcccacatcctgagggcgagtttcagcctcgtagagggcagcgaaagtaattgcatggatcaggaaaatcttgcaatcggaaaacagcagcgt

SEQ ID NO: 909106 - DNA, 120 bp, Artificial Sequence
  ENSG00000240005_2 (sequence is synthesized)
ccgtaatttcaatataggtacatttacctgaactcatcaccttcccacccccatcccatcgactctgtgctgtatcctgaaccggctgacagaacaatgatgtagacttgacttgttttc

SEQ ID NO: 909107 - DNA, 120 bp, Artificial Sequence
  ENSG00000240005_3 (sequence is synthesized)
gccaacctggaatgaagcaaagctcttgtgcacccaagatctgctctctgttgtaaatcctgttcagacctggtctaattggtttgaataaataaagaaccggaatctttctcatccaaa

SEQ ID NO: 909108 - DNA, 120 bp, Artificial Sequence
  ENSG00000240005_4 (sequence is synthesized)
agtgtaccaggcattgctctaaccgttttacacatttacatgctataactccaaaattatcgttacccccttttacgaatgaagagactaagacctagaaatgtgaagtacatttacctg

SEQ ID NO: 909109 - DNA, 120 bp, Artificial Sequence
  ENSG00000260510_0 (sequence is synthesized)
cagagtacctggaattacagtctaaagaagagggaggagcagtctgacaatccggaggagcaagactggcccaaaacactttccttgattggtggagacattctggaggaggagccaagc

SEQ ID NO: 909110 - DNA, 120 bp, Artificial Sequence
  ENSG00000260510_1 (sequence is synthesized)
agtgtcatgacactgctcttcacaaacaactgaggacttctagaaatctctgctgtgcagtgtccaccaaagaaattctgaaaattaaatgctgtattgaatacacaggtaaaagcaaac

SEQ ID NO: 909111 - DNA, 120 bp, Artificial Sequence
  ENSG00000254233_0 (sequence is synthesized)
gacacagaaatgaaaagaagggactaatagggaataagacgtgtgatccatggcccgatggccctgatggacgtgaagatccactgttgtgggaggagtggaacactaacactgaatgat

SEQ ID NO: 909112 - DNA, 120 bp, Artificial Sequence
  ENSG00000254233_1 (sequence is synthesized)
ggaggctgtggtcagaaacagatttgtctgaatttcagttgatccagagcaagaaaaatagctgaatataactggccagtgcagaagagcctatgaaggtggaaaatggaggaaggagga

SEQ ID NO: 909113 - DNA, 120 bp, Artificial Sequence
  ENSG00000254233_2 (sequence is synthesized)
ctggagaagtgatggagatttgaagccttggaagatggcggcaagggagatgccagagatgagacaatgttaaacatctgtaatctaacagtcttctatgggagtttattacatttccat

SEQ ID NO: 909114 - DNA, 120 bp, Artificial Sequence
  ENSG00000254233_3 (sequence is synthesized)
atcctatgttcacttctagtgaaaaataaaaataaaatcttaagccccccacagctgactaaatggatcccattgtgaaaggaaaatatcttgagcctccaaaatcactaaggaaaattc

SEQ ID NO: 909115 - DNA, 120 bp, Artificial Sequence
  ENSG00000254233_4 (sequence is synthesized)
aagctggaaacttcttaggacaaacctgcctcccattctcttcaaagttattcctctgctcgaggagctagatgcatatctgattgccgcctttggaaaggctaaccagaaactcaaaag

SEQ ID NO: 909116 - DNA, 120 bp, Artificial Sequence
  ENSG00000254233_5 (sequence is synthesized)
tgcttgggtactgccatggatagcgcatgtgttggctttgtccagctttgggctttttcccacattgattttaaaaagacaggagccacagattttggagtactgcaaaatgactttcca

SEQ ID NO: 909117 - DNA, 120 bp, Artificial Sequence
  ENSG00000254233_6 (sequence is synthesized)
gttcagcaatcttgctgagctcctctaagtcagtccatcctgccacagctgggaagaatcaagaaactctccaagaagacgtttattggttgataaaaatctgtttatctgcctgttgcc

SEQ ID NO: 909118 - DNA, 120 bp, Artificial Sequence
  ENSG00000254233_7 (sequence is synthesized)
aatgagaagacaggtctgctgaccatggcaggcatggcagcacgtgacaccgtgtttgctgctcactgcatgttccacctgaactttcccgtccggtcaatgagtcttgacagtggggtg

SEQ ID NO: 909119 - DNA, 120 bp, Artificial Sequence
  ENSG00000254233_8 (sequence is synthesized)
aaggggactcactctcaaagaccaaggctgacccgctttgagtacaatgccttgacctagttactgtcactgtggttttgtcttcaggaactaaaaggtacaataaaaacttgttcattt

SEQ ID NO: 909120 - DNA, 120 bp, Artificial Sequence
  ENSG00000254230_0 (sequence is synthesized)
acataattagcagggaagatgcccaggcggccgtggtgctctccctccagccagttcttgtccacctccttgtggatgtagacaatgtcacccttctgcagagtcagctccctgcaggtg

SEQ ID NO: 909121 - DNA, 120 bp, Artificial Sequence
  ENSG00000254230_1 (sequence is synthesized)
gggacgaggaccgcagggaaggggcttcctccatcagccattttgtggggactcagggaccgggcggaacccaggtaaggtgcatgtgggtagctggagctccaggctgaggccgggctg

SEQ ID NO: 909122 - DNA, 120 bp, Artificial Sequence
  ENSG00000254230_2 (sequence is synthesized)
cagggcgtctcccgggtcctgggctctccacaggatgtcctacttcccgagtcgctgcgcggggaagggtgaggcccggcagggcccagcgggagtgcctgggccgtggcggggccgccc

SEQ ID NO: 909123 - DNA, 120 bp, Artificial Sequence
  ENSG00000254230_3 (sequence is synthesized)
taaccgcgctgcgcccccggcggccgcgaccccggtcctctgctaggagttagctgccctcggtggcgcgggaacggcgccccgcagagagtggcgctgcggtccctcccggacacggct

SEQ ID NO: 909124 - DNA, 120 bp, Artificial Sequence
  ENSG00000254231_0 (sequence is synthesized)
gttagggaaaggtggaggaaggcgaagagaaggctaaggaagcctaagaactgcggctgcagagtcacggaaacacttcgctccgctccaggatcactggcacaggcctttgccagggcg

SEQ ID NO: 909125 - DNA, 120 bp, Artificial Sequence
  ENSG00000254231_1 (sequence is synthesized)
aactccgggcaagacccgtgaccccaccccagaaaactcccgactcccgggctggagaaggtagccaagatcattctcagttgccatatggcaaagacacaggaagctgccctgtgtaga

SEQ ID NO: 909126 - DNA, 120 bp, Artificial Sequence
  ENSG00000254231_2 (sequence is synthesized)
gacccacatggcaaggaactgagacatcctgccaacaaccaccagagtctgaggcctgctgccatcaccacgtgagtgagacatcttagaagtggatccttcagcctaagtcaagccttc

SEQ ID NO: 909127 - DNA, 120 bp, Artificial Sequence
  ENSG00000254231_3 (sequence is synthesized)
agatgattgcgtcttgactgcagcctcatcaaagaccttgaaccagaaccacccaactcagttactctcaaatgcttaacccatagaaactatagcggtaaaataagtgcttattgtttt

SEQ ID NO: 909128 - DNA, 120 bp, Artificial Sequence
  ENSG00000254231_4 (sequence is synthesized)
aagtcactaaatttgggagataatttatatctatccagaaatagataacaaatacactaatcctgttgttctcaacttgggaccatttcatatcccaggggattttggcaatggcttacg

SEQ ID NO: 909129 - DNA, 120 bp, Artificial Sequence
  ENSG00000254231_5 (sequence is synthesized)
acatttttcatgggggtaggttggatgttccattggcatctagtgggtagatgtgacagagggtgctaaacatcctacagtgcacaagacagccccatcactccactcaaaaaacaagga

SEQ ID NO: 909130 - DNA, 120 bp, Artificial Sequence
  ENSG00000254231_6 (sequence is synthesized)
atgatcaggtccaaatggcattaatgctgaagctgagaaactgccccaacctattttcccttgcactttaaaagtttcctatttcacctgtacttgtgaaagaggtggggtttgcttcac

SEQ ID NO: 909131 - DNA, 120 bp, Artificial Sequence
  ENSG00000254231_7 (sequence is synthesized)
ttccattactcatttgaatgctgcttcacttgtttcttttttttttttctctttttctacttttattttaggttcagggaatacctgtgcaggtttgttgcatgtgtaaattgcgtgtca

SEQ ID NO: 909132 - DNA, 120 bp, Artificial Sequence
  ENSG00000254231_8 (sequence is synthesized)
ctgaggcttggtgtacaaatgatcctatcacccaagtgcttgttacttagccctctttagtattctcctcattctcatgctccccttctggtcaaagcccaaaactcagatagcatagag

SEQ ID NO: 909133 - DNA, 120 bp, Artificial Sequence
  ENSG00000254231_9 (sequence is synthesized)
agcagtgccccttaggacaatctgcacttccttaagaattcctttgaaggagtgaaataccaacatgaggcagtcctctcctcttctgatgttcccctctcctgtttaccttcctataag

SEQ ID NO: 909134 - DNA, 120 bp, Artificial Sequence
  ENSG00000254231_10 (sequence is synthesized)
taccgaacaaagtaagtaggtatatcagtcttaagggcttcccatgccataagatataacttaaagcagttatatcttatgaaggaaattatttcttgtgatggtcttttttaaaaacta

SEQ ID NO: 909135 - DNA, 71 bp, Artificial Sequence
  ENSG00000254231_11 (sequence is synthesized)
gaaggaaattatttcttgtgatggtcttttttaaaaactatttttagtaaagacagggtttcaccaagttg

SEQ ID NO: 909136 - DNA, 120 bp, Artificial Sequence
  ENSG00000254231_12 (sequence is synthesized)
tggcctttactgatactctttgtttttatttttaaaatatttttatagacacagggtctcactattttgcccaggctggtcttgaacttcaggccttcctgccttggcctcccaaaacac

SEQ ID NO: 909137 - DNA, 120 bp, Artificial Sequence
  ENSG00000254231_13 (sequence is synthesized)
tggcatttacaggtatgagccaccatgcctagactttttatttttatttttgcaatactcttttttaattgacctgaatgaggtattgtttatatacactaaactaacctcattttaatg

SEQ ID NO: 909138 - DNA, 120 bp, Artificial Sequence
  ENSG00000254231_14 (sequence is synthesized)
gtacagttcaataaattttaacaaatgaatacaccagtgtaactattaccacaatcatgatacagaacatttccaacacggcaaaaagtattctcaagcccttcctccccccaactactt

SEQ ID NO: 909139 - DNA, 80 bp, Artificial Sequence
  ENSG00000254231_15 (sequence is synthesized)
catggcattgacacagctcacagcagcttcaatctcctgggctcaagggattctcccgcttcagccccttgagaaactgg

SEQ ID NO: 909140 - DNA, 120 bp, Artificial Sequence
  ENSG00000254231_16 (sequence is synthesized)
gctcaagggattctcccgcttcagccccttgagaaactgggactacaggcatgtaccacagggcccagctaattctttaactttttgttgagatggggtcttgccgtgttgcccaggttt

SEQ ID NO: 909141 - DNA, 120 bp, Artificial Sequence
  ENSG00000254231_17 (sequence is synthesized)
cagcctcccaaagtgctgggagtacaggtgggagccactgcatctcggcccactttttcaagaatttgatataagtggtatcatccagtatatactctgttgtatgtggtttcagctcag

SEQ ID NO: 909142 - DNA, 120 bp, Artificial Sequence
  ENSG00000254231_18 (sequence is synthesized)
ccagtatatactctgttgtatgtggtttcagctcagcatgtttcagagatgcatttgtaatattctgtgcagtagttatttcttcttttctagtggagtagtgatcccttgtatggattt

SEQ ID NO: 909143 - DNA, 120 bp, Artificial Sequence
  ENSG00000254231_19 (sequence is synthesized)
gctacaatttgtttatttttgtcctattcatagataattggtttgtttccagtttttggctactatgactaaagattctatgaacatttggttaaaagtatttttcttggataaataatg

SEQ ID NO: 909144 - DNA, 120 bp, Artificial Sequence
  ENSG00000254231_20 (sequence is synthesized)
cctaagagtaaaacagctaggtcatattgtcatatatctaactttatgataaattgccaaactgttttccaaagtggttgtaccatttccatttccaccagtaatatatgagagttccag

SEQ ID NO: 909145 - DNA, 120 bp, Artificial Sequence
  ENSG00000254231_21 (sequence is synthesized)
ttgcttcatttcttctccaatgtttggtaatccttctaattttcaattattgtatttaaatttgcattttcctaataactaatcatgttgagtatcttttcctgtccttaaggggcatgt

SEQ ID NO: 909146 - DNA, 120 bp, Artificial Sequence
  ENSG00000254231_22 (sequence is synthesized)
gtgtatttgaacagaagtatctgttcaaaccttttgtctacttcaaattggttttttcctcttattactggggtgtgtatattctgtcttttatactatcctttgtcagatattggtgtt

SEQ ID NO: 909147 - DNA, 120 bp, Artificial Sequence
  ENSG00000254231_23 (sequence is synthesized)
gtgaatattttctcccagattatggcttgctatggcagtcagcccccaagatggaccccattgattctggactcctggtgccaaaaccattgtacccagatcaactgcaaacaagaacag

SEQ ID NO: 909148 - DNA, 120 bp, Artificial Sequence
  ENSG00000254231_24 (sequence is synthesized)
agttttaatggaaattttaaacaagtaagatgaaaatcctgaagcatttctttcaagaattgtaacaggagatgaaacatggctttaccagtataatcccgaagacaaagtacaatcaga

SEQ ID NO: 909149 - DNA, 120 bp, Artificial Sequence
  ENSG00000254231_25 (sequence is synthesized)
ggtggaagtggtccagtcaaagcaaaagcagacctgccaagagcaaaggtcgtgggaatagttttttgggatacttattttgcttgttgactttctgaagagccaaagaacaataatatc

SEQ ID NO: 909150 - DNA, 120 bp, Artificial Sequence
  ENSG00000254231_26 (sequence is synthesized)
aaagaacaataatatctgcttgtttcaagagtgttttgagaaagtttgctaaagctttagcagaaaaattcctggaaaagcttcaccagtctttttctaccgcaacaatgctcccactca

SEQ ID NO: 909151 - DNA, 120 bp, Artificial Sequence
  ENSG00000254231_27 (sequence is synthesized)
ttcttctcatcaaacaagggcaattttacaagactttcaatgagaaatcattaggcatcgaccttacagtcctaatttggctctttctaacttctttttgtttcctaatcttaaaaaatc

SEQ ID NO: 909152 - DNA, 120 bp, Artificial Sequence
  ENSG00000254231_28 (sequence is synthesized)
tgcaaagggctcccatttttcgtcatttaatcatgtaaaaaagacatggttaaatttccatgaatctcaatttttttagggatggattaaatgactggtgtcatcacttacaaccatggt

SEQ ID NO: 909153 - DNA, 120 bp, Artificial Sequence
  ENSG00000254231_29 (sequence is synthesized)
tgacctcgatggagcttatgttgagaaataaagtttatattctttatcttttaattcaatttttccatgaacattttgaagtgcctcatattataaatgatatttcattgttagtggttc

SEQ ID NO: 909154 - DNA, 120 bp, Artificial Sequence
  ENSG00000254231_30 (sequence is synthesized)
gggggatggggagctgcagagtcggtgaagaacggagagtgataaaaacatgtcagaaaaagacgttccaaagctggagtccttggtttgcaacgctgaaattggggtgaaagtcaggga

SEQ ID NO: 909155 - DNA, 120 bp, Artificial Sequence
  ENSG00000254231_31 (sequence is synthesized)
tgtacactgagatcatgtttaaaaacctattagttctagtagtattttatagatttcttttgattttctatgtatacaatcatgtttctccaaataaagagttttatttttttccttcca

SEQ ID NO: 909156 - DNA, 120 bp, Artificial Sequence
  ENSG00000254231_32 (sequence is synthesized)
cccattgattctggactcctggtatgtatacactcttatacagtactttcccctattgactgacctatgtgaccaagagaaaattgtagaagtgatagtacctgtcttctgagacaacat

SEQ ID NO: 909157 - DNA, 120 bp, Artificial Sequence
  ENSG00000254231_33 (sequence is synthesized)
cataaaagatattgcagctcccaccttgctgccttggggtactcttgctctagagaaagacagtgctttagcaaggattttgtcttgctgtcttgcctcagacaggaactgaggcctgtt

SEQ ID NO: 909158 - DNA, 120 bp, Artificial Sequence
  ENSG00000254231_34 (sequence is synthesized)
gataaatggacagcagcaatttgctagccatatgtggcaccttggaaatggatcttccaatccctctcaagtcttcagatgactgcaatctcacgtaacactctatgccagaagtagcca

SEQ ID NO: 909159 - DNA, 120 bp, Artificial Sequence
  ENSG00000254231_35 (sequence is synthesized)
gccaagaaatacatatattccagaactgcaaaaactgtgagaaataataaatctgtattattgttttcggtcactaggttttggagaaatttttatacaacaaatatacttgcattttca

SEQ ID NO: 909160 - DNA, 120 bp, Artificial Sequence
  ENSG00000254231_36 (sequence is synthesized)
ttttcttaacaatgtgttttgaaaagtcaatgtttttattttgatgaagttcacatcattttgtgacatatttaagaaattttactttaagacagtgaagatttgttaatactttttttc

SEQ ID NO: 909161 - DNA, 120 bp, Artificial Sequence
  ENSG00000254231_37 (sequence is synthesized)
ttaaagtttatagctttagcttttacatttgggtctataatctatttcaaaataatttttgcatatgctgagatgaaagagtcaatgttcattttttttttctaaatagatatatggttg

SEQ ID NO: 909162 - DNA, 120 bp, Artificial Sequence
  ENSG00000254231_38 (sequence is synthesized)
tttcaataccatttgttgaaaagacaatcctttccccattgaattactttggaacttttgtgaaaactctgtctatttctgggctctctattccttccattgaaccatatgtctatcctt

SEQ ID NO: 909163 - DNA, 120 bp, Artificial Sequence
  ENSG00000254231_39 (sequence is synthesized)
acacaaatatcacactgtcttgattactataactttagaaagtcttaaaattgggaagtgtaaattttccaaatttgttctttttcaaaatgattttgactcttccaggttctttgcata

SEQ ID NO: 909164 - DNA, 120 bp, Artificial Sequence
  ENSG00000254231_40 (sequence is synthesized)
tgttatgctttttgatgctgcaagagatcttcaacaagttcatagaaatatgcatattttgaaaaaactatgcatggattttaaaatttttcgcccccagatgaactcatactaacttgc

SEQ ID NO: 909165 - DNA, 120 bp, Artificial Sequence
  ENSG00000254231_41 (sequence is synthesized)
tataacatgtatgagcaggatgtattttgagtcactaagaaggataagacatcagtttgaaaaaaagcccctatcagagtagcatgaattctgctagagttgaagcaagaacaaacatca

SEQ ID NO: 909166 - DNA, 120 bp, Artificial Sequence
  ENSG00000254231_42 (sequence is synthesized)
aatttatggggaagcttgggtagaacaatggtaaaatcactgatgctttatgaaaaatttattgggacaatgcaccaaagcaatcagcagtttacaaatgggtaattcattttaagaagg

SEQ ID NO: 909167 - DNA, 120 bp, Artificial Sequence
  ENSG00000254231_43 (sequence is synthesized)
gaggagattatgtaaaagatgaagcctgcaatgacagaccttcacatcagtttgcaaggaaaaaactcaccttgttcataacctcattcaagaggcctaacaattagtaggagaaacaat

SEQ ID NO: 909168 - DNA, 120 bp, Artificial Sequence
  ENSG00000254231_44 (sequence is synthesized)
agccaacaccatagaaaactcaaatctcatagcttacacaatctgactgaaaaactaaagtggagcaaacttttcactcaacaggtgccaaaaccattgtacccagatcaactgcaaaca

SEQ ID NO: 909169 - DNA, 120 bp, Artificial Sequence
  ENSG00000251600_0 (sequence is synthesized)
gatctgctgagcggcaggtgcaggcagtggaagcagtagctgctgtccagtcggtagccgacttgcggatccagcaagagccagcggctgcgcttcggctgctgcagagttggggtcttg

SEQ ID NO: 909170 - DNA, 120 bp, Artificial Sequence
  ENSG00000251600_1 (sequence is synthesized)
ggctggagtgcagtggcatgatcatgggtcactgcagccttgaactcctgggcttaagggatcttctcatctcagtctcctaaatagctgggactacaggctcaggccaccatgcctggc

SEQ ID NO: 909171 - DNA, 120 bp, Artificial Sequence
  ENSG00000251600_2 (sequence is synthesized)
accatgcctggctatttattaaactaatccacgttctgaacagttattgctactggaaaccagtcccgatccagaccacaaaagacgattcttggatcttgcacaagaaagaaaggctta

SEQ ID NO: 909172 - DNA, 120 bp, Artificial Sequence
  ENSG00000251600_3 (sequence is synthesized)
tagaagagtacagcatacagaaaaatacatcttctgcaaagaaaacacagtcatgtagagaacctttccatccccagtctggacccagttcctaggaaagaagttgtttcaactctcatt

SEQ ID NO: 909173 - DNA, 120 bp, Artificial Sequence
  ENSG00000251600_4 (sequence is synthesized)
ggaggaagtataaggtgatctcagggaaggggagaagggctggttgcctgccaaatctatgatcaagtcggctccacactttgcttccacttctaagtgagaacatacagtgtttggttt

SEQ ID NO: 909174 - DNA, 120 bp, Artificial Sequence
  ENSG00000251600_5 (sequence is synthesized)
attccatgtccagtgattcaagtttgacacaccacaccacggtggatgtgccttgtcatgacacatcttctcagcagcactagaagatacatccaaagtcctgtgagcaaggacacagcg

SEQ ID NO: 909175 - DNA, 120 bp, Artificial Sequence
  ENSG00000251600_6 (sequence is synthesized)
agaagatggctgtctacaagccaggaagagagtcctcaccagaaccaaaccctgctggactttgatcttggacttcccagcctctaaaactgtgaagacataaatttctgttgttaaacc

SEQ ID NO: 909176 - DNA, 120 bp, Artificial Sequence
  ENSG00000251600_7 (sequence is synthesized)
cacacaggtctgtggtatctgtttattatggcagcccagtaagactaagacaggccatcacaagacatgaatgttttggaccttctcttgggccctagtaaacagaaatcaggtacgcaa

SEQ ID NO: 909177 - DNA, 120 bp, Artificial Sequence
  ENSG00000251600_8 (sequence is synthesized)
aaggggtaagcatataatttcctttatttttatttttaatgtgtaagccttaggtttttatttatttatttggtgaagacaatcacattgtgtacgtacaatgtaattatattgttgacg

SEQ ID NO: 909178 - DNA, 120 bp, Artificial Sequence
  ENSG00000251600_9 (sequence is synthesized)
tgttgacgagaagttacttaaaattttttaaaaattctaatcgatttctagatgtccaaatgagaagatagcatttatataccatcagaacataaaataattcaaaaaaataaatttata

SEQ ID NO: 909179 - DNA, 120 bp, Artificial Sequence
  ENSG00000251600_10 (sequence is synthesized)
tcttcagcatagaacacaaactctgccttcttttctcaagtccagtgattcaagtttgacacaccacaccacggtggatgtgccttgtcatgacacatctcagcagcactagaagataca

SEQ ID NO: 909180 - DNA, 120 bp, Artificial Sequence
  ENSG00000251600_11 (sequence is synthesized)
tccaaagtcctgtgagcaaggtctgtggtatctgtttattatggcagcccagtaagactaagacaggccatcacaagacgtgaacgttttggaccttctcttgggccctagtaaacagaa

SEQ ID NO: 909181 - DNA, 120 bp, Artificial Sequence
  ENSG00000251600_12 (sequence is synthesized)
agtcgggctccaccatggacataccggttccctccagcttcaacgacgttggccaggactggcggctgcggcattttgtagaccagatgtggtacgaacgggaggtgaccttcctggagc

SEQ ID NO: 909182 - DNA, 120 bp, Artificial Sequence
  ENSG00000251600_13 (sequence is synthesized)
aatggacccaggacctgcacacaagagtggtactgaggattgtcagtgcccactcctatgccatcgtgtgggtgaatggggtcgacgcgctagagcatgagggatctacctcccctttga

SEQ ID NO: 909183 - DNA, 120 bp, Artificial Sequence
  ENSG00000251600_14 (sequence is synthesized)
caccgacatcagtagcctgttccaggtggggcccctgccctcccgcctccgcatcactatcaccatcggcaacatgctcatctcctccaccctgccaccagggagcatcctcgacatggc

SEQ ID NO: 909184 - DNA, 120 bp, Artificial Sequence
  ENSG00000251600_15 (sequence is synthesized)
ccttcctgtcccaccccgtggggcattacattagggtaattacattagtgtcaagatatgccataatactgagaatggaggagtctgaggccctggtccatcaactgacagcatgaactt

SEQ ID NO: 909185 - DNA, 120 bp, Artificial Sequence
  ENSG00000251600_16 (sequence is synthesized)
cacgtcaagaagtgagattggtgaataagtgaagacagaaggaaaattggagatacagctggatgtatgaaccctgctctgaaaacactctttaacggtataaggattcttattaacgaa

SEQ ID NO: 909186 - DNA, 120 bp, Artificial Sequence
  ENSG00000251600_17 (sequence is synthesized)
ttttatttcttttttatctgatcattattttattttgatttatagaggaatatatagagggggatatctatagagacacacacgtttgtgtgtgtatatataaatatatatgtatgtgta

SEQ ID NO: 909187 - DNA, 60 bp, Artificial Sequence
  ENSG00000251600_18 (sequence is synthesized)
gggttcaaatgattctcctgcctcagcgtcccgcatagctgggattacaggcacgtgccg

SEQ ID NO: 909188 - DNA, 77 bp, Artificial Sequence
  ENSG00000251600_19 (sequence is synthesized)
acctcaagtggtcacactgagcctggcccatctggctgttcatttctatctattataatatcctttataataaacca

SEQ ID NO: 909189 - DNA, 120 bp, Artificial Sequence
  ENSG00000251600_20 (sequence is synthesized)
catgaggccctcaccagatacagccacctgatcttggacttcacagcctccagaaatatgccctggaatacacttgtgtcagtgacaaatgctgctttgctgtgctacatcgagtacaag

SEQ ID NO: 909190 - DNA, 120 bp, Artificial Sequence
  ENSG00000251600_21 (sequence is synthesized)
aggcgtccccagccatgcagaactgacctgtgagagaaagccggggaagcagaaccctttgatggagacaacagagtcaggacaatattgtttaaaactcctaaatccaaacatgcctga

SEQ ID NO: 909191 - DNA, 120 bp, Artificial Sequence
  ENSG00000251600_22 (sequence is synthesized)
tgtttaaaactcctaaatccaaacatgcctgaagctataagttacttctgaaatttaaaaatttgtctgtggtatctgtttattatggcagcccagtgagactaagacaggccatcaaaa

SEQ ID NO: 909192 - DNA, 120 bp, Artificial Sequence
  ENSG00000251600_23 (sequence is synthesized)
gacgtgaacgttttggaccttctcttgggccctagtaaacagaaatcaggctacttattaaactaaaccacgttctgaactgttactgctactggaaaccagtcccgatccagaccccaa

SEQ ID NO: 909193 - DNA, 120 bp, Artificial Sequence
  ENSG00000251600_24 (sequence is synthesized)
gtactcaagtttacaaagctggactcagaccctaacactggctttaaaatttgtcctaagttagaccataatgcctctctttccagctggatctacatgcctccactctggcttttaaca

SEQ ID NO: 909194 - DNA, 120 bp, Artificial Sequence
  ENSG00000251600_25 (sequence is synthesized)
aggctctgaactattgtcagaacttgggaatttctaacattgaaggtaacacattgacacaatttcctcgatgtaaaattgtatacactttatccaagtcccatctgagcatgttatgtc

SEQ ID NO: 909195 - DNA, 120 bp, Artificial Sequence
  ENSG00000251600_26 (sequence is synthesized)
ctatttgtacccttacaaaaactgattggtggccaaattgatttgagactgaaagttgccacttatgttcttagaaatacttgctttaattcaccagaatcagttgctctgatacaactt

SEQ ID NO: 909196 - DNA, 120 bp, Artificial Sequence
  ENSG00000251600_27 (sequence is synthesized)
gcactagaaattcctcccagtcgagggctttttttccctcctgtgaaaaataaaccagaagaaaggagaagatgtatttttgtaatttagtttcatgattttaaggaccaaatctcagct

SEQ ID NO: 909197 - DNA, 120 bp, Artificial Sequence
  ENSG00000251600_28 (sequence is synthesized)
ttatttctctagaataggaaatagagatatcgttgtcatcttatgttttttctcacttgatctgatctatgatctgttgaaacttgatcatctgttcttgcaaatgccctggaatacact

SEQ ID NO: 909198 - DNA, 120 bp, Artificial Sequence
  ENSG00000251600_29 (sequence is synthesized)
ctgcgacgctgctcggggaccccttgaggaaagcccagcgacgccgggccagcgcattcttattttatgaagatctggcaagagttagcgtgcagttctacattgtgacaattcatgaga

SEQ ID NO: 909199 - DNA, 120 bp, Artificial Sequence
  ENSG00000251600_30 (sequence is synthesized)
gctaaggactggctgtctcttgggacaaataggctttcttgagtctgcatgaggccctcaccagatacagccacctgatcttggacttcacagcctccagaaatctttgcttccacttct

SEQ ID NO: 909200 - DNA, 120 bp, Artificial Sequence
  ENSG00000251600_31 (sequence is synthesized)
tgataatgtgatgtctttgtgagaatgctatatgtcattttctttgtttatatgaatttttacaatttttacctttgaaatataaaaaagagagaataaaagtcattgaaaaaatcaaaa

SEQ ID NO: 909201 - DNA, 120 bp, Artificial Sequence
  ENSG00000251600_32 (sequence is synthesized)
agatgggagagagtttcctgtgggcaaactttaggttgtaaattgactcttgtctctagagacaatcttctggtgggagagatttccagctctggggcttctagatgccctggaatacac

SEQ ID NO: 909202 - DNA, 120 bp, Artificial Sequence
  ENSG00000251600_33 (sequence is synthesized)
ttgtgtcagtgacaaatgctgctttgctgtgctacaccgagtacaaggtcgtgagaaatacatgggctatcttcagcacagaacacaaactctgccttcttttctcaagtccagtgattc

SEQ ID NO: 909203 - DNA, 120 bp, Artificial Sequence
  ENSG00000251600_34 (sequence is synthesized)
aagtttgacacaccacaccacggtggatgtgcctttcatgacgcatcttctcagcagcactagaagatacatccaaagtcctgtgagcaaggtctgtggtatctgtttattatggcagcc

SEQ ID NO: 909204 - DNA, 120 bp, Artificial Sequence
  ENSG00000251600_35 (sequence is synthesized)
gggtggcatataatatacagacacagtgaaggagtgagatgtgaaggtgctctgtcattgcctcagtcaagactttcatggtacattggaagaaagagaagcgtgaacaaattgcatgat

SEQ ID NO: 909205 - DNA, 120 bp, Artificial Sequence
  ENSG00000251600_36 (sequence is synthesized)
acttgaggtcatgctgtgtacctgtattgaacaagaataagggaagaaagctgggaacctggatctcccatatattggaagttttgtaaaaaccttgagggtcccttccactacatatgg

SEQ ID NO: 909206 - DNA, 120 bp, Artificial Sequence
  ENSG00000251600_37 (sequence is synthesized)
agatttgagtgaggacacagccaaaccacatggttttagaacattgacgaagagagaagacaacccactttgccatatatgcccatggtcttaccaaggctagagtacagtggcacagtc

SEQ ID NO: 909207 - DNA, 120 bp, Artificial Sequence
  ENSG00000251600_38 (sequence is synthesized)
agtggcacagtcatagctcactgcagccttaaactcccagactcaggcaatggatccgatcctcccacctcagccagcctcccaagtagctgagactacaggagtggctgcatatgtgtc

SEQ ID NO: 909208 - DNA, 120 bp, Artificial Sequence
  ENSG00000251600_39 (sequence is synthesized)
tgtcccgtttgtgcgtatctgcatataagagaagttgagaaagggcacaagaatgaggtgactgcgtggacatagagcgtattatgaaagacaaactctcccacatccctcccagcagcg

SEQ ID NO: 909209 - DNA, 120 bp, Artificial Sequence
  ENSG00000251600_40 (sequence is synthesized)
gctccagaatttcttcttctcccctgaaaactaacaagagagactgccaccagattactcttatctcagcacccagctttgcttattgtttatcagtcactgagaatgtgtgaggctctg

SEQ ID NO: 909210 - DNA, 120 bp, Artificial Sequence
  ENSG00000251600_41 (sequence is synthesized)
agctaataacttttagatacatcttcttatttagcctttagagaaatgctgtgagataagtactgtgttattggccccattttaaaattaatgggatagaaaccctgcagggcaactcac

SEQ ID NO: 909211 - DNA, 120 bp, Artificial Sequence
  ENSG00000251600_42 (sequence is synthesized)
cctgggtcagcagctggcatagagctgagcccgggtctgagctgaactcagtttgcccacagaccctccgcaccaccgcactattaggtcccctttatctggcccactatttcatggtca

SEQ ID NO: 909212 - DNA, 120 bp, Artificial Sequence
  ENSG00000251600_43 (sequence is synthesized)
cgtgcatcatttctgtgctttgccacattgttttaatttctttaactcacagtattatttctgtgagatatttcagaggcaagaattcctccatagtaggaattgtgtctacttagtagg

SEQ ID NO: 909213 - DNA, 120 bp, Artificial Sequence
  ENSG00000251600_44 (sequence is synthesized)
ctgtgtctacttagctcgcatttctcagtgtttgtcagtttctctgcagtgacaggtcccctaaaatgggttacatcacaaaaatgatttcggagccacaatttaaaaataaaaatgaaa

SEQ ID NO: 909214 - DNA, 120 bp, Artificial Sequence
  ENSG00000251600_45 (sequence is synthesized)
tggttattcttcttgttctttttctaacttcttgagttcatattaagttagttagcttttagtccttctaagtcaattactgaatgttttgaagttttcactttgtgttactttatattt

SEQ ID NO: 909215 - DNA, 120 bp, Artificial Sequence
  ENSG00000251600_46 (sequence is synthesized)
gacaaataggctttcttgagtctggatgtccgctctgcttgtcttaccgcatgagagagtgcagatgttcctgaaagcatctttgcgtggatttgcttgaagcgagatgtgagagaaggg

SEQ ID NO: 909216 - DNA, 120 bp, Artificial Sequence
  ENSG00000251600_47 (sequence is synthesized)
gcaaagctcgaagggagctgctagagagagaggaaagcagctggacagggctttcctgatgactgaaatcttattgtggataatggagatcaggtcctgtggtggtggatctaatggaag

SEQ ID NO: 909217 - DNA, 120 bp, Artificial Sequence
  ENSG00000251600_48 (sequence is synthesized)
gatcctaggtctctgaatcacaacgtggaagaaaatcagtcaccacccctagctggaacaccaacatttcaaataagtgaaaaataaactcttattatgtcaagccactgcaattttggg

SEQ ID NO: 909218 - DNA, 120 bp, Artificial Sequence
  ENSG00000251600_49 (sequence is synthesized)
gtttgtcttagtgttagtgtcacctacatttatgcaatagctgagtaacattttagaagaagaggatgtttgtagccattttggactacaagaaatgtcaaagatactttttattttcct

SEQ ID NO: 909219 - DNA, 120 bp, Artificial Sequence
  ENSG00000251600_50 (sequence is synthesized)
aatttttaatttctaggtttattcttaaaagagtaagatctttttttgaaaaatcagtactattattttgacttttggatatacaaacaggtctctccttaaccactcaaaagagccaag

SEQ ID NO: 909220 - DNA, 120 bp, Artificial Sequence
  ENSG00000251600_51 (sequence is synthesized)
tgagaggaatttgtggataaagacatttaaaggtagtatgaaatctttaatcacgccaaatcaacactcatcaccacgacattctgtcagtgcctccagggattaaggacatatgaatgt

SEQ ID NO: 909221 - DNA, 120 bp, Artificial Sequence
  ENSG00000251600_52 (sequence is synthesized)
ctttccctgaaatgtgattgtgacattggacttagctatttgggttttcatgaaacccattgtcaggttaaataatgatagagtagtagatgttctgcacaattgcttttgttataaaac

SEQ ID NO: 909222 - DNA, 120 bp, Artificial Sequence
  ENSG00000251600_53 (sequence is synthesized)
ttgaaaaaaagtatattaattttttatgccttgcctttcagtgcattattacttatctttgtgcagagtagattaagtaggtccattgaataagaaagcattaatttggtagattctctg

SEQ ID NO: 909223 - DNA, 120 bp, Artificial Sequence
  ENSG00000251600_54 (sequence is synthesized)
tgttaagatgctcagtattttttatggaataaaggtgtggaaggtttctactcctggtcaaggagtagaaacaggtagaaaatatttatatttcagccctgcttctcctttgtcatatcc

SEQ ID NO: 909224 - DNA, 120 bp, Artificial Sequence
  ENSG00000251600_55 (sequence is synthesized)
ttcaccacaaggatctactttcacttctgccttggttttaaacagcagccagtatatgaaggtctagctaactacactatctccctaggagagttggtacaatgttgtttccaaaaatta

SEQ ID NO: 909225 - DNA, 120 bp, Artificial Sequence
  ENSG00000251600_56 (sequence is synthesized)
gacaaagcatgtttaatggctccctttcactaagtaaataaataaaagcaagaaagggaggaagcaagctggctaaagaagaaatgaactagacatctgtatgtttcattttgttagtga

SEQ ID NO: 909226 - DNA, 120 bp, Artificial Sequence
  ENSG00000251600_57 (sequence is synthesized)
tcaagctcgtctttcatgattattactttgatacatacaagatatatcacaactattttcctaagcaatatgaagatacaaagttattataaaaactaatggatctaaaaatacatattg

SEQ ID NO: 909227 - DNA, 120 bp, Artificial Sequence
  ENSG00000251600_58 (sequence is synthesized)
aaaggtatatttatcttttgcacacctcgatgaatttttcacaaactgaacagatctctgaaactgacaaccatataaaacaaacagacaaaacaaacaagcaaacaaacataaccaaca

SEQ ID NO: 909228 - DNA, 120 bp, Artificial Sequence
  ENSG00000251600_59 (sequence is synthesized)
tgaatacattaggtattcttttgtgcctgacattttttgttgaatattttgtttgcaagatttatcctattgttgcatatgcttgtagactgttcattctcacagatgtattataaaatc

SEQ ID NO: 909229 - DNA, 120 bp, Artificial Sequence
  ENSG00000251600_60 (sequence is synthesized)
tattgagcaaatatggcacagtttatttatacactctactgttggtagacatcttgatagtttccagttttgtttggagctattacaaaagtgctgctataaacattccagttaagtctt

SEQ ID NO: 909230 - DNA, 120 bp, Artificial Sequence
  ENSG00000251600_61 (sequence is synthesized)
ttggtaaactcaaatatgtatttttgttgaatatatatgtatatatacctaaagaaagattcgttgatactgccagttttccaacatggttgtatcaatccacatcactaccagttgtgc

SEQ ID NO: 909231 - DNA, 120 bp, Artificial Sequence
  ENSG00000251600_62 (sequence is synthesized)
ataaagatttgagttgccttgtatctttgccaacacttgaaattttttgtctttattgttttagccagactagaggttgtttagtggtatttcactgtggtttaatttgcatttccttga

SEQ ID NO: 909232 - DNA, 120 bp, Artificial Sequence
  ENSG00000251600_63 (sequence is synthesized)
tggctaatgaacttgagaatatggaaatatgtttattggccatttgaatgtctttctttatgaagtacctgttcaagtattttacctattcctctattgagttgcctgcatttttcctat

SEQ ID NO: 909233 - DNA, 120 bp, Artificial Sequence
  ENSG00000251600_64 (sequence is synthesized)
ttcctctattgagttgcctgcatttttcctattgatttgcaggagttctttatatgtgctagataagagtgtttttggtactctacatgtaacattatatgtatgtgtatatatatatat

SEQ ID NO: 909234 - DNA, 120 bp, Artificial Sequence
  ENSG00000251600_65 (sequence is synthesized)
actttgtagtttgccctttcattcttttaatgtcttttgatgaacggatgtttttagtttatttaggcaaagctataaggtaagaacaatgttagattaagctttaaaaggtgattcagt

SEQ ID NO: 909235 - DNA, 120 bp, Artificial Sequence
  ENSG00000251600_66 (sequence is synthesized)
tccatgaacagaaagattgggattcccagcactattgagctgtttgaatcaaactcctagaagccttaatatattttttcaactttccctttgtaattgtagtgttggaaaaacaatagt

SEQ ID NO: 909236 - DNA, 120 bp, Artificial Sequence
  ENSG00000251600_67 (sequence is synthesized)
taccctcagagtgttgtagaaattaccatctgttgattgaaacaatgagaaaatattaccaaaatggttagaacaataagagtactatataatatccatgaaaaattgacactagccaca

SEQ ID NO: 909237 - DNA, 120 bp, Artificial Sequence
  ENSG00000251600_68 (sequence is synthesized)
ggttccttcaggaaaccatcagtgttctgaaaataataaatcagaaaatcaatgttcagttttcaacagcacggtgaggatggcagtgaaaggtattattttaagaattttctcaggccc

SEQ ID NO: 909238 - DNA, 120 bp, Artificial Sequence
  ENSG00000251600_69 (sequence is synthesized)
tgagttgtaagagtctgtaatcagtgatatttttatttaaagaaaatcagagcatgaaagagcattattttaatatctaatatttaatgctagaattaaaaatctagtgtaagatttatg

SEQ ID NO: 909239 - DNA, 120 bp, Artificial Sequence
  ENSG00000251600_70 (sequence is synthesized)
ttggaaaaagcaaacaagcaaacaaagtaaattacagctctctgtgtaataacgtgaatgaatggagattcctcggcaaattgaatttactatgtgaaatcttgtaaatgaggcatattt

SEQ ID NO: 909240 - DNA, 120 bp, Artificial Sequence
  ENSG00000251600_71 (sequence is synthesized)
taaaaaatcttggctctaaagtgatttggtgaaatgattattttcctcattaagacaaaataaatttctgtcatattattaaacatttcacaacctcaaagtgctgttttatggtagacc

SEQ ID NO: 909241 - DNA, 120 bp, Artificial Sequence
  ENSG00000251600_72 (sequence is synthesized)
agctagaagtaaagattaaagtggactgtatttgtggtctggtcagagtttaagcagaggacacagtttctggaagcttttccttcagcctggatgtcaagggtccttttgctgcttagc

SEQ ID NO: 909242 - DNA, 120 bp, Artificial Sequence
  ENSG00000251600_73 (sequence is synthesized)
acctccagcagcctccacccaggttcatcatctagctgtgttgtctccactgtttcctggagaaaggtccaattacccaaaatacagttgtgccctttttatgttttcatcatagttaat

SEQ ID NO: 909243 - DNA, 120 bp, Artificial Sequence
  ENSG00000251600_74 (sequence is synthesized)
tatagaaaaacttggttatatgcgaagtcctactaaaacaaaagtatcataggaaatatttctaagaatcatgcaaaatcatgattttgtattaagaaattctaaattaagaaccatgta

SEQ ID NO: 909244 - DNA, 120 bp, Artificial Sequence
  ENSG00000251600_75 (sequence is synthesized)
aaaatgagagtttgaaatgttactctgtcagacactgaagaatttaagaaccgttaattgtttgtatactagctcctcgaaggtaggtctgtttttattcatctttacggccttcgttgt

SEQ ID NO: 909245 - DNA, 120 bp, Artificial Sequence
  ENSG00000251600_76 (sequence is synthesized)
ccctgacatattgctgcacgtagagtatatgcacagtgtatacttgtggactaagtgaatgccaactttagcttttgaaaatgtaatatatgagtttaacagatgttgtctcttcacttt

SEQ ID NO: 909246 - DNA, 120 bp, Artificial Sequence
  ENSG00000251600_77 (sequence is synthesized)
ctaagtacttggaactttgaaaatggctctttcaatagtaaagtttttttctctagatatgttcttaaataaaaagtgatgtaaagaaaggaaaacaaacttaaaccattaaaatgtttt

SEQ ID NO: 909247 - DNA, 120 bp, Artificial Sequence
  ENSG00000251600_78 (sequence is synthesized)
aaattactaaatctgcctccaggaatgtgtaaagagataatgactacctaacataattttttatgggttaaattttctctaaatgtgatctattctattttgaactacaaatattttaaa

SEQ ID NO: 909248 - DNA, 120 bp, Artificial Sequence
  ENSG00000251600_79 (sequence is synthesized)
agtataaattgtaagcaactggaaaattggttttaggcacgtgatatgcaatttcacaaatgttcaggatcctggtgttatttctatgactatgagatttcataaacaaattatatagcc

SEQ ID NO: 909249 - DNA, 120 bp, Artificial Sequence
  ENSG00000251600_80 (sequence is synthesized)
gaggaaagcccagcgacgccgggccagcgcattcttattttatgtatgagcaaactatggaatggaaaagagattatgagttattacttgatttgatttgccctaagtgttttttaaacg

SEQ ID NO: 909250 - DNA, 120 bp, Artificial Sequence
  ENSG00000251600_81 (sequence is synthesized)
tatggatttagcgccaacatttaaaaagaaggtatattttaattaaaaatcaggaattgatttaatttaaaatttggctcctcttacaggaagatctggcaagagttagcgtgcagttct

SEQ ID NO: 909251 - DNA, 120 bp, Artificial Sequence
  ENSG00000251600_82 (sequence is synthesized)
acattgtgacaattcatgagagctaaggactggctgtctcttgggacaaataggctttcttgagtctgatgccctggaatacacttgtgtcagtgacaaatgctgctttgctgtgctaca

SEQ ID NO: 909252 - DNA, 120 bp, Artificial Sequence
  ENSG00000251600_83 (sequence is synthesized)
caaagctcgaagggagctgctagagagagaggaaagcagctggacagggctttcctgatgactgaaataaatgaataagtcttcagggaccagatgggcgcagtggctcacgcctgtaat

SEQ ID NO: 909253 - DNA, 120 bp, Artificial Sequence
  ENSG00000251600_84 (sequence is synthesized)
gctgaggtgggtgaatcacgaggtctggagtttgagaccagcctgtccaatatggtgaacccccgtctctatttaaaatacaaaaattagactggcgtggtggcacacgcctgtagtccc

SEQ ID NO: 909254 - DNA, 120 bp, Artificial Sequence
  ENSG00000251600_85 (sequence is synthesized)
tgaggttttgttgctacatttctgaacttcaaaattagaaaaataatatcctgaagcttctaatacttacagttgagctgactttatattctgtttacacctaccattttacataaatct

SEQ ID NO: 909255 - DNA, 120 bp, Artificial Sequence
  ENSG00000251600_86 (sequence is synthesized)
agaagacaacataaaaattaaaagagaaaaaatatcccccatattcataatacctctctatggactattcttttgtgggataaggtaggtgggagaatggaagagtagcagacccattag

SEQ ID NO: 909256 - DNA, 120 bp, Artificial Sequence
  ENSG00000251600_87 (sequence is synthesized)
ggtagaagatcagaagaaaaagaaaatgcatacatttttatctttaaaacaattcacttttaagattattttcttgaaaggtatacctttgatggagccgaatctggttccttcaggcag

SEQ ID NO: 909257 - DNA, 120 bp, Artificial Sequence
  ENSG00000251600_88 (sequence is synthesized)
atacaataggatacaataggataggacttcttgggtaaaaaaggtgtagtaatctgtgagtctcaccggaaggagaaaggaaattattcattaatttggctgaggccagggtagtaagca

SEQ ID NO: 909258 - DNA, 120 bp, Artificial Sequence
  ENSG00000251600_89 (sequence is synthesized)
gatttattataaatattggcagcagaggagtacttgaaaagtgcttataaagttagatcatctatttttccaagcaatattcttcatgtcattccaccttgcaaaaactttgtggaaagg

SEQ ID NO: 909259 - DNA, 120 bp, Artificial Sequence
  ENSG00000251600_90 (sequence is synthesized)
aataggcatatgaatgagcaatgaatagactttgcattagattggtaatcttgctactagtacattaatttacttgtattactgatattttaagataggatttttacagatgtttatata

SEQ ID NO: 909260 - DNA, 120 bp, Artificial Sequence
  ENSG00000251600_91 (sequence is synthesized)
tttttaaaaagcctatttttttctttacccattttctcaatttttttaacctcgaaaactttttcctccctgagagaaatacatgggctatcttcagcacagaacacaaactctgccttc

SEQ ID NO: 909261 - DNA, 120 bp, Artificial Sequence
  ENSG00000251600_92 (sequence is synthesized)
gaattggcagagccatgtgtctccaggatgctagccaagactttttcaagaagaaagaggtaatttgttgatgctcaatttcccagaatcgaagaaaatgaagagactttaattaccaac

SEQ ID NO: 909262 - DNA, 120 bp, Artificial Sequence
  ENSG00000251600_93 (sequence is synthesized)
tgggatgaagatggggagtcgacagaggagatgagggcacttagtggctgtcctgtgagactcaagaagggaacagcttctttccaagaactgatgagaagcctgaaccaggacccagta

SEQ ID NO: 909263 - DNA, 120 bp, Artificial Sequence
  ENSG00000251600_94 (sequence is synthesized)
gaagaaaaggaaccccttgagttgctgtttggctgtttatagacagcgtccaagttggtcagtgccgctgacaataggtgcttggctgaaagcatgggctaaattggatgactgataatg

SEQ ID NO: 909264 - DNA, 120 bp, Artificial Sequence
  ENSG00000251600_95 (sequence is synthesized)
acagttaatgctgtggtaactgaacataaagaaaagaagtaaaaaagaaacaagtgagtaatgagaaacagattatttgagtcctgcaatgagacctctaatacaatggtggaagttaga

SEQ ID NO: 909265 - DNA, 120 bp, Artificial Sequence
  ENSG00000251600_96 (sequence is synthesized)
gttgaggaagtccaaggtggaaataatgaactccaggataaagcgctgtcacgaggcatgccttattgttccagataagttaaaacagcttccaatggtataaaacatcactttgaattc

SEQ ID NO: 909266 - DNA, 120 bp, Artificial Sequence
  ENSG00000251600_97 (sequence is synthesized)
tcgtcaaagcagggaaaccatggtctcagggtgaatgttccaatggcagcctgaccagcgtcacttcacaaccatgaccacgtctaaaactgaaagatgactttagccgctgttcccaca

SEQ ID NO: 909267 - DNA, 120 bp, Artificial Sequence
  ENSG00000251600_98 (sequence is synthesized)
aagtggtttcaacacgatgacagtgtgatgcagaaaacctagagctaaaaaactgaatgtatattctctttagagtaaaaggaaatgactacaagcctggtaataaatgtggcagcttac

SEQ ID NO: 909268 - DNA, 120 bp, Artificial Sequence
  ENSG00000251600_99 (sequence is synthesized)
tagaaaggcaggtttaaagaataaggaaattcatgttagagcttaaattgaaaacaggtgccaagcctatttcatggatccatagaatgtcagaactggaggagacccagaagtgactca

SEQ ID NO: 909269 - DNA, 120 bp, Artificial Sequence
  ENSG00000251600_100 (sequence is synthesized)
tccaattcccacatttgatgtatcaggaaactcaggtcacaagaagtgaagtgacttgttcaatgccacacacagtgtcagatttatctcctaatttaaaatttagtcttcttttcagac

SEQ ID NO: 909270 - DNA, 120 bp, Artificial Sequence
  ENSG00000251600_101 (sequence is synthesized)
taatattatgcatgtttaggctatgctttttctttaaatatgtgagcaaatctattggtgtaatgtactcattaccctaaaacctatattataatggacctgaagaccataaggtagaag

SEQ ID NO: 909271 - DNA, 120 bp, Artificial Sequence
  ENSG00000251600_102 (sequence is synthesized)
atcagaagaaaaagaaaatgcatacatttttatctttaaaacaattcacttttaagagtattttcttgaaaggtatacctttgatggagctgaatctagttgcttcaggcagatacaata

SEQ ID NO: 909272 - DNA, 120 bp, Artificial Sequence
  ENSG00000251600_103 (sequence is synthesized)
ggatacaataggataggacttcttgggtaaaaaaggtgtagtaatctgtgagactcaccggaaggagaaaggcaattatgcattaatttggctgaggccagggtagtaagcagattcatt

SEQ ID NO: 909273 - DNA, 120 bp, Artificial Sequence
  ENSG00000251600_104 (sequence is synthesized)
ataaattctgacagcagaggaatacttgagaaatgcttatagttagatcatctatttttccaagcaatattcttcatgtcattccaccttgcaaaaactttgtggaatagaataggcata

SEQ ID NO: 909274 - DNA, 120 bp, Artificial Sequence
  ENSG00000251600_105 (sequence is synthesized)
tgaagagcaatgaatagactttgcattagattggtaatcttgctactagtacattaatttacttgtattactgatattttaagataggatttttacagatgtttatatattttttaaaag

SEQ ID NO: 909275 - DNA, 120 bp, Artificial Sequence
  ENSG00000251600_106 (sequence is synthesized)
tccatgagcagaagatcagaggagcagaagagtggtgcagcagagaaggagagaagagaaggaatgtctaaatgtcaagaggagttcagctggggacagttggagaggagataggccatg

SEQ ID NO: 909276 - DNA, 120 bp, Artificial Sequence
  ENSG00000251600_107 (sequence is synthesized)
gaagagccaaactctaggggaagatcatctttccactccatcccctttccagctctccatccatcccactgacagccacctccaccactcaataaaagtcccatattcaccatccttcaa

SEQ ID NO: 909277 - DNA, 120 bp, Artificial Sequence
  ENSG00000251600_108 (sequence is synthesized)
tttaacagaacagcaaagagtcgatgaatgttcagagatattatataagtaacagataagaagtgtcctgatctatggtattcattctcagttgcaaatatatatgcaaaaaaccccaca

SEQ ID NO: 909278 - DNA, 120 bp, Artificial Sequence
  ENSG00000251600_109 (sequence is synthesized)
tgccctggaatacacttgtgtcagtgacaaatgctgctttgctgtgctacatcgagtacaaggtagtgataagacatgactgggaagcagttaccagagacaagcgaggatagggctttg

SEQ ID NO: 909279 - DNA, 120 bp, Artificial Sequence
  ENSG00000251600_110 (sequence is synthesized)
ccacctcaacagaagaggaactgtgtgctccgtgaggatgtcatagattctgccttaccagtatggaaatcctgaaaacaccatcaactcttcatcatcactaaattctcctttgtcaca

SEQ ID NO: 909280 - DNA, 120 bp, Artificial Sequence
  ENSG00000251600_111 (sequence is synthesized)
ataaggtgatctcagggaaggggagaagggctggttgcctgccaaatctatgatcaagtcggctccacagtcactttgcttccacttctaagtgagaacatacagtgtttggtttttcat

SEQ ID NO: 909281 - DNA, 120 bp, Artificial Sequence
  ENSG00000251600_112 (sequence is synthesized)
agacggcggcccagcagaggagcggaaagcatggtccggggggcggcggacgcctggtaggcgctcgggccgttgttgtggggctgcgcgctggcgctgcagggcgggatgctgtaccca

SEQ ID NO: 909282 - DNA, 120 bp, Artificial Sequence
  ENSG00000251600_113 (sequence is synthesized)
tcttgagtctggtaagtgctccacttgatgcttgcttccatttcttagattaggttctactgtggtaaggcctcaaaatctcagtgtcttgcagcaacactggttcatttcctgctcaca

SEQ ID NO: 909283 - DNA, 120 bp, Artificial Sequence
  ENSG00000251600_114 (sequence is synthesized)
ttacatttggtctatgacggtgacaagttccaggatccagactgaaggagccacccccatttggaatatgctgttcttgttgcaaactgggggaaaaaggccagataaggaatggctttt

SEQ ID NO: 909284 - DNA, 120 bp, Artificial Sequence
  ENSG00000251600_115 (sequence is synthesized)
aatgcttcctctcagactgtgttatggtttttttctcacattctattagccaaagtaaatcagtggccaagctgacctcaatgggacaagtaaatataattcttccaaatggaagtcctg

SEQ ID NO: 909285 - DNA, 120 bp, Artificial Sequence
  ENSG00000251600_116 (sequence is synthesized)
caagtcataggtcaatggtgaggatatataaaacacttacaggaagggccctaataattgggagcaaaaacacaatccatcgcattcatttatactctttctaagcttttggcatttggg

SEQ ID NO: 909286 - DNA, 120 bp, Artificial Sequence
  ENSG00000251600_117 (sequence is synthesized)
tttggaaatctaatttatttaggagtcttcttcaacaccttctagtgatgagatttctttaacccagttttcagtttcctttctttaaaattataatgagatgtgatgtgcgttgaagaa

SEQ ID NO: 909287 - DNA, 120 bp, Artificial Sequence
  ENSG00000251600_118 (sequence is synthesized)
accccagaagtgagaaactctcatcactacaatggtgatgtagacagtggaaaactgttcccagttgcctctaagtccatcgtgctatactgctggaatcaggtatcatacataatcttt

SEQ ID NO: 909288 - DNA, 120 bp, Artificial Sequence
  ENSG00000251600_119 (sequence is synthesized)
ctgctgagaattgataggtccagcttgttctacatccaaataataattcaaccaatgatttgtgagcacctaccgggcactgtgccaagtgtggaagacacaaccttcagtaactcaagt

SEQ ID NO: 909289 - DNA, 120 bp, Artificial Sequence
  ENSG00000251600_120 (sequence is synthesized)
ttcccttcaggaactgacagcttaatttggaaacaaataaattaagaaggcaattgcattatggagtgtcaagtggatgatagtagtaagcaaagggtgttataagggtacataagaggg

SEQ ID NO: 909290 - DNA, 120 bp, Artificial Sequence
  ENSG00000251600_121 (sequence is synthesized)
gtacctaactcagggttgaggttctggaaaggttttccagagcaagcaatgagacctaaaggatgagtagacaagtcacgggagaagtaagaacattttaagcagagaaaacagcatgag

SEQ ID NO: 909291 - DNA, 120 bp, Artificial Sequence
  ENSG00000251600_122 (sequence is synthesized)
caatggtctgatatcaagaaaggcagagatagtgcaagaatacacaatgtagtagttttcaaaactgtttgaaattttaatctcacatttgttcttttcaatgtctaggatatcaattca

SEQ ID NO: 909292 - DNA, 120 bp, Artificial Sequence
  ENSG00000251600_123 (sequence is synthesized)
ttctgcgatttacctttgtaaagatgaatttagccctggttctctatatgaatactagaggaagtatattgataaaagaaaaggaacaaatatgtagtcatttctaagatttatttttat

SEQ ID NO: 909293 - DNA, 120 bp, Artificial Sequence
  ENSG00000251600_124 (sequence is synthesized)
accttcctgtcccaccccgtggggcattacattagggtaattacattaggagaacttgttgtttaaaagagtgtggcaccttcatccccctttttcctttcttgccatgtgacacaccag

SEQ ID NO: 909294 - DNA, 120 bp, Artificial Sequence
  ENSG00000251601_0 (sequence is synthesized)
ttgagcccagaagtcactggaggagttcaagggtgcccagagtgcaagcaagatccaagaatatccagaactattcctaagccacatcgtgtattattatcaaatggcctgtgaagcaga

SEQ ID NO: 909295 - DNA, 120 bp, Artificial Sequence
  ENSG00000251601_1 (sequence is synthesized)
aagacctctctatactgaattgggacactgcctggaagttgtccaaactctgccttttgaaagaatattgatgactaagaaaacttgccctgaataaactaatgttaggacacaggaaag

SEQ ID NO: 909296 - DNA, 120 bp, Artificial Sequence
  ENSG00000251601_2 (sequence is synthesized)
caccctcacttcaagtcatgttcattccacaatctcatatttcagatgtcatggttgcaggattggtcgtgttgtgttggagctgagaagaggcagtgcccatcaatcagcagttcctgc

SEQ ID NO: 909297 - DNA, 120 bp, Artificial Sequence
  ENSG00000251602_0 (sequence is synthesized)
gtctaaggagaggagagtccagtgagtgacccagacgccccagccaggaagagcatgaggtgcgaagggggcttcccagatggagagaaacagatggtcccagagtggcttggagacagg

SEQ ID NO: 909298 - DNA, 120 bp, Artificial Sequence
  ENSG00000251602_1 (sequence is synthesized)
tgcaacatcagtgttgggggaggacatggagcggagcgttcagggctatcaggagggagccccgtggccacggtgcaagatctaggcaggcgggacagacatggtcaggatgctggggac

SEQ ID NO: 909299 - DNA, 120 bp, Artificial Sequence
  ENSG00000251602_2 (sequence is synthesized)
gaaagttagccagaaacaccagaaagtgccaggcagctaggaagcatggggagagccccctgaagctgcgtgtgtagtgcctgcttccgctgccatcccagaaatggacgagcttcaccc

SEQ ID NO: 909300 - DNA, 120 bp, Artificial Sequence
  ENSG00000251602_3 (sequence is synthesized)
tgagaacccagccacaccactgggacacatcctgacagtgacatgcacactcttccctggccccagcctggagaggagcctcctgaagacaccagcctttgctccttctcccagtgggag

SEQ ID NO: 909301 - DNA, 120 bp, Artificial Sequence
  ENSG00000251602_4 (sequence is synthesized)
gcgcgccccttcccggacagttcctctcggcgcccccgagtcctccccgcgcgccgcttcccgggtgggcccttccaccagaaccccctggtagatcctcccctggtgccctgggggtag

SEQ ID NO: 909302 - DNA, 120 bp, Artificial Sequence
  ENSG00000251602_5 (sequence is synthesized)
aggggagatcctccacaagggccatttccctggtgatccctccctgtgccccacaggtgagtcctgccgtagctctccaggggttcctcctgatgctggggtcctccggcattcctccct

SEQ ID NO: 909303 - DNA, 120 bp, Artificial Sequence
  ENSG00000251602_6 (sequence is synthesized)
gagccccccaagggccctgaagctcagcggcccagccctggcctcggggtccccaccccacacctcccttccaggcctaacctttgcccccgacaccaggcagggcgtgtccttggcctt

SEQ ID NO: 909304 - DNA, 120 bp, Artificial Sequence
  ENSG00000251602_7 (sequence is synthesized)
cgccgcccagcccgcgtggcatctctggacaggtggtcgtgcgcgccttggtgtgggcaggctccgtagccggcaaagcctccctgaaccgtgacctggtgagaaggccgcagaggaggt

SEQ ID NO: 909305 - DNA, 120 bp, Artificial Sequence
  ENSG00000251602_8 (sequence is synthesized)
gcctgtgcccagaggccacctccaaagaccccacctgaggctggaacccagcgcctgctgaccccgccagccccaacagggctggagtccaggagcggccgtgctctttccgcagtgagg

SEQ ID NO: 909306 - DNA, 120 bp, Artificial Sequence
  ENSG00000251602_9 (sequence is synthesized)
cagctgccttctcttcccaccacctgtcaggatgccttcccgtgtgtgcttgtgcacaggtctaaggagaggagagtccagtgagtgacccagacgccccagccaggaagagcatgagga

SEQ ID NO: 909307 - DNA, 120 bp, Artificial Sequence
  ENSG00000251602_10 (sequence is synthesized)
agggaggcaatctgaaattcaagccaggcctccccagcggagaggacacacccctcaccatgcagagtgacgtttagtaaactctcaaaagagagcacagagccccactcctccagccga

SEQ ID NO: 909308 - DNA, 120 bp, Artificial Sequence
  ENSG00000251602_11 (sequence is synthesized)
cccatactctgcctccccactccagaccagtgaacaaggtggattgcccttaagccagctcagaggcaaagtccaaagacctcaggtgagtcaaacaataaaaacaaagaattaagaaga

SEQ ID NO: 909309 - DNA, 71 bp, Artificial Sequence
  ENSG00000251602_12 (sequence is synthesized)
tccatccactccatccacttagtagcagagcgaatagacattcaggaaagagctttcacgtcagaaagcac

SEQ ID NO: 909310 - DNA, 120 bp, Artificial Sequence
  ENSG00000251602_13 (sequence is synthesized)
gaatagacattcaggaaagagctttcacgtcagaaagcactacagaagtagtggcatatccccggaggctgaggtgggagcattgctgagaggtggcacgtgaccacatccatgtcattc

SEQ ID NO: 909311 - DNA, 120 bp, Artificial Sequence
  ENSG00000251602_14 (sequence is synthesized)
cacgtgaccacatccatgtcattcaacaacagaaaaacaagtcatcgagggtgtgaggggccggtgagaaacccagtatggaagaaaacacaactgggctgagcgtggtggctcacgcct

SEQ ID NO: 909312 - DNA, 120 bp, Artificial Sequence
  ENSG00000260517_0 (sequence is synthesized)
attaaaggtgtgagccactgcacccggccggccttgtacttttgaggcggtgttgactcttgcaatccatagctttgagagctccccatccgaatctcaggcacacttgactttttcact

SEQ ID NO: 909313 - DNA, 120 bp, Artificial Sequence
  ENSG00000260517_1 (sequence is synthesized)
ctcgtaggagtgatctccttagtccatcgatcaaactgctgagagcaggccatggcctgcctgctgtcatggcccgtgaagcagaattggagatgagaggggaggacctgggctggagag

SEQ ID NO: 909314 - DNA, 120 bp, Artificial Sequence
  ENSG00000260517_2 (sequence is synthesized)
tgggcaggaggagatcctgcaaacagggaactgagagaggggagggaggaggagggtttgagagtggggaggggagctgggggtgctccctgaagaccaggaggagaggaaggaggggag

SEQ ID NO: 909315 - DNA, 120 bp, Artificial Sequence
  ENSG00000260517_3 (sequence is synthesized)
ctgcaggctatgaacggggctgcaggttatgaatggggcactccggcgttctgagaactgagcactccgacattctgagaactgggcacaggggcaccaggccctaagtgagttctgctc

SEQ ID NO: 909316 - DNA, 120 bp, Artificial Sequence
  ENSG00000260517_4 (sequence is synthesized)
cggggtggccgggcccgagagcactgacgtccaacgggagtgtcgctgcccaccgcctcccacaagaggacacttcgatttgccagagaagggcagagtgggagatgactttttctcagc

SEQ ID NO: 909317 - DNA, 120 bp, Artificial Sequence
  ENSG00000260517_5 (sequence is synthesized)
atcttgcctcattttcctcttcccagaggtttgtttttaaggaagtttaagcttgctgcactggaaaagcaaaaaacaatattttgtaaaataaatatttgttttgtgcagacttaggcc

SEQ ID NO: 909318 - DNA, 120 bp, Artificial Sequence
  ENSG00000260517_6 (sequence is synthesized)
tttccacatattggtttttcttgaagaggagacacaaccacagcaggggtgaggagaagagagatgcagtcactcactcattcaggaataatctttgagttgaaactgcagtctgctctt

SEQ ID NO: 909319 - DNA, 120 bp, Artificial Sequence
  ENSG00000260517_7 (sequence is synthesized)
ggccaaaggtagggtgctgaccaccttcacctggaggccgccttcacctggaggccgcccaccaccttcacctggaggctgcccttgctctttcaggatcctctttcatgggtttctgca

SEQ ID NO: 909320 - DNA, 120 bp, Artificial Sequence
  ENSG00000260517_8 (sequence is synthesized)
ttttcctttgcaccccaacacatctctacccgtcctccctgcacccccaacccgaagacgggcgtgtgatcctgtgggtgggtgcatggtccgtgtgtgtaattttgtccggagcagtaa

SEQ ID NO: 909321 - DNA, 120 bp, Artificial Sequence
  ENSG00000260517_9 (sequence is synthesized)
ttctcggagtgggccccagacccgcagtgtaagcattgcctggtgctgtggtttggacgtgtgtcccctccacatctcatgttgaaatgtatccccagtgttggagtgaggcctacggac

SEQ ID NO: 909322 - DNA, 120 bp, Artificial Sequence
  ENSG00000260517_10 (sequence is synthesized)
aggggtttgggtcaagggtcagatccctcaggaatggcttcctgccgaccccacctgccagtcatgagcgggcccttgctcaattagttcctgcgtgagccaggtgttaaaagagcgtgg

SEQ ID NO: 909323 - DNA, 120 bp, Artificial Sequence
  ENSG00000260517_11 (sequence is synthesized)
cccctccctccctttggcttcctctcccactgtgccctctgcacacatggctccccttcaccctccaccctaagtgggagcaggctgaggccccaccagaagcagattctgttgccaggc

SEQ ID NO: 909324 - DNA, 120 bp, Artificial Sequence
  ENSG00000260517_12 (sequence is synthesized)
tgtacagcctgcagaactgtgagccaaagagaccacttttctttagaagttgcccggccccaggtgtcccttgatagccacacaaatgttcacctgtgaacttgctataaattcagattc

SEQ ID NO: 909325 - DNA, 120 bp, Artificial Sequence
  ENSG00000260517_13 (sequence is synthesized)
attctcaggccccacccagacctgctgagtcagaaactccagcaggggcctggaagtctgccttttaccaggaacctgtgtgattcccatacagagtttgagaacctctggtctctggaa

SEQ ID NO: 909326 - DNA, 120 bp, Artificial Sequence
  ENSG00000260517_14 (sequence is synthesized)
ctgcatgctttaaatgggtgcattttacgtatgtggattatatctttaaaaagatatccaaagacaaacaaaaagataattgactacctgaagcaaagacgggaaaagtgtattgtgggg

SEQ ID NO: 909327 - DNA, 120 bp, Artificial Sequence
  ENSG00000260517_15 (sequence is synthesized)
tttgtaacatgcagaagcaaatctgtggtaacaacagtaccaaggatgggaggcaggaagtacaggcgctgctgtcaggttactacatgtatgtgaagtggtagaatattgtgtaatggc

SEQ ID NO: 909328 - DNA, 120 bp, Artificial Sequence
  ENSG00000260517_16 (sequence is synthesized)
agactgagaagctacagctgtaactttatcataagccctattgcaaccatgaatagctacactaagaggtataacaaggcaatagtgaagatgaaatgaaataataaaaaaatactcagc

SEQ ID NO: 909329 - DNA, 120 bp, Artificial Sequence
  ENSG00000260517_17 (sequence is synthesized)
agtgcgtggagacgcagccccaacgtgctgctgctgctgcggacacctggggcgtggagccagggcacggggcagctgtccctctgcagccacacaccacaggggatgggcaccagcaga

SEQ ID NO: 909330 - DNA, 120 bp, Artificial Sequence
  ENSG00000260517_18 (sequence is synthesized)
aaatgaaaaggcacttaaataactcacacaactttgaaagagaaaatcttccaaatcttctttggaagattcacacttgatttttgcaagaggtacaataatgccactgtaatcaaaaca

SEQ ID NO: 909331 - DNA, 120 bp, Artificial Sequence
  ENSG00000260517_19 (sequence is synthesized)
gtgtgatattgtcataaggacaaacaagtcggtcaacagaacaaaatagagtcttggaaataaacgcatgtatatatggtcaatagatctttttcaacaaagtgcccacataacttgttg

SEQ ID NO: 909332 - DNA, 120 bp, Artificial Sequence
  ENSG00000260519_0 (sequence is synthesized)
ggaaagagctgttgggtctgagccggcaggcgaaggcgaaagggtctgggactacaaggtttagctcccagccagagcaggaaaggaacgactgactgttcgccatctgggtgtaattct

SEQ ID NO: 909333 - DNA, 120 bp, Artificial Sequence
  ENSG00000260519_1 (sequence is synthesized)
gctgccaggtcgggaggcccctggtgcccatggtgctcttgtccatggggcttgggtgcatctgggccccgcctgcaagtgggcccggtgcatctccctagttcaggctctgcagcctga

SEQ ID NO: 909334 - DNA, 120 bp, Artificial Sequence
  ENSG00000260519_2 (sequence is synthesized)
caaggcactgaaatagcaattaagccaactaagtattggcccaggtggttcacaaaagactttttttttttcttttagttaaatctgcataaagttggatgcagtcgttttatctgcaaa

SEQ ID NO: 909335 - DNA, 120 bp, Artificial Sequence
  ENSG00000254238_0 (sequence is synthesized)
ggcattacatcaacataaccaccgtgatttcgaaccactccagcatgtactgctgctctgcagatactggacagctgagaagaggcaagaatataagcacaaatgtgaagactagtacat

SEQ ID NO: 909336 - DNA, 120 bp, Artificial Sequence
  ENSG00000254238_1 (sequence is synthesized)
tcaagataccagcaggacttttcagtggcacataagaccagtgcaaatctggagcttgagagagactcagaattggaaaataactgcaaaggtaaagctgaactgaaaaaaatcttggta

SEQ ID NO: 909337 - DNA, 120 bp, Artificial Sequence
  ENSG00000254238_2 (sequence is synthesized)
gcatttgtaactctctggcttagaaatctgtaatggtttctaagtgtttgcctcataaaacgtaaactcatcagcatgcactttcagactttgtctacacactgatgtgagctggattcc

SEQ ID NO: 909338 - DNA, 120 bp, Artificial Sequence
  ENSG00000254238_3 (sequence is synthesized)
tctctctctcagactaacttggttgaagccccttttcgttccgattttcagcagcttagagacaaagctatctgctagtctgatgtacagctcattgactcttaactccgttactttgta

SEQ ID NO: 909339 - DNA, 120 bp, Artificial Sequence
  ENSG00000266586_0 (sequence is synthesized)
ggatcgtgatgtgaaatggtgcctggtctgctggggacagcacaggaacgaaaacgtggaaacgtggaaacgcgggtctccggccgtccagctttcgcgggccccgtgttcttcccttca

SEQ ID NO: 909340 - DNA, 120 bp, Artificial Sequence
  ENSG00000214970_0 (sequence is synthesized)
aaaacaaaactgaagaccgtagcttaggccatatgccccatccatccctggaggtaacaagaggaaagtcaccttccttgggactgtatagatgcccaaacagaaatctgagggtattga

SEQ ID NO: 909341 - DNA, 120 bp, Artificial Sequence
  ENSG00000214970_1 (sequence is synthesized)
gaagggggaagagggattggctggtgcagagggaagcatttgacaaagacaaggggagaagccattgaaaggagatcaatttcagcgtgtttggaccagcagattccaggtgatggatag

SEQ ID NO: 909342 - DNA, 120 bp, Artificial Sequence
  ENSG00000214970_2 (sequence is synthesized)
ttcctcgctccaattccatcattaatccccgtttgaggatttgagtgctgccgaggactgacagactccatgaggttcagctgctgcctggtacatgtggtcacctgcagcttcttcagc

SEQ ID NO: 909343 - DNA, 120 bp, Artificial Sequence
  ENSG00000214970_3 (sequence is synthesized)
cctacatatattttgtgctgttttagactgctctttcttccattaaatgagagattagatctgaatggccacgtgatcttctgagtcccatctgtaagaatctgcatttccacggaattg

SEQ ID NO: 909344 - DNA, 120 bp, Artificial Sequence
  ENSG00000214970_4 (sequence is synthesized)
ggaggccgaggcaggcggatcatgagatattttgtgctgttttagactgctctttcttccattaaatgagagattagatctgaatggccacgtgatcttctgagtcccatctgtaagaat

SEQ ID NO: 909345 - DNA, 120 bp, Artificial Sequence
  ENSG00000214970_5 (sequence is synthesized)
atctgtaagaatctgcatttccacggaattgggggagcaaacgttctcaaaacattcttaaatgcaaacccgcaggcacagcatgtgtctgtcaactccaagagcatttggatgttcgaa

SEQ ID NO: 909346 - DNA, 120 bp, Artificial Sequence
  ENSG00000214970_6 (sequence is synthesized)
atgaaagaaactggaaggaaagtgaagactggaacagagattttctcattcctgcttgagtgttcttccaatgactgtgtgtgtgtagctttgaaaatacaaagtattgggaataggaac

SEQ ID NO: 909347 - DNA, 120 bp, Artificial Sequence
  ENSG00000214970_7 (sequence is synthesized)
tgtgatacaaacaaagacagtgacatgaaggcaatggattctcagcattacaaggcaagacagaacttgaaggaagaaggctgggaggaaaccaatgttgaatgaacactgactctgtgc

SEQ ID NO: 909348 - DNA, 120 bp, Artificial Sequence
  ENSG00000214970_8 (sequence is synthesized)
agaacttgaaggaagaaggctgggaggaaaccaatgttgaatgaacactgactctgtgctcagccctgagcaagcagtggaatgcccctgggctgtgagccacgaattcaaatcccagct

SEQ ID NO: 909349 - DNA, 120 bp, Artificial Sequence
  ENSG00000214970_9 (sequence is synthesized)
tgtagagctgttctgggggttagaagtttggggtccctcgttgctgcactcgttccaggtttggggctggcgctgcccttctgacccctccctaaagtggacacaggagaaggagcgggg

SEQ ID NO: 909350 - DNA, 120 bp, Artificial Sequence
  ENSG00000214970_10 (sequence is synthesized)
aaacaggctgaaatcttttcttcttgcattgctatcttcagcatcttatatcattcagtcagctaaattccatctttgtgataaatcccccacaaatattttgtgatctctctgatctaa

SEQ ID NO: 909351 - DNA, 120 bp, Artificial Sequence
  ENSG00000214970_11 (sequence is synthesized)
gcagtgttaaaccttttgattccttgtatccttcctctcccctttcttaaaatagtctgtagcgctcatgtcaaggacctgctcagcttccctttctctaaaattgcataatcctacaag

SEQ ID NO: 909352 - DNA, 120 bp, Artificial Sequence
  ENSG00000258723_0 (sequence is synthesized)
catttaaaaatgtaaaacccattcttagctttcaagccatacaaaaccaggctgcaagctggatttgaccctcaagctatagtttgccaactcctgctccatcctatgctatcttgcctt

SEQ ID NO: 909353 - DNA, 120 bp, Artificial Sequence
  ENSG00000258723_1 (sequence is synthesized)
acatctacatgaaagatgtaacatgtcagacagagtgtgcctgaacagtgaccagcgcagactaagtggtcagtaagtgttcattctcgttcccttccctaatctcgttcttcttcttcc

SEQ ID NO: 909354 - DNA, 120 bp, Artificial Sequence
  ENSG00000258723_2 (sequence is synthesized)
gaggaagacgagggctttcgcaaggtctaatcagcaggcagagcctgagaaattatcccttcggaggagagaggctgtcattggagcaccataaacagcccctccaggtcccagcatgtt

SEQ ID NO: 909355 - DNA, 120 bp, Artificial Sequence
  ENSG00000258723_3 (sequence is synthesized)
ccaatggagagtcagaagttcaaatcccagtgctaccactgacaagctctatgatcgtgggcaaaactgcttaacctaacaggccctaaatttcctgtacattaaaatgaatataatgat

SEQ ID NO: 909356 - DNA, 120 bp, Artificial Sequence
  ENSG00000258725_0 (sequence is synthesized)
cactcaagtccctgacttgcagtggaccacaatatagccacttctcagctccatacccagatggatgtcatggcatgctctgaaatggactatgcactcccagtattccagcttttgaga

SEQ ID NO: 909357 - DNA, 120 bp, Artificial Sequence
  ENSG00000258725_1 (sequence is synthesized)
catttcttctgaagaagccattttggctggttcagtggtatgcagcttctgggtatgataaaacccacaaaggttggtgttttcatagtattccttttaatcattagttacttttgttcc

SEQ ID NO: 909358 - DNA, 120 bp, Artificial Sequence
  ENSG00000258725_2 (sequence is synthesized)
ctacaaagcaaaactatggtataacaggacaactaagactgccctggcaccagagaaactacaatctagatgtgctctgcttccagtcggccgagaagcctgcagcaaatcacctaaaca

SEQ ID NO: 909359 - DNA, 120 bp, Artificial Sequence
  ENSG00000258725_3 (sequence is synthesized)
cttaaggtctttgtgtgccatccacacccaactgcaactagagactttcattagcccctttctgtctcagagctttcggtggttctacaagtcaccagcctggatctctaacaatgtgtc

SEQ ID NO: 909360 - DNA, 120 bp, Artificial Sequence
  ENSG00000258725_4 (sequence is synthesized)
gaatccaattcaagtctgaacaaattttattaattaatctgttgtgaatgtaaatcagatgtgtttttttgagtccatgataggaattcctgcttcctttgtaacactgctgagattatt

SEQ ID NO: 909361 - DNA, 120 bp, Artificial Sequence
  ENSG00000258725_5 (sequence is synthesized)
agttagtgtagccctgtgcccagatgaatgaagccagcagatgacagatcagtttggaaaagggacatgcagggattgccatacagacctgaagcccaacagtggaactgtcagagaggg

SEQ ID NO: 909362 - DNA, 120 bp, Artificial Sequence
  ENSG00000258725_6 (sequence is synthesized)
acggatccttctaagaacaaagaattaagacaattaccaagaactccaccaagagagcaccaggacagtgatagaggggttgcctcctgcagccagggaatgttgcaagatggtcgtctc

SEQ ID NO: 909363 - DNA, 120 bp, Artificial Sequence
  ENSG00000258725_7 (sequence is synthesized)
tccttcttcctgaataagacaacgtaccactgttataagattccaagtgaattccttcagaggaagagaaggacaacataagaaggcgtggatgacagactttcagttaaactaacaaag

SEQ ID NO: 909364 - DNA, 120 bp, Artificial Sequence
  ENSG00000258725_8 (sequence is synthesized)
tttagaggttgcccgtccttgttgaagaaacatttctacacaaatacctgttgcctataccagatggccataccaatacccaaatactgacaaacgtttaaaagaatttacggtactccc

SEQ ID NO: 909365 - DNA, 120 bp, Artificial Sequence
  ENSG00000258725_9 (sequence is synthesized)
ttcactttagaaatgttaacagttcaagtccaacagaacttaaaggaaaaaaagagaaatgttaacagtctctggccagctgaacttcccgggcatttcctgaacaatgcccctcaataa

SEQ ID NO: 909366 - DNA, 120 bp, Artificial Sequence
  ENSG00000258725_10 (sequence is synthesized)
attactatccttagcttccctcattctcttaccttacattgtctccttatttaagactgaagaaacagctgtcagttttgttcaaactgctatatactacggagatcctagggcataatt

SEQ ID NO: 909367 - DNA, 120 bp, Artificial Sequence
  ENSG00000258725_11 (sequence is synthesized)
tgagaagacagtacctgccgtagcaacttttgtagtgttgcaatattctccaaagacaaacaaaaggcatcttcgtcttcacacaccacatctctttcaaagcttgtgtctggggtgtgg

SEQ ID NO: 909368 - DNA, 120 bp, Artificial Sequence
  ENSG00000258725_12 (sequence is synthesized)
tctaatgcttccatacacagtatgatctgtctctttatactgacaaactcctcacgcctagaagcctttaaaacaaagcaattacaagatacctagaggaaaaccaaagtgacttttagg

SEQ ID NO: 909369 - DNA, 120 bp, Artificial Sequence
  ENSG00000258725_13 (sequence is synthesized)
aagaacaaatgtaggcagtgtacctttgtttccctcaaagttgtcacatgttgcctgaactggttcagctcttctaagctgggcactgaggcactgtcaatatcatagtggggcatacaa

SEQ ID NO: 909370 - DNA, 120 bp, Artificial Sequence
  ENSG00000258725_14 (sequence is synthesized)
agaatttcgcacagttcttgatcttgctcttgaagtagcttcagttcctgttttctctcctttttctgttttcgcatcaattccacttgggtgcgcaaatctttttctagttgcaagatg

SEQ ID NO: 909371 - DNA, 120 bp, Artificial Sequence
  ENSG00000258725_15 (sequence is synthesized)
cttccccaggcaaacactccttttgcacttcattttgaagacaaaagaatgcacaagttaaaatcctaatattaccattttattaaaaataacttttaagatccaatctgtggccaatat

SEQ ID NO: 909372 - DNA, 120 bp, Artificial Sequence
  ENSG00000258725_16 (sequence is synthesized)
tcgatctggatgcaaaaccctggcttccagacaggccagccaggggcactgctctgaaggtcattacttaagtatcccagtctcctcagtctgacagacctacccctgcccagccaatct

SEQ ID NO: 909373 - DNA, 120 bp, Artificial Sequence
  ENSG00000258725_17 (sequence is synthesized)
ccacataacagctagttgttcataataaatcccatcagatccccgcttaactactccccttcaaaggctccactgccctcaggaaatagttcaaccaccttctgtagaaaggccttctaa

SEQ ID NO: 909374 - DNA, 120 bp, Artificial Sequence
  ENSG00000258725_18 (sequence is synthesized)
aacctctctccgagtctgtctgctaatctctcccacttgacactccccaggtctctggccagctgaacttcccgggcatttcctgaacaatgcccctcaataaaccacatgcaactctca

SEQ ID NO: 909375 - DNA, 120 bp, Artificial Sequence
  ENSG00000258725_19 (sequence is synthesized)
aaagacagctcaacccattggaacaaacagactcccaatgtggctggcaactgcgggggtagaagaactcaggcaaagtaggcacaggaatgggggagatgagagccaagggacaaacgc

SEQ ID NO: 909376 - DNA, 120 bp, Artificial Sequence
  ENSG00000258725_20 (sequence is synthesized)
cgagaaagcgttccgacaagcatgtgtgttcatacatgcatacccccaacaaagggcaatgcactgtgtaacagaactgaacacaatttaacaaagctgctcccagccttcctgtcacct

SEQ ID NO: 909377 - DNA, 120 bp, Artificial Sequence
  ENSG00000258725_21 (sequence is synthesized)
ggcattacaggttttcaggaaaactgctgaagctttcttttcatcgttaccagaatgttggcaatcattcccccaccgcaccccgaatttaatgcaaggacgcaacaagcacagacacca

SEQ ID NO: 909378 - DNA, 120 bp, Artificial Sequence
  ENSG00000258725_22 (sequence is synthesized)
aagctggccactccgtgactgtcactataggccgctactcagccttccatccactcaagtggactcgacatgcagggacagaaaaaccctttcccatctctgcaggacagagggcaagag

SEQ ID NO: 909379 - DNA, 120 bp, Artificial Sequence
  ENSG00000258725_23 (sequence is synthesized)
ctcccaaagtgctgggattagaggcatgaaccactgagcctggccaaatcaacaacagtctttatgactaacacagaagtgctaagagaagactgctgacccagtacccactgggtttct

SEQ ID NO: 909380 - DNA, 120 bp, Artificial Sequence
  ENSG00000258725_24 (sequence is synthesized)
gggtttcttaccgctttccggaccttggcctttgacccagacataatggtggccacagcttctctttcttcttcaggtatttgcaacctgtcccagagctctcggatttgagtacgcagc

SEQ ID NO: 909381 - DNA, 120 bp, Artificial Sequence
  ENSG00000258725_25 (sequence is synthesized)
ccctcacacactgcttcattttgtgatttctgcatttccagctacagcatagaaagccagtgtcactcacggcaaagcagcagcacagaggctagccctctagcctcccgcaaagaaatg

SEQ ID NO: 909382 - DNA, 120 bp, Artificial Sequence
  ENSG00000258725_26 (sequence is synthesized)
tctggagtagaggaggaggcactttcatgagagttcaaagtagcatgttttcatgcctcctaaacacgagctgtaaggctgtcgggatctcagaccccaagaattagcattcaaatttag

SEQ ID NO: 909383 - DNA, 120 bp, Artificial Sequence
  ENSG00000258725_27 (sequence is synthesized)
aactgaaaaaaattttaattaaacactagtctaattcaaatgactaatattatttcatctataatttcattttcttggagccatataaaggttttttaactgttaaacaaaaatcaaggt

SEQ ID NO: 909384 - DNA, 120 bp, Artificial Sequence
  ENSG00000258725_28 (sequence is synthesized)
atgcctacctttttctcagcgtttataaaaaaaaattcatattccctacaaagcaaaactatggtaagcagcagcttctttttgatcatctattagttgcttcacctcttaccagggcaa

SEQ ID NO: 909385 - DNA, 120 bp, Artificial Sequence
  ENSG00000258725_29 (sequence is synthesized)
ctctctacagaggtgagaattactctgctgggcctaattaactacacagcatgttttccccacttcttacgtctagctccatccctacgaggaagccttccatctgcaggcccaagtcaa

SEQ ID NO: 909386 - DNA, 120 bp, Artificial Sequence
  ENSG00000258725_30 (sequence is synthesized)
cgttgctttctaagtctcaggccccagacagatcaccagagaccctgtgggctgccacggacctgaaatggctcaacatgtaactcgctgcacagagtgttcagctctttctgacagacg

SEQ ID NO: 909387 - DNA, 120 bp, Artificial Sequence
  ENSG00000258725_31 (sequence is synthesized)
gatatgcttttgatgagtctttccttcaggctttcctcttcagcaatcatcatatccaggagttcctacaagagggaaaacagtccataagtttggggcaatggaggaaaaaaactccca

SEQ ID NO: 909388 - DNA, 79 bp, Artificial Sequence
  ENSG00000258725_32 (sequence is synthesized)
cagtccataagtttggggcaatggaggaaaaaaactcccaacaccaataccaaactcctcaaatttcttttttcttttt

SEQ ID NO: 909389 - DNA, 64 bp, Artificial Sequence
  ENSG00000258725_33 (sequence is synthesized)
tcaaatttcaagaagggacttcaaaaccaaaccaaaccaaacaggaagagcctgtgctatccta

SEQ ID NO: 909390 - DNA, 120 bp, Artificial Sequence
  ENSG00000258725_34 (sequence is synthesized)
aaccaaaccaaaccaaacaggaagagcctgtgctatcctaatgccgatgatcacatgtcccttctgtatgctatctcgggtgagacaccaacatccttaccctggtccaatgcagagacc

SEQ ID NO: 909391 - DNA, 120 bp, Artificial Sequence
  ENSG00000258725_35 (sequence is synthesized)
agtactattcaacccaccttgatatgcttctttaccacctcagttctttgtaaccgctggtcctctggaatcccaattagctcccatatttcccgaaggtgatttagggctttctgcaga

SEQ ID NO: 909392 - DNA, 120 bp, Artificial Sequence
  ENSG00000258725_36 (sequence is synthesized)
catactatggactcctccgccagcacctcactgaaaaccaaaaactaaggcctgttagttacatcagtcacagcctctggactaaaagcactattttcgagaactaaaaagactagcttc

SEQ ID NO: 909393 - DNA, 120 bp, Artificial Sequence
  ENSG00000258725_37 (sequence is synthesized)
tcagtggcctcgagaaaaaaacaaattgaaaacaagcattcagcttaattcacctttaaccactccccatcccttttcctaccaaatgccactagcaatacaagatttcatatcatatta

SEQ ID NO: 909394 - DNA, 120 bp, Artificial Sequence
  ENSG00000258725_38 (sequence is synthesized)
catcatggaagctcaaccttctggactttcaacaatgatctacctatggaagtataatacagaattataaatacttttactaaagaaaaaccggacaaaagatgttggtaaaataaacta

SEQ ID NO: 909395 - DNA, 120 bp, Artificial Sequence
  ENSG00000258727_0 (sequence is synthesized)
aggccagggaaagaagtctggaacaaagggaagacagatgaccatgattgacttcattcttttacctcctgagatggcgatgggatgggggacacacaggaagaagcagggtccatgagc

SEQ ID NO: 909396 - DNA, 120 bp, Artificial Sequence
  ENSG00000258727_1 (sequence is synthesized)
ctcagcccttggcttaggaggaggagcagtacatttccacctaccttctctaagacatcttccctttgcttaggcttacctgggggtggaggtacacagggaaggtcaagcaggtgtacc

SEQ ID NO: 909397 - DNA, 120 bp, Artificial Sequence
  ENSG00000258727_2 (sequence is synthesized)
agggcacctcctggggaggggtccagatggggaggatgctggacatccccagaagccccatccaggagatctagcagatccaggagctgtgaggcctggcagaagggacagaaggggcag

SEQ ID NO: 909398 - DNA, 120 bp, Artificial Sequence
  ENSG00000258727_3 (sequence is synthesized)
ggctgggtatgaagctcagcccgtcttcctaccccagagtttctagccttctcacctggggctctgtgggcactggggctgcttctgaaagctgggctgcttctttgctttcctttgctt

SEQ ID NO: 909399 - DNA, 120 bp, Artificial Sequence
  ENSG00000258727_4 (sequence is synthesized)
cctcatcagcctgagggccatctcgctccacaagaggcattttttccaggatggcagccctgagaggatggaatgcaagtgtgcctctgtgtggtctctgggcctttcacaagaggcatc

SEQ ID NO: 909400 - DNA, 120 bp, Artificial Sequence
  ENSG00000258727_5 (sequence is synthesized)
taggatgaggactaggaatatggagccctgggcacatggtggctcagaagtacccttctgatttcctaaaatgacatgttgttgctgattttcagatgaacaaggagggttggaagccag

SEQ ID NO: 909401 - DNA, 120 bp, Artificial Sequence
  ENSG00000258727_6 (sequence is synthesized)
gagggttggaagccagcttagcttcaattaacagtgggtgggaagctctcaccgtggatatggaagaacacagggtctcactctgtcgcccaaagctcactgcagccttgacctcccagg

SEQ ID NO: 909402 - DNA, 120 bp, Artificial Sequence
  ENSG00000258727_7 (sequence is synthesized)
ctcctgagtggctgggactacaggcacatgccaacaagcccaggtcctgggatgacccgagcaatcctgtgcctgctactctgctgcccaggacactgagagaaccagtgttctctggga

SEQ ID NO: 909403 - DNA, 120 bp, Artificial Sequence
  ENSG00000258727_8 (sequence is synthesized)
ctctgggaggaaaccactggtcatggtcttactgctatgccctctctgatccagggatacagcagtgaaaggtcaccccacctgcaggaaggggtcgctgactccagatatgctgtgttc

SEQ ID NO: 909404 - DNA, 120 bp, Artificial Sequence
  ENSG00000258727_9 (sequence is synthesized)
tgtggagtatcccattgtcaccagagtccggaggatgtgtaccagctggggtaccacctggagggagggcacaactttgggcattcgttctaatcctctccagctaaagccccattcctt

SEQ ID NO: 909405 - DNA, 120 bp, Artificial Sequence
  ENSG00000258727_10 (sequence is synthesized)
ccccactgaccctgtcttccaggcccagggcctgccccttcaccagcccacctttcggaagtgcctgagggctgcagggcttcgttcgcagagctccgtgatcagcgtgatggtgcccag

SEQ ID NO: 909406 - DNA, 120 bp, Artificial Sequence
  ENSG00000258727_11 (sequence is synthesized)
caggatgcctggggtcagcgtcggggaagtgaatggtgggggccaggggcaagagagtctattgcgtgtgtgcctgtgtgtgtgcactacccttctcctgtgagctggggttcccatccg

SEQ ID NO: 909407 - DNA, 120 bp, Artificial Sequence
  ENSG00000258727_12 (sequence is synthesized)
attttcaattcttctgtccatagacctgaagcaaaggatggggggccccacagccttaccatggtgacgctcatgaagcagttgggcacagggtgggaggaagacactggagagttcagg

SEQ ID NO: 909408 - DNA, 120 bp, Artificial Sequence
  ENSG00000258727_13 (sequence is synthesized)
cttccggatcatgtgcactgcagtcagaatagcctgcagaggtcaggggcctcagacaggggtcagaggagatggacccctgcatctactactatatagcacgcagcaggcagtgtgcag

SEQ ID NO: 909409 - DNA, 120 bp, Artificial Sequence
  ENSG00000258727_14 (sequence is synthesized)
gagcacgtgccaggagtcccgccatctcaccttcttgcgcacgtagggactgggctgcaggagcagtttctccacctctggggccaggtctcggcacatctcagcagagcccatggtgct

SEQ ID NO: 909410 - DNA, 120 bp, Artificial Sequence
  ENSG00000258727_15 (sequence is synthesized)
caaagtgcacaaggccaggccttgtactggctgaatcccctggctcaggtcactgcagggtttgggaggacggtcagtcaaacctctgagaaaatcagtccttttcaatacccacaacag

SEQ ID NO: 909411 - DNA, 120 bp, Artificial Sequence
  ENSG00000258727_16 (sequence is synthesized)
gcagtcccctgggatttccaaggtccctactctcccatctccctgattccaagtgattgccagaaccctctcacttcttgatgctgttggtaatgagcaggtgggcatcgtgcctctcat

SEQ ID NO: 909412 - DNA, 120 bp, Artificial Sequence
  ENSG00000258727_17 (sequence is synthesized)
ccaatagaagcatggcccccaggtagcccaccctcttgtctgtgaatctggaggaggcgatcagtttcaggcactccatctatagtgaagggggcagaccaggaagaggcaggggtgaaa

SEQ ID NO: 909413 - DNA, 120 bp, Artificial Sequence
  ENSG00000258727_18 (sequence is synthesized)
ccatagacactcacatccctgttccatcttcctctttaaaaccagattaacctgtggggcatcatatctcatcactctcccttcaacaagaggagaagcttaggaaattcaggcgttagt

SEQ ID NO: 909414 - DNA, 120 bp, Artificial Sequence
  ENSG00000258727_19 (sequence is synthesized)
gggtaggaggaactaggagttgaggaggatgggagcggagaggaggagatgcctgccctaaaggaggctggccagagaatgaagggttcaggccagctgatgaccagtaggggtagcaat

SEQ ID NO: 909415 - DNA, 120 bp, Artificial Sequence
  ENSG00000258727_20 (sequence is synthesized)
ggggaaagaggtttgcagtgcaggctgtgaagactctgaaattgtagaatttaaaaaaccagggcataaacaggtgagagagtctgggactctgccccactagccttcatcaagctcagg

SEQ ID NO: 909416 - DNA, 120 bp, Artificial Sequence
  ENSG00000258727_21 (sequence is synthesized)
agggaggtattcctggccagtacctgtccaaagtgggcggggtagcccaacatgtggacgtagagcagtttggccagctgccggtgcctgtgcactgggtccccgtcgcggaaggaggcc

SEQ ID NO: 909417 - DNA, 120 bp, Artificial Sequence
  ENSG00000258727_22 (sequence is synthesized)
cggatgtgggcacactccttttggatcacctcccgctcctgggcctgagtcttggccccgcgaatctcttcgatgaggtcctgaagcttcagcgaaggcaccaccatcctgactggcaga

SEQ ID NO: 909418 - DNA, 120 bp, Artificial Sequence
  ENSG00000258727_23 (sequence is synthesized)
gtccgggagtggagaaacactctctggtcgggcgtgcctgggctttcggcccaggcccgtcctgtgtcaagaccctaagagcccgggtcccacaggcagcggcagcggcagcgacagcct

SEQ ID NO: 909419 - DNA, 120 bp, Artificial Sequence
  ENSG00000258727_24 (sequence is synthesized)
gcctaccccaggactccagcctcacctggcttctgcctcaactccgctcctctgccccccagcgcttcctggtacggggccgagcaggggttggtgctccgtgcggtccttccctctccc

SEQ ID NO: 909420 - DNA, 120 bp, Artificial Sequence
  ENSG00000258727_25 (sequence is synthesized)
cgcctccaccacgggaccccgccctcctgggccgactgcagagccttcctgaatcctctgacctcgggcctcaggctttagcggagagacagcatgataggcctggagttcttcaagagg

SEQ ID NO: 909421 - DNA, 120 bp, Artificial Sequence
  ENSG00000258727_26 (sequence is synthesized)
cctcctcgcacatccttaccacccggagagcctcagtttggatttgaagccatcgcaccccaaaggagatgacaatccccccccttttttgaacttttttattaatatattttttttgtt

SEQ ID NO: 909422 - DNA, 120 bp, Artificial Sequence
  ENSG00000258729_0 (sequence is synthesized)
agatacaacaagggtcgtatttaaaaatcagtttcaaaaagggtgttggaggccaagttttttgagatttggaataactgagaaaaatgaacactagtgcatccttactgtaagaatttc

SEQ ID NO: 909423 - DNA, 120 bp, Artificial Sequence
  ENSG00000258729_1 (sequence is synthesized)
taaggctaccagaagaggacgaaccattctttcaaatttggattccactgaagtataggggaaaacacaactgctcagtgcaaagtactcacttgacttccagaactcttaacgtgaaca

SEQ ID NO: 909424 - DNA, 120 bp, Artificial Sequence
  ENSG00000258729_2 (sequence is synthesized)
ttttgtcagcccagatgtggcccagttattttcagtgatggagacttcaaggcaatccctccataaactgtttagcatttagtaaaagacaagtgaaaaaaatgccaacatctatgctat

SEQ ID NO: 909425 - DNA, 120 bp, Artificial Sequence
  ENSG00000258729_3 (sequence is synthesized)
tttcaatacagtatcaatgttctaatgctgtagacagaaatcctccttccattaataataaacacttcaaaggccaaatacagtttccctcacgcctccatttcagcttaaagttttact

SEQ ID NO: 909426 - DNA, 120 bp, Artificial Sequence
  ENSG00000258729_4 (sequence is synthesized)
ccccctcaactcccactctttcaggacataactattttcttgacaccagattccgttttaatttcttcttaattgtccataccgcgttctatttggaaagcaatcttaacgtggcccagc

SEQ ID NO: 909427 - DNA, 120 bp, Artificial Sequence
  ENSG00000258729_5 (sequence is synthesized)
ctttatttccatttgctttggtgccaatgaactggaatttcagccaaatctccgccctaaaggttcactttgagccacttaactttgctgcttctccatttctgataagtatatctgatg

SEQ ID NO: 909428 - DNA, 120 bp, Artificial Sequence
  ENSG00000258729_6 (sequence is synthesized)
gtttatttttaaatttttttgaagagatctttaaacaacccctttcaagaggccttgtcctgtttctgtgttctgtttcgctttggaacggatctgtagtgaatcccatgtaagggtttg

SEQ ID NO: 909429 - DNA, 120 bp, Artificial Sequence
  ENSG00000258729_7 (sequence is synthesized)
ctttgagagaaagtgggtgcagaatcatgtctggggaaagagcagtctgcccctgatgccagcagggggcgcccgccctcttctcagtggaactttggtttggaaatcaccccctaccaa

SEQ ID NO: 909430 - DNA, 120 bp, Artificial Sequence
  ENSG00000258729_8 (sequence is synthesized)
gcatggcacccgagcccgtgcaaattccgaccccacgcgcggtgggaaggacttggaaacatcctaactatcctaactctctcacgaggcttgtcggtgacagcttcctcttagtcaagg

SEQ ID NO: 909431 - DNA, 120 bp, Artificial Sequence
  ENSG00000258729_9 (sequence is synthesized)
acactgcgtggattaaaaagaaaaacatcattttattccatggttaatttctcgctgtaaacatggggctgggggccagcacaccaggccctctctcaacatgaaaattgcccctggtgg

SEQ ID NO: 909432 - DNA, 120 bp, Artificial Sequence
  ENSG00000258729_10 (sequence is synthesized)
cactttcacggcagactgataaagcccatgtttggggcatgagagaatagaaatgtgctttgtatacagataaagagcttctgtggccttctctgaggattgtctacagatgagtgtgaa

SEQ ID NO: 909433 - DNA, 120 bp, Artificial Sequence
  ENSG00000258729_11 (sequence is synthesized)
atagaagcctgcagaagcttctctgccagatccctctgctggaaatgcagcccccaccctcccactcagggtgggattagggtgaggcaagtgaggctctcagctgggcgcaaagtctaa

SEQ ID NO: 909434 - DNA, 120 bp, Artificial Sequence
  ENSG00000258729_12 (sequence is synthesized)
ggtgggagcacatctgtcatcaaacaataatgcaaagttttaaaaaataaaaagtaatgcaaaaacatccatgatgaacgaaacctcaaaattttaaataaagacatgatttgacatggc

SEQ ID NO: 909435 - DNA, 120 bp, Artificial Sequence
  ENSG00000261730_0 (sequence is synthesized)
cagatctcctggcctgggcggtgggcacgactcgatgacccactggccaggtctgagggtgcttgaagggggaaaaaggggtccaatctacgagaccctcaagcgaagaccggcctcacc

SEQ ID NO: 909436 - DNA, 120 bp, Artificial Sequence
  ENSG00000261730_1 (sequence is synthesized)
ccatttccgcacttcccaaattgccgggcgcgggtcccctcggttgcgagaccaaaaccttgggatgatcccaggagccagcccagcggcctgcaggccccgatcccagtgcgcaggccg

SEQ ID NO: 909437 - DNA, 120 bp, Artificial Sequence
  ENSG00000261730_2 (sequence is synthesized)
cggtaccaggcggagcacctcttcgacttcgcctacagcccgctgcgtttaggggtggcgagttgcggggttgcggggagtgagtggagagcagaggcggcccgctttgtccaaaaggca

SEQ ID NO: 909438 - DNA, 120 bp, Artificial Sequence
  ENSG00000261730_3 (sequence is synthesized)
gagagaaggggcttaggttggaacagagtcggtctgcgtctcccaacgggggaagaagggggggcacccagcggctaaagaaaataagtcaggaagcctgtaccgcaagtattcctggaa

SEQ ID NO: 909439 - DNA, 120 bp, Artificial Sequence
  ENSG00000261730_4 (sequence is synthesized)
gcaagtgtgggtgccggtggccctcagcatgttaacttttcgcccactgatgctgctggaagggacgtccccatgctttaggtcgcaggacagagcttgcagatgccttggaaaccggta

SEQ ID NO: 909440 - DNA, 120 bp, Artificial Sequence
  ENSG00000261730_5 (sequence is synthesized)
gggtcgtttaggggtccgcgtgccttttgctccgcggcccccggcctcggatcccctcctcccgcccgccttcccaggctggggagaaagatggctaggccgcgcacacacgctgggcag

SEQ ID NO: 909441 - DNA, 120 bp, Artificial Sequence
  ENSG00000261730_6 (sequence is synthesized)
ggttggaggggccgcggggcccacccaggaggcgcccgcggggcctgaagaggtcactccgggcactgcacgcgggagggtgcgcgccgagggctacggaagacaccagccaaaggcgcc

SEQ ID NO: 909442 - DNA, 120 bp, Artificial Sequence
  ENSG00000261730_7 (sequence is synthesized)
cggaggtcgccaggccgcgcctgcgatgccctccaaccgagaccagaggctggccggctgcggccgcgcggggaagcgccctggaggtcccaacccagcccgggcagggctttcttctcc

SEQ ID NO: 909443 - DNA, 120 bp, Artificial Sequence
  ENSG00000261730_8 (sequence is synthesized)
cgtctggctggtctcctccccgctgccctcccttcccccaaataaataaatatttccgagggcggcgaactcggcggggcgccgggtcctgagcgcctgggcgatagatgaacttcctgg

SEQ ID NO: 909444 - DNA, 120 bp, Artificial Sequence
  ENSG00000261730_9 (sequence is synthesized)
cgcatcaaaactcccctctcgtcctccccgccgagctcaggatatggggcgcgctcgcttctcttcagaaaaggaaacgtagctcttccaaaaatataaatcagctctgacgtccaaata

SEQ ID NO: 909445 - DNA, 120 bp, Artificial Sequence
  ENSG00000223863_0 (sequence is synthesized)
taaggatgaaattgcaggagctgcggttttataagaagccaaacattgtgtgcattcagaaaaagatatttttctaaggagatctacacctcagagcacttcctcccactgggcagtgga

SEQ ID NO: 909446 - DNA, 120 bp, Artificial Sequence
  ENSG00000223863_1 (sequence is synthesized)
ccactcgagcagcggttctgaacacctgatccccagactcatcgcagcagcagcatctaggaacaggtttttgtggagagactgagaaaatcacttcctggagaaatgaaggctgaaagc

SEQ ID NO: 909447 - DNA, 120 bp, Artificial Sequence
  ENSG00000223863_2 (sequence is synthesized)
caatgttgatggcaccttcttccagatcgtaaagggcttctccttgggttcaagctttctgcaaatggcagcagctgggcaggctgctaagcatagaggagagttgccctcacctgatcc

SEQ ID NO: 909448 - DNA, 120 bp, Artificial Sequence
  ENSG00000223863_3 (sequence is synthesized)
tgagaaccaagactaagtaacgcatcctggaaaggcccaggccaaacagaggccctgtggcgagttgctccaagggaaacccaggaacggagaaggaaggaggaagtttgggaagcagac

SEQ ID NO: 909449 - DNA, 120 bp, Artificial Sequence
  ENSG00000257761_0 (sequence is synthesized)
agccagcacggcactggagactcccgtgagcatgttcactgctgcgatgaccccaattaacagtttaatgggggaaatgtacagaggggatctgaaaactgttgaagtcaccaaagcatt

SEQ ID NO: 909450 - DNA, 120 bp, Artificial Sequence
  ENSG00000257761_1 (sequence is synthesized)
acaagatgccaagagataatggtcaaaaacagcctaataacacacagtgcccatgtgcatgctccactatctcaagccactgtcaccctggatcttctgcagcactggctggaatcagtg

SEQ ID NO: 909451 - DNA, 120 bp, Artificial Sequence
  ENSG00000257761_2 (sequence is synthesized)
aggtgaacactgcactgaatgaagggctttcaggtcttcctcaaagtcaagcaggaaatcttcaaggtcacgttcatctgcagcacaagaagtcctggaatgattagttctgactctctt

SEQ ID NO: 909452 - DNA, 120 bp, Artificial Sequence
  ENSG00000257761_3 (sequence is synthesized)
ttcaagggaccaaatcccagagtggagagtcctgggttattctggagacatgaactgtcacaaattccttgtgctctagctttcttgcaagttattataaagttgcctttggatgtttga

SEQ ID NO: 909453 - DNA, 120 bp, Artificial Sequence
  ENSG00000257761_4 (sequence is synthesized)
actgatttttccatagggaggatacgtgacatatcttattagaatttagaactctattttttcttccttctgttactgtccccaacatggttacatttggctctgttctcccgtgctgtt

SEQ ID NO: 909454 - DNA, 120 bp, Artificial Sequence
  ENSG00000257761_5 (sequence is synthesized)
attttatagaagcacacttccgtgtggggaggtctgtggtgtctgatgttctctgtgtctcagtggacaaatctgcggaattctcacattaattattaggaagcttacttgccggtggat

SEQ ID NO: 909455 - DNA, 120 bp, Artificial Sequence
  ENSG00000257761_6 (sequence is synthesized)
aaaaaccctgccatcttcgatcagctttattgggagatatgagacatcaatcaacatatgtaagatgtacattggttccgtccagaaaggtgggacaactcaagcagggaggggacttcc

SEQ ID NO: 909456 - DNA, 120 bp, Artificial Sequence
  ENSG00000257761_7 (sequence is synthesized)
aggtcacaggatgttgatataaggtctcattgccttcctcagcaatcttctgaatctggcattccttctgagaagactaacaagcattcatccaaaatgttcgtcattggaaagttagct

SEQ ID NO: 909457 - DNA, 120 bp, Artificial Sequence
  ENSG00000257761_8 (sequence is synthesized)
gtaatttgatctaacttctcactcaatatgatagtttttttttggtatacaagagacctgatggaatctttcttaggtaagccaaatctgtctctctgaatcgttcaccagttggttctt

SEQ ID NO: 909458 - DNA, 120 bp, Artificial Sequence
  ENSG00000257761_9 (sequence is synthesized)
gttctcttaaagagtaagtcagcttactctatgactgtttttcagtgctattaagcgaaacttgggttttagtcctagttcctcatctgtgaccttcgcaagtcacttatccttctgact

SEQ ID NO: 909459 - DNA, 120 bp, Artificial Sequence
  ENSG00000257761_10 (sequence is synthesized)
ctatattttcattggcaaaatgacaaggcctgctttgctcattccataaggctgtcaaaagagggggaaacacaggatccattaattaaatacgtactattcaatgcttttcaggtagtg

SEQ ID NO: 909460 - DNA, 120 bp, Artificial Sequence
  ENSG00000257761_11 (sequence is synthesized)
tgatggtaactttatatacactgagttattagtatttccaatcctatgaggctggtggtgtgatgcccatttttttgaggagaaatttgaggctgaaaaaaattaaataccttgtccaag

SEQ ID NO: 909461 - DNA, 120 bp, Artificial Sequence
  ENSG00000257761_12 (sequence is synthesized)
gattacacagatagtaacagaagtaggatttgaacccaggtctgtctggcagttgagcttaatcattttactatttggcctactataggctcgtacttaagaaagcacttagtaaatttc

SEQ ID NO: 909462 - DNA, 120 bp, Artificial Sequence
  ENSG00000257761_13 (sequence is synthesized)
aattattcaaatattttaaatattttcctttagcctgcttttctccaggtgacacattctccattttttagactattatttgataggatatcatttccctattccactcactgtttcatt

SEQ ID NO: 909463 - DNA, 120 bp, Artificial Sequence
  ENSG00000257761_14 (sequence is synthesized)
cctgtattccataatgcttctccagcctatcacatgcattttctgcccgtttctgaagttttatcatcctacccaataggcttcaggaacttgtgtatgagatgaacgagtcagtgtaga

SEQ ID NO: 909464 - DNA, 120 bp, Artificial Sequence
  ENSG00000257761_15 (sequence is synthesized)
atctgagttcaacatctttagaaatgttcataaggaggacatcgaaatggggatatggctacacagcccctccccacttcacttgcaaggaaaagtgaccataacctaattgtagttaag

SEQ ID NO: 909465 - DNA, 120 bp, Artificial Sequence
  ENSG00000257761_16 (sequence is synthesized)
ggtctctgtggcctgagagagaaaatagttagtgtttagtggcccataggaagatagtctcttttatctgcatagtggaactgtaaaatcaaatctccagtactgaagagcatgaatgga

SEQ ID NO: 909466 - DNA, 120 bp, Artificial Sequence
  ENSG00000257761_17 (sequence is synthesized)
accagtagggtcacagcaatcccatctatttatctaggacttctttctcatcagatgggcctctgaactaaatgtgataagattaacaaaagaagcaggacattgttactttttcatatg

SEQ ID NO: 909467 - DNA, 120 bp, Artificial Sequence
  ENSG00000257761_18 (sequence is synthesized)
ttagagtttttctggttctaaatgaagaaggtgttgctaattttatttccttttactgctttattgttatatttttagccaaaactaaatgagtagatgttttttatttcatataagaat

SEQ ID NO: 909468 - DNA, 120 bp, Artificial Sequence
  ENSG00000257761_19 (sequence is synthesized)
gattttctcttctgtaacagttgaaaaaaaatgatgtgcagtaacagccacctaatatatttttctattaaaatgtccctgaaaatagttataggtgacatatgaagagagggactagaa

SEQ ID NO: 909469 - DNA, 120 bp, Artificial Sequence
  ENSG00000257761_20 (sequence is synthesized)
atgatgagttttttgatgtaactggttaaattcaaaagcaaaggtagctccattgtgagcataaggtcttagcctaaaaggtggctttccagagaggcctttccggagctccatttctaa

SEQ ID NO: 909470 - DNA, 120 bp, Artificial Sequence
  ENSG00000257761_21 (sequence is synthesized)
agcaccacactaattattcccaatagactatttaaaatagcttcatttccttcatttatgtttctatcggatatttccatgtttatatttgtttactgtctatctcccctccgctggaat

SEQ ID NO: 909471 - DNA, 120 bp, Artificial Sequence
  ENSG00000257761_22 (sequence is synthesized)
gcgaattccagaccttgttttgttatccgcagtgcatagaatacagcacataatggtgcagaatacttgttgaatgaatgaacctgtttttggaaacaaaattgttactgccttacttta

SEQ ID NO: 909472 - DNA, 120 bp, Artificial Sequence
  ENSG00000257761_23 (sequence is synthesized)
agctagttcacagtttatggtttttacaaatttgttccatggtttgttctttactgttgttcaatgtctgaacagtacatctttccccttctcactgtagatttatttatttgtggatgt

SEQ ID NO: 909473 - DNA, 120 bp, Artificial Sequence
  ENSG00000257761_24 (sequence is synthesized)
aattcaagttctttctgattatgctatattagagtggagaacatttatcagatggcagtgttttgtgtaaggtgtattataactagtgttttgtcaataaaataataaagcctgtggatt

SEQ ID NO: 909474 - DNA, 120 bp, Artificial Sequence
  ENSG00000257762_0 (sequence is synthesized)
aggtctctaacagcgaatccaagactgggatttttttaaagctctcttcccttccccaccttgagtgtacaatggagagtgctagtgtggtgtcacatggtgcaacatggctcagtgttg

SEQ ID NO: 909475 - DNA, 120 bp, Artificial Sequence
  ENSG00000257762_1 (sequence is synthesized)
tgtgaaactaagagtccctggtttctagtacggtgcctgacagatagatgactttctttatatgttgctgaagacaggcagagaggaagaaaggaagagaggataaagggaggaataaac

SEQ ID NO: 909476 - DNA, 120 bp, Artificial Sequence
  ENSG00000257762_2 (sequence is synthesized)
ttgatataagcatctttgcataattaacaactgggtcaaattttcttcatttcattgagattcttgatacaagcctctgctgatgaattggattccaaaaagatattgttgtccaggcca

SEQ ID NO: 909477 - DNA, 120 bp, Artificial Sequence
  ENSG00000257762_3 (sequence is synthesized)
tgcacgtatttgcctggaggtctcctctggtcaccagatcctactctgcctgggccacatgacaaggtgatgtgctgaggaacaaaagcccccaggagtatccctcaagcagtgttggac

SEQ ID NO: 909478 - DNA, 120 bp, Artificial Sequence
  ENSG00000257762_4 (sequence is synthesized)
tggagttgagaatggatccagcctgtccaggcctttgtgcttgctcttccctcttcctgaatattctgacctggctctgtgtgtgtctacttcctcctcatctctcagatctcctttgca

SEQ ID NO: 909479 - DNA, 120 bp, Artificial Sequence
  ENSG00000257762_5 (sequence is synthesized)
aaagggcttccccaatgatttaatttaatatcatcttttcatgtaccccaaatgtcattctctagcactgtattctgtttatttccttcatagaatctacagtaaattctaatcgtttca

SEQ ID NO: 909480 - DNA, 120 bp, Artificial Sequence
  ENSG00000257762_6 (sequence is synthesized)
gaggagcaagagctccccaacgtggaggtgccgcagccctttgcttagatagccctttgctacctaattaacataaaattaatcagttcttccaaaatggacaagtgtttaaaaaagaat

SEQ ID NO: 909481 - DNA, 120 bp, Artificial Sequence
  ENSG00000257762_7 (sequence is synthesized)
tctgccaaagaaaatgcggactgaagataacgcagataaggcagctacaggttaaactacatgaaactgtcaatatttgctcagtttttatatttaaaagatagcaattgaatataattc

SEQ ID NO: 909482 - DNA, 120 bp, Artificial Sequence
  ENSG00000257762_8 (sequence is synthesized)
aaactaattatattaaatgccactcctccaagtactaatcagccacgatttagataaaaacaatgaccatctaatgaaactcgacataaatagagctcaaaaaggtaaaattatgaaaag

SEQ ID NO: 909483 - DNA, 120 bp, Artificial Sequence
  ENSG00000257762_9 (sequence is synthesized)
gccatttgaaataaggacatacatccactctctttaattatgaactatgaacagaataagtatatattttgctttaagatagtagctattgatagaatgaagacatcacatgtgaattgc

SEQ ID NO: 909484 - DNA, 120 bp, Artificial Sequence
  ENSG00000257762_10 (sequence is synthesized)
ttacttcatctttgcatcaacttttaatatttagatttggggcatattttataatgaacataacatatgagcataacagtcgtgattaacgtatacaattaaagatatgtggaaatgact

SEQ ID NO: 909485 - DNA, 120 bp, Artificial Sequence
  ENSG00000257762_11 (sequence is synthesized)
ccatctccgaccacacatcctctgagtaattttgatggggatggcttatgttctactgccacctcgtggtgggcattctgtgaacatgcatcttggaacagtggggagaaccagtttgga

SEQ ID NO: 909486 - DNA, 120 bp, Artificial Sequence
  ENSG00000257762_12 (sequence is synthesized)
gcacatggaaaaaagttgggacacagaaaaggaaagcagcaagagtcgggcagagattgatccccaaggaacttggaataccatgggaaaggttaatcgtcctcgaagagagagagaaac

SEQ ID NO: 909487 - DNA, 120 bp, Artificial Sequence
  ENSG00000257762_13 (sequence is synthesized)
aaaagaaaaatgaaaaaaggaaagaaattttctccacaaagactcagaaaagctacaatcctaagaagtcaaaactataatcggcttgagttgaagaatccaaggatctttacagttttg

SEQ ID NO: 909488 - DNA, 120 bp, Artificial Sequence
  ENSG00000257762_14 (sequence is synthesized)
tgacctgtccaaggttacacagctcaccttttcattttgcactgggcccaagttatgtagccagcctgcttagagatctctacttaccccagttttctgatttataaaacaaaaataata

SEQ ID NO: 909489 - DNA, 120 bp, Artificial Sequence
  ENSG00000257762_15 (sequence is synthesized)
ataatattgttaaattaaatgaagcctaaagctgcctccctatgtatttttaatttggcctaaaggtttcttcgtacagagtgaactataacctgactagatgtgtgatctactcttgtg

SEQ ID NO: 909490 - DNA, 120 bp, Artificial Sequence
  ENSG00000257762_16 (sequence is synthesized)
ccaatcatcaagttttaaccaatcgaagggagccaactgcttaaaccatgttcaaataaggcaaatgtccagctgtaaccacttcagctgtttctgtgcctcacttctgtcttctacaca

SEQ ID NO: 909491 - DNA, 120 bp, Artificial Sequence
  ENSG00000257762_17 (sequence is synthesized)
tcactttcctttttctatccataaatgttttttgatcatgcagcagcatgaagttgatctgaacctactttggtttgggagactgcccaattcgtgaatcaattaaactgttaaatttaa

SEQ ID NO: 909492 - DNA, 120 bp, Artificial Sequence
  ENSG00000257762_18 (sequence is synthesized)
gttccctggcaggacccagccccacatacccaaaacactaaactgcttaatgatggacacttcccatcctgtctccccttccccatttccctacccgtgtttcctgggaccacctccaaa

SEQ ID NO: 909493 - DNA, 120 bp, Artificial Sequence
  ENSG00000257762_19 (sequence is synthesized)
actaagaatttccccaagctgttccttgaagaacccaaactaagattgctaaagcactaagctggaagtgactcaaaaccaaaaagcctaacataagcttttgtcttctttaagaattca

SEQ ID NO: 909494 - DNA, 120 bp, Artificial Sequence
  ENSG00000257762_20 (sequence is synthesized)
catgggaaagatttgcaaactctcttttcccattgattgggtgaagggaggaagtgtcccttaaatcctgagggctatcgagtagcctgagcatggagccaacctggaagaagcagagct

SEQ ID NO: 909495 - DNA, 120 bp, Artificial Sequence
  ENSG00000257762_21 (sequence is synthesized)
gagacacagatactgaggacatcattcaaagcctgagtcaaaccgtgcctgaagccagacctatctctgaatttttcatttgtgtgaatcaataaattcccttttggtttatgccagtga

SEQ ID NO: 909496 - DNA, 120 bp, Artificial Sequence
  ENSG00000257762_22 (sequence is synthesized)
caatggagagtgctagtgtggtgtcacatggtgcaacatggctcagtgttgtgtgaaactaagtggggagaaccagtttggacttctgaggatccaaaagcccaagaaaaaaatctgagt

SEQ ID NO: 909497 - DNA, 120 bp, Artificial Sequence
  ENSG00000257762_23 (sequence is synthesized)
gcatatgactcgcaggctcacttagttatccgtcctcccctggagatggtcctaatagtactgcagcccttaaaacaaggaaacagcttctctgagcaacacagtctacaaggaagcatt

SEQ ID NO: 909498 - DNA, 120 bp, Artificial Sequence
  ENSG00000257762_24 (sequence is synthesized)
ccaacttccagaaaagatttttcccatcctcctcctgaaaggttcaaagagaccatgaaatctcaaccgtcttcaccagcaacattgtatatcaacaggaaaaaaacaatttcattagtg

SEQ ID NO: 909499 - DNA, 120 bp, Artificial Sequence
  ENSG00000257762_25 (sequence is synthesized)
acttcaacatttgacacagttactccaaggatacatacattgcgctatagaattcctctatttttttgctatccctccatcaagtggtgagttctgactccaaaatatgttttagatcag

SEQ ID NO: 909500 - DNA, 120 bp, Artificial Sequence
  ENSG00000257762_26 (sequence is synthesized)
tcctctactctccatttccactgccagccccctagtccatcccatgccatctcttgctagactggtcatcacttgctagactgtcaccaaatcctcctgactggcccatccccgattcca

SEQ ID NO: 909501 - DNA, 120 bp, Artificial Sequence
  ENSG00000257762_27 (sequence is synthesized)
atcaattgatatcacttccttcattaaaacctagcttcccattgcacatagaatgaaatcccaagtccttcttgtggactaaaagacttctcccacttctgttttaactcactgtaccct

SEQ ID NO: 909502 - DNA, 120 bp, Artificial Sequence
  ENSG00000257762_28 (sequence is synthesized)
tgcgggaggtacacagtgatcaaaaacagaccctacctacattagggagagaatttagtgagagagactgatgttaaacaaataataacatatgcagttttaaagctgacactgtaagaa

SEQ ID NO: 909503 - DNA, 120 bp, Artificial Sequence
  ENSG00000257762_29 (sequence is synthesized)
gtgttatatacagagccctatgagaagtcaaattagaaaattttggcctacttagggatggcatccccaaggaagtaaacaatgagctggggcctgtgtaggcaaaggttaactcagcaa

SEQ ID NO: 909504 - DNA, 120 bp, Artificial Sequence
  ENSG00000257762_30 (sequence is synthesized)
acctgggttgttcaaaccctgcacattttcaggaaaagcctgtcttcaggaatgaccctgggaaaagagctctgaggctttggaatgccctgcctgataagagtgtgtctttatgcccaa

SEQ ID NO: 909505 - DNA, 120 bp, Artificial Sequence
  ENSG00000257762_31 (sequence is synthesized)
agccttgggcaacacggtaccagtttgatcacatagtttatgttaacagtgagatttatggtgaatgcctgctcttgctctaggaggttgaagtctgagtagccaacatcaatcctgcag

SEQ ID NO: 909506 - DNA, 120 bp, Artificial Sequence
  ENSG00000257762_32 (sequence is synthesized)
gtactacatgccaatgcaactggcccccaattaaaaattctggacactcactcaggggagattcctagttggtagcactttactcaggcagtcacacactattgctggaagaatgaagtg

SEQ ID NO: 909507 - DNA, 120 bp, Artificial Sequence
  ENSG00000257762_33 (sequence is synthesized)
tgcccatgtgacgccactggaggaggacacctggaaacttgggcctgttttttcctggactttgccccaagtgctttttcccctttctggtttgaatctgtatcctttcactgtaagaaa

SEQ ID NO: 909508 - DNA, 120 bp, Artificial Sequence
  ENSG00000257762_34 (sequence is synthesized)
tttccaccttgagcatgacagcttttctgagtcctgtgagttctagcaaatcattaagcctaaggatggtctcagggaccctgacacagcaccaaagagagtgtttaaggcagagaaaac

SEQ ID NO: 909509 - DNA, 120 bp, Artificial Sequence
  ENSG00000257762_35 (sequence is synthesized)
agcagactcaaaaaccccgtgacatccctgagcatctcgacatgagaagtgtaacaaaagctggttaggtgggaatggaagagaaagcaggtgtgtgacactaggtgtccacattctctc

SEQ ID NO: 909510 - DNA, 120 bp, Artificial Sequence
  ENSG00000257762_36 (sequence is synthesized)
ttcactggtgaatggacacctgtgattgttgttcactgttggcatcaccaccacataccattatgcttggcatgtcattgatgcccaagagtatccattaaataaatgaattataaataa

SEQ ID NO: 909511 - DNA, 120 bp, Artificial Sequence
  ENSG00000257764_0 (sequence is synthesized)
aagcctttaattagaatgtttgtattttttacatcatgcataacttcacatttgtgattaattagtaattatttcaatacttgtaagctcatctgcctcagatttaatcataatacatga

SEQ ID NO: 909512 - DNA, 120 bp, Artificial Sequence
  ENSG00000257764_1 (sequence is synthesized)
attaaattaatcaaattaaggaacagcaatttagaaagaaacacactttaagaaatcaaaattctcaattcaggcagtctgtttctatcatttggtattctactcctttaaaaatttcat

SEQ ID NO: 909513 - DNA, 120 bp, Artificial Sequence
  ENSG00000257764_2 (sequence is synthesized)
atttaagataaccttttcttatattttttacttaatattgggcataatcgtatcattcaagattaagtctgggttatttctttgataagaactgaatgtggccgggcgcagtggctcacg

SEQ ID NO: 909514 - DNA, 120 bp, Artificial Sequence
  ENSG00000255717_0 (sequence is synthesized)
tttttctactgctcgtggatttacgcgcacgttggaaccgaagagagctctgttgttgcaatgttcagcccacaagagcttactggtgaaggaatgggacaagacccatctttatgcaaa

SEQ ID NO: 909515 - DNA, 120 bp, Artificial Sequence
  ENSG00000255717_1 (sequence is synthesized)
gccagcgttacagtaatgttccaggtattcctgatgacagtctgcctctatcttacagagcagcttgttgctatataccattgaaaagccttcagagctgagaggtactactaaccaata

SEQ ID NO: 909516 - DNA, 120 bp, Artificial Sequence
  ENSG00000255717_2 (sequence is synthesized)
ctctctaaagcccaagaggagtttgaggaaaactaggtgtctgtgttcactccaggctgaagttacaggtgagcactgtatagatgaccactttcgtaaactactgacctagcttgttgc

SEQ ID NO: 909517 - DNA, 120 bp, Artificial Sequence
  ENSG00000255717_3 (sequence is synthesized)
caattgttgattgaacttcccataactccacttcgtgtctgttcctctgtatacagccaccttctgttcccgtcatgagcctttaggtctccatttgcatattgcaaatactatgttcca

SEQ ID NO: 909518 - DNA, 120 bp, Artificial Sequence
  ENSG00000255717_4 (sequence is synthesized)
tgtaggtagctcattcagggccttgctcttcacttcaaaaaaggttcccttgaggactggctgtcaatttgtgttgctgtgttggttgttgatgaaaataataaaatgattgattacata

SEQ ID NO: 909519 - DNA, 120 bp, Artificial Sequence
  ENSG00000255717_5 (sequence is synthesized)
ggtgtctgtgttcactccaggctgaagttacaggtctgagcaaataaggtgtataaaaaatggaatctgtcttggaggacatcagaaggtgaattttccaagttcttggacaacctagct

SEQ ID NO: 909520 - DNA, 120 bp, Artificial Sequence
  ENSG00000255717_6 (sequence is synthesized)
gtaccttaaagtgttagcagacacagattaagacactgggagccaatgaaacagcagttgagggtttgctgtgtatcacatttctgtattttatcacccccttcctgcaacattatttat

SEQ ID NO: 909521 - DNA, 120 bp, Artificial Sequence
  ENSG00000255717_7 (sequence is synthesized)
ctggaatctacctgcccttttgttttttagatacaagggcttggttttgttacccaggctggtttcaaggccatagctttaagagatcctctcaccacagatttccaaagtgctgggatt

SEQ ID NO: 909522 - DNA, 120 bp, Artificial Sequence
  ENSG00000255717_8 (sequence is synthesized)
gcgttacagtaatgttccagcatctcataatctatcctggggaattcagctgcctcccagggtgaatacaggtattcctgatgacagtctgcctctatcttacagagcagcttgttgcta

SEQ ID NO: 909523 - DNA, 120 bp, Artificial Sequence
  ENSG00000255717_9 (sequence is synthesized)
tataccattgaaaagccttcagagctgagaggttagttgatattttttgttccttacagcttatgccaccaagtaggcagtttctatgatgaatcaaactagctcactatgaccgacagt

SEQ ID NO: 909524 - DNA, 120 bp, Artificial Sequence
  ENSG00000255717_10 (sequence is synthesized)
gaaaatacatgaacacctgagaaactggagaacgcagggagtggggggtaaccatgtctgaggaatctttcacccacagctttgtttttctctaggtactactaaccaataacctgcttg

SEQ ID NO: 909525 - DNA, 120 bp, Artificial Sequence
  ENSG00000255717_11 (sequence is synthesized)
gctcaaagggccagcaccttctctctaaagcccaagaggagtttgaggtaaatggctttgcaatagttaccatcaatggctgctatataaaattttctgtgatttttgtgtgtgatagca

SEQ ID NO: 909526 - DNA, 120 bp, Artificial Sequence
  ENSG00000255717_12 (sequence is synthesized)
ctgtggtctgggtgaatgtacacagacataactggcttaacccaaagtctttgatctcctgaaccaccagtgatgaattgctgctcaccagtgatgagttgaataccgccccagtctgat

SEQ ID NO: 909527 - DNA, 120 bp, Artificial Sequence
  ENSG00000255717_13 (sequence is synthesized)
caatgtgtgactgaaaggtattttctgagctgtgagcctgccttccagtgacatgttctaaaaattgcaagttatttgaggaggctttacagccaataggaagttcttgggctaagtagt

SEQ ID NO: 909528 - DNA, 120 bp, Artificial Sequence
  ENSG00000255717_14 (sequence is synthesized)
gaagagagctctgttgttgcagtaagttcttacggccatttcttaatctctgctctttcgttgagtgtgtggaagttgctacggggatgattttacgaactgaactctctctttctgatg

SEQ ID NO: 909529 - DNA, 120 bp, Artificial Sequence
  ENSG00000255717_15 (sequence is synthesized)
gattagtggagaaaacagaaaattctgagtagcactgtactgtacgcaacaaatgtcagggccctattgatttgtctgaggtgttagtgaagggtgttattttttcagatgttcagccca

SEQ ID NO: 909530 - DNA, 120 bp, Artificial Sequence
  ENSG00000255717_16 (sequence is synthesized)
ccataaagttttctggttcctcttgttctctgtagtgatgtttctagatagatgcccactgatatatgccccttttttctcagatagatgcccactgatctgcccagggtcagacgaatg

SEQ ID NO: 909531 - DNA, 120 bp, Artificial Sequence
  ENSG00000255717_17 (sequence is synthesized)
cttgtcagttgtagctttccaggattctgctccaatgaggaggaaacatcctgccttacccctgttttagcctgggaaccagtaattgtgaactcaccagggttaacatgaagagggcat

SEQ ID NO: 909532 - DNA, 120 bp, Artificial Sequence
  ENSG00000255717_18 (sequence is synthesized)
gagagcttattccataaggaattgtctgagacatttggttaccttttcttagtttgtccattagcaaccgtaactaaaatagttttggctgtttgggataattagctaattgaatgattt

SEQ ID NO: 909533 - DNA, 120 bp, Artificial Sequence
  ENSG00000255717_19 (sequence is synthesized)
aatttcacggtattcaatgcactcagtatatagggtaggaaaaagtgcctttttaggcctgtgtttgtgatgacttacatggaatctcgttcggctgatgacttgctgttgagactctga

SEQ ID NO: 909534 - DNA, 120 bp, Artificial Sequence
  ENSG00000255717_20 (sequence is synthesized)
cctagtcccagagcctgtaaaggtgaacccactgggactggctgggggagaagaggaagatttgttccagaaggaactgtctgagggatgataaagatttctatacagagaaagggagta

SEQ ID NO: 909535 - DNA, 120 bp, Artificial Sequence
  ENSG00000255717_21 (sequence is synthesized)
atcatcacttgttgaaaacattggttttattttttccaggtctgagcaaataaggtgtataaaaaatggtaggtatctgtttaaatatttaactgattttataatagcaaccttttgctc

SEQ ID NO: 909536 - DNA, 120 bp, Artificial Sequence
  ENSG00000255717_22 (sequence is synthesized)
ctaggttacatagtgttaaatattgtgttcatttgtattttccaatccaataagaacttttttttttacctctgcaggaatctgtcttggaggacatcagaaggtgaattttccaagttc

SEQ ID NO: 909537 - DNA, 120 bp, Artificial Sequence
  ENSG00000255717_23 (sequence is synthesized)
agactacatttttctttcttgattttgcaggaaaactaggtgtctgtgttcactccaggctgaagttacaggtgagtaaacctaaatgtaaggtggactatgctaaaaattcccaatgaa

SEQ ID NO: 909538 - DNA, 120 bp, Artificial Sequence
  ENSG00000255717_24 (sequence is synthesized)
gttactcttttgtactttgtctttttcttttattttcttttgagcgattgtgcgaacatagcatagcacgcactatgccttctgtgttgtagctgcctggccagggcgactggcggataa

SEQ ID NO: 909539 - DNA, 120 bp, Artificial Sequence
  ENSG00000255717_25 (sequence is synthesized)
ggtcttgtgcgtggcctcgaggcttaaaagtagcagtggggctttgtgaaggacaaaatggcgatggcgggccgtgtaggtcccccttcctatgatgaggaccttttcacagacctgtac

SEQ ID NO: 909540 - DNA, 120 bp, Artificial Sequence
  ENSG00000255717_26 (sequence is synthesized)
tgagctccgtgaggataaataactctgaggagatgggccctgcaagcctcttgcttagccgtctgttcagaaaatagcgttttcgaaatgccctgagttgacctaatgtcttattgggct

SEQ ID NO: 909541 - DNA, 120 bp, Artificial Sequence
  ENSG00000255717_27 (sequence is synthesized)
ccaggtaggtgtacatggtttatgctcttacagaggagaccttgtagataaccactccatgatgaacacaaaatgacaagcatatggctgaactttcaagtgatgtcatcttactactga

SEQ ID NO: 909542 - DNA, 120 bp, Artificial Sequence
  ENSG00000255717_28 (sequence is synthesized)
tgaatacaggtaattatccaaattggtgtatgtcatctttgtaaatgttcaagaaaacaagtggccggcggaacaatgttttttggcgccttccatcttgttcctcttgaaatgattttc

SEQ ID NO: 909543 - DNA, 120 bp, Artificial Sequence
  ENSG00000255717_29 (sequence is synthesized)
tggggagggagatcgcaacccggtactacagttcttgtaagggtgtgctgttaccctcatccatatatcgatcacgttactgtcagatgatttgaattgataagctgatgttctgtgagg

SEQ ID NO: 909544 - DNA, 120 bp, Artificial Sequence
  ENSG00000255717_30 (sequence is synthesized)
aaataactaatttgctttcctttccaggtattcctgatgacagtctgcctctatcttacagtaagttgtttttcgaattctatgggcctattatctaatagataacttagccattttgat

SEQ ID NO: 909545 - DNA, 120 bp, Artificial Sequence
  ENSG00000255717_31 (sequence is synthesized)
gaagggtgttattttttcagatgttcagcccacaagagcttactggtgaaggaatgggacaagacccatctttatgcaaagccagcgttacagtaatgttccaggagcagcttgttgcta

SEQ ID NO: 909546 - DNA, 120 bp, Artificial Sequence
  ENSG00000255717_32 (sequence is synthesized)
tttgaggaaaactaggtgtctgtgttcactccaggctgaagttacaggaatctgtcttggaggacatcagaaggtgaattttccaagttcttggacaacctagctgttgaaaagctttct

SEQ ID NO: 909547 - DNA, 120 bp, Artificial Sequence
  ENSG00000257769_0 (sequence is synthesized)
cacctctgtcagagtaaggatcttttcttctccacattccaatacctttgaaaacacacggggggaggaaagggaaaataaacaaatcacgggtgtttacagaatagcaaaaaaagtatg

SEQ ID NO: 909548 - DNA, 120 bp, Artificial Sequence
  ENSG00000257769_1 (sequence is synthesized)
cagctagtaatgaaaaaacaagtcagcgttactgaatgggtataaagtttcagttgtgtaagatgaaaaagttcagaagatcggttgcataacaatgtgaatgtgctgaccactactgga

SEQ ID NO: 909549 - DNA, 120 bp, Artificial Sequence
  ENSG00000257769_2 (sequence is synthesized)
tagaaggaggatacgaccatacagtcaccccttggtgttctcaagggatcgggtccaggaccctgcctggataccaaaatccgcacctactcaagtcttgcggtctgccccgcggaaact

SEQ ID NO: 909550 - DNA, 120 bp, Artificial Sequence
  ENSG00000257769_3 (sequence is synthesized)
gcagacacgaaaaattggcccccagtatccatgagtttcgcatccctcaaatactgtactttctacccgtaactggacctgtgcagttctgacttcaactattaaaatttgaaaggcaaa

SEQ ID NO: 909551 - DNA, 120 bp, Artificial Sequence
  ENSG00000255618_0 (sequence is synthesized)
atagcaacgggcagccggaagatgcggccattcctctcccttttgtccattgcatttcagcagcgcccgcgcacatggacgctccaattacagctctagaggctagaaattggcagtcag

SEQ ID NO: 909552 - DNA, 120 bp, Artificial Sequence
  ENSG00000255618_1 (sequence is synthesized)
gatgtgtgtaaggccacgctccctctgaagactccaggggaggatctttccttgcctcctccagcttctggtggctgccagcatccttggcattccttggcctgtggacacatcactctc

SEQ ID NO: 909553 - DNA, 120 bp, Artificial Sequence
  ENSG00000255618_2 (sequence is synthesized)
gaggagacaaggaggcaagcagatggatggtggaacaaagtggcagagaaagagagaagaggagagatgtctggacgccaagaggagtctggctggggccagtcagagaagagtccagcg

SEQ ID NO: 909554 - DNA, 120 bp, Artificial Sequence
  ENSG00000255618_3 (sequence is synthesized)
gctgggcagcccgactccaggggaagatcaccttcccactccatcccccttcacgctccccatccatctcactaagagccatctctaccactcaataaaaccttgcattcatccttcaaa

SEQ ID NO: 909555 - DNA, 120 bp, Artificial Sequence
  ENSG00000255618_4 (sequence is synthesized)
ttgagcacaccctacccggaagtcaccagcttccaggagacaatggcctgaagagaaagccccagtcaccccaggggaggcagggaagcatctacctctggctctatctctagcatcatt

SEQ ID NO: 909556 - DNA, 120 bp, Artificial Sequence
  ENSG00000255618_5 (sequence is synthesized)
ctttctctctgggtctctgagttcttaggtcagggatggtgtctctcttgctaatagccctgtctccagaagcacacaggcttggcacacacagcgcccgcgcacatggacgctccaatt

SEQ ID NO: 909557 - DNA, 120 bp, Artificial Sequence
  ENSG00000256494_0 (sequence is synthesized)
aaggatagagctcttcatctctgttagaaacgaccatcaaaaagatacatcaattcattagaatcaaaaggacatgagttatcagaattctttctcctgaaagaaagtggagatcaaagg

SEQ ID NO: 909558 - DNA, 120 bp, Artificial Sequence
  ENSG00000256494_1 (sequence is synthesized)
taaaacttctagagaatgagatgaaggcagatgaaagaagttaacaagacattacatgacttgataatattgcatgtatgcaaaaaccttatgaaatcaactgtgttctagcgaccactt

SEQ ID NO: 909559 - DNA, 120 bp, Artificial Sequence
  ENSG00000256494_2 (sequence is synthesized)
gtttttctttttgtcataatactttttattctcttgcaatgatattgattcatctgcacctgacatcaactctgcatttgtagaaggtgataagaatacagggaaatggaataagtggct

SEQ ID NO: 909560 - DNA, 120 bp, Artificial Sequence
  ENSG00000256494_3 (sequence is synthesized)
ttgcctgcaatcccgcagcagcagaaatgtccatttcctctctcctgaataatactacattctccactgggttccacaagtttcgaggtaaaagcatgaacatacacgaagtcaccatca

SEQ ID NO: 909561 - DNA, 120 bp, Artificial Sequence
  ENSG00000256494_4 (sequence is synthesized)
accaccattatttccaccatattcacccttttaatacgcaaacttcctccaaggcttcctgaagtcacccagaaatgcatttccccaagagtgagttgtgctaacattgtatcctatgga

SEQ ID NO: 909562 - DNA, 120 bp, Artificial Sequence
  ENSG00000256494_5 (sequence is synthesized)
actctgggaagctacccagatcctcaactcttggagtcttgctgactgcatgttccaggctccacatttaagctccagtgactgctgatgactgcatgacctaacacatgtcctcaatcc

SEQ ID NO: 909563 - DNA, 120 bp, Artificial Sequence
  ENSG00000256494_6 (sequence is synthesized)
tttcttggcctcagtttcttcaccagtgaattctgaatgctggaattggcaatatttcaggttctttccaactggaaatacccatgctaataattttagtaagtcaatagccatagaaac

SEQ ID NO: 909564 - DNA, 120 bp, Artificial Sequence
  ENSG00000256494_7 (sequence is synthesized)
ctactgacaaaatgagtattttaacagagacagttgtactttcttaatttttagcagaagggaatgcatatgtataatatctatgttgccttctatgtgtaaaaataaatacacagacac

SEQ ID NO: 909565 - DNA, 120 bp, Artificial Sequence
  ENSG00000256499_0 (sequence is synthesized)
gggagtccgaggagaccagggaatgaagcgctccccagcacagtgcagcagttctacagagaagcagccagactgatttttcgtgcaagtcctttatgctgtttctctttactgggcaga

SEQ ID NO: 909566 - DNA, 120 bp, Artificial Sequence
  ENSG00000256499_1 (sequence is synthesized)
atctccaaaccgaggacgacaaccacccccatagatgtgttcaggcaagcaaatagctagaacatcaataagatgctggagtttaatcaaccacagcagactgtgaggtggaagccactt

SEQ ID NO: 909567 - DNA, 120 bp, Artificial Sequence
  ENSG00000256499_2 (sequence is synthesized)
cacagacccagcatgtcatctctgcaaaggtctttgagcaggagcccaaggaaggaaaaataaggacacacatttttggctggattagtaacatctttcctttgtcttcatccaccagtg

SEQ ID NO: 909568 - DNA, 120 bp, Artificial Sequence
  ENSG00000256499_3 (sequence is synthesized)
ttcttgcttcccagaaagtgtggaatattggccttccttttcagattcatgtgaaagcttggagaaaagaacacagactaaaaggaatataaatccaaaagaatgagtgaaatgggaata

SEQ ID NO: 909569 - DNA, 120 bp, Artificial Sequence
  ENSG00000256499_4 (sequence is synthesized)
cacaaggcatgagcaataagactgttctctcagaaacaatgagaataactgctctacatcttacaaaccagaaacttacacgttgtatctcattaaattttattttgaatattgagaaca

SEQ ID NO: 909570 - DNA, 120 bp, Artificial Sequence
  ENSG00000256499_5 (sequence is synthesized)
ttaatttattcactcaatcacctgtataccaaatatgtattaagtatctgttatgtgccaggaacctgttccaggttcagagaatacagtgaataaacagactgaaccctgctctcaatg

SEQ ID NO: 909571 - DNA, 120 bp, Artificial Sequence
  ENSG00000256499_6 (sequence is synthesized)
gtgagccagcaccaagatcgaaggcatttggatccctggtgatcacagacccagcatgtcatctctgcaaaggtgacattagattctatttgaagaagaagacatccatattgtttaaga

SEQ ID NO: 909572 - DNA, 120 bp, Artificial Sequence
  ENSG00000256499_7 (sequence is synthesized)
cgttgttatttggagttttctgtcagtagcaggcaaacctaattctaactaacatagcctacaacttactttcacaaatttaacaatctatgctacatcctgtataattcttaccatctt

SEQ ID NO: 909573 - DNA, 120 bp, Artificial Sequence
  ENSG00000256499_8 (sequence is synthesized)
gattatttactgaagatgatgaaatgttcagttatgtcacatgcctattattggcaacagcatgattcaccaactcttggagattttcctgaaaaataaaaacactagtgtttgttatga

SEQ ID NO: 909574 - DNA, 120 bp, Artificial Sequence
  ENSG00000256499_9 (sequence is synthesized)
tccatgtcagaagctattacatcattccatttgcaataacatactttaatcttctccaggtttcataaattcttgggacaactataataaatgttatttgcttggaaagctaaagaagaa

SEQ ID NO: 909575 - DNA, 120 bp, Artificial Sequence
  ENSG00000283258_0 (sequence is synthesized)
ctcccaaagtgttggaattataggcgtgagccaccacgcctgaccccttttcattgttcattgccttcttcagtgcatagcttttggagttattttgactctatttctgaaactccagag

SEQ ID NO: 909576 - DNA, 120 bp, Artificial Sequence
  ENSG00000283258_1 (sequence is synthesized)
agatgataagttgcttttccccaaatgtggactctgactggagatgcagaattgtcaaaggggactggattcttaagcattcaattgctcatgaatctctctaaaaacattacatgcttt

SEQ ID NO: 909577 - DNA, 120 bp, Artificial Sequence
  ENSG00000283258_2 (sequence is synthesized)
tgatctcatgtcagccctgaacgttggcacgccaggcccacaaccatgtgctgggagatcacacatgcaccaggccccttccgttttgaaaacttgcggggatgtgggtgctacggtcct

SEQ ID NO: 909578 - DNA, 120 bp, Artificial Sequence
  ENSG00000283258_3 (sequence is synthesized)
gcctgggtaagcagagggggtattgagttccccagtcctcactgcccctttgtctattattattttatagttttgttctgcattccttccactcaacctccagtccatagaagcctgttt

SEQ ID NO: 909579 - DNA, 120 bp, Artificial Sequence
  ENSG00000283258_4 (sequence is synthesized)
ctttattagttgcatatgtctgcacccttttacctcagcagggaagacaaaatattctggagggtttggaggcctgggatggacagctaatccatccccagcttgaactaatcgtcgggc

SEQ ID NO: 909580 - DNA, 120 bp, Artificial Sequence
  ENSG00000283258_5 (sequence is synthesized)
caatgtgctattgtactgggccctgttctgtgcagctgagctgtggggtttcaatttgtaggagcataaacagatactaaagttggaagaacggctcggtcatttgttagcagagttcag

SEQ ID NO: 909581 - DNA, 120 bp, Artificial Sequence
  ENSG00000283258_6 (sequence is synthesized)
cccctgctgacaggctgaacaattacctccttttttcttgatctttaaatgttttctgtttcacttaagcctcagtaaatagtttacttctcatgggcttcatttattgacacagagagg

SEQ ID NO: 909582 - DNA, 120 bp, Artificial Sequence
  ENSG00000283258_7 (sequence is synthesized)
cttgatttatttaattttgtttctctgccgccttccaagaaaggagtcttcataatgttttgttgaaatctaccccccccaaaatgataagtttatcacggtaggctgaggaagcggttt

SEQ ID NO: 909583 - DNA, 120 bp, Artificial Sequence
  ENSG00000283258_8 (sequence is synthesized)
aatgatatgactataaattatctggctttttaatgagaagtttagacacccaaactctaaagccgatttttaaagctttaagccagaacccaggctctgtctcttgaaaaggttgaaatc

SEQ ID NO: 909584 - DNA, 120 bp, Artificial Sequence
  ENSG00000283258_9 (sequence is synthesized)
tagagtcagaaactggtataaagagagatccctgagatttggggatctgaatccataattggattattcaaaacccaggaatctgatgaatcttttcaggaaaatggagcatattgtgtc

SEQ ID NO: 909585 - DNA, 120 bp, Artificial Sequence
  ENSG00000283258_10 (sequence is synthesized)
cgttctgactgtcctatctcggcatagattcattgatgttctgcgtgagttcaccagaattaacttcaacatttgttttcactctttctccccttcccccagtttcaacccttgactttc

SEQ ID NO: 909586 - DNA, 120 bp, Artificial Sequence
  ENSG00000283258_11 (sequence is synthesized)
actctcccatagttacatttgtctgcttcttacagtcctactgggacggatttatcatcatttgctaacatatctgtctcaaaatctcagctttgatcagcttgtattttataacttaca

SEQ ID NO: 909587 - DNA, 120 bp, Artificial Sequence
  ENSG00000283258_12 (sequence is synthesized)
tctgttctacatttaaccttttgtaatgctgtttttcaaaaatattacctgatctaacaaaagaattgtaccagagtgagagctccagagtgtagatttaaaaaaaaaaaaaaaaaaaaa

SEQ ID NO: 909588 - DNA, 120 bp, Artificial Sequence
  ENSG00000283258_13 (sequence is synthesized)
ccaatcagcatgtggcattccacaagctttggagattggctgagaagtgagcatgtgacctgatcaaagttgagaatgctggggcaaggtggtttcacttctcctgcaggtttcacttcc

SEQ ID NO: 909589 - DNA, 120 bp, Artificial Sequence
  ENSG00000283258_14 (sequence is synthesized)
atccccgtctgctcttgtcccgtcatcttgacccttccttcgcctggaattcatgccacagcgcgaggctgtgtgcagggtgcttctgcggaggcccatggctggaactggagccggcag

SEQ ID NO: 909590 - DNA, 120 bp, Artificial Sequence
  ENSG00000283258_15 (sequence is synthesized)
cttcaaacacccagggctccaggacacaaaccaattactgattaacttaaagctccatttctggagtccccatcccttctaaggagatcttcaagtgcagttctggccacaaggccagtg

SEQ ID NO: 909591 - DNA, 120 bp, Artificial Sequence
  ENSG00000283258_16 (sequence is synthesized)
cctggggagtcaggtgatagcttcagctccacgtcttggtgctttggattaagggaaggagatacactgcttccattccaaggctgagatcggaccatacacttttttctcttgatttcc

SEQ ID NO: 909592 - DNA, 120 bp, Artificial Sequence
  ENSG00000283258_17 (sequence is synthesized)
agaatgcgtgggaacggctaaggttaccaaacatacctctcttgatggcacagaaatctctctctctctctttttttttaatgccaaattctaccctttgaaaaatgcagaagcccatta

SEQ ID NO: 909593 - DNA, 120 bp, Artificial Sequence
  ENSG00000283258_18 (sequence is synthesized)
aagattaagactacaaacaagcttaaaacacatcttaactgcattcacaaaggtcgcaggtgtaggcaggtcaaagtgatatcttgttctcctaaatatttcaacagataaacaaacttt

SEQ ID NO: 909594 - DNA, 120 bp, Artificial Sequence
  ENSG00000283258_19 (sequence is synthesized)
tgattgcgttatctgctcgaaaaaatgactttgaactttccgccagcaccgcctacttgggtttactcaaacccgcagaggcccagccgaccgataaagaaccttgagtggtcgcctgat

SEQ ID NO: 909595 - DNA, 90 bp, Artificial Sequence
  ENSG00000283259_0 (sequence is synthesized)
ggagcagcacccacacccccagttgagtagctgacatcctggagctgcacccatacccccaggtgagatctgacagcctggggcaacctg

SEQ ID NO: 909596 - DNA, 120 bp, Artificial Sequence
  ENSG00000283259_1 (sequence is synthesized)
gaacagcatctacagccccaggtgaccatctgacagcctgaagcagcacccacacccccaggtgagcatgtgaccacatgcaatgtcatcctcacctccaggtgagcatcggacagcctg

SEQ ID NO: 909597 - DNA, 120 bp, Artificial Sequence
  ENSG00000283259_2 (sequence is synthesized)
caatgtcatcctcacctccaggtgagcatcggacagcctggaacagaattctcaagccccaggtgagcatctgacagcctgaaacagcaccctccaccttcaggtgagaatatgacagcc

SEQ ID NO: 909598 - DNA, 120 bp, Artificial Sequence
  ENSG00000283259_3 (sequence is synthesized)
tgaaacagcaccccgcacccaggcaaaaatctgacagcatggaacaagactactgcccccaggggagcatctgacaacctagaacagcaccctcaccccgaggtgggcatctggcagcat

SEQ ID NO: 909599 - DNA, 60 bp, Artificial Sequence
  ENSG00000283259_4 (sequence is synthesized)
ggtgagcatctgacagcctggaacagcatccactcccccaggtgagcatctgaccacatt

SEQ ID NO: 909600 - DNA, 66 bp, Artificial Sequence
  ENSG00000283259_5 (sequence is synthesized)
cagcatccaaatctgacgcataaaacagcaccctgcaaccccaggtgagcatctgacagtctggaa

SEQ ID NO: 909601 - DNA, 66 bp, Artificial Sequence
  ENSG00000283259_6 (sequence is synthesized)
tggcatcctcacctccaggtgagaatctgacgcataaaacagcaccctgcaaccccaggtgagcat

SEQ ID NO: 909602 - DNA, 87 bp, Artificial Sequence
  ENSG00000283259_7 (sequence is synthesized)
accagaacctgcaccacacaccccaaggtgggcatccgatggcatgggacagcacccccactcacaggtgatgtgactgcgtggaac

SEQ ID NO: 909603 - DNA, 120 bp, Artificial Sequence
  ENSG00000283259_8 (sequence is synthesized)
gacagcacccccactcacaggtgatgtgactgcgtggaacagcacatcccctcaggtgagcatctgacagcctggaacagaaccccacaacttcaaataagaatttgataagtgggaaaa

SEQ ID NO: 909604 - DNA, 63 bp, Artificial Sequence
  ENSG00000283259_9 (sequence is synthesized)
gtaagattccaacagcatggaacaagaccactgcccccaggtgagcatctggcagcctggaaa

SEQ ID NO: 909605 - DNA, 120 bp, Artificial Sequence
  ENSG00000283255_0 (sequence is synthesized)
aagttagctgttggccaaactattcctactttcaaggacttataggagcagaaatcagaagactttactccacacacttcaggtggacatgtggacaaagccatcggagaacatgacaaa

SEQ ID NO: 909606 - DNA, 120 bp, Artificial Sequence
  ENSG00000283255_1 (sequence is synthesized)
tcatcctgggggcagatgctgggctctgaccaatttgagagagaaaaggaaaaagaacccagctacaagatgcacaagtagcaggccacagccaccaacatcagcagagcaattggaggc

SEQ ID NO: 909607 - DNA, 120 bp, Artificial Sequence
  ENSG00000283255_2 (sequence is synthesized)
caggaagacaaggacacttctgaagagactgaaaaaagcagaagacagtccaagtcactgcaaggttccaagatggggtttctgagaaagaccaaattagttatagagcactagctccca

SEQ ID NO: 909608 - DNA, 87 bp, Artificial Sequence
  ENSG00000273448_0 (sequence is synthesized)
cctcaaacttcactttcagtggagtttggtagcacttccggtctcagactccacacttgtgaagtttgcgagttacataaaaaatta

SEQ ID NO: 909609 - DNA, 120 bp, Artificial Sequence
  ENSG00000273448_1 (sequence is synthesized)
aaaaaaaaaaaaaaaaaaattaaattcctagccaggtcttcctattgggtgaggaggcccttccaaagttccagcgaattccttagtctgacaacttttctcaattcagaaagatgtgtt

SEQ ID NO: 909610 - DNA, 120 bp, Artificial Sequence
  ENSG00000273448_2 (sequence is synthesized)
tgacaacttttctcaattcagaaagatgtgtttggtaacatatattaaaaggcagaaatatgcaaatgcataaacaatagaatttgacataattatgtgataaagtgaaatgctcctgca

SEQ ID NO: 909611 - DNA, 120 bp, Artificial Sequence
  ENSG00000273448_3 (sequence is synthesized)
aaggacctctctaattcttcagagaaactgtgagataatctctaccatttatgcttagcaaggagccatgctgcagaggaaaagtagaaatacacacgagtgacaaaagcaaaaaaatat

SEQ ID NO: 909612 - DNA, 120 bp, Artificial Sequence
  ENSG00000273448_4 (sequence is synthesized)
atatatgaaaaactctgaaaccaccctcaatgaaaagtaatatgtctgtatttaaagagtaggtaaatcatatagtgaatttagaaggtaaaaaacgaggtctataattacatgagtata

SEQ ID NO: 909613 - DNA, 120 bp, Artificial Sequence
  ENSG00000273448_5 (sequence is synthesized)
tagaaaatgttaagtgttttcgtgaaaaggtatataaacaataatgaataatcatttcacattgaaaataatttaattttaaaaggagatagtacaaataacaaaaaaaaaagtcgaagt

SEQ ID NO: 909614 - DNA, 120 bp, Artificial Sequence
  ENSG00000273448_6 (sequence is synthesized)
acggtaatagtagaaatttcaaatattttaggaatgtctttctccagagtagcatgttgtttagaaactaaatttccacagtagatttcatagctcctgaacatgaattaaaactttgat

SEQ ID NO: 909615 - DNA, 120 bp, Artificial Sequence
  ENSG00000273448_7 (sequence is synthesized)
attagctgcagaaatgtacattagtttgtggggaggggataaagaaaataatgtgccaaccttccaacaatttccccaaacagatttttgcatcttggtcattacacttactttcaagat

SEQ ID NO: 909616 - DNA, 120 bp, Artificial Sequence
  ENSG00000273448_8 (sequence is synthesized)
tcttttcttggtttaaacatgtaatcttgtctctttgctcacctgctcactcttcaagcaagcctacagccaaataaattgccatacttgtttaccaataaaccattattttccaaggaa

SEQ ID NO: 909617 - DNA, 120 bp, Artificial Sequence
  ENSG00000250267_0 (sequence is synthesized)
atgtaaataaaaggcatgtaagagaaagggagacaagtatttgtcataaatataacccagggctaatatgtataacataaaaaaagcccttaaaacttaacaagaaacatgattatttaa

SEQ ID NO: 909618 - DNA, 120 bp, Artificial Sequence
  ENSG00000250267_1 (sequence is synthesized)
aatgtttagggggatgggcagatcatgacagacgggaggcaggactaaattgcagctccaactctgatggacagagcagcctgtggagcctcgcatcatgattttttgctccagaatgac

SEQ ID NO: 909619 - DNA, 120 bp, Artificial Sequence
  ENSG00000250267_2 (sequence is synthesized)
gaccctctgaaggaagtggattgctcctacaggacccgggagacaccccaaatactgcattgcagctcaaaaaatgttactccgaaataatgccacttcaacatgaagcagcctcaaggt

SEQ ID NO: 909620 - DNA, 120 bp, Artificial Sequence
  ENSG00000250267_3 (sequence is synthesized)
aaataatgccacttcaacatgaagcagcctcaaggtctttctggcctcccctcccttcctgtttctcccaagcacaggatgaagctattctctgaagttccttcatctacctataaactg

SEQ ID NO: 909621 - DNA, 120 bp, Artificial Sequence
  ENSG00000250267_4 (sequence is synthesized)
gacctgccaaagagaaacacaattgctttccctgaaatttcattaaccagagaagattaaaacttctatcacagaggaagaggctgaaaattaaacaccccacctacagcccagatgaac

SEQ ID NO: 909622 - DNA, 120 bp, Artificial Sequence
  ENSG00000250267_5 (sequence is synthesized)
ttagtcacaaaccattgtctgctctccatcccattcaatttccaaagaaaagtattaactaatcattgtctgagcatcaggcccattcattcatttccccctaaagatcatttgctatcc

SEQ ID NO: 909623 - DNA, 120 bp, Artificial Sequence
  ENSG00000250267_6 (sequence is synthesized)
ctgggtagtcattttcctggattctgccatgtacacatgttaaaatatatttatatgcctttttctcatgttaatctgccgtttgtcaacagattttcagcaaaccttctaagaataaag

SEQ ID NO: 909624 - DNA, 120 bp, Artificial Sequence
  ENSG00000250267_7 (sequence is synthesized)
gggacactttgccttcgtctctacacaggtaagtaagtggtcccctaataattaactcaactgtgaaaacaagctgacattcaggcctagagatgaacatactgacataaaactgagctc

SEQ ID NO: 909625 - DNA, 120 bp, Artificial Sequence
  ENSG00000250267_8 (sequence is synthesized)
ctctaacaaatagttgtaacatgtcactccaagatgcaacctcacacatatattcttacaaatgaaatccagtaactgccccttagacctttaagtacaaattaaagaggcactataaga

SEQ ID NO: 909626 - DNA, 120 bp, Artificial Sequence
  ENSG00000250267_9 (sequence is synthesized)
tgacactcttttagtaacagaaacaaattagcttttcaggtaaatacaaaacaaattattacagaaataatttcctaaatattaagaaacggaacacattactttaaaataagccataat

SEQ ID NO: 909627 - DNA, 120 bp, Artificial Sequence
  ENSG00000250267_10 (sequence is synthesized)
atataaaataaggatgtattaaaaaaccaaagtttaaacacatttttgctttcccaaggcattttctacttccttagcacacttctttccgagggacatttccctaaaattaaggactgt

SEQ ID NO: 909628 - DNA, 120 bp, Artificial Sequence
  ENSG00000250267_11 (sequence is synthesized)
aaacctacaagttaaacttttttgtaaggagagtattctgtctttataaaccagtatgtagacctgctgccacctgttggctccagacagtctgaagacctagcaacctatggctttcaa

SEQ ID NO: 909629 - DNA, 120 bp, Artificial Sequence
  ENSG00000250267_12 (sequence is synthesized)
gtgttgggtcccatagcattcacttttactacaacagttcaggtttaacaaaggtggtcatttgtacatcagtcacagaaaaggagcctgtctaggatttgtgcacgtgtgcctttgatg

SEQ ID NO: 909630 - DNA, 120 bp, Artificial Sequence
  ENSG00000250266_0 (sequence is synthesized)
gctggaaggaccacacatgagcagcctgtctgagaaaaatctgttgctgctgtctaggagcacggactattctctcatgttgaatgtggcactttttacatacaagcaggagagcaacta

SEQ ID NO: 909631 - DNA, 120 bp, Artificial Sequence
  ENSG00000250266_1 (sequence is synthesized)
caccaagattttggaaaacatgttatgtaaggccatatcttatttcatctttccacaacatctgatacagttgattcctctacttcaccttcttcactttgcttgaaggacaccacagaa

SEQ ID NO: 909632 - DNA, 120 bp, Artificial Sequence
  ENSG00000250266_2 (sequence is synthesized)
atagaacatggccagactcagaagtgcccctgggaccctcttccaattaccatcattttccttctctccaagttaattgtgacctctatgatggggatatgataaagaagaaaagtacct

SEQ ID NO: 909633 - DNA, 120 bp, Artificial Sequence
  ENSG00000250266_3 (sequence is synthesized)
cacagcgatgattggcatgtgatcacttagccaatgagataagaggctgtagaaacgatgtgataatgacatctcctgagttgcaggtccatattagaagtggatatgaagtaaacattg

SEQ ID NO: 909634 - DNA, 120 bp, Artificial Sequence
  ENSG00000250266_4 (sequence is synthesized)
ctcaaattagttaattcaggaagcttattttgtagaaattaaaacattaataaacacatacatttagaaataaagaactcggctgaccctttgactctttgaaacaagtggccttccatg

SEQ ID NO: 909635 - DNA, 120 bp, Artificial Sequence
  ENSG00000250266_5 (sequence is synthesized)
ctgtgaaagattgtagccactctttgagacattggaatggtgtccattgcattttatcaagttaactataggtcagcctgggaaatctgaagtttccttatctcctgtcactgtggttgc

SEQ ID NO: 909636 - DNA, 120 bp, Artificial Sequence
  ENSG00000250266_6 (sequence is synthesized)
tgtgagattttgtgtcatcactgtgctgtcttccctctccacatgaaggtgagctgtctggcttcactctaacgtttgtgatttcacgcccgacctgattgttgccaagcaattcctttg

SEQ ID NO: 909637 - DNA, 120 bp, Artificial Sequence
  ENSG00000250266_7 (sequence is synthesized)
tttggagaattctgtgctttgtttagaattttttaaaggttcttttcctgtggtcagatttctgtttgctactgtgtcttatgccttgttctcctacagagaagattctttgaagttagt

SEQ ID NO: 909638 - DNA, 120 bp, Artificial Sequence
  ENSG00000250266_8 (sequence is synthesized)
attctttgaagttagtggaagctcagcttaaaggaagatctactgctctgtgtggtggatgaccatgggggagcgagaaggcagcctccggcttttgttttgtgtgtgtgtgtgtgtgtg

SEQ ID NO: 909639 - DNA, 120 bp, Artificial Sequence
  ENSG00000250266_9 (sequence is synthesized)
cttcctgaagcactgagatgggggataagtcagttttcagggaaatcagagaagctaggtatacatctgaggactccaaaggcaggaggccctggctctgatgcttctaaggcagatgaa

SEQ ID NO: 909640 - DNA, 120 bp, Artificial Sequence
  ENSG00000250266_10 (sequence is synthesized)
ttgggtgccagtggtgggggcgagcatgcattggagtgttccttgtgggccagaggtgagccccaaaggagagagctgttctggggccattcaaattctgtccaagaggtctctgcaaga

SEQ ID NO: 909641 - DNA, 120 bp, Artificial Sequence
  ENSG00000250266_11 (sequence is synthesized)
atgtttaaaataaattgtaaaccaaacgtattttaaagaatttatacaaatttgtcatttagtaaaatgaatgactattgagtattcatgtcaataaaacaaccacttgaatacaacaaa

SEQ ID NO: 909642 - DNA, 120 bp, Artificial Sequence
  ENSG00000250266_12 (sequence is synthesized)
ggactcagaacaggaactgtgttagggataaaaacccctgccctacctggctaggtgtgctcttgtgattgtgactgacacaggcagcacccttttgcagaagtagatgtgcgttgctga

SEQ ID NO: 909643 - DNA, 120 bp, Artificial Sequence
  ENSG00000250266_13 (sequence is synthesized)
gaaattttctgcctaagttctggttttctttgcagcacccagcatttgtttctaacacagggaaagagtgagctggagaaacctctcaaattcaagaaagcgtaaagcaaattgaacaat

SEQ ID NO: 909644 - DNA, 120 bp, Artificial Sequence
  ENSG00000250266_14 (sequence is synthesized)
catggaacacttagcactgcatcatatgttggccttacagaggtcctccgtattccaatgtgaggaaggaagtggtggtacatttgcagaaggcactaaattaagcgactctaatgaacc

SEQ ID NO: 909645 - DNA, 120 bp, Artificial Sequence
  ENSG00000250266_15 (sequence is synthesized)
agatagaagggaccactgcaacaggatttagtttcctcctcgaaccatgaaagagaccaggagagaataggccttcctctttggcagccaacatggaaacaggatgaacaagaccaggag

SEQ ID NO: 909646 - DNA, 120 bp, Artificial Sequence
  ENSG00000250266_16 (sequence is synthesized)
acaagcaggagagcaactacaccaagattttggaaaacatgttatgtaagtttttatttttaaaatcaggagagaatttctgcaacatcctatgaccacagatccctacccatctgcatt

SEQ ID NO: 909647 - DNA, 120 bp, Artificial Sequence
  ENSG00000250260_0 (sequence is synthesized)
gttgaaaataaataaataacaaagaataaatatccctttctcttcttccctctgcctgtatccatataggggaaagaaaaaactgctctgagattcagtgagattatgaccttcacaaaa

SEQ ID NO: 909648 - DNA, 120 bp, Artificial Sequence
  ENSG00000250260_1 (sequence is synthesized)
tcatgaactttctgctgcctttttaaccagaaatctaggcaggagggtctcaccattttgcatatcctacctgttccttacaggctctaggcttttgagccttcctatcatttgaccagc

SEQ ID NO: 909649 - DNA, 79 bp, Artificial Sequence
  ENSG00000250260_2 (sequence is synthesized)
gcttctcagcaccttttttttcccctttgagtcagggtctgggtccagtggcccaattatagctcactgcagcctcagt

SEQ ID NO: 909650 - DNA, 120 bp, Artificial Sequence
  ENSG00000250260_3 (sequence is synthesized)
ggcaccttccattcagaccacattttctgtggcaaactgacaacgccaatgtttgcagtttgcagtttaactacagctgtattttttgccaaacatttacacctaactactcttttccac

SEQ ID NO: 909651 - DNA, 120 bp, Artificial Sequence
  ENSG00000250260_4 (sequence is synthesized)
tagagtatataacaatttacagaagcatttaatgttttctgaatccccaagctcatcagcagagaagctccaaaacatgaaggtgtacatccctattttaggccttcatagaaagaaacc

SEQ ID NO: 909652 - DNA, 120 bp, Artificial Sequence
  ENSG00000250263_0 (sequence is synthesized)
gcaagacagaggcaggactgagaagacgagaggtgggcttcgttcctgagaatatccaggagtccaagagatctaaattggaagatggccttccaatttaggtcagtttccaattaagaa

SEQ ID NO: 909653 - DNA, 120 bp, Artificial Sequence
  ENSG00000250263_1 (sequence is synthesized)
ggccaggtttttatgaagcaatatttgtcaagaattcaactatcaacttgctggtcctctacttcccgaaactctccagcctacatttcttcctcttcttcggtttctaaactcaaactg

SEQ ID NO: 909654 - DNA, 120 bp, Artificial Sequence
  ENSG00000250263_2 (sequence is synthesized)
tcgactggagtcccaggacatattcagaggccgccagacccctgcatggaggcccctcccttgcagctcctggttaccatgattgaatgatgtcctgcagctccgagcctcagccaccta

SEQ ID NO: 909655 - DNA, 120 bp, Artificial Sequence
  ENSG00000250263_3 (sequence is synthesized)
tgttgtcaaggtttcctctgtgaaagcatccaaaaactctgccagcaccttcttctttccttttttgttttcctaccagggccaggccaggctctgctggccatttccgattaagctcct

SEQ ID NO: 909656 - DNA, 120 bp, Artificial Sequence
  ENSG00000250263_4 (sequence is synthesized)
cagaaggcatagagccactcacactcagaattatttaaaataacactagactgcaaatgccctaaatatccatcagaaataaatggatgcataacattgggtgaaagaagccatacacaa

SEQ ID NO: 909657 - DNA, 120 bp, Artificial Sequence
  ENSG00000250263_5 (sequence is synthesized)
cggtgtcaagaactacgtaaatcaagctgtgatcggtcctgcattcttccctgtcactgggacgtcacataagtctactgcacttccggcatggacattcacttttgcagatgaggaaac

SEQ ID NO: 909658 - DNA, 120 bp, Artificial Sequence
  ENSG00000250263_6 (sequence is synthesized)
aagaattcagagttgatttgcacatacgaagcaaaacaagtgagatccaagcctccagactctacaacagatgcttccaatatctatgtctaatgaagtaaactactctgaaaatcaaaa

SEQ ID NO: 909659 - DNA, 120 bp, Artificial Sequence
  ENSG00000250263_7 (sequence is synthesized)
tggccacttgtgatgcaagacagaggcaggactgagaagacgagaggtgggcttcgttcctgagaatatccaggagtccaagagatctaaattggaagatggccttccaatttagaattc

SEQ ID NO: 909660 - DNA, 120 bp, Artificial Sequence
  ENSG00000273449_0 (sequence is synthesized)
ttcacaggcatttcagtgactacaacagtgagtatttaggcaatacataattatgaatgttaaatatatgagggtcaagagtgttaaatatatgagggtcaagtggtcctcttgcccaca

SEQ ID NO: 909661 - DNA, 120 bp, Artificial Sequence
  ENSG00000273449_1 (sequence is synthesized)
ttagggtggtgtgggggacaatagctgtcttcccgtaagtgaaaagttgtgaagtagaaaaatatagctcagtatggctcaatacagtgcaccaggaagggatggtagaaatgtgtaaaa

SEQ ID NO: 909662 - DNA, 120 bp, Artificial Sequence
  ENSG00000273449_2 (sequence is synthesized)
accatggtaattgagagtctatgatttgactttggatttttatttacttacaacagtgattagagttataagaaatatcctatctatattttgtagtagtgacatttgctttatgcttct

SEQ ID NO: 909663 - DNA, 120 bp, Artificial Sequence
  ENSG00000273449_3 (sequence is synthesized)
cctgtcaatttctggtcccaaaataatgaaacattgagtatttcttataatcccagatccccagcaaacaccattttattcttgacttttatttagctcatgttgcaagatctttctgaa

SEQ ID NO: 909664 - DNA, 120 bp, Artificial Sequence
  ENSG00000273449_4 (sequence is synthesized)
tatgatcatcatgtgataagattttgttttttctccatgaacaaattaatgcaaacttagtaatcatggtaatcttctttatatttttctttaaatacctgttatatttttcacttgctt

SEQ ID NO: 909665 - DNA, 120 bp, Artificial Sequence
  ENSG00000273449_5 (sequence is synthesized)
atccagtttttctgaagtctgactcccttgaaccttttcaagtaaactctttttcttttcaaaatgctttggctctgactcttcctttgaaatttttggggaaaaaatgttctctgatct

SEQ ID NO: 909666 - DNA, 120 bp, Artificial Sequence
  ENSG00000273449_6 (sequence is synthesized)
taaaagggattgtaagaaaacatgaaaagcctctcactgttgttgatgtttcattaatttgttgctctgtttggcactgtcaatttaaaataaatttctatgcctctttcagcaatcaaa

SEQ ID NO: 909667 - DNA, 120 bp, Artificial Sequence
  ENSG00000253513_0 (sequence is synthesized)
ggcgctctggggccgggatcggcgtcggggtcggggttggggttggttcaccgcagcagccccagctcctgcgccctccctggactgaggtgtgctcgctttgaggagaagcctggagtg

SEQ ID NO: 909668 - DNA, 120 bp, Artificial Sequence
  ENSG00000253513_1 (sequence is synthesized)
gcgcttatgatatgtcagtccccggagtccgaaagaggaatcagacacagcttccctgccctgtatgttacaagtcactctgcctctgtggggagaaggcaacttcttcatgaactcgaa

SEQ ID NO: 909669 - DNA, 120 bp, Artificial Sequence
  ENSG00000253513_2 (sequence is synthesized)
catcctttgcaattctgtatcagatacttggcagggtttaaaaaaacatggcacctcttataacttttcacccccaatattatgttttatctgctaataaaataattatttggtaaaaca

SEQ ID NO: 909670 - DNA, 120 bp, Artificial Sequence
  ENSG00000253510_0 (sequence is synthesized)
gggaaaacccaacggctggtccctgcatccgctaggaccagcgccatccaaaggcttgttccatcacatggcactcaaatttacagatttttcagaagggcaattaaatgtcacctttga

SEQ ID NO: 909671 - DNA, 120 bp, Artificial Sequence
  ENSG00000253510_1 (sequence is synthesized)
tggagaagtggcaagaacatattgtcaaaaagcaaatggaatggggaagtttttgtgacgatctttggaaaatacaattcgcgacagcctgtgaaaccttgactagatttgcttccttgg

SEQ ID NO: 909672 - DNA, 120 bp, Artificial Sequence
  ENSG00000253510_2 (sequence is synthesized)
tcaatcttccagtcttttagaaaacagaaaactgcatgtgccaacatgcaccccacccctatgctcccagcaacatgtatacaggaggtgagtttccactggagcaggcaagtcactcct

SEQ ID NO: 909673 - DNA, 120 bp, Artificial Sequence
  ENSG00000253510_3 (sequence is synthesized)
ttcccaggatcacttgggaaaacagcgtgcacagaaacccaacaaagaaccctctgcgacccacataggcagaacagctagtcaagcccctgtgatatcggatggcttacttcactcgtc

SEQ ID NO: 909674 - DNA, 120 bp, Artificial Sequence
  ENSG00000253510_4 (sequence is synthesized)
tgtgcctccactctctcttccatcaaatgggggtaaggtactgacagcgtagtgataaaaaattacaaaaagttgctttgaaaagtgtctgacaattggtaaatatacaaggcattttaa

SEQ ID NO: 909675 - DNA, 120 bp, Artificial Sequence
  ENSG00000253510_5 (sequence is synthesized)
taagaccctaaatatcatcagtgccttacattctgatggttattctcaagtcactcctgaaatccctgtgccagtcttcctaatagaactccaacaataatgcacttctgacatgcgtct

SEQ ID NO: 909676 - DNA, 120 bp, Artificial Sequence
  ENSG00000253510_6 (sequence is synthesized)
cgatgacaaacacacggtgctagaatggggaagaggtctgataaaggagactaccactttcggcaaaatggatcactaatgctccaggaaacatgtcctgctacaacctagactctccag

SEQ ID NO: 909677 - DNA, 120 bp, Artificial Sequence
  ENSG00000253510_7 (sequence is synthesized)
ctaaaatctatttttcaaaatctctctgtacacctgtctgacctggaggcaaaataagagatctccttggaaggcaaaaatgaaaatgcatgaatttaaagagataagaaagcactggac

SEQ ID NO: 909678 - DNA, 120 bp, Artificial Sequence
  ENSG00000253510_8 (sequence is synthesized)
ccaggatttccctgtgcatctctgatgccttctggtcaccgaaggtctgggttttaatgatctgcattacctgggaacaggggagaaatgtgaggtatgagcaggatggaaatgaagacg

SEQ ID NO: 909679 - DNA, 120 bp, Artificial Sequence
  ENSG00000253510_9 (sequence is synthesized)
caaagacactgaagggggatattctcagtagaagtagaaaaatagaggaatgaggtgtgtttgttttcccttcttcacatgatagacattacggattgcgcatatctcaaatttacctct

SEQ ID NO: 909680 - DNA, 120 bp, Artificial Sequence
  ENSG00000253510_10 (sequence is synthesized)
ggataaaggagaaaaattaaaactcctaataattcctacctatgaacccacactcatgttacctgcccctcacaaaaaggatgaaggtagaatttaatgtaatacagaatgatatgctat

SEQ ID NO: 909681 - DNA, 120 bp, Artificial Sequence
  ENSG00000253510_11 (sequence is synthesized)
caggtaccttacagcagcaaacctgtttctgcagaaattcttcttaaaaccaggtgggagaaaattttgcttctgatatgcatgaggaagttcataagaaaatgacttgtttccagatag

SEQ ID NO: 909682 - DNA, 120 bp, Artificial Sequence
  ENSG00000253510_12 (sequence is synthesized)
cacttttagtgctgtgcagactgtacaaaagttggcagatatttagacattttagggaaattggaacttaaaggaggcaatcagcaactgagaaacagttgagtttctcatttttgtagc

SEQ ID NO: 909683 - DNA, 120 bp, Artificial Sequence
  ENSG00000253510_13 (sequence is synthesized)
ttttccctgaccacaggcacagtcacacaggtggcagagatggcaaagatggtgttgaaaattctgttctatttcttgttaaaagaaccagtaggaggagcatggggcctctgtggctgc

SEQ ID NO: 909684 - DNA, 120 bp, Artificial Sequence
  ENSG00000253510_14 (sequence is synthesized)
agaaaggagagagatgccaagtggaaatcgaagcgttccgtgtataaaatctgcttaattctccagcgtctccctgaacctctgtgtgctgtgtgtactgacgtctgagtagctacctac

SEQ ID NO: 909685 - DNA, 120 bp, Artificial Sequence
  ENSG00000253510_15 (sequence is synthesized)
agcatgcatacagtttgcaatttgagtatagacaactttattgtctcttactctgactgttcttacaaattcttcttacaaagaagatcagaatcaatctctctacgacatagaaatcgc

SEQ ID NO: 909686 - DNA, 120 bp, Artificial Sequence
  ENSG00000253510_16 (sequence is synthesized)
aatgtccagaatgcaatctacaactactcaagacacaagaatccaggaaaatattttcaatatattctctggaggaaaatataagcaactctgtaatgttctggatattggaattatcag

SEQ ID NO: 909687 - DNA, 120 bp, Artificial Sequence
  ENSG00000253510_17 (sequence is synthesized)
ggaaagatttaaaaatagctattatagtaatgttcactggggcaaaaggaaataactcataatgaatgcaaaggcagaaaagctcaacaaagagatggaatatgaacgtgtgtctataca

SEQ ID NO: 909688 - DNA, 120 bp, Artificial Sequence
  ENSG00000253510_18 (sequence is synthesized)
cacacaaatgtacgttttaaactgaaaatacatgctatctgaatgtttttaaaagcattactgagtctaagaatgagtggaaatggcaatgaaaaagtcagcagatttgaagaaggataa

SEQ ID NO: 909689 - DNA, 80 bp, Artificial Sequence
  ENSG00000253510_19 (sequence is synthesized)
tatatatatataaaagaacctcagaaacttgtgaggagaataaaaatttccatttaagaaaaattagagaagcagagaga

SEQ ID NO: 909690 - DNA, 89 bp, Artificial Sequence
  ENSG00000253510_20 (sequence is synthesized)
ttgaaaaattatggcttcaaacttccaaattcagtggcatatatgtataggtacaatcatctcagcaaaccccaaacaagataaataca

SEQ ID NO: 909691 - DNA, 120 bp, Artificial Sequence
  ENSG00000253510_21 (sequence is synthesized)
ggtacaatcatctcagcaaaccccaaacaagataaatacaaaccgatcagttacaaggcacacaaaagaccaactgctgaagatgaaagatacaaccgtgaaagcagccagaagaaaaac

SEQ ID NO: 909692 - DNA, 120 bp, Artificial Sequence
  ENSG00000253510_22 (sequence is synthesized)
atcctctgaaattgatcacattactagggcttctcccagaaatactgaagaccagaagacaacaaaagcattgttcttaaagtgctgaagaacaataacaacccagattccatgtcctgc

SEQ ID NO: 909693 - DNA, 120 bp, Artificial Sequence
  ENSG00000253510_23 (sequence is synthesized)
aaaactatcttttttaaaatgaaggggacacattttcacctacagactgcctaggggaatttatcccaccagatcttccccataggaaatgctaaaagaagttttctaagttgaagaagg

SEQ ID NO: 909694 - DNA, 120 bp, Artificial Sequence
  ENSG00000253510_24 (sequence is synthesized)
atggtaatggaaaatcaaataaacaggaatgaatggaaggtcatcgaaaattataatggaggaagatatgaaatataaaatcagaagtatattatgctaaatatattaattattaacaca

SEQ ID NO: 909695 - DNA, 120 bp, Artificial Sequence
  ENSG00000253515_0 (sequence is synthesized)
atgctctgccaggtcagggtgcgttctgctctgcgtttttccatcctgcctaaacggcggggtcttactctgtcccacaggctagagtacagtggcgcaatcatggctcatacggcctcg

SEQ ID NO: 909696 - DNA, 120 bp, Artificial Sequence
  ENSG00000253515_1 (sequence is synthesized)
agtagctgggactacaggcactcgccaacacgccctgctatttttaaaattttttgtagagatagggtctcattatgttgcctggactggtctctaactcctagattcaagcaatctgcc

SEQ ID NO: 909697 - DNA, 120 bp, Artificial Sequence
  ENSG00000253515_2 (sequence is synthesized)
cacctcagccccccaaagtgttggggttacagatgtgagccactgcacccagcattcttcttcttctaaaaactggcctagacaaaaaaaaattgcctaaagttgaatagctaataaagt

SEQ ID NO: 909698 - DNA, 120 bp, Artificial Sequence
  ENSG00000242012_0 (sequence is synthesized)
gagccctaaatgtttttttgtttgacattcatgcttaacagaaaatgatgaatccattagcaactccttccgttgccaaaagaaacagacttgcacttgtagattgctttcattctgcgc

SEQ ID NO: 909699 - DNA, 120 bp, Artificial Sequence
  ENSG00000242012_1 (sequence is synthesized)
gacctctgtagaagcaggtacaagctaccaaaagttcctactttatttattttgagtttggaatgagcaactacaaggaaaggaagaaaattgtcaaataaaagaaaattttataaatta

SEQ ID NO: 909700 - DNA, 120 bp, Artificial Sequence
  ENSG00000261038_0 (sequence is synthesized)
ggcaacctactcgggttcccttccatggtgtggaagcttagttcttttgctattcacagtaaatcttgctgttcctcgctctttgggtccgcactacctttctgagctgtaacactcact

SEQ ID NO: 909701 - DNA, 120 bp, Artificial Sequence
  ENSG00000261038_1 (sequence is synthesized)
tctgagctgtaacactcactgcgaaggtctgaggcttcactcctgaagttagcaagaccgcaaacccaccaggaggaacaaacgattctggacgtgccacctttaagagctgtaacactc

SEQ ID NO: 909702 - DNA, 62 bp, Artificial Sequence
  ENSG00000261038_2 (sequence is synthesized)
ctttaagagctgtaacactcactgccaaggtctgcggcttcactcctgaagtcaagtaaaac

SEQ ID NO: 909703 - DNA, 120 bp, Artificial Sequence
  ENSG00000261038_3 (sequence is synthesized)
tgaagtcagcaagaccacgaacccaccaggagcaacaaatgactctggacgcaccaccttttaagagctgtaacactcactgccaaggtccctggcttcattcttgaagtcagtgagacc

SEQ ID NO: 909704 - DNA, 120 bp, Artificial Sequence
  ENSG00000261038_4 (sequence is synthesized)
cactggaaggaactaattctagacatgctagttcccagatcctgtttctctggagaggcctaactaatacatagacaaagccaaatgactttttcccctctctgaactttgatattcttt

SEQ ID NO: 909705 - DNA, 120 bp, Artificial Sequence
  ENSG00000261038_5 (sequence is synthesized)
aaacatttccagctagttcttttaatatttcttgaggatttcctgggattttttttttggtaaatactgtatttcaccagctactccttcaagaacatagtcgtcatatgctttattatc

SEQ ID NO: 909706 - DNA, 120 bp, Artificial Sequence
  ENSG00000261038_6 (sequence is synthesized)
catgaagattattagtgaacccacagttcgtttgtcaaaatgactctaaattcgtgatattcagatgatcacactccataatactgccaccagagccaagttattggagttactactttt

SEQ ID NO: 909707 - DNA, 120 bp, Artificial Sequence
  ENSG00000261038_7 (sequence is synthesized)
tatgatcagcacaattatttttctatgaaagaattgttggtattaaaagggccacagtagactatttgctattgaatgattgttggttagtacttaattaaaacaaaaatgttttttata

SEQ ID NO: 909708 - DNA, 120 bp, Artificial Sequence
  ENSG00000230027_0 (sequence is synthesized)
agagagcagactgcaaaccctgtaactgatccatgtattatctgttcttttaactgagtaacatgcttttcaaaagtgtttttccatgtttcagagacagaaaaggggagaaaaagaaga

SEQ ID NO: 909709 - DNA, 120 bp, Artificial Sequence
  ENSG00000230027_1 (sequence is synthesized)
gaatgaattgcagctgaggaagtggaagagcgagaagcgcttccagataccagacttaacaggtggatttttgggtttgctgaagaagaaaaagaaggagaaggagaaggagaagaagaa

SEQ ID NO: 909710 - DNA, 120 bp, Artificial Sequence
  ENSG00000230027_2 (sequence is synthesized)
agtgtgattaacaagaaaaaaacttatttgggggctatgaacaccttgaatatttaacagaatatcagctactcatctgtaaccattcactacatagctaaacttttagtaataatgtag

SEQ ID NO: 909711 - DNA, 120 bp, Artificial Sequence
  ENSG00000230027_3 (sequence is synthesized)
cattgttatcacaaaacatgtatttagaaccaaccacatgccaggcctcatactagctgaccaatatacacagtgtttggcaaaagctaaggtgatggtgtgccagttctgctctctgct

SEQ ID NO: 909712 - DNA, 120 bp, Artificial Sequence
  ENSG00000230027_4 (sequence is synthesized)
gtatctgtgtcctgtttccttatgtcgtttgtaatttttgatcacaagcacattttcaacaaggtttgtttaccatgggacccccatgaggcctgaactacagaagtggtttggggtttg

SEQ ID NO: 909713 - DNA, 120 bp, Artificial Sequence
  ENSG00000230027_5 (sequence is synthesized)
cctctgccaggtccctggaggtttcattggccttagattaatttttatgttaaacttctgtggtaaattgtgtttctggagaagaccacaacaatagaccctctcccaatagctcttttg

SEQ ID NO: 909714 - DNA, 120 bp, Artificial Sequence
  ENSG00000230027_6 (sequence is synthesized)
taatgtgatcttgccactcctccatcaagaggtggagtttatgatcccttcccctgattctgagctgcctgtgactgactttgattgacagaatgtggcagaaatgacactgcatcactt

SEQ ID NO: 909715 - DNA, 120 bp, Artificial Sequence
  ENSG00000230027_7 (sequence is synthesized)
caacttttgctttcactacttggagagctcccttttggaggccagtcatcgtgttagaagcataactaactggagaccactatgtggtggagaagctcatgctgtctacatatagaggga

SEQ ID NO: 909716 - DNA, 120 bp, Artificial Sequence
  ENSG00000230027_8 (sequence is synthesized)
aatggcatatcaatgaattaaacatgaaagtgaagatttcttggccctctccatcttactcagctcattggagccaccagctgaaagcaagggagtgaatgagcccagccccgagtggag

SEQ ID NO: 909717 - DNA, 60 bp, Artificial Sequence
  ENSG00000230027_9 (sequence is synthesized)
accattcactacatagctaaacttttagtaataatgtaggtattctctggccaagagaaa

SEQ ID NO: 909718 - DNA, 120 bp, Artificial Sequence
  ENSG00000230023_0 (sequence is synthesized)
atggtagtgaataagtcttataagatctgatgattttataaggggtttccccttttgcttagctctcattcattccctcttgtctgctgctacgtaagacgtgccttttgccttctgcca

SEQ ID NO: 909719 - DNA, 120 bp, Artificial Sequence
  ENSG00000230023_1 (sequence is synthesized)
tgattgtgaggcctccccagccacttggaactagatggagccgggcaggactaaccctgctgtgcagatggaataaaaggcagggacctgttccacgatgctcccaagctcagatcacag

SEQ ID NO: 909720 - DNA, 120 bp, Artificial Sequence
  ENSG00000230023_2 (sequence is synthesized)
cgagctaaagggaacctgggaggtgggtctcctaagcctcaggcacaggtctctggaaaggacacgcactggatagaaaattgggaacagtttatttcaaacaacaaaagcagcccacag

SEQ ID NO: 909721 - DNA, 120 bp, Artificial Sequence
  ENSG00000230023_3 (sequence is synthesized)
tcctcatggatgaactttgcagagggcctcacagccaggaacttcctttgacccctgggtggcctcgaccagacccttctcagtgggaatggccttggctatttgtgagtgagctgcctg

SEQ ID NO: 909722 - DNA, 120 bp, Artificial Sequence
  ENSG00000230023_4 (sequence is synthesized)
cccattgcccatgggtcagtccatgggtggcttgggtcctctgtccagggtggcaccgacctcaaggccagtcacctggagatgggggccaggttgtgcagacttgctacccgcttcctg

SEQ ID NO: 909723 - DNA, 120 bp, Artificial Sequence
  ENSG00000230023_5 (sequence is synthesized)
gagcaaacagttgggggtgatccccagaggagatgtacacacagcatactcccagctaacggcctcagcattcttatcgctgcccagatgaggcctagttaattactgaccagagaacgg

SEQ ID NO: 909724 - DNA, 120 bp, Artificial Sequence
  ENSG00000230023_6 (sequence is synthesized)
cggcgactgaatccccggcataagctgttgcctctaaacggtccagggggtccttgcagcctgggggccagtttctttgcccaccctgcaaagaggtacattcaccattaaccacagaaa

SEQ ID NO: 909725 - DNA, 120 bp, Artificial Sequence
  ENSG00000230023_7 (sequence is synthesized)
ccagaccctgggatggggcctccggagtcacagaatttcttcttcaaagcagagaaacatgcctgcccagctcagcatgatccagcttcagaggcagagcgccgatggatggggtgtttg

SEQ ID NO: 909726 - DNA, 120 bp, Artificial Sequence
  ENSG00000230023_8 (sequence is synthesized)
gtcagtgaacaaagggcagcatgtgtggctggctccctgggcaagtaactttccctgtctggcctcggtgttcccatgtgtcagatggggatgctggaggacatgatttcgagggtccct

SEQ ID NO: 909727 - DNA, 120 bp, Artificial Sequence
  ENSG00000230023_9 (sequence is synthesized)
cagtccttgcctcatcccccttgtctggccatgcccaattctccctctgctcctcaacctacaccctctttcttaaccagacaggcatcctcctgaccctactcccctcctctcctccac

SEQ ID NO: 909728 - DNA, 120 bp, Artificial Sequence
  ENSG00000230023_10 (sequence is synthesized)
aaagccctctctgctttccttctcctgtgcaagctctgtccaagctgcaagatctgaccaaatcacttctccaggaagtctgaagccacctctggctacaccaacgctcatgaatctccc

SEQ ID NO: 909729 - DNA, 120 bp, Artificial Sequence
  ENSG00000230023_11 (sequence is synthesized)
tctctctgggtggttccacatgcaaagccaaaacctctgaacttcttccaggtttctggaagaataacagccaatactagatagcactgcctgtgtgccaggcactggagcaaacaacga

SEQ ID NO: 909730 - DNA, 120 bp, Artificial Sequence
  ENSG00000230023_12 (sequence is synthesized)
gcacatgttaacacatctcatcctcatagctctgctcttattcccaatttacagatgaagaaagtgagtccggaggggttaagcaacttgcccacagacacacagccagtatgtggtggc

SEQ ID NO: 909731 - DNA, 120 bp, Artificial Sequence
  ENSG00000230023_13 (sequence is synthesized)
tgcagttggcttcagaactgtgctacccaggagggcagcctccagccctgagtgaccattgagcactagagatgtggctggtgtgaatcgagacaagctgtgagtgtgtaatggacacca

SEQ ID NO: 909732 - DNA, 120 bp, Artificial Sequence
  ENSG00000230023_14 (sequence is synthesized)
ggttttgaatggttggtgtgacaaaaagaatgtactatatcacattgaaatttttatattgatttcatggtgacatattttccatatattgagttaaataaaatatattgttaacactaa

SEQ ID NO: 909733 - DNA, 120 bp, Artificial Sequence
  ENSG00000259143_0 (sequence is synthesized)
tttcacatgagctccgattttcttaactctccagaaggacttcagaagcctctggagttttgagacacggcctctctctcccttctgcttggagacaccttcctgggggtctccactgca

SEQ ID NO: 909734 - DNA, 120 bp, Artificial Sequence
  ENSG00000259143_1 (sequence is synthesized)
ttccccgccggtattcctctgtggagccttgcgccctcaggtcccagaaatgggctgtgtgggagcttccagtcagcctggtatctcgggaccttctcagccaggaaatgagactgcaca

SEQ ID NO: 909735 - DNA, 120 bp, Artificial Sequence
  ENSG00000259143_2 (sequence is synthesized)
catcaccacatagcagccagcgtgggagaaccaaacatgagacacaagcatccccttgagctccacagatcttgcgccttgctctcatcaggcatttccttggaaaacagcagtcagcag

SEQ ID NO: 909736 - DNA, 120 bp, Artificial Sequence
  ENSG00000259143_3 (sequence is synthesized)
ctcatggaagtgagcccggtgcacagactttgcatggactttgcacaggttccatttccatcgtgtgcagacacctgtatctttgggctccacgtgagcacctgccctcttcactctgat

SEQ ID NO: 909737 - DNA, 120 bp, Artificial Sequence
  ENSG00000285155_0 (sequence is synthesized)
gtcggctcagcaaatatccagcccaaaatacaccactagtggtctgttcttaaagaccaaaaaaccaggccctttttcttcctcctttcttgctgctacgcctcaactatttcattgctt

SEQ ID NO: 909738 - DNA, 120 bp, Artificial Sequence
  ENSG00000285155_1 (sequence is synthesized)
gtcaatgctcagcaaggaagacagcctaacagcagccctcccacctgtggttgcttgctccccctgttatgtacaaccacaagtcagccacagaattctgcaaacaacccactgtgcaag

SEQ ID NO: 909739 - DNA, 120 bp, Artificial Sequence
  ENSG00000285155_2 (sequence is synthesized)
gctttggagctacctcagagtgagacccagagacaaagcagccatttaccttgccttcttttagctactcgcaatgaaacgttttcacagaaagacacctggaggtggaagacttgtcac

SEQ ID NO: 909740 - DNA, 120 bp, Artificial Sequence
  ENSG00000285155_3 (sequence is synthesized)
cggtacttcagatgaagcaggtttcacatgcttacccaggaatgctccttgaaaagataatctcctcagacataagcctggccacagaaaagtctctctaagaattttactcatccatct

SEQ ID NO: 909741 - DNA, 120 bp, Artificial Sequence
  ENSG00000285155_4 (sequence is synthesized)
ggagttggcgaaaggtgtgataccccagcaaaccttttagctaaaggatgtcaattaaacttcatcgaaaaccctgtctcccaagtagaaatacttaaaaataagcctctcagtgtaggc

SEQ ID NO: 909742 - DNA, 120 bp, Artificial Sequence
  ENSG00000285155_5 (sequence is synthesized)
agacagaaaaatagttctgacattgttcagattgcgcctcaaagcttgatccttaagttgagaccaggtggtgcgcagactctgcaggtgcatgtccgccagactgaggactacccggtg

SEQ ID NO: 909743 - DNA, 120 bp, Artificial Sequence
  ENSG00000285155_6 (sequence is synthesized)
gatttgtattacctcatggacctctccgcctccatggatgacgacctcaacacaataaaggagctgggctcccggctttccaaagagatgtctaaattaaccagcaactttagactgggc

SEQ ID NO: 909744 - DNA, 120 bp, Artificial Sequence
  ENSG00000285155_7 (sequence is synthesized)
ttcggatcttttgtggaaaaacctgtatccccttttgtgaaaacaacaccagaagaaattgccaacccttgcaggctaagaaagtaacaacaaaatatgaacatttgttagaaaatgaac

SEQ ID NO: 909745 - DNA, 120 bp, Artificial Sequence
  ENSG00000285155_8 (sequence is synthesized)
tcccagcacttttggaggccgaggcgagcagattgcttgagctcaggagttcgtgaccagcttgggcaacatgtagtattccatacttctgtttacctacatttggattcaagcacattt

SEQ ID NO: 909746 - DNA, 120 bp, Artificial Sequence
  ENSG00000285155_9 (sequence is synthesized)
tcaagcacattttgccattgacaaatgatgctgaaagattcaatgaaattgtgaagaatcagaaaatttctgctaatattgacacacccgaaggtggatttgatgcaattatgcaagctg

SEQ ID NO: 909747 - DNA, 120 bp, Artificial Sequence
  ENSG00000285155_10 (sequence is synthesized)
ctgtgtgtaaggaaaaaattggctggcggaatgactccctccacctcctggtctttgtgagtgatgctgattctcattttggaatggacagcaaactagcaggcatcgtcattcctaatg

SEQ ID NO: 909748 - DNA, 120 bp, Artificial Sequence
  ENSG00000285155_11 (sequence is synthesized)
acgggctctgtcacttggacagcaagaatgaatactccatgtcaactgtcttggaatatccaacaattggacaactcattgataaactggtacaaaacaacgtgttattgatcttcgctg

SEQ ID NO: 909749 - DNA, 120 bp, Artificial Sequence
  ENSG00000285155_12 (sequence is synthesized)
taacccaagaacaagttcatttatatgagaattacgcaaaacttattcctggagctacagtaggtctacttcagaaggactccggaaacattctccagctgatcatctcagcttatgaag

SEQ ID NO: 909750 - DNA, 120 bp, Artificial Sequence
  ENSG00000285155_13 (sequence is synthesized)
aaatcaaccagacgttctgtcattcaccagcaatatctctccatagtattctacacccatgtgccttcatgaaatatttcattatgctggtggaagaaatattcaaatgaatgtgctttt

SEQ ID NO: 909751 - DNA, 120 bp, Artificial Sequence
  ENSG00000285155_14 (sequence is synthesized)
tcagggatggtgacaccagaatgttttaaatctgttcattaccacaacaaggataaatggcgtttctgccaaagacttttgataacgggtgcagtaatgcatgccagcactttctgaaat

SEQ ID NO: 909752 - DNA, 120 bp, Artificial Sequence
  ENSG00000285155_15 (sequence is synthesized)
agcagtttctagagtgacgaagtgagaattcgattcttatctgttcacagactctacaaatctcaaaacaccttcctgaagaacaccctgggggaaaaatacaaaaaacctcatggattt

SEQ ID NO: 909753 - DNA, 120 bp, Artificial Sequence
  ENSG00000285155_16 (sequence is synthesized)
agccatagatcatatatattttgaattgtcactctttcactcaacaaataaatatctcctatgtgccaaatcatgagctagaggttggaacagcacattgcatagagaacttggtcccta

SEQ ID NO: 909754 - DNA, 120 bp, Artificial Sequence
  ENSG00000285155_17 (sequence is synthesized)
gcctgagggattcagaatcttgggcaccatcatttctgttttcatcattgttgtcatcagtgtcttttgagacattcttattttgatctcctttgatttttatatattatgattatttcc

SEQ ID NO: 909755 - DNA, 120 bp, Artificial Sequence
  ENSG00000249476_0 (sequence is synthesized)
atttttaagtcaaattgtttatgtagacaggaacccaacaaaaatatttgcccaggaccttgcgcgccctagaagtggctctggagaaaagcatttgcctacagaaataaaccatttcct

SEQ ID NO: 909756 - DNA, 120 bp, Artificial Sequence
  ENSG00000249476_1 (sequence is synthesized)
tcctcagcctatatcagtaacaaaggtgcagctttggccactatctgccactcctttctcttattcctctgtttgtttagaagcggatcaggaaagagggacaccatttcctcagatccc

SEQ ID NO: 909757 - DNA, 120 bp, Artificial Sequence
  ENSG00000249476_2 (sequence is synthesized)
tcaaagtccccaaaaaagaactcaataagcattagctgttatcatttttcaagctttcaggttgtgttttattttccgtttttctcctttcctttcattccaaaaagcctcctttcttta

SEQ ID NO: 909758 - DNA, 120 bp, Artificial Sequence
  ENSG00000249476_3 (sequence is synthesized)
attctataagctcttctttggtccctgagagattcttgtttgtttatttttgtttgtttttttacaattattccagagatctggacaatctctagcacagaaaaaaaaaattcccttcct

SEQ ID NO: 909759 - DNA, 120 bp, Artificial Sequence
  ENSG00000249476_4 (sequence is synthesized)
tcttagcatccttcagtagttggactcggtgaaaattccactgcccccagccctttgcagcactgctctcaaggccagtaggctgtacctgggccctgacttgagaggaagatcacaaga

SEQ ID NO: 909760 - DNA, 120 bp, Artificial Sequence
  ENSG00000249476_5 (sequence is synthesized)
gaagagcattcagtgggttaaaaaaaacagatccgaaggatgaagggaatctaccttcagattggaaccgaaggtcaaaggttctaggaatgaaggtattcaacatggcaacgctggaag

SEQ ID NO: 909761 - DNA, 120 bp, Artificial Sequence
  ENSG00000249476_6 (sequence is synthesized)
caaagtaaacgttcaacagctggatgatgataaagtaagtgaccttgaaaccaataggacaacatggagctcattacgattatgtttagggagaccaggaggagacatggaatagggctt

SEQ ID NO: 909762 - DNA, 120 bp, Artificial Sequence
  ENSG00000249476_7 (sequence is synthesized)
atgtgcaataaaacagagaggaaaggaggaggcaatttataaatgcatgtcctctgattgtgtaaaattaggcatctgttaaaaagacgggaatgaggtaataatagagttaacatgtta

SEQ ID NO: 909763 - DNA, 120 bp, Artificial Sequence
  ENSG00000249476_8 (sequence is synthesized)
gagtaattggataatagtattagttgtttcttttctctaactgaatataatatattacttttataatttagtaaatttgttcttttcaaaggaggtacacccatgcctttctcctggcta

SEQ ID NO: 909764 - DNA, 120 bp, Artificial Sequence
  ENSG00000249476_9 (sequence is synthesized)
tctgcagctcaacaatgagggacttgggctccccaggcctccatcacactaaacagtcctggccgactatgatacccttcctcttttctccctaatttgttgtctattacagtttgctcc

SEQ ID NO: 909765 - DNA, 120 bp, Artificial Sequence
  ENSG00000249476_10 (sequence is synthesized)
gtggacgtgtgaagcaatctctgggggtggagctgaggaatctgcattattaacagtttcctgggagattcttacacacactaaagtttggacaaagattgcttattttttctgccaaaa

SEQ ID NO: 909766 - DNA, 120 bp, Artificial Sequence
  ENSG00000249476_11 (sequence is synthesized)
atcttaaccacacagggacttgcacgatctatgttatttcttgaagcaaagttaatccaccgatattatgccttgtgtgtatgtgttttaagtgcccagtgaacacagttccatttatcc

SEQ ID NO: 909767 - DNA, 120 bp, Artificial Sequence
  ENSG00000249476_12 (sequence is synthesized)
tcaaatatttttgtgtagaaattttcgattataatttattcatggtttttgcttagaaagccaccttataagcaaggtatcctgtcataggatcactactttctttccctctgttttgag

SEQ ID NO: 909768 - DNA, 120 bp, Artificial Sequence
  ENSG00000249476_13 (sequence is synthesized)
tcctgccataattagggctgagtgacttttcgggacacactttactttgtttctttgatcacaacagagaacacaggactctcgggtcctgaggctggctgaagggtttcagttttcctt

SEQ ID NO: 909769 - DNA, 120 bp, Artificial Sequence
  ENSG00000249476_14 (sequence is synthesized)
aattgtctatcattataggacctggaaatacccactcatgatcccactgcttccagccctcaaactaagaatggagtctctagtcgtgcacattcctgggcctcagggctcacaaggcag

SEQ ID NO: 909770 - DNA, 120 bp, Artificial Sequence
  ENSG00000249476_15 (sequence is synthesized)
tgaggctgaggtggggcggcctgtctgcgtctgcgtcccagcagagcctcacaggtcctcgctggcactgcaggaaggaggcccctctgaggcgaggagtgttctgacctacaaggctgt

SEQ ID NO: 909771 - DNA, 120 bp, Artificial Sequence
  ENSG00000249476_16 (sequence is synthesized)
ccaatcttttggcttccctgggcaacattggaaggaggaaaattgtcttaggccacacataaaatacactaatgatagctgatgagctttaaaaaaaaatgcaaacaaatttcataatgt

SEQ ID NO: 909772 - DNA, 120 bp, Artificial Sequence
  ENSG00000249476_17 (sequence is synthesized)
aatttgtgttgggccacattcaaagctatcctgggctgcatgcagcctgtgggccatgggttggagaatcttgctttatgattttactcaagacagaaactaagtgctaacatttccccc

SEQ ID NO: 909773 - DNA, 120 bp, Artificial Sequence
  ENSG00000249476_18 (sequence is synthesized)
tgctaacatttcccccaatcacaattctattttacctttttaaaaactctaaagggcaagaattttgctaatcttttctagaaatataaaaacaagcaaatatgttttctaaaacaaacc

SEQ ID NO: 909774 - DNA, 120 bp, Artificial Sequence
  ENSG00000249476_19 (sequence is synthesized)
aaggcttttctcctggggaatttgcaggcatagcacgaactccttcctcactgctatttcttgagaggggctgttaggctgtgctgtgctctgcttaaggacgagaggccaggtacacag

SEQ ID NO: 909775 - DNA, 120 bp, Artificial Sequence
  ENSG00000249476_20 (sequence is synthesized)
cctgagaggccagtcattgtgccatgttgttgtcaggagttcccagtgtccatcttgataaggctttgctaaaacatactaatacaaacttccattacctcctgtgtttctaaataaaca

SEQ ID NO: 909776 - DNA, 120 bp, Artificial Sequence
  ENSG00000249476_21 (sequence is synthesized)
taccaagttattttaagactcatgttttcctttataatcatttgaaatttctgcctagtgtgaaacaaccatctagattctcacagaattcatgaataatactgaaatccactctcctaa

SEQ ID NO: 909777 - DNA, 120 bp, Artificial Sequence
  ENSG00000249476_22 (sequence is synthesized)
atgatgaagcctcctatgagattatcttttatgtagcggaagaaaagaatccttgagggtcaagttgctagggcagtcacagaagccagagccatgggccaggaggtcctgaggcctctc

SEQ ID NO: 909778 - DNA, 120 bp, Artificial Sequence
  ENSG00000249476_23 (sequence is synthesized)
tgaaggatgtgcgtggtcatccactatgggtgcagctggtgttgagaaactaagctgatgcaccacctctgttgttccaaggctagaccaacagtgggcattctctagatctattgtctc

SEQ ID NO: 909779 - DNA, 120 bp, Artificial Sequence
  ENSG00000249476_24 (sequence is synthesized)
ctttacgtattagggggaaaaccacttctactgtgcagggatctgcccctttaaacacataaataccacttaatccactgccctcaacagaggaaatgaccactggcctggaggcctcca

SEQ ID NO: 909780 - DNA, 120 bp, Artificial Sequence
  ENSG00000249476_25 (sequence is synthesized)
aaattccttctctttttctttctttcaagtcaaaggtcatggttcatttcgagttccaatgctattttctaaattttgttttaatccagatctcatgacttatttctcattctctttcct

SEQ ID NO: 909781 - DNA, 120 bp, Artificial Sequence
  ENSG00000249476_26 (sequence is synthesized)
tcctgaacaattcagtgctaaaaccattaggtagggcagagcgaagactgtatgggcgccagggtgaaggaaaccacagtggcacagagtgcagtgcctgcatcaggacagggtcaggag

SEQ ID NO: 909782 - DNA, 120 bp, Artificial Sequence
  ENSG00000249476_27 (sequence is synthesized)
gcagtcctgcagaggggcagctcagcatggtgtgttcaagtcctacagagtattggagcccaaaggagaaaagtaactttacaatgggaatggctggcagacatcacctgactcaagtgt

SEQ ID NO: 909783 - DNA, 120 bp, Artificial Sequence
  ENSG00000249476_28 (sequence is synthesized)
caaagtgaagaaacatcatcaatgatgtttccattaaatggaaatcctgtgccacctgacaagaggcatttaggacttctgtgatattccctctaaagatgcatcacctgaatctgacta

SEQ ID NO: 909784 - DNA, 120 bp, Artificial Sequence
  ENSG00000249476_29 (sequence is synthesized)
tgaagaaacatcagaaaaactcaaattgaggaacactctgcaagttccctcaaaaccctggcaatggcaactaaaaagatggcttttgtgagaagagcgattggtgtccacacctgctgg

SEQ ID NO: 909785 - DNA, 120 bp, Artificial Sequence
  ENSG00000249476_30 (sequence is synthesized)
tgctgagcacaagacaatgcacatgtgttctcttgaaggaagaaactttagaaacgtcatcttcaaggtgtcaatgacttgtctactatagctgctgcctcagcgtccacttttagaccc

SEQ ID NO: 909786 - DNA, 120 bp, Artificial Sequence
  ENSG00000249476_31 (sequence is synthesized)
acccggcatcagctgtgtgaaacccagtcgcaccctgccacctttggtctaggtgtgacttctcttccttagaggggcatgatagagctcgtgtgtttcttttcttttttttctttttgt

SEQ ID NO: 909787 - DNA, 120 bp, Artificial Sequence
  ENSG00000249476_32 (sequence is synthesized)
attacaggcatgaaccaccatgcctggaggagcccatgtgtttctcatctcaccaacccaaagcccaactcactccacagctgctgaccatgaggaaacctaaggtcaacaccggagtca

SEQ ID NO: 909788 - DNA, 120 bp, Artificial Sequence
  ENSG00000249476_33 (sequence is synthesized)
acaccggagtcaggcaaataagccacccccccacccccacccgcatacacacttgttttatttaaactggccaatccacaactgccagaggaaagcccgtgggccttcatggaggcctag

SEQ ID NO: 909789 - DNA, 120 bp, Artificial Sequence
  ENSG00000249476_34 (sequence is synthesized)
tctcaagccctcactctcccttcccacctgccggtcgagtgccctgctgtctctggacttcccatcggccctcagggacgtaagtctgcctagaggagagttgacacaccaaaaacaaaa

SEQ ID NO: 909790 - DNA, 120 bp, Artificial Sequence
  ENSG00000249476_35 (sequence is synthesized)
cttctgtttcaaaaatccagtccctgaaggcaatcgggaaaaagtgtgaagaacaagggcagagcttcccaactttgagcctgagtggtgaaaggaagcaagaagaaaaggggtttgtgg

SEQ ID NO: 909791 - DNA, 120 bp, Artificial Sequence
  ENSG00000249476_36 (sequence is synthesized)
gtgctcggaggagccccacaactatacccccatcctctccaagatccaccagaacagatacctacataaactagaggcatttgagaacgaaggcctcttgcccccgaggcagcagtagca

SEQ ID NO: 909792 - DNA, 120 bp, Artificial Sequence
  ENSG00000249476_37 (sequence is synthesized)
ttgagaacgaaggcctcttgcccccgaggcagcagtagcagacttgtatggcccacatgtattagtctgttctcacactattaagacatacctaagactgggtaatttataaaggaaaga

SEQ ID NO: 909793 - DNA, 120 bp, Artificial Sequence
  ENSG00000249476_38 (sequence is synthesized)
atggcttgggaggcctcaggaaagttacatcatggtggaagtggaagcaaacaggtctttcttcacacggtggcagcaagaagtgccaagcaaaaggaggaaaagccccttataaaacca

SEQ ID NO: 909794 - DNA, 120 bp, Artificial Sequence
  ENSG00000249476_39 (sequence is synthesized)
ctcactatcacgagaacagcatgagggtaaatgctcccatgattacattacctcccaccagctccttcccaccacatgtagggattataggaactataattcaatataagatttggggtg

SEQ ID NO: 909795 - DNA, 120 bp, Artificial Sequence
  ENSG00000249476_40 (sequence is synthesized)
gggacacagccaaaccatatcagaggatgagctaggggtgcacagggggagtaggctgtgaaggacatgtagtacccacatctctaggcctgcaggtgcctttccgacaggaacaagagg

SEQ ID NO: 909796 - DNA, 120 bp, Artificial Sequence
  ENSG00000249476_41 (sequence is synthesized)
aacgtggtaacattccagtgtggcctggccagcaggcacagccaggtaatgtatggcgcagcaggcaccaatgtggcaggggagggccacgtgctcctgtgtctaccccaacacaaaggt

SEQ ID NO: 909797 - DNA, 120 bp, Artificial Sequence
  ENSG00000249476_42 (sequence is synthesized)
gcttctccataaccactcctacccgcctcccccaaaactggctgagtttaagtttctgcaaactggcaaaatgagggcttgaaataaaaattgtctgtggactaaattttatacacgcta

SEQ ID NO: 909798 - DNA, 120 bp, Artificial Sequence
  ENSG00000249476_43 (sequence is synthesized)
aagacccaagattaccagtctagcagcagctctgcctgattctctgcgttttacacatttgacaattatctccctttatggattagagaaagcacatccttctcagcaagtggttcagtg

SEQ ID NO: 909799 - DNA, 120 bp, Artificial Sequence
  ENSG00000249476_44 (sequence is synthesized)
aaacttccattagtgaaagaggcactttgtcacagaagcagaagtgttcttgccatagtggaaaggaaaagatgcataacttctcatattaaaacagaggcttgctttaaatggtaagga

SEQ ID NO: 909800 - DNA, 120 bp, Artificial Sequence
  ENSG00000249476_45 (sequence is synthesized)
aagaagaggatgtagagaaattggaacccttctgagctgttaggaacgtaaaatggtgcagccactatggaaaagagtatggcagtctctcaaaaaataaaaaatagaactaccatgtga

SEQ ID NO: 909801 - DNA, 120 bp, Artificial Sequence
  ENSG00000285151_0 (sequence is synthesized)
agtaattaaaagtgtagtactgacatcaatatacactaatagacaatgtaacagaattgagagtcagaaatagccctgtgatatatgtgactgattttaactaaagttacaaatgtggtt

SEQ ID NO: 909802 - DNA, 120 bp, Artificial Sequence
  ENSG00000285151_1 (sequence is synthesized)
taatagagaaagcatagtagtttcaagaaatggtggtaaaactattggaaatccttatgcaaaaacaaaccaaatttccacctacactgagccacatataagaattaatacaaaatggat

SEQ ID NO: 909803 - DNA, 120 bp, Artificial Sequence
  ENSG00000285151_2 (sequence is synthesized)
tacagacctaagtgtaaaactaaaactctaaactgtgtaaaaaaaaaaaagagagaaaaatctgtgatcatggattgcctataacaaaagaacaaactgaaatggccttgttgcctgggg

SEQ ID NO: 909804 - DNA, 120 bp, Artificial Sequence
  ENSG00000285151_3 (sequence is synthesized)
tggcacccgaggttcttggtctcacgctgaggaaatcaaggacgctgacacaccaagggtgtgaggctagagcagaagtttaataggcaaaagaaagagactagctctctcctgcagaga

SEQ ID NO: 909805 - DNA, 120 bp, Artificial Sequence
  ENSG00000285151_4 (sequence is synthesized)
gaggtcctgaaaagagttcccattccacagtgaaatgcaagcatttttataaatgagctaatgggaagggggtagcttatctacacatagggagcaaaaaaccagttaggaccaggtgtt

SEQ ID NO: 909806 - DNA, 120 bp, Artificial Sequence
  ENSG00000285151_5 (sequence is synthesized)
gccatctgcacagagcgtgaatctctggcatcccccaccccaaccttttattatgcaggcaggtccttggcctgagctactccacattgcttatctctttcctattgtgcatgtgctaaa

SEQ ID NO: 909807 - DNA, 120 bp, Artificial Sequence
  ENSG00000285151_6 (sequence is synthesized)
ccccaggtacccctttctctccgtgcagctgcaggcaaccccaacaactcacaacatgcaagcttccagcttccttatctgagtatgtactaaggtccactgtgtttacttcacatactg

SEQ ID NO: 909808 - DNA, 120 bp, Artificial Sequence
  ENSG00000285151_7 (sequence is synthesized)
tgtttacttcacatacccaccttacgtatgtgaagcttgctgattacccaggaagctccccctctgtgccagagctgcttccttatacatgtttacagcccgatcttccaggctgctcct

SEQ ID NO: 909809 - DNA, 120 bp, Artificial Sequence
  ENSG00000285151_8 (sequence is synthesized)
tgttagaagagaagtgatttcttgggctgctttttgttagaagggaagttctaccgaggactctgtctaactatcggcttacctagtctttttttacctcctctctcaaaaccatcaaag

SEQ ID NO: 909810 - DNA, 120 bp, Artificial Sequence
  ENSG00000285151_9 (sequence is synthesized)
aaaaaactgaaaaattagatttcagcaaaattaagattttctgttcttaaaaagacgttgttaacaaaatgaaaaaccaaagtgtaaaccgggagaaaatacatgcaagttacctatctg

SEQ ID NO: 909811 - DNA, 120 bp, Artificial Sequence
  ENSG00000285151_10 (sequence is synthesized)
ataaagatattgtacccagcaaacatgaagaactctcaaacctcaacaacaaaaaaattcaattaaaagatgggtaagttggccgggtgcagtggctcatacttgcaatcccaatctttg

SEQ ID NO: 909812 - DNA, 120 bp, Artificial Sequence
  ENSG00000285151_11 (sequence is synthesized)
aggaagattgcttgagcccaggagttcacgacaagcccaggcaacataatgagaccttgtttctacaaaattttaaaaaattagccaggcattgtggcgtgtgctcgtaatttcagctac

SEQ ID NO: 909813 - DNA, 120 bp, Artificial Sequence
  ENSG00000285151_12 (sequence is synthesized)
tcgtaatttcagctactcagaaggctgagacaagaagactgagcgcaggaggtggaggctgcagtaggctgtgtgattgcaccactgcacaacagcctgggtgacagagtgagacactgt

SEQ ID NO: 909814 - DNA, 120 bp, Artificial Sequence
  ENSG00000261030_0 (sequence is synthesized)
gcatatgacacccccagtgcttggttcaaacctgtttgagtcacctgtcactttctaccttgaatttttgtcaccaatgtacatgcagtaacttctatactagactgtgactcagacgct

SEQ ID NO: 909815 - DNA, 120 bp, Artificial Sequence
  ENSG00000261030_1 (sequence is synthesized)
cacaatcacactcaaacacagtctagtgtttttcacagcctggtatagaaggtactgcctgtacatcagaacaggggagcaggagcctgatctgatttattatgaagtctcccaaggcct

SEQ ID NO: 909816 - DNA, 120 bp, Artificial Sequence
  ENSG00000261030_2 (sequence is synthesized)
ccagcgcacagtatcaggcacacaggaaacaatcaatgattaatgtgtgcttcctccatcctatgagaaatattacttaggtctctttatgacgagtggccaaaaagcacaaagccgaat

SEQ ID NO: 909817 - DNA, 120 bp, Artificial Sequence
  ENSG00000261030_3 (sequence is synthesized)
caatggaggtataatttacatacagtaacatgcacacatcttaagtgtatagcttgatgaatttttacctaaatatacctcctggaaaccactgaccacacaaacatctatgtctttcca

SEQ ID NO: 909818 - DNA, 120 bp, Artificial Sequence
  ENSG00000261030_4 (sequence is synthesized)
tcactctagaaagcttcctttttcccttttcctagtcaattaacccccatgcccctcacactccagtgaaccactattctgacttctactcccataaactaggtttgcttgtttgtgaac

SEQ ID NO: 909819 - DNA, 120 bp, Artificial Sequence
  ENSG00000261030_5 (sequence is synthesized)
ttcatataaatgaaattgtacagaatgtactcttgcatctggcttctttctcttaacataatgtttttgagatttatccaggtgattgtatcagtttattctttctttttttaatctgct

SEQ ID NO: 909820 - DNA, 120 bp, Artificial Sequence
  ENSG00000261030_6 (sequence is synthesized)
gtgtattattccattgtaagaatatgccataatttgtttatccattcttctattgatggacatttggatcatttccagtttgggcatattgtgaataaagctgctatgaatactggtgta

SEQ ID NO: 909821 - DNA, 120 bp, Artificial Sequence
  ENSG00000285159_0 (sequence is synthesized)
gcacatgttaaatgggtgattaagaagacagagagctgcttaaaaggtcatgggagaagtacaatgtctggggacttggcagtagcctggcagagaccgcaggaatcctatagagtcttt

SEQ ID NO: 909822 - DNA, 120 bp, Artificial Sequence
  ENSG00000285159_1 (sequence is synthesized)
tatggacagggctctgaaattccagagcctgcaggagtacttagccagcgtgcagagaagcttcccagttaggaggtgaagaaacacaaggctgcactggatgcggaggctcccacctgg

SEQ ID NO: 909823 - DNA, 61 bp, Artificial Sequence
  ENSG00000285159_2 (sequence is synthesized)
taaaaattacctgggtgtgatggtgcacgcctgtagtctcagctacctgaaggacagaggt

SEQ ID NO: 909824 - DNA, 120 bp, Artificial Sequence
  ENSG00000285159_3 (sequence is synthesized)
ggtgcacgcctgtagtctcagctacctgaaggacagaggtgggagaatggcttgagaccaggagattgaggctgcagtgagtagagatcacgctactgcattccagcctgggagacagag

SEQ ID NO: 909825 - DNA, 120 bp, Artificial Sequence
  ENSG00000285159_4 (sequence is synthesized)
aacaaaacaaaacaaaacaaaaaaaacacaaggccacccttcctcacgatgccgcaggtcccctccccttctctcagcatggctggagagcccctcaactgtggcctgctgtccttgatc

SEQ ID NO: 909826 - DNA, 120 bp, Artificial Sequence
  ENSG00000285159_5 (sequence is synthesized)
ggagagcccctcaactgtggcctgctgtccttgatccagtgccccacgctgccccacccttctggggagcccacctcaaagagaactccctggaggctcctacagtggcctccggctgac

SEQ ID NO: 909827 - DNA, 120 bp, Artificial Sequence
  ENSG00000285159_6 (sequence is synthesized)
caaagtgtgctgtgggcagaagcccctgcctccctcaccatgtacttcctcatcccagatctcagtccctcaagggccaggcaggtgtcatccaagacgacaagccatctcagtctcatg

SEQ ID NO: 909828 - DNA, 120 bp, Artificial Sequence
  ENSG00000285159_7 (sequence is synthesized)
gcaggtgtcatccaagacgacaagccatctcagtctcatgtactgtggggagaagacctcccagagccctctaccctctccttgagtcatacatgcttttttttttttttttttttttga

SEQ ID NO: 909829 - DNA, 77 bp, Artificial Sequence
  ENSG00000285159_8 (sequence is synthesized)
caggatctcagctcactgcaacctccaccctctggattcataatccgccaccatgcccggctatttttttttttttt

SEQ ID NO: 909830 - DNA, 76 bp, Artificial Sequence
  ENSG00000285159_9 (sequence is synthesized)
tcctcccaaagtgctagaattacaggtgtgggccactgcgcctggcccatacatgcattttaacagctacattcat

SEQ ID NO: 909831 - DNA, 120 bp, Artificial Sequence
  ENSG00000285159_10 (sequence is synthesized)
tgcgcctggcccatacatgcattttaacagctacattcatggatgcatttagcaagcaacctggcttcacatgcaaggcacagtgctaggaattaggtctacagggatgagcaagatgtg

SEQ ID NO: 909832 - DNA, 82 bp, Artificial Sequence
  ENSG00000285159_11 (sequence is synthesized)
cctctgctgtctccaggccactagggacgatggtcggggaatagaccactgagattgaagtgatgaaagtctcaaggaaaga

SEQ ID NO: 909833 - DNA, 120 bp, Artificial Sequence
  ENSG00000285159_12 (sequence is synthesized)
aaaacaaaacaaacaaacaaaaaaagaactctggcattccactgaacacgttctccttcaaaactgggtccaatcattctgctgacaccaagagagtgcctaaagggacagcccaactca

SEQ ID NO: 909834 - DNA, 120 bp, Artificial Sequence
  ENSG00000285159_13 (sequence is synthesized)
ggccttagatttatcttgagagaaaagtcctagaagcattttgattctcatagatgaaaggacaccagcacggaggacatgattggtcttctcgcctctcaagctgcggtggtgctgtcc

SEQ ID NO: 909835 - DNA, 120 bp, Artificial Sequence
  ENSG00000285159_14 (sequence is synthesized)
gatttgtgcatagccagaggaagatttcctgagaagccagtcaagcatgagctccagggtccttgcctgtgtgcccctcttccaaggtcctgtaccgattttttaaaaattcataattgt

SEQ ID NO: 909836 - DNA, 120 bp, Artificial Sequence
  ENSG00000285159_15 (sequence is synthesized)
ataatacttttcttaaatggtgtggggcacaaaacatagacctgcatcgtaagacctggctctacccctggaatatgtttctgatctgaagatgacaacctggagcagtaagcccttcag

SEQ ID NO: 909837 - DNA, 120 bp, Artificial Sequence
  ENSG00000285159_16 (sequence is synthesized)
tccttggcaacaattaatcatgttttgattgaacatggctcctaattgtaaggaggcttcaatgttaagaagtggtttgtcttcactgtactgtagattctgacttcaatacacatgtga

SEQ ID NO: 909838 - DNA, 120 bp, Artificial Sequence
  ENSG00000285159_17 (sequence is synthesized)
cctcaaaaagtaaattaatgccgccagatccaattcttcacatcctttctgtcagtagcgcaggttcaagaaggcagctggacacactgcctggcacaaagtgggtgcctgcctccagct

SEQ ID NO: 909839 - DNA, 120 bp, Artificial Sequence
  ENSG00000285159_18 (sequence is synthesized)
cctgcctgaggtttatctacaaatgacacagaaaggacaccaggcccattcagatggcaacccaggaagacaccagtccttctgtcctcacattaacagaaggaggcctctgctcgagag

SEQ ID NO: 909840 - DNA, 120 bp, Artificial Sequence
  ENSG00000285159_19 (sequence is synthesized)
ccttcatgggggctgaggaacctttgggagcctgagctgatggagactgggcctaagcctttggcctacagagtctgagaccctggaatgctgccttcatatcaccagtagtgtttatgt

SEQ ID NO: 909841 - DNA, 120 bp, Artificial Sequence
  ENSG00000285159_20 (sequence is synthesized)
tagaatgtgccccttcagtgactgtggcagtctgcaatgtattaatccactcaatggctagggcctttaacgagtattatatacttccaagaaggtgctagcagagagcctcaccatgca

SEQ ID NO: 909842 - DNA, 120 bp, Artificial Sequence
  ENSG00000285159_21 (sequence is synthesized)
ttttacagcaaagaagtgagcaatgtcattaagacaccctccaacttgcagtttttagacagaaggccaattctgtatgtataagaacactgtatgtattaaacgtggtaatgatctccc

SEQ ID NO: 909843 - DNA, 120 bp, Artificial Sequence
  ENSG00000259821_0 (sequence is synthesized)
cacaccttgtgcttccatagaattgtcggcctctgcaacaggaaagagcagctctggggaagtcgctggtgctgacaacctttgctcacacccctactgggtccccgtctgcatcctcca

SEQ ID NO: 909844 - DNA, 120 bp, Artificial Sequence
  ENSG00000259821_1 (sequence is synthesized)
acaccctcatcctgcttcctttacatagagttcattctcaaggaatcttttggcctgatagtgaggcctcctgcaaggagaaggaaagtcagtgtctgaatctgtttgggcggctataac

SEQ ID NO: 909845 - DNA, 120 bp, Artificial Sequence
  ENSG00000259821_2 (sequence is synthesized)
aaacaccacagaccagaaaggaacctgcagaactccaggaaccaaaattgctgctgtaaaattggaggttgactaggaaaatgccttttcctatcaagtcacgtgtgctggggcatgagc

SEQ ID NO: 909846 - DNA, 120 bp, Artificial Sequence
  ENSG00000259821_3 (sequence is synthesized)
ctttttggccaggttgttttataggctcatgcctataatccctgttctttaggaggctgatgcaggtagatcctttgagcccaggagtttgagaccagcctgtgcaacatagtgaaaccc

SEQ ID NO: 909847 - DNA, 120 bp, Artificial Sequence
  ENSG00000259821_4 (sequence is synthesized)
cgtctctacaaaaatatacaaaaattagtcaagcatggtggcatgcacctgtgatcccagctactgaggaggctgaagtgggaggagttcttgaacccgggaggtcgaagctgcagcatg

SEQ ID NO: 909848 - DNA, 67 bp, Artificial Sequence
  ENSG00000259821_5 (sequence is synthesized)
gaaaacaaaaacaaaaacaactttcaaatccagctcttttggcatggcaaggcacagactgagagat

SEQ ID NO: 909849 - DNA, 120 bp, Artificial Sequence
  ENSG00000256149_0 (sequence is synthesized)
aagagtctgggtttgtttctctgctgcctcgttcttggcatctttcttccatctcgctgacttcctcaatcgactccattaaacacagattacagtcttccctatggaagcgtaagctat

SEQ ID NO: 909850 - DNA, 120 bp, Artificial Sequence
  ENSG00000256149_1 (sequence is synthesized)
gtatggaggacccatgtctgcttgttcgctgatgtatccctggtgcttagaagaggacttggaatatgtgctcatggttcttggagggatgaccaggcatcctgaggtcctggtgatagg

SEQ ID NO: 909851 - DNA, 120 bp, Artificial Sequence
  ENSG00000256149_2 (sequence is synthesized)
gcttttaattacctgtgttcacagaacaaaaggaagctacagtgtgtttgaattccttgaatccattctgtcagagtgtggggaaaggagctgaaaatattctaaccagcagggaagaaa

SEQ ID NO: 909852 - DNA, 120 bp, Artificial Sequence
  ENSG00000256149_3 (sequence is synthesized)
atcaacagcttgggattcctgagaatacctggggaagatgatcttcaatcagccaacacttgctgagcaccaactgtccataaaagtcaccatgcttggcaacatgtatgatgcaaagaa

SEQ ID NO: 909853 - DNA, 120 bp, Artificial Sequence
  ENSG00000256146_0 (sequence is synthesized)
ttgcccaatatgggtcaggagaccctcatccatctttggcatgcacgtactggcatcatgtccaagactgctgtgtaaggggaggagataaatgaggagacacaacaactattaactccc

SEQ ID NO: 909854 - DNA, 120 bp, Artificial Sequence
  ENSG00000256146_1 (sequence is synthesized)
atattctgggaagtgacgtgtatcatttctactcattggccagaaatggtcagctggccctaaggtaatgcagaaagatttggaaaattaggggagtaaatgaaatatttggaacacttt

SEQ ID NO: 909855 - DNA, 120 bp, Artificial Sequence
  ENSG00000256146_2 (sequence is synthesized)
caatccaagcagttcttaatgtttcccccactatcatgctagcccattccaccacctttgcctgaaatactgcaagtatcctaattaatcttccttatcctaatcatgctccaatatgat

SEQ ID NO: 909856 - DNA, 120 bp, Artificial Sequence
  ENSG00000256146_3 (sequence is synthesized)
ctattccttcttccattcttgctacctccaactttttgttttccaactatcagttcaaacggttttgttaaatatgaaacagatttgctccaaaccttcaaaagccaagttacttcccat

SEQ ID NO: 909857 - DNA, 120 bp, Artificial Sequence
  ENSG00000256146_4 (sequence is synthesized)
ggcctccaggcctctacacaatctgggccctgaatacttctctgacctcctttctaccacttcctgcctaggtcactttgcattagctacactggccttcaggctcttcttgagcatacc

SEQ ID NO: 909858 - DNA, 120 bp, Artificial Sequence
  ENSG00000256146_5 (sequence is synthesized)
aactttatttctactcaaagccttcacatttgtgtttccctctgcctagaatgctctttcctcaaattttcaaataactcatcccttcatttatgcctctgcttggctatcaccctctta

SEQ ID NO: 909859 - DNA, 120 bp, Artificial Sequence
  ENSG00000256146_6 (sequence is synthesized)
gagaggctgtctttgaccactctgtataaaagagtctacttctaaccccatatcatcagctgctaatccttttccctgatttttctttcatgggacttgtctgttcccaacattttatta

SEQ ID NO: 909860 - DNA, 120 bp, Artificial Sequence
  ENSG00000256146_7 (sequence is synthesized)
tttatttacttgcttagttgtttattgtctgtctcccttactttaatgaaagctaaaaaaagcacaaggaccttgactttaacctttctgctgttttcccagtatcaagagcagtgccca

SEQ ID NO: 909861 - DNA, 120 bp, Artificial Sequence
  ENSG00000256146_8 (sequence is synthesized)
gcacacagtaggttctctataaatatttgttcaataaataagtgaattaattagtaaattagctaaaatatgccaaaattgagatgacaggctcctggccccagttcccagctgggcact

SEQ ID NO: 909862 - DNA, 120 bp, Artificial Sequence
  ENSG00000256146_9 (sequence is synthesized)
ccccaggtcacaggtctggcctctccccagagctgtctggacagcctttcctgtgactccttgaggtttccttgaagcccctgagaatattttgttgagaacacctttcatattggtcct

SEQ ID NO: 909863 - DNA, 120 bp, Artificial Sequence
  ENSG00000256146_10 (sequence is synthesized)
agttctagtcaattttattaatcagatcagccaacaccattcacagaagttggaaactggaacagaaccaatttatgtggcagatttttaatgaaaatataatggcaaccaagagaatct

SEQ ID NO: 909864 - DNA, 120 bp, Artificial Sequence
  ENSG00000256146_11 (sequence is synthesized)
gttctagaccttcaagaccgtctctgcaaatgaagctgtgaactccatggctgagctatgtatcttggaatagggcccatgtttagacagagaggtaaggcctgaaaaagtaaaattcaa

SEQ ID NO: 909865 - DNA, 120 bp, Artificial Sequence
  ENSG00000256146_12 (sequence is synthesized)
tcttcactggtaatgaaatattaaattagtgtggacacagtggagagacttttactcttttgctggcctattaaatccaaatgaagtgtggagaccagacatactctattgttccatttt

SEQ ID NO: 909866 - DNA, 120 bp, Artificial Sequence
  ENSG00000256146_13 (sequence is synthesized)
attcttgcatttttctagctgcagcatgccatttggctttcccacctaaaccttcttgctcttactcttcttccctgcatgggaattgcctgtacacagattgaaatagtgcataacagc

SEQ ID NO: 909867 - DNA, 120 bp, Artificial Sequence
  ENSG00000256146_14 (sequence is synthesized)
acaataacacaaaattattattatatgttgtcccttagacaatgggttgctctgcactggcatgaagttgtggtaacatggaatgcataagcttgtggttcacactgagtgtacaagata

SEQ ID NO: 909868 - DNA, 120 bp, Artificial Sequence
  ENSG00000256146_15 (sequence is synthesized)
cagtttccctgggacataaatctgctctttattgatgtatccaagctccatctcaagtaagaattgggttaagggaaaaatagacccattcattgtgtacattcacataaaaggttttaa

SEQ ID NO: 909869 - DNA, 120 bp, Artificial Sequence
  ENSG00000256146_16 (sequence is synthesized)
gaaatcccactctaaagaaacctattcaactttgcttaatctgatatctcataaaactatgatcactgaatccattttatttttgcctgacaaagtgatactccacctgggccacagtgc

SEQ ID NO: 909870 - DNA, 120 bp, Artificial Sequence
  ENSG00000256146_17 (sequence is synthesized)
ctgcctcgttgtgtctgaaaatctgtggggacattttggtcacaatgtctggaggctctattggcatttaaaaggtggggaccagggatactaaacatcatctagtatgaggaccagttc

SEQ ID NO: 909871 - DNA, 120 bp, Artificial Sequence
  ENSG00000256146_18 (sequence is synthesized)
ttctacatcatgaaaaattatcccacccaaaatgccagtagtatccctgttgggtacatactaattcacactaggaattctaatatacaccacttttttgttgtacagatggagaaacag

SEQ ID NO: 909872 - DNA, 120 bp, Artificial Sequence
  ENSG00000256146_19 (sequence is synthesized)
tctcagatagaggaaacggtatgtgtaagtctcacaactgtgtccatggtccaagtcagtactggaactcgctctcttttttcctattctgtactcacgcttcagcactgtgttgtctct

SEQ ID NO: 909873 - DNA, 120 bp, Artificial Sequence
  ENSG00000256146_20 (sequence is synthesized)
attatgcatacactagcacacttgaaaagtgaacaaaagctaagttgttcaaaagccttaaagaaaaacctccttagagcctccagagtatctacatgcttgtgggaacattgactgatg

SEQ ID NO: 909874 - DNA, 120 bp, Artificial Sequence
  ENSG00000256146_21 (sequence is synthesized)
aatgaatgaaaaattgaaacaagacaggaggaaaagttcagaactagctttcacttggcaattactacatgccaggccttatgcacgtagtggctcttttactccccacaacggaccaat

SEQ ID NO: 909875 - DNA, 120 bp, Artificial Sequence
  ENSG00000256146_22 (sequence is synthesized)
aacagaaagattactaactccttttttcagatgaagaaattgagtcttgaagaacttgcataagattctcaaggtcacagagctcataaaaagtgatagagctgggattcaacctgattt

SEQ ID NO: 909876 - DNA, 120 bp, Artificial Sequence
  ENSG00000256146_23 (sequence is synthesized)
tagtgtgacttctaagcctgagcactttccttcaggcctctcaatgaccagccaaggctcttgctctcagaaatgggaaacacgatgaagaagaaaaggaagactttttttttcaacaaa

SEQ ID NO: 909877 - DNA, 120 bp, Artificial Sequence
  ENSG00000256146_24 (sequence is synthesized)
atttgttgttctgttaattacatttctattgttaaaaataacagaaatcagttcaagaatgtttaagaaaaagtgagcatttttggaaggatagtggagctcatgaaatctagaagttga

SEQ ID NO: 909878 - DNA, 120 bp, Artificial Sequence
  ENSG00000256146_25 (sequence is synthesized)
acaatccagctctacaagggcatgtggcagctgcagtatgtggacacaccctccagaatagcactgttgagactgactcactcccagctcccaatcctgtctcaggtcaatgcttgagag

SEQ ID NO: 909879 - DNA, 120 bp, Artificial Sequence
  ENSG00000256146_26 (sequence is synthesized)
agataataggtctgattcaacttgaatcagatattcactcctgctccaaccagttgtggctgtggagttagagtcacatagcaggaacacagttgctgataagccatttttgtggacaga

SEQ ID NO: 909880 - DNA, 120 bp, Artificial Sequence
  ENSG00000256146_27 (sequence is synthesized)
gtgggtatctttaagagttacctatgatcaattcttggtcacattgtgaggcagttgaagtttcttttgtgtcctttatatccccctaacaacagggaagttttatcagtaaatgcctac

SEQ ID NO: 909881 - DNA, 120 bp, Artificial Sequence
  ENSG00000243655_0 (sequence is synthesized)
caaaagcagctcgattggtttctgctagtgtggaaataaatcatattatagctaggggtcatgatgttaggagtagtcagaggtgttcttgtgttctaatgagggtgcagagattgaatt

SEQ ID NO: 909882 - DNA, 120 bp, Artificial Sequence
  ENSG00000243655_1 (sequence is synthesized)
ggccacttattagtaggatcgataataggatgatagctagggtaacttcgtatgaaattgtttgggcaactgctcataatgcgccgatcagggcatagtttgagtttgatgctcatcctg

SEQ ID NO: 909883 - DNA, 120 bp, Artificial Sequence
  ENSG00000243655_2 (sequence is synthesized)
ggctggatgtagccagaatgaatagaaggcctaagttaagattaactagggggttagttatggacatgttgttaagaagaggggttgaacctctggttgtaaagttttaaattttatgca

SEQ ID NO: 909884 - DNA, 120 bp, Artificial Sequence
  ENSG00000243655_3 (sequence is synthesized)
attgctggggtctgccatcttaacaaaccctgttcttgggtgggtgtgggtacagtaaaatgctgagataatatcatctatggggcaggggcactttatgaagtgggccccatttctctt

SEQ ID NO: 909885 - DNA, 120 bp, Artificial Sequence
  ENSG00000249474_0 (sequence is synthesized)
tttttttaagagagatgaaagtgactcaagaagctgtgtcaccaaatctttgagagctatgtcaccaaatcaaaaaataacagaaaaccagacaagatcataagaaatcatttgcacaat

SEQ ID NO: 909886 - DNA, 120 bp, Artificial Sequence
  ENSG00000249474_1 (sequence is synthesized)
caagtggcatcattccaaaccactggaggagcaatgcccgctttctttttaaaattctcctgggaaaattactcctcagcctcctttataaatccttgaggaaatgtcaagttctttcac

SEQ ID NO: 909887 - DNA, 63 bp, Artificial Sequence
  ENSG00000249474_2 (sequence is synthesized)
ctcctttataaatccttgaggaaatgtcaagttctttcacgacaagaaaaactataatccctg

SEQ ID NO: 909888 - DNA, 120 bp, Artificial Sequence
  ENSG00000247796_0 (sequence is synthesized)
gtcttcaggcttttccactggctcacctttaggcttctgacacttttacctacggtatgtgaacctcgaaaatttgagacaggtctcagttaacttagaaagtttattttgccaacgttg

SEQ ID NO: 909889 - DNA, 76 bp, Artificial Sequence
  ENSG00000247796_1 (sequence is synthesized)
aggtctcagttaacttagaaagtttattttgccaacgttgaggacatgcccgtgacacagcctcaggaagtcctga

SEQ ID NO: 909890 - DNA, 120 bp, Artificial Sequence
  ENSG00000247796_2 (sequence is synthesized)
acattagttccttccagaaaggcggagaccgttaaaagcaagccccgccccccccaactgggggcttccagataatgcagtagttactttttgaaggacgaccgaagcaggatatttccc

SEQ ID NO: 909891 - DNA, 120 bp, Artificial Sequence
  ENSG00000247796_3 (sequence is synthesized)
tgaccccttcatgggacccacgtcagaggtgtttactcagcctgctgcccacaactcctcacaggagggagcgcacaagtgaacgagggtgaggactggagagcaccagcactggaacaa

SEQ ID NO: 909892 - DNA, 120 bp, Artificial Sequence
  ENSG00000247796_4 (sequence is synthesized)
cccggccacttcggcgctactgggatcaaactccatcacttggacacactgtgttccacccctcgtgggagggagcatgcaggtgagaggatgcaggagtcagggtgagcacttttgggc

SEQ ID NO: 909893 - DNA, 120 bp, Artificial Sequence
  ENSG00000247796_5 (sequence is synthesized)
tccagcaggagcaaactctgtgcagggccctgcagcagtgactgaggggcggcctgtgactcccaaagccccagaggacatgctacagtgctcttttagctctaccatccgtaggtggct

SEQ ID NO: 909894 - DNA, 120 bp, Artificial Sequence
  ENSG00000247796_6 (sequence is synthesized)
ggccagtgtcacagccttctgtatctgcactcatgactcctgagctcttgtcctgcattcagggaaaatgaggttacacaaaagaattcacagatggtaaatgcggggtattttattccc

SEQ ID NO: 909895 - DNA, 120 bp, Artificial Sequence
  ENSG00000247796_7 (sequence is synthesized)
agtgaaagtggctctcagcaggaaggagagcagaaaaggggatgggctgggtaggtaaccttcccctgaagtcctgccatctctggctggatttttctccaaagttacaccatcaaaatg

SEQ ID NO: 909896 - DNA, 120 bp, Artificial Sequence
  ENSG00000247796_8 (sequence is synthesized)
tccctctgaaatcaagccacttctctctgacatccagccgtagtccctcacgtccagttgcttctcctctctgctggctgagtctgtggtctttatagcacaggatggcgggcagggtgg

SEQ ID NO: 909897 - DNA, 120 bp, Artificial Sequence
  ENSG00000247796_9 (sequence is synthesized)
gccatgggtaatttaggaaaaagcaacatttgagcagacaaaagggagagaagttctctactttgggctgcggtttcaggctttttggcttgagggtggggttttgtcagggaccctccc

SEQ ID NO: 909898 - DNA, 120 bp, Artificial Sequence
  ENSG00000247796_10 (sequence is synthesized)
ttttctgcctaaaatttctctgcctcctgcctctatcactgtatcactagtttgaagtaaacccatctggaattactgattttaacaaatcacacagaatttcaagcacctttctatgca

SEQ ID NO: 909899 - DNA, 120 bp, Artificial Sequence
  ENSG00000247796_11 (sequence is synthesized)
aatgacttgtgaagacatagagtatagtatgccgttaacaaacagcccagcagtgtgccttgcaccttgtaggtgtacaaaatattaagtcaattttataattgaaggaggtaattttaa

SEQ ID NO: 909900 - DNA, 120 bp, Artificial Sequence
  ENSG00000247796_12 (sequence is synthesized)
agcccccgcctgcgcctgcacggagcatgcgcacaaccagctccgccccgcgccgggctctagctgtttccctcaggcggcctgttccacgccaggattagttttgcttcgcagatgggc

SEQ ID NO: 909901 - DNA, 120 bp, Artificial Sequence
  ENSG00000247796_13 (sequence is synthesized)
cgtggtggtgagaggaagcaatcagtatggaaatggagaaatggcttaccatgcatgtccttctccccaggagggaggtcgtggtgcaggcgagcagacgccagactcctggacacttgc

SEQ ID NO: 909902 - DNA, 120 bp, Artificial Sequence
  ENSG00000247796_14 (sequence is synthesized)
caggcttttccactggctcacctttaggcttctgacacttttacctacgattgaaaaaagacgagattccatgagactagaaatgtaggagcatctcagaccttcacagaacgctctgtt

SEQ ID NO: 909903 - DNA, 65 bp, Artificial Sequence
  ENSG00000247796_15 (sequence is synthesized)
aaatgtaggagcatctcagaccttcacagaacgctctgttagaagatgagaaacataacgttgct

SEQ ID NO: 909904 - DNA, 120 bp, Artificial Sequence
  ENSG00000247796_16 (sequence is synthesized)
ggcagggacaaataagggaataacagctggcgcccctagccagcagtggcaacccactcggatcaccttccatgctgtggaagctttgttatttcacttttcacaataaatcttagggtt

SEQ ID NO: 909905 - DNA, 120 bp, Artificial Sequence
  ENSG00000247796_17 (sequence is synthesized)
gctgtaacactcaccacgaaggtctgaggcttcattcttgaagtcagactaagaacccaccggaaggaaccaattccagacacacgtgtagtagcaaattatcaaaaatgttcattgcct

SEQ ID NO: 909906 - DNA, 120 bp, Artificial Sequence
  ENSG00000247796_18 (sequence is synthesized)
tagtagcaaattatcaaaaatgttcattgccttttctgaaaaacaattttcccagaaacacctggcagaatcagagttcattgtgtcaaaagaaaaactttggacaaattaaaatgagca

SEQ ID NO: 909907 - DNA, 120 bp, Artificial Sequence
  ENSG00000247796_19 (sequence is synthesized)
aagaacaatttgtgaaatgtgcccctctcccaaccagaacaggttcaaagagactccagtgctgccacatgatcaaagaattatggacaaaaaaagcaaataaattacaggaaaagaaaa

SEQ ID NO: 909908 - DNA, 120 bp, Artificial Sequence
  ENSG00000247796_20 (sequence is synthesized)
acacactgtgttccacccctcgtgggagggagcatgcaggaaaggtgactggccactaagaaggtggaggtgagccgggtgtgatggctgatacctgtaatctcagcactttgggaagct

SEQ ID NO: 909909 - DNA, 120 bp, Artificial Sequence
  ENSG00000247796_21 (sequence is synthesized)
aagatcgcttgagaccaggagtttgagacaaacctgggcaacataatgaaatcctcatctctacaaaaaaaaagcatgggcatgttggagcatgcctgtagtcctagctgcttgggaggc

SEQ ID NO: 909910 - DNA, 86 bp, Artificial Sequence
  ENSG00000247796_22 (sequence is synthesized)
tgccacagcactctcaatcaatcaataaaaattggaggtaggaagggtggctgacattcctggaggatttcacatttggtcagaac

SEQ ID NO: 909911 - DNA, 120 bp, Artificial Sequence
  ENSG00000247796_23 (sequence is synthesized)
gtggctgacattcctggaggatttcacatttggtcagaactggttcaggtctgggtcagaacctatcccccggggaggaggcatcaagagaacttttggcaaggcagatgctagaggaaa

SEQ ID NO: 909912 - DNA, 120 bp, Artificial Sequence
  ENSG00000247796_24 (sequence is synthesized)
aaaatacagataggggacaccacagttttaaagcttgtaaaaagtacttttatttgtatttctgtgtacttatctagttcaaccttttgaagtgaaatataaattaaaattcttagacta

SEQ ID NO: 909913 - DNA, 120 bp, Artificial Sequence
  ENSG00000247796_25 (sequence is synthesized)
attgaatcagatgacagctgaagatctacttaagaaaaaaatgtcttgagaataaatctgcagtcatcactgtgctgcatgttaacatcttctcctagactctgtgtataaacaaaagta

SEQ ID NO: 909914 - DNA, 120 bp, Artificial Sequence
  ENSG00000247796_26 (sequence is synthesized)
tacaattaatttgaagtcatcaagagtgtgtggaaaaaaatacatctatgataggtgtgccaccatgctgcttgtgtaagattttcttttccaatatctaaaataatcatttccacaaga

SEQ ID NO: 909915 - DNA, 120 bp, Artificial Sequence
  ENSG00000247796_27 (sequence is synthesized)
gggtgctagttgatatcttattcttaaaataaattgaatctcattttggaaataaaaggctcttgttacatttatatttatgtagttacaccaaatatttcaacataattcatgtagtat

SEQ ID NO: 909916 - DNA, 120 bp, Artificial Sequence
  ENSG00000247796_28 (sequence is synthesized)
acttgggaagattaccttcattgttactgtctcccaaagaaacaaaattttagatcacagaaagtcacagtttttagttgatataaaaaagaaatctctcaagcataattctagtattat

SEQ ID NO: 909917 - DNA, 69 bp, Artificial Sequence
  ENSG00000247796_29 (sequence is synthesized)
aagaaatctctcaagcataattctagtattatttatttaaaaaaataaattgggcaggtggatcatctg

SEQ ID NO: 909918 - DNA, 78 bp, Artificial Sequence
  ENSG00000247796_30 (sequence is synthesized)
atcatctgagacctgtactaaatatataaaaattagcagggcatggtggcgcatgcctgtaatcgcagctacttggga

SEQ ID NO: 909919 - DNA, 64 bp, Artificial Sequence
  ENSG00000247796_31 (sequence is synthesized)
ggtggaagttgcagtgggctgttaaaaaaaaaaatatcgtaaataaataaatgttaaaaatgca

SEQ ID NO: 909920 - DNA, 120 bp, Artificial Sequence
  ENSG00000247796_32 (sequence is synthesized)
aagtgaatttatgtcgtcagtatttttacaatttacttaaatattaaatttgagcaagattgcttcgctttaaatgacaccacaaaaatgccttgattttcctctttttgtggaaacata

SEQ ID NO: 909921 - DNA, 120 bp, Artificial Sequence
  ENSG00000247796_33 (sequence is synthesized)
tgtgtctcaaatttggcatagcctgcaaagtatcctgtgttacttttgagaaatgatcaatgaatctctgctagcataatcctagcataaacatcttagtctcacacacacacacacatc

SEQ ID NO: 909922 - DNA, 120 bp, Artificial Sequence
  ENSG00000247796_34 (sequence is synthesized)
tatacatatgtatgcatgtacatatatacacatacacacatctatacatatatatccatatacacgtatgcagatatatatatatgcatatacacaaacacatcagtgcttaagacaatt

SEQ ID NO: 909923 - DNA, 120 bp, Artificial Sequence
  ENSG00000247796_35 (sequence is synthesized)
catatacttaagtctccttcaccctccatctctcatactaggttctccatttgctatttacaaataataataggagaaatggcaggataatttgcttactgcctgggataactatcaaat

SEQ ID NO: 909924 - DNA, 120 bp, Artificial Sequence
  ENSG00000247796_36 (sequence is synthesized)
tggccacttctagaaactacaaggaaaatccttcataatttagcatggttttccacagtattgctctgtgtgcccggaggagaaagtacttagcaacaaaaatagtacttattgtgcatc

SEQ ID NO: 909925 - DNA, 120 bp, Artificial Sequence
  ENSG00000247796_37 (sequence is synthesized)
tgtgcatctccttgtgccagacattgtataataatatatgttatattattatataaattgtatattgatatggtttggctgtgcccccatgcagatctcatcttgaattgtagttctcat

SEQ ID NO: 909926 - DNA, 120 bp, Artificial Sequence
  ENSG00000247796_38 (sequence is synthesized)
tgtgttgtgggtgggacctggtggatgaatcatgggggaggttacccccaccctgctcttgtgatattgagtgagttctcatgagatctgacggtttcataagatggttttccctctttg

SEQ ID NO: 909927 - DNA, 65 bp, Artificial Sequence
  ENSG00000247796_39 (sequence is synthesized)
atgagatctgacggtttcataagatggttttccctctttgctcggcacttcttcctcctgctgcc

SEQ ID NO: 909928 - DNA, 80 bp, Artificial Sequence
  ENSG00000247796_40 (sequence is synthesized)
cctcttttccttataaattacccaatctcaggtatttcttcatagcagcatgagaacagaataatacatatattaatata

SEQ ID NO: 909929 - DNA, 120 bp, Artificial Sequence
  ENSG00000247796_41 (sequence is synthesized)
taattgtgccaggtattttatttcatccttttaacaacccaatgatttgggtattctcaatactcccattttctaattggggaaactgagtctcaagagaaattaagtacttatccaagg

SEQ ID NO: 909930 - DNA, 120 bp, Artificial Sequence
  ENSG00000247796_42 (sequence is synthesized)
tttcttgctctggtgaagcaatcatttggatccaggcctgtcttactctaaggccctacatttttaactaatcttactaatctttatgcccgtctgaaacccagaaatagctacattatg

SEQ ID NO: 909931 - DNA, 120 bp, Artificial Sequence
  ENSG00000247796_43 (sequence is synthesized)
ttaccaagcccataccttcaactcaggtcctagcatgtatctaatgccctcaatttatgtttggacacattttgatctggaaaatccatggccttctttgatggataccaaaagaggtta

SEQ ID NO: 909932 - DNA, 120 bp, Artificial Sequence
  ENSG00000247796_44 (sequence is synthesized)
gaaggaatggagtgaagttatttacaaacttcaactgaccctcagagtggcatcagctatcactgagcactgtgagacaatcagggataggcacacaacccaagtcattttccaggactt

SEQ ID NO: 909933 - DNA, 120 bp, Artificial Sequence
  ENSG00000247796_45 (sequence is synthesized)
ttgtttgcacaactgggaaagctggcttgtaatgatgtgaaacttgggggcctccgcaaggaccccacaactcttccatctactatttcttcatccagaggaaatgaagtggagctaggg

SEQ ID NO: 909934 - DNA, 120 bp, Artificial Sequence
  ENSG00000247796_46 (sequence is synthesized)
accaggagatgtcctttgaaccaggaatcaatatggcctgaagccagatcttcccatttggactttttagttaagtgatacaacatacttcctcattgccagggccattttgggtcaagt

SEQ ID NO: 909935 - DNA, 120 bp, Artificial Sequence
  ENSG00000247796_47 (sequence is synthesized)
tttctgccactcagtggtagaccccagctgattcagccagcctaaagagaagagtgtaacaagatgttgaacagggtttctccagacttggcaccaaggctcataacacagaacaacatg

SEQ ID NO: 909936 - DNA, 120 bp, Artificial Sequence
  ENSG00000247796_48 (sequence is synthesized)
tgtgaaattgtaaagcccctttttttctgaagagagcagccaatcatgagacgttcctcaagccttccatagagtctgcaaagctgagcctaccacatgtgactgttccccaattttgtc

SEQ ID NO: 909937 - DNA, 120 bp, Artificial Sequence
  ENSG00000247796_49 (sequence is synthesized)
tttatgaaaaaggaacggagagaggaaagtgtgagcctcaatggagaaactggagaatctgtaggatttggaatgagagatgattcacctcccctccccacagagagaagagatgattca

SEQ ID NO: 909938 - DNA, 120 bp, Artificial Sequence
  ENSG00000247796_50 (sequence is synthesized)
cctcctttctcctcaccaaggcaagacagaagagctcagaggctgggggcctgcaagattggcaacctcagtggaatggatggatgtcctggttaaacatctgcttaggtcatgaactgg

SEQ ID NO: 909939 - DNA, 120 bp, Artificial Sequence
  ENSG00000247796_51 (sequence is synthesized)
ctaatttgtctctacgtaaatctgaattgggggaagaagcacctaaagagaaacactaggaaggagagggttctgatctgccctaccactgtttgtggcaaagatgagtgagttgacttt

SEQ ID NO: 909940 - DNA, 120 bp, Artificial Sequence
  ENSG00000247796_52 (sequence is synthesized)
gggtcagaaaatagccaggttgtagacatcttgccctgcccacaaggtggttgcctgagtaagtgcagggattgggggagggcagtaacaagaagctttgtggtgggggcatgtgctgat

SEQ ID NO: 909941 - DNA, 120 bp, Artificial Sequence
  ENSG00000247796_53 (sequence is synthesized)
gatggtaggaagaagaggtggagttcaagctggatctcctggttaagaaactgtggagcaaaagggtctgcacagccctctgaaaaaccatacaagaaagatccaaaggagggaagagac

SEQ ID NO: 909942 - DNA, 120 bp, Artificial Sequence
  ENSG00000247796_54 (sequence is synthesized)
ttaaatcaaatttgaggttgatgctttaaaataacagagttttaatggctcagcatgactggaaatttatggaatctatcccagatagtataaagtgacaagaaacagagaatgaattag

SEQ ID NO: 909943 - DNA, 120 bp, Artificial Sequence
  ENSG00000247796_55 (sequence is synthesized)
gtatggctaaaggcagtgactggaagaaatagaatctttatatatgtatactccactgaatgggggggctgcttagtaactctaatgggatattcgagaatttatctctcatcatacaga

SEQ ID NO: 909944 - DNA, 120 bp, Artificial Sequence
  ENSG00000247796_56 (sequence is synthesized)
catctgaaaatgggccaaaagccaatagaaactttgtcatgagtggccatggcaaatctaatgtcagtatctttgtccacagtttcgttgcattgttggtcatctcataaatcctatttc

SEQ ID NO: 909945 - DNA, 120 bp, Artificial Sequence
  ENSG00000247796_57 (sequence is synthesized)
agaaggctttgctagaggagcccggggtcggggagggctaggcttaggggaaagtcagagtttatgtccaatggtttcccaggttgcactaaattggacaactaaccagaatctatttag

SEQ ID NO: 909946 - DNA, 120 bp, Artificial Sequence
  ENSG00000247796_58 (sequence is synthesized)
ttaccttacttgaacaaggttcgaacagttggctgcctttgatgggctgcaacacagtgattggtataagagtaggttacagcctgtttacacatgcagttaggttacaattcactgtgt

SEQ ID NO: 909947 - DNA, 120 bp, Artificial Sequence
  ENSG00000247796_59 (sequence is synthesized)
gttgagaaacctttaggccaaacttaaaatttgtaaggaggcagctttaggcttaacttgatttaaaagttattagatgttccatcagtcgtttcgccaataggtaataggtttttttgg

SEQ ID NO: 909948 - DNA, 120 bp, Artificial Sequence
  ENSG00000247796_60 (sequence is synthesized)
ttttgttttctgtgctattaaaatagtatataaaacttgtcatcattgattctgatttatcatgttacagttcagtctctaattgaactgagcctatttttttccgtaaaatccaaccta

SEQ ID NO: 909949 - DNA, 120 bp, Artificial Sequence
  ENSG00000247796_61 (sequence is synthesized)
ttcatccatttatacagattttttaaaatctaaatattttatatcaaattgctaaaaatgtttagtcacattctttttctattgctgcccatatattttctgccatcattttcagctgct

SEQ ID NO: 909950 - DNA, 120 bp, Artificial Sequence
  ENSG00000247796_62 (sequence is synthesized)
agatatctggttacccattatcaggaactcttcgtgaaatgctttagtgaccttgtttaagtcagtaataaagttgagatttataatcatattctattaccaaaaaaaatacaggtaata

SEQ ID NO: 909951 - DNA, 120 bp, Artificial Sequence
  ENSG00000247796_63 (sequence is synthesized)
gattttcaaatgtcagcccatgtctactcctttatttcccagtgtggcagaatttttgaacagtgaaaatatttctgtctgaggaagtttggactatgtggtgtgagatccgtagacatt

SEQ ID NO: 909952 - DNA, 120 bp, Artificial Sequence
  ENSG00000237552_0 (sequence is synthesized)
gtaatatgaaaaagttatttaaatttcatttcacgttgtccttttgaatcctcgcattaataaaatcgttttcagtggaaatatcagcagcaagaaatagaaaatactaacagcaagatt

SEQ ID NO: 909953 - DNA, 120 bp, Artificial Sequence
  ENSG00000237552_1 (sequence is synthesized)
aattttccttatggagaatttacaagtttccagatgcattatgctgaagatagccaggatccagtacaaggttggtatcccactacaaagcaagggcctgccacaaccagatgcatgttt

SEQ ID NO: 909954 - DNA, 120 bp, Artificial Sequence
  ENSG00000237552_2 (sequence is synthesized)
caacgacatcgaaagactcaccttggactcatcgctgacttgtcaaccagaactccaatatctgagtttgtcaagatctcaaaggacgtggagtgcatttgtattatcatataaagcacg

SEQ ID NO: 909955 - DNA, 120 bp, Artificial Sequence
  ENSG00000277173_0 (sequence is synthesized)
acagtaaacaaagacatgccccagggacatcagaggtctctctgcatggggattaacaggagaggaggaagccctgacatgtccaataaactcaatcatctggaagatagctcagtaggt

SEQ ID NO: 909956 - DNA, 120 bp, Artificial Sequence
  ENSG00000277173_1 (sequence is synthesized)
gtatccttgacccagcattgtgggagaagatatgtctggaatgtgtatatctgcggggagtgagaaaggaatgtcagcagtcaggatgtctgcagatggggaattagaaatctgtcttag

SEQ ID NO: 909957 - DNA, 120 bp, Artificial Sequence
  ENSG00000277173_2 (sequence is synthesized)
tgttggtgggacccagttcaaaagagacttcagaaggattgatggtttagacgggtaatctatataggacctgtttagatgaacttcagtggaatgagggatgatgtattaggataataa

SEQ ID NO: 909958 - DNA, 120 bp, Artificial Sequence
  ENSG00000277173_3 (sequence is synthesized)
ggttagctgtaacaagcaactgagctgtaacaaagccactgacacttctcactcatattctatagtccagtgagggtctaggggacaggggtagctctgctccatccattcattcaagcc

SEQ ID NO: 909959 - DNA, 120 bp, Artificial Sequence
  ENSG00000277173_4 (sequence is synthesized)
tgtcacagaatgggaagagggaatgcaggttgtatggaagatttttaaatgagcccagcctagaaatggcgcacattgcttctgccttcattccattgttcagaacctgatcccatggca

SEQ ID NO: 909960 - DNA, 120 bp, Artificial Sequence
  ENSG00000277173_5 (sequence is synthesized)
tccgtttgactgcaaggaagctgggaagtgtagttcaaatttgggaggtactgtgcccagaaagagacacacaaatgttggtgtgtgttgtggagcactagtagtttctggcgcaggcag

SEQ ID NO: 909961 - DNA, 120 bp, Artificial Sequence
  ENSG00000277173_6 (sequence is synthesized)
ggagaatggctgtgcatcttgtaggggtcgtagtagtgtctgtcctgggctgggttgggagtgtactctctgagaataccttggaaggaagctgatatgagaagatgtgtatgagtggtg

SEQ ID NO: 909962 - DNA, 120 bp, Artificial Sequence
  ENSG00000277173_7 (sequence is synthesized)
cacacccatgtgctttatggctcaacaatcattccattctttcccattctcaaggtctttcactggataagatcttaattctctcacaccttaccactgaaataaccttgtgaatgcttt

SEQ ID NO: 909963 - DNA, 120 bp, Artificial Sequence
  ENSG00000277173_8 (sequence is synthesized)
atcctctacaattttcccccatcaaatctaactggatattatagtctaactaatcttcctaagacttggcgtatgtcatgcaatccctgttcaataaaaacaataacaatttcaacagca

SEQ ID NO: 909964 - DNA, 86 bp, Artificial Sequence
  ENSG00000277170_0 (sequence is synthesized)
tgcttagccttcttttcttatgccgtgtgttttgtgctgtgtgttgtacgtacctgaattgtgctagttttgtgtcctctagaatt

SEQ ID NO: 909965 - DNA, 120 bp, Artificial Sequence
  ENSG00000277170_1 (sequence is synthesized)
tacgtacctgaattgtgctagttttgtgtcctctagaatttgtgcaaatggtatttaagctatctataaatttataaagattaattaaagggccctgacaagataatttataccaactaa

SEQ ID NO: 909966 - DNA, 120 bp, Artificial Sequence
  ENSG00000267904_0 (sequence is synthesized)
gagctgctgcaactggcctctttctcttgatagttagacgaaagacccctctcaggctccctgagactcctcagaacagcagaacagcagcagtgcgatgttggataatgagatctgctc

SEQ ID NO: 909967 - DNA, 120 bp, Artificial Sequence
  ENSG00000267904_1 (sequence is synthesized)
tcttctgaagtggttagatttgaaaagccagcgaagctgtcattagcaaggcattttcttttcatttcaaccatttcattatatcctttaccaaatttgagtttatgaaatatttgacag

SEQ ID NO: 909968 - DNA, 86 bp, Artificial Sequence
  ENSG00000267904_2 (sequence is synthesized)
gaaagacggatgctgtttgtgtaaaaggaaaaggcatgctataaaaagaaaaagaaggataaaaagggccgggcatgctgctaaaa

SEQ ID NO: 909969 - DNA, 120 bp, Artificial Sequence
  ENSG00000237087_0 (sequence is synthesized)
accccggggagagctgatcccggacaggggttccgaggaggtaaaggaagctccctggtgaagtcccgggatgcgactggatccggagtcccctaccgcagcccgcgcacgaccctcgga

SEQ ID NO: 909970 - DNA, 120 bp, Artificial Sequence
  ENSG00000237087_1 (sequence is synthesized)
agcctgtctccgcggcccccgacccaggtccccgctgccgccgcgctgccaggtagccagagggtcgcaggaggaaggaagggagcgcgggacgggcggaggagggtggagccaccggcg

SEQ ID NO: 909971 - DNA, 120 bp, Artificial Sequence
  ENSG00000237087_2 (sequence is synthesized)
ttcgctcctgctcaggcagcggcttcggcccgacccgctccgcctctgccaggctccggcgcgcacctgccgggtaggtggcgcctgagtccctgcagccgcggccacttccgtcacctt

SEQ ID NO: 909972 - DNA, 120 bp, Artificial Sequence
  ENSG00000237087_3 (sequence is synthesized)
cgtagccgctgcgcggagcctcccggctttgtttgcgtccatccgccggctgcgactcccaggctcggctctgaggctccatggactgcgcgccgcgcctgcatggctctgggctcgccc

SEQ ID NO: 909973 - DNA, 120 bp, Artificial Sequence
  ENSG00000237080_0 (sequence is synthesized)
agggttccttgtgggcactgaggagggagagccgagggctgggcaggagtctgggaaggagcgggtggggtccactttccccaggtgcgctggactctgtccctccatggctcatggaca

SEQ ID NO: 909974 - DNA, 120 bp, Artificial Sequence
  ENSG00000237080_1 (sequence is synthesized)
atgattgacctgaagccgctccaggaagtctactcgggagtcctcactgcctgctcccctatggccctaagggactcaagcctctcctcgagaaggtccctcataggggttccttcccct

SEQ ID NO: 909975 - DNA, 120 bp, Artificial Sequence
  ENSG00000237080_2 (sequence is synthesized)
tcagaccagaagaccaggggggcctccgcagaagcggtcgccatagtcaaacctgtcagaggaaaacaggagcttgtgggacctggacccagccaccaagagcccaccccgaagaccctg

SEQ ID NO: 909976 - DNA, 120 bp, Artificial Sequence
  ENSG00000237080_3 (sequence is synthesized)
tggatcctgctccctgagagggacccgacacccaacctatcttctccagatgggatctgagccccttgtatgttctatggactttcagcatcagcattgcctggggactttttagaaatg

SEQ ID NO: 909977 - DNA, 120 bp, Artificial Sequence
  ENSG00000237080_4 (sequence is synthesized)
cagaatcctgggccccatcccaagcctactgattcaaaatctctctgggaggcacaggactgtttccccaagtcctccaggaaatacttatgtacactgaaatctgagaagctctgcact

SEQ ID NO: 909978 - DNA, 120 bp, Artificial Sequence
  ENSG00000237080_5 (sequence is synthesized)
actccatgcctggacaccaggtacatgccagccttcaggtcccaggtttgctgcatctcccaccccctggcagagcccctagagacccctagagtctcaccctagctcctccccagtccg

SEQ ID NO: 909979 - DNA, 120 bp, Artificial Sequence
  ENSG00000237080_6 (sequence is synthesized)
gatgtctcgggaactgaagaaggcgatgcgtggaaatcgcaggtcttggtgcagcatgaagacccggacgggaatgatgttggggtcacacagcctcagcatcagagatcagctccccga

SEQ ID NO: 909980 - DNA, 120 bp, Artificial Sequence
  ENSG00000237080_7 (sequence is synthesized)
catacctgtgggacaggaatccatggttctgaaggagccacccggcaggaatgggcgatatggaacaggagaggggccaggactgcaggaagagccagaggtacaggagtggcaaggaac

SEQ ID NO: 909981 - DNA, 120 bp, Artificial Sequence
  ENSG00000237080_8 (sequence is synthesized)
tcaaggcatgattcggggcaagagcacccacacatatctggacaccagagggaggagaggagccagctatctaaggagggtgttaaggtgctcccggtgacttactcgcagatgaaggtc

SEQ ID NO: 909982 - DNA, 120 bp, Artificial Sequence
  ENSG00000237080_9 (sequence is synthesized)
ccctgtgggatggtctgcagggcgcggaccccccagcccatcttggctgttcggtagagctgtagccgcaccctgggggtaggagagatggcgctgttgggtggaggccctggaaaagcc

SEQ ID NO: 909983 - DNA, 120 bp, Artificial Sequence
  ENSG00000237080_10 (sequence is synthesized)
gggcctcacttgatgccactctgtacgacccggttcttgcagtttctccagcatgagcacgcctggttacactcgaaaatcagcggaggctcaatcttgttaaattcctggagcaatcgc

SEQ ID NO: 909984 - DNA, 120 bp, Artificial Sequence
  ENSG00000237080_11 (sequence is synthesized)
ccatcctagggtgcggaggggaggatagtggtttctctgtggggcccacctcagctgcccacccaggaaccccaagactctacagagacagggaagttggggttggggaggtcacacagg

SEQ ID NO: 909985 - DNA, 120 bp, Artificial Sequence
  ENSG00000237080_12 (sequence is synthesized)
ctctgagatccgagagcacgaaatgcaggagcatcatccctggtttgcatagacctgggcacacgcccatcgctgtcccagccacatcccaggattcccaggccttgcccagtcctctca

SEQ ID NO: 909986 - DNA, 120 bp, Artificial Sequence
  ENSG00000237080_13 (sequence is synthesized)
gtcacttcccccacagggtaggaggtgagggacatggtcccagggagctggtttattggaggctggctcctctgaaggaggggccgggtgtctgtggccaaggcaaggggcacgcacctt

SEQ ID NO: 909987 - DNA, 120 bp, Artificial Sequence
  ENSG00000237080_14 (sequence is synthesized)
gtcataccagcaccggatgctgagctggccgcacaggcagttggagctagagcagtcgtccacacacgtgcagtgctggggcgaggaggcagaggtcagctcaaccccatgatcggtctg

SEQ ID NO: 909988 - DNA, 120 bp, Artificial Sequence
  ENSG00000237080_15 (sequence is synthesized)
ggcccctctactcttgatgccccctgaccccctaaccactgtcctttctttggggtccatgtgttacaacagtgggtggtgatggtcctagggtgacgggtaatcagtatggtggtgtcc

SEQ ID NO: 909989 - DNA, 120 bp, Artificial Sequence
  ENSG00000237080_16 (sequence is synthesized)
ccagggctactgggagctcatatgataccttgctgtgacctaggaaaaggatccctcccctggtggggatgcgaccccacaccagggctccctttcagccaacccttccttggccaggtg

SEQ ID NO: 909990 - DNA, 120 bp, Artificial Sequence
  ENSG00000237080_17 (sequence is synthesized)
cctttgctggtttgaagcttgtccaactgtacttggcagctctcggtgtccttttggggaggccccgggccccctactcacctgcaggtgggtgatgttgcgatcgatgttcatggtgga

SEQ ID NO: 909991 - DNA, 120 bp, Artificial Sequence
  ENSG00000237080_18 (sequence is synthesized)
cgtctcgcagttctctgagatgtacttgtaatcctcagggcagggctccccatccacaccgttgacacagggaatgggcacgttctcatagccccgagccacgtccctgcagaagacggg

SEQ ID NO: 909992 - DNA, 120 bp, Artificial Sequence
  ENSG00000237080_19 (sequence is synthesized)
aagaaggggctgggaagctggaaaagggggtgaggagctactccaggtataaggaagagagttggggaggttcctggggctgggggcaggggagtaaggttgccaggtaagatgcaggac

SEQ ID NO: 909993 - DNA, 120 bp, Artificial Sequence
  ENSG00000237080_20 (sequence is synthesized)
agcgagttaacatagaattttagataaacaagaaatagctttttagtatgtcccaaaaattacacaggacattctcacactaaaaaagtatgcatctgtgcatctgaaattccagtttaa

SEQ ID NO: 909994 - DNA, 120 bp, Artificial Sequence
  ENSG00000285841_0 (sequence is synthesized)
gcagtatgagaggcccagacccgttgagccctgaaggtcattctggctctcaaagaccttcaaggcggcaaatgccgcagaaccagggacccctgcggcacagcagacaaactcctggga

SEQ ID NO: 909995 - DNA, 120 bp, Artificial Sequence
  ENSG00000285841_1 (sequence is synthesized)
ggggaggcacgcaagaagactgggaacaacttgggatgcccaacagggtctccctatgtcgcttgggctggagtgcagtggcatgatcccagctccctgcagcctcaacctcctgggctc

SEQ ID NO: 909996 - DNA, 80 bp, Artificial Sequence
  ENSG00000285841_2 (sequence is synthesized)
gcatgatcccagctccctgcagcctcaacctcctgggctcaagtggtctcatcaccaagtgtggataatttttttgtatt

SEQ ID NO: 909997 - DNA, 120 bp, Artificial Sequence
  ENSG00000285841_3 (sequence is synthesized)
aaattcttagtaactgctctacacttctgtggattccttctgtagattctcctggagtatatttgcagccaaatttctatggatactaagggactagaatcaggatgattagataaaaac

SEQ ID NO: 909998 - DNA, 120 bp, Artificial Sequence
  ENSG00000285841_4 (sequence is synthesized)
aagtaggtgtccaggggtcagcagtggaggactgcccagtgtctggacaaggcaattggaaacaggagtgagagggtcacattgcaggtgaagaggcggcagggtactgagggtagacaa

SEQ ID NO: 909999 - DNA, 120 bp, Artificial Sequence
  ENSG00000285841_5 (sequence is synthesized)
agagaagctgtgagatcatgaaaggtcaaagggatcataggtggtcacagagttcatggggaacacatagttaaaacatagaacaagaactttaaagcaggcttgtatgctggaagacat

SEQ ID NO: 910000 - DNA, 120 bp, Artificial Sequence
  ENSG00000285841_6 (sequence is synthesized)
tcagagtagtgaggcaaaagaggatttggggtgagatatagctgaggagaaaaaatatatataaaaagaactgtttatgtcattcctctattctgtatcttagtagagtctgagaatatg

SEQ ID NO: 910001 - DNA, 120 bp, Artificial Sequence
  ENSG00000285841_7 (sequence is synthesized)
taaactaatatagcatagatgcaaaatggaaaatgacagaacttgctcaaaataccatagatccacatgaacactggtgttgggagaaaatgatatctatgtcagggactgtatccctgg

SEQ ID NO: 910002 - DNA, 120 bp, Artificial Sequence
  ENSG00000285841_8 (sequence is synthesized)
gtcggagataccacacaggttattattctacacaggggctatgatttggctggtgttctcatgcattgtggaagatgaggcattttataatgtaacttactatccccaaaataagttaga

SEQ ID NO: 910003 - DNA, 120 bp, Artificial Sequence
  ENSG00000285841_9 (sequence is synthesized)
tattattgccccaatcctatagatcaggaaactgaggttcaaaaacctgtagataactgatccaaggccacattgccagtgactggcagagctgggcttcaaacccagattccactccca

SEQ ID NO: 910004 - DNA, 120 bp, Artificial Sequence
  ENSG00000285841_10 (sequence is synthesized)
agccaccacacaggagagggtcttcgtgatattaggttcacataccaaggatgtggggaggccatatctgaatcaaacccttttaggcccaaagcctaatttcttgccatgacactaaat

SEQ ID NO: 910005 - DNA, 120 bp, Artificial Sequence
  ENSG00000285841_11 (sequence is synthesized)
ctctgtagacaagcaccaagaccagcaacaggcgggggtgaagaagctgtcacggaggtgacgcattctttccagtcttttcagggtttcatggaaggtgcagagggcacggctgtgatt

SEQ ID NO: 910006 - DNA, 120 bp, Artificial Sequence
  ENSG00000285841_12 (sequence is synthesized)
gttaggggaaaaaccccttaccaaactctgtggaatcattctcaacacaaaagcaaaatcctcaagaaacccaactgcacgtcatcaggacctcaagtgacagagcttgccactgattca

SEQ ID NO: 910007 - DNA, 120 bp, Artificial Sequence
  ENSG00000285841_13 (sequence is synthesized)
ctgaggaaaaaaaaaaaaagaggagtttcccttgaatgtgtccagtcttttgaaggtaaaaagaacataaataatggagggtaaacatcaaagaatgaagctgtccctttgtctaaagaa

SEQ ID NO: 910008 - DNA, 120 bp, Artificial Sequence
  ENSG00000285841_14 (sequence is synthesized)
gtaaccttgaaattcacttgtctagttggcctacccaatattctccatgccccaaacacggctccctgaaggaaagcaagggtatgatctgtgataaccacaagcataaacaaccaggag

SEQ ID NO: 910009 - DNA, 120 bp, Artificial Sequence
  ENSG00000285841_15 (sequence is synthesized)
gaataaagttgcagttttcttgagattatgagaacatctttgcaagagatttctaacaatgtcgtctctctttggacctttctctttctctttggagcagctgctggtatacccactaag

SEQ ID NO: 910010 - DNA, 120 bp, Artificial Sequence
  ENSG00000285841_16 (sequence is synthesized)
tcatgggaggggatggtttccatgaagagcactgagctctgatctcatggtgtccagaagatagaaatcttcccctgctcctgacgtcttagccacatgccatgcctccttctttcctgg

SEQ ID NO: 910011 - DNA, 120 bp, Artificial Sequence
  ENSG00000285841_17 (sequence is synthesized)
aagtcctctggctccttccttcctctttgatctctccctaatttgaacaactgctacactttgtactcttggttgaaagcatggattctgtcgttattttgcttctattagttttctttc

SEQ ID NO: 910012 - DNA, 120 bp, Artificial Sequence
  ENSG00000285841_18 (sequence is synthesized)
tcctggtttcaagtgctttatatttcctgtgacttcccctcgatgctgagtaaatagttgtctctcagtaaatacactgctgattcagtgacagattaagaatttaagagttcttggttt

SEQ ID NO: 910013 - DNA, 120 bp, Artificial Sequence
  ENSG00000285841_19 (sequence is synthesized)
cacagtaagctaaagacagagctgccctggagaagaaaaacacccctcccatttcgccccaggagggctgcctccttccccagaagcaagttctctttaccaaagaggagaggaagagcc

SEQ ID NO: 910014 - DNA, 120 bp, Artificial Sequence
  ENSG00000285841_20 (sequence is synthesized)
ccgcagaagaaaatgagttatcatacatactgtgaattcccagcatctaaatgtgccacaaaagcacaggctaagattgctgcaactggtgcattatttactttaagtaacaaggcttgg

SEQ ID NO: 910015 - DNA, 120 bp, Artificial Sequence
  ENSG00000285841_21 (sequence is synthesized)
agatggtgaatgcagaacctgtggttgcttggtaatgactactctgtctttttttcagttatgttgaaggttggcaagagtatatgacagatgaaagccccattagaacctacatctagt

SEQ ID NO: 910016 - DNA, 120 bp, Artificial Sequence
  ENSG00000285841_22 (sequence is synthesized)
ttgcctctgagtagggattcattcttgagtcttctaaatccacccaccaagagttagattatggctcccagggacctagagagatgctgctgtccactgagccagatttgatcttttctc

SEQ ID NO: 910017 - DNA, 120 bp, Artificial Sequence
  ENSG00000285841_23 (sequence is synthesized)
tcctgctcaaaacctccagagactcccttttagctactggatagagtcaaaggcctgccatgtgcgatccttggttactgtattccggtttggaaaaagaaacccaaccataatagacat

SEQ ID NO: 910018 - DNA, 120 bp, Artificial Sequence
  ENSG00000285841_24 (sequence is synthesized)
ttgggggacatttgtgcacattaaaaaatgaatgaggcatgggtgatgttagggaatcatagttcactttgttggatgtgatcatggcaatgtggctatgtaggtatgctgatgtatgca

SEQ ID NO: 910019 - DNA, 120 bp, Artificial Sequence
  ENSG00000285841_25 (sequence is synthesized)
gggatgaagggtcctgaagcctgcaatttacactgaagtggatgactgaaaatcaaactttttgataggtaggcagagaggaagagagaaagatgatgttaatatggcaaaatattagca

SEQ ID NO: 910020 - DNA, 120 bp, Artificial Sequence
  ENSG00000285841_26 (sequence is synthesized)
cttgttagatttggataatggatttctctgttcacttcagaagcatagaaggataaattttcttttaagcaaataagtatcagaattttgtgcatgatatggaattgagtgttaaaggtc

SEQ ID NO: 910021 - DNA, 120 bp, Artificial Sequence
  ENSG00000285841_27 (sequence is synthesized)
agaactaggatattataatctttgtctctctatctcatactatatgtaagatcatcaatcaaattgcattctagggttaggtagtttgagacttgttttgttttgaatctgagtgatcag

SEQ ID NO: 910022 - DNA, 120 bp, Artificial Sequence
  ENSG00000285840_0 (sequence is synthesized)
gaggcgggagaggcagaggcagaggcagcagctgctacgggaaagcagagctctatggtgtatgtgtgcatgtgtctaacccaagccagccccacaccggagcggccgccggagcgaaaa

SEQ ID NO: 910023 - DNA, 120 bp, Artificial Sequence
  ENSG00000285840_1 (sequence is synthesized)
agcgaaaagggcctgacttttccacaagtgtctccaactcctcaggcaaaagagacacccacaggttatggctgtattgcccaggctggagtgcagtgcagtggcatgatcacggctcac

SEQ ID NO: 910024 - DNA, 89 bp, Artificial Sequence
  ENSG00000285840_2 (sequence is synthesized)
gtggcatgatcacggctcactgcagccttgactttctgggactgaagccatcctcccacctcagcttcctgggaagccaggactaccaa

SEQ ID NO: 910025 - DNA, 120 bp, Artificial Sequence
  ENSG00000285840_3 (sequence is synthesized)
agctggaactacaggagaccactgcactcagctagggattttttgatggagaaaaaaaaaacacacagatgagattagaagaagatctgctacagcaacagaaaaagagaatgccaagaa

SEQ ID NO: 910026 - DNA, 120 bp, Artificial Sequence
  ENSG00000285840_4 (sequence is synthesized)
ggggaagagtgaaggctggagagcggaagccaatgccaaaacattccgaagctacccaacatctaagaaaggtggcctgagggagattgcaagcactaaccgctaaacgctaaatgaagg

SEQ ID NO: 910027 - DNA, 120 bp, Artificial Sequence
  ENSG00000285840_5 (sequence is synthesized)
gttagatcttatctatgtccagaaggagtaataagaaagaatgcgtatctccaaaagctgaaagatttggacaggacccaaggcggaggcctggcatttttctaaattgagatgccaatc

SEQ ID NO: 910028 - DNA, 120 bp, Artificial Sequence
  ENSG00000285840_6 (sequence is synthesized)
agattcaaggatgaagactggctcccccggtggggcaaaatcagtggatgggacacaacacatctgccatcatgatgaaaacagtaaacctctactgaggctccactcttgaagcgtgcc

SEQ ID NO: 910029 - DNA, 120 bp, Artificial Sequence
  ENSG00000285840_7 (sequence is synthesized)
tctgtcagaccctagttatccaaggctggtgctcaagggaaaaaggacgcagtcttggaaggccaggaagcttctgtcttactcattagcctgatatgccagctccatgtaggtattctt

SEQ ID NO: 910030 - DNA, 120 bp, Artificial Sequence
  ENSG00000285840_8 (sequence is synthesized)
gcctgatatgccagctccatgtaggtattcttaagtctttcttttttttttcttttgaaatggagtcttgctctgtcaccagtgcagtggtgcctcttggctcaccacaacctccgcctc

SEQ ID NO: 910031 - DNA, 120 bp, Artificial Sequence
  ENSG00000285840_9 (sequence is synthesized)
gcctgcctcgaggtattcttagtcttaaatgtgctactgtagacacatattattgtcacataggttaatatttctcttggagaaagaactgaggcaggacacctgaaggtactctttcag

SEQ ID NO: 910032 - DNA, 120 bp, Artificial Sequence
  ENSG00000285840_10 (sequence is synthesized)
gcaacattttcacttaggaaagttctaaattgagtttgtatcattccgtgtccctcctcctctccctttctcttttctcttcccttctctcattgtccgaaagattaaataaaacaaaaa

SEQ ID NO: 910033 - DNA, 120 bp, Artificial Sequence
  ENSG00000285849_0 (sequence is synthesized)
accatggagtctgatgctgttaaagaacagtgcatggaagtggcagatctccaaccctggttggagttccactcaaaggcaacatgaaacaggccatggccaatgttatctatattgtca

SEQ ID NO: 910034 - DNA, 120 bp, Artificial Sequence
  ENSG00000285849_1 (sequence is synthesized)
tgtcctctactcaataaccaacagaattactagaatataaggggcagggcaaaaaatgaagggatggagaaagttcccaaagaccagattgaaaaataccatccctattgcagaagcaat

SEQ ID NO: 910035 - DNA, 120 bp, Artificial Sequence
  ENSG00000285849_2 (sequence is synthesized)
tctccctttactacaaacaaagtctacagacattgactatactattctgatgtcccatgtgtggagaagtaatcgagggtgttgacaaccaggggacaagaaaacaagatagaccagtga

SEQ ID NO: 910036 - DNA, 120 bp, Artificial Sequence
  ENSG00000285849_3 (sequence is synthesized)
gacagatacatatcagggttatagatcatgatcctgagggtcaagatcatcaagacagctccgagaagatggcaataaagaggatgagggaaattaggtagactaggcccagggctagtg

SEQ ID NO: 910037 - DNA, 120 bp, Artificial Sequence
  ENSG00000285849_4 (sequence is synthesized)
gccaaactcaacataggtactgtcacaatatcactagctgtaaagatatctacaaaactatacgacatttttataaagacaaaagcagccaactcaccagctaagaataaatctattcta

SEQ ID NO: 910038 - DNA, 120 bp, Artificial Sequence
  ENSG00000285849_5 (sequence is synthesized)
gatgctgataaagatagacttgagggctgatttaccaagactatcatcatcaggtcaaattccagcaataaaaagtaaccaaaagaatggagctaaatatctcaagtgcttgccttctgt

SEQ ID NO: 910039 - DNA, 120 bp, Artificial Sequence
  ENSG00000285849_6 (sequence is synthesized)
aagtacatctacacttcagacataaaatcctctcttatcaggctgacagtcggagttaatgatattcatctgctggcatccatgacttacctgcacaggtacctactggaatgcttggct

SEQ ID NO: 910040 - DNA, 120 bp, Artificial Sequence
  ENSG00000285849_7 (sequence is synthesized)
ccatgatccatggctctgtcccttgctctaactgggaaatcacatcaggtttagaaacttggagtcctgttcattagggaaaaaaagaaagaaacctgcagtaaggggaaagtaccatat

SEQ ID NO: 910041 - DNA, 120 bp, Artificial Sequence
  ENSG00000285849_8 (sequence is synthesized)
cagaattcaatcaccactttgtctttagaagaaatgatatgtagtaaaaacctgatgggagtggatagcatatcaagctttagtgttaccagttcccagacatggtgggagtataatttg

SEQ ID NO: 910042 - DNA, 120 bp, Artificial Sequence
  ENSG00000285849_9 (sequence is synthesized)
ggaactgatcggggttcaggaaaattattattttgtccctctgcttgctaggatggtagaaaccttttcaaaaactagaaatttagaaatggttggttactaaacttaaaggcaaactcc

SEQ ID NO: 910043 - DNA, 120 bp, Artificial Sequence
  ENSG00000285849_10 (sequence is synthesized)
cctgagcacaagagagaaccctcctcctgcacaccccttgatattaactcagagaaattatccttacctatagagaccaggtgtgtataattttccaatgtcacatccctgaacaaatct

SEQ ID NO: 910044 - DNA, 120 bp, Artificial Sequence
  ENSG00000285849_11 (sequence is synthesized)
ctctggccagggtccagctgtttccattcttcctgggtaaagtccactatcacatccttgaaagtcaccgcttcctgaaataccaaacatatttctgcttagccataagcatttacttag

SEQ ID NO: 910045 - DNA, 120 bp, Artificial Sequence
  ENSG00000285849_12 (sequence is synthesized)
gaaaggggtaaagttagcaatactgacagaagtaaggcagtctataggatgtctgcaaaataatcttgacattttctcctttatgaaataaatgtaaaaacagtgcctcatccattgggt

SEQ ID NO: 910046 - DNA, 120 bp, Artificial Sequence
  ENSG00000285848_0 (sequence is synthesized)
atgccctcaatcagcatccaatatgtgggattgtttctcccatagccaatattcacgagttcaggaattaaggggtggaagtggaaatggcatcactcaccctcacccctagtgacccac

SEQ ID NO: 910047 - DNA, 67 bp, Artificial Sequence
  ENSG00000285848_1 (sequence is synthesized)
tagcagcaatcccattaaactggaagttaaggttgccacctggacactttgggctcctcctcccctt

SEQ ID NO: 910048 - DNA, 77 bp, Artificial Sequence
  ENSG00000285848_2 (sequence is synthesized)
ccaccaggagacatagcagcaatcccattaaactggaagttaaggttgccacctggacactttgggctcctcctccc

SEQ ID NO: 910049 - DNA, 120 bp, Artificial Sequence
  ENSG00000285848_3 (sequence is synthesized)
tccacagtggaggtacgttggagaaaaactatccagcccatgaagcccgtatttcacagatattgttgtctaagacaaaacctgatgaagacgctaaacttgataaggggcacaagtgct

SEQ ID NO: 910050 - DNA, 120 bp, Artificial Sequence
  ENSG00000285848_4 (sequence is synthesized)
gagcccggcacacggcagtggggtcctgcggcagccggagaggaacttgtggctcttacctgccccagtgagcgcccaggttctgcccgatggacaccagcagactggtgggcccgtgct

SEQ ID NO: 910051 - DNA, 120 bp, Artificial Sequence
  ENSG00000285848_5 (sequence is synthesized)
tgactggcccacgctgcagcagacttctccagttcgtcatcccaggtctgcaggagaaggagaaacgggcaccaggagcgggcccttatctccatttcacaggcaagcaaaccaaggctt

SEQ ID NO: 910052 - DNA, 120 bp, Artificial Sequence
  ENSG00000285848_6 (sequence is synthesized)
gaagaagcaatgccattttccctgggtcccacagccagtcacagaaccaggatctgaacccaggtcttcaggaccttggaccctgagctgtctccatgtacgcagttatgtgtggaccac

SEQ ID NO: 910053 - DNA, 120 bp, Artificial Sequence
  ENSG00000285848_7 (sequence is synthesized)
agcaggtggcatccgcgaagatgagtcgagagctggctgcggaacctccatagcactctgcaggtgaaaatcccaggagtccttgggatctgcaagtgaaaaagaccgaatctgccctcg

SEQ ID NO: 910054 - DNA, 120 bp, Artificial Sequence
  ENSG00000285848_8 (sequence is synthesized)
ggactgggaggagacagagagtaaacaaacgggcagcggacagatcctttgtatggcaaccctgtaggctcctcaccggcccaagttggctttggggagacccagcccagcccagacgct

SEQ ID NO: 910055 - DNA, 120 bp, Artificial Sequence
  ENSG00000285848_9 (sequence is synthesized)
ccaaggaccccattggcagagctgcaaccagagaccactgctctgcaagccacgattgctgtccgggcagtctcacccacggggcagactgaatccttagcttgctggtttgtgtcatca

SEQ ID NO: 910056 - DNA, 120 bp, Artificial Sequence
  ENSG00000285848_10 (sequence is synthesized)
tccggcatcaggctcagttcaaatcccagctcctccacttccaagttgttggccttgagcaagtcacttaatgtcgctgcgttccatgccccatctgtgaaatgaatgtggtaataatgg

SEQ ID NO: 910057 - DNA, 120 bp, Artificial Sequence
  ENSG00000249425_0 (sequence is synthesized)
aaaattgagttagacaagttaagtaactgctcagagctttatatacactaaatatcagaattaggctttatctcagaactctttgactccaagatacaggaaattaagaactattatact

SEQ ID NO: 910058 - DNA, 120 bp, Artificial Sequence
  ENSG00000249425_1 (sequence is synthesized)
ttctctatttctaaatgtaatacaattcacacattttaaatatcttaagtgtcaatatctgccgtacattaaaacaagctacatcagagaaagtttattgtctttttaagtattatttgg

SEQ ID NO: 910059 - DNA, 120 bp, Artificial Sequence
  ENSG00000249425_2 (sequence is synthesized)
aaaaaaatcttaactatgtacatatatatttaaaactacctagaatatattttcaacaatagaaaatcaaatgaagtaataaatgctgtggtccgaatatctgtgtcctcttcagatttt

SEQ ID NO: 910060 - DNA, 120 bp, Artificial Sequence
  ENSG00000249425_3 (sequence is synthesized)
tatgttgcaatcttaaccttaagttaatggcattaagaggtaagtcctgtgggaggtgatacactgatggggacatcccattaagtaaccagtgggctaaggcagctcatttgccatttc

SEQ ID NO: 910061 - DNA, 120 bp, Artificial Sequence
  ENSG00000249425_4 (sequence is synthesized)
tacagtgtgagaatgcagcaacaaggtgccagctatgaagcaaagagcccttaccagacaatgaatctactgacaacttgatcttggactcttcagcttcccaaactggttaccaactat

SEQ ID NO: 910062 - DNA, 120 bp, Artificial Sequence
  ENSG00000249425_5 (sequence is synthesized)
attcacagagccagctgaatagaataccagagttttatttctacacaaatcagtctcccagccatggtccaggcttgagggtggagccctcacgagagacctcaccattttctacctagt

SEQ ID NO: 910063 - DNA, 120 bp, Artificial Sequence
  ENSG00000249425_6 (sequence is synthesized)
atttccctgtctcctgtctatatcgcagagcattaaattgaagccaagggactgaaataagaaactccagagaacaacaagaggaactgaaattgcatggtcattagaaggcatcttaag

SEQ ID NO: 910064 - DNA, 120 bp, Artificial Sequence
  ENSG00000249425_7 (sequence is synthesized)
aataactgtgtagcagagaatgaggactcatatcaaagtttgattcttttagtattggattttatgtaagtaaaatttttagtatagtcaaacaaatattatcgtcaatatattaatgtt

SEQ ID NO: 910065 - DNA, 120 bp, Artificial Sequence
  ENSG00000249425_8 (sequence is synthesized)
tgttcatatttacattttcatcatgatgcagaagatgaaaacactaaacagactatttgctaatgctgaaaatctttagtatttaggtaagagttatattatacataaaataaaaataat

SEQ ID NO: 910066 - DNA, 120 bp, Artificial Sequence
  ENSG00000249425_9 (sequence is synthesized)
actaagcataactgaaacgtgctttttaagaccttggttttgtttaaatctaaaaatcaaatacaaatgtaatataaagttcagtgtgtaactatgacaaaaaatattttgagtttagga

SEQ ID NO: 910067 - DNA, 120 bp, Artificial Sequence
  ENSG00000249425_10 (sequence is synthesized)
aataagctgtagtatctggaatttcaagaggtatatataatacattatgagaaggagtactttaaaggtcaaaagaagggaaaataataatttaaagctcaataaatgaattcaaatcca

SEQ ID NO: 910068 - DNA, 120 bp, Artificial Sequence
  ENSG00000249426_0 (sequence is synthesized)
cttctatatagtagacactcaaaatgcttattaaactgcatttacattcagcagagataaacagagtggaaagctgccatagcattacctgtggaaatgaatgaaagcctgtgattcgga

SEQ ID NO: 910069 - DNA, 120 bp, Artificial Sequence
  ENSG00000249426_1 (sequence is synthesized)
tcctaatgggagaaaagtgccatggcagaaggagattctgttgagaagataaatgccctctgactatgtcttcttcaatcctcaaaaatattgccattatgtttgagagcagttgataaa

SEQ ID NO: 910070 - DNA, 120 bp, Artificial Sequence
  ENSG00000249426_2 (sequence is synthesized)
gagtgctggagaaggagtcagttgaccttcacgactgtccaattctgcaatgagcaagctgtgtcactttgggcaaatcatgggttctctgtttctctgtttcatctataaagtgaggca

SEQ ID NO: 910071 - DNA, 120 bp, Artificial Sequence
  ENSG00000249426_3 (sequence is synthesized)
ggcaatgaaatattatgatcttaaattatttctttacagttatatgacattaatcaattcctgacttccttcttccattggtcataaatatgtgtatgtatgtataatatattcatagat

SEQ ID NO: 910072 - DNA, 120 bp, Artificial Sequence
  ENSG00000249429_0 (sequence is synthesized)
gaattttgctcttaactgccatagaatgagtatgtgcatgcatatgcgtgtggaagacagacttttatcattgattttttttaaataggaaaactaaacaacaactaaaaactttctttc

SEQ ID NO: 910073 - DNA, 83 bp, Artificial Sequence
  ENSG00000249429_1 (sequence is synthesized)
ctcggcctcccaagctaaaaactttcttagtgagaaagagataaatggaggaggaaagcaagataaagaggtttgggatcttt

SEQ ID NO: 910074 - DNA, 120 bp, Artificial Sequence
  ENSG00000249429_2 (sequence is synthesized)
aatggaggaggaaagcaagataaagaggtttgggatcttttctgggattttgctgaacagggcgtggtgacactggaggagtcagcagattcggtagcagaagaaaggcaagaagaaaga

SEQ ID NO: 910075 - DNA, 120 bp, Artificial Sequence
  ENSG00000241657_0 (sequence is synthesized)
ctttgctgttgctcacagtgaccctgattgggcaaagctcccatccttccctgaccctgccatgggcaccaggctcctctgctgggcggccctctgtctcctgggagcagaactcacaga

SEQ ID NO: 910076 - DNA, 120 bp, Artificial Sequence
  ENSG00000241657_1 (sequence is synthesized)
gagtgtggctttttggtgcaatcctatatctggccatgctaccctttactggtaccagcagatcctgggacagggcccaaagcttctgattcagtttcagaataacggtgtagtggatga

SEQ ID NO: 910077 - DNA, 120 bp, Artificial Sequence
  ENSG00000241657_2 (sequence is synthesized)
ttcacagttgcctaaggatcgattttctgcagagaggctcaaaggagtagactccactctcaagatccaacctgcaaagcttgaggactcggccgtgtatctctgtgccagcagcttaga

SEQ ID NO: 910078 - DNA, 120 bp, Artificial Sequence
  ENSG00000245937_0 (sequence is synthesized)
gcgaggtgcgttccccagcctggtttgctctgggctctgacccgccgccgcgaatctccgctcgtaactccgggcctgaacctggaggagggaggatttcctctgtgcagctttcgagcg

SEQ ID NO: 910079 - DNA, 120 bp, Artificial Sequence
  ENSG00000245937_1 (sequence is synthesized)
gtagactcaccctgccaggcagacctagattggcataaccagagatcagttccagttgtgatgcagtgggtgtctacacacttctgatgacacctttattttaaaagctgatgttccaag

SEQ ID NO: 910080 - DNA, 120 bp, Artificial Sequence
  ENSG00000245937_2 (sequence is synthesized)
ttttaaactttgactttatggagacgaacaccatcgtttgctgaacacttgaaacatgatgaaagagccacagagttggcagaactgtttgaaaatgctgtgcaagcggtcttctctgtc

SEQ ID NO: 910081 - DNA, 120 bp, Artificial Sequence
  ENSG00000245937_3 (sequence is synthesized)
ttctttatggccagtaaaattctccagaagagatttatggcagcctcactcccagtagtttctgcatttagtgagataaggaatggattttcttctgtgtattgctgacacgaacaggag

SEQ ID NO: 910082 - DNA, 120 bp, Artificial Sequence
  ENSG00000245937_4 (sequence is synthesized)
acggaaatactgagtagaagagggcggttccctggctaaggccccaccctcaagcctggatacccgcggccctaaatgagaagaggcgtttctgtttggggcccaaaaagttgctttttg

SEQ ID NO: 910083 - DNA, 120 bp, Artificial Sequence
  ENSG00000245937_5 (sequence is synthesized)
ccccaacctccagagcataccagcaggtgaggagatacgaggcaagccgactgacggcaaaacgacgtagcagagaaagagagaagaggagggacgtctggacaccgagagatgtttggc

SEQ ID NO: 910084 - DNA, 120 bp, Artificial Sequence
  ENSG00000245937_6 (sequence is synthesized)
tcggggcagtcagagcggagtccagcccctgggcggcccaactccaggggaagatcaccttcccacttcatccatccccacccttccagctccccatccatcctgctgaaagccatttcc

SEQ ID NO: 910085 - DNA, 120 bp, Artificial Sequence
  ENSG00000245937_7 (sequence is synthesized)
accactcaataaaacctcgcattcatccttcaagtccgtgtgtgacccgatttttcctggattctggaaaagagctcggaatacagaaagctgtcccctggtcctttgcccttgtgaaaa

SEQ ID NO: 910086 - DNA, 120 bp, Artificial Sequence
  ENSG00000245937_8 (sequence is synthesized)
agcagaaggtccattgagctggttaacactccagctgtctgtggtggccaagctgaaagagctttgtaacactggggttgcaggcacccacctctagacgctaccgcagagccagagccc

SEQ ID NO: 910087 - DNA, 120 bp, Artificial Sequence
  ENSG00000245937_9 (sequence is synthesized)
aaagccctcaccccggcctctgcacttgcccatctgcgtgctccccctctcgcaaggggtttctgcagagggggctactgaacaggtgagccacacccctgtcgcacgccctgcaagggg

SEQ ID NO: 910088 - DNA, 120 bp, Artificial Sequence
  ENSG00000245937_10 (sequence is synthesized)
aatcagggaactcttccgtttcattgctttgaccacatcctataaatcttgttctccttgtctttcagctccaatttgtttatacattcagtttttacttttgactttactcatgattta

SEQ ID NO: 910089 - DNA, 120 bp, Artificial Sequence
  ENSG00000245937_11 (sequence is synthesized)
ttatagaaagatgtttaacaattttcaagcaaatggaataatttttgctcctctttcgttgttaatttattattcattggagttagaaaattgttgctaaaataaattctgcattttgaa

SEQ ID NO: 910090 - DNA, 120 bp, Artificial Sequence
  ENSG00000245937_12 (sequence is synthesized)
agtgcggcttcccactaggcgcgtggtacccgaggccgggccggagccgcaggccagccgcgattccttcgggcgatgctgggggctttccggtcggggccgcagccgcttccggagccg

SEQ ID NO: 910091 - DNA, 120 bp, Artificial Sequence
  ENSG00000245937_13 (sequence is synthesized)
gtcactcaagtctctttttaaacctatatccacttcacctcatttggctttttgcctatcagaggtgaaacaaaagagtgaaatctttgcttgtggaatcctctcatgtcatcaattgtt

SEQ ID NO: 910092 - DNA, 120 bp, Artificial Sequence
  ENSG00000245937_14 (sequence is synthesized)
tataaatgtttagtatttaaaggaccactaagggccagtggggaaaatgaatcttatggatggatatcatcattttttgctacttaataatgttatggactttcaaatgagatttctgta

SEQ ID NO: 910093 - DNA, 120 bp, Artificial Sequence
  ENSG00000245937_15 (sequence is synthesized)
actggaatgagaaaaatcctaataagtttaggatgggtcagaagatttgtgcaatggagtgaatgcttgtgtgcttcccaaatttcgtatgttgaaactataatcccaatgtgatagtag

SEQ ID NO: 910094 - DNA, 120 bp, Artificial Sequence
  ENSG00000245937_16 (sequence is synthesized)
ttgatggaagggcctttggacagtggagccctcatgaatgggattagtgctcttaaaagaagagaccagagagctagctagctgtctttccaccatatgagggtgcaatgggaagctggc

SEQ ID NO: 910095 - DNA, 120 bp, Artificial Sequence
  ENSG00000245937_17 (sequence is synthesized)
ccatatgagggtgcaatgggaagctggcagtctgcaaccagaagaggaccctcaccagtccctcaccgttctagcaccgtgaactcagacttcagtctccagaactgtgagaaataaatt

SEQ ID NO: 910096 - DNA, 120 bp, Artificial Sequence
  ENSG00000245937_18 (sequence is synthesized)
tactttgttatagaagctcaaattgactaagataatttggatattaggttatatcgcttgcaggaggtatgtaacttcttgaaacatgtaaactctctgtgttgtgttctgctgcctaaa

SEQ ID NO: 910097 - DNA, 120 bp, Artificial Sequence
  ENSG00000245937_19 (sequence is synthesized)
tccaccagataaatatttggtttactttgcttgggaaaactgttactcaaatgttctctgtacaaatgcaggagagtaaaattatttccccattttatatcagtaattgctattttattt

SEQ ID NO: 910098 - DNA, 120 bp, Artificial Sequence
  ENSG00000245937_20 (sequence is synthesized)
gtaagtgtttcattatgatttaaacaattggtataagtatattaatataattatttactagttgctaaaaatatatgctgcatcttatgaaaatacatttaaaaaacactcgaatgggtc

SEQ ID NO: 910099 - DNA, 120 bp, Artificial Sequence
  ENSG00000245937_21 (sequence is synthesized)
ggtcatttgacatgaaagcatcattcgatttagaattcagagactaagttgccaaaagaggaaaatatttaataccattccctgaaggctagtaagtttataattagcaggatcaccaga

SEQ ID NO: 910100 - DNA, 120 bp, Artificial Sequence
  ENSG00000245937_22 (sequence is synthesized)
gggagtaaatttagagctgaaaaccactcactgattctgtagtatacttgaataaaataaggtcactgtccatgtagctggccaaatagcttggcacaatatggaagaaggaactagttt

SEQ ID NO: 910101 - DNA, 120 bp, Artificial Sequence
  ENSG00000245937_23 (sequence is synthesized)
ggcagccttgggaaatatgattattataaaaaattttaatatttttaattaaacaaaccatcaattcattttaaaaccaggatatttcctcatttgattaagtttttcatactagaaaat

SEQ ID NO: 910102 - DNA, 120 bp, Artificial Sequence
  ENSG00000245937_24 (sequence is synthesized)
tagaattgtgactatgtgtatcagaatagagatgaactttaggctctttttgatatggaatttgttcctggtttactggcagctatttcaagacttggggttctagaagacctttttctt

SEQ ID NO: 910103 - DNA, 120 bp, Artificial Sequence
  ENSG00000245937_25 (sequence is synthesized)
aagttttctctatctcctaggaaagacgttgaaccctaaaatgtcatttaaaagagtgccaactcaaattagaacatcatttacaataaaagacagtaggtaaggtttacagctgtaatt

SEQ ID NO: 910104 - DNA, 120 bp, Artificial Sequence
  ENSG00000245937_26 (sequence is synthesized)
aactggtaattcaggataggaagcacaaatttttctaaactatcaaagataattaagaggttatggactcagcctgaattatcccagtggttcactgtacaattcaaatatacatggtga

SEQ ID NO: 910105 - DNA, 120 bp, Artificial Sequence
  ENSG00000245937_27 (sequence is synthesized)
ggcttattttggaaaaaaatgcctttgcaagctttgagatacattacttaaagctgcagagcctcttcttgaagaccactgaagctaactagcatatatttcctggcttgatgaggtctt

SEQ ID NO: 910106 - DNA, 120 bp, Artificial Sequence
  ENSG00000245937_28 (sequence is synthesized)
caagagcctgatgattattcctaggttcacgtattatacacaactaaccatttgtcccatagcaccttattttctccagctaacagattaatagtctgaaaaatctgttctcttaattga

SEQ ID NO: 910107 - DNA, 120 bp, Artificial Sequence
  ENSG00000245937_29 (sequence is synthesized)
acaactgtctctctcagaactcactgggataaagccaattgtccacaagacagacaagtcaggaaggggcctgacttctgaatgactgatgatccatatcttagcaaagagagtttgaca

SEQ ID NO: 910108 - DNA, 120 bp, Artificial Sequence
  ENSG00000245937_30 (sequence is synthesized)
taaaagggtctcatgaactctaggtaaggcaggtagctaaccttgaaagcctgatcagaagtgacacctggatggcctgtctctactggcctgctattcaaggggagaggtgaggcaaga

SEQ ID NO: 910109 - DNA, 120 bp, Artificial Sequence
  ENSG00000245937_31 (sequence is synthesized)
gcccagtaaggaggcctggcaaaggtgaggcaagattcatttctcttggggtatcggaatagaatgaaaaacaggaccaaggcagaagctcagttaaacaaaccagtgccacagactcaa

SEQ ID NO: 910110 - DNA, 120 bp, Artificial Sequence
  ENSG00000245937_32 (sequence is synthesized)
ccaagattgaattctgttaccacagacgccaaggagccacacagaactcctctccagcttccccaaacctgcttttctgcctttcccatttcagtaaatggcaccaccgtccattttccc

SEQ ID NO: 910111 - DNA, 120 bp, Artificial Sequence
  ENSG00000245937_33 (sequence is synthesized)
caggtctcccatgctagacatgttactttttttgtctcttagctccaaatatctgctgtaggctttcataataaagtttgactgcatattaaaactgtagcaaaaacactggcagactaa

SEQ ID NO: 910112 - DNA, 120 bp, Artificial Sequence
  ENSG00000245937_34 (sequence is synthesized)
aagctgatttcatttccttaaaggtaaaaagaacttagttttacaaatatgggacccatctccacactttgaagggggtcggaaatatttgttttatgtcctgaggttacaaataagggg

SEQ ID NO: 910113 - DNA, 120 bp, Artificial Sequence
  ENSG00000245937_35 (sequence is synthesized)
tgatgctcctcctcatagatttattagaatctcccttctaatactaaaaataaaagggaaaattccatattaaaacaggctaattgtttatatccagcagacagataccggctggaaaac

SEQ ID NO: 910114 - DNA, 120 bp, Artificial Sequence
  ENSG00000245937_36 (sequence is synthesized)
ctttatttttgaaggaaagtacttatgtaatttctaaacataagaaaaataatgggctttgctctctttttttgctggttagttttgctaattacttgagccttctggcaagaacattga

SEQ ID NO: 910115 - DNA, 120 bp, Artificial Sequence
  ENSG00000245937_37 (sequence is synthesized)
aatgataattttatcagtttagtcactttttgtcatatgtgaaaaatgagttactgacatttgtcaatcagtctttgccttattcctctggttggtgtgaaacaaagtggtgcagagaat

SEQ ID NO: 910116 - DNA, 120 bp, Artificial Sequence
  ENSG00000245937_38 (sequence is synthesized)
tttagactgttgctaccatttgtactccaaatgatagcatattcctgattttcaataaccagataaggatggacttttcttgcctgtgccaccaaatatcattcctaataaaacaccaaa

SEQ ID NO: 910117 - DNA, 120 bp, Artificial Sequence
  ENSG00000245937_39 (sequence is synthesized)
gtttatcatcttgtgataaacatagagaaactctattcaagataggtgcacatctacttgtaattagaattagttaatgagactaagcattctaaatgtcctgcttcacagcaggtacta

SEQ ID NO: 910118 - DNA, 120 bp, Artificial Sequence
  ENSG00000245937_40 (sequence is synthesized)
tggggaattgagttcatttggtaatatattttgattttgtctgatttctaataagactgatgaactatcccctaaacatttttattagcacatagtatgtgtcagctcttggggttgata

SEQ ID NO: 910119 - DNA, 120 bp, Artificial Sequence
  ENSG00000245937_41 (sequence is synthesized)
ccatgaagagtaagatacaatctcactacctagaaatgagtctacccaaatagagactctttttaatgctttcaacccataaaaacatttttggggggattctactgaagaagcaatgga

SEQ ID NO: 910120 - DNA, 120 bp, Artificial Sequence
  ENSG00000245937_42 (sequence is synthesized)
gacatccattggaggttaacagtattcctttgagtggtgtgattaaaggtgcttttatattttccaagtttttagtttgtttgttttgcagaaaatgtatttaatgttctataagtggga

SEQ ID NO: 910121 - DNA, 120 bp, Artificial Sequence
  ENSG00000245937_43 (sequence is synthesized)
ccagtaaaattctccagaagagatttatggcagcctcactcccagtagtttctgcatttagtgagataagatggaatcttgctctcttgctcagactggagtgcagtggcatgaccttgg

SEQ ID NO: 910122 - DNA, 120 bp, Artificial Sequence
  ENSG00000245937_44 (sequence is synthesized)
cctctcgagtagctgggactacaggtgggagacctccacagaacccttccagcaagctgtcttctaaagcaaacaagaaaaggaaagtctgagcagttttgattagatttcccagaagtc

SEQ ID NO: 910123 - DNA, 120 bp, Artificial Sequence
  ENSG00000245937_45 (sequence is synthesized)
ttttgattagatttcccagaagtcaaagcaaggaaaaatgaaaaagcttcatttctcacgttcttaaaagagagcacagatgttgcatcatctggttagataccctgagaataaaatctg

SEQ ID NO: 910124 - DNA, 120 bp, Artificial Sequence
  ENSG00000245937_46 (sequence is synthesized)
gatccagtgagaggaaagattctgggtgctcatgaaaaaagaaacaaaacaaaacttgggagcctcttgagagtgtacagcatcagcccttgccaactcttgtttatatgcatttaactt

SEQ ID NO: 910125 - DNA, 120 bp, Artificial Sequence
  ENSG00000245937_47 (sequence is synthesized)
tcagttaaccatgggaataattcatgaaaatccaatctacaaacaaaggccatcctaacgttcatgttattcttttccctaagaatctttcacaagagctataatcaagtagaattatgc

SEQ ID NO: 910126 - DNA, 67 bp, Artificial Sequence
  ENSG00000245937_48 (sequence is synthesized)
ataaataaataaataaataaataaataacgaaaaggttgccattgccctttctggggaaagtgataa

SEQ ID NO: 910127 - DNA, 120 bp, Artificial Sequence
  ENSG00000245937_49 (sequence is synthesized)
acgaaaaggttgccattgccctttctggggaaagtgataatgaggaaagactagtttcttaacccaagtcagctttagagtcggcaaggatgcaatttgaggtgatccaggaaaactcta

SEQ ID NO: 910128 - DNA, 120 bp, Artificial Sequence
  ENSG00000245937_50 (sequence is synthesized)
ttagcatggtatttcccatacagattcatttcttttaggcctgaagtctttttggcacttcttaataaaatcacagatacctcttggacatgaaagcttatcctttatcaatttctatca

SEQ ID NO: 910129 - DNA, 120 bp, Artificial Sequence
  ENSG00000245937_51 (sequence is synthesized)
gttaaccactcagatgaggataaaggcctgagtcagaaaggacagagagaggttccacaaagagataaaagatgagtggccataaggagtccttgaaaacacacctctctagcccatcaa

SEQ ID NO: 910130 - DNA, 120 bp, Artificial Sequence
  ENSG00000245937_52 (sequence is synthesized)
aaaatgcagcaccttaaactcaagtccatcttactagcctttagcagtaccccaccactctcaaaatttccagcattaaatgtctcggagctatataaaaggcagacttaggtataagta

SEQ ID NO: 910131 - DNA, 120 bp, Artificial Sequence
  ENSG00000245937_53 (sequence is synthesized)
ggaagagatatcaagggcttgggtatcatttcagcactaatggagcttatggcatgtatgaatgaacctgatgcgtggtctccacggtagattgttacaattgaggtcccacatttatga

SEQ ID NO: 910132 - DNA, 120 bp, Artificial Sequence
  ENSG00000245937_54 (sequence is synthesized)
gattcccagtgaaaacaaatctcacagcttcacctgagagaaacattactgtcagtctcagatacaaaagcctgctgctattaggtacctatacacctgctgaaaatggaccagctttgc

SEQ ID NO: 910133 - DNA, 120 bp, Artificial Sequence
  ENSG00000245937_55 (sequence is synthesized)
tgtcattatgttgctgctacatatttggaagatggaacaagcccagacaaaggaggattcttttttactcatcttaaatccattttattttccttcatctgagccccttaaaactaatgt

SEQ ID NO: 910134 - DNA, 120 bp, Artificial Sequence
  ENSG00000245937_56 (sequence is synthesized)
gttactgatcattacaacctgtggttccaattaaagattttaaagagaagagtttaatcctgcaacaattggttagcccttcttaatttagaggtacctttacaagttcttgatcaccaa

SEQ ID NO: 910135 - DNA, 120 bp, Artificial Sequence
  ENSG00000245937_57 (sequence is synthesized)
ggtttctggtgcaagcggtcttctctgtcttctttatggccagtaaaattctccagaagagatttatggcagcctcactcccagtagtttctgcatttagtgagataagtaccctgggat

SEQ ID NO: 910136 - DNA, 120 bp, Artificial Sequence
  ENSG00000245937_58 (sequence is synthesized)
aggattttgctacttgataatgtgtgtggggtctagaagtcaaggaagactctctaggttcaggaagaggatggagtattgatcaaaacaggaaggtcagaaaagaacccctctgggaag

SEQ ID NO: 910137 - DNA, 120 bp, Artificial Sequence
  ENSG00000245937_59 (sequence is synthesized)
gaaacattttggaggccggaaacaccacattgatatttctctccagtgtgaaatattttaacctgaaaaacttctagatgcaattttcagataaaataggcctattctaatgaatccaag

SEQ ID NO: 910138 - DNA, 120 bp, Artificial Sequence
  ENSG00000245937_60 (sequence is synthesized)
acaagaagaatctttcaagtgttgctaaccagaactgagcagatccaagtagcaatcgtagccaagccattagtccatgtatggagagaccagagagggcatccccacgtggtgatgcct

SEQ ID NO: 910139 - DNA, 120 bp, Artificial Sequence
  ENSG00000245937_61 (sequence is synthesized)
cagaatagaatgcttagtgaatatttgttaaatgaatgagtatatttttcaaattctctaacttttttcctagtgtctttaaaaacaataagcgcatttattttaggtctaaatgactcc

SEQ ID NO: 910140 - DNA, 120 bp, Artificial Sequence
  ENSG00000245937_62 (sequence is synthesized)
ccaaatttcctttaagggaggtattctgaaaactttatcttcaacatttgaaaacccctgatgataagtaaagagcttgataagttctgtggatgttatattgtacccaaaggataaaga

SEQ ID NO: 910141 - DNA, 120 bp, Artificial Sequence
  ENSG00000245937_63 (sequence is synthesized)
aggtgaatttattttccccttctcatttttagaacattctcaaaataaacactatttgcatgtaggacataaatacagcctgagtgtcatcatctaacctgaactaatatgaattgctac

SEQ ID NO: 910142 - DNA, 120 bp, Artificial Sequence
  ENSG00000245937_64 (sequence is synthesized)
agtttttctgaactatcttgatggaatagattagagaagagaatgcaaaaaaaaaatgtctatctaagctgtagggtgtaaagataagtaaatgtaatgaaaagcaaccttaaagttact

SEQ ID NO: 910143 - DNA, 120 bp, Artificial Sequence
  ENSG00000245937_65 (sequence is synthesized)
ggaacaatttgatcttaatctacagatggaagatttcaaaatatagtctagcttagatggctggactatgagggctaatgagcccagtgttccaaacttagatagtccattcaccttctt

SEQ ID NO: 910144 - DNA, 120 bp, Artificial Sequence
  ENSG00000245937_66 (sequence is synthesized)
tatttttttttagccagtgactgtgttgctaaactggtcaaacttcctacacagaggttccatggtcttgaggaaaacgatgtaatagaaacatgaaacacaatataatcaggagaaaag

SEQ ID NO: 910145 - DNA, 120 bp, Artificial Sequence
  ENSG00000245937_67 (sequence is synthesized)
agttcaaaatataagctttaataatagtgggtgggaatgctttgacatcaatactgggagcagatccagagagggctggtggtagttgttggtaaaattccagagagttaactatatgac

SEQ ID NO: 910146 - DNA, 120 bp, Artificial Sequence
  ENSG00000245937_68 (sequence is synthesized)
atgaattttactaaattaggcaatttattgagaaaatagaactggaaatatttaagattttaacatcatgagaaaattgaatgtgaatgattgaatgattcgtttagcaagtgtcttaat

SEQ ID NO: 910147 - DNA, 120 bp, Artificial Sequence
  ENSG00000245937_69 (sequence is synthesized)
tctactgaatggatatatgtcactgagacatttagagtcctgctgaagaaacaagagacccacacaacaaactaaataaaaggtgtattaaatgccttttatgaaccagtcaagtcctct

SEQ ID NO: 910148 - DNA, 120 bp, Artificial Sequence
  ENSG00000245937_70 (sequence is synthesized)
ttctgccatgtcttgctctagaagctgctataataggtttggaccagcatcttgttgatacaactggacaacagtcacctaagccccaaacatttacctacaacttcccatgtctttgtt

SEQ ID NO: 910149 - DNA, 120 bp, Artificial Sequence
  ENSG00000245937_71 (sequence is synthesized)
ttttatttgcttgtctcttgcctgtgcagaacttctctaatgccgtggtggaggccagaagaacgctcagacacacacatgtgcaatcaggaagtgcaggggaggtattgccagtagggt

SEQ ID NO: 910150 - DNA, 120 bp, Artificial Sequence
  ENSG00000245937_72 (sequence is synthesized)
catctttaatcaatggaggccaagaactcataaataaatattttttcttttcacctctcaggtggattttctgagatgaatttcgtaagactcattataagatcctggtgagacctagca

SEQ ID NO: 910151 - DNA, 120 bp, Artificial Sequence
  ENSG00000245937_73 (sequence is synthesized)
tcagttacccatagtggtggccaattcaataaggcatttttgaactcattctccctccttctctgtcctactctcttatgtcagttatgcttcttgggattattgcccaaataaactacc

SEQ ID NO: 910152 - DNA, 120 bp, Artificial Sequence
  ENSG00000245937_74 (sequence is synthesized)
ctacatcggacaggtgtctgatgatcctgagaacagtcatcaaaaagtagaacttgagcctggaatacattctctggcatagccatagtcaatcaccagtataattaatgtaaatggaca

SEQ ID NO: 910153 - DNA, 120 bp, Artificial Sequence
  ENSG00000245937_75 (sequence is synthesized)
ctggatagcttttttgtgaattctgatgcagcacaaagagactttaattgtttccaaaaagaaaatgtctgagattaaaatctagagttttatgacttagaggaaattttatagctttac

SEQ ID NO: 910154 - DNA, 120 bp, Artificial Sequence
  ENSG00000245937_76 (sequence is synthesized)
tccaaaaagggtaaggcacaaaatattctgtgccaaaggatgcatatttggtatttttcctatgaatcccttagtgtaagtggcatgatgaaattttcttggtttcaacacagatgatgt

SEQ ID NO: 910155 - DNA, 120 bp, Artificial Sequence
  ENSG00000245937_77 (sequence is synthesized)
gttgaggtagtgttgaggctgagaggtgggtgggatgggtcttggagaaggaaaagatttgttttgcaaggtttgtggagagctgatgcggtagtgaggctaagacgaggggtatttact

SEQ ID NO: 910156 - DNA, 120 bp, Artificial Sequence
  ENSG00000245937_78 (sequence is synthesized)
tgctacttacattgagtccactaacatctgcagcactttgcttgcattatccacgcaattatcacgggaaacctataaaataagtattcctctcctcattttacaaatagggaagcagat

SEQ ID NO: 910157 - DNA, 120 bp, Artificial Sequence
  ENSG00000245937_79 (sequence is synthesized)
aagatttagaaaatttcccaaactcacacaattattaaatgacagaactaggactcaaacccaggttttattaattttagagacatgtttttaaccacttggacactgccaaccatggaa

SEQ ID NO: 910158 - DNA, 120 bp, Artificial Sequence
  ENSG00000245937_80 (sequence is synthesized)
ttgttggtatgaaaaaaacgtactcttgagttatattatccatggtcttaatatcagagaagtgcagttgagtcgctattaaagaatatggtaaaattataaaatggatactatacaaag

SEQ ID NO: 910159 - DNA, 120 bp, Artificial Sequence
  ENSG00000245937_81 (sequence is synthesized)
gtataaaaatattataaatacttatgtttggggtaaaaggatcaaagtagccatgctcagtggaagggtaaggaactcttagcagagattgattaattgggagataattgattaattggg

SEQ ID NO: 910160 - DNA, 120 bp, Artificial Sequence
  ENSG00000245937_82 (sequence is synthesized)
agttgattgattaattgggatttattaatttgggagtaggtaggaagataggaagttgtataaaataagggagagataacttagtacctggaaaaaaagaaatggaaataggtagaagct

SEQ ID NO: 910161 - DNA, 120 bp, Artificial Sequence
  ENSG00000245937_83 (sequence is synthesized)
aaaaggaataaaagatattggaagggaacgatgaatgtagcatggaagatccaagatgatgggagttcaggggctaattacagctatggggaaaaagtaatgtataagctggaagccaga

SEQ ID NO: 910162 - DNA, 120 bp, Artificial Sequence
  ENSG00000245937_84 (sequence is synthesized)
gataagagccatgtaaatgaagaagttgggccccaataggaaagaattataaggactagaaggagcaggagccatgtggaaaaatatcatgtagtacttttaagcttgatctgtcatctg

SEQ ID NO: 910163 - DNA, 120 bp, Artificial Sequence
  ENSG00000245937_85 (sequence is synthesized)
tagcaaaaccagcatgcttgagtactgaattgacctgactgaactatgttgaaatgtactgtggttttatatccatatgcacttggtctgtggagttgtgggaaaagcatcagtgagtag

SEQ ID NO: 910164 - DNA, 120 bp, Artificial Sequence
  ENSG00000245937_86 (sequence is synthesized)
gaagcccaaggatttgggtcaagtattaaatatgctatttactgtctagctatgtgaccttatataagtcacttgtggtctctgagccttcatgtattcatccataagatgagttgttgt

SEQ ID NO: 910165 - DNA, 120 bp, Artificial Sequence
  ENSG00000245937_87 (sequence is synthesized)
attaaatgggatgtggtatgttaaagagctgaatgcatagtgatacagaattactttctgtaatactattttttaaatattttaaatgaaaaattaatgaacttataaattaaaagattc

SEQ ID NO: 910166 - DNA, 120 bp, Artificial Sequence
  ENSG00000245937_88 (sequence is synthesized)
attcaaaagggataaaaaggtatacaatgaaaagcaattctccttcccaccagtaactctgtcctactccttaggacattcaccataaacagatatcctgaattcttctagaaatattat

SEQ ID NO: 910167 - DNA, 120 bp, Artificial Sequence
  ENSG00000245937_89 (sequence is synthesized)
aaaatcttatatttcttatgtttcttttttactattttaaaggggataaactaaactttgctttttttcatataataatatattctggagatcattttctaaaagcacatgtaaacatac

SEQ ID NO: 910168 - DNA, 120 bp, Artificial Sequence
  ENSG00000245937_90 (sequence is synthesized)
atacctcattattataaaggtttgaaaatatcaatttatttgacctgtcccctctcgatagataattagattgtatccatccctttggttattaccaacagacactaatcacttatcatg

SEQ ID NO: 910169 - DNA, 120 bp, Artificial Sequence
  ENSG00000245937_91 (sequence is synthesized)
tacatatagcctgttttttagcattgttagacaaagtaggcatattcctttccatccaagaactcataacctagtaattgtagttggctgatagctcattgcccatacacaaggatctaa

SEQ ID NO: 910170 - DNA, 120 bp, Artificial Sequence
  ENSG00000245937_92 (sequence is synthesized)
cacaacctcttgaataaacatcccccttattcagaaatgccttttcctatttccatattgcaactttgcttacaaatttccaatctgtctttctgtttacagaagatatacaaaattcct

SEQ ID NO: 910171 - DNA, 120 bp, Artificial Sequence
  ENSG00000245937_93 (sequence is synthesized)
tttgtatgatctctttatatctcttgattttcttttgtgtttgctaccaaagggcctgcacatagtgagaagattgtgcatgatctgtgagctctaccacacctggaattagggatcacc

SEQ ID NO: 910172 - DNA, 120 bp, Artificial Sequence
  ENSG00000245937_94 (sequence is synthesized)
aatatgagaaaaaaaattggaggtacaaataacattatcatatgtaattggcatataaattacagatgtatctatgactaaaaaccctgtggatataaaccaaatgcagataaatataat

SEQ ID NO: 910173 - DNA, 120 bp, Artificial Sequence
  ENSG00000245937_95 (sequence is synthesized)
aaaatatataaaaatataatcaaataatgatagtgctattcaaatacttcaaatttgcacagtgatttatttcttaaaatatgttaacacatgtgagccaatacactgaggtcactggat

SEQ ID NO: 910174 - DNA, 120 bp, Artificial Sequence
  ENSG00000245937_96 (sequence is synthesized)
tcacccaggctggagtacagtgaggtgaacatggcttactgcaggctcaagtgatccccctgcctcagtctcccaagtacctgggatcacaggcatgcaccactacacccagctaatttt

SEQ ID NO: 910175 - DNA, 120 bp, Artificial Sequence
  ENSG00000245937_97 (sequence is synthesized)
ccagctaatttttaaaaattttttgtagagacaggatctcactttgttgcccaggctggtctcaagctcaagtgatcctcctgtctcagccccccaaagagctgggattacaggcgtgag

SEQ ID NO: 910176 - DNA, 120 bp, Artificial Sequence
  ENSG00000245937_98 (sequence is synthesized)
gcccattctctcttttaatgttagtataactatacatttgtaagcaggatcatggcatagtgaaaagtaacttttaggatcagatatgcctggaattaaattccatttgctatttatcaa

SEQ ID NO: 910177 - DNA, 120 bp, Artificial Sequence
  ENSG00000245937_99 (sequence is synthesized)
ctgtgtggtcttgagcaggttaacctgttagtgcctcactttcctccactgtaaaataagaatacaacccatcttgcagtgttgtgaggattaggaatgacagctatcaatcttctgcca

SEQ ID NO: 910178 - DNA, 120 bp, Artificial Sequence
  ENSG00000245937_100 (sequence is synthesized)
ttttgcttcagaattttacaaaattatacaagtaaaaaaatgagtaaatatattctccttacaaacaaatttagaattacaaaatatgaaattacttgctgaccctatcccttcccatct

SEQ ID NO: 910179 - DNA, 120 bp, Artificial Sequence
  ENSG00000245937_101 (sequence is synthesized)
tgccagtagtaaccactaatgttagtttggtgcatactgatagactaaatatacaaacggacaaggaccagaccatatatgtcaatagaactcggacacacaacctctgcagcaaccagc

SEQ ID NO: 910180 - DNA, 120 bp, Artificial Sequence
  ENSG00000245937_102 (sequence is synthesized)
ctgggaagccaaaccacaagctctgatacaattggttctgaagtgtcagtgcttggtcaatgactgtcagcttttaactcaggaccaaccagacaaagccaaatgtactccccaaaccaa

SEQ ID NO: 910181 - DNA, 120 bp, Artificial Sequence
  ENSG00000245937_103 (sequence is synthesized)
tcacataagatggctcacttgtaattacccacctctagcttcccaaaccaagtttccaattgtagcatttgtgaatcttccctcttttcactataaagcttttcatttctgctttggctg

SEQ ID NO: 910182 - DNA, 120 bp, Artificial Sequence
  ENSG00000245937_104 (sequence is synthesized)
cctgtgagtatctgccaaacacaagcgatggtgtttgactcccttgttttagtaagcaatgaataaatagcctctgattgttctcattttgggtggtctctgtttatttccatggtatgg

SEQ ID NO: 910183 - DNA, 120 bp, Artificial Sequence
  ENSG00000245937_105 (sequence is synthesized)
ttccagtctttttattgtggaaatatagatggacatttatatgtgtatatccctgggaaatatataccattttgtggacttttaaaagcaaaaatgttacacgtattgatttatatcttg

SEQ ID NO: 910184 - DNA, 120 bp, Artificial Sequence
  ENSG00000245937_106 (sequence is synthesized)
ttttttttctcaaaaatatccaggaaatctatgcatgttaattcatcttgattattttaactggagggaggtagtaatatctgtcttggtgtctttaacacagctctgtggtgctgccta

SEQ ID NO: 910185 - DNA, 120 bp, Artificial Sequence
  ENSG00000245937_107 (sequence is synthesized)
agacgttctttttacctttacacccccatcctacttccctttcacctgcatccccagcttactcctttactacgtatcctttgaactgcagtcgattcaccatgatcttggctggctgtc

SEQ ID NO: 910186 - DNA, 120 bp, Artificial Sequence
  ENSG00000245937_108 (sequence is synthesized)
ttcttccttcatggctgctagtaatgacaattcagtggctgtttcttcagctgtgcaaagttggaacatgtttgggagttcaacggcattggtttctggttggtaaatgtcctgtttatt

SEQ ID NO: 910187 - DNA, 120 bp, Artificial Sequence
  ENSG00000245937_109 (sequence is synthesized)
gcctgttcaatttcctcattactgactgtgagaaattacaagtcttattcatgctggattcttttaccttgagtcagttttcagttgtatgtaagaaattttttccaatgaattaaacat

SEQ ID NO: 910188 - DNA, 120 bp, Artificial Sequence
  ENSG00000245937_110 (sequence is synthesized)
accaaccttagaaactggcttgtgaaggaagtaaaataaagtcaaatgcttcatttatctttgcttttaccaaataatttaggtaaactttgcagtcacccaaataatgtccctcctggt

SEQ ID NO: 910189 - DNA, 120 bp, Artificial Sequence
  ENSG00000245937_111 (sequence is synthesized)
aaataccaaaacattcagaattaggacacctgatggtaaggactaagaagaatcacttttaagatctgcccatttgcatgggctgctaaagcctctagaccatgtaagaacaatttaatg

SEQ ID NO: 910190 - DNA, 120 bp, Artificial Sequence
  ENSG00000245937_112 (sequence is synthesized)
atttaatgaagtgatactagtgtagactctgggataatatagcttgcatgtgttttttgttgttgttgttttgttttgttttgagacagggtattgctctgtctcccagactggagtgca

SEQ ID NO: 910191 - DNA, 69 bp, Artificial Sequence
  ENSG00000245937_113 (sequence is synthesized)
gatctgtagcctaacctgatttgaatcctcattcctctggtttaatgaacttgggcaaattttataact

SEQ ID NO: 910192 - DNA, 120 bp, Artificial Sequence
  ENSG00000245937_114 (sequence is synthesized)
cattcctctggtttaatgaacttgggcaaattttataacttctttgagtctaagttttctcatgtttttaatgaagatgaaattacttacctttgtaagtaatgtttgttggagaggaaa

SEQ ID NO: 910193 - DNA, 120 bp, Artificial Sequence
  ENSG00000245937_115 (sequence is synthesized)
atcttttcctctaccctcttaggttcagttcttgagggcctgggaattaaacttagacaaaacatagatttttattcacgcaggagcacacagaaaaatgtgactctaaacaactaaaga

SEQ ID NO: 910194 - DNA, 120 bp, Artificial Sequence
  ENSG00000245937_116 (sequence is synthesized)
tgggggtttatatacctaataggggagaggttacttaatgggggagaagaaggggggagtaaagccctctatgtagggaagaacaaatgagtatttaggggaagaaatgaaaaagaagaa

SEQ ID NO: 910195 - DNA, 120 bp, Artificial Sequence
  ENSG00000245937_117 (sequence is synthesized)
gtcatgatttcctttagacataacagtcgtagcccacaaataagccgccatgaaatagtcaagcaacaggcctccagtagctgcagctggagaaaacactggataaggtgatccaatttc

SEQ ID NO: 910196 - DNA, 120 bp, Artificial Sequence
  ENSG00000245937_118 (sequence is synthesized)
tgcacaagatctagtctctcctccatagtagcgtttagcctggaagtcagtcattctcatactgtcaaaagccagggtcccagaaaagggaatctttacagaagcaaatattttatggag

SEQ ID NO: 910197 - DNA, 120 bp, Artificial Sequence
  ENSG00000245937_119 (sequence is synthesized)
gacttgagagagtgtctctcaatgtttaagtatctattccatagcaaattaggaacaacaatagctagagttataaatacaattcattatgtgtattttgaaattgaattttgagcgatt

SEQ ID NO: 910198 - DNA, 120 bp, Artificial Sequence
  ENSG00000245937_120 (sequence is synthesized)
agcataaaaatactgaatatgcattgcaaattagcatgccaaccttgctaaatgaaataacagccctgacacgtacttaagtagaaagtggaactacacaaaaatggaggaatatcagta

SEQ ID NO: 910199 - DNA, 120 bp, Artificial Sequence
  ENSG00000245937_121 (sequence is synthesized)
gataacatgtaaaccaggacgatgaaaaaagaggacacaagtaagatcactgcgggtatattattcttagctacatatagctaactgagtcaccattttctaaggaggaaaaattagaag

SEQ ID NO: 910200 - DNA, 120 bp, Artificial Sequence
  ENSG00000245937_122 (sequence is synthesized)
gagtgctgaaagggaataactccagactgttaattacttacagtgaatatatgtttgcatatatttgcttaaagtagctgttaaggaagctctatttaatttatttgtcagtgtgggctg

SEQ ID NO: 910201 - DNA, 120 bp, Artificial Sequence
  ENSG00000245937_123 (sequence is synthesized)
agtcatcaacaactatacttttcacttttttcatagaatccaagacaagaagaatctttcaagtgttgctaaccagaactgagcagatccaagtagcaatcgtagccaagccattagtcc

SEQ ID NO: 910202 - DNA, 120 bp, Artificial Sequence
  ENSG00000245937_124 (sequence is synthesized)
ttggcagcatattgcacagtgggcagggtgtttttggcttcataaaagtgataagaggagacaacaggctattctctgctcttagaaattattagctctttactaacatttaagaatcca

SEQ ID NO: 910203 - DNA, 120 bp, Artificial Sequence
  ENSG00000245937_125 (sequence is synthesized)
tactaacatttaagaatccatggggaaatttttgctctgaatttgttagaatgtttaatattataacaataatatttaagatgttggtttgaaggtggggcacggtggctcacgcctgta

SEQ ID NO: 910204 - DNA, 77 bp, Artificial Sequence
  ENSG00000245937_126 (sequence is synthesized)
cgagaatcacttcaacctgggagttgcaggttgcattgagctgagattgtgccacagcattccagcctgggcgacag

SEQ ID NO: 910205 - DNA, 120 bp, Artificial Sequence
  ENSG00000245937_127 (sequence is synthesized)
tggtgaagcacaacctgggacaaatggaagctttagcaatgagccgataggtcaaggctaaccagaaagaatgcagctgggtaatgcaagctatcctatcttgtaattaaaagggttttc

SEQ ID NO: 910206 - DNA, 90 bp, Artificial Sequence
  ENSG00000259681_0 (sequence is synthesized)
aaatcatttattttttgagacagggtctcgcgctgttgcccatgctagagtgcagcgttgcaatcatagctcactgcagacttgaactca

SEQ ID NO: 910207 - DNA, 120 bp, Artificial Sequence
  ENSG00000259681_1 (sequence is synthesized)
gactacaggtgtgtgccaccatgcctggccaatttttaaatgtttggtagagacacgaatcttgctatgttgcccaggctcaggatatctttttaaagttttttccttttatcttttttt

SEQ ID NO: 910208 - DNA, 120 bp, Artificial Sequence
  ENSG00000259681_2 (sequence is synthesized)
ttatctttttttgcagggggaaggcagagtctcattctgtcacccaggttagagtgcagtgggaggatcacagaagcccaggaagtcagcagggcaatgagccataattgtgccacagca

SEQ ID NO: 910209 - DNA, 120 bp, Artificial Sequence
  ENSG00000256256_0 (sequence is synthesized)
tggctggtggcgcctttgccctagctttgcttgggtccgctgggttcgttctgcccactcagcctggcaggctgcactcagcccacgctaccggcctggatcccatgcctccaagggaga

SEQ ID NO: 910210 - DNA, 120 bp, Artificial Sequence
  ENSG00000256256_1 (sequence is synthesized)
ctgcaagtcagagttggccatgcccagttaaataccagcatacaaggaaacctcacctcgttgggagaatatttcacacccctccaaactatcagcacagtggaaacttggcatgtccca

SEQ ID NO: 910211 - DNA, 120 bp, Artificial Sequence
  ENSG00000256256_2 (sequence is synthesized)
atctggctgcagctgtctcagggatccaagactgaatgactggtgattttacattgatgttctgctgaaccttcctggtacctgagtggttaaaatctgagaatttctagaagaaaagaa

SEQ ID NO: 910212 - DNA, 120 bp, Artificial Sequence
  ENSG00000256256_3 (sequence is synthesized)
agtacgtctaaagcaatgctagaaaggagctaataaattcttcaggattaacatcaaagtctgatgcaaactaatttaatccccttgatattcagggataaattaaagctaatgaattac

SEQ ID NO: 910213 - DNA, 120 bp, Artificial Sequence
  ENSG00000271631_0 (sequence is synthesized)
gaaataatgcaaagagccctaatgattgacggctcttgtcctaggaagctcaactttccattcaggccgagatttgtaatatgatgtgatgtgagaattccaaaaaagctttatcactgt

SEQ ID NO: 910214 - DNA, 120 bp, Artificial Sequence
  ENSG00000271631_1 (sequence is synthesized)
ccccttgaacaagccttcctttattttctactctgctgcctactataccaccattactgatctgtagagtcctcatgtgctactaggcaggtcccttgaaaatgcaaatctatatcaaat

SEQ ID NO: 910215 - DNA, 120 bp, Artificial Sequence
  ENSG00000271631_2 (sequence is synthesized)
atatatgtgtatatatatatatatattcctttctcatgtggcagcagtggtaggagcatgagagaacctcacttcaaaggaagtggtaaaagggcctaacagtctaaagagaacagtgct

SEQ ID NO: 910216 - DNA, 120 bp, Artificial Sequence
  ENSG00000271631_3 (sequence is synthesized)
taacagtctaaagagaacagtgctgttccatatgggaacctcaacccacatgtgggttactgaatacttgaaatgtgacgtccaaatctagatgtactgtaagtgtaaaatacatactgg

SEQ ID NO: 910217 - DNA, 120 bp, Artificial Sequence
  ENSG00000271631_4 (sequence is synthesized)
atttcaaagagttagtgtaaataagaagtgaaatacctcattgacacattttgtaaatggattagatgtggagatgatattttgcatgtcaaatatgttattaaaattaatttcacctgt

SEQ ID NO: 910218 - DNA, 120 bp, Artificial Sequence
  ENSG00000251459_0 (sequence is synthesized)
attgtcatgtggttgctgggcacactagctgacatgaagaatcaaagtaaaaattaccactgtcagagaagtgatactaatggcggactactgattgtttggggacatccgaaatcactc

SEQ ID NO: 910219 - DNA, 120 bp, Artificial Sequence
  ENSG00000251459_1 (sequence is synthesized)
aggattgtggtgaccagttgaacagagatatgccaaaagcaggcagtgatttatatccctgcagaaggagtctcgccctgtcaccaggctggagtgcgatggtgcaatctctgctcactg

SEQ ID NO: 910220 - DNA, 88 bp, Artificial Sequence
  ENSG00000251459_2 (sequence is synthesized)
cgatggtgcaatctcttttctcctgcctcagcctcctaagtggctgggactacaggtgcctgccgccatgcctggctaattttttgta

SEQ ID NO: 910221 - DNA, 64 bp, Artificial Sequence
  ENSG00000251459_3 (sequence is synthesized)
gctcaggctcagccactatcttattttttagcctatctgaattaaaaacataaagtcttctcta

SEQ ID NO: 910222 - DNA, 120 bp, Artificial Sequence
  ENSG00000251459_4 (sequence is synthesized)
tttttagcctatctgaattaaaaacataaagtcttctctatgtatgttgatgataaactttgggtttcaaggaaaagagtcactcaggcaacttccaagaatgggaggggagaaggggtt

SEQ ID NO: 910223 - DNA, 120 bp, Artificial Sequence
  ENSG00000251459_5 (sequence is synthesized)
gttataggatacagtggaaataaatctgggaggaatctcaatcatgttccaagagcttgcaggggcccagagaaattctcacaatgaggcctcacaggaaaagcaagaacaccgacagca

SEQ ID NO: 910224 - DNA, 120 bp, Artificial Sequence
  ENSG00000251459_6 (sequence is synthesized)
gaactactgcctgagaatattaaaacaaaaacagaaacacgtaaatagccagccctgaaacgagcctctcaacttctgataggttatatttacatttatgtactttcctatcacagttta

SEQ ID NO: 910225 - DNA, 120 bp, Artificial Sequence
  ENSG00000251459_7 (sequence is synthesized)
taatcaagctaaggctagtagccttgaatatttttagggctgcaatttgtacatcatctaagctaacagatgaaaagtgcaagtgtagttgcctaagcacaggtacattcgttcaacaac

SEQ ID NO: 910226 - DNA, 120 bp, Artificial Sequence
  ENSG00000251459_8 (sequence is synthesized)
aaatctttacctgaatgtccattgtatgtccgacgctgtcctgtatcctggggtggcagcctggggacctgagaggactttgagtggagctaaagaaacagaaaataacttcaactaata

SEQ ID NO: 910227 - DNA, 120 bp, Artificial Sequence
  ENSG00000251459_9 (sequence is synthesized)
aatgtcttttaatatctcttgcaatggaaattttcagtggcttaatttttttacttgtctacttcgaaggtgaagttactcacaggcaggtttcttagtttacagacttagcttttcttc

SEQ ID NO: 910228 - DNA, 120 bp, Artificial Sequence
  ENSG00000251459_10 (sequence is synthesized)
cactcccagcgtattatcatttatcaactattgtcattgaatgtccttacaccaggcatggtagatggcttttcagcttccaggcatcatgttgtgtctttttattcttcaatggtattg

SEQ ID NO: 910229 - DNA, 120 bp, Artificial Sequence
  ENSG00000251459_11 (sequence is synthesized)
ctttaaattgtaggcatccttgtaatgggttttcttctttttctgacccataaaaaatttctgataatatttgttgaactctgatcccattaaattaaaattttagttattaaaagacaa

SEQ ID NO: 910230 - DNA, 120 bp, Artificial Sequence
  ENSG00000251459_12 (sequence is synthesized)
tccctgcagagaataaggatgattcagaagctgagctgagtcattgaaaaacattgaaagagaacacatgagagccgaagagaatctagcaatctgaatgtcctccactctctaaaagac

SEQ ID NO: 910231 - DNA, 120 bp, Artificial Sequence
  ENSG00000251459_13 (sequence is synthesized)
gttcagatgacccccagagagttgccactggttgtgctgtgtccactcagtcaccagtcagaacctgcagccagcagcacctgcttactacaaggtggttgaccatggtctgtggacaag

SEQ ID NO: 910232 - DNA, 120 bp, Artificial Sequence
  ENSG00000253653_0 (sequence is synthesized)
tggtcacggcggcagaggcaggggccagcgctctgcagtacctggactcgaggatgtcgccgctgccgggctcgcggccgctgcaggtgtctccggtccctgagattagcaccgcctcct

SEQ ID NO: 910233 - DNA, 120 bp, Artificial Sequence
  ENSG00000253653_1 (sequence is synthesized)
gccgcgcacctgctgctgcggctcccccgccgccgcgccggagctccgcgatgtgcccgcgcctcccgggcagagggtccgtgccgcgggacgcacggggcctgcctcaacttcattctg

SEQ ID NO: 910234 - DNA, 120 bp, Artificial Sequence
  ENSG00000253653_2 (sequence is synthesized)
ggggcctgcctcaacttcattctggaagaattgcctaacggacaaataggtggcaggaagcactgagaggacagttaagcttatcatcaggactgcccttacctataaagctgaaaaccc

SEQ ID NO: 910235 - DNA, 120 bp, Artificial Sequence
  ENSG00000253653_3 (sequence is synthesized)
cgagaactctttctggatcagttccattgatgttttgtccctgaagtcgggaagtaccttgccactaaaggtctgcctttcaaggttcttttgatattgaaggatgcccctcggttatct

SEQ ID NO: 910236 - DNA, 120 bp, Artificial Sequence
  ENSG00000253653_4 (sequence is synthesized)
agaaccccatgagttcaacactgaaggcatcaaagtggtctacttgcccccaaacacatctctaatccagcctctagataagggggtcataaggacctttaatgcccattatatatggta

SEQ ID NO: 910237 - DNA, 120 bp, Artificial Sequence
  ENSG00000253653_5 (sequence is synthesized)
ctctttggaaaagattgtcaatgctatgaaagagaaccctgatagaacatcaagaaagtctggaaggattacactgttgaagatgccacattgttacaggaaaagctattaaagtcatca

SEQ ID NO: 910238 - DNA, 120 bp, Artificial Sequence
  ENSG00000253653_6 (sequence is synthesized)
atctcaaaacaacaagtttctgctggagaaaactgtgttcagatgttgtgcataacttcacaggatttacagcagagtcaatcaagaaaatcatgaaagagattgagcatatggcaaaaa

SEQ ID NO: 910239 - DNA, 120 bp, Artificial Sequence
  ENSG00000271185_0 (sequence is synthesized)
ctccgtgagtagggggcctctcccgcggcgcctgagagccgggtccgcgcgcagaggccctgggggcgcgcgtgccgggtgcgcgctggccagctgtgactgccgctgagggagctgcgc

SEQ ID NO: 910240 - DNA, 120 bp, Artificial Sequence
  ENSG00000271185_1 (sequence is synthesized)
caggtcgggcctcttgccgctaaggtcagcggctgcggtttgagaagactgcagctgcttcctgtgttacgctgtcgcagacaagcagaagttaaaaactagtaaatgacttaaaggtga

SEQ ID NO: 910241 - DNA, 120 bp, Artificial Sequence
  ENSG00000253658_0 (sequence is synthesized)
gaagaggaagagacattagggatgtgagtgcataaagaaaaggccacgtgaggacacagcaagaaagtggtcatctgcaagcgcaaaagacaggcctcagaagaacccaaccctattgac

SEQ ID NO: 910242 - DNA, 120 bp, Artificial Sequence
  ENSG00000253658_1 (sequence is synthesized)
actatgatcttggacatccagcctccagaactccgttaacaaaccatctgtatgcctaatattgatgctgtctttccctagtgtactggacaacctaagacagggaaataaagataaagt

SEQ ID NO: 910243 - DNA, 120 bp, Artificial Sequence
  ENSG00000253658_2 (sequence is synthesized)
ttggattgaagagtgaggagccaaaataatgcagcttcacatctccttaatggacagaagactacactgtttttgctgcacccagagataaaattattggttttggagtaccttcactga

SEQ ID NO: 910244 - DNA, 120 bp, Artificial Sequence
  ENSG00000253658_3 (sequence is synthesized)
tgccaggggtgtcatctttaccttccatcacataatatatataaagagaatttttcttagctttaaatgagttgataagaggacaagaagaaagtcaaggactccatttccaggattaaa

SEQ ID NO: 910245 - DNA, 120 bp, Artificial Sequence
  ENSG00000253658_4 (sequence is synthesized)
agcggttttttcctttgtcttccaaatcctagcagtagaagcatttgagttctgcagaaattactgaagtggttcaagtgtgggcagtcaggacactcagcccaccatactcaaccccaa

SEQ ID NO: 910246 - DNA, 120 bp, Artificial Sequence
  ENSG00000253658_5 (sequence is synthesized)
ctcaacctcaactctcagtacggcagagagacggagaactcagagctataactttcaggaattctcaaaacctcagacaaaatgcatctttgttttaccacctgttaaagtatatcctca

SEQ ID NO: 910247 - DNA, 120 bp, Artificial Sequence
  ENSG00000253658_6 (sequence is synthesized)
tttaacgcattttgtatccaacatttctactaggaaatagtattagtctatccccaaactaaaattcactgcaaaaatgtaattcactcaagaaaaataatgataattcttcaaacacct

SEQ ID NO: 910248 - DNA, 120 bp, Artificial Sequence
  ENSG00000253658_7 (sequence is synthesized)
tgagatgtcattcaacaatcatacccaatgggtaaaatttagagttcaacatttagcttgcatttctttctaaccaaacatctcaagttcaaaaaataaagcagattgttttgtgcattt

SEQ ID NO: 910249 - DNA, 120 bp, Artificial Sequence
  ENSG00000253658_8 (sequence is synthesized)
gttatcactaccacatcaatggtcacctacacttcctgagccccaaatagaactctcagagaagcattgtgtatttgtcaatatcctggagtttcaaaactcccaagtgttgccaccatt

SEQ ID NO: 910250 - DNA, 120 bp, Artificial Sequence
  ENSG00000253658_9 (sequence is synthesized)
tgacctgaaatttcctctcttctcagattcctgcctctaaacacaaaacaaacaaacctttacttaacttagctcatgtgtgaatttttagggtcatttgtttcatatccagaaagactt

SEQ ID NO: 910251 - DNA, 120 bp, Artificial Sequence
  ENSG00000253658_10 (sequence is synthesized)
caagtctctttgctaaattttgatttacctaaggccagtagcctgaattcaactttagcagtcccagggctcagtagatttgccctgtagattctgtaattggatatttatgttccatgt

SEQ ID NO: 910252 - DNA, 120 bp, Artificial Sequence
  ENSG00000253658_11 (sequence is synthesized)
atttcttctttcagagcatagcagaagtatagggataacaccttagctgaatgttggccctaaaatagctgctcatttgtagcactcagacgaagctgaaattattcacattcagccgac

SEQ ID NO: 910253 - DNA, 120 bp, Artificial Sequence
  ENSG00000253658_12 (sequence is synthesized)
atttccgttaggtgagatgctgcctgctaattcacatttgcctgggattgctcctcagagttcagatttaattttgataacatcaactctatcatttaataaataataagcagtaaaaaa

SEQ ID NO: 910254 - DNA, 120 bp, Artificial Sequence
  ENSG00000253658_13 (sequence is synthesized)
agtcctggactgagcttcagaagatctcagatcactgacgttctgtctagaagaatactccaagatatatttctaagtaatattccttctcttgttgggggaaattagagaagatttcta

SEQ ID NO: 910255 - DNA, 120 bp, Artificial Sequence
  ENSG00000253658_14 (sequence is synthesized)
cctggtgccatatcaactcaaggatggagtcaaatactgagaggctctgtcatctgtctttggatctccttctgtgaaaattctaacaaggagcaaacagcaaagaactgaaatgctata

SEQ ID NO: 910256 - DNA, 120 bp, Artificial Sequence
  ENSG00000253658_15 (sequence is synthesized)
cagactccagtgagaaaaaactgaggtaattggtttcggtgtgctggtgcttgaaactctatcccagtgcttccttcaactaaggctgcaaattgaaaatgtgaagaaccttgcctgctt

SEQ ID NO: 910257 - DNA, 120 bp, Artificial Sequence
  ENSG00000253658_16 (sequence is synthesized)
aagcctattgttattgggcattttgaatgaaagaaaagcagtatggcatattaggtttaagggttcctcaatatcttaatctatattgccttcggaaagaagcaatccttagataaaaaa

SEQ ID NO: 910258 - DNA, 120 bp, Artificial Sequence
  ENSG00000253658_17 (sequence is synthesized)
ataaaatactttaaaatttctctccatttcattagtgcatgagactgagacaggtattgtcactcttgccactgactcagtgacatgtcagaaacaatgaagtcttaaatatattgctca

SEQ ID NO: 910259 - DNA, 120 bp, Artificial Sequence
  ENSG00000253658_18 (sequence is synthesized)
aaatttcaactgcctatatatagcataaaattaattgcatttagaaaaaaaagttctgttctcttagcaattttcaggtagatcctaaatgttctcgacacaaaaagattcatatgtgag

SEQ ID NO: 910260 - DNA, 120 bp, Artificial Sequence
  ENSG00000253658_19 (sequence is synthesized)
tctcgacacaaaaagattcatatgtgaggtgatagatattatgattagtttgatttaatcatttcacaatgtataaaaatatcaaaacaacatgtacatcataaatatatagactttaaa

SEQ ID NO: 910261 - DNA, 120 bp, Artificial Sequence
  ENSG00000253658_20 (sequence is synthesized)
tgccagcccaatatcatgtctggtttatatttcaatctgagcaatgagtagggagcaacccacagccacattgagagccagccttgaaaatcagagggacctcttgattttggacacgac

SEQ ID NO: 910262 - DNA, 120 bp, Artificial Sequence
  ENSG00000253658_21 (sequence is synthesized)
agcctgtcccacatttaccaacttcacagaaatgaaaaactttgtgtgacgtgttggggctaacaagatgaagatggactcctgccatcataaggttcctgatctaggcacagggattcc

SEQ ID NO: 910263 - DNA, 120 bp, Artificial Sequence
  ENSG00000253658_22 (sequence is synthesized)
tggaaacaattccccacagatatcaagggatgattgtattcggccagaaagtacatctcaaagagtaagaattaggcaagacatagttggatgttggcactccgtctagcctgaaagcag

SEQ ID NO: 910264 - DNA, 120 bp, Artificial Sequence
  ENSG00000253658_23 (sequence is synthesized)
ttatagaagaaggctttctgagaagcggtgccacacgtcttttcaatgtcatcacaagagtgcctggtctaactctcaggggatacgtgctttttgcctgctcatttattggggagtgtc

SEQ ID NO: 910265 - DNA, 120 bp, Artificial Sequence
  ENSG00000253658_24 (sequence is synthesized)
tggaaagaatctattgttcgtgacgtcgcctatgttctcctttacttccctattcagtcattgggttggagctacattttaaggcaaataaataaataaataattttagtaaaagttaaa

SEQ ID NO: 910266 - DNA, 120 bp, Artificial Sequence
  ENSG00000253658_25 (sequence is synthesized)
agtgacttagcaagggcgtgcatgatgtagtcacgagatggatattggtaacagtgattccttgctggtactttctattaagtctaggtttcttgtcactcattgatcgaccgcacaaaa

SEQ ID NO: 910267 - DNA, 120 bp, Artificial Sequence
  ENSG00000253658_26 (sequence is synthesized)
ataatttgcccaggcttccacatcattgtacctgtattgatgatccccagtgcacaagattaccacgtgaatggcaatgaaatttgtggcgctgatactcagggtctccaccagcgatgt

SEQ ID NO: 910268 - DNA, 120 bp, Artificial Sequence
  ENSG00000253658_27 (sequence is synthesized)
atatcactattaatttcactttgtatttcagaaagccgaaccttttaaaatggagcttattgcaccaaaaatagttggaaatagagtaaaaccaaagagaaaaccttaacaactatatat

SEQ ID NO: 910269 - DNA, 120 bp, Artificial Sequence
  ENSG00000253658_28 (sequence is synthesized)
ttttatttgttttagcaggaacatttttctattcatgttccagattattttctaaagtaaaatatattgattgtaaatttttttttccaaaaaagctacatcaatttatattcaactaag

SEQ ID NO: 910270 - DNA, 120 bp, Artificial Sequence
  ENSG00000253658_29 (sequence is synthesized)
ttctggccacacaaaggaaaataagcaaataaaaataactttcgactcccccaaactcaaagatatccagttatctaagcttccaatgttttcttgtaaaagtggtcgctaccctgagga

SEQ ID NO: 910271 - DNA, 120 bp, Artificial Sequence
  ENSG00000253658_30 (sequence is synthesized)
taaacttgaatatgtacatcctatatccctagatttctttcttacgccctcaagactaaccagaagaaaaaacgctttctcttccagaaaatgcagcaactgtacttcggttttacatat

SEQ ID NO: 910272 - DNA, 120 bp, Artificial Sequence
  ENSG00000253658_31 (sequence is synthesized)
attattctgaaggtgatatgtaaataagatttttctggaaaaagaagcaatcaaaatattttggttcagtttggctaatgaaattcttgtgtttttacttctcatgactcactaccaaaa

SEQ ID NO: 910273 - DNA, 120 bp, Artificial Sequence
  ENSG00000253658_32 (sequence is synthesized)
atccatcgtgtgccctgtgcctggcatggagcctgtcccacagtaagcaggcaagaaatgattttaagtgaaagattgattgggctgactggactctttctccattcaaaataacctttc

SEQ ID NO: 910274 - DNA, 120 bp, Artificial Sequence
  ENSG00000253658_33 (sequence is synthesized)
caaataattcagattaaaatttcagtataaaagacttttgtttcttagagaaagttaaaataatcccatcatgctcaacaaatgcagcatttctattgttcacacaaatttctgatcacc

SEQ ID NO: 910275 - DNA, 120 bp, Artificial Sequence
  ENSG00000253658_34 (sequence is synthesized)
atggcagacgtttctgcttacctactcaacgtctatttcccattcagtttttgtaatataacctgattttcagtgaggctgtacgtagccagctgcaaattgcatttcctaacctccttt

SEQ ID NO: 910276 - DNA, 120 bp, Artificial Sequence
  ENSG00000233705_0 (sequence is synthesized)
ggggctcctagaacccactctccccaaaggcgagtttcccaggcgccgctcgtgctgttgctggaaagcgagctcgctgtagaccggccgcgacaccatgtagctgcagctgtactcggg

SEQ ID NO: 910277 - DNA, 85 bp, Artificial Sequence
  ENSG00000233705_1 (sequence is synthesized)
cagcgaggagggaggacacgcgacatgatctcattctgttgcccagggtgagtgcagtggcaccttcatggctcattgcagtctc

SEQ ID NO: 910278 - DNA, 120 bp, Artificial Sequence
  ENSG00000233705_2 (sequence is synthesized)
cagcccattctgcaatcttcggaaggaagtcactatatgcagcctatgcttgaggagtggggagttgaattccacatccttgagggcagaatacctaaataaattatttggaattcttct

SEQ ID NO: 910279 - DNA, 120 bp, Artificial Sequence
  ENSG00000233705_3 (sequence is synthesized)
gcctggcgctgccatgacctgcgagccagaggacagcgaggagggaggacacgcggtaagcgaggacgatcggaggggaagagcgaggaacagaaagaacgggatcacctgttagctgca

SEQ ID NO: 910280 - DNA, 120 bp, Artificial Sequence
  ENSG00000233705_4 (sequence is synthesized)
gccaggcccccctgcaccgcgagtctggtccgcgtcctgcagccctcggcgctcgcgacaagcgccccacggcgcgcacggccagcctgcaggggggcacctgagaaccttcgggtctcg

SEQ ID NO: 910281 - DNA, 120 bp, Artificial Sequence
  ENSG00000233705_5 (sequence is synthesized)
tggcctgcacccgctgcccggggttccccaaacttgaagcgagtaagcccctgctctgggggcttcccgagttccacccagtcccctatggcccgcagccagggcgctgtccgcgttctg

SEQ ID NO: 910282 - DNA, 120 bp, Artificial Sequence
  ENSG00000233705_6 (sequence is synthesized)
aaatctcccccaaaccgaggggctggggcaggggccaaaggcgcttgcaaggctggaaggggacactgagattccctccctccccgcacctgacccgggacgcagctccaggtgcgcact

SEQ ID NO: 910283 - DNA, 120 bp, Artificial Sequence
  ENSG00000233705_7 (sequence is synthesized)
ggaggagaggtgcagacccccgggccaggcgtggaaccgtcagggcgcgctccgcgggtccccaagaggcggacgctgcaggcacattccagcagctgtcgcagccctctcgggggcaga

SEQ ID NO: 910284 - DNA, 120 bp, Artificial Sequence
  ENSG00000233705_8 (sequence is synthesized)
actttcagcttattgagcaagtctctcccctcgtcctgttttccgagcagcctgttcgctctcggcgtctcagaaagaaagctgtactgccccctgcccacctgatccgtgaccacttaa

SEQ ID NO: 910285 - DNA, 120 bp, Artificial Sequence
  ENSG00000233705_9 (sequence is synthesized)
gagtcccatccgcaaccctcgaggcctccccgggagtggagcccgggccgggcggtgtgggcatcttcagggcgaactcacctgtctctgctcgcgccccgcccggaatgccccgcggac

SEQ ID NO: 910286 - DNA, 120 bp, Artificial Sequence
  ENSG00000233705_10 (sequence is synthesized)
tacccttccgctgcctttatagcgctctcagaaggcagtgggacgttttatttacggagcaacagacaccttggtcgaagggaaagacacacacaggctgcggtctttcccaaccgatcc

SEQ ID NO: 910287 - DNA, 120 bp, Artificial Sequence
  ENSG00000233705_11 (sequence is synthesized)
tatcaggaaagaaatcctacccctcctgcattcttcccctttcccgaaccgggaaggctgagactcttactggctgccacgcaggggccacccggatcctcactcatcccgttactaatc

SEQ ID NO: 910288 - DNA, 120 bp, Artificial Sequence
  ENSG00000233705_12 (sequence is synthesized)
tcaagggttgcgaggtcaggggcgggccaggccctgtgggactccttaaagaagagcagagcccgcctagaggaagaggtccgtggtctctgggagcctgccacaggtgctctcatacca

SEQ ID NO: 910289 - DNA, 120 bp, Artificial Sequence
  ENSG00000233705_13 (sequence is synthesized)
catggggaggagaagaggaacaatggccaggtttctatattaataagtccttgaatttctagaaagtcttttaggagtattcaatgggtggaggatacagagagttcacgatttactcag

SEQ ID NO: 910290 - DNA, 120 bp, Artificial Sequence
  ENSG00000233705_14 (sequence is synthesized)
attttagccacttattctacgtgtgcatgtgtgtgtgttttatttcacaatccaaatcaagccgtccaggtggccctttcttacccactagactctgttttttctttttctcattctcct

SEQ ID NO: 910291 - DNA, 120 bp, Artificial Sequence
  ENSG00000233705_15 (sequence is synthesized)
ggacaatcagggaaggaataaactggactacatggaaatcaagactagaagagagggaggaggagctggagctatcctacctcatcagtgttttgtcttctgttgggatgaactttgtta

SEQ ID NO: 910292 - DNA, 120 bp, Artificial Sequence
  ENSG00000233705_16 (sequence is synthesized)
aaactaatgcatggttaagatgaaaggcagaaggaagggtttgataaaccagaacattctcgcctgattgttagtgttctgaagtaaatacagaagaggctccaaaatacagacctctgt

SEQ ID NO: 910293 - DNA, 120 bp, Artificial Sequence
  ENSG00000233705_17 (sequence is synthesized)
acatcaaccttccgtaatccacctgccttgcatatgcagaccatgacaattctacgagctcctggaaacagaactcagaactcctccccagagaaccctgatgcaaattctctgaaatgg

SEQ ID NO: 910294 - DNA, 120 bp, Artificial Sequence
  ENSG00000233705_18 (sequence is synthesized)
tagtcagcatgtgcgttttcctgagaagtgaatgagtcaacagctttcaacagatcttcaaaggcttacttcacccaatgaagttaagaaccactaaagaagaaacctaaaaggaaaatc

SEQ ID NO: 910295 - DNA, 120 bp, Artificial Sequence
  ENSG00000233705_19 (sequence is synthesized)
caggtcatgaactttgcaatttttattcacatacagagaagaggggaggaatctcttgtgtatgttttacttatgtataccactggttcttaataaagggctttttttgcctccagaggt

SEQ ID NO: 910296 - DNA, 120 bp, Artificial Sequence
  ENSG00000233705_20 (sequence is synthesized)
caatgcctggagacatttttggttgtcacacctagggagatgctattgggatctagtgagtagagaccagagatgctgctaaacatcctacaatgaagtttgctatcactccaaggtttt

SEQ ID NO: 910297 - DNA, 120 bp, Artificial Sequence
  ENSG00000233705_21 (sequence is synthesized)
gcatgcgacttaaactgtacatttattaatcaattgctacatgtactaaaatatgtatctctctccatatatgtatatatgcgtgtattttttcattattgttggatgtatagctcaact

SEQ ID NO: 910298 - DNA, 120 bp, Artificial Sequence
  ENSG00000233705_22 (sequence is synthesized)
gaggaaagtatttgttttaaagtagaatctgaatatactcactctgtataccctcatccataccttcaagatctggtgaaaacactatctcttgcaagaacattctttgatgctgttcag

SEQ ID NO: 910299 - DNA, 120 bp, Artificial Sequence
  ENSG00000233705_23 (sequence is synthesized)
aattaatccagacccttttctgtattctcttaataccttatctgatcctctcttaagttacttctcactatctaccttagtaacacaattttatttacatacaagttctctctccctcac

SEQ ID NO: 910300 - DNA, 120 bp, Artificial Sequence
  ENSG00000233705_24 (sequence is synthesized)
tagacaaaaacttcttgagggcaagcactgtgtctcctttcaaccattattatcttctctcatgttttttgaacagatttatctatagcccaaacataccttttcaaaaaactaaaaatt

SEQ ID NO: 910301 - DNA, 120 bp, Artificial Sequence
  ENSG00000233705_25 (sequence is synthesized)
actttacatatttgatctaaggctttgtttttctccattaagagcatgctgtggatatctttgcaagtgagtgcataaggatttttcttaaccttggagatggctgtctaggatttcaga

SEQ ID NO: 910302 - DNA, 120 bp, Artificial Sequence
  ENSG00000233705_26 (sequence is synthesized)
atatcaactcatatttgtagctccatggcaactcacctacacaactcacaactctttattgaaggcattctgtaccaatataaatatagtccatatcccattctaatatggatttctgct

SEQ ID NO: 910303 - DNA, 120 bp, Artificial Sequence
  ENSG00000233705_27 (sequence is synthesized)
ccttgttgcttgctattttgaacacttttagtctggtccagtcaggcctataaaccactttgcatcagaacttggcaatggtttgctggttcagaggattaaggagtggggtaaggctgg

SEQ ID NO: 910304 - DNA, 120 bp, Artificial Sequence
  ENSG00000233705_28 (sequence is synthesized)
cagaaggacagaagagaaaagacttgagtaacaacaggaggcaaaagagtaacttagcttggctaatagaattcttatttgaaatgcatctctctatataagagtttggttcaataatca

SEQ ID NO: 910305 - DNA, 120 bp, Artificial Sequence
  ENSG00000233705_29 (sequence is synthesized)
caatataataagtcctgcatgtatctggatgaagataattgcttttttctgttcaatgcttttccatagcagaaatagctggggcagaacaaaatggtatctctgttacaggattctata

SEQ ID NO: 910306 - DNA, 120 bp, Artificial Sequence
  ENSG00000233705_30 (sequence is synthesized)
agggtatagaactgcttttctcataggtaaaaggcagaccgtttgaatttggctttttaaaaacagaagagtaggaggaaataacagcttgctctctccaccctatttaattgtgatatt

SEQ ID NO: 910307 - DNA, 120 bp, Artificial Sequence
  ENSG00000233705_31 (sequence is synthesized)
aaacaccttagattactcacttgggctttataaggcaaccttctcctgtttcacacagaggtgggtggttcttatttatcagacttttaaaatattcaggacttctttccaaagaaatag

SEQ ID NO: 910308 - DNA, 120 bp, Artificial Sequence
  ENSG00000233705_32 (sequence is synthesized)
atgcatcacttaaaaataaatatcagacaatattattgatactttacagtacttatttagcagttaatacttttttaaaaggcattttcttatttatcatttaggcatttgcagtgtaag

SEQ ID NO: 910309 - DNA, 120 bp, Artificial Sequence
  ENSG00000233705_33 (sequence is synthesized)
acaaactcccttgtttgattacgcattcacctgttcattcattcattcattcaaggatttattaggaaattatttgtgctggctgtgggtacaatgatgaacaaaagcttataccctggc

SEQ ID NO: 910310 - DNA, 120 bp, Artificial Sequence
  ENSG00000233705_34 (sequence is synthesized)
ctcatatttatgggtgcagtagacactaatcaaatggtcacaaaatgtgtatcttatttcactgattataaaatacagatttttcacattttatcagggttcatgttataattgatgatc

SEQ ID NO: 910311 - DNA, 80 bp, Artificial Sequence
  ENSG00000233705_35 (sequence is synthesized)
aatatagatatttacataaatttatagtgtatctatgccttttttttcttttttagagatgggatcttgctattttgccc

SEQ ID NO: 910312 - DNA, 120 bp, Artificial Sequence
  ENSG00000233705_36 (sequence is synthesized)
taaatttatagtgtatctatgccttttttttcttttttagagatgggatcttgctattttgcccaggctggacttgaactcccagtctccagaatagctgggactataggtgcacaccac

SEQ ID NO: 910313 - DNA, 120 bp, Artificial Sequence
  ENSG00000233705_37 (sequence is synthesized)
tttgagtgactacgtgtgctacaagaatgatttaattgaatccttcgtttatttaacttaagagcagtcaatcttgctacattatttttgtctgagagcgaatattgtggtataaatttt

SEQ ID NO: 910314 - DNA, 120 bp, Artificial Sequence
  ENSG00000233705_38 (sequence is synthesized)
ttctttttttttttttttttacaatttaaaatgttctcaaatcagaagaattgcaaaagaatgcaaacatgttggctgggcgctgtggctcacagtgtaatcccaacactttgagaagct

SEQ ID NO: 910315 - DNA, 120 bp, Artificial Sequence
  ENSG00000233705_39 (sequence is synthesized)
gaggcgggaggatcacttgagccaggcctaatcctgagcttttatttcattatgcgtgttaattttctcaagatagcaaatgctaaatttttgtcatacttatacaaaaagagaactgaa

SEQ ID NO: 910316 - DNA, 120 bp, Artificial Sequence
  ENSG00000233705_40 (sequence is synthesized)
ctgaactttctttctatatttctgatctcttcttctctgagcaacttattgggcttattctcagtaatcatacagttttgcactcaattgttttcttggttttttgttgttatttttatc

SEQ ID NO: 910317 - DNA, 120 bp, Artificial Sequence
  ENSG00000233705_41 (sequence is synthesized)
ttgcactcaattgttttctatttgtttactgtatgctactttattttcttctccagttataagatatgctccctagggacataaatagtatatgtcttttatggtgttacaaaaataaga

SEQ ID NO: 910318 - DNA, 120 bp, Artificial Sequence
  ENSG00000233705_42 (sequence is synthesized)
tgtgcctgtagtaaataatttggaaactacattaatgtataatatagtaatcacattttatctcattatccagataatcactgttttgcttctttttttatttattctttctatgcagac

SEQ ID NO: 910319 - DNA, 120 bp, Artificial Sequence
  ENSG00000233705_43 (sequence is synthesized)
actccaagtttccttcagagaggaaaaagagagacggggctcctagaacccactctccccaaaggcgagtttcccaggtaagttcatttcgggcccgagactgatggagccaccctccca

SEQ ID NO: 910320 - DNA, 120 bp, Artificial Sequence
  ENSG00000233705_44 (sequence is synthesized)
ccagaagggcggcgtggaggaccggagaccgaaagtcgggcctctgggagaagcagctggcgcccaggggctccgccgcccgcaccccactctcgcccgctggggacgcccttccctccc

SEQ ID NO: 910321 - DNA, 120 bp, Artificial Sequence
  ENSG00000233705_45 (sequence is synthesized)
caaggcgtggacgccccgctccgcttctctctacgcaggcccgcgcggccgctacctgcagcacttggccaggctctcccgcagcgtcttgcgctcctgcaggcgccgctcgtgctgttg

SEQ ID NO: 910322 - DNA, 120 bp, Artificial Sequence
  ENSG00000233705_46 (sequence is synthesized)
tttatttccctacacaataccttgacaaattatgacaatataataggtaccagacttgttaaattattgatcaattgattgtttaacaatggaattttgagaaatatttgggtagaaaaa

SEQ ID NO: 910323 - DNA, 120 bp, Artificial Sequence
  ENSG00000233705_47 (sequence is synthesized)
aaactagttttaaaagaagagaatccaaccattaaaacatcaaaaaatgaaattatttgtaaatattatgtggcaatccattcaattttaaacaacttacagtgtcaataaaactataac

SEQ ID NO: 910324 - DNA, 120 bp, Artificial Sequence
  ENSG00000233705_48 (sequence is synthesized)
tcaataaatttctcaggcagagcccatctgcctcttctttaatatgaatgcaaacttgatatgtggtttagtaaattgctagaacgaaatgatggcatagttttgggttttgaggggttt

SEQ ID NO: 910325 - DNA, 120 bp, Artificial Sequence
  ENSG00000233705_49 (sequence is synthesized)
tgtgtgtgtgtgtgtgtgtgtgtttgtttgtttgttttaaacagggtctggctctgtcacccaggttgaagtgcagtgacactatctcagctcactgcaaccttcacctccaaagctcaa

SEQ ID NO: 910326 - DNA, 79 bp, Artificial Sequence
  ENSG00000233705_50 (sequence is synthesized)
tgacactatctcagctcactgcaaccttcacctccaaagctcaagccattctccacctcagcctcccaagtagttgaga

SEQ ID NO: 910327 - DNA, 87 bp, Artificial Sequence
  ENSG00000233705_51 (sequence is synthesized)
tttgtagagacagggttttgccatcttgctcaggctggtctcaaactcctgtgctcaagagatccacctgcttcatcctcccaggag

SEQ ID NO: 910328 - DNA, 120 bp, Artificial Sequence
  ENSG00000233705_52 (sequence is synthesized)
gacagccttcctggaagaggaaacagcaaatgcaaaaactctgagttaggaaagaacttgatgcacttgagaaacaaaaagaaggccggcaagactgaaatccacataagtcagacccgg

SEQ ID NO: 910329 - DNA, 88 bp, Artificial Sequence
  ENSG00000233705_53 (sequence is synthesized)
ccgcctggcgctgccatgacctgcgagccagaggacagcgaggagggaggacacgcggcttctggcttggaggaggatcctacgccca

SEQ ID NO: 910330 - DNA, 120 bp, Artificial Sequence
  ENSG00000233705_54 (sequence is synthesized)
gtccgagatcaaactgcaaggcagtagcgaggctgggggaggggcgccagccattgccaagttagttgtttgattaggtaaacaaagcggctgggaagctcgaactggatggagcccacc

SEQ ID NO: 910331 - DNA, 82 bp, Artificial Sequence
  ENSG00000233705_55 (sequence is synthesized)
aatgaaggaaaaaatgttaaaagggcagccagagacaaaagttgggttacccacaaagggaagcccatcggactaacagctg

SEQ ID NO: 910332 - DNA, 120 bp, Artificial Sequence
  ENSG00000233705_56 (sequence is synthesized)
gagtgtttcaaggactcctcctggtcaagagctgggtttccctattcatttcatttaaacaagctcccaagaaggcaacagggacccactgtaccccaagaggcactccaagtttccttc

SEQ ID NO: 910333 - DNA, 120 bp, Artificial Sequence
  ENSG00000233706_0 (sequence is synthesized)
cttctctcacgtgaggtgctgaggacaaggatctaccaagtcatatgacaatgatccaactaaagggccaacccttggtattcaggtgcttacaatggaatccccagcaggatcctttct

SEQ ID NO: 910334 - DNA, 120 bp, Artificial Sequence
  ENSG00000233706_1 (sequence is synthesized)
cagcatggtggccacctcagtgacacgcaggtcacctcagtgacacagacgtggagtcacagacagcagcagtgaaatgatggccttaaacactgcaactcaggcttatgtgaagaagcc

SEQ ID NO: 910335 - DNA, 120 bp, Artificial Sequence
  ENSG00000233706_2 (sequence is synthesized)
cacgcccactctcaacaaaacagactcctccttgggaagcatctccagccctgggacagacacctcgctgtgacttagggagggacaggattagcccaggaataaaagcatttttagaaa

SEQ ID NO: 910336 - DNA, 120 bp, Artificial Sequence
  ENSG00000232077_0 (sequence is synthesized)
gtatttcaagcagggaaaacggaagagggctgactggtttactctggagattttccttagtctggaccaaaccttcccattattggacacagatggtcagctagtaatcaatcatctata

SEQ ID NO: 910337 - DNA, 120 bp, Artificial Sequence
  ENSG00000232077_1 (sequence is synthesized)
attatgctttggaaaaacctcatgagcaaagaccctcgacttgtagtcaaagctacaatttatgtcaagcagctccattagatgtctcatttcccagccatcaggaggaggaaagaggga

SEQ ID NO: 910338 - DNA, 120 bp, Artificial Sequence
  ENSG00000232077_2 (sequence is synthesized)
atgaagaacaagcttcttcctgtgggtgtgacccagaggttgttcgtgtcacttctattcacatttgcttgtgtagaacttacacaatcatacttaacttcaagaaagattgggcaacat

SEQ ID NO: 910339 - DNA, 120 bp, Artificial Sequence
  ENSG00000232077_3 (sequence is synthesized)
agtttatagcggggaggatttatgccctgaaattgatggtgtcatcttttcatcttccctctctcaccattagcatgtaatctgtaactgaatttgaacaatccaacttccaaatgattt

SEQ ID NO: 910340 - DNA, 120 bp, Artificial Sequence
  ENSG00000232077_4 (sequence is synthesized)
cttgccccaccaagtcatttctgacaccgtggccgctaattcttaagaatagaaaccaaatcatcactcttctttaaggcctttagtgtctatttccatagaataaaatccataccctgc

SEQ ID NO: 910341 - DNA, 120 bp, Artificial Sequence
  ENSG00000232077_5 (sequence is synthesized)
accatgagccgtaagacctggcaatgacctggctctagtgtacccagtgctatccttgcaccatgctttccaccagtcactatgttctggcttctctggcctccacctttttctagaaca

SEQ ID NO: 910342 - DNA, 120 bp, Artificial Sequence
  ENSG00000232077_6 (sequence is synthesized)
cattgatcctttccccacctcaggcccttatccctgctattcttcatcctgtaaaacttttgctgggatctccgcgtggctggctcgccctcatctcttggcactcagcacaaatgtcat

SEQ ID NO: 910343 - DNA, 120 bp, Artificial Sequence
  ENSG00000232077_7 (sequence is synthesized)
ctattttgagaatctttcctgactgccctttgtaaagcagcatgtcttgttcccagtgactctttattgcattactttatttattttcttcatagcatttattaaattatataataatcc

SEQ ID NO: 910344 - DNA, 120 bp, Artificial Sequence
  ENSG00000232077_8 (sequence is synthesized)
agcatgtatttcctattctgtctggttggcttgctgcttaaaaatcagaatacagaagagaagacagtcttgtggagggtcaaaggagccactgtttgtagttatttgggatctttgagg

SEQ ID NO: 910345 - DNA, 120 bp, Artificial Sequence
  ENSG00000232077_9 (sequence is synthesized)
gtatgctgctttaggggtattccaaagagctgcgaaatcactccggagacacaggacatttcccaggattggacgaggccagtaaggtgaaagagtagaggcctgaagattccagagagc

SEQ ID NO: 910346 - DNA, 120 bp, Artificial Sequence
  ENSG00000232077_10 (sequence is synthesized)
tagtaacaacttcactgaagtggctgagatccacagtgtgtcaggaggtgtttctagagaggtacagtagatgggaaatgagaggacatgaattcagtaagctccttaacctcctgcctc

SEQ ID NO: 910347 - DNA, 120 bp, Artificial Sequence
  ENSG00000232077_11 (sequence is synthesized)
atttatcaaatgggtctgatgaaagtgatatatatgaaagcacctggcataatattggtcagattgtggtgcttgatgatggaatggtgcataaataaataaacacgggctctcaatcaa

SEQ ID NO: 910348 - DNA, 120 bp, Artificial Sequence
  ENSG00000232077_12 (sequence is synthesized)
caatgattccattatcagataatctctcagatagtgatgcctataatattgtttataaagacatgtccttgtctgttttcctttcatcacaggataatggaagtaaaccaaggaggtata

SEQ ID NO: 910349 - DNA, 120 bp, Artificial Sequence
  ENSG00000232077_13 (sequence is synthesized)
gagactccgtctcgaaaaaaaaaaaaaaatcctgtgctaaaaagatgtgtcacattacagttttataggagcagctttagtactgggaattggaataggagctgtttcaatacattctaa

SEQ ID NO: 910350 - DNA, 120 bp, Artificial Sequence
  ENSG00000232072_0 (sequence is synthesized)
aggttgaagagcttgcagaatctctgtgccacgcttgccaaggttcttgcatccctcatctgtcatagagaaagtggtggagataaaattgtgccagcagcaccttgtcaaacccctgct

SEQ ID NO: 910351 - DNA, 120 bp, Artificial Sequence
  ENSG00000232072_1 (sequence is synthesized)
acaggcatccattgtgagtcatgggataaaggataagagagcagccagaggcttcagcatcatatgtctgagttctgcagaaaggaccaggcccagaagactcctggcttccacacatac

SEQ ID NO: 910352 - DNA, 120 bp, Artificial Sequence
  ENSG00000232072_2 (sequence is synthesized)
ccatgaatcacctgattaaggcccactctcaggattattcccctatcaatgcactgaatctactttcaaccaaggtaccaaaaacttcattgctcaatctaataaactcctttcaatgaa

SEQ ID NO: 910353 - DNA, 120 bp, Artificial Sequence
  ENSG00000232072_3 (sequence is synthesized)
tttgtgttaggctggcactgggttgggtgacaatcctcaggaattgtggagcctgactcccttggaagttctctgccagctcgctgaccccagtcctcgtaaacacagttctttgccaag

SEQ ID NO: 910354 - DNA, 120 bp, Artificial Sequence
  ENSG00000232072_4 (sequence is synthesized)
ggggtcctgctcttgcggttgcgaaattagtttgaggaggccatgtgagtgaatttctacagcataaaagaaatcactgatcatctgaccaggcccagaagactcctggcttccacacat

SEQ ID NO: 910355 - DNA, 120 bp, Artificial Sequence
  ENSG00000232073_0 (sequence is synthesized)
attaagaagggaggtaggaggagagcatggatatgaccaaactcaaacttatttcttgggattgtgagtttgctgccccctaacagtgctgggaacataatccctcacgaggagcagaaa

SEQ ID NO: 910356 - DNA, 120 bp, Artificial Sequence
  ENSG00000232073_1 (sequence is synthesized)
catcttgcagtttatgtccgtttttatccattgatctcctgctgtcgatgtctgacttttcgctttgtctgttttatcagtgggagctgatgtcaactcttcagaaatgtcaaggttctg

SEQ ID NO: 910357 - DNA, 120 bp, Artificial Sequence
  ENSG00000232073_2 (sequence is synthesized)
tacctagggccacctggaactccaggagacattgagaagtccttccccactcaagtctgcctttgcagtgaagctgagggatcccatcccaggcccctcccagcccgttgtcttcaagga

SEQ ID NO: 910358 - DNA, 120 bp, Artificial Sequence
  ENSG00000232073_3 (sequence is synthesized)
agtgttgcgtaatcatcaggccacttcaatcttaccaaggggatgttcccctgcatgtaccacctcaatcttaccacagggatgttcacctggcacgtaccaccttaatcttaccacggg

SEQ ID NO: 910359 - DNA, 76 bp, Artificial Sequence
  ENSG00000232079_0 (sequence is synthesized)
tgagagtgggcatccttgtcttgttcctgttctcagagggaatgctttcagtggattttattacattaagacatct

SEQ ID NO: 910360 - DNA, 120 bp, Artificial Sequence
  ENSG00000232079_1 (sequence is synthesized)
tcataggtggattttattacattaagacatctacccctggagaaagagcccaatgagaagtaatctctgaagcccagatttcctaaggatgaagcttcaggagaggccttatcaatcctg

SEQ ID NO: 910361 - DNA, 120 bp, Artificial Sequence
  ENSG00000232079_2 (sequence is synthesized)
ttccagctatctaagatacacacacaaccacacacgcgcacacacggtagagataaatatgttcgaaaatccagctcaatgttactagaaaatttgatcagaatctggtgaaataaatag

SEQ ID NO: 910362 - DNA, 120 bp, Artificial Sequence
  ENSG00000232079_3 (sequence is synthesized)
taaacttactaaaaatgccaaatatcccagaagctgcttaacatttgatcaaaagctctgtccagtcaattcctgcttctttcaaaaatactctgctgaaaagccaaaggagaaatgggg

SEQ ID NO: 910363 - DNA, 120 bp, Artificial Sequence
  ENSG00000232079_4 (sequence is synthesized)
tgtgacccagggtagccactgggatttatgaagaggcaaaagtggggagatttgagaatttaggaatgtcaggagtgggcatacacagagctatctctgggcaccctcacccactttgca

SEQ ID NO: 910364 - DNA, 120 bp, Artificial Sequence
  ENSG00000232079_5 (sequence is synthesized)
caggcttttgcacagtggatgattgtgctcctggaagagatccagggagcacaaagtacgagacctgcttctgcccaagaggatcagaaactgagacctatgtgggtctcaggggatggt

SEQ ID NO: 910365 - DNA, 120 bp, Artificial Sequence
  ENSG00000232079_6 (sequence is synthesized)
actaaaccactcgtgagaaattcaccaccataatctcatcacctcccaccaggccccacctccaaaactggggattatatttcaacatgagatgtgggtgtgaacacagattcgaactat

SEQ ID NO: 910366 - DNA, 120 bp, Artificial Sequence
  ENSG00000232079_7 (sequence is synthesized)
catttcagaatacaaatatgccttcccaatcatctcccaaagtctcaactcattccagcgttaactcaaagaccaaaattcaaagtctcatctgaaacaaggtgttgccaaaggagatta

SEQ ID NO: 910367 - DNA, 120 bp, Artificial Sequence
  ENSG00000232079_8 (sequence is synthesized)
ttatttgagtcagaggactgggagaagcagacctaccctcgatctgggtgggtgtcatctagtcagctgccagtgtggctagaatgaagcaggcagaagttggaaagagcagacctgctg

SEQ ID NO: 910368 - DNA, 120 bp, Artificial Sequence
  ENSG00000232079_9 (sequence is synthesized)
agtcttctggccctcaccgttctcccgtgctggattcttctggccctcaaacatcagactccacgttcttcagcttttggactcatggacttacaccagtggtgtgccagggcctcttga

SEQ ID NO: 910369 - DNA, 120 bp, Artificial Sequence
  ENSG00000232079_10 (sequence is synthesized)
gggtggatagggaaggaccatcaggtggaggtggggctaggcgtgtctgagctcagactctttttgggtgggtcctgctgaagctgttgttggggatgggggtgacattcccaggtcact

SEQ ID NO: 910370 - DNA, 120 bp, Artificial Sequence
  ENSG00000232079_11 (sequence is synthesized)
tgagtcatgcaggttgtcagggaagtcggagaaagctgacagtcactggcctcacccagctcccacgcaaactgaagggctggtctcactctcactatgcccccgtaacagagtcagttt

SEQ ID NO: 910371 - DNA, 120 bp, Artificial Sequence
  ENSG00000232079_12 (sequence is synthesized)
ctcactctcactatgcccccgtaacagagtcagtttttaggcggagggtgagaatggcttgaaaatttgctgaatgctatccatctcccagcccccagagaaaagggctttagttcctcc

SEQ ID NO: 910372 - DNA, 120 bp, Artificial Sequence
  ENSG00000232079_13 (sequence is synthesized)
cctcccctgagttctggccaggaggcttcttgccctgttcaaatggttacaaagttcagctagagaattccttctccctgtagagttttaccccctgctcctctggccgccctccggatg

SEQ ID NO: 910373 - DNA, 120 bp, Artificial Sequence
  ENSG00000232079_14 (sequence is synthesized)
ggcaggaatgggctgcttggggacccagtgagctccgagggcctttctgctgcttcctgtacccctgtatttcgctcagctctctgacttgactcagctccagacatctacccctggaga

SEQ ID NO: 910374 - DNA, 120 bp, Artificial Sequence
  ENSG00000232079_15 (sequence is synthesized)
cccagattcaccttgttataccttataacttaaaatataaattccaacaatgtactgcactcaaaaaaattatttctcaatttgtttgctcatactattgatttttttctagaatctaaa

SEQ ID NO: 910375 - DNA, 120 bp, Artificial Sequence
  ENSG00000232079_16 (sequence is synthesized)
taattgtgaattaactatgatagcagtatgcacaaacagtaagtgaaatcagacctattaattctgagaggaaggaggtgtcaggattttcacagaagaagagcactaaggccaggcgca

SEQ ID NO: 910376 - DNA, 120 bp, Artificial Sequence
  ENSG00000232079_17 (sequence is synthesized)
agtgagctccgagggcctttctgctgcttcctgtacccctgtatttcgctcagctctctgacttgactcagctccagaaatattctttcattaatattacatgcttatggaactttacct

SEQ ID NO: 910377 - DNA, 120 bp, Artificial Sequence
  ENSG00000232079_18 (sequence is synthesized)
caaattttttgataaaaggaaacagagacctctttttctagcaggaagatatttttcttgggatgttttgtttatgctggcttgaataacactatgaaatattctttcattaatattaca

SEQ ID NO: 910378 - DNA, 61 bp, Artificial Sequence
  ENSG00000232079_19 (sequence is synthesized)
ttttaaaaatgtacctccttgtcttctgccacgattgtgaggcttccccagccatgtggaa

SEQ ID NO: 910379 - DNA, 80 bp, Artificial Sequence
  ENSG00000232079_20 (sequence is synthesized)
accagtggtgtgccagggcctcttgagcctttggtcacagactgaaggctacactgtcagcttctctaattttgaggttt

SEQ ID NO: 910380 - DNA, 120 bp, Artificial Sequence
  ENSG00000232079_21 (sequence is synthesized)
acagcacagcacagcagtgctgacagcatcgacagtcctgtggtgccagcaagaatccaaaagaagtgtcctacataaattcccttaatcactgaccatttaatgaggctgattcagcct

SEQ ID NO: 910381 - DNA, 120 bp, Artificial Sequence
  ENSG00000232079_22 (sequence is synthesized)
catacaaattttgtatgcttcttcatacaatttttaattgtgctgtaaaagttaaccagagacaatttctgttgcttgcacacagtaagttgactaagcaaaaaaattcaggagagatta

SEQ ID NO: 910382 - DNA, 120 bp, Artificial Sequence
  ENSG00000232079_23 (sequence is synthesized)
ttttatagaagtcaatgcaaatgcattaatttacaagaagtgaaactgcaagttcactttgctgccttatggccagcatattctcttacaagggaagtctatatggcaatctgtgttatg

SEQ ID NO: 910383 - DNA, 120 bp, Artificial Sequence
  ENSG00000232079_24 (sequence is synthesized)
atcagaagatttgggaaagatggaatctgtgagagagttttatgacacacggttacaactgatcacaggatcaaacactaaaactccaatatatatatttattcttattagcaaagcttt

SEQ ID NO: 910384 - DNA, 120 bp, Artificial Sequence
  ENSG00000232079_25 (sequence is synthesized)
tatgctatggaggaaaaagaaaaagaaataagaaattctgagtttctctaaacttccagtatgtggatgagttaaaaactatgtcatcttggattccccattttaaatatttcataataa

SEQ ID NO: 910385 - DNA, 120 bp, Artificial Sequence
  ENSG00000232079_26 (sequence is synthesized)
tgcattataattggtacatgttaatatcaattttttcttttgctgtttttgaagtggtgtgaatcacctgtaacaaggtttccttatcatccatttaattattgtcctataatatacttt

SEQ ID NO: 910386 - DNA, 120 bp, Artificial Sequence
  ENSG00000232079_27 (sequence is synthesized)
tcaatacagcaactactttttatgttttgggattacttttactattgttagataaaacctatggttgattgtgtgcctctagaagaacttcaaaagtacaatataaatcttgctaacaat

SEQ ID NO: 910387 - DNA, 120 bp, Artificial Sequence
  ENSG00000287144_0 (sequence is synthesized)
ggcaacccgctcgcgtccccttccagactgtggaagctttgttttttcgctttttgcagtaaatcttgctactgctcgctctttgggtccaggctgctcttatgagctgtaacactcacg

SEQ ID NO: 910388 - DNA, 120 bp, Artificial Sequence
  ENSG00000287144_1 (sequence is synthesized)
gctgctcttatgagctgtaacactcacggcgaagatctgcagcttcacacctgagcccagcgagactacgagcccacccggaggaacgaggagctccagacgcgctgccttaagagctgt

SEQ ID NO: 910389 - DNA, 120 bp, Artificial Sequence
  ENSG00000287144_2 (sequence is synthesized)
accagaaggaagaaactccgaacacatttgaacatcagaagggataaactccagacgtgccaccttaggagctgtaaacctcaccgtgagggtgcgcggcctcattcttgaaattgagtt

SEQ ID NO: 910390 - DNA, 120 bp, Artificial Sequence
  ENSG00000287144_3 (sequence is synthesized)
tgcgcggcctcattcttgaaattgagttgacttcaagaatcggtcttcgagcttctttcctcagcttggttgattctgctgttaatacttgaacccagccagcatgcttgtgagaagcat

SEQ ID NO: 910391 - DNA, 120 bp, Artificial Sequence
  ENSG00000287144_4 (sequence is synthesized)
gcctgagtcctagagagtcaatagtctctgatgaatgccacccaacagtcaatatcaactgaaagccatctgcgtgagccatctcagtccagtcaagctatcaacatgactgcagcagca

SEQ ID NO: 910392 - DNA, 120 bp, Artificial Sequence
  ENSG00000287144_5 (sequence is synthesized)
ctggagactgcaagaaagaattgcccagcttaggccagtcaacacacaggattacaaaaggttttgaaacttccatccagtgggtattgtcctacttttaaattggttcaaaataggatc

SEQ ID NO: 910393 - DNA, 120 bp, Artificial Sequence
  ENSG00000287144_6 (sequence is synthesized)
gaatcagctcttttctaatcaatgagttttgctggtggttaagtatatatttcaatggtccgtgtaaaggaaacaacagtagacaaagaaaattgtatttctcggctgactgtattgtct

SEQ ID NO: 910394 - DNA, 120 bp, Artificial Sequence
  ENSG00000287144_7 (sequence is synthesized)
ttcctgaggaccctcatcataacaactttttctctggtgatttccaatgaatcaccctgaagtagtacctgcaatgacgttgcacacactattctctgcaatcagctgtgcgaagacagc

SEQ ID NO: 910395 - DNA, 120 bp, Artificial Sequence
  ENSG00000287144_8 (sequence is synthesized)
tgtcactcctcttcgtcactaaagggaatcccagtctgatggcagcagtcccatggtaagatctggtctgcagagaagaaccatcacagaactctccaagaatatatttatcaaagccat

SEQ ID NO: 910396 - DNA, 120 bp, Artificial Sequence
  ENSG00000287144_9 (sequence is synthesized)
gtggaagagagtatcctctggaccatcccaggatgattcctggccacagcaaagaggaagcttgggtttgcatgtccaggacctccaccctaagtattcaggcactctttttgacatcat

SEQ ID NO: 910397 - DNA, 120 bp, Artificial Sequence
  ENSG00000287144_10 (sequence is synthesized)
tgctgttgttacttaggtgtatctccttggttgtgtttctccattctgctataaaaactgagaaaacacagatcttaacgatgctgtgaacttgataagcatttaattgaatcctccaaa

SEQ ID NO: 910398 - DNA, 120 bp, Artificial Sequence
  ENSG00000287144_11 (sequence is synthesized)
tataaaattttaagtggtcatcttaaacatagcaagacttgaatttaaagtattataccaaatcaaacagtggccagatggcgattttaaaaattacaaactcatatatttcttccattc

SEQ ID NO: 910399 - DNA, 120 bp, Artificial Sequence
  ENSG00000287145_0 (sequence is synthesized)
aatgtctaaaatagtaagaaggtcaatccacacagaaaatgcattcgtgcagtaaaaatttatgaatgcctacgggtgctgagcactgatccagggagcggtactccagcccaacaggcc

SEQ ID NO: 910400 - DNA, 120 bp, Artificial Sequence
  ENSG00000287145_1 (sequence is synthesized)
tgatgcagataaggtatggggcaaagaccacatgaggatttatggccaaggactcagccagcctccctgtgcaccagaccagcttgccacaaaaacaaaagaaccaaaaatgactgcaga

SEQ ID NO: 910401 - DNA, 120 bp, Artificial Sequence
  ENSG00000287145_2 (sequence is synthesized)
gaaaggcaatgtcactatttcagcaacaagagcagcaaaatcatctctgggtagtggaattattttcattgctaatcggcctctccaagatggtctctgtgtgtacagggcatacatgtg

SEQ ID NO: 910402 - DNA, 120 bp, Artificial Sequence
  ENSG00000287145_3 (sequence is synthesized)
gtcttggcatcggagttgggatggtgaagaaagaagcccctcctttccaccagcaacttatctagttctggggtgtgtactggccggggtccacacgaggtatggttggtcagccctgca

SEQ ID NO: 910403 - DNA, 120 bp, Artificial Sequence
  ENSG00000287145_4 (sequence is synthesized)
accccaccctgggcattctgctgcttccactgccgctgtctacgtgagatagagttcacagactgtgctttcttgacctgttcaggctcaggatcatcccttctatcttggcgccacctc

SEQ ID NO: 910404 - DNA, 120 bp, Artificial Sequence
  ENSG00000287145_5 (sequence is synthesized)
agttctcaccagctctgcagtgacctagcgttgggcagcaactcctctgcagtcctgatcccaatgccctaccctgcagcctcggctacacagccacccacacggccccatcccctccca

SEQ ID NO: 910405 - DNA, 120 bp, Artificial Sequence
  ENSG00000287145_6 (sequence is synthesized)
gtggatgacaccttctggcacgtttcgcaaccaggctccctacagaaaaggtccttcagtctataagataagggaacaacagtcaggcccccactgtgccaaaacaatcagccatgcagt

SEQ ID NO: 910406 - DNA, 120 bp, Artificial Sequence
  ENSG00000287145_7 (sequence is synthesized)
caagctatggatacaagttagtctcccaggcctcacacaggaagcgacaacaaagcccagtttgcctcaatctactacctccatccccttccatggctttagccagggcgctaaagggaa

SEQ ID NO: 910407 - DNA, 120 bp, Artificial Sequence
  ENSG00000287145_8 (sequence is synthesized)
gcatatgtgcctcactgcctccttcccattcccctctctcccctcttcttcctacagttcttcaggctggaaggggcaggttttcttctttcctctttctccttggttagaacattgccc

SEQ ID NO: 910408 - DNA, 120 bp, Artificial Sequence
  ENSG00000287145_9 (sequence is synthesized)
aggtttaggtccataaggagacctacattttaaagtgtttcaaaaacacagtatccattttattcaaaacagatgaaaatggaggtccttctgttgaagccaggataagggactcagaac

SEQ ID NO: 910409 - DNA, 120 bp, Artificial Sequence
  ENSG00000287145_10 (sequence is synthesized)
cccatctgcttgttggggtccccttgctcttctcagggcccctaaggaacatctaaggaatcctgataatttattaaaacacatcaggacaaccactgatatcatctcggcaaacgtttt

SEQ ID NO: 910410 - DNA, 120 bp, Artificial Sequence
  ENSG00000287145_11 (sequence is synthesized)
ccaaaggaactttctgtggtggtgaaaatgttttatatctacactgtctgctatggcagccactagccacatgtgtctatcaagcacttgaaatggcaccagtgtgactaaggaactgaa

SEQ ID NO: 910411 - DNA, 120 bp, Artificial Sequence
  ENSG00000287145_12 (sequence is synthesized)
tttttaattttaattaagtaccatattggacagtgcagcctagcccatttattttacaaataggaccttgaggcccaatatcattccacaggctagtgacagagttagcatgaagatgta

SEQ ID NO: 910412 - DNA, 120 bp, Artificial Sequence
  ENSG00000287145_13 (sequence is synthesized)
gtttccatgttctctgttgctttcttcctcagctctcaggcccagctcactgttagcccagtgcccatctggctgcttccacatttagtgaagtgcaccaggatttagttataacttgca

SEQ ID NO: 910413 - DNA, 89 bp, Artificial Sequence
  ENSG00000287145_14 (sequence is synthesized)
acatttagtgaagtgcaccaggatttagttataacttgcactattgtgccatgaaactcagtttggctccaaactgtgttttgtgtgtg

SEQ ID NO: 910414 - DNA, 120 bp, Artificial Sequence
  ENSG00000287145_15 (sequence is synthesized)
taaagacttgaagaacactcctataaaaattccaaaatagtatggtctcagatataacaatatctggagtagtgccctcatagatacagtgttttgagtttccgtaagtacaggtgaatt

SEQ ID NO: 910415 - DNA, 120 bp, Artificial Sequence
  ENSG00000287145_16 (sequence is synthesized)
tcttcaactcaaaatgtgccttcctgacatggcttgatgaccacagcaaaacggcgcaacctattgagagaacattaggttaggagacatgggagagcaaggaaagccttttcactaacc

SEQ ID NO: 910416 - DNA, 120 bp, Artificial Sequence
  ENSG00000287145_17 (sequence is synthesized)
agctgtgcattcttacttggggactttacctgtacggggcctcaatttcattttctattaaacacactgcaataacgcctcctcccttctctcaatgatgttaggaagataaatcagcaa

SEQ ID NO: 910417 - DNA, 120 bp, Artificial Sequence
  ENSG00000287146_0 (sequence is synthesized)
gacgcggtgtgtgccagctacccgagtgaaaggttttcgggggattaatcctgatggggtctgcggcggcccttgcccagcgccttccacatgtggagcgggccagtggtgctagttctg

SEQ ID NO: 910418 - DNA, 120 bp, Artificial Sequence
  ENSG00000287146_1 (sequence is synthesized)
ccgccaactctggacggttgagttcagggccactttttactcaggcacggatgtgacagaaagatggaaaagggtcttggaagaaccacatgtgccgtataacgaacgaccttttggtct

SEQ ID NO: 910419 - DNA, 120 bp, Artificial Sequence
  ENSG00000287146_2 (sequence is synthesized)
gaggaggaccgtgtatatgacggtggtcccataacatgataacggagctggaaacttcctgtcctctggtgagggcttagctaaggacatttcctctcctgtatttggagatacacgtac

SEQ ID NO: 910420 - DNA, 120 bp, Artificial Sequence
  ENSG00000287146_3 (sequence is synthesized)
agtctccttggactctcagctccatttcctcagctcaagtagtccactgggctctacctcagttctgcctcctcttgctgtggcctagaaattctctctggatatcagaaaacaaaggac

SEQ ID NO: 910421 - DNA, 120 bp, Artificial Sequence
  ENSG00000287146_4 (sequence is synthesized)
gatatcagaaaacaaaggacagtaatccctgccaagatgggatacaaacaaggtgagccccatgattgcccaagcgtactacctggagtgtcttcttctgtttttttctttttctttttt

SEQ ID NO: 910422 - DNA, 120 bp, Artificial Sequence
  ENSG00000287146_5 (sequence is synthesized)
ctgtgttgcccaggctggagtgcagtgccatgatcatggctaattgcagccttgaactcctggcctcaaatggtcctcccacctcagcctcccatgtagctaggtctccaagcgcatgct

SEQ ID NO: 910423 - DNA, 120 bp, Artificial Sequence
  ENSG00000287146_6 (sequence is synthesized)
actgtgcccagcatggtatccagtgtcttgaaaccaccattgcatgtatttttgacgggctcctttggttgtttcaggtagaagggtcaacctggtccctgttactccatcttgtctgta

SEQ ID NO: 910424 - DNA, 120 bp, Artificial Sequence
  ENSG00000287140_0 (sequence is synthesized)
atacaagatcaggaagtgttcttatttgtagtaagttcattctattcaaattaggtatcctttggaataggaaacgttttcagccattgtacattattgaacttttattttgtctaccgt

SEQ ID NO: 910425 - DNA, 120 bp, Artificial Sequence
  ENSG00000287140_1 (sequence is synthesized)
gtacaaagtacctgtgagatggggatacaaagacattttccaaattttgggctccagtcgattcttgtgtattacgctgtgagcaagacttgcatgtcgtcacagagaacggggcactat

SEQ ID NO: 910426 - DNA, 120 bp, Artificial Sequence
  ENSG00000287140_2 (sequence is synthesized)
ccctgataaagattgtgggagttggcttcctacagcatcgatcacatggctttaacccacgagcaagatggctgaagctgaagaatgggctggatcacaaaaatagattttctgtctgag

SEQ ID NO: 910427 - DNA, 120 bp, Artificial Sequence
  ENSG00000287140_3 (sequence is synthesized)
cctcccaaagtgctgggattacaagcttcagccaccgtgcccggccatttaatacactttcatcattatactcagtttccagaagggcttcttggagttaaggaacatgggtttggaaat

SEQ ID NO: 910428 - DNA, 120 bp, Artificial Sequence
  ENSG00000287140_4 (sequence is synthesized)
agaagggcttcttggagttaaggaacatgggtttggaaatcaagagatgggtttgaggcctgatgtaatggtgatttgagtgtgattttgaataagccattttttccattaaggatctcc

SEQ ID NO: 910429 - DNA, 120 bp, Artificial Sequence
  ENSG00000287140_5 (sequence is synthesized)
attttgtctttggtaaatcaagaacagtgcaacacaccagacttactgctactgagtcatttagttaccgctgcagagcaaaccgtccccaaaatcaggggctttacacaactatttctt

SEQ ID NO: 910430 - DNA, 120 bp, Artificial Sequence
  ENSG00000287140_6 (sequence is synthesized)
gttagagttcacgcaattgcaggtcagctgaggtctcttgttagatttggcttggctggggtagctatgtgagacaactccgattcgtctctcattaatctcctggaaccaatgggctag

SEQ ID NO: 910431 - DNA, 120 bp, Artificial Sequence
  ENSG00000287140_7 (sequence is synthesized)
cctgagaaatgtccttctcctggtggtagctaaaacataagatcacaacagaaacacaagacagctcttgaggtctaggcacagatcaggcatatattcactctggtcttattctattgg

SEQ ID NO: 910432 - DNA, 120 bp, Artificial Sequence
  ENSG00000287140_8 (sequence is synthesized)
ccaatgtgagttacatcgttcaaatcagagtcactgcaagggcacaaggcaaaggacatatgtcccagcatgcataccaggaggggtggagaattggagccacccctaatgtacaacatt

SEQ ID NO: 910433 - DNA, 120 bp, Artificial Sequence
  ENSG00000287140_9 (sequence is synthesized)
taggacaacagttaaaatacaaaagtactttgcaatcaaatttcaaagaagttcagttaatcaaatttatgtactcatcttttacctaaagtttcagcatttgtaaagtctctaactgtt

SEQ ID NO: 910434 - DNA, 120 bp, Artificial Sequence
  ENSG00000287140_10 (sequence is synthesized)
cagatctacactgtttaattagctgttctaattgtttcagaagtacaatattttttcatgacaaccaccaccaccacagaacaccttgcatttacatgaaccaacaaaaatccttgttat

SEQ ID NO: 910435 - DNA, 120 bp, Artificial Sequence
  ENSG00000287140_11 (sequence is synthesized)
tagaacaaaaaggttttttttttttttaagtaggccgatacaagatggtcaaaggatatacaaagacaatgtttgcattttctttgtctgttagtaaattacctggctgacccctgcttc

SEQ ID NO: 910436 - DNA, 120 bp, Artificial Sequence
  ENSG00000287140_12 (sequence is synthesized)
tgaagaaacagcacttttcttattctgtccacatttgaagagaggagatcattgatacttacttgcccactctaatcacaaatgcgataggtctaattctctccactttgggatccctgc

SEQ ID NO: 910437 - DNA, 120 bp, Artificial Sequence
  ENSG00000287140_13 (sequence is synthesized)
atcattccggagacaggcactgtacctggaccggcatggttaaacatcactcagacatcagtgcaccctcccatagcttttatctctgagctgagctctctgtgcacaaagtgcttgtga

SEQ ID NO: 910438 - DNA, 120 bp, Artificial Sequence
  ENSG00000287140_14 (sequence is synthesized)
attcacagcttgtgtatcaagcttcatagttagttataagcattttattttaattaaagagacaaacaatgacccagtgagagaatttctttattttgaattttgtattttcttcctgct

SEQ ID NO: 910439 - DNA, 120 bp, Artificial Sequence
  ENSG00000287140_15 (sequence is synthesized)
ctctcagcctgccattctgacggtggagaaatggatatgggcagttcagccacctcacaccatcacactctcttttgagagcggtcttggaaaccagccagattgcattgttgtccttct

SEQ ID NO: 910440 - DNA, 120 bp, Artificial Sequence
  ENSG00000287140_16 (sequence is synthesized)
gtcaattacaagtgtgccagacacccaaagcattggggaggaagtgcaattattagaagctacccaagagactatcccaatgtcatccctgacttgccaggtgacctttagaaaatcaaa

SEQ ID NO: 910441 - DNA, 120 bp, Artificial Sequence
  ENSG00000287140_17 (sequence is synthesized)
tgtgtaaaagagggatgataaattgttctctaggccaatcatgcaaatgagtagaaacaccaaaggagaaaaaagttagggaaaggagaattccaaagaaaccaatttttgttcatggaa

SEQ ID NO: 910442 - DNA, 120 bp, Artificial Sequence
  ENSG00000287140_18 (sequence is synthesized)
gaactgtcttctaatacaaagagaaccattcccaaataatgggtaaaatccttcccccagatattggtcataatttaccaacctactcctgttcatgtctgttaatcccaaatgccttct

SEQ ID NO: 910443 - DNA, 120 bp, Artificial Sequence
  ENSG00000287140_19 (sequence is synthesized)
tcctgccaaaacccatgtatctaacacctattttttcatttttggtgaagcgttaatggttttataaaataacttctaagattctttaccccaatgccagaaaagcctttattttccctt

SEQ ID NO: 910444 - DNA, 120 bp, Artificial Sequence
  ENSG00000287140_20 (sequence is synthesized)
ggacatagggctgtggggatgagagtgagaacataaatgggaaagcagaaaaatctatttatttattattcatgtgtctatggatatagcaactctattggcctggttgtggtctgacac

SEQ ID NO: 910445 - DNA, 120 bp, Artificial Sequence
  ENSG00000287140_21 (sequence is synthesized)
tgaagggattatattttcagagcaaatattaaagggagaaattattcttagtcatcaaaggattggccttctaagaatgtgtcccagtaagaaatactttgagctacataaagagttggg

SEQ ID NO: 910446 - DNA, 120 bp, Artificial Sequence
  ENSG00000287140_22 (sequence is synthesized)
taaaaagaaagccatcatgaattgaacaccaactatacacccaccactttctttgacatcttatatatgtatcatttagtgagaaacaaaattacttagaagttaaaatcaaatgcaaaa

SEQ ID NO: 910447 - DNA, 120 bp, Artificial Sequence
  ENSG00000287140_23 (sequence is synthesized)
tgaaagtcactggctaaaattctctaccatggacagagccaatctgggcctccttgtatattgttcttgaaggaccttggataagttaaaattaaatgaaatattggacattatcaacaa

SEQ ID NO: 910448 - DNA, 120 bp, Artificial Sequence
  ENSG00000287140_24 (sequence is synthesized)
ggcattctcttagaatgatatgtgtcttgcatgttgccagattgtgatgataattttatatgtcaacttaactaagaaaaggaatgcccagatagctgataaaatgttatttttgggtgt

SEQ ID NO: 910449 - DNA, 120 bp, Artificial Sequence
  ENSG00000287140_25 (sequence is synthesized)
gtgtgtgagggtgtttccagagaagatcagtattttactcagtagactgagtaaacacagttctccctcaccaatgtgggcagccatcatcttatccatcgagggtccaaatggaacaaa

SEQ ID NO: 910450 - DNA, 120 bp, Artificial Sequence
  ENSG00000287140_26 (sequence is synthesized)
aaggtagaggaagggccaattatttctctctcttcttgagttgggatagccatgttctcctgcccttggacatcagagcccctggttcttgggcctttgaactcagagactcaccccaga

SEQ ID NO: 910451 - DNA, 120 bp, Artificial Sequence
  ENSG00000287140_27 (sequence is synthesized)
gctgcctctcatccatcccctactgctcctccctggttctcaggcttttggccttggacaggcagttacaccattagctcccttaactctcaaacctttggactttggctgaattacact

SEQ ID NO: 910452 - DNA, 120 bp, Artificial Sequence
  ENSG00000287140_28 (sequence is synthesized)
attggctttcctggttttccagcatagagacagcatatcttaaaatttcctggactccataaccgttgtgagccaattctcataataaatctcctcttatatttctgttatcccattggt

SEQ ID NO: 910453 - DNA, 120 bp, Artificial Sequence
  ENSG00000287140_29 (sequence is synthesized)
tacgtttccctgaagaacactgattaatatactgaccttcactctttacatttgtatactaaaatattgtaactcaattttgaagctaaccacctggagttagtgttagactccccatag

SEQ ID NO: 910454 - DNA, 120 bp, Artificial Sequence
  ENSG00000287140_30 (sequence is synthesized)
attaaaagacacgatccccaacgagactgccctcacttcagatgtgaacagcaagttagagggtccccaggctacctgtacttttgatcaactggctacaaaactgggatgttcccatgt

SEQ ID NO: 910455 - DNA, 120 bp, Artificial Sequence
  ENSG00000287141_0 (sequence is synthesized)
gagaatagtcaagggagcactgagcaggtcacctatcatagcccaggagagcatgaagaatgggttctgggtaagcttgctggaggaggagacctgtaacttgaaggaagagcagaagtt

SEQ ID NO: 910456 - DNA, 120 bp, Artificial Sequence
  ENSG00000287141_1 (sequence is synthesized)
agcctggtgaagagaagggtggaccaaacatgtaaatgcccagggtgagtgaaagcacagcatgagtatgacccctgaaaatagtctgctatgcttagaacacaggctggggaaaggaga

SEQ ID NO: 910457 - DNA, 120 bp, Artificial Sequence
  ENSG00000287141_2 (sequence is synthesized)
aagagttgaagctggagaagagtgctggggaaaattcatgaggtcttagaccctgctgaggagtttggcctttcttttgaatgatccaggtaagagagtgacacaaataggcagactgaa

SEQ ID NO: 910458 - DNA, 120 bp, Artificial Sequence
  ENSG00000287141_3 (sequence is synthesized)
aagcattaagtctggagttaaggagagctctgttgggaacgtcctcacgacatggcagctggcttaccccagagtgagtgattagagagagcaaagatgcagccacagtatcttttataa

SEQ ID NO: 910459 - DNA, 120 bp, Artificial Sequence
  ENSG00000287141_4 (sequence is synthesized)
cttagcctcagaagggatgtgccattatttccaccatgctctatcagtcactcagaccaactctgataaaatgtgttagaggaccacacaagatcatgaataacaggaagcaaggatcac

SEQ ID NO: 910460 - DNA, 120 bp, Artificial Sequence
  ENSG00000287141_5 (sequence is synthesized)
tgggagacatctcaaaggctgataatgacaaagagcgaaaccaaactgagaccagagattcaagttcaacaaactgaggctggtagattttctgggggacagtacccaagagatggaagc

SEQ ID NO: 910461 - DNA, 120 bp, Artificial Sequence
  ENSG00000287141_6 (sequence is synthesized)
taggaacaagcccaacaattctcagagctcacacagagttgggaactgtttgagtttccactagccagagtggaaaggcctcagtaaatataccaggtatttggaagacaagcagaaaga

SEQ ID NO: 910462 - DNA, 120 bp, Artificial Sequence
  ENSG00000287141_7 (sequence is synthesized)
ccacaccacagaagcactgttaagtttgccctagacaaaaggctactgcagaaccatcctaaaagaacttaacaagaaaactggaaagcatcaaactgacccacaaggaacttaaatgtc

SEQ ID NO: 910463 - DNA, 120 bp, Artificial Sequence
  ENSG00000287141_8 (sequence is synthesized)
tgctagaacaaagttgttaaaggactacaacgtcctccagcactcaaaaatgtgaaattcacaatatgcaccgaccaaacaaacaaaaagcctgcttggattttggctgggattaaactg

SEQ ID NO: 910464 - DNA, 120 bp, Artificial Sequence
  ENSG00000287141_9 (sequence is synthesized)
aacttatagatcaatctgggaagaactgacagtatgatgtttgctacagatttttcatagatgccttttatcagagctgcttgaaaccacctctgctttctagctgctggctagcctgac

SEQ ID NO: 910465 - DNA, 120 bp, Artificial Sequence
  ENSG00000287141_10 (sequence is synthesized)
ttccctcaggaaagacccataaaaggaagaattgcccccaacaaatgagcagagcatgatctgttgtgtgaaaggaaagaggcatgactttggatcctgtagaagccagtttgctctacc

SEQ ID NO: 910466 - DNA, 120 bp, Artificial Sequence
  ENSG00000287141_11 (sequence is synthesized)
cagcaaaaaactgctccttatcctgagactttaactctggcaaccaattttcctagttaggttactggaaacaataagaggaattgggccacaatgaatacgatccaatgaaaatccagt

SEQ ID NO: 910467 - DNA, 120 bp, Artificial Sequence
  ENSG00000287141_12 (sequence is synthesized)
gaaattcttaaaaaaccttggtagttctggtatctcagtattgacacagaaaagacaggccctacctaatgaatattttaacttttatcaaccttaaaactctaattaaaatgttgtcca

SEQ ID NO: 910468 - DNA, 120 bp, Artificial Sequence
  ENSG00000287142_0 (sequence is synthesized)
ttaaacttgtctctaccctttttgtcgctctgacgcgcccttacagccaaacctacgtactccaccccagctcctaaggcaccggatatacacagtgatctaaggagagggtcgctttgg

SEQ ID NO: 910469 - DNA, 120 bp, Artificial Sequence
  ENSG00000287142_1 (sequence is synthesized)
aaagaaaaggcattgactgcccaagggcaggagggaggtctgatgcggtctcctttcctttaccttattctttgcgcctgaagtttctactttggagcttcagaaactattttccttctc

SEQ ID NO: 910470 - DNA, 120 bp, Artificial Sequence
  ENSG00000287142_2 (sequence is synthesized)
ctctatcaatctaaagtctgttatataggagcagtgcccccaagtccacctcagcaccgccaccgtcatcacaagcacagccatcaggattgggcacaacctgccctaatttggatcgcc

SEQ ID NO: 910471 - DNA, 120 bp, Artificial Sequence
  ENSG00000287142_3 (sequence is synthesized)
gtttatttttactgttgttttggcagggtggggattgctttacattcgctggagatgaattataattctcccctccaaccagggtgggcttcatgggtgtgcgactatgcagttgtatag

SEQ ID NO: 910472 - DNA, 120 bp, Artificial Sequence
  ENSG00000287142_4 (sequence is synthesized)
tctgggacaatagtctactgtcgctgttttgttcttcttcataatttttaatcaaggagtctcacatttgtattttgcaatgggccacgcagataatgtagtcagctttgcctctctctt

SEQ ID NO: 910473 - DNA, 120 bp, Artificial Sequence
  ENSG00000287142_5 (sequence is synthesized)
cgccacttccctagactttccccttcctctgcaatgttcatctataattgttcatcagaccaggctaaataaggataatggcacaaaagaaaaataagacccaaatggagacatcaacca

SEQ ID NO: 910474 - DNA, 120 bp, Artificial Sequence
  ENSG00000287142_6 (sequence is synthesized)
cagacacctggcaaaaaatcttctgctaaaacctgattttgtgacaaaatgctgccttatcttgctgatgatttcatggacaataaaaggaaagaaggtaaacttgttaacctaattttt

SEQ ID NO: 910475 - DNA, 84 bp, Artificial Sequence
  ENSG00000287142_7 (sequence is synthesized)
caataaaaggaaagaaggtaaacttgttaacctaatttttcaccaagaagaaaaactaatttgttctttaagaaaccaaatttc

SEQ ID NO: 910476 - DNA, 120 bp, Artificial Sequence
  ENSG00000287143_0 (sequence is synthesized)
tctgctaagcacctgccataggctggacatcgagctagatgcggagatcacaccaccgtctctccccacacattatttgtcatccaacaaggaagagggatgagaagacaagatcatcac

SEQ ID NO: 910477 - DNA, 120 bp, Artificial Sequence
  ENSG00000287143_1 (sequence is synthesized)
agccagagaagcagatgaagagtggaggattcctagatggtgtggagctgcacaatggaaagagcctgggtccttgaatgactacagactacatggagcagagtaacccctgccaccacc

SEQ ID NO: 910478 - DNA, 120 bp, Artificial Sequence
  ENSG00000287143_2 (sequence is synthesized)
aacaatttgcattggtctgtgaagcaaataagagataacctcttagttgggttaaaccaatgagatttggatttgtctatgacggcagctagcattacttgccctgactaatatggtatt

SEQ ID NO: 910479 - DNA, 120 bp, Artificial Sequence
  ENSG00000287143_3 (sequence is synthesized)
tgaactattgctactgcagcagaaaactctttcaatccttcagaatcttttagttttcttctgcctcaggatataatgtgatatatcaacacaagaacatgcaaattttcagccgagtag

SEQ ID NO: 910480 - DNA, 120 bp, Artificial Sequence
  ENSG00000287143_4 (sequence is synthesized)
ggaggaccataagaagagaggtctgggaggacctgggcatgtgacaaagaacaaaatgctggaaaagacaaaattgtggcaccaaaagcagttcacaaagaccaagttcaaaaatgttgg

SEQ ID NO: 910481 - DNA, 120 bp, Artificial Sequence
  ENSG00000287143_5 (sequence is synthesized)
aaacaacatgtagttctacctctaagttaaagctctctgtgtttatttggagatgaaaccaaaacctagggagcactgtgacaggtgtgaaaaggctgctgtattgaagtagcacaacca

SEQ ID NO: 910482 - DNA, 120 bp, Artificial Sequence
  ENSG00000287143_6 (sequence is synthesized)
agtcagattatgaagagatggcagcctacataggaagggagccaattagtcaggcaaagctggtatggagggtagtaacatttagaattaatttctcttctttcatggccgggcacagta

SEQ ID NO: 910483 - DNA, 120 bp, Artificial Sequence
  ENSG00000287148_0 (sequence is synthesized)
agttcagaccgaggagcctgtgacacagtcaacaccaatgccaaggagccagtggatacaggggttgaggttgcagacataaacacaggattcatcagcatatgtgtggtttctgaacct

SEQ ID NO: 910484 - DNA, 120 bp, Artificial Sequence
  ENSG00000287148_1 (sequence is synthesized)
atgggacaggatggcatcactcagggaaagagcacagagtcagaagaaaatatgacccaagaccaggccttgaagaactccgatatttaatgtttgggtagaagaaaaggcaaacgaaag

SEQ ID NO: 910485 - DNA, 120 bp, Artificial Sequence
  ENSG00000287148_2 (sequence is synthesized)
ggagatggtcccagaagtcaaacagaagggagtgattcgctgtgatgaatgctgcagaggccaaataaggaaaagaagacagcaagaagaagccactttgagcccctatgatttcatctt

SEQ ID NO: 910486 - DNA, 120 bp, Artificial Sequence
  ENSG00000287148_3 (sequence is synthesized)
tgatccactcatccagcactccatactccttgatccctacccaccaaattctccttaaaagccctggtctccaaatgttcaaggcgaccgatttgagtaataaaactctagtctcccatt

SEQ ID NO: 910487 - DNA, 120 bp, Artificial Sequence
  ENSG00000287149_0 (sequence is synthesized)
acccctaagtggaacatagcatacaaatctttcagctttccatagaccccattttctcaccagaaattatgttctttgggtggggaagcattcttatttaatctactaacccagaccaga

SEQ ID NO: 910488 - DNA, 120 bp, Artificial Sequence
  ENSG00000287149_1 (sequence is synthesized)
atgtgataagaaatactgttactcttgtaagagtaatagaaatgaataaaaatgcattttaaaaggcaccttctggagctgcattcacttgaatcaaaggctgaccctgcagggttggca

SEQ ID NO: 910489 - DNA, 120 bp, Artificial Sequence
  ENSG00000287149_2 (sequence is synthesized)
cggcagcagctgctagaggagcggttctggagcaaatgggcatattcccctttctgaccctgccaaatataagaccttcagcctactccatccaaggcatccatctgtcttcagaagaga

SEQ ID NO: 910490 - DNA, 120 bp, Artificial Sequence
  ENSG00000287149_3 (sequence is synthesized)
ttagaattttgttctgaagccatgcaaagagtaagaccaagtgctaacatccaatttgcatgtgccgggagagaaaattcttcatggatctctggtgctcctacacatctcactgatgga

SEQ ID NO: 910491 - DNA, 120 bp, Artificial Sequence
  ENSG00000287149_4 (sequence is synthesized)
tttcttgtctaaatgaagagaagcagctcttccccatggatgatcatcaaaaaccataagagtcaagatgaagatgccatctgaaatttctattctatgaatgacatctggatattgatt

SEQ ID NO: 910492 - DNA, 120 bp, Artificial Sequence
  ENSG00000287149_5 (sequence is synthesized)
tcctgaaattttcttgaaactacaccttgtcctctctatgaggatacacctccaacagccacaaagaagccagcctagctctcagtccaggtaccaactatccaggagaatcattacttc

SEQ ID NO: 910493 - DNA, 120 bp, Artificial Sequence
  ENSG00000287149_6 (sequence is synthesized)
ctctcaggcagcttcaaggctgaaacaatggcccatgacttctgtctctcctcaatcaattccctcactggagttcttcccctgaacaaagaccagcttgttcatttgcatttcattggc

SEQ ID NO: 910494 - DNA, 120 bp, Artificial Sequence
  ENSG00000287149_7 (sequence is synthesized)
agataatattacttgagatatcattcaatttgttatttttatcttaacatacacgggggtggggaggagaaaaagaaattaagcaaactgtgaatgtccctttgttcagtgttatctgtt

SEQ ID NO: 910495 - DNA, 120 bp, Artificial Sequence
  ENSG00000287149_8 (sequence is synthesized)
tctgttaactatgtaagatgttggtagatggcaaacaaactccctgagaaaaaaacagtgggagttttcatatgaaagtgttcagagagtggttcaatgatcactctgcaagatattgta

SEQ ID NO: 910496 - DNA, 120 bp, Artificial Sequence
  ENSG00000287149_9 (sequence is synthesized)
ggaaatatctgcacccatctgagagattaactggatgccttctaaggacccatctatttccatggtttagtgatacaataattaattaatttatgcaacagataatgagtatttaccatt

SEQ ID NO: 910497 - DNA, 120 bp, Artificial Sequence
  ENSG00000287149_10 (sequence is synthesized)
ttgcatgtgaaatgtttaacttttttgtctaacacatttcgtacaagggtttaaaattagatccagggttggcgagagacatataatatctaagacgttattgaaatacaagaataaaac

SEQ ID NO: 910498 - DNA, 120 bp, Artificial Sequence
  ENSG00000287149_11 (sequence is synthesized)
cattgttttcactgttgaagagaaggaatgtttcctcacttggtaatgtaaaatttgtttttgccattaaagactgatttttctttctacattaaacatattaaactctaataggaaaat

SEQ ID NO: 910499 - DNA, 120 bp, Artificial Sequence
  ENSG00000287149_12 (sequence is synthesized)
taagccacctattgatttttttcttttctttttgccaatagaataacacttttcttctctctcagtagaaccctccttccatgtgagaaaccaatgacacaggattttgggaaggatcaa

SEQ ID NO: 910500 - DNA, 120 bp, Artificial Sequence
  ENSG00000287149_13 (sequence is synthesized)
cctgctccttcacccactgacaagggaaagtaatgacatagggccagctccataagagttgccatcccccttgtcaatgagttgatgggcccaaggatgaaaacatgattgattcaagga

SEQ ID NO: 910501 - DNA, 120 bp, Artificial Sequence
  ENSG00000287149_14 (sequence is synthesized)
tggaaaatgattaaagtctggaaaatcaggttccacagaatcttttctgctgagggtatctgtaaagattctattcactagttacaaatttggtaagatgtgagcttggtgtagctgact

SEQ ID NO: 910502 - DNA, 120 bp, Artificial Sequence
  ENSG00000287149_15 (sequence is synthesized)
ggccataccatcagctatgtgtagacagactgtccatgagctggagagacagaaccttgacaatgttacagtattcctgtattcagccttcttctaacttggtctcctacttatgcaaat

SEQ ID NO: 910503 - DNA, 120 bp, Artificial Sequence
  ENSG00000287149_16 (sequence is synthesized)
aaacacagagacctaatccacatttttcatggcttctccaaactgaacttaataaacatgtgaagtaaattgaaatctttaaatcacctctgtttatcaaaagtattgcatctgataaac

SEQ ID NO: 910504 - DNA, 120 bp, Artificial Sequence
  ENSG00000287149_17 (sequence is synthesized)
atcattatttagctgctttaaaatgcatgttactttggaacatggtttttgaacagagtcaactgtcaattcctgaagatcagctctgtttccccaatatccaccttctgactgcccatt

SEQ ID NO: 910505 - DNA, 120 bp, Artificial Sequence
  ENSG00000287149_18 (sequence is synthesized)
cagcacctctctagacacaaaatgtctaaatgagatttttattttaaatgggtgagggtcagaaacaaataatttttttaaaaaatttaatgtcaaataagggtcttggttttgacatct

SEQ ID NO: 910506 - DNA, 120 bp, Artificial Sequence
  ENSG00000287149_19 (sequence is synthesized)
ataataaaacctcaactaatgaatgcaataatactatctcttcttttaccaagcaaaaagattaaatgttttaaaacatttctttcaaaatatgtttgaaataaacaacatgccgtgact

SEQ ID NO: 910507 - DNA, 120 bp, Artificial Sequence
  ENSG00000287149_20 (sequence is synthesized)
aggatggaaaggaaatgagtaaccattagctggtgaggaagaaaggaaagccagaggaggagtgaagtaatgtacggggagcattgccaggattggaaggatggaagactctgccagata

SEQ ID NO: 910508 - DNA, 120 bp, Artificial Sequence
  ENSG00000254178_0 (sequence is synthesized)
caaagagtctttggtgcatttaccaaatggcaagaagtccagagtggctgttgggcactgaatgtgagagtgtttagatttgaaactttaagaattaggtggggactatgtcctaaaaga

SEQ ID NO: 910509 - DNA, 120 bp, Artificial Sequence
  ENSG00000254178_1 (sequence is synthesized)
ctgttctcaatgccaaagactttagacttcatacactgatctatactgcagatcttagaagaagaaaatcaattctacataaatggcaaaagcagtgttccccaagctggggctgacaga

SEQ ID NO: 910510 - DNA, 120 bp, Artificial Sequence
  ENSG00000254178_2 (sequence is synthesized)
gagaaaaaagcattacgtgctagtggaggagctggaagttgtggatctccaacactgatttccaatatttggttctcctctgctcctgatcacatgcgaaaattacactttcccatgttg

SEQ ID NO: 910511 - DNA, 120 bp, Artificial Sequence
  ENSG00000254178_3 (sequence is synthesized)
tttcagcaaaacatcatccatcactgtaaattaatgttgttaatattgaacttactgattttgtggttttgatggtttttactttgtgaattatttttattaaaacaagcatatataaaa

SEQ ID NO: 910512 - DNA, 120 bp, Artificial Sequence
  ENSG00000227475_0 (sequence is synthesized)
gtaatgtgagacagtctgatacatctgcagtgcccttgctatatgcattacacgctatgactaggcaccgggctgggtcaactctacgccaaggttatattcagggtcgtatacttgatt

SEQ ID NO: 910513 - DNA, 120 bp, Artificial Sequence
  ENSG00000254171_0 (sequence is synthesized)
aactgcttctagctgaagaggggcggcgtgcaaggggaaaggctagggaggttgggggatggttgttcttgaagctgccggtattcctgaagaaacagcatatctcatactgtcccatgg

SEQ ID NO: 910514 - DNA, 120 bp, Artificial Sequence
  ENSG00000254171_1 (sequence is synthesized)
gtgaaggctttaatgaggttctgtaaaacctggggaaaaagacaggggtccagtggcacacggattggagacaagtccatcagctcccacaactgagacctgagagggatgagttggtcc

SEQ ID NO: 910515 - DNA, 120 bp, Artificial Sequence
  ENSG00000254171_2 (sequence is synthesized)
caatcacaatgaagttcaatgaaatctgaagactggttagcaaagtcttaaccataaccacttgctatctattgaaatatattgggaagcacagattgtatcatcatgaaattttcacac

SEQ ID NO: 910516 - DNA, 120 bp, Artificial Sequence
  ENSG00000254171_3 (sequence is synthesized)
atggtggaactccatttgttaacagtcacagagggtgatgcttggcattttaaactgcaccacagtcttaaattcattatcatgtgaactgataagatctagtacagaatttaaaaatgg

SEQ ID NO: 910517 - DNA, 120 bp, Artificial Sequence
  ENSG00000254175_0 (sequence is synthesized)
atggcctgcaccccctcctcctcaccctcctcagtcgcggcacagggtcccgggcaatcatggctcatcaggtaacctgcaccgtctgtctgtggctaaaccagccaccatctcctgaac

SEQ ID NO: 910518 - DNA, 120 bp, Artificial Sequence
  ENSG00000254175_1 (sequence is synthesized)
tcttggaattgtgacctggtgccaacaatgaccaggaagtgcctccaagcttctgactcatagaagtaaatatctgcccgcagggattcaggacagacgctcaggctaccagtcttgcat

SEQ ID NO: 910519 - DNA, 120 bp, Artificial Sequence
  ENSG00000254175_2 (sequence is synthesized)
gaagcccttcctaagcatctctgggctttaggctgaggacaaggctgatcactcctgttggcttcagacagccccctggaggtccaaacagtgctgcagtctgggaaagtgagatgagaa

SEQ ID NO: 910520 - DNA, 73 bp, Artificial Sequence
  ENSG00000254174_0 (sequence is synthesized)
ggatacaccttcacctactgctacttgcactgggtatgacaggcccctggacaagggcttgaatggacaggat

SEQ ID NO: 910521 - DNA, 120 bp, Artificial Sequence
  ENSG00000254176_0 (sequence is synthesized)
atggggtttgtgctgacttgggatttacttgttactattttaaaaggtgtccagtgtgaggcgcagttgttggagcctgggggagacttggtacagcctggcgcggtgggggtgggggtc

SEQ ID NO: 910522 - DNA, 120 bp, Artificial Sequence
  ENSG00000254176_1 (sequence is synthesized)
agcatacgctatgcacattctgggaagttctgattccccatctccagaaacaatgccaagaacacactcttatctggaaatgaacagtttgagagctgagtacacagccacgtattactg

SEQ ID NO: 910523 - DNA, 120 bp, Artificial Sequence
  ENSG00000227479_0 (sequence is synthesized)
ctgaagagactcaatgtccttgaaagcacttttctttttattatgttcaaaattcagcaacgaaaactgctcgtcttgcttctacggaagctgtaaggacgagaaagtggagcgctgtcg

SEQ ID NO: 910524 - DNA, 120 bp, Artificial Sequence
  ENSG00000227479_1 (sequence is synthesized)
tggtgcccagtcccagctcagctaagccaatgtgcgtctttgggtcgtttagattaagtgctgagaggtgtagctcttcctatacctgctggactacagaaaggcaggcagccactgcct

SEQ ID NO: 910525 - DNA, 120 bp, Artificial Sequence
  ENSG00000227479_2 (sequence is synthesized)
agagaagggtgaggactgcagagaccaaacagctcctcccatgtccacatcagccctgtctgagcagatcctagaacgtagcctgctttgccgccttctctgcctgcagcactctgcctg

SEQ ID NO: 910526 - DNA, 120 bp, Artificial Sequence
  ENSG00000269745_0 (sequence is synthesized)
ctggccaagggcacgacggcatcatcatagcaacagtgctgcagggggtcgtagaacttgtccccacatctcttgtgtggctggcacagcatcaggtccacttgggagcctacatgtccc

SEQ ID NO: 910527 - DNA, 120 bp, Artificial Sequence
  ENSG00000269745_1 (sequence is synthesized)
cagtgatgcagtgctgagtagaaaacgcaaagtcagtgtcttcgtgacgttcatgacagtgagaggagagagagagagagagaaggtaggagaataaaactcctgattttggttattgtc

SEQ ID NO: 910528 - DNA, 120 bp, Artificial Sequence
  ENSG00000277911_0 (sequence is synthesized)
aagagattaaattggtccattcagcataacatgactagttagtgacagtgtcagttgaaatacagggcccctaacccccagtaaagtactgtttacatttatcctctactgaaaattatt

SEQ ID NO: 910529 - DNA, 120 bp, Artificial Sequence
  ENSG00000277911_1 (sequence is synthesized)
agatgctaaggttgaatcttggtaatatgatgaggcatatgtccttcttaatctcctcttaagggaaagacctttggaaatggaccatgtagggtaaaataaacatatatattcttgaca

SEQ ID NO: 910530 - DNA, 120 bp, Artificial Sequence
  ENSG00000240888_0 (sequence is synthesized)
cctcccttaaacctactcggtatggctctgtctgccagcttccttaccccactctgtgggacaggtcagagggagaagggtcagcacagtgtggagggaggattgtgagcaggaaggagc

SEQ ID NO: 910531 - DNA, 120 bp, Artificial Sequence
  ENSG00000240888_1 (sequence is synthesized)
tcccatcaccgggtccctgccctctgtgagtgcctatgtgtctgagcacagctttagaatctgcaagacactgaactgcagttcctccacccacagcagactcaggctctacaacaacca

SEQ ID NO: 910532 - DNA, 120 bp, Artificial Sequence
  ENSG00000240888_2 (sequence is synthesized)
cggaagtggccacagccaaacctaccttgaaggactccatgagggttaatttgatggtatgagtgggagtccctggcatggtacttgttttccacagtaaagataaattaattataggta

SEQ ID NO: 910533 - DNA, 120 bp, Artificial Sequence
  ENSG00000240889_0 (sequence is synthesized)
taccatgacggccctgcacacggtgtcccatctgcccagcgaagtctctccctctccctccggccagcggggtccctctcctcgagtcgcggcttcaggagacacgcggactacaggtcc

SEQ ID NO: 910534 - DNA, 120 bp, Artificial Sequence
  ENSG00000240889_1 (sequence is synthesized)
cagcatgcctcgggacgcggcctcttcaggcgccccagtcaagcagtccgtgcgcagccgcttctgaaaaggcggcctccaacgcgagcgaaagacgccagccgagtcagagcggacata

SEQ ID NO: 910535 - DNA, 120 bp, Artificial Sequence
  ENSG00000240889_2 (sequence is synthesized)
ctcgctcccgtccgccccgcggtccccagccgcctcgcccctgcctacttcgcttccccggcgctccgcccgcgcctcccgtgacgtcacagagtcgctcatctccaggagtgggggagc

SEQ ID NO: 910536 - DNA, 120 bp, Artificial Sequence
  ENSG00000240889_3 (sequence is synthesized)
cggcagccgctcctgacccagattagctgtgagtccttcggctgcaggaaacctctctcccgagagcaaagcccacgcataacttatggttgctgagctgccccatgccttctgaaacag

SEQ ID NO: 910537 - DNA, 120 bp, Artificial Sequence
  ENSG00000240889_4 (sequence is synthesized)
gctgccccatgccttctgaaacagcttgttggttgcccctctgatcctgtagggctctccccgtgttctgcccctcctaaaactgagtggtgtataattcttttttttttttttttttct

SEQ ID NO: 910538 - DNA, 120 bp, Artificial Sequence
  ENSG00000240889_5 (sequence is synthesized)
gactgccgtctttttgtccctttcccgcctccacactgtacctgatgcgcactggcacgaggggctgcgtgaccagctggtgttctccctcccagccatctggagccatcccaacccctc

SEQ ID NO: 910539 - DNA, 120 bp, Artificial Sequence
  ENSG00000240889_6 (sequence is synthesized)
tctgcctgctttgaatgtcccctcaagacctgggaaggaaaaaataacatcacctccttgaaaaaaactgcaccaaaggaatctctgtccacctaaaccatactgctcactaaaagacag

SEQ ID NO: 910540 - DNA, 120 bp, Artificial Sequence
  ENSG00000240889_7 (sequence is synthesized)
gaatgaggaactttatcctggagaaggaaagaatgggagaaactagtcctgtagtcagggcaggactctcggagagcgcaagggcttgactccattcgctgcctggtggtctctaagacg

SEQ ID NO: 910541 - DNA, 120 bp, Artificial Sequence
  ENSG00000240889_8 (sequence is synthesized)
agcaacataatctatgaaggtgcagggataaactgtgattttacctaaaaaaaaaaaaaaagagaaattaagctttacaaataccccccctccaggctgaccccgggcccctcctagtca

SEQ ID NO: 910542 - DNA, 120 bp, Artificial Sequence
  ENSG00000240889_9 (sequence is synthesized)
gccagacggccacatcagctcagctctgagaagaaagcccgtggttgggcctggcagagaggggcaggtggtggtcactgcaggtctgtccctgggcgctgccatggagaagaggacaca

SEQ ID NO: 910543 - DNA, 120 bp, Artificial Sequence
  ENSG00000240889_10 (sequence is synthesized)
ctggttatattaactctcttcatattcaccaaaattaatgcctgcaagtggacaggcgcagacactgtggcagagaaactgtagttccggactagcgggtgaacccggggccatgttaag

SEQ ID NO: 910544 - DNA, 120 bp, Artificial Sequence
  ENSG00000240889_11 (sequence is synthesized)
gaagtggccaagccgttctgctcacgtccccggtatgtcagccactttcatcagttttgttttaccttgtaataaaagttaccaaggagttagcaaaatctattaaaaattaccaagaag

SEQ ID NO: 910545 - DNA, 120 bp, Artificial Sequence
  ENSG00000225206_0 (sequence is synthesized)
agtgtggcgggtctctcaggaacgcatattttcttttcggattctccgagaaggggtggagaaacaggatgggaaccggattggttgcagtgtggcacagacctggaaccttcctgaaag

SEQ ID NO: 910546 - DNA, 120 bp, Artificial Sequence
  ENSG00000225206_1 (sequence is synthesized)
aggttggggcaggcagtgactgttcagacgtccaatctctttgggacgcctcttcagcgctgtcttccctgcctctgcctttaggacgagtctcaaacaccaacaaacgcaaggcacgtc

SEQ ID NO: 910547 - DNA, 120 bp, Artificial Sequence
  ENSG00000225206_2 (sequence is synthesized)
tcaaacaccaacaaacgcaaggcacgtcccccctctcaggtcagctgcgaaggcgtgggagcaagagagagcctctccctccttctacttagagtttttgtttgtttgtttgtttgtttg

SEQ ID NO: 910548 - DNA, 120 bp, Artificial Sequence
  ENSG00000225206_3 (sequence is synthesized)
cacggatttgtcacctcctagcgaagaggaagccaccgccaccacacccctcaagcatgcctgggcactcctggggacaatcggacgtggcaggagttggcatgcccaagatgaagctgg

SEQ ID NO: 910549 - DNA, 120 bp, Artificial Sequence
  ENSG00000225206_4 (sequence is synthesized)
gaaggatgacccagagtggaaggcgtgggctggggctccaggtctcagctctcgccagcgtcggaccacacagctttgccagctttgcaccttgcctttccttcttgtgaggcatctggg

SEQ ID NO: 910550 - DNA, 120 bp, Artificial Sequence
  ENSG00000225206_5 (sequence is synthesized)
accgtcctatcaaggcgcttcaaaggtggaaggacagagtgctggggacaagaacgtaccaggcgcccagaagattccactagcgcggccaaacactaagaccaggtttcctccctgcgt

SEQ ID NO: 910551 - DNA, 120 bp, Artificial Sequence
  ENSG00000225206_6 (sequence is synthesized)
ggtggtcgttggttgtgcacgggctacgcacgaagactgaattcctgagaaatggaaactgcaggagaaaaatcaaataaacttagaggcctgtgaagctctccctcttgtcgctctggg

SEQ ID NO: 910552 - DNA, 120 bp, Artificial Sequence
  ENSG00000225206_7 (sequence is synthesized)
accgctctaagctgagctacatctcagataccttctccccctggaggatgggcctttctcaggcacgaagtgcgtgtgccccactgggctcttgcccacaagagcagtctgaaccctgga

SEQ ID NO: 910553 - DNA, 120 bp, Artificial Sequence
  ENSG00000225206_8 (sequence is synthesized)
ctttcttctaatatttaggattcccagtgaagggtactccacacacaccctctgcctacccctaatcccaccccattgtgtctgatcccacaattactcccagggtatctatactcacag

SEQ ID NO: 910554 - DNA, 120 bp, Artificial Sequence
  ENSG00000225206_9 (sequence is synthesized)
cttttgcgctcaaagaacattgtcgtctgcagggaacgggtggagcccttctcagaagctcccgggggcgagtccattttaagaatgagttgaagtaggaaagaaaacacagatgctgtc

SEQ ID NO: 910555 - DNA, 120 bp, Artificial Sequence
  ENSG00000225206_10 (sequence is synthesized)
tttgcattcgacattctatcaccagcaagagaatatgtaactcctgttctttccttcattattccatgaattaccttttttctctagggatctaccagttggtgatttagggcttttaaa

SEQ ID NO: 910556 - DNA, 120 bp, Artificial Sequence
  ENSG00000225206_11 (sequence is synthesized)
tattatgcttgttatgtatttaacaaaatgcaatatgtctactggtggcattgtttccttgggaaattagaaaagtagaagctacatactctagttcctaggtggtctctggaaagttgg

SEQ ID NO: 910557 - DNA, 120 bp, Artificial Sequence
  ENSG00000225206_12 (sequence is synthesized)
cctcatgctggttggctaaataataagtgtttaggatttgaaaggaagaaagagagctgaagtcctggtgacagagtttgtgagaaacagaagatgtaacactctggcatttgttgagga

SEQ ID NO: 910558 - DNA, 120 bp, Artificial Sequence
  ENSG00000225206_13 (sequence is synthesized)
gatgaggaagaacttttgaaaaataagctattctattcagttttgtgcaaatttattgcagttgcttcatagaggaagaataatgttgagaatggaataattgcaaatgctagtgatgaa

SEQ ID NO: 910559 - DNA, 120 bp, Artificial Sequence
  ENSG00000225206_14 (sequence is synthesized)
atctaaaggaaacctctactcatagttaactgaaagtatttttgttgttgttgtttaaatacttatctcattgctttctttcctttgcagaattattttcctataatagtttccattagg

SEQ ID NO: 910560 - DNA, 120 bp, Artificial Sequence
  ENSG00000225206_15 (sequence is synthesized)
tgtcagtctgaactggttcttacttaagttaggggtgaaaatgttccatcatcacaccttttaagataagaaagtgggaaaaattaaaactttattaagttgaaattactggagttaatt

SEQ ID NO: 910561 - DNA, 120 bp, Artificial Sequence
  ENSG00000225206_16 (sequence is synthesized)
tttattgttaaagacagcttttttattcccagaaaaagtaattttaaattatgtcaccactagtcaatgactgcttttgccctgtcactgtccatagccatgattaaagaagtacaaaat

SEQ ID NO: 910562 - DNA, 120 bp, Artificial Sequence
  ENSG00000225206_17 (sequence is synthesized)
agcagcggcagcggtagcagcggcagcggtagcagcggcagcggcagcttggtcctctgactctcttcggtgacgggtattcttgggtggataatacggattacgttgttattgcttaag

SEQ ID NO: 910563 - DNA, 120 bp, Artificial Sequence
  ENSG00000225206_18 (sequence is synthesized)
aatacgcgtagtcgaggagagtaccagcggcaggggggcagcggccgccctccccagcccaccagctggccactaaacgcccgtggttgccaaggacgagtctcaaacaccaacaaacgc

SEQ ID NO: 910564 - DNA, 120 bp, Artificial Sequence
  ENSG00000225206_19 (sequence is synthesized)
aaacgcccgtggttgccaagcctcttgcagcttttcaaaattcattctcctgtgtcttctcatgactgataacttggaaaggatatgctacataatgtacataataaaagtagtaatttc

SEQ ID NO: 910565 - DNA, 120 bp, Artificial Sequence
  ENSG00000225206_20 (sequence is synthesized)
aacagaaaatcaagatgccactcgattttgccatggatttataaaaatgacacatcagacaacagaagcatatgagaaaaatttgctgggtatctactcacttcaattcaaacatttgaa

SEQ ID NO: 910566 - DNA, 120 bp, Artificial Sequence
  ENSG00000225206_21 (sequence is synthesized)
gaaattatgaaaattccgatgagtttttaaagtttgtgcttgctctggtgtagtgtagccatgcattgatctgtcatcacagccaaaagtggaaacaattcaaatgtccaacaactgacg

SEQ ID NO: 910567 - DNA, 120 bp, Artificial Sequence
  ENSG00000225206_22 (sequence is synthesized)
aaaagatgaagtgtggtatatccatataatggaataatatgcagacataaagtggaatgattgacacatgtttacaacatggatgaaccttgacaacgctgtgttaagttaaagaagcca

SEQ ID NO: 910568 - DNA, 120 bp, Artificial Sequence
  ENSG00000225206_23 (sequence is synthesized)
gttaacatatgctacaaacaaccatcttcagacagtgtagcgaaccaactgtgccagacttaaactgacgaccctgaggtgaatcgttctattgccacaacatttctgatcttcaaggct

SEQ ID NO: 910569 - DNA, 120 bp, Artificial Sequence
  ENSG00000225206_24 (sequence is synthesized)
ctccatgctcctaaactcttttctttaatattctacagtgtgtttattttcacggctataaagtcatactcagatttgcaatgatatttactaccatatttcagagtgttttaactgatg

SEQ ID NO: 910570 - DNA, 120 bp, Artificial Sequence
  ENSG00000225206_25 (sequence is synthesized)
ttagttcaaatcaattctggagaaactttccagccaagggaattgcaagctagctggttgacattggaggtcaaatactccagggtatgggtctcaaatcacttaattcttcacagcaaa

SEQ ID NO: 910571 - DNA, 120 bp, Artificial Sequence
  ENSG00000225206_26 (sequence is synthesized)
ttagaaacgggactccagctggtgctaaagaataagacagacttgctgtataaggacaagctgctgcttggatttcgagtctttatattcctaaaataaaaaatgtgagacccaattccc

SEQ ID NO: 910572 - DNA, 120 bp, Artificial Sequence
  ENSG00000225206_27 (sequence is synthesized)
accccccaatctcattctttcagagtaaaagatttcttaacaacagcaaaaatctggccacctgatttcaatacataaatcttgccaagttataaaaataaaatatgatttaaacagcaa

SEQ ID NO: 910573 - DNA, 120 bp, Artificial Sequence
  ENSG00000225206_28 (sequence is synthesized)
tgaaaaaaggaacatggattcagcttaagctgttcatttgacaatactgagggcacagtaaaggaggagggagacaaattgtgaaaattacttatgtccactagttttactttaataaat

SEQ ID NO: 910574 - DNA, 120 bp, Artificial Sequence
  ENSG00000225206_29 (sequence is synthesized)
cctgcttaaatactcagaatttatgaatacaatttatgatatataagtgggatattttaggtcgcccatttaaatttatataatgtctataaatggtcaattttatactataatattcat

SEQ ID NO: 910575 - DNA, 120 bp, Artificial Sequence
  ENSG00000225206_30 (sequence is synthesized)
taataagcataagaaacatcatcttgattggtcatttgctactgagtcccaagtaagtagcttgatagaaactgcatttttcagaaaatttgcttattttattctttgtatttgtgaatt

SEQ ID NO: 910576 - DNA, 120 bp, Artificial Sequence
  ENSG00000225206_31 (sequence is synthesized)
ctgttctgatgttgttgcttgaataaaattgtggggagtggtgatggtattcgtggttaaagatccatagagcattatgacaaccccatgaactttccctgaggccattgtgagccctag

SEQ ID NO: 910577 - DNA, 120 bp, Artificial Sequence
  ENSG00000225206_32 (sequence is synthesized)
aatgatgtggttcttggtgtcagagcaatgccaatctagaaccagaacagaggtcccagtgaaagtccaagcaaaggcaagcaacgatgaagtagcattttgatggaaggaatattccaa

SEQ ID NO: 910578 - DNA, 120 bp, Artificial Sequence
  ENSG00000225206_33 (sequence is synthesized)
aaaccctattatcaatttttgtcttattatattccacattagtcatgagaaattttcaaatttaaaaatagacaacaaaattagagatgatgggtatattgggaaacatttttgtgtttt

SEQ ID NO: 910579 - DNA, 120 bp, Artificial Sequence
  ENSG00000225206_34 (sequence is synthesized)
atgtaagacagaggagaagtgctaaggacatagaaggaaagacagcataaggccatcacagttgttcaccatcttgtcaatatgtacaggtgcagctaccattgtatcacggaaatgaca

SEQ ID NO: 910580 - DNA, 120 bp, Artificial Sequence
  ENSG00000225206_35 (sequence is synthesized)
gaatgatgttcttactgtgttggaaagtagtgtattctgcatgggagacttactgtttaaaagtaaatttcttttggatatattttccgtaagaagaaaaaatataataatgacatcaga

SEQ ID NO: 910581 - DNA, 120 bp, Artificial Sequence
  ENSG00000225206_36 (sequence is synthesized)
atatttaaagacttttaaatcatttagctattgaatttagttattgatagctgtacagctatatacacaaatggtaagtagagtttaagcaaatagctttgtagtacaatttgtttttta

SEQ ID NO: 910582 - DNA, 120 bp, Artificial Sequence
  ENSG00000225206_37 (sequence is synthesized)
aatgttttcagatttttatcttagtgcttatactttaaatcttgacttacaagtcttgcatttaagtctagaaaacattttgcatgattgtataaaataaacattttagttgaggaaaca

SEQ ID NO: 910583 - DNA, 120 bp, Artificial Sequence
  ENSG00000225206_38 (sequence is synthesized)
ctgcagttcatccaaaaaacataagctaaaaagatataatattttaaatttcttgaaatgtgtttgttacccagtaattagttgagtttgttgagtgcagcctaacaataaaatcagtgt

SEQ ID NO: 910584 - DNA, 120 bp, Artificial Sequence
  ENSG00000225206_39 (sequence is synthesized)
atctgtatgtttgtattgttgaccagcttaaaaatttattaccaactgtatcttgtgagttctgggttctgttacatcctggctaataataatgtgagctaagcaaggcagtctgatctc

SEQ ID NO: 910585 - DNA, 120 bp, Artificial Sequence
  ENSG00000225206_40 (sequence is synthesized)
caacacaattaaaatattataatacatatgcaagggtaaagacaacacttcatttgctttatttgtggaaaagccctttgagactcatagtatttgaaaatatatatatatatagtagat

SEQ ID NO: 910586 - DNA, 120 bp, Artificial Sequence
  ENSG00000225206_41 (sequence is synthesized)
caaactagaaccaaatgttaaaaacctacgagttctaaaacatgcagttcaaagattttaaataagggttattgcctttattaatttaaaaccaatactgaatctcattcagttaaatta

SEQ ID NO: 910587 - DNA, 120 bp, Artificial Sequence
  ENSG00000225206_42 (sequence is synthesized)
caaactaaaaaagacatattgctggaatctattaatactatgtttccagttcaaatgaaatttgtactataatatgctttttaaaaagttgacaaattatattacaatagtgacataatt

SEQ ID NO: 910588 - DNA, 120 bp, Artificial Sequence
  ENSG00000225206_43 (sequence is synthesized)
gcataatttgaaagtagggtctatttgtaaacttgaatgaaatatgtgctttttggaaacactttttctgaaaagattatttttataaaaatgatacattttaattggaaagttgatatt

SEQ ID NO: 910589 - DNA, 120 bp, Artificial Sequence
  ENSG00000225206_44 (sequence is synthesized)
tcttgcaattttgtttttaaaatttgtattcaatacatgagtgagtattaattgaagcctatttttgtctctctaagctagtgtagtcaatttcaataactgtttcaaagaagtctcaag

SEQ ID NO: 910590 - DNA, 120 bp, Artificial Sequence
  ENSG00000225206_45 (sequence is synthesized)
ataaactaaaaattactcatttaaaatagttttttatatatctgccaaatagtccattagtttttggattccaagaagaatgaatgaatgaatgaatgaatgaaggtcatgcctactatt

SEQ ID NO: 910591 - DNA, 120 bp, Artificial Sequence
  ENSG00000225206_46 (sequence is synthesized)
ctgtcagaagcagatataagaaaaagaccttttcctttgtaatagaaatatatcatgataagacttccaaatatcctggattgttttacagataactacacaggaattaaagttatagaa

SEQ ID NO: 910592 - DNA, 86 bp, Artificial Sequence
  ENSG00000225206_47 (sequence is synthesized)
ctctgggaccgctctaagctgagctacatctcagataccttctccccctggaggatgggcctttctcaggcacgaaatggtacgtg

SEQ ID NO: 910593 - DNA, 120 bp, Artificial Sequence
  ENSG00000225206_48 (sequence is synthesized)
taggcgtgagccaccacgcctggccagcattcccaatttttaaaaatgaatgattggcacaaatcttagaaagccattttctgtagatttgaaagcaatgctatttacattgttactact

SEQ ID NO: 910594 - DNA, 120 bp, Artificial Sequence
  ENSG00000225206_49 (sequence is synthesized)
agatttgaaagcaatgctatttacattgttactactttcttgttaaatcttgcatgtctgcagtatgtgttgtaatagaaacctaagattatgatctgctgtattcatatttgaagaaga

SEQ ID NO: 910595 - DNA, 120 bp, Artificial Sequence
  ENSG00000225206_50 (sequence is synthesized)
aaatttcagactgtataatcaactagttgatgattcatatttgcttgtacaaagttaaaagtgtaacttgccagaaaagaaggaagcctgaaaagtattctaaatacattaataagaagg

SEQ ID NO: 910596 - DNA, 120 bp, Artificial Sequence
  ENSG00000225206_51 (sequence is synthesized)
gttctacatgaattaatttttgttttgccatctacagagttcctgccacattctaggcacttcatatttgctgcaacatttattcagacattgacagaacaagagaaacgaagttaaatt

SEQ ID NO: 910597 - DNA, 120 bp, Artificial Sequence
  ENSG00000225206_52 (sequence is synthesized)
ttaagtaccatggattgaaattaaatttagggaagatattttatagtatgaattgttcatctgtatttaacaaggtattcatttattttgggcgatttaaggaaggtcctttctggaaac

SEQ ID NO: 910598 - DNA, 120 bp, Artificial Sequence
  ENSG00000225206_53 (sequence is synthesized)
aggattacaaacatatggacctatttagtcaatttcaaccttgtgattttgaatctgacaggttctcagctgcttttattaaataacggattttcttaataattactgtactcaaactta

SEQ ID NO: 910599 - DNA, 120 bp, Artificial Sequence
  ENSG00000225206_54 (sequence is synthesized)
gcaaaaagctctatttatagcccagttttttagtcacacactattgtgtcttgtcaaattgaaaccatatactacattctttacttattaagatggtctttctttgtaataattttggag

SEQ ID NO: 910600 - DNA, 120 bp, Artificial Sequence
  ENSG00000225206_55 (sequence is synthesized)
taacctggactacggtgaataattgttcaggttgcttactgtgtaactccagaggagcattcacatggtacaatttgcagatttaagtatttattacaaccattttctggcagataacag

SEQ ID NO: 910601 - DNA, 120 bp, Artificial Sequence
  ENSG00000225206_56 (sequence is synthesized)
tggaacaccctgttctgttaaaattagtttattatgacaaattgcctacagatggacataaactgtcttgaggaagggcacctgctttggactgaatcgtgtccccccaaaatcaaatgt

SEQ ID NO: 910602 - DNA, 120 bp, Artificial Sequence
  ENSG00000225206_57 (sequence is synthesized)
tgaagcctaatctctaatatgatggtatttggagatggggcctttgggagataactaggtttagatgaggtcaagagtgtggggccttcctgattagtaccctgaaaagagaaaacacca

SEQ ID NO: 910603 - DNA, 120 bp, Artificial Sequence
  ENSG00000225206_58 (sequence is synthesized)
gagagcttgccctctctccctcttaccccacaggcacacaaagaggtcatgtgagtacacagtgagataacaaccacctatgagaaaacagaagaggcttcagagtgaaatctactttgc

SEQ ID NO: 910604 - DNA, 120 bp, Artificial Sequence
  ENSG00000225206_59 (sequence is synthesized)
tggtactgtaatcttggacattattctctagaactgtgagataataaatttatcttatttaagccacccagtctatggtattttgttatggcaccctgaactaagacaaattttggtacc

SEQ ID NO: 910605 - DNA, 120 bp, Artificial Sequence
  ENSG00000225206_60 (sequence is synthesized)
aagaaatgggggtgctactgtaactaatacctaaacatggggaaatgactttggaattggatagtgagtagaggctcaagaattttcaggtgcatcctaaacatatgaacaaacagtaaa

SEQ ID NO: 910606 - DNA, 120 bp, Artificial Sequence
  ENSG00000225206_61 (sequence is synthesized)
ggtgattctggtgagacctcagatggaattgaggaatatgttattggaaactggaaggacggtgatccttgttacaaagtggcaaaaaacttaggtgaactgtattctagtgttttgagg

SEQ ID NO: 910607 - DNA, 120 bp, Artificial Sequence
  ENSG00000225206_62 (sequence is synthesized)
aaggtagaacttgtgagtgatgaaattaaatatttgacatttctaagcaatatgatgaaggagcagctggtttcctcctgaccatttctgctgaaatgaaaaaaaaaaagataagttgaa

SEQ ID NO: 910608 - DNA, 120 bp, Artificial Sequence
  ENSG00000225206_63 (sequence is synthesized)
gaagaaattgttcagcaaaaaggaaccagaacttgaagatttgggaaattctcagcttatccacattattaaaaaatgacaaaaacttgctctgaaaataacactaggagtgtgactgga

SEQ ID NO: 910609 - DNA, 120 bp, Artificial Sequence
  ENSG00000225206_64 (sequence is synthesized)
caaccatttgataagagtttatgagattatgtgagcagaaattctgccagtttgaactgaaggggatgaagatgggacaaaaagaatgaaggcttcgagacttcttgggttagacatgat

SEQ ID NO: 910610 - DNA, 120 bp, Artificial Sequence
  ENSG00000225206_65 (sequence is synthesized)
gggctgatttgcttatttggctgtgaacctgcactatttttcaaggagaggaaaaaatggccccaaaggcaattcagagatagccagagccacagcctcagtttcaacaggctggacagt

SEQ ID NO: 910611 - DNA, 120 bp, Artificial Sequence
  ENSG00000225206_66 (sequence is synthesized)
ctccactcagctctttggaggcagaaccactcagaggactcaagcctgtcagagctagggggtggggctggcaatcccacagggtggaaaggatggggctatcctgcaaatccatgtggg

SEQ ID NO: 910612 - DNA, 120 bp, Artificial Sequence
  ENSG00000225206_67 (sequence is synthesized)
tgatgtcttgggtggaatgctctggactgaactgtcctcccatcccctgctcagattctgtgttgaagcccttacctccagtgttacggtatttggagatggggtctttgtaagataatt

SEQ ID NO: 910613 - DNA, 120 bp, Artificial Sequence
  ENSG00000225206_68 (sequence is synthesized)
gggtttagatgagatcatgagagtgaggccctcaggattagtgcccttataagaaacctcggaaagcttgcgagttctctctctctctctttctttttctttctctctctctctccccgt

SEQ ID NO: 910614 - DNA, 88 bp, Artificial Sequence
  ENSG00000225206_69 (sequence is synthesized)
acgcgcgcgtcatgtggaaacacagcacaaaggcagcctctgcaagccaggaagagggctcacgagaacccaatcaagctggcacccc

SEQ ID NO: 910615 - DNA, 120 bp, Artificial Sequence
  ENSG00000225206_70 (sequence is synthesized)
attagcatgtttgggatccactactggatggttaacagcagcttttgtaactgtacgccgaccatatcgaattatgctctgctaaaaatgaactctttgcagaccaaccctctcggctgt

SEQ ID NO: 910616 - DNA, 120 bp, Artificial Sequence
  ENSG00000225206_71 (sequence is synthesized)
cagtgttttccgttttcctattttaacgtttgtgtatagtggcaggcgacagatggtgtagatcagatcgatttgattgcattagatgattttttcccttccccactcctttctggaagc

SEQ ID NO: 910617 - DNA, 120 bp, Artificial Sequence
  ENSG00000225206_72 (sequence is synthesized)
tcgcatcagctgaaggctatcgcctgggactcctcggaagcatgagcaagccgccaccacgcgaaggcactggggcacagccagcgcgaggcgccgaggtcccttcccaaggcttgttaa

SEQ ID NO: 910618 - DNA, 120 bp, Artificial Sequence
  ENSG00000225206_73 (sequence is synthesized)
cactgtaacccggcactcggagagaagaagcagctcacactgcccagagcctacctcactgcacatcagatgactccctggcttctacacacagttggagttccgcttgaaacctggatt

SEQ ID NO: 910619 - DNA, 120 bp, Artificial Sequence
  ENSG00000225206_74 (sequence is synthesized)
tagaggggttctctggccgccatggcactcaatcataccacctagagtggactggccgagaccagactgggtaccaagcagagaagtgcagaggaaagcactgggagagcaccagaattg

SEQ ID NO: 910620 - DNA, 120 bp, Artificial Sequence
  ENSG00000225206_75 (sequence is synthesized)
gaaatagagcggccatttggatttgggcaggaagcagccgagcacagctttggatccttctttagggaaatcgagttatggatttatggtcccggtcaagctcagcccatccccaggcag

SEQ ID NO: 910621 - DNA, 120 bp, Artificial Sequence
  ENSG00000225206_76 (sequence is synthesized)
cactaaacgcccgtggttgccaaggcatccaaagcctctgggatgtgttctgactgtaaaaactctgatgttgtgaaaaaagcttacgctttgcctccactcaaaccagatggtgtttcg

SEQ ID NO: 910622 - DNA, 120 bp, Artificial Sequence
  ENSG00000225205_0 (sequence is synthesized)
agcggccgcagctccccgcccgggaccgcgcaaaaaggcccaaggtcccgggccgcactcaccgaagtccaggaactgcttcatggagagcggggacggcgagaagcgcgcgtagaagtc

SEQ ID NO: 910623 - DNA, 120 bp, Artificial Sequence
  ENSG00000225205_1 (sequence is synthesized)
gaagctgcggctgaagccggcggcgcgcagccccgggcccgggccggccaaggcggctccgcgaagcagccgcgccagcctcatgccgagtcccgctagagaagccacagccagtacgcc

SEQ ID NO: 910624 - DNA, 120 bp, Artificial Sequence
  ENSG00000225205_2 (sequence is synthesized)
aggtttccccgcgcctctgccgagtggcaagaaaaacctattggatggttacatgaggacacagcaagaaagcccttatgagacactgagttccggcatcttgatcttgaacttcacagc

SEQ ID NO: 910625 - DNA, 120 bp, Artificial Sequence
  ENSG00000225205_3 (sequence is synthesized)
gcaaatacttgaagttgcaatcgaaggtcaagaaaatggaatcaagaggtcacaatccttctctgatgatggcttagaaagctggaagacactcaacattgaatcctggggctctgtgcc

SEQ ID NO: 910626 - DNA, 120 bp, Artificial Sequence
  ENSG00000225205_4 (sequence is synthesized)
atgcttgctaggagaaacagccaccatgagtccatctttcagatctcaagtgaacaggccaagaaactgggcacagagatatccgtaactcacccaaggttatgttctaagaggagaagc

SEQ ID NO: 910627 - DNA, 120 bp, Artificial Sequence
  ENSG00000225205_5 (sequence is synthesized)
gcctccctgcctatagcaaatgcacctctagcttctcagctcctgttactggtgcagtggaagtaccacaaacaggaacgaggcattccacacaacagagttttgcttttgttgcccagg

SEQ ID NO: 910628 - DNA, 67 bp, Artificial Sequence
  ENSG00000225205_6 (sequence is synthesized)
tagccatgtgccaccaccacacccggctcattttttgtatttagtagaaacggggtttcaccatgtc

SEQ ID NO: 910629 - DNA, 120 bp, Artificial Sequence
  ENSG00000225205_7 (sequence is synthesized)
ccatgtgccaccaccacacccggctcattttttgtatttagtagaaacggggtttcaccatgtcagtcaggctagtctcgaactcctgaccttatgtgatctgcctgcctcggcctccca

SEQ ID NO: 910630 - DNA, 120 bp, Artificial Sequence
  ENSG00000225205_8 (sequence is synthesized)
agtagtacgtaaatacgaaagctgaacactgggacgtgtggccctaaatagtatcaccgcgacggcggccccgggagaagagatgtactgccatgtactggctctgtgcctttgagtgag

SEQ ID NO: 910631 - DNA, 120 bp, Artificial Sequence
  ENSG00000225205_9 (sequence is synthesized)
gccagccagcgccggcacttcggagggaggaaggaagcacctaaggcgctgggggcggaaacgctgaggaggaggggtgcgcctcaggcgagagctggccggcgccgacccggcctgggg

SEQ ID NO: 910632 - DNA, 120 bp, Artificial Sequence
  ENSG00000225205_10 (sequence is synthesized)
caccatgagtccatctttcagatctcaagtgaacagtcattctccagctgggattgagaacaaggggaagctggccatagagccaggtgaccaaagatggaagacaaagggtgggctgtg

SEQ ID NO: 910633 - DNA, 120 bp, Artificial Sequence
  ENSG00000225205_11 (sequence is synthesized)
attcccagagctccaagccttgttctgtcttgtcacaccaactgttactgatgaacagaaaagattttcttggaattcctatgcccctggccttgactctggagccaggggtcaggtgac

SEQ ID NO: 910634 - DNA, 120 bp, Artificial Sequence
  ENSG00000225205_12 (sequence is synthesized)
tcacagctgaagaagtgtggctgctattaaaacatgccagaggagagcttacgacggccactattgttaagagtatcattaacggtgtcaaaattcttgtcaaaaatcctgtgttgcccc

SEQ ID NO: 910635 - DNA, 120 bp, Artificial Sequence
  ENSG00000225205_13 (sequence is synthesized)
gatctcaagtgaacagcatggtatcggggaacactgtcatcgtacctagagcgtttaaagaatccacactagagaagagggaaagagaaagagaaacaaattaatctcacaaagaagcaa

SEQ ID NO: 910636 - DNA, 120 bp, Artificial Sequence
  ENSG00000225205_14 (sequence is synthesized)
atacactaaatgggaatgtctaagctttctgttcagctatgtctacctctggactaaggggaaaaagacatggttttcttttaagaaagaaccaagaggctgaaatgaaagaagagccag

SEQ ID NO: 910637 - DNA, 120 bp, Artificial Sequence
  ENSG00000225205_15 (sequence is synthesized)
tggggatcaacggaagagaacagctgtaaaactggaagaaaagtccattttcatcttctctttacattttataacaaatgtaggctacctctttactaacaatttaagagtttatgaaaa

SEQ ID NO: 910638 - DNA, 120 bp, Artificial Sequence
  ENSG00000225205_16 (sequence is synthesized)
cagtgcttccatatttaaaaataatcacaatatgatatgtaaaatatctgattatcagattagattaagaataatttttaaatggcataaaccaaagattatttcatgcccctttcccac

SEQ ID NO: 910639 - DNA, 120 bp, Artificial Sequence
  ENSG00000225205_17 (sequence is synthesized)
taataaaatgcaaatcatgtcacaagtattttacaaattactatttgaatatgccagtgttccaacaggtcaactttataatctttttctctcctctgaggctctagtacacatatcact

SEQ ID NO: 910640 - DNA, 120 bp, Artificial Sequence
  ENSG00000225205_18 (sequence is synthesized)
tctctcattagccaggaggtcatttatgttgcctggatttgctattgtgcttctaattaagctatttcattaatcacatagtaactgtttcctgcaataaaaatcatgtgctgcatagga

SEQ ID NO: 910641 - DNA, 120 bp, Artificial Sequence
  ENSG00000231031_0 (sequence is synthesized)
agtgaggggagcgtgctagaacaggagggtggtttgggagggctctgcacttcctcgtcccccacctcgcgtttgaggaacgcgaggaggggacctcatggaacattccggcttgctagt

SEQ ID NO: 910642 - DNA, 120 bp, Artificial Sequence
  ENSG00000231031_1 (sequence is synthesized)
ccaagctccgtccgttctgacccccaaacagtcatctctttgccacgccttggacctaggagtgagtaccccgtgacccaatcagccattaggagcatagaccctggaagcaagctctga

SEQ ID NO: 910643 - DNA, 120 bp, Artificial Sequence
  ENSG00000231031_2 (sequence is synthesized)
gccatactgggaacatcaggagagcctgagaataaaattcactgaaggtggcagaacagaaagacagaagaaatctgggcccatgccgatgtcattaaactgcttaattaaccagccctg

SEQ ID NO: 910644 - DNA, 120 bp, Artificial Sequence
  ENSG00000231031_3 (sequence is synthesized)
gaactgccccacttctggacttattatttttaaggacaggatcccggtccagtctcctgactgcgtagagatccctcttcttcccgaaaggcagtggatgtacttgaaaggagacttcac

SEQ ID NO: 910645 - DNA, 120 bp, Artificial Sequence
  ENSG00000231031_4 (sequence is synthesized)
ggacattcccaaggagacctgcattttaagcccagctctgtctgcacttgctgtaaatgagatctcgctttgctgcccaggctggtcttgagctcttggctcagaagatcctccctcctc

SEQ ID NO: 910646 - DNA, 120 bp, Artificial Sequence
  ENSG00000231031_5 (sequence is synthesized)
aatctcctgaagtgctgggattgcaggcatcagccaccacgcccggccaagcttctgttccatgtgccgtcctggatcccgcctcccacaacccagacctgctgctgtcttccttttctc

SEQ ID NO: 910647 - DNA, 120 bp, Artificial Sequence
  ENSG00000231031_6 (sequence is synthesized)
tctctctgctgctttcttcccattctcccagtctctgccataagctccagatttattgaagagtaaaacatccttccctgccctccaggtacccacagcttggcaagggagacaaacaag

SEQ ID NO: 910648 - DNA, 120 bp, Artificial Sequence
  ENSG00000231031_7 (sequence is synthesized)
ccctggaggttcagactggcttcacagagaacaggacatctgggcaggaatttgttagaatgaggagagatgtttccaagcagagagaacaaactgcctgggccaggacagaaccgggag

SEQ ID NO: 910649 - DNA, 120 bp, Artificial Sequence
  ENSG00000231031_8 (sequence is synthesized)
acatttagagaatgcaggcagttgctcagtggtttcttttgaaagggtgaggccatggctattcaaccagtgatgggagcaacacatggagatagaggagagagacaagaaaaggaaatc

SEQ ID NO: 910650 - DNA, 120 bp, Artificial Sequence
  ENSG00000231031_9 (sequence is synthesized)
aaagaagaagaagccagaaaggcattgatcatgcaccctgctggggccagcctcggggttggtattcccacctgagttcagcaggtggagaaaccagggtctcccccaagctgggagcag

SEQ ID NO: 910651 - DNA, 120 bp, Artificial Sequence
  ENSG00000231031_10 (sequence is synthesized)
agctgtgctctcagggatctttccagccatgctccttggcttatagctggtgggtttgggtttcttctgaaattgcagaagctctctggaggtttctaggcagggccctttggcctcctc

SEQ ID NO: 910652 - DNA, 120 bp, Artificial Sequence
  ENSG00000231031_11 (sequence is synthesized)
tgtttacctggtctcaggccctgacctgcaccgccaaccctaggactccgggctctccctttcaccccacctgctggcctcccttcatcctgccagattcactgccactgggtgcccacc

SEQ ID NO: 910653 - DNA, 120 bp, Artificial Sequence
  ENSG00000231031_12 (sequence is synthesized)
ctgtctggacaaagccaaggcccctcctgctaggcccatcctgtggccacctggggctgcgagagatagttgcccttttccgcttgacactgtgtgtttggtcccctgccccgggcagcc

SEQ ID NO: 910654 - DNA, 120 bp, Artificial Sequence
  ENSG00000231031_13 (sequence is synthesized)
ccatgctcctccctggccctgccggcttccagagcatttatcagggcctgtgtatgtttttcttgtgtgggatttgaaatgatttctttaaacaaggcctaaactgggattgatttcctc

SEQ ID NO: 910655 - DNA, 120 bp, Artificial Sequence
  ENSG00000231031_14 (sequence is synthesized)
tctttatttagagtggtttgttttgtaatatggttcttctaacagtctaaattgtgggaacttgggagaaaaaaaagagaattttctgacttcatataaatataaattactttatctctc

SEQ ID NO: 910656 - DNA, 120 bp, Artificial Sequence
  ENSG00000231031_15 (sequence is synthesized)
gagcctcacaactgaacccagaaatgagatctcgctttgctgcccaggctggtcttgagctcttggctcagaagatcctccctcctcaatctcctgaagtgctgggattgcaggcatcag

SEQ ID NO: 910657 - DNA, 120 bp, Artificial Sequence
  ENSG00000231031_16 (sequence is synthesized)
ccaccacgcccggccaaggtcagcttttctgggtataaacttccagtgggagaaagtttcacccttccatggactattgcctatgacctattaaacccagggacctttttcaagtgcaaa

SEQ ID NO: 910658 - DNA, 120 bp, Artificial Sequence
  ENSG00000231031_17 (sequence is synthesized)
tcacggtgagccagtatatggtatttctcggtggatgttccatgtgtacttgaaaagaatgtgtttcctcctgttgttgggtgaagtactctataactctataaatgtcatttagctcca

SEQ ID NO: 910659 - DNA, 120 bp, Artificial Sequence
  ENSG00000274460_0 (sequence is synthesized)
gagatacagcaaaaatcatgaatgtgttatacaggtaccattgagtgaaatctgggaagcagtgctctgatcaagccacctgcctgcttaaaattcttcaacgacagccacgtttttcag

SEQ ID NO: 910660 - DNA, 120 bp, Artificial Sequence
  ENSG00000274460_1 (sequence is synthesized)
gataaaattcaaattcattaacatggcatacaaagctgtctccagtacttcaaaaccccaattcccaagttagctagctgcacccctgagtccaatcattgtaacttcatcattcaacag

SEQ ID NO: 910661 - DNA, 85 bp, Artificial Sequence
  ENSG00000274460_2 (sequence is synthesized)
acctgcttataatgtcctctcattcttaggttatgacccaatatcagaaaggggcaaaaataaattctgttcaaaatgtggcagg

SEQ ID NO: 910662 - DNA, 120 bp, Artificial Sequence
  ENSG00000274460_3 (sequence is synthesized)
agaaaggggcaaaaataaattctgttcaaaatgtggcaggatttgaaacataattcatgatatcagctacataaatcataaaatcccaagtttgtcaattgcaaaatgtcctattaagca

SEQ ID NO: 910663 - DNA, 120 bp, Artificial Sequence
  ENSG00000274460_4 (sequence is synthesized)
ttaagctacaaattaggagtgccatcttgtggacacatccaccacttccacatcatgtcacctcctagccaactccgtggctgttctcactgtggaggtctctgccacaactccagcatt

SEQ ID NO: 910664 - DNA, 120 bp, Artificial Sequence
  ENSG00000274460_5 (sequence is synthesized)
ttattgcagaagaaaacccagtccttgaactggtttctgcgtagaacacactgaaagccctgggagaggaaaccagcagacaggaaaagagtagacatggaagagcagatgagttcattg

SEQ ID NO: 910665 - DNA, 120 bp, Artificial Sequence
  ENSG00000274460_6 (sequence is synthesized)
atggagcctaactacctagcctgagcgctcgcggtgagtatggggtgggagaatgtaaagagaaagcaggcaacagtaggagtaaaacacaccagaggaaggtgatgtgggtttatactt

SEQ ID NO: 910666 - DNA, 120 bp, Artificial Sequence
  ENSG00000274460_7 (sequence is synthesized)
gggaacaacattaccttgccatcttagggccagaggcattaatcatggcttccccaatgcataatttcgatgttggcatttccttccccattcctttcagaatcctaccctgtcaggtat

SEQ ID NO: 910667 - DNA, 120 bp, Artificial Sequence
  ENSG00000274460_8 (sequence is synthesized)
ggcggaagttgcagtgagccgagatcactgccattgtactccagcctaggcgacacagcgagactctgtctcgggggggaaaaaaaagttcatatcaatttctaatattctataattatt

SEQ ID NO: 910668 - DNA, 120 bp, Artificial Sequence
  ENSG00000274460_9 (sequence is synthesized)
gtttttggtcacatatactttttccatgtattgaggtgaacagattggtcttattctgtgttaagttatattgattgattcaaattataaataaacctttcattcctgttataaacccaa

SEQ ID NO: 910669 - DNA, 120 bp, Artificial Sequence
  ENSG00000274469_0 (sequence is synthesized)
agaggggttgtggctttgaggacaattgttcaagtgagaagagggctgtgcagatctcaagatgacatcgggatcctgatgtgaagttttcctgcttctggaggagggaagcagagggct

SEQ ID NO: 910670 - DNA, 120 bp, Artificial Sequence
  ENSG00000274469_1 (sequence is synthesized)
gaagcagatcctgagacaaagtcccctgtgcaagagatttatttcaaaggtgtgcccagctcttggtggcccagggtgggccttggccttcagcctgctgacccaggaccctcactcctt

SEQ ID NO: 910671 - DNA, 120 bp, Artificial Sequence
  ENSG00000274469_2 (sequence is synthesized)
ccatagtggggaccagtgcctgtctgagccccatcatgatcccactgggagcattccattgtgtaaggatatcggaggatgcaagtccccaagacctccccgacactgctggtggagtgc

SEQ ID NO: 910672 - DNA, 120 bp, Artificial Sequence
  ENSG00000274469_3 (sequence is synthesized)
ggttagaggaatgaatgatacaaagagaaaggatttgccatttcaatcccagccatctctgcttgacataccttgtgaccctgcgcaagtcacctcatcttttgagtttctctttctcca

SEQ ID NO: 910673 - DNA, 120 bp, Artificial Sequence
  ENSG00000274469_4 (sequence is synthesized)
cctgtgactaccagatcattccattgtgtaaggatatcggaggatgcaagtccccaagacctccccgacactgctggtggagtgcaaattgatgcaaccacattggaaaacaatttggca

SEQ ID NO: 910674 - DNA, 120 bp, Artificial Sequence
  ENSG00000274469_5 (sequence is synthesized)
gtatctcatggaggtgaatattcagcaattccactcccagatgcctgtctggagacaacctcatcaagtctggtctcagatgtgtgttctctctgatgggagacagctggagcggctgtc

SEQ ID NO: 910675 - DNA, 120 bp, Artificial Sequence
  ENSG00000274469_6 (sequence is synthesized)
aggcctccctggcaatagcggtgcctgcggcagcacctgtcagcagcaccttaacgctgtcccagtgatggctgctgcgagtgggaaggtgacaggaggcagttgttcttggggtctggg

SEQ ID NO: 910676 - DNA, 120 bp, Artificial Sequence
  ENSG00000274469_7 (sequence is synthesized)
aggctctttgctgcactgctccttgacccctctacatggaagggtgagccccagttcctgtacatcttctggaattgcagacctcctccccacgtcacctccagtggatttcctcgctgg

SEQ ID NO: 910677 - DNA, 120 bp, Artificial Sequence
  ENSG00000274469_8 (sequence is synthesized)
tcttgactctggctgatgccacccacacgcctccactccagctgttttcctaagacagcgtgtgatgccatgccgccctgtgtttcctggtccctctgcctcaaagactttggtttccca

SEQ ID NO: 910678 - DNA, 120 bp, Artificial Sequence
  ENSG00000284726_0 (sequence is synthesized)
gccactgcactccagcctgggcgacacagggagactctgtctcaaaaagaaaagaaaagaaaagaaaagtattaactttgcttaatctacttaaaaacctaggctgaaactgaagtttac

SEQ ID NO: 910679 - DNA, 120 bp, Artificial Sequence
  ENSG00000284726_1 (sequence is synthesized)
aaaaacctaggctgaaactgaagtttacagacttaaaggattcctaactgaagtacagaataatctcccaagaacacgcgtacaggaatgtttccaaattctattaaacagtattgagat

SEQ ID NO: 910680 - DNA, 120 bp, Artificial Sequence
  ENSG00000284726_2 (sequence is synthesized)
ctgcaataacgcagtatttttgtaactaaggaaatattaccccttaacatacttaaaaactgagctccttttctcaccaccgttaccatacttgacaatactgattctcacctttacccc

SEQ ID NO: 910681 - DNA, 120 bp, Artificial Sequence
  ENSG00000284721_0 (sequence is synthesized)
atagagtaatggaaaatatgaaagataaaaatcatagaggagaaaatgagaagttccaaaatttatactagattagtagttctacaaggaggaaataggggagaagaagcaccattctaa

SEQ ID NO: 910682 - DNA, 120 bp, Artificial Sequence
  ENSG00000284721_1 (sequence is synthesized)
gaaataatgatgaaggattttctacaagcaaagaaaaatgagcctctggaatgaaaaggcacattgagttctgagtagaataaaaaatttcatttctagacatattgaagagactgaaaa

SEQ ID NO: 910683 - DNA, 120 bp, Artificial Sequence
  ENSG00000284721_2 (sequence is synthesized)
acaataaaaataaaaaaatctgaaaagccatcagaaatgaaacatccacaaatgaatgatgttctgcctgaagccaatttctcatcagcaacaatagatgccagtggactaatacctttg

SEQ ID NO: 910684 - DNA, 120 bp, Artificial Sequence
  ENSG00000284721_3 (sequence is synthesized)
aagtgatcagaaaaacaaattctacattcagttaaccagcatttaaggatgaatgcaaaataaagacattttcagatatatacagactgaggtttaactaatctcagacttttgctcaaa

SEQ ID NO: 910685 - DNA, 120 bp, Artificial Sequence
  ENSG00000284721_4 (sequence is synthesized)
gaatttatgaagggtggactttagcaagaaaaaaattcagctcagaggggaagaatcttccaatcaaaatggaagaataagaaccagatttaccttttcacctggaacaacaaataaaac

SEQ ID NO: 910686 - DNA, 120 bp, Artificial Sequence
  ENSG00000284721_5 (sequence is synthesized)
tggacaaaacagttattattgataattatttaatgatgaggatgtattctgagaaatgcacctttaggtgttttttgtccttactgaaacatcatagaggatacttacacaaacctggat

SEQ ID NO: 910687 - DNA, 120 bp, Artificial Sequence
  ENSG00000284721_6 (sequence is synthesized)
gtcatagcctactacacacctgggctacatgtagagcctgttgctcctaggctcctgtacaggatgttactgtattgaatactgttggcaattgtaacacaatggtaagtatttgtgttt

SEQ ID NO: 910688 - DNA, 120 bp, Artificial Sequence
  ENSG00000284721_7 (sequence is synthesized)
aaacatatctaaacatagaaaaggcagactaaaaatatggcataaaagattaaagtatggtatatttctatagggcacttaccacaagtgaagcttgcaggactggaagttgctctcggt

SEQ ID NO: 910689 - DNA, 120 bp, Artificial Sequence
  ENSG00000284721_8 (sequence is synthesized)
gggtggtgagtgaatgtgaagttgtaggacattatgcataattctgtagacttcataaacactgtacactatggctacactaaatttataaaaaaattttctttcttcgataataaatta

SEQ ID NO: 910690 - DNA, 120 bp, Artificial Sequence
  ENSG00000284721_9 (sequence is synthesized)
accttagctttctgtaacttttttactttataaactttttaaacttttaaaaacttttgggctcttctgtaataacacttagcttaaaacatgtacacgttgtacagctgtactaaaata

SEQ ID NO: 910691 - DNA, 120 bp, Artificial Sequence
  ENSG00000284721_10 (sequence is synthesized)
ttttctttatatccttattctataagcctttttgtattttttaaattattattcttaggttttactttttaaacttctttgttaaaaccaaagacacaggctgggtgcagtggtccacac

SEQ ID NO: 910692 - DNA, 120 bp, Artificial Sequence
  ENSG00000284721_11 (sequence is synthesized)
aaacaaaacaaaacaaaacaaaaaaaccagtaaaatatctgacaacaatagcacaaagtccaggaggggctaagtggaagtgtactgttataagggtcatattctgtttgtgaggtggtg

SEQ ID NO: 910693 - DNA, 120 bp, Artificial Sequence
  ENSG00000284721_12 (sequence is synthesized)
tgtactgttataagggtcatattctgtttgtgaggtggtgtactatcacttgaaggtaggctgttgtcttatctattcctgctgctgtgacaaaataccttaggcaagaagctaaggtgg

SEQ ID NO: 910694 - DNA, 73 bp, Artificial Sequence
  ENSG00000284721_13 (sequence is synthesized)
gtggaaggatcacttgagcccaggagttagaggttacattacaaaccctgtctcttaaaaaagaaagagaaga

SEQ ID NO: 910695 - DNA, 120 bp, Artificial Sequence
  ENSG00000284720_0 (sequence is synthesized)
ctccctcaccatccagtagcaccaaatatcagccaggtgatattgttctagtatcatcccgcttcatagaggcagaaaagggtgaagtcagttgtctgaggctacgctgctagagagctg

SEQ ID NO: 910696 - DNA, 120 bp, Artificial Sequence
  ENSG00000284720_1 (sequence is synthesized)
ggcttcaaacacaggtctgactccagtgcccacactcacaccaggctgccacactggtcgatccctgcatttggacaagagaggcactcagcctaggaagagggggctagtaggagcaga

SEQ ID NO: 910697 - DNA, 120 bp, Artificial Sequence
  ENSG00000284720_2 (sequence is synthesized)
gcaaggcacagatcccagcctcctgggatgtggcctgagattccatccatccatccatccatatttctgttcatccgtttatgtattcaccaatccattcatccatctatacttttgtcc

SEQ ID NO: 910698 - DNA, 120 bp, Artificial Sequence
  ENSG00000284720_3 (sequence is synthesized)
atccatctatccatccattcatctatatttttgtccatccatctatccatccattcatctatatttttgtccatccgttcattcatccagccagtcagcctcctatccacccacatgttt

SEQ ID NO: 910699 - DNA, 120 bp, Artificial Sequence
  ENSG00000284720_4 (sequence is synthesized)
gtctggctgtttactgggaacctgttcatggaccacaagcaaaagtcttccctgcagctcatggggctggcaatggggctgaccctttgactcacctccctgccacactccacactccag

SEQ ID NO: 910700 - DNA, 120 bp, Artificial Sequence
  ENSG00000284720_5 (sequence is synthesized)
agcccaccaggtagcctcacccaccagttgcccgtcggaacgacacatcctgggacttcttgtcatttcctgtccaagattccattataaggtgtgattgctgaagtaatagacagataa

SEQ ID NO: 910701 - DNA, 120 bp, Artificial Sequence
  ENSG00000284720_6 (sequence is synthesized)
ggatttcatactgatgctggagcctgtggcggataattccgtgataacagtttatcacccactgacgggaggtaatgggtaatcaccaggaagaaagcaaacccatcagggagccctggc

SEQ ID NO: 910702 - DNA, 120 bp, Artificial Sequence
  ENSG00000284720_7 (sequence is synthesized)
ctccacccagcctggccctagctttgttgtgccaactgccactttccaactcgaggaccaactcccgcctgtgccctgaaggatggcagagctgccggtccactgtgcatcaagccccag

SEQ ID NO: 910703 - DNA, 120 bp, Artificial Sequence
  ENSG00000284720_8 (sequence is synthesized)
acaccttccttcccactgagacttgcagcaaacttgggagaagacaaagtggggtttcaaggacaaagcaacccaatacatcctctagtccagtcctcctatgcacagccccaggctcca

SEQ ID NO: 910704 - DNA, 120 bp, Artificial Sequence
  ENSG00000284720_9 (sequence is synthesized)
ggccaggatatcagaggaagactttggccacagtgtatgtgccccggccatgttctctgcatcctagaaaccacttattggagccagggtggtgatgaccccttgccaccaccttccatc

SEQ ID NO: 910705 - DNA, 120 bp, Artificial Sequence
  ENSG00000284720_10 (sequence is synthesized)
accttgcaggggtcccctgccccctcttcacctttataaacacttgagtatgccatctgtccctcaccaggcttcccccaatagacactgtctcttccaaatctgcaggaaaaaataaaa

SEQ ID NO: 910706 - DNA, 120 bp, Artificial Sequence
  ENSG00000284720_11 (sequence is synthesized)
tgagtggatacaattttctcccatttcaggattttcccctttttaattttgttttaaacatccaggtcctccttgtctctcactactcagagagaataaaacaaatgaataagcaccaaa

SEQ ID NO: 910707 - DNA, 120 bp, Artificial Sequence
  ENSG00000284902_0 (sequence is synthesized)
actgattttcttagataatataattaaacagaagcgtgtaacagattaaacattatgagagagaaaaactttattgatcaaacatttggcttccaagaaaagtacctgacctagctcaat

SEQ ID NO: 910708 - DNA, 120 bp, Artificial Sequence
  ENSG00000284902_1 (sequence is synthesized)
attaggtaacattatgaagtatttcctgggcatgataatgacattgtggttatatgataggtgaattatttagggtcgaagtgtcaaatcagtgtctttgtggagggataaagctttgtg

SEQ ID NO: 910709 - DNA, 120 bp, Artificial Sequence
  ENSG00000284902_2 (sequence is synthesized)
gagggataggggaaaatgttcgacaattgttgaatctaaatagaaggaattcacatgtttattttaacattctatcaactttttggtatactcttaacaaaaagaaaaaaacaatgcctg

SEQ ID NO: 910710 - DNA, 120 bp, Artificial Sequence
  ENSG00000284902_3 (sequence is synthesized)
acttagatgtttatatgggtgactcaagctatcaagtaatggataactcctgtgccatataaacagttccaatacactaacaaaaacttcctaatttacttgaggacattaacaaaaacc

SEQ ID NO: 910711 - DNA, 120 bp, Artificial Sequence
  ENSG00000284902_4 (sequence is synthesized)
tcagaagacatacctgaaattatgaatcttttgcatcagtgtgatgtctccacttttatttctgattttatttatttgagtcttctagttttttcttagtctagctaaatgtttgttaac

SEQ ID NO: 910712 - DNA, 120 bp, Artificial Sequence
  ENSG00000284902_5 (sequence is synthesized)
attgtttttaccttttcaaaaactaacaatttagttgatttcttcctgtttttctattttttatttctgctctaatttttattctttccttttttctgctaactttgggcttagttttgt

SEQ ID NO: 910713 - DNA, 120 bp, Artificial Sequence
  ENSG00000284902_6 (sequence is synthesized)
aataggcaattatcattagaaacttccctcttagtcctgattttgcttcatcctgtaagtgttcatttgttgtgtttttgtcttttttaaaattttccttgatttcatctttgatccact

SEQ ID NO: 910714 - DNA, 120 bp, Artificial Sequence
  ENSG00000284902_7 (sequence is synthesized)
ggttgttttaagagtgtgttgttaattcccacataattgtgattttcccagttttccttctgttactgatttctaattttagtctattgtgcttgggaaaaaaaggttggtatcatttca

SEQ ID NO: 910715 - DNA, 120 bp, Artificial Sequence
  ENSG00000284902_8 (sequence is synthesized)
gtcttcttaaatttgttcagacttgttttatgacttaatatgtgatctatcctggagaatgttctatgtgcagttgagaagactgtgtattctgcaactgttaggtggaatattcagtat

SEQ ID NO: 910716 - DNA, 120 bp, Artificial Sequence
  ENSG00000284902_9 (sequence is synthesized)
atgtgtgttctgttcattattgaaaatggggtactgacatcttctactgtattgctaattgctatttttcccttcagttctgtcagtgtttgctttatgtatttaggtactctaatgttg

SEQ ID NO: 910717 - DNA, 120 bp, Artificial Sequence
  ENSG00000284902_10 (sequence is synthesized)
ggtgtatatatgtttatacttgtgatatcttcctaatgaattgactcttttatcatatgaccttctttgtctcttgggatggttttttatttaaagtctatatcgtctgatagtgtggcc

SEQ ID NO: 910718 - DNA, 120 bp, Artificial Sequence
  ENSG00000284902_11 (sequence is synthesized)
acacctgtgctcttttggttgctatctgcatggaatatattttcctattccttcacttttagcctgtgtgtccttaaatctaaagtgagtctcttctagatagtatatagttagatctta

SEQ ID NO: 910719 - DNA, 120 bp, Artificial Sequence
  ENSG00000232759_0 (sequence is synthesized)
aacgagcagcagagccgcccagcagcaaccacattaggaaggaatcggaaaccaacgctccgctggctgtcaccccttacccacttgctgtcagaccacagcctgaggcagccaaaccca

SEQ ID NO: 910720 - DNA, 120 bp, Artificial Sequence
  ENSG00000232759_1 (sequence is synthesized)
tttccttggggatccagcgcaaaccagagagtgtggacaggccgatggaagaatgttggaccagctttaagaatgggctgttctaagtcatgaatattgtaggaagcagctctaaggacc

SEQ ID NO: 910721 - DNA, 120 bp, Artificial Sequence
  ENSG00000232759_2 (sequence is synthesized)
acagggctggagggtgcacaggaaggggccagtgcatacaggtgtccaaacagtgtcatccggtgtcctgacatgcggccccaatggactgatccagggtggaaaggaagagtgagaaga

SEQ ID NO: 910722 - DNA, 120 bp, Artificial Sequence
  ENSG00000232759_3 (sequence is synthesized)
aatcagacagaagaattcaggagatgtggcaacagagtggatgtagcagaagggacatagagagtgcctaaagatgagtctttggtcagcatgtgatgaaaagaatgaagacactgggga

SEQ ID NO: 910723 - DNA, 120 bp, Artificial Sequence
  ENSG00000232759_4 (sequence is synthesized)
agtggggagcagaagcggatgtgggcccaggaggaagaagattccagagagcagagatggcaaaaagatgcatggaagagagacacagcagggtcgggttctggcctcaggagccaaggg

SEQ ID NO: 910724 - DNA, 120 bp, Artificial Sequence
  ENSG00000232759_5 (sequence is synthesized)
ggaagtgcctgaggagacccccaaatgaggcctgtgtcaatgaggtctttaggggactggtttccatgtatgccaggccatactccctggattcccagcattgagaagaccaaacacttc

SEQ ID NO: 910725 - DNA, 120 bp, Artificial Sequence
  ENSG00000232759_6 (sequence is synthesized)
tacacatttattactgaagccccctgcaagctgaaggcggaggaagtggccaatctcctaagccgtgtgtggctgaggcagttgtcagagctgtgatgagggaaatgctcattattcttc

SEQ ID NO: 910726 - DNA, 120 bp, Artificial Sequence
  ENSG00000232759_7 (sequence is synthesized)
tatccctcacttggccaaataaagaacttcttagaattcttcccctgtgacaaaacggggctgtgatttggaaagcctcaggcaagtttgctagggccgcggtaaccaagcaccacagac

SEQ ID NO: 910727 - DNA, 120 bp, Artificial Sequence
  ENSG00000232759_8 (sequence is synthesized)
tgggtggcttcaaaactggacggcttcaacagaaagttattgttgctcagttctggaagccagaagtccaaaatcaaggtacttgcagggtcagttcgatctgagggctgcgagggaagg

SEQ ID NO: 910728 - DNA, 120 bp, Artificial Sequence
  ENSG00000232759_9 (sequence is synthesized)
atctgttgtagacctctctcctaggtttgcaggcattggtcctgatgttcacagggcatccttcctgtgccttcacatcatcttctctctgaatgtatctctgggtccaaatttccctat

SEQ ID NO: 910729 - DNA, 120 bp, Artificial Sequence
  ENSG00000232759_10 (sequence is synthesized)
gcaccccgcccctcactttaacttgattacctctgtaaagaccctacctccaaataagatcacattctgcgtactgagggctaggacctcaacatctgaattcagggtgggtggatgcac

SEQ ID NO: 910730 - DNA, 120 bp, Artificial Sequence
  ENSG00000232759_11 (sequence is synthesized)
aattcattccataacattaagaaggaagggataagtgcccaaggaatcacatgctcgcttggggagagttccaagcgtgcagagctggtggtcatagcctagcctcaggccttcggaaat

SEQ ID NO: 910731 - DNA, 120 bp, Artificial Sequence
  ENSG00000232759_12 (sequence is synthesized)
cccctgaatctggttttcccagttctcataatctcatttcaccaaaatacggcatctcaatacattccatgcatttctggtgacaagctcattctggtgcacgctaagcaatgtgctaac

SEQ ID NO: 910732 - DNA, 120 bp, Artificial Sequence
  ENSG00000232759_13 (sequence is synthesized)
tacgtcttaactagggtggtttaactggtttggttaacatagatctctgagtcatttcacgcattccttaagcctaaacaaatctcatccaggtgtttaagacattgcacaatattagac

SEQ ID NO: 910733 - DNA, 120 bp, Artificial Sequence
  ENSG00000232759_14 (sequence is synthesized)
catctgaagctccatctccttggggcaatgatgatgatggtgatgaaagtggctggtgactgttctcagtctcatcgccataatggaaccctacgttgtgttcctccacactggtgtgag

SEQ ID NO: 910734 - DNA, 120 bp, Artificial Sequence
  ENSG00000232759_15 (sequence is synthesized)
ggacactactaagtgcggcagagtttgcactcaggatagagaaatatggactcacgcacagattccagctgagtccctccgatgtgctaggtactatgtccagccccccaggattcacct

SEQ ID NO: 910735 - DNA, 120 bp, Artificial Sequence
  ENSG00000232759_16 (sequence is synthesized)
gtaagcaggacagtcttttggatgacagagggaattctcatatatccacaggcagatggaatttacaagtggaaagacctagaagttcagagacagggggactgaactttttgctttcag

SEQ ID NO: 910736 - DNA, 120 bp, Artificial Sequence
  ENSG00000232759_17 (sequence is synthesized)
tcagaatctttgcttacggttgtgcaaatgcttgcattggtgggtttccatgccatataacgtgctacatatttttacgttacccttgcacataagcatactgttgggagggaaaatgaa

SEQ ID NO: 910737 - DNA, 120 bp, Artificial Sequence
  ENSG00000232759_18 (sequence is synthesized)
gagggtggaggtggtaacaaactcaagctaaggaaatggaatttggatgggtacaaagtccagagaattagcttgaggaaaatgaaccaggattcacacaggagttttcaaacatctcaa

SEQ ID NO: 910738 - DNA, 120 bp, Artificial Sequence
  ENSG00000232759_19 (sequence is synthesized)
tatcaggacccctttaccctcttaaaacttacttcgtgaggaccttaaagagcttttgtttgtgtgacttatatgtattaatatttactatattagaaattaaaagtaaggaatggttgt

SEQ ID NO: 910739 - DNA, 120 bp, Artificial Sequence
  ENSG00000232977_0 (sequence is synthesized)
tcggagtactgggtccactggagagcgaagagccgcggccgccaggattcccagcagcggccgcgtgttgagagcctagaagtggccccgaagccgtgcctttcccgatagccaagcaga

SEQ ID NO: 910740 - DNA, 120 bp, Artificial Sequence
  ENSG00000232977_1 (sequence is synthesized)
agtaggacttgaagcaccgaggctgggatgcccatgctggtgacgccttggggctcgcagttatacttggtgaccggtctacacggcgattcggtgctttccggagtagcagattcatct

SEQ ID NO: 910741 - DNA, 120 bp, Artificial Sequence
  ENSG00000232977_2 (sequence is synthesized)
atctttagacccaccttcgtccttcggcggtttagcacggcctgcgctttcctgcgagccctgctgtcacccgaacagcctgatgacttcacgctcaaccactggagggcacaaccacat

SEQ ID NO: 910742 - DNA, 120 bp, Artificial Sequence
  ENSG00000232977_3 (sequence is synthesized)
catttttaaaaaatagattcctccacttaaaggacatggttttgggggaaagaacatttaaaaaatgtaaaaagatatatatctatatctatatatctatctcagattgttctgatataa

SEQ ID NO: 910743 - DNA, 120 bp, Artificial Sequence
  ENSG00000232977_4 (sequence is synthesized)
actcaggtgggattcttcaaaacaggaggctgttccagtctcttcattttgcagctgagaaaacgaaggccttggagcttgagaactccagttgcccaaggcacacaggtggtgggtaag

SEQ ID NO: 910744 - DNA, 120 bp, Artificial Sequence
  ENSG00000232977_5 (sequence is synthesized)
gaagctgatcatgtctccaaagaatccttccatgacccaggaggatccggtgggagagcagggccgtccacagctcagctaggacacaagaaggcccggggtggcaggagccccactgtg

SEQ ID NO: 910745 - DNA, 120 bp, Artificial Sequence
  ENSG00000232977_6 (sequence is synthesized)
tgctgcggaggatggcagaggaagtcagcattgtcccgaaactgcaggatcatgtgatgtgatgggaaaaaattatgagtacaagacacaggaagagcaggtcacggaaacacatggtgc

SEQ ID NO: 910746 - DNA, 120 bp, Artificial Sequence
  ENSG00000232977_7 (sequence is synthesized)
ccagaagggcttaattagtagcagctgtgcggggtgatgcacagagtgccccaagggtgtcctgagtgagggtggatgtcccctgccctctggcttcgtgaaggcttcgtgaagcctgcc

SEQ ID NO: 910747 - DNA, 120 bp, Artificial Sequence
  ENSG00000232977_8 (sequence is synthesized)
gggtcacccttgttttcatggatagcttctttaggacactctctccaccagtaattgacaaagtctgcttctgttgagtgtctgataaaggattgagtttacatgattgttaagatagga

SEQ ID NO: 910748 - DNA, 120 bp, Artificial Sequence
  ENSG00000232977_9 (sequence is synthesized)
tcatgaaagaagacagaagacggatgtgagtggccctcagaaaaaaagcatcaaaggaaactgaggagtctgtgttccgagttataacatcagtcctgtgttgaaagcatattgactttc

SEQ ID NO: 910749 - DNA, 120 bp, Artificial Sequence
  ENSG00000232977_10 (sequence is synthesized)
ctgacttcttatgaccacatttgaggaaaggagtaagcactggaatcaccaacacagcatgcttacggagggtggtcaccagcttcatcagcctcccaattccacggagccccttgaaaa

SEQ ID NO: 910750 - DNA, 120 bp, Artificial Sequence
  ENSG00000232977_11 (sequence is synthesized)
aaaccaagaaaggacacattttggagattagcactggctccaggaacccagtgaacagaagactcaggctgaaggcttgtgcattcagcccagagaaaatccacttaaattcagaacaat

SEQ ID NO: 910751 - DNA, 120 bp, Artificial Sequence
  ENSG00000232977_12 (sequence is synthesized)
taaggactctggggaagaaggacttcacatggtagtgtgattggaaggcagataaattttaggacacaatggaagttcctaagattttttatccttttccaataggaaggataaaaaaat

SEQ ID NO: 910752 - DNA, 120 bp, Artificial Sequence
  ENSG00000232977_13 (sequence is synthesized)
catctaaaactagaggaaaaatcatctaaaacaaggtataaagaaatggctcacgtgtgacccttattttactgtgacatggagcatttgatgaaggatgtgggaagggagcctgcttaa

SEQ ID NO: 910753 - DNA, 120 bp, Artificial Sequence
  ENSG00000232977_14 (sequence is synthesized)
ctatgaagtgagtagcatcgccccaggagcaccatgacagatgcacaggacatggagggaaggaaatggcatcctggcacagccctggctctacattgagcaatgtagacaaaatcataa

SEQ ID NO: 910754 - DNA, 120 bp, Artificial Sequence
  ENSG00000232977_15 (sequence is synthesized)
aggctgctctagttttctacttttagaatcaacctacagacatgtaagacttaattgtagttgtagaataaaagataaaagattattggctttcataacaataaagtcctaacaatgatt

SEQ ID NO: 910755 - DNA, 120 bp, Artificial Sequence
  ENSG00000232977_16 (sequence is synthesized)
cacagttattccatgaataagggtaggggaaaagagggaggaatgtaaggcattttatatggagcaagggaggcaaaagacgttgacagaggcttatggaacaacacacacacgcacaca

SEQ ID NO: 910756 - DNA, 81 bp, Artificial Sequence
  ENSG00000232977_17 (sequence is synthesized)
cgttgacagaggcttatggaacaacacacacacgcacacaaatagaaggaatatattgcttaaaatgacaaaaatagccaa

SEQ ID NO: 910757 - DNA, 120 bp, Artificial Sequence
  ENSG00000232977_18 (sequence is synthesized)
agtgagccgagatcacgccactgcatcctagcctgggtgacagagtgagaccgtctgaaaaagaaaaaagccaacataggaatttttaaaataatatataattaccaaaaattggggaaa

SEQ ID NO: 910758 - DNA, 120 bp, Artificial Sequence
  ENSG00000232977_19 (sequence is synthesized)
aatatataattaccaaaaattggggaaaatagagacagggaaggcagttctataagcgagataaatctttatcttttgtatcagaaagtcaataaatattgtctgaatttgattggttat

SEQ ID NO: 910759 - DNA, 120 bp, Artificial Sequence
  ENSG00000232977_20 (sequence is synthesized)
ttccatttttatgaaatgtctacaataggcaaatctatagaaccagtaaagaaattaggaattcctgtggctgggactgaagagtgaaatcactgcaagtggtcaagagggatcttctga

SEQ ID NO: 910760 - DNA, 120 bp, Artificial Sequence
  ENSG00000232977_21 (sequence is synthesized)
agtgataggtgtgttctaaaattgggctgtggggatgcttgcacaactctgtaactttgctaaaattcatttcattacacatttagtgagttttatgatatgtacattacccatcaataa

SEQ ID NO: 910761 - DNA, 120 bp, Artificial Sequence
  ENSG00000232977_22 (sequence is synthesized)
cctcacggaaccctaaaagctggctaaggggccattctcctcgccacctgggcctgcgtctgccgaatcgcttcctaaggactttgactagaaaccaaaggtcccatttttcatctgcca

SEQ ID NO: 910762 - DNA, 120 bp, Artificial Sequence
  ENSG00000232977_23 (sequence is synthesized)
tgggactgaggctttgaatgagctccagctctgttctgatcctttaatactggaatgcagttgttatttttctaggctattgctgagctgaagagtgggagatgggcctaaggagtttac

SEQ ID NO: 910763 - DNA, 120 bp, Artificial Sequence
  ENSG00000232977_24 (sequence is synthesized)
gagaaatctccaagtatcttaatgctttcagcgcttctccaatctgacaaatatttattcagattcgaactgactgcccaagcttcactgcagctcctcgtttcctgttagatcttttta

SEQ ID NO: 910764 - DNA, 120 bp, Artificial Sequence
  ENSG00000232977_25 (sequence is synthesized)
aaaatctttgcttaaaacattgaaggctgaacgatgagcaagaaaatcttgcctgtgaataagacactgggaactgcacagaatcaacatcagctcacaagctcatcatctcacgcacgg

SEQ ID NO: 910765 - DNA, 120 bp, Artificial Sequence
  ENSG00000232977_26 (sequence is synthesized)
attcctgagcacattctcgcattcttgctcttaatcctcccttggcgaccttctactcagacatcatcttttatgcagagaagcaggcacgtttctcatcattaattctgttctcagcca

SEQ ID NO: 910766 - DNA, 120 bp, Artificial Sequence
  ENSG00000232977_27 (sequence is synthesized)
agcagtcaggaaggaaggtctcggaggagatggccctgaaactgaatcagactttaaaagataagttggtcaacagggttggagggagggagggaaaagaaggttttgaaagatagatct

SEQ ID NO: 910767 - DNA, 120 bp, Artificial Sequence
  ENSG00000232977_28 (sequence is synthesized)
gtcttttgagaaatacgactggagaggtgatgaggggccagatcttgtgttacacaaagaacctcttatgccacacaaaggaatttggattttttttttccttttaggcataaggaagcc

SEQ ID NO: 910768 - DNA, 120 bp, Artificial Sequence
  ENSG00000232977_29 (sequence is synthesized)
attgaagggttttaaacaggaacaatgtaatcagatttactctttggaaataagatctcctggttagttaatgaactcgtatttctttttttctatgttaaccattgttttattgtttgg

SEQ ID NO: 910769 - DNA, 120 bp, Artificial Sequence
  ENSG00000232977_30 (sequence is synthesized)
tctttagactctattattgattgaaatgccaaagtgatgggagtcaagcggctttgccacttaaccttccaaagtttgtttcatttgcttttaaaatagttattatattacgtgctttgc

SEQ ID NO: 910770 - DNA, 120 bp, Artificial Sequence
  ENSG00000232977_31 (sequence is synthesized)
cttattagttttgtgtacaattaaagcgagataaaggcagagaaactggcttgtagtgctattgctatggacaccattagttgatgtcagaacaattacagatgaatcaatatttactat

SEQ ID NO: 910771 - DNA, 120 bp, Artificial Sequence
  ENSG00000232977_32 (sequence is synthesized)
tggaccaattacagacaaaaccagaaaagattagatctagcacaaactttataaactattgagcctttcattttattttgcatttaaaaatccttacatccgagattctgaattctttta

SEQ ID NO: 910772 - DNA, 120 bp, Artificial Sequence
  ENSG00000232977_33 (sequence is synthesized)
tcaggggtgtggcctgtgcattgagagtttttaaagctctccaggtgattttaatatgcaattagatttgagaaccatgattttagacttaaggggctttagaagtaaatgtctttaaat

SEQ ID NO: 910773 - DNA, 120 bp, Artificial Sequence
  ENSG00000232977_34 (sequence is synthesized)
tctgtgataatacatcattcataggctattcaggctgtactaaaacatagagaaaaaacaaagacaattattgagttcattttatgaagcaagaacaatcttaataacaaaagataaaaa

SEQ ID NO: 910774 - DNA, 120 bp, Artificial Sequence
  ENSG00000232977_35 (sequence is synthesized)
catgtctgaaatctacagcatgtagatttcatacagggcacagtggttgaccagtaatgagttcctgcaggaggggacccttccagtgaatgtagacctggaaaatgagattgtcctatt

SEQ ID NO: 910775 - DNA, 120 bp, Artificial Sequence
  ENSG00000232977_36 (sequence is synthesized)
cacagtttggttttatttttcaatgatagtcattgcctcatttttaaagcatttataataaattaagcaagtaacacttgtgtaccagtttctaatcagtttctaatgtgcctggaactt

SEQ ID NO: 910776 - DNA, 120 bp, Artificial Sequence
  ENSG00000232977_37 (sequence is synthesized)
gctgggctacaaagaaaaggatcaactattttttttcctgcacccaaagatattgcaatcttatcggagaagggaaactgaggcatgtgttacagttagaggactaggaagcactaatct

SEQ ID NO: 910777 - DNA, 120 bp, Artificial Sequence
  ENSG00000235523_0 (sequence is synthesized)
ctttgtttctgtcactgcaaatcaaagagcccagcctaaaatcctctgtagccttcttatttcccccacggcatgtggccactctctaccctctcgcaagccttgccagagatgccatcc

SEQ ID NO: 910778 - DNA, 120 bp, Artificial Sequence
  ENSG00000235523_1 (sequence is synthesized)
ccacttccactgggcacctggagcctgaacctggaatcttccaagaccccagatcagcctctgctgacagttctcttgtaaagatactgaggataggattacaggtagtggctcacgcct

SEQ ID NO: 910779 - DNA, 120 bp, Artificial Sequence
  ENSG00000273115_0 (sequence is synthesized)
ctggatggtgcctctcaaacaaaagtccaattcccatgggatgccttctccaaacagctatatttctagcttctctccttccccttttagacctaggactgccaaagcttccctattgct

SEQ ID NO: 910780 - DNA, 120 bp, Artificial Sequence
  ENSG00000273115_1 (sequence is synthesized)
caaattactccatatgggtagccatcgacttcttaccaaggccctgactgagacactttcattcttttaaaaatatccgagtcaactaatatattaaaatagaccagcatctcttctcaa

SEQ ID NO: 910781 - DNA, 80 bp, Artificial Sequence
  ENSG00000273117_0 (sequence is synthesized)
ggggacggtcctgccgggaggaggcggaggcaggacagggtggggttgcgggcccggcgccgcccctcccggctcctggc

SEQ ID NO: 910782 - DNA, 120 bp, Artificial Sequence
  ENSG00000273117_1 (sequence is synthesized)
ggtctcgatcgcgcgggcctccctggaggggcgcgggctctggcggcggggaggcccctgctcagcgcaatggcgggcttgcatccttgggtgattttttcgggccccttgtggcctttg

SEQ ID NO: 910783 - DNA, 120 bp, Artificial Sequence
  ENSG00000273117_2 (sequence is synthesized)
ctcacgcctagagagcaaaccacccgcaccacccaggagcagataaaatcgagaccacagcctccaagggagcgcgcctccatcctgtttgcccctcgggtcgccgtctgagggcgggcc

SEQ ID NO: 910784 - DNA, 120 bp, Artificial Sequence
  ENSG00000273117_3 (sequence is synthesized)
cgtgcccgctcagagcctacatccgagtcgtataaagcgctgacagcagagaaagctgcggctttgctccgtgcagatgagcaggggctgagggaggacgctgtgctctcagtagccgcg

SEQ ID NO: 910785 - DNA, 120 bp, Artificial Sequence
  ENSG00000273117_4 (sequence is synthesized)
cttggcccggggaccctgcaggcttagaaacgtgagtcacgcctgcagcgtggcgaggaaacgccgttgatgtggcatcctcagcctggggttgtggctttaagccagaaggtcaaaaaa

SEQ ID NO: 910786 - DNA, 120 bp, Artificial Sequence
  ENSG00000273117_5 (sequence is synthesized)
agaagtcttcctgagctgagactgccctgagtcgctttaggggcgaaattccgagcatccggttgcatttcctgaggatgacacgcgtggtgggtgtggacggcctacaggggtccatcc

SEQ ID NO: 910787 - DNA, 120 bp, Artificial Sequence
  ENSG00000273117_6 (sequence is synthesized)
aaccattgtacacgttcccaaggactccaagcaggttggacttcagggaacattgcagtttgggtcttggccattgtttacactccaccttgcataagtgcttgaggatcacacaaccag

SEQ ID NO: 910788 - DNA, 120 bp, Artificial Sequence
  ENSG00000273117_7 (sequence is synthesized)
atacgtagatcatccgtagatcatcgcagtcacatcgaagatttgtttataataggaaaaaaaaaagctacccactgtcatgcgctgggaaactagtgagctgaaggatgacccatctgt

SEQ ID NO: 910789 - DNA, 120 bp, Artificial Sequence
  ENSG00000273117_8 (sequence is synthesized)
aaatggggtgctccctaatggacagggcacctttcagaagcctgtgctgtgtctcctcgaccccactgtgagctccccgtcccgcacgctgatctaaatcaagctgctaacctcatggag

SEQ ID NO: 910790 - DNA, 120 bp, Artificial Sequence
  ENSG00000273117_9 (sequence is synthesized)
aggcgtccgcacgggagccccggccctgagatgcggggcagtcacccattcaattaggaaacaccagcaagtgccagaagcttctcattagcaggtcagctttcaataactggtttatcc

SEQ ID NO: 910791 - DNA, 120 bp, Artificial Sequence
  ENSG00000273117_10 (sequence is synthesized)
aggtgtgtgagacccgataagcagaagggaaagctcttagcgacctatccagctgctctgcactgggctcctgacatcccagaaatcagtacatctgtcttctggggtccaagaggtatt

SEQ ID NO: 910792 - DNA, 120 bp, Artificial Sequence
  ENSG00000273117_11 (sequence is synthesized)
tcagtttctctggctttgtttcccgtcatttgtacctggccctgcagactaccccagtatttccatcataatacccctgtgggcaggtgcatacctcatgacaatatttaatattaatag

SEQ ID NO: 910793 - DNA, 120 bp, Artificial Sequence
  ENSG00000273117_12 (sequence is synthesized)
atttatgtgttgtctccagaatggaaaggggctgtctattccttgagctagttggcttgctaaagactattgacttcattcttcttttcctatctacctaataaaccagtgttcatacaa

SEQ ID NO: 910794 - DNA, 120 bp, Artificial Sequence
  ENSG00000273110_0 (sequence is synthesized)
atggcagtaacgcaccatctctcttcacacagggtcagcggtggagggcctgaaactaaccaactgaacttgtccagtcatcgcaagcaagtattttttttaaagaaggtgtgatcaaga

SEQ ID NO: 910795 - DNA, 120 bp, Artificial Sequence
  ENSG00000273110_1 (sequence is synthesized)
agaacactgacacagctctatggatgctaaattcaaggcaaattcactgaaagacattcttctcaccagagaatatcctgggagatggaataactcgaaggaatgaggactacaggaaaa

SEQ ID NO: 910796 - DNA, 120 bp, Artificial Sequence
  ENSG00000273110_2 (sequence is synthesized)
catggaggtttaacaaggaagccattagggacaccctgctgggcctaattgtttttagaacatatggaactttgtgccaccacacagctgtgaactccctggcttttgtcagcttgtgtc

SEQ ID NO: 910797 - DNA, 120 bp, Artificial Sequence
  ENSG00000273110_3 (sequence is synthesized)
acaacctcaagaagaaaatagctcactaacgcccccacctctgacttcccactaatttactatatttcttcttataacctcctgtacaactgtaaagcaactggacaatatgtaaactct

SEQ ID NO: 910798 - DNA, 120 bp, Artificial Sequence
  ENSG00000273110_4 (sequence is synthesized)
gcctctcctctacttttaattctataaagaatatagtatgacttgtcacagagaaacagtatagaagaagcataatactgggcatatgacagaagctcaataaatacttaatgtatctgg

SEQ ID NO: 910799 - DNA, 120 bp, Artificial Sequence
  ENSG00000273113_0 (sequence is synthesized)
gcaaatcccatgccattttatacaagagactcgagcatctgattttggtacccgtgtgggtcctgtaacgcacccctgtggatactgaggacagactgtatacatgaaagcattaagctc

SEQ ID NO: 910800 - DNA, 120 bp, Artificial Sequence
  ENSG00000273113_1 (sequence is synthesized)
gtaacatgagtagggaagcgggaagggtaagtgcagtggtgtgaggaactcccagtcctttggcaccactggagggtgccaggacattcttactccaaaaattgatcattaaagggaaat

SEQ ID NO: 910801 - DNA, 120 bp, Artificial Sequence
  ENSG00000273113_2 (sequence is synthesized)
aattaagtgcttatgctgcctttctagtatgaacgcacttcagggtaacctgacttaccctaatggataaagggaaggtctgagagaattccagccactaaatgtccttctgatgagaca

SEQ ID NO: 910802 - DNA, 120 bp, Artificial Sequence
  ENSG00000273113_3 (sequence is synthesized)
gaggggaaactgacgataaaggggtcaggctgtcgccatccaagcttattaatgcttcaacaaagtgacacaattggacatgaggctgtgacacgaggaactgagcaccgtccgggtgtg

SEQ ID NO: 910803 - DNA, 120 bp, Artificial Sequence
  ENSG00000273113_4 (sequence is synthesized)
attccagccacaactttagatccaacttccagacgacaggatatagaggggacagaggaacaagttaaacactacaaggaggatgctaagtccagactggggacaccttcgaggacaagt

SEQ ID NO: 910804 - DNA, 120 bp, Artificial Sequence
  ENSG00000273113_5 (sequence is synthesized)
gaccagcttcaccaacaagtcaagggcacaggggagggaagagggggacttttaggatcaaaaggatcctaaaagactttgtagccaaacacaaacgtgaataaagctttgataatccaa

SEQ ID NO: 910805 - DNA, 120 bp, Artificial Sequence
  ENSG00000273118_0 (sequence is synthesized)
agaccaacattagacaccatctctctccacaaaaaacattctccaagcaaaacatcctgatctctaaatacactacggcaggaatgaaactgttgatcagagttgcagtattgattcttc

SEQ ID NO: 910806 - DNA, 120 bp, Artificial Sequence
  ENSG00000273118_1 (sequence is synthesized)
attgatgatatcatactgcttggacatggagaacatgaaacaggagctacttaataccctttgaaaaagaggaagtattctagagaatataaaaagacttcttgagtactaagaggtcgt

SEQ ID NO: 910807 - DNA, 120 bp, Artificial Sequence
  ENSG00000273118_2 (sequence is synthesized)
gaagacagctttggaaatgttataagcgtcaagattcgctcaagatacacctgcttctcttgcaaaagcattattcaaaagagccaagatatggaagcaactgaagtgctcatcaacagg

SEQ ID NO: 910808 - DNA, 120 bp, Artificial Sequence
  ENSG00000285454_0 (sequence is synthesized)
ctcacaaccaaggggtgggaaggaaaagggacagagcgagacagagcgcccccgagaaacacaggcgcacaaaaaaagacagaaggaaaaacggaactgagagccagccagcatggactg

SEQ ID NO: 910809 - DNA, 120 bp, Artificial Sequence
  ENSG00000285454_1 (sequence is synthesized)
cgacagcgtgagagtgcatcaaagaggtggcgaagaaagcactagaaggcaaaggagaagtggagagaagaagaaacaaatggaggaagaaggagaaagggaaaaagcagacggaaaaag

SEQ ID NO: 910810 - DNA, 120 bp, Artificial Sequence
  ENSG00000285454_2 (sequence is synthesized)
tgaagtagtacgagggcgtcccagcggggcggcccgagaagctccagcttcttcccgagcggccgccgctatcccccgggggggcgtctggccccactccggaccacgcccgagcgatcc

SEQ ID NO: 910811 - DNA, 120 bp, Artificial Sequence
  ENSG00000285454_3 (sequence is synthesized)
tggtcgccgactgccacagccgtgcttcccggcgcgggatccaagccgcggagccacctgttaggcgcgcgccgtcggaagcccaggcgcggcggcgctggagaatcctctcgaagtttc

SEQ ID NO: 910812 - DNA, 120 bp, Artificial Sequence
  ENSG00000285454_4 (sequence is synthesized)
cgggtgcgcggggaggccccaggtgcgccccgacatcccgacacggcccagcacggctggaagatactcaccaaacaaacaaacaatgaatcttgatggtttggaggcaacagagaggga

SEQ ID NO: 910813 - DNA, 120 bp, Artificial Sequence
  ENSG00000285454_5 (sequence is synthesized)
gaggccttgcaaaaattcagatccgcacatgcaacatctcttggcagacagacagcaagaagaaacgaaaccagaggagaagaatggagctggatcgtctgtgaagaccctgccaggctg

SEQ ID NO: 910814 - DNA, 120 bp, Artificial Sequence
  ENSG00000285454_6 (sequence is synthesized)
caaagaagctgcactcataatgcagagaatgcagctggaggagctctttgatttaactgttgttactgaaatctgtgcagcatcaagtgacttagagcaggaagttatcttagaattctg

SEQ ID NO: 910815 - DNA, 120 bp, Artificial Sequence
  ENSG00000285454_7 (sequence is synthesized)
gaaagattcaagaatgcatgtcttcctactagattgtaagcttgtcggggccacatctatcctgtttactactgaatcccagctggcagaaagtagtcatttcacaatatttttggagca

SEQ ID NO: 910816 - DNA, 120 bp, Artificial Sequence
  ENSG00000285454_8 (sequence is synthesized)
aatgcatcaatcagaccatcatgtgtaagggaggtcacaggatgaaggaacagtgcagtgacctggaacaccatgccacgctgctgcaactgtgtcggtccgtggctgtgtgtgcgtgct

SEQ ID NO: 910817 - DNA, 120 bp, Artificial Sequence
  ENSG00000285454_9 (sequence is synthesized)
ccatgaactgttgctgcgaagcaaagttctgtttttcagtggactccatatctgtgtcatccaagacgcctactgttgacataaagctgctgcatacggaaggaggaaaatcgtgggaga

SEQ ID NO: 910818 - DNA, 120 bp, Artificial Sequence
  ENSG00000285454_10 (sequence is synthesized)
aatcgtgggagagaaagtaagccatagaggaacccaccctgcattgtgagtaaatcttgctgctgttgactctttgggtccgcactgcctttgtgagctgtaacactcactgcaaaggtc

SEQ ID NO: 910819 - DNA, 70 bp, Artificial Sequence
  ENSG00000285454_11 (sequence is synthesized)
gaacccaccgggaggaatgaacaactccggacgggaggaacgaacaaactccggatacgccgcctttaaa

SEQ ID NO: 910820 - DNA, 120 bp, Artificial Sequence
  ENSG00000285454_12 (sequence is synthesized)
attcttgaagtcagtgagaccaagaacacaccaattctggacacagtaagagcctttgaatcctgtacctcaaaatctttgccttgctgtttccattaatgttgggcttttatttcacaa

SEQ ID NO: 910821 - DNA, 120 bp, Artificial Sequence
  ENSG00000285454_13 (sequence is synthesized)
acaatccttacctgatactaactccctattatgaagaactgatctgtaaaccaaaaataagatcccaaggtctcccggccacctgcagggactttctcttaggtcagggcactctaaaat

SEQ ID NO: 910822 - DNA, 120 bp, Artificial Sequence
  ENSG00000285454_14 (sequence is synthesized)
ttaacctgaaagactggttcaggccattatgggaagtgggagttgaaatgcatcattatacctcttccgcattaacatcaacagactttaagtctgatgagaaacatttacaatctattt

SEQ ID NO: 910823 - DNA, 120 bp, Artificial Sequence
  ENSG00000285454_15 (sequence is synthesized)
gctctaaaacctgctacctgaaggcttcatccgcatgggaaacctttggtttccacagcccagacattccttcccattagtaactctgtcaaccaattgccaattagaaaaaatttaaat

SEQ ID NO: 910824 - DNA, 120 bp, Artificial Sequence
  ENSG00000285454_16 (sequence is synthesized)
ctacctataacctgggttcagctgacccccccaaccctgatagctgtcccacctttctggaatgagccaatgtatttcttgaatgtacttgattgaaatctcatgtctccctaaaatgtg

SEQ ID NO: 910825 - DNA, 120 bp, Artificial Sequence
  ENSG00000285454_17 (sequence is synthesized)
taaaaccaagcttcaccctgaccttgggcacattgttctcaggatctcttgagggctgtgtcagaggccgtggtcactcatatttgactcagaatgaaactcttcaggtattttacagag

SEQ ID NO: 910826 - DNA, 120 bp, Artificial Sequence
  ENSG00000285454_18 (sequence is synthesized)
tttgactctttttgttgacacatctgaatcaaatttccaattctttatgaattctgacctcacttttcctccatccgagatgcttccaaagcactgtcaaatattgctttctcttagcgc

SEQ ID NO: 910827 - DNA, 120 bp, Artificial Sequence
  ENSG00000243519_0 (sequence is synthesized)
atggctcctgtcctcctgctgctcctctctcacttcccaggttccctctcccagcctgtgctgactcagccgccctccctctctgcatctctggaagcaccagccgcacttccctgcatc

SEQ ID NO: 910828 - DNA, 120 bp, Artificial Sequence
  ENSG00000243519_1 (sequence is synthesized)
caaaatgtacttcatgaccagggctccagggtcccgagctgctcctctggattgatggaaggctggtccaataaagggcttttgctcatatctaagctccagtctgaggacgaggctgac

SEQ ID NO: 910829 - DNA, 120 bp, Artificial Sequence
  ENSG00000235831_0 (sequence is synthesized)
acttactgtaagtttgagatgttcgggtaggagatccttcagctgggcgatgcactcgttaatccggtcacgtctctttttctcgatgagccggtgcggcaatttgtaggtctcctgcaa

SEQ ID NO: 910830 - DNA, 120 bp, Artificial Sequence
  ENSG00000235831_1 (sequence is synthesized)
gacgcacggggaggcggtgggcgcttggggaaggagatgagaagcctatcctcccagccccgcagcaacagtccggcagaggagcagagtagcagagtagcacccagaaccatcgtctgc

SEQ ID NO: 910831 - DNA, 120 bp, Artificial Sequence
  ENSG00000235831_2 (sequence is synthesized)
cctttcttttccaagtcactcagaagaggcaccgagcccacaccctgcatcccctcgccaacctcaaagcgagaaaacttttcttggaaactcagcgcgcgcgaggggctgagcgcaggg

SEQ ID NO: 910832 - DNA, 120 bp, Artificial Sequence
  ENSG00000235831_3 (sequence is synthesized)
tccctaggggtgcacttgcttaccttgctgtcctcgctccgctttattccccgtcttgacttgtacacttggtacatgtgggcagggtacatcctgcaggaagagagaccaggaagggtc

SEQ ID NO: 910833 - DNA, 120 bp, Artificial Sequence
  ENSG00000235831_4 (sequence is synthesized)
gtgactgcttgcgcacggctgcaggcgttctgccgggcaagaacctcccggtgcgcccggagctgctccaagttgagagtggcgcataacatggggctgcagttgaggcttgaagggcca

SEQ ID NO: 910834 - DNA, 120 bp, Artificial Sequence
  ENSG00000235831_5 (sequence is synthesized)
aggagtgccaacttaccctgatttaccacttaccgctgcttttcagcagtttggctgtgatttgtttaggtgctgctttttccttatttattctccttgtgggtgcgttaaggttcttgg

SEQ ID NO: 910835 - DNA, 120 bp, Artificial Sequence
  ENSG00000235831_6 (sequence is synthesized)
ttctcctcccacccccaactctcccctgacacacaacgtggatgtggaacttcttgattctatgagttgagatcttcaatcaattttgggttgcagaaaaggaagaagaatcagcagaga

SEQ ID NO: 910836 - DNA, 120 bp, Artificial Sequence
  ENSG00000235831_7 (sequence is synthesized)
gcatttgtggccagcaaagcttaaaatatttcctaaccgatcctttgcaaaaaaagttcacccactcctgtagtcagcagctcccctactgtgcgcagtcagtgtgccatctcagactag

SEQ ID NO: 910837 - DNA, 120 bp, Artificial Sequence
  ENSG00000235831_8 (sequence is synthesized)
caaagatttgtgcttggatcatctacacttccctgaatgttgaagaagatatgctatccatgcaatccttgtcgactgcttgattaaaaagtggataaactgtcttcaggcccttggagt

SEQ ID NO: 910838 - DNA, 120 bp, Artificial Sequence
  ENSG00000235831_9 (sequence is synthesized)
atggtgtctgtgtgaagaagggaatgaggcagaagtagcagtcagtggtggctgaagtaggagaaagtgcttgctaatgaaatcttgatttttctgtggcttttctgtgcaattgggtgg

SEQ ID NO: 910839 - DNA, 120 bp, Artificial Sequence
  ENSG00000235831_10 (sequence is synthesized)
ctaagtaggaaagccattggagcttcactgtatcaattctgcctttcttgttttttggaactccaattcaccaaggctccctgccaccctatccatctataacttttcatcactttttcc

SEQ ID NO: 910840 - DNA, 120 bp, Artificial Sequence
  ENSG00000235831_11 (sequence is synthesized)
atccatctgagccttcccagcgttccaaaagaaatactgatttgaattcagctgcttaaaaaaccagtctctaagcagacagcttgaaacttccttacagcaatagtttaggctttggag

SEQ ID NO: 910841 - DNA, 120 bp, Artificial Sequence
  ENSG00000235831_12 (sequence is synthesized)
gggaaattggtttgtttttaattgttttaatttttcattcaattcatttgccgcctgattatatatgatcttttgagcccaatactctgctaaattaaccttgactttctttctctcttt

SEQ ID NO: 910842 - DNA, 89 bp, Artificial Sequence
  ENSG00000235831_13 (sequence is synthesized)
aatactctgctaaattaaccttgactttctttctctctttctctctctctccttctctctttcttcctttctttctttctttttatgca

SEQ ID NO: 910843 - DNA, 120 bp, Artificial Sequence
  ENSG00000235831_14 (sequence is synthesized)
gccaccacacccggcccctacctttgatttttaagtcaagagggaacaagtcgaaatttctattcaggtaaactgtatacctttggacactgaatcacttttagaaccccagtaaaaatc

SEQ ID NO: 910844 - DNA, 120 bp, Artificial Sequence
  ENSG00000235831_15 (sequence is synthesized)
atgtatgaatgacccacaatttcactccaacaggaaggtgtgtatatgtgcacaaaaacattagattgttcacaccggtgctattcataatagtcaaaaactggaaacaactcaaacatc

SEQ ID NO: 910845 - DNA, 120 bp, Artificial Sequence
  ENSG00000235831_16 (sequence is synthesized)
catcaactgtagaatggataaataaatcatgatatattcataccatggaacataacagtgacaataaatgaaccactgctacacacaacagatatgaatttcacaaacagaatgctgagc

SEQ ID NO: 910846 - DNA, 120 bp, Artificial Sequence
  ENSG00000235831_17 (sequence is synthesized)
aacagaagccaaacacagaaggatacacatttataaatccatttgtatgaagttcataaacagacaaaattagtcagtggagattattctcatagaagtctgaagggtagttgtctttag

SEQ ID NO: 910847 - DNA, 120 bp, Artificial Sequence
  ENSG00000235831_18 (sequence is synthesized)
agtgctgtgtatgcagccatatagtgaatgccttcatttgcaccctgaactctgaatagtcacttttaaaacatccatctgtcatccatctagtgaggtcaggagagtggctgcttaact

SEQ ID NO: 910848 - DNA, 120 bp, Artificial Sequence
  ENSG00000235831_19 (sequence is synthesized)
ccctgagtttgaccctagaactctgtggctactggtgactcatcttgaaaattatcagattgaatcttctctaccggtttgataacaactgatgagtggaaaaagaacgccaatcaaatg

SEQ ID NO: 910849 - DNA, 120 bp, Artificial Sequence
  ENSG00000235831_20 (sequence is synthesized)
tggggtttggtgatggtacaccagcatattcactctgaaaactcattgagctgtgcaataatgatttttcaaacttttatatgtgtatgataatgcttcaataaagctttgcttaaaaac

SEQ ID NO: 910850 - DNA, 67 bp, Artificial Sequence
  ENSG00000235831_21 (sequence is synthesized)
cctataatcccagctactggggaggctgaagcatgagagttgcttcaacccaggaggtggaggctgc

SEQ ID NO: 910851 - DNA, 120 bp, Artificial Sequence
  ENSG00000235831_22 (sequence is synthesized)
agaaaggaaattgagcaactggcaacttcttctggtgtgtagaacagactcattccatttggatttccttttcctgaaccagtctgaaggggctgcctgatcctgctccatgcaccaact

SEQ ID NO: 910852 - DNA, 120 bp, Artificial Sequence
  ENSG00000235831_23 (sequence is synthesized)
gggttcccgtgtccttggccagaactccatagaaggctctgccttggggccagggccaggaaaggcctccacaactcacaactctaaaattgagccagaatcatgacaaaataggggaaa

SEQ ID NO: 910853 - DNA, 120 bp, Artificial Sequence
  ENSG00000235831_24 (sequence is synthesized)
agaagattcagaaatgtttgtcgtcatcttcaaaatgattaccccttccttgtttgtagagtactgatttaaaaacaaacaacaacaacaaacagaaacaaaatgattacccctggtctg

SEQ ID NO: 910854 - DNA, 120 bp, Artificial Sequence
  ENSG00000235831_25 (sequence is synthesized)
ggcctgggatgaagcaaggtgaccagggtgcagcatgtaaggagaccctcagtctcagggttgtgctagtgttttcgtgcaagtaggtactttcttagatcttgcgccctagctgtctcc

SEQ ID NO: 910855 - DNA, 120 bp, Artificial Sequence
  ENSG00000235831_26 (sequence is synthesized)
tttaccttattctagtcttgaccctgcaattaattcttttctttactccctccactgctaccctgaagtgtccactgtcagacacatttggaaaatattgcttaccatgtacagtatatt

SEQ ID NO: 910856 - DNA, 120 bp, Artificial Sequence
  ENSG00000235831_27 (sequence is synthesized)
gcacgcctgtctattaaaggctctgagatctcctgcagtaaggaaatcctatctaaccctgcatttcccaaatgtactggactgtggaagtttttcttctttttaaagaaatacttatta

SEQ ID NO: 910857 - DNA, 120 bp, Artificial Sequence
  ENSG00000235831_28 (sequence is synthesized)
acatctcatgggacatccagggacgctggttaagaaatactttgaatggttgtgtatggaatgtactcattagtttgaaaagttttccttgctcaataatagctattttctattctggat

SEQ ID NO: 910858 - DNA, 120 bp, Artificial Sequence
  ENSG00000235831_29 (sequence is synthesized)
ttagatttctttgcaagtttcattaagctcttcagcatctgagaaaggattagaatgtttattcacactctccaaattccagtttatcagttcattgattcatcaacgttgattaagcac

SEQ ID NO: 910859 - DNA, 120 bp, Artificial Sequence
  ENSG00000235831_30 (sequence is synthesized)
ttactatgtgctgagaatacaaaggtgagtgaaatggagttccttacccctaaggggctaaggaggagcagagacttgcacaacttaagtccaaatgcaatttgataattgctgtaaaag

SEQ ID NO: 910860 - DNA, 120 bp, Artificial Sequence
  ENSG00000235831_31 (sequence is synthesized)
cacaacacaaacagggaaagcagctcaaaaaaaaaaatccttcgatgttttttgttttgttttatttttgagtcagtctggctctgtagcccaggctggagtgtggtgttgcgatcttgg

SEQ ID NO: 910861 - DNA, 79 bp, Artificial Sequence
  ENSG00000235831_32 (sequence is synthesized)
gctctgtagcccaggctggagtgtggtgttgcgatcttggctcactataacctctgccccctgggctcaagcaattctc

SEQ ID NO: 910862 - DNA, 120 bp, Artificial Sequence
  ENSG00000235831_33 (sequence is synthesized)
tcaagcaatctgcccaccttggcctcccagagaactggaattgtaggcatgagcctctgcccctggcctatcctttgattgttgtacctccagaccaaattaactgctccttagggaaaa

SEQ ID NO: 910863 - DNA, 120 bp, Artificial Sequence
  ENSG00000235831_34 (sequence is synthesized)
gttgtacctccagaccaaattaactgctccttagggaaaagagctatttgtgatatttttcagtctttcctatcacacctagtagggactatgcacataatagaggctcaataaatattc

SEQ ID NO: 910864 - DNA, 120 bp, Artificial Sequence
  ENSG00000235831_35 (sequence is synthesized)
atcaaataaatatttgaagaagaaagcttgcaacttaactgacgtacatttggttataatatctattaaagatcattcacaaaaacactttaaaaaaacataaacagaaggttgtactga

SEQ ID NO: 910865 - DNA, 120 bp, Artificial Sequence
  ENSG00000235831_36 (sequence is synthesized)
cccctctaagtttcagtttctccatctgttaaacaacaacaaaaaaatagtcctaatttcatggggttctgcgaggattaaatgagaatgtatgtaaagcggctattatgttcctcagca

SEQ ID NO: 910866 - DNA, 120 bp, Artificial Sequence
  ENSG00000235830_0 (sequence is synthesized)
aggagagcagaactcactgcaagcaaaaaggggaagaaacgctcacaaaagggaaggcagcaggaaaagtaatcgggttgctccgcctgcattctgcccctgtggaggagacctctggtt

SEQ ID NO: 910867 - DNA, 120 bp, Artificial Sequence
  ENSG00000235830_1 (sequence is synthesized)
ctttaagaaacagaataacaagaatagattctagagctgagtttaaaccctggctccaccactgataagctgtgtgaccttgggcaagttgttagctggcacccagacacattgagaaga

SEQ ID NO: 910868 - DNA, 120 bp, Artificial Sequence
  ENSG00000235830_2 (sequence is synthesized)
tggtcatctgaaagccaggaaaagagactgctccagaacctgaccatgctggcaccctaatctcagatttccaccctccagaactgtgagaaaatacatgtctgatttttaagcccccaa

SEQ ID NO: 910869 - DNA, 120 bp, Artificial Sequence
  ENSG00000235834_0 (sequence is synthesized)
ggagaaaatttttccttaaggatgctactgactctggaatccttgagttacatgtgaataactgggtcgtgcatgtcagcattaagaaataatcacagaactcctgattctggtttgctc

SEQ ID NO: 910870 - DNA, 120 bp, Artificial Sequence
  ENSG00000235834_1 (sequence is synthesized)
tgggtggcagctgtgctgggtttaccaatggaggaacttcatggctgctcatctttgactctttttctgaggaaccaaatctctctgggagtgctggctaactcaccccttcttcaaaca

SEQ ID NO: 910871 - DNA, 120 bp, Artificial Sequence
  ENSG00000235834_2 (sequence is synthesized)
cgctgtgtggcttcaggatatggctgctggctttaaaaaagaaggaaaaataaattaagacacccacactgcaagacaacccctaaagcagaagaaatgagaagaacctcgaagtcatct

SEQ ID NO: 910872 - DNA, 120 bp, Artificial Sequence
  ENSG00000235834_3 (sequence is synthesized)
ggcaaaaggcgggaccagactggagatgcttttttttctcttttcaaaaccaggagtgtatttgttatcacacaatttaattcaaaaagtccagtggtagagtcagagcacccatctcct

SEQ ID NO: 910873 - DNA, 120 bp, Artificial Sequence
  ENSG00000235834_4 (sequence is synthesized)
tgtcttggttctgccaccaaccagctctggggcctgggacaagttacttaacctctctgtgccccctcttatctatttaagaatatgggtctggaagttcttgtcttacagaaccatgtt

SEQ ID NO: 910874 - DNA, 120 bp, Artificial Sequence
  ENSG00000235834_5 (sequence is synthesized)
ggtggtctgagagcagtgacaatgaggtgctgtgggttgggtgagtgtgggagtgtctgtcctttgtatactgcagactctcttctctggatgtgccaactgagaatggctacaagaaca

SEQ ID NO: 910875 - DNA, 120 bp, Artificial Sequence
  ENSG00000235834_6 (sequence is synthesized)
agcatttaataataataagatgcctgagagaaaatgtagctgggaacccacatgggattgacagaaggacaggacactttgtcacttgctttttcaataaacagatcagattctcctttt

SEQ ID NO: 910876 - DNA, 120 bp, Artificial Sequence
  ENSG00000235834_7 (sequence is synthesized)
taaccacatgctccttggccaccttctgtgagcaaacacaggatttatcgaagatctgagaatgttgctaatgttgcttgacccctggtaggactagaatccatgacttccttagcccag

SEQ ID NO: 910877 - DNA, 120 bp, Artificial Sequence
  ENSG00000235834_8 (sequence is synthesized)
ccctctaatcaaccctgcccatccaccaggtcttgggaagctgggcagagatgccataagcaaaggactgctggctgaagcaccatgggaagcatggatgctccttctctgtggccaaaa

SEQ ID NO: 910878 - DNA, 120 bp, Artificial Sequence
  ENSG00000235834_9 (sequence is synthesized)
tggcagagcagccctgaaaaaactttcttggctgtgctgtaggctttacacaggcttgttattattttttgaaccctctgagattgacagggcaggaaatggtatcacgattttctctta

SEQ ID NO: 910879 - DNA, 120 bp, Artificial Sequence
  ENSG00000235834_10 (sequence is synthesized)
acttctaaagtgacttgctatagtcacctaggtttttcatgaattatagaagagaagaggcctaaaaactgaatttcccaatacctgggacaatgctgatttagtaagttggggtttcta

SEQ ID NO: 910880 - DNA, 120 bp, Artificial Sequence
  ENSG00000235834_11 (sequence is synthesized)
ggagaagatagaaatacattgacatatattaatccattgattaattaatttatgaggcaactgccatctacattaaagaatacacatttttttcacttaataaaaatgagatctctctca

SEQ ID NO: 910881 - DNA, 120 bp, Artificial Sequence
  ENSG00000235837_0 (sequence is synthesized)
tgtaaggacagatagcagggcctgccctctggccagcaatttctcttcttctttttccatgtggcttgtcagagcactacgttccttatgacaaacaaaaggaatccacagaaacttggt

SEQ ID NO: 910882 - DNA, 120 bp, Artificial Sequence
  ENSG00000235837_1 (sequence is synthesized)
aaaagaagcagagaagacactactccatatgtgtaaaatgtggagccccatgacctcctctgcctcattgcctgctctgcctctcaaagagcttcagcaaaacacagaagcacagcagtg

SEQ ID NO: 910883 - DNA, 120 bp, Artificial Sequence
  ENSG00000235837_2 (sequence is synthesized)
gctttcatgaaatggatgttgtcgtagcagtattcctgaaccttctggaggaggatcagctctgactggccttgggagctgaacacggccagcaggggagcatattgctagaacagaagt

SEQ ID NO: 910884 - DNA, 120 bp, Artificial Sequence
  ENSG00000235837_3 (sequence is synthesized)
ggagagtaaaagccgtcacttgcgtgggagaaatgccagcagtgacttgagcagccttcaaaagcagaaggagccgggcagtcccagtccctgtgctggctggaggaagccacataaaag

SEQ ID NO: 910885 - DNA, 120 bp, Artificial Sequence
  ENSG00000235837_4 (sequence is synthesized)
tgtgacatcctggcatctacaagcatcacaaggctttttatgtttgcttcttttccccatggaaaataatgtacaaattcttgcttggagaaatatgattaaatatactgctatccttaa

SEQ ID NO: 910886 - DNA, 120 bp, Artificial Sequence
  ENSG00000248434_0 (sequence is synthesized)
cagtggcttgaaaccaataaatagaacattaatgaagaatatgagatgaagcaagttccagcaccatcacaggcaaccaaaatcctcgtgtaggagtttgataggtggcagattctgaaa

SEQ ID NO: 910887 - DNA, 120 bp, Artificial Sequence
  ENSG00000248434_1 (sequence is synthesized)
gctgagataatgtttgtgctcgaagtatatcccaaacgactgcagaaaagtaaaatttatttaaggaaagcctaaaatactacaaattttagcagttttgagataatttgcctatgtaag

SEQ ID NO: 910888 - DNA, 120 bp, Artificial Sequence
  ENSG00000248434_2 (sequence is synthesized)
aatgatgacactgttgagaaaatttggttatgaaatagccacatgcttgttctgacattctacaaatattccatgaggttgttttccatattggctccctggaaagccttagaaattctc

SEQ ID NO: 910889 - DNA, 120 bp, Artificial Sequence
  ENSG00000248434_3 (sequence is synthesized)
aagaagtcttggctactgattccagatatccgtgtcaaggtggagcaaagtctcttcctcttgttgactggaacacagaaaattactatcatctgcaccaccccaccctacctttatctg

SEQ ID NO: 910890 - DNA, 120 bp, Artificial Sequence
  ENSG00000248434_4 (sequence is synthesized)
tctgtaaaataattgctatatttttatgatgccattgtaatcaaccaactgtatcactttttaaaattgtatctgaggctaaatataatttactgcctaaaatttaaatatattaataaa

SEQ ID NO: 910891 - DNA, 120 bp, Artificial Sequence
  ENSG00000248434_5 (sequence is synthesized)
cattctacaaatattccatgaggttgttttccatattggctccctggaaagccttagaaattctcaagaagtcttggctactgattccagatatccgtgtcaagctcttcctcttgttga

SEQ ID NO: 910892 - DNA, 88 bp, Artificial Sequence
  ENSG00000248434_6 (sequence is synthesized)
agccataaaaaatgaaactgggaaccatcattttcagcaaactatcgcaaggacaaaaacccaaacactgcatgttctcactcataag

SEQ ID NO: 910893 - DNA, 120 bp, Artificial Sequence
  ENSG00000248431_0 (sequence is synthesized)
aatacacgctaaagtctggaggacagatacttccttttccagataaacttacagatccagatgaaggtaccccaagcagcttgagatgtgatgatggagaccagtttgagaagacccatc

SEQ ID NO: 910894 - DNA, 120 bp, Artificial Sequence
  ENSG00000248431_1 (sequence is synthesized)
atctctgatttccctctgattatgaagtaatacaacaaagctacaccagagccatggtaccagcatgaacagctttcattcatctgacttcaccagagccaatgggatctctgactctag

SEQ ID NO: 910895 - DNA, 120 bp, Artificial Sequence
  ENSG00000248431_2 (sequence is synthesized)
aatcatagatccaccaccagcttgctccctgcacctggaaaagtggcaggcactcaacagcttgtgagaacagccattcaggtgaaccctgcaaggccacaggggtggagctgcccaagg

SEQ ID NO: 910896 - DNA, 120 bp, Artificial Sequence
  ENSG00000248431_3 (sequence is synthesized)
ccttgggagtccaccccttgcaccagtgtgctctggatgtgacacacagagtcaaagaagattattttggagctctaagatttatttactgccctgctggattttagacttgtgtgggac

SEQ ID NO: 910897 - DNA, 120 bp, Artificial Sequence
  ENSG00000248431_4 (sequence is synthesized)
tggaacaggagtgtttacccaatgtctgcactcccattgtatcttggaaataaataacttattttgattttacaggcctataggtagaaggagatgagtctcaaatgagactttggagtt

SEQ ID NO: 910898 - DNA, 120 bp, Artificial Sequence
  ENSG00000248431_5 (sequence is synthesized)
gatgagtctcaaatgagactttggagttagacctgggacttttgatttaatgctggaataagttaagactttgggggactactgagaaagcatgattgtattttgcaatgtgagaaggac

SEQ ID NO: 910899 - DNA, 120 bp, Artificial Sequence
  ENSG00000248431_6 (sequence is synthesized)
gaatgttatagttgggtatttgtcctgccaaaatctgatgttgaaatgtaatccccaatgtggaaggtgagtcctggtgggaagtaattgggtcatggatgcagatccctcatgaatggc

SEQ ID NO: 910900 - DNA, 120 bp, Artificial Sequence
  ENSG00000248431_7 (sequence is synthesized)
ttagtgctgtcctcatgatatcacatgagttttatgagatctggtcatttaaagatgtgtggcatctcctccctctgttatttgctcctgcttccaccatgtgatgtgcttattcacgct

SEQ ID NO: 910901 - DNA, 120 bp, Artificial Sequence
  ENSG00000248431_8 (sequence is synthesized)
ttgccttccaccatgataaaaacctctctaagccttcaccagaagctgagaagatgccagtaccatgttccctgtaaagcctacagaactgtaagccaattaaacctctcttctttataa

SEQ ID NO: 910902 - DNA, 120 bp, Artificial Sequence
  ENSG00000248431_9 (sequence is synthesized)
gcacacaccaccacacctggctaattaaaaaaaaaaaatgtggaaatgagatctccctatgttgctcaagctggtctctaactgctgacctggcctcaagtgagcttcccatctcaggct

SEQ ID NO: 910903 - DNA, 120 bp, Artificial Sequence
  ENSG00000248431_10 (sequence is synthesized)
cttcccatctcaggctcttgaagtgctagaattacaaacatgagccacagtgcttgccctctcttttttcttctttaataaaataagatgttataaatacttgtacctgatattctaaca

SEQ ID NO: 910904 - DNA, 120 bp, Artificial Sequence
  ENSG00000248431_11 (sequence is synthesized)
aataaaggaatataacggtaaatgttccttttaagaaaggcacgacctctagtaaaacatttttgccagaaatttgaaatattttagaaataaagatggctatgatattctacaaaataa

SEQ ID NO: 910905 - DNA, 77 bp, Artificial Sequence
  ENSG00000248431_12 (sequence is synthesized)
ccagtgagaccacgagcccaccggcctcaccgcgaaggtccacggcttcattcctgagccagcgagaccacgaaccc

SEQ ID NO: 910906 - DNA, 120 bp, Artificial Sequence
  ENSG00000248431_13 (sequence is synthesized)
gaccaagaacccaccaattctggacacgctacctcgatccagatgaaggtaccccaagcagcttgagatgtgatgatggagaccagtttgagaagacccatcatctctgatttccctctg

SEQ ID NO: 910907 - DNA, 120 bp, Artificial Sequence
  ENSG00000248431_14 (sequence is synthesized)
ggtgtctttagaggtagcattgcatttcattggcatatgttttatttagtctttctaaattaaaaaagtatatatctgttattttcacacattaggaagtaagaaaggatgttaaagata

SEQ ID NO: 910908 - DNA, 120 bp, Artificial Sequence
  ENSG00000248431_15 (sequence is synthesized)
cctatttctgtttttagtaaacaaagcttattgaaaaagtcttttttgtatttgctaagaatgtttttcattaacaatggctattttctaatattggagtacactgatgcttccatgggt

SEQ ID NO: 910909 - DNA, 120 bp, Artificial Sequence
  ENSG00000248431_16 (sequence is synthesized)
cattgatgtcagcaaagcttgcttgcctaggcattcttatttgtataaattattctgatggtaatccggctatttccaaacacagtgatctcttccgagttcatcctcattctttgtagc

SEQ ID NO: 910910 - DNA, 120 bp, Artificial Sequence
  ENSG00000248431_17 (sequence is synthesized)
tggctccttctttatggccaaatcacttggctctgggtggttttgtttctattgcttctcaaacttccattctaatttgaatttgcatttgtaaaatcactgcccaaatttctgatcgta

SEQ ID NO: 910911 - DNA, 120 bp, Artificial Sequence
  ENSG00000248431_18 (sequence is synthesized)
atctagcaagcgtgtaaagacaataaaaacaaaagaagttgcataatttttattgtagaaaaataaatccttctgtcttctgtgatatattcaatatgaagaatttcttcctctcctaaa

SEQ ID NO: 910912 - DNA, 120 bp, Artificial Sequence
  ENSG00000248431_19 (sequence is synthesized)
tctgattatgaagtaatacaacaaagctacaacaggatctcactctgtcactcaggctggaatgctgtggcacaatcatagcttactgccgcctcaaactcctgggctcaagcgatcctg

SEQ ID NO: 910913 - DNA, 120 bp, Artificial Sequence
  ENSG00000228174_0 (sequence is synthesized)
aacatccttggatctgtccctcctctcccttctcacggcactgcctcttatgatctcagtgagtacagtggtctccaaactagtcccctgcctcagttctccctccttcctatcctcact

SEQ ID NO: 910914 - DNA, 120 bp, Artificial Sequence
  ENSG00000228174_1 (sequence is synthesized)
caactcagcctccaaatgatcttggtgaaaatcagtcctcatgctactcccaagctgaaaactccaactgcttcccaagctccaactcctaagctccaactgcttcccaagctccaactg

SEQ ID NO: 910915 - DNA, 120 bp, Artificial Sequence
  ENSG00000228174_2 (sequence is synthesized)
cttcccatggatggatagagagcatgtctttaaagcgcacctcaccacacaggctcccggcacccctggttgggataatgcccccctctgctcccacacctctgtaggaagctctaaaga

SEQ ID NO: 910916 - DNA, 120 bp, Artificial Sequence
  ENSG00000228174_3 (sequence is synthesized)
agcagcgctgcccctgcctagcggaggagactgggactccccacatctctctgtgttcccagattgagccgggcaagatcacatctgacatctgcacatctcagcgcccagcccctgcct

SEQ ID NO: 910917 - DNA, 120 bp, Artificial Sequence
  ENSG00000228174_4 (sequence is synthesized)
ggctcagagtgaagtgtcttccaatccattgaaatttctagtcccggggtctcgaggacactagggccactgtgcaatggcagaaggagcattgccatagaagtcagggggcctggttac

SEQ ID NO: 910918 - DNA, 120 bp, Artificial Sequence
  ENSG00000228174_5 (sequence is synthesized)
gtcctgactttagttgaggacctgccatatgaccttgagcaaactgctgtacttctctggatctcagtttctacaacctaattcactgggcccagcctgcagcctgcaagcaccggatga

SEQ ID NO: 910919 - DNA, 120 bp, Artificial Sequence
  ENSG00000228174_6 (sequence is synthesized)
gtggacgtggctgagcagccatgagaaagatgtggggctctccggtgactgtagacccagcataaatcaacagttcaaggtgctcatccccaaagccatggtgagaccttagctgctgta

SEQ ID NO: 910920 - DNA, 120 bp, Artificial Sequence
  ENSG00000228174_7 (sequence is synthesized)
ataaaagtgtagtgccaaagtaagggcaatgacagtcttgcttggttttatgctggagctcaactctgggccacactcttttgtggggggtgggtggtaattatcttttttaaacaagac

SEQ ID NO: 910921 - DNA, 120 bp, Artificial Sequence
  ENSG00000228174_8 (sequence is synthesized)
actggctatatacagtcaagtgtgcaaggcttaagtatacaactcatgtaattttcccacatttatatacctatgtagacattcaaatgaagatactaaacatttccagcccccaagaaa

SEQ ID NO: 910922 - DNA, 120 bp, Artificial Sequence
  ENSG00000228174_9 (sequence is synthesized)
acttccttaaattccctcctggtcaatctccctcaaaagtaactatttataatatatataaaataatatatttatagtactattctgacctttaagactgtagattagttttggcttttt

SEQ ID NO: 910923 - DNA, 120 bp, Artificial Sequence
  ENSG00000228174_10 (sequence is synthesized)
acgcccactcgctgtcctaagggaccttaatgagctcccactccttgcagcgaagctctcctggtttccctgcttcctttctgaatcctcccagcccctggcaaccacattctcctttct

SEQ ID NO: 910924 - DNA, 120 bp, Artificial Sequence
  ENSG00000228174_11 (sequence is synthesized)
gtctatgcgaattggactactccgggggccaccgatgactggagtcatgctgtgttgtctctttgtgactggaatcctgtctctttaacatccttggatctgtccctcctctcccttctc

SEQ ID NO: 910925 - DNA, 120 bp, Artificial Sequence
  ENSG00000248432_0 (sequence is synthesized)
acccaggggaagagatgcatggggcagaatccaagaaggttccaaaccaggagctttcagttacccttcctcacggagtcatggacagcgctgcttttctggcaatgacatgtgacaata

SEQ ID NO: 910926 - DNA, 120 bp, Artificial Sequence
  ENSG00000248432_1 (sequence is synthesized)
gaaacatcttctgcttcactctgggaagaatgattgaatttctttagccacagttttgttttctgtctcaaggcgttcactgccaaggtagaagggattcagcatgttctaggtcaggtt

SEQ ID NO: 910927 - DNA, 120 bp, Artificial Sequence
  ENSG00000285051_0 (sequence is synthesized)
ctcctccactgagaaggggtcatccacgtcgtagcgttgataagtaaactgaggcccaaagaagttaagtaaatttcccaaagtcacaagacaaaggaggggcagagctgtgatttgaag

SEQ ID NO: 910928 - DNA, 120 bp, Artificial Sequence
  ENSG00000285051_1 (sequence is synthesized)
ttggtgctgtttgactccaaaggctgtcagcttctttgggcaaagactgagtcatctctgcattctcagcacctggtgcaatttaagcagaaatatcttgaagatttttcgtatcttcag

SEQ ID NO: 910929 - DNA, 120 bp, Artificial Sequence
  ENSG00000285051_2 (sequence is synthesized)
ggagattaggaatgggaatggaatgggaacgccaatgcaggaaggatgagaagtctgcagatgcctccaaggagtccgaaaccaagtccgaagtcaacgacaagcaatgatggcgatggc

SEQ ID NO: 910930 - DNA, 85 bp, Artificial Sequence
  ENSG00000285051_3 (sequence is synthesized)
accaagtccgaagtcaacgacaagcaatgatggcgatggcgatcctagttaataaaaaggggggagatgtgggctacatgagctg

SEQ ID NO: 910931 - DNA, 120 bp, Artificial Sequence
  ENSG00000285051_4 (sequence is synthesized)
ttggtctagcggtgacgccagtgtctgggaagatgcccgttgccaggcggaccgaggtctagcggtagcgtaagtgtcaagggaaaacacctgctacttagcagaccgggaaagggagtc

SEQ ID NO: 910932 - DNA, 81 bp, Artificial Sequence
  ENSG00000285051_5 (sequence is synthesized)
cgcagcctggcattcggggccactaccggtctctgcgcattggtggtagtggtctcccgggcccagctgtcttttctttta

SEQ ID NO: 910933 - DNA, 120 bp, Artificial Sequence
  ENSG00000285051_6 (sequence is synthesized)
gggagggtgctgggccaagctgtggctgggaggccatcaaagactccttctgtgtattaagatttggaatttatttctgatgtcatgataaggacaaaagaatcttgcactgtgtcaggc

SEQ ID NO: 910934 - DNA, 120 bp, Artificial Sequence
  ENSG00000285051_7 (sequence is synthesized)
tggggtagctgctgtgctcctgatggggagaaggattggtgagaaaagctagaatgtggagtcctgtcatcagatgatgtgactacatggaatgaggactatagctgctctcttaaaaac

SEQ ID NO: 910935 - DNA, 120 bp, Artificial Sequence
  ENSG00000285051_8 (sequence is synthesized)
ctgcagccccctctctcagcccagacagttgagataagtaaactgaggcccaaagaagttaagtaaatttcccaaagtcacaagacaaaggaggggcagagctgtgatttgaagttggtg

SEQ ID NO: 910936 - DNA, 120 bp, Artificial Sequence
  ENSG00000285051_9 (sequence is synthesized)
ctgtttgactccaaagttgggatgaagatgccctgctcaagtttacaagcggtgttttccagctcagcacagctcttcttcctctgaaggtgcatctccctacctcttgatcatctgtgc

SEQ ID NO: 910937 - DNA, 120 bp, Artificial Sequence
  ENSG00000285051_10 (sequence is synthesized)
ggcaaatgctccatgtgcatttggggaccatcatcactcttgtcagttttgtccctcctcagccatcagtgagctcaggtgcacagcagtaacgggaaatagtacatggcagtgcctaaa

SEQ ID NO: 910938 - DNA, 120 bp, Artificial Sequence
  ENSG00000285051_11 (sequence is synthesized)
gggttagtgagagagagaccagaccacacagtcattccctctctagcagccatctctgcatgagaagtgttggagggacagcaccacagggacagtgctctgtgcacctctcctgtccca

SEQ ID NO: 910939 - DNA, 120 bp, Artificial Sequence
  ENSG00000285051_12 (sequence is synthesized)
attagaaccatcacagtcaccagtgcctctaaactgcaagggacccactaggcaaagagagcagactggggcagaaatgtcccatcatgggagctggagattgggctgtagaatttcaga

SEQ ID NO: 910940 - DNA, 120 bp, Artificial Sequence
  ENSG00000285051_13 (sequence is synthesized)
ggcatccttctcagattttctggaacagttccaattttatgcaacataatttttttaaataatgatgactcattaaaaaaactgtgatttaatttttatgcatttaataggacttcttat

SEQ ID NO: 910941 - DNA, 120 bp, Artificial Sequence
  ENSG00000285051_14 (sequence is synthesized)
ttaaataaattcactaatcaacaaaacaaaaatctttctcagcaccaagagtagtcacttgaacttcagacatacattctccttatttatagatcatcctgactgtaaaggaaccaaaga

SEQ ID NO: 910942 - DNA, 120 bp, Artificial Sequence
  ENSG00000285051_15 (sequence is synthesized)
ataagttgctgaggatcaacaaaatacttgcggggttgaaatcacatacttcccttgactaaaagaggcttatcatctatggttgtacaggttgtgcactgtaccaggctgcaactgcaa

SEQ ID NO: 910943 - DNA, 120 bp, Artificial Sequence
  ENSG00000285051_16 (sequence is synthesized)
ggagtctctatttgtactgcagacattattgatttgtatgttgaatacaacagttttatgacagatgggcagatttgttcagtataatcaatatacaatatgaagacgatttcaaacaga

SEQ ID NO: 910944 - DNA, 120 bp, Artificial Sequence
  ENSG00000285051_17 (sequence is synthesized)
atgaagcaatgtgccttgaggaaggagtgcctgttctaattttcacaatggtgtcctataaaccactagtggcctagattgaatggccagttctataaaactcatgggcctgggattgag

SEQ ID NO: 910945 - DNA, 120 bp, Artificial Sequence
  ENSG00000285051_18 (sequence is synthesized)
aaaccaagactcagagcagtaaggggaaagtagagcagttacttgcaagaccaaggctaacctgaaagtgtataaggtaacacattattggctacacattagaatctcttggggagattt

SEQ ID NO: 910946 - DNA, 120 bp, Artificial Sequence
  ENSG00000285051_19 (sequence is synthesized)
gaaaaatactgatgcctgggtttcacccctagaggttccttttaactggtctgggatacagcctggggttgaggtattgaggttcttcatgtaaccctaataaacagccaaggttgagaa

SEQ ID NO: 910947 - DNA, 120 bp, Artificial Sequence
  ENSG00000285051_20 (sequence is synthesized)
cgtagcgttggtacgtgctttggtgcagggcctcttctcgagcgctgatttccagggtgctgttccagatgccatatccaaaataaatgagcagacctgtggggcgaggggaaagataag

SEQ ID NO: 910948 - DNA, 120 bp, Artificial Sequence
  ENSG00000285051_21 (sequence is synthesized)
gatgagaagagagtgtctgcagatctgataataactgtaaaataacatggccacactgagatacagagggaaggttaagcctccttgaacttacttaaattggtggcagcacgagctttc

SEQ ID NO: 910949 - DNA, 120 bp, Artificial Sequence
  ENSG00000285051_22 (sequence is synthesized)
agcatcatggccagcatgaccaagccatttccctggtgttcccctcagcatgaaacatctgtctacttatttctttgctgagcctgaatggaatattccatctctgaaaaataaactttg

SEQ ID NO: 910950 - DNA, 120 bp, Artificial Sequence
  ENSG00000285051_23 (sequence is synthesized)
tgtttaaattgaaatctttattcctatctggcaaattggctatatatcctcaacaattggaaggaagtgatgtatctgctgccatcagctacaaagcactggacgcccactgtgctattt

SEQ ID NO: 910951 - DNA, 120 bp, Artificial Sequence
  ENSG00000285051_24 (sequence is synthesized)
tgatccagtggctacaaaaaaagatctgaaacttctataagcccagcatctaaatcagtttttgactgaaatgagtacaggcaagctctgaggcagctctatccagggctatgacaagaa

SEQ ID NO: 910952 - DNA, 120 bp, Artificial Sequence
  ENSG00000285051_25 (sequence is synthesized)
tgaagtgaacacattttaccctacatggaaatgtccattccaacaagtgctaatttgacaatggtaatgattactatgggttgaattggattatcccaaaagatatgttaaagtcctaac

SEQ ID NO: 910953 - DNA, 120 bp, Artificial Sequence
  ENSG00000285051_26 (sequence is synthesized)
ccctggttcctgtaaatgtgattgtatttggaaataggatggatgcagatatcattagttaacatactggagtagggtggatctttaattaaataaaactgatgtctttgtaagaagaga

SEQ ID NO: 910954 - DNA, 120 bp, Artificial Sequence
  ENSG00000285051_27 (sequence is synthesized)
agagacacagacacagagggaagatgaccatgtgaagatggaggcagagattgaaattatgctgccacaagccaaggaactcttggggctaccagaagctggacgagggcaagggagaat

SEQ ID NO: 910955 - DNA, 120 bp, Artificial Sequence
  ENSG00000285051_28 (sequence is synthesized)
tgcctgtagagcttcgaaggggacatagctcttctatcagcttgatttcagaattcctgcctccagaactgcgagacaaaaaagctctgttgttttaagccacctagtttgtgttacttt

SEQ ID NO: 910956 - DNA, 120 bp, Artificial Sequence
  ENSG00000285051_29 (sequence is synthesized)
gttatggcagcccttggaaattaacaatgattataatagtaatatgaataatagcaacagcatctcatttactgttttctatgtgttaataacaattccaagtgctttacacatattatg

SEQ ID NO: 910957 - DNA, 120 bp, Artificial Sequence
  ENSG00000285051_30 (sequence is synthesized)
ggctttagggtctcattttacagataaggaagcaagtagagaaagcaaaagaaagacattgaaacgtgcaatggggaaatttgtttccatacaaataaaacaaaccatctgaggagcctt

SEQ ID NO: 910958 - DNA, 120 bp, Artificial Sequence
  ENSG00000285051_31 (sequence is synthesized)
gaaaccctcctccactgagaaggggtcatccacgtcgtagcgttggtacgtgctttggtgcagggcctcttctcgagcgctgatttccagggtgctgttccagatgccatatccaaaata

SEQ ID NO: 910959 - DNA, 120 bp, Artificial Sequence
  ENSG00000285051_32 (sequence is synthesized)
aatgagcagacctgtggggcgaggggaaagcctaacgcttcagagttcaccctgggtggcaagaccagggctgaaggaccttgtaccagcaactaaatgctctgtgctgaaagtgatgca

SEQ ID NO: 910960 - DNA, 120 bp, Artificial Sequence
  ENSG00000285051_33 (sequence is synthesized)
catcaccatggcccacaactcatagtccaggatggctcatatgaccccactgcaatcacaagatgagtagttgaaaagtaagagcatgcatgagaaactgactttccaaaaaatgagtgg

SEQ ID NO: 910961 - DNA, 120 bp, Artificial Sequence
  ENSG00000285051_34 (sequence is synthesized)
aatttcttttccatactgcttcactctgcaacagtatgcatcacagcttatgaatcagatacttcagcatcaacttttttcatggaaaagtgcatcattttggaacagagaacttctgtg

SEQ ID NO: 910962 - DNA, 120 bp, Artificial Sequence
  ENSG00000285051_35 (sequence is synthesized)
ttgttgtaaaaccaagtgaacagttcttaaaatatcttacgtcatattaaatttgaactgctgttaaattatgtctggagccactcagtgatggcagaaatgactaagtgctttgattag

SEQ ID NO: 910963 - DNA, 120 bp, Artificial Sequence
  ENSG00000285051_36 (sequence is synthesized)
aaattgtctatgtttatgctaggggttatttgtgaattttattctggaaaattacactaagagagattagtattcactttatcttaaactatcttgatatgtagcatccacaaagggtgc

SEQ ID NO: 910964 - DNA, 120 bp, Artificial Sequence
  ENSG00000285051_37 (sequence is synthesized)
atgagttgctctctccttcatgccttcatgttaaaaggtaatgacctccacttatggttgctcttgctttcatcttacccactttaaatctttactctgtactctgacttcaatacctgc

SEQ ID NO: 910965 - DNA, 120 bp, Artificial Sequence
  ENSG00000285051_38 (sequence is synthesized)
ttgtggcccctttggctttggatgatctcctggcatttttcactgagcactcttgcatgcttttgtttctttctccgatttttcttttgactttgggagttgacattactttgagtgaga

SEQ ID NO: 910966 - DNA, 120 bp, Artificial Sequence
  ENSG00000285051_39 (sequence is synthesized)
tcatctcccttaactcctggcccatagagcttcctttcccatccctccagccacagttagctcctagataatatttttggatgcataaaaatagttttattcttcttcttttgatttaag

SEQ ID NO: 910967 - DNA, 120 bp, Artificial Sequence
  ENSG00000285051_40 (sequence is synthesized)
atggtaacctgagtgaatgggatgggagaggcttggagttggtgagcaagccaagggaggaatgaggaagtgatagtagaatttagcccttgattttagttttgaagcttaatacatccc

SEQ ID NO: 910968 - DNA, 120 bp, Artificial Sequence
  ENSG00000285051_41 (sequence is synthesized)
ttaggtttttatttagacttatcatcagcctctacctgtcacttatttaagcaaccgtttatacagcctttatgtgcccagtgcgatgcaagttgctaggaataaccaagtagaagttgc

SEQ ID NO: 910969 - DNA, 120 bp, Artificial Sequence
  ENSG00000285051_42 (sequence is synthesized)
aatctctgccttccaggagcttattatctaatgggggatgcagagaagttataaaaaaaattacaattcattgtggtaggtgctactggaacactctaagagaatcggggattgcttaaa

SEQ ID NO: 910970 - DNA, 120 bp, Artificial Sequence
  ENSG00000285051_43 (sequence is synthesized)
acatccattagtgtttatggctttcatttcatgagctggcctgaaaatagtgcaggggttgatcaatttggcaggaataatcagacaatatttataagaccctttttaccagctgaagac

SEQ ID NO: 910971 - DNA, 120 bp, Artificial Sequence
  ENSG00000285051_44 (sequence is synthesized)
attttccttaaacgtggtacagttcttagaatggtatgttttcccactcatgcaaccgagaaatggagggtttctctccttggtgctgaaacagatattttcgggtaggaagagtggatt

SEQ ID NO: 910972 - DNA, 120 bp, Artificial Sequence
  ENSG00000285051_45 (sequence is synthesized)
ttgtaaacagcactggtttctaaaattggtgatgaggggcagagaagaaatcatttatctagaggacagattggacagagggtgagcaggctccattttgacaaatggggatggcaatgc

SEQ ID NO: 910973 - DNA, 120 bp, Artificial Sequence
  ENSG00000285051_46 (sequence is synthesized)
tcatcttataattaattggctccaaagaaggctccccacacaagtgtgggggcagcacagtgagtagaggtgctctccatccccatgtcctgatgcagcagatgccatggctatgtgtag

SEQ ID NO: 910974 - DNA, 120 bp, Artificial Sequence
  ENSG00000285051_47 (sequence is synthesized)
gcagtaaggggtgggtgtctgaaaacatgcagtatagcagctgctcgtggccccactttcttagtggctgctggcggggttgtggccaagaccatcttcataaatgcatcaattctgggg

SEQ ID NO: 910975 - DNA, 120 bp, Artificial Sequence
  ENSG00000285051_48 (sequence is synthesized)
acagactgaaaaaaatattgcttaaacatgggcttctttgcatcccatagccatatgatgtcaacacttttctgttgacaaagaacttgtatctctttctttttctaagacaagtgtgga

SEQ ID NO: 910976 - DNA, 120 bp, Artificial Sequence
  ENSG00000285051_49 (sequence is synthesized)
gttagcatagtgtagcagaaagctagacagacctggaagctcagtttatttatttgctagctgtatggtttggggggaaattaattaattctctgagcattggtttgctaattgataaaa

SEQ ID NO: 910977 - DNA, 120 bp, Artificial Sequence
  ENSG00000285051_50 (sequence is synthesized)
tgcataagaaacttaactttgaaattgtagtgaggatttactggcagaacacatgtgaagtgccagcacagtttctgacaaacagtaggtgccccataaatggtagttattaaatttaaa

SEQ ID NO: 910978 - DNA, 120 bp, Artificial Sequence
  ENSG00000285051_51 (sequence is synthesized)
tattactatttccagaaagggttttttcctcttgaagatgggtatgtgggcagagaatcagaaagcattatattttgatagaagccagtacagtctcattgcaggtgaggccagtgcacc

SEQ ID NO: 910979 - DNA, 120 bp, Artificial Sequence
  ENSG00000285051_52 (sequence is synthesized)
tttgttttctcttacgcttgatgggagagaagctgactgacaaacaaaccatgagggctcaggctgtaaggtaatgagttctaaagggctttgaagctaggtttcttatacatggtagtc

SEQ ID NO: 910980 - DNA, 120 bp, Artificial Sequence
  ENSG00000285051_53 (sequence is synthesized)
tataaatggattattctcttttcagatttccttttcttcttttgcactctgagacacagaattaatttcatcatatctactcctaaattcatgcctcactatcattggttcatagaaaat

SEQ ID NO: 910981 - DNA, 120 bp, Artificial Sequence
  ENSG00000285051_54 (sequence is synthesized)
atttcctttgtttatgttttatttcattactttctctcttcttcatctcatatcaccaggctcccatcagtcactcaagggcacccagttttgcttgtcttatgaatgcctatttcacta

SEQ ID NO: 910982 - DNA, 120 bp, Artificial Sequence
  ENSG00000285051_55 (sequence is synthesized)
ttcttatgtttatttacacatatgtgtaagtgaaagtacatgatatttttgcgtgtgcattttaaatgtacagaaatggtatttggtcagaaatcttgctttgttacttattttgaaggt

SEQ ID NO: 910983 - DNA, 120 bp, Artificial Sequence
  ENSG00000285051_56 (sequence is synthesized)
aagaattatttgagtttcattttcattgcagtatgtagatttggtttatttctcagatacctgcataaatttccattttatgtgtatactgaattttatttatgaattcccctggtggtt

SEQ ID NO: 910984 - DNA, 120 bp, Artificial Sequence
  ENSG00000285051_57 (sequence is synthesized)
acttcttactctttactctttcaaatcatgctcaattaataatcatttacatgtttccttgtgcatttatatgagagtttctgtggatctatatccaggaaggaaatgatagagttctag

SEQ ID NO: 910985 - DNA, 120 bp, Artificial Sequence
  ENSG00000285051_58 (sequence is synthesized)
agtacaagctctgtaggcctgattactttccaaaaaggctgtactagtttgcatttctactagcagtgcaaggatatttttgtctttgcacatcctcatcagcacttgacattgtttggt

SEQ ID NO: 910986 - DNA, 120 bp, Artificial Sequence
  ENSG00000285051_59 (sequence is synthesized)
tttctattttttgccagctggatgtgtgtaaagtggtatctattgttttatttgagtttctctgggactggtggtgttatacatgtctttatgtagttattaactaactgtattttcttt

SEQ ID NO: 910987 - DNA, 120 bp, Artificial Sequence
  ENSG00000285051_60 (sequence is synthesized)
actctaaaattgctttattattattttactgctttcctatgtccttgccttttttgtattacagaattctttgtacattttagatattaacctattgtcagtcttggaaatgataaaata

SEQ ID NO: 910988 - DNA, 120 bp, Artificial Sequence
  ENSG00000285051_61 (sequence is synthesized)
ggtgcagggcctcttctcgagcgctgatttccagggtgctgttccagatgccatatccaaaataaatgagcagacctgtggggcgaggggaaaggtacaggtaagctgcgcatgccagct

SEQ ID NO: 910989 - DNA, 120 bp, Artificial Sequence
  ENSG00000285051_62 (sequence is synthesized)
ctgtgccctccacctcttcattctttgggatcacaggagagccagtgtctcagctgccactgattgcaaagccctgtgagtgctccgcccgctctgcatctggcagtgcacctctgccag

SEQ ID NO: 910990 - DNA, 120 bp, Artificial Sequence
  ENSG00000285051_63 (sequence is synthesized)
cagacagcctcacgattgcatgatccaccttcacactctaccttcaccctccctccttggaatcccaccagccctgttgccaacctcatcctggccttcaggattattcttgctcgtctg

SEQ ID NO: 910991 - DNA, 120 bp, Artificial Sequence
  ENSG00000285051_64 (sequence is synthesized)
agcacaattttgacattggaagagcccgtttttttttcctctgcctccaaggagaatttcaagcttatttatgggacatgtcatcaagaatttagttatcaggtcccaattcattgctct

SEQ ID NO: 910992 - DNA, 120 bp, Artificial Sequence
  ENSG00000285051_65 (sequence is synthesized)
ttctttccctcttcttctttttctcacctggctgctttgggtcaatttccagttggatttcagataatagctcaggtatagaccatgaggtgtgtcttctctttgggatatttctatttt

SEQ ID NO: 910993 - DNA, 120 bp, Artificial Sequence
  ENSG00000285051_66 (sequence is synthesized)
gagataggattcatgaggtccattgcccgtatcacaagtcctgtcctctaaatctacagacaagaatttgatttcctcagaaagactgaaaaaattcctacatggcaaatcctatggtaa

SEQ ID NO: 910994 - DNA, 120 bp, Artificial Sequence
  ENSG00000285051_67 (sequence is synthesized)
gggcaagctattctaacaggtggttacattataataaaaacccgcagggaacagcaggcccgaaggatgccctggaagataccatggtgcagcattctcactgagcccctgctagttcca

SEQ ID NO: 910995 - DNA, 120 bp, Artificial Sequence
  ENSG00000285051_68 (sequence is synthesized)
tgttccctgagactctgcccaaccccttgagaggttctttcacaaaactgcatcaactaaaaggaaaatgaaggctgctttgtgctcactttactgggattaatacacatttggtgtttg

SEQ ID NO: 910996 - DNA, 120 bp, Artificial Sequence
  ENSG00000285051_69 (sequence is synthesized)
tattccttttcttgtctgaaggaaaagaaacatgtgctggataatcttgttggggcttgtgcctcgttttactctctgagttgtgttcttctgaaggtcaaaagcttagcaaaacattgt

SEQ ID NO: 910997 - DNA, 120 bp, Artificial Sequence
  ENSG00000285051_70 (sequence is synthesized)
tacaaaaatgccgcaattaagatttatttagaaaagcttggataaaaaaatgtgtcttaagaagtttatcaagttatgactcagcctaatcatgtaaatcttcagtttcataagcagctc

SEQ ID NO: 910998 - DNA, 120 bp, Artificial Sequence
  ENSG00000285051_71 (sequence is synthesized)
catttaaaaatatctctactgttttcccccagaaagttacactatgtatagacagattaagaaaaatctgatatcttggaggctcagaagttcagaggtgacatatttatcttataagac

SEQ ID NO: 910999 - DNA, 120 bp, Artificial Sequence
  ENSG00000285051_72 (sequence is synthesized)
cattaaggattttatagccagtttgggattgtgggttggatatattttatatatgcaaaaaatagtttttgaaaaacaagtctttgtaattaaattgtctgccctgcttgataaaactat

SEQ ID NO: 911000 - DNA, 120 bp, Artificial Sequence
  ENSG00000285051_73 (sequence is synthesized)
gctccccttagagcagtggcacgcatttgagtcagctggagggcttgttaaaccctaaattgctctcagagattctgattcagtagacctggggtggagttcaaaaatcacatttctttt

SEQ ID NO: 911001 - DNA, 120 bp, Artificial Sequence
  ENSG00000285051_74 (sequence is synthesized)
ccattgatctagatcattgtcaacttggctgcctattaaaattacctgggaacttaaaaaatattcctcaatactcggccaccagaccaattgaatcagaaaatctctgttgtggaagcc

SEQ ID NO: 911002 - DNA, 120 bp, Artificial Sequence
  ENSG00000285051_75 (sequence is synthesized)
tgggcttagaatgtttcagaagcaacccagggtgatactgatgtgtagctagggttgagaatctttgttctgggtgaaacttagtcatatagcagccttcaaaaatcatgatactaaagc

SEQ ID NO: 911003 - DNA, 120 bp, Artificial Sequence
  ENSG00000285051_76 (sequence is synthesized)
agttagcagcaggtgcccagaaatactagcagtccttcccaaatgtgatttgcgggctgtgcatcagaatcaccgggtgcttgttgaactgcagacttctgtgccctctggctggccagc

SEQ ID NO: 911004 - DNA, 120 bp, Artificial Sequence
  ENSG00000285051_77 (sequence is synthesized)
cccactctgcagggtggcattcttttgagtcagcgagtagcagtttctggagggagtttggagtttgtgctatcagcaagattacaaaaggcgctcagggagttttcctctgcctgatag

SEQ ID NO: 911005 - DNA, 120 bp, Artificial Sequence
  ENSG00000285051_78 (sequence is synthesized)
ctggaagggcagcctgagtcgctgcaggttcacatcgtgctttggcatatgatagccagtctgtccatacttgtggacaatgaatcatttcagatttttaaaagaaaggcaggaaataca

SEQ ID NO: 911006 - DNA, 120 bp, Artificial Sequence
  ENSG00000285051_79 (sequence is synthesized)
tgtttcttgttgcttttctcaacattttctcatttaagccccaaagaataaccaggtcaaggctgataaaattatctgcatttttacagataagtaaactgaggcccaaagaagttaagt

SEQ ID NO: 911007 - DNA, 120 bp, Artificial Sequence
  ENSG00000285051_80 (sequence is synthesized)
aaatttcccaaagtcacaagacaaaggaggggcagagctgtgatttgaagttggtgctgtttgactccaaaggtaagggcccctgccacctgactgtttttgcaaaatgcctctggtgct

SEQ ID NO: 911008 - DNA, 120 bp, Artificial Sequence
  ENSG00000285051_81 (sequence is synthesized)
tcaggagccataaatattctgcagaactggctatagagttttcaatgtaaaatgaaaacatgggtcctctcgttcagaaattattaagaattcaagatggcagcagcagagcattaaacc

SEQ ID NO: 911009 - DNA, 120 bp, Artificial Sequence
  ENSG00000285051_82 (sequence is synthesized)
aagcatgggaccctgtgcacagctgtgtgcccatgaggccagccctgatgctatgtgttaggctctatcgaacgttctaatgaaatgagtctgctcagaggcaccctggtggggtagtag

SEQ ID NO: 911010 - DNA, 120 bp, Artificial Sequence
  ENSG00000285051_83 (sequence is synthesized)
gagccccagatttgagcatgggtatactgagttttagtaatagctctttgaataacttcctgttgactttgagcatgttatttaacttcttggaggttcagtttagtcatccattaaatg

SEQ ID NO: 911011 - DNA, 120 bp, Artificial Sequence
  ENSG00000285051_84 (sequence is synthesized)
gagagagggagaagtgggaaggtggtggactacatctgtatttctccaattccagttagttatataccacatttttagtatataaccatttaggctataaccatggcctctggccccaca

SEQ ID NO: 911012 - DNA, 120 bp, Artificial Sequence
  ENSG00000285051_85 (sequence is synthesized)
ctccctgagttctaatcttggctctgctatattctagctatgtgacctcaggcaagtgcctcagtttcctcatctgtaaaatagagattgctgtgaggattacataaataagtaagtgaa

SEQ ID NO: 911013 - DNA, 120 bp, Artificial Sequence
  ENSG00000285051_86 (sequence is synthesized)
gccctcagaataatggctgatatgtgataagcacggtacaagtgctcattattactattcctatgaatcatacggtatctgtactagtagtactaatgttttttctttaatatgactcac

SEQ ID NO: 911014 - DNA, 120 bp, Artificial Sequence
  ENSG00000285051_87 (sequence is synthesized)
actttaaatttaaaaaagtcatctatagtctctttccaagtaatagtatttgtgaaatcaccagattcatgtgtatgtgtggtttttctaacccaggtgaaaatgtacaataactgtaca

SEQ ID NO: 911015 - DNA, 120 bp, Artificial Sequence
  ENSG00000285051_88 (sequence is synthesized)
atatttttaaaagttcattcatatgctttctaataccagttgaaaatattaccaatggaatgggcaccacactgtgggtagcattgtactagacactgaaggcccttttcagctttaata

SEQ ID NO: 911016 - DNA, 120 bp, Artificial Sequence
  ENSG00000280026_0 (sequence is synthesized)
gccttttgcaacgaaacgtggtgcattgtcattaatatcttggattacaacaaccacgtggaaaacattcattgggttttcagcgaccgtttcgaattctagtgcacactcaagtttcct

SEQ ID NO: 911017 - DNA, 120 bp, Artificial Sequence
  ENSG00000280026_1 (sequence is synthesized)
tccgcaaatcttctctcgatctatcctaccgttcactaacaaatccccgctctccaaactaacgttgaaataatcctctgcactaacccgcagttttcgagttggcaactcccggacact

SEQ ID NO: 911018 - DNA, 120 bp, Artificial Sequence
  ENSG00000280026_2 (sequence is synthesized)
gctgggagatggccccgcagaacaaagacagcaggaagggaaacagtacctgacttttcatcatttcggcttctctggctctctgcatttcaggaactctccgcggagcttctttcctct

SEQ ID NO: 911019 - DNA, 120 bp, Artificial Sequence
  ENSG00000280026_3 (sequence is synthesized)
gggatgtttttcaaaaagaaatggcagcaccctggacttctgtgatttgagcttaggacttattagttaggcgctcgagggtgaacaggagcagcgtctgtgctcagtgcaccggacaaa

SEQ ID NO: 911020 - DNA, 120 bp, Artificial Sequence
  ENSG00000280025_0 (sequence is synthesized)
actccccatctctggagtctcaccttagagtcctctccaccaacaagtcactctcggcctcctcccaacttgggtgttttccctgttgccccaagaccagctctgagagctgaggtcagg

SEQ ID NO: 911021 - DNA, 120 bp, Artificial Sequence
  ENSG00000280025_1 (sequence is synthesized)
ccccgcccagcacgtagtaggtgctcaatatgtttgttgaatgtttcagccaacaaaccaagaaaggcatgcataaaaaatgtggacatgcaagttcatgaacatccatcttcattctcc

SEQ ID NO: 911022 - DNA, 120 bp, Artificial Sequence
  ENSG00000280025_2 (sequence is synthesized)
tgggatcagtaaattcacatgaggtgagcagggagggggcagggaggatggaggggtggcagggcaccatcctcagaacagctccagcacacagtaggtgctcagagagtgtggatttag

SEQ ID NO: 911023 - DNA, 120 bp, Artificial Sequence
  ENSG00000280025_3 (sequence is synthesized)
agaaaactgtgagcctagccatgtatccaggaggttctatagaagtaacactgagcaggatttggagatctgaaaacatggtcatcggcagtccaaaaatgtcccttaaacctcagggca

SEQ ID NO: 911024 - DNA, 120 bp, Artificial Sequence
  ENSG00000280025_4 (sequence is synthesized)
cagtgccacctggcccaacttcgcctcacacactgaagaagacggtgtaggacattttctgaatgtgcaccctcattccaactgtttacatcattaattcatacggcccaatttgcatct

SEQ ID NO: 911025 - DNA, 120 bp, Artificial Sequence
  ENSG00000280025_5 (sequence is synthesized)
gcacaccaactcaatactttttatgatgcaattactactcagagatgaattttttatgagtttccttttaatgtctccagggccttttattttgaagaaaacctccttgtggaaaatggc

SEQ ID NO: 911026 - DNA, 120 bp, Artificial Sequence
  ENSG00000280025_6 (sequence is synthesized)
taatctttcttacagtgaagactgaaagccttctggttctcccagtcacaacctaaatgacacttcttccaggaagccttcgctggcctggatgaatggggaggtagagctccctgtgtg

SEQ ID NO: 911027 - DNA, 120 bp, Artificial Sequence
  ENSG00000280025_7 (sequence is synthesized)
atgggcagcaaagtaggttggtggttaagagaacaaaaagtggggtcaaaataacctggtttcaggttctcactgcagcacttagtagctgtgcaaacttgaataagtaactcaatttct

SEQ ID NO: 911028 - DNA, 120 bp, Artificial Sequence
  ENSG00000280025_8 (sequence is synthesized)
ctgagccccagatacttcatctcaacatagggttcaatagcctctctcctagacttgcctttagaatgagtgagatcttacaggctaagtacttggtgcagagttagcactcatgaaata

SEQ ID NO: 911029 - DNA, 120 bp, Artificial Sequence
  ENSG00000280025_9 (sequence is synthesized)
tccactactattattataacacactagtataacacagcagctggcagccatccacacagataggttcacctttttggcctccataattcatttggtggttatggagataaaggtgcaggt

SEQ ID NO: 911030 - DNA, 120 bp, Artificial Sequence
  ENSG00000280025_10 (sequence is synthesized)
gctcaccctcccccagagagatacatagcatatcttaggagtttaatgtccatgagctttggtatacatcaaattgtctttctttcttttttcttgatcatcacagtgttgatcaggtct

SEQ ID NO: 911031 - DNA, 120 bp, Artificial Sequence
  ENSG00000280025_11 (sequence is synthesized)
gtctaccaaatcaggaaggggaaacaggaggggaaaaggtagagggagccctggggaagcagtttgccctggggtgaggtggtgaaggcagcctggatttgaactctgcttcctagagtt

SEQ ID NO: 911032 - DNA, 120 bp, Artificial Sequence
  ENSG00000280025_12 (sequence is synthesized)
tctgaggtcttgggctgggaggtgccttctttccattttacagatgtaacgctttaggtccacaaaggggagggaaggggctaaggtcctattgctcctcccagtgcctggaataatgcg

SEQ ID NO: 911033 - DNA, 120 bp, Artificial Sequence
  ENSG00000280025_13 (sequence is synthesized)
tttttagggaagcttcctctgaatgtctaagacaccctggatttcctttttaaaacactctcccaacttctcgtaaaggctttttctttttcttttatcctcacactttatactttatat

SEQ ID NO: 911034 - DNA, 120 bp, Artificial Sequence
  ENSG00000280025_14 (sequence is synthesized)
ctatctttctctattctccttctttctctctctctcatctatctacctttatcttcttattttttatttgacaaataaaaattatacacatttatggtatatagcacggtattttgaaat

SEQ ID NO: 911035 - DNA, 120 bp, Artificial Sequence
  ENSG00000280025_15 (sequence is synthesized)
acgtataccctatggaatggccataccaagctaattagcatatgtattactgcacatacttaacatttatttgtagtgagaacacttcaaatctattttcttagcaattttcaagtacac

SEQ ID NO: 911036 - DNA, 120 bp, Artificial Sequence
  ENSG00000280025_16 (sequence is synthesized)
aatatattgtcattaactatagtcacccatgctgtacaacagatgcctcgaatttattcctcctgtctaactgaaattttgtattctttgaccaacatctctaaaatttccttgccatat

SEQ ID NO: 911037 - DNA, 120 bp, Artificial Sequence
  ENSG00000280025_17 (sequence is synthesized)
agcagcacaaaaactctctcacctctttgaaccctagtaccccagctttctcactagacaccaacttttcccaatttcctgcagatccttccagagaccttctctacaagaaccaatata

SEQ ID NO: 911038 - DNA, 120 bp, Artificial Sequence
  ENSG00000280025_18 (sequence is synthesized)
tcaaagcctatccaaggctcttgttttgtagaaatggacatgaagtgcagtcattgcctgtgccttcacttttgtcacttaggtgttgttctgtcaccatatagggatctgcttcattta

SEQ ID NO: 911039 - DNA, 120 bp, Artificial Sequence
  ENSG00000280025_19 (sequence is synthesized)
agggccacatggtatctcatgctagaataagccaaattgcatttaaccaatctatcaatggacgttttggttgctcccaaatcttcatctattactacatttttgatatctgcctttccc

SEQ ID NO: 911040 - DNA, 120 bp, Artificial Sequence
  ENSG00000280025_20 (sequence is synthesized)
acctgactgtagactttatgaggatagtgcagtctgtgtctattttatttctgtctcttcaaagtatagcatggggtgtctgaaacatggtaggtgctcaataaacagtccttagatgga

SEQ ID NO: 911041 - DNA, 120 bp, Artificial Sequence
  ENSG00000280025_21 (sequence is synthesized)
gatggatggatggatggatggatgataaatagatggattggttagttgtagaacctggactaagtctctgattctcctaccccactcttttgtggcctgagggacccagctctttgacag

SEQ ID NO: 911042 - DNA, 120 bp, Artificial Sequence
  ENSG00000280025_22 (sequence is synthesized)
tggcctgagggacccagctctttgacagtctcacccaaggaggaacgcagtacggagtccccatcttcaggcagagccaacagtggagacgagcacatgctgtcccgctgtgctcacagc

SEQ ID NO: 911043 - DNA, 120 bp, Artificial Sequence
  ENSG00000280025_23 (sequence is synthesized)
tccatgagcaatagcaggctcccaaccaaagctctcccttggacgctcacagatagcagcggcttcccaaggcctgctgggtggagttgcaccacgttatggaaacttctatttctgctt

SEQ ID NO: 911044 - DNA, 120 bp, Artificial Sequence
  ENSG00000280025_24 (sequence is synthesized)
tataaaaacaaagtaggaaaggaaacctggctcggcaagagacacatgctggcctcgtgagtcatctttctccaagcaagaccagaaaatcctcccaaaactggggctttcactgagtct

SEQ ID NO: 911045 - DNA, 120 bp, Artificial Sequence
  ENSG00000280025_25 (sequence is synthesized)
ttggcctacatgcttatgtttctccctcccgaaccccagagccctgtacacatgggagttgcaaactcaagtgccccccaggagactggccagaaatgtacaataaaaagtgaggccagc

SEQ ID NO: 911046 - DNA, 87 bp, Artificial Sequence
  ENSG00000280025_26 (sequence is synthesized)
agtgaaatatctcaacttttaaatttcagagaccaatgaagatattttttaaaatgctacataggctaagtcaacttacagagggct

SEQ ID NO: 911047 - DNA, 120 bp, Artificial Sequence
  ENSG00000280025_27 (sequence is synthesized)
tttaaaatgctacataggctaagtcaacttacagagggctggctttggtcagatggccacctgtgtgagcctctgttggatgctctgttggatgtgagagtcagcaacactcgagatcat

SEQ ID NO: 911048 - DNA, 120 bp, Artificial Sequence
  ENSG00000280025_28 (sequence is synthesized)
ttatgttttcaccttctctgtggactgggactctctctgtgcaattctgtatctctgagaccctgcagagtgggaaaataaagcaattgttgtgtgctttttttgcttttaattaatgca

SEQ ID NO: 911049 - DNA, 120 bp, Artificial Sequence
  ENSG00000280025_29 (sequence is synthesized)
ttgattttacagatacttattgatcattccatgtatatgctagtctaggtgatgtccgttttgcatctcttttctatcttctttctgcatctgctgcatcctagtggctataagcttaag

SEQ ID NO: 911050 - DNA, 120 bp, Artificial Sequence
  ENSG00000280025_30 (sequence is synthesized)
ctctagtttcaaattgcctgggttcaaatcctggctctgtcacttactagctaagtgaccttggacgtgggattcagcttttttccccaagcctcagtttgctcacttgtgaaatagggg

SEQ ID NO: 911051 - DNA, 120 bp, Artificial Sequence
  ENSG00000280025_31 (sequence is synthesized)
tcattatagtctctctcactgtgagaactaaatgaactgatgtcaggaaatgtttagaataccccctggctcctgttcagctgttgatcatcacccatttgccacattcttgttaaatgc

SEQ ID NO: 911052 - DNA, 120 bp, Artificial Sequence
  ENSG00000280025_32 (sequence is synthesized)
cctttatgggttaagcttgtgcttggcattaaggtttctgccacaagcaaagtggggcccactcccacaaagactttcttactaaattctcaaagtaaccccattgtacagatgcaaaaa

SEQ ID NO: 911053 - DNA, 120 bp, Artificial Sequence
  ENSG00000280025_33 (sequence is synthesized)
ctgcgggtcagggagggaaagtgactttcctgaggtcacacagctggtcagtgtctgagatgggattccaatcaagtacatctgtccttcctaccagaacccatgcttcttctgggcgca

SEQ ID NO: 911054 - DNA, 120 bp, Artificial Sequence
  ENSG00000262663_0 (sequence is synthesized)
cacactcaaatcagaaacctgcatccttcccacagagacagcccctgccctttgcattctcaccctgcccccctgccaccagtctgtcccttctagaatatgccatgatcgactcgtatg

SEQ ID NO: 911055 - DNA, 120 bp, Artificial Sequence
  ENSG00000262663_1 (sequence is synthesized)
gtcgtggcatttcgaggtgggcattttctgtgagcgtggtgccgagaccccatccagctgtccatgtgttcacagtttgtgccttcctagcccacggttgggttttaccagagtgtgttc

SEQ ID NO: 911056 - DNA, 120 bp, Artificial Sequence
  ENSG00000262663_2 (sequence is synthesized)
ggggctatttctatctgttgctgttgtgaacaaggttgccaggaatattcctgtgcgagatgtgggtacaagccttttcatgtctaccactgagtcccgtgtgccgtttcgtgagaggct

SEQ ID NO: 911057 - DNA, 120 bp, Artificial Sequence
  ENSG00000262663_3 (sequence is synthesized)
gaggcaccgcttcattccaccgctgagccccgcgtgccgtttcgtgagaggctgaggcaccgctgagccgcgcgtgccgtttttaacttgattataaaatacatttaaagttcacatgca

SEQ ID NO: 911058 - DNA, 120 bp, Artificial Sequence
  ENSG00000249748_0 (sequence is synthesized)
aagctcaagccatttgcactgggagagaagccagccagaagttttgctggcaatggtttggtttctagaacagcatcaaaacttgtctcccatgttttgtaagtggtttaacccacaaga

SEQ ID NO: 911059 - DNA, 120 bp, Artificial Sequence
  ENSG00000249748_1 (sequence is synthesized)
aacttttaagaagaaacttaatttcatctgtgaatgcagaagcaaatatgagggcatgggcatttaaatatgaagtatttcttgaaagccacctactggagagtaagtttggtgcaataa

SEQ ID NO: 911060 - DNA, 120 bp, Artificial Sequence
  ENSG00000249748_2 (sequence is synthesized)
tttaagaaaagataaaaaagaaacaggaaaattgggacaacggacagcatgatggagccaccgtgcaagccctcaatagtctgcctccaggttgtgtcaaataaagtaaaaagaacaaaa

SEQ ID NO: 911061 - DNA, 120 bp, Artificial Sequence
  ENSG00000249746_0 (sequence is synthesized)
gtggtttcttcttctctgcaatccctcttgcactggccaatcggatcattctccaacacagttcttacagtggctactacatcaggtgcactctcttcttcctggcaggaatattttaga

SEQ ID NO: 911062 - DNA, 120 bp, Artificial Sequence
  ENSG00000249746_1 (sequence is synthesized)
aggctttaccaagaatgtggaattacactatggctttaagaatttggccagaaagaggtcagaggaggacagagcaaacttcagaaatagacaaggtcttactctgctacccaagctgga

SEQ ID NO: 911063 - DNA, 120 bp, Artificial Sequence
  ENSG00000249746_2 (sequence is synthesized)
gattcccccacgttggccacccaagtagctggaactacaggcatgtaccatcacacccagcttatatatgtatataattatttttggacatacaggatctcactacattgcccaagctgc

SEQ ID NO: 911064 - DNA, 120 bp, Artificial Sequence
  ENSG00000249746_3 (sequence is synthesized)
tctcaaactcctggcctcaagatgatccttctgcttctgcctctcaaagtgctgggattataggcataaaccaccatgctcagtccaatgtttttaatatcagatactctttagtatctt

SEQ ID NO: 911065 - DNA, 120 bp, Artificial Sequence
  ENSG00000249747_0 (sequence is synthesized)
agtgagagggattacatgaatgtgtgaccaccaggagatggtaacaattggggtcatgaggggatatgactgctacaatctcccatcatcaaaaacaaaaacaggaatctatcaaagcaa

SEQ ID NO: 911066 - DNA, 120 bp, Artificial Sequence
  ENSG00000249747_1 (sequence is synthesized)
gagcaccagtgaagaatctatttggctgatatggaccctgttcttgctggttaatgatgagcatcactgttcagctagaacacttgtatgatcattacatggctgactccctgtggaaat

SEQ ID NO: 911067 - DNA, 120 bp, Artificial Sequence
  ENSG00000249747_2 (sequence is synthesized)
gggaagggaataaggaatacatatttggaatgaagaacagtttacaaacacttgtttgttggtactaatttacagagaatagtgcaagagttagctttattttttctttattaatattat

SEQ ID NO: 911068 - DNA, 120 bp, Artificial Sequence
  ENSG00000249747_3 (sequence is synthesized)
atatgtgtatcttacatatacatttctagagaccttaggaatagaaatctgaagagctgagttgcaaaccccttattttcaagggtcgaacacttcaggtagttggtgaataatttatta

SEQ ID NO: 911069 - DNA, 120 bp, Artificial Sequence
  ENSG00000249747_4 (sequence is synthesized)
caaagaatctctacttagaattgtaacgtgtgtgtatatatattatatgtaattatacatatgtaatatatacatacaaaaagacagagacagagagagacagagaatttacgcaccaac

SEQ ID NO: 911070 - DNA, 120 bp, Artificial Sequence
  ENSG00000249747_5 (sequence is synthesized)
caacacaaatacatatggaataatagaacatatgttaatatccctaaaattcagtatgtatgaggccagaagagagcgttcataaaatataaaggataaacattatgtatacgatgtttt

SEQ ID NO: 911071 - DNA, 120 bp, Artificial Sequence
  ENSG00000249747_6 (sequence is synthesized)
gtcatcatctatcggttagaagcaagtcacaggtcttgcccacactcagtgagagggattacatgaatgtgtgaccaccaggagatggtaacaattggggtcatgaggggatatgactgc

SEQ ID NO: 911072 - DNA, 120 bp, Artificial Sequence
  ENSG00000249747_7 (sequence is synthesized)
tacaatctcccatcatcaaaaacaaaaacaggaatctggctgctcctccttgctgtcttttgctcatgaagctgcctaaagggtgactcagcactatgcaacttccaggtaccaactatg

SEQ ID NO: 911073 - DNA, 120 bp, Artificial Sequence
  ENSG00000249747_8 (sequence is synthesized)
cactctctaccctgtacagggttgtgatccagagctggatttcagacccctgtttctacaggaactctaaacaagcccagaaagggtctcactctgtcaccgaggctagagtgcagtggc

SEQ ID NO: 911074 - DNA, 120 bp, Artificial Sequence
  ENSG00000249740_0 (sequence is synthesized)
ggaaaccgaaaactcggcggccgaggctccgtgccccgcgcgcagcgctgctcctgccccggccaaggacgcacgggccagccggcggaaccagaggagtgaagcttcagatcttcgcag

SEQ ID NO: 911075 - DNA, 120 bp, Artificial Sequence
  ENSG00000249740_1 (sequence is synthesized)
tgttacagctcataaaggcagcgtggacctaaagagtgaccagcagcaagatttattgcgaagagcgaatgaacatagctttcacagtgtggaaggggagctagacacaaaagttctcca

SEQ ID NO: 911076 - DNA, 120 bp, Artificial Sequence
  ENSG00000249740_2 (sequence is synthesized)
agctggcttcacctctcaatggcactctccgcgggactttgcagcacctagcccgggcactctggcagcccagagggagctcatcccccaatcaagcccagcaggcactgagcccctgac

SEQ ID NO: 911077 - DNA, 120 bp, Artificial Sequence
  ENSG00000249740_3 (sequence is synthesized)
gcactgagcccctgaccacccggaacccgcaccggcctgtgaatgccacgcgcagccccagctcccgccggcacctctccctccacacctccccaagagcagagggagctggttacagac

SEQ ID NO: 911078 - DNA, 120 bp, Artificial Sequence
  ENSG00000249740_4 (sequence is synthesized)
tcggccagccccagagtggggcccccacagcacagcgacaggctgaagagctcctcaagtgcggccagagcggacgcggaggccgaggaggtgccaagagccagtgagggctgctagcac

SEQ ID NO: 911079 - DNA, 120 bp, Artificial Sequence
  ENSG00000249740_5 (sequence is synthesized)
gttgtcactgctcacatatacacgtatatacacgtgtatacatatacatatgtatatacttgtatatacatatgtatatacttgtatatgtattcatgtgtatatacatgtatataggtg

SEQ ID NO: 911080 - DNA, 120 bp, Artificial Sequence
  ENSG00000249740_6 (sequence is synthesized)
tacagatgtatatagtatgtatatatacatgcatgtgtacatgtatacattgtatacagtttacatgtatgtatatatgtacacatgtattccagtgcgtgtatatatacacataatata

SEQ ID NO: 911081 - DNA, 120 bp, Artificial Sequence
  ENSG00000249740_7 (sequence is synthesized)
aacttggaaaccgaaaactcggcggccgaggctccgtgccccgcgcgcagcgctgctcctgccccggccaaggacgcacgggccagccggcggaaccagaggttttcagtgatgttgaga

SEQ ID NO: 911082 - DNA, 120 bp, Artificial Sequence
  ENSG00000249740_8 (sequence is synthesized)
gtcaacaggaaattaatcagcaagtagaaaattgaaagaagatctgcatcttactgcaggagtcattaaaataaaagcagatttggcaaaatggcaagaaccagaggatgaggatgtaaa

SEQ ID NO: 911083 - DNA, 120 bp, Artificial Sequence
  ENSG00000249740_9 (sequence is synthesized)
cagcgggaaggagatggggtgggaatgtgataaaccacttcccttgaaggacattttccagaaggtgaatgccacttctgtttatatcccattggccagcacttagatttatttccaaga

SEQ ID NO: 911084 - DNA, 120 bp, Artificial Sequence
  ENSG00000249740_10 (sequence is synthesized)
agaaaaaaggagaacagatatcatgttgaccagcagtctctgccacagacagctaatctccaccttccactaaggctgagaaattaccagcatgggaggaaaaggtggtgcagttcagca

SEQ ID NO: 911085 - DNA, 120 bp, Artificial Sequence
  ENSG00000249740_11 (sequence is synthesized)
gtcatagccttctccagcatgtgttccttctgtatttcagacatggcagaggagacacagcaataactaaggggcaactattgcatccagaaaaaaaaaaaatgaagataatgacttctc

SEQ ID NO: 911086 - DNA, 120 bp, Artificial Sequence
  ENSG00000249740_12 (sequence is synthesized)
tgcaactaagatgaagatccactgaactttggggtttgaaatgcaacgttagaacttcagactcccggcacctaggtctccagctgctgggtggtgccagcatcagagatacactctgca

SEQ ID NO: 911087 - DNA, 120 bp, Artificial Sequence
  ENSG00000249740_13 (sequence is synthesized)
aaacatatactgtcttaggaaaaagtgaccctgttgtcctttcaggcccatattccacaagaagacaaatggagatgtaaaaggaaaactgcagctccgactgaagagagagcaagttgt

SEQ ID NO: 911088 - DNA, 120 bp, Artificial Sequence
  ENSG00000249740_14 (sequence is synthesized)
ctgttctgatacagccaggaaataagatgttctggttaatatgtgctaaagatgtggtgctgactttccgactcagaatatgatcacatgtttttctcattaaaactatattgaatatta

SEQ ID NO: 911089 - DNA, 120 bp, Artificial Sequence
  ENSG00000249740_15 (sequence is synthesized)
atgtgatggggtgaaatcatggcagtgtgattttcaaacaccaacttgccttggaagggaatgtggggatgtgcactgctggaagccatgtgttctgatatgagaagaacttcttcagaa

SEQ ID NO: 911090 - DNA, 120 bp, Artificial Sequence
  ENSG00000249740_16 (sequence is synthesized)
ggtatcttaatgcatatggggaaactgaggcccagattgcacatacatgagttgccctggaaaatcccaagtcaaagaagctgcactgcaggaaatcagtatggtgcaggccccaggcaa

SEQ ID NO: 911091 - DNA, 120 bp, Artificial Sequence
  ENSG00000249740_17 (sequence is synthesized)
aagacacaatggcaatgaatggaccacaccaaatctacagtgaatatgcagcaagagacctgagccaagtaaccccagcacagtctgagatgtgcaaggcagaagcaaatttaaggagaa

SEQ ID NO: 911092 - DNA, 120 bp, Artificial Sequence
  ENSG00000249740_18 (sequence is synthesized)
tgaaacggaaagcaaggcccaattaaaatccaaatgaacaggaagcacgatgcaaaagcaaacttggaaaaagccaaggcgagagaggaacactttggaagaagcacagttatggcaaag

SEQ ID NO: 911093 - DNA, 120 bp, Artificial Sequence
  ENSG00000249740_19 (sequence is synthesized)
gagctatcctgtaccaacacgaaggagagagtggtaaaggaccccacagaaatggagggaatgatattgacacaaaaatggcaacaagatctaactccagcgtcaaactgaagtaacagc

SEQ ID NO: 911094 - DNA, 120 bp, Artificial Sequence
  ENSG00000249740_20 (sequence is synthesized)
agctgcagcaactaagtccatcagaatgcaatgctaaatggcacaggagagctcagagctgcataaagtacaaggagctatcagccagaagaacaactgctgggaggacagattttgcac

SEQ ID NO: 911095 - DNA, 120 bp, Artificial Sequence
  ENSG00000249740_21 (sequence is synthesized)
ttctccttgtcatcttttcttgaacccaatgtcaagattattccaagtcactttaaaaaatatggaccaagattatggcagccttggaagaccttattttggactttagccccctgacat

SEQ ID NO: 911096 - DNA, 120 bp, Artificial Sequence
  ENSG00000249740_22 (sequence is synthesized)
ttgattactctattcatctagaccagtcctaaagatttcatgggcaccttagccaacttcagatctttactgcacagttcagtaaggacccctaggtccactccaggtagggtggtggga

SEQ ID NO: 911097 - DNA, 120 bp, Artificial Sequence
  ENSG00000249740_23 (sequence is synthesized)
ccacacctcacagctgcccatctcaactggcctaaaggacacgtgtaggcttttattctgtaatgtacagcattatttgaatttatcatctggccaaaatgtaggcatatactgaaaatt

SEQ ID NO: 911098 - DNA, 120 bp, Artificial Sequence
  ENSG00000249740_24 (sequence is synthesized)
aatgtgagcccttcatcacaattgagctagtatcaacacagtcatgcagacgaaaaggaaagaaaatgcactctaagaaacagagggactctgtccaaagtttggttctgccccctctca

SEQ ID NO: 911099 - DNA, 120 bp, Artificial Sequence
  ENSG00000249740_25 (sequence is synthesized)
ggtgtgtgatcctaagcaggttactctctaagcaagaaacttacctgccatgaggatacatgagataatgcaggtgacacacctggtttgtagtaggtatgctcatcgactttaactatg

SEQ ID NO: 911100 - DNA, 120 bp, Artificial Sequence
  ENSG00000249740_26 (sequence is synthesized)
attatatcattgcacaaaacaagccttacatggttttatagtacatgcaaatgagcttccagggagcatgtttctctaagccaatttttattttttcccttatcatccaactctccatcc

SEQ ID NO: 911101 - DNA, 120 bp, Artificial Sequence
  ENSG00000249740_27 (sequence is synthesized)
tttcccacccttttctcattattaccaattagacacagttttcagcaacaatttcttagcatgtacttcctcccttgaataaaattacaaattaagacctgcctaaggtgacctctttgt

SEQ ID NO: 911102 - DNA, 120 bp, Artificial Sequence
  ENSG00000249740_28 (sequence is synthesized)
ccctagttcatcctcataagattgtttccaaatagctctaagctagactctcagaacagagagccatctacagagagagcaaatatcagcttagctgtagatttccccaggaatgctgga

SEQ ID NO: 911103 - DNA, 120 bp, Artificial Sequence
  ENSG00000249740_29 (sequence is synthesized)
ggaggggtagaagatagtagaagatgttaaacaggcagtgaggagacttgggggccagagtcctagatccacacttagtagttgtgtgaccctgtgcgcactcacctcagtttattccct

SEQ ID NO: 911104 - DNA, 120 bp, Artificial Sequence
  ENSG00000249740_30 (sequence is synthesized)
ggtaaattggagctaacaaagcctgctttgcttacctcctgtggcctctctcatgggcttactaaaaggatccaacataacagacttgctccaaatgtagtagggatagcaatttgtatg

SEQ ID NO: 911105 - DNA, 120 bp, Artificial Sequence
  ENSG00000249740_31 (sequence is synthesized)
atgtgagatgattttgcacaatccagtttttatctactttttaattctatataaaatgatttatttgttcttatgtgtattaggaaaaaatataactagcacataaaactcatgatttta

SEQ ID NO: 911106 - DNA, 120 bp, Artificial Sequence
  ENSG00000249740_32 (sequence is synthesized)
aaggaatggcaaggttgctgaccaccaccagaagctaggagagaggaacggaacaggctccctttgaacccctaagaagaagctagccctgccaacatcttcatttcagacttctggcct

SEQ ID NO: 911107 - DNA, 120 bp, Artificial Sequence
  ENSG00000249740_33 (sequence is synthesized)
cctgaaaataactaataggaaaaagatgaaaaataccaatggcttattaagctaagagctaaaatatccatccttgcttagttttgataagattgtgtggccaaggcacatattattctg

SEQ ID NO: 911108 - DNA, 120 bp, Artificial Sequence
  ENSG00000249740_34 (sequence is synthesized)
gttttgataagattgtgtggccaaggcacatattattctgcttcgttaaacactctttttatttttttatttgtgtgtgtgtttttatttttaatttatttatttatttatttatttaga

SEQ ID NO: 911109 - DNA, 120 bp, Artificial Sequence
  ENSG00000249740_35 (sequence is synthesized)
tgcagtggcacgatctcagctcactgcatgctccgcctcctgggttcacaccattctgcctcagcctcccgaggagctggaactacaggcgccggctaccacgcccagctaatttttttg

SEQ ID NO: 911110 - DNA, 120 bp, Artificial Sequence
  ENSG00000249742_0 (sequence is synthesized)
accagctggaagggctgcagcaagtctaggacactgtgacgcagagtgcagccttcagaacggaagacctgcaagaggactccagtgcaacacatctgctcttccacttcaatgagacaa

SEQ ID NO: 911111 - DNA, 120 bp, Artificial Sequence
  ENSG00000249742_1 (sequence is synthesized)
atgtcagattagctgccgtcagcagcttgcagcaaactcagggtgatcaaggaagtgaagtcataagtccctgtacagaggaggtgaaatgccacattcttccaggaggcccatctgtat

SEQ ID NO: 911112 - DNA, 120 bp, Artificial Sequence
  ENSG00000249742_2 (sequence is synthesized)
ggataagccttcagaggcgtttccctgcgattcccactgcactctaatccactggctttccgcacaagggcagctccaacaaggaacccaaccagagttgagggaaattcaagtttgggc

SEQ ID NO: 911113 - DNA, 120 bp, Artificial Sequence
  ENSG00000249742_3 (sequence is synthesized)
agttgaccagaggtgctgactgggtccacggcagctgcattcttcaggacctgcactggccgtcatcattccaggacacaagaaagaccccgccagactgtccccgatggaagtttggct

SEQ ID NO: 911114 - DNA, 120 bp, Artificial Sequence
  ENSG00000249742_4 (sequence is synthesized)
gtggtcaccatgcattgcctcctatagagcctgcctattttccatgtctgattcttcagctcttctggcaattctgtaaattacccaaaatcctttcaataaaatctatttatgattaaa

SEQ ID NO: 911115 - DNA, 120 bp, Artificial Sequence
  ENSG00000249743_0 (sequence is synthesized)
aggtaagggctctgaaccttcctgcgtgctacccaaggagtgcctagggctaccaggaggcccagggaggaaccttgagacctgagaaaggcttttcttccccgagaggaccactgctca

SEQ ID NO: 911116 - DNA, 120 bp, Artificial Sequence
  ENSG00000249743_1 (sequence is synthesized)
ggctcagaggccatggggtgaagtgcacaaaaaagtgggcgtccagccatgctctaagtcccccgaagatgaagaccagggagcagcttcctccaatgaagcagcagcaatcagaggacc

SEQ ID NO: 911117 - DNA, 120 bp, Artificial Sequence
  ENSG00000249743_2 (sequence is synthesized)
aggaggctgaagccctgagcccagccagaggcaggatcagccaagtctgggacaggcttcaattattttaggcagagcttctggttcctgggccttcagacttggactagaacttcacta

SEQ ID NO: 911118 - DNA, 120 bp, Artificial Sequence
  ENSG00000249743_3 (sequence is synthesized)
cagacttggactagaacttcactaccagctttcctgggtctccagcttgcagagagcagatcgcagaacttcttagcctccataatcacaagaacgtgtttgcttccccttccaccatga

SEQ ID NO: 911119 - DNA, 120 bp, Artificial Sequence
  ENSG00000249743_4 (sequence is synthesized)
ttgtgaaatgttttgagcctctggatttaaataagatggaaaaccaaagctcagggagttttacatgggcaggcagctggtgagggctgagactggagccaggccagtggtcttcaaagg

SEQ ID NO: 911120 - DNA, 120 bp, Artificial Sequence
  ENSG00000249743_5 (sequence is synthesized)
ctttagtcaaactttttgacagatataagaaaaccgaactaaggaaaatactttcctgggatcatccctatatgaagtggcagacctggaattgctccctgtttcaaaacatctcccgcc

SEQ ID NO: 911121 - DNA, 120 bp, Artificial Sequence
  ENSG00000249743_6 (sequence is synthesized)
cccacccaggcctgctcagaagaacccaagccactcagaagcaggaggcagccttcaccccaaccagaccaatatccgttccagactcaggattacaacaatctgggagagggtcaacca

SEQ ID NO: 911122 - DNA, 120 bp, Artificial Sequence
  ENSG00000249743_7 (sequence is synthesized)
agtcagagtcccacatggcagaagagctgctttagcttaagactcttaactctttttcttcggggcaggaaaggtttgagccaatgaaggatgaggctttccaggcccaggacacaacct

SEQ ID NO: 911123 - DNA, 120 bp, Artificial Sequence
  ENSG00000249743_8 (sequence is synthesized)
tgatccaaggcctagttgtggctttaatttttgtaaatcaagcctcaagtttttcttcactcttttagccaaagatatgtttcccaggatgcatgaaataaataaataaaatgtaccaaa

SEQ ID NO: 911124 - DNA, 120 bp, Artificial Sequence
  ENSG00000249743_9 (sequence is synthesized)
tcctaaccattgtcttcataagatcatcccatacttggaaaacatttatctaattatcatcacacacaatgggcccgctgccagctgttttttattttaacttcagattctttccagggt

SEQ ID NO: 911125 - DNA, 120 bp, Artificial Sequence
  ENSG00000249743_10 (sequence is synthesized)
gtttgtttgtttttttcttgggggtggggagtaggagagaggagtgtgtgtgtctgtttttgctattacacagaactgatcagatttccttttataatcacaattaaacttccagaccca

SEQ ID NO: 911126 - DNA, 120 bp, Artificial Sequence
  ENSG00000249743_11 (sequence is synthesized)
ttgtgtgtctgtacagatagattctgtatcttattggttctgtttctctggagaaccctaatacaatatacatgtatgtctacattctatgaatgtatatatcgccaagaaatgttaagt

SEQ ID NO: 911127 - DNA, 120 bp, Artificial Sequence
  ENSG00000249743_12 (sequence is synthesized)
caaaaaagcaagttgcaaaacagcatgtatagtatgctaccatttgtacatgtgtgtaaacaactctggaaggatcttcaggaaacaaattacattgatggcttatgaagaaagaagcta

SEQ ID NO: 911128 - DNA, 120 bp, Artificial Sequence
  ENSG00000249743_13 (sequence is synthesized)
ggtggctgttggggcagaagagagactcaacatttacttttttatactctttgaattttgaaccatgtgaatgtgtaacccatataaaacattaaattttaaaaagtcaccttaaaaata

SEQ ID NO: 911129 - DNA, 120 bp, Artificial Sequence
  ENSG00000249743_14 (sequence is synthesized)
acaatgggatattgttcagcctttaaaaggaaggaaattctgactcatgctacaacatggatgaactttgaagatattatactaagtgaaataagccagtcacaaagggataaatattgt

SEQ ID NO: 911130 - DNA, 120 bp, Artificial Sequence
  ENSG00000249743_15 (sequence is synthesized)
atgattctagttatatgtggtacctagaatagtcaaattcataaagacagaaagtagaatggcggttgccaagagtttggtgagggggtaggaatggggagttattgtttaatgggtaca

SEQ ID NO: 911131 - DNA, 120 bp, Artificial Sequence
  ENSG00000249743_16 (sequence is synthesized)
aatggggagttattgtttaatgggtacagtttcagctttgcaagatcaaaagaattttggagattgcgtgcacaacaagtgaatgtactaaaactacttgatatggtttggctgtgtccc

SEQ ID NO: 911132 - DNA, 120 bp, Artificial Sequence
  ENSG00000249743_17 (sequence is synthesized)
atcttgaattgcaattcccataatccccacatgtcgttgggggtactggtgggaggtaattgaatcatgggagcagttaccctcatgctgttttcatgatagtgagtgagttctcacaag

SEQ ID NO: 911133 - DNA, 120 bp, Artificial Sequence
  ENSG00000249743_18 (sequence is synthesized)
agtgagttctcacaagatccaatggttttataaggggcttttcccctacccttcattctcattcttctctctcctacctccatgtgaagaagaacgtgtttgcttccccttccaccatga

SEQ ID NO: 911134 - DNA, 120 bp, Artificial Sequence
  ENSG00000249743_19 (sequence is synthesized)
ctgtgagtcaattaaacctctttcctttcaaaattacccagtctcagatatttcttcatagcagtgtgagaatgaactaatacactactgaactgcacatcttgactgtacatggttaag

SEQ ID NO: 911135 - DNA, 70 bp, Artificial Sequence
  ENSG00000249743_20 (sequence is synthesized)
agaagcggcaggtaatttattcaggagctggaagctgagaaacggatttcctcactgcaacctccacctc

SEQ ID NO: 911136 - DNA, 120 bp, Artificial Sequence
  ENSG00000249743_21 (sequence is synthesized)
aaatgttttgagcctctggatttaaataaggtgaaatataaaggatccttttcactactgggcacgcctaactgcatgtcttctaaacactgcttgtgatggtcattcataccaaaggac

SEQ ID NO: 911137 - DNA, 120 bp, Artificial Sequence
  ENSG00000249743_22 (sequence is synthesized)
ggaaacagaaagcacagatcacaaaatcctctggccaaatggggaatctgaccctgaaacgaaggagcagtgtcaatgtcctgagccccactgccagcctcagctctatgagaaaggtgg

SEQ ID NO: 911138 - DNA, 120 bp, Artificial Sequence
  ENSG00000233068_0 (sequence is synthesized)
ccgatcagctgtggcatgagggctacagccccgacgcaggtgtaaacatccgtgtggctctgacactcctacacgagaatgcttcttggatttgccgtaaaacagactaaaagaacgaca

SEQ ID NO: 911139 - DNA, 120 bp, Artificial Sequence
  ENSG00000233068_1 (sequence is synthesized)
gacctgctccatagcgacggcaggacctgcctcccagcagagcagagatgagctagtcaggagcaggagaaatgatcttcagactctggggcccagcattccccaggtttcctgcaggtc

SEQ ID NO: 911140 - DNA, 120 bp, Artificial Sequence
  ENSG00000233068_2 (sequence is synthesized)
tcaaaatctatcttgaacaaacttgcttacatcatttatttttaaataaaaaagaaccactattgggagaaggtagtgcttgattttttcttcttggcagagttcattccatagcctgca

SEQ ID NO: 911141 - DNA, 120 bp, Artificial Sequence
  ENSG00000233068_3 (sequence is synthesized)
atcatccctgcccattagagtgaacaatattagcaaaggcactgagaaggaataatcttggcctgtttatcgaacggcactgttccaggcagggagatctagcaggatgtaaagggcggg

SEQ ID NO: 911142 - DNA, 120 bp, Artificial Sequence
  ENSG00000233068_4 (sequence is synthesized)
gccctgctctcatggagctcacggtctcgtgcaggaagatggctaataagtaaatgagacatgatcaaggcagtaaaatgatcaatcttcaagagggtgacgccacagacatccccttcc

SEQ ID NO: 911143 - DNA, 120 bp, Artificial Sequence
  ENSG00000233068_5 (sequence is synthesized)
gtttaagcaacttatctaaagtcacacgactggtggaaccaagcacaggcccaagctggcagtctggtctcataaccctggtgtgtccacagttggctccttccggtgggttctcactct

SEQ ID NO: 911144 - DNA, 120 bp, Artificial Sequence
  ENSG00000233068_6 (sequence is synthesized)
agtccccacctgacccagaagcccagttggcttcacctctcactgctactttctgtcaaccagagtcaaataattttttccaaccaaccaggcaactcacaaaatcagtgggtccccggg

SEQ ID NO: 911145 - DNA, 120 bp, Artificial Sequence
  ENSG00000233069_0 (sequence is synthesized)
caaggctgctgtgtatccaacctgacatctgcaggaaacccccccggaacctgcccatgcaccacaccacagagaaaccaggacacaggggctcagggccagtgggggcgcaaaggctgc

SEQ ID NO: 911146 - DNA, 120 bp, Artificial Sequence
  ENSG00000233069_1 (sequence is synthesized)
catctgccagccttgagtccagtgacaagagggaacaagatggtttacaagtcacccctattctctgcaaatccagtttattaaacttggagttcacaaagaataaacggttaattccta

SEQ ID NO: 911147 - DNA, 120 bp, Artificial Sequence
  ENSG00000233064_0 (sequence is synthesized)
ctgggggtcgcgtgcccttggccggaggcctggtcacccgcaggccctgccatcctcggcttggccgctgctgcccgcgcgcctgtggcggagcgagcctgcctccagggcagcctcacc

SEQ ID NO: 911148 - DNA, 120 bp, Artificial Sequence
  ENSG00000233064_1 (sequence is synthesized)
ccagctgtctggaatggagccgccatgtctggtgctcaagcggccagctctgacccagaggttaaccagtgttggttcctgttgtttacaaccaagaatcctgagaagttcatatgtagc

SEQ ID NO: 911149 - DNA, 120 bp, Artificial Sequence
  ENSG00000233064_2 (sequence is synthesized)
ccacacataagctgaagtattgccttatgacatattctgaatattccaattattttgcaaataattccactaagagattaatacattctagagcatgtagctgtggttcattcattttca

SEQ ID NO: 911150 - DNA, 120 bp, Artificial Sequence
  ENSG00000233060_0 (sequence is synthesized)
ggaaggggggaggggacggtaccaacgagacgcacgtgtcaagcatgcacctgtggcaagcagcctgtcagaggatgttattacacctgccaagtggtgtatccagaaacaaaagaggcc

SEQ ID NO: 911151 - DNA, 120 bp, Artificial Sequence
  ENSG00000233060_1 (sequence is synthesized)
agataataaggaaccaatagtaagctgaacgttaaagatacaggggtggattgtgcctccaaacatctgccactgggctgagtgagccttggtagggagctgagaccaccgtccttcagc

SEQ ID NO: 911152 - DNA, 120 bp, Artificial Sequence
  ENSG00000233060_2 (sequence is synthesized)
gtcagcaaactcatatcatgtcagctagccactcgaatggtgcaagatgccaaactggttattccctgagcagttcagtcacagtaaggtgactctaaatggacggtctgcacatttttc

SEQ ID NO: 911153 - DNA, 69 bp, Artificial Sequence
  ENSG00000233061_0 (sequence is synthesized)
ttctcttttctctgcagccttgctggcatctgttggtttttgactttttgttagttgccattctgactg

SEQ ID NO: 911154 - DNA, 120 bp, Artificial Sequence
  ENSG00000233061_1 (sequence is synthesized)
tcactgtagccttgacctcctgggctgaagcagtccttctatctcagcctcctgagtagctaggactaaaggtgcacaccaccatactcagctaattttgtttatagtttgtagagatga

SEQ ID NO: 911155 - DNA, 120 bp, Artificial Sequence
  ENSG00000233061_2 (sequence is synthesized)
tttgtttatagtttgtagagatgaagtctcattatattgccctggccggtctcaaactctgggctccagctctcttcctgcgtcggccttccaaattgcaagatcacaggcatgagccac

SEQ ID NO: 911156 - DNA, 120 bp, Artificial Sequence
  ENSG00000233061_3 (sequence is synthesized)
ggcacctggcctacctttgttgatttttaagcttttcagatctattagtttttgccttgtgtattttgaagccatcttgtttggtggatatacacttattattgttatatcttcttggtg

SEQ ID NO: 911157 - DNA, 120 bp, Artificial Sequence
  ENSG00000233061_4 (sequence is synthesized)
gattgagctttttataattttgcagtagccctccttggctctagtgatttttttttgctttgaaatttattttatctgatattgttatagccacttctgctttttaaaaataaatacttg

SEQ ID NO: 911158 - DNA, 120 bp, Artificial Sequence
  ENSG00000233061_5 (sequence is synthesized)
catgatatatctttttccatagttttattttcaatctatatatgtcattatgtgtgaaaagaagtttttatagatatgtatagttgggttgcattttaaaatttactgtgccaatctctc

SEQ ID NO: 911159 - DNA, 120 bp, Artificial Sequence
  ENSG00000233061_6 (sequence is synthesized)
ttttaaatgatgtgtctgtaccatttatgtgtgtagttgttgatatatcaagtctgcttttttcctcattttttatttcctttctttctcatttttctatttctttttcttgcctttctg

SEQ ID NO: 911160 - DNA, 120 bp, Artificial Sequence
  ENSG00000233061_7 (sequence is synthesized)
tggattacttggatattttttagagctgcatttttatttatttataagtttttgaaacatatagcttcgtatagttttcttagtggttggcctaggtattactatttttcttagtggttc

SEQ ID NO: 911161 - DNA, 120 bp, Artificial Sequence
  ENSG00000233061_8 (sequence is synthesized)
ccctggtattactttatacatacttagtttatcatagcttacttttttacatttttcaactttgaattaagtatagaaaactttacttccatttaggtccttttaccctctcttcttttt

SEQ ID NO: 911162 - DNA, 120 bp, Artificial Sequence
  ENSG00000233061_9 (sequence is synthesized)
aattataattgttttaagtatttcccatacatactttgagtaacagaagagatggttgctttttccataaaatattattaaagaattgtatgttagcaatagtctgttatgtgtacttgt

SEQ ID NO: 911163 - DNA, 120 bp, Artificial Sequence
  ENSG00000233061_10 (sequence is synthesized)
atttttcccaattctgttattattctttcctttctgaagatctcagatttatcattttctttgtgttaagagagcttcctgaagccattctttcatgggacatctggtagtatcaaattt

SEQ ID NO: 911164 - DNA, 120 bp, Artificial Sequence
  ENSG00000233061_11 (sequence is synthesized)
attcctgaatgatggtttggccagatacaggaaatgggattaacagttactttctttcagcacttgaaagagaaaagcctggccaagatggcaagatcctgtttctacagaaaaaaatta

SEQ ID NO: 911165 - DNA, 120 bp, Artificial Sequence
  ENSG00000233061_12 (sequence is synthesized)
gtgcgcctgtagtcccagctacttgggaagttgaggtgggaggattccttgagcccaggagttcaaggcggcagtgagctatgattgtgcctctgtgcttcagccacatttggagaatgt

SEQ ID NO: 911166 - DNA, 120 bp, Artificial Sequence
  ENSG00000233061_13 (sequence is synthesized)
gcttcagccacatttggagaatgtggctccaaatgcctgtctcagccagcagtcttatgcacaaatataataggcaagactaccacctccatttttactagagggaagtgtaattttttt

SEQ ID NO: 911167 - DNA, 120 bp, Artificial Sequence
  ENSG00000233061_14 (sequence is synthesized)
tttcttcagaccaaaatttttcctctagaatattcttttgacagtgaattctgttaagggaaagagaagacaagattgttgggatttggtaaattctcactcactaaaagatgaattaag

SEQ ID NO: 911168 - DNA, 120 bp, Artificial Sequence
  ENSG00000233061_15 (sequence is synthesized)
ccctagcctttacatatatgttttagttgaacagaagtgtaaaattaatttgtagtaattgcacaagcattccagaagattggcttgataccttagtggtcttttaaagtcagctatcag

SEQ ID NO: 911169 - DNA, 120 bp, Artificial Sequence
  ENSG00000233061_16 (sequence is synthesized)
aagaacatgatgcgtatttgattttaaaaaatctttcgagtcttttttagagttgattttgttttcattagtaatcctttgaaaatttgccataagcaagtcctgcaagccccatacatt

SEQ ID NO: 911170 - DNA, 120 bp, Artificial Sequence
  ENSG00000233061_17 (sequence is synthesized)
tttcgcaccatcaaaagccttctcgggattaccccaagagtacttagattcactgtggtgtttgtgaagcccctttgcaaaattatgagagtaagagaactctgacatagttgactccat

SEQ ID NO: 911171 - DNA, 120 bp, Artificial Sequence
  ENSG00000233061_18 (sequence is synthesized)
tttgcttctaacttccaagctatctttgatcattcctaggtgtaggccaagctaattttggatggaatttagtttatagtttaaccttaaagcaaggatgataatagttctttcccaaat

SEQ ID NO: 911172 - DNA, 120 bp, Artificial Sequence
  ENSG00000233061_19 (sequence is synthesized)
taaactgtctttttaaaactaatgaaagactgcaaggttaggattatgagaggggcctgcattgtgctaaaatgtaggtgtagttaaacaacaaccagccattgatccggatattaaaag

SEQ ID NO: 911173 - DNA, 120 bp, Artificial Sequence
  ENSG00000233061_20 (sequence is synthesized)
atttgtgacttacccaattatttctctaaaatccctactctagaacctaagattggccttttgagatgtttttcagacttctgcatttctgactgttgggtgactccacctggaccctcg

SEQ ID NO: 911174 - DNA, 120 bp, Artificial Sequence
  ENSG00000233061_21 (sequence is synthesized)
actcctgactcaactggtcctgtggcctccacccggaggcagactcagcacacaaggaacattttccacaccgctatgatttcatccccagtcagtcaacattcctcattccctagcccc

SEQ ID NO: 911175 - DNA, 120 bp, Artificial Sequence
  ENSG00000233061_22 (sequence is synthesized)
ttgcctactaaactattcttgaaaaaccctaatctctgaggcttcagagagactgatttgagtgatagctctgtcttctgtgtggctggcctcccgttaattaaactttacttaatgcaa

SEQ ID NO: 911176 - DNA, 120 bp, Artificial Sequence
  ENSG00000268119_0 (sequence is synthesized)
agctcgaggttagctcttcactgccctgtgtcttctttccaagggtctcggtgattcggccacagcctcagcctccatcacgcggtgaactgatggtgctggaagattcatagactccag

SEQ ID NO: 911177 - DNA, 120 bp, Artificial Sequence
  ENSG00000268119_1 (sequence is synthesized)
gacattcctgaagccgagaaaaggttaagtagggtctggcctggaatactctcctagatgaagatagcccaaccatgagccaccttcgaagcagatgagatgaaattaaagctcttcaac

SEQ ID NO: 911178 - DNA, 120 bp, Artificial Sequence
  ENSG00000268119_2 (sequence is synthesized)
tcctaaaggcccagagactatcacaaaagaggtcagaaatcctgaaggtcactttctgacaaactcaggaaccccaggtttatcttggagcctcaagaggagataaattcacccaactca

SEQ ID NO: 911179 - DNA, 89 bp, Artificial Sequence
  ENSG00000268119_3 (sequence is synthesized)
tgatctgcccgcttcagtctcccaaagtgtgattacagagtgaggctggctgggggagcctgggctcctctgtcctccccgaggtggca

SEQ ID NO: 911180 - DNA, 120 bp, Artificial Sequence
  ENSG00000268119_4 (sequence is synthesized)
ctgggggagcctgggctcctctgtcctccccgaggtggcagtggctgatgtctgctcaggtgtgagggggtgctgccatcctctgggcctgaggctgcctggcccagcccctcctaactc

SEQ ID NO: 911181 - DNA, 120 bp, Artificial Sequence
  ENSG00000268119_5 (sequence is synthesized)
cctggactcttccacggtgtcttcaggcccctacaccatcctttgtgtaaggggaggtggcagcatagagatgatgggggaactgccccatgtgccaaggaaagctcacccatctgtgcg

SEQ ID NO: 911182 - DNA, 120 bp, Artificial Sequence
  ENSG00000268119_6 (sequence is synthesized)
aggagacggcggtagctgtggtcattgaaaacaagctcctgctgataaatctcagacaccagacacagaagaacctggagaccctgccagagagcttgaggcaaatggatggactgttgg

SEQ ID NO: 911183 - DNA, 120 bp, Artificial Sequence
  ENSG00000268119_7 (sequence is synthesized)
agcagctgagggtgaagcagcacaaactcctcaaagttgaatagcaaagcagccaccagagatggacaagaaaaatgaacaaagaaaattagcagaaatcaaaggcagatgctaaagcag

SEQ ID NO: 911184 - DNA, 120 bp, Artificial Sequence
  ENSG00000268119_8 (sequence is synthesized)
tgcaaaatcattcattcaatgatagaaatgaaattgatgaaggagtctggaaaatgaatgacagaagagaattaaacagcagtgaccatagtaaggtcctgacgattctggtccactgaa

SEQ ID NO: 911185 - DNA, 120 bp, Artificial Sequence
  ENSG00000268119_9 (sequence is synthesized)
tcccatcatccctaagacagtaaatatcatcacagtcaccaccagcaagttaccaccacagcatttcctgtttgttccaaaatgaataaagatgattctcatcacaagggcaaatacaaa

SEQ ID NO: 911186 - DNA, 120 bp, Artificial Sequence
  ENSG00000268119_10 (sequence is synthesized)
gtagtttagtatgtttttaactaaactaaaggtgtttggtttactttttctaagttctcataattctgaaaatgcagttgacacttgtgtggctcatgatgtttttaatagtctaatgct

SEQ ID NO: 911187 - DNA, 120 bp, Artificial Sequence
  ENSG00000268119_11 (sequence is synthesized)
acacttgtgtggctcatgatgtttttaatagtctaatgctacttgaattgttcaaaaaccactgtattttaaattaagatgaataaacggtcctttgaaaactggcacaaggcaaggatg

SEQ ID NO: 911188 - DNA, 120 bp, Artificial Sequence
  ENSG00000268119_12 (sequence is synthesized)
atcggggaaaaattgtgcaaatgtaataaatttggaaaaacactttttcaaaaactacagcttagaaaacaacagagagttcatactggagtatgcttttgcagatgcagtacatgtaaa

SEQ ID NO: 911189 - DNA, 120 bp, Artificial Sequence
  ENSG00000268119_13 (sequence is synthesized)
aaaatatttaatccataattaagtctatgcaaatatcagaatttatggtagaaatatataaggcactgacacacttcacgtattctaaatcagtgctgagtataggaaatctaaaactaa

SEQ ID NO: 911190 - DNA, 120 bp, Artificial Sequence
  ENSG00000268119_14 (sequence is synthesized)
agttggcagaaaaattatttgtatgtaactttcagaggatcagaaggttttttgcagaattataattacattcaaagtatatttcttgaaaaaaatacagattttttgaaaagtgaataa

SEQ ID NO: 911191 - DNA, 66 bp, Artificial Sequence
  ENSG00000268119_15 (sequence is synthesized)
tgattacagagttttgctcttggtgcccaggctggagtgcattggcacgatctctggctcactgtg

SEQ ID NO: 911192 - DNA, 65 bp, Artificial Sequence
  ENSG00000268119_16 (sequence is synthesized)
ggattacgggcatgtgcccccatgcctggctaattttgaacctcaggtgatctgcccactttggc

SEQ ID NO: 911193 - DNA, 120 bp, Artificial Sequence
  ENSG00000268119_17 (sequence is synthesized)
tggcctgattgtacttttatataataaaatgcagtacatttataaattttagattatgtgtgaagttaatagtttaattcaacatttttaacatgttaaatactattgtgcattcaatga

SEQ ID NO: 911194 - DNA, 120 bp, Artificial Sequence
  ENSG00000268119_18 (sequence is synthesized)
ctaaaggcccagagactatcacaaaagaggtgggcatgtgagattgtaagaactgattttgagagataaaataagttcagtttttctatacattaatcattaatgtcaaaggcacactaa

SEQ ID NO: 911195 - DNA, 120 bp, Artificial Sequence
  ENSG00000268119_19 (sequence is synthesized)
tgcaagaccagaataggggccccagtgttagattaacaaggttttcttgaagcattaactgactccttaataaaggcttatagaagttatatctcatggtcaagattagaattttataga

SEQ ID NO: 911196 - DNA, 120 bp, Artificial Sequence
  ENSG00000268119_20 (sequence is synthesized)
ttgttcataacattttgaaaaacaaatttaattggctttatgctgttttattgaagattattgtttggaaaattaagtcttgtctcccaaagaatgaaggttttttctttttttgttttt

SEQ ID NO: 911197 - DNA, 120 bp, Artificial Sequence
  ENSG00000268119_21 (sequence is synthesized)
gaaatctttattactttggtcaaattaatgacttattttacaatgacctgtgacatcaggtgttttaaatctttgatatttgactgagattctttctgtggaacaaagttccatcaaact

SEQ ID NO: 911198 - DNA, 120 bp, Artificial Sequence
  ENSG00000268119_22 (sequence is synthesized)
gaacaaagttccatcaaactttccaaaatcaaattataaattatgtatttttcttacctaatcctttaaaatattatgttccctaaagtttaaaaatgacataattttgcttatttctta

SEQ ID NO: 911199 - DNA, 120 bp, Artificial Sequence
  ENSG00000268119_23 (sequence is synthesized)
ttgttgaatatgaaatggtgtttggtttttttgggctgtgtttgtataagtatattattggtatttgttctaaaattatgggaaactcctataattcttatatgacttagtgtacattat

SEQ ID NO: 911200 - DNA, 120 bp, Artificial Sequence
  ENSG00000268119_24 (sequence is synthesized)
tagcagtaattataattgctatattgccacagaggtaacaaatttccttgtcaattgtatctttgactttggttgccttaaaactttttgtcattcacagacaattgtattgttttggtc

SEQ ID NO: 911201 - DNA, 120 bp, Artificial Sequence
  ENSG00000268119_25 (sequence is synthesized)
tggttttataatcagctataaaactcttaacaggtggtcttgaatgcaagtttctgataactttggagatggtgacatcagagtagaggaaaaaaattcagaactcatggagagctgaaa

SEQ ID NO: 911202 - DNA, 120 bp, Artificial Sequence
  ENSG00000268119_26 (sequence is synthesized)
ggagagctgaaatgttcatgaatattaagcagaacaaggattaagtgcatgcattgaactattagaagactgaagtaatctttttttctttttttgagtcggggtttcactcggtcttcc

SEQ ID NO: 911203 - DNA, 120 bp, Artificial Sequence
  ENSG00000268119_27 (sequence is synthesized)
tgttgggattataggcgtgagccaccgagaccagctgatctttttgactttttacttaaaatgttgctgatcctttcttttgttttctgagtcaaggaaacctaccttttgatctattta

SEQ ID NO: 911204 - DNA, 120 bp, Artificial Sequence
  ENSG00000268119_28 (sequence is synthesized)
ttctgagtcaaggaaacctaccttttgatctatttacagcttttaacaagttagtatactcctgtgaacaaaatttaaagcatatttaattctctctacttgatttctctagaatttgga

SEQ ID NO: 911205 - DNA, 78 bp, Artificial Sequence
  ENSG00000268119_29 (sequence is synthesized)
gtgagtattcttaacttatggcaatacatttatttgcataagtgcattaagaatgtttttttttgtttgttttgttgt

SEQ ID NO: 911206 - DNA, 68 bp, Artificial Sequence
  ENSG00000268119_30 (sequence is synthesized)
gtagctgggactacaggcgagcgccaccatgcccagctgattttttatatttttagtagagatagggt

SEQ ID NO: 911207 - DNA, 77 bp, Artificial Sequence
  ENSG00000268119_31 (sequence is synthesized)
tagagatagggtttcaccatgctggccactatggtcttgatctcttgacctcatgattcacccatcttgtgccaaga

SEQ ID NO: 911208 - DNA, 79 bp, Artificial Sequence
  ENSG00000268119_32 (sequence is synthesized)
taactttgactggaatggtgttccttttttaaggaatcaaacttgatttatggagccaattaaaagcccctcgggaaaa

SEQ ID NO: 911209 - DNA, 120 bp, Artificial Sequence
  ENSG00000268119_33 (sequence is synthesized)
aacttgatttatggagccaattaaaagcccctcgggaaaactggattcaaatcttgtctacatattccctgtactatgacatttttacttaccacaggtcagaaatcctgaaggtcactt

SEQ ID NO: 911210 - DNA, 72 bp, Artificial Sequence
  ENSG00000268119_34 (sequence is synthesized)
ttgttttgttttgttttctgtttttttgagatggaatttccgtctccgccttccagtttcaagtgattctcc

SEQ ID NO: 911211 - DNA, 120 bp, Artificial Sequence
  ENSG00000268119_35 (sequence is synthesized)
aaaagtaaagacattaaaatgtaagatgcataataaaaatctaagtggagaggctcttataacctataatattgagtgatgcatcaggtaggtgttcagagtaatctgcattatcatgag

SEQ ID NO: 911212 - DNA, 120 bp, Artificial Sequence
  ENSG00000268119_36 (sequence is synthesized)
atgccacaaactttaacctctttcaccttactcaagggtataggtaaaagatggtaacaatatactgtttagtaagataatagattaacatctctagtgattttttttttttgccagtgg

SEQ ID NO: 911213 - DNA, 120 bp, Artificial Sequence
  ENSG00000268119_37 (sequence is synthesized)
ctttcaactgcaaataagttaaagaatattgtttctgtaggtaaatttttattctgtttttaatcatttaaatttattttaattttggtggctgcatgagtatctatgcaatatatggca

SEQ ID NO: 911214 - DNA, 120 bp, Artificial Sequence
  ENSG00000268119_38 (sequence is synthesized)
tgttttaatacaggaatacaatatataataataatatcagcattaagtgaggcatccttcacctgtagcatttatcctatgttttataatccaattctacacttttttttaaatttaaaa

SEQ ID NO: 911215 - DNA, 120 bp, Artificial Sequence
  ENSG00000268119_39 (sequence is synthesized)
acagggttatttttatggtcataataaaaattatatatgagtataaataaaattcattgttaaattcttaatattttttcaaatttcttatatatttttcttggaacatgtggcctgtct

SEQ ID NO: 911216 - DNA, 120 bp, Artificial Sequence
  ENSG00000268119_40 (sequence is synthesized)
tttcttggaacatgtggcctgtctgcctgcaaacacataagacttttagttttgatttacatagagttaaatatttattaatctaaagacaaaccttaggtgtaagaaaattatggagta

SEQ ID NO: 911217 - DNA, 81 bp, Artificial Sequence
  ENSG00000268119_41 (sequence is synthesized)
atctaaagacaaaccttaggtgtaagaaaattatggagtaagtgtgttgggagtttgagaccagccagaccaacgtggatt

SEQ ID NO: 911218 - DNA, 120 bp, Artificial Sequence
  ENSG00000264301_0 (sequence is synthesized)
gaagctgcataaccggcacacttccagaaaggaccgaggaagagagcgtcgcttcagctagggatctgattagtcatgcctggagctaaaggagtggagctggggatgcaaatgtttctg

SEQ ID NO: 911219 - DNA, 120 bp, Artificial Sequence
  ENSG00000264301_1 (sequence is synthesized)
tttagacagctgaagtggccatgcgagcccacagcgagagctgcaggagcagctactacagggagtgggcagattttaggatgtgcagctttgtacttggtgtggctcggttgtacattc

SEQ ID NO: 911220 - DNA, 120 bp, Artificial Sequence
  ENSG00000264301_2 (sequence is synthesized)
cagctgggtgcagttttgctggttagttctgaacaaacctaaagatgtgagatttgaactctataagggaagaaagtgaggaggaagaaggcactgaggctgcctgtcaccaggagggtt

SEQ ID NO: 911221 - DNA, 120 bp, Artificial Sequence
  ENSG00000264301_3 (sequence is synthesized)
ctgggcaaaacagggtagagtgacttgggacagttcctcttaacgatagcacaggcagtaggggttgagacacagtggggttgagacttgcttaaatgtacagttattcagtcaaccatt

SEQ ID NO: 911222 - DNA, 120 bp, Artificial Sequence
  ENSG00000264301_4 (sequence is synthesized)
ttcatagaataattgtgggttgtgtgggttgtcttgagctgccgagttcacatgttctgcagtggagcactatatgctaatgtgagatgtgagtacacccagatttcacctgccctagaa

SEQ ID NO: 911223 - DNA, 120 bp, Artificial Sequence
  ENSG00000264301_5 (sequence is synthesized)
gccatagtagctctgggaactgaatctcggggaccaggaacagtctcgcatgtcattgtaatctggattcatgaactctgactttccacagtctttgagtcactgagcaccaggatcaac

SEQ ID NO: 911224 - DNA, 120 bp, Artificial Sequence
  ENSG00000264301_6 (sequence is synthesized)
tttcacagaggatccagataatcagccagcttgagtcacactcctgcagcttggctagggtagggattcctgaccaacagtcccataagatcttatccagtcaggaggtactggaccaat

SEQ ID NO: 911225 - DNA, 120 bp, Artificial Sequence
  ENSG00000264301_7 (sequence is synthesized)
ctgaagtgcagccaagaccgggagccacagacctggaacctgggtactcaaagagttgtccacgtgccagcagcactggcccctccaggagcttgttagaaatgtagaacctcagagcct

SEQ ID NO: 911226 - DNA, 120 bp, Artificial Sequence
  ENSG00000264301_8 (sequence is synthesized)
gccatgagctaagctgatgccattcagctgggtagcatcgcagtcactgtgcaacttttaaacctacagctgcccaggcccactgcagacctgctaaattcgagctccttgtagtggggc

SEQ ID NO: 911227 - DNA, 120 bp, Artificial Sequence
  ENSG00000264301_9 (sequence is synthesized)
cagggccctgggacttcacacaaaactctgcaagtcatcactgatgagaaaaccaagactcgatgagagtctcctgagctcgggggaagaagctgcataaccggcacacttccagaaagg

SEQ ID NO: 911228 - DNA, 120 bp, Artificial Sequence
  ENSG00000264301_10 (sequence is synthesized)
accgaggaagagagcgtcgcttcagctagggatctgattagtcatgcctggtaggctctgctgagctgggggctcttgggttttgcttgttgagctgaattaatatattaatggatttca

SEQ ID NO: 911229 - DNA, 73 bp, Artificial Sequence
  ENSG00000264304_0 (sequence is synthesized)
tacaggcgcctgccaccatgcccagcttttttttgtattttaatagagccgggtttcaccttgtcgtgcccaa

SEQ ID NO: 911230 - DNA, 120 bp, Artificial Sequence
  ENSG00000264304_1 (sequence is synthesized)
gcatgagccaccgcacccagcccaccctttacctttaacttattctttggcttggggagcaggctgccacagctcaagctgggccttggccaagggcaacattgccaggttcccaagggt

SEQ ID NO: 911231 - DNA, 120 bp, Artificial Sequence
  ENSG00000264304_2 (sequence is synthesized)
cctggaaggcaacttcctgccagcttcctggtcactcagcctgagcacccctcccaagaggccagttaggtgcctcttccttgatttccctaactcttactcgtctcaagacctggaagt

SEQ ID NO: 911232 - DNA, 120 bp, Artificial Sequence
  ENSG00000264304_3 (sequence is synthesized)
ttctcctaactgtacctcactctattctttctaacccaacttgctttccctttccacaattgagctgaagaaccacaaaataccccacgataacctctgttccactcccttagcccttcc

SEQ ID NO: 911233 - DNA, 120 bp, Artificial Sequence
  ENSG00000258253_0 (sequence is synthesized)
gcgccatgtcctgcttggcctgctgcagggcacactccagatctgccagcttgcatttggcatcactgagggtcgcctcgccctgctgctcggcctcggccactgcagcctccaacttgg

SEQ ID NO: 911234 - DNA, 120 bp, Artificial Sequence
  ENSG00000258253_1 (sequence is synthesized)
cacgctgcagggaaggcagtttgcagaactgctgcagcaacggccctggactctggagcctagccccctgggtttgaattctggctctgtcccgtgcaagctgtgggcaagttgggtaag

SEQ ID NO: 911235 - DNA, 120 bp, Artificial Sequence
  ENSG00000258253_2 (sequence is synthesized)
tgtgagctaacatgtcacatgcattaatacctgaagagcactaggacagtgcctggtacaggctctgtactgtgaaagtgtttgctattattcttaaaataccagttggacctcatcctt

SEQ ID NO: 911236 - DNA, 120 bp, Artificial Sequence
  ENSG00000258253_3 (sequence is synthesized)
ccccgattgtctcacttttaaaagccaaagttctcatcttgagctgcaaatcctgtctcttaatctcaccttgctactcactcctcaagaaaggcattgcttctgctgacaggctggcct

SEQ ID NO: 911237 - DNA, 120 bp, Artificial Sequence
  ENSG00000267968_0 (sequence is synthesized)
gccccagctgggcgcagcaggcaggcgcgaggcagagaaggcattcgaagcccagagaggtgaagcagttccctcaaggacacacagcaaggaagcggttgccccaggactcagctcagg

SEQ ID NO: 911238 - DNA, 120 bp, Artificial Sequence
  ENSG00000267968_1 (sequence is synthesized)
tgggcagcgagaggccccaggcaacatagcgactccagagcagcagcaccagcacctgacggacagtaagcaagcctggatctgagagagatatcatcttgcaaggatgcctgctttaca

SEQ ID NO: 911239 - DNA, 120 bp, Artificial Sequence
  ENSG00000267968_2 (sequence is synthesized)
aacatccttgaaacaacaatccagaaaaaaaaaggtgttgctgtctttgctcagaagacacacagatacgtgacagaaccatggagaattgcctcccaacactgttcagccagagccttc

SEQ ID NO: 911240 - DNA, 120 bp, Artificial Sequence
  ENSG00000258256_0 (sequence is synthesized)
tggcagcacatgaagatggccgcagcccaggtggatgagagtccatggggtatatactaaatctaatcatgaggaaacaatagaaaaagaaacattctaaaacatttcaaaaaatgattg

SEQ ID NO: 911241 - DNA, 120 bp, Artificial Sequence
  ENSG00000258256_1 (sequence is synthesized)
aacggttattttcaaaagcgtcaagccgggaaagccaaggaaagattgaggttctattcaggaagacttcttccaagttgctggaggagatggccactagtagccttgattttatatcat

SEQ ID NO: 911242 - DNA, 120 bp, Artificial Sequence
  ENSG00000258256_2 (sequence is synthesized)
agaagagtggttatccagaaagggatgctgagcagataatcaacgttctctgaagtgggtataatgactatctacatgcatatgggaaagggaggcacagagaaatgaagtaacttttcc

SEQ ID NO: 911243 - DNA, 120 bp, Artificial Sequence
  ENSG00000258256_3 (sequence is synthesized)
aagatcacacggttggttggtgggagaggtaaaccaaaaacccaggcctcctcactcagacctctgctcttgcctgaataaccatgttatttcgccacttcaaaataaaagtgagaccta

SEQ ID NO: 911244 - DNA, 120 bp, Artificial Sequence
  ENSG00000258256_4 (sequence is synthesized)
ggcaggagtgcgagaccgtgaacccggtccggggcgctcccgcctgcgtcctccagacggcagaggcgtgcggggaaggcgcccgcgccgctggctgactcctggggcgcgagtctctct

SEQ ID NO: 911245 - DNA, 120 bp, Artificial Sequence
  ENSG00000258256_5 (sequence is synthesized)
tagtttggactcgggaatgagagatttgagttagagggagagacggagagagaaaggtttccgggggggatctcctgccttctgaggagtcgtcactcgggagaggaaagtgttgcctag

SEQ ID NO: 911246 - DNA, 120 bp, Artificial Sequence
  ENSG00000258256_6 (sequence is synthesized)
aggacttccaggaagtgaatgagtcaccagagcctggaactgccaggctgggaggtggggatcccggtggaggcgtaaaagagatggaatttcgctcttgttgcccacgctggagtgcaa

SEQ ID NO: 911247 - DNA, 120 bp, Artificial Sequence
  ENSG00000258256_7 (sequence is synthesized)
acagatgtgagccactgcgcccagctgccattcaatggactattgtccatttataaaaagaatgaagatctccatgagcagagcagatataaagaagacttcttccaagttgctggagga

SEQ ID NO: 911248 - DNA, 120 bp, Artificial Sequence
  ENSG00000236581_0 (sequence is synthesized)
gggggagaatgggcatcccaccccagcactttctaggaagaagggcagcattttgaagggctggaagtagaggaaggaggttgcgggtagaagactccatactttctgtgacgcctattc

SEQ ID NO: 911249 - DNA, 120 bp, Artificial Sequence
  ENSG00000236581_1 (sequence is synthesized)
cttagcttgtgatgaatgttttctcagtatcctatgctgaaaacaggtagatactaatatcgatcttcaagggagggctgttgagtattgaataagacaaaaacatggaagcaatcagca

SEQ ID NO: 911250 - DNA, 120 bp, Artificial Sequence
  ENSG00000236581_2 (sequence is synthesized)
ccatgctgcaggaggaaaaacatctgaagaatatatttgtagacttcctggaaattgataagttgtctccataactaaagcaagcagattttactaattagaattatctacataatttta

SEQ ID NO: 911251 - DNA, 120 bp, Artificial Sequence
  ENSG00000236581_3 (sequence is synthesized)
agcttcagtgagtccatatcccatgtcacccacggcaaaggagactctaagacttctgaagagtttcttgcttctttcctgtggggcagtgactccacttcccagcagtaatggaatatc

SEQ ID NO: 911252 - DNA, 120 bp, Artificial Sequence
  ENSG00000236581_4 (sequence is synthesized)
ctgaattagctacattaatgttagaaccatttggacctcacccaggacttcaactacattatgagtaactcctggacgattggcacagaagaaggcacaaggcaaatacccatctctgta

SEQ ID NO: 911253 - DNA, 120 bp, Artificial Sequence
  ENSG00000236581_5 (sequence is synthesized)
caccctgtgctactgtgtcatgtgctgctccaggcaactccaatggattggccaccctggccaatgtgttctagtatgttacgtttatgttcccctgctttctacaatcctgttcaaaga

SEQ ID NO: 911254 - DNA, 120 bp, Artificial Sequence
  ENSG00000236581_6 (sequence is synthesized)
gttgctgacttaaccacagagaggattccagaacctgagacacagaataaacttgagcaatcatagtccatccacttcattgtctcatcaaaaaccaaaggtccagtgaagctctggaac

SEQ ID NO: 911255 - DNA, 120 bp, Artificial Sequence
  ENSG00000236581_7 (sequence is synthesized)
ggagcgaaggagcttctatacagagcctggatgcctgtctccttatcctacttcagtggacttgactgcaatccggattatgctgttttctaagcatttaaaataaaataaaaagtataa

SEQ ID NO: 911256 - DNA, 120 bp, Artificial Sequence
  ENSG00000236581_8 (sequence is synthesized)
ccatgctggaatcaaggctatctgtaatcacagggctatttgaaaaagagaagaaaaggtgtcttgaaattcaaccaacatgtttcaattatttgctcctaagaacaacagaagtttcaa

SEQ ID NO: 911257 - DNA, 120 bp, Artificial Sequence
  ENSG00000236581_9 (sequence is synthesized)
cattctgccaacagagtaactcctggaagattggcacagaagaaggcacaaggagagcctttatataaccaaagatatttttggaccatgaattcagaaattctcggagccacccatcag

SEQ ID NO: 911258 - DNA, 120 bp, Artificial Sequence
  ENSG00000236581_10 (sequence is synthesized)
catttaaaataaaataaaaagtataatagtgtgataagttctttcacaaagcaagcaatcacatttatgtttctacttacatttgggttttccaaatatgtgtgtgtgtgtgtgtgtgtg

SEQ ID NO: 911259 - DNA, 120 bp, Artificial Sequence
  ENSG00000236581_11 (sequence is synthesized)
tccatcatgttgcactaaatcaaaaccaccaaataatgatgtagaactaataaatcaaaaccatcaaataatgacatagaaatccaattctcccaccttacacccattaagatggctact

SEQ ID NO: 911260 - DNA, 120 bp, Artificial Sequence
  ENSG00000236581_12 (sequence is synthesized)
acccaggacttcaactacattatggatgttataagaaatgagactcactactgaattcacagcaggcatggttgaaggcaccattcactatagcttgcagtgttccctttatgagatttg

SEQ ID NO: 911261 - DNA, 120 bp, Artificial Sequence
  ENSG00000236581_13 (sequence is synthesized)
tatgagaaattcctctcataggtcaagttcttgggagaaaattctcccaaagagcaagtcccaggaaaatcttggctgagtaactcctggacgattggcacagaagaaggcacaaggcaa

SEQ ID NO: 911262 - DNA, 120 bp, Artificial Sequence
  ENSG00000236581_14 (sequence is synthesized)
caccagcactgagtagaaagaggctctgattcatgaaatgtgaatttatgacagttgccactcttaaaaaaaaaaacaaacagacagaacttgagcaatacatgactgatgcattctcag

SEQ ID NO: 911263 - DNA, 120 bp, Artificial Sequence
  ENSG00000236581_15 (sequence is synthesized)
aacttgtctcaactcaacgtcattcctggcattatcgaacaaagcaataaacctcacagaatggaagctacagtgtccagggccagctctgctaaggtaaccaaagacagagaaggaggc

SEQ ID NO: 911264 - DNA, 120 bp, Artificial Sequence
  ENSG00000236581_16 (sequence is synthesized)
ctaaagttacagaacccaaatttggcaactgtctgcatctgaacaacagaagtttcaacattctgccaacagagtaactcctggacgattggcacagaagaaggcacaaggccctccaaa

SEQ ID NO: 911265 - DNA, 120 bp, Artificial Sequence
  ENSG00000236581_17 (sequence is synthesized)
taggaagtcagtgataaaaatatttaagcagctttgtctgccttagaccttccaactaaaagtacagcaagtggaatggaatgctaatatgaggatccaaattttcagggaaggaggaga

SEQ ID NO: 911266 - DNA, 120 bp, Artificial Sequence
  ENSG00000236581_18 (sequence is synthesized)
caactacattatggtaagacaaagccagagctagaaggcaataatttcttccttctggctcaacagtacctatcttgtagagttatttgaggaatggttgtattcttgatgttataatta

SEQ ID NO: 911267 - DNA, 120 bp, Artificial Sequence
  ENSG00000236581_19 (sequence is synthesized)
ttaactctacccatataccgactcagctttctgttctgcctacccaagatagaatctttgtgtggttgttaattttcataaaaagatggtcatctggcctttactcagttgacttttaaa

SEQ ID NO: 911268 - DNA, 120 bp, Artificial Sequence
  ENSG00000236581_20 (sequence is synthesized)
gtatttgtggctggcctttttggaaaacatagaatacttgcaatgttcctctccaaaacacaacttcaaagtatctactgccaaatctatgcaagaagtatattcagagagaattatcta

SEQ ID NO: 911269 - DNA, 120 bp, Artificial Sequence
  ENSG00000236581_21 (sequence is synthesized)
agggaagcgtaggccacatactctcctagatcagcatttccaaaatgtgttccccagggaaagctggttttgcaatatgtgacttcccagtatcctgtgaaaagtggtttcaagatgaaa

SEQ ID NO: 911270 - DNA, 120 bp, Artificial Sequence
  ENSG00000236581_22 (sequence is synthesized)
tataccagtttaaacacagttaaactactttgtgcaagattttcctgagcctttcataagtctgaatttccaagggaaagggaatgtagcatttccaaaaatgacttaaccacagaaatg

SEQ ID NO: 911271 - DNA, 120 bp, Artificial Sequence
  ENSG00000236581_23 (sequence is synthesized)
ttttctcccttgaatatctgtctaatgggcctagtgttctgtgaagcagacttatagaaattgcctgtggataatctccatgctatttctaggttaagacagagaatctgaagactgcat

SEQ ID NO: 911272 - DNA, 120 bp, Artificial Sequence
  ENSG00000236581_24 (sequence is synthesized)
agcaagtcccaggaaaatcttggctggtaagttcttaccttaagaacagggaaaatcttcccttggttgtgttttcctctttgcttagatcagggaagctcaagccaaatttgcagccca

SEQ ID NO: 911273 - DNA, 120 bp, Artificial Sequence
  ENSG00000236581_25 (sequence is synthesized)
tttttgattattattcaaggccttacattttatatttccatgtgatatatcttcctagttttacctcattaattggccaacatttctcttttcatcagatttatcttttttgcaatcttt

SEQ ID NO: 911274 - DNA, 120 bp, Artificial Sequence
  ENSG00000236581_26 (sequence is synthesized)
agttatatattcttctataaatgacctcaaatcctctaggtaatgaggtggaatgtaaattaatatatagtatctttccccataccaaaatcatatttcaattgctccaagggagacggc

SEQ ID NO: 911275 - DNA, 120 bp, Artificial Sequence
  ENSG00000236581_27 (sequence is synthesized)
aaatattttttatgtggtctttagatcattcaaatatctggtgtgcaatgcatgttcaggttctcctatcttcttaagtcttcttgattgcctcactaccctgttgtcatagctaatgaa

SEQ ID NO: 911276 - DNA, 120 bp, Artificial Sequence
  ENSG00000236581_28 (sequence is synthesized)
acacagagaaagtgtgtactcttgttaatgacatgtctccactaaatctccatctatttatgtccctttatataagagttttgccaaaacccacttatcatttgttctctttttaaatct

SEQ ID NO: 911277 - DNA, 120 bp, Artificial Sequence
  ENSG00000236581_29 (sequence is synthesized)
agaccactagcagtgactgttttttctaacttgtgtttctgtgttcatgattaatttgctaatgaaatgaggaattttgcattgtaagagttgaccattgtccaaaatttgctaagaatt

SEQ ID NO: 911278 - DNA, 120 bp, Artificial Sequence
  ENSG00000236581_30 (sequence is synthesized)
aatggattggccaccctggccaatgtgtgagttataaagcaatgatgtgtagctattgaacctacaatttggttaaagttaaactctcaagttttatatgtttacaagcatattgtcctt

SEQ ID NO: 911279 - DNA, 120 bp, Artificial Sequence
  ENSG00000236581_31 (sequence is synthesized)
ttgttaatttcctcccagtactcatttcttgacttcttttagttttactatgtagtaatttttaaaatgttagtcaaagttagttaatttaattcacttagcagattttcctgtaatttt

SEQ ID NO: 911280 - DNA, 120 bp, Artificial Sequence
  ENSG00000236581_32 (sequence is synthesized)
tagagaaagggcaattccaaaagaacaaatgattgcttaatttaggctgacattacccagttgctgggggtatgggccatggggatgggccatgttcaccacttaggttgggcaaattcc

SEQ ID NO: 911281 - DNA, 120 bp, Artificial Sequence
  ENSG00000236581_33 (sequence is synthesized)
caagatgccttttgacatagtaatgagggggaatacatcactcatgcccactggcattctctggggaaatttttaaaaggcagtatatcccactccagttgagttcaaatcaggtgccat

SEQ ID NO: 911282 - DNA, 120 bp, Artificial Sequence
  ENSG00000236581_34 (sequence is synthesized)
atctacttaaaaatagcctcagatagaatggcaactcaaatgacagtttaactttcactactttctcggtagtgaaactttctacattccacattttctatcaagaaaagaaagaggttg

SEQ ID NO: 911283 - DNA, 120 bp, Artificial Sequence
  ENSG00000236581_35 (sequence is synthesized)
tattgtgaggtaagaggcacacacacggacttccttcagtagctgcaatccttgctataggtcaggcatcaagacaattccactttacaggcctggattttggagaaagaaaggtgttta

SEQ ID NO: 911284 - DNA, 120 bp, Artificial Sequence
  ENSG00000236581_36 (sequence is synthesized)
caagtttctgtataattatagttatactgacatttaaatagttcaacagactggacttcctaacattcctattacatcgatattaatgaaagcatgacacaggtttcaaggaagcatgtc

SEQ ID NO: 911285 - DNA, 120 bp, Artificial Sequence
  ENSG00000236581_37 (sequence is synthesized)
caggtatatgctgaatgacataataagaaaaatgtaaatatgcattgcttttgtcttaaggtaatacttgtgattgcagaatcctagaatgtagagatgatggggacttcagagattctt

SEQ ID NO: 911286 - DNA, 120 bp, Artificial Sequence
  ENSG00000236581_38 (sequence is synthesized)
taatccaaaccctttatttaatggaagaagggaaaaaggtctagagaagctgtgacttctctcagatcacacaataaattagttgctgaggtagaacaaaaacctaacttccactttacc

SEQ ID NO: 911287 - DNA, 120 bp, Artificial Sequence
  ENSG00000236581_39 (sequence is synthesized)
atttccttgagaaactgtagaacaattgtaagccactgatatattccacataataaagccgctctgttgcctttttaggttctagtatgttacgtttatgttcccctgctttctacaatc

SEQ ID NO: 911288 - DNA, 120 bp, Artificial Sequence
  ENSG00000236581_40 (sequence is synthesized)
gggcatcccaccccagcactttctaggaagaagggcagcattttgaagggctggaagtagaggaaggaggttgcgggtagaagactccatactttctgtgacgcctattccttagcagga

SEQ ID NO: 911289 - DNA, 120 bp, Artificial Sequence
  ENSG00000236581_41 (sequence is synthesized)
cttaaaggttaataaactctgctgacaacctgcctatccatgacaaaccctgagtcttttcatgggtgattcagtggaaatattctcccgtagtcagaggcatggcttgcctgggcctct

SEQ ID NO: 911290 - DNA, 120 bp, Artificial Sequence
  ENSG00000236581_42 (sequence is synthesized)
gtgttaaaacataaccaaacactccaggaccttgggaaagaaatctgtatcagacatgtgggcttcattaagggaaatgccttcagaagattatttttccatgttatgagaaaaaatctc

SEQ ID NO: 911291 - DNA, 120 bp, Artificial Sequence
  ENSG00000236581_43 (sequence is synthesized)
catcccaccccagcactttctaggaagaagggcagcattttgaagggctggaagtagaggaaggaggttgcgggtagaagactccatactttctgtgacgcctattccttagaaattctc

SEQ ID NO: 911292 - DNA, 120 bp, Artificial Sequence
  ENSG00000236581_44 (sequence is synthesized)
ccatgtcatgtgctgctccaggcaactccaatggattggccaccctggccagtgataacacataaaaattccactcagtattgggaccaatagataatgaacacagtcagtggaattcct

SEQ ID NO: 911293 - DNA, 120 bp, Artificial Sequence
  ENSG00000236581_45 (sequence is synthesized)
tcgcaggcttcttcaagatattctgcaagactgatttcccttcttcttgccaagattttttcctccttcttctaggaagtcagtgataaaaatatttaagcagctttgtctgccttagac

SEQ ID NO: 911294 - DNA, 120 bp, Artificial Sequence
  ENSG00000248211_0 (sequence is synthesized)
caggagcctggagagaatggctcggcacagcagatgcagccgtggtggccatggagctgaccagcctcttgggagtgagctggccacctgagcacggtccactcagcccacacaagcagc

SEQ ID NO: 911295 - DNA, 120 bp, Artificial Sequence
  ENSG00000248211_1 (sequence is synthesized)
aaccttgtggttagaagtccaatgggtctaggctgtgggaatcttcttattaaccacaaacagatgtcaaaaggatctttcctaatactgtagatactgcacttggctcgtgtgggagtc

SEQ ID NO: 911296 - DNA, 120 bp, Artificial Sequence
  ENSG00000248211_2 (sequence is synthesized)
cactgtctgtggaaacattactcgtctatttttcaggtctgcagagcccagactgaaaaacacattaaaaaaatggttttgtgaaaaataacaattcagacaccctggagcctaaggaaa

SEQ ID NO: 911297 - DNA, 120 bp, Artificial Sequence
  ENSG00000224605_0 (sequence is synthesized)
cacatagaaatacagatagacccccattccatggaatccaatattcccagacattatcctcaatatgtgtcctccaaccacaacatattttttttataaggaagaatttgtaactgaagt

SEQ ID NO: 911298 - DNA, 120 bp, Artificial Sequence
  ENSG00000224605_1 (sequence is synthesized)
aaatacagattgctgtccagggcaccagcgaatgctgcacccgttcttggcatatcatccttctcgtaaaaggcaatcatggcaggaaaactgagaccaatggctttttcattctccacc

SEQ ID NO: 911299 - DNA, 120 bp, Artificial Sequence
  ENSG00000224605_2 (sequence is synthesized)
tctcagctctccatagtaacggcactggttcttctcattgtgtattccttttcagatgcatactttctccctttaacaacttttttatatataatttaaaaaataaattattcccagaaa

SEQ ID NO: 911300 - DNA, 120 bp, Artificial Sequence
  ENSG00000224606_0 (sequence is synthesized)
tgagcacagagaagccagttatgcaaactacagcagacccttcctgtctcaattcagcatccagcgtctactgttagccagtgactgggcctgttcctcaaccactcaagccaagcacat

SEQ ID NO: 911301 - DNA, 120 bp, Artificial Sequence
  ENSG00000224606_1 (sequence is synthesized)
cccaaaatagaagcataagaggacctgttgaaagaagcagtggagactatatcgatggagctgtcttgaaatagctacataccatgcctcaaatttactttggacaaaatgggagtggaa

SEQ ID NO: 911302 - DNA, 120 bp, Artificial Sequence
  ENSG00000224606_2 (sequence is synthesized)
aaaaataagcccaaagtgctgcctggtcagcaggtctgttgtgcatgacggtgctcctgaattggctggctatttttattcctgtctgaaagccagggatggaaaaccctgagaggtttg

SEQ ID NO: 911303 - DNA, 72 bp, Artificial Sequence
  ENSG00000224607_0 (sequence is synthesized)
ccagggaaagttcctaagctcctgatctatgctgcatccgctttgcaatcagggggtcccatctcggttcag

SEQ ID NO: 911304 - DNA, 120 bp, Artificial Sequence
  ENSG00000224609_0 (sequence is synthesized)
ggcctcttttccaggattccaggacagggttctttctaataggttaccccagtatgatctggaattttaaaaagaagtaaaagcagttgaagaccacccacttgctataatttgaaaggc

SEQ ID NO: 911305 - DNA, 120 bp, Artificial Sequence
  ENSG00000224609_1 (sequence is synthesized)
ttgttctcccctcccttcatctctttgaatcctgcttcacagacattgttgtctttgggaccaatacatttcttctatctgcatatctgggtagaagctctcatggaagaaaaaagaaaa

SEQ ID NO: 911306 - DNA, 120 bp, Artificial Sequence
  ENSG00000224609_2 (sequence is synthesized)
gccccataggtgaaggggagtgtgcctgccaagttccttgtaataacttcacacgcagagtattttctgaaatggatctgctagagtcatctcatggaatcttctcattcttctggagtc

SEQ ID NO: 911307 - DNA, 120 bp, Artificial Sequence
  ENSG00000224609_3 (sequence is synthesized)
attttacaggaaaaacatccaggcaagtggacagcatttgcaacagcccagcaataagaaggaccatattctacttgggaaaaggtaaagtcgtttcatatggacggagcctgccaggaa

SEQ ID NO: 911308 - DNA, 120 bp, Artificial Sequence
  ENSG00000224609_4 (sequence is synthesized)
acctgtcattcaaccctttgcaataaaacagctcctcatgaatgaagcaaaataaatcagaagttgtgggcttttaaactcactaaatgaaagcacagcatgcatgcagcctccctccaa

SEQ ID NO: 911309 - DNA, 120 bp, Artificial Sequence
  ENSG00000224609_5 (sequence is synthesized)
attaatcaccagattaaatgcaagatgtgcacaccaaatcaatagcttgtgacggggacctcctgcctgtgcttcaggaaaattccatttcctttcagatgttgtcgcttgaaatgtcag

SEQ ID NO: 911310 - DNA, 120 bp, Artificial Sequence
  ENSG00000224609_6 (sequence is synthesized)
gaagtttccattcatcacccgcccttgaaaatgccaccatcaccatacttcatgtttccttgctttctttcttcagaggaatccaagcaccttgcagagggagcccactccttgtcacag

SEQ ID NO: 911311 - DNA, 120 bp, Artificial Sequence
  ENSG00000224609_7 (sequence is synthesized)
acagggccgggtgttgctgactcagtgctgaagagggcaccttgtcagccctcctaggctcccaactccccctctccctccccttcctccccagaggacactgaaggaaagcagatgcgt

SEQ ID NO: 911312 - DNA, 120 bp, Artificial Sequence
  ENSG00000224609_8 (sequence is synthesized)
ggcccgcgtgaaaccctctctgctgcctcgactgactgtcgtttccgtgtcttgattgtggcctctgcctctcccccttccgatttcgttcgacttctttctacagttactaagcgccca

SEQ ID NO: 911313 - DNA, 120 bp, Artificial Sequence
  ENSG00000224609_9 (sequence is synthesized)
atatggacggaggtgagttcaagggggaaaagaaatggaacttgccaagtaagtggaggctggctcttaaagtttgttcttcaggcaatggggagccattgataagatgttagttagaga

SEQ ID NO: 911314 - DNA, 120 bp, Artificial Sequence
  ENSG00000224609_10 (sequence is synthesized)
gtgcttatgttaattctcaatttattattaaaatactttgaatattttaggaacatatttcgagctctacacatacttcttgtattttggtggtcttgaagtcacagggcagagctagga

SEQ ID NO: 911315 - DNA, 120 bp, Artificial Sequence
  ENSG00000224609_11 (sequence is synthesized)
ttaggtccttagttttctcatctctaaatgaagaaaaagaaaagcaagggattggcaagcttaacatgctcaatagtttttctttgctgaactattcccggagggtcaaccagccttcaa

SEQ ID NO: 911316 - DNA, 120 bp, Artificial Sequence
  ENSG00000224609_12 (sequence is synthesized)
cattcgagcaccaggaagaccaggtttgccccatcaagtacctcaagaaagaagtcaattacctaaagaagtcaagcaaagaggaaaggacaaaatgaaaatcatgtaccagggtacacg

SEQ ID NO: 911317 - DNA, 120 bp, Artificial Sequence
  ENSG00000224609_13 (sequence is synthesized)
aagctggaatgaatatggccttcaacatactctttatcatacagaagcttgtgttcagggcttggattttgaagtcagacagacctggattaaaaaccaattcaactacctattacatat

SEQ ID NO: 911318 - DNA, 120 bp, Artificial Sequence
  ENSG00000224609_14 (sequence is synthesized)
aaggaatggtaccagctcttctttgtacctctagtagaattcggctctgaatttggttccactctccccatcactttcaggtacaccaaccaaagacattgttgtctttgggaccaatac

SEQ ID NO: 911319 - DNA, 120 bp, Artificial Sequence
  ENSG00000224609_15 (sequence is synthesized)
tgagggagttcgaggtttgggagacagtttagcagtcgctgagtccaaacatgttgttttcctagaaaagaaaactgagatccaggaaagggaagtgattttccaaagacacacctgtga

SEQ ID NO: 911320 - DNA, 120 bp, Artificial Sequence
  ENSG00000224609_16 (sequence is synthesized)
aaggtaataatttcactgaacggatcttaagtggcaggtgcactaagattgtctgctatcttcacaacaaccccgaagtaaataagtgctcttatcttggtcttacaggtgaggagaaca

SEQ ID NO: 911321 - DNA, 120 bp, Artificial Sequence
  ENSG00000224609_17 (sequence is synthesized)
gcccagtgaggctgaggccacacaattaaccccagtctttgcactacaactctaccagggatcctggtttggctcattttctttcttctgcaccatgattgttcaccttttcattaccag

SEQ ID NO: 911322 - DNA, 120 bp, Artificial Sequence
  ENSG00000224609_18 (sequence is synthesized)
caacatacccaaagacctagctatagactcgttggaatctgttacttagcagctgtgtgaatcaagtgttcaataggaataataagatgtattcatcttaccttttcagaacattatgaa

SEQ ID NO: 911323 - DNA, 120 bp, Artificial Sequence
  ENSG00000224609_19 (sequence is synthesized)
gaacaaatgtggtaagacatatgaaaatgctttgtaaagtgttagatgcttaatacacagaagacattgcttccagatctgtttcaacgtaccccaagaatggaataagtggaatatgct

SEQ ID NO: 911324 - DNA, 120 bp, Artificial Sequence
  ENSG00000224609_20 (sequence is synthesized)
ggtttcatgcactgtggcaagggggtctcatcttggctagacttgaataagtggatttgttgcctggcctctgtggatggctctttctctgggcttttgtgtatttgattttttatttgc

SEQ ID NO: 911325 - DNA, 120 bp, Artificial Sequence
  ENSG00000224609_21 (sequence is synthesized)
tccagcagccgtgttgaaccatgaaaggacctcaggaatgaaacccacacacagcaaagcaacaaagtgaaagaagcgtggattcctaatgcaggaggcactgaaccaatcaatacccac

SEQ ID NO: 911326 - DNA, 120 bp, Artificial Sequence
  ENSG00000224609_22 (sequence is synthesized)
tgccctccagacctccacatgaaagaaaaaaactgctgtcctgtgaagaagacactccccagatgccagcaacttgatattggacttcctgcctttagaaacgtgagaaataaatttttt

SEQ ID NO: 911327 - DNA, 120 bp, Artificial Sequence
  ENSG00000224609_23 (sequence is synthesized)
ttctttataagttacccagcctctggcattctgttatagcagcacagaacagactaagacagccactgaaaccagatctatgtcccggaccaccctcatttgcctcaatttctctctata

SEQ ID NO: 911328 - DNA, 120 bp, Artificial Sequence
  ENSG00000224609_24 (sequence is synthesized)
tataataagaacaaataatgcaaatgctatctatacttccccgtgactacagggagactaagggatgaaatatataatcacactttgaaaatatataaatgttatccaaccatacatcca

SEQ ID NO: 911329 - DNA, 120 bp, Artificial Sequence
  ENSG00000224609_25 (sequence is synthesized)
atagcttcctctgtaccctttagtttcctgcccttatctctatcacaggccatatatcaaatgcctagtaattatcagtgcatctatatattccctattctccccaacaatacataaaag

SEQ ID NO: 911330 - DNA, 120 bp, Artificial Sequence
  ENSG00000224609_26 (sequence is synthesized)
gttattgcattgcattgaattataagacttgattactggaaagtctagacatcactcagggtcattgtggggcagcatggggattatgcagtgtcattatccactaagcacactggaggt

SEQ ID NO: 911331 - DNA, 120 bp, Artificial Sequence
  ENSG00000224609_27 (sequence is synthesized)
cacaccagtgaagtagcacgtcagatgtaagcaagacagagctgggttgtgaaactctggaaccagctgagctgaaagtttgtgtaatttccttcctgctcagagatggttccatatagt

SEQ ID NO: 911332 - DNA, 120 bp, Artificial Sequence
  ENSG00000224609_28 (sequence is synthesized)
agacagagaggagacacggagcttctctggtaagctgtggaggccctgtaatgctctaactgcattctatgaaagcttttcctgcattagcaacctgcccattaccagagaaaagagata

SEQ ID NO: 911333 - DNA, 120 bp, Artificial Sequence
  ENSG00000224609_29 (sequence is synthesized)
ttttccctaagattcttagaatcatagcacagaaatagatcttattattcatttattcattcctacatttatgtattcattcattcaacaaagatttattgagtactgttctaggcatta

SEQ ID NO: 911334 - DNA, 120 bp, Artificial Sequence
  ENSG00000224609_30 (sequence is synthesized)
aagagatagtgtttgagatgaacagatattttccttgtcctcatggaacttacagtcaggaaacacattaaagaaataaacacacaaatatgtagttgattcaagtgcaagtagaaagga

SEQ ID NO: 911335 - DNA, 120 bp, Artificial Sequence
  ENSG00000224609_31 (sequence is synthesized)
aaacagaaaactgtaagagagggaagctgattttgattgaagtttaatttagagtggggattttgaagaggcagataacattacacacattgtttctggtctcaacaactctatgaagtg

SEQ ID NO: 911336 - DNA, 120 bp, Artificial Sequence
  ENSG00000224609_32 (sequence is synthesized)
cctattatcacaactattgtacagatagggaaaccgaggtttatggaaattgggtgactgggctagggaagcactattagtaagtttggagcaggttgtgctctctctggtactccgtgc

SEQ ID NO: 911337 - DNA, 120 bp, Artificial Sequence
  ENSG00000224609_33 (sequence is synthesized)
tgcataacagaaacccggaaggtgaaaattttcccacttcccacctttgcacataccatgcctacttccacctaaaatgcctctcccttcattcttattggattcatattctgccatcag

SEQ ID NO: 911338 - DNA, 120 bp, Artificial Sequence
  ENSG00000224609_34 (sequence is synthesized)
tatctagttgaggatgtacctcctctgtaaagttcctccttctatctcaataaatctcttttcttgtaggattcctgcaacaatcatcaaatattacttacatggccttgaacctaggat

SEQ ID NO: 911339 - DNA, 120 bp, Artificial Sequence
  ENSG00000224609_35 (sequence is synthesized)
agcttgtcaagttaattctctttttcacatgcttgccctgatgctcttactcagaggcctacagacagtacaatgccattagagccagacagacttgggccttctcccagttctacagat

SEQ ID NO: 911340 - DNA, 120 bp, Artificial Sequence
  ENSG00000224609_36 (sequence is synthesized)
agcatttgtcccctccctcctcttctttttttttttttttttaatttaatctaaaggaaccttgcttctggaagacctcacagtagaattaaaaagcctacttttatctgacttctagag

SEQ ID NO: 911341 - DNA, 120 bp, Artificial Sequence
  ENSG00000224609_37 (sequence is synthesized)
agttgcaattaaaatgtacatcttaccttgactcatgccaacaagttaagctgttatcagctattaacacctcaaccagaattagtttattaacctaaagcagacagctttatcctatgg

SEQ ID NO: 911342 - DNA, 120 bp, Artificial Sequence
  ENSG00000224609_38 (sequence is synthesized)
aggtcgcctacttgagataaactattattcacatactttcacttttgtgccactcactcattcaaagaaaaatattcagtcgttcaactatttattgagcacctagtatgtgccagcatt

SEQ ID NO: 911343 - DNA, 120 bp, Artificial Sequence
  ENSG00000224609_39 (sequence is synthesized)
aaattttctagcagccacattaaagaaagtgaaaagacataggtaaaagtaattttaataatttaacccaatatgccctaaatattatttcaatatgtgatcaatataaaaattatcaat

SEQ ID NO: 911344 - DNA, 120 bp, Artificial Sequence
  ENSG00000224609_40 (sequence is synthesized)
aaaatattttacatttactttttttttaatgctgtgtctttgaaactttgtgtgtatgttacacttccagcacatctcagttcctgctaggaacatttcaaatgcttaatagccacattg

SEQ ID NO: 911345 - DNA, 120 bp, Artificial Sequence
  ENSG00000224609_41 (sequence is synthesized)
gctagtggccactgtgctaatcactgcaattctagacacttggagaacagctatggaaagacaaaggtagaaagtcagtaaactcatgaacaaataaaataatcataagtagtgttcaat

SEQ ID NO: 911346 - DNA, 120 bp, Artificial Sequence
  ENSG00000224609_42 (sequence is synthesized)
gctaggaagaaattaaaacaaagtaatgacatagaatgatggacattacctcatttaaccttttcaattcccccctcaagttgaataatagtatataacaatgttataggccgggtgtgg

SEQ ID NO: 911347 - DNA, 120 bp, Artificial Sequence
  ENSG00000224609_43 (sequence is synthesized)
gtccaggtgctctcctgccgccaacacagccctaatgagctctgcatattcaaaacacaagtaattgatagtccaatttaaagtgtgcagaggccaaatttctttccagacgctgaagga

SEQ ID NO: 911348 - DNA, 120 bp, Artificial Sequence
  ENSG00000224609_44 (sequence is synthesized)
atcgtaaagaagcctaatgtcttgttgcaacatctgaaagaaacaagatgaatatattccactaggtgggaagcttagggtagtgggaagaacatggattcaggactttgagaaacatgg

SEQ ID NO: 911349 - DNA, 120 bp, Artificial Sequence
  ENSG00000224609_45 (sequence is synthesized)
atttaaattttgatccccaatgcctctctgcacttcactgttatctataaaatagaggaaataaaaatactatacattcaagtcttaacaccaacagttaactagttgtgtaaccttgga

SEQ ID NO: 911350 - DNA, 120 bp, Artificial Sequence
  ENSG00000224609_46 (sequence is synthesized)
caagttatgtgacctctctgtctgagcattgtcatttgtatatgagatcatggaggttaaatgtccaacctgttgtcactgtgcacctcaaaataataaataaaacatttcatctctcaa

SEQ ID NO: 911351 - DNA, 120 bp, Artificial Sequence
  ENSG00000224609_47 (sequence is synthesized)
aggctgcgagttcccggctctggggactcaccttgcggagcttacccaggcggactctccgcagcccctgatgggtgtgtgtgtcagaccgtttactaaacaccaggactgttgtaggcg

SEQ ID NO: 911352 - DNA, 120 bp, Artificial Sequence
  ENSG00000224609_48 (sequence is synthesized)
cactctctctcttccaaattcaccctgtcatatcaaagggaaaactgaagtggtccactgtagacctgacagatgatcacaaacaggaaaccagcaatcagaagtgcctactgagctccc

SEQ ID NO: 911353 - DNA, 120 bp, Artificial Sequence
  ENSG00000224609_49 (sequence is synthesized)
taccctgaccatcacctacagctacattttacagatacaaaatcattgtttgttcaactttcatatcaaaggatgctattagttcatttccaaaggtgggaaaatgtttcaacttacttt

SEQ ID NO: 911354 - DNA, 120 bp, Artificial Sequence
  ENSG00000224609_50 (sequence is synthesized)
attacttgtctgctacttactattttccctccgtttgcctgcctgacttcttttaactcttcactcaacaaatatctactgactactgagcacttgccaagtgctaggccagagctggat

SEQ ID NO: 911355 - DNA, 120 bp, Artificial Sequence
  ENSG00000224609_51 (sequence is synthesized)
gctgtactacgggcagatgaagtgctatgggcatccagaggtggaagaagagggtatagcgaaaggggagaaaaggctgcaacaatattcactgagccctgtgctcccaggtcatcacat

SEQ ID NO: 911356 - DNA, 120 bp, Artificial Sequence
  ENSG00000224609_52 (sequence is synthesized)
agcaacttgcccaaggtcatctatcacaagacactacaagtcagactgctgaagagggagtttctgctgagaagctgaagtgggcagctcatattggatatgaaggcttcaaaggaatct

SEQ ID NO: 911357 - DNA, 120 bp, Artificial Sequence
  ENSG00000224609_53 (sequence is synthesized)
aaatcctaatgatccctctagagccaacatgcagcaccagttttctcttccacatttgaactgctcatccacttccggctccaagacctcactctccatctaaactagtcccacgccatc

SEQ ID NO: 911358 - DNA, 120 bp, Artificial Sequence
  ENSG00000224609_54 (sequence is synthesized)
catatctttctccactaacgccacccaatcacaaccccacagcctcttagtcatgagtcattttttaaaaactgcaaaccatgtaatgagccatggcaatatgcaaccctaaacctcaac

SEQ ID NO: 911359 - DNA, 120 bp, Artificial Sequence
  ENSG00000224609_55 (sequence is synthesized)
acgtgttttccacaacaaggccacaggtggcagaagcgagcctaaggccgtaggacactaaggcaggactctctggcttgagctttccaaaaagggaggtgagagaaggtctacctgcgg

SEQ ID NO: 911360 - DNA, 120 bp, Artificial Sequence
  ENSG00000235584_0 (sequence is synthesized)
ggggctcgccatgccctcgcctcctggagttgaattcttccgctcgcacatggtggttcctctttctgaggcagcaccacgcacctgtgccctccagtggctgcatttccctgggactgc

SEQ ID NO: 911361 - DNA, 120 bp, Artificial Sequence
  ENSG00000235584_1 (sequence is synthesized)
atgctgaggggatgtcacccagagaccccgacccccctcaacacacagcaccgttgttactttgcctcattttcctgctcccatgtcccagggagccagtcagtaccgcatagtagggca

SEQ ID NO: 911362 - DNA, 120 bp, Artificial Sequence
  ENSG00000235584_2 (sequence is synthesized)
attgatcggttctggctaatccataagggaggggagatctcagcctgccgcccaatggggagcatgtggcactctggaaagagcatgtgctctagagccagagggcatgggttcaaggtc

SEQ ID NO: 911363 - DNA, 120 bp, Artificial Sequence
  ENSG00000235584_3 (sequence is synthesized)
tcccttctacctttctagctgtgtgactttggggaagctgcttgacttctctgagtctccacttactaatctataaaagcagaagtcggatgggagctgagaggaggactctcacaagca

SEQ ID NO: 911364 - DNA, 120 bp, Artificial Sequence
  ENSG00000235584_4 (sequence is synthesized)
acctcagaggattgggaagaggacctgtggactgggcggcccacacaactgctgtaacctcaggcagttttcaagcagattgaccttcctgctggaacacggcacatgaggtgaagttct

SEQ ID NO: 911365 - DNA, 120 bp, Artificial Sequence
  ENSG00000235584_5 (sequence is synthesized)
agagagggaagtggcagacagtctgggcccagcacttgggtatcgtgctctagccatgcgactcatctctccagttcagacctgcccctggaaaaaagagcccagacctcatcatgaatg

SEQ ID NO: 911366 - DNA, 120 bp, Artificial Sequence
  ENSG00000235584_6 (sequence is synthesized)
ctttcctaggagaaaatgaacagctggacaatgctcctggtcagtaggcctgaaggatgctgggatgcagccctcaagatggaacagccaggatgccaagtatccctcttgcccagatcc

SEQ ID NO: 911367 - DNA, 120 bp, Artificial Sequence
  ENSG00000235584_7 (sequence is synthesized)
taaggcactttttctactgatccatattggcctcaggagatgtctcaacacagcaccccagccaatggagctgccacataagatgaactcttgatcatctctaaactagagagttaaact

SEQ ID NO: 911368 - DNA, 120 bp, Artificial Sequence
  ENSG00000235584_8 (sequence is synthesized)
caacactagcaaacgactttgggtttatgcatatgtcatgttttctctggcaactgcacagaatcatctctaaatatcacatctatggttggcaggagtggcatgtataatacaaaatgt

SEQ ID NO: 911369 - DNA, 120 bp, Artificial Sequence
  ENSG00000235584_9 (sequence is synthesized)
ctggtggccctactgtcacaaaacctgtataaaagtaaattcacaaatggctttttagaactgatgacaaaaagttactcgttatcacttttctaattaatttcctaaaagggcaatttg

SEQ ID NO: 911370 - DNA, 120 bp, Artificial Sequence
  ENSG00000235584_10 (sequence is synthesized)
aaatcatactgggattctcacaattttggttgacagtcaagtaaattgcagctacttatcaagcacttttgaatgaatacatgaagaatgaataaaatgaaagctctcctgttgccctca

SEQ ID NO: 911371 - DNA, 120 bp, Artificial Sequence
  ENSG00000235584_11 (sequence is synthesized)
gcccagctcagttcctcattttataagtaatgtttaagagcaatgacccactcctactttcagcaaagaggtgcacatagcatagacccatagaagaggaaggatctgagaaggagtttg

SEQ ID NO: 911372 - DNA, 120 bp, Artificial Sequence
  ENSG00000235584_12 (sequence is synthesized)
aaaaaagtgtaggagaggctgcgagaaaacaaggcaggtgtcctggctgagggcaggaaggagacattgcgatggaaattgtgccccattttcttggaggattgggaagaggacctgtgg

SEQ ID NO: 911373 - DNA, 120 bp, Artificial Sequence
  ENSG00000235584_13 (sequence is synthesized)
gaggccacatgtcctccctgtggctgcctggtcattccccttcacctagcagctgtcttgctcccatgtagaacagcagggcccagcggccacctgcacctcgccatttcctccagctct

SEQ ID NO: 911374 - DNA, 120 bp, Artificial Sequence
  ENSG00000235584_14 (sequence is synthesized)
gtgctagaaatgatgcaagcaggaaaaccatttgcttgtggacctactatgtgtcaggcacctgctgaacagtagcatttgatgctctcgacggccttaacaggtcggcactgatctgtt

SEQ ID NO: 911375 - DNA, 120 bp, Artificial Sequence
  ENSG00000235584_15 (sequence is synthesized)
gatgctgcagttgaggagctttagcttagagaggttaaatagcatcctcaaagtcacccaggtcatgctctgcttctggagaggctgggatgcagcatgggagtgtgacctcctgagcac

SEQ ID NO: 911376 - DNA, 120 bp, Artificial Sequence
  ENSG00000235584_16 (sequence is synthesized)
ggactgcacgggccgcctcgcagccggcatggtgaggtgagatgagttgagggttgcttggccttgcctccaccatgcctgacactggcgctctgctgggaggaaaaagcttgctctgtt

SEQ ID NO: 911377 - DNA, 120 bp, Artificial Sequence
  ENSG00000238358_0 (sequence is synthesized)
cacttttgtaaaataatgtacacaggcttgcacactgaaagactcagagccatttaaccatataaccactgcagaatctttaacttcttttttaactgatttccaattggcaggtgttgc

SEQ ID NO: 911378 - DNA, 76 bp, Artificial Sequence
  ENSG00000238358_1 (sequence is synthesized)
taacttcttttttaactgatttccaattggcaggtgttgctaaaactttatcaccaaagttatttcactggctgaa

SEQ ID NO: 911379 - DNA, 120 bp, Artificial Sequence
  ENSG00000238358_2 (sequence is synthesized)
aatccctgatagagctgggtcaatttcaggcacagcccagccgagtcaggcgaggtccagaaaggcctgactcgcctggcagcctcaacggtcttgtccccgcagccgttgcggacctac

SEQ ID NO: 911380 - DNA, 120 bp, Artificial Sequence
  ENSG00000238358_3 (sequence is synthesized)
cggtcgtcatggcgactgtgaaatgtcgggtggggcgcatgcgttcgaagccattcgcgccggcagtccctgcgtgttcccccacgtgctcccaagcgcgcagcacccccgcctccgcgc

SEQ ID NO: 911381 - DNA, 120 bp, Artificial Sequence
  ENSG00000258874_0 (sequence is synthesized)
agtggaaatgctacttgtaaaaccatccttagctccaggatcgtagagctatcactgagacaattgcgcagtgagtgacaagagagataagcggagaatgtgagccatctatgagacaga

SEQ ID NO: 911382 - DNA, 120 bp, Artificial Sequence
  ENSG00000258874_1 (sequence is synthesized)
agtaaggacgctgtggacattttctgaagttggagaaatggaatggtggagaagccagtattggggtaccatgagtggagcagagttgactacaaatctcaataaagcttttcaactgta

SEQ ID NO: 911383 - DNA, 120 bp, Artificial Sequence
  ENSG00000258875_0 (sequence is synthesized)
gtggtcccctctctgctcagcctgcctgagctggtctgagggtcctgatttttcaccagtgccttcccttctactgttccctgaggacaggcacccccagatggaaactctgacttgccc

SEQ ID NO: 911384 - DNA, 120 bp, Artificial Sequence
  ENSG00000258875_1 (sequence is synthesized)
tgtcgagggccctgcacttgccaggtcatgagctatgaagttgatttactgacccatgaatgggtcacaacccgcagtttggaaacagctggatggacccccacctgtgctttccagctt

SEQ ID NO: 911385 - DNA, 120 bp, Artificial Sequence
  ENSG00000258875_2 (sequence is synthesized)
ctcctagagcctcagggccccaggaaggcagtgtggtctctgcaaccaggtccttctcctgggagaaacacttcaacttttgcaaaagattcattaattcatcaccatggcacccagaaa

SEQ ID NO: 911386 - DNA, 120 bp, Artificial Sequence
  ENSG00000258875_3 (sequence is synthesized)
cgaaaatattccataaatggaaaaacgtagatgtagagaagaactaagccacatctgtcgagggccctgcacttgccagatcgcctcactccagcaacaacgtggaccatagcatctcac

SEQ ID NO: 911387 - DNA, 120 bp, Artificial Sequence
  ENSG00000258875_4 (sequence is synthesized)
gccctctgactgcctaaccaacagaaatagcatggaagcgacactgtaccggtttttgaggctaagcctgaagagactggcagttcccacttcctgtcatctgggaataattgttcttga

SEQ ID NO: 911388 - DNA, 120 bp, Artificial Sequence
  ENSG00000258875_5 (sequence is synthesized)
aacctaagtgctatgctgtgaggaagccaagcagcctcgatgacaggcccacatggagcggaaccaaaccctggccagcagcccctgctgcacccctagctgacagccaggttcgacttg

SEQ ID NO: 911389 - DNA, 120 bp, Artificial Sequence
  ENSG00000258875_6 (sequence is synthesized)
tcttgcataccagtatgtcatcctggatgaggatcccctagtagggccatctcagctgatgctccaaggagcagagatgagccatccccaccaagccctgcaagaaagactgccaactaa

SEQ ID NO: 911390 - DNA, 120 bp, Artificial Sequence
  ENSG00000258875_7 (sequence is synthesized)
ttacaggcgtgagccactgcgcccggtctaagttaatatctttaaatgtggtttgttatgcagcaatagataacaggaacataaattatttgtctccccaaatcactttagggcctatca

SEQ ID NO: 911391 - DNA, 120 bp, Artificial Sequence
  ENSG00000258875_8 (sequence is synthesized)
tttgtctccccaaatcactttagggcctatcatgtgctggattcattcatataattatttgatttcaatttttataacaattccttgaggtgtaggtattatcatctccactctccctat

SEQ ID NO: 911392 - DNA, 120 bp, Artificial Sequence
  ENSG00000258875_9 (sequence is synthesized)
gagatagtgagactcagaaagttaaaatatcttgtttgaggccaaccagctaggaaagatgaaacaggaattctgatgctaaagctcattcctctaccaccatcatcatcatcctcaccg

SEQ ID NO: 911393 - DNA, 120 bp, Artificial Sequence
  ENSG00000258875_10 (sequence is synthesized)
tggctggtgccaagtgctcctccttccctcaggggtcttcagtcaccagcccctctttgggtccacccactgaagtccaccaacctctggacaccttcacactttacatttgctgccttg

SEQ ID NO: 911394 - DNA, 120 bp, Artificial Sequence
  ENSG00000258875_11 (sequence is synthesized)
aacctgttttccactttgtttcctgttagctgagtcttctcttctgacagtgtgcaccttacccagaagcgtgtggtatgacagtaataataaaagtgggcggagctgacattcagagga

SEQ ID NO: 911395 - DNA, 120 bp, Artificial Sequence
  ENSG00000258875_12 (sequence is synthesized)
gtggtctctgcaaccagcttctagagacttctagcatactttggcttgtggcatcttccatcttcaaagcctacagcagtcaactgagtccttctcacatcacatctcctcttctgactc

SEQ ID NO: 911396 - DNA, 120 bp, Artificial Sequence
  ENSG00000258876_0 (sequence is synthesized)
gtggctgcatccccagggcctgtcttacagtgagcatttaataaacattagttgagtgaatgaatggaggatactcagtggcaaagctagggtttgaacccagatctctgactcccttaa

SEQ ID NO: 911397 - DNA, 120 bp, Artificial Sequence
  ENSG00000258876_1 (sequence is synthesized)
ttctgtcctcttccctccatttcatggaggactaagggacctgaggttcattctgaaatgcttatctgaagggtccacctacctcttctcaacagccactcacgcacagtgtcagtgaca

SEQ ID NO: 911398 - DNA, 120 bp, Artificial Sequence
  ENSG00000258876_2 (sequence is synthesized)
cagagaaaggagtgagtacccgagaccaggacagagtgccccagaagatgtcacaatgcagagcacagacacagatacggaaacgaaggctcagagaagccaggattcaaacccaggtct

SEQ ID NO: 911399 - DNA, 120 bp, Artificial Sequence
  ENSG00000258876_3 (sequence is synthesized)
gccaaacgctgcacccagtggtgccctgatatggcaaaggaaccagctttcccgtcggtgtggtttctgctctgagagaggagttacctggaagagctcgatcctctgctcattccgctt

SEQ ID NO: 911400 - DNA, 120 bp, Artificial Sequence
  ENSG00000258871_0 (sequence is synthesized)
tgaactggcagagagagatggttattagaaaataaaatgcacttagagtcccccatgaatcatttatgggagacaccatgcttagcaaagactatgaaaatatggctgttaagggcaact

SEQ ID NO: 911401 - DNA, 120 bp, Artificial Sequence
  ENSG00000258871_1 (sequence is synthesized)
caggcactatttctggatgactttcaagcatgaccactagctacaggactgggcctggacacattagaagaatttaggccttcaggatgaaaaggaaaatgtgtgggcagagactgagtc

SEQ ID NO: 911402 - DNA, 120 bp, Artificial Sequence
  ENSG00000258871_2 (sequence is synthesized)
ccctcacccgagaaagcaactttttctgcacgggatgactctggttacatttgcttgttcccgccatgaataaaaggaagagaggtcagctgaagaggcaattaattcaacacaactgag

SEQ ID NO: 911403 - DNA, 120 bp, Artificial Sequence
  ENSG00000258871_3 (sequence is synthesized)
tctacgactaaaggaaaatggacgagcttccccacaggcagtaggagtgcccaccccaggggtccggtttatcaaggaatttcaaagcatcccctgccacgtgcttctgactcctccact

SEQ ID NO: 911404 - DNA, 120 bp, Artificial Sequence
  ENSG00000258871_4 (sequence is synthesized)
acctcgctttggaataagtggttaaaaaagagaaacctctgtttattggactgacggagcaactggacttgttgaggttgcattgctcagggtggctccaggcaagcagacagctgagag

SEQ ID NO: 911405 - DNA, 120 bp, Artificial Sequence
  ENSG00000246820_0 (sequence is synthesized)
gtggttacccgtcgctgtaaatggacagataattatccaaacaaaaaaaatgcaggaaatattctggatccccgagcagtcttctcaactggtacgaggaaaagtcaagaaaagcccctt

SEQ ID NO: 911406 - DNA, 120 bp, Artificial Sequence
  ENSG00000246820_1 (sequence is synthesized)
tgagaaggtctccctggaagacaggcccatgaagagctgaagaaagaagtgggaggacagaggagaactcacacaaggtatttggaggaggaagaattcagattggaaaataaaaataag

SEQ ID NO: 911407 - DNA, 120 bp, Artificial Sequence
  ENSG00000246820_2 (sequence is synthesized)
gtgggagagaagctggggaggggtgggaagaaaatagaggaaagaggaagaagaccaagaaggaagaaaacggacatgaagtggttgccttcttatgaactccctgcaagggaaacagag

SEQ ID NO: 911408 - DNA, 120 bp, Artificial Sequence
  ENSG00000246820_3 (sequence is synthesized)
cccagaggcaatagcctagttttcaagagactccatggtctcctaagtcttatccagtgtgctttaccctccagaccaggctggaatctgagcttgggatcctctcctgctcaaaagcct

SEQ ID NO: 911409 - DNA, 120 bp, Artificial Sequence
  ENSG00000246820_4 (sequence is synthesized)
tccatgactccctttggctgccatatttagtctcagctcattggccactctttcaaggaccttcatccttgaagcataattcatttctcttgcccaaaatcatcccctcctctctaggcc

SEQ ID NO: 911410 - DNA, 120 bp, Artificial Sequence
  ENSG00000246820_5 (sequence is synthesized)
agcatgagctctgtgtattcctcccttaagatgctcctttacccaattttcttccctccttgcctttcatagccaatcttccctaaaatataaggcccaaacactatgaacttttttcag

SEQ ID NO: 911411 - DNA, 120 bp, Artificial Sequence
  ENSG00000246820_6 (sequence is synthesized)
gaggctctcccagattccaccccatgctgactcttcctttcactagattcctgtggacactgtttctcatgggtttactgggccttttcacctagttgggagtcccgggaggatagggtg

SEQ ID NO: 911412 - DNA, 120 bp, Artificial Sequence
  ENSG00000246820_7 (sequence is synthesized)
ctcctcccatggcatgactgagcacagaacttgttcacagcagatacttattcaagtatgaggctgctagtttctcaaacacattgattctgccactgctctgagcaactagacctctct

SEQ ID NO: 911413 - DNA, 120 bp, Artificial Sequence
  ENSG00000246820_8 (sequence is synthesized)
ccaggaatcagcaatgagttgccttgaagaaacaccccagagagtctcatttcaaaaagtcactgactttgccaccaaatttgtccctgaagtgactgtaatgattaattgtgtgttaat

SEQ ID NO: 911414 - DNA, 120 bp, Artificial Sequence
  ENSG00000246820_9 (sequence is synthesized)
ttggctgggtgatggtgcctagatatgtggtcatacttaattctggatgtttctgtgagggtgtttttggatgagatgaacatttgaatcggcagactttgagtaaagcagattgctctt

SEQ ID NO: 911415 - DNA, 120 bp, Artificial Sequence
  ENSG00000246820_10 (sequence is synthesized)
cataatgtgagtgggccttatccaatcagttgaaggcctgaatagaataaaaaaccagttcgccctggcaagaagcaattctgtagccaaccgaactttggatttgaactgcagcatctg

SEQ ID NO: 911416 - DNA, 120 bp, Artificial Sequence
  ENSG00000246820_11 (sequence is synthesized)
tccttccggggtctccagcctgttggcccaccttgcagagtctggatttgccaccttctaaaatcacatgagccaactgcctaaagtaaatctctctctctctccctctctccactgtgg

SEQ ID NO: 911417 - DNA, 120 bp, Artificial Sequence
  ENSG00000246820_12 (sequence is synthesized)
agtccccattgtggagagtcatacaccttaccacaggcaggaaatcaaggtggttagcaggaaaatgagacccaggtgcccaaaacactgagcagaagggagcaaggcctgtaactccaa

SEQ ID NO: 911418 - DNA, 120 bp, Artificial Sequence
  ENSG00000246820_13 (sequence is synthesized)
agtttagaatgaagaggttagagaaggaaagcaggagatgggacagaatgcacagaacagcatatgggacctggactttgaacgatgggtagaattttgatcagggttaagggaaatatg

SEQ ID NO: 911419 - DNA, 120 bp, Artificial Sequence
  ENSG00000246820_14 (sequence is synthesized)
atgaacacctgccaatagtagacatccacaatctttgaataccctttcttcatttgacattatccacattgagagtctcaggttctcaatgtagaatccaacaaactacatttcctggcc

SEQ ID NO: 911420 - DNA, 120 bp, Artificial Sequence
  ENSG00000246820_15 (sequence is synthesized)
gcaaatagttaactgtttccccgatcagacatacccgtgtccaactttggtttgaaagttatctgtgagaggaaacagcagtgcttgcttggcctacctcttttggtgggtgaggcggca

SEQ ID NO: 911421 - DNA, 120 bp, Artificial Sequence
  ENSG00000246820_16 (sequence is synthesized)
gcagaggtgggacgttcctgtggctggtagcggccacaacgcagtttcctgacaggcagagcagaggccatgcaggtctgggatctgtggcactggagcttccttacgaggccagttctg

SEQ ID NO: 911422 - DNA, 120 bp, Artificial Sequence
  ENSG00000246820_17 (sequence is synthesized)
tggtgtggttctgggagttattccaagctctggggccctagttttctcatctgtgaaatggagactgttctgcctccctcccactgagctagcaaatgtgatggaggctggaaggcaatc

SEQ ID NO: 911423 - DNA, 120 bp, Artificial Sequence
  ENSG00000246820_18 (sequence is synthesized)
acgtgtgagacaaaaacagcaacagctgctgccgctcaaaggcaagtctgaagaaagaaaattggaatcagaaaagggaagagtttttgaggaaaacctttgggaggaagcctctagaag

SEQ ID NO: 911424 - DNA, 120 bp, Artificial Sequence
  ENSG00000246820_19 (sequence is synthesized)
gcccatatttcttatcctaaagctctacccaaatggggacaggtgggcaaaggttaggggtacgaggatagaagtttcttggtggtgagtggtcaaggtgagaatgtccttactgctttc

SEQ ID NO: 911425 - DNA, 120 bp, Artificial Sequence
  ENSG00000246820_20 (sequence is synthesized)
ctgccaactctcctcactggcctctgcccctgaaagacgcagagcagagagaagtcacagtcggttaccttgggcatttctgccttgaataaggagaaatagtctttggtgccaattaat

SEQ ID NO: 911426 - DNA, 120 bp, Artificial Sequence
  ENSG00000246820_21 (sequence is synthesized)
taagcaaactgatagaaattccctgcttaagtcacactttgcatatccacaatctctgcactacattttctgtatactttacccctgggtaaaaattggtgagtatttaaatgcttcctc

SEQ ID NO: 911427 - DNA, 120 bp, Artificial Sequence
  ENSG00000246820_22 (sequence is synthesized)
acataatcttgctaaagcacactcttgcctataaatattcatgccactgccaaaacatttgcaagctttccccaaaggtgaaatgtgtgtaatgtactttgtcttctgggtataaatatt

SEQ ID NO: 911428 - DNA, 120 bp, Artificial Sequence
  ENSG00000246820_23 (sequence is synthesized)
atccaatacattttggttaatatgaatacactaattattcctgcaacccttttaaaaagggtcatcttcatgatgtgaattttttaaaaatgtaattacaataattggatacttaatcta

SEQ ID NO: 911429 - DNA, 120 bp, Artificial Sequence
  ENSG00000246820_24 (sequence is synthesized)
attaaaatttgctttatctttaatgggaatttgtctaaagaggcagaatgacaattggctttttgataatgactgttttctttcttcaggggatcaagctggtgaaaactggagaaccag

SEQ ID NO: 911430 - DNA, 120 bp, Artificial Sequence
  ENSG00000246820_25 (sequence is synthesized)
gcaggtttgtgtctgccagttccctgcttactgggcagagcaaggccagtctctcttcttcttacaattcactacttaagtagcaaacatgggttgtggttactggaaaaggactagggg

SEQ ID NO: 911431 - DNA, 120 bp, Artificial Sequence
  ENSG00000246820_26 (sequence is synthesized)
aaccttttgtattccaacagatgaagctgctcctcttcctaggaagcagtcctttgttcccctggacctgtgactgatccacagcaggcatgtgatctaagcctgatagatcaggtccct

SEQ ID NO: 911432 - DNA, 120 bp, Artificial Sequence
  ENSG00000246820_27 (sequence is synthesized)
cgctgggcttgctgcagctggagaagaagcagctccatgctgctttggggggggcatggtgctggaaggagttgtagtggatggtataggtgctccactcatatcccattggttcaccct

SEQ ID NO: 911433 - DNA, 120 bp, Artificial Sequence
  ENSG00000246820_28 (sequence is synthesized)
tgaggtcatcttcagacagtccctgcacacaaactgagctcctatgtctctctgcataaagctgcttctctggcctggggagcaagctagggagagttaccactcccagagcaactctta

SEQ ID NO: 911434 - DNA, 120 bp, Artificial Sequence
  ENSG00000246820_29 (sequence is synthesized)
aacaatgaaggagaggagctggcagataaacacctcagcttccttgttcttcaggggctcaattctgagtggtgctccacacattctttttgaggcatcccagtaggattgagatctact

SEQ ID NO: 911435 - DNA, 120 bp, Artificial Sequence
  ENSG00000246820_30 (sequence is synthesized)
tgctccagctgtaacccactcaccgagacacccgtttggggtttccgccccttctttgtctcacttacctgctctctcattttgcttctggtgtcatcttccaaataaagtggtacaccc

SEQ ID NO: 911436 - DNA, 120 bp, Artificial Sequence
  ENSG00000235052_0 (sequence is synthesized)
cagaggttgtgagcctcccctggctcagcctgacccagaaccagctcactcatgaaactaccctctcttgaagagaataggagttgtggggaggaagaacataacccagaggccagagaa

SEQ ID NO: 911437 - DNA, 120 bp, Artificial Sequence
  ENSG00000235052_1 (sequence is synthesized)
aacagtccctacacagatggttgttgtgaggcttagttaccatacaaaattcttagattagtgcctggcacataataataaccacagcccccaaatgctagttgtcattcattatcttaa

SEQ ID NO: 911438 - DNA, 120 bp, Artificial Sequence
  ENSG00000235052_2 (sequence is synthesized)
cataccatgtgaaggttgtgttctcttacattctatagccctctgtgttttaatataaaattgtgatgtctctctttcttttatttgtattttttgagtaaaacggacatttcagaaaga

SEQ ID NO: 911439 - DNA, 120 bp, Artificial Sequence
  ENSG00000235051_0 (sequence is synthesized)
gcggccgccggcatctgcccaactcgctcgcgctttccgcccagggttctgaaaaatagaagaaaaaaggacaggctagagtgcagtggcgccatctcagctaactgcaacctctgcctc

SEQ ID NO: 911440 - DNA, 120 bp, Artificial Sequence
  ENSG00000235051_1 (sequence is synthesized)
tgcctcaacctcccgagtagctgggaatacagctgcacgcttccattcccagccccagccagagaagaggagccaactcctcacggcagatcccttgatagaggaggatgaaccgaatcc

SEQ ID NO: 911441 - DNA, 120 bp, Artificial Sequence
  ENSG00000235051_2 (sequence is synthesized)
gcaaagcccgtgctgagcgcacggacgggtgctgcccgggactcggccaggagggcgcccatgccaacgcctcttgcaggattagtgccttcggttggcaaaaggcggataaaggaagag

SEQ ID NO: 911442 - DNA, 120 bp, Artificial Sequence
  ENSG00000235051_3 (sequence is synthesized)
cgaaaccacatcaggaagctaagggtggtccacgctccctgtccttttacttcccgcgccaaaggcacagtgaggcttgcttagaaaagtccatcccgcgattgggcgcagtggctcatg

SEQ ID NO: 911443 - DNA, 79 bp, Artificial Sequence
  ENSG00000235051_4 (sequence is synthesized)
gcttgagcccaggagtgcaagaccagactgggcaacatggcgaaaccctgtctcttcgaaaaaaaaaaaaaaaaaaaaa

SEQ ID NO: 911444 - DNA, 120 bp, Artificial Sequence
  ENSG00000235050_0 (sequence is synthesized)
gggttccgcttgactctgcattctcctacttccctgcctgcttactctctgccatcatagttttttgcttcaaccttcaaatgtagccattctttttctaaagcggtacttattctcttt

SEQ ID NO: 911445 - DNA, 120 bp, Artificial Sequence
  ENSG00000235050_1 (sequence is synthesized)
attagttaaaattattaattttatgcacttactgttctagctccaattttgcatttccagttccctgctgggaataaattaaattggcagaagctcagtctaagtgcctgcaacagaatt

SEQ ID NO: 911446 - DNA, 120 bp, Artificial Sequence
  ENSG00000235050_2 (sequence is synthesized)
tgatggaggagaagctacccctcagcacaggattttggtagaataagaataaaaatgacaagtcccttcctgaaaagctcttcattgtctcttgaaaacggtctgtgaaagtgccaaacc

SEQ ID NO: 911447 - DNA, 120 bp, Artificial Sequence
  ENSG00000235050_3 (sequence is synthesized)
accagctctccagatgtggctgaatatcaagcaaaacaaaatatgtggaaggtaatagaagaatagaaacggatttcagagtaaactaagactgctctctatggtgatttaatacttcag

SEQ ID NO: 911448 - DNA, 120 bp, Artificial Sequence
  ENSG00000235050_4 (sequence is synthesized)
cctgtttaaaacatccttttaacacctgttttttggttttggttttgttttgttctgttttgtctactttaactcaaattccctatcagcttttccttcataagaaaacatttcagaaaa

SEQ ID NO: 911449 - DNA, 120 bp, Artificial Sequence
  ENSG00000235050_5 (sequence is synthesized)
gggttccgcttgactctgcattctcctacttccctgcctgcttactctctgccatcatagttttttgcttcaaccttcaaatgtagccattctttttctaaagcgctttcatcgtagctt

SEQ ID NO: 911450 - DNA, 120 bp, Artificial Sequence
  ENSG00000235050_6 (sequence is synthesized)
aagggaggaacactgtgtcctcacatggcagaagagcagaagagaatgaactcattccctcaagccctgctagaagggcactactctcatccactaggactccaacctcacagcttcatc

SEQ ID NO: 911451 - DNA, 120 bp, Artificial Sequence
  ENSG00000235050_7 (sequence is synthesized)
acctcttaaaagccccacctcttcatactatcagttgattattaaattccaacatctgaatgttggaggacacatccagaccgtagcatccctcaaaaaaagaataaagatgttccatag

SEQ ID NO: 911452 - DNA, 120 bp, Artificial Sequence
  ENSG00000235050_8 (sequence is synthesized)
cacacactcagacatgtaaaacccatcctagacagttcaaacaaggtttgagtaccactttccacgtatcaggcttacaaggtgccaagaacatagagttcctgaccttgaggagcctgc

SEQ ID NO: 911453 - DNA, 120 bp, Artificial Sequence
  ENSG00000235050_9 (sequence is synthesized)
ggcagaagctcagtctaagtgcctgcaacagaatttgtcccatatccatacaacttgctcctccacaacaaatgggagaatcatcctcttacctccaggacaagtcccttcctgaaaagc

SEQ ID NO: 911454 - DNA, 120 bp, Artificial Sequence
  ENSG00000235050_10 (sequence is synthesized)
ttcattgtctcttgaaaacggtctgtgaaagtgccaaaccaccagctctccagatgtggctgaatatcaaggtctctacaaataaataccataaagaagctacaagcagccaggcatggt

SEQ ID NO: 911455 - DNA, 69 bp, Artificial Sequence
  ENSG00000235050_11 (sequence is synthesized)
ggctcacaggaggcagaggttgcagtgaaccaagatggccccactgctctccagcctgggtgacagagc

SEQ ID NO: 911456 - DNA, 120 bp, Artificial Sequence
  ENSG00000235050_12 (sequence is synthesized)
tgtcccatatccatacaacttgctcctccacaacaaatgggagaatcatcctcttacctccagcacctgcctcaaacaaagtttctgatccatctaccacgtaactttgacgctgaccaa

SEQ ID NO: 911457 - DNA, 120 bp, Artificial Sequence
  ENSG00000235050_13 (sequence is synthesized)
gaattacagcttcaaagaaatcattcgaggatcattaatatcttggtcatgaataacttttatgtgaaaggctctgcagctaatctcaagtgcagtgaactctgtttcattactgtattt

SEQ ID NO: 911458 - DNA, 120 bp, Artificial Sequence
  ENSG00000235050_14 (sequence is synthesized)
ccaaatttagagttatttgggttgtatataggtcagataatttacttttttgttttcaacctaatataaagcacctccaaactttctgccatttgctattacttttctccctcagtgagt

SEQ ID NO: 911459 - DNA, 120 bp, Artificial Sequence
  ENSG00000235050_15 (sequence is synthesized)
gccaaattagctcaattttagttaatttgcaaggtctgacaatcaagactatcctcagcagcaagcagaaaaatttctgaatgactagatacaatttcaagggacaagaaatttctctgt

SEQ ID NO: 911460 - DNA, 120 bp, Artificial Sequence
  ENSG00000235050_16 (sequence is synthesized)
gacaatttataatagtgaaataattaacacagtcttaatgtcaaataatagtgtattatttaaatgatgtagggaacagttgtgcaatacaaaaccatggagatattaaatatggcttat

SEQ ID NO: 911461 - DNA, 120 bp, Artificial Sequence
  ENSG00000235050_17 (sequence is synthesized)
tagcatgtttaaaggtagaaaataccatcatacattaagaaaagatacagtttgaaacttgcacacaggatagttccatttctttatatgaagaatatatatcaacagtagtagaagaag

SEQ ID NO: 911462 - DNA, 80 bp, Artificial Sequence
  ENSG00000235050_18 (sequence is synthesized)
tgaagaatatatatcaacagtagtagaagaagtcttagagagatgaaattgtgggaacatttttcttttaactttatttt

SEQ ID NO: 911463 - DNA, 120 bp, Artificial Sequence
  ENSG00000235050_19 (sequence is synthesized)
agtccaaaaaaaaaaaaagtaatgtccatccctttaaggatagcctttattggtcaaatttaaagttaatataagttaggttattcaacatttatggaaagggtattttaatggactctt

SEQ ID NO: 911464 - DNA, 120 bp, Artificial Sequence
  ENSG00000235050_20 (sequence is synthesized)
gggggaaaagagatacatgtttctgaagacactggaactcagggaaatatagccaccagtggctgggctgatcaaaggaaggggagaatgaaaatattatcttccccacgaataatctta

SEQ ID NO: 911465 - DNA, 120 bp, Artificial Sequence
  ENSG00000235050_21 (sequence is synthesized)
cctagagagaggctggtaccaacaactaaccttaaataaatgtaaaactagaggtctgtattagtccattctcgcactgctgtaaaaacctcctgaaactgaaatttataaagaaaataa

SEQ ID NO: 911466 - DNA, 120 bp, Artificial Sequence
  ENSG00000235050_22 (sequence is synthesized)
gggttccgcttgactctgcattctcctacttccctgcctgcttactctctgccatcatagttttttgcttcaaccttcaaatgtagccattctttttctaaagcgctcctttgtttcagg

SEQ ID NO: 911467 - DNA, 120 bp, Artificial Sequence
  ENSG00000235050_23 (sequence is synthesized)
gcttttaaaataaattgaggggcttctgggtcaagatcactaatggaacacacatgttcattttatattcttctctggacactattaaaatgagagtaaaggaatgttaaaccataaacc

SEQ ID NO: 911468 - DNA, 120 bp, Artificial Sequence
  ENSG00000235050_24 (sequence is synthesized)
cacaaaaataagagacctggcaaagagaaaaatcagtgtgaaaaagcacattgcaaatttctggaagatgaaaaggagatagaggtagacagccagatgaagatgagctgccaagaagag

SEQ ID NO: 911469 - DNA, 120 bp, Artificial Sequence
  ENSG00000235050_25 (sequence is synthesized)
gggttccgcttgactctgcattctcctacttccctgcctgcttactctctgccatcatagttttttgcttcaaccttcaaatttccctgctgggaataaattaaattggcagaagctcag

SEQ ID NO: 911470 - DNA, 120 bp, Artificial Sequence
  ENSG00000235050_26 (sequence is synthesized)
cggagagtattaggagtactcagattaaaagagaaacaaggtgatagaggaaaagagggatctgagaaatatgggttcaactacggagctttaagcttgaatttactacagtggaagtag

SEQ ID NO: 911471 - DNA, 120 bp, Artificial Sequence
  ENSG00000235050_27 (sequence is synthesized)
actttcacaaaattttcagaattcatatatttggtttttcatcgttctccaatacggaaaactgactcacgtttcaatcttcttaaatgtaactttctttcttctagaagatggtcctaa

SEQ ID NO: 911472 - DNA, 120 bp, Artificial Sequence
  ENSG00000235050_28 (sequence is synthesized)
taagaatgcttcttgaaatatagacaagaataagatgttatcttagctctaacactcaggcaaaatccagcccctgtgagatccaggatatcatccctcagtctcatattaaaaaacagt

SEQ ID NO: 911473 - DNA, 120 bp, Artificial Sequence
  ENSG00000235050_29 (sequence is synthesized)
gaggaaggagttacgttttgcacggccagagaagtaggaagagcgtaaagtgggaggtgctacacatttttggacaactagatctcgtgagaactcaatatcacaagaacagcaagggga

SEQ ID NO: 911474 - DNA, 120 bp, Artificial Sequence
  ENSG00000235050_30 (sequence is synthesized)
tccagtcacctcccaccaggtccctcttccaacactggggattaaaattcaacatgagattcaagaggagacacaaatccaaaccatatcaaggtctctgctgaatatgctgttattcac

SEQ ID NO: 911475 - DNA, 120 bp, Artificial Sequence
  ENSG00000235050_31 (sequence is synthesized)
atatgctgttattcacttaacattcatgacaagtctaccagcatcataaaagtcacgacgactcacaagaaaatcaaatttacatttttgccactaccatgttcattgagaagggtaaaa

SEQ ID NO: 911476 - DNA, 120 bp, Artificial Sequence
  ENSG00000235050_32 (sequence is synthesized)
ctcctccacaacaaatgggagaatcatcctcttacctccagctcctttgtttcaggtcagcctttcaagatggatcatttcaattcattacatcttaactagccacaaggggaataggac

SEQ ID NO: 911477 - DNA, 120 bp, Artificial Sequence
  ENSG00000235050_33 (sequence is synthesized)
gagccatggactcccacaatatggtggggggaaaggaatcaagctcatttatctggaaattaaaggtaaagatgacatttcagaggtaaagtgatttagaatattcaagacatctgatgt

SEQ ID NO: 911478 - DNA, 120 bp, Artificial Sequence
  ENSG00000235050_34 (sequence is synthesized)
gccctacttatatatgtgaaagactggaccaataaacagcagaatgtttacagtggtttgctctggataatgaaagtatgagttcaactacggagctttaagcttgaatttactacagtg

SEQ ID NO: 911479 - DNA, 120 bp, Artificial Sequence
  ENSG00000235056_0 (sequence is synthesized)
gccactgaaagacctaggcaactttcactgagaataggtggctgtggccagctgctttagggaaaggcaccaggagtttggcgtgtgtagtcaatactacaatgattacttgaagtcagt

SEQ ID NO: 911480 - DNA, 120 bp, Artificial Sequence
  ENSG00000235056_1 (sequence is synthesized)
ggcagcagtggatgaatttatgagaggtatatgtttcttacaactgattgaaagctgactcacatgaagatacaagattctcaggcagtatgtccttcctcgttggcagcactttctgct

SEQ ID NO: 911481 - DNA, 120 bp, Artificial Sequence
  ENSG00000235056_2 (sequence is synthesized)
gaacctgccagtgaaatgaagcctatgactttctggggaggctagtcctcaatttttcctgcaaaggtttggtccaggtggagtttttccaaagtgtgcaaactgcacttcaattaaaga

SEQ ID NO: 911482 - DNA, 120 bp, Artificial Sequence
  ENSG00000235056_3 (sequence is synthesized)
agtctgcagggcacatagagcagatgaacagcaagtgtgctgagacttctcttgacaagactttggcaggtgggaagcccaagtgaaaagcaagcatttggaaacgctatatggaagcaa

SEQ ID NO: 911483 - DNA, 120 bp, Artificial Sequence
  ENSG00000235056_4 (sequence is synthesized)
ttctagaaggaattccttatgattacagataatcaaaagaatccaacatattcaaatctgaggaattgcgacaatccaaacattgtgcttttgaacagctgctaaaaggaaaggcagcag

SEQ ID NO: 911484 - DNA, 120 bp, Artificial Sequence
  ENSG00000235056_5 (sequence is synthesized)
ttattaattcactagcacctttttttttttcctaaactgaaatactgactgcattcattttggctaaagtcattcttggaagcttaaaaaattcccagtaagagtctttcatttttgtaa

SEQ ID NO: 911485 - DNA, 120 bp, Artificial Sequence
  ENSG00000235056_6 (sequence is synthesized)
gtgcagatgattttctgttggcttttgcttaacttcagctgactttcatgtaaatgtactgcagacggggttaaaatggccagatggttgctgcaaaatgcttttctgacttgaacttct

SEQ ID NO: 911486 - DNA, 120 bp, Artificial Sequence
  ENSG00000235056_7 (sequence is synthesized)
cctcttcctcacctctttcatatgcttcaatcctgagcactatggacttgggagagaagtataaattaatttgatggatgttctggctgctttatcagcttaaaaacaaggtaattgaaa

SEQ ID NO: 911487 - DNA, 120 bp, Artificial Sequence
  ENSG00000235054_0 (sequence is synthesized)
cgcagtgtgtttactggagttgtgcgcatgcttgcttgaggcatttttctcttaaccagcgcaatgtacttaggaggtcatgcgccggttaaactctgccattatgcctcttactgggca

SEQ ID NO: 911488 - DNA, 120 bp, Artificial Sequence
  ENSG00000235054_1 (sequence is synthesized)
tgcttgagcccacgggcccaactcctgagatcccattcggaagctgctgatcaccagtttcaagtgtttctgtttattgggagactgccttcctctggcactggcagtgaccaattatta

SEQ ID NO: 911489 - DNA, 120 bp, Artificial Sequence
  ENSG00000235054_2 (sequence is synthesized)
ttttagagagactgttaacggcctgaccatcacctgatgaatatcaggaatgtggcctgacattcctggtacacggagcgccttcttttcgtttagagcattggtgtctccacattagaa

SEQ ID NO: 911490 - DNA, 120 bp, Artificial Sequence
  ENSG00000235054_3 (sequence is synthesized)
gcatcctatgtagctgttctgcttgcagctgcccaagtctgcctgggcctcctgcatgaggtcatgagtcttaataaagccactgacccacacatttggaatcgtactgacttttcacaa

SEQ ID NO: 911491 - DNA, 120 bp, Artificial Sequence
  ENSG00000235054_4 (sequence is synthesized)
ctaacagccaacacattgccaagaagcaattcaattgttgaggatatcacatcatgccagggaaagagagatggaattcagaaagcctgggatattgcagttcagataaattgcacttgg

SEQ ID NO: 911492 - DNA, 120 bp, Artificial Sequence
  ENSG00000235054_5 (sequence is synthesized)
tcaacggaaatgtcctaagggcactgcagctgcagctggagaatgaagaagacataaaattagggcttttgtcactgtcgcttgatttcattaaagggcattagttctcggcgagatata

SEQ ID NO: 911493 - DNA, 120 bp, Artificial Sequence
  ENSG00000235054_6 (sequence is synthesized)
tggggttggagaggacaggagccagaagctcccagtgcagcagcaaggctggcccacgtgagcacctggagcatcatttctgctgccacatgcttgggctgccccaccccgccgtgccct

SEQ ID NO: 911494 - DNA, 120 bp, Artificial Sequence
  ENSG00000235054_7 (sequence is synthesized)
cagccgtgccctgctccatctccctcgccaggcctgagaccggcccccagtgtgttgtgactcctgaggtctctcagctctccctcaacccccaggagaattgctctccactccagaagc

SEQ ID NO: 911495 - DNA, 120 bp, Artificial Sequence
  ENSG00000235054_8 (sequence is synthesized)
cgcctgatggggaggctgacccctctccaggactgactgatccaggtttatcctgacagtaacctctccccaggtcggaagacctctcaggctctgtttctagggaggctgacctgctga

SEQ ID NO: 911496 - DNA, 120 bp, Artificial Sequence
  ENSG00000235054_9 (sequence is synthesized)
caatgctcctagctggattttgtaagcggtcttgaataaagtcttcctcactgttttaacaagagacaaggtaatgttcattgaacatcttatacaaagaggaaacctggcacagaagtg

SEQ ID NO: 911497 - DNA, 120 bp, Artificial Sequence
  ENSG00000235054_10 (sequence is synthesized)
gacatgcactcggagggaaaatgccaagtgacaatgaaggcagagatcaggtgatgcatctgcaagctgagcaacatcaggaattgccaaaaaccaccaggagctggagaggcctgggac

SEQ ID NO: 911498 - DNA, 120 bp, Artificial Sequence
  ENSG00000235054_11 (sequence is synthesized)
agagcctcccacggagcctcaagggagccagccctgcccacgccttgatctttgacgtccgacctcaagaactatgaaagaacccatttctgttggtgaaggctccccgtctgtggtccc

SEQ ID NO: 911499 - DNA, 120 bp, Artificial Sequence
  ENSG00000235054_12 (sequence is synthesized)
ctgtcctggcagccctaggaacctgacctctggtccctctgcatccctggcatcactctgcctccctctctttttctccagtgaatccaacacactctcagtgagacagccaggtggcaa

SEQ ID NO: 911500 - DNA, 120 bp, Artificial Sequence
  ENSG00000235054_13 (sequence is synthesized)
ggggttctcggagaaactccagccggcctgctcgctgggcatgtacactggagtggagccacagaagttcacggtgtttgcagcagggaggagcctggccactcctcttcctggttggaa

SEQ ID NO: 911501 - DNA, 120 bp, Artificial Sequence
  ENSG00000235054_14 (sequence is synthesized)
cctggaatttattttgtgaggcgggaagcctatactggggagactcttgctctgctgagtccccattccccctttattttcctttttgcccaataaatcctattattctcagtcttcaaa

SEQ ID NO: 911502 - DNA, 120 bp, Artificial Sequence
  ENSG00000235054_15 (sequence is synthesized)
tgagccccatgtggacaggggctttatccatctcctttgcttggtcatctctgggtccaacatccagcctgcctgtggccgttaatattctgcatgaagggatcagtctacacacagaaa

SEQ ID NO: 911503 - DNA, 120 bp, Artificial Sequence
  ENSG00000235054_16 (sequence is synthesized)
ctttggctgcctggtcttgtttcatgatgactctggaattatcataatcccattctttttaattatttccaccattctgctgtatgcagtttatgttacaattatacgttggcaactaaa

SEQ ID NO: 911504 - DNA, 120 bp, Artificial Sequence
  ENSG00000235054_17 (sequence is synthesized)
aatatcaggaatgtggcctgacattcctggtgtgtgtggtgtggggtacgaggggagctctctcctacgctgctcatgtctgactagttggattctgcagagtggaagtgggaaactcct

SEQ ID NO: 911505 - DNA, 120 bp, Artificial Sequence
  ENSG00000235054_18 (sequence is synthesized)
tctgaccctggccacctgtctccatgtgaaggcagatccatttgagtgacagtccgaggcaatacctcaactgcctctcacttcccaagacaaataaacccacttgaccttgatgtgctt

SEQ ID NO: 911506 - DNA, 120 bp, Artificial Sequence
  ENSG00000235054_19 (sequence is synthesized)
tgcagtcacactgacatcccgcatccacgcggaatctgctcagccacggtggagcatccattggtgcaccgagggggatggcaggggccccaacacacaacacgatttatatcaaagcaa

SEQ ID NO: 911507 - DNA, 120 bp, Artificial Sequence
  ENSG00000261478_0 (sequence is synthesized)
atatatatatatatacatatatatatttatgcaaaatgaaatctcacatgtctagttcatgcaccatggtcagactgggattgggttaaaggccttatttggaaaggtaaatgagatggg

SEQ ID NO: 911508 - DNA, 120 bp, Artificial Sequence
  ENSG00000261478_1 (sequence is synthesized)
ttgggttaaaggccttatttggaaaggtaaatgagatgggaaaagaagactggcttgaggtttgactgcagaggcgtactatatgtatatagtatgttttgagtgtctccataaaaactt

SEQ ID NO: 911509 - DNA, 120 bp, Artificial Sequence
  ENSG00000261478_2 (sequence is synthesized)
gccactgatggaactgggaggtggggccttaaaaggtgattgggtcatgagggtagagccctcacgaatggattaatgccattaacacaggattgagttagttctaggaagtgcattagt

SEQ ID NO: 911510 - DNA, 120 bp, Artificial Sequence
  ENSG00000261478_3 (sequence is synthesized)
tctcacaagagcagctcatcataaaggtgagcttagcttgcccttgcggtctcttctgcatgtacttctttgccctctccccttctgtcatgaaagccttcaccagatggtcaagcagat

SEQ ID NO: 911511 - DNA, 120 bp, Artificial Sequence
  ENSG00000261478_4 (sequence is synthesized)
gctggtgccatgcccttgaacttcccaccaccatcccccacctagccactatatgggttgttagatattttgaccacctcctcttcgctcactccactattcaactcactgcatcatcaa

SEQ ID NO: 911512 - DNA, 120 bp, Artificial Sequence
  ENSG00000261478_5 (sequence is synthesized)
tgtacttattacaaacctgtcacaagccaggtcttatgctaggtgctcctctcaacaggttcttgagctggcaggggagagagagacattcaaacaccaaggattaatataccattacag

SEQ ID NO: 911513 - DNA, 120 bp, Artificial Sequence
  ENSG00000261478_6 (sequence is synthesized)
gtttaaagacagaggcctataagggtcccctggcagtgccatggaggtagggcatggtcggctgtacctgtagaggtgtctaaagggaggcttgcaagctgccccttgaaggacgagcag

SEQ ID NO: 911514 - DNA, 120 bp, Artificial Sequence
  ENSG00000261478_7 (sequence is synthesized)
aaaattgtacatgaggacaagtaggaaaggaattccaggaggagggatcagcatgtgcaaaggcatggaggttgtccatagaatgtagagagaaaatattaaaacctatatttatactaa

SEQ ID NO: 911515 - DNA, 120 bp, Artificial Sequence
  ENSG00000251398_0 (sequence is synthesized)
aggaaataaggtctcttgccaacagccagtgaaaaactgaggcctcctgttctcccaaaagccatgagagtgaaccaacttggaagttgctcgtccagccctagtgaagtcttcaaataa

SEQ ID NO: 911516 - DNA, 120 bp, Artificial Sequence
  ENSG00000251398_1 (sequence is synthesized)
ctgcaaccccagctgaaagcttgactgttgttgagagaccctaagccagaaccacagagctgagccacttctggatcactagacttctgaaacatacagttctccaagcatgaggtttct

SEQ ID NO: 911517 - DNA, 120 bp, Artificial Sequence
  ENSG00000251398_2 (sequence is synthesized)
aagaactgttaggtgaaataaatctctctagatttataagagactttgcttctccatgaccacgtatttcaacactcaatatgtcctagctccctctctgctactgtgtccacaaccaag

SEQ ID NO: 911518 - DNA, 120 bp, Artificial Sequence
  ENSG00000251398_3 (sequence is synthesized)
cttaaatcataaactaaataagctgaggatgttctgaatctgatatgagaagaaaatactattggtcctgtggtcatcagaaattataacagaattggagaagattgctgccatttggtg

SEQ ID NO: 911519 - DNA, 120 bp, Artificial Sequence
  ENSG00000251398_4 (sequence is synthesized)
cccagattgcttcaaaaaattgtaggagactgccatccagattattcctcagaagctataaaaccttttgtaatattggaagttgacaagccaagcgcattaaatgaaaactgtcaaaaa

SEQ ID NO: 911520 - DNA, 120 bp, Artificial Sequence
  ENSG00000251399_0 (sequence is synthesized)
aaaaggaagatctctcttttctacagcaagcagtagtttctcacagcatccagcataggttactcaagacaaaaagaggagtttggatgaaatggcatagggctgactactggactaaga

SEQ ID NO: 911521 - DNA, 120 bp, Artificial Sequence
  ENSG00000251399_1 (sequence is synthesized)
tcccttatattatacacttacagagggctggctttgtttaacttgtcctacataactttcagtactgaaagtgagcattataccattgatgaggttgctattaaacctatgtaaaacatc

SEQ ID NO: 911522 - DNA, 120 bp, Artificial Sequence
  ENSG00000261474_0 (sequence is synthesized)
gaggtactctaagcgctagacaggacggggtgggagtcggtaacatcgtctcctctgggctggccctgcttctgcttagctctgggcataagactgactccagtacagtcacagttatgt

SEQ ID NO: 911523 - DNA, 120 bp, Artificial Sequence
  ENSG00000261474_1 (sequence is synthesized)
ggtgatctgcttgccttgacctcccaaagttcagggattacaggcgtgaggcaccatgcccagccagtccctgtcttcaaatacagtcacactgggggttaaacaatgtataaatttggg

SEQ ID NO: 911524 - DNA, 120 bp, Artificial Sequence
  ENSG00000261474_2 (sequence is synthesized)
ggcgatacaaacattcagtccataacaccccctataccccaaccctaggcaaccactaatctacatcttatctctacagatgacctattctggacatgtcatataaatggaatcatacaa

SEQ ID NO: 911525 - DNA, 120 bp, Artificial Sequence
  ENSG00000261475_0 (sequence is synthesized)
aagcacccacattctagaaacagtctctccccagctcacttggctgaagatactaaagagaactagatgttatctagtgttatcctgctgatcccaatttcctatagttctggcaccaga

SEQ ID NO: 911526 - DNA, 120 bp, Artificial Sequence
  ENSG00000261475_1 (sequence is synthesized)
aaatcctgaatgataggtttttctgaagctgctgacatcgggtcagccctcaacaccatcacctttggccatgttcaggaagtactcaaaggtaacactggcagccaagagcaggccaat

SEQ ID NO: 911527 - DNA, 120 bp, Artificial Sequence
  ENSG00000261475_2 (sequence is synthesized)
caatgtctggccaccaccctaatcccacctggacagtcacaccccacctccctatgtgtgttcgcacagtgggggtgatatcatgtgggtctggcctgtcctgagcagaacctggtgttg

SEQ ID NO: 911528 - DNA, 120 bp, Artificial Sequence
  ENSG00000261475_3 (sequence is synthesized)
ggttgtcagaaacccagtgacccatcacgttcactcttcagatcatggctcaaaagtctgcagagcagagacaagagattgacaaagaggtgttgatgagtgagatgttactgttctgct

SEQ ID NO: 911529 - DNA, 120 bp, Artificial Sequence
  ENSG00000261475_4 (sequence is synthesized)
ctggagaagatactgtcagataatgtcccgcatttccatcagctggcatgcatgcctttggactcggacagggttctttggattgtagctgaattttcaatgtttagtcaatatggatct

SEQ ID NO: 911530 - DNA, 120 bp, Artificial Sequence
  ENSG00000261475_5 (sequence is synthesized)
gatctccgcatgatcttttttgtgaatgccaacaccattttgtaacttttttccattctaaacatttttcttttcactgccaaccctctgccttgtgattttattggaaatcaaggacct

SEQ ID NO: 911531 - DNA, 120 bp, Artificial Sequence
  ENSG00000261475_6 (sequence is synthesized)
atatctgcatgctttatgaagttgcttcgatagcagcccctgggatgccagaaattagcatttctttgctgccatgggctgatgatactgctgctattagagaaagtttagctgtggcac

SEQ ID NO: 911532 - DNA, 120 bp, Artificial Sequence
  ENSG00000261475_7 (sequence is synthesized)
caactcacagcattttcatagaaaaagattacttgtagcttattttagaagtaggaacatttggtctattcgactagacttgcaattttaaaaaaaaaaggttgcattcattaaagaaaa

SEQ ID NO: 911533 - DNA, 120 bp, Artificial Sequence
  ENSG00000261475_8 (sequence is synthesized)
aatgaatttaaggtaaaatgacaaaacctgatctttaacatcctgaaggatctgatacattattttccctccaactccatcccaggcctggtggtagaactgctatttttccttcttacc

SEQ ID NO: 911534 - DNA, 120 bp, Artificial Sequence
  ENSG00000261475_9 (sequence is synthesized)
ttttagaaaagtatgcatctagattttattcaaaaatagaagaaacaacagtagaatcatataaatagcaaaaatttgaaactcaaaatattaagcgtaagttacaaaaaaacatataaa

SEQ ID NO: 911535 - DNA, 120 bp, Artificial Sequence
  ENSG00000261475_10 (sequence is synthesized)
caacagaatatgtgggataaataccaattttgatacaattagtctggattaaaaggctgaaagttcaggtgaaggagcagagaatgctccttcaaaaccaaaagagagaaaatcttcgta

SEQ ID NO: 911536 - DNA, 120 bp, Artificial Sequence
  ENSG00000261475_11 (sequence is synthesized)
taagaagcatgaacataggatctacacatcagaaaatttatagaaggacagaattatttttaaataatcaaaaactagtctcattaaaataaagtataatcatcaaggacaaaaagaaaa

SEQ ID NO: 911537 - DNA, 120 bp, Artificial Sequence
  ENSG00000261475_12 (sequence is synthesized)
tgttgatgagggcaataaaagcaaaggtggctttatcacggtgagctacttctcacaggagtcgggatccacatctgcagactacacaaaaacaaacaacacagattaaaagcacaatca

SEQ ID NO: 911538 - DNA, 120 bp, Artificial Sequence
  ENSG00000261476_0 (sequence is synthesized)
catcttgttagggaggagtagagaggacagttggacctccaggccaggaggtggggtttggcaagagagggtgcagggctgcaggctgatgggtgattagtatcaagatagcccaacttc

SEQ ID NO: 911539 - DNA, 82 bp, Artificial Sequence
  ENSG00000261476_1 (sequence is synthesized)
gaaaaaaaaagatatgtctctgtaaaaatatatcctcaaggaaatcctcaaatatcttttagggtagggatcttagtctttt

SEQ ID NO: 911540 - DNA, 120 bp, Artificial Sequence
  ENSG00000261476_2 (sequence is synthesized)
aatcctcaaatatcttttagggtagggatcttagtctttttactgatatgtcagcatatagaatgagatcaatgtatatttatttgattgatcagtgattaactttttagtgtttttatg

SEQ ID NO: 911541 - DNA, 120 bp, Artificial Sequence
  ENSG00000261476_3 (sequence is synthesized)
actgtaattaattccacaaatttagcagcttaaagccatacagattttattgtcttacagttatgaaggtcagaagtccaaattgggtgtgtgtgggctaaaaccaaggtttagcagggc

SEQ ID NO: 911542 - DNA, 120 bp, Artificial Sequence
  ENSG00000261476_4 (sequence is synthesized)
tgtgttccttctggagcttgtaataagaactttgcttgccttttccagcatttagaggccacgtacattccctgatgcttggcctgctcttcttcttcatagccagcggcataacatctt

SEQ ID NO: 911543 - DNA, 120 bp, Artificial Sequence
  ENSG00000261476_5 (sequence is synthesized)
caaatctctctgactcttatctcctaccttggtcttacaaagaccctgtgattacattagacctaactggaaaatccaagacaatctccttttggaagatccttactttagtcaccacaa

SEQ ID NO: 911544 - DNA, 120 bp, Artificial Sequence
  ENSG00000261476_6 (sequence is synthesized)
tgtcccttttcccatgtgggttaatctgttcacaggttttggagatggagatgcgaacacctttgggagcccattctaccacaatgcttaatctcattttccaatatcatattgtattac

SEQ ID NO: 911545 - DNA, 120 bp, Artificial Sequence
  ENSG00000261470_0 (sequence is synthesized)
attcagttgaatatgtagacaaccaccagctaatctctattggcttggattttgtggtttagaaaatactcatcacctgcattgtcctaatgatttatgatgagtgggatcataatttgt

SEQ ID NO: 911546 - DNA, 120 bp, Artificial Sequence
  ENSG00000261470_1 (sequence is synthesized)
cttcacgtcacactggagcagaataacttgactcaggatggttggagaaagagaggtggaagaaggctgagaaaaatagtgaagatggaagactttgttttgggatctttcagaatctct

SEQ ID NO: 911547 - DNA, 120 bp, Artificial Sequence
  ENSG00000261470_2 (sequence is synthesized)
actctcaagtggtccattttcttggactactatccagagataagatgagaataaagagacaaaaaaattgacttcctatttaatcagtgagaaaccccactacctattcaaattctagtt

SEQ ID NO: 911548 - DNA, 120 bp, Artificial Sequence
  ENSG00000251393_0 (sequence is synthesized)
agcaaagtgcagcctctgccactggttaaaagggaaagcgtgccaggctccagcctatgggaccgttgttctgctgccacctggaaatcctcccagagctcaaagcctgctgctctgggc

SEQ ID NO: 911549 - DNA, 120 bp, Artificial Sequence
  ENSG00000251393_1 (sequence is synthesized)
aaagctgacaaggaaggacagattcagcagccaaccaaggagcataccttcatttgatttccttaaggcaaaagcactggctaaacaaagggagactatctgggagaaggtgttttcacc

SEQ ID NO: 911550 - DNA, 120 bp, Artificial Sequence
  ENSG00000251393_2 (sequence is synthesized)
ctttcaagctggggtgctttcaccaccgggaagtgccacgctgctttccacgctggaacaaggtactgtggtttcaaagttcaaggctctgtttcagggatgggaaggaaaaaaaaatca

SEQ ID NO: 911551 - DNA, 120 bp, Artificial Sequence
  ENSG00000251393_3 (sequence is synthesized)
gtgaaagaaggtgttctggtctctcaggcagaaccatttgttatttgattccagagctcatgtaatttttaaataccacactatgcattttcattactaaatgcattcattttcatcctc

SEQ ID NO: 911552 - DNA, 120 bp, Artificial Sequence
  ENSG00000251393_4 (sequence is synthesized)
aagaaaagtgtatgcccccttccgcctgctttacataatatggcttgagcgcttgtaaaaatggatgggctgtagctctgagttctgccattgtgctattgactggagctcctggttact

SEQ ID NO: 911553 - DNA, 120 bp, Artificial Sequence
  ENSG00000251393_5 (sequence is synthesized)
atcaccagatctatgggtggatcagccattcttctgcagcagggagtggaccgactcaaagcacttagcaccatttaaacttttgtccatctctgtttttatgcacacaaagagtttcct

SEQ ID NO: 911554 - DNA, 120 bp, Artificial Sequence
  ENSG00000251393_6 (sequence is synthesized)
ggaaacatggctatcctccaaggatttcagagagtagaattcttccagaactgcagtgtcccaatcacttggaacctcatgagaaagcagacttaaactcagaccctagaacctcgaact

SEQ ID NO: 911555 - DNA, 120 bp, Artificial Sequence
  ENSG00000251393_7 (sequence is synthesized)
tagtatgttccaaaagctttggctctgccatttaccaactgtgtaatttggggaacattgattcatcaccctaaagcttcattttcttcatctataaaatgagatacatattagctatct

SEQ ID NO: 911556 - DNA, 120 bp, Artificial Sequence
  ENSG00000251393_8 (sequence is synthesized)
tctcaagctcagttgggacagatctgcttcctgcctcactcacctcgttattgttggcaggactcacttcctaaggccttggttccccaggagctgttggccagaagcctccctcggtgc

SEQ ID NO: 911557 - DNA, 120 bp, Artificial Sequence
  ENSG00000251393_9 (sequence is synthesized)
cctgcctcatgggcctcttcgttgagcatctcacaacgtggcagcttacttcatcagtgcaagcaagcaagagcaagagagaggactcaccagagacagtaatagcaaaacagaaggcac

SEQ ID NO: 911558 - DNA, 120 bp, Artificial Sequence
  ENSG00000251393_10 (sequence is synthesized)
agtctttcgtaatccaatcacagatgtgacatcccatcactgttgccacatcctgtgagttagaagtaagtcattaggtccagcccacactcaaggagattacacaaggatgtaaagacc

SEQ ID NO: 911559 - DNA, 120 bp, Artificial Sequence
  ENSG00000251393_11 (sequence is synthesized)
agcaagaggatcattgggagctattttagaagcagcctactctaagataataataacatctagggtttgtttaaaatttaaattagagactgcatggtggcagctacttgggaggctgag

SEQ ID NO: 911560 - DNA, 120 bp, Artificial Sequence
  ENSG00000251393_12 (sequence is synthesized)
gtgggaggctcacttgaggccaggggtttgaggccagcttgggcaacatggtgagactcctccatctcttaaaaaaaaaaaacaaatatatgtgtatatttttaaatattcaaaaatcaa

SEQ ID NO: 911561 - DNA, 120 bp, Artificial Sequence
  ENSG00000251393_13 (sequence is synthesized)
attagagaatatgttcaattcgggccagcatatgttatgtaatatataactgttatatataataactattattaccattaatattattattgactatataatggctggttttctccccta

SEQ ID NO: 911562 - DNA, 120 bp, Artificial Sequence
  ENSG00000251393_14 (sequence is synthesized)
gctcctagaaggaacccttttatgaggagtaaatgaaataatatacataattcaggacctgacatgtagtaaatgctcaataatcattagttattgttaacattattaatagccgggcac

SEQ ID NO: 911563 - DNA, 66 bp, Artificial Sequence
  ENSG00000251393_15 (sequence is synthesized)
tacaaaaaaattaattgggcatggtggcggacacctgttgtcccagctactcagaaggctgaagca

SEQ ID NO: 911564 - DNA, 120 bp, Artificial Sequence
  ENSG00000261472_0 (sequence is synthesized)
tcagggcccgagggatgcatcactgagggagccacgactggtctctgggcctgacggtaaaccagggctgttaagtgttgcccaggtggccagcaagacaaataagtgcctcaagctaag

SEQ ID NO: 911565 - DNA, 120 bp, Artificial Sequence
  ENSG00000261472_1 (sequence is synthesized)
agctctccagcaattctcccccactcccacctctattcgattctggggccgaaagccagcaaggcagagccactgggaccttccctgcctgagaagcgcatagaagtaagaccctcgaac

SEQ ID NO: 911566 - DNA, 120 bp, Artificial Sequence
  ENSG00000261472_2 (sequence is synthesized)
aggtccaagctgggcccatcacagaaaacagatgtccactgagggtccagcatcgggatttagggctattttttacaatgttactgaatgaataaattcccccaagacttacattttaaa

SEQ ID NO: 911567 - DNA, 120 bp, Artificial Sequence
  ENSG00000251391_0 (sequence is synthesized)
gagagtctgtggctcagccatcgtgactatgtaaccagtattggtcggtggcccaaggtctctctcctttcagggttcaacctccaaccttatttctgcttccttcatgttggaattcac

SEQ ID NO: 911568 - DNA, 120 bp, Artificial Sequence
  ENSG00000251391_1 (sequence is synthesized)
actgtgagaattgttgtcatcctttctctacgactccaagagaaactttatactggaggaagaatattctaccactttgggatgcttccaaagaaatgggataccaaaggagtgaacttc

SEQ ID NO: 911569 - DNA, 120 bp, Artificial Sequence
  ENSG00000251391_2 (sequence is synthesized)
tgaccttcagttcttcctgagatcgataaagcttaaaagaaaagaaaaagccaactcagcttgtgcgtggatcctggaccttgctctaatacagaccccgctcctggagtggaataggga

SEQ ID NO: 911570 - DNA, 120 bp, Artificial Sequence
  ENSG00000251391_3 (sequence is synthesized)
gaccagaggagaggggagagataggggaattgccggtcagtggaacagtcagaacacagacaacatttactgaccttctcgaggatattggagatattctgccctgcctgccacctctca

SEQ ID NO: 911571 - DNA, 120 bp, Artificial Sequence
  ENSG00000251391_4 (sequence is synthesized)
cctcctctttcctggagcaggaggagtgacttacctgtttgctgggaaggggagaaattaacacccactgctccacgtgggaaagaaggatgtattaaattaaaggtctccattctcaaa

SEQ ID NO: 911572 - DNA, 120 bp, Artificial Sequence
  ENSG00000251391_5 (sequence is synthesized)
agagcaagagcagaggagtccctggtctctctgctgccaactgcgcaccttctcaaggtatccaaccaaggcagactaaatgattcggataattgcttgaatggcactgcttgctgaaac

SEQ ID NO: 911573 - DNA, 120 bp, Artificial Sequence
  ENSG00000251391_6 (sequence is synthesized)
tgttatttaaaagatgtgaaaaagatggaaagtacagaggaagcctatacaaatacctcaacaattgcaaggcattttgggtagaaaaagtgttcaagatataaagcttgtttcattcaa

SEQ ID NO: 911574 - DNA, 120 bp, Artificial Sequence
  ENSG00000251391_7 (sequence is synthesized)
aaaagaataattgagaaggagaatttgaatattgttgtcaagtcaaaacccagaacttatcctggccttggagtgtaagagaagatggacaggatggagtagactgaggcaatgggaaca

SEQ ID NO: 911575 - DNA, 120 bp, Artificial Sequence
  ENSG00000251391_8 (sequence is synthesized)
tattggtagagattctgaggtcagataccttgttagattagcaaggtattttctaatgcttctgagaggcatcaattacagacaatcataaatttcatctgtgaataaatctctgatgct

SEQ ID NO: 911576 - DNA, 120 bp, Artificial Sequence
  ENSG00000251391_9 (sequence is synthesized)
gctgcttcccctgcagtgcagaactgaccaggggctcctctgatggaaagctatttgctttgcagttagcaaagggaatgaaattctttttgaattctttgatggcatatccagaaatta

SEQ ID NO: 911577 - DNA, 120 bp, Artificial Sequence
  ENSG00000251391_10 (sequence is synthesized)
aacttattctactgtcccttgaaatgtaaagtcacatggcatccatttggtatttagtgcatgcaatcttgcttgatgagttgttgttaggtgcacaggttttgtttcctcaattcatgt

SEQ ID NO: 911578 - DNA, 120 bp, Artificial Sequence
  ENSG00000251391_11 (sequence is synthesized)
attaccttccagagggaggagctgtgtcttacactttgtatcactcacagtgtctagcagcatattctatacatattggtgctcaatgattgtttattaaatcattgacatgagctaata

SEQ ID NO: 911579 - DNA, 120 bp, Artificial Sequence
  ENSG00000251391_12 (sequence is synthesized)
tagagcttgatagaaatgattgagctaagtttattttaaggatgatagtcaatgtgtctcttcactaaagacaatacttgtcattgttttttgctcctttatcttcacagtccacttctg

SEQ ID NO: 911580 - DNA, 120 bp, Artificial Sequence
  ENSG00000251391_13 (sequence is synthesized)
tatgttctcctgtgggtcacaggactgtctatgcatccatacaaaatgcaaaacaggggatgacatcctagaatgaattgtggcaaaacagcttcaaactagccaagaagacaaacaaaa

SEQ ID NO: 911581 - DNA, 120 bp, Artificial Sequence
  ENSG00000251391_14 (sequence is synthesized)
cacctgaaacaagggtaagagagaaatggaaagcagagttgtcccatacgagaccattctagaccagacaaccctgagcagcccactggttgcccacagaagaatgagagagcccagttg

SEQ ID NO: 911582 - DNA, 120 bp, Artificial Sequence
  ENSG00000251391_15 (sequence is synthesized)
agatcaccccagccctgttctggatccagagaccacgagaaataatcagtcatttttggtttaagtcactatgtcttggatggtttgttgtacatcagtaatgaactgatacgagacttg

SEQ ID NO: 911583 - DNA, 120 bp, Artificial Sequence
  ENSG00000251391_16 (sequence is synthesized)
atctggaaaagaacccagagtagctgccaaccagatggccccttggtgaccgtgaagctgcagcctctgacatgatatgtagataaaagacgtcacggggataagagctagagaaagctt

SEQ ID NO: 911584 - DNA, 120 bp, Artificial Sequence
  ENSG00000251391_17 (sequence is synthesized)
taacgagaagagcttagaccattttcaaagctcctccacagtgcacggaggggcccaaagctggcggagcgctgggcgacacgctcccgctcgcaccaaggcctcgctctgatgagctgg

SEQ ID NO: 911585 - DNA, 120 bp, Artificial Sequence
  ENSG00000251391_18 (sequence is synthesized)
gcaattgggagactgtttgaacaaaccaaagaaaaatatcaaaaggcaaattggagttagggagaaaatgaatagcccatgatctccaagggagattacagaggtaatgacaaagcaggc

SEQ ID NO: 911586 - DNA, 120 bp, Artificial Sequence
  ENSG00000251391_19 (sequence is synthesized)
aggtttttagaggcgctgttattccaagaaaggtaattttgttcaacttattttttttttaacggaaaagaggatgaagagatcagcactagctaaatcatcactgtcagataaaagata

SEQ ID NO: 911587 - DNA, 120 bp, Artificial Sequence
  ENSG00000251391_20 (sequence is synthesized)
aatctttcattaggaaccatatctttgcatgcccttttgacattgaagaatatatttgatgtaaggatttggggctttatcaaaactatagtattctaaaataaacaaaaccacaatgtc

SEQ ID NO: 911588 - DNA, 120 bp, Artificial Sequence
  ENSG00000251391_21 (sequence is synthesized)
taatgagtctcggcttgggtcatggaaaaactgaagatgcattagatcatcaaagaaaatggcacaaacaaccctgcaaaagaaaggatcttcttccagattaaatctcttataatataa

SEQ ID NO: 911589 - DNA, 120 bp, Artificial Sequence
  ENSG00000251391_22 (sequence is synthesized)
agccatcgtgactatgtaaccagtattggtcggtggcccaaggtctctctcctttcagggttcaacctccaaccttatttctgcttccttcatgttggaattcacactgtgagctgttac

SEQ ID NO: 911590 - DNA, 120 bp, Artificial Sequence
  ENSG00000251391_23 (sequence is synthesized)
tactgatttgggcggagacttttactggcttcctgataacaaagccctcataggagggaatctctcaacagcagaaggctgtggctactggaacgctgagttctctcagacacattgaaa

SEQ ID NO: 911591 - DNA, 120 bp, Artificial Sequence
  ENSG00000251391_24 (sequence is synthesized)
tagcaaggacgaagtgagtgcaccactgattaaacatggagagaaatttctttccaaagggctgtgtaagaggagaagcaggagatgtatgtaagatttctcatttgtgcaatgcatcct

SEQ ID NO: 911592 - DNA, 120 bp, Artificial Sequence
  ENSG00000251391_25 (sequence is synthesized)
cattagggacgaaatcacaccgatggaatgaaagggaaaataaccaaagacaacagcaacagctcaaaacaccagaaaaagcagcaacactatatctatccgtcactggcccaactcgac

SEQ ID NO: 911593 - DNA, 120 bp, Artificial Sequence
  ENSG00000251391_26 (sequence is synthesized)
atcgtgactatgtaaccagtattggtcggtggcccaaggtctctctcctttcagggttcaacctccaaccttatttctgcttccttcatgttggaattcacactgtgaggagaatttcca

SEQ ID NO: 911594 - DNA, 120 bp, Artificial Sequence
  ENSG00000251391_27 (sequence is synthesized)
aagccttaccgtcatggaatacactagaccgtgctgctaccatattctgcgttggatgtgagttctcaagttctggtccatggggaatgggcaagtgaagatgagaattgcaaaaaacta

SEQ ID NO: 911595 - DNA, 120 bp, Artificial Sequence
  ENSG00000251391_28 (sequence is synthesized)
caggcacatgcagccctacacaggctgaatttcaggcctcctcgtgcagggaaccctcttcccagctgtacatggtcccctgagcattcgcatgtaattctctcatctttccagccattc

SEQ ID NO: 911596 - DNA, 120 bp, Artificial Sequence
  ENSG00000251391_29 (sequence is synthesized)
aacctttccaaagcacacgctgggaattactctgggtgtgggtgtggagaaaggagagaaaaactgagaaactcagagacagagtttgaagaggactttgtaagtgaaggtttttaccat

SEQ ID NO: 911597 - DNA, 120 bp, Artificial Sequence
  ENSG00000251391_30 (sequence is synthesized)
cccttggtaagtgtgtccctttaaggaagaaaggggctggctcccatttggatctacacatccctggggaagatatcagaattttccattaataaacttaggagttttaagatccataaa

SEQ ID NO: 911598 - DNA, 120 bp, Artificial Sequence
  ENSG00000228604_0 (sequence is synthesized)
gaagggcttttgtgactttggttccctgtgagcaagatgatctgcaagtggcgacatgaactgattaccaatcactgacttcaggaggaagcaagttctggaggctgggaagtccaagat

SEQ ID NO: 911599 - DNA, 120 bp, Artificial Sequence
  ENSG00000228604_1 (sequence is synthesized)
ctgacaagggaatgagaagcagcaagttaaatgcagaacagaaatgaagctgttagaccaaattttcagcttctcacatgggcacagattaccaaaagtgggactgctggcacaaagcat

SEQ ID NO: 911600 - DNA, 120 bp, Artificial Sequence
  ENSG00000228604_2 (sequence is synthesized)
atgtgtgtattcatcgtgactgttactaccagattcttttccaagaaagttctaggcactaactttttttttaagactgcatgaagtatatctttttctaataatacagtatttcatgga

SEQ ID NO: 911601 - DNA, 120 bp, Artificial Sequence
  ENSG00000228604_3 (sequence is synthesized)
gaggatagaaaagtatagaggaaaaaggaagttccacctccatgatcctttagtcctctagctgttctccccagagaaagcaactctaagtttcttgcagaaaggacctggatacactag

SEQ ID NO: 911602 - DNA, 120 bp, Artificial Sequence
  ENSG00000228604_4 (sequence is synthesized)
tagatgtaccataatttatgtaaacagtctgctattgaaggacattggtttgtttcccaccatcttccactccaaatcatgctgcagtgattatccctgagtgtatgtctctctgcacac

SEQ ID NO: 911603 - DNA, 120 bp, Artificial Sequence
  ENSG00000228604_5 (sequence is synthesized)
aggcaaggaatgagaagcagcaagttaaatgcagaacagaaatgaagctgttagaccaaattttcagcttctcacatggcacctctatctgtgaatacgattttctcacttgttagagcc

SEQ ID NO: 911604 - DNA, 120 bp, Artificial Sequence
  ENSG00000228604_6 (sequence is synthesized)
ccccacaatggaatagtgcctgaaagacccatgggggagctgtccatcagagccacactccccaccagctccttggaaggcacccccaaaagcaggagtggagagtccaaatgtcatctg

SEQ ID NO: 911605 - DNA, 120 bp, Artificial Sequence
  ENSG00000228604_7 (sequence is synthesized)
ccctcgaacaccacatgaaatggggagtacccttcactcagagagcagcccacccctcttcctcctttcagggagggttaccacagtggaagtgaagctcctcaacaagccttcagctct

SEQ ID NO: 911606 - DNA, 120 bp, Artificial Sequence
  ENSG00000228604_8 (sequence is synthesized)
gtgatgaaattccctggtcctccacacctatccatccctgacagagtatgatcagtttgcttctatttctagtagaatatatttcacagcataatagttcaaagaaaccttacaacccta

SEQ ID NO: 911607 - DNA, 120 bp, Artificial Sequence
  ENSG00000228606_0 (sequence is synthesized)
cagaaattcaagccaccagatgctttccaactaacagggaccaaatgggaccgttctaagatatcctaaaagatttgggagttagaggaggtaaactaagataattatattacaaagggt

SEQ ID NO: 911608 - DNA, 120 bp, Artificial Sequence
  ENSG00000228606_1 (sequence is synthesized)
acaagaccacaagacaacaaccgactccggaattcttggacctccgccttccgtacaaggcccagccgccccgtccactgccaccaccaacgccgccgccatcttacactggccagcggc

SEQ ID NO: 911609 - DNA, 120 bp, Artificial Sequence
  ENSG00000228606_2 (sequence is synthesized)
tcgagaagactgagggaagagtggtcgcgcgagctcacggctcgcaaccctcctcgaaggacgcacaaggggcggggcttaaggccaacggaaaacagagcgagaggcgcctgcgcatta

SEQ ID NO: 911610 - DNA, 120 bp, Artificial Sequence
  ENSG00000228606_3 (sequence is synthesized)
ccgaagaggcaaagttgtttttgtagtttcttcgggcttgcttatcttgtgatactctaaacaaatgcgagttaggggctacccagagttgtgatagaaataaactaaatttccagcgga

SEQ ID NO: 911611 - DNA, 120 bp, Artificial Sequence
  ENSG00000228606_4 (sequence is synthesized)
aatctaaggggagaaataggagcgcacacatgggtcacccaacgaagcaaggcgtccctgtgaactgtgcggctggctcttgggggcaacaccagggctgacctgaggaaagggcaacca

SEQ ID NO: 911612 - DNA, 120 bp, Artificial Sequence
  ENSG00000228606_5 (sequence is synthesized)
gtactcccagcgatgacttcgggtcggcggaaggaaaagacctgagcgctaagagcttgggatacgggtcaggcccatccttaggggaaaccggctgggaagcgagggggggcgcaggcc

SEQ ID NO: 911613 - DNA, 120 bp, Artificial Sequence
  ENSG00000228606_6 (sequence is synthesized)
caaggatttcttctgaaaatccccgtttcctttcagggctttgtttccttaagtggtttctatactatcgaggcccattttcccctgagagtccccatttacgtatttttaaagaagggg

SEQ ID NO: 911614 - DNA, 120 bp, Artificial Sequence
  ENSG00000228606_7 (sequence is synthesized)
ctcagtagcttgaggtgtagctattccagaagctcttttctgaagagaggtggtgtgggtaaaggttcccaagagtgggccgggtgatgtggggtgacttttgtactctgtttcgttatg

SEQ ID NO: 911615 - DNA, 120 bp, Artificial Sequence
  ENSG00000228606_8 (sequence is synthesized)
acacctacagtaaccctgcagaggattactcccagctgccaggctggggtattttttttttttttcttaccagaagcccagggtgcaaaaatctgaccctttctcacctcccctaccgct

SEQ ID NO: 911616 - DNA, 120 bp, Artificial Sequence
  ENSG00000228606_9 (sequence is synthesized)
actctcctattccaagtcattacatattacttaagactaccgcaatagaaacttacctcgtttgtctacttccattattgccattacagttaaacataaggcagccagagtgctttttaa

SEQ ID NO: 911617 - DNA, 120 bp, Artificial Sequence
  ENSG00000239589_0 (sequence is synthesized)
gccacctcatcgtgtccgccatcttggggcgacggccagaagtccagggctaggagcctcagccggcggacgccaggaaacagaactgaaccaaaatacaaacaacataaactaccactt

SEQ ID NO: 911618 - DNA, 120 bp, Artificial Sequence
  ENSG00000239589_1 (sequence is synthesized)
gatgagaagaacttcaaagtcaaattgcaaaaggtgactaaaaaaggggagtactttcagccgttttcaaaataatctatgatatgtactggaaaacttctaataatccttgtcatttta

SEQ ID NO: 911619 - DNA, 120 bp, Artificial Sequence
  ENSG00000239589_2 (sequence is synthesized)
caactttcccacagttagatcatcagcaaatgtcacttggatccctagctaaattgttcttcccagaaaatagttatctccactatggaaagtattttatcagaagaattcgtagaagta

SEQ ID NO: 911620 - DNA, 120 bp, Artificial Sequence
  ENSG00000239589_3 (sequence is synthesized)
gaatctgtttgtcttcagttaaacaaaagaagaacctcattgctttccaactgggccccggccattttccagttgaaacatcaaatattttatttgtgtctttcactgccaattaaaggg

SEQ ID NO: 911621 - DNA, 120 bp, Artificial Sequence
  ENSG00000239589_4 (sequence is synthesized)
atccacctgatcttgaactggtgctattccatggggaaaattggaacatggggcaattaacactttctccactttatcccatcaacaggaaattgaaatataaccaactaactcaggaga

SEQ ID NO: 911622 - DNA, 120 bp, Artificial Sequence
  ENSG00000239589_5 (sequence is synthesized)
catcatggaagatgtcacacagtgaatgatgatgaagcagaatttttaaaatgtgtaggattacgagaagtggggtcatttttctttgtgtatggtattgctgatgcagtttaatgctcc

SEQ ID NO: 911623 - DNA, 120 bp, Artificial Sequence
  ENSG00000239589_6 (sequence is synthesized)
attacttctaaattttcatcataagctagattttccagttgtggtttctataaagaaaaacaaacattctgaagacagtttttccagatttattccagatatcgatgattaacttttgaa

SEQ ID NO: 911624 - DNA, 120 bp, Artificial Sequence
  ENSG00000239589_7 (sequence is synthesized)
gctcctctgttgatttgaacatccgctgaagcttatttttcacctcagaatagcatcaacattatttgaaattcaattgtactttctcgttacattaataaatcatggaagttgagaaaa

SEQ ID NO: 911625 - DNA, 120 bp, Artificial Sequence
  ENSG00000239589_8 (sequence is synthesized)
agcgccacctcatcgtgtccgccatcttggggcgacggccagaagtccagggctaggagcctcagccggcggacgccaggaaacagcagttactgatgctacaatattcctttatgaagc

SEQ ID NO: 911626 - DNA, 120 bp, Artificial Sequence
  ENSG00000239589_9 (sequence is synthesized)
ctcacatacaaagaaagaacaaattgctgatagacacagatgtccatcaatctcaaaagtcgtcatgaaacctctggaagaattgagctggtcgactatgcaaacagttgtcaagagcct

SEQ ID NO: 911627 - DNA, 120 bp, Artificial Sequence
  ENSG00000239589_10 (sequence is synthesized)
ataaaatatgcagcataaaatttttcctttgtagtcaaacctgattattcctcttagatactgggaacagaatttcacagtcgtcagagaatataccttttgtattttcgtattaaatat

SEQ ID NO: 911628 - DNA, 120 bp, Artificial Sequence
  ENSG00000239589_11 (sequence is synthesized)
gtactcctattacttaacaattgtagtttaactccttttttaggtaaaattctaatttttctcttctgttaaaaatttccagttccaacacgaagataataaagaatattaattttatcc

SEQ ID NO: 911629 - DNA, 120 bp, Artificial Sequence
  ENSG00000239589_12 (sequence is synthesized)
gagtatgtaccataaagtcttatctgcagatttagacttgaatatgcattacatcattggaaaatattatgtcactgaaattggaaaaggttgagttaaacaaaactaaactattaactg

SEQ ID NO: 911630 - DNA, 120 bp, Artificial Sequence
  ENSG00000239589_13 (sequence is synthesized)
cctggcgacgcggaagctccgcaacacgctgtcggtcagcttcatggcggcgggtggggaaggcagccgggactggcagcgggcgggctgctgaggggccaacccctggtggcggcggtg

SEQ ID NO: 911631 - DNA, 120 bp, Artificial Sequence
  ENSG00000239589_14 (sequence is synthesized)
ttgagccggtggctagcgagaagtcggccggcagtggggccgcctccttttcttcctcctgcttggacgactgtcttccgcctcaactgtggagcctcgccgaccgttagtcctcacaga

SEQ ID NO: 911632 - DNA, 120 bp, Artificial Sequence
  ENSG00000239589_15 (sequence is synthesized)
gcaggtaattgtgacaagtccagtgtgggttactggtcatgaagaatccattgttgatgacatcccagaagagaacactaagtcttagctttcatcttacccctgaacttcccttcctct

SEQ ID NO: 911633 - DNA, 120 bp, Artificial Sequence
  ENSG00000239589_16 (sequence is synthesized)
cttgaaggaagtaatatttatttttgtatttctgtacttaagtatatcacaaatacagatttctgtagttggagaattaatataaagtaacatagtattcaataagaagggatttttctt

SEQ ID NO: 911634 - DNA, 120 bp, Artificial Sequence
  ENSG00000239589_17 (sequence is synthesized)
agaggtctgaattataaactaaatatctgtgtaactttgaacaatttatttaactttttgaagatatttgaaacttatttctaaaatgagaaaaatacctatcatgaggagcttttgtaa

SEQ ID NO: 911635 - DNA, 120 bp, Artificial Sequence
  ENSG00000239589_18 (sequence is synthesized)
atactaaatgagatataacatgtaaagcagttaacaaaattctaggcatggtatgggtatttaaataaatggaaagtattcttaagttttatagtaatagttttacaaattttatatgta

SEQ ID NO: 911636 - DNA, 120 bp, Artificial Sequence
  ENSG00000239589_19 (sequence is synthesized)
attctgatgattaatggttattttaatatcttttctactgtatatgctagggagtattttggagtatcaaatttaaatattagtaaagcatgaaaatttgatttagtaataagtagacaa

SEQ ID NO: 911637 - DNA, 120 bp, Artificial Sequence
  ENSG00000239589_20 (sequence is synthesized)
agcagaaaaatgcactaaatcttatttcttatgcaaattgggacaataaaatatgggagcaagaaataaggctgaagtatgtatatgagcagaataaaataaattactgcaaaatgtaaa

SEQ ID NO: 911638 - DNA, 120 bp, Artificial Sequence
  ENSG00000239589_21 (sequence is synthesized)
actcaccaccatcccatgtacatgtatgttccaggaaggaagttttccttccaactccacaactgaattataaggaatagtatctgtgagctttctatagtcaatcaaaaatattggtgt

SEQ ID NO: 911639 - DNA, 120 bp, Artificial Sequence
  ENSG00000239589_22 (sequence is synthesized)
gataagtggaaaacataaaaatagatctcctgccatcaagaagcaaatagtaaaactaggcaatgttagattaagtgctacagggtgaggagtccaacttcaggtcgaaatgccatgtgc

SEQ ID NO: 911640 - DNA, 120 bp, Artificial Sequence
  ENSG00000239589_23 (sequence is synthesized)
gatatttccggcccaaacataggtagttataaaagctttacttcgcagatcttagcagggaaatcttccgcttgcggggaaatgtgctggtacacagccagcacatttcagtctccgaag

SEQ ID NO: 911641 - DNA, 120 bp, Artificial Sequence
  ENSG00000239589_24 (sequence is synthesized)
gagttgtagtcaaggactcagctctccctgcctggccatgtccttatgcatagctgcatttttagcccaagtgccttcatttggaggtgtctttattgaggactttagcagggaccttcc

SEQ ID NO: 911642 - DNA, 120 bp, Artificial Sequence
  ENSG00000239589_25 (sequence is synthesized)
gctttccctctgcccttctccgtgtcctccacaccatctaggtcgataaaactatgggatccttttgttttaggctccctctgcagtggaattacccttatgtcttttctgtctatgctg

SEQ ID NO: 911643 - DNA, 120 bp, Artificial Sequence
  ENSG00000239589_26 (sequence is synthesized)
taggattacgagaagtgggcaagtacttatgaaaagataccataaacaaaacctattttacttcagacattctctaaactttatttcaacctttagaaactgtgaataagtacatttgtc

SEQ ID NO: 911644 - DNA, 120 bp, Artificial Sequence
  ENSG00000239589_27 (sequence is synthesized)
aaatgaatcttggtatttataaagttctggttgttactgatattttataatctgacctagcttaactgtccaggttaatttcccaccaattttcaataggcacatttcattttgaccaaa

SEQ ID NO: 911645 - DNA, 120 bp, Artificial Sequence
  ENSG00000239589_28 (sequence is synthesized)
ccaggttacaactgaaactatcgtatcttaaccaatctgtagtagtatttaattaaaaatacttgttaaagcagtaaattgaaaattatacttaggtattataaacattgcatttaacat

SEQ ID NO: 911646 - DNA, 120 bp, Artificial Sequence
  ENSG00000239589_29 (sequence is synthesized)
attaagaaagtctgcagttgagcctggagccagcaaaagacatcatcactaaaagtatatgcatgacccgcatttgttgcctttatggtccttacccaagatatttgaattcaccagaat

SEQ ID NO: 911647 - DNA, 120 bp, Artificial Sequence
  ENSG00000239589_30 (sequence is synthesized)
ggtcttaatatggtattgtaagtacctggatctgaaaaccattaagtatgagagtgcgctgtattggtgatgccagtttgtggactccttatgtaaataaatgaaggacaagttaaaaac

SEQ ID NO: 911648 - DNA, 120 bp, Artificial Sequence
  ENSG00000239589_31 (sequence is synthesized)
tgcagtcactcatgtgaaatataaaaggctggcagaatacggctaaatgtcgaggtctagcccaatgtgtgagatttagagaaatcatgtattccaataaaatcagatatactcctgaaa

SEQ ID NO: 911649 - DNA, 120 bp, Artificial Sequence
  ENSG00000239589_32 (sequence is synthesized)
caggaacaacacttgttctgctgatacagatttgggaatgaaatctgaaaaggcatgaaatagactggtagaagggaaaaaatgttaagaaaagagcattcatattttattctaggtaac

SEQ ID NO: 911650 - DNA, 120 bp, Artificial Sequence
  ENSG00000239589_33 (sequence is synthesized)
agcttgataagttgatacagagggaggagaataataaaaagaacacaagcaaatatttagagaagtatcagtgaattataaggtttttatgtgatttttctagggtctttgttgatttgt

SEQ ID NO: 911651 - DNA, 120 bp, Artificial Sequence
  ENSG00000239589_34 (sequence is synthesized)
caaagaaaatcaagaaaaatagcatacactttcttctttaaaccccttttgtgtatatgcttttgtgtctgtgtgtataaaatatgtttataaatacattaaactatttttactaattaa

SEQ ID NO: 911652 - DNA, 120 bp, Artificial Sequence
  ENSG00000239589_35 (sequence is synthesized)
gatccgttggtaaccaccaatatgctctcagctcattcacattgaacttctctcgattcgacatatacgaggaactattctgtgaaaattattgagacatatttgggacccatcccttgg

SEQ ID NO: 911653 - DNA, 120 bp, Artificial Sequence
  ENSG00000239589_36 (sequence is synthesized)
gtatttctcctgtgtaactggaactttgtatcctttgaccaacgtctccacttggcccatcccaactgccttccccgatccgttggtaaccaccaatatgctctcagctcattcacattg

SEQ ID NO: 911654 - DNA, 120 bp, Artificial Sequence
  ENSG00000239589_37 (sequence is synthesized)
atagacacagatgtccatcaatctcaaaagtcgtcatgtctgtggatccatacggttaataccacctgtagtcagcattctgaaaagggaacaggccatatgaggacatcgagagacggg

SEQ ID NO: 911655 - DNA, 120 bp, Artificial Sequence
  ENSG00000239589_38 (sequence is synthesized)
actgtctacaagccaagaagggaggattctttctgaaaaaggagaaaccaaacctgcaagcaccttgatattggacttccagccccaagaatgtgagaaataaatttctgctgtttaagc

SEQ ID NO: 911656 - DNA, 120 bp, Artificial Sequence
  ENSG00000239589_39 (sequence is synthesized)
agaagtccagggctaggagcctcagccggcggacgccaggaaacaggatttcagttaccataataatattggatctttgcgatctgagagctgagaagtccaagatgaagtctctggcag

SEQ ID NO: 911657 - DNA, 120 bp, Artificial Sequence
  ENSG00000239589_40 (sequence is synthesized)
ggggcgacggccagaagtccagggctaggagcctcagccggcggacgccaggaaacagatctgagagctgagaagtccaagatgaagtctctggcagatttgatgtctgttactgatgct

SEQ ID NO: 911658 - DNA, 120 bp, Artificial Sequence
  ENSG00000239589_41 (sequence is synthesized)
aaccaccaccctgctcactcaacaacaatgaacactgaggcaagactctccactagcaaaaagattatgacttgttgaagactcagataattaaatatctgaatgaaatgctcatgaaag

SEQ ID NO: 911659 - DNA, 120 bp, Artificial Sequence
  ENSG00000239589_42 (sequence is synthesized)
gaagtccagggctaggagcctcagccggcggacgccaggaaacagatctgagagctgagaagtccaagatgaagtctctggcagatttgatgtctgccaagaactgaaccaaaatacaaa

SEQ ID NO: 911660 - DNA, 120 bp, Artificial Sequence
  ENSG00000239589_43 (sequence is synthesized)
tttatggtgattaaaagtaatgatactataaacatttgtggacaggtttttgtgtggacataggttttcaattcaattgcataaatacttagttggattgtatggtaagactatgtttac

SEQ ID NO: 911661 - DNA, 120 bp, Artificial Sequence
  ENSG00000239589_44 (sequence is synthesized)
ctttgtaataacttccaaactgttttcaaaagtggtttaccactttgaatttccactgtcaatgaagggtacttcttcctgcactgtgcaatcaccatccactgatatccttactttcta

SEQ ID NO: 911662 - DNA, 120 bp, Artificial Sequence
  ENSG00000239589_45 (sequence is synthesized)
tttctatttttatactttaaccattctaatagatgtgtaatggcatctcattgttttatttggaattgcttaataatgaataattaatcattttcttatgtttatttgcatttgcatatc

SEQ ID NO: 911663 - DNA, 120 bp, Artificial Sequence
  ENSG00000239589_46 (sequence is synthesized)
tgcatatcttatttggtaaaatatctgttcagatttttaaattgaattgttttcttattgttgatatttgaaactgttgacctttaaacattctttctatattttgaatataagtatttt

SEQ ID NO: 911664 - DNA, 120 bp, Artificial Sequence
  ENSG00000239589_47 (sequence is synthesized)
tataaaataagtatagtgttatttatgttgctgctttagtgcagcaggaataaagaccatttcacgatgggaaaaactgaacatattagtggaatgattgactcatggggtatcagacat

SEQ ID NO: 911665 - DNA, 120 bp, Artificial Sequence
  ENSG00000239589_48 (sequence is synthesized)
acctcatcgtgtccgccatcttggggcgacggccagaagtccagggctaggagcctcagccggcggacgccaggaaacaggctccctctgcagtggaattacccttatgtcttttctgtc

SEQ ID NO: 911666 - DNA, 120 bp, Artificial Sequence
  ENSG00000281721_0 (sequence is synthesized)
ttgctgaatatgaatgaataccaaggcagctggtctcagtcaaactgcagcaacgctgggcatgcagctcaacatcctctgagactctgtcctcattttgcgaaattagggacaaccaga

SEQ ID NO: 911667 - DNA, 120 bp, Artificial Sequence
  ENSG00000281721_1 (sequence is synthesized)
cctatcttcctgtcctatcataagaattaaagaagacatgggagtattccgtatacagaggaaagcagagggagtcttgaaacagcagaagaggagacagcaatgcaatcacagaagcag

SEQ ID NO: 911668 - DNA, 120 bp, Artificial Sequence
  ENSG00000281721_2 (sequence is synthesized)
agattggagcaatgtggccacgccacaaggaatgcccacagcaccagaagctgaaagaggcaagaaatggattctccctaagagcctctggaaggaacacagccttcttggtttgggccc

SEQ ID NO: 911669 - DNA, 120 bp, Artificial Sequence
  ENSG00000281721_3 (sequence is synthesized)
agtgaaactcactatagaacctctggcctccagaactgtgagagcatacatttctgttggtttaaatcagcaagtttgtggtaatttgttacaccctaggtttacggtctaatacaccac

SEQ ID NO: 911670 - DNA, 120 bp, Artificial Sequence
  ENSG00000281721_4 (sequence is synthesized)
ctcagatgaggagaatgagaactccattatgggaaaggtaaaatgaaaatttagaagtggctaagttgccagataactctgaaaccataacagctctgagcttccttcatcagacttttt

SEQ ID NO: 911671 - DNA, 120 bp, Artificial Sequence
  ENSG00000281721_5 (sequence is synthesized)
taaatgagaaagggataaacttctgtctttcagtcacagttatttggagtttcttttataggcagtcaaacctataaataaccggcaaatatgttatttaaccctctatctctaagccaa

SEQ ID NO: 911672 - DNA, 120 bp, Artificial Sequence
  ENSG00000281721_6 (sequence is synthesized)
gatataactaaataatgtaaaataaatagatgtccacccaaggaatacgatttagtatcacgttttaaatatagtaatagtaagtacataaagaaaatctcttcactgagcttggtacca

SEQ ID NO: 911673 - DNA, 120 bp, Artificial Sequence
  ENSG00000281721_7 (sequence is synthesized)
cttatttccatgactggactcaagatatgtggaaatgatacttttactgccaaagactttataggttataggaatggtttcagtggtgttaaatacattacaccagtaatgacatgcttt

SEQ ID NO: 911674 - DNA, 120 bp, Artificial Sequence
  ENSG00000281721_8 (sequence is synthesized)
atggaaaatagaaattctaggtgggtagggggtagttcttggacacattgaaacatggtttaaaataactcagtctttgaccaggcttttcttctgttcattgggaattatttcattgcc

SEQ ID NO: 911675 - DNA, 120 bp, Artificial Sequence
  ENSG00000281721_9 (sequence is synthesized)
atctctacaagcctcagtttccttgtaggtagaatggaactacctcataagttctcacataaatgaggtaaggctttcacagagtgcctgccacagtgcaagagtttaataataggaaag

SEQ ID NO: 911676 - DNA, 120 bp, Artificial Sequence
  ENSG00000281721_10 (sequence is synthesized)
tcgtcatcgctattgctatctggatgagacaggcctattaaggaaccaagaaaaggactaacaaatatagttttttgtttgtttttgttttgcctactgttgctacctttgaagaacaaa

SEQ ID NO: 911677 - DNA, 120 bp, Artificial Sequence
  ENSG00000281721_11 (sequence is synthesized)
tatagattttgacactattaacagaaggcaatttggaagatcaaatgtaagtcttttagtcatccattcctaccaaaagcttgtttcatacaaaattttagtttgtatgaagtgttcttc

SEQ ID NO: 911678 - DNA, 120 bp, Artificial Sequence
  ENSG00000281721_12 (sequence is synthesized)
tggtacaactttttagtcaccatgggaattttatttcaacaaagtattaaaccatgaggcatttattttgaatatagttagcaaaaagagtgattgggagctgaagagagataaggaaag

SEQ ID NO: 911679 - DNA, 120 bp, Artificial Sequence
  ENSG00000281721_13 (sequence is synthesized)
tggaatgaaaggcagagagaagaaaagatttgagcaatgcagcttcaggcaagatggggaaggaagaagagttgaagcaagtatgaaagggactaagagagcaaaacgaagtagtttgta

SEQ ID NO: 911680 - DNA, 120 bp, Artificial Sequence
  ENSG00000281721_14 (sequence is synthesized)
ggataccatgggaaataatgaactacatagcctttgcactggcattgagtcacagaaatacctattcacatagctgcagatgactgaaagctttttgtcattgttgttcatctcaaacat

SEQ ID NO: 911681 - DNA, 120 bp, Artificial Sequence
  ENSG00000281721_15 (sequence is synthesized)
caaaactattctgtagatctggaattatggtcagacacaggtgaatgtcaacaactctgggtcaaaaaaatcagaaagccatttaaatcaactaaggaccaggaaggtaggatagagaac

SEQ ID NO: 911682 - DNA, 120 bp, Artificial Sequence
  ENSG00000281721_16 (sequence is synthesized)
cagcatagctgagattgtactgcaagtggttattgtgctaagtgcatgaatacgcctctctcgtttaagtcatacaaaaatcctgcaccactattttacataagaaatgtgaaataaatt

SEQ ID NO: 911683 - DNA, 120 bp, Artificial Sequence
  ENSG00000281721_17 (sequence is synthesized)
ttttatctaagatgaaataataatattgatatattagggattctattaacgagaatgttaaattaagatgagtatgttatattaaaatccatgttccattaattacatcatgctgccaat

SEQ ID NO: 911684 - DNA, 120 bp, Artificial Sequence
  ENSG00000250448_0 (sequence is synthesized)
ggctgagcagtggagcgggaaagggcgcgggacccgggactgtaaccgccacttccaggccctcgctccccgcgcttggagccctcaagggcactctcagggatcctcgagagccttaaa

SEQ ID NO: 911685 - DNA, 120 bp, Artificial Sequence
  ENSG00000250448_1 (sequence is synthesized)
acagaagtctctggaacctgtgtcctctccctgtctgtcccgccctcgaatccctgtgtcctcctcacccgctccctcctgcatcgtctctgccttgaaccttggaaacaagtgctttca

SEQ ID NO: 911686 - DNA, 120 bp, Artificial Sequence
  ENSG00000250448_2 (sequence is synthesized)
acataagcgatgtgaaggcattaaaacatgttgaatggctgtgtgcacaggatatcctacacctgcctgacatctggaatgcaggtgaagcaacctgacctgatggagccacccacactt

SEQ ID NO: 911687 - DNA, 120 bp, Artificial Sequence
  ENSG00000250448_3 (sequence is synthesized)
tagaagaatctcaaatacagccaaccctgatcttcctcagctgaaaatcatccatctaccaaactcacaaattaaacataacgtaaatattattacgttatgccttgtgttgtggtgtta

SEQ ID NO: 911688 - DNA, 120 bp, Artificial Sequence
  ENSG00000250448_4 (sequence is synthesized)
ggcatgcacagatctgggtttatccccttgtgctagacagtaagtcacttggtttgagtctgtctgtttcagtgacccttttctctaaagcatttagttaacatgatggctgacatcagc

SEQ ID NO: 911689 - DNA, 120 bp, Artificial Sequence
  ENSG00000250448_5 (sequence is synthesized)
gagaactcagtaaatgtggattaaatgagaaaattcaaaagaatgattacttacctttttaaagttatcaatgaattctatacaaataacaacttaaaggtcactatgtttccaggaagt

SEQ ID NO: 911690 - DNA, 120 bp, Artificial Sequence
  ENSG00000250448_6 (sequence is synthesized)
ttgggtggagagcagaggattggttttctagacagagaacttgttagactgaaacaaatctttctgtggaaagtgttgggttgctggcctgaatcctggctgctatagggtccctgcctc

SEQ ID NO: 911691 - DNA, 120 bp, Artificial Sequence
  ENSG00000250448_7 (sequence is synthesized)
tttcttgggcccctgaccttagaagaatcttccttcagataagaagaggaggcagctccaagtttacggcaaaccaccagcctcacacaccactcccaacccaccctttttccagacttt

SEQ ID NO: 911692 - DNA, 120 bp, Artificial Sequence
  ENSG00000250448_8 (sequence is synthesized)
tgctccagcctggaccatgagctgctgagcagtcgctgaaaatcccttcaacaaaatgacatagctgatgtgagtaaatagtaattccttgaaggaagagaaattctatttccaggggaa

SEQ ID NO: 911693 - DNA, 120 bp, Artificial Sequence
  ENSG00000250448_9 (sequence is synthesized)
tgactgcttgacagataaaaagagacacaagtatccccacatcttggaatttgacctctagccgccacaattgactatatttgtcatcaccttcttcttgtccagctgaactcctaaacc

SEQ ID NO: 911694 - DNA, 120 bp, Artificial Sequence
  ENSG00000250448_10 (sequence is synthesized)
tgccaccccacccctagctaagctaataacatgaaactgtgccccaaaagatagtgaatatttactgaaatgcaaaaccaagagttataaactatagccacagacaagacttcttaaatg

SEQ ID NO: 911695 - DNA, 120 bp, Artificial Sequence
  ENSG00000250448_11 (sequence is synthesized)
caggaagttttgaataagtgggcacaagttaatacaatcaaagaaaaacaatatttgatattttggacatgagcccaatgtgctggcgtatatgtgtgtgtgagtgggcaggtggatggg

SEQ ID NO: 911696 - DNA, 120 bp, Artificial Sequence
  ENSG00000250448_12 (sequence is synthesized)
ggaaatctcactaatgatgggtgtcatcaggaaagaaaatccaaaaacaaaactaccattcatttgtacaattaacaattagaaagtgacaaatgtttaataatacacttggagtgatac

SEQ ID NO: 911697 - DNA, 120 bp, Artificial Sequence
  ENSG00000250448_13 (sequence is synthesized)
atggttgtacctgacctcagaaaactcatggcacaactaagaagacagagacatagacataaacatgtcacatagcttgagttctagttggaggattaaaagtattatacaagtacagag

SEQ ID NO: 911698 - DNA, 120 bp, Artificial Sequence
  ENSG00000250448_14 (sequence is synthesized)
atctaagagttctgcagaagaaagatgatgttttataagaaagttcctcggagtgggtcatttgagctgggatttgaaggctaaataggagtatgtcaggtgtgcttcatatcagcaact

SEQ ID NO: 911699 - DNA, 120 bp, Artificial Sequence
  ENSG00000250448_15 (sequence is synthesized)
aacaaaatcaaagagacagagaaactgctgtagttgttaaagtgaccccatctctacaaaaactacaaaagttatccacgggtggtgacacacccctgtggtcccagctacttaggggtg

SEQ ID NO: 911700 - DNA, 84 bp, Artificial Sequence
  ENSG00000250448_16 (sequence is synthesized)
ggtggtgacacacccctgtggtcccagctacttaggggtgctgaggtgggaggatgacttgagcccaggaggttgagtgttagt

SEQ ID NO: 911701 - DNA, 120 bp, Artificial Sequence
  ENSG00000250447_0 (sequence is synthesized)
tggagcacaattgtgagaacaactggatctgtgtctctggagatccctttgctcagccatcagatcaagcaggcatccatggttcagaatgcaggtgatgacctgggcaagagctcacca

SEQ ID NO: 911702 - DNA, 120 bp, Artificial Sequence
  ENSG00000250447_1 (sequence is synthesized)
gtaaggagcaaaggggcccgcctgccactcttaagcagagcgcctgctgaatcaggatttccaaggctccggctgagtgcctggctgggggctgtgtgtgcagatgccacaagatggaca

SEQ ID NO: 911703 - DNA, 120 bp, Artificial Sequence
  ENSG00000250447_2 (sequence is synthesized)
agactgaggacgcagatgaggaaactgaagcaactgttcaagaagaggatataaaaagggacaggcattgatgatgatatcagagcttcttcctggggaatctcagcctcacatgatgga

SEQ ID NO: 911704 - DNA, 120 bp, Artificial Sequence
  ENSG00000250447_3 (sequence is synthesized)
gtatgactaaaggaaaaaaataaggctcttcacatactttcttggcagtctgtgagggtcagggttgattttgtgtccctaaaatgtcacatgaagttcataggcacttccaaaggggca

SEQ ID NO: 911705 - DNA, 120 bp, Artificial Sequence
  ENSG00000250447_4 (sequence is synthesized)
gtctagcaagttaaagagtagatgtggggctgtgtggagtccattgtttgggtaatctttttcaaacagtaggaatataccagcttgtaaagatttgcccacttagcttcaagtctctct

SEQ ID NO: 911706 - DNA, 120 bp, Artificial Sequence
  ENSG00000250447_5 (sequence is synthesized)
gaacacatttccccccgctctatgaatagatgaagacatacaaatggaactcttgatattcttaagtgaaaaacatgatatggaatagcagataaatacaaacaatttcttatccagcaa

SEQ ID NO: 911707 - DNA, 120 bp, Artificial Sequence
  ENSG00000250447_6 (sequence is synthesized)
tggtggaatttttttctaaaccaaataccctgaaggattttagttgtctatctacaactttttgcttgtggaaaatgttgacttcctggttactttgacttgtgttcacctgaaattttg

SEQ ID NO: 911708 - DNA, 120 bp, Artificial Sequence
  ENSG00000250447_7 (sequence is synthesized)
cttttgcagtagtttttcttatgatttagtggcattgcctgtccagtgacaggaagtggtgttcttattgggactaatatgtgttatggccctagaaccagcagaagccactcctgcttt

SEQ ID NO: 911709 - DNA, 120 bp, Artificial Sequence
  ENSG00000250447_8 (sequence is synthesized)
tttccacactcttctttctatagaagagaagggaatgaggatcccacatggcattcactgccttgagcatactgagatttctttgcaaaaggagaaacagcaccagcaactaagcatttt

SEQ ID NO: 911710 - DNA, 120 bp, Artificial Sequence
  ENSG00000250447_9 (sequence is synthesized)
atcccattttattttacttcttctatgattctttgccacttagcaatgccaattaattgatttgggactggaaatacatttcttatacaatcttcaagttttctttcataagaacataac

SEQ ID NO: 911711 - DNA, 120 bp, Artificial Sequence
  ENSG00000250447_10 (sequence is synthesized)
tttcatctgatattgttccccacttctctcttttcaaatgtaatatttgggccagtccttgaaagtgaactgagttgagttctcatggcccataaaagaacatattcaaaatgtatcatt

SEQ ID NO: 911712 - DNA, 80 bp, Artificial Sequence
  ENSG00000250447_11 (sequence is synthesized)
tctcatggcccataaaagaacatattcaaaatgtatcattttctttatgtcacagataaaagatcattaattgtatataa

SEQ ID NO: 911713 - DNA, 120 bp, Artificial Sequence
  ENSG00000250447_12 (sequence is synthesized)
gctttctgaggagcactgagcaagatggccacctcctggtggtaagtctcgctcctggagttcccatcttgaccctacagcgggacattttgccgccacctctttgtgtgttgggaagat

SEQ ID NO: 911714 - DNA, 120 bp, Artificial Sequence
  ENSG00000250447_13 (sequence is synthesized)
gacgtcctttctgctcgtcctgcttctctgattgggacagtctggtttgaaagggaggaggagaaataagagaaagctccgtggtaatatacaagacgaaaggaaaagaaagacaagtaa

SEQ ID NO: 911715 - DNA, 120 bp, Artificial Sequence
  ENSG00000250446_0 (sequence is synthesized)
aatgaacaggatatttcattgttgtaatatcataaaatcagaatttgagtacatctgggcgagcttcctgtttcagagatctgtgctgaatgcatagtgaagtcattgctgcaaagccat

SEQ ID NO: 911716 - DNA, 120 bp, Artificial Sequence
  ENSG00000250446_1 (sequence is synthesized)
ggccttagccttagtcctggcagtggagcagtcaggagggcacctgaagtcatgttcattgggtcttaaaggagaaaccttaagattcacaatgtggtggtgagacttgctcttggatgc

SEQ ID NO: 911717 - DNA, 120 bp, Artificial Sequence
  ENSG00000250446_2 (sequence is synthesized)
gcgtttgctaccctgggggagacaaacaaaacttgagtgaaggaaaatgagaactcacctgaaaccaagaagagtctttggaaaaggatttttgtgtaggtcatctggaaagtgtttact

SEQ ID NO: 911718 - DNA, 120 bp, Artificial Sequence
  ENSG00000250446_3 (sequence is synthesized)
cttagcagttatgcataactatagtcttaagaacaaagtgaggtgggggtgcgggtaagggtgggaatggggtaggggtaaacgagtgggtggagacgtgtctgtgtgtccaaaaaactg

SEQ ID NO: 911719 - DNA, 120 bp, Artificial Sequence
  ENSG00000267146_0 (sequence is synthesized)
gttctgtcagctgacctctgcagaagggaattgctaaccgctgccttgctccttagctgacaaatgaatgatcgcagctccatctattttcactatggctgcctctagcccaggtgctca

SEQ ID NO: 911720 - DNA, 120 bp, Artificial Sequence
  ENSG00000267146_1 (sequence is synthesized)
gacagagagcctggtgtgacatcttagatcaagatgaattggcacaaactcctgattcaagattgttttataccatttaatttagtttcttcccctgcttggatgagcacagctctggtt

SEQ ID NO: 911721 - DNA, 120 bp, Artificial Sequence
  ENSG00000267146_2 (sequence is synthesized)
ttgaccccagccgttcagcctctgcaatggccactgcttgaagcgggagggggcacagaagcacatatgggctgcttccagtaggaaattaaacaacaggggcatttgagacatgcctcc

SEQ ID NO: 911722 - DNA, 120 bp, Artificial Sequence
  ENSG00000267146_3 (sequence is synthesized)
atttaatcatgctaaggggtgacatggagatccattttcttgacaggacggttgatcaccctatcacagtaagaaaattaataccttcaactagccctgtgtggaaaagagaagctatat

SEQ ID NO: 911723 - DNA, 120 bp, Artificial Sequence
  ENSG00000267144_0 (sequence is synthesized)
agagcatttggactatatcactctaactctgcagcaagctttcctgaagtggagttggagatagcatttcagtaaatgtcctttacccactgcttattcgggacacaccctgttgactgc

SEQ ID NO: 911724 - DNA, 120 bp, Artificial Sequence
  ENSG00000267144_1 (sequence is synthesized)
tagaaattttcatgggacacaattttgggaagtgagacattaggagaagtgagctgtcctctcctgacaagaaatgtgcttggcaggctgtgagtacacgaggagttgaaagagtaaaaa

SEQ ID NO: 911725 - DNA, 120 bp, Artificial Sequence
  ENSG00000267144_2 (sequence is synthesized)
ggtgatcgtctcagtggactaacttccaatactacattgactaaatgtgggaaaagtggagaaaactcattgtgttcctgatattagaagaaaagctttcagtccttcaccattgagtat

SEQ ID NO: 911726 - DNA, 120 bp, Artificial Sequence
  ENSG00000267144_3 (sequence is synthesized)
gacaatcagctctgagaatttccatatatagcctttattttgctggggtagtttattctccttctagttatttggtatttcaatcatgaaaaggtgctaggtgctgaattttgtgaaact

SEQ ID NO: 911727 - DNA, 120 bp, Artificial Sequence
  ENSG00000267144_4 (sequence is synthesized)
gaaccataattatattcgccttccaggaataaaacagttcggtcactaagtgtaatccttttaatatgctgctggatcttgctggtattttgctggtgaattcttgcatcagtattcata

SEQ ID NO: 911728 - DNA, 120 bp, Artificial Sequence
  ENSG00000267144_5 (sequence is synthesized)
agggatattggtgtataattttattgaattgtctttttctggtttggcatcagggtaatactgacctgacagaaggatcaaagaagtgttctctcttcttgcatttttgggaagaggttg

SEQ ID NO: 911729 - DNA, 120 bp, Artificial Sequence
  ENSG00000267144_6 (sequence is synthesized)
agcagctatggtgttaaatgttccttaaatgtgttgaagcgtttgccagtgaagccatctgatcctgggcttttctacattgggaggttttggattactgattcaatctccttactagtt

SEQ ID NO: 911730 - DNA, 120 bp, Artificial Sequence
  ENSG00000267144_7 (sequence is synthesized)
agaggtctactcagatttttttgtcttcataattcagatttggtaaggtgtatgctttaaggaatttgtctatttcatctagttatacaaattcttggcatacaattgtatatagtattc

SEQ ID NO: 911731 - DNA, 120 bp, Artificial Sequence
  ENSG00000267141_0 (sequence is synthesized)
acccacagcttccaaagtccttccccgccccacgcaggggagagagagccgagagctggccgggctaggataggggctgtgggccagacccaggggacgggaggtgcagtcctgccgcct

SEQ ID NO: 911732 - DNA, 120 bp, Artificial Sequence
  ENSG00000267141_1 (sequence is synthesized)
gctgcccccatgaagaacatcccactgctcccctggcctccctgctcccagggccaaatgtggccgaaatcacagacccccaatgtccctccccgcggagatacacggaccccattgccc

SEQ ID NO: 911733 - DNA, 120 bp, Artificial Sequence
  ENSG00000267141_2 (sequence is synthesized)
gaggtaacaccctgggacccctccgccgaggatgtgtggctcctcgcagaaaacgcagaccccacccaagtcctgtcttgacgccctcggttcccgtctgtgtctcaaggcgtcccagcg

SEQ ID NO: 911734 - DNA, 120 bp, Artificial Sequence
  ENSG00000267141_3 (sequence is synthesized)
cggctccccataccccaaagatggaccctcaattcttccgcaaggcattcgcggcccctgctcatctcagccccaccactctggacggcccacttcccttcggctgctccacgtgtccct

SEQ ID NO: 911735 - DNA, 120 bp, Artificial Sequence
  ENSG00000267141_4 (sequence is synthesized)
acaatccgagcccacggaccaagcctccttggagtgtccagctgcccaaagcggccaccgctatggctatgaaatagaggcagcatcgcactcttgatagaaatgagaaaattgagaccc

SEQ ID NO: 911736 - DNA, 120 bp, Artificial Sequence
  ENSG00000259396_0 (sequence is synthesized)
cttggtcaagtaccagctctcatttatttctctgcaacattagaaaactcaaactcctcttctttaaaatggaaataatatctgttctgctgaactgagtgttgtgagcatcacatgaag

SEQ ID NO: 911737 - DNA, 120 bp, Artificial Sequence
  ENSG00000259396_1 (sequence is synthesized)
aaggcatgactcctaaacggatgaatgagtgccccattagagccaagattcttttattctttttgttgttgtagttgttgagacagaatcttgctgtcatccaggctggagtgcagtggt

SEQ ID NO: 911738 - DNA, 120 bp, Artificial Sequence
  ENSG00000259396_2 (sequence is synthesized)
agctcactgcaacctccatctcctggggcaggagaatcacttgaatccgtgaggcagatgtagtgagcagagatcaaaccattgcactccaccctgggagacagaatgagactccatctc

SEQ ID NO: 911739 - DNA, 120 bp, Artificial Sequence
  ENSG00000259398_0 (sequence is synthesized)
tccctttcatatatacataaaacttattatttctgtccctgtggagaagtgtgactaatacatctgggttaataggctttgttttttattttattttttccttattttctttttgggttg

SEQ ID NO: 911740 - DNA, 120 bp, Artificial Sequence
  ENSG00000259398_1 (sequence is synthesized)
tacttaaaacatattctattgtcttctgtttttcattgtttctagtgataaatcagctatcattcttattattcttctccagtatatactttatctcttttccctggttgcttttttgtt

SEQ ID NO: 911741 - DNA, 120 bp, Artificial Sequence
  ENSG00000259398_2 (sequence is synthesized)
ctttatctcttttccctggttgcttttttgttttttgtttctttttttcctggttgctttttttttggatattgagttttgctcttgttgcagagagccgaggtcacaccactgcactcc

SEQ ID NO: 911742 - DNA, 120 bp, Artificial Sequence
  ENSG00000205500_0 (sequence is synthesized)
agtggagtatttgcagggttggcctggagcccagcatgcgccccctcccacacatccaggacagggatctggacggctgtgggttcagatcccctggaaagtgagagccgtttcttcact

SEQ ID NO: 911743 - DNA, 120 bp, Artificial Sequence
  ENSG00000205500_1 (sequence is synthesized)
agatactttccctccagtgtcccagtattggtggccacagtgggagccccttacagctggctcttgagtcttgttgacacatcccatcattctttgtggccggtgtctccacaggcacca

SEQ ID NO: 911744 - DNA, 120 bp, Artificial Sequence
  ENSG00000205500_2 (sequence is synthesized)
gaccaaagctgacgtagctttccatgttttctgcctgagagaacctgtgcagctctccactggcacagtgaaagcatctcctaggggtgagttcaaaacagttccctgacatgtcttgga

SEQ ID NO: 911745 - DNA, 120 bp, Artificial Sequence
  ENSG00000205500_3 (sequence is synthesized)
aatagtgctactggggacaaaatcaaaactaatgttacctggggcaatgggaagtgcgttctgcatgtaatttacactggaacttgatatgactactgtaaaaactataaatgaatatga

SEQ ID NO: 911746 - DNA, 120 bp, Artificial Sequence
  ENSG00000205500_4 (sequence is synthesized)
agcccagcatgcgccccctcccacacatccaggacagggatctggacggctgtgggttcaggtcaacaaatgtccatggagtcacccatcaatccaaggctcccagcagaaggcagacag

SEQ ID NO: 911747 - DNA, 120 bp, Artificial Sequence
  ENSG00000205500_5 (sequence is synthesized)
attgagcatggggctgttggaaggataatgagtaccgctggcaggagccaaaggttcaccatcacgctgctttgggggctgagcaacctttactgataggcaagatcactgacatagaca

SEQ ID NO: 911748 - DNA, 120 bp, Artificial Sequence
  ENSG00000205500_6 (sequence is synthesized)
cctcagttctcatgaagcatcagaatgatggtgccactggctacatggagaagcaaggagaggagaatgctagctgcactccctggctacacgcaaacagatgcagcacgaagccttggg

SEQ ID NO: 911749 - DNA, 120 bp, Artificial Sequence
  ENSG00000205500_7 (sequence is synthesized)
aaccttggcaagggatttaaacagtctccctctaatgcatataacatggtgctgctggatttcccagaacaggattttaagatggttccgagagtggaacctggtaactcctgggagcac

SEQ ID NO: 911750 - DNA, 120 bp, Artificial Sequence
  ENSG00000205500_8 (sequence is synthesized)
ctctctgcttggtctgctctgggggtgggctgctggcccatctgtggctagcctcaggatagagggaagggagctgcagcagctgccatgacgtgttgggaagggaactgtcatgtttgc

SEQ ID NO: 911751 - DNA, 120 bp, Artificial Sequence
  ENSG00000205500_9 (sequence is synthesized)
agcagccctggtgggtctgatgtttttttaattatccttcaagttccaaaagcacatccatgtctctggggacacataacaagccatgtcactttatgttcctttggaactatgtctctt

SEQ ID NO: 911752 - DNA, 120 bp, Artificial Sequence
  ENSG00000205500_10 (sequence is synthesized)
tggactgtctggcttatagttgttgttcagggccaagtgatgtgtcacccttctctgaaatgtctgcatcctgtgaattgtttagcctactttcccctgaccccaggctcaggcccctct

SEQ ID NO: 911753 - DNA, 120 bp, Artificial Sequence
  ENSG00000205500_11 (sequence is synthesized)
tctctgctctcaccatacctttcaccccacatccagtcccctcccaaaatcctcccagttttacttctgtgcccttttgagagggcacagtcatttatactttaagctttccaccagaaa

SEQ ID NO: 911754 - DNA, 120 bp, Artificial Sequence
  ENSG00000205500_12 (sequence is synthesized)
ttgaactctctgtgccctctccagtagactgcctttcctcatgccctcagactctactctacctgcctgttctgcaggactaaccccacgtggagacagtcagcccccaccccagtgggg

SEQ ID NO: 911755 - DNA, 120 bp, Artificial Sequence
  ENSG00000205500_13 (sequence is synthesized)
acatgcactggagagcttccagaaggcctgcagatagcttctctcctgccctaccatagtgcccgaaattcccaccagaaatgccactcttgtggattacagcatccagctccagaaagc

SEQ ID NO: 911756 - DNA, 120 bp, Artificial Sequence
  ENSG00000205500_14 (sequence is synthesized)
ctttgagttgttacctcaattttgcttttgaggaaatgaaggatgaggattccagtgacttttccaagttcaagatcaaccactggcaagatcagagctgaacctggccaaatgaacaca

SEQ ID NO: 911757 - DNA, 120 bp, Artificial Sequence
  ENSG00000205500_15 (sequence is synthesized)
aatcccatgctctttccacaccaccacactggtgcaggaaggacgatttgatttttcacagctctagagcaggatgacttgcccagatttcaccccttgagaattaggaggagggaaagg

SEQ ID NO: 911758 - DNA, 76 bp, Artificial Sequence
  ENSG00000205500_16 (sequence is synthesized)
ttttcttctttatacttattttttcaagacattgcagcattgccttaacctctctctttctttttttttttttttt

SEQ ID NO: 911759 - DNA, 120 bp, Artificial Sequence
  ENSG00000226519_0 (sequence is synthesized)
aaacactcacttcctgggactcaaagaaagtgcagctgaattcgatggcttttagctggggactggctagatcagtggaaatcacaaccaagttctcccactgcctttctatccaacagc

SEQ ID NO: 911760 - DNA, 120 bp, Artificial Sequence
  ENSG00000226519_1 (sequence is synthesized)
actgtggatcacccgcagacaaggatggaatcaccaaaaagtataatcattaggtcactagatgtgcacgttggcaattttcgaaaatattgccagagagattgaaataattcaccactg

SEQ ID NO: 911761 - DNA, 120 bp, Artificial Sequence
  ENSG00000226519_2 (sequence is synthesized)
cccctcctccagcttctcctgggcatgccacatacactgtgggaaggggaaaggctgacctagaacaccttcaagtggatgctacaactctgtcataaagaggaagccatcaggttcttg

SEQ ID NO: 911762 - DNA, 120 bp, Artificial Sequence
  ENSG00000226519_3 (sequence is synthesized)
gataattgctgaatggaactaagggaaatgagaggagagaagcatctcagagcatgtttggacttgctgcatgccttggaccctgctacacactgataactgaatattgagcccttgagc

SEQ ID NO: 911763 - DNA, 120 bp, Artificial Sequence
  ENSG00000226519_4 (sequence is synthesized)
tgataaacaagggtctttgactcgagagtgttttgccatcctgtttgcaagctttgtgtttgtttcctttcctccaagagtacattttcttactcctcatatggccccaaaccacacatt

SEQ ID NO: 911764 - DNA, 120 bp, Artificial Sequence
  ENSG00000226519_5 (sequence is synthesized)
gagaactatggcctagagtttgtgattaatggaaccctatctccactccaacctccactcattaaccaatgatctctactggtgcctgtcacatttacaaatatgtgagaggccttaatt

SEQ ID NO: 911765 - DNA, 120 bp, Artificial Sequence
  ENSG00000226519_6 (sequence is synthesized)
taaatctggaactaagctagtgatttcaattacaatagtctgactcattccgacattatcattgggtaaaatagcctcagtttccttatctgtaaaatgaattcaatgttggcaacactg

SEQ ID NO: 911766 - DNA, 120 bp, Artificial Sequence
  ENSG00000226519_7 (sequence is synthesized)
gtcttaaagtaaaataactttaagaaaattgctgaaggctatggcgtatgacttagtgtattattattttataatggagagttttacctaccaaagaaaggagttatcagctgcccgttg

SEQ ID NO: 911767 - DNA, 120 bp, Artificial Sequence
  ENSG00000226519_8 (sequence is synthesized)
cattgctggtaatttattattaatgatttctaaaaactctaacattgcaggaagcttcaagcatcattactgcattacattttgcttttgtgttaatggacagctatttttcactgtcat

SEQ ID NO: 911768 - DNA, 120 bp, Artificial Sequence
  ENSG00000226519_9 (sequence is synthesized)
tttcatgagtagaaagagagcacagatgaacaattttaacaaatataggacaatagaagacatattccagacttcagcatttattaatagaatgatcaaattcagccttatcagaatgga

SEQ ID NO: 911769 - DNA, 120 bp, Artificial Sequence
  ENSG00000226519_10 (sequence is synthesized)
gttaacccactcagaggcaagggtcaggaaacactgcacttagtacttttgtgcttaaaaaattaaagaatccaaattatcactttttgctttctacatagttgagaaaaaaaagtaatg

SEQ ID NO: 911770 - DNA, 120 bp, Artificial Sequence
  ENSG00000226519_11 (sequence is synthesized)
ttacaatctcagaccatggaggaacttctattcacttcaactgaacttctttatggattagaatgaggaagccctttgatgtcaccaaagaggtcttttccttctagaaggcttttaaaa

SEQ ID NO: 911771 - DNA, 120 bp, Artificial Sequence
  ENSG00000226519_12 (sequence is synthesized)
aatcatgttccagggagagttctctgtttttcagacaattcttggaagtaaagacctccttctcccccacaatctggaataatcaactgggcttgacagcccagttgcacatactacaga

SEQ ID NO: 911772 - DNA, 120 bp, Artificial Sequence
  ENSG00000226519_13 (sequence is synthesized)
agcaaaactatcctaacccccaatgttaaaaaatggaagcaattcttttctattgaagtcacaagtccccattctacatcttcagcttgtattctctcccgattcctaatataccattca

SEQ ID NO: 911773 - DNA, 120 bp, Artificial Sequence
  ENSG00000226519_14 (sequence is synthesized)
tagtaaaaatgcatgtgcctaaggatggttctgtctgaagatgctatcagtcagcagaaacaaagacattgggggtctcgttttatcttcttgttgcaggtagttagacatagacatgag

SEQ ID NO: 911774 - DNA, 120 bp, Artificial Sequence
  ENSG00000226519_15 (sequence is synthesized)
ggaggcaagacagggcttttctctgccacccactaggaatgtcaggtgatggttcaacaattatcatactgcctctctaaaaaatgtggccagagccggggagagacagtctccagctga

SEQ ID NO: 911775 - DNA, 120 bp, Artificial Sequence
  ENSG00000226519_16 (sequence is synthesized)
tccacagctgttaacattaaagtgttcattgaatgccgatgtcagggagaagcaacttcctgggcatacgcattaagagacaaaatggtagaatatgaccttctgggggcactccactag

SEQ ID NO: 911776 - DNA, 120 bp, Artificial Sequence
  ENSG00000226519_17 (sequence is synthesized)
aaaagggaagaaagcctcagatggccatgcatacaacttcctaaacaccctgtgtgtgctcacttcccaagggtaaggagggtactacacatgtgggcagctcacctcaagagaaaaatc

SEQ ID NO: 911777 - DNA, 120 bp, Artificial Sequence
  ENSG00000226519_18 (sequence is synthesized)
acgggaaagggatgcaagatggcagcctataaagtcctaggatcatggttaaacaccacacttgttgttcacccacaatctggaataatctaagtcttgttcttcacatcacccacttca

SEQ ID NO: 911778 - DNA, 90 bp, Artificial Sequence
  ENSG00000226519_19 (sequence is synthesized)
gcttttttgtgggtttttttttttttgacaagagtttcactcttttgcccaggctggagtccagtgactcaatctcagctcactgcaacc

SEQ ID NO: 911779 - DNA, 120 bp, Artificial Sequence
  ENSG00000226519_20 (sequence is synthesized)
ataggcaccaagggcattgtctcagcagcctcagccaccagacaggatggcccagggctgcttgttccttgacctgctaggaccaactgtgactcatctatttactgcagagcaaaggaa

SEQ ID NO: 911780 - DNA, 120 bp, Artificial Sequence
  ENSG00000226519_21 (sequence is synthesized)
cccaccagggcagagcctcagctctcagcctcccggaatgaaccatgaacccaaagcaaagagcagaactcctttgacacctccagcttcacagacaaagatgaatctcctaaggcattt

SEQ ID NO: 911781 - DNA, 120 bp, Artificial Sequence
  ENSG00000226519_22 (sequence is synthesized)
ctgaaacatgcagttctgaagtctggccagccacaccaaagagcttttcgcaagaaggcacaggccaggtagaggcagctgtgcagtgggaggactgtgatgttttggactagaaaataa

SEQ ID NO: 911782 - DNA, 120 bp, Artificial Sequence
  ENSG00000226519_23 (sequence is synthesized)
gacgcaaatgaggccaaaaaaacacaggcactgcataaaggtgtcttctccccactttataagccttatgtgtgataatattcaatgccacagcaaggcaagcaaataggtccttggagg

SEQ ID NO: 911783 - DNA, 120 bp, Artificial Sequence
  ENSG00000226519_24 (sequence is synthesized)
gagggatagctggattttaatcctggctctacactaaggtcttggactacttactgcaggtctctgagcttcatagttttatgtataaaataggatgaagaccatccccaaatccacttc

SEQ ID NO: 911784 - DNA, 120 bp, Artificial Sequence
  ENSG00000226519_25 (sequence is synthesized)
aggtgacatgacagcagaagggcatttagagtttggcacagaagggatctcaacaaatggtagctgtgtttcatcgttcatttgagaactgatgtttggatccttttctgcatcttgaaa

SEQ ID NO: 911785 - DNA, 120 bp, Artificial Sequence
  ENSG00000226519_26 (sequence is synthesized)
tgtcccaaaatattcctccttaagccctgcagttggatactcattgatacttctctgttcaatttatactgcgagcaggggagggaggcttgagcttggttccatgaacgaggttgaagg

SEQ ID NO: 911786 - DNA, 120 bp, Artificial Sequence
  ENSG00000226519_27 (sequence is synthesized)
gtgtaagtctcccagcttcatttctgtctcctcctcacctggggagccatggccaattctcttcccaggtcacttgacttctccatgaccatgactttcaccttctgcattttggaacaa

SEQ ID NO: 911787 - DNA, 120 bp, Artificial Sequence
  ENSG00000226519_28 (sequence is synthesized)
tatactcatgaatgctaagaagcttttgtttctttctgcctgtgctgagcctgtctactataaaagaaaaatcacaatggttgtcatagttatgctctttgcttcctgagtggaatagca

SEQ ID NO: 911788 - DNA, 120 bp, Artificial Sequence
  ENSG00000226519_29 (sequence is synthesized)
ccggtttttatgttacattatactatattctggatctctctttgatggtgggttatggagaaggtttgccaattctttcttttacaattctttttaaataaatcctcagaattaaggcca

SEQ ID NO: 911789 - DNA, 120 bp, Artificial Sequence
  ENSG00000226519_30 (sequence is synthesized)
aggctgttggtgaagtcacgacgtagtgccagtggcctcgtcccgctctgctcaagggaccctcacaggctgtggaatccgggcgtcgggacctccggggacctgggccttctgcttcca

SEQ ID NO: 911790 - DNA, 120 bp, Artificial Sequence
  ENSG00000226519_31 (sequence is synthesized)
gaaattgaggccacgggaatattttaaaaggcagggcttgaacacaaattccttctgctccatttgcattgtaaccatttaaggtgaggccttctcagctcctaccaggactgtttaaga

SEQ ID NO: 911791 - DNA, 120 bp, Artificial Sequence
  ENSG00000226519_32 (sequence is synthesized)
accttgcacttgctctctggcctctttcccctgcagtgtgtgctgctcaagtatctcagtcatcacgtgatacgccagctcaaagttccccaatagctccccactgatagcaggataaaa

SEQ ID NO: 911792 - DNA, 120 bp, Artificial Sequence
  ENSG00000226519_33 (sequence is synthesized)
cccattgtcctgaaccagacattcaaaatcctttactatcagcttccttctgactttccaggcacttgacccccgtcaagtgggtttgctcattgtctcggtgtgctgtgagagtgctta

SEQ ID NO: 911793 - DNA, 120 bp, Artificial Sequence
  ENSG00000226519_34 (sequence is synthesized)
aatacctttattttgtgccctagagttacggatctctctgttttcccccttcagaaatcattttcctcttccttatctgtccaaatctcacccatgtcctttgtgtactgtgactggaag

SEQ ID NO: 911794 - DNA, 120 bp, Artificial Sequence
  ENSG00000226519_35 (sequence is synthesized)
ctcagtctccacatagatggagactgcaaagggctacctgtcttgatgagtagccattttgtgctccatttccctttgcccacaaatggatggatattcctgggccgcatggtgtcctgt

SEQ ID NO: 911795 - DNA, 120 bp, Artificial Sequence
  ENSG00000226519_36 (sequence is synthesized)
tccccactttttctttgactttcactggcagctctactatctttcccctgctctgctccggcgacttcttagtcccctttctttacaaatccagaaggaacttgatagcacagaggtgtt

SEQ ID NO: 911796 - DNA, 120 bp, Artificial Sequence
  ENSG00000226519_37 (sequence is synthesized)
gtttctctgctataatctgtgtccaagcgcatttgcatatagttttacaattttgtctcccacattgtgaacctgtcctccaggaaaacttccctgggcaggcaaggagagggggagtac

SEQ ID NO: 911797 - DNA, 120 bp, Artificial Sequence
  ENSG00000226519_38 (sequence is synthesized)
cgatgtttcctgcctgtcctggacacatttgagcgcatgtaaattgacctacaagcctgtcaggaggtgttttgatccacattttcagaaaagagaactgaagctcagagagggttaatg

SEQ ID NO: 911798 - DNA, 120 bp, Artificial Sequence
  ENSG00000226519_39 (sequence is synthesized)
actttctctgggagcgtttgataccagatatgatgccaaagatgaaaaaaaaattgttgtgggatggagcttgttagaacaggcttcacagctgtggtgggacctgagccaggccttggt

SEQ ID NO: 911799 - DNA, 120 bp, Artificial Sequence
  ENSG00000226519_40 (sequence is synthesized)
ctgttgggcaggaggagagagcaccatgagtgtgagcagcatcacaaagatttcagactcaatgtgacaatgtgatcctttacggcttccagagattgtacctgatttcctttaagaatg

SEQ ID NO: 911800 - DNA, 120 bp, Artificial Sequence
  ENSG00000226519_41 (sequence is synthesized)
catattaaagttaattgcttggttttgagcatgcaaacgctgaaatgtgctagaatggtcaaagttcaggggtaagtgaactttactgcagcatgttgagaacagaatgaatgctgacaa

SEQ ID NO: 911801 - DNA, 120 bp, Artificial Sequence
  ENSG00000226519_42 (sequence is synthesized)
agaagcagagactttttaattttaactgcaggtcaaaagaggactcttaacacaaggtagctgaaactgggcaaacacacgatcccagatggttttatacagcataaaaatgaatgagcc

SEQ ID NO: 911802 - DNA, 120 bp, Artificial Sequence
  ENSG00000226519_43 (sequence is synthesized)
aatgtgggttcatcgatggtaacaaatgcatcactctgtatgtgtgtgagggggtatgtgggaactctctgtactttctgctcatttttgctgtgaacctaaaactgctctaaaaaataa

SEQ ID NO: 911803 - DNA, 120 bp, Artificial Sequence; identical to SEQ ID NO: 826002
  ENSG00000226516_0 (sequence is synthesized)

SEQ ID NO: 911804 - DNA, 120 bp, Artificial Sequence; identical to SEQ ID NO: 826003
  ENSG00000226516_1 (sequence is synthesized)

SEQ ID NO: 911805 - DNA, 120 bp, Artificial Sequence
  ENSG00000226516_2 (sequence is synthesized)
tcccacgcctgcctgtgaaaatggagtcctctctcacctgggagagccaggtgctgccccgagaaggatgcatttatggcttcatgaagtctttcctgacccccgatgctgctgactata

SEQ ID NO: 911806 - DNA, 120 bp, Artificial Sequence
  ENSG00000226516_3 (sequence is synthesized)
ttgggcaagttcttaaacccttcaaagcctcatttttctccaatcataaaagggaaagatggtaatattttcccctccaaattcttgtaagtattaaacattgtatatgtattttgaaca

SEQ ID NO: 911807 - DNA, 120 bp, Artificial Sequence
  ENSG00000226516_4 (sequence is synthesized)
gagtagcatttgaaacaaacagctcttttcccacaggtcggatgccctcacagaattgagattatgtacgtaaaacaccaggtgcctaacccggcacagagcaggagggctaagcgtgac

SEQ ID NO: 911808 - DNA, 120 bp, Artificial Sequence
  ENSG00000226516_5 (sequence is synthesized)
atccagcacgtggtcagtggaatccagtattcctacccacctctctagtctcccctccacccctctccctttcagaggcaccaagctgcttgtggtcttgtctattcccactccctgcct

SEQ ID NO: 911809 - DNA, 120 bp, Artificial Sequence
  ENSG00000226516_6 (sequence is synthesized)
gactgaacattttctccacctcctgatcatcagcagcagaaactggctgctcttcctcctgggtagacagccagactgtatttcccagctgcccctgcagtgagatgtggccatcggagc

SEQ ID NO: 911810 - DNA, 120 bp, Artificial Sequence
  ENSG00000226516_7 (sequence is synthesized)
cagcattggccaatggactctgcatgggagtgacgcatgctgcctccaggcttgtccctaaaacctcccacgtgtcctccgcctgctcttcccacttccaaggagcacggcaattgtgga

SEQ ID NO: 911811 - DNA, 120 bp, Artificial Sequence
  ENSG00000226516_8 (sequence is synthesized)
agacccagattagtgatggcagaaccatagatgggaggaacctgggtccctgacttaaagtatcatggatttggatgttcccttagtgagaaataaacttccattgtgtttaagccttta

SEQ ID NO: 911812 - DNA, 120 bp, Artificial Sequence
  ENSG00000226510_0 (sequence is synthesized)
gtaggacgtgatgcaggaggcgcactcgaagatgtagacgatgagcatgagcaccagtgtccccatcccccaacccctggagtctcaccgtgaggaccatggaccggcggcggcagagtg

SEQ ID NO: 911813 - DNA, 120 bp, Artificial Sequence
  ENSG00000226510_1 (sequence is synthesized)
cggcacccacaccaaaactggctaccatgaagaaggagaagccgcagaagatggcaatccaggcaccagcgaagacgtcatccttgcctgagactcccatcagtgggtatacacggtact

SEQ ID NO: 911814 - DNA, 120 bp, Artificial Sequence
  ENSG00000226510_2 (sequence is synthesized)
ggtcggctgtcacccatatggtctcagcaaacagggacaggcctgacagctggacagagcggtgggttaggaaggtctgctcggggccagcagccctggcaccaggcatctccacgagca

SEQ ID NO: 911815 - DNA, 120 bp, Artificial Sequence
  ENSG00000226510_3 (sequence is synthesized)
tgagggtgagcagaggccaggagagaagagacagcccagccagacaaccgacccccacgccccagctgccagtttcttcggggataaaaggggatgccacgtggaaaggctggagcagtg

SEQ ID NO: 911816 - DNA, 120 bp, Artificial Sequence
  ENSG00000226510_4 (sequence is synthesized)
gactggcacagaggagatgcttggtccatctgccctcccttgacagtgctgttattccccgaggaggggaacatggccatggccataaacattacaaatgggccaggcaaggtggctcac

SEQ ID NO: 911817 - DNA, 60 bp, Artificial Sequence
  ENSG00000226510_5 (sequence is synthesized)
ggccataaacattacaaatgggccaggcaaggtggctcacacctgcagtcccagcattag

SEQ ID NO: 911818 - DNA, 120 bp, Artificial Sequence
  ENSG00000237212_0 (sequence is synthesized)
ctgctgggtgctcactgggaccctggaaaggtctagctgagccttttagggcatgaggatgttgggagaatagaggtggctcctctgagaagcctgagaagtgatcaggccaaccttaga

SEQ ID NO: 911819 - DNA, 120 bp, Artificial Sequence
  ENSG00000237212_1 (sequence is synthesized)
atctctgactactagaggcttgacttgcagtgaaacccgtcctaattgatgaagatcctgtatcgagttagagaaatggaagaaacgacgcgggggtctggtttgccagccaacagctgt

SEQ ID NO: 911820 - DNA, 120 bp, Artificial Sequence
  ENSG00000237212_2 (sequence is synthesized)
ggcttaaatctgagtcctttggaaagaaaggaaggcattccttttatttctaatatggctaaggtggaagttcttcatctctgtgtgcatgcagcttagttcctgctccttcagccaagc

SEQ ID NO: 911821 - DNA, 120 bp, Artificial Sequence
  ENSG00000237212_3 (sequence is synthesized)
taacgcggaagccctagagcatctggaccaagcaaggaagccggcaggagcctctgcactgcctatgaatttgaccaacgggacttgggcctggaaaagagcatcccgaacagtggagag

SEQ ID NO: 911822 - DNA, 120 bp, Artificial Sequence
  ENSG00000237212_4 (sequence is synthesized)
gaagagggagtgaggccctgtggacacagcagaggaatccacaatggatttgcagcaggctggtggaggcagagcagagaagggcgggagagggccagcgaaggcctgggaaggtggacc

SEQ ID NO: 911823 - DNA, 120 bp, Artificial Sequence
  ENSG00000237212_5 (sequence is synthesized)
cacaaactcgtctcctaatgaagctaaccagcaatgcgagggcacacagggagaccccctagaggctgccccaggccaggagtcacctgtgaactgaggtggccaaggcaggttctgtgg

SEQ ID NO: 911824 - DNA, 120 bp, Artificial Sequence
  ENSG00000237212_6 (sequence is synthesized)
cagatgagaaccagccgcggtgcccagaaaggaacagtgtgcgggcctgacgggagcccccatcaatacaaccagctcctgctcagaactctcttcaggcagacaaatagaagatatgtt

SEQ ID NO: 911825 - DNA, 120 bp, Artificial Sequence
  ENSG00000237212_7 (sequence is synthesized)
tctacttccccaggcctcagcaccatgactattctagtcccagtggataccctgcttcaggttttatgcagctgagttgaaaaagaataacagaataggaggaaaacaaggggaagaagg

SEQ ID NO: 911826 - DNA, 120 bp, Artificial Sequence
  ENSG00000237212_8 (sequence is synthesized)
taggtgggacgccccaaatcatcttgagtgcactccataaaagaaagaggcattaaagcagccccctctcctatctcaagccatccttcaacttatagggactttgcacatagttgctgc

SEQ ID NO: 911827 - DNA, 120 bp, Artificial Sequence
  ENSG00000237212_9 (sequence is synthesized)
ccatccttcaacttatagggactttgcacatagttgctgcaggttggcctgcctctgtcagaggtgtttaaaccagattgactctctcttgtataggggctgggtaaaatgaggctgaga

SEQ ID NO: 911828 - DNA, 120 bp, Artificial Sequence
  ENSG00000237212_10 (sequence is synthesized)
gactctggtcgtcctcactgctacactcccatcagcgccatgacagtttacagatgccatagcaacgtctggaagttacctgtacggtctataaaggggaggcatgaataatccacccct

SEQ ID NO: 911829 - DNA, 79 bp, Artificial Sequence
  ENSG00000237212_11 (sequence is synthesized)
gagcccttggggctcctctgcctatggagtggccattcttttattcctttactttctcaataaacttgctttcacttta

SEQ ID NO: 911830 - DNA, 120 bp, Artificial Sequence
  ENSG00000237212_12 (sequence is synthesized)
gggatgccttgcaccaccctggggccctgcagagtccctgccagcaagagggccctcaccagatgcaccccctagacttggacttcccagcctccagaaataaacctagaatgaaatctg

SEQ ID NO: 911831 - DNA, 120 bp, Artificial Sequence
  ENSG00000237212_13 (sequence is synthesized)
tgctgcctgctacaacctgtggctttggattttctcgaggccccagagcgtcagaggaagttttccgaatggcactctgcgtgggaaggagcttgtgcacgtgcacgctgccaccatctg

SEQ ID NO: 911832 - DNA, 120 bp, Artificial Sequence
  ENSG00000237212_14 (sequence is synthesized)
caccctggggccctgcagagtccctgccagcaagagggccctcaccagatgcaccccctagacttggacttcccagcctccagaaatgacttcatgtgcaagcgctttgccttaatgagt

SEQ ID NO: 911833 - DNA, 120 bp, Artificial Sequence
  ENSG00000259642_0 (sequence is synthesized)
aaaatgcccagaccagcatccgaaagctggtctcctatacaaagcagaatccctgcctacaaagcagtttcccacctccgactcctccccacggcgaacagcccttctggatccaaccaa

SEQ ID NO: 911834 - DNA, 120 bp, Artificial Sequence
  ENSG00000259642_1 (sequence is synthesized)
cccaccaaccccaatagggcccagcacccagagggtccacaatccagagaaggagctacaagccctgtacttgcaagcctcgaacccccaactccaactgacctcccctctgccagagca

SEQ ID NO: 911835 - DNA, 120 bp, Artificial Sequence
  ENSG00000259642_2 (sequence is synthesized)
agaccacgagtacccgccgagagcggacctggctggctacacaaagccaggcgcccgaccagagggatcctccgggacgtcctccgccaccggggcgtccccgcccagccccgcccggcg

SEQ ID NO: 911836 - DNA, 120 bp, Artificial Sequence
  ENSG00000259642_3 (sequence is synthesized)
cccggcgctcaccagctctcctccccctcctcctagcctgacagacgctccaggtcgtctagcaagccgccctcccccgccgccagcaagaaggtggcgtctcgcagctcctcgttattc

SEQ ID NO: 911837 - DNA, 120 bp, Artificial Sequence
  ENSG00000259642_4 (sequence is synthesized)
gtccgcctcgggtccatccggccccgccgcccgactttgcgctgagacccaaggggaagccccgaggggaccccgcgccgtaggagggagtggaggagccggcgaaccgcgatggagccg

SEQ ID NO: 911838 - DNA, 120 bp, Artificial Sequence
  ENSG00000259642_5 (sequence is synthesized)
gggcccagcacagcgcgagcggctcctcggctgttcgtgctgcttccccagcttcttcaccggcacctgcagcttccgcacctcctggtccgcgttcacgttagagttaacgtcctccat

SEQ ID NO: 911839 - DNA, 120 bp, Artificial Sequence
  ENSG00000259642_6 (sequence is synthesized)
cccggccccgctgcctccgccgcccgcggccctctcgctctcgcagcaacaagggaagagccggaggaaagaggcgtccacgccgctcactccagccgaggcccccgcatatagcagggc

SEQ ID NO: 911840 - DNA, 120 bp, Artificial Sequence
  ENSG00000259642_7 (sequence is synthesized)
caggccccgtcgccagggttcccccagcgcgggtcccgaagcaccgctggccacagatgaaccgcctcctcagcgcaggtccgggattcggggaggcagcgccaatatccggtctctgca

SEQ ID NO: 911841 - DNA, 120 bp, Artificial Sequence
  ENSG00000259642_8 (sequence is synthesized)
gccatcttccctccgtccctccgcccaccgagggtcggccctgtaggtgacctcagagcgtcggggatgggcgtggccccgtcgggcgctaagaagacctagcgcagagaggaccgccga

SEQ ID NO: 911842 - DNA, 120 bp, Artificial Sequence
  ENSG00000259642_9 (sequence is synthesized)
gctcccgacggggcggggccaggtgtgtgaggggcggggattggacccggaggggcgtgtctggactgccggcggaagtggaacgcggcctgacctgcgacggaaagccactgcaagccc

SEQ ID NO: 911843 - DNA, 120 bp, Artificial Sequence
  ENSG00000259642_10 (sequence is synthesized)
ggaggcgaacagaaggcattccgcgagccgggctgagttggtgaacacggtcctcgttcaccccgcctattggtctgggcgtgtggggtattctccacccacttatacggcgtgtgggac

SEQ ID NO: 911844 - DNA, 120 bp, Artificial Sequence
  ENSG00000259642_11 (sequence is synthesized)
cgacgggcccgtcctgcccggctccggtccggatctcgagtaggcgctcaatgggattcggggagacgtagtttactttgttcagcaaatatttaaccgatgcctattttaatgggagat

SEQ ID NO: 911845 - DNA, 120 bp, Artificial Sequence
  ENSG00000259642_12 (sequence is synthesized)
tgtttccgctggcgggagcctcagagaccgcctgtgtcctttaagaaacccgaatttcagacagttaagagaggtctaaggtcaaaataataatcataatttcttcttactggccagata

SEQ ID NO: 911846 - DNA, 120 bp, Artificial Sequence
  ENSG00000259642_13 (sequence is synthesized)
ctatgctaagccctttttaattttattattattatattttgtcaccgaggctggagtgcaatggcccgatcttggctctgcaacctccgcctcccggtttaaagcgattctcctgcctca

SEQ ID NO: 911847 - DNA, 65 bp, Artificial Sequence
  ENSG00000259642_14 (sequence is synthesized)
cctcgctgccctgacctcagggtgatccgctcacctcagccactcaaaagtgctgggattactgg

SEQ ID NO: 911848 - DNA, 120 bp, Artificial Sequence
  ENSG00000259642_15 (sequence is synthesized)
tccgctcacctcagccactcaaaagtgctgggattactggcgtcagccaccgcgcgcccggtcgtgctaatcactttgaaaggcattatctcatcggttaaaacatagttttccggactt

SEQ ID NO: 911849 - DNA, 120 bp, Artificial Sequence
  ENSG00000259642_16 (sequence is synthesized)
aaaagtttacagcacactggcgcagaagatggaaaaccgctgcttgcctttctccgtttattgactcacattctgctctttggatcattttcttcggaaaaagttttccaaagtgtgtct

SEQ ID NO: 911850 - DNA, 120 bp, Artificial Sequence
  ENSG00000259642_17 (sequence is synthesized)
aaagtatttgaacacgctgacagatactgaagaatgcagaaaattgtatgagtgtgaaaatctgcctttacgatgtgtactagtggcagcaaatccaaacaaaatttaagtgctttgttt

SEQ ID NO: 911851 - DNA, 120 bp, Artificial Sequence
  ENSG00000259642_18 (sequence is synthesized)
tgatcacattcattgggcttcagatgtcaattgtgcgctgctttggcttgtgtttgcagccacaaacacaagtggagttattaacgccactcactaaacacaagtggaagttattaagag

SEQ ID NO: 911852 - DNA, 85 bp, Artificial Sequence
  ENSG00000259642_19 (sequence is synthesized)
ttaacgccactcactaaacacaagtggaagttattaagagtggaggttccctcctccactcttaataacagtgatccagttcgtg

SEQ ID NO: 911853 - DNA, 70 bp, Artificial Sequence
  ENSG00000259642_20 (sequence is synthesized)
gtcacgccattctcctgcctcagcctcctgcctagctgggacaacaggcgcccgccaccgcgcccggcta

SEQ ID NO: 911854 - DNA, 120 bp, Artificial Sequence
  ENSG00000259642_21 (sequence is synthesized)
acacctgggtgtggactcatgccacgactgatttgcttctaccctttagcttttctagtgccttagtttccttgcctagaatatcctgcctgccatagctgattcgttttcttaaaaccc

SEQ ID NO: 911855 - DNA, 120 bp, Artificial Sequence
  ENSG00000259642_22 (sequence is synthesized)
gtactcgctcattcattcaggaaacctcttcctgaaaattccacaaaaatctaattattctttgtattctagcattacccgagccatagttttcaataggtgtttgcactttttaaaaaa

SEQ ID NO: 911856 - DNA, 120 bp, Artificial Sequence
  ENSG00000259642_23 (sequence is synthesized)
ttgcattattttctaaaaattattttgtttgtttttgtctgtttacttgatttaaagacaccatttttgtttaccatgtctagtacactgacacagtggatactcaatacttggtttgtt

SEQ ID NO: 911857 - DNA, 120 bp, Artificial Sequence
  ENSG00000259642_24 (sequence is synthesized)
gaaagttaagtagaatgtaagttcttacaggccaaagaccaggtagatgtttattcatagcaaaaaaagtattgtgttaaaagtttgctggctaactgtaagtcgagtattttcctaact

SEQ ID NO: 911858 - DNA, 88 bp, Artificial Sequence
  ENSG00000259642_25 (sequence is synthesized)
aaccagggctgcgcgcatgtgggctcggcgggccccgcactcggagcgcacggccagccctgccggccgggcaatgaggggcttagca

SEQ ID NO: 911859 - DNA, 120 bp, Artificial Sequence
  ENSG00000259642_26 (sequence is synthesized)
agcacccaggccagcggctgcagagggtgtgctgagtcccccagtagtgccggcccaccggcgctgcgctccatttcttgccgggccttaggtgcctccccgcggggcagggctcgggac

SEQ ID NO: 911860 - DNA, 70 bp, Artificial Sequence
  ENSG00000259642_27 (sequence is synthesized)
caatcagaacagtggcaacctgctggggttgctttccagagcgtggaagctttgttcttttgctctttgc

SEQ ID NO: 911861 - DNA, 120 bp, Artificial Sequence
  ENSG00000259644_0 (sequence is synthesized)
cagtaacatctttaaactgcatagtgttaatttaaagaatcagaacatcatcttttttttttaatatattgcttttcatttcattgccaatgaagttgaataaggatatttattttctga

SEQ ID NO: 911862 - DNA, 120 bp, Artificial Sequence
  ENSG00000259644_1 (sequence is synthesized)
acatcagaagatttgcagacaaatgatttgagtaaaatctgagcaagttagaaaatgtttatttcttagttttttcagaagaagttttgttttgttttgttttcttttgtttgagacaag

SEQ ID NO: 911863 - DNA, 74 bp, Artificial Sequence
  ENSG00000259644_2 (sequence is synthesized)
gaagttttgttttgttttgttttcttttgtttgagacaaggtcttactgtgttgcccaggttggagtgcactga

SEQ ID NO: 911864 - DNA, 120 bp, Artificial Sequence
  ENSG00000259644_3 (sequence is synthesized)
acctgccaccgcacctggctaagttatctgtagatgacatttcacctgaaggaagttggtggtaacccttacccataaccaaacttaggatttttagatatgggaaaagcaagtatgatg

SEQ ID NO: 911865 - DNA, 120 bp, Artificial Sequence
  ENSG00000259644_4 (sequence is synthesized)
acttacaaagctctgccttaaagggtaatacattggtttaatcaggtttactccacaacagggaattcaggtagcttagttttatatcttctttgagtctaatgacagtcttttgagttg

SEQ ID NO: 911866 - DNA, 120 bp, Artificial Sequence
  ENSG00000259644_5 (sequence is synthesized)
ccaaaattcccagttgatctttcttcttaattctccagtgttcactagatttgaaattctgccctgcttgcccatggtgctttgtcttatggtagtctcattctccaaaatcatttatct

SEQ ID NO: 911867 - DNA, 120 bp, Artificial Sequence
  ENSG00000259644_6 (sequence is synthesized)
tgaacctcagtgtgacttgtctttccagatctctgcctttgtctgatctctgaaacaccaaagctcttcctttcctttcaaactttccttgtgaccagagtcacaaacgttgctgtgctc

SEQ ID NO: 911868 - DNA, 120 bp, Artificial Sequence
  ENSG00000259644_7 (sequence is synthesized)
tgagatggttggttggaaaccagcccaagctgcatttggcacagtatacaccagtgaagacaggttgccaggatgaagccataggctgtctcacagttacagatgaacagcttcctgccc

SEQ ID NO: 911869 - DNA, 120 bp, Artificial Sequence
  ENSG00000259644_8 (sequence is synthesized)
ccaggttccccttctactgatgtaactaaggtctctaacccagaactccctaggcaatccactatagcaccattaccgatggttgatggacatgccaaggtattgacctcttaagccagt

SEQ ID NO: 911870 - DNA, 120 bp, Artificial Sequence
  ENSG00000259644_9 (sequence is synthesized)
agtggctggttagagcttggcaaaggagcagccccctcagtttatctcagtgtgccatacaaataatattttctctggatgttacagtgtgaaaaagggtgggaagtagtgccctgttga

SEQ ID NO: 911871 - DNA, 120 bp, Artificial Sequence
  ENSG00000259644_10 (sequence is synthesized)
gccatattagagccccaggcaaaagaaaaaaatgtgcattcctgtatattttttcttctttaatggctaagtttttttccagaatattaaagtagttgaaaaaatagtgaaaaaaaaaaa

SEQ ID NO: 911872 - DNA, 120 bp, Artificial Sequence
  ENSG00000259645_0 (sequence is synthesized)
atctggtaacttctccagaatgattttgtctccaaattcctttgggtgacacttgggatgtgtggggccagcaagtttcacaagggagagcaggcaagtttcacaaacaggacaaaccag

SEQ ID NO: 911873 - DNA, 120 bp, Artificial Sequence
  ENSG00000259645_1 (sequence is synthesized)
tttttttgtttctgttttttatttttaaatggaaggatagattctgaaacagcattgggaatacttgttccaattcgccttccattcacctgcgctaaggtgggttggaagtgtggagct

SEQ ID NO: 911874 - DNA, 120 bp, Artificial Sequence
  ENSG00000259645_2 (sequence is synthesized)
aagtccagcagagatgaagcaagccccggagacctgggtgcatgggcttgtggactggccatggtccaggaacctggacactcttggacctggtccttggaccagtcactgccccatctg

SEQ ID NO: 911875 - DNA, 120 bp, Artificial Sequence
  ENSG00000259645_3 (sequence is synthesized)
gttcgctctcctagggctgtgtggctctggcgtttgaaatttaggattagacagggagagtaccacaggttgagggggcagaggttgcagtgagctgagagcatgccactgtactccagc

SEQ ID NO: 911876 - DNA, 120 bp, Artificial Sequence
  ENSG00000259645_4 (sequence is synthesized)
ccgggcagtggagccaagaaaaaaaagaaattgtctccagagtgaatgatccaagatggcttccccatgagctcataattcaaattcttagaacacttgctggttttattttattttttt

SEQ ID NO: 911877 - DNA, 120 bp, Artificial Sequence
  ENSG00000259647_0 (sequence is synthesized)
agccccgccttcacaccgtgggaggcagcccagaggccaccggcacagggtggtggcccccagatcatacagcagtggacacaggggaagcaaacctgagtgaggacacaagagcctggt

SEQ ID NO: 911878 - DNA, 120 bp, Artificial Sequence
  ENSG00000259647_1 (sequence is synthesized)
ccggctccgctgcacaggattgccaccagttcactgagaggagtcattgaaaacatggcattgaggacagagactgccacttcagaattttctacatccaactgctgaagccactcgaag

SEQ ID NO: 911879 - DNA, 120 bp, Artificial Sequence
  ENSG00000259647_2 (sequence is synthesized)
tccctcagagaaccataaccagctttggagaagatgcttccacatagcttgtttcacagcatctcatctctcattaaaaccttgttgagggagcattactgtctgagcaatggacatagc

SEQ ID NO: 911880 - DNA, 120 bp, Artificial Sequence
  ENSG00000259647_3 (sequence is synthesized)
tctcatacgaaccttttcagctaacaccggataagccagctttctgacagcctctttcacatccttggtgcaccctacaatttttggcaaagtctttgctgatggtgcaatacatgataa

SEQ ID NO: 911881 - DNA, 120 bp, Artificial Sequence
  ENSG00000259649_0 (sequence is synthesized)
cccagcagcacttgctctgaaggaacacttggttcatcagaagaaaaaaagcccattgttgtcaccatctcaaatctgttgggtagataccacagccgggtcttcgcatgatccccctgt

SEQ ID NO: 911882 - DNA, 120 bp, Artificial Sequence
  ENSG00000259649_1 (sequence is synthesized)
ctgcagttagcagagctgtcatgctgtgtggccgtggaatgatctccagatttcatgtgatgccaatgaagtacaggaaaaactggactcccagaaaccaccacaaagtaatcactctcc

SEQ ID NO: 911883 - DNA, 120 bp, Artificial Sequence
  ENSG00000259649_2 (sequence is synthesized)
tgcaaacagtcctgtagaatgaaatctgggagcaatgaggaagaaggacccagggagatcgtgtccgtgtctgcagccagcctggggaagagaagcctaagagatagctgtgtccctaga

SEQ ID NO: 911884 - DNA, 120 bp, Artificial Sequence
  ENSG00000259649_3 (sequence is synthesized)
ttcttccacaagcacatctcaggcagccaaaaagattgtgttgaattttatgttctgtgggtttctttccaaaataatagatatggagtttgcaatctcccccgtgagaagaatatgttt

SEQ ID NO: 911885 - DNA, 120 bp, Artificial Sequence
  ENSG00000259649_4 (sequence is synthesized)
tgggaagaatgggagtcatatggaagtgacttgaacccaactctcagcctggagtcaggctcagtctagagaagctgatccctagacaacctgcagatacatgagtaagaaataaagacc

SEQ ID NO: 911886 - DNA, 120 bp, Artificial Sequence
  ENSG00000280927_0 (sequence is synthesized)
agggcttgcctgtggagaggctggagtcagccgtcagcgcggaactcctggtcttcccactgccacctctgcagcccccaccagagatatcagaaaacatcagctccagcctgcagccca

SEQ ID NO: 911887 - DNA, 120 bp, Artificial Sequence
  ENSG00000280927_1 (sequence is synthesized)
gacacttgaagtcaccttggctgcccctcctcacacccgtgcccacgtcagcaaaaccagggccggcttgttaaccgtgtccagaacccacccttcccaccctgcccaggccacctccct

SEQ ID NO: 911888 - DNA, 120 bp, Artificial Sequence
  ENSG00000280927_2 (sequence is synthesized)
cagtggcccagggggctccaagttgaagagcccaagacaggtcagagatgggctgggcggcctctgccactcacctccggagagggcagggagcagaggcctcagtcatgaggtggggct

SEQ ID NO: 911889 - DNA, 120 bp, Artificial Sequence
  ENSG00000280927_3 (sequence is synthesized)
gtcctcggcgtgggcctcgagactgggagccactgcccatacccaagagacctctgcgagcactggggtgcagagccagctctgagaaaccaggaggctgggattttgaagaggacgccg

SEQ ID NO: 911890 - DNA, 120 bp, Artificial Sequence
  ENSG00000280927_4 (sequence is synthesized)
gtaaacaggctcagctgtgggccaaggaacgcgaaggacacagggcagagcgcccacaggacggacgacgacaagcgacacgaggcccagcgctgccccctcccgcctcctgacagcccg

SEQ ID NO: 911891 - DNA, 120 bp, Artificial Sequence
  ENSG00000280927_5 (sequence is synthesized)
gaccagtctctgcagtgccagggccaccacacagatgcctcctccacacactctggtccgagggtttccgggccctctgcccaggcgccgaggctggagagctcctcccgggctacaact

SEQ ID NO: 911892 - DNA, 120 bp, Artificial Sequence
  ENSG00000280927_6 (sequence is synthesized)
ggtcactggcgtggtctctatccgcctcgggcttgacggtttggccaggagaaggggcgtggggcgggtgggccacagggggcaggccgtgggacagggacatggcgctggggacgatac

SEQ ID NO: 911893 - DNA, 120 bp, Artificial Sequence
  ENSG00000280927_7 (sequence is synthesized)
cttccacagcagctgggatgccagtgggggccacgcccaccacgcccggagggtacctgctgggagagggtccatccgtgaggcccacctgtaggcggcctggccaggccccacctgccc

SEQ ID NO: 911894 - DNA, 120 bp, Artificial Sequence
  ENSG00000280927_8 (sequence is synthesized)
tcctagcatcggcagcaccgagggggcctctccaggaggaccagcagtcagggccccgtgcccatggcactcctgtgtccactgagccctgaaggccaccccagcccaggctccttccaa

SEQ ID NO: 911895 - DNA, 120 bp, Artificial Sequence
  ENSG00000280927_9 (sequence is synthesized)
gaggccctggttctcatgggcctttcagctgcagatgtcagaggccgacctgagcacagccctttccagctgcagatgtcagaggccgacctgagcacagcccgttccagctgcagatgt

SEQ ID NO: 911896 - DNA, 120 bp, Artificial Sequence
  ENSG00000280927_10 (sequence is synthesized)
gaaacctgaacctggcagcacggaagtcacaagggccgacccaacgcccccagaagtagagtcctgtgtccccggctccacgcacctgcttgacggtgaagtcgttgatgaggtggtggt

SEQ ID NO: 911897 - DNA, 120 bp, Artificial Sequence
  ENSG00000280927_11 (sequence is synthesized)
tgtgctcgttgaggccgcagtgcagggtcacgcagtcgctgtggaagagcaggtcctgcagggtgctgacacgctgcagccccagcgcccgctccacgccatccgacaagtaagggtcgt

SEQ ID NO: 911898 - DNA, 120 bp, Artificial Sequence
  ENSG00000280927_12 (sequence is synthesized)
agaagagcacgttgaagccgaaggccttggcccgcagcgccactgcctgccccacgcgacctggtggcgtcaagacacagtgtgagacccttgctcacccgtggccgggaggccggcccc

SEQ ID NO: 911899 - DNA, 120 bp, Artificial Sequence
  ENSG00000280927_13 (sequence is synthesized)
gaaagccagggtcggagtggcctctgtgcctcagtttgaccatctgccaaggatgacaccagctgtggtcaagccaaggtgcccacgcacgctccacacgagcgctccacgtccgctcca

SEQ ID NO: 911900 - DNA, 120 bp, Artificial Sequence
  ENSG00000280927_14 (sequence is synthesized)
acgcgcccactgccaaggcggaggagatgcacaggggtggaaagggtacactagcccctcggcccacaccagctgccagccacaccactcccctgcagcctgtccacaggacgtgacatg

SEQ ID NO: 911901 - DNA, 120 bp, Artificial Sequence
  ENSG00000280927_15 (sequence is synthesized)
aaccactcagtgtcaaacggactggtcagtgggtctccacccacccaacacatgtcctccgtgcccaggcccctccgctggcctttcgatccacccatcaatgtttccggcatctcaatt

SEQ ID NO: 911902 - DNA, 120 bp, Artificial Sequence
  ENSG00000280927_16 (sequence is synthesized)
tccagaccagggaggccccgctgggctcaggtcctgaccccttcgagtggagcggcagagaaagccatcccaggcagacgtgcctgcccccaccccagcagtccaaggctggcacgggtc

SEQ ID NO: 911903 - DNA, 120 bp, Artificial Sequence
  ENSG00000280927_17 (sequence is synthesized)
ccagcacaggagccgtggagcttgagccaccgtgtctggctggggccggctcctcctcggggaagggtctgcagagtgctcgtgcccactgtgagccaacagcatggctgcaaaggacac

SEQ ID NO: 911904 - DNA, 120 bp, Artificial Sequence
  ENSG00000280927_18 (sequence is synthesized)
aggaccccaagcccgcgaacgtggtgtctcctgcattgcctcagagggaaccgctacacaggaaggaagcaggttgagcgccggggcgggtgggaagtgggcgcagtttcaaaggcggca

SEQ ID NO: 911905 - DNA, 120 bp, Artificial Sequence
  ENSG00000280927_19 (sequence is synthesized)
gccagggcaggcctccctgagaagaccaagcttgctggagacataaggggacaggaagggagccagagagctggaacaacacgtgcgaggggcccgcggcggcctgagggccaaggagac

SEQ ID NO: 911906 - DNA, 120 bp, Artificial Sequence
  ENSG00000280927_20 (sequence is synthesized)
cagaccgccaggcacacagggtggccggacgtggcccaaacgcccaggggacccccagtcactctgggaagaggactgggggaggctgggaggccagtcagaagagctgaggaccgtcta

SEQ ID NO: 911907 - DNA, 120 bp, Artificial Sequence
  ENSG00000280927_21 (sequence is synthesized)
aacgcactacatcctagaaagggaggcgcctgttctacgagaaggaacatggtggctccttccatccccagggacgaggctgctgcaggagggaggagggctcggcaggcggaggtggga

SEQ ID NO: 911908 - DNA, 120 bp, Artificial Sequence
  ENSG00000280927_22 (sequence is synthesized)
gcagcagttctgagggttgcagccacggccggagtacccgggcagctccccaggtgcagaacagcccgtctgtcaacgccccctgccagggatcccaccaaatggggaggaagagaacac

SEQ ID NO: 911909 - DNA, 120 bp, Artificial Sequence
  ENSG00000280927_23 (sequence is synthesized)
aggcagacacagagaaaggcgtctcccacagcgcagaaggcggacgacacgctgtttcccactgcgcacaacacaaagccccggaagtcgggctgccggtggcgaaaaccagctaaagcc

SEQ ID NO: 911910 - DNA, 120 bp, Artificial Sequence
  ENSG00000280927_24 (sequence is synthesized)
gcgggccggcgccggccacgcctgacacgggagagcagcggctgttcggggcgagaccattcttcacttctgtctctgccattctcttccacatgatgtctggcttaggataagaaatta

SEQ ID NO: 911911 - DNA, 120 bp, Artificial Sequence
  ENSG00000280927_25 (sequence is synthesized)
tgatgatgcaggtgaagagacaggaggatgtagtttctaattagaacaaaacactggaagcggacagacgcacagatgaccgaggctggaatcagccagcaaaacctcttaataactact

SEQ ID NO: 911912 - DNA, 120 bp, Artificial Sequence
  ENSG00000280927_26 (sequence is synthesized)
ataaacatgctcagagatgacaacaagtgtggatgtaaacagcagaaaaatggaggcttccggaagatgaatggtaactctataaagaaccacatagaaattccagaacgaaaacatccc

SEQ ID NO: 911913 - DNA, 120 bp, Artificial Sequence
  ENSG00000280927_27 (sequence is synthesized)
tctgaaacggaactccctggacaaagctaactgcaagaaaaggatcgggagcttgaagggaggggctcaaagtcagcagatggcatccaaacagaagcagagagaaaagaatttaaaaaa

SEQ ID NO: 911914 - DNA, 62 bp, Artificial Sequence
  ENSG00000280927_28 (sequence is synthesized)
tggcatccaaacagaagcagagagaaaagaatttaaaaaataaattttaaagaacaggcctt

SEQ ID NO: 911915 - DNA, 120 bp, Artificial Sequence
  ENSG00000280927_29 (sequence is synthesized)
cactccagactgggcgacagagcgagactaccttccacaaaaaaaaaaaaggcaacacattttcggacaaagaaaagcaaaaggaatcggtcactggtgagccacatttctaagacagtc

SEQ ID NO: 911916 - DNA, 120 bp, Artificial Sequence
  ENSG00000280927_30 (sequence is synthesized)
catttctaagacagtctttaggctacaggaacgtgacgcccgaggacagccagaatcggggggcgtaaacaaggcagaaagggtggatgtgtcggttgatattcaaaagaaaaattactg

SEQ ID NO: 911917 - DNA, 120 bp, Artificial Sequence
  ENSG00000280924_0 (sequence is synthesized)
agccaactggttgtctaaggctgggaaggggttaagatgcccccggagcttgccgcgagggcagctgcctcagcgggcactccgcctggatgggaatataagcactcttggtgttgccca

SEQ ID NO: 911918 - DNA, 120 bp, Artificial Sequence
  ENSG00000280924_1 (sequence is synthesized)
ggcagagagggcagtgtggagggaagttgctagaaaaaggcaggggacataatccatactggcctctttcccaggcacatcacagtggcagaattatttatgattctgacccaatgggga

SEQ ID NO: 911919 - DNA, 120 bp, Artificial Sequence
  ENSG00000280924_2 (sequence is synthesized)
tccctctacttggggagactgccaacccacgccctcctgaatggcaacgtcctcccacagagacagaggggaacaagtagcatttatggagcggcacagaggaaagagtgtgggctttgg

SEQ ID NO: 911920 - DNA, 120 bp, Artificial Sequence
  ENSG00000280924_3 (sequence is synthesized)
agacagcacagcagcactcacatcccggcccagacacttcctgtgtgaccttgagccagttgatgaacctgtctgggcctctgtttcctcatctgttatcggcgaaaatgtttcggagga

SEQ ID NO: 911921 - DNA, 120 bp, Artificial Sequence
  ENSG00000280924_4 (sequence is synthesized)
cacctattgtataatgttgctatgcagattaaatgcactagcagaggcaaagtgcatagcttagaggaaggaagtactcgctaagtggtagctggtgtgataggtgggccaagtcctggc

SEQ ID NO: 911922 - DNA, 120 bp, Artificial Sequence
  ENSG00000280924_5 (sequence is synthesized)
caggtgaataaaatgaatgattagaaactggacctgccactctgcagaacccaggcactgctccccagcagctggtgcctcaaagcagctgctaacatggcaggagacagtcagaccagc

SEQ ID NO: 911923 - DNA, 120 bp, Artificial Sequence
  ENSG00000280924_6 (sequence is synthesized)
agtgaatagctatgcttcgtaagacttcatacacaaggcaggcgtgtggactgaccagaaaggtggcagtcactgtccatcaagagaatccccacctgttttccaatatgtcagccagga

SEQ ID NO: 911924 - DNA, 120 bp, Artificial Sequence
  ENSG00000280924_7 (sequence is synthesized)
ggctcgcactcccaaaaggaatgttctcagccagctccctgactgtccccacctctgacagtggactctcttgggtctctcaaaaggctcctcctcctcagccatggggtgaaggaatcc

SEQ ID NO: 911925 - DNA, 120 bp, Artificial Sequence
  ENSG00000280924_8 (sequence is synthesized)
tgtttgccggggaggcgggatgctgcccagggtggctgttttgggagagcgagcaggatgagatagtgcctatgagtgatctttggagatggaggtgctatggccacctgtggggactgc

SEQ ID NO: 911926 - DNA, 120 bp, Artificial Sequence
  ENSG00000280924_9 (sequence is synthesized)
ctgggtgcctcctggccactgtcaacttccttgctcacactgagattctgtgattctcctctgagcatttccatggataatttttttttttcagagacactattaaagattttaaaaatt

SEQ ID NO: 911927 - DNA, 120 bp, Artificial Sequence
  ENSG00000280920_0 (sequence is synthesized)
ctagaaagtattaactaagggacttactgttaggtatgttctaggactaatatgatattgagggaaaccagttcacttttctcagctatgcttctactacagataggtggaacatctaca

SEQ ID NO: 911928 - DNA, 120 bp, Artificial Sequence
  ENSG00000280920_1 (sequence is synthesized)
aatatgtaatactaaaaaattcatatccaagctcaaaactaggaaaggttgtccttatatcctaaaaatgaaggtggaacttaaatctagaaaaataatctagaaaaataagctttagct

SEQ ID NO: 911929 - DNA, 120 bp, Artificial Sequence
  ENSG00000280920_2 (sequence is synthesized)
tcctatgcaggaaaactcgcaccaacacatacacagtgacacacagaggcacacacaggcagacacacacagtcatacatacagacacacatgcagacacacccacaagcacacacaaac

SEQ ID NO: 911930 - DNA, 120 bp, Artificial Sequence
  ENSG00000280920_3 (sequence is synthesized)
atacacacaaacacacagacacactggcatgcacaggcacacacagacatacacacaaacacacacacagacacactggcatgcacaggcacacacacacacaggcatacacactgacat

SEQ ID NO: 911931 - DNA, 120 bp, Artificial Sequence
  ENSG00000280920_4 (sequence is synthesized)
aggcatacacacacacacaggtacacacacagacacacacaggcatacacacagacacacatacaggcacagacaggaacacacagacacatacatagcaggacacatgcatacacacga

SEQ ID NO: 911932 - DNA, 120 bp, Artificial Sequence
  ENSG00000280920_5 (sequence is synthesized)
gaatgcttgggcacacacacagtcgttgttatgggtggaaaggaggacaatggatatttattagaaaagaagatttattagaaaagaagatggatggagaagtaggtagtatatttaaat

SEQ ID NO: 911933 - DNA, 120 bp, Artificial Sequence
  ENSG00000280920_6 (sequence is synthesized)
tgataatttataatgggaaaatagatgcccaaaattgaagacaattgtataatacaaaatcttgagtagaatcagaaacaagctttatttgttatggacacagtatagtgaattttctta

SEQ ID NO: 911934 - DNA, 120 bp, Artificial Sequence
  ENSG00000280920_7 (sequence is synthesized)
gcatcaaatgccacagaattttcaataccatcagagagaaaataaatattcccaaaatcataagataatatattacatcagactctcattagcaatgagagatgccagtagacagtgtat

SEQ ID NO: 911935 - DNA, 120 bp, Artificial Sequence
  ENSG00000280920_8 (sequence is synthesized)
tttatgtgttgaaattggtggaggagaataatgataaaactaaaattctatatccatatgaatcagattcatgacaaaaggtgaaataaaggtactttagagagaggctgaatttacttt

SEQ ID NO: 911936 - DNA, 120 bp, Artificial Sequence
  ENSG00000229269_0 (sequence is synthesized)
agctcttctttctcttcgtacatgagggtaatagacagcagtcttcagcctgagacccatcactagaaacagataatcggtgtcgtgaagaaaagacaaaggatctctcagcaaggcaat

SEQ ID NO: 911937 - DNA, 120 bp, Artificial Sequence
  ENSG00000229267_0 (sequence is synthesized)
gggcggggcctgaagcccctctgggctgcctggacggatgaagtccaggtggaaagccagtcgacgtttcccgggagctacgactccagggaccctcatccgagcttaaccgttggaaca

SEQ ID NO: 911938 - DNA, 120 bp, Artificial Sequence
  ENSG00000229267_1 (sequence is synthesized)
atcacaaacccagaaacttttagctgagtgttatttataaaaagcgctgttttgactgctgttggacttggaaaagctttgcccacgatactgaagcgtaattagctgcctacttttcaa

SEQ ID NO: 911939 - DNA, 120 bp, Artificial Sequence
  ENSG00000229267_2 (sequence is synthesized)
aattatgtgatgacttcatgggaaaagagattcacaagaaccagtaacaggaaagcttaaataagcttggaaatctttaaactttcaatatcggaaaatgccaaagcaattggggaaaaa

SEQ ID NO: 911940 - DNA, 120 bp, Artificial Sequence
  ENSG00000229267_3 (sequence is synthesized)
aatactgttttctctgaaatgaagactcctcaagatcctgttgctggaatgagtattggactcttcggtctacttctacagtcaccagtacatctggcatacactatgatgcccaacagt

SEQ ID NO: 911941 - DNA, 120 bp, Artificial Sequence
  ENSG00000229267_4 (sequence is synthesized)
aggaagatgaaagaaatgtagatgttggcatttctaaaagagatgttgtatcttttttcctacttaatagactattaggctataaatctcaatcttggccagcaaatgtgtttgccagct

SEQ ID NO: 911942 - DNA, 120 bp, Artificial Sequence
  ENSG00000229267_5 (sequence is synthesized)
tttctttattctttttaatttttttgaggatcagcatggaaaaacaatttgcgcaaggctcaagaagatgagatggtcttataaacagtaattgaaatatgtatattttttaaaagtctg

SEQ ID NO: 911943 - DNA, 120 bp, Artificial Sequence
  ENSG00000229267_6 (sequence is synthesized)
tttcaaatttcaaaccttattttaaaaactatgtgaaagcctcttgtgaaactcaactgaagtaggcatggctgagtccagaggagcagtgtggaggattagaaaaataaacaggcagga

SEQ ID NO: 911944 - DNA, 120 bp, Artificial Sequence
  ENSG00000229267_7 (sequence is synthesized)
gtcagacagtcctggattcaaatcccacttctaggccttagagaaataatataatagtaggggataataatattcaccctgaagagtgctgtagggatcatcaatatttcatataaagca

SEQ ID NO: 911945 - DNA, 120 bp, Artificial Sequence
  ENSG00000229267_8 (sequence is synthesized)
gaacttcttagtataaaagttttgtctttcagaaaattaacaaagatattcaggaccggaattcagctctggatcaagtagacctgatagatatctacagaactttctatcccaaaacaa

SEQ ID NO: 911946 - DNA, 120 bp, Artificial Sequence
  ENSG00000229267_9 (sequence is synthesized)
atcccaaaacaacagaatgtacatttttctcattgccacatgtcacttactctaaaatcgatcacataatcggaagtaaaacactcctcagtaaatgcaaaagaactgaaatcataacaa

SEQ ID NO: 911947 - DNA, 72 bp, Artificial Sequence
  ENSG00000229267_10 (sequence is synthesized)
caagaagttctttgaaactaatgagaaaaagagagaatgtaccagaatctctgggacgcagctcagctggac

SEQ ID NO: 911948 - DNA, 120 bp, Artificial Sequence
  ENSG00000229267_11 (sequence is synthesized)
aaacagctggacagagctcaagttgataacctaacatcttaactaaaagaacttagagaaccaagagcaaataaaccccaaagctagcagaagataagaaataaccaagatcagagctga

SEQ ID NO: 911949 - DNA, 120 bp, Artificial Sequence
  ENSG00000229267_12 (sequence is synthesized)
agatagagacacaaaaaatccttaaaaaaatcaacgaatccaggagctgttttttgaaaaaattaataaaatagacaactagctagactaacaaataagaaaagagagaagagtcaaata

SEQ ID NO: 911950 - DNA, 120 bp, Artificial Sequence
  ENSG00000229267_13 (sequence is synthesized)
agactaacaaataagaaaagagagaagagtcaaataaacacaatgaaaaatgataagggggatagtaccgctgaccccatagaaatacaaacaaccatcagagaatactatgaacacctc

SEQ ID NO: 911951 - DNA, 74 bp, Artificial Sequence
  ENSG00000229267_14 (sequence is synthesized)
cctctatgcaaataaactagaaaatgtagaaaaaatggataaatttctggacacatataccctcccaagactga

SEQ ID NO: 911952 - DNA, 82 bp, Artificial Sequence
  ENSG00000229267_15 (sequence is synthesized)
tataaagaagagctggtacaatgtctgctaaaattattccaaataattgaaaaggagagactcctccctaactaattctatg

SEQ ID NO: 911953 - DNA, 120 bp, Artificial Sequence
  ENSG00000229267_16 (sequence is synthesized)
tcaatatcgaatcaagaaatactctatttcaccagaggaatccttgcaaatacattttactccactatgcaaaatcctgtggaaccagttttttatacatatttttagctgaaagatcaa

SEQ ID NO: 911954 - DNA, 120 bp, Artificial Sequence
  ENSG00000229263_0 (sequence is synthesized)
tcttctatgaacttcttaagttaaggaaagacctcatacttcattctccccttccaaattccaagcaaagtcaagaatccatctcaattcttatttattggaataattctgagcaaaact

SEQ ID NO: 911955 - DNA, 120 bp, Artificial Sequence
  ENSG00000229263_1 (sequence is synthesized)
caaaaaggtagggacacagacaagtcacccctatactcaggcagctgacagtccagcaggaggaacaaagtagcctgtcaactctctccagcgtgacatgtgccatgagaggtctgagaa

SEQ ID NO: 911956 - DNA, 120 bp, Artificial Sequence
  ENSG00000229263_2 (sequence is synthesized)
cagacgacttaaagatggggcatcacagttgggacaggtatgactccaggaattcagagtctgaaatcaagtctacccaaaaccaaaggatctgtaacatgaagagcaagacatcatatg

SEQ ID NO: 911957 - DNA, 120 bp, Artificial Sequence
  ENSG00000229263_3 (sequence is synthesized)
ttggttagtgacatctgtgatggaggctttaagtgaatacaggaggagcatgcctatttaaaaagaaagctttaaacattaactacaagggaaaacagagtttatgaaaataactttgct

SEQ ID NO: 911958 - DNA, 120 bp, Artificial Sequence
  ENSG00000254377_0 (sequence is synthesized)
gggagaaggaaatgacagagagagagagagaaaggagagagagaacgcagagggagggaggcagggagggagaccaaacccccgctttactgcgttgaaagcttctgaatttcaagcaga

SEQ ID NO: 911959 - DNA, 120 bp, Artificial Sequence
  ENSG00000254377_1 (sequence is synthesized)
aagtagaaggagctccaaaggcagtgagcgtctttccttgggctgcgtgtgccgagcgtagacaatgaaaatcttcatccccctcccccattctactaggctacaagattcttgttttcg

SEQ ID NO: 911960 - DNA, 120 bp, Artificial Sequence
  ENSG00000254377_2 (sequence is synthesized)
ttccttctcaccggtggaagatgtgtaaaatcaaagatgtagaggtgtgtagtgatttttttaaaagccaactaaccaccgcacggactgcgacgcggattacccgagcgcacgccggct

SEQ ID NO: 911961 - DNA, 120 bp, Artificial Sequence
  ENSG00000254377_3 (sequence is synthesized)
gggcgcattctggggtctctgcgcaagaccagctctcagctctctctcctttcctcggactctggagcgggagcgggcctttccctcgggtcgaccacgccgtaggggacgccgtgaaaa

SEQ ID NO: 911962 - DNA, 120 bp, Artificial Sequence
  ENSG00000254377_4 (sequence is synthesized)
cccaggcgcttccagccccagactgtggccactggctgaggagtgcgagtcggctgcgctgccctgagcctaatccctcttccgggcccagacccgaggtccgcgctcctgggcagtggg

SEQ ID NO: 911963 - DNA, 120 bp, Artificial Sequence
  ENSG00000254377_5 (sequence is synthesized)
gaagctttagtgagcaggcttttctctccgcagcaaacttgtagccagaccagatgggccgcccagctctctcgggactaggcaggtgcggatgagttaatttttccgcattacaaagaa

SEQ ID NO: 911964 - DNA, 120 bp, Artificial Sequence
  ENSG00000254377_6 (sequence is synthesized)
agatgacccagcccgcccttggactctcttttcccaaaatctcccaaccaaacccgcggtaacgttatcaaaggacacagagcccaggcatatctgtgtgtttatcttacaggcacacac

SEQ ID NO: 911965 - DNA, 120 bp, Artificial Sequence
  ENSG00000254377_7 (sequence is synthesized)
gcatggttttctcttttatatgctagatttcatccctgacagcagaaaatgattggcaatggttatgacggagaacatgcaatagcgtggtccttaaaaacctgccattccttacaagtg

SEQ ID NO: 911966 - DNA, 120 bp, Artificial Sequence
  ENSG00000254377_8 (sequence is synthesized)
ccttagaaaggattcagggcgaaccaactgggttaattgcattcagtaaaataacacgattacaaaattagatctgtaccagaggggtaattaacttggatccacgccgtcatttgaaaa

SEQ ID NO: 911967 - DNA, 120 bp, Artificial Sequence
  ENSG00000254377_9 (sequence is synthesized)
ttctcggaataatttaggaacagcttgacccgttgagatactcaaggacaaccctccagggaaatagtatgtttccttcctgggaacaagatgctagcgcggtgcaccgggaggtatctg

SEQ ID NO: 911968 - DNA, 120 bp, Artificial Sequence
  ENSG00000254377_10 (sequence is synthesized)
gtgtcaacaatgccagagcgccctctgctgcctcaaagaggcaggacaccagttacaaaagccagatggcacagtggcaataagcggaggaaacattaagctcttagaaacgtttaatct

SEQ ID NO: 911969 - DNA, 120 bp, Artificial Sequence
  ENSG00000254377_11 (sequence is synthesized)
gtgaaatttaaaagctctcatcatattctacttttgaaagggccacctgattttgattttgagcactccttggatgttatcttctattctggaggataatgaaaagtccgtgttttgaag

SEQ ID NO: 911970 - DNA, 120 bp, Artificial Sequence
  ENSG00000254377_12 (sequence is synthesized)
ttttcagattatttctgtagttatatttctccactctttctcgaattttatatggaaatacgaaattgcaaatctaagtgaaaaacctttgtgtaaaacaggtgagtggagaagacgtcc

SEQ ID NO: 911971 - DNA, 120 bp, Artificial Sequence
  ENSG00000254377_13 (sequence is synthesized)
tggtttctccaaataactaagatctaataaagaaacaaatcttaattaaaataaagataccgagcacatgttgttgtgttagtttaaaacgataataaaaagaaagaaattaagtctcga

SEQ ID NO: 911972 - DNA, 120 bp, Artificial Sequence
  ENSG00000254377_14 (sequence is synthesized)
ctgcaaaatcgtcctgcctgattcctttagaattcatactacctcagaggagcaaacctaatcccctcagcctaatcctacctgtttaggatcatctaaacttgtccttcagaaagcttg

SEQ ID NO: 911973 - DNA, 120 bp, Artificial Sequence
  ENSG00000254377_15 (sequence is synthesized)
atcagtttaaaattgctttctaaatagaaatgaaatacgtgatatgagagaggttaaaatactgcttaaaaagggaaacactcaatttagtaattcggttgcctagatgaaatcgagtgg

SEQ ID NO: 911974 - DNA, 120 bp, Artificial Sequence
  ENSG00000254377_16 (sequence is synthesized)
ctattgatccgtgatgtttctagatttttaagactatgtacttcctatttctttggaaaataatcatccagtttgatgcccattacaaattttcctgctatgaaagaaattctatgcgcg

SEQ ID NO: 911975 - DNA, 120 bp, Artificial Sequence
  ENSG00000254377_17 (sequence is synthesized)
tgaaataagaaagtgaattattttaaagaagaagaaaaatttgcttcttattaatatgtacaatatttttgcccttaaaacctttgcaatacatttatacacacacactcagcttgcaaa

SEQ ID NO: 911976 - DNA, 120 bp, Artificial Sequence
  ENSG00000254377_18 (sequence is synthesized)
gccttctttagaaaataacccactctgagtagaagtaatgagatatggtagcagcatgggcaaagccataagaaacgttatttgcattaaaaatgagtttttcagtatggaaaatcaatt

SEQ ID NO: 911977 - DNA, 120 bp, Artificial Sequence
  ENSG00000254377_19 (sequence is synthesized)
accaaatgaaatagagattttttttaaaggttcaaaccttttcaaatttttatgttatagggtttatattgattaaaataaatgtacgtttgtagttattcaacattatgaatttcaaga

SEQ ID NO: 911978 - DNA, 120 bp, Artificial Sequence
  ENSG00000254377_20 (sequence is synthesized)
tggccacctattttgaaacgcacacctttgccatgaagtctgttgttgcatatattagtgctgatgtaataaaatgcttctattaactatgtggttgttaataaatcttgtaaaaataaa

SEQ ID NO: 911979 - DNA, 120 bp, Artificial Sequence
  ENSG00000254377_21 (sequence is synthesized)
gtgtcagaacaaaatagctgtttaaaatcacttattttagtcttagcttttaaatcaaaatgcctataagaatattaagttctaagattgttgagaatactaagataaaattaaaaattg

SEQ ID NO: 911980 - DNA, 120 bp, Artificial Sequence
  ENSG00000254377_22 (sequence is synthesized)
attttacaatttgctataatttaaaaatcttgtattgattaaatgttaaatcaggttaaatatttgaccaattgtgtcaagttccgtataaatatgggtacatttgtcttctgaaagcta

SEQ ID NO: 911981 - DNA, 120 bp, Artificial Sequence
  ENSG00000254377_23 (sequence is synthesized)
tttctccaaagaatgcacttacgaatgtatggcataataagtgaaaaaatggtagaacttttatgtttttattttaagtatccttttaaaaattaaaaatattttttttcttttacttaa

SEQ ID NO: 911982 - DNA, 120 bp, Artificial Sequence
  ENSG00000254377_24 (sequence is synthesized)
tttaaatttcttcctaaataagtgcatattttacccaggagaaaataaacagagtgacataaatttgctatacttcttatagttactataatcagttaaaaaacaacttctaggcaaata

SEQ ID NO: 911983 - DNA, 120 bp, Artificial Sequence
  ENSG00000254377_25 (sequence is synthesized)
taagaggatgcaccaaagtagccgcgccctccctgcctggcgctgtccgcggtgctgaccgtggcccttttctctctccgtaatcaaactggaaaagcaataggaccgtcccgtccctac

SEQ ID NO: 911984 - DNA, 120 bp, Artificial Sequence
  ENSG00000254377_26 (sequence is synthesized)
agcaagcgagggggaaagaccggaccgctccgacccaccccctccctacccccacctcccaccttaaagcaccttataccacggaaggctctcagcctcttctttcctctgcgaacgcgc

SEQ ID NO: 911985 - DNA, 120 bp, Artificial Sequence
  ENSG00000286186_0 (sequence is synthesized)
gggctgacccgggaagctctggccacccggagcctgtctcggcatttgtacgggggataaagagacgcttcctccaaggctgttttctgaattcagcagtgctcagggcagctgcgatgg

SEQ ID NO: 911986 - DNA, 120 bp, Artificial Sequence
  ENSG00000286186_1 (sequence is synthesized)
agtcagcagctacaccaggacccttctgagcaccctgactcactggctctgcggacaacgggccgtgtaggccgggactccttcctctgaacactggcctgccctggggcctccagcttt

SEQ ID NO: 911987 - DNA, 120 bp, Artificial Sequence
  ENSG00000286186_2 (sequence is synthesized)
cctcaaggggcttctcaggtgaaggcaagaaaagcgacagcattgaactggaaccctgtgagtgccaggagcttcaggggaggcctgagcaccactgaaggtgcagggagtgaaggtgcc

SEQ ID NO: 911988 - DNA, 120 bp, Artificial Sequence
  ENSG00000286186_3 (sequence is synthesized)
agcaccgctctccatggaggccaccgatcgtcccaccaacaggagacgacctcaagactcctccccggtgtcctgtccacctgcctccagccgcccgagatgggctcttccctgaggttt

SEQ ID NO: 911989 - DNA, 120 bp, Artificial Sequence
  ENSG00000286186_4 (sequence is synthesized)
ctgaagggaccagcttccaactgcacacactgagtgggtgcacaagactccccgacccgcagggacacacactgagtgggtgcacaagacttccctgacccgcagggacacacactgctg

SEQ ID NO: 911990 - DNA, 120 bp, Artificial Sequence
  ENSG00000286186_5 (sequence is synthesized)
agctcagaagcatgttcatgtcttcaaaactcccttgtgagccatgtggcatcttatgttggcctagagatttctactgcttttataggactaaacagaacactcaaaaaatccaacgta

SEQ ID NO: 911991 - DNA, 74 bp, Artificial Sequence
  ENSG00000286186_6 (sequence is synthesized)
ttttataggactaaacagaacactcaaaaaatccaacgtagggatcaatccaactgtatcaataataagtgaac

SEQ ID NO: 911992 - DNA, 120 bp, Artificial Sequence
  ENSG00000286186_7 (sequence is synthesized)
cagcctgggcaacaagaacgaaactctgtttcaaaaaaacaaaaacaaacaaaactaaagacctaaacatcaatggtctccatgtgccaattacaagacagcgtcagagaggatccaaga

SEQ ID NO: 911993 - DNA, 120 bp, Artificial Sequence
  ENSG00000286186_8 (sequence is synthesized)
cagagaggatccaagacaccacccaagaagacgttgcctccaagaaaccactttaaacatgagcacatggatcagaagcgcagggatgggagagatgcacgcagcaaccggtgccgtgca

SEQ ID NO: 911994 - DNA, 120 bp, Artificial Sequence
  ENSG00000286186_9 (sequence is synthesized)
ggagatgtgggagcagctacagccatccacacaaaaggtcatctccaatccgaggacggtcattatcctcaggcaccggctgtatgcacgcggtgccagggaagctgtggcaggtgactg

SEQ ID NO: 911995 - DNA, 120 bp, Artificial Sequence
  ENSG00000286186_10 (sequence is synthesized)
ggggagttggaaacggcccggtgacagcagaagtgtgacccagccacgcgtctgccacgaccccgcacacatgcaccgcccgctaacaggctgtggccaatcgcgagtccaggagccacg

SEQ ID NO: 911996 - DNA, 120 bp, Artificial Sequence
  ENSG00000286186_11 (sequence is synthesized)
ccctcggtgctgtgagcgggtctgggcaggtgctgaccaccccccgggaactcagcacagcactgactcccaggagcctgctctgtgccaggtgatggtgacagcaaggggacagcaaag

SEQ ID NO: 911997 - DNA, 120 bp, Artificial Sequence
  ENSG00000286186_12 (sequence is synthesized)
ggcgggagggtccgtgtgagacgaccttccctgggctgtctcagcgccagggtgtgtgaggtggccctcagcctgtccagcaccgtccccggccgccagggctctgacgtgacctgacac

SEQ ID NO: 911998 - DNA, 120 bp, Artificial Sequence
  ENSG00000286186_13 (sequence is synthesized)
gttgggtgacagcacatggtgctttggcgagtacttggtgatcctgtttgttactggttctgttactctatgcactatttttatttgtttcattctaagaaacaggaaccccagcctccc

SEQ ID NO: 911999 - DNA, 120 bp, Artificial Sequence
  ENSG00000286186_14 (sequence is synthesized)
aaggcctggggacccgcagtggctccagcagaccccagcctcccaagccctggggacccacagtagctccagctgcgccaaaggcactcaccggcttgcacaggtcccggtcagttttcg

SEQ ID NO: 912000 - DNA, 120 bp, Artificial Sequence
  ENSG00000286186_15 (sequence is synthesized)
cttccatctcccagacatggtggccatctggaagaaaggagcaggaaacgtctgtgactctgtgtggtggggagccccctccccagacacccccacgtgatccagacccagggccctgag

SEQ ID NO: 912001 - DNA, 120 bp, Artificial Sequence
  ENSG00000286186_16 (sequence is synthesized)
ccaggagggcgccttgtcccaggagacccacgtaggcccatcccagggctttgtcgagggcagcacctcaggagccacgtgccctggcagggccccgagctcgacaccaaagttgccctg

SEQ ID NO: 912002 - DNA, 120 bp, Artificial Sequence
  ENSG00000286186_17 (sequence is synthesized)
ggagcctggagaagctgaggacacgcggctcagggcttgttctgaccccagcccggcgtaggagggactacagggcaggggcatcctcaggaatccgtcctggccctgcatctgctggcc

SEQ ID NO: 912003 - DNA, 120 bp, Artificial Sequence
  ENSG00000286186_18 (sequence is synthesized)
tctcacagcctcaggacaggtcacgggagggtctctatgccctcgtcctctccagggagagcaggtgtgagggggagcaggtaccccatcagcagagcgtgtgcagggcgtctgtgcgtg

SEQ ID NO: 912004 - DNA, 120 bp, Artificial Sequence
  ENSG00000286186_19 (sequence is synthesized)
gacctgggacccggctctgcagttcccagcccagcctcccagggatgcaggaggtgtgagagtagtgacggggggccgggggctccacgccagggtgcgacgcctgctcgtgctggggtc

SEQ ID NO: 912005 - DNA, 120 bp, Artificial Sequence
  ENSG00000286186_20 (sequence is synthesized)
tactctggtggatgagggcctggccgctggccctgcctgtgtgcaaaggaaccactgggtaaatgagaagagccttcctctgacaacttcttgcccatcaggagacagaaatgcaaaaca

SEQ ID NO: 912006 - DNA, 120 bp, Artificial Sequence
  ENSG00000286186_21 (sequence is synthesized)
cgaggtatttttggcatttccccagtggccatttgcatgtttttaaaaaataaaaaggctcccagaggtgtagtgaaaggacgcgttgtgctctctgctccaggcctggcagagtggggg

SEQ ID NO: 912007 - DNA, 120 bp, Artificial Sequence
  ENSG00000286186_22 (sequence is synthesized)
ctccaggcgcacacggacaaggcggccccaccacagcctgggtgtgtgcacggcctggcccctcagatgggctgagtttggggcaattatctcaaattaacagatgtcaatctcctacag

SEQ ID NO: 912008 - DNA, 120 bp, Artificial Sequence
  ENSG00000286183_0 (sequence is synthesized)
atagcaaatgggctattcctcagcctacaaaaggatggaaattctgatacatcatacaacatggatgaaccttgaagaattatgctaaatgaaataagccatttataaaaggacatttac

SEQ ID NO: 912009 - DNA, 120 bp, Artificial Sequence
  ENSG00000286183_1 (sequence is synthesized)
cgcttcatgattttgttgatgatattcctggagtagttacattcatggagaaagaaagtggaatggtgcattttacctcaatggaaaatgtttcaaatgaaaacaaaataaaaattcacc

SEQ ID NO: 912010 - DNA, 120 bp, Artificial Sequence
  ENSG00000286183_2 (sequence is synthesized)
tccaaccaatctactgaatggctagaatttgaaaggccaacacatgagctgctgcaaggctggagaaaggaagtttcagacaccacaggagaaagcagaagacattggcagctggtggag

SEQ ID NO: 912011 - DNA, 120 bp, Artificial Sequence
  ENSG00000286183_3 (sequence is synthesized)
agacacgtgtagacatgtaggggcttcggggtctctcctcaaaggacaacaggtgcagagtggccggcacttgggaactttgccttcacattgacctgggcaaagggctgcccacagccc

SEQ ID NO: 912012 - DNA, 120 bp, Artificial Sequence
  ENSG00000286183_4 (sequence is synthesized)
tattctgatgcctgctgtgcatgacagagacggagaaagaaggaagaaggggaaggggagaaaggggagaaagtgttttctgttcacaggtgggaaaagaggagacaggagcttcgatga

SEQ ID NO: 912013 - DNA, 120 bp, Artificial Sequence
  ENSG00000286183_5 (sequence is synthesized)
ggctgctgtcatgagtgatacatacagggatgaccagagctggaataaactgaggtgagaatgacaaatatcagaggtggctgtgcgcaggtacctctggaaaggagaaagggcttggtg

SEQ ID NO: 912014 - DNA, 120 bp, Artificial Sequence
  ENSG00000286183_6 (sequence is synthesized)
tggagcaggcctatcagctatggcttcagacttcggggaggggaggtccttgcaggtctatttcctcctctgggcctctctcccgcatcctcttctctctcctctctttgccgaattcca

SEQ ID NO: 912015 - DNA, 120 bp, Artificial Sequence
  ENSG00000286183_7 (sequence is synthesized)
ctccagctctcagcttggacaccacccctcagggagcctttcctgccttccccacggcacccacgcttgacacgctgatgtctgtcttccctgaagctgctgtcttgtccctgctgctct

SEQ ID NO: 912016 - DNA, 120 bp, Artificial Sequence
  ENSG00000286183_8 (sequence is synthesized)
gcaggccgctagcaaccagcatggaccggaaccactgctccagcgccaaggcggtgctcagcaagtgtcggctgaatgaggggatgaggaatggtgtgcttgaatgaccgtgggtcctgg

SEQ ID NO: 912017 - DNA, 120 bp, Artificial Sequence
  ENSG00000286183_9 (sequence is synthesized)
gtgagccgccagggatgcgacaaacctagaacccctgggtgacccctcctatgttgggtgggctggtcccagagccacccagatgccccaagacccccgccgccgactttgggggatggg

SEQ ID NO: 912018 - DNA, 120 bp, Artificial Sequence
  ENSG00000286183_10 (sequence is synthesized)
aatgggaagggtggggaatgggggccgtggactccacatcatatccacgggtaaaatgttctcaaggaacagtttgttttcatttcaaaggctcatccaatatatcgggtcaaggtttat

SEQ ID NO: 912019 - DNA, 120 bp, Artificial Sequence
  ENSG00000286183_11 (sequence is synthesized)
cagaaaattttctgagatcttactgttttccctatatcggaaagaatttccaaaaaatagtgttttaaagatgtgtaattgtcactggagtgaggtggagccacgtccaggagggcgggt

SEQ ID NO: 912020 - DNA, 120 bp, Artificial Sequence
  ENSG00000286183_12 (sequence is synthesized)
ggcagtttccgggcagaagtcagggcctcagcctggatgcattcttgcctcccccaagatgctgaaatgcttgcccattccagcctccgaggaaagcaggagacccacaggaagggtggc

SEQ ID NO: 912021 - DNA, 120 bp, Artificial Sequence
  ENSG00000286183_13 (sequence is synthesized)
tccctgcctgccttccaccacctccctgctataaacaaaaaggtctcaatcaatttaggaagtctattttgccaaggttagggacgcgcctgtgacacagcctcaggaggtcctgacgac

SEQ ID NO: 912022 - DNA, 120 bp, Artificial Sequence
  ENSG00000286183_14 (sequence is synthesized)
atgcacccaaggtgatggggcacagcttggtttgatacattttagggagatgtgagacctcaatcaatgtatgtaagatgaacattggtttggtctggaaaggcggggacaactcgaaac

SEQ ID NO: 912023 - DNA, 120 bp, Artificial Sequence
  ENSG00000286183_15 (sequence is synthesized)
agggaggaggcttccaggtcataggaagataaagagacaaacggttgcattcttttgaatttctgatcagcctttctaaagggagcaatcagatacgcattcgtctcagtgagcagaagg

SEQ ID NO: 912024 - DNA, 120 bp, Artificial Sequence
  ENSG00000286183_16 (sequence is synthesized)
gtgacttttgagttctgtctgtcctttgtctgcaaggaacttccttgtggacaaattgtgagggaggtgtgtagcttttttatcttagtaggtatctcttttaggaatagaatgggaggc

SEQ ID NO: 912025 - DNA, 120 bp, Artificial Sequence
  ENSG00000286183_17 (sequence is synthesized)
aggtttgccctaaccagttcccatcttgacctttccctttggcttagtgacttggggagtcccaagatttattttcctttcacactgggctgccctgtcttactcagaaccagcctgcct

SEQ ID NO: 912026 - DNA, 120 bp, Artificial Sequence
  ENSG00000286183_18 (sequence is synthesized)
ccacccccaacccagcacacctgtgtcctctcctcttctggccagagggtatggtgggaatgtgaaccctggcccaggtcaggcccaaccaggccctggtggcctctgcagggacaggct

SEQ ID NO: 912027 - DNA, 120 bp, Artificial Sequence
  ENSG00000286183_19 (sequence is synthesized)
ccctgtacagggaactggggaatgctggcccggcagacaagcccatctgtactgtgcacttttatggggcgttgagggagctagctctgagtgaagctctcccaggccccagccatccct

SEQ ID NO: 912028 - DNA, 120 bp, Artificial Sequence
  ENSG00000286183_20 (sequence is synthesized)
accacctgtcccaccacacccgagctgcccacattcccaagccctgagcctccaccctggacttggccttgactggtgaataaatcgcaggctgtgcagtctgcctgaccaccataccct

SEQ ID NO: 912029 - DNA, 120 bp, Artificial Sequence
  ENSG00000254372_0 (sequence is synthesized)
gtacttataagagagtaaggcaggggcgccgtcctttctccgcgcctgagctcagagcgccaacctcctgagatccgccagctcagagccagctcaagtcccggcctcaatgtcaccttc

SEQ ID NO: 912030 - DNA, 120 bp, Artificial Sequence
  ENSG00000254372_1 (sequence is synthesized)
ctctggggttaaacagcctggatttggaatcatggatctgctgctcactagctgtgaccttgggcaagtttcttcacctcagggtcctcatccgtcaagtggagatgacaaccaaactta

SEQ ID NO: 912031 - DNA, 120 bp, Artificial Sequence
  ENSG00000286181_0 (sequence is synthesized)
gggggcgggatgatcgaggaatcaatggagaggccggaatgggggtggtgcgaaatccatgatgaagaaaacagaagcagacagctaatgcggaagtctgagcgagagaggcatgtgggc

SEQ ID NO: 912032 - DNA, 120 bp, Artificial Sequence
  ENSG00000286181_1 (sequence is synthesized)
ggtgggaaaagtggaatggctacaggcgatgagggcagccgggaacgaacgcagaggcccaaaaagtgggagatcccgcgggttgcgtaggcggtggaacggtagctagagagagagaac

SEQ ID NO: 912033 - DNA, 120 bp, Artificial Sequence
  ENSG00000286181_2 (sequence is synthesized)
agccaatggagagccacgcgtgggatgacgacaatggctgcagcgagccaatggggaggcttgtgagcgtgcactgcggcttcgaaggggtggtgccaaggtggagctagccaatacgaa

SEQ ID NO: 912034 - DNA, 120 bp, Artificial Sequence
  ENSG00000286181_3 (sequence is synthesized)
ggctaaaaggagaccaagaggcgggtgtgtagggagccgagccaatggaggtctgaagccagtcttgtagagggctggagtggttgttggacgactagaaccctgggctttgcagggtgc

SEQ ID NO: 912035 - DNA, 120 bp, Artificial Sequence
  ENSG00000286181_4 (sequence is synthesized)
caccatggcctgtcaggagaagcccctgggggctggtctaccatgctgaccagtggttgaatagagtgcctgctgaggtcaagagatgcagccgccaattcctggacaacctaaaagcct

SEQ ID NO: 912036 - DNA, 120 bp, Artificial Sequence
  ENSG00000286181_5 (sequence is synthesized)
cacaagcttcaagtctccaaggactctccaaatcccaggatctccctgccatcacatcctagaatttaaaacctgagaacatcaagttcaggaaagcttggggatttcaaagcccagcac

SEQ ID NO: 912037 - DNA, 120 bp, Artificial Sequence
  ENSG00000286181_6 (sequence is synthesized)
caaagaaagcgggacccacactcgccagctctgtgatcttgggcaagttgcttgactacttatacctccgtttccctcatctgtataacaggaatacaataatgatgagatggagctcaa

SEQ ID NO: 912038 - DNA, 120 bp, Artificial Sequence
  ENSG00000286181_7 (sequence is synthesized)
ggggccatggtgaggattgaacatgatcacttgtgagacatgttcagcactgtatctgacccatggaaaattcaagataaacatcagctactgagatgatggcggatatttggaatccta

SEQ ID NO: 912039 - DNA, 120 bp, Artificial Sequence
  ENSG00000286181_8 (sequence is synthesized)
aatccttggaaactggggctttttgaagtaaaagaccccaaaggctgagggcctcagaagcatcaggccatgatgttcctgaaacaagagggtcagggtcccaatgggcctctggggttc

SEQ ID NO: 912040 - DNA, 120 bp, Artificial Sequence
  ENSG00000286181_9 (sequence is synthesized)
ggatgggatctcctgctcctgttcctcccgctcctgcccacggcgggctgcgcgggacgtagcgcgctgggtggtcgcaaaaggaagcccagccgtcgtgtgaggcccgcacgtgcaccg

SEQ ID NO: 912041 - DNA, 120 bp, Artificial Sequence
  ENSG00000286181_10 (sequence is synthesized)
ccttctcgaaggagcggttcagcacgcgtaccaacccgcgcagcaccggcgggcggcccccaggcacccacaccccggcacccccggggaccgctccgggaggcggcagcagcgcctcca

SEQ ID NO: 912042 - DNA, 120 bp, Artificial Sequence
  ENSG00000286181_11 (sequence is synthesized)
gctccaccatgacgcgccccaagcgctccagacggcccggcgcgggcggcagcgaaaatgtggggaccagccaggccatcaggcccattctgggcttttccagaagggtctgaagccagt

SEQ ID NO: 912043 - DNA, 120 bp, Artificial Sequence
  ENSG00000286181_12 (sequence is synthesized)
cccagtgggacagtggctgggtcagggcactcaagccctaaaacgtgatgaggcgagacttttctctctttcctcattcagtaactgtcagtagattctgggagccagggattctccgac

SEQ ID NO: 912044 - DNA, 120 bp, Artificial Sequence
  ENSG00000286181_13 (sequence is synthesized)
tcttcaagtccatgaattttaggggatgacagtgggctctccgctttctcctccatgaagtaacttacatgcccctcaccctctgtgggaggggtgttgcagggggtgcagaactcccct

SEQ ID NO: 912045 - DNA, 120 bp, Artificial Sequence
  ENSG00000286181_14 (sequence is synthesized)
cgccgggtagttcaagcaatggggaccatatcaattccatctatagggaaactgaggcctggagtagggcgaggcctctgggaacccagccctattctgtctctttccctggcatttccc

SEQ ID NO: 912046 - DNA, 120 bp, Artificial Sequence
  ENSG00000286181_15 (sequence is synthesized)
atccacacatagagcttcagattctctttctttccccagagaccctcaaatatcctctcactcacagaatggtgtctctgcctgcctcgggttggccctgtgatttattttagttctttt

SEQ ID NO: 912047 - DNA, 120 bp, Artificial Sequence
  ENSG00000286181_16 (sequence is synthesized)
cccttgttttttttttttcaaactctatacacttttgttttaaaaactgtggtttctcatgagccctattatctcattgatacctctcacctctgtggtgaggggaagaaatcatatttt

SEQ ID NO: 912048 - DNA, 120 bp, Artificial Sequence
  ENSG00000286181_17 (sequence is synthesized)
cagatgactcgtaaagggcaaagaaaaaaacccaaaatttcaaaatttccgtttaagtctcataatcaagaaaaggagaaacacagagagagagaaaaaaaaaactatgagaacccctcc

SEQ ID NO: 912049 - DNA, 120 bp, Artificial Sequence
  ENSG00000286181_18 (sequence is synthesized)
aggtctgcggcttccacaccgtacagcgtggtttttcttctcggtataaaagcaaagttgtttttgatacgtgacagtttcccacaagccaggctgatccttttctgtcagtccacttca

SEQ ID NO: 912050 - DNA, 120 bp, Artificial Sequence
  ENSG00000286181_19 (sequence is synthesized)
ccaaggtgagtgtccctgctctcccctaccagatgtgggccccattggaggagatggcagggaggtaggcacggcgggggggtcaggggccctctggtacagtgggatgtacccagctac

SEQ ID NO: 912051 - DNA, 120 bp, Artificial Sequence
  ENSG00000286181_20 (sequence is synthesized)
cgtgattccagccaggtaaggtctttaaaaaaataatagaataaatggcagaagacttaaaggtgaagtacttaatgcatgggcaggggcaaaaataaatgaattcatcaattgatacgt

SEQ ID NO: 912052 - DNA, 120 bp, Artificial Sequence
  ENSG00000286181_21 (sequence is synthesized)
agatggataggatttttaaaatatgtcagctgccagtctttatggatttcagagctttgaacaacttgaaatgctgtccaggtgcaactgaaaatttcaactgcatctctctcatctctt

SEQ ID NO: 912053 - DNA, 120 bp, Artificial Sequence
  ENSG00000286181_22 (sequence is synthesized)
tgtctcttagctcttgatgcctctcatccttctctgtctctctgctcaccctgtcttgctcttttacatgtttctctgcctctctttctcccgccatctgtctgtcgctacactcagact

SEQ ID NO: 912054 - DNA, 120 bp, Artificial Sequence
  ENSG00000286181_23 (sequence is synthesized)
ctctttccccgcatctctcctggcctctgaccatctcccctatctctgtctcctccatcttgaccacactccatcgatctcctttcctccatctctcccgctctcttttcttgccttccc

SEQ ID NO: 912055 - DNA, 120 bp, Artificial Sequence
  ENSG00000286181_24 (sequence is synthesized)
ccacctgccttcccagccagcatccagcctagagctttgtacacagctggcgtttaataatagtaatgtcgccgaggacctttacattttatgagagtgagcatcagttctgttcaccct

SEQ ID NO: 912056 - DNA, 120 bp, Artificial Sequence
  ENSG00000286181_25 (sequence is synthesized)
agtagcaggaggattgcaaggtgccggggcaagctgagcacttaactgaactttgcttgtatcgctttagaggagacccttggggcgggggggcagggagcacttcacaccattgtcaac

SEQ ID NO: 912057 - DNA, 120 bp, Artificial Sequence
  ENSG00000286181_26 (sequence is synthesized)
cgtagtttagctgtgtggacctaccccaggactgcatgtgtgtgaccagagtccatattcaggaagcaaacaggttgttcagggctggggtgagctcgattctgcaggcttagcacagcg

SEQ ID NO: 912058 - DNA, 120 bp, Artificial Sequence
  ENSG00000286181_27 (sequence is synthesized)
tttggcacaaagtaagtgctcacgaagtgttagctattagtatttctgtaaccaaattagaatcatgctatatattggttttgttcctgctttattcaattaacagtagtgtttttgaag

SEQ ID NO: 912059 - DNA, 120 bp, Artificial Sequence
  ENSG00000286181_28 (sequence is synthesized)
cttactaaaaattgtttgaacacatgatctttcatgatggacaagactgtcctcacatcagcatgaactttgattgatttgaccaagtgccgattgttggacattccggttgtttctcgt

SEQ ID NO: 912060 - DNA, 120 bp, Artificial Sequence
  ENSG00000286181_29 (sequence is synthesized)
ttttttctataaacatccctgactgcttccttggattcctgaaaagggagttgctggggcaaagggggcgtgcatttttaaagtttatgaccctctctgctaattctccttccaaaaggt

SEQ ID NO: 912061 - DNA, 120 bp, Artificial Sequence
  ENSG00000286181_30 (sequence is synthesized)
tgtcctattttatgctccctctacttaagctaaccctaggtgagtattattatgttttaattatttcccaacatgacaggtaagaaaaacacattatcacattgttgaaatttgcatctt

SEQ ID NO: 912062 - DNA, 120 bp, Artificial Sequence
  ENSG00000286181_31 (sequence is synthesized)
gtgattacttttactattcattggccattcatgcttttttttttttttttttggttgtctggtcatgtccttactcctaatagggtgttcatcttatttttcccttattgatttgccaca

SEQ ID NO: 912063 - DNA, 120 bp, Artificial Sequence
  ENSG00000286181_32 (sequence is synthesized)
gctctttatttggaatggttattaacctttcatcagccattacatatatagcaaatattttccccaattcatcatttgctttttttctatttgtttatggtgttttttgtgatgcttatg

SEQ ID NO: 912064 - DNA, 120 bp, Artificial Sequence
  ENSG00000286181_33 (sequence is synthesized)
atggttttatacagtcaaataggttagtctttttttctgtggcttctgtctctggttttgtgcttagaaagtcctttcctacttgaaaatgagataaatgttcacctatgttggcttcta

SEQ ID NO: 912065 - DNA, 120 bp, Artificial Sequence
  ENSG00000254370_0 (sequence is synthesized)
ctcaaactcctccttaaccggccaggtttacattttgatgtgaatctggacttctctccccttcgaagtcttgatcttcccatattcacattatatatactgtccattttgctcaatctg

SEQ ID NO: 912066 - DNA, 120 bp, Artificial Sequence
  ENSG00000254370_1 (sequence is synthesized)
tcttctactcaagtgatttctgcatgtatcttatctccccactaggcagtacttgattaagtgccagatgactagcagaggcaagacatgctctgagttagaaggagtcatcatgatttt

SEQ ID NO: 912067 - DNA, 120 bp, Artificial Sequence
  ENSG00000254370_2 (sequence is synthesized)
gtcttttaaggttggggaggtttctgcagtcaggaatagggggagagtaccagggacatggagtggtttatgcaaagcaaacaaataagaaagcaaaaatgaacagagattagacaactt

SEQ ID NO: 912068 - DNA, 120 bp, Artificial Sequence
  ENSG00000254370_3 (sequence is synthesized)
tgctatcaaggggagtagctgcgatctggctggaaaaactgtgaataagaggccaagtatttgttcgggagggcggtgttttctctaacttattcatgataaaattttgatatattgcat

SEQ ID NO: 912069 - DNA, 120 bp, Artificial Sequence
  ENSG00000286189_0 (sequence is synthesized)
ggtattggagagtttgttttgttttgggaagaggcatgtgtgtagctcgatgtattgtttctctttatacttaagtaagtaatatgtaataaagcttctttaaactttaaagagtaacag

SEQ ID NO: 912070 - DNA, 120 bp, Artificial Sequence
  ENSG00000286189_1 (sequence is synthesized)
gctcacaggaggaaacagaatagtatcacgttttgcccttgttcatcataattatcagcattataatagagatgggggattgaagacttttgttattaataaattctatttctacttaaa

SEQ ID NO: 912071 - DNA, 120 bp, Artificial Sequence
  ENSG00000286189_2 (sequence is synthesized)
atttacaatgtttttacaagataaatacacttcacccttgaacaacacaggtttgaaatatgcaaatccacttctatgtagattttctgccaccttggccacccccctgagacatcaaga

SEQ ID NO: 912072 - DNA, 120 bp, Artificial Sequence
  ENSG00000286189_3 (sequence is synthesized)
acaactctttctcttcctccccttctcagcttattcaacctgaagatgatgaggatgaaaacctttatgatgatccttctccacttaatgaataataaatatattttctcttcttcatga

SEQ ID NO: 912073 - DNA, 120 bp, Artificial Sequence
  ENSG00000286188_0 (sequence is synthesized)
agtggcagtggcagtgcctggctagtgtctgggcctcctgagctccacagaagcctgatgcagagagacccctgatcctcaaccaactcccactgcccagtctctgatttgctcagaaac

SEQ ID NO: 912074 - DNA, 120 bp, Artificial Sequence
  ENSG00000286188_1 (sequence is synthesized)
ttgcagagtcagcagctatcagccaccaagttgtaattaactcttcctggagtcatgaaaaactgccgtttccttgttggcttttaggtccagtgtaaacagcccttccagagccttagt

SEQ ID NO: 912075 - DNA, 120 bp, Artificial Sequence
  ENSG00000286188_2 (sequence is synthesized)
ccaagtcttggaaaccctagagagaagcaatggggaccctcggggagcagagggttccttcgtgatgatcctccactgcctcaggttatcaaacaaatccccatccaggttattttcatc

SEQ ID NO: 912076 - DNA, 120 bp, Artificial Sequence
  ENSG00000286188_3 (sequence is synthesized)
tgccggctcctgtagcctgggtagtgagacccccaggtgcacttcgggagatcttcctgcagggtctagagggaggacctctcattcagcaagaagaaagcagagggagatttgagaata

SEQ ID NO: 912077 - DNA, 120 bp, Artificial Sequence
  ENSG00000286188_4 (sequence is synthesized)
gctcggagtcgtgtgggctcagattctcccctagaggcctgcggggagcatggccttgccagatttccagcttccagcctgcaggatgctgagacagtaaatcctcaccgttttaagcca

SEQ ID NO: 912078 - DNA, 120 bp, Artificial Sequence
  ENSG00000286188_5 (sequence is synthesized)
ccaagtttgtggtgatctgttacagcagcttcagtaaacacatacaacctgcataactgggtgcctgaacccttggtaaagaaagtacacagagggattcatgagtgcttggccaactcc

SEQ ID NO: 912079 - DNA, 120 bp, Artificial Sequence
  ENSG00000286188_6 (sequence is synthesized)
aaggtcctgggaggacatgaaccagtgactttgaatgtgatgctgagcccagcagggagccagtatgactctccccaaatcacaagtgagactcagaggccccactgggctcccacatgg

SEQ ID NO: 912080 - DNA, 120 bp, Artificial Sequence
  ENSG00000286188_7 (sequence is synthesized)
actcaggccaccgtctttgcttagaggacgcagcagaaagacttggctcattttccaggggcagacttggagagttctggcaggtccatacatttcaactccctcctcccaccacagcag

SEQ ID NO: 912081 - DNA, 120 bp, Artificial Sequence
  ENSG00000286188_8 (sequence is synthesized)
gcctgctcttttatgtatccaatgggaatatttttcattatcttccctctcaatttaattaatccacattccgtaatgaaccttgaaatttcattaaacacatcattactaatcagcaca

SEQ ID NO: 912082 - DNA, 120 bp, Artificial Sequence
  ENSG00000286188_9 (sequence is synthesized)
cggaaacttcagagctgtcagacactgctgcgcctcctcctgctgctgcctggctgctgagattggtgcatctggatgaatctgatgtgtatgttttcattcctttccttccagaaccct

SEQ ID NO: 912083 - DNA, 120 bp, Artificial Sequence
  ENSG00000227392_0 (sequence is synthesized)
gctcgtaattgctgcggggaggacaggccagctctggaagaaaacaggtggacctgggtcccattaacctggacagacacctccaagatgagcatgagggggctgctggatctgttctcc

SEQ ID NO: 912084 - DNA, 120 bp, Artificial Sequence
  ENSG00000227392_1 (sequence is synthesized)
tttcacagctgtatcctgaagaatggcagtgagccggaagagccacaggattcggcaaagacggacacacaggcaacacaaaaaggatgttctgggtcacctggtgtgcctgccaagttg

SEQ ID NO: 912085 - DNA, 120 bp, Artificial Sequence
  ENSG00000227392_2 (sequence is synthesized)
ttggatatatttagaagtgtgaaaatcccaggaaaaaaaaagcgagggtgagaggaagaacctccttccatgctgtgtggttcagaggacttcagcgcctccagtgggacaggaagcatc

SEQ ID NO: 912086 - DNA, 120 bp, Artificial Sequence
  ENSG00000227392_3 (sequence is synthesized)
tgcatcctggggttcccccagtatgagaggcatcctccctgcatgtctctactgggacaggcagcatcctcatctggcccacggtgtgggacgcatcctcatcctccctgcgtgtctcta

SEQ ID NO: 912087 - DNA, 120 bp, Artificial Sequence
  ENSG00000227392_4 (sequence is synthesized)
ctgggacaggcagcatcctcatctggcccagggtgtgggacgcatcctcatcctccctgcgtgtctctactgggacaggcggcacgtcaacatcaattctttgatcccagcagcagggct

SEQ ID NO: 912088 - DNA, 120 bp, Artificial Sequence
  ENSG00000227392_5 (sequence is synthesized)
atttcccttggtcagttcttccgcctccaccatttggctgcaaagacccccacgcgtaacacctttggctctctggctctgaaaatccactcaactggtggctccgtgtctcgggcctca

SEQ ID NO: 912089 - DNA, 120 bp, Artificial Sequence
  ENSG00000227392_6 (sequence is synthesized)
tcttacatgactgcagcttcctgtataaatgctctcctctttggacttctgggacaccaggcgcacctgattttccttcccgcctctgaggctgctgtcttcacccaccctctacctact

SEQ ID NO: 912090 - DNA, 120 bp, Artificial Sequence
  ENSG00000227392_7 (sequence is synthesized)
ccgtaaaatccagagtttgtagggctggccgcagcctccccctgctcctccttgcccctaagtctgtctcacccacctctgtggactcagtttcccctctgtccccagccctagaccctc

SEQ ID NO: 912091 - DNA, 120 bp, Artificial Sequence
  ENSG00000227392_8 (sequence is synthesized)
ttccaggtcccaggtcagggctcctgcagtcctttaaataccttttaaatacctttccctgggacctcctagtccctttgcccctaccaggtcccagaatgtctccccaatgtctcccca

SEQ ID NO: 912092 - DNA, 120 bp, Artificial Sequence
  ENSG00000227392_9 (sequence is synthesized)
agtatattcttcctcccggtcctgtctcagaggccctcactcctaggaccatccccatctgcataacattcccctcccccgacagcctgccaatcctcctgagtgactctccttcccccg

SEQ ID NO: 912093 - DNA, 120 bp, Artificial Sequence
  ENSG00000227392_10 (sequence is synthesized)
tttccttctttctctccatctgcaccttgctccggccccatccaaccgctgggctcagtctcccttctagcgcaccctccacacggaggcttggggaacctactgagacaccaaatccaa

SEQ ID NO: 912094 - DNA, 120 bp, Artificial Sequence
  ENSG00000227392_11 (sequence is synthesized)
cctgtcccctctttacctatagaaccctctgtgactccctagtaccccccagacagcttaagtccctcagcctggcatttccagccccactagggtataagcatggctttcagagatttg

SEQ ID NO: 912095 - DNA, 120 bp, Artificial Sequence
  ENSG00000227392_12 (sequence is synthesized)
ggagtatgtttcccccaattctcagacaaccatgtgggtcactatcaggtaccagagagagcttccaaaaagcaacccaaacagtagaacttgtaaaatacaagttagacaagagaagca

SEQ ID NO: 912096 - DNA, 120 bp, Artificial Sequence
  ENSG00000227392_13 (sequence is synthesized)
gcacacctcttctcccacccagctcaacttccagcttcacctccagaaataccacaattggctacgtgcacaccagtgctgtgtcacctcccagcttcccagagaagagcaagagccttg

SEQ ID NO: 912097 - DNA, 120 bp, Artificial Sequence
  ENSG00000227392_14 (sequence is synthesized)
ctcttccctctgcctggcatccttggaattgcaactccagtatcacctcctccaattccaagtttccaggcagcaccaagaagccagcagcaataacagtgacaccaacaacagcagccg

SEQ ID NO: 912098 - DNA, 120 bp, Artificial Sequence
  ENSG00000227392_15 (sequence is synthesized)
ctgcagccacaacggctctctgaatcacacacggacgcaccgccctaccctaaccccgtccagtcctgcacagcatccttacttaaatccttgcagctgttcacgaggaaggcgccattg

SEQ ID NO: 912099 - DNA, 120 bp, Artificial Sequence
  ENSG00000227392_16 (sequence is synthesized)
ccatcacccccagtttacagatgagaaaaggaggcccaaagtccggcagccaccaaacccgggtcacccggcaagtaagtgcagaatcggaacccttcagcatctgtgtccaggttcgac

SEQ ID NO: 912100 - DNA, 120 bp, Artificial Sequence
  ENSG00000227392_17 (sequence is synthesized)
ctccacacccctagccctgacagcaggactcccctccaagaccagcccggagctgccagggaggcaccagagcccactttgtgtctgtttctctttgtacccaggccatctctgtccatt

SEQ ID NO: 912101 - DNA, 120 bp, Artificial Sequence
  ENSG00000227392_18 (sequence is synthesized)
cgggcattttctgcttttcttccctggctcattcacccatgggcccaagccctggggctgtccttccggcagctccaggaaagagattgtccccaaggagctggattctgtcatccacct

SEQ ID NO: 912102 - DNA, 120 bp, Artificial Sequence
  ENSG00000227392_19 (sequence is synthesized)
gctcggctagggtgcaatgccttctcctgagtaactgggagcctgggttccctctggactgcagctgattggtttggggtctgaattgccagctgtgccgagacccgaggaggccagaga

SEQ ID NO: 912103 - DNA, 120 bp, Artificial Sequence
  ENSG00000227392_20 (sequence is synthesized)
tctgaactaatcatttcagccaacacgctcagtgcttcctgcccatcctggcatttcaggcctcgccccacgctgttggacatgcactgtcaccctctccatttcacagatgagagaatg

SEQ ID NO: 912104 - DNA, 120 bp, Artificial Sequence
  ENSG00000227392_21 (sequence is synthesized)
gaggcccagggagaacacgccgtctgcccagggccacacagctagaaagtgctactgcccaggactgagcccggctatcctggttgcggaagaagagagggagtcagccccagctagggg

SEQ ID NO: 912105 - DNA, 120 bp, Artificial Sequence
  ENSG00000227392_22 (sequence is synthesized)
aaggcagaaagaacaggacgcccctccatgcgcccctccagctgggtcccatgtgtgagaggtagaaaggaagccaggctagctgggggctgcccagagactcccaagggccagcaactc

SEQ ID NO: 912106 - DNA, 120 bp, Artificial Sequence
  ENSG00000227392_23 (sequence is synthesized)
catgacgcagtctctctctctcatccttatggtggtttctctgccgtctctcccctctccatccatccaggcccagtccaaagtcctccctctgctcttttgcccacagagccaggaggt

SEQ ID NO: 912107 - DNA, 120 bp, Artificial Sequence
  ENSG00000227392_24 (sequence is synthesized)
ggaggaatgtctgggatcggtgggggtcctgggtctctgggactccgagtttgccaacctctgtcatgacagctctgcttgatggcatgcgtcttatatgcagagccccagaccagtgcc

SEQ ID NO: 912108 - DNA, 120 bp, Artificial Sequence
  ENSG00000227392_25 (sequence is synthesized)
tggtgtgtgtcatgcactcagcaacctcacagagggaggactggtatccatgcttgacccagagggagaccaaagccctaagaataatgtcacttgcaccagatcacacagcaaaaaaga

SEQ ID NO: 912109 - DNA, 120 bp, Artificial Sequence
  ENSG00000227392_26 (sequence is synthesized)
acaagagctaggacaggaggagccgcagagctcgtaattgctgcggggaggacaggccagctctggaagaaaacagacagggtcttgctctgttgcccaggccaagtgcaatggcatgat

SEQ ID NO: 912110 - DNA, 120 bp, Artificial Sequence
  ENSG00000227392_27 (sequence is synthesized)
ctcagctcactgcagcctcccgattgttccgatgaaacttttaaccacgtggtttgttatgcatgtcacacccacaggccacttcaaacttgcagcacacagtgagcaactcggacaata

SEQ ID NO: 912111 - DNA, 120 bp, Artificial Sequence
  ENSG00000227392_28 (sequence is synthesized)
gtgagccggaagagccacaggattcggcaaagacggacacacagctgagtccggctaccctggcgttggagcgcgaggagcacagcagccgccacgtcccttccgtcttgtcaaagacca

SEQ ID NO: 912112 - DNA, 120 bp, Artificial Sequence
  ENSG00000227392_29 (sequence is synthesized)
ggcccggggccgcctgggtcccacagccaggctccccacatgcttccccagccggagcccctcctggcctgtgctccagccatgtggtgtagacgtgaaccccagcccatcggagggttg

SEQ ID NO: 912113 - DNA, 120 bp, Artificial Sequence
  ENSG00000227392_30 (sequence is synthesized)
tggtgtagacgtgaaccccagcccatcggagggttgcagcccccacatctgcgattgcatctggaatcatgactcaaggactttttttttttaaagacagggtctcgctctgttgcccag

SEQ ID NO: 912114 - DNA, 120 bp, Artificial Sequence
  ENSG00000227392_31 (sequence is synthesized)
cactgtagccttgacctcccagactcaagaaatcctcctacctcaacctcctgagtagctaggaccacaggcgtgcaccaccacacctgactaatttttttgtttgtttgttttgttttg

SEQ ID NO: 912115 - DNA, 120 bp, Artificial Sequence
  ENSG00000227392_32 (sequence is synthesized)
cttgaactcctaggctcaagcaatcttcctgcctctgcctcctaaaatgctgggattacaggtgggattacagagcaccatggcactctgccagactcaaggactcaggtcggaccaatc

SEQ ID NO: 912116 - DNA, 120 bp, Artificial Sequence
  ENSG00000227392_33 (sequence is synthesized)
actctgccagactcaaggactcaggtcggaccaatcaacagcagccttgaggctgtggccggcccctccgcgaaccaggggaacttcactctccattagaagtcctaagttggctgctca

SEQ ID NO: 912117 - DNA, 120 bp, Artificial Sequence
  ENSG00000227392_34 (sequence is synthesized)
gctgcaggtctggaaggtgacttggacattcgggaagaaaaaaaaccatttaaccaagttcccaagagaatccagcacttgaggctggatctgttaagggtcatgttcaccctcttgagg

SEQ ID NO: 912118 - DNA, 120 bp, Artificial Sequence
  ENSG00000227392_35 (sequence is synthesized)
gaaaaagtgagctaacgtggaggagagtcaagagatttctgataacattttattttattattgtattttttgtggagaaaccgaagctctttattagtatgtttgtcatttgtctttttc

SEQ ID NO: 912119 - DNA, 120 bp, Artificial Sequence
  ENSG00000227392_36 (sequence is synthesized)
catttgtctttggtcacacccttaactcatataaaaagacctctcactttatacgtacacagacagcatatggaaaatagaagaacaaatttgttgccagtttgtagatcatagcctggt

SEQ ID NO: 912120 - DNA, 120 bp, Artificial Sequence
  ENSG00000227392_37 (sequence is synthesized)
acaaatttgttgccagtttgtagatcatagcctggtttcttcatatgaacttttccatagctatatggagtagtattattattacataatataatattaatatattgttataatataata

SEQ ID NO: 912121 - DNA, 120 bp, Artificial Sequence
  ENSG00000251471_0 (sequence is synthesized)
agttgctaacattcaggccaggtgttgaccaggaagtgaagcgagattattaagagtacacttacacacagcaagctgcatcacaagtgcctcagaatgcttgaaaatgaggtcctatct

SEQ ID NO: 912122 - DNA, 120 bp, Artificial Sequence
  ENSG00000251471_1 (sequence is synthesized)
ggcacagctgcccagggtttgccttacctgttcacatctgtgggttctctgtgatcaagaactgcctgccctgggaaatccatttgttttcctccactcagtgccaaatgccttcgtctt

SEQ ID NO: 912123 - DNA, 120 bp, Artificial Sequence
  ENSG00000251471_2 (sequence is synthesized)
gagaagagagggaaaaatagacagaaacacaccaaggagaagacaatgtgaagacagaggcagatattggagtgatgcatctacaggccaaggaatgccaagaattgccagcagccacca

SEQ ID NO: 912124 - DNA, 120 bp, Artificial Sequence
  ENSG00000251471_3 (sequence is synthesized)
aggccaaggaatgccaagaattgccagcagccaccagaagccaggagataacagattctctgttcgagcctccagaaggatccaatgcagctgacaccttgatttcagacttctggcctc

SEQ ID NO: 912125 - DNA, 120 bp, Artificial Sequence
  ENSG00000231401_0 (sequence is synthesized)
atactcagagagaagctgcaatgtgggcaaccgccacactcattttactcagcattcctggagggcaagagggcaattcctaagggcctgtctatggcggtgcagctaatgggaaaacag

SEQ ID NO: 912126 - DNA, 120 bp, Artificial Sequence
  ENSG00000231401_1 (sequence is synthesized)
tccataacagcaatcccatgcatggtctccagaggtacatctcagttcccttttcaatacccaaagctccacattttctgtactggctacactctcagacagtctctcctctcctggaag

SEQ ID NO: 912127 - DNA, 120 bp, Artificial Sequence
  ENSG00000231401_2 (sequence is synthesized)
caggatgactgcagcatctccagcataaattgttcttggttcaagtttaactgcagaagaaaaaagcaccacttcctgaaagtcccaaataaaccctggaattcattttgttagaaaaaa

SEQ ID NO: 912128 - DNA, 120 bp, Artificial Sequence
  ENSG00000231401_3 (sequence is synthesized)
caggccccactcggagaggcattgtggaactttctggttaacaaagttaaaaccaaaacaaagtaaatgacgaatccaccacctcaatctgcattgtattttttgtttttaaagaaaatg

SEQ ID NO: 912129 - DNA, 120 bp, Artificial Sequence
  ENSG00000231401_4 (sequence is synthesized)
gtaaaacttttgctgctgcttttagtgactgagattttcaagagtggattgaagaaattattatcagtctgtttggcagctaagaaacctgctttgagatgggtagttgcttattaataa

SEQ ID NO: 912130 - DNA, 120 bp, Artificial Sequence
  ENSG00000231401_5 (sequence is synthesized)
tactgctttccacttcagcctcatctgtaaggcactgaactagctgctactgggtcttcaacctaccttcagacttctactgcatgaagtctttccacatctactgtgagatggatcact

SEQ ID NO: 912131 - DNA, 120 bp, Artificial Sequence
  ENSG00000231401_6 (sequence is synthesized)
tcttctccgttcccagcactttttgggtatctctcctatgtcataggagagacattacatctatgtaatagatgtaatgatgttgtacaaggctgagcaacctcagccttgctctaaaat

SEQ ID NO: 912132 - DNA, 120 bp, Artificial Sequence
  ENSG00000231401_7 (sequence is synthesized)
tatttacatcatagtttaccattctttgagggtggcactttgcatttcatagaataattgaacatttagagaattaattgaatgaatgcatggatgcagagttggatggaggaatggata

SEQ ID NO: 912133 - DNA, 120 bp, Artificial Sequence
  ENSG00000231401_8 (sequence is synthesized)
cttggaggtgcactggtgtccagtgagcatgtaatgcaggcagtactgctaacacctacataacatgccccgcatcaactagagcttcgctttacctccatatgaaaaaaaacttatttt

SEQ ID NO: 912134 - DNA, 120 bp, Artificial Sequence
  ENSG00000231401_9 (sequence is synthesized)
ccaaaaataatttttaaaatttaaaaatctgaaaaaagagaagaagaattgtgacttttacaatacttgacattagatggatagagactttgtcatctttctacagacctggataatggt

SEQ ID NO: 912135 - DNA, 120 bp, Artificial Sequence
  ENSG00000231401_10 (sequence is synthesized)
ttactgggtgatggtgttgtttaaaatattttttgctctgttttttgtcattttcctttgagtctaccttctattttccttcataatctagaggtaatatttgccatagcttcacatgta

SEQ ID NO: 912136 - DNA, 120 bp, Artificial Sequence
  ENSG00000231401_11 (sequence is synthesized)
aatctagaggtaatatttgccatagcttcacatgtagactgattaggagggaactacagggagagttttattttaaacttatgacttttttttccatcacatcttgagatagtcacataa

SEQ ID NO: 912137 - DNA, 120 bp, Artificial Sequence
  ENSG00000231401_12 (sequence is synthesized)
ataatagccaaaagctttttctttttctttacttcttttttttctttctttgtgttcatggctgttcttaatatttatgctagtggcttgtaaaaattaagtttattttgattttttctg

SEQ ID NO: 912138 - DNA, 120 bp, Artificial Sequence
  ENSG00000231401_13 (sequence is synthesized)
tatcttttttaatagaaaaaaaatgacagagtagttaaaatttacccctaaagctatggaaataaaaatgatctatcttccaagtcacctctataaatgttctttgaaattaaacggact

SEQ ID NO: 912139 - DNA, 120 bp, Artificial Sequence
  ENSG00000231401_14 (sequence is synthesized)
gtcttgaaaacaagattgccagtttcctattcactcatagatgtaatatcaattgtgtctcctattattgcctttctaagtctttcgtttgtacaaaaaccatgtttaaaacatatcatc

SEQ ID NO: 912140 - DNA, 120 bp, Artificial Sequence
  ENSG00000231401_15 (sequence is synthesized)
atccaatacagtgtctgtaagaaaaacaaaccatgattgatttggatagatatgaatgttaatatctttttctttgaatttctggcttgcatttttattaaaagtatgatattaaatata

SEQ ID NO: 912141 - DNA, 120 bp, Artificial Sequence
  ENSG00000231401_16 (sequence is synthesized)
tgatttttggcagaagaaggaatggatagaggattatttattcaacacacacataccggagagaactcatttttttcacttttataaaaaaagaaatttttatcatgaccactaatgaaa

SEQ ID NO: 912142 - DNA, 120 bp, Artificial Sequence
  ENSG00000231401_17 (sequence is synthesized)
aaatactatcagtcatcataaatagaagattcacattaatgcatgttaaaatgtatgtagttattacaattaaaatagttcaggttctgcctaaaataatctctagtaccacccatgtgg

SEQ ID NO: 912143 - DNA, 120 bp, Artificial Sequence
  ENSG00000231401_18 (sequence is synthesized)
ggttattttagtgagagaactagttttactcgctgccataacgcagcttaaaaaaaaaaaggtattaatctctattctattgtcatctaattttgaacataggcgttaagtccaaagtta

SEQ ID NO: 912144 - DNA, 120 bp, Artificial Sequence
  ENSG00000231401_19 (sequence is synthesized)
gattcatcaatcataacacaggaaatgttactgacatccattaagaactccgcagttgattagctcacttgattaaatagcggtgcagctaatgggaaaacaggagaggagcctgccact

SEQ ID NO: 912145 - DNA, 120 bp, Artificial Sequence
  ENSG00000257135_0 (sequence is synthesized)
ggccccggcccgcggcagctgaacggcagagcctgtagctgcacagctgtgcttccacctggcgttcagtacctcgtgcccgagagcggaaaagggaaatcgcgagcggaggaccgatgt

SEQ ID NO: 912146 - DNA, 120 bp, Artificial Sequence
  ENSG00000257135_1 (sequence is synthesized)
gctggccacgtgggccccgccgggccgactccggaccctgctgccgcccattcctccggtgcaagggacctggaagtgatcccggtgccgctctgctcccaccagctagggagcagaggc

SEQ ID NO: 912147 - DNA, 120 bp, Artificial Sequence
  ENSG00000257135_2 (sequence is synthesized)
gcgggagggaaggggcgtcccgggggtcgccagcacgctgcgggcagggctggcagccgcctccacgcccccgcgctggaagcctcgtctttgtaacatcgaggtatcctgtaactagat

SEQ ID NO: 912148 - DNA, 120 bp, Artificial Sequence
  ENSG00000257135_3 (sequence is synthesized)
gggtcctggcctgcggaggtagtttcccctgtgaagccagggactcagccaggagcgtgaggggacccggatcctgagtctccaagccgcccactaccctctgctttaccggatggaact

SEQ ID NO: 912149 - DNA, 120 bp, Artificial Sequence
  ENSG00000257135_4 (sequence is synthesized)
catcagtaactaggtatctttaagggcggctccctggcgcgctctgagagttacggaagtcccaaaatgctttgaccgaaaacgtctaaacagtgaatacataaagcaaaaagccgcgtg

SEQ ID NO: 912150 - DNA, 120 bp, Artificial Sequence
  ENSG00000257135_5 (sequence is synthesized)
ggaaattcgagtccctaggagcgcccaggggacgcctctggaggtggactgccactcactccaggccacgctggaatgcccgcaccagggaggcactgcacttgaattggggacactttt

SEQ ID NO: 912151 - DNA, 120 bp, Artificial Sequence
  ENSG00000257135_6 (sequence is synthesized)
ttttttttttttcatttttacctttcattcccttttggacaatccagacaggatatgtctctccctagggtggggatttcgactccttagggtgggagtacagccgatgaagagttaagg

SEQ ID NO: 912152 - DNA, 120 bp, Artificial Sequence
  ENSG00000257135_7 (sequence is synthesized)
agaggagtgggtagatctagatctagccttgggtgggtgggggcggggttggaggagctcagagcactggcccagcgctgcccccaacttgctgtgtgctcttggacaagttatctccct

SEQ ID NO: 912153 - DNA, 120 bp, Artificial Sequence
  ENSG00000257135_8 (sequence is synthesized)
tctctgggcttcagataacccaaggatccttacatatctttatagctacaaagccctgtgaggttttgaaaaacttccttggtacccaaaaccaggtctgaggcacagtcagtgaatacc

SEQ ID NO: 912154 - DNA, 120 bp, Artificial Sequence
  ENSG00000257135_9 (sequence is synthesized)
tgtttaatgaatgcatgcataaatgaatgaatggatgatccagctcttcctggagcaggcacgacttccacagaaacagagcaaacgctagccgtaagcagaagtgagtcttcttcctat

SEQ ID NO: 912155 - DNA, 120 bp, Artificial Sequence
  ENSG00000257135_10 (sequence is synthesized)
gtgaagggatgtgggggtggtacgcccctatcaactttatctttacatagtccttgagcgcccaccgggcaccgtgttccccggactagagggagggagaggggggttagctccaccctt

SEQ ID NO: 912156 - DNA, 120 bp, Artificial Sequence
  ENSG00000257135_11 (sequence is synthesized)
aacaagcttaattcttgatgagattaaccatcaaaacccatcagagaacgttatagctccagcgctgaatgagacatctttgattctgtggtgatgcggactttgtgcctctctgtgagg

SEQ ID NO: 912157 - DNA, 120 bp, Artificial Sequence
  ENSG00000257135_12 (sequence is synthesized)
aatcactttgttccaatgacgcaattttcctcacactccggaagtgtcctgcactgccagaatcgcccagcttcccggcacacctatcaaccagtcgttcccagcactgcccagtatgca

SEQ ID NO: 912158 - DNA, 120 bp, Artificial Sequence
  ENSG00000257135_13 (sequence is synthesized)
gcctccaggcagagggcctggatgtcttggcaggtgtttccgaaaaatccaatccaccctccaaggtggaaagtgtgccatctctgcccataatccaaatggcgtgcctgaggcatagaa

SEQ ID NO: 912159 - DNA, 120 bp, Artificial Sequence
  ENSG00000257135_14 (sequence is synthesized)
agcagctttcagggaggccttccttcctctgagcaatggtggcatcatcagaaaagtggagctcctccaaaaggatctgctggaagcagaggacgcccatgtcgcctggtgactccctct

SEQ ID NO: 912160 - DNA, 120 bp, Artificial Sequence
  ENSG00000257135_15 (sequence is synthesized)
gacccaacaagttgcagcacctctgctgggctttgccactgccccatttttgccagagcctcaccctggtggggccccacctctgggaagccccagcgcctgcaagattttttcctctcg

SEQ ID NO: 912161 - DNA, 120 bp, Artificial Sequence
  ENSG00000257135_16 (sequence is synthesized)
tgacagggagcagcatgcggagggcccttgcacaacctgggtcttcaggaagttccttgcccaggtgttggcccagctctcttcatggttccaagaaggctgccccaggaaggcttgtgg

SEQ ID NO: 912162 - DNA, 120 bp, Artificial Sequence
  ENSG00000257135_17 (sequence is synthesized)
aagaaaccagtttgaccagcatccttcccctcggctccccaggaggaatgcacggatcccttcgccttcccccatccctccatggttgactaaacccactaggatccactcttttgcgtg

SEQ ID NO: 912163 - DNA, 120 bp, Artificial Sequence
  ENSG00000257135_18 (sequence is synthesized)
gaaatgggttcaggcctcccacgaagagcatgaagatgccctctgttatgggttacattatgtcccctgcccccgagaccgtatgttgagtcctaaccctagtattgcagaacgtgaatt

SEQ ID NO: 912164 - DNA, 120 bp, Artificial Sequence
  ENSG00000257135_19 (sequence is synthesized)
tattaggagatagggtctttatggaggtcattaagttaaatgagggtgttagggtgggctggtgtcctgatataaaggggaaatttggggctgggtgtagtggctcacacatataatccc

SEQ ID NO: 912165 - DNA, 120 bp, Artificial Sequence
  ENSG00000257135_20 (sequence is synthesized)
agtgcctcgagaggccaaggcaggaggattgcttgagggcaggagttcaagaccagcttgggtaacatagggagaccggtatctataaaaaaaattaaaaacaaaaaaattagccgagtg

SEQ ID NO: 912166 - DNA, 120 bp, Artificial Sequence
  ENSG00000257135_21 (sequence is synthesized)
aggtgggaggatcgcttgagtccaggaatttgaggctgcagtgagccataaaaagatgggggacgatggagacgcacagggaaaacaccttgtgaatgcggcagagataagggtgatgcc

SEQ ID NO: 912167 - DNA, 120 bp, Artificial Sequence
  ENSG00000257135_22 (sequence is synthesized)
gaaaacaccttgtgaatgcggcagagataagggtgatgcctctacacaccgaggaacttcagagacaaccagtaagtcactgggagctcggggaaggcacagcgcagatgctcgctgccc

SEQ ID NO: 912168 - DNA, 120 bp, Artificial Sequence
  ENSG00000257135_23 (sequence is synthesized)
tcagagggaagccagcccgccaaccccttgatctcagacctctggcccctggaactgtgagatgatagatttctgtcgtttaagcacagtggtgctgtgttatagcagccctagggaacc

SEQ ID NO: 912169 - DNA, 120 bp, Artificial Sequence
  ENSG00000257135_24 (sequence is synthesized)
atccactatcagaacaaaagcagggctggactgctagaagaaaggagaggagaatggcagaggatacccaccttggggctgaatctgagatcactccagggctccccaggttgttttgaa

SEQ ID NO: 912170 - DNA, 120 bp, Artificial Sequence
  ENSG00000257135_25 (sequence is synthesized)
gaatggagatggatttgtgcagggctcactgtagaagctcagtgcagcatgcgacgcttataaggctgcaatccccagagctcagtccctgaagagcgctgcattcacagacatcagcca

SEQ ID NO: 912171 - DNA, 120 bp, Artificial Sequence
  ENSG00000257135_26 (sequence is synthesized)
gcagacaaaccagtacctattgtccctgacccccagaatccagcagacatataaaagatggttgttaaccccactaagttttggggtaatttgttatgcagccatgcaactgaaagaagc

SEQ ID NO: 912172 - DNA, 120 bp, Artificial Sequence
  ENSG00000257135_27 (sequence is synthesized)
agctacaatatttttataatgaaattcttagccaggaccctcatagcctagcaagaagttctgtctggaagagcccagctttggggttgggtatgtctgggttttaatatgtcaagaggg

SEQ ID NO: 912173 - DNA, 120 bp, Artificial Sequence
  ENSG00000257135_28 (sequence is synthesized)
caggccctggagacggagcacatggatttgaatcccagcctctcataggcaggttaattaatttccctgaatctcagtttcttcatctctcaatggagaaaataatagaagccacctcac

SEQ ID NO: 912174 - DNA, 120 bp, Artificial Sequence
  ENSG00000257135_29 (sequence is synthesized)
gggaattaaatgagattatttacgcacagcaccaaggctgtggctactgtatttgacccctgaaacagttaatttttcttgacatcccttccttggtatatgtattagtcagggttctct

SEQ ID NO: 912175 - DNA, 74 bp, Artificial Sequence
  ENSG00000257135_30 (sequence is synthesized)
ctctagagggacagaactaataggatatctctctctctatagatttattgcaataggtcgtctgcaggctgagg

SEQ ID NO: 912176 - DNA, 120 bp, Artificial Sequence
  ENSG00000257135_31 (sequence is synthesized)
agacacacccaggatcaatactgtcagttcaatcaagttgacactcagtatgaaccatcgcaatacaataggattactttctgtgataacctgtgtaaaaataggcagtcatgattttcc

SEQ ID NO: 912177 - DNA, 120 bp, Artificial Sequence
  ENSG00000257135_32 (sequence is synthesized)
tgttgtgttcttcaggtgtaaaacaaaaaattttaaaagaagaaacttcaattttaaagatattattcaaactaagttaaacattttgtgtataaattaaaacaataaattttgtttgca

SEQ ID NO: 912178 - DNA, 90 bp, Artificial Sequence
  ENSG00000257135_33 (sequence is synthesized)
aagcatccagcacaggagaaagatggaagctgggaggccaggcctgactctccgctggcagctgattaggtggtgcccaccagattaagg

SEQ ID NO: 912179 - DNA, 120 bp, Artificial Sequence
  ENSG00000257135_34 (sequence is synthesized)
gcccaccccaaagcccaaactcctgcccgcatgctgggaaggtgagcccttgcctggagagcccagcaggggaaatagaaggagggaaggaggcctgctccttccccggagctctgctct

SEQ ID NO: 912180 - DNA, 120 bp, Artificial Sequence
  ENSG00000257135_35 (sequence is synthesized)
gcggctgcaggaagacccgcagaggccctgggcagcagaactgtggacagcaaggctggagttgtgaaacccaaccactcagctggattccagaagctcaggtggtggtgactaaacctg

SEQ ID NO: 912181 - DNA, 120 bp, Artificial Sequence
  ENSG00000257135_36 (sequence is synthesized)
gccttacttaaaatgcatgactttattgtctttcaatgtattttcagtaaacttcatcctctccattactattttcttttcttcggaaacaagcaacagatctttgtaaaaaaaatacgt

SEQ ID NO: 912182 - DNA, 120 bp, Artificial Sequence
  ENSG00000258119_0 (sequence is synthesized)
atgaaacaaaataaaaattatcaagtcatatcaagcacacatgtggcagatacattttgtgatagatgaccatttttatataaaaacatacagctccatctagctctaagtgcttttgtc

SEQ ID NO: 912183 - DNA, 120 bp, Artificial Sequence
  ENSG00000258119_1 (sequence is synthesized)
ccatcacaaagccatcctgccttaaagtgaaaagtgcaattccctaagactctggtaacacccatgactgaacatcctgctaattttagcaaaataataaatatgaataagtcttgttta

SEQ ID NO: 912184 - DNA, 72 bp, Artificial Sequence
  ENSG00000258119_2 (sequence is synthesized)
gaaactacagagatcctgaacaaccctatgaggtggacgaagaaaatagcctcatgctcattttaaatctac

SEQ ID NO: 912185 - DNA, 120 bp, Artificial Sequence
  ENSG00000258119_3 (sequence is synthesized)
gtggacgaagaaaatagcctcatgctcattttaaatctacagtaacagagactccaagacgttaaggggtgaattcacgtggatgactagcaaaacaagagcaaaccaaaatgaaacaaa

SEQ ID NO: 912186 - DNA, 120 bp, Artificial Sequence
  ENSG00000258119_4 (sequence is synthesized)
aacgttagcttgcaagaaataaaaaccggaagctcttccctttcgatcgaaaccatgattaacaaacatttgtgaaatccaagttgttctcaaaagatcagaactggtatgattcagtga

SEQ ID NO: 912187 - DNA, 120 bp, Artificial Sequence
  ENSG00000257137_0 (sequence is synthesized)
aggctggacccagccagcctcaaggagggaagagagggacatcatggtggcgctggactccctgcagggctcagcggctccctcaggacaaggagaaagctgggaaccctaagacagaac

SEQ ID NO: 912188 - DNA, 120 bp, Artificial Sequence
  ENSG00000257137_1 (sequence is synthesized)
tggaggttctcgttgcctaaatctctcctggcttgctgcacatggaacccatttcttcccattcagggctctgcagaggcagaagatgaacagtaagatgcaaagatctggcaaccttca

SEQ ID NO: 912189 - DNA, 120 bp, Artificial Sequence
  ENSG00000257137_2 (sequence is synthesized)
gagctgggtccctggggcctctgcagaaccacccagaagccccaaattgtgacatcaccagttcaacagccttccccactcccatcacttcctgaaacagccagagcgagaagatgatgc

SEQ ID NO: 912190 - DNA, 120 bp, Artificial Sequence
  ENSG00000257137_3 (sequence is synthesized)
atgtgagccctgcccttgggaagcttccaggttgggaaatgaggaatgagcctgacacccagggcccagagagacccaggacagaggcaggtcaggaggcagacacgcgctgctgggtaa

SEQ ID NO: 912191 - DNA, 120 bp, Artificial Sequence
  ENSG00000257137_4 (sequence is synthesized)
tgacgacagcaccagtaatcacggctactccttgttaagtacttactaagtgcaagactccaagctaagcaattaatagaccttttcttgtttaatccttaccacaattccataggatgt

SEQ ID NO: 912192 - DNA, 120 bp, Artificial Sequence
  ENSG00000257137_5 (sequence is synthesized)
cacagtcatcactagttgcgagagtctccagtgttcattaagcctattttgctggaagtttagtccctggaggattagtccctgcccttaaggagtgccaaagaagactttggaatctaa

SEQ ID NO: 912193 - DNA, 120 bp, Artificial Sequence
  ENSG00000257137_6 (sequence is synthesized)
gtcacatctcccctgctgcaattttttcctcttgataatcaaggaatctcactgataaaactctcaatgaggagcagctctccccatgagcaagttcttgccttcattgccagggaggcc

SEQ ID NO: 912194 - DNA, 120 bp, Artificial Sequence
  ENSG00000257137_7 (sequence is synthesized)
ccagctaaggttatactgggaaaggaatctctggggagtacctggaagaggtcagcttctcctcaaaggaagcctctccagctggtgtactgcaaagccttccaagaccaagttccctct

SEQ ID NO: 912195 - DNA, 120 bp, Artificial Sequence
  ENSG00000257137_8 (sequence is synthesized)
tcctggcctctggaaccagcctgtgtgccagcgctgtgtccccagtaacacacatgagtctctccctcagaagccacagaaggatgcagagagagaccaacccaggattgattctcagca

SEQ ID NO: 912196 - DNA, 120 bp, Artificial Sequence
  ENSG00000257137_9 (sequence is synthesized)
cttactaattgtgtggacataactgctctggacctcagctttgctatctataaaatgagcaccctttttatagatatgaacactttaagagagtcataaagattgaagttgatttgtgct

SEQ ID NO: 912197 - DNA, 120 bp, Artificial Sequence
  ENSG00000257137_10 (sequence is synthesized)
ttaggggagaggaatcaggcaggttccagagtgaaggagggccaggataggccttgagaaatgggcaggttctgaaaggggagggcatgagaaaagtacagagatgacagcaaagagaga

SEQ ID NO: 912198 - DNA, 120 bp, Artificial Sequence
  ENSG00000257137_11 (sequence is synthesized)
gagagaggaagggacagggggttgtcaaaattagggagagaatgtggaatggtgaagagagctgtgactaggagtcaggagacccggctgtatcccctcaacttcctgtgtgatattggg

SEQ ID NO: 912199 - DNA, 120 bp, Artificial Sequence
  ENSG00000257137_12 (sequence is synthesized)
aaaaggcagaactggctggttggaggagccacctccctgcaaggggccaggagggagattacggaggcgccaagcccagagctccaacatgcacctgccacagctccaggggagatcggg

SEQ ID NO: 912200 - DNA, 120 bp, Artificial Sequence
  ENSG00000257137_13 (sequence is synthesized)
ggcctgccaatttaccccgccccatgatctcatggctgtgtgcgccaggcactggctcagggagcagcatctcacagagaagatacttggatgggccacaggccaaaactgggccaaaac

SEQ ID NO: 912201 - DNA, 120 bp, Artificial Sequence
  ENSG00000257137_14 (sequence is synthesized)
attggggtgccccaacaccccttgcccctgcccaccattagctttcacttaggcccacactgagggtgtggctgttgtgttgggggaaggaaaaaaaccatgcctgggttgcagggcccc

SEQ ID NO: 912202 - DNA, 120 bp, Artificial Sequence
  ENSG00000257139_0 (sequence is synthesized)
agctgagacactcatcttctcctgccctggcacatcaaaactccaggttctctgatctttgaacactgggacttaatccagcatccccttactgcctgaagttctcaggactttggactt

SEQ ID NO: 912203 - DNA, 120 bp, Artificial Sequence
  ENSG00000257139_1 (sequence is synthesized)
ggactgaacgatgctaccagcttccctggctttccagcttgtagatggcgtatcatggaatttctcagtctccaaagtaatgaacaagcaaccaagaaccacaaaaatcactggccactg

SEQ ID NO: 912204 - DNA, 120 bp, Artificial Sequence
  ENSG00000258115_0 (sequence is synthesized)
aattatgggtgtggttgatgcaagaaagatgaagcagagttccaaccaggggatccatactagaaatgaagacagtgggtctccatcaaaatattgatgagtgaatacaaatatacatgt

SEQ ID NO: 912205 - DNA, 86 bp, Artificial Sequence
  ENSG00000258115_1 (sequence is synthesized)
ctccatcaaaatattgatgagtgaatacaaatatacatgtttttaagagacggggtttcaccatgttaaccaggtttcagcctccc

SEQ ID NO: 912206 - DNA, 120 bp, Artificial Sequence
  ENSG00000258115_2 (sequence is synthesized)
atctcaggagacatcagttgtgtttctgtaacaacagcaccccaaacagtgcttgtacgggccatattgccaatctgtacctgcaaggaacaaggagtatattgtgtagctcatcaagag

SEQ ID NO: 912207 - DNA, 120 bp, Artificial Sequence
  ENSG00000258115_3 (sequence is synthesized)
gcatgtcagtgaagaccacatggggacatggaagcagtgacaagacccctctaccctctctcagcagtaagaggagcccctccccatcccaggtgtcaacagaggctgagtgggaacctg

SEQ ID NO: 912208 - DNA, 120 bp, Artificial Sequence
  ENSG00000258115_4 (sequence is synthesized)
gacttctacccccacctggtagtaacaagacaggctccacccctttctttgccagagtggtgttggaagaagccaataaaaacaaaaggtgtaaatgagactgagcgtctcataacgtga

SEQ ID NO: 912209 - DNA, 120 bp, Artificial Sequence
  ENSG00000258115_5 (sequence is synthesized)
tatccaaaatgtctagctttccatcgaagatcatatcaagagccaggaaaatctcaacttgaatggaaaaagacaatcaatagatcccaacatcaaaatgacagagatggcagaattatc

SEQ ID NO: 912210 - DNA, 120 bp, Artificial Sequence
  ENSG00000258114_0 (sequence is synthesized)
cttcttcctgggcagccactgcacacgtgagcctgagggtagctgtgttccagctttgcacagaaagcaggtttgggagaatgaagccagaggccaaggagagaatgcggaatcctggag

SEQ ID NO: 912211 - DNA, 120 bp, Artificial Sequence
  ENSG00000258114_1 (sequence is synthesized)
tgttgaaggcccttgttttgattcctcgcgtcctccagtccatcctcattttctggagaggcagcgtgacctaacgacgaaagcctccacaactggtttctgtcggtgtgagtcccaaat

SEQ ID NO: 912212 - DNA, 120 bp, Artificial Sequence
  ENSG00000258114_2 (sequence is synthesized)
catcactgagcaaagtcagtatcctcctataccttgctacttattctaagtgtgtttcatggaccagcaaaatggacctcatctaggagcttgttggaaatgcagaatctcagcccgact

SEQ ID NO: 912213 - DNA, 120 bp, Artificial Sequence
  ENSG00000258114_3 (sequence is synthesized)
tacggaatcagaatctacatgtcaacaagatccccaggggctgtgtgtgcacatcaaagtgtgagagttttctgccctagtgccactgctttaagaactacagcttggtcatctctagaa

SEQ ID NO: 912214 - DNA, 72 bp, Artificial Sequence
  ENSG00000245667_0 (sequence is synthesized)
ggaaaacaagttcatggctcccactgattctacattatggtgagatgtataattatttcattatatattata

SEQ ID NO: 912215 - DNA, 62 bp, Artificial Sequence
  ENSG00000245667_1 (sequence is synthesized)
ggaaaacaagttcatggctcccactgattctacattatggtgaggccgggtgcggtggctca

SEQ ID NO: 912216 - DNA, 120 bp, Artificial Sequence
  ENSG00000245667_2 (sequence is synthesized)
atgcccgtaatcccagctacttgggagggtggggagtactggtttcccttgccatgtctttagctagcagcacaaatccaggaaacctcatctacctggccaagaaaaccaggtttgatg

SEQ ID NO: 912217 - DNA, 120 bp, Artificial Sequence
  ENSG00000245667_3 (sequence is synthesized)
ccaggtttgatgcaggagcaggacagtttgatgtgtgttgggagaatgagtatataggaaaataatttctcgacttccttctcaaacacctccaatgtgacagcaataagaataaagtca

SEQ ID NO: 912218 - DNA, 120 bp, Artificial Sequence
  ENSG00000231238_0 (sequence is synthesized)
cccccgagtagctgggactacaggattatctcatttcttacaaaagttacccatggtgctgagaaaactagaaactggactttagatgatgcttggtccatttcttatacaaggaaatgc

SEQ ID NO: 912219 - DNA, 120 bp, Artificial Sequence
  ENSG00000231238_1 (sequence is synthesized)
agttactccgaggacaattcagcttacctagatgaggagaaattcgaagtattccaacgtctgcgctcatgaatagatcaagccttgggggaaaccagtgatctcttggcaacaggacca

SEQ ID NO: 912220 - DNA, 120 bp, Artificial Sequence
  ENSG00000231238_2 (sequence is synthesized)
gaaggtggcaagaagaaaagtttaagaatttcaagtggcttgattggactcttcttcatggtcgctgagtcaaggaccttctcttctagtgaatttaagggttttgtggaacactagtct

SEQ ID NO: 912221 - DNA, 120 bp, Artificial Sequence
  ENSG00000231238_3 (sequence is synthesized)
ttctttatgaactctgtcctcttttctcatacaatttatcttttccacatatggatggaataaaactgcagaaaatataatgaaatggataaccatatattttttaaaatagaaattttt

SEQ ID NO: 912222 - DNA, 120 bp, Artificial Sequence
  ENSG00000231238_4 (sequence is synthesized)
cttttggtctattatgaataatgctactatgaacattaatgtataagtatttgtgtgaacaaatagaacagacatggtcagttctcttgggtatattcctacaagtagaatttctgggtc

SEQ ID NO: 912223 - DNA, 120 bp, Artificial Sequence
  ENSG00000231238_5 (sequence is synthesized)
atatggcagctctatgtttcattttatgcagaatttctaaactgtttttcaaagaaactgttttacattctgagaagcaatgtatgagagttctaattcttttacatcctcagcaacact

SEQ ID NO: 912224 - DNA, 120 bp, Artificial Sequence
  ENSG00000231238_6 (sequence is synthesized)
tgttattatctgtcttttttattatagttattctggtatttgtgaagtttcatctcattatgattgtgatttgcatttccctaatggctaataacagtcagcatattttcatgtgcctat

SEQ ID NO: 912225 - DNA, 120 bp, Artificial Sequence
  ENSG00000231238_7 (sequence is synthesized)
tggccatttgtatatcttccttggcgtaaagtctttcaaattacttgctcattttttaattgagttatttgtcttttgatttttagttgcaacagttctttatatattatgcataagtcc

SEQ ID NO: 912226 - DNA, 120 bp, Artificial Sequence
  ENSG00000231238_8 (sequence is synthesized)
ttatcagacatacaatatgaaaatattttggttcctgctatacattggttttcccctttataagtggtgtattttgtagatcaaaagcctttaattttaatgaagtccaatttaacaata

SEQ ID NO: 912227 - DNA, 120 bp, Artificial Sequence
  ENSG00000231238_9 (sequence is synthesized)
attaaatatcttacagaaaacaaaggaaatcgtaacgtcttatttaccatcattaagagaaacctgaaggccaattacttattgagtggcaggcaactcaattacattattgtatagaat

SEQ ID NO: 912228 - DNA, 120 bp, Artificial Sequence
  ENSG00000231238_10 (sequence is synthesized)
cctcaggactgtattaaaaaattatgacaaggagtttacacaggtcagcctataaaactactgcataatttctatctgtaaattaaaatagaaaagaaataagattgaagtaaatatgat

SEQ ID NO: 912229 - DNA, 120 bp, Artificial Sequence
  ENSG00000231233_0 (sequence is synthesized)
gggcagatggagacacccaggagaaagaagagggcgaattggaagaggccacccagaaaggacggtgtgtgacactagggagccaagcatggagagccgaggactaacgcttggaaggaa

SEQ ID NO: 912230 - DNA, 120 bp, Artificial Sequence
  ENSG00000231233_1 (sequence is synthesized)
atgtggaccagaaggttccggatgagggaaggactggcggctacactctgccttccgagacaacgaggaataatctcacttcagtcagttcaacccttgtaaaacagctactgtgtgcaa

SEQ ID NO: 912231 - DNA, 120 bp, Artificial Sequence
  ENSG00000231233_2 (sequence is synthesized)
gacacggagggaaagctgaagtagagaaaccacagacgctgtcttcaaagggtttaatctaatattagtgatgagaaaaatagggtgcagagcttaaggcatcctggaaaaacgtatgta

SEQ ID NO: 912232 - DNA, 120 bp, Artificial Sequence
  ENSG00000231233_3 (sequence is synthesized)
cctccactctttctggacttcagatatctttgagaagcctggacatcaatctgctttagaagactagaaactctgcctttatgtctttaagggaacaatagtccttaactttgatactgt

SEQ ID NO: 912233 - DNA, 120 bp, Artificial Sequence
  ENSG00000231233_4 (sequence is synthesized)
ggctctttagctctttttttccctatattttttatatagttttttggtattatttagacctccttaaccccacggtcataaaggtattctcccatcatttttttctatccattagcttca

SEQ ID NO: 912234 - DNA, 120 bp, Artificial Sequence
  ENSG00000231233_5 (sequence is synthesized)
tagttttacttttttacattcagttatctaatccatctggagttctccttcccatatggtgtgagatagggatctaactatatttttctccatggggtgagcaaattttccaacaaccca

SEQ ID NO: 912235 - DNA, 120 bp, Artificial Sequence
  ENSG00000277283_0 (sequence is synthesized)
ggccgcgcccgggtcgcgcacgcgccctgacggagtcccagcaagcgcgggcccgtcttcctcgcgtctcctcggggagcgtcgtcgccgccaccctgggcgctgagagcttgcggagcc

SEQ ID NO: 912236 - DNA, 120 bp, Artificial Sequence
  ENSG00000277283_1 (sequence is synthesized)
gagccgctgtcgagtcccagcggaaagaagcccaaggtgccggagaagcccggtcgtggacgttgttgctccctcatcttcgagacccgcacgccctgcggagaggaaatgacaggcacg

SEQ ID NO: 912237 - DNA, 120 bp, Artificial Sequence
  ENSG00000277283_2 (sequence is synthesized)
ccgcgaccgtggggcggggctcgcacgagctccgggtttccagaggcaggggccggggccgtagaaggcagagtcgcgcggggaaggcccggtaccccgccccttccgcaccgacccctc

SEQ ID NO: 912238 - DNA, 120 bp, Artificial Sequence
  ENSG00000277283_3 (sequence is synthesized)
ccccgcggagctggccccggccccgggcctgtggagtggacgccgagggcggcgggcggcttccgagttggacagaacgggagctgccggcgggagcagagctgcgaggaggtggccttt

SEQ ID NO: 912239 - DNA, 120 bp, Artificial Sequence
  ENSG00000277283_4 (sequence is synthesized)
gagggcagcgcggggtcgaaatcccatcccagcgctgtgacctcttggagcccacattgcctctttggtggaggggagggagtggtccagctccgagccgagcctgggagctgaatgacc

SEQ ID NO: 912240 - DNA, 120 bp, Artificial Sequence
  ENSG00000277283_5 (sequence is synthesized)
cagtgtgcaaggcgcacctcggagaccgaaagcaaccgctcccccggcttcaatttcacaccacctgcagatacacgtctcagaatctgcggctaggaagacctgggccgccagaagcta

SEQ ID NO: 912241 - DNA, 120 bp, Artificial Sequence
  ENSG00000277283_6 (sequence is synthesized)
aacgtgtgcattttgtcatcagccccggtttctcgttttagagtgagttcccacctgccctacctaaactgacctgaaacggaaagttgtatgcccccacgaccatcctcactgcagaac

SEQ ID NO: 912242 - DNA, 120 bp, Artificial Sequence
  ENSG00000277283_7 (sequence is synthesized)
tgcagagggttttaagctccttattacctgtttcttataatcctgtccctttccaggcgagtatttatcggatagttctacttgttttatcaaacttccttttcttttgactttataaaa

SEQ ID NO: 912243 - DNA, 84 bp, Artificial Sequence
  ENSG00000277283_8 (sequence is synthesized)
aatgttcgtccttaaaattatgtgcagaagtttactgaaaagtacaagttactatttttccttctgaagcactcctcacaggta

SEQ ID NO: 912244 - DNA, 120 bp, Artificial Sequence
  ENSG00000277283_9 (sequence is synthesized)
caagttactatttttccttctgaagcactcctcacaggtaacccctgttagtttcacaggtaaccttaaaatgcttaacacatatttgttgaatgaataagtgccccccagtgaatttcc

SEQ ID NO: 912245 - DNA, 120 bp, Artificial Sequence
  ENSG00000277283_10 (sequence is synthesized)
tttgcctgtacaaacatatatgtacataccttgctttttctatttaacagtacacttttatcatttaacatctgcgtggtatggtactccatccgataaccatcggatgtactattattt

SEQ ID NO: 912246 - DNA, 120 bp, Artificial Sequence
  ENSG00000277283_11 (sequence is synthesized)
aaccactccgctattaatagacattcatgctgtttatattttttggttataataaacattgttgcaggcgggatcattgaacaacacatggagtgtctgactcaagccttgagttgtttt

SEQ ID NO: 912247 - DNA, 120 bp, Artificial Sequence
  ENSG00000277283_12 (sequence is synthesized)
tccgggagctgagaatcagtgtggtgatatcgaaataacatgagcttggaatctgaaggtactggctagggagaagagctgctcatgtgctcccgatagaaagtcccccttggtcgggaa

SEQ ID NO: 912248 - DNA, 120 bp, Artificial Sequence
  ENSG00000277283_13 (sequence is synthesized)
ggttagggccatcctctgactcagcagttttaggaaatagagggggagaaggaaggtatgtaccttccttccaccagggaggcacgcccagccctaaccagccagcgaggcagtaggtcc

SEQ ID NO: 912249 - DNA, 120 bp, Artificial Sequence
  ENSG00000277283_14 (sequence is synthesized)
tcctagctcatcttcacaacctgggctggtgtcgggaagactttcgttccaatgctagctttggaatcctggcctccatcccttaaaagctttgtgatcttaggtaagtcacatcacact

SEQ ID NO: 912250 - DNA, 120 bp, Artificial Sequence
  ENSG00000277283_15 (sequence is synthesized)
atctcaaagcccccgtttcctcacagaatggttgttttagagttatgtttgtaaattacctggcacatgtaggcatgtgacagactgtaaccaatgttactcaaggtcattttgcactga

SEQ ID NO: 912251 - DNA, 120 bp, Artificial Sequence
  ENSG00000277283_16 (sequence is synthesized)
ttcatactttgagccatttcctactgtagactctagcacacattttcaaggcagcttcctgataataaggctgtaggatatttttgggaaataaatccaaattggccattaaaaccagat

SEQ ID NO: 912252 - DNA, 120 bp, Artificial Sequence
  ENSG00000277287_0 (sequence is synthesized)
ctcctccaggaagcgcgccccgactgactagacggacctccgtgcattccccgggctacgccctcgcccgctgagacggcgctctccgagctcggctgctttgggttttcgctgcgagcc

SEQ ID NO: 912253 - DNA, 120 bp, Artificial Sequence
  ENSG00000277287_1 (sequence is synthesized)
tcgccaacttatctgccagcctcttcacgtcctcggccttctatgaggtcaaggtcatggttcgccccctttttccttccccaaatggcccttgcgccctgtcccctttcctggaccggc

SEQ ID NO: 912254 - DNA, 120 bp, Artificial Sequence
  ENSG00000277287_2 (sequence is synthesized)
tgcgacccgcccggggacgcgccttttcggggcgcttagtctcctgcgagtagggcgtgtgcgcgtgtgggtgcgcgtgctgcgatgcgatccggcaaatgcagctgacgaacccctggc

SEQ ID NO: 912255 - DNA, 120 bp, Artificial Sequence
  ENSG00000277287_3 (sequence is synthesized)
ctgatccacggtggctcccagtagaaggctctacagcccttggaaacggaacacgcagctccgtaaagcgctaaccaacctcccgacccctccggccgccatcgctttccggctcagccg

SEQ ID NO: 912256 - DNA, 120 bp, Artificial Sequence
  ENSG00000277287_4 (sequence is synthesized)
cgctgggacggagtcctcggccactgtgccctaaccatggtagaggaacggggacaggccggggcaagcccacctctgcgaaggaagggcttctggcgcgttggggaagcctcatgcata

SEQ ID NO: 912257 - DNA, 120 bp, Artificial Sequence
  ENSG00000277287_5 (sequence is synthesized)
gattgggtgagtaaggctggcccagttctcctcccggcaagataagaacgcattaggagggaagcgctggagtgctcctcttggcgacggatggcctggggctctgcgacagactgagta

SEQ ID NO: 912258 - DNA, 120 bp, Artificial Sequence
  ENSG00000277287_6 (sequence is synthesized)
ccccaccctcccccagcgcgactccaggaggccttgtggaagatcccaacaccatgacctgcaactgacttggggctggccacatagtattttagcaggggtgactctggagagacacca

SEQ ID NO: 912259 - DNA, 120 bp, Artificial Sequence
  ENSG00000277287_7 (sequence is synthesized)
ggtcatcctgcgcaccccttgggacctttcctagacgccctccagctagagctccagtccaggcactgactcccgggtggcgggtggaggctgaggaagagctgaaggacacaggcggat

SEQ ID NO: 912260 - DNA, 120 bp, Artificial Sequence
  ENSG00000277287_8 (sequence is synthesized)
gtcgcccccggagcatggctgcataggtggcatgcaggctggatccctgaaaagccaccttgccacccccagtctcccccatctgggaatgccttggcttctgcacctgctcccagcagc

SEQ ID NO: 912261 - DNA, 120 bp, Artificial Sequence
  ENSG00000277287_9 (sequence is synthesized)
tcccaaacacctggtccttccaacccacttgttccaggaaagcctctgggatggagggcgcttccccttaccacagtctcctcagcgctcctcaaaggacctaacccctcagcccactga

SEQ ID NO: 912262 - DNA, 120 bp, Artificial Sequence
  ENSG00000277287_10 (sequence is synthesized)
ggaaagaggagcccatgaccaagccgcccctagtcggctatgggccccctctgtccgctccctgaccgtctctcaaaggaactggcactgagcccttctctgctacacctgtgctctgcc

SEQ ID NO: 912263 - DNA, 120 bp, Artificial Sequence
  ENSG00000277287_11 (sequence is synthesized)
cctgcggttctgttccctcggccttcctggagggaacccctgaggcccacacgcctgctgcctccagactgaccgtttcagaggctgtttccttcagtcctcccacctgcctcctgtcct

SEQ ID NO: 912264 - DNA, 120 bp, Artificial Sequence
  ENSG00000277287_12 (sequence is synthesized)
gtgtagatcgtctgacgctgaaggcaaatactggtgccccagatctcctgtcctgtgccccactgggtccttacataggcaggcaggttgagggacccagacgcaggcacccactttccc

SEQ ID NO: 912265 - DNA, 120 bp, Artificial Sequence
  ENSG00000277287_13 (sequence is synthesized)
tctcattccctcccttggggtctcagactttactgggctgtggacttgaaactgtaaccgctgggttccacaaggcgcacttaacagttttctgctgtcctcccctgatgccacttatct

SEQ ID NO: 912266 - DNA, 120 bp, Artificial Sequence
  ENSG00000277287_14 (sequence is synthesized)
ttaacagttttctgctgtcctcccctgatgccacttatcttgcctgtggattgtagaatctggggtctgaagtaaatgtataacatctcatttttaggccgggcttggtggctcacacct

SEQ ID NO: 912267 - DNA, 120 bp, Artificial Sequence
  ENSG00000277287_15 (sequence is synthesized)
aaaccccgtctctactaaaattacaaaaacttagccaggcatggtggcatacgcctgtggtcccagccactcagcaggctggtgtgggagaattgtttgagccagggaggtcaaggctgc

SEQ ID NO: 912268 - DNA, 120 bp, Artificial Sequence
  ENSG00000277287_16 (sequence is synthesized)
gccagggaggtcaaggctgcagtgagccaagactgcatcactgcactccagccgtggtgacagagagaaaccctatctcaaaaaaaaaagggctcattttaaaaacaaaacattccccgg

SEQ ID NO: 912269 - DNA, 64 bp, Artificial Sequence
  ENSG00000277287_17 (sequence is synthesized)
agtccagagatggagatcatcctggcaaaccaacatgctaaaaccccctctctactaaaaatac

SEQ ID NO: 912270 - DNA, 74 bp, Artificial Sequence
  ENSG00000277287_18 (sequence is synthesized)
tgggcatagagttgcttgaacccggcaggtggaagttgcagtgatccgagatcgtgccactgcactccagccca

SEQ ID NO: 912271 - DNA, 74 bp, Artificial Sequence
  ENSG00000277287_19 (sequence is synthesized)
cccttaaagccccttgccctccgggtgctgccttatccctcagctacatttaagaggaagtttctccagagctc

SEQ ID NO: 912272 - DNA, 120 bp, Artificial Sequence
  ENSG00000277287_20 (sequence is synthesized)
atccctcagctacatttaagaggaagtttctccagagctccatgcccctcccgctatgtctcttcaaccgactcatacctgtcttttgtccccaccacaccactgaaactgctgagactc

SEQ ID NO: 912273 - DNA, 120 bp, Artificial Sequence
  ENSG00000277287_21 (sequence is synthesized)
aaacaaaacaaaacaaaaaacaaaaagtaaaccaggtgcggtggcacatacctataatcccagctactagggaggatgagatgggaggatcccttgagcccaggagtgttgagaccagct

SEQ ID NO: 912274 - DNA, 120 bp, Artificial Sequence
  ENSG00000277287_22 (sequence is synthesized)
gaccagcttgggcaacatagggagacccacccatctcaaaacaaacaaaaaacccaaaggaatgttaaaggcagatatctccatggaggcatttcaggcctatgacgccctcccgaagct

SEQ ID NO: 912275 - DNA, 120 bp, Artificial Sequence
  ENSG00000277287_23 (sequence is synthesized)
tcaggctttctggtctagcctaatgggcatcccagccagatactcccgactcccctctgcctccttcctctcaccctggatggccacatttcactgagtcattttatttctttgattttt

SEQ ID NO: 912276 - DNA, 120 bp, Artificial Sequence
  ENSG00000277287_24 (sequence is synthesized)
caggctggagtgcagtggcacaaacacggctcactgtagcctcgatctcctggcctcaggcgatcctcccacatcagctgggactacaggtgtgcaccactgtgcctggctaattttttt

SEQ ID NO: 912277 - DNA, 88 bp, Artificial Sequence
  ENSG00000277287_25 (sequence is synthesized)
tgagagaaatggggtctcactctgtctcacaggctggagtgcagcgatgcaatcttggcttactgcaacctccgtctcccaggttcaa

SEQ ID NO: 912278 - DNA, 83 bp, Artificial Sequence
  ENSG00000277287_26 (sequence is synthesized)
cattaagacaggggccactgctcactgcagcctcaacctcccaggttcccgcaatctgcgcacttcggcctcccaaattgcga

SEQ ID NO: 912279 - DNA, 120 bp, Artificial Sequence
  ENSG00000277287_27 (sequence is synthesized)
ggttcccgcaatctgcgcacttcggcctcccaaattgcgattacaggtgtgagccacggcactcagctgagtccttttatttctacctcgggtctgcagcatcctggctgccatagcctt

SEQ ID NO: 912280 - DNA, 120 bp, Artificial Sequence
  ENSG00000277287_28 (sequence is synthesized)
ccttggacccttggcaggcatggcttcccatacctcgcagccagccgctctctctgaagtcactgggattttaccagcctcttggggctcccgctgccttgaccggtgttctcagcctct

SEQ ID NO: 912281 - DNA, 120 bp, Artificial Sequence
  ENSG00000277287_29 (sequence is synthesized)
ggtagcccttctccagctgcagctgctccgcctcctcgctgttcctggggaggagaggtgctgttcccacgctctctctctatgattgaggacttgtcatctgtaatggttagttattta

SEQ ID NO: 912282 - DNA, 120 bp, Artificial Sequence
  ENSG00000277287_30 (sequence is synthesized)
tgggagccctatgtccagctctgaaccaggccaagtgactgggctcagctgcccactgaatcaactgcctgatactccctggtggtctaactggaccccaacaatcatgccagtctcctg

SEQ ID NO: 912283 - DNA, 120 bp, Artificial Sequence
  ENSG00000277287_31 (sequence is synthesized)
ggaccccaacaatcatgccagtctcctgttcccctccaaatatttttaatttttttagacagggtctttctctgtcacccaggctggattacagtggcgcaatcatagctcactgcagcc

SEQ ID NO: 912284 - DNA, 120 bp, Artificial Sequence
  ENSG00000277287_32 (sequence is synthesized)
cacttcagcctcccaagtaggtgagactacaagcaggtgtcatcacgcctggctaatttttttattttcaaaatttttggaaaagacggccttgctgtgttgcccaggctggtcctgaac

SEQ ID NO: 912285 - DNA, 120 bp, Artificial Sequence
  ENSG00000277287_33 (sequence is synthesized)
acctggcttcaagagatctcaatctttgtttagactgtcttcccccacgccataactcttcctgtcccgtcagcttttgctttctatccgtgggagcccagcatgagactggttgtcctg

SEQ ID NO: 912286 - DNA, 120 bp, Artificial Sequence
  ENSG00000277287_34 (sequence is synthesized)
gtaatgctgcagggtgctgggagggggaacatagcctccactggcctcctctctttcctggggggcatctcccggccccttgggtaggtggaaggacaaccctttggtgctcaacaaaca

SEQ ID NO: 912287 - DNA, 120 bp, Artificial Sequence
  ENSG00000277287_35 (sequence is synthesized)
cagcaataagccctctctcagttgccatctacccctactgagagaaagatccaggctactataacataagggcatccaggagggcaaggagcccctgccctgcagagggtcaacaaggac

SEQ ID NO: 912288 - DNA, 120 bp, Artificial Sequence
  ENSG00000277287_36 (sequence is synthesized)
ctgctaccctcaggatggcatctgtctgccccgcccctcagtccatactcacagtccaaagctagcatgggcaggagtgggctagggctcttggctcactgattctaagagctcatgaat

SEQ ID NO: 912289 - DNA, 120 bp, Artificial Sequence
  ENSG00000277287_37 (sequence is synthesized)
tccaggcatacagactgtcaaggtcttgtggcaggcatgcagcagaccactgggcaggaagattctggggctgccccactgccctcctgtcaggcctctctgccctccacagcccagcct

SEQ ID NO: 912290 - DNA, 120 bp, Artificial Sequence
  ENSG00000277287_38 (sequence is synthesized)
ctcacaaccaaacactggcttccttccccaccctcacctacccccaggccctactccatcaaaatcccatcacctgctacccaaggaagaattctacctggtgaccctaaggttctctgg

SEQ ID NO: 912291 - DNA, 120 bp, Artificial Sequence
  ENSG00000277287_39 (sequence is synthesized)
gtagactgtcacctcctggccatccttggccaatctgtgtccctcatgtcttcctcacccatggctctcctcgctggtccccatcctgctcaggggcctggatgtcaccattgggggctg

SEQ ID NO: 912292 - DNA, 120 bp, Artificial Sequence
  ENSG00000277287_40 (sequence is synthesized)
atgtggcctgagaccccatccaggtcaccctcctctccagccccaactcctcccaggaatttggaggcacagggaagagagaggtggtggggaggcccagggcaacaccctggagcaaga

SEQ ID NO: 912293 - DNA, 120 bp, Artificial Sequence
  ENSG00000277287_41 (sequence is synthesized)
cctccagcctctttagatctctgatcgttgttatctataaaacaaataagctggaatggagttttcgtagctagaaaattccatgaattttgtctcaaactgaaataatcttatcaaacc

SEQ ID NO: 912294 - DNA, 120 bp, Artificial Sequence
  ENSG00000260173_0 (sequence is synthesized)
tcgtgctggcagggctccttgccttcccggaatgtgttccttcttgtttgccactcagtgcctggcccaaagccaaacctgggctgctcggaatgccatgcccccactcacttctctctc

SEQ ID NO: 912295 - DNA, 120 bp, Artificial Sequence
  ENSG00000260173_1 (sequence is synthesized)
aaaggccaggctctcgctgcagcctcgtcccactgcgcaacttctctaggcacatcagactctccaccggctgaaagcagaagcacttagggagaggacagcagggtccccaggaaagca

SEQ ID NO: 912296 - DNA, 120 bp, Artificial Sequence
  ENSG00000260173_2 (sequence is synthesized)
gacgatcactgcttttcctccagaataagccaatgtggataagggagaccaaaggaaattaattatataccaataagaaaagtcttacgtaaaccctgtgtgtaataaatgttcaaataa

SEQ ID NO: 912297 - DNA, 120 bp, Artificial Sequence
  ENSG00000231585_0 (sequence is synthesized)
agacctcatagcctgcgggagatgggagtccgggacgcggacaggacgggcacttacctacgaatagccagagggagccccccgacacgaggaagaagcatgcagagcccaccaggactc

SEQ ID NO: 912298 - DNA, 120 bp, Artificial Sequence
  ENSG00000231585_1 (sequence is synthesized)
aaaccagagagcagaagtcaggaagcagagagtggaagagcatgagatctcttcaggcccaccagagaccatcagccatgagtgcatgtgggctcacagctcagcagctgggatctggac

SEQ ID NO: 912299 - DNA, 120 bp, Artificial Sequence
  ENSG00000231585_2 (sequence is synthesized)
tcctgggagagctgctccagcttgaactcagccacagcctggcagggactttgctgggatctcaagcttggcagggctcctccaagagggtgtgacagaggctgtatggcaggactcctc

SEQ ID NO: 912300 - DNA, 120 bp, Artificial Sequence
  ENSG00000197670_0 (sequence is synthesized)
tcaaacatgtgacaacattaagcaccctggtagaggcaagatttgccaggcggctctcacatacccctgcctcccacaatactacccccgcctcccatgatatgatgagatgacaaggca

SEQ ID NO: 912301 - DNA, 120 bp, Artificial Sequence
  ENSG00000197670_1 (sequence is synthesized)
ctttacctctgcattatactccacaaaacccgtaatcccagacaatcatgagaaaacatcagacaaacccagatcagcagacattctacaaaacaccgagtccttcccaacactgtccac

SEQ ID NO: 912302 - DNA, 120 bp, Artificial Sequence
  ENSG00000197670_2 (sequence is synthesized)
ggaatgaaaaacaaggaaaatctaagaaatggtcacagacgagagaagactacaagaggcatgatgactgaatgcaagggtctcactctgctgtccaagctggagtgtggtggtgccatc

SEQ ID NO: 912303 - DNA, 120 bp, Artificial Sequence
  ENSG00000197670_3 (sequence is synthesized)
gctcaagcgatcctcctgcctcggcctccagagtctctgggactacaggagtctcactctttcgctgaggctggcttgcaatggcacgacctcagctcactacaacctctgccttctgag

SEQ ID NO: 912304 - DNA, 82 bp, Artificial Sequence
  ENSG00000197670_4 (sequence is synthesized)
aaaagactgcagaaccacacaaggctcacgctgcccagggagaacgtcatctcagttcccatatgagtcccgatgaaaatat

SEQ ID NO: 912305 - DNA, 120 bp, Artificial Sequence
  ENSG00000197670_5 (sequence is synthesized)
aacgtcatctcagttcccatatgagtcccgatgaaaatatgacagagaaattctgtcctggaccacgagcatcttttcatcttcgtatcctagcagccagcaggcacttggtgaagaggc

SEQ ID NO: 912306 - DNA, 120 bp, Artificial Sequence
  ENSG00000197670_6 (sequence is synthesized)
tgctcaacgaatatacagtgacggttttacgggacaagagttacctgaggaacaactaaatctgccccatcaagcaattcttgacagagtgttgtcaccacacagaatcctcagtttgaa

SEQ ID NO: 912307 - DNA, 120 bp, Artificial Sequence
  ENSG00000197670_7 (sequence is synthesized)
actaacacaaactgaaatgtgcaaaactgaatctgtttctttggggagcacaaaccagtagagcttctatgtgataaaggaagatgctgcagtttgaccgagtttgccaaggagaagatg

SEQ ID NO: 912308 - DNA, 120 bp, Artificial Sequence
  ENSG00000197670_8 (sequence is synthesized)
tccctgggacactgagctacttttttacacatacaggtcaagggtccacgtgtggtccttactgggcgccccctattctgccccgtgtgggaagcatgtgacttgatgctgtacatgtaa

SEQ ID NO: 912309 - DNA, 120 bp, Artificial Sequence
  ENSG00000197670_9 (sequence is synthesized)
tgtgacttgatgctgtacatgtaaaacatggtttctgctcttaagaagtttacaggccagcagggaatggtaaaatgcgtgaggaagaacccctaggctgggcgcggtggctcacacctg

SEQ ID NO: 912310 - DNA, 71 bp, Artificial Sequence
  ENSG00000197670_10 (sequence is synthesized)
aatacaagaattagccgggcgtggtggcacgtgcctattaaaggaggtttcagtgagccgagatcgtgcca

SEQ ID NO: 912311 - DNA, 120 bp, Artificial Sequence
  ENSG00000197670_11 (sequence is synthesized)
aaaaaaaagaaagaaagaaaaaaaaaacccccgcaactccaggtggattggcactgactactgagcacaccatacatgtgcaaaggaagaaaaagggctgtgatgaagtgaggcaagctg

SEQ ID NO: 912312 - DNA, 120 bp, Artificial Sequence
  ENSG00000197670_12 (sequence is synthesized)
tgatgaagtgaggcaagctggggcctcaactggctgcatctggaatttcaacagcaagacaagaatggactagacagaccagtgttctcacccactgtttccatgatcactctcacaaca

SEQ ID NO: 912313 - DNA, 120 bp, Artificial Sequence
  ENSG00000197670_13 (sequence is synthesized)
gatcactctcacaacagaaaaataaaattgacaagaaaaattactcaagaataaggctgggtatggtggctcgcgcctgtaatgctggcattctgggaggccgaggcaggaggatcactt

SEQ ID NO: 912314 - DNA, 120 bp, Artificial Sequence
  ENSG00000197670_14 (sequence is synthesized)
gaccagcccgggcaacaaagcaaatccctgtctctacaaaaaaataaatttaagttagccaagcgtggtggagtgcatctgtagtctaagatacttgggaggtcaacgcaggaggatcac

SEQ ID NO: 912315 - DNA, 120 bp, Artificial Sequence
  ENSG00000197670_15 (sequence is synthesized)
aggagttcaagaccagcctgggcaactccatctctacaaaaaaaatttaaaaatcagctgtgcatggtagcagcacatatagtctcagctacctgggaagctgaggcagaaggatctctt

SEQ ID NO: 912316 - DNA, 120 bp, Artificial Sequence
  ENSG00000197670_16 (sequence is synthesized)
gatctcttgaactcaggaattcaagactacagtaagctatgattacaccgctgcactccaatctagatgacggagcaagaccctttctctaaaaataaagtaagactaaacaaatcaaaa

SEQ ID NO: 912317 - DNA, 120 bp, Artificial Sequence
  ENSG00000197670_17 (sequence is synthesized)
gaataaaatacacagggttaagagttaaacccacagagttaagtaagccttggaggaccacaaaccactgccgtatctaagaatgcttctctctgtgacccccaagaacttctggctgcc

SEQ ID NO: 912318 - DNA, 120 bp, Artificial Sequence
  ENSG00000197670_18 (sequence is synthesized)
taccccccacccttgggagtggtaccatctccactgagaatgcctggattagctattaatcactgtaggcagccatttaaacacgacgcccctcatgcaataccttctaacgtcgagctg

SEQ ID NO: 912319 - DNA, 120 bp, Artificial Sequence
  ENSG00000197670_19 (sequence is synthesized)
gatgctggactaccagcaggcacacaagtgtaaagtggcccggagccaccatagggcttctgaacagtcagcacatttggagaatcgacctcgctggagctcaggaaccttggtttggga

SEQ ID NO: 912320 - DNA, 120 bp, Artificial Sequence
  ENSG00000256268_0 (sequence is synthesized)
ttggaaaatggcatggaaataatccagcttgaacatcgtcctcctcacctcctggactagggcgagggccccttatatttcttcatggcaattgtgtcacagttcaaacgctcgtaccct

SEQ ID NO: 912321 - DNA, 120 bp, Artificial Sequence
  ENSG00000256268_1 (sequence is synthesized)
gactccatctgggatttggaatgcactcagggaagtggctgtgcatggagactagaaatggaagaggcttccaaggtcatgcctttcaggctcccttcaaattctacagctactgtgaag

SEQ ID NO: 912322 - DNA, 120 bp, Artificial Sequence
  ENSG00000256268_2 (sequence is synthesized)
ccacagagaacatgtcagactggaggaaaattgtgacaaaaggtctccccaaagatcgaggaaaggaggtttgcctgaaaaggagccagagtggttccgcccagactgacgtgcttctgg

SEQ ID NO: 912323 - DNA, 120 bp, Artificial Sequence
  ENSG00000256268_3 (sequence is synthesized)
cagccggtgtgtactgcttggtgactgctctttcatttcaggtggtgatttaccaaatgccgctttttttctgtatgacacaggcgtggccaaacatagtcaccactcagaatgttgggg

SEQ ID NO: 912324 - DNA, 120 bp, Artificial Sequence
  ENSG00000256268_4 (sequence is synthesized)
aagtttctcgtccccatcaaacagagggagcaacccttggtggttcaacaatgaagcctccattagctgagaagtctaactgtgatttatcattccctacctataaagattgtaaacaaa

SEQ ID NO: 912325 - DNA, 120 bp, Artificial Sequence
  ENSG00000256268_5 (sequence is synthesized)
gatcttatctcattccacaaggcaaaggccagtttcctaaatcaaagaatgaaacaaagtacatctttttcaagcattgttttgacatcactcccttttatacaactggacaggcactcc

SEQ ID NO: 912326 - DNA, 120 bp, Artificial Sequence
  ENSG00000256268_6 (sequence is synthesized)
cattctctttaaataatttttaaacactcctgaactttggcttggagatcctcatttgaaatgattttatcactctagacatactagctcatattttttaacttcaacctggcaaaagtt

SEQ ID NO: 912327 - DNA, 120 bp, Artificial Sequence
  ENSG00000256268_7 (sequence is synthesized)
aatatccctcataaaactctacccactctcttctctaagtatcacataaaccactcttcctgattatacatgccccatcttgagccatatccattactctgtcaactttccctggaggtt

SEQ ID NO: 912328 - DNA, 120 bp, Artificial Sequence
  ENSG00000256268_8 (sequence is synthesized)
tcctggggtggagtattctacaatggatggaacttggattctgaagtcagtcagttctggttcaaatcccagttattccatttactagctgtgtcatgttgggcaagctatgtaacctcc

SEQ ID NO: 912329 - DNA, 120 bp, Artificial Sequence
  ENSG00000256268_9 (sequence is synthesized)
ctaaatcgttgtttcctcacctagaatatgaatacaatattaatagtactggtataacagttgttctgagaattaaataagatattgcatataaagaacttagttcagagtaaacacatt

SEQ ID NO: 912330 - DNA, 120 bp, Artificial Sequence
  ENSG00000256268_10 (sequence is synthesized)
ataaaattcaacacatgttagtccccatgattacaattcttttggagcacaaaataatcagagatatgtaaaaaagatggttgtgaagagatgtttatgtaccatttttataagagtaaa

SEQ ID NO: 912331 - DNA, 120 bp, Artificial Sequence
  ENSG00000256268_11 (sequence is synthesized)
aagttggaaacaatttatgcccaaccatggttgactatgcaaccaattataagtcatgttctgaatgttgggaaatatcaagattgtattagtgagtattaaaaaaaaacataaaacctg

SEQ ID NO: 912332 - DNA, 120 bp, Artificial Sequence
  ENSG00000256268_12 (sequence is synthesized)
cagagcatcaaatctgagagggaaagtatatgcatagaaaagagatttgaagaacctacatcaaaaagtagattataattatctcaacagagaaaaggtatatggagtatagatgggtac

SEQ ID NO: 912333 - DNA, 120 bp, Artificial Sequence
  ENSG00000256268_13 (sequence is synthesized)
tgggattatgaagatttttaaaatgttttgtatttttctgtgcatcctaaattttgtaccttttgtaattaggaaaattacatgctgttgaaaaataatggatgaagtttagccttctca

SEQ ID NO: 912334 - DNA, 120 bp, Artificial Sequence
  ENSG00000231589_0 (sequence is synthesized)
acaaagagaagtgaccaaagaaaaaaaggcactcagcacataacagctgtctgaattttcaaactcctttactaaggaaaaaagaaaattaaaaatacgacttttttataaggcttttaa

SEQ ID NO: 912335 - DNA, 120 bp, Artificial Sequence
  ENSG00000231589_1 (sequence is synthesized)
caacgacaaaagcttgcaggggactttgaaaatactgctgtgtttcatcaaggctttttgactattacagaagatgtgtattggaagcctaatgaagtctgtttgtcttgcttccaaaac

SEQ ID NO: 912336 - DNA, 120 bp, Artificial Sequence
  ENSG00000231589_2 (sequence is synthesized)
aatctataaaacaaaataacatcctaattccattagatgcactattctgtagcataatgtttaattggtttcaatttaacagagattcatgttgaactgcactctggacaatcagagatg

SEQ ID NO: 912337 - DNA, 120 bp, Artificial Sequence
  ENSG00000231589_3 (sequence is synthesized)
ttgatggccatatgctgaattcctcaaggtgcagtgagaggggcttgtgtgcttgttaaggacatggcaggccatcaacaacatatgtattggatggcttcataacacacatgctttcgg

SEQ ID NO: 912338 - DNA, 120 bp, Artificial Sequence
  ENSG00000256262_0 (sequence is synthesized)
gagtgaaggaacatggctctgaatcatgcctgtctgtctccccaggtctgtgcttaaaaccacgaagttcaagatggaaactgaagggaagagtgtcaaggggatgggagagaggacttg

SEQ ID NO: 912339 - DNA, 120 bp, Artificial Sequence
  ENSG00000256262_1 (sequence is synthesized)
tccatgactttggcagcataaggaaaaaatacccagggacaagtggcgactttggaaactccattcctctgcaaaatgacatcacgaggagagtggtggggcctgcggatgaaaagatct

SEQ ID NO: 912340 - DNA, 120 bp, Artificial Sequence
  ENSG00000256262_2 (sequence is synthesized)
tcatcgccgcctcggcccgggagctcagcattgcagccgcaccggaggcctgaaaccgtctcctccgctaccgccgccgccgccgccggaccgagggatacgacggttcccgagacagcg

SEQ ID NO: 912341 - DNA, 120 bp, Artificial Sequence
  ENSG00000256262_3 (sequence is synthesized)
gaacctgcggccgcagtcccagcacctcgggggaacgtagaccgcaggacagctcccagggggaccggaagtagctgcccccggagagcaatagctgacggaccacgtcctttctttctt

SEQ ID NO: 912342 - DNA, 120 bp, Artificial Sequence
  ENSG00000256262_4 (sequence is synthesized)
ttcccttagcaacaggccccggcgtcggttgctacgctgggctcagttgcctggggctgcttggttttcagatttgcttaggctccattcataaatacagatggcacacttctaggatgg

SEQ ID NO: 912343 - DNA, 120 bp, Artificial Sequence
  ENSG00000255409_0 (sequence is synthesized)
ttttcattccctaagaataaatgtgtactgattaatctcatgggagattgtttcataagcatgtatcattacattattttccttgtaattaatttgctaaacggaggtgaacaaagtagt

SEQ ID NO: 912344 - DNA, 120 bp, Artificial Sequence
  ENSG00000255409_1 (sequence is synthesized)
cctaaactaaaatttatttaccatttctcctttaaatacaaagacaaatatgatctattcatgacattataccactgtttctgttatttcccatattaacttggcgtagttgtttaaaac

SEQ ID NO: 912345 - DNA, 120 bp, Artificial Sequence
  ENSG00000255409_2 (sequence is synthesized)
aaacattcttttcttctttgtagatgaagaaaatatgacagtgaaataacgattactattgatcagtcatagttgtttaaaataatgtctaatgggctgggtgcggtggttcacacctgt

SEQ ID NO: 912346 - DNA, 76 bp, Artificial Sequence
  ENSG00000255409_3 (sequence is synthesized)
aaaccccatctctactaaaataaaaaaaaaaaattagctgggtttggagaatcgcttgaaccagcaggtggaggtt

SEQ ID NO: 912347 - DNA, 78 bp, Artificial Sequence
  ENSG00000255409_4 (sequence is synthesized)
gctgtggctggagaatcgcttgaatctccagcctgggcaacacagcgaggctccgtctccaaaaaaaagaaaaaaaaa

SEQ ID NO: 912348 - DNA, 120 bp, Artificial Sequence
  ENSG00000276888_0 (sequence is synthesized)
agcatatgtaacatgacctgtgcttcagtgttcttttgtgatcaaaaattccttacttttagttttttatctatggtagaaccacccagagcaggggtcctcaactcccaggccacagac

SEQ ID NO: 912349 - DNA, 120 bp, Artificial Sequence
  ENSG00000276888_1 (sequence is synthesized)
cacaccacacaggaggaggtgagcactaggcaagccaaggaagcttcacctgtacttacagccacaccccatggctcatattacagcctgaactctgcctccactcagatcagtgataac

SEQ ID NO: 912350 - DNA, 120 bp, Artificial Sequence
  ENSG00000276888_2 (sequence is synthesized)
ctctgcctccactcagatcagtgataacattagaaactcattggagcacgaaccctgttgtgaactgcctatccgaaggatctaggttgtgtgcttcgtatgagaatctaatgccagatg

SEQ ID NO: 912351 - DNA, 120 bp, Artificial Sequence
  ENSG00000276888_3 (sequence is synthesized)
atctatcattgtctcactttgcccccagataagaccatctagttgcagaaaaataagctcagagcttccactgattctacattatggatatgtgccgccgaagcaagcacaaagccctac

SEQ ID NO: 912352 - DNA, 120 bp, Artificial Sequence
  ENSG00000276888_4 (sequence is synthesized)
ttttacacatgcctagtgatgcttcatggacaaggcttggctctgttgagtccaactaacctacctgagattctgagatttctcttcaatggcttcctgtgagctagagtttgaaaatat

SEQ ID NO: 912353 - DNA, 120 bp, Artificial Sequence
  ENSG00000276888_5 (sequence is synthesized)
atggcttcctgtgagctagagtttgaaaatatcttaaaatcttgagctagagatggaagtagcttggacgattttcattatcatgtaaatcgggtcactcaaggggccaaccacagctgg

SEQ ID NO: 912354 - DNA, 89 bp, Artificial Sequence
  ENSG00000276888_6 (sequence is synthesized)
acagctgggagccactgctcaggggaaggttcatatgggactttctactgcccaaggttctatacaggatataaaggtgcctcacagta

SEQ ID NO: 912355 - DNA, 120 bp, Artificial Sequence
  ENSG00000276888_7 (sequence is synthesized)
ctctgaccctttagaacaagcctacctaatatctgctagagaaaagaccaacaacggcctcaaaggatctcttaccatgaaggtctcagctaattcttggctaagatgtgggttccacat

SEQ ID NO: 912356 - DNA, 120 bp, Artificial Sequence
  ENSG00000276888_8 (sequence is synthesized)
taggttctgaatatggggggaagggtcaatttgctcattttgtgtgtggataaagtcaggatgcccaggggccagagcagggggctgctgctttgggaacaatggctgagcatataacca

SEQ ID NO: 912357 - DNA, 120 bp, Artificial Sequence
  ENSG00000276888_9 (sequence is synthesized)
taggtatgggaacaaaaaacatcaaagtcactgtatcaattgccatgaagacttgagggacctgaatctaccgattcatcttaaggcagcaggaccagtttgagtggcaacaatgcagca

SEQ ID NO: 912358 - DNA, 120 bp, Artificial Sequence
  ENSG00000276888_10 (sequence is synthesized)
ctcctccttctgacttgataaaagggaccgtcttccttggatttagtgaacccctttggttcctgaaaaattcaaggagtatctaggacatagtccccagaagacagtacaagactttct

SEQ ID NO: 912359 - DNA, 120 bp, Artificial Sequence
  ENSG00000276888_11 (sequence is synthesized)
caagacccaaataactaatcagaaaaatcaaagatgtgatactattttttatcccatgcataggtgctacacttggatcaaatgaacaatgttgggatctctatggataaaggtcttaaa

SEQ ID NO: 912360 - DNA, 120 bp, Artificial Sequence
  ENSG00000276888_12 (sequence is synthesized)
atcaaatgaacaatgttgggatctctatggataaaggtcttaaaagtcctgagataaagaatcctgcacccactggtacttctaacttgtcttgttttttgtctgatttctggctgatgc

SEQ ID NO: 912361 - DNA, 86 bp, Artificial Sequence
  ENSG00000276888_13 (sequence is synthesized)
tctggctgatgcaggggactaactcactgccacgcgaaaactacctgaactgaactatgacatctcacctgatatgtaagatgtaa

SEQ ID NO: 912362 - DNA, 120 bp, Artificial Sequence
  ENSG00000276888_14 (sequence is synthesized)
gatagatcttgagaagatacatcaatgttttgctcaagtagaaggctgactatacttgccgatccacaacatacagcaagtatgagagcagttctaaaatgacagagataggaacagtaa

SEQ ID NO: 912363 - DNA, 120 bp, Artificial Sequence
  ENSG00000276888_15 (sequence is synthesized)
cagttctaaaatgacagagataggaacagtaataaagttattttaaaagctaatttgatatactttaccaatttaacatcttgcctgtccgtgcagaatcaaacatttacatgcactaaa

SEQ ID NO: 912364 - DNA, 120 bp, Artificial Sequence
  ENSG00000276888_16 (sequence is synthesized)
acatgcactaaaagacataagcatcttcagtgctcaagtgttcatatttgtaaaataccaccaaggttaaaaggaagggacaaaaaaaaaaccctcttatctcagtggggtattgcatag

SEQ ID NO: 912365 - DNA, 120 bp, Artificial Sequence
  ENSG00000276888_17 (sequence is synthesized)
atttaaagtcctttgatggacaagaaacaatattagggccacttatctgaaatgaacaaagatttaagtgaagatttcatcacagcttccctagactgatatgctgtaatagaaaatcag

SEQ ID NO: 912366 - DNA, 120 bp, Artificial Sequence
  ENSG00000276888_18 (sequence is synthesized)
ctagggggtaaaataaataagacctctctgcgtgctgaaagcaagtaagattaataataatggtaagaatagtagtcacaggagtttcagttaatgatgccaataagcatgtgctaggca

SEQ ID NO: 912367 - DNA, 120 bp, Artificial Sequence
  ENSG00000276888_19 (sequence is synthesized)
ctgaattaaatgccacatatatctttcttatgcacagcaaactttgaaggaatgtattctcctaattttcatatatgacaacatatttggtggtaaataacgttcccaaggtcacacacc

SEQ ID NO: 912368 - DNA, 120 bp, Artificial Sequence
  ENSG00000276888_20 (sequence is synthesized)
tagcaagtaagaaagttaggaattaaacccagtattgtgtgaatctaaagcctaacttttttctctttatcacccacctacggcttgtcttcattaaaggaaaagtgtatccacttaaaa

SEQ ID NO: 912369 - DNA, 120 bp, Artificial Sequence
  ENSG00000255402_0 (sequence is synthesized)
gaatcgatgctgagctcatcgatgccccagtactggatctcctgcaggaaggagagcgcgcacagctgctccatgacatgcagaagacactagagtccagggaggtcagggagccgctgt

SEQ ID NO: 912370 - DNA, 120 bp, Artificial Sequence
  ENSG00000255402_1 (sequence is synthesized)
ccagcggcgagtccagcagcgctctgccgctggaaggcatctctaacccagtcgccgcggcctgagggcgccacaaagttggggacacgccggaagctttggtcccgcgagggcggtggc

SEQ ID NO: 912371 - DNA, 120 bp, Artificial Sequence
  ENSG00000255402_2 (sequence is synthesized)
cgctgtgcgccttcctcctcctgccgctagggagccgggagtgcgcggaagcagcgcacaagtggcagaaagaggagacagggagcagaggaagggtcgcgctaagagagaggatcaggt

SEQ ID NO: 912372 - DNA, 120 bp, Artificial Sequence
  ENSG00000255402_3 (sequence is synthesized)
gaggtccaagcccgacacagtccctgtgcacactgccggtcgccctggcccttcccaaacgttgtcaccccgcctcccaacttcgcaattgcgattcccagcccaggaggtgtacagatt

SEQ ID NO: 912373 - DNA, 120 bp, Artificial Sequence
  ENSG00000255400_0 (sequence is synthesized)
aactgggaggagaacaaggagatcacaggctccaaacaagaccaagctttctcttgggaaatgagcttttctcccagatggagctccatctgcccttgcaggatcagctcccccaagtgt

SEQ ID NO: 912374 - DNA, 120 bp, Artificial Sequence
  ENSG00000255400_1 (sequence is synthesized)
gccctgctccaccctggggttgaccagccagctcagcctgcctgccaatatgatgcctggaattgtctgtggttctgggggccaagccttgtcaggatcatcacgtaagggtctccatct

SEQ ID NO: 912375 - DNA, 120 bp, Artificial Sequence
  ENSG00000255400_2 (sequence is synthesized)
gagctgctgggggaaaggcctgcagggcccttctgagctttgtcgccagctctggggtcagcaggaaagaatgcagtgactgaccagtgatcactgcctcaaggaccacgagaagagggg

SEQ ID NO: 912376 - DNA, 120 bp, Artificial Sequence
  ENSG00000255400_3 (sequence is synthesized)
aaagccctggtatgaatgagcttgtacccttcacctcgctgcgtcttggtttcctcttttacatttttctaaggattcttcagtatggatatgaggaaatataattgtctaatttcatta

SEQ ID NO: 912377 - DNA, 120 bp, Artificial Sequence
  ENSG00000255406_0 (sequence is synthesized)
ggcaggcaccctggggggtctgagaggccagggagggggtctgggccagctccctaacagagggcctggctgctggagaagcagctcagaacacagagatggccatgcctctcccaaaga

SEQ ID NO: 912378 - DNA, 120 bp, Artificial Sequence
  ENSG00000255406_1 (sequence is synthesized)
cctctgcctgtgagcctcagctacttgcccaagagccatcctagaaaggagaagtactggttacatcccaggtaagccagcagccaggtgacacttggtcacttctagatgtggtaacta

SEQ ID NO: 912379 - DNA, 120 bp, Artificial Sequence
  ENSG00000255406_2 (sequence is synthesized)
actggatttttcctcaggctgatagggtgcgtaaaaagatgaggaaatggaggcttcaaggtcaaaccccttgcccagagacatgcagcagaaagtgatgaagctgagatttgaacttgc

SEQ ID NO: 912380 - DNA, 120 bp, Artificial Sequence
  ENSG00000255406_3 (sequence is synthesized)
acctgtctgcctgcaaatcccatctcttcctgctgtgccagagacagcagaagggcccacggctgtgtagatgtggcctattagcctctcaagtctagagcaagcccctcagtgtggggc

SEQ ID NO: 912381 - DNA, 120 bp, Artificial Sequence
  ENSG00000255406_4 (sequence is synthesized)
agcagccgcctttctttagaaccccacgtctactgtggtgatcactctgcatagctgctttagaaacatatgaagataacagaaggatctcatctgcaacccagagctctctgtgcctgg

SEQ ID NO: 912382 - DNA, 120 bp, Artificial Sequence
  ENSG00000255406_5 (sequence is synthesized)
tggtgactcccaagaagctcccataaggaagaggtccctcaaagaacacactgaacacagtggaccctctgctgccaaaacaggcagggaagcatctcctggagcctgcttggtcagctc

SEQ ID NO: 912383 - DNA, 120 bp, Artificial Sequence
  ENSG00000255406_6 (sequence is synthesized)
tgctctcagaagcttggagggcaaacgggggtgactggacccagctggaataatggaaagaatgggaactagcacttagaagcacctactgtgttccagaaattctggtgcatttatctg

SEQ ID NO: 912384 - DNA, 120 bp, Artificial Sequence
  ENSG00000255406_7 (sequence is synthesized)
tgtagccttcaaaatagctctgttgggttgatagtatttttgccccatgttatggtataagaaactgagttcagagaggttaggtaacttgaatcaggccataaagcacttaagcccaaa

SEQ ID NO: 912385 - DNA, 120 bp, Artificial Sequence
  ENSG00000255406_8 (sequence is synthesized)
ggaaacggtgttcccagctggctgccatggcaacagcaggcttcggagccattcatctcggtctggacagcttcccctactcgcactagcgctttgtctccctaagtggctaactgaggt

SEQ ID NO: 912386 - DNA, 120 bp, Artificial Sequence
  ENSG00000255406_9 (sequence is synthesized)
gtgccaacctggctcctgcatttccataccccaacacaagagtctcaatgcaagggttgtaacatgccagcagtgtctgtacaagcaaacgatggcactcgtagcatatggagggcgtgg

SEQ ID NO: 912387 - DNA, 120 bp, Artificial Sequence
  ENSG00000255406_10 (sequence is synthesized)
ggcagtggagctgtgccttcccctctcctgaggcccctgggcttcgagcagtcttcacgctcctgagttctttctcagaattccctcctaaacctcttagcgagtaaatgctgcttgcca

SEQ ID NO: 912388 - DNA, 120 bp, Artificial Sequence
  ENSG00000255406_11 (sequence is synthesized)
gccccgggccagggccgaagctgcagcggtggtggcaacagcatcagctgttgctaaggaagctgagaatgcagggtgggggccggagagtgggcagcaacccagcagggcagcaccccc

SEQ ID NO: 912389 - DNA, 120 bp, Artificial Sequence
  ENSG00000255406_12 (sequence is synthesized)
tgcactgcctgaggcgggtccttgagggagtgcctcctgggtatttgctagtgctgagtgcccacagcctctgcccccaagtaaatgcagctccctttagccccttgagcacaggtgatc

SEQ ID NO: 912390 - DNA, 120 bp, Artificial Sequence
  ENSG00000255406_13 (sequence is synthesized)
tctccctgctgccctttgagaggctgactactgatgaagccgaaacccacctctcctctccctgctctgttagacctgaagacacaaagtggaaggaaggtgaggaaggcatcaaaaatc

SEQ ID NO: 912391 - DNA, 120 bp, Artificial Sequence
  ENSG00000255406_14 (sequence is synthesized)
tgcccatcagtgagctgctctgcttcaaggctgctctgatggcacagggctgatgtgactcctgggcccgcagcgctttgggaatcaagcctgatcttagaggttggcgggttctgctga

SEQ ID NO: 912392 - DNA, 120 bp, Artificial Sequence
  ENSG00000255406_15 (sequence is synthesized)
cactgtttaacctggtgaataataataaaaacctggaccggtctgctcagaaccacccagctggggccatccagggagaacacagggcagagacatgctggcctgagctggaaggcagct

SEQ ID NO: 912393 - DNA, 120 bp, Artificial Sequence
  ENSG00000255406_16 (sequence is synthesized)
gggaccttgtagcctgtgagaatgacgtcatctgacaagagaaacctgcagagtgaagcagagctactccaccggcctccacacactgcaggactcaagatgaggaaatggaggcttcaa

SEQ ID NO: 912394 - DNA, 120 bp, Artificial Sequence
  ENSG00000255404_0 (sequence is synthesized)
aaacattagatctctaattttaatagttgagaggaaggttataaaataaaacagacaacacagagcttcatgacggcctcggattggcagtcaacccagggatacagaaatgtaaacaaa

SEQ ID NO: 912395 - DNA, 120 bp, Artificial Sequence
  ENSG00000255404_1 (sequence is synthesized)
aacagagcttccagataacattactgtgtgctatgtgactttcagaatacagcagcgtcccagacactctaaagtcaagtgaaacaagagattttagaatcaatctatacacatttcaga

SEQ ID NO: 912396 - DNA, 120 bp, Artificial Sequence
  ENSG00000255404_2 (sequence is synthesized)
gggcagtccaggaaggagccttcctctcaggtcagcccagggctgggcctgagcctgagcccggggacgtgtagacactacccattttgggcaggggaggccaaagtggttctgcttcag

SEQ ID NO: 912397 - DNA, 120 bp, Artificial Sequence
  ENSG00000255404_3 (sequence is synthesized)
gtgaaaaagtcagaaaaaaggcaacagatacaatttggtagccatcaaatcctctcctccctctggaagtttctgaggtgctggtcatcattctgtcccattttttgccactgtgctaag

SEQ ID NO: 912398 - DNA, 120 bp, Artificial Sequence
  ENSG00000255404_4 (sequence is synthesized)
cgtcattcgtcccaccttcctgccccctaaagccccaggaggacacactctcagcatcaggccagctctccgggtcactggggcttggctcaacaggatgtgcagggcagagccgggagg

SEQ ID NO: 912399 - DNA, 120 bp, Artificial Sequence
  ENSG00000255404_5 (sequence is synthesized)
gaagagcagaagatgccatgggctgttcgcaggagcagccgtccagggcgccgctggaggaagatcttctagtggctgtctcagcacgtacaaagaacgggggtgggttggggcagcccc

SEQ ID NO: 912400 - DNA, 120 bp, Artificial Sequence
  ENSG00000255404_6 (sequence is synthesized)
cgcccagagccaaggcacagaggaggtttgaaatgtccaggataaatagaagcgcacgggaatggagaaaagccagctccatcccactcttaaaaacatcgccattggcaccaaaaatat

SEQ ID NO: 912401 - DNA, 120 bp, Artificial Sequence
  ENSG00000255404_7 (sequence is synthesized)
attaacatctgtacatttgtcatctttaaaaaataaaaggaaataaaaccttcttggcaccttgtagtttatttcttagaaatgaggtgatatgtggaaaggcttcctgtgcgtgcacac

SEQ ID NO: 912402 - DNA, 120 bp, Artificial Sequence
  ENSG00000246363_0 (sequence is synthesized)
ggaacacttggtcactgtggcagaaggaaaggaaaaatggtgaaccacttcctggctcgaaaagcttctgtgtggaagtgacacacatctcttctgtctacatttcagaagggatggggc

SEQ ID NO: 912403 - DNA, 120 bp, Artificial Sequence
  ENSG00000246363_1 (sequence is synthesized)
cagggatgctgaggacacaccatgtaccctttttcaggccatatccagtaacagagtctactgcatcatattaactgataaacccaggatgacaagagaaacatgggactcactcttcat

SEQ ID NO: 912404 - DNA, 120 bp, Artificial Sequence
  ENSG00000246363_2 (sequence is synthesized)
ttgcattgactccagctaagagcttcagttttcatgctttgcttcagaattattgtggtctgatgcagaactgaaaaggccaacacgagaatcttcaagtacaattgcctgggaatcctg

SEQ ID NO: 912405 - DNA, 120 bp, Artificial Sequence
  ENSG00000246363_3 (sequence is synthesized)
aggtctggacagcaacacctgaatctgaatctcttttgggttgaatcataaaagaaaatagtatggagagatttaaggccaggcctctggagaaggaattgataaaatatgtggtagtac

SEQ ID NO: 912406 - DNA, 120 bp, Artificial Sequence
  ENSG00000246363_4 (sequence is synthesized)
ctgcgctacagaacagaattcacttggaagttcttggcatatagtaagcactcagtaactgtcagttatcgctctcatctctatgaagactgtatttgacatgacatcatctccataaga

SEQ ID NO: 912407 - DNA, 120 bp, Artificial Sequence
  ENSG00000246363_5 (sequence is synthesized)
ttcctgaactcaactttatttcctcttttttcctttaaccccaattttctaataccaattagtaaggtggcttcctctccttctggacttgctactcccagaaggaaattaaattacaag

SEQ ID NO: 912408 - DNA, 120 bp, Artificial Sequence
  ENSG00000246363_6 (sequence is synthesized)
tctctaattccctaggcattcccttgtagccaaagtcattaatcagtggctcatatttaaaaaaattgctctaggcctctggagactctttctatggcataatagattttcatttgtttc

SEQ ID NO: 912409 - DNA, 120 bp, Artificial Sequence
  ENSG00000246363_7 (sequence is synthesized)
tcatcccctgagtagcttttaattcaggatggatatttgccctgcaatttcttttattccctggataatttgaaaagccaggggaacagtgtcactttgtcttatcccttccctctttat

SEQ ID NO: 912410 - DNA, 120 bp, Artificial Sequence
  ENSG00000246363_8 (sequence is synthesized)
tagtcagtctgttctaacaaaatgttggttggtccacgcttttcatggaatgtcatggttaactgataagctgcccccaaactcggtatcctggtttaatgttataatcataatgccctc

SEQ ID NO: 912411 - DNA, 120 bp, Artificial Sequence
  ENSG00000246363_9 (sequence is synthesized)
tgagatcacttagagaaaagctgagggtagcaactctgtggattcttatttaccttatgcgtttgacatctgcaatgatgtgcttctttaccacctccctcatcaaattaaactaagaat

SEQ ID NO: 912412 - DNA, 120 bp, Artificial Sequence
  ENSG00000246363_10 (sequence is synthesized)
gaaaacagatgggctgggaagccagtggatcaaaagaaggacctgggggaagctcagcttggggaccggcttgctctttgccctcactatttgtcaactgggaatctcctgggtgctcag

SEQ ID NO: 912413 - DNA, 120 bp, Artificial Sequence
  ENSG00000246363_11 (sequence is synthesized)
ctgtgctggaatctcagatgagtaaattgaagcccagaaaggccaagaaacttgaaccatttaggtgaagaagagtgctcaccagattcccttctggtctggaaaaagaaatcccttctt

SEQ ID NO: 912414 - DNA, 120 bp, Artificial Sequence
  ENSG00000246363_12 (sequence is synthesized)
ttgtggatgtcatctctaccatctctcggtgaaaaatatttcaagagaatcctaagatggagagagcattggaagtcatccggcccaattcccttgtgcaattcaaagcttctttgtaag

SEQ ID NO: 912415 - DNA, 120 bp, Artificial Sequence
  ENSG00000246363_13 (sequence is synthesized)
aaaaatgcccccagaagtttgtttgcatcatgaagatcagattttgaggatccagtctggctcttccctgtacaaaacattcctcacaaacagaatatggacaattgttaaatgtcaaag

SEQ ID NO: 912416 - DNA, 120 bp, Artificial Sequence
  ENSG00000246363_14 (sequence is synthesized)
gtaaagttattgtgggaactccttcaaaaagttcaagtgagagcccattctatgaatgaccatttacatctaatttttttctgtgctatgttacttattctgaagtggttgatccaattc

SEQ ID NO: 912417 - DNA, 120 bp, Artificial Sequence
  ENSG00000246363_15 (sequence is synthesized)
ctaaaagggaatatttcattaccttttatttcctatagcatccattctgaccccttttcggtttaattattccctgattccagtcttcattcactcatttatttgaggaatatttattga

SEQ ID NO: 912418 - DNA, 120 bp, Artificial Sequence
  ENSG00000246363_16 (sequence is synthesized)
ccaacaactatgccaggtcccattctatgtgtagggactataaagttgaacaagacagaggaggtactggcctcagaatttacattctagtagatgagaaagtaaaaataaacacatgaa

SEQ ID NO: 912419 - DNA, 120 bp, Artificial Sequence
  ENSG00000246363_17 (sequence is synthesized)
ttttagatggaatggagatctctgaggaaatgaaatttgagctgagacctaaaaggtcacccaaggactcatgggaaaactcagttgtttctatcaaaatttagcttcatgaactccagg

SEQ ID NO: 912420 - DNA, 120 bp, Artificial Sequence
  ENSG00000246363_18 (sequence is synthesized)
cccttgcaaatgatggttaccaggtgagaaatgtctcactggcaacagaggttggcagacccagctccagttccatcccagccaacataccaatgtcattaaaataaggccattcatcaa

SEQ ID NO: 912421 - DNA, 120 bp, Artificial Sequence
  ENSG00000246363_19 (sequence is synthesized)
ggtggagactattactagaaacaagcattctaaagtgccatttgagtgccaggctctcaacactgggcgtagcactgctccatgaggcttttgagagcatatactgaggcatgaccaaaa

SEQ ID NO: 912422 - DNA, 120 bp, Artificial Sequence
  ENSG00000246363_20 (sequence is synthesized)
aaattaagtcccatgtaagtgatgcaactgctccccaattactgtggaagtatctgcagactaactattgtgcgtgtgtgtttgtttgctttaatgaataaattcagtcaaccaaccatc

SEQ ID NO: 912423 - DNA, 120 bp, Artificial Sequence
  ENSG00000246363_21 (sequence is synthesized)
tagctattgactaaatccattctttttcttccaaaatgtctattggctgaagtttactggtttttatttctattcgcatacgtaattttctaaaccccattcttatggaaccttctctaa

SEQ ID NO: 912424 - DNA, 120 bp, Artificial Sequence
  ENSG00000246363_22 (sequence is synthesized)
gttcctctctatggccctgtccatgttcatacggatacacataaagacacaaatacaccaaactaagtttagagcagtctggtgcctgcctaagacttcagcctcatctcctgcttctac

SEQ ID NO: 912425 - DNA, 120 bp, Artificial Sequence
  ENSG00000246363_23 (sequence is synthesized)
cctctttagtttaggaaaaacaggtaacgttgctgagtgccaagtattgtgttagtagctttgcatgcattttttcattttatcttcacaagtttcttctatcaccatgatctgtatgtt

SEQ ID NO: 912426 - DNA, 120 bp, Artificial Sequence
  ENSG00000246363_24 (sequence is synthesized)
tgaccatggtgtttcctccacctgaaattcccttggtgctctgcctggggaactgttactcattcttcaaatctcaacggaatgatctcctcctctggaaagctctccctacttccctag

SEQ ID NO: 912427 - DNA, 120 bp, Artificial Sequence
  ENSG00000246363_25 (sequence is synthesized)
gaagaagtaatcccttcctcagttctgctttgattataactttataagcacctatcactctgcatggtattagttcactgtcatgtccatttcctctattgggatgtaaattgcttatgg

SEQ ID NO: 912428 - DNA, 120 bp, Artificial Sequence
  ENSG00000246363_26 (sequence is synthesized)
gtaataattaggctttgaatcattttatgatctggcctaagacagtgcttggcacatactataggctcatcagatgatggctgagtagaattaaattgaatcaagttgaagttatacttt

SEQ ID NO: 912429 - DNA, 120 bp, Artificial Sequence
  ENSG00000246363_27 (sequence is synthesized)
gatgtttatcaattaacatgtgtagtgtgttaaatggtggtcactgaaaacatacgtctgcaccctaattcctggaacctgtgaatataaccttacatgttaagaagaaatatgacctta

SEQ ID NO: 912430 - DNA, 120 bp, Artificial Sequence
  ENSG00000246363_28 (sequence is synthesized)
aatggatatggagacaaggagcttatcctggattgtctgagagggccctagatgcaatcgcatgtattctgataagtggagagaaacagaagaggaggatgcaatgtgaccatgtaggca

SEQ ID NO: 912431 - DNA, 120 bp, Artificial Sequence
  ENSG00000246363_29 (sequence is synthesized)
gaagtttgaatggtgcagccacaagccaaggagcccctggggccatcagaagctggaagaagcaaggaatggattccttcctagtgtttggaaggagtgtgcacttgccaacaccttggt

SEQ ID NO: 912432 - DNA, 120 bp, Artificial Sequence
  ENSG00000246363_30 (sequence is synthesized)
ttgagacttctggcctctggaactgtgacagaataaatatctgttgttttgagccacccaattgttgctaatttgttaaagcaaccttagaaaattaatatagcatccacaataaaattt

SEQ ID NO: 912433 - DNA, 120 bp, Artificial Sequence
  ENSG00000246363_31 (sequence is synthesized)
ctcaaaatatatgttcctgtgaaatggaagagttctagggatctagtagcatatacggaacccagataagttatacaagtttttccctgaaagtcttttcagattctttagcgggctaag

SEQ ID NO: 912434 - DNA, 120 bp, Artificial Sequence
  ENSG00000246363_32 (sequence is synthesized)
gtgcattgtgaatcccaaaaactttagcgtttttcagcatctattatcacataatcctttccccacccatggaattatatactaaactgtttttgtagatgttgatgttctgtagaacag

SEQ ID NO: 912435 - DNA, 120 bp, Artificial Sequence
  ENSG00000246363_33 (sequence is synthesized)
agttttggggtctgtatgacttaagatccttctacaatggaacacagtgaggagggtattcagaggagtcatagagggcattgatcttgcaatatatactcaggaaattaccatgggcag

SEQ ID NO: 912436 - DNA, 120 bp, Artificial Sequence
  ENSG00000246363_34 (sequence is synthesized)
cttgcgtcgctgctcctgtctccgtgtaactcacaataaagagattttggcatcaaccgtgagcttaggggtagaagggtatatgttaggaggtgggagcagaatcaattcttcaaatct

SEQ ID NO: 912437 - DNA, 120 bp, Artificial Sequence
  ENSG00000246366_0 (sequence is synthesized)
gtcacttctacaagtgactaacaccgtcaggataatctaaaactacgaatactacctgactccacaagggtacggtgtattctccagttttagcatctgccttaaaaattacctcagagt

SEQ ID NO: 912438 - DNA, 88 bp, Artificial Sequence
  ENSG00000246366_1 (sequence is synthesized)
tctccagttttagcatctgccttaaaaattacctcagagttaagcactgctggggacttatttctactcttgttttccttctaacagg

SEQ ID NO: 912439 - DNA, 120 bp, Artificial Sequence
  ENSG00000246366_2 (sequence is synthesized)
gctgcagaacagcaaatattgcagaacagtaaatattgctgcctgatccttccctctggaagcttcgtcccagaaggccacctgcctatatgagttctagatccctgaggaatcgccaca

SEQ ID NO: 912440 - DNA, 120 bp, Artificial Sequence
  ENSG00000246366_3 (sequence is synthesized)
ttctaccttccctgctaccagccacttcactaactttttctggagagatgacttcaaaatactcaaagtcgcaagataaatacacagaaacgattaacgttgcacagagttgacccagtc

SEQ ID NO: 912441 - DNA, 120 bp, Artificial Sequence
  ENSG00000246366_4 (sequence is synthesized)
attctgtaaattgctgcagaaaaattggatttatttattatatattttacacaaattagaaagaaagcaaagttatttagtaaggtaactatatttgtccagaatcttcctgtgacagtc

SEQ ID NO: 912442 - DNA, 120 bp, Artificial Sequence
  ENSG00000246366_5 (sequence is synthesized)
ttcttctgggaacagactttgctcactccagccacaggggtagctgggctaaatgcagtacctaatgtttccttgaccacagggactggtctaaggaatgggtaatgagccagtataaat

SEQ ID NO: 912443 - DNA, 120 bp, Artificial Sequence
  ENSG00000246366_6 (sequence is synthesized)
aaaaggaaatgacatcagaggtgctttgctaaagatcacaggaactgcagctgtggccttcctatttcgcagattcccatcagagtacagtaaaacaaaaattaaatagaattcatatat

SEQ ID NO: 912444 - DNA, 120 bp, Artificial Sequence
  ENSG00000246366_7 (sequence is synthesized)
tccgtttcttcatctgaatgctgcttatgggccttgttcaatttgtgaaaattcatgactttgtacatttatgttaatttcccagacaccctacagtgaggggtgacttatgactgaatt

SEQ ID NO: 912445 - DNA, 120 bp, Artificial Sequence
  ENSG00000246366_8 (sequence is synthesized)
gacagccaatgcaacagaagacttggtccatgaaaacctcccatgcaatatcccttccatgctcttttctacctgctggattgatcgagctgagcatgcaaccttgaaaaaaaaagcctt

SEQ ID NO: 912446 - DNA, 120 bp, Artificial Sequence
  ENSG00000246366_9 (sequence is synthesized)
caggagggtagagtcacaagatggaaggagcatacatcattacttgcagagggccactggctaactgggaacctttttgggactgtatgggaccaagaaataaatttatttcctatttga

SEQ ID NO: 912447 - DNA, 120 bp, Artificial Sequence
  ENSG00000246366_10 (sequence is synthesized)
ggctggtcttgaactgctgggctcaaactatcgtcctgcctcagtctcctgagtggatgggattataagcacacaccaccgtccctggcataaaatagttttttaattcacaagatttaa

SEQ ID NO: 912448 - DNA, 120 bp, Artificial Sequence
  ENSG00000246366_11 (sequence is synthesized)
taggtagattaaaagaagaggtaagacaaaattaaaagaggtaagacaagagaaggaaaagtcagactgacagattataagttcctatggtacacagtccccttagattggaagaaagga

SEQ ID NO: 912449 - DNA, 120 bp, Artificial Sequence
  ENSG00000246366_12 (sequence is synthesized)
gctaagagggtaaggaagcttggttgccagttttttataactggcagcctggtgatattgggtgtggtagctgagatgtcccaattgtagtcacaaggcctaaaaaagcagatctttaca

SEQ ID NO: 912450 - DNA, 120 bp, Artificial Sequence
  ENSG00000246366_13 (sequence is synthesized)
aatgtttaaaaatactagctcaatgtaaataagcatgaatgttcttgacctccttactgtgccctgaatgtgccaaccacactctcattccaccatctttgctcctgcaatgctgtttgc

SEQ ID NO: 912451 - DNA, 120 bp, Artificial Sequence
  ENSG00000246366_14 (sequence is synthesized)
ctgcaggccttcctgccaggagcttgctccttctctctgtccactctggatataacagcccttgcccttctccactttacgctctcttccctttctcttcttgtacctttattttcctgc

SEQ ID NO: 912452 - DNA, 120 bp, Artificial Sequence
  ENSG00000246366_15 (sequence is synthesized)
atagcacccatgattatctgatctatttttttccctttttttttcattctggtgcccaggctggagtgcagtggcacaatattggcttactgcagcctcagcttccctggctcaagccat

SEQ ID NO: 912453 - DNA, 81 bp, Artificial Sequence
  ENSG00000246366_16 (sequence is synthesized)
ctcagcttccctggctcaagccatctgcgccaccatacccgggaaatttttgtactttttttgtagagacagggtcttgct

SEQ ID NO: 912454 - DNA, 81 bp, Artificial Sequence
  ENSG00000246366_17 (sequence is synthesized)
tctattatttatttaccagtaccttccctactggaatgaaagctccatgagaacagagtctgttttgttcactgctatacc

SEQ ID NO: 912455 - DNA, 120 bp, Artificial Sequence
  ENSG00000246366_18 (sequence is synthesized)
gctccatgagaacagagtctgttttgttcactgctataccccttgtgccaagaacactgtctgacatataacagtaactggaatatttaatgaatgaatgaatgaatctaggtatatgat

SEQ ID NO: 912456 - DNA, 120 bp, Artificial Sequence
  ENSG00000246366_19 (sequence is synthesized)
ggtgggatgaggaaataaagagatagaaaatgtcagtactgtataggtttcagggacaatgaattatcaatacaatgatatattgcctgaatttcagcatatcttagtaactgccttaaa

SEQ ID NO: 912457 - DNA, 120 bp, Artificial Sequence
  ENSG00000246366_20 (sequence is synthesized)
ttagttatgattaagtctgaatagtaactcacacactaaagtaaaattgaggatttgaaacagaaatcaggatttccgttcctcctttgttaaaactaggcacagtattcaacagtctaa

SEQ ID NO: 912458 - DNA, 120 bp, Artificial Sequence
  ENSG00000246366_21 (sequence is synthesized)
tcaatttctaaaagtaccatttaaaactgaggtatttagtaaatggtttatagactacttagctctgtaactgaaataaattattctccaaacacggctttcctcaatgagcttaatgaa

SEQ ID NO: 912459 - DNA, 120 bp, Artificial Sequence
  ENSG00000246366_22 (sequence is synthesized)
tgttttctgtttaccattattgatgcttttacaaatatctcctatgcctccagaatgatctcggtgccagtgagtcactacaatttcctggattgctgtgttaaattcagttagagcctg

SEQ ID NO: 912460 - DNA, 120 bp, Artificial Sequence
  ENSG00000246366_23 (sequence is synthesized)
ctttaaacagctgatgtattctggaattgctggttctccagtgtcaatgaggattctcctgaaaattaaatggaagataatcacacaattggaacactgcgttgacattagcattatttt

SEQ ID NO: 912461 - DNA, 120 bp, Artificial Sequence
  ENSG00000246366_24 (sequence is synthesized)
gcacacagataatttacattaaagaaactgcaaaaattattttacttttaacatgcacaaaaaccagctacatcacttcagcttaactacagtaatctcaccctaagaaagttttctgag

SEQ ID NO: 912462 - DNA, 120 bp, Artificial Sequence
  ENSG00000246366_25 (sequence is synthesized)
aaaaattagagctaaatataagtctgaacaaggaataatagcagtcatcttgaacatttacatagcaattaaaataaacatggcaccattccaaggactttacatattttaccaattaca

SEQ ID NO: 912463 - DNA, 120 bp, Artificial Sequence
  ENSG00000246366_26 (sequence is synthesized)
ttcctcgtaacaactgtttaaagtagatattttatcattatatttagaagtaacttgcccaggttactctacagataaatggcagaaacagctttcaaacccaggtattctgatgccaga

SEQ ID NO: 912464 - DNA, 120 bp, Artificial Sequence
  ENSG00000246366_27 (sequence is synthesized)
atatgtgcttttatctatctgcctttgagatctcatatctcagtatatttcaaaagttttatagatatgaaagattttgattcaatggcacccctaaagaaactagtctttggcactaga

SEQ ID NO: 912465 - DNA, 120 bp, Artificial Sequence
  ENSG00000246366_28 (sequence is synthesized)
tatacaacttatcactgaagttttatattagcaccctgacacatgaaaatgaaggctttagtgaagcatgggaaaaacatctgagctattttctttctttacttagacaaccccattagc

SEQ ID NO: 912466 - DNA, 120 bp, Artificial Sequence
  ENSG00000246366_29 (sequence is synthesized)
tgtattttttgcttgtggttctgaatcttccttatattttgtttgcccttcctcacgattttatgaggtggcctttctctgtgaagttttgctgaactaaagacatgggggtgacatgtt

SEQ ID NO: 912467 - DNA, 73 bp, Artificial Sequence
  ENSG00000246366_30 (sequence is synthesized)
ttgcagccttgacctcctgggcacaagcgattctcccacatctacttcctgagtagctgggactacaggtatg

SEQ ID NO: 912468 - DNA, 88 bp, Artificial Sequence
  ENSG00000246366_31 (sequence is synthesized)
caggtatgtgtagagatggtgtttcgtcatattgcccaggctggtctcttaactcctggggtcaagcaatcctcccacctcagcctcc

SEQ ID NO: 912469 - DNA, 120 bp, Artificial Sequence
  ENSG00000246366_32 (sequence is synthesized)
tgggattacaggcgttgagccaccatgcccagctcaagatccaattcacaaacttcttcactcatactgtttcacagtaacacctcaataattcaggctggctgacagattagccttgat

SEQ ID NO: 912470 - DNA, 120 bp, Artificial Sequence
  ENSG00000246366_33 (sequence is synthesized)
tcaataattcaggctggctgacagattagccttgatgaaaagtctgagttattcattaattgatcaataactgtttatggattacctaatatgtgctacaaatttgtttcttgcagtaag

SEQ ID NO: 912471 - DNA, 120 bp, Artificial Sequence
  ENSG00000246366_34 (sequence is synthesized)
caggacacaacaaccctgcttacattcaactgttggtgagaaggggaactgcatatgactggaaataaacaataaaagtaacataccatagaaagcattttgcaaagcattaaaattaaa

SEQ ID NO: 912472 - DNA, 120 bp, Artificial Sequence
  ENSG00000246366_35 (sequence is synthesized)
taaaataggaaacaaaatcatcaggagtggagatagtgtgatgacatttgagaagagaatggaggaaaactgtggaggaatggggaccaggctggtctcagaatcctggcctcaagcaat

SEQ ID NO: 912473 - DNA, 120 bp, Artificial Sequence
  ENSG00000246366_36 (sequence is synthesized)
cctcttgccttggcatcccaaaatgctgggattacagggatgagctatcccaccagggacccctcaggcagattgatttcttatgtgtgttcagctctggaggccacattccaacacctg

SEQ ID NO: 912474 - DNA, 120 bp, Artificial Sequence
  ENSG00000246366_37 (sequence is synthesized)
gagaaacgcaaatcagaaaaagactctttaatctatttttttctctctagttaaacattttaagacagagccgttttttataaattctaccctatataagaaacttaacatgcatttatt

SEQ ID NO: 912475 - DNA, 120 bp, Artificial Sequence
  ENSG00000246366_38 (sequence is synthesized)
tcctttttcctttcctccaattttcagtttttgttgacaaaactgattataatacttttaaagtatgacaggtattttatttcaaaaattcttatttacatttatattgttttgtaacta

SEQ ID NO: 912476 - DNA, 120 bp, Artificial Sequence
  ENSG00000226562_0 (sequence is synthesized)
atcacgttgctagaagaaaatctcatgccagagcttggaccatccctagctcagaggttaggggttgtctcttggtgacctacatgaaaaaataggtccagatcagagttcctgatgcag

SEQ ID NO: 912477 - DNA, 120 bp, Artificial Sequence
  ENSG00000226562_1 (sequence is synthesized)
agcactcatccactctttcaatcgttggaggagaggcctggttttaggtaaacctaacctctttgaggaaccacagagcccaagactggaaaccttcagaatctgctggcccccaaccct

SEQ ID NO: 912478 - DNA, 120 bp, Artificial Sequence
  ENSG00000226562_2 (sequence is synthesized)
ccctggggacccctgtggcctgtctcaccagagcactcttctgtctgtagatgtctcagcggctctacaagggagtcccatttcaggtgtggggctgggcatggtcactcctgctggatg

SEQ ID NO: 912479 - DNA, 120 bp, Artificial Sequence
  ENSG00000226562_3 (sequence is synthesized)
tctagaagatggaaactaaggacctaggaaaatgccagatacagcctttccaccctcatccagagcaggacaaacaggccaggtggtgtcaggagcccaggtctccagctggagggaacg

SEQ ID NO: 912480 - DNA, 120 bp, Artificial Sequence
  ENSG00000226562_4 (sequence is synthesized)
gcacatcctaggcacagatgctaatgtaggcactgcagccttaccctgtaggaattctagtgactatgttgccaccatcttggagctccatgccctcatagtgtaatggcaccagcagat

SEQ ID NO: 912481 - DNA, 120 bp, Artificial Sequence
  ENSG00000226562_5 (sequence is synthesized)
ctgcctgtgcatggacttcctgtactacctcactcctgaggggagatgtttctgcagggcctatgacctggtgcacaactttagacaccatcatcctggagcagcactgcaccctcacta

SEQ ID NO: 912482 - DNA, 120 bp, Artificial Sequence
  ENSG00000226562_6 (sequence is synthesized)
gccagagtgttgacatcctcaaggccagggccacattcaagactttggacttcattgatgcacttgtgctgagcaagatcctggtcagagtaaaacattccatgggaactcgggctgtga

SEQ ID NO: 912483 - DNA, 120 bp, Artificial Sequence
  ENSG00000226562_7 (sequence is synthesized)
gaaacatcctaaccacctgactgcagaaacatccttatcacatcctgctgggcaagggcccaacagcctgacttcaggaacatccttatcatcttctactgagcagcaagctatactgtc

SEQ ID NO: 912484 - DNA, 120 bp, Artificial Sequence
  ENSG00000226562_8 (sequence is synthesized)
cagagccctccctcccagccccatgattaccccagcctgtaagtggcagtgggcgctgacactaagctggtttccccctccgcagggttttgctagtaataaacctgtgttgctgttgaa

SEQ ID NO: 912485 - DNA, 120 bp, Artificial Sequence
  ENSG00000226562_9 (sequence is synthesized)
gtaagctgggcttggtacccttccctggcttcagaaagaagccaacaaggagcgttttgcagaatgaaacctcttttccatccagaagcactgctgactgtaggtggttgccgtttgtgg

SEQ ID NO: 912486 - DNA, 120 bp, Artificial Sequence
  ENSG00000226562_10 (sequence is synthesized)
cagtgagcattttgtccattctgaggttggattggtttcttcttttggccttgccctgccctacagaccataaaggagaacagcaagaggcccccagcaaacatccacagatggccctgg

SEQ ID NO: 912487 - DNA, 120 bp, Artificial Sequence
  ENSG00000226562_11 (sequence is synthesized)
acatcagccacattctgagaaacatgtcatgttctgggagggctaaggcatcaagttaggcctacggggctggatgatcccaggcaacgtggggcaatccagagccatgggggctttcca

SEQ ID NO: 912488 - DNA, 120 bp, Artificial Sequence
  ENSG00000226562_12 (sequence is synthesized)
tgggaattgggaggtcccaaggcagagtcagaggttccacaggaggagtcacagagtcaccaagggctctcctggcccagggagcagtcaacaccatggactgaacacctgctgggctcc

SEQ ID NO: 912489 - DNA, 120 bp, Artificial Sequence
  ENSG00000226562_13 (sequence is synthesized)
atgctggcagcccagccagctggtctggccctggacgtgccttcaggtgctggttatgctttatgacctgtgttgtgatcctggtcagagtaaaacattccatgggaactcgggctgtga

SEQ ID NO: 912490 - DNA, 120 bp, Artificial Sequence
  ENSG00000226562_14 (sequence is synthesized)
gctgagcaaggtgggcatctctggtatcttaattcaggaggcagaatacagcttgagatcaggtgtctgatcaaagaacttgaacttgatctggagggctctggggagccatggaaggtt

SEQ ID NO: 912491 - DNA, 120 bp, Artificial Sequence
  ENSG00000226562_15 (sequence is synthesized)
ctggataaaggagggtcagtcagccacgttttagaaatgactgtggaagtcttcctggaaggagtgaacaagagccaggagaccagggagggagcttgtggggcaggtctggagatggca

SEQ ID NO: 912492 - DNA, 120 bp, Artificial Sequence
  ENSG00000226562_16 (sequence is synthesized)
agggagggatcctgcttggatgaaaagtcttcagggaccatctcaggttacactcaggtgccctctgagttagtgtgttctaagtaaggggttttaagcctcctattgtggcttatccct

SEQ ID NO: 912493 - DNA, 120 bp, Artificial Sequence
  ENSG00000226562_17 (sequence is synthesized)
tgcatgttcccctttcctgctgaaaagcagattccccaatgagcagcagaatcctgtttctccctgcaggcccctctgctccatatgagtggtgttttgtgggattcctcccttggtttt

SEQ ID NO: 912494 - DNA, 120 bp, Artificial Sequence
  ENSG00000226562_18 (sequence is synthesized)
ggatgagaacaccctttcccgttccacagggattgtttctgtggaccttaccccaggttttcccctggtcgggcaccgggcaggtgggggtggtgggaccaactctttagaaccagcaat

SEQ ID NO: 912495 - DNA, 120 bp, Artificial Sequence
  ENSG00000226562_19 (sequence is synthesized)
gtcaaacagatcccactcaggggaagttcatgctaagtgtcatgggtcctatggaattttctgaagctttccttttctcccccaccttcaaccagcttatctgatctcctgggatctcta

SEQ ID NO: 912496 - DNA, 120 bp, Artificial Sequence
  ENSG00000226562_20 (sequence is synthesized)
ggtaatgtctttcattaccaccaccatctgacctagtcttatgacctgttagcttccttcatcagacatgagcaccaggatggcaggggcctcatctgtcttgttcctcctgtggcctgg

SEQ ID NO: 912497 - DNA, 120 bp, Artificial Sequence
  ENSG00000226562_21 (sequence is synthesized)
gtcctagcaccatgtctggtacagtgtagatgctcaagggaagtttactgttgaagaactgtctacctgggagaggttactgttagtctaagctgcactatttggtaaaccccttgatgt

SEQ ID NO: 912498 - DNA, 120 bp, Artificial Sequence
  ENSG00000226562_22 (sequence is synthesized)
ctgcgcccggccgatatcatctttctagagccaacgacaagagcagcacttatttcctgtaccatgaatttgtgggatgattcagaccaaattcctcagccctcttcaggacattttggc

SEQ ID NO: 912499 - DNA, 120 bp, Artificial Sequence
  ENSG00000226562_23 (sequence is synthesized)
taactgaggtcttcttgtcatgttggagaaagggagcaagatggggattctgcacaactcaagccccaacatgtggggacagactcaagtagatcaccactgaggctttttgtggtaatg

SEQ ID NO: 912500 - DNA, 120 bp, Artificial Sequence
  ENSG00000226562_24 (sequence is synthesized)
tggatactgggaagcctgaggaaggctgtggccacaaacaggctcattgaatttaccccttgaaatctgcacagaacttggacagctcactccccgatgagccaccacatttatacctgc

SEQ ID NO: 912501 - DNA, 120 bp, Artificial Sequence
  ENSG00000226562_25 (sequence is synthesized)
agctatgacctttctcttgagcctcagacccttatatcctcctgagcactggttatttctactttgatatttaaaaggcccctgaaaactaactcctctgaaactgttcatgtggacaat

SEQ ID NO: 912502 - DNA, 120 bp, Artificial Sequence
  ENSG00000226562_26 (sequence is synthesized)
tgacgtgtcagaaccaaaccttagacttctccaaacttactgtccctcagtacccctttgctgtgaaagcaacatcatcctgacaggtgttcagaatacagctttgtggtatttcttgac

SEQ ID NO: 912503 - DNA, 120 bp, Artificial Sequence
  ENSG00000226562_27 (sequence is synthesized)
aaaaggatgattttggagctgtaggattgaatgactggcctactgcgttttggacattcatgtatcctagcaggacaaacaggccaggtggtgtcaggagcccaggtctccagctggagg

SEQ ID NO: 912504 - DNA, 120 bp, Artificial Sequence
  ENSG00000226562_28 (sequence is synthesized)
gggtacaggcacccagtgttgtggcctggcaccactggcctctcagagggtgggtagcacactgtccttacccggaggacagcaggcctgatcaccagcttttctacctgtccctgtaag

SEQ ID NO: 912505 - DNA, 120 bp, Artificial Sequence
  ENSG00000226562_29 (sequence is synthesized)
ctctatggaccctgcatggaattgccccatgtttctgtttgggcaccactgaggaaggaagcatgaaggatgcacagatcctggtcagagtaaaacattccatgggaactcgggctgtga

SEQ ID NO: 912506 - DNA, 120 bp, Artificial Sequence
  ENSG00000226562_30 (sequence is synthesized)
cttatctgatctcctgggatctctactaggatgctggcagcccagccagctggtctggccctggacgtgccttcaggtgctggttatgctttatgacctgtgttgtggtgagtgataagc

SEQ ID NO: 912507 - DNA, 120 bp, Artificial Sequence
  ENSG00000230186_0 (sequence is synthesized)
cagctgctcttgatgaaaacggcagtggctctgaaaagagcctttagatcgaccacttaaaaatataccttaggcccgctccccgcggatgcggctgaccaactggatgtccttgggcat

SEQ ID NO: 912508 - DNA, 120 bp, Artificial Sequence
  ENSG00000230186_1 (sequence is synthesized)
gatggtcacgcgcttggcatggatggcgcacagataagaaaactgagtctcagagaaattatggcttgtcctggcttttcccaggcaagtaaatgcaggccacagtctgccagctgccca

SEQ ID NO: 912509 - DNA, 120 bp, Artificial Sequence
  ENSG00000230186_2 (sequence is synthesized)
tcattattataggaagcatctggccaaggaccaccaacatcttcctgtcctgcccctgaagctgtgcctagaggaggtctctcatagatgcccacgttctcttgacaagatatttgggga

SEQ ID NO: 912510 - DNA, 120 bp, Artificial Sequence
  ENSG00000230186_3 (sequence is synthesized)
ggacccctggctactgtcactgctgccatgcctgccaggaggaggcaccttcctgacacttcactgctgctgctcagcaggcctgccaagtggttctgctgtgttctaggagaaacagga

SEQ ID NO: 912511 - DNA, 79 bp, Artificial Sequence
  ENSG00000230184_0 (sequence is synthesized)
ttttttttttttttaaatctccacttccattttcaaacaaaatttcctttgagatttttttccccctctttgggaatag

SEQ ID NO: 912512 - DNA, 76 bp, Artificial Sequence
  ENSG00000230184_1 (sequence is synthesized)
gtgggaggattgcttgagcctaggaagtcactacaaagtgagaccctgtctcaaaaaaatttatcatggcatgaca

SEQ ID NO: 912513 - DNA, 120 bp, Artificial Sequence
  ENSG00000230184_2 (sequence is synthesized)
agtgagaccctgtctcaaaaaaatttatcatggcatgacaaatgctgtgattcggtgtactgattgggtccgaaacatttgctacaaatatagaaaatgtatatactcctaagcataaat

SEQ ID NO: 912514 - DNA, 120 bp, Artificial Sequence
  ENSG00000253720_0 (sequence is synthesized)
aggaagtgagggcgccgcggacctgtccggccgtgcgcatgcgccgcacgcccgccccgcaagtttatcaacctttcttaataaaggaacgtcagccacatcgctgttaaaggctatata

SEQ ID NO: 912515 - DNA, 120 bp, Artificial Sequence
  ENSG00000253720_1 (sequence is synthesized)
acactccgctgtgcagctcaaccatgaagtgttgaatgattctggagttcagctgaagggaggtttcttcaatgtcaataaaggaaaaggcacaggcacaggagggcgccacctgaagga

SEQ ID NO: 912516 - DNA, 120 bp, Artificial Sequence
  ENSG00000253720_2 (sequence is synthesized)
agggacaagatgccataaaatcatagatggctccagaggaacggaagggagaaaaagggtgggccgttcacttctgagcttcaccccactgtgaccccaaaacctatggagagaaatacc

SEQ ID NO: 912517 - DNA, 120 bp, Artificial Sequence
  ENSG00000253720_3 (sequence is synthesized)
atcattagaagacaaaaggatttaatgtgaaatataatgacagaagaactattaccaccaatatctctgatcaattgcttagtttctgccattattacagaaagtgatttctacccattt

SEQ ID NO: 912518 - DNA, 120 bp, Artificial Sequence
  ENSG00000253720_4 (sequence is synthesized)
ataatgcaatccttacaacattatgaaagatattttattacttccctgttttcagatgagaaaatggagggacaaacagttcaagtactttgccataggttacatacctacgaggaggtg

SEQ ID NO: 912519 - DNA, 120 bp, Artificial Sequence
  ENSG00000253720_5 (sequence is synthesized)
aaccaggattctagaccaagtcttagctccctgctttgcataaatcattccacctgccttgcttctccagcccgttttcctttctgtaaacattaactaaatccctcagtgaccaagctc

SEQ ID NO: 912520 - DNA, 120 bp, Artificial Sequence
  ENSG00000253720_6 (sequence is synthesized)
cctgggcaaaaagagcgaaactccatcttaaaaaaaaataataataataatacactactcatctataaaacagccacaattatcacctacttcactgtgttattgtgagcactgactaca

SEQ ID NO: 912521 - DNA, 120 bp, Artificial Sequence
  ENSG00000253720_7 (sequence is synthesized)
aaattgccaattccaactgtctttggctataaaaagcaacaattacataggaaacataatcagtaaaagtttgggtaaaacttaaatgtttggtaaactcttaaataaatgtatgtacct

SEQ ID NO: 912522 - DNA, 120 bp, Artificial Sequence
  ENSG00000253720_8 (sequence is synthesized)
gattatcttggcttttgacatttgcttttttttcttttaatttgagagtttggggcatttttgttgacaattgctgttttaatattcaaactcgcaaagttgtgtatgatagaagctgac

SEQ ID NO: 912523 - DNA, 120 bp, Artificial Sequence
  ENSG00000253720_9 (sequence is synthesized)
tgtgtatgatagaagctgacagtcagaccccgggcttggtcagccttaagttttaatcccttcattttctcatctataaaataaagacagtgtccgggcactgtggctcacgcctgtaat

SEQ ID NO: 912524 - DNA, 68 bp, Artificial Sequence
  ENSG00000253720_10 (sequence is synthesized)
cagcctggccagacgtgcacctgtaatctcagctacttgcgaggctgagacaggagaatcacttgaac

SEQ ID NO: 912525 - DNA, 75 bp, Artificial Sequence
  ENSG00000253720_11 (sequence is synthesized)
gaggtggaggttgcagtgagaatctcaaagaaaaaaaaaaaaatgaagaaactaatggtactcattgtcagatgt

SEQ ID NO: 912526 - DNA, 120 bp, Artificial Sequence
  ENSG00000253720_12 (sequence is synthesized)
aaaaaaaatgaagaaactaatggtactcattgtcagatgtaaattatttcatgtagagtacttagcacagggcacagaaaatttaagagctcagtaaatattaacattttctattactta

SEQ ID NO: 912527 - DNA, 120 bp, Artificial Sequence
  ENSG00000253720_13 (sequence is synthesized)
ttattattgtttttattaacagacttgctttcattaagatgctgttggtataaagctgcccactgcagcattatttataataaaagccagacacaaattaaatttcccactatagggaaa

SEQ ID NO: 912528 - DNA, 120 bp, Artificial Sequence
  ENSG00000253720_14 (sequence is synthesized)
gggcatagtaggattctgaaagaaccatctttagaattaatgaaaatcactttaattacaatgtaagcccctgctttgctacttgggggcagtacgattttgagcaagtcatttattttc

SEQ ID NO: 912529 - DNA, 120 bp, Artificial Sequence
  ENSG00000253720_15 (sequence is synthesized)
tctggacctgtttcctcacctcagaaatgaagggtttgctctcaatgactcccatgtcttctcatgatttaaagttacatagtcctggccagacagggtggctcacgcctataatcccag

SEQ ID NO: 912530 - DNA, 120 bp, Artificial Sequence
  ENSG00000253720_16 (sequence is synthesized)
gagggcgccgcggacctgtccggccgtgcgcatgcgccgcacgcccgccccgcaaggatgaatgaacactgaatcctttagaaaacagctccaaacatttccaccatagtcagggactcc

SEQ ID NO: 912531 - DNA, 120 bp, Artificial Sequence
  ENSG00000253720_17 (sequence is synthesized)
agtgttgccttagggatgaggactccatggatatttaacgaagaaaggggaagaggacaggggacagaggcctgagaatcccctgggaagggctagaagctcatccagcattgaaagatg

SEQ ID NO: 912532 - DNA, 120 bp, Artificial Sequence
  ENSG00000253722_0 (sequence is synthesized)
aaaaagaatggcaatttgcaagcaaaagaaaaccagattcacattctactatttacatttgttctattcacaggtcaaaaataaaatatttcattagataatttaaaaaaaaaacacttt

SEQ ID NO: 912533 - DNA, 120 bp, Artificial Sequence
  ENSG00000253722_1 (sequence is synthesized)
tttaaaacaaatgtattttactccatcaatactgcaaggaagataactgaatttagaaatgctctctctctacagcaaagttaacttaacttttcggggcccaactggcctatcatttag

SEQ ID NO: 912534 - DNA, 120 bp, Artificial Sequence
  ENSG00000253722_2 (sequence is synthesized)
atcaggtatgattctgtaaccatggaaaaagtctaaaatttcattcacattagctttaaatggaagattcattatcttaataggagttactctacctgaaccacaatttatttttggatc

SEQ ID NO: 912535 - DNA, 120 bp, Artificial Sequence
  ENSG00000253722_3 (sequence is synthesized)
aggcataaatctcccctcaggaaaacttcccatattatgctttccaaaatcaaacttgccaccttctgggcgaccaaaattcacaaaagggcggtgacttctaaaatcatcagaagggca

SEQ ID NO: 912536 - DNA, 120 bp, Artificial Sequence
  ENSG00000253722_4 (sequence is synthesized)
tctaaaatcttcctcctgggggctcctgaagtcctcatcaggagggtgcctaaagtcttcatcaggagggcccctgaagtcttcatctggtgggtgcctgaaatcttcctctcgggagcg

SEQ ID NO: 912537 - DNA, 120 bp, Artificial Sequence
  ENSG00000253726_0 (sequence is synthesized)
cagatgccaagaggaagcctctgttggaagtcactgcagccaagtggattctatctggctggtctcaagctcctgagctcaagcagtcctcccaactcagcaagggattccaagagtgac

SEQ ID NO: 912538 - DNA, 120 bp, Artificial Sequence
  ENSG00000253726_1 (sequence is synthesized)
ccactcattctcttatgtggacatcacaatttacctgttctcccagcagtggatatttgtgttgtttccagtcacttgctgttatctcagtgcttataaatgattgtttctcttacaccc

SEQ ID NO: 912539 - DNA, 120 bp, Artificial Sequence
  ENSG00000253726_2 (sequence is synthesized)
aggaattccattcctgggttatgggttatgcttattatgctcacctgcacagttgaatttcaaattgttttccaaagtgattagacctccttctccttcatcagcaatgtatcccattgg

SEQ ID NO: 912540 - DNA, 120 bp, Artificial Sequence
  ENSG00000253726_3 (sequence is synthesized)
ttctttgtatgtcaaacttagcagtctaaggaataattaatgtttgcatcactgaactgattgggaatacttgtttctgtgagttacttacttttcaaggtctccagaggagactttcag

SEQ ID NO: 912541 - DNA, 120 bp, Artificial Sequence
  ENSG00000253726_4 (sequence is synthesized)
gccttagtaaggtcattacagcacattaattttgtcttctgggtttctttacttggttttactttagtttgctcacagatgccccttccaaccaagcaccaggtgcttaaggttttcttc

SEQ ID NO: 912542 - DNA, 120 bp, Artificial Sequence
  ENSG00000253726_5 (sequence is synthesized)
cataattagttccatcaacagtttttgttttttatttcctgaatacacgtgcgttaatggctacatgtactttcctacttatacaggggcaataaccaccttatcaacagtaataatatt

SEQ ID NO: 912543 - DNA, 120 bp, Artificial Sequence
  ENSG00000253726_6 (sequence is synthesized)
gactaacatttataaaaatcaaatgatatcagtcactcacttatccttctctccagtttcagccaggaaacaagtgaaatcgagatatgatatcgcatttctgcttgtaaaattgcgttg

SEQ ID NO: 912544 - DNA, 120 bp, Artificial Sequence
  ENSG00000253726_7 (sequence is synthesized)
ccagttactcctggagaaacttaagaaggctaccctgcctgtatcaggggtcaggccctgacttgagaagcttgaagcttggtagcaagaagctaaggaggaaaggatattcagcttcaa

SEQ ID NO: 912545 - DNA, 120 bp, Artificial Sequence
  ENSG00000253726_8 (sequence is synthesized)
gggatgcaggtaggaagcaggagacagagacagacagacaagagttggagacttaggatccctacatttcagtgtagcaaccccatctctggaagccatggcccattgcaagccagactc

SEQ ID NO: 912546 - DNA, 120 bp, Artificial Sequence
  ENSG00000253726_9 (sequence is synthesized)
acaacaatcacatagctcttccctcttcctatggaggaaatggaccactctattaaacactctgtatacattatcctatttaatttgtaaaacattcttatgcatggatattaatatttc

SEQ ID NO: 912547 - DNA, 120 bp, Artificial Sequence
  ENSG00000253726_10 (sequence is synthesized)
attacaatgttatagatgaagacactaaaagattacagacatactgataatttcatagctaaaagtgatagagctgaaatttgaactcaagtctattgacaacagaacccaaaagtttag

SEQ ID NO: 912548 - DNA, 120 bp, Artificial Sequence
  ENSG00000253726_11 (sequence is synthesized)
cctcttccctatactgcgtcttcttaacaggaaccttctggaaaccctgccttcattcagcaaactaactatgctaaggtaaagacctggcaccaaggcaagtcataaggagatgcctca

SEQ ID NO: 912549 - DNA, 120 bp, Artificial Sequence
  ENSG00000253726_12 (sequence is synthesized)
ggacttcttggttcccctaaaaatatatattgtgcaatcgtctttgacttcagaattccaaattcagcattgaaaaactagcttagtaatgtttccacttagacattttagtacttaatt

SEQ ID NO: 912550 - DNA, 120 bp, Artificial Sequence
  ENSG00000253726_13 (sequence is synthesized)
aaatgaatacccatgtgaggcttattatgtgcctggaactctttggattgccatctgagcccccacctacatgcacatgtacacacatgaacacatatacacatatgcccatacacacac

SEQ ID NO: 912551 - DNA, 120 bp, Artificial Sequence
  ENSG00000253728_0 (sequence is synthesized)
ggctgcctcagctgggcccctgggcagactccagtctcacgcctgggtcccgacccgcctcaggaaactgacctgtgcccctcggagccccgcagtgtgcgtgcccgccgcctccagcca

SEQ ID NO: 912552 - DNA, 120 bp, Artificial Sequence
  ENSG00000253728_1 (sequence is synthesized)
ctccaggcctccagcccatctgccagtgttcaaagctgtgtgtggccagggacagctggcttcacccgagcatctcctacacagtgtggcttggctcttgtcgaagtcatataaaatagg

SEQ ID NO: 912553 - DNA, 120 bp, Artificial Sequence
  ENSG00000253728_2 (sequence is synthesized)
tcaaaggtgggcagggtcccccttggggctcccagctgtgtgtggccagggacagctggcttcacccgagcatctcctacacagtgtggcttggctcttgtcgaagtcatataaaatagg

SEQ ID NO: 912554 - DNA, 120 bp, Artificial Sequence
  ENSG00000189238_0 (sequence is synthesized)
ctctccgtccccggctccgccagcagcagtcccggagagatttcccctccccgccgcccgcgctctctctcctcctgcgcccaggccggtctccggctccggagtcggacggcgacggtg

SEQ ID NO: 912555 - DNA, 120 bp, Artificial Sequence
  ENSG00000189238_1 (sequence is synthesized)
cagatgagggcgcacaggggacggtcctggagcccgggaagggtgcgagatggagacggcggttcagaaaagttgtcaggtctccagcccgggcagtggcgggagctggagccgcggtgg

SEQ ID NO: 912556 - DNA, 120 bp, Artificial Sequence
  ENSG00000189238_2 (sequence is synthesized)
agacgactcgaggggacgcagcccgcctggcacaaagggccacgggcgcgagggactcgatgagctgggagatcgcggccccggcaggtgcggcgcgctggggcgggtgcttggcgcctt

SEQ ID NO: 912557 - DNA, 120 bp, Artificial Sequence
  ENSG00000189238_3 (sequence is synthesized)
ccccggcacaggacatactttattcagctgggtgctgaaaaagaatcttggaaattaggaaactgaatgaggcctcatttcacactcagaatgtgggttgcaatagtcacttcctctgct

SEQ ID NO: 912558 - DNA, 120 bp, Artificial Sequence
  ENSG00000189238_4 (sequence is synthesized)
gctgggaaagaaagaattatactaccttttgaattttggattaaggagagaggtgttggcttgtcaaactaccatgtattcctcaagacatatttttgtggctttataaaattcaatata

SEQ ID NO: 912559 - DNA, 120 bp, Artificial Sequence
  ENSG00000189238_5 (sequence is synthesized)
tatgtctaaattcaaaaatattttgttgcaatctggcccttggacaaactgaggccctagcaactgatgtttatggctttccgtagaacctttcagataaaatttacacagcattttact

SEQ ID NO: 912560 - DNA, 120 bp, Artificial Sequence
  ENSG00000189238_6 (sequence is synthesized)
gcagctatttcacacaaagcagaggattttgccacaaaactgaaagaaaaaagaaactgcattcttaaatttttcataaatcaaaaggtataaaaatatctacctaaacgataaaggaga

SEQ ID NO: 912561 - DNA, 120 bp, Artificial Sequence
  ENSG00000189238_7 (sequence is synthesized)
tgagaaaccccacccatgatgggaagaaagcctatttcagttttgcctttacttcaagttcttttttccatatctggaatgcaatcagaattttaatcttgccttgggttcctcctggat

SEQ ID NO: 912562 - DNA, 120 bp, Artificial Sequence
  ENSG00000189238_8 (sequence is synthesized)
ttggggagaagacaaaacctgaaaatctctaatctgcatgtgttcagctgcgtatcttctggatacggaaggatcacactgcacagagtgctggacttgcaggagccccgcttctcaacc

SEQ ID NO: 912563 - DNA, 120 bp, Artificial Sequence
  ENSG00000189238_9 (sequence is synthesized)
tccatcgctttatgaatgaattcaccagaaagaaaaggaagaatcaacactttcagagatggagcctgttgagccacagtaccaactagtcaatgctgaatcgacttctccctttctaca

SEQ ID NO: 912564 - DNA, 120 bp, Artificial Sequence
  ENSG00000189238_10 (sequence is synthesized)
ttgcctgagagaagtcattggggaatactctagagtcaagggattggattgtggattgcattggtggttttcctcagtttcctcatcttctccacaagtttctacatatcgaatgcagag

SEQ ID NO: 912565 - DNA, 120 bp, Artificial Sequence
  ENSG00000189238_11 (sequence is synthesized)
cagcccttcttcaaaggacctcctacggaagctgctaaggaactcagtctgtagctctgcgtggagccatgtgtaaacactgaactgagacctgccacctcctactacctaagggcccat

SEQ ID NO: 912566 - DNA, 120 bp, Artificial Sequence
  ENSG00000189238_12 (sequence is synthesized)
tttcatctgatatcatcccccagaaacaaactcatgatgacttccatgttttttttagattagatacatggagaattttcctttcccttagaattaaaatcctgcattctaattttcagt

SEQ ID NO: 912567 - DNA, 120 bp, Artificial Sequence
  ENSG00000189238_13 (sequence is synthesized)
aagcttttttatttctgaataattttaaatttaaagagaagttgcaaagatagtatagaatgttcccttatacctgtttttatttagagtgatgttcccaggagaaatgataatgcagca

SEQ ID NO: 912568 - DNA, 120 bp, Artificial Sequence
  ENSG00000189238_14 (sequence is synthesized)
atggacaagaacaggaacaagagacagtcttaccatcttcttacaatttatagatgggacagtggaaagagaagccacatcggggttgggcatgcagagacctggtcctaaatctgtgtg

SEQ ID NO: 912569 - DNA, 120 bp, Artificial Sequence
  ENSG00000189238_15 (sequence is synthesized)
acttttgcgaaatccttttgcctcacagagctctaggttcttatctgtcaaacaggaaccagaccatcagatccgtagagatccaaccaatgaaggagacttcgaaaacttcacattgcc

SEQ ID NO: 912570 - DNA, 120 bp, Artificial Sequence
  ENSG00000189238_16 (sequence is synthesized)
gtgtcaatgtgaggttgctggatggttatgacaagaaatcacattaaattcactggggtaacattgttcatgaaacgggataatgtgtttcagcgatgaaccacccatggccttactaca

SEQ ID NO: 912571 - DNA, 120 bp, Artificial Sequence
  ENSG00000189238_17 (sequence is synthesized)
gacatatttccactttgaaaatgtgtgtgagtgtacatgtctgtgtgtgaggcagagattagaaagtgtaaatgtgtgcgttttcattttacacatcttacattttcctttaatttgttt

SEQ ID NO: 912572 - DNA, 120 bp, Artificial Sequence
  ENSG00000189238_18 (sequence is synthesized)
gaaagcctgttttgtttgtggcttccattcctggaagtcccatgagttgttagtggtgaagatggaacagatgtgtccaacccgggggactcctgccctcagggactgagcagctgcaaa

SEQ ID NO: 912573 - DNA, 120 bp, Artificial Sequence
  ENSG00000189238_19 (sequence is synthesized)
cctctctctcatctgattccactgtttcttccacatgtacacatcatgagaaatattgttcaatcaatatcttcccttaaatcaactcatatgcttatttacatgaatttacctaaaaca

SEQ ID NO: 912574 - DNA, 120 bp, Artificial Sequence
  ENSG00000189238_20 (sequence is synthesized)
gaaacttgatatcacttctgtaaatgaaaaaattaaactttctggctttaaataaagcataacaataataatcatgtcaaaattacctctccagtgttatgaagttcaagttaggggtga

SEQ ID NO: 912575 - DNA, 120 bp, Artificial Sequence
  ENSG00000189238_21 (sequence is synthesized)
aattgagacttccttctgaaattaatcagaaagtttaaaagagagttcttcctcattttgttaattactttcacatattaatatatattaacattttatatggtaatatgtttttgacat

SEQ ID NO: 912576 - DNA, 120 bp, Artificial Sequence
  ENSG00000189238_22 (sequence is synthesized)
tcccctctaaaatgttctcatgggctggcagtggtttcttatattatgggagccctactctttactgaattttgtccttctgtcatagggtaaaactttttcgtctctacagaactctct

SEQ ID NO: 912577 - DNA, 120 bp, Artificial Sequence
  ENSG00000189238_23 (sequence is synthesized)
ccaagtgcacacccatagattggtttgcttgtggaatcctagcatatcagaaatgaaggaatctcagaaattgttttcatcaaacacctcatatgcagaaggcaaaatgaaggttcagag

SEQ ID NO: 912578 - DNA, 120 bp, Artificial Sequence
  ENSG00000189238_24 (sequence is synthesized)
cagaaatgatttgtccaaggatgcaacactcatctgcagcagagggaagctgagctctgcagacccacctagcactgcagaggcagccctctaggacaaggcttcataaaaaagtgactt

SEQ ID NO: 912579 - DNA, 120 bp, Artificial Sequence
  ENSG00000189238_25 (sequence is synthesized)
tatgagttggctccataaaaaagatacagattaagaaattgtttaaacagtgatctctatataattactcttttatttaaaagtatgggctgggagcggtggctgacgcctgtaatccca

SEQ ID NO: 912580 - DNA, 120 bp, Artificial Sequence
  ENSG00000189238_26 (sequence is synthesized)
ctctgtctcaaaataaataaataaataagtattcctttcccagtcttttgctgtgtggagccaagatttttatttgcagaagtctgcagggctggtgtgatctctttcagtcataaacca

SEQ ID NO: 912581 - DNA, 120 bp, Artificial Sequence
  ENSG00000189238_27 (sequence is synthesized)
taaccttcctaacgggccatctgcaatatccagttgtgttttctcgaatgtggggaaatgacttaaagacacttcagaatcaattggaggaagggaccgttccagagcttaattttccgt

SEQ ID NO: 912582 - DNA, 120 bp, Artificial Sequence
  ENSG00000189238_28 (sequence is synthesized)
tgtgttttagagttctgttgtccacacctaatttgtcagaaatggttttagtcatgttgttttgtagaatctttccacagcatttatgctccttttcatagaagcggctcaatctgctca

SEQ ID NO: 912583 - DNA, 120 bp, Artificial Sequence
  ENSG00000189238_29 (sequence is synthesized)
cggatttatatagtatagattaaaggagggcagtgtaataatgccataacagaggctggtactaagcttaaagcacccctgatgggagcagaaatgccctggcagctggagagagagcca

SEQ ID NO: 912584 - DNA, 120 bp, Artificial Sequence
  ENSG00000189238_30 (sequence is synthesized)
gcacctagagcgagcgccccctgctggccatggaggggaatggagggtgtgggatcccctgcaagcaggttaagtggaggttgtttcaaaagcttcttctctaatctttctggatactac

SEQ ID NO: 912585 - DNA, 120 bp, Artificial Sequence
  ENSG00000189238_31 (sequence is synthesized)
agatgatttacatgaaactcagtgtgatgctttaatagaccaatgagatcaagttaacaaatagatcctagaaattatactatttttaatgtttgtgaagtacctgctcagccaggtgtt

SEQ ID NO: 912586 - DNA, 120 bp, Artificial Sequence
  ENSG00000189238_32 (sequence is synthesized)
gatggaggacagaggattaagaggaagccttgagttacagggaccgaagcagctgctgtgtggattcagatctgggcgataccgccccaaggctcgttcttccagcatttctatcattct

SEQ ID NO: 912587 - DNA, 120 bp, Artificial Sequence
  ENSG00000189238_33 (sequence is synthesized)
ctctctctgtcttataggcaaatgagatgatgtttccgggtcaatacatgacgggattaactgggatagagaaacgtggttttaggatgtgagtctccaaaatttctatggttcaaatgt

SEQ ID NO: 912588 - DNA, 120 bp, Artificial Sequence
  ENSG00000189238_34 (sequence is synthesized)
gggatctcacatgatggtcttgggcaaagagaatatcattgattctcaagatttaaacacaggagagcctctcactcctcccaaagctacgaaggggatggagatggcccagggacattc

SEQ ID NO: 912589 - DNA, 120 bp, Artificial Sequence
  ENSG00000189238_35 (sequence is synthesized)
gaatcggaactcaagatcagtattggagaccccaccctgtgacatagacatcatggacaagttccttgaatgttggagctttattttcctatttgataaaatgagaattatagcttctgt

SEQ ID NO: 912590 - DNA, 120 bp, Artificial Sequence
  ENSG00000189238_36 (sequence is synthesized)
ggagggcacgggggtggtctctgaggatcacaggagataatgcacatcgaaatgctttgaaaagcatcaagtactgaaaaatgtccagcttagctattagtaacagtgactgtgttggga

SEQ ID NO: 912591 - DNA, 120 bp, Artificial Sequence
  ENSG00000189238_37 (sequence is synthesized)
gtctgggctttctcctgtccagctagaaacacttttattgtgctatttttagtgttacacctgcacatgcttgtttgagcaggtattaatggtataaagatgccaggctcaggcccacag

SEQ ID NO: 912592 - DNA, 120 bp, Artificial Sequence
  ENSG00000189238_38 (sequence is synthesized)
tgggccagttgttctataatttgttctataatagcataacttgacaacagctaaatgccataaaatgaattgaggatggggtgtgggggtgaagacactgcctaactcctccccactgtt

SEQ ID NO: 912593 - DNA, 120 bp, Artificial Sequence
  ENSG00000189238_39 (sequence is synthesized)
ggggaatgatatccagcctgtcacccactgatggcaggttatgtaggagaagcagatctattaaaatagaagcacagctgcatgccatgattacttctctaaagttattgtctagctctg

SEQ ID NO: 912594 - DNA, 120 bp, Artificial Sequence
  ENSG00000189238_40 (sequence is synthesized)
cacttgatcctcctctgataatactcaagaaatagaacaccaaagtttgcttgttttaaatttggtaattaacgtctgttttgcttacactaatggtttctcgcgggaaggatgcgtgca

SEQ ID NO: 912595 - DNA, 120 bp, Artificial Sequence
  ENSG00000189238_41 (sequence is synthesized)
gaccagtcttggaactaggattggggtggggttcatcccacccagaccacagagactgaaaataagaaaggggtgaggcctaagggacaatcaggatgtttttcagagagaagtgtggat

SEQ ID NO: 912596 - DNA, 120 bp, Artificial Sequence
  ENSG00000189238_42 (sequence is synthesized)
ggcatttcgctgagatgcttcagctcctgctcactctcagccactgtgctgtgtctctgccaccatgacacggaacagctttcaccaaaaaaggaagaatcaacactttcagagatggag

SEQ ID NO: 912597 - DNA, 120 bp, Artificial Sequence
  ENSG00000189238_43 (sequence is synthesized)
attgcctgagagaagtcattggggaatactctgtacacgaattttcactgttggggaaaacaggtattggaagtgatgggtagacctcagtttgtatgcattgtgttaattactatttct

SEQ ID NO: 912598 - DNA, 120 bp, Artificial Sequence
  ENSG00000189238_44 (sequence is synthesized)
agagactgaaaataagaaaggggtgaggcctaagggacaatcaggatgtttttcagagagaagtgtggatgctggacaggaagaaccacagataccagatacggctgcgtatcttctgga

SEQ ID NO: 912599 - DNA, 87 bp, Artificial Sequence
  ENSG00000189238_45 (sequence is synthesized)
taagagatagataatcggcacatataatcagcaatgcactgagaaggagagcaacatttaagcgtaaaaggaagaatcaacactttc

SEQ ID NO: 912600 - DNA, 120 bp, Artificial Sequence
  ENSG00000189238_46 (sequence is synthesized)
tcaggtattgggctttggaaaaggggtggctaaatagaactaaagaccttgtggcactcagcgcccagtggtgcacgaaatatccagttaatgccctcagtgatagccattcgtttttta

SEQ ID NO: 912601 - DNA, 120 bp, Artificial Sequence
  ENSG00000189238_47 (sequence is synthesized)
ccaagggtagtagaagacgaaatgggttcatgctaccatgagttggtttggatactcacagaaagaatggtcccttcaggcattattcaacttccacagctcctgctcactctcagccac

SEQ ID NO: 912602 - DNA, 120 bp, Artificial Sequence
  ENSG00000189238_48 (sequence is synthesized)
agagcaacatttaagcgtactcattctgctgctatgagcgaggagactgggcccaaaggaacaagaatggacacaggaaaggtcagctgaggttatggcaggtatccaggtgcatgaaga

SEQ ID NO: 912603 - DNA, 120 bp, Artificial Sequence
  ENSG00000189238_49 (sequence is synthesized)
tggtggcttggaccaggtggccatggtggagagaacaggaaatgatcatccttaatatgaattaggatgagtgtgattaatagaggaagaatcaacactttcagagatggagcctgttga

SEQ ID NO: 912604 - DNA, 87 bp, Artificial Sequence
  ENSG00000189238_50 (sequence is synthesized)
agtcacactccagggaactcacatgggggctgggcagggggacctaagagatagataatcggcacatataatcagcaagtaaatgca

SEQ ID NO: 912605 - DNA, 120 bp, Artificial Sequence
  ENSG00000189238_51 (sequence is synthesized)
gaggaaggagagctggggaactctgggcacaactttacagcttcgtggttcatattcttttctaggagaaaggaagggtggatgaggccccaatccatcggttggaaataatgggctatg

SEQ ID NO: 912606 - DNA, 120 bp, Artificial Sequence
  ENSG00000189238_52 (sequence is synthesized)
gagttcttccttcttcttctcctccaaccttgcaccagtgcctccaaattggctgaacctgctgaaagccggtgggagagagcctgggaaatgtatttcggaggcatacacaacagagga

SEQ ID NO: 912607 - DNA, 120 bp, Artificial Sequence
  ENSG00000189238_53 (sequence is synthesized)
aggtgtctgggggcccaggacaaaccggcagttgacagcgtagtggcttttcagaaacaagtcttgtcagaaatgtgactttttctggggaaaattggactagaagcgagaacaagaact

SEQ ID NO: 912608 - DNA, 120 bp, Artificial Sequence
  ENSG00000189238_54 (sequence is synthesized)
gttttctgggaattccctctatgggaaagtcatggtggtatcgactgtagattggcagatgacagagggcctctttgagggggtgccagatggctgaggatgcctgaccaggggctgaca

SEQ ID NO: 912609 - DNA, 120 bp, Artificial Sequence
  ENSG00000189238_55 (sequence is synthesized)
tctctgcacacatcctggtggagaggtttccaggctgagcaaggagccagtaacagccatgaagacagcacagaggaagctgtgtcaaaaaatcagaaaccgatatttcagacaagcctg

SEQ ID NO: 912610 - DNA, 120 bp, Artificial Sequence
  ENSG00000189238_56 (sequence is synthesized)
gttacaaaattatgaggaacctttggccctttccttcaccctaagcagtgacatcaacaccatcaccccggatgaatatcagtttacttaccgaggctccttcaagctcttggcaggcaa

SEQ ID NO: 912611 - DNA, 120 bp, Artificial Sequence
  ENSG00000189238_57 (sequence is synthesized)
gaccatggacccaagagggtatgtaactgtgtattgtcagcgactccacacggctacatttcggtatttaatgaggcattgatcttgctggagatttttgaaagtctggccagctggccc

SEQ ID NO: 912612 - DNA, 120 bp, Artificial Sequence
  ENSG00000189238_58 (sequence is synthesized)
attggaaggagacctgagcttggttctctgtgcctgagtcgttggctgtctatgctacaggaactgcctcagctgtggaaatgccatgaatccttttccccgttggccatgcagcaggac

SEQ ID NO: 912613 - DNA, 120 bp, Artificial Sequence
  ENSG00000189238_59 (sequence is synthesized)
acacggtcgtgcacgctgctctttttcctctccgtgtatccggaagatggttccgaatcaactggataggatttttaatttccgaaggcacgagctcccctggcatccgcaaatgtgacc

SEQ ID NO: 912614 - DNA, 120 bp, Artificial Sequence
  ENSG00000189238_60 (sequence is synthesized)
cgcaatttagagaggaagaggagcgcagaccctacctgtccggagtaacggtcaggagagaggtggggaagggctgggcccctctcggtgtcccgggttcccggcagaagtctccagggc

SEQ ID NO: 912615 - DNA, 120 bp, Artificial Sequence
  ENSG00000189238_61 (sequence is synthesized)
acctgagcttggttctctgtgcctgagtcgttggctgtctatgctacaggaactgcctcagctgtggaaatgccatgaatccttttccccgttggccatgcagcaggtaattagctttat

SEQ ID NO: 912616 - DNA, 120 bp, Artificial Sequence
  ENSG00000189238_62 (sequence is synthesized)
agagatgtggggaggatatggcaggccttcaggtctgcgggttgtatcaggggccctgtcacactgccggagtgtttgcattcagggcttcctcaatcctgacagaggcacatttccagg

SEQ ID NO: 912617 - DNA, 120 bp, Artificial Sequence
  ENSG00000189238_63 (sequence is synthesized)
gatgatgtatgtgttccaagcacagctacaaatgagacagttaagtccgtggaagcgctgtgggccgcagtctcctgccagggttcccaagaccctgggagtggcttccttccaatgggc

SEQ ID NO: 912618 - DNA, 120 bp, Artificial Sequence
  ENSG00000189238_64 (sequence is synthesized)
cattagctttcccccgaagctctttgaggcttctctggagccagcttctcttggcaccgccgggctggaggaagcttctcccatagcgcttgtctggcaagcctcacagattcactctgt

SEQ ID NO: 912619 - DNA, 120 bp, Artificial Sequence
  ENSG00000189238_65 (sequence is synthesized)
agaccacagagactgaaaataagaaaggggtgaggcctaagggacaatcaggatgtttttcagagagaagtgtggatgctggacaggaagaaccacagataccagatacggtatctaaga

SEQ ID NO: 912620 - DNA, 120 bp, Artificial Sequence
  ENSG00000189238_66 (sequence is synthesized)
atgctatggaaaaacaccacctgtcccctaccttccagctttgtacttcagaaaaactgacccttttttaggcctcggtagggggcctcctggcataggctgggctactcaatatagtct

SEQ ID NO: 912621 - DNA, 120 bp, Artificial Sequence
  ENSG00000189238_67 (sequence is synthesized)
ttccttcttctactgtgacttgtggaaaaggaaccctaaccagttcttgatggactgaacaacatttaggagatggtgttcttgtcaccttgtggagcttaagcaaaaagccacaccatg

SEQ ID NO: 912622 - DNA, 120 bp, Artificial Sequence
  ENSG00000189238_68 (sequence is synthesized)
gaaagcaggactgagaaatgaatgaaaaagcatgttggtgccattggttgcacctgaatccatctgagcctgaagccagtctactcctagtgactgcatgttttatagaattcttttaaa

SEQ ID NO: 912623 - DNA, 120 bp, Artificial Sequence
  ENSG00000189238_69 (sequence is synthesized)
agaatccttactgatatacataatggccaaagaagaggaagatcagtctcaattagtgagaagtccaaagcaaatggactctgtggatggtcccatcaaaatgaagtcaaaggttaaggg

SEQ ID NO: 912624 - DNA, 120 bp, Artificial Sequence
  ENSG00000189238_70 (sequence is synthesized)
gtgcactgagaaggagagcaacatttaagcgtgacgccctggggtgctccactgaaggagactactgtgacaccttgcgagcaagcaggcttcctttctgaggttgcaccgagccagccc

SEQ ID NO: 912625 - DNA, 120 bp, Artificial Sequence
  ENSG00000189238_71 (sequence is synthesized)
tggtgcttctgcatcgctttaccttttcaagtataagttacagcagataattcttctgagaatgatctcctaaggcatgtcttcctctttgcatttttatctggaccctgtcccatctat

SEQ ID NO: 912626 - DNA, 120 bp, Artificial Sequence
  ENSG00000189238_72 (sequence is synthesized)
agggtcacattttttattagaaatgttgctgaagatcccctcaaaataacaaatactaccaactagtcaatgctgaatcgacttctccctttctacattgcctgagagaagtcattgggg

SEQ ID NO: 912627 - DNA, 120 bp, Artificial Sequence
  ENSG00000246582_0 (sequence is synthesized)
ctcagcttctgttcctcaaccacggccgccgcgtggatgccgctgcattcggagtcgttttgccacttggtcccagcgccaggcttctcggtcgggagttgacctcagcctttctgtgac

SEQ ID NO: 912628 - DNA, 120 bp, Artificial Sequence
  ENSG00000246582_1 (sequence is synthesized)
ccagttcctggcacccagcaggcgctcggtggacggatgggtggcggaatgaaggacacagaggccactgcggggtctggcctctaagaggcttttacggcctcctccgtcactaccggg

SEQ ID NO: 912629 - DNA, 82 bp, Artificial Sequence
  ENSG00000246582_2 (sequence is synthesized)
cctctaagaggcttttacggcctcctccgtcactaccgggcgagtgattcagccagctctgtcgcccaggctggagtgcagt

SEQ ID NO: 912630 - DNA, 79 bp, Artificial Sequence
  ENSG00000246582_3 (sequence is synthesized)
tttcatcctgcttttggtttcaggtctccatgccagtgaaatgtcacctcaactccaccgtccctggtgtcaggcaagc

SEQ ID NO: 912631 - DNA, 120 bp, Artificial Sequence
  ENSG00000246582_4 (sequence is synthesized)
aatgtcacctcaactccaccgtccctggtgtcaggcaagcccgagggacccaattctgcctttcttctggattttcctaacctgttaagagtcttgaaagtccttaaaccacgggagact

SEQ ID NO: 912632 - DNA, 120 bp, Artificial Sequence
  ENSG00000246582_5 (sequence is synthesized)
atctggcacatgacacgggatgagacttggtgggggtcccacgggggacaggtccttccagcggttcctctgcacccagcgctgcacgggcatggggcgtgggtaatcagcctcccgaaa

SEQ ID NO: 912633 - DNA, 120 bp, Artificial Sequence
  ENSG00000246582_6 (sequence is synthesized)
gccacgcgagtcacggtcctgcctgcgaagaactcccagggcgaccttggggctgaggagtgggcctgcttcggccttctgctcttctgttgtgtggtgaccctcaccagaggacagctt

SEQ ID NO: 912634 - DNA, 120 bp, Artificial Sequence
  ENSG00000246582_7 (sequence is synthesized)
caccatgcccggcctccatcttttactttcaatctatctgaagctttatatttaaggtgcatatattttagacagttaataatttcagcttgcttttttttttcctagttggggaaactc

SEQ ID NO: 912635 - DNA, 120 bp, Artificial Sequence
  ENSG00000246582_8 (sequence is synthesized)
tgctttttaattggattgtttattctggttacatttgttgttgtggtgaaatttggaaagttcaacctgccacaacgtcttcacttactatttttaaaggatattctcaatgagtgtgaa

SEQ ID NO: 912636 - DNA, 120 bp, Artificial Sequence
  ENSG00000246582_9 (sequence is synthesized)
tagtgagtcaacagctttctttcaccatttcacacatcctgagcctccattgttttgagtcagctgtcgttcatatctttgttacctgtgaatgcacaaaatttgctctgtatgatgact

SEQ ID NO: 912637 - DNA, 120 bp, Artificial Sequence
  ENSG00000246582_10 (sequence is synthesized)
atgatgtgtccaggtagggttttctttacatttatttttatgaggggtttatgaactttttgaatctataagttgatgttttttcactacatttgagactatatcaactttttttttctt

SEQ ID NO: 912638 - DNA, 120 bp, Artificial Sequence
  ENSG00000246582_11 (sequence is synthesized)
tcatcttttccagccatttcttcttggttctggttccgtgtgtactgcatgatattgtaccacgtgtcacggagactcgcttccttgttttctttcagtttcattttcccttgcacttca

SEQ ID NO: 912639 - DNA, 120 bp, Artificial Sequence
  ENSG00000246582_12 (sequence is synthesized)
gatggaatgatatctattgatctcttttcaagttcactcattctttcttctgtaatgttcaatctctcttaagaaagtccaaataaatttttcatttcagagagtggaattttcggttct

SEQ ID NO: 912640 - DNA, 120 bp, Artificial Sequence
  ENSG00000246582_13 (sequence is synthesized)
gcccagtctgtggtatttggttatagcagcaggaaatggagtgagacaatgccctttaccagatcaaattccctttcatttctactttgctgtttttaccattaatagaatgtgaaatat

SEQ ID NO: 912641 - DNA, 120 bp, Artificial Sequence
  ENSG00000246582_14 (sequence is synthesized)
aacaataaacaataacgtttgacactttgaaacgtatcaaatgttattttttggcgtctattgagatgattatattgtttttctcttttatgctattcaaatgtttaatcaaattgactt

SEQ ID NO: 912642 - DNA, 120 bp, Artificial Sequence
  ENSG00000246582_15 (sequence is synthesized)
tcaaatgttgcatctaacttgaattcctgggtcaaatttcacttgtcatgatgtattatcttttttacatattgctaggtttgatttgctaatactttcttaagcatatttttgtgtctg

SEQ ID NO: 912643 - DNA, 120 bp, Artificial Sequence
  ENSG00000246582_16 (sequence is synthesized)
tattcatgagagatattgatttatcattgtctttttctgtaatgtctttctaagtttgggtatactcattattctggctttataaaataaactcagtttcctgagagtcttataagatta

SEQ ID NO: 912644 - DNA, 120 bp, Artificial Sequence
  ENSG00000246582_17 (sequence is synthesized)
gaggtgtgggcaggagggagacgcgccaggcagcagccaacggggtggagtccccgggcccagcctcctgcgggagggggctctgctgcctccaggcccgggtcgctcctgcctggcccc

SEQ ID NO: 912645 - DNA, 120 bp, Artificial Sequence
  ENSG00000246582_18 (sequence is synthesized)
ggggaccccgttcttcctccgactccgacgacgggctcctcctgcccggacatgccccgccacaagtgacccgggccaggcacccccgccgcgtccccctctctctctgccccctcccgg

SEQ ID NO: 912646 - DNA, 120 bp, Artificial Sequence
  ENSG00000246582_19 (sequence is synthesized)
caggcaggaccgcggtggggactcacctgcagcaggaccccgacgacgacaaacttgaaggtcttgtggacccggagccgagggctggcttcccgcgccggcctgggtcctggggcgcgc

SEQ ID NO: 912647 - DNA, 120 bp, Artificial Sequence
  ENSG00000246582_20 (sequence is synthesized)
cctgcccgggcccgggcactgggtccgtgctgtcccatggaggtctccatgccagtgaaatgtcacctcaactccaccgtccctggtgtcaggcaagcccgagggacccaattctgcctt

SEQ ID NO: 912648 - DNA, 120 bp, Artificial Sequence
  ENSG00000248636_0 (sequence is synthesized)
acgaggagtgcagaggaggtgctgatgattgcggggagagctctgagagcccgagaaagatggggaaactgaagccctagaggaaaagaagactaaatgtattaccatctgacccacttc

SEQ ID NO: 912649 - DNA, 120 bp, Artificial Sequence
  ENSG00000248636_1 (sequence is synthesized)
ctggccagcctgttcacctgtctgctgttcttcattgaacaagagaaggaatcacaattggtccatgacagtcacggtcatctcattcctcttgccagtggcaggtgtatgtgtgagttt

SEQ ID NO: 912650 - DNA, 120 bp, Artificial Sequence
  ENSG00000248636_2 (sequence is synthesized)
ccaaggggatccaaggactgctgaagaggcatgtctgcacatgtcacctagaacatctccagccatcatgtgatctctgggggaggcattcccaactctctgagagaagcagaccagaaa

SEQ ID NO: 912651 - DNA, 120 bp, Artificial Sequence
  ENSG00000248636_3 (sequence is synthesized)
gatggaaagaaagcacctggctccaggatgatgacattgagccgatgaattaaccacctttgtgctgctctaaccttcagagttcaccttaacatgagaaaataaaacccttattgctta

SEQ ID NO: 912652 - DNA, 120 bp, Artificial Sequence
  ENSG00000248636_4 (sequence is synthesized)
gcagggttgccgagctctcgcaatcgcgctttacctgcccaggcaagccgcggcaagaacgcaaggggcgcgaagataaaccgacactttcccaaccgcttcaccacccctcagcgactt

SEQ ID NO: 912653 - DNA, 120 bp, Artificial Sequence
  ENSG00000248636_5 (sequence is synthesized)
ccgcttccggcgactccatggggaaactgaagccctagaggaaaagaagactaaatgtattaccatctgacccacttcctggccagcctgttcacctgtctgctgttcttcattgatgtg

SEQ ID NO: 912654 - DNA, 120 bp, Artificial Sequence
  ENSG00000248636_6 (sequence is synthesized)
gagcaggagcccccggagcggcagggaaaggaacgtagagcctgcatgctcggggtatgagcttactgcgctcgctagggtggcgcgcactggggctctagaaaagagggttgagaagcc

SEQ ID NO: 912655 - DNA, 120 bp, Artificial Sequence
  ENSG00000248636_7 (sequence is synthesized)
ccgggcaagtgcctaggaaggtcagaggagtcagcaaagtccacggaagaacttccccgggttggagaggaaacgcaccctgggagctggaaagaagaggaaagctagcctgggggaagc

SEQ ID NO: 912656 - DNA, 120 bp, Artificial Sequence
  ENSG00000248636_8 (sequence is synthesized)
tggtctctgggctccaagtgaataactcaggggtgattcttttgcgacccttgatgtttctttacagaaagagaagcttatttttttttccctgctgttcctaagccagaagaatttaaa

SEQ ID NO: 912657 - DNA, 120 bp, Artificial Sequence
  ENSG00000248636_9 (sequence is synthesized)
cctggagctgctggtggccattttgacactcaataaagagctcttgcctgagaatgaaaccatcacaaatggaaatagagacaatgaatataggcagattcttgatgactttgtctaaac

SEQ ID NO: 912658 - DNA, 120 bp, Artificial Sequence
  ENSG00000248636_10 (sequence is synthesized)
tcttggatctagctatgcctgaaaccttagagtttctgtaatgtgaacctctgattccaatattttttgcttgtgtaaatttgagagggttttgttacttgcaactaaaagatttttgat

SEQ ID NO: 912659 - DNA, 66 bp, Artificial Sequence
  ENSG00000248634_0 (sequence is synthesized)
catagaaatgaatctcttctatcaagatgaaaactacaaacgactgtttccatgaaagtgagaact

SEQ ID NO: 912660 - DNA, 120 bp, Artificial Sequence
  ENSG00000248634_1 (sequence is synthesized)
ctatattgtgaacttctacaaataatatgaaagaaacagaagacaggcaacacaatagaaagtgggccaaatcataaagtgggcacttcatgaaaaaggacatccaaattgctaataaac

SEQ ID NO: 912661 - DNA, 120 bp, Artificial Sequence
  ENSG00000240401_0 (sequence is synthesized)
ttatcccaccgaggccaccatagaccagccagccctcagcgtacatgccagctaattacagatgcaggagcaaacccctggcccatacatcaattttaatgtcattgaatacagagaaca

SEQ ID NO: 912662 - DNA, 120 bp, Artificial Sequence
  ENSG00000240401_1 (sequence is synthesized)
aacaaatctcattcactttggtatcggctggagtcaacaaacatttaaaaatcatttactgcgtctgattttggattttgagtcttgctctatggcccagactggagtgcagtggcgtga

SEQ ID NO: 912663 - DNA, 85 bp, Artificial Sequence
  ENSG00000240401_2 (sequence is synthesized)
cacttcaacctccacctcccgggttcgagagacaccggcgcccacaaccacacccggctaatttttgtacttttagtggagacag

SEQ ID NO: 912664 - DNA, 120 bp, Artificial Sequence
  ENSG00000240401_3 (sequence is synthesized)
attacaggcgtgagcccccgcacctggccaagatcagctagattttggaagcattgccttctacagaatccacagtagtccgaagctcttctacggtttttgtcaaactttgattttcca

SEQ ID NO: 912665 - DNA, 120 bp, Artificial Sequence
  ENSG00000240401_4 (sequence is synthesized)
tttttgtcaaactttgattttccatctctagcttcaataatctacttgatgtcaactcattcacctcatggcccagggatttctggggtgctataatattgaaaaatacaccattgtatt

SEQ ID NO: 912666 - DNA, 120 bp, Artificial Sequence
  ENSG00000240401_5 (sequence is synthesized)
tactctttactgtttttactatgtttactctttactatttaaaaagttgagtgtatatgcattgcatcatctgatccttaactttattaaaaattcaatgaggttatataagataaacaa

SEQ ID NO: 912667 - DNA, 120 bp, Artificial Sequence
  ENSG00000240401_6 (sequence is synthesized)
atttcttatttggtctggccatcttctaaagagtttgaacctactgaagaactatcttgactgtcttgatgagggagctgaagaaatccttcactggagtctgagcggaagtggaatcta

SEQ ID NO: 912668 - DNA, 120 bp, Artificial Sequence
  ENSG00000240401_7 (sequence is synthesized)
ttgcctgtggacttccactcagactctcagagccctgctggaggatggagagaccacatggaacagagaagggttatcccaccgaggccaccatagaccagccagccctcagcgtacatg

SEQ ID NO: 912669 - DNA, 120 bp, Artificial Sequence
  ENSG00000240401_8 (sequence is synthesized)
ccagctaattacagatgcaggagcaaacccctggcccatacatcagtgagtagattagcatagatgctcagcaaactcagactcattaggcaaaaagaaatgtttactgtccattaccac

SEQ ID NO: 912670 - DNA, 120 bp, Artificial Sequence
  ENSG00000240401_9 (sequence is synthesized)
taaggttgtctcgttgttaaagagcattatcagtgtcaatagacaactgataaagcatatataaagaaaagagaacaattttttttgtttgtttgttagatggagtttcgctctttcgcc

SEQ ID NO: 912671 - DNA, 120 bp, Artificial Sequence
  ENSG00000240401_10 (sequence is synthesized)
ctgtgaagtatgaagcaaaggtaaaaggcttgcccatattaacagaaatagcaagtggcagaggtattccagctcttattttaactttctttctgcaatattttacccctctggccaaat

SEQ ID NO: 912672 - DNA, 120 bp, Artificial Sequence
  ENSG00000240401_11 (sequence is synthesized)
gatagtatatctgtgtatgatttacctcagaaaattgtgtggctgtacactaatgcagtacacaattaattttatgatgttaaattaaaaagaaatgccattcatcagactattccccca

SEQ ID NO: 912673 - DNA, 120 bp, Artificial Sequence
  ENSG00000240401_12 (sequence is synthesized)
atcccaccgaggccaccatagaccagccagccctcagcgtacatgccagctaattacagatgcaggagcaaacccctggcccatacatcaaaacatacagtaaacagagaaaaaaaagga

SEQ ID NO: 912674 - DNA, 120 bp, Artificial Sequence
  ENSG00000240401_13 (sequence is synthesized)
tctcaggtgagatgatgtatgggaatgctcagcatacagaatgaatggataagaggcctgaaaacataatcctgtaaacaaccatattgaaagagaagacagaagacatcaaacagatgg

SEQ ID NO: 912675 - DNA, 61 bp, Artificial Sequence
  ENSG00000240401_14 (sequence is synthesized)
cattttggaagcattgccttctacagaatccacagtagtccgaagctcttctacggttttt

SEQ ID NO: 912676 - DNA, 79 bp, Artificial Sequence
  ENSG00000240401_15 (sequence is synthesized)
ttccttttctttttttcttttttttaaagagacctcctagctcactgcagcctcaaacgcctggtctgaagggatcctc

SEQ ID NO: 912677 - DNA, 120 bp, Artificial Sequence
  ENSG00000240401_16 (sequence is synthesized)
cctcagcgtacatgccagctaattacagatgcaggagcaaacccctggcccatacatcagttgggtgtggtgactcacacctgcaatcccagcacttcaggaggctgaagagagcagatc

SEQ ID NO: 912678 - DNA, 120 bp, Artificial Sequence
  ENSG00000240401_17 (sequence is synthesized)
atcccaccgaggccaccatagaccagccagccctcagcgtacatgccagctaattacagatgcaggagcaaacccctggcccatacatcaatgaggaaattaactgagaaagaagataca

SEQ ID NO: 912679 - DNA, 71 bp, Artificial Sequence
  ENSG00000240401_18 (sequence is synthesized)
ccatacatcaatgaggaaattaactgagaaagaagatacaagacctgccaaattctttttgcgcgatctcg

SEQ ID NO: 912680 - DNA, 120 bp, Artificial Sequence
  ENSG00000240401_19 (sequence is synthesized)
cccagcctgacctgtcaaattcctgtcaaactcaacttcatgtaacactgaactgtaactatcaagttagaatatttttttcatttgtttgcatatatatagacttcattaatcttaatt

SEQ ID NO: 912681 - DNA, 120 bp, Artificial Sequence
  ENSG00000240401_20 (sequence is synthesized)
tagtgatctcagttaagaagcaatctgaaatatgttttgctttcacttttggaaaaaagtctgaaatagaagtaaatattttgactacaagggaaggacttcaaaggtctgctctatata

SEQ ID NO: 912682 - DNA, 120 bp, Artificial Sequence
  ENSG00000240401_21 (sequence is synthesized)
tgatgctaagaaaaggaataaaagaagaaccccagagttcaataaaattagtaatatccatagatcccttttgtaaaagtctaactaaaagcaatatgctaatctatcataaaataaaca

SEQ ID NO: 912683 - DNA, 120 bp, Artificial Sequence
  ENSG00000240401_22 (sequence is synthesized)
cctcagcgtacatgccagctaattacagatgcaggagcaaacccctggcccatacatcacttgccctgtgctctgtcaaaactaccaggcacaggaaccagggaaggagaagaggaatgg

SEQ ID NO: 912684 - DNA, 120 bp, Artificial Sequence
  ENSG00000240401_23 (sequence is synthesized)
gataaaatgcctcagacaaccacagttccttcccagggttgaatagttttgctttaataaatgcttctcaatttgctatatgcccttgttgggttctagagtcctaacaaggttgttttt

SEQ ID NO: 912685 - DNA, 90 bp, Artificial Sequence
  ENSG00000240401_24 (sequence is synthesized)
ctcagcgtacatgccagctaattacagatgcaggagcaaacccctggcccatacatcaatggagtttcgctctttcgcccaggctagagg

SEQ ID NO: 912686 - DNA, 120 bp, Artificial Sequence
  ENSG00000240401_25 (sequence is synthesized)
acaggtgtgagccactgcacccagcctattctattttttaaaattccgaattcaaactatgcttggtactacaaaggggcagtatatagtttggatgtaagaaataatacataattttga

SEQ ID NO: 912687 - DNA, 120 bp, Artificial Sequence
  ENSG00000240401_26 (sequence is synthesized)
tccgaattcaaactatgcttggtactacaaaggggcagtatatagtttggatgtaagaaataatacataattttgaaaaaacatatatatacacatatatatgtatatactttctatata

SEQ ID NO: 912688 - DNA, 120 bp, Artificial Sequence
  ENSG00000240401_27 (sequence is synthesized)
gactggatgctaaataatagacttgaaaatcagattaactctgtttgatagattgtaattaccatgagagaatacatatttttttaaacctatattgatcatttttaaaattaaaaggca

SEQ ID NO: 912689 - DNA, 120 bp, Artificial Sequence
  ENSG00000240401_28 (sequence is synthesized)
tagaagttaattttttatccagcttttaaggctttagttttccacattatttttatacctcagttgcttttcttttcctttgtttcatacttttcctccatttatctttaagtcaacatt

SEQ ID NO: 912690 - DNA, 120 bp, Artificial Sequence
  ENSG00000240401_29 (sequence is synthesized)
ttggcaaataaagaacagagatatttaagcacatgattcaaataaaaaataacttgcttatttttgtttgttgttaatgtcttattctgtttttacagtcaattatagcctctgatcttc

SEQ ID NO: 912691 - DNA, 120 bp, Artificial Sequence
  ENSG00000240401_30 (sequence is synthesized)
tgctacctgggtggcatcctgttttcctattttataactgtatttatatagtaacattttagttttttgttttcttatatctatattagattgtctatgattcctcttttctccttacag

SEQ ID NO: 912692 - DNA, 120 bp, Artificial Sequence
  ENSG00000240401_31 (sequence is synthesized)
gatcctcccacctcagtctcccaagcggccgggactgcaggtacagccagctaatttttttattttttagtaaagactgggtctctgttacttaggctggtctcgaactcctgagctcaa

SEQ ID NO: 912693 - DNA, 120 bp, Artificial Sequence
  ENSG00000240401_32 (sequence is synthesized)
tgcacccagctaagagatacatgtttaacttttaatgcatccacagcattctagttaaaaaaagcataaaatttagattgaagaaattggagttcaagcagacccattaaatattttgct

SEQ ID NO: 912694 - DNA, 120 bp, Artificial Sequence
  ENSG00000240401_33 (sequence is synthesized)
atcccaccgaggccaccatagaccagccagccctcagcgtacatgccagctaattacagatgcaggagcaaacccctggcccatacatcattttctggaccaccagtgacatgtggaatc

SEQ ID NO: 912695 - DNA, 120 bp, Artificial Sequence
  ENSG00000240401_34 (sequence is synthesized)
ttatgaagacccactgaggctgactcatttcttgaaaatcctttaatttttgactggtttactggtctgttacttgccccaaccaatatttcaacctcaggctatctaagagctgacctt

SEQ ID NO: 912696 - DNA, 65 bp, Artificial Sequence
  ENSG00000240401_35 (sequence is synthesized)
cgctgggtgtggtggtgtgcacctgtgctcccagctagttgggaggctgaggcaagaggatcact

SEQ ID NO: 912697 - DNA, 120 bp, Artificial Sequence
  ENSG00000240401_36 (sequence is synthesized)
aggcaagaggatcacttgagcctgggaggatgaggcttcagtgagctatgatctcgccactgcattccagcctgggagatgagtgagaccctgtctcagagaagaaaaaaaaaaaaaaaa

SEQ ID NO: 912698 - DNA, 120 bp, Artificial Sequence
  ENSG00000240401_37 (sequence is synthesized)
gatgcaggagcaaacccctggcccatacatcaattcattttcattttctaaggaagactgctggattaggagttgggcattctggttcatgagtgaggattttggaagcattgccttcta

SEQ ID NO: 912699 - DNA, 120 bp, Artificial Sequence
  ENSG00000240405_0 (sequence is synthesized)
agacacaggtggctggtcatggagagcccgctgggggaagagcacacagacaggcaccggcaggccattgaccagcgggacaaggtgggctcaatgtcatcacaagggtgcttaagaggg

SEQ ID NO: 912700 - DNA, 120 bp, Artificial Sequence
  ENSG00000240405_1 (sequence is synthesized)
aaagaggaagccatgagggtcagagtcaaaggaagacttgaagatactacactgcggactttaaagatgaaggaaggggcgaaaaccaagaatgtgggaagcctctagaagctagagaag

SEQ ID NO: 912701 - DNA, 120 bp, Artificial Sequence
  ENSG00000240405_2 (sequence is synthesized)
gcaaggaaacaaattttccactagagcctccagaaggaacacagccctgctgacccactgtaatgtctgacctctagatgtgtaagggtagtaagactgaaagtctcagaaaggcactgt

SEQ ID NO: 912702 - DNA, 120 bp, Artificial Sequence
  ENSG00000240405_3 (sequence is synthesized)
caaaactggggtcctcagcagtgagcgaggggtgagagaagacactgtataaacatggcacatcctcctggaaagtcaactttactcaaagatcttggatcttaacattgatagcaaaac

SEQ ID NO: 912703 - DNA, 120 bp, Artificial Sequence
  ENSG00000240405_4 (sequence is synthesized)
aaaagatgcagaggaaaaggagtgagagaggcagaaaactcaagaatgtttaattccttggggctgtttagtcaattgtgagaagaggtggaagatgacctaagactgttgaggtcatga

SEQ ID NO: 912704 - DNA, 120 bp, Artificial Sequence
  ENSG00000240405_5 (sequence is synthesized)
gcttgccccattcttggtgaaaggggagaagatggggctggaagaggccttgagcttcctgtagataacaccatgggctaagatctacatagttacaaagggcatgttattttatgataa

SEQ ID NO: 912705 - DNA, 120 bp, Artificial Sequence
  ENSG00000240405_6 (sequence is synthesized)
aatctgtgaactccagaatgtttgccagttggctgatgtggtaaagtccgaggcatattgtcacttaaaagaatttagagaaaaagatattttggaataaataccatagttttatgttaa

SEQ ID NO: 912706 - DNA, 120 bp, Artificial Sequence
  ENSG00000240405_7 (sequence is synthesized)
gtctatctttagactcctgatgtaatttctgaatcaccaaccatttctgagaccacaagatatttaaaaataagataagaaatattgactgagactccctgaagcctgcaagggaaacga

SEQ ID NO: 912707 - DNA, 120 bp, Artificial Sequence
  ENSG00000240405_8 (sequence is synthesized)
agataccgcggcagaggtttacagtggaatttctctcctgtagttcgtgcacattgaaaatgacatgatctatcccaaggaatagcttaagacctgatccacttaaacagctccaagtga

SEQ ID NO: 912708 - DNA, 120 bp, Artificial Sequence
  ENSG00000240405_9 (sequence is synthesized)
tttatcataaatgtgcttatttggaaggtttagcagtaaccgcttatgggaggtggtggggttaactaccaaaattgtacataacttggatcctgtgtatggcaattaatcaagaaatta

SEQ ID NO: 912709 - DNA, 120 bp, Artificial Sequence
  ENSG00000240405_10 (sequence is synthesized)
tattctttgactttctaacaacccacacagagtgctacatctgtggcatgtttaaagagagagcgagggatgaaatatttcttctaataaaatgctaatggctttgttttggagaaaaaa

SEQ ID NO: 912710 - DNA, 120 bp, Artificial Sequence
  ENSG00000240405_11 (sequence is synthesized)
tgacttagagatgtgataaagagaaacatctattgcattttcttggctcgtgtggaatgacttatcctggaatttagagttgaagataatcctgatgcttcaaagagaagagttggaaca

SEQ ID NO: 912711 - DNA, 120 bp, Artificial Sequence
  ENSG00000240405_12 (sequence is synthesized)
ctaattagttaatttggagcagagtttgaacacagtcctttttctaaacagaggaattgttgaatatgcaactggtcctctgacttaactaattatttaatttggaagttataggttttt

SEQ ID NO: 912712 - DNA, 120 bp, Artificial Sequence
  ENSG00000240405_13 (sequence is synthesized)
tattacttgaggagcagctttctctgaacaaatacagtgtcccctggggtgtccaaattgtgacagaaaagtagcgccagcttgaaactagctagtcatcacatagtggcatcatgtgaa

SEQ ID NO: 912713 - DNA, 120 bp, Artificial Sequence
  ENSG00000240405_14 (sequence is synthesized)
tgaagaatcccccaaatctgtgaccctcttctatccttatgaactaattcaataaataaatgagcactttctcagttcccaaactgagagcagtttaaaaaaataatgagagcacagata

SEQ ID NO: 912714 - DNA, 120 bp, Artificial Sequence
  ENSG00000240405_15 (sequence is synthesized)
tctatttagagagatggcgagatagaggagagagcaagttgcacaccacgaaacaaagggaaagataagaagagagagtgtgtcactacttccccgtggcagaatcacaatcttttttgg

SEQ ID NO: 912715 - DNA, 120 bp, Artificial Sequence
  ENSG00000240405_16 (sequence is synthesized)
atgtcatgttgaaaagattcccaattcgtagttctgtgagctaaagcagatggatgctccatgttggtacaaattcctatttgaagcagtgtggttgcaaagatggggtttgggtcattt

SEQ ID NO: 912716 - DNA, 120 bp, Artificial Sequence
  ENSG00000240405_17 (sequence is synthesized)
gattttctccgaaaaacaatcttgtgtaactgttaaaagaatttataatacccaatgcaatgtatcatccgtgatgcttcttcaaaaatgttaaataaatgctgaaaccagtgtttcaaa

SEQ ID NO: 912717 - DNA, 120 bp, Artificial Sequence
  ENSG00000240405_18 (sequence is synthesized)
gattaagcaaccagttctgatgggtgatcatcttgcttcactttctacaaatataaccagatagctaagaacaaatagctaatattttcaaaagataactacagctgttgagtcctgacc

SEQ ID NO: 912718 - DNA, 120 bp, Artificial Sequence
  ENSG00000240405_19 (sequence is synthesized)
atatgccacacatgctattaggtgattctacatcattatctcacttatgtctgacatcagtatcctgaggtggttattaatggcctcatttttcaaataaggaaactgaggctcgggaat

SEQ ID NO: 912719 - DNA, 120 bp, Artificial Sequence
  ENSG00000240405_20 (sequence is synthesized)
tttaaatgaactccataggtctgtaagtggtggaagtgaattttaagcatgtgtttgtctaacaccaaaacccaatgcaaaaacaatgaaaataaataatccaattcaaaaatgggcaaa

SEQ ID NO: 912720 - DNA, 120 bp, Artificial Sequence
  ENSG00000240405_21 (sequence is synthesized)
agaggtgtggctagatccaacggctctctggaaaactctgtgaaaaaaatgcttcctcaagtccagaaaccagaagctcaggaaattgttgcttggttcctcttgttagaggcagagatt

SEQ ID NO: 912721 - DNA, 120 bp, Artificial Sequence
  ENSG00000240405_22 (sequence is synthesized)
tactttgccatcttccaagtctgttctcctcagtattggtttcatttacaagcaggccatctctgccctcatggcaatgatggtctttactccaggcttaagacccttactatctactat

SEQ ID NO: 912722 - DNA, 120 bp, Artificial Sequence
  ENSG00000240405_23 (sequence is synthesized)
ttccaaagcggagagagaacttcccacacctagtgacctgtgacacaggattttatccttcgtacagagggaattcagttggctaacataatctgccttccaatggagtaagaatgtctg

SEQ ID NO: 912723 - DNA, 120 bp, Artificial Sequence
  ENSG00000240405_24 (sequence is synthesized)
gactctttccttcacctacccccaagacatggaggcgtctaaaagataaataaaacttggcaactgaccgaaggaggaagaggggatttcaggcaaaatcaacgctgttcactacgagga

SEQ ID NO: 912724 - DNA, 120 bp, Artificial Sequence
  ENSG00000240405_25 (sequence is synthesized)
gacttcagaaaggttgcctgcttctggggagcatagtccctgattcctcaagacatacgtttattcttttcttcaatgtctttgcctgcagtcaaaacaaaaccattacctttagccaag

SEQ ID NO: 912725 - DNA, 120 bp, Artificial Sequence
  ENSG00000240405_26 (sequence is synthesized)
ttcacacatttcagccaaatccatatgcatcggatcagttctgtaggttatgggtgagcatgaacatataaaagaggcacctgcctgtgcctatctactccatggaatttcaaaaggggc

SEQ ID NO: 912726 - DNA, 120 bp, Artificial Sequence
  ENSG00000240405_27 (sequence is synthesized)
cacttatggagaatgtctttagggacagaaccaaccaccctgtctttcctccaactctcaaagtaacttctggctttaatcctcaagtgtctatgctggagtttaagaaaaatgtttttc

SEQ ID NO: 912727 - DNA, 120 bp, Artificial Sequence
  ENSG00000240405_28 (sequence is synthesized)
tgacagctagcagagtctaaaatgctgacattatgacttagagatgtgataaagagaaacatctattgcattttctgtaagtaaatgtggtgccggcattgagagaacatacgtaatcag

SEQ ID NO: 912728 - DNA, 120 bp, Artificial Sequence
  ENSG00000240405_29 (sequence is synthesized)
atacctgttctccctgagtttcttaatttaagcctcgcgattcctaattagcagttagattgcatccattgttattttgtctttggttatcaatgatgatcaacctttgctaaacaaaga

SEQ ID NO: 912729 - DNA, 120 bp, Artificial Sequence
  ENSG00000240405_30 (sequence is synthesized)
tcttttccagctgaagtatttcctgagttctgtccaagccctctgtagttaaagaaaaggctttttgacactgaatagacaatgttgtggctttttttttccttcttcagacaaatgtat

SEQ ID NO: 912730 - DNA, 120 bp, Artificial Sequence
  ENSG00000240405_31 (sequence is synthesized)
aggcatttagaccgccacgttgtactctcgtaattgagataccttgcagaaatggcaattaagggtgactcgtgtcaaaaatattcaggacaaattacattttactgatttttaaaaact

SEQ ID NO: 912731 - DNA, 120 bp, Artificial Sequence
  ENSG00000240405_32 (sequence is synthesized)
ttcaaaggtactctctcctctttctttctcctttctctcttcctgcctccctcccacccgctcctcgttttttcttttaaatattaagtaaactatttgcatttttacgtctcatcaaag

SEQ ID NO: 912732 - DNA, 120 bp, Artificial Sequence
  ENSG00000240405_33 (sequence is synthesized)
ttgttccaggttttttctgggtttactgaaactccaaatcgactactcagatcaaaacaattagtgaagtctaaggtattcttaattcctgaaatgaaaacagaatggacgttcgggacg

SEQ ID NO: 912733 - DNA, 120 bp, Artificial Sequence
  ENSG00000240405_34 (sequence is synthesized)
ttctgttttgctctggctacccgcttggcttctcgctcagaatattcttgctctcaagttagttccagttctgtttattttgtcctgagctcagtgaactttccaaagccctactcttca

SEQ ID NO: 912734 - DNA, 120 bp, Artificial Sequence
  ENSG00000240405_35 (sequence is synthesized)
aacaacactttttttcccccgccccgtgagctggagtttattttgtgctcacccttcattctgtgagttgtgaataattttaacacaaagaaaaaaaaatctcctcctgaccacggagag

SEQ ID NO: 912735 - DNA, 120 bp, Artificial Sequence
  ENSG00000240405_36 (sequence is synthesized)
agagaagaggggattttagaataaagataaaaattgctgttttagcccccaaagcaaaggacttgggaaagaagagaaaaggggggaaaatagaacagcaaaggaaaaaaaaaaaaaaaa

SEQ ID NO: 912736 - DNA, 120 bp, Artificial Sequence
  ENSG00000240405_37 (sequence is synthesized)
tgacttagagatgtgataaagagaaacatctattgcattttctacaacagcagcaactacaaaaagagacaatatctattcagcacctactgtgttccaggcacactatatgaattactt

SEQ ID NO: 912737 - DNA, 120 bp, Artificial Sequence
  ENSG00000240405_38 (sequence is synthesized)
cgaactgaaggtgggtccacctatcctgtgcagcaaagccaaacactgacattgagatggcagcgagagaaagagtgaggcatttgttgcagggtgccaaccaaggagaatcaggcagct

SEQ ID NO: 912738 - DNA, 120 bp, Artificial Sequence
  ENSG00000240405_39 (sequence is synthesized)
gatgctgaactcttgaacttcttgacaggttacagtttctgtggtcatgagtccagcatgactgagctgagctttctgcctcagggtctctcacaagtcaacgttcaagtcagattttct

SEQ ID NO: 912739 - DNA, 120 bp, Artificial Sequence
  ENSG00000240405_40 (sequence is synthesized)
agttaacacatcaaaagtgtatctgtgtacatgaagtacgaagaaaacagttcaaagaggacagtcaagcccatgcatttgattggatgcaggtttttacattcaattcacgtcaaagtt

SEQ ID NO: 912740 - DNA, 120 bp, Artificial Sequence
  ENSG00000240405_41 (sequence is synthesized)
tggtttcttctcgccataccatgatggcccgccatgatgacagaagctgcctgcttcacgcatgtactctggagtgttgctctcacctctgccagcaggaggagctcttgcactcatgtg

SEQ ID NO: 912741 - DNA, 120 bp, Artificial Sequence
  ENSG00000240405_42 (sequence is synthesized)
agaactgaagtcagccatgcctccatgctcaagcaaatgtccttggaggtgacactccaagattgtttttgactgaggcgactaaacctgaattggcagtgaaatattaaaaacgcagga

SEQ ID NO: 912742 - DNA, 120 bp, Artificial Sequence
  ENSG00000240405_43 (sequence is synthesized)
taaagagaaacatctattgcattttctaaaacatttgccagttcccagtctacacttacactgtccaatggaaatacaatgcaaaccagaagtgtaattgtgacagtctcatgttggcca

SEQ ID NO: 912743 - DNA, 120 bp, Artificial Sequence
  ENSG00000240405_44 (sequence is synthesized)
ctctctgcgtcatgctagaaagagtttatggtcccacctgcatccatgagaaagagaaaacaaagcttcaattttaagtccttggaaattccatgccattaagaaactgctactgccagc

SEQ ID NO: 912744 - DNA, 120 bp, Artificial Sequence
  ENSG00000240405_45 (sequence is synthesized)
tttctggcgttattcaaaggggtaaaaagttcattacactagtgttcttataagtgttggttttatttcatattatttgaagagctattctgcttagtaacaataaattgcttggaagat

SEQ ID NO: 912745 - DNA, 120 bp, Artificial Sequence
  ENSG00000240405_46 (sequence is synthesized)
gtcagacctgtgtttgggttaggggttgcttttagctgcaagtaagaacactcacaaaagaggggcttaaatgcaacaaaaggggaagggctaagggcaaaaggcacatgacttcagcat

SEQ ID NO: 912746 - DNA, 120 bp, Artificial Sequence
  ENSG00000240405_47 (sequence is synthesized)
ctgtcccttatagcgataaccatattttctctagatgctcattggacagaactatttctcatggtcaatcacaaccaaaagacagctggggaaattcaggattttaacagggcacacttc

SEQ ID NO: 912747 - DNA, 120 bp, Artificial Sequence
  ENSG00000240405_48 (sequence is synthesized)
ctatgctgaacaaaatctgagttcttaattttaaaaaagaagagaatgatattagagagatacatgttccataatagttatttaactgttcgtttttaataaacatcacttcatatcaaa

SEQ ID NO: 912748 - DNA, 120 bp, Artificial Sequence
  ENSG00000240405_49 (sequence is synthesized)
tatcccagtcttctaaatgacttcaggattatggagaggcccctttataatactgaagaaagaacacaggaataaatggtgtgatagagaactgtagcagtcgaagttattactgtgagc

SEQ ID NO: 912749 - DNA, 120 bp, Artificial Sequence
  ENSG00000240405_50 (sequence is synthesized)
ggtgtctcatgggcataacttgcacccacttagttgctctagtccttaggttttcaagattttgcggggatgcctactgtggttaggaacccagagctcactccttggagggttagtttc

SEQ ID NO: 912750 - DNA, 120 bp, Artificial Sequence
  ENSG00000240405_51 (sequence is synthesized)
acaaattcaatatctgaaaacctaaaagtaccatcatctaaaaagaaaaatttggggcaacaaaagcgccaaagtataatgtcattttcattcctatgatcctttgtgatgtggttcaaa

SEQ ID NO: 912751 - DNA, 120 bp, Artificial Sequence
  ENSG00000240405_52 (sequence is synthesized)
tggcttattttaatatttcacttttcaatcagtagctttttaaaaatgacaatttcacaaatgcttatggagcatctactttgtgcctacactggccaagagacagaaagatggaataat

SEQ ID NO: 912752 - DNA, 120 bp, Artificial Sequence
  ENSG00000240405_53 (sequence is synthesized)
acctgacttctaccttttaagatctcatagtgcagcaaaacagagagctgtagcaaatatttgtaatgtgaaaagagcaacactcatgaaacagtccagtgctggacacttactgtagta

SEQ ID NO: 912753 - DNA, 120 bp, Artificial Sequence
  ENSG00000240405_54 (sequence is synthesized)
gagacactgcatcaatgattctcttttacaggcaagggaactgaagcttgtagagaggttagatcacacagttaacaagaagagggacaagcatttaccggaagccctgtgtggttctgg

SEQ ID NO: 912754 - DNA, 120 bp, Artificial Sequence
  ENSG00000240405_55 (sequence is synthesized)
atactcacatagtgcttgccagacgcccggcattgtgtttagggctttacactcatgacctcactcggtcctcatgacaaccctatgcaggggatactataattatccccatttcacaga

SEQ ID NO: 912755 - DNA, 120 bp, Artificial Sequence
  ENSG00000240405_56 (sequence is synthesized)
tgagcaaactgagctctgagaaggagcaacttgaccaaggtcatgtaggtaatgtcagagcagcaatttgaatataggctcttgacaactaaactttactgctgtgagatgtagaggcat

SEQ ID NO: 912756 - DNA, 120 bp, Artificial Sequence
  ENSG00000240405_57 (sequence is synthesized)
ttctgcctggagctgcgggaaggtacagagattagggcaaataaattataagaagattagaaatatggtcttgataaggactttgaagataatgcttatatcagacttccttctgatctg

SEQ ID NO: 912757 - DNA, 120 bp, Artificial Sequence
  ENSG00000240405_58 (sequence is synthesized)
agtcaattgaaggatgtatttttgaacctttcagaaatctctctataagttatagatctgaattttagtgagaatctattccattcctcggagtgcgaaaatccaacacaatgtctggga

SEQ ID NO: 912758 - DNA, 120 bp, Artificial Sequence
  ENSG00000240405_59 (sequence is synthesized)
attcagacttataaaaatcatacagaagtaattcttaaaaaatcttttattttgaagtaattgtaggctcataagaggttgtaaaaataagagagttatagtatgcccttcacccagctt

SEQ ID NO: 912759 - DNA, 120 bp, Artificial Sequence
  ENSG00000240405_60 (sequence is synthesized)
cctccaaagttaacgttttatataaccatagtacatatcaaaagtgggaaatagactttgacaaaatactattcattagaccacagatcatatggggatttcattagtttttagatgcac

SEQ ID NO: 912760 - DNA, 76 bp, Artificial Sequence
  ENSG00000240405_61 (sequence is synthesized)
acaggtggctggtcatggagagcccgctgggggaagagcacacagacaggcaccggcaggccattgaccagcggga

SEQ ID NO: 912761 - DNA, 120 bp, Artificial Sequence
  ENSG00000240405_62 (sequence is synthesized)
attttctgtaccaaaagctcttacttcaccggggagatttttcacacgggaggaaaaggacaagtggactatcacctaggtggtcagcttacaacctgaatttcttggaaatgacctaat

SEQ ID NO: 912762 - DNA, 120 bp, Artificial Sequence
  ENSG00000240405_63 (sequence is synthesized)
ttaattatcttcatggatctcctttgctctttgaatgaagagtagtcagctattttctttctttttttttttttgaatggggctcttgagtgtcagttgccattttaatgaagtagtgat

SEQ ID NO: 912763 - DNA, 120 bp, Artificial Sequence
  ENSG00000240405_64 (sequence is synthesized)
ttgggccctttcctgataatacaagagttaggtgtcatgctagttggcttggcccctcttattcctccagtatccctgataggtcagatcagagtgattctggagggaaagtatgtttca

SEQ ID NO: 912764 - DNA, 120 bp, Artificial Sequence
  ENSG00000240405_65 (sequence is synthesized)
atgtacaatggcaattcccagttctgggatttaacttaattcaattattcacatgatgagtagcatccacacactcctggtaaaatttgataaaatgctgtagcatcaagatgcttttgt

SEQ ID NO: 912765 - DNA, 120 bp, Artificial Sequence
  ENSG00000240405_66 (sequence is synthesized)
agaggcctctctgccattacctgttttcttgactggcattaatctctaccaaagctagagacttgagcatcatcctgaattcagagtcataatctgatagctacaggtcaaagttggccc

SEQ ID NO: 912766 - DNA, 120 bp, Artificial Sequence
  ENSG00000240405_67 (sequence is synthesized)
aacgatgtgttgttgggagtaccttgagctttgaaaaaataaataaaagtaattatcaaccctggaaaacttagaaattttacataacactcctggtctctggattttcttggaaaactt

SEQ ID NO: 912767 - DNA, 120 bp, Artificial Sequence
  ENSG00000240405_68 (sequence is synthesized)
caatatctggcaactctggccctgtatttccttctggcaacaatcagctggtactgtgtcgaggtagtgacatttagatgagccatgtgctctccagcttgccatagtcctcaccaatcc

SEQ ID NO: 912768 - DNA, 120 bp, Artificial Sequence
  ENSG00000240405_69 (sequence is synthesized)
ctgttgtttacttccagcctacttagtattcatattatctgcaggcaactacaggcaattaagcctgtagtttctggcctaaagcattcatgacaacatgtgcacaagacaccacataca

SEQ ID NO: 912769 - DNA, 120 bp, Artificial Sequence
  ENSG00000240405_70 (sequence is synthesized)
taatatatgatagaaatcttccttactttctaaaaatgtaatcacaatcatggctgaaattgagtaccttctgtgtaccaacttttgtactaggtgctttatacgttatttttttttgat

SEQ ID NO: 912770 - DNA, 120 bp, Artificial Sequence
  ENSG00000240405_71 (sequence is synthesized)
ccccaacataccccatggtgtgaactagcctatcatataatcagagactaaaatttagagatggtaaatttaaaaaacgtgtccagtactgtacagttaatagacttcagaggcagaagt

SEQ ID NO: 912771 - DNA, 120 bp, Artificial Sequence
  ENSG00000240405_72 (sequence is synthesized)
gaaactgatgtgattccaaaggtgctgttattcaaagtttatttaatcttttttcttattttcaaaaagtaaatatgtatttaaatgtagaccagaaaccataccttgttacattttcct

SEQ ID NO: 912772 - DNA, 120 bp, Artificial Sequence
  ENSG00000240405_73 (sequence is synthesized)
ttgagaaactccaggctttctttaaatgctaatgtagatactgaacactacaaaatcttgaatggtttttctcctgtaaaggtcattgcaaagttaacctaagtaaaattccatatcttg

SEQ ID NO: 912773 - DNA, 120 bp, Artificial Sequence
  ENSG00000240405_74 (sequence is synthesized)
gcccctgctgtgaaaatggaaagaaatgtaatgttttggtcatgggagagctgccaattccacagtaccagcacaggccctggagccagactgtctggggtttgaaatcagctcctccac

SEQ ID NO: 912774 - DNA, 120 bp, Artificial Sequence
  ENSG00000240405_75 (sequence is synthesized)
ctaccagctattgacctcagttttgcaagatgttatcaccagaggaagctgcattaaaagtacccttctctatggtatgtcttacaactgcagatgaatctacggttccctcaaaacaaa

SEQ ID NO: 912775 - DNA, 120 bp, Artificial Sequence
  ENSG00000240405_76 (sequence is synthesized)
aaggttgggaacatgacctaatggtgtgctaccatgcagctctttccagctccatgttcagtgacttcatattgggtgttgtctatttgccctccacttgtatacaggctggcctttgtg

SEQ ID NO: 912776 - DNA, 120 bp, Artificial Sequence
  ENSG00000240405_77 (sequence is synthesized)
acttgctttgtacagctgatgtgacatcttgagacatctgaggtcaaggccttaagaagactggtcgttttttctggatgctaagagaagaaagtgattcaaggaggagggtgtaatcaa

SEQ ID NO: 912777 - DNA, 120 bp, Artificial Sequence
  ENSG00000240405_78 (sequence is synthesized)
cttcatcaagtgctgctgacaagtcaagtaggatgaggaccaggaagtggtcattggaaataccagtgtggatgtcatttgcgatttggtagatagtaatccgagtggagcatttggagc

SEQ ID NO: 912778 - DNA, 67 bp, Artificial Sequence
  ENSG00000240405_79 (sequence is synthesized)
ctaggacgtttcatcatgttgacctggctgatctttaactctgaacttcaggtgatccgcctgcctt

SEQ ID NO: 912779 - DNA, 72 bp, Artificial Sequence
  ENSG00000240405_80 (sequence is synthesized)
atggctaacacttttttaaggaaataacaacaatccccaaatatcacatgcccagagttgctcagcacattt

SEQ ID NO: 912780 - DNA, 120 bp, Artificial Sequence
  ENSG00000240405_81 (sequence is synthesized)
atccccaaatatcacatgcccagagttgctcagcacatttattttgtccgaagtatatgtaatgtacatacaataaaatgtacccattccaaatgcatagtgggggtttgacaaaagtgc

SEQ ID NO: 912781 - DNA, 120 bp, Artificial Sequence
  ENSG00000240405_82 (sequence is synthesized)
acaccatcacaattaaaatgaaaaatatttctatctccccaagatgctcctttacgctcctttgcaatcatcacacccttaccagccagcccccaggcaatcactttctgctactataga

SEQ ID NO: 912782 - DNA, 120 bp, Artificial Sequence
  ENSG00000240405_83 (sequence is synthesized)
aaggagaatgcaaattttgcatgaatttttaagaataggtgtggattattcaaccactttcttattgcagctttagaaacccagctcaaactagctgaagcagaaaagacattactgcgc

SEQ ID NO: 912783 - DNA, 120 bp, Artificial Sequence
  ENSG00000240405_84 (sequence is synthesized)
ccccatggatctaggtgaggacaggcgctcctgctttcccgcccaaatgttgtattttccaagcctacccttgccggccacgcccccaacctgggcctataaaaaccgccccccgcaggc

SEQ ID NO: 912784 - DNA, 120 bp, Artificial Sequence
  ENSG00000240405_85 (sequence is synthesized)
gattcagagctctgtgtcctgaacacagagtaataccagcattactaaggatgatcgtgggattttaaaattcctcccttagatagatcttacgaacttatgttaccaatcaacataagt

SEQ ID NO: 912785 - DNA, 78 bp, Artificial Sequence
  ENSG00000240405_86 (sequence is synthesized)
agatagatcttacgaacttatgttaccaatcaacataagttaagacaaaaagagcaaatttagatgtaaaaccatctt

SEQ ID NO: 912786 - DNA, 120 bp, Artificial Sequence
  ENSG00000240405_87 (sequence is synthesized)
tctagactggagtgggacatggggagtgaacttgatcttgctcttttgcaaattcaaagactaaagtatgacctaaaagtttcagctgatggagtcttgtcaatgcctttatagctgctt

SEQ ID NO: 912787 - DNA, 120 bp, Artificial Sequence
  ENSG00000240405_88 (sequence is synthesized)
gtatgtttcagctgccccttatctgacaggtcatgcaccaaccgtgccttgaagtacttcagcaagtcctctttctcctcagcggtcagctcagctggcaggtgcctcaccagaagagtt

SEQ ID NO: 912788 - DNA, 120 bp, Artificial Sequence
  ENSG00000240405_89 (sequence is synthesized)
cggtcggccgaggcagggaaagtggggaggagcttgtgcatccccttgatattgcaaatggctgatagagagctggcattttcaagcaaaaattggcccagagacatgtgggactcactg

SEQ ID NO: 912789 - DNA, 82 bp, Artificial Sequence
  ENSG00000240405_90 (sequence is synthesized)
ttcaagcaaaaattggcccagagacatgtgggactcactgtcaagattaattgtgaaaagctgggcaaggctaagaagttag

SEQ ID NO: 912790 - DNA, 120 bp, Artificial Sequence
  ENSG00000240405_91 (sequence is synthesized)
gccaggctggtcttgaactcctgacttcacctgatctgcctgtcttggccttccaaagtactgggattataggagttggccactgtgcctggccaaaattaggcttttaatcaaataaaa

SEQ ID NO: 912791 - DNA, 120 bp, Artificial Sequence
  ENSG00000240405_92 (sequence is synthesized)
ccaaaattaggcttttaatcaaataaaattaagtggaacattttgaactgtccaagatgggtagcatatattatacttatgtgaacgaatgttttaaattatgacaaaggctgtaccact

SEQ ID NO: 912792 - DNA, 120 bp, Artificial Sequence
  ENSG00000240405_93 (sequence is synthesized)
taagagtgtgggcttctatgtttcagagaaattggtatctaaagcaaagcttcccaaataatgatataagatgtcatttatttttattctaaaggaaagaataaaatgtttacatccata

SEQ ID NO: 912793 - DNA, 120 bp, Artificial Sequence
  ENSG00000240405_94 (sequence is synthesized)
gttcttgggcagattaaagggattcatgctggggtcaggcttttggagctattttcacaataacatttgggtttggatgactgcatttcaaagggtttcaagttagaatcttgatttcat

SEQ ID NO: 912794 - DNA, 120 bp, Artificial Sequence
  ENSG00000240405_95 (sequence is synthesized)
acagagtaacagagaataaagagtatgtaatgcttattttttgtaaaaaaaaaaagagagagaagaaaaagaaaaaggcaaatatggccaaatgttaacatctgttaaatctggatgggc

SEQ ID NO: 912795 - DNA, 120 bp, Artificial Sequence
  ENSG00000240405_96 (sequence is synthesized)
cctggagccagactgtctggggtttgaaatcagctcctccacctaccagctattgacctcagatgtgctgtctggtgatcttatcttcggcttcctggaagaatgtaggagtctaatatt

SEQ ID NO: 912796 - DNA, 120 bp, Artificial Sequence
  ENSG00000240405_97 (sequence is synthesized)
ttctgctctcttatctttcgcctcttacttaaattgtaaccaacgttttgcagtggtcctgctttatttctcagattcatccattcattaagcatttctatcatatacaagacacgatgg

SEQ ID NO: 912797 - DNA, 120 bp, Artificial Sequence
  ENSG00000240405_98 (sequence is synthesized)
tctcttccttcaagaagttatctacaattgtcttcttcctattgggactggaggattggttcctggtctctacagattgcttcactgttacttcataaaactgcaattaataatggttgg

SEQ ID NO: 912798 - DNA, 120 bp, Artificial Sequence
  ENSG00000240405_99 (sequence is synthesized)
gaacatgacctaatggtgtgctaccatgcagctctttccagctccatgttcagtgacttcatattgggagctgtcttgtgcgttgtaggatgttcagcagaatccctggcttctacccac

SEQ ID NO: 912799 - DNA, 120 bp, Artificial Sequence
  ENSG00000240405_100 (sequence is synthesized)
tacatgccagtagcaccccctctccagttgtgacaactgcaaaatgtctccagacattgtacctcgagggatagaattgcccccagttgagaacaatgaaactaaaaggatgaagaagaa

SEQ ID NO: 912800 - DNA, 120 bp, Artificial Sequence
  ENSG00000240405_101 (sequence is synthesized)
agaggaggaggaggagaaaaagaaggagggagaggaagggaaaagcggaagagaaagagaaggagaaggaagaggaggaagaagggaggaagaagaaaaggggaagaagtggaaagagaa

SEQ ID NO: 912801 - DNA, 120 bp, Artificial Sequence
  ENSG00000240405_102 (sequence is synthesized)
gaaggaacatttataggaggcaatttgacttaacagggcactatactatgtgtcaagcgatcagtgttctgaccactgtttcccagtttctccaataagcaatgataatgtgtcacatca

SEQ ID NO: 912802 - DNA, 120 bp, Artificial Sequence
  ENSG00000240405_103 (sequence is synthesized)
acaggcgtgagctaccgcgcccagctggcaccaggttgggaacatgacctaatggtgtgctaccatgcagctctttccagctccatgttcagtgacttcatattggtttccacttttgca

SEQ ID NO: 912803 - DNA, 120 bp, Artificial Sequence
  ENSG00000240405_104 (sequence is synthesized)
agaagtgccttttgcctcctgccatgtttctgaggcctcaccagccatgtggaactcatgcttcctagattaaatctaagacacttaccatgaggtggaggtccagaatgcttcagggcc

SEQ ID NO: 912804 - DNA, 120 bp, Artificial Sequence
  ENSG00000240405_105 (sequence is synthesized)
acacttaccatgaggtggaggtccagaatgcttcagggccagcactccagagatggaattatctccaacagccacaccaagagcactgaagcccctttgtgacctgttgacagacaccat

SEQ ID NO: 912805 - DNA, 120 bp, Artificial Sequence
  ENSG00000240405_106 (sequence is synthesized)
gttttgcataatatatatattttcattttcccttagctttcttattatttattcaataaatccttttttcttgctgacagcagttgtatttataaagctaaacccaacacagcaaaatgt

SEQ ID NO: 912806 - DNA, 120 bp, Artificial Sequence
  ENSG00000240405_107 (sequence is synthesized)
tcatcactttataaactaaatgctaatgttttatttatgtgcaatgaagaaagaaaaaaagaactgaattgatgtttaccttacaagcagcacaaaagtgcagtaccataatagtggagt

SEQ ID NO: 912807 - DNA, 120 bp, Artificial Sequence
  ENSG00000240405_108 (sequence is synthesized)
cacaagtgcagtttagatccacatctataaaaataacatctgtttaagcatacattacatttaaaaataactgtacagtgatcagctggttaagtacagttaaccagatgtcgttttaaa

SEQ ID NO: 912808 - DNA, 120 bp, Artificial Sequence
  ENSG00000240405_109 (sequence is synthesized)
gggccagatggaactatgaaactaagattgaaaaattaaaaaatactgtgaaaggtcaaaccaattaagcaacctgttttgttggcatgtaacagttaaaaagtaagttaaactacttaa

SEQ ID NO: 912809 - DNA, 120 bp, Artificial Sequence
  ENSG00000240405_110 (sequence is synthesized)
ggagtgagcaatatgaagatgtagcagttaaaaccaggtcttgctcctctgaggacaaagagaaaaatccaggctagagttgctcacttactggaactcaggccaacatcagaaatgtga

SEQ ID NO: 912810 - DNA, 120 bp, Artificial Sequence
  ENSG00000240405_111 (sequence is synthesized)
attttcctgtggttatcagaggctggggagtgggaggtttggggagctgttggcccaaaaatagaaaatttcagttagacaggaggaataagtccaagagatctatcgcacaacatgatg

SEQ ID NO: 912811 - DNA, 120 bp, Artificial Sequence
  ENSG00000240405_112 (sequence is synthesized)
attatagttaataaaaatgtattgtatacttgaaaattactaagagagtggattttaaatgttttctccacaaaaaaaaaaagataagtatgtaaggtaatacatatgcttgatttagcc

SEQ ID NO: 912812 - DNA, 120 bp, Artificial Sequence
  ENSG00000240405_113 (sequence is synthesized)
attccacaatgcagtatttcaaaacatcatgttgtataccataaatacaaacaatttttatttgccagttaaaaaattattttttaaaaaaattgaaaaataaatgtgaatttctgttga

SEQ ID NO: 912813 - DNA, 120 bp, Artificial Sequence
  ENSG00000240405_114 (sequence is synthesized)
agatgtgataaagagaaacatctattgcattttctgctggagcacagtggtgcaatctcggctcacttcatcttctgcctcccagtttaaagctattcttgtgcctcagcctctcaagta

SEQ ID NO: 912814 - DNA, 120 bp, Artificial Sequence
  ENSG00000240405_115 (sequence is synthesized)
agtgtcgtctatggtgtgattcatctcccaatacccctgggtgcaataaaactggtcccttctttgtaccccgtagctctttgttcctctcctcgtatgtgatggctgtttgagcatctt

SEQ ID NO: 912815 - DNA, 120 bp, Artificial Sequence
  ENSG00000240405_116 (sequence is synthesized)
ttcacccctccacaccaggaactcctcagtgagttcttgagatctatgccctattcacctttccagaaaatttgattcctgtcttcaaggagtttccagtctgggcaaggaagcagacat

SEQ ID NO: 912816 - DNA, 120 bp, Artificial Sequence
  ENSG00000240405_117 (sequence is synthesized)
ataaacatggaattacgttgcaatttggaaagtgatgtaaaacaattatctaaattagtgtacacagatgagcactaatttactaaagaatcttgcttttctcatataacaactgagcag

SEQ ID NO: 912817 - DNA, 120 bp, Artificial Sequence
  ENSG00000240405_118 (sequence is synthesized)
tcggcatgtaggtgtagtctgtttcttaaaatagcaatgttttcccagtcttcatatcaatatttatgttgttactcatgctctgttaaaacaaaacaaaataaaacaaaatctctcaaa

SEQ ID NO: 912818 - DNA, 120 bp, Artificial Sequence
  ENSG00000280118_0 (sequence is synthesized)
ggatctcttccggttatggcgcccgctgggagtgtcttatcagccgcttataccgcggaaactttaacctgcgttttcccgtaaaattttcctctctagattttgattcagagtcatcga

SEQ ID NO: 912819 - DNA, 120 bp, Artificial Sequence
  ENSG00000280118_1 (sequence is synthesized)
tgtcttcacaccaccctctgtggcatgaacagagatggtaatgaagcatttcttagaaaacaaggctggaccactgtctgtgtgatttccacctttcttgctgacaccattctgcatgtt

SEQ ID NO: 912820 - DNA, 120 bp, Artificial Sequence
  ENSG00000280118_2 (sequence is synthesized)
ttgattacctccaggtcaagaagagtgaggatagcctctgtgtctgaggaggtccctgtgcattatgaggaattggttctaggaagaagggagagtgaagaggaacagagaggaccctcc

SEQ ID NO: 912821 - DNA, 120 bp, Artificial Sequence
  ENSG00000280118_3 (sequence is synthesized)
ctgaatgcaggttcctttcccctcggttattttgtgcgtctcagatgatgacatgtattgtaactttattctatcacatatgacttttacattatatcatagaaaaagttacttacataa

SEQ ID NO: 912822 - DNA, 120 bp, Artificial Sequence
  ENSG00000280118_4 (sequence is synthesized)
attacttaatggtggattagtcatagttaaaatgttgtcagcttggtaaacaaatgaaattatcacactttagtttttcttcgttgatcatttatgaagattagtgtctcctcatttcat

SEQ ID NO: 912823 - DNA, 120 bp, Artificial Sequence
  ENSG00000280118_5 (sequence is synthesized)
ggatgtcacaactacatgttcttaagtaaggtgtatgcttggggtgttgtgttttccctgttaatgttggatactccagtgttcagcaaactataaacctatcaacacacatttgaaaaa

SEQ ID NO: 912824 - DNA, 120 bp, Artificial Sequence
  ENSG00000280118_6 (sequence is synthesized)
atctcttccggttatggcgcccgctgggagtgtcttatcagccgcttataccgcggaaactttaacctgcgttttcccgtaaaattttcctctctaggtttcgtatcattgtcttgtttc

SEQ ID NO: 912825 - DNA, 120 bp, Artificial Sequence
  ENSG00000280118_7 (sequence is synthesized)
ttactcttgtattaactttgttttaacctaaggtttctctttcccaaaaactgtggtgtttctttacaacctctttttatagttatataaacattgcaagaaccatgattttatattctt

SEQ ID NO: 912826 - DNA, 120 bp, Artificial Sequence
  ENSG00000280118_8 (sequence is synthesized)
ccttttcagtattaataacttcaatgtcttttttggcatttgtctgaaaatttgaaatatttttcaatttactgaactgattatcgttttgtaaatatcggatactactttaatcatttg

SEQ ID NO: 912827 - DNA, 120 bp, Artificial Sequence
  ENSG00000280118_9 (sequence is synthesized)
tgtattggccttaagattctctatttttaactcttccaccaacatacctttaatctgagaggtgttgtaggggcttcaagatcaaactttccccacagtctctattttcattataaaata

SEQ ID NO: 912828 - DNA, 120 bp, Artificial Sequence
  ENSG00000280118_10 (sequence is synthesized)
atcaaactttccccacagtctctattttcattataaaataccgtgttttaagaaaaaatgtacaaggttgaaagaagtttcactactacgtgttttttttttaatttttattttatttta

SEQ ID NO: 912829 - DNA, 120 bp, Artificial Sequence
  ENSG00000280118_11 (sequence is synthesized)
cagtggtgcggtctcggctcactgcaacccccgactccctggttcaggcagttctgccgccgactccctggttcaagcaattctgcctcaacctcccgggtagctgggattaccggcaca

SEQ ID NO: 912830 - DNA, 120 bp, Artificial Sequence
  ENSG00000280118_12 (sequence is synthesized)
acaggcgtgagccaccgcgctcggcctctactatgttttaaaacagtggctaggtcatgcttttctgtgtatccttacttcccttattccatcacctcatccatcactttacaactgatc

SEQ ID NO: 912831 - DNA, 120 bp, Artificial Sequence
  ENSG00000280118_13 (sequence is synthesized)
aactgatcatacaattacaaaattattttactaatcagattaaatgtgtgccttccatttgaagaagaaaggtctactaaaggcttagttttccctaggacactgggagaatacaggatc

SEQ ID NO: 912832 - DNA, 120 bp, Artificial Sequence
  ENSG00000280118_14 (sequence is synthesized)
tggtttccagtgccacagtggtgatcacacaggaataaacgggacacaggtcagacaacagccagaaagtcatctgccagtatatgtttcctgtgagatggacacctggtcccaggtcag

SEQ ID NO: 912833 - DNA, 120 bp, Artificial Sequence
  ENSG00000280118_15 (sequence is synthesized)
acacaggtgttagagtgtcagctaggtaaaagaagtaacctgaaagagacacgctgtgaacaactatgtccacctccccttcatttcctagtattggagggctgctagctgctctgttac

SEQ ID NO: 912834 - DNA, 120 bp, Artificial Sequence
  ENSG00000280118_16 (sequence is synthesized)
taggacccagatttagttggggcctctcagaacaggtcagaattgacctatgcacagtacctgtgggagtctggatgagggccatccactgaaagttagtgaatcaaagatttaagattg

SEQ ID NO: 912835 - DNA, 120 bp, Artificial Sequence
  ENSG00000280118_17 (sequence is synthesized)
atctaaatgcaaatagatctgtgtcaaacgactatacgcataattgccttattttatacttattgaaaaaatcctcgtaaaattataaaggcataagatttacttgttatgaaaatgaag

SEQ ID NO: 912836 - DNA, 120 bp, Artificial Sequence
  ENSG00000280118_18 (sequence is synthesized)
aacagcagaaggttgcaaaacaagtgcaaacaatgaaagccatgtcatggctgccaacaggctaatagtgattgtaacaacacttgacaaaataatttttaaaaattattcaaatatgat

SEQ ID NO: 912837 - DNA, 68 bp, Artificial Sequence
  ENSG00000280118_19 (sequence is synthesized)
aattatcaagggaggtccaatttttttttttgtctgagacggagtctctctctgacccaggttcaagc

SEQ ID NO: 912838 - DNA, 120 bp, Artificial Sequence
  ENSG00000280118_20 (sequence is synthesized)
caggcgtgagccactgcacccggcctaagggagctctattaatggagctgaatctatgaaacaagaacatcttccttcatcaagggagcaaaactgtccagaaaaaaagtacagatgagg

SEQ ID NO: 912839 - DNA, 120 bp, Artificial Sequence
  ENSG00000280118_21 (sequence is synthesized)
aaaagtacagatgaggtagaaggagcctggtctatgtgttcatctttgtggtggattgagaatagggaggctggagaagaggctgagggggaagtcagggctcactcctgtcctaaaagc

SEQ ID NO: 912840 - DNA, 120 bp, Artificial Sequence
  ENSG00000280118_22 (sequence is synthesized)
aaaagggagcaaaagaaccatgttcatcttcagattcacacattcttcactttgaaagaaaatttaagtttattaggaaaccatatctgtgaggagtttttattttttttttgttttctt

SEQ ID NO: 912841 - DNA, 89 bp, Artificial Sequence
  ENSG00000280118_23 (sequence is synthesized)
acagggtcttaatacactgttcactgcagcctctacctcctgggccctagcagttatcctacctcagcctcccatgtagctgggaccac

SEQ ID NO: 912842 - DNA, 120 bp, Artificial Sequence
  ENSG00000280118_24 (sequence is synthesized)
gggaccacaggcatatgccaccaagccctgcctattttatttttttgtaaagacgtgtctcactttgttgcccaggctggtggggggaagttttagagattcattaaataatttgtgaaa

SEQ ID NO: 912843 - DNA, 120 bp, Artificial Sequence
  ENSG00000280118_25 (sequence is synthesized)
tttaaaataaaggaaaatattctgttttgggttttgcccagtgcatgtttggggctcataggtgaacaacatggacaaaataacctctgatatttcagtccagtagtgattcaaggactg

SEQ ID NO: 912844 - DNA, 120 bp, Artificial Sequence
  ENSG00000280118_26 (sequence is synthesized)
taacccaaatctcaaatgtaggagttttgggttacaaaacttttgggagctgagagcacaggcatcagacctgaaatggaatggacaaggaaggcctctaggaggaggaacattggagga

SEQ ID NO: 912845 - DNA, 120 bp, Artificial Sequence
  ENSG00000280118_27 (sequence is synthesized)
ggttctggagagcgtggagcagtgaatctggcaaacaggagaaagagaagaggaaaaaatgtgtctgtggcacaggccagggcatgagaaggggacagtggattagaaggactgctggga

SEQ ID NO: 912846 - DNA, 120 bp, Artificial Sequence
  ENSG00000280118_28 (sequence is synthesized)
ttagcaacatgtaaggagggcaggagcgggaagggcagaccatggagaggctgtgaaggggagagtgggcaggtcaggaagtgacacagggccggccagcccactaaggaatgcatttgt

SEQ ID NO: 912847 - DNA, 120 bp, Artificial Sequence
  ENSG00000241754_0 (sequence is synthesized)
agtgcaagtgtccttgtgccctggtgcctgatatccagctccggcagcctagaaaatcagttaggcttttcagtcacagcaccctctgtgacaaacgtgtggagcaccgcacgacttctt

SEQ ID NO: 912848 - DNA, 120 bp, Artificial Sequence
  ENSG00000241754_1 (sequence is synthesized)
caaccagctggtttttctggcattcgaataaaagtaaaaatagaaaacaaagagggagaagaaaagtgacaagctgaaacctgcgaagagaaagaggacaagaaatgaacaagttgatct

SEQ ID NO: 912849 - DNA, 120 bp, Artificial Sequence
  ENSG00000241754_2 (sequence is synthesized)
ggtcttgagggaggaggaggcacaggaacacagtaaaggaacctatctgaggagctgcagacatgaaccaacaaagccagaagagcctgaagcaatactgcaagtgggtgctttggtact

SEQ ID NO: 912850 - DNA, 120 bp, Artificial Sequence
  ENSG00000241754_3 (sequence is synthesized)
acatgctgctgatgttggattaatagttagacaaacaactaagaagatcagaagtaacatgctactttgggtgttgcaaaatgactggacgctacctgtcatcaaaccatagtttactct

SEQ ID NO: 912851 - DNA, 120 bp, Artificial Sequence
  ENSG00000241754_4 (sequence is synthesized)
ccacttcaacataaatcaatagcctgcttttacctcaatgatcagttgctgcaggggaaaaaagtaagcttcaatttagacgctgtcaaatatatggccaacttgccacctctctcttct

SEQ ID NO: 912852 - DNA, 120 bp, Artificial Sequence
  ENSG00000241754_5 (sequence is synthesized)
ccttgttcctggaacatgttgctaattgctatggtgttcctgccacactctgatgtgattatggaatcagcctcagcacaatgctataggcagccactaataagggattggagtggggag

SEQ ID NO: 912853 - DNA, 120 bp, Artificial Sequence
  ENSG00000241754_6 (sequence is synthesized)
gctgattgaaattgttccccaagacagtaagcataatatgttctcatctgctttgatagactctaaattgtatacacagtgtggattttgtgatactcaataaaaagcttctaggaaaga

SEQ ID NO: 912854 - DNA, 120 bp, Artificial Sequence
  ENSG00000241754_7 (sequence is synthesized)
atgtacccagtggtgtggataaatcgttatgtatctgcctacgcattgtcagaaatacagcagcctaagtagccattcaaggaatttagagtaaagtaccatggtcagaattcaagatat

SEQ ID NO: 912855 - DNA, 120 bp, Artificial Sequence
  ENSG00000241754_8 (sequence is synthesized)
agccactacaggatctgaaatgccatctgttccaaccgcacgacatccccattcagcaggctcacaaggctggcatagacaggaagagggacccctctgttgtcctctactctcttcttc

SEQ ID NO: 912856 - DNA, 120 bp, Artificial Sequence
  ENSG00000241754_9 (sequence is synthesized)
aactgagcaatgagcagaagatttaagtttgggattttttcactatttttcccaaacgcatgaacaggttcttctcaaactgcaagagtcgattcaaaatccagacagctttcaccaccc

SEQ ID NO: 912857 - DNA, 120 bp, Artificial Sequence
  ENSG00000241754_10 (sequence is synthesized)
aaggattcagggaagtgtttatttctttgtctcagaatctctttaaacatggtaaggacaaagtcataagaagtgtgcatggtatagaatcaaagtacctttggcagtgatataggtctg

SEQ ID NO: 912858 - DNA, 120 bp, Artificial Sequence
  ENSG00000241754_11 (sequence is synthesized)
ttctgaaatacagactcctgtgcccatggccactctgggaactcacgtcgtgtgttcaggctaaggacatattaatatacactgcttttctaacagccaacaatgcagctgggagaaaaa

SEQ ID NO: 912859 - DNA, 120 bp, Artificial Sequence
  ENSG00000241754_12 (sequence is synthesized)
ctagggagggagactgaggcatggggaggttaagtgagttgcccaaggtcacccaggaagtcagtgaattaaccagaaatagcacccgggactcctgcctccttcaccacagctaccacc

SEQ ID NO: 912860 - DNA, 120 bp, Artificial Sequence
  ENSG00000241754_13 (sequence is synthesized)
actggaccacgtttcctgatggcaacaaagcatcagaccacagcggtttgccagtaacatcaaatagcattttgccagtgtaatttacctctttcggaattaaataataataccatttta

SEQ ID NO: 912861 - DNA, 120 bp, Artificial Sequence
  ENSG00000241754_14 (sequence is synthesized)
ccttaatctatcaccttttgtcccagaggagcctaaagtgctaagtgctttagttatgagttttagaagcttacatataaatcacttcacacaccattaaaatgcagctgtccttggagt

SEQ ID NO: 912862 - DNA, 120 bp, Artificial Sequence
  ENSG00000241754_15 (sequence is synthesized)
caatgttgcagctgttaaacataagtatcccaactgttaaacatttattgagcaccaacaatgtgctaaatgttagagaggaggcagaatttgaatttcaggagttttgggggactaaga

SEQ ID NO: 912863 - DNA, 120 bp, Artificial Sequence
  ENSG00000241754_16 (sequence is synthesized)
aatacaggaaaactacctaaaatgttgatgatgtataaatagacatccgactattactaaaacacacttctgttgctagtgaatataatcatggggtctgaaaaatcgcctttggttata

SEQ ID NO: 912864 - DNA, 120 bp, Artificial Sequence
  ENSG00000241754_17 (sequence is synthesized)
gcaaggacccttagataaatgctttaaaaatgtgaaacatatagttcagaccacaggcaaagctgttccagattcattccaaggcatgtcactaatctttcctgattccttattttcatt

SEQ ID NO: 912865 - DNA, 120 bp, Artificial Sequence
  ENSG00000241754_18 (sequence is synthesized)
tctccttccttgtgtgttcaggcacctacaatgacaaattgtaaatagccacgtccaataagtttatgcgtaaccttacctgacttttccatggaactccattatataactagaagcatt

SEQ ID NO: 912866 - DNA, 120 bp, Artificial Sequence
  ENSG00000241754_19 (sequence is synthesized)
tctccacaagcggaaaaaaaatggaaccagaagagaaacaaagcacatttgagcatacaataaataatgatatgatgaaaagtcaaagggaaataaaggacatttgaaaggaataaaaaa

SEQ ID NO: 912867 - DNA, 120 bp, Artificial Sequence
  ENSG00000241754_20 (sequence is synthesized)
agtagccaaggcctgtgactccagtccctgagaaagtaccatcaggagcaatacgtaagcttttcagggacaaagaaccttgtcctcttaatctggattcacaattcacaattatacccc

SEQ ID NO: 912868 - DNA, 120 bp, Artificial Sequence
  ENSG00000241754_21 (sequence is synthesized)
tagcctgcccaacgcctttttctcagtctctgagaagtattgactctcttttacctaagagcaggagtctgaaaactacagcctatgggccaaatctcttctgttgtgtcccacaaggta

SEQ ID NO: 912869 - DNA, 120 bp, Artificial Sequence
  ENSG00000241754_22 (sequence is synthesized)
acagtcgcagttacatttttaattggttaaaaaaatcaatcaaaagaacaacactattttataagatgagaaagatatttaaaattcaaatataaatgccgatgaataaaattttattgg

SEQ ID NO: 912870 - DNA, 120 bp, Artificial Sequence
  ENSG00000241754_23 (sequence is synthesized)
ttatataaacccccctttttttaattaacaaaatggtttggagtcatttttctaccactaggtaattatgtgagtgtgatctataatcttcctcctgaaaattgtttatgtcctaattcc

SEQ ID NO: 912871 - DNA, 120 bp, Artificial Sequence
  ENSG00000241754_24 (sequence is synthesized)
caggtcaaattgatagacacctctcaaaccacgtgatatggtttggatttgtgtccctgacctcttaagtcaaattgtaatccccaatgttggaggagggacctggtgggaggtgattat

SEQ ID NO: 912872 - DNA, 120 bp, Artificial Sequence
  ENSG00000241754_25 (sequence is synthesized)
atcatgggggcggatttcccccttgctaatctcatgatagtgatgagcgagttctcatgagatcttgttgcttaaaagcgtgtagcacctcccacttctatctctttctcctgctctact

SEQ ID NO: 912873 - DNA, 83 bp, Artificial Sequence
  ENSG00000241754_26 (sequence is synthesized)
tgtagcacctcccacttctatctctttctcctgctctacttatgtaagatgtgcctgctttgcctttctcttcctgtacagcc

SEQ ID NO: 912874 - DNA, 120 bp, Artificial Sequence
  ENSG00000257824_0 (sequence is synthesized)
gctaagaaaaatctgtatgttgattatgggtgccaagttaagaaagtattgactaagcctgggtctcaagaaataaaaagcaaacacatgtacaaaaccccaaaacagctatcaaatagg

SEQ ID NO: 912875 - DNA, 120 bp, Artificial Sequence
  ENSG00000257824_1 (sequence is synthesized)
ctgacaaaaggatttggggttaaattagtccctcccaataaaaggcagagtacccccaaatggtacaggagggaaaacccacctaagtctgggccaatcagttgtcatgtaacctagaat

SEQ ID NO: 912876 - DNA, 120 bp, Artificial Sequence
  ENSG00000257824_2 (sequence is synthesized)
taggtgggcagtgaacatctctgaagggcacttcctccttgccccagtaggaaacgcagtcaagctgggggcaaaggaagagacccaatgacccctcgaagagccccacaaaggaaaaga

SEQ ID NO: 912877 - DNA, 120 bp, Artificial Sequence
  ENSG00000257824_3 (sequence is synthesized)
ggggctcctttgctgctactctgcagtaggagcaggttgaatgtttgctgaacacatttgaaaaaggaagagagaagataatggtcctaatgaatgtgcaggagacaatagcagctccag

SEQ ID NO: 912878 - DNA, 120 bp, Artificial Sequence
  ENSG00000248184_0 (sequence is synthesized)
ctcaccctgctctgtgtctagaagagagctgaacacgcagtagaacacaataaattatattcaaatggcagtcaaggaggaaacttttcttcctcatcaacaaagctgatcgatgggggc

SEQ ID NO: 912879 - DNA, 120 bp, Artificial Sequence
  ENSG00000248184_1 (sequence is synthesized)
tgcacacatcattagcaactatgctggagaagaatgatcaaggaggtgaggaggggaatggatctgattaaagggatgttcaagaaaggaaattccaagcacttgggtaaaagcttcata

SEQ ID NO: 912880 - DNA, 120 bp, Artificial Sequence
  ENSG00000248184_2 (sequence is synthesized)
gctaaaatgaatgaactcgtgagcaaagcaaacagccaggtacatttgggagatgctgacagacaatctggataattttgcctctgaaactttcaaaacaaagtcatttcatgcagtgaa

SEQ ID NO: 912881 - DNA, 120 bp, Artificial Sequence
  ENSG00000248187_0 (sequence is synthesized)
ggcatgggaggctcagcaggtctgttcccttggcatgtgggacatcttgcagtggatgcagggagggaccatgcctctagcattctctgggaagaataaaggagaagtttatcttcccac

SEQ ID NO: 912882 - DNA, 120 bp, Artificial Sequence
  ENSG00000248187_1 (sequence is synthesized)
ctacctcccattgcctgtttttcattggtcaaaacttgtcccactaggaattaactccttcacatttccaagtttatatcatatgactgctccaactacatgggaccccaaaccccaaac

SEQ ID NO: 912883 - DNA, 120 bp, Artificial Sequence
  ENSG00000248187_2 (sequence is synthesized)
ctgatgtatgtatagtgttcctgtttcatccaagcctggaaatgaggggaagagccagaacctctaggcttggtgctctggaaaaagaattagaattgcattcaaatagtcaggcttcaa

SEQ ID NO: 912884 - DNA, 120 bp, Artificial Sequence
  ENSG00000248187_3 (sequence is synthesized)
gttgcttctgcctctgtgtgaagcaaatagtaacaactcacttcgaaactcaggctcctggactgtaaatgaggataatgatactcaccctaccaacctcagggactgttctaagagcaa

SEQ ID NO: 912885 - DNA, 120 bp, Artificial Sequence
  ENSG00000248187_4 (sequence is synthesized)
aatgaaatgagactgagctctgaaaatgcttaaatgcttttcaaagtagagtgatcgtgctttctgtagcatcaaaacagtcctctataaatgggcaaagtcaaggcatggactggatct

SEQ ID NO: 912886 - DNA, 120 bp, Artificial Sequence
  ENSG00000248187_5 (sequence is synthesized)
gacaacagagaatggcttgagggctggaaaaagaaaaaaatgcaaatgccccaaatctctgcttcccttacagtgtggaaatcgccccataacacactgcaccaggtagggttaaattga

SEQ ID NO: 912887 - DNA, 120 bp, Artificial Sequence
  ENSG00000248187_6 (sequence is synthesized)
aaagtaatgctgctaacctactatctgtcagtttcctcagtgctttgaagatttttctaaagtcatctgacttggtttccctttgatttcaaattcctgcttattatatgtatgaccttg

SEQ ID NO: 912888 - DNA, 120 bp, Artificial Sequence
  ENSG00000248187_7 (sequence is synthesized)
agcctttttaactcatctgagcctctctgtttcctcatctataaattgtgaataagaagacgttactgtaggattattagaaactttagaaataatacttttaataccagcatagtgcct

SEQ ID NO: 912889 - DNA, 120 bp, Artificial Sequence
  ENSG00000248187_8 (sequence is synthesized)
gatccataggcatccaggacatgccagctaagatcattgattattgttgtcgtttttagtatcatacagtagaaagaacaacatctttgaaaccagacaatcccgcatttaaatcagctc

SEQ ID NO: 912890 - DNA, 120 bp, Artificial Sequence
  ENSG00000248187_9 (sequence is synthesized)
tgtcacttacgaaacgtgtaatcctgaataactgaagaaaactttttgaagttcaattttgagataatgatggatgatttcagactttgtgagaatttcagaggtatcggcagtaggttg

SEQ ID NO: 912891 - DNA, 120 bp, Artificial Sequence
  ENSG00000248187_10 (sequence is synthesized)
aatggtgaaccctccaaaagatatatctatgttccaaactcagaatctgtgaatgtgacattatttgggaaaagggggttttgcagatataattaagttaagcatcctgagatgagatca

SEQ ID NO: 912892 - DNA, 120 bp, Artificial Sequence
  ENSG00000248187_11 (sequence is synthesized)
tcctggattttctagatagggcctaaagccaataatgagtgtctaagacagaagaagacacaaagaagaagagacgggaatgtggtcacagaggcagagactggagcaatgcagccacaa

SEQ ID NO: 912893 - DNA, 120 bp, Artificial Sequence
  ENSG00000248187_12 (sequence is synthesized)
gccaaggaacacctggacccaccagaagctggaagaggaaagaagggatttctttttcttctagagccttgggagggagcatggccctgctgacaacttattttcagacttctagattct

SEQ ID NO: 912894 - DNA, 120 bp, Artificial Sequence
  ENSG00000163915_0 (sequence is synthesized)
gttattgcgactttgatctaaacagctctgtaaagcccattttcacatttttaaaataatatgctttagcagcaggtgaggaaaacttaaggcatggcacatttattggaaaagcagcag

SEQ ID NO: 912895 - DNA, 120 bp, Artificial Sequence
  ENSG00000163915_1 (sequence is synthesized)
tgggcggcttggtttaatggcaacaccactagataactgtctaaggccctttccagatccaatggtcaaggtaacagcagaaacaaagaaaatctcagaggtctcttcttatgtctctgc

SEQ ID NO: 912896 - DNA, 120 bp, Artificial Sequence
  ENSG00000163915_2 (sequence is synthesized)
taacaataaaaagaacagcttttggggaagtgggctgctttatcctgtagccctcctcagatgccaagactgctgggctggccaccagactcacgtcctcagtaaggaatttacctccta

SEQ ID NO: 912897 - DNA, 120 bp, Artificial Sequence
  ENSG00000163915_3 (sequence is synthesized)
cttttcttcgggggcaggtagggaagcacagcaccagccctcagctgtcttgggctccctgatctggttaaggagagtgtatttactcagggccatggtggtgcatggaggaagccaacc

SEQ ID NO: 912898 - DNA, 120 bp, Artificial Sequence
  ENSG00000163915_4 (sequence is synthesized)
ctgtcagcgctggctggtcatcagaatggaagtgggaggacatccttcatttccaggtcatgcctggttaacatttcaccttaactgaggggccaaagagaggctacgcagcctggatca

SEQ ID NO: 912899 - DNA, 120 bp, Artificial Sequence
  ENSG00000163915_5 (sequence is synthesized)
gagctccgacagcccttacctggtggcttgttcgtggaatttatcacatcctgttgtaacgctctgtttacatctctgctgcccagccagactccgccttctgtgattttctcatcccac

SEQ ID NO: 912900 - DNA, 120 bp, Artificial Sequence
  ENSG00000163915_6 (sequence is synthesized)
cacccagtactgtacatgctcaatggatgactataaacaagtgaacagacagcaggagtggctgcccttatgcccatggaactgggcctctcaattcagctcatgttggtcatttcagat

SEQ ID NO: 912901 - DNA, 120 bp, Artificial Sequence
  ENSG00000163915_7 (sequence is synthesized)
catctgaatgtaaagggtcctctctgtctctgaccaggcttcttgcaggcctttggcagccgtggagctctgagagagactggtttcctgagggctgggcaccccggtctatttattggg

SEQ ID NO: 912902 - DNA, 120 bp, Artificial Sequence
  ENSG00000163915_8 (sequence is synthesized)
cacaaacagaaagagtgggcatcaggaccaacgggcacatggccaccacccagatacgtgactctggcatgtatttcacttctctggggccagatggcctcttcctaagattctcctcag

SEQ ID NO: 912903 - DNA, 120 bp, Artificial Sequence
  ENSG00000163915_9 (sequence is synthesized)
tgctgagagttcttcagtcctgcctgctgacttccctccaggacagaacagatgcctcttcctcccatagatatgatgcaagaactgagctgtccaagcaaaaaaaaacctttgaaggaa

SEQ ID NO: 912904 - DNA, 120 bp, Artificial Sequence
  ENSG00000163915_10 (sequence is synthesized)
gaatttctgtgctgtgagtggtttactctgagaataggactcaagttttagaaatctttgttcaatgtcagagatagagcgactgtaatctgtgagccaagaaaaaaggtttgtaaaggc

SEQ ID NO: 912905 - DNA, 120 bp, Artificial Sequence
  ENSG00000163915_11 (sequence is synthesized)
tagaagaaaagaagcccatggctaagaacttgtaaaaacatctacagcaaacaagagttccaagagaaagactgtgaaacagcaggcccacaggagctggagagcgagctttgaaacgat

SEQ ID NO: 912906 - DNA, 120 bp, Artificial Sequence
  ENSG00000163915_12 (sequence is synthesized)
acaaaattaattgtctaaggggcaaataaatggtgcagtacacaaatgcaggaggtgacacaaacgcacctggattcaacagaggacaagtagacacatctatgtcccaggctgcactaa

SEQ ID NO: 912907 - DNA, 120 bp, Artificial Sequence
  ENSG00000163915_13 (sequence is synthesized)
tgaggaaagtccaccaggtgggaagtaggtaccactgagagtttataaggctaaaaaccccagtcttgggatgcggagaaggagggaaggaagtgagaatgaacaggaatggcatattct

SEQ ID NO: 912908 - DNA, 120 bp, Artificial Sequence
  ENSG00000163915_14 (sequence is synthesized)
gttcacttcactgacagctttgcactgtgcattcccagctgggcatgtcccagacatgatctcttgcatgggctgtactaacgaacatcaaatattcaggctggcaaccagttacatgaa

SEQ ID NO: 912909 - DNA, 120 bp, Artificial Sequence
  ENSG00000163915_15 (sequence is synthesized)
ccggtgtcaggagtgcacattaataggcatctgactagggcagggctgggcaaactacggcccctgcgctacatccagcctaaagcctgtttctgtaaataaagttttatcaaaacaccc

SEQ ID NO: 912910 - DNA, 120 bp, Artificial Sequence
  ENSG00000163915_16 (sequence is synthesized)
tattgatggatttaagttttcaattttatgtcattttgtgctttctggaggcggtacagtgagcttggaagtttttgccctggtagaggtggagacgatatagcccagaagttcagactg

SEQ ID NO: 912911 - DNA, 120 bp, Artificial Sequence
  ENSG00000163915_17 (sequence is synthesized)
gagtcaaaggttccgagttcaaagcccacccagctacttattaactgaatgacccttagcgaagttgctttaactttcctgattcagctccttcatctaaactctcagaattgttagatc

SEQ ID NO: 912912 - DNA, 120 bp, Artificial Sequence
  ENSG00000163915_18 (sequence is synthesized)
ccagccaccatgctgtgaggaagagcaagcaacacatggagaggccactgttccagccaacagccccagctgaggtcccagctgacaggccgcatcaaatcgccaaggatgtgaacaagt

SEQ ID NO: 912913 - DNA, 120 bp, Artificial Sequence
  ENSG00000163915_19 (sequence is synthesized)
aaaatgacaatggtggacgtctcattcatcctggaagactgacagaggagacagcttcaaggcaagcagggctttggccatttccccagcccatcaaccagccaatcacaaaatcaaaaa

SEQ ID NO: 912914 - DNA, 120 bp, Artificial Sequence
  ENSG00000163915_20 (sequence is synthesized)
actagatactacatggcaactaacctttaagaaactactgcttgtcaaattttgttgtagtatcaaagaagaatatccataattatctgaaaaggctattaaaatactctttgccaatta

SEQ ID NO: 912915 - DNA, 120 bp, Artificial Sequence
  ENSG00000163915_21 (sequence is synthesized)
gaatcccagctctaccacgatgctgagtcagtcattcaacctctctaatgcctcagccatgagacagagaagattctttctaaatctatgatttacctcattttgacagcaaaacagaac

SEQ ID NO: 912916 - DNA, 120 bp, Artificial Sequence
  ENSG00000163915_22 (sequence is synthesized)
gccaccatgcccagccgcaagtgtttatccccattccatagggggtgaaactgaggcacaaaaagaggaaatcaccatcaggatatgccactgcagagagatataagatgagagtaattc

SEQ ID NO: 912917 - DNA, 120 bp, Artificial Sequence
  ENSG00000163915_23 (sequence is synthesized)
agcttcatgggttattttcaaaaagtaaggaagaaactgcaacaagaactgaatcacgctttactacagcattgccttctacttcctccaccagccaactgggagatgaacttttatgag

SEQ ID NO: 912918 - DNA, 120 bp, Artificial Sequence
  ENSG00000163915_24 (sequence is synthesized)
caggagcaggattcaaacgcaggcaatcaaaaccccgagtcatgctcttaaccactacgccacgagttctcaaagcgtgacctgcacacccttggaatcctcaagaccctttcaggggtt

SEQ ID NO: 912919 - DNA, 120 bp, Artificial Sequence
  ENSG00000163915_25 (sequence is synthesized)
attagatactacatggcaactaacctttaagaaactactgcttgtcaaattttgttgtagtatcaaagaagaatatccataattatctgaaaaggctattaaaatactctttgccaatta

SEQ ID NO: 912920 - DNA, 120 bp, Artificial Sequence
  ENSG00000237321_0 (sequence is synthesized)
tatctctaatttggagacaaagaattggaaacttagtgctggcttctatcattgtggtaagagtgaaaataatggatacaaatcagatacctgaggatctttagagaagtaattgttgag

SEQ ID NO: 912921 - DNA, 120 bp, Artificial Sequence
  ENSG00000237321_1 (sequence is synthesized)
atgtgttgacagatgggatagtttgacagaggattttcttacccccccttaccccagctggccttgcttctactaaactttcaggtttcagcttaaaggtcttctgggaagctctccctg

SEQ ID NO: 912922 - DNA, 120 bp, Artificial Sequence
  ENSG00000237321_2 (sequence is synthesized)
tcttagaacttgagagatatttatgcattcatgtcctccaaactatgcctggcattctgtaggtgctcaataaatattcatggagtaaaaacaggaatatatgaaaactgcttaactgtc

SEQ ID NO: 912923 - DNA, 120 bp, Artificial Sequence
  ENSG00000237321_3 (sequence is synthesized)
attgaatagataatgattccaatagagactggtacctgtttatctattacacctttacaactttaaaaggaaaataactatacttctgtacttgcatgtgtgaaatccctatctgctctt

SEQ ID NO: 912924 - DNA, 120 bp, Artificial Sequence
  ENSG00000237321_4 (sequence is synthesized)
gagctaagattctttcttattctaactctactttctccttaagcaatcttgtccatactaacatttttttattatcaccgttactcagatgattctcaaattaaaattttccacccagag

SEQ ID NO: 912925 - DNA, 120 bp, Artificial Sequence
  ENSG00000272558_0 (sequence is synthesized)
tttaaaaggagacttgtgaacagcaaagagtagaaagggttctcttacaactgaagcccatggaagacaaatgtgtactgcttggcggataattgcagctttctttcattccctacatga

SEQ ID NO: 912926 - DNA, 120 bp, Artificial Sequence
  ENSG00000272558_1 (sequence is synthesized)
gagacagcaacatacgatcatcactattatcttgctttgccccagtccaggttaaccatctgtggtatttttagttgctaagtccatatattcaacataaatcaattatatatccactaa

SEQ ID NO: 912927 - DNA, 120 bp, Artificial Sequence
  ENSG00000177234_0 (sequence is synthesized)
attctacactccctggccttccttgtccagaggcttcttcctaagaactcagtgccaggattttgagtagcactggatattctgtgcaatgggttcgttcatccaatttccaccacttta

SEQ ID NO: 912928 - DNA, 120 bp, Artificial Sequence
  ENSG00000177234_1 (sequence is synthesized)
cagatgaactggggatcagagaaggcaagccacctccccaaggtcacacagcttgtgagagcaagacaacagcatcgaggcctatgtaatagcagagccattgcttctttggctctgcgg

SEQ ID NO: 912929 - DNA, 120 bp, Artificial Sequence
  ENSG00000177234_2 (sequence is synthesized)
aagcttgtattgtggtatatctgtggtgtagctttgctgtctcctgtgtcaatgtcaggaggacaggctgagctcctgggaccagaacccctcagattccaggaggagcagagaaagcac

SEQ ID NO: 912930 - DNA, 120 bp, Artificial Sequence
  ENSG00000177234_3 (sequence is synthesized)
agatggcctggagagtcccaggggtgaggccagcaagtactttcttcccccaggtgctcagagcatcctctgagttgccaaacagactcccagaggggtcaactgtgggccctaaaccag

SEQ ID NO: 912931 - DNA, 120 bp, Artificial Sequence
  ENSG00000177234_4 (sequence is synthesized)
acagcagctgggaagcaggctctcaggggaactggggtctcaccagctcaggagcaggccaggactcctcagcacagaagctgggaatcttgagtgtccagatcagcctgaaaatctgga

SEQ ID NO: 912932 - DNA, 120 bp, Artificial Sequence
  ENSG00000177234_5 (sequence is synthesized)
cttgggaaaagccatctggctggggccacctgcatgccgctgtgactggggcatcctgctgctctcctctctcacaaggtggtgccatctgccttgtcactgctcctcaggacaagcctg

SEQ ID NO: 912933 - DNA, 120 bp, Artificial Sequence
  ENSG00000177234_6 (sequence is synthesized)
actgctctccctgcacctctggccattgagaatccggctgctccatcgtggtggaaaatcttccatgctcagagggacaccttccgacactggggttctggagagcctggtgccacgaga

SEQ ID NO: 912934 - DNA, 120 bp, Artificial Sequence
  ENSG00000177234_7 (sequence is synthesized)
caaggagccatgtgacaagagggggaggggtaggagtgggagacacaagtgtggtttgggacaaaatagggcctgaggctcacgtgttataaaaccccctttgctctgcctgtctccttg

SEQ ID NO: 912935 - DNA, 120 bp, Artificial Sequence
  ENSG00000177234_8 (sequence is synthesized)
aattgtggccagtttcacatgggaagcaacgtcgagggacagggagactgcaggtgaggcctcagggctctgcattcccatccccaaaagtcaccagcgtgtggccttgtgggtgtcact

SEQ ID NO: 912936 - DNA, 120 bp, Artificial Sequence
  ENSG00000177234_9 (sequence is synthesized)
cccctctgtggagtcaactttgtgcagtgacatgcagaggctggactgctgccacctcatgcccctcctggcatgatggtcgcatgaggctgagtgatttgcaggtctatggggaaaccc

SEQ ID NO: 912937 - DNA, 120 bp, Artificial Sequence
  ENSG00000177234_10 (sequence is synthesized)
gcctcagagatgtggaggagaagccaggcagagcgctgttcattccatttctttctttttttaatctaaaggagggaaagagctttattaactcaaacaaagggatgccatacaacttcc

SEQ ID NO: 912938 - DNA, 120 bp, Artificial Sequence
  ENSG00000177234_11 (sequence is synthesized)
caacgatactgtgcagtgatggtattagcttccacctgttcttccattctgggggcagggtgtgaggactggctgctctgggagacgctctgagctgagagagaagaaatagctatgcta

SEQ ID NO: 912939 - DNA, 120 bp, Artificial Sequence
  ENSG00000177234_12 (sequence is synthesized)
atagctgccccttactgagtgctcactctgtgtccggggctacaccgagtgcttgcagcgggttctcaggcgcacttagaacagcactgtgagaaaggcacttttgctgccccttgtgta

SEQ ID NO: 912940 - DNA, 120 bp, Artificial Sequence
  ENSG00000177234_13 (sequence is synthesized)
cagatgaggacaaagagggacagagaggtttagaaccttgacctatatcacacagccagtgagcagacgaccggaatttgaatcctgcaatctctctgcagagcctgcgcatttaatacc

SEQ ID NO: 912941 - DNA, 120 bp, Artificial Sequence
  ENSG00000177234_14 (sequence is synthesized)
acacacagttctggcctgcagtgaatttggttgttcttcctgcctggggtggtcagtttccaagcctttccagatggacttctgcagcccaaagctgcgtgctccccgtgcaggcccttg

SEQ ID NO: 912942 - DNA, 120 bp, Artificial Sequence
  ENSG00000177234_15 (sequence is synthesized)
tcagagcagagaaagatggctgaagttgttgtccatctagatttttatcttcaaaacattgctgaaatcaatctctcttctaccgtctccgatttcctttgtccttatgggtggtctaca

SEQ ID NO: 912943 - DNA, 120 bp, Artificial Sequence
  ENSG00000177234_16 (sequence is synthesized)
actttactatcattttagtggatgcaagaggagtggagataaacacgtgttcagcctgctgtgaatctctgcagtggctatgttgtttcttaaacagatgtaatgaggcatctattccct

SEQ ID NO: 912944 - DNA, 120 bp, Artificial Sequence
  ENSG00000177234_17 (sequence is synthesized)
gtgtgccatgtgccccttgagtaggggacatctgttttgtgttgtctgtgtctccagcattagaatggaacctggcacacaatagaggctcaattagtatttgttgaataaatgaacatt

SEQ ID NO: 912945 - DNA, 120 bp, Artificial Sequence
  ENSG00000237326_0 (sequence is synthesized)
tgacagggaaacaatgcccgacaccgggcccttcccacatgccctgctgaggaccgacctgagtttctgaggcgcctctgccgggccctgtgtggagggaggaggcagagaatgggtgac

SEQ ID NO: 912946 - DNA, 120 bp, Artificial Sequence
  ENSG00000237326_1 (sequence is synthesized)
gggaccctggacaagccaaagcggcaggagaagaccctgcctgaacccagctatgtggagaggcccacgggatggaggttgaggtggagcatgagctgcccctgagcagacagaacaaca

SEQ ID NO: 912947 - DNA, 120 bp, Artificial Sequence
  ENSG00000237326_2 (sequence is synthesized)
gctgggaattgagagtggcggtgcccacagggagcccacaggcaggaagacccaggctggaggatcagggcccccacggaggaagactttggactaaaagtcacaagaccttgcttttag

SEQ ID NO: 912948 - DNA, 120 bp, Artificial Sequence
  ENSG00000237326_3 (sequence is synthesized)
tgccagctttgtcactaactggcaatttaccgtaatgaaatcaccgatactggcccaaccttcatttcttcatctgtaaaacatattgccagggacgaagtttgcaatttcgttgacttc

SEQ ID NO: 912949 - DNA, 120 bp, Artificial Sequence
  ENSG00000272551_0 (sequence is synthesized)
ctgaaacagtaacagttcatcaaaagacagttatcccagatacgcttccaagagtggcaatcagttttcctaaagagtcaaagaaaagagtgagaattgtgggaagtgggagactagaag

SEQ ID NO: 912950 - DNA, 120 bp, Artificial Sequence
  ENSG00000272551_1 (sequence is synthesized)
gacagactcatttggaaacaggaagtggttcaaggaacttaggatttggaatataggaaaagaaatggggaaacatacccatgccttctcttctctgtagacatccaatttgaacctact

SEQ ID NO: 912951 - DNA, 120 bp, Artificial Sequence
  ENSG00000272551_2 (sequence is synthesized)
ccagattagtaggaagtaaaatcattatctgatgttctgtggccacatggaaaatacattggtagttgcaaccagactagagtcaacattgagaaaccaatagaaccactaacttgggct

SEQ ID NO: 912952 - DNA, 120 bp, Artificial Sequence
  ENSG00000272551_3 (sequence is synthesized)
tactgcagcccatctctgatggggaggtgaggacttccagccctgggctgctcattcacctcccctctggagcagtaaacagggaagtagcaagaagctaagctccttttgttaggcatt

SEQ ID NO: 912953 - DNA, 120 bp, Artificial Sequence
  ENSG00000272551_4 (sequence is synthesized)
cattgttaattcctccaaggtgaccattgatgtattttttattcagtaacttagcatatatgtgtgtgcacaattaatagttatatataataaaagtgaatatattaaaatttaaaaaaa

SEQ ID NO: 912954 - DNA, 120 bp, Artificial Sequence
  ENSG00000272551_5 (sequence is synthesized)
ttatgatcattgcacaattctgtgactatactacaaaccattaaaatgtatactttaaatgggtgttttttatgttatttatgtgattatgtctcaataaagatgttttaaaaccataaa

SEQ ID NO: 912955 - DNA, 120 bp, Artificial Sequence
  ENSG00000237328_0 (sequence is synthesized)
gggatggcatcctccctcggcttcccagacacccccatcaatgcctggcccccttccttaggagtgggggtctcagagacatgaggcttggggaggccagccaaagtaacaactaggcca

SEQ ID NO: 912956 - DNA, 120 bp, Artificial Sequence
  ENSG00000237328_1 (sequence is synthesized)
tatgtttcttaaaaacaaaacccaacagcccttaagggcttgggggtggggaatgcatcctgcaggaccaggacagctgcacgggacactacaatgtgagttcacaagaaggccgcctgg

SEQ ID NO: 912957 - DNA, 120 bp, Artificial Sequence
  ENSG00000237328_2 (sequence is synthesized)
ctgctcaggggctggcctgggcacctcggaaccaggcctggaccccaggtcttccctgtgatgaatccaagttcaaaggcaccagctccagcacctaccgctcaggctgggaggctccag

SEQ ID NO: 912958 - DNA, 120 bp, Artificial Sequence
  ENSG00000237328_3 (sequence is synthesized)
agctcccaagaagccctgtcttctagaaccagagcctgaagccccaccattctcctggcttcattccaggcaaaggattacccatgcttggcttctaagaaatgccacaccccaagaggg

SEQ ID NO: 912959 - DNA, 120 bp, Artificial Sequence
  ENSG00000237328_4 (sequence is synthesized)
taacagggtggagagactgccaacggacgcatccatagctgggctgaagtctgtgtctcaacttgtgtcctgatttctggagatgcaaagagtgagacaactcctcgtagttggccactc

SEQ ID NO: 912960 - DNA, 120 bp, Artificial Sequence
  ENSG00000237328_5 (sequence is synthesized)
tgacctggcaagagcccacaagctccctgcccgcttcttcttctctaggcatgctgtcccagggtctgaggtcacaccacccttccccatgtggggatggacatacagcaggtgcatctt

SEQ ID NO: 912961 - DNA, 120 bp, Artificial Sequence
  ENSG00000277701_0 (sequence is synthesized)
atcccacatcaaaaagttaggaagaactcaaattaataacctaacatcacaactgaaagaactagagaagcaagacaaaaccccaaagctagaggaagacaagaaataactgaaaatctg

SEQ ID NO: 912962 - DNA, 120 bp, Artificial Sequence
  ENSG00000277701_1 (sequence is synthesized)
agctgaactgaaagaaaccgagacatgaaaaaaagaaattcaaaagatctatgaattccgggtgatggcatcagctgagaagggaaggaagcccatgagaggacactgaagaaggagtga

SEQ ID NO: 912963 - DNA, 120 bp, Artificial Sequence
  ENSG00000277701_2 (sequence is synthesized)
gcagacaataagaagcccacagaagacagagaaggaacaactagagggagaagccaagacactacccaaagcagtgcttcactacagtggcagacagacctgaaaattttcatctgaagc

SEQ ID NO: 912964 - DNA, 120 bp, Artificial Sequence
  ENSG00000277701_3 (sequence is synthesized)
gtgtggaggctaaaagcgggcctctttggggattccaggtggaagtgttggacatctgtagtattcctggtctcgaatcatcctgatattcttcattttgttattcacattggactagga

SEQ ID NO: 912965 - DNA, 120 bp, Artificial Sequence
  ENSG00000277701_4 (sequence is synthesized)
ctatgttgaccaggctggtcttgaactcttggcacccaagcgatccttttgcctggaatcccaaagtgtcagatttactgaagaatatttcattgtaattactttttatactttataggt

SEQ ID NO: 912966 - DNA, 120 bp, Artificial Sequence
  ENSG00000277701_5 (sequence is synthesized)
tactttataggtcaagagctctgttttaaatacaaaatttattgaatatactttttcaaacaaagtttcatgttctaatcattgtctgatttcagcattaaatgaaacacagtaaagaaa

SEQ ID NO: 912967 - DNA, 120 bp, Artificial Sequence
  ENSG00000277701_6 (sequence is synthesized)
agctgcattcgaggctggtggagggtgggctgggcatgggatgcacaaatggaaattccactgggtctgcagctcacacataggcatgaccagcatagagatagagaggccccagtgctg

SEQ ID NO: 912968 - DNA, 120 bp, Artificial Sequence
  ENSG00000277701_7 (sequence is synthesized)
ctgagtaactgtgattccccaggtgatggcatcagctgagaagggaaggaagcccatgagaggacactgaagaaggagtgagcagacaataagaagcccacagaagacagagaaggaaca

SEQ ID NO: 912969 - DNA, 120 bp, Artificial Sequence
  ENSG00000277701_8 (sequence is synthesized)
agagacagtttgacttcctgtctattcctctcttccctcctctgtttggatgcccttccagttttgcacattcagtgtaatgttggctgtgggtttgtcatggctagctctcatcatttt

SEQ ID NO: 912970 - DNA, 120 bp, Artificial Sequence
  ENSG00000277701_9 (sequence is synthesized)
ggcacttctgactagaagggcaagaggggccagtgttgttgttacctgaaaggtaagtgcagcccacaaaaatgcagtgaagaagaagatgtattatgcatatgtttaagttaatacaat

SEQ ID NO: 912971 - DNA, 120 bp, Artificial Sequence
  ENSG00000277701_10 (sequence is synthesized)
tgagatatatttagcagacagaatcaatagagttgatgagtgactgactggatgtgtggggagtttatatcactcccaggtttttgacttgggcaaccgggcactcatgaaggaaaaagg

SEQ ID NO: 912972 - DNA, 120 bp, Artificial Sequence
  ENSG00000277701_11 (sequence is synthesized)
gggatgccatacaacaggactatgtgatggtttttggctgtgtccataggaagtcacaacaggcaagggaaagaaaccagaacccagtcatggagttaagaagtgagtcagagagtagat

SEQ ID NO: 912973 - DNA, 120 bp, Artificial Sequence
  ENSG00000277701_12 (sequence is synthesized)
gggtagggacagtgaggtaaggcctctttctaaggaagtttggctgaaggatagactagctggacacatgctggctgtgtggggtagagggaggaatgatggagggtaggagagccttga

SEQ ID NO: 912974 - DNA, 120 bp, Artificial Sequence
  ENSG00000277701_13 (sequence is synthesized)
gagatgacctttgccaagagcacagccgtctttcacggtcacagagaggtaggacaaaatgagtggtgttcaagaattggtttgtagcacaatatttcaactatgtcctttaaaaagttt

SEQ ID NO: 912975 - DNA, 120 bp, Artificial Sequence
  ENSG00000277701_14 (sequence is synthesized)
ggtcagagtcaatgtttcctaacaatgttgatttatttggtcctaaatatttaaacacattttataaatagcttttccacaccacatatatagggaaaaacagggagttaacttggccca

SEQ ID NO: 912976 - DNA, 120 bp, Artificial Sequence
  ENSG00000277701_15 (sequence is synthesized)
gcagcactgtttgtggggctaacaccctgtctgtgtatctcacaccaaccctaagctttgtttctctcctgtcactttgctcctatttctttcatgtgaaagaatgttcattttctttga

SEQ ID NO: 912977 - DNA, 120 bp, Artificial Sequence
  ENSG00000277701_16 (sequence is synthesized)
aaatgagctcatttcctcattttctttccatatttcagcaggaacaaagatcaccacaactggctccccttcaactatgttagatggcaacttgccttcagtatggtgaaacacatcagt

SEQ ID NO: 912978 - DNA, 120 bp, Artificial Sequence
  ENSG00000277701_17 (sequence is synthesized)
taagaccggggttgtgcatggcaggactttctacaaggacacccagtctccttaataaacatgagatgctctctttccagaatttctcttgcctgacacagcataggaagatgctgaacg

SEQ ID NO: 912979 - DNA, 120 bp, Artificial Sequence
  ENSG00000277701_18 (sequence is synthesized)
ggagtgaggagaagtagggaagactaggtggttgtaggcctccttcatctgttcattggctgtggcattaggccagctactctttgcacttctgtaaagtgagacggtcgatcttgtctg

SEQ ID NO: 912980 - DNA, 120 bp, Artificial Sequence
  ENSG00000277701_19 (sequence is synthesized)
cctctctagaggatggttgcaggtgtcaaatggggtagttaggtgggagggcatttcacaaagttaaaaaatatgactttggaggcttgttatattgatgaggattataatccctgagaa

SEQ ID NO: 912981 - DNA, 120 bp, Artificial Sequence
  ENSG00000277701_20 (sequence is synthesized)
ttcctggtatgaagaagggaaaagaagataatttgtgaaagaaatgtgtccagttactagtctttgaaaagggtcagtctgtagctcttcttaatgagaataggcagctttcagttgctc

SEQ ID NO: 912982 - DNA, 84 bp, Artificial Sequence
  ENSG00000277701_21 (sequence is synthesized)
aatccatcatgatcaagtatgcttcatccccaggatgcaaggttgcctcaacatacacatatcaattaatctgattcatcacat

SEQ ID NO: 912983 - DNA, 120 bp, Artificial Sequence
  ENSG00000277701_22 (sequence is synthesized)
gcctcaacatacacatatcaattaatctgattcatcacataaacaaaactaaagataaaaaccatgtggttatctcaatataagcagaaaaggctttcaataaaattcaatgcctctcca

SEQ ID NO: 912984 - DNA, 120 bp, Artificial Sequence
  ENSG00000277701_23 (sequence is synthesized)
tcaataaaattcaatgcctctccatattaaaaactctaaaaaatctgggtattgaagaaacatagctcaaaatgatgagctgtttttgtatcagtatcatgctgttttggttactgtagc

SEQ ID NO: 912985 - DNA, 120 bp, Artificial Sequence
  ENSG00000277701_24 (sequence is synthesized)
taacatgatgcctccagcttcgttctttttgctgaggattgcttggctattagggctcttttttttggttccatatgaattttgaaatagtttgctctagttctgtgaggaatgccgttg

SEQ ID NO: 912986 - DNA, 120 bp, Artificial Sequence
  ENSG00000277701_25 (sequence is synthesized)
gttggtaatttaatagggataacttgcatctgtaaattactttgggcagtatagccattttaatgacattaattcttcctatccatgagcatgacatgtttttccatttgtttgtgtctt

SEQ ID NO: 912987 - DNA, 77 bp, Artificial Sequence
  ENSG00000277701_26 (sequence is synthesized)
ccttattttttctgtgtgtagcaattatgaatgggattgtgttcttcatttgactctctgcttgacttgatgtatag

SEQ ID NO: 912988 - DNA, 120 bp, Artificial Sequence
  ENSG00000277701_27 (sequence is synthesized)
tgtgttcttcatttgactctctgcttgacttgatgtataggactgctagtaatttttgcacattgattttgtatgctaagactttgctaaagtttatcagcagaagaagctttggggcca

SEQ ID NO: 912989 - DNA, 120 bp, Artificial Sequence
  ENSG00000277701_28 (sequence is synthesized)
atattcttcattttgttattcacattggactaggcaggaacaaagatcaccacaactggctccccttcaactatgttagatggcaacttgccttcagtatggtgaaacacatcaaatttc

SEQ ID NO: 912990 - DNA, 120 bp, Artificial Sequence
  ENSG00000277701_29 (sequence is synthesized)
catccaatgcaggagcacccagattcataagtaaagttcttagagacctacaaagtatgtttcacagtaatagtgggagatttccacactccaatgacagtattagacagatgattgagg

SEQ ID NO: 912991 - DNA, 120 bp, Artificial Sequence
  ENSG00000277701_30 (sequence is synthesized)
caaaaaaatgaacaaagatattcaggacctgaactcaacattggatcaaatggatctgatagacctttacagaactctgcactcaaaaacaacagaatatgcattcctcacatcatcata

SEQ ID NO: 912992 - DNA, 120 bp, Artificial Sequence
  ENSG00000277701_31 (sequence is synthesized)
tgccacatactctaaaatcaaccacataattggacataaagcaatcctcagcaaatgcaaaacaactgaaatcataccaaatacatactgagatcacagtgcagtaaaaatagaagacta

SEQ ID NO: 912993 - DNA, 120 bp, Artificial Sequence
  ENSG00000277701_32 (sequence is synthesized)
atcacagtgcagtaaaaatagaagactaagaaaattgctgaaaatcatgcaattacatggaaatcaatcaacatgctcctgaatgactttttaataaataatgaaattaaggcagaaatc

SEQ ID NO: 912994 - DNA, 120 bp, Artificial Sequence
  ENSG00000277701_33 (sequence is synthesized)
gaattccgggtaggtttcttgaaaatattaataagaaagtctgctagcagactaatacagaggatgattgaaagaaacacaattagaaatgacaaagggaatgttaccactgaccccaca

SEQ ID NO: 912995 - DNA, 120 bp, Artificial Sequence
  ENSG00000277701_34 (sequence is synthesized)
gaaatagaaacagccatcagaaactactgcaaacacttctatgcatacaaactagaaaacttcaaagagatggataaattcatggagaaatacaccctcccacaactgagccaggaagaa

SEQ ID NO: 912996 - DNA, 120 bp, Artificial Sequence
  ENSG00000277701_35 (sequence is synthesized)
attgatttgctgtaaacagaccaataacaagctccgaaattgaatcagtaataaataacctaccaaccaaaaaaagcccagaacatgatggattcccagtcatattctactagaaataca

SEQ ID NO: 912997 - DNA, 120 bp, Artificial Sequence
  ENSG00000277701_36 (sequence is synthesized)
aagaagagctggtaccatttttacaggaactatttgaaaatattgaggaggaggaactcctccccaactcattctatgaggccaacatcatcttgataccaaaatctggcagacacacac

SEQ ID NO: 912998 - DNA, 120 bp, Artificial Sequence
  ENSG00000260466_0 (sequence is synthesized)
cgcagccagatcatgccgatgatggccagggccacgcagagccagttgaagaagctgaagaagttgatgacggagaagatgtccttggagaaggcgtagagcagcgtcatcacacactgg

SEQ ID NO: 912999 - DNA, 120 bp, Artificial Sequence
  ENSG00000260466_1 (sequence is synthesized)
aagagagaggcggctggctgagccctggggcccacgagcagggctgtggacggccgtggtggccaccggggactgtccagcctggctgggcccagctgagcaccagggaattttgtttta

SEQ ID NO: 913000 - DNA, 120 bp, Artificial Sequence
  ENSG00000260466_2 (sequence is synthesized)
ttggagtgatgtgtgacacagccagagggaacaaaggcagtcacgcgggctggcacggaaagatgcaggagaagcggaaggaaactgtgtgtgatgcaccccgctgagaaacgaacagag

SEQ ID NO: 913001 - DNA, 120 bp, Artificial Sequence
  ENSG00000260466_3 (sequence is synthesized)
tgggcgcccacggaggtgcagtgagccaggcggctggcagagcagcaccccgggtcagcttctgcctcccgcatttccgatggtctgaatcgtttgtggcagccaccatatattattttt

SEQ ID NO: 913002 - DNA, 120 bp, Artificial Sequence
  ENSG00000249588_0 (sequence is synthesized)
aactattaggacacccttgagaagagctgttcagacttatcagaatcatggaaggaagctggattctttgattaccaacctgaagttgctcagaatggcttgcaacagaaaatggatctt

SEQ ID NO: 913003 - DNA, 120 bp, Artificial Sequence
  ENSG00000249588_1 (sequence is synthesized)
cagcagctgcccacaaacaaggtcaccgacaacagcaaccagctctcttcatcagcccctgccaaccccacaaaaagtacatattctccttcagaaggatccatgaggccgccattcaat

SEQ ID NO: 913004 - DNA, 120 bp, Artificial Sequence
  ENSG00000249588_2 (sequence is synthesized)
cttgcagagacattttaattttagaaggaagagtgactaatgaacaggacattctaattctggtgatgtgctttttcccattttaatgtcagctgaaccacaaaaatgttgatatttctc

SEQ ID NO: 913005 - DNA, 120 bp, Artificial Sequence
  ENSG00000249588_3 (sequence is synthesized)
tcttcattactcctcatggttcaggaagaacattgtcgccaaagggaaaaaaaactgggtaactcctgatccctccacccagtttcaaaagacaaaataaggtgcagctctggtgtcagc

SEQ ID NO: 913006 - DNA, 120 bp, Artificial Sequence
  ENSG00000249584_0 (sequence is synthesized)
ggcagtatagagtcaaaaagcaacactggaaaagggagagaaaagagcaaaacaaaattaggctggagtgggttttttagtttagtttagtttagttttgttttgtttgtgcattaagaa

SEQ ID NO: 913007 - DNA, 120 bp, Artificial Sequence
  ENSG00000249584_1 (sequence is synthesized)
gcatagcaggcttcaacatgacttgctggctaaaagttctaacatgaagagtcttttcaagcaaataccccacagaattcctcttatacatcaaatggagtatcagaatcctttggtcat

SEQ ID NO: 913008 - DNA, 120 bp, Artificial Sequence
  ENSG00000249584_2 (sequence is synthesized)
aaccttaatatcagacaattatatgtggatatttgtaaagatacattttcaacaattcaattaaatacaatggaccaaaatctgatagattccaaaaagttttgcctttcccttttcatc

SEQ ID NO: 913009 - DNA, 120 bp, Artificial Sequence
  ENSG00000249584_3 (sequence is synthesized)
aaatcttacgtacctgaaattctcttgcatagggctgttcacttacactcagactttaagctcctttaaaggcacctgtgctctaagagaaaggatttcaatgaaaggtatgctaagact

SEQ ID NO: 913010 - DNA, 120 bp, Artificial Sequence
  ENSG00000249584_4 (sequence is synthesized)
cgggctctgccacttatttaggcctgtgagtaagggcaagccaccgacctgtttatgctctgattggcttatctgtataatgaagttactaatacctaccacgggagattgtaagaattt

SEQ ID NO: 913011 - DNA, 120 bp, Artificial Sequence
  ENSG00000249584_5 (sequence is synthesized)
tacctaccacgggagattgtaagaatttctaaaattcaatgaatttgaactattttataaatgctgaagttgcactggggttcacacctggaatcccagcactttgagaggctgaggcag

SEQ ID NO: 913012 - DNA, 120 bp, Artificial Sequence
  ENSG00000249584_6 (sequence is synthesized)
accagtctggtcaacataatgagatcctctctctaaaaagaaattgaaaaaattagacggatggtggcacacacctctagtccccaccactcaggaagcttgaggtggggggattgcttg

SEQ ID NO: 913013 - DNA, 120 bp, Artificial Sequence
  ENSG00000249584_7 (sequence is synthesized)
attccagaagttcaaggctgttgtgaactatgaatcacaacactgcactccagcccgggcaacagagtaacaccctgtctctaaaaaaattgaaattaactttaaaaaatatatagcact

SEQ ID NO: 913014 - DNA, 120 bp, Artificial Sequence
  ENSG00000249584_8 (sequence is synthesized)
gggttattccatgaaaatgctcctggaattggtgatcttctaaacaaggggtccccaaatcccatggcgcagactggtatgagtccatggcctgttaggaactaggccacacaggaggag

SEQ ID NO: 913015 - DNA, 120 bp, Artificial Sequence
  ENSG00000249584_9 (sequence is synthesized)
gtgagcagcaggcaagctagcattgctacctgagctccgccccctgtcagatcagcggtggcattagattcccataggagcgcaagccttactgtgaactgtacatgcgagagatctaga

SEQ ID NO: 913016 - DNA, 64 bp, Artificial Sequence
  ENSG00000249584_10 (sequence is synthesized)
ctgaggtggaacagtttcatcctgaaacctttcccaacctccatccctgctttaaactatttcc

SEQ ID NO: 913017 - DNA, 120 bp, Artificial Sequence
  ENSG00000249584_11 (sequence is synthesized)
gtgccaaaaaggttggggaccgctgctttaaactatttccattctcttatgcagaagtgatatgcatagcaaatttttccatcagaacaagttttgattaaacttgacagcttgaggaga

SEQ ID NO: 913018 - DNA, 120 bp, Artificial Sequence
  ENSG00000249584_12 (sequence is synthesized)
atgcagggagcattaagaaggaggatgtttaaaggaggaaatgggggaaaatggcccattgtgaaaacaaatttctgtatctcataactatgtattggtaaagtatgctttgctttcact

SEQ ID NO: 913019 - DNA, 120 bp, Artificial Sequence
  ENSG00000249584_13 (sequence is synthesized)
tgtaaacctgaaggaaacaagttagtgaatagagatcatttaatacatgttctctatactatgactatttgttttattgcagtttttaagatgagatcttagtgggttggattagacttg

SEQ ID NO: 913020 - DNA, 120 bp, Artificial Sequence
  ENSG00000249584_14 (sequence is synthesized)
acatttttttctggggatgagctcttgtgatcgctagagaagaaagggagtagagaaaatccagccttggttgaagtggagaggggtcaagatgccacaggtggagaagaggatacagct

SEQ ID NO: 913021 - DNA, 120 bp, Artificial Sequence
  ENSG00000249584_15 (sequence is synthesized)
cccattagaggaacattttaaagtgtgtggctacccatcttgtaaacctgtaaaagatttctctagctcagaactatgtactggtaaagtatgctttgactatatcaggggaaatcttta

SEQ ID NO: 913022 - DNA, 78 bp, Artificial Sequence
  ENSG00000249584_16 (sequence is synthesized)
taaaaaataaaattgttcagtgtaagtttgtattctctcctcctcccgcagaaccagaaaacatgattgatcgatgga

SEQ ID NO: 913023 - DNA, 120 bp, Artificial Sequence
  ENSG00000249584_17 (sequence is synthesized)
tcttggctcactgcaacctccaactcacggattcaggggattctcctctctcagcctcccatcttgcttctattataatttgtattcagttaatcatactgagattggcttgaaatcatt

SEQ ID NO: 913024 - DNA, 120 bp, Artificial Sequence
  ENSG00000249584_18 (sequence is synthesized)
tgtttacttattactatttttaaacatattagtttattatttttaaacatactcattgaattagtaatgagtagaagccttctttggcctgggatacaattactcaagtcactttaggtc

SEQ ID NO: 913025 - DNA, 120 bp, Artificial Sequence
  ENSG00000249584_19 (sequence is synthesized)
atgataaaagttgtacaaatctcagtactcatggagttgctcattttctgtttgttttggggaatttaagctacagagctaggttcttcttacatatcatccagggccagagggcattca

SEQ ID NO: 913026 - DNA, 120 bp, Artificial Sequence
  ENSG00000249584_20 (sequence is synthesized)
tctccttacctttctttcagttgggatgtttgactggaataatagaggttgaaattactaaagtatctacaacacatataatatatatcataggaaagagaagaggtggaacatgaagaa

SEQ ID NO: 913027 - DNA, 120 bp, Artificial Sequence
  ENSG00000249584_21 (sequence is synthesized)
gtaatgaagaaagaataaatttcaggaattttaggagttttcagaataattacacatgctattggataagtgatatgaaataccatttctatccaccaaaggaagctgatttaatagcaa

SEQ ID NO: 913028 - DNA, 120 bp, Artificial Sequence
  ENSG00000249584_22 (sequence is synthesized)
ttgctatgcatattagcatcttaattaagactttaatttatcacaagcatttactaggaatccttgtggcacaatccaaggcacttcaagagagtggaacacagctcctcaaaataggca

SEQ ID NO: 913029 - DNA, 120 bp, Artificial Sequence
  ENSG00000249584_23 (sequence is synthesized)
tgttggtagttgaaaatgtatgccagtggaaaccattcatgatcaattacatcatagatagataggtactggggaattaagttaaaggacataattttttaattagcctaaactttcttt

SEQ ID NO: 913030 - DNA, 120 bp, Artificial Sequence
  ENSG00000249584_24 (sequence is synthesized)
gaatgaacttgtaccaagatttaatagtaagaaagatctgaaatttctatccttattagaaagcagcaggctgctgcatgacttggggaattcctagccacaaaatgttgtggaatgctg

SEQ ID NO: 913031 - DNA, 120 bp, Artificial Sequence
  ENSG00000249584_25 (sequence is synthesized)
ttttttggaagtatcaacagttgatttcaagcaaagtgaagatataatattagggtagaatgagcatttgtctcccttcggatgccaagtatttaagactgtaacaagaaattgaaaaca

SEQ ID NO: 913032 - DNA, 120 bp, Artificial Sequence
  ENSG00000249584_26 (sequence is synthesized)
ggaatttaagaaggagaaaagtttttatcatttgaaacttgaaaccaaggaatttaatacaagtgatgaccaacttatgcacagaagggatttttaaagcctggaaagataagcacagag

SEQ ID NO: 913033 - DNA, 120 bp, Artificial Sequence
  ENSG00000249584_27 (sequence is synthesized)
aagcattgcatctcatggcacagatacaatagaagacaggggatccagtgaaggccaaggcaaagatggtcatggcctctacgtgaaagcacatcagttcttgagtggtgaggtaggaaa

SEQ ID NO: 913034 - DNA, 120 bp, Artificial Sequence
  ENSG00000249584_28 (sequence is synthesized)
gaggcagggatttggcagagcaatactgtgtggaataggctggcttttgagattactgattctctctggtaagtggagagttacctacctacgtgttatcttctaggatgtggaaacaga

SEQ ID NO: 913035 - DNA, 120 bp, Artificial Sequence
  ENSG00000249584_29 (sequence is synthesized)
ctctagtgtatagacttggaaaagtgtcaaattgatatcattgacttaatatcttaacttaaaaattacatgtagagaaagccttacaaaaaagcgtcctttattgtacttgtttatatg

SEQ ID NO: 913036 - DNA, 120 bp, Artificial Sequence
  ENSG00000249584_30 (sequence is synthesized)
ctatataccctgctaatctctttgatttttaagattctccatgagatacatgacgacaaacatacaatgttaatgttttctgtaggatgatacaattgtaatatctctgtcaaattggaa

SEQ ID NO: 913037 - DNA, 120 bp, Artificial Sequence
  ENSG00000249584_31 (sequence is synthesized)
caaatatacaacaatcagcagcaattaccttgggaaacagaggtcaaggttggggtcttgctatgttggttaggctggacttgaacccctgggctcaaacaatcctcccacttcagccac

SEQ ID NO: 913038 - DNA, 120 bp, Artificial Sequence
  ENSG00000249584_32 (sequence is synthesized)
ctgagtagctgggaatatgagtggaatcagatctcagtgatgagactcacatgaaagaaacagcttaatcttaacctgtatcctgtaagtttaaaattaaactatcattaaccatcaaaa

SEQ ID NO: 913039 - DNA, 120 bp, Artificial Sequence
  ENSG00000274244_0 (sequence is synthesized)
gtaggaagtgagggagtaagggtggcaggatggagtgggctttgtggaaagttagaaaagactttatagagaagacaaagctggcatagccttaacaaataaagtgttgaccaattagaa

SEQ ID NO: 913040 - DNA, 120 bp, Artificial Sequence
  ENSG00000274244_1 (sequence is synthesized)
aacacaggtaaaagtatttaagtagagaggagagcagcgcaacaaatgtaaagagggatgaaacacgctgttgtgtttggggaactactagtggctcaacaaagctggaagtggatgctg

SEQ ID NO: 913041 - DNA, 120 bp, Artificial Sequence
  ENSG00000274244_2 (sequence is synthesized)
aattggagctggacaggtaggacagaattgaagtaaatagcgcaaggaccaatgctgacctcacggtggcactccagtcttcgaataaagggctctctggactcatcttattgacctcca

SEQ ID NO: 913042 - DNA, 120 bp, Artificial Sequence
  ENSG00000274244_3 (sequence is synthesized)
aatggacagtccacattgaagtgaagagttgacatgaactctgggcccatagaccccacagtttaatttcctgaagagaatctaccaaggactttgcttttctgtttttaaatcagctct

SEQ ID NO: 913043 - DNA, 120 bp, Artificial Sequence
  ENSG00000274244_4 (sequence is synthesized)
gacgtaaggctggatcaatagaataggtgtcaagtatgcccgaatgtctccatccgtaaaaaatttcatcagggttcaaaagtaaccaaaataatttcaccattattatttattaatgga

SEQ ID NO: 913044 - DNA, 120 bp, Artificial Sequence
  ENSG00000274248_0 (sequence is synthesized)
ggccctgggacccgccccacccgaagcccggggagatccaaccgcaggctgcctccggccagcggactcattcacactccgcaaacaggctggggccagacgccgccctgccctaggtgc

SEQ ID NO: 913045 - DNA, 120 bp, Artificial Sequence
  ENSG00000274248_1 (sequence is synthesized)
gcccaggtgccgggacaggagccgagggccgcgtgcaccccttgggcccttggaggggccggcatgtgcctctctgtccctgtgccacttccactggccgtacagggccaccaccgcgga

SEQ ID NO: 913046 - DNA, 120 bp, Artificial Sequence
  ENSG00000274248_2 (sequence is synthesized)
aaccgcatgtgtaacccctggaaacagggtcctccttgatgagtcatgttctaagttgggaggaaaattcactggatagtggaggcagtagaaagaaataaaaaaagtctttgttccaca

SEQ ID NO: 913047 - DNA, 120 bp, Artificial Sequence
  ENSG00000270956_0 (sequence is synthesized)
tttacggggtaataaaaatattccacattttgattgtggtggtgattacaaaacagtacatttttcaaaagtcatagaactatatatttcaaaaaggtgaattttcccacatataaattg

SEQ ID NO: 913048 - DNA, 120 bp, Artificial Sequence
  ENSG00000270956_1 (sequence is synthesized)
taactcaatcaatttgactgatacaaaatgtccttaccaattggatccatggcaacgatgggtttggaaggacgacttggtttcccagaccctcttgcattaatggctgtgacacggtgt

SEQ ID NO: 913049 - DNA, 120 bp, Artificial Sequence
  ENSG00000270956_2 (sequence is synthesized)
catcgatctgctctcacttctttgcgctccacaatatatccagtcacttgggagccaccgtcatcctctggtgggtaccaagtaagtgtcatgccatcacgggaaacatcaaatatctgt

SEQ ID NO: 913050 - DNA, 120 bp, Artificial Sequence
  ENSG00000270956_3 (sequence is synthesized)
aatgtttctgggggtccaggaatacctgcagcaagacagaggttaacacgatatggcaatatgaatacgttaaaacaatgactcatatatttgtgttttccttaggttttggttggtatt

SEQ ID NO: 913051 - DNA, 120 bp, Artificial Sequence
  ENSG00000270956_4 (sequence is synthesized)
tttccttaggttttggttggtattttaaaaggtacataaggcacatgactatttttccaatagtttcacttttgtactatttgtaaattttaatttaaatcatttaattatttaattatt

SEQ ID NO: 913052 - DNA, 120 bp, Artificial Sequence
  ENSG00000270951_0 (sequence is synthesized)
aaagcagagttctaagcagaatcctaaccctgcgagggtggggagaaaatcaatgttttgagctggtgtctgtttgcagcgaggtgctggtgaggccattttcatcaggaggaacggtgg

SEQ ID NO: 913053 - DNA, 120 bp, Artificial Sequence
  ENSG00000270951_1 (sequence is synthesized)
caaggtctcctaaatacaagtcactgtcatggtacacaatttagcaaaacttggaggctgattttccccgttgacttagctaagggtcaggaggaagctgtttagaagtacagaggttct

SEQ ID NO: 913054 - DNA, 120 bp, Artificial Sequence
  ENSG00000270951_2 (sequence is synthesized)
gcatctgggagggtaaaatccaaacgcctctcatgctcagagggaaagcatgcctgcatgtttactatcactgctggcctacgtgcttgtgtgtctgaaataaaactgtaacttatataa

SEQ ID NO: 913055 - DNA, 120 bp, Artificial Sequence
  ENSG00000270953_0 (sequence is synthesized)
atactgatagcaaaatgggtctcaccttcaagggttttggtagaactgagggcaaaggtttcctctttctcaaaggtatctcccacctcttcccaagcagcagcaaagttaggcttcagt

SEQ ID NO: 913056 - DNA, 120 bp, Artificial Sequence
  ENSG00000270953_1 (sequence is synthesized)
actttctgaatatggtcagacacagtcacttcgagatcttccagctagtgggtaataagcagtcagtaaagaaaagtcctttctgttatagggcaaagataaaggaactagtcaatatgg

SEQ ID NO: 913057 - DNA, 120 bp, Artificial Sequence
  ENSG00000270953_2 (sequence is synthesized)
ctaccaccaaaatagtttaagttctgtagtctggataaatctaatgttgtagcccttagcaaaggaaagcaagaaaacagaacatctggcaagagcctcagatcaacatctgtagccctg

SEQ ID NO: 913058 - DNA, 120 bp, Artificial Sequence
  ENSG00000270953_3 (sequence is synthesized)
aggtacagagtagtcatgttgcacccacacttgaccactgagttctgggcacacggtaccctctgatcattcactaagaggttgatattttttaaaaaaagttttccctccattctgtga

SEQ ID NO: 913059 - DNA, 120 bp, Artificial Sequence
  ENSG00000270953_4 (sequence is synthesized)
aggctttttaatccatgatctggctataaactaacagctgctgaagcaaaaacaaaaaaccaaaaaacaaaaccaaccccctccccaaatcattttaaataaaactgatctcaatgaaaa

SEQ ID NO: 913060 - DNA, 120 bp, Artificial Sequence
  ENSG00000270959_0 (sequence is synthesized)
acgccccgcgccccgggccgtgcagccagcccttaccttgcagcgcccggctgtctcccgatcgctaaagctacttatcccgggaaagctcgcgcgggacccgggaacgaacccacagac

SEQ ID NO: 913061 - DNA, 120 bp, Artificial Sequence
  ENSG00000270959_1 (sequence is synthesized)
aaaaagtgaaacttcggcagggctggagcggctgctggttggtgcctttccccctccttcctccccaccgtccccaccccctccccttggtctcccgtgcggtgccctgagcgctggagg

SEQ ID NO: 913062 - DNA, 120 bp, Artificial Sequence
  ENSG00000270959_2 (sequence is synthesized)
ctgacgtcaggggcctgaattcctgactttgcctgcacgcatttgtccatgtaaggtatgggaaggcgtgtgcccgcgaagccgccgcgcagagctcgcctggcgggggaggggaaaccc

SEQ ID NO: 913063 - DNA, 120 bp, Artificial Sequence
  ENSG00000270959_3 (sequence is synthesized)
gcagccggcagtggctttgccaaaaggtgggcgcactgagggcattgcatttcctgggaggaagaggaggagacgcgggaatgcagggagcttgcaaaggaggaagagaaagagggagat

SEQ ID NO: 913064 - DNA, 120 bp, Artificial Sequence
  ENSG00000270959_4 (sequence is synthesized)
gtggagactttgcccctgctagaggaagaggaaggagacgtaggaggaagcggccgcgtcagggggctcctggaaaatggaaaagcctgcgtctactattaaggcgtcaaattagggcac

SEQ ID NO: 913065 - DNA, 120 bp, Artificial Sequence
  ENSG00000270959_5 (sequence is synthesized)
tgagcttgagtggaagagatccagccatgaaatccccttccaagattttcctcgtgagccccgccctggattcccagcaagactcaaaacttacaaggtgtcagagctggcaaagaccaa

SEQ ID NO: 913066 - DNA, 120 bp, Artificial Sequence
  ENSG00000270959_6 (sequence is synthesized)
cttccaacccgtccgcttggcacgtgaggaaactgaagctctcggaagagaaatgacttgtacagggtcgtcactcagcagatcgaggagcgggcccaggcgctctgcctcccacttggg

SEQ ID NO: 913067 - DNA, 120 bp, Artificial Sequence
  ENSG00000270959_7 (sequence is synthesized)
ttcccgcctccaggaagggccctggctcccttttagccctgagccttgaagcaggttagatgcccgcgagctgtgcggaccacccagtgatttctactgctcttggcccagagccagttc

SEQ ID NO: 913068 - DNA, 120 bp, Artificial Sequence
  ENSG00000270959_8 (sequence is synthesized)
ctggaaggtcctggttgacagcgagccctgaatatcaatgacaatcagttgcttcagggcaacttcctctgtcctgtgctcaaataaatgaatccctggagtttaacgtttacttctgag

SEQ ID NO: 913069 - DNA, 120 bp, Artificial Sequence
  ENSG00000270959_9 (sequence is synthesized)
ccccgcccagaaagcttgctctgtgcttatagcttcaaaaaagtctgcgaacgagatgaactggtttgaatacagacaagcctgtcattggaagttttgagttggatttttctttcccct

SEQ ID NO: 913070 - DNA, 120 bp, Artificial Sequence
  ENSG00000270959_10 (sequence is synthesized)
ctgacatctgtaagggtgaacgacgatgagaaccaccacttaactgtgttaggggattatgacgcgcagcagccatggccaggaaagcattccataccctgagacttcctttccttgcac

SEQ ID NO: 913071 - DNA, 120 bp, Artificial Sequence
  ENSG00000270959_11 (sequence is synthesized)
taggacagagcgtagtcccccctttacacctcagacaaaaacttaagaaacgttactcgcccaacacaaaacaactgactgaccaagcacctgtcttcccctcctcccatccaggtctcc

SEQ ID NO: 913072 - DNA, 120 bp, Artificial Sequence
  ENSG00000270959_12 (sequence is synthesized)
tgactaatcccttcatctttccatacctggccctgacctctagcaggacctaattccattcataactgttgagagtacaccatgagctactgattcataaaaactccaaaaagtggttct

SEQ ID NO: 913073 - DNA, 120 bp, Artificial Sequence
  ENSG00000270959_13 (sequence is synthesized)
tctgaggatggactttagtgggattcttttgaccaggaattaaggaaataatgtaaaaacacatgttattggatttattaagcaccttccttgtgcttaataagtgtttgaattcagaca

SEQ ID NO: 913074 - DNA, 120 bp, Artificial Sequence
  ENSG00000270959_14 (sequence is synthesized)
ttcagacatttcaggggtaagactacttaacctctgtgttcctctcaactatctaatgtacacatacaaaaatatgaacatggctgggcgcggtggcttacacctgtaattccagcactt

SEQ ID NO: 913075 - DNA, 74 bp, Artificial Sequence
  ENSG00000270959_15 (sequence is synthesized)
ctagctgggcgtggcggcgagcgcctgtaatcccaggtattccggaagctgaggcaggagaattgcctgaaccc

SEQ ID NO: 913076 - DNA, 84 bp, Artificial Sequence
  ENSG00000270959_16 (sequence is synthesized)
aaaaaactagctgggcgtggcggcgagcgcctgtaatcccaggtattccggaaaggttttagtgagccgagattgcgccactgc

SEQ ID NO: 913077 - DNA, 80 bp, Artificial Sequence
  ENSG00000270959_17 (sequence is synthesized)
cagcctgggggacagagcaagactgttgtcaaaaaaaaaaaatatatatatatacaaacacatatatatacacatatata

SEQ ID NO: 913078 - DNA, 120 bp, Artificial Sequence
  ENSG00000270959_18 (sequence is synthesized)
cacacatacatatatatatatgaaggcagtaacagagagataaggtcgagaataaccacccattccacagactaataaagaatttatctctttgcaactaacatagtttgaaatgggaga

SEQ ID NO: 913079 - DNA, 120 bp, Artificial Sequence
  ENSG00000270959_19 (sequence is synthesized)
tacgggctcttggagagagttttttctggggttctgaaaaggtcagatcctatcaaaacacaatccactcactcaaacatttcagcgtactcacattctgagtactactgtttagtatga

SEQ ID NO: 913080 - DNA, 120 bp, Artificial Sequence
  ENSG00000270959_20 (sequence is synthesized)
aaagaattccagtgttacatgaagtaaaaatggattatctcaatcctcatggaatataacgggacttgaccagcatttcctttttttttttccttcagtaactcacttataaggaataat

SEQ ID NO: 913081 - DNA, 120 bp, Artificial Sequence
  ENSG00000270959_21 (sequence is synthesized)
agggtcctaatgaggattaagatttaataaggtgtaattagagttgttcatttcttccatcatatacattataagagtactgtgccggatccagaaatgctactaattatgttgaaactg

SEQ ID NO: 913082 - DNA, 120 bp, Artificial Sequence
  ENSG00000270959_22 (sequence is synthesized)
ttgtatgggtgtgttggggaagtcactgtgtttctcctcctgaaatgtttatgaattgctcaggtgagcatggtgagcatggtgttagcatgaacatcatataaagttaactacaaaaga

SEQ ID NO: 913083 - DNA, 120 bp, Artificial Sequence
  ENSG00000255187_0 (sequence is synthesized)
agacatgagaatgtttcttctggaagatgtgattctaaaagaaaaagaaggaaatattttatatgtctaacttttaaccaggaattgtgggaggttttcaatgtttaagaaactgtttaa

SEQ ID NO: 913084 - DNA, 120 bp, Artificial Sequence
  ENSG00000255187_1 (sequence is synthesized)
gaagttttctttatgatcaaaatatgtttattctctcaatttctgaaccaataattggcttgtcattttaaagccttaacaaagttattgtggcaaaatattttcttgaaaaataatgca

SEQ ID NO: 913085 - DNA, 120 bp, Artificial Sequence
  ENSG00000255187_2 (sequence is synthesized)
tctaattttcgacttcctgtggccctactactatccttgcttcccaaaacaaaggtctccaactcaggcaaatacagtctctgcaaagtggaactcaaaatattaacgagtcactgcaag

SEQ ID NO: 913086 - DNA, 120 bp, Artificial Sequence
  ENSG00000255187_3 (sequence is synthesized)
aaagaatacagtgtaaaggaaatttggatgggactgcaagtaaaatcaatgaagtctatccaaatgtagatcctggaggaatacaatctgtgtctcttacatcaagaaagacttagtact

SEQ ID NO: 913087 - DNA, 120 bp, Artificial Sequence
  ENSG00000255187_4 (sequence is synthesized)
aagtgaggcttcattaaggaaccccaatttcattatgttatgagccctgatttagtcactgaaacccttacctacaaggcatcggcgagtttgggacttaagcatttgctgcctgatcct

SEQ ID NO: 913088 - DNA, 120 bp, Artificial Sequence
  ENSG00000255187_5 (sequence is synthesized)
ccttgcttgggcactgcataccaacaccttcctttctacagctgcaaaccttcctttacatatctggttctactgtgccagaaagttccacaccaacggggagatggaaagtggtggaag

SEQ ID NO: 913089 - DNA, 120 bp, Artificial Sequence
  ENSG00000255187_6 (sequence is synthesized)
tgaacagcctccatgggaaggattatcactagcatcgtttagaaatctggatacgtgaggatgataaaaaaaagactgacaattgacttcaatattccttttaaattacctcatgacaat

SEQ ID NO: 913090 - DNA, 120 bp, Artificial Sequence
  ENSG00000255187_7 (sequence is synthesized)
gcatatcttatcttttgcttccacctattctcacatttgccactgactcctggcacatcataggtgctctataaatgatcattaactgggtcaataaatgagtataaggtgttcaataaa

SEQ ID NO: 913091 - DNA, 120 bp, Artificial Sequence
  ENSG00000255187_8 (sequence is synthesized)
ggaaattcagttcatattaaaactggaaaattccatacaatttttaaattaaaaattacaaaataatttttaaatgcagaaattccggaaaagaagaaggagaagaagaaatagctttgg

SEQ ID NO: 913092 - DNA, 120 bp, Artificial Sequence
  ENSG00000255187_9 (sequence is synthesized)
tctgtcataaagtgaaatgggatcttgattgaatttttttctctcgacactctgaaggacttggaagagggaaggtactattggaaaggattttgaataaagtttaattcctgactcaaa

SEQ ID NO: 913093 - DNA, 120 bp, Artificial Sequence
  ENSG00000255186_0 (sequence is synthesized)
ctctaagaaaagaaattggttcttcctttcatctacttttcctgccagtgtttatttgctagcccatatgttcctgcacagggtcactcctattgtgaaataaatgctgaataaataaaa

SEQ ID NO: 913094 - DNA, 120 bp, Artificial Sequence
  ENSG00000255183_0 (sequence is synthesized)
gtaagggaggaggtggtagtaaagaaacctttagactgaaaaatgtaaagatacaatatgaaaggagaaaaaaaacaacaaaagaacccaccatggaagtttcaacccaccaccaccaca

SEQ ID NO: 913095 - DNA, 120 bp, Artificial Sequence
  ENSG00000255183_1 (sequence is synthesized)
tggtgccaaaaacttcaaaatggaacatttcttatattggcacatatttttgtgagaacaaacatatggttgtgagcatattcttaccttcattgtgatctgcatatttcctctctgcag

SEQ ID NO: 913096 - DNA, 120 bp, Artificial Sequence
  ENSG00000255183_2 (sequence is synthesized)
attcatgagataccacagtctctaatatatgaagtttttcatatttacactactggtgaatctctagttgtatacctgcctctgtggtctcattgttggtccctaggatagcttataaat

SEQ ID NO: 913097 - DNA, 120 bp, Artificial Sequence
  ENSG00000255183_3 (sequence is synthesized)
aaaaacagatgatactgtctactggccagaacaagctcacaactcactttctactccattctcaagtgactatgtagagaaagatggatggttgaggtcaggatttggagttctctggct

SEQ ID NO: 913098 - DNA, 120 bp, Artificial Sequence
  ENSG00000255183_4 (sequence is synthesized)
aactgcatattaactttgttatcatcgccaatattatcacctgacagagaaacagacttgatggatttgggctttagccctgacttcatcacaaataaacagtgtcatcttggatgctaa

SEQ ID NO: 913099 - DNA, 120 bp, Artificial Sequence
  ENSG00000255182_0 (sequence is synthesized)
gtcctgggtgatgcctgcgaggcggcaggctcagagggagcgcgaccggcagccctcccacagccgcaccgccgcacctaccacggtcggccatggcagtctccaggcagtccagcgtct

SEQ ID NO: 913100 - DNA, 120 bp, Artificial Sequence
  ENSG00000255182_1 (sequence is synthesized)
gctcatcatcacacaggtcatagggcatgttcccgtcggtgttgaccgccaggagattggcgccactgcagggaagacggacggggtgctgggcacaaggcccttccccgcttgccaggc

SEQ ID NO: 913101 - DNA, 120 bp, Artificial Sequence
  ENSG00000255182_2 (sequence is synthesized)
tcctcacttggagaagtccccgccagggcccctcagcccagggctgcccctcaggaggcaccctgtccacctgctgctgggagaggcagccttggggcccatcggctgtcctagatcctg

SEQ ID NO: 913102 - DNA, 120 bp, Artificial Sequence
  ENSG00000255182_3 (sequence is synthesized)
tcattaagccagacaggcctcctgcagtctctatccatccagggatccaggttcctggcacctccaggggcagcggtgcccccataaacatgcattggatgggcctgcctgctggggagc

SEQ ID NO: 913103 - DNA, 120 bp, Artificial Sequence
  ENSG00000255182_4 (sequence is synthesized)
agggagcacagggtggcgggggtgcaggaccaggcagccacgctgaggggctgctgagctgtggggagcatggccccagggaagaagggcggtgaaggggagcccagaacacagaagggg

SEQ ID NO: 913104 - DNA, 120 bp, Artificial Sequence
  ENSG00000255182_5 (sequence is synthesized)
gtgtctgtgtgcagtggaggagcaggcctacctgtggacaccccacatccccgcctgccccgcagcgcctgtgtgtgacgcgaccgccatgcacaccccacccggcctcacaggggcact

SEQ ID NO: 913105 - DNA, 120 bp, Artificial Sequence
  ENSG00000255182_6 (sequence is synthesized)
cgagaatgaccgcagccctgacctctctcccactacagatgcctggagcaaaggggaagggaggaggctcatggaccctccctgctcagagttccccccgctctacgtccctctgtgtta

SEQ ID NO: 913106 - DNA, 120 bp, Artificial Sequence
  ENSG00000255182_7 (sequence is synthesized)
aaggtaaaggccctacctgtgctcaggtaccctctcctcccaagccacctggcctcctcactctgcttccctccttagcagttctgccctcctcactgaccaagacatttctctgtgcac

SEQ ID NO: 913107 - DNA, 120 bp, Artificial Sequence
  ENSG00000255182_8 (sequence is synthesized)
actctgggggggggcccgaggcctgccctctcggcaggaggacgaatgctggggaggcagggaccgcgctgccctgggcacatgcccattcccctggagccccaggccctgctctccatg

SEQ ID NO: 913108 - DNA, 120 bp, Artificial Sequence
  ENSG00000255182_9 (sequence is synthesized)
ccaggacacaggcagggtcagcaaaggtgaaggcgggaacacaggaggccgagagccacagatactgcccaagaggagcctcctgagcggccatctgagaggaagcctctccctgccaag

SEQ ID NO: 913109 - DNA, 120 bp, Artificial Sequence
  ENSG00000255182_10 (sequence is synthesized)
gacgcccaacaggccctacctggcgatgagcagctccaccaggtgcaggtggccgcaggtggccgcagcatgcagaggcgtccagcactcactgtcacaggcattgatgttggccccagc

SEQ ID NO: 913110 - DNA, 120 bp, Artificial Sequence
  ENSG00000255182_11 (sequence is synthesized)
ctccaggagctgctgcaccatctctcggaaatcatcaatgcagcactgcaaaccgtgccacgtgagcgaccagagcacgggggccagcccccaccctgcccacacccagtgcaggctgac

SEQ ID NO: 913111 - DNA, 120 bp, Artificial Sequence
  ENSG00000255182_12 (sequence is synthesized)
ctggtgcagggccgtcaggccgtcctcgttggccaagtcagggctgaccccactcccaaggaactggcggactgcaaaaaggtggcgaggtgaggacagggtcctgcccctggtcaggtc

SEQ ID NO: 913112 - DNA, 120 bp, Artificial Sequence
  ENSG00000255182_13 (sequence is synthesized)
ctgtcaactgtgcttcggcccaggacccagggaaggacaaggaagacagtggtgccgatggcaggaggcacaccagagcccaggggtgggggcagaagcaccaggcatctgtctggccca

SEQ ID NO: 913113 - DNA, 120 bp, Artificial Sequence
  ENSG00000255182_14 (sequence is synthesized)
cacccacctgcaggcccttcatggtggtgctccagccctccgacccccagaacaggccgtgctcctgtgtgagagcagcactccaacaatcccacacctccctccagcccaggaagagct

SEQ ID NO: 913114 - DNA, 120 bp, Artificial Sequence
  ENSG00000255182_15 (sequence is synthesized)
ccctgcctggaggctaccacagctccttcggctcttccctgacaacctgccagccctgtgttcatgagctctcctgggtcctctgggacctgacctgaggctccccaccaccagagcaca

SEQ ID NO: 913115 - DNA, 120 bp, Artificial Sequence
  ENSG00000255182_16 (sequence is synthesized)
tccctgctctcactcccctccccatcaaagatcccaactcgggcccagctctcgcccaggtcaccagggttctccctgacggtgcctggggtgcagcaggagggctcccaccttcccaca

SEQ ID NO: 913116 - DNA, 120 bp, Artificial Sequence
  ENSG00000255182_17 (sequence is synthesized)
gctccctgtggaccatggcaccctccgcctcttccctctgcctccaggcctcccgggagggctcctgtccacatggaaagatgcaggccagacactgccggctcctctttactctctgct

SEQ ID NO: 913117 - DNA, 120 bp, Artificial Sequence
  ENSG00000255182_18 (sequence is synthesized)
ccggagggaggcaggaaggagtctcaagggccaccacagtgcctcttcccccaagactccagagcaccagaagtggaacccacacagctggggctgcaagcgtggggcacaggtcatttc

SEQ ID NO: 913118 - DNA, 120 bp, Artificial Sequence
  ENSG00000255182_19 (sequence is synthesized)
gggcagcggcctccagaaggacaacactgggagggaagaggacctgcttcaggagcccttggctggctgcctccttccggggacgctccccaggacccttcttgccctgggcctccttct

SEQ ID NO: 913119 - DNA, 120 bp, Artificial Sequence
  ENSG00000255182_20 (sequence is synthesized)
cagcctgggcccacatcttcacctgctgggcgcgccgcttctgggcatgcttcagccgctcctgtgtgctcatcctgcccaccatgggcatctctgccagcagctccaggtgctcggcca

SEQ ID NO: 913120 - DNA, 120 bp, Artificial Sequence
  ENSG00000255182_21 (sequence is synthesized)
tggcggcggctgcttgcccacagggctgctcggggcaccagagtggggagcttgggggccaggctgggcctgaggggtggggcagctagctggactggcaccctcgggggcatccccttc

SEQ ID NO: 913121 - DNA, 120 bp, Artificial Sequence
  ENSG00000255182_22 (sequence is synthesized)
ccagagcttcgtgcccttggctgggtcaggaggccccacacaataaccaggcccaggcagccctggggggcatgggccggggcagggagggcagtgtgggagggcaccccaaacctgctc

SEQ ID NO: 913122 - DNA, 120 bp, Artificial Sequence
  ENSG00000255182_23 (sequence is synthesized)
cccaggccagcctctagctgtcgacaagcagcgcctcgcctccctctcggggtcagggtgcacaacctatgggaggcagccccgagacctggccggcctcagtgcagggtctgaaactaa

SEQ ID NO: 913123 - DNA, 120 bp, Artificial Sequence
  ENSG00000255182_24 (sequence is synthesized)
ttacccagataacaaggttccagcttccgggcaccctgctgagggggaagggagggcagggccaaccagcagtgagagcccctgtgagcccctgagagtcctcttttcaccttctaggct

SEQ ID NO: 913124 - DNA, 120 bp, Artificial Sequence
  ENSG00000255182_25 (sequence is synthesized)
caggagcctgggtggggcctgggagcagccatgacccagcccccaacccctcccagctgtgtgccgaggtcagtgcatcagtactaacgaggaggtgcagccgctgaggctgggggaggg

SEQ ID NO: 913125 - DNA, 120 bp, Artificial Sequence
  ENSG00000255182_26 (sequence is synthesized)
caggtagtcagagtcctggagtcctggccccagggcccaggggtgaggctctctaggcagccagggcaccaagggcacaggcgggccggccgcagtgtcttcaggagcacctcctcttcc

SEQ ID NO: 913126 - DNA, 120 bp, Artificial Sequence
  ENSG00000255182_27 (sequence is synthesized)
agcagctgctcacacctgagaagtggggaacaaggaagcatatcaaggccggcttgaggcagggtggcccgggggagcccctgccctgggcctcagcctgggtgacagagcgagactccg

SEQ ID NO: 913127 - DNA, 120 bp, Artificial Sequence
  ENSG00000255182_28 (sequence is synthesized)
gacgttgttggggtccgcagggatgcctccgtcacgcctctcaatgtaccgcgccacgtcctcccggatcagctggatgccggagctgacgctgtaggcccctggactcgggcaggacag

SEQ ID NO: 913128 - DNA, 120 bp, Artificial Sequence
  ENSG00000255182_29 (sequence is synthesized)
gcattgatgttggccccagcctccaggagctgctgcaccatctctcggaaatcatcaatgcagcactgcaaaccgtgccacgcctcccgggagggctcctgtccacatggaaagatgcag

SEQ ID NO: 913129 - DNA, 120 bp, Artificial Sequence
  ENSG00000255182_30 (sequence is synthesized)
cccacagaggtggctggtcccaccctatttcacggaggtggagaccagggctctcctgagcagcctaacaagaagcagcaatgactaccggccacccctgctcccgtggggccccgcact

SEQ ID NO: 913130 - DNA, 120 bp, Artificial Sequence
  ENSG00000255182_31 (sequence is synthesized)
aggtttttctgcaggctcctgggggtccactcatggcctcagctcacctcacagcaggagccctctgcatgcagcccccgcctgaaggacggctgtcccgcacaggctcacctcagggct

SEQ ID NO: 913131 - DNA, 120 bp, Artificial Sequence
  ENSG00000255182_32 (sequence is synthesized)
gcccactgcttggggcttgcctgatgggggcaccctgggccacccagcctgaagagaccaggcaagatctgggggctggagcccaggagctgtggacaggcccagcccccagccttggca

SEQ ID NO: 913132 - DNA, 120 bp, Artificial Sequence
  ENSG00000255182_33 (sequence is synthesized)
aggcccaccctttgtccacagagagcactgcaggtcaacagtcctgggggtacggggagctactctgcccccattctgccccaggttcagagaggggcgggggaaaggcatgtcaggctc

SEQ ID NO: 913133 - DNA, 120 bp, Artificial Sequence
  ENSG00000255182_34 (sequence is synthesized)
ctcccacccaccctttccagaaagggccgcccaccccagcgaggcgttccctgctaggctgctcctccagggccaggcgctgccctaaggctgggcagggtgaggtctcgtggaacagcc

SEQ ID NO: 913134 - DNA, 120 bp, Artificial Sequence
  ENSG00000255182_35 (sequence is synthesized)
ttgagggctttgcaggctactgccttccaagggcaggccccgcctcctgggcctccacctctcctgccttccaagggtaggccccgcctcctcctgtcctgactgataccccagcctctc

SEQ ID NO: 913135 - DNA, 120 bp, Artificial Sequence
  ENSG00000255182_36 (sequence is synthesized)
actgcccagtctctagacctcttccttgatgggctcccacaatgcctctgccatcctaggctgcaataaaagcccccacctggtgcctggcttgaggcctatggggacagacaggcaggc

SEQ ID NO: 913136 - DNA, 120 bp, Artificial Sequence
  ENSG00000255182_37 (sequence is synthesized)
agacagcttcggctggggcacaaccctgcctatgtacctgctatggccctagtcctgcccgacacactaagtgtggttgctgggctggccacaggcctcacctcagaaggcactctgtgc

SEQ ID NO: 913137 - DNA, 120 bp, Artificial Sequence
  ENSG00000233515_0 (sequence is synthesized)
ggagtggtaagatggcggacgagcagctgcagcagctccgtgcggtgctacagggggaggggaaggtggtttctcctgacacaagctggaggccggagcctgtggcaccctggcttgcct

SEQ ID NO: 913138 - DNA, 120 bp, Artificial Sequence
  ENSG00000233515_1 (sequence is synthesized)
cactgaagctggtggctgtgacagggactgcacggctgctggagtggtagaaaggcagcccaggtaggagccgcagccccagtgggcccaacggttcctgtgggtggggagccagccacc

SEQ ID NO: 913139 - DNA, 120 bp, Artificial Sequence
  ENSG00000233515_2 (sequence is synthesized)
ttggagtctccagttcactgaaacctgtcactgccacccagtggccaccatgacaaggaagccatcattctgtagaaggcagtgacggaacagtaccagcagaaattgaaggaccagcag

SEQ ID NO: 913140 - DNA, 120 bp, Artificial Sequence
  ENSG00000233515_3 (sequence is synthesized)
aagggatcatggccaaagttgcagtgtccccccgctcgttgaagatgaggagttctcagagagcgggatgtttgtgacattcctcatgtcagctctcgagtccatgactctcactcggtc

SEQ ID NO: 913141 - DNA, 78 bp, Artificial Sequence
  ENSG00000233515_4 (sequence is synthesized)
ctctcgagtccatgactctcactcggtcgatctggctcccaggttcaatcgattcttctgcctcagccttctgagtag

SEQ ID NO: 913142 - DNA, 120 bp, Artificial Sequence
  ENSG00000233515_5 (sequence is synthesized)
cctaaagtgctgggattataggcgtcagccaccgcttctggcctagatcattaacatatcactatgatactaaaattccctctgccaaagaaaatcttgccattttgtgacatgagttgt

SEQ ID NO: 913143 - DNA, 120 bp, Artificial Sequence
  ENSG00000233515_6 (sequence is synthesized)
ataaagatgtatgtttatatgcactgaacctgtgcacctagagttccaccctgctcatgctaacgttgttctccctccccgtacctagttcttaaaaactccatgccttccatttttcag

SEQ ID NO: 913144 - DNA, 120 bp, Artificial Sequence
  ENSG00000233515_7 (sequence is synthesized)
agaactcttttcttctccatcccaggcagggaaaaaacccacttggccttgtttctgattgggttttcttgctttgcgactaatacaaagcaggaaaaaactccctttatcagtgataaa

SEQ ID NO: 913145 - DNA, 120 bp, Artificial Sequence
  ENSG00000233515_8 (sequence is synthesized)
aacaagtaagattattatttacccacctattctagctaggggtcatgggtggccggagtctctcctagcaactcagggcgctaggcagaaccagccctggatctggaatagggtgccatc

SEQ ID NO: 913146 - DNA, 120 bp, Artificial Sequence
  ENSG00000233515_9 (sequence is synthesized)
acacacacacacacacacacacagagctcaaatggggactatttagaaatgatagttcacataatgggcacatctttgagatgtgggaggaaactgggagtacccagtgaaaacccatgt

SEQ ID NO: 913147 - DNA, 120 bp, Artificial Sequence
  ENSG00000233515_10 (sequence is synthesized)
ggaaactgggagtacccagtgaaaacccatgtggacctggggagaatgtgtaaaggacacacaggaagtggccagctgggagttgattgttttttcttatcaacattacaatgaaatgat

SEQ ID NO: 913148 - DNA, 120 bp, Artificial Sequence
  ENSG00000233515_11 (sequence is synthesized)
actgaacgaaatgacattattcaagtacctgctgtaatagtcagactccttcatataaaattcaaagccctctacactcgggcactacattggacttccatcctacacctacattctagc

SEQ ID NO: 913149 - DNA, 120 bp, Artificial Sequence
  ENSG00000233515_12 (sequence is synthesized)
cactgtactacacatcatttaccaaaggcgctgtatacttctgtgctaccaaacatttgccagtctggttccctctgcatttcaagattacacacccctcataatcctgcaaagcctttc

SEQ ID NO: 913150 - DNA, 120 bp, Artificial Sequence
  ENSG00000233515_13 (sequence is synthesized)
gtatcaatttttctgtgaagcttttcagaatccaccaccactcccaccatcaccccaactccctgagagggcagatctctctctccgtttggcagccacttttaataaagcatttttcac

SEQ ID NO: 913151 - DNA, 120 bp, Artificial Sequence
  ENSG00000233515_14 (sequence is synthesized)
ataagatccccaaccagcacaaactcgaacagaccctccatcaccctcctgtatcctgctggagattttggagcatctcagcatctctggggcagctcgcggacatcagggaggggcagg

SEQ ID NO: 913152 - DNA, 120 bp, Artificial Sequence
  ENSG00000233515_15 (sequence is synthesized)
caacaaagcccacgtagacccttacagctgtgctggtgaggtgaagcaggaactcgctgagcttcaaggaatatgaaaccgcttcttttagctctcccagaactctccacattgatccca

SEQ ID NO: 913153 - DNA, 120 bp, Artificial Sequence
  ENSG00000233515_16 (sequence is synthesized)
ctctggctactagcaccagctggacagtaacgactttcagaggtgaacacaatgtgcttcaacatgccttcctgaaagttcagttagcaactggacagcatctgaattccagttctgcaa

SEQ ID NO: 913154 - DNA, 120 bp, Artificial Sequence
  ENSG00000233515_17 (sequence is synthesized)
agctcttctctgaatacctgaggtaccagcatgatcctggcactgcccctgcctccgctgtcttgtctaattctagctctctggggccactcttgtgagtttctaggttccgagaacctt

SEQ ID NO: 913155 - DNA, 120 bp, Artificial Sequence
  ENSG00000233515_18 (sequence is synthesized)
aatcttttccattgtttcccagccctagacaggtagctgctacctgatgttgtcatcctgtgttagctcagtgttcatttttaccattaaaacacctgctttaaataatcttcatcaaat

SEQ ID NO: 913156 - DNA, 120 bp, Artificial Sequence
  ENSG00000233516_0 (sequence is synthesized)
acataacagggatttttttttatgccttggggttctgtttctgattttctttctgtgtgtttctccattatgttgttgcatttttctctatttacgttatctccctttccctttttctct

SEQ ID NO: 913157 - DNA, 120 bp, Artificial Sequence
  ENSG00000233516_1 (sequence is synthesized)
ctgtccctccctccttcttcctctctattcttcccctccccttgtttttatgcctgattatgtggacacagacaaggattaaaacagggcacctgcccttgaggagtttacaatctgctg

SEQ ID NO: 913158 - DNA, 120 bp, Artificial Sequence
  ENSG00000233516_2 (sequence is synthesized)
ggctgaggatcaacacatgttcaaaaagagaggaaagaagtcaagggagatcatgccagatggacttaatttcaatgaagaacaggcatttccatggaaagagacaagttgctgcgtgaa

SEQ ID NO: 913159 - DNA, 120 bp, Artificial Sequence
  ENSG00000233516_3 (sequence is synthesized)
gctgaaaagctggcgacagggcttccattacgtagacagtcatcctgacatggtacctgaacaaatcccatcaaggacagattctcagtcttgaagaggcagcacagtaaaggggaaaga

SEQ ID NO: 913160 - DNA, 120 bp, Artificial Sequence
  ENSG00000233516_4 (sequence is synthesized)
tcatgagttttggggccaggttcccttggatattgtggggtccccacacttctggatgatgttggataactctttgagacttaggcttcacatctgtaaaatggaaatacttatttttca

SEQ ID NO: 913161 - DNA, 120 bp, Artificial Sequence
  ENSG00000233516_5 (sequence is synthesized)
gagttgtcataaacactaaatgatttgacttatatcaacctaattcctactggctcattgaactcagctcagctgtcccctctgttcggatgccttccccagtggggcttagttaggtat

SEQ ID NO: 913162 - DNA, 120 bp, Artificial Sequence
  ENSG00000233517_0 (sequence is synthesized)
gcaaaagatactgctgaagaagagtaaacagactttggccactgggtgaatataaaagaaggacaagagaaagctgttgatgcccaagaagagaaaaacgttccactgaagggtaggaaa

SEQ ID NO: 913163 - DNA, 120 bp, Artificial Sequence
  ENSG00000233517_1 (sequence is synthesized)
tggcagaaaatttggaaccggggctcagaatcgcatgcttcccgggatggtgcacctttctcttctgactgtccagtgagggaagaatgtgatctagaagcaaatccacatggaccttgg

SEQ ID NO: 913164 - DNA, 120 bp, Artificial Sequence
  ENSG00000233517_2 (sequence is synthesized)
atttttcggggacagaggagctaatttaagggaaccgtgactgattagagattccttttcctctgccctaacaaggaagacacattctagtggaattttaccctgaagaaactacctcat

SEQ ID NO: 913165 - DNA, 120 bp, Artificial Sequence
  ENSG00000233517_3 (sequence is synthesized)
tggagcaaacaaaatccacccttcatccagtccaagatcagcttccattttccagggcaacatcactccaaaccttttttgatagaatctactttttttttttttttttaacttttgttt

SEQ ID NO: 913166 - DNA, 120 bp, Artificial Sequence
  ENSG00000236747_0 (sequence is synthesized)
tgtgcatgccagcctgatttctgactgcaggaagctgtgtcttgcagcctgtgggctttttctggctgctgtggcccactacgcctgcagcaggactggaggcttgcaggactgataccc

SEQ ID NO: 913167 - DNA, 120 bp, Artificial Sequence
  ENSG00000236747_1 (sequence is synthesized)
attccccagagcaaccctcaaccaatgaccttcaggattgggtggataaatatcccagctctcttactcttcagcaccatgagaagagcttctcccctgtaaatggccactctcacttgt

SEQ ID NO: 913168 - DNA, 120 bp, Artificial Sequence
  ENSG00000236747_2 (sequence is synthesized)
gggtccatgactagctgaactgaacccattccacagtaaggacccaagcccagcagatctgcagccaaaaccaaagttgctcagtgggacccatgccacataagccgacccatggccaac

SEQ ID NO: 913169 - DNA, 120 bp, Artificial Sequence
  ENSG00000236747_3 (sequence is synthesized)
ctgaaaataaattttcagccaagacattcttttgcagcctaagagggttattatggagaggtggaaagatcttcaaacctggaaggcttgcttcaaaccccagctctactccaactacag

SEQ ID NO: 913170 - DNA, 120 bp, Artificial Sequence
  ENSG00000236747_4 (sequence is synthesized)
tggcatgccctgtgtcccatgcccacagtctaatcacctctgacttcagtcacagctgtggtggacagttccgtgtgttccaattcacctcatgcaagacagcatccagtctcaagtatg

SEQ ID NO: 913171 - DNA, 120 bp, Artificial Sequence
  ENSG00000236747_5 (sequence is synthesized)
tgctgtgcatctttctgctctctgctccagggccttctctgacactatggaagcccactgggcctgcataaaaacaaaacttggaagtgtgagattcatgcccttgggatcgacccttaa

SEQ ID NO: 913172 - DNA, 120 bp, Artificial Sequence
  ENSG00000236747_6 (sequence is synthesized)
tcgatggggaacacggcctagtggatagatgctccagccacctgtcctttgggggcacacttctgggaggcattgtgtacagttatcaggaggtctgggtgcaattgagcctctagggcc

SEQ ID NO: 913173 - DNA, 120 bp, Artificial Sequence
  ENSG00000236747_7 (sequence is synthesized)
ccaggcagtaacctttttaatatgcctttatattgtcattttcgtctttactctctcattctccttgcttcctcttgcgcatacagggatcagttaccaaataaactatgtgcactcaaa

SEQ ID NO: 913174 - DNA, 120 bp, Artificial Sequence
  ENSG00000236747_8 (sequence is synthesized)
tgttaagtatcctgactgaagcctgggaatgttccacactcactgtcctgtggcccggacaaatgagagttgtttatctttcaactccacttagaaaagtaaatttaaaaaactcattaa

SEQ ID NO: 913175 - DNA, 120 bp, Artificial Sequence
  ENSG00000236747_9 (sequence is synthesized)
tctccagcactagtttcaaattatgaagacttggcttctctaaaagctcctggagaggtgtggacttctaacagccatcttatatcacaaacgtcatctctgcttccagagggcacagcc

SEQ ID NO: 913176 - DNA, 120 bp, Artificial Sequence
  ENSG00000236747_10 (sequence is synthesized)
tagaacaggaacaaaggttcgacctccttccaagttcaagttaatatttgaggctctctttagaagttcagggatccagaaccacataatatttttcctctctaggggcttaactcctca

SEQ ID NO: 913177 - DNA, 120 bp, Artificial Sequence
  ENSG00000260461_0 (sequence is synthesized)
tcctcagtcctctctgcttccgccctggcccctcttgggctgttcacagcacagcagctgttgccaccctgttaatgctcccactctcctacagccttcggtcttgccccaggtaggagc

SEQ ID NO: 913178 - DNA, 120 bp, Artificial Sequence
  ENSG00000260461_1 (sequence is synthesized)
ctgaggctgcacagaggtcagcacggccccgcttaccctgccctcccagcccagccgcacgggccttgcacacatgcctcggcatattcctgccttagggctggtgctcctgctatttcc

SEQ ID NO: 913179 - DNA, 120 bp, Artificial Sequence
  ENSG00000260461_2 (sequence is synthesized)
tcttcccaggtaaccatgtgaagtgcctccctctgccctctttccagcctttacttgagtgtcaccttctcagtgaggcctgccctcattcctctttcgctgtttgcaacccatctcctg

SEQ ID NO: 913180 - DNA, 120 bp, Artificial Sequence
  ENSG00000260461_3 (sequence is synthesized)
tcccccttcccagaactccctttcctacttcgtttttcttcacagtacttgatactgcctaacacactccatggtttcttacttgccctgtttattattttcccccaatagacagaatgt

SEQ ID NO: 913181 - DNA, 120 bp, Artificial Sequence
  ENSG00000260461_4 (sequence is synthesized)
tccatgatggcagaattctctgttttgtttccttccatgtccccagcacctagaacagtgcctgacgcatctcctaagcaatacgaccaataagtatgtgtctggctgccttccggctgc

SEQ ID NO: 913182 - DNA, 120 bp, Artificial Sequence
  ENSG00000260461_5 (sequence is synthesized)
cagtgtctgcctctttcctaggggcagtggttgcgggggtgctttctcacatgtcttagtaggctgtgcaggctggaagtgctcagaagtcacacccccagggagcagcctcagccaaca

SEQ ID NO: 913183 - DNA, 120 bp, Artificial Sequence
  ENSG00000260461_6 (sequence is synthesized)
gcaccttggctgtaaatgccccagctccctcgccctcaggtaagcattgctgaggcacacgttccatactcttttccacagttcctccgtgggactgagcaccacccagccacccacagg

SEQ ID NO: 913184 - DNA, 120 bp, Artificial Sequence
  ENSG00000260461_7 (sequence is synthesized)
agcagctaacctgataaccaccagcctcaccctccctgccttacttccccgctcccctttaccacatgctgacctcccagatgcatttcttgctttccggtctctgtctcaggattggct

SEQ ID NO: 913185 - DNA, 120 bp, Artificial Sequence
  ENSG00000260461_8 (sequence is synthesized)
cctggatgaacacaaactaacactatgttcacaaatatatttgggaaatgctggatgaataattatacacatcagacagattactagaaattctcaccaaagggatgcacatgttacctc

SEQ ID NO: 913186 - DNA, 120 bp, Artificial Sequence
  ENSG00000260461_9 (sequence is synthesized)
ggcgctggacaagaattcaaccggtgtgtaagccagactcggcccgggcagtctcaaactcctgactccttatataatttctacaaaaattataaagctatttcccactccccaccccac

SEQ ID NO: 913187 - DNA, 120 bp, Artificial Sequence
  ENSG00000260461_10 (sequence is synthesized)
attcatgtaacctgaagcatgagtaaaccaagaatgaggtaggcctctgtcttctaagcaacatcagaactctaagaacatgagggactcttagaaaactctctggagctaaccacagct

SEQ ID NO: 913188 - DNA, 120 bp, Artificial Sequence
  ENSG00000260461_11 (sequence is synthesized)
gggtcactgctcatgtactgaagaccagccagagggttcccctgaaaaggagggaaactgagcaaacattctccagttctcttagtgtgcacatgtttcaggaggtgtgaaccccacatg

SEQ ID NO: 913189 - DNA, 120 bp, Artificial Sequence
  ENSG00000260461_12 (sequence is synthesized)
tagcttgtgtaggcaagaagacaaatagtgctactgtctggtcaaggatttgtttgaagagccatgattatgcccatatggtaagccaccagtgctccccatccctgtaagacacttctt

SEQ ID NO: 913190 - DNA, 120 bp, Artificial Sequence
  ENSG00000260461_13 (sequence is synthesized)
tctcattattttctcctctgatggtgtgccaggatgctggccaagagaagccaagtggaaagaaggctgttcagtgacaaggaacctaagacttagtgccaaggactgaaaccaagtaaa

SEQ ID NO: 913191 - DNA, 120 bp, Artificial Sequence
  ENSG00000260461_14 (sequence is synthesized)
cttgtaattttccatgatggaaacatctacactttctcattagtggcctctacagcagttgccccaaagaagcgtctcattgtttttttactacatttatgtgaagcatacaggcaaact

SEQ ID NO: 913192 - DNA, 120 bp, Artificial Sequence
  ENSG00000260461_15 (sequence is synthesized)
cagaaagactgtgataaggctcgccagagatgcctgcacaggtgctgggggaaaagcaggaccatcctgaagggagatggtgtctgtggacaaagaactctgcagtggttcttatttgca

SEQ ID NO: 913193 - DNA, 120 bp, Artificial Sequence
  ENSG00000260461_16 (sequence is synthesized)
tgatttctgctggtggaggctgtaaatgtgagctcaaactcccacataagtgagttttcattgtaatccagaatgtttttaaatcaccctacttctattgaacttgcactatcatctgtt

SEQ ID NO: 913194 - DNA, 120 bp, Artificial Sequence
  ENSG00000260461_17 (sequence is synthesized)
aacctctactgtatttattaaataaacctgaataggtaaatcacagtacagcaaaaggttctgtgttccccagaattctaatcaaactccaaattcctgaaaaggctctagtcctttcct

SEQ ID NO: 913195 - DNA, 120 bp, Artificial Sequence
  ENSG00000260461_18 (sequence is synthesized)
atatgtcaaatttaaatgataagttttcattttggaacataaagagggattttgaagaccacagcatagccctgggtttttgcatagagataataaacagacaatctcttttcagactga

SEQ ID NO: 913196 - DNA, 120 bp, Artificial Sequence
  ENSG00000233519_0 (sequence is synthesized)
gtaaagaaagtcttggccaattcaagcaaaagaagaactccataaaaaactgaggctttgggttctaaagaaatttacatggggagagagtacatatggtgagccactgttgagattggg

SEQ ID NO: 913197 - DNA, 120 bp, Artificial Sequence
  ENSG00000268798_0 (sequence is synthesized)
gcagcccctcaagccctcacctggcctgggctctcctttctggcttccctcatctcctgtggagggttcccgcaggaagtgaagcagcagcaggaacctttgggccacctgagcccctcc

SEQ ID NO: 913198 - DNA, 120 bp, Artificial Sequence
  ENSG00000268798_1 (sequence is synthesized)
cttctatcctcacccctgcttggcttcttagaagctcctgactctcctcctgacaccacgctgctggcatctcctctcccagcaggctccatggctgcagccagccccatccgcccagcc

SEQ ID NO: 913199 - DNA, 120 bp, Artificial Sequence
  ENSG00000268798_2 (sequence is synthesized)
tggggctttgtgtccgggacagagccgtgtcccgtggttaggctgcaccatccgtggcctggccagctctgtctcctttgcacagaatgcttgaaagaacaggacaaagtggctgtgcct

SEQ ID NO: 913200 - DNA, 120 bp, Artificial Sequence
  ENSG00000268798_3 (sequence is synthesized)
gtgggtggggggcaccgtccagccctccatgggctctctgatggccgtacgtgggttggagaacatggtgagaactaaccccgttcaatgctggagtcacctcagcccagaaggtggtaa

SEQ ID NO: 913201 - DNA, 120 bp, Artificial Sequence
  ENSG00000268798_4 (sequence is synthesized)
gcagagtggcccagggatgtggggtgggcctccccttgggcagtggacaggagggtgagagctcagccaggcagatgggggcaggggagatgtgaggagccccaccttcaccctcaaatg

SEQ ID NO: 913202 - DNA, 120 bp, Artificial Sequence
  ENSG00000268798_5 (sequence is synthesized)
cccaccttcaccctcaaatggcccacaacagcctcctgtgggccctcttctataatgtttctccacttttttttttaaatttgttgcccagccggagtgcagtggtgtgatcatggctca

SEQ ID NO: 913203 - DNA, 120 bp, Artificial Sequence
  ENSG00000268798_6 (sequence is synthesized)
cccaaagtgctgggatcacaggcatgagacactgcagctggctatatcttcaaatttaaacatgatttgcagccaggcgcggtggttcacgtctgtgatcctagcactttgggaggccga

SEQ ID NO: 913204 - DNA, 120 bp, Artificial Sequence
  ENSG00000268798_7 (sequence is synthesized)
gggcatggtggcatgcggctataatctcagctacttgagaggctgaagcaggagagtcacttgaacccaggaggcggaaatcgcactctagcccgggcaacaagagctagactctgcctc

SEQ ID NO: 913205 - DNA, 120 bp, Artificial Sequence
  ENSG00000276075_0 (sequence is synthesized)
tgagggaggctttctcacgcagaccctaaaacgggctgggccgtgggagtgctggccaacgtgccaggcagggaggacctgaattcctgaaggtggtggtggcagctgttagggtccaca

SEQ ID NO: 913206 - DNA, 120 bp, Artificial Sequence
  ENSG00000276075_1 (sequence is synthesized)
ggttaatgatctccaacgtcacacagaagagaatgtgctgaggtgtgacctccctcaccctgccttggctgcgtggggcaccgtctctccaggactcaccctgccccccaatagactgaa

SEQ ID NO: 913207 - DNA, 120 bp, Artificial Sequence
  ENSG00000276075_2 (sequence is synthesized)
tcggaggctgctctgtggggtccctcccttgggcctttgctaatgctgtgccctctgcctgtgccagaggtgggcctgggcccgtttctcagggagctcctgaacaccaagaaattgaat

SEQ ID NO: 913208 - DNA, 120 bp, Artificial Sequence
  ENSG00000276075_3 (sequence is synthesized)
tgctttgtaaataaacaaaaagtgccaaacaagcctgcctgtcacttgggagatggcccgtctctgccccaccaaatttgctaatcaaacaaataacctaaaatagaatagaaagaactc

SEQ ID NO: 913209 - DNA, 120 bp, Artificial Sequence
  ENSG00000276075_4 (sequence is synthesized)
acgcagcccaccagcttgcagggagggcagaccctgggggatgtgagggaggctttctcacgcagaccctaaaacggtgagcgccagggagccccgcctgcttgtcccctccccagatcc

SEQ ID NO: 913210 - DNA, 120 bp, Artificial Sequence
  ENSG00000276075_5 (sequence is synthesized)
ctcgggctctggagaccttgcgggccccctgtccgtgaccacctgaaacaggtcctggagctgctactgctggcttaggctggttggtggaaaggatccagggctgttgtgaaggccttg

SEQ ID NO: 913211 - DNA, 120 bp, Artificial Sequence
  ENSG00000276075_6 (sequence is synthesized)
gggagtccagaagccgcctggcaccttctgggtccagacgctgcccttcagccctgccatttcagccagcctcagcgtcgctgtagaggcaggccgccctttctgccactgtctggctgg

SEQ ID NO: 913212 - DNA, 120 bp, Artificial Sequence
  ENSG00000276077_0 (sequence is synthesized)
ctttcgcctcctccgctttgggagccccgggctactctttcacagcccctgttgccctgtgatctgtaggtccttggggacgcacagttaagatgacaggacatcctggaagctgggaaa

SEQ ID NO: 913213 - DNA, 120 bp, Artificial Sequence
  ENSG00000276077_1 (sequence is synthesized)
tggtaacttcttagaccaagtctagaaacagtctgaggacaataacaattccattctaaaaagaatctcccaacatttcttctatctcaacctcaactgcatctgcctgtgaacttccag

SEQ ID NO: 913214 - DNA, 120 bp, Artificial Sequence
  ENSG00000276077_2 (sequence is synthesized)
cttaccaaggctctatatcttctggcagtgacaaaggctccttccatggttggtgtgagtaggcttggacacctgcagggcagacacccaggaataatcaactgggccttcagtggtcct

SEQ ID NO: 913215 - DNA, 120 bp, Artificial Sequence
  ENSG00000276077_3 (sequence is synthesized)
tccctatctttacaactgatagcatttccaacagtaagctgtgagattctgcttgaaatcacctctcaaacaaataaaaaacagacctgggagacatgctacactcattctgctgaggaa

SEQ ID NO: 913216 - DNA, 120 bp, Artificial Sequence
  ENSG00000276077_4 (sequence is synthesized)
atagggcaagaatattttctaagaccccgaactccagatatgcgatggggcaaatcctgaagcgtacatggctatctctcacagctaaagcacccctcacccctatccagcgcttcttac

SEQ ID NO: 913217 - DNA, 120 bp, Artificial Sequence
  ENSG00000276077_5 (sequence is synthesized)
ccctggcgcaagagagtcacctgcggggaggaaaactatcaaaatcccttaaacccaagttgtaaccgcacaactaaatcagaatccttggagctggatctgaaaaaaatacggttgaaa

SEQ ID NO: 913218 - DNA, 120 bp, Artificial Sequence
  ENSG00000276077_6 (sequence is synthesized)
acggattcacaagacccaggctgttccctacatatgtttcctcctccgacatcagttcatcagtcaatcaagccatgtgagagtggaggccttgtattccctattattcttgggcactct

SEQ ID NO: 913219 - DNA, 120 bp, Artificial Sequence
  ENSG00000276077_7 (sequence is synthesized)
actccaagtaggaaaaggccaggaggtcctgttaaaggatgcactcagagcccgggctccctaacatatgagagtgctaaccagcaggtgtagacttttcaggagtgaagaatgaggcag

SEQ ID NO: 913220 - DNA, 120 bp, Artificial Sequence
  ENSG00000276077_8 (sequence is synthesized)
gctttgatgtgactcagttgagatctttcatggggaggcaggaattcaatgcccagaatctgggctggtgtctttgaggtcagtaggttgcgtctttgtatccaagtccattgttactag

SEQ ID NO: 913221 - DNA, 120 bp, Artificial Sequence
  ENSG00000276077_9 (sequence is synthesized)
gttggaggctggagattctaaatggcttccagaccatctctctgattctctttgggagatggggtctgaaagacaatgtcagtagttttgggaaattctagaaagtgtgcttggaaacgt

SEQ ID NO: 913222 - DNA, 120 bp, Artificial Sequence
  ENSG00000276077_10 (sequence is synthesized)
gggaagagctcttgcctagtgcctaaatgctccatttgcagctctagccaagtagatacttggtaggtatagagccgggtttgcgtttatatcagcaaaacctatgtcagagttgaagaa

SEQ ID NO: 913223 - DNA, 120 bp, Artificial Sequence
  ENSG00000276077_11 (sequence is synthesized)
ccggggaacatcttaaaagcaaacttctagcctgctgactcttggcaatgagtgttggatcctggctaaagtgccttgaatgcagcatgaggccaatccatgaatccaacttctcatgga

SEQ ID NO: 913224 - DNA, 120 bp, Artificial Sequence
  ENSG00000276077_12 (sequence is synthesized)
ggtgaaactaccatgctattggtttgcttactttttattatttcatgtaaaatctaagacaaaatacattaaatgcttattgacatatgtatttattcttcaccaggctgataatatctg

SEQ ID NO: 913225 - DNA, 120 bp, Artificial Sequence
  ENSG00000276077_13 (sequence is synthesized)
cctaattttaaactttcttccattttgtaggtttcaacttattctattgtaagatactgttaaatctaatagaggcattgtcacttttacgtataattttattttatttcatatatttcc

SEQ ID NO: 913226 - DNA, 120 bp, Artificial Sequence
  ENSG00000276077_14 (sequence is synthesized)
tattggctttttacatttaaattatggagcacttcatcatataaaaaacttcaattatatttaaacagtaagtctttggatttttttgccttgtaatttccatattacataataatgaga

SEQ ID NO: 913227 - DNA, 120 bp, Artificial Sequence
  ENSG00000276077_15 (sequence is synthesized)
taaacattaatgttttcagggtactttaaattttagataattactcattgtattcatgtgaaatttgtttttactgcatgtgtgggttggaggactgttttcacttctgattcatcttta

SEQ ID NO: 913228 - DNA, 120 bp, Artificial Sequence
  ENSG00000276077_16 (sequence is synthesized)
ctcttatctcatcagagctcatacctcttgtagttgggggattgcagtttataattccaataaatggggcaaattcaataataacataatacaaatgagtttgaatgcaggacaggtctt

SEQ ID NO: 913229 - DNA, 120 bp, Artificial Sequence
  ENSG00000276077_17 (sequence is synthesized)
caaagcatacacaacatgggcctacatatgtacaacaataataatttataagttactgtttggatggaaagtaaaagtacagaaaatttgttaaaggaaattaaaatggagatcatgtct

SEQ ID NO: 913230 - DNA, 120 bp, Artificial Sequence
  ENSG00000276077_18 (sequence is synthesized)
caataatctctgagcagacaaaattagttaggtctcataagtgatctcaacctcgcttgatttgcaaatacaaacaaaacttaaattatttcttgtagctgcatattgaaaaaagagaaa

SEQ ID NO: 913231 - DNA, 120 bp, Artificial Sequence
  ENSG00000276077_19 (sequence is synthesized)
tgaagctcaaccagtcagaagtagccaacaaccttatataaatagaaactgtccaacaaggtaaacagacaaacaaaaaacaataaaaaaagttgtgctaccaccaaatgatttctttgt

SEQ ID NO: 913232 - DNA, 120 bp, Artificial Sequence
  ENSG00000276077_20 (sequence is synthesized)
ttctacatttttcaaataaatacttgcttcttacactgtcaatgaagcactcaatatctttccgtctgatattttataatttatcaattgctcttactcaaataaacactttgcaatttc

SEQ ID NO: 913233 - DNA, 120 bp, Artificial Sequence
  ENSG00000276077_21 (sequence is synthesized)
taacgagcagcttttgttagaaatgatttctcaaatgaatgtaaaaacgtttgctgctgaattgtgacctttcaattttacctgcttttcctgcaaagtatattttgcagacccaggctg

SEQ ID NO: 913234 - DNA, 120 bp, Artificial Sequence
  ENSG00000276077_22 (sequence is synthesized)
gcttgtccttctgttcatggttcacccagtgccgtgtgtgctcagtgcatcctgtgcacgggtcactgtgctgtgtgcgctggccggggtgagcatcattcttcggggagaacctttctg

SEQ ID NO: 913235 - DNA, 120 bp, Artificial Sequence
  ENSG00000276077_23 (sequence is synthesized)
aaaacaaagctgcaatccaaaaagttaaaaccatgctacttactgtactgaggtaaaaattaaaagacctaggggactcttccaaaagttaaaacgtaaataaatatcttggaacattaa

SEQ ID NO: 913236 - DNA, 85 bp, Artificial Sequence
  ENSG00000276071_0 (sequence is synthesized)
gctatgttgcccaggctggtctcagtggccaaagtattggatgacaggtgtgagccaccgcgctgggtggtgaaacggttttgag

SEQ ID NO: 913237 - DNA, 120 bp, Artificial Sequence
  ENSG00000276071_1 (sequence is synthesized)
aggtgtgagccaccgcgctgggtggtgaaacggttttgaggctttttgagaatggctgttctatatgcccgcgtggggctcatgcggcgagcgccgccactcccgcagtggcccctgtgg

SEQ ID NO: 913238 - DNA, 120 bp, Artificial Sequence
  ENSG00000276071_2 (sequence is synthesized)
gggtgatacgtgatgtggcttaaatgtgagaggccacctggacccgtgtgattgccacgtttgcaggagcgcagccacgtgcacagggatcttgtgacattctgtgtgaggctttttgcg

SEQ ID NO: 913239 - DNA, 120 bp, Artificial Sequence
  ENSG00000276071_3 (sequence is synthesized)
ctgggtccacccatgattagaggactagtgtgactgtggcggcccctgagaagggaagaagctggttgcgaccaggaaggtctgagatggatgaatgacagatctctggaccagggcgtc

SEQ ID NO: 913240 - DNA, 120 bp, Artificial Sequence
  ENSG00000276071_4 (sequence is synthesized)
ctgaaccttagatgtatgcataggagcggtgtgaggtgactgtgtatgtttgtgtgtgagagtccagagccgacttagaggagtggaagctggcacatgttatctgccagaagggacaga

SEQ ID NO: 913241 - DNA, 120 bp, Artificial Sequence
  ENSG00000276071_5 (sequence is synthesized)
tctgattctcattcatgtatgtgagatggtttgcacttgaaactgtcagtgagagagaaagtagagtgaaatatatgacgtacagctggccctccctatccatgggtcttgcattgtgga

SEQ ID NO: 913242 - DNA, 120 bp, Artificial Sequence
  ENSG00000276071_6 (sequence is synthesized)
ttcaacaaaccttcagttgaaaatatctgggaaaagaagttgatgtttgcatctgtactgaacttgtacaggctttttttcttgtcattatgccctaaaaaatagaatataacaactatg

SEQ ID NO: 913243 - DNA, 120 bp, Artificial Sequence
  ENSG00000276071_7 (sequence is synthesized)
tacatagtatttacatggttattaggtgttataagtaatctagagagggtttaaagaatatgggaggatttccatagattatatgcaaataccgtgttcattttatataagggacttgag

SEQ ID NO: 913244 - DNA, 120 bp, Artificial Sequence
  ENSG00000276071_8 (sequence is synthesized)
catctgtgtatgttggtggggaggggtcctggagggacactgagggatgactatgtgaaagtggtttgcgaatatgctcaagtctctggatgaattgtatgacagtgaaggggtatgtga

SEQ ID NO: 913245 - DNA, 120 bp, Artificial Sequence
  ENSG00000276071_9 (sequence is synthesized)
ttagactgttgtggctttgaggttgatgtgtatgttttaaaggattatgattgagttggagatcatgtgagatttggtgtgtttaaatgtgacatgaattaaaatccgaatgaaagattg

SEQ ID NO: 913246 - DNA, 120 bp, Artificial Sequence
  ENSG00000224445_0 (sequence is synthesized)
gggaaaacgcagagtccaacaatgggataaaaatgtgcctcaagagtgggtaaattgaactcccccaagccactgaagattgctaagggtcttcattttggcaatatagatccaaatatt

SEQ ID NO: 913247 - DNA, 120 bp, Artificial Sequence
  ENSG00000224445_1 (sequence is synthesized)
gtgataacagaggttaccaaaggactttgtctccattatatagagttaacagagatatggcatgaacatgtattagaaaaatgattcacacacaatagaaaaaataagtaagaccaggat

SEQ ID NO: 913248 - DNA, 120 bp, Artificial Sequence
  ENSG00000224445_2 (sequence is synthesized)
ggagaatgtaatttcagcttgaatatgaagatgcttgtagaacagtgttccttcctctgaacatggctacagaagaacaaatcagttagtctgaagatgaaaacaagaagctgatggtag

SEQ ID NO: 913249 - DNA, 120 bp, Artificial Sequence
  ENSG00000224445_3 (sequence is synthesized)
acacattctgaactggctaacacaacactctgaaactggaggatatcaactgataagatatgaagttctcccttagtttcaaatacactgggttcataaattattgacataaacaataga

SEQ ID NO: 913250 - DNA, 120 bp, Artificial Sequence
  ENSG00000224445_4 (sequence is synthesized)
tgtcccatcaagctaccatgaagatagctaggtctgcacaactcctcaagtgtcgacccctccaagcacatcctccacctggaactgtgaactgaatggataaatgtgttggtcagaaag

SEQ ID NO: 913251 - DNA, 120 bp, Artificial Sequence
  ENSG00000224445_5 (sequence is synthesized)
tgagaattaaatgagttaatatatggaaatttcttgtagcaaggtctggctcacagcattatatattattatatattgtcattttgtgtaattatccccattttatagatttcagaagac

SEQ ID NO: 913252 - DNA, 120 bp, Artificial Sequence
  ENSG00000224445_6 (sequence is synthesized)
acacacacaaccaaatgaaacaaataaattatatttcagggtttatctgatgtcttttaggttcactttagaatattcaagaagatatccaggcattagcctgagctggaaacttgggtc

SEQ ID NO: 913253 - DNA, 120 bp, Artificial Sequence
  ENSG00000224445_7 (sequence is synthesized)
tcccacagaaagaactatcttcccggttttctctggaaatgagtggagggaatgaaaagttgccagaagagggatgaagagtctgtgaattctgaagaggcagaagatagcaatgagagt

SEQ ID NO: 913254 - DNA, 120 bp, Artificial Sequence
  ENSG00000278546_0 (sequence is synthesized)
ggctggcgtgcgctccggccaggctgcctctcaggtccacgctggagaaggagtggtgaggtgcgctcgccccggctgcgtgcggtgattcgggaaatccccgcacttcgctggagaaat

SEQ ID NO: 913255 - DNA, 120 bp, Artificial Sequence
  ENSG00000278546_1 (sequence is synthesized)
gggttgagtggacagacgggacccggcttacccatgggccaagccctgccacttaccgaggcctgccctgctgtgctttccagggcggcaaccttgagcttgggggtggggagaacgggg

SEQ ID NO: 913256 - DNA, 120 bp, Artificial Sequence
  ENSG00000278546_2 (sequence is synthesized)
cctgacttctagaattgcccctggggaggtgggaagcggaggtttggcccggtggcgcaggaagcccctgttcctctcccaaacaccatttcattaaagatggatctttgtggatgtgtt

SEQ ID NO: 913257 - DNA, 120 bp, Artificial Sequence
  ENSG00000273733_0 (sequence is synthesized)
caggcatgagccactgcgcccggcctaatatctgaaattaagaactcaacggatggggtcaacaggacactgggcacaacagaagacataagtggtgaactcatagacaagtgaacaaaa

SEQ ID NO: 913258 - DNA, 120 bp, Artificial Sequence
  ENSG00000273733_1 (sequence is synthesized)
agacaagtgaacaaaaaacttcccagttggattacagagaggaaagaatggaaaaaacagaacaggacataacagatgtgatcaaaaggcctaatatatgtgtaattggagtcccaggag

SEQ ID NO: 913259 - DNA, 120 bp, Artificial Sequence
  ENSG00000273733_2 (sequence is synthesized)
aatgaggcagaaaaaaattcaagtgagaatggctaagaatttccccaaactgatgaaaggcatccacccacaaatcccaattttgtacttccaaccactgttataccacccccctcaaca

SEQ ID NO: 913260 - DNA, 120 bp, Artificial Sequence
  ENSG00000273733_3 (sequence is synthesized)
atgcctataaatgtttgttgaaaatgagtgaatgaatgtactccaatcattttctcacttggatgttccctactttttgctcttcttagaaaataataaatggtacaataatatctccca

SEQ ID NO: 913261 - DNA, 120 bp, Artificial Sequence
  ENSG00000264023_0 (sequence is synthesized)
aggaaacaccagctacctataataacgcgtgacacgcaccttcttcaacactcagcacagctctgcaataatggcccagcctgatcttcacgttggaggtgaggacacaggccctggagg

SEQ ID NO: 913262 - DNA, 120 bp, Artificial Sequence
  ENSG00000264023_1 (sequence is synthesized)
cccccctgcctggactgccctaggctctggatctgtaacccctggcttgctccccattcgcctgcctgaccacagctccgaggcctctgaaaagcctggcaagcccggtcacctggtcac

SEQ ID NO: 913263 - DNA, 120 bp, Artificial Sequence
  ENSG00000264023_2 (sequence is synthesized)
cctatgaccccacaccctgcagctgcactgagcttcactgaccttgggtggggatgcctcctgagggctctttctgttgttctcgcatctctccagccacatattaaagtgactcagacc

SEQ ID NO: 913264 - DNA, 120 bp, Artificial Sequence
  ENSG00000264026_0 (sequence is synthesized)
attgaactgaagttgtattactgtgagagaaagggggcgggggatggcgatgggagagagaaagagatctacggaccctctggatggccggagcagacactacagtcttcaccagaggca

SEQ ID NO: 913265 - DNA, 120 bp, Artificial Sequence
  ENSG00000264026_1 (sequence is synthesized)
gccccataaaaatgtcatcgtctcgggctctccccgcattacaacacaatgatttctttggggaggagaaaaaaaaactaagatttattttgcaaccacacctccgcctcccttggaaga

SEQ ID NO: 913266 - DNA, 120 bp, Artificial Sequence
  ENSG00000264026_2 (sequence is synthesized)
gaaatactgaccaacaacaagttgtgaatgaaatgtctgcagatcggcccccctcgcccagcctgagaactttccagacggaaaggcgcacacgtgcacacagcaccagctgagccgatt

SEQ ID NO: 913267 - DNA, 120 bp, Artificial Sequence
  ENSG00000264026_3 (sequence is synthesized)
tgtgctgctctcagcagccaccggggatggaggaaccgctcaaggatctccagagtgcgagcctggttcgggacaaagttgcccaacctagtggtgtgagccacgtaaggagctggggag

SEQ ID NO: 913268 - DNA, 120 bp, Artificial Sequence
  ENSG00000264026_4 (sequence is synthesized)
aggggagtctgtccccaagacaatgacagcatctagggctcagtgccaggctcccgggagaagcaaacaagccatggctttagggaggggtgcaggctcattagagagcccactgaagtg

SEQ ID NO: 913269 - DNA, 120 bp, Artificial Sequence
  ENSG00000264026_5 (sequence is synthesized)
ttaccaccatgcagagaggaggggtgagagggcacggctctcctctgccagtttttttctcttgggacggggaagcagtgctgcttggaaaatagcaaactcaaaccttccccccaaatg

SEQ ID NO: 913270 - DNA, 120 bp, Artificial Sequence
  ENSG00000264026_6 (sequence is synthesized)
ccagaaatgttcccgggagtccaggccacaaggacagtgtgtgcaatggcttggaccaggccagagctgttctccctccccttaaactatgcataaaaaggaggttcccccacatgctcc

SEQ ID NO: 913271 - DNA, 120 bp, Artificial Sequence
  ENSG00000264026_7 (sequence is synthesized)
tcctgggatctttctggggttatcccacatgaacccgcttagattgcctttgaggaaacagagaagtgaagatcccccatccactccccattttggaaaagtggacatcaaggcccagag

SEQ ID NO: 913272 - DNA, 120 bp, Artificial Sequence
  ENSG00000264026_8 (sequence is synthesized)
ccagcccaatgaccaacagagtcaccagtgactctggggctatgcctaggactctgtctccagtctactgttcattcccaaggacaagcccacaacacagtagcagcacctgcagatgga

SEQ ID NO: 913273 - DNA, 120 bp, Artificial Sequence
  ENSG00000264026_9 (sequence is synthesized)
aagccttcgatctcaatgtcacctgtttgccgctttctgcataagtaatgtcattgttggaatgagtttatgatggtctccatccccatttctatgagctgtgagcaagacatctgctgc

SEQ ID NO: 913274 - DNA, 120 bp, Artificial Sequence
  ENSG00000264026_10 (sequence is synthesized)
atagctcacgtgtgttcaggcctccctggaccagcagctctgactcacacacgcacagaacggtagagtttgatcctgtatcataacctgaggattgattgaacttagacaatgtatttt

SEQ ID NO: 913275 - DNA, 120 bp, Artificial Sequence
  ENSG00000264026_11 (sequence is synthesized)
ccacttgtgcttagcccagtgaccagaagaagcctcgatattttgaaagcacagctgtatttctagaaaaggccttcaaagagataacgcagatgggagcatgcgcctggaaggccaccc

SEQ ID NO: 913276 - DNA, 120 bp, Artificial Sequence
  ENSG00000264026_12 (sequence is synthesized)
tgctgcacagcacactgactgagcaagaacaaagaccgtaaatgaagaaggatgtttgcattctgctcctcgcttgcctgaaaacaggaaactttggagacctgttctggcaaggtttcc

SEQ ID NO: 913277 - DNA, 120 bp, Artificial Sequence
  ENSG00000264026_13 (sequence is synthesized)
acctcttcctcaccccaaaggtcttgccttcctcaagcacctgcgaggagaagtcgtcactagtggggaattccagcaggtgacccaatcgagacagctgggcaggctcctggagctgat

SEQ ID NO: 913278 - DNA, 120 bp, Artificial Sequence
  ENSG00000264026_14 (sequence is synthesized)
ggcttgggaaggagggagtcagaagtggcaggcccatggagggccttcaactcattggatgaagcccacccttattcccaaggataatctcctttactcaaggtcaactgattgttgatg

SEQ ID NO: 913279 - DNA, 120 bp, Artificial Sequence
  ENSG00000264026_15 (sequence is synthesized)
ttaatgacatccacaaaatgtcttcacagcaacgggattgcttcacagtaatgggattgctgggtcaaatggtaattatccttatgattttcttaataccattgtcttttctctacctta

SEQ ID NO: 913280 - DNA, 120 bp, Artificial Sequence
  ENSG00000264026_16 (sequence is synthesized)
ggggggccttgcccggccaggaaaggactggaagtaaaggggggtggggaggcacaagccgagatgatatcattcctgaagcctgcaagcagccaatccgctggtgaggatatgatgtca

SEQ ID NO: 913281 - DNA, 120 bp, Artificial Sequence
  ENSG00000264026_17 (sequence is synthesized)
accagcagctctgactcacacacgcacagaacggtgctgaaatacaaacatgactaggtctgagttctaccctcgtggcatttatatcaagagaaggagactgaggctgtaaacttaaat

SEQ ID NO: 913282 - DNA, 120 bp, Artificial Sequence
  ENSG00000264026_18 (sequence is synthesized)
cttccctatggaagccccaggaaggcaggggcttggttgtatggaggctgtatgaacccggcacctagcatagcgcctgctatacagtaaacacacgatatgttggatgaccaaacagaa

SEQ ID NO: 913283 - DNA, 120 bp, Artificial Sequence
  ENSG00000261411_0 (sequence is synthesized)
agcgccccgcaagtgttcgagaggaaggccgcgggggtatctgccatcaggaaagacaaaatggagccacgcaggggaaagcagcatggggtgggggaaggtggcacgtttccggcgcag

SEQ ID NO: 913284 - DNA, 120 bp, Artificial Sequence
  ENSG00000261411_1 (sequence is synthesized)
ggagaggaagaacaggtgctcctccaaggaagactgccgctgctccccgggccctggcagcctgccccgccgcagagctgcgcgcacgccggcctcctggcagcggagcccgcggcggaa

SEQ ID NO: 913285 - DNA, 120 bp, Artificial Sequence
  ENSG00000261411_2 (sequence is synthesized)
ccaccacagcgaagcattctgtcccctcgcagctgctctcccaaaaactacaggtcctccaggaggccgagataaacctacgcgcagccttgtcttccgggagaggagagtgcctgtttc

SEQ ID NO: 913286 - DNA, 120 bp, Artificial Sequence
  ENSG00000261411_3 (sequence is synthesized)
cctacgcgaaatgatgtttaagatccctgcccgagcccccagtcccgcagttaagcatcaactggccgcctaacgggattgttcttccgcttggcatttgcaagggatggatttttctcc

SEQ ID NO: 913287 - DNA, 120 bp, Artificial Sequence
  ENSG00000261411_4 (sequence is synthesized)
gttctctcctctgccaagtttgcctcctctgaggctctctgggagggtatttgtaactctgcagttcagtttgaggaaggaaaaaaaaataagacaattttccaaagcaatcgtgtggtc

SEQ ID NO: 913288 - DNA, 120 bp, Artificial Sequence
  ENSG00000261411_5 (sequence is synthesized)
tttaaaatattgttatgtaaatgaatctaatgtgtctctaaattcattaagtgggttggagggttactagccctggagggccccagcgaaattggcagagacattttcactgtctaggtt

SEQ ID NO: 913289 - DNA, 120 bp, Artificial Sequence
  ENSG00000261411_6 (sequence is synthesized)
gtggttgttgaccttttcttctgtcttgcttaccctttcctagggaggaggcaggaactcgaggggcttatcggagtggcagaaggaaagcccccactgaaaatgcctgttatgcgcctt

SEQ ID NO: 913290 - DNA, 120 bp, Artificial Sequence
  ENSG00000261411_7 (sequence is synthesized)
ctgggaaccgtcctcctctttcacttcctcccagccccagctggaattcccaaatgtagcctaaaccagtaccatacctgctagacaaattgtataaattagacatccctaagagggagg

SEQ ID NO: 913291 - DNA, 120 bp, Artificial Sequence
  ENSG00000261411_8 (sequence is synthesized)
agaattttggatggggagcaaataaaggaaaaggaagctgccaaaacagtgagtcttggtcagaatttcacagtcatttctcaggtctgggttggaggatgtaaacacaggggaagtcaa

SEQ ID NO: 913292 - DNA, 120 bp, Artificial Sequence
  ENSG00000261411_9 (sequence is synthesized)
gctactttttgtaattgggaagcatgtaaagattgactcctttttcttgcgtccttcaaagagcacgaaaagtggggcagtaagtattcaaaagcatctgtttcctgcctgaacccctct

SEQ ID NO: 913293 - DNA, 120 bp, Artificial Sequence
  ENSG00000261411_10 (sequence is synthesized)
gagtaccagagggggccagcagaagaacctgccatggtccgtaaacatgcagggaaggctgtgacataggaagccaggcccacagctgagcctcccaaggatgaagataggcattcatcg

SEQ ID NO: 913294 - DNA, 120 bp, Artificial Sequence
  ENSG00000261411_11 (sequence is synthesized)
aaaaactgtttttgtgtttcttccagtactgctactttttaagtataatttacatacaataaaatgcagatttttaagtatactgatctatggattttgacaagtatgtacacccatgga

SEQ ID NO: 913295 - DNA, 65 bp, Artificial Sequence
  ENSG00000261411_12 (sequence is synthesized)
tactgatctatggattttgacaagtatgtacacccatggaacccaccacccatcaagaaacagaa

SEQ ID NO: 913296 - DNA, 83 bp, Artificial Sequence
  ENSG00000261411_13 (sequence is synthesized)
actaaaaaaaaatacaaaaattagctcggtatggtggcacatgcctgtagttgaacatgggagacggaggttgcagtgagccg

SEQ ID NO: 913297 - DNA, 75 bp, Artificial Sequence
  ENSG00000261411_14 (sequence is synthesized)
taaaaaaaaaaaaaaaaagaacttgttcatcactgcagcagattccctcgtgccctttgtttcaatcttcctctc

SEQ ID NO: 913298 - DNA, 120 bp, Artificial Sequence
  ENSG00000261411_15 (sequence is synthesized)
cagcagattccctcgtgccctttgtttcaatcttcctctcatcaaaggacacctctgatggatctgccttctgtcattacagattagtttgcattttctaatgtcatattaatgaaacta

SEQ ID NO: 913299 - DNA, 120 bp, Artificial Sequence
  ENSG00000261411_16 (sequence is synthesized)
cacagtatgtagtcattttctggctttgtttgcttagaatgatgtttttgaagatcacccatgtaggaacatatatcgagagcatctatatgtagtttgtttcattttattggtgagtaa

SEQ ID NO: 913300 - DNA, 120 bp, Artificial Sequence
  ENSG00000261411_17 (sequence is synthesized)
cattccatgatatggttataccgccatttgtttatgcattcatctgttgatagacatttgggctgtatattggtttgtggctcttatgagtaaagttgcaatgaatattcttttagattt

SEQ ID NO: 913301 - DNA, 120 bp, Artificial Sequence
  ENSG00000271395_0 (sequence is synthesized)
gcgagacaaagaacccaccggaaggaaccaattctgggcacaatgaggttcctgaccaaggggagtaaaggagatggaatgaagcttgtgtgctgtacttcaagtcatgcatccagtacc

SEQ ID NO: 913302 - DNA, 120 bp, Artificial Sequence
  ENSG00000271395_1 (sequence is synthesized)
tagaaagatgtctcatggcctagaaacaggccttgagcaagagcaagccctgcctttctcatatagaatatgtactgttttcttatatatagcctctttctttaaatttgataagataat

SEQ ID NO: 913303 - DNA, 90 bp, Artificial Sequence
  ENSG00000271395_2 (sequence is synthesized)
ttttcaggagatctggttgtttaaaaatgtgtaacatctccgccttctctctctgtcctgctgtggccatgtgaagatgtgacaattgtc

SEQ ID NO: 913304 - DNA, 120 bp, Artificial Sequence
  ENSG00000271395_3 (sequence is synthesized)
tcaatcaagattgaacttggtctcaagtgtcctgaatccagtgattatctaatctgtgatacaaagactaactaccttgcctccattttgagaaacccggaagtgctgctattttagttc

SEQ ID NO: 913305 - DNA, 120 bp, Artificial Sequence
  ENSG00000271395_4 (sequence is synthesized)
cagagcttctcacaggaaggcttaagatctaagaagttgagccacctcagcctggttcagaagccttgctggaaagatgattgctggagaggtgatgcaatcatttggaaaatagaagcc

SEQ ID NO: 913306 - DNA, 73 bp, Artificial Sequence
  ENSG00000271395_5 (sequence is synthesized)
tctctttcttttgtaaactgcccagtcttagatatgtctttatcagcagcgtgaaaacagggtaatatagtaa

SEQ ID NO: 913307 - DNA, 120 bp, Artificial Sequence
  ENSG00000271395_6 (sequence is synthesized)
atgtctttatcagcagcgtgaaaacagggtaatatagtaaattggtaacagtagaatgggatgctgctgaaaaggtatctgaaaatgtggaggtgactttggaaatgggtaacaggctga

SEQ ID NO: 913308 - DNA, 120 bp, Artificial Sequence
  ENSG00000271395_7 (sequence is synthesized)
gaaaaagacaggaaaatgtgggaaagtgtggaactccctagagacttgcagaatggctttgatcaaaacacagaatatgatatggacaatgaaacccaggctgaggcggtctcagatgta

SEQ ID NO: 913309 - DNA, 86 bp, Artificial Sequence
  ENSG00000271395_8 (sequence is synthesized)
tttgatcaaaacacagaatatgatatggacaatgaaacccaggctgaggcggtctcagatgtagatgagaaacttgttgggaacca

SEQ ID NO: 913310 - DNA, 120 bp, Artificial Sequence
  ENSG00000271395_9 (sequence is synthesized)
actttgaatttgagagagatgatttagagtatatggcggaagaaatttctaagaagcaaagcaatcaagaagtgacttgggtgctgttaaatgcattcagttttataagggaagcagagc

SEQ ID NO: 913311 - DNA, 82 bp, Artificial Sequence
  ENSG00000271395_10 (sequence is synthesized)
tcagttttataagggaagcagagcatacaagtaaatcccattttctgaggagaaatacaagctggctgcagaaatttgcata

SEQ ID NO: 913312 - DNA, 120 bp, Artificial Sequence
  ENSG00000271395_11 (sequence is synthesized)
cccaagacaataaggaaaatgtcttctgagcatgacacacctttgcagcagcccctggcatcacagcctcagaagtttaggaggaaaaagtgtttttttgggtcaggcctggggtccctc

SEQ ID NO: 913313 - DNA, 120 bp, Artificial Sequence
  ENSG00000271395_12 (sequence is synthesized)
tctagggacttggtgccctgcatcctagctgctccagccatgactgaaaaggaccaaggtgcagctcagactgttgcttcagagggtgaaagccttggtgttgagccttcaggtagacag

SEQ ID NO: 913314 - DNA, 120 bp, Artificial Sequence
  ENSG00000271395_13 (sequence is synthesized)
tcaggtagacagaagtcaagaatgaacctccacccagatttcagaagatgtatggaaaatgcttggatgcccaggcagaagtttactgcaggggtggtgtcctcatggagaacccgtgct

SEQ ID NO: 913315 - DNA, 120 bp, Artificial Sequence
  ENSG00000271395_14 (sequence is synthesized)
agggcagtgcagatgggaaatgtggggtcggagcccccaaagtgtctctactgaggcactgcctagtggagctcttagaagagggctgctgtccaggtgcctgtagtcccagctacttgg

SEQ ID NO: 913316 - DNA, 120 bp, Artificial Sequence
  ENSG00000271395_15 (sequence is synthesized)
agagtagtgatgctggcaattcagatctgccaaagagaagccatcaagttcttattttaactgaaaaggggaaagttctctacttaagaaagaaaaaaaatatgctgcgtttgccaagat

SEQ ID NO: 913317 - DNA, 120 bp, Artificial Sequence
  ENSG00000271395_16 (sequence is synthesized)
ctacatcgctgctgtttcaccaattaatgaagcaaataagttattatctgactgactacaggcagagaatctcggcagttattgaccactgtgccctacgagatgacaacggcctctgtg

SEQ ID NO: 913318 - DNA, 120 bp, Artificial Sequence
  ENSG00000271395_17 (sequence is synthesized)
acatcaggcacagaaggcagcatatgactgagtccttctggctcttacaggcttcagatacacttttacaagtgccctccataataaatgtgaacttcaagcttcatacagaggttcctg

SEQ ID NO: 913319 - DNA, 120 bp, Artificial Sequence
  ENSG00000271390_0 (sequence is synthesized)
gagaggtcaaagagatcagaagtgtgagaaagcctcattggctcattggctttgcagatgaagggggttaccagccagggaatgtgggtgacttcagaagctggaccctggtcaacagcc

SEQ ID NO: 913320 - DNA, 120 bp, Artificial Sequence
  ENSG00000271390_1 (sequence is synthesized)
agcacggacatgaggacctcagtcttacagccatgtggaactgaaatctaccaaccacctgaatgaggctggaagtggattctcccccggagcctccagatcagagcccagcctggctga

SEQ ID NO: 913321 - DNA, 120 bp, Artificial Sequence
  ENSG00000271390_2 (sequence is synthesized)
agattcagagcagagcctctgagcttacctggacttctgacctatggagctgtgagatcataagggagtgttcttttaagctgccaaattttggggaatctgttatagcatcagtagaaa

SEQ ID NO: 913322 - DNA, 120 bp, Artificial Sequence
  ENSG00000271390_3 (sequence is synthesized)
gcaaacacatgtgggaagccagctgtcaagttatgagcatacaaaggaaattggggaagtgataacgtcaagcattcatcatgataaggcttatgttattgaataaaattttctgaaaga

SEQ ID NO: 913323 - DNA, 120 bp, Artificial Sequence
  ENSG00000271392_0 (sequence is synthesized)
ggaacatatgtatgcctcctgcactcagacgtctgcttgggagacctcttgagaggggtgaaaccatcccggtaatgagtgaaaactcagaattgactgaatatctctccaaaagagact

SEQ ID NO: 913324 - DNA, 120 bp, Artificial Sequence
  ENSG00000271392_1 (sequence is synthesized)
gtttgaaaccagaagagaatgggctatattctattggcaagctcaagcattattttctgctatttatagaaataatacctaaaagacaagacaaagtcagttatcacagctccaggcatt

SEQ ID NO: 913325 - DNA, 120 bp, Artificial Sequence
  ENSG00000271392_2 (sequence is synthesized)
gtggcttcatgcaactatgaccaaagcaggaagaaaaggaatggcagagacttctcagaagctctccaacagacttctctttgaatctcattggccagaactggagcacaaacccattcc

SEQ ID NO: 913326 - DNA, 120 bp, Artificial Sequence
  ENSG00000271392_3 (sequence is synthesized)
taaaccaacttatggcaaaaagagggttgtcaagattgtcctagaccagttgtaattggtacctttgatcaagtgggactcatggagtatagttataaaacaatttcatttttgtctcct

SEQ ID NO: 913327 - DNA, 120 bp, Artificial Sequence
  ENSG00000271398_0 (sequence is synthesized)
aaagaaagaaagaaattagaagcagatggggcagttcagcctcttctcgcggagcggggctagacggagtcaggggcggaccgccacagcctgcaccaatcaggacccggttgataggca

SEQ ID NO: 913328 - DNA, 120 bp, Artificial Sequence
  ENSG00000271398_1 (sequence is synthesized)
cctggaaaccagcctgggcctatcctgcgcgccgctgcgggctactattggctgccaagaaaccccgcccatcttcctgctcattggccggtgcggtttacgtaagaggagcctgttgct

SEQ ID NO: 913329 - DNA, 120 bp, Artificial Sequence
  ENSG00000271398_2 (sequence is synthesized)
gagcgaaaagtctgttctgcaattttcgctaaggagttgttaacgctgaaaccgcactgggcgtcctggggtcaaaaaaacaatactagccacagtttattaaactgcaactaaatgcca

SEQ ID NO: 913330 - DNA, 120 bp, Artificial Sequence
  ENSG00000270040_0 (sequence is synthesized)
taatggaacttaagagctatcactgtattttaagtgctttcttttttatgtttagaaatgttaatttcataaacagccataaagtaattgaaataaaaagatacattgtaaaagcttttt

SEQ ID NO: 913331 - DNA, 120 bp, Artificial Sequence
  ENSG00000270040_1 (sequence is synthesized)
catttttcaattggaggctatggattccaaatcttccatggagttacttacgagattctgtacccattttattataattgcaattttaagatgcatttcatttatttaaaaatgtatttt

SEQ ID NO: 913332 - DNA, 120 bp, Artificial Sequence
  ENSG00000270040_2 (sequence is synthesized)
taaaaataatatgtacactctaattacctgccagttggacatcacagaataaagtttttccaccatctctgtgtatatatttgtactattaataaatgtacacttgattaaaaacacaaa

SEQ ID NO: 913333 - DNA, 120 bp, Artificial Sequence
  ENSG00000270049_0 (sequence is synthesized)
gcctgcctcattagcactaatggctgctcccttccgccctgtgtcgtcaggactgtctatgcctggtctcatcagcacaaggctgggtgtactccccttcaagggccctgttcccacctt

SEQ ID NO: 913334 - DNA, 120 bp, Artificial Sequence
  ENSG00000270049_1 (sequence is synthesized)
gtccaggggagagggtggggggtgcagggaaaaactgcaagcacccgtggctctgtcaatcagggttgattttgaaacccctacccagcccattgcccctgccccagagagcacagccat

SEQ ID NO: 913335 - DNA, 120 bp, Artificial Sequence
  ENSG00000270049_2 (sequence is synthesized)
gcctggagaggcacggtctcctcagtcattcagggagaggagaagatggatgggggttctctcgggctggtgtattgagccctgagctagagaggatctgtgattgttaattttgtgtgt

SEQ ID NO: 913336 - DNA, 120 bp, Artificial Sequence
  ENSG00000270049_3 (sequence is synthesized)
caacttgactgggccaggaatgcccagatatctggttaaatattatttctaggtgtgcctgtgagggtgtttccagaatcatccaatcctttgagggttggaataaaacaaaaagataga

SEQ ID NO: 913337 - DNA, 120 bp, Artificial Sequence
  ENSG00000270049_4 (sequence is synthesized)
tgacgctgcagggcgggcggggtaaagaagggagcgagcccttctcaagcttggaaagtttccagactgctgggccagcctcctccccagagggaaactgaggtccgattgaggtttctc

SEQ ID NO: 913338 - DNA, 120 bp, Artificial Sequence
  ENSG00000270049_5 (sequence is synthesized)
caagaccgcccactcctgctcctgtccccaaacccctttctgcctagggttcctggaagccaaggaaacagaacgaactgttccctgggtgggcgagccactgcagagtacaaagctttc

SEQ ID NO: 913339 - DNA, 120 bp, Artificial Sequence
  ENSG00000270049_6 (sequence is synthesized)
aggccgcctgcctcattagcactaatggctgctcccttccgccctgtgtcgtcaggactgtctatgcctggtctcatcagcacaaggctgggctgaagaagtcccaggagtcctcccatg

SEQ ID NO: 913340 - DNA, 120 bp, Artificial Sequence
  ENSG00000270049_7 (sequence is synthesized)
tcctctcagcaacccaggctggagcctactccttggtgttggcaaaggaaaccgtctttgaagccagagggagccctgaattcatgcagaggagtttttctaccttccatctgcttctgc

SEQ ID NO: 913341 - DNA, 120 bp, Artificial Sequence
  ENSG00000270049_8 (sequence is synthesized)
atatcatcttgtctacttaatgcccctccttccggatttatagaacagtatgcataatatgaccccaactgcattccaaaaaatagatgtagatgtaagcttagagatgcaaagaaactt

SEQ ID NO: 913342 - DNA, 120 bp, Artificial Sequence
  ENSG00000270049_9 (sequence is synthesized)
tttgagagaattcactatgcttctcgcgggtggtgacacagttcaaggaggttccatggggtgtaatgtttatctttctcttttgtccttctgatcattgaaatgatgctttgtgtgtgt

SEQ ID NO: 913343 - DNA, 120 bp, Artificial Sequence
  ENSG00000270049_10 (sequence is synthesized)
taaaatagaaaaattaatttgaatgggacaaatgctcgaagtcaaagtcacctgttataactgctgtcactaacagggcaactgtttgaaaatgctgcagaaacatgagaaatgttcatg

SEQ ID NO: 913344 - DNA, 120 bp, Artificial Sequence
  ENSG00000270049_11 (sequence is synthesized)
aagtgaccctgtggaggcttccggtcacaggatcatgtgagcgccacgatcaccccaggggtggagcagatgctaagtgttcaccacacccaattctcttcctggacacacaggaagatg

SEQ ID NO: 913345 - DNA, 120 bp, Artificial Sequence
  ENSG00000270049_12 (sequence is synthesized)
cacacccaattctcttcctggacacacaggaagatgacatttccagtgacatgccccacctctaggccctagtcttttttttatttaaaggtctgagtcttgttctgtcacccaggctgg

SEQ ID NO: 913346 - DNA, 120 bp, Artificial Sequence
  ENSG00000270049_13 (sequence is synthesized)
caaacaatcctcccacctcagcctccctaatagctgatgtcatataggcatgagccagtgtgcctggctcaggccctacccttaaaagcatcccacctgattcaccagcccccttctctc

SEQ ID NO: 913347 - DNA, 120 bp, Artificial Sequence
  ENSG00000270049_14 (sequence is synthesized)
cccccttctctctctcagtaaacttggaaaccacgcattccagatggtataatttacagcatgatggaaaaagccagctctccatgggaagctggccagtcttcattggagtacattttt

SEQ ID NO: 913348 - DNA, 120 bp, Artificial Sequence
  ENSG00000270049_15 (sequence is synthesized)
attgcatgaagccaatgagacttgatattgtttaactctgtggtttccaaagtgcggtccttttgaagtatccataaagtctacactaggttcacggtaatattaagatgttatttgtca

SEQ ID NO: 913349 - DNA, 120 bp, Artificial Sequence
  ENSG00000270049_16 (sequence is synthesized)
gacactgtctcaaaaaaaaaaaaaaagatattatttgtctttcatgagtgtacagtgggattttccagaggctacatgacatgtgtttttttattttgttttttatactgacagaggggt

SEQ ID NO: 913350 - DNA, 120 bp, Artificial Sequence
  ENSG00000270049_17 (sequence is synthesized)
cctggctgtttgtgacatgtgatgttgaaacaggttgagtatagaagcagatatgggaattaaaccagaatattaaaccagacattgaagagatttgcaaaaaatacaaaacaataccac

SEQ ID NO: 913351 - DNA, 120 bp, Artificial Sequence
  ENSG00000270049_18 (sequence is synthesized)
agagatttgcaaaaaatacaaaacaataccactgttttcactttctttttggtttggaaaaatgtagttatttttcattaaaagtatgttgtgttggctgggcacagtggctcatgcctg

SEQ ID NO: 913352 - DNA, 120 bp, Artificial Sequence
  ENSG00000270049_19 (sequence is synthesized)
ggggtaaggactgcccttttgtggagatggcaggacatacaggaccctgctgcccctgccttccctcaccccactgcagagctgtttatcacacacgtgtccatctgggaaaggaatgca

SEQ ID NO: 913353 - DNA, 120 bp, Artificial Sequence
  ENSG00000270049_20 (sequence is synthesized)
tgcaggctgaatcagctttgagaggatcgcaaggccccagtgcacaaactgggttggcacaaggcagtggaaaaaagatgaagggggccaggtatggtggctcacacctgtaattccagc

SEQ ID NO: 913354 - DNA, 120 bp, Artificial Sequence
  ENSG00000270049_21 (sequence is synthesized)
tgagaggccaaggtgggaggatcacaaggccaggggtttaagaccagcctgggtatcatggtgagaccccgttgctacaaaaaataaaaaaatagctgggtgtagtggtgcatgcctgta

SEQ ID NO: 913355 - DNA, 120 bp, Artificial Sequence
  ENSG00000270049_22 (sequence is synthesized)
gtagaggctgaggtgggaggatggcttgagcacagggattcaagagtgcagtgagctatgactgcatcaccacactccaggctgagcgacagagcaagatcctgtctcaaaaagaaaaga

SEQ ID NO: 913356 - DNA, 120 bp, Artificial Sequence
  ENSG00000270049_23 (sequence is synthesized)
gactccatcttaaaaaaaaaatgctatttaaaatgaaatgaagcaatccatactcccaacatttatatatactgggacatccaagaaattaaaatcacacctcattatgtctttttcttt

SEQ ID NO: 913357 - DNA, 120 bp, Artificial Sequence
  ENSG00000270049_24 (sequence is synthesized)
gagtcagggtctcactctgtcacccaggctgggcctggtcagcacccatgctatggagagctcttcatggtctggtgtggacagagtgggagtggaagatctcctcccacacaggtgctc

SEQ ID NO: 913358 - DNA, 120 bp, Artificial Sequence
  ENSG00000270049_25 (sequence is synthesized)
agtgtcttacctcacctacgggcagcagctgtcttcacctgagtgtgtgcacacaggtgtatcagccccatgggcagtgatggacgagggctgaggcactcacagggcagcccatgcccc

SEQ ID NO: 913359 - DNA, 120 bp, Artificial Sequence
  ENSG00000270049_26 (sequence is synthesized)
cgagggctgaggcactcacagggcagcccatgccccggtcaggtccagtgggggagatatcaagaaaacccagcgccaaaatgcaatgagctgtgatcgcgctactgcactccagcctgg

SEQ ID NO: 913360 - DNA, 120 bp, Artificial Sequence
  ENSG00000270049_27 (sequence is synthesized)
aaaactaaacaaaaaaaaaaaaacggccaggtgtagtgattcacaccttcttgagcccaggagtggcaacatagtgagactctgtctctaccaaaaaaaaaaaatttaattagctgaatg

SEQ ID NO: 913361 - DNA, 82 bp, Artificial Sequence
  ENSG00000270049_28 (sequence is synthesized)
tctctaccaaaaaaaaaaaatttaattagctgaatgagggaggaggatagcttcggcccaggagattgaggctgcagtgagc

SEQ ID NO: 913362 - DNA, 120 bp, Artificial Sequence
  ENSG00000270049_29 (sequence is synthesized)
ccaaggtctgggggcagggaaccggaggccaactaaggcgagcttactaaagctaaaccaaaaagaaaaaccccatctccccatgtccaagtaacaaaggatcaaaggccactgtcccca

SEQ ID NO: 913363 - DNA, 120 bp, Artificial Sequence
  ENSG00000270049_30 (sequence is synthesized)
caaccctcccccttccaccacgtctcagttgaaagggagagtgccttggattggctgcgggccaagcacgggccatcccttcatctgcatagggcgccaattcaccttagccccatttat

SEQ ID NO: 913364 - DNA, 86 bp, Artificial Sequence
  ENSG00000270049_31 (sequence is synthesized)
tcatctgcatagggcgccaattcaccttagccccatttatgccttgtgttccattattggaacgctaagcataggccaaggtctga

SEQ ID NO: 913365 - DNA, 120 bp, Artificial Sequence
  ENSG00000270048_0 (sequence is synthesized)
gtagattctctgagggaaaaaaaaaacaccgtgtagatggtgttctcagcaggtgagagtcagactgcagaagcaggccagctcctctgtaagacccacatgaagattactgttgccact

SEQ ID NO: 913366 - DNA, 120 bp, Artificial Sequence
  ENSG00000270048_1 (sequence is synthesized)
cagagtcgccaccttcctctctctactccccatcctgttccgccttctgaatcgcagcatcaattgttgacttaagcaggcaaaaactcaaactacatttgaataaagaatttgtcagta

SEQ ID NO: 913367 - DNA, 120 bp, Artificial Sequence
  ENSG00000250603_0 (sequence is synthesized)
caaagactgaagatttctgaagaagaagcaatcatgcctcaataaagcaacctaagaaaccctgcctgagtttccagcctgctggcccatcctgcagatttagaactgaaaactacatca

SEQ ID NO: 913368 - DNA, 120 bp, Artificial Sequence
  ENSG00000250603_1 (sequence is synthesized)
agccagccctacagctttcaaacttgccagcccctacagtcattactggcaacaaggaggtgaaatgtacaagtaaccatcgtagcagaactcagtctttaaaaaaggtttcagtggacc

SEQ ID NO: 913369 - DNA, 120 bp, Artificial Sequence
  ENSG00000250603_2 (sequence is synthesized)
taagaaaaggaagttttaagagagaccatgggaagactgcacattcttgacaacccatccacctatcctgagaaagacattctgtacctattccaccttcagaaaataaacactgtcaat

SEQ ID NO: 913370 - DNA, 120 bp, Artificial Sequence
  ENSG00000264790_0 (sequence is synthesized)
cctgcctcaacctcccaagtagctggggttacagatgagctacttaacagccacagccctccgactttggaatagccctgcctgccatcatcatctgtcctgagaggaaggcttgccttt

SEQ ID NO: 913371 - DNA, 120 bp, Artificial Sequence
  ENSG00000264790_1 (sequence is synthesized)
atctgtcctgagaggaaggcttgcctttgaaattcctttattgtagcagacatttgctgctaggtctcttttgttagtgcacatgcctgctcttcagcctgcctgtgttcctgcacccat

SEQ ID NO: 913372 - DNA, 120 bp, Artificial Sequence
  ENSG00000264790_2 (sequence is synthesized)
tctgttgctttaacttgctttcctgtggctgagctccactggctcctgactgcctgcttggtttgtctgccagcttgccttacccttgggcttcaatcttcacaatcctcataatcttgc

SEQ ID NO: 913373 - DNA, 120 bp, Artificial Sequence
  ENSG00000264790_3 (sequence is synthesized)
tctgagcatagggtaccatgcagcccaattctacgtggttcatctgctcctgacttaactgaatctacctcttacttgagccccttatattaaagagggtcgatggcttttataatgaaa

SEQ ID NO: 913374 - DNA, 120 bp, Artificial Sequence
  ENSG00000264790_4 (sequence is synthesized)
gtgactgcaatacaaatacattttaatggtgtcacaacctttaaacattagcagtccaggttgttcaaggaccaccttaagttctgaacttagtgtgtagaaaagtttccacaagtaaaa

SEQ ID NO: 913375 - DNA, 120 bp, Artificial Sequence
  ENSG00000264790_5 (sequence is synthesized)
aatattttcatgcttctgaatattttatgggttttgtcctacataggaatacttgctatctttattgaaaggggtatgtggaatcaaatatctgaataaattatgtcatatatatacagc

SEQ ID NO: 913376 - DNA, 120 bp, Artificial Sequence
  ENSG00000264791_0 (sequence is synthesized)
gacttctccaggttctctacattcctgaagcaagtgctatagaatggcttggcactccacctgcacgttcccaagcacagaatcagggtgcagtaaagaggatctgggctgaccaacagt

SEQ ID NO: 913377 - DNA, 120 bp, Artificial Sequence
  ENSG00000264791_1 (sequence is synthesized)
acttgctaattcacgcatggaagacccagagtgtatcactcccctcaactgctggactactgtgctgcaaactttgagtcagaatgatgagcttcagtcaggcatatcatggctcctgaa

SEQ ID NO: 913378 - DNA, 120 bp, Artificial Sequence
  ENSG00000264791_2 (sequence is synthesized)
caggattttgagagcaagattctgtgcctccctcatcctgctgcagcctctcagtgcatctaggtgtttctgcttccattgtacatatctatcaaaataaaattgttataattaaacaaa

SEQ ID NO: 913379 - DNA, 120 bp, Artificial Sequence
  ENSG00000235215_0 (sequence is synthesized)
agcctgtgggaaaatgactgagtgcccatagatgaagtgctttcaagactgtctggcacctagaggtatcatcgcagaagccttggatatgaacagaagcaggcagaggatgaagctgat

SEQ ID NO: 913380 - DNA, 120 bp, Artificial Sequence
  ENSG00000235215_1 (sequence is synthesized)
cccagtctgactaggcatcttctgatggggtttgacctggttgcttctaacactaggatggacctcttggcaatctctggatatctttctgtggtttgttataatggtaattattactta

SEQ ID NO: 913381 - DNA, 120 bp, Artificial Sequence
  ENSG00000235214_0 (sequence is synthesized)
aagtgcggccagaccgaggctggagaaagagcgcagccagagacggaaaggcagccaggctgcaggatagtgatgggggccaagggccctgctgcacacttggacaggatgaacttggcc

SEQ ID NO: 913382 - DNA, 120 bp, Artificial Sequence
  ENSG00000235214_1 (sequence is synthesized)
tttccccataattggcctgaatggtgcccttcccattcccccaacgtgtccctcccataactcctcaaagttcaggatacaccaggcgctgtgattcacaataaagtctgcctttattga

SEQ ID NO: 913383 - DNA, 120 bp, Artificial Sequence
  ENSG00000275672_0 (sequence is synthesized)
gatgcttgcccttttttagccagcggggccactgacggcttctgttgcacgtccggacccggacccagacccgagcgtcgcaagaaggcccgttggagtctcgcgcaactgggcaggacg

SEQ ID NO: 913384 - DNA, 120 bp, Artificial Sequence
  ENSG00000275672_1 (sequence is synthesized)
cgacttctgacgaagtgacaatggtctatgcatatattaagtgaatatttgagaatttaaatatgcaaagcgtgagtacagtgttacccttaaattcacatatgcgcactgaaccagtca

SEQ ID NO: 913385 - DNA, 120 bp, Artificial Sequence
  ENSG00000275672_2 (sequence is synthesized)
cctcatttttcggtaaacgaaaccacctaaagattaggtggtttcttggtgcaacatcgggtttgagactgcagaaaactaagtctggaaattgggccatttgttccccggggaggcagt

SEQ ID NO: 913386 - DNA, 120 bp, Artificial Sequence
  ENSG00000275672_3 (sequence is synthesized)
gctttccttccagtaccccgtcggttgttatttggaacacctggcatttcacatggtctttggccatatgcccctggcttgagaaactccgtcatgaaaatcgacaagtgtgggtcagaa

SEQ ID NO: 913387 - DNA, 120 bp, Artificial Sequence
  ENSG00000275672_4 (sequence is synthesized)
ataagggaggacgacagtttcgttccttccatttcatgttttaaaatttttgtttcaacttgatcaggattcttttttagaaaagtattttccctcacagtgcagtcttaattgctgtgg

SEQ ID NO: 913388 - DNA, 120 bp, Artificial Sequence
  ENSG00000275672_5 (sequence is synthesized)
tcatttttgatgagctgtcttttcaattttggtatctcaagcttgttttccagagttcatggatggaaagcaccagacgagcagatggcatggtggaaagagcctccgagagggaattag

SEQ ID NO: 913389 - DNA, 120 bp, Artificial Sequence
  ENSG00000275672_6 (sequence is synthesized)
gataactgagttccagtcctgaatcacttatagactactatatgtcttcctgaattgcagtcttcttatctgcaaagtgagaacaatagaatttactgtccctagcacatggggggttgc

SEQ ID NO: 913390 - DNA, 120 bp, Artificial Sequence
  ENSG00000275672_7 (sequence is synthesized)
aatagaatttactgtccctagcacatggggggttgctgagaggccaaaatgagagattgtacatgcagaacttgatgcgtggcattagagctgtatgaggccgggtgcagtggctcacgc

SEQ ID NO: 913391 - DNA, 120 bp, Artificial Sequence
  ENSG00000275672_8 (sequence is synthesized)
aaggccgaggcaggcggattgcctgaggtcaggagtttgagactatcctggtcaacatgatgaaaccctgtctactaaaaatacaaaaactaggtcgggcgcggtggctcatgcttgtaa

SEQ ID NO: 913392 - DNA, 120 bp, Artificial Sequence; identical to SEQ ID NO: 804445
  ENSG00000275676_0 (sequence is synthesized)

SEQ ID NO: 913393 - DNA, 71 bp, Artificial Sequence
  ENSG00000275676_1 (sequence is synthesized)
gctgggaagattacgaggtcaagagatcaagactatcctgggcaacatgatgaaacgctgtctctactaaa

SEQ ID NO: 913394 - DNA, 120 bp, Artificial Sequence
  ENSG00000275676_2 (sequence is synthesized)
ccgtctcaaaaaaagaaaaaaaaaaaatttcagggatatttatgtagtgacctgttatttaatttttcaataatataaatctgtttcaagaaaaagaaattttaaataaactcttatgat

SEQ ID NO: 913395 - DNA, 120 bp, Artificial Sequence
  ENSG00000275676_3 (sequence is synthesized)
aaattattccagaacttaaaaaaaagaagaaacaaaacagagtaagtacattagctttattcaacatagcatcttgtctagtagtaaactactaaaaacagtctcctgagtggaaaaaat

SEQ ID NO: 913396 - DNA, 120 bp, Artificial Sequence
  ENSG00000275676_4 (sequence is synthesized)
ataaatttttgtctatagcatcagcgttgtcctgcatgttctcattattttctccaaataaattggctcaatatgctgctaagtattaccatttatgtttattttgaagttctatatctt

SEQ ID NO: 913397 - DNA, 120 bp, Artificial Sequence; identical to SEQ ID NO: 804454
  ENSG00000275676_5 (sequence is synthesized)

SEQ ID NO: 913398 - DNA, 120 bp, Artificial Sequence
  ENSG00000275676_6 (sequence is synthesized)
caaaatcacaggtcacatagtctcagtgccaagagttataagaacaactgctttatttcactcctatctctgtgaatacaaaacttcaatctctaaagtattttctatctatttataaca

SEQ ID NO: 913399 - DNA, 120 bp, Artificial Sequence; identical to SEQ ID NO: 804456
  ENSG00000275676_7 (sequence is synthesized)

SEQ ID NO: 913400 - DNA, 120 bp, Artificial Sequence
  ENSG00000250600_0 (sequence is synthesized)
caaaagcatcttcggatcggtttcccaccgccgaatgttgcttgagccaatgtgactggctctaggaggaaataaatcacatctgtcaaaagagcctcgagtcgaaggataggagaaacc

SEQ ID NO: 913401 - DNA, 120 bp, Artificial Sequence
  ENSG00000231918_0 (sequence is synthesized)
aggcccctgctagacccatggaaagctgtatggagattccacttctccggggtttggtagtgattgggcggggatacctgagagggtgccaggaaagggtccagcagtcaaagagaaggg

SEQ ID NO: 913402 - DNA, 120 bp, Artificial Sequence
  ENSG00000231918_1 (sequence is synthesized)
gccaaggagtcgataattatgatgagctctggctttacttgtgcaccttggtctcctgctcggaacccttgaaaagaagctgcagcttttcgaggaatgcaggggcaagcaagactcaca

SEQ ID NO: 913403 - DNA, 120 bp, Artificial Sequence
  ENSG00000231918_2 (sequence is synthesized)
caggcactggcattcttctagatccgatgtcccttgccccaccccttactgtggctctgccttgggtaatcacaacaaatcttcatgacttgcctaggctgtgccaaaaagatgtaaaag

SEQ ID NO: 913404 - DNA, 120 bp, Artificial Sequence
  ENSG00000231918_3 (sequence is synthesized)
gaacccaccagggtaagatgccaacttgcagacgacgatcaactgtgtctgacaaggttgttctggaatcatagttgaagaaacagttggctagactctaacagctgttcacaatttctc

SEQ ID NO: 913405 - DNA, 120 bp, Artificial Sequence
  ENSG00000231918_4 (sequence is synthesized)
gtatctctcctgatggaggacagtgtttttaaagtggctactccaaaaataatcacacaaggcaggatttcatctatccctaatattctcagaaggttcatcagtggcatgatgacagaa

SEQ ID NO: 913406 - DNA, 82 bp, Artificial Sequence
  ENSG00000231918_5 (sequence is synthesized)
agagccatgctgaactaaaccttgtgattacattgagcctacctgaatgatccaggataatcgtcccatatcaaggagagca

SEQ ID NO: 913407 - DNA, 120 bp, Artificial Sequence
  ENSG00000231918_6 (sequence is synthesized)
ctgaatgatccaggataatcgtcccatatcaaggagagcaaagtgaatagtgtgatttgcttagaggacaatgctgctacaaaaacctgttccactccaaggccaactgcagttttgaga

SEQ ID NO: 913408 - DNA, 120 bp, Artificial Sequence
  ENSG00000231918_7 (sequence is synthesized)
tgtttgagttgctcccagttttatgctaccatgaatgagaggacggatccaacattcaaatggtcttgggtctgcatcttagctcggccactggatagctgtacaactacggagtcttgc

SEQ ID NO: 913409 - DNA, 87 bp, Artificial Sequence
  ENSG00000231918_8 (sequence is synthesized)
gttctggagtctttctctaatacactacatacaatccataggcaaattctgttggcgtcaccttcgaaatctaccccaaatcttact

SEQ ID NO: 913410 - DNA, 120 bp, Artificial Sequence
  ENSG00000231918_9 (sequence is synthesized)
tctgttggcgtcaccttcgaaatctaccccaaatcttactatttttacagcacttcaaccaccagtaccttatcaaaaaccacttctatatttcttgtaaattattggaacagcccttta

SEQ ID NO: 913411 - DNA, 120 bp, Artificial Sequence
  ENSG00000231918_10 (sequence is synthesized)
cctggtcttcctgtttctgccttttgcatcccttcttccttcctctcctccacacataccactaaaatcgcagcattgcaactacagtaataaatacatcacttctctgcacaaaagctt

SEQ ID NO: 913412 - DNA, 120 bp, Artificial Sequence
  ENSG00000231918_11 (sequence is synthesized)
ctggtggcttcccccctcactcaggaagtctttatagtactccagaagatcactttctggccttccctgttgggctcattttctatttctaccttgcccactctgttgcagccacactgt

SEQ ID NO: 913413 - DNA, 120 bp, Artificial Sequence
  ENSG00000231918_12 (sequence is synthesized)
cctccctgctgattcgtgaacacactgaccatgctcttgcttcaagaacacttacattgctgttccctctgccaggacagttcctctagtatccactcacctcattcagtttctgcacaa

SEQ ID NO: 913414 - DNA, 120 bp, Artificial Sequence
  ENSG00000231918_13 (sequence is synthesized)
atgtcacttttacaataaagtcatccctaaagaactaatttaaaattgtaccctactaaatagaaatccccttacctcacttagaacactctaaaagtgctctaaaggactaaattagca

SEQ ID NO: 913415 - DNA, 120 bp, Artificial Sequence
  ENSG00000231918_14 (sequence is synthesized)
atttagccctttagtaccccactgattagcaatccccttaccccacttagagagtgctctactagtactttaggtagtaccatctaaacagtgatgccactgtcagactaaaaatcacca

SEQ ID NO: 913416 - DNA, 120 bp, Artificial Sequence
  ENSG00000231918_15 (sequence is synthesized)
gaccatgctgtacaattttctaggtgcagaagatacatcacttaacaaagaagatcactacacttggttacttggagtttatatttgaattggtaaaatatatggcagaaactgaaagtg

SEQ ID NO: 913417 - DNA, 120 bp, Artificial Sequence
  ENSG00000231918_16 (sequence is synthesized)
ctgagaaggaccaaattagtaatgagtaatttagccctttagtgccctactgattagcaatcctcttaccccacttatagagtgctcttctagtactttagatagcagcatctaaacagt

SEQ ID NO: 913418 - DNA, 120 bp, Artificial Sequence
  ENSG00000231918_17 (sequence is synthesized)
agcatctaaaccccttgggattgctaattaccctactttaggaggtaattacatgaggatggtgaagcctttatggaaggaattagggtccttataaaagcacttgaggcagtgggtcca

SEQ ID NO: 913419 - DNA, 120 bp, Artificial Sequence
  ENSG00000231918_18 (sequence is synthesized)
ctctcttttgctcttccaccatgtgaggacacagcattcaaagcaccaccttggaagcagagataaggctctcaccagacaccaaacctgcctgccccttgattttggacatccagcctt

SEQ ID NO: 913420 - DNA, 120 bp, Artificial Sequence
  ENSG00000231918_19 (sequence is synthesized)
cagaactgtgagaagtacatttctattatttatgaattacccagtctggtattttattatagcagcataaagagactgtgatagaaggtatgaatttttgttctaaacgaggactggggg

SEQ ID NO: 913421 - DNA, 120 bp, Artificial Sequence
  ENSG00000231918_20 (sequence is synthesized)
tggtaggaacttgaaaacaacgctaatataacaaatcaattagattgcttctagctattttatttttctttcattaattagtaattccaatccagttctgggtgtgaagttctacaggta

SEQ ID NO: 913422 - DNA, 120 bp, Artificial Sequence
  ENSG00000231918_21 (sequence is synthesized)
aaacatgttccttttagatattttcctctgaaaagaattggggaaatattgcaaaggaaaaggaaaagggaaaggagtgattctgacatttatgaatttgtgatattatgtactgaaatt

SEQ ID NO: 913423 - DNA, 120 bp, Artificial Sequence
  ENSG00000231918_22 (sequence is synthesized)
atgacctgattgtatatttctccctagtctgcatatagggaggttattcagcccttccaccttctgccatgggatggcacagcaagaaggccctcatcagatacaggcccttcagccttg

SEQ ID NO: 913424 - DNA, 120 bp, Artificial Sequence
  ENSG00000231918_23 (sequence is synthesized)
gttttccagtcattagaactcattgccatctatattttcactcctgagaagtttgaaaattaaaaaaaaaaaaaaagatcatcaagaataagggatgaaccacaaaaagaaagaaaggct

SEQ ID NO: 913425 - DNA, 120 bp, Artificial Sequence
  ENSG00000231918_24 (sequence is synthesized)
ggaaaaaggttttacagatttttaagaaatataactcatttgcctgagcattctttcaacatcctcattttaaggttacttctaaaaagaagaaatgatttttaatatttccttcatctg

SEQ ID NO: 913426 - DNA, 120 bp, Artificial Sequence
  ENSG00000231918_25 (sequence is synthesized)
gagaaataactgtcgctgttcggtattcacagacttcctgctgaggactgctatcgcaataaactctggtctcacgataggcagccatgatgagaaacggcccctgcatagagatggttt

SEQ ID NO: 913427 - DNA, 120 bp, Artificial Sequence
  ENSG00000231918_26 (sequence is synthesized)
gaactgtgtggctccctcctgccccatataaccatcgcgagaagaatgtaacagcggccctccattagtgaaccttttaccgtgattcccgagtcataaccccgacccaccttgaaatct

SEQ ID NO: 913428 - DNA, 120 bp, Artificial Sequence
  ENSG00000231918_27 (sequence is synthesized)
actgctggcattttctcgtcattggtttgacacatgaattagcagtttaagactttgcctccctactaacaccaacatcttatttgtatggctctggcactagttcctgcctccttgtcc

SEQ ID NO: 913429 - DNA, 120 bp, Artificial Sequence
  ENSG00000231918_28 (sequence is synthesized)
tctaactctaatcccagttatcacccttaattcagtatgctcttggatctctggttaaatctcttagaactttccattcaaaataacatactttatacttcagagccacccttaggtttg

SEQ ID NO: 913430 - DNA, 120 bp, Artificial Sequence
  ENSG00000231918_29 (sequence is synthesized)
gtacttctactatgtccatgaattgaatttttgcatctgtttctctatatatgtatttttcatttaaaatatttgttcttaagtcgtataatttacctggtgaaagaccatacaacagta

SEQ ID NO: 913431 - DNA, 120 bp, Artificial Sequence
  ENSG00000231918_30 (sequence is synthesized)
cttgcatgtagtctccctataactgatgaacgtgcatgtttcttttctccgataaattttatgtcaattttactacattattgaaattcccccagcgtaatgtgataaaatttatcaact

SEQ ID NO: 913432 - DNA, 120 bp, Artificial Sequence
  ENSG00000231914_0 (sequence is synthesized)
tttctacttgcagacttccaaacatttcctgaaaccttaaactcttactgattctttaaactgtccccattccacttttctctgcagcaagtagctctcaatgtgtagtcctcagatggg

SEQ ID NO: 913433 - DNA, 120 bp, Artificial Sequence
  ENSG00000231914_1 (sequence is synthesized)
ttaacaagccttccagatgactctgaagcatgctccatactgataactaatgcaatgcattatgtcttcatgtgaccagcagcaccaactgcaagactgtctgtcacctgagtgtggctt

SEQ ID NO: 913434 - DNA, 120 bp, Artificial Sequence; identical to SEQ ID NO: 807135
  ENSG00000231914_2 (sequence is synthesized)

SEQ ID NO: 913435 - DNA, 120 bp, Artificial Sequence
  ENSG00000231912_0 (sequence is synthesized)
gcagatgccagctgtggagtctcccacaagtgaagagaaggacttgagtaggtcttacataatttcttcaaaagcagaagaaagatcacaggaattagcaggctgcatggtggtccaatt

SEQ ID NO: 913436 - DNA, 120 bp, Artificial Sequence
  ENSG00000231912_1 (sequence is synthesized)
ctgcaccactcttctgtcaagagtctatgagtggctgcaatataaaaagaagaaaacgcacctcaaagactttaaaaagcaacagaaataatggtagggtcattgtgggggtcaacatgg

SEQ ID NO: 913437 - DNA, 120 bp, Artificial Sequence
  ENSG00000231912_2 (sequence is synthesized)
attcacgtcaatatttgttactttcctagtcaaatctatataactatttaattataattgtcatcagataatgactataaaataggaacattttcaaccacaaaataaatattaagacaa

SEQ ID NO: 913438 - DNA, 120 bp, Artificial Sequence
  ENSG00000287333_0 (sequence is synthesized)
gggtctcctggcctggctaccaacatgcctgtggcttctcattgggccccgtgagtgctggcagggctgtgaagcaggtgtgactaatgggtcagctccccgctgggactgtgaccctga

SEQ ID NO: 913439 - DNA, 120 bp, Artificial Sequence
  ENSG00000287333_1 (sequence is synthesized)
agctaacaaacctaagggcaaggccaggcgcagcagctttctgagtctcttctgaagtggcttgaagtcgatactgtgtgtgtatgtaagatctagcctgaaggaaggcgctttgttcag

SEQ ID NO: 913440 - DNA, 120 bp, Artificial Sequence
  ENSG00000287333_2 (sequence is synthesized)
ttgctaacttattttcttggtgctcagccagacagtcaaaaggagagcaacttagcagaagattttggtctagctgaggattcagatcactgaagaacttaagtttaggctgttaaacaa

SEQ ID NO: 913441 - DNA, 120 bp, Artificial Sequence
  ENSG00000287333_3 (sequence is synthesized)
actaggccccaacagacgagaccaaaccaaaatggagtcattcatgctaaatgcctcgtcatcaaatagaagctttaaggaagcagatagatccaacatagactagtttttcttgagaac

SEQ ID NO: 913442 - DNA, 120 bp, Artificial Sequence
  ENSG00000287333_4 (sequence is synthesized)
agaagattccagtctacctgtgtcagtgcaataaggaagtcctctctgctttaatttttacacaaaaagtaacctcatgttagccaatccgactttaaaattttttttttcctatttcct

SEQ ID NO: 913443 - DNA, 120 bp, Artificial Sequence
  ENSG00000287333_5 (sequence is synthesized)
tgttctcaccttacaaaacccactgttctgctgctgtccagcaggaaccctcatgctgttttgtagaatggaagctgccctgattcatgaattgcaaataaaagccaattagatctataa

SEQ ID NO: 913444 - DNA, 120 bp, Artificial Sequence
  ENSG00000287332_0 (sequence is synthesized)
gtcccaaagaggggcagtcgcttgcccaaggccatgtggctgttagtgttggagtcagaatttgaagccagggaggctgatcttggaacacctgctgtcaacagaaacttctgacaaaat

SEQ ID NO: 913445 - DNA, 120 bp, Artificial Sequence
  ENSG00000287332_1 (sequence is synthesized)
acagaggactgccatgccttccggggtgttctcccagagatgccccttctgctatcctgcctgtgctgctgccctgatcattactgcaaatggctggattcatctttgtcaagtttgcac

SEQ ID NO: 913446 - DNA, 120 bp, Artificial Sequence
  ENSG00000287332_2 (sequence is synthesized)
tttcaccaaagtttgaattaacgtcgacattaatttgctgatgaagcgcctgcagtaggtcatatagcgtgagcacctgtgatttccaaggaaattattgtaatgtgctaaatgggagat

SEQ ID NO: 913447 - DNA, 120 bp, Artificial Sequence
  ENSG00000287332_3 (sequence is synthesized)
ttaaagataatgcatcattgacagccgtggatctgcagcttgtccccgtgacagcccctgcagcatcagcagacgagggaccttgaggtggacaaggaaacacagtcctgaagaagctgg

SEQ ID NO: 913448 - DNA, 120 bp, Artificial Sequence
  ENSG00000287332_4 (sequence is synthesized)
tgggcccaggcctgaaaagcagaggtggcttctcctctttagcctggtggcagcaggtgtgccctggtagtcaccgtgagcctgggttttcggccgctcccatcccctagtgaggtcctt

SEQ ID NO: 913449 - DNA, 120 bp, Artificial Sequence
  ENSG00000287332_5 (sequence is synthesized)
gtgtgcggaggggaaagctttagggagggtttggcctccccaggtgatggggtgtaggtggtggggctgggagttgtcagaccccagaccctcttgttagcaataggccgtgctcttgaa

SEQ ID NO: 913450 - DNA, 120 bp, Artificial Sequence
  ENSG00000287332_6 (sequence is synthesized)
tcaggcctgatgtgaaggacctggtcacggtgggctggcaggatggccaaggcattttctgttgttttctgttgggctcccacagaccaggggtcagaccatgagccacacaccccgaag

SEQ ID NO: 913451 - DNA, 120 bp, Artificial Sequence
  ENSG00000287332_7 (sequence is synthesized)
atgctcggagatggtgaaggtggcatcgcagaaggccagggctgccctggggctgaaggatggcagagcctcccgctaccctgttgggagctgggaatcggccattccttccccaattct

SEQ ID NO: 913452 - DNA, 120 bp, Artificial Sequence
  ENSG00000287332_8 (sequence is synthesized)
gaccacggaaagtagccctcagcccgaactgagctgcagaattcccacatcacccacgggaaggttatgatttccattttaattagaaacacttgattacactcctcgcccatcccttct

SEQ ID NO: 913453 - DNA, 120 bp, Artificial Sequence
  ENSG00000287332_9 (sequence is synthesized)
cctctccccagctcagggctttagatagtgtgttcactgaacgggcgccctcgggaccttgccgagtgggacagtcccctctctccctcacccaatgtctggggctgcccaacagtggtg

SEQ ID NO: 913454 - DNA, 120 bp, Artificial Sequence
  ENSG00000287332_10 (sequence is synthesized)
aaaggtgctgggaaggcacggcagccctgggaaggagcaggaagcaggacagtgggagagtgcactgtgtggccctgcgagggtggactgcagctcccaccccctcacagcccgcaagtc

SEQ ID NO: 913455 - DNA, 120 bp, Artificial Sequence
  ENSG00000287332_11 (sequence is synthesized)
ctgcggggactgcatggaaaccccccttattctggggagcacgtgctctgactcccctgctttagggtaggcccagtctgcgcaccttggaaggaaacctgctgatcccattttttctct

SEQ ID NO: 913456 - DNA, 120 bp, Artificial Sequence
  ENSG00000287332_12 (sequence is synthesized)
agtcaaggacaccccgtgtggcagaggctgctgcacactcaccgaaaccatttccgctctcctgggctcacagcgcagccacatctgcccatcctttgcggtgggtgtggctgcgctcag

SEQ ID NO: 913457 - DNA, 120 bp, Artificial Sequence
  ENSG00000287332_13 (sequence is synthesized)
ggcagcgggtgggagcgggagaggagaggggcacacactgaggtctgagaatagagaggcacaggaacagggacctggcacacagggacagaagagggggtgagagcgtggtggcaggac

SEQ ID NO: 913458 - DNA, 120 bp, Artificial Sequence
  ENSG00000287332_14 (sequence is synthesized)
ggagcatggcaggctcacgggcccaaaaggaggtagcgtggcaggaggggcctcctccccaccatcagtgcgcttgtggaacgagccctcctccaggtcctcgagctccatggtctgagc

SEQ ID NO: 913459 - DNA, 120 bp, Artificial Sequence
  ENSG00000287332_15 (sequence is synthesized)
tctgacctcccgatgagggtcaggacggtggagtgtggggagaaagagccagctctgggtgcagacctggacagctccgagtggcccaggcaggcaccagccctccctgcggcgaagtgg

SEQ ID NO: 913460 - DNA, 120 bp, Artificial Sequence
  ENSG00000287332_16 (sequence is synthesized)
ccattcacccgcaggcacggtgagcaagctctgaagtcagctgtgccgtgtgctgggctgcagaagctctacgtcctctagagctgccctagcttcccagccaccctgaggcctttccac

SEQ ID NO: 913461 - DNA, 120 bp, Artificial Sequence
  ENSG00000287332_17 (sequence is synthesized)
ctgcctgagggggtttcgtggggtcccctgggtggcatctgggaagcactcagctggctgcactcctccgggccctgcccttctccagagaggtcctgggcttccagggcccgcgctcct

SEQ ID NO: 913462 - DNA, 120 bp, Artificial Sequence
  ENSG00000287332_18 (sequence is synthesized)
gcaggaggacaagcaatgaccccaataattgctctccagccccaggcagtgatgaatggacccagaagccgtgcagtgctgggaatcgatactgtaatatctttataccagcggcagagg

SEQ ID NO: 913463 - DNA, 120 bp, Artificial Sequence
  ENSG00000287332_19 (sequence is synthesized)
atgaggtgaggaaatgccacagcctttgaacctccctggcagtctgtggagccaccacgcttgggcctgggactgccaggaactcgtgaacgtagcctgggagggagggtgcgtggagaa

SEQ ID NO: 913464 - DNA, 120 bp, Artificial Sequence
  ENSG00000287332_20 (sequence is synthesized)
atgaagcctcctagagcgcagaggctgcctggagggcagcacagccccttcacccgtccctgtgtgtctctgagccttggtcctcttcatggaagatgtaacaggctctacagtagggcg

SEQ ID NO: 913465 - DNA, 120 bp, Artificial Sequence
  ENSG00000287332_21 (sequence is synthesized)
ggccacaggtgcatattacagggtgaccagggagctgaaagttggggggtccaaaagtgctgcagcatcaggggcctcagacagaacggtgagactcaggcctctgaccgggccttgttc

SEQ ID NO: 913466 - DNA, 120 bp, Artificial Sequence
  ENSG00000287332_22 (sequence is synthesized)
tgcgaggggtggcatcgttgattcgcaggagactcttgtacgctcaaggtcacacctcaggttggcgtgggagccatttctctgagctgtgcttcgctaccgagagggtgaaggtgcagg

SEQ ID NO: 913467 - DNA, 120 bp, Artificial Sequence
  ENSG00000287332_23 (sequence is synthesized)
cagccatgcccgtctcttgggtgccgtggcggttgaggaggttctgaccttgcctcccagggcacgctgtgcagggggactgagagggccctgggtgggcacctggacagtgggactctg

SEQ ID NO: 913468 - DNA, 120 bp, Artificial Sequence
  ENSG00000287332_24 (sequence is synthesized)
ctccaggggcccgtgcgtgcctttgagaggaaagccagaacactcgcctgcagcggcaaagcatccctcccgatgctctttcatcttttagagcacctctggtgagaaattgacttcttt

SEQ ID NO: 913469 - DNA, 120 bp, Artificial Sequence
  ENSG00000287331_0 (sequence is synthesized)
ctctcttccacaagcacaacccttcttcagacgtccatatacacttctcccaaaatcctgtgcttaacacattgttactgagcacacaggcgtgctggggcaagcgacgcctgggaatat

SEQ ID NO: 913470 - DNA, 120 bp, Artificial Sequence
  ENSG00000287331_1 (sequence is synthesized)
ggtgttgaagacataaccgcatgaccgagaaacctcagttttgctctgaaggccttcaactgcccggccgaggctcacccacaccaaggggaatcccttctcttaaagtcaactgatggt

SEQ ID NO: 913471 - DNA, 120 bp, Artificial Sequence
  ENSG00000287331_2 (sequence is synthesized)
agatgtcaaccacagctacaaaacaccgtcacagcaacacctgggttagcgtttgattgaataaatgtgactggagcctggccaagttgatacataaaatcaaccggcacattcctttta

SEQ ID NO: 913472 - DNA, 120 bp, Artificial Sequence
  ENSG00000287330_0 (sequence is synthesized)
cctcctgagtggctgggattacaggtgtgcgccaccaccaggtctggctttttttttaagagatggggtggatctcgctatgacgcccagactggtcttgaattcctggcctcaagggat

SEQ ID NO: 913473 - DNA, 120 bp, Artificial Sequence
  ENSG00000287330_1 (sequence is synthesized)
gcctcaagggatcctcctgctttgtcctcccaaagtatgggattacaggtgtgagtcacagtacccagcctttttctaacaatttctttcagggtgatatgttaacaggatataggaaaa

SEQ ID NO: 913474 - DNA, 120 bp, Artificial Sequence
  ENSG00000287330_2 (sequence is synthesized)
aggcttcactgtgcaagacctctaaataccaaaacagagtcgaaactgtgaaatctatttcaatgcatgagagctcctgtcgctccacatcctcagcagcacgtggtgttcggtgttctg

SEQ ID NO: 913475 - DNA, 120 bp, Artificial Sequence
  ENSG00000287330_3 (sequence is synthesized)
gattttagacattctaatagcccagcttccctgctgagggaagtgaggatagcgtgcaagaagcccctgtccctggagaaaaggagagcggctggtcaaggacacagatgaggccatgct

SEQ ID NO: 913476 - DNA, 120 bp, Artificial Sequence
  ENSG00000287330_4 (sequence is synthesized)
ttctggtgcgaagatccaaagaatatcacgccgtgattcttctgcttctctgcatgaatcccaatcaaccaaccaatctctctcctcctctcactcacagtatcttcctaccattacaca

SEQ ID NO: 913477 - DNA, 120 bp, Artificial Sequence
  ENSG00000287330_5 (sequence is synthesized)
gacctgggatagtcggctggccgcaaaggcctggggtgagtgactgattgaagaatttgcgtaattcttcaagaaggttgtgagtcaaggtaggattcaaatactccagggtctataggt

SEQ ID NO: 913478 - DNA, 120 bp, Artificial Sequence
  ENSG00000287330_6 (sequence is synthesized)
taacacatcctttgacagctctgtaacttcaccacaaatctaaaactatttatttaccagagtactacatatagatagtagagtattaaatgggacagtatgagcaacttgaatgctggc

SEQ ID NO: 913479 - DNA, 120 bp, Artificial Sequence
  ENSG00000287330_7 (sequence is synthesized)
tcgtcagccataaggtgctacttttacagtcgaccctccatggattcaaacaactgcaggttgaaaatatttgagaaaaaaaatgtattgttgtctgtactgaacatgtacaggcttttt

SEQ ID NO: 913480 - DNA, 120 bp, Artificial Sequence
  ENSG00000287330_8 (sequence is synthesized)
tttcttgtcattttcctcaaagcaatgcagtataacaatgatttacacagcatttacattgtactacgcattataagtaacctagagatgatttaaagtgcagggaggatatgtctaagt

SEQ ID NO: 913481 - DNA, 120 bp, Artificial Sequence
  ENSG00000287330_9 (sequence is synthesized)
tatatgtaaatacgacactggggaattgagcttctgtggatttttgtacctgaaagggtcctagaaccaatcacccacagataccaagaaacaaatgtacaattcaaaaaaagaaaaaaa

SEQ ID NO: 913482 - DNA, 120 bp, Artificial Sequence
  ENSG00000287337_0 (sequence is synthesized)
cagtgcaagtgcagcccaagccgaacgcccaagagggctccggggtcctaccgatcaccgcttaccatgtatgcgataaaagctcaccgaaagcgggacctcgtgcgctgtgcaaatgag

SEQ ID NO: 913483 - DNA, 120 bp, Artificial Sequence
  ENSG00000287337_1 (sequence is synthesized)
gaaactggcacagccatcagcccacttcatatagacagatagatgcagaaatgatgacggggaccaggtggcctgagtcttcgccctctaccttttccaccatgccacactgccttccac

SEQ ID NO: 913484 - DNA, 120 bp, Artificial Sequence
  ENSG00000287337_2 (sequence is synthesized)
ccaacgcgtgaaaactttggcctgaaaatcgggtgatgtgactgtaagaaatgcacccattattcccaaaggagtcagggaaggtgatggcccttagccagacaagaaaatatattcttg

SEQ ID NO: 913485 - DNA, 120 bp, Artificial Sequence
  ENSG00000287337_3 (sequence is synthesized)
gaagacaaaaaaagtgtcagaagatttattagtctttgtgttgatattcactgagcaaagaaagaaaaaacaaggaagtcaacagtaaggaaggaaacgatgttattattgaactgattc

SEQ ID NO: 913486 - DNA, 120 bp, Artificial Sequence
  ENSG00000287337_4 (sequence is synthesized)
ttaccttgtgtatgttagttttggatcattaagccactttgttactgcactggcttcctgaaaagccaaaaaagtgacattcacaagtcatgcttcgttgtactagcaaaggaaggacat

SEQ ID NO: 913487 - DNA, 120 bp, Artificial Sequence
  ENSG00000287337_5 (sequence is synthesized)
gctgtaacctcacgtctggcgtcccggcactttgggaatgtcaacatttatcagccttgttcacatctagtcctcctccaacaaaatagcaagcagctcattggagagccacacagtcac

SEQ ID NO: 913488 - DNA, 120 bp, Artificial Sequence
  ENSG00000287337_6 (sequence is synthesized)
tctgtggcgtgcaacccagctatgaggacgtggggttgaagccatttcctttttcagtttcagcttctgaccctcctcaggattagaagtggcgattcagaggctgggagggtgaaagca

SEQ ID NO: 913489 - DNA, 120 bp, Artificial Sequence
  ENSG00000287337_7 (sequence is synthesized)
tgacttctcaagaaccagctcgtgctgaagtcactgctcaccttcctgtctcagggatgctcctgatgctaatgacgtcgtgtgaatcatgctctacgtgtctgcatgcctgagccgagc

SEQ ID NO: 913490 - DNA, 120 bp, Artificial Sequence
  ENSG00000287337_8 (sequence is synthesized)
ttatcctcatggcaccctgtgaggcaggctgctgctcctactcccactcaccagaagaggaagccgaggctcagagactgagtaactcttgaggttacacagccaccgagcagggtcatt

SEQ ID NO: 913491 - DNA, 120 bp, Artificial Sequence
  ENSG00000287337_9 (sequence is synthesized)
agggccctatgagatttccttccgactccgctctgaactcactctcgtaggcccaagctgggcgcctcccccagggaacaccgtagtggcccggaaaacagagagcacaggttacatttg

SEQ ID NO: 913492 - DNA, 120 bp, Artificial Sequence
  ENSG00000287337_10 (sequence is synthesized)
gctcacattcttggtgtgtccactgtaggttgctgtgaagtaaattttaaatttttatataaaaacaaacagataatttcttgagtgggacataaaagcatgaatttgaaagttaaaatg

SEQ ID NO: 913493 - DNA, 120 bp, Artificial Sequence
  ENSG00000287337_11 (sequence is synthesized)
taagatattgaccttttacttaataataatgtaacaatattgctttattaactgtgacaaatgtaccattgtaaaataagataatcataatgaaaactgggtgtggagtgtgcaggaact

SEQ ID NO: 913494 - DNA, 120 bp, Artificial Sequence
  ENSG00000287336_0 (sequence is synthesized)
ttgttctgtaagctttgtttaactttttgttgaaatatccagaaatatacatcacataatttccacaaactgaatgttcccatgtaacccacatccagatcaagaaacagaacattacca

SEQ ID NO: 913495 - DNA, 120 bp, Artificial Sequence
  ENSG00000287336_1 (sequence is synthesized)
gcacctggaatgacactccccttgtgccctcttctaacaatgctttttaattaaccatgccaacacagtttctgcaaagaagtcatttctgaagcacgtatagaggagtaaagcaagatc

SEQ ID NO: 913496 - DNA, 120 bp, Artificial Sequence
  ENSG00000287336_2 (sequence is synthesized)
agcctgtaatttctaggtctattggccagaagcaaacttggtttgtgtgcaaggggcctcctctaaaaatcagctgtggcccggacctgatggtgctggacttattactgctgctgctct

SEQ ID NO: 913497 - DNA, 120 bp, Artificial Sequence
  ENSG00000287336_3 (sequence is synthesized)
cctgttgttcagaggaagagttcagtggaagaaacagtgtgtggaaagagaagaaagaacactggacttagaagtttgcaaaccaacttcttgagattcagattttcttcctccaagtag

SEQ ID NO: 913498 - DNA, 120 bp, Artificial Sequence
  ENSG00000287336_4 (sequence is synthesized)
ctctttgacctgggcaacttagttcacctttccagtccttagtttccttcatctacaaaaaaaagatgtttgactacacgacgatctctaaggtttgttccagtgctaaaagaccatgat

SEQ ID NO: 913499 - DNA, 120 bp, Artificial Sequence
  ENSG00000287336_5 (sequence is synthesized)
ttcacaccaaaagactcagaacttcaaaactcctgacaattggctcatatgaatcattgtcaggaagaaatcttccagcagcagtgactagcctcagtgtctagctgaggtgtgattgat

SEQ ID NO: 913500 - DNA, 120 bp, Artificial Sequence
  ENSG00000287336_6 (sequence is synthesized)
accagggactgagcaactttccagcttctagcaagaatatggaaactgctacaaaatcaagaattagaaatctcataatcgacatcctttctgttctttctttgctatgattgcaattgc

SEQ ID NO: 913501 - DNA, 120 bp, Artificial Sequence
  ENSG00000287336_7 (sequence is synthesized)
aatatattccctgtatatcctttttttctcatttatcagactttttgtttgacattacaacaagcctggtgacagctctgctacaatatttctattaggtgaataaaaaccaaattactg

SEQ ID NO: 913502 - DNA, 120 bp, Artificial Sequence
  ENSG00000287336_8 (sequence is synthesized)
cctattagctacaaattcattcctttgctaaatacaacaaatagataacattaaagagcttgaacaatttgatcttgattatgtaaaagcattacaacaaaccctccaaccctccttcat

SEQ ID NO: 913503 - DNA, 120 bp, Artificial Sequence
  ENSG00000287336_9 (sequence is synthesized)
ataaggcagacagacacactcacaaaactccaggttccattttcttttcaatttccacctgttccttgaaaatccatttcttcacatttattctctgatcttatttcagtttctgcagca

SEQ ID NO: 913504 - DNA, 120 bp, Artificial Sequence
  ENSG00000287336_10 (sequence is synthesized)
ggaaaactgtgcagaaactcaagttttagtaatcagtgtacaattttgtatgtgtagtcttcaaacatccagagtttttcctttcgctgttcatctaacccatcaatgtaaaaaaattgt

SEQ ID NO: 913505 - DNA, 120 bp, Artificial Sequence
  ENSG00000287336_11 (sequence is synthesized)
tttaaactagacattatgtatcagattcagaccggtaactttctccagtcacattcagtccacatgagatacttaaggatgtaataaaacataagaaaagcatattctagctgcttgcta

SEQ ID NO: 913506 - DNA, 120 bp, Artificial Sequence
  ENSG00000287336_12 (sequence is synthesized)
ttttgaaaaggggaaaaaaatcctttcagacagtaatcaatttcattgtggaggagatttctgcaaaatgcattaagaagttcacgcctgtggcaatggtcactgcacatattttggaat

SEQ ID NO: 913507 - DNA, 120 bp, Artificial Sequence
  ENSG00000287336_13 (sequence is synthesized)
gtctcccagactataagactttttccagacatccaggagagactttagcatgacagggatcctgcgctgggccttaaaaaattgtagaaggaaaactttagacggttcagtttcagctgg

SEQ ID NO: 913508 - DNA, 120 bp, Artificial Sequence
  ENSG00000287336_14 (sequence is synthesized)
attttgtttcttagacagctgagttacctaggttatggaaaatactagtaattacggagtgatgataatcagaaaaatctcgctctctgtcttctttttctgaagccttaattagttagt

SEQ ID NO: 913509 - DNA, 120 bp, Artificial Sequence
  ENSG00000287336_15 (sequence is synthesized)
caaggtatttgttaagcaataatgctactttgcttcctaaatatctttatagatagggttgattctatcctacctgagatactgaaatcaccaaaaggaattatgataatattttttaac

SEQ ID NO: 913510 - DNA, 120 bp, Artificial Sequence
  ENSG00000287336_16 (sequence is synthesized)
ttttggaaacaaactgtaagatatatttccgtttactcaactgccctttggctgcaatagcaatcataaatttcttaaatttgtcagaatttttgttttgagggagggaaggatggctga

SEQ ID NO: 913511 - DNA, 120 bp, Artificial Sequence
  ENSG00000287336_17 (sequence is synthesized)
aatcgctggatgtaaaaaatgccctttatttccttctctatcatgtttatctctaaactcttccctcacacttggcttttgctatcgctaggaatgaaatctaagtatagaaaccaacac

SEQ ID NO: 913512 - DNA, 120 bp, Artificial Sequence
  ENSG00000287336_18 (sequence is synthesized)
aatttataccttaaaggacatgctgatgtatgttgaagcctcggattttccacagacatatgttatctgctttcttctgtctctcaaaggcacaacttttctttttgaacatattttgcc

SEQ ID NO: 913513 - DNA, 120 bp, Artificial Sequence
  ENSG00000287335_0 (sequence is synthesized)
ccctgccctcagcaatagaagctgcacctggtgtttctgtgggaaaggccttcacactgacattcttatttgatagtgaatgttgatggacaccaggcctgcttatgcacaagagcttct

SEQ ID NO: 913514 - DNA, 120 bp, Artificial Sequence
  ENSG00000287335_1 (sequence is synthesized)
gacctgggatcagagaaggaaacggaattttaaagaaatgtctcaagagtcagagaaggcaggagccgagaagtgatcactactgacctcaagctcaaagacctatgggaagtagcaaaa

SEQ ID NO: 913515 - DNA, 120 bp, Artificial Sequence
  ENSG00000287335_2 (sequence is synthesized)
ttcaacaggatgagtggtgaatccctgggtccttggtcaaaggtcctgaggtcctgaggtcaaatcagaagagaaaatgcaaatttgtccatgtaagaaatttattccaaaaagtcagat

SEQ ID NO: 913516 - DNA, 120 bp, Artificial Sequence
  ENSG00000287335_3 (sequence is synthesized)
acaaaaatttgacttgacaaagcatggtgggttttgtaaaaaaaaataaatggttataaagaggagctgaatgtggaataactttgcatttcacagagttaacatttgaagtttcagctg

SEQ ID NO: 913517 - DNA, 120 bp, Artificial Sequence
  ENSG00000287335_4 (sequence is synthesized)
tttgcaaatgactcatggtgctactcagcgtgggtgaggttgtgctgcagtaacaaataagaccaaatatatcagtggtttaaataagaaggctgcattgccaccacagggtcagctgag

SEQ ID NO: 913518 - DNA, 120 bp, Artificial Sequence
  ENSG00000287335_5 (sequence is synthesized)
acttctgtacattggggcccacctcacagcacctccctcttggcacatccttctacaatcactgtggcaggaggaagataacatggcttcataaagattggcttttaaaatatttgccca

SEQ ID NO: 913519 - DNA, 120 bp, Artificial Sequence
  ENSG00000287335_6 (sequence is synthesized)
agagcaacactaccattttatcccacatgtcctaggcaaagtcagtcatatggctgcacctgccttccaagattgtgggaaagtgcttggagggacgggggaatatttagtgagcagtag

SEQ ID NO: 913520 - DNA, 120 bp, Artificial Sequence
  ENSG00000287335_7 (sequence is synthesized)
tcatgaccaccatactccatggtatgcagaaatgtggagcagggctggtgggtggacccactccacttggctgctgagcagggctggcccactactcagaatgtgggtgccagggaagcc

SEQ ID NO: 913521 - DNA, 120 bp, Artificial Sequence
  ENSG00000287335_8 (sequence is synthesized)
tgggcttctctctcatctgctttgtatatttctcatgatttgattcaaatgcagattctttgtgaaaaattagccctgatgagaaagccagttcctgatcatggaagtaaagggcaaagg

SEQ ID NO: 913522 - DNA, 120 bp, Artificial Sequence
  ENSG00000287335_9 (sequence is synthesized)
aaaaaaattagagggtaaaatacaaaggacaaaaatgacaaggttgtgtaaatgacaagagtactgtaaatattgatactttgcaataaaactgtgcatcgtccttttgagagatgacaa

SEQ ID NO: 913523 - DNA, 120 bp, Artificial Sequence
  ENSG00000287335_10 (sequence is synthesized)
gtccttttgagagatgacaacatgctagcagccctcactcgctctccatgcctacttggcctcagcgtccagtctggccacacttaaggaggccttcagcccaccgctgcactgtgggag

SEQ ID NO: 913524 - DNA, 120 bp, Artificial Sequence
  ENSG00000287335_11 (sequence is synthesized)
cgggtgggagcgggctcggcaaacccattccagggtgccctgcccttcacaaagaaaactctccctggggctcccatgggcttctctgggatcagtcacgggctccgtgggccctacact

SEQ ID NO: 913525 - DNA, 120 bp, Artificial Sequence
  ENSG00000287335_12 (sequence is synthesized)
aggagtggccagccagagccgcaggccctgggcagtgaagggattagcacccaggccagcagctgtggagggtgcaccgggtcccccagcactgctgcctggcccacgctgctcttgaat

SEQ ID NO: 913526 - DNA, 120 bp, Artificial Sequence
  ENSG00000287335_13 (sequence is synthesized)
tcttgctgggcctcagccacctccccgtggggcagggctcgggacttgcagcccgctgtgctcaagagccagccccccggcatgggcttctgaaggaggccacccccggctccacggcgc

SEQ ID NO: 913527 - DNA, 120 bp, Artificial Sequence
  ENSG00000287335_14 (sequence is synthesized)
gctccacggcgctgggtcccatcaacctagggctgaggagtgcgggcatgccgctgcgggactggtgggcagctctgccctcgtccctggcttgggatccactaggcgaagccagctggg

SEQ ID NO: 913528 - DNA, 60 bp, Artificial Sequence
  ENSG00000287335_15 (sequence is synthesized)
aagccagctgggctcctgagtcaggtggggagttggagaacgtttatgtctagctggagt

SEQ ID NO: 913529 - DNA, 84 bp, Artificial Sequence
  ENSG00000287335_16 (sequence is synthesized)
ttccctttggaggcttgctgctgctcactctttgggtgggtgtgccttaatgagctgtaacactcatggcgaaggtctgcagct

SEQ ID NO: 913530 - DNA, 120 bp, Artificial Sequence
  ENSG00000287335_17 (sequence is synthesized)
ccttaatgagctgtaacactcatggcgaaggtctgcagctttactcctgaggccagcgagaccacaaacccaccgggagggacgaacaactctggacgcaccacctttatgagctgtgac

SEQ ID NO: 913531 - DNA, 120 bp, Artificial Sequence
  ENSG00000287335_18 (sequence is synthesized)
actcactgcgaaggtctgcagcttcactcatgaggacagtgagaccacgaacccaccagaaggaatgaacagctccagacgcaccaccattagaactgtaacactcatcttaagggtcca

SEQ ID NO: 913532 - DNA, 120 bp, Artificial Sequence
  ENSG00000287335_19 (sequence is synthesized)
cggctattcttgaagtcagcaagaccaagaacacacccattctggacacactttcaaatgcatccaatggaagctaaatatcatagttgattaatatgcatgatctttaaaatatattaa

SEQ ID NO: 913533 - DNA, 120 bp, Artificial Sequence
  ENSG00000287335_20 (sequence is synthesized)
caagcttttcttaatagttagaaatgcgtatcatttcctttcctccttctacttcctccggataattttatcttatttcaatttattttgatgctatcaattgctttacttttaaatata

SEQ ID NO: 913534 - DNA, 120 bp, Artificial Sequence
  ENSG00000287334_0 (sequence is synthesized)
actgcctgatgttccctccctgggctggatgccgacgctgggagactcggaagccgcgtgtggaagatggcagtgtgggtgagcaaggagagaagacacccattgctcctgtctacacca

SEQ ID NO: 913535 - DNA, 120 bp, Artificial Sequence
  ENSG00000287334_1 (sequence is synthesized)
catctagaaggcagagaaaggaaaaagtgtcttaaaaaagtaataataaggacccagcaagagagcaccctagccaatcaatcgtggaagaaaagggtgtcgttgattaaagaaactgcc

SEQ ID NO: 913536 - DNA, 120 bp, Artificial Sequence
  ENSG00000287334_2 (sequence is synthesized)
cttcactctagcaacagaagagggagcagttgatctgcacaaccaacaggccgctcgggcctctaggcctccactgcattgtctgctattgccagtccggggaaacgcaacagaaataac

SEQ ID NO: 913537 - DNA, 120 bp, Artificial Sequence
  ENSG00000287334_3 (sequence is synthesized)
caccaccaatcacaaagcagaaaaggagaaccatactttccagcagatggcgccacttcggaaaacagtttggtgcgtcctcaaaaaattaaacatataattaccgtgacccggcaattc

SEQ ID NO: 913538 - DNA, 120 bp, Artificial Sequence
  ENSG00000287334_4 (sequence is synthesized)
cactcctaggtatacccaaggcaaatgaaaacatgtccacatagacacttgtacatcaatgttcctagcaatattactccttaagagccaaaagatggaaaccactcaaacgcccgtcaa

SEQ ID NO: 913539 - DNA, 120 bp, Artificial Sequence
  ENSG00000287334_5 (sequence is synthesized)
ctgatgaattggtgaacatgttgtggtatatatcgatacaagagactatttgcggtaaatagggatgcaatactgattgatactacaacatggattaactttgaaaacattgctggggct

SEQ ID NO: 913540 - DNA, 120 bp, Artificial Sequence
  ENSG00000287334_6 (sequence is synthesized)
ggaagctgatgccccgaatttgatgctttgtacatgctgaactgaaaaaggagcttcaaggtctctctcctccctcctgccccaaagcataggcttctctgacattcccttatctgtcta

SEQ ID NO: 913541 - DNA, 120 bp, Artificial Sequence
  ENSG00000287334_7 (sequence is synthesized)
aagtctgggtctatgaaagaaaaacaatcacctccagtcacttccctgagttttcattaactgcacccatatctcagaaaggaaaactaaagtcggtcaacacacctggacagacttttg

SEQ ID NO: 913542 - DNA, 120 bp, Artificial Sequence
  ENSG00000287334_8 (sequence is synthesized)
tcacaaaccattgtctgctctgcaggcccagcagactttaccgcagaccgtggtgtgttcttcaagccctttgaatcttccctagtcatcatttattgcccctccccagaattcctcttc

SEQ ID NO: 913543 - DNA, 78 bp, Artificial Sequence
  ENSG00000287334_9 (sequence is synthesized)
cctagtcatcatttattgcccctccccagaattcctcttctcccgctcccataactacgaccagggaagattcaaagg

SEQ ID NO: 913544 - DNA, 78 bp, Artificial Sequence
  ENSG00000287334_10 (sequence is synthesized)
agctacttgggaggctgaggcatgagatttgattgaacccgtgagatggagaggttgcagtaagccaagattgcgccg

SEQ ID NO: 913545 - DNA, 120 bp, Artificial Sequence
  ENSG00000287334_11 (sequence is synthesized)
attgtgtcatgggggctctgcctttgtgaatagattaacccattcatgaactgatggactggtgggttaatggattaatgtgttatcacagagtggaattggtggctttataagaagaga

SEQ ID NO: 913546 - DNA, 120 bp, Artificial Sequence
  ENSG00000287334_12 (sequence is synthesized)
aagagacatgggccagcatgttcagccccctcgccatgtgatgcccggcaccaccttgggactctacagagtccccaccagcaagaagccctcaccagatgcagccattcaaccttggac

SEQ ID NO: 913547 - DNA, 120 bp, Artificial Sequence
  ENSG00000288302_0 (sequence is synthesized)
acaaaggggaaggaaacgcagtgagcacaccagcaggcttctgtccccagccagggcccgttcctctgggtggccctggctcgggcctccggtggagcctcctgctctgcggatcttctg

SEQ ID NO: 913548 - DNA, 120 bp, Artificial Sequence
  ENSG00000288302_1 (sequence is synthesized)
gtttctcatctgccctcccctgagccctgggaggacggcgctcaccgacacactggagctgcgcagtttcaggccactgttcccagacttgcactgactccatgatgatcaactctgccc

SEQ ID NO: 913549 - DNA, 120 bp, Artificial Sequence
  ENSG00000288302_2 (sequence is synthesized)
gggctctgactctccctgaacagcagagccacaggggtccctgagtcagccaggaagagggccacctgcccaccagaagcaccacatggagctgttcaggaagcaagaattaacggtgtt

SEQ ID NO: 913550 - DNA, 120 bp, Artificial Sequence
  ENSG00000288302_3 (sequence is synthesized)
acatgaagccactgaaatgcggaggttttgcttgttagatgctattataagttccctaatatggcatgttataaatcatctctggctgcctctgaatacagtgtgttttctaaaccaaaa

SEQ ID NO: 913551 - DNA, 120 bp, Artificial Sequence
  ENSG00000288300_0 (sequence is synthesized)
ctgggtgcaagcaggccaagccccactcctcaagatggaggaggagctgctgctcccggtggggactccccagtaggccactgggggaagccccacgacccagacagcaggtggagagca

SEQ ID NO: 913552 - DNA, 120 bp, Artificial Sequence
  ENSG00000288300_1 (sequence is synthesized)
gcagctggccggagatcgacttcagcgagaaactgtgcggagctccagcagctggacttcctggagcagaagagccgctgaaccccgcccctgctgatctcactgcacacagcctagggc

SEQ ID NO: 913553 - DNA, 120 bp, Artificial Sequence
  ENSG00000288300_2 (sequence is synthesized)
cccacccgccgaggactccagaaccttctcctaccagctcgcccagagaccaagccaagagagtggtctctgaggagcccgctagaaaggcaaggcgaggcccgcagagaaggatgccaa

SEQ ID NO: 913554 - DNA, 120 bp, Artificial Sequence
  ENSG00000288300_3 (sequence is synthesized)
gcctgtagaagcagagacgtcggggatgggggacctgccctgggcgccgccagaggcccaagcgcccagcaccgcaggagctggagacgtcgctgagcaccaggtggcgccggcgcggtt

SEQ ID NO: 913555 - DNA, 120 bp, Artificial Sequence
  ENSG00000288300_4 (sequence is synthesized)
cctacagggagcctggaggcaggctgcggggtggctgtgccgggagactggagcggctcctggctccgcgcaggcagggcccccagagacagctcatgcagcagatccgcagccccgggg

SEQ ID NO: 913556 - DNA, 120 bp, Artificial Sequence
  ENSG00000288300_5 (sequence is synthesized)
gccctcgctcagtcccgagcgcgtccaccctggccagccagctgcccccgctgaacctgcgccgggcgctccggctctccgttcgggccccagccaaccccgcgggctcaggctcccagt

SEQ ID NO: 913557 - DNA, 120 bp, Artificial Sequence
  ENSG00000288300_6 (sequence is synthesized)
accccgcgggctcaggctcccagttcctgtcccagcctgcgccggctccagcgcccccggctctccagctgctcttcccgactcctatccttggccgcccccagcgcggaaccgacccgc

SEQ ID NO: 913558 - DNA, 120 bp, Artificial Sequence
  ENSG00000288300_7 (sequence is synthesized)
gaccctaccgccaacatcgcgggtctcgcctctcgcagcctttttggcgtccgcgcctcagcgttgaagccagggcccctcgtgagctcggcgcccagcctgtcaagtcctcttctgcct

SEQ ID NO: 913559 - DNA, 120 bp, Artificial Sequence
  ENSG00000288300_8 (sequence is synthesized)
cagctctcacagcagtgtcttccccgcctgctggtcggcatcgcgccacagccaatgtctcctgttgctgtccgcccccgcgaagcgctgcaagggccagcgcccaacctgtcgctgcgg

SEQ ID NO: 913560 - DNA, 120 bp, Artificial Sequence
  ENSG00000288300_9 (sequence is synthesized)
cctggaggagcccagggaatagcgctcaggacccagaggctggacagccagcccgcccgcccgtccctggccacgaggcgccccggacctgaccaccgcccccgccacctccgccggtgg

SEQ ID NO: 913561 - DNA, 120 bp, Artificial Sequence
  ENSG00000288300_10 (sequence is synthesized)
gcaaggagggtcccctttcagcctgcagttcctcagcagagaggagggccctccgcaggcccgcgcccggtcccacactggggagaagccgttcagcggcgccatctgcggtagggcctt

SEQ ID NO: 913562 - DNA, 120 bp, Artificial Sequence
  ENSG00000288300_11 (sequence is synthesized)
caccactaagggcaacctccaggtacacttggcactcacatgtggaataaccaccctcacaacctcccccaaggcgagctgccgcggtggaacagtccatggctctgctaggggatgatg

SEQ ID NO: 913563 - DNA, 120 bp, Artificial Sequence
  ENSG00000288300_12 (sequence is synthesized)
gcctgaagttctctgaaatattccggaaggatctgacagcccaaataatgaatggcgaccccaatatttggaaccaggaagctgcagctcacccccaggagcttcccataaagaacaatg

SEQ ID NO: 913564 - DNA, 120 bp, Artificial Sequence
  ENSG00000288300_13 (sequence is synthesized)
agatttccatcattcagaacagaggcttttcccagatcccaggaagttttggctgctgcaccatccctctgggtaccctggggtgcaaagagcgcaaaatagccctcccattgtcagtct

SEQ ID NO: 913565 - DNA, 120 bp, Artificial Sequence
  ENSG00000288300_14 (sequence is synthesized)
ggacaacgcacctcagcagcctgcatagcaggcagcgtccattcgccaggttacccaggagaacaaggagatggtctaaactagctcaacacacgggactcgcgtccttcaacagtgagt

SEQ ID NO: 913566 - DNA, 120 bp, Artificial Sequence
  ENSG00000288300_15 (sequence is synthesized)
ctgactgttcttgagaactctgcaaccttttaagtgaaaaaaaaaggtgattgcaaaacggcctcaggaacagaaagagcccaggcaatcctcacttcttttctactaaaacccagtaat

SEQ ID NO: 913567 - DNA, 120 bp, Artificial Sequence
  ENSG00000288300_16 (sequence is synthesized)
ccctagagggagaaagggcgtctcctgcagtattccactgaaactcgctggttttgctcgaattagacacttgaactatgtttttagaactcttcatcttaaaagaagtggtttagtagt

SEQ ID NO: 913568 - DNA, 120 bp, Artificial Sequence
  ENSG00000288300_17 (sequence is synthesized)
ccaaatgctgtgtattatgacagtgtcttcctctgacgtatttataatgttaagattatgtgggcaacagacaatataataaccctaaccttaaatgaagtttatctacttctgaataaa

SEQ ID NO: 913569 - DNA, 120 bp, Artificial Sequence
  ENSG00000269463_0 (sequence is synthesized)
gcaatggtctgtgaacatttttccccttacaataaatataatacatactcaccagataaaaatgtaaatactgatgaggaaaaattgtaactaacattttcggggctcttgtgggttagg

SEQ ID NO: 913570 - DNA, 120 bp, Artificial Sequence
  ENSG00000269463_1 (sequence is synthesized)
gacagacagtagcctgagagaaggtagggtttgggttatcctcattttgccggtgaggaaaatgaagcttgaagttagactaacttagagtcttaagctaataaatggcagagttggttt

SEQ ID NO: 913571 - DNA, 120 bp, Artificial Sequence
  ENSG00000269463_2 (sequence is synthesized)
tcaaaccagaaataacttgtttatagtacccttccaaagccttttctatacacaaatatatataagaatgggatcatattgtgaccatctttccatgtcaataaatggacttcaacagca

SEQ ID NO: 913572 - DNA, 120 bp, Artificial Sequence
  ENSG00000265775_0 (sequence is synthesized)
atccatgctcaaggccacttgaagctgctccagaaattcaggcttggacagcacaaccttagagcacccgttccctggattggagccaaacagtctggacatctcacaagagacctgcag

SEQ ID NO: 913573 - DNA, 120 bp, Artificial Sequence
  ENSG00000265775_1 (sequence is synthesized)
agatgtaaggacacactcacctcctgtgttggggaaggagtgactcagctggctggaacacagtggccaagagggtcagataatcttgctttatttcctaacccggaccggcctttgttc

SEQ ID NO: 913574 - DNA, 120 bp, Artificial Sequence
  ENSG00000265775_2 (sequence is synthesized)
tccaggaaagggaccagatgcatattctgctgatagtggccaagaacgtggctggtctgtgtgtctaacgggcagtgcatggtgactgcactgcatcaaccttaatgggatcttctggaa

SEQ ID NO: 913575 - DNA, 120 bp, Artificial Sequence
  ENSG00000265775_3 (sequence is synthesized)
gaaatgtcggtgtggggaattgtagaagattggtctttgtttccttctctgatcaatagtctcctccaaccccactcccagcacatacacatgaaagaaaataaagaaaaagaaaaaaca

SEQ ID NO: 913576 - DNA, 120 bp, Artificial Sequence
  ENSG00000265778_0 (sequence is synthesized)
acggccctcctcctggcagcccagcaacaagcggccaccgcccccaccccggggcgggcagaagcgcagcaaccccgcggtgctcccggaagacaccgcgtctccaacatttacacggag

SEQ ID NO: 913577 - DNA, 120 bp, Artificial Sequence
  ENSG00000265778_1 (sequence is synthesized)
atgctgctcggctcaggtcgggtccgtacgcttcccgaggtgcgtactacgcgagccacacacatcactaccgatattcctgagaaagtcggtgccacagttccgacctgaatctgaaag

SEQ ID NO: 913578 - DNA, 120 bp, Artificial Sequence
  ENSG00000265778_2 (sequence is synthesized)
cggagggggaggcgctccgtgggggctgctgcgtgcccatgtagccgaactgactcgaataaaagcgtgtccacgtctacatcacacatctgtgtaaatgcagaagcctgcggatgcgcg

SEQ ID NO: 913579 - DNA, 120 bp, Artificial Sequence
  ENSG00000265778_3 (sequence is synthesized)
gggctggccagacttcacagtgtgcagacacatgggctcatgcacgcgcacgcgcgcgctcacacacacaccccaaattacctccgggatggagaaagccgctgcggattggccagcaga

SEQ ID NO: 913580 - DNA, 120 bp, Artificial Sequence
  ENSG00000265778_4 (sequence is synthesized)
gccgtcactcacgcccagggggcagggagacttcgcaaagctgtttccttttttttttttcctcctctcctccctaccgtttcatttaatggtaaaacaacagcagagctctgaaagtta

SEQ ID NO: 913581 - DNA, 120 bp, Artificial Sequence
  ENSG00000265778_5 (sequence is synthesized)
cggagttcacatcagtttcagcaatccgcgttctcagttcgctttgcccgggcgagtgggttccatcatcacctgaaccaaaaacgcaccagggcgcgcgtgcccaggcaccaaggccag

SEQ ID NO: 913582 - DNA, 120 bp, Artificial Sequence
  ENSG00000265778_6 (sequence is synthesized)
gagggaggcgtcagacgatatccatttaaatatattttgtacttccacaaaggatggaaagggaaattcacgaagggagtggaggcggaaagggagctccgagaaagaaggaggggtcat

SEQ ID NO: 913583 - DNA, 120 bp, Artificial Sequence
  ENSG00000265778_7 (sequence is synthesized)
tccgcggggggcgggggggggggcgggggccgacgcaggggaaagagttgctctctacaccgaaaagggactttgaccttccattgatctcgaaattcaaaaacgtttcttcacaggtca

SEQ ID NO: 913584 - DNA, 120 bp, Artificial Sequence
  ENSG00000265778_8 (sequence is synthesized)
gattgtaacaaacactcgttcctaatttatgaactcgccgttttgattttattatttaagcatgcgccagcaatcgtgtttccttaagaaagaactgacctatttttggctggagataaa

SEQ ID NO: 913585 - DNA, 120 bp, Artificial Sequence
  ENSG00000265778_9 (sequence is synthesized)
cgatcatgttaacagatgttaatcttgtaatctgtttttcctgtaagcactttacctagccgggtttcagaccttaaaaataacatcttttccaaaaagacctgacgtcacaattcactc

SEQ ID NO: 913586 - DNA, 120 bp, Artificial Sequence
  ENSG00000265778_10 (sequence is synthesized)
cctgaaaaatcacactccccctccagtttcttcccctgcaatgatttcaaagacattaaatcttttccactttataaatgctgatctgttctgcctctactcccacaggctcttatttgc

SEQ ID NO: 913587 - DNA, 120 bp, Artificial Sequence
  ENSG00000265778_11 (sequence is synthesized)
atttcaaattccacaggttacaccagtcgccttttcaaaaaatgtaaaccaacaatgcagcagcaaatggctttttgtgcatctggattaaataaagcacagaatgaatatatttaaaaa

SEQ ID NO: 913588 - DNA, 120 bp, Artificial Sequence
  ENSG00000266998_0 (sequence is synthesized)
agtcgcctggaggcccgtttgtacagtggaaaagtagaaaatgagactctaaaaatctcatcagccaaatacaaaacattctccttgctgctacgtggcggcctccacagagccctaaaa

SEQ ID NO: 913589 - DNA, 120 bp, Artificial Sequence
  ENSG00000266998_1 (sequence is synthesized)
ccttgaagctcggagacctatcttgaagggggagcaaaggcgggatgcgggaagtttgagtccatggaagacactgataccctctccattcctgggaaccctgagcctgaaggacccggc

SEQ ID NO: 913590 - DNA, 120 bp, Artificial Sequence
  ENSG00000266998_2 (sequence is synthesized)
ctgaacagcggaaggactgaatccctgtgcaactcatcggtgatggaacataaagccatggtgccctcggtccccaagacgggagggatggggaaggccctgggtgaaggggacaggcgg

SEQ ID NO: 913591 - DNA, 120 bp, Artificial Sequence
  ENSG00000266998_3 (sequence is synthesized)
ggaaggaaaaggtgaagagaaaggtgctccccagggagggggtagatgtgcccaggacatgggacattggcagaattttaactccgagcacacacacaggcccacggacggcttcccgtc

SEQ ID NO: 913592 - DNA, 120 bp, Artificial Sequence
  ENSG00000266998_4 (sequence is synthesized)
tacctgttccttacgggtgtgctgtgccggcctgggcacctgcctctttccccatgccaggtcacttgccgtctaccctgtatactgccactagttctaagcctcccagaacaccctgat

SEQ ID NO: 913593 - DNA, 120 bp, Artificial Sequence
  ENSG00000266998_5 (sequence is synthesized)
cagggccctgtggcctctgttacaggattccaggcctagacgtctgctcgattggaaaactgcccccagagatgccgtggctcagagctcgtcctgctttggggtggcccctggagtctc

SEQ ID NO: 913594 - DNA, 120 bp, Artificial Sequence
  ENSG00000266998_6 (sequence is synthesized)
cgcccctcagcaacccacatggtgacaggcacccacatccgctggcctcaggaaccctggggccaccatcccagcgctgtaaggagctggcagtttcctccccaccctttcggcctacct

SEQ ID NO: 913595 - DNA, 120 bp, Artificial Sequence
  ENSG00000266998_7 (sequence is synthesized)
tgcaggaaccaagacaccaggtgagccgccccgggaaagagacctgtgctcccacggcgctgctcctgcgcccattcccagccactccagatgcttcccgtggaccagctgcactcccgg

SEQ ID NO: 913596 - DNA, 120 bp, Artificial Sequence
  ENSG00000266998_8 (sequence is synthesized)
cgggcatgcctggccctccgcagcctggcccatatgatcttcacaggcaggcccctccttatgccccagccccctctccagccagctcattccagcctcccccactgctgctggctgctg

SEQ ID NO: 913597 - DNA, 120 bp, Artificial Sequence
  ENSG00000266998_9 (sequence is synthesized)
ctggccagaaggctctccttcctcttgcaatccaattcctactctccctcaaggtccgcctcctccatactgacttctcccctgctagctagtggtgacttttctctaccctgattcgga

SEQ ID NO: 913598 - DNA, 120 bp, Artificial Sequence
  ENSG00000266998_10 (sequence is synthesized)
agctgcctgtccacatcacccctggctgggctgaatcacactctctcctccacctccttcaatcatcccttccccacgtctgtctgtccacccaaggttgtccaactcccatatacacac

SEQ ID NO: 913599 - DNA, 120 bp, Artificial Sequence
  ENSG00000266998_11 (sequence is synthesized)
ccccacaccctccaactatactccaggctccttgggcaccagggagggccacctttccataccccaggtcagcccccatgcacatgcgcactcatgcacacacacactctctcacgccta

SEQ ID NO: 913600 - DNA, 120 bp, Artificial Sequence
  ENSG00000266998_12 (sequence is synthesized)
tcgactcgggccacctgatggctctaagaccagaattcccagcaaaaccattcaggacacacaagggggagactgataaacacagggaaccagcagattgaggccccactccccgagact

SEQ ID NO: 913601 - DNA, 120 bp, Artificial Sequence
  ENSG00000266998_13 (sequence is synthesized)
gagaaaccttcccccagagccaaaggattgccaactgctgcaccaggatggtctcaatgagcccattgtcttggactaaattacagggtcacaaaactggcttgggagacagccgcagaa

SEQ ID NO: 913602 - DNA, 120 bp, Artificial Sequence
  ENSG00000266998_14 (sequence is synthesized)
aggggcactaacaactttcatagtgcaaatggtgacagctgtacaacgaacacaaccccaaaccctggcctcccctcccgccacagggctcccgttgagacacgagagttcttccccaga

SEQ ID NO: 913603 - DNA, 120 bp, Artificial Sequence
  ENSG00000266998_15 (sequence is synthesized)
aatcccactgggggcccgacactttctgttaggaactgagagcagagacctcgatcccgcaggcaggaggagagctctgcacaacacagggcctctctccataagggcttactggaaagt

SEQ ID NO: 913604 - DNA, 120 bp, Artificial Sequence
  ENSG00000266998_16 (sequence is synthesized)
ggtcagaccggctaagtcgtgccacttggacatttgggacaaggaaggcccctggaggagcggtcgcagggaggagttgcaaagaggcaggggcagggaggtcacattcactcggggact

SEQ ID NO: 913605 - DNA, 120 bp, Artificial Sequence
  ENSG00000266998_17 (sequence is synthesized)
gcaggaggctcaacggaacacagtggacctagggagaccccagtatgagcatgtgcccaaagatgtccagatgaggaggtgttgtgggggaggggggcgggaacagcaagccctcccagc

SEQ ID NO: 913606 - DNA, 120 bp, Artificial Sequence
  ENSG00000266998_18 (sequence is synthesized)
tctgcagacccagacctcccctccctctgggaagcagggatgcaaagggatagagcctgaaaaagggctttcaccactaagctgacaaagtaactacgatgtttccagctcacactctgc

SEQ ID NO: 913607 - DNA, 120 bp, Artificial Sequence
  ENSG00000266998_19 (sequence is synthesized)
acagcgccagtggccactggatcacaaccccctcccgtcccttcgccgccccacaccctcctcaggcccagccctgaagaacagccactggcactctgcttggcgtccagccaaagttct

SEQ ID NO: 913608 - DNA, 120 bp, Artificial Sequence
  ENSG00000266998_20 (sequence is synthesized)
ggtcccccaggaggccccgcctcccccactcagatagggctgaccccaggtgggccgtgtgggcagctgggctcaggacacccagatgtcagccctggttctggccatggagcggggagg

SEQ ID NO: 913609 - DNA, 120 bp, Artificial Sequence
  ENSG00000266998_21 (sequence is synthesized)
acctcaggctggtcacctcccagcttggcctgacacctggacagtttgctcatttcaacacagcctttccccctcccggcccaccagagggctctgcccaagtcagcctaggagcctctc

SEQ ID NO: 913610 - DNA, 120 bp, Artificial Sequence
  ENSG00000266998_22 (sequence is synthesized)
cgaggggcgggggctccaggtcccggcagaggcaggcccgcccctcagaagccctgccccagagcgctggagaccattgtgtgagcttccccttcgcctgctgtatttactcccgcggac

SEQ ID NO: 913611 - DNA, 120 bp, Artificial Sequence
  ENSG00000266998_23 (sequence is synthesized)
gcaggacgcagagccccagcaccggcagtcaagaggacgcaggaaagcgcacgcactcacaggctcagagacgcggacgccagacccaggcttggacagagcagccccgcaagtcccaac

SEQ ID NO: 913612 - DNA, 120 bp, Artificial Sequence
  ENSG00000266998_24 (sequence is synthesized)
acactttgtaaaccccgaagacaggagagagccaaaatactctccctgcccgcacgcaggccccttctgtcccccacggcccgattctgggaggcggatgaggatatccccaggcctgga

SEQ ID NO: 913613 - DNA, 120 bp, Artificial Sequence
  ENSG00000266998_25 (sequence is synthesized)
tgggggccatgggacatcccactctagaccctgccacgacctgggctgtgtccgttcggtgctcccggcccacgggctgcacaacttggcggccccgaaactggcgtgggggaggggagg

SEQ ID NO: 913614 - DNA, 120 bp, Artificial Sequence
  ENSG00000266998_26 (sequence is synthesized)
gctgtccacccgagcaggacgcggctgtccactcagtcggaggtgaggaacgacctccctatcccgttgccgggtccaagcggggcccgagagccgccggggagagccaaagggagggga

SEQ ID NO: 913615 - DNA, 120 bp, Artificial Sequence
  ENSG00000266998_27 (sequence is synthesized)
ccgatggatttcccagagtgaaactgtgcgtcctggagagttccgaggcagcctcgcgagccctcgaggaggtcgctgtcgcttggcaaacacaaacaacaataaaaggaaggaaaccca

SEQ ID NO: 913616 - DNA, 80 bp, Artificial Sequence
  ENSG00000263327_0 (sequence is synthesized)
ggcgacggtttctcgcgccgtggctggctcggccggccggggcaccgcgccgggctccatgcagccgggctgcgcggtcc

SEQ ID NO: 913617 - DNA, 120 bp, Artificial Sequence
  ENSG00000263327_1 (sequence is synthesized)
ggggatggcggcggcgggcggcgggtcggccgtggagccccggagaggcggccgccaccaccgctgcccgcagtctgcgaggtgtccggcggtccgctcagggcctcttttgcagactcg

SEQ ID NO: 913618 - DNA, 120 bp, Artificial Sequence
  ENSG00000263327_2 (sequence is synthesized)
ctcagggcctcttttgcagactcggtgcccggagtgcgccggcgccgcccgccaggtcttggcactgctggcgcggccgcggcggcgggggcccggctccagatcaccgacccccacgag

SEQ ID NO: 913619 - DNA, 120 bp, Artificial Sequence
  ENSG00000263327_3 (sequence is synthesized)
ctgcctgcccgctattttggttccatctcttctgcatatttatgcttgcctgttacattccctggcctctgagtgtcctttggcagtttccaaagcatttgggcaagaaggagcttgggc

SEQ ID NO: 913620 - DNA, 120 bp, Artificial Sequence
  ENSG00000263327_4 (sequence is synthesized)
aagaaacatggctctagcccttagggagctcccggtcctgcagtcaaaacttctttgagacgatgctgtcggccttggccaatcggagaatcgaatcatctgactcacccatcctatcgc

SEQ ID NO: 913621 - DNA, 120 bp, Artificial Sequence
  ENSG00000263327_5 (sequence is synthesized)
cccgcagatagcataagttttaaactggccattaaacctgcccgtgaccttgtcagcctcggccacgttcatctggatggatgcgtggtccttggcaccgatgatgcggttgctagcgga

SEQ ID NO: 913622 - DNA, 120 bp, Artificial Sequence
  ENSG00000263327_6 (sequence is synthesized)
gcatttccgcggaacttacaggtccacgaactcgccggcgttgttctgcatttcgaggctccgcctgctgccaccacaccgcgcacgcgagagaaagccgagggtttgtcctcttatgcc

SEQ ID NO: 913623 - DNA, 120 bp, Artificial Sequence
  ENSG00000263327_7 (sequence is synthesized)
aagttagggcagccctcaaagcagatctcgaagggaagacgtctaccgagagcggattttgatgtatcactccatgagactggtgcctttctctagcctggagaattccaagggtgcaaa

SEQ ID NO: 913624 - DNA, 120 bp, Artificial Sequence
  ENSG00000263327_8 (sequence is synthesized)
caggctttagttgtcttaaaacggccatacccagagcaagtgtaaaggcagttgtggaaaataatataaaccagttacaatagcattcttggagtgcttacccaggtactagggattatt

SEQ ID NO: 913625 - DNA, 120 bp, Artificial Sequence
  ENSG00000263327_9 (sequence is synthesized)
ttattaatcctcacaaccaccctaaaaaagcattactttcattcccatttttcagatgagaaaacggaggagtgaggtcgttattttctcaagatcatagaattagcatggttcataact

SEQ ID NO: 913626 - DNA, 120 bp, Artificial Sequence
  ENSG00000263327_10 (sequence is synthesized)
ttaaatagcagatccttgtatgtattagcttggtgttgatcccatctatctgtggttggttcccagatttactacctccagctttggtttcattccctcctgaactcaagacctgtatat

SEQ ID NO: 913627 - DNA, 120 bp, Artificial Sequence
  ENSG00000263327_11 (sequence is synthesized)
ccaactgcttacttgatatttccatttgggtatgtcatagccagtggaaaacactgggtaatttatgaggataagaggtttagttgacccacaggtccacaggctgtacaggaagcatgg

SEQ ID NO: 913628 - DNA, 120 bp, Artificial Sequence
  ENSG00000263327_12 (sequence is synthesized)
ctgggagacctcaggaaacttaaaatcatggcagaaggtgaaggggaagcacttgctctcctctctgcctagagggctagaggaaagttcctgattgcaacttaccgctaccttgctctt

SEQ ID NO: 913629 - DNA, 120 bp, Artificial Sequence
  ENSG00000263327_13 (sequence is synthesized)
ccctatcttggttgcttgagtcacgtctcctttcccttaccttctccctttgtctgacatacccagttgctgtagaacttgaatccattgacttctctccatttccactgtcattttatg

SEQ ID NO: 913630 - DNA, 120 bp, Artificial Sequence
  ENSG00000263327_14 (sequence is synthesized)
agtgcaacccacatcaccccactgcttttattcttccctctcagcccactctccacagtagagagagaattattttcatctccctttactggcttgtcatttatctgggaataaaatcca

SEQ ID NO: 913631 - DNA, 120 bp, Artificial Sequence
  ENSG00000263327_15 (sequence is synthesized)
aactgcaccacggagccttggaaggcctggctgctcctcccctcgcagttctccatggctcactggactttagcagctctggcctcccttctgttccctaggaaccttggcctttgcact

SEQ ID NO: 913632 - DNA, 120 bp, Artificial Sequence
  ENSG00000263327_16 (sequence is synthesized)
tgttctcctctctgcctagagggctctttttctcatctctttgcatagctgggtcatcctcatcctttaggtctcaactgaaaggtcaccttctcactgctactcccagctactcattct

SEQ ID NO: 913633 - DNA, 120 bp, Artificial Sequence
  ENSG00000263327_17 (sequence is synthesized)
ctttcccatgtttatctttgtcatagtccttcaaacaattggtaattaatttgcttattttaaaaaacttgtttgttagatgtgtttatcctgtttcctcctcccaactatgatctaagc

SEQ ID NO: 913634 - DNA, 120 bp, Artificial Sequence
  ENSG00000263327_18 (sequence is synthesized)
tctctgagaaggggcctcacttaccttcatgttcatcactgtagtgccacaatctagcaaattgcctggcatatggaggtgctcagcaaatacctgttaaataaatgaatgaattttttt

SEQ ID NO: 913635 - DNA, 120 bp, Artificial Sequence
  ENSG00000263327_19 (sequence is synthesized)
agaccccacatataggaaccatcggatccctgtgtacagatgaagaactgagtcttggaaagcttaactaccttgctcacagtcacacgttaaggtctaaagtgagaaattaaaccaagt

SEQ ID NO: 913636 - DNA, 120 bp, Artificial Sequence
  ENSG00000263327_20 (sequence is synthesized)
cttccaatctcaaagactttaaaggaaaagctacaagctacaagaataaagaagttcttcatgtatatttatgggaaaattgctaaggtgtagtctcaagtcctaaaaaagcaaagttca

SEQ ID NO: 913637 - DNA, 120 bp, Artificial Sequence
  ENSG00000271806_0 (sequence is synthesized)
ggcctccctccgcctctagctgaccacatttctggggccggtctcatttgcttacgctaaagtggacctatgaggtcaaagggcattacaggctttttggcagatgcagctgaaggacct

SEQ ID NO: 913638 - DNA, 120 bp, Artificial Sequence
  ENSG00000271806_1 (sequence is synthesized)
ctggaaggactgtgccaacgcatgcaccagcctgcgtggtcccccatccctgtggctggtgatcctggggtgacaccctgatccagactctgtctttatcccgtaacagaggagagggca

SEQ ID NO: 913639 - DNA, 120 bp, Artificial Sequence
  ENSG00000271806_2 (sequence is synthesized)
cgtcactgccacaggcgcctttcctcccatgccacagcaagatgcagacaagccaccctccccagacacacccactgcacgctgcagcagggcccagggagttgaatgttcagtccaggc

SEQ ID NO: 913640 - DNA, 120 bp, Artificial Sequence
  ENSG00000271806_3 (sequence is synthesized)
ctcacccccgtggttcagtgggatgcagggggccacacggaaatgccagaggcagccttcaataagcaaaagtcaataaggcccccaaaggcctggatgcttcaagtccaagcactcggg

SEQ ID NO: 913641 - DNA, 120 bp, Artificial Sequence
  ENSG00000271806_4 (sequence is synthesized)
gatggcggagggaaggtgccgccctcatcacaggctgggcatggcttcccaggggggatgccagggagaggctccagatgttcggagcctcagcgtgcccaatgctactaggtcagacct

SEQ ID NO: 913642 - DNA, 120 bp, Artificial Sequence
  ENSG00000271806_5 (sequence is synthesized)
ggctttcacctccacagtccttaagagctggttcaagactggggtatgaatgaaccttacctccgacccactgagcagagcgtaccacgtcctacctgagcctgctgcctgagcctcatg

SEQ ID NO: 913643 - DNA, 120 bp, Artificial Sequence
  ENSG00000271806_6 (sequence is synthesized)
ccccaatgagcagagtgtgccgggggcttgtgggggctcaggaagatgggtcctatccaagactgccgcctgagtctcacgctgcagcccagagctaggacggcaccacggcccctcttg

SEQ ID NO: 913644 - DNA, 120 bp, Artificial Sequence
  ENSG00000271806_7 (sequence is synthesized)
aagaacccagggtcaccaaggtctgcttggacaatgggctggctgccacgccccgaccccgcccgtgccccccgggcctccccagccctgccactcaccatatgcttcctgcaggtcagc

SEQ ID NO: 913645 - DNA, 120 bp, Artificial Sequence
  ENSG00000271806_8 (sequence is synthesized)
gggacgaggccgtggcagcgcttatggaccagcagtttgcagttgatgcacctgtagccttgcctcgcgaggccccatatcctctcgctgcactgaccgcagtacgctctctgcaggtgg

SEQ ID NO: 913646 - DNA, 120 bp, Artificial Sequence
  ENSG00000271806_9 (sequence is synthesized)
gaacagagcgtcaggcccaggccacactgaggggccagcggagaggacaggcagggccttccacacctataccttctcaaaagaggacactgagccgggcaacaggtggccccggcacct

SEQ ID NO: 913647 - DNA, 120 bp, Artificial Sequence
  ENSG00000271806_10 (sequence is synthesized)
tgtcccttccgggcgccaggcttgcccaagcttgagagcctcctcttgggtctatcccaaggttgggggaaccagtggccccaaggagaggcctggaaccctgctctgcatgaggggaca

SEQ ID NO: 913648 - DNA, 120 bp, Artificial Sequence
  ENSG00000271806_11 (sequence is synthesized)
caggggaggtgccatcgggcaggggtgacgaggtgctgcttcaggcaaggccccgtggcttgcaggggctggggggctgcagctcctgctgcgctctgcgtagagcagcctggggtcccg

SEQ ID NO: 913649 - DNA, 120 bp, Artificial Sequence
  ENSG00000271806_12 (sequence is synthesized)
tctagggctaagcagagtgtgtgggggtaccccctgcctgaccttcattcaaacagaacctcctcctgacagcctcagagaaggggaactcggactcatgaacatcttgaactgctacat

SEQ ID NO: 913650 - DNA, 120 bp, Artificial Sequence
  ENSG00000271806_13 (sequence is synthesized)
ggcagcctgcaattatcttagtattctttgttcagtatttttcaagattttaaatgatccttctttattcttcatggttctgaacaattccaaaatgatggtaattatcagcttgtttgg

SEQ ID NO: 913651 - DNA, 120 bp, Artificial Sequence
  ENSG00000271806_14 (sequence is synthesized)
cgatgttttcatgaacgtttaaatgttacaaaaggcatgagaatgaatgttgtcgggacctgcttggacattttctgccttgcctaagtgcccaaagtgttcctgggagtaaaggggtgc

SEQ ID NO: 913652 - DNA, 120 bp, Artificial Sequence
  ENSG00000271806_15 (sequence is synthesized)
atctgcactgtcaccatgtgcccagagcctccaattcagattctttccagacacagccctttcatatgcttttccctcttttaccatttttcacaaatttccttcctattacagagctca

SEQ ID NO: 913653 - DNA, 66 bp, Artificial Sequence
  ENSG00000271806_16 (sequence is synthesized)
ttaccatttttcacaaatttccttcctattacagagctcacctcacacctgagttaagacgaggaa

SEQ ID NO: 913654 - DNA, 120 bp, Artificial Sequence
  ENSG00000271806_17 (sequence is synthesized)
tgaaccgcctgcactgaattcacgtgaggaaacgggactgaagagaaaatacagcactgagttcacgtgaggaaccgggaccctcagcacatgtgggcatcaggtgcggctgagcaaagg

SEQ ID NO: 913655 - DNA, 120 bp, Artificial Sequence
  ENSG00000271806_18 (sequence is synthesized)
gggtccagaccctctacgggactctcctgctcatcagaagagcctgctcgggacgtcagggcccggggaccctccccccgcccacacagcccacttgtttgggtggggccggatgaccag

SEQ ID NO: 913656 - DNA, 120 bp, Artificial Sequence
  ENSG00000271806_19 (sequence is synthesized)
cacctaggacagtgcccagcacacagtgggcatcgggtaagaaaacacacatgcatcatcgctttcaacttcgtcacaggaaaaaggagccgactccacatcctctgcacatgctaccta

SEQ ID NO: 913657 - DNA, 120 bp, Artificial Sequence
  ENSG00000271806_20 (sequence is synthesized)
catcagcccagccatgacagagccacaccaggaccgtgggctctattcgaaggagggatgggtgagagggggcatcccacccaagacctctgattccgggccaatctagcttaatgccgg

SEQ ID NO: 913658 - DNA, 120 bp, Artificial Sequence
  ENSG00000271806_21 (sequence is synthesized)
cattgggagttttgccccagtcggcacctgctggatgtgtggaccctggattgaaaggaggcgcttcggctgctggatgtgtggaccctggattgaaaggaggcgcttcggctgctagat

SEQ ID NO: 913659 - DNA, 120 bp, Artificial Sequence
  ENSG00000271806_22 (sequence is synthesized)
gcctggaccctggattgaaaggagggcgcttcggctgctggatgtgtggaccctggattgaaaggaggcgcttcggctgctggatgcctggaccctagagtgaaaggaggcgcttcggct

SEQ ID NO: 913660 - DNA, 120 bp, Artificial Sequence
  ENSG00000271806_23 (sequence is synthesized)
gctggatgtgtggaccctggattgaaaggaggcgcttcggctgctggatgtgtggaccctggagtgaaaggaggcgcttcggctgctggatgtgtggaccctggagtgaaaggaggcgct

SEQ ID NO: 913661 - DNA, 120 bp, Artificial Sequence
  ENSG00000271806_24 (sequence is synthesized)
tcggctgctggatgtgtggaccctggagagaaaggaggcgcttcggctgttggatgtgtggaccctggagtgaaaggaggcgcttcggctgctggatgtgtggaccctggattgaaagga

SEQ ID NO: 913662 - DNA, 120 bp, Artificial Sequence
  ENSG00000271806_25 (sequence is synthesized)
ggcgcttcggctgctggatgtgtggaccctggagtgaaaagaggcgcttcggctgctggatgtgtggaccctggagtgaaaggaggcgcttcggctgctggatgtgtggaccctggagtg

SEQ ID NO: 913663 - DNA, 120 bp, Artificial Sequence
  ENSG00000271806_26 (sequence is synthesized)
aaaggaggcgcttcggctgctggatgcctggaccctggagtgaaaggaggcactttggctgtgcagacctgctccattctcctccgcgtccacagcgcagaagaacaccagcttccattt

SEQ ID NO: 913664 - DNA, 120 bp, Artificial Sequence
  ENSG00000271806_27 (sequence is synthesized)
ctaaaaccattatttaaaagtcaagttcttttggtataatgtgcctaatgtgtttggctttctctaggtcaccatttaacatcttactctgcaacactacggtcctagttaagaccaaat

SEQ ID NO: 913665 - DNA, 74 bp, Artificial Sequence
  ENSG00000271806_28 (sequence is synthesized)
atcttactctgcaacactacggtcctagttaagaccaaattcacagccaccaggtatctttacaaattaaccaa

SEQ ID NO: 913666 - DNA, 120 bp, Artificial Sequence
  ENSG00000271806_29 (sequence is synthesized)
aacaaaaaacaaattgaccaaggttcctttccgtggggagccacccttacctggggtcaggccaggacatctgctgacaagggcagtgtgaatctgccaagggttggcacccaccacaga

SEQ ID NO: 913667 - DNA, 120 bp, Artificial Sequence
  ENSG00000271806_30 (sequence is synthesized)
gacctcacgtgtgtgctttgtaagtgaggctgcccaagctctgtcaaaagctcttgtttcaaatctatatttgaatagtaacatttcaggaaatgtgacattaaaaaaataaaacctaaa

SEQ ID NO: 913668 - DNA, 120 bp, Artificial Sequence
  ENSG00000263325_0 (sequence is synthesized)
gataaacagagcagaagcggaaaggagatgagagagggccccaggcccctgtgactcagcccagagacctggcgcaacccgggcttgggaatcccgttaacccacttcccgaaagctgtg

SEQ ID NO: 913669 - DNA, 120 bp, Artificial Sequence
  ENSG00000263325_1 (sequence is synthesized)
ttagggcggttaagtgacttgcccgagattgctgggtgagtggtggagccggacctgcaccccaacactgggggtggctgctgggactgccctcatggaggcttcgggagcctggaggag

SEQ ID NO: 913670 - DNA, 120 bp, Artificial Sequence
  ENSG00000263321_0 (sequence is synthesized)
gaaacagggtcttgctctgtcacccagggtcaaagtaacaagctgcagtcctggccaacgggagcaggtcctgtcaggttggaaactgaccacactcacggtccttcctcactccacaca

SEQ ID NO: 913671 - DNA, 120 bp, Artificial Sequence
  ENSG00000263321_1 (sequence is synthesized)
atccatcccctccggcccagctcatgacaccctgggtgacccctcaaacacgggtgtttgccaagttcaccaagtggcttcttcccccaaaggtaattctacagctactttcattctccc

SEQ ID NO: 913672 - DNA, 120 bp, Artificial Sequence
  ENSG00000273091_0 (sequence is synthesized)
gattatttggtttttatgttgacagtgtttgagaggtcttttagcaagtagttggtatcagctagactttgggtgccttggcagcattttctagcattttcctgttctgaagacagcagc

SEQ ID NO: 913673 - DNA, 120 bp, Artificial Sequence
  ENSG00000273091_1 (sequence is synthesized)
acctgtatctgttctggaacatctggtggccatttgcacagctactgctggacttccatctttatctctccaggcagacgagtcgaaccttccaataggaaattttgggtaaatgacaaa

SEQ ID NO: 913674 - DNA, 120 bp, Artificial Sequence
  ENSG00000273091_2 (sequence is synthesized)
tcagaaataagcgtgacggataaaaatcagcaagacatttaatacatctgcaaacttgccttctttcaaagaacattgattgaaacagattcgtttgttcataatgtgggtgtgaaaata

SEQ ID NO: 913675 - DNA, 120 bp, Artificial Sequence
  ENSG00000273091_3 (sequence is synthesized)
gttctgaaaagccattctaaacaaacttatgtttttaaaaagagtagatgaaatctgtttgcggaggaaggaaaagatgacattcaggaagcaatgttctggttaattctgtgttcttca

SEQ ID NO: 913676 - DNA, 120 bp, Artificial Sequence
  ENSG00000273091_4 (sequence is synthesized)
aaagccagctcattttcttgaaaagaatgctggccacaatccacaggtatagagaatatggagagaaagcatctcacgcctgaagagtccaataaaacatttatagataagaatttaaga

SEQ ID NO: 913677 - DNA, 120 bp, Artificial Sequence
  ENSG00000273090_0 (sequence is synthesized)
tggtggggttgccacaggcaggcaccgggcaggtgatcagggcacacatttcccgtccattgagacagtagcattcccggcacccatcgtgccagctctcctcatttttatgatgatgac

SEQ ID NO: 913678 - DNA, 120 bp, Artificial Sequence
  ENSG00000273090_1 (sequence is synthesized)
gagtctgtacatggactggaccccagccaccaacaattacgtctaacacaggacagtttgtgacatgggacatgttcatgaaaagaatttaagtcagtatgttctcaatcttgaaaaaag

SEQ ID NO: 913679 - DNA, 120 bp, Artificial Sequence
  ENSG00000273090_2 (sequence is synthesized)
aaaagagagaaaaaaaccggcaaatagtttctctccaattcgtgggatgatcgctgattttttattccttccactgtactttctcatattttatacaataaacaagcactgattttataa

SEQ ID NO: 913680 - DNA, 120 bp, Artificial Sequence
  ENSG00000273093_0 (sequence is synthesized)
cattgtgattaaaaagataatcagcttgatttttgataaccaaagagttaccagggatatctgaaaaaaaaagaaattcccaactatgaattcacacatgttattttctaatttagattt

SEQ ID NO: 913681 - DNA, 120 bp, Artificial Sequence
  ENSG00000273093_1 (sequence is synthesized)
tcacaccaaataatatgtaataagtaaacacgtattttccatattatttctattctattcttctggtgcagtttttcttagaagtgaggttttgtcatgaattggtgctaccataagtag

SEQ ID NO: 913682 - DNA, 120 bp, Artificial Sequence
  ENSG00000273093_2 (sequence is synthesized)
tttttaaaaaactgtttccttagttcacagtgatataatatttatgctgagattgttttaaatgaactctgtgatagaattgttgatttattaatatttggatttgggttgatgttcctt

SEQ ID NO: 913683 - DNA, 120 bp, Artificial Sequence
  ENSG00000273093_3 (sequence is synthesized)
ttacatttgctgtaggaaatacccacgacatgaggtttgtaagcttttgtgtttttctctattctaaccactctgcttgaaatataatttgaagatgctagtaaaaaatataacaaattc

SEQ ID NO: 913684 - DNA, 120 bp, Artificial Sequence
  ENSG00000273096_0 (sequence is synthesized)
aggcccgatgggcactggagaaaaagaatcaagtgtgccccacatcagcatctatgaagccctctatgaaggtggttctatctgttgatcacaataaaaaaacgattgtggatgaattca

SEQ ID NO: 913685 - DNA, 120 bp, Artificial Sequence
  ENSG00000261879_0 (sequence is synthesized)
accgccgagaggccgcgtcctcagctggtcctagacatgcgtggcgtcggggctgtggcacggtcgggtccggggacacttgtttaacaagacatctgcccatgtccctggcccatctca

SEQ ID NO: 913686 - DNA, 120 bp, Artificial Sequence
  ENSG00000261879_1 (sequence is synthesized)
ttggctgcagcacatcacagtggaccttctgcctcctcccagatgcccagggacagtgatctggaaggaaggggcttgaggctgttttcctagaactcgacttgaatgcaccaaggaaag

SEQ ID NO: 913687 - DNA, 120 bp, Artificial Sequence
  ENSG00000261879_2 (sequence is synthesized)
gccatttgtggggacatagcaagaaggcagctgtctgcaagccaggaggagaaccctcaccagaaacctcacagaaatcggccaacaccctcatctcgggcttccagcttcagaacaacg

SEQ ID NO: 913688 - DNA, 120 bp, Artificial Sequence
  ENSG00000261879_3 (sequence is synthesized)
agaaaacaaatttctgttgtgtcctggttcccatttgtaattggcaccctaatgaaaccgttttctgtagccctggaaatggctgaaaatgaggggagggaaataaagtgctataattca

SEQ ID NO: 913689 - DNA, 120 bp, Artificial Sequence
  ENSG00000261879_4 (sequence is synthesized)
gagcatggagcacaccttcctggttcacctgagctggattcggagaggtaaaatggccattacctcgtctaagctgccacttacagacacagtacaggatgaggcccagacccacagaga

SEQ ID NO: 913690 - DNA, 120 bp, Artificial Sequence
  ENSG00000261879_5 (sequence is synthesized)
caacgatgatggccacagctaagatgatccagaaattattcctccaccagctcattgcagtggaatcctgagaagaatggagagagaagaatgagagggcaaaagcagatggctacaccg

SEQ ID NO: 913691 - DNA, 120 bp, Artificial Sequence
  ENSG00000261879_6 (sequence is synthesized)
agaactcacgccagcccaacacactttgatctcgaggcctctggaagggaaggtgcctaatgaactactgaaagccagagatgcaatgacaaagaggtagacttcttcatcgcccctgac

SEQ ID NO: 913692 - DNA, 120 bp, Artificial Sequence
  ENSG00000261879_7 (sequence is synthesized)
gaaaaggcccagagaggtgaagtgatgcctcaggtcactcagccagttaccagtagagcagatccttcaatgcaagtttttctccaaccctacacagcagtcgtaccagggccccaggct

SEQ ID NO: 913693 - DNA, 120 bp, Artificial Sequence
  ENSG00000261879_8 (sequence is synthesized)
gcaatcccctggcccagtgctgatcggtggctcccagggacacgccctgatgccagcgctggcagatgtctgctgtgaagagagcaggaaactgtcccttggaaagctgagatgcttacc

SEQ ID NO: 913694 - DNA, 120 bp, Artificial Sequence
  ENSG00000261879_9 (sequence is synthesized)
tgaactgtgaaagtatccatatgtgagcagctaaggagacagcagtggctggagtgctgcagctcaggcacagctgacgagtttgccgtgagcattcctggatgtggcaacctcagtctc

SEQ ID NO: 913695 - DNA, 120 bp, Artificial Sequence
  ENSG00000261879_10 (sequence is synthesized)
aagaagagcgacaggacgccagctcccatgcagagacagatccaggtaagaaaccagctcatgtgtgacaaactcaccatctcaccatgaaggtgactcttgaaagctcctgtgcacctt

SEQ ID NO: 913696 - DNA, 120 bp, Artificial Sequence
  ENSG00000261879_11 (sequence is synthesized)
ggaactgctgagacatcttctgcttggaggaggcaagggacaggcttcctgtttctaaaggcgtgtgagtggcgaccttgagaaatgtggccagtggagcattttgactgagttgggtcc

SEQ ID NO: 913697 - DNA, 120 bp, Artificial Sequence
  ENSG00000261879_12 (sequence is synthesized)
cctcgtgcaatactgtgagacagaactcccagcgaggcccacggcctctgaccatgggggttggagtggggaaaccaattagccattttgttgaattggctggttctgactcaaatgagc

SEQ ID NO: 913698 - DNA, 120 bp, Artificial Sequence
  ENSG00000261879_13 (sequence is synthesized)
agtcacattagtaaaaataggcaaacggatgtgcattgtatttgcccagagcgaatgagttgttatccatttcagtaataatgataaccagatatgtctgataaatatctgataatgtct

SEQ ID NO: 913699 - DNA, 70 bp, Artificial Sequence
  ENSG00000261879_14 (sequence is synthesized)
taatctactgtgttgtgtagagatgcagacatctgcttaggaatcaggcactggatcacagccataccct

SEQ ID NO: 913700 - DNA, 120 bp, Artificial Sequence
  ENSG00000261879_15 (sequence is synthesized)
atctgcttaggaatcaggcactggatcacagccataccctactcattaacacctgggggacctcaggcatgtcactcgaccttctgtgagcctcatctataatatgggaatgatatctcc

SEQ ID NO: 913701 - DNA, 120 bp, Artificial Sequence
  ENSG00000261879_16 (sequence is synthesized)
agtgctgcagctcaggcacagctgggaagctcatgacccacggctgtccagaagccagaatcttctcactgccccgtgtcgctcccgcaaggcctaccagaggaccctcatggtgtggta

SEQ ID NO: 913702 - DNA, 120 bp, Artificial Sequence
  ENSG00000261879_17 (sequence is synthesized)
cttggggtcagctcttatccagttcaagccacttatgaccatcaatccttcaacttggtctgtgtgagtgtccagtaggtgacgtttgatgtcagagcgccaaaaactccatcttccatc

SEQ ID NO: 913703 - DNA, 120 bp, Artificial Sequence
  ENSG00000261879_18 (sequence is synthesized)
atgctaatgccaccattttgtgaacctgcatcctatgaagaacgatgaagcttgactaggcttgcacagattgccgatgtcctacttttccctccaatcaccttccccacaccttaggcc

SEQ ID NO: 913704 - DNA, 120 bp, Artificial Sequence
  ENSG00000261879_19 (sequence is synthesized)
acctgcttctttgtcccataaacgtctctaaaccccatcttcgaggaagtgggtttgagacctgttttcccatctcctcacttggctgcctcatgaataaatgcattctgtgctgcaaaa

SEQ ID NO: 913705 - DNA, 120 bp, Artificial Sequence
  ENSG00000261879_20 (sequence is synthesized)
atcagcaggggcattggattatgataggagtgagaacaccattgtggactgcgcatgccagggatctaggttccgcgctccttatgagaatctgatgcctgatgatctgtcactgtctcc

SEQ ID NO: 913706 - DNA, 120 bp, Artificial Sequence
  ENSG00000261879_21 (sequence is synthesized)
atgggactgtctagttgaagaaaaacaagttcagggctcccactgatgctacgttacggtgagttgtataattatttcattataattacaatgtaatgataatagaaataaagggcacaa

SEQ ID NO: 913707 - DNA, 120 bp, Artificial Sequence
  ENSG00000261879_22 (sequence is synthesized)
taaatataatgagcttgaatgatcctgaaaccatactctgctgctccatggaaaaattgtcttccatgaaatcagtccctggtgccacaaaactagtccccgatgctgccctagagttta

SEQ ID NO: 913708 - DNA, 120 bp, Artificial Sequence
  ENSG00000261879_23 (sequence is synthesized)
aaagccagagatgcaatgacaaaggtaccaagactggaggtgatccaggtctttcatccaagagccccaagacgtagcctaaattcatgctacggtaatcccagcactttgggaggccga

SEQ ID NO: 913709 - DNA, 73 bp, Artificial Sequence
  ENSG00000261879_24 (sequence is synthesized)
cgtaaaataaaaataaataaattgacacagtcagtgcctcgctcccacccccacctccagcatagcaccatga

SEQ ID NO: 913710 - DNA, 77 bp, Artificial Sequence
  ENSG00000261879_25 (sequence is synthesized)
ggtatgaatgaaagatatcctggggttgggtggagtggggcagttatctactgtgggttgttttttttttcttttcc

SEQ ID NO: 913711 - DNA, 120 bp, Artificial Sequence
  ENSG00000264808_0 (sequence is synthesized)
agttaagatggcgcggggaagtgccgggagccgtctccgtcgccgcctcgggggaaccggcccgggcctcggccgcctctagtcctcacacagccgaggccctctcggtcccccgccgcg

SEQ ID NO: 913712 - DNA, 120 bp, Artificial Sequence
  ENSG00000264808_1 (sequence is synthesized)
gcccctcggcgggcgggcccacgcgcagccctccgccaccaacaccacccctgtggcaagaggaaaaacagcaagtccaactccacaggtttgtaaggagcagccagctttgatttgccc

SEQ ID NO: 913713 - DNA, 120 bp, Artificial Sequence
  ENSG00000264808_2 (sequence is synthesized)
tgcacgtcatagctcagaaagttttgctgctcatacaatcctcagcaaagaccatccattcattccgggattcccccagctcatggacacaggtcggtctctaactacagacagccttct

SEQ ID NO: 913714 - DNA, 120 bp, Artificial Sequence
  ENSG00000264808_3 (sequence is synthesized)
ccttcacattgtttgcctgttttcagtgcctttcctctgcagatctctcagtaggcagccgtaaggagtcagcaaaggctaacacggctgccctcagctggaaacctagtgtagtgccta

SEQ ID NO: 913715 - DNA, 120 bp, Artificial Sequence
  ENSG00000264808_4 (sequence is synthesized)
ttacatttctcctggaaccactccttgtgagaaaggcaattcaaactctatcttaagtgagcatctacttccttttcatctgagttataaaagaatagtgccccctttggctcaaatcta

SEQ ID NO: 913716 - DNA, 120 bp, Artificial Sequence
  ENSG00000264808_5 (sequence is synthesized)
tgcaatgtggaggaagaaaaggcaagagctaatccttgccatgaattcatcattgtcatcgtcaccatttcaccattatcagcaacagactctagaaacaacttggtgaaggcttgaaaa

SEQ ID NO: 913717 - DNA, 120 bp, Artificial Sequence
  ENSG00000261872_0 (sequence is synthesized)
ttgataaacactgatcaacataggttttttaaactataaaacatacttgtatggaaatgcttttctgacagtttgaatcattcttacttaccaatatacatgtcccaacaatgaaagagt

SEQ ID NO: 913718 - DNA, 120 bp, Artificial Sequence
  ENSG00000261872_1 (sequence is synthesized)
aaagcaagctgaatcaccaaactcagtaacaatatcatcatggcttttctgcttattaaacactccaccagataagatttgttccccttctgcaagcctttaaaatacaaatttaaagat

SEQ ID NO: 913719 - DNA, 120 bp, Artificial Sequence
  ENSG00000261872_2 (sequence is synthesized)
cacaaattttttctctctctctctttccttttccttccttccttcatccctccctctctctgtcttcctttctttaaagagatagggtcttgctttgttacccaggctagagtgcagtag

SEQ ID NO: 913720 - DNA, 120 bp, Artificial Sequence
  ENSG00000261872_3 (sequence is synthesized)
cttgctttgttacccaggctagagtgcagtagtacaatcatagttcacatggcctcaaattcctggactcaggtgagcctcttgcatcagccttgtgagtagctgggactacaggtgcac

SEQ ID NO: 913721 - DNA, 120 bp, Artificial Sequence
  ENSG00000261872_4 (sequence is synthesized)
gtagagacagggtctcactatgttgaccaggtgtagtgacacgtgtctgcagctccagctacgtgggaggctgagatgggaggatcgcttaggcccagatggggactgcagtgagccatc

SEQ ID NO: 913722 - DNA, 120 bp, Artificial Sequence
  ENSG00000242474_0 (sequence is synthesized)
atgttccaaagttgtatgggatttctaaaattctaatttttctgagtatatgctaccgatcataattatggttatgttgttgttataaccaaatttctttgtcaattgtgtctttttgag

SEQ ID NO: 913723 - DNA, 120 bp, Artificial Sequence
  ENSG00000242474_1 (sequence is synthesized)
tatttaaagtcatttccgcagttaattgcttcatgctgatgtagtttctgaaaacttcacaagcacacaaaaatcctagaacatggtgtcttttaggaggttcgtgaacggatggggagg

SEQ ID NO: 913724 - DNA, 120 bp, Artificial Sequence
  ENSG00000242474_2 (sequence is synthesized)
accctgaaaagcactgtggaatacaggtttctagtaacttcaaaatcacatcatttggactggaacccaaagatgggatcttctgagaacatcagagaaacgctgcccttggcatcatca

SEQ ID NO: 913725 - DNA, 120 bp, Artificial Sequence
  ENSG00000242474_3 (sequence is synthesized)
ctgcaacaaaacatcaggatcttgaaccttggggtcataatctcacaactgagcagggtcactcttggaactctacatccattgaaacccttaaggtaaagctaatcagggaagtttctc

SEQ ID NO: 913726 - DNA, 120 bp, Artificial Sequence
  ENSG00000242474_4 (sequence is synthesized)
aagatcatggatcaagacttcttactatcatgagactcttatctttgaatgtttttccgttgcttccgcctctgtgaacaacagaagtgagaagggggtctgttttgtgcacttatgggg

SEQ ID NO: 913727 - DNA, 120 bp, Artificial Sequence
  ENSG00000242474_5 (sequence is synthesized)
tatacttttatttgtgaagggctttgcagccagctttatacatggataatcttataacttgatagataaagatgaaggcccagtgtatcataggtgagaaacttcaatggtacatatggt

SEQ ID NO: 913728 - DNA, 120 bp, Artificial Sequence
  ENSG00000242474_6 (sequence is synthesized)
tggtgcctcataatcattcagaagcagaacattggttcactcctcttaacccacagcatgggttaaagagaccattgccaagaggccttccctcttctagaagggcatcatttgttaggt

SEQ ID NO: 913729 - DNA, 120 bp, Artificial Sequence
  ENSG00000242474_7 (sequence is synthesized)
tttccatggtttggaattaaaaaggcaatgactagaaacatatccctcatggtagactctgtagcagattctactgtaaaggctacacaacagatgttaaattctcttgtgaaagttatg

SEQ ID NO: 913730 - DNA, 120 bp, Artificial Sequence
  ENSG00000242474_8 (sequence is synthesized)
ctaaaaaatagaattggctaaacaggaaagtacctgtgcagatgctggcacttaaggcctatggagaaaacatcaggtgttatagagagtctgttgtagggaattaacgaaaagaccact

SEQ ID NO: 913731 - DNA, 120 bp, Artificial Sequence
  ENSG00000242474_9 (sequence is synthesized)
catcaatttttctagcttctttgggatgtccgctctgcatatctactaaggaattaagaaataatggcttcagcaagaaacaaggcaggaaagtgcagtgacatgaggaccatacaggga

SEQ ID NO: 913732 - DNA, 120 bp, Artificial Sequence
  ENSG00000242474_10 (sequence is synthesized)
aggagctgtccccaaagcacgatgagccacttgaggccaggtacagccatggcgtgtatcccagagcacctgtgagaatgtctcacagacagtccgtctctcctgaatatgaagggatgg

SEQ ID NO: 913733 - DNA, 120 bp, Artificial Sequence
  ENSG00000242474_11 (sequence is synthesized)
tgactggcccgtggccgcctccagctcacacagaacctctgcacgcaacggaaaaaggtctcccctgggtgaatggggtgggaaacgtgtgcccctccaggcggctggtgagcagagtgc

SEQ ID NO: 913734 - DNA, 120 bp, Artificial Sequence
  ENSG00000242474_12 (sequence is synthesized)
tcccctcggcagggtgtgacttgtacagctccaccacgggccctgtaacaagacaggcttcgaccctgccctcttgcagctcgtatgtatgaggggcagcccaataaataaataagcaaa

SEQ ID NO: 913735 - DNA, 120 bp, Artificial Sequence
  ENSG00000242474_13 (sequence is synthesized)
gagaggagcgagcgactcctgcgcaagcgcagagtgaagggccgggaacagtggagggtgcgaggaagacaatgggggaggaccctgaggcggcctctgtgagccgacaggaacacgtgg

SEQ ID NO: 913736 - DNA, 120 bp, Artificial Sequence
  ENSG00000242474_14 (sequence is synthesized)
ggaatacaggtttctagtaacttcaaaatcacatcatttggactgggtaagaattgctgaaactttaatgaaaagactgactggcttataaaactgctaacccaaatagaataaaaatta

SEQ ID NO: 913737 - DNA, 120 bp, Artificial Sequence
  ENSG00000242474_15 (sequence is synthesized)
actgctaacccaaatagaataaaaattaattgaataccgaggaaatgcttcaccaggtttgcatacttaatcagcctatactgaaattgtttagatatacaatttgaatgaactccatgg

SEQ ID NO: 913738 - DNA, 120 bp, Artificial Sequence
  ENSG00000242474_16 (sequence is synthesized)
tcagttatccatgctatgtgcccaatttggagaaacaactggcacccaagaggacataagtccgatgttaagcatggactcatggagaaccaagatggctgccttgtccttcgtgagtcc

SEQ ID NO: 913739 - DNA, 120 bp, Artificial Sequence
  ENSG00000242474_17 (sequence is synthesized)
ttaaagcttttgttattaaaagttatgcattccatgactcatcctggaaaagataaaatgatccaaattaaatatgttggtgtggtgacttacagattgttaaaatagtttataaacaat

SEQ ID NO: 913740 - DNA, 120 bp, Artificial Sequence
  ENSG00000242474_18 (sequence is synthesized)
gtttagtttgtcaaacccatactcctgggaagtcaatcaaagcttcatgtacatttggctacctgatgaggcatttaaacatttataaaggggtttcattcagttgtcattttcaatgta

SEQ ID NO: 913741 - DNA, 120 bp, Artificial Sequence
  ENSG00000242474_19 (sequence is synthesized)
tgtgttctggttgtactaaagctttcccatgcaggagggctaatgttataacagtagattactatgtatcagtgtattttcaccaggtaaagagctttttatggttcactgaggacaatc

SEQ ID NO: 913742 - DNA, 120 bp, Artificial Sequence
  ENSG00000242474_20 (sequence is synthesized)
gtggtctggtttatggggaccctggctaaggagcatactccaaattcttggtgttaaccctctcagtagtcataagaatagtctccctggtgcactgtattctctcaaaggttttaaatg

SEQ ID NO: 913743 - DNA, 120 bp, Artificial Sequence
  ENSG00000242474_21 (sequence is synthesized)
tttgcatgaagccatctttagaacgtcagatggtctctcttcaactggaatgacaagagctgaaagaaatgtgtgaccacgaggacaccgaaaccgatgagtgacatgctgagactggaa

SEQ ID NO: 913744 - DNA, 120 bp, Artificial Sequence
  ENSG00000242474_22 (sequence is synthesized)
atccaaaatgatagtaacggagagtggcgctaacatcctaagttttggtcacactcttgcctaagtgacaacctgacaaagggggaattttttaaacaaaatgatgggaggccattgttt

SEQ ID NO: 913745 - DNA, 120 bp, Artificial Sequence
  ENSG00000242474_23 (sequence is synthesized)
tggactgagcactaggtcccaacagaccaaaccgaaccaaaatggcatcattcgtgctaaatgtgacataatcgaattaagactttaaggaaacacatgggtcctagaatagaccaggtt

SEQ ID NO: 913746 - DNA, 120 bp, Artificial Sequence
  ENSG00000242474_24 (sequence is synthesized)
ttgtttttctcttgcaaacaggactttccagcataaggtggtatcctcaactcagtccttgttcctacctttgcaaaactcactgttctgcttcctagtgggtttcaagaccaatggtga

SEQ ID NO: 913747 - DNA, 120 bp, Artificial Sequence
  ENSG00000242474_25 (sequence is synthesized)
cagtgacatcaataactcaagtttcgatcaatctctcaaaactgataaaatgaccaaaaagggggaattgttaaagcgaactaaatatggcctgagaaggactccgtacttctgtattgg

SEQ ID NO: 913748 - DNA, 120 bp, Artificial Sequence
  ENSG00000242474_26 (sequence is synthesized)
taataggtagacaagattgaaaacctaaattaggagtatgtacctgtcacaattgctgagtctcggccagtcccagcagccgtacttcaatcactcatacactgctgaatgttcaaactg

SEQ ID NO: 913749 - DNA, 120 bp, Artificial Sequence
  ENSG00000242474_27 (sequence is synthesized)
actcatacactgctgaatgttcaaactgtgtgtaaataaggcaaatgccaacctgtaactaatccaggtgtttctctacctcacttccctttttttgtctataaatcttccaccacgtgg

SEQ ID NO: 913750 - DNA, 120 bp, Artificial Sequence
  ENSG00000242474_28 (sequence is synthesized)
tcacttccctttttttgtctataaatcttccaccacgtggctgcactggagtctctctgaatctgctgtaattctgggggctgcccgatgtgcaaatcattcattgctcaattaaactcc

SEQ ID NO: 913751 - DNA, 120 bp, Artificial Sequence
  ENSG00000242474_29 (sequence is synthesized)
gagataagaatctgtgttcttatcccccagaatggacaaatcagtagcgttccttgtcattcttttgtggctggtttcacgtaaatattttgtgtgtatgataatagaatttgattttaa

SEQ ID NO: 913752 - DNA, 120 bp, Artificial Sequence
  ENSG00000242474_30 (sequence is synthesized)
tcgatcagagagagactcgaggttcgtgaacggatggggaggaccctgaaaagcactgtggaatacaggtttctagtaacttcaaaatcacatcatttggactgggtaagaattgctgaa

SEQ ID NO: 913753 - DNA, 120 bp, Artificial Sequence
  ENSG00000242474_31 (sequence is synthesized)
gaagggccgggaacagtggagggtgcgaggaagacaatgggggaggaccctgaggcggcctctgtgagccgacaggaacacgtggtcgatcagagagagactcaacatggtgtcttttag

SEQ ID NO: 913754 - DNA, 120 bp, Artificial Sequence
  ENSG00000242474_32 (sequence is synthesized)
ctaagaacactgaacttcctggggttacagcccacaggtctcagcctcatttcatccagcccctattcaagatggagtcgctctggttcaaatgcctctgacactagtaaggatcacagg

SEQ ID NO: 913755 - DNA, 120 bp, Artificial Sequence
  ENSG00000242474_33 (sequence is synthesized)
tggcatcaacaggtttggagcaaacctgagtgtctcccggttggtcacatctcaactgacgaaatccacgaccagcagagagcagcctccttgccccctgtgctcactgagtcatccagc

SEQ ID NO: 913756 - DNA, 120 bp, Artificial Sequence
  ENSG00000242474_34 (sequence is synthesized)
ccattttgaccaagattatgtgagttgctggagcagaggttggttgagggagctcccactgtatgtaatcaccgtgtcttgcacaaaataaatagaaaacacaagaatacactcttatgc

SEQ ID NO: 913757 - DNA, 120 bp, Artificial Sequence
  ENSG00000242474_35 (sequence is synthesized)
aagggccgggaacagtggagggtgcgaggaagacaatgggggaggaccctgaggcggcctctgtgagccgacaggaacacgtggtcgatcagagagagactcgtaagtgcacggagctga

SEQ ID NO: 913758 - DNA, 120 bp, Artificial Sequence
  ENSG00000242474_36 (sequence is synthesized)
tggacaagggttcttgctgtgacttcactcagaccagaccaccttgaccttttcatcaccgtgcctcagcgaagtcagtcgttgattctctgatcggttactgagatcatcatgaaatct

SEQ ID NO: 913759 - DNA, 120 bp, Artificial Sequence
  ENSG00000242474_37 (sequence is synthesized)
ccctcgtacgagagttgcagaactctgcagtgtcaatcatagtgtttgggagagaggactttctacctccatcctttttctgaacctaaatggaatgaaaattagaactgttgcttattc

SEQ ID NO: 913760 - DNA, 120 bp, Artificial Sequence
  ENSG00000242474_38 (sequence is synthesized)
ttgaggtaatttcaaattcccttatccaaaccagtgttacaaaaggactccagtttgccccccaaatcggtctattaagaatgtaatgatgaattttcatccaaatcccacaatatgagc

SEQ ID NO: 913761 - DNA, 120 bp, Artificial Sequence
  ENSG00000242474_39 (sequence is synthesized)
caggcgcagacgcagggcgggcaatggccgcctgggtctctcgggcagccctgcccacctctctcgcgtctcctggtcttggcctgcggctctctttctggcaggtgccgcggcgtctcc

SEQ ID NO: 913762 - DNA, 120 bp, Artificial Sequence
  ENSG00000242474_40 (sequence is synthesized)
tgcgggcctgaccgtgttctcccgcctagccaggctcttctgcgctccttttttgttgagatttttccatcccctgcacaggaagtgtcctttaattactccagtgtttttttagttact

SEQ ID NO: 913763 - DNA, 120 bp, Artificial Sequence
  ENSG00000227155_0 (sequence is synthesized)
aagagttttccaaataaaatgaagagggctatcatggcatatcaagtttctctaattttcaggaaacaaagatactaatttgctttactcttagggattcttaaaaggcctcttttctaa

SEQ ID NO: 913764 - DNA, 120 bp, Artificial Sequence
  ENSG00000227155_1 (sequence is synthesized)
ctgcatatttagaatatataatcagaggaccaacgttcaatatctttttttgtgccatcactttaaaaagtgcagccatgctccccacttaactatctggagttgagaaatgatctggga

SEQ ID NO: 913765 - DNA, 120 bp, Artificial Sequence
  ENSG00000227155_2 (sequence is synthesized)
gttggcccagaaatagtgtgaacagctagagccaatattgacaaatccttattctgcaaccccacaagtttctctcctaggtaagctcatggggctctcaatcataccctgtcattctta

SEQ ID NO: 913766 - DNA, 120 bp, Artificial Sequence
  ENSG00000227155_3 (sequence is synthesized)
tggccccctgtggctactgtgcacttaaaatgtggccagtcctaactgcaacgtgctggctaggggtaagaatgcagcagtgaacatggttcctgcactcatgaagcaaatgtatccact

SEQ ID NO: 913767 - DNA, 120 bp, Artificial Sequence
  ENSG00000227155_4 (sequence is synthesized)
gtggtacaaaagagactgtaaaaaacaaacccaaatggacaacagagttctgaaccatcctgtgacaagtctagttaccctaaagctgtcatgcaggagagaccatgtggagagaaggag

SEQ ID NO: 913768 - DNA, 120 bp, Artificial Sequence
  ENSG00000227155_5 (sequence is synthesized)
agttagagagaggaggagcccctgctgtttgagtattctcagcccagacaccagacatgagtgaggaagcattcagaccccaactccagtttaaaaacgccaccactcaacagcctgttt

SEQ ID NO: 913769 - DNA, 120 bp, Artificial Sequence
  ENSG00000227155_6 (sequence is synthesized)
ttcagggtgtatctgaaactacttctcttaaaggcaagctgtaactggtgccagaaaagacagaagctgattgaggtcccagcttggtaacagtttgaagagttgcaggactggctggat

SEQ ID NO: 913770 - DNA, 120 bp, Artificial Sequence
  ENSG00000227155_7 (sequence is synthesized)
aaaggtcgctgccccgtggtggcactagacgcagtggacctggcaagcaaatgtttccgctattagctctcagcaacagagactcatttatggtcaccttggaaatctgggcttatcgat

SEQ ID NO: 913771 - DNA, 120 bp, Artificial Sequence
  ENSG00000227155_8 (sequence is synthesized)
ctacagcccaagtctgctgagaagctggagcttactaaaggggaaacctgagagctgttcaagccccaaatattttccacttctgcgtcacctctgctgtctgttagcagagtggaggag

SEQ ID NO: 913772 - DNA, 120 bp, Artificial Sequence
  ENSG00000227155_9 (sequence is synthesized)
aaaatacacagcacaaacaacgtgaaaaaatagttactctattcattaaaagctgtaacttccagattggacttgagaagcaattaagcaacagaggaacctcatctactatctgtattc

SEQ ID NO: 913773 - DNA, 120 bp, Artificial Sequence
  ENSG00000227155_10 (sequence is synthesized)
atggaatttaaaacaatgtgtggcatgacaaacccaatcagatctgtgcagtatattcatgtttaatttttatgagattcttatgtgatagtgacaactgcacccttgaccttgctgaag

SEQ ID NO: 913774 - DNA, 120 bp, Artificial Sequence
  ENSG00000227155_11 (sequence is synthesized)
ttatttttttattgcttcttaactaacagttacaattaccaccatgtgtaaaataagatcagtttcaggatgacttcaaggcccaagtttataacattggcaggctacaggaggtgggat

SEQ ID NO: 913775 - DNA, 120 bp, Artificial Sequence
  ENSG00000227155_12 (sequence is synthesized)
gagtcctgccaaagctaacagctaatttggggaagtctactcggacaactttggtaaaatcagctaaactctccttagtctttgtttgcagaagtagcagcagctagctaacaccttctg

SEQ ID NO: 913776 - DNA, 120 bp, Artificial Sequence
  ENSG00000227155_13 (sequence is synthesized)
attgctcaccatgtgcccttgactgagttaaatgtgttatatgcagacaactgcggttgaaacaagctgctactcattagcaggatgacttaaccataaaaatcttcaattttctctgga

SEQ ID NO: 913777 - DNA, 120 bp, Artificial Sequence
  ENSG00000227155_14 (sequence is synthesized)
aaatggggataataagctcatataatctcctagggttgctgggagaattaaatcagaagctatgataataaggcaaacagatgcttctggagtgtagcagattgtatttctgaaaatggc

SEQ ID NO: 913778 - DNA, 120 bp, Artificial Sequence
  ENSG00000227155_15 (sequence is synthesized)
cacaagaatgtgctctcctagaaccttgcccatgcccccatcaagaggtggatggttctttgtgacagccacactgaataggatgtggtggaggtggtactgtgtgactggctaataaaa

SEQ ID NO: 913779 - DNA, 120 bp, Artificial Sequence
  ENSG00000227155_16 (sequence is synthesized)
gccgcccggtggctttgcttcaggcggaagtccgcgtgctttgataccctcagggggcacttacaggctaggtggacacagacactagtcccacttctttggttatctgtattctgagtc

SEQ ID NO: 913780 - DNA, 120 bp, Artificial Sequence
  ENSG00000227155_17 (sequence is synthesized)
aacccggtgcatcacaggcattcctgacagagtctcgtggtcctgctggtccactcagtggtactcagtcctcctcattctcggggataggttccaagacccccaggggatgcctgaaac

SEQ ID NO: 913781 - DNA, 120 bp, Artificial Sequence
  ENSG00000227155_18 (sequence is synthesized)
caaacccaaatggacaacaggagagaccatgtggagagaaggagagttagagagaggaggagcccctgctgtttgagtattctcagcccagacaccagacatgagtgaggaagcattcag

SEQ ID NO: 913782 - DNA, 120 bp, Artificial Sequence
  ENSG00000227155_19 (sequence is synthesized)
attcaggcatgctcatgagaacacgctgctccagctggacttagaggaacccggtgcatcacaggcattcctgacagagtctcgtggtcctgctggtccactcagtggtgaaatgccatc

SEQ ID NO: 913783 - DNA, 120 bp, Artificial Sequence
  ENSG00000227155_20 (sequence is synthesized)
acatccttcatactcatatttttaggaccataggagacccaatatatctgtctgtattgcaataaattacaaggctttgaccaaagacccagttcctaactgactgctcttgaagccagc

SEQ ID NO: 913784 - DNA, 120 bp, Artificial Sequence
  ENSG00000227155_21 (sequence is synthesized)
ttagaacttgcctctctcaatttgaggcagtgtatgtttttaagtttctaaaaataagatattataagatttgtaacattacaatgactgccaatgcaaagaacctctgggactctagtg

SEQ ID NO: 913785 - DNA, 120 bp, Artificial Sequence
  ENSG00000227155_22 (sequence is synthesized)
catcagtggaatatcagcacattgatggacatgtggactatttggattcagaagacctggtttgagctcatctctgctgccaactgtctgtgtgaccttaagtaaaattatctcctctct

SEQ ID NO: 913786 - DNA, 120 bp, Artificial Sequence
  ENSG00000227155_23 (sequence is synthesized)
ggataagaatgtcctgagcttcaaatctcttccctgataaaaagagggctgctgctctcaaggaacttcagtcaaggggagtgggggaagacagtcccacacacagacaaaaaactaggg

SEQ ID NO: 913787 - DNA, 120 bp, Artificial Sequence
  ENSG00000227155_24 (sequence is synthesized)
gccgcccggtggctttgcttcaggcggaagtccgcgtgctttgataccctcagggggcacttacaggctaggtggacacagggctaggggtaagaatgcagcagtgaacatggttcctgc

SEQ ID NO: 913788 - DNA, 120 bp, Artificial Sequence
  ENSG00000227155_25 (sequence is synthesized)
actcatgaagcaaatgtatccactgtggtacaaaagagactgtaaaaaacaaacccaaatggacaacaggaaaagacagaagctgattgaggtcccagcttggtaacagtttgaagagtt

SEQ ID NO: 913789 - DNA, 120 bp, Artificial Sequence
  ENSG00000227155_26 (sequence is synthesized)
cagtcacagagtaaataaactaagactcaaaactggaagttaggtttgtggagttctgtcacaattatgatgacaataatgactctgtcttttctcctactactctcctcttccctgtct

SEQ ID NO: 913790 - DNA, 120 bp, Artificial Sequence
  ENSG00000227155_27 (sequence is synthesized)
cctgtccagccacgttgcctcctggctgttcctggaacactccaggtgattccaaaactcctcctagttaagaaacaatggatcaagcatcctcattttacagatcgaggaaactgaggc

SEQ ID NO: 913791 - DNA, 120 bp, Artificial Sequence
  ENSG00000227155_28 (sequence is synthesized)
tatattatgtttttttcctatacatacatacctatgataaagcttaatttacaaattagatagagtaagagattaacaacaattacagcaatatactgaaataaaagttatgtgaatgtg

SEQ ID NO: 913792 - DNA, 120 bp, Artificial Sequence
  ENSG00000227155_29 (sequence is synthesized)
acatatatgctgcagaaccctttcagggtgtatctgaaactacttctcttaaaggcaagctgtaactggtgccagtgagtactactatcttttatttaaattaaaaacaaatttaacatc

SEQ ID NO: 913793 - DNA, 120 bp, Artificial Sequence
  ENSG00000227155_30 (sequence is synthesized)
acttagtctttataagaatgagaaagtccagataagtataaagaagaaaatttaaaaatctaaatggtcggggtgtttgggggagcagaagaggaagatagaagattgtatctctctatc

SEQ ID NO: 913794 - DNA, 120 bp, Artificial Sequence
  ENSG00000227155_31 (sequence is synthesized)
cagacaccagacatgagtgaggaagcattcagaactccaggcagtgtgaccacctgaaaacttacacttcctagcctcccatgcagatgtggtcatgatggctggagccctagcaaccat

SEQ ID NO: 913795 - DNA, 120 bp, Artificial Sequence
  ENSG00000227155_32 (sequence is synthesized)
ctagaaccaggatggcatggcaaaggattggaaaagaaccagggtctctgatgactttatgaggccactacacagctctacatcgactacctccaatcttatttaatgaaaagacagaag

SEQ ID NO: 913796 - DNA, 120 bp, Artificial Sequence
  ENSG00000227157_0 (sequence is synthesized)
tttggaaagaaaaacaaaagtactaataatcaaactcaaggttggatagctttaagagtaaggaaaaaaagaaattactcatgaagttagaacactgaagaaatagaagtgagatggatc

SEQ ID NO: 913797 - DNA, 120 bp, Artificial Sequence
  ENSG00000227157_1 (sequence is synthesized)
accacaggaaaatcctgaatgaagcaaatgttttcttgagtacaaggatgtataattttaggaaagattgagctatttgccatcttgcttatgtatatgttgttggatttacttattatg

SEQ ID NO: 913798 - DNA, 120 bp, Artificial Sequence
  ENSG00000227157_2 (sequence is synthesized)
gattttaccactttagtgtcatggttagtgttaaagtacgtggggtgtgtgtctaattgatgtcatgcctatcccaggaagtcactaaggagcagccctgtcacaacagcctccaaagga

SEQ ID NO: 913799 - DNA, 120 bp, Artificial Sequence
  ENSG00000227157_3 (sequence is synthesized)
cagagagtgaaccacagaggaaattcgaatgcatgtacagtgggttccattaccagggagcctgagcttgggacaagaggagctcatcaccaccagaaaatactaccaacatgcccaaga

SEQ ID NO: 913800 - DNA, 120 bp, Artificial Sequence
  ENSG00000227157_4 (sequence is synthesized)
catacttttaaagaaaaagaaaaatggatggttctgaaatcacctgggtttgttttattacattatatcttctggcaagatcagtgatggcagatgtgattcagcaatagaagcatggct

SEQ ID NO: 913801 - DNA, 120 bp, Artificial Sequence
  ENSG00000227157_5 (sequence is synthesized)
gtactggaggggactgacaagaacgtttgcagtcggtagtgttcctcagtactcatcaatttgtgagccacaagaaattctagctctggaggcggatggtgggagtgaagcggaccagcc

SEQ ID NO: 913802 - DNA, 120 bp, Artificial Sequence
  ENSG00000227157_6 (sequence is synthesized)
ggccattccctgttgcctacctgtggtggctctgcccagtcatcggtgtccactgttcagcatgcattctttatggacaatcttattcaagaaaatagttgcaaaagagcaagacaaaat

SEQ ID NO: 913803 - DNA, 120 bp, Artificial Sequence
  ENSG00000227157_7 (sequence is synthesized)
tcaaatgatgtacacttgaacacttgcctacagaggtgacagttgccccaaaaagtttgctgtaaagtttggaggaggaagacacttcctgtcttgaaatataaatatgagtatcaaaaa

SEQ ID NO: 913804 - DNA, 120 bp, Artificial Sequence
  ENSG00000227157_8 (sequence is synthesized)
atccctttatagccctaacgtctgggacacctcagagcagcagagaaatcaccgttccccaggccttgccgggactacgaggcagcagagagcattgtggcaggacggtttttccttctg

SEQ ID NO: 913805 - DNA, 120 bp, Artificial Sequence
  ENSG00000227157_9 (sequence is synthesized)
aagggtggttaatgagcaatgtaggtgaagacccctgagagatacctgggcatcctgcccacccaaatagaagaccgcgttgagatggcagtcggagatggagcccatgaccagagagag

SEQ ID NO: 913806 - DNA, 120 bp, Artificial Sequence
  ENSG00000227157_10 (sequence is synthesized)
tcactatttttgtaaaaacagatttgatagtgcagcaaccttcgagcattctttaatcctggaactccaccatccaccctgaaaacattggaaaagaatacacaacaaaaaacacacaac

SEQ ID NO: 913807 - DNA, 120 bp, Artificial Sequence
  ENSG00000227157_11 (sequence is synthesized)
ctaaaacacacaacctaacaaaaaaacttcctaatgtgtacaaatgagaacactatcttccttactgtagtttgatttctaccaaattctaattttaagccagcagacaaacaggttgtc

SEQ ID NO: 913808 - DNA, 120 bp, Artificial Sequence
  ENSG00000227157_12 (sequence is synthesized)
ctatctattcccttaggctaaggctaaagggagaaacaggcatctcatttctaactcctggtacatttggacttcgggcctctagagcaccaaaaagtttgatgggaccacgccaagggg

SEQ ID NO: 913809 - DNA, 120 bp, Artificial Sequence
  ENSG00000227157_13 (sequence is synthesized)
gtcccctgtaaccaggagttggttaatatcctcccatccctcattcagacagggaacagaggcaaaaaaaaaaaaaaaatagcagggcaacaaacgctgccttctgcaaatgctctgtaa

SEQ ID NO: 913810 - DNA, 120 bp, Artificial Sequence
  ENSG00000227157_14 (sequence is synthesized)
taaattgttctttcagtggtgcagaagacggatttttctttcctttgcctctttcctcctttgcggggaagcaccaatgggcggcttgctttcccacctggccctggctgcctgtgccca

SEQ ID NO: 913811 - DNA, 120 bp, Artificial Sequence
  ENSG00000227157_15 (sequence is synthesized)
taaatttgcctatgcaatgcctgtttacgggtcgctgatggaacatggagacggtgcattttgtaagcgccgggtagataatcatggtaattgatgtttggagctgtgagctcctaggag

SEQ ID NO: 913812 - DNA, 120 bp, Artificial Sequence
  ENSG00000227157_16 (sequence is synthesized)
cacagggtctctttctcccagtgaggccctgctctctgttatcagcccagcccataattaaatatcactcttttacaatatgtttcaggctccttaatgagtctaaagcagaaatagtca

SEQ ID NO: 913813 - DNA, 120 bp, Artificial Sequence
  ENSG00000227157_17 (sequence is synthesized)
acacaaagtaaaagcgctgccagttcatttaggtctgaatgattttaagaaggaaaatgagagagagaaagaaagcataatcaaaagcctacatgacaaagagttgacagtcagattctg

SEQ ID NO: 913814 - DNA, 120 bp, Artificial Sequence
  ENSG00000227157_18 (sequence is synthesized)
tggtaaatgattccagagtcgctggcctgcggagacgctgaggaagtccccagcagacctgattaattccagtctctccagctgccaggggagcagagggaagtcactaaggagcagccc

SEQ ID NO: 913815 - DNA, 120 bp, Artificial Sequence
  ENSG00000227150_0 (sequence is synthesized)
tgacctgaaaacaggaccagtaaccccagatcaaccgccagccacaccctgggcaccatctcccccagaagtcctttggtgccccagggccagcacctgctaaggttctccagcccctca

SEQ ID NO: 913816 - DNA, 120 bp, Artificial Sequence
  ENSG00000227150_1 (sequence is synthesized)
aatccccaatggggtttcctgtgcggctctggagggctctggttccctcggtctccagagaaacatgtgaggacagcgatggttttgcagtttctggcgccgcccgcaacacaactccag

SEQ ID NO: 913817 - DNA, 120 bp, Artificial Sequence
  ENSG00000259408_0 (sequence is synthesized)
aaacaaacaaacaaacaaacaaaaaacccaaaggttctttggactggtggatatccctaccttatactatttcataaataatcatgcactggataattgtcacaactttgaagttactct

SEQ ID NO: 913818 - DNA, 120 bp, Artificial Sequence
  ENSG00000259408_1 (sequence is synthesized)
actttgaagttactctaagaattatgatggtggagctgagtcacactttttattacagagaattctgcccaggccctttgcagtgtcctagggcacgcttacttccaggctttaggagtg

SEQ ID NO: 913819 - DNA, 120 bp, Artificial Sequence
  ENSG00000259408_2 (sequence is synthesized)
agagttcactggcttaagtgaggagtacacaggacctgcacatctgacctctctcaaggactaggcattgagctgggagataggaagatcaacaggatcagagctttgccttcaaggagc

SEQ ID NO: 913820 - DNA, 120 bp, Artificial Sequence
  ENSG00000259408_3 (sequence is synthesized)
caaaagggagtgggtccattctgttctgcatcagtagaaaccatacctgtttgccattgtgagttacagatgacagaatggtcctcagtgtcttgaagcccattgcgatgtccaatagaa

SEQ ID NO: 913821 - DNA, 120 bp, Artificial Sequence
  ENSG00000259408_4 (sequence is synthesized)
cacaacagttccctattctccagagaccacccaagttggtgataaggaaatggagacctcctactattcactgacctctcatgccgcctctcccccaacagggtggcagtatttaaaaaa

SEQ ID NO: 913822 - DNA, 120 bp, Artificial Sequence
  ENSG00000259408_5 (sequence is synthesized)
aaatgttttttttttttggtttgttaaagcagtttctttgtcttaaacatttaaatgccacttgaaagcaaaaacaaatgctggtgttacagagtaaactgctaatattttatctctggg

SEQ ID NO: 913823 - DNA, 120 bp, Artificial Sequence
  ENSG00000259408_6 (sequence is synthesized)
ggatgaaaataacaattattttgactttcttccttgtacattgctccttgatttttttatgcactgcatttaaattgaaaataaaacaaataaaaatcaagccatgcgctctctgccaca

SEQ ID NO: 913824 - DNA, 120 bp, Artificial Sequence
  ENSG00000259409_0 (sequence is synthesized)
ttgaaacaggccaggcagaggccaggctgagtcctccaccctcattgcaggagtccagcgtctggcctggggacttccctcaccagatctgttgaccaacttctagaaacccctgctttg

SEQ ID NO: 913825 - DNA, 120 bp, Artificial Sequence
  ENSG00000259409_1 (sequence is synthesized)
cccccaccctcagcaagccacaaagcctccaccgtcttcagctggttacaggtcaggatccaggtcgggggggaggggcaggtctcctgaggctagacttgaggaatgtttaggccaact

SEQ ID NO: 913826 - DNA, 120 bp, Artificial Sequence
  ENSG00000259409_2 (sequence is synthesized)
caccaggcagaggaggaaggggccagtttagatcactaagccaattaaaaacaaccagccagaaagaacctttctccttcctgacagctactctgccagctacctcctgggttttgttgg

SEQ ID NO: 913827 - DNA, 120 bp, Artificial Sequence
  ENSG00000259407_0 (sequence is synthesized)
tcaacctcccgagtagctgggattacaggatttagcacacaaatgtccatagagcatttgcaaacaagcaatgagagcagaggtatccggtgtatcccaaccaccctcctgcggatcccc

SEQ ID NO: 913828 - DNA, 120 bp, Artificial Sequence
  ENSG00000259407_1 (sequence is synthesized)
ctgcggatccccacgcctcccctgcgcatcccatgcgggcagcagcacacaggagaccacaggctaagcctgaaccacaggcagactcaccaggcacgccccatggcctgtgctcatgcc

SEQ ID NO: 913829 - DNA, 120 bp, Artificial Sequence
  ENSG00000259407_2 (sequence is synthesized)
ctcaggtggtgacgaaaggacctggggccgcccaggaggactggacgctgaggagcagtgggcgtccagtgtaagagacttgtgcacgcggggacagcaggagaggtgggctggccagga

SEQ ID NO: 913830 - DNA, 120 bp, Artificial Sequence
  ENSG00000259407_3 (sequence is synthesized)
tcaggaggcagctgcctcagcagagaggaagagggtcagcagaagatctcttcaccctctgctgatacttctgacgcgggaccatctggaaatgtgaaaaccaagaatgaaaaaaattca

SEQ ID NO: 913831 - DNA, 120 bp, Artificial Sequence
  ENSG00000259407_4 (sequence is synthesized)
aactgctcctttcattgaacttcctccccatcccaaagtcttctgtaatgcaaacaggcgactggggcttatgggcaattaactcttctgcgcaccggggtttctgaacaaatttggtta

SEQ ID NO: 913832 - DNA, 120 bp, Artificial Sequence
  ENSG00000259407_5 (sequence is synthesized)
ataaggttcttaagtgatatccttcactgcctaatgctccctttaacttttaaataatcactagaatttatgaagaggccaggaaaatgtactttttctttaacctcccacacagaaagg

SEQ ID NO: 913833 - DNA, 120 bp, Artificial Sequence
  ENSG00000259407_6 (sequence is synthesized)
agagatcaatcctaaagagaaggattcaggggaaaaagtggtacatgaacagggaggcatttagtggaattcagccgcaggctctgtggccgctggcacattagttagcctctgtgagcc

SEQ ID NO: 913834 - DNA, 120 bp, Artificial Sequence
  ENSG00000259407_7 (sequence is synthesized)
tcagtttcctcacttctcttggggttagcagtgccaacttcatacagtcatttgagggttaaatcaccaaatgctagctgttaccaatgactactctaggcccagaaaggcaaggaggac

SEQ ID NO: 913835 - DNA, 77 bp, Artificial Sequence
  ENSG00000259402_0 (sequence is synthesized)
cctcctcattgccttaaaagcatccagtttaattaaaataagatttaaaacttataagtatttatggtctgtgtcac

SEQ ID NO: 913836 - DNA, 120 bp, Artificial Sequence
  ENSG00000259402_1 (sequence is synthesized)
gctggagtgcagtggcacagtcttggttcactgcagcctcgacctcctgtgctcaagcaatcctccctactcggccccccagtagttgggactacaggtgcacaccagcacgcctggcaa

SEQ ID NO: 913837 - DNA, 86 bp, Artificial Sequence
  ENSG00000259402_2 (sequence is synthesized)
cctcccaccttggcctcccaaagtgctgcattacaggcatgagccactgtgcttggctcaagaagaaaggatattatttcacagag

SEQ ID NO: 913838 - DNA, 120 bp, Artificial Sequence
  ENSG00000259403_0 (sequence is synthesized)
actgccaatgaaattaaatgtgtggctacaacatcaaacaaccagaatttaagaattattacagaacagaataaagtgagggtctgaagaattatccataaagcatgatcctttcagaac

SEQ ID NO: 913839 - DNA, 120 bp, Artificial Sequence
  ENSG00000259403_1 (sequence is synthesized)
gctgggctttaactgaacacatagctacccaactaaagcatcttttgcagctagaaatggccatgtgatcaagtttggaggaactagaggggttggcaagtgatgagtgtgactttggac

SEQ ID NO: 913840 - DNA, 120 bp, Artificial Sequence
  ENSG00000259403_2 (sequence is synthesized)
tgcttcccaggacttctttcccacttcccacaggctggagagtgggcacccaggctttagtcacaaccaccaagatgaccctgtggggaggtgacagggagagaagatggacctcttgga

SEQ ID NO: 913841 - DNA, 120 bp, Artificial Sequence
  ENSG00000259403_3 (sequence is synthesized)
gaggagcagccacttctccagctatggactgctgacataagtactatttagagagaggaaaataaactatcccgtgtaagtcagcccatatttgagtgtctttgtataatagtttagcct

SEQ ID NO: 913842 - DNA, 120 bp, Artificial Sequence
  ENSG00000259403_4 (sequence is synthesized)
tttagcctgtattctaattagtacaaataattattattgtgtcctctttattcattcaacatatatataaatattaacagagcttagatttcagtaatatgtcgacatgaaataaagtaa

SEQ ID NO: 913843 - DNA, 120 bp, Artificial Sequence
  ENSG00000259403_5 (sequence is synthesized)
ggtagcttctacaaacagaaatttactgccaatgaaattaaatgtgtggctacaacatcaaacaaccagaatttaagaattattacagaacagaataaagtgagggtctgaagaattatc

SEQ ID NO: 913844 - DNA, 120 bp, Artificial Sequence
  ENSG00000242268_0 (sequence is synthesized)
attacaggcatgagccaccacccccaggccacttgtgtcttaattcctcttgatagtgcattttagtttgtgtcacccacctctgtaagttgaaatacttttaccatttcagtaacttga

SEQ ID NO: 913845 - DNA, 120 bp, Artificial Sequence
  ENSG00000242268_1 (sequence is synthesized)
ttgaaaacaaactgctcatttttcttctttatcagttatgaaactaaatatataaaatcttatccctagtcatccaggattgactgctccttcttcacaagggtctctgcaggtcccagt

SEQ ID NO: 913846 - DNA, 120 bp, Artificial Sequence
  ENSG00000242268_2 (sequence is synthesized)
ataccaaacacacagtattaatcaatattcatggagtgaatgaaaaaaatgaatgaatgaaagtgatatatttgctaccttacagataacatgtgagtagttctttgttttaattttaac

SEQ ID NO: 913847 - DNA, 120 bp, Artificial Sequence
  ENSG00000242268_3 (sequence is synthesized)
ttgttttaattttaacatttattaagcttttgctatctagatacagttactgtatctgaagtagagaaaaatgttgtttttccggctgagcaccatggcttacgcctgtaatcccagcac

SEQ ID NO: 913848 - DNA, 76 bp, Artificial Sequence
  ENSG00000242268_4 (sequence is synthesized)
aggtgacagagcaagactcctttaaaaaaaaaaagagaaagagagaaagaacggaaggaaggaaggaagaaagaaa

SEQ ID NO: 913849 - DNA, 120 bp, Artificial Sequence
  ENSG00000242268_5 (sequence is synthesized)
gaaagagagaaagaacggaaggaaggaaggaagaaagaaaggaagagaaaagtgttgtgttattttatttttacaaaattttattacaggttgtccccagataagacatggcctcaatta

SEQ ID NO: 913850 - DNA, 120 bp, Artificial Sequence
  ENSG00000242268_6 (sequence is synthesized)
tcagctaaaatgtacttgtaaaaatggtggcctttgcaattctgcagatagaaggtctatctgtggccttgggtggacaggaaattattgtgaaaaaagcaagttgattcactgcctttt

SEQ ID NO: 913851 - DNA, 73 bp, Artificial Sequence
  ENSG00000242268_7 (sequence is synthesized)
gaaattattgtgaaaaaagcaagttgattcactgccttttttccctcaataaagatctacttattgaggtggg

SEQ ID NO: 913852 - DNA, 89 bp, Artificial Sequence
  ENSG00000242268_8 (sequence is synthesized)
caaaaggatctacttttgagaatactgtcattggttgataaaatacagcagaaacttgtgaagaagctattttccatattcacctggca

SEQ ID NO: 913853 - DNA, 120 bp, Artificial Sequence
  ENSG00000242268_9 (sequence is synthesized)
tgactgtgaaggagaaaccttctgccacccaaaaactgaaaaatgcctctgcccccgtgggagaactggagccagatgtgatgctggttagtctcctgtattgggcgttcagcatggatg

SEQ ID NO: 913854 - DNA, 120 bp, Artificial Sequence
  ENSG00000242268_10 (sequence is synthesized)
ttgcctttttctgacctcaagacaactatccaactttccctgtgtccttcacgatgcaaccactaaagctctactgaagtctctaattctgagaaggcaccttaaaaatttgaatctaat

SEQ ID NO: 913855 - DNA, 120 bp, Artificial Sequence
  ENSG00000242268_11 (sequence is synthesized)
aacttgcttggatcatatggctcctaagtggagcagaactcaggtttgcctcattccagaggccacgttcttgactacagcatgcatgcaattataaaacactaccatcgaggatgaaaa

SEQ ID NO: 913856 - DNA, 120 bp, Artificial Sequence
  ENSG00000242268_12 (sequence is synthesized)
tctatacccgtaaattttggaaagtaataaaattttgatgaatccaagtcagaatgagttcatactccagttgctaatcaagacacacacaggaggaagaatttcgcagaaacatgactt

SEQ ID NO: 913857 - DNA, 120 bp, Artificial Sequence
  ENSG00000242268_13 (sequence is synthesized)
tgaatccaacatacgtcctgtaccaattgaatggtgctggccactagtttaacacatctgtctcaggaagggaataatgatgttctatctaccttatgggttaatgtgaacattttcata

SEQ ID NO: 913858 - DNA, 120 bp, Artificial Sequence
  ENSG00000242268_14 (sequence is synthesized)
ttacgattattaagcagtacaggttgtttggctaattatatatgaatcaggtgaaggcatttcgtaaattatttgcctcagtcttggacttaggaaaccttagcttgcgtcccaactcta

SEQ ID NO: 913859 - DNA, 120 bp, Artificial Sequence
  ENSG00000242268_15 (sequence is synthesized)
cctctgggcagttttgtgatccaagcacacttaatcttttgaacttcatttattcatctggacagagagggacaaaattcctcactcaaagttacagtggtttaaatgaaaacaaaaagc

SEQ ID NO: 913860 - DNA, 120 bp, Artificial Sequence
  ENSG00000242268_16 (sequence is synthesized)
ccatcatgtggaacacatagatgataaatataagttgaatctgaactatagaatataagttttccacctgttaatagtaataccattaacaacaataataatggcacacagatttcacaa

SEQ ID NO: 913861 - DNA, 120 bp, Artificial Sequence
  ENSG00000242268_17 (sequence is synthesized)
tcttaatgttggggctcagaacataataacccaaaagatggcaccttagtgtactattttaagttgaaggaacttgaaaaaaatcacagaagcaggagtctctgacctccctcccttctc

SEQ ID NO: 913862 - DNA, 120 bp, Artificial Sequence
  ENSG00000242268_18 (sequence is synthesized)
ccctgaagaccctaatgtgacaggtgttctgccctgactgtgaagagaagaagtgtcacacctctcagagaggctaagacgaatctggacagacagtccttgctatgtttcttccagttt

SEQ ID NO: 913863 - DNA, 120 bp, Artificial Sequence
  ENSG00000242268_19 (sequence is synthesized)
attaccattagatcatacacttttgtcctccaatcatacttcttctgcacaactattcataaaatacagagtttccctgtgtttttggctcttcatttctgacagcttctatgtcatgta

SEQ ID NO: 913864 - DNA, 120 bp, Artificial Sequence
  ENSG00000225620_0 (sequence is synthesized)
cactacaggcaagaacagcaaacctgggagaaactgactctataaccagtggaagaaaggctgcgtagccatcgccggatctctaggggaaaagagaagacacagagacacagacctgcc

SEQ ID NO: 913865 - DNA, 120 bp, Artificial Sequence
  ENSG00000225620_1 (sequence is synthesized)
ggaatccagagcccacctgcccagagaggctcctcctgatttccctggctctgggcacccccttaaaagccctttatgccatctttcctttcagtcaaatgatgcaggatttgggaccag

SEQ ID NO: 913866 - DNA, 120 bp, Artificial Sequence
  ENSG00000225620_2 (sequence is synthesized)
acagcctttgctcaaatccttccactgttacctaccagcttggtggccttggagaagttatttccctgttctggatgtgcttcctcttctataaactagagacgctacaaattcccacca

SEQ ID NO: 913867 - DNA, 120 bp, Artificial Sequence
  ENSG00000260008_0 (sequence is synthesized)
cgtggttgaaattgtataaacgaggaatagtaaattacaaaatcttggttgatgatacagaagtgcttacagaacatagtcactccaaagaccctttcactccacttatcaaagtaattt

SEQ ID NO: 913868 - DNA, 120 bp, Artificial Sequence
  ENSG00000260008_1 (sequence is synthesized)
tgtcctcagtttaatggcaggtgaaacaatattgaacaaagcagcctctgctgtatctgaagccctttagttagtgttcatagcagtaaatgctctagtaaagggacagcttctattcca

SEQ ID NO: 913869 - DNA, 66 bp, Artificial Sequence
  ENSG00000260008_2 (sequence is synthesized)
tagcagtaaatgctctagtaaagggacagcttctattccaatcccaggttttcaatcactttggtt

SEQ ID NO: 913870 - DNA, 90 bp, Artificial Sequence
  ENSG00000260008_3 (sequence is synthesized)
cagccacctgagtagctgggactacaggaacatgccaccacacctggctaatttttatgtatttttttttttgtagagacagggtatctg

SEQ ID NO: 913871 - DNA, 87 bp, Artificial Sequence
  ENSG00000260008_4 (sequence is synthesized)
gcacccggcccactttggttcctaaagttttctttcaggtaaagtttttaatgcatagtttctgcccaaaggttttgtttgtgtgga

SEQ ID NO: 913872 - DNA, 120 bp, Artificial Sequence
  ENSG00000260008_5 (sequence is synthesized)
ttaatgcatagtttctgcccaaaggttttgtttgtgtggactgattattggataagagaggaagggactaccaacagggtccctgaggctgtgcttagaaagagagggctgctgcaagga

SEQ ID NO: 913873 - DNA, 120 bp, Artificial Sequence
  ENSG00000260008_6 (sequence is synthesized)
gaggctatgttactacctgtgaaataatctgtgaacatgggacaacaatgacaactgacattgatgtggaactcactgcacgtcccaaactgggctaagtactttatatccattgactca

SEQ ID NO: 913874 - DNA, 120 bp, Artificial Sequence
  ENSG00000260008_7 (sequence is synthesized)
tttaatgccccaacaactatgaggtaggtgttattacccctgatgctaatattaaagaacaggaaataaataacttgtccaaaacctcacagctagtaaatggcagaactgggacctgaa

SEQ ID NO: 913875 - DNA, 120 bp, Artificial Sequence
  ENSG00000260008_8 (sequence is synthesized)
gttaaatgcacttgacatttaggagtgggaacaaatccaagaactagtcatgggtgtcatttactctgatcctttttttcagacaggaaactgggggttcagagtagttgattggaatct

SEQ ID NO: 913876 - DNA, 120 bp, Artificial Sequence
  ENSG00000260008_9 (sequence is synthesized)
tctgttagaattttgagtgtctgaggcctgctcctttggccgagccctaccacaccaagtgatacagatccttcagaattctcctgggcatgttctggctgaaggaagaaattacctttt

SEQ ID NO: 913877 - DNA, 120 bp, Artificial Sequence
  ENSG00000260008_10 (sequence is synthesized)
tgctcacggactttttccttgcttaatcctacttatacctttgtttcactagcattgtagacaaaatcattaaaacaagaaagccagatttccttagaatgggcttgtgcatttaaaatt

SEQ ID NO: 913878 - DNA, 120 bp, Artificial Sequence
  ENSG00000260008_11 (sequence is synthesized)
agactgatgttgcacaatcctatgaatatatttaaaaaaacagtgaattgcttaaatatactaatatgtacaactattgcaaaaactgtatggtatataaattatatctcaacaaggatg

SEQ ID NO: 913879 - DNA, 120 bp, Artificial Sequence
  ENSG00000260008_12 (sequence is synthesized)
ctttaaaaaaaaaaaacccagagtgtatgacttaaaaaacatttctattgtttttgagtggcttccagaagggctccttgtacatcaggtgcctgggatgacctccttgcccattcattt

SEQ ID NO: 913880 - DNA, 120 bp, Artificial Sequence
  ENSG00000260008_13 (sequence is synthesized)
cttattcagtccacattaacggagtccaccgttgggccaggcacagggatagcaggggtagggacccagctccttgaggatgaaagacaggtacagaggcatgaatgcttgtacctgaag

SEQ ID NO: 913881 - DNA, 120 bp, Artificial Sequence
  ENSG00000260008_14 (sequence is synthesized)
acgcactaattttttgggttgcggcttccagtgactattgcaaattcgagtactaaaaaagttgatgtgatttcactatttggaaaatgtagtgtttttgtttcttttaataagttacac

SEQ ID NO: 913882 - DNA, 120 bp, Artificial Sequence
  ENSG00000260008_15 (sequence is synthesized)
tgagttacagacctggtctcaaagcttcaattacagtaaccgtttacccctctcaagtgagtttttgcagactaacagataagtgaaacaattacaaaataaagttaatgctgaaaacaa

SEQ ID NO: 913883 - DNA, 120 bp, Artificial Sequence
  ENSG00000260009_0 (sequence is synthesized)
ccaggctctggctcactccctctgccgacatctgaggaaccccccaaagccgggtctgcaacacccctcctgagtcctcccccactgccctgccacagcttcttggtgggactctagggg

SEQ ID NO: 913884 - DNA, 120 bp, Artificial Sequence
  ENSG00000260009_1 (sequence is synthesized)
gcgagggggtgcaactggacacccatttcacagatgccccccccagccaactggtacatctaatgcagcacaaagctcagaccgccaagactgggaacggggaccccagctctgccacct

SEQ ID NO: 913885 - DNA, 120 bp, Artificial Sequence
  ENSG00000260009_2 (sequence is synthesized)
aagctgaagtagaaacgcgcttggagcagggtgtggcatacaggaagcaccatgcagcataaacacccttgagatcatccaagtagtggcgagtatcggcagctcattcgtcttattgct

SEQ ID NO: 913886 - DNA, 120 bp, Artificial Sequence
  ENSG00000260009_3 (sequence is synthesized)
cagtggtgttccgcggtgtggaggggccacggtttgctgaaccggtcgactatcgagaggcatctgcgctgtttccaatttggagctgttatgaataaagctgctacaggtttccatgtg

SEQ ID NO: 913887 - DNA, 120 bp, Artificial Sequence
  ENSG00000260004_0 (sequence is synthesized)
aaggaaaggtggtcattctgatgatcgatgactcacctgtccagctaatggctagcctgtcatgccatgacctgacccacactcagagcagagggtaccctaatgtggccacagcaaatt

SEQ ID NO: 913888 - DNA, 120 bp, Artificial Sequence
  ENSG00000260004_1 (sequence is synthesized)
agcacagagaccacagagagaaggctggccatgtggaacagacctcagagaagctgcttacaggaggcaacatctaagttaattttgaagaattagaaacagttttccagatggagagac

SEQ ID NO: 913889 - DNA, 120 bp, Artificial Sequence
  ENSG00000260004_2 (sequence is synthesized)
tggaaaacacatgctacagagaaagaatgtgctcaaagatccaggattgcaagaaacacttaaaacctcttcatcttgaagccccatctcattttaaaccgaatataaatacatacatag

SEQ ID NO: 913890 - DNA, 120 bp, Artificial Sequence
  ENSG00000260005_0 (sequence is synthesized)
acatttctgaagccctgccacctgccatccctcgtagggattcaagtccaaatagccagagcctctggcagaggagatgggggaaactgaggtagccctagggtcgtcctctcaagtcaa

SEQ ID NO: 913891 - DNA, 120 bp, Artificial Sequence
  ENSG00000260005_1 (sequence is synthesized)
gctgcctggagactgtagcagctacggttgaggctgctcaggaagcacagaccgccccagacagcagctgaagctgaagactccagggccaggccatcgggtcaggcgttcaggaacgcg

SEQ ID NO: 913892 - DNA, 120 bp, Artificial Sequence
  ENSG00000260005_2 (sequence is synthesized)
aaagctgacggctctgagccaggaggctctttggctgctgtcctctgggacgatgtttggggggcgcggggagcatcaggacaggactctcccgcagcagccccagcccccaccaggcgg

SEQ ID NO: 913893 - DNA, 120 bp, Artificial Sequence
  ENSG00000260005_3 (sequence is synthesized)
ggacaggccaccagctccatgccagcaaacaaggagtcgcggctccacgcacagctgctggggcctctctttgggctgtccgtgccccctgggatccgttcaggtctccaccgcctgctt

SEQ ID NO: 913894 - DNA, 120 bp, Artificial Sequence
  ENSG00000260005_4 (sequence is synthesized)
tctgccagtctggcctcggcctcgctggggtctccgggggctggaatgggggaggcatctgggggtggggtgggcacagggctggacggcatcccagatgagggagcagggctccgggac

SEQ ID NO: 913895 - DNA, 120 bp, Artificial Sequence
  ENSG00000260005_5 (sequence is synthesized)
gagaccggggttgaactcagaggctgcaggaagacctggctcccagggagaggcacagcgtcggtcagcagacaaatggacaccctccccgtcataacccgccaggcactgccggaggga

SEQ ID NO: 913896 - DNA, 120 bp, Artificial Sequence
  ENSG00000260005_6 (sequence is synthesized)
gtgaacacgtggcctggcacatctgggcatttccaactgttggacgcagggttcttccagcatgcccgttttagaaaccccactatgaggttcgcctgcggtggtgcgaaccccaggctc

SEQ ID NO: 913897 - DNA, 120 bp, Artificial Sequence
  ENSG00000260005_7 (sequence is synthesized)
actcgtcgctctgactgaaagccagggagaaaacaggaagaaagaagctgggaatgcccacaggcagagggaaggtgccagggcctggcggccgggagaggcctccccgtgtgattccag

SEQ ID NO: 913898 - DNA, 120 bp, Artificial Sequence
  ENSG00000260005_8 (sequence is synthesized)
tggccgccaggcagttcagagtgttcaagtgcacagagatgaatggaaccatttctgccctccggagcttgggagttgagcatgagctgtgtcatgggtggcaaactgcatgtgcagtca

SEQ ID NO: 913899 - DNA, 120 bp, Artificial Sequence
  ENSG00000260005_9 (sequence is synthesized)
gggagggcttcctggaagaggtaagtgtgaggccaagacacaagggcaggaacattaaggcagcggagtctgggggcttccaggaataggtagaggccagtgtactgtgagtgctgcaga

SEQ ID NO: 913900 - DNA, 120 bp, Artificial Sequence
  ENSG00000260005_10 (sequence is synthesized)
gtttgggtggaaggcgggaaggcaatggggaggtgaggaccctgacttgctgctgctccctctgccagcgggacagggacttgagagggggtccgggaagggctgaccaggcgccgggca

SEQ ID NO: 913901 - DNA, 120 bp, Artificial Sequence
  ENSG00000260005_11 (sequence is synthesized)
gggacggggtggccgtggactgcagcgtatctcccactgtacccttggaccccggtgtgcgtgtggcctccgcagctgcccaccttggtggccttgttggtcacaggtcccgggctgccc

SEQ ID NO: 913902 - DNA, 120 bp, Artificial Sequence
  ENSG00000260005_12 (sequence is synthesized)
atgctgagctcctgcagccacggccgggtgcggaggaggatgtgctcctgggggaggaggtcgctgctccccagggaggcgatggcacacagcgccctctgcgggtgaagggaggggaca

SEQ ID NO: 913903 - DNA, 120 bp, Artificial Sequence
  ENSG00000260005_13 (sequence is synthesized)
tcagcacccatggggcagcaggtccacgccagggaggcctatttggccatctctctccctcttcttcctcctcatcaatgactggagtgccaggaggccccagagacagctccaccacag

SEQ ID NO: 913904 - DNA, 120 bp, Artificial Sequence
  ENSG00000260005_14 (sequence is synthesized)
ccctgtcctcaccgccttacaccccggatcccagacaccacagccctgtcctcaccaccttacacccccgctcccagacaccagagccctgtcttcaccgccttacaccccagctcccgg

SEQ ID NO: 913905 - DNA, 120 bp, Artificial Sequence
  ENSG00000260005_15 (sequence is synthesized)
acaccagagccatgtcctccccggctcctggacagaccccagcgagaagcacgtgacctgctgccccgattgccttaccttcattcctccgcacgccccccgacacacgcacacacgtgt

SEQ ID NO: 913906 - DNA, 120 bp, Artificial Sequence
  ENSG00000260005_16 (sequence is synthesized)
ccacactttcatgtgcatgcacacacacacaggcacatacatacacaaccacacacatgcagtcatgtacacacacacacagatgtgtgcataccacacacgtgcacaagtgtgtacaca

SEQ ID NO: 913907 - DNA, 120 bp, Artificial Sequence
  ENSG00000260005_17 (sequence is synthesized)
ccgcacacatgcacgagtgtgtacacacacaggcatacatacacaggcatacacacccacacgcacacacacaggcatgtgcgcacgcacagccacacagaggaatgttcacacacaggt

SEQ ID NO: 913908 - DNA, 120 bp, Artificial Sequence
  ENSG00000260005_18 (sequence is synthesized)
tcacgccctcccgcccgcgtgtgcagctcaccagctgcgtgcattcactggtcccacgcaggtggcaggtcagcagctgcagcacggcctcacagttgagcagtccacacctgcacagag

SEQ ID NO: 913909 - DNA, 120 bp, Artificial Sequence
  ENSG00000260005_19 (sequence is synthesized)
gggacacctgggtggcgggtgcggcccgttccctcctccctcgcccacggttggggctgaggcagagcagggcgggtccgggcgcactcacgctttgatgaagtgctgtgcctcctcgcg

SEQ ID NO: 913910 - DNA, 120 bp, Artificial Sequence
  ENSG00000260005_20 (sequence is synthesized)
gctcaggaaggcgcgtggtccccgagtcacagtcctcaccaagctcaactcctgctgacagtcactcagggccaccacctcgaccctgccagggggaatggccgggtcaagggtgagtgg

SEQ ID NO: 913911 - DNA, 120 bp, Artificial Sequence
  ENSG00000260005_21 (sequence is synthesized)
aggccatgcccccactcctgtctcgcatgggggagaacctggagagcaggagccgcgctgggagggggacagtgtggtgcctccgagacctctcccacatatctggcagctcccgctcac

SEQ ID NO: 913912 - DNA, 120 bp, Artificial Sequence
  ENSG00000260005_22 (sequence is synthesized)
ctttctgccaggtcacccggctcccggctggcccctgaatggctgtcgctgccggaatgactgcccgagtccgagaccctgctcaggtcgctgttctgggaggaattctgagagctgggg

SEQ ID NO: 913913 - DNA, 120 bp, Artificial Sequence
  ENSG00000260005_23 (sequence is synthesized)
ccgctgtccagctcatcccagccccctccggcctgcccaggctgatgcctcacagctggaggaaacaggacagccggtgagatccctggggcttcaggccagccccatgcccacctcccg

SEQ ID NO: 913914 - DNA, 120 bp, Artificial Sequence
  ENSG00000260005_24 (sequence is synthesized)
gggccctggaccaggaggcctcgggggctgagtcctgagctgaggatgggtggccaccttggctccagcttcagcaaacaccagccccatgggcatgtgcttccgccgcgggtcccaccc

SEQ ID NO: 913915 - DNA, 120 bp, Artificial Sequence
  ENSG00000260005_25 (sequence is synthesized)
ctcctgctgtgtgggaggccctgggatttgcctccgtggccgcaaagccccagcggtgacaggaaggagtgacccagaccccaaggggaggagccctcgcctcgatacctcggggacctg

SEQ ID NO: 913916 - DNA, 120 bp, Artificial Sequence
  ENSG00000260005_26 (sequence is synthesized)
gaatggccccggggagtaggttccccagggttgggggaccgtggctggctgaaggcatcatggcaggctggtaggtgtcaccccgcggcaggagcctccgggtactgggactctcgggcc

SEQ ID NO: 913917 - DNA, 120 bp, Artificial Sequence
  ENSG00000260005_27 (sequence is synthesized)
cggggcgcatggcgctggccaccacctctgcggccttctggatggtggagaggaaggcttcgcctgccgagcctgtacccgaggagagggagatgggacggccgcccagtgcggccccca

SEQ ID NO: 913918 - DNA, 120 bp, Artificial Sequence
  ENSG00000260005_28 (sequence is synthesized)
cccgcgttctctgggagcagggtgcccgcatcggctccctgctcaagcttggagaggtcggggtacatgctgcaggtagggaggcctcctggtgggccccaggccctctggaagctccca

SEQ ID NO: 913919 - DNA, 120 bp, Artificial Sequence
  ENSG00000260005_29 (sequence is synthesized)
gtggactccgctttggcattcccactcccagtgggcctggacaccaaagctcactgcagagttatgcctccgtccctctgtcctctgggggtgaaggtgtcctaaggggcttgggcttgg

SEQ ID NO: 913920 - DNA, 120 bp, Artificial Sequence
  ENSG00000260005_30 (sequence is synthesized)
ccttggctcagggagggtgtgtccagggctcggggaggggccggcctttcctgtgtgagttccctgtagaagctgccccgacaccaaagtgtcggcaggagccccaggctgtgcgcagga

SEQ ID NO: 913921 - DNA, 120 bp, Artificial Sequence
  ENSG00000260005_31 (sequence is synthesized)
cggcgtgacacagcctaacggtgagcagctacacaccgcccagggcccggcagcagggcacagctgggctgggggctgggtcccagccgcaggcagtggtgccacctgtggctctcctgg

SEQ ID NO: 913922 - DNA, 120 bp, Artificial Sequence
  ENSG00000260005_32 (sequence is synthesized)
cgctggtgagcagttgtccactggtactgccccacctcataacagctccacacgggactgcctgagtcacctgcaccacagccaggggcacagccctcggcccctctcagagtgggactc

SEQ ID NO: 913923 - DNA, 120 bp, Artificial Sequence
  ENSG00000260005_33 (sequence is synthesized)
acccctgccacggggcccagccctgacttcttgctcggcctggtttctctcatctgtccataaagcagccctggccacacctgccccacccccacgtcagcagccagagagagacagtgg

SEQ ID NO: 913924 - DNA, 120 bp, Artificial Sequence
  ENSG00000260005_34 (sequence is synthesized)
ggacagccccaggaagggttgaggccatgtaggggaggggacgggggacagcagctactagatggggcggcatggtccggcccccaccacctcctcatccccacaccctgagatgccaga

SEQ ID NO: 913925 - DNA, 120 bp, Artificial Sequence
  ENSG00000260005_35 (sequence is synthesized)
gcccatgcaggccctccccactcacccgtgcggccgtgttccttgctgtagccgaaaccctggagggtgctgtgcggcctggcctgggagcccatgcctgcagagggtcctccgttagca

SEQ ID NO: 913926 - DNA, 120 bp, Artificial Sequence
  ENSG00000260005_36 (sequence is synthesized)
gcaagccggcccccaccctcggccctgcccacggatggcacagacacccaggacactcaaggaggcagaaaccaggaggaggggcaccccgcagagcgacactgctcctgggctcacctg

SEQ ID NO: 913927 - DNA, 120 bp, Artificial Sequence
  ENSG00000260003_0 (sequence is synthesized)
attgatggtgccagccatatttctgcgggaatggaggcgtaaatgaacaccatatgtcacagcttatcacgtacggtaggagggaactgtgaatggcgcagcgtggcctacttaggaatg

SEQ ID NO: 913928 - DNA, 120 bp, Artificial Sequence
  ENSG00000260003_1 (sequence is synthesized)
ctgatggatcattcgcagccagcttttgttccagactgggcttcacctcactgtgttattgggctataagctccctcttctccaccaccctcctccagatggaaaagggagcccaaggag

SEQ ID NO: 913929 - DNA, 120 bp, Artificial Sequence
  ENSG00000260003_2 (sequence is synthesized)
atgaaagaaaaatcaagaaaaaaattagaaaaatggatcccctatttcaaatacacttctcaagcatctaagttactgcagcggagaggggctagagtaatcacgttgaatgaacaaatg

SEQ ID NO: 913930 - DNA, 120 bp, Artificial Sequence
  ENSG00000260003_3 (sequence is synthesized)
atgtccttctcagaactaattatttctgaaacttaggagtgttttttccatttcatgctgtagccagaattgggaagcatatgaatctctcatttcagaaagtgaaacttagtgtctcaa

SEQ ID NO: 913931 - DNA, 120 bp, Artificial Sequence
  ENSG00000260003_4 (sequence is synthesized)
atcaggagtccctaatccctggaacgcagacaggtaccggtccgtgtcctgttaagaaccaggccacaaagcaggagaggaacttgcaagaggaattctcggctgaaatgtcacagatag

SEQ ID NO: 913932 - DNA, 120 bp, Artificial Sequence
  ENSG00000260000_0 (sequence is synthesized)
ggaggagcagaggcggaaggtcccggcggcggcgaggatgcgccccagggcgggagcgggacgctccactttaccctggctgcccgcaacgggccaggcctgccgtctctacctctctac

SEQ ID NO: 913933 - DNA, 120 bp, Artificial Sequence
  ENSG00000260000_1 (sequence is synthesized)
ctgtgagttttttccctgcatttacttcagtctgccgcgtcttctccccgcccttctctgtaaggtaaatatgtggaggaaataattcctattaaaggtaaaggaaaggagagcaatttg

SEQ ID NO: 913934 - DNA, 120 bp, Artificial Sequence
  ENSG00000260000_2 (sequence is synthesized)
aatgaagaaacaggtagttgctatcgtcgttttcagccaaagccctctggctgctagagagtatacatggttctctggtgtcaaggcctgttttccataagctttctggattctcagctt

SEQ ID NO: 913935 - DNA, 120 bp, Artificial Sequence
  ENSG00000260000_3 (sequence is synthesized)
agttccctcaaagtgatctctgcaagtcggctcttcggtcagaagacctcctccaaaaacagaaagcccaaagattccctaactcgattgaaaagataggaagatacgaagaaaaactaa

SEQ ID NO: 913936 - DNA, 120 bp, Artificial Sequence
  ENSG00000260000_4 (sequence is synthesized)
cctaaagaattgtgtggtttatctgcaaagagttctagactaaaagccaacaatgcaaagatagtatgagttaatatgtttgttgtggctctcttctgccattcccgcttcctcaaggta

SEQ ID NO: 913937 - DNA, 120 bp, Artificial Sequence
  ENSG00000260000_5 (sequence is synthesized)
atgtgccccgatgcctggtagaactgttttgtagaggcagccaatagtgatccagttattgtctttactggtcagaccacctctgaagtgctgtgttcagcatttgaagactttaatcaa

SEQ ID NO: 913938 - DNA, 120 bp, Artificial Sequence
  ENSG00000260000_6 (sequence is synthesized)
cttccaggactcacctagaagagagaaaactactggactctctccaaatatgaaatgacctatcatgtgaagttgatttgtttcatgtgatgcaaacttcagggaacagatttaagatcc

SEQ ID NO: 913939 - DNA, 120 bp, Artificial Sequence
  ENSG00000260000_7 (sequence is synthesized)
tgaaaagaagatgcccttgtagcacgacccaaagaattgcctaccttagcatgtgtgaatacctcaaccacagaattttgcttcaaggagattctgaagctcacttaatagggacttggt

SEQ ID NO: 913940 - DNA, 120 bp, Artificial Sequence
  ENSG00000260000_8 (sequence is synthesized)
acaggggagccacacatcaacagaataattagttgatggttttgttaaagatatttccagtcttgagattacatgtgtctttggtcctggacttcatagagtttacaagttagttcatga

SEQ ID NO: 913941 - DNA, 120 bp, Artificial Sequence
  ENSG00000260000_9 (sequence is synthesized)
gacaagacaaatgcatcacaaaaataaataatgcaaggaggccaagtgataatgagaggtgctgataagtgctaggaattcacatgacagattattcccatcacagttccagaggcttaa

SEQ ID NO: 913942 - DNA, 120 bp, Artificial Sequence
  ENSG00000260000_10 (sequence is synthesized)
gggagaagagaggaactgaaaatagactacctagaactgccctatccattggggtagccaccagttaaatacgtctcttgacatttgaaatgtggcttgtccaaactgagacatgcaatg

SEQ ID NO: 913943 - DNA, 120 bp, Artificial Sequence
  ENSG00000260000_11 (sequence is synthesized)
agtccaaaatgtacaccagatttcaaagacttagaaaacaaatgtaaaatattgtaattcttatgtcgattacatgttgaaataatatataatggatcaaataaaatatgttaaaattaa

SEQ ID NO: 913944 - DNA, 120 bp, Artificial Sequence
  ENSG00000234938_0 (sequence is synthesized)
gcttttctttttaaagtccaatgactgaaagagtttaccaaaatggcctggtgtcatccagcttcatgatgtgaatgtctttagatctactactctaaggagctgcccagatgagctatg

SEQ ID NO: 913945 - DNA, 120 bp, Artificial Sequence
  ENSG00000234938_1 (sequence is synthesized)
ttctgtggaatgtggagatgtctgtgcattacgtgactatctgaaaatcagcgatttcagaatggtgactcacagatctgggatcggggaaaaggaaaaaattgtgagaaactaaacaga

SEQ ID NO: 913946 - DNA, 120 bp, Artificial Sequence
  ENSG00000234938_2 (sequence is synthesized)
cgtcacctttttcatatttttgagcttgactggaatcaagatttcacatggcacctcgaggacaggattattaatagcctttgtgtcagcctgatggtaaagctttctctttgaatcctt

SEQ ID NO: 913947 - DNA, 120 bp, Artificial Sequence
  ENSG00000234936_0 (sequence is synthesized)
aagctactacccttccaaagctatgattctcaagataactattaccatcccagcaggatgggcagtccaggggccaactggtcccactgctggagcagatcacacaggacggccagggcc

SEQ ID NO: 913948 - DNA, 120 bp, Artificial Sequence
  ENSG00000234936_1 (sequence is synthesized)
aaactctgcaaagacaggagaaagtgtcaccagaaggatcaggaaggcttccctgtccagtgtctcctctgcacatctgcctggatttgactggtttgccctttccttggaaagcagatc

SEQ ID NO: 913949 - DNA, 120 bp, Artificial Sequence
  ENSG00000234936_2 (sequence is synthesized)
tcttgggcacaagacacatcctagagcagggcatcggcaagcttttccttaaagggccagagagtcaatattttagactttgcaagcctatacctcctcacctcggctgaaagcagccat

SEQ ID NO: 913950 - DNA, 120 bp, Artificial Sequence
  ENSG00000228397_0 (sequence is synthesized)
ggaggggcataggttggaaggggtgggccgggtctctctagcctccgcggtactacgcagcttcatggttttaactcttggtggtcttttgaccgtcctcagtccttaccgtgcggagtt

SEQ ID NO: 913951 - DNA, 120 bp, Artificial Sequence
  ENSG00000228397_1 (sequence is synthesized)
ttggatacattcttagcagctttttcgctccggagaagttctttatctttctgagccgcagtttgcccaactgcaaaatggaaagagatgaagcaggaattaagatactctaggagctcg

SEQ ID NO: 913952 - DNA, 120 bp, Artificial Sequence
  ENSG00000228397_2 (sequence is synthesized)
cccacagctgattcagggccccattctgaggttacacccttaagcctttgcaccactcaaaggaaggaaaccaagagagaggggtggctggctgctgtttggagacagtggtccttgtat

SEQ ID NO: 913953 - DNA, 120 bp, Artificial Sequence
  ENSG00000228397_3 (sequence is synthesized)
tggcgccccgcggaatcactccagatgagtcagtggatacagtctataggtcccgcctcattgacttttccagttgctaccagactacgcactgtcgcctgatggttaagaactgaagct

SEQ ID NO: 913954 - DNA, 120 bp, Artificial Sequence
  ENSG00000228397_4 (sequence is synthesized)
cgagttcgagaccagcttgaccaacaagctggcatatccgaatgggctgagctaccggattaagagggacaccccaaagcccccattgctgggttattgctccagagccaatgttcttgg

SEQ ID NO: 913955 - DNA, 120 bp, Artificial Sequence
  ENSG00000228397_5 (sequence is synthesized)
ggaaaggaagatatgccctttgtcaacattgccactgctggtctgtaaactcctagacggccagctggtggttcacaaaccaggactccttgctctggccctacccctacctaccagaat

SEQ ID NO: 913956 - DNA, 120 bp, Artificial Sequence
  ENSG00000228397_6 (sequence is synthesized)
gaccgtgaacccttccccactcactcctacaaccaggtttccatctcctctctcagcttaggtttccctaactgtaaaataaaagggttggactaggttaaggacttcctgctatttctc

SEQ ID NO: 913957 - DNA, 120 bp, Artificial Sequence
  ENSG00000228397_7 (sequence is synthesized)
tctcccacactctaaggttccttaggaatgcttcagaaaacagcaggggttggggcaaggatgccgcttgagtcccagagcaactccaatttcataggcacataaatttatgtgaaagta

SEQ ID NO: 913958 - DNA, 120 bp, Artificial Sequence
  ENSG00000228397_8 (sequence is synthesized)
ggggtaggcactgttatttccattcacagataagcaaagtgaggctcggagggcggggacttgcccaaagccacaaggatgaaaggacttttccagttgctaccagactacgcactgtcg

SEQ ID NO: 913959 - DNA, 120 bp, Artificial Sequence
  ENSG00000228397_9 (sequence is synthesized)
tccagatgagtcagtggatacagtctataggtcccgcctcattgtacgcaaacagcagtgggcatatggccgtggggggttgatacagcctgtccggggtgggactctgtgtgtatggga

SEQ ID NO: 913960 - DNA, 72 bp, Artificial Sequence
  ENSG00000228397_10 (sequence is synthesized)
tcacctgaggtcacgagttcgagaccagcttgaccaacaaggtgaaactcaatagtcccagctgctcgggag

SEQ ID NO: 913961 - DNA, 120 bp, Artificial Sequence
  ENSG00000228397_11 (sequence is synthesized)
cgagattgcgccattgcactccagcccggacgagggagcaagactccatctcaaagatgaagctttgaagtcatactgatctggtttgcgtctgatcacacaggttcaatgacacagccg

SEQ ID NO: 913962 - DNA, 120 bp, Artificial Sequence
  ENSG00000228397_12 (sequence is synthesized)
tttgcgtctgatcacacaggttcaatgacacagccggctagaggaagcagagatgctaaccactgcagccccgatcttaaccctgaaggggagggattgagctgttagagagaggtactc

SEQ ID NO: 913963 - DNA, 62 bp, Artificial Sequence
  ENSG00000228395_0 (sequence is synthesized)
ttgtatttttagtagagatagcttcggcctcccgaagttctgggattacaggcatgagccac

SEQ ID NO: 913964 - DNA, 120 bp, Artificial Sequence
  ENSG00000228395_1 (sequence is synthesized)
ggattacaggcatgagccaccacacccggatgaattatgccatttttaaggcaaagcagcggtgatggtgggtgatggagtgacatcaggagcgccagaaggaggaagtcagaaagccct

SEQ ID NO: 913965 - DNA, 120 bp, Artificial Sequence
  ENSG00000228395_2 (sequence is synthesized)
tcagaaagcccttggggacaggaatgtccttgtgttgcaaacatttctggtcagggaaagatgaagaaaacagaatgagtttctgataacagtgttcccaacacttaatggttaaaagaa

SEQ ID NO: 913966 - DNA, 120 bp, Artificial Sequence
  ENSG00000228395_3 (sequence is synthesized)
acaccatatttcagccctatggaacagtgaacaaaaaggaaaaagccagtaagactgatggttctgtataagatgtccacttctgcatgatctgctccagacaacaaatgaaatgctctt

SEQ ID NO: 913967 - DNA, 120 bp, Artificial Sequence
  ENSG00000228395_4 (sequence is synthesized)
attattcctgtcccactcttgtctccctacaggctaacctcatctttcacaatcactattttcacaatcgagctttgagaagctgaaaagtcagcaggctatcttggcaaacccactata

SEQ ID NO: 913968 - DNA, 120 bp, Artificial Sequence
  ENSG00000228395_5 (sequence is synthesized)
gtgttctaaattctttgtcaaaattaaccttttacaatctcttggcacttggaagtaggggaagagtccaactgaaagtgcagtttgatctcatggagaaaagtgatgacacttaccaat

SEQ ID NO: 913969 - DNA, 120 bp, Artificial Sequence
  ENSG00000228395_6 (sequence is synthesized)
tccccagacctgagactaagaaaataaccttggccaacatgcaaaaaaaatatatattaatgagaggagatacactaaatatattttactcatctcagcatagctttctcacaggcagta

SEQ ID NO: 913970 - DNA, 79 bp, Artificial Sequence
  ENSG00000228395_7 (sequence is synthesized)
gatcccggaaggagccgaagcgacaatgcgggggaagagatagagtcttgcaccgcaacctctgcctcccgggttcaag

SEQ ID NO: 913971 - DNA, 120 bp, Artificial Sequence
  ENSG00000228395_8 (sequence is synthesized)
agagtgcaatcagagcatcggaaggtccaagacttgtcagacataggtgcattccagcccaacaacagtgtggggcatgttggtctaagggcatcttacctccaagaactgcttgaggcg

SEQ ID NO: 913972 - DNA, 120 bp, Artificial Sequence
  ENSG00000228395_9 (sequence is synthesized)
tatgaaggagcccatctgtcctgagcttgtgatagcttcaattctacagggagagaaagacacatgaatcacacctatgatatacacctatcttttggaaacggtgtctcactctgtcac

SEQ ID NO: 913973 - DNA, 120 bp, Artificial Sequence
  ENSG00000228395_10 (sequence is synthesized)
ctaggctggagtgcagcgcggtggtgcgatcatagctcaccgaggccttgaactcttgggctcaagcgatcctcctgtctcagcttccctagtagctgggactatagatgcatgccatca

SEQ ID NO: 913974 - DNA, 120 bp, Artificial Sequence
  ENSG00000228395_11 (sequence is synthesized)
tggggtcttgctatattgcccaggctggttttgaacacctgggctcaagtgatcctcctcctgtggcctcccaaagagctgcaattataggcataattataggcataagccactgtgctc

SEQ ID NO: 913975 - DNA, 120 bp, Artificial Sequence
  ENSG00000228395_12 (sequence is synthesized)
ataattataggcataagccactgtgctcagcccctaatttgtgtttttgtttgggcaatgatatttaagacagactctcattaaggttcaaaagcatttattcaaatatcaacgagaggg

SEQ ID NO: 913976 - DNA, 120 bp, Artificial Sequence
  ENSG00000228395_13 (sequence is synthesized)
actggagtaggaaagatgtcatacttagtacaggtgtttttaacttgaatcaaaaccagcaggtaatagcacccttgggtatctgaggcctggttatgagttacttaatcccctgctgtc

SEQ ID NO: 913977 - DNA, 120 bp, Artificial Sequence
  ENSG00000228395_14 (sequence is synthesized)
tgctcaacaagcctgatacctgggaaagtagtcctctttgatgagaattagcatcttccagaactgaacctggtattgcttcatgagggcattcccacacacctagagggaaagacaggc

SEQ ID NO: 913978 - DNA, 120 bp, Artificial Sequence
  ENSG00000228395_15 (sequence is synthesized)
actgtcagagcagaaaatgaaaattcacactcacaggacagattcataaagcacaatcagcccttcatctttcacacctatcaaaaatttcaaccacaatgccactgaacttgctaacaa

SEQ ID NO: 913979 - DNA, 120 bp, Artificial Sequence
  ENSG00000228395_16 (sequence is synthesized)
ccatctgtgaagtaaggcaatgagaagtgagtcggggaacggaacccacgatgcgtcagaggagtgttccagttgcacacacactccccagccacctggcagctcagtctataatctgga

SEQ ID NO: 913980 - DNA, 120 bp, Artificial Sequence
  ENSG00000228395_17 (sequence is synthesized)
ggcttccacatctacagctccatacaaatgaacctctggttctaaagaagtttcttccttgtctggttctcactttctaaacctcagtctctggagagaaaaggagtcctggaggatgaa

SEQ ID NO: 913981 - DNA, 120 bp, Artificial Sequence
  ENSG00000228395_18 (sequence is synthesized)
caaggcgagcttggagtaatttggaaaagctaatgttgtaggacagaagcaaagcctgcaagtcacagcctaggttccctgagtgatgttttcagcagtaaactgcaacttcaaagctaa

SEQ ID NO: 913982 - DNA, 120 bp, Artificial Sequence
  ENSG00000228392_0 (sequence is synthesized)
ggccagcagttggaagggatcccagggacgggctcagctactcagggcagcagccaggcatcggtgcagaggaaagccaacagatttttctttaaaaatgtgaaactagcagtataaacc

SEQ ID NO: 913983 - DNA, 120 bp, Artificial Sequence
  ENSG00000228392_1 (sequence is synthesized)
agtgttttgaagtacaaaggtaaatagcagaagatatcagtgaacgcatgtaaagtggctgtcttgtgggagaggaaactgaagacatagtggagactattgtttttgttttgcaacgtt

SEQ ID NO: 913984 - DNA, 120 bp, Artificial Sequence
  ENSG00000228392_2 (sequence is synthesized)
tggggctgactttccagaattacccaagattgacctgtgggagatatctgggccccctgtgccttgcaaagcttcacatgggtgatgatgttgaagaccaggtgcggatcaatgggggct

SEQ ID NO: 913985 - DNA, 120 bp, Artificial Sequence
  ENSG00000228392_3 (sequence is synthesized)
ccatggcaaatgagaaacagaggaagaagaactaaccttcctacccaccagtgctcactggcactcaacatagccttgctcttgtttctggaggaagggccattgggatcaacttaagaa

SEQ ID NO: 913986 - DNA, 120 bp, Artificial Sequence
  ENSG00000228392_4 (sequence is synthesized)
catggcagaacagagatgcttgctgaattagttggttggaagcacaaaattattttagtagttgttgcaaattgcttcacttctctgggtttaagtgtagaactcaatggtaatgtgaat

SEQ ID NO: 913987 - DNA, 120 bp, Artificial Sequence
  ENSG00000228392_5 (sequence is synthesized)
agacttgatctccataggatcattgtggggactcaatgagatagattctgtagagctttgggcttgattggtgcacagtgttcaatgagtgtgctgggagaaactcttctcctcacttct

SEQ ID NO: 913988 - DNA, 120 bp, Artificial Sequence
  ENSG00000228392_6 (sequence is synthesized)
ggtgtttccttccaggaggagagaggtccctctgggtagcacccctggcctctctgtctgctccctgggttctgcctttggaagtgggaggtgatgtgcttggtagggaagcttgagggc

SEQ ID NO: 913989 - DNA, 120 bp, Artificial Sequence
  ENSG00000228392_7 (sequence is synthesized)
aggagctgggtctgggtagctcagctgcttcctcttccattctcaggagccagctgtctatgggaagcacccattctggtcagcccccataagccataaatgtataggggcaggctggat

SEQ ID NO: 913990 - DNA, 120 bp, Artificial Sequence
  ENSG00000228392_8 (sequence is synthesized)
gctgacacattgggcctagtgcctagtgaacaagcagtggaacgtggggagcaaattaatactcaaggactgaggcttttgaggggaccaggccatcagatttttattttattttatttt

SEQ ID NO: 913991 - DNA, 120 bp, Artificial Sequence
  ENSG00000228392_9 (sequence is synthesized)
atatttttacaggcaagctgctatttttatacaggcataggccttagcaaaagtgggttgagttggttcctgaggccttaggctaagagcggctgcagctcaccctgggcaaaaccgtgc

SEQ ID NO: 913992 - DNA, 120 bp, Artificial Sequence
  ENSG00000228392_10 (sequence is synthesized)
ctgcctcagcatgggccaccaggttctctgaagatgccattaggccttagggcccctgtggacaggcattgtagatatgctttgattatagggaaaagaaagtttacccatatatagact

SEQ ID NO: 913993 - DNA, 120 bp, Artificial Sequence
  ENSG00000228392_11 (sequence is synthesized)
cttttagtgtctgactgctgttgtaacaaattgccacacttagtggcttaagacaacacaaccttcttatcttgctgttctggaggtcagaagtccaaaagggtttcactgggtcaaaat

SEQ ID NO: 913994 - DNA, 120 bp, Artificial Sequence
  ENSG00000228392_12 (sequence is synthesized)
caaggtgcatagtcacgctccctccagaggctctaggagagaatcaatttccatgccttttccagcatctagaagccctctgtcttcctttgctgatgatcctttcctcctccttcaaag

SEQ ID NO: 913995 - DNA, 120 bp, Artificial Sequence
  ENSG00000228392_13 (sequence is synthesized)
ccaacagtgtagcatcttctcatccctctctgttctgttgttatatcaacttgacttcactctgagcctcctgcctcctcttagaaggaccctggtgattacatttaggacccactgggg

SEQ ID NO: 913996 - DNA, 120 bp, Artificial Sequence
  ENSG00000228392_14 (sequence is synthesized)
tcatctagcataatctttccatctcaagatctttaatatcatcacatcttcaatatccctttaccatagccacaggctccagagactcagccataaacatctttggacagaaacatcatt

SEQ ID NO: 913997 - DNA, 88 bp, Artificial Sequence
  ENSG00000228392_15 (sequence is synthesized)
agagactcagccataaacatctttggacagaaacatcattattcaacctaccacatagacctttttctttaatttttaatttttatga

SEQ ID NO: 913998 - DNA, 120 bp, Artificial Sequence
  ENSG00000228392_16 (sequence is synthesized)
cattagggtaaatggggtagccatcatctcaagaatttgtccttactttagtgttacaaacaatccaattatactcctttaattattttaagatgtataataaatttggattgactgtca

SEQ ID NO: 913999 - DNA, 120 bp, Artificial Sequence
  ENSG00000228392_17 (sequence is synthesized)
atgtggggccataatatttaagtgtcttggctgtaagcctgcgactgggtcccccgacagccaagccttgctccgcacgctctaacagctgtctgtaaaacccgtttatggagcctccat

SEQ ID NO: 914000 - DNA, 120 bp, Artificial Sequence
  ENSG00000228392_18 (sequence is synthesized)
aaatttcccagctgctgcaaacacagggctggggacaaagagtcgagggagggaggtgtggaagagcagcagcttcagcgtctccgctggctggtcctctgggccccagcttgcccccca

SEQ ID NO: 914001 - DNA, 120 bp, Artificial Sequence
  ENSG00000228392_19 (sequence is synthesized)
aagctgatcttaacgtcgaccccgtggggcctggctgggcgatccagctcaccacagatgcaggcactttcaagattgcagcaaaagggcctggagcttgagctggaacccacgctgctt

SEQ ID NO: 914002 - DNA, 120 bp, Artificial Sequence
  ENSG00000228392_20 (sequence is synthesized)
gtctggggcttgagccgccttcatcacgcatgccagctcacccctgagtcacacctgctccctgagcctctggctcggggcctcccacagatggatcacctgctgtgtacctgactccaa

SEQ ID NO: 914003 - DNA, 120 bp, Artificial Sequence
  ENSG00000228392_21 (sequence is synthesized)
aacctgggcaacatagcaaggcctcatctctaccataaataaaaaggttttaagaaagaagtatataaaattgtataaagaacaaattaataattccctaaacctcaccatggacatttt

SEQ ID NO: 914004 - DNA, 68 bp, Artificial Sequence
  ENSG00000228392_22 (sequence is synthesized)
tcctcaaacacctttctgtttctctgctttcatacacacgtttgtccacaaatatatcacatacattg

SEQ ID NO: 914005 - DNA, 120 bp, Artificial Sequence
  ENSG00000228392_23 (sequence is synthesized)
ttcatacacacgtttgtccacaaatatatcacatacattgctgttttcacggaaacttttaaaacacttttgttttgtctgaccctcttttccatctccctggtctttccctgatattcc

SEQ ID NO: 914006 - DNA, 120 bp, Artificial Sequence
  ENSG00000228392_24 (sequence is synthesized)
ccaaaccaaagttaataacctggcgtgtatcccatatcttccatgtgcctgtgcatcgtatacatatagggcttgctgatctttatttgaccaaatggatcacattacatatatttcttg

SEQ ID NO: 914007 - DNA, 120 bp, Artificial Sequence
  ENSG00000228392_25 (sequence is synthesized)
atttgaccaaatggatcacattacatatatttcttgaatttttcaactaacaatgcattgtggaaacccatccaagtgaatctattctttctctttttttttgagacaaagtttcactct

SEQ ID NO: 914008 - DNA, 73 bp, Artificial Sequence
  ENSG00000228392_26 (sequence is synthesized)
cctcaggtgatctgcccaccttagcatctattttttttaatggttgcttcttgttccatggcatgaccgtata

SEQ ID NO: 914009 - DNA, 120 bp, Artificial Sequence
  ENSG00000228392_27 (sequence is synthesized)
tttttaatggttgcttcttgttccatggcatgaccgtataattatttaaacccttttctattgacagattctttctggctctttggccactacaaatattgtgacattaacacctttata

SEQ ID NO: 914010 - DNA, 120 bp, Artificial Sequence
  ENSG00000228392_28 (sequence is synthesized)
atacttagatctttaaaatagatttgttccatattgctttccaaaaaggcagtatcagttctcatttgaaccagcagtgtatgaaaatatacttttcctatcactctcatcagtagtagg

SEQ ID NO: 914011 - DNA, 120 bp, Artificial Sequence
  ENSG00000228392_29 (sequence is synthesized)
tgttaacattcttttgaattgttgccagtatgatgggtgagaagtgctacctcattgttactttaatttgcatttccctgagtactaggaggttgagccatatgtttattggccatttgg

SEQ ID NO: 914012 - DNA, 120 bp, Artificial Sequence
  ENSG00000228392_30 (sequence is synthesized)
gtttactcttctctgagcctattcatatcctgggaatatttttctattggatgctttgtcttttgcttaacaatttgtaagagctaaaaattaactctttctccgtcgtaggcgttgcga

SEQ ID NO: 914013 - DNA, 120 bp, Artificial Sequence
  ENSG00000228392_31 (sequence is synthesized)
atatgttttccccaaattcagtgcttgtcttttagctttgtttatgggaacatttagccatctaaaaatgtttaaaatttatttattttttacttttttgagacagagtctcactctggt

SEQ ID NO: 914014 - DNA, 87 bp, Artificial Sequence
  ENSG00000228392_32 (sequence is synthesized)
atttattttttacttttttgagacagagtctcactctggtgcccaggctgcagtgctgtggtgcgatgacaattctcctgctgagcc

SEQ ID NO: 914015 - DNA, 120 bp, Artificial Sequence
  ENSG00000228392_33 (sequence is synthesized)
catgagccaccgtgcccggcctaaaaaagtttaagttgtatgtagtcagagagttgtacttccaataatgacagagtaccttgtaaaagacaatctctcccacagatagcaattataaat

SEQ ID NO: 914016 - DNA, 120 bp, Artificial Sequence
  ENSG00000228392_34 (sequence is synthesized)
tctggacaaaaggctaggtgggggcactaaaagtgacccaaaccaggcagaacttataacatctgacatttctaagaagggaatgacagtgtttcttatttttatattttatatgactgg

SEQ ID NO: 914017 - DNA, 120 bp, Artificial Sequence
  ENSG00000228392_35 (sequence is synthesized)
ctcccctctgaggccggaggcttggctgccatcaaattcaggcctccctgggtcactgccctgcggggcccacatagcaccacataagtcagttaaaagttggatagaaatctgcattct

SEQ ID NO: 914018 - DNA, 120 bp, Artificial Sequence
  ENSG00000228392_36 (sequence is synthesized)
tacttgttaaggaatcacagggcagaatctgggacttccacagaaattgaaaagtaaaggaggaaattccgggaaggagaactccatggaggatatgttccgaattctccacccaaactt

SEQ ID NO: 914019 - DNA, 120 bp, Artificial Sequence
  ENSG00000228392_37 (sequence is synthesized)
caggctgttttctgaactgtgaattcatctgggaggctcctggaatcctaactgtggctaaaatagctgaacagagatttcagctgctgtctaccagaggggagactttgaagtttgagt

SEQ ID NO: 914020 - DNA, 120 bp, Artificial Sequence
  ENSG00000228392_38 (sequence is synthesized)
tcagccaagttaactgcctgctaaaataaaaagccgacactcagaagaacataataaaatccagagtctctacaacttatcattgacagtgtccaggatacaatccaaaactactagata

SEQ ID NO: 914021 - DNA, 120 bp, Artificial Sequence
  ENSG00000228392_39 (sequence is synthesized)
tatgaagaaacggcaaaatgtgagccatattaatagaaaaggcaatcaatggagaataaccttaatgtgacctagatgttagaattaagagacaagaatttaaaagtagctgttataact

SEQ ID NO: 914022 - DNA, 120 bp, Artificial Sequence
  ENSG00000228392_40 (sequence is synthesized)
atgctcaaggacatgaagaaaaatatactagcaatgaatgattaaacagaaaacttcagttggaaatagactatacaaatgagcaaatgggaattctagaaccaaaaaatacaatatctg

SEQ ID NO: 914023 - DNA, 120 bp, Artificial Sequence
  ENSG00000228393_0 (sequence is synthesized)
gatcgttgctgccgcggccgatatggaacccaagcagtggcgaagggaatcgcaaggctcttccctgaccattttctactgtccctgcgcgaggctgagttatgaacttcggtttggttt

SEQ ID NO: 914024 - DNA, 120 bp, Artificial Sequence
  ENSG00000228393_1 (sequence is synthesized)
ctttctgcaatccctgcagggccataaattcttggcccttaagactgggtggcccataacagactcagtgataccatcagtaaccacaattcacactggagtcaagttatctgattccca

SEQ ID NO: 914025 - DNA, 120 bp, Artificial Sequence
  ENSG00000228393_2 (sequence is synthesized)
aatacaactaatctgtggtgatagagacgagaagagttaagctctaaaattagaagagcagttcgttttgaggcagcactgattgggagggagcatggagtatataattacacatttcta

SEQ ID NO: 914026 - DNA, 120 bp, Artificial Sequence
  ENSG00000228393_3 (sequence is synthesized)
gcatggagtatataattacacatttctatgtaatgtaaaaatgtatagatttaagatttatgcattttatgtaaattttactacaataaaacgaaaatgaaagaagacagatcatagttt

SEQ ID NO: 914027 - DNA, 120 bp, Artificial Sequence
  ENSG00000228393_4 (sequence is synthesized)
tgttaaacatttatatttttatgtgtatatgtatcttttacatgtatgtgttaaggatatgcattaaaatggtaataacttcctctgcctgttgggataatggagagttttgttactttt

SEQ ID NO: 914028 - DNA, 120 bp, Artificial Sequence
  ENSG00000228393_5 (sequence is synthesized)
gagggagaagtgacgatggtgatcgttgctgccgcggccgatatggaacccaagcagtggcgaagggaatcgcaaggctcttccctgaccattttctactgtccctgcgcgaggtggacg

SEQ ID NO: 914029 - DNA, 120 bp, Artificial Sequence
  ENSG00000228393_6 (sequence is synthesized)
caaaggtgttaaatgaggttgaatatattgaccagaaaagaaaatattatagtcctttgttgaagaagagttttctcatactggaaagaaaaaaaataaaagaaagaaacttcaaaaact

SEQ ID NO: 914030 - DNA, 69 bp, Artificial Sequence
  ENSG00000228393_7 (sequence is synthesized)
tactccagccaaagaaaataattcaggtatcaagttggactagctcagatgactacaaaatatgagcca

SEQ ID NO: 914031 - DNA, 67 bp, Artificial Sequence
  ENSG00000228393_8 (sequence is synthesized)
tatttttagtagagacggggtttcacgccatgttgggcaggatggtctcaatctcttgaatgactag

SEQ ID NO: 914032 - DNA, 120 bp, Artificial Sequence
  ENSG00000228393_9 (sequence is synthesized)
ctactcaattctcatgtaggaaaacaaaataaataatgtctatttgataaatcgagaaacagaagcattacttagaaatctgagttacctctaaaataatgactggcatttgaagttgag

SEQ ID NO: 914033 - DNA, 120 bp, Artificial Sequence
  ENSG00000228393_10 (sequence is synthesized)
gatgggtcttgagttcctgtgattttaagctcttggatatgagggttgggtgagttcctctttttctcttttaaaatatatgtatgtttaactttgctaaataaaatttaaaagatgcaa

SEQ ID NO: 914034 - DNA, 120 bp, Artificial Sequence
  ENSG00000228391_0 (sequence is synthesized)
gaattagagaccccacccttcaccaagcaggtcgcagggcagagagagcatgggcttggaagaggggcagacctctggatgatttggggtgccctgtactcctgtggaactcacgtcttt

SEQ ID NO: 914035 - DNA, 120 bp, Artificial Sequence
  ENSG00000228391_1 (sequence is synthesized)
gaacttcagtttagttgagtccacacaaatgtccctggctggtgaatggtcttctgtcacacagggacctgaggacagaggcctccatcccgtggctgttccgtaccctggggcctggag

SEQ ID NO: 914036 - DNA, 120 bp, Artificial Sequence
  ENSG00000228391_2 (sequence is synthesized)
ggcccgcagccattctgggaacaaagtgggtgggacatgccgttcctgatgggtagcagcaccaggaccagctccactgcatggaataatgaacccacagctttggtgaataggcagcca

SEQ ID NO: 914037 - DNA, 120 bp, Artificial Sequence
  ENSG00000228391_3 (sequence is synthesized)
cctctgccacatatcatagcttgttgggtggttgtgaagcttgaatattataacacatgtgaagcattaaccttggagtgccctgcagtgcaggataaatgctgttatttagttaagtta

SEQ ID NO: 914038 - DNA, 120 bp, Artificial Sequence
  ENSG00000236268_0 (sequence is synthesized)
cagactatatggtgcagctgactggtggaagagatgaggctgagaagacacgaaaggcttatgggaacacagtaggagcaagggaagggcagaggggcttatttcatataagggcttctt

SEQ ID NO: 914039 - DNA, 120 bp, Artificial Sequence
  ENSG00000236268_1 (sequence is synthesized)
gtcgcctgaactatggttgaagttccctcacagaacagagcagctggtcacagctctgcccaggcatttctgtgtctgcatcttcctgctgtacttgcatatcaagaagcatttcagacc

SEQ ID NO: 914040 - DNA, 120 bp, Artificial Sequence
  ENSG00000236268_2 (sequence is synthesized)
acaggaatgcaggattccaaggcgccaatttaccttggaatttgaaaagatgatggaaatgatgttaaagaaaaagaaaattcgagtgattttcttatttgaggtcaaaatgggtcataa

SEQ ID NO: 914041 - DNA, 120 bp, Artificial Sequence
  ENSG00000236268_3 (sequence is synthesized)
agtgattttcttatttgaggtcaaaatgggtcataaagcagtggagacaactcgcaaaatcaacaacacatttggttcaggaactgctaacaaatgtacagtgcagtggtggttcaagaa

SEQ ID NO: 914042 - DNA, 120 bp, Artificial Sequence
  ENSG00000236268_4 (sequence is synthesized)
aaacagtggctggctataggaagttgacaatgaccaactgagagcaaccatggaagctgatcctcttacaactgcgtgagaagttgccaaggaactcagcgttgagcattctagagtctt

SEQ ID NO: 914043 - DNA, 120 bp, Artificial Sequence
  ENSG00000236268_5 (sequence is synthesized)
tcagcatttgaagcaaattgggaaggtgaaaaagctggataagtggatgcctcatgagatgagtgaaaatttaaaaaaaaataaaataaaaaacaaaattgtcattttgaagtgtcatct

SEQ ID NO: 914044 - DNA, 120 bp, Artificial Sequence
  ENSG00000236268_6 (sequence is synthesized)
atgaccagctcagtggctagaccaagaagctccaaaacacttcccaaagccaaacttggaccaaaaaaaggtcatgttcgctgtttggtggtctgctgctggtctgatccactattgctt

SEQ ID NO: 914045 - DNA, 120 bp, Artificial Sequence
  ENSG00000236268_7 (sequence is synthesized)
ttacatctgagaagtatgctcagcaattcaaagagatgaaccgaaaacttcaacccctgcagtcagcaatggtcaacagaaagggcccaattctccacgacaatgcatgatcgcacatta

SEQ ID NO: 914046 - DNA, 120 bp, Artificial Sequence
  ENSG00000236268_8 (sequence is synthesized)
caatgcatgatcgcacattacacaactaaagcttcaaaagttgaactaactgggctacgaagttttgcctcatccaccatattcacctgacctcccgccaaccgactaccacttcttcaa

SEQ ID NO: 914047 - DNA, 120 bp, Artificial Sequence
  ENSG00000236268_9 (sequence is synthesized)
tcatctcgacaactttttgcaaggaaaacacttccacaaccagtagaatgcaaaaagtgctttccaagagttcactgaatcctgaagcacggatttttatgctacaggaataaacaaact

SEQ ID NO: 914048 - DNA, 78 bp, Artificial Sequence
  ENSG00000236268_10 (sequence is synthesized)
tattttgattaatatccaaaaccgcaattacttttgcatcagcctaatatgaggaagtaatagttgaacagaataatt

SEQ ID NO: 914049 - DNA, 120 bp, Artificial Sequence
  ENSG00000236268_11 (sequence is synthesized)
tcagcctaatatgaggaagtaatagttgaacagaataattctttcctggaagtctggcattttgcctggggagaaggatcattaaaaacttaaacattttaataaaaccatttaaacaaa

SEQ ID NO: 914050 - DNA, 120 bp, Artificial Sequence
  ENSG00000236268_12 (sequence is synthesized)
ataggcattttgagtcatcttgtgactttcatctgactaactccatctgaagtagttgtctatttatggaaggaggtgtcctttatttttgtttctagggaacacagtaggagcaaggga

SEQ ID NO: 914051 - DNA, 120 bp, Artificial Sequence
  ENSG00000236268_13 (sequence is synthesized)
gtgcctcactgctcaaacctctaggggagcatacagaccggcagctgtggggctctgaccccacggcagtgtctagaggtgagtgtctacagctgaagccccagtgggtgtgtgttacag

SEQ ID NO: 914052 - DNA, 120 bp, Artificial Sequence
  ENSG00000236268_14 (sequence is synthesized)
agccccagtgggtgtgtgttacagggtactcttttagtttgctgtctataggcagcttgtgttaaccagctagattagaccctctaccttatcccaaggacagagggctttctgtatcct

SEQ ID NO: 914053 - DNA, 120 bp, Artificial Sequence
  ENSG00000236268_15 (sequence is synthesized)
gggttcttgccttggtgtaccggaagaatcggatcacacgtgggcttggagaatgaatgtaaagttttattgagtggaagtagctctcagccgatgggggagccagaagggagatggttt

SEQ ID NO: 914054 - DNA, 120 bp, Artificial Sequence
  ENSG00000236268_16 (sequence is synthesized)
ggcccctggctctcctaagacttccccaggccaaactccacctagtcctgctagaggacggcctggcctcctgccggcgtcagtcagtgtgctcttccattggtgtgcttccctcaacat

SEQ ID NO: 914055 - DNA, 120 bp, Artificial Sequence
  ENSG00000236268_17 (sequence is synthesized)
cctctcaatgtccggccacttatctttttccgccgatgtgttcctctcgccatccagcagcttctgtctctgccttgctagggtctcaggtttttataggcccaggatggggttgtggtg

SEQ ID NO: 914056 - DNA, 120 bp, Artificial Sequence
  ENSG00000236268_18 (sequence is synthesized)
ctcctctacccaacacttcccttcccccctccatatcatttaaagggaccacgcccttcccttcctggcactcttgtatcactataaaaataaaacagtataaaagcttggaatgcaaag

SEQ ID NO: 914057 - DNA, 120 bp, Artificial Sequence
  ENSG00000236268_19 (sequence is synthesized)
agcagtaaacgctgagctaggatgggaagccaggctctagatcctctgtaatagcccctgttattcatcagtctcaggtacaactgggaggtcacaattcaacccataatgaaagcatct

SEQ ID NO: 914058 - DNA, 120 bp, Artificial Sequence
  ENSG00000236268_20 (sequence is synthesized)
ctattactggcatttgaggcctccagtaatcactccttacctacataatctaaggtaactcaagtcatcaacatcaaatctctgttccaatcaagtctacttatcttcacttaaaatgta

SEQ ID NO: 914059 - DNA, 120 bp, Artificial Sequence
  ENSG00000236268_21 (sequence is synthesized)
ctcactatgactctgtgccttggctcacgctgttcctttagcatgtgtgcacacgcactcaggcacacattcacacatgctttcttttgactttaatgtaagttcaatttattctataaa

SEQ ID NO: 914060 - DNA, 120 bp, Artificial Sequence
  ENSG00000236268_22 (sequence is synthesized)
acattccctgtttattagagtaagagttacatcttcagttttgtttgtaatttttatcacatgtactgtgattctgaacaatctataaatatgtgttgacagagcagaatttatctgagc

SEQ ID NO: 914061 - DNA, 120 bp, Artificial Sequence
  ENSG00000236268_23 (sequence is synthesized)
tccaagccctgaaaaatgataaaaagaaaccaatatgcaaatatttcagaagctgaggaactataacttcgggactagttttttgtcgtgtctgcattgacaatgatttttaaaattaaa

SEQ ID NO: 914062 - DNA, 120 bp, Artificial Sequence
  ENSG00000236268_24 (sequence is synthesized)
gtgtaaaatctggaaaaaagtattaaaaatattgaacctactggtcaagaaaaaatattgaggataaatacaaatatgatttgcatggcattagactttggagaatttaataacattaaa

SEQ ID NO: 914063 - DNA, 120 bp, Artificial Sequence
  ENSG00000236268_25 (sequence is synthesized)
attatttaatttttatatccttcaattccaaaaaagaatataaagaaataaatttgaatgtttattcacattatttcagccattaattataatatacagttgacccttcatatccacagg

SEQ ID NO: 914064 - DNA, 120 bp, Artificial Sequence
  ENSG00000236268_26 (sequence is synthesized)
ataatatacagttgacccttcatatccacaggagattggctcctgaacccctgaggttaccaaaatccgtggatgctcaaatctctgaaataaagtggcatagtatttgcacataaccta

SEQ ID NO: 914065 - DNA, 120 bp, Artificial Sequence
  ENSG00000236268_27 (sequence is synthesized)
cgcacatcctattatatactttaaatcatctctagatgacttataatacctaaaacaaggtaaatgctatgtaaataattcttatatggtattgtttcctcatttgtattttttaaattg

SEQ ID NO: 914066 - DNA, 120 bp, Artificial Sequence
  ENSG00000236268_28 (sequence is synthesized)
tattatttttcattgtttttttcccaaatatctttcagcttctgatggttgaatctgagaatgcagaagcagcacatatggaggactgactgtgtatttaaaagtggtggttcagtcata

SEQ ID NO: 914067 - DNA, 120 bp, Artificial Sequence
  ENSG00000236268_29 (sequence is synthesized)
gtgaagagaatgacttctttctaaataaaatgaagcaggtgtattcatcattaaagtgaagaaaacatgtttgagaaaagcaaaatgccaagaattcatatgacatttgcaccatctcaa

SEQ ID NO: 914068 - DNA, 120 bp, Artificial Sequence
  ENSG00000236268_30 (sequence is synthesized)
actaaagctgaagtggccttgccaatattatttattctaaataatcacacagaaaaacaaatggcttctcaataaaaaaatactccttctagttccaacaataatagagtcagaaacagg

SEQ ID NO: 914069 - DNA, 120 bp, Artificial Sequence
  ENSG00000236268_31 (sequence is synthesized)
acttgactaaaactgcagttgccattcctgctttccacctttttccaactttaaaagatttaaatacaatttgcttgtctttataaacaacagaactaatcaccatccggggtagcaacc

SEQ ID NO: 914070 - DNA, 120 bp, Artificial Sequence
  ENSG00000236268_32 (sequence is synthesized)
agcatgtgttgctaaatttggcagactcaaccagaataaagaatataaagaacagttaatagaatcttaataaagttgctggtgtttataggcattacattagtttgctatggctgccaa

SEQ ID NO: 914071 - DNA, 120 bp, Artificial Sequence
  ENSG00000236268_33 (sequence is synthesized)
aacaaagtactggaaactgttggaaatttaatgactctcagttctcgaggctaaaagtctgaaatcaaaggattggtaggatcggttcctttttagggctgtgagggaaagatctgttct

SEQ ID NO: 914072 - DNA, 120 bp, Artificial Sequence
  ENSG00000236268_34 (sequence is synthesized)
aggtcattctggtttgtagattttcatacttacatgtcattctccctgcatatgtggctgtccctaaatttcccctttttacatggacacaagtcatgttggattgggacccaccttaat

SEQ ID NO: 914073 - DNA, 120 bp, Artificial Sequence
  ENSG00000236268_35 (sequence is synthesized)
gcccttattttagcttgattaattctataaagattctatttctatacaaggtcacatttgtaggtagaggggttaagacttcaacatatgaactggaaggtcacaattcaacctataaca

SEQ ID NO: 914074 - DNA, 120 bp, Artificial Sequence
  ENSG00000236268_36 (sequence is synthesized)
agcacttttctcattttcatttggagcgtaatttaaaattttatttttttgtgtaaattctatgggtaacataaatacctattcggaacaataattaagctgggtcttcaaaactgtata

SEQ ID NO: 914075 - DNA, 120 bp, Artificial Sequence
  ENSG00000236263_0 (sequence is synthesized)
tgtgagtggctttattctgggtggcagcaccccgtgtccggctgtaccaacaacgaggaggcacgggggcctctggaatgcatgagagtagaaaaaccagtcttgggagcgtgaggacaa

SEQ ID NO: 914076 - DNA, 120 bp, Artificial Sequence
  ENSG00000236263_1 (sequence is synthesized)
atcattcctcttcatcctcctcagccatgcccagggtccgggtgcctggggcccgagcaggctccagtccctgttcctcagcatccccctccacatcctgagtaagctttgtccccagat

SEQ ID NO: 914077 - DNA, 120 bp, Artificial Sequence
  ENSG00000236263_2 (sequence is synthesized)
tgtgttaggaaataatttagaatactttggaaactggaaaagctctgttcacacctaagcaatcagggcagtggcctcggctctgccaggaactttggcttttatctggatcctctcttt

SEQ ID NO: 914078 - DNA, 120 bp, Artificial Sequence
  ENSG00000236263_3 (sequence is synthesized)
ccaggcctctcaattaattccccaggtcctcaacctttgggaagttagaaatgaggaagagtgtcctacttctgacactgttccctcttggaacctgaccgtcaatgctagaagaaccct

SEQ ID NO: 914079 - DNA, 120 bp, Artificial Sequence
  ENSG00000236262_0 (sequence is synthesized)
gccccctcaaacccaggacattcagtgtaaatgactgtgagcctcaggctggaaagatcgtttcccttcccagctagaaagactcatccatcaggctgtgtcagacgcacctgagccctc

SEQ ID NO: 914080 - DNA, 120 bp, Artificial Sequence
  ENSG00000236262_1 (sequence is synthesized)
cttggaagaacagcctggctctaccactcgccgtgtgtctgtgggtatgtgagtccccactctgtgctgtggcctcctcatgcagagaaaggagctgataaaagtcaccgagttaaactt

SEQ ID NO: 914081 - DNA, 120 bp, Artificial Sequence
  ENSG00000236267_0 (sequence is synthesized)
ggcaggatcaaaagcagctcctgcatggggacgccgtgtcctcctgctgttatcatagtatgccctgtgctcccaggaggaggctgagatcataaagggcattgtggcacctaccttgat

SEQ ID NO: 914082 - DNA, 120 bp, Artificial Sequence
  ENSG00000236267_1 (sequence is synthesized)
aagccccttccaaacagctagcaccaacttgccagccatgtaaagtgattcaccttggaaacagatcctccagcctcagccaagccttcagatgcaacctcatgacagactctgaaccag

SEQ ID NO: 914083 - DNA, 120 bp, Artificial Sequence
  ENSG00000236266_0 (sequence is synthesized)
aaggggcctggctgggcaccatggcggcaggtgggaaggtcgggctcgaggtgtgcggagaggaggccgcggaggggcagcagggctgtgcgttctgatgcgctcccctgcggggaccag

SEQ ID NO: 914084 - DNA, 120 bp, Artificial Sequence
  ENSG00000236266_1 (sequence is synthesized)
agccggtgttcgagctgctgctgtctggcggctccggcagcttcttccgcttgtgcttccctttcctgcagccggccgaccgcgtctgcttggaagtagaatctcctggaaggataaagg

SEQ ID NO: 914085 - DNA, 120 bp, Artificial Sequence
  ENSG00000236266_2 (sequence is synthesized)
acacagcgtttgtccccttcaaggaagtgatgttctctgagaagcacagacctggccctcgctagacactgaacctgccggtgccctgatcttggacttcctcgcctccaaaactgcaaa

SEQ ID NO: 914086 - DNA, 120 bp, Artificial Sequence
  ENSG00000236266_3 (sequence is synthesized)
ccggctgactcaccaccaccattcgctgactcaccaccaccattcggttctgtgcgtgtccccgtcactggcttgaatgatgatttggtcattgactcaatgtagagctgctgacccaga

SEQ ID NO: 914087 - DNA, 120 bp, Artificial Sequence
  ENSG00000236266_4 (sequence is synthesized)
tttttaattttgttcacactggcatagacctgctgcaaggtcatcttagggaaaggaatgataaaatatgtttcaaaaattataaaaatgtccactaaaagatacataaacaaaatacac

SEQ ID NO: 914088 - DNA, 120 bp, Artificial Sequence
  ENSG00000236266_5 (sequence is synthesized)
ttagcttctgtttctttgaagatataatgactgaagcacagtaatcactttaatccagtttcctgcaccatgccacagtatactggtaccaacaaattctaaataaatctgttcacaata

SEQ ID NO: 914089 - DNA, 120 bp, Artificial Sequence
  ENSG00000203804_0 (sequence is synthesized)
ccaggctgagccatctctgaggaatgtggctttggcaggacatccagtgctgccccgctcctccctcagccccgcccagggccctggagccgggccgggctcctcctcctccaggggaag

SEQ ID NO: 914090 - DNA, 120 bp, Artificial Sequence
  ENSG00000203804_1 (sequence is synthesized)
ggctcggggcaggaatcccttccctttccccaccccagaagaagccccagagcgtagggatatgcgtacggcagaaagggagacagaaggcagggctagagaaagggaacaggaaaaaag

SEQ ID NO: 914091 - DNA, 120 bp, Artificial Sequence
  ENSG00000203804_2 (sequence is synthesized)
agccaactgcccttcgctcaggccccagcggaaaggcgcagatacccggagacttcccagagagactcgacccaccaaaaagcgcaccgcggccgcgcagcccttccttcagctctggaa

SEQ ID NO: 914092 - DNA, 120 bp, Artificial Sequence
  ENSG00000203804_3 (sequence is synthesized)
cccagcgccccacacctcaaatgggagaactggtgacctctagtggcccatgaccagcctgcagggcctggggctggcggggattctctgacccaaactctcctgggctctaatgctgtt

SEQ ID NO: 914093 - DNA, 120 bp, Artificial Sequence
  ENSG00000203804_4 (sequence is synthesized)
ggtgtgatatgggtcttttctcatcgacgcctctttttccttccctctcttaggcaaaccttttagagaagtcagctgagcaaatatgtacaggtgaattcaaagcaaaagcctcacaaa

SEQ ID NO: 914094 - DNA, 120 bp, Artificial Sequence
  ENSG00000203804_5 (sequence is synthesized)
gttgatttgccttagagcaaaggacagttcctttcttcaattctaattagaggtgttgggtttttaattaaatatattactgctgtacttagaggagttcttaaacctccaagtaaaatc

SEQ ID NO: 914095 - DNA, 86 bp, Artificial Sequence
  ENSG00000203804_6 (sequence is synthesized)
tgctgtacttagaggagttcttaaacctccaagtaaaatcaaaaacctctttaaaatcaaaatttctgtcttgatttatttattta

SEQ ID NO: 914096 - DNA, 120 bp, Artificial Sequence
  ENSG00000203804_7 (sequence is synthesized)
cagacctgagccactgcgcccagccttgatcttgaggtttcctgggagaaggtggcttaaggctgagacacttatgccctgggccagccactggattcctgtgctctgcttcactcctag

SEQ ID NO: 914097 - DNA, 120 bp, Artificial Sequence
  ENSG00000203804_8 (sequence is synthesized)
cttcggccttctatacctactgggcgggctcggatcccgtttccctggccccccacatctgtgattccctgctgaggcctctttaggctcagcagagacgttggaactgggctttccttg

SEQ ID NO: 914098 - DNA, 120 bp, Artificial Sequence
  ENSG00000203804_9 (sequence is synthesized)
tggccccctttcctcgctccctgccctgggctgacgtcagttttatcttccttctccattcccttttgcctccttccccactcgctctcctcttaagatgtccaaattcttccttctcag

SEQ ID NO: 914099 - DNA, 120 bp, Artificial Sequence
  ENSG00000203804_10 (sequence is synthesized)
ccactttcaacccagagaaagcccgagtcccaaagcaacaggaagatgtgcgggggaccgcgagtgtggggacatcctgccgcctcgggcaactctgtcgtcccccacagggttcaggtg

SEQ ID NO: 914100 - DNA, 120 bp, Artificial Sequence
  ENSG00000203804_11 (sequence is synthesized)
ctcagaaaacagcagccactgagttcactgtttccgcaggccccgtattcccggccgtgctcagctgggcttgtggagtcgcgagcgggggcgctcctgcggcaccgcccctcctgggca

SEQ ID NO: 914101 - DNA, 120 bp, Artificial Sequence
  ENSG00000203804_12 (sequence is synthesized)
gcccggcttccaggagagactcggcctcagtctccgaatggcaggggtctgggagaggatgtgatggcaaaggcctgcccctctcaggccgcctctagcaagttctctaccttgagagaa

SEQ ID NO: 914102 - DNA, 120 bp, Artificial Sequence
  ENSG00000203804_13 (sequence is synthesized)
accatctttaataaaaaataaattagttctgggtgggaaccatttcaggaggcagggagtggggctaggggctgggcggggtggtgggggagcggatgctcacatttctctttttcaccc

SEQ ID NO: 914103 - DNA, 120 bp, Artificial Sequence
  ENSG00000203804_14 (sequence is synthesized)
tctgcccagctgggccttgctctggagaggcagtctctttcctcctgccttcctgagtaaggcaggattggcagtggctgaccccagccctagctaattagggaggcaggggcagagata

SEQ ID NO: 914104 - DNA, 120 bp, Artificial Sequence
  ENSG00000203804_15 (sequence is synthesized)
ctaggcaaatgagaaggggtcagagacacagggcggcttagaagatgtgaggtctgaacatgagaaatgaggcttagggcacaaaactggagttggtggggagaccacactctaagtagc

SEQ ID NO: 914105 - DNA, 120 bp, Artificial Sequence
  ENSG00000203804_16 (sequence is synthesized)
tcagattagcaaggaactgcagacttgctttcctttccacctaggaaagtctcaaggaaacaggtcttgtccttctcagtctgtgtaacctctttttgaaaagtgatacacgtttgagca

SEQ ID NO: 914106 - DNA, 120 bp, Artificial Sequence
  ENSG00000203804_17 (sequence is synthesized)
cacacatatccatgcagtcccaaaagcacacctgaggcatatgtgcacacacccatcacaccaccacatgggcctgaccacagccctgaaagtcactttgtgtcagtcaccttgccaccc

SEQ ID NO: 914107 - DNA, 120 bp, Artificial Sequence
  ENSG00000203804_18 (sequence is synthesized)
tctgtcacctggaggacatccctgctgagactgggacaggctggagagccagggggttcagagtgggccgatcaatgggtgaccgatggtggcacagaaaaccgtgaaggtgccccggac

SEQ ID NO: 914108 - DNA, 120 bp, Artificial Sequence
  ENSG00000203801_0 (sequence is synthesized)
acccaaatatgacaacccagaccaggtggggaaaatgaagtctagttcaggctggtggcccaaggtcccccttgttacactggccagcaacaaggtaacactggccttggctcgcaaggc

SEQ ID NO: 914109 - DNA, 120 bp, Artificial Sequence
  ENSG00000203801_1 (sequence is synthesized)
acataaaccacacaagatgctgcagtcaacaccgctgagggttgggggatccagctatctgtaattgtgaagtgaagaggatgtgactgccaggtaatgctaaccccgaatccttggtgc

SEQ ID NO: 914110 - DNA, 120 bp, Artificial Sequence
  ENSG00000203801_2 (sequence is synthesized)
ctgtgttatgcaccatatgctgaatttcggttccagctgtgtgctaggctgggtctgatctggcaaagaggaactggctccacagctctgggcagaatccactgctgctcccacacagag

SEQ ID NO: 914111 - DNA, 120 bp, Artificial Sequence
  ENSG00000203801_3 (sequence is synthesized)
aagaccaggggaaccgcagtcccactctgagtggaaacccttgacacgtgttacacacaaacaacacttggggtggaacaagaggtttacaatgatctgtctgggacccataatacaatt

SEQ ID NO: 914112 - DNA, 120 bp, Artificial Sequence
  ENSG00000203801_4 (sequence is synthesized)
cagactatttcatttaaccttaacagttattgaaatgcttgggggggaaaaaaacctccacatttgagatttccatagcagaagcatcaccagcagcctcaacagccattcaaaaagata

SEQ ID NO: 914113 - DNA, 120 bp, Artificial Sequence
  ENSG00000203801_5 (sequence is synthesized)
tcgtctgcaggcttgttacctcttatcgtccctccattgtattatagaactcttattcttagagagattgcctggaaagaggtaaagtatgcatagacatggtcagccccatttgcagct

SEQ ID NO: 914114 - DNA, 120 bp, Artificial Sequence
  ENSG00000203801_6 (sequence is synthesized)
gaggaaatgagactcagagtggcaaagtgactttttcagaatcatagcagtaaatggtagcattaggaagctaagcctgatcatcctgttcttgtcctgttgaggagatagtgagagcaa

SEQ ID NO: 914115 - DNA, 120 bp, Artificial Sequence
  ENSG00000203801_7 (sequence is synthesized)
aggaaagtggcaacaatgaaggaataaaacccagctcgtccccctgttcctcatgcccaacccttgccaagacttcaggtaacagaaggaagagaacacatggatgggcacatgctgggc

SEQ ID NO: 914116 - DNA, 120 bp, Artificial Sequence
  ENSG00000203801_8 (sequence is synthesized)
ccggaagagctgtgcatgtcccacagaccacgagtgtggagcccatggccgtgtgaagggggtggggtcccagtcctagaagcaggatcatggaagtggccttggaggacctgacgagga

SEQ ID NO: 914117 - DNA, 120 bp, Artificial Sequence
  ENSG00000203801_9 (sequence is synthesized)
ctcctttcctagtgtccccatctttgctgccttctgtgagtttgatcatgtggactccatggaggttggccactgctgggcaatgcagccaaacaaagtgagcaaaagtaggctggaggg

SEQ ID NO: 914118 - DNA, 77 bp, Artificial Sequence
  ENSG00000203801_10 (sequence is synthesized)
gagacttttgaatgtgttctgtttccactacacaattgagaacactgaagtaccagtgacttccagggtggggaaga

SEQ ID NO: 914119 - DNA, 120 bp, Artificial Sequence
  ENSG00000203801_11 (sequence is synthesized)
gagaacactgaagtaccagtgacttccagggtggggaagaaatccagaggctgctcctgaaaggggtcacccttgagtgtgagtctgttccaagtaaatcaagtgagctggaagatcggt

SEQ ID NO: 914120 - DNA, 120 bp, Artificial Sequence
  ENSG00000203801_12 (sequence is synthesized)
attttgtatctttttttttttctttttaaaggggagctgtagaattaagggttgaggtttttcttattctctttagaggttttttggctacctaatacatcagctgaactaatctgcaga

SEQ ID NO: 914121 - DNA, 120 bp, Artificial Sequence
  ENSG00000203801_13 (sequence is synthesized)
ctaatctgcagaaaataaatttatctttaaagtagagctatttagatgcctgagtaacaaactctatctcaatagaagctattggcaaaatgaagctcacctcttaggctgacagcactg

SEQ ID NO: 914122 - DNA, 120 bp, Artificial Sequence
  ENSG00000203801_14 (sequence is synthesized)
acacagccacgtggttgttcctcataacccacagttgggtttcatctggactccctccccacccctaacgtctgccgatgtatctgtgtctaaagccatagtttactcttttttatcctc

SEQ ID NO: 914123 - DNA, 120 bp, Artificial Sequence
  ENSG00000203801_15 (sequence is synthesized)
atccttcaaccagccctacatcttacgtgcctgctgtccagacttctcttaaatctatctgttcctttccaccccaactatcaactcaactgaatagccactaaatgaggcactgtgcta

SEQ ID NO: 914124 - DNA, 120 bp, Artificial Sequence
  ENSG00000203801_16 (sequence is synthesized)
agctctgaattgcaaagatcattagggcatttggtcttattacttcagtcctgggttatgcacctgtgctaggaggtgcagctgattttcctgattatgcttccagacgtgccactcctt

SEQ ID NO: 914125 - DNA, 120 bp, Artificial Sequence
  ENSG00000203801_17 (sequence is synthesized)
ctcatacacacaactcttgctcagacactgtcctgtacttcctgtaaggtacagtcaaaacctgcgtttttcagaggcctctgcagcctgcacccattgtgattgtgcagtcttagctcc

SEQ ID NO: 914126 - DNA, 120 bp, Artificial Sequence
  ENSG00000203801_18 (sequence is synthesized)
ttttggccttgtggaaggagagtggattctagaaagatccctgcccagccacttcctgcccactgtgaccttgagcaaaatctctggctccaagtgttgcatgggtggtggtgaaggggt

SEQ ID NO: 914127 - DNA, 120 bp, Artificial Sequence
  ENSG00000203801_19 (sequence is synthesized)
agcaaggaaacttgagtgggtttgtcagaactaggagcagtaagaaaacttgaaagagcctcctgtcttaagaaggcacttgactgcctctgatcaattcagggaggcttcaacagctct

SEQ ID NO: 914128 - DNA, 120 bp, Artificial Sequence
  ENSG00000203801_20 (sequence is synthesized)
taagaggattaggccaaaggacttcagtgaaacttttgtgcttttgttccctagagtggaaacccttgacacgtgttacacacaaacaacacttggggtggaacaagaggtttacaatga

SEQ ID NO: 914129 - DNA, 120 bp, Artificial Sequence
  ENSG00000203801_21 (sequence is synthesized)
cttgggaacttccactaacgctgtcagtccatggacttctagaggagctgaatctaccgctggctcaggaacaggaacctgacctgggcctaagctaatgaatccatcaaatttaccttg

SEQ ID NO: 914130 - DNA, 120 bp, Artificial Sequence
  ENSG00000203801_22 (sequence is synthesized)
gcaaagtgattgcctcaggaatgggcagtgacccaactagagccaataggacttttcccaggtatcctgaaacagacagtctttttctcatggatgtggacctgagacagtatagttctg

SEQ ID NO: 914131 - DNA, 120 bp, Artificial Sequence
  ENSG00000203801_23 (sequence is synthesized)
ggagttgctgacaaccatcttatggtcatgagctgatttgagattggcttcaacaagcaggaagtggaacagatggagataaattggatcctgaattgtggaaagcttacaaagggcttc

SEQ ID NO: 914132 - DNA, 120 bp, Artificial Sequence
  ENSG00000203801_24 (sequence is synthesized)
tgcttctgactacgatggagtgactggtatcagatggccctcttgtcaggaacaaccataaaagctatacttcacccagctttttgatagcatggagaaatgtcaaggcagctgggattg

SEQ ID NO: 914133 - DNA, 120 bp, Artificial Sequence
  ENSG00000203809_0 (sequence is synthesized)
agggccggcgaaggaaagacgcggcgcgccggcttccgaaccgcaacttgctgcgagacctgtcacttccccgcggtgcccagtcctcgcccctccctggcgctcgcgcctcctcttttc

SEQ ID NO: 914134 - DNA, 120 bp, Artificial Sequence
  ENSG00000203809_1 (sequence is synthesized)
ttcctgctcctcagcacggagctcccctcgacgttgctcacgtgccagactcgggaccgcgagcggcgtccgcacccgcacgcacacccggccacgctcgcactcgcgcggccgcggggc

SEQ ID NO: 914135 - DNA, 120 bp, Artificial Sequence
  ENSG00000203809_2 (sequence is synthesized)
cggctgcttacctccggggcctcatggtcgcgtcgctagcctggatgccctggacatcattccgaacagcacaattcaagggtggctgaaacaacaaaaatgtaacgtcttacagatctg

SEQ ID NO: 914136 - DNA, 120 bp, Artificial Sequence
  ENSG00000203809_3 (sequence is synthesized)
aaggcttccgggtcgattctggactgtgatgagaatctgtgccaagcctctctcctggcttctggtagactcgggcattccttagcttgtaaatggctgctgcttgtgtcatcacattgt

SEQ ID NO: 914137 - DNA, 120 bp, Artificial Sequence
  ENSG00000203809_4 (sequence is synthesized)
cttccctttctacttatctgtccccatgccccaatttttccttttcaggacaccagtcagattaggacccaccctaatgatctcatcttaacttgattaactacaaggaccctattttta

SEQ ID NO: 914138 - DNA, 120 bp, Artificial Sequence
  ENSG00000203809_5 (sequence is synthesized)
agtacacatttacagagactggggggtaggacttcaacatctttttggagggatgcagttcaacccataacaagaatcattgttagaaatgattttgcttcttcactgaaaaattaatat

SEQ ID NO: 914139 - DNA, 120 bp, Artificial Sequence
  ENSG00000203809_6 (sequence is synthesized)
cattctgcagagaactgacttgctgcacatggcacagattttttgcatttatcatagtaaaagaaatcagtcacaaaagtttgttttagactgctacatacctatcacaaatacaaatta

SEQ ID NO: 914140 - DNA, 68 bp, Artificial Sequence
  ENSG00000203809_7 (sequence is synthesized)
agaagaggaaaatgagaaatgaacaggaagtttaacattcataaaaactgttggctgggcgcggtggg

SEQ ID NO: 914141 - DNA, 70 bp, Artificial Sequence
  ENSG00000203809_8 (sequence is synthesized)
gcgggcgcctgtagtcccagctactccgggggctgaggcgggaaaatcgcttgaacccgggagggggaga

SEQ ID NO: 914142 - DNA, 120 bp, Artificial Sequence
  ENSG00000203809_9 (sequence is synthesized)
aagactccatctcaaaaaaataataataattcataaaaattgtgacaaacttgtgtttgtctattaaactggcaaaaatcctaacgtttgacaacacactgttaaaatacagctttaaag

SEQ ID NO: 914143 - DNA, 120 bp, Artificial Sequence
  ENSG00000203809_10 (sequence is synthesized)
ctaacgtttgacaacacactgttaaaatacagctttaaagttttaaaataattttttggtgaggctatagataaacccatactttgatacattcctggtgggggtaccaagggggcacaa

SEQ ID NO: 914144 - DNA, 120 bp, Artificial Sequence
  ENSG00000203809_11 (sequence is synthesized)
catttagagagggaaatttggtgaaatctctcaaaatttaaaatatactctatgacttagcaatccctttcctgggaaattatcccagagatataagtgcatcttatacagcaaatgatg

SEQ ID NO: 914145 - DNA, 120 bp, Artificial Sequence
  ENSG00000203809_12 (sequence is synthesized)
tgtatacctggattgatttttataatagcaaaagaatggaaatagcctacgtgtccacctacaaggactgaataaataaacaatagtacactgagatgtaaaatccttctgtgtatttat

SEQ ID NO: 914146 - DNA, 120 bp, Artificial Sequence
  ENSG00000203809_13 (sequence is synthesized)
atgggaagagctccacaatacattgttaagtacaggaagctgcataccaaacatcacatatgctgccttttgtgtgagaaaggaaggggataatgagaatatatgttatacttatttata

SEQ ID NO: 914147 - DNA, 120 bp, Artificial Sequence
  ENSG00000203809_14 (sequence is synthesized)
acgctcgcactcgcgcggccgcggggccggctgcttacctccggggcctcatggtcgcgtcgctagcctggatgccctggacatcattccgaacagcacaattcaagggtaaccacagtc

SEQ ID NO: 914148 - DNA, 120 bp, Artificial Sequence
  ENSG00000203809_15 (sequence is synthesized)
tagaaaaaagcatctctggcctgggagtgagatcaatgcagacaaactgatcagaagcaaaatcctgttgtgacccctcctaagaattttccacattggctaccaccttcagcaaattcc

SEQ ID NO: 914149 - DNA, 120 bp, Artificial Sequence
  ENSG00000203809_16 (sequence is synthesized)
gcactcgcgcggccgcggggccggctgcttacctccggggcctcatggtcgcgtcgctagcctgggtgtgagagggggagagggtgtgaggacgtgtgtggcgttcagtcccgaaggacg

SEQ ID NO: 914150 - DNA, 120 bp, Artificial Sequence
  ENSG00000203809_17 (sequence is synthesized)
gggcggaggaaggggcctggagtctgtcacttcctgagggagcgcggaggtcgagagacctgtgaggcgcgcggcggggccgggaggatgccctggacatcattccgaacagcacaattc

SEQ ID NO: 914151 - DNA, 120 bp, Artificial Sequence
  ENSG00000203809_18 (sequence is synthesized)
aaggctcttgggtaaccccctcccacaccaactctgagtttgtttatggcttgttttggacaataagacattagcaaatgagatataagtacaggcttgagaagtacatgggcactgggg

SEQ ID NO: 914152 - DNA, 120 bp, Artificial Sequence
  ENSG00000203809_19 (sequence is synthesized)
cttgcttgctggctgctctgtggaacctgagactaccacgtgaagaagaagttcgaagtgctagaggttgagagaacatgtgcagcaaagatgaagcatcccagctgagattcccctaga

SEQ ID NO: 914153 - DNA, 120 bp, Artificial Sequence
  ENSG00000203809_20 (sequence is synthesized)
tcaatcagcttgccaactgccgcaaaagcgaataaagccttccaagagcatccagctataaggtgagccagtccagaccggaagaatcacctgatcaactgaaagatatatgtgaaataa

SEQ ID NO: 914154 - DNA, 120 bp, Artificial Sequence
  ENSG00000203809_21 (sequence is synthesized)
taaatgttagaggttttaaattttaagaggtacagaggcatatggttgatggttctgttgtataatcattatttagtctggaaagaatcacttggagtcgtctgcttttaacttttgtca

SEQ ID NO: 914155 - DNA, 120 bp, Artificial Sequence
  ENSG00000203809_22 (sequence is synthesized)
tggagtcgtctgcttttaacttttgtcataaacacaacatatgagataacatatttcaaaacattaaaaaatttttgttttgttttgtttgggttttgaaatggagtctcgctctgtcac

SEQ ID NO: 914156 - DNA, 120 bp, Artificial Sequence
  ENSG00000203809_23 (sequence is synthesized)
tttttaaactatagaaacccccctcaggtttgtagctgatgttgggcatgaagatgtctgtgcttttagagcccattttcaagttttagatacagattttcccccaacaaaaattcatgg

SEQ ID NO: 914157 - DNA, 120 bp, Artificial Sequence
  ENSG00000203809_24 (sequence is synthesized)
tatatctctcaagaaaagcattgaatttatttcattgtaccatattttgaaatgtcaaggaaaaaggaagatgcctcaaaacattgcagattcacacacagcttttctttatttttagca

SEQ ID NO: 914158 - DNA, 120 bp, Artificial Sequence
  ENSG00000203809_25 (sequence is synthesized)
ttaacataaattacattaaactcttgatttttaaaaatcgttatacagttaattagtgaagaattcctaagtgtttatctgcccagggtcatttcttccattagttcccccttagtactt

SEQ ID NO: 914159 - DNA, 120 bp, Artificial Sequence
  ENSG00000203809_26 (sequence is synthesized)
aactgaaattgctgtgttttcagacctaaagattaagtcatgggaggttggtattgaagtacaaaaggtatttggtattttagatacatgataaataaggcatgaatacgttagctcaaa

SEQ ID NO: 914160 - DNA, 120 bp, Artificial Sequence
  ENSG00000203809_27 (sequence is synthesized)
ttatgggacagaattaaaatatgataataatcgtgatttccatttattaggacacagtatcctggacctggggcaagtggcaaatgaattttaagcagttggcaaagcttttcataagta

SEQ ID NO: 914161 - DNA, 120 bp, Artificial Sequence
  ENSG00000203809_28 (sequence is synthesized)
ggcaaagcttttcataagtaaatctagctgcatatcagactgtattgtagtcccagctgcttggggggtagggtaactgaagcagaggatagatagcttgagcccaggagttcaaggctg

SEQ ID NO: 914162 - DNA, 120 bp, Artificial Sequence
  ENSG00000203809_29 (sequence is synthesized)
actgcactccagcctgggcaacagaaccagactttcgctctaaaaataaattaataaataaaaagtaattcagcagttttctttcttggatagtaaaaaatatctcctaaaataggaaga

SEQ ID NO: 914163 - DNA, 120 bp, Artificial Sequence
  ENSG00000203809_30 (sequence is synthesized)
ggtgtagggtgaagaattaacatatgctgaatccttaccaggtggcagattctattcttagcatctatgtacatgatctcatttatatctcataataaacctataaattgagcatagtca

SEQ ID NO: 914164 - DNA, 120 bp, Artificial Sequence
  ENSG00000203809_31 (sequence is synthesized)
tttccatttacaaaggaggagcctaagactactcactgtatgtttctcaaagtgtattccacagatcactcacaccagataacctagggaacttaacagaagtttacatttcttgtcctc

SEQ ID NO: 914165 - DNA, 120 bp, Artificial Sequence
  ENSG00000203809_32 (sequence is synthesized)
ttaacagaagtttacatttcttgtcctcaaatcagatttccctgactcataatttctggggcacttttaagaaaaccaataaattatacaaaagcggccgggcacagtggctcatgcctg

SEQ ID NO: 914166 - DNA, 120 bp, Artificial Sequence
  ENSG00000203809_33 (sequence is synthesized)
ctcccgctccaagccggctttggccgcccggcagcaaccgcagcggcgagcctgggcggccgctgtggcaacgcagtgcccacaccgggcgccgacccagcagcaccgagcggggagaga

SEQ ID NO: 914167 - DNA, 120 bp, Artificial Sequence
  ENSG00000203809_34 (sequence is synthesized)
attgaatgaatcaaaagcattttaatctgtgacttcaatccctatatagagagggagcttgtcaagtctgcacatgatacacagcacagaagataccagacaactgattaatagatgcag

SEQ ID NO: 914168 - DNA, 120 bp, Artificial Sequence
  ENSG00000203809_35 (sequence is synthesized)
gcggccgcggtggagctttaccgcgggcgcccccgaacccccgaagcgcgtccccgcgcaggccgtgggcgcgcacggccgctgccgccgtttgttctggtggaggctgcgagtgcctgg

SEQ ID NO: 914169 - DNA, 120 bp, Artificial Sequence
  ENSG00000203809_36 (sequence is synthesized)
agtctgggagggaagctcacatggcggtccctagggtgcgactggagggaggcgggacgatgctactccttgctccccaacctgacaccttggtgcggtaaaactgtaagaaggtaacaa

SEQ ID NO: 914170 - DNA, 120 bp, Artificial Sequence
  ENSG00000203808_0 (sequence is synthesized)
gacacgcgccactgtttttgttttcaaacaggggtacttaaccgaaactagcaatcccaggcggtacaaggccctccatcgtaggcaaagcactacctgaatgtagatttgggccatacg

SEQ ID NO: 914171 - DNA, 120 bp, Artificial Sequence
  ENSG00000203808_1 (sequence is synthesized)
ttggaaaataagacatgagagtatgctccgatcaacttttactgttcactggacaactattttgggaatttgcagacctataaagcccatctataaatctcaagcatgtccactttcaga

SEQ ID NO: 914172 - DNA, 120 bp, Artificial Sequence
  ENSG00000203808_2 (sequence is synthesized)
aagaaggcaaacatccatatgtgaactgcctgtggggtttccaaggaaaggaacggcaggcagcctctatgagcttaaagaagataactgggactttagtcctataacctcaaggaacag

SEQ ID NO: 914173 - DNA, 120 bp, Artificial Sequence
  ENSG00000203808_3 (sequence is synthesized)
tattctgtgaaccatctgagaagcttggaagaggaccccaaactccaaataagaagctcagtgtgtctgacaccttgactgcaggcttgggaggtcctgagcagaagatccagttcaaca

SEQ ID NO: 914174 - DNA, 120 bp, Artificial Sequence
  ENSG00000203808_4 (sequence is synthesized)
gtgcctggactcctgatccacaaaaactgataacaaatatttattgttttaagatgctaagtttgtagtcattttttatacagcaacagaaaactaaacacacacataaacagttataag

SEQ ID NO: 914175 - DNA, 120 bp, Artificial Sequence
  ENSG00000203808_5 (sequence is synthesized)
gcgccccccggcgggcggagcccggcgccgcggccaggatttcccacctcgctcccgcgactccgctgcgggtctgcacacccgaggactcggggtacttaaccgaaactagcaatccca

SEQ ID NO: 914176 - DNA, 120 bp, Artificial Sequence
  ENSG00000203808_6 (sequence is synthesized)
ctgagaatcattccttgatagaacctggaaaacaagaccctatgagagaccctgggaattacattaaattcactgtggttcccagtgtcactgaagaggttttcctttcatagtcaggta

SEQ ID NO: 914177 - DNA, 120 bp, Artificial Sequence
  ENSG00000203808_7 (sequence is synthesized)
gtcaccatactgttaagcatttgaacacatgggcaacttccagaatagttatgacattgatataccaatctccaaaattcctagaataccatgttttcatggttgaccttcaaatcagtc

SEQ ID NO: 914178 - DNA, 120 bp, Artificial Sequence
  ENSG00000203808_8 (sequence is synthesized)
agttctttgtaacattgagccataaagatagggcaaatacttaatgttttacatatattcagagattgaccctcaaaatacagcccagagaaactcaaaagaattaactctatttcttca

SEQ ID NO: 914179 - DNA, 120 bp, Artificial Sequence
  ENSG00000203808_9 (sequence is synthesized)
aattgtgtgacgccaccaaggccagatgacttcagcattgggaaggcaatatccagctgtcatcttcttgatcctcatatgctactactagcatctagcatttactgagcagatagtttt

SEQ ID NO: 914180 - DNA, 120 bp, Artificial Sequence
  ENSG00000203808_10 (sequence is synthesized)
attgtccagtttttaaagataagaaaattgaggtattaggaaagttaagttggttgcctagggaaacacgaagatatagcccagattcactcccaggcaggcagatgccagtgtctgctc

SEQ ID NO: 914181 - DNA, 120 bp, Artificial Sequence
  ENSG00000203808_11 (sequence is synthesized)
cctcttcatgtgttctcacttccatcctttacctcggtgaaaagacgttttccttccgtacactcatcagtccaagagggatgaagcttgtggaaattttgcagcagccttccctgacca

SEQ ID NO: 914182 - DNA, 120 bp, Artificial Sequence
  ENSG00000203808_12 (sequence is synthesized)
gggtggcgcggacctcgggtccccagccatcggcgctctcccggggccctctgacctcgctccttaaaggaggagggtccgtggcaacggtcctcctcggccaggcgctctcgggacgcg

SEQ ID NO: 914183 - DNA, 120 bp, Artificial Sequence
  ENSG00000203808_13 (sequence is synthesized)
ggggtgaggagtgagcgccgtggcccaccctactctccgagcggggacggagtgggcgacaccgcgcgcccggctgcacgcaggctctgcgcggctcgaggcggccctacagggggcgag

SEQ ID NO: 914184 - DNA, 120 bp, Artificial Sequence
  ENSG00000203808_14 (sequence is synthesized)
agatgagcggagagcaaatgaatttccttctgctcccctgttgaagaggagagaaaaattcttcaagctttatacaggactccatcataggactggagagagattggatgtcagagtgat

SEQ ID NO: 914185 - DNA, 120 bp, Artificial Sequence
  ENSG00000203808_15 (sequence is synthesized)
gctcccgcgactccgctgcgggtctgcacacccgaggactcggtttgaaacgcccgcttatttattttcttgtcgcctcgctacaagattctatccttgtttgggcatgagtggggggcg

SEQ ID NO: 914186 - DNA, 120 bp, Artificial Sequence
  ENSG00000203808_16 (sequence is synthesized)
taaacaacttctttatatgaggtatttagtggttagaaaggaaaacttgttaaaggtagaaaaataacttttggcaatttttaatagtatgtaatttagtggtatagataagattttgat

SEQ ID NO: 914187 - DNA, 120 bp, Artificial Sequence
  ENSG00000203808_17 (sequence is synthesized)
ctcaaagttggacgacccactcgtatatctcctttttgggagattcgcccataactcagcacaaacagggaatagcccggaaagcgcgcgagttcccgtccgattgtggcgggggaggct

SEQ ID NO: 914188 - DNA, 120 bp, Artificial Sequence
  ENSG00000203808_18 (sequence is synthesized)
ctaatctcaagaccatgagttcctaggggctgcagagtccaaggcaaatcccactgatcctttctcatatttgcacaggggtcaaatcaagttcagaggaatagccccatggggatggga

SEQ ID NO: 914189 - DNA, 120 bp, Artificial Sequence
  ENSG00000203808_19 (sequence is synthesized)
agcctccagatatgcaggtaaaggaaaggccatgcaagagagaagcctgcagcctccagggacttgctttggcgactggggtgtggggtgtttacggcctcattttgtgccaaagccact

SEQ ID NO: 914190 - DNA, 120 bp, Artificial Sequence
  ENSG00000203808_20 (sequence is synthesized)
ctcttttcccggactcactacttctcagagtccctcctgaccatgaaaattaggacagaaaatcacaaggcagtcaccccaatttcttaaagtctaggaacaactcagctagggccagct

SEQ ID NO: 914191 - DNA, 120 bp, Artificial Sequence
  ENSG00000203808_21 (sequence is synthesized)
tcctgggcatgcgacctgtgcagtcacaaagggctccaggcttacaagagccccgcacttggcataatgctctgccatctccatcttgaaattcttaagactctttgaacaaagagtcca

SEQ ID NO: 914192 - DNA, 120 bp, Artificial Sequence
  ENSG00000203808_22 (sequence is synthesized)
tttatttatgaatatccagatcttgtatacaaagccataaagcatttttagcacaagaacacaagctgttgctcatcttagtgcactcttatcaatgacaagagaaccaaaggatggaaa

SEQ ID NO: 914193 - DNA, 120 bp, Artificial Sequence
  ENSG00000203808_23 (sequence is synthesized)
taattaggctaagactaaaatgagcccaatttttaataaaaattaaattttaggggcactatgatacagaggtcagaggtatttttctaggatatgtgtcatttctgctttccatctggt

SEQ ID NO: 914194 - DNA, 120 bp, Artificial Sequence
  ENSG00000203808_24 (sequence is synthesized)
ttgattattttgagatagtatgtggtttgctagacatttcaaaccagacatacaatacagctacctaaaagtcactgtaggtttttgatttttttttttaataaagtgagaaaacctgag

SEQ ID NO: 914195 - DNA, 120 bp, Artificial Sequence
  ENSG00000203808_25 (sequence is synthesized)
tgcaaacctaggtattggataatagcatatctgttaacaccaaggaacagtgccagccctatacagaagtgaagactgtgaagtttcaaagcatccctttacctcctctttcagtatccc

SEQ ID NO: 914196 - DNA, 120 bp, Artificial Sequence
  ENSG00000203808_26 (sequence is synthesized)
tttatcccattatgtttgtacccctttctccttatagtaaaaatagatttctgggaaacttacatataaaatcttgtcccctctgccactgagttgagccaaaagtctacatcccatttc

SEQ ID NO: 914197 - DNA, 120 bp, Artificial Sequence
  ENSG00000203808_27 (sequence is synthesized)
tatgtggctttgttctctgctgactttaatggttagaaagctatctgataattaatccctgtaaaattattacctggtagtactaacttaagatgtgacttctacctgggatgctctgca

SEQ ID NO: 914198 - DNA, 120 bp, Artificial Sequence
  ENSG00000203808_28 (sequence is synthesized)
cccagagccattgtaaagcccactgacaagccagtgggtgcttcctgaaggcctttgattgcatctggcagacagctgccttcgtgtctgcttggaagagctgcccatgatggcaatgtg

SEQ ID NO: 914199 - DNA, 120 bp, Artificial Sequence
  ENSG00000203808_29 (sequence is synthesized)
tggccaagaaatagaagaaaccattccagtgattcctttagttcatgctaaacttgaatagctcagtagttcatccagactaatgatttacatcttgtcacattgtcccacttatggtag

SEQ ID NO: 914200 - DNA, 120 bp, Artificial Sequence
  ENSG00000203808_30 (sequence is synthesized)
atgctaacatacaggaaaagcaacgtcctttacataaccccagtacttcctctcccgttctccttgctgactttgcttcctaggtcaccgagaaaatgaaaatcactggagaactttcac

SEQ ID NO: 914201 - DNA, 120 bp, Artificial Sequence
  ENSG00000203808_31 (sequence is synthesized)
aatctctcaccacatctcccacttgccagcaactactctcacagatactcttctcttttcattcatgaagaattgtccatatttctctttaaggccactggatcccatcacctgctcaag

SEQ ID NO: 914202 - DNA, 120 bp, Artificial Sequence
  ENSG00000203808_32 (sequence is synthesized)
gtcatcactcccgcagttcactcctcacttatggattatttccatctgcatgcaaatgcaccatcttatctgaaaatcaataacaaccccctctcttgaccccactttctgcccaggcta

SEQ ID NO: 914203 - DNA, 120 bp, Artificial Sequence
  ENSG00000203808_33 (sequence is synthesized)
ctgatcatttctatttcagttcacatcaaaactccttgaaaaacttacctacccttactgttccaacttcttgcctctcattctccttcaacctgcttcagtcgagtttttgttcctgct

SEQ ID NO: 914204 - DNA, 120 bp, Artificial Sequence
  ENSG00000203808_34 (sequence is synthesized)
cactccaccaaaactgctcttgttaagttccccagtgacttccatgttgcttaacccgatggttcattctcaggcctctcagccacatctgagacagttcatcactcccttctcccagaa

SEQ ID NO: 914205 - DNA, 120 bp, Artificial Sequence
  ENSG00000203808_35 (sequence is synthesized)
attctctttgcttggcttccaggatcccaggctctcctgattttctttctacctcattggctgctcttcctcagatcctttgctgattcttcccccatcgctttgtccccttaacaatgg

SEQ ID NO: 914206 - DNA, 120 bp, Artificial Sequence
  ENSG00000203808_36 (sequence is synthesized)
agtgctccaaggtaagcctcagaccatttttcttctgaatctacactcactcttttggccatctcatggagactcatggctttaaataccatgtatatgctaaatactcccaaagctgtc

SEQ ID NO: 914207 - DNA, 120 bp, Artificial Sequence
  ENSG00000203808_37 (sequence is synthesized)
tctacagcgcagacttttctttgaaactccaggctcatatctccagctgtctactctacttcagcgtctagcaggcatctcactcttaatcctcattttactttccaagtccactctttt

SEQ ID NO: 914208 - DNA, 120 bp, Artificial Sequence
  ENSG00000203808_38 (sequence is synthesized)
ctctcttccccctagtctattctcagcaggctagccagagtgatcctattaaaccatggggcagatcatatcactcttctacttcagaccctacaatggcttctggtcactcttagaaaa

SEQ ID NO: 914209 - DNA, 120 bp, Artificial Sequence
  ENSG00000203808_39 (sequence is synthesized)
aaatcaaagtccttaccatgacttatttaggccttacccagtctgcccacggttactttctgttcattctgtgccagccaaactagccttccagctgctcctggaacaggccagtcatgt

SEQ ID NO: 914210 - DNA, 120 bp, Artificial Sequence
  ENSG00000203808_40 (sequence is synthesized)
tcatgcctaagggcctgctcagttgctgtcccctttgcccaaattgctcttccctcagatatctgcatggattcttccattgcctctttcaggtcttcattcagacattcctttttgtgg

SEQ ID NO: 914211 - DNA, 120 bp, Artificial Sequence
  ENSG00000203808_41 (sequence is synthesized)
atactttccttgaccaccctattaaaattgcaatgccctttcttacccaccttctctaatttatcactccccttggtactatcaccttctaaacatttactgatttactttattatgtct

SEQ ID NO: 914212 - DNA, 120 bp, Artificial Sequence
  ENSG00000203808_42 (sequence is synthesized)
cccgcatccccagaatgtaagctttatgaggggtgggatctccatctgttacctgatgtatccccatgcccatgtcagccatagaaggtgctcaatacacacttgttaaatatttgataa

SEQ ID NO: 914213 - DNA, 120 bp, Artificial Sequence
  ENSG00000203808_43 (sequence is synthesized)
tgtatctctgtatcaaagaacatagtctgcatgtgatcttcagaaaaccagttttccaaaggaagggatcagatctccaactagggttctttcttaagctcttcacaaagctgaagcact

SEQ ID NO: 914214 - DNA, 120 bp, Artificial Sequence
  ENSG00000203808_44 (sequence is synthesized)
cgctgtgaggcagacccttgtgtttgtgcggtgggctgagcattccctgtgaaccctcgctgcccattcacaccactgaaagctctttctgctgaacacgtgaaactgaaacaccgtgca

SEQ ID NO: 914215 - DNA, 120 bp, Artificial Sequence
  ENSG00000203808_45 (sequence is synthesized)
acatttttactattggttcaggagtactcttttgacttagtaatgatcaggcagctttgttttccaggaaatgcttctttttaaatgttattttatttgtagcaataaaataggcttcaa

SEQ ID NO: 914216 - DNA, 120 bp, Artificial Sequence
  ENSG00000203808_46 (sequence is synthesized)
tgcatttattctactttttagtcgcatcaagtaactgcacatttaaaataaataattgctttcactggaggttgtagcaaaaaagtgaattccggaaatgcctatgtggacagtagcaac

SEQ ID NO: 914217 - DNA, 120 bp, Artificial Sequence
  ENSG00000203808_47 (sequence is synthesized)
ccaccctcaggctgagaatacttgctggctctttcttgagaagcaactcctgagtctatagggcaagacaatgcatttgagtaaatgtgagaaaagaattgagaaagtggaatttcattc

SEQ ID NO: 914218 - DNA, 120 bp, Artificial Sequence
  ENSG00000203808_48 (sequence is synthesized)
tcccagttttgatgcagaaaagggcaaactgcccatagttatccaccccctccccaattataacaatgagaaatacaagaaaaatttgtaaagtttattcacaatgcagttgttgaaagg

SEQ ID NO: 914219 - DNA, 120 bp, Artificial Sequence
  ENSG00000203808_49 (sequence is synthesized)
tgttgaagaggagagaaaaattcttcaagctacgttttccttccgtacactcatcagtccaagagggatgaagcttgtggaaattttgcagcagccttccctgaccatggtggcctgaag

SEQ ID NO: 914220 - DNA, 120 bp, Artificial Sequence
  ENSG00000286256_0 (sequence is synthesized)
ttgctacaaacactgcgtacacattattctatttaatcttcataacccagtgaggatatcaaccaggatatggcattgcattggatcccaaccaggatatgacgttacattggatcccaa

SEQ ID NO: 914221 - DNA, 120 bp, Artificial Sequence
  ENSG00000286256_1 (sequence is synthesized)
ccaggatatggcattgcactggatcccaaccaggatatggcattgcactggatcccaaccaggatatggcattgcgttggatcccaaccaggttatggcattacattggatcccaaccag

SEQ ID NO: 914222 - DNA, 120 bp, Artificial Sequence
  ENSG00000286256_2 (sequence is synthesized)
gttatggcattgcattggatcccaaccaggatatgacattgcatttactcatcacgcctccttaggttcctcttggctgtgacggtttctcagactatccttgttttttaggaccttgac

SEQ ID NO: 914223 - DNA, 120 bp, Artificial Sequence
  ENSG00000286256_3 (sequence is synthesized)
agtttaaaggtattggaaaacccaagcattgactctccagaccagcctcgcacctaagaacgccgtgggatgcagtttcagacagtgagaaatctgctggggatgcctgggaaagggaca

SEQ ID NO: 914224 - DNA, 120 bp, Artificial Sequence
  ENSG00000286256_4 (sequence is synthesized)
tacctggcaggtgccgctccatggccttcttgctgccttgaattgggacatgagcctgagtcgcagcagccgtcttgtgactgagaggtggcaagcaggaggaagaggctaagagaatag

SEQ ID NO: 914225 - DNA, 120 bp, Artificial Sequence
  ENSG00000286256_5 (sequence is synthesized)
agacactgttgagctgctgaagcacagcaagcggccacttctctatgcttcttgctatttgactgttaagctagtgcaagttacttttctggtcagaatgaattcataactgaaacatgc

SEQ ID NO: 914226 - DNA, 120 bp, Artificial Sequence
  ENSG00000286256_6 (sequence is synthesized)
gcgctgcaccacggcggccacctgctgtgcggttctgagggcttccgcggttctgagggcttccgcgtccctgccatgcccatcttggggcttcagaagccaacacgatggttttcgggc

SEQ ID NO: 914227 - DNA, 120 bp, Artificial Sequence
  ENSG00000286256_7 (sequence is synthesized)
tcacatcccaaaggctgctcttccttttagcacctgggacctaccaggaacctcaacctctaacaacattggtccccgttaccgtggagtttgcgcccagcgttcgctggagggccgttt

SEQ ID NO: 914228 - DNA, 120 bp, Artificial Sequence
  ENSG00000286256_8 (sequence is synthesized)
tcttggcgatagcagcttttggaagcctaggcgcggcacagaaggtcagacaggaatggcttgtcttccactacaacatggggcttcatcggaagcaccgctgctgaggaacaaccacct

SEQ ID NO: 914229 - DNA, 120 bp, Artificial Sequence
  ENSG00000286256_9 (sequence is synthesized)
cctcctgaccatcgcaagctgcccaggaagacatgctcatagcagtgtccgtttccctgcctaactttccaccagaagattccttcatgtctacgggcggacccaggccgatcttggaat

SEQ ID NO: 914230 - DNA, 120 bp, Artificial Sequence
  ENSG00000286256_10 (sequence is synthesized)
gctgtctcagactgaccagtggccgactaaacatgacagcaagtactgttgccagcctctgccttcttatacttgtggagtttgtttaaatctaaattcaggactcaccctgttaaattt

SEQ ID NO: 914231 - DNA, 120 bp, Artificial Sequence
  ENSG00000238031_0 (sequence is synthesized)
gttctctcaggtcctgattctgatggatacttttacccccaatctttggaattcagctaacttaccagctctgtagggaaaatacggcgaagccatcatagagaagtcccaagatgccaa

SEQ ID NO: 914232 - DNA, 120 bp, Artificial Sequence
  ENSG00000238031_1 (sequence is synthesized)
ctgttatatcctgggaactgtgctagccactggagatacaataatgaacaggagagaatctaggtctcaaggtcttacgtcccagtaagggaaacagacaactaaacagatgaggaaagg

SEQ ID NO: 914233 - DNA, 120 bp, Artificial Sequence
  ENSG00000238031_2 (sequence is synthesized)
ttaaacaagacctgatgttttcctgctcactggagtttgctggggttattgcgctgcctttctgtttactggactgataaagaaaataaaattgagcaattgcttctgcctcaggaaaag

SEQ ID NO: 914234 - DNA, 120 bp, Artificial Sequence
  ENSG00000260918_0 (sequence is synthesized)
aaaataagtaagtgaaagaaaggccaaatagcattattcatttgccttaggtttacagggtcacagattcattagcttaattacaacctcatttggatgccaaagaatgagcaagagcaa

SEQ ID NO: 914235 - DNA, 120 bp, Artificial Sequence
  ENSG00000260918_1 (sequence is synthesized)
tcagtattgctacctggctcttgcttcttcttcctgggtttgttttgtttttcagagaaacagggaagggaggacattttctaatataattgtttatagggacaaattgttaaaatatga

SEQ ID NO: 914236 - DNA, 120 bp, Artificial Sequence
  ENSG00000260918_2 (sequence is synthesized)
tgtgtgtgcattttgcaagtttgacttgtgtaaaatagattacctctcctgtcttctttccttcccacactgtataccatcctgcctcatgtcaacccaatgaaattgattccattattt

SEQ ID NO: 914237 - DNA, 120 bp, Artificial Sequence
  ENSG00000260918_3 (sequence is synthesized)
ttcctctttcttatttccaaacctcataggctatcttgcctatgaacagttgaaagttttgacttctttggactcaattgaattcactaaaacaatgaattttaataatttttttccaaa

SEQ ID NO: 914238 - DNA, 120 bp, Artificial Sequence
  ENSG00000260918_4 (sequence is synthesized)
ttcttattcccattgcctttaaaagtcctttagaggcaggttgtataatcataatagcctcctctgaactgccttgagttgtttttcttttctgcttttctgtcacttatgtaaagagta

SEQ ID NO: 914239 - DNA, 120 bp, Artificial Sequence
  ENSG00000260918_5 (sequence is synthesized)
catgtatttacataaaccttctctgtcccggcctatttcaaaataaagtggaaataaaaatctttagctcaatcttacagaaatttatattatctaccccagagtttgaagataaggcca

SEQ ID NO: 914240 - DNA, 120 bp, Artificial Sequence
  ENSG00000260918_6 (sequence is synthesized)
tctccttacactataattgtaatatagtgaacttaaagtgtatcaatcctttatcaaacttgtttattcattagctttttcagtctccagtaggcccattttacaatttattattattcc

SEQ ID NO: 914241 - DNA, 120 bp, Artificial Sequence
  ENSG00000260918_7 (sequence is synthesized)
tcctagaagggcttatcattcaaatagcacaccactagttacagactatccttgatccatttcatcttttttgtatattacccccattacaaatttctacttctatataacaccctaccc

SEQ ID NO: 914242 - DNA, 120 bp, Artificial Sequence
  ENSG00000260918_8 (sequence is synthesized)
acttcccctcagccttgcagacagcctgcaaactgtctaaatttctcccataaaaatatgtagaacatctgtttcctctagacagcatttatatagatttggaagagagttctctaaaca

SEQ ID NO: 914243 - DNA, 120 bp, Artificial Sequence
  ENSG00000260918_9 (sequence is synthesized)
tataccaaagagtatgcagcctaacctcgaaaagttaacaataagtgagcatcatgatggagagagggaattcacagtggatggaagacaccttggaattattaatatgattggggacct

SEQ ID NO: 914244 - DNA, 120 bp, Artificial Sequence
  ENSG00000260918_10 (sequence is synthesized)
ggtcttggtgctgtctctgccactgcctaggagcatgactttgaacatgccaccagatgacctccaagttctcttccaaaactaaatttcaaaggtaattttagagaagttcatttgtat

SEQ ID NO: 914245 - DNA, 120 bp, Artificial Sequence
  ENSG00000260918_11 (sequence is synthesized)
gggaggttagcagaaagatacaggaggaccatggcctctgctaacataacccaactaatttggtaataattcttgatatcatgtctttgagagtaagccatctggtatcaagtgaattga

SEQ ID NO: 914246 - DNA, 120 bp, Artificial Sequence
  ENSG00000260918_12 (sequence is synthesized)
attcaatacctattcatgttcctttaaaaatatataggacatacagttacatttgcaagccaagtggaaaaatgttactatttttgtaattttctataactacaatatttccctttaaga

SEQ ID NO: 914247 - DNA, 120 bp, Artificial Sequence
  ENSG00000260918_13 (sequence is synthesized)
gagagtctcagataatacaaatcctttatttttagatccctggaagataaagatgttcttaaaccattctctgtaattcaattaaggaacagccatgcaacaccccatcatgggtagaaa

SEQ ID NO: 914248 - DNA, 120 bp, Artificial Sequence
  ENSG00000260918_14 (sequence is synthesized)
agccaatctctaggcagcatctaagcccaaatgttgttgcagtgccctcctcagtcttggaccccacactgtcttgtttcctgaaagtagagtagcagatatttttgagctctcaggcaa

SEQ ID NO: 914249 - DNA, 120 bp, Artificial Sequence
  ENSG00000260918_15 (sequence is synthesized)
gaagcagctttccatctataatagttggaaagatccaaggtctttagaacatctgttatccactctccttgctcaagtccttccaccccggcttacctagttaactacttacctagttaa

SEQ ID NO: 914250 - DNA, 120 bp, Artificial Sequence
  ENSG00000260918_16 (sequence is synthesized)
ctacttacctagttaaatccactggtgttaggcacagccatgacaaaactgacagtttattaatttgtgattagcattctagctattcatgttcttcaagcatgcatgaagaattccggt

SEQ ID NO: 914251 - DNA, 120 bp, Artificial Sequence
  ENSG00000260918_17 (sequence is synthesized)
ctctgaacattgtcctcaatacaacttctgtaaacagatgttcttaactttttcttctttgttgaaagataccttccaactctaaactttcatgattttcctgagtatttcctggccatt

SEQ ID NO: 914252 - DNA, 120 bp, Artificial Sequence
  ENSG00000260918_18 (sequence is synthesized)
caagctttttccactctactaagctgtctagattttatccattttaccttgatgatccagattttgggcagttcaaaaatgagtagagagtaagggggaagagaactattcccactccca

SEQ ID NO: 914253 - DNA, 120 bp, Artificial Sequence
  ENSG00000260918_19 (sequence is synthesized)
acagataaatatcatgctcagtagacactctgtgtccagttttgttttctgctttttccatctgttccacccacttgcttacccatacataaaagcctttccttagtctcttgagaaaat

SEQ ID NO: 914254 - DNA, 120 bp, Artificial Sequence
  ENSG00000260918_20 (sequence is synthesized)
atatagaaggaaagtttgcacagcagcaaaatagcctgaaatgtgctccagttctttttggttaacattattgtttagaccatatgacccaatttgcctcagacagtctcagtgtgtaat

SEQ ID NO: 914255 - DNA, 120 bp, Artificial Sequence
  ENSG00000260918_21 (sequence is synthesized)
tattaataaaactccttttcactctcaaaattgtccatgtgaataataaatgatacgaccaccataattatgggatctcagccacctgaagggtggggaaatattaataaatgtaacatt

SEQ ID NO: 914256 - DNA, 120 bp, Artificial Sequence
  ENSG00000260918_22 (sequence is synthesized)
aacacactacagaaaacatgtcttggctccctacaaatcatttaagtctggcccagtcttctccaccactcgttcatactcaccttatttctccatgagttccttaattagctgcaagca

SEQ ID NO: 914257 - DNA, 120 bp, Artificial Sequence
  ENSG00000260918_23 (sequence is synthesized)
agctcatcctcaggtcttccttatccttccactccaacatccacacatcatcccaaaatgtcctcactgctgtgcttgaagttttacattttatttccactgattagatatttttcttcc

SEQ ID NO: 914258 - DNA, 120 bp, Artificial Sequence
  ENSG00000260918_24 (sequence is synthesized)
tagccccatctcaatcgtggtttatgaatcaggccaacatcctcaaaaatgctgtccatgagcaccctgcctcattctgttcactctcctgttaacactccctcaattcttgtggtcact

SEQ ID NO: 914259 - DNA, 120 bp, Artificial Sequence
  ENSG00000260918_25 (sequence is synthesized)
ttattcaataataatagacagtttatttgcacatttctagttttgcaaagagatattctgcctccctttgtgaggtccttaaaagcaaacaccccattttctaattcttttgtattgtcc

SEQ ID NO: 914260 - DNA, 120 bp, Artificial Sequence
  ENSG00000260918_26 (sequence is synthesized)
aaagcaactattgttctgcccatggcagggtctataaatgctgattagatcacctacagtgggaaaggcagcaaaagacaaacactttttcataacaggcaatatttcaggattatagat

SEQ ID NO: 914261 - DNA, 120 bp, Artificial Sequence
  ENSG00000260918_27 (sequence is synthesized)
aataccttgtgggacagatgacctcctctctcaaattattttagtcccatagagcctctatctacaacctctcaaagaataaaaaatgcagtcaaaggtacagttgaatccaggtttgtg

SEQ ID NO: 914262 - DNA, 120 bp, Artificial Sequence
  ENSG00000260918_28 (sequence is synthesized)
tcttgcaaagtggtcattaagatttttttctactgggattttccaagcagactgaatcctgataataccaccaatctagattctaccagttctagaagaattgaatattccttgctaatt

SEQ ID NO: 914263 - DNA, 120 bp, Artificial Sequence
  ENSG00000260918_29 (sequence is synthesized)
tatagttttttcccctgtttatcattgtttgccttattaatggccttttaaatctaggttctacagggtatttattcttgaagctggggctacactgtattattgatggaacattcccat

SEQ ID NO: 914264 - DNA, 120 bp, Artificial Sequence
  ENSG00000260918_30 (sequence is synthesized)
gtgaattctaatactcccagaaggtactgcacaacaaatcctatttctgccaagatataaatagaagatttagaactatataagagggatggacagttcttgacattcaccactgcttct

SEQ ID NO: 914265 - DNA, 120 bp, Artificial Sequence
  ENSG00000260918_31 (sequence is synthesized)
caagagtgcataaaatataatagatgtacaaggaaatgcattttctgcctccacccccttttttcaattattaactttccagttgtcctgttaaataatttactaatttgcataaaagaa

SEQ ID NO: 914266 - DNA, 120 bp, Artificial Sequence
  ENSG00000260918_32 (sequence is synthesized)
atatataatttgcaagccttacctcagagtggcaaccagccatcccagtttactagataacgtatttttctacctgatactcctcaaataaattgaattgcagtgtatctgctttttctt

SEQ ID NO: 914267 - DNA, 120 bp, Artificial Sequence
  ENSG00000260918_33 (sequence is synthesized)
tttttaagctaattaattcattgttgatctgtttgttagatctttttaaaatactcactggataaagcttgaaattttacaacaatgcccctgagacaattttagggaagtcctttgatt

SEQ ID NO: 914268 - DNA, 120 bp, Artificial Sequence
  ENSG00000260918_34 (sequence is synthesized)
attctaacttaacttcagtgtcatggaaaacagaattatatatccaagtgttctttcatattcagaacatccagtactcttccaagaagggaatgttcatgattatatacacatatattt

SEQ ID NO: 914269 - DNA, 120 bp, Artificial Sequence
  ENSG00000260918_35 (sequence is synthesized)
atatacacatatatttattgactgtgttgctcagcttcttatctcaaggagagtcagtaactctttttcttgataaaaactaccatgtcagccaagcacggtggttcacacctgtaatcc

SEQ ID NO: 914270 - DNA, 82 bp, Artificial Sequence
  ENSG00000260918_36 (sequence is synthesized)
ttcttgagcccatgagctcaagaccagccaggacaacgtggtgaagccccgtttctacttaaaatacaaaaattagccaggc

SEQ ID NO: 914271 - DNA, 120 bp, Artificial Sequence
  ENSG00000260918_37 (sequence is synthesized)
aggaaaaaaaaaaaaaaaaaaaaaactaccacgtggcattatacaaagccaagatttcacaacatttttgaaaattccaaatgacttacatgtttacaaggaccaaaaactttttgatat

SEQ ID NO: 914272 - DNA, 120 bp, Artificial Sequence
  ENSG00000260918_38 (sequence is synthesized)
tttaaaataagctttatcctttttaaccaccatgcagcatgctgtgccatcatgatggaagcctgatggctaatgtgaaataatgttggcatgtcatttaaaaggttaacagacatgaaa

SEQ ID NO: 914273 - DNA, 120 bp, Artificial Sequence
  ENSG00000260918_39 (sequence is synthesized)
attgggaagtttaatattgtttaatacaaataaaattgtttttgaaagaaaggcatctgtgttgagcgtggcttgcttgaaaacttctcctgtctatcatctctgaacattattttgctc

SEQ ID NO: 914274 - DNA, 120 bp, Artificial Sequence
  ENSG00000260918_40 (sequence is synthesized)
ctcttgactttactcaaggggcctaatcctacagtgattcaggaggtttgagaaagcaggactcatgagactaaaaattaggaaactactatcctgccagcaatgggacacctctttggc

SEQ ID NO: 914275 - DNA, 120 bp, Artificial Sequence
  ENSG00000260918_41 (sequence is synthesized)
taccacctcacctaaaacttcattgaatcagaaaattagctgaactttccacaccagtctcctgcaattttaattcatagcatcctgtactaaatagctggggctttcaaaagcaggtgc

SEQ ID NO: 914276 - DNA, 120 bp, Artificial Sequence
  ENSG00000260918_42 (sequence is synthesized)
tacgtatatacagaaagaaatacataccttctgttgcctctcaaaatccgttatgctaaactcaccaaatacgttacatgttaaatgtttcattccttgtgtttttagatctccagttac

SEQ ID NO: 914277 - DNA, 120 bp, Artificial Sequence
  ENSG00000260918_43 (sequence is synthesized)
caatttgctatctatcctcctaccaaacattatttaaccaactcatatcctgattggtattacaattcttgtaaataaaagaatccttttctccctctttatttttaccaagtagacttc

SEQ ID NO: 914278 - DNA, 120 bp, Artificial Sequence
  ENSG00000260918_44 (sequence is synthesized)
tttcattgcaaataaacataaattacaatattttaaggctctttgacataagcatttgctttcttacctaagcaggtaatacttttgtatacctaccagacactaaagaagctaaatgtc

SEQ ID NO: 914279 - DNA, 120 bp, Artificial Sequence
  ENSG00000260918_45 (sequence is synthesized)
aagagtgagtatttcagtaaaacctgtagaaattttaatgaaatgggacaggtttaaaaaaatgccaagaaaggaaaaggtggactccttacttttatatttcaagttttctattttgta

SEQ ID NO: 914280 - DNA, 120 bp, Artificial Sequence
  ENSG00000260918_46 (sequence is synthesized)
tcaatatatgctgcattttctgattgaaattgctgttctgtctaatgaaacttgtgattttctgtagttgctttttacatttgaaagcaaactttcatactgtgtgtgcttaactgtacc

SEQ ID NO: 914281 - DNA, 120 bp, Artificial Sequence
  ENSG00000260918_47 (sequence is synthesized)
ccttctgttagggatttgattaaaatactctaaccgtttcattaattcctttttatgtgcttaatgtatgtgacatttatggctttgttatctcaaaagctatctgtggacaaaatccat

SEQ ID NO: 914282 - DNA, 120 bp, Artificial Sequence
  ENSG00000260918_48 (sequence is synthesized)
gaagcctgttgactgtgatttatacacgtgaaagaaaaaaaccaatttcctcctaagcagtgaatcagtgaataagaaactgttcagtggcctctgattcctgacccttttacccttcat

SEQ ID NO: 914283 - DNA, 120 bp, Artificial Sequence
  ENSG00000260918_49 (sequence is synthesized)
ggccttttttctattcttaattattccttgagtaattgtgtgttcttgtaaaatgcaaaatcaatttacatgcaatcaggtatggacacaagaaatgcttgtgctctcgatttcaggact

SEQ ID NO: 914284 - DNA, 120 bp, Artificial Sequence
  ENSG00000260918_50 (sequence is synthesized)
cacagataccataacagtcacgggactgtagttcactcagtattttttgttaataatgtggctttgctataaaataacttggtgtttcctttgctttggtactacaagattttaaatgtt

SEQ ID NO: 914285 - DNA, 120 bp, Artificial Sequence
  ENSG00000260918_51 (sequence is synthesized)
gcagcaaatgaaagaatgaaaacacatttgaaagctggtgtcaaaaatcatcagctgtacttataaaagttgttgtgcagcttctgaaatgtagtttattgctgtaaatatgtacaattt

SEQ ID NO: 914286 - DNA, 120 bp, Artificial Sequence
  ENSG00000260918_52 (sequence is synthesized)
atgttagctcgtttattctgaaaacacaaataaaacttttttttaaattacaaatgcctacatataaaaagcttactttgtactacgttttaaaacatgcaagatttcaggcatatcttt

SEQ ID NO: 914287 - DNA, 120 bp, Artificial Sequence
  ENSG00000260918_53 (sequence is synthesized)
ttataatccttaaaaatgtttagaattttgaatctatcatttgagaacttttattacaaaatttaatacaaagctacatccctttatttggaagaaattcatttcaggattactcaacaa

SEQ ID NO: 914288 - DNA, 120 bp, Artificial Sequence
  ENSG00000260918_54 (sequence is synthesized)
tcaaaaaaaaaaaaaaagataccagcacatttccaggagcttgtgtctgtaccactttgatttttttaaatattatttaagatgacaacatgccttacaaacacttaaacatatggtgtg

SEQ ID NO: 914289 - DNA, 120 bp, Artificial Sequence
  ENSG00000260918_55 (sequence is synthesized)
tttatactagaaaagaagaaatgaacagtctccttgtattcaaaaataatgcctaaaactgacttattggcatccctttgtgaggtgtattatgtcaaacttctttgaaaatctccactg

SEQ ID NO: 914290 - DNA, 120 bp, Artificial Sequence
  ENSG00000260918_56 (sequence is synthesized)
taaatatgaatattagagttggcctatttgtcagactttcctaatttgaagacctccaacttccaaattaattctctcccttgagaaagaatgtgttgacaataaaacaatgaagagacc

SEQ ID NO: 914291 - DNA, 120 bp, Artificial Sequence
  ENSG00000260919_0 (sequence is synthesized)
gctgggctctcagagccgagaggtggggccccgacctggccgtggggctgggcccgctccgtcgccccgaccccgcgtggtccgccaactccctcctgcgcgcggagaggacgggcattg

SEQ ID NO: 914292 - DNA, 120 bp, Artificial Sequence
  ENSG00000260919_1 (sequence is synthesized)
tgcgcgcggagaggacgggcattgttctcggggccccggagagcgcgagagcggcctgagcctggaggccatcctgcctgagattctacccttagagcttcattcttttgtgactttcac

SEQ ID NO: 914293 - DNA, 120 bp, Artificial Sequence
  ENSG00000260919_2 (sequence is synthesized)
gaaagatctgcccccaggtgaggtttgggtaactcctccactcccatccccacctcagaggaggcttgctccacctccactgcccctcaggcccaagctcctgtctgggtcctcagcctc

SEQ ID NO: 914294 - DNA, 120 bp, Artificial Sequence
  ENSG00000260919_3 (sequence is synthesized)
tgtggagttgaggtctgtagcatatctcaagggcactggggaggtgccgctgccctgcatcctcccaaaccccacagctcctctcaccccttttggtctcccttttgccccccacctcca

SEQ ID NO: 914295 - DNA, 120 bp, Artificial Sequence
  ENSG00000260917_0 (sequence is synthesized)
agcagacattttcaaaggcttctctccccttcttctcctctctctgtcccccatgcggaaaggggaaaatagaagtagaatccagattggggcgcgtggctgatttggtcctcctcccgc

SEQ ID NO: 914296 - DNA, 120 bp, Artificial Sequence
  ENSG00000260917_1 (sequence is synthesized)
accatcctcccccagacagcagagaaactttgatgtctgggtgcatggcattcagggacagaggagcctgggcatcccagcaaatgcagccgcatgttccgcctctggacggcctctctg

SEQ ID NO: 914297 - DNA, 120 bp, Artificial Sequence
  ENSG00000260917_2 (sequence is synthesized)
aactcctttgtgaggggagatgaagcccacagagctggaaagagcagcgttttgaaatgaggaagtgtggatcggcattccttgagctcagtgctagccaccttggcgatggggtgagcc

SEQ ID NO: 914298 - DNA, 120 bp, Artificial Sequence
  ENSG00000260917_3 (sequence is synthesized)
aaccaggagctcagatttataaaacttttgagctttgtgggccctagggggccactgtggcctacctgctgattttcagatggggaaatgggggctcagagaggggacaagatttgctta

SEQ ID NO: 914299 - DNA, 120 bp, Artificial Sequence
  ENSG00000260917_4 (sequence is synthesized)
atggcacctagcaaattggtaacaggtccaggagtagattccatgccttcagcctctggtgagacgtctttcctctgcaccaggaagtggaacttcaaacagcaccaggggttggaactt

SEQ ID NO: 914300 - DNA, 120 bp, Artificial Sequence
  ENSG00000260917_5 (sequence is synthesized)
ttgtttcaaatcctctctgcctcatccccacccactgcccagcaactcaaggctgggtctttcgccccctcaggctcagaagggctgtggcccagccacagagccagggggcctcctcag

SEQ ID NO: 914301 - DNA, 120 bp, Artificial Sequence
  ENSG00000260917_6 (sequence is synthesized)
gggcctcctcagtagtattggccttcacactcttggtgctaaagttctccagttacttttttattaaaccaacatgtacagaaaaactcagttttcggctgggcacagtggctcacacct

SEQ ID NO: 914302 - DNA, 83 bp, Artificial Sequence
  ENSG00000260917_7 (sequence is synthesized)
aaaatacaaaaattagctgggcgtggaggcgcgtgcctgtagtccctgctagtcaacgaagtagcagtgagccgagatcgcgc

SEQ ID NO: 914303 - DNA, 120 bp, Artificial Sequence
  ENSG00000260917_8 (sequence is synthesized)
aaccctgataccacttctgggtccagatggctgtggctggaatgcggccacagccaggaacagcgtggtacggataccagtggggctctggtcttttcccagaggctggcacctttcatg

SEQ ID NO: 914304 - DNA, 120 bp, Artificial Sequence
  ENSG00000260917_9 (sequence is synthesized)
ccgagttgggcctcgggtctcggggctctaggccctgctgtgccagtggcctgatgtgtggccttatatgccagtcacaccctgctccagacctcggtttcctcatccacaaaatgggaa

SEQ ID NO: 914305 - DNA, 120 bp, Artificial Sequence
  ENSG00000260917_10 (sequence is synthesized)
agctgggctagaaaatctctcaggaaggtaggtctctgctagctcccagccttccatggcagtgcaaagggaaccttcccaacaaagtaagagccaaaggctaagatggcagtctgtggt

SEQ ID NO: 914306 - DNA, 120 bp, Artificial Sequence
  ENSG00000260917_11 (sequence is synthesized)
ttgtagaaccttctagaagaccacgagacttggtaagctgagcttctaagtggtccaggatgcagggctggtgtcacaggtgtgtgaccagtagagctacacagggctttgtgcccagaa

SEQ ID NO: 914307 - DNA, 120 bp, Artificial Sequence
  ENSG00000260917_12 (sequence is synthesized)
gggccccacgcttgggaaataaggctctgcagtcactgtcttcaaattcttaataattttatctttgtcactgtgttttgtaagtgaagtccaatgggacagtggaatgtgaactgggag

SEQ ID NO: 914308 - DNA, 120 bp, Artificial Sequence
  ENSG00000260917_13 (sequence is synthesized)
catggagcctcccatctccctgcgtccaggatctgcttctcagctgcttgctcctctgcccccacagctccagctccagctccactcaccttctacctccctgcctcccacccagcaacc

SEQ ID NO: 914309 - DNA, 120 bp, Artificial Sequence
  ENSG00000260917_14 (sequence is synthesized)
actgccaacctgcccccaacctgggcacaggcacaccctgtgggggagggggacaagcacaccccacagcatctcagagtggggcatggtggcagcagtccccatcctgcactggcagcc

SEQ ID NO: 914310 - DNA, 120 bp, Artificial Sequence
  ENSG00000260917_15 (sequence is synthesized)
cagggcacatttcatgtgggactctgcgggggtgagcctctagccccccccagatccagtacctcgtgtgtcctggtacaaaatttgtagtgccccgggggctgcccatctgctatgggt

SEQ ID NO: 914311 - DNA, 120 bp, Artificial Sequence
  ENSG00000260917_16 (sequence is synthesized)
tcctgccctaggcctggagcacaacatgtgggcccagcagctcacaggaaagggagccagaagatgggttcaagtgtttgtgtgttccccaagtcaccagggtgcctgtgggggtctgca

SEQ ID NO: 914312 - DNA, 120 bp, Artificial Sequence
  ENSG00000260917_17 (sequence is synthesized)
ctcccccaggagaaccctcatgtctagggagcactccatggggtcatctccatgcctgagaggaccctctcttccttctttcaaccttccggagcccagcttgtctcttccggccaggtc

SEQ ID NO: 914313 - DNA, 120 bp, Artificial Sequence
  ENSG00000260917_18 (sequence is synthesized)
aaggtatcctcctgagagaaccgtgaaatacagtgtgccgctttgataattccacatgcatgttcaatattcggatatttccagttaaaactggcattgcacaatataaaaaggaatggt

SEQ ID NO: 914314 - DNA, 120 bp, Artificial Sequence
  ENSG00000260917_19 (sequence is synthesized)
aaaagtcatgctaataatttaaaattttgactttacttagaatggtattaactagcaaatttaaaacaccatgacaaattgaaagtgagactggggaagaaagcaaaaagcatgttttct

SEQ ID NO: 914315 - DNA, 120 bp, Artificial Sequence
  ENSG00000260917_20 (sequence is synthesized)
gactgtttgaacaaggggccccacattttcgttttgtagtgggtcctgaaaattatgtagccagtcctgcctggtgagccacctaccctcttgggcatttagttgtctatcagtaaacta

SEQ ID NO: 914316 - DNA, 120 bp, Artificial Sequence
  ENSG00000260917_21 (sequence is synthesized)
gatcattaacactgcgcctgcccctcctgctcacgggcacgttaggaacatgcgcttggataaaatccaagccagagatttagaaaccagtgtgtggtgccagctctcagccttggaacc

SEQ ID NO: 914317 - DNA, 120 bp, Artificial Sequence
  ENSG00000260917_22 (sequence is synthesized)
acaagcccatttttcttaaaaagggatctggactggcatccaaagagatttcagtcccctcatataggtttaaccaccatgggcaaggcagtctctctcccaggtattcctctcactagg

SEQ ID NO: 914318 - DNA, 120 bp, Artificial Sequence
  ENSG00000260917_23 (sequence is synthesized)
tgctctgctctagaaatgaagtctaaaagcagccccatcaatacagaacagagttagaaccacccggagagatttaatctggaatcccagcaagttgtgaaatggaaagactagtcggcc

SEQ ID NO: 914319 - DNA, 120 bp, Artificial Sequence
  ENSG00000260917_24 (sequence is synthesized)
agagagctgaggtctcacagtgtgcaaagaccagtcctcagtatctgcacccatccatttgagtttcaggtgaagcctaggatttgggagctcaatacaaagatgccagcatgaaggagg

SEQ ID NO: 914320 - DNA, 120 bp, Artificial Sequence
  ENSG00000260917_25 (sequence is synthesized)
gtgggtgccaactaggtttggatttagagacatcctccttttgggaaaggaaaatatcctgattccacttaggtttccaggaagaaggcatccccatttcagaacagttttctaagccac

SEQ ID NO: 914321 - DNA, 120 bp, Artificial Sequence
  ENSG00000260917_26 (sequence is synthesized)
cctcatggaggtttcacctgcagctttcagtctgctttgtctgatgtttgaggatgcaactgcccaaaaatgggtctaaagtagcatcccgtcacgttctgtaaaaagtaatactgcttt

SEQ ID NO: 914322 - DNA, 120 bp, Artificial Sequence
  ENSG00000260917_27 (sequence is synthesized)
aaggtaacacttatggaatgaatgaatgcatgaatgaatgagtcagtttggatgaagttgcctcaaatagagtctaaatataagatttcatactcgatagtgtcatttcaggatcaggaa

SEQ ID NO: 914323 - DNA, 120 bp, Artificial Sequence
  ENSG00000260917_28 (sequence is synthesized)
aaattaggtgactcccatttggtttctacagcttttccccaatatcatgttaaagttttggcttttatcttatttcacttatttcattttgagtcatgtcttctggctccagctcagctt

SEQ ID NO: 914324 - DNA, 120 bp, Artificial Sequence
  ENSG00000260917_29 (sequence is synthesized)
cctagagataattcattaggcccgagagctgctccagagtgggattagaacccgtgtagtacatagtcacattaaactgagatcggctaattaatcgctcttctccgtgtaactgagcga

SEQ ID NO: 914325 - DNA, 120 bp, Artificial Sequence
  ENSG00000260917_30 (sequence is synthesized)
tcgcgctccttccccgaggaattgcaatttcatggttcctaatgatggtgcgattacattatgtggatcacttaggctgtgggtgtcaggagcggtacttggagcctctctcggtgggga

SEQ ID NO: 914326 - DNA, 120 bp, Artificial Sequence
  ENSG00000260917_31 (sequence is synthesized)
tgggagaagtcacttctaaaaccggggagatggaggaaagcagttagaatgtctgttactaatttttgttaacgtgctgctgtttcctacatctcattcaggcattagtttcaagttcca

SEQ ID NO: 914327 - DNA, 120 bp, Artificial Sequence
  ENSG00000260917_32 (sequence is synthesized)
ttttcccccagcaccgtgtggcaccttccccagaaccctcacattttttttctaatattcacagggttattgtttgtaaaaaatctatttatttgctttattccatcaagtaatttattt

SEQ ID NO: 914328 - DNA, 120 bp, Artificial Sequence
  ENSG00000260917_33 (sequence is synthesized)
tcatgagatttcttggaaatgtggctctacatatcgttagtacaagtaatacattttgattgttgtttcctggaataacttgtattatttgatgagttaaataaaatgcctaattctaaa

SEQ ID NO: 914329 - DNA, 120 bp, Artificial Sequence
  ENSG00000260910_0 (sequence is synthesized)
agggacaccacactcggtgtcagcctctgaggccatggagccacgcagacccagcacaggattagaaacagaccttcccgggaggcagagagccaggcctcctggtttatagcatgacaa

SEQ ID NO: 914330 - DNA, 120 bp, Artificial Sequence
  ENSG00000260910_1 (sequence is synthesized)
ggcagcactcaggaggacgcatcaatccttctccatgtcagcacctgtgactgtgaccactggtgaggtggacatgcttctttttccattttacagatgaggaaactgaggccaagggag

SEQ ID NO: 914331 - DNA, 120 bp, Artificial Sequence
  ENSG00000260910_2 (sequence is synthesized)
ggtcagcagcctgccctgggctgactggtgatgcagcgagggtggggtgtgggagggtggcggcggcccttgcagtccctgggaacctgcacctcttcctgggcgctgttcccctctctc

SEQ ID NO: 914332 - DNA, 120 bp, Artificial Sequence
  ENSG00000260910_3 (sequence is synthesized)
tcccaggacccttgggcctggcgtttcttcacctgcgaccatccaggagctggacctgccctagggcgtcagtttccagggaagcctctggcctgtgtgtgagcctccccacctgcccgg

SEQ ID NO: 914333 - DNA, 120 bp, Artificial Sequence
  ENSG00000260910_4 (sequence is synthesized)
ccacggcctccacaggcgccctgcgcagccccgcccctcctggggcaaaggctttgcgaagactttcttctctggctcatccctttaaggaggcataaaaacgaaccccgggcctcacag

SEQ ID NO: 914334 - DNA, 120 bp, Artificial Sequence
  ENSG00000260910_5 (sequence is synthesized)
gtccggaatgcgcccccctccacgatgggagcttcttggccttggctgtgcaggggccgcggctcctgggggtctggccggatctgcagtagtgctgaatgagctgtggccaggaagacg

SEQ ID NO: 914335 - DNA, 120 bp, Artificial Sequence
  ENSG00000260910_6 (sequence is synthesized)
caatgaataattgtcacttaaaaggataaacagaaattccatttcccttttaaatacttgaacatttcaaaacatctggaggacgcgatgcttttccttccaagcatctccgtggagttt

SEQ ID NO: 914336 - DNA, 120 bp, Artificial Sequence
  ENSG00000260910_7 (sequence is synthesized)
tgtgggttaccgcagaggatcggcagcattcctctctcagggaaaactggcctgagcattgcataacgcaggcagactgcacccctcacgtcgcctggggccacatgcacatgtttccaa

SEQ ID NO: 914337 - DNA, 120 bp, Artificial Sequence
  ENSG00000260910_8 (sequence is synthesized)
gagacttgctggagaatcttccccggatcttgacaaagttggacatggaaagcacgttggtccatccaaggtccacagagcgaccctggctatgaaaaatcatcctccgagtgggagtct

SEQ ID NO: 914338 - DNA, 120 bp, Artificial Sequence
  ENSG00000260910_9 (sequence is synthesized)
tggtgaattcagatgcagccaaagcttctaacttagtcacagttattaattattcttggtcttattggagcaggaaccactgccatgcatcaggccagcaaggctcactccccaccgtag

SEQ ID NO: 914339 - DNA, 120 bp, Artificial Sequence
  ENSG00000260910_10 (sequence is synthesized)
gatccctgtgtagacggtcgctccatcagtgtagttgggtgtgtggagcaagggactgggctgaccctaccttccaagcatcgatgtggccttcagcagagcaggaggagatagcccagg

SEQ ID NO: 914340 - DNA, 120 bp, Artificial Sequence
  ENSG00000260910_11 (sequence is synthesized)
acttgtactttgcagttgaagtgccagacctaagaaatgcaaacctgaggatggaaagagggtggagaggggggaggtgtctggattggccgtccagagcagccccagctgcagcaagtg

SEQ ID NO: 914341 - DNA, 120 bp, Artificial Sequence
  ENSG00000260910_12 (sequence is synthesized)
gaacttggctggctgcctcacaggcctggtggcagcgtccccagcgaggagcctgtcccacatatgaaggtccccatacccttagcccctagctgagagtttcactgaccagagctccct

SEQ ID NO: 914342 - DNA, 120 bp, Artificial Sequence
  ENSG00000260910_13 (sequence is synthesized)
gagtccagggctccactcaagggactgctgtccccgttggtgaagaaggcctgttggggccaatgcttccccccacagggaagcggagctgtattttgtcggacagaactttgcaagcct

SEQ ID NO: 914343 - DNA, 120 bp, Artificial Sequence
  ENSG00000260910_14 (sequence is synthesized)
gaaacagctggtggtggccccagagccaagatctgacctcactccagagttgaagggcacagagaaggcacagctagaggcggcaggtacccctcaaagctctcgggagagggtacaaag

SEQ ID NO: 914344 - DNA, 120 bp, Artificial Sequence
  ENSG00000260910_15 (sequence is synthesized)
tgggacctcccagcacccttggcctccaggcctcaaaagccctgagagggctgcatgcaaggagacaaagctggagaaggatgtgggaggcaggtggctaagaagacaggctggaaaggg

SEQ ID NO: 914345 - DNA, 120 bp, Artificial Sequence
  ENSG00000260910_16 (sequence is synthesized)
acgtgggaggtaggtggctttgctctaaacagaatcgtctcagtaatgtgacactgcacatgtataggtaggctcgctcatgggcataaccctctaaaacacaccttttatggagtgaaa

SEQ ID NO: 914346 - DNA, 120 bp, Artificial Sequence
  ENSG00000260910_17 (sequence is synthesized)
ttcacttaacagccatcttgaagcatatacttcggcggcatttgctggattcacgacgttgtgcaacctctgcttctccagtttcagaacatttcatccctccagaacaacagctcatcc

SEQ ID NO: 914347 - DNA, 120 bp, Artificial Sequence
  ENSG00000260910_18 (sequence is synthesized)
ccattaagtaatcactcctcattccttccccatcctctggaaaccacagatctgctttctgtctctatggatttgtccgttttggatatttcatataaaaggaatcacgcggtgtgcgaa

SEQ ID NO: 914348 - DNA, 120 bp, Artificial Sequence
  ENSG00000260911_0 (sequence is synthesized)
ggtggcctgatggccaagtggcctcggatgccaggctcaatcctttgaacttttcctgtgggctgtcaggacccatagaaggtctttgagcagctcataggtctctgaatcaagagaagc

SEQ ID NO: 914349 - DNA, 120 bp, Artificial Sequence
  ENSG00000260911_1 (sequence is synthesized)
tgggaaggggatgcatttattttgcatatggaagaaaatgcaaaggcagtatttgtaaggaagagggcagacgggggaagattttataattgttcaaaaacattcactgggatgtgtgtg

SEQ ID NO: 914350 - DNA, 78 bp, Artificial Sequence
  ENSG00000260911_2 (sequence is synthesized)
attttataattgttcaaaaacattcactgggatgtgtgtggtggctcacgcctataatcccagtgctttgggagggat

SEQ ID NO: 914351 - DNA, 120 bp, Artificial Sequence
  ENSG00000260912_0 (sequence is synthesized)
tttttttttaatgtgagaagcagaatgtgcttctagaaactggttttaaagagatgagctgagaaagaaatgtggaatggagtatatttgaggaggacaaaacataacttcacttttgaa

SEQ ID NO: 914352 - DNA, 120 bp, Artificial Sequence
  ENSG00000260912_1 (sequence is synthesized)
cagaaatcactctagcttgccagcatgggatgtaaaccaagagagtagaaatatacccatcttattttaagttgggtttatggcatcgctcatatatgtaaaagcactacaaactcttta

SEQ ID NO: 914353 - DNA, 120 bp, Artificial Sequence
  ENSG00000260912_2 (sequence is synthesized)
aagaaaattgggaaactacagagaagtcaaagaaaaaaaaaagtaacccatatttctattgcccaggtataatccttgttaatattttggtttggtctcctcttttttcccccaatatag

SEQ ID NO: 914354 - DNA, 120 bp, Artificial Sequence
  ENSG00000260912_3 (sequence is synthesized)
ttgtaaataaatgatgtctttcagagttgacatttatcctgtagcttgaatggcatgtaaatgccagttgtatattttttcatgaagtgtaggtttggaatacactagagttagctatat

SEQ ID NO: 914355 - DNA, 120 bp, Artificial Sequence
  ENSG00000260912_4 (sequence is synthesized)
gcttgaatgctgatcactggattctgagactgactactgagtctacctttttaatcaagcctaacatgaatgggctccaaaaagtaatgaatgtaattgtactttttgatgtgcctctgc

SEQ ID NO: 914356 - DNA, 120 bp, Artificial Sequence
  ENSG00000260912_5 (sequence is synthesized)
acttggcttggtgagtcatcataaatagctgttaaatatgtgactttacagattttgatatgttcagattgtaaaaaatgaatagtttatttcattaattgatgggcagtcaagaatctc

SEQ ID NO: 914357 - DNA, 120 bp, Artificial Sequence
  ENSG00000260912_6 (sequence is synthesized)
cctcccttcagtagggctgacacttaggagttaggtcatggttgtggttacttggcatggctaatcagattttgttctggtcagaatttgcccaagatcaatacccagcagaaactggag

SEQ ID NO: 914358 - DNA, 120 bp, Artificial Sequence
  ENSG00000260912_7 (sequence is synthesized)
ttaggctataaaaaaccattcatgtttccgagtgatcatttcagtcagcgattcatgttttacagtgtttagttgttgattattagaaaaagtaatattttcttccctttatgattacat

SEQ ID NO: 914359 - DNA, 120 bp, Artificial Sequence
  ENSG00000260912_8 (sequence is synthesized)
gatgagatctctgaatccatttggggatgggctgcatttttggggaactctatgcctgtccagtgaagagtgcctaaaacattaattatagatcaaagatgttctgttgagggacaaagc

SEQ ID NO: 914360 - DNA, 120 bp, Artificial Sequence
  ENSG00000260912_9 (sequence is synthesized)
ttgatggtcatcaaacacaaggctttgtaaaaatacgaccacctattccacttactggatctgtcaggtgtgtaaaacttctctcgccagttcatcatgcttccatgagccctcaggact

SEQ ID NO: 914361 - DNA, 120 bp, Artificial Sequence
  ENSG00000260912_10 (sequence is synthesized)
gggatttgagccttcctggctctttatcccttggggcagacatggaaccatctctgagggaccaggtggatgctgaagctcacccagtcagggcccctctcctagctccttttacactga

SEQ ID NO: 914362 - DNA, 120 bp, Artificial Sequence
  ENSG00000260912_11 (sequence is synthesized)
aattaatctgaaagctttcatagccaaggctttgcctaggtgctattattccagctggccaaagagaagtcttgggccagattgggattctcaatggattttatagacataattcccctg

SEQ ID NO: 914363 - DNA, 120 bp, Artificial Sequence
  ENSG00000260912_12 (sequence is synthesized)
caaacttaaaaaaataaataacccctactttataggactaattgtttgaattgtatctttctctgtatgttaaaccagatttaaaactattttataaccacaatatgtaatcagagcaat

SEQ ID NO: 914364 - DNA, 120 bp, Artificial Sequence
  ENSG00000260912_13 (sequence is synthesized)
atagtgttttcagatatataccttgttttataccttatgtaggtgtcctacataagggtggcatgcccactggctgtggtaaaatttaatcctcattgctttgggagtgacttaaggcct

SEQ ID NO: 914365 - DNA, 120 bp, Artificial Sequence
  ENSG00000260912_14 (sequence is synthesized)
tttgaagtggagcttttgcactttatactttttctgtgaactatgataactatatttgatattaaagctgtaagtggcattttcagcaaatgaatatgtacatgtttgtgtctatttcca

SEQ ID NO: 914366 - DNA, 120 bp, Artificial Sequence
  ENSG00000260912_15 (sequence is synthesized)
aaatgatttctgaactatctgcagtgaaaatgtatctgatggattgtagagcaaagcacattgcctaaattcatttgttaatgaattgggtaccattgttattaaaaatgcgtaaagtaa

SEQ ID NO: 914367 - DNA, 120 bp, Artificial Sequence
  ENSG00000260913_0 (sequence is synthesized)
gccttcttggccgagtggtggcattctgcctgccccctgtgggcatcattgagattctgctccccagcttccgcagtgctccgttttgtgatggaaagtcagcatcccttgccttaggag

SEQ ID NO: 914368 - DNA, 120 bp, Artificial Sequence
  ENSG00000260913_1 (sequence is synthesized)
aaacccaggtatctggtgatggaagaacttttgagggaagcttgagactggccagtccacactctgcttaaccaagggaagggcaccacttctaccaccaggagatacctgctgtgggac

SEQ ID NO: 914369 - DNA, 120 bp, Artificial Sequence
  ENSG00000260913_2 (sequence is synthesized)
acagtgctgctccagccatgcagaagctcacacaggcctgcagcagttattcatccgtgcacagctgccactggccagcagagcctgtgacggggccttcacaggtaattcccaagatca

SEQ ID NO: 914370 - DNA, 120 bp, Artificial Sequence
  ENSG00000260913_3 (sequence is synthesized)
aaacagcctcttgtacttaaaataattgctttgccaccatttccaagatgctgcagagtgcttctgaattctgttcatttcaaagaacccacttcctctatttgaaaaacgggtatttta

SEQ ID NO: 914371 - DNA, 120 bp, Artificial Sequence
  ENSG00000260913_4 (sequence is synthesized)
atgtctgccaggccacaattccatgaggcatgatggtgtgcagaatgttctggagatttccataagaaagatctctaagggccagaactgactaaagtcatgtaggccacctctaaaaga

SEQ ID NO: 914372 - DNA, 120 bp, Artificial Sequence
  ENSG00000260913_5 (sequence is synthesized)
ggcaaggctcaaagataaatactagcatcaaaagagaggtcctttggtgtgatatgccccatgtcattcagctttgttgtggccagtcatcgttggtggcagctgactggtggcagaatc

SEQ ID NO: 914373 - DNA, 120 bp, Artificial Sequence
  ENSG00000260913_6 (sequence is synthesized)
acacccactgtgtgattctctgcagaaggctggtgatttgaggatggacaggaagttctgaactcaggaataccatgcattttcacaagcgttttcactttgccttaagatttgtagaag

SEQ ID NO: 914374 - DNA, 120 bp, Artificial Sequence
  ENSG00000260913_7 (sequence is synthesized)
caacctttcttctagatcagaacagcaaacgtgatgcaggatttcctgaggttgggaccggaccgaaacgttttccatcttctatttttgtttactcagcttcaactgccaccttttatg

SEQ ID NO: 914375 - DNA, 120 bp, Artificial Sequence
  ENSG00000260913_8 (sequence is synthesized)
ctatcctgggggcaagggggcacccatgtgaatgagagatactggatttggccaagatcattaggcaagggtgccgttcccacacagtaatgccttgcaggcacaaggatggaaaattat

SEQ ID NO: 914376 - DNA, 120 bp, Artificial Sequence
  ENSG00000260913_9 (sequence is synthesized)
gccaggaatgcgataccgccaagcctgaacacagagaggacacgacgttggcacaggcctgttgggtcttgacttcagcctgcagaggagctggaggaggctggcagactctgctcacaa

SEQ ID NO: 914377 - DNA, 120 bp, Artificial Sequence
  ENSG00000260913_10 (sequence is synthesized)
atgggaaggcccagctgccaatggcttttcctctctgcccatgtaacactttttgtggggaatgtgtggacacagcttgaggctttgtatccaccctgtcagttggtgagatagagaaga

SEQ ID NO: 914378 - DNA, 120 bp, Artificial Sequence
  ENSG00000260913_11 (sequence is synthesized)
gatgggctgatggttattgaggcactactgctcagatggggcattgttggagcccatagatggggcattgttggagttgtaatgagagaagttgctagtggcccctggagcaagacacct

SEQ ID NO: 914379 - DNA, 120 bp, Artificial Sequence
  ENSG00000260913_12 (sequence is synthesized)
ggagcttctattcagcttgctcttcttcaacatccatgcttctggaacttgcattcctcacagtgaaggatggaagccctttggccttgccctcccgcccagctgatgggatgagaggca

SEQ ID NO: 914380 - DNA, 120 bp, Artificial Sequence
  ENSG00000260913_13 (sequence is synthesized)
gatgcaggcagctgtcaggagagcaaagggaagggagatactgggtccggaaaccctgctgctgctgcgacaagttctccgggtccaggctgtgatttccacaatctgcatccaaaccac

SEQ ID NO: 914381 - DNA, 120 bp, Artificial Sequence
  ENSG00000260913_14 (sequence is synthesized)
agagtgaagccgaaattgtgtgaatgatcgggagtgtttgcagagttcaaccacagtgttatcacgttttatccaaatctcctagtccaaaaaagaataccacgccctgtttttatctca

SEQ ID NO: 914382 - DNA, 120 bp, Artificial Sequence
  ENSG00000260913_15 (sequence is synthesized)
gggcgagtaccagcagaagccgcctggacagcaaccggaagtgcggtggctctggtgggcgtggtggctgagtaccagcagaagccgcgtggacagcaaccggaagtgccgtggctctgg

SEQ ID NO: 914383 - DNA, 120 bp, Artificial Sequence
  ENSG00000260913_16 (sequence is synthesized)
ttgctcttcttcaacatccatgcttctgtaagatgagatttgcacggtgcttttatttatatattttattattattattttgagataaggtcttgctctgtcacccaagctagagtgcag

SEQ ID NO: 914384 - DNA, 120 bp, Artificial Sequence
  ENSG00000260913_17 (sequence is synthesized)
ataaggtcttgctctgtcacccaagctagagtgcagtggcataaccatcgctcactgcagcattgacctccctggcccaagcaatcctcccaactcagccccctgagtagctgggactac

SEQ ID NO: 914385 - DNA, 89 bp, Artificial Sequence
  ENSG00000260913_18 (sequence is synthesized)
aaatttttgtagagttgggatctcactctgctgcccaggctggccttaaactcctggactgaagtgatcctcttgcctcagcctcccaa

SEQ ID NO: 914386 - DNA, 70 bp, Artificial Sequence
  ENSG00000260913_19 (sequence is synthesized)
agtgctaggattacagtcatgagccagcatgcccacccacatcatccttttagagtgacaaattcgggct

SEQ ID NO: 914387 - DNA, 88 bp, Artificial Sequence
  ENSG00000260913_20 (sequence is synthesized)
caagaataaaaaataaaaaaaagttaagaaggacaaattcaaataggtctaggggagaggcagaaaagctgctttatgttaggacctg

SEQ ID NO: 914388 - DNA, 120 bp, Artificial Sequence
  ENSG00000260913_21 (sequence is synthesized)
ctaggggagaggcagaaaagctgctttatgttaggacctggcttgtatgagagggaacaataactgcaaatgtggaaaactggtagggagaaaggggatgagactgattttgtatcactc

SEQ ID NO: 914389 - DNA, 120 bp, Artificial Sequence
  ENSG00000260913_22 (sequence is synthesized)
taaatggtaactacgctgacaaatggaaatatcgaaggaaagtttccactcaatagaaatgaagtgttttccaataattagaatggtggaaaaaaaaaagtggctccaggtgagaacacc

SEQ ID NO: 914390 - DNA, 120 bp, Artificial Sequence
  ENSG00000260913_23 (sequence is synthesized)
cagagttcaaattccaggtttgtgactgaccacctctgtgaccacaggcacattagacaatgactctgagcatgttttctcatctgcaaaacacatatgtttttgacgatttcttattga

SEQ ID NO: 914391 - DNA, 120 bp, Artificial Sequence
  ENSG00000260913_24 (sequence is synthesized)
tcaccaactacatgccatgttctagagaccatgttccacccaagagttggaaaaaaaggggtaaataagtcctgcagtttgccttctaggtgggaagaaagaataaagaatgaagtgaaa

SEQ ID NO: 914392 - DNA, 120 bp, Artificial Sequence
  ENSG00000229444_0 (sequence is synthesized)
atcttatagcatatagcaggagtgtaataaacaattgcttaaaaaaaaaaaaggaagcaggtctccttggaagaatggctgactccaaggctggggcagagaaggcgtaaggtcctgcca

SEQ ID NO: 914393 - DNA, 120 bp, Artificial Sequence
  ENSG00000229444_1 (sequence is synthesized)
gaaatcaaatgatctacaatggttttaaaaacagagaacagaagagtaaagctgaaaaatactttgtcactggccaggtactccctttagaagcaggtcacctgcctgtggtcccagcta

SEQ ID NO: 914394 - DNA, 87 bp, Artificial Sequence
  ENSG00000229444_2 (sequence is synthesized)
cttgggaagctgaggtgggaggatcgcctgagtccagaaagtcaaggctgcagagagccacattcactgcactccagcaaaagaaaa

SEQ ID NO: 914395 - DNA, 120 bp, Artificial Sequence
  ENSG00000229443_0 (sequence is synthesized)
agaggaccatcaaatactctgtgttacatgatgcagttgtaaggcaacttgtacagcaacctgagcctcaactcttttatataccatcccattccttcagtttgcctcaatgggttgaac

SEQ ID NO: 914396 - DNA, 120 bp, Artificial Sequence
  ENSG00000229443_1 (sequence is synthesized)
acccccacatttgtgacctgtattaatttgccctgtctggcattcactggaaaagtcagggtctgcctggttccaactgagctggacctgggtactgaagttgatgagctgcgaacgtaa

SEQ ID NO: 914397 - DNA, 120 bp, Artificial Sequence
  ENSG00000229443_2 (sequence is synthesized)
caggattcatctgatctaaaattccttgcttgtgtggctgctgactctatcagttgtacacatgacttcatgcattaactctcgcctccggcggattctgctcctgcctcggagatttga

SEQ ID NO: 914398 - DNA, 120 bp, Artificial Sequence
  ENSG00000229443_3 (sequence is synthesized)
tcacttaatttgtattatcttctctaatagaactaattaatacattatgtaatggctttgaaataatcattaaaactatacatttaacaagatcggagtcatatggtgcgcatctgccag

SEQ ID NO: 914399 - DNA, 120 bp, Artificial Sequence
  ENSG00000229443_4 (sequence is synthesized)
cacagattgccacctttggacagatgaaaatactgaggcagagaaaagttaagtaagttccccaaagagaaatacacagctaagaagtgttagtttaacctgaccatgtggcagaaagcc

SEQ ID NO: 914400 - DNA, 120 bp, Artificial Sequence
  ENSG00000229443_5 (sequence is synthesized)
agatatgcaaagaaaaacatgggggaatggatcaagaatggtaaattgacatattattataaaagaatttaaatgaaaatttaagatgttttgtgtcaaataaatgaatgagagtcatcg

SEQ ID NO: 914401 - DNA, 120 bp, Artificial Sequence
  ENSG00000229443_6 (sequence is synthesized)
aaggctaaatgtttgccctgctgggttttggacttgcttggagctttttactcttattttgattctctctcccttttggaatgggaatgtctgtcctatacctgtaacaccattttatct

SEQ ID NO: 914402 - DNA, 120 bp, Artificial Sequence
  ENSG00000229443_7 (sequence is synthesized)
tgaaagtggataacttgcctcaatttcggaggtttacaagtaagactctggaatttggacttttgagctgatgctgatgctgaaatgagtttttggggctatgaggatggaaaaaaacgt

SEQ ID NO: 914403 - DNA, 120 bp, Artificial Sequence
  ENSG00000229443_8 (sequence is synthesized)
atatgtatttaaagttgtgagaaagacataagttttggagatccaagggcagaacactatgacgtgaaagtttgttccctctgaaattcatgttgcatgaactttgtccccagtgtggca

SEQ ID NO: 914404 - DNA, 120 bp, Artificial Sequence
  ENSG00000229443_9 (sequence is synthesized)
gtatcgagaggtaaggccttcaagaggtaattggatcacggccctcaggagggaatttatcaattaatggattaatggattaatgaattgtcatgggagagatattagtggtttcaaaag

SEQ ID NO: 914405 - DNA, 120 bp, Artificial Sequence
  ENSG00000229443_10 (sequence is synthesized)
cagagaaagagagacctgagctagcacactcctccccttcaccatgcgatgcccttcactaccttgcgactctacagcgagtcaccaccagcaatgagacgctcatcagatatggatcct

SEQ ID NO: 914406 - DNA, 120 bp, Artificial Sequence
  ENSG00000229443_11 (sequence is synthesized)
aacaagatcggagtcatatggtgcgcatctgccagcacagaaatcttactaaatataatttcagattgccacctttggacagatgaaaatactgaggcagagaaaagttaaaaagggttt

SEQ ID NO: 914407 - DNA, 120 bp, Artificial Sequence
  ENSG00000229443_12 (sequence is synthesized)
cactctgtcaccgaagctggagtacagtggcgagattacagctcgctgcagtcttcacctcccaggttcaagtgatcttcacacagcctcccaggtagctgggatcacaggtgaggtctg

SEQ ID NO: 914408 - DNA, 120 bp, Artificial Sequence
  ENSG00000229443_13 (sequence is synthesized)
tctctgtcacccaatacagtggcgtgatctcagctcactacaacttctgtctcctgggcccaagtgatcctcctgcctcagactcccaagtaactgggactacaggtgaacaccaccaca

SEQ ID NO: 914409 - DNA, 120 bp, Artificial Sequence
  ENSG00000229443_14 (sequence is synthesized)
cctggctaaatttttattcttagtagagatggggccttgccactttgcccagactggtcctgaactcttggggtcaagcaatactcccaccttggccacttgtgatcttctggggttaca

SEQ ID NO: 914410 - DNA, 120 bp, Artificial Sequence
  ENSG00000229443_15 (sequence is synthesized)
agagtgagccaccacacctggccaacatgtatttcttgataatgtaaaaattagtaaagaattgacttttacagtggtctttaatttgtattagcatataaattaaagttttagaatttt

SEQ ID NO: 914411 - DNA, 120 bp, Artificial Sequence
  ENSG00000229443_16 (sequence is synthesized)
aggtactacaaactgggtctgaagcactgtgaacagggtggaagaagagcaaaacataaaacctgtttcagagaatgagtgacaagttttgttgggtcaaatacagcgactgctcatgta

SEQ ID NO: 914412 - DNA, 120 bp, Artificial Sequence
  ENSG00000238142_0 (sequence is synthesized)
ggagccagaacagcggaattgccttcgcccgccctgcccctcgcctgcttcagaagcttccaggaactcccgggtcggcgacccagcccgagccgcctggggccccaagggaagctgaac

SEQ ID NO: 914413 - DNA, 120 bp, Artificial Sequence
  ENSG00000238142_1 (sequence is synthesized)
gccctgtgggctcctgggatggttcttcccgttctttgcgccgccttcacccattgaagagcctgtgcccaccctgcccagtcgctctcggggccgcggaggagcttccgctgccatctt

SEQ ID NO: 914414 - DNA, 120 bp, Artificial Sequence
  ENSG00000238142_2 (sequence is synthesized)
atggggaaatggagagagaacctgaaagagccccaaactcgaggacctattgctccccaagaataacatcttccagaagaactagacagaaaactaggcgtctgggaactctgaaatcct

SEQ ID NO: 914415 - DNA, 120 bp, Artificial Sequence
  ENSG00000238142_3 (sequence is synthesized)
tggaggagtagcatcatcatgaccctctgtgttccttttggcaaaggacttgctcccattgtttgcttgttccattgtctgtctgttaaataaataaaacccttttcatatatctttaaa

SEQ ID NO: 914416 - DNA, 120 bp, Artificial Sequence
  ENSG00000238142_4 (sequence is synthesized)
gggcagggatggtggtgagggtcgctcgtgggtcccctcggggggagcagggtctggcactcaccagggctcacgactaggacttgtcgaatgaattcattgtcgcctttagcttttagt

SEQ ID NO: 914417 - DNA, 120 bp, Artificial Sequence
  ENSG00000238142_5 (sequence is synthesized)
agggcgggaaactggcagggcctccggcgcaccttctgcgcggtggagccgcggggctcagctgggccgtggtccggccctggggccgtagggcgagagcaggtaaagggaaaagcaaaa

SEQ ID NO: 914418 - DNA, 120 bp, Artificial Sequence
  ENSG00000238142_6 (sequence is synthesized)
gctgggaaagaagcccgggagcggtggaccagacatccagacctcctgaaaggcgcatgcagaggcacaggcgggatcttctggaagtgagaattgtttttgtttgtttattgtagcaga

SEQ ID NO: 914419 - DNA, 120 bp, Artificial Sequence
  ENSG00000238142_7 (sequence is synthesized)
gcgctaaccgattgcgccacagagacaagcgcttccgcttctactggtgatatgggaagggcccactcactgaactaactcccttccctctactcccagagcccgcccggcaggaccacc

SEQ ID NO: 914420 - DNA, 120 bp, Artificial Sequence
  ENSG00000238142_8 (sequence is synthesized)
aacccttttcttatttaagaggctgctttagggtttccgggatacatctttaatttatcatagtctgctttctagtgtcattatgcctccctttctggcctttatcctagtgttatgtag

SEQ ID NO: 914421 - DNA, 120 bp, Artificial Sequence
  ENSG00000238142_9 (sequence is synthesized)
ttttactttatgcactataagctttgtgattcattattacttttatttattacgtcaaatattttttgaaagatttaaattataagaaaacgtgtagtacatgttttctaaatgccattt

SEQ ID NO: 914422 - DNA, 120 bp, Artificial Sequence
  ENSG00000238142_10 (sequence is synthesized)
ccaatattcgtttctttgtgtaggcccgcatttttatctggtatccttttgcttctgcctggaggactcttaagatttcttgcagcatgggttggtgaattcttttagcttttgtatttt

SEQ ID NO: 914423 - DNA, 120 bp, Artificial Sequence
  ENSG00000238142_11 (sequence is synthesized)
ttcaatgtccttatttcactcacagttatgaaattttatttttgcatagaattctagattaactttttttctctaggtactttaaaaatgttgccatttatgaagcattgtcatttaaaa

SEQ ID NO: 914424 - DNA, 120 bp, Artificial Sequence
  ENSG00000238142_12 (sequence is synthesized)
tatcatctttctttcctatgtttgtaaatatggcgtaaagccggtttcttgtgctggttatacaattttcagaatgtgtatttaaatttaaaatattaaattgtactaaaaaactaaaaa

SEQ ID NO: 914425 - DNA, 120 bp, Artificial Sequence
  ENSG00000238142_13 (sequence is synthesized)
ttgtacactctcattggccactggtgtatttctatagggtggaggcctggagagtagttgttccagcatagtgtttacatagcttttatttcattccgttttctttcctttgttgcttta

SEQ ID NO: 914426 - DNA, 120 bp, Artificial Sequence
  ENSG00000238142_14 (sequence is synthesized)
tgagggtcaaatctacttgctgacatggaatttgtgtttgtgagagcctagtgattttccttacatctgaatgtcttcattgcaaaaggaaacgtttttctttgccaaaatactttaaaa

SEQ ID NO: 914427 - DNA, 120 bp, Artificial Sequence
  ENSG00000238140_0 (sequence is synthesized)
gagaaataattagtgggaaacaatactaaaaaatggcatttaaataaatatttattgagcatctaaaatctatataacattgatccagtagtagtaataatatggtggtatggtggttgt

SEQ ID NO: 914428 - DNA, 120 bp, Artificial Sequence
  ENSG00000238140_1 (sequence is synthesized)
catcatcatagcagctagcattcaaagagtatgtagcaatcatggtaataagcaggacttaacattcattatcacattcaatcactacaattctataagctgggaattatgtccctttta

SEQ ID NO: 914429 - DNA, 120 bp, Artificial Sequence
  ENSG00000238140_2 (sequence is synthesized)
gaccctatgtaatctgctgaagcaggtaattaaagaaagggcagccgggtgctggtggctcacgctgtaatctcaacactttgggaggctgaagcaggtgtgagccaccatgcccagcca

SEQ ID NO: 914430 - DNA, 120 bp, Artificial Sequence
  ENSG00000238140_3 (sequence is synthesized)
agaagtcagatttaaaggtcttagtaaaaccagtcaaagaattagtcttgctagtttctggaaaagagctctataaagacaggaagtacaagttagagagaagaatttatgatttcagag

SEQ ID NO: 914431 - DNA, 120 bp, Artificial Sequence
  ENSG00000238140_4 (sequence is synthesized)
ataaaactattccttacaacaagacaccatgatacagccacagagtaagtggcagacataaaatactgatggtctctagaaattaactcaagcaaataggaggtcaagagtgtacagcac

SEQ ID NO: 914432 - DNA, 120 bp, Artificial Sequence
  ENSG00000248008_0 (sequence is synthesized)
accgctcacggcgtcggttgcccgggcaatgggccgcacgctacgaggcccacacacccagaaggtggagccccggccgggttacgaggaccacccagctgtctggagagatgaagaaaa

SEQ ID NO: 914433 - DNA, 120 bp, Artificial Sequence
  ENSG00000248008_1 (sequence is synthesized)
tgaggttcaaagagatgaagtctcttgcctaaagtcagtgacagaaagtgacagagctgggatgtgaatcctggtctgactctacagtcccacatggtagatggaacctccgagcaacac

SEQ ID NO: 914434 - DNA, 120 bp, Artificial Sequence
  ENSG00000248008_2 (sequence is synthesized)
ctaaacaaaaggagttgatgcctccgaacagagtaatgtcgctggagacactaagcatcgtcggcccctggcaggagctccctaaatatgtgttggatggatggaagaaaggatggatag

SEQ ID NO: 914435 - DNA, 120 bp, Artificial Sequence
  ENSG00000248008_3 (sequence is synthesized)
ttcagagtacttcagccttgattcctccgcaacagacacctgaaacttgaccctacattggttcttggccatcgtgatcttccttggacagaatcacctttcagctccggtcatcagact

SEQ ID NO: 914436 - DNA, 120 bp, Artificial Sequence
  ENSG00000248008_4 (sequence is synthesized)
ttcccagggccctcagaaagcccttcagagttgttactcacaggcaggctgagggattccttacggggtctgcagctctcctcacctcatccacaagtaggaccgtggcctgttcctcac

SEQ ID NO: 914437 - DNA, 120 bp, Artificial Sequence
  ENSG00000248008_5 (sequence is synthesized)
tactgccccaggatcactctgttcccagcccagtccagcaatcacttgtctagctttctggaaccttgagtactttcttgaaccatgagtcctgtgaccaccctagcagctctaaccctc

SEQ ID NO: 914438 - DNA, 120 bp, Artificial Sequence
  ENSG00000248008_6 (sequence is synthesized)
ccttatctgaaaggaagtgtgaggtgaccttgcaggtcccagagttgattgaagaccccatccagaaagaaggcaccctgtgggagagattgcaaggcctaggtctgaatccggaagctt

SEQ ID NO: 914439 - DNA, 120 bp, Artificial Sequence
  ENSG00000248008_7 (sequence is synthesized)
ccaccccatggagaagggctggcaccagcctggggctggcagtggagctgagctttggagccaaggactgtactgcagtgcagggagagtgaggccagaaaggctgagacaactcaggga

SEQ ID NO: 914440 - DNA, 120 bp, Artificial Sequence
  ENSG00000248008_8 (sequence is synthesized)
aagaaaacctcccttctggctaatagtcaagcaccgcctgagtagaccaacactctcctgtccacaggggcagcagatgaagacacaaccagagaggactaacaggccccctcagctctc

SEQ ID NO: 914441 - DNA, 120 bp, Artificial Sequence
  ENSG00000248008_9 (sequence is synthesized)
agtcagagggcagagcaacacagaatagacattaaaggaacagactttgaggccaggcagccttgggtgtgcatctgtccctactaagccatgtgacattaaacaagtgagtccacctct

SEQ ID NO: 914442 - DNA, 120 bp, Artificial Sequence
  ENSG00000248008_10 (sequence is synthesized)
ctgagcctcaggttcctcatctgtaaaatggggattataagagttcttgtttctcagggacaatgtgaggattaagtgagatgatacacatagagaatgtggtgcagtactgggcacatg

SEQ ID NO: 914443 - DNA, 120 bp, Artificial Sequence
  ENSG00000248008_11 (sequence is synthesized)
gcaaagatcagtgatgctagctaccacttatcattagtgttcctgtagaccaggacttctcaaccttggcactattcaccttttgggccagaaagttttttttgttgttgttgtggggag

SEQ ID NO: 914444 - DNA, 120 bp, Artificial Sequence
  ENSG00000248008_12 (sequence is synthesized)
ctgtcctatgcatttgaggatgtttaacagcacccctggcctctacccactagatgccaatcacaccacacccccagtttcaacaaccaaaaatgtctgcagatggtgccgaatgtcttc

SEQ ID NO: 914445 - DNA, 120 bp, Artificial Sequence
  ENSG00000248008_13 (sequence is synthesized)
tggagggtgaaatcactccccagcagttgaaaagcaccaccctaaacaatctggactgaatttgaatgtcacagatcccaagctcacagctccatgtaaaggccacaaggcaggcaggcc

SEQ ID NO: 914446 - DNA, 120 bp, Artificial Sequence
  ENSG00000248008_14 (sequence is synthesized)
tacttgcagatgaaggaacggaaagagcaacaattacagatcaagcggctagctccggtgtagactaagaggcgggatctgtagtctgctctaggagctaacaaggcctctgtgactcag

SEQ ID NO: 914447 - DNA, 120 bp, Artificial Sequence
  ENSG00000248008_15 (sequence is synthesized)
taggtgacctcagtgtcactctttaattatatgcaaagtggtcttgtgttaactcttaattattctagggctccaaacaagaaaataggtagttggtatctgatttctggcatcaagatc

SEQ ID NO: 914448 - DNA, 120 bp, Artificial Sequence
  ENSG00000248008_16 (sequence is synthesized)
ctgattcattgactgggagaaaatctgactctccaaaactctttcagagttcatttagcccttcatttatgactctggggagatttctgagcgagagctaggtgtcaggccctgttccag

SEQ ID NO: 914449 - DNA, 120 bp, Artificial Sequence
  ENSG00000248008_17 (sequence is synthesized)
tcctttttatggaacttatagcaggagaataaagataaaaacaagcaaaaatatttatctctgataagggcaatggataaaaataaagtagaataggccaggcacggtggcttacgcctg

SEQ ID NO: 914450 - DNA, 61 bp, Artificial Sequence
  ENSG00000248008_18 (sequence is synthesized)
agagactccacctcaaaaaaatttaaaaaagtagactaagagaaccaagcatcgctgggtg

SEQ ID NO: 914451 - DNA, 120 bp, Artificial Sequence
  ENSG00000248008_19 (sequence is synthesized)
tttaaaaaagtagactaagagaaccaagcatcgctgggtgaggggtcttgttttaaagagttttctaggaagacctctctgagaaggcaccatttgagccaagacttgatgacctggcta

SEQ ID NO: 914452 - DNA, 120 bp, Artificial Sequence
  ENSG00000248008_20 (sequence is synthesized)
ctgcatgaggatggaaggtggggaagctgatgggagcagcgagagaggtgggagcagttagaggctattgcagcagtccaggtaagaaggaatggtggcttggacaaggaggtggtagca

SEQ ID NO: 914453 - DNA, 120 bp, Artificial Sequence
  ENSG00000248008_21 (sequence is synthesized)
gagatagggcagagatggccagattccagatgtattctgaaggtagagctgacagatttgctgagcaattggatgcagaataggagggaaccagaggcagtcaaggatgactccagactt

SEQ ID NO: 914454 - DNA, 120 bp, Artificial Sequence
  ENSG00000248008_22 (sequence is synthesized)
gtgagctgaacaatgagaagaatagattgagatggggaagtctggcagaggaaacaagaagttctgctttggccatgttaagtttgagatgcctattagatattccaagtggagatgtca

SEQ ID NO: 914455 - DNA, 120 bp, Artificial Sequence
  ENSG00000248008_23 (sequence is synthesized)
aatatgcagttggatatatgagttctgggaagagggccagccttgagctataatttggagagtcatcagcttataggtgacatttaaagcaatgggactggatgagatcaccactgaggg

SEQ ID NO: 914456 - DNA, 120 bp, Artificial Sequence
  ENSG00000248008_24 (sequence is synthesized)
cggagtacgtgtagatggaagtaatgcttattcagctagcaatattctctgagcgtttactatgggccaggcccggagctaggtgctaggtacagagatggacttcctttggcacctgcc

SEQ ID NO: 914457 - DNA, 120 bp, Artificial Sequence
  ENSG00000248008_25 (sequence is synthesized)
ccagagaagctctattacttacttaattttcctgcctaagtgctttggccatgtagaggatgagccttgagttcctaccctgtcttttagtcacttagtcctttttttctcttttttctt

SEQ ID NO: 914458 - DNA, 89 bp, Artificial Sequence
  ENSG00000248008_26 (sequence is synthesized)
ttcaagcaatcctcctgtctcagcctcctcagtaggtgggattaccggcatgcaccaccacatcgggctaattttttgtatttttagtt

SEQ ID NO: 914459 - DNA, 120 bp, Artificial Sequence
  ENSG00000248008_27 (sequence is synthesized)
cggcctcccaaagtgctgggattacctgcgtgaaccaccgcaccctgcatcattttttcagcagacatttgttgagcacctgcttgatacaaggcacccatctaggcacaagggacatga

SEQ ID NO: 914460 - DNA, 120 bp, Artificial Sequence
  ENSG00000248008_28 (sequence is synthesized)
aaggaagcgagtcagacacagttcctatccttttggagtttagattttatgtgtggagacagacattgaacaggatgcacacaggatcacaggatgtgacaaatgcagtggaggagaaag

SEQ ID NO: 914461 - DNA, 120 bp, Artificial Sequence
  ENSG00000248008_29 (sequence is synthesized)
ataggctggtgtgagagctgttaatgggggctctgctctagccggagaggcaaggaaggcttttccaggagtcacattagaggaacaatctatacaagcagggaactaggctgggggaag

SEQ ID NO: 914462 - DNA, 120 bp, Artificial Sequence
  ENSG00000248008_30 (sequence is synthesized)
tgcagggagctttttaggtggaaagaacagcatgttcaaaggcctgaagctggaaggaggctggctgacttggctccagagaagctgttgggggagtgtgggagagacaagacagggagt

SEQ ID NO: 914463 - DNA, 120 bp, Artificial Sequence
  ENSG00000248008_31 (sequence is synthesized)
aggggtggggagaagccagacctttggagtcttgtaagtctggttaagacacgtggactgtcttctgcggccaccagtggctctgttgaggtgggaaattaaagaaaagcaaaattaaaa

SEQ ID NO: 914464 - DNA, 120 bp, Artificial Sequence
  ENSG00000280356_0 (sequence is synthesized)
atgcagaagccttgatctccgagtggtctgtggccgtgaggtggagagatacaactgctttgtcgaggacccaagggaaaaccgagccgtggctgtctgagtcttatcaaaggaaaaacg

SEQ ID NO: 914465 - DNA, 120 bp, Artificial Sequence
  ENSG00000280356_1 (sequence is synthesized)
gtaacagtacttttattttcttttaatgagtaatgtaggggaaaaaacttgtaagtaagaattcgaaactaaatttgccaaatatgctgagagttgatccttggagaaactttatcttta

SEQ ID NO: 914466 - DNA, 120 bp, Artificial Sequence
  ENSG00000280356_2 (sequence is synthesized)
ctgcatagtcaaacacatcaactttgggggcacctggcaattactatgtggcatagattcaatttgttcttgtgtagacaatattatctggcacagggaacaggaaacctccacacatat

SEQ ID NO: 914467 - DNA, 120 bp, Artificial Sequence
  ENSG00000280356_3 (sequence is synthesized)
tttagtaaacacaatcccagatcgtgaggaagggtttctgggggctcctcatcgacacagccagcatcctgttttgctttgcagccagtgaagaggcagggcccatccaaatctcccagt

SEQ ID NO: 914468 - DNA, 120 bp, Artificial Sequence
  ENSG00000280356_4 (sequence is synthesized)
tgtgggggctcgttgagcagcctgggaagggctgaaacagagacagcagacatcctctgatgtctgaaggtgattaaaagcaaaagaggagatctctggtagtctattcttttttctctg

SEQ ID NO: 914469 - DNA, 120 bp, Artificial Sequence
  ENSG00000280356_5 (sequence is synthesized)
atagattggtgattctcaaaatttgggggagggggacaatttgtgggaaagcctgtaatgtatttgtatggcttatccataaagaccataaagccagtcttgagcaaaattcttgttatt

SEQ ID NO: 914470 - DNA, 120 bp, Artificial Sequence
  ENSG00000280356_6 (sequence is synthesized)
tcagggaataattttactgccttgcatgtataaagacataccttatcacttatccaaaactatgataattccatttggaagaataatgtggcatagtcatggtgcctttgccaatttcag

SEQ ID NO: 914471 - DNA, 120 bp, Artificial Sequence
  ENSG00000280356_7 (sequence is synthesized)
gtgaatgtcaaatactagtaatgggtgaatatgtggctcttcagtcctgttgagagataaaggtgggcagagtcagggtgggggcactactggtcctttcactatctgagttcactatac

SEQ ID NO: 914472 - DNA, 120 bp, Artificial Sequence
  ENSG00000280356_8 (sequence is synthesized)
ctttgacaggtgccaagtactgagtattggcataatgaaggcaacttcatttgccaagttatgccttcaatagactcttcattccaggtgactataggactcatttaagtactgctttac

SEQ ID NO: 914473 - DNA, 120 bp, Artificial Sequence
  ENSG00000280356_9 (sequence is synthesized)
cagtgggtgctctaggctactagttttctattctctaatagtaaccagggattcaccgccttcgactcagccagattacataacctataccaggtttttatcctagagagtctaatgcct

SEQ ID NO: 914474 - DNA, 120 bp, Artificial Sequence
  ENSG00000280356_10 (sequence is synthesized)
ataaccatttctggtactaaatattgtacccatttaaggtttagttatagataataggactgttcctttaacagtttttgagaattaacatggggaatttttggaggagcttgaggagca

SEQ ID NO: 914475 - DNA, 120 bp, Artificial Sequence
  ENSG00000280356_11 (sequence is synthesized)
ggctgcagaattaacctccaagaatgatttctagaatagcactgtgggattggctaccagaggaaggaccttctaccataagaagaatgctggtggtcaggaaggactacggagactctt

SEQ ID NO: 914476 - DNA, 120 bp, Artificial Sequence
  ENSG00000280356_12 (sequence is synthesized)
gaaggactacggagactcttgtttccagggtcacattgaggctgaatggtcaataccagcaacagaatatctcttaggttaaaatcttccctgccactttgggaggccgaggcgggtgga

SEQ ID NO: 914477 - DNA, 120 bp, Artificial Sequence
  ENSG00000280356_13 (sequence is synthesized)
aaccttccctgcgtaacttaggcctgattcaaatattgctaagtgtgtctaattataaaatcaagatcacatccaaatctttagctgcagaggaatctagaaaatactgttttcagtttt

SEQ ID NO: 914478 - DNA, 120 bp, Artificial Sequence
  ENSG00000280356_14 (sequence is synthesized)
ccaatgccttcagcacaaaagaaagaatacttaaaggaggttgccagcagatgtggagggagccaggctacagtattcactcctccaccaccccgagttccatccaagttcccaaattat

SEQ ID NO: 914479 - DNA, 120 bp, Artificial Sequence
  ENSG00000280356_15 (sequence is synthesized)
gaattaatcagccaagtatttgttgcagtgctactgcacacaaagtaccttggcggtacagggttgtatgaggtgtgtctaaagtatgatgttcgttgatttcacaaactaagccaaatt

SEQ ID NO: 914480 - DNA, 120 bp, Artificial Sequence
  ENSG00000280356_16 (sequence is synthesized)
aatgggctggaatgaatatctcccttcaaaggggaaccctgtgcagatcttacatgggacagtctggcctcagaccttttctggactccctttggagggcttaatgagcatatacacata

SEQ ID NO: 914481 - DNA, 120 bp, Artificial Sequence
  ENSG00000280356_17 (sequence is synthesized)
tgtaccctcgaaatcaggttcatggttttaaaaccatacttgtcagaacagtatctcatgttgacaatgtgccaggccctgtggtatgttgtttacaagcgttacattacttcaattgca

SEQ ID NO: 914482 - DNA, 120 bp, Artificial Sequence
  ENSG00000280356_18 (sequence is synthesized)
tgacaaattgcactgtgaagtaggtgctattctcatttctcttttaatgaaagaaagaaaagctcagaaaagttaagtgacttttgcaaagtctcacgtgttctaagtgtgcagcaggag

SEQ ID NO: 914483 - DNA, 120 bp, Artificial Sequence
  ENSG00000280356_19 (sequence is synthesized)
aagggaactgaaggctctgtggcttcaaaggccattctcttcccataacattaacattcctttccttaactaagagaatggagttttccttccagcctgagagcctaccatatctcttga

SEQ ID NO: 914484 - DNA, 120 bp, Artificial Sequence
  ENSG00000280356_20 (sequence is synthesized)
gcttgtatctcagggatgttctactgtttccatgaagggcagcctctcagtgcaaaaagacgtctctgagttggttactgttcctgaataaatccaagtgaatatgctcttagatcttca

SEQ ID NO: 914485 - DNA, 120 bp, Artificial Sequence
  ENSG00000280356_21 (sequence is synthesized)
gccagtcctaaggagagagaggaagaatgttgtgaatcatggatttattagtttaatattcccaaagcttcgccaagtggctctctgagaaagggatagtcatcaactaagtataacaag

SEQ ID NO: 914486 - DNA, 120 bp, Artificial Sequence
  ENSG00000280356_22 (sequence is synthesized)
aataggatgtataatcaataatcatcgagatgtataaggtgaagtgtgtttacttagatttaaacatgtcacttcattattgtatctacgtaatatttggcttccattctcatgtgatac

SEQ ID NO: 914487 - DNA, 120 bp, Artificial Sequence
  ENSG00000280356_23 (sequence is synthesized)
ctaatttcttccttctttcactttctttctgatacaatgtaatactgaggttgaatatgtgagctcagtgtagttttgatccctggctcagtcacttactaaatatggaacttgagctaa

SEQ ID NO: 914488 - DNA, 120 bp, Artificial Sequence
  ENSG00000280356_24 (sequence is synthesized)
ttacttaatcccttcttaagtctcatttttcctctaagtaaaataatgatgataatggtacctacctcacaaggttattcatagagttgttgaatggattaaatctgatcatttgaaaaa

SEQ ID NO: 914489 - DNA, 120 bp, Artificial Sequence
  ENSG00000280356_25 (sequence is synthesized)
ggcattaacatactctttggtacatagtaaacactaaataaatgtgagatattatttttttcttttttgatacagagtctcgctctgtcacacaggctgaagtgcagtggtgtgatctca

SEQ ID NO: 914490 - DNA, 76 bp, Artificial Sequence
  ENSG00000280356_26 (sequence is synthesized)
cctgggttcaagcgattctcctgccttagtctaccaagtagctgggattactggcacgcaccaccacacccagcta

SEQ ID NO: 914491 - DNA, 120 bp, Artificial Sequence
  ENSG00000280356_27 (sequence is synthesized)
ttttatttttcatgtacaaaactctgctctaggcaccctaaagattcttaccttcactaattcaacaaacatttactgaatgctggagattataaaggattccaatgtggtttcagcctc

SEQ ID NO: 914492 - DNA, 120 bp, Artificial Sequence
  ENSG00000280356_28 (sequence is synthesized)
taggagctcaatgtgtggcagaggaaacagatcagtgaacaaatcaatggagttaaaagtctatggtatctagttgtggtacacactctccaggatagagtgcaagcatgagagtgagtg

SEQ ID NO: 914493 - DNA, 120 bp, Artificial Sequence
  ENSG00000280356_29 (sequence is synthesized)
gtagttctacctagctgttatgtctggggaggcttcaaaaagatgatgtttgagattagtctagaaagatggttccagagggtagaaagaaagggaattccatggagacacaaacaaaaa

SEQ ID NO: 914494 - DNA, 120 bp, Artificial Sequence
  ENSG00000280356_30 (sequence is synthesized)
agcaagaatgaaagcaagctgacaggaagggaaccataggtattgtgatgggacaaaactcacacaaggggtgggaggcagacggatctagagtctggggggaggttgccataagtagtc

SEQ ID NO: 914495 - DNA, 120 bp, Artificial Sequence
  ENSG00000280356_31 (sequence is synthesized)
acaagcaatgtcagcaaacattgctctaaactatataaatcccagtgctcccagtggcccagtccctgaacaaagtcacatttaagaaaaagtttcattgtcaggagggaattaatgaca

SEQ ID NO: 914496 - DNA, 120 bp, Artificial Sequence
  ENSG00000280356_32 (sequence is synthesized)
atcaaatcttccccggccatcatacttaaaaatgtcagagggtagaaatacagtcaatgccaagaactcctaatatgtaggtttgcatctctcttcccaaatcttacactcataacaact

SEQ ID NO: 914497 - DNA, 120 bp, Artificial Sequence
  ENSG00000280356_33 (sequence is synthesized)
gtagaacgtgtctcccttctctccgctccacaagtcccacgtgcagtttcttcattgccatgcccctctttggtccatcccagccacagccacgcgctaagtgcctgctttgctcccacc

SEQ ID NO: 914498 - DNA, 120 bp, Artificial Sequence
  ENSG00000280356_34 (sequence is synthesized)
tgctggccagtccaagggaagccaacagggaattctcaaccatgttgccctacaagacagcatagccagggcattcatttgctggtagaccccacatggttttaagaaaaggaggctatc

SEQ ID NO: 914499 - DNA, 120 bp, Artificial Sequence
  ENSG00000280356_35 (sequence is synthesized)
tctagctcagtgactcctggaaagcctcaggcaccaggtgatacctgagttgggactgtgccatctgagaagtcccagatggaaattggacagacagaaaataagaaaaaagccatgttg

SEQ ID NO: 914500 - DNA, 120 bp, Artificial Sequence
  ENSG00000280356_36 (sequence is synthesized)
aggaagaaagaaaggagcgaatggagccaacgctggtgtaggatctctatgcattgggaagagttgtactcactttgccctctgcacacctgggatgcaggttttctgagacaccacagc

SEQ ID NO: 914501 - DNA, 120 bp, Artificial Sequence
  ENSG00000280356_37 (sequence is synthesized)
attttggaagtagaagagaccttagatattccgtcgtccagccctttggctttagagatgaaatttgggaccagagagaaaaagaacatagacatttttgtctaaaattcaaacatttac

SEQ ID NO: 914502 - DNA, 120 bp, Artificial Sequence
  ENSG00000280356_38 (sequence is synthesized)
ttcacttcttcaatcaaaattacaaattagattcatcgtccccaggaaactgtgatgtttcttgtcatgagtatgaacatagagtcacaaaatgtatgaaagaggtgggtatgtatttgt

SEQ ID NO: 914503 - DNA, 120 bp, Artificial Sequence
  ENSG00000280356_39 (sequence is synthesized)
atgttccttttaaaaaggatgtcctccttgggatatgtcctccaggattaattttagcaaggatggaagtgggagaaaggcagtatggggtgagcattttcaggggtggtactaatttga

SEQ ID NO: 914504 - DNA, 120 bp, Artificial Sequence
  ENSG00000280356_40 (sequence is synthesized)
attctccctgggctttgccactcacaagtggagtatgatattggtcagttccttagtctccttgagcctcagtttccctgtcttgtaaaatgaagtgtgtgattgcaccttgctctctgt

SEQ ID NO: 914505 - DNA, 120 bp, Artificial Sequence
  ENSG00000280356_41 (sequence is synthesized)
tcaggatcatttgagataatgaacataaagcccttatcaaagggacaggcaggaagtcactgctaaattggtggtagctaatattattagtgctgttgaacaaacaaattctgcaggcac

SEQ ID NO: 914506 - DNA, 120 bp, Artificial Sequence
  ENSG00000280356_42 (sequence is synthesized)
cttgcagcagacattctaatatgttcagcatccatttcaatcgtatttattgtgtttcccttgtcctctgggccatggtccatatttacaagcaaggtgctttgttggcaatatcagcat

SEQ ID NO: 914507 - DNA, 120 bp, Artificial Sequence
  ENSG00000280356_43 (sequence is synthesized)
tgattgtaggacgacctgggggccttcaaactgtcccttcctcaagatggccatgccagtcaaccctcaggggaatagatagcagggctctgccaattgcacttggcatggagcatgtgg

SEQ ID NO: 914508 - DNA, 120 bp, Artificial Sequence
  ENSG00000280356_44 (sequence is synthesized)
tcagcaggatgagcacagcctccatcctggctgggaaaggtgagccggcagatgctgattccaacacagatgttgcccaggagagtggcagccgctggtgtcaggaattgctaattgtgt

SEQ ID NO: 914509 - DNA, 120 bp, Artificial Sequence
  ENSG00000280356_45 (sequence is synthesized)
tgcctcctggcacagcattcacacacagccctagaatggctcttgcattggaaaaggattctttctgcctctcgttttgtggcaacttccttctcagggacaaagcctggcgctgttaca

SEQ ID NO: 914510 - DNA, 120 bp, Artificial Sequence
  ENSG00000280356_46 (sequence is synthesized)
agatttggtttacagaaaaaggcccttgtactgtgcccagttttccagatgggctcctctttaaactaaaaaaaaaaaaaaaaaaattgatttggccaagttcacctggtgaacccagac

SEQ ID NO: 914511 - DNA, 120 bp, Artificial Sequence
  ENSG00000280356_47 (sequence is synthesized)
gcgcagtagggctagtcctcccatttgaatgccacctttttaaattaaactttctctcttaaaggcaagacacactgattagttagtttcctgcccaaaaaacttacaaaacacatacac

SEQ ID NO: 914512 - DNA, 120 bp, Artificial Sequence
  ENSG00000280356_48 (sequence is synthesized)
atcctataatataacacatttattataatagttctccctccctatttcaagcactgcagtatttcaccatggaaaggatctggcctttgctatcaaaactcttgattctgaattctgggt

SEQ ID NO: 914513 - DNA, 120 bp, Artificial Sequence
  ENSG00000280356_49 (sequence is synthesized)
ctgccacaccagacctttgtgactttggacaagagttctgtccttgaggctcagtcaccttgtgtataatatgtggataagacaacctaccctctccatcttgcaaagaataaaggagaa

SEQ ID NO: 914514 - DNA, 120 bp, Artificial Sequence
  ENSG00000280356_50 (sequence is synthesized)
gagttatgtaaattacttaatattgggtgcctggagcatggtaaatgctcattaaatgcccctctattatttcttgtaactagttgcagaacaaataaagtcacatctctcttaataatg

SEQ ID NO: 914515 - DNA, 120 bp, Artificial Sequence
  ENSG00000280356_51 (sequence is synthesized)
taattaatttctcaagcttttcatatgaccaaattacccagaagcccagaagttcttactggggacctctctattgctcctgaattgtccgagaatgcttaatcagcatgaaggaggcag

SEQ ID NO: 914516 - DNA, 120 bp, Artificial Sequence
  ENSG00000280356_52 (sequence is synthesized)
tctgctctaaatgcttcacagagagctggagaatcagtcagcaggtgggccccattttttgctgttgcttcatacagggttgacattgaaacctaggcctgcattggccatggggcccat

SEQ ID NO: 914517 - DNA, 120 bp, Artificial Sequence
  ENSG00000280356_53 (sequence is synthesized)
ctactgctgcagagatggcagtgctagttcagcagtttttccaggatgtaaaatgaatggcaaggcattcttcatcccgacggcaacatacgtctgtagtgcagaatgctactgtgggcc

SEQ ID NO: 914518 - DNA, 120 bp, Artificial Sequence
  ENSG00000280356_54 (sequence is synthesized)
tgtgggcccattttccaggtacagcaatgctttaactataggtgttaatacaggtttttgtgtgggctggagttggttagtgttaattgagccagggaaaacacacacacacacacacac

SEQ ID NO: 914519 - DNA, 120 bp, Artificial Sequence
  ENSG00000280356_55 (sequence is synthesized)
acacacacccttgtacctagaggataggcccacaatagcatcctggactacggatgtgcattccactgtagatatataaatatatcacacattgaaatacacatggctgggcatggtggc

SEQ ID NO: 914520 - DNA, 78 bp, Artificial Sequence
  ENSG00000280356_56 (sequence is synthesized)
gtaatcctagctactcaggagggtgaggcttagatagctccattgcacttcagcctgggcaataagagcaaaactctg

SEQ ID NO: 914521 - DNA, 120 bp, Artificial Sequence
  ENSG00000280356_57 (sequence is synthesized)
agcaaaactctgtctcaaaataaataaaagaaatgcacacacaaacatacacacccatagcaatcactaggcatgggtgcatggattatctcatttaattttcgcaactgctgtcttagt

SEQ ID NO: 914522 - DNA, 120 bp, Artificial Sequence
  ENSG00000280356_58 (sequence is synthesized)
gtcttagtctgctagggcttccataataaaatatcatgaaagagagagagagggagatctttctctgatgcccgcttataaggacaccagtctcatcatgaatgcccaacccccatgacc

SEQ ID NO: 914523 - DNA, 120 bp, Artificial Sequence
  ENSG00000280356_59 (sequence is synthesized)
tcatctaatcctaattaccttccaaaggtctcatctccaaataccatcacattgtgggttaggttgaaatttggtggagacacaaacatccagttcatgatagccacgctatgagttagc

SEQ ID NO: 914524 - DNA, 120 bp, Artificial Sequence
  ENSG00000280356_60 (sequence is synthesized)
tactagcatttttcttattttatatatgaggaaacaggcataaagaggtgaagtaacttacagtcacttgaactggtaagaagcagatttgggctatttatgttgtgaatagaagcagtt

SEQ ID NO: 914525 - DNA, 120 bp, Artificial Sequence
  ENSG00000280356_61 (sequence is synthesized)
agaatctgtatttgcagttcttatttattttattagttcttacatgaacttgggttttttagattacagctttttgcttgctactctcatgctcagcgtgcatctgcctgcatggttgag

SEQ ID NO: 914526 - DNA, 120 bp, Artificial Sequence
  ENSG00000280356_62 (sequence is synthesized)
tgaggggtgggcagtgtcttcaccagaatgcaccactctatgacaatttatactggggcgtcagatggccatgcaggtcttccctcttcccggtgaaccaccagaggcagttttgtcttc

SEQ ID NO: 914527 - DNA, 120 bp, Artificial Sequence
  ENSG00000280356_63 (sequence is synthesized)
cctcctgccaacacacctcagccaagagagttttgttttatcagagaggttctaataactctcaagcttttttgttgttgttgagacggagtttcaatcttgtcattcgggctggagtgc

SEQ ID NO: 914528 - DNA, 120 bp, Artificial Sequence
  ENSG00000280356_64 (sequence is synthesized)
ctggcaactctgaaacttaaaagcaacaggctccaaataagtgctggcccctttgcagctcttaggcttctcagcctccacacaaatgtgctcttttgtcatccagtggccagtctgttt

SEQ ID NO: 914529 - DNA, 120 bp, Artificial Sequence
  ENSG00000280356_65 (sequence is synthesized)
actgccactgacgctgctccttgctccttgtccttaagccttatccctgactagagctcaaactcattagtgcccaaggcctgggccaggagaggataatagcatgaggtttaaagactc

SEQ ID NO: 914530 - DNA, 120 bp, Artificial Sequence
  ENSG00000280356_66 (sequence is synthesized)
caaacacttacaggggtgaagtgtgcagattctgatgccagatgctctgtgttctaatcctggcacctcttgtgcaactttcggcaatttactggacttcctgtgcctccatcccaatgt

SEQ ID NO: 914531 - DNA, 120 bp, Artificial Sequence
  ENSG00000280356_67 (sequence is synthesized)
ctgaaaactggagatcccaatagtaactcataaggttttttgagagggttaaatgatatgatacacacaaagcactgagaacaatatttggcatacataaagcgcaccataaatgtgacc

SEQ ID NO: 914532 - DNA, 120 bp, Artificial Sequence
  ENSG00000280356_68 (sequence is synthesized)
tattataaatatgaatcttagatgtaccactgcttacctacatgacggagggcatttcattcagcttctccagctttggtttcttcatatgtaaaatgcaacagatggaaataaaaacca

SEQ ID NO: 914533 - DNA, 120 bp, Artificial Sequence
  ENSG00000280356_69 (sequence is synthesized)
tattaaggctccaggagatctggtttctagttccaatctgtcactagtcagctctggatattagcaagtaattctgtctcattgtgcctcagtgtttgcctataaaatgagaacagaatc

SEQ ID NO: 914534 - DNA, 120 bp, Artificial Sequence
  ENSG00000280356_70 (sequence is synthesized)
agatcatctgtaaaatcctgttatcctaaagatatgtttctgctatcttagtatattgctgggtgcaaggtaagtgttcaataccaatgatcctgtaaatccataacatgtttttattgt

SEQ ID NO: 914535 - DNA, 120 bp, Artificial Sequence
  ENSG00000280356_71 (sequence is synthesized)
tcatatataattatgattatttcatggggttgtactgaatgggaatatgtaaagtttcatttgttatttacaacaatcctatgagagagtaatattgacgaagccagctgtattagtctg

SEQ ID NO: 914536 - DNA, 120 bp, Artificial Sequence
  ENSG00000280356_72 (sequence is synthesized)
gagagtaatattgacgaagccagctgtattagtctgttctccaattgctataaagaaatatgtgagccagggtaattcataaagaaaagatgtttaattggctcatggttctgcaggctg

SEQ ID NO: 914537 - DNA, 120 bp, Artificial Sequence
  ENSG00000280356_73 (sequence is synthesized)
aggaaggcctcaggaaacttacaattacgacgaaggcgaacagggagcaggcactttgcttggccagagcaggagcaaggcagagaagaggggaggtgctacatactttagaatgtccag

SEQ ID NO: 914538 - DNA, 120 bp, Artificial Sequence
  ENSG00000280356_74 (sequence is synthesized)
atctcatgaggcctcactattgcaaggaaattgccaaggggaatggtgctagattattcatgagaaactgcccccacgatccaaccgtttttcaccaggcctcactactaatattgggga

SEQ ID NO: 914539 - DNA, 120 bp, Artificial Sequence
  ENSG00000280356_75 (sequence is synthesized)
ttacaatgtgatttgaaatttgggtagggacacacatccaaactatatcatgtagctaacatggtttcagggcttactgtatttcgtataaattcctcccatgctctgcttcattcagtc

SEQ ID NO: 914540 - DNA, 120 bp, Artificial Sequence
  ENSG00000280356_76 (sequence is synthesized)
tccacaatagtgctctgaattaggtattatccttattcccattgttcagatgagaaagtagaggcttggaggtttaagtaatatgttttgtgttactttggtggagctggagctgaagaa

SEQ ID NO: 914541 - DNA, 120 bp, Artificial Sequence
  ENSG00000280356_77 (sequence is synthesized)
tagggcataagatgactgctccatagacaggcagttattaataaacccacctgacagagagagactctgaagctcggtcaggaaataataggtccaaattcacttacaagtgagcaacaa

SEQ ID NO: 914542 - DNA, 120 bp, Artificial Sequence
  ENSG00000280356_78 (sequence is synthesized)
ggtcaaaaccagaatccaggctttctcttccctcatctggagtgtgctccactgtgcagcctctcaagccctcttgcttgtggaataaatgaatacaaattaatgctgaatttgtattca

SEQ ID NO: 914543 - DNA, 120 bp, Artificial Sequence
  ENSG00000280356_79 (sequence is synthesized)
tttccagctaactggcagatttacactaaccagcagatttacactttctccgcagcacaccttcaacaaacacatcctcatgcatactcttttcagtctttggggatctgtcttctctct

SEQ ID NO: 914544 - DNA, 120 bp, Artificial Sequence
  ENSG00000280356_80 (sequence is synthesized)
ctgactcactccctggccctggcaaactaaagtcgtagccctgtctgtgagcatgtcggtaccagaccccaacaaaggctacggtaagcactgagaaacaggggcagatcgtactgcttt

SEQ ID NO: 914545 - DNA, 120 bp, Artificial Sequence
  ENSG00000280356_81 (sequence is synthesized)
acttggtagtgaaatcaaagacggaggtccccaagtgcagatgacagaagttcccaagacaaaatgagccacaggaattcggagggctggcagcagatgtgagaggttttggaagaaatt

SEQ ID NO: 914546 - DNA, 120 bp, Artificial Sequence
  ENSG00000280356_82 (sequence is synthesized)
acccaggctaattaaatgtgaaataatacataaagggagcaagaaagtcctgtgttccctctctttaatgtgcctacattcacagggcatctgtcattttggtaccaagtctcagaaaac

SEQ ID NO: 914547 - DNA, 120 bp, Artificial Sequence
  ENSG00000280350_0 (sequence is synthesized)
cagtggatactcgtgatccggaaaagcagctaaagccgcttcttccccccagtaggtgaggagtcaacaggcacactctaaagacgaggaaataaagccggtcgtgacaccgtgagagct

SEQ ID NO: 914548 - DNA, 120 bp, Artificial Sequence
  ENSG00000280350_1 (sequence is synthesized)
ggttcgcccaactaccctttcaggggaacgtccaccccacctctgctgccgagcttggaaaagtggcaaggagtcgcagtccaggacaaaactccgcccccgtccccgtgaaggccgccc

SEQ ID NO: 914549 - DNA, 120 bp, Artificial Sequence
  ENSG00000280350_2 (sequence is synthesized)
gtggctgggggctactgtagagggagaaaatgaaaagaatggcatgatcagaagttgagcagtgtacatcctgcacagccaaatgcaacaggtcttttccagagtctgctgccactcgca

SEQ ID NO: 914550 - DNA, 120 bp, Artificial Sequence
  ENSG00000280350_3 (sequence is synthesized)
ggggtccccaatccctgggatgcaaaccaggggccataagccaggtccatggtgtgttaggaaccaggctacgcagcagaaggatccgtccttctgcacaacccatgctgtcaaccagga

SEQ ID NO: 914551 - DNA, 120 bp, Artificial Sequence
  ENSG00000280350_4 (sequence is synthesized)
gctattctgtccccaccgactcaacgaggcagcaaccagttctgtacatgaagattccaagggatcccaaatggcacgtgttagaacagacactatccaagaaggaaaggacatatctgt

SEQ ID NO: 914552 - DNA, 120 bp, Artificial Sequence
  ENSG00000280350_5 (sequence is synthesized)
acacacacacacacacacacgctgaagcatcctcagaattcctgcaactccaaggttcaaacgtccaagaagaatactgtgggagacagagtcactctgtagcccatgctgaagtgcagg

SEQ ID NO: 914553 - DNA, 75 bp, Artificial Sequence
  ENSG00000280350_6 (sequence is synthesized)
tccaaggttcaaacgtccaagaagaatactgtgggagacagagtcactctgtagcccatgctgaagtgcagggtt

SEQ ID NO: 914554 - DNA, 120 bp, Artificial Sequence
  ENSG00000280350_7 (sequence is synthesized)
aagccaccacacccagcctgttattgtattttatgaaaatgctcacctatggtggattgaaaatgcacttaaacatctatttttaagtcaagatgtcctctctctgtctcttaactttcc

SEQ ID NO: 914555 - DNA, 120 bp, Artificial Sequence
  ENSG00000280350_8 (sequence is synthesized)
atgacttgactagcaggcacattcaaggtacttcatgcatcatgaagcagatggaacaggcggctctccattctagagatccctggctgtaagggtctgtccctttgctagtgtgggagg

SEQ ID NO: 914556 - DNA, 120 bp, Artificial Sequence
  ENSG00000280350_9 (sequence is synthesized)
tcagcctgccttgcagaatgaaccatacggattcaaagactaatcccaaatatgccaggattgtcactttcatttcattagactttctaagcccaatgtaagtgttgtttatgctgaatg

SEQ ID NO: 914557 - DNA, 120 bp, Artificial Sequence
  ENSG00000225144_0 (sequence is synthesized)
gcaactaagcccagagatggatcccaaaactgaagaattggtttaattaaattgaaagctctggtgcttgtggtaattgctatgaaggaatccatatcccatcagaaccctctcccctgg

SEQ ID NO: 914558 - DNA, 120 bp, Artificial Sequence
  ENSG00000225144_1 (sequence is synthesized)
tgtgcatttgaaatctccaaccttttaaaacattactgtgaagttgaaagttcctggtgtcttttgattaaacatcgtgctagcaacaataatattgaccacgtttgagacagaagagcc

SEQ ID NO: 914559 - DNA, 120 bp, Artificial Sequence
  ENSG00000225144_2 (sequence is synthesized)
acaagagggaattagcctaaattcctaagcgcccacctggaaaggatcctccttggaagatctgtcagatccatagtaaactttgaatgaaagagaaataaaatgttatgtgttaaagtt

SEQ ID NO: 914560 - DNA, 120 bp, Artificial Sequence
  ENSG00000225146_0 (sequence is synthesized)
cgtggatgagtcacgcagccttttcctcaccacacagagggcgtctagatctcttctggcttgtttgatgaaatacggacgtatctacctcaaaacaatggttgaggctcagaacagaac

SEQ ID NO: 914561 - DNA, 120 bp, Artificial Sequence
  ENSG00000225146_1 (sequence is synthesized)
ctgacacagaatacgccctcaggtatcggtgttggctgcttgtgactgactttggcaagtaagatcagtacccggcacctctgggcacacagggcccgggctgcatccactgtgccaggg

SEQ ID NO: 914562 - DNA, 120 bp, Artificial Sequence
  ENSG00000225146_2 (sequence is synthesized)
gtgagcctctccctgccctcccgctggaatagaaagctgatcccgacgtcccactccgacccacggtcaggaagccgtcctgtccaggaaggtggctgaggtacatccctgaacacagta

SEQ ID NO: 914563 - DNA, 120 bp, Artificial Sequence
  ENSG00000225146_3 (sequence is synthesized)
ggccacagcatcatgcagcggagggccagtggccgctattcttcctgctggtgttccactcggcccgcagctcacagcaagtctatgcggaactgtgcaacccacatgctttgattttca

SEQ ID NO: 914564 - DNA, 120 bp, Artificial Sequence
  ENSG00000225140_0 (sequence is synthesized)
aggagaaggggctgtgctgccagcaggcagtgctttgagctctaatggatgaacattgctaaccagcgaaggtggagagagggcacccgtctgagaagatgaagaggcagcaaagcacag

SEQ ID NO: 914565 - DNA, 120 bp, Artificial Sequence
  ENSG00000225140_1 (sequence is synthesized)
ctggcctcggggaaccggaagccacagggacatcaggctgtgtgctgctgtctgtcggccaccagctgggggactatcctggacctggaagggcatccctgacactccccaccagatgcc

SEQ ID NO: 914566 - DNA, 120 bp, Artificial Sequence
  ENSG00000225140_2 (sequence is synthesized)
aggggcacccccagccccagtatagatctggactccatcctttgcaatgtgtggggttctaggaagaggccagccagccgtggaagtgtcctgggctctgtcccggagacgacgaacttg

SEQ ID NO: 914567 - DNA, 120 bp, Artificial Sequence
  ENSG00000225140_3 (sequence is synthesized)
gctccccacgagggcggcctattccccacagtgtcccccgggggccacacctgcacccaccttgctgaagataattcgctttctcatccgtgaaagaataaagtcggattaactcatctc

SEQ ID NO: 914568 - DNA, 120 bp, Artificial Sequence
  ENSG00000225140_4 (sequence is synthesized)
cacactcacttccaactctaacaacctgtgttaggaaatcaaaggtaaggactctgaccacaaacccaagaagcaaaacccgagactcacggaacgacgccaccattgcagttcccagct

SEQ ID NO: 914569 - DNA, 120 bp, Artificial Sequence
  ENSG00000225140_5 (sequence is synthesized)
tgactagttgtttttcttttctggtctgttctgctcttttggtttaaataattaaagatccttgttgacaagtaaaaaaaattctttatgaagctaaaaaaagtggttctaattaaacat

SEQ ID NO: 914570 - DNA, 120 bp, Artificial Sequence
  ENSG00000225140_6 (sequence is synthesized)
gcaattataaaaaataaggtaacatattcatggcattatgaataattaataagaactcttcgatttcatttagaccagggattctgtgctaatatgctctcagctgtcttgaaataatgg

SEQ ID NO: 914571 - DNA, 120 bp, Artificial Sequence
  ENSG00000225140_7 (sequence is synthesized)
tgaaattttaaaattagttttgtacttaaacatgtccccaaagtgaagcacagcggccaacgtccgtcacggtgccgagcagtgccagccgctctaccatggccgacggcctgattccca

SEQ ID NO: 914572 - DNA, 120 bp, Artificial Sequence
  ENSG00000225140_8 (sequence is synthesized)
agggctgcgtcccggggccgtgctagtgcagtgaatgttcaggaaacagaccaggtggcaggagggagtcttgtcctcaaggaacctcataagtcttgctagggggacaaacaacgagag

SEQ ID NO: 914573 - DNA, 120 bp, Artificial Sequence
  ENSG00000225140_9 (sequence is synthesized)
aatgaaactggcagccatagaatccgggccttgatgcccaggcctcgccatgcatacctgctggccggcatctccctgagacccgtctggcacaggcaacggcagggcccggcccttgga

SEQ ID NO: 914574 - DNA, 120 bp, Artificial Sequence
  ENSG00000225140_10 (sequence is synthesized)
gcacagggatggcagagcagggtcatcgaagcaggtggcgtgcagacagtggcttctccgcaagagctcctggctctcagggagctgagggctcctcaatggggaattctggctgagctc

SEQ ID NO: 914575 - DNA, 120 bp, Artificial Sequence
  ENSG00000225140_11 (sequence is synthesized)
caggggaaagcgggttggaggcctggctcctccgcccccatctcctctgccccaaccctggaagggggtcagatatcaatgctaacatttgtgctgactcaattaattcaaacgattcac

SEQ ID NO: 914576 - DNA, 120 bp, Artificial Sequence
  ENSG00000225140_12 (sequence is synthesized)
gctgactcaattaattcaaacgattcacaaaaacaaacttgcttaaagtattaatttcctaaaaagaactaaaatgagttcaaataattcacataattaaattattttaattgttaattt

SEQ ID NO: 914577 - DNA, 89 bp, Artificial Sequence
  ENSG00000282265_0 (sequence is synthesized)
tgtggaagctttgttcttttgctctttacactaaatcttgttgctgctcagtgtttgggtccgcacggcgtttgtctttgctcctgaag

SEQ ID NO: 914578 - DNA, 120 bp, Artificial Sequence
  ENSG00000282265_1 (sequence is synthesized)
acgaaggtctgcatctttgctcctgaagccagcgcgaaggtgtgcagcttcagtcctgaagccagcgagatcgcgaacccgccaggagggacgaacaactcccgccaggaggaacaaact

SEQ ID NO: 914579 - DNA, 120 bp, Artificial Sequence
  ENSG00000282265_2 (sequence is synthesized)
tcctgaagccagcgagaccgcgaacccaccagaacaaagaaactccggacacatcatctttaagaactcactgggagagtctgcggcttcattcctgaagtcagcgagaccaagaaccca

SEQ ID NO: 914580 - DNA, 120 bp, Artificial Sequence
  ENSG00000282265_3 (sequence is synthesized)
tggccttcagaaattcccagtcttgcaaaggcaagagggaaacacagcaaggagcaaggttgtctgctgaatatttgccaagaggaagtttggggaaatgccacatgcatagtaattcca

SEQ ID NO: 914581 - DNA, 120 bp, Artificial Sequence
  ENSG00000225148_0 (sequence is synthesized)
gggaccacacttcacaaaagggagcaagaaggcagataacggcaaagaaaaatgtttgtagtttactgtggaggaccaagtgagtttatacagatgtttacctcctttgggattatttgc

SEQ ID NO: 914582 - DNA, 120 bp, Artificial Sequence
  ENSG00000225148_1 (sequence is synthesized)
tgctggctagaatgaaaagacaaacattcccttcaaacagtatgccattgcctaataattttgcaagctcaaatgaaatccaaccaaattcagaatttagattttcctactggcttgtgt

SEQ ID NO: 914583 - DNA, 120 bp, Artificial Sequence
  ENSG00000225148_2 (sequence is synthesized)
aatttttgtttgtatgggatagaatcaggttccatcttttattctccttcagaatatcattaacaaagaaaactttgaatgttagttggtgggatagatacattgacactgtttacatag

SEQ ID NO: 914584 - DNA, 120 bp, Artificial Sequence
  ENSG00000225148_3 (sequence is synthesized)
gaggtcaatgaatattacaattcttcttctggaaataatccttaagaatgaatgagcaaaagacacagttttcaaccctattttctcttctctttctctctttttcttccctctgttctt

SEQ ID NO: 914585 - DNA, 120 bp, Artificial Sequence
  ENSG00000225148_4 (sequence is synthesized)
tctctctctctcttttttccttctttttatttttttcttcctggagaggtttctgaagttcaacagtgattctttaattaagagaaaaaaaaaaccacacatacacacactagagaacaa

SEQ ID NO: 914586 - DNA, 120 bp, Artificial Sequence
  ENSG00000225148_5 (sequence is synthesized)
gaaggaatagtaaacagttccctccactgctagaggggttagttacaaaataaacatttcacagactggaccacatctcctgtaatgagacagctctggctagtgagactgcagctaaag

SEQ ID NO: 914587 - DNA, 120 bp, Artificial Sequence
  ENSG00000251213_0 (sequence is synthesized)
cgcgccctttgagtatcagttgccatctctaaattgaaccgtgtttgtatttacaccggtgaaaatgagtatactgtcattaaaatagaactctttaagaataattgtggtctcttgtgg

SEQ ID NO: 914588 - DNA, 120 bp, Artificial Sequence
  ENSG00000251213_1 (sequence is synthesized)
tgatctctagaaggaatcctgaagcatgtgccagagacgcagttcctaaagtctttttttctctatggttagagtgactggccaacatccccacaaatctattaaagcaggtttttgtgt

SEQ ID NO: 914589 - DNA, 120 bp, Artificial Sequence
  ENSG00000251210_0 (sequence is synthesized)
ctgcctaacgaagaggacactggggcatttaactgccagtgcccagcagtcgtagttgagtcctgctgatgaaacagaaaacctgcaacctgccctgtttgcaggcagaacagacagtta

SEQ ID NO: 914590 - DNA, 120 bp, Artificial Sequence
  ENSG00000251210_1 (sequence is synthesized)
gtttgcaggcagaacagacagttaaatatatcagccaaggaacagcaggggctggtagctgaagtttggacagtcgagcccgtaaatgatggagtctggctctgtcatccaggctggagt

SEQ ID NO: 914591 - DNA, 89 bp, Artificial Sequence
  ENSG00000251210_2 (sequence is synthesized)
ccattcttcctaaatgttaatcaaggaagcaaaggacatcttggagggaaggaaagagcaagtcactgttttctgtgattcagctactc

SEQ ID NO: 914592 - DNA, 120 bp, Artificial Sequence
  ENSG00000251210_3 (sequence is synthesized)
aggaaagagcaagtcactgttttctgtgattcagctactctctgtattttttaaagctgtttgaatatgacagcgtttcaacctttcagaacattcatttttctcttctgaaaaatgggc

SEQ ID NO: 914593 - DNA, 120 bp, Artificial Sequence
  ENSG00000251210_4 (sequence is synthesized)
tcatggaggagggtgacagatggaattgtgtccctttaaaattcatatgctgagtcctcatccccagcatgtgtgtcatgaatatacctcagcatgtgactacatttagatataaggtct

SEQ ID NO: 914594 - DNA, 120 bp, Artificial Sequence
  ENSG00000251210_5 (sequence is synthesized)
ttaaagaattaattaagatttattccactctgttaagcttcctgaatcacagagaagttgtcagaaagattttagcctccgctataggaagtcctgcccaccttctccagatctctgttc

SEQ ID NO: 914595 - DNA, 120 bp, Artificial Sequence
  ENSG00000251210_6 (sequence is synthesized)
tcatagtccatcctctggttccaggtggaagaattctaaaatcacacaagaaaatgtaagatatcttcctcgaatatcaacagagaagaacagcagccacgtggataaggcagagtttgg

SEQ ID NO: 914596 - DNA, 120 bp, Artificial Sequence
  ENSG00000251210_7 (sequence is synthesized)
gaaatcctggattcccttatcataaagcatcttacagtaacctcagaaatgcagaagttacttgtaatggtgctgtagacactgtacgagaaagtttcacctttatgatctaatttaatt

SEQ ID NO: 914597 - DNA, 120 bp, Artificial Sequence
  ENSG00000251210_8 (sequence is synthesized)
ctcacaaaaaccctgttaggtagggtgttattatttaaatttaaatcagaggaaaatgtaacaggaattctgcaacttacagtcaaagagataataaacaggagcatctgtggtttgaaa

SEQ ID NO: 914598 - DNA, 120 bp, Artificial Sequence
  ENSG00000251210_9 (sequence is synthesized)
aggtggaagaattctaaaatcacacaagaaaatgtaagtcaaagaagctgagatctcaatggatgacaagatcagctcaaagttacaaacacagacttagaggcagggctgaaccgccat

SEQ ID NO: 914599 - DNA, 120 bp, Artificial Sequence
  ENSG00000251210_10 (sequence is synthesized)
ttcttagcatctccctttatcatcatcctattttaaagagtaacactgactcgcaaacaatttagttttactttattacaaaattcactgtttctatttcctatacatatggtttacctt

SEQ ID NO: 914600 - DNA, 120 bp, Artificial Sequence
  ENSG00000251216_0 (sequence is synthesized)
ctcattttttaggaaggaaccacatgtgaaaccacttacctgtttaaccctatgaacttgaagagaacatgtaatgccacttaaaatacctaagctcgggttctgccttcagcgactcct

SEQ ID NO: 914601 - DNA, 120 bp, Artificial Sequence
  ENSG00000251216_1 (sequence is synthesized)
ggtagtagtgcccttatgagccatttatcaagaagaaaccagggcacttggaatgttttgagggaggcagatctgtccccgtcatggagcactgactaccatcttccctgaactcttacg

SEQ ID NO: 914602 - DNA, 120 bp, Artificial Sequence
  ENSG00000251216_2 (sequence is synthesized)
tgaggaagaacaaacctctaaggttgttagcctctattttgtgatctccttattagagcaactgagcctataccctaacaaatagacattcataagatttgctgatggatcagatgtgga

SEQ ID NO: 914603 - DNA, 120 bp, Artificial Sequence
  ENSG00000251216_3 (sequence is synthesized)
agacaaaaagaagagttaaggatggttctaaggcttttggcctgagcaaaatgtgtcatttactaagatgtagaagactatgggaagaacatatttggcaagaagatcaagaatacaatc

SEQ ID NO: 914604 - DNA, 120 bp, Artificial Sequence
  ENSG00000251216_4 (sequence is synthesized)
ttgggcatggcacactggagatgtctagttgacatatcttttaaaaataatttttcattagccaaactagtacttgctttaaaaaaaaacccactaagatctctaggtgcactaagcatt

SEQ ID NO: 914605 - DNA, 120 bp, Artificial Sequence
  ENSG00000251216_5 (sequence is synthesized)
gcacaaaactaaaaggagatactctcctattttctagtggttcacaatttaatgtaaatcctacaatgggctgaatgtcagatcaaaattataccccatatttagaaatttctgtagagg

SEQ ID NO: 914606 - DNA, 120 bp, Artificial Sequence
  ENSG00000251216_6 (sequence is synthesized)
aacccattcaaggtttaattgaaatgccattattacttaagctactttatacaaattattctgctagaatacctttataattgtaaagatctcaaaatatagttatttactatatacaaa

SEQ ID NO: 914607 - DNA, 120 bp, Artificial Sequence
  ENSG00000251216_7 (sequence is synthesized)
agcctctaggttaccctcatccataggaatcacatctgcattcctgtaactgcataaggagaaagaaggtggaagcactctactttaggccaagaaacaatgaccacagcagcaaaacat

SEQ ID NO: 914608 - DNA, 120 bp, Artificial Sequence
  ENSG00000251216_8 (sequence is synthesized)
tggtttcagaaagagttttcatcggaacccttggttcaagtcctagaactcacagctgaggatgctatgaaaaccccttgaggaaacaaaggcaccttgggggccattgagaactcctga

SEQ ID NO: 914609 - DNA, 120 bp, Artificial Sequence
  ENSG00000251216_9 (sequence is synthesized)
agagactgaaatttgtctgccttggacttttcttttgacaattcacatccaacttaagcagaatcattgtttattcttattatgccaggtttccttttctggtctgcaggttctctaggg

SEQ ID NO: 914610 - DNA, 120 bp, Artificial Sequence
  ENSG00000251216_10 (sequence is synthesized)
tttcataggctagtagttggaattttcatatttccaaagcattggggattttgcaaaaacaaaatctaaaggatattcagcagcacagtttacttaggaggttttaatcataataatctg

SEQ ID NO: 914611 - DNA, 120 bp, Artificial Sequence
  ENSG00000251216_11 (sequence is synthesized)
cataatgtatgagaatttctacctcagctgcctcctttctttctctttcgtgtctgggaaaaagccagggatttttcccttcctctgatttaaataccttataaaattttggtggaagca

SEQ ID NO: 914612 - DNA, 120 bp, Artificial Sequence
  ENSG00000251216_12 (sequence is synthesized)
cccttatgagccatttatcaagaagtgataggatcgcattctgtcacccagtctggagtgcaatggcatgaccttggctcactgcagcctcgatctcccagcctcaatcaatcctttcac

SEQ ID NO: 914613 - DNA, 120 bp, Artificial Sequence
  ENSG00000251216_13 (sequence is synthesized)
taataaactgggtcataggtagaatcagtgccgccttatgacccttagctgtcattgctttaaggaatttggcatggtcctcgaaggccagaaggcaatgtgggttgcatcctacagctt

SEQ ID NO: 914614 - DNA, 120 bp, Artificial Sequence
  ENSG00000251216_14 (sequence is synthesized)
ttgagatctcagagacttactgcacccatggctgggaatgaactgtaaatgctgacactggtaactaggtgccaaactgaagtgatcacaacctaatctgagccaaaaggcatttctttg

SEQ ID NO: 914615 - DNA, 120 bp, Artificial Sequence
  ENSG00000251216_15 (sequence is synthesized)
catcaggcataaagcaacatcaaactcccataacccacacacaacacagaaatcattactgaagagattcaacatcatcatgccagacactaagtgagttatttctctccttccctgtct

SEQ ID NO: 914616 - DNA, 120 bp, Artificial Sequence
  ENSG00000251216_16 (sequence is synthesized)
caccacagtttcctcccacttggtcacacatggtaagcattcatgtgtgcgaaggcattttatgccttcgacctaaccccgaccacagtcccctagtcttatcagagatctgcactcccc

SEQ ID NO: 914617 - DNA, 120 bp, Artificial Sequence
  ENSG00000251216_17 (sequence is synthesized)
accatttgagcacgatggagtgcatatttccagtgcaaaaagactgatatcattatgattttcattaactagttgccagcttgcattcttttttctccctttttttctctctcaacagca

SEQ ID NO: 914618 - DNA, 120 bp, Artificial Sequence
  ENSG00000251216_18 (sequence is synthesized)
cttctgtcctcagcccaaccccagccagaaaaggtgttgctacattcagtgaaaaattattattagtatagacatgaaatttgatgataatgtagattgttttgtgtcatctgcaggctg

SEQ ID NO: 914619 - DNA, 120 bp, Artificial Sequence
  ENSG00000251216_19 (sequence is synthesized)
tcacaatacactctgcatcactgaaatgtgttgaccagaaggatgatggtgttgtcatgatactgaggtcttttaattaattactttgtgactttcatagcatttagaaaacggagaaca

SEQ ID NO: 914620 - DNA, 120 bp, Artificial Sequence
  ENSG00000251216_20 (sequence is synthesized)
gggtattttcttgaacagcctagccaaatgaaaaactggttactaatgtatgttatcttcatgaatgaaggcataaaataataaaaacaaacaaattaaaaattgttaataaattaataa

SEQ ID NO: 914621 - DNA, 120 bp, Artificial Sequence
  ENSG00000251216_21 (sequence is synthesized)
acactaacagggccgccccagtcagggtgacagaacccagctgctggctccaggctccatcgtcagaaggttccacttactgcagaactctgtctccagagagcgtggattctaactagt

SEQ ID NO: 914622 - DNA, 120 bp, Artificial Sequence
  ENSG00000251216_22 (sequence is synthesized)
tctcaatgtgaagatgacaaggatgaagacctttctgatgattcactttcacttaatgaatagctttaagatacaagatacttcaatgaataaaacaaagacctttgctttcctgaaact

SEQ ID NO: 914623 - DNA, 120 bp, Artificial Sequence
  ENSG00000251216_23 (sequence is synthesized)
agagtgaatacactaaggaatttaagagcttacaaactgatttttatggaagtcatcaagagtggagaaggctgatttaaaaatcaaccatgattttaaacaggggctgaaaactgtggc

SEQ ID NO: 914624 - DNA, 120 bp, Artificial Sequence
  ENSG00000251216_24 (sequence is synthesized)
ttacgaggcaagattgcaagtttgtgaaaagtttgagccaaagaaagtattctttatgaagacaagtaattcgatttaaaaggaaaatttaaatgaggcattaggaactgaactgtgaat

SEQ ID NO: 914625 - DNA, 120 bp, Artificial Sequence
  ENSG00000251216_25 (sequence is synthesized)
tcaattaggctgtatattggactttcaaaagaagcagtgaaaaactctatagcttttattgaggcaaagaaaggacatgtgttaaggctttaagatacaagatacttcaatgaataaaac

SEQ ID NO: 914626 - DNA, 120 bp, Artificial Sequence
  ENSG00000251214_0 (sequence is synthesized)
aaaaatgagaagtcaagtttaattataaaaaatgtgtggtctatccctctattaaaatctgtatacacatctgtactccatgacctcagattgccatatttcttcctctgaagcacaaga

SEQ ID NO: 914627 - DNA, 120 bp, Artificial Sequence
  ENSG00000251214_1 (sequence is synthesized)
aagtcttccttttacctcacccaattctctcctgcttttaattcgagcctatttccattcattgggtttgttgcagacatgaagagcaaactggctttgaagttaataatcattattttc

SEQ ID NO: 914628 - DNA, 120 bp, Artificial Sequence
  ENSG00000251214_2 (sequence is synthesized)
cttccctcagaaaccattctttagccctttcatcatctttgtcacttctctgaactcactccaggttcgccacatctgcacgttacaagcgtgagttctcagtgttctcaaacatcccca

SEQ ID NO: 914629 - DNA, 120 bp, Artificial Sequence
  ENSG00000251214_3 (sequence is synthesized)
actccgttctcaaaaacatctgccagcacttggggccaagtctagagttaatccttctgttttaacacctctggtatgggtcacagactagccgttttgttgcctttaaacaaaacaaac

SEQ ID NO: 914630 - DNA, 120 bp, Artificial Sequence
  ENSG00000251214_4 (sequence is synthesized)
aacaacaaaaaaaccatagggatgggatatttcgaaggtgagtggccaactttcagaatgacagtgttttcttctgacctcaaagatgggctgccttccaaggggagccttgaagtttca

SEQ ID NO: 914631 - DNA, 120 bp, Artificial Sequence
  ENSG00000251218_0 (sequence is synthesized)
caaactccggtgaccataagaatcacctggagagcttgttaaagcacagatttgtggtcccctcacctgagattctgattcagtgggtctggaggggggactttgcatttctaataagct

SEQ ID NO: 914632 - DNA, 120 bp, Artificial Sequence
  ENSG00000251218_1 (sequence is synthesized)
cccaagtgatgctgcatagggctgccacaaatagtaggggctcagtcaagttagtataataggattttttttcctcttatgttgaagtccataggcaggtagtccagcctagtaccaagg

SEQ ID NO: 914633 - DNA, 120 bp, Artificial Sequence
  ENSG00000251218_2 (sequence is synthesized)
tttcagaacctaggcttttccccctctccttcctgccttaaatggcatttggtttcctactcatgtttcagaatgtttgcttgagctacagccatcatgtccacattcaaaccagtaaga

SEQ ID NO: 914634 - DNA, 120 bp, Artificial Sequence
  ENSG00000251218_3 (sequence is synthesized)
aagaggaagggggaaaggatgtcttctctctttttaaggacatatctcagaagttgtatgtgacactctacttacatcttcttagccaaaacttcctcacaaatcacactagctgcaaag

SEQ ID NO: 914635 - DNA, 120 bp, Artificial Sequence
  ENSG00000251218_4 (sequence is synthesized)
aaatctggaaaatatagtttttatttggggtgtcatatgcccagctaaaaatcaaggttttatgatcaaggcagaagagaatgcacttctgacattactgatttttaatgttacagcaaa

SEQ ID NO: 914636 - DNA, 120 bp, Artificial Sequence
  ENSG00000251218_5 (sequence is synthesized)
cctttcccaactctccagccagaggtttgcaatctaaaacctgcaatgggctaggaaattacaataaaattctgaatttcaaattctgatcacccctctacaggtaagtattatttcttt

SEQ ID NO: 914637 - DNA, 120 bp, Artificial Sequence
  ENSG00000251218_6 (sequence is synthesized)
catttctgtgttcaagaaattgagtctcagagagcttcagtgactttcctgagatctctcggtaactaaatgccccaaccaagatttaaactcaaccctgccaaagcccaggcttctaat

SEQ ID NO: 914638 - DNA, 120 bp, Artificial Sequence
  ENSG00000251218_7 (sequence is synthesized)
gcgtcattctacatcacaggaatcccacatgtgtttgcaggatgagccttgaatcaaccaactactgttgcatactatgcaaccacaaaactctgagacctagacacttattttactacc

SEQ ID NO: 914639 - DNA, 120 bp, Artificial Sequence
  ENSG00000251218_8 (sequence is synthesized)
ccaagccacagctgggtctgagtctgctccatggttctccatcttcctcagacttgtgggcctaccagggtagagccttctcatgccaaaagcagagaagcacatctcactgctgcttgt

SEQ ID NO: 914640 - DNA, 120 bp, Artificial Sequence
  ENSG00000251218_9 (sequence is synthesized)
cgtgggtctgcttccattcccttgactgaaggaagtcacatggccaagacaaaagctaggcagtacagtcctccaggagggagtaaatatttctgaatatgttcttatttaccccaagtc

SEQ ID NO: 914641 - DNA, 120 bp, Artificial Sequence
  ENSG00000251218_10 (sequence is synthesized)
cctatgcagatgcattggaatgggaagagccccagactgagaatcagaagtccctagttctagtcccagacctgccatgaatgacttgtgtggccttggacaaatactagccccttctgg

SEQ ID NO: 914642 - DNA, 120 bp, Artificial Sequence
  ENSG00000251218_11 (sequence is synthesized)
gcctcatgtttgttctagagatctctaaggcatacgcaggctttaacttaagaagctatggcatgaaaaaacaaatagttgcctctcaaaattctaatctcctctgaatgtagcttagtc

SEQ ID NO: 914643 - DNA, 120 bp, Artificial Sequence
  ENSG00000251218_12 (sequence is synthesized)
tttatgcaaaaataaacacacacactagagtgtcttcaaaaccactgggctaataatgttcatgattctgttaatgaccaaactggagcacagtgcagctggtcctgctggtcacaggaa

SEQ ID NO: 914644 - DNA, 120 bp, Artificial Sequence
  ENSG00000251218_13 (sequence is synthesized)
ggccccagaaagaaatgaagccatcaagaagccattgatgctgtgaccttctgttgcaggctgctcctctacttagacagggagaagatggccatctatgaaccaggaagccctcactag

SEQ ID NO: 914645 - DNA, 120 bp, Artificial Sequence
  ENSG00000251218_14 (sequence is synthesized)
accccaagtctgccagcacctcgaacttggattcctcagtcttcacaacagtgtgagctggctcaccgccatgctgtctctgagaagactccatctctcggagaacaatctgccttgttc

SEQ ID NO: 914646 - DNA, 120 bp, Artificial Sequence
  ENSG00000251218_15 (sequence is synthesized)
atggcatgatgcatgaagaaaagcagccgggcaggagagggacaggaaaatctcccatcttcctgcatagctgaggctttccctactcctagggagaaggcactgaagtgaatcccatga

SEQ ID NO: 914647 - DNA, 120 bp, Artificial Sequence
  ENSG00000251218_16 (sequence is synthesized)
acattctcaactgtttccaaaatgttgccaatattcttctgtatattgatattttgaaatccccaatgtagtggtatgttgtatttgagcccagatttaaaattgtatatgtttcattct

SEQ ID NO: 914648 - DNA, 120 bp, Artificial Sequence
  ENSG00000280683_0 (sequence is synthesized)
agcctttgggtcatccctggcttgaaggtggggtttcactggggacccagctcttcccgcccggaaacctcttagcctcccaccgccatcaatataccggctgcggtgcccaggctgtcc

SEQ ID NO: 914649 - DNA, 120 bp, Artificial Sequence
  ENSG00000280683_1 (sequence is synthesized)
acgctaaggggtgcccacaggcccatgccgagccaccctcagccccgcagcctccctcacgttctcgttagtgcccagagtctggagggggctgaggcggctggaggctggtgtgtcagc

SEQ ID NO: 914650 - DNA, 120 bp, Artificial Sequence
  ENSG00000280683_2 (sequence is synthesized)
agccctatatcacgcacatgtctgtctgggtcgcaacagttccccgggctcagccacaactttgcttcacaccaaagcaagccctgggagcagggagaggccagggaacatgagcaagca

SEQ ID NO: 914651 - DNA, 120 bp, Artificial Sequence
  ENSG00000280683_3 (sequence is synthesized)
cttcctagcctgcaaggtcagggtgtttcccaggcccccaagagcacagggctgcccaggtccagagccacagctgggccgctgcaactgcacctgggagcatggtgggagcatggtgct

SEQ ID NO: 914652 - DNA, 120 bp, Artificial Sequence
  ENSG00000280683_4 (sequence is synthesized)
cgcgtcccgccagctctgtaaggtgcagggttcttgcctgtttctggccccggctggttctgtgaagcatgcaggccggactgcacctcccccactgcagctggcgctctcgcagtggcc

SEQ ID NO: 914653 - DNA, 120 bp, Artificial Sequence
  ENSG00000280683_5 (sequence is synthesized)
actccagagggggcaccactgccatcaaaagtttgctgtatcacccaggctggaatgcagtggtgcaattaaagctcaccatggccttgaacgcctgagatcaacagatattcctgactt

SEQ ID NO: 914654 - DNA, 120 bp, Artificial Sequence
  ENSG00000280683_6 (sequence is synthesized)
agcctccccagtaactaggaccacagcaattttattctgctcaagaaccattgctggggaactaatgcagttatttgatgggccaaggcacagctcagcactcttgggctaaatactgta

SEQ ID NO: 914655 - DNA, 120 bp, Artificial Sequence
  ENSG00000280683_7 (sequence is synthesized)
accctggaggattggatcagacccatggctttgttctctggcttcttgaggttaagcatctgctgtggtggaagggccgaggtgttcctgtcttctggcaaaagcactacaacacggggt

SEQ ID NO: 914656 - DNA, 120 bp, Artificial Sequence
  ENSG00000280683_8 (sequence is synthesized)
tgtacattagcagcagcaaggtggtggtggtatccacacatgcacatgccagatatataatttgtaagctataaatgtacttaacaccagagacccaaaatatgtgaagaaaagacacat

SEQ ID NO: 914657 - DNA, 120 bp, Artificial Sequence
  ENSG00000280683_9 (sequence is synthesized)
aattgaagagagaaatagacaattagatataattcaatactccacattcaatagcgaatagaataactaggcagatcaataacaaaatagaatacatgaataacacaacaacagtataac

SEQ ID NO: 914658 - DNA, 120 bp, Artificial Sequence
  ENSG00000280683_10 (sequence is synthesized)
ataatgaaacctactatacacataaagaacactccacacaacaaccgagaatacacattattctcaagtgtatgtggaactttctccaggatatactgtatgataggttataaaacatac

SEQ ID NO: 914659 - DNA, 120 bp, Artificial Sequence
  ENSG00000280683_11 (sequence is synthesized)
ctcaagggttttttttaatgatataatacaaaatgctttctcagactacaatgaaagaaagttagaaagtgataataggagaaaattttggaaattcacaattatgtggaaatttataag

SEQ ID NO: 914660 - DNA, 120 bp, Artificial Sequence
  ENSG00000280683_12 (sequence is synthesized)
ataattggtcaaagaggaagtcacaatggaagtcagaaaacaccttgggaaaaatgaataccgaatcacaacacactaaaatttgggggatgcagctaaagcagtgcttagagggaaatg

SEQ ID NO: 914661 - DNA, 120 bp, Artificial Sequence
  ENSG00000280683_13 (sequence is synthesized)
tatttgtatctggctatcttaaaggaaataaatatttcaaatcaacactataagttttcaccttataaaattagaaaaagtagagctaaccacatccaaaataaatgaaaggaaatagtg

SEQ ID NO: 914662 - DNA, 120 bp, Artificial Sequence
  ENSG00000280683_14 (sequence is synthesized)
tacattagaacaaaaaatgaaataaagaatagaaaattcaataaagttatcaataaaaccaaaagttacttcttagaaaatataaacctttaattgactgatagagagaaaaacacacat

SEQ ID NO: 914663 - DNA, 120 bp, Artificial Sequence
  ENSG00000280683_15 (sequence is synthesized)
atttgaacaaatagtataacttgattgcagatatatgtatcgctgtatctttggtggtaagttgaggcagtatatgtctgatcactctggatatctgtgtaaaataaaatgctaggtgga

SEQ ID NO: 914664 - DNA, 120 bp, Artificial Sequence
  ENSG00000258292_0 (sequence is synthesized)
tgcacttgctaaaacattctcctctctgggtctggaagcctagagtctatatccatatgaggcactgggcaggtattccagacttctgagtcatggatgaaaaatgccatcttgcaactg

SEQ ID NO: 914665 - DNA, 120 bp, Artificial Sequence
  ENSG00000258292_1 (sequence is synthesized)
tccttagtttcttatgttgaggaaaagtgatgaattaattacaaatttctgcaaatggaagttcattcatttatttggccaccaaatattttttgagtttggagatcaaagcagtagagt

SEQ ID NO: 914666 - DNA, 120 bp, Artificial Sequence
  ENSG00000258292_2 (sequence is synthesized)
ctcaactctgaagtcagacagacctgggtggaatcctggccataccattttcaagctatgtaacctcgaagaaattctgtaatctctctaaacctcaataaaatgaaaatgttcacagtg

SEQ ID NO: 914667 - DNA, 120 bp, Artificial Sequence
  ENSG00000247345_0 (sequence is synthesized)
cgggcgccactcgctttgaagtgcagacgaggaggcgcgggcgcgagcgtgtgtgtctgtggggctgctgtgggactgtctgtgctaggagagcggcggaaaacccggcgtggagcgcct

SEQ ID NO: 914668 - DNA, 120 bp, Artificial Sequence
  ENSG00000247345_1 (sequence is synthesized)
cggaaaacccggcgtggagcgcctgcagtccgccgtccggggtcgcgcccgccgcggggctcaggagggaccggcacgcaggcgcgcacggccgcgcacctgtctcgctagaaccccgcg

SEQ ID NO: 914669 - DNA, 120 bp, Artificial Sequence
  ENSG00000247345_2 (sequence is synthesized)
aggttgcccagaccgctggagcctctgcgactccacgaccggctgcttcctgcgaagtttcacaaacaagatttgattgaaaatggcccatggagtacaaccacctgggaacatatcctc

SEQ ID NO: 914670 - DNA, 120 bp, Artificial Sequence
  ENSG00000247345_3 (sequence is synthesized)
agttgaggcttattgcctaaaccacaggctactgaaaacttggccaaaggcgactactctagactggtgacttcaaaagtgctgatgaatacagtgaaccatgaaagatgcattatttgt

SEQ ID NO: 914671 - DNA, 120 bp, Artificial Sequence
  ENSG00000247345_4 (sequence is synthesized)
tttgaacattttactatgattgatgacccagatttggcaagttagttcactcccagtggagatgaaagtttcactgccttctttctttcaacattcttgttgagacagatttcactttta

SEQ ID NO: 914672 - DNA, 120 bp, Artificial Sequence
  ENSG00000247345_5 (sequence is synthesized)
ttggccaatgtactaacaaatcacttgcatttgcagcataatgaattcattagcaacactgtggatcaatgctatacataatattcctgagtcaacattaactcttaattaaacttcctt

SEQ ID NO: 914673 - DNA, 120 bp, Artificial Sequence
  ENSG00000282199_0 (sequence is synthesized)
ctgagctagaacctactcaggattcattggtgcagtctgaaagttacatccaagataaggctttaactgcaccagaggaacagaaggcctccacaagcaccaacatatgtgagctctgta

SEQ ID NO: 914674 - DNA, 120 bp, Artificial Sequence
  ENSG00000282199_1 (sequence is synthesized)
cctgcggagatgagatgttgtcatgtattgatctcaacccagagcagaggctccgccaagtgcctgtgccagagcccaacacccacaatggcaccttcaccatcttgaacatggatggag

SEQ ID NO: 914675 - DNA, 120 bp, Artificial Sequence
  ENSG00000282199_2 (sequence is synthesized)
ctggaggccattatcctcagcagaaaaccacatacagcatgttctcacggagacatcggacatcaataatatatgcgacatgtacagtggtttgatctggaaaggctggacaactggaat

SEQ ID NO: 914676 - DNA, 120 bp, Artificial Sequence
  ENSG00000282199_3 (sequence is synthesized)
tggggaagtggacgacttccagacgcaaaaaccaaggccaaacagctgagttttctgccctggaggaggaaagtggtctctgaaagccagaagactctcacattacataattcctgccag

SEQ ID NO: 914677 - DNA, 120 bp, Artificial Sequence
  ENSG00000282199_4 (sequence is synthesized)
ctgctgtcaagagctgctaagctgtcctcaagtcctgtgtctgatgtcaagctaataacagatttagggtgcattagtaaaggtatcttaatcaagtctagatgccttcgagattagact

SEQ ID NO: 914678 - DNA, 120 bp, Artificial Sequence
  ENSG00000282199_5 (sequence is synthesized)
cagccatgatgagcagctaaggattagcaagaaagattacaaattgtttccaggaatttatttctttcaacactgattatatgtatagtcttaagtcaaattaaaatgttgtttatgttc

SEQ ID NO: 914679 - DNA, 120 bp, Artificial Sequence
  ENSG00000282199_6 (sequence is synthesized)
ttctgcttcattccatggccagagcaagccacgtgggcaagcccgaaaccagggggcgggaaagtaccctccacccacaaggaaaccatggcaagcggtggttgcagacgcaaaaaccaa

SEQ ID NO: 914680 - DNA, 120 bp, Artificial Sequence
  ENSG00000286688_0 (sequence is synthesized)
tcaagcaccaggagctccttgttctcggtgcccagcaccaggcaagacacagcatcctcgtcagccaggttcttcttcaaggtggtcatggtggtgatgactgtctacagaaggactcca

SEQ ID NO: 914681 - DNA, 120 bp, Artificial Sequence
  ENSG00000286688_1 (sequence is synthesized)
ggggtcacccagggaacctccacacaccacccccaagatactcccagaatgccacatgagggaagaaagagggcaaaggaggatgaagaggaaatatcagagatgtgacagaagatttaa

SEQ ID NO: 914682 - DNA, 120 bp, Artificial Sequence
  ENSG00000286688_2 (sequence is synthesized)
gtacaaagggaaataaaaagagaagggggtattacctgccgcttgatggagttggacttgtgttggtttacaaatgcctccatttcacttagctccagctgcagaaacctagacacacag

SEQ ID NO: 914683 - DNA, 120 bp, Artificial Sequence
  ENSG00000286688_3 (sequence is synthesized)
agaactggcatctgcaggccccggcctcgctgccctcctccatcattctggcacattctggcggctgcttcctctccctggagcctcccaaaccctggccctccacagggtccttacctg

SEQ ID NO: 914684 - DNA, 120 bp, Artificial Sequence
  ENSG00000286688_4 (sequence is synthesized)
agtgactggatggacaaaggctcctctgccgtctccctgcaaggaaaggggccagcatggcagccgaatggaagaatggggccctggggctcagatgggatgaaggagtgaggggggtat

SEQ ID NO: 914685 - DNA, 120 bp, Artificial Sequence
  ENSG00000286688_5 (sequence is synthesized)
gaaggggaaggcagcctctcaccggatgctctccagcatctccttcagggttaaggggtcgattcggtcctgtgacaatgtgggaagagagcctgtgagctcaagccaggcaggaaaccc

SEQ ID NO: 914686 - DNA, 120 bp, Artificial Sequence
  ENSG00000286688_6 (sequence is synthesized)
aatgtctacacccccagacagctccacacttctaggggtacctcttggtctctgcctccctgccagcctacctctgcactgagcaccaagctcacgtcctttatctgaatccagtctcat

SEQ ID NO: 914687 - DNA, 120 bp, Artificial Sequence
  ENSG00000286688_7 (sequence is synthesized)
ggtttcatcttcctcaaatttgggcagggatgtggctagtgcagagaaattttctgggttccactctccaagagaactggctcagtgcctctctgggagccatgctgagtagccaagcac

SEQ ID NO: 914688 - DNA, 70 bp, Artificial Sequence
  ENSG00000286688_8 (sequence is synthesized)
ctcagtgcctctctgggagccatgctgagtagccaagcacaacaccttgtccagaagtgccatcactagg

SEQ ID NO: 914689 - DNA, 120 bp, Artificial Sequence
  ENSG00000286688_9 (sequence is synthesized)
gccaacatagtaaaaccttgtctctactaacacatacaaaaaattcgccaggcgtggttgctggtgcctgcaatcccagctactcaggaggatgagacagaagaattgctttaacccggg

SEQ ID NO: 914690 - DNA, 72 bp, Artificial Sequence
  ENSG00000286688_10 (sequence is synthesized)
gccatcactgctgctgtcagagatggactatagctgacctcctgccaccagcccacgttcttcccaggagcc

SEQ ID NO: 914691 - DNA, 120 bp, Artificial Sequence
  ENSG00000286688_11 (sequence is synthesized)
gctgacctcctgccaccagcccacgttcttcccaggagcccagccctcttcacccagtggctgccatctttgccttctggttcccaactcccatgttatttatttacctctttggcctgg

SEQ ID NO: 914692 - DNA, 120 bp, Artificial Sequence
  ENSG00000286688_12 (sequence is synthesized)
ttccaaaggtcttgttccagaggatttggaggcaattggggcaggctgaacttgaagtagggtctgagattcttatacacatagacacaagggcctgaagcaagtgccagagctggggtc

SEQ ID NO: 914693 - DNA, 120 bp, Artificial Sequence
  ENSG00000286688_13 (sequence is synthesized)
cggggctcatgttgctccatgaggaaggtggcagcagcagctggcagagcaggtagcgggctttcggtcatcaccagtggtcctttgagcaccttcaggcggggctgctgcccaccaggg

SEQ ID NO: 914694 - DNA, 120 bp, Artificial Sequence
  ENSG00000286688_14 (sequence is synthesized)
ccaaggtcccctaccaccagctgcagggagaggatggctcattctaggctcagggtctgaagacctctccactgaccctcttcttgccttattgctggtgcacattcattcattcctgca

SEQ ID NO: 914695 - DNA, 120 bp, Artificial Sequence
  ENSG00000286689_0 (sequence is synthesized)
gagttggtttcctgggcctatgtgctctcagagtcctttccttttcttagcttgcccagtggtgctgacacctgcaggctgcatctctcaaactccccatcagttggtttctggcaggtt

SEQ ID NO: 914696 - DNA, 120 bp, Artificial Sequence
  ENSG00000286689_1 (sequence is synthesized)
tgaccaggagaaaccactgatcagacataagcaggaggaaaccagagaaaccagagtatttccatccttcctcttcgccttgggcaggaactccattagcagcttgtcttctcccttgtt

SEQ ID NO: 914697 - DNA, 120 bp, Artificial Sequence
  ENSG00000286689_2 (sequence is synthesized)
ctaactctcctatgcaggctcactgtggttccagctcccataaaggaatctctcagtccctggctctggccacaccactgtggtagatgtgaggtactcaggtcctctttaaggaaggac

SEQ ID NO: 914698 - DNA, 120 bp, Artificial Sequence
  ENSG00000286689_3 (sequence is synthesized)
ttgctgcccaacggcaggtgctgcagccagcatccagctgtcagcccctacagggtcagccttacttgcagagaaccaccttgctcgaggtcatgcccttcctgaagcagctggcatccg

SEQ ID NO: 914699 - DNA, 120 bp, Artificial Sequence
  ENSG00000286689_4 (sequence is synthesized)
cagtatatttctaagtgcttctgagagcccggcctgcaacaccacttctcccctctgcctccagcctagagatgggaatggcttcctgctggtgctaatctctaggtggcctcaccatgt

SEQ ID NO: 914700 - DNA, 120 bp, Artificial Sequence
  ENSG00000286689_5 (sequence is synthesized)
caccatgtcccatttggacactctgctcttgcatcatccatgtaatcaattaactgcattaaatccccatctctttaaataaagtaggttctgacacagccaacattatactgaatgggg

SEQ ID NO: 914701 - DNA, 63 bp, Artificial Sequence
  ENSG00000286689_6 (sequence is synthesized)
attatactgaatggggaaaagttgaaagcgttcctcctgagaactggaacaagacaaggatgt

SEQ ID NO: 914702 - DNA, 89 bp, Artificial Sequence
  ENSG00000286689_7 (sequence is synthesized)
gaacttatccaaaaagctcctagaactgattaatgaattcagtaaagtttcaggatacagaattaatgtacacaagtcagtagcactgc

SEQ ID NO: 914703 - DNA, 120 bp, Artificial Sequence
  ENSG00000286689_8 (sequence is synthesized)
caaaaagctcctagaactgattaatgaattcagtaaagtttcaggatacagaattaatgtacacaagtcagtagcactgctgtacaccaacagtaaccaagctgagaatcaaatcaagaa

SEQ ID NO: 914704 - DNA, 120 bp, Artificial Sequence
  ENSG00000286680_0 (sequence is synthesized)
agtctttctgaagctggaggtttgtcataattgacggctttatatgcagccttctgaagccctttaactaggcaagagatcatgtagtcccgcctggctatgcctgggtcccagggcctg

SEQ ID NO: 914705 - DNA, 120 bp, Artificial Sequence
  ENSG00000286680_1 (sequence is synthesized)
gcttcaaaatggtgagaagataatgagaaaaggaaagaatctatggataagaagtaaggagaaaatcgttgacaattgtcaaaatcttgcctcattacttctccaggaatgatgtctatc

SEQ ID NO: 914706 - DNA, 120 bp, Artificial Sequence
  ENSG00000286680_2 (sequence is synthesized)
ctgccatgttgaaaggaatacaacccaacatggagtagaaacaagaaatcaagatatacactctaggacaaggagcaataagaatttgacttaaaatggttatttagcatgtattagagt

SEQ ID NO: 914707 - DNA, 120 bp, Artificial Sequence
  ENSG00000286680_3 (sequence is synthesized)
tgcaactggattttatgtagttatgagggaaccctgaaaaaagtaccattgaacagaaatgagatttggtttcagaacttcagcccaaatgctattaaatcttttgcatttcttgaacta

SEQ ID NO: 914708 - DNA, 120 bp, Artificial Sequence
  ENSG00000231826_0 (sequence is synthesized)
agtggagaccagggacaagaagacagttctgtgggaagagccaggaggaccatttgggaaaatacaggttccaggtgtgtctccagaccttgagagttggtgtctcctgggaagaggccc

SEQ ID NO: 914709 - DNA, 120 bp, Artificial Sequence
  ENSG00000231826_1 (sequence is synthesized)
tgatgagatctggggagattcggatctgatgagattcaggaagccctggcctctccgtacttgaggagacgggacacacaggacaagctgcaggctggtgagcaggttcaccttctattt

SEQ ID NO: 914710 - DNA, 120 bp, Artificial Sequence
  ENSG00000231826_2 (sequence is synthesized)
tgaagacccgcttcttcctcaggtacctgatcttgaaaacgacctcccctttcagttctggaggccagaagcccaaaatcagtctcgctgggctaacgtgaaggtgtcagtcgggctggt

SEQ ID NO: 914711 - DNA, 120 bp, Artificial Sequence
  ENSG00000231826_3 (sequence is synthesized)
tccttctggaggctccagaaaagaatctgttttcttgccttttctggctcagtttctcggcttgtggctccttcctccatcttcaaagagcaccactccaatctgctcctccatcaggtc

SEQ ID NO: 914712 - DNA, 120 bp, Artificial Sequence
  ENSG00000231826_4 (sequence is synthesized)
accttctgcctgactcctacatccctttcagaaggacccttgtgattccatgaggtccacccagatcacgcaggataatgtccccgtctcaagaggcttaatctaatcacaggtcttgct

SEQ ID NO: 914713 - DNA, 120 bp, Artificial Sequence
  ENSG00000231826_5 (sequence is synthesized)
tcccctcaacccagacaccgactcgcccaagggtcttccagctggctgagttggaacctgcattttttaaccacaaggaaaagaagcccagagctaccaagaataatattttattgactt

SEQ ID NO: 914714 - DNA, 120 bp, Artificial Sequence
  ENSG00000231826_6 (sequence is synthesized)
tgcccagtgaaaaccatttcctcctcgtcgtggcgcaggtccagaggctgcgcccatctctcccacgtcaacagtcctgtgtccttggcgaaggactgttctctcattcagtgcctttcc

SEQ ID NO: 914715 - DNA, 120 bp, Artificial Sequence
  ENSG00000231826_7 (sequence is synthesized)
tctcttcctgggccaaatccctgctttgcgtctccctgcagctcataaaaagctgaattacctgaggcagggaaagccccacccactgtcattctcagggaggagtggagtctgcagagg

SEQ ID NO: 914716 - DNA, 120 bp, Artificial Sequence
  ENSG00000231826_8 (sequence is synthesized)
ccgcaatgcacagcttccctatccccctccacccgtgttttcccagagcagctctgttccaggcccgggggtgtccctgggccgagatggaatccagccctgaccacctcccaaagccaa

SEQ ID NO: 914717 - DNA, 120 bp, Artificial Sequence
  ENSG00000231826_9 (sequence is synthesized)
cagccctgagtgagcgtgcagagaagcaagagctgttcctgatgcagagcaaagacatctcccagtcaagggggatgaactgatttgggacaaaaggcagttgttggctgaggaaggcag

SEQ ID NO: 914718 - DNA, 120 bp, Artificial Sequence
  ENSG00000231826_10 (sequence is synthesized)
gatctgggggagccctgtgctgagtggaggtgggtgggtgtatttccttggctcacagaggcctcttgtctggtgggatcagctcctccagccagttgccacctggtccagctttgggag

SEQ ID NO: 914719 - DNA, 120 bp, Artificial Sequence
  ENSG00000231826_11 (sequence is synthesized)
atgtggagaatgactttcgcagtgatttccactgggccatggcattgaaacagctgcaggaggggacacagctggtgccacccctactccgtccattagagctgctgtgaaggaatgcca

SEQ ID NO: 914720 - DNA, 120 bp, Artificial Sequence
  ENSG00000231826_12 (sequence is synthesized)
ccctccccatggggagtgagggggccctacttgctgtggttggttccagggaccatgggaagaggcaaacccctattttcaagggcacaagttggcttttattaaaataaaatttcatca

SEQ ID NO: 914721 - DNA, 120 bp, Artificial Sequence
  ENSG00000231826_13 (sequence is synthesized)
ggccagagaggctgtgagggtggctttgtgaggatggctttgtgtggctgcacattgcccttggccaagccccgctgccaggagaggcagctcggctgccaaacctcctgaacccaagtt

SEQ ID NO: 914722 - DNA, 120 bp, Artificial Sequence
  ENSG00000231826_14 (sequence is synthesized)
acctcccctttcaggccggcgtgcagcagggcaatcgtggttcactgcaacctcgacctcccagggtcaagtgatcctccagcctcagccccacaagtagctgggaccacagacggttga

SEQ ID NO: 914723 - DNA, 120 bp, Artificial Sequence
  ENSG00000231826_15 (sequence is synthesized)
gcccatagaacaggagtgagaagatggaagggcgagggggctgggatgatgaaaacttgcgcctgcagccaccattcattacagagcgccgggggccagctgcagaactgtagactcctc

SEQ ID NO: 914724 - DNA, 80 bp, Artificial Sequence
  ENSG00000231826_16 (sequence is synthesized)
acagagcgccgggggccagctgcagaactgtagactcctcatacatcatcgtgttgagtcttcaaaacaaacctatttcc

SEQ ID NO: 914725 - DNA, 120 bp, Artificial Sequence
  ENSG00000231826_17 (sequence is synthesized)
aaacgctattattgccttcctctgcaaggaaaggttattttggtgagcagtggatagaggaaatgcagagggagccactaaagggttctggtgagatctggagccctgctgggataatct

SEQ ID NO: 914726 - DNA, 120 bp, Artificial Sequence
  ENSG00000231826_18 (sequence is synthesized)
gaccagagaaagcaaagattccagagagctaggcacacttgccctacctccagctgcacacagctggttccagctttgtcctgaccttcagtctggcatacagggtagacccactggtac

SEQ ID NO: 914727 - DNA, 120 bp, Artificial Sequence
  ENSG00000231826_19 (sequence is synthesized)
ctggtacctcactctgggggtgaggtggccacccacctaggtctgggtcctgtagcagtttggcagcaacatctgggtgataagagaaggcgatttgacctactcccagggacaagaagc

SEQ ID NO: 914728 - DNA, 120 bp, Artificial Sequence
  ENSG00000231826_20 (sequence is synthesized)
tttgactcttcaagatcataaagtcttccctcctggccttgggtcctcctgttgcgggagaggtgaggtggggtgagggtcctccgggagggcaggcttggcagagcccagcaccatctc

SEQ ID NO: 914729 - DNA, 120 bp, Artificial Sequence
  ENSG00000231826_21 (sequence is synthesized)
agcagacactgctcttctcctactctcagcacctccaaggcagtgagtggctttctcttgtctagaggacaaaatccgttcctcacctggacacaatgaacctgtctgtgggatttaggg

SEQ ID NO: 914730 - DNA, 120 bp, Artificial Sequence
  ENSG00000231826_22 (sequence is synthesized)
agcatcaaggagggaatttagtttccgcagacttcaaggaagactttctggaggaggtgatgcctgagagctatccaggagagaagagtgaaaaaatgttaagcagtggaaaaacatgaa

SEQ ID NO: 914731 - DNA, 120 bp, Artificial Sequence
  ENSG00000231826_23 (sequence is synthesized)
ccaaactgtggctgcatcttcccatagggcaacagggacttagcgcgtgcaatcaaggatctccagatggggataacccaggtgtgcccaacctaatctcagtgtccttggaagagggat

SEQ ID NO: 914732 - DNA, 120 bp, Artificial Sequence
  ENSG00000231826_24 (sequence is synthesized)
gcagaaggagtcagaatcagagaagaaggtgacacgatgaaggaatccgaaattagagtgatgctctttgaagatggaggaagggaccacaagctgagaaatagaggtggccactagaca

SEQ ID NO: 914733 - DNA, 120 bp, Artificial Sequence
  ENSG00000231826_25 (sequence is synthesized)
ctgaaaaaggcaaggaagtggattctcccctggagcctccagaaggaaccagctctgccgacaccttgacattagcccattgagactgatttaagggctgctggcctccagaattgtaag

SEQ ID NO: 914734 - DNA, 120 bp, Artificial Sequence
  ENSG00000231826_26 (sequence is synthesized)
ggccctggtctcagcatcttcggagaggccccagattgataagtgtcttgttctgagtcatggctcaaagtccccatgacagacaggaatccctatcagcatgacccggtgtgctgttac

SEQ ID NO: 914735 - DNA, 120 bp, Artificial Sequence
  ENSG00000231826_27 (sequence is synthesized)
cagagccttctagaggaagtgttctccgagctgagggcggctctttgattctccaggccacaaacccccgcagcccggcctggccagaggcgtgcctgtgcatcccggcaagtgagcgcc

SEQ ID NO: 914736 - DNA, 120 bp, Artificial Sequence
  ENSG00000231826_28 (sequence is synthesized)
tgaggattcaccaggagactggcccgagaaaggagacacggattggacaggctcagccagtggaagaccgtcctgcctggagggaagtggcttttaggagttttttcctgagcctgttgt

SEQ ID NO: 914737 - DNA, 120 bp, Artificial Sequence
  ENSG00000286682_0 (sequence is synthesized)
gggactctgcagctcgattctcctgcggctctacagcaggtccccaaggcgctggcgctggggggcgggggccggggaccgtgaacccgcctggaacgcagccggtgccactccagggaa

SEQ ID NO: 914738 - DNA, 120 bp, Artificial Sequence
  ENSG00000286682_1 (sequence is synthesized)
caggcaagccaagaggacaagcaatcagctctgttctacaacactgtctctggagtggagaggaggacgtcctgcccctggggctgtgacatatgccactcagaccatccaactcccttt

SEQ ID NO: 914739 - DNA, 120 bp, Artificial Sequence
  ENSG00000286682_2 (sequence is synthesized)
ggctctgacgtcatgctcaccaagcaaactttggattgtcatttgatttcccatatagactctgctgcagcacagagaatatactgaccagttaatagcagtcaatacccctgagttcac

SEQ ID NO: 914740 - DNA, 120 bp, Artificial Sequence
  ENSG00000286682_3 (sequence is synthesized)
ttaccagtcagtaacctgaagacaccaaatttccagactgccaaagctgacatctagactctaggctgtcaactcacccatgtgtcatgactgataaaaagacctctctttagattcttc

SEQ ID NO: 914741 - DNA, 120 bp, Artificial Sequence
  ENSG00000286682_4 (sequence is synthesized)
tttacttgtaatacttttctttactagtagtgacagaagcttgtttgcttgcaaaaggaacattcaatttcacctcttttagatctattacgaggaaaatctaactctgtttttaaaata

SEQ ID NO: 914742 - DNA, 120 bp, Artificial Sequence
  ENSG00000286682_5 (sequence is synthesized)
gtttacattggagaggaaagtcaggactgccaacttttatagcaaacagataattacatgagcactaaaacacaatactctaaaagcagcgatggcccaagcctagtattatgttgattg

SEQ ID NO: 914743 - DNA, 120 bp, Artificial Sequence
  ENSG00000286682_6 (sequence is synthesized)
tgtgactcacagttttttatttcatgtctggaatattgttttacaaacgtgaaagatgtcatctaaagtcaacttacagagaactcaagccagcatggactttgcctgagaatctcagga

SEQ ID NO: 914744 - DNA, 120 bp, Artificial Sequence
  ENSG00000286682_7 (sequence is synthesized)
gccaggccaatttaccattattctttactaatcaagctttaccaatcaaataatagtgaattcacatttgggcaaattatacactgccacagtctacaatggttatgacttatgctgaat

SEQ ID NO: 914745 - DNA, 120 bp, Artificial Sequence
  ENSG00000286682_8 (sequence is synthesized)
ttaggggaaggaaggcttaatgaacacttcacattggatgagataatgttatttggattgctaaagaaaatgaaggctttgaggaaatgccccgaatgtcacagagctaataacctgagg

SEQ ID NO: 914746 - DNA, 120 bp, Artificial Sequence
  ENSG00000286682_9 (sequence is synthesized)
acatcccccacagatgtgagctcccaggctgaaacaaaaaaaagtatggaccattcggcataccctgcatcttcaggcctacatgctgggaatgaggtttccttgagagcgaacttttcc

SEQ ID NO: 914747 - DNA, 120 bp, Artificial Sequence
  ENSG00000286682_10 (sequence is synthesized)
tttaatgggagaagggggaagaagtcagtaagaaaagaaagcccaacacaaggaataaaaactatgtcccaaggggcttccagaaggggaagtgggtctgagacctgtgatttcctaatg

SEQ ID NO: 914748 - DNA, 120 bp, Artificial Sequence
  ENSG00000286683_0 (sequence is synthesized)
ggagaaaccggagccttggaggagttgtcgactgctgctcggttatgcagccagtgggtggcaaagccccctgttcacgcccaggcctggcacctgcaaaggccagacagcggtgtcaac

SEQ ID NO: 914749 - DNA, 120 bp, Artificial Sequence
  ENSG00000286683_1 (sequence is synthesized)
actgctggcagatttaaaatcaccgtcgcaatactgaagctgggtcagggagctgagccacactctgaggaagcctgactctcactatggactggtggcagcttccccaaagtctgggtt

SEQ ID NO: 914750 - DNA, 120 bp, Artificial Sequence
  ENSG00000286683_2 (sequence is synthesized)
cagttcccaggaggaagtggcttctgaagagcacatttggatgcgggagagtgacagcgggaggggcaccccacaggaaggaagccccttgacagagggctggcagattaacgcagcaca

SEQ ID NO: 914751 - DNA, 120 bp, Artificial Sequence
  ENSG00000286683_3 (sequence is synthesized)
actacaccgatgctagcattcacaagggaatagagcaccatgactggcttagacgaatgacaatcccagccaataaaacttgacgaggcgtctgctgggagctgctgggaaggttttcct

SEQ ID NO: 914752 - DNA, 120 bp, Artificial Sequence
  ENSG00000286683_4 (sequence is synthesized)
cacccttacaaagggacatgaagaagaaacacctcctcctcaggccaacattgtgtgatgcctggagctggggcagcaattttgcaacctcgagggaaatgactgccacggtgagaatgg

SEQ ID NO: 914753 - DNA, 120 bp, Artificial Sequence
  ENSG00000286683_5 (sequence is synthesized)
caaggctgaaagaaagaacccaggttattggtgacaatgctgagcttctggattcaccaccctggacatgcccttcccctgatatttttgtggcctataaagatgaaagccctcattgtt

SEQ ID NO: 914754 - DNA, 120 bp, Artificial Sequence
  ENSG00000286684_0 (sequence is synthesized)
cgcgctccctccgcgttaactcatcgccctgtcgcgcccgcttctccagcgggttcggcggtcgggggaggacagtgatcgagttcgaagttcggagggtctctgcgtctctggggtttc

SEQ ID NO: 914755 - DNA, 120 bp, Artificial Sequence
  ENSG00000286684_1 (sequence is synthesized)
tatcactgctccttccagccctcaagcggctactccgaagaatgacgaagggccctacttgcgtagattcgtgggatgattttaccaagaaggaaaagggggaaaagaaatcacaattat

SEQ ID NO: 914756 - DNA, 120 bp, Artificial Sequence
  ENSG00000286684_2 (sequence is synthesized)
tgagggtccagccttggtcagattccgtgtcagacccttccaacttgacattattgactcttcacaactcttcattttgtagtccaggaagcaggctccgagagactgcctagaaaaaac

SEQ ID NO: 914757 - DNA, 120 bp, Artificial Sequence
  ENSG00000286684_3 (sequence is synthesized)
gaagccaatcccagctttcccaagcttacaggttttttccagaagaagccaacttgatctcccggaacacgaattcagcaggctctcatctcagaactgcctccaatccatcccataccc

SEQ ID NO: 914758 - DNA, 120 bp, Artificial Sequence
  ENSG00000286684_4 (sequence is synthesized)
cttcacacttcagtccttggtattttctccgatcacaccttccactcctccttcatatttgcaagtctctccctgcagaatctgccccgaggagcaaaggacatttttccatggggaaca

SEQ ID NO: 914759 - DNA, 120 bp, Artificial Sequence
  ENSG00000286684_5 (sequence is synthesized)
gaattttagaatttccctttgtacccagtgagaaagactaaagtttggtataggaaataacccaaagacaaatctatacactgcatagaacacaggaagcctgggctctgaaaacataaa

SEQ ID NO: 914760 - DNA, 120 bp, Artificial Sequence
  ENSG00000286684_6 (sequence is synthesized)
agacaccaaatcattcctggagcacttgtgaagttttggaaaattcctttaacctctctaaacctcagtctcctcatttgtaaaatgaacataataaatattttttcttgcctatgtcaa

SEQ ID NO: 914761 - DNA, 120 bp, Artificial Sequence
  ENSG00000286685_0 (sequence is synthesized)
agaggcgacgctggcagccgtctcttaggagatttctccgcagtgtggacgggggtcaggatttgcaggcgagcaagggcagagaggagaaatcgtacagaaaaatttttggtttgtttt

SEQ ID NO: 914762 - DNA, 120 bp, Artificial Sequence
  ENSG00000286685_1 (sequence is synthesized)
tgtatttacgcatggaggaactgaagcttggcgagaacaagagtgaattttggcccaaggtcacacagatggtaagtggcacatcaggggttagaacccagtctggctgtcaataaaact

SEQ ID NO: 914763 - DNA, 120 bp, Artificial Sequence
  ENSG00000286685_2 (sequence is synthesized)
gtacccacccaggtgcttctccaagggctgaaaatctgcctcatttgtctaacaggctgcccaagtccccttagatcatgagagggacaagtgaccaggcaaaacaagggggaggttttg

SEQ ID NO: 914764 - DNA, 120 bp, Artificial Sequence
  ENSG00000286685_3 (sequence is synthesized)
tttcctctagaggggaagaaaacatgtagcccctatctagagaaaaatcctctccatggtttccccaaacacattccaccaaagagaacttcgtctttaataatgttcccattttgctcc

SEQ ID NO: 914765 - DNA, 120 bp, Artificial Sequence
  ENSG00000286685_4 (sequence is synthesized)
cattttggtccagcatgtaagaaagtctctatgaatggtattttgagtggcgggcagagaagcaagtagggcagggagtattatcttagggtaggataacttgaaagatatgagattgct

SEQ ID NO: 914766 - DNA, 120 bp, Artificial Sequence
  ENSG00000286685_5 (sequence is synthesized)
tttactatcatattagcttccctgcccatcatcagagtcaattctgctagccttgctctctagcaaggagcctctccattccccatcaatccatgcatttctttcccaaggctgaaccat

SEQ ID NO: 914767 - DNA, 120 bp, Artificial Sequence
  ENSG00000286685_6 (sequence is synthesized)
atctggaaaacagccatgttccatatagttcctgggaaggctaggcctcaacaccacacatcttggatcagatcagtacctccctattggtgcaactgttggggaataggagtttttatt

SEQ ID NO: 914768 - DNA, 120 bp, Artificial Sequence
  ENSG00000286685_7 (sequence is synthesized)
ctattaaagttttggagacactcatggagcaggaattttgaataggcagaaaacattattataatagtagctactgttaatactactggatatctggcattattccaggtgaattaaatg

SEQ ID NO: 914769 - DNA, 120 bp, Artificial Sequence
  ENSG00000286685_8 (sequence is synthesized)
tatttattcttataattcagtcctttcaacaattataaaaatatatgttattgtcctcatttttatatataggaggaaactgagtctcagagggtttaaggttgtatttgctgaaggtct

SEQ ID NO: 914770 - DNA, 120 bp, Artificial Sequence
  ENSG00000286685_9 (sequence is synthesized)
tattttcctctctcacgccacacagggttagggtcaggcttcccaattgtcaaattgcacctcatgtttctctgccatccgccacacaggggttctgtctgatggtccaagatggctgca

SEQ ID NO: 914771 - DNA, 120 bp, Artificial Sequence
  ENSG00000286685_10 (sequence is synthesized)
gtgggtcaccacctactctctagtaggaggaaacaaagggagaagagaatttccacttctcttaaggacacttcttggaagtgacaaacactacttctacttgcaaccatcgatccgagc

SEQ ID NO: 914772 - DNA, 120 bp, Artificial Sequence
  ENSG00000286685_11 (sequence is synthesized)
tatatctcaaagacttgcccagctgcaagagagactgataaacataatctattctgggtggctacgtgtccagctaaattcaggatttatgtttttgaggaagaaggggaaaagggatgt

SEQ ID NO: 914773 - DNA, 120 bp, Artificial Sequence
  ENSG00000286685_12 (sequence is synthesized)
tgaaagacaattagcagtctggcacagaagggatgtggactcagggctatgtggtccagagactagaacctttccgtcatctcacactgcttcttgagcaccttggcagccaaggagagg

SEQ ID NO: 914774 - DNA, 120 bp, Artificial Sequence
  ENSG00000286685_13 (sequence is synthesized)
aggcagagtgccaaagatagtttttctgtgtgtcctgaggtggcctgagggcctctgaaagtcagcctctgagacacatgctataggctgtcttagatatttcctcgattttttgctccc

SEQ ID NO: 914775 - DNA, 120 bp, Artificial Sequence
  ENSG00000286685_14 (sequence is synthesized)
ccagcattttgaatacgtttatatattcatccatatgttatcattgtttattttcagttttcctgaatcaaacattggcaaattggtaacattcattacatgaatgactgaattgatgaa

SEQ ID NO: 914776 - DNA, 120 bp, Artificial Sequence
  ENSG00000286685_15 (sequence is synthesized)
acggccaattttgtttttttttatctctagcataatgtctagcattttacaggtattcaacaaatatatgtttattgaatggatgcctggagagccaacaactttcctaattcaattttt

SEQ ID NO: 914777 - DNA, 120 bp, Artificial Sequence
  ENSG00000286685_16 (sequence is synthesized)
tttctaattttgagtaagcacagcctactttctcagcatatccttttctcttccaggatgggagaagagagaaaacagaaaagacaatagaaaaagaaaaaatgggacaaggtatattta

SEQ ID NO: 914778 - DNA, 120 bp, Artificial Sequence
  ENSG00000286685_17 (sequence is synthesized)
ttatacaagttctctcatcccttactttcttctctccatttatttttgataccacaatcatgaattttcctatccaaatggacttccataatactctttgaggaatggcctaagaatgct

SEQ ID NO: 914779 - DNA, 120 bp, Artificial Sequence
  ENSG00000286686_0 (sequence is synthesized)
acacagacacgaggctgaagaggaaggaagctgggaaccctgcgcgggagtggtgagtacagacagtggagagtgaagaactgtccccagaatatctcctctgaacagaaacaagagacc

SEQ ID NO: 914780 - DNA, 120 bp, Artificial Sequence
  ENSG00000286686_1 (sequence is synthesized)
aggttggctgcaaggccacagcctcttattaacaggtgtagctaagatggaaacatttgttcctggaaactgaggtgacgaaaagacccatcccatcctaagctagggatggagtatctt

SEQ ID NO: 914781 - DNA, 120 bp, Artificial Sequence
  ENSG00000286686_2 (sequence is synthesized)
gacctcactctgccaatctgccctagcttcaaactatggtctcgctgtgtggccttaggcaaattacttggcctccacaaagctccatcaactcatctgtaaaatgaagataaaaataac

SEQ ID NO: 914782 - DNA, 120 bp, Artificial Sequence
  ENSG00000286686_3 (sequence is synthesized)
caccctcaagactactgtatttgaaaaaacaggcaatgcatttgtcactcaagaagtatttgttccgagtccccatccctgttttcttcatacttgctgcatacttcaaaaccagtattt

SEQ ID NO: 914783 - DNA, 120 bp, Artificial Sequence
  ENSG00000286686_4 (sequence is synthesized)
ccaaacacttctctctgctccacaaaagctgtgtctgtaaaatctttcagtgtccttcttctacctttaataccctccctgagaacaggaactcttggttgtgggagacgaattctatgg

SEQ ID NO: 914784 - DNA, 120 bp, Artificial Sequence
  ENSG00000286686_5 (sequence is synthesized)
aaaggctccagaacacatggagcatgtcaaaaaggaggctttaagaacatgaaaataacactaagtatatatatcacacaccctctttataacatagaacttaaaagctgagtgccatct

SEQ ID NO: 914785 - DNA, 120 bp, Artificial Sequence
  ENSG00000286686_6 (sequence is synthesized)
caagatagagcacagggtccttatacatttcacaccaagaaggagaggaagtcttggaaagttgatcagagcagatttgtgctagaacaagttcaggaagatgtcaaggactttggagtc

SEQ ID NO: 914786 - DNA, 120 bp, Artificial Sequence
  ENSG00000286686_7 (sequence is synthesized)
tctgtgctctttcaactcctacaaatggacctccagtggcctcatccactgaggccgattggcccccagagagagatgctatgcaagggatgaagaatcttgaagggactctgccaattc

SEQ ID NO: 914787 - DNA, 120 bp, Artificial Sequence
  ENSG00000286686_8 (sequence is synthesized)
taccaatcagtcacttcaccaagactgtagggagtttgaatatgggttgtcatggtacacatagtaggtattcaagtatttgcggaatacatgaatgacacaaaatataatgggcttaaa

SEQ ID NO: 914788 - DNA, 120 bp, Artificial Sequence
  ENSG00000286686_9 (sequence is synthesized)
tgtaacaaactcctttatgttcgaagataatcagccaaccacaattgtgatgctggtattacaagtattgctattttggtaattcactgaagatttttgaataggatattgaatgtctaa

SEQ ID NO: 914789 - DNA, 120 bp, Artificial Sequence
  ENSG00000286686_10 (sequence is synthesized)
tgggaagaaggggctaattgggaaggcaaaagactcctacaagggaaaggtgatatcttaagacacactttgcatgaataatgcttttctttcttggttgcaaacaacagaaacagactt

SEQ ID NO: 914790 - DNA, 120 bp, Artificial Sequence
  ENSG00000286686_11 (sequence is synthesized)
accagacctgaacatatataggacctctgactgatcctgcaactttgtttcatgctcttaagactcaaagtcctgagtgtaagcatcagtctgaccacctcagattttggtccctgtttc

SEQ ID NO: 914791 - DNA, 120 bp, Artificial Sequence
  ENSG00000286686_12 (sequence is synthesized)
tggatccagtgacaggtgacttcttacttgctattctacttccataaagaggtatatattaccctccattcttcttggcatgaagcaaaataggaagggtattctgacactgagaagcca

SEQ ID NO: 914792 - DNA, 120 bp, Artificial Sequence
  ENSG00000286686_13 (sequence is synthesized)
ggaagggtattctgacactgagaagccaaaacaacaaatgtcccttgtacatccctgctgaaagtgaacagctctaaagagctttactctcagccgggcgcagtggctcaagcctgtaat

SEQ ID NO: 914793 - DNA, 81 bp, Artificial Sequence
  ENSG00000286686_14 (sequence is synthesized)
gaaggcgtggtggcgggaacctgtagtcccagttaacttgggaggctgagccggaagaatggtgtgaacccgggaggcgga

SEQ ID NO: 914794 - DNA, 120 bp, Artificial Sequence
  ENSG00000286686_15 (sequence is synthesized)
gctttactctcttcatctcttgcaactaacctgggtgaactttagttttcctggccctatttgccccactcagcaatgccaccctaacctatgcatcattagcatggaggtcctgtcaac

SEQ ID NO: 914795 - DNA, 120 bp, Artificial Sequence
  ENSG00000286686_16 (sequence is synthesized)
acagagaagtcaatgtactctttttcaaagtggaggagacattgtgagaatcagagtgatgtatccgtatcttcaatgtttgacaactctgttttgctccttaaatgaactggacagact

SEQ ID NO: 914796 - DNA, 120 bp, Artificial Sequence
  ENSG00000286686_17 (sequence is synthesized)
ccattcatatttggaaaagtccatttttaaaatgatagttctatcatagttttagctttgagaaaattcaacttatttagacatataatttaggatttttttggcggggggagagaggga

SEQ ID NO: 914797 - DNA, 120 bp, Artificial Sequence
  ENSG00000286686_18 (sequence is synthesized)
gcttaaaggccctcccactgtttgattatccctctcccatacccagcactcaattttcttccctctgacactttctgctgtagccagatgcattgtttcaccaacttaccctcccaggat

SEQ ID NO: 914798 - DNA, 120 bp, Artificial Sequence
  ENSG00000286686_19 (sequence is synthesized)
tgtttggttataatgaactctttcactggttctcaatttgtttttgctatttttgaccattaattttttccggttcaagaataattttaaactatgcaaataagtatgaaattaagcata

SEQ ID NO: 914799 - DNA, 120 bp, Artificial Sequence
  ENSG00000286686_20 (sequence is synthesized)
taattgtgacatctgagtgctgactgtgtaccaggcaccagcctaagagctttacatgcatcacacctcatttcatcctcaaaatcttgtcattttacagctggagaaacaaaagccaaa

SEQ ID NO: 914800 - DNA, 120 bp, Artificial Sequence
  ENSG00000286687_0 (sequence is synthesized)
gggaagagctcttcatcaagaggacagttgttgtgacaactgagaaacagcaataataaaaactggaatctgccatttgagttcttcacctatcccctcatcactgctatagccaaacag

SEQ ID NO: 914801 - DNA, 120 bp, Artificial Sequence
  ENSG00000286687_1 (sequence is synthesized)
cctatcccctcatcactgctatagccaaacagaagtgagaagacggaagaaaagaattcttacagagacaagacgtaagaggaaagaagagaagagacggagtttcaccgtgttagccag

SEQ ID NO: 914802 - DNA, 120 bp, Artificial Sequence
  ENSG00000286687_2 (sequence is synthesized)
tacaggcgtgagccaccgcgcctgaccttgatgagttcccgtttcccgtctaggacgtcctaattttgaacagaacaaacagcacttgcaacacccaacccatcaggaaatcccgttgtc

SEQ ID NO: 914803 - DNA, 120 bp, Artificial Sequence
  ENSG00000286687_3 (sequence is synthesized)
tcccgttgtctctgcctttggaagatccagaacctcatggattgttaccatttcccagctactcaccattgcagctggaaacaccgtcctctgtcactggattcccacgcgcacccgcca

SEQ ID NO: 914804 - DNA, 120 bp, Artificial Sequence
  ENSG00000286687_4 (sequence is synthesized)
gctcccctgctccagagcctggctccttccgcagcagcgagagggtccccacgcaagccagcctcaggtgctcacttcagcagcacatctgctaaaactggaacatacagagaagaggaa

SEQ ID NO: 914805 - DNA, 120 bp, Artificial Sequence
  ENSG00000286687_5 (sequence is synthesized)
cctggcccctgtgtaaacatgacatggaaattcatgggacattccatatttttatgaatatactaaaagccgctgaattgtaggcattgaaaataatacattttatggcatgtgaattat

SEQ ID NO: 914806 - DNA, 120 bp, Artificial Sequence
  ENSG00000286687_6 (sequence is synthesized)
atctcaattcagctactgtaaactaaataaacaaaagtaaaccatgcccatcctccgctcaaagccctgcaatggttatttcattcaaagtaaagtctatgttcttaaaaaagccaaaaa

SEQ ID NO: 914807 - DNA, 120 bp, Artificial Sequence
  ENSG00000287021_0 (sequence is synthesized)
ggaggtgttaagggacagcttcgcttaatctttctttctcttcttcctaagccatgtgaagaccttgcctgattcccctttgccctccaccatgattgtaagtttcctgaagcctcctcc

SEQ ID NO: 914808 - DNA, 120 bp, Artificial Sequence
  ENSG00000287021_1 (sequence is synthesized)
tcagacgaagcctacacagcctgcagaactgtgaagtgattaaacctcttttctttataagttacccagcctcaggcatgaaaatgcacctcacagacagagcacccagctgctgtgctt

SEQ ID NO: 914809 - DNA, 120 bp, Artificial Sequence
  ENSG00000287021_2 (sequence is synthesized)
tgaagtcagccacacctcccattcattgctgttaccaatggactgactgaatgctgtggcgatactgaggccgtcttagtcccggaagacagactgtaaaaagaagatgtttactggaag

SEQ ID NO: 914810 - DNA, 120 bp, Artificial Sequence
  ENSG00000287021_3 (sequence is synthesized)
cttgtagtaaagttagagtagctctgttccaatgtttgaccattcagagaggagtcatacccttcttcacttcacaagagattttccttgtgaaaaccttggtggtgaagggcaggagaa

SEQ ID NO: 914811 - DNA, 120 bp, Artificial Sequence
  ENSG00000287021_4 (sequence is synthesized)
tatgctacccccagaattcgactttggcataaggattatcttgagctgaagggaattgagaagaagcacaaacaagaaaagctgtctgccctctccctatttgcctaaaatcaggaaata

SEQ ID NO: 914812 - DNA, 120 bp, Artificial Sequence
  ENSG00000287021_5 (sequence is synthesized)
aatatacaaagatgtacctctttacctctctaccaggaatgacaaagtttgatcagtggagatgactttagacccttatcagcctggagatggcacaagagaaatctatacagcaaactt

SEQ ID NO: 914813 - DNA, 120 bp, Artificial Sequence
  ENSG00000287021_6 (sequence is synthesized)
taccaactgttctacctactattggtttcccatataattgcttttccacaatatgccacatctagacactcaaagtccttttcctttttcttgtcacttctctgaaattgtattgtactt

SEQ ID NO: 914814 - DNA, 120 bp, Artificial Sequence
  ENSG00000287021_7 (sequence is synthesized)
tgttgaagatgctatataagctgaagttctaagccatctttttgagagttactctttcctttagttctctctcatgtatatatgaaatatacatgttagtgaacttgtttgtttttctct

SEQ ID NO: 914815 - DNA, 120 bp, Artificial Sequence
  ENSG00000287021_8 (sequence is synthesized)
tgttaatctgtcttttgttgcaggaggtccagctaaggactctgaagagtaaaggagaaattgttttctcctctcctacagtggattttgtctttttagtgcagaaagttgcattaaaga

SEQ ID NO: 914816 - DNA, 120 bp, Artificial Sequence
  ENSG00000287021_9 (sequence is synthesized)
tggcaacaacagtcactcaagatggtttctatccacagataatttcattgattggagcaaagtttttccaaggatcattgttatgagctgaactatgttcccctcaaatttatacgtgga

SEQ ID NO: 914817 - DNA, 120 bp, Artificial Sequence
  ENSG00000287021_10 (sequence is synthesized)
atttggagacaagcttttcaaagagagaattaaggcaaagtaaggtcatcagaatggactctaatctcacataactggtgtccttataagaagaggagattaagacacagatatacatag

SEQ ID NO: 914818 - DNA, 120 bp, Artificial Sequence
  ENSG00000287021_11 (sequence is synthesized)
aagaagaccatgtaaagacatgggaagaagatagtcatttacaagccaagaggaagagccttcagaaggaaccctgtcaacacctctgtcttagacttgtagtctccagaactgtgagga

SEQ ID NO: 914819 - DNA, 120 bp, Artificial Sequence
  ENSG00000287021_12 (sequence is synthesized)
aataaatttctgttgcttaagccacccagtttgtagtacttaggtatggcagccctcgctagcaagcttacatcaaaatgacacatgaggcttgtgaaaaatgacagatctatgcatgat

SEQ ID NO: 914820 - DNA, 120 bp, Artificial Sequence
  ENSG00000287021_13 (sequence is synthesized)
tgaaaaaagaaaggaaaatattaaagaatctgtctctacttctagtttcttctgagaaaagttaggatacaatttctgtcaaaggatggtactgaccttgtgtaattttcattcttcagg

SEQ ID NO: 914821 - DNA, 120 bp, Artificial Sequence
  ENSG00000287021_14 (sequence is synthesized)
aactataatcacattaccatgtcagcaaaccacacagatttttattttgtctaaaaaagcatgatttccactctttggaataatactgttaactatacacgaagataaatataaaagaca

SEQ ID NO: 914822 - DNA, 120 bp, Artificial Sequence
  ENSG00000287021_15 (sequence is synthesized)
gcgccacattgactgtggattctgaaattccctttattacatttattcttggattctcagaccaaaccctgggactcagaccaaagaaattttggtttaatatgaagatttcttaaagct

SEQ ID NO: 914823 - DNA, 120 bp, Artificial Sequence
  ENSG00000287021_16 (sequence is synthesized)
ctgacctgacagtcttataattatattttcttcttgtgtatatccctagatatacaaacagaacatcttaaaactgcctgatccaacaaatattattagttgattattcaaggcatgatg

SEQ ID NO: 914824 - DNA, 120 bp, Artificial Sequence
  ENSG00000287021_17 (sequence is synthesized)
attccattatttttggatcttttttatggcatgctaatgttctctatatctcttcttcatggcttctgttgtttcctcttttcttttcccacctctccttctgtctcctattttttttct

SEQ ID NO: 914825 - DNA, 120 bp, Artificial Sequence
  ENSG00000287021_18 (sequence is synthesized)
ccttgtccccttgtatatgtacaatttctataatccaactcataaatccttgtgctaattccactctcagtaactattaagatggaattccacacgtgtcacaacaaatatccacatgtg

SEQ ID NO: 914826 - DNA, 120 bp, Artificial Sequence
  ENSG00000287021_19 (sequence is synthesized)
acaagcaattagtgatactactctctgaatgctttttgttttagaagtgtaaatttacataaaaaataaagcaaaaaaaacccaaaaaacaaaaaacaaatgtttgcttataaagcgtgt

SEQ ID NO: 914827 - DNA, 120 bp, Artificial Sequence
  ENSG00000287021_20 (sequence is synthesized)
agtattttttgcatgatattaattttacaaccacccagtgggagaagaggaaagagagttcaccttaagcgttttcagagggttttgtaatgttgttataaatttctctaaacaaagtta

SEQ ID NO: 914828 - DNA, 120 bp, Artificial Sequence
  ENSG00000287021_21 (sequence is synthesized)
attatggtctttatcctcagtgcaacaaaataaagtcattgaagagttttaagtagaggactgacatgatgacatgttaggttcagccttctgaagaatttgagaatccatcattgcact

SEQ ID NO: 914829 - DNA, 120 bp, Artificial Sequence
  ENSG00000287021_22 (sequence is synthesized)
ttatatactatggacttaatgaagttgttttatagcaatgttctatagagatgatctctaaatttattacttgctgagaacagtgatatgagtgactacatttatctttatgagaaggaa

SEQ ID NO: 914830 - DNA, 120 bp, Artificial Sequence
  ENSG00000287021_23 (sequence is synthesized)
agaaaaaaggagaaaagacattttgagaagaaatgaaagaggacaggcattgtgacccatagaagttaacctcctcctcattgaatattggggacatggagcctagggcctgagagtaga

SEQ ID NO: 914831 - DNA, 120 bp, Artificial Sequence
  ENSG00000287021_24 (sequence is synthesized)
tgccaaggctgaatgactatttgaacccagaaggtgcagggagataacaactcagctgctgtgaaacagagattttatttgcttggttccattaagcaaatcagaaagctggccctgtga

SEQ ID NO: 914832 - DNA, 120 bp, Artificial Sequence
  ENSG00000287021_25 (sequence is synthesized)
caggactgagctactgaccccagatgaatgaggtcagcacatgtatttcagctctgggaaagttgggaaatggaaaaagaagcaagtagatgccaacattcttacatgtgagggagattc

SEQ ID NO: 914833 - DNA, 120 bp, Artificial Sequence
  ENSG00000287021_26 (sequence is synthesized)
cccattgctggcttgaagatggagagagttggtgtccaggaccctagaacaacttccaggagctgagagtaacccctggccagtagccagcatgaaaacaggaatctcaattctacagct

SEQ ID NO: 914834 - DNA, 120 bp, Artificial Sequence
  ENSG00000287021_27 (sequence is synthesized)
gcaaggaactgaatttggccaatggcctgaatgaacttggaagcactttcttcctcagaacttccagataagaacttagctggtctaacagcttgaatgtgagactcagagcagagaacc

SEQ ID NO: 914835 - DNA, 120 bp, Artificial Sequence
  ENSG00000287021_28 (sequence is synthesized)
catttgagcaactccggaacttctaatttatacaactgtgagataataaatgggtgctgttttaagctgctaagtttgtggtaatttcttatgcagcaatagaaaattaatatagtaaca

SEQ ID NO: 914836 - DNA, 120 bp, Artificial Sequence
  ENSG00000287021_29 (sequence is synthesized)
taacattgaaaatgctttctttaagatatattggtgtccataaattagcttcaaactggttcttccttttaccaactgtttgatcttgggtaaattaaggaatccttctgaatctgtcct

SEQ ID NO: 914837 - DNA, 120 bp, Artificial Sequence
  ENSG00000287021_30 (sequence is synthesized)
gtatagacaaaggaaataatgactactgccttaagtggttactatatgaagtgaattaatgttaatgaaaattcctatcataagaacttacgaacacaaacaagaaaacagacgatggag

SEQ ID NO: 914838 - DNA, 66 bp, Artificial Sequence
  ENSG00000262514_0 (sequence is synthesized)
atgaagttttaaaggctctccattctctttctcgctggagttcacactttggtattcttaatgata

SEQ ID NO: 914839 - DNA, 120 bp, Artificial Sequence
  ENSG00000262514_1 (sequence is synthesized)
ctttctcgctggagttcacactttggtattcttaatgataattatattcgtctgtgtctcttccctagcttctttggaacatctcagggccttttgagttctaactactcttcttgtttt

SEQ ID NO: 914840 - DNA, 120 bp, Artificial Sequence
  ENSG00000262514_2 (sequence is synthesized)
atgtgggctctatctaatacctctagattaattcagaacatatttaatccttcttgtataatagccttcacatgtgtgaaagcttgatctctttcccagtcttaaaaactctccagcaac

SEQ ID NO: 914841 - DNA, 120 bp, Artificial Sequence
  ENSG00000262514_3 (sequence is synthesized)
ttcatccttccctcaccaaaatgcaaatttccttctgcttgaaccgtgatgtttaagttccctttcatagtggagtatccagaagggaacacattgtagctagcttgttgtgggttaaga

SEQ ID NO: 914842 - DNA, 120 bp, Artificial Sequence
  ENSG00000262514_4 (sequence is synthesized)
tgtcctttccctacataggtttatatatatatatatatggggtttttttggaccaaagactaaactttataattatccttgttcagtttcattgagatgatttcggtgcctcataccaat

SEQ ID NO: 914843 - DNA, 120 bp, Artificial Sequence
  ENSG00000262514_5 (sequence is synthesized)
tttccaagctcagaagaatcccagaagcatttctcagtctcaggcttcctggggcaaggcagatattcctttgggggttacaacagcagcacagtactgacgtttcaccaagttctcttt

SEQ ID NO: 914844 - DNA, 120 bp, Artificial Sequence
  ENSG00000262514_6 (sequence is synthesized)
caagtagtccccctggaaggctgtaatataaacttactcaaacaattaaggcatagttcatgactattttgcttcttgtctttatattttcttcactacctccatatatcattgcacctc

SEQ ID NO: 914845 - DNA, 120 bp, Artificial Sequence
  ENSG00000262514_7 (sequence is synthesized)
cttgaaaagcatgttctgtggctgtccaattatcactgaattttactcatatttacaattcgtatgcctggaaatgtaattttccgtaaacatttatgttcgttatggtttttatgccgc

SEQ ID NO: 914846 - DNA, 120 bp, Artificial Sequence
  ENSG00000262514_8 (sequence is synthesized)
aggttttggaccagacagtaaacattaaaacagttgattttataacagatatggaaactgtcaagctgtttttcatttgtttattttttgagatggagtttcccttgtcacccaggctgg

SEQ ID NO: 914847 - DNA, 120 bp, Artificial Sequence
  ENSG00000226497_0 (sequence is synthesized)
tcacaagggaaagcatatgtagattgaagctatgcagaatgaagtctcaacagctgaagcttactggggaaccaatggtgccctaaattaagataatttatgaaatgttggtctccctct

SEQ ID NO: 914848 - DNA, 120 bp, Artificial Sequence
  ENSG00000226497_1 (sequence is synthesized)
gttgctgcccaggctccaggctgaagtgcagaggcatgatcttggctcactgccgcctcctcttcccaggctcaagcgatcctcccacatttgcctcctgagtagctgagactacagtct

SEQ ID NO: 914849 - DNA, 120 bp, Artificial Sequence
  ENSG00000226497_2 (sequence is synthesized)
attcttctgcctcagcctcccaagcaactgggactacagcccctgaaaagtagcagcaatgtgccctgcaacagaatctgcacactacagagatactacaaaagctaccatgaagaagct

SEQ ID NO: 914850 - DNA, 120 bp, Artificial Sequence
  ENSG00000226497_3 (sequence is synthesized)
acatagatgatcactgggttgtacctctcaagtactttctcagaagccacatccatgttattgctgagagtacatgctttgctataaaccctaactgggttgaatcctggctgtgccact

SEQ ID NO: 914851 - DNA, 120 bp, Artificial Sequence
  ENSG00000226497_4 (sequence is synthesized)
tagtagctaagagattttgaccaaatcactggcagagacctttgtccccttgtctatgaaataaaataaaaatagctaccgctctgagatttttcaataaaacctgttaaattttacaag

SEQ ID NO: 914852 - DNA, 120 bp, Artificial Sequence
  ENSG00000226496_0 (sequence is synthesized)
attgtgtccatgggtagccctgtaccaggtaatgaaaggatttctcttatgtttctgttctttgttttcaaggaacaacagagagatggtatttccagacaagggaataaattcccggaa

SEQ ID NO: 914853 - DNA, 120 bp, Artificial Sequence
  ENSG00000226496_1 (sequence is synthesized)
gcaactggccaaggaatgaaaatcctggagaacagagtggaagaaacgcgtattccacatttcctgttgattttctttcctccctaaacactgacctcccgcagtcttcactagcaggtg

SEQ ID NO: 914854 - DNA, 120 bp, Artificial Sequence
  ENSG00000226496_2 (sequence is synthesized)
aggtcacctgtagaggtcatgctgcggagtcccgagtccctgattatattcaagacgtggagctctctttttcccgtcctgctttctttccagaagtgcctcagatgcatcctccccttc

SEQ ID NO: 914855 - DNA, 120 bp, Artificial Sequence
  ENSG00000226496_3 (sequence is synthesized)
tcttttctccacatgaagacgtcactgaccatcttctctggtttgctttccaacaccgagcaccaagtgcttcaaaggtcatggtgccctggggccgagagctacttatgtgggcattta

SEQ ID NO: 914856 - DNA, 120 bp, Artificial Sequence
  ENSG00000226496_4 (sequence is synthesized)
taaccaaataaatattgaaatggcccacaaagcaaatgttagtggtaaccaacagcggtaaaactgggtacatgggaccctgaaccttcttgaatattccccatgagaccctgggccgac

SEQ ID NO: 914857 - DNA, 120 bp, Artificial Sequence
  ENSG00000226496_5 (sequence is synthesized)
cttcgggctttccagtgtgctcagaaaatcctccgtggctcccagccccagcttagtctttcaacggtcctcggactgaagcaagagacagggaaggaattgtccaaggttttccagcat

SEQ ID NO: 914858 - DNA, 120 bp, Artificial Sequence
  ENSG00000226496_6 (sequence is synthesized)
gctgagaacacttaccatggtggagcctggcacgtactggctctttgatgcatgtgtattggtctcaagtagccagaagcatctcctctgagagcccttgccctccagtttaaatggcaa

SEQ ID NO: 914859 - DNA, 120 bp, Artificial Sequence
  ENSG00000226496_7 (sequence is synthesized)
atggaagggaatgggttctggaaggccccaggtgggctggggtgggttctggagaccatcttccaactcctgttcaggaggagggttggtcagatcagctctgtggccacctgggctctg

SEQ ID NO: 914860 - DNA, 120 bp, Artificial Sequence
  ENSG00000226496_8 (sequence is synthesized)
gaggggcgagatacgggcaggtgcggccacaggagggagagcaccatgtgcgggggaagcccacagctggaaccaaaaggccccaggagggatcctggctctgacatctcccagccgtgt

SEQ ID NO: 914861 - DNA, 120 bp, Artificial Sequence
  ENSG00000226496_9 (sequence is synthesized)
ggccttgggcaaggtccctgacttggacctcagcctcctcatctgtaaaacaggcagaacagtaataccgaccttgtaggttgtatagagttcatatacatcaagcacttaccacagtgc

SEQ ID NO: 914862 - DNA, 120 bp, Artificial Sequence
  ENSG00000226496_10 (sequence is synthesized)
ctggcggaccgcatgccctaaacacacaatccgtgaaatgaatccatcagcaagcagctgctaggggcagtgtggggcagagaggcagctgcctgctggaactggctgacaggaggatga

SEQ ID NO: 914863 - DNA, 120 bp, Artificial Sequence
  ENSG00000226496_11 (sequence is synthesized)
gtgtgtggcaggaggaacgctctgcacagaggacactaggtagcgtcacctgtctcttaccctgtgtctccactggaatggaatgtcagactcgcaccatgcattcctttccctgccaaa

SEQ ID NO: 914864 - DNA, 120 bp, Artificial Sequence
  ENSG00000226496_12 (sequence is synthesized)
acgcctcctcttagcagtgagcaagaaagttgttcgagtggatgaagccaaaagcccatttggcaagagtgctgttttggaaaatgcttagcggtgtgggttgggatgaggttttctgtg

SEQ ID NO: 914865 - DNA, 120 bp, Artificial Sequence
  ENSG00000226496_13 (sequence is synthesized)
cctttccattatttcttcagcttcatgtaaccctgactgagcaatgctcagcagagtgaaggctgggcagcagatggacaagattttctcaaactcctttttaagccaatttcaaaatag

SEQ ID NO: 914866 - DNA, 120 bp, Artificial Sequence
  ENSG00000226496_14 (sequence is synthesized)
agagagggaaaaatccttgttttctcttttcggttttgagaggtttcatatgcagacacaattttaaattttattttttttgcccccaatgagatgtttggagatggtggtactagaaca

SEQ ID NO: 914867 - DNA, 120 bp, Artificial Sequence
  ENSG00000226496_15 (sequence is synthesized)
ggaaggaatttataagtattggggaatttttcatcccaattcccatatcctcctataattcaaggagtgaatgggtagtgtttttgtttttgtgagaggggtggcggagggtagagagag

SEQ ID NO: 914868 - DNA, 120 bp, Artificial Sequence
  ENSG00000226496_16 (sequence is synthesized)
aaagagagagagacagagagagattacatagaggtgtccaaaatgaacacagtaaaaaccagttttgattaattctgcaatattaagtaggcagccaaaaattttggtctgcttaattct

SEQ ID NO: 914869 - DNA, 120 bp, Artificial Sequence
  ENSG00000226496_17 (sequence is synthesized)
tagctcatctaagtctccagttgactgattgattgattgaatgacttattcaacatgcgctagccagacactggtctagggcccaggaattcagcaataaatgaaacaagaccaaaaaaa

SEQ ID NO: 914870 - DNA, 120 bp, Artificial Sequence
  ENSG00000226496_18 (sequence is synthesized)
aagtagtcgagctgaaacccctgaaaacaatcgtaggacgatgacaaggttttggcagctgcaatcttaaagaccaggaagtgagggtaacagaagcaaatcatcagtgcctgtctttga

SEQ ID NO: 914871 - DNA, 120 bp, Artificial Sequence
  ENSG00000226496_19 (sequence is synthesized)
acttgatgaaactgtctcagcctcatgacctgtggtactagacagagaccacaacaccttgtctatccagagtgtgggagcactgtgtgcagttagctcctggaggcttgtcctcagtag

SEQ ID NO: 914872 - DNA, 120 bp, Artificial Sequence
  ENSG00000226496_20 (sequence is synthesized)
aggaatgaaaatcctggagaacagagtggaagaaacgcgtattccacatttcctgttgattttctttcctccctaaacactgacctcccgcagtcttcactagcagggtgttctggcctc

SEQ ID NO: 914873 - DNA, 120 bp, Artificial Sequence
  ENSG00000226496_21 (sequence is synthesized)
cagagcatctggatgggttccaggatataaatgtgacactgtcattgcattaaagtagtcgagctgaaacccctgaaaacaatcgtaggacgatgacaaggttttggcagctgcaatctt

SEQ ID NO: 914874 - DNA, 120 bp, Artificial Sequence
  ENSG00000243319_0 (sequence is synthesized)
gttgctatggaaaccatggcggccggaagccgccgcgcgggagagacttggggcgcgggtcggggctagggctcctgccctggcagagatcttcgctcttccgtggtggccggggaccgg

SEQ ID NO: 914875 - DNA, 120 bp, Artificial Sequence
  ENSG00000243319_1 (sequence is synthesized)
gcagtgagcggccggctctgccgcccgcggggcgcgggtttgcaaggtgtggcaactccttcccagtggaggaagcgactgttccaagagccagttttggaattgtaggcacaaacacag

SEQ ID NO: 914876 - DNA, 120 bp, Artificial Sequence
  ENSG00000243319_2 (sequence is synthesized)
gagaatgtggtcagtgtttcagccagtgcttgctgctgaggcaggagagaataattgtgtaaagagggggctcccgcagtgcaggacaggaagccaccatgtgagcaccacatccacgtg

SEQ ID NO: 914877 - DNA, 120 bp, Artificial Sequence
  ENSG00000243319_3 (sequence is synthesized)
caggtcgcaggcttcatcatgtcctgaataccatgccttagcattttatatttcaggtttctacttctacatctccagccctgaatactcatggaatatcgctgtacctatgacaggttg

SEQ ID NO: 914878 - DNA, 120 bp, Artificial Sequence
  ENSG00000243319_4 (sequence is synthesized)
catgatttttccccctctgtgcactcaatttgtgtattattgtatcatatgacattctgaatcaagtgctgctagtaccaagctgctatcatcagctgatgccaaaaatattcgttataa

SEQ ID NO: 914879 - DNA, 120 bp, Artificial Sequence
  ENSG00000243319_5 (sequence is synthesized)
cacttctcagcatgcaagtgagagcacttcaaatcacacagacagaatttccagccattgttcttttcttctttgcttattatacagcaacaagaatcaaaacaaaaggggatttattag

SEQ ID NO: 914880 - DNA, 120 bp, Artificial Sequence
  ENSG00000243319_6 (sequence is synthesized)
aaaataatgcttcagtaaaatgttataaaacatgaggtttattgtttgtgaagatagagtgaaattcagtaccacattatagataccacctcagaggcctattttccccttcttttctct

SEQ ID NO: 914881 - DNA, 120 bp, Artificial Sequence
  ENSG00000243319_7 (sequence is synthesized)
tttctcaaatgtttttcaagtggcatctttttttcagtctttgattacattaaggtgcaaactatttatccatctggaaataagcaatactgtcaacagagaaccaggaaatgaaaagtg

SEQ ID NO: 914882 - DNA, 120 bp, Artificial Sequence
  ENSG00000243319_8 (sequence is synthesized)
agagtgaaaatatgtattctccaagggaagacaattaaaagacaaattccatcaggaagatttgtcattttttgagagtgctgatcctgcatctatcagcaaatttcacataaattaatt

SEQ ID NO: 914883 - DNA, 120 bp, Artificial Sequence
  ENSG00000243319_9 (sequence is synthesized)
cattttacagagtgaatgctgaaacttggaagccaactgacaagatgccagggatggcatggcaaggaagagagagccttcatggcaattttgaatacctgatctcttgctttcatcatc

SEQ ID NO: 914884 - DNA, 120 bp, Artificial Sequence
  ENSG00000243319_10 (sequence is synthesized)
ttgtctaggggaagaaacacggagcctggtagttgggaggtgagaggcaggaatggataccagagatggacagacagtggggtggtgagaagggagctgcaatttgctaatccttgtagt

SEQ ID NO: 914885 - DNA, 120 bp, Artificial Sequence
  ENSG00000243319_11 (sequence is synthesized)
actacctgtcaatcatcttgctttccttaatcatcgatcctggagagactttgaggaaagggctggtggagttgcgcagatgtgatcttcatttcagccttatgaatacataccaaggtc

SEQ ID NO: 914886 - DNA, 120 bp, Artificial Sequence
  ENSG00000243319_12 (sequence is synthesized)
tctttaaatctgtggttcctgcacaaagtgctgtgacttcaggctaatagagaggtccagatgtcacatgtgccaattagaaagaaatgaggaccatggctatggcccactgtgttcaga

SEQ ID NO: 914887 - DNA, 120 bp, Artificial Sequence
  ENSG00000243319_13 (sequence is synthesized)
agacacgcccaagccacccattgtcattcattgtgtctaatacttgacctgtcctgctgtttattatgtggggtggctccatattttaaaaactgtattcataaaaagatatttctcatc

SEQ ID NO: 914888 - DNA, 120 bp, Artificial Sequence
  ENSG00000243319_14 (sequence is synthesized)
ctgctgagtctcaggcccattgttgtaggtgaggtggtttcttttgtttgatatataacgttttgctgactttcgacttgggaattgcaaaggcttacccaaaaccctgaaggaaaagct

SEQ ID NO: 914889 - DNA, 120 bp, Artificial Sequence
  ENSG00000243319_15 (sequence is synthesized)
aagaattcatacttattaagcacttggtaggtgtctgacactgtagtagatatatgcgagagcccagaacaagctgatgtccatgtacatatctttaaaaaatataatgatctagtctta

SEQ ID NO: 914890 - DNA, 120 bp, Artificial Sequence
  ENSG00000243319_16 (sequence is synthesized)
tctgtggaaactgcttcagatactgatcttactctttcctgttacatcagaaattctggaaggtaatatcctgaaagatttatcctcaagaataacaatacattaaaatcttctgctttg

SEQ ID NO: 914891 - DNA, 120 bp, Artificial Sequence
  ENSG00000243319_17 (sequence is synthesized)
acttgctctggggaaagccagctgccatcaggtggggacactagaggagccccagggagctcccatatggcaaggaactgagacctgctgccaacacccaggaccaatttgccatccatg

SEQ ID NO: 914892 - DNA, 120 bp, Artificial Sequence
  ENSG00000287028_0 (sequence is synthesized)
aggctcgcggacacacacagaagggtgaggaaaacggaatttactgggggaaaaggaaaaagaaaaaactctcaccaaagcaagagtcctgctagcaggtttcccgcctcacagattgaa

SEQ ID NO: 914893 - DNA, 120 bp, Artificial Sequence
  ENSG00000287028_1 (sequence is synthesized)
gcccaggtcgccacacaggaacaggctcctccccgctgcaaatggcgtgaacttctggaggccccaccccgttctcccagtgcaaagaaactcacatttcttctatctcattacctgtgg

SEQ ID NO: 914894 - DNA, 120 bp, Artificial Sequence
  ENSG00000287028_2 (sequence is synthesized)
tcagaaattacctcatgtggcttcaacagggcattctgtactaaccatggtttattgaaaatgttacaacatttcagaaagattcaaacagctccatgtggtggatagtccaatctgcag

SEQ ID NO: 914895 - DNA, 120 bp, Artificial Sequence
  ENSG00000287028_3 (sequence is synthesized)
gagcataattatctctcctttctctcttcttctcctgcaacctgatggaaatacctcttactgggcccctgtgaatctgcttcttcagatgcgtgactcagcctgctatcttgttgcaga

SEQ ID NO: 914896 - DNA, 120 bp, Artificial Sequence
  ENSG00000287028_4 (sequence is synthesized)
gcttcttgctggggataatgacagtcttcacccacttgcttgttcatgtggaaatcattaccggggtgcatgtaatacttttctatgatgacccaggctaccttcttcactgttttggtg

SEQ ID NO: 914897 - DNA, 120 bp, Artificial Sequence
  ENSG00000287028_5 (sequence is synthesized)
tgaaggctgcccatcttggcaggtccttggtaaaagaggccaaactctttatacttaaaaatttactttgctcatcttacagccttttacatctaaatatagtttcatcaagtaacattc

SEQ ID NO: 914898 - DNA, 120 bp, Artificial Sequence
  ENSG00000228470_0 (sequence is synthesized)
ctgctggatcattttgaggacagaggcatgagggagcacatctcttgtgaagttgcagccagatttgtaaccaaccctgaaattcatcagcttaattcatttatcagcttgattcattca

SEQ ID NO: 914899 - DNA, 120 bp, Artificial Sequence
  ENSG00000228470_1 (sequence is synthesized)
tcattcattgcttatatccaaagcaaagacgctttataacagctcaacttgtgtccaggtttaaaggtggctgtcctgtcccagactttcagccagtaaccaccatagcacattcacggt

SEQ ID NO: 914900 - DNA, 120 bp, Artificial Sequence
  ENSG00000228470_2 (sequence is synthesized)
gaatgaaagaacatgtctgggttgacagaggactcactgctcactgtggaacaatcacagatggctatatctgacacagacacacagcaggttattcctgaagaaacaaccagcctggtg

SEQ ID NO: 914901 - DNA, 120 bp, Artificial Sequence
  ENSG00000228470_3 (sequence is synthesized)
gactggataaaaggcactatgaggtatgtttactctgagaagtgaggctgtccaactccccctataaatgttaaaagcaacactctgatgaagtacctgataaactgtgtatgcaagtca

SEQ ID NO: 914902 - DNA, 120 bp, Artificial Sequence
  ENSG00000228478_0 (sequence is synthesized)
caccgcaccgccgggaagcgacgcccacctgtttgctcagatattgccatttccaggccatgacacctgcaccctgaatgtgacacagcaaaacattgactctccactggcatcagacat

SEQ ID NO: 914903 - DNA, 120 bp, Artificial Sequence
  ENSG00000228478_1 (sequence is synthesized)
acaggaattatgaaggatgaaaccatctcccccaggccttcaataagtgcaagtggattgctttgtaaacagaagtgcaaactcgttccgatagtggttccgcaccagtgctcggcagcc

SEQ ID NO: 914904 - DNA, 120 bp, Artificial Sequence
  ENSG00000228478_2 (sequence is synthesized)
ccgggaggccgctcctggagggggcgcactgaccggtgatgcgctcctccagtctccagggcatctttagcttctcggcctctgggcttcccagcttgctgcacacctcgggcctgtacc

SEQ ID NO: 914905 - DNA, 120 bp, Artificial Sequence
  ENSG00000228478_3 (sequence is synthesized)
cactgctgtcagttgaaagcgtgcattctggaaagccacagtgggacatccctaatgcacacccttccttcttcaccttctccctggacacctttgctaagagatttggctaatttcttc

SEQ ID NO: 914906 - DNA, 120 bp, Artificial Sequence
  ENSG00000239791_0 (sequence is synthesized)
ctggagcgcagcggagacctcggcatctgcggtgctcgggattgtgtcccctacggtctcttaccgtgcctcccgatggcgggagctggaatttggtccccagaccccttgggaagacgc

SEQ ID NO: 914907 - DNA, 120 bp, Artificial Sequence
  ENSG00000239791_1 (sequence is synthesized)
gcacaccctggcaaaccatgtgtacacccgcggtagaagcaggtcttcaagaccaaggaacacctacactccaggtgtctccttgccagatgtttcacctgcattggtaaaaggcagaat

SEQ ID NO: 914908 - DNA, 62 bp, Artificial Sequence
  ENSG00000239791_2 (sequence is synthesized)
agcactttgagacaaccccgtctctactaacagcacaaaaattagctgggcctggtggcgca

SEQ ID NO: 914909 - DNA, 120 bp, Artificial Sequence
  ENSG00000239791_3 (sequence is synthesized)
gcactccagcctgggcgacagagcatgactccatctcaaaaaaaagaaaagaatcctgggatgagctccgccccccccaccagccgagggacaggcctgagggaaacgctgaccagtttg

SEQ ID NO: 914910 - DNA, 120 bp, Artificial Sequence
  ENSG00000239791_4 (sequence is synthesized)
aacgctgaccagtttgtgtgaacgccatcacccacactcttgaaatatatctggaaagtgccggaagtgaactgggggatccttgcctcccaaaacagggatgggctctgaacgccccac

SEQ ID NO: 914911 - DNA, 120 bp, Artificial Sequence
  ENSG00000239791_5 (sequence is synthesized)
cacggcctgctgccacgcgcgcctctcgctgcaggagcggtggatccaccgatgggcttccagggcggtcttgcgcttgaagcctttcccacactccacgcaggggaagggccggctgtc

SEQ ID NO: 914912 - DNA, 120 bp, Artificial Sequence
  ENSG00000239791_6 (sequence is synthesized)
ggagtgaatgcgccggtgactgaggaggagggaagaataggtgaagcggcggccgcagtcaggacaggggtagggcttctcgccggtgtgtatgcgcctgtggatggccagcagggaggt

SEQ ID NO: 914913 - DNA, 120 bp, Artificial Sequence
  ENSG00000239791_7 (sequence is synthesized)
aggggtaagtgaagcgactcttgcagtctgagcacgcgtaaggcttctccccggtgtgagcccgcctgtggatagccagggaacccctctggcggaagcggcgcccgcagtcggggcagg

SEQ ID NO: 914914 - DNA, 120 bp, Artificial Sequence
  ENSG00000239791_8 (sequence is synthesized)
tgcgctgggagaaacgcgcctgacactggccgcaggagaagggccgctccccggagtggacccgctggtggctggccaggagggaagggtagctgaagttgcggccacagtctgggcaag

SEQ ID NO: 914915 - DNA, 120 bp, Artificial Sequence
  ENSG00000239791_9 (sequence is synthesized)
agtggggcagtcttcgggtcagagtgtccttgagccagggattcatggggctctgcctagggttgcagaactctgggcaggcgacgctgggccaccactccttgacagccacttcatgcg

SEQ ID NO: 914916 - DNA, 120 bp, Artificial Sequence
  ENSG00000239791_10 (sequence is synthesized)
ccacctctttttgttttggacacttcttcagcctttccttctcctcattcccatccctggatcctgaaacagggaagatgataaaatcagaaactcatccctggatcctgagacaggaaa

SEQ ID NO: 914917 - DNA, 120 bp, Artificial Sequence
  ENSG00000239791_11 (sequence is synthesized)
gatgataaagtcaaaaccagcatattccgggaccatgtcctgccttggaaggcagcaggaatggttcagaatatggcgcccagggagcacggcttaatgataggggcctcatgaagccct

SEQ ID NO: 914918 - DNA, 120 bp, Artificial Sequence
  ENSG00000239791_12 (sequence is synthesized)
gaaagccagcctggagtaaaagcaaatgccatggtctgcaggttaacacaagaaggccctgagcactggagataatgaaagaggagtcgggccgggtgccatggctcacacctgttatcc

SEQ ID NO: 914919 - DNA, 83 bp, Artificial Sequence
  ENSG00000239791_13 (sequence is synthesized)
cgggtgccatggctcacacctgttatccaagcacaaattcaagggacagtgagctgtgatcgggccactgcactccagcctgg

SEQ ID NO: 914920 - DNA, 120 bp, Artificial Sequence
  ENSG00000239791_14 (sequence is synthesized)
agtgggggaggcggggtgtctgggaagtagaggagaggcttcttgccttcaagaaagatgtaagggcccgaagcttcacttacccctctgtacccgcaatacgcaacggccgatgattgg

SEQ ID NO: 914921 - DNA, 75 bp, Artificial Sequence
  ENSG00000254315_0 (sequence is synthesized)
ggtcttgaattcctgacccccatgagccactgctctcagccttgtggtcaacttcttacagtgattaacactgga

SEQ ID NO: 914922 - DNA, 120 bp, Artificial Sequence
  ENSG00000254315_1 (sequence is synthesized)
tcagccttgtggtcaacttcttacagtgattaacactggagtgaggagaagagattctgagaaacatgagtccagctgcctatcttctgaaagaaagccactgaagttcttatttttctt

SEQ ID NO: 914923 - DNA, 120 bp, Artificial Sequence
  ENSG00000254315_2 (sequence is synthesized)
atgagcaaaaggttctcaaaagtggaagaaatctacattagttaagatgtagatacctaataaattttaaatgcactcttgaaaaaaaaatgtcatttatataagtattccgggaatatg

SEQ ID NO: 914924 - DNA, 120 bp, Artificial Sequence
  ENSG00000254315_3 (sequence is synthesized)
taacaaactccctgcctatttttcaattcatttacaaataattttaatagtaaaccatgaatagtcactagattgcattatcattaagatattttaaatgggaaaaaattccctcagatc

SEQ ID NO: 914925 - DNA, 120 bp, Artificial Sequence
  ENSG00000286028_0 (sequence is synthesized)
gcaggccaaatcaacagcaaccctaagaacaagcattcttttttttttttcaacagaactaggccacacatattttttgtcgttatttaaatttttagttgtactacatagaaaataaac

SEQ ID NO: 914926 - DNA, 120 bp, Artificial Sequence
  ENSG00000286028_1 (sequence is synthesized)
tcattttaaaaagttatttcagtaggcaatgcatcttcatgacttttacatatgagttttattttttattacttttgaagaaaagtctgtagaaacctacttttcaaggcatctgaccca

SEQ ID NO: 914927 - DNA, 120 bp, Artificial Sequence
  ENSG00000286028_2 (sequence is synthesized)
accattgccttggatggcagcaatccagctcaggcacagcatcaccgccgcccggccgggaagaagacgccggctcgggcagcccgcagccttcgagagaagatgcctgagaagcgcggc

SEQ ID NO: 914928 - DNA, 120 bp, Artificial Sequence
  ENSG00000286028_3 (sequence is synthesized)
gtcggcgtgggtcctgcgcagcctgccccgcgagcgcccgctgcaagtgcgaggaaacccgcggtttctccagatacagttaaactgttagctctctctaggagtcacagaagatgaaac

SEQ ID NO: 914929 - DNA, 120 bp, Artificial Sequence
  ENSG00000286028_4 (sequence is synthesized)
ctgtatgctgtgattcactgtgtctatttgccatcgtctagtagagtattcaccaagctagcaactcagttgagctccaactcaaccaatgaattgcctgcctgtcacaacgtgttgggg

SEQ ID NO: 914930 - DNA, 120 bp, Artificial Sequence
  ENSG00000286028_5 (sequence is synthesized)
taccaacttgagactgcaattttttctatgagtctagttactaggcagtgtagttagctgattgctaatagtaccaatcactaaccacacggccaggtaaaaagatttgggaattcgtcc

SEQ ID NO: 914931 - DNA, 120 bp, Artificial Sequence
  ENSG00000286028_6 (sequence is synthesized)
aaatgagctgcctgtgcatcatcaatgtgcgtggggaagaggggtgttggaaaatgctgatttcatccattgcctattaattgctcagccaaaagaaaaaaatcaacatttcagctacta

SEQ ID NO: 914932 - DNA, 120 bp, Artificial Sequence
  ENSG00000286028_7 (sequence is synthesized)
agtttacaatgtatgtaatgtgtatgtatgtggggttttgttttgtttttttttcaatattccttcaggctcttaaccaaaattttagatataagggggaatatgatttttttcttagct

SEQ ID NO: 914933 - DNA, 120 bp, Artificial Sequence
  ENSG00000286028_8 (sequence is synthesized)
gactgatgtatgttattatatgaacatgtgattattaacttcttgagactatattgttagtaatattttgaaagtaatattgttagtaatatttcgaaagaataaagtgccataaagaca

SEQ ID NO: 914934 - DNA, 120 bp, Artificial Sequence
  ENSG00000286024_0 (sequence is synthesized)
agcgcctcccaccccagagacctttggtcgcagcctggagatcagctcagacaagaaaacaaccagggaaggcacacagccctgtggggaggcgttggggcgtgaggttgagagagacag

SEQ ID NO: 914935 - DNA, 120 bp, Artificial Sequence
  ENSG00000286024_1 (sequence is synthesized)
agtggcctggcctggcctgccctgtgagctgggtgagttggcactgattctggaagatggacgtgaatgggcgtggtcacttgtcgctagactctgggaaacgctgctgctgtttgacat

SEQ ID NO: 914936 - DNA, 120 bp, Artificial Sequence
  ENSG00000286024_2 (sequence is synthesized)
tttgggaagcacagcaatccccatctcttatttttttcaactttcattccaagaaaataggaccttgagtccaattcccagagctgagacttgaggtccaactctgccttcacctgcacc

SEQ ID NO: 914937 - DNA, 120 bp, Artificial Sequence
  ENSG00000286024_3 (sequence is synthesized)
cggccctggaggtctgggcccctttattccagctcccgcacaggctgatgccccaccgcaccccagggctccgctccccaaatcacaacctccccacccccacgcctccctcattacagg

SEQ ID NO: 914938 - DNA, 120 bp, Artificial Sequence
  ENSG00000286027_0 (sequence is synthesized)
gaataccaaaccttgtgaagatgagcgttgggaaaggagtaggaaggtcccaatttggaattttgacatcctaaaagccttgggtgccgcagaatgagtaagctggagggtactgtgtaa

SEQ ID NO: 914939 - DNA, 120 bp, Artificial Sequence
  ENSG00000286027_1 (sequence is synthesized)
agacctcggctactgcagcagagaaacagatcaaaaaagtcaagaccggcgagaggaaagtgattgaaaggccatcactgaaagaggtgacaagcttggatttggcagggcaggagggat

SEQ ID NO: 914940 - DNA, 120 bp, Artificial Sequence
  ENSG00000286027_2 (sequence is synthesized)
gcagagagggacggatgtgagagtccacaggaagaagccttctgattgaaagggtgcttggctgtggatgtgagggacagaaaggggtcgaggctgtcactgagatcctcagcttcagca

SEQ ID NO: 914941 - DNA, 120 bp, Artificial Sequence
  ENSG00000286027_3 (sequence is synthesized)
aggggatgcatggtgccttaatttactgtaagaacatggaagaggcacaggtttagggggcgatatggagccccattgtggaaatgcagggtctgaggagtgcctggccttctgctggcg

SEQ ID NO: 914942 - DNA, 120 bp, Artificial Sequence
  ENSG00000286027_4 (sequence is synthesized)
ctgcccaggagagcactggaggagcagacgtggcctccgggagatgctgagccagggctgaggacatgagatgcgcagggagggcagacactcccaccaggtcagaggagagacagggag

SEQ ID NO: 914943 - DNA, 120 bp, Artificial Sequence
  ENSG00000286027_5 (sequence is synthesized)
gccagccctgccaaagccaggcctcagtttatttgtagagtgagagcttgaatttcaggatcacaaaaggttttttccaagagccaaaaggacttagtttctaactgttctcctccctcc

SEQ ID NO: 914944 - DNA, 120 bp, Artificial Sequence
  ENSG00000286027_6 (sequence is synthesized)
tttttgtggctgacaatgaacaacctaatccccttcctttctgaataattctccctgcccagtgactcacccaggtgcagatgagacacagagctcatggttgcctcctgtgaagtgcag

SEQ ID NO: 914945 - DNA, 120 bp, Artificial Sequence
  ENSG00000286027_7 (sequence is synthesized)
gaaggatggagcagacagacccaaaagcactggcctcccagatgaatcaggagggatgtgcaggctgggtgacgtctgccccggaaccaggaaagtgcggctgcttcctccacaccccgc

SEQ ID NO: 914946 - DNA, 120 bp, Artificial Sequence
  ENSG00000286027_8 (sequence is synthesized)
ccgccgcccaggacccagggcccttctgaaaagtgagcattgtgttgttctttagacttattttatatgaaagcacatcacgctctaagaagagtcacccaggctttctgttctcaggtg

SEQ ID NO: 914947 - DNA, 120 bp, Artificial Sequence
  ENSG00000286027_9 (sequence is synthesized)
gagcctccctacaccctacgcacacggcggctgttccccacgacacagcggggggcaaatgaccaccaggagccagggagtcccagggaaaggacgcagatggctcgtgtcctggaattt

SEQ ID NO: 914948 - DNA, 120 bp, Artificial Sequence
  ENSG00000286027_10 (sequence is synthesized)
tgaaatcatcagcaaatgacgcccgagtctataagggacctcagcgcaggggctggatgagacagggtgggcagccacaaaacagggtggtgaaggcccgaggccaggagggctgggtta

SEQ ID NO: 914949 - DNA, 120 bp, Artificial Sequence
  ENSG00000286027_11 (sequence is synthesized)
gcactcggccaccagagggaagcaagcaagctccctccctctctctctttctctctgtctatgtgtctttctctctccctctctgtctctctccatctctctctccacccacacctcctg

SEQ ID NO: 914950 - DNA, 120 bp, Artificial Sequence
  ENSG00000286027_12 (sequence is synthesized)
aggattgttgggttttcccatggactagggttagacagccagcgagtctgaacggaaggcgccaggtgtggcagtggggaagtgaggtggggcctggaacacaagggcaagggcctctgg

SEQ ID NO: 914951 - DNA, 120 bp, Artificial Sequence
  ENSG00000286027_13 (sequence is synthesized)
gaggaccgcgcaggctcggcacactgagcggactgactgcagaccctcctcccacaccagggggaccacctctctgtgcaaagatgtcctcacttgatattctcaattctttgaggtcaa

SEQ ID NO: 914952 - DNA, 120 bp, Artificial Sequence
  ENSG00000286027_14 (sequence is synthesized)
ggttttattaacactccctgaaaagtgggagagcttagtgataagactgtatcatttttgcaagacacaaagcaagcacagctggatggcatgtgccagctccctcaccatgctgagcac

SEQ ID NO: 914953 - DNA, 120 bp, Artificial Sequence
  ENSG00000286027_15 (sequence is synthesized)
ttttactcacatctcacccctgcagacagatgccagtgtcctcactcacccactggggcagacattattagttgccaatgcaagacccatttcctcacgtcctaactaatagaaccccaa

SEQ ID NO: 914954 - DNA, 120 bp, Artificial Sequence
  ENSG00000286027_16 (sequence is synthesized)
ctgtgtccaggcaggtgacgtgcccagctaaaaatactcaccttttcagactcccttgaagttagtagcggccacgtgatacttccaacaaataagacatacacagagatctgctggggc

SEQ ID NO: 914955 - DNA, 120 bp, Artificial Sequence
  ENSG00000286027_17 (sequence is synthesized)
ttctgtgaaaacttttacttccctgaaacgggtaccaccttccttctcccattctttcttcctccttgaagcacagaagcaatgcctggagctgcagcggccattttgtgattgtgaagc

SEQ ID NO: 914956 - DNA, 120 bp, Artificial Sequence
  ENSG00000286027_18 (sequence is synthesized)
aatgacctgaggaatgaaggccaacatcaaggatggcaaaacagagagaggaaaagagcaattgtcccctgatggcatggctgggccactgccccaaccctgtgaggccatgtgactcct

SEQ ID NO: 914957 - DNA, 120 bp, Artificial Sequence
  ENSG00000286027_19 (sequence is synthesized)
tattacatgagcacaggctagtcggggtttgtgctatctgcaggtgaatgcttggagattgtacaaaagtttatactggaggctttggaattcaatagaagtagacctgggttaaagtca

SEQ ID NO: 914958 - DNA, 120 bp, Artificial Sequence
  ENSG00000286020_0 (sequence is synthesized)
cccaaagtaaaggtgcagtggcatgtgctgtagtcccagctactgagaaggctgaatcaggaggattgtttgaagccagaagttcaagttcaacctgggcaatatagtgagacaccatct

SEQ ID NO: 914959 - DNA, 120 bp, Artificial Sequence
  ENSG00000286020_1 (sequence is synthesized)
tgagtcctttctcaacctcagaaagggtcattatctcttcaccttacaatgagaaacctcaactactggtcaagcttaacagctaacatttctgagtgtgacttctcacaacctatgcag

SEQ ID NO: 914960 - DNA, 120 bp, Artificial Sequence
  ENSG00000286020_2 (sequence is synthesized)
ttcttactttgatgacgatgtctctggataaagaccatcttcccagttgcaggaaagaaaactggggatcaaaaggttacctaaaccaggcatggggacacaggcctatagttccagcta

SEQ ID NO: 914961 - DNA, 120 bp, Artificial Sequence
  ENSG00000286020_3 (sequence is synthesized)
cttgggagtttgaggtgagaggatcccttaagcccaggagttcaaatctagcctgggaaacacagcaaaacccccatctctactaaaaaaaataaaataaatgttacctcctgttgagac

SEQ ID NO: 914962 - DNA, 120 bp, Artificial Sequence
  ENSG00000286023_0 (sequence is synthesized)
gctgcatttctttcctccagatacagggcggttcatctctcacatgagggtcttacgatctacttgcaggaaaggcccattaatcccaagactacacatgtggcatttttaaagtatgga

SEQ ID NO: 914963 - DNA, 120 bp, Artificial Sequence
  ENSG00000286023_1 (sequence is synthesized)
atccagaacagaactcgataccacaggtgagatctgatcctagccttctcttttcttgaaaggcatgtaaattccatttgggaagatattttgaacttggagaactgatgacagattgac

SEQ ID NO: 914964 - DNA, 120 bp, Artificial Sequence
  ENSG00000286023_2 (sequence is synthesized)
cgatgcgaggacacagtgagaagatagcgtccacaaaccagaaaaagagagctcaccagaaaccaaccctgacaacatcttgatcttggagttccagcctccagaactgtgagaaaaaaa

SEQ ID NO: 914965 - DNA, 120 bp, Artificial Sequence
  ENSG00000286023_3 (sequence is synthesized)
atttttgttgtttaagtcaccagtctgtggtattctgttatggttgcccaagcagactaatacagtatacaaaaacttgtattgtcacaatttacatgtttatgcattgtatgcccacaa

SEQ ID NO: 914966 - DNA, 120 bp, Artificial Sequence
  ENSG00000251144_0 (sequence is synthesized)
ttgggactattacccagccttattgcaatggaagccttgttcatacagcgttccagagaggacttctataatctcctgcctcagacataattaaggtaaggatcaagacgagatcacact

SEQ ID NO: 914967 - DNA, 120 bp, Artificial Sequence
  ENSG00000251144_1 (sequence is synthesized)
tcttattctgtcctaataagagacagagacgggcacacagagacacagaagaaggccatgtgttgatggaggcagagactggagtgatgccgtcccaagccagggagtgcctggctccgc

SEQ ID NO: 914968 - DNA, 120 bp, Artificial Sequence
  ENSG00000254031_0 (sequence is synthesized)
gtgcttttgaggaaggtttggtggcaaaggtagatttttagccttagcatttcacaactggtgggcagaatttagatgggcagaagcattttaggagattttcagattgagaaatggagg

SEQ ID NO: 914969 - DNA, 120 bp, Artificial Sequence
  ENSG00000254031_1 (sequence is synthesized)
catcgaggtcaaatcttttacctaaaccactgagcagcagagacaggaaatcaagttctcagcttgttaattaagttaaaaatacagaagtttcctggttattctctcatcagtttcaga

SEQ ID NO: 914970 - DNA, 120 bp, Artificial Sequence
  ENSG00000254031_2 (sequence is synthesized)
aggcagaggtcaagactgacagcaactgcgcatcaccaggcggaaattgctaagttctggaggccggcgctgatgcgagactggggcctgctggatctgtccctggtcacagagcagctg

SEQ ID NO: 914971 - DNA, 120 bp, Artificial Sequence
  ENSG00000254031_3 (sequence is synthesized)
tgcgctgtcaaagtgccgagcgctgttacaggtttttgcagttgttgttatttaaacctcaatctaaaaatctagtttaagaagtgggaatgtttgtgatacacgtgaataaaccaaggg

SEQ ID NO: 914972 - DNA, 120 bp, Artificial Sequence
  ENSG00000254031_4 (sequence is synthesized)
gaagaactcagaagttacatcatccatgaagggtgaaaatgtgatgaactttcactgctccaaagcactataaaccaaaattttgcctgatgggaaaacaatgacacatccttcctgttt

SEQ ID NO: 914973 - DNA, 120 bp, Artificial Sequence
  ENSG00000254031_5 (sequence is synthesized)
agtgtgcttttgaggaaggtttggtggcaaaggatttgttcatgcctgtttatcaaatggatggaagaactatcccctgccttataggatcattgtgaaaatcaaaataaggcacagcat

SEQ ID NO: 914974 - DNA, 120 bp, Artificial Sequence
  ENSG00000254031_6 (sequence is synthesized)
tgaaacctagtaaactgatggatgctacaattgctattattaaagaggagcccttgaggtcgttggacaagtgggtgccatgaacagaagctggcttttagaagattactctgacacatg

SEQ ID NO: 914975 - DNA, 120 bp, Artificial Sequence
  ENSG00000254031_7 (sequence is synthesized)
catctgtgaggaagaggaaatactaagacacataacaacttcatctctctgagtggtctggcgctgacgtttcaccacttcaacggtttggctcgtgattcagtcatgacagagtcacac

SEQ ID NO: 914976 - DNA, 120 bp, Artificial Sequence
  ENSG00000254031_8 (sequence is synthesized)
agagctattctggcaagagcaagaatagaatctgcaggataagcccagagagctgtgtgcccaccacacaataggggacaacttgccagtgagaagtcaagccctggtttattgtgaggc

SEQ ID NO: 914977 - DNA, 120 bp, Artificial Sequence
  ENSG00000254031_9 (sequence is synthesized)
atgaaatatcaacagctgaaatttttgctctgccaactagaaatgaggcaagacatgttaaaaaaaatttttttttttttttagtaagactgggaatgtagaaatgcagcagcctggaca

SEQ ID NO: 914978 - DNA, 120 bp, Artificial Sequence
  ENSG00000254031_10 (sequence is synthesized)
gacttgcctgctggagctctgttccaacagaacgtgaattcctctaactgaaatcacttacatgtcatcctagactttggaatctgctgaaagatgccctgagtctgtagaagtaataga

SEQ ID NO: 914979 - DNA, 120 bp, Artificial Sequence
  ENSG00000254031_11 (sequence is synthesized)
tgccctgagtccaagcatctcattagatctcctcttgactattactttcatctactggtttaccgttatattatcaacacctactactataatcaacacctgacacatagtaggagtaca

SEQ ID NO: 914980 - DNA, 120 bp, Artificial Sequence
  ENSG00000254031_12 (sequence is synthesized)
gtaaaagtttaggcaaaaggtcccaaaacctgggtttttgtcttgtttctcatggccaagaggaaatcccagaggaaaagctgaatacaaggaattaaaggatatgaggaaccaaagaag

SEQ ID NO: 914981 - DNA, 120 bp, Artificial Sequence
  ENSG00000254031_13 (sequence is synthesized)
aaatacaaggaaccaagtcagccatttcccagtggttacctagagcttgaagttctgcatctcactcccatggctgttacatgttgcttggcaccagttctcctcttcttgcccttattc

SEQ ID NO: 914982 - DNA, 120 bp, Artificial Sequence
  ENSG00000254031_14 (sequence is synthesized)
tcgctgcctgctcctcagaaatctgtgtacacacctccatgtctagacttcttcctcttatctaccactgggtgctgttcttcttggttgccctgtggagtggggtgtctaacccctggt

SEQ ID NO: 914983 - DNA, 120 bp, Artificial Sequence
  ENSG00000254031_15 (sequence is synthesized)
gctgatctttctcacccagcccattccaccactggccatgacctgatttggcagttacttgaggaaagggatggccagtataaaaccttcaatgaaagagatttatctatgatttttaaa

SEQ ID NO: 914984 - DNA, 120 bp, Artificial Sequence
  ENSG00000254031_16 (sequence is synthesized)
cagaatttagatgggcagaagcattttaggagattttcagattgagaaatggaggcatcgaggtcaaatcttttacctaaaccactgagcagcagagacagcttcctatcccatgtttca

SEQ ID NO: 914985 - DNA, 120 bp, Artificial Sequence
  ENSG00000254031_17 (sequence is synthesized)
ggggtagctggagctcttggaggcctcgcagagagatggccttgcccatgatgaagtcctctggtgactctgcaggactggcttcggtcttcaaattggatatttccactggcacataac

SEQ ID NO: 914986 - DNA, 120 bp, Artificial Sequence
  ENSG00000254031_18 (sequence is synthesized)
taagcctcagtcaatggaactatacatccataagtctcagaaagcagaaggatggcttcctaaatgatttttccttatgctatatgtgccaatagatatcactaatacaatcagtacaaa

SEQ ID NO: 914987 - DNA, 83 bp, Artificial Sequence
  ENSG00000246145_0 (sequence is synthesized)
aatccgggcgaccagaggaaaggccggcagagggcggcaagactatacagtgcccagagaaagcaggcaacactgggaggcca

SEQ ID NO: 914988 - DNA, 120 bp, Artificial Sequence
  ENSG00000246145_1 (sequence is synthesized)
aggcgggaagatcccttgagaccaggagtttgagaccagcgtgaataagatgggtgaaaatgctgtgatacctttcctcagccctcaaaagggtcatggctgccgggagtggtggctcat

SEQ ID NO: 914989 - DNA, 120 bp, Artificial Sequence
  ENSG00000246145_2 (sequence is synthesized)
ccaatggagcatttcaaaaaaaaagaaagaaagaaagaaaaaggaggggggttgtcatggttgacactcctataatgaaagacaggttaacaagacaaaagcacggcaaatttattcagt

SEQ ID NO: 914990 - DNA, 120 bp, Artificial Sequence
  ENSG00000246145_3 (sequence is synthesized)
cagaattttgcgtgacacggaagcattcacaatgaagactcaaagacccaagggaaaactgtccatttttatgcttagattcaatgaggagtggacaaccatgtaaaaatgggattggac

SEQ ID NO: 914991 - DNA, 120 bp, Artificial Sequence
  ENSG00000246145_4 (sequence is synthesized)
aaaaaggaaataatctaatgtaatagattgaaggggaacaacccagcaaggcctgactatttggattcttcttggcctctctgtgtggcattccttcctccctggtatagagcaggaccc

SEQ ID NO: 914992 - DNA, 120 bp, Artificial Sequence
  ENSG00000246145_5 (sequence is synthesized)
cttctggaataagggttttatgatctactatcagacaaggtagaccagagaatttctttatggccagctcatatgcagaaaggcaatggaagttgagagaaatatgtttagtttctatga

SEQ ID NO: 914993 - DNA, 120 bp, Artificial Sequence
  ENSG00000246145_6 (sequence is synthesized)
cccactgtggggcagaggaattctgatttctatggcctgccttagggtagaagggggaccaggagacaggagggcaggagaagcccagagagagactttgtttctagggtccttccagta

SEQ ID NO: 914994 - DNA, 120 bp, Artificial Sequence
  ENSG00000246145_7 (sequence is synthesized)
tccttcggctcaaagtactcagcatatcaaagcaccttactttggggcattgtttttctgagctccaatgctgtaaaagacacaatggtttttattttccaaaaattgctagatgcagct

SEQ ID NO: 914995 - DNA, 120 bp, Artificial Sequence
  ENSG00000246145_8 (sequence is synthesized)
ttttgcatttgccacaatcttattaccacctgtaagtaagcaccactagctgatagtttttattcataaaacatcatcattgtatcctaagagaatgagattggtattggtctttagatt

SEQ ID NO: 914996 - DNA, 120 bp, Artificial Sequence
  ENSG00000246145_9 (sequence is synthesized)
ttacttctataagcagatcagctacatggatgaaagactgatataaaatggaaagctgaatttccagaattttagggatatttgcactcaaagaatctaataacagaatatttagatctg

SEQ ID NO: 914997 - DNA, 120 bp, Artificial Sequence
  ENSG00000246145_10 (sequence is synthesized)
tctgcttattaatctatcattttaattacattttaatttatgaatttaaagttacaatgagtaaaaaatccttttaggtttttattaatcagtaacacctgaacagtttttgtaaattgc

SEQ ID NO: 914998 - DNA, 120 bp, Artificial Sequence
  ENSG00000246145_11 (sequence is synthesized)
gagtagatttactccagacgaggcagctgagtccggaatacctttcccctaaggaaagcaaccttgttgccatgcagccttcaatttgcctttgtagtcatagaccatgtatgaaatatc

SEQ ID NO: 914999 - DNA, 120 bp, Artificial Sequence
  ENSG00000246145_12 (sequence is synthesized)
aatcctttctaaatgaagtgactgccaatcaaatctttcttttaaacttcccactagagcaatattaagaatacacagggaagttatgaagttgtgattatgccgaataaacacaaattc

SEQ ID NO: 915000 - DNA, 120 bp, Artificial Sequence
  ENSG00000246145_13 (sequence is synthesized)
ctggcccttcttaaccatgaattatttctaaacattattaacccattattttttagaacacatccgtgaaaagtgaaaacaatggatagaaaaaccaaaactctgaccacatatgtggtc

SEQ ID NO: 915001 - DNA, 120 bp, Artificial Sequence
  ENSG00000246145_14 (sequence is synthesized)
agttctgtagcctacacttttcctttttgaagtgtttttatttgccaaaggaagacagcaaaggaaagaacctcttagtggcaagtaggtgtcactgtgtacttgtcagccactgagagt

SEQ ID NO: 915002 - DNA, 120 bp, Artificial Sequence
  ENSG00000246145_15 (sequence is synthesized)
gcaccagtcttgtcagctccctgggccgcttggggatgcagaagattcagttgcttgtagcataggtgctttcccccaggcctaaataggacttatttagaatgtataaataatgttcct

SEQ ID NO: 915003 - DNA, 120 bp, Artificial Sequence
  ENSG00000246145_16 (sequence is synthesized)
gtgaatttttagctgaggaagctgacttcttatggtgtatcctggattttcttccctggaaagcctgtgaatttcaaaggaaacaaagtttaggtctcaggcttccccttatttatcttg

SEQ ID NO: 915004 - DNA, 120 bp, Artificial Sequence
  ENSG00000246145_17 (sequence is synthesized)
agaatgaagggttttgaagaggtggcctttgcaattcatctctatgatccttttcttttgtttcaaacctacatacttcaggtgctccaatgttgttttcttataaagtgctttctttcc

SEQ ID NO: 915005 - DNA, 120 bp, Artificial Sequence
  ENSG00000246145_18 (sequence is synthesized)
tagttgttgattaaagttttttccagtatatctcattttacaaacctccccctctttctgagtcatttatctcatttcctaggctgattgtatgatttcacttagtgaaacagcttcctg

SEQ ID NO: 915006 - DNA, 120 bp, Artificial Sequence
  ENSG00000246145_19 (sequence is synthesized)
tgtgcacaaggagtctgtgactatacagatgtcaatcagtttttaattatgtggaggctgattattgtgtttcatagcttatttgtaattcttttcttttttctttgcttgcccttaaag

SEQ ID NO: 915007 - DNA, 120 bp, Artificial Sequence
  ENSG00000246145_20 (sequence is synthesized)
agagaatgggcagcgtatagtccattttattgtttgttacttgttctggaaaaatgtcatagagaagaagatagaggagatatttataaaatatttatgtttataaagttgaatctgaga

SEQ ID NO: 915008 - DNA, 120 bp, Artificial Sequence
  ENSG00000246145_21 (sequence is synthesized)
atggaaagattgtggattgactatctcttttctagctcaagatctagaactgatgatgtcctttgattgttacagttacagacaagttttaaagacagcttcaaaattaccttccccaaa

SEQ ID NO: 915009 - DNA, 120 bp, Artificial Sequence
  ENSG00000246145_22 (sequence is synthesized)
taataacattgggacaggtttgtgcttcctagtttgatattgcttcagagaaagttagtgaggaaatgttaatacaaggaagtaaagtaaaagaaaacaaaaaccaaacactactagtat

SEQ ID NO: 915010 - DNA, 120 bp, Artificial Sequence
  ENSG00000246145_23 (sequence is synthesized)
gtttagtaattattattctgagtatgagtcttgggacttttggcctgattacctggagacaaattccctaagggatcatcaccccacctgaaaaatgggctaacatgatttcttagtttt

SEQ ID NO: 915011 - DNA, 120 bp, Artificial Sequence
  ENSG00000246145_24 (sequence is synthesized)
agagttctgtgagttggagattagttcatcaagcacacttgcaaagaactctataggggtagtcaggagacagcctccagctccatctctgtcactccatagttgtatatggctttggcc

SEQ ID NO: 915012 - DNA, 120 bp, Artificial Sequence
  ENSG00000246145_25 (sequence is synthesized)
agtcactttatctctctgtgaatttccttatgtatgaagtgagcttcaccagcttctctctgtgcctcttccagctccttgttagctgtccgtacttttgttaagatggcctcaggagaa

SEQ ID NO: 915013 - DNA, 120 bp, Artificial Sequence
  ENSG00000246145_26 (sequence is synthesized)
cagggtaggtgatggtgaagcatagacttgaagtcagatgtttgtaattggggttccatgggtgagcttcagagggacatgaatcccttgaagttttatgcaaatgtgtgtatgcatgtg

SEQ ID NO: 915014 - DNA, 120 bp, Artificial Sequence
  ENSG00000246145_27 (sequence is synthesized)
catttttatgaatagaagattttttcccatcagattctcagtggcatctgtgactccctatccctctttcacaaggttaagaactactgtattgtaggagagggagataaatgaaggctg

SEQ ID NO: 915015 - DNA, 120 bp, Artificial Sequence
  ENSG00000246145_28 (sequence is synthesized)
gagggagtaactggtgaaggctttatgaaagaggaagttcctgagttggctttggagcctgagttttaatagataggagaaggaaaggagcattccagtagatggtaacaatatgaataa

SEQ ID NO: 915016 - DNA, 120 bp, Artificial Sequence
  ENSG00000246145_29 (sequence is synthesized)
agggatgtagctaattcttatggcaagtataatatgtcagtcactgattgtctttataaatcccacaacaggcctaagaggtagatgttatcaatatcctcatcttatagatgagaagac

SEQ ID NO: 915017 - DNA, 120 bp, Artificial Sequence
  ENSG00000246145_30 (sequence is synthesized)
tgagggtcataaagattaagttattaagttactatgcagttaatagtttgtagaatcaggatttgaacctttgcagtccgatctcagagtccatgcacataaacactacatcataaagct

SEQ ID NO: 915018 - DNA, 120 bp, Artificial Sequence
  ENSG00000246145_31 (sequence is synthesized)
tcttctttctggttcactagcaatttgatttgcctagaatagatgatttgtattggggacaggtaagaaataggcttggcaaatggtcaggatggtgccaactgtggtgcaactttagga

SEQ ID NO: 915019 - DNA, 120 bp, Artificial Sequence
  ENSG00000246145_32 (sequence is synthesized)
tcaagaagaagaatttcaatttgatgctataggcaatagggagtcatggaaggttttagaccagtgaagacataaccacaatggtattttcttaactttattatttaaatcttccatgtt

SEQ ID NO: 915020 - DNA, 120 bp, Artificial Sequence
  ENSG00000246145_33 (sequence is synthesized)
cttactaattttgtgttttcttgatctatcagttactgaaagatgtgttgaaactttctactttgattataaattcccattctgtatttgatgctctaatattaaaagcataacattttg

SEQ ID NO: 915021 - DNA, 120 bp, Artificial Sequence
  ENSG00000203280_0 (sequence is synthesized)
acagacgtcgactccagcaaaaatgtcctgactgacttcaggagagaggaattattgctacgtgcctctttcccagtgaagaaaatctctgttggctgcgagcagagaagcggcggaagg

SEQ ID NO: 915022 - DNA, 120 bp, Artificial Sequence
  ENSG00000203280_1 (sequence is synthesized)
attcccgactccgggaagccaggtgtcggaaggaggaagtacgcttgaagggggtccggctggccgactctgcactcgtccgttcgtggcccaccgtggtggtcaccaaattgagggctt

SEQ ID NO: 915023 - DNA, 120 bp, Artificial Sequence
  ENSG00000203280_2 (sequence is synthesized)
cctggaaggacctcctcacggtgcccatccactgggtcatgtgggtctgggccactgtgagtttatctcccagctgtctctccctccctctctggaaggcaacactgatccaggatctca

SEQ ID NO: 915024 - DNA, 120 bp, Artificial Sequence
  ENSG00000203280_3 (sequence is synthesized)
caacaccgtcagtcagaaggcagcggatggcacagggcttccgcgtaaggcctgcatcgcctgagtcatggttttctcatcttgtatgaggcccacccccttcaaaaggttgtgacaaaa

SEQ ID NO: 915025 - DNA, 120 bp, Artificial Sequence
  ENSG00000203280_4 (sequence is synthesized)
ccccttcaaaaggttgtgacaaaaaaaacaactgagataatttgtgccgctggcacatagttaacactcaataaggccgggcgcagtggcttacacctctaatcccagcactttgggagg

SEQ ID NO: 915026 - DNA, 120 bp, Artificial Sequence
  ENSG00000223438_0 (sequence is synthesized)
ggagtaggctactgttgctctagggtggcaggggttagggaaaaatcaggagaggctgtaggctactgttcatctaggatggcagagtttagtgaagaagaggaagacactgtacgctac

SEQ ID NO: 915027 - DNA, 120 bp, Artificial Sequence
  ENSG00000223438_1 (sequence is synthesized)
tgttgttctacaatagaagatgttcctgaagaaataaaagaggctatagcctacttttgctctaagatggcggagattaacaaggagccagaagggaatataggccaccattgctacatt

SEQ ID NO: 915028 - DNA, 120 bp, Artificial Sequence
  ENSG00000223438_2 (sequence is synthesized)
agcatgaaatggagaaagaaaactacttgtgaagctaaagaaggtgaaactgacgagttgttgaaggcagcaaagaagataagatcatttgttcagcagaattcagaaagacgtaaagcg

SEQ ID NO: 915029 - DNA, 120 bp, Artificial Sequence
  ENSG00000223438_3 (sequence is synthesized)
gggaaaaagtcaactgtattaattttttattaccacagtaataaaaaaagggatgaaaatcagccaaatgaggatgaagacagccacgagtaatctcccacctcaagtgattctgagagc

SEQ ID NO: 915030 - DNA, 120 bp, Artificial Sequence
  ENSG00000223438_4 (sequence is synthesized)
tcatcagaagaccaagacctatctcatctctaggttaacctctagaaatggtctcctgtgcagagaaactacatattgcaccaagattcttggatgttggtgattaaaattcaaccaaaa

SEQ ID NO: 915031 - DNA, 120 bp, Artificial Sequence
  ENSG00000253103_0 (sequence is synthesized)
gggggaaagggagagtatcatggttacagctggatcacctaaggcagagagggaaggaaccaacaggtatatgaagaagactgtatttcctcctcaggaagaaaaaatcacctataatct

SEQ ID NO: 915032 - DNA, 120 bp, Artificial Sequence
  ENSG00000253103_1 (sequence is synthesized)
agttttcagaacagcaagcactctcaaaaccatttctatcttacaccttcagagaagccagccttcattaaagactgaatgaagtaaaataaagacttaacacagactggcaaattggat

SEQ ID NO: 915033 - DNA, 120 bp, Artificial Sequence
  ENSG00000253103_2 (sequence is synthesized)
gcactgggggaaagggagagtatcatggttacagctggatcacctaaggcagagagggaaggaaccaacaggtatatgaagaagactgtatttcctcctcaggaagaaaaaatcacctat

SEQ ID NO: 915034 - DNA, 120 bp, Artificial Sequence
  ENSG00000253103_3 (sequence is synthesized)
ttttcttatggtaaactgcaatggcctgtaccaacataattatttaaagtaatttgtagcatatgtccaagcaaagagctgcaatttaaataaggctattttcaaaggggagtttgcttt

SEQ ID NO: 915035 - DNA, 120 bp, Artificial Sequence
  ENSG00000253103_4 (sequence is synthesized)
tccttttcctacattgcagcattccaggaaattgtggagctctatgaagaagatcaagtattttcttatttttgaagatattgcggaaataaataaaacagcatctagataagtgcaaaa

SEQ ID NO: 915036 - DNA, 120 bp, Artificial Sequence
  ENSG00000253103_5 (sequence is synthesized)
gggggaaagggagagtatcatggttacagctggatcacctaaggcagagagggaaggaaccaacaggtatatgaagaagactgtatttcctcctcaggaagaaaaaatcacctataactg

SEQ ID NO: 915037 - DNA, 120 bp, Artificial Sequence
  ENSG00000253103_6 (sequence is synthesized)
cgatgaattttagccaaattcaagaggccttgaatttgaaattgtcactcagatttgactaagtcaggtagagttggtcaaatctgatgggagaaagaccagaacaaacaacaacaacaa

SEQ ID NO: 915038 - DNA, 120 bp, Artificial Sequence
  ENSG00000253103_7 (sequence is synthesized)
aaatctcaacaatatgatcactgggtgctccaatggagaggagcatggactggatgaatgacagaataagactgacttgaacagacgaaactcaaactctggaaaagaagccagatcact

SEQ ID NO: 915039 - DNA, 120 bp, Artificial Sequence
  ENSG00000253103_8 (sequence is synthesized)
cactattactagtgatataaaaattgcagtgctggcatttggaggatgtagagtctcagaataatccacatctttctacgtgcagcctaagaccctgaccctcaccttgacagtcacaca

SEQ ID NO: 915040 - DNA, 120 bp, Artificial Sequence
  ENSG00000253103_9 (sequence is synthesized)
tgatatctttttattttctatgtttagatatgtttagagataaaaatacttgcattacattgtattataactgtttaccatattcagtacaataacatgatgttcaggcttgtagcctaa

SEQ ID NO: 915041 - DNA, 120 bp, Artificial Sequence
  ENSG00000253103_10 (sequence is synthesized)
gagcaacaggtgatactatatagcttaggtgtgtggtaggctattccatctaggcttgaaagtacactctgatgtagagtgtgtaaatacactctgatatttgtacaatgatgaaatcac

SEQ ID NO: 915042 - DNA, 120 bp, Artificial Sequence
  ENSG00000253103_11 (sequence is synthesized)
ctaatgacacatttctcagagagtatcgccattgttaagaaacacgtgactatattactaaacttttaatgttgtataaatggagcaatatgtaattataaataattacaaatggtaact

SEQ ID NO: 915043 - DNA, 120 bp, Artificial Sequence
  ENSG00000253103_12 (sequence is synthesized)
aaggttgttataaatttgtaaactgtttagtttagaaaaaaaatctagcagtaaaatttaatgttcacttactccatctttcttactgatattaaatactattttgtttctctttgaaaa

SEQ ID NO: 915044 - DNA, 120 bp, Artificial Sequence
  ENSG00000253103_13 (sequence is synthesized)
agctggatcacctaaggcagagagggaaggaaccaacaggtatatgaagaagactgtatttcctcctcaggaagaaaaaatcacctataagatccatggctataactgctaccaagctct

SEQ ID NO: 915045 - DNA, 120 bp, Artificial Sequence
  ENSG00000253103_14 (sequence is synthesized)
gagaggactacattgagacttggcaaagtcctatagaagttttgttttcttatggtaaactgcattcattttgtgaattatgaagaatgcagtgtttcaaaatgtgtgtacatcaaagat

SEQ ID NO: 915046 - DNA, 120 bp, Artificial Sequence
  ENSG00000253103_15 (sequence is synthesized)
cctgcatgaccttgccggtgtttatttctccattttaagactctttttctttcaaccattccaaacttcagatcttacatcacaatattctatcaagaaattgcatggggaccggagtca

SEQ ID NO: 915047 - DNA, 120 bp, Artificial Sequence
  ENSG00000253103_16 (sequence is synthesized)
gggagagtatcatggttacagctggatcacctaaggcagagagggaaggaaccaacaggtatatgaagaagactgtatttcctcctcaggaagaaaaaatcacctataatgaattacaac

SEQ ID NO: 915048 - DNA, 120 bp, Artificial Sequence
  ENSG00000253103_17 (sequence is synthesized)
aggagaaattcagacatccatgccatgggtgctaatgcatttttagaagctgaaaagatccatggctataactgctaccaagctctgggctgcagtagtgtatcatccataacgcaaata

SEQ ID NO: 915049 - DNA, 120 bp, Artificial Sequence
  ENSG00000253103_18 (sequence is synthesized)
aactaatacaacatatagcattgatacaaaggatgcactaaaggatggacacaaatgaaagaactgagacatgaatttgttcttaagaaaattattctccattctttgagaagtcaactg

SEQ ID NO: 915050 - DNA, 120 bp, Artificial Sequence
  ENSG00000253103_19 (sequence is synthesized)
tttgagaagtcaactgaataggatgaagaaactgctctatgttatcaagtttttaaattttgtatttacttatttacttttgttgttacttaaatcaactttaaaataaaataaaattta

SEQ ID NO: 915051 - DNA, 120 bp, Artificial Sequence
  ENSG00000253103_20 (sequence is synthesized)
tgagcagaagaacctaggaaatacagttttcagaacagcaaggagaaagctgaagaataaaaaaggggaaagagggttgccaattatagttgatttgacatgaatatgagtcttctgttg

SEQ ID NO: 915052 - DNA, 68 bp, Artificial Sequence
  ENSG00000253103_21 (sequence is synthesized)
cctaacatcacaattgaaagaactaggaagcaagagcaaagaaggagatagagacacaaaaaactctt

SEQ ID NO: 915053 - DNA, 120 bp, Artificial Sequence
  ENSG00000253102_0 (sequence is synthesized)
ctgggcccagcgcccaaggcaaatgtaatttatcaacggcagaaagcaaagtgtgggtcacccaaagtcgctgaggctcaggtccagttcgttgccgtccagcttgtcgcggaggttccc

SEQ ID NO: 915054 - DNA, 120 bp, Artificial Sequence
  ENSG00000253102_1 (sequence is synthesized)
gcccttgctaccggccttggtcatggtaacgccggctgagcgggccccggctccggggttccggcgggtgaaaggagctgaaatgtcgcttgtcagttcagcggccccccacccaaacga

SEQ ID NO: 915055 - DNA, 120 bp, Artificial Sequence
  ENSG00000253102_2 (sequence is synthesized)
cgtcaccttccgcgaccactgagatgggctgggccagagcggcccgagcgtgtgcgggcacgccccctggtgcccagggtgatgcactgcacgtcgccgccgccggaggggtggggttgg

SEQ ID NO: 915056 - DNA, 120 bp, Artificial Sequence
  ENSG00000253102_3 (sequence is synthesized)
aggctgcgagctcggttcacgttcacccgtggcccgcgggcattattgctggcagtgccacgaggcgaaagggcacggactgggcgccagaagactgggttgacatccaatactgacctc

SEQ ID NO: 915057 - DNA, 120 bp, Artificial Sequence
  ENSG00000253102_4 (sequence is synthesized)
atcagatcaccccaatccccctgattaggagcagaagctgggtgtcctctaaaactgctccctgtcctctacttaacccccgaataaccatcatggggaaaactcttcttcctgaatttc

SEQ ID NO: 915058 - DNA, 120 bp, Artificial Sequence
  ENSG00000253104_0 (sequence is synthesized)
agtctcactaaagaactaaggatgctcttctctcctaatgaagttgtgtttacttctcaggtagggacagtgagagagaatcatgccattcaaatagaagttttattctcagcatccagc

SEQ ID NO: 915059 - DNA, 120 bp, Artificial Sequence
  ENSG00000253104_1 (sequence is synthesized)
acatcaattcaccatagtagaagctcaaaggaaggatacgtctattgagaaattgcacgccaagtaaaatcctgagataaacaactttatgcaagagaaactgacagtttaccatacatt

SEQ ID NO: 915060 - DNA, 120 bp, Artificial Sequence
  ENSG00000253104_2 (sequence is synthesized)
gtggtgtgctttctttttgtgcaaattatggaatagatgaaagtgacagagtgatgacaccacctaaatggaagcataatgtagacggttattgcagatgcctgaccacacagctctgcc

SEQ ID NO: 915061 - DNA, 120 bp, Artificial Sequence
  ENSG00000253104_3 (sequence is synthesized)
agcgcacatgcttcctgcaaacctcctgcaatttaaacccttgggctccttcaactaatgatgctaatttgccaatggagcaatggctttcttcgctaaacactcacctacaaaggagta

SEQ ID NO: 915062 - DNA, 120 bp, Artificial Sequence
  ENSG00000253106_0 (sequence is synthesized)
gcagataatttctttattgaaactatcaggaagttttactatgaaattttacatacatgatggaaagtggaagacatataccaattatattccaggaaaaaatactttaatagtattgtt

SEQ ID NO: 915063 - DNA, 120 bp, Artificial Sequence
  ENSG00000253106_1 (sequence is synthesized)
atatagtgtattggctaattccagtggatcctcatctctcactgctgacattatctccaatatttgactaaaacaaaacaaaaacaaaaatggttaaatctccaagtatacatttagttc

SEQ ID NO: 915064 - DNA, 120 bp, Artificial Sequence
  ENSG00000253106_2 (sequence is synthesized)
taaagctatataatatttttccacacaaaggaaaatattggcacacctttaatataataaagcttaacagttattaagtttttcagcaatatcaatagaaaaacttactgccagtaactg

SEQ ID NO: 915065 - DNA, 120 bp, Artificial Sequence
  ENSG00000253106_3 (sequence is synthesized)
gaaacagatttatggactgtcttgcatataactagagctaagaaccaggttcaagtaaattattaaagcagccatctgtattatgttcaccaattatagcattaactgagtggaaatgaa

SEQ ID NO: 915066 - DNA, 120 bp, Artificial Sequence
  ENSG00000253106_4 (sequence is synthesized)
gagtccttttcaattgtgagtcatagcatgttcattagtgggtcatgatgagcattttaaacattgacaagtacattgtactcaataagggtaagtactgttccattttttgttaggttt

SEQ ID NO: 915067 - DNA, 120 bp, Artificial Sequence
  ENSG00000253106_5 (sequence is synthesized)
tattatgtatgtgtgtcctaagtcacaacgtaatttgtactgtgggacagcagccacagttggaaatctactgctagagaactagtccttgagagacagcaaatgaaggtattaggttgc

SEQ ID NO: 915068 - DNA, 120 bp, Artificial Sequence
  ENSG00000253106_6 (sequence is synthesized)
tgcaaaagtaatatttacttggaaaaatgtgtggttattgagggcgagggctttctgtacctctacccttgcgagagaaataagcccaggtgtccatccttcagtttctttctttctctg

SEQ ID NO: 915069 - DNA, 79 bp, Artificial Sequence
  ENSG00000253106_7 (sequence is synthesized)
taagcccaggtgtccatccttcagtttctttctttctctgtctctctcttccttcccttccctcccttcctttcctttc

SEQ ID NO: 915070 - DNA, 120 bp, Artificial Sequence
  ENSG00000253106_8 (sequence is synthesized)
caggtgtgagccaccgcgcctggccgcatctttcagtttctgtgcttacagtaatgatgatccgtagtgtctccatacttattatatataagtggaagatttttaatacatgaattagaa

SEQ ID NO: 915071 - DNA, 120 bp, Artificial Sequence
  ENSG00000253106_9 (sequence is synthesized)
agatttttaatacatgaattagaaagttccaaagtccaaattgaacatttaaatattctttgcctaagctttttgttcccttagtatcttaaatgttaacacctaaaggaattaaggatg

SEQ ID NO: 915072 - DNA, 120 bp, Artificial Sequence
  ENSG00000253106_10 (sequence is synthesized)
gagatctaagattaatgggaatttaaaaaattgttttgtaatgtgacacaaaagccttgcttgatgtttatactaagcaaacactacactaaaattttatctgacagtcaagatacacta

SEQ ID NO: 915073 - DNA, 120 bp, Artificial Sequence
  ENSG00000253106_11 (sequence is synthesized)
aaagcaaatctattaacatttaaattaagacagtgaaaatccatttttcttaggaaactactgaatgtccctctgtatgcacttctcagaattggaactcttgattaatgctgctgatga

SEQ ID NO: 915074 - DNA, 120 bp, Artificial Sequence
  ENSG00000253106_12 (sequence is synthesized)
atgacacagttttgaaggtcacagcagctttgctaagattatattgcatagcaaattcattttattgaaatcgcttataagaaatctattgggctgggcccagtggctcatgcctgtaat

SEQ ID NO: 915075 - DNA, 120 bp, Artificial Sequence
  ENSG00000253106_13 (sequence is synthesized)
gcactttgggaggctgaggtgtgagccactgtgcccagccaggcaaaggtttttaaagtcttgcaagatctacatgattcctaccctatctcctttccagcccttccccatactgataca

SEQ ID NO: 915076 - DNA, 120 bp, Artificial Sequence
  ENSG00000253106_14 (sequence is synthesized)
agttatagctttaaaaaaaataattgccactctcctgcttaaaatcctttgggtagtgataaaatctaagcaaaatgctggcatataagagccctcacaatctgggctcactctaccttc

SEQ ID NO: 915077 - DNA, 120 bp, Artificial Sequence
  ENSG00000253106_15 (sequence is synthesized)
ccagacttgacttctgcttacactgtgcatcctactttctgccacacttgttcctctggattagccaggcccttctgcagtctgcctttgcttaaggtgtttgtttgtctttctctggcc

SEQ ID NO: 915078 - DNA, 120 bp, Artificial Sequence
  ENSG00000253106_16 (sequence is synthesized)
taactcccagtcatgggtaaacaactgaaatgtcaccttggtataactctctcctgtttcccctcaaagcagacagttgatgtgccctatggtcctggtcatagattcctacttgtataa

SEQ ID NO: 915079 - DNA, 120 bp, Artificial Sequence
  ENSG00000253106_17 (sequence is synthesized)
cagcactactatcttggactctgtctgcttatgtgctccaggagggcaggggtcctcgcctgactcactgaatgccttatctaaagtgccaggcacagtgtacctattcatctggtggat

SEQ ID NO: 915080 - DNA, 120 bp, Artificial Sequence
  ENSG00000253108_0 (sequence is synthesized)
acagtctgagatacatgaagcaaaaagcaaaatcaagaaactcatgtaattccttgagttaagggtctcaaatgttctgaaggggttgctattttttgcaaggtcaagtctgggtcaagt

SEQ ID NO: 915081 - DNA, 120 bp, Artificial Sequence
  ENSG00000253108_1 (sequence is synthesized)
ctggcttcctgaaactatagcctggtgttccatcctatagaaagggggaaagagaaaatggatgtcaagcatatgtttccaaaaatcatctaggattcccaggcaagatggctgaatagg

SEQ ID NO: 915082 - DNA, 120 bp, Artificial Sequence
  ENSG00000253108_2 (sequence is synthesized)
tgatgcattgactacaagttcacccaaagatcctaggccttgacttgatgctttgacttgatggaacttggggtggccttccttgagaaagtggcagagaagagactgggaaatggatga

SEQ ID NO: 915083 - DNA, 120 bp, Artificial Sequence
  ENSG00000253108_3 (sequence is synthesized)
aggtgaaaccctgtcagaacaaaagagatgatcctgccaattgacataaaccaaaacaaatgctaaatccatgtggctcttcagccccatcttacacatgcctcctgaatcaagagaaag

SEQ ID NO: 915084 - DNA, 120 bp, Artificial Sequence
  ENSG00000205334_0 (sequence is synthesized)
gatgcagcgtcaggcagccgctggggaggacgcggcgggagcctcagatgccacctactccccggcctctctcccagttgatgcttctattttaggcagcacattatttcctgctgtgat

SEQ ID NO: 915085 - DNA, 120 bp, Artificial Sequence
  ENSG00000205334_1 (sequence is synthesized)
tttttcagccttctaatttgggctctgagaccacctcataattccgtgtgtgttccttgacggaaggggcagcagagcacccagcactggatactcagtgtcagatgagtgaacaagcaa

SEQ ID NO: 915086 - DNA, 120 bp, Artificial Sequence
  ENSG00000205334_2 (sequence is synthesized)
atggctgatgtctggtttcaatgtttgcctacgaggagatgtactccgctcccagctcttagcctcaccatgcagtggaagggaaggaggcttctgaactggcagctctacattcttccc

SEQ ID NO: 915087 - DNA, 120 bp, Artificial Sequence
  ENSG00000205334_3 (sequence is synthesized)
ctctctgtgcaacttgtttagatcacagaactggaagggaccccaaaaatcccattctcccacccctccgattagagaggaagaaacagaggcccagactcaacagacttgccaaaaccc

SEQ ID NO: 915088 - DNA, 120 bp, Artificial Sequence
  ENSG00000205334_4 (sequence is synthesized)
atggacctggttgggggcccacatctagcactttccccagcctcacagcctgccttgtttatttgttcagcagtttttgtttcgccatggcacagcttgttccgactctggaacatttat

SEQ ID NO: 915089 - DNA, 120 bp, Artificial Sequence
  ENSG00000205334_5 (sequence is synthesized)
gagatgagccaatttttaaaaatcatagaaaataaatggtttgctcttggagctgaagggcggggcagccagggtgggagacaggttccaggccagttctggggcagaattttggcttat

SEQ ID NO: 915090 - DNA, 120 bp, Artificial Sequence
  ENSG00000205334_6 (sequence is synthesized)
cctttgctgtgtttttttattctcctgccttgggaaccaaaaggatttcagtgggatttcctgcctcgatttctccagtactatgatatggaaagactagaacattcaaccatacacttt

SEQ ID NO: 915091 - DNA, 120 bp, Artificial Sequence
  ENSG00000205334_7 (sequence is synthesized)
ctgattctcacctccaccatcattagttccattccaaactctggctcctacccattgagttcaagctacagcctgattcaactgatcaacctggggatggtggtgtcaggactagcacct

SEQ ID NO: 915092 - DNA, 120 bp, Artificial Sequence
  ENSG00000205334_8 (sequence is synthesized)
ggaccattctgcctcctctgcctgcaacatcctctctatctgcttgtgaactcttctccttcaaaacccagcggttacgtcaccacttctaaaaccttgaactgattccccacgtagtcg

SEQ ID NO: 915093 - DNA, 120 bp, Artificial Sequence
  ENSG00000205334_9 (sequence is synthesized)
gccagctactttttaaatttaaaaaagcccaaccagaataaacaggatagctaaaatgctgaatttctttgcttttttttgactggatattaactcagtgtactaatgttagctattatc

SEQ ID NO: 915094 - DNA, 120 bp, Artificial Sequence
  ENSG00000205334_10 (sequence is synthesized)
ttgtgttatttgatcataatttatttgcagatatgtaaatatgtgattaccaaaaacttgtaaatgaatacttgctaaattcaatttttttggccaacaaaaataatttatttaaacgtt

SEQ ID NO: 915095 - DNA, 120 bp, Artificial Sequence
  ENSG00000205334_11 (sequence is synthesized)
catggctggctcatttccccaaaaggcctggtacatagtaggtgctcaaaaagtatgcattatatgtataagtccgtgaggacgattacactctctgaccctggggtcaatgaagcttct

SEQ ID NO: 915096 - DNA, 120 bp, Artificial Sequence
  ENSG00000205334_12 (sequence is synthesized)
ctctgaccctggggtcaatgaagcttctgtcaaccccagttgaatgtcccatgaggggccaggctaagaatccattcaagagctgtcctaggccagatacagtggctcacacctgtaatc

SEQ ID NO: 915097 - DNA, 79 bp, Artificial Sequence
  ENSG00000205334_13 (sequence is synthesized)
aggctgaggcatgagaatcccttgaaccaggaggtggagattgcagtgagccaaaatcactccactgcactcaatggag

SEQ ID NO: 915098 - DNA, 120 bp, Artificial Sequence
  ENSG00000205334_14 (sequence is synthesized)
ctgtcctagcttcaggctttttctccctaactgggcgacatgcccattcttagcattcttagtactaagattggtgagatcctggggatggatagggcagtgtgttctgaagccctttca

SEQ ID NO: 915099 - DNA, 120 bp, Artificial Sequence
  ENSG00000205334_15 (sequence is synthesized)
aggagcaggggcagcagcctgggttctgatgcccattccaactccctctgcccctttgctcaaggcagttccccaagcagcagtctggccagctgtgggaggtgctgttcaccacttcca

SEQ ID NO: 915100 - DNA, 120 bp, Artificial Sequence
  ENSG00000205334_16 (sequence is synthesized)
agattagctcagaccttaaaaatcacagcccagctcctgcccttctcgtgccaaggaaaacagtagatgtcagaagcctccttaggtatctggaagggaacagctccttctgctccctcc

SEQ ID NO: 915101 - DNA, 120 bp, Artificial Sequence
  ENSG00000205334_17 (sequence is synthesized)
cttccttgtatgaggtcattgaatcaggatgacaaagcaaacagtgacatgtgttgggacttgttcccagactgattccaggatttctccagcccctcccacctccccaccctcagaatg

SEQ ID NO: 915102 - DNA, 120 bp, Artificial Sequence
  ENSG00000205334_18 (sequence is synthesized)
gcagacccaggtgtggacaacaaactgaatagaacttggtccttgggatcctgggaaataggggctagttgtgaggcacttcctggggtggtgaagaggaagccctggatagaccttggt

SEQ ID NO: 915103 - DNA, 120 bp, Artificial Sequence
  ENSG00000205334_19 (sequence is synthesized)
aaaagaggaaattgggatatcagccccacgggctatttgcacggtgtgttccgggcttcagcatgtttctacatattttaatgtgagtttaggagggtaggagttctttttcaacttcac

SEQ ID NO: 915104 - DNA, 120 bp, Artificial Sequence
  ENSG00000205334_20 (sequence is synthesized)
agatgaggaaacagcctcatttaaggtcagcagtttaatcagggttacatgacttaagtgtgacagagccagacttgaagtgaggtttgtgactaatgagttttgttacattttcccacc

SEQ ID NO: 915105 - DNA, 120 bp, Artificial Sequence
  ENSG00000205334_21 (sequence is synthesized)
tcaccacagttccttgaacttgtcattggtatatctgtttcaggctttctgccttgtggcataccaccatactattatttacataatatttttcttaaataaacacaatttaaaagttaa

SEQ ID NO: 915106 - DNA, 120 bp, Artificial Sequence
  ENSG00000254651_0 (sequence is synthesized)
gactttgctagagcagctcacagaactcagggcaattatttgtgtttacacatttattacaaagcatgttacaaaagatacagaaaagcagccagatggaagagatgcctagagcaagat

SEQ ID NO: 915107 - DNA, 120 bp, Artificial Sequence
  ENSG00000254651_1 (sequence is synthesized)
gcctctgacaggggcactacttggagctgatctcactcaccaagtcctgagcaagaagaaatttcacctcttctgatccaaagatcaaagcctgtgaggccctcactcctcaaggaggat

SEQ ID NO: 915108 - DNA, 120 bp, Artificial Sequence
  ENSG00000254651_2 (sequence is synthesized)
gagctggtggtagtcgtgaagtctgacagatgtgagctttggattgccttcagaggcagcccatgtccttgatctccataaggagaggaaagagctatcactagagatatttggtttcct

SEQ ID NO: 915109 - DNA, 120 bp, Artificial Sequence
  ENSG00000254651_3 (sequence is synthesized)
gtttatctggggacagtttgatttgcatctcatttacatccatttgtgctctgcatcttgaaggtccaaactctgggtgtctgagataaaacgaaattgtacaacctgctaccactggat

SEQ ID NO: 915110 - DNA, 120 bp, Artificial Sequence
  ENSG00000254653_0 (sequence is synthesized)
aaattatgagaaactgactaggcagcattttttcaaaagcagcttcaaaactataacaaagacatttttggtaaccacagcagtatttaaaaaacaaaaatttaggccgggcgtggtggc

SEQ ID NO: 915111 - DNA, 120 bp, Artificial Sequence
  ENSG00000254653_1 (sequence is synthesized)
tccgtctcaaaaaataaaaaaataaaaaaactatagtgtccagggtgcactttaaatgtattactttctcaactgatatggaaaaagttagcatttaaagacagaagcttctgtccatgt

SEQ ID NO: 915112 - DNA, 120 bp, Artificial Sequence
  ENSG00000254653_2 (sequence is synthesized)
attaattagttacctatctcaacaacttaatatctgcatgctttcttaccatttatgaagaacttttatatgtattatctcatttggtcttactgagaaaacagtattttgcctacaaaa

SEQ ID NO: 915113 - DNA, 120 bp, Artificial Sequence
  ENSG00000254653_3 (sequence is synthesized)
tagacaaaattcaaagcagatttatcaaactttctagcatccccaaatttttaaaacttcgacacaaaactttacaagcaaccacagtggcatgatattttcagtgataatcaattcacc

SEQ ID NO: 915114 - DNA, 120 bp, Artificial Sequence
  ENSG00000254654_0 (sequence is synthesized)
agtccgaggcccattaggagcacagtgaacagcagcccaggcgagcccagggaggcaagaaaatgaggctccccgtgaggtctaataaacacctctcgccacaccccaaacacatagaca

SEQ ID NO: 915115 - DNA, 120 bp, Artificial Sequence
  ENSG00000254654_1 (sequence is synthesized)
cgcaatagagcccataggtcctgagtgagtccccctggcccaccccattcagctgagatctgacaacatatgtttggggacaaacagccccagcagccaggagcaggccacatcatacat

SEQ ID NO: 915116 - DNA, 120 bp, Artificial Sequence
  ENSG00000254654_2 (sequence is synthesized)
agtcagcatcagccatggtcccctcccactctcctgggggaaaaaggtgctttacaggcagcgtggcatccgagcatccccatggcgatgctgaggtcagacctcactgtggtgatctca

SEQ ID NO: 915117 - DNA, 120 bp, Artificial Sequence
  ENSG00000254654_3 (sequence is synthesized)
cgctggggccaccggactcaggccaggctgggagtaggctgtctagccattgctggctgtcattgtcaccaagggaaggggagaagctgtgaagagttgctctggaaaaaacaaatctgc

SEQ ID NO: 915118 - DNA, 120 bp, Artificial Sequence
  ENSG00000254654_4 (sequence is synthesized)
tcataggacaatgggtctgggtgaacctatcccggccctcttggctgctgggccagggcctggtttttcacagggcaccattgagaccacaggaagtggcttcctgcctctgaagacagc

SEQ ID NO: 915119 - DNA, 120 bp, Artificial Sequence
  ENSG00000254654_5 (sequence is synthesized)
acacaactgccctagaaagcgctcttgtcacccctgctggctgagccagactccaggcagcctccagccacccgtgcctccggttcacccctgcctgcctgcccgcctgctgctgtcctc

SEQ ID NO: 915120 - DNA, 120 bp, Artificial Sequence
  ENSG00000254654_6 (sequence is synthesized)
ccttctgcattccccggctcgaggccccactgtactacctgcctagttgggacacttttgcaggagggactgtcgcctttcttttgctggacttttatttttttgagacagagtcttgct

SEQ ID NO: 915121 - DNA, 89 bp, Artificial Sequence
  ENSG00000254654_7 (sequence is synthesized)
tgctaagactacagggtagagaatcagaggcttgtagatgtctttgccacttccacgggatctctgggagctggaaactgagctttaag

SEQ ID NO: 915122 - DNA, 120 bp, Artificial Sequence
  ENSG00000254654_8 (sequence is synthesized)
cttccacgggatctctgggagctggaaactgagctttaagaaataactatagtgcaaagggaactaagggaaaagggttcagcccaaagcagaagggactgtgatgatcacagtgacctc

SEQ ID NO: 915123 - DNA, 120 bp, Artificial Sequence
  ENSG00000254654_9 (sequence is synthesized)
ctgaggccagcatggtggtagcagccagagacagcagctgagtgagaccctaagggagggatgagccaggcagtgtgtggttggagttctccctacacatctcgttttcctcacctccag

SEQ ID NO: 915124 - DNA, 120 bp, Artificial Sequence
  ENSG00000254654_10 (sequence is synthesized)
atcacacacatgcacacacacatatgcacccacacaccccttacacactccggcccgaaggtttctgcaggactccttcctggcactctctccagtgctgccagcgtcgcaccacactgc

SEQ ID NO: 915125 - DNA, 120 bp, Artificial Sequence
  ENSG00000254654_11 (sequence is synthesized)
aaggctttgcaaactttccttccaaagtgaaggagaccctctggccatctgaggctcggtctgaagcaacagcctcagagcgcaatctcaggcatgcaggaagtgcaggaaggccacgtg

SEQ ID NO: 915126 - DNA, 120 bp, Artificial Sequence
  ENSG00000254654_12 (sequence is synthesized)
ccacatacgttatctcacttaatctcattagcaggaaatgtctttaaagtcttatgttggtgcttaaaaattcctgagcagtttagcccttaataaagccaggctttttaaaatttgaaa

SEQ ID NO: 915127 - DNA, 120 bp, Artificial Sequence
  ENSG00000254659_0 (sequence is synthesized)
aagagtgaaagagtgttgtgtgcttttgctgagtttaggatggtgtcaattgtgcctcaggagaagagtttagacattctgtcctgatgaatgtaatcaagtctttatttcatggtttct

SEQ ID NO: 915128 - DNA, 120 bp, Artificial Sequence
  ENSG00000254659_1 (sequence is synthesized)
cttaacgcaaatacgtacaggttcatattcgtcgatgagggtgagaggaaaactatcgccaacagaaagaatccagataggaagagagaaaaagaaagaccagagatggattttgtgtcc

SEQ ID NO: 915129 - DNA, 120 bp, Artificial Sequence
  ENSG00000254659_2 (sequence is synthesized)
acctgattcctccctgccacttctctgcaaatgatagagttcacacatctataattctctcataggttcatgtgggctgctcctcataaccctgctcaaacactactgaggcatcaggat

SEQ ID NO: 915130 - DNA, 120 bp, Artificial Sequence
  ENSG00000254659_3 (sequence is synthesized)
cttcaagattcataatcacataacaattgttttgagctgaagacagcagaagaacataaggataccctgtacttctcaggaggataggaacatcagatttggaatggatgaggaaactga

SEQ ID NO: 915131 - DNA, 120 bp, Artificial Sequence
  ENSG00000254659_4 (sequence is synthesized)
agcgaaagaatgttgactaattttgtcaaggtcacacaactgggtgctttggtgggctcttctggggacaaaagaaagcacaacaaaaaaaggaaataaatggcatatgcaaacccctaa

SEQ ID NO: 915132 - DNA, 120 bp, Artificial Sequence
  ENSG00000254659_5 (sequence is synthesized)
cctaggaagaagagatgagagctccatctctctgctggtggaaggagaggttgtctttcccttcccatagggcaagaagagctgcctccacatcctccttctgctgtagctgaagagcct

SEQ ID NO: 915133 - DNA, 120 bp, Artificial Sequence
  ENSG00000254659_6 (sequence is synthesized)
gtttaaaggaacatcctgatggggctcagccttttgacccccagaaaacatggctttgtctgccatcctgcagctcatcatgggagcctgcaaagtggttgggggcagcacacaccagca

SEQ ID NO: 915134 - DNA, 120 bp, Artificial Sequence
  ENSG00000254659_7 (sequence is synthesized)
tgctgtgaagagaggaaagagctgccgggataacaaccccgcagccaccataatgactcagattagaacacaagggaacaccagccattttttagtctgtcagtttttctattatcctca

SEQ ID NO: 915135 - DNA, 120 bp, Artificial Sequence
  ENSG00000254659_8 (sequence is synthesized)
agactgagcatgaaacattcattataacacgtccttattgattcaactgatggaaatatattggtattaataacacgaaactctaaggcactgaggataataaaatgattgcgaacataa

SEQ ID NO: 915136 - DNA, 120 bp, Artificial Sequence
  ENSG00000254659_9 (sequence is synthesized)
catcaggagagtttgatctcatctgaagtgtgaataggattggtgaaagagtgaaagagtgttgtgtgcttttgctgagtttaggatggtgtcaattgtgcctcaggagaagagtttaga

SEQ ID NO: 915137 - DNA, 120 bp, Artificial Sequence
  ENSG00000278035_0 (sequence is synthesized)
agcaaatgcatttaaaaaggaaactatattacttccacaaatgaaaagcttatgttatttgccaagaaaggaggtcttcataaaataaatgcaaaaatattaaaattaacaaccacaatg

SEQ ID NO: 915138 - DNA, 120 bp, Artificial Sequence
  ENSG00000278035_1 (sequence is synthesized)
cacctttattgctgcaaatctcaccagcgagtcttttccatgtgtatgtatttttccagagttggtcatcttgtacatacttttgtaaatactttaaaatatatatatgtacatatatgt

SEQ ID NO: 915139 - DNA, 80 bp, Artificial Sequence
  ENSG00000278035_2 (sequence is synthesized)
cctgagcatttccgtatactttcaaatactaaatacttattttctttggaaaggtaattcattaaatgatacaaagacta

SEQ ID NO: 915140 - DNA, 120 bp, Artificial Sequence
  ENSG00000227459_0 (sequence is synthesized)
gagcttcctgagaggctgaaggacactttagaaatgtcagcaggagagacccacttcccttttaacccatggagtcaggaggagaggaaagaaaagaggttcacctcaggctgctcagaa

SEQ ID NO: 915141 - DNA, 120 bp, Artificial Sequence
  ENSG00000227459_1 (sequence is synthesized)
ctgcaacgtcaggcagctggtccccagcaaggctggcacgtggaaacctcacggagaaaagtgattcataaccaaagcagggctcccacagcgacgctgagcagacacagaactattttt

SEQ ID NO: 915142 - DNA, 120 bp, Artificial Sequence
  ENSG00000227455_0 (sequence is synthesized)
gccaaggagaaatatagccccagggatatagatgggaaatgaaatcacctggcccctgactcagtccatctcccaggctaactgggagctactggatacaggcatcaggaaggtgatgtg

SEQ ID NO: 915143 - DNA, 120 bp, Artificial Sequence
  ENSG00000227455_1 (sequence is synthesized)
aaagatgccgcaggtgaaagagaagaagaacgcggagcacctgagcagctgtggagcctcggattcgttggaaggcacattcttggaagaataggtgggcttcaactgaatgtcgtccta

SEQ ID NO: 915144 - DNA, 120 bp, Artificial Sequence
  ENSG00000227455_2 (sequence is synthesized)
acagaatcagggctcaccttggtgtacattgtgagtttttagagaagcctggattttaaagcagtctggattttttttatttgtataaacttattgggtacaagtgcaattttgttccat

SEQ ID NO: 915145 - DNA, 120 bp, Artificial Sequence
  ENSG00000227455_3 (sequence is synthesized)
gcgtagattgtgtaatgtgtaaatcagggtgtttggtgtaataactaactattaaagtaatttctcatcatccaacccctctcactctctcacttttctgagtctccattgtctatgatt

SEQ ID NO: 915146 - DNA, 89 bp, Artificial Sequence
  ENSG00000227455_4 (sequence is synthesized)
ctcactctctcacttttctgagtctccattgtctatgattcaactctctgtgtccatgtgtacacattttttagctccaatttagattt

SEQ ID NO: 915147 - DNA, 120 bp, Artificial Sequence
  ENSG00000227455_5 (sequence is synthesized)
cctccagttccatccatgttgctgcaacagacaggatttcatttatttttatggtgaatagtttttattgtgtatatgtaacatttatattttatatttatatttccttttttttttttt

SEQ ID NO: 915148 - DNA, 120 bp, Artificial Sequence
  ENSG00000227455_6 (sequence is synthesized)
ttgctctgtaacccaggctggagtgtggtggagtgatcacagctcattgcagcctcaacttcccaggctcaaacaatcttcccatctcagcccaccaagcagcttggaccacgggcacac

SEQ ID NO: 915149 - DNA, 83 bp, Artificial Sequence
  ENSG00000227455_7 (sequence is synthesized)
caccaagcagcttggaccacgagagaaaggtttccctgcattgaccaggctgctcccaaactcctgggctcaagcaatcctcc

SEQ ID NO: 915150 - DNA, 120 bp, Artificial Sequence
  ENSG00000227455_8 (sequence is synthesized)
acaggcgtgagccactgcctccagtcaccatttatatttcttgacgtttaaatgttgtcacctaatttaaaaaatgatttggtccagtgtatgtgggccacactgtcatctgtaggtcaa

SEQ ID NO: 915151 - DNA, 120 bp, Artificial Sequence
  ENSG00000227455_9 (sequence is synthesized)
atgtagccatgagtgcccaagttttcatctcacaatgctgaaacttgattcagttgacatagaaaagcctgaattcagcatacaaaagatatttgtgccaaaatagaatgtaagaaatta

SEQ ID NO: 915152 - DNA, 120 bp, Artificial Sequence
  ENSG00000227455_10 (sequence is synthesized)
taaaatgtaggggtagcacagatcccagatgagtcctcccctacttgtctaccaaatgatgtcttaagccagcagttctcaaagtaaaggctatgggcccttgagagtcccagagaccct

SEQ ID NO: 915153 - DNA, 120 bp, Artificial Sequence
  ENSG00000227455_11 (sequence is synthesized)
tttatggtgtatttatttctatttctaaattttcgattcatgtcaaacaagttactgcaaactttttggcttaacacagcacacatttatggtctaacagtgtccatgggtcaggagtcc

SEQ ID NO: 915154 - DNA, 120 bp, Artificial Sequence
  ENSG00000227455_12 (sequence is synthesized)
aggtaaaatgtgaacagtccctgtcctgggtctcccaaggccaccatcaatgtgttggcaggtctgcctactggatattccaggggaaagccatgtgtagcctcattcatgttgtttgca

SEQ ID NO: 915155 - DNA, 120 bp, Artificial Sequence
  ENSG00000227455_13 (sequence is synthesized)
gaattggcttcacacagtcataggactacagtcctgttcccatgctgggtgttgatccagggttgttttccacttctagttagttctagcatcttctagttgctgcctgccttccttggc

SEQ ID NO: 915156 - DNA, 120 bp, Artificial Sequence
  ENSG00000227455_14 (sequence is synthesized)
tatgacctcctccatctccaaagccagcaacagtgggtgaagttctcatgtttcaaactttctgagatctgctctcctctcccgtccacagctcctgtaatgagattgggcacatccagg

SEQ ID NO: 915157 - DNA, 120 bp, Artificial Sequence
  ENSG00000227455_15 (sequence is synthesized)
ccatcttctattttactgtccgcataacacaatccaggaagtgaaatctcagcatgttcacagatcctaaggactcaactatggaaccatgggggctgcccatagaaactccacctatgc

SEQ ID NO: 915158 - DNA, 120 bp, Artificial Sequence
  ENSG00000227455_16 (sequence is synthesized)
aagtcatcacctttttattaacactatgttgccacttgcccttggaagcagtcgcagtgaatttgcccatcccttagaagcaagaatcaagttggtaacaccaaacgaaactcaatgaat

SEQ ID NO: 915159 - DNA, 120 bp, Artificial Sequence
  ENSG00000227455_17 (sequence is synthesized)
tctccatggccacaacccatgattcaagaaaatgctaaatgtctttgataaagagtcaaaatgtatcaatttattaaatctcaatccttgcatcccatcttgtaatactgaaaaatgaaa

SEQ ID NO: 915160 - DNA, 120 bp, Artificial Sequence
  ENSG00000227455_18 (sequence is synthesized)
tgagaagtatgcctaaagcatttgtcgcaaggtaaagcacttacagaacagtttgagaggcaaattgaactgcctgctttttcatgaatacttaaccgaatgacccagtcgcttattgca

SEQ ID NO: 915161 - DNA, 120 bp, Artificial Sequence
  ENSG00000227455_19 (sequence is synthesized)
ggtattaatatttgactatttaactggcattttgtttaattcgtatgaaagttcttatcaaaggaaaacaactgatagtatttactgccaatgataaaaattgagccttcaagtttaatt

SEQ ID NO: 915162 - DNA, 120 bp, Artificial Sequence
  ENSG00000227455_20 (sequence is synthesized)
tagtattttggaaaagaactatcaatccacctcagcttaaatacttcttaatatttcagagatttgataagacctgtggtgatatttaacaaatgtgattttaaaaaaatattctacaat

SEQ ID NO: 915163 - DNA, 120 bp, Artificial Sequence
  ENSG00000227455_21 (sequence is synthesized)
aaaatataccatgttttaaagatctgtagacctaactaaaccagtattttccaaatgatcaaaatcatgcataggtaaagatccattgaaatttacaagatagaccaaaataagaacaat

SEQ ID NO: 915164 - DNA, 120 bp, Artificial Sequence
  ENSG00000227455_22 (sequence is synthesized)
aaatgagaagcttgttgaaattgctatatattttacattgcaattcaactttgagaaactatgatttgctgagttttggtgtaatattaaagaagaatagtcacaattttctaggcaagc

SEQ ID NO: 915165 - DNA, 120 bp, Artificial Sequence
  ENSG00000227455_23 (sequence is synthesized)
tacatatacttctccctctttcagatacatatctgtgtgagaccaaattttccttataaatttctactaaaactacatatttcaatggaagaaatgcagaagcagatgagaatccatctg

SEQ ID NO: 915166 - DNA, 120 bp, Artificial Sequence
  ENSG00000227455_24 (sequence is synthesized)
tcttctattatgacagatattaatagatttcaaatggaaaacaatgccacttctctaactgctactttcttttaataaaaatagtcatttttcataaaataacctgatgtcaacaattat

SEQ ID NO: 915167 - DNA, 120 bp, Artificial Sequence
  ENSG00000227455_25 (sequence is synthesized)
taaatatatattttacatttatgtttgaatttcaaatacagtatttattaagaagtataatcttcaaaaacagaaattgcttggtgttctaagtaacttttaaaaccagaaagtgtcctg

SEQ ID NO: 915168 - DNA, 120 bp, Artificial Sequence
  ENSG00000227455_26 (sequence is synthesized)
cttttaaaaccagaaagtgtcctgagactaaaatatttcaaaagtggtacctgaaacccattagacctctcacactaacttaataaccaataagctactctctcttccaggaattcttct

SEQ ID NO: 915169 - DNA, 120 bp, Artificial Sequence
  ENSG00000227455_27 (sequence is synthesized)
caacaaattcctctcaacttcttgcaaatagccaactctttgtggatagtcaagactcatcttttacattttattctgcagaaagcctcctgtgatggttaatattgagtgttaacttga

SEQ ID NO: 915170 - DNA, 120 bp, Artificial Sequence
  ENSG00000227455_28 (sequence is synthesized)
ttcggctgaaagtatgcaaagtattgttcctgggtatgtctgtgagggtgctgtcaaaagagattaacatttgagtcagtggactgagagaggcagacccaccattaatctgggtgggca

SEQ ID NO: 915171 - DNA, 120 bp, Artificial Sequence
  ENSG00000227455_29 (sequence is synthesized)
ggactgagagaggcagacccaccattaatctgggtgggcaccatccccttggctgccagcatggttagaaaaagcagacagaagaaagtggaatgagcagacttgctgagtcttctggcc

SEQ ID NO: 915172 - DNA, 120 bp, Artificial Sequence
  ENSG00000227455_30 (sequence is synthesized)
atcagactccaagttcttcagcttctggactctcggacttacaccagtgatttgccagggcatcttgggctcttgggccttcagccacagacagaaggctgcactgccagcttccctact

SEQ ID NO: 915173 - DNA, 70 bp, Artificial Sequence
  ENSG00000227455_31 (sequence is synthesized)
tcctcagcttgcagatggcctattgtggaatttcaccttatgatcgcatgagtcaattctccttaataaa

SEQ ID NO: 915174 - DNA, 120 bp, Artificial Sequence
  ENSG00000227455_32 (sequence is synthesized)
actaatacgcctcacattcttctttccccaaacagcaaaaggcatttctcttctgtgttttttttagcatattatttataagttaaatcatagtacttaccataatgtgctttaattatt

SEQ ID NO: 915175 - DNA, 120 bp, Artificial Sequence
  ENSG00000227455_33 (sequence is synthesized)
gcgtgtttgaaggtctactccacaggactgaaaagtatctggtggtctggcctgatttgcttcaggtacaggaattagaacttttctatgtctataccatcaatgtctagcactgtcctc

SEQ ID NO: 915176 - DNA, 120 bp, Artificial Sequence
  ENSG00000227455_34 (sequence is synthesized)
tgtgtatgttatcatactgaagatatgtttctttcatgacagctctcattctcagaggactgtgatggtatcatgatatatttctaatgctatctgtggtagtaaagatgtgtcaaagag

SEQ ID NO: 915177 - DNA, 120 bp, Artificial Sequence
  ENSG00000227456_0 (sequence is synthesized)
tggctttggattctttgtgaacaaatgagacaagctgccagagggatgctaacaccgcccacgtgctgcagcaggactttggaaggggaaccagcactgtaatgaagtgttgggttggct

SEQ ID NO: 915178 - DNA, 120 bp, Artificial Sequence
  ENSG00000227456_1 (sequence is synthesized)
caagtcttgtctggaccacaaaccatttttcaaccactagtgtgcctttaaaacccaaaccaactgtgagagtggttttctactttgattctagatgggaaaatattttgcttttttggt

SEQ ID NO: 915179 - DNA, 120 bp, Artificial Sequence
  ENSG00000227456_2 (sequence is synthesized)
ggatgacagtgtcaggtcccaaatggatttggtttcatcctccagcacgcatgcatataacgtgaaacatgcccacactctgcaagggccacagccaccccaccattatgttccaaggca

SEQ ID NO: 915180 - DNA, 120 bp, Artificial Sequence
  ENSG00000227456_3 (sequence is synthesized)
agttctgatgtctctccaaggcccacagatcctggtctactaacttaaggccccttttgtctaaaatagtgatgtacattaaatgcaaagggcaaatggaaccattgaaaagtacttttt

SEQ ID NO: 915181 - DNA, 120 bp, Artificial Sequence
  ENSG00000227456_4 (sequence is synthesized)
gcatccaaaacagccaacgctttggtgcctgctatgtgtcagacactgattcttctgtcatccttattctactgatgaggcaactgaggcagcttcagagagttcgagtaacctgcggat

SEQ ID NO: 915182 - DNA, 120 bp, Artificial Sequence
  ENSG00000227456_5 (sequence is synthesized)
cacacaactaggaagtaagagagctggaacttgacgttgggctgttgacctccagaaatggtgttttttccagtactcagtgctgcctctgactccattgtgatggttgattttatgtgt

SEQ ID NO: 915183 - DNA, 120 bp, Artificial Sequence
  ENSG00000227456_6 (sequence is synthesized)
caacttgactgggcccaggggtacccagatatttggtcaaacattattctgggtgtttctgtgagggcgttttgggtgagattaacatttaaattggtagactgagtaaagcagatggcc

SEQ ID NO: 915184 - DNA, 120 bp, Artificial Sequence
  ENSG00000227456_7 (sequence is synthesized)
ggctttggattctttgtgaacaaatgagacaaggctgcaaattcagaggatcctcccagaagataagatggagcaggtcaccaccttcttccctgcttcacaccctcaggccccgactct

SEQ ID NO: 915185 - DNA, 120 bp, Artificial Sequence
  ENSG00000227456_8 (sequence is synthesized)
tgtctgctgagatcactctccaaaccaatcttcccttacaaagcccttgttgcaggctatgctttctgaggggaacccaggccaagacactaaaatgacacaccaacatgaagacatgaa

SEQ ID NO: 915186 - DNA, 120 bp, Artificial Sequence
  ENSG00000227456_9 (sequence is synthesized)
cacaattgcaaagggattggttggattgcatatctctgtgaatgggactcaagagaagtttgggaaatgctggaccagatgacccttgcaatcatggtgcacagaattaaaaccgtcaag

SEQ ID NO: 915187 - DNA, 120 bp, Artificial Sequence
  ENSG00000227456_10 (sequence is synthesized)
caactttttcctgcctttggacttgaatagaaacatcagctcttcctagatcttcaacctgccaggcttcagattgaagtttataccatcagctctcttggttcttgggcctttggaccc

SEQ ID NO: 915188 - DNA, 120 bp, Artificial Sequence
  ENSG00000227456_11 (sequence is synthesized)
agactgtaagtgcaccatccgttctcttgggtcttgcttgctgactcaccctgcagatttggggacttatcagcctctaattctgtgagccaattccttctaatatatctctctatacgc

SEQ ID NO: 915189 - DNA, 120 bp, Artificial Sequence
  ENSG00000227456_12 (sequence is synthesized)
atcctgtctcactggaagaaccctgatacggttaggctttgtgtcctcattcaaatctcatcttgaattgtaaatcccataatccccataatccccatgtgtcaggggagggatcaggtg

SEQ ID NO: 915190 - DNA, 120 bp, Artificial Sequence
  ENSG00000227456_13 (sequence is synthesized)
aatccccataatccccatgtgtcaggggagggatcaggtggaggtaattgcatcatgggagcagtttcccctgtgctcttctcacgatagtgaaagagttctcacaagatctgatggttt

SEQ ID NO: 915191 - DNA, 120 bp, Artificial Sequence
  ENSG00000227456_14 (sequence is synthesized)
tataaggggctcttccccctttgctctgcacttccccttcctgctgccttgtggccttgtgaagaaggtgtcttgcttcccctttgccctcctccatgattgtaagtttcctgaggcctc

SEQ ID NO: 915192 - DNA, 120 bp, Artificial Sequence
  ENSG00000227456_15 (sequence is synthesized)
tgacatcaacaagaagcagcagacaaaacaaaatattttcacaaacattcagaaatccctaaatcttgtgagttgtcgtatcatttgtagatataattataaaatggcacatgatgctga

SEQ ID NO: 915193 - DNA, 120 bp, Artificial Sequence
  ENSG00000227456_16 (sequence is synthesized)
agtcttagaagtgctgtaatctgaaagaaaaaaatgaaactttccacttcatcactctggtatattattatttttaaaaagatgcaagttgtcatatgaaaatggaggcattaattcctt

SEQ ID NO: 915194 - DNA, 120 bp, Artificial Sequence
  ENSG00000227456_17 (sequence is synthesized)
aacctattccaaaactttagctcatatttgccaagaaaacagaatgcgaatgggaagccgtgtttctgcttgaggcagtaggaagcaggagaccaaaaagtcgtcttaatgttaagcaaa

SEQ ID NO: 915195 - DNA, 120 bp, Artificial Sequence
  ENSG00000227456_18 (sequence is synthesized)
actttgaatcagcatttaaattagatatgctttaacggctaatgttatttgaaagctgaatagccaatgtcaaaaatagatttccctttctttccaaagtgcagacggggtccagaaagg

SEQ ID NO: 915196 - DNA, 120 bp, Artificial Sequence
  ENSG00000227456_19 (sequence is synthesized)
ggcaaaaataaccacatgcctttcttggactcctgactcttaccacccaaagggttttcttgtgtagcaaccaacaattccttggatggaaacactggataggctagtcattattttgag

SEQ ID NO: 915197 - DNA, 120 bp, Artificial Sequence
  ENSG00000227456_20 (sequence is synthesized)
attgaagggactgcagattcttggcagacctctgttgtttttctagagttgtaggcaagtagttggacaaaaagcaagaagctgatcgatgttgctggctttggattctttgtgaacaaa

SEQ ID NO: 915198 - DNA, 120 bp, Artificial Sequence
  ENSG00000227456_21 (sequence is synthesized)
accaggcaatcctgtgaagtagatgggtcaggtaatatcattgctatttgacagatgagggagaacaagacctagcaaatgaacacgcatgtgttacatgctcacatagtcacacacatg

SEQ ID NO: 915199 - DNA, 120 bp, Artificial Sequence
  ENSG00000227456_22 (sequence is synthesized)
ctcgcatgcgtgcgcgtgcacacacacacacacacacatatacatacagaccacgcacttcaggacgaaggtcagaatccaggtctaatcatttaagtaagtgcttcttccccagggtgt

SEQ ID NO: 915200 - DNA, 120 bp, Artificial Sequence
  ENSG00000227456_23 (sequence is synthesized)
ggagacattagggcaataactttaagagtgtgacattgattctcctctgcctaagatgaatatatggtcattccttgaagcaggaagatgaatcagttctcaggtgacccatgaatagtt

SEQ ID NO: 915201 - DNA, 120 bp, Artificial Sequence
  ENSG00000244706_0 (sequence is synthesized)
cctaccttttgttataggagtgttggccatgacccttatgacggatggggaaagacatcacatccttcctctcctacttgcagaaatatgaatactcaaggttaatgtcaaggacgtttg

SEQ ID NO: 915202 - DNA, 120 bp, Artificial Sequence
  ENSG00000244706_1 (sequence is synthesized)
ttccacttcgcatctgaattgacaaggaatggactcttcagctctgacagcaaatctctcttcagaagtctggaaaagcagaaagagaagaatgaagaaatgtccacaaaactgctccta

SEQ ID NO: 915203 - DNA, 120 bp, Artificial Sequence
  ENSG00000244706_2 (sequence is synthesized)
ctcaaccacttctgcaacattcaattttaatttatatttgcccacatcatttcatttgtgatttggacacatgcaggctactgaatataatggatacaaatctctcactgattcccttga

SEQ ID NO: 915204 - DNA, 120 bp, Artificial Sequence
  ENSG00000244706_3 (sequence is synthesized)
gctatttcatagttctgctttcacaggcaggagacagtgaagaaataatgattcagttatttcttaaagatttcacaattctacattcaataaagaatatgtgaattcctggaagttatg

SEQ ID NO: 915205 - DNA, 120 bp, Artificial Sequence
  ENSG00000244706_4 (sequence is synthesized)
atggctgacactggagctttgcctgttttgccacatggaccgcacgaatgaagcacctcctaggacgtaaatcatcctaaagggaagaggaatcagatatatggggctggttcaatggca

SEQ ID NO: 915206 - DNA, 120 bp, Artificial Sequence
  ENSG00000244706_5 (sequence is synthesized)
aagactatgtcacctgacaggagaaagaacttctttctgaatgtggcaattaaatgtgtgattccaagaatggaagatcaaaggaatccatactagttttagctggaaatctgatgcctc

SEQ ID NO: 915207 - DNA, 120 bp, Artificial Sequence
  ENSG00000244706_6 (sequence is synthesized)
agacatacctcagagatattgcaggctgggttccagaacactacaataaagtgaatatcgctgtaaaacgaatcacatgaattttttgtttcccagtgcattatcaaaagtcagaagctg

SEQ ID NO: 915208 - DNA, 120 bp, Artificial Sequence
  ENSG00000244706_7 (sequence is synthesized)
ttggactcagacgtggagtacaagtgaaccacataagaggaaaatatcgggctacgttgaaagaggcatctccaagtacacagaaatgaggacatgtcttgcaggtgcaaaaagtcctct

SEQ ID NO: 915209 - DNA, 120 bp, Artificial Sequence
  ENSG00000244706_8 (sequence is synthesized)
tgccttcataaagctatttttctgaagacatttttcatcattttccctggaggggatatgagagctgtccactaagaatctgcagcctcttttgggggtcttccacggattcactgtgac

SEQ ID NO: 915210 - DNA, 120 bp, Artificial Sequence
  ENSG00000244706_9 (sequence is synthesized)
gaagaagtgagattttcctgtaacagtatgaagaataactggttgggaaacaagacacaaactgagaaaaattccatggatttactgtatgaagaagtgaaataaaatagctgagttagt

SEQ ID NO: 915211 - DNA, 120 bp, Artificial Sequence
  ENSG00000182057_0 (sequence is synthesized)
tgccctccgcccccaacaggcgagaagcagccgcgtccacatggcttcaggtgttcacatggcagtaaacgggcccctgctctcctgggcgccccagcgcggcgccctcccgcccacatc

SEQ ID NO: 915212 - DNA, 120 bp, Artificial Sequence
  ENSG00000182057_1 (sequence is synthesized)
ctccagcccgtagccaagaggcgagcgcggccggtgcccccggggctgccaggggccccgaagcaggcggcgctgactcccggacgccgcccgctcacacccgccgcctttgcacccaag

SEQ ID NO: 915213 - DNA, 120 bp, Artificial Sequence
  ENSG00000182057_2 (sequence is synthesized)
acacccgccgcctttgcacccaaggcctcgcgcgaccagcaggtcactgattctactaccatctgtcagcgtggattgattgaggagactggccctgctcggcagatcagtgacttgtgc

SEQ ID NO: 915214 - DNA, 120 bp, Artificial Sequence
  ENSG00000182057_3 (sequence is synthesized)
gaagtgagccagggtgtcggtgccttcagagcaggcggatgtccttcctcacttgccagctctcgtgagcagacacacagccctcacctttatccttcaccaagctccagctctccttcc

SEQ ID NO: 915215 - DNA, 120 bp, Artificial Sequence
  ENSG00000182057_4 (sequence is synthesized)
tcttgggaggcgccgcctgctaactcagtcacaccaagagggaggcctggaattcctgctcacaagctcggggcttcatctgcagtctgccaggaggcaacttacaaaagcctctggcta

SEQ ID NO: 915216 - DNA, 120 bp, Artificial Sequence
  ENSG00000182057_5 (sequence is synthesized)
acagagcgggaaactccccacagcctcctgctgtgcctgtccccaagccacgcactgtccccttgcaaagcacaaggatactgagagtgcacaaacagcaggggtggagagcctctgtgg

SEQ ID NO: 915217 - DNA, 120 bp, Artificial Sequence
  ENSG00000182057_6 (sequence is synthesized)
gcacgccctcattctgtgccctcattccacaggagcccctgctttgtgcaagtctctgagcccgcatggagggagcatgggggctcagaacagttctttctggggcaaggtcaggggagg

SEQ ID NO: 915218 - DNA, 120 bp, Artificial Sequence
  ENSG00000182057_7 (sequence is synthesized)
ctctaaagttatggtggtggggagggccttaaaacagaggaccagagaataccaagacttaggggtgtgggggagagccacctgctgtgcccaggaggactgtgcccagtgcaggggaaa

SEQ ID NO: 915219 - DNA, 120 bp, Artificial Sequence
  ENSG00000182057_8 (sequence is synthesized)
aagatgaagctgcggagttgggcaagggtgggatcctgcagggccttagagcattgacatgtttggcatggatttgtttcacagggtcccacagaaacttctgctctccaggtttgcccc

SEQ ID NO: 915220 - DNA, 120 bp, Artificial Sequence
  ENSG00000182057_9 (sequence is synthesized)
tccactctgccctccaggatagaagtgtggcatcctaatctgggatgcatccatctctccccctggactgtgagcatatgcagggcagagacacctctgcttctcttgggtctccggcat

SEQ ID NO: 915221 - DNA, 120 bp, Artificial Sequence
  ENSG00000182057_10 (sequence is synthesized)
cctgtgcagggtagggcaccatgtccattaaaatgatgttaatgaggatgatacagcccagaggaatccaggcttactatgaaccaggcactatgcagatttccctttatcatcccagtt

SEQ ID NO: 915222 - DNA, 120 bp, Artificial Sequence
  ENSG00000182057_11 (sequence is synthesized)
cttcttatttgcagcagtctaatgagtttggtactgttatcacccctattttacagatggggccactgaggtgcaaagagtttaacttatcccaagtcacacagtttggaagaggctgag

SEQ ID NO: 915223 - DNA, 120 bp, Artificial Sequence
  ENSG00000182057_12 (sequence is synthesized)
ctggtatttgaacccaggttttcagaggctgcactcttaaccaccaagcttcccagcactcagcaaacactggaaagacagagatggacctagacagtcagtaggaccaaaagtctgcag

SEQ ID NO: 915224 - DNA, 120 bp, Artificial Sequence
  ENSG00000182057_13 (sequence is synthesized)
gccgatagggaaagaatgtaagaggacggcatgggcagcgccagcccctccagcagtcatatattaagccctggacactgggcagctcgggcaggtcggggggcctcagactctcggacc

SEQ ID NO: 915225 - DNA, 120 bp, Artificial Sequence
  ENSG00000182057_14 (sequence is synthesized)
ccatgcctggaagaccacggtctgcccaacaagcagcagctgctgtgaatcgacttacacatcttccccacaggtgagcagagagctaacacctgaggataggccaagaaacgggaagcc

SEQ ID NO: 915226 - DNA, 120 bp, Artificial Sequence
  ENSG00000182057_15 (sequence is synthesized)
cgtgcaacctgagcgcacagatcacccccacctgcccggcactcactgtccccagtggctggactctcatcgggccagtcactgagctggcgccagcctggtctcaccagtgtgtgtctt

SEQ ID NO: 915227 - DNA, 120 bp, Artificial Sequence
  ENSG00000182057_16 (sequence is synthesized)
taaatcatccaatttcttcagctgtaaattgggctgggaggggccaggtgagctgcctgcctcaggggagtcggcgcccttacctgagtgatcccattcactcctcacaacaaacccatg

SEQ ID NO: 915228 - DNA, 120 bp, Artificial Sequence
  ENSG00000182057_17 (sequence is synthesized)
aggcagggattgtcatcttcattgtacagagcaggaaatgggtgcacacagaggttaagagacttgcccaggtcacacagctaggaagaggctgtgatttgaactcagtcttctggctcc

SEQ ID NO: 915229 - DNA, 120 bp, Artificial Sequence
  ENSG00000182057_18 (sequence is synthesized)
aaagcccccacagagtcactcagggcactacaaagagttaacctgaatatgaaatgatctaagagtcgcagtgacaaaggcatgctctaagcgcttttcctgcagtaacttgcttaatcc

SEQ ID NO: 915230 - DNA, 120 bp, Artificial Sequence
  ENSG00000182057_19 (sequence is synthesized)
ttacaacaaccctataaagtgggtactgttctcgcctcattttgcagatgaggaaactgaggcacagagcagctcggagggggcagagctgaatctgacaggctacagggcccctgcgtt

SEQ ID NO: 915231 - DNA, 120 bp, Artificial Sequence
  ENSG00000182057_20 (sequence is synthesized)
gctttgttataagatgacaataaggaagttcctttcctttgggattatttctgcctgaaagctcaagacttttagccacatcattgtctgggctccacgggaaggcagtgccacatgctg

SEQ ID NO: 915232 - DNA, 120 bp, Artificial Sequence
  ENSG00000182057_21 (sequence is synthesized)
aggcatgctgggaaaagactttgttccatcctgttttgttgacatgctcttcatttttaagcctgaaaccgaagcttcctgctaagaattcaaaccatggagaaaaacgcagccatgata

SEQ ID NO: 915233 - DNA, 120 bp, Artificial Sequence
  ENSG00000182057_22 (sequence is synthesized)
acggccactacttcctgagcctccagtgttccctgtgcttggggatccatatatgtcacttaaccttaaccttcacaacaccagggcagcctccattttcacaagtgaagaaatggaggc

SEQ ID NO: 915234 - DNA, 120 bp, Artificial Sequence
  ENSG00000182057_23 (sequence is synthesized)
ccagagtcacttagaagatgctcgaaggtgcacagctgctaagtggtggtgctgggatttgtcctcaggtcctcaagagtcctgactcttatgtgctggctccccacggaggcgtggagt

SEQ ID NO: 915235 - DNA, 120 bp, Artificial Sequence
  ENSG00000182057_24 (sequence is synthesized)
tgccacaggttggtccttcagcgtcaagattcctgggccacttattaatagaaggcaccaggacacaggtgcagggatgcagagctggatgctgccttctcaataggagaagccaagaaa

SEQ ID NO: 915236 - DNA, 120 bp, Artificial Sequence
  ENSG00000182057_25 (sequence is synthesized)
cgcagatgccgatgcttaatcaactccgtctctccctctagtgactcggggatagctgccctgatgccaaggcgattgtcttctggaagcagccacgccgtgtgaggttcctcatcactg

SEQ ID NO: 915237 - DNA, 120 bp, Artificial Sequence
  ENSG00000182057_26 (sequence is synthesized)
ccctgcatctccctgcgagctctcggggataattgcaaaatcacgtttgattccaggggagcagaaagcagcaggagccgtgaattctccaactcttaactggtcctcgactggagccac

SEQ ID NO: 915238 - DNA, 120 bp, Artificial Sequence
  ENSG00000182057_27 (sequence is synthesized)
ttttccctgcccacccatccctgtggcggattcattacagttatccaaagccggttttaactttgctccccctggctcagaagtctgtcagtgggtcctgagcggcttcaccattcaagt

SEQ ID NO: 915239 - DNA, 120 bp, Artificial Sequence
  ENSG00000182057_28 (sequence is synthesized)
ttattcctatcagcctggaatacaatgctctatctggctccgcttgcttctccaaaccttctctcccaggtctcattctgcctctctgtctaactagacaagttggcttcctgtcctgtg

SEQ ID NO: 915240 - DNA, 120 bp, Artificial Sequence
  ENSG00000182057_29 (sequence is synthesized)
cctgtctgctccctgcagcaggaatgccgttccctcttccctacagattgaaattatatcctctttcaagtcttactcaaatgccacctcctccacaaactcttaacacttattcattca

SEQ ID NO: 915241 - DNA, 120 bp, Artificial Sequence
  ENSG00000182057_30 (sequence is synthesized)
ttcaacaaacattgactgagcccttatgacaagcattgatcccaagggtccctgtggtcatgaagtttatggtgccatggagctgttagaaaaagaatcatcacataaataatcatctga

SEQ ID NO: 915242 - DNA, 120 bp, Artificial Sequence
  ENSG00000182057_31 (sequence is synthesized)
taacagccatgatacaaattagtaagaaagtgtggcaggagcacagcagatgtacaatagggaccctgagccttggggatctaggacatttgagctgaggcctgaaagacaagtaggaag

SEQ ID NO: 915243 - DNA, 120 bp, Artificial Sequence
  ENSG00000182057_32 (sequence is synthesized)
taaccacatggtgaagttggaggagagctccaggcagagggcacggcatgggcaaaggccctgcggtaggagggaacaagtagatttccaggaagggcacaggggcctgcagggtaatgt

SEQ ID NO: 915244 - DNA, 120 bp, Artificial Sequence
  ENSG00000182057_33 (sequence is synthesized)
aagtgaaatgagaaagctggagatgcagctggagcaggacagtacaggccacagaggctttgcgactttatccctgggcaaaaagaggagatgatgaaggattctgagcacaggacacaa

SEQ ID NO: 915245 - DNA, 120 bp, Artificial Sequence
  ENSG00000182057_34 (sequence is synthesized)
gccagtatgtatttagacgcgatcctgccctgtggctgagcctcttctgagaagtgcaggccctgtgtcacgtcaccctgaacctcagtcatcagggttttggatgtgagtttccatatc

SEQ ID NO: 915246 - DNA, 120 bp, Artificial Sequence
  ENSG00000182057_35 (sequence is synthesized)
cctcttcctaggccaagctctcaaaggcaaggctgacctctggtcttcagcttcatcctcatcagccaggccagtgcccagcacaaggagctgctccaaaaacatacgtgggttgaacca

SEQ ID NO: 915247 - DNA, 120 bp, Artificial Sequence
  ENSG00000182057_36 (sequence is synthesized)
gtgaccaggacaagacgcttatcagcatttccctgcgaaggagcagggctgcctgtaaagccttccacattctctagaaattacaaagttcaagggttttagtgaggccacgactcaggg

SEQ ID NO: 915248 - DNA, 120 bp, Artificial Sequence
  ENSG00000182057_37 (sequence is synthesized)
agcccttgagagccaagctggcatcccactgctgtgcacacccagcctgggcacacagtatgaccctgcccaggcatctgcctgcggccgtctggtgaatgaccagaaacagaaccgaaa

SEQ ID NO: 915249 - DNA, 120 bp, Artificial Sequence
  ENSG00000182057_38 (sequence is synthesized)
gctctgtaaagtgctctcaaggttacaaagcatgtttcacaggagcagtttcatctcacacgggcagccctctgagctgggtagttactgctttacagatgaggaaactgaggcccggga

SEQ ID NO: 915250 - DNA, 120 bp, Artificial Sequence
  ENSG00000182057_39 (sequence is synthesized)
gagggcgggacctcagcaaatcaagaaaaaactgagactaggacctaacggaagtccaggctatgaatggcccccgtagggttaaaagagctttctagaaatttctttgaaaactattgt

SEQ ID NO: 915251 - DNA, 120 bp, Artificial Sequence
  ENSG00000182057_40 (sequence is synthesized)
aaagtgacatatttcctcaggatgtctgtcacgccagcagtgggagccaacacaccaactctcagaggctgttccccctgcgcggcagatccagacgctcagctcccaggcctggaggct

SEQ ID NO: 915252 - DNA, 120 bp, Artificial Sequence
  ENSG00000182057_41 (sequence is synthesized)
ggcggcttagcccagggcacaggaggaggctgcctgggtttggcgctgacttacagcaggtgctgagggaatgctgaggagaggcaaggctgattcaagaggccgacaacagagaacatt

SEQ ID NO: 915253 - DNA, 120 bp, Artificial Sequence
  ENSG00000182057_42 (sequence is synthesized)
cctagagctctcccgccagctaggcatggtgctaagtgcattacctgcgtccactcgtaacatcctcacaacactgtgaatacgatgaccatccccatgtacaggcgtggacgctaaggc

SEQ ID NO: 915254 - DNA, 120 bp, Artificial Sequence
  ENSG00000182057_43 (sequence is synthesized)
tcagagcaataaataattagcctgagatcacacggcaggtgagtgcagaggccggatctgaacccacacattgcccttaagcaaccccatgtcctgagcaaaggtgagcagaaacatctt

SEQ ID NO: 915255 - DNA, 120 bp, Artificial Sequence
  ENSG00000182057_44 (sequence is synthesized)
gggaagagggaaccacgactgtatcttcctcagcagacatgatggtgcagggtaccccttcccctgcccacctgacgaccattattcccattatcagtatatccctctgtgggcaaatga

SEQ ID NO: 915256 - DNA, 120 bp, Artificial Sequence
  ENSG00000182057_45 (sequence is synthesized)
tgacagacatgcatggtaaccacttcttcacaagttttgtgtctccccagcctcctcccctagggctctctaggcttcctttacccgtcctgcctcagatggactcccagcatcatcatc

SEQ ID NO: 915257 - DNA, 120 bp, Artificial Sequence
  ENSG00000182057_46 (sequence is synthesized)
cctgcctcagatggactcccagcatcatcatctgcctctgtgccttcttggtagtaggtgggtgtgaaaaagaaaggaagggccaggtgcagtggctcatacctgtagtcccagcacttt

SEQ ID NO: 915258 - DNA, 69 bp, Artificial Sequence
  ENSG00000182057_47 (sequence is synthesized)
ctccctctcaataaataaaataaaataaggaaggacagagggcaatgtgaccttcggcaagctccctaa

SEQ ID NO: 915259 - DNA, 120 bp, Artificial Sequence
  ENSG00000244701_0 (sequence is synthesized)
aaccaagttgtgtgcagagaggttgatataactatatttacagaaaatgatttttacaattaaagttcacattttaacatgaacgtgcgtgctgcaatcccttctccagtccgagaaatg

SEQ ID NO: 915260 - DNA, 120 bp, Artificial Sequence
  ENSG00000244701_1 (sequence is synthesized)
tggtttgtggtaggaaggaatggtggcctactccatgagcagagcctgtgggggctgaacctgacttcacttacagtgatgatggaggagattggggagctgctacctgtccttctagaa

SEQ ID NO: 915261 - DNA, 120 bp, Artificial Sequence
  ENSG00000244701_2 (sequence is synthesized)
gccacggtctggacaaactttctccaggatcacagaagaactgcagcttcctggggagcagtttcacctccacaggcatcgcttcatactcctcactgtcaatgctaaaagagccccctg

SEQ ID NO: 915262 - DNA, 120 bp, Artificial Sequence
  ENSG00000244701_3 (sequence is synthesized)
tactggagttggaggtctcacagcagcaccagaagaagttcattatggaaaacaacatcctctcttgaggagctatcctaatgttcttttacaaaaaaaaattcagtgcctactacgatg

SEQ ID NO: 915263 - DNA, 120 bp, Artificial Sequence
  ENSG00000244701_4 (sequence is synthesized)
ggcacagtgctggttctggaaacatcctaattctaccatccatgaaaaaggatttattttctttttttggcccctatctcctcccagagtattttgggatttgaacaacatggttataat

SEQ ID NO: 915264 - DNA, 120 bp, Artificial Sequence
  ENSG00000244701_5 (sequence is synthesized)
tttcaaatatgtattaaaaggcaagggtcctgccatgtcttaaggaactcatatacatagtctttctatattatgctaatccttctcaaataaaaataaagacagctaattctcttatga

SEQ ID NO: 915265 - DNA, 120 bp, Artificial Sequence
  ENSG00000232956_0 (sequence is synthesized)
gtgcgcggcgcagcgcgcggcgtcagtcttggctggcagacctgtactccgtactccgtacttcgtagtcgcagcggcgcggtcttcggcagtctagtcatccaccgccatcctgggccc

SEQ ID NO: 915266 - DNA, 120 bp, Artificial Sequence
  ENSG00000232956_1 (sequence is synthesized)
cacgtgttgcctgaccattcctgagcccaggtgggagccgtggctgaggtgacggtctcaaagtggaagagcttactgtcacagcaactcctttgcaagatgccccggccaggaatagtt

SEQ ID NO: 915267 - DNA, 120 bp, Artificial Sequence
  ENSG00000232956_2 (sequence is synthesized)
gctgaacaccccaggcctgctgaggtccctccttgagtctcatgttcaagcagtcttgtgagtaaagcactggctaccccttttcacttactatcttttcaagcatgttctaccaccttg

SEQ ID NO: 915268 - DNA, 120 bp, Artificial Sequence
  ENSG00000232956_3 (sequence is synthesized)
gaaggtaagaggttagtaccttcttccagagcagagggcaggcattcttgctgtgcgttgtgaaagggtagagtcctgcgctcctttcttgtagtagtccaatggctcatgcaggtgcct

SEQ ID NO: 915269 - DNA, 120 bp, Artificial Sequence
  ENSG00000232956_4 (sequence is synthesized)
ctgactcccctatgggaactggggcttgggagggtggtggaaaatgctgatgctctggctattgctattgttttgaataatcagtggtcccttgtccctaatcgaggaattttgtatttt

SEQ ID NO: 915270 - DNA, 120 bp, Artificial Sequence
  ENSG00000232956_5 (sequence is synthesized)
ctaccagtgtccatgaaactgggaggcgaccgtgttagctgccagttcctgacagccacctctcaccagtggcttcactctgtgtccctgacccagcacatggcacaagagtgcctgcca

SEQ ID NO: 915271 - DNA, 120 bp, Artificial Sequence
  ENSG00000232956_6 (sequence is synthesized)
gataccttcagtggctgccaggctgttccttggaacctgtgcaggggtaagtgtgcaggaaggtctgacctggcaagtcacttcactcctgttttatttagagtcacctggctaatgaaa

SEQ ID NO: 915272 - DNA, 120 bp, Artificial Sequence
  ENSG00000232956_7 (sequence is synthesized)
agtattttgaccttcccgtatggtaagtcaggtgattgaatcccagaaaggttcattgtcttcaagctcacaatactattttgggacaaacagttgtctagtgtttggactcatgaaccc

SEQ ID NO: 915273 - DNA, 120 bp, Artificial Sequence
  ENSG00000232956_8 (sequence is synthesized)
tgattcttgagggtggtattttactgcttttgtgatttggtttcaacatatatagtcttttctccggagttaccttaggtcagtggccagtgtttcagcccctggaaagggcatgggctg

SEQ ID NO: 915274 - DNA, 120 bp, Artificial Sequence
  ENSG00000232956_9 (sequence is synthesized)
ccactgaggttggtcacaggcctctcagctcatggtgggagtgggttcaggagttggtaagtagggttcagttctgttgttgccaccgatggcaacaggggtttgtaataatccctagtt

SEQ ID NO: 915275 - DNA, 120 bp, Artificial Sequence
  ENSG00000232956_10 (sequence is synthesized)
gtgtcaattatgtcacttaattttcacaacaggtctctgaagtgtttctcatctcatttttacagatgaggcctgcctgtgttaatacacctagtgaggagtggagctgaatttgaatgc

SEQ ID NO: 915276 - DNA, 120 bp, Artificial Sequence
  ENSG00000232956_11 (sequence is synthesized)
aagccttggcaccttaattgagcaagtttgaaacctcgcttgttgcccttctggaaggagtcaggaatttccagttctgggcctgggctgtgggtctggcagacagacctctggccctag

SEQ ID NO: 915277 - DNA, 120 bp, Artificial Sequence
  ENSG00000232956_12 (sequence is synthesized)
gtttgggtgccaggttctctgcttccagaatgagaagctttgctgtgcaccaggacctgggcccttctggtatctcctgaatgaaaaacaagggatatttaataaatatggatttaaata

SEQ ID NO: 915278 - DNA, 120 bp, Artificial Sequence
  ENSG00000232956_13 (sequence is synthesized)
aaatgaaatctacttcatgtgcctggtctacttactccttcagaagtgatttctgagccgccaggaatagttgctgaacaccccaggcctgctgaggtccctccttgagtctcatgttca

SEQ ID NO: 915279 - DNA, 120 bp, Artificial Sequence
  ENSG00000232956_14 (sequence is synthesized)
ctagaggggacctgacctgagagaagataccttcagtggctgccaggctgttccttggaacctgtgcagggatgaggcctgcctgtgttaatacacctagtgaggagtggagctgaattt

SEQ ID NO: 915280 - DNA, 120 bp, Artificial Sequence
  ENSG00000232956_15 (sequence is synthesized)
agacctgtactccgtactccgtacttcgtagtcgcagcggcgcggtcttcggcagtctagtcatccaccgccatcctgggccccacgtgttgcctgaccattcctgagcccaggtagggg

SEQ ID NO: 915281 - DNA, 120 bp, Artificial Sequence
  ENSG00000232956_16 (sequence is synthesized)
tcctgggggattgggttcagtggcgggcggcgtgggaggctgggccgcagtgagtgggggcaccagtgattcttggagaccaagccttcactacacgtgctacttcctctcaagaggcgg

SEQ ID NO: 915282 - DNA, 120 bp, Artificial Sequence
  ENSG00000232956_17 (sequence is synthesized)
ttgagcgcgttcggaacattttacccggaggagactcggggattacttgatgagtaacctcgtgcttctctttcagccgagaagtggggcttctgcatgacctgggtggaccccagtagg

SEQ ID NO: 915283 - DNA, 120 bp, Artificial Sequence
  ENSG00000232956_18 (sequence is synthesized)
tgggatgggacgtgtggtcaggagggacctcaccggaaggcatggggtggcgtgtagacctgccgcaagagaggctgtagagtgggccaggcgttgcaaggagctagagctggataatgg

SEQ ID NO: 915284 - DNA, 120 bp, Artificial Sequence
  ENSG00000232956_19 (sequence is synthesized)
tggtctacttactccttcagaagtgatttctgagccgtaagatacatgagaaaaaaatgaaggggaaaaggcagtatttatattaactacatgatgataaggatgtttctggtcacagtg

SEQ ID NO: 915285 - DNA, 120 bp, Artificial Sequence
  ENSG00000232956_20 (sequence is synthesized)
aaaagccatgctagaattgtagtgtcatagaataatgtggaagtttagttcgtgttgtctgatctatttaataatttaataaggttatctcttccaagacaccttcccttcttcctcagc

SEQ ID NO: 915286 - DNA, 120 bp, Artificial Sequence
  ENSG00000232956_21 (sequence is synthesized)
cagaaaggatctttccctgagagtcattagtagctctgggctcctggaaccaagctcaggtgcctaattgaactctggtctcttcccacagcccccagcagggactggtgcttagtgaga

SEQ ID NO: 915287 - DNA, 120 bp, Artificial Sequence
  ENSG00000232956_22 (sequence is synthesized)
gtggactgccagattccttgagtgtgggggatttgggtgaatgagggtagcaagcctccagcgtgcttgggtctgcggtgaccctatgcattccttcagtgcttgctagaacagttttga

SEQ ID NO: 915288 - DNA, 120 bp, Artificial Sequence
  ENSG00000232956_23 (sequence is synthesized)
aacggtttgaggccttgccctgctccatccagagcaaggttatagaaatttcagacaatgacttcctccctcctggatctagtgtcctgggccttgtatagatccgtgccatctaatgtg

SEQ ID NO: 915289 - DNA, 120 bp, Artificial Sequence
  ENSG00000232956_24 (sequence is synthesized)
gtagccacttggcacacatgattaaattaaatttggagttttatttcattttcacactagccacatttcagatgatcagtagccacaggtggccagtggctaccatattggaccgcacag

SEQ ID NO: 915290 - DNA, 120 bp, Artificial Sequence
  ENSG00000232956_25 (sequence is synthesized)
acacttaaagcaaaagtcttataaaagttgaggatgaagccaagagtggtggtaagggtaggagttgaaacagtgaagaggaataacagggaagagtcctgccctgagagactcatggaa

SEQ ID NO: 915291 - DNA, 120 bp, Artificial Sequence
  ENSG00000232956_26 (sequence is synthesized)
taggatatttacaaggcaaagcaaagagaaccaaagtctcagttctgcagaggagctgagtgccccaggagctagtggagggtgaggtcaatgtgtgctcatcttaaaggaaaaactcat

SEQ ID NO: 915292 - DNA, 120 bp, Artificial Sequence
  ENSG00000232956_27 (sequence is synthesized)
ggaagaggaaggtgctaatgttgaacacctattttgcgccagacctcttaattgttttaaatctttgaggtatcatcatgaggtcgtttttaagttcagtacagatgaggggcccaaggt

SEQ ID NO: 915293 - DNA, 120 bp, Artificial Sequence
  ENSG00000232956_28 (sequence is synthesized)
cagaattatgtgtccagggttgcccagccacaaaccagcagatcagggtttgatgccaggcctctctaaccctgcatcctgagtggaatatagaagccggtgggaagtttggatgggaag

SEQ ID NO: 915294 - DNA, 120 bp, Artificial Sequence
  ENSG00000232956_29 (sequence is synthesized)
gagatggatgccttcaagttcttgtcttggtgttaggtgtgttaaaggactggctgggatgagaagagtgttgctggcttgagcatagcacgagcagcacagctcctgtgttcctctggg

SEQ ID NO: 915295 - DNA, 120 bp, Artificial Sequence
  ENSG00000232956_30 (sequence is synthesized)
cattaggggctcagcgcgtccctccaggccacgccgtcaggcctccgtccttttagctgtaggggcagattacgtaactccagccttctggtcactaaaggagggtaacaaagggcggtc

SEQ ID NO: 915296 - DNA, 120 bp, Artificial Sequence
  ENSG00000232956_31 (sequence is synthesized)
gagagactccactgagttgacacgcagacgcagcctcaggaccctaaactctacgccccagcacaccctaccaagcgagcgcccgcggccgcgtgacgtcatctaccccaaacgctgtgg

SEQ ID NO: 915297 - DNA, 120 bp, Artificial Sequence
  ENSG00000232954_0 (sequence is synthesized)
ttaatgtattttgtttctttttctttttttcccagcacgtccttactctggcactacgaaatgctccagactcgtgtgtatttcttgctccaccatagaatcagccatttctacaaatgt

SEQ ID NO: 915298 - DNA, 120 bp, Artificial Sequence
  ENSG00000232954_1 (sequence is synthesized)
cactggtttcttttatggagaatgacattggaaaccaagatctgactactaagtgtgttctttgctactgggttgtcatttctcttaaggcttccaagctgacagagcaaacgagtatat

SEQ ID NO: 915299 - DNA, 120 bp, Artificial Sequence
  ENSG00000232954_2 (sequence is synthesized)
gacacatctgattttttatttgactgtggaactctgtatctatatacacttgcaattcttatcaagtaaaaatacatcaaagatatcaacaaccacagacgtatacacccgacaagaacc

SEQ ID NO: 915300 - DNA, 120 bp, Artificial Sequence
  ENSG00000232954_3 (sequence is synthesized)
tggaatacagggaggaaggagttgaaatgagatgggaagagtcatctgtatgcagaggaggtataaagtcatgcaaatggataagatttcaagaagaaagaagaaaaaggtaggctctga

SEQ ID NO: 915301 - DNA, 120 bp, Artificial Sequence
  ENSG00000232954_4 (sequence is synthesized)
gtttggagagttgaatgagcctacagagataatgaagttgttgctggagagcctccataacttctgttgagaaatcggccttaatcttattgatgatgactttcacatgatcctcagata

SEQ ID NO: 915302 - DNA, 120 bp, Artificial Sequence
  ENSG00000232954_5 (sequence is synthesized)
tctgcctctagatcccagatgagcaccagttgcagcagtcaaacgtcatctatctgtatatcaagataaattatgaaaggattatataccaactgtctaaatgacaaagagaagaaaggt

SEQ ID NO: 915303 - DNA, 120 bp, Artificial Sequence
  ENSG00000287649_0 (sequence is synthesized)
aaggacatcaacggagggcagaaggccatgtgaagacaaagcggacactagagtgaatctgctgagaagagaagattggcctcagacacttccgtcttcagacctgtgcctctcctttga

SEQ ID NO: 915304 - DNA, 120 bp, Artificial Sequence
  ENSG00000287649_1 (sequence is synthesized)
ggatcccttccccgaagctgccaaggagaaccttccctcacattgttcctcctttgttccccgctctccttttccaggctgagagacctggggccttggaagcaagcacacgctggctga

SEQ ID NO: 915305 - DNA, 120 bp, Artificial Sequence
  ENSG00000287649_2 (sequence is synthesized)
gctgtgattcctccatgttgattataatttttatcacattatatgggatccctctggtggttactaggggatacgtcagttttgagagattggaacctaaccaaagaagcttcaaatcta

SEQ ID NO: 915306 - DNA, 120 bp, Artificial Sequence
  ENSG00000287649_3 (sequence is synthesized)
gaggataaggggactcagagtttacaagtcacagcaagcagatgctggtctgctttaggtgcctcttacggggattgtgagagggctcctggggcctgaggagggtcttctgaggtgtga

SEQ ID NO: 915307 - DNA, 120 bp, Artificial Sequence
  ENSG00000287649_4 (sequence is synthesized)
aaggctgtactggtggtccctgaaagccatcgtcatttgtgtgaggaggagtactggaggagctgtcttaccacatgaaaaacagcatggagcatcccagccacatcaaaggcacggttt

SEQ ID NO: 915308 - DNA, 120 bp, Artificial Sequence
  ENSG00000287649_5 (sequence is synthesized)
gagccttgggctgtagaggctcagagagagtgacaaataagaccctggtgagagaccaatggggacagtatttccagactttggcatgaaacagatttctgagcacctcatgaaatgtct

SEQ ID NO: 915309 - DNA, 120 bp, Artificial Sequence
  ENSG00000287649_6 (sequence is synthesized)
tgcacctggctggatgcagtttgccacatggtttacaatagcggtagaataagaaataacttaccaaacgagtacattttcttggctggctggggcactcagagttgacactggtaaggc

SEQ ID NO: 915310 - DNA, 120 bp, Artificial Sequence
  ENSG00000287649_7 (sequence is synthesized)
tccattaaaatgcctttatgttctgatatacacagatgtgttaatttatagcatattcatcagaagacataaattaattgctctctgatgaattttataacacctcctttatgcctctcc

SEQ ID NO: 915311 - DNA, 120 bp, Artificial Sequence
  ENSG00000287649_8 (sequence is synthesized)
accctccccctccaaagtacactgaaaaggtcaacagcactatcgaatgcagcacacttcaacttccttccaagcttataattaaagctaattagtagctttggtaattagcgcatgtaa

SEQ ID NO: 915312 - DNA, 120 bp, Artificial Sequence
  ENSG00000287649_9 (sequence is synthesized)
gctttctgctttctgaattaataagactgagtcaggttttgagccaagtagacttttcactcactggttctgattcttgaactgtgtttggctggttaatttaaaacatgtctgttgaaa

SEQ ID NO: 915313 - DNA, 120 bp, Artificial Sequence
  ENSG00000287649_10 (sequence is synthesized)
gtggaatactagaaagaaaacatacttgtgatggtctgctctcaagccagtgtgatttatgaacaggccaaagtggaactgttgtcacaagagaaaatcagaatgctctgggtttccaat

SEQ ID NO: 915314 - DNA, 120 bp, Artificial Sequence
  ENSG00000287649_11 (sequence is synthesized)
aactgaccagtctcaacctctcagtgtgaaatgagttgtgcccagttactatgtcacatggacacaacacaacgtcaaggatgcccttgcacacttatgtcaccctctcataacacatct

SEQ ID NO: 915315 - DNA, 120 bp, Artificial Sequence
  ENSG00000287649_12 (sequence is synthesized)
gtactaagcacatcaaatcctctttattttaggagaatgcagaggcaatggcagtggggtgccaagatataactaactgctcattttgattcaaataaaaatcaaagaggagaaaaatca

SEQ ID NO: 915316 - DNA, 120 bp, Artificial Sequence
  ENSG00000287643_0 (sequence is synthesized)
ttttttttttttgctattatctggataaaagttacaatatatgtgttggacattacagaggatatatcttgctatctggcatccaattcaacctcctgattatgtaaaaaaaaaaaaaaa

SEQ ID NO: 915317 - DNA, 120 bp, Artificial Sequence
  ENSG00000287643_1 (sequence is synthesized)
aaaaaaaaaaagcaaccccaaattcttcaggtgaaccacctcatctcaaactctcataggtttttgggtaatgttgaccccaccctcaggtttaggggtgggctctactgtccagtcatc

SEQ ID NO: 915318 - DNA, 120 bp, Artificial Sequence
  ENSG00000287643_2 (sequence is synthesized)
agcatatcccattgttctggtcattgagattagctctagaataagcacaggacccaacccaggctagtttgaatcaggccaggagtgtcttattggtgggaggaaatttctctatatctg

SEQ ID NO: 915319 - DNA, 120 bp, Artificial Sequence
  ENSG00000287643_3 (sequence is synthesized)
ctactcttaatgttgagacttaaggcctggaggtgctgcagccatcttataaccattaaggggcagcctgttctaagaagccaaaataatagaaaagaacagagactggcgagaagaaga

SEQ ID NO: 915320 - DNA, 120 bp, Artificial Sequence
  ENSG00000287643_4 (sequence is synthesized)
gaagcagggacatgaagtgacagtttgaaacgttgcatcctgacacatctgaagacatccctcatgtgcagacttttcagtaatgtaaagtggaaagtgggcaaggccaaggtcatgcta

SEQ ID NO: 915321 - DNA, 120 bp, Artificial Sequence
  ENSG00000287643_5 (sequence is synthesized)
cagaatgtgactgagcaacagggggatcacttcagctgggatgggaaaggaaagcctccaggaggagttgacatcgaatcacagttgaatcctaagaagtcagtcttgcaaagatctagg

SEQ ID NO: 915322 - DNA, 120 bp, Artificial Sequence
  ENSG00000287643_6 (sequence is synthesized)
aaagaaacagctaagtttctaaggtaagaatatacaattcaaacaaatttacaataggttaagtaaagtatactacttataaatgtcaagtaaaatatcacaatttgcttaaggtgtgtg

SEQ ID NO: 915323 - DNA, 120 bp, Artificial Sequence
  ENSG00000287643_7 (sequence is synthesized)
tgtgtgtatatatatacacatgcgtatgtgtatattatacatatatacacatatatacgtgtatatatgtacatatatatgtacacacacacacatatgtatatacacgtatgtgtctat

SEQ ID NO: 915324 - DNA, 120 bp, Artificial Sequence
  ENSG00000287643_8 (sequence is synthesized)
gtatatatgcacgtgcgtgtatgcacgtgcgtgtatacacgtgtgtatctacacacatatgtgtgtacacacgtgtgtgtatacacgtgtgtgcatacacgtgtgtgtgtatacacgtgt

SEQ ID NO: 915325 - DNA, 120 bp, Artificial Sequence
  ENSG00000287643_9 (sequence is synthesized)
acacgtgtgtatatacacatacatatatctatatatacatgtgtatatacacactatgagtaaatgctgagatgtataagcatttataagtatatatacacatatacatatgtgtatatg

SEQ ID NO: 915326 - DNA, 120 bp, Artificial Sequence
  ENSG00000287643_10 (sequence is synthesized)
atatacacatatctatatatgcatatgtgtatatatacacacacatacattttatttatatgagtaaataaaaataaatgctgagatttataagccatgctgaataatttctttaggctg

SEQ ID NO: 915327 - DNA, 120 bp, Artificial Sequence
  ENSG00000287643_11 (sequence is synthesized)
aatgctgagatttataagccatgctgaataatttctttaggctgctggttttggtctctagtgtaagtaactatcatacagtagtgtatttatcaggggaaccagcccccaatatttcaa

SEQ ID NO: 915328 - DNA, 83 bp, Artificial Sequence
  ENSG00000287643_12 (sequence is synthesized)
cacaaggcaaatgggcagggcaaggtcacaatgccagggcgaaattagaattactgatgaggttcactgtcccgctatgcaca

SEQ ID NO: 915329 - DNA, 120 bp, Artificial Sequence
  ENSG00000287643_13 (sequence is synthesized)
cagtctgcctacaatttcgccaggctggaatttcccaatcctaacaagcctgggggcgctgctggagaccagggcatatttcatcccctatccacaactgcgtaagacagacactcccag

SEQ ID NO: 915330 - DNA, 120 bp, Artificial Sequence
  ENSG00000287643_14 (sequence is synthesized)
agtggccattttagaggcctccccctgggaatgcattcttttcccagggctgctccttgctaagaaaaagaattcagcgatatttcttttatttgcttttgcaagaagagaaatatgact

SEQ ID NO: 915331 - DNA, 120 bp, Artificial Sequence
  ENSG00000287643_15 (sequence is synthesized)
atatgactctgttccgcccagcccgcaggcagtcagactttatggttatctccttgttccctgaaaatcgctgttatcctcttccttttctaggtgcccagatttcatattgctcaaaca

SEQ ID NO: 915332 - DNA, 120 bp, Artificial Sequence
  ENSG00000287643_16 (sequence is synthesized)
ctacaaacaatttatacagacaacgcaatcatcacaggatcctgagacgagatacatcctcagcttaagaagaagacgggattaagagattaaaggacaggcataggaaactataagagt

SEQ ID NO: 915333 - DNA, 120 bp, Artificial Sequence
  ENSG00000287643_17 (sequence is synthesized)
cttctgccatggcttcagctggtccctctgttcggggtccctgtcttcccgcaacagtactgttctaacctgtctagtaatgaggccaagaatattgatttaatcccccaaacacaccag

SEQ ID NO: 915334 - DNA, 120 bp, Artificial Sequence
  ENSG00000287643_18 (sequence is synthesized)
taatcccccaaacacaccagttagcttagctctgttctaatattaaaatatgtacccatcattgtatctacagtggtaagatctaacactgccttaaaaccatataaagaaaacaagtac

SEQ ID NO: 915335 - DNA, 120 bp, Artificial Sequence
  ENSG00000287643_19 (sequence is synthesized)
aatataataatcacatcattatacagataacacaatctaaatcattacgatcaatcaatgacataggtttccttacctcggtccattgctgtcttttctcctggttgaacagttgccttg

SEQ ID NO: 915336 - DNA, 120 bp, Artificial Sequence
  ENSG00000287643_20 (sequence is synthesized)
ttcagctttggttcgctgatccgtgaactcatttgcagtcctatctacaacttctccagcatcaagtgctctgtgtagtcgatagttgaccatcttcagaacaatgaaaacagcagctat

SEQ ID NO: 915337 - DNA, 120 bp, Artificial Sequence
  ENSG00000287643_21 (sequence is synthesized)
cacaggacaataaactgctactataatcatggtagaaggaagggcctttaagagaaagaaaataaggaaatacattttaaaatattttatatcgtattcaattagataaatctgtatcta

SEQ ID NO: 915338 - DNA, 120 bp, Artificial Sequence
  ENSG00000287643_22 (sequence is synthesized)
aaataataaacacatttacacacaaagcaacaactatgttactagcgctaagctgcaaaacttagcagcttcaatgcccaatgcaaaagacactagctacatgtggctactgagtaactg

SEQ ID NO: 915339 - DNA, 120 bp, Artificial Sequence
  ENSG00000287643_23 (sequence is synthesized)
aaatatggctagtttgaactgagatgtaaagtgagaataaacactgcatttcaaagattcaatataaaaaatgtaaaatatctcaattttaatgttgattacatgttgaaataatactta

SEQ ID NO: 915340 - DNA, 120 bp, Artificial Sequence
  ENSG00000287643_24 (sequence is synthesized)
gattatactggtcaaataaaacattattaaaattaatttcatgtgtttctttttatttaatgtggctactagaaaatgttaaattacatatatggcttgcctgcattacattcccactgg

SEQ ID NO: 915341 - DNA, 120 bp, Artificial Sequence
  ENSG00000287643_25 (sequence is synthesized)
acagcacaggtatacagtccatgccaaaagccttatcatacaattggagaacaaaggtatcacattacagtatatgtgaagaaatcaaggttgtgatccaaatataatgcctctttatgg

SEQ ID NO: 915342 - DNA, 120 bp, Artificial Sequence
  ENSG00000287643_26 (sequence is synthesized)
gctctgtgcaaccgttttttaggatacattcttcgtattccagaaaattggaagttaaaactgtcatgagaatgaccttagaactgtgactgtaaaaccaggtaagatatggaagacatg

SEQ ID NO: 915343 - DNA, 120 bp, Artificial Sequence
  ENSG00000287643_27 (sequence is synthesized)
caaaatccaggtgggttttattttaaaatagttaaacatttaaaatacttaaaaattgtggcctgccaaacaaaaagaataaaagaacacaggacagaatcaagtaacagattaaataaa

SEQ ID NO: 915344 - DNA, 120 bp, Artificial Sequence
  ENSG00000287643_28 (sequence is synthesized)
ataagtcagccaaacatcctgggtgtggggctgaaggcccatcacacaggaggattcagtgatggggaacttgagtccacaggtggcaggcttggagaacagctcactgggaaggcaagg

SEQ ID NO: 915345 - DNA, 120 bp, Artificial Sequence
  ENSG00000287643_29 (sequence is synthesized)
cctagagtcactactggcagaggtaatacaactaggctcaacttatcccaatttcatgagaaaaatcacccagacatctatagctctagatcccacatgttttcacaagattcaatctca

SEQ ID NO: 915346 - DNA, 120 bp, Artificial Sequence
  ENSG00000287643_30 (sequence is synthesized)
tctagatcccacatgttttcacaagattcaatctcagttatctgagaacatgaccccaaattggctttaaaagagtaacctctagccaggcgtagtggtgggcacttgtaatcccagcta

SEQ ID NO: 915347 - DNA, 77 bp, Artificial Sequence
  ENSG00000287643_31 (sequence is synthesized)
ggaggtggaggttccagtgatactccatttcaaaaaaaaaaaagttaacctcaaatcacttgagacaaaaataaaaa

SEQ ID NO: 915348 - DNA, 120 bp, Artificial Sequence
  ENSG00000287642_0 (sequence is synthesized)
aaccgcccaggtgcgacccgcagcagccttggcgatgcagctcgttctccagacgcgggtccacaccggcgcgtcctcgcctccagggaccgatcgctgttctccgtggccggtgacttg

SEQ ID NO: 915349 - DNA, 120 bp, Artificial Sequence
  ENSG00000287642_1 (sequence is synthesized)
gggcgccagtgagaagcaagtagtcaaagaaaacatcccgggcaaaccggctgaccgaaaatccactgtcggggtagggaggcgccctctacggggatgaagtcatcgctacctttgact

SEQ ID NO: 915350 - DNA, 120 bp, Artificial Sequence
  ENSG00000287642_2 (sequence is synthesized)
ctttgatcctagataaccgaccaagacgtttccagcctaatgcctgacgccttttgcttcctccatcctggtcctcagtccctgaactcccaggacagaattcctgacctccttggtcaa

SEQ ID NO: 915351 - DNA, 120 bp, Artificial Sequence
  ENSG00000287642_3 (sequence is synthesized)
gccttggatcgagaaagagaaactattagtgtaaacaaaccaatcaaccccaaaaccaaaactgtgcctgccaatagcccatttcttggccattgatggtgcatgaagagaaatggatcc

SEQ ID NO: 915352 - DNA, 120 bp, Artificial Sequence
  ENSG00000287642_4 (sequence is synthesized)
aaggaatattgactgttcaggctcaagttaaattacagcagatcgaaagtgaggagttgagtggcatcttcttttctcttactgtcgaccttgttaaatggggagtccacaccccttgcc

SEQ ID NO: 915353 - DNA, 120 bp, Artificial Sequence
  ENSG00000287642_5 (sequence is synthesized)
tactcctccctcctcaaccccgtgacagtgggcctccccccaactgtattgagcatgcactctaaaacagttactttttgagaagtcaagtctggtgacccattctcagcccctcatccc

SEQ ID NO: 915354 - DNA, 120 bp, Artificial Sequence
  ENSG00000287642_6 (sequence is synthesized)
tttgatctccttggcagcatcctaccctaaggccttctctatgcttctctggacttctctgctgacccttctcttcctttgaggacagtaacaaggtttttccaactctcgatctcccag

SEQ ID NO: 915355 - DNA, 120 bp, Artificial Sequence
  ENSG00000287642_7 (sequence is synthesized)
tatcccaaagaaataccttctgatttcaaactgaacccatccagatgtcgtgggacctgaagcttgtataactcctgggggaacttcttaaaggaaagcaataaaaacttacaaacataa

SEQ ID NO: 915356 - DNA, 120 bp, Artificial Sequence
  ENSG00000287641_0 (sequence is synthesized)
ttgcaaaaattgagaaaatttgtttggaagataacctcaagtgtgtagctgaacaactatttgataaaaaaaatttctgtgggtatgagctataaacctaatcagccatctcaacagaaa

SEQ ID NO: 915357 - DNA, 120 bp, Artificial Sequence
  ENSG00000287641_1 (sequence is synthesized)
ccagaaagagatacctcgcaagaattggaccacgcctgcacactgttaatgaactcccagcctccataactaggaaaagccaagtgagaaaacagagaaggtggctgtctataagcaaga

SEQ ID NO: 915358 - DNA, 120 bp, Artificial Sequence
  ENSG00000287641_2 (sequence is synthesized)
tgttatgacagccctagcagatgaatatgcctattttccacattttattaattttagaatgactcttctttcttttgaaagcaactattgtgaaaagttgagagtaaaagcaagtggaga

SEQ ID NO: 915359 - DNA, 120 bp, Artificial Sequence
  ENSG00000287641_3 (sequence is synthesized)
tggaaagaaaatgactgagaaaataagcttgttcttaaactctggcttgtatttactagagtttttactagctagagtatttactacacaagaagatacctgcagactgctgtggttgca

SEQ ID NO: 915360 - DNA, 120 bp, Artificial Sequence
  ENSG00000287641_4 (sequence is synthesized)
caaaagtctgattgtaaggttttctcttgggctgaaatatttcttatccttctgccccaccatgtatagggagctaactataatttatagtcagaatgtatgcggtatagtcagcttata

SEQ ID NO: 915361 - DNA, 120 bp, Artificial Sequence
  ENSG00000287647_0 (sequence is synthesized)
agtttaaaacttgaaggagaaaaagaggtttctaaaaatcaaactgctgtggaaactgctttacccaaagctttggtccacagccttcataagatcacctatcagggcaaataaaattta

SEQ ID NO: 915362 - DNA, 120 bp, Artificial Sequence
  ENSG00000287647_1 (sequence is synthesized)
gccatgtgaacaggtcccattttgtcagaaatataatttggattcaactgtccttttataaactgatctgatcagaacctgaattctcctaattttcttcaatatttggctgcaactctc

SEQ ID NO: 915363 - DNA, 120 bp, Artificial Sequence
  ENSG00000287647_2 (sequence is synthesized)
caactaagagcaaaaactgctctgtgcttgccgccttagaagatgaagctagacaacttgatataaatttcaagagacaagtctcatacccgaaaaaagaaggacaagtcttgtgccaca

SEQ ID NO: 915364 - DNA, 120 bp, Artificial Sequence
  ENSG00000287647_3 (sequence is synthesized)
cagaaagttcaccaatccacctgataccatagcagagaattcaaactgcaagccaagagaagttgatggcttcatgctataggcagcgtttcccaagacactccatcaaaatgagactct

SEQ ID NO: 915365 - DNA, 120 bp, Artificial Sequence
  ENSG00000287647_4 (sequence is synthesized)
tgcccctcttaatttttcctttcttatgcttacctttttctttggcaagataatgatgtaattcagatttcacaatcagcagcttctgctcataacttaaaagaacatgacctcttaggt

SEQ ID NO: 915366 - DNA, 120 bp, Artificial Sequence
  ENSG00000287647_5 (sequence is synthesized)
atctattgtttaaataaaaaaaagtctacgcttccactaatactacatgttatacttgggtaaattcctctggggaagttgaggcccatatccacagaattttttaaatgggtcacacag

SEQ ID NO: 915367 - DNA, 120 bp, Artificial Sequence
  ENSG00000287647_6 (sequence is synthesized)
taacaacagatgtcatctaattctcaatggtcatttgctttattcaattgtttgtctttaagactggattcatggctcaaaaccattatacaaacttggatttaccatattactattaat

SEQ ID NO: 915368 - DNA, 120 bp, Artificial Sequence
  ENSG00000287647_7 (sequence is synthesized)
tttattttatatttttgtttttaaaacttgtacctgttgcttgttaaatttctgcagaagtacaactcctaacagaataatgctggcccagtgctttgagattgtggccaaaatactatg

SEQ ID NO: 915369 - DNA, 120 bp, Artificial Sequence
  ENSG00000287647_8 (sequence is synthesized)
tagcaataaattccaggtagacttagcctgagagccatttcctccaagcctcccttgttgctcaaatgtggctagaacgcttttgacacagattcctactcaccaatcacgtcttctgat

SEQ ID NO: 915370 - DNA, 120 bp, Artificial Sequence
  ENSG00000287647_9 (sequence is synthesized)
atgggaccagaccaacaatctgggacacatcctggcaccaagggacaatgaaaatctaactacaggatgattgaatggtgatactttcagaaaaagatcttgatcaaaaggggggaaatg

SEQ ID NO: 915371 - DNA, 120 bp, Artificial Sequence
  ENSG00000287647_10 (sequence is synthesized)
tgaaagttatcagaatcaaaatagagtcacttgtgtcaacaagaaaaaaacaaaaccaaaaacagctgaaaaacagtgcttgggaaggccataaagggaggattctcacgcacaagttct

SEQ ID NO: 915372 - DNA, 120 bp, Artificial Sequence
  ENSG00000287647_11 (sequence is synthesized)
tgataacaaaactaccacaaaaaattctgcaaaaactacaacttcacacaaaggccatcacaaccttacacagaaaacacttctttgaggacatctgcccagcaattgcctttccaaact

SEQ ID NO: 915373 - DNA, 120 bp, Artificial Sequence
  ENSG00000287647_12 (sequence is synthesized)
tggactgacaccacctttgttacttatccttgtagccaaggataattatctcaaaactattatgtaatcctcctcatttttttcttacaagacctttgtcttcctttacctccctgaata

SEQ ID NO: 915374 - DNA, 120 bp, Artificial Sequence
  ENSG00000287647_13 (sequence is synthesized)
cacacatagtttacaatggcacccatattcctattgcaatgcccatttctgaataaatatcattttctgttagagaatttccctctctgttatttagaatgacacaatttgctaggatca

SEQ ID NO: 915375 - DNA, 120 bp, Artificial Sequence
  ENSG00000287647_14 (sequence is synthesized)
aatattcttttaaaccaagagatagcactcttgatttaaaagagtgacatagggttatatttttaaagaagtcaaatatgcttctagtgcttttgggcgttggctcctaattgttctcta

SEQ ID NO: 915376 - DNA, 120 bp, Artificial Sequence
  ENSG00000287647_15 (sequence is synthesized)
cccacttccttcctaaactgcttagaatcctcagctcattaccacttatactctgccaatgctttgctctctgcctttctgaaccacatatttgctaaaattccatcactgtgtgaacca

SEQ ID NO: 915377 - DNA, 120 bp, Artificial Sequence
  ENSG00000287647_16 (sequence is synthesized)
aattactgaccttctctgtgtcctgctagaattccacaacactcagtatagcgcctataagagtgtctggcacctaaggccacccaataaacatttgctaaaggaatgaaaaaaatgaaa

SEQ ID NO: 915378 - DNA, 120 bp, Artificial Sequence
  ENSG00000287646_0 (sequence is synthesized)
agcgttggccgccgcgcacgtcgggagttgtagttctggctaggccgtgcgtcctgcaccgatctccgggcccgccgcggcgcccgctggcctggggttccggcttacagcgcgggaatt

SEQ ID NO: 915379 - DNA, 120 bp, Artificial Sequence
  ENSG00000287646_1 (sequence is synthesized)
cgggaacccagcgcgggctgcagaggccccagcaggagccccgcctcccggctcgtcgacggattcgttcttggccctgccaatctgattctcagctcccagaacttcacgatttagaat

SEQ ID NO: 915380 - DNA, 120 bp, Artificial Sequence
  ENSG00000287646_2 (sequence is synthesized)
gtagacttttgctttgtgacagttctccccatccccgactactaaatgacgaaccctctttaactgtgaaatgtacctgcaaagtcaagcagtgtctttggatacccaagttcagatatg

SEQ ID NO: 915381 - DNA, 120 bp, Artificial Sequence
  ENSG00000287646_3 (sequence is synthesized)
aacaagcaagctacaaaagcggggtgggcgggtatgagtgagcagaagagagaaaccgggctgcaaaaaaggaaaataaaggcgggacgtgggggtatgatttgctgaatggtaccaaag

SEQ ID NO: 915382 - DNA, 120 bp, Artificial Sequence
  ENSG00000287646_4 (sequence is synthesized)
ttgattttttgcaccgtgcacagtgatcgagctgagcaaattattttttttttaattataagcagcgagtgccttgctgcctcctcatgtgtgtcaataggagagtgatgatatttgagt

SEQ ID NO: 915383 - DNA, 120 bp, Artificial Sequence
  ENSG00000287646_5 (sequence is synthesized)
tggatcttaaagagtaagtaggagtttgccacacaaagaagttgggtaaggaaattcctgcaggagaaacctgtatttgcaaaggcaagaatccagacggagtgtgtcaaattcgggaaa

SEQ ID NO: 915384 - DNA, 120 bp, Artificial Sequence
  ENSG00000287646_6 (sequence is synthesized)
agaacaaaattcaaggtggccatattatctctgggaagaagagaggaagggcaagattgctgctagcatgctggatattctccattccaccttctagtggttcctcccagctcttccagc

SEQ ID NO: 915385 - DNA, 120 bp, Artificial Sequence
  ENSG00000287646_7 (sequence is synthesized)
tctgcatcaactgacctgaacaggcaaaaagactgcactatccaggctgcctggccctctggcttccagttggttgccgccgataggaggcatcagcaggaaattggaaagtaggaggaa

SEQ ID NO: 915386 - DNA, 120 bp, Artificial Sequence
  ENSG00000287646_8 (sequence is synthesized)
agagatacggatattaaaccaagattccactagcccatgcctaagcctgcctggccaagattgtaacagtggctgaattccttgacccaaagaccacatgtcctgatggatagcatacca

SEQ ID NO: 915387 - DNA, 120 bp, Artificial Sequence
  ENSG00000287646_9 (sequence is synthesized)
gttacaccaactcagaagtgtctgtagttatccaggaaggaaggtgttaattacggatttgaagtgtcaaggtcaaaaaacacatgacaatacagaaaaataatagaaataacttgtcaa

SEQ ID NO: 915388 - DNA, 120 bp, Artificial Sequence
  ENSG00000287646_10 (sequence is synthesized)
tgatgtttctgagatgaacaatcttaggtgatgagagactgtagatgcagtggggtaaggggcgataatactgtagaagaaatataaaaaatccattgacttaaaacaagcatgttacaa

SEQ ID NO: 915389 - DNA, 120 bp, Artificial Sequence
  ENSG00000287646_11 (sequence is synthesized)
gtaaaatgggggtcaaactatgaaagggttttacttatgttgcacccaaggtcaacataaacattttattttattttcattgttgagcatatattgctcctgtaattagacaaaaataat

SEQ ID NO: 915390 - DNA, 120 bp, Artificial Sequence
  ENSG00000287646_12 (sequence is synthesized)
taaatcccattcattacattcaaagcaaataatctatcattctcctattagactattgattcagcaatttttcctaaaaaaaaatcaacctttgatttattaattctactatttaaaaac

SEQ ID NO: 915391 - DNA, 83 bp, Artificial Sequence
  ENSG00000287646_13 (sequence is synthesized)
ctcctgggttcaagtgattttcctgcctccacctcccacatagctgggatcataagcatgagccactttttcgccacaatgac

SEQ ID NO: 915392 - DNA, 85 bp, Artificial Sequence
  ENSG00000287646_14 (sequence is synthesized)
tgggctacatccttctttaagtgtgttttgctgttctttttttaacttcttaagctaaaggtcttgtttacattctttctttatt

SEQ ID NO: 915393 - DNA, 120 bp, Artificial Sequence
  ENSG00000287646_15 (sequence is synthesized)
cttcttaagctaaaggtcttgtttacattctttctttattagttatagagaattttaagtccatgaatttgcatgtaaaaaaagttttaatcatgtatcatgagtttcaatttgtaaggt

SEQ ID NO: 915394 - DNA, 120 bp, Artificial Sequence
  ENSG00000287646_16 (sequence is synthesized)
tttgttctcagccaatctgaaactgctgttttgatactttctgtttcacccaagatccatgtaggaagatggtctttaatcaccaagtctttcttacatacactttagttattaatttcg

SEQ ID NO: 915395 - DNA, 120 bp, Artificial Sequence
  ENSG00000287646_17 (sequence is synthesized)
acttttattatatcagagtcagcaacaattacaaaaggtcagggccttttgtaatttgaatgttaaagtcaaagattttaggtgaacttgaaaaaaatgggcaatagatgtctgcgtgga

SEQ ID NO: 915396 - DNA, 120 bp, Artificial Sequence
  ENSG00000287646_18 (sequence is synthesized)
gcgctcaccaggagtaggagtcattacgtgagcccttcgcggccccagcgtcgccaggagagcttccagcctctctagaatcactactgcgcacttcctggacagcagtctccgtcgcaa

SEQ ID NO: 915397 - DNA, 120 bp, Artificial Sequence
  ENSG00000287646_19 (sequence is synthesized)
aacaaaattacatttggaaaatgatttgcattttctcggtctgatcatttcacgttccctgggaaagggatgtcaaggcagagtgccttgctgcctcctcatgtgtgtcaataggagagt

SEQ ID NO: 915398 - DNA, 120 bp, Artificial Sequence
  ENSG00000287645_0 (sequence is synthesized)
aggctaatacagctgccagagaagggctgaacactcaaaaggctttagtcatcaaaatatacagtagaacagtagaaaatgactggaatggttgttggtggaagatggtgcagagtctaa

SEQ ID NO: 915399 - DNA, 120 bp, Artificial Sequence
  ENSG00000287645_1 (sequence is synthesized)
gagaattgacgtattatcttggatcccagtggcaagggaacacttctgtcctacaataatctctcccatccccaacaggaaaaagcagaggaacaaagaaaaaccacaaacgaaccccga

SEQ ID NO: 915400 - DNA, 120 bp, Artificial Sequence
  ENSG00000287645_2 (sequence is synthesized)
aatctgaattgggattattatggtgatttcgatcttgcaattgcagctatttcaccaaaggcttttatttcatccttgcactgtacttaccataagatgcttgctacatgtaaacatcag

SEQ ID NO: 915401 - DNA, 120 bp, Artificial Sequence
  ENSG00000287645_3 (sequence is synthesized)
tacctatttctgttattgcagaaccattttattcagcactgacatagagcataaacatgaataaggtatattcttttcaagcaagaaatgtgagaggtaaacacaaatagcaataacata

SEQ ID NO: 915402 - DNA, 120 bp, Artificial Sequence
  ENSG00000287645_4 (sequence is synthesized)
cttgtaaaagtgctctgagaaagaaacagatgaagtgctgtggggattaccggcagaaagggctctgtctcattccttagcagagccttagagaaatgttttgctggaagatgggttggc

SEQ ID NO: 915403 - DNA, 120 bp, Artificial Sequence
  ENSG00000287645_5 (sequence is synthesized)
tccgtaaaccccttgaggacaggaaccacacctcattcatctttgtatcccttcctgctaacatttgatgaatgtttaaaacacattttttaaataatattgtatacaagggagttgact

SEQ ID NO: 915404 - DNA, 120 bp, Artificial Sequence
  ENSG00000287645_6 (sequence is synthesized)
ctggagccaaatttctggttcaaatcccacctctgctaagttagcgaacgagctaccaaattttaattatattttatagaaaacttgttttctccaaaacgaggtgtgtgtgtgttttaa

SEQ ID NO: 915405 - DNA, 120 bp, Artificial Sequence
  ENSG00000287645_7 (sequence is synthesized)
ttctaatgtcatgctcttagtataacagaagaaaaatgtttcctattgaggactccattcatggtagaaacatccataattgtcttacatggtgagagagtctttaaaattatcatcatt

SEQ ID NO: 915406 - DNA, 120 bp, Artificial Sequence
  ENSG00000287645_8 (sequence is synthesized)
gtatattattaaaaactaaaacaaagcagtatccctgatgtctaattatagtgaattgttccttagtgttttcatggacttctgggaattcacaaaataaacaaactgagaggatggcca

SEQ ID NO: 915407 - DNA, 120 bp, Artificial Sequence
  ENSG00000287645_9 (sequence is synthesized)
tggttattcatgaactagaatttcagagttagagagggcctcagaccattctatatattaatctcctcactattggtgaggaagccaagctatagagaagacttaagtcagaagaatgaa

SEQ ID NO: 915408 - DNA, 120 bp, Artificial Sequence
  ENSG00000287645_10 (sequence is synthesized)
taatatattatatataatgtataataaataaacaaaagtgtaaaagtaggatgaataatcaacacatgaaattatgaaaaggcataatgggatatttgggtttaaactacagagacagag

SEQ ID NO: 915409 - DNA, 120 bp, Artificial Sequence
  ENSG00000287645_11 (sequence is synthesized)
aaataatggctgatagtgatttaggtcacaacaagtgagcatgactgatttggggaaaaaacattcttttccacaaagagaagtaagtgctgtaacaccaccaccaccaccaccaccaac

SEQ ID NO: 915410 - DNA, 120 bp, Artificial Sequence
  ENSG00000287645_12 (sequence is synthesized)
actcaatatcttatctttctgtttttaattctatccttaattttattctaatgtgttaatcttatctccagaaaaatgtggctaggtcataccatggggaaggatgactttgatcaatga

SEQ ID NO: 915411 - DNA, 120 bp, Artificial Sequence
  ENSG00000287645_13 (sequence is synthesized)
ttatatcataatacttaaagttttattaaatccttactgctatctctaatgtttaagttagcctcctattaattggatgtcagctcagtgctatgaaatatttttatatatctatctctc

SEQ ID NO: 915412 - DNA, 120 bp, Artificial Sequence
  ENSG00000287645_14 (sequence is synthesized)
tatatatgtgaatgtttaaaatcatgcccttgtctttaagaaatttctaatttaaaatagatgagattcacaaggtactaacacagttcacctatctctgcaactgacctttaatttggt

SEQ ID NO: 915413 - DNA, 120 bp, Artificial Sequence
  ENSG00000287645_15 (sequence is synthesized)
tgtttaatttgtccttgaatatacctggttcaattatcacgcaggaatgaacaatacagaaaattcttgctgatttttatcacaaaagaagtagacatgtaccagcagtgcagctggagc

SEQ ID NO: 915414 - DNA, 120 bp, Artificial Sequence
  ENSG00000287645_16 (sequence is synthesized)
cagaggggctccagaggtgacagtgctctcaataaatgcctgaccttgaccttcacccatgaagtgaatgatgctgaacttccaagaactcagacagggttgcagatggattttattacc

SEQ ID NO: 915415 - DNA, 120 bp, Artificial Sequence
  ENSG00000287645_17 (sequence is synthesized)
tttctgatgtaaatctatacttagttgtaaagtgttattcttaaatgttcctacttattaatttagctgatttatttgcatttatatttgaacatttcttgcaaatgtaaatagctttcc

SEQ ID NO: 915416 - DNA, 120 bp, Artificial Sequence
  ENSG00000287645_18 (sequence is synthesized)
atttatgctcttgatcatttgctttgtcaataaacatacttaattccacaggaatcctaaagaacagagcattatagattcatgaatccaagtatttaatttcatattttattgctaact

SEQ ID NO: 915417 - DNA, 120 bp, Artificial Sequence
  ENSG00000287645_19 (sequence is synthesized)
ttttatgtaaaaagagtgagtaatgttcattaacacatcatatttatttatgaagttatattttcatgatgaaattttatactagcttaacatctatacaagattttctctagtgggtaa

SEQ ID NO: 915418 - DNA, 120 bp, Artificial Sequence
  ENSG00000287644_0 (sequence is synthesized)
agacgcctcaaggctgcgcgcgaagacacggcgcaggcagactcacagacggggctcccccaccctggacacggcggcagcgagttgggaagcccaggaaaccccgggttcccgtcggaa

SEQ ID NO: 915419 - DNA, 120 bp, Artificial Sequence
  ENSG00000287644_1 (sequence is synthesized)
gcctcccggtacccagtcccctcccgcagcaccaatctggggcaggacatggggccccgacgcctgcgggaaccaggggctccccaaaatccccaggggaggaattacctcgcagcgggg

SEQ ID NO: 915420 - DNA, 120 bp, Artificial Sequence
  ENSG00000287644_2 (sequence is synthesized)
atcagggtgcggggtcccgggagaggagccgtccagggggccgcggctcaggggcgcggggcgatggcagcggccatagcgagtcacgtgcggaggctgaaactttacccggagccccag

SEQ ID NO: 915421 - DNA, 120 bp, Artificial Sequence
  ENSG00000287644_3 (sequence is synthesized)
actgaaggggcggagggtacggagcagagacctcgggaagggcgagtcttaaaggagccactcctagttgaagactggaccgtgggaatccgggagaatccctccctcagacccagaacc

SEQ ID NO: 915422 - DNA, 120 bp, Artificial Sequence
  ENSG00000287644_4 (sequence is synthesized)
gaagattcagagcaagaacgggggaccagctggaactgagagctgtgtgaccttgaccaagtcacttcccttccctggatcttaattatctcagctgcaagaaaaagaaaaaaaaaaaaa

SEQ ID NO: 915423 - DNA, 120 bp, Artificial Sequence
  ENSG00000246283_0 (sequence is synthesized)
gtggcctatacaaaagcactccatgtttctgccgatactctgtccttggttgcctgagcaaaattgtataaagggagctgcttggaggggaaaggaacacaataaaacgcctctggaggg

SEQ ID NO: 915424 - DNA, 120 bp, Artificial Sequence
  ENSG00000246283_1 (sequence is synthesized)
gctaaagtacctctcccctgaggcaaagtcccgacacatctgtgattgaatgcaactatagaagtattagcataaaaatatgtggcctggaaggaatctctgaagatactgaagaacctc

SEQ ID NO: 915425 - DNA, 120 bp, Artificial Sequence
  ENSG00000246283_2 (sequence is synthesized)
aagttccctacattgctaggagccaagggaaggagacactgtacacctagagcgctgaattagcagctgaggttttagtatttgaaagcaaataatataaagcgagtaatgtctacagtg

SEQ ID NO: 915426 - DNA, 120 bp, Artificial Sequence
  ENSG00000246283_3 (sequence is synthesized)
taaaatttctgtgagctgctctagaaaactaaaggacgaaaactttactgtcataattccaagttcagtcagggatttctcagaattgaggtgtgcagcatccagattcccctttatgtg

SEQ ID NO: 915427 - DNA, 120 bp, Artificial Sequence
  ENSG00000246283_4 (sequence is synthesized)
gatagggatccctgtgccatgtcttgcacttacctaagaactataggaattctccatgtacctcctacagtttttctagcagtgttggacaatggattctaaaggttcctgagactttgt

SEQ ID NO: 915428 - DNA, 120 bp, Artificial Sequence
  ENSG00000246283_5 (sequence is synthesized)
taaatttctcataattccagagggaaggccaaaatattgagaatactcaatgataggatgagtttccactctacttccttatcctcaaggcacacaccagagttccactgggtgaggaca

SEQ ID NO: 915429 - DNA, 120 bp, Artificial Sequence
  ENSG00000246283_6 (sequence is synthesized)
gggaagtaggatgtcccaacaccctctgagggttttcatgcattaatcccgccatatgggctgatggttggaactgcctttagttctctaagtaaaggtctaaaaatgcacctgtggttt

SEQ ID NO: 915430 - DNA, 120 bp, Artificial Sequence
  ENSG00000246283_7 (sequence is synthesized)
ctgaacttgggtatacgctgatacataaggactaccatagaagttacatgccttaatcctgtaatacttttgtgtggtatcattctgctaatatattgtccacagggccaaaccccaagt

SEQ ID NO: 915431 - DNA, 120 bp, Artificial Sequence
  ENSG00000246283_8 (sequence is synthesized)
ggcaacttttacaaaaaacattcacatcacaacatgcaacttaaaaaacagttaatgtaactatgccactgtcagcaaggccagcttgcataccagagttaagaatgagagtgtctgtct

SEQ ID NO: 915432 - DNA, 120 bp, Artificial Sequence
  ENSG00000246283_9 (sequence is synthesized)
gcctagggcttaacattcaaagatatttataatctgtgttttaaggttaaattttatatgacccagttttccttctttgttcactatacactaaaattaaacgcctctacgctgtgcaag

SEQ ID NO: 915433 - DNA, 120 bp, Artificial Sequence
  ENSG00000246283_10 (sequence is synthesized)
aaatcactatgtgtgattttactatttcaaccaatccatagaccctgaggatttggcagcagaattcaggagaaatgctacctaaagtgattgagctgttgctaattctaccttctgttc

SEQ ID NO: 915434 - DNA, 120 bp, Artificial Sequence
  ENSG00000246283_11 (sequence is synthesized)
cactcaagtacctccagggactaacaagggaaggcaagggcaactgtgactgactaggtaaccagctattctgttgtgacagaagaaaccaggtaatacttgattttcaaaagataattt

SEQ ID NO: 915435 - DNA, 120 bp, Artificial Sequence
  ENSG00000246283_12 (sequence is synthesized)
taactgctgccctatactacttttagtatagtttggcttgaccttaatagccatgtccctcatcttagatagaataaccaaattggtttaaaattacttgatctatgtcactgaaacctg

SEQ ID NO: 915436 - DNA, 120 bp, Artificial Sequence
  ENSG00000246283_13 (sequence is synthesized)
aaatatgccatcactaagagaacccccaaataaaaaataaagaactaaaaaacacaaccaaaccaaatcaaaccaaaaacctcattctctgtatcatactttaaaactaaaataaaaatc

SEQ ID NO: 915437 - DNA, 120 bp, Artificial Sequence
  ENSG00000246283_14 (sequence is synthesized)
cctgtgtcacaggtgcttgctcagggctgccaacttctatttttcacctgagagacatctaaaagcgcaaactatgcttgtaaaaaccaaaaagtaaatctctacataggacaatactta

SEQ ID NO: 915438 - DNA, 120 bp, Artificial Sequence
  ENSG00000246283_15 (sequence is synthesized)
taagcagacctattgataccacttatatataattagtctgttttctttagaaagtatcagagcagaaacgtctttggttaattctttcctctacatgcaaaataaaatattcttaaacga

SEQ ID NO: 915439 - DNA, 120 bp, Artificial Sequence
  ENSG00000257303_0 (sequence is synthesized)
atgatcatggaaactgatcattgcctgatccttctaccgccttggcgcgctttcttgaggaatgtctttggttaatggcttcacggccatggaggtgacatcatgtggacaacaggctag

SEQ ID NO: 915440 - DNA, 120 bp, Artificial Sequence
  ENSG00000257303_1 (sequence is synthesized)
cagtgctacattaaaaaccagtcatgtggatgtggagaagggtgctgatcaggactccctgtttgctaacaaattctacagcagaaacaaagtattaaggtttgcagccaggaagcaagt

SEQ ID NO: 915441 - DNA, 120 bp, Artificial Sequence
  ENSG00000257303_2 (sequence is synthesized)
gcatggggaataagcctgcagcttcttccaaatgagacagagccaaatcttttttctgagtctgttttcttcatttctattaaaccaaggtcctttttaagcagtcgaatttcatccaaa

SEQ ID NO: 915442 - DNA, 120 bp, Artificial Sequence
  ENSG00000257303_3 (sequence is synthesized)
agtgagctactttgtttgggggaacagtaacagttacctccaccactgactggctgccatctggattgatccggaaagatcccatctgaatggtcttcttggggtccacctgggcaattt

SEQ ID NO: 915443 - DNA, 120 bp, Artificial Sequence
  ENSG00000257303_4 (sequence is synthesized)
cccattctagttcatccaccagagccctgcatgctggtggaagaggagagaatgagagcaggggacagggtagggggtagggtgtgaggagaatgggatcaacccaggatttccattcat

SEQ ID NO: 915444 - DNA, 120 bp, Artificial Sequence
  ENSG00000257303_5 (sequence is synthesized)
ccttctcccaggccttggatctcatgccctcccaaggctctgcttcctccacttctttttcccgttgtgcctttacctccacagtggagatcctggctcctccgagcccaggcggttccc

SEQ ID NO: 915445 - DNA, 120 bp, Artificial Sequence
  ENSG00000257303_6 (sequence is synthesized)
agcagggcccccagaagcagggccagccaaccccagcctttcatctttagcgtaatggggtcgctccacctgggtttgagtgggaataaaacataagtgtgaggagccgactccattttt

SEQ ID NO: 915446 - DNA, 120 bp, Artificial Sequence
  ENSG00000257303_7 (sequence is synthesized)
ccctgacccccccaatcctcaccccaaggctttcaaaggcctcattgtgactctggctctactttccaggaaatggccgggacacaaaggggcttctctgttccagcgcttgagggctct

SEQ ID NO: 915447 - DNA, 120 bp, Artificial Sequence
  ENSG00000257303_8 (sequence is synthesized)
gattcccccagggtggtgggtgggagcgcgagctcaggacttgcggctcagccccagactctacgtggataggtgaggccctaagtgttggtactttagcactgcatgcctagggttcac

SEQ ID NO: 915448 - DNA, 120 bp, Artificial Sequence
  ENSG00000257303_9 (sequence is synthesized)
ggggctttgtggcagctacaggaggtaagttggcgattacgtgaggactacaggcactagggaactgccggcagggagccctcagtcaggccaggaggccagcgaggagagcaataacta

SEQ ID NO: 915449 - DNA, 120 bp, Artificial Sequence
  ENSG00000257303_10 (sequence is synthesized)
gggcccatttggatcctgcaccgaagattcctgcgtccccacctccagcccgtaagtgattacccgtacggacaccagccccctttctaaggactccgccattgctttcgcttcagtcca

SEQ ID NO: 915450 - DNA, 120 bp, Artificial Sequence
  ENSG00000257303_11 (sequence is synthesized)
tccccaaccctcagcgcccagcgcctcgccgcccgcatccgtcccacctctgctcccagggccgccgccgtggcccaagcgctggaagaccgctggactctcactttggccccagtggct

SEQ ID NO: 915451 - DNA, 120 bp, Artificial Sequence
  ENSG00000257303_12 (sequence is synthesized)
cccgaaactacacctggctgcagggagcagggctgtccgggattctccagagcgcttcgccgcctgccacacacggggtgtcccggcgaccgcctgacccagctcccctgacgctaactg

SEQ ID NO: 915452 - DNA, 120 bp, Artificial Sequence
  ENSG00000257303_13 (sequence is synthesized)
gtacctaagcgggactccagcgtgctgcggtgcgagccccaatcagacaccgaccccaaacccgcccctccaaactctcgcgcgaacaggcagcttaggagaggctcccgaacagcaagg

SEQ ID NO: 915453 - DNA, 120 bp, Artificial Sequence
  ENSG00000257303_14 (sequence is synthesized)
aggggtcagccgtagaataggagtggccttaagcgacgacagagtccgggcgtgctgtatgggagcggctagtcgtgcgcgtgagccagcccaggtgggctaggaccttcaaaacggtgc

SEQ ID NO: 915454 - DNA, 120 bp, Artificial Sequence
  ENSG00000257303_15 (sequence is synthesized)
gctgccggccagcgagcagtccaggtttcaatacacaggaaactacatctcccaggaagcaccgcagcaccggacccatctttgtgagcaactacaagtctcaagctatcctgggacctg

SEQ ID NO: 915455 - DNA, 120 bp, Artificial Sequence
  ENSG00000257303_16 (sequence is synthesized)
tagtttgtcggcttacacaattaacggaaaccatactgtacatcttcagtctgacttagggtactgggcagctatagcaaagacccagcattgcccagaaaaggcataaattataccttt

SEQ ID NO: 915456 - DNA, 86 bp, Artificial Sequence
  ENSG00000257303_17 (sequence is synthesized)
agacccagcattgcccagaaaaggcataaattatacctttttcccctttttttgagacggagtctcgccctatcgcccaggctggc

SEQ ID NO: 915457 - DNA, 120 bp, Artificial Sequence
  ENSG00000257303_18 (sequence is synthesized)
aaagtgctaggattacagaagtgagccaccgcgcccggcctaattataccctttcatatccataactttggattccggacctttaccttcaaaggaaggagaggaagactgaagccagag

SEQ ID NO: 915458 - DNA, 120 bp, Artificial Sequence
  ENSG00000257303_19 (sequence is synthesized)
aacccacactagcagttctctaatgagataaataacaaacgatattttatttttattttataaaacatgcagtttacaacaaatttttaaaaaatggaacaaaacttgggacaggcaagt

SEQ ID NO: 915459 - DNA, 120 bp, Artificial Sequence
  ENSG00000257303_20 (sequence is synthesized)
gggatggaagacagatgcttctcagccatcagcaggaataaatgaagccggcagccaagctttgtccaggatccaaaggcccttttggcaatggtattggcaacactggtttgcttgggc

SEQ ID NO: 915460 - DNA, 120 bp, Artificial Sequence
  ENSG00000257303_21 (sequence is synthesized)
caccaacactctacttgctggcccctccaggtatccctgaagcagttggtgacttgtgctaagtcttgaactactgtggtatcctctgtcactgtccaggacttcaatccctagccagct

SEQ ID NO: 915461 - DNA, 120 bp, Artificial Sequence
  ENSG00000257303_22 (sequence is synthesized)
aggaacttacagttatggttccaggagcttctctgcctggatattagtcacccaggatattaagaataccaattactttccatctgggtcaattctagactccatgtctgtaccactgtt

SEQ ID NO: 915462 - DNA, 120 bp, Artificial Sequence
  ENSG00000257303_23 (sequence is synthesized)
ttgcaaagaatgaagaaggaatgaatctggctcctagaacctttgcaacaattctgctgtgttccagttcaattaatagcaccatctgtgaccctagaccctgagcacgtccagtactgg

SEQ ID NO: 915463 - DNA, 120 bp, Artificial Sequence
  ENSG00000257303_24 (sequence is synthesized)
aagtggacaaggtatagccaacttaggaagccatctcccagttctggggctatagaacagtaaagggagagggccgtggttctttgggaagggtagtcagagcgccagcactgaggagaa

SEQ ID NO: 915464 - DNA, 120 bp, Artificial Sequence
  ENSG00000257303_25 (sequence is synthesized)
gacagctgcatctgtcagagacaaaaccaaaagcatgattcaagctgagtggagaaaaagcatcttctcatacttcctatgaaggaaaaatgcaagagaaaaaagggcatggaccttccc

SEQ ID NO: 915465 - DNA, 120 bp, Artificial Sequence
  ENSG00000257303_26 (sequence is synthesized)
tgaacattttagacttgggcaagaggaagttatagttaatggagagtttcgataaaatgtattttactgaatgttaggaggatgaagtgctttgtaaactgttaagtgctattctccata

SEQ ID NO: 915466 - DNA, 86 bp, Artificial Sequence
  ENSG00000257303_27 (sequence is synthesized)
gatgaagtgctttgtaaactgttaagtgctattctccatatgtgcaatcaaaatccacccaattgggggcgctcccaaggtgggtg

SEQ ID NO: 915467 - DNA, 120 bp, Artificial Sequence
  ENSG00000257303_28 (sequence is synthesized)
tgggagggagaccccggcgccggagggcctgcggtcgcctcagccccaccctgggacggcgtgctccctcccctcgctgctcaccttggttcccaagagccgggcggccgcaagacgggg

SEQ ID NO: 915468 - DNA, 120 bp, Artificial Sequence
  ENSG00000285644_0 (sequence is synthesized)
gtagttcaacccaatggcgacccgcgctccggagcatcgcgcggccaagcgttcagtggccgtgctgggagtagtcagcccagccgcggggagacaagcactaaagactgagcgtcctct

SEQ ID NO: 915469 - DNA, 120 bp, Artificial Sequence
  ENSG00000285644_1 (sequence is synthesized)
tggggacgcttgtgtgaagtccttttcctctctgtgcctcagtttccactcagccgtttaaacaaccagaatttcagtcttccagcacagacacctggggctgcaataaggtgaatgcag

SEQ ID NO: 915470 - DNA, 120 bp, Artificial Sequence
  ENSG00000285644_2 (sequence is synthesized)
acaccatgacgcaggctaaaactgggagtgcaggcaggaaggcctggggctgccccacacccactcctggaagttttggggactttgctgctgctcatgcaaaggtctaaatgcccagct

SEQ ID NO: 915471 - DNA, 120 bp, Artificial Sequence
  ENSG00000285644_3 (sequence is synthesized)
ctgtgccagggccctgagacaccgtcaggcatttccaggaggatgtgcccaaacgccagcatggtcctgacagggctgccaggctcatttgcctcttctgaaagcaaaaagaagagacat

SEQ ID NO: 915472 - DNA, 120 bp, Artificial Sequence
  ENSG00000285644_4 (sequence is synthesized)
gaaatgaatttctattaactgggaccatgacttctgcgaaggaatgaaaatgcttttaattcataaccaagaaatcctacttacatttgaaaaacttgtcaacccattgctgaacatctg

SEQ ID NO: 915473 - DNA, 120 bp, Artificial Sequence
  ENSG00000285644_5 (sequence is synthesized)
ggagaacacggggcgggggtgggcttcgttagtgcccagcctggaaccccccaattgccccgaggacctccctggctcaagtagctccagtctctcccggcttgataccaggaacatcat

SEQ ID NO: 915474 - DNA, 120 bp, Artificial Sequence
  ENSG00000285644_6 (sequence is synthesized)
ggcgcacagctcgcgtcccaggtcagccttcgtcttctgtctataattacaccaccctcttgaacgtccctggaccagacgtgtataacagcacatgtccatgagccgacatcaagagga

SEQ ID NO: 915475 - DNA, 120 bp, Artificial Sequence
  ENSG00000285644_7 (sequence is synthesized)
ccatgctctgcataccatcctgtggcatgccctcccctctgtgggacccctcatgttgtgcagggacccccagtcctctctcacagctgtgcagtgtgccgctgtgggaactcacagctg

SEQ ID NO: 915476 - DNA, 120 bp, Artificial Sequence
  ENSG00000285644_8 (sequence is synthesized)
gaggctgaggcaggaggatcgcttaagcccagcggtcaaggctgcagtgagtggagacactcaacgccagctgctgtgaaagcagccaggagggaggttgtaccctgaaaagccacaggg

SEQ ID NO: 915477 - DNA, 84 bp, Artificial Sequence
  ENSG00000285644_9 (sequence is synthesized)
tgcgtggcctggatgtgagacctggagtcaaaagagatcgttttggaactttaaaatttgactccccctctggattttggactt

SEQ ID NO: 915478 - DNA, 120 bp, Artificial Sequence
  ENSG00000285644_10 (sequence is synthesized)
ctgaaatgagctaagactttgggagactccagggaaggtatgattggttttgaaatgtgaggacttgagatttggaggtgtcaggagtggaatgatatggtttgggtatgtccccaccca

SEQ ID NO: 915479 - DNA, 90 bp, Artificial Sequence
  ENSG00000285644_11 (sequence is synthesized)
cccacccagatctcatcttgaattgtcctcctataactcccacgtgttgtgggggagacccggtgggagataatttgaatcatgggggtg

SEQ ID NO: 915480 - DNA, 87 bp, Artificial Sequence
  ENSG00000285644_12 (sequence is synthesized)
atcttccttcctttcagccgcgactggagcagctgggacgaagggcaccaagtccctaggctgcaaacagcacggggaccctgggac

SEQ ID NO: 915481 - DNA, 120 bp, Artificial Sequence
  ENSG00000285644_13 (sequence is synthesized)
ccaagtccctaggctgcaaacagcacggggaccctgggaccagcccacaaaaccattttctcctaggcctccaggcctgcgaagacctttgacatgccctggagacataccccattgtct

SEQ ID NO: 915482 - DNA, 68 bp, Artificial Sequence
  ENSG00000285644_14 (sequence is synthesized)
gaagacctttgacatgccctggagacataccccattgtcttggggattaacattccgctctcgttact

SEQ ID NO: 915483 - DNA, 66 bp, Artificial Sequence
  ENSG00000285644_15 (sequence is synthesized)
ttttctatcatattgtcagactgcaaattttccaaacttttacgaatgttttgctgcttagaaatt

SEQ ID NO: 915484 - DNA, 89 bp, Artificial Sequence
  ENSG00000285644_16 (sequence is synthesized)
aaatctctaggacaggggcaaaatgctgccggtctctgctaaaatgcaagttccttatcttcatctgagaccacctcagcctggacctt

SEQ ID NO: 915485 - DNA, 120 bp, Artificial Sequence
  ENSG00000285647_0 (sequence is synthesized)
agcgcagcagcgccacctggtggtcgatgcgcttcctttgcagatcacgcacagccctgagatccacctctccttcctacgcaccacgcatttcttcactggacaccagcctgcgtcaat

SEQ ID NO: 915486 - DNA, 120 bp, Artificial Sequence
  ENSG00000285647_1 (sequence is synthesized)
cttcctgtaaagcaaaagaagcgtgaggttggtgggggaggaatggtgttatctccacctttggcgagatccatgtcaccgtgttcaggggaagggccaggccttactccccatgcagag

SEQ ID NO: 915487 - DNA, 120 bp, Artificial Sequence
  ENSG00000285647_2 (sequence is synthesized)
aggaggctctggccgtgaaggcgcctgtggagagaatggagttctcagcagaggaatgaaagacagccctaggaacatgatacacctcatgggtagctgactgacccacccatctgccac

SEQ ID NO: 915488 - DNA, 120 bp, Artificial Sequence
  ENSG00000285647_3 (sequence is synthesized)
ccccagctgaaggaagcagctagactgtacccttcacccatccttcagttgtattccactggacgtggaccctctacaagtgtggacattcctggatctcagttgctcttcctgctgttg

SEQ ID NO: 915489 - DNA, 120 bp, Artificial Sequence
  ENSG00000285647_4 (sequence is synthesized)
aggagtctccactggtgtggctcatgcctagatgggctctgcaggaggcttagtgtctcccagttctcaaggctaatattcagtgaacccagaccaagcctcaaagtacacaggggctca

SEQ ID NO: 915490 - DNA, 120 bp, Artificial Sequence
  ENSG00000285647_5 (sequence is synthesized)
gattttcatctatgaaatggaagaatccatctccctctttcaggtgtagtggtaattatatatatacatatatatagacacacacatttatacacgaacacatacatgacaatcagtaat

SEQ ID NO: 915491 - DNA, 120 bp, Artificial Sequence
  ENSG00000285647_6 (sequence is synthesized)
agctgaactctataaccaaaaattggatcatggattgtgaaggaagaactcatttcttttctctggtggagcactcggtaggcatttctgccctttgggttcaaatgagaaagtagcttt

SEQ ID NO: 915492 - DNA, 120 bp, Artificial Sequence
  ENSG00000285647_7 (sequence is synthesized)
agcctgagggagaaagaagattatgactattattattattattataatagagataaggtcttgctatgttgcccaggctggggtgcagtgactattcacagctgtgatcatagtggacta

SEQ ID NO: 915493 - DNA, 69 bp, Artificial Sequence
  ENSG00000285647_8 (sequence is synthesized)
gggtgcagtgactattcacagctgtgatcatagtggactacgtccttgaacttcagggctccagcaatg

SEQ ID NO: 915494 - DNA, 120 bp, Artificial Sequence
  ENSG00000285647_9 (sequence is synthesized)
ttttaaatgttaaaatatatgtttttatattcaaaagtgaaaccctatttgatcacagaagactttaagatgcacagacagttagaaacatcacctagacctttctttaaaaaatcactg

SEQ ID NO: 915495 - DNA, 120 bp, Artificial Sequence
  ENSG00000285647_10 (sequence is synthesized)
ctattatattgttgaacctttgtagactgcagtgcaaatggtggtccctggagctgtcttgtgcagtggtgctgattttcattttgttattttctatatatgtatttttatatatgctgt

SEQ ID NO: 915496 - DNA, 120 bp, Artificial Sequence
  ENSG00000285647_11 (sequence is synthesized)
cattttacaaagttgcattcatatgttaagggttatcttggatgttgcttttggaatgtattattatacaagtagttttccatgttataagctctgcataaagtttatacactttttcaa

SEQ ID NO: 915497 - DNA, 120 bp, Artificial Sequence
  ENSG00000285646_0 (sequence is synthesized)
tatactctggtttctcttcaaatcgtataaatctttcgccttttactaaagatttccgtggagagaaacgagtgtgagtctgaaaccaattttttgaggccttgcgtttcttagcagggc

SEQ ID NO: 915498 - DNA, 120 bp, Artificial Sequence
  ENSG00000285646_1 (sequence is synthesized)
ttattttaagtgttttaaaaacagatgcgattccgttaaatcgcgtgtggagctatgtaaagtgtattatagaacaaatgcgagttacggtttttcagcttttcgctttgttaaggtatg

SEQ ID NO: 915499 - DNA, 120 bp, Artificial Sequence
  ENSG00000285646_2 (sequence is synthesized)
tgatatcaattgtattgcatttctgagcagttataatattaagatgttggggtggcttactgcttttgaccaagaagtagggtttgttggttgattacaccagtggtttttaaccccagc

SEQ ID NO: 915500 - DNA, 120 bp, Artificial Sequence
  ENSG00000285646_3 (sequence is synthesized)
cactgagtgatggagggttaccgactcacaagcgagcattaacgcctgaggtccgcctgctgtcagggcagcaaggcatcagattctcctaggagcgggaaccctattgtgaactgcgta

SEQ ID NO: 915501 - DNA, 120 bp, Artificial Sequence
  ENSG00000285646_4 (sequence is synthesized)
cccgcccttggaaaaactgccttccatgaactgggtcccttgtgccagaaaggttggggaccgctggactatccgatcaaatgaagcagggactcggggcgagctcccccgctgctcccg

SEQ ID NO: 915502 - DNA, 120 bp, Artificial Sequence
  ENSG00000285646_5 (sequence is synthesized)
ccggcttctccgtgtagaatcgaagaaggcagtcccaagggctcttctgccccgtatccccgcctgaggagcgtgccaggcgcgcagctagtcctcccccgacccaaccggtttgatgaa

SEQ ID NO: 915503 - DNA, 120 bp, Artificial Sequence
  ENSG00000285646_6 (sequence is synthesized)
acgcaagagaaagtgaattttccagccactcccattggccagaattcgtctcagccgcaagggaggctgggaagtgcagtcatgccttcaggtagccgtgagccctgctagcgataggag

SEQ ID NO: 915504 - DNA, 120 bp, Artificial Sequence
  ENSG00000285646_7 (sequence is synthesized)
attctagagagaggttgagtactggggaggaaaaactagcagggtctgtcccagtaaaggagggaggaaatccatcgcaaaaaatcctgacccccaggccgggcgcggtggctcacgcct

SEQ ID NO: 915505 - DNA, 120 bp, Artificial Sequence
  ENSG00000285646_8 (sequence is synthesized)
acccacaatgcattgcgcactaaataatgttcgtctttaaaattatttcccctttttccttcaacatatctttctcggaaccgagattgctgtcccagaattgtctgaagaaaaaggctg

SEQ ID NO: 915506 - DNA, 120 bp, Artificial Sequence
  ENSG00000285646_9 (sequence is synthesized)
agagtgttccctgactcctccaaggaaacggagactccctttcacggtttgctaagtaacgggtgccttcccaggcactggcattaccacttgaccaaggagccctcaagcggccctgat

SEQ ID NO: 915507 - DNA, 120 bp, Artificial Sequence
  ENSG00000285646_10 (sequence is synthesized)
gccctgatgcaggtgtgacagagggctcacctcttgccttcttggtcacttctcacaatgtcccttcagcccctgtccctatacccgccggttattccttggttatacaacaaagagtaa

SEQ ID NO: 915508 - DNA, 89 bp, Artificial Sequence
  ENSG00000285646_11 (sequence is synthesized)
tacggtttttcagcttttcgctttgttaagagcatgaaagtggacaaggagcgtgaccatggaagcacagcaccacagggaggggttta

SEQ ID NO: 915509 - DNA, 120 bp, Artificial Sequence
  ENSG00000285646_12 (sequence is synthesized)
tctcttgcctcggcacctgggtaatcctccgtccacactcgtctgtctctcctgcaggctgcattcgctgaggtgtgtctgtgttgttcccctttgagttccagtcaaaaaagattccta

SEQ ID NO: 915510 - DNA, 120 bp, Artificial Sequence
  ENSG00000285646_13 (sequence is synthesized)
agagagaattcgctctcacgccagggctaagctcctcccaccaggttcatgagcctggaagtaagtgccgtccaccaatgtcctgcctgctcttcagaggctcctcaagccttccctgcc

SEQ ID NO: 915511 - DNA, 120 bp, Artificial Sequence
  ENSG00000285646_14 (sequence is synthesized)
cagagagattccgggatgaaaaggaaaaacgtccctgcctggcagaaattgatgctgcttctggaaacgtagggcgggtggttgtttccaaaatgtgtctgccatcacttgagctagtag

SEQ ID NO: 915512 - DNA, 120 bp, Artificial Sequence
  ENSG00000285646_15 (sequence is synthesized)
tgggagcatctagttttggagctggacaggcttgggaacgcatccctgactccacaaattatgtgactttggcttaatgacttatcatctgggagcctcactttcctcatctgtaaaaca

SEQ ID NO: 915513 - DNA, 120 bp, Artificial Sequence
  ENSG00000285646_16 (sequence is synthesized)
ggactgacactcaccttgcaggaatactggaggtctgtactgcgctgccaacatctattcgccctcatccgtgacaagagtacccacaatttcctctgggaagctgctcctctctgatta

SEQ ID NO: 915514 - DNA, 120 bp, Artificial Sequence
  ENSG00000285646_17 (sequence is synthesized)
gtgtctgttcagtggttggaggttgaccctaccccagctctgagacggcctggccagcctatcctaattagcatatccctttcaccctggccacagtgattgacttagggctgggctgtg

SEQ ID NO: 915515 - DNA, 120 bp, Artificial Sequence
  ENSG00000285646_18 (sequence is synthesized)
cagaggtgagcctcagctttttgggtaggaacaccaggacttggattccagtgggtttaatgctaggagggcatcaagcttgtgataactgtggccatttttgttaccataagggtagcc

SEQ ID NO: 915516 - DNA, 120 bp, Artificial Sequence
  ENSG00000285646_19 (sequence is synthesized)
agtctgaggatggaagccaatctacaggaaacagagctaagagatactaatgcatccctaaatcacttgagtcctggatcaaaccgttcctgaagctcctactaagctacactgttatgt

SEQ ID NO: 915517 - DNA, 120 bp, Artificial Sequence
  ENSG00000285640_0 (sequence is synthesized)
tctcttcacccagggacactgagtgcctgttcctcttagcgtcacataactcgggatgtttgggaaccgcagcccctccggctgaagtgtccacctgtgctgactgattctggcacttga

SEQ ID NO: 915518 - DNA, 120 bp, Artificial Sequence
  ENSG00000285640_1 (sequence is synthesized)
agcattgccgggcacgctttctctggctgctgcaggtgctccagctttgtcctccctctcggggccgccaggacccaggggaaggctctggagtgagtcattccccccagggttctccca

SEQ ID NO: 915519 - DNA, 120 bp, Artificial Sequence
  ENSG00000285640_2 (sequence is synthesized)
ttctgctgcctcggggccccggcactgggtgtggaccgcccgggcatagcatgaccctgagtgagatgaggagactctgcagcagctgaccaccggaggcggctgcagaccacacgccgc

SEQ ID NO: 915520 - DNA, 120 bp, Artificial Sequence
  ENSG00000285640_3 (sequence is synthesized)
aactacacaacccatctttgtttctagcatagtccacacctgccttagtccacctgggctgccgcaacaaatgaccctaaactgggtggctcaacagcaagcattgattgatcagtgctc

SEQ ID NO: 915521 - DNA, 120 bp, Artificial Sequence
  ENSG00000285640_4 (sequence is synthesized)
tgaaggctggacgcgaaggagccggcagattcagtgtctgtgaaggtcactccctggttgtagcctgctgtcccttcatcgtatcctcacatggcagacagcagagagaaaaaggagaaa

SEQ ID NO: 915522 - DNA, 120 bp, Artificial Sequence
  ENSG00000285640_5 (sequence is synthesized)
acacgctgtcttgaagaccaggacctctaaacctgcagagcccagcaggaaagggaagcacgtcctccgtgagtgatagaatcaggcatgagtcacggggccatcacctgaagctccctc

SEQ ID NO: 915523 - DNA, 120 bp, Artificial Sequence
  ENSG00000285640_6 (sequence is synthesized)
atggtgaagctgtcccttgccactgccttccaaggcatcgtgcagctgccatccattttgtgcacacaccgtatatcaaaccaacctgcccgtgaagcaaaggtaagactcactgcacaa

SEQ ID NO: 915524 - DNA, 120 bp, Artificial Sequence
  ENSG00000285640_7 (sequence is synthesized)
tgttgaattaactcatgagaggcgacatccttctcttattcctgatcataggtgtaaagcacttggattctcaccaacttgttatcactcatcataaaagcaatccttctctgctttcct

SEQ ID NO: 915525 - DNA, 120 bp, Artificial Sequence
  ENSG00000285640_8 (sequence is synthesized)
gatgtctgcctttctctgcttgtctgacacaagtttccctgcggttcatacagatttgatgcctctattcatcttccagctccttctgcggcttagctttcctccttccttccctcactg

SEQ ID NO: 915526 - DNA, 120 bp, Artificial Sequence
  ENSG00000285640_9 (sequence is synthesized)
tctggccattgtctcctcagctccctgctagctgctgactaaactctaatttggtgttgagattgcttttgcactgggcttctttcactaagtgtgtttaatctgctgtgaaattgtttt

SEQ ID NO: 915527 - DNA, 120 bp, Artificial Sequence
  ENSG00000285640_10 (sequence is synthesized)
catggttgcagtcagtgttatagtaacagtttaacaatgtgcatttctttgctttgcaaagggtcttggcagtctctatgcaaattagcacttgtctaatgtcattatgcatggttcctg

SEQ ID NO: 915528 - DNA, 120 bp, Artificial Sequence
  ENSG00000285640_11 (sequence is synthesized)
ggagagcagcaactggaatcctggataaacttgtccactcagtctgggggataaggagactgggataaagaagcagaaactctctcacggatggatggaccaggccttaccttgacgtat

SEQ ID NO: 915529 - DNA, 120 bp, Artificial Sequence
  ENSG00000285640_12 (sequence is synthesized)
gtgatcttccctttaacctgtgaccttgtgtttgggacggtagtaagaagatttcattaaaccagctgaacttttatcatctgaggccgaatgtcaaactctaccctgaaatgcaacata

SEQ ID NO: 915530 - DNA, 120 bp, Artificial Sequence
  ENSG00000285640_13 (sequence is synthesized)
gtgggcttagactggtgtaagaaagtatgttttgattcgggttagttgtggaagctatatttcaggtggaagcatagggtacattggggttagagacttagcctatgatattgtaagaaa

SEQ ID NO: 915531 - DNA, 120 bp, Artificial Sequence
  ENSG00000285640_14 (sequence is synthesized)
gggggagtgaggggctatattgtccaacaattgtaatgtatatttagttctcctaattctggcaacaattctgcaaagttagatgcagagattgcattcccttggaagcttactctgaga

SEQ ID NO: 915532 - DNA, 120 bp, Artificial Sequence
  ENSG00000285640_15 (sequence is synthesized)
tggagttcggaaagcagaatgcttattgtgaagataaataattcaaattaaagctgttggaactttaaagtattttgagcctctaagggaatgtgaattgtgagacctgagtcatgtagc

SEQ ID NO: 915533 - DNA, 120 bp, Artificial Sequence
  ENSG00000285640_16 (sequence is synthesized)
atgcagctacagcttctgttccttcctgtaaatgataagaaaaggccttgtggcaccagagagcagaccccctcagattgtcacccctcctcagaaagcgctggagcactgttccttaga

SEQ ID NO: 915534 - DNA, 120 bp, Artificial Sequence
  ENSG00000285640_17 (sequence is synthesized)
atgtagcaaactgtgagcaatcacatccctgcaactgtgtactggccatgtatggaaatgtgtgatcctgccaaacctctttgtttctgcctatattaataaaaccttaatttcctcact

SEQ ID NO: 915535 - DNA, 120 bp, Artificial Sequence
  ENSG00000285643_0 (sequence is synthesized)
ggggttgaagtcaggccacatggtcacctgggccaaatctccaagcagagctgacccccagagctgtgcagtcattcactcagtgcttaatcaatgtcctggagttctcccggaaacaca

SEQ ID NO: 915536 - DNA, 120 bp, Artificial Sequence
  ENSG00000285643_1 (sequence is synthesized)
gtctctgccttcagggaattcatggtccctttccctagcatgtgtatttagctccactgagatgaagccatactgcataggaagggcccttgatccaatgtgaagacacagggacttgga

SEQ ID NO: 915537 - DNA, 120 bp, Artificial Sequence
  ENSG00000285643_2 (sequence is synthesized)
gaggacgccagggaatgacagaggcagagacagcactgatgcacctgcaagccaaggagtgcaaaggatccatggccatcaccagaagctaggaagaggattcttcccagagcccttgga

SEQ ID NO: 915538 - DNA, 120 bp, Artificial Sequence
  ENSG00000285643_3 (sequence is synthesized)
aaaactggctctgctgacacttgattcaaacttcgagcctgaagaactataagaaaattatttctgttgttttaatccattgggtttatggtactttattacatcagccatgggaaagta

SEQ ID NO: 915539 - DNA, 120 bp, Artificial Sequence
  ENSG00000285643_4 (sequence is synthesized)
ttcccacttggatctttcctattccccacttgagtgcccagcctgcccacatactgaacagttgtcatagaccctatgaagaagacttattaagtggtcttttgtattcagtgcccttgg

SEQ ID NO: 915540 - DNA, 120 bp, Artificial Sequence
  ENSG00000285643_5 (sequence is synthesized)
attcaaattcatgaagaagagttaaactcaaggatcaaatcattctgtatctggtttgaagcatgtgaggtaggatattatcacaaccacaaatggaactatattcatcacattgcttat

SEQ ID NO: 915541 - DNA, 120 bp, Artificial Sequence
  ENSG00000285643_6 (sequence is synthesized)
actgtgttactgattagcttcaccctcaatggtcactaaagaaattgaactgaccatgaatattttatatcaagagaccatcaacctgaaaagagcttccaaaagtaaacgcataactga

SEQ ID NO: 915542 - DNA, 120 bp, Artificial Sequence
  ENSG00000285643_7 (sequence is synthesized)
gatctggagttagtcttccaagacaaagtggcttggatttattttaaatttaaaatgtagtccatgtaattctcgggcagcattatttttcctctataataaatttctagtattggacca

SEQ ID NO: 915543 - DNA, 120 bp, Artificial Sequence
  ENSG00000285642_0 (sequence is synthesized)
caaagaagaggccgaccacagtgcggtgcggccccacaggtggcacatctcaggcacatatggtttgtgactctccggccttctccatacatgtctgctcttacgtacagaggccctgtc

SEQ ID NO: 915544 - DNA, 120 bp, Artificial Sequence
  ENSG00000285642_1 (sequence is synthesized)
tattttttacaaaagggcagaagaaaccttctcaagtgacgctagttaccgtcattccgtggatctggaaacagcttcctccactttaccaatggttttctgtacctagaattagctcct

SEQ ID NO: 915545 - DNA, 120 bp, Artificial Sequence
  ENSG00000285649_0 (sequence is synthesized)
tagttgtagtcacgcgtctcggcggaggcttgggcgccctcctctctaggaacttcgacatctggccggtccttctcgagtctctccacctcgccctgccagccctgttttattcccgag

SEQ ID NO: 915546 - DNA, 120 bp, Artificial Sequence
  ENSG00000285649_1 (sequence is synthesized)
cctgctcgcgggcccctaaggcgtcctctctggcagccgtgcgtcctagcctgtggcgggtggcgccgcgcgtgccctctgcctcaccttgctcacggcgtctctccgccccagtgcgcc

SEQ ID NO: 915547 - DNA, 120 bp, Artificial Sequence
  ENSG00000285649_2 (sequence is synthesized)
tgttggcgctcgctccgctgcctggctaacacctgctgtcctccgaaatcgtccttccggcaagccttccctaacccagtggcagggaagcgcgtttgctgggctcccgcgatgtcctgg

SEQ ID NO: 915548 - DNA, 120 bp, Artificial Sequence
  ENSG00000285649_3 (sequence is synthesized)
tgatgcttattaagcttcagtacactggaaaggaatctggttaaatacagttaacatctacatcccaggaccagtgcaggacctgcagtatttcatgaattaaaaagaaacacaaagaga

SEQ ID NO: 915549 - DNA, 120 bp, Artificial Sequence
  ENSG00000285649_4 (sequence is synthesized)
aaaggtcgcggacaaatccagcgactcgctccagctcgtacactccgtccaggtccggaagaggagtaagcagtcctggcaccccggtctctcgctgcagcgccgcctcggcagggctgc

SEQ ID NO: 915550 - DNA, 120 bp, Artificial Sequence
  ENSG00000285649_5 (sequence is synthesized)
taaacatcgactccatgaggcacagcttgggtggtgggatgcagcggggacctccctgggacagcttcggggcctgagtcctctagagcagccctcagggggtcaaaatcgccttgtggg

SEQ ID NO: 915551 - DNA, 120 bp, Artificial Sequence
  ENSG00000285649_6 (sequence is synthesized)
ggtagggggaatcacagtcggccttcagccggtctcgctatgttgcttggactggagtgcagtggcgcgatctccacaaccttcacctcctggactgaagccatcctcccacctctgcct

SEQ ID NO: 915552 - DNA, 78 bp, Artificial Sequence
  ENSG00000285649_7 (sequence is synthesized)
ctcagactggtcacaaactcctgaactcaagcaatccactcatctcggcctcccaaaatgctgagagtacagacgtga

SEQ ID NO: 915553 - DNA, 120 bp, Artificial Sequence
  ENSG00000285649_8 (sequence is synthesized)
tctcggcctcccaaaatgctgagagtacagacgtgagccaccgtgcccggctacactgcataattttaaacttggtgccgaccggctcgggtttgaatattgtgcttggtcacttgctac

SEQ ID NO: 915554 - DNA, 120 bp, Artificial Sequence
  ENSG00000285649_9 (sequence is synthesized)
tgagtatcttaggaatgtccctatgcccatttccttatctgaagaatggggagttgtgacaatagtacctcttaataagattgttgtgagggtctaattaatttatatacaaaactttac

SEQ ID NO: 915555 - DNA, 120 bp, Artificial Sequence
  ENSG00000285649_10 (sequence is synthesized)
aaagtagttctttggatatcgcatgcagtgaaagcatttgctatttaatcagccaaatactgagcacttactgtacattaggcacttcatttttagtgtttacagtctttggagtaagaa

SEQ ID NO: 915556 - DNA, 120 bp, Artificial Sequence
  ENSG00000285649_11 (sequence is synthesized)
ttatcccgagtggtaccaaggacatgactggcacatcctcaagtcacaggagatgctctgcacagctccagccatcctcaaacactgctgcttcccagcaatacccccagtgcataccac

SEQ ID NO: 915557 - DNA, 120 bp, Artificial Sequence
  ENSG00000285649_12 (sequence is synthesized)
atagacctctaccctccagcccctcacatcccctctactccccatgtttacttatatgcaaacacccccacatgcaacatcacttgaaatgccctccttacatacctctgtcagatacgg

SEQ ID NO: 915558 - DNA, 120 bp, Artificial Sequence
  ENSG00000285649_13 (sequence is synthesized)
aaactgaggttcaaagagactacttgtgtaataagacactaattctgtggcacaaccagcatcaaacccggatctattgaacagggaaggagtgggatgaatgtgggagtaacgagttcc

SEQ ID NO: 915559 - DNA, 120 bp, Artificial Sequence
  ENSG00000285649_14 (sequence is synthesized)
ccatcacccacaaggagattgaaagctcaagggtaaaagtggggagaactcattctgctcttcagatcttactgaggagaagcctggggtacctgagaggcagcctaggtgaaactatag

SEQ ID NO: 915560 - DNA, 120 bp, Artificial Sequence
  ENSG00000285649_15 (sequence is synthesized)
ctgaggagacagaaagggaggcaacactgctaagggagaaaagcaagaataggtcaggagctgtccctggtgctgattgatccctgaccatcctgtgctggaggtcctgtgtaagcgggg

SEQ ID NO: 915561 - DNA, 120 bp, Artificial Sequence
  ENSG00000285649_16 (sequence is synthesized)
agcagcggacatatggacaaccttaggtcctactttcctcttttctcctctgcggctgagatatcttctctccttcacctccctgccacccacccaccccccaatacacacacactcagc

SEQ ID NO: 915562 - DNA, 120 bp, Artificial Sequence
  ENSG00000285648_0 (sequence is synthesized)
ctttaggtgctgtggatgcccctgaaacaaggcctcagacttggcttggactatgggttccatccatagggttggcctcattgatcagcgttacaggaaggcttcgaggtggctccctgt

SEQ ID NO: 915563 - DNA, 120 bp, Artificial Sequence
  ENSG00000285648_1 (sequence is synthesized)
gaccgtgttgtgagcaaaccattcctggcatcccaccttgcagaacttgtggagaagaaacaaaaataacccataatcccactgttttgatgccacttactgatatttgaaaagaggtaa

SEQ ID NO: 915564 - DNA, 120 bp, Artificial Sequence
  ENSG00000285648_2 (sequence is synthesized)
aaataaaatatgaagacagaaaatcccatcatgtatccaaaggcatgaatgaaaagaaagagccttctaccaggacctcctgcaccacccaagagtgccattttctcaggggctgagaag

SEQ ID NO: 915565 - DNA, 120 bp, Artificial Sequence
  ENSG00000285648_3 (sequence is synthesized)
agcccctccaacagggcagtgacccgcttgccacaacccaccttggcaaaagcagtggatatgccccaggactccaggaagcagtgtggcctcagagagcttggtgagaaatgtgtgtgg

SEQ ID NO: 915566 - DNA, 120 bp, Artificial Sequence
  ENSG00000285648_4 (sequence is synthesized)
gcctcagtttccccacctggggtatggtgataatcacccactcagccacgatgctggggagtgctaacagtgcctcctgcagccacctcccagataaaccaccagtactcccatccttgt

SEQ ID NO: 915567 - DNA, 120 bp, Artificial Sequence
  ENSG00000285648_5 (sequence is synthesized)
tggagggcctgtttttaggaaaaccctgactaaggcaggaagctccccgcactgcagcagagggagtcaggatgctgagctctgggtgccccagctgtctggctcaccagccatgagatg

SEQ ID NO: 915568 - DNA, 120 bp, Artificial Sequence
  ENSG00000285648_6 (sequence is synthesized)
ccagggaataagggaacccgaggagaaggagagagatgagggaccagctcctcggtggaggacgcagaatacacacatttattgatgaggtttgccatcttttatgggcacagtttgtgg

SEQ ID NO: 915569 - DNA, 120 bp, Artificial Sequence
  ENSG00000285648_7 (sequence is synthesized)
caccacaaaacaattacaatggtgactttgaagattattgatcacagatcaccataacagatataatgatgaaaaggtttgaaatattgtgaaaattatcagaatataacaacaagacac

SEQ ID NO: 915570 - DNA, 120 bp, Artificial Sequence
  ENSG00000256658_0 (sequence is synthesized)
acacttgatggccttctcgtcccgaggcaccagccagcccgaccccgcaactgccgcggcgggcgggcgcggaactgcggggaagccgaagagtccaacctgctcaaaaaaaaaaaaaaa

SEQ ID NO: 915571 - DNA, 120 bp, Artificial Sequence
  ENSG00000256659_0 (sequence is synthesized)
ggcaggatgacacggcagttaggagcttctctggggccttcaggcagacggtctgggctgtgtcctggctgtgccttttcccagccctacctgcagtcctacacatcttctccacctcca

SEQ ID NO: 915572 - DNA, 120 bp, Artificial Sequence
  ENSG00000256659_1 (sequence is synthesized)
gcggcttctccttctcacatccaccctctgcgaaggcataaatagtagcaactcccttctggattctatgaggtgataattacatgagatggcagagcctggagcacgggagctcctcag

SEQ ID NO: 915573 - DNA, 120 bp, Artificial Sequence
  ENSG00000256659_2 (sequence is synthesized)
agtaacattccagcctcaactacaacaatacttgtagatgaatggagcttccactggaccccatgtcactggtgagggacttcaggcagagagaaagctcatcctttgcccaaggtcaca

SEQ ID NO: 915574 - DNA, 120 bp, Artificial Sequence
  ENSG00000256659_3 (sequence is synthesized)
ccgctggtaaaaagcaaatgaagttcaaactgacctcctcatccctgcccttgtcctcccaacaggctcctcacaggtggaaaaatcaacccctacagcaaactcattgtttttttgacc

SEQ ID NO: 915575 - DNA, 120 bp, Artificial Sequence
  ENSG00000256659_4 (sequence is synthesized)
tctcctaaaattaaaatccaagatccctcatgagctctgtgatcttgggtaaggtgtttttttttttttcacctctatgggttccagtttcctccaaagaaaaaccaagggttttgcaaa

SEQ ID NO: 915576 - DNA, 120 bp, Artificial Sequence
  ENSG00000256659_5 (sequence is synthesized)
ttcttctcacttattattgttttcgtcatcatcgacatcatcgtcaccattacttttcattgtctttggaaatttggacagagaccacaggcagatgcggtgccgtattcccacagggct

SEQ ID NO: 915577 - DNA, 120 bp, Artificial Sequence
  ENSG00000256659_6 (sequence is synthesized)
ccttgagtctgactgtcaagcagtaacattccagcctcaactacaacaatacttgtagatggtaagaaacattgagatagaggagaatttcttagagaaggtcagggtcttggattcctt

SEQ ID NO: 915578 - DNA, 120 bp, Artificial Sequence
  ENSG00000256659_7 (sequence is synthesized)
catagaaaagaaaaaagggccaatttatgtcctttgctaactcaaggcctgatttaaaaccgtaacccatgggtaaaaatgtaaaaaagctcaaccacaaaagcatgtatggggacgtgt

SEQ ID NO: 915579 - DNA, 120 bp, Artificial Sequence
  ENSG00000256659_8 (sequence is synthesized)
ctgggtgccattatgttcatgtacaatgaagagtgggaactcctctatgtggggccagccacgagcctgaccccatgcacagcatctcatttaagtttctccacgtacccacagaatgga

SEQ ID NO: 915580 - DNA, 120 bp, Artificial Sequence
  ENSG00000256659_9 (sequence is synthesized)
tgggagaaggctggccagtggccagaaccgtcctctatgctctgaggctgagaggcgtcaaagcaaagctctgtgacacacattacctttgagcccccaaagaacatgaaggagcccagc

SEQ ID NO: 915581 - DNA, 120 bp, Artificial Sequence
  ENSG00000256659_10 (sequence is synthesized)
ctggggggtgcttctactctctctctcccagtccagactccagctacttcccctaaagaggaaggccatgctgagtgtctccagctgaggacgtgttactccaagactcatctcctttga

SEQ ID NO: 915582 - DNA, 120 bp, Artificial Sequence
  ENSG00000256659_11 (sequence is synthesized)
tgtctggtctcgttagcggctacggtggtataggtgctgactgggttaactccatcaatattctccttcttactcacctactttgctgtttaataacataatacatattcttgtatcttt

SEQ ID NO: 915583 - DNA, 120 bp, Artificial Sequence
  ENSG00000256659_12 (sequence is synthesized)
ggaagcagaaagggagttcccttccgcctccctaatgccatggaatggggaagggtacaactctaggatcagacccaaagggaactgttgtgaatcttgattttgtgacttcttggctat

SEQ ID NO: 915584 - DNA, 120 bp, Artificial Sequence
  ENSG00000256659_13 (sequence is synthesized)
tggatttgggccaattatttgtcatctctgtaccttaatttactcatctatgaaagaaggactaaaaatacttatcataggagaagacaatatgtaagccacttggcaatgtgcctggga

SEQ ID NO: 915585 - DNA, 120 bp, Artificial Sequence
  ENSG00000256659_14 (sequence is synthesized)
tgtgatagcagcgcttcccggaaccagcagggtacacgttatttgacctgaagggcgagggagttcagagcctacagtgatgagagaaagccctgagtgaacgtttcctttcagcttcgt

SEQ ID NO: 915586 - DNA, 120 bp, Artificial Sequence
  ENSG00000256659_15 (sequence is synthesized)
gagaggaagagtctaaataggggagccatccccaaaacctgaccacgagcaagggtgcaaaatagggtgcagtctcttcacatatctagacaggagtatgaacctccttgggagcgtgca

SEQ ID NO: 915587 - DNA, 120 bp, Artificial Sequence
  ENSG00000256659_16 (sequence is synthesized)
ggagacattatctgcacaatctcactgcatctgcctcgtctcatctccgaagaccacagcggctgagagcagaaagatcaccagcagggacgggtggctcagtacctcacagaagcaagt

SEQ ID NO: 915588 - DNA, 120 bp, Artificial Sequence
  ENSG00000256659_17 (sequence is synthesized)
cctgcctttggaaaggaagttctttactattttgatatgaaatatgcctgcttagttctcagagcaagagtgtcaagagtacacagcccaagaggcccggtggaagctgcagccttctta

SEQ ID NO: 915589 - DNA, 120 bp, Artificial Sequence
  ENSG00000256659_18 (sequence is synthesized)
accaacagcccagcgatgggctggggccgagtggcgttgactccatcagcctggacattgacacatggctcttcccagctaccaatctagccatgctcctcactcaaattacccaacgac

SEQ ID NO: 915590 - DNA, 120 bp, Artificial Sequence
  ENSG00000256659_19 (sequence is synthesized)
ccttcgagcccgagagaggtcatccagctgagaactgttacggtaatctacaattgggggtcttcacattttatatccatgagtttaaaataaaacctcaatgaccaccacaatgaaaaa

SEQ ID NO: 915591 - DNA, 120 bp, Artificial Sequence
  ENSG00000256650_0 (sequence is synthesized)
tgctgaatcataaggtacgcccacaccgaacactagtgaattgctcttcaaaatgatgtaccacagtctacactctcattgtcggtgtagagaagctgcctgtaacctagtcaggcatta

SEQ ID NO: 915592 - DNA, 120 bp, Artificial Sequence
  ENSG00000256650_1 (sequence is synthesized)
aagcttctctctgcttggtgaccactctgctgttgatccaccaacctccagctggtactgagcatctgccatttttctgctttgaagaggcagcataagcaagaggactccatatagttc

SEQ ID NO: 915593 - DNA, 120 bp, Artificial Sequence
  ENSG00000256654_0 (sequence is synthesized)
gcccagaaatggaccgagcggacccgccgccgcacgcaccctgctccactccaagctcctaagggctcctggcgcgccgcgtagccttggcgaggtccgcgctggggtgcggagagcgaa

SEQ ID NO: 915594 - DNA, 120 bp, Artificial Sequence
  ENSG00000256654_1 (sequence is synthesized)
gggaactggagagccatgtagatccaggctctcgcccgcccgcctccttcgggatcgaatcaagggctcccatagtgttaggagggggcgagagtgctgtttatcgtcatttgcctcgga

SEQ ID NO: 915595 - DNA, 120 bp, Artificial Sequence
  ENSG00000256654_2 (sequence is synthesized)
gcttcgagagagggtggtattttgcttttccgccccgcatcctccggaactccctgcaccggagagaggacggcgtctccaggttgctggcaaccggtgagaatgggggtagggaaggaa

SEQ ID NO: 915596 - DNA, 120 bp, Artificial Sequence
  ENSG00000256654_3 (sequence is synthesized)
cattttcgccgtagctgctccgtaaagcgattgtccaactgagaggggcgtcggacgagtggaccagggcggcgagtttgcccggcgcgtctcggatgctgctgcggcggccgccgcggc

SEQ ID NO: 915597 - DNA, 120 bp, Artificial Sequence
  ENSG00000256654_4 (sequence is synthesized)
tcccgccagggcactgcaaagacgacctgccgcattcccactcgggctctccgctgactcagcaccgcccctgcgccaagccagccggccagcccagccctggcattagccacaagaaga

SEQ ID NO: 915598 - DNA, 120 bp, Artificial Sequence
  ENSG00000256654_5 (sequence is synthesized)
tgaagatgcaggccctgcttgcaaggatcctgtgacattattccacctcgaatccctaacctctgtggacgggttttctggcttcgtcccgggcagtctgaccaagccctggcattccca

SEQ ID NO: 915599 - DNA, 120 bp, Artificial Sequence
  ENSG00000256654_6 (sequence is synthesized)
ggccacatccacctgccttggcatcctgtccccagccaccctgccttcctcggatgtggccaacagacatgtgtcatggcgaatgtgccagagcaactgggagctactcagagaggaact

SEQ ID NO: 915600 - DNA, 120 bp, Artificial Sequence
  ENSG00000256654_7 (sequence is synthesized)
caatgaagatgagatcattttacctcccccacagttccccagcaaatctcagcactgagcctctgtgccaactccagagagagtgcacttgttggtaactaactgctttgtttaccattc

SEQ ID NO: 915601 - DNA, 120 bp, Artificial Sequence
  ENSG00000256654_8 (sequence is synthesized)
acagtggctctgaaaagcccacctcttgggtggtagatatgaagtgaacaatgttactgtgatgaaatgacacagtgacagcctggaggtcatgcaacctagagaacctagagcgggacc

SEQ ID NO: 915602 - DNA, 120 bp, Artificial Sequence
  ENSG00000256654_9 (sequence is synthesized)
gatacttcatttcacaggtaacctagagaacctagagcgggaccctgttctagatacttcatttcacaggcaacctacagaacctggagcgggaccctgttctagatacttcatttcaca

SEQ ID NO: 915603 - DNA, 120 bp, Artificial Sequence
  ENSG00000256654_10 (sequence is synthesized)
ggcaacctagagaacctagagcgggaccctgttctagatacttcatttcacaggtaacctagagaacctagagcgggaccctgttctaggtacttcatttcacaggtaacctagagaacc

SEQ ID NO: 915604 - DNA, 120 bp, Artificial Sequence
  ENSG00000256654_11 (sequence is synthesized)
tagagcgggaccctgttctaggtacttcatttcacaggtaacctagagaacctagagcgggaccctgttctagatacttcatttcacaggtaacctagagaacccagagcgggaccctgt

SEQ ID NO: 915605 - DNA, 120 bp, Artificial Sequence
  ENSG00000256654_12 (sequence is synthesized)
tctagatacttcatttcacaggtaacctagagaacccagagcgggaccctgttctagatacttcatttcacaggtaaagacactgagacccagaaaaatgatcttccttgttatgtaatg

SEQ ID NO: 915606 - DNA, 120 bp, Artificial Sequence
  ENSG00000256654_13 (sequence is synthesized)
aaaggccaagctggtgccagagtctaggagccccattgctctggcccatcctcctttcctatccctgccccagtttccttcccaccagttgatgctgcaggggccctcaactccacagat

SEQ ID NO: 915607 - DNA, 120 bp, Artificial Sequence
  ENSG00000256654_14 (sequence is synthesized)
aagcctaaactttgccccaagacattgaacttcttcccttcctagactggtcttgtgaaatattcagaaacaggaaattggctttattgatgactttccttcccttcccaattcagttca

SEQ ID NO: 915608 - DNA, 120 bp, Artificial Sequence
  ENSG00000256654_15 (sequence is synthesized)
ggaaacaataaactgaaacaagaataaataaaataaatagggaagagaagacaataataatcagaactatttcttgactgtgaaaagactgtaatgaaataaggaaataagatcccttaa

SEQ ID NO: 915609 - DNA, 120 bp, Artificial Sequence
  ENSG00000256654_16 (sequence is synthesized)
gaattctattggccaggcacagtggctgctcacacctacaatgccagcactttgggagacagagtccagcacattgcttgaatgcaggagtttgagaccagcctgagcaacagggcaaaa

SEQ ID NO: 915610 - DNA, 120 bp, Artificial Sequence
  ENSG00000256654_17 (sequence is synthesized)
aacagggcaaaactctgtttccaaaaaaaagaaattagcctcagttattcaggaggctgaggtgggagggtcacctgggcctgggaggtcaagactgcagtgagctgagatcacgccact

SEQ ID NO: 915611 - DNA, 120 bp, Artificial Sequence
  ENSG00000256654_18 (sequence is synthesized)
ggcactgtgcgcgagagaggagggaaaggggaagcgttcgtgcctctctgccccctgtccccctcttgctgcatagtagccacatccatgtctcttgtaccctgcaatctggaggccact

SEQ ID NO: 915612 - DNA, 120 bp, Artificial Sequence
  ENSG00000256654_19 (sequence is synthesized)
gccagaagctggaaatctcaagtagagcagcaaaaggcttgaggatggattcttggctcctggtgcattgccactccctgccaccctcctccttgtcttctatcttctcctggtggcgtc

SEQ ID NO: 915613 - DNA, 120 bp, Artificial Sequence
  ENSG00000256654_20 (sequence is synthesized)
aggccttgcttcgtgtcccaacaggagcctctggggctggcacagccctcactgcctacaacctgggcctggtggttctcctagggtgcctctgggaggtcatggtcaccccgctgctgg

SEQ ID NO: 915614 - DNA, 120 bp, Artificial Sequence
  ENSG00000256654_21 (sequence is synthesized)
ctaactgcagctacttctgccagccagtggactacagatggagaaagcatggaatgagggtatggcagggagcaggaagcaagcctggagagggttaggaggaacaacttcataacaatc

SEQ ID NO: 915615 - DNA, 120 bp, Artificial Sequence
  ENSG00000256654_22 (sequence is synthesized)
ggaggtcaaggaggcatcttcctggagacaggaaggtaggcactgtggaatcagcggtgcgtagaacagtgaggatttggggctgaacccagcccaggtgggccaagccgtggcaccagc

SEQ ID NO: 915616 - DNA, 120 bp, Artificial Sequence
  ENSG00000256654_23 (sequence is synthesized)
tgacagccctgcccagcatctagaagaccacctgaagctttcacactttgagaccttagatcctgcgagggtttgaatttcaaaagcttcaattaaagcacacagtgttctttactttat

SEQ ID NO: 915617 - DNA, 120 bp, Artificial Sequence
  ENSG00000256654_24 (sequence is synthesized)
gaatgaagccagagcagcccaccttcctgcatctctaccaccatggcaccatgccctgtgatgggtgggctggagtcaaatatgtagcaggcagccagggtcagtttgtggccactgctg

SEQ ID NO: 915618 - DNA, 120 bp, Artificial Sequence
  ENSG00000256654_25 (sequence is synthesized)
ccccctcttcctacagtctcctcactgagtgccccttccctgttgggttcaacacatctgtgctcctgtaagccctcagcctcctcgttctcttcctcaacttctaccaccagacacatc

SEQ ID NO: 915619 - DNA, 120 bp, Artificial Sequence
  ENSG00000256654_26 (sequence is synthesized)
tgagaagcaagcaagagaggctgaactaggagcaggacccagggactgaaaccagcacagcatccccacagagaattgggtggaaggcagcatggcttccagcttactggtgctgagcag

SEQ ID NO: 915620 - DNA, 120 bp, Artificial Sequence
  ENSG00000256654_27 (sequence is synthesized)
attgctctgggtctccattgtatcctctgaaggaaggaggaggattgccttctgtccagatctcaggatcaaacaaataggtccaatttcctgtgctcacttcagttagagcacttctca

SEQ ID NO: 915621 - DNA, 120 bp, Artificial Sequence
  ENSG00000256654_28 (sequence is synthesized)
tgtgactttgtagctttgtgtgcatctccttcctctactagacctaagcccctcacgggagggactctcttattcttgatgttccccacacctggaatttcaataaacatctcaataaac

SEQ ID NO: 915622 - DNA, 120 bp, Artificial Sequence
  ENSG00000256654_29 (sequence is synthesized)
tgggagatgcgtttctctgccacggtgtcagttgtcatgccttagcggagtgcccgaggggaggggcaggaggccccttggatgggctggcactgcgcccctgctgctgtcagagtgact

SEQ ID NO: 915623 - DNA, 120 bp, Artificial Sequence
  ENSG00000256654_30 (sequence is synthesized)
cagatcccctcctggcaccagcctgctcaggcagtgcaagctgttcctttggctcctggagattgggctggttcttcacttcttcctcccctaggactgaggccagggaggaggggtgcg

SEQ ID NO: 915624 - DNA, 120 bp, Artificial Sequence
  ENSG00000256654_31 (sequence is synthesized)
gatttctgtgtttccacccttttctcttctcccagcacaggggtgcgagaggaggaagtggaggctgcagtgctgggctctgggttcattccctgtgattcctctgggctgccccaagtc

SEQ ID NO: 915625 - DNA, 120 bp, Artificial Sequence
  ENSG00000256654_32 (sequence is synthesized)
ctgctcagcacatacacaacaggacaccaggtgtgctggacaaatgaccaggcagtgtggtacttgaatgcaagggtttcctgaaaagttaccatcaaaaactgggtcaggtggacgaat

SEQ ID NO: 915626 - DNA, 120 bp, Artificial Sequence
  ENSG00000256654_33 (sequence is synthesized)
ttaagccacagaagctttcatcttatgtgaacccttccttggaatgtcacttgctcacagcctcaggagccatcaatgctttcaaagagataatatacagggaaaagaaacgttgaaatc

SEQ ID NO: 915627 - DNA, 120 bp, Artificial Sequence
  ENSG00000256654_34 (sequence is synthesized)
acagggaaaagaaacgttgaaatcagccaagggaagaagcacatagtctaggaacaattcaaaatgtggagatccagctgggtgcagtggctcttgcctgtaatcccaacactttgggag

SEQ ID NO: 915628 - DNA, 120 bp, Artificial Sequence
  ENSG00000256654_35 (sequence is synthesized)
taggagaattgcttgaacctgggaggagtagtttgcagtgagccaagaccacagcactgtactctagcccgagtgacaaagcaagactcagtcttaaaaataaaatatgtgaagacccca

SEQ ID NO: 915629 - DNA, 120 bp, Artificial Sequence
  ENSG00000256654_36 (sequence is synthesized)
ggccagtaggtgttcagtgagtcctgaatgaagaaagaatattttgctatgttggatgctgtggggaagacccaaggaaatttttgcaagcaggctggagtccagtggcaccgtcttggc

SEQ ID NO: 915630 - DNA, 120 bp, Artificial Sequence
  ENSG00000256654_37 (sequence is synthesized)
ttggccaggatggtctcgatctcctgatctcagtgggaaagagggacggaagagtaagattgaaatctgaggcaagaggagtggcctaacctggtggaggcaggagaggcgcgtgtcctc

SEQ ID NO: 915631 - DNA, 120 bp, Artificial Sequence
  ENSG00000256654_38 (sequence is synthesized)
gcgcgtgtcctctacatgcccgtccaagtccctggggctggggctggagtcgacaacagatcagagcacaggagtagagcgcttctgggagggtggggccacccgtgagtcacgtcctgc

SEQ ID NO: 915632 - DNA, 120 bp, Artificial Sequence
  ENSG00000256654_39 (sequence is synthesized)
accctggagcccagaggacccttcgctcaaacccaccaccagctggcaacaccggaccagaccagccggagccgctttcttcgctgcgcagaggagcctgggagaagccagaggtgtaag

SEQ ID NO: 915633 - DNA, 120 bp, Artificial Sequence
  ENSG00000256654_40 (sequence is synthesized)
gacacaaagttgtggccgatggaggctccccaaagtgcatggaaggtggtgatccagtgtctaaaggcaggagtactggggcaaccccatagctgggggtcctatgggagagactgagga

SEQ ID NO: 915634 - DNA, 120 bp, Artificial Sequence
  ENSG00000256654_41 (sequence is synthesized)
acttcggtttgtggactctcagtcaactgtgttactgaggaggggaaaggaaagtagatgagttggtggtttgaacaagacccaaatcttgcttctacttataggtgctcacaatggcca

SEQ ID NO: 915635 - DNA, 120 bp, Artificial Sequence
  ENSG00000256654_42 (sequence is synthesized)
gaggcaggagacaatgccatccagtgggagctttcatttgtttcctcagccagcctctgtgtcaggctttttgggaacaagggctggatgaacaagaccttgggagttcctgtggggagg

SEQ ID NO: 915636 - DNA, 120 bp, Artificial Sequence
  ENSG00000256654_43 (sequence is synthesized)
ggctgggagtaggaaagaggtcaaggttcgcttgatctctaaccctatagtgggaaattgtgacggagaatattcaagagtgggtgtgggtctgtttgatttcaggtgtagctgtgtaaa

SEQ ID NO: 915637 - DNA, 120 bp, Artificial Sequence
  ENSG00000256654_44 (sequence is synthesized)
tagttagccctgcatatatttttgtctactcacaactgcctgcatgtgtattcatagagttgtgtgattctgtgtatgtgcctggggagtgggagagggccatgtgcacatgtctgaata

SEQ ID NO: 915638 - DNA, 120 bp, Artificial Sequence
  ENSG00000256654_45 (sequence is synthesized)
cttgttttcaaatatacatgcatgtttccatttgggtttctctccatttgtgttgtttgcctgcctcttctgtaagtctctgaaagtgccacattggcaaataaaagccactgggatcaa

SEQ ID NO: 915639 - DNA, 120 bp, Artificial Sequence
  ENSG00000256654_46 (sequence is synthesized)
ggtcgtgtccctcagggactttcccatttactctggaagaccaaacttataggctacactctgggtgcagacagtgctagtcctgtggggagttgggaaaaaggagtgggaggctttgtg

SEQ ID NO: 915640 - DNA, 120 bp, Artificial Sequence
  ENSG00000256654_47 (sequence is synthesized)
gccgaggaggggcttcagggcagcaaggatgacggctgggtttgaacagtcagtggagaaggaagtgtggaaaggccagagaagtagacatggatgtgtgcatgccagagagggcaggca

SEQ ID NO: 915641 - DNA, 120 bp, Artificial Sequence
  ENSG00000256654_48 (sequence is synthesized)
gacagggttcatggagggggcagaagcagcacattgacctctgcttctgccagaagatcagaggggatatcgggggggtggtctggccagagtaagggcagccttgaagccccgatggaa

SEQ ID NO: 915642 - DNA, 120 bp, Artificial Sequence
  ENSG00000256654_49 (sequence is synthesized)
taattttgacttgattctatggaaaatgacatacgacagtgtaggagggcttgtcttctaactgaaaccagctgggaatctttcccagtagagtcaagggcagggcagagcgagggcctt

SEQ ID NO: 915643 - DNA, 120 bp, Artificial Sequence
  ENSG00000256654_50 (sequence is synthesized)
tggcagcatgtgcaaatgtacatgcatgtaaccattgtgtgtggcccaccatgcttttaaacctacctttacctcctctagttcttcatatctcttaaccctcttgtctgtgagcatcaa

SEQ ID NO: 915644 - DNA, 120 bp, Artificial Sequence
  ENSG00000256654_51 (sequence is synthesized)
caatccggggcttacacagacaacaccacagtgtgccatcttgccagaaggagaaactgaggcactctattctaaagaggctggttctaggacctgcccttgaatcactgtggagtaaga

SEQ ID NO: 915645 - DNA, 120 bp, Artificial Sequence
  ENSG00000256654_52 (sequence is synthesized)
cccagagtgtgggctgccaggccccttccttcagggatctggcttctaaagttggttcttttcctgtatctcataaagagggaaaggatgggcctaagagaggttatttggacaaatggc

SEQ ID NO: 915646 - DNA, 120 bp, Artificial Sequence
  ENSG00000256654_53 (sequence is synthesized)
cattgtaattgcctcctatcagacacaggtggatagaggcaggtgtggggaagagggctgcctggatctgggattcccaatcccccatactccttggcctattgttgagggggagctaga

SEQ ID NO: 915647 - DNA, 120 bp, Artificial Sequence
  ENSG00000256654_54 (sequence is synthesized)
ggaggggtgcggacttagcaggttaagaaagataaacgcttactctttaacagtgggaaagagggacggaagagtaagattgaaatctgaggcaagaggagtggcctaacctggtggagg

SEQ ID NO: 915648 - DNA, 120 bp, Artificial Sequence
  ENSG00000256654_55 (sequence is synthesized)
caggagaggcgcgtgtcctctacatgcccgtccaagtccctggtaggttcgtccttgctctgagggaagagtgtgggccacaggccatggggacactctgaggatgtgggtgctgcccat

SEQ ID NO: 915649 - DNA, 120 bp, Artificial Sequence
  ENSG00000256654_56 (sequence is synthesized)
cttgaagtttctccccacccctctccggagctgctaccattgtcctttgccctcggagtgctctcctcccacccccgccgcctcttgttctctttctcccttgagccgttagaatggcag

SEQ ID NO: 915650 - DNA, 120 bp, Artificial Sequence
  ENSG00000256654_57 (sequence is synthesized)
ggagcccagccagggcctggacggcggcctcagctccctgttctcaataattgtgtgtgtgtgcatgtgtgcatgtgtacgtgtgagtgcctgtgtgtgtgcattgtgtgtaggggctgg

SEQ ID NO: 915651 - DNA, 120 bp, Artificial Sequence
  ENSG00000256654_58 (sequence is synthesized)
atgaaacaagcccagaaaaggaagagagccttcaaaaatgacgttaaattcatggcagacctgatactagaaaccagaagtcccagcagggtagaaatattctcacttagacaccaggct

SEQ ID NO: 915652 - DNA, 120 bp, Artificial Sequence
  ENSG00000256654_59 (sequence is synthesized)
atgactgttcagagtgcagcagagactgcttttcgtccttctgttctcactcaggtccaggaattatgtggggttttccatttaggccttctgcttttcaaggctcataaaagcagatta

SEQ ID NO: 915653 - DNA, 120 bp, Artificial Sequence
  ENSG00000256654_60 (sequence is synthesized)
cttacaattagctctcttatcagcttgattggagaggagaaggctgccagtggccacaggggtgcagcctgtcccctgcatggtccccacgatgcatcaagagctgggagcatctagggg

SEQ ID NO: 915654 - DNA, 120 bp, Artificial Sequence
  ENSG00000256654_61 (sequence is synthesized)
caaaataagaaatgaggccgggactgagctcttcatttgccaattttgacctgcaaagcctggggctgcttccccctagcacaggggacggacagcctgaaggactgtggggacatgcat

SEQ ID NO: 915655 - DNA, 120 bp, Artificial Sequence
  ENSG00000256654_62 (sequence is synthesized)
catgtcaggtttccttgggtccagggagcagctcggctgaccggcagatgaggtcatggtcaccccgctgctggctaactgcagctacttctgccagccagtggactacagatggagaaa

SEQ ID NO: 915656 - DNA, 120 bp, Artificial Sequence
  ENSG00000256654_63 (sequence is synthesized)
tggcgtatggaccaccttggtgtctccagcacccacctcaggctttcatgcatagtaggcacccggggtagggttgtagcctatatttgctcacattaaaaaattagagaccagcaagat

SEQ ID NO: 915657 - DNA, 120 bp, Artificial Sequence
  ENSG00000256654_64 (sequence is synthesized)
atatgcaagttgccgcctctaacctcgccaccccatggagtttctttttagcagttgttgaccaagtgtcagcagaggttgcattggggtgttggtgttcaggagcccgagccagtcggg

SEQ ID NO: 915658 - DNA, 120 bp, Artificial Sequence
  ENSG00000256654_65 (sequence is synthesized)
aggcaggggactagctagttttggagtcagataacatcaatttggatctcagctctgccagttacttgctgtgtgactctgggtggcacacctaactcttctgggactcaattttcttat

SEQ ID NO: 915659 - DNA, 120 bp, Artificial Sequence
  ENSG00000256654_66 (sequence is synthesized)
ctataagattgagataataatacctattttataaagcgaaatgattgaaggaagacggaatcagataatatatgatagataatatatgaaagtgtttagcacaggggccggcacacactg

SEQ ID NO: 915660 - DNA, 120 bp, Artificial Sequence
  ENSG00000256654_67 (sequence is synthesized)
agcggtagctaggtggtagtgatttcatcactgttagctgttctctgtttcaactggaagcagaacaaaagactctagctgaagcctgtctccaggtagctaaggcttctcaccagctga

SEQ ID NO: 915661 - DNA, 120 bp, Artificial Sequence
  ENSG00000256654_68 (sequence is synthesized)
tatggatgttgagtcactggatgttggtgatgggctcatgtcctgtgactcaaagtatgatccttgggccagcagcatcatttgggagcttgttggaaatgcagaatctgtgctccaccc

SEQ ID NO: 915662 - DNA, 120 bp, Artificial Sequence
  ENSG00000256654_69 (sequence is synthesized)
gcacactgattaagaatcttcttttcaacgaacaagatgcccacatgctcattagattccaaggttctgggctggggcacatttggagagtccttctgtggtcactccagtagcttctcc

SEQ ID NO: 915663 - DNA, 120 bp, Artificial Sequence
  ENSG00000256654_70 (sequence is synthesized)
ggcctagaattcatagccccattctcttgatctgagttgcttctgggggatgagcgtggcaccacagcgtctcaggtgctatataggggacttcccaagagttgcccgtatcggttgtaa

SEQ ID NO: 915664 - DNA, 120 bp, Artificial Sequence
  ENSG00000256654_71 (sequence is synthesized)
ggtgctgtctacatgaggggatggttttatgaatacacaagggagagttaccagcagagtgatggcgaaagctttgagctagatggttttcatcttcctgaaacatcgccctagggtttt

SEQ ID NO: 915665 - DNA, 120 bp, Artificial Sequence
  ENSG00000256654_72 (sequence is synthesized)
tttttttttttttttcttgaaaaatggaagtagtagaagtataaactgcacacaattatgtggtatttaagtgattattttatacacataaagtagaatagtgttctcttccctcctctt

SEQ ID NO: 915666 - DNA, 120 bp, Artificial Sequence
  ENSG00000256654_73 (sequence is synthesized)
cccaccacacagccctgcccagcatctagaagaccacctgaagctttcacactttgagaccttagatcctgcgagggtttgaatttcaaaagcttcaattaaagcacacagtaggtcata

SEQ ID NO: 915667 - DNA, 120 bp, Artificial Sequence
  ENSG00000256654_74 (sequence is synthesized)
aattggtgtttgactgttgttatttccctttagttttactctcttcttcagtaaaacaggtagaattaccatatcccactctaaggggtagttgaggcccctggagaagtctggagaaag

SEQ ID NO: 915668 - DNA, 83 bp, Artificial Sequence
  ENSG00000234148_0 (sequence is synthesized)
cttttttctttctttttttttttttggaggctgagtcttgctctgttgcccatgctttgctggatctcgggtgactgcaacca

SEQ ID NO: 915669 - DNA, 120 bp, Artificial Sequence
  ENSG00000234148_1 (sequence is synthesized)
ctcccaaagtgctgggattgcaggtgggagccaccgggtccagcctctccggcgattttcatacctgcatactctgatcactactctgttaaacagtcaaggagggtaagtattatcttc

SEQ ID NO: 915670 - DNA, 120 bp, Artificial Sequence
  ENSG00000234148_2 (sequence is synthesized)
ggtaagtattatcttcagatttccagagctctgtctctgtacagccctctcctcctcaatattctgccctatgaattctagccacattggccttcccagactcacagttctgtcttctca

SEQ ID NO: 915671 - DNA, 120 bp, Artificial Sequence
  ENSG00000234148_3 (sequence is synthesized)
actcaggaagatctctgagctccatctgcattctttcttcctgtgctgtggcctggaaagttttctaaggtgtttgggaggtcaattgtggggctagcctcatttgtttctcatctcttg

SEQ ID NO: 915672 - DNA, 120 bp, Artificial Sequence
  ENSG00000234148_4 (sequence is synthesized)
aggatcactgccctttgatgcttgattccagtgattgattccctttgttgcttgagggccatagtttcatatattttgtccagtatttttgttgttttaggtcagaaagtaattttggtc

SEQ ID NO: 915673 - DNA, 120 bp, Artificial Sequence
  ENSG00000234148_5 (sequence is synthesized)
tctgttactccatcttggccagaagtgtaagacctaagcatttacacatcaaaatactgcacacataattttagtttaagctacctttaaaaaaatctgcttcattttccattaagcatt

SEQ ID NO: 915674 - DNA, 120 bp, Artificial Sequence
  ENSG00000234148_6 (sequence is synthesized)
tggtttttttgaaattctgttattggcagtttctattgcctatcaatcccatttaaagatagtgcatagggtattctaaaatagctgttaagcaaagagaaaattgggcctgatagggtg

SEQ ID NO: 915675 - DNA, 120 bp, Artificial Sequence
  ENSG00000234148_7 (sequence is synthesized)
agaatcacagctctaatacctagagtgaccttataatgtattgtccaaaggagatatttttgacagtgaaagagggtgttgttagtaattatatcaggaccatggcctaaaccaggacta

SEQ ID NO: 915676 - DNA, 120 bp, Artificial Sequence
  ENSG00000234148_8 (sequence is synthesized)
tcccaggcagcctgggacatatttgtaccccatctctatttaatgcctttatacaattctttacttaattctaccagcctttattgagcctgctttctttgtctagctgagtgccacgtg

SEQ ID NO: 915677 - DNA, 120 bp, Artificial Sequence
  ENSG00000234148_9 (sequence is synthesized)
ctgacgtcactaagatcaatacagcaaactctgaaagatggacagagagacaggagatggtcctttataatgcagtgtgatctgtgctgcaatagagatggaagagtgttctgatcagct

SEQ ID NO: 915678 - DNA, 120 bp, Artificial Sequence
  ENSG00000234148_10 (sequence is synthesized)
ggaaaacaacgcacatgggaagctgtacagaaatgagtggggaaagttttggaagctagaagttcaaaacgaggtgttggcagcaccatgctctctctgaagatgctaggaagaatctgc

SEQ ID NO: 915679 - DNA, 120 bp, Artificial Sequence
  ENSG00000234148_11 (sequence is synthesized)
tccatgcctttccattcgctcctggggtttcctgcaagccctgacattccttggcttgtagatacaccaccccagtttccgcccccatcatcacatggcctcctctctgtgggtgcctct

SEQ ID NO: 915680 - DNA, 120 bp, Artificial Sequence
  ENSG00000234148_12 (sequence is synthesized)
gcgttccctctattcttcttctaaggacaccgacaccagtcatagtggattaagggtccactcctaactaattacatctgcaaccaccctatttccaaataaagtcacattctaagattc

SEQ ID NO: 915681 - DNA, 120 bp, Artificial Sequence
  ENSG00000234148_13 (sequence is synthesized)
agaaagattacagatgactttaagctaaagagggagatagggttaaatgtaggacttttttttttttccaggacgggagaggtttaaacatgttactacattgaataaatgaaataacca

SEQ ID NO: 915682 - DNA, 120 bp, Artificial Sequence
  ENSG00000274833_0 (sequence is synthesized)
gggagtaggaagcgcgtcacccgggccataaatttgcggtgatggcgcctccggccgcctccccagacggagggacagggccgactccggagcaggtggggccgccgagactcgacctcc

SEQ ID NO: 915683 - DNA, 120 bp, Artificial Sequence
  ENSG00000274833_1 (sequence is synthesized)
ttccgggcttggatgtagaggctttgatttttttaccacccgcctcaggagactttttgcttggaaaagtcctgctattaaaacaaaaacaaaaaccaatcaattccggagggaagaaaa

SEQ ID NO: 915684 - DNA, 120 bp, Artificial Sequence
  ENSG00000274834_0 (sequence is synthesized)
gccaagttggctcaagactcagggtaataaactctaaattacggtaagtctttaagttacattgaaaaaaccaccaaaaaaaagaacttaaagtcagaagaatggaaccatttgtctctt

SEQ ID NO: 915685 - DNA, 120 bp, Artificial Sequence
  ENSG00000274834_1 (sequence is synthesized)
gcgccgtcgagtcctcccagctttgcttcaagttgtcttgcctttctagacctgccccgtctttccagaccgaaccaatgttcatccagcacgtattgatggatgtgttatgtctcccta

SEQ ID NO: 915686 - DNA, 120 bp, Artificial Sequence
  ENSG00000274834_2 (sequence is synthesized)
ggaagtgtaaaagccagttgtgttctgaccacctcgggcacaggtcgtcaggaactcctgagagtgtcacagacaggtgtgttcaactttggcaaaataaactttctggattaactgcaa

SEQ ID NO: 915687 - DNA, 120 bp, Artificial Sequence
  ENSG00000231794_0 (sequence is synthesized)
ctgagcagccacatcacagtccaggaggtgccgcttccacattttgtgctgctacatgtatgccgtgctctacatgggtcacagggggattctgccttggaagcaaagcaacagtaaaga

SEQ ID NO: 915688 - DNA, 120 bp, Artificial Sequence
  ENSG00000231794_1 (sequence is synthesized)
ataaaacactgagaagtacaaaggaactggaagaaaatctattttgggatcaaagagctccttccaccaagggaagcagaacccctgaatcaacaggcacctggattgtgtagacaagat

SEQ ID NO: 915689 - DNA, 120 bp, Artificial Sequence
  ENSG00000231794_2 (sequence is synthesized)
acaaggaggcaaagtgctgatgaactggaagaaaatctattttgggatcaaagagctccttccaccaagggaagcagaacccctgaatcaacaggcacctggattgtgtagacaagataa

SEQ ID NO: 915690 - DNA, 120 bp, Artificial Sequence
  ENSG00000231794_3 (sequence is synthesized)
aatcgaaacaggctggttttcagcttgtggattgtgggtctgtatatatcctccaagcggctgaagagccgacgctccaagtagctccaataatcccgaagggcagccaagtcatacacc

SEQ ID NO: 915691 - DNA, 120 bp, Artificial Sequence
  ENSG00000231794_4 (sequence is synthesized)
tgcattaactgctgcagctggtccacaatcttatccacctggcgagaaacatggatggagaaggtggtaagggacagaagggaattctcccctccatggaataaagctttttcctcttgt

SEQ ID NO: 915692 - DNA, 120 bp, Artificial Sequence
  ENSG00000231794_5 (sequence is synthesized)
acaaaggaataatgctatgaacgtttcagtaataatgacaacaggtacagcaaccaattacaaggaggcaaagtgctgatctccagagggctaagctaagatctgtgaggaaaagtcata

SEQ ID NO: 915693 - DNA, 120 bp, Artificial Sequence
  ENSG00000231794_6 (sequence is synthesized)
aagaagtttcttctaatagctttctaacatgcatatgttcccgctttgacaagcaatgagctctgcatcttaggaggcaatcaatccagacactgtactcctatactcagcaggaggtag

SEQ ID NO: 915694 - DNA, 120 bp, Artificial Sequence
  ENSG00000231794_7 (sequence is synthesized)
gccagacgaccttcaagcttccctctaaaattctgtgattttcttgaacctcaaatctactagttatttttagacgtgaaacattaatgctgaatctaaatcatctaccattaataaaaa

SEQ ID NO: 915695 - DNA, 120 bp, Artificial Sequence
  ENSG00000231794_8 (sequence is synthesized)
agatgtcatcttgatctaatcggaacaatttagtctagttgaggggaaggagccagcacttactaagtgatgactaaggcaggccggggcctacgcttggtgttatacacatttacaagc

SEQ ID NO: 915696 - DNA, 120 bp, Artificial Sequence
  ENSG00000231794_9 (sequence is synthesized)
aacaatatgtttgggcaatctaaaaattatttatgcaacaagcaatcacctctggagggaaaaggaaaaggaacacagtaccctctcttgttttgggccaagtgtggactaaaccagcta

SEQ ID NO: 915697 - DNA, 120 bp, Artificial Sequence
  ENSG00000231794_10 (sequence is synthesized)
atattaacaaatactgaggtgtttgaaaatgattactagaaaaccagaaatttttaacagaaattgttgaaaacccaaggaatgttaagaaagataaatcggacaggaaataaaccggta

SEQ ID NO: 915698 - DNA, 120 bp, Artificial Sequence
  ENSG00000231794_11 (sequence is synthesized)
ttttctggctccttttcataacaacagtgatagggtcagctaagttatagcaagaggggatgaatttgatcatccccaccccacctgtatagagagaagaagtctccattcttaatctag

SEQ ID NO: 915699 - DNA, 120 bp, Artificial Sequence
  ENSG00000231794_12 (sequence is synthesized)
aaactcttaaaaggagctgccacccccacatctttccagattgctgggcagggctctctttttccagctttttacccacaaattgtgatggccaaacaccctcaccctcattttttacac

SEQ ID NO: 915700 - DNA, 120 bp, Artificial Sequence
  ENSG00000231794_13 (sequence is synthesized)
tcttagcaaagagatatgaatgcaaacagctactcaggtttgagaccaatcttctcaagaaaccatttctacacaagccctaagtgaagagaagaaactcaaccaaagtctacctgctgc

SEQ ID NO: 915701 - DNA, 120 bp, Artificial Sequence
  ENSG00000231794_14 (sequence is synthesized)
tttccagttcttctacttgttattttttatgtcaacagtaaataatttaaaatgattaacatggattccttggaatcctgcagccatgtgaacagttaaaagaaaattttaaaggactat

SEQ ID NO: 915702 - DNA, 120 bp, Artificial Sequence
  ENSG00000231794_15 (sequence is synthesized)
ggaaccaaaccatgactaacctgcagggtatttactatttttggcctgtttataaacttcaagtacttccgtgaacaaagaaaggatggtaaacctgtctcaatcagccacaaacacatt

SEQ ID NO: 915703 - DNA, 120 bp, Artificial Sequence
  ENSG00000231794_16 (sequence is synthesized)
taattccaagtatcagaattgtgtcaataacaattgtgtatgggtcctgggaggacaaaagccacggagaggtaatgtccactcctcagagtttcagagagatggagtggggaggtggcc

SEQ ID NO: 915704 - DNA, 120 bp, Artificial Sequence
  ENSG00000231794_17 (sequence is synthesized)
gtaatacttccctcacaagtcaagatagcaaggaaggcatctggtacagagaagaactacctttacaatgatagggcagtttacgccaagacagtgatggacctaagcatgacctatcag

SEQ ID NO: 915705 - DNA, 120 bp, Artificial Sequence
  ENSG00000231794_18 (sequence is synthesized)
attttgctttaaagaagaggataggttctcctttctccttaaatctatgttaatcactgaataacaaaagataataatatattaaaagctggtgaatgcggttgtccacaaaacttttta

SEQ ID NO: 915706 - DNA, 120 bp, Artificial Sequence
  ENSG00000231794_19 (sequence is synthesized)
ataagtaggtgaaggccaatttgtgtctagccacaaatgtacaaaacaagtgaatgcttactggcaactgttaattttttagaaataaaaggctaaaaaataaaaacaaaggaaaaaggg

SEQ ID NO: 915707 - DNA, 120 bp, Artificial Sequence
  ENSG00000231795_0 (sequence is synthesized)
ggcctatgtttttctttagagacagcctttgagttggtgataagcttatgcactgaagatgccttgaccagcaaaacctgtgtcatgagaggcagagtcccacttttctgtatattatgc

SEQ ID NO: 915708 - DNA, 120 bp, Artificial Sequence
  ENSG00000255233_0 (sequence is synthesized)
ctagtcagggatattgctgccatcacatggatatgatctcactgagaatgaaactaacgtagaagaaagcaaagataagagaggggagagcaagcgcacaagagtttgaactaggtttcc

SEQ ID NO: 915709 - DNA, 120 bp, Artificial Sequence
  ENSG00000255233_1 (sequence is synthesized)
agatgttacttgttgaagtaaagagtgaagatttgttctacatcctattctcttacctcctgtgctgcactgaaggaaggagcagagctgaaaatgaacttgataaaatacacaagatta

SEQ ID NO: 915710 - DNA, 120 bp, Artificial Sequence
  ENSG00000255233_2 (sequence is synthesized)
aaattattatacaaaaataaaatagatttgagaaccagagcaatgtccaatgcttgtgatgaatcttagataaataatggctgctagacaaataaaaaggacaatattctgaaagaaaaa

SEQ ID NO: 915711 - DNA, 120 bp, Artificial Sequence
  ENSG00000255234_0 (sequence is synthesized)
gtcgcatttagccgcacagcagcctggaacctgaagttttcggccgctgagcgttctgggtgattgcgtagtgcgagggccaacgaaaccttctgggaagtgtagtccagcaagccgctc

SEQ ID NO: 915712 - DNA, 120 bp, Artificial Sequence
  ENSG00000255234_1 (sequence is synthesized)
aacacttgtggaccagagatgagctgccttcccaaaacgtagaataatgactccaaagatatccacatcctaatccctgggacctatgaatatgttaccttacatggtaaaagggatttt

SEQ ID NO: 915713 - DNA, 120 bp, Artificial Sequence
  ENSG00000255234_2 (sequence is synthesized)
gcagatgtgagtaaatgaagactcttgatatgaggagattaccttggattatccatgtggacccgaggatatctatgagggaaagagggatgcaggagagtcagagtcggaaaaaggaat

SEQ ID NO: 915714 - DNA, 120 bp, Artificial Sequence
  ENSG00000255234_3 (sequence is synthesized)
gtggtcccacgaaactgggtctcttcacagacagacccacagttcgcgagcatggctcagcgctgccccgcttctcccagcgccccttcccgacctttgaacgccttcaccgccctagga

SEQ ID NO: 915715 - DNA, 120 bp, Artificial Sequence
  ENSG00000255234_4 (sequence is synthesized)
cttttcgtgaggcgtcacatcctgctgcttcaccctctggtgcacgggaggaccaactatttcagtcgacacgagtgaaatttggtgccatgactcagatcgggggacttcccttgggag

SEQ ID NO: 915716 - DNA, 75 bp, Artificial Sequence
  ENSG00000255234_5 (sequence is synthesized)
ggaacatctcaccaattttaaatcggatcttggcttagtggctgaagactgatgctccccgatcacctcagaagc

SEQ ID NO: 915717 - DNA, 79 bp, Artificial Sequence
  ENSG00000255234_6 (sequence is synthesized)
tgcctccataactgttgtgggtattgacaaccaggcttctaagcctcttaaaactccccaactctggtgccagtgcctg

SEQ ID NO: 915718 - DNA, 120 bp, Artificial Sequence
  ENSG00000255234_7 (sequence is synthesized)
tttatgcactcctttttagttatccctgcctgcccagttcccttattaggccgagacattttaactaaattatctgcttcctatgctacagccacacctcattgccacccttttctccag

SEQ ID NO: 915719 - DNA, 120 bp, Artificial Sequence
  ENSG00000255234_8 (sequence is synthesized)
gctacagccacacctcattgccacccttttctccagttcaaagcctccttcacatcctgctcttgtatctccccattttaatccacaactataggatacctctactccctccttggtgac

SEQ ID NO: 915720 - DNA, 72 bp, Artificial Sequence
  ENSG00000255234_9 (sequence is synthesized)
caagagctgggactctagccctcatgtctgcatgcagctgctgccactgccttaatacttttagaggccctc

SEQ ID NO: 915721 - DNA, 80 bp, Artificial Sequence
  ENSG00000255234_10 (sequence is synthesized)
actcactctctacagttctcataacttacataatctattttcttcctcacacctgatacatatactttctgccccctgag

SEQ ID NO: 915722 - DNA, 120 bp, Artificial Sequence
  ENSG00000255234_11 (sequence is synthesized)
accatgctgttatatgggcaagaagaggtttcctcactatgcaagggtcctccattattaattcctctttaataaaaactcttctcaaggccggtttacttccaaaggaagctggagtca

SEQ ID NO: 915723 - DNA, 120 bp, Artificial Sequence
  ENSG00000255234_12 (sequence is synthesized)
tcagggcaacgcataggctgataaggtagctaaaaaagcagctagtgttccaacttctgtccacccccaaaatttttgctgccccaacacttcaatactattttatgtgatttttcttat

SEQ ID NO: 915724 - DNA, 120 bp, Artificial Sequence
  ENSG00000255234_13 (sequence is synthesized)
taatataagaagacaggaatgtcagggctctgagaccaagctaagccatcatataccctgtgacctgcttgtatacatccagatggcccaaagtaactgaagaatcacagaagaagtgga

SEQ ID NO: 915725 - DNA, 63 bp, Artificial Sequence
  ENSG00000255234_14 (sequence is synthesized)
aaattccttcacctggtcaaagaacaaccccctttgagtgtaattttccactacctacctaaa

SEQ ID NO: 915726 - DNA, 120 bp, Artificial Sequence
  ENSG00000255234_15 (sequence is synthesized)
acaaccccctttgagtgtaattttccactacctacctaaatcctataaaacggcccaacccctatatccctttgctggctatatcccttcactggctctctttttggactcagcctgcct

SEQ ID NO: 915727 - DNA, 120 bp, Artificial Sequence
  ENSG00000255234_16 (sequence is synthesized)
acataacttgaaggtcatgatgttctgttttctagttatgctgacgactcaaatcagacacgagtgaaatttggtgccatgactcagatcgggggacttcccttgggagatcaatcccct

SEQ ID NO: 915728 - DNA, 89 bp, Artificial Sequence
  ENSG00000255234_17 (sequence is synthesized)
agcctataaactctccttacaattcccccgttttacctgtcctaaaaccagacaagccttacagattaagttgcctatccaccccatgg

SEQ ID NO: 915729 - DNA, 120 bp, Artificial Sequence
  ENSG00000255237_0 (sequence is synthesized)
cagcctggacaacagagcgagagtctgtctgaaaacaaaaaaataaggctgggagctgcagtggctcaggctgtttgttctggcgcttggggaggcgaggctacacgttcgaggccaacc

SEQ ID NO: 915730 - DNA, 78 bp, Artificial Sequence
  ENSG00000255237_1 (sequence is synthesized)
ctgtctgggcatggtggtgggccctgtattcccagctactcgggaggcatgagccaccgcgcccggctaatttttgta

SEQ ID NO: 915731 - DNA, 60 bp, Artificial Sequence
  ENSG00000255237_2 (sequence is synthesized)
aactgtctgggcatggtggtgggccctgtattcccagctactcgggaggcatgtaggttg

SEQ ID NO: 915732 - DNA, 120 bp, Artificial Sequence
  ENSG00000255236_0 (sequence is synthesized)
tctgcacgcctcccgcagcctcagtttccctgtccgtggtactgaggatgctcgggcctagaagttcagggctggaggcccagggaccgtcgagggaggggcatcatccccgccatgggg

SEQ ID NO: 915733 - DNA, 120 bp, Artificial Sequence
  ENSG00000255236_1 (sequence is synthesized)
ccgccgcaactgcccagagcacaggccaaaggaagctgcaggatgaagacaacagcatcacaaggaggaagccaggatccctgtgttaccacaaggaggagagatgcctaaccaagaccg

SEQ ID NO: 915734 - DNA, 120 bp, Artificial Sequence
  ENSG00000255236_2 (sequence is synthesized)
tttgtgtgagccagaagcagagctgtatggtgttcagccactgagatttgagggctgtttgttacagcagttgacctatcctgactgacacatcacatcattcctttccccaccatgtgt

SEQ ID NO: 915735 - DNA, 120 bp, Artificial Sequence
  ENSG00000255236_3 (sequence is synthesized)
ctaacatgctaccaaattgaattttaagtaaattagtacttataaattaagtacaaatgcttttcaaattcacatgaatctttggtaaataaaactggttgtaaaattattgataaatat

SEQ ID NO: 915736 - DNA, 120 bp, Artificial Sequence
  ENSG00000255236_4 (sequence is synthesized)
ggggagcgaggcgcggggggcgccgggagagcgcctccgcggtgggacggagccggactgggccgagcgagggaggctcctgagcctcggaggaccccggggttggctttgggagctgaa

SEQ ID NO: 915737 - DNA, 120 bp, Artificial Sequence
  ENSG00000255236_5 (sequence is synthesized)
agtttccttggacccctcggaagccccgtgacatcagaggccgggcctggcaggggcaggcaggaaacgtgtctggaggctactgccctctccgcgtgaccttgggcgagcagcctcctc

SEQ ID NO: 915738 - DNA, 120 bp, Artificial Sequence
  ENSG00000255236_6 (sequence is synthesized)
ctggggctcagtgggtgtgattttgtaacatttcccagcgctgccacaggcgcgtctcgccctgtccaacgcggagcccgaagaattactaagaaaccgaggtctgaaggagggaagagg

SEQ ID NO: 915739 - DNA, 120 bp, Artificial Sequence
  ENSG00000255236_7 (sequence is synthesized)
cttcagagcatgcacgtcgcaaattctcaatgactgtttggaggaatgaataaatgaattgtgaacaaatggtctgaagattccagaggtagcctaatggggccctgctgcttgagttct

SEQ ID NO: 915740 - DNA, 120 bp, Artificial Sequence
  ENSG00000255236_8 (sequence is synthesized)
aatcccagccccaccagttgttggctatttggccctgggcaggtgattattctctctttgcctctgtaccttgcccgtaaaatgaggagaataccagtacctactgcataaggttgttaa

SEQ ID NO: 915741 - DNA, 120 bp, Artificial Sequence
  ENSG00000255236_9 (sequence is synthesized)
aagaaacacacagccacagtattaaaaaaattaaaaacccatttctctccaggcttctgccatcactctgtgtgacttcaacattctacctgcatgacctatgcagcacctggccgctgt

SEQ ID NO: 915742 - DNA, 120 bp, Artificial Sequence
  ENSG00000255236_10 (sequence is synthesized)
taccttgccaccctcactgacatcttctctgcataggccttccaccatgccctgtactttctccccactagaaatagccctggctctgaaatgtgttttaatcatcccactttgggtcca

SEQ ID NO: 915743 - DNA, 120 bp, Artificial Sequence
  ENSG00000255236_11 (sequence is synthesized)
ccagttcctagcctttgagcttaggcctctcctccaggaccctccctggctacgatttcccaacccctctcgaccttccattcactgaccttgccactttcttgcctcttgtctgcacct

SEQ ID NO: 915744 - DNA, 120 bp, Artificial Sequence
  ENSG00000255236_12 (sequence is synthesized)
ctccccatccctagtgtggattccatccccttgtgaacgctgccacccgtcctggcagagactcagtacttccactctctgaatgcatttcttcttcctaggcacaccagaagactacat

SEQ ID NO: 915745 - DNA, 120 bp, Artificial Sequence
  ENSG00000255236_13 (sequence is synthesized)
ttcctagccccccacccccttgcagtgtctgggaccatgtgactccttaattaggtcacttctctctcctgggaggccctctctgccctctctaagtctaactagtggcaaaggatctaa

SEQ ID NO: 915746 - DNA, 120 bp, Artificial Sequence
  ENSG00000253686_0 (sequence is synthesized)
ataaacaatagggcagaggaagcaatcggataggcatttgcttcaggtgagcagagggatgactttctgtcccacatctgtgaagatcagctgttggtttacattgccagggtgaaattc

SEQ ID NO: 915747 - DNA, 120 bp, Artificial Sequence
  ENSG00000253686_1 (sequence is synthesized)
aacagaactaatttagggtgaagatcttgaggcccacaaggaatttccttgtgggaaaattgtgaggaagagcaatcactgcacccagccacctctatatacatgtacacaaagccacac

SEQ ID NO: 915748 - DNA, 120 bp, Artificial Sequence
  ENSG00000253686_2 (sequence is synthesized)
agtttacacagtcacaggtatttaagtacacactattcacacacaaatacatatatagacacacatgtacagtccgtccaaaatatatgtacataaaagcacactattacaccttcatat

SEQ ID NO: 915749 - DNA, 120 bp, Artificial Sequence
  ENSG00000253686_3 (sequence is synthesized)
gtgcacacacacacacacccagactcacttcatacacacatagatacaacagccacagctccccatcacctacacacacacacacacacctggacacccagctctaatataatcagatag

SEQ ID NO: 915750 - DNA, 120 bp, Artificial Sequence
  ENSG00000253686_4 (sequence is synthesized)
agatatgcatgcagacaaatttgcctgtatagtcaaacacataggcaaatagagaacgagacaccacatgaacaaaggcaaacctacacacaaagacacagagcacacttacgcatatat

SEQ ID NO: 915751 - DNA, 120 bp, Artificial Sequence
  ENSG00000253686_5 (sequence is synthesized)
ctatagacccaccatggcacatatgggtaagtgcacacaggcaaactcacacacacgagcatgcacaggcagagaacacaaatgtacactcccaggtgtcataaagaacagcccagcttc

SEQ ID NO: 915752 - DNA, 120 bp, Artificial Sequence
  ENSG00000253686_6 (sequence is synthesized)
ggcttgggaacgtcacatcagacaataggaacggctgcaccgcgcgtttcctcggctgccagcttcccagccacagaggatgcctcacctgctatgtcagctcccctctgccccacctca

SEQ ID NO: 915753 - DNA, 120 bp, Artificial Sequence
  ENSG00000253686_7 (sequence is synthesized)
caagaagctcagaagctgaggagtcacagagagacctccctactgtgtcagaggaataggtccttctgtcacggggcacaggacccttgaccgcaaaatgacgtgagttaccactgacta

SEQ ID NO: 915754 - DNA, 120 bp, Artificial Sequence
  ENSG00000253686_8 (sequence is synthesized)
ttttctgggtcttgatcttgtgactccaaatggatggtaagctccttaagggaaagtctatgatattcatccaaccacccatccatcctttcatccacccaaccatccatccatctgacc

SEQ ID NO: 915755 - DNA, 120 bp, Artificial Sequence
  ENSG00000253686_9 (sequence is synthesized)
atctatccatcttctatccatctgtctactcacccatccacccatccattcaattattcatccatccctcttccatccattcacccatcttccatccatctgtccacccatccattccac

SEQ ID NO: 915756 - DNA, 120 bp, Artificial Sequence
  ENSG00000253686_10 (sequence is synthesized)
catttatccatccaaccaccatctattcatccaaccactcgtctattcatccctctgaccatccaaccatccatcgatttgttcaattattttatcaagcatctacactgcaccacacac

SEQ ID NO: 915757 - DNA, 120 bp, Artificial Sequence
  ENSG00000253686_11 (sequence is synthesized)
cctaatgggtgttggggagaaaatggagagtaaaatcagatgggacctctgacctcagtgcggctgaccatcagtccggtagaggagacacgtaaactgacaattataaataaacacaat

SEQ ID NO: 915758 - DNA, 120 bp, Artificial Sequence
  ENSG00000253686_12 (sequence is synthesized)
gtgtcaactctgacaagtgctgtgagggagaaatcagcagtactgagaaagcctttatggtcctggtgtgagaggtgggatgagcccaacacagcaacaacagcaagaccatgggggagt

SEQ ID NO: 915759 - DNA, 120 bp, Artificial Sequence
  ENSG00000253686_13 (sequence is synthesized)
gtggtgcagatgggcaggtgtacagagcatgcaggccatgtctgccagccctctctttgtgcattagcaacagtaaaacggggcttgtgtttgggcagattataccactggtcttgcatc

SEQ ID NO: 915760 - DNA, 120 bp, Artificial Sequence
  ENSG00000253686_14 (sequence is synthesized)
ccaaatgtctctttgttcactcgtttatacaaacatgctcaataatatttatgcatttttactgtgacatcattttcttatataataaaagtgcctatttatataccgtatatgtatata

SEQ ID NO: 915761 - DNA, 120 bp, Artificial Sequence
  ENSG00000253686_15 (sequence is synthesized)
tataatacacagatgcacacacacaagcacacatgcacagagcttcttgacagtcagtccctcataaggtagtccactgaagtgcagtcatcaccatcctcagacctcatgattatataa

SEQ ID NO: 915762 - DNA, 120 bp, Artificial Sequence
  ENSG00000253686_16 (sequence is synthesized)
ctagagcaccttatatttttatattttattatgtatttaataatcacataactctttagtgaatgccaattaattaggagaatgacatgccttctctctgctcctcataatatccccctt

SEQ ID NO: 915763 - DNA, 78 bp, Artificial Sequence
  ENSG00000253686_17 (sequence is synthesized)
aatgacatgccttctctctgctcctcataatatcccccttagataggttttatctccccacttacaagatgtggagac

SEQ ID NO: 915764 - DNA, 120 bp, Artificial Sequence
  ENSG00000253686_18 (sequence is synthesized)
agtgaccccggaggtttaaacaaacatggcctcaggcctcagtaaatgtttagccttagtgactggctggcaggggggtgaggcctgaggccctctgtccctgacagctggcactgtggg

SEQ ID NO: 915765 - DNA, 120 bp, Artificial Sequence
  ENSG00000253686_19 (sequence is synthesized)
ggcaggctggggcggtgagggtggggagtgagggcctgggtcaagctcctcgccctgtgctcatcttttctgacctaaggagaggctgacattcttggaggctgaaagaacacatggaga

SEQ ID NO: 915766 - DNA, 120 bp, Artificial Sequence
  ENSG00000253686_20 (sequence is synthesized)
tcagacagctggctgcgttaggagctacctgtggctgctgaagaagagtttgcgtcaatttaaagaaagagccattcaaggaatgaggaccatgaccttggctgcactgaccagctgggc

SEQ ID NO: 915767 - DNA, 120 bp, Artificial Sequence
  ENSG00000253686_21 (sequence is synthesized)
tctggagactcagtgaggctgcccagccaccaacaggccctgcacaatagatccacggacccagcagtcagaggtgaccctaggggtcactggcccgtggctaaggaggaggagcacaga

SEQ ID NO: 915768 - DNA, 120 bp, Artificial Sequence
  ENSG00000253686_22 (sequence is synthesized)
cctgcgacccccttttcccatggaccacccagggaggctgagcggggactctgagctcagatggacaacctcagagccactgggaatttgcctgaggccactggggccagggttaaatcc

SEQ ID NO: 915769 - DNA, 120 bp, Artificial Sequence
  ENSG00000253686_23 (sequence is synthesized)
atatgaagcagcgcgggctgtgcacctgccattttctaggctctgtcacatgcatctttctgccaaatctcatggtgatccttcaagaatagtactattaatctccccattgacagaggg

SEQ ID NO: 915770 - DNA, 120 bp, Artificial Sequence
  ENSG00000253686_24 (sequence is synthesized)
agaaagggaggctcagagacgttaagtgtctcaccaaagctcacacagcttccaagcaatagaactttactcagtactcagtacaggttaacatttattcattcactcgataaccatttg

SEQ ID NO: 915771 - DNA, 120 bp, Artificial Sequence
  ENSG00000253686_25 (sequence is synthesized)
cagcacagctaccatatgccaggcagtgttctaggcacttagaatacatagatgagcaaaacaggcaaaacctttccctcagggcgttaccatttgagtgccaccatgccacggctggta

SEQ ID NO: 915772 - DNA, 120 bp, Artificial Sequence
  ENSG00000253686_26 (sequence is synthesized)
caaagtactgtggaaatctcagggtactttgatagggattaccagaggagctgtgagaataaaggctggatatcagggaaggcttcctggaagaggtgttgcctgaaatgagcctggaag

SEQ ID NO: 915773 - DNA, 120 bp, Artificial Sequence
  ENSG00000253686_27 (sequence is synthesized)
gatcacttagggacagaaaagtcattccgtgtagaattcatggtgagtgacagagcctaaacccagtctcttttgcatgctgagcactgagacccagacgctggtgctcagacctgatga

SEQ ID NO: 915774 - DNA, 120 bp, Artificial Sequence
  ENSG00000253686_28 (sequence is synthesized)
cttattttcccaggtacagcttgagcaaagacacagaagcagaaggcaggtttttggttccatgaactctacatctggctacatacaaatggtgaagaggaacagggagaaacatggttg

SEQ ID NO: 915775 - DNA, 120 bp, Artificial Sequence
  ENSG00000253686_29 (sequence is synthesized)
aaaagaacaggcttggacttcaggaagcagtaaaatgagcgaatgccatttatggttacaaagataactcagctgggggccaaacagagactgaaatggagtgggtgaggatggaggccg

SEQ ID NO: 915776 - DNA, 120 bp, Artificial Sequence
  ENSG00000253686_30 (sequence is synthesized)
ggaggagatggctgcagaggtcccagcaatgacagtggttgtgggaaggggcaaccccaagtcttgtgctcccaactgcaaatccagtgctttttctaaaaaaatatttaaataatttat

SEQ ID NO: 915777 - DNA, 120 bp, Artificial Sequence
  ENSG00000253686_31 (sequence is synthesized)
gatgacaggcgtgagccactgtgcccagccttatttttttttttaatttatattttcagaggcaaacgatccttgctcattaaaaaaaggaaatagaaattcaaaacaaaaatgcctgta

SEQ ID NO: 915778 - DNA, 120 bp, Artificial Sequence
  ENSG00000253686_32 (sequence is synthesized)
tcaaaacaaaaatgcctgtatctgatgggaaagatgagcccaatgttcttttttaaaaaacctttattatgaaatatttcaactgaacatatgcagtttatattgttataaagcataaca

SEQ ID NO: 915779 - DNA, 120 bp, Artificial Sequence
  ENSG00000253686_33 (sequence is synthesized)
agcaatcaaacagctgtgaacccaccactccatgtcagaactagaacttcccaaagcagtcggagctgaggtgagatccactctgatgcccttccccaactccacgccaccccccaagac

SEQ ID NO: 915780 - DNA, 120 bp, Artificial Sequence
  ENSG00000253686_34 (sequence is synthesized)
ctgaccacctgattactctgggatttcatttttgtctcgttcccttgctttgctttatgtctttaccaaatgtgaatgtgtgcctaaacaatacagtgctcgatttgcttgtgtttaagc

SEQ ID NO: 915781 - DNA, 120 bp, Artificial Sequence
  ENSG00000253686_35 (sequence is synthesized)
agttcctctaggaaaccacggtgtacaactgctgggttgcaggcccagggttctttccacttctctatcctcccaagtagggtccagctggccttagtgctgccatgctgagagctctgg

SEQ ID NO: 915782 - DNA, 120 bp, Artificial Sequence
  ENSG00000253686_36 (sequence is synthesized)
gaggggcaacccagggcagacaggcccaggccagccaccctgccccaggcatttcccaggactcatcaggcacccagcggcccctcagcagtgagcaataccagaaatctgccagctggc

SEQ ID NO: 915783 - DNA, 75 bp, Artificial Sequence
  ENSG00000253686_37 (sequence is synthesized)
ttcttggaggctgaaagaacacatggagagcagtgtttttccagcttctgtgttggtaagagcctggcacacaca

SEQ ID NO: 915784 - DNA, 120 bp, Artificial Sequence
  ENSG00000253686_38 (sequence is synthesized)
attgtataaaaacttctctagctgctgtgtcacaaagatactggaaaggggcaaggtgaaggaggagaccagcagagcagccacggccgggacagtgcagaggagggaagatgacacagc

SEQ ID NO: 915785 - DNA, 120 bp, Artificial Sequence
  ENSG00000253687_0 (sequence is synthesized)
ctaatggctacccatttcactctgggcaggagcacggcattttgtttcttttaataatccagagtgacaataggttggcaaagtggttacgttggatgcatattgaaaagattatttcat

SEQ ID NO: 915786 - DNA, 120 bp, Artificial Sequence
  ENSG00000253687_1 (sequence is synthesized)
attttgagacagcatgaaggcattacagctttttagtggtgtgccaatttctcggtggaaagtggaattctcttctcagcccagtcctctccaagccatcttgaggggagacaaagaacc

SEQ ID NO: 915787 - DNA, 120 bp, Artificial Sequence
  ENSG00000253687_2 (sequence is synthesized)
ccattatcctgaaatgtgcctgttttgcatctgagggccatatgcacaggtaaacaaccccataaaaagtgatggcttgagcctcatcttcccctataagcgttagtctggaaggtgaga

SEQ ID NO: 915788 - DNA, 120 bp, Artificial Sequence
  ENSG00000253687_3 (sequence is synthesized)
tattacggtgaggcagagtgaaggagagaggaggaaaaacacatttatttgtgtgaaagagaaaatgaaacaggaaggttgtgaaagcctttcccagctaggggaagccaacaggttctg

SEQ ID NO: 915789 - DNA, 120 bp, Artificial Sequence
  ENSG00000253687_4 (sequence is synthesized)
ataagtgtgttctcttcacccagaagaaccggaggaacacctctcacagactgagcctagagtgctgtcatgaaacaaaagaaacctctgggaagggagaaagggatcaggagcctgaat

SEQ ID NO: 915790 - DNA, 120 bp, Artificial Sequence
  ENSG00000253687_5 (sequence is synthesized)
gggatgactttctggtggcatcatctggcagatagagttgtctggcccagccatcctctggttcctgttcaactgcctgccacatccagcccctacacttggctctgccatcctcctcct

SEQ ID NO: 915791 - DNA, 120 bp, Artificial Sequence
  ENSG00000253682_0 (sequence is synthesized)
ggaagtgatgctgtatgacttccaaacctttacctgaaaagatcttctaccttctacccttgctgccttggaacctgggaccaccatgctgtgaagactccagggacatgaggccatgtg

SEQ ID NO: 915792 - DNA, 120 bp, Artificial Sequence
  ENSG00000253682_1 (sequence is synthesized)
gagagagtcccaaccattacaaccatcccagccatttagcctgatcccccacactgagtctgttattggtgttcttgtaatctcccaggatagaaatcaagagagatcaccagccacagc

SEQ ID NO: 915793 - DNA, 120 bp, Artificial Sequence
  ENSG00000253682_2 (sequence is synthesized)
aaaggcagcaccatggaagtagttaacagttctgcagaacattttagaaatggtaacataagtataaacaacaaaacagtgagattctgataccaacttccagttcctcctcaccaagac

SEQ ID NO: 915794 - DNA, 120 bp, Artificial Sequence
  ENSG00000253682_3 (sequence is synthesized)
ttcgtgaaaactcttcagctcatctggcaaaacaaacaggcaaagacgcagataccaggacacttccttttgaacacttggctgcagaagctaagagacatgggatacgcgaattgattc

SEQ ID NO: 915795 - DNA, 120 bp, Artificial Sequence
  ENSG00000253682_4 (sequence is synthesized)
ttacataatatgagagatataggtgagtcaaaagactgcagaacttccaattttatctcctcagccagttattaaccactcattttttgaaagtccaacattaaatggataccaaaaacc

SEQ ID NO: 915796 - DNA, 120 bp, Artificial Sequence
  ENSG00000253682_5 (sequence is synthesized)
ttacaggccatgaactgcagactcaggaagataaattggcaaagcagcaccgcgatggaagagctcctggcagcaatgtaaatactggagcccagtagaaagagtctaagtcgaggaggc

SEQ ID NO: 915797 - DNA, 120 bp, Artificial Sequence
  ENSG00000253682_6 (sequence is synthesized)
atgaggacaagatgatcagtaattgccattgattgcatgggtgagatctcaccattcccatacattcacagagcaacccacagagtgaactatataccaagtgagcagaggataaagtag

SEQ ID NO: 915798 - DNA, 120 bp, Artificial Sequence
  ENSG00000253682_7 (sequence is synthesized)
gatgatcacaggaagggttaacaggcccctccctaacctggagaaccctcacaacatttgctcagcaatttaggacaagtctgctttttatcctgctgtagatacctaaatgagcccagt

SEQ ID NO: 915799 - DNA, 120 bp, Artificial Sequence
  ENSG00000253682_8 (sequence is synthesized)
atcccagttaagtcctgaaactccaaaattcatgtaggctcatatgccatcctattgacattaccactcttttgctggttcccccacatcatctctccaatttgtgtgactatcccacat

SEQ ID NO: 915800 - DNA, 120 bp, Artificial Sequence
  ENSG00000253682_9 (sequence is synthesized)
gccacaaccatttttagtttttatgttagctctcattctaactggctctgtggattaatgttttaattttgatcttaccatcccaattcctacctcaaagcctttctcctagttggaatc

SEQ ID NO: 915801 - DNA, 120 bp, Artificial Sequence
  ENSG00000253682_10 (sequence is synthesized)
tagcctcaagtcctaagtgccatgcacccttgagattcacatcctcgtctattttgtgtccaattatatcttctattcatttgaattcacgtgaataattaaaatcagaatttgaatggt

SEQ ID NO: 915802 - DNA, 87 bp, Artificial Sequence
  ENSG00000267571_0 (sequence is synthesized)
caaaattgctgaggaatcaaagttcaaaagggccccaggttctgaccggccactgctctaggtgggaggatcacttgagcccaggag

SEQ ID NO: 915803 - DNA, 88 bp, Artificial Sequence
  ENSG00000267571_1 (sequence is synthesized)
gggaggatcacttgagcccaggagtttggaccagcctggggaacatatagagaacttgtttctattgtacagcaacaaaaatgcccca

SEQ ID NO: 915804 - DNA, 120 bp, Artificial Sequence
  ENSG00000267571_2 (sequence is synthesized)
ccgtctcaaaaaaaaaaaaaaaaaaaagttgcctttggagtctgaaaccaatctgtaggttacaggcatcccagcatcttgattcaggccaccactgatgtaacatcatcagttttatga

SEQ ID NO: 915805 - DNA, 120 bp, Artificial Sequence
  ENSG00000253681_0 (sequence is synthesized)
agaaccatgataattaccaaccgcctgtgagaaaattaaacaaaaggcccaacttttaaaccaccattttaaacgacctattacatctcagaaataaatcattgaggaaatagcctgctt

SEQ ID NO: 915806 - DNA, 120 bp, Artificial Sequence
  ENSG00000253681_1 (sequence is synthesized)
atggcacaagaagtttgagaactagtgctgtggataccatctatacagcaaagcactatgcttctgacgatagaccctgctttcctaattgatcaagagataaataagtgattccagctg

SEQ ID NO: 915807 - DNA, 120 bp, Artificial Sequence
  ENSG00000246130_0 (sequence is synthesized)
cggaacggaaccactgggccgcagcgaccacaggggagttcttcgccggccgcaggttcaaagcgatctgcaatgagcgcctttaggaattcattcgaaggcgcaaaagaaaaagaaatt

SEQ ID NO: 915808 - DNA, 120 bp, Artificial Sequence
  ENSG00000246130_1 (sequence is synthesized)
aaggcaggaactgagcgaggaaggaagggagggaaagaaaggaagaaagagaaaaagagaaagaaacagaaagaacaggcaaaagctgaaagggtcatgggaggaggctgctggttccag

SEQ ID NO: 915809 - DNA, 120 bp, Artificial Sequence
  ENSG00000246130_2 (sequence is synthesized)
tgaatggcgctgaccccactgagatcaacaccttgctggaggcctcaaacactgaaagaaagacatgcaaaggaaataattcaggaccaactggtgggctccaaaaatctcttctatgag

SEQ ID NO: 915810 - DNA, 120 bp, Artificial Sequence
  ENSG00000246130_3 (sequence is synthesized)
gaaggtgaatgcaggctctgctacgtcctgcctgtgaaagaatcccttcaggaaaccagagcttccctcgtttaccttttctcctacaaagggaagcagcctggaagaaagagtccagta

SEQ ID NO: 915811 - DNA, 120 bp, Artificial Sequence
  ENSG00000246130_4 (sequence is synthesized)
cttgacccatgcctcaacaaactctgctatcaatatggtgcagcttaccaaaggtcctagaactttgtcaacgcacttggagtaatttttatgaaatattgtgtgtgataagcaaactgt

SEQ ID NO: 915812 - DNA, 120 bp, Artificial Sequence
  ENSG00000246130_5 (sequence is synthesized)
ggaaatttatataagatgttggtggcatagagttatacgattgtgtattaagggtagttttaggatgtcatttttttttcagttcatcatgacagaagtccttttcatgagagaagtcac

SEQ ID NO: 915813 - DNA, 120 bp, Artificial Sequence
  ENSG00000246130_6 (sequence is synthesized)
atgagaaaaaactttcttatattgtaagctccttctatagtggtatgtgcatttaatgacatccaactaaagatggtgtaataccacggtggtttgacttagagttttttaactttatat

SEQ ID NO: 915814 - DNA, 120 bp, Artificial Sequence
  ENSG00000246130_7 (sequence is synthesized)
ctggtttatctgggtattacatgcgttttaaatgtggatcttttcaacttacgatgagattatcaagacatagccccatgctaagtcatgagcatgtggacttataatggttcaatttag

SEQ ID NO: 915815 - DNA, 120 bp, Artificial Sequence
  ENSG00000246130_8 (sequence is synthesized)
atttttcggctttaagataggattattggggcttacccccatcttaagtagagaaacatctgtattgtgtaatactatatgatgtacatttttctgttttcctattttcgtgcatgttga

SEQ ID NO: 915816 - DNA, 120 bp, Artificial Sequence
  ENSG00000246130_9 (sequence is synthesized)
tgtaagcatggaaaaattttaggaaatgtatttattaggctgtttacatgggctgcctggtgcaaatcagcagtcaaaaatgactacatacacaactagcaatgggaggagaaatcctcc

SEQ ID NO: 915817 - DNA, 120 bp, Artificial Sequence
  ENSG00000246130_10 (sequence is synthesized)
aggtatatagaggtatttatttacaaataaacaaatatttatttataagtagatgtttacatatgcccaggattttgaagagcctggtatctttgggaagccatgtgtctggtctgtcct

SEQ ID NO: 915818 - DNA, 120 bp, Artificial Sequence
  ENSG00000246130_11 (sequence is synthesized)
gctgggacagtcatgggactgcatcttcgtccttgtccacagcagatgaggacagtgagaattaggttagatctgggactacaaatagcttctctttcaagtgccattacagctgaacat

SEQ ID NO: 915819 - DNA, 120 bp, Artificial Sequence
  ENSG00000246130_12 (sequence is synthesized)
tagtgaatcttgggccttctttgggctcagggcagagcaggtgtttatctgccccggcatctgctatggcatcaagagggaagagtggacggtgcctgggaatggtgtgaaatgattgct

SEQ ID NO: 915820 - DNA, 120 bp, Artificial Sequence
  ENSG00000246130_13 (sequence is synthesized)
gactcaggagtggatgggcccctctcgcttctggtggtctgtgaccctgagcccctgagctgcattttacggtaaagattcctgagctgcagcatctgactcatctcagaaatatcaatt

SEQ ID NO: 915821 - DNA, 120 bp, Artificial Sequence
  ENSG00000246130_14 (sequence is synthesized)
cttaaacactgtgacaacaggacctagaatggctgacacattaaggctttgtccttgtgtcacgctctattattttatttaaaaacttcagtaatcattttagcctctttccagcaaact

SEQ ID NO: 915822 - DNA, 120 bp, Artificial Sequence
  ENSG00000246130_15 (sequence is synthesized)
cttctccatagcagtccagtagtggtaggataaattatggatgtagtcgttcaagggattttggtcttttccatctcaagccatgtgttttgtcttgttccgggactggtttggctggga

SEQ ID NO: 915823 - DNA, 120 bp, Artificial Sequence
  ENSG00000246130_16 (sequence is synthesized)
caaagttagaattgcctgaagatttaggcacattcagtgttgtgtccatggagttttaggagggggtagcctttctggtctttgcacttccatcctctcccacttccatctggcgtccca

SEQ ID NO: 915824 - DNA, 120 bp, Artificial Sequence
  ENSG00000246130_17 (sequence is synthesized)
tgcgttgtcccctgcacatctggaagacacaaggtgctgctgccacctggtctttgcttttgcagggccttctgtgcaggacacttggcctcaaagcccagagggagccagtccagcccc

SEQ ID NO: 915825 - DNA, 120 bp, Artificial Sequence
  ENSG00000246130_18 (sequence is synthesized)
agctcccttgtgccttccgtagaggccttccttgaagatgcatctagagtgtcagccttatcagtgtttgttaagcttattcttttaaagtaagcttcctgacaacatgaaattgttggg

SEQ ID NO: 915826 - DNA, 120 bp, Artificial Sequence
  ENSG00000246130_19 (sequence is synthesized)
gttttctggagttgtttggtttgtatgggatttgctttatccccaagccaaacagcacatgacacacgacagccacttaagacagtgtgtcactcgtggttagagtcctttgatgtttct

SEQ ID NO: 915827 - DNA, 120 bp, Artificial Sequence
  ENSG00000246130_20 (sequence is synthesized)
gccctatggaccctatttgaagactatgttgtaatatcaaacaatacaaggaagcacgttatacagaaaatgctcatatgtttatgaattttgaccaaaataaatatgaaatcttatatt

SEQ ID NO: 915828 - DNA, 120 bp, Artificial Sequence
  ENSG00000253688_0 (sequence is synthesized)
cgccgcgctccgctggctgggccgtgctggcccctggcgctaggcagctgactccatccagatgtgccgcggctccagagtggctgccgcgcgcagtaaatgggcatcggaggctcgtca

SEQ ID NO: 915829 - DNA, 120 bp, Artificial Sequence
  ENSG00000253688_1 (sequence is synthesized)
atccgggccagagcaattgcggtctcggggccgccccactggcactcggaaagagtcaagagtccaagaacttgtaacatcacaatctgaaatggatctggctgagcctcccagtccttc

SEQ ID NO: 915830 - DNA, 120 bp, Artificial Sequence
  ENSG00000253688_2 (sequence is synthesized)
ttgagtaactttattgacccctttcaggacttaagtgaagagataacggtggtgtacgcaatgtctttgaagtctgttcgtggaaaagctgtcatcagagactaactggaaaatcctcat

SEQ ID NO: 915831 - DNA, 120 bp, Artificial Sequence
  ENSG00000253688_3 (sequence is synthesized)
gaactgggtccctgacctaccgatttgcattgcccacaggctgggcatgttttaccagaggcaggtctacagcaggttgagagcattttctgccaagaaaactcatgtcctgactgatat

SEQ ID NO: 915832 - DNA, 120 bp, Artificial Sequence
  ENSG00000253688_4 (sequence is synthesized)
actcatgtcctgactgatatacggtaccctgagtgagcgaggtctcgctctgtcacccaggcagaagagcagtggtacgatcttggttcattacagccttgacctcctgagctcaagtga

SEQ ID NO: 915833 - DNA, 120 bp, Artificial Sequence
  ENSG00000253688_5 (sequence is synthesized)
gagtagctgggaccgcaggaatgcaataccatgtctggctaatttttgtacttttggtagaggcggggtcttgctaccttaccagggctggtctcaaactcccgggctcaagcgatcctc

SEQ ID NO: 915834 - DNA, 120 bp, Artificial Sequence
  ENSG00000253688_6 (sequence is synthesized)
gaaagattgaatacaatctgtttagaggaagaagctgtaaaactgtaataagatgaaagaagaagaaaggaagaaaaggaggagcgaaaggaggaggggaagaaactgattcatgcaggt

SEQ ID NO: 915835 - DNA, 120 bp, Artificial Sequence
  ENSG00000253688_7 (sequence is synthesized)
taaataatatcataattattccactgtaatttttttgcactttaaagtactcacctgtctattctgtactggagttctgaccttgtttctggtctaccacaccactgcattttcaaacca

SEQ ID NO: 915836 - DNA, 120 bp, Artificial Sequence
  ENSG00000253688_8 (sequence is synthesized)
agaattcactgagagcgaataggaaggctcgtgcaccagagagactattctcatttatttcttaattatttatcaacaaaacttcattggcacacttattgagagagtttcaaatcagcg

SEQ ID NO: 915837 - DNA, 120 bp, Artificial Sequence
  ENSG00000253688_9 (sequence is synthesized)
tgctgggcgctgggaagcgcactgggtgctgagacacgggaagccacagcttctctggagaagctcgcattctgaaaggaagcgttgggagaggacatggatgaaaacatacaagacaaa

SEQ ID NO: 915838 - DNA, 120 bp, Artificial Sequence
  ENSG00000253688_10 (sequence is synthesized)
acagtgagcattgtgataagagataatacagtgtcacagcagcaagaagaaggaattcacgactctcaagaggtcgagatcatccttgaaccaccactgacctcaaggcaaggcacaagg

SEQ ID NO: 915839 - DNA, 120 bp, Artificial Sequence
  ENSG00000253688_11 (sequence is synthesized)
cgaagagcccccgagtggcacagggagattgagggtctcatccccactcataggaattcagcccatcagtggtctagactgagacaagaaattaagtaaatttgactcctatgccacttc

SEQ ID NO: 915840 - DNA, 120 bp, Artificial Sequence
  ENSG00000249955_0 (sequence is synthesized)
attgtggcctgggtgctggacttttcatattaagtcctgtcttagccaagggagaagaatgtaaggataagaccaccaatatcacaggggctgtctgagcctttacctgtgattttctac

SEQ ID NO: 915841 - DNA, 120 bp, Artificial Sequence
  ENSG00000249955_1 (sequence is synthesized)
cactctgtggccttctggagcaatggacaaccaagtcagctatgcagttcataaaagtggacctggttatatgtcatccaacagcatatggtccctgcaagcctgtttggaagccaatat

SEQ ID NO: 915842 - DNA, 120 bp, Artificial Sequence
  ENSG00000249955_2 (sequence is synthesized)
tctataacctacaggaatccactgaatctgatgtctttggaagcaatatattttccagggttccaatggactacggaataaggcaacacagggcctgttttcccgcagtgtcctctgctc

SEQ ID NO: 915843 - DNA, 120 bp, Artificial Sequence
  ENSG00000249955_3 (sequence is synthesized)
caaggaactttcttaaggaagcgggacgtgtcaatgaggtacctcccggggttctacagttcctcctgcccactggccagggggaatctggcgggagcctctcggtggatgctgtcacat

SEQ ID NO: 915844 - DNA, 120 bp, Artificial Sequence
  ENSG00000249955_4 (sequence is synthesized)
gactgtgccttctgaaagaacatctgtgaagagcagtttctggtgtccctgagtaacccttttctaacaattcagccagtgtatttcctccaagagtagaaaacactggcttggaaaatc

SEQ ID NO: 915845 - DNA, 120 bp, Artificial Sequence
  ENSG00000249955_5 (sequence is synthesized)
ccaacctactcggtctgtgaaattctcgctaattcagatgggacatgggcaaggcttctaatactttcatcccatgaacataaattttgatatttcagctgcagattttttcaaatatac

SEQ ID NO: 915846 - DNA, 120 bp, Artificial Sequence
  ENSG00000249955_6 (sequence is synthesized)
aatgacctgaggccaggaaagttaccttgtcaatttattttcttataatttgcatgtcttataaaagtagactacagcaggcatggacaaaaacagaacaaaagtctaactgattgaaag

SEQ ID NO: 915847 - DNA, 120 bp, Artificial Sequence
  ENSG00000249955_7 (sequence is synthesized)
cttattccatagagaagacattgggttctagagacttacaggctatgcttgtagtttctcatatttaccttccttttgttggaaaatatagcagaaaatagagtggaggagggtgagaag

SEQ ID NO: 915848 - DNA, 120 bp, Artificial Sequence
  ENSG00000249955_8 (sequence is synthesized)
gtgaggttatttgtgtgaagaatggttaggatcagtttgtttacctcctccccatccgtaccactttttggaacagttatctgtaaatataaggataaagtagtctgaacctgggtacag

SEQ ID NO: 915849 - DNA, 120 bp, Artificial Sequence
  ENSG00000249955_9 (sequence is synthesized)
aagaggagaacactaacaagacaggcatctgatggtaataccaacagctttttccccaaacctaagttacaactttagtgatcattatgttctaattgttatagaaaaataaaatgtgaa

SEQ ID NO: 915850 - DNA, 76 bp, Artificial Sequence
  ENSG00000249951_0 (sequence is synthesized)
tcacaaaacagaatgctgaggaaccttgtgagcctgaaggctggaacgcagtcgacaatcgtagtgctccgctccc

SEQ ID NO: 915851 - DNA, 120 bp, Artificial Sequence
  ENSG00000249959_0 (sequence is synthesized)
tttcctttttctttttttttttttctccagacggactgttgtgcagactcaggcagctcactcggggctgggcagcagacagtgattatcgtcaccccctgctttcatccattacggcgg

SEQ ID NO: 915852 - DNA, 120 bp, Artificial Sequence
  ENSG00000249959_1 (sequence is synthesized)
gtgttagcagatgtgggatttgagacccaaagaagtgaagtaacctgcccaagtttacacagcttggagtagaacccgagtttctatggactccagagctcatgagttcaccacttttct

SEQ ID NO: 915853 - DNA, 120 bp, Artificial Sequence
  ENSG00000249959_2 (sequence is synthesized)
gtgcctcctaactctatgccgctgaggactcagaagaagccagtgctaatgctttctccagtttctctcctcttgtgtgaactgtgtgaactgccactttaagactctcttggagaatca

SEQ ID NO: 915854 - DNA, 120 bp, Artificial Sequence
  ENSG00000249959_3 (sequence is synthesized)
taatccaagttgcgaagtccaacaattcctctggagaaatggttctcaactgggggcaaatttgggccccaggagacatatggcaatgtctgacaatgtttttttgattgttacaaacag

SEQ ID NO: 915855 - DNA, 120 bp, Artificial Sequence
  ENSG00000249959_4 (sequence is synthesized)
cgtcaatggtactgaggttgaaaaaccctggtctggagttttaatcagttggccatttttcccatcccatgttgaaatatttgtatttaaaacattacatctggtttattttttcaagat

SEQ ID NO: 915856 - DNA, 120 bp, Artificial Sequence
  ENSG00000249959_5 (sequence is synthesized)
aatgtccagtgtacagtggaaaatgatgtgttttcctatcactttgctcaagaataaagctgtaatatttgcaaaatagataaccttagttgtcactcaaaatgtaaactgtcataaggg

SEQ ID NO: 915857 - DNA, 120 bp, Artificial Sequence
  ENSG00000249959_6 (sequence is synthesized)
ataagagattaactgatttcactgtcaacctttacagtgtcattatttttccctgtaactgtctgcttgatatccttgctgacgaagatgttttaaaatggaagacaattagaggcttta

SEQ ID NO: 915858 - DNA, 120 bp, Artificial Sequence
  ENSG00000249959_7 (sequence is synthesized)
tgtttatgaaaaatgaagtgttcacacacaaaagaatgcacagtggaccttttatgggatgtttaaaatatcctttcattaaaagattttcttaagtggctgtttgtcacttaataggaa

SEQ ID NO: 915859 - DNA, 120 bp, Artificial Sequence
  ENSG00000249959_8 (sequence is synthesized)
gcaccaggggatttttcttacatatttaccatgagaacctaatagagctccaggtggtaggactcacaaaagtgtggggcttctctgtgattgggtcctcctggagtttttaactctgag

SEQ ID NO: 915860 - DNA, 120 bp, Artificial Sequence
  ENSG00000249959_9 (sequence is synthesized)
gcttgtctacaccaagcctccagcatttcatcggttacactttaggttttcctaccccagcactgcttcctacagaggctctgtctcagttttccagctgggacatagtttttcttctgt

SEQ ID NO: 915861 - DNA, 120 bp, Artificial Sequence
  ENSG00000249959_10 (sequence is synthesized)
ctttccacatggattcgaactaacaccatcagctcgcctgcttctcagaccttcagactcagatggaactacactataggttctcctgggtctggacttctcagcctccataatcatagg

SEQ ID NO: 915862 - DNA, 120 bp, Artificial Sequence
  ENSG00000253972_0 (sequence is synthesized)
atgctcaagatcgaatggcatctctcagactggaagacctttctgaagtcagttccagacatccctggaaggctggataatttgggaaaaggctgactcaatgtaagcaattacaactgg

SEQ ID NO: 915863 - DNA, 120 bp, Artificial Sequence
  ENSG00000253972_1 (sequence is synthesized)
atcaaaatcatggatctacatgcccatttcacccactagactgtgacgtcagagtcggtgacattgccttcaacatctccgtatgctcattacccagggtggtgctttctacagaaggtc

SEQ ID NO: 915864 - DNA, 120 bp, Artificial Sequence
  ENSG00000253972_2 (sequence is synthesized)
gagtgcagcttgggatgctaggaacacactccggtctggagcccagctcactccctggttcatggtggatgtccaaaaataggcatgaaaacgagtgaagcgagaatatgtacttctcaa

SEQ ID NO: 915865 - DNA, 120 bp, Artificial Sequence
  ENSG00000253972_3 (sequence is synthesized)
ttctcaagttattattggtgacacccaccacctagtaccagatctcaggaggctgagatggaaagttatgggaaactttgtacctcttgccagttgaattcatgacacccaattttaaat

SEQ ID NO: 915866 - DNA, 120 bp, Artificial Sequence
  ENSG00000253972_4 (sequence is synthesized)
tcggccccaaatttgcccacatgacctatttctattgtaactgccactggaacttttgaccagggtaaatcttgtgccttcttccagtgcctcctgctcccctcatcagtccccatctgt

SEQ ID NO: 915867 - DNA, 120 bp, Artificial Sequence
  ENSG00000253972_5 (sequence is synthesized)
cctctaaccatgctgacttctgtccaaactgcttctggactggccctggcatagacctgcattagagatgcaaggcagcaaggtgtttatttatttagttagttaggaaaacagaacaaa

SEQ ID NO: 915868 - DNA, 120 bp, Artificial Sequence
  ENSG00000253972_6 (sequence is synthesized)
ttctgggatgtaatgagaaatgacatacacataagaggcttatgaccaaaatacgttaatactcattgcaaaagaagttctactttttagctttacatttgaaggctttaaaaatatgtc

SEQ ID NO: 915869 - DNA, 120 bp, Artificial Sequence
  ENSG00000253972_7 (sequence is synthesized)
tgagagtgctatagagagttatactttcttcctccccatgtgacctaaacctccaattcagctgcttaaatagctgacaccgaccctaaaatggaaagctcatattacagaggagaaata

SEQ ID NO: 915870 - DNA, 120 bp, Artificial Sequence
  ENSG00000253972_8 (sequence is synthesized)
atagtccatgctcaagatcgaatggcatctctcagactggaagacctttctgaagtcagttccagacatccctggaaggctggataatttgggaaaaggctgactcaatgtaagaaagac

SEQ ID NO: 915871 - DNA, 120 bp, Artificial Sequence
  ENSG00000253972_9 (sequence is synthesized)
aattcatagtccatgctcaagatcgaatggcatctctcagactggaagacctttctgaagtcagttccagacatccctggaaggctggataatttgggaaaaggctgactcaatgtaagt

SEQ ID NO: 915872 - DNA, 120 bp, Artificial Sequence
  ENSG00000253972_10 (sequence is synthesized)
ttggcacctttccatgacgaggatctctacaggactctgcctgagaaattttatacattcctccaaagaggaagaaactaaaatcgagagaggttaataattgtgcccgaggctacacag

SEQ ID NO: 915873 - DNA, 120 bp, Artificial Sequence
  ENSG00000253972_11 (sequence is synthesized)
tcctgcttggagaactgatccaactccacacctgtatcttcaggttggactcgcttcttcaacccatgtacatgtccagtattccttcatcattgacaaataccttcctttgactttact

SEQ ID NO: 915874 - DNA, 120 bp, Artificial Sequence
  ENSG00000253972_12 (sequence is synthesized)
gattctctgactaccaccttttcaatgaagaaagacttccctggccaggtgccatccctcggtgcttccacggttactgacgcgtgtattctccacagcaattacaactggatcaaaatc

SEQ ID NO: 915875 - DNA, 120 bp, Artificial Sequence
  ENSG00000253972_13 (sequence is synthesized)
atagtccatgctcaagatcgaatggcatctctcagactggaagacctttctgaagtcagttccagacatccctggaaggctggataatttgggaaaaggctgactcaatgtaagcccaac

SEQ ID NO: 915876 - DNA, 120 bp, Artificial Sequence
  ENSG00000253972_14 (sequence is synthesized)
ttatacatggcactccaaggggatgcttcagccagaaagtaaagggctgaaaaagtagaacaatacaaaagccctcgtgtggtgggaactgtggcctcactcttacttgtccttccattc

SEQ ID NO: 915877 - DNA, 120 bp, Artificial Sequence
  ENSG00000253972_15 (sequence is synthesized)
tgtttcaaaaccaaaatctccttattttcccagaatagaatgaggagaaaacaactatttttgagccattaatgtctgacagttccagaatgcaacaattaaaaattgttaccaacttgt

SEQ ID NO: 915878 - DNA, 120 bp, Artificial Sequence
  ENSG00000253972_16 (sequence is synthesized)
gacaattccattatatacatggctaaaaagttttcctgggagagtgtacaaaatatgttaccaaacctatcaaaagcaagccatgcaataaaaaatgactgaataataataataaaaaaa

SEQ ID NO: 915879 - DNA, 120 bp, Artificial Sequence
  ENSG00000253972_17 (sequence is synthesized)
ctctcagactggaagacctttctgaagtcagttccagacatccctggaaggctggataatttgggaaaaggctgactcaatgtaaggactctgcctgagaaattttatacattcctccaa

SEQ ID NO: 915880 - DNA, 120 bp, Artificial Sequence
  ENSG00000253972_18 (sequence is synthesized)
agaaaaaaaatacagaaaagctgtttcaaaaccaaaatctccttattttcccagaatagaatgagaggaagaaactaaaatcgagagaggttaataattgtgcccgaggctacacagcta

SEQ ID NO: 915881 - DNA, 120 bp, Artificial Sequence
  ENSG00000253972_19 (sequence is synthesized)
ttcatctttgcttggtctccaattcctctccttgaagttgctcttcacatcactataaaccagcttttgatctcattgcttcttagagagttagtaaaaaaaatggatagaataatagtt

SEQ ID NO: 915882 - DNA, 120 bp, Artificial Sequence
  ENSG00000253973_0 (sequence is synthesized)
gcgctccggatttctccaacttcaggccctgaaatgtggtagttcagctccacattggatgcttttggccgatgccttggttttgctcctcccctatgtgccagtcctatgagtctgcta

SEQ ID NO: 915883 - DNA, 120 bp, Artificial Sequence
  ENSG00000253973_1 (sequence is synthesized)
gcctcctggttcagtgtggaagcctccttggctgcagcgggggtcatgcacagcagcctcaggaggctgcatttgtccatctcagcatctctttccctgggtctggccctcaacctcttt

SEQ ID NO: 915884 - DNA, 120 bp, Artificial Sequence
  ENSG00000253973_2 (sequence is synthesized)
cttgtaggctggaatttgagtgcttcactccctgaactctggaggattttaacatagttacgacttgtgtctccaaatggataaaccaggaccagtgccgcactcagtcgaagccaacta

SEQ ID NO: 915885 - DNA, 120 bp, Artificial Sequence
  ENSG00000253973_3 (sequence is synthesized)
gaccactgctagaccacttttttcaacaccgagtgtgccatgagaaactatgttaataaaaggcaaaaatgtggaaggaacaggaagaatgaaaaagcaaaataaaaaagggcaaattct

SEQ ID NO: 915886 - DNA, 120 bp, Artificial Sequence
  ENSG00000253973_4 (sequence is synthesized)
tgcaaaacctcttcatccctagcttttcccagaaatcctggcatttcttcagtaaatttgttctgtgcaagtatttgttctaccaagaccgatcagtgaaaaatgagaaaaacctagttt

SEQ ID NO: 915887 - DNA, 120 bp, Artificial Sequence
  ENSG00000253973_5 (sequence is synthesized)
cttccctaggaattgatgccattttatgaaatctgttattaatatcagccagttgtcgagaaagtgcacttgttcagtagctgactttggctgctcagtatgggcttttgctttgccaaa

SEQ ID NO: 915888 - DNA, 120 bp, Artificial Sequence
  ENSG00000253973_6 (sequence is synthesized)
aataatgagatcacttttctaattcctttttaatgtgtttacacagcttcaacagtattgcctgctctatacactaggaaacattatgtggaacagcaaatttgctttccaagtcaaact

SEQ ID NO: 915889 - DNA, 120 bp, Artificial Sequence
  ENSG00000253973_7 (sequence is synthesized)
gaagaaaaccacacaataattatctagaattaacttactgaatttaaagaggaatatacttgaactgcctgacaaattatgcattaagaacaaaccaagagaaaaacaaaacaaacatca

SEQ ID NO: 915890 - DNA, 120 bp, Artificial Sequence
  ENSG00000253973_8 (sequence is synthesized)
caccataatatttttgtaaaaagttttgaaagacaagtgtttcatcgtcttgagaacgctgacttatgatgcccttgattggcattaaggaaacaaactctgggaaagaatgatgacgtc

SEQ ID NO: 915891 - DNA, 120 bp, Artificial Sequence
  ENSG00000253973_9 (sequence is synthesized)
ctgttatattctcatctttgtattgctctctcaagaaatatgggggaggaggagccagaagaagaaacagctcgaagaattgactattgttgcctctggcaaatgggatgaggaaatggg

SEQ ID NO: 915892 - DNA, 120 bp, Artificial Sequence
  ENSG00000253973_10 (sequence is synthesized)
aagttatgagacaaggaaatgatgagtttcattacaagcctagaagtaattaagcgtttatgttactcatttgtactattttcacttaagacaatgaaaatttataatttctaaagagca

SEQ ID NO: 915893 - DNA, 120 bp, Artificial Sequence
  ENSG00000253973_11 (sequence is synthesized)
gaaaagagctcggaaaggttacctgcttggtaaccaatggctgtatgatatgttgcctgactgttaaatccagaaactgtcaaaagatgggttttgtttaggttgagccagactttctcc

SEQ ID NO: 915894 - DNA, 120 bp, Artificial Sequence
  ENSG00000253973_12 (sequence is synthesized)
agaaggagtaacgcaccaaaggatctgtctgactcccacccccatgaccacctctatttctgctcatctccagcttgaccgctggaccttcaggcaggtcttcccttgtcccacagccaa

SEQ ID NO: 915895 - DNA, 120 bp, Artificial Sequence
  ENSG00000253973_13 (sequence is synthesized)
gtgttgcccctctccattcatctcttctactattatcatcagctgagtcagaaatagaagactcagtggacacaaaaaaagactagctgccattctgagctagaggctgcttcagaggaa

SEQ ID NO: 915896 - DNA, 120 bp, Artificial Sequence
  ENSG00000253973_14 (sequence is synthesized)
gacagctgacttcactgaccacccactcagtcccaggcactggactctgggcacctttccatattattatcttaattgagcatcccaactgatatggccaggctttatgtccccactcaa

SEQ ID NO: 915897 - DNA, 120 bp, Artificial Sequence
  ENSG00000253973_15 (sequence is synthesized)
atctcatcctgaattataatccccataatcccctcgtgtcaagggagagaccaggtggaggtgattggattatgggggcggttcccatgctgttctcatgatagagtgagatcatgagat

SEQ ID NO: 915898 - DNA, 120 bp, Artificial Sequence
  ENSG00000253973_16 (sequence is synthesized)
atagagtgagatcatgagatctcatggttttacaagtgtttggtagttcctcctgcatttattctccttcctgccaccttgtgaagaaggtaccttgcttcccctttgccttccaccatg

SEQ ID NO: 915899 - DNA, 120 bp, Artificial Sequence
  ENSG00000253973_17 (sequence is synthesized)
tggaactgtgagtcaattaagcctctttctttatcaattacccagtctcaggcagttctttacagcagtatgaaaatgggcgaataccctggccctaagaggtagactttattacatcca

SEQ ID NO: 915900 - DNA, 120 bp, Artificial Sequence
  ENSG00000253973_18 (sequence is synthesized)
tacatccatttcaaagaaagaccaagagacagagcctcagggcagtttgccaagtcttacagctaggtgggggctgcattgggacgttaacctgattattctgatggacacgagaccaag

SEQ ID NO: 915901 - DNA, 120 bp, Artificial Sequence
  ENSG00000253973_19 (sequence is synthesized)
ggtcttgcttggttggtgattaagcaacagcactggtgaagaacagacacacaccctggttcacaggagctgctcaccccagtccagctggtctgagggcatgtggctcccaagttcagg

SEQ ID NO: 915902 - DNA, 120 bp, Artificial Sequence
  ENSG00000253973_20 (sequence is synthesized)
tctgatgcaataagttggggagggaaaaggacaattgcagtggccaaggaaagggagtgaaggtgcctacccatgagcagccgccgtttcacccgtttatccccatccaccactgatgtg

SEQ ID NO: 915903 - DNA, 120 bp, Artificial Sequence
  ENSG00000253973_21 (sequence is synthesized)
gtgttgctctctgtcacctccaggacagtgtcctctcgctctacaagagaagcaaaagagcacggttctcagactgaatgagttagattgctcatccccatacaactgtgtttgctgaaa

SEQ ID NO: 915904 - DNA, 120 bp, Artificial Sequence
  ENSG00000253973_22 (sequence is synthesized)
tcccagacataagaggaatgaaagatatgtgactctgttcacgcaataaaaatgtgttgtaatgaggctctgtgggagacacagcccgttaaagggccacagatccttagcaaacattaa

SEQ ID NO: 915905 - DNA, 120 bp, Artificial Sequence
  ENSG00000253973_23 (sequence is synthesized)
acatggaaaagattttggaggtatattgcactgaccaaagagacactagggaatgcaagcttcagtcccctgagtcgaggagaaaaagagccttgggcctggaaacctctaaaatggagc

SEQ ID NO: 915906 - DNA, 120 bp, Artificial Sequence
  ENSG00000253973_24 (sequence is synthesized)
tagtgaaggacacaccgtgaagggcaaggcaggcatcccgccagaaatatacggccctggctcctgctggccagaagtgccgcatcattataaacagctctaacttcgtgctgccctggc

SEQ ID NO: 915907 - DNA, 120 bp, Artificial Sequence
  ENSG00000253973_25 (sequence is synthesized)
ctcctgggaggtgttgtgccagtctctggaataccagcgttaggagcagcctagtccaggagaggaggaagggcttcccaaggtcacacagggagagaggggccttccccacaggcctag

SEQ ID NO: 915908 - DNA, 120 bp, Artificial Sequence
  ENSG00000253973_26 (sequence is synthesized)
accactcccactgtagcatgcgaagcagcacagggcctgctgggggggcaaatgcacaggaaacagcctgcatctgtgctaaacaccattaaggggtaggggtagggacaggcaggctgg

SEQ ID NO: 915909 - DNA, 120 bp, Artificial Sequence
  ENSG00000253973_27 (sequence is synthesized)
tgcagaccctcactcagtgttggggttgccactcaccaaggcagctcctcccatctgtgtgcatcttgtactgtggatggcagctgcactctgggccatcggctgtatcgtcacaggagt

SEQ ID NO: 915910 - DNA, 120 bp, Artificial Sequence
  ENSG00000253973_28 (sequence is synthesized)
gctggcacccaccgttcccatggttacaggtcactgacagcaaaatgaatcaatacataaagcactgagatttccacaaacacagggctgtgtttgctccagagaaattctgattttcat

SEQ ID NO: 915911 - DNA, 120 bp, Artificial Sequence
  ENSG00000253973_29 (sequence is synthesized)
tctgcaagtatttgagcacctagtgcatgccaggcatggtgcacgaaagacataactccaagtcagaccctgtggtgtctgtgtatgcagatagttacaatacaaattgtagaaatgctg

SEQ ID NO: 915912 - DNA, 120 bp, Artificial Sequence
  ENSG00000253973_30 (sequence is synthesized)
aaacatgggtttaaacaaagtcatacaggaagagggagatgggagagttgggggagagacttttattatataagggagattataccaagagattctagactactgctttgttctatctag

SEQ ID NO: 915913 - DNA, 120 bp, Artificial Sequence
  ENSG00000253973_31 (sequence is synthesized)
agaagtttacctattaatacagctgtactggggctttgggaaatgctatagcactttatgctggaataaaacagacaatatttaatttgtacatatatgtcagaatttctctcatcagat

SEQ ID NO: 915914 - DNA, 120 bp, Artificial Sequence
  ENSG00000253973_32 (sequence is synthesized)
tcaatctagattagttagaaggaaggataatcacaggatgattctgcacacaattaacgtgacagtaactggtaattatcaagactatatatgaatgtattgatgataggccaaaaagaa

SEQ ID NO: 915915 - DNA, 120 bp, Artificial Sequence
  ENSG00000253973_33 (sequence is synthesized)
aaaaagccaactacaaaactatctattcatcaaactgctaaccgtggttacctctggcaagggaaacgggaggcgggaaactgcatgttttctttatatgctttggagtgtttgcatttt

SEQ ID NO: 915916 - DNA, 120 bp, Artificial Sequence
  ENSG00000253973_34 (sequence is synthesized)
aagccggcgaggaggcggcggcgctggtggggactgacccggcagtccgagaatccaccgcggccttttcacccaaccgccccctcctgcgtgggggccccgcatcccctggactggcgt

SEQ ID NO: 915917 - DNA, 120 bp, Artificial Sequence
  ENSG00000253973_35 (sequence is synthesized)
gggctctggggcccgatgccctggcagccccggccatctctgccgctggccgcgggtacctgctcacctgtccacgccgtggccgacccggggatcaccgacagccgggccatgcctcga

SEQ ID NO: 915918 - DNA, 120 bp, Artificial Sequence
  ENSG00000253973_36 (sequence is synthesized)
gggcccggaggactggcgactccctccgaggttgggagcgctccggatttctccaacttcaggcagtgtggatggggctcatgaaatagagaaatatagaggaacaagatatgtgtgtat

SEQ ID NO: 915919 - DNA, 120 bp, Artificial Sequence
  ENSG00000253973_37 (sequence is synthesized)
ctccaaagagtttatggttcatgcagagtcaggcatcaatgatcacaactccagtcttcatgcagagcacgtctcttcaacagtattgcctgctctatacactaggaaacattatgtgga

SEQ ID NO: 915920 - DNA, 120 bp, Artificial Sequence
  ENSG00000253973_38 (sequence is synthesized)
atctttgtattgctctctcaagggcacccagtctccctggggaggtgaaggctacctttacatgtcttcccatccaactggagagtgaatccaacaggacaactgcagtggacacctgtc

SEQ ID NO: 915921 - DNA, 120 bp, Artificial Sequence
  ENSG00000253973_39 (sequence is synthesized)
cctttgtaatttttctaattcaaaagaactaattacatatttgtgttgtcctgtgattatagctgtgtaaaaattgtgtatgcatatgaacaacaactaaataggaatatggaaaaattg

SEQ ID NO: 915922 - DNA, 120 bp, Artificial Sequence
  ENSG00000253973_40 (sequence is synthesized)
aaacagctggttatgtggtgagattctaggtcttagtttttttctttgttaattcctcaaacgttaaatatgttaatgttaaaaatgttataatgttaaaaatgttaataatgttaatgt

SEQ ID NO: 915923 - DNA, 120 bp, Artificial Sequence
  ENSG00000253974_0 (sequence is synthesized)
ttctttcttcactgacaatggcaccccactaatggagtgtgcaaatccaggaagaccagtgtttgaacgttgtggggtaaagtgccgatagatgaaatttcagtctttattcaagatcaa

SEQ ID NO: 915924 - DNA, 120 bp, Artificial Sequence
  ENSG00000253974_1 (sequence is synthesized)
tgggagcgagaaccgcctagccatcccttctccttgcacagtcatgaaacaaaagttgaaaaggagcctggttttacttgaccagtcataaattaccataaaataaaatgagatattagg

SEQ ID NO: 915925 - DNA, 120 bp, Artificial Sequence
  ENSG00000253974_2 (sequence is synthesized)
ggtaaccacatttcccagttgactactaccggtaataaaatcaaatggattcagtgctcacaactcttcagtctttgggctactttccattcttgaatttttagctgaattcatctcttt

SEQ ID NO: 915926 - DNA, 120 bp, Artificial Sequence
  ENSG00000253974_3 (sequence is synthesized)
ggctggattttgtgaatcgggcagccattagaaccaaaacagttctgaggagctcccaggctgcaatgtggtgcgaaatgttttatggacagaaaatggaaatgaggtgcagaaattgga

SEQ ID NO: 915927 - DNA, 120 bp, Artificial Sequence
  ENSG00000253974_4 (sequence is synthesized)
ggaaagtcacgtttcagtgttttggttttggtgaatgcccacaacaaggctagtgaaggaaggaggcatagtaggaagctgttggccagacgagcttttagaagacccttgctacataga

SEQ ID NO: 915928 - DNA, 120 bp, Artificial Sequence
  ENSG00000253974_5 (sequence is synthesized)
caggctgagacaatacaaaagatggacagctctaagttgattatcaagctttaaatatgtttcacttgattaagaacattgaaggtgagaatggaattatgtaggcttcactgagtatcc

SEQ ID NO: 915929 - DNA, 120 bp, Artificial Sequence
  ENSG00000253974_6 (sequence is synthesized)
gtaaagttgggaacaatgatatacaacacagaaaagaagctccataagaaaacagctgcaactaacccatctggaaagagacctcaatcaaaatgatacttagcgaaagaaaaatacttt

SEQ ID NO: 915930 - DNA, 120 bp, Artificial Sequence
  ENSG00000253974_7 (sequence is synthesized)
cagtgatcaaattatttgtctgaccaatgcttggtggaaagattccacattactagttatttgtaatgggtaattgcacaatatactgtattgttcaatctggtgtgaatgaaagtgggg

SEQ ID NO: 915931 - DNA, 120 bp, Artificial Sequence
  ENSG00000253974_8 (sequence is synthesized)
aagtgtggcatctcatgtattctaaagtatatggtgaccatctaaggaagttggtttgaatgtgcaggtctagcaaagaacatgccctggatataaaacctaggaatcaccatctgatcg

SEQ ID NO: 915932 - DNA, 120 bp, Artificial Sequence
  ENSG00000253974_9 (sequence is synthesized)
aagatggagatgaatgacttcaccctagggcaagaaggacttaagaagaataggaaggatggcaggaatggaggaaaacattttggatggaaagatgagacactgaaacaatttgaagat

SEQ ID NO: 915933 - DNA, 120 bp, Artificial Sequence
  ENSG00000253974_10 (sequence is synthesized)
tggaaggtgagagtctgaggtccaaagctttacaccagttgttgaagaaccttgatcacaggccagccaggacctcaaaggctcaagagaaatgatgacaaggtttgcttggcttattta

SEQ ID NO: 915934 - DNA, 120 bp, Artificial Sequence
  ENSG00000253974_11 (sequence is synthesized)
tagattttggccagacactgatgctaaagtcaccccgatgctgtctttgcttctaagatgaaatttcagtctttattcaagatcaagtgcaactgtctctttgaggaaagtcctttgacc

SEQ ID NO: 915935 - DNA, 120 bp, Artificial Sequence
  ENSG00000253976_0 (sequence is synthesized)
aatcaggatgaggaagtaggaaagagggcaggcagccagtactctgaagagaccagtgtgtactataccctttccttatccaggagaatggcaacttctcctacgaggagaggtctaaga

SEQ ID NO: 915936 - DNA, 120 bp, Artificial Sequence
  ENSG00000253976_1 (sequence is synthesized)
gcaagtttcaatgacatgaagttctgccgtttgaccagcagatcagcaggagaagacaaagcgctcaggagagcagcagtgaggccagtgggctccctgtgggggaaagaatggagagtc

SEQ ID NO: 915937 - DNA, 120 bp, Artificial Sequence
  ENSG00000253976_2 (sequence is synthesized)
tgcagatggaactcacctttgagataaataaagaagaaaagacactcagtcaagataccaacccaggaataactgagggagaattttcatctaaaagaaattcacctggtaaactcttaa

SEQ ID NO: 915938 - DNA, 120 bp, Artificial Sequence
  ENSG00000253976_3 (sequence is synthesized)
tggacatgttggactgtgctccttgtcatcaactgagggaaaagagttaacattacagatggacaaagagtgaagccaccgattcagatatgatttggggggacccttagatttcattct

SEQ ID NO: 915939 - DNA, 120 bp, Artificial Sequence
  ENSG00000253976_4 (sequence is synthesized)
ttctgtccctattcatacaacatccaacaaatatatattgcatatctactatgtataaagatctgctctaaatagaaggattacaacatagtggttaaagagtgtaggctttagataagt

SEQ ID NO: 915940 - DNA, 120 bp, Artificial Sequence
  ENSG00000253976_5 (sequence is synthesized)
agtgtaggctttagataagtgttttaaaaactgtgcatcacaattgatttgtataatccatttagtatgttatcataaaaaagaaataatatagaacagaatatattcaatttagaatat

SEQ ID NO: 915941 - DNA, 120 bp, Artificial Sequence
  ENSG00000253978_0 (sequence is synthesized)
gctgcgggtgctggggaatggcgccttacaggctgcccacctgcctcctcagggtggaaggcggggcttgggtgtgagcgtgctgaatcagaactttcctggaaagtcgccacttggtgt

SEQ ID NO: 915942 - DNA, 120 bp, Artificial Sequence
  ENSG00000253978_1 (sequence is synthesized)
ggtcagaggatcactgaagtaacaactgcacagagcctgtgcttaagatggcaggatcgcaagacagagcaactggagcaagtcctcattaagaagagccgcccgatgcatttggactgc

SEQ ID NO: 915943 - DNA, 120 bp, Artificial Sequence
  ENSG00000253978_2 (sequence is synthesized)
gaggaagaaaaacctgggagactgctgctaacctaatgtggagacttgacttaaacttcagccagacaaaggcggaatcttaatatggaggggcctggctctgcagggaggtcacctggg

SEQ ID NO: 915944 - DNA, 120 bp, Artificial Sequence
  ENSG00000253978_3 (sequence is synthesized)
ctggctggatttcaatccagttacacagcaaaaaagttacaacccaagctttggcgatgctgagccttctactctcagggattccaaagcatttgataaactctttctttgttccattgt

SEQ ID NO: 915945 - DNA, 120 bp, Artificial Sequence
  ENSG00000253979_0 (sequence is synthesized)
ttgttccaggaaagaatgcaccaaaccctgcatgattgtttattcacatccacttagcaggctggtgagcagcgtgcggaggaggcggcagaaccagaacctggacgcaggagaaggacg

SEQ ID NO: 915946 - DNA, 120 bp, Artificial Sequence
  ENSG00000253979_1 (sequence is synthesized)
gggggcacgagatgggcacaggacgcctcccaatcaaggctgctctgtgggtttcagaaacgggacacccatcccttcagacatggattcacatccaccaactcctgacagtctcgggca

SEQ ID NO: 915947 - DNA, 120 bp, Artificial Sequence
  ENSG00000253979_2 (sequence is synthesized)
gagcagctgcctgcctgcttctcagatccctgctatagaaagcaaggccgtgatgacagcgtaaaagcatgcgtcggccacacacaggcttcccaccactgcctctgccctccacaccac

SEQ ID NO: 915948 - DNA, 120 bp, Artificial Sequence
  ENSG00000237896_0 (sequence is synthesized)
ggcaaatgttccaaatctgccactatgaaataattggcagcaaggatgggaaaaagaaaaacctcattttaatgcgaatgacttaccaggaaataaaacacaggacctcagatgagtggg

SEQ ID NO: 915949 - DNA, 120 bp, Artificial Sequence
  ENSG00000237896_1 (sequence is synthesized)
cgttctccatagcaaaccctgcccacttaacagttttgccaagatatggtccagatacaggtccttacctctggtttggctttcacagtgaagccaaaccaggacagcttgttacacaga

SEQ ID NO: 915950 - DNA, 120 bp, Artificial Sequence
  ENSG00000237896_2 (sequence is synthesized)
gctaatttgacatggtagacaagaaattccaagtactggataaaatgatctggagcatgccaagtaaatgaaagttattggatcttgaatcttctaccactaagaaagaggcacagtgct

SEQ ID NO: 915951 - DNA, 120 bp, Artificial Sequence
  ENSG00000237896_3 (sequence is synthesized)
ttttggacctctttggattttagggaagtatattctataattgaaagtggctctctgacctattcattatatgactgtgaagactacctattttgaatgaaactctgaggaagaaagggc

SEQ ID NO: 915952 - DNA, 120 bp, Artificial Sequence
  ENSG00000237896_4 (sequence is synthesized)
tctggggcaggtccagcctgcagagtaaccttccctcccacttggaaatcctaacaaaatcaaagatatccttgatagctaaagataggtaagtaggaattctacaagaaatcaccagca

SEQ ID NO: 915953 - DNA, 120 bp, Artificial Sequence
  ENSG00000237896_5 (sequence is synthesized)
aaattccaagtactgttctttgcattattggtaactgtgtctgctgtgctttggaataaggtccaagatttgaaaatgactttggaactctctcaagaaatcccttatccaagaaatacg

SEQ ID NO: 915954 - DNA, 120 bp, Artificial Sequence
  ENSG00000237896_6 (sequence is synthesized)
gataaatagccatgtggagatgatcaacatcaggagtatggttgtacaaccagagctgatgaataaacttttaggtattcctagttttctttttcaataatataaatacattttaaacaa

SEQ ID NO: 915955 - DNA, 120 bp, Artificial Sequence
  ENSG00000275016_0 (sequence is synthesized)
gcctcccaaagtgctgggattacagtctggagccaccgcgcccggccctgagatgtctccaagtggtggtgagacatcatcaaatcctaagaaacaatatacttgaagatttttcactca

SEQ ID NO: 915956 - DNA, 120 bp, Artificial Sequence
  ENSG00000275016_1 (sequence is synthesized)
aagaaacaatatacttgaagatttttcactcactgcatcaaagacaagaatgaggcagatgaaaaccatacgcaaaaacacaacaaatagaaaagagattccaccaaaagcaatcatcaa

SEQ ID NO: 915957 - DNA, 120 bp, Artificial Sequence
  ENSG00000275016_2 (sequence is synthesized)
gaaaatgtctccagtgagattcccattgttgtgaaggggcgtgtaagtatatttgcactcagacagcttcagaagtgcttgcctgatgaaaaggactcaccaagagctgaagagtttggc

SEQ ID NO: 915958 - DNA, 120 bp, Artificial Sequence
  ENSG00000275016_3 (sequence is synthesized)
atcacagtccaagtggttccttgttggcaatggccattgtcatcataaggctggatttaacttcagaagtactgcatgccatctggctccaaagagcaaatctatttttataatatcaaa

SEQ ID NO: 915959 - DNA, 120 bp, Artificial Sequence
  ENSG00000275016_4 (sequence is synthesized)
tttgcaataagggaaaactacaaacatgctcagagttggatgagcttccatttttaacatgactgactttcaccagtcttcctgggggccccaaactgggtgggctcttttcctctgctc

SEQ ID NO: 915960 - DNA, 120 bp, Artificial Sequence
  ENSG00000275016_5 (sequence is synthesized)
tcctaaagtcactgaacaaacagggtaggagtctccataacagaccttttgttcatatacatttcactggctttcgctggagaagtcagagaatggctatcatctccacactaataatat

SEQ ID NO: 915961 - DNA, 120 bp, Artificial Sequence
  ENSG00000275016_6 (sequence is synthesized)
ccttcagtaaatgataaagtcaagtccaaagtaaactgagaagctttatcagcatgtcaaagctatccccttacagctctgtacttgccaactgtgcatccttttccgagacaaagactt

SEQ ID NO: 915962 - DNA, 120 bp, Artificial Sequence
  ENSG00000275016_7 (sequence is synthesized)
gatgcacattaaaaggcacttaccagagtgggtgtttgtttgccaaaggagagcaggctgccctctgattccaggcaccccggtcgtcactctcatcagaggaagggaggtatactttac

SEQ ID NO: 915963 - DNA, 120 bp, Artificial Sequence
  ENSG00000275016_8 (sequence is synthesized)
agctagactccttccttgatgatctcctgaatcgagtcagggggagattcagagcttcctgccaagttattccttctctttctccttgttaatattaactgatggacttctcagagggac

SEQ ID NO: 915964 - DNA, 120 bp, Artificial Sequence
  ENSG00000275016_9 (sequence is synthesized)
agtgtatttctcactgtgagtagagagaacgctgtggtcgaccagttactcttccaccctgttgtcagagaagatgcatcaaaagggatttacacacccagttaattctaacagatggcc

SEQ ID NO: 915965 - DNA, 120 bp, Artificial Sequence
  ENSG00000275016_10 (sequence is synthesized)
cttccccggtattctgagagaagttgaaaatcaatccacatttctctccaattccaaattaggcaaattagcacactggccttgatttttggtaagcagatttagcaaaatggacacagt

SEQ ID NO: 915966 - DNA, 120 bp, Artificial Sequence
  ENSG00000275016_11 (sequence is synthesized)
gaaaaagaggaaagatgtaaaaaatttagaaaggcctatctcacttaaaatgctgtgcctctgcccatacgtttgatatacaaatgatgcttatctataaagcagtgaaaacactcatca

SEQ ID NO: 915967 - DNA, 120 bp, Artificial Sequence
  ENSG00000275016_12 (sequence is synthesized)
tactgagctgtcaaagagaagaatgggctgagatgattgatgactgggaggcctgaaacccaaacctccactgcaaatgcttcttttacaaaaaagctggggctacccacagcgcctata

SEQ ID NO: 915968 - DNA, 120 bp, Artificial Sequence
  ENSG00000275016_13 (sequence is synthesized)
ttcaaggtcacttcgcataccattacacccaccactgtaggctcccgacaagccaggccattcacacaggggccgacttctcagcctcgctcaccccctgtctctccacccctcctctgc

SEQ ID NO: 915969 - DNA, 120 bp, Artificial Sequence
  ENSG00000275016_14 (sequence is synthesized)
caaagatatgtattttttcatcttgtttggttttgtcttgtttttcttcaggctacatttgctctgagaagccatgagctggagctttctggagcacaagtcagatgacaagattattaa

SEQ ID NO: 915970 - DNA, 120 bp, Artificial Sequence
  ENSG00000275016_15 (sequence is synthesized)
tgggagcagggcaatgtcatatctgatttcatgcatattcatgtagggagccacacagctgggaccatgcgctgtggagaggacaaataaagagtgctctaccccccacccccagcatga

SEQ ID NO: 915971 - DNA, 120 bp, Artificial Sequence
  ENSG00000275016_16 (sequence is synthesized)
agaatgtcattgtggagatgaggagcctgattggaaaagtttaagtaattgtagcctttattttgaaaaaaagggatagaatttgcagaaacaacaacaaaacaaggtttgctaccctgg

SEQ ID NO: 915972 - DNA, 120 bp, Artificial Sequence
  ENSG00000275016_17 (sequence is synthesized)
ccaaactaagtcaatactaagttatacagaaccttgtatctaagggtcacccacctagaagctctctggattgaagtatgcagagagacaacttttgcacttggtgtcaacaaaagaagt

SEQ ID NO: 915973 - DNA, 86 bp, Artificial Sequence
  ENSG00000275016_18 (sequence is synthesized)
cagagagacaacttttgcacttggtgtcaacaaaagaagtaaatgtttagaagcaaaagatggaaggaaggaacaaaggaaggaag

SEQ ID NO: 915974 - DNA, 120 bp, Artificial Sequence
  ENSG00000275016_19 (sequence is synthesized)
acaccaaatatccctataaagaagtcttatcgcaatgaatactgaactcatccttcaaaacagatttagtctccaaatcctactctttttccctggaagttggatgccttcacatgccaa

SEQ ID NO: 915975 - DNA, 120 bp, Artificial Sequence
  ENSG00000275016_20 (sequence is synthesized)
gatcgcaggaagcacagaattctccccacattattccacctgcccctccatctctcttctttcttcagtcttgtagatttcactaataaaatcgtttgaagaccggacagtaagaaaaaa

SEQ ID NO: 915976 - DNA, 120 bp, Artificial Sequence
  ENSG00000275016_21 (sequence is synthesized)
ctgatatttgagaaggactctggagtcggaccaaaggcctattgaaagatccaagccactgcaaattgacttggcagaggaagatcctcttgaataggaaagaaaaccagcacagtgtca

SEQ ID NO: 915977 - DNA, 120 bp, Artificial Sequence
  ENSG00000275016_22 (sequence is synthesized)
cttgcagcagcaaacaccatatgcttgactcagcatccattactggggaggtgacagagccagagaaacacaaatctgacaagtagggcaatcctttgtcaatcggagcacaacatttct

SEQ ID NO: 915978 - DNA, 120 bp, Artificial Sequence
  ENSG00000275016_23 (sequence is synthesized)
ctctctcaaatcagtttaaaggacatgttctttgccaagaagctccacagaaacctgaaaatgtatgcttttattatgatgggttttcatttcaattttgaaattctgggacaactgctt

SEQ ID NO: 915979 - DNA, 120 bp, Artificial Sequence
  ENSG00000275016_24 (sequence is synthesized)
aaaaaggaaaagaaaagatgtgatagaagggaaagcacattcagctaagacaggtttcttgtcaagatctaaaatatgtcaagacacacttctgtctttcttgaggatagaaagtaattg

SEQ ID NO: 915980 - DNA, 120 bp, Artificial Sequence
  ENSG00000275016_25 (sequence is synthesized)
tgcttagactttagagaataatgaaaaataaatttactgttggctaaaatgtttgtgaaaatgggcattgtatttcaggggatttcaaagctgtaatgaataaataagattagtttcatc

SEQ ID NO: 915981 - DNA, 120 bp, Artificial Sequence
  ENSG00000275016_26 (sequence is synthesized)
atgaaagcagtagtttttaagggaattttgaataaatcacatgagcaagaaaatagaagtatgatttgagaatttaaattatacatttttttgaatgagtgcagtagcagagtaacagtg

SEQ ID NO: 915982 - DNA, 120 bp, Artificial Sequence
  ENSG00000275016_27 (sequence is synthesized)
aaacagcttgagaaaactttttctcctccttttcatagcccctgaaccaaatgataaaataataaattaaagtatatagaattaaacttaataataagtggaagtggttttataaagata

SEQ ID NO: 915983 - DNA, 120 bp, Artificial Sequence
  ENSG00000275016_28 (sequence is synthesized)
agggaatttcagaaaatgcaagacatatttatcaagagaatatatgttgtatataacattgtatttgatacttttttgattgattacatttgttaagttataaaataccttttcattgaa

SEQ ID NO: 915984 - DNA, 120 bp, Artificial Sequence
  ENSG00000275016_29 (sequence is synthesized)
ataaatcaaagttgtatataggaaaatgtccatattcccctcctcacctttaaccctacccctctggtaatcagtactaacaacatggagtgtatcccttcacatttcatcttgataacc

SEQ ID NO: 915985 - DNA, 120 bp, Artificial Sequence
  ENSG00000275016_30 (sequence is synthesized)
aataaaaatgttttaattattcttagaccaaacttggaattcattgcaaacatgaatcatgtatgattgaactatgtaccttagtaaataaataataatcaaaataaacagatgaattaa

SEQ ID NO: 915986 - DNA, 120 bp, Artificial Sequence
  ENSG00000275016_31 (sequence is synthesized)
tcactgcatcaaaggtaagaaaaatacttctctccactccctaaagatatgttacttttttgcctcgtcaacctgttctcttacagtctggagatccgtcatgaacgatgctggcagaat

SEQ ID NO: 915987 - DNA, 120 bp, Artificial Sequence
  ENSG00000275016_32 (sequence is synthesized)
gagttttatcacatcctgatgtggtagttcagctcttccacttaggctggtagggttctgagaacattatatttttctcaacaactggggccctggcccaaaaggagacaaaaaaatccc

SEQ ID NO: 915988 - DNA, 120 bp, Artificial Sequence
  ENSG00000275016_33 (sequence is synthesized)
tcgttagcatcccattataattattattaacagtaattacatgtaagagcaaatgccactcttgttatttacttgaaaattaattatgtaaaaaaattgttagcaaataatttccccata

SEQ ID NO: 915989 - DNA, 120 bp, Artificial Sequence
  ENSG00000275016_34 (sequence is synthesized)
aagagtagataaaaatctactttcacgatctgactggcagttttggaatttgaaatctctgtctttgtctctctgtctttttcacacacatgtgcacacacaaacacacaactagttcat

SEQ ID NO: 915990 - DNA, 120 bp, Artificial Sequence
  ENSG00000275016_35 (sequence is synthesized)
ttgttttataaacattataatttgcttctaaattatgagctactggatgttactggaagacacatttctacaaacaaaatattctgggagcagatagattattatattatcaataaatta

SEQ ID NO: 915991 - DNA, 120 bp, Artificial Sequence
  ENSG00000275016_36 (sequence is synthesized)
aaagacaaaacataataaatggagtattttttgctatacttttcttttgtaaccttgggttttgaatcactatctacatctcactctagttcatacaaactatgatggaataaatacagc

SEQ ID NO: 915992 - DNA, 120 bp, Artificial Sequence
  ENSG00000275016_37 (sequence is synthesized)
tggaacaatctattgaagctcattgcacaattatattttcacactgctgattaacttatatgtttacatcactgttttagtcttcctttctttaatcaatagtattttatctcattaata

SEQ ID NO: 915993 - DNA, 120 bp, Artificial Sequence
  ENSG00000275016_38 (sequence is synthesized)
atttatagacataaaggaaataagtctaagaataaaaataatttgcttgcacactataaccactgaagtaagacatggaggtgtgattgacagcccataagaagcattatcagatatcca

SEQ ID NO: 915994 - DNA, 120 bp, Artificial Sequence
  ENSG00000275016_39 (sequence is synthesized)
caaactccagaaatatttgaatttcatgttgctcttgtaggttctcaaaacattccatttttaaagaggcaatattttgatattgtagttattgatttaaagtagacattaaaagataaa

SEQ ID NO: 915995 - DNA, 120 bp, Artificial Sequence
  ENSG00000275016_40 (sequence is synthesized)
tacttgaagatttttcactcactgcatcaaagtaatcgtggaagcaagtgatgatactgtggtgtcctaaagcaaagcatcctggatcactgtgccagcaggtggagaacaccgccctga

SEQ ID NO: 915996 - DNA, 120 bp, Artificial Sequence
  ENSG00000275016_41 (sequence is synthesized)
attgttactgcagcaaagctagcctctgctcaccggtagataaagaagatgcccttggttgcttagcatctgcactgaggtttttttaagtccctcattttcttgcccttcttcttaccc

SEQ ID NO: 915997 - DNA, 120 bp, Artificial Sequence
  ENSG00000275016_42 (sequence is synthesized)
ccacatttccttatcttctattgttgatagaaagagtggttgggtcttattaactcaagtaaggtcaaaatgatgatacttgagtgtgggaatgataccaagagttaaggaggaaaactt

SEQ ID NO: 915998 - DNA, 120 bp, Artificial Sequence
  ENSG00000275016_43 (sequence is synthesized)
ttctacagatccaagatatgagaaatggcaccaatgtttcaaggatgtttcaagacataattttaagccatgaacaaaatagtagatgagaatctagttgatcaaaattaacttgatgag

SEQ ID NO: 915999 - DNA, 120 bp, Artificial Sequence
  ENSG00000275016_44 (sequence is synthesized)
aaaatatacacaggtatataggtgtgggggtgtaaatatatatgtgtgtgtgtgtgtatctatctatatatatatatgttaagaggaacattaaaaaacacctgataaactgcaatgaaa

SEQ ID NO: 916000 - DNA, 120 bp, Artificial Sequence
  ENSG00000275016_45 (sequence is synthesized)
aagaaacaatatacttgaagatttttcactcactgcatcaaagattccggtatattttggttctgtgattgcattgaaggaggctattcttgccctgtgctgtatccagtgtgactcagt

SEQ ID NO: 916001 - DNA, 120 bp, Artificial Sequence
  ENSG00000275016_46 (sequence is synthesized)
ggagactagagaccaaagaacctaaggctcaggtgacagcaatccagtagtgtcactgcctcctgtcaatggcagcatttgcagcagtttccgagggtgtggctgagcacggatgctcct

SEQ ID NO: 916002 - DNA, 120 bp, Artificial Sequence
  ENSG00000275016_47 (sequence is synthesized)
aatattcaccacacagctcatttcaatgacagcgggactatcggttctgatgaagaaattaatatctcctggagaaaaaaaggtttaaaagacagaagttgcagatgaacctaaaactga

SEQ ID NO: 916003 - DNA, 120 bp, Artificial Sequence
  ENSG00000275016_48 (sequence is synthesized)
ggcactgcatatcttaacttccattggccatccttcacttggtgtaaattttcaataccttcttctggctcctgtgtcactgagagacttggaaatttgttttatcttttattaggttga

SEQ ID NO: 916004 - DNA, 120 bp, Artificial Sequence
  ENSG00000275016_49 (sequence is synthesized)
tgcaaaagtaattgcagctttgccattactttcaataccaaaatgtactcttaaaaaattgaccatcctacatacactcaatgtcatgctgattttatgactcaaaattattggcttcca

SEQ ID NO: 916005 - DNA, 120 bp, Artificial Sequence
  ENSG00000275016_50 (sequence is synthesized)
acttttgagttacagtgtgaatgctgagaccagtcctcaagaatgtgcttttccgccagggttcatgtctggctccttgatccatttttgcaccatcaaatgaagggtagaaacatattg

SEQ ID NO: 916006 - DNA, 120 bp, Artificial Sequence
  ENSG00000275016_51 (sequence is synthesized)
cggtcaaggaactacactttgtgtttaaacctgaattaaaaatccagatcaccatttgctgcccatttttatgttctataaaagtgcataataaaagtagcccttaagataaagaaaaaa

SEQ ID NO: 916007 - DNA, 120 bp, Artificial Sequence
  ENSG00000275016_52 (sequence is synthesized)
tgatatattttatatgactaatcctatgattccattttctgatctgtaaaattggacaatattaccaacttccaaagtccattacgagaataaaataaaacaaaatcagcatctaacaaa

SEQ ID NO: 916008 - DNA, 120 bp, Artificial Sequence
  ENSG00000275016_53 (sequence is synthesized)
caaagctacagctctgaaaagctttgcaaagatctaacatcatcaaagggaagagagtacaatctaaagctgaaattatgagctccctcaagctggtggatcacacacactgctcaatag

SEQ ID NO: 916009 - DNA, 120 bp, Artificial Sequence
  ENSG00000275016_54 (sequence is synthesized)
atactgttgtggcttcttccatttaaaataattctgtggcgcctttgtaattgttctgtggtgctctggaagacctttgtgcacaatgtgggaatctcactcttaacacatccacagtta

SEQ ID NO: 916010 - DNA, 120 bp, Artificial Sequence
  ENSG00000275016_55 (sequence is synthesized)
ataagtctttggcaaagacttattaactttgccaaactagcagatgtaaaatgttctaacaagatttagtttgcatttcccaaattattaaatagattgaacatcttttcaagtgtttat

SEQ ID NO: 916011 - DNA, 120 bp, Artificial Sequence
  ENSG00000275016_56 (sequence is synthesized)
tatccctgtacattatatatgatcagatatatactatcagtgtatttcttacctttaacttagtttatttgttttgtttttttactaatactatttaagcgaaattcagattcaagtaga

SEQ ID NO: 916012 - DNA, 120 bp, Artificial Sequence
  ENSG00000275016_57 (sequence is synthesized)
attcagaacttgaaaactcaatagatttctttatttcatactactgattttatgaagagtaaattgagagtgaagatatatgtatctaagtttagcctgttggttagtgacacaaagaaa

SEQ ID NO: 916013 - DNA, 120 bp, Artificial Sequence
  ENSG00000275016_58 (sequence is synthesized)
attagaaattgggtcttttaatttctgtgctagtgattgggaatcataccaacatattctccactgagctctggttaaagttgtattcttaggggaacaaaaaaaagataagactcacac

SEQ ID NO: 916014 - DNA, 120 bp, Artificial Sequence
  ENSG00000275016_59 (sequence is synthesized)
tagatggagtcttgctctgtcacccaagctagagtgcacttggtcttgaattatacatatactgattttatttttttaacaaaggttgcacttaggtgaaaagtaccttttgagagtcct

SEQ ID NO: 916015 - DNA, 120 bp, Artificial Sequence
  ENSG00000275016_60 (sequence is synthesized)
gttgcacttaggtgaaaagtaccttttgagagtcctcctttcttcctctgtcttttctctctgctaggtttcatttgatagccttgaatgtgaataaagaataaatacggctttcccgta

SEQ ID NO: 916016 - DNA, 120 bp, Artificial Sequence
  ENSG00000275016_61 (sequence is synthesized)
caaagtgctgggattacagtctggagccaccgcgcccggccctgagggattctacacaaccagcaaaaggaaataagaggaattaagatataggaggatgtttccagagtcgggtgagag

SEQ ID NO: 916017 - DNA, 120 bp, Artificial Sequence
  ENSG00000271926_0 (sequence is synthesized)
gagtcagaatttgagcagcagaaatgcttaggtaagagagaagacaaattaacttgtcaaatccttcatctcagcttgaatgctatagattcctgcatgacaaagtattgtttctcagta

SEQ ID NO: 916018 - DNA, 120 bp, Artificial Sequence
  ENSG00000271926_1 (sequence is synthesized)
gtatcaagcatacattttccttttgttagtgttccaatgtgtggctattacctacagacaatttagtatagtattcacaatagttactggccttcattcgcattcttctgctccccttaa

SEQ ID NO: 916019 - DNA, 120 bp, Artificial Sequence
  ENSG00000271926_2 (sequence is synthesized)
atttcaggtatttgcaaggttcattagggccgaaacaccatatcctgtaattgcctgatgtttaagttgtggaactttatagtaaacagtgattaaggtgactaaatttcagacaagact

SEQ ID NO: 916020 - DNA, 120 bp, Artificial Sequence
  ENSG00000271926_3 (sequence is synthesized)
gtgtagtataggaagagcgtggatggtatcagcctccttctgcactctcaagtgaggtttccagggatgaacatacattctggcagagcatagataagctcctgagtgggtagtgctggg

SEQ ID NO: 916021 - DNA, 120 bp, Artificial Sequence
  ENSG00000271926_4 (sequence is synthesized)
tggggttacaggcatgagccaccgagcttatatgcgttaaagtgtttgtgccacactctcttagactttgcttatcaaaatgtatttcattttgaaattattaaaaaccaacatagataa

SEQ ID NO: 916022 - DNA, 120 bp, Artificial Sequence
  ENSG00000230442_0 (sequence is synthesized)
gtggacattgcctccatgtttcagcagcagagctacgatatcttttcggccttgcttggctgcttcatgcattgctgaccatcgcttgacacagggctggtctaggctagtgttatgttt

SEQ ID NO: 916023 - DNA, 120 bp, Artificial Sequence
  ENSG00000230442_1 (sequence is synthesized)
gatcagagtcgacaccatgtcataggagccctttttcacagcttgaaaatgattgttaaaaacaacattaagggattctgaatagcaaatctcaaagaagaccatagattcaagaacaaa

SEQ ID NO: 916024 - DNA, 120 bp, Artificial Sequence
  ENSG00000230442_2 (sequence is synthesized)
cttggcatgggttccacaacaaaggtgctgattaagctacagaagccccaagtatttagctggccacagaccatccaggtagacaataaatgtcctggcctccgttgccccaaggtgtgg

SEQ ID NO: 916025 - DNA, 120 bp, Artificial Sequence
  ENSG00000230442_3 (sequence is synthesized)
tggcattgtgacaaaatctgaactaatgggacatgagtggaagggccgtgtgcactgtcccggtcatctttttaaattgaagatgcttgcctagggcttcctctttagtccttcctgctg

SEQ ID NO: 916026 - DNA, 120 bp, Artificial Sequence
  ENSG00000230442_4 (sequence is synthesized)
cctggaaaatggcgacgttgggagcaactttggaagcacactgtaatgttgatacagccaccctcacaaccctgggccattctgcaatgtgtgagagagaaatgacttctttctctttaa

SEQ ID NO: 916027 - DNA, 120 bp, Artificial Sequence
  ENSG00000230442_5 (sequence is synthesized)
gggaaaacctgatgccaagttccattcagcagaggaagaggagctcccctagttacattcaggaagaagagacagatttggatctcactcgtagagtttatggcctagagaagaagccta

SEQ ID NO: 916028 - DNA, 120 bp, Artificial Sequence
  ENSG00000230442_6 (sequence is synthesized)
tgctgccttctatttaaagagagactcaaagtctgggcctgtactgggaaacgtagaagaagatatgaggccacatggaacattctggggtaaccaggaggcagaacgcagaaaggatct

SEQ ID NO: 916029 - DNA, 120 bp, Artificial Sequence
  ENSG00000230442_7 (sequence is synthesized)
atgaataatccattttcctataaaacctaagaagacttggcatgggttccacaacaaaggtgctgattaagctcaaaagcaacaatttttaaacactggatctcttcaaaagtactacta

SEQ ID NO: 916030 - DNA, 120 bp, Artificial Sequence
  ENSG00000230442_8 (sequence is synthesized)
aattccagaatacaagattttaaacactataacaaaaagtaaagtaatgactgcagttgggcttataagaattcactttttcctgagcttctgattgatgccaattttggtccatcagtt

SEQ ID NO: 916031 - DNA, 120 bp, Artificial Sequence
  ENSG00000230442_9 (sequence is synthesized)
acctaagaagacttggcatgggttccacaacaaaggtgctgattaagcagaaacatctgctagcataccagggttgtgaatgccttccaggaagctctgaagttctaaagcttgttggag

SEQ ID NO: 916032 - DNA, 120 bp, Artificial Sequence
  ENSG00000230442_10 (sequence is synthesized)
tttttctccctctccttgtctaaagtagaacctgttgacaaatgcctctctctgaattgcccaactgtcactggcagctctaattacagtgaattacctcatgctagctggtgttattgc

SEQ ID NO: 916033 - DNA, 120 bp, Artificial Sequence
  ENSG00000230442_11 (sequence is synthesized)
gccctttttcacagcttgaaaatgattgttaaaaacaacaactgaaaatcaaacaactgaaaacatgagccaaatctattagcactgaactcctccaacagcactgatgtcacaggcccc

SEQ ID NO: 916034 - DNA, 120 bp, Artificial Sequence
  ENSG00000230442_12 (sequence is synthesized)
gccaagcaaagagatggggtttgaccttgttgtccaggctggtttcaaactcctgagttcgagcaatctacccacccttcaaagtgttgggatcacaggtgactcttagaatcatctagt

SEQ ID NO: 916035 - DNA, 120 bp, Artificial Sequence
  ENSG00000230442_13 (sequence is synthesized)
caaaatggaattgtgactgtaagtgcactaagaaaagatccctttgggaagaatgaacttattttgacaaatatgttcaatatttttacatatttaaaatattgactctcacccaggaaa

SEQ ID NO: 916036 - DNA, 120 bp, Artificial Sequence
  ENSG00000230440_0 (sequence is synthesized)
ccagctgctccaagccaggctgaaggaggagaaggaggagtcgcctgtggtagggtcgagcagatgacgtggctctgcagcttgcctcatgcagttggtggtggagatggagaccgcagc

SEQ ID NO: 916037 - DNA, 120 bp, Artificial Sequence
  ENSG00000230440_1 (sequence is synthesized)
ggccaggtgagtattgtcatgtgcatgagcaaacctggatcatcaccacatctttgcaagaggaaaaagaatgggagggaatcatgtgtataatgttgttaaggcaaagattcacaacca

SEQ ID NO: 916038 - DNA, 120 bp, Artificial Sequence
  ENSG00000278869_0 (sequence is synthesized)
gcccgcccctgaagctctggaaaaacaacagaaggctgcatggagaggccaggagaacacgcacagactcagtgaccagaggggccaccaataggtgaccccatccccgggggtctgctg

SEQ ID NO: 916039 - DNA, 120 bp, Artificial Sequence
  ENSG00000278869_1 (sequence is synthesized)
tgccccggcctcggtgctggctgggaagaaacaggatgtctccaaaccgtgcctcctccgtgggagaggccggccccctgccccggctccccaggacctgcccgagaccctcctgggatt

SEQ ID NO: 916040 - DNA, 120 bp, Artificial Sequence
  ENSG00000278869_2 (sequence is synthesized)
acccaggacctgcccgagaccctcctgggattaagttgcagtgtatcctggtggggatgtgctggcccagtgacaaaggggccacagcctgaaggagcccgggacccgaagccgtgccca

SEQ ID NO: 916041 - DNA, 120 bp, Artificial Sequence
  ENSG00000278869_3 (sequence is synthesized)
acgggttgtgggcccttttctgaggactaggaccccaggaggcggtgtcctctgctgctctgtttcacggcccagaggctcctggagtgtgggacacacgtgaggaggggtgaatgtcag

SEQ ID NO: 916042 - DNA, 120 bp, Artificial Sequence
  ENSG00000278869_4 (sequence is synthesized)
aacagccaccgcagacaggggctgaaagtcatgtggcaccacagatcccagctgtcctctggaactgagagcaggggacggtcacagcactggactggctgacagggacgggggtgatgg

SEQ ID NO: 916043 - DNA, 120 bp, Artificial Sequence
  ENSG00000278869_5 (sequence is synthesized)
ccaggcagcagcatttgaccatcagtggctgtgaaggcagctctctaatgagttgcagggctggagcgggcccagggtcagagctgcgtggggttgtggaggtggctgatagaacagcat

SEQ ID NO: 916044 - DNA, 120 bp, Artificial Sequence
  ENSG00000278869_6 (sequence is synthesized)
gttcctgggagagggacaggcagcccacaagagactgctcagcttgttggagcaaaatatattagggttgtgtgatgcggaggtcaagggtactcgctccaataaaaagtcagggccggt

SEQ ID NO: 916045 - DNA, 120 bp, Artificial Sequence
  ENSG00000243944_0 (sequence is synthesized)
aaggagtgaagccttctaagtacagtacctggcacaacgaattgtcaagcaaatggcaaatcttctctgcagaggggaactgagacccagtactcacaatccattctggagtctcctcat

SEQ ID NO: 916046 - DNA, 120 bp, Artificial Sequence
  ENSG00000243944_1 (sequence is synthesized)
aatcctgaagagggaagcccagaggaaatcatctggtctaaccataaaatcatcaatactgagaaattaaaaggggaacatgtcaggcctcactctttctgtattggatttcaagagtat

SEQ ID NO: 916047 - DNA, 120 bp, Artificial Sequence
  ENSG00000243944_2 (sequence is synthesized)
cccttagacccctcgtgaagcccaagatcatctaagatggaccaagaagtttatccttcaccagtcagactgacatatcaaaattagatgtacgcatatagcagcaacccagaggcattg

SEQ ID NO: 916048 - DNA, 120 bp, Artificial Sequence
  ENSG00000243944_3 (sequence is synthesized)
acaacagggtggggagaaaaatcaaaggcgagaccttgatccccaacattggttgtgggagcaaaaagaagcaaaacacatgctccccagtggcttccaaaaattcctgttccacgatgt

SEQ ID NO: 916049 - DNA, 120 bp, Artificial Sequence
  ENSG00000243944_4 (sequence is synthesized)
tgttcgtcttctctggaagagacagcatttaaggcaccatcttcgaagtaaagactgggccctcaccagacactgaacctgctggcatttggattttgaacttcccagcctccataactg

SEQ ID NO: 916050 - DNA, 120 bp, Artificial Sequence
  ENSG00000243944_5 (sequence is synthesized)
tctaaccataaaatcatcaatactgagaaattaaaaggggaacatgtcaggcctcactctttctgtattggatttcaagagtattgtccttggtgaggaagacaaagtgagtgggctcag

SEQ ID NO: 916051 - DNA, 120 bp, Artificial Sequence
  ENSG00000243944_6 (sequence is synthesized)
tcgctatcctgaataaaaaaaccaagactccaggagggctgcagcttcgtccaaggtgtcgtgacttgcccacagccaccctcttggcaaatgacccagtaaactccacctccagctcct

SEQ ID NO: 916052 - DNA, 120 bp, Artificial Sequence
  ENSG00000243944_7 (sequence is synthesized)
ctacctccagagcctgtgtctgtatgtcttccttttggagctttctttcttggtattctttatgtttcaatttttaaaatgatagtcaaatatacacaacttgaattttggccattttaa

SEQ ID NO: 916053 - DNA, 120 bp, Artificial Sequence
  ENSG00000230448_0 (sequence is synthesized)
ggggagcccagacttgccaatgggtaagtgagtctagtcaagatgtaggatttcagaaaactcactcagaagagcaggatgaagataaaggaggcatcattcagcagcaataaccaactc

SEQ ID NO: 916054 - DNA, 120 bp, Artificial Sequence
  ENSG00000230448_1 (sequence is synthesized)
atttccttctctagaaagcaatgaaacaagaatctggtcatgggattttaccagtgcaaaggattaatccacccaattgatggccaagaaaccaaccagtgagagcaggaagcaagaaca

SEQ ID NO: 916055 - DNA, 120 bp, Artificial Sequence
  ENSG00000230448_2 (sequence is synthesized)
cctcgagacaggaggcatggctgggaggcctcaggaaacgtataatcatggcagaaggcaaaggggaagctgtatcttgtaataagttaaatatttgctgaaggaagagagctgtaatag

SEQ ID NO: 916056 - DNA, 120 bp, Artificial Sequence
  ENSG00000230448_3 (sequence is synthesized)
aaaatggaagtgccagtggtgagactttatttttttttctgaggaatggttgaaatacatgaagatacatagagaagaaaacaattcttaataagtgctaagtgtcatcaaatactatgt

SEQ ID NO: 916057 - DNA, 120 bp, Artificial Sequence
  ENSG00000230448_4 (sequence is synthesized)
ttaaatgaactcctactgaagagagattagatttttttcatctattttgttaagaaaacaattgaagatcaacaagtagaagtaaggagtagactcttcagatacatggatttctaatag

SEQ ID NO: 916058 - DNA, 120 bp, Artificial Sequence
  ENSG00000230448_5 (sequence is synthesized)
tagagttgctccagctggactcactcaaataaaatgagttccaaattcccagggatgtgcaaacattgaataaacaatgaactgccaagattaggtagtacaaagctcatagatgattcc

SEQ ID NO: 916059 - DNA, 120 bp, Artificial Sequence
  ENSG00000230448_6 (sequence is synthesized)
tgttcccatattgcataggtctcctttggattcagaaagacaatgaactgccaagattaggtagtacaaagctcatagatgattcctgttcccatattacataggtctcctttggattca

SEQ ID NO: 916060 - DNA, 120 bp, Artificial Sequence
  ENSG00000230448_7 (sequence is synthesized)
gaaagacactgggcttcccccaaaccaaaggagaatagtgcccctcccactcacatccagaggcgtacatctactgcataggagttgctttcattttcctctttataaattgttttgtct

SEQ ID NO: 916061 - DNA, 120 bp, Artificial Sequence
  ENSG00000230448_8 (sequence is synthesized)
tattctaaattcactaaagaatgatgattttcagaaatgtaacaatatcaggtggaagtatagttatgtagtagtatagcacaagttaagctaattaaaagatatcactgatatatatca

SEQ ID NO: 916062 - DNA, 120 bp, Artificial Sequence
  ENSG00000230448_9 (sequence is synthesized)
aaatagaaacacatgcaaaaatgacaatacttatttttgttggggatgcagagaaaatagtactctaaaaactcctagagtgaatatgcattgttatatctttaatttttaagccatgat

SEQ ID NO: 916063 - DNA, 120 bp, Artificial Sequence
  ENSG00000230448_10 (sequence is synthesized)
aaagagggtattaaaatttaatgtacatacactttttcatcaagcaatactttatatctagaaatgtatgttatagaaaccaaagggttactagtagagacctatgaataaataattttc

SEQ ID NO: 916064 - DNA, 120 bp, Artificial Sequence
  ENSG00000230448_11 (sequence is synthesized)
ttgcattagatattagaaaaatacccaaacatgataaagtagttattcaaattatggtacatctataccatggatgttcatgaatgcaaccattagatacaaccccgtcataaaaccatc

SEQ ID NO: 916065 - DNA, 90 bp, Artificial Sequence
  ENSG00000230448_12 (sequence is synthesized)
catcagatctcatgagacttattcattatcaagagaacagcatgagaaaaacccatccccgtgattcagttacctcctaccaagtcccta

SEQ ID NO: 916066 - DNA, 120 bp, Artificial Sequence
  ENSG00000230448_13 (sequence is synthesized)
aaaatgagattggactagggacacagccaaaccataacagacatcaaactatttatcttcacaaatgatataatttcacacctagaaaacctcatagtctctgcaaaaaggctcctaggc

SEQ ID NO: 916067 - DNA, 120 bp, Artificial Sequence
  ENSG00000230448_14 (sequence is synthesized)
tcagtagcatttctatacaccaataacatccaagctgacagcaaaatcaaaaatgaaatcccattcactatagccacatacaaaaaatacctaggaatatggctcaccagggagatgaaa

SEQ ID NO: 916068 - DNA, 120 bp, Artificial Sequence
  ENSG00000230448_15 (sequence is synthesized)
atatggctcaccagggagatgaaacatctctagaataagaattataaaactctgctgaaagaaatcagagatggcataaagaaatggaaaaacattccatgctcttcgatagaaagaatc

SEQ ID NO: 916069 - DNA, 120 bp, Artificial Sequence
  ENSG00000230448_16 (sequence is synthesized)
agtattttttaaatggccatactgcccaaagcaatttcacagattcaatgctatttctatcaaactaccaattacatttttcacagaattagaataaactatttcaaatgtcatatagaa

SEQ ID NO: 916070 - DNA, 120 bp, Artificial Sequence
  ENSG00000230448_17 (sequence is synthesized)
ccaaaaaaaagcttgaatagctaaagcaatcctaaggaaaaaaaaatgaaacaaagatgaaggcctcatgatacctaactttaaaatacattacagggctacagtaaccaaaacagcata

SEQ ID NO: 916071 - DNA, 76 bp, Artificial Sequence
  ENSG00000230448_18 (sequence is synthesized)
gtactggtacaaaaacagacacatagactaatacaacaggttagagatcccagaaagaaagccataaacaggtaaa

SEQ ID NO: 916072 - DNA, 120 bp, Artificial Sequence
  ENSG00000230448_19 (sequence is synthesized)
agactccatattcaacaaatgatgctgggataactggctaatcatatgcagaagattgaaattagattctttcctttcaccatttataaaaatcaactcaagatagattaaagacctaaa

SEQ ID NO: 916073 - DNA, 120 bp, Artificial Sequence
  ENSG00000230448_20 (sequence is synthesized)
tggaaaacctcaaactgtaaaaactctaaaaggaaacctaggaaatatcaccttggacagaggccctgacaaagattttatgacaaagctttcaaaagcctttgcaacaaaaacaaaaat

SEQ ID NO: 916074 - DNA, 89 bp, Artificial Sequence
  ENSG00000230448_21 (sequence is synthesized)
acaacaaaaattgagtaaacagatttttgcatcccacaaaggtctaatatgaagaatatataaagaacttcaacaaattaacaaacaag

SEQ ID NO: 916075 - DNA, 120 bp, Artificial Sequence
  ENSG00000230448_22 (sequence is synthesized)
tgaagaatatataaagaacttcaacaaattaacaaacaaggagtgaacaaccctatccaaaaatgtgcaaagaagacgaacagacacttctcaaaggaagacatatgtggccaaaaaaca

SEQ ID NO: 916076 - DNA, 74 bp, Artificial Sequence
  ENSG00000230448_23 (sequence is synthesized)
cagacacttctcaaaggaagacatatgtggccaaaaaacatatgagaaaaaaatgcttatcatcacaaatattt

SEQ ID NO: 916077 - DNA, 120 bp, Artificial Sequence
  ENSG00000230448_24 (sequence is synthesized)
gtgaggtcctgaagaaaagggaaaactgatacactgctagtaggaatgtacattaatttagccacagtgtaaagaagtttggagatctttcaaagaacttcctcaaagaacacacatata

SEQ ID NO: 916078 - DNA, 120 bp, Artificial Sequence
  ENSG00000230448_25 (sequence is synthesized)
ttcattgcgacactattcacagtagcaaagacagcaaagacatgggatcaaccttgatgctgatcaatggtggactggataaggaaaatgtggtacttatacaccatgcaatactatgca

SEQ ID NO: 916079 - DNA, 120 bp, Artificial Sequence
  ENSG00000230448_26 (sequence is synthesized)
ttatacaccatgcaatactatgcagccataaaaaaagaacaaaagcatgtcctttgcagggacatggatagagccagaggccattatcctaagtcaattaacacaggaacagaaaaccaa

SEQ ID NO: 916080 - DNA, 120 bp, Artificial Sequence
  ENSG00000230448_27 (sequence is synthesized)
caggagttaaacattgagaacacttggacaaaaagaaaggaacagtagacgtcgggcctactggagggtggagggtaggaggagagtgagaactgaaaaactacctatctgatactatgt

SEQ ID NO: 916081 - DNA, 90 bp, Artificial Sequence
  ENSG00000230448_28 (sequence is synthesized)
tcaaaactcccatgacaggcagtttacccatgtagcaaacctgcatatgtactccttgaacctaaaataaaaattgaaaaaaaaaagcca

SEQ ID NO: 916082 - DNA, 120 bp, Artificial Sequence
  ENSG00000230448_29 (sequence is synthesized)
ccagcgtgagcaactcagaagatgggtgatttctgcatttgcaactgaggtcatgaggatggagttctcatgaatgagatgactgcccttgtagaacagactcaagagagactcttgctc

SEQ ID NO: 916083 - DNA, 120 bp, Artificial Sequence
  ENSG00000230448_30 (sequence is synthesized)
gcccttgtagaacagactcaagagagactcttgctccttacatcatgtgaagacacagaaagaaggtatcatctatgaatcaggaaaccgttccttgatcttggacttcccagtctccag

SEQ ID NO: 916084 - DNA, 120 bp, Artificial Sequence
  ENSG00000237798_0 (sequence is synthesized)
ctcagcttcggcattccagcctggaacaatcctcccagacctggaggtccgccccctccaaaacttccaccgcctccgccaccacctcctccgccaaatccgccgcctccaccaaagcca

SEQ ID NO: 916085 - DNA, 120 bp, Artificial Sequence
  ENSG00000237798_1 (sequence is synthesized)
agctaaaaaagacactgctggacttgtcacagccgccgggaaacaagaattaagacagttcggaagagtcccattcaaagtgggcggtctagaaaatgaaaattttaaattccacagcag

SEQ ID NO: 916086 - DNA, 120 bp, Artificial Sequence
  ENSG00000237798_2 (sequence is synthesized)
caacagcagctctcatgtatggagaatctgctggatccagggctctatccttgcgtggtctctgactcctaagacagcggaagccagcatcgctgtgctcatttgatagactcagagaaa

SEQ ID NO: 916087 - DNA, 120 bp, Artificial Sequence
  ENSG00000237797_0 (sequence is synthesized)
accccgcatgaccctgttccccgggaggggcagcctggggagtgacaggcatgacctcgatggtgggccaggggcctcctcagaggagcaaagagaagcttggtggaagagaaagccgct

SEQ ID NO: 916088 - DNA, 120 bp, Artificial Sequence
  ENSG00000237797_1 (sequence is synthesized)
aagtaccaaaataagtgttccaatggttttatttggggaaagccaacgctttccccaaaaagactttttcttgtttctcatttggctgctacaaataaagctgcaatgaacatacatgta

SEQ ID NO: 916089 - DNA, 120 bp, Artificial Sequence
  ENSG00000237790_0 (sequence is synthesized)
attagggattcaatcaaaaagtagaaagccagggcacaatgttactttgcaatttctctacattcaaagactaaagaggattgaaaggaacccaaaatcttctttactgctgggatagac

SEQ ID NO: 916090 - DNA, 120 bp, Artificial Sequence
  ENSG00000237790_1 (sequence is synthesized)
attgatgtcttctgtatgggtttagcattattcacaatcgccaagatacagaatcaacctgagtgcatcagtgaatgaatggataaagaaaatgtgatatacatacacaatggaatacta

SEQ ID NO: 916091 - DNA, 120 bp, Artificial Sequence
  ENSG00000237790_2 (sequence is synthesized)
tcaaaaggtttatctcatagaagtagagaatagaatggtggttaccaggaactatgggttagggagcttgaagagatatttgtccaaagagacaaaatttcagttagataggaggaagag

SEQ ID NO: 916092 - DNA, 120 bp, Artificial Sequence
  ENSG00000237790_3 (sequence is synthesized)
tttcaagatacctgttgtatagcgtggtcactatacctaataacagcatgttatattcttgagaatgactaagagaagatttcatattctcaccacaaaaaataagtatgtgaagtaatg

SEQ ID NO: 916093 - DNA, 67 bp, Artificial Sequence
  ENSG00000234273_0 (sequence is synthesized)
ctctttgctccagtttcaccaatttcaaatccaaaaagaaaactgaggctgaagaggacaaaaacat

SEQ ID NO: 916094 - DNA, 120 bp, Artificial Sequence
  ENSG00000234273_1 (sequence is synthesized)
ggacaaaaacattgcggatggtcagaaaaagtagtcagtggatgacaccagaacacaaattagctggaggaaaagaataaaaaggaaattactctgcccagctatcagcaactggggaag

SEQ ID NO: 916095 - DNA, 120 bp, Artificial Sequence
  ENSG00000234273_2 (sequence is synthesized)
aataggaggaatgttgatcactctctaacagattggcatctttgaaaacaaaagacactgacggttcagaacttctactggaaaagtctatggagcaacactctctgcttttcacatatg

SEQ ID NO: 916096 - DNA, 120 bp, Artificial Sequence
  ENSG00000241544_0 (sequence is synthesized)
ggaggagcggcctggctttgtctgagtcaggcagcccagcgtgtgggatgccaggctggatgtgctgggcctgaccagccgcccgctttcctcttctcttgcctctgcctgccccctggt

SEQ ID NO: 916097 - DNA, 120 bp, Artificial Sequence
  ENSG00000241544_1 (sequence is synthesized)
ggacagctggggtaaagcatgggagtgcgcctttggggtctcagtggggctgaaatacgactcctcccctaggacagcctgccttccccagccttgttctccggcaaagtcaatttcctg

SEQ ID NO: 916098 - DNA, 120 bp, Artificial Sequence
  ENSG00000241544_2 (sequence is synthesized)
gagaatcgaggctctgcctcagatgttcggagcctccgcaggatgaacacctccatttcaattccaggggctttgatcaacctgtgcctcccttgatccccaacttgtgggcaccttccc

SEQ ID NO: 916099 - DNA, 120 bp, Artificial Sequence
  ENSG00000241544_3 (sequence is synthesized)
ttgagcagtgcccccacgaggtacacctttcccgggaaacaaaaatcattccttctttgggtcctgcaagctgtaaagaaccaatacagcactgtgctactgaacatgttgccactatag

SEQ ID NO: 916100 - DNA, 120 bp, Artificial Sequence
  ENSG00000241544_4 (sequence is synthesized)
aagccccttgtgttttgaagagtacatctctatagccattcgtttattcatcagaaaccagctagaagccaggccctgtgctgggcgctggagacatggaagaaactgggctgaggctcc

SEQ ID NO: 916101 - DNA, 120 bp, Artificial Sequence
  ENSG00000241544_5 (sequence is synthesized)
cgccttgaagagcttgtggcccagggaagggacagttcatctgtcattgattgccacgtgacagtgtctatgatgctaaaaagatgccagtgctgtgctgcaggagcaaaggccgtggag

SEQ ID NO: 916102 - DNA, 120 bp, Artificial Sequence
  ENSG00000241544_6 (sequence is synthesized)
gaagaggctttggctttgttgcgagtccttgccagagccaggcaaagccagtcaccgctttgttcagatgactcaggtaaataaatgaggccgcacaggctgtcctgacaccacacacct

SEQ ID NO: 916103 - DNA, 120 bp, Artificial Sequence
  ENSG00000241544_7 (sequence is synthesized)
acagcaccatgagctcccttagatgacgatcggcatgatgttcctgctgtggcagcgctcagctcttgccaatgctcttctctgctttgctcactttaagcctcccttaatttttttgaa

SEQ ID NO: 916104 - DNA, 120 bp, Artificial Sequence
  ENSG00000241544_8 (sequence is synthesized)
gcccagtttccacattgctgattcacagatatgcaagactcaggcaggaaaaaaaaaagacttcttagaggacttggaaagaaaatgaaatgacgttgaacgaaatcaaagtaaattgag

SEQ ID NO: 916105 - DNA, 120 bp, Artificial Sequence
  ENSG00000241544_9 (sequence is synthesized)
tgatctgaaacgatttgatgtcagcaagaattccccatacagctcacagccctaccccgagcacgcctccctcttgggtatggtgagttcagctccaaatttattctgacaagaaagcac

SEQ ID NO: 916106 - DNA, 120 bp, Artificial Sequence
  ENSG00000241544_10 (sequence is synthesized)
aggcaatggcttcagtgggtctaaatcaggtgaaaattcaaagcaatcacccttcctggacaatcttctgctttctcagtgcttatcatggtctgaaaattcctatttaaagaagcagag

SEQ ID NO: 916107 - DNA, 120 bp, Artificial Sequence
  ENSG00000241544_11 (sequence is synthesized)
ctttcttttaagtcctaacagaacaaagtcacactcaacagtgcacaggcacacgccgggatcgagaatgcatttttggcaaaaagtctcctcttttctctgtctcctccagctctctgc

SEQ ID NO: 916108 - DNA, 120 bp, Artificial Sequence
  ENSG00000241544_12 (sequence is synthesized)
aggcccaaaccttgcagaagccattccatgtttcctgagcaggaaaagacaaactcagaccgacaaccttggacttcaaaagactgcacacaaggggaggaaggactgagagtaccaagg

SEQ ID NO: 916109 - DNA, 120 bp, Artificial Sequence
  ENSG00000241544_13 (sequence is synthesized)
cgtgagaattcagaatgctgctatctcatttatttttaccatttaggaaacgttttgatctgcattccttttcccttccctgatttcaaaaaataaaaataaaaatgcttcggttctgag

SEQ ID NO: 916110 - DNA, 120 bp, Artificial Sequence
  ENSG00000241544_14 (sequence is synthesized)
taagttgctatggatacagagtgacaggccagtgaaggaaactggggacagggagtggcctgcccacagtgtctccttttccagacttcttagaggacttggaaagaaaatgaaatgacg

SEQ ID NO: 916111 - DNA, 120 bp, Artificial Sequence
  ENSG00000241544_15 (sequence is synthesized)
ggaaaaaaaaaaggaaaggctggaagaaaaacacattagtgttcttccaaactcttgacttttggaaaaaattagcatagagaggatggatgctcagccatggcctgacatcgaatgcct

SEQ ID NO: 916112 - DNA, 120 bp, Artificial Sequence
  ENSG00000241544_16 (sequence is synthesized)
aatgcagaggtgaagacacctgcacagtcccatgcactggcgagcttcctggggacaagggcagtgccttgatcacctctcttcctcgtgcagtaaatgtttgttggatgaatggttgtc

SEQ ID NO: 916113 - DNA, 120 bp, Artificial Sequence
  ENSG00000241544_17 (sequence is synthesized)
aactctagtcctgtcagtcctccctgagccctgaaacagaaattaggaaataataacaattagcaggtcctatactcctagatttaagatttttgaacaaataagggaaaattatttgcc

SEQ ID NO: 916114 - DNA, 120 bp, Artificial Sequence
  ENSG00000241544_18 (sequence is synthesized)
ggtggctggttgtttcagcaaaagaaatagctcctaaaaagacacctgagagtaagatgtgccccaaaagtgtccccaggggtgatagagaggctgtagcaggagctctccctaaggatt

SEQ ID NO: 916115 - DNA, 120 bp, Artificial Sequence
  ENSG00000241544_19 (sequence is synthesized)
ttatacaacccacttggcactcacactgttattattaaatggattcagccaaaagctgcctgtgggggtagagatcggtgggaaggtagggcggcagagaaaggaagtgctcaggacccc

SEQ ID NO: 916116 - DNA, 120 bp, Artificial Sequence
  ENSG00000233234_0 (sequence is synthesized)
acagctgaccctagcctccaccttcactgtcacgctgctctttggctccgaccctcctgccaccccttgtgaatattcaggtgccagggccctctccatctcaacatctctactcaccct

SEQ ID NO: 916117 - DNA, 120 bp, Artificial Sequence
  ENSG00000233234_1 (sequence is synthesized)
gcaaagccccttgagccacaggaggtcacatgtccacagcttccagggacaagggtgtggacattttggaggagccatgatgctgcctcccacacctccgttcgaacattatcacagccc

SEQ ID NO: 916118 - DNA, 120 bp, Artificial Sequence
  ENSG00000233234_2 (sequence is synthesized)
ttctcctgcagcctggggcctggaatgcaaaggccactggggccaaatcagctgcacggagctgagccagcagagccgcaggcagcagccgccctgtgagcagctgggaaccactgagaa

SEQ ID NO: 916119 - DNA, 120 bp, Artificial Sequence
  ENSG00000233234_3 (sequence is synthesized)
gtggagatgtttgtcatagcagcagcagctggcagatacttgctatccacacaccctgggcacacatgggcaccaaggctgggggcgacagaactttacactgtgggattctctcctgac

SEQ ID NO: 916120 - DNA, 120 bp, Artificial Sequence
  ENSG00000233234_4 (sequence is synthesized)
agccaagaagggggttttcccttctaccatgaagaacttccccggaggtctccccacatctaataattaggaagataacgtggtcatcaacaataaaagctgcccaggcaggcgcctgca

SEQ ID NO: 916121 - DNA, 120 bp, Artificial Sequence
  ENSG00000233237_0 (sequence is synthesized)
gcggccggtggggactgcggggcgggccggagtccgtccgagggctcccgcacctcgggctgcgggaacattaaaatctccccagatgctcactgctctgatcatttcccctacagcacc

SEQ ID NO: 916122 - DNA, 120 bp, Artificial Sequence
  ENSG00000233237_1 (sequence is synthesized)
agacatgttggcatcatctcttagttgggccatgtggccagggaacccttcatgaaaccacctctgcagtcctggagagttgctgtagaagaaggaaaagagaggaagacaacacaacac

SEQ ID NO: 916123 - DNA, 120 bp, Artificial Sequence
  ENSG00000233237_2 (sequence is synthesized)
aggaggggataagtacctctggacacaatggaagtagtagttgttgagcagagggaaagggataggagaaggatgtggactgcagtgctgcagtgccaggaagttcgaggaccttcagaa

SEQ ID NO: 916124 - DNA, 120 bp, Artificial Sequence
  ENSG00000233237_3 (sequence is synthesized)
atcaatccatgggctccacaagcactgtatcaagaggcattcgagaccagtctgggctagaggaaatggggaaaagaagagaaggaagtgaaaggaatctgttgagagagcaggtgaagt

SEQ ID NO: 916125 - DNA, 120 bp, Artificial Sequence
  ENSG00000233237_4 (sequence is synthesized)
gatccaagaaaaggcagtgccatgggaaccaagaaaggagaccaaaagtgaagaatgttgagtctgagccagagaaggactgatggagccattgccactgtagcctcagagagggcagct

SEQ ID NO: 916126 - DNA, 120 bp, Artificial Sequence
  ENSG00000233237_5 (sequence is synthesized)
tcactagaacaatggcagcagaatgcagatggagccagcggggagaggagtggacatgagagaaagatcccatagccctcttggtcttggttggaacaggaggaaaatgaaaactggaca

SEQ ID NO: 916127 - DNA, 120 bp, Artificial Sequence
  ENSG00000233237_6 (sequence is synthesized)
tccatcttaggacttaatcctacggagaccacaagctggaagaggcactcaatactagcatggcttctgtggcattttgatgagtagtatgggctccacactgaaatattaatatcttat

SEQ ID NO: 916128 - DNA, 120 bp, Artificial Sequence
  ENSG00000233237_7 (sequence is synthesized)
attacgatgcctataaatattgtattgagaaagaaaaaaaaaactaaggcagaagatatcatattacctgtccatatgtgacattttggctggccaagccataatggccaaagaggagca

SEQ ID NO: 916129 - DNA, 120 bp, Artificial Sequence
  ENSG00000233237_8 (sequence is synthesized)
actgtcaaaatttaagtggggttagaaaagaagagaggaacttgcacgtttgcacctacaaggaccctcttttctcctctggtagccatggaaaccactccttggacctcctttcaagag

SEQ ID NO: 916130 - DNA, 120 bp, Artificial Sequence
  ENSG00000233237_9 (sequence is synthesized)
actctgcatggggagcacagttgactgacagctccaattgctgctccttcgagtccaccatggcactcatgcccacgcaatgtttcctccagggttctccaggtagagatggagcaggtg

SEQ ID NO: 916131 - DNA, 120 bp, Artificial Sequence
  ENSG00000233237_10 (sequence is synthesized)
gggttgccagaggcaggccatcaggccatcttgactgatgtgggacttctaatgcttccaggtctgaaggctcacctgccacttcctgctccctcctcctttacccttcacaggagtttc

SEQ ID NO: 916132 - DNA, 120 bp, Artificial Sequence
  ENSG00000233237_11 (sequence is synthesized)
ctccccataaatttcttgtgtatctagtcctgtcttggcatcagcttcttggaggacttgaactgatatgcactcaacagccagtaaatcctgctaattcacaaaatccttgattatcag

SEQ ID NO: 916133 - DNA, 120 bp, Artificial Sequence
  ENSG00000233237_12 (sequence is synthesized)
tactaaagaaagacactgggggtgaagatgtcatcttctaaaagacttactggggataatctaccaccaaatgtaggtggcaaatgccatctttgatcacataatggaatcaatgaagga

SEQ ID NO: 916134 - DNA, 120 bp, Artificial Sequence
  ENSG00000233237_13 (sequence is synthesized)
ggttattgatctggttcagaggtgactttagaatgtcccaaaccctttaaatatgtgtgtattgagtatgtgtgcaattctccttgaagaacatttatacctttcatctcattaatctac

SEQ ID NO: 916135 - DNA, 120 bp, Artificial Sequence
  ENSG00000233237_14 (sequence is synthesized)
aaaattatcagcagtggcagctaattgtcagttaactaggtagttgacaagtcacattaacatgaaatctgtgtttcatgtaaataaaaaaaataaaatgacttattttatgcaataata

SEQ ID NO: 916136 - DNA, 120 bp, Artificial Sequence
  ENSG00000233237_15 (sequence is synthesized)
agagagggcagcttcactagaacaatggcagcagaatgcagatggagccagcggggagaggaggtgaggagatggacatgagagaaagatcccatagccctcttggtcttggttggaaca

SEQ ID NO: 916137 - DNA, 120 bp, Artificial Sequence
  ENSG00000233237_16 (sequence is synthesized)
gcggccgcagatcccggcaacttgcgaaccgggaaaagtttgcggcgcctccgcggggcggcgcgacgcggcccgcccctcgcgtccgcggtcatcgcgggtgactttctcgactcgtcg

SEQ ID NO: 916138 - DNA, 120 bp, Artificial Sequence
  ENSG00000233237_17 (sequence is synthesized)
ttacttgtactaccttatttagcacttaattatatactttcttgactcactttgagacacactgattatgtggtctgcctcaaagacagaatcctagttttggattttagcattactgat

SEQ ID NO: 916139 - DNA, 120 bp, Artificial Sequence
  ENSG00000233237_18 (sequence is synthesized)
ctatagccttgcaggggcttaaggatggcagctgtctctctcccttgggatctagcttttgcaaatattgaagggaagagatttctttgatcttataggaatagatccacagttcctctc

SEQ ID NO: 916140 - DNA, 120 bp, Artificial Sequence
  ENSG00000233237_19 (sequence is synthesized)
cagatttgcttttatagagaagtgtgtgtcaccaaaacaatggagatacggtcagagaggcccctacccccagaattttaatataattttactttctggggcatttattcttgacaaata

SEQ ID NO: 916141 - DNA, 120 bp, Artificial Sequence
  ENSG00000233237_20 (sequence is synthesized)
tatgaagcacctcaagtctttctctcttcccacttccattcttgcacaccttttgctagactagtctctgcgttcatcacatcaggtttctaaaataaaagtcccctaataactttctat

SEQ ID NO: 916142 - DNA, 120 bp, Artificial Sequence
  ENSG00000233237_21 (sequence is synthesized)
ttgttctctcatcatattgaaccttttttgcctggcttataaggtggccttaaaaccccattttcctctaaacattgtctctgtagttcaggaatatggcaggctcaacactatgcttga

SEQ ID NO: 916143 - DNA, 120 bp, Artificial Sequence
  ENSG00000233237_22 (sequence is synthesized)
gcccatattgcttccctcattagtgatgcctcctctcagaccacccagattctactcattcttcaatttccagcttctccttggagccttcccagatcattagcttcttaaaaatcccag

SEQ ID NO: 916144 - DNA, 120 bp, Artificial Sequence
  ENSG00000233237_23 (sequence is synthesized)
ctttctctgaattctgatggtagcccccgttatttggacaattatgtcctggtcttaaagtcctaatgggaaaaaaaagtacatgatggacttcatgtagagaagaaagcactggactga

SEQ ID NO: 916145 - DNA, 120 bp, Artificial Sequence
  ENSG00000233237_24 (sequence is synthesized)
gttttaagacagctgctaaggagctgtgtgagccaaaccaggttactttacctctctggatctatatttgctgatctgttaagtggagacaattgggtcagataatcttggtggtctttg

SEQ ID NO: 916146 - DNA, 120 bp, Artificial Sequence
  ENSG00000233237_25 (sequence is synthesized)
cttattctgaggttcttggacaacttggcctagttcacgtgggatgggattgaagatcttactgagttcttggatggaaatgtcagtaatgggcacttagtgccttcaggacttgttcta

SEQ ID NO: 916147 - DNA, 120 bp, Artificial Sequence
  ENSG00000233237_26 (sequence is synthesized)
tactatcccagaaatttctgatgctaaacttggcaatttttaaatgtcatattccttttctccaaactctttaaccacaagaattcagggaaggttatggggggtgacttagttatctgg

SEQ ID NO: 916148 - DNA, 120 bp, Artificial Sequence
  ENSG00000233237_27 (sequence is synthesized)
ataatacatattgtggacaatatagcattatccttgggaatgatttcatattgttgaataaataggatcaacttcttgataaaccttagtcccaagcatttcatcttcattggatagtgt

SEQ ID NO: 916149 - DNA, 120 bp, Artificial Sequence
  ENSG00000233237_28 (sequence is synthesized)
attcttttctgtttttctcctgattgttgcttactctttcaaaaatcagctgactgtacaagtcctctctgggagcagactttagagcaaaagtgatctataaaagcagcatgaagttcg

SEQ ID NO: 916150 - DNA, 120 bp, Artificial Sequence
  ENSG00000233237_29 (sequence is synthesized)
atgcgaggctggggccggttgcctaccggccgcttctcgccgaggcagtccagacttttcccccggcggtgcccgctccaagacagcatctgtcaacgctcctcttctcccctcctcctc

SEQ ID NO: 916151 - DNA, 120 bp, Artificial Sequence
  ENSG00000233237_30 (sequence is synthesized)
ctgccgggccgggctccgccggctgcggccgagaggacgcgggacccggcgcggtgagcccatcagctgtcaggcgagcggcgaagcggctggagggcggcgagagacacacaaagaacg

SEQ ID NO: 916152 - DNA, 120 bp, Artificial Sequence
  ENSG00000233237_31 (sequence is synthesized)
aaagaacgcggtgggcggcggcggcgaaaggggacggcaactcctccccgcgcccgccggtgccaccgccggccgtgcttgttccgaggccgcgcagacaatgcggccgggctcgtcccc

SEQ ID NO: 916153 - DNA, 120 bp, Artificial Sequence
  ENSG00000233237_32 (sequence is synthesized)
atctggttggagacatgttgtaattctgtatatatatgtacatttatcccatgcatgttatgcctaaactaagacggatacccctgaattaagaggtgctgttatacattgaccaggctt

SEQ ID NO: 916154 - DNA, 120 bp, Artificial Sequence
  ENSG00000233237_33 (sequence is synthesized)
aagaatatctctttaaagtgtgtcgacatttaattgacctttggaagttcattctgttaatcatactcaaagtgctaaagctatggttgactgctctggtgtttttatattcattcgtgc

SEQ ID NO: 916155 - DNA, 120 bp, Artificial Sequence
  ENSG00000233237_34 (sequence is synthesized)
tttagcatataaattcttcagcataattgctacttatttagcaagagtttcctttatttgaaaatgtgagttgtgcttgtatttttgtgtctttctttctttctttctttttttaaactt

SEQ ID NO: 916156 - DNA, 120 bp, Artificial Sequence
  ENSG00000233237_35 (sequence is synthesized)
tgcttcaggctgggtagtggtagaggtttgaattaaaatgttttcctgtcagtagttgtatgaggtgtggcttcttaatctagaagtaatggaaatttcttgcttaaatgaagtgcactt

SEQ ID NO: 916157 - DNA, 120 bp, Artificial Sequence
  ENSG00000233237_36 (sequence is synthesized)
ttcttcctgcagaagttagaactcttttagacaagcttaacacttcaaaactgtatatctttaacagaaacttttggaaatttttaaattccatttgtgtagattaaaaatatcaatgct

SEQ ID NO: 916158 - DNA, 120 bp, Artificial Sequence
  ENSG00000233237_37 (sequence is synthesized)
tcaatgctaatactttctattaaataaggatttatctattttcataaaacctctaattatattccttgaattgctatgagtagaattttgttgtaaacacaatatttttaaaaagtcaaa

SEQ ID NO: 916159 - DNA, 120 bp, Artificial Sequence
  ENSG00000233237_38 (sequence is synthesized)
aaaaatcttaacattatattactataacttagagaacaggtgtttacatgtttaaaattttctaggccttaaatttgtgaaatcagtctttcagaagttatttttaatatagttatctgt

SEQ ID NO: 916160 - DNA, 120 bp, Artificial Sequence
  ENSG00000233237_39 (sequence is synthesized)
ctgtgttacaggtttataagttgacatttcaatttaaaattttttcaatttatatttcaatgaccaggaaaaaatagttaaacttattcctaaattttaatagaaaaataaaaaaccaca

SEQ ID NO: 916161 - DNA, 120 bp, Artificial Sequence
  ENSG00000233237_40 (sequence is synthesized)
tgttaatttctggtaatttatcttgagactccaggcatgtttttagaacatttttaccttaaaagcaattttgaaatagggaaattaaagtttaaagcagagttttcactttaatgaggt

SEQ ID NO: 916162 - DNA, 120 bp, Artificial Sequence
  ENSG00000233237_41 (sequence is synthesized)
aattttatacttcccagataggtaggcccatattcaagaacactctgatctctgtttatagtaagttttgatgccattatatcatttacttattcacgcattataagcatagtagatagc

SEQ ID NO: 916163 - DNA, 120 bp, Artificial Sequence
  ENSG00000233237_42 (sequence is synthesized)
cccattgtcacgaagctggcattattttcttgtctgtcattcaatattgtccccttttttttttctgttttcatcatagccgtccttttcattttattgtagccctgactcgaaatgaaa

SEQ ID NO: 916164 - DNA, 120 bp, Artificial Sequence
  ENSG00000233237_43 (sequence is synthesized)
gtaagtttgaactcttaaaaaagagttcctcaaactcttttttaagaatatacagtgaaatgtcttaaataatattatctaaataatacctaaagaatgcaaatgacttgcaatgctgaa

SEQ ID NO: 916165 - DNA, 120 bp, Artificial Sequence
  ENSG00000233237_44 (sequence is synthesized)
tagtcagacacaggatgttccatgctaagggtagactcatatttccactttataaaatgtggtttcagaaaacaaatagatgtgtttcttccttaataattagtgtttcaggaccaaagt

SEQ ID NO: 916166 - DNA, 120 bp, Artificial Sequence
  ENSG00000233237_45 (sequence is synthesized)
tgactaaatatggaagtttaagataaaacccggtttcttagggaatctttctcagtccttagtaattctgtagaattgatgatagagtggcaacttcaatacactcagtattcttttctg

SEQ ID NO: 916167 - DNA, 120 bp, Artificial Sequence
  ENSG00000233237_46 (sequence is synthesized)
tttgaagtctgttttgccattggaaaaaacttattgttgtttgaatttgggtatatgtattcacagatggtttactttatttttattttgtttaaacaaatactttcatgtcccaaacac

SEQ ID NO: 916168 - DNA, 120 bp, Artificial Sequence
  ENSG00000233237_47 (sequence is synthesized)
tgagacatgtttcatgtcctaaacactttataaatattagaatatttaatccccttaactctgtagttataattatcttcattttacaattgagaaaactaagatacgacgttttattta

SEQ ID NO: 916169 - DNA, 120 bp, Artificial Sequence
  ENSG00000233237_48 (sequence is synthesized)
atggtaacgccttaagtaaggggagagtgataagtgtaagcagagtggaaaacttagtagtgctaaggagcaacagaagtatgtgcaagagtttgggaagatgtgtctgcttggaaagga

SEQ ID NO: 916170 - DNA, 120 bp, Artificial Sequence
  ENSG00000233237_49 (sequence is synthesized)
tcagggactcagctgggatcagtcttaaagagcaacatgtcctcattcctcaattttaagcctttgggctctagaagtaaagggcaaacttagaggaggcactcctcaggtttcagctgc

SEQ ID NO: 916171 - DNA, 120 bp, Artificial Sequence
  ENSG00000233237_50 (sequence is synthesized)
tgtgtttctcatagggctacatgagcctttatgtcttacctcctcctcatttcttggctgactcctgcttttttggagggtttaacttctctctcagctagaaggttaggcattgcaaat

SEQ ID NO: 916172 - DNA, 120 bp, Artificial Sequence
  ENSG00000233237_51 (sequence is synthesized)
accagtggataatttttttcttagctttaaccccagcccatttcaaccccctctttgccctttgtatattcttttgaaaatatgatccagtagtgtttatgaatgtgtgttgtgtaaaat

SEQ ID NO: 916173 - DNA, 120 bp, Artificial Sequence
  ENSG00000233237_52 (sequence is synthesized)
ttagagattgatgttaaacaacagaattaaaggacaaagctgtcttttttgttggaattggggatgggagagcagctcaaagtgggaaatatggagaaaggagagacattgtggaaaaga

SEQ ID NO: 916174 - DNA, 120 bp, Artificial Sequence
  ENSG00000233237_53 (sequence is synthesized)
agagataaattgaggggaaaaaaagaggatgaaaaaatgaagagagagaattactgatgtgcttcacacccacacctcctctccaacttcacagtaacagaggcaatgtcactatctttt

SEQ ID NO: 916175 - DNA, 120 bp, Artificial Sequence
  ENSG00000233237_54 (sequence is synthesized)
acctgacaagtgctttaccagggagttgtgcctggcatcgtgggagtggaaaatttttcccttttgcattttgagacttgggtgtgctgctttaagatgccactggtatctaagtaatgt

SEQ ID NO: 916176 - DNA, 120 bp, Artificial Sequence
  ENSG00000233237_55 (sequence is synthesized)
ttgtttatactggatatttttctctgtagcctttgtggattggacttataatataaacaatattgttagcagaactgcaggtactctattgctatgtttattttattagttaaaaaacta

SEQ ID NO: 916177 - DNA, 120 bp, Artificial Sequence
  ENSG00000233237_56 (sequence is synthesized)
ccagagccctaggacttctgagcacatttagaaaataccagaggcaattttaagactagcattagaaagaaagaaaagaataagaataaaactaagacttgcataccttagaatcctaac

SEQ ID NO: 916178 - DNA, 120 bp, Artificial Sequence
  ENSG00000233237_57 (sequence is synthesized)
caatgtggtgatttttaaaaattaatgtttcagagactctaaattagggtagttggtttcatcaattacattttttaagttaatataaagtgcttttgtatgtaaattctcttaatagat

SEQ ID NO: 916179 - DNA, 120 bp, Artificial Sequence
  ENSG00000233237_58 (sequence is synthesized)
aatttaggtaaaatgaaagtgtggcattttttgttccatagaatgtaaaactaacgtcagaataagaattcttttgggaatttaggatttttttgatgcttctcaaatcatctgtaatga

SEQ ID NO: 916180 - DNA, 120 bp, Artificial Sequence
  ENSG00000233237_59 (sequence is synthesized)
catctgtaatgacttttatttatagaaaaggtagattattcattagtttttatgaaaaacactcagtttaaatagccgggtatggtggcgcatggctgtagtcccagctactcaggaggc

SEQ ID NO: 916181 - DNA, 120 bp, Artificial Sequence
  ENSG00000233237_60 (sequence is synthesized)
aagatcgcaccactgcactccagcctggtccagagtgagattccgtctcgaacaaaacaaaacaaaaatattgagctaatctaaatggtaaaaatctagatttgaagaaatttattttaa

SEQ ID NO: 916182 - DNA, 120 bp, Artificial Sequence
  ENSG00000233237_61 (sequence is synthesized)
atggtaaaaatctagatttgaagaaatttattttaaaatagttgttcatttgtcaaatagaaaagtatgatcttagcaggtttggttagatccctatctgaaacaaagtaaactaaagat

SEQ ID NO: 916183 - DNA, 120 bp, Artificial Sequence
  ENSG00000233237_62 (sequence is synthesized)
gtttttcttgatcaatgcatagcaataactgctgttcaaacatgtgaggaatcaccagtaaattgggggatagaaagcaggaaaaggagcttttttctcttattttttttcatttatcag

SEQ ID NO: 916184 - DNA, 120 bp, Artificial Sequence
  ENSG00000233237_63 (sequence is synthesized)
tttttcccatttgtccatcctttcctataatcatggaaatttttattttttacactcctctccccatttttttatcctagattgccaccacaccaaggttttctagagttaggcagaaag

SEQ ID NO: 916185 - DNA, 120 bp, Artificial Sequence
  ENSG00000233237_64 (sequence is synthesized)
agaacctgggcctagatgctaatggaaactatcccatgctttctcagactctctttcctccccagagacaagaggagcaaaacaggagttgatggctcattgctgttgcttctgtggctg

SEQ ID NO: 916186 - DNA, 120 bp, Artificial Sequence
  ENSG00000233237_65 (sequence is synthesized)
ccctgtttggttgacctgagctttttttaaaaacctccactcttgacgcttaactctatgaataaaattagggccagtcacactgtattttcatcatcagttatccctagtgattcaaat

SEQ ID NO: 916187 - DNA, 120 bp, Artificial Sequence
  ENSG00000233237_66 (sequence is synthesized)
ttagcacaaacctgctgtgagtacatattaattaggtgaatacagtagaatgcaatcataacatgagtcttttaataactattctttgtttgatttttattttagaagtttgaagttatt

SEQ ID NO: 916188 - DNA, 120 bp, Artificial Sequence
  ENSG00000233237_67 (sequence is synthesized)
ttgttgaaaatctagaaaatctttatgtgagcaactgaggttcgggtagcccacaacagtttaaatcaaacattaacttgcagtaaaacactactgaaagtgtctttgattttgaggtgc

SEQ ID NO: 916189 - DNA, 87 bp, Artificial Sequence
  ENSG00000233237_68 (sequence is synthesized)
tcatgctgctaataaagacatacctgcaaccgggcaatttattaaaaaaaaaaagaggtttaattgcgtcatggtgaaagagcaagg

SEQ ID NO: 916190 - DNA, 120 bp, Artificial Sequence
  ENSG00000233237_69 (sequence is synthesized)
atggctggggaggcctcaccgtcatggtgaaagagcaagggatgtcttacatggtggcaggcaagaagtttgtgcagaggaactcctgtttataaaaccaccagatctcatgagacttac

SEQ ID NO: 916191 - DNA, 120 bp, Artificial Sequence
  ENSG00000233237_70 (sequence is synthesized)
catgagacttactcactaccaggagaacaggatgcgggaaaccacctcggtgattcagttatctgcacctggccccacccttgacacatgttgattattacaattcaaggtgagatttgg

SEQ ID NO: 916192 - DNA, 120 bp, Artificial Sequence
  ENSG00000233237_71 (sequence is synthesized)
ccaaaccatatcagctgcccattctcctgtgcagtgacataaaggtctgataacctgatttaaagcttggactctaagatttttttttttctttttttgagtcaggttatctctgtcgct

SEQ ID NO: 916193 - DNA, 120 bp, Artificial Sequence
  ENSG00000233237_72 (sequence is synthesized)
ttttttttttctttttttgagtcaggttatctctgtcgctcaagctggagttcagtggcatgaacagggctcattgcagcctcaaccttccaggttcaagtgattctcttgcctcaacct

SEQ ID NO: 916194 - DNA, 120 bp, Artificial Sequence
  ENSG00000233237_73 (sequence is synthesized)
tctggggctacaggcatgtgccaccgtgccaggctaatatttttatttttatttttgtaaagatggggtctcacttctgggctcaagcaatctttcctcagcctcccaaagtgctgggat

SEQ ID NO: 916195 - DNA, 120 bp, Artificial Sequence
  ENSG00000233237_74 (sequence is synthesized)
gaatttcatatccctgttttcggtgtgctgtgtcactgtttgccatgggtaaaggtatatgaatctcttttattttgctgcttgcaacccaattcccatgccaaacccaatttgtatcca

SEQ ID NO: 916196 - DNA, 120 bp, Artificial Sequence
  ENSG00000233237_75 (sequence is synthesized)
aacaaacaatattggagacaagttcttctatagaaagcttcataagccagttactgactactgtgtctgtaaatatactcaaactattttgtagtcttgctattttaaaaaatgtgtggg

SEQ ID NO: 916197 - DNA, 120 bp, Artificial Sequence
  ENSG00000233237_76 (sequence is synthesized)
tgtgggaagtgatgttgaatgaattcagggtaattggtggttctttgtattaggaaaactcactagttaagggaagtctgttttcatgattcatgtatgtttaacttaaaaaaaaattct

SEQ ID NO: 916198 - DNA, 120 bp, Artificial Sequence
  ENSG00000233237_77 (sequence is synthesized)
tccatccttctctccagtttccactctacctcataaattcaagtaatgaaggaatttaaataatagaattttataactgaaaggattttggagagaatctattaaccctcctactacagt

SEQ ID NO: 916199 - DNA, 120 bp, Artificial Sequence
  ENSG00000233237_78 (sequence is synthesized)
tgaggaaatagatgtccagtgaggtcaaatgagatcatgtagctagtttaaaaacccaaataacattttagtagtttgtttccattagtaaacactgttctgtttgatttgccctaacat

SEQ ID NO: 916200 - DNA, 120 bp, Artificial Sequence
  ENSG00000233237_79 (sequence is synthesized)
gttcataatcagagtcataataaggaaaaatcactaatatgtgtgtggtactttcttgtgcatacctcagtcacttctcaaaagaggtctgtaaggtgtcggtatcctggtttccattca

SEQ ID NO: 916201 - DNA, 120 bp, Artificial Sequence
  ENSG00000233237_80 (sequence is synthesized)
gggagagaacagtctatgagcctaagagacctgtctgtgccagtcactatcagaacagtctaatgctatgtgtcttcctaccttggcaaaagcattggctggtctctggacagttctcat

SEQ ID NO: 916202 - DNA, 120 bp, Artificial Sequence
  ENSG00000233237_81 (sequence is synthesized)
agaccacaggattgggcaggggggagccacatcttcatgttagggctctaacctgtaccaattattaactgttgtctctatttcatcatttcttaaagggaaaaaaaagcactttttaaa

SEQ ID NO: 916203 - DNA, 120 bp, Artificial Sequence
  ENSG00000233237_82 (sequence is synthesized)
gagcatgagattttaaatttttcaaaagaaggatgctggatcattataagtaaggcatgttttaaagatcttcttatcaacagcttaaaaattagccagtatatactgaacatccactgt

SEQ ID NO: 916204 - DNA, 120 bp, Artificial Sequence
  ENSG00000233237_83 (sequence is synthesized)
ataaaaagcacattatggggtgctccagtaggtacagcagtgatcgagacagaatcatagccttcagggaagaggtatatgcaatgttctctccttccaaagattacctagatagagaac

SEQ ID NO: 916205 - DNA, 120 bp, Artificial Sequence
  ENSG00000233237_84 (sequence is synthesized)
tgttcataagaaatatcttggtactgtctacattactcttgagatataaaatatatattatttcttacgtctgaaatgagtcagttgtttctaaaacaatttgtattaaagtattcacat

SEQ ID NO: 916206 - DNA, 120 bp, Artificial Sequence
  ENSG00000233237_85 (sequence is synthesized)
taaaaatttgtaaaatacagaaaagtagagagaaaaaatcatgaatttttaacatggtaatgattatatcagtttcgttcttggcgtttctttaacttgatgggatagctaatgtttttt

SEQ ID NO: 916207 - DNA, 120 bp, Artificial Sequence
  ENSG00000233237_86 (sequence is synthesized)
gtcattgcatagctttgtaaacttgtcctaaggattatataatttcagcatgagttagtttctaagtatgtcagaaatctagcttttttgtggtaattgttgttttacacaaaatgatta

SEQ ID NO: 916208 - DNA, 120 bp, Artificial Sequence
  ENSG00000233237_87 (sequence is synthesized)
ataaaagactctaaactaaccttggctttagaaatgctttttaaattttaaaatagtgaatgagtagcagattactttctagtatttctttaaggtcaccaaaatcacttaacttgctta

SEQ ID NO: 916209 - DNA, 120 bp, Artificial Sequence
  ENSG00000233237_88 (sequence is synthesized)
tcacttaacttgcttaaaatattgatggaaatatcaactacgtacagttgacctaaattagaaatgggtgttttttaaatagtgaaatttataaatataatatgtatattttaaaataca

SEQ ID NO: 916210 - DNA, 120 bp, Artificial Sequence
  ENSG00000233237_89 (sequence is synthesized)
tatgttcctctgtaataatttctctttacactgaatcatgttcagtttttattatgcagataatttaatcttacagctttgatcttttttaaaaaataaaacagccatttggagtctaaa

SEQ ID NO: 916211 - DNA, 120 bp, Artificial Sequence
  ENSG00000233237_90 (sequence is synthesized)
agaaggatgtggactgcagtgctgcagtgccagctgactgtacaagtcctctctgggagcagactttagagcaaaagtgatctataaaagcagcatagtctcactctgttgcccaggctg

SEQ ID NO: 916212 - DNA, 120 bp, Artificial Sequence
  ENSG00000233237_91 (sequence is synthesized)
cctgggcgacagagcgagattccatctcgaacaaaaaaaaaaaaggagtaaagcccattactgggcagggcatgagctgtagaacatccttgtatacaagatacattaagctttaaatct

SEQ ID NO: 916213 - DNA, 120 bp, Artificial Sequence
  ENSG00000233237_92 (sequence is synthesized)
gggaacagtgttttttctccagtgaatcattcatggctgtaaagctgctacattttaattttaaaaatgtaagtttttaaattaaaaactttacatactgtaaagttgctacattttaat

SEQ ID NO: 916214 - DNA, 120 bp, Artificial Sequence
  ENSG00000233237_93 (sequence is synthesized)
ttaaaaaatgaacattgggagttgggaaaagccactgtgtatcctgaaagttgatgtgtaatactgcagaatatttttaaatcaatggataaggttttttgatacagaatgtgacagatt

SEQ ID NO: 916215 - DNA, 120 bp, Artificial Sequence
  ENSG00000233237_94 (sequence is synthesized)
tgatcaaatataatctacatttgaaataaatgtattttcattcagaactaaaaatgaccaaaggctagtttattggagattagttttatgtgactaaaatgcctattacatcagaagccc

SEQ ID NO: 916216 - DNA, 120 bp, Artificial Sequence
  ENSG00000233237_95 (sequence is synthesized)
tactgaagcaaaagagagtggctttcacgttacaaaaggaacttttcagacttgactttaagaagttaaaatcatttcatgtagctaaaattattttagtgactatttaataaggtgtgg

SEQ ID NO: 916217 - DNA, 120 bp, Artificial Sequence
  ENSG00000233237_96 (sequence is synthesized)
ttctttccatgtagaacattttaagctcttacataattattcagtattgatacccacattttatgaccattttctttcattcttgtctatttttaaactgtttacatagatttcttctct

SEQ ID NO: 916218 - DNA, 120 bp, Artificial Sequence
  ENSG00000233237_97 (sequence is synthesized)
gcatttactgtgtatcctggtttttcttcacttgaaatccatcatgaaaataaaattttaaaataaggctgccttcataaaaggttaactttccaggagttaatgccatcatttaaggag

SEQ ID NO: 916219 - DNA, 120 bp, Artificial Sequence
  ENSG00000233237_98 (sequence is synthesized)
agattgctttctcttcttagctatgagttccttagaaaagtaaaacagcctaaccttgaattttgggggaataaaaacaaagttttagaaactggtaaatattttttatttagagatttt

SEQ ID NO: 916220 - DNA, 120 bp, Artificial Sequence
  ENSG00000233237_99 (sequence is synthesized)
taaaacctgaataatcatcttaacattgttaacccattgtcaggtggtagatggcatcattcattcattcattcattcattcatcaaaccttcactgagaacctcctttagtaccagaca

SEQ ID NO: 916221 - DNA, 120 bp, Artificial Sequence
  ENSG00000233237_100 (sequence is synthesized)
aaccctggatacatgttgtgaatttcttctgatgaaatgaagttaagttaaacgaaacatggtgtttcttccctagtagagagatggataggtaaacaaataattgtaataaagtatcag

SEQ ID NO: 916222 - DNA, 120 bp, Artificial Sequence
  ENSG00000233237_101 (sequence is synthesized)
ttctgtgatctaggcatatgcaattatgtgacctaggcacagtataatggtggtaaaaggaaaaatgaacaattcctcctcaggttgggggaggggtgtgggtgttagggatgacgctga

SEQ ID NO: 916223 - DNA, 120 bp, Artificial Sequence
  ENSG00000233237_102 (sequence is synthesized)
ccagagaggattcacaagagagaatacttgatttgggatttgaagactgtatgggcacttgccaggtagaagagtaagcagaagtgcagaaacagaataaagaacaggtttgtgtgattt

SEQ ID NO: 916224 - DNA, 120 bp, Artificial Sequence
  ENSG00000233237_103 (sequence is synthesized)
agttcttcaagtgttttcaccctttcagttgtgacagaattcagtattcaatgagcatggggtcataactttgcagcccagcccattcaagttatcattcttagggctctttccttctcc

SEQ ID NO: 916225 - DNA, 120 bp, Artificial Sequence
  ENSG00000233237_104 (sequence is synthesized)
acttctcttcctattctttccctcctgcatgaaaggccttatgaagcccaagccaggcttgtgaattacccatgacttctccatctccacagtgcctctcccctcagctactcactcact

SEQ ID NO: 916226 - DNA, 120 bp, Artificial Sequence
  ENSG00000233237_105 (sequence is synthesized)
gaattctgctgttcttcttgtctttataatttctcatattcattttctctgtgttcttactgcctcttccctaattaaggctcccatgctctcccttacactactgcagtgattcttttc

SEQ ID NO: 916227 - DNA, 120 bp, Artificial Sequence
  ENSG00000233237_106 (sequence is synthesized)
ctgttttccttacctgccaccttaaagctagagtaaattctctaaagtactgacatggtcatcccacttgcctgcttactatctttcactcgtacccatcgtttggagataatgcccaaa

SEQ ID NO: 916228 - DNA, 120 bp, Artificial Sequence
  ENSG00000233237_107 (sequence is synthesized)
ccctttaacctggcacataaggactcccatctttcccttgtgtctctccccttacccttcacccacatgcatctttgactccacctctgctgaattcttaaaggcctcagcatacattac

SEQ ID NO: 916229 - DNA, 120 bp, Artificial Sequence
  ENSG00000233237_108 (sequence is synthesized)
ctttgtctttctttctctattggatgactgttctttctggtacactttaagctacactatcttcttcactgcccaccccttccaaattcccattagcaccatcttcacctagctaatttt

SEQ ID NO: 916230 - DNA, 120 bp, Artificial Sequence
  ENSG00000233237_109 (sequence is synthesized)
attcaggcttcaagactcagcctggctattagccaactcagaagtgtcttttgacccatcataacacttatagtaatggtgtatgtgtctgtcttgcaaattaagctgtgtccttctcga

SEQ ID NO: 916231 - DNA, 120 bp, Artificial Sequence
  ENSG00000233237_110 (sequence is synthesized)
aggtagggatgatacccttcatttctcatcacctagaatttaaaacattgctgatatatggcaggcagtcacaattgtttgttgaatgaatgaatgaatgaatgaaatgagtaagatcct

SEQ ID NO: 916232 - DNA, 120 bp, Artificial Sequence
  ENSG00000233237_111 (sequence is synthesized)
gtaacagtttggaattatatgccacctgggtttacagtgtagtctcttatcaggtaggtttgttctgagatgtatagtaatgatgactttcttcttcgcccaagtattttgtgtacctta

SEQ ID NO: 916233 - DNA, 120 bp, Artificial Sequence
  ENSG00000233237_112 (sequence is synthesized)
gaccagtttagcaaatgaagtccaagaactatttgaataagtcattcttagaaaataactttaggaagcaactgactccattcatgtgtatgcctctaattgtaggttcacttctgtccg

SEQ ID NO: 916234 - DNA, 120 bp, Artificial Sequence
  ENSG00000233237_113 (sequence is synthesized)
tccgaatatgaatttttaaaataattttagcattatattagcaatttgcaatataccatttttatgcatgtaaagttgtattctaacatatttactttttgctcatttgattaaatttat

SEQ ID NO: 916235 - DNA, 120 bp, Artificial Sequence
  ENSG00000233237_114 (sequence is synthesized)
gtgtatcccatcattaaggtaactaattttcagtaattaaactgttggtcttctgtttagccattattctcagttctgtgcaggagtgagctgaaacaaagttgtatagcccagagagtg

SEQ ID NO: 916236 - DNA, 120 bp, Artificial Sequence
  ENSG00000233237_115 (sequence is synthesized)
agaagctgcatttcatgtctcccaacagtcagaaagggattatgtactgtttaaggaaggagtttggcgaatattttgaaacccttttgggaaagcatagaatattgaaaatccaaaatt

SEQ ID NO: 916237 - DNA, 120 bp, Artificial Sequence
  ENSG00000233237_116 (sequence is synthesized)
aaccaaatccgtgagtgtgcaagctcaaagctagagaccttaggaatatcttaggatgtgcaaaacaggaagaaaacaagaactgagcaggcagcactaagtaagtgtcatatagcctcc

SEQ ID NO: 916238 - DNA, 120 bp, Artificial Sequence
  ENSG00000233237_117 (sequence is synthesized)
ccacccacccttccaaccctactcctaaaagagccataatttagtcccaagtatacttttctgatcttttcctgtgacatattatggtatcttcaaatggtactgggtttcctgaggctt

SEQ ID NO: 916239 - DNA, 120 bp, Artificial Sequence
  ENSG00000233237_118 (sequence is synthesized)
ttactctttctgccttggaagtcaactaaagagaaatggattttgaatatttctatgtcttagaattgatcctatcccgtgtttgtttctgaggtcaactgtaaaaggaaaaaaggtgaa

SEQ ID NO: 916240 - DNA, 120 bp, Artificial Sequence
  ENSG00000233237_119 (sequence is synthesized)
ttgactaagtcatccaaagaaatgtaagataatctataatatcagttatatttgaactgtttcacttagtttaaaaagaaaaaaaagattaccaaatacccaagtgacaaaagttctggt

SEQ ID NO: 916241 - DNA, 120 bp, Artificial Sequence
  ENSG00000233237_120 (sequence is synthesized)
taacttgtatgaggctacattttgtgggttgctgcagtctgatctgtaaaagcaacacattacctatacgttaagctaaacatttctcctttaacctgagagcattccacactgaagtct

SEQ ID NO: 916242 - DNA, 120 bp, Artificial Sequence
  ENSG00000233237_121 (sequence is synthesized)
gcttttcttgaagcaaaaattctagtgtccttggacttgctattttatcagggatcaaaggcaccttggagccccatgctttaggaattgtaatggcaaacaataaggtctgctctttaa

SEQ ID NO: 916243 - DNA, 120 bp, Artificial Sequence
  ENSG00000233237_122 (sequence is synthesized)
agctagaatatagttacacatttcaggaaaaaatagaattgttgttggaggacgggagaggaaggaaaatgtagaggtaagggatgggatgcaagaagttaattttaagaaaaatctaca

SEQ ID NO: 916244 - DNA, 120 bp, Artificial Sequence
  ENSG00000233237_123 (sequence is synthesized)
gaacgaactcataagttcagccttaaccagaaaaactctttcatgtaaatcgtttaaatcaaaggtctattaaacatctaatctagaatgtaacttacctgaaatttgagtccattgctg

SEQ ID NO: 916245 - DNA, 120 bp, Artificial Sequence
  ENSG00000233237_124 (sequence is synthesized)
cattgctgatttatttaaaattattatgaaataagccttcttgttaaagagaatatttaaataaggcatatttttatataacaagcccttaagaagttaaataattaacttaatgcttct

SEQ ID NO: 916246 - DNA, 120 bp, Artificial Sequence
  ENSG00000233237_125 (sequence is synthesized)
ttaaacaaatctgaacaaaattactctagtcttggcatatcagcatatatcagtcatttaaactaaaagacactctactactttagaagtattagaggagcttttaattttacctccgca

SEQ ID NO: 916247 - DNA, 120 bp, Artificial Sequence
  ENSG00000233237_126 (sequence is synthesized)
ctgactgtagagcctaatacaataggagtaattgtttcatatgagtttatagaaaaaaagtttaaatacaatgactttagcatgtgatttcagggaagtatttgaacaggctggccttga

SEQ ID NO: 916248 - DNA, 120 bp, Artificial Sequence
  ENSG00000233237_127 (sequence is synthesized)
agcagtggtagacactgttgaagtgccagcttgattgagtcatttacctttttaggtttgcctacaggcttaagaaaaccctctttgaaacaatgctctacagtcttctcaaagaaataa

SEQ ID NO: 916249 - DNA, 120 bp, Artificial Sequence
  ENSG00000233237_128 (sequence is synthesized)
ttgttatagatgtttgaaattttgctttctgctaggagaggcagataatatgggtaaggggaaaagcaactctaagcagcagagaatgatgcatatgctttgccatagcattttattatt

SEQ ID NO: 916250 - DNA, 120 bp, Artificial Sequence
  ENSG00000233237_129 (sequence is synthesized)
ctgcctaaattaaaaggggggacattcaaatattccagatctaaatttatggttaacttttagtcatgaatgtaggtgtttcaaagcttattgaaatacatgctgaaattcattcatcat

SEQ ID NO: 916251 - DNA, 120 bp, Artificial Sequence
  ENSG00000233237_130 (sequence is synthesized)
tcaagaattatttattgagcatctactatgtgaacttctaggcacaggggatatagcagagaacagaaacaaagtcctttttctcatggaacttacaagaaaatatataatgtgtcaaaa

SEQ ID NO: 916252 - DNA, 120 bp, Artificial Sequence
  ENSG00000233237_131 (sequence is synthesized)
tataaacatcttgtgtatctatgtaaaatatctaattttattcaatctttttattgccttgtcctccaaaaccaagtgtatttaaatattccagaatatttctttcattgactatggaaa

SEQ ID NO: 916253 - DNA, 120 bp, Artificial Sequence
  ENSG00000233237_132 (sequence is synthesized)
actttgatataaagctatataattttggtttttgtttagtattattcttctagatatgttctagttgttaactagcctgttttgtgacatgagtaagtaggattattaagcatgcttgag

SEQ ID NO: 916254 - DNA, 120 bp, Artificial Sequence
  ENSG00000233237_133 (sequence is synthesized)
taaatatatatatgagggggcttcaaaatattcatggaaacattgagttaaaagctacaaataaaaaatataaattttatttctcagagtaagctccatcagggtcaagacacttttgta

SEQ ID NO: 916255 - DNA, 120 bp, Artificial Sequence
  ENSG00000233237_134 (sequence is synthesized)
agcaatgataccagacatttattccatccctaaagaacagggtcttgggaatttcaccacatcagtgccatctttttaacattattaactgaagaaaaatgagtgctctgacagattttt

SEQ ID NO: 916256 - DNA, 120 bp, Artificial Sequence
  ENSG00000233237_135 (sequence is synthesized)
ttaagattaggaaacaaaagtccaaatgagccaaatcaggacagtaaggtggatgcctagtgacattccactgaaactctggcaaaattgcccttgtttgatgagaagaatgagcagaag

SEQ ID NO: 916257 - DNA, 120 bp, Artificial Sequence
  ENSG00000233237_136 (sequence is synthesized)
cattgtcatggtggagagggagtctggtatagctttcctggacatttttctgctaaacctttggctagctttccccaaacactctcataataagtagatgttatcattctttggcctttc

SEQ ID NO: 916258 - DNA, 120 bp, Artificial Sequence
  ENSG00000233237_137 (sequence is synthesized)
agaaagttaacaagcaaaaagacttaagcatcccaaaaaactgttgccatgaccttagctcttgactgcttggcttttctttgactgcaccacatccccttcttggtagccattactttg

SEQ ID NO: 916259 - DNA, 120 bp, Artificial Sequence
  ENSG00000233237_138 (sequence is synthesized)
attgtgctttgtcttcaggatcataccagtaaagctgtgtttcatctcctatcacaatccttcaaagaaaagctttaagaccttgatctcacttgtgtaaaatttccactgaaagctctg

SEQ ID NO: 916260 - DNA, 120 bp, Artificial Sequence
  ENSG00000233237_139 (sequence is synthesized)
ctcttgtctgcagctcatctgagtgcaatgattttggcacctatagagtggaaagtttgctcaactttaattttgcagtcagaattgtgtaagctgaaccagttggaatgtctgtggcgt

SEQ ID NO: 916261 - DNA, 120 bp, Artificial Sequence
  ENSG00000233237_140 (sequence is synthesized)
tggctatggtttgtactgttaatcatcagtactcttcaattagggcacaaacaagattttttttttccttgcaaattgatgtagtttgtcttctatagtgggcttcatcttcaacatcat

SEQ ID NO: 916262 - DNA, 120 bp, Artificial Sequence
  ENSG00000233237_141 (sequence is synthesized)
ctcatcttttcttaaaataaattattcatttgtaaactgccaatttctttggggcattgcccccactaacattttgtaaagcagcaatgatttcctgattttcccacccaaacttcccca

SEQ ID NO: 916263 - DNA, 120 bp, Artificial Sequence
  ENSG00000233237_142 (sequence is synthesized)
taaatttgatgttcttgctttaattttagcagaattgacattgctctgataagggctcttttcaaactgatttcttatccttttttgtgcctcaaaatagatcctgttcagacatgttac

SEQ ID NO: 916264 - DNA, 120 bp, Artificial Sequence
  ENSG00000233237_143 (sequence is synthesized)
aaattagtacaagtttattttgatataagaaaaaattgaaatccatgtatagtttttccataatatgtattttccatgaactttttgaaattcttcgtatttgctgagatgatattgcta

SEQ ID NO: 916265 - DNA, 120 bp, Artificial Sequence
  ENSG00000233237_144 (sequence is synthesized)
aaaaagttacatgtttgtgtgtttatatatgttgcatatgttatatatattcaaattatcattgtatctgatacaagtaaacatattaatttgaacctaactctattcaagtttgtaact

SEQ ID NO: 916266 - DNA, 120 bp, Artificial Sequence
  ENSG00000233237_145 (sequence is synthesized)
attcaagtttgtaactctctaaatactggtaaggatgatttatctttatgttatgtttatatattggttgctaagcaaacgccataaagactttaaaagaacagattacttttaaatgta

SEQ ID NO: 916267 - DNA, 120 bp, Artificial Sequence
  ENSG00000233237_146 (sequence is synthesized)
aacatccatttatatttgaaaaaagacataagctttaattgacaagctttgtaagcctaattgtgtcattaaaaactcagtagaaataaaggtatcatatgtactttattcatttatgaa

SEQ ID NO: 916268 - DNA, 120 bp, Artificial Sequence
  ENSG00000233237_147 (sequence is synthesized)
ccattttttgtaaggaatcattttatcaactaggatgacaagaggcctctcccatcctggttgcacatcactttctataacagagagacatgggccagaagccctgatggagaaagcagc

SEQ ID NO: 916269 - DNA, 120 bp, Artificial Sequence
  ENSG00000233237_148 (sequence is synthesized)
caatgtcccttacatttccacctttggcttgaaaaaaagatctgtgcactaaatacagggaaaaaaaaatgaagttaggctggaagaagaaagacattgttacatggtaaaattggaaag

SEQ ID NO: 916270 - DNA, 120 bp, Artificial Sequence
  ENSG00000233237_149 (sequence is synthesized)
attcataccaacagtacgggataaagcaggggtccccagcccctgggccacggaactggactggtccagggcctgttaggaactggactgcccagcaggaggtgagtggtaggaaatgag

SEQ ID NO: 916271 - DNA, 90 bp, Artificial Sequence
  ENSG00000233237_150 (sequence is synthesized)
cagcaggaggtgagtggtaggaaatgagcatcacagtggcattacattctcataggagtgccaaccctattgtgaactgcacatgtgagg

SEQ ID NO: 916272 - DNA, 120 bp, Artificial Sequence
  ENSG00000233237_151 (sequence is synthesized)
agcccccgcatccatgaaaaaattgttttccatgaaactggtccctgctgccaaaaaggctggggaccggtggtataaagtacgtctgagaatgtatacttactgagaatgtacctttat

SEQ ID NO: 916273 - DNA, 120 bp, Artificial Sequence
  ENSG00000233237_152 (sequence is synthesized)
accctgtaagataccatagtgttttatcattttataaaagctgaggctcagagagggttctaagagtactcaaggtcacaaagttaatcaactgtctagggaagctagaatttcaagtga

SEQ ID NO: 916274 - DNA, 120 bp, Artificial Sequence
  ENSG00000233237_153 (sequence is synthesized)
accctatctctaatttggctcaagaaagaatttaaatttaaatgaccagatgtaattttcaaatttgtatacatgttacatgagtacattctccttttaaaatattgccaataaggttga

SEQ ID NO: 916275 - DNA, 120 bp, Artificial Sequence
  ENSG00000233237_154 (sequence is synthesized)
aatcatctttgatacccaagttctagtcccatcccctcctcttttctccagtggtgactcacactatcgtttccagatatccctccctgtcacacacgcgtgcacatatactgtgttaaa

SEQ ID NO: 916276 - DNA, 120 bp, Artificial Sequence
  ENSG00000233237_155 (sequence is synthesized)
tacagagatgggtggtcgcttacctgtgtgtttgatacataatagtatttggtcaaagtaacttttatactggtaaaacctcttcattggaacaataatgcctcatcaaaatctgaactc

SEQ ID NO: 916277 - DNA, 120 bp, Artificial Sequence
  ENSG00000233237_156 (sequence is synthesized)
ataccactaagtattattataataatttggtattctatagcagtaacagttatttccaaagacattccaatatgcctgtagtaaatattctagatttaattaaaatattggcaggactac

SEQ ID NO: 916278 - DNA, 120 bp, Artificial Sequence
  ENSG00000233237_157 (sequence is synthesized)
cgttttccagattaaattaaaaagcaattattagcattgcagattaagtttttaaatgaatatttcaattcagcgacactggctagaatatcttctgttttgtcacagtgtcacagatcc

SEQ ID NO: 916279 - DNA, 120 bp, Artificial Sequence
  ENSG00000233236_0 (sequence is synthesized)
ataccacatccaaatggctcaagccggtggctagagataagaacttagcagcatttttctcacctagctgactggttcccctttctttaaacagacactccaggcacttgtttgtgaact

SEQ ID NO: 916280 - DNA, 120 bp, Artificial Sequence
  ENSG00000233236_1 (sequence is synthesized)
taaagtgccccacatcctatttccttatgcatactgctaactgccaaaatattctctctctgtccacctgaccctccattcctgcttcctgtgacctgggaatggagaattaccctctgg

SEQ ID NO: 916281 - DNA, 120 bp, Artificial Sequence
  ENSG00000233236_2 (sequence is synthesized)
actccttgtgccctccctgctcaggatatcagcacagagggacgaaggcaattgcctaccctgcttgagagatgcagaggcctggtgtggagttagcagtattatgagattggatcagcc

SEQ ID NO: 916282 - DNA, 120 bp, Artificial Sequence
  ENSG00000233236_3 (sequence is synthesized)
ggacacactatggagagtttcttgtgccaagatcagacatggtatatgcaagaataaatgtgtgcgtgaatcaaaccagaggttgtgtttattttttaattactatattgtattcttgct

SEQ ID NO: 916283 - DNA, 120 bp, Artificial Sequence
  ENSG00000233236_4 (sequence is synthesized)
aacctgactaatccagccagcaaccttacaattctaattatctgactgtagatcctcccaggttgtctatgtacataaacttgtcctcactttgcaaaagctaactatcttgtttctttt

SEQ ID NO: 916284 - DNA, 120 bp, Artificial Sequence
  ENSG00000233236_5 (sequence is synthesized)
ttttccaatcatgtcaacttaattttggcttatttgtttatttatgcactgaatgttgaattgaagagatatggtgaaaatattttacttgcttttgatttcgaaggaaaagctcttaaa

SEQ ID NO: 916285 - DNA, 120 bp, Artificial Sequence
  ENSG00000233236_6 (sequence is synthesized)
atttactattaaatggaattattattgcaagtttttataaactaaggaaattacttgtgtcattctatttaagattcttttcaattggatcatgcactggtattgaacataatctaataa

SEQ ID NO: 916286 - DNA, 120 bp, Artificial Sequence
  ENSG00000233230_0 (sequence is synthesized)
cgattctgggagaggaggtgctcggaggaaagggcgggggttgctgatgtaatggggagaagtgattaatccttcggttcgccgtttcagcttcccccctaccccaaccttcacccgatt

SEQ ID NO: 916287 - DNA, 120 bp, Artificial Sequence
  ENSG00000233230_1 (sequence is synthesized)
tttttgagctgaaaaaaaagtggaacgagggagccaatctttggtcccacaaactgcaaggaaaagaaaaaccctcaacaggaattacctttatacctgatgcccccaacataatctctc

SEQ ID NO: 916288 - DNA, 120 bp, Artificial Sequence
  ENSG00000233230_2 (sequence is synthesized)
cccttctctcttttgttgtgcattttttggatgtggtaaaactggcagtttatctgattatctggttttcagaactttgggcgatgtctctgagtgtcatcagttgctctctaggtttga

SEQ ID NO: 916289 - DNA, 120 bp, Artificial Sequence
  ENSG00000233230_3 (sequence is synthesized)
catagataattaagcaactacaaagcgtgataaagcttttgagagggaggaaaatgtattttggaaggagggagagacgcaaagaggcgagcctgtgtgttgagtcccagacttggtgtg

SEQ ID NO: 916290 - DNA, 120 bp, Artificial Sequence
  ENSG00000233230_4 (sequence is synthesized)
tgactacaggcaaagtacttcacctttctagatgtcagccccgcccccctcacctcccaagtttaaataagaacttattttagactacatgatcctgttttcaatttttaagagttctgt

SEQ ID NO: 916291 - DNA, 120 bp, Artificial Sequence
  ENSG00000233230_5 (sequence is synthesized)
acactcgcctgggtctccggttggcggctcggacggagttcatttgccgggctgaggtggcggcgttggcggagggacacacacacgcacacgcacagcgagcttcggggcaggagaaag

SEQ ID NO: 916292 - DNA, 120 bp, Artificial Sequence
  ENSG00000265179_0 (sequence is synthesized)
atccgaacatggtttttggagagccctctttgtcaacatctgcctgcctgttgcctttaagtacagaatattttgttgcactgttgcgctccgatttttattcatgaaatgacttccttt

SEQ ID NO: 916293 - DNA, 120 bp, Artificial Sequence
  ENSG00000265179_1 (sequence is synthesized)
tagtccctcaaggaacatattaactattctgtgctgtcctcttggatgataagatccggagtcatcgacttctcataaacacctttcactcatacaatccaatttttaagaagtccaatt

SEQ ID NO: 916294 - DNA, 120 bp, Artificial Sequence
  ENSG00000265179_2 (sequence is synthesized)
gttttgatggttttcaatttcacccgtttctcaaggacagcctcaccaatcagagctctggtctctggaattaagcatcatcaagctctcctattaataaatttaatttagatctcctaa

SEQ ID NO: 916295 - DNA, 120 bp, Artificial Sequence
  ENSG00000265179_3 (sequence is synthesized)
actcgccttttctccatccttggagaggcccgggcaaggcaagcgcatcattccgcacgcctcgcacccagcctttgctcggcgatgcgcctcagccctggcccgggtaccccgaaccct

SEQ ID NO: 916296 - DNA, 120 bp, Artificial Sequence
  ENSG00000265179_4 (sequence is synthesized)
ggggtctttctggatattgccctgcctcgagcccagatgctggaatcctaatacagaacccagaacccatctctccgtccaaatcaatgatcagcggccccccagagctaatgttcctgg

SEQ ID NO: 916297 - DNA, 120 bp, Artificial Sequence
  ENSG00000265179_5 (sequence is synthesized)
gcggggctcggagaaggcagcttcgcaggcagaacgcgcgctcctcgctgccccaggcgccgctggtacgaaccctcccctacccagggctcatccacagcctggcacatcggtccgcga

SEQ ID NO: 916298 - DNA, 120 bp, Artificial Sequence
  ENSG00000265179_6 (sequence is synthesized)
ctctggggctgcctccgggaacctgggccgcgcctgccggttagaaacccggggttaagaaaaaagccaaggttcctccatcccgggccaggcagggctgctctcccggtcctgcctgcc

SEQ ID NO: 916299 - DNA, 120 bp, Artificial Sequence
  ENSG00000265179_7 (sequence is synthesized)
tgctggctttcccttcctcctcctttgcgcctgtttttccccctccttcgcagtctcgtccttgttcttccctctcttaagtcgcttttcctcaatcacaccgggccaacaccctcccca

SEQ ID NO: 916300 - DNA, 120 bp, Artificial Sequence
  ENSG00000265179_8 (sequence is synthesized)
ccgcacgccccccaagacagcctgggattcaaaatgcagttggaacacggatcacttgaaagaaagctcttcaggggaaagaattggaatgaaatgaaaagaaagggtggaggagagaga

SEQ ID NO: 916301 - DNA, 120 bp, Artificial Sequence
  ENSG00000265179_9 (sequence is synthesized)
gagaccccacccggatagtccagaacaagcagtaacaaagcaaagtccgagggagcttcacgctcaacccccggccaggctccagagctgaagttctcctaactcgtcccaagaataggt

SEQ ID NO: 916302 - DNA, 120 bp, Artificial Sequence
  ENSG00000265179_10 (sequence is synthesized)
aaaagaaaccaagctaggggccgtgccctgcccccatcctgtgggccgggttgggggagggggggttctccagcggccagaagctcactggctctacccgggaccctgagctgcctaggg

SEQ ID NO: 916303 - DNA, 120 bp, Artificial Sequence
  ENSG00000265179_11 (sequence is synthesized)
ctgggggaggcgtccgagcagtcgcggagcctgccagaccctcggctagaatggggacccgctgtccagccgaggctggcggaggcgcaccgggggcgcagagggcgatgctagtagtct

SEQ ID NO: 916304 - DNA, 120 bp, Artificial Sequence
  ENSG00000265179_12 (sequence is synthesized)
ggacccaaaggactgcaggaaggagaccgtgaggaagcgtctgtgcctgggaagccccagctcctgcttgggccaggcagccagcacctacctgatcccggggaaccggagtccggcggc

SEQ ID NO: 916305 - DNA, 120 bp, Artificial Sequence
  ENSG00000265179_13 (sequence is synthesized)
ggcaggtgagctgtagacgctgctgtgcatgattatcccatagaccagcagggccagcctcgctccgctacacatggtcattctgcgcaggatgggaaagaggacacacagctgtgagaa

SEQ ID NO: 916306 - DNA, 120 bp, Artificial Sequence
  ENSG00000265179_14 (sequence is synthesized)
cgcccctggcctcccaccctccaaccccaaaaagctctggaagccgggggagggacggagcgaagccccggctccctgagttgaacagcacttggcgacagccggtgcgcgccctgccac

SEQ ID NO: 916307 - DNA, 120 bp, Artificial Sequence
  ENSG00000265179_15 (sequence is synthesized)
ttcttgcttgctatagttagaaaaaaatatatatatatgcatctacccggcgcccaataactagccagacccggctgaaggaaagctaactcccctgacgcgatgccaagcgaaagaatc

SEQ ID NO: 916308 - DNA, 120 bp, Artificial Sequence
  ENSG00000265179_16 (sequence is synthesized)
agcagtcgagtgagccggtcgctttggtaagattttccctcccttacccttcaactcctcccgctgccaggagagctgccaggtaggacggcgggcaaagcgcttcttcaagttcctgcg

SEQ ID NO: 916309 - DNA, 120 bp, Artificial Sequence
  ENSG00000265179_17 (sequence is synthesized)
ctggagtcaccacccgagaggcatcgccgtctggcgttggtgtctgagcagaagccgcaggaaccagcgggagcagcaggaggagctgcgggactcgtttgccgaggctcgtgttctgct

SEQ ID NO: 916310 - DNA, 120 bp, Artificial Sequence
  ENSG00000265179_18 (sequence is synthesized)
caaaagtttgtagacgcgcagaaccaggagggagcgtgacacggagagaagggggcgcagagagagaggcagaagaaagaaagagggggcgatgaggtgaagcgcggaggagcaaggtgg

SEQ ID NO: 916311 - DNA, 120 bp, Artificial Sequence
  ENSG00000265179_19 (sequence is synthesized)
ggggaggaaggcaagggagagggcgggcggctagcccgcctttgtaggagccgcgggccaggcagccgcgagggtcggcggcgccttctctgctccgaggtctctccggctgcctctgaa

SEQ ID NO: 916312 - DNA, 120 bp, Artificial Sequence
  ENSG00000265179_20 (sequence is synthesized)
tctctttactttttcatcaagcctcaccaatcagagctctggtctctggaattaagcatcatcaagctctcctattaataaatttaatttagatctcctaatttcttgcgtatgttcttt

SEQ ID NO: 916313 - DNA, 120 bp, Artificial Sequence
  ENSG00000265179_21 (sequence is synthesized)
cagatagaccattaaatgtggaagtcgttttgtttttaaagggaagtcttggaggattttcagtaaatctctcctgagtctggctgccgttgacagtagggctatgagtagattgatgag

SEQ ID NO: 916314 - DNA, 120 bp, Artificial Sequence
  ENSG00000265179_22 (sequence is synthesized)
agctcatgctgcctccggagcgcggcctgcggagctgtccagactccgggtgctgaagtgtagggtaacagatgctacaaacgttgaaaattgccaccggtttaatttttcaccagagcc

SEQ ID NO: 916315 - DNA, 120 bp, Artificial Sequence
  ENSG00000265179_23 (sequence is synthesized)
tctaaatttgaagatttggcagtagtgctattaacgtggcgattcatcgcctaaatcacccccaccgttcagatacatcctttccctcttgtagcgtccataaatgccctaatgctgaga

SEQ ID NO: 916316 - DNA, 120 bp, Artificial Sequence
  ENSG00000265179_24 (sequence is synthesized)
atgctccccatccctgcctggatttgaggaaaaagcattctgtcccccgttagtcctggcttttggatttctagaccggctgtttggctactttcacaccttctgtggctcttacagatt

SEQ ID NO: 916317 - DNA, 120 bp, Artificial Sequence
  ENSG00000265179_25 (sequence is synthesized)
ttaaaaattgatgttgtgaaattgtgttttccacaagaagtgaaattttaagaatttgggggcgagaaatatgtttttccactttgtttacaacttcagctctgtttgggagacacagac

SEQ ID NO: 916318 - DNA, 120 bp, Artificial Sequence
  ENSG00000265179_26 (sequence is synthesized)
agactgggaaagcatgagggttcccagtacaagttcacctgatgaaggtttctaacaggaatccctctgctggaaacagttaatttttttaactgaaaatgatgtgggaagaggaaagca

SEQ ID NO: 916319 - DNA, 120 bp, Artificial Sequence
  ENSG00000265179_27 (sequence is synthesized)
ataagggaagaccatatccacccagaggcttccaatttcctgggtaattgaagaaggttcatatatttctactccagtaagagaactcaggtctatttctttaaaaaaaaaaaaaagaag

SEQ ID NO: 916320 - DNA, 120 bp, Artificial Sequence
  ENSG00000265179_28 (sequence is synthesized)
aagaagaaagaaagaaagaaaatagagccatcaataaccattagagtgcattttaattatttggatcttacacaaaaattaggggaaattccagtttagtgggagggtttcctgttacta

SEQ ID NO: 916321 - DNA, 120 bp, Artificial Sequence
  ENSG00000265179_29 (sequence is synthesized)
cgatttggatctcacatttaaataagctatattagttctgcatgctttttccaagatattatatttctccttctaaatgctgttcctgctcttatttgagatttaatacttcctccttct

SEQ ID NO: 916322 - DNA, 120 bp, Artificial Sequence
  ENSG00000265179_30 (sequence is synthesized)
taaaaaaaaaaactaagttttgtttattcctggccatgaatgaccgaaaactgtctgcttcctcttagtttattcctggccgtgcttcagattgtctgccttcaataaagcttcaaacca

SEQ ID NO: 916323 - DNA, 120 bp, Artificial Sequence
  ENSG00000234279_0 (sequence is synthesized)
acaagagggcggtgtgactagcaaatgaagcgtagaagacccatcagcagtggaggttgctggggacaacggctgatgaagccttctcacggtgcaggatacttgtctctcccaaaccaa

SEQ ID NO: 916324 - DNA, 120 bp, Artificial Sequence
  ENSG00000234279_1 (sequence is synthesized)
ccaaggctgcattaacctttcctgaaaataaaaaacagttctgcttttaccatttgggggcctgaggcaagtgttcaaatagaagccctcctgccagtctattaaatgaagctactaaac

SEQ ID NO: 916325 - DNA, 120 bp, Artificial Sequence
  ENSG00000234279_2 (sequence is synthesized)
gggtctacttactgcctttcctgccacaagaccttgtcttgtgcccagagggcctcaggcacgtgcgtgtggacaccacattcccatccactagaatggcaaacattacaaagactgttt

SEQ ID NO: 916326 - DNA, 120 bp, Artificial Sequence
  ENSG00000234279_3 (sequence is synthesized)
aaagtgttgtcaaggacgtgaagcaattgaaacccttagacactgccggtggggatgcaaaatggcacagtcgctttggaaaacagtatggcaatttctaatgaggtcccacatgcagct

SEQ ID NO: 916327 - DNA, 120 bp, Artificial Sequence
  ENSG00000234279_4 (sequence is synthesized)
catcaggaatgtgtggctcacagttctggaagacggaggtccgaggtcgaaggcccagcagcttcggtgtctggtgcggaaccgccttccagctgcccgggggcacaggcacgcagaaga

SEQ ID NO: 916328 - DNA, 120 bp, Artificial Sequence
  ENSG00000248397_0 (sequence is synthesized)
agcctgagctctgttctgggaccccgctttactgaaataagataaccttcaatgttttagcccagcaaatctcattgccccacagcataaaaccaaggttgagaggctttctggggtccc

SEQ ID NO: 916329 - DNA, 120 bp, Artificial Sequence
  ENSG00000248397_1 (sequence is synthesized)
ttctgttgtcttgctgcctatctgtaagtagtaaaaagtctcttcatgcagcttgttgtatgcacaggtgttttctctcactggactcagacaagttggtgacccgcacacaataaacct

SEQ ID NO: 916330 - DNA, 120 bp, Artificial Sequence
  ENSG00000248397_2 (sequence is synthesized)
gctccacaacaagaggagaaggaattccagagctcaaaatggagaaaggaacagagtaagaacaatggcttcaggaggaaaatgcaatgatagaagctttgaaagaaagacaactagaat

SEQ ID NO: 916331 - DNA, 120 bp, Artificial Sequence
  ENSG00000248391_0 (sequence is synthesized)
aggtcataaaggaagagggcaacgttatcatctgactgcttgtagctgtggaagggcggcgtagaagaggaaaggctgggggtttcggatggttgtttttgaagccatcagtattcttga

SEQ ID NO: 916332 - DNA, 120 bp, Artificial Sequence
  ENSG00000248391_1 (sequence is synthesized)
agaagcagcatatcttgaactgtcctatgggtgaaggctttgatgtggtcctgtaaaaactgggaagatttggaggatcatctgaatacccatccaacagagatccatgattcatgtatt

SEQ ID NO: 916333 - DNA, 120 bp, Artificial Sequence
  ENSG00000248391_2 (sequence is synthesized)
tctcaagacagccatacactaaaattataagatcataagaatattaattatattctaccaatgcaatacaagcattgaaatggatggcatctgatcctgcttcatgtgattcttcattta

SEQ ID NO: 916334 - DNA, 120 bp, Artificial Sequence
  ENSG00000248391_3 (sequence is synthesized)
gctctggactctttacatcattaaggctttttctttgcaggaatttaaaagcaaccctatgaatataacatttgtcaaaaagagcaagtgccaagccagttgagaataaccttacaatgt

SEQ ID NO: 916335 - DNA, 120 bp, Artificial Sequence
  ENSG00000248391_4 (sequence is synthesized)
tgccactgcctgacatgtgaaagagagcatccaggataagccacctgtcaaactgtcaactttatgcagatatacaagtgacaggtttgagatcagcccagcccagtcaacagagaaata

SEQ ID NO: 916336 - DNA, 120 bp, Artificial Sequence
  ENSG00000248391_5 (sequence is synthesized)
aacattaaaaaaaaaaaaaaaagaaaaactaagtttgggatgattcgttgtgcaccaaagacttgaatgtgaccaagtgctaaaaattgtccattatttacccaacatactttgtcttga

SEQ ID NO: 916337 - DNA, 120 bp, Artificial Sequence
  ENSG00000248391_6 (sequence is synthesized)
attatttacccaacatactttgtcttgaccgaactttagtcaggcttttctcctccctaaatgcccctagacattggcttgcctacaagctcaagtaagcactaaagcaccaagttacag

SEQ ID NO: 916338 - DNA, 120 bp, Artificial Sequence
  ENSG00000248391_7 (sequence is synthesized)
aacattcctctcaacagctcattctgaaaattggcagaccacagaaacattttatgttaaaccatcctgaccacgtcgttggctcatgtctaccatctgccctattattcacaaagttct

SEQ ID NO: 916339 - DNA, 120 bp, Artificial Sequence
  ENSG00000248391_8 (sequence is synthesized)
tgctagcactaacctccctattttttttgcttttttgtttacttttgagacacttgcagatcttgaggttagagcgtttccccattgcgagagtgtttttgaataaactctctccttatt

SEQ ID NO: 916340 - DNA, 120 bp, Artificial Sequence
  ENSG00000248391_9 (sequence is synthesized)
tgcaatacaagcattgaaatggatggcatctgatcctgcttcatgtgattcttcatttagctctggactctttacatcattaaggtaccctgaatatattcagtatggctttttctttgc

SEQ ID NO: 916341 - DNA, 120 bp, Artificial Sequence
  ENSG00000248391_10 (sequence is synthesized)
atcttctacttgaaccagtgccaaattaatgttgcaagctttgtcttgaaatattttcttctgagcatcagccagagatcactgattggttcacaggaataagcagggttactctaaact

SEQ ID NO: 916342 - DNA, 120 bp, Artificial Sequence
  ENSG00000248391_11 (sequence is synthesized)
gcttgaaaaggaaacctcaaaaacaactgatgaaactagaatttaataacaagtgtaccataattcttgaaacataatttttctctctctagtctttcatttttaccaaagacaaatcat

SEQ ID NO: 916343 - DNA, 120 bp, Artificial Sequence
  ENSG00000248391_12 (sequence is synthesized)
gaaacatgcactaaccagtggaaaagcttgcctaagtgattgttgtcataatgacacggattcaatgaataattctattcatggaatttcatcagcttaataaggaaagagtaaacaaaa

SEQ ID NO: 916344 - DNA, 120 bp, Artificial Sequence
  ENSG00000248391_13 (sequence is synthesized)
ttgcatttatcagcaagtactaatttattgaaggtccattataaacagcccttttttatgtaatgtaaaagtcttaatgtaaagacacttacattaatattacaactagttttaaattat

SEQ ID NO: 916345 - DNA, 120 bp, Artificial Sequence
  ENSG00000248391_14 (sequence is synthesized)
gtatcacaaagaaaatggcctggaaaatcacacaaaatataatatcctaatttgcttagaagggttgggtctaatctatatcatgggattcttttggatcatcatgccagcagtggaaga

SEQ ID NO: 916346 - DNA, 120 bp, Artificial Sequence
  ENSG00000248391_15 (sequence is synthesized)
acacttaaaatcaaaactaacaactataacaaagttctgagctagtctgagatagtttagtcttccaatcagttgtaggtgtgtgcaatgatttgtggcaataaggaagcagacagcaaa

SEQ ID NO: 916347 - DNA, 120 bp, Artificial Sequence
  ENSG00000248391_16 (sequence is synthesized)
tattaaatctgatgataatcagtcattagaatgacatgaaggcagaataccatatgtactttgcaactcctcccatcaaaaagtagaatctatctcctcatcctttgaatcaagtctggc

SEQ ID NO: 916348 - DNA, 120 bp, Artificial Sequence
  ENSG00000248391_17 (sequence is synthesized)
tttgttactgggtttgaactatagaatatagcataaatgacagtgtcagttctgagcatacatttcaagaggtcttgcaggttttgctctcattcttttacagttctgctgctatataaa

SEQ ID NO: 916349 - DNA, 120 bp, Artificial Sequence
  ENSG00000248391_18 (sequence is synthesized)
aggattccagcttatgcaacatgaaaatggcaaggatgaagacctttatgatgatccatttccatttaatgaatagaagaagtgttatcaattctgttgatggaccccttaatctcttct

SEQ ID NO: 916350 - DNA, 120 bp, Artificial Sequence
  ENSG00000248391_19 (sequence is synthesized)
gactttgatggaaatttgttgcatagaaagattctcagataagacttttttaaagatgatcccagccgtggctttgtaccctcaaatacctatgagttaggtaaattcctctactcttga

SEQ ID NO: 916351 - DNA, 120 bp, Artificial Sequence
  ENSG00000248391_20 (sequence is synthesized)
ggtcccacgacaacttggagctcctgagcctttcagaaagtgacattctttacttaccgaggtcaagaaccctgcacaaggcctttgtagacaagtatgaggccagttttcttaagggaa

SEQ ID NO: 916352 - DNA, 120 bp, Artificial Sequence
  ENSG00000248391_21 (sequence is synthesized)
ttttattggctctgtaagtcaaatttaattccttaaagaaaagcacatcatttcagtaaagccttgataaaaataacaagtttctccagttgtgtcatgttccaaaaaaaaaaaaaaaaa

SEQ ID NO: 916353 - DNA, 120 bp, Artificial Sequence
  ENSG00000248391_22 (sequence is synthesized)
attttaatcattgtacacaaataagtcacagtcaattgctgtattagttcattcttgcattgctatagactacttgagactgggcaatttacaaagaaaaaagatttaattgactcagtt

SEQ ID NO: 916354 - DNA, 120 bp, Artificial Sequence
  ENSG00000248391_23 (sequence is synthesized)
ctgcaggctgtaaaggaagcatggcagaggaggcctcaagaaacttataattatggtggaaggggaagctggcacatcttacatggccagagaagaaggacaagagagagggggaggtgc

SEQ ID NO: 916355 - DNA, 120 bp, Artificial Sequence
  ENSG00000248391_24 (sequence is synthesized)
cacacacttttaaacaatcagatatcataagaactcactcactgtcatgagaacatcaggggggatccactgtcatgatccaatcacctcccaccaagcccctcctccaacattgaggat

SEQ ID NO: 916356 - DNA, 120 bp, Artificial Sequence
  ENSG00000248391_25 (sequence is synthesized)
gtggggacacaaatccaaaccatataaattgcttattagggttttaagaagaaatgtatccagatccatctgtaactgtcaacagttcatagttagaaaaataaaaaaaatctagagaga

SEQ ID NO: 916357 - DNA, 120 bp, Artificial Sequence
  ENSG00000248391_26 (sequence is synthesized)
atataaagaaatttaaagattgaaaagtgaaatactctcacctactcatcagttaacaaatattaactcatatgaagtgaatattatgtagcacatgttattctgtacactgaagatata

SEQ ID NO: 916358 - DNA, 120 bp, Artificial Sequence
  ENSG00000248391_27 (sequence is synthesized)
gggatgacaaagaaattagagttctggcctaaaggagtttacatattttaaaaggatacagatattaaccatttatacataaacacataagatttcttgttctgagtgctaagaacaaga

SEQ ID NO: 916359 - DNA, 120 bp, Artificial Sequence
  ENSG00000248391_28 (sequence is synthesized)
gtctaaggaggcatttgactgagagtggctaatgagagatttctcctttagctagcgttgtcaggaagataaaaccctaatgatgaaaaaaaggcagtagtgaaaatatcttctagaata

SEQ ID NO: 916360 - DNA, 120 bp, Artificial Sequence
  ENSG00000248391_29 (sequence is synthesized)
atgtttcaagcttaaggaacgctacagcaaagggccctagttaaattggacctgaaatactggagggttataaacatcacagtactactaatgtggtttttcactgtactttcatcctat

SEQ ID NO: 916361 - DNA, 120 bp, Artificial Sequence
  ENSG00000248391_30 (sequence is synthesized)
agttgtaatggtttccaggttatggcactggtagaggatcgtgactgcaagttgtccaggttcttggtgttttgaacaaagaattcgacaaatctcacagcaaagaaaagaaagaataaa

SEQ ID NO: 916362 - DNA, 120 bp, Artificial Sequence
  ENSG00000248391_31 (sequence is synthesized)
ctttgtcttgaaatatgtaagacttataactttgttgttattccactcgattgtgatgaatatgggtattctgggtttccatttaaactttacatacggtttttaaatttctccaaaaaa

SEQ ID NO: 916363 - DNA, 120 bp, Artificial Sequence
  ENSG00000248393_0 (sequence is synthesized)
attatgaacagggtgaccaggataggacttagtgttacaatatatgtaagtaaagaactgaagaaagagaaggaaggagttccttgttgctcaactcacaattactacataccacttaac

SEQ ID NO: 916364 - DNA, 120 bp, Artificial Sequence
  ENSG00000248393_1 (sequence is synthesized)
cttattaactacggcagaatcataatgagcatttcctatagaacaaagtcatctgcctgtgattttttcacttatttttgggtagctcaatagagccacaaagtgaagaaagcaataatt

SEQ ID NO: 916365 - DNA, 120 bp, Artificial Sequence
  ENSG00000248393_2 (sequence is synthesized)
atgtggccaccagagctgctattagagtgtcacctgttgttctatccattgtctcaaagacagttttaaaaaagaccctatacgcttcattaagagcatttgttcactgtggggtggagg

SEQ ID NO: 916366 - DNA, 120 bp, Artificial Sequence
  ENSG00000248399_0 (sequence is synthesized)
cccagggtacactcagaccaggaaggcaggcatctcagcagtgacaagaacaggctaaaggacaagagccctactccaatattctgagtttgtgagaaccccaggattttaccacccagg

SEQ ID NO: 916367 - DNA, 120 bp, Artificial Sequence
  ENSG00000249042_0 (sequence is synthesized)
gcccaggctggcgcccctgctaaccgggcactggtggcagggaaattcgactccacaaaccacaggcctcggcgggggaagagcccggcgggcgccagcgaagcggaaccaaacggagcc

SEQ ID NO: 916368 - DNA, 120 bp, Artificial Sequence
  ENSG00000249042_1 (sequence is synthesized)
gcggcacgcaggcgcaaaggctggcgttcgaggttcgtttacgcgccgcttcgccgtgcaggtggtggcgaagcgctcctccgaaaggtttcggaagctggtggtagctctgaagataac

SEQ ID NO: 916369 - DNA, 120 bp, Artificial Sequence
  ENSG00000249042_2 (sequence is synthesized)
gctgcgttagggcatactgcggcggaggatggaactccgattgaaagcagttgctggagtggagcacgaatttcaacaagccgcatgttgaagtgtgaggcgtgaaagggtatgtctgat

SEQ ID NO: 916370 - DNA, 120 bp, Artificial Sequence
  ENSG00000249042_3 (sequence is synthesized)
tgaagtgtgaggcgtgaaagggtatgtctgatatttgctttaaaatgctccagcaaagaaattaagggatggatgaagcaaaagagccaggtatggtggctcatgcctctaatctcagca

SEQ ID NO: 916371 - DNA, 120 bp, Artificial Sequence
  ENSG00000249042_4 (sequence is synthesized)
gagaccatcctgaccaacatggtgaaactcgtctctactacaaacataaaaaaattagctgggcgtggtaccacgcacctgtaatcccagctactcctctggaggctcagacaggagaac

SEQ ID NO: 916372 - DNA, 74 bp, Artificial Sequence
  ENSG00000249042_5 (sequence is synthesized)
taccacgcacctgtaatcccagctactcctctggaggctcagacaggagaacatccattccagcctgggcaaca

SEQ ID NO: 916373 - DNA, 120 bp, Artificial Sequence
  ENSG00000249042_6 (sequence is synthesized)
aaaaaagaaaatgtctttatttcattttctttcctaaagaatatatttgctggataaaggattctgtgttgacagttttgttgctttttaaaagcactttataaatgttgctccatggtt

SEQ ID NO: 916374 - DNA, 120 bp, Artificial Sequence
  ENSG00000249042_7 (sequence is synthesized)
tctgatgagaaatctgccatcactgaaatctttggttctcctatatacaaagtgttgttttcttccagttgttttcaaagtattttctttacagttggtttcatcactttgattatgacg

SEQ ID NO: 916375 - DNA, 120 bp, Artificial Sequence
  ENSG00000249042_8 (sequence is synthesized)
tgcctgggtgtggttttcctttttgggatttgctgtgccagcagaccggctttaaatagaatgctatgtaaatgtatgtgaatatttgttttttgccagatgtttggaagtttttagcta

SEQ ID NO: 916376 - DNA, 120 bp, Artificial Sequence
  ENSG00000249042_9 (sequence is synthesized)
ttatttcttcagatatttttttcttccaattgttctttctgggctcctaagacatgaatattagactgtttcatattgtcccacagatccccaaaggtcttctcatttttttcacttttt

SEQ ID NO: 916377 - DNA, 120 bp, Artificial Sequence
  ENSG00000249042_10 (sequence is synthesized)
tctctgtcattcagactagataatttctgctcatgtatcttcaaatttactgactcttccctcagtcatcttcattgtgttgagaccttccagtaaattttgttattgtattttcagttc

SEQ ID NO: 916378 - DNA, 120 bp, Artificial Sequence
  ENSG00000249042_11 (sequence is synthesized)
tacaatttccacttgtttctttttatagcttctatgctgagacttttagctttccatttatttcaacagtgtttccctttatatatttcctttggagaaatgtcttctttgtgtagcatg

SEQ ID NO: 916379 - DNA, 71 bp, Artificial Sequence
  ENSG00000249042_12 (sequence is synthesized)
atatatttcctttggagaaatgtcttctttgtgtagcatgattaaaataactagtttaacggccaggtgtg

SEQ ID NO: 916380 - DNA, 72 bp, Artificial Sequence
  ENSG00000249042_13 (sequence is synthesized)
aggcgtggtggtacacaccctgggggtggaggttgcagtgagccaagattgtatcactgcactctagcctgg

SEQ ID NO: 916381 - DNA, 120 bp, Artificial Sequence
  ENSG00000249042_14 (sequence is synthesized)
ttgcagtgagccaagattgtatcactgcactctagcctgggtgatagagactgtctcaaaaataaataaaaaaaataaaataactagttttaagtctttttctgataattctgacatttg

SEQ ID NO: 916382 - DNA, 120 bp, Artificial Sequence
  ENSG00000249042_15 (sequence is synthesized)
ggtaaccttagagttggctcttgttcattgtcttttccctagagagttgcttaggtttcacaagttctttgtccaatcattttgggttgtttctgggatatatttggaatattatgatat

SEQ ID NO: 916383 - DNA, 120 bp, Artificial Sequence
  ENSG00000249042_16 (sequence is synthesized)
tctctatcctgtttaaatcttcataagaatgtttttgttttgttttgttttagcagaccatcaattcagttaagtttcagagcacacatcctggccactttttttggtggctgtggttcc

SEQ ID NO: 916384 - DNA, 120 bp, Artificial Sequence
  ENSG00000249042_17 (sequence is synthesized)
aatgttagttttcactgcctttgttaagctgttctttgccccagttgtgcaccatctagtggccaatctgaaacttggacagtggcctacactgtaattcagtgttcagaacctttgctc

SEQ ID NO: 916385 - DNA, 120 bp, Artificial Sequence
  ENSG00000249042_18 (sequence is synthesized)
agctgcttctggttagtttcacacatacacagcttgtgagatgatcccaggattttattgacagatttaagggttccttttcttcagttccctcctatttgtgatcttacctatactctg

SEQ ID NO: 916386 - DNA, 120 bp, Artificial Sequence
  ENSG00000249042_19 (sequence is synthesized)
gtttctagaaccccattcttggtttttggctagaaagtcagggcgttagcctccccattgccagtgttctgccctgcaatgtctgccactagtgcaccagggggaagagaagagtgatac

SEQ ID NO: 916387 - DNA, 120 bp, Artificial Sequence
  ENSG00000249042_20 (sequence is synthesized)
ctctttactgctgcgggattgatgtagagcaaggaaagtccagaaggttccaagtcattacccatggttctcctggtggggcggtgggtcttactgcatctttcctgaggctctcttaga

SEQ ID NO: 916388 - DNA, 120 bp, Artificial Sequence
  ENSG00000249042_21 (sequence is synthesized)
atactgcaattaaattaaaaagggttttgtcccatagcctccaacctcctttctggtcctctgactagaaacagcaaattgttccttggactatttttctctctgtcagctagcatttcc

SEQ ID NO: 916389 - DNA, 120 bp, Artificial Sequence
  ENSG00000249042_22 (sequence is synthesized)
agtgatcctcccacctcagcccccgtgaagctgggaccacaagtatgagccaccacacctggcaaaatttttttaattttgcagagacagtgtctccctgtgttgctcactctggtctca

SEQ ID NO: 916390 - DNA, 88 bp, Artificial Sequence
  ENSG00000249042_23 (sequence is synthesized)
tgctcattatgtgtctatgtgtggattttctagtttattctgtttgggatttgtctggcttctagaatgtgtggggtcatgtctttca

SEQ ID NO: 916391 - DNA, 120 bp, Artificial Sequence
  ENSG00000249042_24 (sequence is synthesized)
atttgtctggcttctagaatgtgtggggtcatgtctttcatcagtttttaaaattctgcattctatctaagtatttgctctgtcctattcttgcctctcctctcacagctaatgaagcac

SEQ ID NO: 916392 - DNA, 120 bp, Artificial Sequence
  ENSG00000249042_25 (sequence is synthesized)
ttaggatttttcactgtattctctacaggtcttctgtttttttttccagctgtttctcccatggtgcactgtgaatagtttctcctgagttatcttccagtttataaactaccccaattg

SEQ ID NO: 916393 - DNA, 120 bp, Artificial Sequence
  ENSG00000249042_26 (sequence is synthesized)
gctacattctattacatctatttactgagttttaaagtgcagtttttatgtatattcttgtaatgtttatattcagttcttttccagattagctccacaactttttatcgtatagtttcc

SEQ ID NO: 916394 - DNA, 120 bp, Artificial Sequence
  ENSG00000249042_27 (sequence is synthesized)
catttcctgcaagtacattcacacaccttatttccttaaacaaagaaaacaaatctaatacctatatctgtgagtttgttttcattgcttcaagtaattcttgcctctggaatctagttt

SEQ ID NO: 916395 - DNA, 120 bp, Artificial Sequence
  ENSG00000249042_28 (sequence is synthesized)
ccttatatgactactttttactatgtgttactagacatatttgaaaagtaatttgaggcctacaatgaaattacttttccatgaaaagtatttacattttattttctctgtcacctggag

SEQ ID NO: 916396 - DNA, 120 bp, Artificial Sequence
  ENSG00000249042_29 (sequence is synthesized)
gcattactagtgtgggaacaccttaaaggaagctcagtgcttaagattctttagatcactggggcaattctaaacttgcctgttcttttacattggttcttccacctctgattcattatc

SEQ ID NO: 916397 - DNA, 120 bp, Artificial Sequence
  ENSG00000249042_30 (sequence is synthesized)
atcctaaaggtgaaagtatttgggagtctcagcctattgtgtggagggtctcctgttaggttcatcaccttatatgggccctgaactttaatttctgtccccctcactcataaggttgtc

SEQ ID NO: 916398 - DNA, 120 bp, Artificial Sequence
  ENSG00000249042_31 (sequence is synthesized)
agagtaagggtacatgcttgcttctcttattctctttacttttggacttggcattccttattgtctggaaaatctctttgatgttttaagattattcttgtattttaatcaggaattgtt

SEQ ID NO: 916399 - DNA, 120 bp, Artificial Sequence
  ENSG00000249042_32 (sequence is synthesized)
ttcaacaggaacatgatgtaaatatcctagcatgcaattttcagaaacaagtagtttcccacaattgaatctttgctcctacagggccaaatcctactctttctcttggcatgctctgca

SEQ ID NO: 916400 - DNA, 120 bp, Artificial Sequence
  ENSG00000249042_33 (sequence is synthesized)
cttaagcgcatactacttgtggcatggaatccataaatgttgataaagaactacgcctaattctgtcagaacaattaatcatttttagaaatttttgcttagaaacctggtaaagtgctc

SEQ ID NO: 916401 - DNA, 120 bp, Artificial Sequence
  ENSG00000249042_34 (sequence is synthesized)
tgcatgtagcaagtatacgaacacacaaagtttgttgaatagctgcataaaacaaatgggctagattttacttcatatttcaaaattcagagaaagagagtagtattaaaagacataagc

SEQ ID NO: 916402 - DNA, 120 bp, Artificial Sequence
  ENSG00000249042_35 (sequence is synthesized)
caaaaatagatcattgcagactgagtacaaagaaccattctatttcttctcttaaaaaattaaaatttcaaattaagtaccaatgaccaaataagtaacaaacacattcagaaacatact

SEQ ID NO: 916403 - DNA, 120 bp, Artificial Sequence
  ENSG00000249042_36 (sequence is synthesized)
atatgtctacaaagaatacttcaaaatgtgcctccaaacttcaggcacataattccaatttttattgaatatagagattttatgaaaacaaatccaaagctgtcccatcatggaacagcc

SEQ ID NO: 916404 - DNA, 120 bp, Artificial Sequence
  ENSG00000249042_37 (sequence is synthesized)
ctctaccatttggttattttaagactgttcaattacttacatggcagaatacatacactatatttagaaaacataaattgggtttgatatgcaattgttttcatcttacaccatttcaat

SEQ ID NO: 916405 - DNA, 120 bp, Artificial Sequence
  ENSG00000249042_38 (sequence is synthesized)
aaatttcacaaattataacaggttgccattttattgaatatctgcgacactttacattgttcaggaagtagctacttccagaaggctgatattctcctccaaattgtctttggctaagta

SEQ ID NO: 916406 - DNA, 120 bp, Artificial Sequence
  ENSG00000249042_39 (sequence is synthesized)
ctacagatgtgattcagtccaaactatatgcccaaactgattaaaattctcagtctctcctagcttgagacctcagatcctgagttataactttgacttgatcttcaagttgagatgctt

SEQ ID NO: 916407 - DNA, 120 bp, Artificial Sequence
  ENSG00000249042_40 (sequence is synthesized)
cataaatatttttcttaaaacagggctatttaacataatttctttttcttgaaatatatgagtgtttttgatacaaaaacatatattacacatgagaatgtttaaagcatcaaaataatg

SEQ ID NO: 916408 - DNA, 120 bp, Artificial Sequence
  ENSG00000249042_41 (sequence is synthesized)
attaaattttttacataacttaaatgacaggactacaatatgccccccacttttttgctgtttgaagtaaagaggaaagctctgtaacaatttcaaatacataggatttaacttatgtta

SEQ ID NO: 916409 - DNA, 120 bp, Artificial Sequence
  ENSG00000249042_42 (sequence is synthesized)
atatcctgttataaaaaataactaccatataaagaatttaaaatatgcaaaagtaattagttcatttaaatttatacttatacactggtgtcaatgaaaatatgcgaagttgccaagaaa

SEQ ID NO: 916410 - DNA, 120 bp, Artificial Sequence
  ENSG00000249042_43 (sequence is synthesized)
tttctaaggattaaagtggaagtaaaaaaacctgtttcaggcttcatttattgctacataatgactacttcaagggtcatctggcccgtcgtcagtcactcttagaagtggtaaatacag

SEQ ID NO: 916411 - DNA, 120 bp, Artificial Sequence
  ENSG00000249042_44 (sequence is synthesized)
atggatgaagcaaaagaggaagctactcaaaaacatactctgccaatataagggagacaccaagaaaaaggaaaacctgaaatccaagaaaaagaggctacccacacagaagagacaaat

SEQ ID NO: 916412 - DNA, 120 bp, Artificial Sequence
  ENSG00000249042_45 (sequence is synthesized)
gcaattcacagatgactgtaaaagggcagtccaggaagagagttgtgcaacaggcctagagagcaacccatcaagatggaggcaggaaagatgtcgcaaaacagattatcagatgtgttt

SEQ ID NO: 916413 - DNA, 120 bp, Artificial Sequence
  ENSG00000249042_46 (sequence is synthesized)
gaatctactaagaggagactgatgtatctggttcaagagattaatagatcaaataaagaatacaaaagacacattaaaaagatataaaacatttatttataaagaaatataaaaggtaca

SEQ ID NO: 916414 - DNA, 120 bp, Artificial Sequence
  ENSG00000249042_47 (sequence is synthesized)
tgtacaaaagaattaagatattaactaggaaaaacaaaaattatacaagaaaggaaataacctcacacttaccttgttcagctacatacaatatttacatagttaaaatgaggtaaacac

SEQ ID NO: 916415 - DNA, 120 bp, Artificial Sequence
  ENSG00000249042_48 (sequence is synthesized)
caaataactaaaagttaacatgtaactaatttgggaatatagaggggagaggggaagtgaaatgcagtgtttaaaggtaggagttggtacaaaaaacctaaactcccatcttctgtaata

SEQ ID NO: 916416 - DNA, 120 bp, Artificial Sequence
  ENSG00000249042_49 (sequence is synthesized)
ggaaatgagtaaactatacttcaaatcgcattaggatgggaatggggaggggatatcgccatatatctaaatatgtcattttaaaaaactggaagtgataaggaattgaagtcactgact

SEQ ID NO: 916417 - DNA, 120 bp, Artificial Sequence
  ENSG00000249042_50 (sequence is synthesized)
ctggagcagcctttctcaattaaggttcggcgagagaattaatctttaatgccctaaggcttccattttatgtaataaactaacttctctcctatgcatccatcatattattagctacct

SEQ ID NO: 916418 - DNA, 120 bp, Artificial Sequence
  ENSG00000249042_51 (sequence is synthesized)
accctctttgggagaattaagaaaatagttgctcaaatcatttttcttgttcagtgattcagacagaaagcactgattgagaaagactgcttctggagagtgggattcaggggtgagaag

SEQ ID NO: 916419 - DNA, 75 bp, Artificial Sequence
  ENSG00000249042_52 (sequence is synthesized)
ggggcagaagaaagttttgatcttgttgcccaagctggagtgcaatatcgcgatctcagctcactgcaacctccg

SEQ ID NO: 916420 - DNA, 61 bp, Artificial Sequence
  ENSG00000249042_53 (sequence is synthesized)
tcttcttttttgagacagggtctcactctgttgcgcaagttggactgcagtggcacgatat

SEQ ID NO: 916421 - DNA, 120 bp, Artificial Sequence
  ENSG00000249042_54 (sequence is synthesized)
agccctctcttcttttttgagacagggtctcactctgttgcgcaagttggactgcagtggcacgatattagctcactatagcctccacgtgctgggctcaagcgatcctcccacctcagc

SEQ ID NO: 916422 - DNA, 120 bp, Artificial Sequence
  ENSG00000249042_55 (sequence is synthesized)
gtgtgtgccccacaacccagctaattttgtttattttttgtggagacaaggtctcactatgttgcccagaatggtctcaaactcctgggctgatgtgatcctcttgcctcagcctcccaa

SEQ ID NO: 916423 - DNA, 120 bp, Artificial Sequence
  ENSG00000249042_56 (sequence is synthesized)
gagccaccacacccagacagtttttcattataatccttgaagtactatttgactgtttatgtacaggtatcccttcgataaatataaacattaaatttaaaataaacataatagtaaaaa

SEQ ID NO: 916424 - DNA, 120 bp, Artificial Sequence
  ENSG00000249042_57 (sequence is synthesized)
gtagtagtaacggaactctgaatacaggatgtatttaacaaattaagcacagaaactgaaaggtctagaaatagtttcttattagcaaaagccagagaattttttagaaataaattatgg

SEQ ID NO: 916425 - DNA, 120 bp, Artificial Sequence
  ENSG00000249042_58 (sequence is synthesized)
aattcattaaataacatatatttacaaaacattcctatctatatagcaatgctctactaagcattatgtaatttcaggtgccaagaaagatataaaaaaagataatataatttgtaaaag

SEQ ID NO: 916426 - DNA, 120 bp, Artificial Sequence
  ENSG00000249042_59 (sequence is synthesized)
gtatgatatgacaatgtaaatacggtatactgaaatgttttaacatgaaatctcattaagctgtgtatatttcccatttcaatcaatcagtatgtactttttgtgccaataatctaccat

SEQ ID NO: 916427 - DNA, 80 bp, Artificial Sequence
  ENSG00000249042_60 (sequence is synthesized)
aatcagtatgtactttttgtgccaataatctaccatattcagtataagacataaaagaaatataagatatactccctttt

SEQ ID NO: 916428 - DNA, 120 bp, Artificial Sequence
  ENSG00000249042_61 (sequence is synthesized)
aaatttaagaaaaaatcttcgtaatatttacaataaaatggtttttaaaaatctcttcatgattacaaaaattggcagtaacatggaagattaaccagaaaaccaacaaaaccaacagta

SEQ ID NO: 916429 - DNA, 120 bp, Artificial Sequence
  ENSG00000249042_62 (sequence is synthesized)
aggagacacctaaaatggttaaggtaagagatgaaggcctgagctgagataatgcagtggagaaaaaaaggaaatacatataaaggtggctaaaatgagccaggcatggtgatgcccgcc

SEQ ID NO: 916430 - DNA, 89 bp, Artificial Sequence
  ENSG00000249042_63 (sequence is synthesized)
acaacagagtgagatcctgtctcaaataaaaataataaaatgaaataaaagtggcaaaataatgagaagttttggagaccgaaagcaag

SEQ ID NO: 916431 - DNA, 120 bp, Artificial Sequence
  ENSG00000249042_64 (sequence is synthesized)
agtggcaaaataatgagaagttttggagaccgaaagcaagggagaaagctggattagtgccaggtttccaccatgagtggctagggtagatggtggtgccactgaccatgacaggcaata

SEQ ID NO: 916432 - DNA, 120 bp, Artificial Sequence
  ENSG00000249042_65 (sequence is synthesized)
caaagaggagcaggattaagggaaaacatgagttcacgtttggactgtttgaagtaccttgagaacatcctgggagagatatccaaaaggcagctgaatataagaatctggaatgcagga

SEQ ID NO: 916433 - DNA, 120 bp, Artificial Sequence
  ENSG00000249042_66 (sequence is synthesized)
gagaagtctgagatagataaagatttgggaactggcaacacacagctgttaatggatgagatcacctaggaagagaatatatttagaagaggacaagagcctgccatcagataactaaag

SEQ ID NO: 916434 - DNA, 120 bp, Artificial Sequence
  ENSG00000249042_67 (sequence is synthesized)
atcacaactcatgttcctaaaaccactcaggataaaactttgcccagttatatgtacttcagtagaaaaatatccaatatataatgttaaatgaaagaaaatcaaatcacaaaactttat

SEQ ID NO: 916435 - DNA, 120 bp, Artificial Sequence
  ENSG00000249042_68 (sequence is synthesized)
gcatagtgcaaacctatttttacaaataagttgtaaaaaaaattaacaaatgcatagtaaaaaaatatgaaggaacaaacattaatgatgttagtaatactataaatctaggaatgggat

SEQ ID NO: 916436 - DNA, 120 bp, Artificial Sequence
  ENSG00000249042_69 (sequence is synthesized)
atactataaatctaggaatgggattatgtaagcctttcagagctacatgatatgtcttcatactattttactttttttttataagcatatacttggccagcgtggtggctcatgcctgta

SEQ ID NO: 916437 - DNA, 120 bp, Artificial Sequence
  ENSG00000249041_0 (sequence is synthesized)
aacggccaggcagcggcccgggcctgcagcggtcgttggtcgtcggcgtaagcgtgtcaggaaaataacacgaaatgcagcacaggtgaatgagaatcaagcagattctcctgaaacaca

SEQ ID NO: 916438 - DNA, 120 bp, Artificial Sequence
  ENSG00000249041_1 (sequence is synthesized)
tccgcaagctgaaggcagagaaggcctgcaagaagcccctggctaaccagataggcccccaaggttaagaccaaggaagtacaggagtgccccgaggagccacttcaggccaagaaggag

SEQ ID NO: 916439 - DNA, 120 bp, Artificial Sequence
  ENSG00000249041_2 (sequence is synthesized)
cccccctctcttatgtctgtcattgcaataggcctggaggccttgagaaggattgcaccattgcccactcgtggagagccagggtggtccatttgccatcactgcatcccagcttctcag

SEQ ID NO: 916440 - DNA, 120 bp, Artificial Sequence
  ENSG00000249041_3 (sequence is synthesized)
cattggaccagaaaatcacatggtcctaatactcacgggacccagttgcaaagtttgggaaatgctttctttcctctccaaactttcacaatgcaaagtcctccgtgaacttgcctcctg

SEQ ID NO: 916441 - DNA, 120 bp, Artificial Sequence
  ENSG00000223960_0 (sequence is synthesized)
gcaggagcttgaatttcagttttcttatgaggaattttccagaaaagatatcttcactgtgaaataactaaataaatgcccactcagtacagtcactgtctcccttttggaacttgatgg

SEQ ID NO: 916442 - DNA, 120 bp, Artificial Sequence
  ENSG00000223960_1 (sequence is synthesized)
caccttaagcccaggtttgcctccactctagaaactcatcagagtgatgcccttctcaaatgggggaggtcccaaagcggatatcctggcagtgtgaaaggccggctaaaggtttgtgcc

SEQ ID NO: 916443 - DNA, 120 bp, Artificial Sequence
  ENSG00000223960_2 (sequence is synthesized)
atcttctttgatcaagttacagagcagagtttccagggctggggattgaagtcctgcctcctccctttgtctctggttgtcctcggtaatgtttttccctcaaggtactcatgatacttc

SEQ ID NO: 916444 - DNA, 120 bp, Artificial Sequence
  ENSG00000223960_3 (sequence is synthesized)
ccatgggctttccctgcactccaaacacagagctgagacttccacctaatgtagaaagctagcacgagccggcgctgacagatggaagacttgagatgttacaagattatatatggaaac

SEQ ID NO: 916445 - DNA, 120 bp, Artificial Sequence
  ENSG00000223960_4 (sequence is synthesized)
acaaaaggagataccggagccatgacagactgtgatggggctggtggacagttcagcaagacattgatattgtccattggcgctcagttcatctgtaatgacacattcaaggatgacgat

SEQ ID NO: 916446 - DNA, 120 bp, Artificial Sequence
  ENSG00000223960_5 (sequence is synthesized)
gttgctcttgggtggccgcggcgcccgctccctctgaattcgccgggcagggatacagccgcccggggcctcttgctcgtgcttggttttccggaccttgcttcctaaagggtctttagg

SEQ ID NO: 916447 - DNA, 120 bp, Artificial Sequence
  ENSG00000223960_6 (sequence is synthesized)
ggttcccggactcctccgcctgggagcctctatccgcctgggagcctctatgcgccccgcaaagcccccggcagagccgaggggaggcttcattggcgacctggtggggcctcgcggccc

SEQ ID NO: 916448 - DNA, 74 bp, Artificial Sequence
  ENSG00000223960_7 (sequence is synthesized)
cagctttgatcttctgaaagtgtgccaccacacctgattttctttttggtagagatggggactcactatgttgc

SEQ ID NO: 916449 - DNA, 120 bp, Artificial Sequence
  ENSG00000223960_8 (sequence is synthesized)
tatgttgcccaggctggtctcaaacttttggcctcaagggatcctcccaccttggcctccgaaagagttgggattataggcatgagccaacatgcatggtcaaatgctttttaaactagt

SEQ ID NO: 916450 - DNA, 120 bp, Artificial Sequence
  ENSG00000223960_9 (sequence is synthesized)
aacatgcatggtcaaatgctttttaaactagtaattcacctgtgtatggttatgtcaaagaaaaatacaaggttgcatacgcttagagaaagtaaggaagtaacccattacatgtatgtt

SEQ ID NO: 916451 - DNA, 120 bp, Artificial Sequence
  ENSG00000223960_10 (sequence is synthesized)
tgtaaattttacttaggccatcattttttattttcacctttgaatttcaaagtaaattagagatatgtaaataacagaattatcaacattaaaatcttattcacaatggctaacaagaac

SEQ ID NO: 916452 - DNA, 120 bp, Artificial Sequence
  ENSG00000223960_11 (sequence is synthesized)
cccatcgtaacagttctttgttacatgaattcaaatacacagcagaccaatcatgttccctgaaatttaacaatcaatcatacttaataaaggcctgttagtgctgtccctcaagactct

SEQ ID NO: 916453 - DNA, 120 bp, Artificial Sequence
  ENSG00000223960_12 (sequence is synthesized)
aattctaaagggcttcctttgaattccctttataaagctttgtgcaaagaagagcttaagcaccagtaagaaagactgtcgctagcatttttatttcatcatcaacaacaaacatgcagt

SEQ ID NO: 916454 - DNA, 120 bp, Artificial Sequence
  ENSG00000223960_13 (sequence is synthesized)
ttctttctctgatgtgcatggcactgtaaaatgggtgctacactctctcttgtggtacaaagtttataaatacagtatactgatacaaagttgaagccattaaaaagagcttaataacaa

SEQ ID NO: 916455 - DNA, 120 bp, Artificial Sequence
  ENSG00000223960_14 (sequence is synthesized)
ctatgaggagataattaaatctggagtgttgatggaatctatgaagagatttagaaacaagacataaacactacggtaaaagttttacttgggaaggggccagaggggaactttttatgt

SEQ ID NO: 916456 - DNA, 120 bp, Artificial Sequence
  ENSG00000223960_15 (sequence is synthesized)
gctactgaaagattttttaagttgctccagatttactttctttctgctattatctttaaatactgcaaagcattgtgagctgcatcactttgtgcattgccacaggagataccggagcca

SEQ ID NO: 916457 - DNA, 120 bp, Artificial Sequence
  ENSG00000223960_16 (sequence is synthesized)
tgacagactgtgatggggctggtggacagttcagcaagacattgatattgtccattggcgctcagttcatctgtaatgacacattcaaggatgacgattaatgtccaatatgtataaagt

SEQ ID NO: 916458 - DNA, 120 bp, Artificial Sequence
  ENSG00000223960_17 (sequence is synthesized)
ggatccctttgtaaaaacaatacaattcttattattgtctttctttttaagcctccatggtatactacaccactcgcaatctttgttttgcttgtacaaacaaaaaaccacaactgctca

SEQ ID NO: 916459 - DNA, 120 bp, Artificial Sequence
  ENSG00000223960_18 (sequence is synthesized)
gctgtagcagttttcaaacacattacacttcataatgatctgacagtgttaaagacatacagatatctaggctgcactctagctcactcaatcagaaatatacagttgggggtggctgat

SEQ ID NO: 916460 - DNA, 120 bp, Artificial Sequence
  ENSG00000223960_19 (sequence is synthesized)
tcctacacttaaaaaaataacagctcccaaggcaattctaatatagttagttgaacactatttggaaattactgaaccacacagtaactttctcaaaagggaaagaaccatttgctagag

SEQ ID NO: 916461 - DNA, 120 bp, Artificial Sequence
  ENSG00000223960_20 (sequence is synthesized)
gactggagagattgtattttccactaggaagtcattttcaggaggcatttgaaccaggaataacttcggtcaaggcaaaacctcccttgtgtcttctattaaaaaaaaatgtttaattga

SEQ ID NO: 916462 - DNA, 120 bp, Artificial Sequence
  ENSG00000223960_21 (sequence is synthesized)
tacataataattgtatgtatttatgctgttgtccattcatgttcctaggttttaagtctgtgcagagtctagttctttatttatactgtaaatgggtcatggtattttaaaaacaatacc

SEQ ID NO: 916463 - DNA, 120 bp, Artificial Sequence
  ENSG00000223960_22 (sequence is synthesized)
tgacccaggaaacaaacgttcttcccatcaactgatgagccactcttactaaagatggctgaaatgagggcaaagaggaagaaatagaaacgtgtgcggtatgatttatttgaagtaggc

SEQ ID NO: 916464 - DNA, 120 bp, Artificial Sequence
  ENSG00000223960_23 (sequence is synthesized)
ggtcatatggcaattcatttgaggaactgagaagcttattccatggaggctgaactgttttatattcccaccagcaacgtgtaaggttccagtttatctacatcatcaccaacacttgct

SEQ ID NO: 916465 - DNA, 120 bp, Artificial Sequence
  ENSG00000223960_24 (sequence is synthesized)
gaggcagcagcaattttatcttctgggcaccttatcctcagacctcattttatcaatacatacggactgtctacaaccacgtaatatccttttcatcagccttatgaaattttcccccaa

SEQ ID NO: 916466 - DNA, 120 bp, Artificial Sequence
  ENSG00000223960_25 (sequence is synthesized)
tttatccaagtcaggatttcagtatgcagaagtctaatgtcatcttggagagttcattgtgcctcccccatatccaagaccatttactaaaaccttagttcagtctttaaagagtcacaa

SEQ ID NO: 916467 - DNA, 120 bp, Artificial Sequence
  ENSG00000223960_26 (sequence is synthesized)
gatcctattatgcctagttttttttccagtcttttaagtctattccttaccttgccaaaaaagtacctgtttctatggtttaacaaatggagcttagaatatggaactatggtaagtgct

SEQ ID NO: 916468 - DNA, 120 bp, Artificial Sequence
  ENSG00000223960_27 (sequence is synthesized)
ctttagaatttaaaataagttacatgtactggttttcctttattttgtagttttgttctcaaagaattccagatatgatttttttccagacaaaaatacctgctacatgcttccttctgt

SEQ ID NO: 916469 - DNA, 120 bp, Artificial Sequence
  ENSG00000223960_28 (sequence is synthesized)
ttaaaattttgagacaggctctcactatgttgcccaggtggtctcaaactcctgggttccagcgatgctcatgcctcagtctcccaaaggggtgggattacaggtgtgagccactttgcc

SEQ ID NO: 916470 - DNA, 120 bp, Artificial Sequence
  ENSG00000223960_29 (sequence is synthesized)
cagcccatttgtatatctcctttggagaatatctaggttcttttgaaggtagctgcatataaactagccaaattaacagactgtggtttttagatggctttccatatctacaagaactat

SEQ ID NO: 916471 - DNA, 120 bp, Artificial Sequence
  ENSG00000223960_30 (sequence is synthesized)
ttagttctcaaaactgggaagaaatgtttcagaggcatcattaattcataatctaaaaatttatcttgggtttccttttttcccccagattctgtatcctccatagtcctattcatgaca

SEQ ID NO: 916472 - DNA, 120 bp, Artificial Sequence
  ENSG00000223960_31 (sequence is synthesized)
tcatgacatgggtcgttcatctctgtattctaaaccctcaatgaactgtagacagtaataaatatttattggatgaatggtctctcatcagccaccttttctttttttttttttgagaca

SEQ ID NO: 916473 - DNA, 89 bp, Artificial Sequence
  ENSG00000223960_32 (sequence is synthesized)
agcctcttttcttttttttttttgagacaagtctaactctgtcacccaggctggagagcagcggcatgatcatggctcactgctgcctc

SEQ ID NO: 916474 - DNA, 120 bp, Artificial Sequence
  ENSG00000223960_33 (sequence is synthesized)
tgcccactcagtacaacagtgccgatgtaatagtaacaaaaagtctcagcctcatttaagataaaaggccatcatcagacaatgcaggacagattgtaacaataggaagtactacagaga

SEQ ID NO: 916475 - DNA, 120 bp, Artificial Sequence
  ENSG00000223960_34 (sequence is synthesized)
aactgagaagcttattccatggaggctgaactgttttatattcccaccagcaacgttagagacggggtttcaccgcgttagccagaatggtttctatctcctgacctcatgatccgccca

SEQ ID NO: 916476 - DNA, 120 bp, Artificial Sequence
  ENSG00000223960_35 (sequence is synthesized)
aggcgtgagccactgtgcctggccaaacgctggtaggttttgagtgagaccacattacatttaaatatatttacaatgttttctgctctattctttagtagacttttcctcacgtggtcc

SEQ ID NO: 916477 - DNA, 120 bp, Artificial Sequence
  ENSG00000223960_36 (sequence is synthesized)
ggatcttctatattctagttattatttgtaaataagaaaactactgacttttttctagtatattttctcagaataggattttctatttttctataaaatgaccaatgttatgaagcttcg

SEQ ID NO: 916478 - DNA, 120 bp, Artificial Sequence
  ENSG00000223960_37 (sequence is synthesized)
taagttttgtcaaagtgatacacacatacagcaaaaaatcaaatagtacagaagtataaaagcaacaacctctgccttgccccttctccaccttcaggtccccttcccagatacaataat

SEQ ID NO: 916479 - DNA, 120 bp, Artificial Sequence
  ENSG00000223960_38 (sequence is synthesized)
ttttagctttttatttttaattattctggttgttacctacataactctgggcaatatggaaaagttattgattttgtatattaatttcataatcagttaccttgatgaattctcttgttt

SEQ ID NO: 916480 - DNA, 120 bp, Artificial Sequence
  ENSG00000223960_39 (sequence is synthesized)
ctagtagtttttctttagggttttaaagggatacaatcataccatttgcagttagtaaccattttatctcctcttatttccaacttcgtactgttttctcttgtctaatttgtttttaat

SEQ ID NO: 916481 - DNA, 120 bp, Artificial Sequence
  ENSG00000223960_40 (sequence is synthesized)
tggtgggtacttctagaacaaggttaaataaaagtggtgttggtgggcgtccttatttctgatattaatgggaatgagtataatgtataaatatataaccatgattttggtttttttcca

SEQ ID NO: 916482 - DNA, 120 bp, Artificial Sequence
  ENSG00000223960_41 (sequence is synthesized)
agtttttatcagtaatgattgctgagttttatcaaaatttttttggcatccattgagaggattatatattactctttgacacattaatgtggttaattaaagtaaccaacttattaacct

SEQ ID NO: 916483 - DNA, 120 bp, Artificial Sequence
  ENSG00000223960_42 (sequence is synthesized)
cagtacaagatgcggatctcactatttgcccagactgatctcaaactcctgatttcaagcaatcctcctgccccaatctcctacagtgctgggattacaggagtgagtcactgtaccttg

SEQ ID NO: 916484 - DNA, 120 bp, Artificial Sequence
  ENSG00000223960_43 (sequence is synthesized)
cctcattgagtaatttttttctttatcatatacaatgtctgaaaggagctgccttctgtcttttgtccagttttaaagttgtttacagtgaaaggagggctagcccacacatgttattat

SEQ ID NO: 916485 - DNA, 120 bp, Artificial Sequence
  ENSG00000223960_44 (sequence is synthesized)
tcagttacccttaaattagagatgaggaaactgaggaactgaaaggttaagcaacttgccccaaatcacacagccgtttacctgtgatggagcttgaattcaaacccaggcagtctgtct

SEQ ID NO: 916486 - DNA, 120 bp, Artificial Sequence
  ENSG00000223960_45 (sequence is synthesized)
ttagagatgctcacttaattattgttctgtacagcttcttagaaaaatggctttatatatgtatgtaaaatgttttgtccagtgtaggtaacatagtcaatccttaataaagtctagcta

SEQ ID NO: 916487 - DNA, 120 bp, Artificial Sequence
  ENSG00000223960_46 (sequence is synthesized)
aattattctttaaaatcctaaagctcagtatgaatttgttcctagcccagtgtttcaaagcaaaagtcccatcatgtgagttgatctttattaacactaatttttattactgtcctacta

SEQ ID NO: 916488 - DNA, 120 bp, Artificial Sequence
  ENSG00000223960_47 (sequence is synthesized)
tacttgtcaatgctatatcattattttaatattgtactgaacattttacaaaggtgtttcaccataaggcatattgatctgtaatttttttttttctgttgaacttgctattgtcaggtt

SEQ ID NO: 916489 - DNA, 120 bp, Artificial Sequence
  ENSG00000223960_48 (sequence is synthesized)
ttggtgtattatgttggttttggagaataaatttaaaagtttcctttatgttatctatacattgcctgaaaagagtttaaatagcattgaaaatgatctcttctttgaagatttaaccaa

SEQ ID NO: 916490 - DNA, 120 bp, Artificial Sequence
  ENSG00000223960_49 (sequence is synthesized)
tttcacctgtaaatctgtctgtgctttgtaattttggtgatactgttgactcaaattccaaaagcagtaaatgcagtgttttatatttttctattaaaaatgtaaaatcaaattatatta

SEQ ID NO: 916491 - DNA, 120 bp, Artificial Sequence
  ENSG00000223960_50 (sequence is synthesized)
catctgtctgcactgacttcccaggttctgcatcattattggtttactgagacaatgcacttcacccgtccttcaatcccaaagtagcacagaatatcaggagttctttgagcccctaag

SEQ ID NO: 916492 - DNA, 120 bp, Artificial Sequence
  ENSG00000223960_51 (sequence is synthesized)
tgccctactttcccagggtcaggggaccctgacaagcaaggtccccacatctttctgtggttggatagggatataaaatttctcacacatgttaaatcaagatactttggccaggcacgg

SEQ ID NO: 916493 - DNA, 67 bp, Artificial Sequence
  ENSG00000223960_52 (sequence is synthesized)
gggaggctgaggtgttcccatctctactaaaaaaaaaaaaactttgggaggccgaggtgggtggatc

SEQ ID NO: 916494 - DNA, 120 bp, Artificial Sequence
  ENSG00000223960_53 (sequence is synthesized)
ttgtctaccttgatctcactttttccattgtagaaactgtgagttggggaaagttttccacacacttggtgctggacagattgtggcaaggggcaccacagatataaaaatctgattctt

SEQ ID NO: 916495 - DNA, 120 bp, Artificial Sequence
  ENSG00000223960_54 (sequence is synthesized)
ttaccatgctcagagttttttcacttctgtgtccccaggaattgactcatcctcatatctgagttctgggatattgttggtgataatctcagtgctgtatatttgtttttggttttctgg

SEQ ID NO: 916496 - DNA, 120 bp, Artificial Sequence
  ENSG00000223960_55 (sequence is synthesized)
tgtggaagtgaagccagcttgcgtctacactgccatttttgaactagaagtccacctgatgccatgtgggtctgctctaacaaagatgcctgtagctgtctctgtaggtacaattggagc

SEQ ID NO: 916497 - DNA, 120 bp, Artificial Sequence
  ENSG00000223960_56 (sequence is synthesized)
tactacctcataaagtttgtggtagcccactatctggtttttggaggggctagactggtaaattaaatggagatacaatttgaaccatcatccccgaatcttttaggtcttttaggatgg

SEQ ID NO: 916498 - DNA, 120 bp, Artificial Sequence
  ENSG00000223960_57 (sequence is synthesized)
cattaatttctgccattccctgaaatattattttttgatttactgtattggtatggagaagaggtcaatttttaaagcttccacctggccacttggcctttatcactatgttagctctta

SEQ ID NO: 916499 - DNA, 120 bp, Artificial Sequence
  ENSG00000223960_58 (sequence is synthesized)
ccacacacaccgagaaacctggtgccactaatcaagtgtatttatcacaattatacactcaaggactaggtgggtctgtggatatattgtgagccagacttgggccaggacaccctagga

SEQ ID NO: 916500 - DNA, 120 bp, Artificial Sequence
  ENSG00000223960_59 (sequence is synthesized)
cttggcctccataacccttactctaatcaagggcatatagtgagagttctgtgatatcattgttaactcagaccctgtttccaacagatatcaaaatgttgagtattcccctttcaccac

SEQ ID NO: 916501 - DNA, 120 bp, Artificial Sequence
  ENSG00000223960_60 (sequence is synthesized)
tgtatgatttcctgagtaatggtgataggtccctttggagaaggactagaggaatcattattgtgcacacttgtggtattacacaatccttcctcctggggacccagattcttctttagt

SEQ ID NO: 916502 - DNA, 120 bp, Artificial Sequence
  ENSG00000223960_61 (sequence is synthesized)
aatccttcctcctggggacccagattcttctttagttaatgggcctggatccaaaaacggactcaggtctggaaatcggacaaggggtcatgattattttttatttttatttatttattt

SEQ ID NO: 916503 - DNA, 87 bp, Artificial Sequence
  ENSG00000223960_62 (sequence is synthesized)
cacaatctctactcatgttgcctcagcctcccgagtaactggattacaggcgcgcaccaccttgcccggctaatgtttgtattttta

SEQ ID NO: 916504 - DNA, 120 bp, Artificial Sequence
  ENSG00000223960_63 (sequence is synthesized)
tgttggccaggctggtcttgaactactggcctcagggaatccaccctcctcggccttccaaagtactaaatttatagtcatgagccactgcaccccgccagtttaacttttttttaattg

SEQ ID NO: 916505 - DNA, 120 bp, Artificial Sequence
  ENSG00000223960_64 (sequence is synthesized)
tgagccactgcaccccgccagtttaacttttttttaattggcttagttgccaagagaggaagttggggaggatcctgaggagtgtatgttttgtccttggagagagagctcattgtcttc

SEQ ID NO: 916506 - DNA, 120 bp, Artificial Sequence
  ENSG00000223960_65 (sequence is synthesized)
aagcaaaagagggagcacactagcccttattagagaagagaggggcacttctgtagccttagaaggttctggaaacctgaggattgaagatttttcaggtgcatcaacccagatggtttc

SEQ ID NO: 916507 - DNA, 120 bp, Artificial Sequence
  ENSG00000223960_66 (sequence is synthesized)
atcccatgtgtcagggttccattttttcccaatcagggtcctgacaacagcacagtagacctgcctagcttgggtcctaacttctttggagttttattctcatgactaagtcctgggcct

SEQ ID NO: 916508 - DNA, 120 bp, Artificial Sequence
  ENSG00000223960_67 (sequence is synthesized)
ggtcctcagcttcctctcctcattggcttgagaacctgagagtctcatattctacgagggaggctttctggccctcacactgagtttttgtttgtttttgagacaagatcttgctttgtc

SEQ ID NO: 916509 - DNA, 120 bp, Artificial Sequence
  ENSG00000223960_68 (sequence is synthesized)
actaaggctgagtgtgtagttgcacccaggctgggagtgcagtggcacagtaagctactgtaaccttgaactcctggacccaaattatcctctggcctcagcctcttgagtaacagaaca

SEQ ID NO: 916510 - DNA, 83 bp, Artificial Sequence
  ENSG00000223960_69 (sequence is synthesized)
tatcctcccttttcagtcttctgaggcactggaattacaggcatgagccacggctcttggtcccacactcagcttctaattac

SEQ ID NO: 916511 - DNA, 120 bp, Artificial Sequence
  ENSG00000223960_70 (sequence is synthesized)
tgagccacggctcttggtcccacactcagcttctaattaccaactaatcactctcattcttttattttgagacagggtctcattctgtagctcaagctggagtacagtagtgcaaatata

SEQ ID NO: 916512 - DNA, 120 bp, Artificial Sequence
  ENSG00000223960_71 (sequence is synthesized)
gctcactgcagcctcaaactcctggggtcaggtgatcttcttgcctcagcttcccaaatagctaggactacagccacaagctactgggcatggataattttttaaatatttgtagagaca

SEQ ID NO: 916513 - DNA, 74 bp, Artificial Sequence
  ENSG00000223960_72 (sequence is synthesized)
tggcccattctcattcttctgttatctttttccaaggtatcggtctagctcagtaataactcttcagttccact

SEQ ID NO: 916514 - DNA, 120 bp, Artificial Sequence
  ENSG00000223960_73 (sequence is synthesized)
aggtatcggtctagctcagtaataactcttcagttccactgtctacactgtttcccacctgatcttcgtgcctgccggtgcatttctttgtgttgacatgccatctcagttcaccactag

SEQ ID NO: 916515 - DNA, 120 bp, Artificial Sequence
  ENSG00000223960_74 (sequence is synthesized)
tcaaagttttaataactgcactgtcagggtgtgctagcagttaacttctccctgccccagtgaggagactctcatcctataagtgagaaggcaagagaaatggctccaaaagcacactgg

SEQ ID NO: 916516 - DNA, 120 bp, Artificial Sequence
  ENSG00000223960_75 (sequence is synthesized)
agcacctactttcctgcaacccttctgataccaagtatcacagatgctgagatgaagattagtgggtaggagatttggattgccacctgtggaaagaaaggaaactccactgggtggagg

SEQ ID NO: 916517 - DNA, 120 bp, Artificial Sequence
  ENSG00000223960_76 (sequence is synthesized)
aagaatatggactatgatgcaatctcaaaggtggccttagctgacactaaggggaactctgaagctaggatggtctttcagattgttctaatatggggcaatgggactagtctttgcatg

SEQ ID NO: 916518 - DNA, 120 bp, Artificial Sequence
  ENSG00000223960_77 (sequence is synthesized)
cagcctggcccaagaaggaagtgtgacttcagatgaggtggctcttttcacttaagagggcaattctactgacagctgagggccgttgggtgcacactgccagagcgagaaaacaaaatc

SEQ ID NO: 916519 - DNA, 120 bp, Artificial Sequence
  ENSG00000223960_78 (sequence is synthesized)
ctctgtagggaaggggactgtgtggcatatcacagcacaccccgagaacaagggagcggctcttcatcaaataacacaatatgggcccacatattcccagaggctgctatagtgctgggc

SEQ ID NO: 916520 - DNA, 120 bp, Artificial Sequence
  ENSG00000223960_79 (sequence is synthesized)
acattagtgctcaataacttattgaattagtattatcatattgtgctattgccatcctcatcttttaaagtcacttatcacttaatggatgttcttgttagaactgacactatgaagatg

SEQ ID NO: 916521 - DNA, 120 bp, Artificial Sequence
  ENSG00000223960_80 (sequence is synthesized)
actatgacacaattacctgttgagcctatttgagaaattaacctatatttaacaagtttgactaattagattggttaagagccttagcagagggctaaacaaaatggtgttaaagaatac

SEQ ID NO: 916522 - DNA, 120 bp, Artificial Sequence
  ENSG00000249049_0 (sequence is synthesized)
cttctttgggaaaaaagcctttgtaactcttctttcttcttcctgcctaggacccatgtgcacaggcttagatgtgcaacagccatatctaattacaataatggcaagagccacctacta

SEQ ID NO: 916523 - DNA, 120 bp, Artificial Sequence
  ENSG00000249049_1 (sequence is synthesized)
aagacagaaaaagaggaccactgctaacccatttgacacctgtggaattagaaataagtgctatagaaacctgagggacacacagggaaatcagaagactaagtggagaagggagaatca

SEQ ID NO: 916524 - DNA, 120 bp, Artificial Sequence
  ENSG00000249049_2 (sequence is synthesized)
cagactgggttttgtattagaaaaaattatccagaagctgataccgtctgtcttaattaccatctgttaatttccttaccaagttctggagattaaaaatggacactggaggaacctaaa

SEQ ID NO: 916525 - DNA, 120 bp, Artificial Sequence
  ENSG00000249048_0 (sequence is synthesized)
atgactgttggcagcatattacgggcactcatggcctctgccttccttgcatgtcacagagggtcattcaatcccaaccagcaatatctacgcaggagggtgagaccgtgaaactggact

SEQ ID NO: 916526 - DNA, 120 bp, Artificial Sequence
  ENSG00000249048_1 (sequence is synthesized)
ccaatgcgacacagggtcaatattctgtgagcttccagaaagcaactaaaactattcagcttatcatatcatcatcacagccagaagacctgcaacatatttttgttgtctcaaagagcc

SEQ ID NO: 916527 - DNA, 120 bp, Artificial Sequence
  ENSG00000237413_0 (sequence is synthesized)
attgctgatttggtaaccacctcagagcctaccctatttattcccagcatggacctaaatccacttcagccaaaaatgaacaaagaaatgatgaagaacagagcctgtttctttctcagt

SEQ ID NO: 916528 - DNA, 120 bp, Artificial Sequence
  ENSG00000237413_1 (sequence is synthesized)
ggtgtactcagaaaatggatgcaagagtagaagctgatcctcgaggcttgcaaaagtggggttctttctgaaagtgaagccagcagccaagagccacccttcagaagatagaaggaagag

SEQ ID NO: 916529 - DNA, 120 bp, Artificial Sequence
  ENSG00000237413_2 (sequence is synthesized)
cagctgcatgagtgatggccacagcaatgcatgggtcctgtctgtccacgtagtcctctccatctgcccgtagcttgccaggtctcctacccacactggggaaattccagctgccggccc

SEQ ID NO: 916530 - DNA, 120 bp, Artificial Sequence
  ENSG00000237413_3 (sequence is synthesized)
tctttgggttgcacctcccctttttgcacagggctctattgggaaagcagctgtcatgtgtctatttgaaagacaagaaaccagtctagttatagaaaagagatttagattacatcagaa

SEQ ID NO: 916531 - DNA, 120 bp, Artificial Sequence
  ENSG00000237413_4 (sequence is synthesized)
taacaatgcaaatcatttgtgcagttcttagtacagaaaacagatttaggaacaaaaattgggagggttaaagaaagtggttttttattctgtcatcaaaattgttttttaaaaacacat

SEQ ID NO: 916532 - DNA, 120 bp, Artificial Sequence
  ENSG00000237413_5 (sequence is synthesized)
ctgtagtaagataaataattgtgtgccgacttcataaacagaatgaatgactgaattcacacaatgttatttactgtttcagggcacacacacatggtttccaagtggtttcttgccact

SEQ ID NO: 916533 - DNA, 120 bp, Artificial Sequence
  ENSG00000237413_6 (sequence is synthesized)
ttggccttcaactggccttgctattttccattgaggggtgtctgattgtctcctccacagccctgagtctaagcaaaagcccatgggttggttgactggtgttcttgttgtccttggaag

SEQ ID NO: 916534 - DNA, 120 bp, Artificial Sequence
  ENSG00000237413_7 (sequence is synthesized)
tggacagactggcagatgtggggctagtggggaagattctcgtaaacactttatttgttgtaagaactccagttggaatgtggcttccaatcatgggaggaggactgctttagaacagga

SEQ ID NO: 916535 - DNA, 120 bp, Artificial Sequence
  ENSG00000237413_8 (sequence is synthesized)
atttcctatctacctgatgaagggcactaccaggcggtcactctggctctgtccaccgatgcctgtgcccactttgtgcgacgtagcttccatggagacaagagcaatggtaatggaaga

SEQ ID NO: 916536 - DNA, 120 bp, Artificial Sequence
  ENSG00000237413_9 (sequence is synthesized)
agaaagtctggatgtactcttgcagaagcagaaagcttcatggaacaatattaatcttctggtcatctctgtgctggtctagttgcccataaagttgtcagattgactttggatttaaag

SEQ ID NO: 916537 - DNA, 120 bp, Artificial Sequence
  ENSG00000237413_10 (sequence is synthesized)
cctgaaaatgagtcccaaggaaatccgttgacatgaggcccaaggaagacagtttttggaaggggcaaggagggacagttctctgctccactgaagctaggtatggccatgtgacccatg

SEQ ID NO: 916538 - DNA, 120 bp, Artificial Sequence
  ENSG00000237413_11 (sequence is synthesized)
ttgccagtgaaacaggaggagaagggacatctgggtggaaacatttaagagtcaagtgtatttctccatactctctttctttggctttggcagtgatgaaggtcaatccaattacagttg

SEQ ID NO: 916539 - DNA, 120 bp, Artificial Sequence
  ENSG00000237413_12 (sequence is synthesized)
attcttgaacaacagaggtttgaactgtgtgggtcaacctatacgtggattttcttctgcctctgccacctctgagacagcaagaccaatccttccttttcctccttctcctcagcctat

SEQ ID NO: 916540 - DNA, 120 bp, Artificial Sequence
  ENSG00000237413_13 (sequence is synthesized)
acaatgtaaaaatgacaaggatgaagacctttatgatgattcacgtccacttaatgaacaacgtacctttcacttcccaccatgattctgaggcctcccgagccatgtggaactgtaagt

SEQ ID NO: 916541 - DNA, 120 bp, Artificial Sequence
  ENSG00000237413_14 (sequence is synthesized)
tttggaatgatgcctaataaaataaatggttgaccagaagattaataatgtgttggtttctcaatagaagaggaggaaaacatgtttttaagattcttaccaataaggctcactccaccc

SEQ ID NO: 916542 - DNA, 120 bp, Artificial Sequence
  ENSG00000237413_15 (sequence is synthesized)
agtcctgtgactcatgactcacctccaatcaagagatggactcagctcatgaggaccattttccatacccctatgactgcctccgcaaccaaccagcaacacccatcacctagtcacctg

SEQ ID NO: 916543 - DNA, 120 bp, Artificial Sequence
  ENSG00000237413_16 (sequence is synthesized)
cccaccatactatccttgaaaatctctaatcttcaagccttcagggagactgatttgaaacaaaagggaccctagaaatcttcagccatccaaaagaaggcaaaaaaaagagtatcaagg

SEQ ID NO: 916544 - DNA, 120 bp, Artificial Sequence
  ENSG00000237413_17 (sequence is synthesized)
aaagaggatggcaaacagaaaatgtaaaagaagatggtagaaatcacttcaagttggtaatcacaatatatgtaaatatattaaacacatccattaaaaggctatgtgattagattaaaa

SEQ ID NO: 916545 - DNA, 120 bp, Artificial Sequence
  ENSG00000268615_0 (sequence is synthesized)
ctctctttcaggtctcctgacttcccaccatgtgatgcaatgatcatcttgctggatttctgtgatgagagagggatgctgtggtatagaataaacatggaaatgggtcttgggaaattc

SEQ ID NO: 916546 - DNA, 120 bp, Artificial Sequence
  ENSG00000268618_0 (sequence is synthesized)
agtctctctctgttgcccaggctggaatacaatagcacgatctcaccctctgagtagccagaactacacatgcacaccactacacccaactaatttgaaatttctgtagagatgggggtc

SEQ ID NO: 916547 - DNA, 120 bp, Artificial Sequence
  ENSG00000268618_1 (sequence is synthesized)
gaacttctggcctcaaagaatgctcccaactcagccacccaaagcattgggattgcagccgtgagccactgcactcagcttccataaatgtttgtgaccccagagcatccactctgcctt

SEQ ID NO: 916548 - DNA, 120 bp, Artificial Sequence
  ENSG00000272748_0 (sequence is synthesized)
acaatgtctggttacttcagtcaagggcagaggggatgggggatgatcagtcaaagcattaaactggttaggaaattctagctacagctgcctttatgaacagctggggttatctcaaat

SEQ ID NO: 916549 - DNA, 120 bp, Artificial Sequence
  ENSG00000272748_1 (sequence is synthesized)
accagtattctgtacccacatctaatttatgcattcctgctttaaaacctttaacgtcttttaaatgcgttctggaccaagcctaaaccccttagtcctctaaaggtatgcatatctgca

SEQ ID NO: 916550 - DNA, 120 bp, Artificial Sequence
  ENSG00000272748_2 (sequence is synthesized)
tgtctgtgcccagcacaccctgtcctcactgcgatgccctcactccctgccttatctgataaagaccttggctaagcactcctcccaattcctgcttggctgctgcctcctctgtgaagt

SEQ ID NO: 916551 - DNA, 120 bp, Artificial Sequence
  ENSG00000272748_3 (sequence is synthesized)
tttcctggtttttgcaggtagcccacaggactgagagcctggcttcactccagcactggcgcttgttaagtgcttagctaatatttgttgaattatggaataaataaaagcatttaccct

SEQ ID NO: 916552 - DNA, 120 bp, Artificial Sequence
  ENSG00000225076_0 (sequence is synthesized)
ttttttttttcttttttcaaaatttccctttgaacataggattctctttttgatgtcacctgttcagtcaggtcaccggttaccttaacaactgctttgccatgtattagttttacgttt

SEQ ID NO: 916553 - DNA, 120 bp, Artificial Sequence
  ENSG00000225076_1 (sequence is synthesized)
gctccctttggggtggggatgtattatcagaatcacctgagtggcttgagggacaggggctatgtttaagaaagcttcccaggtgtgttgtaagaagccccaaggaatgaatcgctggtc

SEQ ID NO: 916554 - DNA, 120 bp, Artificial Sequence
  ENSG00000225076_2 (sequence is synthesized)
gcctgtaaattttatagtatctcaattttttaaaaatggaaataatgtttaaggtaaatctagttgaccccatactccaaggcctcccccatgctggggacaggcacccgtccacaggac

SEQ ID NO: 916555 - DNA, 120 bp, Artificial Sequence
  ENSG00000225076_3 (sequence is synthesized)
agagctctaagtggcagaaagaacaagtctcctgcagtgactatgtggtctcctggccgagctccgggccgcctggaaacaccatacccaagctggtagatgccctctttcctggagcac

SEQ ID NO: 916556 - DNA, 120 bp, Artificial Sequence
  ENSG00000272742_0 (sequence is synthesized)
tcagttctactattatttatttttttaaatatttttgaaaaaatataatttttttacaatattttcaacttaaacactattcacactgaacacgtatggcagcttaacctacccaaatat

SEQ ID NO: 916557 - DNA, 120 bp, Artificial Sequence
  ENSG00000272742_1 (sequence is synthesized)
gaagtttaagaagccaaaactgttctagctttgttaaaagttgtgctgcagactctcgtgatggttaacaaagcaaggaaaagcaccactcaaatcatgttacagtatctttgttcagct

SEQ ID NO: 916558 - DNA, 120 bp, Artificial Sequence
  ENSG00000272742_2 (sequence is synthesized)
cccttagaagttacaattctcaaattacatacttcctcagatgtaacattagaactcaatatttctaacaataacataccagaaaaggctggactggcactcatctgctgactaacttgt

SEQ ID NO: 916559 - DNA, 120 bp, Artificial Sequence
  ENSG00000272742_3 (sequence is synthesized)
agcctcagtaatatgacatacttgcctttaacaaattatctcaaattaactaacagaccttcagaaaatggagattctttttgatggggacataatcaaatttaagtctgagaaatatgc

SEQ ID NO: 916560 - DNA, 120 bp, Artificial Sequence
  ENSG00000272742_4 (sequence is synthesized)
ttaacagttggaactcaaattaaatgtactgattttaaagtttagacattaacaagtgatagattagcctcaaaaaaagacaatttggtaaggtcattaaactggtcttggatttggtcc

SEQ ID NO: 916561 - DNA, 120 bp, Artificial Sequence
  ENSG00000236445_0 (sequence is synthesized)
agtggcatcattgcactgtgactgtgcaggtcccaaacagtatggacatgaatgtcctcaagctgcatgttagcagggcttctaattccatctgcaagtgatagtgtgtggagcttagtt

SEQ ID NO: 916562 - DNA, 120 bp, Artificial Sequence
  ENSG00000236445_1 (sequence is synthesized)
gcacagagcgcatgttactggaggagatatgggtctgtgtcatcctgcatgggaatgatcctaaaaacaaagtgatcagtgactgctcaggactgtggaaaggtcacttggagcagtggg

SEQ ID NO: 916563 - DNA, 120 bp, Artificial Sequence
  ENSG00000236445_2 (sequence is synthesized)
aaaaggtctggcagaggaataagaagatacaggtcttagaacaagccctgggacttcaaccaagtcatttaacatctggggccttcgtttatttatcctcccagcagataaagcaatacc

SEQ ID NO: 916564 - DNA, 120 bp, Artificial Sequence
  ENSG00000236445_3 (sequence is synthesized)
tgccctgtcttcctaaccttggaggggtcaaaaaagtgatgggtgtgaaagcattttgtaaactgtagtgcaagcatacggcaggggagtgaaccatactttcactagcgacttgaatga

SEQ ID NO: 916565 - DNA, 120 bp, Artificial Sequence
  ENSG00000236445_4 (sequence is synthesized)
ggtgataaagaaaaggctcagaacttcagaaaatgcaagaggggcttgaccctggattggcagaggaaagcaatggtgggatcgataccttggagagccaaggaccaaggggttaagggt

SEQ ID NO: 916566 - DNA, 120 bp, Artificial Sequence
  ENSG00000236445_5 (sequence is synthesized)
agtttgcaaatctctggttcagccttattatttaaatgagaggagaatgaaatcccagaaaagagatgtgattatgtgaaggtcacacagcaagttagttgccaagctgcaactggaact

SEQ ID NO: 916567 - DNA, 120 bp, Artificial Sequence
  ENSG00000236445_6 (sequence is synthesized)
cagaatttctggttcccagttctatatcttagcctcccaaactggctatgtggacaggaaagaacagagtaatggggtgagctttaaggatgcaatttcataggattccaagagtctcaa

SEQ ID NO: 916568 - DNA, 120 bp, Artificial Sequence
  ENSG00000236445_7 (sequence is synthesized)
ggttagagaagtcgcctagtccacctcccctctctgcttctcacagaagggtctgctgaacactctggtgacagagaactcacccaacatgttccatggcagaggcttttcattagatca

SEQ ID NO: 916569 - DNA, 120 bp, Artificial Sequence
  ENSG00000236445_8 (sequence is synthesized)
aggtgacatctgttttactggagcttccaaccacgtgtcccaatactgcccttagtcacaggcatccaggtcctctctctcaggacagcactttgaataaatgaggacagctcccatccc

SEQ ID NO: 916570 - DNA, 120 bp, Artificial Sequence
  ENSG00000236445_9 (sequence is synthesized)
tacactgtgtgtcctccacttggtctcttcctgaaagcaacactgtgcacaatgttcctgggggcagacttattaaaccaagtggaccacttccttcatcttaggtgtcacagctccatc

SEQ ID NO: 916571 - DNA, 81 bp, Artificial Sequence
  ENSG00000236445_10 (sequence is synthesized)
agtggaccacttccttcatcttaggtgtcacagctccatcaatgcatcctcaaatcacaatgatttttctgcacttcaccc

SEQ ID NO: 916572 - DNA, 90 bp, Artificial Sequence
  ENSG00000236445_11 (sequence is synthesized)
ttcatgcgtttttacacgcttcatccaaccaatagttcatggaggccttaggtgtgtgtttccaaattttctatgctgagtgtgtgttct

SEQ ID NO: 916573 - DNA, 74 bp, Artificial Sequence
  ENSG00000236445_12 (sequence is synthesized)
cagaagggtctgctgaacactctggtgacagagaactcacccaacatgttccatggcagaggcttttcattaga

SEQ ID NO: 916574 - DNA, 120 bp, Artificial Sequence
  ENSG00000236445_13 (sequence is synthesized)
ctgctgagccccatctttgccaagactctgacttctgttgtttcatttaaagatgtaagaacagggcctcacagttcttcctaaggaattttactttgtggctgggtgcggtggctcaca

SEQ ID NO: 916575 - DNA, 60 bp, Artificial Sequence
  ENSG00000236445_14 (sequence is synthesized)
gcctggccacctatatcccagctacttggcaggttgaggcaggagaatcgcttgagcccg

SEQ ID NO: 916576 - DNA, 61 bp, Artificial Sequence
  ENSG00000236445_15 (sequence is synthesized)
caaaaacaacacaaaacaacaacaacaaaaaccagaaattttactttgctacattcagccc

SEQ ID NO: 916577 - DNA, 120 bp, Artificial Sequence
  ENSG00000236445_16 (sequence is synthesized)
acaacaaaaaccagaaattttactttgctacattcagcccataatttttagcaacccagatctttctggatcctggctgtatcttctcagtgtgtttcttcttcctcccagtttcctgac

SEQ ID NO: 916578 - DNA, 120 bp, Artificial Sequence
  ENSG00000236445_17 (sequence is synthesized)
ccctgcaaatagggctgtaaagaggctctctgatgctgcaccccctccctcattgccaccatgcaaatcacagaggacccccaccaggccagactggctcacctgcttgatgaatgcacc

SEQ ID NO: 916579 - DNA, 120 bp, Artificial Sequence
  ENSG00000236445_18 (sequence is synthesized)
agcccactctcccatccggggaggcctgtcgggcataatgatgtggaacatacttgttttctattcagctacgaaagcagggtattatcaaattttaaaaggcatcggccaggcactgtg

SEQ ID NO: 916580 - DNA, 77 bp, Artificial Sequence
  ENSG00000236445_19 (sequence is synthesized)
ggtattatcaaattttaaaaggcatcggccaggcactgtggcacatacctgtaaaaccaggcactttgggaggccaa

SEQ ID NO: 916581 - DNA, 120 bp, Artificial Sequence
  ENSG00000236445_20 (sequence is synthesized)
aaattagctggggatggtggcacaggcctgtagtctcagtttctcgggaagttgaagtggaaggatcacttgagcccgagaggcggaggttgcagtgagctgaaatcccaccactgcact

SEQ ID NO: 916582 - DNA, 120 bp, Artificial Sequence
  ENSG00000236445_21 (sequence is synthesized)
cggcctggcagcctgggcaacagagagagacactgcctcaaaaaaaataaataaaaggcatcgagaaaagaaagggaggaagggaggattttgacaaaaaattatcaatagtaacagtgg

SEQ ID NO: 916583 - DNA, 88 bp, Artificial Sequence
  ENSG00000236445_22 (sequence is synthesized)
agggaggattttgacaaaaaattatcaatagtaacagtggcgtctgtgtaacaggactataggtttggctggaatcttgctctgtcgc

SEQ ID NO: 916584 - DNA, 120 bp, Artificial Sequence
  ENSG00000236445_23 (sequence is synthesized)
ggcaacagagtgagactctatctctaaacaaagaaaacaaaagaaataggaaacatcacagtcaatgggacattgaaccattcacctctatacatgacatgcgtcatcccaagatggagg

SEQ ID NO: 916585 - DNA, 120 bp, Artificial Sequence
  ENSG00000236445_24 (sequence is synthesized)
agtgtcatggagaaatcctgctgaccaaacaaaagtaggaaatgccactcaagtcaatatataatcagagccccaccccacctcagagtacagtgatcttctccaagcctgcagcgcctc

SEQ ID NO: 916586 - DNA, 120 bp, Artificial Sequence
  ENSG00000236445_25 (sequence is synthesized)
agttaggaaagtgaaagcttgcaaaaggcattggggcaacaaaatagtctctatttcttatcagggacaaaatgtacttccttatcaaacagagacctaaccaaggacactcataaggca

SEQ ID NO: 916587 - DNA, 120 bp, Artificial Sequence
  ENSG00000236445_26 (sequence is synthesized)
agctgtcagtttgtcctttataaccaattgtaggcggtgtgcacctgtactgggcaagcagcaggtcatgtttacatgaggaagaagctatccaggaagatccacttgacatggattata

SEQ ID NO: 916588 - DNA, 120 bp, Artificial Sequence
  ENSG00000236445_27 (sequence is synthesized)
aatagctaaagaaacaagttcattttggtgcatttcaaagacatattaaaggaaaggtggaggccagaagagcagaaggctctgagaaaagtgcatcacagtggcccattatgatgtctg

SEQ ID NO: 916589 - DNA, 120 bp, Artificial Sequence
  ENSG00000236445_28 (sequence is synthesized)
taagactgtggcttcttcagggattgggtggagtacagtcctgccaagaccacagtaactcagggcttggagacatcacaaaggcaggggctcctagagctgagataatctggagaagag

SEQ ID NO: 916590 - DNA, 120 bp, Artificial Sequence
  ENSG00000236445_29 (sequence is synthesized)
gatacccatctactgcattctgagattgggttcgacctgtaggtcatcttggatagacgttttccagctcttctttttttttttttttggaacagagagaacctaattgacccttaaagt

SEQ ID NO: 916591 - DNA, 120 bp, Artificial Sequence
  ENSG00000236445_30 (sequence is synthesized)
aagataaagcaatacctgccctgtcttcctaaccttggaggggtcaaaaaagtgatgggtgtgaaagcattttgtaaactgtagtgcaagcatacggcaggggagtgaaccatactttca

SEQ ID NO: 916592 - DNA, 120 bp, Artificial Sequence
  ENSG00000272746_0 (sequence is synthesized)
gctaatttcctgtgggaattttatggcactgttataagcaaacactcccataggatggatatgggatatatcctctgtgcattttcatttcccatcgcaagttaggtggacagcatctcc

SEQ ID NO: 916593 - DNA, 120 bp, Artificial Sequence
  ENSG00000272746_1 (sequence is synthesized)
caagccttcaggatttccgcaggagcctactaggccctcctcttgtcaatgagcctggagtgactccttgcactgcatgtggtgggaaaaatatccccggataagctggggcatgtcata

SEQ ID NO: 916594 - DNA, 120 bp, Artificial Sequence
  ENSG00000272746_2 (sequence is synthesized)
agggatttttataatattggaaaacatataatgcactctgaacagctttaaatgtgtgagaagagaaaaagagatgtgtctgtaagaggggaaatgaagttagctccaaaaacaaagcca

SEQ ID NO: 916595 - DNA, 120 bp, Artificial Sequence
  ENSG00000272746_3 (sequence is synthesized)
gaagtataaaaaagcaattaaaaagtctctcacatttttgcattttctgtatcatgagatcacttgtgattgagccatactttttaaataatgggcaacattttctccattgtcttgctt

SEQ ID NO: 916596 - DNA, 120 bp, Artificial Sequence
  ENSG00000272746_4 (sequence is synthesized)
gagcattaactaccatttctgtgttactcttgtgaggttatttttggtgtgatttgatcctagtcagagcaaaaataaaatgtcagttctacaatgatgtactctataatgtagaaagca

SEQ ID NO: 916597 - DNA, 120 bp, Artificial Sequence
  ENSG00000277511_0 (sequence is synthesized)
agacgcgcggctccccttccttgtcctccgcatgacgcccgtgccggagcccacgtgagcctttgccaaggagagattcagagatatgagcagaaaaactggaagatggacttcttcaat

SEQ ID NO: 916598 - DNA, 120 bp, Artificial Sequence
  ENSG00000277511_1 (sequence is synthesized)
aaggcagcgggacggtttggctgatggaagatgtttcccggaagcctgttcacgctccaccctgaaagtcccagggccgtgagagtcagccgggccgccgaggcggtgccctccaggctg

SEQ ID NO: 916599 - DNA, 120 bp, Artificial Sequence
  ENSG00000277511_2 (sequence is synthesized)
caggatgatccagggactgttttcctcagcactgtgtaggtttcagcttatgagttctgtccatgttttgtgagatttatagctaagtatttaccttttcgaatgattataaacaacata

SEQ ID NO: 916600 - DNA, 120 bp, Artificial Sequence
  ENSG00000277511_3 (sequence is synthesized)
tacttgttttttgttactatatagaaatacaatcgattttcatatatttatgttgcatcctctgtgcttctaaactcactagttttggaagctgttttttgtttttagattccttaaaat

SEQ ID NO: 916601 - DNA, 120 bp, Artificial Sequence
  ENSG00000277511_4 (sequence is synthesized)
tttatatatgggcaatcatgtcatttaataatcaacctgtatgcctaaaataatcaacctgtatgcctaaaataatcaacctgtatgccttttattgtaagaaaatccctaaatactggg

SEQ ID NO: 916602 - DNA, 120 bp, Artificial Sequence
  ENSG00000277511_5 (sequence is synthesized)
attacaggtggtgagccaccgtgtccaacctgaaactttttttttggtgatttcaaatgaacttgacttttactgtaattatacctaaagtatttgtaaacaattgtttagaacttctat

SEQ ID NO: 916603 - DNA, 120 bp, Artificial Sequence
  ENSG00000277511_6 (sequence is synthesized)
ttgtcatggacttttgagtttattctttggatcatataaaaagactttttttttttgtttttaaagttataaatctctgtatgcactttgcttttcttaattaaacataatccaaagtaa

SEQ ID NO: 916604 - DNA, 120 bp, Artificial Sequence
  ENSG00000272745_0 (sequence is synthesized)
tcatggagtttgtagtatattgaacaggtagaccaccaagaaattataataaggtacattcagtcttctcattatcagtaattttttactacgtttctgggttctgggaggagggtgtta

SEQ ID NO: 916605 - DNA, 120 bp, Artificial Sequence
  ENSG00000272745_1 (sequence is synthesized)
cagaatgctgagctgggaagcttcaatcatgagattttaatatttatcaatgaagggtttaaaaagatggagaatgagttaaaggaattaactgccacagagaaaaataaagtggtccct

SEQ ID NO: 916606 - DNA, 120 bp, Artificial Sequence
  ENSG00000272745_2 (sequence is synthesized)
aaatgtaccctgaagtaattcatatgtgtcatgctaatgccctgtccacttcttactaaaatgtatgggttaaaattaacagtaatacttttgtctggatactgaatccaactaagtaga

SEQ ID NO: 916607 - DNA, 120 bp, Artificial Sequence
  ENSG00000272745_3 (sequence is synthesized)
tgaaatattgtgcaatataattgtaatattttcaagccctatatgaaaaagctgttatttgcatgactgtatcctatgaatagttatggaaatgaataaataagctttttagaaacagtt

SEQ ID NO: 916608 - DNA, 120 bp, Artificial Sequence
  ENSG00000271218_0 (sequence is synthesized)
agaggcaaagaatctgcatttccataccgtctcattgtcttcttcatctttctcatcctccacaaatcggatcgcactgactctgttgacagcacgctcgttccaggcttcatcagagac

SEQ ID NO: 916609 - DNA, 120 bp, Artificial Sequence
  ENSG00000271218_1 (sequence is synthesized)
aatgctatgaactttgcggctgacaaggtttcaatgtaaagagagaaagtcaaggtgattttggaaggacccagaaggaggagttctttacctctgatggccacagcctcactgacaggg

SEQ ID NO: 916610 - DNA, 120 bp, Artificial Sequence
  ENSG00000271218_2 (sequence is synthesized)
ctggtgtgaagctgcaggattacctgtttccaggagcacctgatgaatcaggccaagaggaaggaggtgcctgcggtgtcaaagcatttaagttgcagccaaaataaagattaaacacca

SEQ ID NO: 916611 - DNA, 120 bp, Artificial Sequence
  ENSG00000223729_0 (sequence is synthesized)
gaggcatcacaaaagtggccacgagaggcaggtaaaggcccccaaagtcttcaccatcgtccgcctcagaaaatcacttgtctgatgctcaggcggagcccagcaaacaccccgaccccc

SEQ ID NO: 916612 - DNA, 120 bp, Artificial Sequence
  ENSG00000223729_1 (sequence is synthesized)
tggaggtgccacgaggaaaggagtgtcctcagagagcttccggggaagccagccctatgaagccctccacgttcaccaggagttcatcgcagctgcggccaggctgggaaggagaggtgg

SEQ ID NO: 916613 - DNA, 120 bp, Artificial Sequence
  ENSG00000223729_2 (sequence is synthesized)
ccacaggcaggcagcgtgtctgttccggatgcaaagcgcagccccagccccgcccgctggagccctctctggcgctgggtggacaaagctgcagtgcgccggccagggaaggccgaggag

SEQ ID NO: 916614 - DNA, 120 bp, Artificial Sequence
  ENSG00000223729_3 (sequence is synthesized)
cctggtggcatctgtgtggaccccaggccatgtcactgcctcagcacactcgacctccaactcacattcctcacaggtggcccgggaaaggggaccacccactcggcaggagctccctga

SEQ ID NO: 916615 - DNA, 120 bp, Artificial Sequence
  ENSG00000223729_4 (sequence is synthesized)
gccagctcagtggatggagcaaactgacttggaaatcaaagtgatgcccagacggagcaagagacagccccggaccagcccccgggccacacccgcgcaccagccaggaccaggccccgc

SEQ ID NO: 916616 - DNA, 120 bp, Artificial Sequence
  ENSG00000223729_5 (sequence is synthesized)
ggaggcttgctgggaagctggcgctgtgttgtttcccccgccagctgctcgcttcctcccgggctcactggagtgcaaactgctttcacttgtttgaaatggaaattttttcgtctcttt

SEQ ID NO: 916617 - DNA, 120 bp, Artificial Sequence
  ENSG00000223726_0 (sequence is synthesized)
atcccattgcagtctgggccgttgcatgcaacattgattgtctgttatattacatttattaagaagtgataacttgtaataattggatgttaaattaaagaactctctcctagttattgc

SEQ ID NO: 916618 - DNA, 120 bp, Artificial Sequence
  ENSG00000223726_1 (sequence is synthesized)
cgtctcaattataactgtcgttggctggcagttataatgatatatgagggttgtattttacgcagccgaccatgacctggtgagtaatattcccccagctatgggggcactcatgcactc

SEQ ID NO: 916619 - DNA, 120 bp, Artificial Sequence
  ENSG00000223726_2 (sequence is synthesized)
gagagccccctctggcaatctccacccgcctcctgcttctcctcgctgccagcagaagtgacttccagcacatcagcggtggctgcagggcattcaaggaggatctgttaagaatgggac

SEQ ID NO: 916620 - DNA, 120 bp, Artificial Sequence
  ENSG00000223726_3 (sequence is synthesized)
cctggggaaccctctggacaagcagtcctcggggaagtgttgaaagaactatcaggggaaaggaagaagagaagacagaccagcatggatgcaaaatcagggacttcaagggatttccag

SEQ ID NO: 916621 - DNA, 120 bp, Artificial Sequence
  ENSG00000223727_0 (sequence is synthesized)
gatcaagggtttaagctgcaagtactcaatatttggctttacatttcagctactggccttcaacaccacggagagagctattgtgagtaatactgctatgatcacggctatgcaaatatc

SEQ ID NO: 916622 - DNA, 120 bp, Artificial Sequence
  ENSG00000223727_1 (sequence is synthesized)
tcttcaagagcccatttttcattctgttggaagaagtggaattgctgaccatatgccttctgtgaaagtgattctgaaggtgtggtccctgggccagcagcatcaacatcacctggaact

SEQ ID NO: 916623 - DNA, 120 bp, Artificial Sequence
  ENSG00000223727_2 (sequence is synthesized)
gaagattctcaggctcttctctatacctactgaatcagacattgggtgcaaaggggaacactacagtctgtctttaaggagccctcaagccaggaacagtaattgcacagaagaaatccg

SEQ ID NO: 916624 - DNA, 120 bp, Artificial Sequence
  ENSG00000223727_3 (sequence is synthesized)
atctctgttgggatgattagacactaaatatcatcctgcagataattaattggtacttctcaatcagaggtaaaattttgtcctgatgactctaaactttagccagcttctgtgttgtat

SEQ ID NO: 916625 - DNA, 120 bp, Artificial Sequence
  ENSG00000223727_4 (sequence is synthesized)
cccatgacttccaactcgcagcatcccaacagactttactcctctgctgttccatctcaaccagagaagactggggctctatgtcagtctcgacttgatacactgaagattttccatgag

SEQ ID NO: 916626 - DNA, 120 bp, Artificial Sequence
  ENSG00000223727_5 (sequence is synthesized)
caagtactcaatatttggctttacatttcagctactggccttcaacaccacggagagaggtgttttcctggtttttcagagctgagaagtgagctgtcttccaactcacctgcataggtg

SEQ ID NO: 916627 - DNA, 120 bp, Artificial Sequence
  ENSG00000223727_6 (sequence is synthesized)
gaagtcttcccagatgctgtgcttgaatctctaatttgatatatttacaagacttgcagaggctgtgagctgtgtgaatacattgcacataagaactacagatgttttaaagccttctgt

SEQ ID NO: 916628 - DNA, 120 bp, Artificial Sequence
  ENSG00000223727_7 (sequence is synthesized)
tacagtctgtctttaaggagccctcaagaattaggagcctcccaagctgagacagatctcagctactggctgtatggagttggatgagcttcttacctgacccctgggcttcagtttttc

SEQ ID NO: 916629 - DNA, 120 bp, Artificial Sequence
  ENSG00000223727_8 (sequence is synthesized)
atctgcaagatgaagtttaccagagaatgggacaaacaggagagaagttcctctgcttttatgccagataatcttagatgaatgtatgatgattttacaaggtgcacggaaaggactgta

SEQ ID NO: 916630 - DNA, 120 bp, Artificial Sequence
  ENSG00000223727_9 (sequence is synthesized)
ttgaattacatcatgagaaagttattcccttctgatcaactctctttccccagtttctacattgaggcaaagtctcagtttaatgctggaatattataacacttgctaatctttctttaa

SEQ ID NO: 916631 - DNA, 120 bp, Artificial Sequence
  ENSG00000223727_10 (sequence is synthesized)
attaactttgtggttgaagggagcagcgtcagaaactgctttagcacagtgggaggaaaacaaacagattcatctccagaaaccaaaggaaaggattctcactctgttgtccaggctgga

SEQ ID NO: 916632 - DNA, 77 bp, Artificial Sequence
  ENSG00000223727_11 (sequence is synthesized)
ttttcctggtttttcagagctgagaagtgagctgtcttccaactcacctgcataggtggaagtcttcccagatgctg

SEQ ID NO: 916633 - DNA, 120 bp, Artificial Sequence
  ENSG00000223725_0 (sequence is synthesized)
gttccgcggggagagggaaggcgaaggcgggctgagcccggcgccgggaggagtggtctaaactccaccgcggctttcgcatcggagacgtgtctttaggaagcagagagggttcgattc

SEQ ID NO: 916634 - DNA, 120 bp, Artificial Sequence
  ENSG00000223725_1 (sequence is synthesized)
tggactccgcccatgactcacttctcttgtaaagaaagagttgtccttcctggtactccaggtttatgggatgcaggataatggagcatgctctatctgggacattgctagtcttatgac

SEQ ID NO: 916635 - DNA, 120 bp, Artificial Sequence
  ENSG00000223725_2 (sequence is synthesized)
gcaaagtaggatcctgatactgagctcaagtgattcagaatgaaaagaccttggcacagacctgttaaggaagctccatataaggtgaagaaaacaacatgctcagccatgtccttgcct

SEQ ID NO: 916636 - DNA, 120 bp, Artificial Sequence
  ENSG00000223725_3 (sequence is synthesized)
tctgcacacggtagtgcattcactgcctgagaattcaaggctaaaacaaaaagaggagcttttgttccaacagataagtacttacctttttcaaaaaatgcataagctgtcctgggtgtt

SEQ ID NO: 916637 - DNA, 120 bp, Artificial Sequence
  ENSG00000223725_4 (sequence is synthesized)
ggagaagacagcgatggtaactttgctgggactatgatagaatcatgaaatcatccaggcctttaaaaatgttcatcacaacatttaatctggacatcatttgtagcaattaccaccatt

SEQ ID NO: 916638 - DNA, 120 bp, Artificial Sequence
  ENSG00000223725_5 (sequence is synthesized)
aaagggctcagctggcagtagttttcgaagaactccaggaagtggctgcagagcaaagtaggatcctgatactgatcacacttttgtcaagaagccaaagaacaaagttgattaaagcat

SEQ ID NO: 916639 - DNA, 120 bp, Artificial Sequence
  ENSG00000223725_6 (sequence is synthesized)
tatgcctggaaataaaggggaacaggacatcagcaaaattctttttatccattcacacattgaagacatgtaagatcaatgacacacaaaatggaagagaaatcttaatcacacgtgtga

SEQ ID NO: 916640 - DNA, 120 bp, Artificial Sequence
  ENSG00000223725_7 (sequence is synthesized)
agactagcaggtatttttttcctgtgcacatcaacgggctgtattgtggcatatacatgaaagggtgaagtgcttgatgtctttagtttatgttttcctaaaactccatgctactaggag

SEQ ID NO: 916641 - DNA, 120 bp, Artificial Sequence
  ENSG00000223725_8 (sequence is synthesized)
gctttccaaagactcacagcatttaaaagctaactctacagagattcaacagcttcttccagatcccaccacagtggaaaagaactccggtgtcctggctccctgtccagctcttctctc

SEQ ID NO: 916642 - DNA, 120 bp, Artificial Sequence
  ENSG00000223725_9 (sequence is synthesized)
tccccttccagctgccagttcagctttaagaagttcattctccacattcagatgcaggcaaatgcgtttgacttgagcatattgatttcaggcaggtgagagtggatgtagcgattcagc

SEQ ID NO: 916643 - DNA, 120 bp, Artificial Sequence
  ENSG00000223720_0 (sequence is synthesized)
cagtgggctctgcccagtttgaaatttcaggccgctttctttatactgtgaggggaaaaccgtctactcaagcctcagtaatggtggatgcccttctctgcaccaagctcgagcatccca

SEQ ID NO: 916644 - DNA, 120 bp, Artificial Sequence
  ENSG00000223720_1 (sequence is synthesized)
gtcatggctcactgcagacttgacctcccaggctcaagtaatcctcccaactcaacctcccaagtagctgggacaacagtgaggaccagatgctggttgaagagctccccagagtcttgt

SEQ ID NO: 916645 - DNA, 120 bp, Artificial Sequence
  ENSG00000223720_2 (sequence is synthesized)
tgggataactgcagtctctgctttctgtagaggatgtgacaagggtgaacaccagtgtggagccaggagaagccgttcacctgtgaatgataacagggccagcaccaactcctactgact

SEQ ID NO: 916646 - DNA, 120 bp, Artificial Sequence
  ENSG00000223720_3 (sequence is synthesized)
gagcatttctgtgtcagaccaaggggtctgtgctttacacactcacttcatacctcaagatgactgtgtgagctttattgaggcataatgaacaaataaaaattatatctgcttaaggta

SEQ ID NO: 916647 - DNA, 120 bp, Artificial Sequence
  ENSG00000271216_0 (sequence is synthesized)
ggctcttagcagatgaagagaagcattttatatggcccctatcaaattctaccagaaagactaatgattaaagaggtttgtgttacaggaaccaagacttcatagcacatgaaagaaaat

SEQ ID NO: 916648 - DNA, 120 bp, Artificial Sequence
  ENSG00000271216_1 (sequence is synthesized)
tgtatctagacttgataaaaatgagccacaaactgctacaaaaatcaccaggacaagaaaaactcacttaggtgtttttatcccatccacatggagtgtgaatggttaagtcaggtgctg

SEQ ID NO: 916649 - DNA, 120 bp, Artificial Sequence
  ENSG00000271216_2 (sequence is synthesized)
tgtgaagaatggaaacatgcaacaataaagacaccagtcctggtggacctgatggcctatgtctggtgtggcgggggacagataagtaaacagatcgtcctatacggggtagccaacgct

SEQ ID NO: 916650 - DNA, 120 bp, Artificial Sequence
  ENSG00000271216_3 (sequence is synthesized)
aacagatcgtcctatacggggtagccaacgctatcatctgatagaagtaagcatgaggtaatgtattagtctgttctcatgctgctgtaaagaactacccaagactgggtaatttataaa

SEQ ID NO: 916651 - DNA, 90 bp, Artificial Sequence
  ENSG00000271216_4 (sequence is synthesized)
cagcatgtctcacatggcaggagcaggaggaatagagagcaggaggaggtgctacacatttcaaaaagccagatctcatgagaactcact

SEQ ID NO: 916652 - DNA, 90 bp, Artificial Sequence
  ENSG00000271216_5 (sequence is synthesized)
cgcccccatgatccagtcacctcccaccagacccctcctccaacactgggattacaatttgacatgtgatttgggtggggacacagggtc

SEQ ID NO: 916653 - DNA, 120 bp, Artificial Sequence
  ENSG00000271216_6 (sequence is synthesized)
attacaatttgacatgtgatttgggtggggacacagggtcaaaccatatcaggtaacaaaactccagtctcaaaaatggtaagtcaattttattgctattataattcttaaaactggtgt

SEQ ID NO: 916654 - DNA, 120 bp, Artificial Sequence
  ENSG00000271216_7 (sequence is synthesized)
tgatgatgatgatgatagcagttatttgtacagtaacatgcccaagacaaatcccaagagaggaacataaacaaaatcaagtggggagatttgactttgcccaagttcttctcaactaga

SEQ ID NO: 916655 - DNA, 120 bp, Artificial Sequence
  ENSG00000271216_8 (sequence is synthesized)
aaaggtgttttgtgtggagtgctgcgctatgtgcagttttcagctattcaacctcaaggatgtcaaattgttggaagagattcaaagaaggataatcaaacttggatggagctgacttaa

SEQ ID NO: 916656 - DNA, 120 bp, Artificial Sequence
  ENSG00000271216_9 (sequence is synthesized)
agaaatgggctaacctccagaaagaatgccattgaatccagagagaggtgccgttgaatcagcccttgctgatgaagcctcttcactgtactgctcagacctctccatcctggtggcaag

SEQ ID NO: 916657 - DNA, 120 bp, Artificial Sequence
  ENSG00000271216_10 (sequence is synthesized)
ggcttagaccattattcatggtctgactggcctcgaggtggctgtctcgcctttgaaaaagggcagacacagagcatgttcagagcacggagccatactgtgcgatttcttcaaagagag

SEQ ID NO: 916658 - DNA, 120 bp, Artificial Sequence
  ENSG00000271216_11 (sequence is synthesized)
cttaaccacagaatttggattaatgaatgacgtaactgcttcagggcaacacaccctcactgcagctgcttagcccaggaagcagcaaggtcaatacaaggagagccacaggcctgggga

SEQ ID NO: 916659 - DNA, 120 bp, Artificial Sequence
  ENSG00000271216_12 (sequence is synthesized)
gatgcatgccttccttcctggccacgtggatctcactacttagcccagatggcctgcgagaaggacaaagccaagcacttcacaacactgtcagttgctgtcctgaagaaggtggccagg

SEQ ID NO: 916660 - DNA, 120 bp, Artificial Sequence
  ENSG00000271216_13 (sequence is synthesized)
agctctagaaggattcaaagccccagggatttttggtttttatgtatacacttctctttacatacttgttcctcaacatccaatcagccttgcagggatgatgtaatagccagaaaaata

SEQ ID NO: 916661 - DNA, 120 bp, Artificial Sequence
  ENSG00000271216_14 (sequence is synthesized)
agtgaacagaagattccgggttctactttatgccaatttttcttaaatatctcagtcactagaaaaagatctatttgaaaatcttgctctgagcagtttctgtcttgggcccagttgttt

SEQ ID NO: 916662 - DNA, 120 bp, Artificial Sequence
  ENSG00000271216_15 (sequence is synthesized)
gaggagcctgttgaatttttaaatttattagtgttcccatgcttcattcattggcatatatgtatattctctatactttataattacaagtaagctcttgataataaaaagtaactgtca

SEQ ID NO: 916663 - DNA, 120 bp, Artificial Sequence
  ENSG00000236467_0 (sequence is synthesized)
actactttgttgttcttcacaattagttggagctttctttggtcaacagcagatgtgactaagaaaatcacgctgtttcacttagagcagtggtcaccaagtgtggtccttaggccacac

SEQ ID NO: 916664 - DNA, 120 bp, Artificial Sequence
  ENSG00000236467_1 (sequence is synthesized)
aggtcagcatcacctaggaactaggaaatgcaagttcttaagcaatcccacccagacctactgaattggaagtgctgaggatggggtccagcaatctgtggttgaacaagctctgcaggc

SEQ ID NO: 916665 - DNA, 120 bp, Artificial Sequence
  ENSG00000236467_2 (sequence is synthesized)
atccaggagcagagctgtggggcagcagaatctgtgatgacagagaatgatgatgtatttttgccagcagatgcttttgctcctgttttgataccccaatattcggatgcagaaaaggac

SEQ ID NO: 916666 - DNA, 120 bp, Artificial Sequence
  ENSG00000236467_3 (sequence is synthesized)
tctgagcattgctgacgggtgtgctctgcacacctatctcttcaggatctgaataatttggtggaaagacaatgccttttctggaaaagggtgtcaggtcagtcatattggaggatgcaa

SEQ ID NO: 916667 - DNA, 120 bp, Artificial Sequence
  ENSG00000236467_4 (sequence is synthesized)
atttccttatgtgatgggagtgagggttggggtagggcacttcacggagcattcagcagtctgcaattaagcatcactccaaggctttctgcataggtgatggctgtttctgcatcatgg

SEQ ID NO: 916668 - DNA, 120 bp, Artificial Sequence
  ENSG00000236467_5 (sequence is synthesized)
ggcaaaccaggtgctagaacttcaaatgccaattaccaaaggcgcttcctgcggaggaaacctctctacaactcacctgacccagaaggcacacatttttttctgggttaacataaatgc

SEQ ID NO: 916669 - DNA, 120 bp, Artificial Sequence
  ENSG00000236467_6 (sequence is synthesized)
taaaattgaagaaatgaaacattctaaaggcaggatcatgtaggtgagatcctttgcctcctaagcttttgtcctgccagtcttttctgtgccttaccatgatacctgtgctagaagtct

SEQ ID NO: 916670 - DNA, 120 bp, Artificial Sequence
  ENSG00000236467_7 (sequence is synthesized)
tctgggaagctcttgtatagaacctccaactctggcagggttagtcttcagggatgcttcaggcagagaccttctcaatatctatccttgcgtcacatgggcattgagtataagacagct

SEQ ID NO: 916671 - DNA, 120 bp, Artificial Sequence
  ENSG00000236467_8 (sequence is synthesized)
gagttagggtcctgttcagagcctgggatcagggaacccgcatagtctaaggaatacaggagtccctcttcccactgccaaggacaagtttgcaaacctgactagcgaagcccttcttct

SEQ ID NO: 916672 - DNA, 120 bp, Artificial Sequence
  ENSG00000236467_9 (sequence is synthesized)
gattaaggcaacgtggccccctggttatgagtacagatttccaaatccaattagtgtggcttttaatacctgctttgctatccaataggcacaacaatgaaaaagttgcctaacttttct

SEQ ID NO: 916673 - DNA, 120 bp, Artificial Sequence
  ENSG00000236467_10 (sequence is synthesized)
ctgccttgaattcctcatccatataacagagatgaaaaaacaaaacaaaacaaaaatttatagattagagttaaatgagaggatttgtgaaacttctgatagacaaagcatactcaaaaa

SEQ ID NO: 916674 - DNA, 120 bp, Artificial Sequence
  ENSG00000236467_11 (sequence is synthesized)
atgggagtttataaaaagaaccatcaactagcaatgcaaccaatttagacaattccctctccgggtgtctcggcgttctgattctaatctctgagagctggctcagaacacaagggtggc

SEQ ID NO: 916675 - DNA, 120 bp, Artificial Sequence
  ENSG00000236467_12 (sequence is synthesized)
ccgcttggcctctaaagtttgatgattctcaggtcctgtaaaaggacactgaggaaaccatgaaatgccaggggagggaccaaggcactgtaacagggaaacctgagcccacagcgccat

SEQ ID NO: 916676 - DNA, 120 bp, Artificial Sequence
  ENSG00000236467_13 (sequence is synthesized)
ctagcccgcttggcccacgccccgctgtgcctgcaagtgtaacccgcccaagcatcctcctctttttatttttttaaagtataattaccggagcttatgtttcacagttaatgctgtcaa

SEQ ID NO: 916677 - DNA, 120 bp, Artificial Sequence
  ENSG00000236467_14 (sequence is synthesized)
tctgcctttcgtttataattgctctaaaattgtcattttccatgtcatagctgccattttttatatttgctagttttcatggtgtagatttttatttttagtatttttctttcgtgaggg

SEQ ID NO: 916678 - DNA, 120 bp, Artificial Sequence
  ENSG00000236467_15 (sequence is synthesized)
atgaaaatgattggatttttttttccctaccccaggcctgcctggcctgatgtgacagcagtggtctgtcctgagtctagcaggacatacctccatgtacccgactgacaccactgctag

SEQ ID NO: 916679 - DNA, 120 bp, Artificial Sequence
  ENSG00000236467_16 (sequence is synthesized)
ctcctctgcctcgggacggccatgtgccctctgtctccgtgtgagcagttgaaatggaggctcttgagtggagtgtaagaaatagggttatggagcaataaattgtttatgtaactaaaa

SEQ ID NO: 916680 - DNA, 120 bp, Artificial Sequence
  ENSG00000236467_17 (sequence is synthesized)
tcacatggcattaggttagcttggactgatagagaactcaggcctctccataacaccaggttcaagggtttggcccttaatgaaagtacaggaaagacagtaaatcatgtgaacccacat

SEQ ID NO: 916681 - DNA, 120 bp, Artificial Sequence
  ENSG00000236467_18 (sequence is synthesized)
tccagacggtcacaccctccagtcttactgatataacttcgtttctggcaaacaggccagctctctgatattaaagatgagaacatggaatcatatcttctgggtaccccaactcatcta

SEQ ID NO: 916682 - DNA, 120 bp, Artificial Sequence
  ENSG00000236467_19 (sequence is synthesized)
cccactaagctcccaaatattatctaagatgtgtgttcatgaaagagagaaagagagaggataagtgcacacaaacacataaatatatatacatatatgtacatgcatatataccaaaaa

SEQ ID NO: 916683 - DNA, 120 bp, Artificial Sequence
  ENSG00000236467_20 (sequence is synthesized)
aatctgcttctttgtaattacatgtgatcttaagaaatacgtatctgctctgtgaaagatttttatatgcctttgccattctccaattagcagaaagtcataaggagtaacatcattccc

SEQ ID NO: 916684 - DNA, 120 bp, Artificial Sequence
  ENSG00000236467_21 (sequence is synthesized)
atttaacagtagaaaaaatgtgcaagggctgccggtgagccaggaccagaagctacaagtcctaattcatggcccagtttccctcctccaagtcactgcctttgttctgaaaatatgaat

SEQ ID NO: 916685 - DNA, 120 bp, Artificial Sequence
  ENSG00000236467_22 (sequence is synthesized)
gcactggacatgcaaactcctgccctgggcattgtggtgcagtgggcagagcaaagacacacctgccttaactggctcacattgaaatttctctctagctcctgggggatcctgcgcatg

SEQ ID NO: 916686 - DNA, 120 bp, Artificial Sequence
  ENSG00000236467_23 (sequence is synthesized)
ggtctctccataggctggcattcacgcttctcagatgtatcgtacactagcaaaaggggcctctgcttttctctgctctttctcttaacactgttataatatgctttttctttatttttc

SEQ ID NO: 916687 - DNA, 120 bp, Artificial Sequence
  ENSG00000236467_24 (sequence is synthesized)
cagattaggtaggccctgcaaacctaaagcttcattaaatcttgttttctaaaaaaaaaacgacaacactcccaacttgtgtgcattggaactcattagctcttgtagtagggttcccct

SEQ ID NO: 916688 - DNA, 120 bp, Artificial Sequence
  ENSG00000236467_25 (sequence is synthesized)
ttttctcctcagaaggaggtggctcctcactgctccttcaataacgatggttcagtgtgattggtatctgtttaggaaaggtccaaggctcaaggaaaatggacatcatgtgcacaacct

SEQ ID NO: 916689 - DNA, 120 bp, Artificial Sequence
  ENSG00000236467_26 (sequence is synthesized)
cctaactcagaggacaagcaagtgaccggaaggccaaggatgctgtctgaccacagacattgcaatgcagacacataagattagaagcaaaacgcaggaggctggtaaggccaggacagt

SEQ ID NO: 916690 - DNA, 120 bp, Artificial Sequence
  ENSG00000236467_27 (sequence is synthesized)
gggatgaaccaagcagggaagggacatgaatgaagcaggcctggtgggatacaatagagagtagtgtggactgtggctaaagggagcagctgctcagctcaagccaatagctgctttacg

SEQ ID NO: 916691 - DNA, 120 bp, Artificial Sequence
  ENSG00000236467_28 (sequence is synthesized)
ggaatctgggactctgccttctgactctaatttaaagaaggcaggaaccccgattttatataaaatcttattttaaaatattggcaacaaattcaatttaaaaataaaaacttgataaat

SEQ ID NO: 916692 - DNA, 120 bp, Artificial Sequence
  ENSG00000236467_29 (sequence is synthesized)
cagcaaaagaacagagagaaacatcctttttatttgcctgaaaatcaagggacagcagggaaacgggtcttttcatcaaagcttgttttggtgtctcccaagttggagggtccatgtgcc

SEQ ID NO: 916693 - DNA, 120 bp, Artificial Sequence
  ENSG00000236467_30 (sequence is synthesized)
aagggacggcagtggaagaagtcaacatgtttaacagactacacccaatatgtgtgatttttagggatcaggcatccaggagcagagctgtggggcagcagaatctgtgatgacagagaa

SEQ ID NO: 916694 - DNA, 120 bp, Artificial Sequence
  ENSG00000236467_31 (sequence is synthesized)
cagcatatacaaaaatcaaatggattaaagacttgaatgtaaaatctgaaaccgtaaaactcctaggagaaaaaataggggaaaagctctttgacattggtctgggcgatgatttcttgg

SEQ ID NO: 916695 - DNA, 120 bp, Artificial Sequence
  ENSG00000236467_32 (sequence is synthesized)
gacaccaaaagcacaggcaacaaaagcaaaaattaaaaagcgggactacatcaaactaaaaatctgcacagcaaagaaaacaatcaacaaagtgagaagccaatctactgaacgggagaa

SEQ ID NO: 916696 - DNA, 120 bp, Artificial Sequence
  ENSG00000236467_33 (sequence is synthesized)
catggcatgctccctcttttcaggcaatatggacactttggggaagttatgaagcgtctcccattcccgcttgaggtactcaatagagcccacaaacacaatgtgcttgagctcatggta

SEQ ID NO: 916697 - DNA, 120 bp, Artificial Sequence
  ENSG00000236467_34 (sequence is synthesized)
atgaaagttgctggcacggagcggcatcaccaggttccggaggccgatcagggctgagctgacgtcgccaaagatgcagaccacgacatggccactcaggacggtcatggcagcttcact

SEQ ID NO: 916698 - DNA, 120 bp, Artificial Sequence
  ENSG00000236467_35 (sequence is synthesized)
ctacaagatcatcatttcaaaacaatatgaaagcagaatgggaaatgccatggcatgctccctcttttcagactttcaccagaaagtttgtgcaagttaactctcaaagtcttacggcat

SEQ ID NO: 916699 - DNA, 120 bp, Artificial Sequence
  ENSG00000236467_36 (sequence is synthesized)
ggccacaagagcgcagtctctggattggaggatggaatggtgcctggctgtttctcacacgaaccagacggtctccacaaagaacaatgttcttcccaacctgccaagacagccaaataa

SEQ ID NO: 916700 - DNA, 120 bp, Artificial Sequence
  ENSG00000236467_37 (sequence is synthesized)
caaaagaaatacccgtggagcccacctgaagtgcacagatctggggacattgggaggaacagaggtagcttagtgactctactgtccctaccacccaacctgctattagccctgctggtc

SEQ ID NO: 916701 - DNA, 120 bp, Artificial Sequence
  ENSG00000236467_38 (sequence is synthesized)
cgctcgtgtttgaggtcatgagtcaggttcaaatagccatgactggcagaagatgtcaatcacatttcatttccattttcactttgctgtttacattctttaaattaatgcttgccccaa

SEQ ID NO: 916702 - DNA, 120 bp, Artificial Sequence
  ENSG00000236467_39 (sequence is synthesized)
tgattgtgatatttaaagaccagcctagaatctaattgtgtatatgtgaaactgttttctaaaccataagatgttatataaatacaaaccactattattattaacattattactattggc

SEQ ID NO: 916703 - DNA, 120 bp, Artificial Sequence
  ENSG00000236467_40 (sequence is synthesized)
tgggtgcactgataatttctttcaaactcagataaaggtaaaatgcatgggtttttagtgcaagccaggtgcccgacgaagaatattctgccagaacactttagaaatacagtatgcttt

SEQ ID NO: 916704 - DNA, 120 bp, Artificial Sequence
  ENSG00000236467_41 (sequence is synthesized)
taaccttgggaggtaaggaccagtgtggattatgactttacactaaacacagcatttagtatatttcttaagggcataatcaccttctatagatgttcttgaactataaaatctttatct

SEQ ID NO: 916705 - DNA, 120 bp, Artificial Sequence
  ENSG00000236467_42 (sequence is synthesized)
gtatgctatcataatttatcctcggacacatcctgtgcaatattttataatgctagtgtatggtgggcctttctggtcaatgcattggagaacaaggtgtggagtgcaacagaagggctg

SEQ ID NO: 916706 - DNA, 120 bp, Artificial Sequence
  ENSG00000236467_43 (sequence is synthesized)
gaagcggcttggggatgctctggcctcaccctcttttgcgtcatagctgcactcatacgcagaccctgacccaggacccaggtcggctgacttctaattcagatcatttgctgccagaat

SEQ ID NO: 916707 - DNA, 120 bp, Artificial Sequence
  ENSG00000236467_44 (sequence is synthesized)
tctgcctgtgagtgagaacagcatgaggatatgagcttcttgagtcagtccacctgcccaagtcccagctctgaccctctttagagctctgatctcagaccagttactccatacctcaat

SEQ ID NO: 916708 - DNA, 120 bp, Artificial Sequence
  ENSG00000236467_45 (sequence is synthesized)
gtcctacgatctactgtgatccctactggaccaaggacaccaaatttcggagatgctttgggattatgtgacataaccagggggctgcaggctgacagcctgaggaccaactactgtccc

SEQ ID NO: 916709 - DNA, 120 bp, Artificial Sequence
  ENSG00000236467_46 (sequence is synthesized)
cagtgtgctgagcttggcaccaccctgctgatacacaggatttcacatgtgggacaatctttaagtctgaagattgtccatacaaatatggatttctaacttctaattaaaaatcttgta

SEQ ID NO: 916710 - DNA, 120 bp, Artificial Sequence
  ENSG00000236467_47 (sequence is synthesized)
gtgacctcggtgctgtggactcacccctaagtccgcaaatggcccatcgagcagagctaactgggccacgcggcagcggtccctattggccagtgtctgcggggtgctgtagccacctct

SEQ ID NO: 916711 - DNA, 120 bp, Artificial Sequence
  ENSG00000236467_48 (sequence is synthesized)
aaagcaatagtgcttaatagatacaagcatgctaatatattttttaagtgaatgctgatctttctgagctgtgtgtctaaaatcatcattgtgaataaaagaattgtaatttccaaccca

SEQ ID NO: 916712 - DNA, 120 bp, Artificial Sequence
  ENSG00000236467_49 (sequence is synthesized)
gtaagccaccgtgcctggccgatgccacctcttcttgaaagccttctcaattcctcaaaatacctaaaccaaggatccctttgtgttcctctatttctagcctcgtccttgtttccttgg

SEQ ID NO: 916713 - DNA, 120 bp, Artificial Sequence
  ENSG00000236467_50 (sequence is synthesized)
ccactcacctgaatcctgcaagcatagtgagtggctgaatccaagcaacctttggtcacctttgtgttctgggcctttagagtgcctgatgcatggagaacagccatttattcctttttc

SEQ ID NO: 916714 - DNA, 120 bp, Artificial Sequence
  ENSG00000236467_51 (sequence is synthesized)
gagttacctttcatggaagggtaagcaggaagcaactacaagatcatcatttcaaaacaatatgaaagcagaatgggaaatgccatggcatgctccctcttttcaggtctcccagggttt

SEQ ID NO: 916715 - DNA, 120 bp, Artificial Sequence
  ENSG00000236467_52 (sequence is synthesized)
ggattttccttgacagagcataggggaagtgctgagtcctcaggcccatacccagatgaagaagcacaggcatgatcaaagctacaactattatatccatccgggattttcttttgtgaa

SEQ ID NO: 916716 - DNA, 120 bp, Artificial Sequence
  ENSG00000236466_0 (sequence is synthesized)
agaagggttcgggctgcaaggaatcctattgtgtgagagccatgacacagtgagtgggagttttgatcttgacctcctggagcattttcatggaaaaggcagttccaggattctttgtgg

SEQ ID NO: 916717 - DNA, 120 bp, Artificial Sequence
  ENSG00000236466_1 (sequence is synthesized)
cctcttccacaggagaaagtaaaggagctagaggcctctaaaaatttagttattgaagaactgaagttattcacagcaacctggcagaagagaatgtgaaatacgtgggtctcaggtaat

SEQ ID NO: 916718 - DNA, 120 bp, Artificial Sequence
  ENSG00000236466_2 (sequence is synthesized)
aggtaatatccctaattccacggtgatgctgagaagcagagggcgccctcagaagtagtttctcttaaggaatttgcagctggcctacaagaacaggaccacagaatcaggtcctgtaaa

SEQ ID NO: 916719 - DNA, 120 bp, Artificial Sequence
  ENSG00000236466_3 (sequence is synthesized)
aggatttgcttcttctggatatttcatataaatggaatcatatcacctgtggtcctttgtgtctggcttcttttgcttaatgttttcaaggcttgtccatgttgtagcacttatcaatat

SEQ ID NO: 916720 - DNA, 120 bp, Artificial Sequence
  ENSG00000236466_4 (sequence is synthesized)
atcaatatgctgtatttttctttttaaattaagactatatatttttggagcagttttaggttcacagcaaaattgagaggtaccgagattttccacatatccccttttatctctttttat

SEQ ID NO: 916721 - DNA, 120 bp, Artificial Sequence
  ENSG00000236466_5 (sequence is synthesized)
tgccaagtaaaattctgttgtatggttataccacattttattatccattcatctgttgatggacatttgaatacttttcacttcttggctattatgaatagtgctgctataaacatttgt

SEQ ID NO: 916722 - DNA, 120 bp, Artificial Sequence
  ENSG00000236466_6 (sequence is synthesized)
gtttttgtttgagtagctgtttcaagtctcttgggatatacctaggagtagactttctggatcatatggtaagctctatgcttaaccagttgaggaaatgccaaagtgttttccaaagca

SEQ ID NO: 916723 - DNA, 120 bp, Artificial Sequence
  ENSG00000236466_7 (sequence is synthesized)
attgcccgattttccattcctaccaccagaggatcccaatttctccatattttcaccaacacttgcaattatgtgtctttttaattatagctatccaagtggatgtgaagtggtatctca

SEQ ID NO: 916724 - DNA, 120 bp, Artificial Sequence
  ENSG00000236466_8 (sequence is synthesized)
ttatagctttaatttacattaccctgatggctaattatgtcaaacaccttttcatgtgcttgtgcctattgtctatttgtatgtcttctttggagaactgaattacttttcagattcttt

SEQ ID NO: 916725 - DNA, 120 bp, Artificial Sequence
  ENSG00000236466_9 (sequence is synthesized)
gctcattttctaaaacttgggttgtctctttattttgaggatctttcactttcttaatgatgtcttttgaagtacaaaagttttttaattctgatgacattccagcttatctatttggtt

SEQ ID NO: 916726 - DNA, 120 bp, Artificial Sequence
  ENSG00000236466_10 (sequence is synthesized)
gcttgtgcttttgatgtcacatccaagaaatcattgtctaatccaaggtaataaatattttcacctatgttttcttccaagaatttcatagttttaggtcttatatttatttgattcatt

SEQ ID NO: 916727 - DNA, 120 bp, Artificial Sequence
  ENSG00000236466_11 (sequence is synthesized)
ttgagtttgtttttgtaatatggtataagggaagggggtgccactttattattttgcatagggatatccagttgtcccacactcttgaattaaggttatattatgcctatttagtctgtg

SEQ ID NO: 916728 - DNA, 120 bp, Artificial Sequence
  ENSG00000236466_12 (sequence is synthesized)
aagaaactgaggctcagagaactaaagtgattggctcactatcatatggagctaaatggccaagccagaatttgaacttgagtcttcccacaatgcaaccaatattctttctgttaggct

SEQ ID NO: 916729 - DNA, 120 bp, Artificial Sequence
  ENSG00000236466_13 (sequence is synthesized)
atagctgctgccctatttctatttccaaccacaaagaacttagacatcaaatggattttttaagctatttttaattattattttccttattttgaaacataaagaaaaaatgagataagg

SEQ ID NO: 916730 - DNA, 120 bp, Artificial Sequence
  ENSG00000236466_14 (sequence is synthesized)
gtccattttcattcttctgcatttggatatctagttttcccaacaccatttattgaagaaattgtactttcccatggtgtgttcttgacatcttctcaaaaatcaattgaccataggtag

SEQ ID NO: 916731 - DNA, 120 bp, Artificial Sequence
  ENSG00000236466_15 (sequence is synthesized)
gtgggtttattctggagctctctatactactccatttgttaatgtgtctgtttttatgccagtcccatagcattttgattatagcttgtaatatattttgaaatgtggtagtgcgatgcc

SEQ ID NO: 916732 - DNA, 120 bp, Artificial Sequence
  ENSG00000236466_16 (sequence is synthesized)
tccagctttgttctttttgttcaagatagctttggctacttgttttttgtggtttcaaataaattttaaatttttttctatttctatgaacaattatggtgaaattttgataggagtcac

SEQ ID NO: 916733 - DNA, 120 bp, Artificial Sequence
  ENSG00000236466_17 (sequence is synthesized)
ttttgataggagtcacattgaatctgtagattgctttggatagtatgaatatttaaataacactaattgtttcaattcattaacatagtatattcttcttttcttttttttctttctttt

SEQ ID NO: 916734 - DNA, 120 bp, Artificial Sequence
  ENSG00000236466_18 (sequence is synthesized)
ccagtgcacctggcctatttttctatttatttgtgtcatcaacttttttcatcaatgttatataattttcagcatatagatcttttactgccttgattaaatttactcctatgtatttta

SEQ ID NO: 916735 - DNA, 120 bp, Artificial Sequence
  ENSG00000236466_19 (sequence is synthesized)
ttcttcaatcctattgtaaatggaattattttcttaatttatttttcagatagtttgttgttagtgtacaaaatgctactgatttttagaggttgattttctctaattatcagacaaata

SEQ ID NO: 916736 - DNA, 120 bp, Artificial Sequence
  ENSG00000236466_20 (sequence is synthesized)
caaattaaaaccacaatgagatatcacctcacatctgttaaactggctattacaaaaaaagatggaagataacaagtgttgccaacgaagtggagaaaagaaaatcctgtacactgttgg

SEQ ID NO: 916737 - DNA, 120 bp, Artificial Sequence
  ENSG00000236466_21 (sequence is synthesized)
ttggtggaaatataaattagtacagccattttgaaaaacagtatggaggttccacaaaaaactaaaaatagaattactatatgatccagcaacctcatttctaggtatatatccaaagga

SEQ ID NO: 916738 - DNA, 120 bp, Artificial Sequence
  ENSG00000236466_22 (sequence is synthesized)
acttaaatcagtatgtctaagagatatctgtgctcccttgttcactgcagcattattctcaatagccaagatatgaaaacaactgaagtgccatcaacagatgaatggatttttaaaatg

SEQ ID NO: 916739 - DNA, 120 bp, Artificial Sequence
  ENSG00000236466_23 (sequence is synthesized)
tggtacacacacacacacacacaatagaatactattcagcctttaaaaagcagaaattctgtcatttgcaacaacatgagtgaatatagaatgcattatcctaagtgaaataagccaggc

SEQ ID NO: 916740 - DNA, 120 bp, Artificial Sequence
  ENSG00000236466_24 (sequence is synthesized)
acagagaaacaaatactgcatgatttcacttacatgtgaaatttttaaaagttgaactcatagaaggagaatagtggttaccagaggctgggaaggtaaggtaactggagaaagaagaaa

SEQ ID NO: 916741 - DNA, 120 bp, Artificial Sequence
  ENSG00000236466_25 (sequence is synthesized)
tgttggtcaaagggtacaaactttctgttagaaaaaataggttctggtgatcttttgtacagcatggtgactgtacatggtgacatgttaatagtaatgtatatttttaaatagctaaag

SEQ ID NO: 916742 - DNA, 120 bp, Artificial Sequence
  ENSG00000236466_26 (sequence is synthesized)
gagtggttttagatattatcaccataaagaaaagtatttaaggtgatgaatatgttaattagcctgatttaatcattccacagtgcatacttgtatcgaaatatcatattggactccata

SEQ ID NO: 916743 - DNA, 120 bp, Artificial Sequence
  ENSG00000236466_27 (sequence is synthesized)
tatataattattatttgtcaataaaacttaaaaaaataaaataatagtcctgatcatcattcaggaaaaggtctttaatttgcaacatattctaatgagctaaatattcttcctatttgt

SEQ ID NO: 916744 - DNA, 120 bp, Artificial Sequence
  ENSG00000236466_28 (sequence is synthesized)
ttgtatatgtttgcataagatatcgattagtgatctaataccaagaagaattgtttttcttaaacagaaatatgtttatgacagagttggttaaagtcacctaatcaacaatatttgata

SEQ ID NO: 916745 - DNA, 120 bp, Artificial Sequence
  ENSG00000236466_29 (sequence is synthesized)
tttgttttatatttattatgtgctaggctttgtgttacagtactaattcaagccatggcaaccctgaagagaatatcttagtagctcaattatagtcccagggcttagggagatagggta

SEQ ID NO: 916746 - DNA, 120 bp, Artificial Sequence
  ENSG00000236466_30 (sequence is synthesized)
acttgcaaaagtatacacaatcagatgcaatagagttgaactttgaatgcataatattggatatcaaagtttctattatgaacctctgtgctttactctctgtaagaataggtatgatgc

SEQ ID NO: 916747 - DNA, 120 bp, Artificial Sequence
  ENSG00000236466_31 (sequence is synthesized)
taaggacacagttgggtgcctaatacatgttttttgcttttgaatgtctcattatgtgagttaaataacctatatgacccactcagaaatcattttgtgtgtggattcttttctatataa

SEQ ID NO: 916748 - DNA, 120 bp, Artificial Sequence
  ENSG00000236466_32 (sequence is synthesized)
taaaccaatcaattgcttagaaaataaaatataacggccaacatataaatttgactacaatgttatgtatgactttaaaaaaattattgtatagcatatccataaaatcattttggtata

SEQ ID NO: 916749 - DNA, 120 bp, Artificial Sequence
  ENSG00000236466_33 (sequence is synthesized)
atcatactgacaccatcgaggtggtattcagcttgctgaaacttattcctgtaaataaaatcagattcgagaaaagaggactaaagacatagaaagagaatagaaaccagagaatttcat

SEQ ID NO: 916750 - DNA, 120 bp, Artificial Sequence
  ENSG00000236466_34 (sequence is synthesized)
ttccaaggttgttcaggtaggctagtttatgctgtggcaacaaacgtcagtgtgtctcttccatgctgcatgtccagcgtgggttttgaaaaaggacattttctttctcgctaacactca

SEQ ID NO: 916751 - DNA, 120 bp, Artificial Sequence
  ENSG00000236466_35 (sequence is synthesized)
gggacccaggctgatggaggctctgcctttctgttgctgcatagctccgctgttatggccacagaggaagaagataataaagtcaatttttatccatatgtctaccttgcatcttgaaat

SEQ ID NO: 916752 - DNA, 120 bp, Artificial Sequence
  ENSG00000236466_36 (sequence is synthesized)
cgacaaacatcacctctacttatagcccattggcccaaagtagtcacatgaccctgtataactgtcaaggtgctgggactgtggggaagcacctcacattcttcaggcactaaatgtatc

SEQ ID NO: 916753 - DNA, 120 bp, Artificial Sequence
  ENSG00000236466_37 (sequence is synthesized)
tgtcacagagagcttatctagtccactgtctttcaaaatgtgcacctttgaaacatagggctttgcagagttgtgtaatgagtcctggaaataataaagtacagtcaactaaataataaa

SEQ ID NO: 916754 - DNA, 120 bp, Artificial Sequence
  ENSG00000236466_38 (sequence is synthesized)
agacctgaggacagaagggttcgggctgcaaggaatcctattgtgtgagagccatgacacagtgagtgggaggttggtatcctacagcaaacgggactgaaggtgaatcgcaatctaggg

SEQ ID NO: 916755 - DNA, 120 bp, Artificial Sequence
  ENSG00000236466_39 (sequence is synthesized)
tagatctgttgctcaacaaagttaaccccagtagaagtctctgctttacggaataaagcaactcaaatggttttgatcttgacctcctggagcattttcatggaaaaggcagttccagga

SEQ ID NO: 916756 - DNA, 120 bp, Artificial Sequence
  ENSG00000236466_40 (sequence is synthesized)
ctacatattgcataattctggtcttggaaaagtttggactctagtaatggtgaagttcttgacctccttcagaaaaacatttttggataaagtactcttagtaagttaaaaagggtaaaa

SEQ ID NO: 916757 - DNA, 120 bp, Artificial Sequence
  ENSG00000236466_41 (sequence is synthesized)
tgtaaaagttgtattttttgcacatctgtcttgtattctgagtcacactcctctcattgattatccttcacaatagccgttgttttaacagcgttatggagataaagttgagatggcata

SEQ ID NO: 916758 - DNA, 120 bp, Artificial Sequence
  ENSG00000236466_42 (sequence is synthesized)
atggcatataattcacccatttaaagtataagattcaatggcttttagtatattcacagagttgtacaagtgttaccacaatcaattaaaaaatgttttggttactgtagccttgtagta

SEQ ID NO: 916759 - DNA, 120 bp, Artificial Sequence
  ENSG00000236464_0 (sequence is synthesized)
gcactggttttctttcctgtctgaccaacaagcctctggagagtggccaccatcttacaggctcactttgtattctgtaaactttcagttggaaaataaacacactgtctccctgtcaaa

SEQ ID NO: 916760 - DNA, 120 bp, Artificial Sequence
  ENSG00000236461_0 (sequence is synthesized)
attgaggatttggtttcaacatgaacttggagaggacacaaacattcagactctagaaagccttactcaacatttgaaaattgaacttgatcctttgggcaacaggaaggaacatgatga

SEQ ID NO: 916761 - DNA, 120 bp, Artificial Sequence
  ENSG00000236461_1 (sequence is synthesized)
gataaagactttagaatgataatccgaggttagaggacatgagaaaaatgcctaatgcagcacaggatacagattctccaaaaaactttaattgacctttcaacttccctttctccctta

SEQ ID NO: 916762 - DNA, 120 bp, Artificial Sequence
  ENSG00000236461_2 (sequence is synthesized)
aagaaagcagggctctgaatccccaagacaaagtgcatccagtattatatactgagaagagaaaatgaaccaagaataaggttctaccatggtgttgatatcagtacagtatccacagat

SEQ ID NO: 916763 - DNA, 120 bp, Artificial Sequence
  ENSG00000236461_3 (sequence is synthesized)
gggagaaaaaaattcatctgccaaccatggctgtcagaactgcaagcatggggttaactcactgtccttcacaaataccctgccccataccaacctggcctgtctttccatcgcaagagt

SEQ ID NO: 916764 - DNA, 120 bp, Artificial Sequence
  ENSG00000236461_4 (sequence is synthesized)
gacggtcaaatatggctgaacaggagcaatttcatatgaattacttcttagattaactgagcaaacaagattgcaacttgctaaaagccaaagtacttccacttccttcaaaagcaacca

SEQ ID NO: 916765 - DNA, 120 bp, Artificial Sequence
  ENSG00000236461_5 (sequence is synthesized)
cttatgactgatttctgctcattaagccagactctcggaagatctctccttggcaatactttactagtttaaaggagccactggcaaaatatacttcaaagtaagcttccctggattggt

SEQ ID NO: 916766 - DNA, 120 bp, Artificial Sequence
  ENSG00000236461_6 (sequence is synthesized)
ccttatatagtatttccacaagggaaatccatcatctgtctcaaacgatgagtcatctatctatattcacccaagagcactccccatataccattcatctgcaagttgagcccaatgtgg

SEQ ID NO: 916767 - DNA, 120 bp, Artificial Sequence
  ENSG00000236461_7 (sequence is synthesized)
gcctgggcaggtgttccaaagcatttagaaagtctttgaagttctcctacagaggctgctttctgatacagtgtctgaaaaacttgcctggcatctcactagggggcttctttggtcctc

SEQ ID NO: 916768 - DNA, 120 bp, Artificial Sequence
  ENSG00000236461_8 (sequence is synthesized)
tgataccacagccacatcgatgagagcactgcacacatccaaaaccggagaaaagcaggagagagagagaagcaacattatactgctcacggaagctcagagggagtagagagcctgcct

SEQ ID NO: 916769 - DNA, 120 bp, Artificial Sequence
  ENSG00000236461_9 (sequence is synthesized)
acaactaaaatgtcatgttaaaggagctgtgacaaaaaaaactacttgaaaatctagcaatgtgcatttacatcatagaactacatctctatggaaaagcattccagtttcaagttttat

SEQ ID NO: 916770 - DNA, 120 bp, Artificial Sequence
  ENSG00000236461_10 (sequence is synthesized)
aaaacaggaaaccagatgaatcccaagaagaagaggaggagcttcagagaggggacatgcttttctcaagatggggaaactgaggcccacagcaacaataataactgtggggatgatatc

SEQ ID NO: 916771 - DNA, 120 bp, Artificial Sequence
  ENSG00000236461_11 (sequence is synthesized)
atttaatattgaaaataagtggataattgagacctccattattagtagttaatttttaaaaatcaaagatctctcctaattagctttatggagcaaataaatatattttccatattcaaa

SEQ ID NO: 916772 - DNA, 120 bp, Artificial Sequence
  ENSG00000279028_0 (sequence is synthesized)
agggggagggaaaaggaaacagaagggaagacagagggggagggggaaagggagcggtaggagggctcagcaagtcctgctctgattccgcgccgaagtggcggacagcgaacccggact

SEQ ID NO: 916773 - DNA, 120 bp, Artificial Sequence
  ENSG00000279028_1 (sequence is synthesized)
gccggatcccagcggaccgcaggaacacggccactccctttctccctacccccactgtccagttcatccagtctccaccgtctctcccctgcttaacgggtctttaaggagattagtctg

SEQ ID NO: 916774 - DNA, 120 bp, Artificial Sequence
  ENSG00000233496_0 (sequence is synthesized)
ccagctcttagtgactctagccctctcccgccctcctctgcaccctgcatgcacttgtgttgctgaatgtggccggagaaaaacacagccatcttgactgttctgtgagacttcatagat

SEQ ID NO: 916775 - DNA, 120 bp, Artificial Sequence
  ENSG00000233496_1 (sequence is synthesized)
ttccagggctgtgtggaatcaaaaaatcttcctgcatttccccagccatctggcctccaggatgactatttcacatctcctcaagcctttcacatctcatccccctcacacctgatgatt

SEQ ID NO: 916776 - DNA, 120 bp, Artificial Sequence
  ENSG00000233496_2 (sequence is synthesized)
acaggcatgagccaccgcgcccagccaaagagcctagaaccatgcctggcacacagtgggcatctagaccctttgctgagtggtgaaattgaagtgtgacagggtgcgtggcttccctgc

SEQ ID NO: 916777 - DNA, 120 bp, Artificial Sequence
  ENSG00000233496_3 (sequence is synthesized)
tcaggctccctcagttcccaaagctgtgctccttcctggatctcatgtagcacaaggaggcatacgtgggtcgcaccacatggcttctagaggagtatgtgtgaatgtgttcatgttcat

SEQ ID NO: 916778 - DNA, 120 bp, Artificial Sequence
  ENSG00000232545_0 (sequence is synthesized)
cacagggctgaaatccctaatgttgaagcttcctgaccaggaaaacgagcagagggcccagagagcttagccattacagaatggcttggttcgtcacttggcctggctcagccctgcttt

SEQ ID NO: 916779 - DNA, 120 bp, Artificial Sequence
  ENSG00000232545_1 (sequence is synthesized)
gggatgtgttgatagtgcctttcttggactaaaatccttgctctctgcctgtcgtgctccatgtcacttcagaatgccagagccagaaaaggcctcagagctcggaggccttgtgctgtg

SEQ ID NO: 916780 - DNA, 120 bp, Artificial Sequence
  ENSG00000232545_2 (sequence is synthesized)
ctccctgctacccctgtgaccaggagcaccttcatgtctgctcgccctgtgatttggagagtgtgtttgatgcgcttggcttctgctgatggcctatcctcccagttctggccagaggca

SEQ ID NO: 916781 - DNA, 120 bp, Artificial Sequence
  ENSG00000232545_3 (sequence is synthesized)
gatgcggtgggggcctcttctccactgcccccctgcctgcacctccagcaggtggcccagtcctatatttccattgctttgctctttcttgctttaaaataaacaacaaaggcaacagac

SEQ ID NO: 916782 - DNA, 120 bp, Artificial Sequence
  ENSG00000232542_0 (sequence is synthesized)
tgccactgaaatctcagctcatgtctggtggccctttttgccaggctctggtcttaagatggtcctgggtccttactgccactcccagtgtcctctactgtcccttgtggttttcctgca

SEQ ID NO: 916783 - DNA, 120 bp, Artificial Sequence
  ENSG00000232542_1 (sequence is synthesized)
aaggctatatcttttctcttcaggcctccctgttccctgagatgcgacaatattgaaattaggctatttaaagtacttcatgactaaaacacgaaaagcaatggcaacaaaaaccaaaat

SEQ ID NO: 916784 - DNA, 120 bp, Artificial Sequence
  ENSG00000232548_0 (sequence is synthesized)
gatttctgagacagaatgatcagggtcagagatgacatttaggatgacaagtttaagggtaattggttgttacaagagacaagaaagagcaatagtgaaaataaacacaggcacaaagca

SEQ ID NO: 916785 - DNA, 120 bp, Artificial Sequence
  ENSG00000232548_1 (sequence is synthesized)
tcacagtgccggtaacagtaaagccaagtgacatgagtctgtctatgtaacaaacctgcacatgtactcctgaatctaaaataaaaatttaaaaaataaataaatgttaaattaaaaaaa

SEQ ID NO: 916786 - DNA, 120 bp, Artificial Sequence
  ENSG00000231892_0 (sequence is synthesized)
ctaatattaccctgatactaaaaccagaaaaagacagtgaaaaaaaaaaaaaagaaagaaaagaagcattgatgcggctgtccagcctgttggatcagctgcaacccaccctggtatgga

SEQ ID NO: 916787 - DNA, 120 bp, Artificial Sequence
  ENSG00000231892_1 (sequence is synthesized)
cccctgccctcacggagctaacgagaagagcaaatggctggcaacggtgcatgacacagaatgagcaacgggctgcacacatcgcgatttacgtggctttggaaaaaacgcgtctcacaa

SEQ ID NO: 916788 - DNA, 120 bp, Artificial Sequence
  ENSG00000231892_2 (sequence is synthesized)
gttggggctgtcatacattggcttcttggtaatcaatgcgtttcagcaatatatgggggtgagtttagtttccagttggcttccctgagggtgttggataaaattgcaatttagattcaa

SEQ ID NO: 916789 - DNA, 120 bp, Artificial Sequence
  ENSG00000231890_0 (sequence is synthesized)
gttctgggcttctggctgcattctaggaagatcattccttaaaagaaatagccatatggcttataaggtgctaaaaggataataccaaggaaaactatgggtgggggcagtgaatggcca

SEQ ID NO: 916790 - DNA, 87 bp, Artificial Sequence
  ENSG00000231890_1 (sequence is synthesized)
gcatgcctataatcccagaaacaaagcaagaccctgtgtctaaaaaaatttttttaaaaataagctgggcatggtggcacgtgccta

SEQ ID NO: 916791 - DNA, 120 bp, Artificial Sequence
  ENSG00000231890_2 (sequence is synthesized)
tggcatgagacctcaggctgaaacttctcatctgagccattgaagggagcctctcatctctccaccgagaggggagaccagaatggctccttcaggcacattctgttgggcttccctcta

SEQ ID NO: 916792 - DNA, 120 bp, Artificial Sequence
  ENSG00000231890_3 (sequence is synthesized)
cctccccactctgctgcttccccgctctttttgaatttctccctgttgaggagagggaagaccagctaggagctctgtttctggcaggaatctgacaccacttactccttgggtagaaac

SEQ ID NO: 916793 - DNA, 120 bp, Artificial Sequence
  ENSG00000231890_4 (sequence is synthesized)
tcccccaagtctgaactatgtgattgcctgagccctgcttcttgttcattaagactgctcctctgaaacggaattgatgaatttttagtggctattagaagcatttgggatccataggca

SEQ ID NO: 916794 - DNA, 120 bp, Artificial Sequence
  ENSG00000231890_5 (sequence is synthesized)
taacatgtaaatgttgaatctgcatctcacttgaaatggttgggtttggagaaacggatagtcaagcttattggaattattgttaaaaaagtaatttgaaggccttccctgacttaaagt

SEQ ID NO: 916795 - DNA, 120 bp, Artificial Sequence
  ENSG00000231890_6 (sequence is synthesized)
ggatgctgctttggaaagcactggaaaaatggatcctgtctttcttagccaaggactggtctcttttctccaatgtgtccctaacagagtggtgaggctggctcttcccaccagtacagg

SEQ ID NO: 916796 - DNA, 120 bp, Artificial Sequence
  ENSG00000231890_7 (sequence is synthesized)
aagatcattccttaaaagaaatagccatatggcttataaggtaagactactcagttcccatcccaacccccagaagagaatggaggaagggaagcagactctggctatatttttatggct

SEQ ID NO: 916797 - DNA, 120 bp, Artificial Sequence
  ENSG00000231890_8 (sequence is synthesized)
gcccttacatggcagagggagggagaagggccagcaacattggttaacaggaatagagaatgttcgaggaaggcagtggcaggcaatagccatagagagtcacagaaggttaaagaggtt

SEQ ID NO: 916798 - DNA, 120 bp, Artificial Sequence
  ENSG00000231890_9 (sequence is synthesized)
gtggaaacagtcatttgtttttcaagcagttccggtggggtttgagaaagcagcagcactcaactgtgagcagacaaactcactttggaaacctatgcagccacttctaagtaaactacc

SEQ ID NO: 916799 - DNA, 120 bp, Artificial Sequence
  ENSG00000231890_10 (sequence is synthesized)
aagagaattattattttatttaggttcctcatttcagtgacaatcttttaatcctttgaactgtatgctgaaaaggacattatagatcctcctgaaagataatttttagtgtccacggtt

SEQ ID NO: 916800 - DNA, 120 bp, Artificial Sequence
  ENSG00000231890_11 (sequence is synthesized)
gttagaaagtgaattaatcttgaccttggcctcaggggtgtggttctctgccctcttacacatcttcaattcgcttctttatcagaagcacttgttttaggcccaggctcccccaatttt

SEQ ID NO: 916801 - DNA, 120 bp, Artificial Sequence
  ENSG00000231890_12 (sequence is synthesized)
aatttctccctgttgaggagagggaagaccagctaggagaggatctggattgagaaacttgccatgcttttctctcagatgttctcttttctctgaagacagcaggacctcatccaaagc

SEQ ID NO: 916802 - DNA, 120 bp, Artificial Sequence
  ENSG00000231890_13 (sequence is synthesized)
atctgaaaaacaggaaattttggagaaacatgcttatgataacaaacaagggatctatcgtgtggtatagaagtttacacaaagaggcatctgattttaagtttttgttttttttttttt

SEQ ID NO: 916803 - DNA, 120 bp, Artificial Sequence
  ENSG00000231890_14 (sequence is synthesized)
ctgggcttctggctgcattctaggaagatcattccttaaaagaaatagccatatggcttataagggactatatcttaagactatgtgtcttctgcagttctttgcatagagtcaacgttg

SEQ ID NO: 916804 - DNA, 120 bp, Artificial Sequence
  ENSG00000231890_15 (sequence is synthesized)
ttattggaattattgttaaaagtgttctttcttggaaccatctgccaagctgtgaggaagctccagagccatatgacaagacctgatggaggataactgaggactttggccaacaacccc

SEQ ID NO: 916805 - DNA, 120 bp, Artificial Sequence
  ENSG00000231890_16 (sequence is synthesized)
agctgagctccagttggaatgtgaatgaggccattttgagtgttccagcctattggagccctagccaacactctacaaactagaactgcctgattgacccgcagaatcataagaaataaa

SEQ ID NO: 916806 - DNA, 120 bp, Artificial Sequence
  ENSG00000231890_17 (sequence is synthesized)
tccttaaaagaaatagccatatggcttataaggattgtgtgtccagtgttcagaagagtgcctggcacatcaaaagtgctgagttaatgtttattgggtaaatgaatacagttttgggaa

SEQ ID NO: 916807 - DNA, 120 bp, Artificial Sequence
  ENSG00000231890_18 (sequence is synthesized)
gcaacaaaattatgttcgggtggttttctgaaagcgagatcttaagaaccacctgtatcagaatcccatgaagagcttgtttagtgtgcaaatttacagattgtcccccctcagaaatgc

SEQ ID NO: 916808 - DNA, 82 bp, Artificial Sequence
  ENSG00000231890_19 (sequence is synthesized)
acatgtatacctatgtaacaaacttgcatgttcagtacatgtatcccagaacttaaagtaaaatataaaacaataataaaaa

SEQ ID NO: 916809 - DNA, 120 bp, Artificial Sequence
  ENSG00000231890_20 (sequence is synthesized)
ggagaccagaatgactgtatccacagagcggtgctcttgccttgaaaggaaggatttgccccggtttggaaggaagtggaataaatagaactggaaatggctccttcaggcacattctgt

SEQ ID NO: 916810 - DNA, 120 bp, Artificial Sequence
  ENSG00000231890_21 (sequence is synthesized)
ctaacctcaactgcaccttctgtctctgggaagtcacttatagagtagacctataattaggatttggtaccggaaacataattctcaggatggtgaatctctaaattatgtccccagaga

SEQ ID NO: 916811 - DNA, 120 bp, Artificial Sequence
  ENSG00000231890_22 (sequence is synthesized)
catacctgagacaaaaccctaagggctgttggccgtaagagggtgtgtgtggtattctacattcagtagggatttataaatgaggatgatatcactcagaaggggcaggtgtccaagagg

SEQ ID NO: 916812 - DNA, 120 bp, Artificial Sequence
  ENSG00000231890_23 (sequence is synthesized)
cccttttgacttctgcaatggggcctgacagccccgtgaactgagctccataatttatgcctccggcatagaatctgtgcaaagcaggaatggccgtatcagcatttggggatttaaagc

SEQ ID NO: 916813 - DNA, 65 bp, Artificial Sequence
  ENSG00000231890_24 (sequence is synthesized)
gttctgggcttctggctgcattctaggaagatcattccttaaaagaaatagccatatggcttata

SEQ ID NO: 916814 - DNA, 88 bp, Artificial Sequence
  ENSG00000231890_25 (sequence is synthesized)
tccctggctccaggcccatacattgaactgcatatggaacagttctcttctagatgacctgcgggcatcttcatcttaggactatatc

SEQ ID NO: 916815 - DNA, 120 bp, Artificial Sequence
  ENSG00000231890_26 (sequence is synthesized)
tggatcattaaagctttgaaggatgctaatgggcagaaaaaagagacttaacaaaacgaaagttattattaggaattacaaatcacttaacatttcaacatcactcgtcggatgtgggca

SEQ ID NO: 916816 - DNA, 120 bp, Artificial Sequence
  ENSG00000231890_27 (sequence is synthesized)
ttttgttgaaagagaccttgttttgaacagtgacagtgcagaagacctatggaagaaacaagcttccaacttgatttctattgttatgcatgcatagcaaattattaattctattctaat

SEQ ID NO: 916817 - DNA, 120 bp, Artificial Sequence
  ENSG00000231890_28 (sequence is synthesized)
gctgacatgtctgcgtcactcctattgatgctatgatgatcatgagcatgaagttgccaaagaaactgcttctctgaggaaatttccatgagtgtgaaatcatgggaatcaaaattgatg

SEQ ID NO: 916818 - DNA, 120 bp, Artificial Sequence
  ENSG00000231890_29 (sequence is synthesized)
ggaaagtccctccgagagtgtgaaaattgccaggattcttataggaaaagagcttatgatcatctccttcaccatttagtcagatgcatttctattgcctttggagaaaattgccaagct

SEQ ID NO: 916819 - DNA, 120 bp, Artificial Sequence
  ENSG00000231890_30 (sequence is synthesized)
ctgttcagtgcaaaatgcttcatttttcttcaagtactttgggtggatatatgtttgtaaaattcggattttcatagtttatttagtccagccccagcattcgacaggcaaggacaccca

SEQ ID NO: 916820 - DNA, 120 bp, Artificial Sequence
  ENSG00000231890_31 (sequence is synthesized)
agaacagaggaatgaaatgaccttaaggtgtgacctacaagttacagccagaaccaggatacaaaccaaagtcttctgcttctttctattgtacctccatgccttgcacccagggcagaa

SEQ ID NO: 916821 - DNA, 120 bp, Artificial Sequence
  ENSG00000231890_32 (sequence is synthesized)
gttctgggcttctggctgcattctaggaagatcattccttaaaagaaatagccatatggcttataagtgttctttcctgtatgaagcccaagctgtccacttggagagacatctggccag

SEQ ID NO: 916822 - DNA, 120 bp, Artificial Sequence
  ENSG00000231890_33 (sequence is synthesized)
ccccagctaccatctgatgcaaccacactgctcaccccgagcaagaactgcctgcaggagcctagtattatcctctctcacagaaccatggcagggaataataaattgttgtttgaagcc

SEQ ID NO: 916823 - DNA, 77 bp, Artificial Sequence
  ENSG00000231890_34 (sequence is synthesized)
cgggggtgggaggtgctaaaaggataataccaaggaaaactatgggtgggggcagtgaatggccagcatgcctataa

SEQ ID NO: 916824 - DNA, 120 bp, Artificial Sequence
  ENSG00000231890_35 (sequence is synthesized)
ttttaaaagaaaataattattgatgtgtaaagtaaatgaaaacacagtcaagtgggagtgtaattgaaagtaatttaagagttcaatggttgatgacttttttcaattatgatatctctt

SEQ ID NO: 916825 - DNA, 120 bp, Artificial Sequence
  ENSG00000231890_36 (sequence is synthesized)
tattaataggaaattcataaattaaggagtatgcaatataatcattgtggaatatattagggaaacatttttgatccatgcaagtaaattgagatagactgggtgcacctgttcctagtc

SEQ ID NO: 916826 - DNA, 120 bp, Artificial Sequence
  ENSG00000231890_37 (sequence is synthesized)
atgcccagggaatatgtgaaactctggctcaggatgaacgtctgttggtgtcagcacaacaataatgaaacaaagttggcagtagggtggggaagtgtttggtgggtgggagccaccatc

SEQ ID NO: 916827 - DNA, 120 bp, Artificial Sequence
  ENSG00000231890_38 (sequence is synthesized)
tgcagccagctcccagcacggctgtgtgttcggatacccatcaaccaggaaagggagtctaaggcctccagatgattttcccctttcacaaaactgttgtaaaatgaaatacaaatcctt

SEQ ID NO: 916828 - DNA, 120 bp, Artificial Sequence
  ENSG00000231890_39 (sequence is synthesized)
cctgaatgttcctagcttttcttcctttcggaagttttcagtcaatgggaaacaaagccttattcaaaggattaaagccatagtcattctattgtttggggcttcaataatgtggctttc

SEQ ID NO: 916829 - DNA, 120 bp, Artificial Sequence
  ENSG00000231890_40 (sequence is synthesized)
ctttccttaatctctgaggtctcacctcttcaagacccaattgtgtaagccaccttacataatgttattatgatgtcccccttcctcatccagccagaaggatttacttccttctctgta

SEQ ID NO: 916830 - DNA, 120 bp, Artificial Sequence
  ENSG00000231890_41 (sequence is synthesized)
tgctcatagcaatttgttcattttctattcttctcacccttgtcctgtgttagagttaccgaaatatatgtatatgtgtgtgtatatattttttgtcttgttttgttcctgttagatttt

SEQ ID NO: 916831 - DNA, 120 bp, Artificial Sequence
  ENSG00000231890_42 (sequence is synthesized)
agaaaacttgatgtattaggcaatactacataccacattagtctaaccgctcaactgtaatttttcatccatactttcttgggatgtaaataaaattgatattatacaatgaaaataaaa

SEQ ID NO: 916832 - DNA, 120 bp, Artificial Sequence
  ENSG00000231890_43 (sequence is synthesized)
tcctccctccctcggcgcagcccggcccaggggtctgtcctcccaggcccaggaaaggaggaaacccacttccgccgcgtccatgatctcccgcggcttctcctgactcttgcggctggc

SEQ ID NO: 916833 - DNA, 120 bp, Artificial Sequence
  ENSG00000231890_44 (sequence is synthesized)
ctgtaaccgcagactcgtcactaaaacacccacctaagcgcgggccttggtttctcctctcttggactttcccgccttctctcttcccctgggcgacgtagctgcttggggacggaggag

SEQ ID NO: 916834 - DNA, 120 bp, Artificial Sequence
  ENSG00000231890_45 (sequence is synthesized)
gcctcttcgcaatccattgccctgcttgttgggacagaggagtgcagttggcttgccaaggcagcatgggttaccagtccctgtgtaagtgaggtgtaaatacagtggcaacgacaacaa

SEQ ID NO: 916835 - DNA, 120 bp, Artificial Sequence
  ENSG00000231890_46 (sequence is synthesized)
cgcttctagtaggccaaactcccaggtgacccccgcaagaaacgcggtccggagagggtctggccccactgctggggcaagggctctaggcgcccggaccccacgcccgcagcctgcgga

SEQ ID NO: 916836 - DNA, 65 bp, Artificial Sequence; identical to SEQ ID NO: 916813
  ENSG00000231890_47 (sequence is synthesized)

SEQ ID NO: 916837 - DNA, 120 bp, Artificial Sequence
  ENSG00000231896_0 (sequence is synthesized)
ggttctgggcctcctggagcatcatgagaaggcatagggatgctcagcctgaagagcaggagatgctgcaggcaggacagctggcctgaaagaagtgggaaagaaactgcaatgatcaac

SEQ ID NO: 916838 - DNA, 120 bp, Artificial Sequence
  ENSG00000231896_1 (sequence is synthesized)
tgttcagattatcaaagaacaccaaagattatagaagaagaccagcaaaattatataatcatgaaaaagagtattaagacaaattcttcagccaggtaaaaaaaatgagaacattggccg

SEQ ID NO: 916839 - DNA, 120 bp, Artificial Sequence
  ENSG00000231898_0 (sequence is synthesized)
ataactaacttccttccttcctgccttcctccctccctgccttcccttccttcctgccttccttcttccttcctcccttttttcttttctcccttccttccttcttaatatgtttttggc

SEQ ID NO: 916840 - DNA, 120 bp, Artificial Sequence
  ENSG00000231898_1 (sequence is synthesized)
cttttctttatatatgtggcctagcaatatcctgtgtttggaaaagtataaacctaaggcatcacctttacagaaaatatcttccacggaaacatctaaagtgaggaagtaaagttgcat

SEQ ID NO: 916841 - DNA, 120 bp, Artificial Sequence
  ENSG00000231898_2 (sequence is synthesized)
tcacaggccttgaacttttccacatctcgatttttacccatcatctctgcatagttccctaaggcagccttcaaatggtgatgtttcttataatccagagttcagaagtggcttctcttc

SEQ ID NO: 916842 - DNA, 120 bp, Artificial Sequence
  ENSG00000231898_3 (sequence is synthesized)
tctgtggaattctaaaccacgtgataaaggagctggtggccacagatcagccctggggttcagagggatcctgacagctactcctcaagatcctctctgttgtgattcatccccccgggg

SEQ ID NO: 916843 - DNA, 120 bp, Artificial Sequence
  ENSG00000231898_4 (sequence is synthesized)
ccctacagtttctccttcctgactcttacatttctttggatggcatcattatttacctgtctcctcccatagttaggtgccaagcactgtggattctgcctctcagtgtccagacaccca

SEQ ID NO: 916844 - DNA, 120 bp, Artificial Sequence
  ENSG00000231898_5 (sequence is synthesized)
ttttccttcccactgttccttccccatggagaagcctgtggctggctgacagcagagagagatgctcaacttggagaaggtgttacctgggccaggtggggaaggtttgtttgcagagca

SEQ ID NO: 916845 - DNA, 120 bp, Artificial Sequence
  ENSG00000231898_6 (sequence is synthesized)
aagaagtgaaggaagtattaaccctttgcatggcctcctgagaatccgacaagacgtaaatagccaagaatatctgtgaaacttcatcactgagttacaatatttatcactgcaagtgtg

SEQ ID NO: 916846 - DNA, 120 bp, Artificial Sequence
  ENSG00000231898_7 (sequence is synthesized)
acacattgccccattttaaaatacaccagtcatactagattggggcccatcctactccagtatgacctcatcttaactaattacatctgtaatggccccatttgagatattgaggatgag

SEQ ID NO: 916847 - DNA, 120 bp, Artificial Sequence
  ENSG00000231898_8 (sequence is synthesized)
aacatcaacatatgaattttgaggggacacaattcgacccatgacatgggggattgaagccagggtttctgtatgtgtgtgtgaagcactgcttgagcctgaaggttcaagctttgggcc

SEQ ID NO: 916848 - DNA, 120 bp, Artificial Sequence
  ENSG00000231898_9 (sequence is synthesized)
tcttttaaaggcaaaaattctcattattcactaaaatgtgggcttttaaataaaactattatttcaaaaaatcattaaatagcccttcatactaaaaataaattatgaaatttccccctc

SEQ ID NO: 916849 - DNA, 120 bp, Artificial Sequence
  ENSG00000231898_10 (sequence is synthesized)
cattcactaacctggtatgacagctaaatattatgcatttgatgaccctagaaagttccgaattaaaatactaagaaggcagtggaagccgcacatatgcccaaaagcacataagaccaa

SEQ ID NO: 916850 - DNA, 120 bp, Artificial Sequence
  ENSG00000231898_11 (sequence is synthesized)
cagaatctatgatgacttattatatctaaattttctgttataaatttttaattcattaaaacacacccacacatatacccctttcttcattagtgccaaagggctatgtctgttattttt

SEQ ID NO: 916851 - DNA, 120 bp, Artificial Sequence
  ENSG00000231898_12 (sequence is synthesized)
atccctgccagaaatcatcactgggctgaaagaatgtagtactggtgacatgagcctgcatttccatttttaattaaaattctaactgacccagagccagatttccttctgcaccagagc

SEQ ID NO: 916852 - DNA, 120 bp, Artificial Sequence
  ENSG00000231898_13 (sequence is synthesized)
accaggaagtcaccacagctcttaggcaaagacccggaaaggtgtcaacatggccacactactgctcccaccttgtccttactttcctcatctcatcccacaggccacagatcagccctg

SEQ ID NO: 916853 - DNA, 120 bp, Artificial Sequence
  ENSG00000231898_14 (sequence is synthesized)
tccacttccaagtaatgaacacactggagaaagtcagacagtcaaaacaatgtcccagactccgtgaagttcctgggtagagaaggagacagacatataccatacctaataattggatgt

SEQ ID NO: 916854 - DNA, 120 bp, Artificial Sequence
  ENSG00000231898_15 (sequence is synthesized)
ccgagagaatgagagaatggcagaaagaactttagagcatgggtatgatggctagagcttgagcagccattgtggacatcagatgaacttgaaagtgaaaactatgagctgaatacgaca

SEQ ID NO: 916855 - DNA, 120 bp, Artificial Sequence
  ENSG00000231898_16 (sequence is synthesized)
aagcaaacagatagaaaactggattcattatgacattgcaaagctgccagaccagctctagtctgcttccccctaatcttccttactaagagagagaaataaacttccatcttcttcaag

SEQ ID NO: 916856 - DNA, 77 bp, Artificial Sequence
  ENSG00000231898_17 (sequence is synthesized)
tacagtttctccttcctgactcttacatttctttggatggcatcattatggaccttgtgatccacccgcctcggcct

SEQ ID NO: 916857 - DNA, 120 bp, Artificial Sequence
  ENSG00000231898_18 (sequence is synthesized)
attgacactataaagccatgtggaattaagcagccttgaaacacaaaatggagaaaggctaagagctgagaattgttgccttcagggaaatacaatcaatgtcaagcaaacaaccacccc

SEQ ID NO: 916858 - DNA, 120 bp, Artificial Sequence
  ENSG00000231898_19 (sequence is synthesized)
tccttcaaattcaaatttatccaatcatttcttctgcttactaccatcctaaatcatttttctttagtaagatctattagtgtgaagctattaagctattaatgtatgtatcatattaat

SEQ ID NO: 916859 - DNA, 120 bp, Artificial Sequence
  ENSG00000231898_20 (sequence is synthesized)
aagaataaacatatgcaaatgaccattagtcttagtagttttagggctcagaatgatcttatcttgttaacattcagggcaactgcttatacccatttgaatgtcatttagagggctagg

SEQ ID NO: 916860 - DNA, 120 bp, Artificial Sequence
  ENSG00000231898_21 (sequence is synthesized)
aaagactgcttcaacatttgatgactaaatggcagggctcagccacaatgctcactccgagaaatgagaaatagacacaccagtatgctagatgctgatgcagttcaggaaatgctaccc

SEQ ID NO: 916861 - DNA, 120 bp, Artificial Sequence
  ENSG00000231898_22 (sequence is synthesized)
caaaatatggcccctcagcatactgagtattttaagcagaaggcaattaagaaaaccacaaaaacagaaaggtccctctgaccttctcccaccctctctctcttgaagatcctcatgtga

SEQ ID NO: 916862 - DNA, 120 bp, Artificial Sequence
  ENSG00000231898_23 (sequence is synthesized)
caggtgacctgccatataatcagaaggaagaaatgttacacagagaggctgagaagaatctgaggacttgctaagttttccccagtttattaccattagatcatatgccttttttgttca

SEQ ID NO: 916863 - DNA, 120 bp, Artificial Sequence
  ENSG00000231898_24 (sequence is synthesized)
atcatacttctatacaactgtccatcattcattaaacctaaccacaaaagtagttttcactcggtttttgagtgaaggctcctgtgtcacataaaacttacattaaataaatttgttcca

SEQ ID NO: 916864 - DNA, 120 bp, Artificial Sequence
  ENSG00000231898_25 (sequence is synthesized)
tcattattcttcctttgcagctaggtgtggccatgtgataaagttgtagctaatgatacgttgtgtgaaactgccagaaagccttcccgccccgccccgccccccacccccccaaccgag

SEQ ID NO: 916865 - DNA, 120 bp, Artificial Sequence
  ENSG00000231898_26 (sequence is synthesized)
ctgtggctggctgacagcagagagagatgctcaacttggagaaggtgttacctgggccaggtggggaaggtttgtttgcagagcaaagaagtgaagcctattcaacgtgaaaaagatgag

SEQ ID NO: 916866 - DNA, 120 bp, Artificial Sequence
  ENSG00000231898_27 (sequence is synthesized)
aagtttacaaatttgtgttggaccacattcaaagctgtcctgggtggcatgagaaccatgggctgaggattggacaagcttgctctacaatattcacagagccagatttccttctgcacc

SEQ ID NO: 916867 - DNA, 120 bp, Artificial Sequence
  ENSG00000231898_28 (sequence is synthesized)
gtgagaaataagggaaggcagagatgaaaaggaatgggcagaagcttttggagaggaataaccactgagattgccatgaaggattcattctgacattcttttcatgtatttaaggcaatc

SEQ ID NO: 916868 - DNA, 120 bp, Artificial Sequence
  ENSG00000231898_29 (sequence is synthesized)
tccacccatcttggcctcccaaagtgttacgtgtgaaccactgcacctggccaaaaatattttactaagaaaaaggagtcacctattgtatgattccatttatatgaaatatccaaaata

SEQ ID NO: 916869 - DNA, 120 bp, Artificial Sequence
  ENSG00000231898_30 (sequence is synthesized)
aaatggaatgtcagccattaacctcacagtaggtgatgaaaagatattactttttctcccctatactacccaagccagccacctcaagaaagaacagttcatgtgcagcctattcaacgt

SEQ ID NO: 916870 - DNA, 120 bp, Artificial Sequence
  ENSG00000231898_31 (sequence is synthesized)
gacttttttctagcaatacatggaaataagggcttgtcggcaactcaagttcagaaaatgaagaaagtgacagttctgcacacatgaattatggctgtaaattttaaagccatcatatgt

SEQ ID NO: 916871 - DNA, 120 bp, Artificial Sequence
  ENSG00000231898_32 (sequence is synthesized)
gatccttgattttaccttgattctaactgcttcctaaagccatggattgctcagattcaataggcagaggaatgggaagcagcaagaattaccagaaataaatatacatcagataatgtg

SEQ ID NO: 916872 - DNA, 120 bp, Artificial Sequence
  ENSG00000231898_33 (sequence is synthesized)
agagctgtgagaaggctgagttggccgcccagctaaaagcagcagaatcccaggttcatctgcaggagaaattcctagaaatggggatgttggatcaaaagcaccagcaaccggaatgga

SEQ ID NO: 916873 - DNA, 120 bp, Artificial Sequence
  ENSG00000231898_34 (sequence is synthesized)
cccttgaccaagagaaatccatcttgattgtctcaataatcggctcaaggaccactgatgatgaggtcctaaatttaattcctaaaaaaccactaaagttatagaggcaaaatgagaaag

SEQ ID NO: 916874 - DNA, 120 bp, Artificial Sequence
  ENSG00000231898_35 (sequence is synthesized)
atcctctctgttgtgattcatccccccggggccctacagtttctccttcctgactcttacatttctttggatggcatcattattctgggattacagttaggtgccaagcactgtggattc

SEQ ID NO: 916875 - DNA, 120 bp, Artificial Sequence
  ENSG00000231898_36 (sequence is synthesized)
aaccaaacatcttcctttcttaaggctgcatcccacccggttgttgaagtcagaaacctggattctacattctcccttaaccccatatccaattaaagcaggcagaataatggctccctc

SEQ ID NO: 916876 - DNA, 120 bp, Artificial Sequence
  ENSG00000231898_37 (sequence is synthesized)
ccacagctaaccacgggtgtccaatcttctgccttccctggaccaactggaagaattgtcttcgaccacacataaaatacactaacaatagctgatgagctttaaaaaaaaatcacaaaa

SEQ ID NO: 916877 - DNA, 120 bp, Artificial Sequence
  ENSG00000231898_38 (sequence is synthesized)
tctgacattcttttcatgtatttaaggcaatcaaaaaagaatccacagctaaccacctgtcctgggtggcatgagaaccatgggctgaggattggacaagcttgctctacaatattcaca

SEQ ID NO: 916878 - DNA, 120 bp, Artificial Sequence
  ENSG00000231898_39 (sequence is synthesized)
gatcctctctgttgtgattcatccccccggggccctacagtttctccttcctgactcttacatttctttggatggcatcattattcctattcaacgtgaaaaagatgaggatgaagacct

SEQ ID NO: 916879 - DNA, 60 bp, Artificial Sequence
  ENSG00000231898_40 (sequence is synthesized)
ctgcaaccctaggtgccaagcactgtggattctgcctctcagtgtccagacacccatttt

SEQ ID NO: 916880 - DNA, 120 bp, Artificial Sequence
  ENSG00000231898_41 (sequence is synthesized)
aatgacatggggaaatggaggaggtgtctgagtagccagacttgggttttcttcatatatccaggtgaaaaaggtacataggatgttgatattctgcctcaaaatatacacagtatgggc

SEQ ID NO: 916881 - DNA, 86 bp, Artificial Sequence
  ENSG00000231898_42 (sequence is synthesized)
ggatgttgatattctgcctcaaaatatacacagtatgggctgggcatggtggctgtaggaggatcacctgaggtcagcagttcgag

SEQ ID NO: 916882 - DNA, 120 bp, Artificial Sequence
  ENSG00000231898_43 (sequence is synthesized)
aaaatagtgatgctttacaataggggtgtccaatcttctgccttccctggaccaactggaagaattgtcttcgaccacacataaaatacactaacaatagctgatgagctttaaaaaaaa

SEQ ID NO: 916883 - DNA, 120 bp, Artificial Sequence
  ENSG00000231898_44 (sequence is synthesized)
ttgaattggcatataataggatttgccataaggaactatcttagggaggaatttctgcatagttgacccttgaacaacatggattttaactgcatggatgcacttatacatggattttct

SEQ ID NO: 916884 - DNA, 120 bp, Artificial Sequence
  ENSG00000231898_45 (sequence is synthesized)
agtctttttgattcacagtatgaaaatcaagtgtaattttttttaaaagaagaaagaaaagccagtatggagaaaatggtacagacataacttaatgaatccacagcagctacaaaagtc

SEQ ID NO: 916885 - DNA, 120 bp, Artificial Sequence
  ENSG00000231898_46 (sequence is synthesized)
agctaatataatgcgccacaagcactaacataaaatctatgacatatgccacagatctggtttctcacaagatttaaacccagcatctgtcaggaaataaacaggatatgctgacaacag

SEQ ID NO: 916886 - DNA, 120 bp, Artificial Sequence
  ENSG00000240963_0 (sequence is synthesized)
cttttaatgattgccagtaatgcaagaaacactccttgagagggaggggaaaagactttcttaaatatttcatttatgacctgcaaattcaagaataaagacactgaatggattggtttt

SEQ ID NO: 916887 - DNA, 120 bp, Artificial Sequence
  ENSG00000240963_1 (sequence is synthesized)
caacatcgtgcctgccgatatgcctacagaatcatctatgagatgagctgctgttgatgtgaaaaatattaagtgttggctgagatttaggaacatctaaatctaaacgactttcgtgac

SEQ ID NO: 916888 - DNA, 120 bp, Artificial Sequence
  ENSG00000240963_2 (sequence is synthesized)
tctctttgcactatgatcaaaatggagtcttgccagctgcccagggtaatagccttgaacgtctcttccttggtgagcgatgaatatactagagcagaaagtgaggaggtgagaagaaag

SEQ ID NO: 916889 - DNA, 120 bp, Artificial Sequence
  ENSG00000240963_3 (sequence is synthesized)
ccattcttacaattagttcattccagaagaatgccagctgcggcataatacaaaacgtatttggtctttgtccccagtttctggcactgagcccctaaaacccatggaatttcctgataa

SEQ ID NO: 916890 - DNA, 120 bp, Artificial Sequence
  ENSG00000240963_4 (sequence is synthesized)
gggtctttttcatgcataaccagcccttttctaccatagctgagtgtatgggcctcgcaggcctccctcctcccaccacaacctcccgcatctgtaataaaatgttatttatgttcagga

SEQ ID NO: 916891 - DNA, 120 bp, Artificial Sequence
  ENSG00000237767_0 (sequence is synthesized)
ctgcgttagtttgctaaggataatggccattatcttagccatttgaaaataatgatttaacctctctcaccttcattgtcattttagaagaaactaccatttggtgtcctgctgagacaa

SEQ ID NO: 916892 - DNA, 120 bp, Artificial Sequence
  ENSG00000237767_1 (sequence is synthesized)
ctgctgagacaagaaaatattttcacaactcaagacaagttaaatatccacttatgggaacagtgctgaaggcctggactaggatggtagcaatggagacagactaaagaaagagatgca

SEQ ID NO: 916893 - DNA, 120 bp, Artificial Sequence
  ENSG00000237767_2 (sequence is synthesized)
atcattcccttgcatatggtccgtatgaagacgggatcattacaggaaaggcctagtagagctgccaactgactgcagacacatgagtcaatccagctaatgccacatggagcagagaca

SEQ ID NO: 916894 - DNA, 120 bp, Artificial Sequence
  ENSG00000237767_3 (sequence is synthesized)
agccgcccagctgagcccagtccagatgacagaatcatgagcaaataaggttgttgttcttttaagccactaaattttcgggtgatttgttacacagtaataaataactgaaacaactat

SEQ ID NO: 916895 - DNA, 120 bp, Artificial Sequence
  ENSG00000237767_4 (sequence is synthesized)
gtacagtttaatgatctgaaatcaatccatagtgttatgatagcctttttaacaaaattgaaatgataacttattcatttacaatgcaaatcaatttaatggcaatagttacaactgccc

SEQ ID NO: 916896 - DNA, 120 bp, Artificial Sequence
  ENSG00000237767_5 (sequence is synthesized)
gtgactgaatctccatgagcaagataatagtaaagctctttttttctctttctctttttttccagatgaataattttacatttacactgataaaaagttaaagttgcagctctgttttca

SEQ ID NO: 916897 - DNA, 120 bp, Artificial Sequence
  ENSG00000237767_6 (sequence is synthesized)
cactacctgagggatctttgtagattacataaaccctaagcctcctgtgtaagttaaggaaaaaaattccaaactcacagtgttatcgagaggattaaataacataatttatgcaaagtc

SEQ ID NO: 916898 - DNA, 120 bp, Artificial Sequence
  ENSG00000237767_7 (sequence is synthesized)
ttaaccatagttgctagcatttaaactttaacttttgtccatgtctctaatgtaatttaaaatgatcttactctttaaggtttgatctaatagaatatttgtcagacacaaagaccaaga

SEQ ID NO: 916899 - DNA, 120 bp, Artificial Sequence
  ENSG00000237767_8 (sequence is synthesized)
tttgtcccagttgatgaaccctgggtataactcaatagcatattggcagtttttattttctgttaagtctggatccattcaattagtgatttatttcttaatttgtcaaacattacatta

SEQ ID NO: 916900 - DNA, 120 bp, Artificial Sequence
  ENSG00000237767_9 (sequence is synthesized)
acaaagtaacaacttttctatccatattatattgtggttacaaaaaatggatcaattatatttgaattaaaaaatttaattgccaccaaagaagagaaaaataactagagaaaaataaaa

SEQ ID NO: 916901 - DNA, 120 bp, Artificial Sequence
  ENSG00000237767_10 (sequence is synthesized)
aagccagcattaggcgtgatggggacgtgcataaatgtgtatgttatccactgagacacagattctgaagcaccagaacattaaaggcacttctacttgtttcttctacccagctgaaag

SEQ ID NO: 916902 - DNA, 120 bp, Artificial Sequence
  ENSG00000237767_11 (sequence is synthesized)
gacagaaagcttcttccacagagccaggacagtccaggggaacgtagtccttcgactgaaagctatgcttcctattttctaacaaagaggctaggtcatgttgaccacccagttttggcc

SEQ ID NO: 916903 - DNA, 120 bp, Artificial Sequence
  ENSG00000237767_12 (sequence is synthesized)
tgcctggcttgctttttattccagcctggaggactttcagggttgaatatccactcaagccaaatcccaagaagcataacctgctattagactcttgtcacttatcgggtgaggggctgt

SEQ ID NO: 916904 - DNA, 120 bp, Artificial Sequence
  ENSG00000237767_13 (sequence is synthesized)
ttaaagagagctcagggatgtctggacaggacctggagacagtgccctgggccagagacctctgatctctaggccagcagagtcaccatgcagacagatttatgagccttaggcaaaaca

SEQ ID NO: 916905 - DNA, 120 bp, Artificial Sequence
  ENSG00000237767_14 (sequence is synthesized)
gctggcattcctgtggccatctttctaccccttcctttccacatgaccatatccttggccagatcttcatgtccttagatggctgttgcctttgggtaaattggcaattaagataaatga

SEQ ID NO: 916906 - DNA, 120 bp, Artificial Sequence
  ENSG00000237767_15 (sequence is synthesized)
gcatatttatcatggccttgtggttacccctcctgaagctctcagggtggcaagctgcctgaccctcctactatgaacttagtaactttaaaacagagagtatcttttcttgcccagctg

SEQ ID NO: 916907 - DNA, 120 bp, Artificial Sequence
  ENSG00000237767_16 (sequence is synthesized)
aaatttcctccccaggcgacctacttttaggattaatatgcgggaaagtctgcagttttgttttcagtgagggtagttgtgttttcaaggaaagaggtagcgccttacagtcagattagc

SEQ ID NO: 916908 - DNA, 120 bp, Artificial Sequence
  ENSG00000237767_17 (sequence is synthesized)
cagctttatttctttcatcaaccctttactggctttctaaattttttcaagtaacttcacctctctgagtttcatttacctcattaccttcatcaggtaagatgacatatgaaaagccct

SEQ ID NO: 916909 - DNA, 120 bp, Artificial Sequence
  ENSG00000237767_18 (sequence is synthesized)
tctcaagcaactgcaaagttccaattaatagaagaaattgtaatgactatctgtgtttgaagcggggccatttttcttatttggaattttcacgtattaaaaatatggatcctttacacc

SEQ ID NO: 916910 - DNA, 120 bp, Artificial Sequence
  ENSG00000237767_19 (sequence is synthesized)
gagccttgtaagttctctttacacgtatgtttatgtctatatctacttgtctatctgtgtatctatctttgtagagagaaagacttggacaagttacttgcaaggaagttattggacagt

SEQ ID NO: 916911 - DNA, 120 bp, Artificial Sequence
  ENSG00000237767_20 (sequence is synthesized)
tggacagttttttttgtgaaatattgtctattttcatctttgaaaatgtgataactgatattatatatatgaactttaaaaaattaatataggcattaaaatggtttcacattcattatt

SEQ ID NO: 916912 - DNA, 120 bp, Artificial Sequence
  ENSG00000237767_21 (sequence is synthesized)
tttaataaattgcctgttgatgtattttcctattttttctcttgaggcattcataattttatagttaattttcaaaccttctttgcttaccaagaatattaatactttttctggaaaatg

SEQ ID NO: 916913 - DNA, 120 bp, Artificial Sequence
  ENSG00000237767_22 (sequence is synthesized)
cctagcaaagactttttgtccatttaaaaatgttccactgtttcctgttatttatgacttaatgacatttcagaactttaatacactaatatccataaatctcttcctttttccttagaa

SEQ ID NO: 916914 - DNA, 120 bp, Artificial Sequence
  ENSG00000237767_23 (sequence is synthesized)
gcatatggtccgtatgaagacgggatcattacaggaaaggtgaaggagatacagtcattatgctctatatacacccatttttatggctagcggctgaagatgggatgctttctttgctgg

SEQ ID NO: 916915 - DNA, 120 bp, Artificial Sequence
  ENSG00000237767_24 (sequence is synthesized)
aagacctattacctgttaggttgcaaaagatgtgatcatcttcctaaacaataatttagagtcccataacaattttaagtgtgctgttcatgaaaatttgaatacattgtattgggaata

SEQ ID NO: 916916 - DNA, 120 bp, Artificial Sequence
  ENSG00000237767_25 (sequence is synthesized)
taatggaagtgagatgcctcatgtcgtgagaaaatctgacataaactccttaagcatgagaggccatgtgggtatggaagccctgaaagggaggaaaaaacagccagaccctagctgttc

SEQ ID NO: 916917 - DNA, 66 bp, Artificial Sequence
  ENSG00000237767_26 (sequence is synthesized)
acccattagttgtttgtttcccaatcctctccctcctcccatcctccaccctctgaaagggcactt

SEQ ID NO: 916918 - DNA, 120 bp, Artificial Sequence
  ENSG00000237767_27 (sequence is synthesized)
gtcttgtgaaatgactaaaattttaaaagctaggatcaagtattggtgaggagatgaagtaattctaagtctcatccattgctaatggggtatacattggtttaaccagtttggaggact

SEQ ID NO: 916919 - DNA, 120 bp, Artificial Sequence
  ENSG00000237767_28 (sequence is synthesized)
gtttggtaatgtccaaatatttattaaagttaaacctactcctaagtcttatagcccagaaatttcaaacctaggtaaatacctaagagaaataagagtacatgtcttccaaaagatcta

SEQ ID NO: 916920 - DNA, 120 bp, Artificial Sequence
  ENSG00000237767_29 (sequence is synthesized)
tacaagaatgtgtatagcagccatagtcataactccctaaaactggaaatgacccaaatgtccataaaaagggaaatggatacatgtatcattacatatttatctaatgaattgctatgt

SEQ ID NO: 916921 - DNA, 120 bp, Artificial Sequence
  ENSG00000237767_30 (sequence is synthesized)
cgctgtaagaatgagcaacccactgatacatgccacagtatcatgaatcacatagacagtatgctgcctgaaataagccaaaataaaaaatgtcttatttcacttatatgaagttctaga

SEQ ID NO: 916922 - DNA, 120 bp, Artificial Sequence
  ENSG00000237767_31 (sequence is synthesized)
atatgtaaacgtgatttatgatgacagaaattaaaatagcagttccctttgcatagggggagcgtattcattacggaagtgtatgataaaacattgtacattggtggaatgttctatatc

SEQ ID NO: 916923 - DNA, 120 bp, Artificial Sequence
  ENSG00000237767_32 (sequence is synthesized)
ttcacttgagtgtttaccaggatatatgtccacaaaaaagttaggaatccatacttaagatttgtgccctttataatatgtgtgttatacagccactgaaaataaattgatagataaaaa

SEQ ID NO: 916924 - DNA, 120 bp, Artificial Sequence
  ENSG00000237767_33 (sequence is synthesized)
tgctgtccagatttctatcttggatatgtagacagatgatggtcagcaagcaagaaaacaggcagaacaattttagaaactaagaaaatgtatttccaatggaactaattaaatcagagt

SEQ ID NO: 916925 - DNA, 120 bp, Artificial Sequence
  ENSG00000237767_34 (sequence is synthesized)
ctgtaaatagcattgtaagatataggaggctgatatggtttggatttgtgtccctgcctaaatctcatgtcaaattatatctccaatgttggagaagaggcctagtggggggtaattgga

SEQ ID NO: 916926 - DNA, 81 bp, Artificial Sequence
  ENSG00000237767_35 (sequence is synthesized)
ctccaatgttggagaagaggcctagtggggggtaattggatcatggagctggattttccctttgctgttctcatgacagtg

SEQ ID NO: 916927 - DNA, 120 bp, Artificial Sequence
  ENSG00000237767_36 (sequence is synthesized)
atgtgactgcttctcctttcaccatgattgaaagtttcctgaggcgcccccagccatgctttctgtacagcccatggaactgtcagccaattaaacctctttttaaaataaattaccctg

SEQ ID NO: 916928 - DNA, 120 bp, Artificial Sequence
  ENSG00000237767_37 (sequence is synthesized)
tttcagatatttatcagtgcatgaacggactaatacagaggcagaagcacatctgcaggcagaaatggggaaaaaaataatatcagaagaaaggataagaggaagagcttaagaataagt

SEQ ID NO: 916929 - DNA, 120 bp, Artificial Sequence
  ENSG00000237767_38 (sequence is synthesized)
atgtgcaaattttagttgatgctggactggggagaggtgctaatggattcagatcctgggggaatctggacaaggatatggtccagagatcaatgggaggagaagaaaattaataaactt

SEQ ID NO: 916930 - DNA, 120 bp, Artificial Sequence
  ENSG00000237767_39 (sequence is synthesized)
gacttaaggactagcctctaagttgagaaatgtaatgtttatgctaatatttttacagaaaaaggtgttatcattctcagttttgcaacctgattcagagaagctaagccatagacccca

SEQ ID NO: 916931 - DNA, 120 bp, Artificial Sequence
  ENSG00000237767_40 (sequence is synthesized)
ttatttgttcttagcacttttgttgtggtcgctatgctacctctaagtaggactttgacttcctacaaaattcactgttacacatccaggtagatgtgaatacatgctgcagtaatgtct

SEQ ID NO: 916932 - DNA, 120 bp, Artificial Sequence
  ENSG00000237767_41 (sequence is synthesized)
gtcacccatagtcactgcaggggaagttggcatcacagcactgacgatatgcctactatctttaggttaaagtggatacgttatcattaccctatgcaaaagaatctgatcattgccctg

SEQ ID NO: 916933 - DNA, 120 bp, Artificial Sequence
  ENSG00000237767_42 (sequence is synthesized)
aagataattttgttatctcacattgcatatgtgatcattaccctgagggcagagatgcaatcattggcctataggaatacttatcattatggcttggcaagtggaaaagtgataattaac

SEQ ID NO: 916934 - DNA, 120 bp, Artificial Sequence
  ENSG00000237767_43 (sequence is synthesized)
ttgcacgaatagatgggatcattgcactacagatagatctgttattgcatttcctgaagaaatgcaatctctagtgtgcaaaagacaatgtgttatctacatttatggtagagatatgct

SEQ ID NO: 916935 - DNA, 120 bp, Artificial Sequence
  ENSG00000272192_0 (sequence is synthesized)
ccaagactgagaaagaagtgagagtatgggtgaaaagaatgagaaaggatgatactgagaagacaaagggaaaaagtagactgcatgcccctctaccaaaagtgttgtttgttgactttc

SEQ ID NO: 916936 - DNA, 120 bp, Artificial Sequence
  ENSG00000272192_1 (sequence is synthesized)
gatttttcgaaagcgagaaaagataaagagctcttgacctgttttgtaagctagatgtgtaatttgagtgttcattttgtcacatttctcactaaacggtcaaagctttcagcatcaact

SEQ ID NO: 916937 - DNA, 120 bp, Artificial Sequence
  ENSG00000272192_2 (sequence is synthesized)
cttctactgatttgtgatgactagccactgacaaggtggaaggcctttgaaagcactgcataacttccactgatgatgagatcacataccaaatgcacataatccggtaaatgagcaaaa

SEQ ID NO: 916938 - DNA, 120 bp, Artificial Sequence
  ENSG00000272192_3 (sequence is synthesized)
gtagaccttttatcatcttcccatggcatgtttcttttctcttgctaaaactttatacctcctacgtggatatttttctacctgtctgctttctactattaaaagaactatgacctccaa

SEQ ID NO: 916939 - DNA, 120 bp, Artificial Sequence
  ENSG00000240666_0 (sequence is synthesized)
ggtgagagaagcagaggcccaaaggaatattgcaaatacccaaggtcaccctgtcaggagtggcagaatagggctggaacaaggactcttttctctggacagcttgcacctacaatcctt

SEQ ID NO: 916940 - DNA, 120 bp, Artificial Sequence
  ENSG00000240666_1 (sequence is synthesized)
tccatcttgcacctacaatccactcgaacactgcagcatggaggcagactccttgccaacgggtattgtcgagagcttcttcctaccatcatttgaagaaaaaaagcttggagatgggga

SEQ ID NO: 916941 - DNA, 120 bp, Artificial Sequence
  ENSG00000240666_2 (sequence is synthesized)
agaatgattgatcaacatgtttcttccttagtttgttactgctgttgttttaaatcgagaaagcatttttaaacaggatggggggggactgataatatcagtcctccttaatttcattac

SEQ ID NO: 916942 - DNA, 120 bp, Artificial Sequence
  ENSG00000240666_3 (sequence is synthesized)
tcacaagaaaaacatgtatgtgtaaacccagggatattagactaaaattgagagatcagaaacgatgtagaacaaatagattgcgttgacgtgactacgaagtattataaaagaaaataa

SEQ ID NO: 916943 - DNA, 120 bp, Artificial Sequence
  ENSG00000240666_4 (sequence is synthesized)
acaaaaatcatgattaggaaatatattatgactatgtttatatatattcagacagttactataattcaggttcagatacgattccaagctgtctggcaagaaagtcaaaatggaaaatgt

SEQ ID NO: 916944 - DNA, 120 bp, Artificial Sequence
  ENSG00000240666_5 (sequence is synthesized)
gctcttactactcctagggggaaacattgttccttgcatgacttctgaaaggtaattctgatgtgtcctcgacattttcatagcaaacgtggcagcaaattttttaggtaaacagcttat

SEQ ID NO: 916945 - DNA, 120 bp, Artificial Sequence
  ENSG00000261227_0 (sequence is synthesized)
tttggctcttgattcttcggggaaagcagctgtagagaaatgagaatacaggaccccctcctcacactcgcacaccctggttcgcacgcattccggtacccgtcacctcggagccagcga

SEQ ID NO: 916946 - DNA, 120 bp, Artificial Sequence
  ENSG00000261227_1 (sequence is synthesized)
gacctgggatccaaatgcggttctgcctcctccggccgtggagcactgcagtgtcgtcctccacgagcctccctgcccctgctcctgattccctttcaggaatttacaaacattttcccc

SEQ ID NO: 916947 - DNA, 120 bp, Artificial Sequence
  ENSG00000261227_2 (sequence is synthesized)
agatcaatatccgtattgattattcattgtgagtgagtcgtgtgtctttggtgatccagcttgcagaggtagcaggcaaaggctgctgcgggggaaaaaaataacagaaggcgagaggga

SEQ ID NO: 916948 - DNA, 120 bp, Artificial Sequence
  ENSG00000261227_3 (sequence is synthesized)
cccagctcttgctgggtctgcggctgtcggcaacacagaagggaagagaaaaagagaaaagcacctcaaaaccaaggaatggacacgggtggaagagaaagagggagcaatagcaagaaa

SEQ ID NO: 916949 - DNA, 120 bp, Artificial Sequence
  ENSG00000261227_4 (sequence is synthesized)
ggactttgctctgggagtgcaaagtgactcacagttttggtatctcctacgtaagagctttggggggattccttggcttgctgacaggcaaggaagacagcggcagcagtgaggtaaaac

SEQ ID NO: 916950 - DNA, 120 bp, Artificial Sequence
  ENSG00000261227_5 (sequence is synthesized)
acgattacttccaactgccttgcggaggaggcgcagtcgtgcggtgtgacttggacagcttgctgctctctgatggcacgcggagggagaataattaaaaaggccagcatcacttactaa

SEQ ID NO: 916951 - DNA, 120 bp, Artificial Sequence
  ENSG00000261227_6 (sequence is synthesized)
gtgagtaaacacagagccgttccaatcgtgctctccagctaatgagaagctgtaatttcttatacttcaaggcaagatgagacagtgatgggttcagtggagggtgtgtttgcgtggata

SEQ ID NO: 916952 - DNA, 120 bp, Artificial Sequence
  ENSG00000261227_7 (sequence is synthesized)
tgggggtggggggtagtggtggtggtagagttagatcgactaattgttggcaatgtttaagaaagggattactggaaaagacagtgaaatgatgacaggaaaacatcttggaccagagcc

SEQ ID NO: 916953 - DNA, 120 bp, Artificial Sequence
  ENSG00000261227_8 (sequence is synthesized)
agaataattaaaaaggccagcatcacttactaagactccccagtacattccaagtttcctgagcaggagaaatagattttgcagaagtgagccacggagacccaaatgaggaggaaataa

SEQ ID NO: 916954 - DNA, 120 bp, Artificial Sequence
  ENSG00000261226_0 (sequence is synthesized)
acttccacaggggccagacaggcggatgctgtgcaagccggagctgccgggagggtcctgttctgtgcggccgacagcaccgtgcctggaaaagccatgctatttgggaccgtcctgctg

SEQ ID NO: 916955 - DNA, 120 bp, Artificial Sequence
  ENSG00000261226_1 (sequence is synthesized)
ggcaagcggccactcttccacactgaaagggaaacagaaaggaagaagcgcccagagcaggaggaacagatgtggcctccacccgagattggggctcagggagggaagagagtgtcgcat

SEQ ID NO: 916956 - DNA, 120 bp, Artificial Sequence
  ENSG00000261226_2 (sequence is synthesized)
caggatcagtcttccggcaggctccatctctcctgggatgtgctgggatcctctagtgacaggggagaagggaagttcacatgagtggttcgtggtgctggggccgtgctgtcaccacct

SEQ ID NO: 916957 - DNA, 120 bp, Artificial Sequence
  ENSG00000261226_3 (sequence is synthesized)
gtgaagccagggctggtgagtgggagggctttccccagacatcgccttccagaaccctctggggctacgaagccacacaccagccgcccgagcccccctgagctcttcccctgccgcccg

SEQ ID NO: 916958 - DNA, 120 bp, Artificial Sequence
  ENSG00000261226_4 (sequence is synthesized)
ctatctgcgtaattcagttaccacctccaggaaatctctctggtttggctccacgtattttcatttctgcatgactggaagaaattaatttttctccctacgcgaggatctggagatgct

SEQ ID NO: 916959 - DNA, 120 bp, Artificial Sequence
  ENSG00000261226_5 (sequence is synthesized)
gccagcaggctgggtcactaatccccaagatcccagccctcagggctgcagtggggagggccgggcctcgccgctgccgcctctggggtggcagggagggtgtgaggtgggtgaggcatt

SEQ ID NO: 916960 - DNA, 120 bp, Artificial Sequence
  ENSG00000261226_6 (sequence is synthesized)
tccctgccagcttctggaaccatcttggggctctccgctggcctccccccttccctgctgcaccgttagcaggttgactttggggttttctgattcatcctcagcctcccacagtgccag

SEQ ID NO: 916961 - DNA, 120 bp, Artificial Sequence
  ENSG00000261226_7 (sequence is synthesized)
ggtggaaggatggtgcttgaattaagtggctctgaatttccttccctggcagggaggaaccagaagcaacttcagcgtgccccagtgccgtgtgtgccacgcgggtgttcagacccagca

SEQ ID NO: 916962 - DNA, 120 bp, Artificial Sequence
  ENSG00000261226_8 (sequence is synthesized)
tggagggactagcagggccttgttattggtgccacaggtgaaggcgctggcgtctccatggggctgctctcccggcccgcacttgctgcactgcctgcctgtggcctgtgtctcctgctc

SEQ ID NO: 916963 - DNA, 120 bp, Artificial Sequence
  ENSG00000261226_9 (sequence is synthesized)
acagggtcgtggagccttcctgggtgggtcttagagcctacaacagcgctggggcttacacgcactgtcgcgtccctgtaacacccacgagggccgtggagcgttccccgtctccgacgc

SEQ ID NO: 916964 - DNA, 120 bp, Artificial Sequence
  ENSG00000261226_10 (sequence is synthesized)
cgggagaggtacagtcactccacaggtcatgcagggagccagtctgacggcgggccgcagcgagtgtctccaggcccctgtccagccccgcccagtccctgtccagccctgcccgggcgt

SEQ ID NO: 916965 - DNA, 120 bp, Artificial Sequence
  ENSG00000261226_11 (sequence is synthesized)
cggggttagcactgtaggtgcaaaagccctcacctggatacaggccctggggcccatctggggtcagggcacgggtgggagaacttgacctctgccctgcctgggtcatggagccccaag

SEQ ID NO: 916966 - DNA, 120 bp, Artificial Sequence
  ENSG00000261226_12 (sequence is synthesized)
gccagcctcatcccggctgctctaggtctgcacctctggccagccccacctctgcttcctgccctgctgtgcaggggagggaggtcgttgttgctaaagaccctccagaagccactggaa

SEQ ID NO: 916967 - DNA, 120 bp, Artificial Sequence
  ENSG00000261226_13 (sequence is synthesized)
cattgcccggctattatcacagacatggcatccagtgttcatagaaatccacgtccaggcaaccgatgtcacctcccaggctggccccaggcccctggggacggaaaggacctaaactct

SEQ ID NO: 916968 - DNA, 120 bp, Artificial Sequence
  ENSG00000261226_14 (sequence is synthesized)
acaatttgtcaatgccggagggtggctttgccaccacttcacttacaggacaaaaagtgcctgtcctccagtgctcattccctgggcaagtattgatcgaacacctactccataccaggc

SEQ ID NO: 916969 - DNA, 120 bp, Artificial Sequence
  ENSG00000261226_15 (sequence is synthesized)
gggggcagagtcacatgcagtgagaggcacccaggccctgcattggatcctcacggcagccagccctgagggcaccgctgctgccccactttccagaccgggaagccgaggcccacagaa

SEQ ID NO: 916970 - DNA, 120 bp, Artificial Sequence
  ENSG00000261226_16 (sequence is synthesized)
gttcctagctcacagcgcaggagcccgacgcgggtgggtaccacggggctctgtctgtgacacatccagggtggtcaggcccctggaacttcccactgagttctgacacgggagggccag

SEQ ID NO: 916971 - DNA, 120 bp, Artificial Sequence
  ENSG00000261226_17 (sequence is synthesized)
cgtggggacggcagggagtgggccgggagtgtgcagagtccagtgcacactgtgggctgggacccgctgcctcgcaggggcaggagaggggtggaaacacaactgctggggtactggcta

SEQ ID NO: 916972 - DNA, 120 bp, Artificial Sequence
  ENSG00000261226_18 (sequence is synthesized)
gggaggtgcaggccgcttgagggcagctcagagggaggctcacgacagcgtcaccatccctggtgtcagggccaggttgggtggacaccacgctgttcgtccacctcgtggctcagtctc

SEQ ID NO: 916973 - DNA, 120 bp, Artificial Sequence
  ENSG00000261226_19 (sequence is synthesized)
tctgggaaagcctgcgtcagtgaacgacaccccagatcctttcctgggggttttattctccacctcctgactttcctgggcagagtgagaaggcctggttctgcttctgcgcttccgtag

SEQ ID NO: 916974 - DNA, 120 bp, Artificial Sequence
  ENSG00000261226_20 (sequence is synthesized)
gccgggaccttcctttcagcggagcccaggccgtgctgcgggaaacagcccaccgggcaggcctgggagggccgccttagccgagagcaaatgcaggcaagggctttgcttgtctggaaa

SEQ ID NO: 916975 - DNA, 120 bp, Artificial Sequence
  ENSG00000261226_21 (sequence is synthesized)
aaaaattcctggagtggaaaccgcccttgtagcatcagtggaaaagactcaggcggagacctggcagttgggctggaaactgacgatgaggagagtgagagataactgctccccagtccc

SEQ ID NO: 916976 - DNA, 120 bp, Artificial Sequence
  ENSG00000261226_22 (sequence is synthesized)
cacttctgagctcgcagcttgccccgagggtgggagctggggactcaggacccgccgggatccggctttccgcctgtgctgtggcaatgagtttcctgtggcaataaaacagaagttcag

SEQ ID NO: 916977 - DNA, 74 bp, Artificial Sequence
  ENSG00000273507_0 (sequence is synthesized)
aatcagctgccagcgtggctagaataaaagcaagcagaggaacgtggaaggatgagactggctgagtcttctgg

SEQ ID NO: 916978 - DNA, 120 bp, Artificial Sequence
  ENSG00000273507_1 (sequence is synthesized)
acaccagtggtttgccaggggctctcagaccttctgccacagactgaaggctgcactttcagcttccctacttttgaggttttggaactcggactggctttcttgctccgcagcttgcag

SEQ ID NO: 916979 - DNA, 120 bp, Artificial Sequence
  ENSG00000273507_2 (sequence is synthesized)
gaactcggactggctttcttgctccgcagcttgcaggtggcctgttatgggactttaccttgtggatcataatcaagaaaaacttttttttaagctacttgtagcttttcacaattgagt

SEQ ID NO: 916980 - DNA, 120 bp, Artificial Sequence
  ENSG00000273507_3 (sequence is synthesized)
aaggtatactcctgtaaacaaaatttggagcacattcgtctctctctacctgatttctccagaatttgaaaactagttgacaactttgtgccctgtcttccagtttaacatggagctttc

SEQ ID NO: 916981 - DNA, 120 bp, Artificial Sequence
  ENSG00000273507_4 (sequence is synthesized)
agtctgtaatgcagaggatcctctagggtataactccacaaggcagaagacaagtttactgtggacaaaaaaatgggctagaatgtcttcagcttctcaggcccttaatagggctgatga

SEQ ID NO: 916982 - DNA, 120 bp, Artificial Sequence
  ENSG00000273507_5 (sequence is synthesized)
tggatgactctactggagaaaaggaagacaaagaggtttcagatcatcaataaagcagctgactctcaagaaatggctggaaatcatatttaaagtcgatcttaaatgaatttgaaaaaa

SEQ ID NO: 916983 - DNA, 120 bp, Artificial Sequence
  ENSG00000273507_6 (sequence is synthesized)
atgcacataaagatcgttacctgcctcgtttggacatatcagacctatgaatatttatgtagaaacaagagcttataattatcacaaaaagaaaatgaacactacttttcccatttagaa

SEQ ID NO: 916984 - DNA, 120 bp, Artificial Sequence
  ENSG00000273507_7 (sequence is synthesized)
aaatatgaaaggcaaattttaaatgaaaactctcttgggacatttgatatgtcatgaactatcaagaccatgactattttttaatagcttttgaaatctttctcgaaaatgtctctcttc

SEQ ID NO: 916985 - DNA, 120 bp, Artificial Sequence
  ENSG00000273507_8 (sequence is synthesized)
ttttctccattcttatttattccttagttttgactttaatatatttattattctcagttgcttctgtaagccttaacttttatcaaatttgtaaaatagcagagaatagaattttgatgt

SEQ ID NO: 916986 - DNA, 120 bp, Artificial Sequence
  ENSG00000273507_9 (sequence is synthesized)
cattcaaatgcctcacctagtactatgcacatagtaaacacacaactaatacaactgcacttggattcaaagatccttcaatggtggagaatagaaaagctatagggcaggatttctagt

SEQ ID NO: 916987 - DNA, 120 bp, Artificial Sequence
  ENSG00000273507_10 (sequence is synthesized)
ctgcacagagctgagcacagaggagcagtgctgtgtcaagggcaagactctcacaagtggctggagcaaacagagaggaaagactcttcccctagaacctaagtagccagttattcaggc

SEQ ID NO: 916988 - DNA, 120 bp, Artificial Sequence
  ENSG00000273507_11 (sequence is synthesized)
ccaaaggacccctctgttgctaaatcagggatcaagccttaaataggttaattttttccttatgtgaacatacaagggtaagcagacttaccattctcatcaaaaggagatggaaaaggg

SEQ ID NO: 916989 - DNA, 120 bp, Artificial Sequence
  ENSG00000273507_12 (sequence is synthesized)
acatagaggtctgacatctgcataagctacctagctacctgcaatctagctggtacaacagctatctttaatttttagtaagggagctcaagtaagttgccctagatgaaaaaaccagta

SEQ ID NO: 916990 - DNA, 120 bp, Artificial Sequence
  ENSG00000273507_13 (sequence is synthesized)
aggagaaagcttaaataacttgcccaagatgacacagctagcacagggcagtgcttgagtaacttcccgaggttacacaggtagtgagaggtggaattgctaggttgttcagcaccacac

SEQ ID NO: 916991 - DNA, 120 bp, Artificial Sequence
  ENSG00000273507_14 (sequence is synthesized)
ttttctcccctctacctcaatggttcctggctctgtgtgggtgtctcctagcagataaaatggccctcttccatttacatttgtcttatccttatatcttcaaaatggttcgtaagacaa

SEQ ID NO: 916992 - DNA, 120 bp, Artificial Sequence
  ENSG00000273507_15 (sequence is synthesized)
aaagagcctgcccttgatagactgcctcccactgcagcaagtctagcactgagcagccctaagactagaatgccaacttcgtagagggaggatagataggaaaggctcctgagacctggg

SEQ ID NO: 916993 - DNA, 120 bp, Artificial Sequence
  ENSG00000273507_16 (sequence is synthesized)
gcctgggagaaggaagtagtaggttcaagattaagaggaggtgagtgatacgtgtggctcagacataaaatgtaatgcccaccaaaaaactcagtcatcaatctaagtaatatttactga

SEQ ID NO: 916994 - DNA, 120 bp, Artificial Sequence
  ENSG00000273507_17 (sequence is synthesized)
aatgatttttaaaatcacagtatgagaaacccgtgaagaacaaaatatcaaacttgtaaataaagacaggatccggcagggccagtgtggtggtgaggcaagtgaggctaagttatgtaa

SEQ ID NO: 916995 - DNA, 120 bp, Artificial Sequence
  ENSG00000273507_18 (sequence is synthesized)
atgaagggttggaccctatcttaattttaaactgctgaaattttatttatcatgggcttttttggcattttgattgttaaaataattcattatattgtttatcttgattactgcattttg

SEQ ID NO: 916996 - DNA, 120 bp, Artificial Sequence
  ENSG00000273507_19 (sequence is synthesized)
gcatccccataaattttgtgcctgagctgactgcctcactcacttcattctaacgttggctttagggtgaaggctggggagccaatctgaacctgacaaatagtctgggcctcacaaaag

SEQ ID NO: 916997 - DNA, 120 bp, Artificial Sequence
  ENSG00000273507_20 (sequence is synthesized)
aaaggagaaaggtgggagcctcactaagaatttcatgccgggctcctcttggcacattattttgtttgttcctgacggccaccctccaaggcagctattagtattatcatttatgtagga

SEQ ID NO: 916998 - DNA, 120 bp, Artificial Sequence
  ENSG00000273507_21 (sequence is synthesized)
aactgagtgccagtattacaagggtagaaagtgactgagctgggtttcagccaaggcctatctgcctctagatcctggcaattcccactactggctgatacgtgcctaatagtttataac

SEQ ID NO: 916999 - DNA, 120 bp, Artificial Sequence
  ENSG00000273507_22 (sequence is synthesized)
tcttgaagctgcgtgaaattttaaaccatagctctattttcctgatgtccttaaattactattcttcccaagttattcatattttacgtctagtatgaggctcagacagtaaaagtgtga

SEQ ID NO: 917000 - DNA, 120 bp, Artificial Sequence
  ENSG00000273507_23 (sequence is synthesized)
atgcaatgcacccattttacatgtatcattcattactatgctcgattggtgtgccctttgccgcaccacagcatatttagaacaaaacagatcagtcggttggggggattcagtaacact

SEQ ID NO: 917001 - DNA, 120 bp, Artificial Sequence
  ENSG00000273507_24 (sequence is synthesized)
ctacacttgtatccagtcaattgttgatggtaatccaatcttggatgtggtgaaaagagggtgggcttagggtctaagtgaaattgactgccagtgtgtgactctgaatcatttatttat

SEQ ID NO: 917002 - DNA, 120 bp, Artificial Sequence
  ENSG00000273507_25 (sequence is synthesized)
atctctgaggttttcgttcccttttttataaaaattttattaaataagttttcatttttccgtaaaactaagactgaaggaaagtctgcctttcttaaagtcagcaaggtctactgataa

SEQ ID NO: 917003 - DNA, 120 bp, Artificial Sequence
  ENSG00000273507_26 (sequence is synthesized)
agaagataccttgtaatctctactttcatgacagaaatccaggcctaatcaatacttttttctattatcactgtaattaaggcataaggctttccctgatatacaaatgattaaacctct

SEQ ID NO: 917004 - DNA, 120 bp, Artificial Sequence
  ENSG00000273507_27 (sequence is synthesized)
caataaacaacttcacataggtctggctctgctgattactttatcattgccttctgcaatagccactattgccatctacagcttgggctcctctccataaatagagtacaattaacaaat

SEQ ID NO: 917005 - DNA, 120 bp, Artificial Sequence
  ENSG00000273507_28 (sequence is synthesized)
gcattattgtcatcttgtttgtataaatgttgttgtgaacaatagccatttattatctaagatgtcaccttttggctttcacaaactaacatttcatgaattcatagaccatgcacagtc

SEQ ID NO: 917006 - DNA, 120 bp, Artificial Sequence
  ENSG00000273507_29 (sequence is synthesized)
tttcaggcagaattaatcaaatatctctttgggaccctaatagattttgggggcataattctgttatgtttgtgtcatctttgcacgttcaatgccaagtataatgcctggcatataata

SEQ ID NO: 917007 - DNA, 120 bp, Artificial Sequence
  ENSG00000273507_30 (sequence is synthesized)
ggttccacaacagataatagttgatccttgatggaaatcactcagtttatttcgttttgttcctgaaaaaataaacactgcaaacactggtctttccagagtctcaccggataaatatct

SEQ ID NO: 917008 - DNA, 120 bp, Artificial Sequence
  ENSG00000273507_31 (sequence is synthesized)
gtgtcctccaccaaatggcccatgaattagcacatcagagtgaagagaaaggattagggactagaagaactagtagatgatactaatcaagcttcagacttattgaattaatttagatca

SEQ ID NO: 917009 - DNA, 120 bp, Artificial Sequence
  ENSG00000273507_32 (sequence is synthesized)
aaggctgactaatccttgtcatttagcccattttctaatatttgagcatttaatcttttggggagatcttctttggaggaatacattcattcaatagattgaatatttatggatcagata

SEQ ID NO: 917010 - DNA, 120 bp, Artificial Sequence
  ENSG00000273507_33 (sequence is synthesized)
ttgtttcaggttctagaggctcaaaaatgtctaagatattatctctgtctttaaggctatcacaggttaatgggtaatgtacacagagttaaaatgcagtgcaaatgcatagaaacatgt

SEQ ID NO: 917011 - DNA, 120 bp, Artificial Sequence
  ENSG00000273507_34 (sequence is synthesized)
ccaaggaataatacgggcataaatgagaagttattggcttttatttcctgagcctaggaatgtgtagcaaagaagcttcaaagtggtctaaagaatgagtaggaattttccagccagtac

SEQ ID NO: 917012 - DNA, 85 bp, Artificial Sequence
  ENSG00000273507_35 (sequence is synthesized)
aagtggtctaaagaatgagtaggaattttccagccagtacaaaatagcataataagcttagggatgtcacccaggatagaatgcc

SEQ ID NO: 917013 - DNA, 79 bp, Artificial Sequence
  ENSG00000273507_36 (sequence is synthesized)
tcaggagttttaatagcttcatatggttggaacacaggatgcttggagagggcaggggattacgcagcacattgggtca

SEQ ID NO: 917014 - DNA, 120 bp, Artificial Sequence
  ENSG00000273507_37 (sequence is synthesized)
tgcttggagagggcaggggattacgcagcacattgggtcagggatcagatgatagggagccctctgtacctgttgagttttgacttggaccttttggtcagaagttctcaacagtcctga

SEQ ID NO: 917015 - DNA, 120 bp, Artificial Sequence
  ENSG00000273507_38 (sequence is synthesized)
gaaatacaggatactacttggctcacatcccaattagtacgaatgggtcatccagagtgattaatcccctttgcatatgtgattttggtttggccttttgccctgagaatttcaaccttg

SEQ ID NO: 917016 - DNA, 120 bp, Artificial Sequence
  ENSG00000273507_39 (sequence is synthesized)
gctgtatattagaatcctatagtgggaacttttgaaaaatacatatttgttcttctcctctatgtcacccctctaatcagcttactgaacacagcccagcagtaatccctaaactcatgt

SEQ ID NO: 917017 - DNA, 120 bp, Artificial Sequence
  ENSG00000273507_40 (sequence is synthesized)
ttagggacttctgaagtggggagacattgacaggtgttaaacagggttaaaacatcaaagtaaatgtacctttatgtcattttataaatgacactctggaaaggtcagattgatcactgt

SEQ ID NO: 917018 - DNA, 120 bp, Artificial Sequence
  ENSG00000273507_41 (sequence is synthesized)
ggggaggatgtttgggaagggagataaagggcacaaatgaccaatggcagggattcttcaaatcactgaagtagttagagccaggtataaaaagaatatgagctaagtcagtgggggtgt

SEQ ID NO: 917019 - DNA, 120 bp, Artificial Sequence
  ENSG00000273507_42 (sequence is synthesized)
aaaggaggagctagaaatggatagcattataactatagaatccataagacaggttgcatgaaactgaatgagtaaagcgatgaacactaaagagtttagaatgattctagattctggctg

SEQ ID NO: 917020 - DNA, 120 bp, Artificial Sequence
  ENSG00000273507_43 (sequence is synthesized)
ttaccttgtggatcatggtgatcatggaagcaaatgtcagaagagcaaagcaacgtagaacgctcagccacctcaggaagaaccttgaaaagtcacctggatatatttttgtgaactggt

SEQ ID NO: 917021 - DNA, 120 bp, Artificial Sequence
  ENSG00000273507_44 (sequence is synthesized)
gtcccaggacagattttcagctgaattctacaagaggtgacaaagtagggctggtatcgttgatactgaaactattccaaaaaattgaaaaggaggcactcctgcctaactcattctatg

SEQ ID NO: 917022 - DNA, 86 bp, Artificial Sequence
  ENSG00000273507_45 (sequence is synthesized)
aagccagcatcatcctgataccaaaacctgaccaaggtacaacaaaaaaagaaaacttcaagccaatatctttgatgtacataggt

SEQ ID NO: 917023 - DNA, 120 bp, Artificial Sequence
  ENSG00000273507_46 (sequence is synthesized)
tccagcagcacatcaaaaagcttattcacctcaatcaagttggtttcatacctgggatgcaaggttggttcaacacaacctcactgtgatcaataaatgtgattcattacttaaacagaa

SEQ ID NO: 917024 - DNA, 89 bp, Artificial Sequence
  ENSG00000273507_47 (sequence is synthesized)
tcactgtgatcaataaatgtgattcattacttaaacagaactaaagacaaaaaaatcaataaatgtgatttattacttaaacagagctc

SEQ ID NO: 917025 - DNA, 120 bp, Artificial Sequence
  ENSG00000273507_48 (sequence is synthesized)
ttaaagactttccataaactaggtattgaagggatatacctcaaaatatgtaagagccatatatgacaaacccacagccaatatactaaatgggcaaaagctggaagcactcccttaaaa

SEQ ID NO: 917026 - DNA, 120 bp, Artificial Sequence
  ENSG00000273507_49 (sequence is synthesized)
aaaagcttcttaagctgataagcaactgcagcaaagtcacagaatacaaaatcagtgtgcaaaaattgctagcattcatatacatcaacaacaggcaaacagagagccaaatcatgaatg

SEQ ID NO: 917027 - DNA, 63 bp, Artificial Sequence
  ENSG00000273507_50 (sequence is synthesized)
ttcacaattgctacaaagaataaaataccaaggaatatagctaacaaggaatacaaacaaatg

SEQ ID NO: 917028 - DNA, 120 bp, Artificial Sequence
  ENSG00000273507_51 (sequence is synthesized)
atgctattaccattaaactaccattgacattattcacataattagaaaaaaaaccctattttaaaattcatatggaaccaaaacagagcctgaataaccaagacaatcctaagcaaaaag

SEQ ID NO: 917029 - DNA, 70 bp, Artificial Sequence
  ENSG00000273507_52 (sequence is synthesized)
ccagagaactggctagtcatatgcagaaaattgaaattggagcccttccttacaccatatacaaaaatta

SEQ ID NO: 917030 - DNA, 87 bp, Artificial Sequence
  ENSG00000273507_53 (sequence is synthesized)
ttgaaattggagtgatggattaaaatttaaatgtaaaaccccaaactataaaatccctggaagaaaatctaggtgatatcattgaga

SEQ ID NO: 917031 - DNA, 120 bp, Artificial Sequence
  ENSG00000273507_54 (sequence is synthesized)
tttaccttgtggatcatgacccctttctggtaacatcttcctggcaaaccccaaagggatgatactgaggagacttctgacccaaaggaaatggactggagcaccaattggctaactttg

SEQ ID NO: 917032 - DNA, 120 bp, Artificial Sequence
  ENSG00000273507_55 (sequence is synthesized)
gcttggcccccagtgctatggtgcactgagctgggttactagggccacttaggaaaagggaacccagaagcctagcatgcggcaaaaggaatcaagaaaaacttttttttaagctacttg

SEQ ID NO: 917033 - DNA, 120 bp, Artificial Sequence
  ENSG00000273507_56 (sequence is synthesized)
tttaccttgtggatcataaaaatagaaaagttgactactttgaaaaggaaactatgacaaacaagtatatattcaggaaagggactcctagaacttgagcaacaaaaaaaagagttcaac

SEQ ID NO: 917034 - DNA, 120 bp, Artificial Sequence
  ENSG00000273507_57 (sequence is synthesized)
ctcagcacagtggagtctgcagtgtctttgcaactacagaaatgaacttgtgttcctcacatccttgagagtcgagatttgcatttctctacagagctcgggctgaatgaagcaaagaga

SEQ ID NO: 917035 - DNA, 120 bp, Artificial Sequence
  ENSG00000273507_58 (sequence is synthesized)
cctctgccacccccactagctggcccagtcctggaaacggaagcagtcacttgcgatcttccacactgtattcctgggtgaggcctgggcggtcaggatgaagttctggttgaagtccca

SEQ ID NO: 917036 - DNA, 120 bp, Artificial Sequence
  ENSG00000273507_59 (sequence is synthesized)
ttgtttgttccccttcaaacttcactgatccacagatcacaacaaggaccgtggtctggctcattgtggcttcatcatgaacaggctgacagtctaccacgctgatttggaactcgctgg

SEQ ID NO: 917037 - DNA, 120 bp, Artificial Sequence
  ENSG00000273507_60 (sequence is synthesized)
aaggcaacatttcaaaaaactcactcaaagattcttgtcctgaaacagcattgccgttccagaccagggtggctgtgcccatgtacaggcgggacagtgcacagctatagcatgttgcat

SEQ ID NO: 917038 - DNA, 120 bp, Artificial Sequence
  ENSG00000273507_61 (sequence is synthesized)
gccaagggacataaggactccacctactgccagaaaaaggatcctcattgtcatctgggcagagaatgacacagctccaaaatcccactttaaattctgtttccaaggaccacttgacca

SEQ ID NO: 917039 - DNA, 120 bp, Artificial Sequence
  ENSG00000273507_62 (sequence is synthesized)
ccttttgacacagagtccctggagatgagctttgtctgagaagaaaatttgtgtacagaaagtttattggcaatcacactcagaaacaagacacttaagaaaatgatggaataaaaattg

SEQ ID NO: 917040 - DNA, 120 bp, Artificial Sequence
  ENSG00000273507_63 (sequence is synthesized)
cgtagagatagaagctgacctgcgatacatactcaaattaaatcttagttaataacatgaagttctctgcagctgagatggctaatgagaattgttctaaattcagaagaggaagcttgg

SEQ ID NO: 917041 - DNA, 120 bp, Artificial Sequence
  ENSG00000273507_64 (sequence is synthesized)
cctttgacccttatatcaacatggcaaggggcatgatcttgagtgaggcgtctcccagagggcagcccccggagaagggcgcaggactagccatcaggagccaacactcctagcagctgg

SEQ ID NO: 917042 - DNA, 120 bp, Artificial Sequence
  ENSG00000273507_65 (sequence is synthesized)
gtgaacaaactccagaatgggtcctgtagagaggacctgggtgatgcaccacaatgcctgcgacagggacgatatctctgggttagagaggatggggatgaaatcgtgaaaactggaagc

SEQ ID NO: 917043 - DNA, 120 bp, Artificial Sequence
  ENSG00000273507_66 (sequence is synthesized)
ttagaaatgtttacgactgggtgaaaggaggtagtcagtggttatacattatttacatgatcaattcatcccagatcatggaaccccctgacgctaaatcaaacagagatcaaacaaatg

SEQ ID NO: 917044 - DNA, 120 bp, Artificial Sequence
  ENSG00000273507_67 (sequence is synthesized)
tgttttattttctgccagctaatgaatgctcacacacatatatatgtaatcattgttgtaaattattcagtctcctgccctggtaatgcaccgctgctctctgagcatgctcaagagtca

SEQ ID NO: 917045 - DNA, 120 bp, Artificial Sequence
  ENSG00000273507_68 (sequence is synthesized)
tcagctcctccagaagatttcctttaatatctttactgacttttcaagagttcagcaacaaccgattaattcctttttatcctgccccaaatgtcccaaatattttcatattgccttaaa

SEQ ID NO: 917046 - DNA, 120 bp, Artificial Sequence
  ENSG00000273507_69 (sequence is synthesized)
atatttatcttgggccagtttccaatcttgcttgattcttcatctcatcttgcttcaaggagaaatttcctttgatgtccatagtaaactacttccttgaaaggctacatgtggttgttt

SEQ ID NO: 917047 - DNA, 120 bp, Artificial Sequence
  ENSG00000273507_70 (sequence is synthesized)
aagaggattagaaagaaacttggtcagatcactctgtcaagctgtcaaggctttcatcttttcaacctacctcctgtgaattccttgagaccctctaacccgtatgaatatgttttccat

SEQ ID NO: 917048 - DNA, 120 bp, Artificial Sequence
  ENSG00000273507_71 (sequence is synthesized)
ttttttgtggagggtggtagtttttgttgttgtctgccctttaaaaaattattctcatcactgaatggcaccatggccccaaatatctgcattagaaatatttacccaaaggtaatcttc

SEQ ID NO: 917049 - DNA, 120 bp, Artificial Sequence
  ENSG00000273507_72 (sequence is synthesized)
taccacatgctcccaatttagtgtaaaattacatagtaaattctgactaatgactgtgtttgaaataatttttctttgctcttttattttttttaacacatttctactcatctttccata

SEQ ID NO: 917050 - DNA, 120 bp, Artificial Sequence
  ENSG00000273507_73 (sequence is synthesized)
gcttctacaaataccactctctcttgtaaaacctttctttatttctcctgggcagaattaatcacattttcttctggatacctctactagttcattcattcattcattctgcagttgctt

SEQ ID NO: 917051 - DNA, 120 bp, Artificial Sequence
  ENSG00000273507_74 (sequence is synthesized)
attgaagtctactatacgtcacatattgtactgattctgagtacagatataagaaaactccctgcttttttagatcagtgaaaaagaagagtaaataaatagttattacagtgtcataac

SEQ ID NO: 917052 - DNA, 120 bp, Artificial Sequence
  ENSG00000273507_75 (sequence is synthesized)
ttcgatgatagaggaagcagaagatgctgtggaaagagaatgggggaactcaatttggactgagtctcaaaggatgaatgacggttttccagttgtagggggcaagatggacattttggt

SEQ ID NO: 917053 - DNA, 120 bp, Artificial Sequence
  ENSG00000273507_76 (sequence is synthesized)
gagaggaagcagtctgagccgggcaggcctctttaggagaattatatgtagctgcaaaaggctagagcacgatacatgtgcaggtctaactaggcacttggaaaggaaggcaaagccatg

SEQ ID NO: 917054 - DNA, 120 bp, Artificial Sequence
  ENSG00000273507_77 (sequence is synthesized)
ctgagtcacttgggaagccactgaaggtttattcctaagaaagtgacatgatataccttttcatattatctttctataaaagagttaaccaaaggggaagaaaaaagacaatataaggaa

SEQ ID NO: 917055 - DNA, 120 bp, Artificial Sequence
  ENSG00000273507_78 (sequence is synthesized)
gtaaaagctaagagtaatatctgtaacaaataaaatacgtggattaatattcttaataaatgccttaaaatcagttaggaaaagtactaacattccagtagtaggcaaaggacacatttt

SEQ ID NO: 917056 - DNA, 120 bp, Artificial Sequence
  ENSG00000273507_79 (sequence is synthesized)
ttgcttatattattctttttaattgacacatattaattgtgcatatttatggggtacaaagtgatattttgatatgtgcatacgatgtgtaatgatatccaccacctgtaaaatttatga

SEQ ID NO: 917057 - DNA, 120 bp, Artificial Sequence
  ENSG00000273507_80 (sequence is synthesized)
tgttttgtgtgaggaacattcaaaatccactcttctagctatttaaaaatatacaataatttattgttaataattgtcaccctacagtggtatagaacactagaacttattcttcctctc

SEQ ID NO: 917058 - DNA, 120 bp, Artificial Sequence
  ENSG00000273507_81 (sequence is synthesized)
tagctataattttgtattccttaaccaatttctggctgccctccctttcttctaccattcccaccctctagtgactcttattttactctctgagatcaatgtttttagctacatatgagt

SEQ ID NO: 917059 - DNA, 120 bp, Artificial Sequence
  ENSG00000273507_82 (sequence is synthesized)
gcagcttgcaggtggcctgttatgggactttaccttgtggatcatgtctgctggagtttgctgggggtccacttcagaccctgttcacctgggtatcaccagtggagactcccgtacacc

SEQ ID NO: 917060 - DNA, 120 bp, Artificial Sequence
  ENSG00000273507_83 (sequence is synthesized)
agagattgctgcctgctccttcctgcagaagctccatcccaaaggggcaccgacctgatgctgctggagctctcctgtatgaggtgtctggcaacctctgttgggaggtctcatccagtc

SEQ ID NO: 917061 - DNA, 120 bp, Artificial Sequence
  ENSG00000273507_84 (sequence is synthesized)
aggaggcatcagatcagggacccacttaaggaggcagtctgactgtcccttagtggagctggtgcactgtgctgggaaaatctccctcatccagatcagctggactcctcagagccagaa

SEQ ID NO: 917062 - DNA, 120 bp, Artificial Sequence
  ENSG00000273507_85 (sequence is synthesized)
ggcaggaaagattaagtcctctgaacctgagatggtgtctgcccctcccctgaggtactctgccccagggattatctataagctcctggctggggtgctggcattcctgcagggaggcct

SEQ ID NO: 917063 - DNA, 120 bp, Artificial Sequence
  ENSG00000273507_86 (sequence is synthesized)
tgcctggtgaggagggatagatccaggtcccacctaaagaagcagtctggctacaatctgccacaaccactgtgctgtgttgtgaggagtaccgcccagtccaaacctccctgcctccct

SEQ ID NO: 917064 - DNA, 120 bp, Artificial Sequence
  ENSG00000273507_87 (sequence is synthesized)
agcactgggaagggaaaagccaccaactagagctacagtaatggcggttgcccctcctgctggcaactcagtcgtcttaggcagactccaggcttctgtgctagccagcagagatttcaa

SEQ ID NO: 917065 - DNA, 120 bp, Artificial Sequence
  ENSG00000273507_88 (sequence is synthesized)
accagtgggtcttagcttccgaggttctgtgggagtgggaccctctgagtgagaccatttatcttcctggcttctgccccctttccgggggagtggatggttctcctgcctcactggagt

SEQ ID NO: 917066 - DNA, 120 bp, Artificial Sequence
  ENSG00000273507_89 (sequence is synthesized)
tgctggaatagccattgacgggagcagatgtcatgggtctgcccagttttgtgcttgagacccaaagccctcgtggtgtaggatcacaagggaatctcctgatctgtggattgcaaaaat

SEQ ID NO: 917067 - DNA, 120 bp, Artificial Sequence
  ENSG00000273507_90 (sequence is synthesized)
ccgtgggaaaaatgtagtgccccaggtgggtagcacagtccctcaccgcctcccttggctgggtgagggaggtccctttaccacacgcagctccgcagctccagagtgaactgtcacccc

SEQ ID NO: 917068 - DNA, 120 bp, Artificial Sequence
  ENSG00000273507_91 (sequence is synthesized)
ccgccgcctactttttcttactctccttgggtcatgccaactgcctagtcagtcccagtgaggtgaactggctgcctcagttggaaatgcagaaatcactcgcttcttgcgtttgtactg

SEQ ID NO: 917069 - DNA, 120 bp, Artificial Sequence
  ENSG00000273507_92 (sequence is synthesized)
aaatcactcgcttcttgcgtttgtactgctgggagctactgaccgcagagagctgtttgtatcttggcgctgccctgattttttttttttttaaacagagtttcgctcttgtcgcccagg

SEQ ID NO: 917070 - DNA, 60 bp, Artificial Sequence
  ENSG00000273507_93 (sequence is synthesized)
ctcaacctcccaagtagctgggattacagttgcccaccactttttttttggtagagatat

SEQ ID NO: 917071 - DNA, 120 bp, Artificial Sequence
  ENSG00000273507_94 (sequence is synthesized)
gttacattagtcttttaaatgtagcctatggaatttaaacacagtaccatggtattatgagccatcaaaaaataaacttctttaacagtaaaaagctttctataattcctctttttcctt

SEQ ID NO: 917072 - DNA, 120 bp, Artificial Sequence
  ENSG00000273507_95 (sequence is synthesized)
tttacatttcatttccttccttttcagagatttatcataatttcttatatttttatactggaaagggttttattgatccccatatcataatgaaaataagtatatgcatttaaattttaa

SEQ ID NO: 917073 - DNA, 120 bp, Artificial Sequence
  ENSG00000273507_96 (sequence is synthesized)
ttcaaaaaatttctgtgactttaaggctcatgaatttttctttccggactaaattgttataattattacattaaaattagtttaaatgtcgtaaacatattacatatacagattgagcat

SEQ ID NO: 917074 - DNA, 120 bp, Artificial Sequence
  ENSG00000273507_97 (sequence is synthesized)
ttctaatccaaaaatgaaaaatctgaaatgcttccaaatctgaaactttcatgacacgagagctgacatgatattcaaaggaaatgttcattggagatttcaggttttggattttcagat

SEQ ID NO: 917075 - DNA, 120 bp, Artificial Sequence
  ENSG00000273507_98 (sequence is synthesized)
ttgcaggcagatttatatcccagcctggagctcaggaagaaggtctgggctgaggatagggatttgggacgtatctgttgggaaaaagctgagggttgggagggaaactgaggcagggct

SEQ ID NO: 917076 - DNA, 85 bp, Artificial Sequence
  ENSG00000273507_99 (sequence is synthesized)
ggaaaaagctgagggttgggagggaaactgaggcagggcttgcataatgtctatggccctcctaggctcctaggctcctattccc

SEQ ID NO: 917077 - DNA, 65 bp, Artificial Sequence
  ENSG00000273507_100 (sequence is synthesized)
cgtgggctcccagagctctgggccttcacagactccatgatagtgatggcccacctttttctctt

SEQ ID NO: 917078 - DNA, 120 bp, Artificial Sequence
  ENSG00000273507_101 (sequence is synthesized)
tcacagactccatgatagtgatggcccacctttttctctttcactgtcttttcctcaatcctttgactctgccagactttgtcaccccaatgacctggtattgggtctgatcaccccaac

SEQ ID NO: 917079 - DNA, 120 bp, Artificial Sequence
  ENSG00000273507_102 (sequence is synthesized)
aacatctttgtttaggtagaagtcagaagttaagtcagtaggtgagattgctcagaaagcagagacagtaacagaatactaagaagtgtaagcctaaaagcactaagttttaagatgagg

SEQ ID NO: 917080 - DNA, 120 bp, Artificial Sequence
  ENSG00000273507_103 (sequence is synthesized)
gttaaaagaaagtgttagcaaagaagactgagggagcagccacagagatggcaggaaacccagggaagacaagcatgatagaagttaccaaagccagaaaaaaatttcaaaaagaagatg

SEQ ID NO: 917081 - DNA, 120 bp, Artificial Sequence
  ENSG00000273507_104 (sequence is synthesized)
cggcaagcgtagaaacatttctaagacagaccaaagaatgaaatgaacattgaggaggtcctcagtaattatggtaaaggcaaattcaatctagcaactaggaaaattgaagtcaatttt

SEQ ID NO: 917082 - DNA, 120 bp, Artificial Sequence
  ENSG00000273507_105 (sequence is synthesized)
gtgtgtgttgagaaatttattgtggtgaaggagagataagaagtataataatttttcaagaagcttgcctgaggaggagataaatggggtgtcagcttgctagaaaaggatgagtggttg

SEQ ID NO: 917083 - DNA, 120 bp, Artificial Sequence
  ENSG00000273507_106 (sequence is synthesized)
aatgcacagatgtgtctgcttttgagattggagagaaatggcaaaacttgctgagtggaagatagagtttaacaattggaaagtatagttgacacaagaagggatgagagtctacagaat

SEQ ID NO: 917084 - DNA, 120 bp, Artificial Sequence
  ENSG00000273507_107 (sequence is synthesized)
gagtggggctttctctagttttctttatgctctaagctgctcccactgagttgggaaagtaagaaagtgcatatgagagaggaaatggaaatacctctcccataccttcctaccttaatc

SEQ ID NO: 917085 - DNA, 120 bp, Artificial Sequence
  ENSG00000273507_108 (sequence is synthesized)
attagaataacacctttccttttttaccacaccaaaactttgaagataagtatatttaggcacagggatttttatggcataaaaatatcacaaatattagttgtgattagtaaaatcctc

SEQ ID NO: 917086 - DNA, 120 bp, Artificial Sequence
  ENSG00000273507_109 (sequence is synthesized)
tcactcaaactgcacaaaatcacatcaacttgacttcaaaaacagggtaaaagcaattgttcatttaattatcttaaaactcaactttaggtgttttgttgttgttgttgctttgcaaaa

SEQ ID NO: 917087 - DNA, 120 bp, Artificial Sequence
  ENSG00000273507_110 (sequence is synthesized)
attggcaattatcagctcctgaacaaaagagctcctcccacgatgcctgaaaatactaatttaggtacattgaaagggggaaagtctgtccatgtattattcagttcattagtcaagtag

SEQ ID NO: 917088 - DNA, 120 bp, Artificial Sequence
  ENSG00000273507_111 (sequence is synthesized)
agctaaagcggttaatatttggtccaattctccatctttctcttatttttcaagtgaggagactgatcattattgagaaaatgtgctcacactgtgtgaatgtttttattttatgcgtct

SEQ ID NO: 917089 - DNA, 120 bp, Artificial Sequence
  ENSG00000273507_112 (sequence is synthesized)
tcagagtctgataagggcactatgcatttagggttttattttttaaaaatagtacctttccttagtgtacagttattcagaaacatctgttggtttcatttttgaagttgtaatggcatt

SEQ ID NO: 917090 - DNA, 120 bp, Artificial Sequence
  ENSG00000273507_113 (sequence is synthesized)
cacacaaagcatggaaaacataaatagcatataatgatggaaaggactcatcacaggaaaccaagatttaacctcagtggaaattacataggggaaaaaagagcagtattttgtctcaga

SEQ ID NO: 917091 - DNA, 120 bp, Artificial Sequence
  ENSG00000273507_114 (sequence is synthesized)
cagacctaaattgagattacaactgtgataccagctgtctcagggcaagtttcttagcccctacaaacattacttgttaaatgctgataggccctttctgttgggcaggaatttctgcgg

SEQ ID NO: 917092 - DNA, 120 bp, Artificial Sequence
  ENSG00000273507_115 (sequence is synthesized)
aagctatcttaggttagtttatagctatagttcctaagccctcaccaaagccacagaatgaaagaaaaagtttatctttcccaggtctccaaaactgccaaaattatgtttttaccctag

SEQ ID NO: 917093 - DNA, 120 bp, Artificial Sequence
  ENSG00000273507_116 (sequence is synthesized)
agaatagaacagagccaaacttgagaaaaagtaacctttaatgggctgtgagagtaatcactgacaggacaatgaggaacaggggtagaaatcggggaaaggaaggcagtacacctgatg

SEQ ID NO: 917094 - DNA, 120 bp, Artificial Sequence
  ENSG00000273507_117 (sequence is synthesized)
acacgggcacaccggggctgggtgagagctccgattttgtttagtttctatgatttgagtacttcagtctctttttctacaaccctgttgactggaaaggtacacagattctacaagcac

SEQ ID NO: 917095 - DNA, 120 bp, Artificial Sequence
  ENSG00000273507_118 (sequence is synthesized)
aaggccctgtagacttaggcaagtttaaacctaatagatgaaatggccagctttgcagagcaaaatatcaaagggagtgagccaaataagagccaccagtggggaaaaatctgaaggcca

SEQ ID NO: 917096 - DNA, 120 bp, Artificial Sequence
  ENSG00000273507_119 (sequence is synthesized)
tagagatgagaataggaacttcccactccatcatcaatgtccattctggtgttcttctttaatatgtgctacactctacccatggcctctttttcattcccaatattacttatttgtgat

SEQ ID NO: 917097 - DNA, 120 bp, Artificial Sequence
  ENSG00000273507_120 (sequence is synthesized)
ttcctttatttaaaaataatcaatactgccagaggttatccatttgtctttccaaaaaactagttttggcctttgttgattctttctgtaatctgttgctttctattttattaattttgg

SEQ ID NO: 917098 - DNA, 120 bp, Artificial Sequence
  ENSG00000273507_121 (sequence is synthesized)
ccctttttctttctttctagtctttttgggtttattctgttatttttctaacttcttaagtacgtgcttagttcattttttaaaaattctttttattttgtaattttataaattttctaa

SEQ ID NO: 917099 - DNA, 120 bp, Artificial Sequence
  ENSG00000273507_122 (sequence is synthesized)
gtacctctttagttaggccatccaggttttgagtatcgtatcttaattgtaatcgagctccaaatactttatttccataaaaatttgtctttgaagtttgttactaaatttataaattat

SEQ ID NO: 917100 - DNA, 120 bp, Artificial Sequence
  ENSG00000273507_123 (sequence is synthesized)
gatgaattatatttatctttgcattactgttttctaacttaattgcatagtggacagagaagatagtatgtttgatacagaccatctagtatgttgaaacttgccttgtaactaagtgca

SEQ ID NO: 917101 - DNA, 120 bp, Artificial Sequence
  ENSG00000273507_124 (sequence is synthesized)
tggtcaattttgaaatgcctcatttatgcatgaaaagaatgagtcttctctaattgttgtcattctctaattgttgtagataaaactacctagttctctaattgttgtagataaaactac

SEQ ID NO: 917102 - DNA, 120 bp, Artificial Sequence
  ENSG00000273507_125 (sequence is synthesized)
ctaactgtattatttgaattttctatattcttaaaaaattttgctacccatgagttaattagtggcagaaatgtgagttcattgattttctttggaatgttatcaatttctgttttatat

SEQ ID NO: 917103 - DNA, 120 bp, Artificial Sequence
  ENSG00000261220_0 (sequence is synthesized)
tcggtgtcctcatctgtgagaaccgacctaagaagtgtctgtctgataaagctgttgtgatgagttagtgaattcgtacacatagaacctttagaactgtctttgacatgtagtaagtca

SEQ ID NO: 917104 - DNA, 120 bp, Artificial Sequence
  ENSG00000261220_1 (sequence is synthesized)
gctgtgtagatggtgggtttctccagtgtcaggtccctgcccacagcaggaagatgacctgtgctagaagatgggggctagggtgttggggaagacttcagggacttgggagagaaaagg

SEQ ID NO: 917105 - DNA, 120 bp, Artificial Sequence
  ENSG00000261220_2 (sequence is synthesized)
ctagaaagggaaggaaaagatgaatagccttttaggtacttcgggacctgctctgagacctcttgcctgacgcccttggtttttgatagaattctagagaaggggtgagcccttttgtct

SEQ ID NO: 917106 - DNA, 120 bp, Artificial Sequence
  ENSG00000261220_3 (sequence is synthesized)
gcctggacacatcctgtgggctttcctctttctgaaactcaggtcaaggtgttcactgcatctccagattgcttgtgtgcatgggaggaggggggcagagagttctgcttacatcggcta

SEQ ID NO: 917107 - DNA, 120 bp, Artificial Sequence
  ENSG00000261220_4 (sequence is synthesized)
ctgtcccctccaccagcagcgtcttccagcaaagaagagcttctaacatgcaccagacttttagctttggctgggaatatcgtctgggccaataaagagtttttggatgaaataacaaaa

SEQ ID NO: 917108 - DNA, 120 bp, Artificial Sequence
  ENSG00000261222_0 (sequence is synthesized)
gggcagggcgggagagcgggaagctgggcctcttgcttttctttcacattcccagcatggtagatgggtgtggacatcaatccgaagcccacctcctttcgagggatcaataggatgtct

SEQ ID NO: 917109 - DNA, 120 bp, Artificial Sequence
  ENSG00000261222_1 (sequence is synthesized)
catcaccgcgcaaatgcggctgcccctgtttaaccccatcacagcctggtgcttcaggatccctcaaagtccagggtcaaggcccattctctccctggatcctgccttccctgctccacc

SEQ ID NO: 917110 - DNA, 120 bp, Artificial Sequence
  ENSG00000261222_2 (sequence is synthesized)
ggctcccttctccagcccaactccgttcctttcaaagggtcttgttccctggagcctgccagcaccgatcctgtgttccctaggagtccggaagaggcgaggcactggggatgcttcctg

SEQ ID NO: 917111 - DNA, 120 bp, Artificial Sequence
  ENSG00000261222_3 (sequence is synthesized)
acctggccttcgtctcgctccactgtttgcagagcggttgttctgctgagtggggatggcagtgccaggacttctagcgagacgggagaggcacaaggggaaacttggcgggaagagacc

SEQ ID NO: 917112 - DNA, 120 bp, Artificial Sequence
  ENSG00000261222_4 (sequence is synthesized)
aagggtgcggcggctccacggggagtggaacttgcaagaagaacacagtggtttaaagggtatttttaggatgtgcaatatggcaggcctgctctcactcaagaaaactctgagttaaat

SEQ ID NO: 917113 - DNA, 120 bp, Artificial Sequence
  ENSG00000261222_5 (sequence is synthesized)
tcacatgactcatcactgcttccatgccctgggctggaggccagcttcggggagagaacagggatggcctgagggaaagggccctggcactgggtgtaggggagtggatgaggaataaga

SEQ ID NO: 917114 - DNA, 120 bp, Artificial Sequence
  ENSG00000261222_6 (sequence is synthesized)
ctggggaatcagactcttacacgctgatggggactccccagaacccactcgtttagctagaccaaatattaaacatgtgggtgatatgaggcagcaggtctcagatctgctgtcataaag

SEQ ID NO: 917115 - DNA, 120 bp, Artificial Sequence
  ENSG00000261222_7 (sequence is synthesized)
caggagaaccaaatagataaatagccaggttgttagaagtgggggaatcttcctgtgcttcaaagaggtaataataattagatttgagcttgaaagatgggcagaagtgacaaagggaga

SEQ ID NO: 917116 - DNA, 120 bp, Artificial Sequence
  ENSG00000261222_8 (sequence is synthesized)
cacaaggcagagagaggagcagaagcaggaatacaggacacagcagaccctcgagcttggcgggacacaggatcctgctctgcaacatccacttcctgctcccgatctccctgaaggggc

SEQ ID NO: 917117 - DNA, 120 bp, Artificial Sequence
  ENSG00000261222_9 (sequence is synthesized)
tgctgctcgtgggcctgctctgcactgtgctgcaagtgagcagtgctaagggggcctccagggggaaataaagtcacagcctgagccggggaaccgcagctcccacaccatcaacaccct

SEQ ID NO: 917118 - DNA, 120 bp, Artificial Sequence
  ENSG00000261222_10 (sequence is synthesized)
cggagggggcaagcagaacctctggcctcctatcaggagcagataaaagaaaggacatcccccttgcacactgattccttggaggcatctgcatctcaccttcatggatcctccctcagg

SEQ ID NO: 917119 - DNA, 120 bp, Artificial Sequence
  ENSG00000261222_11 (sequence is synthesized)
cctcctttccttgtggctccaggatgaccctgtcagagatactggactatcgttcagttgcagaggccccagggcctgtctggacttttccatcccaagaggggctcggctctatcccct

SEQ ID NO: 917120 - DNA, 120 bp, Artificial Sequence
  ENSG00000261222_12 (sequence is synthesized)
ttgtgcctgtgaccctctccatcccccacccggctcagaactggcacagccaccaccaaccactcctgattcaacccaagcttcgccctttccacctctcgagctgtgcaacaacaaatg

SEQ ID NO: 917121 - DNA, 120 bp, Artificial Sequence
  ENSG00000261222_13 (sequence is synthesized)
caggatgctcagccctcatgtgtcagtcccctcaattcacttgtaattaaataacaacacacctctttttctaattttcaaaggtgtatatatttcccctcaataaagttgttaggatta

SEQ ID NO: 917122 - DNA, 120 bp, Artificial Sequence
  ENSG00000261222_14 (sequence is synthesized)
agttacaagttgctggagggcagctggtattaactcatcaccagggagagagcacagacaggcaggggcatgtagtgctcactggtcctgttccttctcatccttccagcaactccaaga

SEQ ID NO: 917123 - DNA, 120 bp, Artificial Sequence
  ENSG00000261222_15 (sequence is synthesized)
aaacaatctgaacctaagacaacagacgcagctgcacctgggacagcagacacagctgggcctgggacaatggacacagctgtacctagaaaagcagaaacagctgtgcctgggaaaagg

SEQ ID NO: 917124 - DNA, 120 bp, Artificial Sequence
  ENSG00000261222_16 (sequence is synthesized)
acacagcagaacctatgagaacaaccactccaacagttctggcctcctggccttctctcacccagagcaccaacagcacccagcccacggctcttaccagccccctcaccaggtgagcag

SEQ ID NO: 917125 - DNA, 120 bp, Artificial Sequence
  ENSG00000261222_17 (sequence is synthesized)
agctgggctcccacagacctttccctaggctgccccatgactgctccttcagatgctctcaccagggaccctcatgtggcgctcgtcaggggagaaacagtgaagtctgtagtgggcctt

SEQ ID NO: 917126 - DNA, 120 bp, Artificial Sequence
  ENSG00000261222_18 (sequence is synthesized)
aactgtagtgctaagactaaatgcttcacgatccttggaggggtaagaggtgacgtgagccacggggaagccacctaggtcaccctcaaaactatcctttgcatgtcccacagcaactcc

SEQ ID NO: 917127 - DNA, 120 bp, Artificial Sequence
  ENSG00000261222_19 (sequence is synthesized)
agagagcaggctctgggctccatgcttcaccgagtccctcaagccccaggaggcaaaagcgaggtgaagctttgggtgctctggaagggcagctgtctgggtggctttcctgtggctgct

SEQ ID NO: 917128 - DNA, 120 bp, Artificial Sequence
  ENSG00000261222_20 (sequence is synthesized)
gtaactgatcgttacaaactttgtggcttaaaacaacacagtctcatgatcatacagctgtggagaccagaagtctgaaatgggtctcactgggctgaaatcaaggtgttaacagggctg

SEQ ID NO: 917129 - DNA, 120 bp, Artificial Sequence
  ENSG00000261222_21 (sequence is synthesized)
gttccttctagaggctccagcggagggcctgttcccttgccttttccagcttctggaggccacccgtgttccttggctcatggccccctcctacccaaagccagcaaaggtcggtggagt

SEQ ID NO: 917130 - DNA, 120 bp, Artificial Sequence
  ENSG00000261222_22 (sequence is synthesized)
ctcccacagagcatcgctccactgtctctcctgcctccctctttcatttataaggacgctggtgattccactgggctcagccagatgatccaggataatccaccctgggtcacctgacga

SEQ ID NO: 917131 - DNA, 120 bp, Artificial Sequence
  ENSG00000261222_23 (sequence is synthesized)
gcagtctcaaatccacccactgccttaattcccccttgcatgtaataaaacatattcacaggctttggggttatgacatcgtgggtggggttcactattctgcctaccacagtcacaggc

SEQ ID NO: 917132 - DNA, 120 bp, Artificial Sequence
  ENSG00000261222_24 (sequence is synthesized)
atacaggacacagcagaccctcgagcttggcgggacacaggtgagtagcagggactgtgggaaagaagaccaaaggcaggcctggctgggtgcagtggctcacgcctgtcatctcagcac

SEQ ID NO: 917133 - DNA, 120 bp, Artificial Sequence
  ENSG00000261222_25 (sequence is synthesized)
ctcagtagttcaaaatcagcctggggtatatagcgagacgccatctcggcaaataatgttaaaggctgggcagtcacggccaagggcagcgaaggggccgggccccagactgagcctgtg

SEQ ID NO: 917134 - DNA, 120 bp, Artificial Sequence
  ENSG00000261222_26 (sequence is synthesized)
ggaaggccactggaagctcagcctccgggtggcatgactttgccccttgcatggggcttccctggttggggaccaggcagctgaccagggtggcaggtgttggctcagggaagaggctgc

SEQ ID NO: 917135 - DNA, 120 bp, Artificial Sequence
  ENSG00000261222_27 (sequence is synthesized)
ataagcagcaattgcagttccccaggagacaagggtccctgcagagatgaaatatccctcatcctggcctcaggaaggcaatcccactcccagctggctctgcacagcacagggatgctg

SEQ ID NO: 917136 - DNA, 120 bp, Artificial Sequence
  ENSG00000261229_0 (sequence is synthesized)
agccttttagcatttctaagctggactaggcgagagtgtcacacctgcttcccttggcttccatcttgcctcttccagtttatttctcaagctgcagtcaaactgatcttagaaaacacg

SEQ ID NO: 917137 - DNA, 120 bp, Artificial Sequence
  ENSG00000261229_1 (sequence is synthesized)
aatctaatcatgcagcacccctgactaaggtcttccggtggctgttcagagcctcttgggtagcaaacagatggcttctgttgtatacaaagccccttaagagaggtctcctcatctact

SEQ ID NO: 917138 - DNA, 120 bp, Artificial Sequence
  ENSG00000261229_2 (sequence is synthesized)
ttttctagcctcttctctcccaactctgtattctcctgtaacactgactgagcactgcaggcttctgccctttgcacatagtaagcatgcatttctctctgtctgaaatgctctttctgt

SEQ ID NO: 917139 - DNA, 120 bp, Artificial Sequence
  ENSG00000261229_3 (sequence is synthesized)
cctagcatcacctcttctgtgaagtcttctgctactttcccaagcagagtgagtgttccttcccttgtctgagtggccttggccattgatgtgcttatcatgttgtcttacgtatcaaat

SEQ ID NO: 917140 - DNA, 120 bp, Artificial Sequence
  ENSG00000261229_4 (sequence is synthesized)
tatttgttgtcatatctgtccccttcaccatactgtgagctccaaagaaaagaagtgatctttatacttcttatgcttagtacacaactagacatatagtgtgtgtgtgagagagagaat

SEQ ID NO: 917141 - DNA, 120 bp, Artificial Sequence
  ENSG00000261229_5 (sequence is synthesized)
tttttaatgaaataattgaatacattggaagtgtttcattcaaaatactcatccattattctttggatagtagcataaatttgatgttttatgtacaaaagtaaaaacatttgaaaaata

SEQ ID NO: 917142 - DNA, 86 bp, Artificial Sequence
  ENSG00000269053_0 (sequence is synthesized)
gctgctagtctagaaaaaagctcggtgcttaacggaaaagttgggagctttgtggccgcgcgcagtggctgacgcctgtaatcccg

SEQ ID NO: 917143 - DNA, 120 bp, Artificial Sequence
  ENSG00000269053_1 (sequence is synthesized)
atctgtgggatacgcagctattgatttaaagagcgagtactatggaccatcatgagctttgaaatcttgggtataacttgaagatttgttcacaggcacaatacgtttaaaaagcgacgt

SEQ ID NO: 917144 - DNA, 120 bp, Artificial Sequence
  ENSG00000269053_2 (sequence is synthesized)
ataaaagaatttattgcctgtagtcccagctactgaggatgccaccagcaaaccgagttacctccccactttgtgtaggtggcaaagaaggaacatccaatcggaaaaggcaatcaggtt

SEQ ID NO: 917145 - DNA, 120 bp, Artificial Sequence
  ENSG00000269050_0 (sequence is synthesized)
gccgccgcagctccggtgctcggagtgtgcggagtcgtgtccacagggccggcttcaggggcgccagcaccgcctggcacaccgccgtctccagcgcggggcctgcggggtgtgggggac

SEQ ID NO: 917146 - DNA, 120 bp, Artificial Sequence
  ENSG00000269050_1 (sequence is synthesized)
gggtgatcctggaggtcagtaaggaggtgccgcacatcctgaagcagctccgtggccgggtccccagacccgtggggacccccagaatctgaggcgatgcgcacccgaaggcttcggtac

SEQ ID NO: 917147 - DNA, 84 bp, Artificial Sequence
  ENSG00000269050_2 (sequence is synthesized)
ccgaaggcttcggtactgcctggccacgtagctgctccgggccctgaccagagactggacgtgaatgggtttccctctgttgcc

SEQ ID NO: 917148 - DNA, 74 bp, Artificial Sequence
  ENSG00000269050_3 (sequence is synthesized)
ctctgcctcctgggttcaagctattctcgtgcctcggcctgccaagtagctgggattacagtcgcgcgtcacca

SEQ ID NO: 917149 - DNA, 120 bp, Artificial Sequence
  ENSG00000269054_0 (sequence is synthesized)
agggccgaggcccgtcctgccccgcgcggcgggagtggttggagccggagggcggatctgtgcctggccgagggtgtccgtcggcgtcactcaccgtcctcggcccgcctctgcgtccac

SEQ ID NO: 917150 - DNA, 120 bp, Artificial Sequence
  ENSG00000269054_1 (sequence is synthesized)
taggagcggcctgaaagaggcccgcacgcgggctcgagccgcgtggaatgcacctagagctgcattccatgtattccttggcttttcgtcctttcctccatcatcaagtaactggatctg

SEQ ID NO: 917151 - DNA, 120 bp, Artificial Sequence
  ENSG00000269054_2 (sequence is synthesized)
tgagcatgatgaactttgttttcctgagcttgtcctgtgtctcctcttctggccacacctgactgagcagaacataaaagcgacagaacaccaggagggctgctgcttggggaaattgtg

SEQ ID NO: 917152 - DNA, 120 bp, Artificial Sequence
  ENSG00000269054_3 (sequence is synthesized)
tgagaagagtcctgggggactaggggcagggcaagcactgctctccctctcctggaggctggggagagcatcaaggagactaccaggtaggaggaaccatgggcagggcctccctcatca

SEQ ID NO: 917153 - DNA, 120 bp, Artificial Sequence
  ENSG00000269054_4 (sequence is synthesized)
ggatgctttccccacaacagagggatttaagcccctggtgggtgagtcctggattaaccaagacctgagccttttggggggtgcagaggacagaggacactgtgaggtgagtttctcctg

SEQ ID NO: 917154 - DNA, 120 bp, Artificial Sequence
  ENSG00000269054_5 (sequence is synthesized)
ggtggattccccaggggcctctgaggctggtttcaggccctgccctttggctgccccactggaagctctgagcatctacccttcagggacgctttccctggtctgaccttggcaagggca

SEQ ID NO: 917155 - DNA, 120 bp, Artificial Sequence
  ENSG00000269054_6 (sequence is synthesized)
aataagaggtactccatggagggtcaccaaggtctggggcgtaaacggtgcccatctgcacagtagcatgagggccacagagtgtggtaaatgtcagtgaccatcacatgcggtccccag

SEQ ID NO: 917156 - DNA, 120 bp, Artificial Sequence
  ENSG00000269054_7 (sequence is synthesized)
ggaaccctattggaagcaacaaggtctaggccctgagggcccagggctctgccctctccagggctctagctgagccacgtgcaagcatcctcccggccctcccagctggtgtgaggagga

SEQ ID NO: 917157 - DNA, 120 bp, Artificial Sequence
  ENSG00000269054_8 (sequence is synthesized)
aaccacagccaaagggcaaggtgctccacacagatatgtccctagtcagcctgccccattcggcctctggagtgggagccttgggtctgtctggaaccagtgtggatgaaatgcagggag

SEQ ID NO: 917158 - DNA, 120 bp, Artificial Sequence
  ENSG00000269054_9 (sequence is synthesized)
aaactggaatcatagccatggacagccactcacatagctgggaagaggcatgctgtggtagatcccggtggactctcacctctgcggtgctggggacgttgtgccgacacctcaggcacc

SEQ ID NO: 917159 - DNA, 120 bp, Artificial Sequence
  ENSG00000269054_10 (sequence is synthesized)
cacttccactcacaccgcggaggcttggggagatgcggttcagtctggagtccagcggggggcgacaataaaggcgaccccgctcgtcagtcagaccagggcaagcttgccagggcttca

SEQ ID NO: 917160 - DNA, 120 bp, Artificial Sequence
  ENSG00000269054_11 (sequence is synthesized)
cacttcaccaaagggaaccctttctgccgcgactaccgagctgccagggccgggacaggcagaagcctgccccgaggtctcacctctggagggttacgagctgtgccaggccggctacgg

SEQ ID NO: 917161 - DNA, 120 bp, Artificial Sequence
  ENSG00000269054_12 (sequence is synthesized)
tagagggtgtgcaaataccccgcggtcccaaggctcctgaagctgcctaagggatatgagagaccctaggttcgaatcctgcctccatcgtcttatgttcgtgcctcaggagagtcactt

SEQ ID NO: 917162 - DNA, 120 bp, Artificial Sequence
  ENSG00000269054_13 (sequence is synthesized)
tgccccgtttcctcgcataccagagagcccagtaacacgctccgcggctctgcggagaaaaagaccctagagatcgtggacacagcgtctgggccgtatcagcgcccactcgagattatt

SEQ ID NO: 917163 - DNA, 120 bp, Artificial Sequence
  ENSG00000228586_0 (sequence is synthesized)
gttgtgtaaataagcacctcacccatctcagtacttcccaagccacaggacggagtgtgggagcgaagccccttcatcaaagcaccagaaagatgtcagcagaaaaacaaacagatggaa

SEQ ID NO: 917164 - DNA, 120 bp, Artificial Sequence
  ENSG00000228586_1 (sequence is synthesized)
cttcggacagccaaatccagtgaggtgtgagctaacctccccacccagtcatgtgcttacacatgggaacaaaacccaagagggtggccagccttcagcccagtgcccagggatgaaaca

SEQ ID NO: 917165 - DNA, 120 bp, Artificial Sequence
  ENSG00000228586_2 (sequence is synthesized)
ctgtccatgcttccacctcaagcactgagcaagatcctctggcaaatgacctcactgggaggtaaagaggaaagcgctattgtcaactccattcttcagagtatctgagcccaagggaca

SEQ ID NO: 917166 - DNA, 120 bp, Artificial Sequence
  ENSG00000228586_3 (sequence is synthesized)
ctcccgtgtgatttggtctccctaaccgctcccctacctcccttcaagttaatgttggagcttctccagggctgacttgggagaggagccggcagaccgggccagtgcaccctcttggca

SEQ ID NO: 917167 - DNA, 120 bp, Artificial Sequence
  ENSG00000224187_0 (sequence is synthesized)
atatattgggcttctggttttcaaggacaattttatgataagtagcaatgatgcctcaaaagctctggtagctagcttgaatgaacttatgtaataaacatttatcacagaacatgtgtc

SEQ ID NO: 917168 - DNA, 120 bp, Artificial Sequence
  ENSG00000224187_1 (sequence is synthesized)
aggaacttggctgaacaaagctggcagacgtttatactagaaaatttagagatgtcaggagcaagggagcaccagtggtagaagaacctgcctcccctggctccatcaaaggccacaggc

SEQ ID NO: 917169 - DNA, 120 bp, Artificial Sequence
  ENSG00000224187_2 (sequence is synthesized)
ccatgagaatcacccggcctgctctgagcagcacactcggaggccacagccacgcacaggaaagtgagaggaagtggaaacgtgcgagcagagggctcaaagcgacgggctcaccaccgg

SEQ ID NO: 917170 - DNA, 120 bp, Artificial Sequence
  ENSG00000224187_3 (sequence is synthesized)
gtggtctctcctcttcccatacacaccttacggattcttcacagggtgtgatgatgggaagcctagacacgcttatcagaagtttgtcctcttatcgggatacgtcagaaattagagaga

SEQ ID NO: 917171 - DNA, 120 bp, Artificial Sequence
  ENSG00000224187_4 (sequence is synthesized)
ccctggcaatcacagcttccacctcctcattttacaaatgagcaactaggctcagagtacagaagtggctttcccagggtcacacagccagcttgtgacagagtcaggattcaagtacca

SEQ ID NO: 917172 - DNA, 120 bp, Artificial Sequence
  ENSG00000224187_5 (sequence is synthesized)
ttataaaatttatttaaatgtgattgggtgaatttagcagttaaagaagtgaagaacactgaggtccaattggtgcctgaggcttcttccaggacccagtcttttctgtctgccttgggc

SEQ ID NO: 917173 - DNA, 120 bp, Artificial Sequence
  ENSG00000224187_6 (sequence is synthesized)
catagaaacacatcccaaaacgttcttggttcttattggaatctcatctcatttgcagaacatggccagagtcaaagagacatggaccatgtgtcactcagactgagtccatccatacaa

SEQ ID NO: 917174 - DNA, 120 bp, Artificial Sequence
  ENSG00000224187_7 (sequence is synthesized)
agagaattctctagcctgtattggaagtcaatctacatcagcatgacagggcatgtagccgaatacgtggccacttccctttggctacccacacatttttgaactgcaagatctgttctt

SEQ ID NO: 917175 - DNA, 120 bp, Artificial Sequence
  ENSG00000224187_8 (sequence is synthesized)
tatctactcatctaatggttattactgggagagcactggactataaattctgttgcacttgcaggtgtaatgagctctttgaacctcagtttcctcacccatcagatactattcattatc

SEQ ID NO: 917176 - DNA, 120 bp, Artificial Sequence
  ENSG00000224187_9 (sequence is synthesized)
tgccttgcggacaacacctagttgttgggaacattgcatgaatggcaggtggaggtgctttgtaaacgctaaagcctgccatgaatgtgaaggagtgttgctactcttctgtgcccaaca

SEQ ID NO: 917177 - DNA, 120 bp, Artificial Sequence
  ENSG00000224187_10 (sequence is synthesized)
atgtgctagcaccaagggagttcaaaagaaatgtgagacatggtccctaccctccaggaacttacaactcattgttgggagaccaagacacatcccctaaaaacagatatgtaacacctc

SEQ ID NO: 917178 - DNA, 120 bp, Artificial Sequence
  ENSG00000224187_11 (sequence is synthesized)
aagtctgtgaagtacttactatttaaatgatgcccagagcctctgaatcccctagaagtacagaggagggggagatcattaatggtgtggagaagttggaggaggtgagacgatgccagg

SEQ ID NO: 917179 - DNA, 120 bp, Artificial Sequence
  ENSG00000224186_0 (sequence is synthesized)
gatcaagaggggctgtcagtccaaccctccagctgtaggctcgtgcatctgccagtctcttggcgcgtggggaccgcgtggaagtgccttcgcgtgtgcgtgccagctgagatgagacgt

SEQ ID NO: 917180 - DNA, 120 bp, Artificial Sequence
  ENSG00000224186_1 (sequence is synthesized)
ggaagctggaggggtccggcatcccagagaggcgtgaggctcccaaacggcatccttagaaacatctcaagacttgctggatgtttgaaggtctctctggattcctagcaggtggtctga

SEQ ID NO: 917181 - DNA, 120 bp, Artificial Sequence
  ENSG00000224186_2 (sequence is synthesized)
ctctacagcagcccccaagctgcctctggatagttcagacaaggcctctgtgctgtgatggaaccaggtgacccgcagcctccgggccagggagagaagacagatttccctcatgcagga

SEQ ID NO: 917182 - DNA, 120 bp, Artificial Sequence
  ENSG00000224186_3 (sequence is synthesized)
agacgtctgactctgtggcaagcagctctatgttgcaatctccctgtgaaatcgcctcataagaagagttaaaaggaggaactaaaggaggctgtggagagagacatgtgccctataaca

SEQ ID NO: 917183 - DNA, 120 bp, Artificial Sequence
  ENSG00000224186_4 (sequence is synthesized)
gtcgcctactgtcacggtgttaacctccctctctgtctctctgagtgcgttctctcgcccgtcacccctcttcctttctcggtctcctcctctcccttcgtccgagccgctccttagcgc

SEQ ID NO: 917184 - DNA, 120 bp, Artificial Sequence
  ENSG00000224186_5 (sequence is synthesized)
gtcttcctagataatcaacatccctcaacagccttggcggtgagaaggcacgtgaaagctgccagcacatcccaggagccttggctgtggcggcttctccttggaaagctccacgcaccc

SEQ ID NO: 917185 - DNA, 120 bp, Artificial Sequence
  ENSG00000224186_6 (sequence is synthesized)
ttctgccagggatcctgtcctgcagggatgacagacccagcagcctcggcagagggaatgaggctccagcagcttcatcagcaagtggccaggcccagccctaagtcacagactgtcaga

SEQ ID NO: 917186 - DNA, 120 bp, Artificial Sequence
  ENSG00000224186_7 (sequence is synthesized)
aggggacaatggtaggagagagctgggctcagggtctggagcctgccacatgccacctgcacggctttggatacactccctccttcatctgtggaacggggaatggggataacaccctgg

SEQ ID NO: 917187 - DNA, 120 bp, Artificial Sequence
  ENSG00000224186_8 (sequence is synthesized)
cccaagggtcacacagaaccaaaaggaagctacagcctaaggaagaaaccctgctatgggactgtggctgctctggactgcgcaggctgccaggaaggaatggcggaggcagcctccgtg

SEQ ID NO: 917188 - DNA, 120 bp, Artificial Sequence
  ENSG00000224186_9 (sequence is synthesized)
ggccttgcacagagtgagagcaccacaattatgggccatgtgtgcgcagagagacacacccatgaccgatacgtaacaagcatgtgcccctacctgccgctgccgatggatggaaatgca

SEQ ID NO: 917189 - DNA, 120 bp, Artificial Sequence
  ENSG00000224186_10 (sequence is synthesized)
atggatttcagcttcttatcatcagccagggccaagcagtttttcactgtcttttccagaagttcttcacacttgtctgcaccccaaactggactattacagtggatcacaaacttggca

SEQ ID NO: 917190 - DNA, 120 bp, Artificial Sequence
  ENSG00000224186_11 (sequence is synthesized)
cacaagatgccaaacacagacccactcccctgccacggtatatcttcctgggccctccaatgccctgtgtccgaggagttccacagctgtctgctgcgttgtgattccaacgtgagctgg

SEQ ID NO: 917191 - DNA, 120 bp, Artificial Sequence
  ENSG00000224186_12 (sequence is synthesized)
agccaagccacacccttggaaagttggcattatgatgtgtcaccaccaggaattttgaccaagttcgtagtaagcctctctccactctcagaaagcatacacggttctcccagaggcaga

SEQ ID NO: 917192 - DNA, 120 bp, Artificial Sequence
  ENSG00000224186_13 (sequence is synthesized)
gccttatccatcaaaactcaactgaacgcaaactcaacgtgtcagaacatttgcagcctcaaaataattgttttgggtttccaacccttcttcttcaagtcgactggtgtgctaattatc

SEQ ID NO: 917193 - DNA, 120 bp, Artificial Sequence
  ENSG00000224186_14 (sequence is synthesized)
gacttgcacaccaatatgatgtatttgtctctactatgatgtattctctaaatctcccaaacccaattcaggacaaagctactaggaaagcaactgctttaaatgatctgctaagcaacc

SEQ ID NO: 917194 - DNA, 120 bp, Artificial Sequence
  ENSG00000224186_15 (sequence is synthesized)
tgaccagcatctccactctgccattgtcttctccctgctgaggatggcctcactgtgtgaataacggatcctgtttatttgtggcagaattagattagtttttaaggaactgtgtttttc

SEQ ID NO: 917195 - DNA, 120 bp, Artificial Sequence
  ENSG00000224186_16 (sequence is synthesized)
ttttcctagaagaggggcccctttctagctatacatctccaccaaagacttgcctttcccttgccagatctaaggacacaggcctggggtctgccacaaactgcaaagtaccatgtctcc

SEQ ID NO: 917196 - DNA, 120 bp, Artificial Sequence
  ENSG00000224186_17 (sequence is synthesized)
cagagcatgttccagaacccctgtccacagatgctctgcaaagaaggtttccagggcactgggtttagctgcatgctacgcttctatacaagagcacaccagagtctccacaccactgct

SEQ ID NO: 917197 - DNA, 120 bp, Artificial Sequence
  ENSG00000224186_18 (sequence is synthesized)
aaagtaaaacatccaaactttttgtatttggttggctatttctgaaactttttttttttttaaggaatatctgtccaaggggtatggtttgttatggtcgtgtcatagatactggagaag

SEQ ID NO: 917198 - DNA, 120 bp, Artificial Sequence
  ENSG00000224186_19 (sequence is synthesized)
gagcgatttgtgggtagtgtctcatggtacagtggaaacagctcagtcacagggtgtgaatttgagtcctggctctgctttgtgactgggcttgagaactctgggctgacctataaaaac

SEQ ID NO: 917199 - DNA, 120 bp, Artificial Sequence
  ENSG00000224186_20 (sequence is synthesized)
ctgacattgggggttgaattaaaccagtgggtttgtccccatgagaagtcatggctaaactatgcatagaaaacgactggaaagaaacattaacagtgactatctttgcacagtggaaca

SEQ ID NO: 917200 - DNA, 120 bp, Artificial Sequence
  ENSG00000224186_21 (sequence is synthesized)
gttggaggctgatggcctagcccattgccccatgcctagtctcatagaacctgggtgggacagtgagctctggtctcttccagcatgccagggagaagtggagacccttggactggaagt

SEQ ID NO: 917201 - DNA, 120 bp, Artificial Sequence
  ENSG00000224186_22 (sequence is synthesized)
tgaagccatctgggcctggagttttatttattggaatgtttcaaactatctgtaacagacaaaggacctactttttcttggctacagcctaaggaagaaaccctgctatgggactgtggc

SEQ ID NO: 917202 - DNA, 120 bp, Artificial Sequence
  ENSG00000224186_23 (sequence is synthesized)
gacagggtcaggacagctggaagtgtgaaatgaatgcagccctgcatagctgtcaaaggatcaagctgtctgcagcggccgactgaccatgcacacacacactcggcagcacccggctag

SEQ ID NO: 917203 - DNA, 120 bp, Artificial Sequence
  ENSG00000224186_24 (sequence is synthesized)
gcattacctacttcaccaccgatgtagaagtcagtgtttgtcgggtgaacgacagcatcactgtcgatcgaggcaatgtcagcctgtacaacttgcaactataacagatgcttctggtgt

SEQ ID NO: 917204 - DNA, 120 bp, Artificial Sequence
  ENSG00000224186_25 (sequence is synthesized)
tatattcagaaatgtttcattggaaaagaagctattttggcgggctctgcttcagctagccaggaagaccccctcagtggcctgtatctgactctcttcgcgggagaaccacctgctctg

SEQ ID NO: 917205 - DNA, 120 bp, Artificial Sequence
  ENSG00000224186_26 (sequence is synthesized)
gggaaacttggatttgctgaaggaagggagcagttgcgaacagaactcaagctcatggagaattctcagcttcctttggactcactaccttcccttctgaccagaggcatccccactctt

SEQ ID NO: 917206 - DNA, 120 bp, Artificial Sequence
  ENSG00000224186_27 (sequence is synthesized)
ggaagtgcagactacagtacctcagggagccactactactcagcattgaggatttcctgccaaccaagtgctgtttcactcttcacatctgtggatgaggctagagctgtgattttccaa

SEQ ID NO: 917207 - DNA, 120 bp, Artificial Sequence
  ENSG00000224186_28 (sequence is synthesized)
ctatgctctgctatgcactggggctcagcagaagtcctcagggtatgcagctgagccacaaaagtttttttgctgtaaaatgtgtacaaatatgtatttttaaacaatcttgactagaaa

SEQ ID NO: 917208 - DNA, 120 bp, Artificial Sequence
  ENSG00000224186_29 (sequence is synthesized)
tgggatgtgtgcatcaggggaagagaatgggaaggggagaagacaaattaattcaagtactttggaaggacaaatgggtaatcagcttggcaggtgggccagtgggcagaagctgacagt

SEQ ID NO: 917209 - DNA, 120 bp, Artificial Sequence
  ENSG00000224186_30 (sequence is synthesized)
gagatgatcatgaacgaagacagtagctccactatacagaagaaagcccatgagcatagcgtgcaaatggaccaggtacacatgtgtctggacaggctcccactgtccagtcacaaatga

SEQ ID NO: 917210 - DNA, 120 bp, Artificial Sequence
  ENSG00000224186_31 (sequence is synthesized)
ataagcgagatagagccaagacagaggtccagtcctaggaggccccagggtcccctcccaccagccagggtcagatccagtggggtttatcagccagaggggtgtgtgtccatctgaagt

SEQ ID NO: 917211 - DNA, 120 bp, Artificial Sequence
  ENSG00000224186_32 (sequence is synthesized)
acatggcagagaagtggtccttgtgggttaggaaatcagatttctgggaactgtaaaaattcccaaaattagtctgattttctgggaggaataaggatcattaatggtttcagaatttga

SEQ ID NO: 917212 - DNA, 120 bp, Artificial Sequence
  ENSG00000224186_33 (sequence is synthesized)
ataaggtgactgcttctttgtaccgtcgttaggaaagatggaaaactaagttttaaaccacagcatgaggaatttaaagcagctatgaagactgttagccactgaggaaagtaatcatag

SEQ ID NO: 917213 - DNA, 120 bp, Artificial Sequence
  ENSG00000224186_34 (sequence is synthesized)
ggcactgccagttatagagcagaagggggtccccgcgtggctgcacagttggcagaaagggtcgtagccaagggaccttcaagatcccttccagcactgggatccgataatcctaacctc

SEQ ID NO: 917214 - DNA, 120 bp, Artificial Sequence
  ENSG00000224186_35 (sequence is synthesized)
actggctctgctgggccagcttctgatacaagcagtacccgagtcttccctgtggtgaggatgtccgtggaaacccttgttctttactcatggtatatgctcatcagagtataatctctt

SEQ ID NO: 917215 - DNA, 120 bp, Artificial Sequence
  ENSG00000224186_36 (sequence is synthesized)
tgaaggcaggagtgggtgtggccccctaaccctgagtgctgcacagtgcctaagccagtgctggggttcccctgggcatgtagagttagaactgaacatcaaacatccttagatataact

SEQ ID NO: 917216 - DNA, 120 bp, Artificial Sequence
  ENSG00000224186_37 (sequence is synthesized)
atgactgcccctgcttgctttcctttaaggcattgttaatggaaatgccagagctcagaaattgagccctgggcctggcttgtatctgaggtggctcagagccaagctgtcctcgcctgg

SEQ ID NO: 917217 - DNA, 120 bp, Artificial Sequence
  ENSG00000224186_38 (sequence is synthesized)
atgggaggctggcccccaccatttagggcagggcaggaggcggtctgtcgatgatgacagggaaggagtgtctggatggacatgcagactgcctgacctgacctacttggctacaggaaa

SEQ ID NO: 917218 - DNA, 120 bp, Artificial Sequence
  ENSG00000224186_39 (sequence is synthesized)
tagtacattccttcttggttcttttaaaaaaatatgattagaaacccaattttagttaatgaaagtggctgttaaagatagtgcctgagtagtatgttaaatctagcctgtaactgtcag

SEQ ID NO: 917219 - DNA, 120 bp, Artificial Sequence
  ENSG00000224186_40 (sequence is synthesized)
attttggtgtctctcattttctcataacagataaggaaggaagcctggctgaccacctaaaatgcagttattttcctgtccccaaagttcacttcaacgaggggaatgggaagggcaatg

SEQ ID NO: 917220 - DNA, 120 bp, Artificial Sequence
  ENSG00000224186_41 (sequence is synthesized)
tcttccataggaccctttccagtctcctcctgagagctgtgtcttccctggggcacactccagggctggctcctgccctcacagctgtgctgtgtggctctccctgcatgcatgcatgcc

SEQ ID NO: 917221 - DNA, 120 bp, Artificial Sequence
  ENSG00000224186_42 (sequence is synthesized)
caagctggatttctccagaggccttgggccgggcagaatctagtgtgtccagctagaaagagccccacaaagataaggacatggatagatactgctggatgtccagatggtcgatagctg

SEQ ID NO: 917222 - DNA, 120 bp, Artificial Sequence
  ENSG00000224186_43 (sequence is synthesized)
agccattccttcatggctttgtcagtttcctaaactgtctcagaagccagtcctcagccatagtggggggaaggggtgaatggtttttctcctcactgatgcttcaacttcaagagctcc

SEQ ID NO: 917223 - DNA, 120 bp, Artificial Sequence
  ENSG00000224186_44 (sequence is synthesized)
ctttctcctcacagttcttccagctcccgggagaagggtatgtggatcaaagggagaaaacccatggtacgttatgcccgccttgaatggcttgcgagctggggttgccatcttgatcat

SEQ ID NO: 917224 - DNA, 120 bp, Artificial Sequence
  ENSG00000224186_45 (sequence is synthesized)
ttgggaggtaaggagactcatcacagcctcagactgccttcctaactccttcaaataatactgactctgacaaggaaacttaaatcatttaccatttaccattaagtcagtgttaccact

SEQ ID NO: 917225 - DNA, 120 bp, Artificial Sequence
  ENSG00000224186_46 (sequence is synthesized)
gacacattagacacattagaaatgttttttctgaaaattttaaaacctctgaaaaaaggctgcaaatcttggctgaacacaaagcaaaagcatttagttgactcagattcacagcactga

SEQ ID NO: 917226 - DNA, 120 bp, Artificial Sequence
  ENSG00000224186_47 (sequence is synthesized)
tttcttttttaaaacaattcaacaatgtgtgtgaacattgggcaaaatcagagagtaatggctatgatgactcctgagacttcagtatgtgaaatacatcattaacatcaatggtcaggc

SEQ ID NO: 917227 - DNA, 120 bp, Artificial Sequence
  ENSG00000224186_48 (sequence is synthesized)
tcctaagcctgggccatgcttcctgagtagcttagcaaccatgccttacagggctgtagcatgcacaatatcacctttctccaccccagcttgcttgcaatcttcaagcactggtttcag

SEQ ID NO: 917228 - DNA, 120 bp, Artificial Sequence
  ENSG00000224186_49 (sequence is synthesized)
tgtcacagatagaaaaatgagattcataggacacagggtaccatatagtcaccattctaaagtaccccttttgaaacatttcctaaaatccaagtcaaaattaatgtctataatatttta

SEQ ID NO: 917229 - DNA, 120 bp, Artificial Sequence
  ENSG00000224186_50 (sequence is synthesized)
aatgtgctttttgtaaaaactgtgtgttagtttcatgatttttgccttttttacactatatgccatgattttcacctgacagtaatagccaataaaaagccagaaagtaatgcttcaaaa

SEQ ID NO: 917230 - DNA, 72 bp, Artificial Sequence
  ENSG00000224186_51 (sequence is synthesized)
aaggtctctctggattcctagcaggtggtctgatgctcgaaggtttcccacagctggatgggagggaattca

SEQ ID NO: 917231 - DNA, 120 bp, Artificial Sequence
  ENSG00000224186_52 (sequence is synthesized)
ggttgcacctctgccttccaagcacctattggctccaattctcttgcttttgtgagattcttcacacacagccacttgcgtcttgaaggttgacccactggaggtgtagcaggctggaat

SEQ ID NO: 917232 - DNA, 120 bp, Artificial Sequence
  ENSG00000224184_0 (sequence is synthesized)
ggaagagaccagagagaccagagaccagagctgatgaagacgctgaggttaagaaacaagtgactgctatgagatcataaagaaaatgcataagtggtggaaacaattagaaaataggtg

SEQ ID NO: 917233 - DNA, 120 bp, Artificial Sequence
  ENSG00000224184_1 (sequence is synthesized)
ttttgattttaagttgcaagtgctctccattccacaaagatattggaaatggcttgaaggagggtccatggagtatcttctctaaattctccacagcactttatacagctccaaatgcat

SEQ ID NO: 917234 - DNA, 120 bp, Artificial Sequence
  ENSG00000224184_2 (sequence is synthesized)
aatgaaacttaaataaatcttactgaattaaaaagaaggaaaaaacatgagaggaagtcatcgagaatggagagagggagagaaatagaaatagagggaagattataaagatgaaaagga

SEQ ID NO: 917235 - DNA, 120 bp, Artificial Sequence
  ENSG00000224184_3 (sequence is synthesized)
caagaagaacagtccatatttataaaatattttagaagaaaaataaaatttccttctacgtgctgtcaggacatgctttttaatttgtggaagtcacacactgcagatgttgccttccgg

SEQ ID NO: 917236 - DNA, 120 bp, Artificial Sequence
  ENSG00000224184_4 (sequence is synthesized)
gttgctggtaggatcaccatgacaaaggcgctgcctcatctataaatagacggtcagattgatttcacatcctgccctggttcttccgactgcttgatgggcgtgacaacacaatcgatg

SEQ ID NO: 917237 - DNA, 120 bp, Artificial Sequence
  ENSG00000224184_5 (sequence is synthesized)
agtgatcccatccactctgcctgcacaggcctcgcctgcactgtcttctggaagatgacaatcaggctcattaaatccagcacaaagaagcttcaaagacgtttgtcctatcagagaaat

SEQ ID NO: 917238 - DNA, 120 bp, Artificial Sequence
  ENSG00000224184_6 (sequence is synthesized)
tgagcctgagtcctttgccattgcatcaaaaggaattgagatttaatcagccatcccgtccaaacctattgctagtaagacagtttggatctttcctttgcctgtttggatcgatgttaa

SEQ ID NO: 917239 - DNA, 120 bp, Artificial Sequence
  ENSG00000224184_7 (sequence is synthesized)
cagctatcctgaagctgccatgctgaaaaggccaattgggagaccacatagagaccgagagagacttccaaggactccagccaatcctgggccccagcagtttgaatctcccagcaatgc

SEQ ID NO: 917240 - DNA, 120 bp, Artificial Sequence
  ENSG00000224184_8 (sequence is synthesized)
caccatacaggagagggagcaaatactcagaagattcaagtgccagctgcatgggttgatacctacataaaaggcattggcattattcacaagagccaagatatggaaataacctgtgtc

SEQ ID NO: 917241 - DNA, 120 bp, Artificial Sequence
  ENSG00000224184_9 (sequence is synthesized)
cattgacagacgaatagatgagggaaacgtggcatatacacacagtggaatattattcggaattaaaaaaagaaggaaatcctgaatcctgctatttctgacaacatgagactgcaggac

SEQ ID NO: 917242 - DNA, 120 bp, Artificial Sequence
  ENSG00000224184_10 (sequence is synthesized)
gttatgaaaatggccacatcatgctcttctagaactttctcatccctcagtcaagaggtggagcctatttacccttgaccttgaaattgatcaggactttgtcactgccttgctcttaac

SEQ ID NO: 917243 - DNA, 120 bp, Artificial Sequence
  ENSG00000224184_11 (sequence is synthesized)
atcaccatgctggagaaatagcatggcaaggccagctggtgatagagaaagatgcctaaggagctccagctgctattttccctggatttttgagtcttcccagtccagccagacatatga

SEQ ID NO: 917244 - DNA, 120 bp, Artificial Sequence
  ENSG00000224184_12 (sequence is synthesized)
ctgggcaaaaccctcaggtaactacagccttatccactgtctgactatcacaaaatgagagaccttgggtgaggaccacctacctgagcccagtcatcctgcagagatgcgagaaaaata

SEQ ID NO: 917245 - DNA, 120 bp, Artificial Sequence
  ENSG00000224184_13 (sequence is synthesized)
agaatgtcattattgttattttaaaatcactgagtttgggttaatttgtatgcagcaatagataactgggacacaaagatagactgtaaaaaaataaagagggaatggttaagctaaaaa

SEQ ID NO: 917246 - DNA, 120 bp, Artificial Sequence
  ENSG00000224184_14 (sequence is synthesized)
actctctcaaggacattctgagggtgataaactcagagcatgtgagatacaggactacaggacaggaaaaaaaggactctgctaaggccatgaagcccaggaactttctccacattctct

SEQ ID NO: 917247 - DNA, 120 bp, Artificial Sequence
  ENSG00000224184_15 (sequence is synthesized)
aatctttacacagtcctaaaggaggctgttgcaattaggatggcgaatggtgaaaaacagtgtggttgaattgaacataagctgaagggctagacatcatggcttcaatccttgtggaga

SEQ ID NO: 917248 - DNA, 120 bp, Artificial Sequence
  ENSG00000224184_16 (sequence is synthesized)
gtacttctcagaagtgaatgtcaacttcctgatgtttatactcaaggagaatgaggtttggagatctgagtagtttactgaaggcactcacattgaaagattttatgaagctgaaattca

SEQ ID NO: 917249 - DNA, 120 bp, Artificial Sequence
  ENSG00000224184_17 (sequence is synthesized)
caacaaaatgaaaatgaaacaagcaaagaaacaaagcatggattataacttgtaagagagaaaaccatattaaggggagttatttgaatattttgtatgaaaatacagaaatcagatata

SEQ ID NO: 917250 - DNA, 120 bp, Artificial Sequence
  ENSG00000224184_18 (sequence is synthesized)
agtgagctgacactgactttggaggcaggaggaaaactgatggggaattctgggaaaacagaatgatacaaagcagaatcctcaatgtccctacccaaaacctaatgaaataaacagaaa

SEQ ID NO: 917251 - DNA, 120 bp, Artificial Sequence
  ENSG00000224184_19 (sequence is synthesized)
cttaatggagtgaactgcctgtgaagcgcagaggcaaggacatgtgctggatgtgtatgcagtctttgaagctggagaggcctgtgttggaaactgtgctctgtcccatgccagttccct

SEQ ID NO: 917252 - DNA, 120 bp, Artificial Sequence
  ENSG00000224184_20 (sequence is synthesized)
tgaaacagacaggatgcaacacctcagggttgttggagaaccagaggctgttgcaattaggatggcgaatggtgaaaaacagtgtggttgaattgaacataagctgaagggctagacatc

SEQ ID NO: 917253 - DNA, 120 bp, Artificial Sequence
  ENSG00000224184_21 (sequence is synthesized)
atggcttcaatccttgtggagaatgacttgtgaattgccacctcctgcaaatcctgtggcctatgatctggaccaaatcacatccaagtgtctgatcagttctgagagtggttgtggatg

SEQ ID NO: 917254 - DNA, 120 bp, Artificial Sequence
  ENSG00000224184_22 (sequence is synthesized)
actcagtgcagagggaaattgacacagccatgatgaggcctggctcacaagagccatagttactgtaggagtttctgtggctaaatatgcttagctattgaggcaaggacatgtgctgga

SEQ ID NO: 917255 - DNA, 120 bp, Artificial Sequence
  ENSG00000224184_23 (sequence is synthesized)
aacttggccaagacttatggcttgatacggatcttctaactcaaaatcgtgtgttcttctcactacccaattattgcttcacacttcatcattttgcagatgactgtgtgttgatgagag

SEQ ID NO: 917256 - DNA, 120 bp, Artificial Sequence
  ENSG00000224184_24 (sequence is synthesized)
gctgccataatttgaagtcattagaacaatgaaatagtatctgcacatatgcacagtcctcggatgcgatgggcattccctcaagctgcagtccagcaggaaattttcagtgctagaaga

SEQ ID NO: 917257 - DNA, 120 bp, Artificial Sequence
  ENSG00000224184_25 (sequence is synthesized)
gttaaactataagctgacttgagatgtagtagttcaaaacccttgccaataactctttattatgtgcagcattttcaaagcaaaattacaacatgttagaaagtgaatgaggcaaattac

SEQ ID NO: 917258 - DNA, 120 bp, Artificial Sequence
  ENSG00000224184_26 (sequence is synthesized)
ctgctaatgacccttttactcctgggcattgcctgaggccacactgacaggaagagcagatctgctttctgtgaatccatttggattatctagaaggcatcctgaaagttatgaaaacat

SEQ ID NO: 917259 - DNA, 120 bp, Artificial Sequence
  ENSG00000224184_27 (sequence is synthesized)
aatgtgagaaaatgatagatcaaagtgtgaatacaatgcagggacaacagaaaggaaaatgtactctctgttgtgtaatgggtattttggccagagtttgaagagctttattaaggagtg

SEQ ID NO: 917260 - DNA, 120 bp, Artificial Sequence
  ENSG00000224184_28 (sequence is synthesized)
acaacaaacatatatttaaatgatgacatttcctccaaaataaaataaacaaataaatatgtagaatttaaaacttttttgtttccatgaaagagtttggaatacccttccaaactctcc

SEQ ID NO: 917261 - DNA, 120 bp, Artificial Sequence
  ENSG00000224184_29 (sequence is synthesized)
tcattcattgagacgatggatctcttgttattaaccgagacactgaattttgaggtgacatcctgttctggaggcagaaacattgccagcacttctccttcagcagttgatttattatgt

SEQ ID NO: 917262 - DNA, 120 bp, Artificial Sequence
  ENSG00000224184_30 (sequence is synthesized)
gacagtcggtgatgagcttatcctcatgaagatgctccctcccacggacagccgtatcatacttgaggcctccctgccacttacccaggccactgcaatagcccctttgttgtcatctgg

SEQ ID NO: 917263 - DNA, 120 bp, Artificial Sequence
  ENSG00000224184_31 (sequence is synthesized)
ttaagaactaaggttcttccttaaccagtccattcccctgacttccacagagaaaccattctataaactgctcatctgtcagctgttcaccagctcaaaaaccattcagaatcccacacc

SEQ ID NO: 917264 - DNA, 120 bp, Artificial Sequence
  ENSG00000224184_32 (sequence is synthesized)
ttctcccactgtccacagaatattgtcagtactccttctaagagaattcaaagcaacatgacatcatcctatatttctagccttacctaataaatattcataccgactacctactgcttt

SEQ ID NO: 917265 - DNA, 120 bp, Artificial Sequence
  ENSG00000224184_33 (sequence is synthesized)
ctatacagggaaacatttcaaggcctccgaggtctgcttggaattctcccatccaccatcatttctgctgcctattaatattccacctataatttattcaccaaatattccttgaatgag

SEQ ID NO: 917266 - DNA, 120 bp, Artificial Sequence
  ENSG00000224184_34 (sequence is synthesized)
tgccaggtgtcagatacctcagttccaaggtcctttcttttgtgaagcttttcttggaagctcccctgtctgagctcacactctaattgggacattatttaattatagtctgtattgaac

SEQ ID NO: 917267 - DNA, 120 bp, Artificial Sequence
  ENSG00000224184_35 (sequence is synthesized)
ggcagagcttgctctttcaattcagagatatcttcaaggacccaattatgctgtggtgcggaatggagcatgtatgtaactgaggttcctgccaaagacatcatctcctggctgaatggc

SEQ ID NO: 917268 - DNA, 120 bp, Artificial Sequence
  ENSG00000224184_36 (sequence is synthesized)
aagactggccaggacaccaggaaactgagactgattggacacacaagaatgtgagctgggtaagcagaatgaaggccctgggcataacttgaacacccgaggaacttgaacccaaggctg

SEQ ID NO: 917269 - DNA, 120 bp, Artificial Sequence
  ENSG00000224184_37 (sequence is synthesized)
gcacaaaagccagaaggtgttactctccaccagctcagggattgtgaagatctctgtgcagactccactctgcggttggacagcatccctgagacatgcattttggaaattgtgatcaac

SEQ ID NO: 917270 - DNA, 120 bp, Artificial Sequence
  ENSG00000224184_38 (sequence is synthesized)
gcggatgataagtgacagtgccggtgcccccagcgcccttttacctgatggctcacccggcctacagctgcgcccttccctttgaatcgtcttgggtaacgggtgctgctttggaaatgc

SEQ ID NO: 917271 - DNA, 120 bp, Artificial Sequence
  ENSG00000224184_39 (sequence is synthesized)
ctggaaggtcatgtcctttgtctggggatggcttccagctgtggttgactgatagcagggggcacagaaggccagacacaacttgcctcaggtgggccgactctgagggtttgttcggcc

SEQ ID NO: 917272 - DNA, 120 bp, Artificial Sequence
  ENSG00000224184_40 (sequence is synthesized)
tccacgtggacttcagctgagcctgcatctttgcttggcttttcccactggcctattctgcttccctctccttaagggttctcccaggagaactcccttaataaatcacttgcacaagga

SEQ ID NO: 917273 - DNA, 120 bp, Artificial Sequence
  ENSG00000224184_41 (sequence is synthesized)
agagcatgtgagatacaggactacaggacaggaaaaaaaggactctgctaaggccatgaagcccaggaactttctccacattctctaatctttacacagtcctaaaggggcatcttgatg

SEQ ID NO: 917274 - DNA, 120 bp, Artificial Sequence
  ENSG00000224184_42 (sequence is synthesized)
caggagcgggaccaagaatttggcttcagaagttcaggttcatatgtcagctctgtttaagcccctctctgtgcaagctcaggaaaatggcttccctaatgaagcctcagttcctaacct

SEQ ID NO: 917275 - DNA, 120 bp, Artificial Sequence
  ENSG00000224184_43 (sequence is synthesized)
ggaaaacagaggatttttaaaaacatcctacttcacagggcttttaagagattggatggaacagtcattgatgacctgtctttccccagaaatcttcagttcagaaagttcaggcatatt

SEQ ID NO: 917276 - DNA, 120 bp, Artificial Sequence
  ENSG00000224184_44 (sequence is synthesized)
aaaagatggagtcaagacagaatggggtcttctgactgaagggtcttccagggccctgcttcagggtccctgttcctgaaacgttagccatacccttggacagagctggaacttgggcac

SEQ ID NO: 917277 - DNA, 120 bp, Artificial Sequence
  ENSG00000224184_45 (sequence is synthesized)
gtaaaatagttgatcagcgcggccccattttgcctcccaagggataataaaagaaaccatcactgctgacatctgcatgggaaggcaaagaatgacatttctgctgcgaagaaatgaacc

SEQ ID NO: 917278 - DNA, 120 bp, Artificial Sequence
  ENSG00000224184_46 (sequence is synthesized)
atcgaatgcatttcaagacagtgtgaggtcaactgtaatagtggtaaaacctgaggcctcacactaagatgtcagtgaagaagaacagatcaccatgaacacagagctttaggtgatgag

SEQ ID NO: 917279 - DNA, 120 bp, Artificial Sequence
  ENSG00000224184_47 (sequence is synthesized)
aatgtttctctctctgagtgaaacttacttggcagaaaaattgcagaactcaggctcagtcttggcaacttcaggggcctccctagttggggcttagtctaactttctctttttcttatg

SEQ ID NO: 917280 - DNA, 120 bp, Artificial Sequence
  ENSG00000224184_48 (sequence is synthesized)
ggggcttagtctaactttctctttttcttatgttaaaactatattatatacatagaacttttcatagatctttgtgttttgtgtgagagattcttcttgagaatatatctatatatttta

SEQ ID NO: 917281 - DNA, 120 bp, Artificial Sequence
  ENSG00000224184_49 (sequence is synthesized)
actcttatttcatccggcctggggaggaggggaaagaggaagtcacctgtgaaattgtctttgcgctttggactcaagcccccaggagccttcatctaccacataagaattgcagcaaac

SEQ ID NO: 917282 - DNA, 120 bp, Artificial Sequence
  ENSG00000224184_50 (sequence is synthesized)
ggggccgtccttcctacccccagccctgtgagtcatcttcattgagttccaagaatccccgcgcagctgtgcagctgtacattgcatgctgacactgaatgagcagtgactggacgctgc

SEQ ID NO: 917283 - DNA, 120 bp, Artificial Sequence
  ENSG00000224184_51 (sequence is synthesized)
cttccatgtgggacacgagccttcaatgcctgataaagcctgaaagccacaatctgccctggaaacccagctccaccctgcttccactacatcaggaggtgaaggaggaaattgaaagtg

SEQ ID NO: 917284 - DNA, 120 bp, Artificial Sequence
  ENSG00000224184_52 (sequence is synthesized)
aatgtggttatcaatgggaaagaagctttctagagcttatatacggggccgagtcatgcacacttcatcatactcaccaggggacgacccagaccatcattcttctctggtctgccacct

SEQ ID NO: 917285 - DNA, 120 bp, Artificial Sequence
  ENSG00000224184_53 (sequence is synthesized)
tcatcctccacttgcagcctcctttgcagtgaccatacaggtgcagagcatgagcaggatgcacaggggtttatgtggtcaggcctgcctggagttggcacatagcatttctgcttccat

SEQ ID NO: 917286 - DNA, 120 bp, Artificial Sequence
  ENSG00000224184_54 (sequence is synthesized)
tcttaggtctgaaatccaggtcacagagccctaacataactacaaaggatcctgaaaagtgttgtattccagtgtgcctcggaaaagaaaataggattaataaactttgattagactaaa

SEQ ID NO: 917287 - DNA, 120 bp, Artificial Sequence
  ENSG00000224184_55 (sequence is synthesized)
acacactcttatttcatccggcctggggaggaggggaaagaggaagtcacctgtgaaattgtctttgcgctttggactcaagcccccagatgcctttggataatttctgcttgctaaaga

SEQ ID NO: 917288 - DNA, 120 bp, Artificial Sequence
  ENSG00000224184_56 (sequence is synthesized)
tgcctgcttatcagaggctcctgggattctgagagtgatcttctacaggaagccgttgagaagggcattgggtcttttgttaccaggcacaatgaaggaatggaaactagggctcagagg

SEQ ID NO: 917289 - DNA, 120 bp, Artificial Sequence
  ENSG00000224184_57 (sequence is synthesized)
ccagaccacccccaaggatgtgacccattccttctgtggagtctgatcttccaaactttagacaacagctccttctgcaagctttcgagcctgcaagctaaggacatgaatgaactgagt

SEQ ID NO: 917290 - DNA, 120 bp, Artificial Sequence
  ENSG00000224184_58 (sequence is synthesized)
catccccacagagcttcattaattttaaggcaatttaagatttctgagtcataggtttcagtcatttagattttcccagctggtactgtacttgcccacacacacttttctttaaagatt

SEQ ID NO: 917291 - DNA, 120 bp, Artificial Sequence
  ENSG00000224184_59 (sequence is synthesized)
gcatctgtctagatgtgtggttctgcccacccttcctcagtttctgagaagaaactcgccctcgtggagtgctacatgcagggctaagccatttccatttgccacgtgcattagagtctt

SEQ ID NO: 917292 - DNA, 120 bp, Artificial Sequence
  ENSG00000224184_60 (sequence is synthesized)
tgcctgagggattaatgggattagcagtctgcagcttgatctagactctatccaccagagacatgcacaattccaaattctatatccaacacaatattttacccagtctcccaagaaaat

SEQ ID NO: 917293 - DNA, 120 bp, Artificial Sequence
  ENSG00000224184_61 (sequence is synthesized)
tcagttatgccatatggtgactccactcactgaataatatttagcaacttgatgaacaaggactgaatcatatcttaaccatcttggccaaatattgttttatatagcaacagtattagt

SEQ ID NO: 917294 - DNA, 120 bp, Artificial Sequence
  ENSG00000224184_62 (sequence is synthesized)
aatatatatgttttattttttacactagtacttcctgctacgcccactgaaaattaagagctagacctcactggaagtagactacacaataaaagagttctcgctcattagcaacctcca

SEQ ID NO: 917295 - DNA, 120 bp, Artificial Sequence
  ENSG00000224184_63 (sequence is synthesized)
acacattctaactctgtctcagagagttggagtaaggttaaaatgggaaaatatgtatgtgtgctaccaaccatcatatagaagaggctgttgcaattaggatggcgaatggtgaaaaac

SEQ ID NO: 917296 - DNA, 120 bp, Artificial Sequence
  ENSG00000224184_64 (sequence is synthesized)
agtgtggttgaattgaacataagctgaagggctagacatcatggcttcaatccttgtggagatgcctttggataatttctgcttgctaaagaggcggggccttagtcctcatcggccgat

SEQ ID NO: 917297 - DNA, 120 bp, Artificial Sequence
  ENSG00000224184_65 (sequence is synthesized)
gaggttaatgaccctgcaggagccaggaagaagcaagagaaatctcagggagctcagaacacaaagcctgatgatgagaaaaaaatgttaagagagcagcacccagctcaaaggtggaga

SEQ ID NO: 917298 - DNA, 120 bp, Artificial Sequence
  ENSG00000224184_66 (sequence is synthesized)
catcgtgacaaaatgaactcaggagcaaatacagggattttgctctcactgtgagcagcatggaggccctcattctgagccctaactccttgagggaaatagagaatcgaataaatctca

SEQ ID NO: 917299 - DNA, 120 bp, Artificial Sequence
  ENSG00000224184_67 (sequence is synthesized)
ccagagcacagcgatcgcacgcgcagcgtgctctacagaaggtgcatccacagatggcgggccagccggctcccaatatagtttttaacataaatgatgaaaataaaaaccctgaagaaa

SEQ ID NO: 917300 - DNA, 120 bp, Artificial Sequence
  ENSG00000224184_68 (sequence is synthesized)
atacaggtctgaaatccaggtcacagagccctaacataactacaaaggatcctgaaaagtgttgtattccagtgtgcctcggaaaagaaaataggattaataaactttgattagactaaa

SEQ ID NO: 917301 - DNA, 120 bp, Artificial Sequence
  ENSG00000224189_0 (sequence is synthesized)
ggaggcggcggctattgttccccgcaggggcccggggcgccctgaaacggggtccacgtcagcccgctcccgagcgtgtcctcagatctggggacccttcacctgcctctactactgcaa

SEQ ID NO: 917302 - DNA, 120 bp, Artificial Sequence
  ENSG00000224189_1 (sequence is synthesized)
tttgcactttccaacttgccaagtttctgaaagaaggaccaaagtaatgccaagaactcccagatgaagaggaccttccttagacctataacagattcactacttgacttcagagggaag

SEQ ID NO: 917303 - DNA, 120 bp, Artificial Sequence
  ENSG00000224189_2 (sequence is synthesized)
tttcagctaattctcaggaaaaggtcaaaacaggcctgtgactgtcccttgaatactgaaggctcttcaggtttcttttgatatctgtggaggcgaatctggaacaaaatggaaaactct

SEQ ID NO: 917304 - DNA, 120 bp, Artificial Sequence
  ENSG00000224189_3 (sequence is synthesized)
gtgccgcgcgcccgccagaccgcccaggaggcggcggctattgttccccgcaggggcccggggcgccctgaaacggggtccacgtcagcccgctcccgagcgtgtcctcaggtctaagga

SEQ ID NO: 917305 - DNA, 120 bp, Artificial Sequence
  ENSG00000224189_4 (sequence is synthesized)
cgggtggggcttcctttgtgtgttctctggaaggggctgggatggcgtcgttgctgccccaaggggtaaccgagggggattgagggaagatggtaccagctccctagagctcagctcacc

SEQ ID NO: 917306 - DNA, 120 bp, Artificial Sequence
  ENSG00000224189_5 (sequence is synthesized)
ggggacggatatggtatttgtagggcagcgctgtgaacaatggagccatcaaaaaggccttctcccagcctcctcaccaaccacggacattcctggcccaacaagacctcctggccaggt

SEQ ID NO: 917307 - DNA, 120 bp, Artificial Sequence
  ENSG00000224189_6 (sequence is synthesized)
agctaattctcaggaaaaggtcaaaacaggcctgtgactgtcccttgaatactgaaggtataaacaagcttctggctcctccaggtcaagcagaggaacacttttattagaatgaagggt

SEQ ID NO: 917308 - DNA, 120 bp, Artificial Sequence
  ENSG00000224189_7 (sequence is synthesized)
aaagcagcccagggccgccgcccagcgcccccgagccccgaggagagccgtcgcgaccgggggctgcctgggcaagggcggggcgagagggcagaacgcctgctctcggacagggtgttc

SEQ ID NO: 917309 - DNA, 120 bp, Artificial Sequence
  ENSG00000224189_8 (sequence is synthesized)
ttgttattcaaacacacacccacacacatcctctgtagtctccctaatgaaaaacctcaacagatggagagcctgagctcccaagtccgcaggctgagaagatgcacttcactcaagggc

SEQ ID NO: 917310 - DNA, 120 bp, Artificial Sequence
  ENSG00000224189_9 (sequence is synthesized)
cagtgggctggtacagactagggaagagaaaagggacaaaggctgctagtataggtaatcactatcttttaatactcctaacacatagaaattcgaaaaatcttgttcagcaatgttagc

SEQ ID NO: 917311 - DNA, 120 bp, Artificial Sequence
  ENSG00000224189_10 (sequence is synthesized)
agcctgtgagcctcggaaactaatttggctgatgtgtctctgatagggagcttggggctgcaccaaggggaaacattctcctcctgtattctctcctctctctcgtttgaaagcctgtac

SEQ ID NO: 917312 - DNA, 120 bp, Artificial Sequence
  ENSG00000224189_11 (sequence is synthesized)
aaagaaatggtacaaatggatggttaacttaatgattccatcagaggcagatttttctctgtcaggtccctggataaggtggaggtctgaaagccaggagacagaatatgtacttaatcg

SEQ ID NO: 917313 - DNA, 120 bp, Artificial Sequence
  ENSG00000224189_12 (sequence is synthesized)
ccctttctgacctgcttaccagtgaccaggactactctccaggcctttcttctgccacttccccattcttcctggctagttcagttgggtctcagcacttcaactcctggctggatcctg

SEQ ID NO: 917314 - DNA, 120 bp, Artificial Sequence
  ENSG00000224189_13 (sequence is synthesized)
agtttttcttggttgcagggaaagctctcactgtctgcatctccttccccacccccacctcccgttttgcagctggccattctggctgcctcacagctatcctgccttaattcatatttg

SEQ ID NO: 917315 - DNA, 120 bp, Artificial Sequence
  ENSG00000224189_14 (sequence is synthesized)
attgcctggacagaaccacctagaatgtccagacgactgccacccctcagccatgggcctgagatcctgccctgacccctttcttcagaccccaggaggacccacaatctccctgatccc

SEQ ID NO: 917316 - DNA, 120 bp, Artificial Sequence
  ENSG00000224189_15 (sequence is synthesized)
caccttccccaaagtagtctctaggaaaaaagcagagctggctaaggcctgagacagagccatttcttccccttgggcaaacgaggtagaccctcccagagaccaatgccggagaggccc

SEQ ID NO: 917317 - DNA, 120 bp, Artificial Sequence
  ENSG00000224189_16 (sequence is synthesized)
ggatccgagctccctttatatggcctcccccatcacggatcccgtgggaaaacctgacacacaatggcgcggctgctccgggcaccctcaacccagcgccctgcggcaaggcctggagca

SEQ ID NO: 917318 - DNA, 120 bp, Artificial Sequence
  ENSG00000224189_17 (sequence is synthesized)
gcctggtggtcttggtgcgctccctttgccctccccgcaaccctctgcgagcactcgtcccaggagagagaccctggctagggtggaggttgcctcccgcaaagggcgctgttgctgggg

SEQ ID NO: 917319 - DNA, 120 bp, Artificial Sequence
  ENSG00000224189_18 (sequence is synthesized)
cctcccctcccccattctcttgtttttctgcttctgagactcgggagggaggcggcaggcgcctccgcagccgatagagcagctattgtgaccttcccttgcagagcgggaacccagccg

SEQ ID NO: 917320 - DNA, 120 bp, Artificial Sequence
  ENSG00000224189_19 (sequence is synthesized)
ttgggcccttcagagggcgtttggttgtgtttagactcggttgctttctaacactaattgcaggctcaaaaggagcggaatttattgcgaaggccaaggcggcttgtttataatttatga

SEQ ID NO: 917321 - DNA, 120 bp, Artificial Sequence
  ENSG00000224189_20 (sequence is synthesized)
agttttaaatggctgtgccgcgggccccaactttctcctgggctggcagccgcgcggaaacgcgccctcccccggctcgccgcccacccccacccacgcccctcagatgagtctcacgcc

SEQ ID NO: 917322 - DNA, 120 bp, Artificial Sequence
  ENSG00000224189_21 (sequence is synthesized)
aatggcaggaacagatccgagctattagaagtctcgggaacctccagagatgacagaaggtggcagatttggtccaagccctcaccccactcgagaggagggcgtcggggaaagctgtgg

SEQ ID NO: 917323 - DNA, 120 bp, Artificial Sequence
  ENSG00000224189_22 (sequence is synthesized)
ctgcctggagagggagcccctgatcccacacttccttggagcctgagtgtgagaggaagctaatgtcagccgggctagacaccgtttaaagtctaatccatgaaaccctaagccgcaaat

SEQ ID NO: 917324 - DNA, 120 bp, Artificial Sequence
  ENSG00000224189_23 (sequence is synthesized)
gacacttggggctttgcagacacccgcagactcagcagatactcctgcggtaacacactgtgctggaaaacgcctggagccatgacacattacgtatttttattattatttatggtagga

SEQ ID NO: 917325 - DNA, 120 bp, Artificial Sequence
  ENSG00000224189_24 (sequence is synthesized)
agaggagatgagggaaaatcgggctgaatctaagcagcctgacaattcagctagttaatatttagccagttaagaaaggtggttgtaatccctgcaaggcagtgagctctcctttgattt

SEQ ID NO: 917326 - DNA, 120 bp, Artificial Sequence
  ENSG00000224189_25 (sequence is synthesized)
ctctaatagcttaaaaaataatttcttacaagacaattagaaattctgcctatggatgcaaatttcatagaaaacaatgttaagccttgaaagtgggtaaaatgtgccttcgattgaagt

SEQ ID NO: 917327 - DNA, 120 bp, Artificial Sequence
  ENSG00000224189_26 (sequence is synthesized)
catttattctgttgatacacttctacaacatatatattttaaacctgctcagataaagtgaaatttagcaaaaggatatcccctcccacccccaaatctaacatgccattttaaaaacag

SEQ ID NO: 917328 - DNA, 120 bp, Artificial Sequence
  ENSG00000224189_27 (sequence is synthesized)
cacaaaggaacaaggaaactaaatattattttgagccatcattacttagtgaaatacaaacatccaaatagaaacgattgttgttccaccagaagattagaagttaaattatttccacac

SEQ ID NO: 917329 - DNA, 120 bp, Artificial Sequence
  ENSG00000224189_28 (sequence is synthesized)
aataggaatttcacttcgtgtcatcggggatgtagtaggagttgcattatttgtcaaaccaaatagagatgcgtgggctgactttgctgaaatacaaaagaattgaaccttatctgaagg

SEQ ID NO: 917330 - DNA, 120 bp, Artificial Sequence
  ENSG00000224189_29 (sequence is synthesized)
cgttttctaagtggcccctcccatagaagccgggaagttgtccacccctagcagaagccacattaatatttacaaaatggttataaatccttgaagacatttttgcccattttgtataag

SEQ ID NO: 917331 - DNA, 120 bp, Artificial Sequence
  ENSG00000224189_30 (sequence is synthesized)
aaacaggagtaaacaaggtgtttatacttgttatgtttcattaatgaaatattattactttacatcttggggaatgtttgttttctttagaaatgaactaatgatcactacaaaggaaga

SEQ ID NO: 917332 - DNA, 120 bp, Artificial Sequence
  ENSG00000224189_31 (sequence is synthesized)
attcatgacagcatttcctagagaaaaagcttaggtacgcgtctccaaatgatggtttctttttctacaccttagctttttcatagctcaattcttcttacaacttctcttgtgtttttt

SEQ ID NO: 917333 - DNA, 120 bp, Artificial Sequence
  ENSG00000224189_32 (sequence is synthesized)
ctttgattgtcagttttctttcaaagtttattttttgttacttaatgcagaaaagtgagctctggtctccccagtgtaaaagtcgattgtgtctagaaagaaggcagtaaaaacagcaaa

SEQ ID NO: 917334 - DNA, 120 bp, Artificial Sequence
  ENSG00000224189_33 (sequence is synthesized)
gcaggcgctgctttcaaaaagccctgcccaaatcatcccgcccagaaccttcttaggtttgcatcctcatttccccctcccctaatttcaatagctggaaagtaatcaagtatcccgaga

SEQ ID NO: 917335 - DNA, 120 bp, Artificial Sequence
  ENSG00000224189_34 (sequence is synthesized)
accaatttatgcactagactccaaataaataaaatatttttttcaaagtgtcagtctgtttcggggccttccatggggattgtgcgagataaaggcatagtgatctgcttgcaagtgtgc

SEQ ID NO: 917336 - DNA, 120 bp, Artificial Sequence
  ENSG00000224189_35 (sequence is synthesized)
atgattaacacagatacagttccgactgggaaatttttttattctaaatatttgttccaatagtaccagacaatttgaaatcaataaactgtggtgaggactgtggtttttgagaaatga

SEQ ID NO: 917337 - DNA, 120 bp, Artificial Sequence
  ENSG00000224189_36 (sequence is synthesized)
ctataggaaccaatcaggacattttgcccaagatctaggacagaaagactcatgcagtaactcctgccttacagatctggggacccttcacctgcctctactactgcaaatgattggata

SEQ ID NO: 917338 - DNA, 120 bp, Artificial Sequence
  ENSG00000224189_37 (sequence is synthesized)
aatgggagcgtgacgcgcggccggtggagactgctcttcgcccacctccaggacagataaagttattcctcttcccctcttctgagtcctctgcgctttcggtttgcttggcgctgatgt

SEQ ID NO: 917339 - DNA, 120 bp, Artificial Sequence
  ENSG00000224189_38 (sequence is synthesized)
tatccctcttctaaacctagagcagatgtttggttttttcctttcttccccctttcctaggactcatggaactacatcttatgctggtgttcttaaaatacaccggaaagaacggaggta

SEQ ID NO: 917340 - DNA, 120 bp, Artificial Sequence
  ENSG00000224189_39 (sequence is synthesized)
tgttccccgcaggggcccggggcgccctgaaacggggtccacgtcagcccgctcccgagcgtgtcctcaggtctaaggacggatctggggacccttcacctgcctctactactgcaaatg

SEQ ID NO: 917341 - DNA, 120 bp, Artificial Sequence
  ENSG00000224189_40 (sequence is synthesized)
agctgacgaaggcgccgtcgccgttgcccagagggaaggcgggctgcagagccacgggccgggcgtcggagcggcagaacttgggtgccaagctgagcacgtcgccgccgaccccgccgc

SEQ ID NO: 917342 - DNA, 120 bp, Artificial Sequence
  ENSG00000248809_0 (sequence is synthesized)
cagctttagaatcagatctgccttctggcggcttcccacctaggagccatgggacctttgtgaagtcaccaattgtgctgtggatgcttcatttgtgaaggagaacaggactgccttgtg

SEQ ID NO: 917343 - DNA, 120 bp, Artificial Sequence
  ENSG00000248809_1 (sequence is synthesized)
ggctgattgtactttaagttttcagtttgagctggagctttgtattataacaggagggtactggacaagaacaacacaataagatagggaccctgtcccagagatgactacattgaagtt

SEQ ID NO: 917344 - DNA, 120 bp, Artificial Sequence
  ENSG00000248809_2 (sequence is synthesized)
cagagagtttaagtaacttgcccaaagtcacatcgctagtgaatagcaaaacgaggattcaagcctaggcctgcctattttcaaagtttatggaaggaattaaaacatttcttagtctaa

SEQ ID NO: 917345 - DNA, 120 bp, Artificial Sequence
  ENSG00000248809_3 (sequence is synthesized)
gggaggccagcacaagagctctgccataaaaggacattggacagaagtgaagagtccaatcagaaactctttttgagagactgaacgcaaagcattcagagagtcagcaggctggagagg

SEQ ID NO: 917346 - DNA, 120 bp, Artificial Sequence
  ENSG00000248809_4 (sequence is synthesized)
ccaagacacacacacgaagaaggcagtgccctgtcatctcctcaaatgttgctcttattcactgaagcaagctgactccccaataccatgtacatactgaacccagaagaggggagaaaa

SEQ ID NO: 917347 - DNA, 120 bp, Artificial Sequence
  ENSG00000248809_5 (sequence is synthesized)
gaaggaaggattgtgcataggagttccttttgaagaagtgacatggagggacactcttctcctcctgcggttggactccaggctctatgaccttcaaactccaggacttacaccagttgc

SEQ ID NO: 917348 - DNA, 120 bp, Artificial Sequence
  ENSG00000248809_6 (sequence is synthesized)
ccctgggcactcaggacttctgcttcagactgacagttgcaggacagtgcagcattttattttaaagataccccacaacgtaggtggccagtcctgctgcagattgagagctgtactagc

SEQ ID NO: 917349 - DNA, 120 bp, Artificial Sequence
  ENSG00000248809_7 (sequence is synthesized)
cacccgatcatgaccatggatctacgtgctggaacttgaaagtatgtccacgctcaagatttctgtctcttctaaagcaagaaaggactggttttgcatgccctgcctatgcacatcttt

SEQ ID NO: 917350 - DNA, 120 bp, Artificial Sequence
  ENSG00000248809_8 (sequence is synthesized)
tgatgaaaccagctgttgaaatacttcaattgggttgcagttgcttctcctgtgagctgcatggccatctcttcttttgtttcaaaaacttggctggcactttcagcagccactgtgaag

SEQ ID NO: 917351 - DNA, 120 bp, Artificial Sequence
  ENSG00000248809_9 (sequence is synthesized)
cttggctggcactttcagcagccactgtgaagttgacaaagtcttgctctgtcacccaagctggaacacagtagcatgatcacagctcacttcagccttgacctcccaggctcaagcaat

SEQ ID NO: 917352 - DNA, 120 bp, Artificial Sequence
  ENSG00000248809_10 (sequence is synthesized)
cacaggttccttctacgtgtggggcttctccactgccaggttcctgcagcaagtagcagtcaccagcacccagtggccagcagcttcctccaccacctcctgcttgacactggagtaaat

SEQ ID NO: 917353 - DNA, 120 bp, Artificial Sequence
  ENSG00000248809_11 (sequence is synthesized)
tccaaaacatggcaccaccctgtgaatagcttccttgacacccaagaaggtcaattagactgcggttgcatggatgccatctggattttccagaaggatccagagaaaacgtagctggat

SEQ ID NO: 917354 - DNA, 120 bp, Artificial Sequence
  ENSG00000248809_12 (sequence is synthesized)
accagacatcctgctaagaagaaatgccttaggggctgggcccagcaaagtgtctaccgggagtagttgacaagcccagttggagagagattctaaatcattaattttaagccactggaa

SEQ ID NO: 917355 - DNA, 120 bp, Artificial Sequence
  ENSG00000248809_13 (sequence is synthesized)
attaaaaggtcaaaactgggcaagtggcaacaaagagactttcaacctgaaaactggtcatcatttcaaaagccccatttggaagcaaaccctgggattatcaaggagagagccaagcag

SEQ ID NO: 917356 - DNA, 120 bp, Artificial Sequence
  ENSG00000248809_14 (sequence is synthesized)
gatgagctgcaatggtggtggagacagagggtggatgtcttgacttaaaaacatagagctacataaacaccccttggtcttctgcttaccaataaagaaatagagaacgaccttgcttaa

SEQ ID NO: 917357 - DNA, 120 bp, Artificial Sequence
  ENSG00000248809_15 (sequence is synthesized)
tttcaagcctttggagtttgaccttctagtccaaggtcattacagctgcaggcagaggctcccgcggggaaaagagcatttcctgggacgctggaactaaatgaatggcccactctccag

SEQ ID NO: 917358 - DNA, 120 bp, Artificial Sequence
  ENSG00000248809_16 (sequence is synthesized)
ttcagcccttgcctccttcccgacacataaagttcaagagccacggtcctgagtgcataggaacagccccatcacccttctccctctgggcaagctaggagcagcggtgcgaggctccat

SEQ ID NO: 917359 - DNA, 120 bp, Artificial Sequence
  ENSG00000248809_17 (sequence is synthesized)
aagtccaagagcaaaaccaggcaggctggctccagagctcacgatagtccaccactgctttccaccatcactacggaatcaagtccatgaggatactcaccttatgtcagttgcctaagt

SEQ ID NO: 917360 - DNA, 120 bp, Artificial Sequence
  ENSG00000248809_18 (sequence is synthesized)
tggaaattatagaatcttcaaattggaagggacgttatcatccaagatttcaactttctactcactgcaaaatcccttctggaacttcccagattgatgaattttcatcagctctgcttg

SEQ ID NO: 917361 - DNA, 120 bp, Artificial Sequence
  ENSG00000248809_19 (sequence is synthesized)
agtactcccagtgacttggaaaaaaaacactgtaatatggatatgaaatataaactgttcatggataaattattgcataataaaaacatgcctaatggctacactcccctaatatgttca

SEQ ID NO: 917362 - DNA, 120 bp, Artificial Sequence
  ENSG00000248809_20 (sequence is synthesized)
cagttattaagtggcaaagaccggatttgaatcaagatatctgatttttaaaattcaccttgtttcaaagcattttacttcacctaagaagttaatacacctcacaaccagataactcct

SEQ ID NO: 917363 - DNA, 120 bp, Artificial Sequence
  ENSG00000248809_21 (sequence is synthesized)
gcctcctggacctcagccacctctgctcaggcacaggccagctgcccaggcgtcctcatctggcgaccagctctgaccgcagccctggtctgctctcggggtcgggcccacacccctctt

SEQ ID NO: 917364 - DNA, 120 bp, Artificial Sequence
  ENSG00000248809_22 (sequence is synthesized)
cttcctcctcttcctcccaaggcctgggctcgggtccctcttctcacctttccctttcttgcgttgcaaccgtaacttgggaaaacccttcttgatcttcctctctcacctcctttcaaa

SEQ ID NO: 917365 - DNA, 120 bp, Artificial Sequence
  ENSG00000248809_23 (sequence is synthesized)
agggcagatacgctcccttgattctgaggtctttgaacttgctgtgaagccacactacctgcgtcccagggtctccagcttgcagatggactgtggtgggacttctcagtcaccaagatt

SEQ ID NO: 917366 - DNA, 120 bp, Artificial Sequence
  ENSG00000248809_24 (sequence is synthesized)
acagacctatcattagatggaatgtaatggactttggccagttgttctccaccccagctctgacttagcggctctggcaagaatggatatatgagcctaaatacagagcttgttgtgcta

SEQ ID NO: 917367 - DNA, 120 bp, Artificial Sequence
  ENSG00000248802_0 (sequence is synthesized)
tcaaggcttcagaccctgaactaaatactggagtgtcgagatcaagaaggcatgattcccgcccttaggagtgcaccatcaaaggaggtgaggagtgcatctcctcacaggaggagacag

SEQ ID NO: 917368 - DNA, 120 bp, Artificial Sequence
  ENSG00000248802_1 (sequence is synthesized)
gatgggaaatggctgacagcaggataaacaagcagctccctttttggtgagcttcaggggaatcaggtggacagaatcaaggcttcagccctaaagatgagaatttaagctggatctcct

SEQ ID NO: 917369 - DNA, 88 bp, Artificial Sequence
  ENSG00000248802_2 (sequence is synthesized)
ggcttcagccctaaagatgagaatttaagctggatctcctagaggagttgggatcaagtctatgtacttggagaatacaagagaagga

SEQ ID NO: 917370 - DNA, 120 bp, Artificial Sequence
  ENSG00000236999_0 (sequence is synthesized)
ctgcaaatccctcccactcaccaaactgctgccgcctgcaattccacaatgagcactttagtcatcaaatcataaaatgtcagcttgtaattagccttggaacctgtctagttcaatttc

SEQ ID NO: 917371 - DNA, 120 bp, Artificial Sequence
  ENSG00000236999_1 (sequence is synthesized)
tctgcagcttcttcaatgggaagttggggcatcatatgcctttttgaaattatgtgtattggtaggttatatgatgtgtgaattttcttggaagataaagaaaaaaagtaaaatgatgtt

SEQ ID NO: 917372 - DNA, 120 bp, Artificial Sequence
  ENSG00000236999_2 (sequence is synthesized)
ggatccaatgggaccaagagccaccagcacagtggatagaaacaaaggccctgtactgaatcctgccctgcctcctaattagctaggaccttgcatatgagcatgaacatcagctcttac

SEQ ID NO: 917373 - DNA, 120 bp, Artificial Sequence
  ENSG00000230852_0 (sequence is synthesized)
acagacgccagatttgttttccagaagcaatcctaggcgatctggtacacatgactaaatctctccttacaggattcttcccctatcaatttcatcactttactttgcaggagaaccatc

SEQ ID NO: 917374 - DNA, 120 bp, Artificial Sequence
  ENSG00000230852_1 (sequence is synthesized)
attacaaggagattagagaaggtcactgatttttttttttccctcaggcgggcacggggattctctgccttcttaaaggggagcgtgtgctgtagacctgctgcttaatcgtgtccttcc

SEQ ID NO: 917375 - DNA, 120 bp, Artificial Sequence
  ENSG00000230852_2 (sequence is synthesized)
cggagataaagcagttgctcacctgaaaagccttggaagataaaaaaaccaaggcacagaacaagttagtggcagaacagagattccaatgaagacctctttgactctgatcctgtgttc

SEQ ID NO: 917376 - DNA, 120 bp, Artificial Sequence
  ENSG00000230852_3 (sequence is synthesized)
tcactgcctcttgtactgcctctccgaaactcaggatatgttgtccactccagaagtatgaggtgggactgcaggaatatgagctcctctccacatgcagggaccccaggtgcttatcca

SEQ ID NO: 917377 - DNA, 120 bp, Artificial Sequence
  ENSG00000230852_4 (sequence is synthesized)
gcctgttcgagatcatagccaccaagggggaactctctggacaacctggcagaagttcccctcactcagctgaaacctgcctccacctgaggccacagagcaagtctccctgggcttctg

SEQ ID NO: 917378 - DNA, 120 bp, Artificial Sequence
  ENSG00000230852_5 (sequence is synthesized)
ggtcttcagacatttggagacagttattatctctccctgccctcagatttaccatgtccaggctaaatggatgatttctcacttataaatgtaaggcatttaataattacatttcttgat

SEQ ID NO: 917379 - DNA, 120 bp, Artificial Sequence
  ENSG00000230852_6 (sequence is synthesized)
aataaaataaggaaaaatttagggtttttaaacaaaaaattgcattggtatatgtctgctgttacccacaggaggcccttgtttgcaaagctagatattgctggacccacctattggtag

SEQ ID NO: 917380 - DNA, 120 bp, Artificial Sequence
  ENSG00000230852_7 (sequence is synthesized)
acatctgaaaaatttctgcaaatgtgaaataaatattaaggtccagagagaataactgtattttgtaatatctgtaatatagctgtgtattttatcatatctgcctttatataatataat

SEQ ID NO: 917381 - DNA, 120 bp, Artificial Sequence
  ENSG00000230852_8 (sequence is synthesized)
gataaatataaatatcattgcagcaatagttatagtagaaaaaaatctggagtccacctaagtgtctattaataatgagatagttaaataaattatggtgtctactcagccattaacagt

SEQ ID NO: 917382 - DNA, 120 bp, Artificial Sequence
  ENSG00000230852_9 (sequence is synthesized)
ctgaggtgggaggatcacttgaacccaagaatttaaggtcaacttaggtaatgtagcaagaacaccctctcaaaaaggagtcgatgcttataaagttatataataatatagaaaatgcct

SEQ ID NO: 917383 - DNA, 120 bp, Artificial Sequence
  ENSG00000230852_10 (sequence is synthesized)
tcgatgcttataaagttatataataatatagaaaatgcctacaatataatggaattatgtgggaaaatcaatatactcatttaaaggtaccatatgatatggtttggctctgtgtcccca

SEQ ID NO: 917384 - DNA, 120 bp, Artificial Sequence
  ENSG00000230852_11 (sequence is synthesized)
aatttcatgttgaattgtaattaccagtgggaggtgggaggtgattgaatcataggggtgaatttcccccttgactttcttgcgatagagttctcacaagatctggttgtttgaaagtat

SEQ ID NO: 917385 - DNA, 120 bp, Artificial Sequence
  ENSG00000230852_12 (sequence is synthesized)
ctcacaagatctggttgtttgaaagtatgtagcaccccaccccttctctctctctctcctgctggccatatgaagatgtgcttacttccttttcaccttctaccatgattgtaagtttcc

SEQ ID NO: 917386 - DNA, 120 bp, Artificial Sequence
  ENSG00000230852_13 (sequence is synthesized)
acagaccacagaaccatgagctgattaaacctcttttctttacacattacccagtctcaggtatgtctttacagcagtttaagaatggactaatacaccatatggttgctatgtaaacag

SEQ ID NO: 917387 - DNA, 120 bp, Artificial Sequence
  ENSG00000230852_14 (sequence is synthesized)
ccatgttttacaacagtcttaaagtaaatgcaatatgttaagtaaaataagcctgatatagaaagacaaatatctcattctctcactcatatataggagctaaaaaaaaaattgaactca

SEQ ID NO: 917388 - DNA, 120 bp, Artificial Sequence
  ENSG00000230852_15 (sequence is synthesized)
tggagatagaaagcagaatgatgattaccagacactgggaagggtagtagggagagaggataaagaggagttggttaatgggcacaaaaatacagttagattaaaaaaaaaaaaataaga

SEQ ID NO: 917389 - DNA, 120 bp, Artificial Sequence
  ENSG00000230852_16 (sequence is synthesized)
tctagtgctcagtaacccaatagggcaactatagtttacaatagcttattgtatatttcaaaataactaaaaagtagaattagaatattcctaacacaaagaaatgttaaatgctttagg

SEQ ID NO: 917390 - DNA, 120 bp, Artificial Sequence
  ENSG00000230852_17 (sequence is synthesized)
tgatggatatcccaattaccctgtttgatcattacatattgacacactggtaccaaatatcacatgtaccccataaatatttacaactattatgtatccataaaaattaaaaataaaaaa

SEQ ID NO: 917391 - DNA, 120 bp, Artificial Sequence
  ENSG00000230852_18 (sequence is synthesized)
atttaaaaataaaagtacaaaatgctatcattggtggttttacagtagtgaagttatagatgactttttcttctattttgttttccaaaaagtgctgatattacctttaaaataataaaa

SEQ ID NO: 917392 - DNA, 120 bp, Artificial Sequence
  ENSG00000227213_0 (sequence is synthesized)
acccagaagttgccatactgccctggatgggacgcaagctctgaagcagtgactaatttggagaggctggcccacagcagaagatgcagggccggaaaccaaggaaggcaagggtccctg

SEQ ID NO: 917393 - DNA, 120 bp, Artificial Sequence
  ENSG00000227213_1 (sequence is synthesized)
tgaatcttccatcctgggacctgaacccctggcgctcactggatacccagataaagtgctcactggatacctcactagctcctgggacagtgccatggccagtctcccatcacacacctt

SEQ ID NO: 917394 - DNA, 120 bp, Artificial Sequence
  ENSG00000227213_2 (sequence is synthesized)
ccggtggctcctccactcccaggagtgagcctggatgccatcccttccctagcctggttccccagccatcccatcaattctgggcacacctggcccccttccaataaattccctttttgc

SEQ ID NO: 917395 - DNA, 120 bp, Artificial Sequence
  ENSG00000260664_0 (sequence is synthesized)
ggacgcaaagcatcaacgaaatattatggatgtcttcaagaaagggggagagaaaatcctgactgaaggaatgtccacataaattatttttatttaaatgaattcaaaggatgggatgag

SEQ ID NO: 917396 - DNA, 120 bp, Artificial Sequence
  ENSG00000260664_1 (sequence is synthesized)
ggcaagtcagacggagtcgcgtggaaaacatgaataatattaatatgcataaagaattctcaccaacgaggagaagctcctcactacagctcttgggacaaacaggttcattaggaaaca

SEQ ID NO: 917397 - DNA, 120 bp, Artificial Sequence
  ENSG00000260664_2 (sequence is synthesized)
gctcagagcgactacagcattttgctatttcaattttttcccttattttaaatgaagagtcagacagatgtgttttctttgcatggcagcattgagatggatccaatctgcgaaatttgc

SEQ ID NO: 917398 - DNA, 120 bp, Artificial Sequence
  ENSG00000260664_3 (sequence is synthesized)
tgcccaaatagcatttctaatggaaactggaactaaacaagggcacggatatgggagggaggggagaagagagaatacacgaagaagagtatattcagagccactgcatggcattttgag

SEQ ID NO: 917399 - DNA, 120 bp, Artificial Sequence
  ENSG00000260664_4 (sequence is synthesized)
tacaggaggttttcaggaacgatctttgcttcattagtctcccctgtgggctcctgatgtagggagctatcagggtataccaagatgagcactgagacaggcctttctaggtctgaggct

SEQ ID NO: 917400 - DNA, 120 bp, Artificial Sequence
  ENSG00000260664_5 (sequence is synthesized)
gaggaaagcagcggcaacttggtgcctgtcccccagagctgtctacagttcagaagccaaaagcacagctacttctaatttggggatgcagtagagtgcctactgatccaggtggacaaa

SEQ ID NO: 917401 - DNA, 120 bp, Artificial Sequence
  ENSG00000260664_6 (sequence is synthesized)
ctcagacccctgcccttccttcaacattggcatctaaagaatctctccagcgtttggaggaaatcaagttggaagttaagcaagaagcaacacaaaaaactgagtaactacaaagaagta

SEQ ID NO: 917402 - DNA, 120 bp, Artificial Sequence
  ENSG00000260664_7 (sequence is synthesized)
aaaagtaaaaactctgcaagttgaattgttagctggcaggctaccatgtgatattggctcagaattgtcttgtgttagtaaagatacaaacatttgaattctatttatgaactttgaatt

SEQ ID NO: 917403 - DNA, 120 bp, Artificial Sequence
  ENSG00000260664_8 (sequence is synthesized)
ctgcttctgtaattagacttttttttttttttttggacagagtctcactctgtcgcttaggctggactgcagcggaatgatctcagctcactgcaaactccgtctcccgggttcaaatga

SEQ ID NO: 917404 - DNA, 72 bp, Artificial Sequence
  ENSG00000260664_9 (sequence is synthesized)
ttctcctgcctcagcctccccagtagctgtagctgggattacaggtgtggatcaccacgcgcagctgaattt

SEQ ID NO: 917405 - DNA, 88 bp, Artificial Sequence
  ENSG00000260664_10 (sequence is synthesized)
ggctggtctcaaacttctgacctcaaatcatccacttgccttcgctgtgtgcccagcctgcatgttttttgtttgtttgtttgtttgt

SEQ ID NO: 917406 - DNA, 120 bp, Artificial Sequence
  ENSG00000260664_11 (sequence is synthesized)
acagtgcggtaaagccaagggagattatccagacccccaggagcgaacagcaagcagcaaccgaaggcgcaagtgccaggattacagcctaggctgctccaactatgagcccttcctcgg

SEQ ID NO: 917407 - DNA, 120 bp, Artificial Sequence
  ENSG00000260664_12 (sequence is synthesized)
accctgggactcggctacttggggtttgggggtcttccacaccacagaggcacaaagctgactttaatcactttttttcctttaaacttgattctgccgcagtggagccagcacagcgga

SEQ ID NO: 917408 - DNA, 120 bp, Artificial Sequence
  ENSG00000260664_13 (sequence is synthesized)
tgttttcacacccagcaagacaaaggccgtcgtctccgccatgacactgttccgttccaagcagaggccgggattctggactcctcgaaaaatcaaaaagaaacaaggaaaacaaacaac

SEQ ID NO: 917409 - DNA, 120 bp, Artificial Sequence
  ENSG00000260664_14 (sequence is synthesized)
aaatacagcaacaaacagaaaaaactgaaaaccaccaaaatcgtttgcccgtttgcccgtgccaggggtgatctgggcatctgttgcagcagaaggcgcttgtgtggggctaatttttct

SEQ ID NO: 917410 - DNA, 120 bp, Artificial Sequence
  ENSG00000260664_15 (sequence is synthesized)
tttggtgggggggacaagctgttggcttgtttgctatttcaacttcgtttataattaacttaaaaaaaaccccaccattcagcctagtcaacaacaaacaaagaaaaagcagacatcgga

SEQ ID NO: 917411 - DNA, 120 bp, Artificial Sequence
  ENSG00000260664_16 (sequence is synthesized)
agagaaatgccataggaagcggcatgaatacatgccacagccggtgccacttgccactcggaaaacctcagggaaagatgccaattctacagctgcgaagaaggcagagaaaggaggata

SEQ ID NO: 917412 - DNA, 120 bp, Artificial Sequence
  ENSG00000260664_17 (sequence is synthesized)
aaggtctacaactagaaatcataaggaaagaatactgcttgtataatcctggattgcaattgcacacagcctctgctgggagaagagagggaatatttaaatggagatatagatgggtat

SEQ ID NO: 917413 - DNA, 120 bp, Artificial Sequence
  ENSG00000260664_18 (sequence is synthesized)
aaattaaaagataggcacctatcgattgcgtataaacacatgtgtaaggttgtatgtgtatataaatatgcatattttcagacaaacgtttagatatgtatatattttgtgctacaggta

SEQ ID NO: 917414 - DNA, 120 bp, Artificial Sequence
  ENSG00000260664_19 (sequence is synthesized)
tgggtatgtatataggtgtatatgtttatgcatatacacacatatgtaggatgtatgcatgtgtgagaaaaaggagggagagagaggagagagaaggaaatatgtgtatgtgcatgtatg

SEQ ID NO: 917415 - DNA, 120 bp, Artificial Sequence
  ENSG00000260664_20 (sequence is synthesized)
tgtatgcatacatcccactttttgacccaggtatacacagaagacaaaataaaaatcatactccagcagcaagcaggcagccagagatttatctacattcactgctatcaccagggagat

SEQ ID NO: 917416 - DNA, 120 bp, Artificial Sequence
  ENSG00000260664_21 (sequence is synthesized)
gaatggggccgatctgaagcccttttacaagatccactatgggagtgaaggaggaggagggatgccacacagacatgcacaaacttgaaggcagagcgatttggaaggggctactgagga

SEQ ID NO: 917417 - DNA, 120 bp, Artificial Sequence
  ENSG00000260664_22 (sequence is synthesized)
aacactggtggcataacgcaggggagaagaaggggaaagaggcttgtctctctctctctatgttttaggtggttgtttttaaaaaatctgcaaaagggtttcagggaacggctggtactt

SEQ ID NO: 917418 - DNA, 120 bp, Artificial Sequence
  ENSG00000260664_23 (sequence is synthesized)
acgttgtctgcgttgctgtggatcctgaaaggtgttctgttggcaccgggcgctgagccaggggcaggcgctggaaacaaaagggagagacaaaaaaataaagtgattcaatgggaatat

SEQ ID NO: 917419 - DNA, 120 bp, Artificial Sequence
  ENSG00000260664_24 (sequence is synthesized)
taattgctgctcttgtggattttacaaaacacataaactgttttctttttctttcttaaaaaaaaatgtggattggcgcgtgtcccttttgcatggaatatacaagtagtatgggattta

SEQ ID NO: 917420 - DNA, 120 bp, Artificial Sequence
  ENSG00000260664_25 (sequence is synthesized)
cagcccagttacgggactcaggattagctgcgctggcatcttttgggcatattcttccttttaatgaatgagctttcgctgttaatgaggaataatcgtttggctaatgagctttgaaac

SEQ ID NO: 917421 - DNA, 120 bp, Artificial Sequence
  ENSG00000260664_26 (sequence is synthesized)
attaagagaaaagaggttttttccgttaatcgctctggtgcgactgcatggatggattacaaaagacagcaataggaacgcagtacaaagggggggacctctcctgcagtgggagaagca

SEQ ID NO: 917422 - DNA, 120 bp, Artificial Sequence
  ENSG00000260664_27 (sequence is synthesized)
ccgagatgggtgatgtgtccctgcgtctttccttccttctctctttcgctctctctgccaactgctatgggtttccataactctgcaatcaaagtggatggtcgggaaggattattacac

SEQ ID NO: 917423 - DNA, 120 bp, Artificial Sequence
  ENSG00000260664_28 (sequence is synthesized)
agaagtacaaagttggggagagagggaagaaaaaaaggtccctatgatgcttatcttcaaacggggacttgttccatgatctgtcttctacttttgctaaaatcattatgacttggaaac

SEQ ID NO: 917424 - DNA, 120 bp, Artificial Sequence
  ENSG00000260664_29 (sequence is synthesized)
ctttgaagttggatacaaccttggattcttctaattcctgcagagcagtgtattttacaaaacagcagaaatgttcctgcactagacaattaaaggaatataaactccagtgggctgaaa

SEQ ID NO: 917425 - DNA, 120 bp, Artificial Sequence
  ENSG00000260664_30 (sequence is synthesized)
ctagtagctctttggggaatgcagtagcagaggcttctacaaataccaacacttaaaaatatataataaacagcatcatattagaaacaaagaaaacgaagacaagaaatattaacacgt

SEQ ID NO: 917426 - DNA, 120 bp, Artificial Sequence
  ENSG00000260664_31 (sequence is synthesized)
ggattatatttgtttcttttggggggtaatgaactaaagagaatgaagaagccatcggtaatttatcccttcattaatgaacagtcacctttttgtatgtgtttgtttttgtcctttctt

SEQ ID NO: 917427 - DNA, 120 bp, Artificial Sequence
  ENSG00000260664_32 (sequence is synthesized)
tttgaagagggatgttgttacttttgaagcaattagtcaattattttgtagctctgatcttttccccctgcacccgacaggacagaaaggtggtggttagggaatatgtgagtacttggg

SEQ ID NO: 917428 - DNA, 120 bp, Artificial Sequence
  ENSG00000260664_33 (sequence is synthesized)
gagggggggacttggtggggagagaaagaatacagtgagttctttgtagatcttatacatgcacaacatattaattgggggcttttaaagctccctcaatgggctatttcattcctggta

SEQ ID NO: 917429 - DNA, 120 bp, Artificial Sequence
  ENSG00000260664_34 (sequence is synthesized)
aaacagcagctggttagccactactggtgactcttcaaatattacttcatttttattctgtcgccgttgttgttgtcttgctttgtttttcctcagttaagaatgaaaatgtagtatcac

SEQ ID NO: 917430 - DNA, 120 bp, Artificial Sequence
  ENSG00000260664_35 (sequence is synthesized)
cccctctttagtgagtctcttctccatcttcttcactccaatttccaaactgtaaaacaatgttggcttaatactgagtcctggtgcacagtctaactggcacaacttgatttggaaatg

SEQ ID NO: 917431 - DNA, 120 bp, Artificial Sequence
  ENSG00000260664_36 (sequence is synthesized)
agatgctgctttatatttaaattaccccggctccccccttatcctccaaagctttgtctctgttatgaatatgcagatgaggcctgatgtgattacactgtacaattactcctatccatg

SEQ ID NO: 917432 - DNA, 120 bp, Artificial Sequence
  ENSG00000260664_37 (sequence is synthesized)
gtggtgtcaggggctgctagggagacagagagtcagacagcctccaagccaatacagagttttgttttcggtatttttcctatctccttggcactgcggcacatgcagatgtcgctgttg

SEQ ID NO: 917433 - DNA, 120 bp, Artificial Sequence
  ENSG00000260664_38 (sequence is synthesized)
gataatatttatgttggttaattctcatgataatgataactgcacttgtctagtattttcagaatgttaaaattaccagtgtggcttaatgcatgtttacaataaatagagagggacaaa

SEQ ID NO: 917434 - DNA, 120 bp, Artificial Sequence
  ENSG00000260661_0 (sequence is synthesized)
tgacttcatgaggcctgaggcaatgacaaagagcccccagggtcttggtctgtcacccagcctggagtgcagtggtgggttcacagctcactgcagcctcaacctatgggctcgcgcgat

SEQ ID NO: 917435 - DNA, 120 bp, Artificial Sequence
  ENSG00000260661_1 (sequence is synthesized)
ggactacaggcatgcaccaccacacctgggctgtctggtcctctgggcaggaacttgtggatgaagcaggtgttaatagggttccatcactggggcactgggaacccaccctgtgctgag

SEQ ID NO: 917436 - DNA, 120 bp, Artificial Sequence
  ENSG00000260661_2 (sequence is synthesized)
gggcactgggaacccaccctgtgctgaggaagctatcatatgtcactaggaacaaagtgagcaaggtgctaagatctcccttcatatcctgttgggaaattgcttcctatgagaagaaga

SEQ ID NO: 917437 - DNA, 120 bp, Artificial Sequence
  ENSG00000260661_3 (sequence is synthesized)
atccttcttggcttgagtcatgaagaaacggggagggctccgtgtgaacactattgaaagctctggacaacgctgggagggagtcttagttctaaaggtactagctgggtgaccttgaga

SEQ ID NO: 917438 - DNA, 120 bp, Artificial Sequence
  ENSG00000260661_4 (sequence is synthesized)
acactgcctaatttctctcggagcccagcgtggggcctaagaggggctgggcatcagctttcaacctcgcttccagatgttctgagcactgttgttgggatggtcctgtttggcatgaca

SEQ ID NO: 917439 - DNA, 120 bp, Artificial Sequence
  ENSG00000260661_5 (sequence is synthesized)
aaaactgtgtcttggacctctcaatatgcacaatgcatagcatgcgcttccagcacagcgtggagttacaagcctaggtcatttaggccatctgtggctgattaatttagagggaatcaa

SEQ ID NO: 917440 - DNA, 120 bp, Artificial Sequence
  ENSG00000260661_6 (sequence is synthesized)
atatttccagcaaagctccaagagctgtttatcaagctgagatctggaagtgattaagaatttcaacaaactttccatgtttggtagtcaccactagtcagcgtctagaggctgggtttt

SEQ ID NO: 917441 - DNA, 120 bp, Artificial Sequence
  ENSG00000260661_7 (sequence is synthesized)
tgcagaggagtcgtggggcaagctaataagagactagtcatttttcatgcttctccaatgcctttagtgtatgaatatcacaatataacttcacgaaaacgtctaataatgaaaaataaa

SEQ ID NO: 917442 - DNA, 120 bp, Artificial Sequence
  ENSG00000260661_8 (sequence is synthesized)
ctactcataaggcagccacctaaaacctatacatgagatctgatgggttttgtccaaatgcatattataatcatcttctctaaatagttttaaattcaatagttcatttcataaacactt

SEQ ID NO: 917443 - DNA, 120 bp, Artificial Sequence
  ENSG00000260661_9 (sequence is synthesized)
tcacattcttaagaattttcattattccatggagctgcagtgccataatttaactcactattccaattcaggtttttctgctattatagttaacgttgtaataaaaatttgtctgcattg

SEQ ID NO: 917444 - DNA, 120 bp, Artificial Sequence
  ENSG00000265254_0 (sequence is synthesized)
gggcacaaaggatgcgacccagcacgaagtagccgacgtggagctgcagctgcaccacaaaaacggacactagggcctggagcagcaggcccagcgaggccagcactagcagcgggcggc

SEQ ID NO: 917445 - DNA, 120 bp, Artificial Sequence
  ENSG00000265254_1 (sequence is synthesized)
ggcccacactgtcgctccaagctcccagcagggtggacgagaagagccccaccaggaagccgcccacgttcatgtagagggtccagtgggaggctagccaatattaaccatcgctatcta

SEQ ID NO: 917446 - DNA, 120 bp, Artificial Sequence
  ENSG00000265254_2 (sequence is synthesized)
gaggtcatcgggtactcaaggcagagctggaagagcacatgactcctgatgctgctgatgttctgcgctgtaacagagaggcagctggagaggatcggagtgggctgagcccagctgcct

SEQ ID NO: 917447 - DNA, 120 bp, Artificial Sequence
  ENSG00000265254_3 (sequence is synthesized)
gggttggagcacctaggctctgccactaccttcggcatgccacttaccaccctgagcctctgttttttcatctgtaaaatggagttgctaacaaaacatgtctcaaaaagttgtggaaaa

SEQ ID NO: 917448 - DNA, 120 bp, Artificial Sequence
  ENSG00000260599_0 (sequence is synthesized)
cttgtctggctctcgaatccttgcttaacttgacctctttcatgtctatgcccgcgtccacgtcctctcacattgttaatttctctttttataagagctgttgccaacagattggccttt

SEQ ID NO: 917449 - DNA, 120 bp, Artificial Sequence
  ENSG00000260599_1 (sequence is synthesized)
ttcttaagcctttaatttacatttttctttttctttttgagttctcctgctcctgcggctggctggtggggccggacaacggcacgggcgctgcccctatgcactgccttctattttttc

SEQ ID NO: 917450 - DNA, 120 bp, Artificial Sequence
  ENSG00000260599_2 (sequence is synthesized)
tatttttttccaattttttttttctttttcctttccttttttacacttttatttttttcttttctttgctcttctcctggcgctggttcccgccccctctttttctagatagagctgggc

SEQ ID NO: 917451 - DNA, 120 bp, Artificial Sequence
  ENSG00000260599_3 (sequence is synthesized)
tggggagagggacttaacccttggcgtgcctagcttgttacttttgctctttcccattttgttccttggttacagttaacatataccttggtggccacttttataagttgggtggcattc

SEQ ID NO: 917452 - DNA, 120 bp, Artificial Sequence
  ENSG00000260599_4 (sequence is synthesized)
atgtctgcagcttctgcttgatgttaccctgggcttgcctgacaaatgctgtgttcaccacgtgctgatttttggcagccttagggtcaaatggggtgtaaagccagaatgttttacaga

SEQ ID NO: 917453 - DNA, 120 bp, Artificial Sequence
  ENSG00000260599_5 (sequence is synthesized)
gtcttttataaaactaacttgggctctcgttagctctctgaagcacttttgaaattttccttatattaattgttctctttttaccagctctttacccctgtaaaagcgacctctttgtac

SEQ ID NO: 917454 - DNA, 120 bp, Artificial Sequence
  ENSG00000260599_6 (sequence is synthesized)
ctctgcaggcgctgaagctgggtcctgattggggtctgcttctgggaaccagccttgagcatgtgcttgagcattcactgcttctgctagtgcatgggcttctagctagcggagagctgc

SEQ ID NO: 917455 - DNA, 120 bp, Artificial Sequence
  ENSG00000260599_7 (sequence is synthesized)
ttatgtcattctctggcactctttaatgttaaacaacgttaggaaaagctgcctgcaatttggccaggttagattatgtgtcagaaagatggaatgcatcagatttataagagcttgggg

SEQ ID NO: 917456 - DNA, 120 bp, Artificial Sequence
  ENSG00000260599_8 (sequence is synthesized)
cttctccgtgtaggagggtgtgtggtgttttcagtttagtagatgagtggttgaaaagggctgatagaagaaagtccgttgcccccccgccactgggatgtggccctggtcattataata

SEQ ID NO: 917457 - DNA, 120 bp, Artificial Sequence
  ENSG00000260599_9 (sequence is synthesized)
gatgggtcttcgtatctccctgagaggcatttgtatagctcgagcacaaccagatttgggacggcctgcttgactattttgacttccttccttagcctcttgaggctccagtctttccct

SEQ ID NO: 917458 - DNA, 120 bp, Artificial Sequence
  ENSG00000260599_10 (sequence is synthesized)
ttggggtgagacttggagcatgctggctcctgaatctggtttctggagagctggagctgttggcctcggtaaaggggggtaggctgggacatatggaaggagaatttttgttccctctgg

SEQ ID NO: 917459 - DNA, 120 bp, Artificial Sequence
  ENSG00000260599_11 (sequence is synthesized)
tggctcctataaactagcttcttttgctttttctgggacttttcctttaactctgtgtctgccggcgaagctgtttttatttttatttttggctttttgtaataagccattaaacagggc

SEQ ID NO: 917460 - DNA, 120 bp, Artificial Sequence
  ENSG00000260599_12 (sequence is synthesized)
tggatttatgtcggttttgtttatattatatttaaccatgagtcaatttaaaagaatttggtctgggtgccctggctgtcctctgacccctgtcaccaccttaaatatatggctaattgt

SEQ ID NO: 917461 - DNA, 120 bp, Artificial Sequence
  ENSG00000260599_13 (sequence is synthesized)
cttttaagtttttaaatatatattttaagggactaggttttgatgagttttttcccattttctcccagttatgatgctgcacatttacttttgtacagttatttttcttctcattttggc

SEQ ID NO: 917462 - DNA, 120 bp, Artificial Sequence
  ENSG00000260599_14 (sequence is synthesized)
cgactatatgctgtctcctattacaggagttttcagacgctgcttggctttggagagttttttatttttgttataacttggagttgtagggcagctcctattagtcatatgtagattgtt

SEQ ID NO: 917463 - DNA, 120 bp, Artificial Sequence
  ENSG00000260599_15 (sequence is synthesized)
attagtctcagtttgccccacaattttcttggagcatacagtttacgttaagagatttgtgatttcttattttgcgactgatgagcctaattaggtccctccatttacacacttttatat

SEQ ID NO: 917464 - DNA, 120 bp, Artificial Sequence
  ENSG00000260599_16 (sequence is synthesized)
acttttagttctcatgtttgtacctggggtggcaagccacttttgctacctctagttttgcagttggggtggcgagccacttttgccacctctagttttgtagttggggtggtaagccac

SEQ ID NO: 917465 - DNA, 120 bp, Artificial Sequence
  ENSG00000260599_17 (sequence is synthesized)
tctcgtcagttttctagctgacttagtgagctactttcgtgtcctgtgtcagctggggtgtgagttttatctgaattgagccactcctgttgcccccagcccctctgggtcggactattt

SEQ ID NO: 917466 - DNA, 120 bp, Artificial Sequence
  ENSG00000260599_18 (sequence is synthesized)
ggcacaccccgggaggcgattagctttctttctgtccctatgggcgggtcctgccttgggcccccaaaaccttactgtggttcctgaagtgctctgtttctgaaattgtcctgtagttct

SEQ ID NO: 917467 - DNA, 120 bp, Artificial Sequence
  ENSG00000260599_19 (sequence is synthesized)
tttcaggttttgtcgtgctgctgcgtagggggaaccaggtcaggggaaagctgatttcccctccgggctgaagattttctggtggcacctggggtcacaggtttcccctggcccagggct

SEQ ID NO: 917468 - DNA, 120 bp, Artificial Sequence
  ENSG00000260599_20 (sequence is synthesized)
ccagaccccagaggcaaaggagacagtcagcctgcagtctccggtcccttcatggctgccaaaaatgtggtaaactgaggaacggagagaccaatatggagtacaggaggattgttgttt

SEQ ID NO: 917469 - DNA, 120 bp, Artificial Sequence
  ENSG00000260599_21 (sequence is synthesized)
attttagataagaaactatcagtggaggaacagccttggtgttcctagaggagcgaaagagaaaatttaaaatggcagtaaccctgagacaaccacttctggtggttgccactcacctgg

SEQ ID NO: 917470 - DNA, 120 bp, Artificial Sequence
  ENSG00000260599_22 (sequence is synthesized)
ggatattcaggacattctgaatgtcctggtgtctgaccttaaccgttccaatggggtagtgctccccacactggacaagtggaagaagaccagtgtctccctgtaaaccgtggccttctg

SEQ ID NO: 917471 - DNA, 120 bp, Artificial Sequence
  ENSG00000260599_23 (sequence is synthesized)
tgcaccgagctcagtggctcttccccaccaaaactcctaagagaagtcatctctccccaaaaggatccccacaagatgttctggccctctgctgactgctccctggaatctgcatctcaa

SEQ ID NO: 917472 - DNA, 120 bp, Artificial Sequence
  ENSG00000260599_24 (sequence is synthesized)
gcactgagaatgctgtgctctccattggtcaccttcagactccatttccctgctgccaagtcttctcttctgccctgtgtattccatggatgcccctgaggcctgggacctgtgcctggc

SEQ ID NO: 917473 - DNA, 120 bp, Artificial Sequence
  ENSG00000260599_25 (sequence is synthesized)
tttgaggagcatctgtggcttggcgatccagctgctggggtgatggtgggcttcccttctctcagcagggctggagttcttgccccagagactggacaagtggctgtttctgtgacatat

SEQ ID NO: 917474 - DNA, 120 bp, Artificial Sequence
  ENSG00000260599_26 (sequence is synthesized)
ttatttttactggcgtttcatgttgcttaaaaaaaaaaagcaaacagaaaaattgtaagtcagtataattgcctatcagttttccttatttcactttttgtaagataaaattaaaactcc

SEQ ID NO: 917475 - DNA, 120 bp, Artificial Sequence
  ENSG00000226122_0 (sequence is synthesized)
actttgctggcagcagatcttcgcggagagaagcacggggagggtgacatgtggtacagagcaggaacgatggctctgtgcgatagcagcagacaaaggttgccatggcaagcctgctca

SEQ ID NO: 917476 - DNA, 120 bp, Artificial Sequence
  ENSG00000226122_1 (sequence is synthesized)
ggagcatgccacatagaccgatgcccacaagtccacctggctccaagccacagacaaggtcccttgtgcataggtaccgtgtccccaccccgggatcccaccacagccaggaccccttcc

SEQ ID NO: 917477 - DNA, 120 bp, Artificial Sequence
  ENSG00000226122_2 (sequence is synthesized)
cgaggtgcatccggaccctcacccaggagaagccgatgcagccaatggccccgcacagcatgtccgcaagcatggccgggtacgagctggcagtggggaagtaggcgaagaagtaggggc

SEQ ID NO: 917478 - DNA, 120 bp, Artificial Sequence
  ENSG00000226122_3 (sequence is synthesized)
tgtgccagtgcgtcacctgcatgggaggacagagcagctgctgaggagtgaggaaagccaggcctcaagagagcgggggacccaggtacccccatggctcccagctgccagatgcagcca

SEQ ID NO: 917479 - DNA, 120 bp, Artificial Sequence
  ENSG00000226122_4 (sequence is synthesized)
gacccagagttaggtctggctcagaatcccagcagcagaggatatgctctatcgggcttggctgctctgctctgaatggaggaaggagccgacaaagacaaagcgcccggggcccaggag

SEQ ID NO: 917480 - DNA, 120 bp, Artificial Sequence
  ENSG00000226122_5 (sequence is synthesized)
agtttaagagcagccctgtggctgactagcccctccgcacctggagggcccatgtgcctttgtctctctccccttcctgtggcctttgggctggaaaaggacagaagcgattcttgatta

SEQ ID NO: 917481 - DNA, 120 bp, Artificial Sequence
  ENSG00000226122_6 (sequence is synthesized)
gggacagatgtgtgctcttttgcttcactctccgctgatattcacagcaacttttgagatggctgggcctgcacttgctccgctcacggctcgagagctcacctggtttcctgcgatcac

SEQ ID NO: 917482 - DNA, 120 bp, Artificial Sequence
  ENSG00000226122_7 (sequence is synthesized)
gaaggaagcagaaagacttcaaatcctcccttactctcctgtactccccactgcctgacatttagccacacctctcccaaagggttttatgctgaacagcttagtgtacttgcacaattt

SEQ ID NO: 917483 - DNA, 120 bp, Artificial Sequence
  ENSG00000226122_8 (sequence is synthesized)
ctagaagaacctgaatcctgttctttgctcaaagcataaatgccaagtgagaatcccctggaagaagaaatgtgagcagtgtggtgagagaggcgctcagctactgagaaaccagtccct

SEQ ID NO: 917484 - DNA, 120 bp, Artificial Sequence
  ENSG00000226122_9 (sequence is synthesized)
gaggtccagggcctgaggcctagtctcaacccatgatcagtggactgtaaccttgtctgaccttatgccttcacagggccttggcattctgtctacattgagggagtgggtcttgatggt

SEQ ID NO: 917485 - DNA, 120 bp, Artificial Sequence
  ENSG00000226122_10 (sequence is synthesized)
cccagacccctcttctatgaaaatcacatgtcgttgctcataggccttacaaccacagacatgctgggtcgcggcagtgatcaaccagtggagcccacggagattttccctgcctggact

SEQ ID NO: 917486 - DNA, 120 bp, Artificial Sequence
  ENSG00000226122_11 (sequence is synthesized)
ctgcacattgttgcatggaagggcaggtttggccatcctcataaacattcgtgatctagaaactggccgggctgcaactcccacccagaccctgactaggccagagccactttaaccaac

SEQ ID NO: 917487 - DNA, 120 bp, Artificial Sequence
  ENSG00000226122_12 (sequence is synthesized)
aggcttttaggtgaactccttggcagagaaaatctactgtggaagcgtaaagctgaagggaagtttctctgagctccaactctgctgccctgtgagtgagtatcggagacagcagccagt

SEQ ID NO: 917488 - DNA, 120 bp, Artificial Sequence
  ENSG00000226122_13 (sequence is synthesized)
cccgctgatttctgccctctgtgtaccccaggcctactggcttcagagaaaaagggctgccttggtgggcagcaccacactgcccactctcaaataaactaaagaaaacgtttcttccac

SEQ ID NO: 917489 - DNA, 120 bp, Artificial Sequence
  ENSG00000260592_0 (sequence is synthesized)
ctctgcctcctgaacaaccctgatgcttccctgtgtggtcccttgtggcatagagtgccccctcttctcaggaactatggtgatggccagggtgcacaagaccccggtgaaggatgggaa

SEQ ID NO: 917490 - DNA, 120 bp, Artificial Sequence
  ENSG00000260592_1 (sequence is synthesized)
aaagagcaagaagatgaagaaagtcatcatctgtgaggcccgccaggctttgctcggaggctggaaattcatcatcaggctgatctgaagagagagaggcagccacctcccatctgcagc

SEQ ID NO: 917491 - DNA, 120 bp, Artificial Sequence
  ENSG00000260592_2 (sequence is synthesized)
ggcttcctgacacctttgcagagcccccttccccagctttaagcgccaccaggtcacaggtgactgaacaaagctgattgatggcaatgtcggactgactcacatttttggagtagaaca

SEQ ID NO: 917492 - DNA, 120 bp, Artificial Sequence
  ENSG00000260592_3 (sequence is synthesized)
cacatttttggagtagaacatgatgaaaagcataatcatttggataaagggcagcagggggcagaagaagatgccaatcctgtgagggagagaggtagagacgggatttcaccatgttag

SEQ ID NO: 917493 - DNA, 120 bp, Artificial Sequence
  ENSG00000260593_0 (sequence is synthesized)
ggcatttgttcatttaaacgggctcctaggacgagaacccggggacgccagggcctcgcgggccggcctgggccacaggtgtccccggcgcggaggtcgcagcgccccggcccctctcac

SEQ ID NO: 917494 - DNA, 120 bp, Artificial Sequence
  ENSG00000260593_1 (sequence is synthesized)
tactgtgacccctgaagcctttcttcccagagtggagaggatggggccaaattctaggaccttccacaaatctttattgagcaaagccctgttctgaacccgggacaactatggatgcag

SEQ ID NO: 917495 - DNA, 120 bp, Artificial Sequence
  ENSG00000260593_2 (sequence is synthesized)
aggaagcctggtaaacaagcagacacaggatggtttgtggaacagcatagcccttcctctcttcgaccttcgctcttgacttctgcagacctctttcagaataaacaaaccctcaaacca

SEQ ID NO: 917496 - DNA, 120 bp, Artificial Sequence
  ENSG00000260594_0 (sequence is synthesized)
ccaacacacagcattcaacagactaagcacttattttcaagttactaatttttaatttacgaagcccttatgtgcaacatgacagtgagcaagagaggtacaaagctgaacccccagtct

SEQ ID NO: 917497 - DNA, 120 bp, Artificial Sequence
  ENSG00000260594_1 (sequence is synthesized)
ctaaaaatcactgacttgtacactttcaattgatgagaaaactgagatatacagagatcaagaatcatccaaggtcacacaatacgaggtggggtcagaatgcaaacccaggcagtgtgc

SEQ ID NO: 917498 - DNA, 120 bp, Artificial Sequence
  ENSG00000260594_2 (sequence is synthesized)
ctacctagcccagactcttaaccactaagatgtcactaaagaagcatcaacatcaacaggaaacactttaacactacctaatgtccaacaacaaggattgattaaacacattccagaata

SEQ ID NO: 917499 - DNA, 74 bp, Artificial Sequence
  ENSG00000226125_0 (sequence is synthesized)
gtgttttaccagaagaaccttctctggtttatgttgactttaagatgtccttgattttttaattattttttata

SEQ ID NO: 917500 - DNA, 73 bp, Artificial Sequence
  ENSG00000226125_1 (sequence is synthesized)
cctgaattggcatcaccaagaattaacacccgactgcccaaatccctgtcaggactgtgggttgccttgcagc

SEQ ID NO: 917501 - DNA, 120 bp, Artificial Sequence
  ENSG00000226125_2 (sequence is synthesized)
ctgcccaaatccctgtcaggactgtgggttgccttgcagctggccttttctcccagaatctgaaggagttctacaagctgaggcttagcgatttggcataaaccttgaaagactcagccc

SEQ ID NO: 917502 - DNA, 120 bp, Artificial Sequence
  ENSG00000226125_3 (sequence is synthesized)
ttcaggataccatgaattctccctggacaagctgctgcctggaccactaaggaagcccagcaaaatgctcaggccatgtatgccctttcgtgacaagtgccaagattgtggacaatatca

SEQ ID NO: 917503 - DNA, 120 bp, Artificial Sequence
  ENSG00000226125_4 (sequence is synthesized)
caagacattgacagctttaagaaactcaaaaactggtgctggaagattttcttctgctaacctcttggaattcactgaaccagctaattctcagattcaactactggcttttactttaat

SEQ ID NO: 917504 - DNA, 120 bp, Artificial Sequence
  ENSG00000226125_5 (sequence is synthesized)
aaatggcaaagcagatgaccgcaaaaggccacactgccctcccagtttcttccagaagactggtcttcatcctgcctcatgactcccatagactccagggtgcctccctctttttttttt

SEQ ID NO: 917505 - DNA, 120 bp, Artificial Sequence
  ENSG00000226125_6 (sequence is synthesized)
ggcatgagccaccgcgcctggccaatgcctccctcttttaccttcgtctgcaaaatcccaggcccccttccttttctttgagatgtccctcattaatgagcattctcttcatggcactag

SEQ ID NO: 917506 - DNA, 120 bp, Artificial Sequence
  ENSG00000226125_7 (sequence is synthesized)
ttaatgagcattctcttcatggcactagcttgaataaaaccatctccttaatcgtcaagtgaatttcgtctgtcacagtgccagcgacgaactctcataagggcagccagcacttcgccc

SEQ ID NO: 917507 - DNA, 120 bp, Artificial Sequence
  ENSG00000226125_8 (sequence is synthesized)
atctcaggcctgaccttgacctgagtatgtcttgccagaagatctgacatctgcgtccctctacgttgatgtcatggcagaatgcacacccgtattctggctttttccccaaggaacatg

SEQ ID NO: 917508 - DNA, 120 bp, Artificial Sequence
  ENSG00000226125_9 (sequence is synthesized)
ctggaggggtcaaaatggcagagctagccccctgccccgttctctgcacttttggaatccctgcagaatgggtgggagaccttgtctagggacggctgtggtaggcattggcttgcagct

SEQ ID NO: 917509 - DNA, 120 bp, Artificial Sequence
  ENSG00000226125_10 (sequence is synthesized)
ggtatctggttatgctggtggattttaagattgctcagtgataactgtttcacgatggagaatcttcttcaagtcagggtggtcttggctgactcctgttatttgggcttgtataacaag

SEQ ID NO: 917510 - DNA, 120 bp, Artificial Sequence
  ENSG00000226125_11 (sequence is synthesized)
gttttaaccaagtggttgcctagaacctggttgtttgaaaattccaatcgttcaaagttaagtgcctactctaagtggccaagactaagttttcctggctcaaagtggtgtcaagctgca

SEQ ID NO: 917511 - DNA, 120 bp, Artificial Sequence
  ENSG00000226125_12 (sequence is synthesized)
gtggccgttcctcagggacctctgatgccaagtttcatctctctaagccttaaagcctatttttatgtaattcatgtgcttggagatgactttgaacaggactggtcttttaaaaataag

SEQ ID NO: 917512 - DNA, 120 bp, Artificial Sequence
  ENSG00000226125_13 (sequence is synthesized)
cagaagaacaaaagtcctctagcaatatcatggccctatatgcatggctgagaggttcccaagtcggcagacagctccatgtccaactacctaagtgaggatgaaaccaaagtcttccag

SEQ ID NO: 917513 - DNA, 120 bp, Artificial Sequence
  ENSG00000226125_14 (sequence is synthesized)
ttaggggggccaggagcagtggggtgtccagcaagggttgcaaggagtagtcaaggacctctgtggttatgctcttggcaccaatggggcaccctagaagcagggactcatctgtgctgt

SEQ ID NO: 917514 - DNA, 120 bp, Artificial Sequence
  ENSG00000226125_15 (sequence is synthesized)
ctgtccatactggtgtgtccctgagttcagaagactccctgacatcctgtaatctaatgtgacaagcattacagtaactcgcggttccacaggtagtcagatcctttctgccttaggtct

SEQ ID NO: 917515 - DNA, 120 bp, Artificial Sequence
  ENSG00000226125_16 (sequence is synthesized)
tagggcagagggttgagtttggattcctggtggatgacatcattcttggtggttgggaggggaataggaaaggagcatctattaagcagaggaatgtgccgtggttcccttgcatgattt

SEQ ID NO: 917516 - DNA, 120 bp, Artificial Sequence
  ENSG00000226125_17 (sequence is synthesized)
gcccatttgactggtgagtatgtgtgctggggggaggtgcacataggtgaatgtgtgggtgtgtgtgagtgggtatgatgtgtaaatgtgggggaggttcaatgagaggtggcccagaat

SEQ ID NO: 917517 - DNA, 120 bp, Artificial Sequence
  ENSG00000226125_18 (sequence is synthesized)
acttgtataggaagcctactgaccaccccaggcagtgcctgctggctgggctggtcaggaagtcaagaagcagtagagccctatttacctggcatcttctgccctgttcatctacggatt

SEQ ID NO: 917518 - DNA, 120 bp, Artificial Sequence
  ENSG00000226125_19 (sequence is synthesized)
actgtcctgctggagtgacaaccatctgtgctgagcctctttgcagtcctcctgtggctcatccctcggacagccgccctttcaacatctcaggctgaagatctctgtgtacagtcacaa

SEQ ID NO: 917519 - DNA, 120 bp, Artificial Sequence
  ENSG00000226125_20 (sequence is synthesized)
tcttggtgcagcttctgcagaccctggtgcatccagtcataccaattccacatccacagcacatgctactagccacttccaggatcattaaaatacatttctggccatttctggacccag

SEQ ID NO: 917520 - DNA, 120 bp, Artificial Sequence
  ENSG00000226125_21 (sequence is synthesized)
tccaaagataaagactgactatgcaacaaacaaatgacagattaaaggagacaaaaattactttcacaatgtataattaccaacaatgtaacattttattaaatgtgtctgtagtctgca

SEQ ID NO: 917521 - DNA, 120 bp, Artificial Sequence
  ENSG00000266505_0 (sequence is synthesized)
tccaggagcctgacctttcatgtgccagtggctgggctcttatcactctctcaggccgcgatgatgtgccctcacatgtgctatcagggatggctggtgcgccagctctgttactcctca

SEQ ID NO: 917522 - DNA, 120 bp, Artificial Sequence
  ENSG00000266505_1 (sequence is synthesized)
ccccatagggcagcccgggaggaagtgagactgggccccaccagcaggtcaagtcagcttcaaaggctggtaccaggaagccagacggtcaggggaaagatgacattccctgggtagatc

SEQ ID NO: 917523 - DNA, 120 bp, Artificial Sequence
  ENSG00000266505_2 (sequence is synthesized)
tgacaaacagccttatgaattccagggtaaagaaaaggggccctctcaaagggaagagcacagtgaccaagctgaggtcaagacctagatgtcagacagactgcagccaccctgggccaa

SEQ ID NO: 917524 - DNA, 120 bp, Artificial Sequence
  ENSG00000266505_3 (sequence is synthesized)
tctgcaaagggtccgataaggagacaatgctctgctctcagctatcctggagggtggatggccccaggctccaggaaggagtcctctgggatgcaggaggattgagccaccaatcaaaac

SEQ ID NO: 917525 - DNA, 120 bp, Artificial Sequence
  ENSG00000266505_4 (sequence is synthesized)
cagcaattcaaacttggaagagaagtgcaaaggccaagataaggggagggagagcttctgcatgggcagtaagtcatgtcctaacacctgccgaagaaaaccagggtcattcagaagtta

SEQ ID NO: 917526 - DNA, 120 bp, Artificial Sequence
  ENSG00000266505_5 (sequence is synthesized)
aagtggagaagacaaattttatttgggaccattgcaatagggggagagaggccccagtgaagaactgggctctgttctgagtacctggataagtgcggatgcatagccaaggagcagggg

SEQ ID NO: 917527 - DNA, 120 bp, Artificial Sequence
  ENSG00000266505_6 (sequence is synthesized)
gcaggagatggaaaattgctaagatgagacatcaaatctgtggggaattctggctgaaccaaccaaacaggattcctgctgaaggcagtccagggtgatcagataccaagggtgaagagt

SEQ ID NO: 917528 - DNA, 120 bp, Artificial Sequence
  ENSG00000266505_7 (sequence is synthesized)
aggaagcagacacaggcctaggagtagattcagaagcctgactaaagtttggccaagcaaagaatctttgtcacaccccaggaagtctctccttggatctggatagttcagaagcagaag

SEQ ID NO: 917529 - DNA, 120 bp, Artificial Sequence
  ENSG00000266505_8 (sequence is synthesized)
aaaaaggaaaccctgtcccctgacccagactcaggcaagtctaacgtgcacctcgtggagccataaaggaagcagggactgagttgctgagaaggggagagactccctcctctcgacgct

SEQ ID NO: 917530 - DNA, 120 bp, Artificial Sequence
  ENSG00000266505_9 (sequence is synthesized)
ggcctgtgtctaaggctgcctgtaagaaaggtactaggatcacgaaggaagccagcctatcacctggctgggtgagaagatggagaacacagaggcagagaaagccctcctagcagcctg

SEQ ID NO: 917531 - DNA, 120 bp, Artificial Sequence
  ENSG00000266505_10 (sequence is synthesized)
cagagcaggagttgttatggagaccgttctagctgctctgctgtgacaaggagtaatttcatgtcaagagcatgccctggaatggaaggcagggctgtggctcagaggacgcggctccca

SEQ ID NO: 917532 - DNA, 120 bp, Artificial Sequence
  ENSG00000266505_11 (sequence is synthesized)
gtggaaagatggaggtggtgagccgtggggaacgctctctgcctgcttttgggagtcctccctgtgtagcgcctcatgaccgagaaagcaaacactagtggaacttggagcattgtggtg

SEQ ID NO: 917533 - DNA, 120 bp, Artificial Sequence
  ENSG00000266505_12 (sequence is synthesized)
aaaatcagtagtttccaactggatgggatcaaaaagaagttcctacttaaacatttagcctcagaagtagattttttaaaacgaagccgcagttaatgtgctgatgaactgaagattgaa

SEQ ID NO: 917534 - DNA, 120 bp, Artificial Sequence
  ENSG00000266505_13 (sequence is synthesized)
cttgagcttcacattctgtctttggctgtgaacaaataacaaataagtgctcccgttgtatgggctcagcatgttcttgggagactgctttaaatcttattattttatagtcttctgcaa

SEQ ID NO: 917535 - DNA, 120 bp, Artificial Sequence
  ENSG00000245017_0 (sequence is synthesized)
aagccggcgcaggccttcgcaagatggcggctggaggcaagggcagaggccttcagagcgttttctttttccctttcctcccttcctgcaaacaatgtggctacagtttaactggaagtg

SEQ ID NO: 917536 - DNA, 120 bp, Artificial Sequence
  ENSG00000245017_1 (sequence is synthesized)
acaaactgaggaaactgaggcactggaagatgaaggctacagaggtagaaagtgatggaggagatacatccagaagactgcattacaatttcaaatcaaagctggacaagtttttttttt

SEQ ID NO: 917537 - DNA, 120 bp, Artificial Sequence
  ENSG00000245017_2 (sequence is synthesized)
tttttacacagatatcaccatgttagaaaagttggacaagttttgaaaccattctgaacctatcattcctgtctttcaaatccttccaaggcatcttattattgatttgtttctatattt

SEQ ID NO: 917538 - DNA, 120 bp, Artificial Sequence
  ENSG00000245017_3 (sequence is synthesized)
tcctcattattaaagaggttgagtatcttttctctagagctagtttgggttctgattttcttcactttcgtgatggagtcattttagaattgaagggcatcatagcaactgaggcagtgt

SEQ ID NO: 917539 - DNA, 120 bp, Artificial Sequence
  ENSG00000245017_4 (sequence is synthesized)
ggcagtgttgacatcatcaatgttttaggattacaggtaaccatatttcccagtttgcttgggacaaggccagtttgtacctcttgtcctagcatttttttttttttttttttttttgag

SEQ ID NO: 917540 - DNA, 78 bp, Artificial Sequence
  ENSG00000245017_5 (sequence is synthesized)
tctggtatcaaactcctgacctcaagtgacgccctggctcggcctcccacagtgatgggattacaggcgtgagccacc

SEQ ID NO: 917541 - DNA, 120 bp, Artificial Sequence
  ENSG00000245017_6 (sequence is synthesized)
tggccctagtatattttttaatagcattgcattcaatctcaaaagtgtgtgagttttgatgaaaaattatatggtggtcatttattatctgaaatacacatcaaaataccactattgcca

SEQ ID NO: 917542 - DNA, 120 bp, Artificial Sequence
  ENSG00000245017_7 (sequence is synthesized)
ttttgctctggtatcttcatcagtgggtgcaggattgtcatgaaggcggggggaggttgttctgcttccttctctgttgcatccccagagcccagaacagtgcccagcacccagtaagtg

SEQ ID NO: 917543 - DNA, 120 bp, Artificial Sequence
  ENSG00000245017_8 (sequence is synthesized)
cttaatgaatatgaatgcatctgcacataaattcgtttcttggggcttggcacattgccacttgaacaaatggattctattaacaaggagtatggagcaatgattttggggtacacaact

SEQ ID NO: 917544 - DNA, 120 bp, Artificial Sequence
  ENSG00000245017_9 (sequence is synthesized)
catggcgcctgccaaaacatgcgctttagattttgatagatatcgtcaagttgttctccgcaggggttgagccagtttacactcccaccagcaatatgtgagagcatctgtttctctaac

SEQ ID NO: 917545 - DNA, 120 bp, Artificial Sequence
  ENSG00000245017_10 (sequence is synthesized)
cttcacccacatggtgttatcaaaatttttatctgtgccaatctggtattttaaatttgcattttctttattatggaaagatagagcatactttcatatgtttaaaagccatttgaaatt

SEQ ID NO: 917546 - DNA, 120 bp, Artificial Sequence
  ENSG00000245017_11 (sequence is synthesized)
tctaagaactgtctgttcatatcctctgcccattttttttttttcagtgaattactggtctttttcttatcaatccataggaatacaaatagttgttccaagcttttcatgccttttgag

SEQ ID NO: 917547 - DNA, 120 bp, Artificial Sequence
  ENSG00000245017_12 (sequence is synthesized)
tttgtttctggtgttgttactaagcagaatttaaaacatgtatttatatttagcttctttcgttttattgcatctatattttgcatcatgcttagaaaggctttcccagattgtaaaata

SEQ ID NO: 917548 - DNA, 120 bp, Artificial Sequence
  ENSG00000245017_13 (sequence is synthesized)
attctcccatattttcttgtcttactttcaagttttcatttttttcacatgtaagtcttgatctatctgaaatttattttggtgtaagatttgagatatgaataaaatctaatattgttt

SEQ ID NO: 917549 - DNA, 120 bp, Artificial Sequence
  ENSG00000245017_14 (sequence is synthesized)
atgcctggagacgggaatgtctggaatcttagaggaaggaatcacacaccgacaagcatggcaggcttagtctttgaaacttaatcagagcctgagatacatccagaagactgcattaca

SEQ ID NO: 917550 - DNA, 120 bp, Artificial Sequence
  ENSG00000188185_0 (sequence is synthesized)
gcaagcgccaagcttccatccggacttcaaggccagtggctgggtctggttttctcaacacggcctcctagtctccttcccgcttgggcatctgtttttcttatatagaccctgaagccg

SEQ ID NO: 917551 - DNA, 120 bp, Artificial Sequence
  ENSG00000188185_1 (sequence is synthesized)
cccgtgatgttctgtaagcaggttccgcttcagaatcagaggtacttaagagggaacctggatgctagacctgcccttgctgctggcctcagtttctttacctgtaaaacagggattttg

SEQ ID NO: 917552 - DNA, 120 bp, Artificial Sequence
  ENSG00000188185_2 (sequence is synthesized)
gaactgttaaattaaatcaaacttaaaagaattacaacttaaagctgctggaactttacatgatcccgagccttgagaggaatgtggctatgcagcctgagtcatgtggcatgcagatgc

SEQ ID NO: 917553 - DNA, 120 bp, Artificial Sequence
  ENSG00000188185_3 (sequence is synthesized)
tggctatgcagcctgagtcatgtggcatgcagatgcaacctctgcctttttccgctgtaaataattaagaagaccaagtagcatccaagagtcacctaagctgaagattcccttgagaac

SEQ ID NO: 917554 - DNA, 120 bp, Artificial Sequence
  ENSG00000188185_4 (sequence is synthesized)
gaacaagtactgtcctgtggtttcatggcctttcttccatttgtggttcttgccaagcggaatttaaatgacatcttatcaagatggataaaccctagtttcccagtgctggaatataga

SEQ ID NO: 917555 - DNA, 120 bp, Artificial Sequence
  ENSG00000188185_5 (sequence is synthesized)
caggcatggggacctcaacacatttgagccgcagagatcacctttcattgtgaatagctctgagatgatacttctggttgaatgtctttttgtcacttccggctggatctaccatgaaag

SEQ ID NO: 917556 - DNA, 81 bp, Artificial Sequence
  ENSG00000188185_6 (sequence is synthesized)
aatgtctttttgtcacttccggctggatctaccatgaaagatttctgaatccaggaagagagattgactgggcaacatgtt

SEQ ID NO: 917557 - DNA, 120 bp, Artificial Sequence
  ENSG00000188185_7 (sequence is synthesized)
aagggatcctcccaccccagactcccaagtagctggaattacaggtctcatgctctcactcaggctgcagtacagtggcacaacctctactcactgcagcctctacctgccaggctcaag

SEQ ID NO: 917558 - DNA, 120 bp, Artificial Sequence
  ENSG00000188185_8 (sequence is synthesized)
ctctactcactgcagcctctacctgccaggctcaagcaattctcctgacttagcctcccgagtagctgggattacagttgaagcatatgtcctgtgagcttaggggtgctacaagttgac

SEQ ID NO: 917559 - DNA, 70 bp, Artificial Sequence
  ENSG00000188185_9 (sequence is synthesized)
tgaccactgcagcagtaaagatgattctgaagaatggcatgggatggatcctttcggatctaccatgaaa

SEQ ID NO: 917560 - DNA, 64 bp, Artificial Sequence
  ENSG00000188185_10 (sequence is synthesized)
tccaggcccagaactttctccagtcggcctcgcagtctccgcagatgaggctactgcctcacaa

SEQ ID NO: 917561 - DNA, 120 bp, Artificial Sequence
  ENSG00000188185_11 (sequence is synthesized)
agctcctgcctcccagccttctctctaggccctgaactttctcaagtcgacgtcaccaggcccagctcatgcttcttggcagcctctccaggcccagctcttcctcccggcggcctctgc

SEQ ID NO: 917562 - DNA, 120 bp, Artificial Sequence
  ENSG00000188185_12 (sequence is synthesized)
agcctctccaggcccagctcttcctcccggcggcctctgcaggcccagactgtcatcaagtcggcctgtccagggccagctcctgcctcccggcgccctctgcaggcccaagtcgtcctc

SEQ ID NO: 917563 - DNA, 120 bp, Artificial Sequence
  ENSG00000188185_13 (sequence is synthesized)
gcctcccggcgccctctgcaggcccaagtcgtcctcaagttggcctccccaggcccagctccagcctctcggcggcctctccgggtgcaaaagttcctcgagtcagcctctccaggccca

SEQ ID NO: 917564 - DNA, 120 bp, Artificial Sequence
  ENSG00000188185_14 (sequence is synthesized)
ccagctcatgcctctgggcggccttcccaggccccgcttttgacttttggcggcctctgcaggcctcgacaaggcccggcctcctgcctcccgaagcctgcacaggcccagcctctgcct

SEQ ID NO: 917565 - DNA, 72 bp, Artificial Sequence
  ENSG00000188185_15 (sequence is synthesized)
ggcccggcctctccagacccacttgcaccctccgggcgtcctctccaggcccagctcttcctcccggctgcg

SEQ ID NO: 917566 - DNA, 120 bp, Artificial Sequence
  ENSG00000188185_16 (sequence is synthesized)
ggcctcacggtggcctctccaggatcagctcctgccctccgatggtgtctccaggccccaaatggtctccggccagtgggctcctccacgcccagcttgggcctcccggcgacctctgca

SEQ ID NO: 917567 - DNA, 120 bp, Artificial Sequence
  ENSG00000188185_17 (sequence is synthesized)
aggccccaaatggtctccggccagtgggctcctccacgcccagcttgggcctcccggcgacctctgcaggcccaagtcgtcctgaagtcggcctctcccggccctgcctcccagcaagta

SEQ ID NO: 917568 - DNA, 120 bp, Artificial Sequence
  ENSG00000188185_18 (sequence is synthesized)
ggagacgccggaggagatttccgtgacaacggcaagctggctgcaacgaagccgcccacgtaggcctccccggcctgctggaggagaggggatcccccggggcagaggcggctacacccg

SEQ ID NO: 917569 - DNA, 120 bp, Artificial Sequence
  ENSG00000188185_19 (sequence is synthesized)
cagactccaactcttgagtttccagttcactaccaccagcctagagatcacatcctcatcaggagttggaaagaagggaagcttgagcccacttgggaaggaccttatttagtgctctta

SEQ ID NO: 917570 - DNA, 120 bp, Artificial Sequence
  ENSG00000188185_20 (sequence is synthesized)
acaactgatacagcagtttggactgccaagaagggctggactcatcacactcaagttaagcgggcaccacccttcccagaatcatggacccttgttccaggaccaactcttaccaagcta

SEQ ID NO: 917571 - DNA, 120 bp, Artificial Sequence
  ENSG00000188185_21 (sequence is synthesized)
aggctaaagagggtttaaccctcttattctgtatttatttcctccccctaccccatccctagtccccttatcattaatgtaaccaagtcaagctcaccccaaactattacctttgatgct

SEQ ID NO: 917572 - DNA, 120 bp, Artificial Sequence
  ENSG00000188185_22 (sequence is synthesized)
tgccttgttataccctgtggagagttgtcaagtcaaaagcaactctcttcttcagaaaagtatctccatccttcctggctttcctcagattgggcatttgttaatcgggataagttagtt

SEQ ID NO: 917573 - DNA, 120 bp, Artificial Sequence
  ENSG00000188185_23 (sequence is synthesized)
tgggaagagtttgatgaagacttcagtatgaactggaaatcttgtcctcttagagcagatcttctctgccgaagttggttcaatgtttgatgaaatactaaagagcaagaatggaccacc

SEQ ID NO: 917574 - DNA, 88 bp, Artificial Sequence
  ENSG00000188185_24 (sequence is synthesized)
atgtggctatgcagcctgagtcatgtggcatgcagatgcaacctctgcctttttccgctgtaaataattaagaagaccaagtagcatc

SEQ ID NO: 917575 - DNA, 120 bp, Artificial Sequence
  ENSG00000188185_25 (sequence is synthesized)
ggcctcccaaagttctggattacaggtgtgaaccaccgcgcccggccgcctgttgtcattaatactgccccgttcactctccaaagtgtcacagtttgagcgataaattatttgatctcc

SEQ ID NO: 917576 - DNA, 120 bp, Artificial Sequence
  ENSG00000188185_26 (sequence is synthesized)
gaaggaataaatagtcaccaaaacattttctgtccctaattccagcataaattggattagatagttattttatgaagaatttcctatgccacagtcctgaccatatcttcaagtgaacag

SEQ ID NO: 917577 - DNA, 75 bp, Artificial Sequence
  ENSG00000188185_27 (sequence is synthesized)
ttcctatgccacagtcctgaccatatcttcaagtgaacagaaaaatttgtgcagtggtgcagttatggctcactg

SEQ ID NO: 917578 - DNA, 120 bp, Artificial Sequence
  ENSG00000188185_28 (sequence is synthesized)
gcctcacaagtagctgggactacaggtacttgtcaccacacctcactaattttcgtatttttttaaatatgtggattccacaggactgacttcaaaaacttgagtatgtgtggattttgg

SEQ ID NO: 917579 - DNA, 120 bp, Artificial Sequence
  ENSG00000188185_29 (sequence is synthesized)
tatacacagaaatgggggagctggaattaatcccgccatataccaagggacaaattgtatatatttttacaattatactgtaggatacattacattccatgacaatggtagtttttaata

SEQ ID NO: 917580 - DNA, 120 bp, Artificial Sequence
  ENSG00000188185_30 (sequence is synthesized)
tagctggaattacaggtatgcaccaccaccacacctggctaatatttttcttttttttggtagacatatagtctcactatgttgcgctgacaggtctccaactcctggcctcaagtgatc

SEQ ID NO: 917581 - DNA, 72 bp, Artificial Sequence
  ENSG00000188185_31 (sequence is synthesized)
gtgcctggcctctgctagttctgctgatcctctgctaaaattaatactttttttttgagatggagtttcact

SEQ ID NO: 917582 - DNA, 74 bp, Artificial Sequence
  ENSG00000188185_32 (sequence is synthesized)
ctctactcactgcagcctctacctgccaggctcaagcaattctcctgaaagctaaattttgtgttttttgtaga

SEQ ID NO: 917583 - DNA, 77 bp, Artificial Sequence
  ENSG00000188185_33 (sequence is synthesized)
ttgatcctttatatatcaaacttggagcacaagtgcggcaactcaacctgctgacaggattaaacaagaatacctga

SEQ ID NO: 917584 - DNA, 120 bp, Artificial Sequence
  ENSG00000188185_34 (sequence is synthesized)
tgaccagtatgatgaaaccccatctcaactaaaaagacaaaaattagccaagtgtggtggcacacacctatagacccagctacttgggaggctcagccaggagaatcgcttgaacctggg

SEQ ID NO: 917585 - DNA, 120 bp, Artificial Sequence
  ENSG00000188185_35 (sequence is synthesized)
cactccagcctgggcgacagagagagaccctgcctcaaagaaaaaaaaaaagaatatctgtcctaacccaccaatcccatttcttttgctctcttgaaggaaaagggtccaggaactgtt

SEQ ID NO: 917586 - DNA, 120 bp, Artificial Sequence
  ENSG00000188185_36 (sequence is synthesized)
cttgaaggaaaagggtccaggaactgttggcaatttttatccaaagtaactgacacaaagacaaaaatactttatcaaaacaagagagactacagactatttattaatgccctggaaaac

SEQ ID NO: 917587 - DNA, 120 bp, Artificial Sequence
  ENSG00000188185_37 (sequence is synthesized)
tgggcatcttttgaaatgatgtggtgtatctgaaacccaaattctgaaattaagttccttggatacaccaaaagcagggcaatgacatttattggtgtcttttgtgtgtcagttaacaaa

SEQ ID NO: 917588 - DNA, 120 bp, Artificial Sequence
  ENSG00000188185_38 (sequence is synthesized)
aatgctttacatatgttgaataattttaagccctcaaaacaaaactatcttcacttttatgggtctagaaaaggaagctctaaaattgaggtcatacctacaaagtaccatgactaacgt

SEQ ID NO: 917589 - DNA, 120 bp, Artificial Sequence
  ENSG00000188185_39 (sequence is synthesized)
ggttgtggctggaacaccattctggatctatctacaggttcttaggggaggcaatcatctgtttatcaatagctgggctgtcttatagtgagtaaaatagctaaaaaaaaaaaaaaaaaa

SEQ ID NO: 917590 - DNA, 120 bp, Artificial Sequence
  ENSG00000188185_40 (sequence is synthesized)
gtgttgaaagctttcccacttcaggagctgctgcaggaagtctctatttggctgccagaaaagaacacctaaaagctgagtcactcaacagtctcttgtccttctgcctgctgttgtggg

SEQ ID NO: 917591 - DNA, 120 bp, Artificial Sequence
  ENSG00000188185_41 (sequence is synthesized)
gtgtagaggaagatagtcttcctctacacagcaagaagatccctaccagatgcagccctctcaaccttggacttcctgacatccagaactagtcacctaagctgaagattcccttgagaa

SEQ ID NO: 917592 - DNA, 83 bp, Artificial Sequence
  ENSG00000263159_0 (sequence is synthesized)
aggccgagccgggcagatcacatgagccaccgtgcccagcctgtatcatatacttttttaaaaagagactttacagaaaaaca

SEQ ID NO: 917593 - DNA, 120 bp, Artificial Sequence
  ENSG00000263159_1 (sequence is synthesized)
atatacttttttaaaaagagactttacagaaaaacagactgagcaaacagagctgcatgccggtgcatgagcaacaagttataatcgcacgctggaggaagaaagaggaagccgtcggcc

SEQ ID NO: 917594 - DNA, 120 bp, Artificial Sequence
  ENSG00000263154_0 (sequence is synthesized)
tgaggcctccccagccatgtggaactgagcctgaagttatggggcgtgtatacagtgagggaccgcaccgcccgccggcagctttcatctgtcaactcctagtgagaagaacactcaccc

SEQ ID NO: 917595 - DNA, 120 bp, Artificial Sequence
  ENSG00000263154_1 (sequence is synthesized)
tcctagtgagaagaacactcacccaccaaaaaaaggaaaaattgaaaatggtgctgatttcgaggggtacttggagactggccccgggctgggcccctgtctggagcgccgaggcctgcc

SEQ ID NO: 917596 - DNA, 120 bp, Artificial Sequence
  ENSG00000263154_2 (sequence is synthesized)
agccgacctaggggcccaagagaccaagatgagctctccaggccccacagcccggccctgagcctcctctgctgaagccagcccgtgcgctgacagcggtatggggcctgcatgattggc

SEQ ID NO: 917597 - DNA, 120 bp, Artificial Sequence
  ENSG00000263154_3 (sequence is synthesized)
gcaggaataagcaaagagaccctggacccaagggcgggtccagaaagcggccccttccccacgccgatttataacaaaggcccctgcagagcagggggaagaggtggcctttccctgcca

SEQ ID NO: 917598 - DNA, 120 bp, Artificial Sequence
  ENSG00000263154_4 (sequence is synthesized)
gaggtggcctttccctgccacgtgtccagtatcagttggacactgacagaaaaaagtgaccccatccccacaattaatttaaaatgagtcacagagcaggctgggcacggtggctcacac

SEQ ID NO: 917599 - DNA, 120 bp, Artificial Sequence
  ENSG00000250159_0 (sequence is synthesized)
gtcgtcagcgcggctgcgccgcaggagcccgggaggcctttcgcccgaggcgggctgcgggctgctggggtctggtgcggagggccaacttctgggaataacctggctgtgggcttaaaa

SEQ ID NO: 917600 - DNA, 120 bp, Artificial Sequence
  ENSG00000250159_1 (sequence is synthesized)
atcgtagtcattcattatcacgggcttctctctctcgaatacctttaacatttatcgccttgttagtctccacatccacctccgtgaaagagatggagtctcgctatatttcccagtctg

SEQ ID NO: 917601 - DNA, 120 bp, Artificial Sequence
  ENSG00000250159_2 (sequence is synthesized)
gcctcaaactcctgatcttaagggatccccagctcaacctctcccagcagctgggactaccgggctgtcaaatttacattaactatgagaattaagcaggtaatctctagagactattct

SEQ ID NO: 917602 - DNA, 120 bp, Artificial Sequence
  ENSG00000250159_3 (sequence is synthesized)
tattcctttgagcataacagactgaaaaatcctgaagaattagaaacctgtttggttaaaacaaaatcacaaattcagtagattcagtcatgatttaagttcttgtgattgcctttgaag

SEQ ID NO: 917603 - DNA, 120 bp, Artificial Sequence
  ENSG00000250159_4 (sequence is synthesized)
tgcaaaccatggcaagtctagcttagtttctagaggaattggctgagctgtaagtgagcttcacactgttctagaatataacattgctcttttggaacttgttattcataggttttgctg

SEQ ID NO: 917604 - DNA, 120 bp, Artificial Sequence
  ENSG00000250159_5 (sequence is synthesized)
agtggagttttattttacagatctagacttttgtgaagaggagacagtccgttttaaatatttgaattttattttcttttgacatacaactgtggaacactcagataatctataccatgt

SEQ ID NO: 917605 - DNA, 120 bp, Artificial Sequence
  ENSG00000250159_6 (sequence is synthesized)
tagtattcctacaagagaaaacgggtaaaacagtatttagaaagcagtaccagtaaacgttattacaagcattagatgtgtttaaaaagttgatactaatttataacctgtaattgttaa

SEQ ID NO: 917606 - DNA, 120 bp, Artificial Sequence
  ENSG00000250159_7 (sequence is synthesized)
atgtgcatgacttaaatgttaaaatcctgtattttaagatagtcttctgcagttacaaatccatatacccagatttcctgtaggcttcacaaatcggaggggtacatagaatgtgcaaga

SEQ ID NO: 917607 - DNA, 120 bp, Artificial Sequence
  ENSG00000250159_8 (sequence is synthesized)
attaactatattacctaattaaaaccataatctgttaatacagctatggattaatttcaaaaaaatgtaatcaaatatattactaatggtgtagttggctgttttccaatgttggtaaag

SEQ ID NO: 917608 - DNA, 120 bp, Artificial Sequence
  ENSG00000250159_9 (sequence is synthesized)
ttattaaagttcttcactttcatagagtccagattgagctgccaaacgctgaaattctccttctgggttaaaagcttgttttacattcaaacctttcccattaagtgctaaatatttgct

SEQ ID NO: 917609 - DNA, 120 bp, Artificial Sequence
  ENSG00000250159_10 (sequence is synthesized)
gaatgttggtcgaacccgtaactgcttaggagctggaagagtttggtttggacgtgctgaaatagatcacataaaagttgattcagaaaacctgttctaaccaaattggtcacactaggt

SEQ ID NO: 917610 - DNA, 120 bp, Artificial Sequence
  ENSG00000250159_11 (sequence is synthesized)
atttattatcagacaggaaaagaaaaaagaaccaaaactgattatatatggggaaaatatctcaaattttatactctgctgggattttcatttcttattaaatcttcctagttaaatccc

SEQ ID NO: 917611 - DNA, 120 bp, Artificial Sequence
  ENSG00000250159_12 (sequence is synthesized)
ttataatactttggttaatagtatgacatacccgtaacgtctaatcttgtgttacatgtagtcactccagcttcattaactgctgacacagtataccacccagcatctttcttgtttaca

SEQ ID NO: 917612 - DNA, 120 bp, Artificial Sequence
  ENSG00000250159_13 (sequence is synthesized)
tcttttatcagtaaagtaactcttccagtgttatcttgatataagctgaaataaaaatttttaagaaatgaaagtacaggaattatttctgtgaagtggatgtctctgaccaacagtcag

SEQ ID NO: 917613 - DNA, 120 bp, Artificial Sequence
  ENSG00000250159_14 (sequence is synthesized)
actaggaagaaaaaaacatttgaaaattccaaagctgtatctatttattgccaaatagctattggttttcttgaattaaacatccccccttgggtgctgtctccctctgctcttcaatct

SEQ ID NO: 917614 - DNA, 120 bp, Artificial Sequence
  ENSG00000250159_15 (sequence is synthesized)
gtcccctgatggtccctgtcattcactcgggtgtgtctgtgtttgtatttatgcgtatgtataggggaatggaggggtcctgacctgttccgttatctgtctcctacctcctcctttgtt

SEQ ID NO: 917615 - DNA, 120 bp, Artificial Sequence
  ENSG00000250159_16 (sequence is synthesized)
tgtaccagtgaacttgaactgtggctgtggcctggattccgcattcaaacatgaccaactgacctctggttgtagggatgtcttgaagatgctgaagaacaaacacagagttcagaggat

SEQ ID NO: 917616 - DNA, 120 bp, Artificial Sequence
  ENSG00000250159_17 (sequence is synthesized)
ggaagaaactgttataccatctacaatgatttgaaatgccatttgcaactgcagttgaccgtgggttattgaaaccacagaaagtgaaactggataacgaagggaaacactatcccagcc

SEQ ID NO: 917617 - DNA, 120 bp, Artificial Sequence
  ENSG00000250159_18 (sequence is synthesized)
tcaacaaggagcttgatttgggcacagaaacaggagaaagagacctgccttgcctcccttatccaaccggaagtattcttcttcttctgtcttcaatttattgcatgatcacatttattg

SEQ ID NO: 917618 - DNA, 120 bp, Artificial Sequence
  ENSG00000250159_19 (sequence is synthesized)
catgggtggcttcaggaaggattttagggattcctggaaataatcagtcttgaaatactcccctcttcttccttcatctaggatgcttcctcttctctcaatatattctcacttatgggt

SEQ ID NO: 917619 - DNA, 120 bp, Artificial Sequence
  ENSG00000250159_20 (sequence is synthesized)
ataaaggtaagttgagtcctcctttgatattaactctgccttcagttacccttaactttcctttagtcagctttcaacctagcctgaagagaagcctttggaacccctgtgtacatgttg

SEQ ID NO: 917620 - DNA, 120 bp, Artificial Sequence
  ENSG00000250159_21 (sequence is synthesized)
agtatggaggttcctcaaaaaattaaaattagaactaccatatgctccagcaataccattcgtgggtatatatccaaaggaattgaaatcagcatatcagggagatatctgtactctcat

SEQ ID NO: 917621 - DNA, 120 bp, Artificial Sequence
  ENSG00000250159_22 (sequence is synthesized)
ggaatcaacctaaatgtccatcaatggatgaatggataatgaaaaaatgtgacacacatacagacacatacacagatatatatacaatggtatactatttggcttttaaaaagaaggaaa

SEQ ID NO: 917622 - DNA, 120 bp, Artificial Sequence
  ENSG00000250159_23 (sequence is synthesized)
tcctgtcatttgcaacagtatagatgaacctggaggacattatgctaagtgaaataagccgggcacagaaagacaaatgctacatgatcttagttttatgtggaatcttaaaaagtcgaa

SEQ ID NO: 917623 - DNA, 120 bp, Artificial Sequence
  ENSG00000250159_24 (sequence is synthesized)
ctcatagaaacagagagtagaatggtggttaccaggagctgaggggtggttgtggaactggggagatactggtcaaagtttccaaatttcagacagaagaaatgagtacaagagatctat

SEQ ID NO: 917624 - DNA, 120 bp, Artificial Sequence
  ENSG00000250159_25 (sequence is synthesized)
tgtctatcatggtgactgcagttaatagcaatgtattggattcttgaaaattgctaagagagtagatcttaaatgttctcacaacagaaagtgataagtatgtgagatgatggatatgtt

SEQ ID NO: 917625 - DNA, 120 bp, Artificial Sequence
  ENSG00000250159_26 (sequence is synthesized)
agcttgatttaaccatttcataacattatccatatatcaaaacacattgttcactgtaaatatatataatttttgtcacctatactgtaatttaaaaaagtaaattaaaaaaagaaggaa

SEQ ID NO: 917626 - DNA, 120 bp, Artificial Sequence
  ENSG00000250159_27 (sequence is synthesized)
ggaaagacttcaaaaccaacacattgaattactcccctggtatattgtaaatgctttaaagcctcagcttggttgtaaattctttaaagctgtgtcttgtactttttctattccaaatgc

SEQ ID NO: 917627 - DNA, 120 bp, Artificial Sequence
  ENSG00000250159_28 (sequence is synthesized)
agagctaagtatatagtaagggcttaatatatttttcttgatttattattctacaaaaaacaaagcttacaggaagagagattgactctgtttattaggctgatgaactatgctgttcag

SEQ ID NO: 917628 - DNA, 120 bp, Artificial Sequence
  ENSG00000250159_29 (sequence is synthesized)
gcagagaagaaacttaggggacttgttgcaagaatgttttagcattttctcattcagctctggtttactggacagacatattcaggatagtttactaattcttttagggcataaacactt

SEQ ID NO: 917629 - DNA, 120 bp, Artificial Sequence
  ENSG00000250159_30 (sequence is synthesized)
attcattccactaatagtcttcttttctagaagcttttaaagatatgagaaattattctcaatccaaaatgatttgaggttgggggataggaggtttttggagtgctggttaggggaacc

SEQ ID NO: 917630 - DNA, 79 bp, Artificial Sequence
  ENSG00000250159_31 (sequence is synthesized)
tgggggataggaggtttttggagtgctggttaggggaacctgtttccaggactatctggcaaacatgaaagtccagtct

SEQ ID NO: 917631 - DNA, 120 bp, Artificial Sequence
  ENSG00000250159_32 (sequence is synthesized)
agacatgaagtcacttgtattggcagtagctgcagggtattatgcctgctgctcaaaagtggcaccaacagcagtaaacacatattagactggaaaattcttctctttttagctcgtggc

SEQ ID NO: 917632 - DNA, 120 bp, Artificial Sequence
  ENSG00000250159_33 (sequence is synthesized)
taattaaaaaaaaaaaaaaaaagaaagtccagtctcctaaaaggctcatctggcaactggagagagggaggtaagaccttatttcatataccagcttgttcaacaatagaccaaattgat

SEQ ID NO: 917633 - DNA, 120 bp, Artificial Sequence
  ENSG00000250159_34 (sequence is synthesized)
caacaatagaccaaattgatatgaattatccacaaacactgcaaaaatagaggaaataaaggctgattttctgaagtctttccatgtttcctctcatataaaagacttttacccacaata

SEQ ID NO: 917634 - DNA, 120 bp, Artificial Sequence
  ENSG00000250159_35 (sequence is synthesized)
cttggtttatgtttccattataccttcttctcgaagtagctacttatagacttgtgtttgcctacctgtcagaatgtaagccccttaaaggtgaaggcatgcattaaaaatacatttaat

SEQ ID NO: 917635 - DNA, 120 bp, Artificial Sequence
  ENSG00000250159_36 (sequence is synthesized)
tcactacttttttgaggtaaaaataaacacaagaaagactattattgatagttataccatttgctcaagaaaagttgaaaagaaaaaacaaaacatctttatggaaggaaattgctctta

SEQ ID NO: 917636 - DNA, 120 bp, Artificial Sequence
  ENSG00000250159_37 (sequence is synthesized)
tcaaggaaagaatgccatactatttagtcatatacaggagatctcttctgcatgttcagggtggaagtcggaattagaggagattgggtatatgtatgtgggtgagaggaaggaggaata

SEQ ID NO: 917637 - DNA, 120 bp, Artificial Sequence
  ENSG00000250159_38 (sequence is synthesized)
ttagaatttgatgccctttcctgcttttggtggtgtgttagtttgttctgagttgctataaaggaatacctgaagctgggtaatttttaaagaaaagaggtttatttggcccatggttct

SEQ ID NO: 917638 - DNA, 120 bp, Artificial Sequence
  ENSG00000250159_39 (sequence is synthesized)
acaggctgtataggcatagcaccagcatctgctcagcttctggtgaggcctcaagaagcttacagtcatagtggaaggtgaagggggagctggcatatgacatggcaagagaggaagcaa

SEQ ID NO: 917639 - DNA, 120 bp, Artificial Sequence
  ENSG00000250159_40 (sequence is synthesized)
gagagaggaggaggtgccagactccttaaacaaccagttcacctgaactaacagagcaagaactcactcatcaccaaggcagtggcactaagccattcataagggatctgcccccatgat

SEQ ID NO: 917640 - DNA, 120 bp, Artificial Sequence
  ENSG00000250159_41 (sequence is synthesized)
ccaacacctcccatcaggccccaccttcaacactgggtatcactttccaacatgagatttggaggagacacacatctaaaccacatcaaattgtttgatcagaatcattttagtaatgac

SEQ ID NO: 917641 - DNA, 80 bp, Artificial Sequence
  ENSG00000250159_42 (sequence is synthesized)
ccacatcaaattgtttgatcagaatcattttagtaatgacaactagcatcatatttcttttcttttctttttgtcagtgg

SEQ ID NO: 917642 - DNA, 76 bp, Artificial Sequence
  ENSG00000250159_43 (sequence is synthesized)
atcggtatttctttaccaagtaagtaaagtgacatttacagctactgccatgagatggttagattttgtttcgttt

SEQ ID NO: 917643 - DNA, 120 bp, Artificial Sequence
  ENSG00000250159_44 (sequence is synthesized)
tacagctactgccatgagatggttagattttgtttcgtttgtgtgttctgcagtgcttttgttgttcatttattccaaaatgataaaacagagaatagaaaccctaaagagaatgaataa

SEQ ID NO: 917644 - DNA, 120 bp, Artificial Sequence
  ENSG00000250159_45 (sequence is synthesized)
agagagaataagggaaggagggaaagaggaagagagaaagagattttcaggagaggaaaatgtgaaagctaatgtgcaagaaaaagcacaatagaaaaatcacagatgtttccagaaaca

SEQ ID NO: 917645 - DNA, 120 bp, Artificial Sequence
  ENSG00000250159_46 (sequence is synthesized)
gatgtttccagaaacattactttttattcaaaagaaaatatagttacttttaaaatttttttttgagacagggtctcactctttcatccaggttggagtgcagtggtgtgatcatgactc

SEQ ID NO: 917646 - DNA, 89 bp, Artificial Sequence
  ENSG00000250159_47 (sequence is synthesized)
agtgcagtggtgtgatcatgactcacttgatctcccaggctcaggtgatccttcctctcatctaagtagctgggactgcaggtatgcat

SEQ ID NO: 917647 - DNA, 120 bp, Artificial Sequence
  ENSG00000250159_48 (sequence is synthesized)
cctcccaaagggctgggattacaggtgtaagttgctgagtccagcctacagttacatttttaacatacaaataagctgcagttcaactttgatagatataggggaggtttgttctaagaa

SEQ ID NO: 917648 - DNA, 120 bp, Artificial Sequence
  ENSG00000250159_49 (sequence is synthesized)
ttgatagatataggggaggtttgttctaagaagtggtaaagctggtcacaatttaataaaagtgacttcagttaatagcaatttgaacagtagcttagtgtcttttgagaacagtctagt

SEQ ID NO: 917649 - DNA, 120 bp, Artificial Sequence
  ENSG00000250159_50 (sequence is synthesized)
tgattcccctgtgtaagcaactctgtggggatgagggctcttttaaaaatgtttaagccacaagatatatgagaaggttttaaaaatctggcgctaattataaaaatgctactgacaaag

SEQ ID NO: 917650 - DNA, 120 bp, Artificial Sequence
  ENSG00000250159_51 (sequence is synthesized)
tctctgagatccagtaatagagtcataatgacctctttttaatatacataaagaattagggattaaaagccactttgtgaggaaagctgtatctacattggccattaataagtttgttag

SEQ ID NO: 917651 - DNA, 120 bp, Artificial Sequence
  ENSG00000250159_52 (sequence is synthesized)
agcaatttctagcataattgctatgctaaagaatttgtggccagttctaatagcattgttagtgaataaaatgtactgttatcataaactggagatatgattcaagcatgggaattaatt

SEQ ID NO: 917652 - DNA, 120 bp, Artificial Sequence
  ENSG00000250159_53 (sequence is synthesized)
gtaattacaacacttcgtttaaatgttaagttaaaaccagcccttcaactttagtccaaacttagtttgttaattaattaatgaattttaaggggggattttctgacttggctaattaat

SEQ ID NO: 917653 - DNA, 120 bp, Artificial Sequence
  ENSG00000250159_54 (sequence is synthesized)
aatatggaagaaaaaaaatcaaccacagaccgagcacacaaaaacaaattccttgggtttcctgttttttgactgaatctgtgagatagaaggcgagatcaggatccttcataggtaggt

SEQ ID NO: 917654 - DNA, 120 bp, Artificial Sequence
  ENSG00000250159_55 (sequence is synthesized)
attgactctcagtcttcggagctgagctctaaaaggtgagtcagaatcttcccataatccctggtagagatcagctgttaactgttctccttttgttacccttctctttttttccgcaca

SEQ ID NO: 917655 - DNA, 120 bp, Artificial Sequence
  ENSG00000250159_56 (sequence is synthesized)
acactcttcctttccttctggctatatcagtaggttttctctttgtctttctctactgtttgtcatttccaggcttaaagtcagcagcagattctacctggcctccccagggcagagtca

SEQ ID NO: 917656 - DNA, 120 bp, Artificial Sequence
  ENSG00000250159_57 (sequence is synthesized)
aggcccccagtagcaatgaagagaatgaaaggacaaatatggaaacttctcctttttctagtctcccactcaccgagattggcactggcttctcagaagtacactgaccaaaaagaggag

SEQ ID NO: 917657 - DNA, 80 bp, Artificial Sequence
  ENSG00000250159_58 (sequence is synthesized)
ggcactggcttctcagaagtacactgaccaaaaagaggagtgttgggcagtccaggaacttttctaggctggagtgcaat

SEQ ID NO: 917658 - DNA, 77 bp, Artificial Sequence
  ENSG00000250159_59 (sequence is synthesized)
agtgcaggacctttaacagctgcagatgtttggagccaggaaatattgagctccagtctatctttgagtcctctcct

SEQ ID NO: 917659 - DNA, 120 bp, Artificial Sequence
  ENSG00000250159_60 (sequence is synthesized)
gtttggtcctgagactggaagtaagaagccactatactggtttcctataagttaaaatcatcaggattgtattctctttcctgctcccaaggaattaagaacgtttgattttcctcatct

SEQ ID NO: 917660 - DNA, 120 bp, Artificial Sequence
  ENSG00000250159_61 (sequence is synthesized)
gtaggatcaatatgatatgagaaaacccagttaaccagcagccttcgtttcaaagatactcacaacctccacgttgtctgtttggttttctgctcctgttgtccccaaagaaagagcccc

SEQ ID NO: 917661 - DNA, 120 bp, Artificial Sequence
  ENSG00000250159_62 (sequence is synthesized)
tcaaggctgtgtttgaggcgggtcgctgctctctggcaagaaggagcataaactggaatgacagctgtgtgcaaataggctagtgtataaattggaaaggatggggaagagtcttcctat

SEQ ID NO: 917662 - DNA, 120 bp, Artificial Sequence
  ENSG00000250159_63 (sequence is synthesized)
tctactctagttgatgcagttccagctttcaatttatcacacttgagaagtgctcatcttcccaacaggacagaaaatatgtgaccccgaattaaccactaataattgtacatcaaatct

SEQ ID NO: 917663 - DNA, 120 bp, Artificial Sequence
  ENSG00000250159_64 (sequence is synthesized)
aaatgggaatgaggagataaaaggcagggtaaagccaaagtctcatggtaaggaaagcatttttagctggaatgtaaagaatgttggtattggcatttaatggaaattcaagctgccctt

SEQ ID NO: 917664 - DNA, 120 bp, Artificial Sequence
  ENSG00000250159_65 (sequence is synthesized)
cccttcaatccagatagctcacagttgtttgggtcacaattacaattttactgattttggaaatctaatattaatcttagcattggctttagtggagaatctgtccaatgttgtagatct

SEQ ID NO: 917665 - DNA, 120 bp, Artificial Sequence
  ENSG00000250159_66 (sequence is synthesized)
ttatggagaggtattttaaattgtgaaatttttttcttagacatgtaagacttttatatacactgttggtggatgtgcttttgattgtgctgaatcgatctatacatttaaaatacaata

SEQ ID NO: 917666 - DNA, 89 bp, Artificial Sequence
  ENSG00000250159_67 (sequence is synthesized)
caggtttgagatttgttttttcttcagattttggaatatttgctgatacttaaatggtcctttgagcatcatgtcagtgctgaaaaaat

SEQ ID NO: 917667 - DNA, 120 bp, Artificial Sequence
  ENSG00000250159_68 (sequence is synthesized)
ttaaatggtcctttgagcatcatgtcagtgctgaaaaaattttggattttggagcattgaagattttggatttttggattaggcatgctcagccagtatagagaaacttcatcttaccat

SEQ ID NO: 917668 - DNA, 120 bp, Artificial Sequence
  ENSG00000250159_69 (sequence is synthesized)
gcataagctgaaaaatttttttgacaagaatacacttccactctctattataaattatagaattaaatagcaggctttgattgagggtctcttgtactgcccggtactgagcagctggag

SEQ ID NO: 917669 - DNA, 120 bp, Artificial Sequence
  ENSG00000250159_70 (sequence is synthesized)
ctatgagaattaagcaggaattctcaagggtctctttggaggcttaccaaggacatccagctgcacagtgaaggtggcttctcctgctctattcttggcaacacatgcataagcccctgc

SEQ ID NO: 917670 - DNA, 120 bp, Artificial Sequence
  ENSG00000250159_71 (sequence is synthesized)
atctgaagctctgactacttcaaagatgagtgaatgaagacccttctcagacactatcattttgtgcaaatcatctgattgaactgttcttccatttagataccatgacacatcaggagc

SEQ ID NO: 917671 - DNA, 120 bp, Artificial Sequence
  ENSG00000250159_72 (sequence is synthesized)
tggcagtccactcacctagaaagaaaaacacaaggagatggcagaattttaaagtattgcatcactgaaacctatttgtccatatatgaatttaaacagttcccgtatctgagtgggttt

SEQ ID NO: 917672 - DNA, 120 bp, Artificial Sequence
  ENSG00000250159_73 (sequence is synthesized)
gcgattgaaatgcaaagcaagagctcaaaagtatttataattttttaaacaaaacattggaaataagatccttgaaattaacatagtatttttagactgtctcaaaccataactctttta

SEQ ID NO: 917673 - DNA, 120 bp, Artificial Sequence
  ENSG00000250159_74 (sequence is synthesized)
catgcaacctcagtctctttatgaactcttaatttctatatttagaacattaatttatgttacattggtttccataaggaatatagaagtcattgcttttctggctaaatgtgactgcaa

SEQ ID NO: 917674 - DNA, 120 bp, Artificial Sequence
  ENSG00000250159_75 (sequence is synthesized)
atgaagtcccagaggcacatatatatgaggcttcctgatctaatgcgtaatttttctaaaacagagtgttcttgagctatagtttggcatataaatggcaatttgttaagtgtttttaca

SEQ ID NO: 917675 - DNA, 120 bp, Artificial Sequence
  ENSG00000250159_76 (sequence is synthesized)
taaactgttaacagtggaatccaaagctttaacactaacttgagttcataaggaatctggaaaaaaaattttataaggaaaagttctccaaaataaggataataaaaatataacctcttc

SEQ ID NO: 917676 - DNA, 120 bp, Artificial Sequence
  ENSG00000250159_77 (sequence is synthesized)
taaagagcttttctagtctgagggactcttttaggccaagagaaagcagggtggcttgaatttcttgatagaggagaattggagagacattatactttaaggctgggcacagtggctcac

SEQ ID NO: 917677 - DNA, 120 bp, Artificial Sequence
  ENSG00000250159_78 (sequence is synthesized)
ctttgggaagccaaggtgagtggatcgccttgaacccaggagttctagactagctgggcatggtggcacgcgtctgtagtttcagctactagggaggctgagttgggatgatggcttgag

SEQ ID NO: 917678 - DNA, 82 bp, Artificial Sequence
  ENSG00000250159_79 (sequence is synthesized)
ggcacgcgtctgtagtttcagctactagggaggctgagttgggatgatggcttgagcctgggagacaggttgcagtgagctg

SEQ ID NO: 917679 - DNA, 120 bp, Artificial Sequence
  ENSG00000250159_80 (sequence is synthesized)
aaaaattatattgttctgatagcttcacttataaaagtatttattaggtatacctatccactcaattaatcctcataattttttggggtatttgttatcccattttacagatgaggagac

SEQ ID NO: 917680 - DNA, 120 bp, Artificial Sequence
  ENSG00000250159_81 (sequence is synthesized)
aaaagcacagagaggttaaatgacttgtctaaggttgcttagctggaggatggcagagccagaattcaaacccacatcagtttgacttcagaatttgtgttcttgtccattgtacgtact

SEQ ID NO: 917681 - DNA, 120 bp, Artificial Sequence
  ENSG00000250159_82 (sequence is synthesized)
gctttgcaagctatgaagtaggaaaagaacatttttcaaaacttagtatcccattgttaattttcccccagtacttttgaacccttctcttactttgaagtccattctgcagaatcttcc

SEQ ID NO: 917682 - DNA, 120 bp, Artificial Sequence
  ENSG00000250159_83 (sequence is synthesized)
ttcatcaatcgacatgttctctggcacttgaatgaaacgtggtgggtaaaatttctcctggattgcatcctgatcattcacatctccccttgaggttgatctacttctacaagaatattt

SEQ ID NO: 917683 - DNA, 78 bp, Artificial Sequence
  ENSG00000250159_84 (sequence is synthesized)
tcattttgcacaaatatagtttagccatcaatttttttttttcccaatctcagctcactcaggaggctaaggcaggag

SEQ ID NO: 917684 - DNA, 120 bp, Artificial Sequence
  ENSG00000250159_85 (sequence is synthesized)
gcactccagcctggatgacagagtgagagtctgtctcaaagataaataaataaataaaaatatccaaattaagtttttgacgtttttctatagtggtggtgtgaacatgtatatagttat

SEQ ID NO: 917685 - DNA, 120 bp, Artificial Sequence
  ENSG00000250159_86 (sequence is synthesized)
gtttttgacgtttttctatagtggtggtgtgaacatgtatatagttatattcagagatgtggtatttcagttataccaacctccgcttcttgggttcaagtgattctcttacctcagcct

SEQ ID NO: 917686 - DNA, 120 bp, Artificial Sequence
  ENSG00000250159_87 (sequence is synthesized)
tgtgagccactgcgtccagcctagccatcaaatttgaaaccacagaatctactgtttgatctgatagtgtaataacaatgaagagaggccttagggctgtatttacctgtggcatatttg

SEQ ID NO: 917687 - DNA, 120 bp, Artificial Sequence
  ENSG00000250159_88 (sequence is synthesized)
atgactattagaaatggtagcaatttagaaacatctggtacaaattgtacatcttagtttctcttttacagtgccatgaattgatgaagaaatggtctattaaaatgcccagtacccagc

SEQ ID NO: 917688 - DNA, 120 bp, Artificial Sequence
  ENSG00000250159_89 (sequence is synthesized)
agattattcttaccaccaaagattgtataataagaattaggtctccattgtcatgagaaaattgtttaatatagaagcatgatcctggcttatttgaccaaaacattaaaaaattcccct

SEQ ID NO: 917689 - DNA, 120 bp, Artificial Sequence
  ENSG00000250159_90 (sequence is synthesized)
gtgatagttttgatgatgaacgtcaaaattttggtcatcttctcagacattagaaaatacacattgtatttttcaaaaggtatagagtaggctcgagggctttataaatattacattttt

SEQ ID NO: 917690 - DNA, 120 bp, Artificial Sequence
  ENSG00000250159_91 (sequence is synthesized)
aagctgaaaatattttagataggaaaacatacatttctttaaaattaaaattttttaccttacttgtgatgtaggaacttgcagtcgcgcatgttctgagttgtgttgcttgaaattaaa

SEQ ID NO: 917691 - DNA, 120 bp, Artificial Sequence
  ENSG00000250159_92 (sequence is synthesized)
acaaagtaagaatgtttacatgcaattgttagcttgaatgaagcagaattaagtagttacagttgaaaggaacattcctattttggctgtatttgaacagccctggtaagttctatatat

SEQ ID NO: 917692 - DNA, 120 bp, Artificial Sequence
  ENSG00000250159_93 (sequence is synthesized)
tcagcttttaagcccttaaagtacagtgcactaacatactaccactctagcaagaagcccagaattaatgggactattcaacaagtattatttatgaaaattagctagacttggaattga

SEQ ID NO: 917693 - DNA, 120 bp, Artificial Sequence
  ENSG00000250159_94 (sequence is synthesized)
atggactccacgaaaggtatgtgtaaggctttgaaaaagctttgtaaaatagcattaattcctgtttaataaagttgtatttaagcagacatcttttaggatttatatccgaacagcaga

SEQ ID NO: 917694 - DNA, 120 bp, Artificial Sequence
  ENSG00000250159_95 (sequence is synthesized)
aaattatttctatttgagaataaaatcagggatttatgaaaattataagagaactaattgattaagtagtgtgtattttgcgtttcactgtgcttagcacagtgggagatacaaagtgga

SEQ ID NO: 917695 - DNA, 120 bp, Artificial Sequence
  ENSG00000250159_96 (sequence is synthesized)
aaacacagtccctacccaaagctctgtaggagcacacaagatctgagtacaaataatttgctttgggatgaatctatttagctaatgtattttgtcatttttaaggcaaaagtcttacaa

SEQ ID NO: 917696 - DNA, 120 bp, Artificial Sequence
  ENSG00000250159_97 (sequence is synthesized)
ctctgtaacaatttttggctagccttaaggttctctaagcaaaatatcaagacaactggtcaattcagtgatcaaacaaatcaactaattttttggtaaagtaaaagtaatccaattaaa

SEQ ID NO: 917697 - DNA, 120 bp, Artificial Sequence
  ENSG00000250158_0 (sequence is synthesized)
taatcagtgcaaagaaaagcatctacagtgttatcttatagaagcaaaggatacctaattaatgcccagtctccaaagaaaactgccacccttctggctgctttcccagggaagatgttg

SEQ ID NO: 917698 - DNA, 120 bp, Artificial Sequence
  ENSG00000250158_1 (sequence is synthesized)
aggaagaatattcctggcttatagcctcagccctcagtagccactcggtggggacaggcagagccactgcttacaggtatgcttagaaaaagcatgggattgcttatttccatccagggg

SEQ ID NO: 917699 - DNA, 120 bp, Artificial Sequence
  ENSG00000250158_2 (sequence is synthesized)
aagaggaagatgtcccctgcctacgaaagacagcagaagatagaaaacaaaagcaaaatggctttttgtgattacacctcttgagtcctgcatgctcaatataccacttgtgtatacaca

SEQ ID NO: 917700 - DNA, 120 bp, Artificial Sequence
  ENSG00000227292_0 (sequence is synthesized)
agtcacgcgaggctggcttgctggaaccggctagaaaatgcagccctgcctgccgcagggatctcctccggtatggccacacatatgagttctggcaatgcccattagtgatatggccga

SEQ ID NO: 917701 - DNA, 120 bp, Artificial Sequence
  ENSG00000227292_1 (sequence is synthesized)
tagtttcttctgtcttgcttccaggaaccttttcttggtttgaagccaccgaaccagaagagagaatttttaccactttgaggacttcttgtgacgaatccaatgggaattccataatat

SEQ ID NO: 917702 - DNA, 120 bp, Artificial Sequence
  ENSG00000227292_2 (sequence is synthesized)
gccaacaaattattaagccctttgctaggtcttagagatacaaagataaagaagactggagttttctttttattatctaccagactgaaggccactgcctggggacttgatctaagagaa

SEQ ID NO: 917703 - DNA, 120 bp, Artificial Sequence
  ENSG00000227292_3 (sequence is synthesized)
gaaatatcaggagacctgggtttggctcctggctctgccaggtgatcatggagcagtcacgtattatccctgagcttccgtttcctcatctacttaattagtgatgggtctacagggcct

SEQ ID NO: 917704 - DNA, 120 bp, Artificial Sequence
  ENSG00000227292_4 (sequence is synthesized)
tgctggggtccacttctgacattctgtgttgcatggaccatgtcagagaagatggagacaccttcacggcctgttagtcacatctcaccaaagcttctcaatgggctgtcagacaagaaa

SEQ ID NO: 917705 - DNA, 120 bp, Artificial Sequence
  ENSG00000227293_0 (sequence is synthesized)
aggaccgactacacagggctgaaggaggcaaacaccctcaaggctgagtgtgcggaattaccttgtagatgccaaggggaggaaaaggctgaggagccccagagaaagctccattgccat

SEQ ID NO: 917706 - DNA, 120 bp, Artificial Sequence
  ENSG00000227293_1 (sequence is synthesized)
attttatggacagaaagttccattctcctcctctgcaagtgttgtagcctgacatggggccaggctaggaagaatgctgcgagccctctttggagtgacacggactgtatggatcatcag

SEQ ID NO: 917707 - DNA, 120 bp, Artificial Sequence
  ENSG00000227293_2 (sequence is synthesized)
cagacacactttatgtaaaggagaaggagctgttgaagcgtcttgaaaacctactgaattgctgagcaggagagtatgtactaaagcagatcctaagaatactaattattcagatatgga

SEQ ID NO: 917708 - DNA, 120 bp, Artificial Sequence
  ENSG00000227290_0 (sequence is synthesized)
ccaggcccttcactcttctactgaaccactttcttccatgtgcacacgctgatttctcaacctggaatcatttccctacacctttcctcaaaggactgttaatgagttttcagagcaggt

SEQ ID NO: 917709 - DNA, 120 bp, Artificial Sequence
  ENSG00000227290_1 (sequence is synthesized)
acttcactgaaatgtaactaccacaatgcatcctttccatgtgactaacttcgctcatggaccagaatcactgtggctctgccctggagtggtgcaaagagctcgcattctgtttggaaa

SEQ ID NO: 917710 - DNA, 120 bp, Artificial Sequence
  ENSG00000227290_2 (sequence is synthesized)
gcaaattatttaaatccagtagaggactctcaaatgtggttggaaaatctaagaagacttcccagaggcagcagcactagtgttagggaaagagctcacaaattccattgctgtagaatc

SEQ ID NO: 917711 - DNA, 120 bp, Artificial Sequence
  ENSG00000227290_3 (sequence is synthesized)
gtttgcaaatatctgtgatcttcaccttgcctgcctgcaaagcccataagcaagttcagaagagacttctacttgtccaaagcaacatggagtaaagtgggtcaactagaattaaaatat

SEQ ID NO: 917712 - DNA, 120 bp, Artificial Sequence
  ENSG00000227290_4 (sequence is synthesized)
gctccagccaaaggtgaccatggaaacctattgataaggctctggggtcagattcatctctgttcagacaactctagcggtgtgactctgagcaagtgttttttaacctaagttcctgct

SEQ ID NO: 917713 - DNA, 120 bp, Artificial Sequence
  ENSG00000227290_5 (sequence is synthesized)
tcctcaactgcaaatgtaggaatggtaacatcttcctcaaagttgtatgctggggataacacatgaaggagatgcctgggccatataattatttaagaaatgttcatttctttcttgaac

SEQ ID NO: 917714 - DNA, 120 bp, Artificial Sequence
  ENSG00000227290_6 (sequence is synthesized)
taccttctaccaactatttggtctgagtttatgaaactgtaaattttgtctaacatttgcctaacaaagcattattaccttgcttaaagaaacacacaatacattctaaaccaaaaataa

SEQ ID NO: 917715 - DNA, 120 bp, Artificial Sequence
  ENSG00000250150_0 (sequence is synthesized)
agccctccctgaattatccatcatgaaaacaaggagaataaacacagagtaagacaacatgggagagtagaagagagaaaaccaaataaggaatctcaaatgcagcctctcccttgcctc

SEQ ID NO: 917716 - DNA, 120 bp, Artificial Sequence
  ENSG00000250150_1 (sequence is synthesized)
ccaaccattgtgaacacagatctcaatgaacattttggtgaataagtacctactctatgtgaacagaaagggaaaggacaaaaggaaagaaagacaaaaaggaaatatgtttgctgtcct

SEQ ID NO: 917717 - DNA, 120 bp, Artificial Sequence
  ENSG00000250150_2 (sequence is synthesized)
ggaaaatggaaaccagcagaaggctctacacgttacatttccactacaaaactataggcaacttctgaaggaaataagaaaagataacaagtatttacccttaaccatgtgccctttatt

SEQ ID NO: 917718 - DNA, 120 bp, Artificial Sequence
  ENSG00000250150_3 (sequence is synthesized)
ctgcttgacaaatgtttattttgagcagcaagtacactgaataattagtaatgaaggctcatgatatgaaatccataacttaagattcaggacaaaatatatatacctgaaatcaaacaa

SEQ ID NO: 917719 - DNA, 120 bp, Artificial Sequence
  ENSG00000250156_0 (sequence is synthesized)
tcaataagacaagtcttccattgagcatgcttgggcaagtacagctggaatagaaaagatagacagtggattctttggcttcatccaagtgggctgaggattgaagtatttttccagtca

SEQ ID NO: 917720 - DNA, 120 bp, Artificial Sequence
  ENSG00000250156_1 (sequence is synthesized)
ttaactgatcctgcatttgatgaaaaaaaaagtttgcacattccaaaggagataggtttcaaatgactatatagggtacaatttccactgaagtgatttctcttaatcttaatccttaac

SEQ ID NO: 917721 - DNA, 120 bp, Artificial Sequence
  ENSG00000250156_2 (sequence is synthesized)
cactctcattgctacagtaccttccaaaagtaagcatagttcataaagtcttcagactgccttttagcacattaacatactcttcacaatcccacaataaaagcaccttaagtgcaggga

SEQ ID NO: 917722 - DNA, 120 bp, Artificial Sequence
  ENSG00000250156_3 (sequence is synthesized)
gtgtgaggacccacctagaagtcaccatctatgaagcaggaagcaggccctcagcagacatgaaatctcctggtgctttgatttggacttcccagcctctagaactaggccaagaaactt

SEQ ID NO: 917723 - DNA, 120 bp, Artificial Sequence
  ENSG00000250156_4 (sequence is synthesized)
gaaaaagtgatagaagcagggtaccttttgcatcatcaaacacagctcaggtgtcttctgagaagtcattttgatacagtatgaattcaataagacaagtcttccattgagcatgcttgg

SEQ ID NO: 917724 - DNA, 120 bp, Artificial Sequence
  ENSG00000250156_5 (sequence is synthesized)
gtactggtgaggaatcacctggggttgttaccattgagaactagcagaacagtaaccatcatttgctccaatgacacacggtgcatctcttatgctattagaagcaggacagctggatat

SEQ ID NO: 917725 - DNA, 120 bp, Artificial Sequence
  ENSG00000250156_6 (sequence is synthesized)
tcaataccaaaaggcccttttgagtttttctagcaagagtccccagttccgggaagccaagcacagggcaaactctctgtgtaatggcttccagactgcttggttttggatcccttctca

SEQ ID NO: 917726 - DNA, 120 bp, Artificial Sequence
  ENSG00000250156_7 (sequence is synthesized)
catagtctgaagggaaaggaggcgtacttatttcattagattatatggaacatcagaaatcaggtggggtggcagtggtggaatctcttaaaagttttttgaattccttagtcactgaac

SEQ ID NO: 917727 - DNA, 120 bp, Artificial Sequence
  ENSG00000250156_8 (sequence is synthesized)
tggttctagttaaaactaaaatcctgagcaaagagattaaacaaaagaaaacaatatcacagatactgaacaaaaggaaatagttcatgtatctgaagagctctttaatcctaagcatag

SEQ ID NO: 917728 - DNA, 120 bp, Artificial Sequence
  ENSG00000250156_9 (sequence is synthesized)
tcaagaaatagttgaggggacttgcctaaatcaatttcacttcagaatgaagacaatgtctgggtcactgaccaacattaatagaagaaaaaaaatcattagctaaataatgaagtgaca

SEQ ID NO: 917729 - DNA, 120 bp, Artificial Sequence
  ENSG00000250156_10 (sequence is synthesized)
ggagtgaaggaaggtgagaggaaagaacacactaaaaaggaaaacagaagacatgagcaaagtacaaaggaaaagtaaaagaagttgaatttttctcatttttttccactttgataaaac

SEQ ID NO: 917730 - DNA, 120 bp, Artificial Sequence
  ENSG00000250156_11 (sequence is synthesized)
attcaaaacaaagagtataaccatacctactgtataaaggtttaacatgcaggaattagttacacatcaacataagaccagttagaagttcacgtccaaggtcaatgatacatttttctt

SEQ ID NO: 917731 - DNA, 120 bp, Artificial Sequence
  ENSG00000250156_12 (sequence is synthesized)
attgcaaatcttatatttagaaacctaactatgaggtatgaggactgaccctgacaaaaagacaaacattttacaaaaccaaaatacacctaattctctaaataaaaatgttttcatcaa

SEQ ID NO: 917732 - DNA, 120 bp, Artificial Sequence
  ENSG00000250155_0 (sequence is synthesized)
ttccttcctactccctcccacacacccaggagctccagcctgttatgggatgggcatcctaccaggaaccaaggatgctaagatgtcctccaaaatggattgcctcatatctagtacccg

SEQ ID NO: 917733 - DNA, 120 bp, Artificial Sequence
  ENSG00000250155_1 (sequence is synthesized)
cctgctgcaggcttcttcatctagttcctctggggacacactgtgcagctaattcatccaggcagattcactgggaagctgttgctcatgagggtatttctgagacttttttttgtgacc

SEQ ID NO: 917734 - DNA, 120 bp, Artificial Sequence
  ENSG00000250155_2 (sequence is synthesized)
agatctgacacatgcaggagaggggaaggcaatgtgaccatggaggcagagaggggagtgatgtggccacaaaccaaggattgttggcagctgccagtggccgaaggggcaatgaatgga

SEQ ID NO: 917735 - DNA, 120 bp, Artificial Sequence
  ENSG00000250155_3 (sequence is synthesized)
ttctcctttggagcctctggagggagaatggccctgctaacaccttgattttggcccagtgatactgattttggacttctgccctctagaactgtgagggaatacttttctgttgcttta

SEQ ID NO: 917736 - DNA, 120 bp, Artificial Sequence
  ENSG00000250155_4 (sequence is synthesized)
tgagttagattacttcagggaaacacaataaatagttaacagggcttgtcaggggggtgggagtgagatgaaagtgtgaaggcaacttctatggtttacttttatatttccctatttttc

SEQ ID NO: 917737 - DNA, 120 bp, Artificial Sequence
  ENSG00000250155_5 (sequence is synthesized)
aaatcttttgcaagaaaatgaattcatatactattttaaaaaacatataaaatatgagcaaaaagatttattgtatctctttaaaataatttagaacaagtaatggctgcagaaccttaa

SEQ ID NO: 917738 - DNA, 120 bp, Artificial Sequence
  ENSG00000250155_6 (sequence is synthesized)
agggtttttctagcatgtttccaagatacagtcttgattatttgagattgacatgaagatggcccagactgtgccacaacacagcacttgacaccaaatgttagactgtaatgggccgtg

SEQ ID NO: 917739 - DNA, 120 bp, Artificial Sequence
  ENSG00000250155_7 (sequence is synthesized)
tattactcagtgtggccatttcattatcaaatatctatttatttcagatttcaaacacgaatacaagcttctcctttctttccttcctttctctttttctcctttctacagcaagttcag

SEQ ID NO: 917740 - DNA, 120 bp, Artificial Sequence
  ENSG00000250155_8 (sequence is synthesized)
gaatgtgctaggtatgacctgggatagaaagagcatatactcagcttttgccttcaagaaaattggatattggcttgggagataagataaatgaaaaggaagcagatgatctgttataga

SEQ ID NO: 917741 - DNA, 120 bp, Artificial Sequence
  ENSG00000250155_9 (sequence is synthesized)
agagataacactgtaagcccaaatgtatgtgattaagttctaaaagtgtaaaccaatagggagtgctgtgaggtgtcaccacgggcgcagattgcagcagatctgaccatacaagtgtaa

SEQ ID NO: 917742 - DNA, 120 bp, Artificial Sequence
  ENSG00000250155_10 (sequence is synthesized)
ataaaaccctattgaatgccccctctccctccccaattgttctgagtggttgcttcaagatttcttctcatcgttctcaaattgttactgtgagattaactggcaaacatttctccttaa

SEQ ID NO: 917743 - DNA, 120 bp, Artificial Sequence
  ENSG00000250155_11 (sequence is synthesized)
cataagaagtgtgaatggaatcctaccaagtgattttgccaatagttcctattcctgctgcaaacagtggtgtgctcaggcttaagctgtaacatgtccacactcacctgtcacttggga

SEQ ID NO: 917744 - DNA, 120 bp, Artificial Sequence
  ENSG00000250155_12 (sequence is synthesized)
atgcctctgttggaatgcaacatgcccacttatcacacagccggcatgagaggcagagtggagtttaaccaagcattctgcccccaaagtctgcagatgtagccagtgccttcagaaaag

SEQ ID NO: 917745 - DNA, 120 bp, Artificial Sequence
  ENSG00000250155_13 (sequence is synthesized)
ggaagggaaactaaccctgttgagtatctactatgtgctaggcattctgttaagcacttttacacacatcatttaatcctcgtgacagtatttagaaatagctatcatttcccagttctg

SEQ ID NO: 917746 - DNA, 120 bp, Artificial Sequence
  ENSG00000250155_14 (sequence is synthesized)
tagatgaggaagaaaaggtaggctcagagagggtaggtaagttgtctaaggtcacatagctggtacatagtagtagagctagggtgcaaacccaagattttctgagtccaaagcacatgc

SEQ ID NO: 917747 - DNA, 120 bp, Artificial Sequence
  ENSG00000250155_15 (sequence is synthesized)
cacccaggagctccagcctgttatgggatgggcatcctaccaggaaccaaggatgctaagctgaagacaaccatcaaggcattttttcccaaaaagcacagaaggagattcaatcatcaa

SEQ ID NO: 917748 - DNA, 120 bp, Artificial Sequence
  ENSG00000250155_16 (sequence is synthesized)
agagtgatggcaactgctgattcaagaagattgttctgtttcagtttttattttattttagatgtaccccttctccacaatgagtttctcatacacgcatctaatgaaagacgcctgttc

SEQ ID NO: 917749 - DNA, 120 bp, Artificial Sequence
  ENSG00000250155_17 (sequence is synthesized)
tcaaccctcctagaatttcaagatgggcaaacttacaaggaaagcaaggatgagtgctaatatgtaccatattcatgtgaatataagtttttttaataagaaaatcaaactctaaaaata

SEQ ID NO: 917750 - DNA, 120 bp, Artificial Sequence
  ENSG00000250155_18 (sequence is synthesized)
ccatgccaagaatatcagagccatgacccatggtatagaatgctgcaagcttagccttcatttgttgccatgctagagcagactctgtttctccaggaaattcctggttttgctcatggg

SEQ ID NO: 917751 - DNA, 120 bp, Artificial Sequence
  ENSG00000250155_19 (sequence is synthesized)
agaccctgcagatgctcactttgccactcgctgatctgatctcaagagcatctggatctgccttaaccagcatctcaggctccctacgcactgagttcttgactggaaactagtaatctg

SEQ ID NO: 917752 - DNA, 120 bp, Artificial Sequence
  ENSG00000250155_20 (sequence is synthesized)
tatttccctggggccacactaaagggggatgaggggcggagttaagttgcaataacaagaccaaagttgggtatctctggctcactggctgtctctgtctagactctcaggcttttcgac

SEQ ID NO: 917753 - DNA, 120 bp, Artificial Sequence
  ENSG00000250155_21 (sequence is synthesized)
ctcccctctgtgtgctccaccctgcagtcttcctgatgattccagaggctcctgctgtttccttctctccaatccccaggttggcctcctgggccctggctcccaggttgctgctcaggc

SEQ ID NO: 917754 - DNA, 120 bp, Artificial Sequence
  ENSG00000250155_22 (sequence is synthesized)
tgcctggatacttctctctcctgctaaatttcagtcacagtgggcttttctcagtctcaactttctatttttatttattttgcccctgttgctgctgattctttattctaacttacaata

SEQ ID NO: 917755 - DNA, 120 bp, Artificial Sequence
  ENSG00000250155_23 (sequence is synthesized)
attctccatggaccaatacaggacacaaataagcaaacaagaatattaatgttgatgtccctctctccagcaaaagattggtgatgagcgtcatcaatttattttaatacagcacattga

SEQ ID NO: 917756 - DNA, 120 bp, Artificial Sequence
  ENSG00000250155_24 (sequence is synthesized)
aagggcaggcgtggtggtgcagatttcactcatttcactatggcaatcgagggaggtcttggttgctgaccaggaaaggaaagctatacccaatcaggcacactttccagatattccaga

SEQ ID NO: 917757 - DNA, 120 bp, Artificial Sequence
  ENSG00000250155_25 (sequence is synthesized)
taggtaaatggtccatgaaaccataaaaccagaaatgaatctcagggatgaagagtggaaaaaaatcatcacctgggtctttcctttttgtaaagaaaagaaaatcaatagagctaactg

SEQ ID NO: 917758 - DNA, 120 bp, Artificial Sequence
  ENSG00000250155_26 (sequence is synthesized)
catttccgcagttggaaaatgttttctgacataaataaaaagtataacaattttaggtcaattggaggcattaacaatcagataaaatggtcattttggattatgcatccagggtagaag

SEQ ID NO: 917759 - DNA, 120 bp, Artificial Sequence
  ENSG00000250155_27 (sequence is synthesized)
tgatcctgctggaaacttgtgacacttgtctgtctgattgttggtctctctttttcttcttctctttctctccctcctcacctcttactgtgcattctttcccatatcttttcctccctt

SEQ ID NO: 917760 - DNA, 120 bp, Artificial Sequence
  ENSG00000250155_28 (sequence is synthesized)
tgcctactactgggtggagtttccatgtgggccccactgttgtgctaagaatagcactagctgctatttatcaaggctttaccacttgccaggcactgtgcagagcaccctagatacatt

SEQ ID NO: 917761 - DNA, 120 bp, Artificial Sequence
  ENSG00000250155_29 (sequence is synthesized)
acctcacttattctgcccaacagccctccaggaggatgggcatatttgtgtaatgaacccggtctgacatggtgtttaattgctttattatgttctttgtcagcactccaaataataaag

SEQ ID NO: 917762 - DNA, 120 bp, Artificial Sequence
  ENSG00000267674_0 (sequence is synthesized)
tgtcgcccaggctggagtgcagcggctcaatcacagctcactgcagtctcgccctcctgggcttaattacttctgaatttcggagatctagtaaaacaaaaataaacgacatagagaatc

SEQ ID NO: 917763 - DNA, 120 bp, Artificial Sequence
  ENSG00000267674_1 (sequence is synthesized)
tcattttattttgtcctcagaatctttgtaaaaattgatctcatatttggctctaaagaaaatctataaaatataaaagtggagatacacaagctaaatgtcctgagcctcagcctatac

SEQ ID NO: 917764 - DNA, 120 bp, Artificial Sequence
  ENSG00000267677_0 (sequence is synthesized)
catatgttaacttattgaatgctgacagcagccctctaaggtagatgccattaatatttccatttacagatgaggaaacagaagcatagattaaataatttgcccaatgtcacacagtaa

SEQ ID NO: 917765 - DNA, 120 bp, Artificial Sequence
  ENSG00000267677_1 (sequence is synthesized)
acacagaggaagctctgagatgaagagtcctctccgccaccagaagcagcagcgaaaacccatccaaagggttcaagaaaaactttcattctgagaagaggaacagggtcggggaggcac

SEQ ID NO: 917766 - DNA, 120 bp, Artificial Sequence
  ENSG00000267677_2 (sequence is synthesized)
gccggactccacatcatttcttccttcaattttgaaggagagtcgagggctggaccatcaaggctttagtctgaattcaggcctaatgtgagaattaaagaacagaaaccgccagactaa

SEQ ID NO: 917767 - DNA, 120 bp, Artificial Sequence
  ENSG00000267670_0 (sequence is synthesized)
ctctgccaaagtcttcgaatttttattattggagtttgggaagattcgaatgtgcccagagctctcctaggggggccacctgccaccttctctggggtccacagccttggaactctggca

SEQ ID NO: 917768 - DNA, 120 bp, Artificial Sequence
  ENSG00000267670_1 (sequence is synthesized)
ggggagttggagggagaggggatggaaagcagggcaaaggaagcgtgcgtgcaaaggctggactgagacagaggcttgattttagctggtcaggggacaatggccacagtttggactggg

SEQ ID NO: 917769 - DNA, 120 bp, Artificial Sequence
  ENSG00000267670_2 (sequence is synthesized)
gtagggacccagttgtggcagtggagtgtgtagatgaatgaatgaatgtgtgaggctcgaaagacaggtgcccagccagacactagttgagtggatggcaggactggggcattggtcctg

SEQ ID NO: 917770 - DNA, 120 bp, Artificial Sequence
  ENSG00000267670_3 (sequence is synthesized)
gtgcccacggctgcccagccctcaaactagcaaaggctactgatttcacttttgctacacccccacttgcagcagctgctggaaaggccagccaggacatctcggctgccccgaagaacc

SEQ ID NO: 917771 - DNA, 120 bp, Artificial Sequence
  ENSG00000267672_0 (sequence is synthesized)
tgaacaaagggctagatttgaagtttgggatacttggaatattggcagataaaacagcctatacattgttacactttagatctgctaaaggagctctaaataattcacacgcccagtcac

SEQ ID NO: 917772 - DNA, 120 bp, Artificial Sequence
  ENSG00000267672_1 (sequence is synthesized)
agatttaaaaaatagatgcagagatgtatgttttttctgataaaagagtttacatcatttgtatagtgatagagtagatcaatgcatttcaccaacaactcaaatgaagacaacccatta

SEQ ID NO: 917773 - DNA, 120 bp, Artificial Sequence
  ENSG00000267672_2 (sequence is synthesized)
attagaacaaacacattgtcttatatgtgcttggtagttgaatattacatattaagaactttgggctgggctcggtggctcacgcctataatcccggcacgttgggaggccaaggtgggt

SEQ ID NO: 917774 - DNA, 120 bp, Artificial Sequence
  ENSG00000267672_3 (sequence is synthesized)
gaatgaatatgctagaatcatcttttattgtaaaatagttgagggggaacctgtgattgtctaagaaactttattgttttcttctgtagtatttttatatgaaacaaaatccgtatcaat

SEQ ID NO: 917775 - DNA, 120 bp, Artificial Sequence
  ENSG00000267672_4 (sequence is synthesized)
tacaactttaataagtgattttccaacctacatgataactttattccttgtgctggaataaactgtctcttgcctcttccttcctttctcctctgaagcctttaggaagtcagtgattaa

SEQ ID NO: 917776 - DNA, 120 bp, Artificial Sequence
  ENSG00000267672_5 (sequence is synthesized)
cacatgtccctagaggacccaagtggtgtggaaaaaaacctatgacttgaggagaaaagcaagggtttttcaccatgatcttcctaaagactcttacctaatttctactgcgtcctttcc

SEQ ID NO: 917777 - DNA, 120 bp, Artificial Sequence
  ENSG00000267672_6 (sequence is synthesized)
ctgttggtttttattatcattcttcccactttcaaaagagggaatggttggccgggcgcggtcttgtatgtgcttggtagttgaatattacatattaagaactttgggctcggctcggtg

SEQ ID NO: 917778 - DNA, 120 bp, Artificial Sequence
  ENSG00000250365_0 (sequence is synthesized)
gggaccctagagagccttgactgtgaggactgagggcctcctttgttgcccaggccggagtgcagtggctattcacaggtcgataatgcaatcatggtgcacactacagccttgaacttc

SEQ ID NO: 917779 - DNA, 120 bp, Artificial Sequence
  ENSG00000250365_1 (sequence is synthesized)
ggaagaggaatgcagagtggcaacagctccaagtggacctggcagactatgaacactagaatcaccaaggaaacatggagctatgaaatggcaaaaggctgtgtgaaaaccctgacgctt

SEQ ID NO: 917780 - DNA, 120 bp, Artificial Sequence
  ENSG00000250365_2 (sequence is synthesized)
tttggttcagcctttaaaaaccaaatgaaaactcaagagatacaagaatgtggttattttgatgaacaactcacaaactagttgaattaaaagaaactggttcaaatgaacacaaaccta

SEQ ID NO: 917781 - DNA, 120 bp, Artificial Sequence
  ENSG00000250365_3 (sequence is synthesized)
gcgatggagactgcggcccaagttaggattaggacagcggtttttcagtccggagattccggccacaactatttttgtctgtttttatcgtaagccagagtctttgggtgcagctctggg

SEQ ID NO: 917782 - DNA, 120 bp, Artificial Sequence
  ENSG00000250365_4 (sequence is synthesized)
acacctaaagggcctggagaaattcaggcggggccagtgctgtgggggtagatgttagacgtggaagggaccctagagagccttgactgtgaggactgagacagggcctcctttgttgcc

SEQ ID NO: 917783 - DNA, 120 bp, Artificial Sequence
  ENSG00000250365_5 (sequence is synthesized)
acatatactgtgaagataaaatatctgttgaagattctttgagcaccttgggccagaagagctacagaaagccaaggtgtggctgtgatgacactgaattcagctcaagacccaggagaa

SEQ ID NO: 917784 - DNA, 120 bp, Artificial Sequence
  ENSG00000250365_6 (sequence is synthesized)
ccttacatctattcttatttccacaaggaagtgcacacatggctaatgcaaattcttccataataatgatataaacttgagttgtccaggtttgatgagacccacatcttgtatatacag

SEQ ID NO: 917785 - DNA, 120 bp, Artificial Sequence
  ENSG00000250365_7 (sequence is synthesized)
ctctgttaggggctctaggggataaaggaaactatattaagaaatgcagcatctgtttctccctgtgtgaccaccctacttccaagaagtttctgtatccttggctgaagtgcactgtgt

SEQ ID NO: 917786 - DNA, 120 bp, Artificial Sequence
  ENSG00000250365_8 (sequence is synthesized)
gtatgtgtatgtgtgtacactcttctacatcaatctgtaagtcactgaaatgctgcagatgttttaaaaaaattccaccatacttgcttactttaaactttgaaacaggcaaatagctaa

SEQ ID NO: 917787 - DNA, 120 bp, Artificial Sequence
  ENSG00000250365_9 (sequence is synthesized)
ggccaataacactagatagaattaagtaattaataatttaacagcacaatttaacattgtgcttcttaggatgggcagggattggttaatggatacaaaattatagctagataggaggaa

SEQ ID NO: 917788 - DNA, 120 bp, Artificial Sequence
  ENSG00000250365_10 (sequence is synthesized)
tgagttctggtgttctggagcactgtaggatgaatatggctaactataatttattgtatactgtcaaaagtctagaagaaaggattttaaatgttcacaacacaaataataaatttttga

SEQ ID NO: 917789 - DNA, 120 bp, Artificial Sequence
  ENSG00000250365_11 (sequence is synthesized)
gataatgcatatctggtttgattgttatacattgtatacagtattaaaatatcactatgtatcccatgaatatgtaaaattattatttattattttaaaaataaaaggggaggaaagaga

SEQ ID NO: 917790 - DNA, 120 bp, Artificial Sequence
  ENSG00000250365_12 (sequence is synthesized)
ccctcgaccggttctcccaccggcttctttcgcgatcacattgctgccgcgaccaccctcgggatccccgagcgctcaactcatacagcggccctggtgcgttctccttcccagccaaca

SEQ ID NO: 917791 - DNA, 120 bp, Artificial Sequence
  ENSG00000250365_13 (sequence is synthesized)
ggcagcccagacacagccccctcgcgcccggaggtgtccccgctccctggatccccgactgcctgcctttgggggtcctcctcagctgagcgtgcgtcccggtccagcaacgttaccggc

SEQ ID NO: 917792 - DNA, 120 bp, Artificial Sequence
  ENSG00000250365_14 (sequence is synthesized)
cttgggccagaagagctacagaaagccaaggtatagttattttcatatccacgacttcatttgccttttcccttgttgtagcctctctggaaattaagcaaagatgcctatcaccttctg

SEQ ID NO: 917793 - DNA, 120 bp, Artificial Sequence
  ENSG00000250365_15 (sequence is synthesized)
cttaataacccttcatgtacttgaaattgttattctccccaggtacctcaagcacattttttaaagaggattgcctaaactctaaaacagcaatcaagggctatgagtcagcatttcacc

SEQ ID NO: 917794 - DNA, 120 bp, Artificial Sequence
  ENSG00000250365_16 (sequence is synthesized)
tagacataaaatcaaaatggtttaaaataggtaacattatctttttgaaatatgtacatacctctttggagaaactttgagacaactggagtttgcaagtttatgaatagtttattacat

SEQ ID NO: 917795 - DNA, 120 bp, Artificial Sequence
  ENSG00000250365_17 (sequence is synthesized)
ttcagtaagtgtattgtgaatcaataaagcaaaagttaaggacaatgagctcattaccaagccagttattgattctctggttccaaaatagaacagtacaggaagggtatagagaaaata

SEQ ID NO: 917796 - DNA, 120 bp, Artificial Sequence
  ENSG00000250365_18 (sequence is synthesized)
ggatttttcatgataaaaattttaagcatcttaggaacacagacctaaagaaactataagacacaacggaaatttcagcagctacttaggatgtttatttatttacctttttttgccaat

SEQ ID NO: 917797 - DNA, 120 bp, Artificial Sequence
  ENSG00000250365_19 (sequence is synthesized)
tagaattagttatttggtttttactcttaaaaaaaaaaagtattttcaactcaagtcagaggagtttgccaaaactgaatattacctcttactgacttaattattctttcaatttcttgt

SEQ ID NO: 917798 - DNA, 120 bp, Artificial Sequence
  ENSG00000250365_20 (sequence is synthesized)
atatcttcctctcttgcctttgaaaagtttaccttactagctgtctatcttatatcactgtcgtagctcagactgccctaacaaaataccataggactgggtggtttaaacaccagaaat

SEQ ID NO: 917799 - DNA, 120 bp, Artificial Sequence
  ENSG00000250365_21 (sequence is synthesized)
ctttctttctggcttatatgttccaggatgggatggttggaggagccccatctccagataccatcacattaataagggcttcaacatataaattttggggacgggaacatctagtccaaa

SEQ ID NO: 917800 - DNA, 120 bp, Artificial Sequence
  ENSG00000250365_22 (sequence is synthesized)
acattcactaacagaaaaattgacactggctccatatcatcaagcagataatatggaaatgaacaagtcaatttgttttcaaactattcttatgggaagcttccctttttctccctttta

SEQ ID NO: 917801 - DNA, 120 bp, Artificial Sequence
  ENSG00000250365_23 (sequence is synthesized)
cagcaatctaattcaatggaaaaggaacttcttaaacaatttatgaactaacactaatttcatgaaccagttctttaaaaagcgaagacaaaaagtgagacacatgattttggtaaaaac

SEQ ID NO: 917802 - DNA, 120 bp, Artificial Sequence
  ENSG00000250365_24 (sequence is synthesized)
tgaaaaatagaccattaacccatttatatagtatgtttaataaaaacaacttttaaacccttatactttgttcttatatcaagtaaagattcttaaagtaatgtaaaacatttgaatgtc

SEQ ID NO: 917803 - DNA, 120 bp, Artificial Sequence
  ENSG00000250365_25 (sequence is synthesized)
cctggaaagtaatataacacacaataacccttctatattacatatatatctatatgtatatgtatatgttagagactgggtcttgctattctgcccaggctggtcgcaaactcctgggct

SEQ ID NO: 917804 - DNA, 120 bp, Artificial Sequence
  ENSG00000250365_26 (sequence is synthesized)
gctgggattataggcatgagccaccacatttggccctatattacattttcatgcatattattaaaagaaatggtgacttacatatggaaatacagaaaactgaaatagtaaacaaaatta

SEQ ID NO: 917805 - DNA, 120 bp, Artificial Sequence
  ENSG00000250365_27 (sequence is synthesized)
aatacagaaaactgaaatagtaaacaaaattaacaaagttataattgggttgtgctgaagtttacctaattttaatacaaatagttatttttattacatgctacacaaatttgatggtat

SEQ ID NO: 917806 - DNA, 120 bp, Artificial Sequence
  ENSG00000250365_28 (sequence is synthesized)
atttgatggtataagaaatgtgtttttcttgtttgcatgaatttcttcattgcaaaatacttaaaatgtacataatttttaaaaaacaactaagaggccgggcacggtggctcatgcctg

SEQ ID NO: 917807 - DNA, 120 bp, Artificial Sequence
  ENSG00000242545_0 (sequence is synthesized)
accaccaaaacaaaatcgtctccttctctcatttgggtctcctgggatcctgtcatctgtgctcccacacactgtacctcaggaaaagataggaaaggcaaggagacgaaagctcagcaa

SEQ ID NO: 917808 - DNA, 120 bp, Artificial Sequence
  ENSG00000242545_1 (sequence is synthesized)
gtcctcagtttccccagatcacacattcaaggtctgtctgaatctatgatgtgtgcctgccacacttggtcctaagaaggtcatagcaagaacagcaagagaagtaacagccacagccat

SEQ ID NO: 917809 - DNA, 120 bp, Artificial Sequence
  ENSG00000242545_2 (sequence is synthesized)
gactttctactttaactcttctttcaaagccaagcggtatcaaaataatcacgtaattccataagaagtgttcttctgcaggaagaaagtgtagctgagatagttaattttccggacaac

SEQ ID NO: 917810 - DNA, 120 bp, Artificial Sequence
  ENSG00000242545_3 (sequence is synthesized)
acaagagttccctttcaaatcactgaagtcagaggcatctgataacaaatggagtgtgccatttttctgaagcgagagacaaccctggagctgattttctgtgtgtgtaacaatggtgtc

SEQ ID NO: 917811 - DNA, 120 bp, Artificial Sequence
  ENSG00000242545_4 (sequence is synthesized)
tacaggcagagctgagcctccgcacaggagtctgcacatctttgcgtctgagacagttggtacaagtcagaacaattcactggaattccccaaggaattaaatcctccaggatctttaaa

SEQ ID NO: 917812 - DNA, 120 bp, Artificial Sequence
  ENSG00000242540_0 (sequence is synthesized)
ttggcggagaacgccgccgcagtgtttgacctctagcggtgaagggggaaggggaagaggaaaggagagaagtgatgtcagggacaggcttgaagattcctgatgtctcagcacccagca

SEQ ID NO: 917813 - DNA, 120 bp, Artificial Sequence
  ENSG00000242540_1 (sequence is synthesized)
cggctgtcagcctcggcaggaggaagaccacggaaaagagagatgaccatgtgaccaggaaaacccctctacaaggaagcatacatagtgggtcaaggagagggtgtggactggaggaaa

SEQ ID NO: 917814 - DNA, 120 bp, Artificial Sequence
  ENSG00000242540_2 (sequence is synthesized)
tctaagtccgtggagacgtagccctctggctctaacctgtgaggacggggttccccctgcctcgtggactctgctctccagagcctgggaccctggcaggtgcttcggatgaaggagccg

SEQ ID NO: 917815 - DNA, 120 bp, Artificial Sequence
  ENSG00000242540_3 (sequence is synthesized)
ggaggagccgactgcctttccttcccgccgggatccgcgaaaacgtgtggtcgggactccgagcgcggaaccctcaaggggaagaagaggccccgtggggaacgcgcagcgtgtcagggc

SEQ ID NO: 917816 - DNA, 120 bp, Artificial Sequence
  ENSG00000242540_4 (sequence is synthesized)
cgggagatcctggctagcgcagagtgtagccatcgttttcggctctggcacactcgagggctgtcattcacatgtgtaatagatacgaattcggaaagatccagtggaaagaatactgca

SEQ ID NO: 917817 - DNA, 120 bp, Artificial Sequence
  ENSG00000242540_5 (sequence is synthesized)
acaacttctcgcaattacttcgataattcgcaattgctctattaacatcgtatcaggaatggtgggtcactttggactcttgtgtagataagatagactaagggttaaaggacgttcagc

SEQ ID NO: 917818 - DNA, 120 bp, Artificial Sequence
  ENSG00000242540_6 (sequence is synthesized)
ctcccacccaccaagaaacacacagaagaaagagtgagaggaagagctggaagtgattttaaatacactgtgattgctaaagcaagtcaatcatctccaaactgtggtctgcttcaatta

SEQ ID NO: 917819 - DNA, 120 bp, Artificial Sequence
  ENSG00000242540_7 (sequence is synthesized)
ctagttagaaatgatttgtgaaagacctcacagaagactgcccacaccacgatgcattgagaaattgttttctagtacagtggtctttgaaagcaattgctaccgtcctcagaaactgtg

SEQ ID NO: 917820 - DNA, 120 bp, Artificial Sequence
  ENSG00000242540_8 (sequence is synthesized)
caggatcatgtatagggatgaagaaaaacacaaattggagtgctttatttgtacttcttttccagcttacaaaaaataaagatattatgcttcattaacatttaatgactagattaacaa

SEQ ID NO: 917821 - DNA, 120 bp, Artificial Sequence
  ENSG00000242540_9 (sequence is synthesized)
aggaagcatacatagtggggaacgaagtgcttacaagcagcaaacaagctggaaggtgggtttatattgacaagttctcccaccaacatggcgcttctcgggaagttccttctgagacct

SEQ ID NO: 917822 - DNA, 120 bp, Artificial Sequence
  ENSG00000242540_10 (sequence is synthesized)
caactgtggaagaacaacctagaccttggaagaggatgctgctttcccgccttcctcacttgcacaagcctctggctagttgaaacagacaaagcagtctgtccctcataacctcattaa

SEQ ID NO: 917823 - DNA, 120 bp, Artificial Sequence
  ENSG00000242540_11 (sequence is synthesized)
tatgacctgtaggagacctcctccgtgtctcctgaatgatatatttactctgatcttagaagagacctacccatcctccctgtgtccttcaggcagagcatttttactgtgcacctcttt

SEQ ID NO: 917824 - DNA, 120 bp, Artificial Sequence
  ENSG00000242540_12 (sequence is synthesized)
gtgacgagatcatcacaagattctggggaaacaacagtgagcacaatggacaaagcccttcttttggaactggcttaagagacactcaatgaacaaggaaatgtgtatctattggtgtaa

SEQ ID NO: 917825 - DNA, 120 bp, Artificial Sequence
  ENSG00000242540_13 (sequence is synthesized)
gcagagcaggaatgaaggatgggtccaagccatggaaatagttggccagaaccaggaagaagaacagcaggtgcaaaggtcctggggcgggggtgcacatggcacagatgagcagcagca

SEQ ID NO: 917826 - DNA, 120 bp, Artificial Sequence
  ENSG00000242540_14 (sequence is synthesized)
agggaggtgctgccgcacgacgtagcaagacaggagatgggatgtggctcctggggaagaagaaggacagtgaagaaggcggttgagcaaggagctagaaaaactaacgcggacatgagg

SEQ ID NO: 917827 - DNA, 120 bp, Artificial Sequence
  ENSG00000242540_15 (sequence is synthesized)
acgaagcaaagatagtcattttaggacatttggtctaagccagaactgtctctcacacctcaaggccatctgcagggatttcactatatacagtatgatagttgatgcttatatgatcac

SEQ ID NO: 917828 - DNA, 120 bp, Artificial Sequence
  ENSG00000242540_16 (sequence is synthesized)
cccaagttgttaacatgagtttatgtttatattcagcattccatttattttaattccaaacacctttattgagcccttagtacatgggagaccttatgtcagacagtgggaatggaaaga

SEQ ID NO: 917829 - DNA, 120 bp, Artificial Sequence
  ENSG00000242540_17 (sequence is synthesized)
tgagaaatttagcgtcatcaaccttccagagttcataatctagctagagagaaatatgcatagctatgtaccctgattatgaaaacaagaaaatgcttcgtgtatttaaaaagctctcta

SEQ ID NO: 917830 - DNA, 120 bp, Artificial Sequence
  ENSG00000242540_18 (sequence is synthesized)
tctaaaataatttcacttacatttaaataacttaatactaaaaggggaatctcgagttgctgaaaattcactgatatggaaatcttcaaacccaactatgccaggaaaaaacacagactt

SEQ ID NO: 917831 - DNA, 120 bp, Artificial Sequence
  ENSG00000282836_0 (sequence is synthesized)
ggatatgtagtttccggcgcctgccctccggggggtcctgtgctgcccacttcacagtgacttgtctccgcctggtgaactcgcggtgttctgctaatcttgcggagcctcaatgtgaga

SEQ ID NO: 917832 - DNA, 120 bp, Artificial Sequence
  ENSG00000282836_1 (sequence is synthesized)
ctgcccatcaaaccacagccatattcatcaagctttgagccgatccggtgaagagaaatgagcactgcatacattattcagagaaagggaccaaataaagcttttaataggaaatgaaaa

SEQ ID NO: 917833 - DNA, 120 bp, Artificial Sequence
  ENSG00000256417_0 (sequence is synthesized)
gtgggcataggaccctccgagccagatatattgttgtttataattgcactcctgtgtccttacaggccacttcctctttctctctctctgtgatctcaggcatgttgtgtgcttccagct

SEQ ID NO: 917834 - DNA, 120 bp, Artificial Sequence
  ENSG00000256417_1 (sequence is synthesized)
caagccggctctgtgttttaggccaaccaacacaattcatataacatccttgcacatttccaccatttcccgcctcaccatgcctcagaggactacaggctccccaagacgggacatggt

SEQ ID NO: 917835 - DNA, 120 bp, Artificial Sequence
  ENSG00000256417_2 (sequence is synthesized)
tgggcaggtaccggatagatgctgtcactgctgaaaaagaaaaaaatatccaaagtattcacgttgtacctgctgagtgccagtactgcatgctctggggattccattcctgcccctatg

SEQ ID NO: 917836 - DNA, 120 bp, Artificial Sequence
  ENSG00000256417_3 (sequence is synthesized)
tctagaggaagaagctgaagcccagcaaggaaaagtaacataacgaagatctcagcagaatgacggttatctgagcatctatattctggggttgcaaaaagaacaagaacgtagggttca

SEQ ID NO: 917837 - DNA, 120 bp, Artificial Sequence
  ENSG00000256417_4 (sequence is synthesized)
atggacctgagttccaggcctcactctgtcaccagctgactgtaagaagcccacccacctccaccttctctagatcacatgttttatggccgcctcaaaggcgtgaagcaggtgagtcgt

SEQ ID NO: 917838 - DNA, 120 bp, Artificial Sequence
  ENSG00000256417_5 (sequence is synthesized)
gctgcctctgccaacatctgctttgtgagcctgggagtatttcacggagatgtttctctcgacaggtttatggctggtcttggctcagtgccttgaaaacactgatcatgtgatgaaacg

SEQ ID NO: 917839 - DNA, 120 bp, Artificial Sequence
  ENSG00000256417_6 (sequence is synthesized)
agaatgtcatgctgcgggccatcaataaaccacactggcattcccgctcccaccccgacaccactccacccatgcaatttccctccccttcagcctcctccctccccacctcccaaagat

SEQ ID NO: 917840 - DNA, 120 bp, Artificial Sequence
  ENSG00000256417_7 (sequence is synthesized)
atgctgtcactgctgaaaaagaaaaaaatatccaaagtgcaatgaagaaattgcacacaagaacaagctacggtctgtcctctatgctgatgttggcagcctgcttctgcagaacatgct

SEQ ID NO: 917841 - DNA, 120 bp, Artificial Sequence
  ENSG00000256417_8 (sequence is synthesized)
taactggctatctgaggaccagaggggaagacagccgaccccaccacttctgagaccctatcttgcagccttatgaaaggagaagttatgcttaattcttggggaaacaaaggaatggct

SEQ ID NO: 917842 - DNA, 120 bp, Artificial Sequence
  ENSG00000256417_9 (sequence is synthesized)
gatggggacaacagtaatggggacagatgaacaatgtctcttgctttaggttcagcagggactcttgagaagtggagatggggacaacagtaatggggacagatgaacaatgtctcttgc

SEQ ID NO: 917843 - DNA, 120 bp, Artificial Sequence
  ENSG00000256417_10 (sequence is synthesized)
tttaggttcagcagtcagagacccaggcaccaagcgagaaggaactcagcctactgaaataacttcttaggtcaattcctggatccagtatttcctcagtgccatccattctacagtcca

SEQ ID NO: 917844 - DNA, 120 bp, Artificial Sequence
  ENSG00000256417_11 (sequence is synthesized)
gattaatcctccctaaaaacctttccaacatgccactgaagtactctaattggctcctcctgatatcctatcaaaatgggcttctaattcgacctaacttattttacagaagaagctgag

SEQ ID NO: 917845 - DNA, 120 bp, Artificial Sequence
  ENSG00000254921_0 (sequence is synthesized)
agctcaccgagcgatctcccttccttccttccagtacttcctcctggttgttctcctgaggaggaaaagaaggggtgactctccacatccttgcagcctcacctcatcatccctgcctgc

SEQ ID NO: 917846 - DNA, 120 bp, Artificial Sequence
  ENSG00000254921_1 (sequence is synthesized)
tgcctggccacacctggtcactcaaggcctccttcagtgccctggtctcagctgcctcagtaggggcccaggtttcctgtgctgctttgaatgctgagatcccatgggccagggagtgcc

SEQ ID NO: 917847 - DNA, 120 bp, Artificial Sequence
  ENSG00000254921_2 (sequence is synthesized)
gctgcatagtaagacctggagcctgttgaaattccctgtattcgcctcagtactgaaaccagcacttggatgtctcccttcatcaccgtggcaacagtcagactaacaaccaccatcacc

SEQ ID NO: 917848 - DNA, 120 bp, Artificial Sequence
  ENSG00000254921_3 (sequence is synthesized)
cattaattaggacatggaaacatcttctggtcgcagtctccccccaaacccttcaggaccagactgaatcctcaaggtctcagtggccatgccacacagggacacccaattgctggtttc

SEQ ID NO: 917849 - DNA, 120 bp, Artificial Sequence
  ENSG00000254921_4 (sequence is synthesized)
attctctggagacaggtgtgcccccctactgacagaccctgctcagcagaacagaagcccttcagcgaatgagacctaccctctgcggaaggctggttaggaagcatccatgtctacttc

SEQ ID NO: 917850 - DNA, 120 bp, Artificial Sequence
  ENSG00000254921_5 (sequence is synthesized)
tccacctccatgcatgtccagtgacgttttggatcagcgtgtcagggacgctgtcaggcgtgcctgcttgcactcatccagccctggctggatgtgattctacgagcagagcaagaccag

SEQ ID NO: 917851 - DNA, 120 bp, Artificial Sequence
  ENSG00000254921_6 (sequence is synthesized)
catgttctgtcctccagttatcacagcagttactctggcaacctgcaggccctccctgaggtgtctgacggctgaagcagggtccagtgggatggaatgaaggatgggcaccctggaaga

SEQ ID NO: 917852 - DNA, 120 bp, Artificial Sequence
  ENSG00000254921_7 (sequence is synthesized)
cagcccatggaggggccctttgggtcccctgctgccctgggcacctgcgaagagagaagctgagccaccctgcctgaggcagtaggcagtaagagctgaagggagcaggaggttagggcc

SEQ ID NO: 917853 - DNA, 120 bp, Artificial Sequence
  ENSG00000254927_0 (sequence is synthesized)
gcagcattctgtgttgttggaatccccagacccttcagtagagctctgttcctggcagaactgccgccggaagcccagatcatttactctgggggatgcaagttaccatgccttgtcaca

SEQ ID NO: 917854 - DNA, 120 bp, Artificial Sequence
  ENSG00000254927_1 (sequence is synthesized)
aagactaaggcagccctacggagaagactccaggcctcccaccgatacccatcagagacctgccatctctgaatgtgccaccttcacacaagaccctccagctgcaggcaagccttccag

SEQ ID NO: 917855 - DNA, 120 bp, Artificial Sequence
  ENSG00000254927_2 (sequence is synthesized)
ctgagaaagcatgagtcagaaccacacccaagttcctcatccaaagatactgtgggaaataagacctgtctgttgttttaaactacttaatgttgggataatatatacttagcaatagat

SEQ ID NO: 917856 - DNA, 120 bp, Artificial Sequence
  ENSG00000254927_3 (sequence is synthesized)
catgaataagccccgtttctgctgtcattttctgttatgccccatttcatatcggcttagtcttcaagcatacttccctcattggggtgaaatggttgtattagtttcaggtccaacaaa

SEQ ID NO: 917857 - DNA, 120 bp, Artificial Sequence
  ENSG00000254928_0 (sequence is synthesized)
gttctagctgagatctgggatagtttctgaattcagaagtgttcaccagccacattgcatgtattagctggaaccatatatgaaactacgatactcagctgtttctaacctacaaacaca

SEQ ID NO: 917858 - DNA, 120 bp, Artificial Sequence
  ENSG00000254928_1 (sequence is synthesized)
gtgattacatatggctcaacttaatgtatatgaagcctagaatgtcagaactgatagagccttagagactttcaagtctatttcattatgttgaagaggaaaacggatgagggagagaag

SEQ ID NO: 917859 - DNA, 120 bp, Artificial Sequence
  ENSG00000254928_2 (sequence is synthesized)
taagatcatacatcaccttaagtggtagaatcagggctgcttctcttcctactggaccatgtacctgtctctcatactctgcttcttttaatataataataatttaggtgcgatatcagt

SEQ ID NO: 917860 - DNA, 120 bp, Artificial Sequence
  ENSG00000254928_3 (sequence is synthesized)
tgagacagagccttgctctgtcacccagaattgtatgaccttcaggcctggatccactcctgtgtagcacagagttttgaaaagcactaggcaaggagaccagagttcctgggttccaat

SEQ ID NO: 917861 - DNA, 120 bp, Artificial Sequence
  ENSG00000254928_4 (sequence is synthesized)
aaggagaccagagttcctgggttccaatcatggcactatgcaggcccaaatgggcagcacagcacttgccctgctttcttcacgggagcgggggcagggtggtggtggtaaatcatatct

SEQ ID NO: 917862 - DNA, 120 bp, Artificial Sequence
  ENSG00000228213_0 (sequence is synthesized)
caagctaagaactgaaaagttctgattgacaggttgaaagacctggagcacttaagtcttctattattcaccaatcttttctccttcagcaggtggctccaatgtttaaaacctagaggt

SEQ ID NO: 917863 - DNA, 120 bp, Artificial Sequence
  ENSG00000228213_1 (sequence is synthesized)
tgaaccaggggttgtgaaccttaaatagagtgttatgagctactgactcttaaactttgagcttcagaggaagttaacagcaagtctgatgactcatatgcattctcacatgcttgaagg

SEQ ID NO: 917864 - DNA, 120 bp, Artificial Sequence
  ENSG00000228213_2 (sequence is synthesized)
tggctgaagatgaaaatagccgaactagcagcaattgttttaaaaaccgcaaggattattcgccgttgaaaataaaatcttgtgctccattcaagtacaggcacatcttctaaggaacac

SEQ ID NO: 917865 - DNA, 120 bp, Artificial Sequence
  ENSG00000228213_3 (sequence is synthesized)
ttttatggatgacgaagaacacttggagaagataagaaaatggccacagttacaatgagatcaaaacagctcaatcttaaaatcaagtctctcactccaaatggagatttttatgctaca

SEQ ID NO: 917866 - DNA, 120 bp, Artificial Sequence
  ENSG00000228213_4 (sequence is synthesized)
ttattaccaaaataattttgtttctcttttcctcaaggaagcacacatttgctgtgagcattatatattacttattaaaatttagtgattttagaatcgtaagaactttagtagaatata

SEQ ID NO: 917867 - DNA, 120 bp, Artificial Sequence
  ENSG00000228213_5 (sequence is synthesized)
gttgaaaaatctgcataccttgtatagatctaaatcaaaggatactagaaaatacaagctatataaagggattacttaattattcctattttatcctgtgtgaaattagaaaagaagaaa

SEQ ID NO: 917868 - DNA, 120 bp, Artificial Sequence
  ENSG00000228216_0 (sequence is synthesized)
ttaggaggcgcctgctgaggaatgcaagggtgagttgttttgacgtctgtaactagcttccaaccggttccacgagagaaagcgggcggaggcagagaaatcacaacatgctacgaagcg

SEQ ID NO: 917869 - DNA, 120 bp, Artificial Sequence
  ENSG00000228216_1 (sequence is synthesized)
ttttttgagttcaaaatggatcataaagcagcagagacaacttgcaacgtcaacaatgcatttggctcaggaactactaatgaatgtacagtgcagtggtggttcaaaaagttttgcaaa

SEQ ID NO: 917870 - DNA, 120 bp, Artificial Sequence
  ENSG00000228215_0 (sequence is synthesized)
ctataaagagcaagagagtgtcctttcaacctcaagcccttctcatgaatgagtgttaatctcattcatgagagaagggtggagacttcataattaaatcacctcccaaaggtcacacct

SEQ ID NO: 917871 - DNA, 120 bp, Artificial Sequence
  ENSG00000228215_1 (sequence is synthesized)
tttaatgctgttgaattggggattaagtttcaacaaaaatgttgaagggaacatcatcattcaaaccattgaaatcctccatcccagagtgatatatcttgaaaattcacttcatttgag

SEQ ID NO: 917872 - DNA, 120 bp, Artificial Sequence
  ENSG00000228215_2 (sequence is synthesized)
agtcatttgtttcttgataactgttttccagttgctacatacttcattaaattgatgcaaaggaaaatctgttcattgcgctcaaaattttagagaaagacatgagaaatgatgaagaag

SEQ ID NO: 917873 - DNA, 120 bp, Artificial Sequence
  ENSG00000228215_3 (sequence is synthesized)
tggatgattgacagagagttcagctgagtttcagtttggtgagaggatgtctaatatagagggcactccaggagtgggcctagcagccttagctggatgagggggtcccatggaagagga

SEQ ID NO: 917874 - DNA, 120 bp, Artificial Sequence
  ENSG00000228215_4 (sequence is synthesized)
ttgcctaacacatgattctgaacttcatccttacagacccgcgaatgtgtttctcaacgacctggggaccatatccgaaatgtcatcatcaatggagatggcacctacctacctctcagt

SEQ ID NO: 917875 - DNA, 120 bp, Artificial Sequence
  ENSG00000228215_5 (sequence is synthesized)
ttctgtgggagggtagcagcctaactttggaaggtcttcgtggacaatatgtccatgcagctgtgtcatctcctataataacaccacctcctgctggaatacctcctgaagaacctgctt

SEQ ID NO: 917876 - DNA, 120 bp, Artificial Sequence
  ENSG00000228215_6 (sequence is synthesized)
gaggctgtttaaaatggttaactttttttatttttaatatatatgtagaagcagactctaaaataatgacaaaagtatggtgtagtaaatgcataaaccagaaacatggtcatttattat

SEQ ID NO: 917877 - DNA, 120 bp, Artificial Sequence
  ENSG00000228215_7 (sequence is synthesized)
atgcataaaccagaaacatggtcatttattatcagtattaagtattatgtactgtataaaattgtactgctatacttttatactactactaacacagtaggtttgtttacaccagcatca

SEQ ID NO: 917878 - DNA, 120 bp, Artificial Sequence
  ENSG00000228215_8 (sequence is synthesized)
gcttgtcacctattctatcaatatgtgataaaaatttttcagttccattttaatcttatggaaccactgctgtctatgcggcctgtcgttgacccaaatgtcattatgtagtgcataact

SEQ ID NO: 917879 - DNA, 120 bp, Artificial Sequence
  ENSG00000228215_9 (sequence is synthesized)
gtactaatactaagaaaaactgagtgtttgtattttagagttaagcactgatacgtttacaaataaaataatatctgacgtttgtttcaaaggaatctggataagaggatatggtaagaa

SEQ ID NO: 917880 - DNA, 120 bp, Artificial Sequence
  ENSG00000228215_10 (sequence is synthesized)
catatatgaagtaagattgaccatgggttaataatgtttgaagctaagtggtaaataatctttgtcccaacctttgtgcatagtggttctcaaagatgatccctgcactggcagcaacag

SEQ ID NO: 917881 - DNA, 120 bp, Artificial Sequence
  ENSG00000228215_11 (sequence is synthesized)
gatcatttgagatcttgtttgaaaagcaaactctgaggaaaccacatattttgtaaccaaaactctgcacatgaggcccattagcctgtggtttcacaagccctttaggtaattttgatc

SEQ ID NO: 917882 - DNA, 120 bp, Artificial Sequence
  ENSG00000228215_12 (sequence is synthesized)
caagctaatgtttctgaatcactgctccagtataaataacatagaatattgcatgtatttgtagagacatgacatttgtatatttttaagttatccataatacaacgaaaaataatgaaa

SEQ ID NO: 917883 - DNA, 120 bp, Artificial Sequence
  ENSG00000228215_13 (sequence is synthesized)
acacccaggacaaatgtttcactggaaaaatttgaataaagtttgcagacataattctaatcttaaacacttccaaaagacagaaaaggatctattccccaacccagtctgagagtagaa

SEQ ID NO: 917884 - DNA, 120 bp, Artificial Sequence
  ENSG00000228215_14 (sequence is synthesized)
aatcttagccctggaagtgaacaaagagtatgaaagaactattaaagccagtctcacttatgaacaaaagatccagtaatcttaagaagttaagtaaatctagcattatgtaaaaataat

SEQ ID NO: 917885 - DNA, 120 bp, Artificial Sequence
  ENSG00000228215_15 (sequence is synthesized)
aaaaatacatcagaacgaagttgtatttatcctagaaaatgaaagttgatttaacattagaaacactttaaaaagcagggaggattaaaggagtttgtttattcttaatatattctgttt

SEQ ID NO: 917886 - DNA, 120 bp, Artificial Sequence
  ENSG00000228215_16 (sequence is synthesized)
gtttatttcagtgtttttatatgagtatccttaaatttttaaactgtgttaagatgcatgcttatacttgttttacttttctgactggaagataaacctaaataaaggttgtgaaaaaga

SEQ ID NO: 917887 - DNA, 120 bp, Artificial Sequence
  ENSG00000228215_17 (sequence is synthesized)
gagagagaaactgagctagtccctttccctgaataagtgcccctccaccccaactcccttcccaagcactgctctgtgcttcagtagtgcaatcccctccagaccgctttccagtttatc

SEQ ID NO: 917888 - DNA, 120 bp, Artificial Sequence
  ENSG00000228215_18 (sequence is synthesized)
agctttattcactgagctctacgaaactttgcagactgaagggaggaaagagaagaaggtgttaatttcactcttatttcacctctgcatctctgctgattgcttttccaaagaagctat

SEQ ID NO: 917889 - DNA, 120 bp, Artificial Sequence
  ENSG00000273387_0 (sequence is synthesized)
acagcagttactgtttaaacaggtggtggctgtggagggttgggagggactaggcttcagtaccaggcatggacaggcacatgccacaagggcctctgcatcagccacatggaactggcc

SEQ ID NO: 917890 - DNA, 120 bp, Artificial Sequence
  ENSG00000273387_1 (sequence is synthesized)
tacccctgttcccatgtccccctcctcctgacctttcccccatcacttcttcctgtcagctgagaggtaccctggattgaccctgcctctctggcttggctttcctgtccccacagtggg

SEQ ID NO: 917891 - DNA, 120 bp, Artificial Sequence
  ENSG00000273387_2 (sequence is synthesized)
tgatggggccacttaccagcttccgaagggctccctcatccagcccagctaaggcctcgtccgccatctcgctggcccctagctccgtcggttcctttctggtgagatccccagtgcctg

SEQ ID NO: 917892 - DNA, 120 bp, Artificial Sequence
  ENSG00000273387_3 (sequence is synthesized)
tggcacctgtcaccagctcagagaattctgcaggggacagacatgaatcaggcatgctggggcttccagaaaccacaggcacttaggctctgtgccttactttccctctctaacctagga

SEQ ID NO: 917893 - DNA, 120 bp, Artificial Sequence
  ENSG00000273387_4 (sequence is synthesized)
gcgtccattactgtcccatcctataatgtggctcctggctggaagctgccctctgccctagggtggtttgctggaaaactcaccaaacccagggtagggggtctctggttccagccctgc

SEQ ID NO: 917894 - DNA, 120 bp, Artificial Sequence
  ENSG00000273387_5 (sequence is synthesized)
agccagggcctggcaagacccacccaagctgtgcttaccaccagggggtgcactccagtctccagtttcctgccccacccacccatccacagggcctacccagcccccacccactccgca

SEQ ID NO: 917895 - DNA, 120 bp, Artificial Sequence
  ENSG00000273387_6 (sequence is synthesized)
ggctcagcttctggctgtgggctgaacccgtagttcttgctgccaccaccactgtcattcccccaggtataggaaggtacactgtgtcttccgattcttggagccagctctgctgtccag

SEQ ID NO: 917896 - DNA, 120 bp, Artificial Sequence
  ENSG00000273387_7 (sequence is synthesized)
acctcctgaagccaggtgtccaggcacccagcacctcctgccaattcatacagaattcaattccccacctggaagggctttcagaagctgacctgcccaacccctggatttcaggcaaac

SEQ ID NO: 917897 - DNA, 120 bp, Artificial Sequence
  ENSG00000273387_8 (sequence is synthesized)
tgagaagattggagagggccaaggatttgtcactgagcaaggaggaagccaaagacttagagggcagagaaggatgtaatcaaaatcttcgtcatctccggcttccgaagctcccttcca

SEQ ID NO: 917898 - DNA, 120 bp, Artificial Sequence
  ENSG00000273387_9 (sequence is synthesized)
aagtgccctcaagggcctggaacactctcagtgacagaggcaagagccccatcttgccccagtgctgcccatcaaaatggacccctaaatcctggcccagcctcccagcgcagatctctc

SEQ ID NO: 917899 - DNA, 120 bp, Artificial Sequence
  ENSG00000273387_10 (sequence is synthesized)
cttcctcctgtagccccaactaatgtctgtctggaatttgaggggccctggtctggcacactgtggatgcttagttaatgtatggtgactgactaatgtgtggccccaggcctgcccccc

SEQ ID NO: 917900 - DNA, 90 bp, Artificial Sequence
  ENSG00000259639_0 (sequence is synthesized)
aaagactggtggtgctgctggaataaaaggagtgatggaagacaggtgagggtgtgaggagaaaagatttggtgaatcacagttatgttt

SEQ ID NO: 917901 - DNA, 120 bp, Artificial Sequence
  ENSG00000259639_1 (sequence is synthesized)
ggtgtgaggagaaaagatttggtgaatcacagttatgtttcctggcattaaatcacccttgaatatttctataataaatgaaattcaatagggcctgaaaagggggtcaaccaagtactg

SEQ ID NO: 917902 - DNA, 120 bp, Artificial Sequence
  ENSG00000259639_2 (sequence is synthesized)
ctctcatgagttcataacctgagccaaagaaaaaggaaagtcatattacaataagaagaatgccccccatggaggacccatcactgccatacagcagcaagaaaggcgagatgagcacaa

SEQ ID NO: 917903 - DNA, 120 bp, Artificial Sequence
  ENSG00000259639_3 (sequence is synthesized)
tggtgtatgtaacactgctctacgccgacagatgtcccattgcaactcctgagacttggaggccaaatgttttctctaccgacattctatgccctcaggaattcctccacaaatccagat

SEQ ID NO: 917904 - DNA, 120 bp, Artificial Sequence
  ENSG00000259639_4 (sequence is synthesized)
cttacacacagcatattatttgtctgactccagaatgtgaatatggtctgctaatttttatgctgtaccctgcttttaataaatgtttacattacatatttaaatatgaatattaaagaa

SEQ ID NO: 917905 - DNA, 120 bp, Artificial Sequence
  ENSG00000259639_5 (sequence is synthesized)
gaaattcaatagggcctgaaaagggggtcaaccaagtactgcgactttcacaataaaatgaatcaaagctctcatgagttcataacctgagccaaagaaaaagatggagtctcgctctgt

SEQ ID NO: 917906 - DNA, 65 bp, Artificial Sequence
  ENSG00000259639_6 (sequence is synthesized)
agttattttcaataacacctagcaattaggaagcttaaaattacatgtttttaagacttggaatc

SEQ ID NO: 917907 - DNA, 120 bp, Artificial Sequence
  ENSG00000259639_7 (sequence is synthesized)
ttaggaagcttaaaattacatgtttttaagacttggaatcaaataacttcactctctaaagacttaaggcaatgaaaattttttcgttttaagtttcactttcgttcttaattatgacac

SEQ ID NO: 917908 - DNA, 120 bp, Artificial Sequence
  ENSG00000259639_8 (sequence is synthesized)
tctaggaatttctgtatttgtcttttaaggtaattctactcttgggtattataaaatgtttgtcttgtctttatgtttgtttctcttggttctataaattgcatcctcgagtccagaaaa

SEQ ID NO: 917909 - DNA, 120 bp, Artificial Sequence
  ENSG00000259639_9 (sequence is synthesized)
taaccaaatatcaaaattcactgtaggacattcctcatggggccatctgaaatccttcttattttaatatatgttgtagttacattttttatagttcccacctatcaaatttgtgagagc

SEQ ID NO: 917910 - DNA, 120 bp, Artificial Sequence
  ENSG00000259639_10 (sequence is synthesized)
tattcatacctgaagagcatttgttcttcgatccacactatcaaaatttcatggatttctgtcacattttaattataaaaaggattactcttgaaatcttactacttgaattgttgtaaa

SEQ ID NO: 917911 - DNA, 120 bp, Artificial Sequence
  ENSG00000259639_11 (sequence is synthesized)
tccttattttcattgtcaagaaatttgcatttcatattatttattcagaaaagcatgattccagttgtataaatgtcatatacatgtatatatctagtcattaagaaaaagactggaagg

SEQ ID NO: 917912 - DNA, 120 bp, Artificial Sequence
  ENSG00000226919_0 (sequence is synthesized)
ctcttttttttcttctggcacggtccaacagacactcctggcacttggcttcccgggggctgctcgcccccggcccagaggccggtttccagcggcaggccttattccaccatctttgca

SEQ ID NO: 917913 - DNA, 120 bp, Artificial Sequence
  ENSG00000226919_1 (sequence is synthesized)
gcttccaattcttttcatgttaagttgttttttggagagatatataaatttattttgagtccattctaagttgttctgtcagtgaaactctgtttaaaacatggcttgtatgaagttgtc

SEQ ID NO: 917914 - DNA, 120 bp, Artificial Sequence
  ENSG00000226919_2 (sequence is synthesized)
aggaatcggctctgacacttggatgattcttcagctggctataaaattctaaaatcagagtaaccgtgtattgacttccaacattccacatttccaaaggtgtttcctgtgatctctggg

SEQ ID NO: 917915 - DNA, 120 bp, Artificial Sequence
  ENSG00000226919_3 (sequence is synthesized)
atcctgatccgcaccactcaactttggcctcctaaacttcatccttgaccccaccccaggtaggaaggatgtgtggatatttcttttatctttctgcaacgatgaccttttggagaaaaa

SEQ ID NO: 917916 - DNA, 120 bp, Artificial Sequence
  ENSG00000226919_4 (sequence is synthesized)
gaaaggaagcagctatcatagtgtgaaatttcacagccaaaacttctgcatcagcttcataaggcaggaagcctacaaattcccctcttatgttttgagactcatcaacaaacctcaccg

SEQ ID NO: 917917 - DNA, 120 bp, Artificial Sequence
  ENSG00000226919_5 (sequence is synthesized)
acataggacctcttgaccagaatttatccagcactccagcacggcttgcacgttatctggagtaaagagaccttctgggatttcatcagcctcctgtccatcaagagagccacagctaag

SEQ ID NO: 917918 - DNA, 120 bp, Artificial Sequence
  ENSG00000226919_6 (sequence is synthesized)
aacctagaagggtagaagcaaaagatttttttcctcctgtataatcccaatccactacttagttcttccagtttttgactgactgaattttcagtgaactgtgtgtctaactgaagcttt

SEQ ID NO: 917919 - DNA, 120 bp, Artificial Sequence
  ENSG00000226919_7 (sequence is synthesized)
gagagagagagagagagaaagaaggaaaaaaagaaaaggttttacttcacttgaacttgttaaaaaggaagagacacagatccagcatagtagaaggagaaagaaagcagacaacagttt

SEQ ID NO: 917920 - DNA, 120 bp, Artificial Sequence
  ENSG00000226919_8 (sequence is synthesized)
ggaatggaggcattgagacggaagagtccattggagatggaatgtacacacaaaaataacaatttaggtcctttgctcatgcaacatcttgttctaatgtcctctgctccaggtcacaac

SEQ ID NO: 917921 - DNA, 120 bp, Artificial Sequence
  ENSG00000226919_9 (sequence is synthesized)
attgagctacaaagtgtgtgcagtgactccagtctgcattcatgctacaagatgatccgtttagtaagactgagcaaggcttgttaacctcttggacgtgagagatttcccctgagaaaa

SEQ ID NO: 917922 - DNA, 74 bp, Artificial Sequence
  ENSG00000226919_10 (sequence is synthesized)
agctgtaacactcactgtgaaggtccgcagcttccgaacacatcccaacatcagaaggaacaaactccagacgc

SEQ ID NO: 917923 - DNA, 83 bp, Artificial Sequence
  ENSG00000226919_11 (sequence is synthesized)
agtcctgagttcagaattttgtttttgagatgaacataaaagcacctaaaggtcaaggaagatgttcttcctgtgataaggaa

SEQ ID NO: 917924 - DNA, 87 bp, Artificial Sequence
  ENSG00000226919_12 (sequence is synthesized)
agcgcatgacacttcgctttagtgtagatgaccactcccctctgtaagagtccattctaagttgttctgtcagtgaaactctgttta

SEQ ID NO: 917925 - DNA, 120 bp, Artificial Sequence
  ENSG00000226919_13 (sequence is synthesized)
tataaaacaagagaaaagaaagaaaatcaagtacgatcactgaaaacctgcttagtagtagcaactatttactgtagctgatttttgtgcaaggtcaacactgaaccctttaagtccatc

SEQ ID NO: 917926 - DNA, 120 bp, Artificial Sequence
  ENSG00000226919_14 (sequence is synthesized)
ttagttcaaacctcatgaccaacctgccttcccccctccctccctccactgacacgtcaaacaaaactatcctccctccctccaccctcctacccctcccaaatccttcctccccactgc

SEQ ID NO: 917927 - DNA, 120 bp, Artificial Sequence
  ENSG00000226919_15 (sequence is synthesized)
aaacagactgatggtttcacagcacagattagcaaatcataaaacatatccataaatgctccatcaaggcttagcaatgaagcaacacctaggttcccaactgattataaacatgttaca

SEQ ID NO: 917928 - DNA, 120 bp, Artificial Sequence
  ENSG00000226919_16 (sequence is synthesized)
acaaatcttagtaagctgctctgaaagataatgtgagtgcattcttgttcaatggctgaaattaatgtcacatttataaatatctagaaatgtagaggatacgatttaattaaataaaat

SEQ ID NO: 917929 - DNA, 120 bp, Artificial Sequence
  ENSG00000226919_17 (sequence is synthesized)
gcagtttttgagggtgtgattcatgaaactcaagattgagtctgttccctatcttacataataatggataaaaaggtgccaattatatatctgaagataaaagtctacttgttccctgtt

SEQ ID NO: 917930 - DNA, 120 bp, Artificial Sequence
  ENSG00000226919_18 (sequence is synthesized)
atgctcagctttatttcccaataaatgtgaaatgattaaggtcctataatctgattaagatatcaagattaatcaaattttttaaacaaaattcgcattttatttagattgatataaatt

SEQ ID NO: 917931 - DNA, 120 bp, Artificial Sequence
  ENSG00000226919_19 (sequence is synthesized)
accaaaaaataactgcaatattttccgtatttttctagataagccaatacacttatatttgtaggttttccgggtttttcttataaatcaagatgaggcaataggtaagagtcatgaaaa

SEQ ID NO: 917932 - DNA, 120 bp, Artificial Sequence
  ENSG00000226913_0 (sequence is synthesized)
gtatcatgctgagaaggagccgggcgggggccggcggggctgcgagggccctgtgaggaggggcacctgccactagaagcggcctctgggacgtcgcgctgagccctgctttggagtcag

SEQ ID NO: 917933 - DNA, 120 bp, Artificial Sequence
  ENSG00000226913_1 (sequence is synthesized)
aggggctttccgcctcggtgaactcgagagtagcaactctcctccgggtaaccggagtgccacagcgggcaggcgtcataaggacaggcctcggagaggagaggggctacccgagaatgg

SEQ ID NO: 917934 - DNA, 120 bp, Artificial Sequence
  ENSG00000226913_2 (sequence is synthesized)
acaagcctgtactttcctgtgggagaatatttcctaggagcctatattccagttcatctctgacgtcataaatcatgactgtgtagaaaggccataacatgtgacacatggcagccattt

SEQ ID NO: 917935 - DNA, 120 bp, Artificial Sequence
  ENSG00000226913_3 (sequence is synthesized)
tggagatggccagatgagaggacaatcaatccacatgcctaaatggaaccaacagacatgtgccagcttgcttctccagcctatgttctcagacacttgtagaagaccagagggaaaatg

SEQ ID NO: 917936 - DNA, 79 bp, Artificial Sequence
  ENSG00000226913_4 (sequence is synthesized)
gctgtgatggtgccactgcactcccctaaacaaaaaaatccatgtgggaaaaggcccaatcagagccaactcactgctg

SEQ ID NO: 917937 - DNA, 120 bp, Artificial Sequence
  ENSG00000226913_5 (sequence is synthesized)
ccatgtgggaaaaggcccaatcagagccaactcactgctgggattagtagaaatgattagtcaccagaaggcaaatcgtggaagaatgaagagatgacaggacctcaggaactacaccca

SEQ ID NO: 917938 - DNA, 120 bp, Artificial Sequence
  ENSG00000226913_6 (sequence is synthesized)
gaggtgtagttgtgccgtaggcaaagcatcatgccggtcatccccaagaaagggagaaggggtagagctcagactcttccctgcttccccataagtccagtttaccctgggctgatcctt

SEQ ID NO: 917939 - DNA, 120 bp, Artificial Sequence
  ENSG00000226913_7 (sequence is synthesized)
ggcaagagtaggcattagagagatcagaggaggaagacaatagagaaggatgacacaggacaggctgtatctagaggatataatgccatggactttggactattccagagaggctgagag

SEQ ID NO: 917940 - DNA, 120 bp, Artificial Sequence
  ENSG00000226913_8 (sequence is synthesized)
acctgtctcctgcctacaaggctccttgaactctgcacccttctttttgctaaagtgctgctgaggcctgtctcacttcccaatgaaaagcaactcaggaaattggcttcctgccccact

SEQ ID NO: 917941 - DNA, 120 bp, Artificial Sequence
  ENSG00000226913_9 (sequence is synthesized)
ccttctttgggagagagaaacagaactgaagaggaaggaaggaagcccaaagaaacagaggctttctttcctggctgagatttgttggcactgcccactaacatagagaataaggtggtt

SEQ ID NO: 917942 - DNA, 120 bp, Artificial Sequence
  ENSG00000226913_10 (sequence is synthesized)
ccctaagcgagccttaagctggcatgaggctacaaacaagtgattgtatcttcgttctgctcagcagcctacctgggctggcctggacaacctcaattgtatactgaggtcttaagctgg

SEQ ID NO: 917943 - DNA, 120 bp, Artificial Sequence
  ENSG00000226913_11 (sequence is synthesized)
ccatggcccttggtaaagcaggagaaaggaataaggctggaaggtacagaatttgcttgatgccttgcctacataattcctttgctgttgcaactggcaactctttgcttgcattatatg

SEQ ID NO: 917944 - DNA, 120 bp, Artificial Sequence
  ENSG00000226913_12 (sequence is synthesized)
aaaaaaaggcggtaaaaaattgtcagaaatgtttgccaccagcctaaccccactgcccatgcattgctcccaagaaagctaattaaggcccattgctattagagttacatgattctgaag

SEQ ID NO: 917945 - DNA, 120 bp, Artificial Sequence
  ENSG00000226913_13 (sequence is synthesized)
atgattctgaaggcttgttatgacaagaaaaaataatgaagacatggttcctccaagtcataagcatccaagtcaaaacatactgcatcccaggcgagtgtggtggctcacgcctgtaat

SEQ ID NO: 917946 - DNA, 120 bp, Artificial Sequence
  ENSG00000226913_14 (sequence is synthesized)
aaaaaaaaagaaaaaaacatcctgcatcccttgttcctttgtgttcccctagacaagcctctgggctggctttgcctatctcatgcatgcaggcagtcatcctcctttggccagtgcata

SEQ ID NO: 917947 - DNA, 120 bp, Artificial Sequence
  ENSG00000226913_15 (sequence is synthesized)
cctgactcctactcagtgccaggcctggagaagactgtgagacctgcccttgaggagttctgtttgcaggaagagagtgataggcacacaaattatttccaataaactacagaaaatgtc

SEQ ID NO: 917948 - DNA, 120 bp, Artificial Sequence
  ENSG00000226913_16 (sequence is synthesized)
gaacaagtgtattcagagacgcaaggtcgtagagggaaggagagggagggtgctgggtggtcgggccggattgtgagggtctttaaggccagctggggagtggagcctttatccagatgg

SEQ ID NO: 917949 - DNA, 120 bp, Artificial Sequence
  ENSG00000226913_17 (sequence is synthesized)
cgatgggaaccatctgggattcacactgaggaactgggagtctcaggaagcgccccgggcacagatggaaggtgtgacagggctgtgtgaagccagctgggaggccacctcagtcagccc

SEQ ID NO: 917950 - DNA, 120 bp, Artificial Sequence
  ENSG00000226913_18 (sequence is synthesized)
tgggagagtgaccttggggatggaaaagaggacttgatggttctcaggcctggagctgtctcgatgcggggccgcaggttgcctctgcattaccctgagagctttccaaattacttcccc

SEQ ID NO: 917951 - DNA, 67 bp, Artificial Sequence
  ENSG00000226913_19 (sequence is synthesized)
agcaacaacaacaaaaagccatccagggccatgcacagtggctcactcagtttaagaccagcctggg

SEQ ID NO: 917952 - DNA, 120 bp, Artificial Sequence
  ENSG00000226917_0 (sequence is synthesized)
acagatgagtaaactgagggttagagcagtaatgtgactttcctaaagacagacacagctagctagtggcccagctgaggccacagccccgtcaccagacttgattagatctctgtcaac

SEQ ID NO: 917953 - DNA, 120 bp, Artificial Sequence
  ENSG00000226917_1 (sequence is synthesized)
cacatcccagcagccaaatgctccctccttttgccctcctgcggggccacgcagcacacaccacaaccccttggtccactgtggtctaggcaagagcagaagagtccaaaagcagatgac

SEQ ID NO: 917954 - DNA, 120 bp, Artificial Sequence
  ENSG00000226917_2 (sequence is synthesized)
tatcatcttccatttgtcttgggacagaagacccatattaggcactgtcttggtccagctgggatgccattctcccattctctcagaagtcagaagtcaagggtcagggcaccaccaagg

SEQ ID NO: 917955 - DNA, 120 bp, Artificial Sequence
  ENSG00000226917_3 (sequence is synthesized)
tcttcagggacagaagcccaggcaagaggacagatggagaggtgcctgaggacaccttcaaaccttctctgctccgttgtagaactttttccagcaagggggagaggaaggacaaaaggc

SEQ ID NO: 917956 - DNA, 120 bp, Artificial Sequence
  ENSG00000226917_4 (sequence is synthesized)
tatgccttgggctccaaagtttaggagaggagccatggagatggacagagagagatcccattgtctctggacactgctggccaagggcctccacctcaggagctgctgcctctcatccac

SEQ ID NO: 917957 - DNA, 120 bp, Artificial Sequence
  ENSG00000226917_5 (sequence is synthesized)
ctgccttctccaggcctaagggtcaagctgccaggccaccaggcagtgccagatggacaattcgaggctgagagagttacatgatttatccaaagtcacacacgtgcacaggtggtggag

SEQ ID NO: 917958 - DNA, 120 bp, Artificial Sequence
  ENSG00000226917_6 (sequence is synthesized)
ctgaggtgcagattcaggcttgacttcaaaaccagggctctcgctccaacagtaggctgcaacggcttgaaggacaatgatacttacagcatgcctactgtgtgcaaaatgccatgctga

SEQ ID NO: 917959 - DNA, 120 bp, Artificial Sequence
  ENSG00000226917_7 (sequence is synthesized)
aggctgtcagggcttgaaaggtgatgattcagcagaggatgctgtttgtgcctcaccccgtgtcctctagcccacttctccactcatctgccaccgtgatgggaaggtgtcagcaagccc

SEQ ID NO: 917960 - DNA, 120 bp, Artificial Sequence
  ENSG00000226917_8 (sequence is synthesized)
aggaattgtccaccctaagcagcctttctgcttctcacctgcagagtttctccagtgcagggaccaagagagctttactcagcccacaggacagctgggatttagcactgcaggggcaac

SEQ ID NO: 917961 - DNA, 120 bp, Artificial Sequence
  ENSG00000226917_9 (sequence is synthesized)
cctcaagttattaataagagataagaatgggtggataagcaacctggctgccttggaactccgtgggacaattccatggtgtgttctcacagttcctcagtgggcccccattgcccacaa

SEQ ID NO: 917962 - DNA, 120 bp, Artificial Sequence
  ENSG00000226917_10 (sequence is synthesized)
tgaaactcgatcattaaccactcttcactggcttttctcctaacccatccctatctcacttcccctttccctccctccagcctccagggatcacctcctcagtaaactacctgcacccaa

SEQ ID NO: 917963 - DNA, 120 bp, Artificial Sequence
  ENSG00000226917_11 (sequence is synthesized)
tggaagccggagaagaggctcacctgcccaaaggccttctgtccaaagttcaagggagccccacccctcccagatgctcagctcaccccacccccaacaggcagggctacagtgtggtgg

SEQ ID NO: 917964 - DNA, 120 bp, Artificial Sequence
  ENSG00000226917_12 (sequence is synthesized)
gcactgccacacccggacctgccacaacctcttggagtcagtgacaagaaccaaacgcaccccagcctccacccctcccctttcctgcttttattattttcttttccataaagattagtc

SEQ ID NO: 917965 - DNA, 120 bp, Artificial Sequence
  ENSG00000226917_13 (sequence is synthesized)
tgtgttgctcctctatcaaggcctggaggataaacatgtggtccggaggcagagaaaccccaggcctgaaggccccactgcccccaccccagcagcataaacccagggcttttaagcaag

SEQ ID NO: 917966 - DNA, 120 bp, Artificial Sequence
  ENSG00000226917_14 (sequence is synthesized)
tgcaatgacatctgcccctgctcaagtcctctgcccttgggaggtcccacgacaggccttggctccaaccttcagcacccaagaccccaggatggcccatactctcaggggcccctgccc

SEQ ID NO: 917967 - DNA, 120 bp, Artificial Sequence
  ENSG00000226917_15 (sequence is synthesized)
tggccctggcccactttcctggtcatgttctcttaggagtggcttctagctataaaagcccaggtcctggcacaggctaggtgccttctgactgttggttgatgcaggaatagacatgat

SEQ ID NO: 917968 - DNA, 120 bp, Artificial Sequence
  ENSG00000246731_0 (sequence is synthesized)
gggctgcttcttatttatgatcagatcaagggtataaggtgtcagtgggggcagccagcagtcataggccagagaggggcgactgcccgtcccaagggcttgtcacagggtaagtaaccg

SEQ ID NO: 917969 - DNA, 120 bp, Artificial Sequence
  ENSG00000246731_1 (sequence is synthesized)
acagactgggaaaggaaggaggcaatcttcagccactcggtcactcattctaaattcactctcattttttgggcatctattgtgcaagccctgtggacttaaaaagagaaataagacgcc

SEQ ID NO: 917970 - DNA, 120 bp, Artificial Sequence
  ENSG00000246731_2 (sequence is synthesized)
gtccctgccctcgggagctcccggcgcatctgccccaacaactcgctgaagccgcctgcaggacgcctgagtgaggacaaggtgtctcactcagaaaatttgcttgattcttcctggcaa

SEQ ID NO: 917971 - DNA, 120 bp, Artificial Sequence
  ENSG00000246731_3 (sequence is synthesized)
gtgggacagggtgagcttcccggaggaggggaccttcgagctgtgtagcggggaaggtaggagagcgatgagagcgcccggaagggacaagcattcggggagactgaagcgcattcaaca

SEQ ID NO: 917972 - DNA, 120 bp, Artificial Sequence
  ENSG00000246731_4 (sequence is synthesized)
acatatttattgagcacctactacgtccaggcactgttacatcggtgatgtaacaaaagccgacaaaaaccctcaccccgagcgcaggcaccgcagagggcgatgacgacccgagaagat

SEQ ID NO: 917973 - DNA, 120 bp, Artificial Sequence
  ENSG00000246731_5 (sequence is synthesized)
gccgaacgcaggccaggagggggctctggggaaaagcaaaggcaggggaggttgcccatcggggagcctcgcgtccctgggccctccgtactctgcacatatgcagaggcccccacccgt

SEQ ID NO: 917974 - DNA, 120 bp, Artificial Sequence
  ENSG00000246731_6 (sequence is synthesized)
cctgtaaccgcaaactgcttggcgtgacttggccagcggagggaggagcccaggctgcaggacaagcaggagtcagggtccctgcagttgctggggaaagtggactcttctggtagctgc

SEQ ID NO: 917975 - DNA, 120 bp, Artificial Sequence
  ENSG00000246731_7 (sequence is synthesized)
ttttacagcccctgccctcagaggccccccaggtgggaagggcctgcctcctaggcagtgggtggtcaccgaggactgactttgaacccggggcaagggagccccagaaggctggaggcc

SEQ ID NO: 917976 - DNA, 120 bp, Artificial Sequence
  ENSG00000246731_8 (sequence is synthesized)
tgcacacggcactggaagaaacaaactgcaaaggctgtccctcagggctatctccacagccaccggaatgcggcctggaatatccaaacctgtcagcccacctgcacccagccagacagc

SEQ ID NO: 917977 - DNA, 120 bp, Artificial Sequence
  ENSG00000246731_9 (sequence is synthesized)
gaccattctagctgcttccccggaggcctgctgacccagagaggtgtcaaaaagctgaagcacaacagacagacctcccacagactcagcagggagttggaggacagtcggcacaccagc

SEQ ID NO: 917978 - DNA, 120 bp, Artificial Sequence
  ENSG00000246731_10 (sequence is synthesized)
aacacacctatgccccagaccaccgcaatcgcaatctccagtcagccctggccaccacagtgaactgcctaagtgccccagatgactgagtcacaagccagggctgggaagcactgcatg

SEQ ID NO: 917979 - DNA, 120 bp, Artificial Sequence
  ENSG00000246731_11 (sequence is synthesized)
aaaggcggccttctctagacaaggctggacacacccctgcaaggcctgtctcctaggagctgggatgaaactctggacgatgtgctgggaacaaagaaaacccacatggtaaaggctcgc

SEQ ID NO: 917980 - DNA, 120 bp, Artificial Sequence
  ENSG00000246731_12 (sequence is synthesized)
ttttccttgggaatctgcaatgcttacagaacgggaaaggctgaaagccgcccacagtgccgcacctgggcctgagggctggtgtacccaccctctcccggaggaaacaagacccgtgac

SEQ ID NO: 917981 - DNA, 120 bp, Artificial Sequence
  ENSG00000246731_13 (sequence is synthesized)
cagactcaaaaccacctcacaccctcacaatccttacagaatattcaaagactggcacttcaaccttacaacctgagcacgtctaaatgcctaacacaataccaagcacactgtatgcca

SEQ ID NO: 917982 - DNA, 120 bp, Artificial Sequence
  ENSG00000246731_14 (sequence is synthesized)
cgcttttaaaaggtagagatcttaaaaaaacaaaaaacactacctcgggtatgaagacagattttatgatgccagtcatttccagaggggctgcccgctgtggcacagcaccacctggtg

SEQ ID NO: 917983 - DNA, 120 bp, Artificial Sequence
  ENSG00000246731_15 (sequence is synthesized)
gccaccccaacccatgcacctccccccatcccagtaccctgacagcaagccaatgaaagaggtgttaatatggctattttccaactgaggaaacaggcaaaagtgtagtcatttctccaa

SEQ ID NO: 917984 - DNA, 120 bp, Artificial Sequence
  ENSG00000246731_16 (sequence is synthesized)
gtcagtcaagttagcgagtggtagatgtgctataccttgttgcacccattttgggacctgtttgaatggcatgccccaccatcgctcccacatctgccagttatgtttaaccccacgtgc

SEQ ID NO: 917985 - DNA, 120 bp, Artificial Sequence
  ENSG00000246731_17 (sequence is synthesized)
tatttccatcatggcctccccacatcttattttcaaacaggctgaaaacagatggcctcatttgccgactgagatcatgctcaagattagggatgcaccgggcacggaggctcatgcctg

SEQ ID NO: 917986 - DNA, 77 bp, Artificial Sequence
  ENSG00000246731_18 (sequence is synthesized)
cctgtctctactacaaatacaaaaattggccaggcgtggtgatgtcgcttgaacccaggaggcggaggtggtagtga

SEQ ID NO: 917987 - DNA, 120 bp, Artificial Sequence
  ENSG00000246731_19 (sequence is synthesized)
aggacagtcgcttgaacccaggaggcggaggtggtagtgagctgatatcgcaccactgtgctccaggatgagccacagagcaagactccgtctcaaagaaagaaaaaaaaaaaaaaaaaa

SEQ ID NO: 917988 - DNA, 120 bp, Artificial Sequence
  ENSG00000246731_20 (sequence is synthesized)
ggtcgcggcagattgggcgtggaaaccgcgctgggcagccagcctgaggggtgcgtatccaccgcggcagggacgcggtccctgcagttgctggggaaagtggactcttctggtagctgc

SEQ ID NO: 917989 - DNA, 120 bp, Artificial Sequence
  ENSG00000246731_21 (sequence is synthesized)
tttatgatcagatcaagggtataaggtgtcagtgggggcagccagcagtcataggccagagaggggcgactgcccgtcccaagggcttgtcacaggccctgtggacttaaaaagagaaat

SEQ ID NO: 917990 - DNA, 120 bp, Artificial Sequence
  ENSG00000264630_0 (sequence is synthesized)
atggacagggtagatctcagacagacaatccacagtgaggtttctggcacccggggtgtgcagtccacacacaggaacaggatgtttccagcaggaggaggaagcacaaggttacacagg

SEQ ID NO: 917991 - DNA, 120 bp, Artificial Sequence
  ENSG00000264630_1 (sequence is synthesized)
cttcagagtcaggctgccagggatcaaatcccagcacctcctttttcctgtgatggggcttgttcaacttctttgatatctctaaactagggataacaacagcacccgcttgagactatt

SEQ ID NO: 917992 - DNA, 120 bp, Artificial Sequence
  ENSG00000264630_2 (sequence is synthesized)
gggtggattgactgaactcatctatgtaaaatgcccagcacacaataagcttcatcagctgttataattaaggtcagtccttgaaaaggcttagtggagtttgggcaggtggctacacgg

SEQ ID NO: 917993 - DNA, 120 bp, Artificial Sequence
  ENSG00000264630_3 (sequence is synthesized)
tgggagaggatccagctgtgcctgtcagtccccagctgccggccacatggatgctccccactcccctagccacctctgcctgtgtacgcttctgacactacgctgcctctgcttccctct

SEQ ID NO: 917994 - DNA, 120 bp, Artificial Sequence
  ENSG00000264630_4 (sequence is synthesized)
ccctgttccagcacgtcgggcacacacgtggagttgcactaatgccattccgctgcagctttctgcatggcccacacccatcttttcctgggtgtccactctcagccagtcaggatggtg

SEQ ID NO: 917995 - DNA, 120 bp, Artificial Sequence
  ENSG00000264630_5 (sequence is synthesized)
gttgcccatcctgcaggggtccaggacctgtagcctgtgtgatagacaccagcagcagctagtctatcagccacctcagtagaggcaggtgacaacagtgcaggctctttcatgatggta

SEQ ID NO: 917996 - DNA, 120 bp, Artificial Sequence
  ENSG00000264630_6 (sequence is synthesized)
gactttggaattagttacagatgagtaagagaaacccatagtgagggagggggtcttaccggttcattcatccatttaaccaccatttacagaatgcccactgtgtgccagtcagtatcc

SEQ ID NO: 917997 - DNA, 120 bp, Artificial Sequence
  ENSG00000264630_7 (sequence is synthesized)
agaattcccaaagaggcacctaacgaatgggaatgcatgcagcctgacagtgtgggtggcttgtcacttacagcagcctcctgcccaggtttctttaagcctttcaaggactgaccttaa

SEQ ID NO: 917998 - DNA, 120 bp, Artificial Sequence
  ENSG00000264630_8 (sequence is synthesized)
gtttgagcaggcactgttgttatccccatttcacagatgaggaagcagacgcaaaaaaggcaaccaggcaaagtccctatcgcccaacctacccagaaaccaacagaccccagggcactt

SEQ ID NO: 917999 - DNA, 120 bp, Artificial Sequence
  ENSG00000264630_9 (sequence is synthesized)
cgagctggaaagggctagaaagcttaccacttttttttctttgaagctgaacacttctttgaacgctttctctaacatcgatttaaggatatctttgatctttgtggaaacaaagaagaa

SEQ ID NO: 918000 - DNA, 120 bp, Artificial Sequence
  ENSG00000264630_10 (sequence is synthesized)
tgctttaagactgcgcttagaaatctggccgtttggttttaaggtcattggcctctgcctaccgtgctcctgaatgaatagctcaggacttccagggctacctttgggccaaaagttaat

SEQ ID NO: 918001 - DNA, 120 bp, Artificial Sequence
  ENSG00000264630_11 (sequence is synthesized)
aatttacagctgagcaagtgtaggtaaactgccactttacagcaagcttctaatccctcactgatcactttgaaaattacaaaggacattcacttcaagtgtgagccaattcagaatcaa

SEQ ID NO: 918002 - DNA, 120 bp, Artificial Sequence
  ENSG00000264630_12 (sequence is synthesized)
cctcatgctaatttgatataagctgttcactgagggaaaaagtccaaaggaggttctaacttattttctaaatggacatcgtatcaaaattaaaaattcaatgacagcatcttttagctc

SEQ ID NO: 918003 - DNA, 120 bp, Artificial Sequence
  ENSG00000264630_13 (sequence is synthesized)
aatcatagttaagtatataatactgctgaatttaaagtcagcagagattatctagactttactatgaaatatagacaagctgtgcttttaaaaggtttatttaaattactgattataaaa

SEQ ID NO: 918004 - DNA, 120 bp, Artificial Sequence
  ENSG00000264630_14 (sequence is synthesized)
gtaatccaagcccatttgtgaaaatttggaaaatgtggaagagtataaagaaaaaaaaaactactcattctatgagcaccgagagataaacgttatcatgttggcgcacttccttctggc

SEQ ID NO: 918005 - DNA, 120 bp, Artificial Sequence
  ENSG00000264630_15 (sequence is synthesized)
ctttttctccagatcagaggaagaggaagggtggtgtatcttcatgaaactactaacccaaacccagaacacagccatctcgctactaaagtctcagagatattgagcttggacttcgac

SEQ ID NO: 918006 - DNA, 120 bp, Artificial Sequence
  ENSG00000264630_16 (sequence is synthesized)
catgggttctggagtccattcaattcccagccttggccattcctggctgtgtaatttcaaggaaattacctaaacactctgagttttgattctatcgtcaataaaatgaaggaaatgcta

SEQ ID NO: 918007 - DNA, 120 bp, Artificial Sequence
  ENSG00000264630_17 (sequence is synthesized)
ccagatcagaggaagaggaagggtggtgtatcttcatgaaactactaacccaaacccagaacacagccatctcgctactaaagcacccaggaattgtagttttctgtgcaacagagattg

SEQ ID NO: 918008 - DNA, 120 bp, Artificial Sequence
  ENSG00000264630_18 (sequence is synthesized)
gggagctaaggctgaggattcagggtgaataacaagtctggtgcttgtctgcagaacagccagctgacttttgaagttgattcctccaacatgatgaagcgtatgtagctcaggaaaaac

SEQ ID NO: 918009 - DNA, 120 bp, Artificial Sequence
  ENSG00000264630_19 (sequence is synthesized)
tcatatagcataagcaaagggctcttccctggactatgtctcatttactatttgaataaacaaaattcaacaacctgaacaataaataaaataaaaagggaatctgctggatccactgaa

SEQ ID NO: 918010 - DNA, 120 bp, Artificial Sequence
  ENSG00000264630_20 (sequence is synthesized)
aagtaatgcttacttattcaaatttattatgccccatttccccatgcattacatttaaacctctgattttttaaaagaataacatcattattgaaaactaatgttatgcttcaaagctct

SEQ ID NO: 918011 - DNA, 120 bp, Artificial Sequence
  ENSG00000264630_21 (sequence is synthesized)
attacttgaactgttcataaatggatttatggctactgctgagttctgtgaaagactgtattgtatgccttctccttcagtttcaccaagactattaataaagatatccctacatcaaca

SEQ ID NO: 918012 - DNA, 120 bp, Artificial Sequence
  ENSG00000205913_0 (sequence is synthesized)
atccagcccctccaggttgactcaagtcagagtgtgtgggggccagtcatggaacagagggagcctcctgcccagggcaagcgtggggagaccaccaggggccccagacaggtgagccgc

SEQ ID NO: 918013 - DNA, 120 bp, Artificial Sequence
  ENSG00000205913_1 (sequence is synthesized)
tccagcagggacagcacaggtggtgcatggtcggggctggacatcggggttagtcggcaaggatgaggagtctctggggatggaggctgaggcttggggttctcaggcaagggcaggcct

SEQ ID NO: 918014 - DNA, 120 bp, Artificial Sequence
  ENSG00000205913_2 (sequence is synthesized)
aggtgcagcagagaattgtttggagggaggaaatcaagctttccttctagaaagggtgacagggaccaaagggagagggcagggacagcccctggaaagggcaggtgaggaaggtgaggc

SEQ ID NO: 918015 - DNA, 120 bp, Artificial Sequence
  ENSG00000205913_3 (sequence is synthesized)
tggaggggacccaagaagggatcctggggaggtagtggccaagagcagggtgagggccaggccgcacctttcgctgtacccagctctccctggggtggccctggccctgctctgctgtcc

SEQ ID NO: 918016 - DNA, 120 bp, Artificial Sequence
  ENSG00000205913_4 (sequence is synthesized)
cctgcaggacaggtgcctcaggcttgtcccagcttgtcctacagcaggtcctcagcacccacaggtcctgccttgggctctgcagaagcagggagtggtgaggtcaggaccctgggccac

SEQ ID NO: 918017 - DNA, 120 bp, Artificial Sequence
  ENSG00000205913_5 (sequence is synthesized)
agaagaaatggtctgggggacaaggacgggggttgggggactgacagctgttttctgaaggcccggggagtggaggagaggggtgaggggccaaggcttggggctcagtatgggggcagc

SEQ ID NO: 918018 - DNA, 120 bp, Artificial Sequence
  ENSG00000205913_6 (sequence is synthesized)
tgcagggggtgagggggccagtggggccagtgaagagggcctagggtctggtatctgcagcaggcactcacagaggacagactgtttgcaaggtaggtcaggtgacagggagccaggggg

SEQ ID NO: 918019 - DNA, 120 bp, Artificial Sequence
  ENSG00000205913_7 (sequence is synthesized)
gctgaggaggctcagggcctgactccagggagagcagttgccatcccccaggtccagaggggccctgggaggagtccaggcagggctgaagctggaagaagtaagaggggctggcactca

SEQ ID NO: 918020 - DNA, 120 bp, Artificial Sequence
  ENSG00000205913_8 (sequence is synthesized)
aggactgcagccactggccaggtggggccaggtcggaccggctgccttccctggtctcagccccagccttctgtggctgcctcccccatcggagccatcagagagcaggatgtgggaggg

SEQ ID NO: 918021 - DNA, 120 bp, Artificial Sequence
  ENSG00000205913_9 (sequence is synthesized)
gcaggtgaaggacagcctctgtgatagtccctggtgtgctgcagcctggggtgaggggccttggggatgggaagggctgggagctgggagacgatggctcccagcacttggtcctgaggg

SEQ ID NO: 918022 - DNA, 120 bp, Artificial Sequence
  ENSG00000205913_10 (sequence is synthesized)
gccttggagcagcttcccccaggcctgcagaggcaacttctgacactcggggagctgaggccaagggaaggctccccagacacaaggagaaggggctgggggcagccagaaggctttggg

SEQ ID NO: 918023 - DNA, 120 bp, Artificial Sequence
  ENSG00000205913_11 (sequence is synthesized)
ctaccctccctggaggctcaggtcccaggtgacccctccagctgtgttccttccaagattgggacctgcaaagattgcagatgtgaggaaaggaaggtgtcttgggcattcttcccagtg

SEQ ID NO: 918024 - DNA, 120 bp, Artificial Sequence
  ENSG00000205913_12 (sequence is synthesized)
tggctgagctgtgcctgtgaggacatgcagacactcagaggacctgtcctcaggggccccagggtgaaggtcaagatctcaccttacaaccagccgggccctgactacttccagccacca

SEQ ID NO: 918025 - DNA, 120 bp, Artificial Sequence
  ENSG00000205913_13 (sequence is synthesized)
ggcccccaggacaggagcaggacagtggttatttccccagtggacggggggctccaggtcacataagaataacatgccctgtgacaaggcgtggggatgaaaatgcttccccctgggctg

SEQ ID NO: 918026 - DNA, 120 bp, Artificial Sequence
  ENSG00000205913_14 (sequence is synthesized)
tagagctctcagggaacctggagggcccctcagcctctgttcccctactggggagaacagaggcctggtggtagcaatttcagggaactcagagaaacactgttccccagaccttggagc

SEQ ID NO: 918027 - DNA, 120 bp, Artificial Sequence
  ENSG00000205913_15 (sequence is synthesized)
tccctctgtgcctggctctcactgtgaggccccccaccagctggtcctgctcagggagcctccacgtgtccccctggttcctccggccagcctaggggtggagggtgcggtccccatggc

SEQ ID NO: 918028 - DNA, 120 bp, Artificial Sequence
  ENSG00000205913_16 (sequence is synthesized)
ctgtaggaagtagggctcagaggggcaaagtcaccgccctgaggtcaccaggaggtcccggcagagggggttggggcctggctcagggcctgttctccctgctgagctcagtgggatggg

SEQ ID NO: 918029 - DNA, 120 bp, Artificial Sequence
  ENSG00000205913_17 (sequence is synthesized)
gccatctcaagggtcccactgtttttctctggtctctgccccagcatgtggtgggaccttgatttccatactctcatgtcaccagtctgttggggggcagaggttatggggtcactgata

SEQ ID NO: 918030 - DNA, 120 bp, Artificial Sequence
  ENSG00000205913_18 (sequence is synthesized)
tcacctggctcattcctcccccatccaggctgtcccatgagaatgtctaatctgtatgtcatcggagtcaataatgtgttttgctatcgctctggttccagggatattgctcagccaaag

SEQ ID NO: 918031 - DNA, 120 bp, Artificial Sequence
  ENSG00000205913_19 (sequence is synthesized)
ggccagcatcccagtgaagaagatcagaaagaggcttccggtcaccaggagactcctggggagggcctaggctgggagtgggacacgggtggggttggatggaagagtaccaggtgggcc

SEQ ID NO: 918032 - DNA, 120 bp, Artificial Sequence
  ENSG00000205913_20 (sequence is synthesized)
taggatggatggaggaggctgtgtccccagctacaggcctggagatgttacgggacccaacaggcccccagcctccatccccgtgctgggttctcaggtttagtgggggcagtgcctggg

SEQ ID NO: 918033 - DNA, 120 bp, Artificial Sequence
  ENSG00000205913_21 (sequence is synthesized)
gactcagagggaccctgaccccagagcttggagacccctctggagcatgcctggctctcactgtgaggcccgcaccagccagtcctgctctgagagcctcctcgtgtccccctggcttgt

SEQ ID NO: 918034 - DNA, 120 bp, Artificial Sequence
  ENSG00000205913_22 (sequence is synthesized)
cctgccagcctgggggtggagggtgtggtccccatggcttgtgggagggagggcccagaggggcaaagtcaccaccctgaggccaccaggagatccctacagagggcagagtgggttggg

SEQ ID NO: 918035 - DNA, 120 bp, Artificial Sequence
  ENSG00000205913_23 (sequence is synthesized)
gcctgccttagggtctgttccccttgagctcggtgggacagggccatctcgagggtcccagtgtttttttctggtccctgccccagtgtttaatgggacacagcccctcacatccccagt

SEQ ID NO: 918036 - DNA, 120 bp, Artificial Sequence
  ENSG00000205913_24 (sequence is synthesized)
ctgtggggggcagaggtcatgggtcactgacatcccctggctcattcctcccacattcacccaacagaccccttatcctccatccccctgctgagactggggattggctcagggcctgtt

SEQ ID NO: 918037 - DNA, 120 bp, Artificial Sequence
  ENSG00000205913_25 (sequence is synthesized)
ctccccactgagtttggtgggatggggccatcttgagggtctgggtgtttttctcaggtgggacctagatccccacagtccctcacgtgcccaatctgtggggtgggcatggggtcacca

SEQ ID NO: 918038 - DNA, 120 bp, Artificial Sequence
  ENSG00000205913_26 (sequence is synthesized)
aggtcacctggttcattcttcccccatccagattccgtctctagagcctttgaggtcactcctgacgctgacatggctgtgaagagctgggtgccaggcattactgcctccaaggttgct

SEQ ID NO: 918039 - DNA, 120 bp, Artificial Sequence
  ENSG00000205913_27 (sequence is synthesized)
ttgcgaggaataggtggggcatcaggaagaagccagttgcaggcaaggcctctgctgatgctgcttttttctcctgtacccatccatgggagggagctgtgagatggcctggcagaaccc

SEQ ID NO: 918040 - DNA, 120 bp, Artificial Sequence
  ENSG00000205913_28 (sequence is synthesized)
gctcttggaccccacagaatgagaggctcaccctgcacaggaacatcctggggcagcaggctcagcacattttaaattttgagtatgaacaaagtaaacttcagggttaaaaaaaaacac

SEQ ID NO: 918041 - DNA, 120 bp, Artificial Sequence
  ENSG00000205913_29 (sequence is synthesized)
aatgactgatgatgctgagaatcttttgatgtgcttgttggccgtttgtacatctttggagaaatttctcttcgtgtcttttgtctattttatttttttgggacagagtctcactcctaa

SEQ ID NO: 918042 - DNA, 80 bp, Artificial Sequence
  ENSG00000205913_30 (sequence is synthesized)
ttgtctattttatttttttgggacagagtctcactcctaaccccgggctggagtgcagtggcacgatctccacgcactac

SEQ ID NO: 918043 - DNA, 73 bp, Artificial Sequence
  ENSG00000205913_31 (sequence is synthesized)
gcgcacgccaccacccagctcatttttttatttttagtagaggtggagttttttgtagagattgtgtcctccc

SEQ ID NO: 918044 - DNA, 120 bp, Artificial Sequence
  ENSG00000205913_32 (sequence is synthesized)
atggcacccagccctagaatgattttttagtttccctttaaactttatttttttattcactgtagtgtggtggacggtggtgccccaaaacttcacaaccacctagacattcggaaggtg

SEQ ID NO: 918045 - DNA, 120 bp, Artificial Sequence
  ENSG00000205913_33 (sequence is synthesized)
accttatttggaataagagattttgcagatgtaattgagttaaagatctgaagatgaaatcatcatgaatttagggtaggccgtaaatccaatgactgacatccttacaagaagacaaga

SEQ ID NO: 918046 - DNA, 120 bp, Artificial Sequence
  ENSG00000205913_34 (sequence is synthesized)
ggacacaggcacccgggggaagaggccgtaggagacccaggcagagattcggagcggtgcccatgccagggatctccaggaggagccagaagctgggagaggccctgcagatcctctccc

SEQ ID NO: 918047 - DNA, 120 bp, Artificial Sequence
  ENSG00000205913_35 (sequence is synthesized)
agagcctttggaggaggcacaaccctgtccacaccttggtctccactttctggcctccagagctgtaggggaacccacttctgtggtttgaagccaccaagttcgtggtgacttatggca

SEQ ID NO: 918048 - DNA, 120 bp, Artificial Sequence
  ENSG00000205913_36 (sequence is synthesized)
gacagccatggctgacatcctagcggctgtcacctcggagtgatgttcctaaaatgcaaacttctgaactgcttaaaactcttccagacaccctcaggttgacatcacaactcctttgtt

SEQ ID NO: 918049 - DNA, 120 bp, Artificial Sequence
  ENSG00000205913_37 (sequence is synthesized)
gggccttccaaggctggtccttcccgtggcctcttttccctccgctctgtgacagtccatgacgggcacacttgcctatgcttgttctcccaggcagtggccttgtgtgggccttcagct

SEQ ID NO: 918050 - DNA, 120 bp, Artificial Sequence
  ENSG00000205913_38 (sequence is synthesized)
tccagttccatggcctggtggaggaccctgtggtgcaagccttcctccagacccccctggcctggggcccaagactgggaagcctttgaagatttcagtttgtaagtagtgagagcaatg

SEQ ID NO: 918051 - DNA, 120 bp, Artificial Sequence
  ENSG00000205913_39 (sequence is synthesized)
atcttggctttgcatggtgctcaggaagccttccccgctcccaaaccagaaaggaatccatccagattttcctccactgtctggatggccgctctgtggatgcttccatctgtatccatt

SEQ ID NO: 918052 - DNA, 120 bp, Artificial Sequence
  ENSG00000205913_40 (sequence is synthesized)
ggggcctgccgggaactggagtgcgccccgcggccttttgcgcaggcgccgaagccacaccgcgaagtaccgttttttcaggcacaaggaaggtttcaccccgttgccgaaagactaagc

SEQ ID NO: 918053 - DNA, 120 bp, Artificial Sequence
  ENSG00000205913_41 (sequence is synthesized)
tggccagtgcaacgaagaacggaggaagcgacgtaagacaccgcgtattcgtaggccttccgctgcggggaggagcacagggcctagcggcagcaaagcgacgcccgagcgcgtctcgtc

SEQ ID NO: 918054 - DNA, 120 bp, Artificial Sequence
  ENSG00000205913_42 (sequence is synthesized)
tcccgctgtcgatgcagagcattctgggagttgtggttcgggcgtgtcgcggagcccggatgtaatttcggctcggggcgtggcggccattttgtctccccatgttgggagacgatatcc

SEQ ID NO: 918055 - DNA, 120 bp, Artificial Sequence
  ENSG00000205913_43 (sequence is synthesized)
cagccgcggtggtgctgccgctttcgtgtgactttgggtttcccgagcgagcccgcagctgcacagcagtccgccttcccgtacccgagagaagccgcctcagaccccagccagcgggca

SEQ ID NO: 918056 - DNA, 120 bp, Artificial Sequence
  ENSG00000205913_44 (sequence is synthesized)
cccccggaggccccgagcctggctgcaggccctagacctgcaccaggggcccaaccagttacccgtagcatgggccacgttctcccgctgtagaccgggctgaggcccgacggccacccc

SEQ ID NO: 918057 - DNA, 120 bp, Artificial Sequence
  ENSG00000205913_45 (sequence is synthesized)
cagccaggccggggtcccaccagacccaggacgtgataccggtgaagcggcacatacaggaacaaggcaggaggaaaataataagcaccttaaagtttccacttttcgaagatttcagtt

SEQ ID NO: 918058 - DNA, 120 bp, Artificial Sequence
  ENSG00000205913_46 (sequence is synthesized)
cacaaggaaggtttcaccccgttgccgaaagactaagcgtcccgttggccagtgcaacgaagaacggaggaagcgactgtggtggacggtggtgccccaaaacttcacaaccacctagac

SEQ ID NO: 918059 - DNA, 61 bp, Artificial Sequence
  ENSG00000205913_47 (sequence is synthesized)
caggaagatttcagtttgtaagtagtgagagcaatgatcttggctttgcatggtgctcagg

SEQ ID NO: 918060 - DNA, 120 bp, Artificial Sequence
  ENSG00000205913_48 (sequence is synthesized)
ggagagggctgcagaccctgaggcaggggttggtgcaggggctggacctgaaactgggttcacacaacaagctcggactcctcttaacactcctgattggtgacattatggggtcttgga

SEQ ID NO: 918061 - DNA, 120 bp, Artificial Sequence
  ENSG00000205913_49 (sequence is synthesized)
tgcctcctcctctctgtccctcgtactgcccctgccacctgggactccaccaagttccttctccaccagccatgaggagagcctgcccaggggccagcactctctccctgagccttagaa

SEQ ID NO: 918062 - DNA, 120 bp, Artificial Sequence
  ENSG00000261146_0 (sequence is synthesized)
ggtttgaataagggttgctggacgctgttttcctattgacaaatccttctgttctgcaggtacacaggggtgggatggctggaggatggggaagggagaggatccaaaggcactaagaac

SEQ ID NO: 918063 - DNA, 120 bp, Artificial Sequence
  ENSG00000261146_1 (sequence is synthesized)
tgtcttggcctttctacaataaatttcccagcatgacacagaagcacagttacacacttgcacacacaccactgagcctcccaagtgttgaaatactacatccaggcatatattaaacta

SEQ ID NO: 918064 - DNA, 120 bp, Artificial Sequence
  ENSG00000261146_2 (sequence is synthesized)
acaaatttaaaaagaaactaccatgtccagcaatactctaatcatccaaagtagtaatagtaaaggtaactgatgctaatgtctattaatgccccaaaacatttaaaaactcaagaagaa

SEQ ID NO: 918065 - DNA, 120 bp, Artificial Sequence
  ENSG00000261146_3 (sequence is synthesized)
aaagaaatctaccctgataaatatgaatatatgtttttaatttatgcttttctttatttttaatttatgcttttcttgaaaaattattgtcttccaatgattaattcttttgagtcaggg

SEQ ID NO: 918066 - DNA, 120 bp, Artificial Sequence
  ENSG00000261146_4 (sequence is synthesized)
tgatgtatggttttgccctgaaactttctttctaaaagaaatccctagtctcagtttgctttctaaacaaatgacaggagaaaccataggaaaatgtaattcaaaatcaaaaaggctcat

SEQ ID NO: 918067 - DNA, 120 bp, Artificial Sequence
  ENSG00000261146_5 (sequence is synthesized)
aagtttcactttctgaaaaagttgccagcacctggatatataaaattatactatttctacaaacacaatccttgaattggaagctggcccagatttctacttccccagattcctacattc

SEQ ID NO: 918068 - DNA, 120 bp, Artificial Sequence
  ENSG00000261146_6 (sequence is synthesized)
cctgtgcaaccctcttcaatcctgggcttggtgtctttttggcttttcaccagtattcaaaacgttcccctagttcaggctctgcagccagctgtccaggaggctccctgatggttgcat

SEQ ID NO: 918069 - DNA, 120 bp, Artificial Sequence
  ENSG00000261146_7 (sequence is synthesized)
taacatcctggggcaatactgccgtcgtgtgggcatgtaaaatgctgcaggttcatcccaaagtgaagttgcattttcccaactacaggcacaaatgagtcttctctctgctctttcact

SEQ ID NO: 918070 - DNA, 120 bp, Artificial Sequence
  ENSG00000261146_8 (sequence is synthesized)
tctaggttaatgggactcctgggtgactgaagatgtcaagagggttttgggtagacaatttgtagtgcctgtttgtcctgtctctgagatcttgaataaactttgggaacctattgggtg

SEQ ID NO: 918071 - DNA, 120 bp, Artificial Sequence
  ENSG00000261146_9 (sequence is synthesized)
agagttgttggaaatgtaaatttacaagatgcattcttaatatatcagacctaattaaaaattttgccaataaaacaatgtggcaaccctgtaccatgtgtgatggcatgcttgtgactt

SEQ ID NO: 918072 - DNA, 120 bp, Artificial Sequence
  ENSG00000261146_10 (sequence is synthesized)
gatttatccttgtaaaaatgactttactggatatgtggtcaccagacctaatggcctctgtgatttaattttttaaatatgggaaatatctttgctgccgaaactcactaacatcttttt

SEQ ID NO: 918073 - DNA, 120 bp, Artificial Sequence
  ENSG00000261146_11 (sequence is synthesized)
gaactttacgggaattgatgtttccagctgaaagatggatttagagtttgggacagaaaacacagtgatgctaaaaaccaaaagttatttggaaaaaacatttgaatcagcaccgaaatg

SEQ ID NO: 918074 - DNA, 120 bp, Artificial Sequence
  ENSG00000261146_12 (sequence is synthesized)
atgtagtttagcaaaaacattaacaataaaacattacctttcttgtcataagactattttcttttttacaaacagcttataaactttctctgtgatgaaccttcgtatacagttcagctg

SEQ ID NO: 918075 - DNA, 120 bp, Artificial Sequence
  ENSG00000261146_13 (sequence is synthesized)
aagactataagcctgttagagtcccttgggaagaagaaacctatgcatctaggttgttcctaaaaaagctgttgttcaactaagacatgctgtccttacagtgctgtcaccgccagaaat

SEQ ID NO: 918076 - DNA, 120 bp, Artificial Sequence
  ENSG00000261146_14 (sequence is synthesized)
aatctttaattctgtcttcttggtgtgaattctcaactagtaaaactctatattgaaatgcaaattagctcttccgagtacaagcttgtaaaaatgtcaaaacacctcacaaaaattcta

SEQ ID NO: 918077 - DNA, 120 bp, Artificial Sequence
  ENSG00000261146_15 (sequence is synthesized)
attgccacataattaggtatctaaacaaaagttctatgctgatattttaattttgcttcattgcaataatgtacattcaataatgggcccaactaggacaaggtgataagttagggaaga

SEQ ID NO: 918078 - DNA, 120 bp, Artificial Sequence
  ENSG00000261146_16 (sequence is synthesized)
aagtagctaatagcaccaaataaggatgcccctgaacccagagcctggcagaaaatagaatggacttccagagaaacatcatggggcctagggaaataaacaccgcttagggagaattag

SEQ ID NO: 918079 - DNA, 120 bp, Artificial Sequence
  ENSG00000261146_17 (sequence is synthesized)
attagccagagtacaacaaacttccattacaagctggaatttcttttagaaggaatacatgaaagtgtgtctttataaagaggtggtatcctggagtgagcactaaatcagtctaatgcc

SEQ ID NO: 918080 - DNA, 120 bp, Artificial Sequence
  ENSG00000261146_18 (sequence is synthesized)
ttcaatcttcttgatttccccctacagaactgtacttcttattaatgtttgtaatgaccacctgtggcactgtaggatgctgaattaccaaagaaagattaaattatgtcctattgatga

SEQ ID NO: 918081 - DNA, 120 bp, Artificial Sequence
  ENSG00000261146_19 (sequence is synthesized)
catgttacagaatgatatttgacaaatgtagaaatgataagggttatctgatctgtctgaaattaatcagaagcttcagttaagtagaactccagttctgataacattccattattatta

SEQ ID NO: 918082 - DNA, 120 bp, Artificial Sequence
  ENSG00000261146_20 (sequence is synthesized)
tcatcattattattgttactattaagaattatagccccttttcaactcatcactacctttattgtggaatcacctgtgttcaatgtacctatattttagaaggacaacggggcaccaaag

SEQ ID NO: 918083 - DNA, 120 bp, Artificial Sequence
  ENSG00000261146_21 (sequence is synthesized)
ttgctagcctgatcctataattgccatcttcatctttcagtatggaatatattatatttacattaaaaattatcccttacaagatccctttgaacaatttttcaaatatatgtttaaaga

SEQ ID NO: 918084 - DNA, 120 bp, Artificial Sequence
  ENSG00000261146_22 (sequence is synthesized)
caagtacattaatttcaagaaaatttcttatgagattagaggatgtaatgttagtatgatctactaataacctagtaactatcatttattgattacctacaaagtcacttgtgttttata

SEQ ID NO: 918085 - DNA, 120 bp, Artificial Sequence
  ENSG00000261146_23 (sequence is synthesized)
ttcattatctctaatttttaaggtacccctgcaaggttggcagtattatcttcactgtccagaagaagaaatagtttcaagaggctaagtaatcacagtaagatcatatggtcaataagt

SEQ ID NO: 918086 - DNA, 120 bp, Artificial Sequence
  ENSG00000261146_24 (sequence is synthesized)
gcaaaaacaagactcaagcctcactgggttttaatggaagaaccatgtggtgtttgagtagaaaaatctattccctctcctctctctctccctctctctctctcttttcccagtgataaa

SEQ ID NO: 918087 - DNA, 120 bp, Artificial Sequence
  ENSG00000261146_25 (sequence is synthesized)
cagtaggaagtgggattagtctgtgttgaaccctattacttcagcccacattcattgctcatctttccactatttttagtttttccttctgttctggactcttcctttcttccttcaaat

SEQ ID NO: 918088 - DNA, 120 bp, Artificial Sequence
  ENSG00000261146_26 (sequence is synthesized)
agaaaaaggtcacacctctatttaaaacatcacagaacacccatatttttgctcttctatcaacttaccagtctaaatcttttttattttcagctaaacttattagatgaatgtcataat

SEQ ID NO: 918089 - DNA, 120 bp, Artificial Sequence
  ENSG00000261146_27 (sequence is synthesized)
tgccccattttcactttgctttcactctcatggccaccactggaatgaagctgttcttcagacttacttatgacatctgctccagtttcaaaggctgtctccaagtcctgactttctgaa

SEQ ID NO: 918090 - DNA, 120 bp, Artificial Sequence
  ENSG00000261146_28 (sequence is synthesized)
attctctgcagcatctgacacaattaatctcatccaccctcacctactgccagtaaaaatactggcagctgacacacatggaacagcgacttggtgctaggctctgggttaagcacttta

SEQ ID NO: 918091 - DNA, 120 bp, Artificial Sequence
  ENSG00000261146_29 (sequence is synthesized)
tatgcattatctcatttaatccccacaacatccctgtgaggttggcactgttatgggtccccattttacagatgaggaaactgagtctcggggggtaaagtaacttgaccagtattacac

SEQ ID NO: 918092 - DNA, 120 bp, Artificial Sequence
  ENSG00000261146_30 (sequence is synthesized)
aagcaaaaacatggtgaagatagctgttgatccaatatgctgtgctatctttaaaattatttagccagtcttttactatctgctgggcacaaagccaagttcattagaggtattatctga

SEQ ID NO: 918093 - DNA, 120 bp, Artificial Sequence
  ENSG00000261146_31 (sequence is synthesized)
ttattttgtgttatattttctcctattatacctaactctaggtctattgcaagatcaagtttgtgatcctctgcctatttctcctcttgactacttcaaattccaagtattttttagaag

SEQ ID NO: 918094 - DNA, 120 bp, Artificial Sequence
  ENSG00000261146_32 (sequence is synthesized)
attttaacttgcatcaaataattattgatgtacaggtcatggtggcagggctctggacataggaaagtgaacaaggtaggcttgctgcctgcttgaagttgacaacatagtggatagaaa

SEQ ID NO: 918095 - DNA, 120 bp, Artificial Sequence
  ENSG00000261146_33 (sequence is synthesized)
gtgagacagagaagccacaaatcattacctgagccaatcagtggcccactgagaacactccttccaggtcatgaaatttcaagtgaagtggcacaccagctcacccacctacttcccacc

SEQ ID NO: 918096 - DNA, 120 bp, Artificial Sequence
  ENSG00000261146_34 (sequence is synthesized)
ccgaccccagaatccccttcctggaaaccttgtgctacctccaaagccaaactctcaaataaaccccagcaccttccagagatgccgtttcagtggtggggtttgaggtgagtactctgg

SEQ ID NO: 918097 - DNA, 120 bp, Artificial Sequence
  ENSG00000261146_35 (sequence is synthesized)
gacccagcctgggtttcacagaactaggagactatctgccctgggctggccccaaggccagtgtcagaagtacccccaccctcctgattatcagtcaacccagaacaaacgctttcctct

SEQ ID NO: 918098 - DNA, 120 bp, Artificial Sequence
  ENSG00000261146_36 (sequence is synthesized)
actttcccttaattgtacttggtgctagtcatctctgtggcaagaatatgagcttctcacaagctaataatgaaacatatctttggttctttcacagcacccagctttgggctaagtatg

SEQ ID NO: 918099 - DNA, 120 bp, Artificial Sequence
  ENSG00000261146_37 (sequence is synthesized)
taaatgtgggcgtcagatacacctgcttgagtaaatgtctcctctcaatacctggaagaatgatgagtgtttgctcttctacaaaccaactcaaggcacccagaaagcaaggaagcttcc

SEQ ID NO: 918100 - DNA, 120 bp, Artificial Sequence
  ENSG00000261146_38 (sequence is synthesized)
aaagaaaaatggagttatattaaaaggatgtaggcattatcttgaagggttttctactggtcaaagttgggataatttaagcatcaaataaatgatagctgtaaattgaatatataagaa

SEQ ID NO: 918101 - DNA, 120 bp, Artificial Sequence
  ENSG00000261140_0 (sequence is synthesized)
ggcctccccaagtgttgggattacaggtgggccactgtgcccaagctatttcactatttcatcagcgcacttaaatgcccgttttttttaagtggctacagggcaacaagactatccctg

SEQ ID NO: 918102 - DNA, 120 bp, Artificial Sequence
  ENSG00000261140_1 (sequence is synthesized)
gggcaacaagactatccctgtgccaaataccagattccaaagaaactctacccacgtcacaaacctgcacgtggatcccctgaatctaaaataaaagttgaaattatgaataaataaagc

SEQ ID NO: 918103 - DNA, 120 bp, Artificial Sequence
  ENSG00000250978_0 (sequence is synthesized)
gtcgagaagtgattaatagggttggacagcttctctcacgcagccatcagggtaaattctcaagatgccaaacgatgaagcagaacttttatggagaccactaacatttactttcagttc

SEQ ID NO: 918104 - DNA, 120 bp, Artificial Sequence
  ENSG00000250978_1 (sequence is synthesized)
ttcctgagaaaagtaccaaggcataggttccttaagtgatcttaaattgtctcgtaagcattttatatgtgggaagcacttaggaaataaatgttcaatgaatgaattaatgaaggaatg

SEQ ID NO: 918105 - DNA, 120 bp, Artificial Sequence
  ENSG00000250978_2 (sequence is synthesized)
ggagaattagcccattttgaattttgggaagaggaccagtctgaccatacatacacacttttctcagcacatgacagacagtagcatcctagcagccatcctgtattttgaagatgaatg

SEQ ID NO: 918106 - DNA, 120 bp, Artificial Sequence
  ENSG00000250978_3 (sequence is synthesized)
agtgacaccaaggatgagaaagtgagtgtggagtcctggacttcccatctccagacctcttacaggaaagaggaaaaggaaacctgtgtcttcttaatgtcatgattatttgggtttttt

SEQ ID NO: 918107 - DNA, 120 bp, Artificial Sequence
  ENSG00000250978_4 (sequence is synthesized)
gttcagagaattctgccaaacctaacactcatttaaaagcttatcaagcaattattataaatttattgagtgagcactttctattcttaaaatttgggatttgccctttcattaatagta

SEQ ID NO: 918108 - DNA, 120 bp, Artificial Sequence
  ENSG00000250978_5 (sequence is synthesized)
tttttattgaagagtaatagtttattgcaacacagtgaaaaggtaacctacagaaagagagaaaaatatttgcaaactatatatcctatgttgattaattcccaaaatatctaagtaatg

SEQ ID NO: 918109 - DNA, 120 bp, Artificial Sequence
  ENSG00000250974_0 (sequence is synthesized)
aaggcgtgatcgtgagtaatggagactgatgatgtccaggacgttttcaatatagttaaggagaaacaatcatgagaatgaggtctcctggtcccaagaaattttagaccctatatcctg

SEQ ID NO: 918110 - DNA, 120 bp, Artificial Sequence
  ENSG00000250974_1 (sequence is synthesized)
aaggtggatccaatgaaaaaagagaagcagcaagagtggcttctgtttccctggctggactctgagtaatatagcagcaataatttcccaagggaaaggaggaagacgggttggctccaa

SEQ ID NO: 918111 - DNA, 120 bp, Artificial Sequence
  ENSG00000250974_2 (sequence is synthesized)
tgaagacacttatgatgtgaagagttcccgtaacagttcaccatctctggggcagttatacaacagggatccctgacttcttcagaaccgagagttcaaatcaggactatctggtgatga

SEQ ID NO: 918112 - DNA, 120 bp, Artificial Sequence
  ENSG00000250974_3 (sequence is synthesized)
atctatccactagaagctgatatgaagagtcaggtcactagaaaacagaatatcatgtgattgtgtttgactgcacaactggtctctatcaatatctatgcctgaagaggaagaatgttt

SEQ ID NO: 918113 - DNA, 120 bp, Artificial Sequence
  ENSG00000250974_4 (sequence is synthesized)
gcctagtaagcctcagagaccaagccaggctgcagctcctctgggtgcctcccccatgcctgcccactgaggcagagaccctccttcctcatgctcccacagcccttcttctctgagacc

SEQ ID NO: 918114 - DNA, 120 bp, Artificial Sequence
  ENSG00000250974_5 (sequence is synthesized)
tggctcctgaaatcctcttgctgagttgtctgtgacctcaattgagtgaataactcctcatggccaggggctgtgtttccccatggagccccagcacctgccaaaacctctgacacacaa

SEQ ID NO: 918115 - DNA, 120 bp, Artificial Sequence
  ENSG00000250974_6 (sequence is synthesized)
ggagcactcggtgagctgtggacagatgcatgaacagaaagacagcctttgaattcaatgattttgcccgttcctcgttatgatgattgtatggaggagtggggagtaaagcacagttca

SEQ ID NO: 918116 - DNA, 120 bp, Artificial Sequence
  ENSG00000250974_7 (sequence is synthesized)
gctttagttggacgagtatcactatcatcattcatcctataatacatttatccctttcaagggagtcactctgctcattcccctcagtaggagagaaataagctgaaagtgggtgctcct

SEQ ID NO: 918117 - DNA, 120 bp, Artificial Sequence
  ENSG00000250974_8 (sequence is synthesized)
ctgaaaggggttcagaggtcatgagaacaaaaacaacccagaaggtgctttgcttctgtgaacacatcccgggttcttctattttacagccacacaaaccactaagaccaagtgtcattg

SEQ ID NO: 918118 - DNA, 120 bp, Artificial Sequence
  ENSG00000250974_9 (sequence is synthesized)
ctcccactaatgatagaattttgatataaataacactcagctggcagtccaatttgagttgttatgctggaatttttaacctgaatgtaggagtcttgtacaaagctaagtttaaaatta

SEQ ID NO: 918119 - DNA, 120 bp, Artificial Sequence
  ENSG00000250974_10 (sequence is synthesized)
tttgagtggaaatgcaaaaatcaaagggataaattcacgttgaaatattgacaagcagttttccggtccacatctaattttcttagaaaaaggacgaaggttgttccaggctatcattct

SEQ ID NO: 918120 - DNA, 120 bp, Artificial Sequence
  ENSG00000250974_11 (sequence is synthesized)
gtcatcttacttgtaggtgttccagtgtggggacactatactgtctcattgtgaaagatgacagctggccagctgccttctaatgtctactccatcgtaactgaccatccaaggacgcac

SEQ ID NO: 918121 - DNA, 120 bp, Artificial Sequence
  ENSG00000250974_12 (sequence is synthesized)
aggtctggagctgcaaaaggagcagcactaggaaagaaaacccagtcttcttgaggttgacttcccttatggggtatgaactggccacatccttcatatagaaaattgaataatttaata

SEQ ID NO: 918122 - DNA, 120 bp, Artificial Sequence
  ENSG00000250974_13 (sequence is synthesized)
aggaatggtctaactcagattctagttctatctgtttatttgcctggtaattacagcataacaactcaaattggactgccagctgagtgtttgcctggggccagagatttccttgtgcac

SEQ ID NO: 918123 - DNA, 120 bp, Artificial Sequence
  ENSG00000250974_14 (sequence is synthesized)
atactggtgttcccttacaccaagtagagactgataaaaagaaaaaataataattttgaaaatctgaattggtatactctcaaaaattaatatagcatgccaaatggaagccttgaagcc

SEQ ID NO: 918124 - DNA, 120 bp, Artificial Sequence
  ENSG00000250974_15 (sequence is synthesized)
acccctcaaactggttaagtagttttctaaatgaccataccccatccaccttaacttctcttcaatgtactcaccaagctgctgcaaattgatctttgtatttttctttctaaattgtga

SEQ ID NO: 918125 - DNA, 120 bp, Artificial Sequence
  ENSG00000250974_16 (sequence is synthesized)
gcttcttcccggagtggaggcttagaggcaggctctgtggcatgcactccccgactctacatggtgcattttgactgaagtgaataccctgagaaggttttgcagaaaaatcaaggagat

SEQ ID NO: 918126 - DNA, 120 bp, Artificial Sequence
  ENSG00000250974_17 (sequence is synthesized)
aaatgaaaggtttccctcagtggtgaatgtgcagaggctccctaaaatgcagctcctggggactgatgcacacagctgtggaaatgatagtaaggctctttgttagagctcttgtggctg

SEQ ID NO: 918127 - DNA, 120 bp, Artificial Sequence
  ENSG00000250974_18 (sequence is synthesized)
cctggagatgatgctgccttggccatggcctgctgttatcctcggggagctgggacgtgggcacaggggcatgcatttccccctcagcactagctccaagggacaatgtgcagcacttgc

SEQ ID NO: 918128 - DNA, 120 bp, Artificial Sequence
  ENSG00000250974_19 (sequence is synthesized)
tggttatctacctctgtttgcctgacttatccctgctggtattagtaaccactatagaggaagaacaaatagacaattacaagaatgtgtgtcaagatcttggacacaaaattatttcat

SEQ ID NO: 918129 - DNA, 120 bp, Artificial Sequence
  ENSG00000250974_20 (sequence is synthesized)
ctagaagccctcttgttatgttgaataggaaagaaaaaaagtccactgggtatgaatcacataagttgcctctgtggcaggtgcctgcagcaattactttccaatgggtgcttaataaaa

SEQ ID NO: 918130 - DNA, 120 bp, Artificial Sequence
  ENSG00000250974_21 (sequence is synthesized)
acagaagatggaaaactcaatacgtaaggtcaatactgataacagttcattagcacaagttgaggacaagcgaaggatgaatgtgccttgtcctccaagcagctgaagtgcacttcccca

SEQ ID NO: 918131 - DNA, 120 bp, Artificial Sequence
  ENSG00000250974_22 (sequence is synthesized)
ggcttctgtcttctcttctgagtcactgagtctctgtgctctttgacaccctataactggaggattatgattacttagtaggcttctgtgcttaacttgataaaacaataaaaagtcaca

SEQ ID NO: 918132 - DNA, 120 bp, Artificial Sequence
  ENSG00000250974_23 (sequence is synthesized)
cagagaaatcttaaaaactcgaggtagcttgtaaagccacaactccactgttatttcataccaccttcctctctatctcacttctccacattgaaatatgcccctttccttgagatatga

SEQ ID NO: 918133 - DNA, 120 bp, Artificial Sequence
  ENSG00000250974_24 (sequence is synthesized)
atcactaaagtacaaaaactagttttaaagtatgcacagttgaccaggcacagtggcttacacttataatgccagcactttggaaggctgaggcaggagcatcacttgaggccaggagtt

SEQ ID NO: 918134 - DNA, 120 bp, Artificial Sequence
  ENSG00000250974_25 (sequence is synthesized)
caggagtttgagagcagcctgggcaatagagccagaccctctttctaccaaaaataataataataaaaaacagctgggcatggcggtgcaagtctgtaatctcagctactcagggggctg

SEQ ID NO: 918135 - DNA, 120 bp, Artificial Sequence
  ENSG00000250974_26 (sequence is synthesized)
ggatgagttgggcccagaagtttgaggctgcagtgagcaatgattgtaccactgtacttcagcctgggtgacagagcaagagcctgtctgttaataaatgaaaaatataaaataaaataa

SEQ ID NO: 918136 - DNA, 120 bp, Artificial Sequence
  ENSG00000250974_27 (sequence is synthesized)
aatattgatagtagtatttagtgggaaaacattaatttgagtctactcataattttgaattttgagatctggattcatttaataaaaatcatgttgagtacattttccaaactatttgaa

SEQ ID NO: 918137 - DNA, 120 bp, Artificial Sequence
  ENSG00000250974_28 (sequence is synthesized)
agtaggcagcttcagtcctggtatgggctgtagcaagtactgctgctgctgtccatcccttctgcccacagggcagaagaaaatggaaaacaaagacaaacaaaccaaagaaggcggatg

SEQ ID NO: 918138 - DNA, 120 bp, Artificial Sequence
  ENSG00000250974_29 (sequence is synthesized)
ttactaccattaagacagtagatggatggctttgaatttgggccaagtgagcaaaggcagcccctccctctctacgttccagccgttttgctcactgtgaggactcagctgtgacacgta

SEQ ID NO: 918139 - DNA, 120 bp, Artificial Sequence
  ENSG00000250977_0 (sequence is synthesized)
aaacaccatatacagcttgtagttcactcaaaaagagtagctcgttcatcaactgaccaagctgaaatattctgaatattgaaaaatctcagaaattttttagatatttgaaatgtggga

SEQ ID NO: 918140 - DNA, 120 bp, Artificial Sequence
  ENSG00000250977_1 (sequence is synthesized)
cttatctgaaaggacaaaaagaaagtcaggcttctccttgggctacttgagcatccacagtgtggcaactgggttccaagaatgagttttccaagaggcagcagtggaagctgccagtgt

SEQ ID NO: 918141 - DNA, 120 bp, Artificial Sequence
  ENSG00000250977_2 (sequence is synthesized)
tcaagaaaagggcaccgagagcccacctcttcatgggaggactgtcaaaattttgtggccatctttaaaccaccatagggatcacctctctctttttcccgttttcatatcatcatcctc

SEQ ID NO: 918142 - DNA, 120 bp, Artificial Sequence
  ENSG00000250977_3 (sequence is synthesized)
ttcctcctccttccccagaattgcaaaaatatgaggaattattgctacgtaccagttactctgttcagcgtctcagcatcacacaagagagaagagacaatcacatattcacaagagaag

SEQ ID NO: 918143 - DNA, 120 bp, Artificial Sequence
  ENSG00000250976_0 (sequence is synthesized)
cacacacccaactaccactcccctgggggaagctgctccccaactcccaagctcagagagaaaggaagaaggggcagtggatgagaagaggatgtgatgaggggagcttcctaaagaccc

SEQ ID NO: 918144 - DNA, 120 bp, Artificial Sequence
  ENSG00000250971_0 (sequence is synthesized)
acatggccccgctccctccctcagtctgtagcctcaggaggggactgctttgcctgtgagtgggagggagctaccgtgtgagtagttcccaacagaccatctgaagtcattttcccaggt

SEQ ID NO: 918145 - DNA, 120 bp, Artificial Sequence
  ENSG00000250971_1 (sequence is synthesized)
ccagcgaggatggcgacacaaacagcggtggtgtcagcggacagcggtggtgtcagcggtgaccgaggcagggccgagactccagggcccttcgggttcaagctgtgccccctcgcgcag

SEQ ID NO: 918146 - DNA, 120 bp, Artificial Sequence
  ENSG00000250971_2 (sequence is synthesized)
ttcagcacctgccagcacttccaagtgtgtgattgtcacgcttgcctgattactccttcctttgggctcccatagcaatttgtacattactgtggaattgatcaaattgctttataacta

SEQ ID NO: 918147 - DNA, 120 bp, Artificial Sequence
  ENSG00000250971_3 (sequence is synthesized)
agattgatttgtgtctgggaagaagacccttttctatgcaggctggaagggggatttgctggcattcccgagtggttacaactttgtggagttaatatttaatgtgccattttatagcat

SEQ ID NO: 918148 - DNA, 120 bp, Artificial Sequence
  ENSG00000250971_4 (sequence is synthesized)
atacagatttagaagctgaaaagatactaagacaatataatatgaatttatcatcaatttcatagcatgaaactgaagaaactactttttgtactgttttaaggaaatcctatcatcata

SEQ ID NO: 918149 - DNA, 120 bp, Artificial Sequence
  ENSG00000250971_5 (sequence is synthesized)
tggtgactgtacaacattaaagcaacattctggaaagaaattgccaggtggtacggttcatctggaccagcctctgatgtggggaagaccaagcgagagcacactgcggagagtgagtcc

SEQ ID NO: 918150 - DNA, 120 bp, Artificial Sequence
  ENSG00000250971_6 (sequence is synthesized)
tgcttattttgccacagacctacagagaccagacttcaagatgttcctgtggacaggaatttacacaaaaaaccaggcccaaaagtcagatgtcctggcttaagctgctgaagccacctt

SEQ ID NO: 918151 - DNA, 120 bp, Artificial Sequence
  ENSG00000250971_7 (sequence is synthesized)
ttggaacaaagacaatggcctgggcctccctgatgacaccgcagagtcaccaattctaatgaacatactaccaacagtgattttctccttggcccattaaccacacggaagggagtattc

SEQ ID NO: 918152 - DNA, 120 bp, Artificial Sequence
  ENSG00000250971_8 (sequence is synthesized)
gctgtggagtgcctctgtagctgagggcccctggcgcgtggtttcatcagaggcagacagctgctgtggccaaggccattccagcctcaggagggcaagaggaggcctgttggatgcatc

SEQ ID NO: 918153 - DNA, 120 bp, Artificial Sequence
  ENSG00000250971_9 (sequence is synthesized)
ctgaaaacacaggccatcactgtgggtgagatctaccaggacagatgccattctgcaaagtggcaggagaaacacagagccagacgttacactgcttttcaaagagagttgcctctgctg

SEQ ID NO: 918154 - DNA, 120 bp, Artificial Sequence
  ENSG00000250971_10 (sequence is synthesized)
cagaacttaaagtaaaataaaaataaaaaaatcacaacattggaaagccaaaaaaaatagccatatataaactttttcatcttaaaatccattttactcctaactgtcaaggaaaaacag

SEQ ID NO: 918155 - DNA, 120 bp, Artificial Sequence
  ENSG00000250971_11 (sequence is synthesized)
cttaaaatccattttactcctaactgtcaaggaaaaacagatggttctaaactcctccttctaggctcctagtggtaaagcaatttgcaggacaaccatggaagaaaggtgcccgccttc

SEQ ID NO: 918156 - DNA, 120 bp, Artificial Sequence
  ENSG00000250971_12 (sequence is synthesized)
tctccttggcccattaaccacacggaagggagtattcgctgtggagtgcctctgtagctgagggcccctggcgcgtggtttcatcagaggcagacagctgcgtgagtcactgtggtgggc

SEQ ID NO: 918157 - DNA, 120 bp, Artificial Sequence
  ENSG00000250971_13 (sequence is synthesized)
agtgtgctgggccaccctgcgggtcctgccagagtgctgtggaattcaagtttgtcttctccagttttagtctctgcacgtgcgttggtctcctttctgcccctacagtgtggccaaggc

SEQ ID NO: 918158 - DNA, 120 bp, Artificial Sequence
  ENSG00000255332_0 (sequence is synthesized)
acacaagaagaattggcccttgaccagcctgattggttgcaggaggggaccaatcagaggtacctcccatttttcatctgcagcccaatgcaaagtaatgacatggatctggagagattc

SEQ ID NO: 918159 - DNA, 120 bp, Artificial Sequence
  ENSG00000255332_1 (sequence is synthesized)
tcttaggagagaatctggctaagtgtctagcaggatgattgattaacaagatgttttgttttcatcatctcagagataactgtattgaggtataattgatatgccaaataactggacaca

SEQ ID NO: 918160 - DNA, 120 bp, Artificial Sequence
  ENSG00000255332_2 (sequence is synthesized)
ttcaacttgtgcaatttgatgagtttggagatacacatacatctgtgaaaccatcaccaaaatcaagatgctggtgcctgcagtggaggctgcttgaaatacatctggtccagtcacagc

SEQ ID NO: 918161 - DNA, 120 bp, Artificial Sequence
  ENSG00000255332_3 (sequence is synthesized)
cttgattggggccagtgcctgtgccagcacctggagctgcctgccccaccacagcagccagcgtgcctggctgtgcacagaggccagacctgtgctcactcactcacacgcccctcacca

SEQ ID NO: 918162 - DNA, 120 bp, Artificial Sequence
  ENSG00000255332_4 (sequence is synthesized)
caagcacagcctgctgggccaagtgggtaaaacgagcccagtgggtgcgagcaagactcaagcagaggcaccaccagccgccgaggcaccaccagccacagaggtttctggctggtgaag

SEQ ID NO: 918163 - DNA, 120 bp, Artificial Sequence
  ENSG00000255332_5 (sequence is synthesized)
caacacctgaagaatcctatggcattttcctgactttgaaatttacccacttagtcaagaaaatatgaagctattcattccctttacttgtctagcagaatatttccacatagaagattt

SEQ ID NO: 918164 - DNA, 120 bp, Artificial Sequence
  ENSG00000255332_6 (sequence is synthesized)
tagtctttgtcatcaagactgcgtaacatttaacactccaccacatcaaaatgctacttacacatacataataaacactcagagaggaatgctgcctcagacatcatcttttcttcactc

SEQ ID NO: 918165 - DNA, 120 bp, Artificial Sequence
  ENSG00000255332_7 (sequence is synthesized)
tgtctaaagcatgaatgtccttagatgttcattcaaaattagtgccagggagtgctatttggcaaggccacttagaatatagtaattaattagaatgcatttattaaattaagctgaaac

SEQ ID NO: 918166 - DNA, 120 bp, Artificial Sequence
  ENSG00000255332_8 (sequence is synthesized)
tctatcaactatggggaaggaagggccagaagaggtgtaaccatcatggctaccaggtttcgaaatatttacattacatactgcatttattaaaatacaaattaaatctgcaataaaaaa

SEQ ID NO: 918167 - DNA, 120 bp, Artificial Sequence
  ENSG00000255332_9 (sequence is synthesized)
aatcgaaagaaagtggtggatggtttctggaaggacaagtctgcaccagagaataaaagggcattccttagggttgctgaggattttctttgattgtattctgctaatgtgtgtgcaagg

SEQ ID NO: 918168 - DNA, 120 bp, Artificial Sequence
  ENSG00000255332_10 (sequence is synthesized)
cacatttgtggaaggctctagagacattttctacaaattttaccctggtttcagaacaactttctctgatctctgtggacatgcttaaaatggctgactcacacagcaagactatttaac

SEQ ID NO: 918169 - DNA, 120 bp, Artificial Sequence
  ENSG00000255332_11 (sequence is synthesized)
actccttctcccaaaaccttttcttctctcagaatcttttggcagcaaacacattcaagcatcttctatgtgccaagaacttgctggaaaacatcacaaaagttaatattttctggagat

SEQ ID NO: 918170 - DNA, 120 bp, Artificial Sequence
  ENSG00000255332_12 (sequence is synthesized)
caaggaatgaaactcagccctctgcaaatggaacacaaacgcctggtacatggatgctacaatgaaaagaatatgggtgctgaaatcagagagaatcatccaagatgatccttatgcatg

SEQ ID NO: 918171 - DNA, 120 bp, Artificial Sequence
  ENSG00000255332_13 (sequence is synthesized)
aaggcattcaggcccaataattaactgaacattagctgtgtaccagacactgtggtcgacattgagatataacggatttaagaaagtctttgtggctgtggtggcttcaaatcactcccg

SEQ ID NO: 918172 - DNA, 120 bp, Artificial Sequence
  ENSG00000255332_14 (sequence is synthesized)
aggctttagaagaatataattgccgttctaagaagaatctgaggcctctaggagatctgccagtagtggccccaatgtataacagcactagctcagtgaagagagagagaaaagatctga

SEQ ID NO: 918173 - DNA, 120 bp, Artificial Sequence
  ENSG00000255332_15 (sequence is synthesized)
agagagtggttgcagtttgagctctgtcaatgggacagtcctgggcaggagactggggagaagaggcggcttgctggttttcctgaaccacttccaccctgaaagactccttgcatacaa

SEQ ID NO: 918174 - DNA, 120 bp, Artificial Sequence
  ENSG00000255332_16 (sequence is synthesized)
tcatcagagaagaaccgtgggaaccaagaaccatgagcaggagaaccatgagcacactgttcgcaatggccaagatttggaggcaacctaagtgtccatcgacagacaaatggttaaaga

SEQ ID NO: 918175 - DNA, 120 bp, Artificial Sequence
  ENSG00000255332_17 (sequence is synthesized)
aaatgagggaggaggaaaaaaccatggctgcggaggtgatttaatatcctgttgactctgaagaaaaatacacttcttcattataagagttttattgccaatgactagaaggaaatgtaa

SEQ ID NO: 918176 - DNA, 120 bp, Artificial Sequence
  ENSG00000255332_18 (sequence is synthesized)
aggggacaacacaagatgactaacacaggaagttataaaactcacagctctaactgtcatggccctgggcccatggtgcctgaatccctctgggagtattaaatggaaggccccctggta

SEQ ID NO: 918177 - DNA, 120 bp, Artificial Sequence
  ENSG00000255334_0 (sequence is synthesized)
cccctcccagaactactgttctgtggctgccaatatgaatgcctagaataagttaagaggaagatcagtacaggtggaatagcaggagatattttagtaacagtttaattattaattttt

SEQ ID NO: 918178 - DNA, 72 bp, Artificial Sequence
  ENSG00000255334_1 (sequence is synthesized)
attacaaggacttatacttttccaaaagtacctttttaaaaggtagagacagtccaggctgtttgggaaata

SEQ ID NO: 918179 - DNA, 120 bp, Artificial Sequence
  ENSG00000255335_0 (sequence is synthesized)
aggtgtgatccaaggttctgcaaggaaaaggaaggatggtgtggagtgtgttgctgcagggaaggcttcccagtggaggtggctcctgagctctaggaaaagggaagtgagtgtccttcc

SEQ ID NO: 918180 - DNA, 120 bp, Artificial Sequence
  ENSG00000255335_1 (sequence is synthesized)
aggcagagggaacagcaggtgcaaaggcctgggggctcgtctataagcaccagaggtctgaggccctgcaggatggatggctgagacattgctgctgggaaggagcttgtggggggtctt

SEQ ID NO: 918181 - DNA, 120 bp, Artificial Sequence
  ENSG00000255335_2 (sequence is synthesized)
ctaccacctgccagctctgtgcctgcccctccactagatcatgacttcggctccagctccctcactctccatgcctctcacttgcgggttgtgccctgctcagctggccagactttggcc

SEQ ID NO: 918182 - DNA, 120 bp, Artificial Sequence
  ENSG00000255335_3 (sequence is synthesized)
ccctccctacctggatttgtgaagccccaaatttcatctcccccaccacacttattcacagcctccgcctgctgacatacccaggcaagactcccttcccctccaggcagccaaacttca

SEQ ID NO: 918183 - DNA, 120 bp, Artificial Sequence
  ENSG00000255335_4 (sequence is synthesized)
gttcgaatcttctggctcttaccagacccctgatgaatcccaggatcttcgcaggtggtcccagggcctctttgaaccacagttttacttatctgaaaaataaaaaggcatgatttagat

SEQ ID NO: 918184 - DNA, 120 bp, Artificial Sequence
  ENSG00000255335_5 (sequence is synthesized)
caaaggcctgggggctcgtctataagcacccccacggccgcggcccagatcctccccgctttgcccaccggcctccatctctgtcctcaggcccgctggagtcacaagccccatcccaga

SEQ ID NO: 918185 - DNA, 120 bp, Artificial Sequence
  ENSG00000255337_0 (sequence is synthesized)
cagaaaccgcgagccgtttcctttctcttcggaaatggcagttttgttgtcctggatgaaggcgagcgccgctgcctccctgaatgctgagcacgctggcttcgcggtgcccggaaggaa

SEQ ID NO: 918186 - DNA, 120 bp, Artificial Sequence
  ENSG00000255337_1 (sequence is synthesized)
gcctttgaagaccctgactccagtgtctccagctgagaggctgagcttgccagctccatttctgactgctcatggagcagaatcagtgaccaaggagaaaagggctgagtgaagaaacaa

SEQ ID NO: 918187 - DNA, 120 bp, Artificial Sequence
  ENSG00000255337_2 (sequence is synthesized)
caagaatcacaaggaatcaagttcggagagaattttggcagagattttgagaggggggctttaagtcagccatggacatactgaagcaagaggaatgaagggaaaaaagaaaagggggga

SEQ ID NO: 918188 - DNA, 120 bp, Artificial Sequence
  ENSG00000255337_3 (sequence is synthesized)
aaaaaagaagaagaatggggccaaggaggatttaagactaccattataggttacaagttgaattctttttaatattcttcaagcaatgacagtaaagattcaaataacttttaaattacc

SEQ ID NO: 918189 - DNA, 120 bp, Artificial Sequence
  ENSG00000255337_4 (sequence is synthesized)
tttgatttctaaaccaagtttcttggaatgtgaaagtcgccaagactgggccctgcagggcctgggttgggctactactgcctatggagattctgagggtattaaccttaataatggcat

SEQ ID NO: 918190 - DNA, 72 bp, Artificial Sequence
  ENSG00000226005_0 (sequence is synthesized)
tacaggcaggcaccaccatgcccaggctactctcgaactcctggcctcatgtgatccgcccacctcagcctc

SEQ ID NO: 918191 - DNA, 120 bp, Artificial Sequence
  ENSG00000226005_1 (sequence is synthesized)
acactgtggatcattctggggagttaatagttttgagatgtgtcccaagataattgttagcttgaattaccacgtggatggaaccatgctgatcctaagagccaggccaagcctactgct

SEQ ID NO: 918192 - DNA, 120 bp, Artificial Sequence
  ENSG00000226005_2 (sequence is synthesized)
gttagaaaacatatttagaaatcacttggttcttccttgcctgaacatcatctatttagttagcttgtgttgtttagatgtgcttcagatctcaaaaaaataaattatgttatttgaaag

SEQ ID NO: 918193 - DNA, 120 bp, Artificial Sequence
  ENSG00000226005_3 (sequence is synthesized)
ctttgagcaagaggacaaacctgggtagggatctctatgatgttttctgcgttgcccgtggacgttcatctttctgatttgttagctgaagatgaggatctggagcaggagctcggagtg

SEQ ID NO: 918194 - DNA, 120 bp, Artificial Sequence
  ENSG00000226005_4 (sequence is synthesized)
ccattgttccatgggcagatgtgcagcagagattagcattaggaagacaagcagggccttcagtaggcataaggtgatgaggttcatgccgttggatcccacgggtgccctggggaagag

SEQ ID NO: 918195 - DNA, 120 bp, Artificial Sequence
  ENSG00000226005_5 (sequence is synthesized)
atggttgggaagtctgagaggaagcaggagagctttcggagcacatggatgccgtccagaatggagatggttgtggctcggaagaaaaagaaatcacccagctcggagtcaggatacatt

SEQ ID NO: 918196 - DNA, 120 bp, Artificial Sequence
  ENSG00000226005_6 (sequence is synthesized)
tggaggtccaggccgccgagtttgctggtggggaagataggcaccagaaaggaaagaggacatccagggcaatttcttctgccccccagccaatccgtacattgtccagagggtcttgct

SEQ ID NO: 918197 - DNA, 120 bp, Artificial Sequence
  ENSG00000226005_7 (sequence is synthesized)
aggtaatggccaaaggtgccattcaggtgaaatccccaggtggaaaattcttccacttccaatgatagaattctattactctgcctatagtttggtgaaacaagactttacaaatagagg

SEQ ID NO: 918198 - DNA, 120 bp, Artificial Sequence
  ENSG00000226005_8 (sequence is synthesized)
acaagatccattttgccaagaacaaccatatggatttaactgctgctaacaaccgttaggaaggaacatcaataaaaagcaagcctgtgagacaactccttccccaaggggcgcttgtta

SEQ ID NO: 918199 - DNA, 120 bp, Artificial Sequence
  ENSG00000226005_9 (sequence is synthesized)
cagagcgcgggccccagcaggcctggtccatcctccacattctttcctctctgacttatttttactttctgtttgaattggcttggttttattttgccctaaactgtgtctgtagtcatc

SEQ ID NO: 918200 - DNA, 120 bp, Artificial Sequence
  ENSG00000226005_10 (sequence is synthesized)
ccccgacagagttttgagagtgaaagtccgatctgcccacgcttcacagaactcaatgcggagccttctcaggagtcacttgacgtcaaggctgacttttaaatttgccaaaaaggcatt

SEQ ID NO: 918201 - DNA, 120 bp, Artificial Sequence
  ENSG00000226005_11 (sequence is synthesized)
ctttggggagcggtcggcaccatcactttccctctttagagagctgctactggctgctggaattcaaaacccacaaattgcatttctaaacttaattcgatacatagatgagcggaaaga

SEQ ID NO: 918202 - DNA, 120 bp, Artificial Sequence
  ENSG00000226005_12 (sequence is synthesized)
tcagacattgatgctattgttttcaaccaagatgttttactatatcatttatattttgtttttttcttcccccagtttttaaactttttgtttgtttgttttacaggccaagcctactgc

SEQ ID NO: 918203 - DNA, 120 bp, Artificial Sequence
  ENSG00000226005_13 (sequence is synthesized)
gaagggagcaggcatcatagatggtattacaggcggctggtctctcctctctcagccaactatgagaactatttgggattgaaggagataagctacagcaagtcgttacttgtcctgaat

SEQ ID NO: 918204 - DNA, 120 bp, Artificial Sequence
  ENSG00000226005_14 (sequence is synthesized)
gcaggagctcggagtgccattgttccatgggcagatgtgcagcagagattggtcttgctctgtcatccaggctggcgcgatctcggctcactttgacctctgcctcctgggttcaagcga

SEQ ID NO: 918205 - DNA, 120 bp, Artificial Sequence
  ENSG00000225331_0 (sequence is synthesized)
ctcctgggcacagagctgaaggggaactggaggctgcggcgttcctctctccgttcccctctctctggtgactcgtgataacgaaccgaccttttggagacattctgtgccctcaacaaa

SEQ ID NO: 918206 - DNA, 120 bp, Artificial Sequence
  ENSG00000225331_1 (sequence is synthesized)
agcggcccctgtctggaaacccccccgagggagactgacttcctcccctgctgcctgggctgcggtagctcttccggcacctgctcttcaggcacctgccctgtgctggcccctcctgca

SEQ ID NO: 918207 - DNA, 120 bp, Artificial Sequence
  ENSG00000225331_2 (sequence is synthesized)
acaatcgggagccctcacctcagtcggcgctgcagaaccagcccaggagagcagctggcctgtcatctgctgaggagcggaggcgtgcggggatccggaggggaagggggtctggagtgc

SEQ ID NO: 918208 - DNA, 120 bp, Artificial Sequence
  ENSG00000225331_3 (sequence is synthesized)
gccctgctgctggcagcgcctgggcccacggctgatggaggcgtctcctggcccccagggctgtgcccaggactgcaatggcctcccacactacctcactaccctggtccaggctcactg

SEQ ID NO: 918209 - DNA, 120 bp, Artificial Sequence
  ENSG00000225331_4 (sequence is synthesized)
acagatgaggaaactgaggcaggggccccggtctcacggccattggtgcagagctgggatccacgaccaggtgggctctttgttattacttcctccaaggacaagcccaggttctccagg

SEQ ID NO: 918210 - DNA, 120 bp, Artificial Sequence
  ENSG00000225331_5 (sequence is synthesized)
gtgtggggtccacgtgtggccacagcgggccttagagacagacaggcctgggtagggggaggggtgggtgggcaaggccttagagacaggcctggcgggggaggggccgggcctgtgcac

SEQ ID NO: 918211 - DNA, 120 bp, Artificial Sequence
  ENSG00000225331_6 (sequence is synthesized)
tggcagtggtggcaccacgggcccttggggacaccaagtgagctctttaaagtggctaaagtggtaaaccttgtgttttgtatagattctaccaattaaaaaaaggaaatgtgggccggg

SEQ ID NO: 918212 - DNA, 120 bp, Artificial Sequence
  ENSG00000225330_0 (sequence is synthesized)
atctttagtaaacgcgatgtattggcagctagatttggagtgaagtgaatgtgagtgaagctggaagcagattctgcaagaaacccaaatgttggaggggggttttccaagcgtcagagt

SEQ ID NO: 918213 - DNA, 120 bp, Artificial Sequence
  ENSG00000225330_1 (sequence is synthesized)
cttaggtctctcaataccccctttgacactcgtggccacactcttccgccatgcccattacagtgactcactcggaactgcttgggaatcagtgacttggcagttttaggatgaagcttc

SEQ ID NO: 918214 - DNA, 120 bp, Artificial Sequence
  ENSG00000225330_2 (sequence is synthesized)
ttaaagaataatccttggtaaatcttggctgcgggtgactgatggaagtttcagaggctggactggaagatgaaactggggcaagatgttacacagcatggcctcaggaacctgagctcc

SEQ ID NO: 918215 - DNA, 120 bp, Artificial Sequence
  ENSG00000225330_3 (sequence is synthesized)
agcaacctgcgggtcccaatggaggcgaagtcaaggagcgtctcagagagtggttgatgtgtgaagtctctgtctgcccatctgaataacaagagatggggcttgtgattttcctccacg

SEQ ID NO: 918216 - DNA, 120 bp, Artificial Sequence
  ENSG00000225337_0 (sequence is synthesized)
gctcacgcctgactagagcactctgcttcacagaggggcgttctgcgcgttcttcctccctggctgcctagatcacacggccccgtttcattcatttttacttaataacggtcgttagac

SEQ ID NO: 918217 - DNA, 120 bp, Artificial Sequence
  ENSG00000225337_1 (sequence is synthesized)
gactaacaaggctggcggggagatttagcaaatggtggcttctgagagtttgcaccagtccttcaccacattttattggaagtgtggagagtcatgattctcattcctccccagccttcc

SEQ ID NO: 918218 - DNA, 120 bp, Artificial Sequence
  ENSG00000225337_2 (sequence is synthesized)
ggaaaaatgctcagaaatttctttccacattgacacctgattacagtctaaatagtaaccttattctgactgttaatgtaaccttctcgtaatttctacaaaaatactttagtttttcta

SEQ ID NO: 918219 - DNA, 120 bp, Artificial Sequence
  ENSG00000225335_0 (sequence is synthesized)
aaccgaagctgtcttgtgaaatggaggggtcctcactaaccagttccagcggaggctaacggaagaagtgccagcaatggatgtgcagctacatgcacgcttttaattcagagcttctgc

SEQ ID NO: 918220 - DNA, 120 bp, Artificial Sequence
  ENSG00000225335_1 (sequence is synthesized)
gacggtggcgatcaggggatctgtaatgtaatgtaatgtcaaggctgacgcagagctgatcaaacattttggcaaccttagtcttgaattgattcacactttctccgcgttgcctccgga

SEQ ID NO: 918221 - DNA, 120 bp, Artificial Sequence
  ENSG00000225335_2 (sequence is synthesized)
gtttgctgtagggtaatgaatattgcctgggtccagacttctctttcctcggagtctggtggacttggttctgcctcagcttcccatgcagacttttctgcaagagaacggaaatcccag

SEQ ID NO: 918222 - DNA, 120 bp, Artificial Sequence
  ENSG00000225335_3 (sequence is synthesized)
aaagattctagggaagctttggagtgaattcaaagggtagagaactggggagaaactaaagccaagaggatctagtacaaatgtgggaagcttggcaaagcccgggtgaaacagaatata

SEQ ID NO: 918223 - DNA, 120 bp, Artificial Sequence
  ENSG00000225335_4 (sequence is synthesized)
ataataagtgtgatttgtggatctgtttaaaattattattatagttacaatttaccaaatactctgttcccagtactttactataaagtgcattatgtacggtatggttttgtttttcac

SEQ ID NO: 918224 - DNA, 120 bp, Artificial Sequence
  ENSG00000225335_5 (sequence is synthesized)
aatgtccttattttacattgtgtaacttgctcatggaatgactgtgtatcccctgaatagcaaacatacttagttctgtccctgcagagcagagtagagctcaatacacatctttgaacc

SEQ ID NO: 918225 - DNA, 120 bp, Artificial Sequence
  ENSG00000225335_6 (sequence is synthesized)
agcacttaatacacattcagccttcccatcatgtcattgtaccttggaacaaggagcaaataattggctgtgggatccccactaagtttttgttacacgacttcccttctctgtagaatg

SEQ ID NO: 918226 - DNA, 120 bp, Artificial Sequence
  ENSG00000225335_7 (sequence is synthesized)
ggcacacgatgagcgaccaccctctcggagacaaaccactgatgaaagcgaggtgtaaagctccttgtgggcaatctgggaaggacagaactcctgagaccttgagccccaccacaagag

SEQ ID NO: 918227 - DNA, 120 bp, Artificial Sequence
  ENSG00000225335_8 (sequence is synthesized)
cgcccggaaatcggttcatttccgagcccagcacgtacgtgcccgcgggttcctctgccacggcgtggttggccagactctgccaggcccgctcgcaggtctccagcgccgcccggaagt

SEQ ID NO: 918228 - DNA, 120 bp, Artificial Sequence
  ENSG00000225335_9 (sequence is synthesized)
tcggccgcctcctccagaaggtccacggccggcgcccgggccgggaccgcgcgcaccggctcgctgctgcgcaggggtcccccgagccccctgaggggggctgcagaggtcgaagaatcg

SEQ ID NO: 918229 - DNA, 120 bp, Artificial Sequence
  ENSG00000225335_10 (sequence is synthesized)
ctgcagaggtcgaagaatcgctcttcataacgagtccgggtccaaggcccaggtcctcagacgtcggagtgaccgcctccccagaggctccgggatatcccgagttggcctgggcgaaga

SEQ ID NO: 918230 - DNA, 120 bp, Artificial Sequence
  ENSG00000225335_11 (sequence is synthesized)
gggagagtcctcatctctttgcccacaccccttcccgaggtcgattccccgagaaggaaaaggaaggggcctatctgaggcaaaagctgggctcgcctggaggctggggaagcagtttac

SEQ ID NO: 918231 - DNA, 120 bp, Artificial Sequence
  ENSG00000225335_12 (sequence is synthesized)
acgtcagatttgcaggattcttgcatccctggaatacctggccctagcttctccggccccgcgacacgtgcaggaactgcctcagctccgggctcctggttacgatcaaagactcacctc

SEQ ID NO: 918232 - DNA, 120 bp, Artificial Sequence
  ENSG00000225335_13 (sequence is synthesized)
ggacatctttgcgctcgcccagccccgcagccgcgcggcgtcccggcggcgcggagtactctaggagttgtagttcctcagctctcggcccatcgccttctgtaatggaagtaggaggca

SEQ ID NO: 918233 - DNA, 120 bp, Artificial Sequence
  ENSG00000225335_14 (sequence is synthesized)
gtaatgaatattgcctggtgaggatgagggacttagggtggaaaccttcacaaggaccactgagaatatgttggtcccaagggcaatgttccaaaatgaatagtgaccccaccgaggcgg

SEQ ID NO: 918234 - DNA, 120 bp, Artificial Sequence
  ENSG00000225335_15 (sequence is synthesized)
ggttgggggcgctgagcataagggcctcatttttctcactgctctctgccccatcctgaatttgctgttaaaaaacaacgttaaatgcagataccaattccacttccccactgttgtcac

SEQ ID NO: 918235 - DNA, 120 bp, Artificial Sequence
  ENSG00000225335_16 (sequence is synthesized)
ttccgatctgtctttatatttctccttatcatttatcaccatctacataccaatgtctatattttacttatttttattgtctatttccttccactatgatataaactcacaaaggcagac

SEQ ID NO: 918236 - DNA, 120 bp, Artificial Sequence
  ENSG00000225334_0 (sequence is synthesized)
gatctctaatctggaattttcaacaatggggctggtgggtcagggtgcaccagatctcaggaggtttatccagaagactttcaagtgccccaagaggctgagtggtccgccaagtgcctg

SEQ ID NO: 918237 - DNA, 120 bp, Artificial Sequence
  ENSG00000225334_1 (sequence is synthesized)
agcctcatttctgctattcgtaaaatggagaagacacctcctatgatatcaagtcactgacttgttcccaggtgctaaaaaatgaaattacattgcttagccttgaaactgtgcaacctt

SEQ ID NO: 918238 - DNA, 120 bp, Artificial Sequence
  ENSG00000225334_2 (sequence is synthesized)
tcaactgctgatgaaaacaacctcagcaagatgaaaatttctccattttcctgaaactattctgcatcataaaattcattgcaggtggtacctttaaaaataaaagacttgtaaaaaatg

SEQ ID NO: 918239 - DNA, 120 bp, Artificial Sequence
  ENSG00000225334_3 (sequence is synthesized)
actcctcgccttgaccacacagatggaaggttttggctgtgttaggtcaatgcatggggaaaggtgtcagcttccccaccgtgcagtcagtgttgtgcaaaagcagaggcaggatctgag

SEQ ID NO: 918240 - DNA, 120 bp, Artificial Sequence
  ENSG00000225334_4 (sequence is synthesized)
ggcaagacaaactgggggctcctgcttgattgtctcacctgcccctctttggcagcgggttgtgtccctggccttttagacctaagcagagagggaatttcaagtcaggtggcgcctgta

SEQ ID NO: 918241 - DNA, 120 bp, Artificial Sequence
  ENSG00000225334_5 (sequence is synthesized)
cagtctatggaataggtagttaatgaggtctggagttgatgttgccttcctctccttctctgatcactttcatgtcactcacccatcccagatgccatggtgttctcaatgccccagttc

SEQ ID NO: 918242 - DNA, 120 bp, Artificial Sequence
  ENSG00000225334_6 (sequence is synthesized)
tggggtttcctgccccactccacctttcctttcctgatcctcaagaaaactgacttcttttcctaagccccccgtctccactttgtgaggggcattctgagcatggaggctaatcaatat

SEQ ID NO: 918243 - DNA, 120 bp, Artificial Sequence
  ENSG00000225334_7 (sequence is synthesized)
gcaggaacatctactgagagaggccagaacatttccatcaaagaggaggcaaatatctagtgagagaaaaaagtagttccaagactgggggctggggcaccaaaagaagttgagagccac

SEQ ID NO: 918244 - DNA, 120 bp, Artificial Sequence
  ENSG00000225334_8 (sequence is synthesized)
ctgcatggtttactggagaagtgttggcagcaagctggaaatgaaacggagagagactctttgatccacaaggtctgtgagcaagattgaaaggaaagaaaggaaaagagggttttaagc

SEQ ID NO: 918245 - DNA, 120 bp, Artificial Sequence
  ENSG00000225334_9 (sequence is synthesized)
cacgttgtcatggattggaactgtatcttctgtgatattctttgagaacatcggtaaacattggaattgcttgtgctaaaaaatgaaattacattgcttagccttgaaactgtgcaacct

SEQ ID NO: 918246 - DNA, 120 bp, Artificial Sequence
  ENSG00000225334_10 (sequence is synthesized)
tcaactcactcattggacttcatgaatgtgtggtggagcctcctgaggatttaactttcaataccatgacttattgatgagacttgtaatcaacaataaaattggaaggcctcctaacca

SEQ ID NO: 918247 - DNA, 120 bp, Artificial Sequence
  ENSG00000225334_11 (sequence is synthesized)
gtcactgacttgttcccagcatcgttcctatcctcctgactgtgaaagaaagagaatccttgaacctccctcctccctttctttccaagggaaactttgaatttgttagctcaatgcctg

SEQ ID NO: 918248 - DNA, 120 bp, Artificial Sequence
  ENSG00000225339_0 (sequence is synthesized)
ggttggcacaagattacaacctacaatttcaatgcccttccctcccacacagctcaaatggaaggaaactgattaacacatagaaaggaacggcaggctcacaggtttaagcatttgttt

SEQ ID NO: 918249 - DNA, 120 bp, Artificial Sequence
  ENSG00000225339_1 (sequence is synthesized)
ttacaaaaaggagtgggatatgggggtggtcaagttttacgggtaataacaacattctctctagatggcagggggtaagtctgcctgtcctccattgctggtaccacataagggatacat

SEQ ID NO: 918250 - DNA, 120 bp, Artificial Sequence
  ENSG00000225339_2 (sequence is synthesized)
tagtaaagtagggaaagggttatatgtgtggctggcctgttctttagagaggaaggtgggatggtatctgctgtgtacctgtctcagaccaaacctggggctggaccagtgcccctttct

SEQ ID NO: 918251 - DNA, 120 bp, Artificial Sequence
  ENSG00000225339_3 (sequence is synthesized)
tctcagccctcctccacagcctgactgtactgccagccgcacccatgagaaggaggtgtgaaggaagcctgaggacatccacctcgagaaaaggaaacaggaaaactatttccttccgcc

SEQ ID NO: 918252 - DNA, 120 bp, Artificial Sequence
  ENSG00000225339_4 (sequence is synthesized)
ttctctggaccaaatttcactcccctcagctccagagagtgctgcaaaaatcttccttagggacgctgtgaagacacggggaagaggccagccctgagcgggcaagaagaaaagcttgaa

SEQ ID NO: 918253 - DNA, 120 bp, Artificial Sequence
  ENSG00000225339_5 (sequence is synthesized)
ctttccatgcagtaccaagcaaggctattttggaaacaagcaaacaaacaaaaaatggaaaccaacaccatataaccacaggttgggtagctcctaaatcctggacagcatttggattgg

SEQ ID NO: 918254 - DNA, 120 bp, Artificial Sequence
  ENSG00000225339_6 (sequence is synthesized)
gggtaagggcaattttactccagctccttgttttataacccgcacaaggtgccaagaggtttaaggaccacaactgacctctctttccctacaagcaccattccttggattcccagtttt

SEQ ID NO: 918255 - DNA, 120 bp, Artificial Sequence
  ENSG00000225339_7 (sequence is synthesized)
gttgagctcatttgaggtcatccttgccatcctcttaaaaaatgacacagcctcttggttattccattttctatccctttctacaattatgaacacactctctaaacaggagatctatat

SEQ ID NO: 918256 - DNA, 120 bp, Artificial Sequence
  ENSG00000225339_8 (sequence is synthesized)
atgctctcatcctgcaacccaagagattaggtgacctaatgatgagaaggctaacttatttgctttcctgggtggtcctgatggaaatgaacagcagcagagttctggtgggatagagca

SEQ ID NO: 918257 - DNA, 120 bp, Artificial Sequence
  ENSG00000225339_9 (sequence is synthesized)
gtctagtctgagccactgtgtgattccccaggggactggtccctgggtacatgggtccctggctctctgtctcagttccacagatattactcaacttggccatttacgcctcagctaaaa

SEQ ID NO: 918258 - DNA, 120 bp, Artificial Sequence
  ENSG00000225339_10 (sequence is synthesized)
catatgagcatgagggaaaagggacaagaaatacttttgtcctctagaaaaacttaactcaatacatcttggctactttgcctcaacccacggggttccctggaaacatttgttgaactt

SEQ ID NO: 918259 - DNA, 120 bp, Artificial Sequence
  ENSG00000225339_11 (sequence is synthesized)
ggccaagaggagattgtatatggatggcacacctggaaaaggggagaaagcacactagttcatctcttttataagtagaatggtcccagggatgttaacctttctgatgctgatagtaga

SEQ ID NO: 918260 - DNA, 120 bp, Artificial Sequence
  ENSG00000225339_12 (sequence is synthesized)
tgagtggagtggaggtaatcgtgagaaaacttaaaaacccttaagctgtttggagactacacaccacagtggagcaaaccaaggtggggcctcactgcctcctcagagcccatccctgac

SEQ ID NO: 918261 - DNA, 120 bp, Artificial Sequence
  ENSG00000225339_13 (sequence is synthesized)
catgtcattggataggatggaagacaaagtctttgaaatggaggctgggctggcaaaagtaagtatgaagatgctactactggccttccacttcctctctctgatacacctaagaaggtg

SEQ ID NO: 918262 - DNA, 120 bp, Artificial Sequence
  ENSG00000225339_14 (sequence is synthesized)
agagacactagcttcaattccattttacaacagttctcaacaacctgaaatattcttgacttccttaagcacatggaaaactggtaagctatatctttctaactgaaattttacttattc

SEQ ID NO: 918263 - DNA, 120 bp, Artificial Sequence
  ENSG00000225339_15 (sequence is synthesized)
taaccaccaaccttttctttgattatcaaccagtttgacagtcttcagatcacaaaacaatagaacagacctgacatttacaaaactgtactacatacttatttcttttacagtagagct

SEQ ID NO: 918264 - DNA, 120 bp, Artificial Sequence
  ENSG00000225339_16 (sequence is synthesized)
gaccaattacttttctaactactaatgcaacaccatgccactgggccctggactctgatgtttctgatccctgagcaacacatctatgtccattcacagatggaaatgaaagagtgagat

SEQ ID NO: 918265 - DNA, 120 bp, Artificial Sequence
  ENSG00000225339_17 (sequence is synthesized)
tctcagaggctaaacaacattctgggagcaaattggatttttgaagggagagtcctcttagaaaattctgagcaaacatgctcccagtcacgagggatggggtgagcgggcaggtttctg

SEQ ID NO: 918266 - DNA, 120 bp, Artificial Sequence
  ENSG00000225339_18 (sequence is synthesized)
tctgtgagctatagctcccttctgaactccctcatgttcttgggaggacacaagcctcttgctcattaagcaaaggccctccaagtctcctttttacttcagcactttggaaactctcca

SEQ ID NO: 918267 - DNA, 120 bp, Artificial Sequence
  ENSG00000225339_19 (sequence is synthesized)
agacttaacttccgatctggggaggttctacgtggagcagacctatcccttcttattcctgttcctgggtgtctccataatcagcctctaccttccctggcataagtcatatctgttatg

SEQ ID NO: 918268 - DNA, 120 bp, Artificial Sequence
  ENSG00000225339_20 (sequence is synthesized)
ctgcaggaactgagtaaccaaagctagatatcccttggaccactgattagtgacacattttctccacaacaaagggaggttaaagacaaaggtttaacctgagaaactttttttttggca

SEQ ID NO: 918269 - DNA, 120 bp, Artificial Sequence
  ENSG00000225339_21 (sequence is synthesized)
agataataaagaggttaaagaggctacgtggatctgtcactgctttagcttaccattttcaattcagcaccaaagtgctcagaaagacaggctcagatcaggacgacttcttaaagggat

SEQ ID NO: 918270 - DNA, 120 bp, Artificial Sequence
  ENSG00000225339_22 (sequence is synthesized)
tcacaggcaatattactggcaaaatgattttccaaagctgagccacgcgccccaccctacagggaggggagtagaatcttatggcccagcattggcattgaggcatcttgctttttttcc

SEQ ID NO: 918271 - DNA, 120 bp, Artificial Sequence
  ENSG00000225339_23 (sequence is synthesized)
tcagaattccacaaaggcttaagagtgatctaaatgcctggctggaagctcaagtctaggagagctattttactgcactgttgagatgttctctgcaaggtagtcacagataataagcaa

SEQ ID NO: 918272 - DNA, 120 bp, Artificial Sequence
  ENSG00000225339_24 (sequence is synthesized)
tttagtagataattattctatacaagaattaatgttctctgaaacagtgattaatagaatcttcacatctggcctggctgggaggcttgggggcaggaaagggagggtggaaggatgggt

SEQ ID NO: 918273 - DNA, 120 bp, Artificial Sequence
  ENSG00000225339_25 (sequence is synthesized)
agcacatcaaaatggtgatgaacctggcaaaacgacaatgctgctgtttttgtatcctttaaagcctatatccagggttttaaatgacgctttttttgtgtgcttcctgataggaagtca

SEQ ID NO: 918274 - DNA, 120 bp, Artificial Sequence
  ENSG00000225339_26 (sequence is synthesized)
aataagttttagtattaagaactggggatataaaccaaaggaaacctagagtcaactgactgctggaggaacagaagcaatgacttctttccaccttctagatagtaatcttacttttgt

SEQ ID NO: 918275 - DNA, 120 bp, Artificial Sequence
  ENSG00000225339_27 (sequence is synthesized)
tggctaaaagcactttcttcagcattctgagttaacacgggttccctataagctcccctccccaggtggacagtcttattttctaagacaagctcaaagctcaaactcaccaaattacca

SEQ ID NO: 918276 - DNA, 120 bp, Artificial Sequence
  ENSG00000225339_28 (sequence is synthesized)
ctataaacaaagcttcagggaagagacataaccttacttcaaaagcttcaggtcagagacagccaaaatcatgtgactgctagcctcagctcaagtagtgtgcccaaatcatcacaaaat

SEQ ID NO: 918277 - DNA, 65 bp, Artificial Sequence
  ENSG00000225339_29 (sequence is synthesized)
tccatttattaatttataaggggactagaaggacaaactatttgattaatttgaaggtgagaggt

SEQ ID NO: 918278 - DNA, 120 bp, Artificial Sequence
  ENSG00000225339_30 (sequence is synthesized)
tagaaggacaaactatttgattaatttgaaggtgagaggtatcattttctcagatgctccaactaggcttctcacatccctcaaaggttatcagctaaagacaagagtttctgaggctaa

SEQ ID NO: 918279 - DNA, 120 bp, Artificial Sequence
  ENSG00000225339_31 (sequence is synthesized)
tgcaaaaacatggtcaaatgtgaaaccgcccttttagaggcagggtttgtgaaaggctgctggcctccaaaggagagtatgcctaaactctctgggctcccaggacctgtggtgacctca

SEQ ID NO: 918280 - DNA, 120 bp, Artificial Sequence
  ENSG00000225339_32 (sequence is synthesized)
agctaacctgatgcacagacaacagtatcttttagggactgcagccaatgttccccaatttactttttttttataccttaaaatatcaaatgtttcatttttaggtgatatcccaagtga

SEQ ID NO: 918281 - DNA, 120 bp, Artificial Sequence
  ENSG00000225339_33 (sequence is synthesized)
cacagaaacacagctcctccggatggtgaagtctccgctgcaaaactcacgaaacagcacagaggatgactctagggtgctctcccacttgctccaagttaggcaggtgccctgatggag

SEQ ID NO: 918282 - DNA, 120 bp, Artificial Sequence
  ENSG00000225339_34 (sequence is synthesized)
gcaaggctgagccattaacatgcacagctccatatcctggaagcctctgtagccttgaggagataggctctatccaacaggactcagaataaatgactgccacctcaactgagcagtatg

SEQ ID NO: 918283 - DNA, 120 bp, Artificial Sequence
  ENSG00000225339_35 (sequence is synthesized)
aactgcccacctcaactgggcagtctgacctcttccacagtctttaagaaacagaagagccatttgcattatttaatcaccattcaataatctcctccctccccatagctgcttgagtta

SEQ ID NO: 918284 - DNA, 120 bp, Artificial Sequence
  ENSG00000225339_36 (sequence is synthesized)
actgtcccacaagtgtcctgtgttttgtaaagatgagggttattttctgaaatgcagatgggactaggatgaagctgtattatcaattacagagacagccaactctcatttctcttaaag

SEQ ID NO: 918285 - DNA, 120 bp, Artificial Sequence
  ENSG00000225339_37 (sequence is synthesized)
caaaaattcattccactgtgatttctccaggtatttcctgcaattctaaatccgcccttgatattagagaatattaaaatcacacagttgtggcaaaaatcacattgtggctattaaatc

SEQ ID NO: 918286 - DNA, 120 bp, Artificial Sequence
  ENSG00000225339_38 (sequence is synthesized)
ctttttgtgaactaaaaaaagtgaatgtggcttaggctaagctgtttttttttttttttttttaaagatgaggatgcggactccaacaaaggcattaagaaagtactagatgaaaatgag

SEQ ID NO: 918287 - DNA, 120 bp, Artificial Sequence
  ENSG00000225339_39 (sequence is synthesized)
aaatatgtgaaggataacatgtgaaatgtacactcaggtctaacaaatacctattatttctctggttaagaaggtttagcaggagcctccaatgagcactgtatgtagagaaaagggaag

SEQ ID NO: 918288 - DNA, 120 bp, Artificial Sequence
  ENSG00000225339_40 (sequence is synthesized)
gagcaggaggaggaacagatctgcacagaatttttttcttaaaaaccacaaagggtgacttttttcttctaagcaagcaagcctgagaggcattacatgggctggctcctaatatcaaaa

SEQ ID NO: 918289 - DNA, 120 bp, Artificial Sequence
  ENSG00000225339_41 (sequence is synthesized)
caaaatatttctttgccacaaaggaacttgactatgtagcaacacatttacaaaactactgcaaaacactcccagagggcagtgacctactctgctccccagaggctccaagaagcaagg

SEQ ID NO: 918290 - DNA, 120 bp, Artificial Sequence
  ENSG00000225339_42 (sequence is synthesized)
cctcaagtgcctcatgttccatggggctgtgcagtgcaatgcagaaggcggaaatcctgctgtgacgccaccctcgagaccttctgcagcctgagagggggtgatactcccacacccttt

SEQ ID NO: 918291 - DNA, 120 bp, Artificial Sequence
  ENSG00000225339_43 (sequence is synthesized)
gatccttccagatggctcagcctagatctagcagtgagagagccctctccatgcagggcagatggagtggtggacacttgtgaaaacaaaacactaactgttccatcctgttatatttgc

SEQ ID NO: 918292 - DNA, 120 bp, Artificial Sequence
  ENSG00000225339_44 (sequence is synthesized)
tgtgaggaaaattaagattcctgttgtatgggctgcactgtttctggaagactacagaaaatctaacatggttgacacttcctggtagcccttctgtacatacacacacacacacccaga

SEQ ID NO: 918293 - DNA, 120 bp, Artificial Sequence
  ENSG00000225339_45 (sequence is synthesized)
gagaagacagagagaaaatcctggtccaaaagatcacatgaccttactagtgtttccccaatgactgtaatttataaactaaaaatttttacaaatccactgctatcttcttctgtcctg

SEQ ID NO: 918294 - DNA, 120 bp, Artificial Sequence
  ENSG00000225339_46 (sequence is synthesized)
agtttggtagactttaatggatgctccagcaataaccagaatctaggacatgcagactcactgtgagcgagaggctagggatctgccctaaacataggaacctgtttctatcaagcctga

SEQ ID NO: 918295 - DNA, 120 bp, Artificial Sequence
  ENSG00000225339_47 (sequence is synthesized)
atgaggtcagctctggtagaattaatgacaaatcaatgtcagtgaaatattctgcaaacagggtagcttttgtgctttcttttgattattttctttggggagataaaggtattgcaacca

SEQ ID NO: 918296 - DNA, 120 bp, Artificial Sequence
  ENSG00000225339_48 (sequence is synthesized)
tgggtctaactaatctatcactaaaggactgtgacgacattctcaataaagacagtcatggtgtttactgtgccaaggagggaaaatcccagatcatcagaatcccagtgcaacagaaaa

SEQ ID NO: 918297 - DNA, 120 bp, Artificial Sequence
  ENSG00000225339_49 (sequence is synthesized)
cagcaccagtttcaacaattctgatgttggacaaagcctctttttgtcagttaagaaagcgtaagcacaatctctcagtcaattgcattaacaggaatccattcatgtcactgaaaaata

SEQ ID NO: 918298 - DNA, 120 bp, Artificial Sequence
  ENSG00000225339_50 (sequence is synthesized)
cttcttggcacagttcactttcctgacccaaagacaccaacaacaatcaaaactgcactttcagggtagtatattgttacactagcccagtcaaaacatactcagaacatttaaaaatgt

SEQ ID NO: 918299 - DNA, 89 bp, Artificial Sequence
  ENSG00000225339_51 (sequence is synthesized)
actagcccagtcaaaacatactcagaacatttaaaaatgtataaattactgttagcactgcagttccgttttattttcttatttattta

SEQ ID NO: 918300 - DNA, 62 bp, Artificial Sequence
  ENSG00000225339_52 (sequence is synthesized)
tctgcctcccaggtttaagcaattctcatgcttcagcctaccaagtagctgggattacagga

SEQ ID NO: 918301 - DNA, 67 bp, Artificial Sequence
  ENSG00000225339_53 (sequence is synthesized)
tgcagtccctttttaaagagtactgactgttttcctgcaaagtactttcaaatccataccataaagg

SEQ ID NO: 918302 - DNA, 120 bp, Artificial Sequence
  ENSG00000225339_54 (sequence is synthesized)
tgttttcctgcaaagtactttcaaatccataccataaaggtagaatttatctggaagaatgtgttttttgaattccacctggcacttggttaaatctactttattttgccctttatttat

SEQ ID NO: 918303 - DNA, 120 bp, Artificial Sequence
  ENSG00000225339_55 (sequence is synthesized)
ttgaacagaactttagaatgctctaggtcaggaaaagaaacagtgtgttcgtttttaagaaggatgtgtgaatagtaagttggcattcagactcaagtcccatggtattgttcttatcca

SEQ ID NO: 918304 - DNA, 120 bp, Artificial Sequence
  ENSG00000225339_56 (sequence is synthesized)
atgggacctctccttgggaatataattcctttcccagaggtatcatggtatcccaagaatataactgctctttggctctgtgtgtgaagattgggggagaggatgtaaactaagagtata

SEQ ID NO: 918305 - DNA, 120 bp, Artificial Sequence
  ENSG00000225339_57 (sequence is synthesized)
atcgtcctggggcagtttgcacgctgatggcccaaggtccgcgacccaggttcgcttgagtctctatcagagggcaagccaggcgtgctttatggacaatgcgctcctcaggccttgacc

SEQ ID NO: 918306 - DNA, 120 bp, Artificial Sequence
  ENSG00000225339_58 (sequence is synthesized)
catgcttgttgagccggcggcgcatggcgcgtgtcttcttaggccgcaggtccaggggcttgtagttcctgcccttgtagaatttcctgaggttttctttctgagtctagttaataacag

SEQ ID NO: 918307 - DNA, 120 bp, Artificial Sequence
  ENSG00000225339_59 (sequence is synthesized)
tgagaacacaggcaatggatttgcggacgactcggatcttagagagcttggaggccgcaccgcctgtcactttggcgacgcgcagctgggacagctccaccttcaggtcgtccagctgtt

SEQ ID NO: 918308 - DNA, 120 bp, Artificial Sequence
  ENSG00000225339_60 (sequence is synthesized)
ggcctgagctgacaggcagaggtggagagggtcagtccccatcgacagaagcaaagagatcgtcctggggcagtttgcacgctgatggcccaaggtccgcgacccaggttcgcttgagtc

SEQ ID NO: 918309 - DNA, 120 bp, Artificial Sequence
  ENSG00000225339_61 (sequence is synthesized)
tctatcagagggcaagctcaaactgttccttccattttgggaccagggaacagagctcacttaatgctgctctcccactgatgatgcccacccattctcggcctgcaagccctaccactc

SEQ ID NO: 918310 - DNA, 120 bp, Artificial Sequence
  ENSG00000225339_62 (sequence is synthesized)
acagcttcaaaaatggctccgcccttcctgattccaccccacacagaagaaagcaacttcttgtgatgcttccttattctggatgtggctcacctcttaccccttccaactcctttgggt

SEQ ID NO: 918311 - DNA, 120 bp, Artificial Sequence
  ENSG00000225339_63 (sequence is synthesized)
cccctagaaagcctccctggctaaggggtacaggccctctcctcagcagtgggcactgaccgtctaaccagggctctgtctcggcacctggtagcaaggacggcaagatacaacaacatg

SEQ ID NO: 918312 - DNA, 120 bp, Artificial Sequence
  ENSG00000225339_64 (sequence is synthesized)
ctgattttaatagcctctggctttctccactgcgtttctcacctgaatgccctgcacaccaaatcttccatggggtcacccttgacctctagggcaattcccaagaatctagcagaggag

SEQ ID NO: 918313 - DNA, 120 bp, Artificial Sequence
  ENSG00000225339_65 (sequence is synthesized)
agaagcaaagagatcgtcctggggcagtttgcacgctgatggcccaaggtccgcgacccaggttcgcttgagtctctatcagagggcaagttatcaggtgcccagagatggaagccaccc

SEQ ID NO: 918314 - DNA, 120 bp, Artificial Sequence
  ENSG00000225339_66 (sequence is synthesized)
tgactggggatgagcagttacttcaccaactcaaactggcttagacggtcagtgctaccacctggcatgtcaacaaaggatggaggaagtgcagtgctgctccccgcaatgatatgagct

SEQ ID NO: 918315 - DNA, 120 bp, Artificial Sequence
  ENSG00000225339_67 (sequence is synthesized)
gcaatggtgtcctttgggctgatttcctctctccacccacgtccgaagttttggggcgtctctttagagttctttctctctagccacaagtcctgcaggccattggaagactaggctgca

SEQ ID NO: 918316 - DNA, 120 bp, Artificial Sequence
  ENSG00000282012_0 (sequence is synthesized)
ggggcttggctgagcagagcatggccagcctagccgagggcagccagcatcctacactcactggtctcgaggtgcccaagccaggggcccaggactttgggcattactgggaaatgatgg

SEQ ID NO: 918317 - DNA, 120 bp, Artificial Sequence
  ENSG00000282012_1 (sequence is synthesized)
ccaggactttgggcattactgggaaatgatgggaacccagggtgaggtggcgtgaaacaagatgagatgctcaatgatttgggaggttggttagtgtcaggcctctgagcccaagccaag

SEQ ID NO: 918318 - DNA, 72 bp, Artificial Sequence
  ENSG00000282012_2 (sequence is synthesized)
aacttatctcccttggctgactctcttttcggactcagcccgtctgcacccaggtgaaataaacagccatgt

SEQ ID NO: 918319 - DNA, 80 bp, Artificial Sequence
  ENSG00000268458_0 (sequence is synthesized)
agagaggctgaggaatacaggcatgagccacagagcccagccaaaactacattttaaaaataattttttatcattacaca

SEQ ID NO: 918320 - DNA, 120 bp, Artificial Sequence
  ENSG00000268458_1 (sequence is synthesized)
agaacttgaaggatccaaaaatcgaggtgacattctcagatttgtgtggcaaaaaaagaatagaaaaataacagatgcaaagaatgtgttccaccaatatgtggaggatcccttttattt

SEQ ID NO: 918321 - DNA, 120 bp, Artificial Sequence
  ENSG00000255801_0 (sequence is synthesized)
aacactcaataaagctcttctttgtcttgttcaccttccacttgtctgcataggcaggatttggcaccactggcagtgacactgtaacattttgggggctcatctgggatctccaaaagg

SEQ ID NO: 918322 - DNA, 120 bp, Artificial Sequence
  ENSG00000255801_1 (sequence is synthesized)
gtgaagaaagagaggattaatgagaaaaacaaattagacggcatagcctagatgcagaaagtctaactccaaaattcatgaaccttccaaaatttaccatgttgtccctcttcacttgga

SEQ ID NO: 918323 - DNA, 120 bp, Artificial Sequence
  ENSG00000255801_2 (sequence is synthesized)
aggaaatgactgcatgcatgtagaaggatgacaaagatggagaataaccagagtgcataagagggtaagatggaaggtatgaggaagtggtgattaccagaacagaaaagagagaaaaag

SEQ ID NO: 918324 - DNA, 120 bp, Artificial Sequence
  ENSG00000255801_3 (sequence is synthesized)
tcaaaagggagaaaggggaggaaagcaaactaaatctcaggaaacattgtgaaaaaatagtgagaagtgagaaactcttccagcatagtaactgtattcaacaggtatgtctatgctgtg

SEQ ID NO: 918325 - DNA, 120 bp, Artificial Sequence
  ENSG00000255808_0 (sequence is synthesized)
agttgccggctgcccggaggggccgcgtccggggattcagcgggtcaccggggtcagctccctgcccggaccgacccggttcttaggcctctgcttggcatgaaagcggttggggcggca

SEQ ID NO: 918326 - DNA, 120 bp, Artificial Sequence
  ENSG00000255808_1 (sequence is synthesized)
ggacgtgtctggactggagggtgcgcttgggtctcgctaggcctttgccagcgacttgccgcatgaccttgctcggatcccctccccccacttcctgggcctcagttttctcatctccct

SEQ ID NO: 918327 - DNA, 120 bp, Artificial Sequence
  ENSG00000255808_2 (sequence is synthesized)
agacatctacagactacaggaatcagtgatggaactgcctcccagccagaaaacctgcagggtcagaatcattactccattttacggatgccggatgtcttctcagctaatcctcccatc

SEQ ID NO: 918328 - DNA, 120 bp, Artificial Sequence
  ENSG00000255808_3 (sequence is synthesized)
caatcctctgggaagcctttcaggatgccccaccccgacttatcgctgccttctctgaactgccagcaatggacctcagtggggcggaggatcagctttcatctccttgcagacacctgg

SEQ ID NO: 918329 - DNA, 120 bp, Artificial Sequence
  ENSG00000279220_0 (sequence is synthesized)
ggaagagcgcttgagcccaggaattaaggctgcagtgagctataatcatgccattgcaccccagtctgggtgacagcaaaaccctgtctcaaaaaaaaaaaattacagagctacttgtgc

SEQ ID NO: 918330 - DNA, 120 bp, Artificial Sequence
  ENSG00000279220_1 (sequence is synthesized)
gtttacaaaatatagtatttgataaaaatatttctcagaattgcacaagaaggaagacagggaccactgataagacaagggtgtaggatattaaccagacttggcttctttctctcctgc

SEQ ID NO: 918331 - DNA, 120 bp, Artificial Sequence
  ENSG00000279220_2 (sequence is synthesized)
ttgcattttttcatttgtttgtgtgaagatttatcctttcctgctgcctgttttggatttgttttcacttttgtaggggcggttttagctgataacctcaccagtcttcacttcggctct

SEQ ID NO: 918332 - DNA, 120 bp, Artificial Sequence
  ENSG00000279220_3 (sequence is synthesized)
tccttcgctgccccttcagctgcggggaacttgctctagggcatcttggcaggagggagggcgtctgagggtactggtgcctgcagacttcaagcacggagagacttcttgaagcggtgc

SEQ ID NO: 918333 - DNA, 120 bp, Artificial Sequence
  ENSG00000279220_4 (sequence is synthesized)
tgcctggccacttggaaaaaggtggattaatttggggatatccgaggagccccagagggccattgtaattcaagatcttcagtaaacttctgccgcggagaaagaacccggccagtattg

SEQ ID NO: 918334 - DNA, 120 bp, Artificial Sequence
  ENSG00000279220_5 (sequence is synthesized)
ggcatggaagctccgcgccccttcccacagaccttgtcccgtgcatcgcttccatccggctcttcctgagttctggcccttgtagtaaacctgcagtcttaatctcaataagtatccagg

SEQ ID NO: 918335 - DNA, 60 bp, Artificial Sequence
  ENSG00000279220_6 (sequence is synthesized)
actaccatttttccccctctgtcttttgatgttcacctgacaagctcctggtggtagccg

SEQ ID NO: 918336 - DNA, 120 bp, Artificial Sequence
  ENSG00000279220_7 (sequence is synthesized)
gaacaggggtttcggttgactgagaagttcctgtgagagaaacaggctcaaatagagagaatagaaagatgtcgtgaggagccaggaaacaaaattttccaggggtcagggaatgaattc

SEQ ID NO: 918337 - DNA, 120 bp, Artificial Sequence
  ENSG00000279220_8 (sequence is synthesized)
taatcagaacaaggagccagcaagaacttccagcctaggaggtacttttcaaaagaagcctgggactctaacccagcttctgagagtatactcagaattgttaagaatcaggcagggcgc

SEQ ID NO: 918338 - DNA, 120 bp, Artificial Sequence
  ENSG00000279220_9 (sequence is synthesized)
acacggaggtcctggaaatggtggcgcgcccagagggcatggaagctccgcgccccttcccacagaccttgtcccgtgcatcgcttccatccggctcttcctgagttctggcccttgtag

SEQ ID NO: 918339 - DNA, 120 bp, Artificial Sequence
  ENSG00000279220_10 (sequence is synthesized)
taaacctgcagtcttgatcaattttctctcaggaggctcttcattgactcatgcaaacagatttctggcgggaactgctccaaggccttccagatgtgcacaggcatggatgaatcagag

SEQ ID NO: 918340 - DNA, 79 bp, Artificial Sequence
  ENSG00000279220_11 (sequence is synthesized)
aggctgaggcgggtggatcacttgaggtccggagtgtgagatcagcctgactaacaagacgtcgtagcgcatgcctgta

SEQ ID NO: 918341 - DNA, 120 bp, Artificial Sequence
  ENSG00000279220_12 (sequence is synthesized)
gaaactctgcctcggagggaaaaaaaaaaaaaaagaattgaaagaatgaaaacctgtcctcaatgtgcctgaataaatgcttgttcagacactggatgtgaagtccgattctccactgga

SEQ ID NO: 918342 - DNA, 120 bp, Artificial Sequence
  ENSG00000279220_13 (sequence is synthesized)
tacccaaactgcaggaggtaggtggttcccatctggacccgagttgcctaccagaccattgtcagaaacacagctggacgtgagttaaagtggtgaaaaaacagattttattcagtaact

SEQ ID NO: 918343 - DNA, 120 bp, Artificial Sequence
  ENSG00000279220_14 (sequence is synthesized)
actgaaagtagggaaggagctgagcttattccgatttcggcagaggtgatttgggtgttttaaagaaagaatgagggagacgggaataaaggagctccgaagtgtcggggaagtgaaaaa

SEQ ID NO: 918344 - DNA, 120 bp, Artificial Sequence
  ENSG00000279220_15 (sequence is synthesized)
gtgcaaaggggagcttccggatagcgaagcacgtggaggttcctggagggtgtcctcccagagaggacgtggaaccttcccgctcccaccgcgcacttgccctgtgtatctcttcccttt

SEQ ID NO: 918345 - DNA, 120 bp, Artificial Sequence
  ENSG00000279220_16 (sequence is synthesized)
ggctgttcatctacatacgtggtagtttcctttatagtaaactaataaacggaaatttgcagcagctgtgaaaaacttcaattttctgaatccacttttgatttttagtggcgattgctt

SEQ ID NO: 918346 - DNA, 120 bp, Artificial Sequence
  ENSG00000279220_17 (sequence is synthesized)
aaatgcctcagttttaagtatcataacgaaaggaaagcatacgattcctatattaatgaatcggaagtaccttttgcagtttttgttttgctttttcagacaaggtcttattctgtcatc

SEQ ID NO: 918347 - DNA, 120 bp, Artificial Sequence
  ENSG00000279220_18 (sequence is synthesized)
ttttgttttgctttttcagacaaggtcttattctgtcatccaggctggagtgcattggtgggaacacagctcactacctactcagcctcctgagctcaagcgatcctcccacctcagcct

SEQ ID NO: 918348 - DNA, 120 bp, Artificial Sequence
  ENSG00000279220_19 (sequence is synthesized)
cctaactaatgttttgttttatattatattattttattttatagagacagaggtctcaccatgtcgaccaggctagttttgaactcctggcctcaagcaatcctcctcccacctcagcct

SEQ ID NO: 918349 - DNA, 120 bp, Artificial Sequence
  ENSG00000279220_20 (sequence is synthesized)
cccaaagtgctaaaatgataggtgtgagccactgcacccggtgattttgcagtttttggaaaccacaagtttgatttcggtgtgaatattttggaagaatctatgaaacaaatgcacttc

SEQ ID NO: 918350 - DNA, 120 bp, Artificial Sequence
  ENSG00000279220_21 (sequence is synthesized)
atctgatttctcagtaatgttgatgatagatttacttctgaacctcttggacgtgtgtatgttagaagttctccacccaattgatacggaattaaatagctgtgaaattactgtaagaag

SEQ ID NO: 918351 - DNA, 120 bp, Artificial Sequence
  ENSG00000279220_22 (sequence is synthesized)
aaccgaagcaacgttggaaatttggtaactaatgccacgttggaagctattcatgccaatgtagcattgcttcatacaggtacttccagatctaattgaatacatccagtgggaaatttc

SEQ ID NO: 918352 - DNA, 120 bp, Artificial Sequence
  ENSG00000283769_0 (sequence is synthesized)
aattggcctttgcccgcccctcctgccgggcctaggatacccccatggccttgggcttccctgggcttggtggaggaggcagctgcgggcggcaggagggaggcaggtactctttcccca

SEQ ID NO: 918353 - DNA, 120 bp, Artificial Sequence
  ENSG00000283769_1 (sequence is synthesized)
gggcccacgcagggctggcacaggctggctgggcctcgccctccctctctgcaggctccaggcactgcccccaccccgtcactcctttacaactgttctttctgttccccacagcgtccc

SEQ ID NO: 918354 - DNA, 120 bp, Artificial Sequence
  ENSG00000283769_2 (sequence is synthesized)
tggtggacgcaccctcggaacaaccttgcacagagcccagggccgggccgggccgttgcacactcgccctgggagacagcagcttcactgagaccacaattattctctggttccaaggag

SEQ ID NO: 918355 - DNA, 120 bp, Artificial Sequence
  ENSG00000283769_3 (sequence is synthesized)
gaaactgaggctccaagagacaaagccacttgctcaaggtgacatccagcaaaaggctgagcctggtctggagccagggccacagggccaccctccactctggccacgaggcccccagaa

SEQ ID NO: 918356 - DNA, 120 bp, Artificial Sequence
  ENSG00000283769_4 (sequence is synthesized)
ggccgcagacactccttgtgtacaggaccacgctccaccctggccgtgatgccctcttgggccgtggacactccttctatacttcggggtcctgtatggccctggagggtggcaagggct

SEQ ID NO: 918357 - DNA, 120 bp, Artificial Sequence
  ENSG00000283769_5 (sequence is synthesized)
tgggaattctttagctctgttgctggggaatgttcagattccaggcaagaagatgacacgactgcctctgtgagccgcccaccctgacccaccaggcctgtgctggccccacctgctcct

SEQ ID NO: 918358 - DNA, 120 bp, Artificial Sequence
  ENSG00000283769_6 (sequence is synthesized)
tctccaatctgctgagggcttgctgctgcttctcaaccagcgcggccagcacagctctgtccctcttgctgtccaggcacctggggggaggtggcaacatcactgccaatgttgacagcc

SEQ ID NO: 918359 - DNA, 120 bp, Artificial Sequence
  ENSG00000283769_7 (sequence is synthesized)
cgtgcaagtggatatagaaagtcacagacacagccagccctggtcggccacatcaacctggaatgccctcccaaggtgcaggcaccagggaggacgcagccatgcgtggacaggcttgga

SEQ ID NO: 918360 - DNA, 120 bp, Artificial Sequence
  ENSG00000283769_8 (sequence is synthesized)
gtctaaagagacaaaggctagccgagagccgcccctgccaccctgaaggcccagcccaggccagtgggtcctctggggagggaggtgggggtcacccacatccaccccccacccatcatg

SEQ ID NO: 918361 - DNA, 120 bp, Artificial Sequence
  ENSG00000283769_9 (sequence is synthesized)
gaataaacaccctcagtctggcccgctcagacaccgggtgaggatgttaactggaatcacctttctggagaccaatgtggcagtatcaagcggcttccagatgcattctcactgacccgg

SEQ ID NO: 918362 - DNA, 120 bp, Artificial Sequence
  ENSG00000283769_10 (sequence is synthesized)
tcattccatttctaaggttttaccttaaggaaatgatctctctatcttcattaataatggcaaaacgttggagacaacctagaggcccggagatccgggacaagcgaagggagttacagc

SEQ ID NO: 918363 - DNA, 120 bp, Artificial Sequence
  ENSG00000283769_11 (sequence is synthesized)
cctgtctctacgccggtgcgccctgtgtgttatagcggttatgtagctacacagaaaggttttcctgacatataaattgaaaacgcaagttacaaaacagcacgtactgcccatttgcaa

SEQ ID NO: 918364 - DNA, 84 bp, Artificial Sequence
  ENSG00000283769_12 (sequence is synthesized)
aaacgcaagttacaaaacagcacgtactgcccatttgcaagttgaaatagccatgtgtgtttctccccaaaacagagtatccgc

SEQ ID NO: 918365 - DNA, 120 bp, Artificial Sequence
  ENSG00000283769_13 (sequence is synthesized)
aaagtatgcacaaagatgatctcagaggtcacctttggaacgatgggggtatttttttatttgtgtattgagtactttactgccttatgtaagtttcagcaaacacctattactgtttgg

SEQ ID NO: 918366 - DNA, 120 bp, Artificial Sequence
  ENSG00000270504_0 (sequence is synthesized)
gccgcccgggcacccctcgtctgcgggcgcggggtccaagtgtcccctgtccagggcgggcagaaaggagaagtcgcaatctcggttgaagtctcttccccgcctccttcgtgcacttca

SEQ ID NO: 918367 - DNA, 120 bp, Artificial Sequence
  ENSG00000270504_1 (sequence is synthesized)
tccttcgtgcacttcaaggctgcctcggccccgcgcccctcccgcgtccccggccccgcaccttgccgcagcggcccctgcgccagttcggaccggtcctcgggaaaggcgtcgcgcagg

SEQ ID NO: 918368 - DNA, 120 bp, Artificial Sequence
  ENSG00000270504_2 (sequence is synthesized)
ccaggtccgccaggctgcggtgcaggtagagcacgctgcggtccgaccactccgtgcggatctcgaagaactcctcttcgtcgccgcgccggctgacgatgagcctgcggatgccgttca

SEQ ID NO: 918369 - DNA, 120 bp, Artificial Sequence
  ENSG00000270504_3 (sequence is synthesized)
cccagcagccgcgcacgaacatgttcacgagcgacgtgccctcaaacaccgccgaggccatgtcgcacgcatgcccccgccaagggctccccagccccgccgcccgcccgcccgcaggag

SEQ ID NO: 918370 - DNA, 120 bp, Artificial Sequence
  ENSG00000270504_4 (sequence is synthesized)
ggggtcgtccggggtcggcccgtcactccaaggaggctgcgtatggcccgcgttcggggcagcggggcggcgcggcggcgagtggctcgggccggccgggcgcggctttataaggcgctt

SEQ ID NO: 918371 - DNA, 120 bp, Artificial Sequence
  ENSG00000270504_5 (sequence is synthesized)
agtggctcgggccggccgggcgcggctttataaggcgcttcccatcgcgggcggcgcggtagtcgacgtcgaggttaggccgcgtccgcctcccgcccgcctcccgcggaacgggcgccg

SEQ ID NO: 918372 - DNA, 120 bp, Artificial Sequence
  ENSG00000270504_6 (sequence is synthesized)
cgggccgctctggaaaggaagaggtccggctggccgcgcccccgccgcctccgcagagaccgcgctgccgcggccacgagaacccccggagccgggagccgggccgagtcccaagcgctc

SEQ ID NO: 918373 - DNA, 120 bp, Artificial Sequence
  ENSG00000270504_7 (sequence is synthesized)
ctcgcgccccccgcgcctcctccctcgcggccccggagccgcaggtcggtgactggaccagccgggaagggaggcggggcgggccctgcttgccaggcgctcggcgcagacttttttctc

SEQ ID NO: 918374 - DNA, 120 bp, Artificial Sequence
  ENSG00000270504_8 (sequence is synthesized)
tttttctctttccgtttcgcgatcctcgggacctcccagggctaggagctgcgcgccccacccggcccgcgaggggatggcaactacccggggtccggaggcggggctgcgagtgtcggg

SEQ ID NO: 918375 - DNA, 120 bp, Artificial Sequence
  ENSG00000270504_9 (sequence is synthesized)
ggccgggtcgagcaccgccccgacgagggcccaggccagtccggcccgccccgggttccctccgtgcctcaggtcccctccgtgccccgcgtcctcccgcgcattccggtcatgcctcag

SEQ ID NO: 918376 - DNA, 120 bp, Artificial Sequence
  ENSG00000270504_10 (sequence is synthesized)
gtcatgcctcagccgcgccaaggcctgggacacggccggacagaccgcggggcagccctcggagaagtgggaagaggggagaaaacagtggcgaaaagaaggtctcctgggaaggagcgc

SEQ ID NO: 918377 - DNA, 120 bp, Artificial Sequence
  ENSG00000270504_11 (sequence is synthesized)
ctgggaagctggacgcggtgggtgctcttgaggggcctcaggagtggacttggggaaaccgcccgccctgaaaactgactcagcggcgcgttactgaggccgttcctagttggaagagaa

SEQ ID NO: 918378 - DNA, 120 bp, Artificial Sequence
  ENSG00000270504_12 (sequence is synthesized)
ttaatagcacttgtttgagaattacaagttagttccagaaatgaatcgagtgacctcacagcccgtaggcaggggtgggagagccagggtgagcccctcacctcaccccgcccccgcccc

SEQ ID NO: 918379 - DNA, 120 bp, Artificial Sequence
  ENSG00000270504_13 (sequence is synthesized)
ggcagcgctctggaaagcctcaaagcccagcgctgcgcggaaatgttagaggcccaaggcaggtggcctgtctggactcagacccgacccagatgtccccccaggtccctaccactcagt

SEQ ID NO: 918380 - DNA, 120 bp, Artificial Sequence
  ENSG00000270504_14 (sequence is synthesized)
cccacctgcctcgactcagtcccgacccagatgaccaccccccccccgcccccaccacgaccaacttttattccgactgcgccagtgacttgcagatagcatagcttcaaatttcctcac

SEQ ID NO: 918381 - DNA, 120 bp, Artificial Sequence
  ENSG00000270504_15 (sequence is synthesized)
ctggtctggggcggtgaacaggtcaagatggagagtgtcaagagagacttttgctttgtctatgatgtttttatatacacttgctaattaaatgaacgcatatgtttcctgtgtaatttt

SEQ ID NO: 918382 - DNA, 120 bp, Artificial Sequence
  ENSG00000270504_16 (sequence is synthesized)
gtataggggaataggggccgtgggaactggaagtaaacagccagtgtgccagcagctcttgactctaggtggtgggaataagtgccgttgtaaccacagtaccagcccaaacggggctta

SEQ ID NO: 918383 - DNA, 120 bp, Artificial Sequence
  ENSG00000270504_17 (sequence is synthesized)
ctctgtttgtaacaatgttgagttaccttgcaggtataacagagccaaaaactcttaagtcacaaagcccaggcatgcaccatagaaaaagatttgatctctaacaaacatccagaacca

SEQ ID NO: 918384 - DNA, 120 bp, Artificial Sequence
  ENSG00000270504_18 (sequence is synthesized)
actattcgtctccttggaacgaagaagactgggacatgactggaacccgaacattcgaactctcagaagggaagggtctcttggcccagaagataggggctaaaatccacctcaacatac

SEQ ID NO: 918385 - DNA, 120 bp, Artificial Sequence
  ENSG00000270504_19 (sequence is synthesized)
cgtaccataaatggccaaatttgaaggccttcaaacagatcctgcccagccaacatttctaagtcctttcctttgccctctgcttccttagaacttgccccagaccccaaatcagggagg

SEQ ID NO: 918386 - DNA, 120 bp, Artificial Sequence
  ENSG00000270504_20 (sequence is synthesized)
aagatttgaacctgcctcctgtctccttgctggctggtcttgcaataaagtctttcttttctcaaaggcagtaccatggtattgcttccgtgtacattgagcagtgagcctgaggcagga

SEQ ID NO: 918387 - DNA, 120 bp, Artificial Sequence
  ENSG00000270504_21 (sequence is synthesized)
aaatagggtcaggaggcagggaacataaggccaattcacacttcggctgtaacaggaaatatccactccatagggcgtatgctgtaagtgactttgtaactttacttcatcctctgcatt

SEQ ID NO: 918388 - DNA, 120 bp, Artificial Sequence
  ENSG00000270504_22 (sequence is synthesized)
tacgtagagggtaagtgaagtaaacaatggaatcatctaggggatatttaaacttccaaaaattctgtaacggggcctttgagcccctatgttcgggccgctcccacactgtggaatgta

SEQ ID NO: 918389 - DNA, 120 bp, Artificial Sequence
  ENSG00000283766_0 (sequence is synthesized)
aggacaagaatgaggaagagatttgacccagaataaagaagcagaaggtgcagcttcacaccatgcgacgcaggccccacagccacgttcctctcaaggctcaaaatcagggccatgtgc

SEQ ID NO: 918390 - DNA, 120 bp, Artificial Sequence
  ENSG00000283766_1 (sequence is synthesized)
caagctgtacagaactgacggggcataggccgaacctggagccacatgaaggaagtgacgtggtgaccttggtcaggctacacagctgcattgtccgttaatgggattctgacaagaatg

SEQ ID NO: 918391 - DNA, 120 bp, Artificial Sequence
  ENSG00000283766_2 (sequence is synthesized)
aggaagagatttgacccagaatcaaagaagttgcagcttcacaccttgtgactcaagccacacggccacattcctctcaaggtgcaaaatgatctcaacttacaacagcttcacatctga

SEQ ID NO: 918392 - DNA, 120 bp, Artificial Sequence
  ENSG00000283766_3 (sequence is synthesized)
ttgcacaaagatcactacaccttccaaaaccctgctcaggacgtcttagtcatgcattcacaatgggaactggaagtaaaaagcattgagactgttccactgacaattgttttacttctt

SEQ ID NO: 918393 - DNA, 120 bp, Artificial Sequence
  ENSG00000283766_4 (sequence is synthesized)
ttttatcttcattagcaggcatcaggcaactttaaccaaccttctaggcagttgtcagtgatcattgtcatattaaagtgcatgttatagattataaattactttcatgttatttttcct

SEQ ID NO: 918394 - DNA, 120 bp, Artificial Sequence
  ENSG00000283766_5 (sequence is synthesized)
ttatcttacacttacttacagcattatgttgatttttaaactatatggaaagggaagttacatgagctataaattccccattacatggtcaagccgcattacaaaagacttgctatatta

SEQ ID NO: 918395 - DNA, 120 bp, Artificial Sequence
  ENSG00000233960_0 (sequence is synthesized)
gggttcaacagggaccatccctcagaacacctacaagtggcttctctagcatggagcctcagacttctgtatctcagggatcccaggaagatgattctatgagtgaaagttgtaagccct

SEQ ID NO: 918396 - DNA, 120 bp, Artificial Sequence
  ENSG00000233960_1 (sequence is synthesized)
tcctatgagatagtttcagattctgttcttttgtgacattgcattaatcaacaagtcatcaagttcaactcaaactcaaagggagaggaattctattccacctcttagtgagacaagtac

SEQ ID NO: 918397 - DNA, 120 bp, Artificial Sequence
  ENSG00000233960_2 (sequence is synthesized)
caaggaatttgtggccatctttaatctattacatagatttctaagtcaaaatgttttgaccaaagccacatttgccagatattgggagataccactgctctcactcagaagcctgaatct

SEQ ID NO: 918398 - DNA, 120 bp, Artificial Sequence
  ENSG00000233960_3 (sequence is synthesized)
agtgctgctggaattttggacagcctattactacagaaatgtgttgaaacataatataaatcagaaaggaacaaatatagccagcatacaagaatgaggggagaagagagtgggagtcac

SEQ ID NO: 918399 - DNA, 120 bp, Artificial Sequence
  ENSG00000233960_4 (sequence is synthesized)
ctgcccaagagaacacaggagagtcctgaggttcccgtgctgaagaaattgatcaatctattcaggaaacagctatcagttggacattcctaagggaaaactgcaggagagtgggacctt

SEQ ID NO: 918400 - DNA, 120 bp, Artificial Sequence
  ENSG00000233960_5 (sequence is synthesized)
ctgctgatatggaaatactatatagagctctcgggctgctgctgaagaagaaagatttgctaaattttaatagttattctcaccttcttatgaagttaattgtagaaggaagattatgac

SEQ ID NO: 918401 - DNA, 120 bp, Artificial Sequence
  ENSG00000233967_0 (sequence is synthesized)
atcttcaatttgttcatagtaaccaaattgaacatattgccttattctgttatgtgtatgtatgtcctcttggctgccaaactctggagagctcaaaacaagtgtgcaagcaaaactgaa

SEQ ID NO: 918402 - DNA, 120 bp, Artificial Sequence
  ENSG00000233967_1 (sequence is synthesized)
agaggttaatatcacaagagaacctgccacttataaaggtcttctctgtgttgattctcagagacatgttaatggtcaatttaataaaaataatttagtaattttttgcctgacacttta

SEQ ID NO: 918403 - DNA, 120 bp, Artificial Sequence
  ENSG00000233967_2 (sequence is synthesized)
gatttaattttttaattaaaataacatataataaacagacaaagattttgtcattttagataaagttagtaactttggctttggttttccttctggttcctcagtgcttttttgcagtgt

SEQ ID NO: 918404 - DNA, 120 bp, Artificial Sequence
  ENSG00000233967_3 (sequence is synthesized)
ttacctatctgtggtctcatgtctttcccattaattcattgaaattgctgtcatcatgtttgttattaaattcaagtgacatttctcagttcttaacctatttgacctcttatttatcca

SEQ ID NO: 918405 - DNA, 120 bp, Artificial Sequence
  ENSG00000233967_4 (sequence is synthesized)
gccaaaaaatatataccaaatagctactaagtgccaggcactgcatttagatgataggaataaatgctgaagtagacatataaagtccctacagttgtggcatttacagtggaataggag

SEQ ID NO: 918406 - DNA, 120 bp, Artificial Sequence
  ENSG00000233967_5 (sequence is synthesized)
ggagagcttaatattaaacagttacataaacaattattcaattacaatatgattaatgatacaaagaacaaatatagcgtgcaataagagcatataaatgaaaaatataatttagttgga

SEQ ID NO: 918407 - DNA, 120 bp, Artificial Sequence
  ENSG00000233967_6 (sequence is synthesized)
tcagggaaatgtccctgagaaaaagacagctaaccttaatattaaaacttatttactcaaaaataagtgtgcgaaactgtatagttaacttatcttcaattcagtcaatctaaaacatca

SEQ ID NO: 918408 - DNA, 120 bp, Artificial Sequence
  ENSG00000233967_7 (sequence is synthesized)
actaaataatgtattcacagatataccacacaatgacagttagtgttcgtaatgataatcttggatgagaaaagagcctacagggtcttttagatcatcacagttaaattatacttggct

SEQ ID NO: 918409 - DNA, 120 bp, Artificial Sequence
  ENSG00000233967_8 (sequence is synthesized)
aatatagtttgaatatttagtacaatttcatgttcaaaacttctgaaacacttttattcacatgtagaccatataatacttatattatagtagaccatcctatttcacaatcaaattata

SEQ ID NO: 918410 - DNA, 120 bp, Artificial Sequence
  ENSG00000233967_9 (sequence is synthesized)
caacagtatactaaattatcatatcagttttttgtttctttaatagttgctaatatatgtgtatagttgtgaacatacctgtatatgtgtatgtgatatgtatatatatcaactgtatag

SEQ ID NO: 918411 - DNA, 120 bp, Artificial Sequence
  ENSG00000233967_10 (sequence is synthesized)
ttaaaacaccacatgtatagaagagaccatctgactagtatttaagcttagccatgagaatggaatttggaagatgaagaatgtgacctggaggaaagaagaaaatgattacagaggggc

SEQ ID NO: 918412 - DNA, 120 bp, Artificial Sequence
  ENSG00000233967_11 (sequence is synthesized)
gagaagagagaaagaggttgaggaaagaagatatcagagtcccctcactgccctccccattaacacactcaaggctaagctagtgaggggagagtatctttgggatactggacaaaatat

SEQ ID NO: 918413 - DNA, 120 bp, Artificial Sequence
  ENSG00000233967_12 (sequence is synthesized)
ggaattccaagaaccaggaagcttttgtcttattctaaaaggatataacttgcaggctgtctccagatcaattgagtggtagatccatattacaaataaacatgatagcagagtgtgatt

SEQ ID NO: 918414 - DNA, 120 bp, Artificial Sequence
  ENSG00000233967_13 (sequence is synthesized)
aggcagaagaaggtgcatctcagcacctccttctgtgtaatgtggaaatgagcagctattgtagtgggaatgagcaactccacagtaaaggcattaggctgtgccatctgggcagtggat

SEQ ID NO: 918415 - DNA, 120 bp, Artificial Sequence
  ENSG00000233967_14 (sequence is synthesized)
gacagagatatcagtgtgtggctggggtctgaagcctgttcagggtcaagatgagcctaagtcatccagaaaggctgatgaaatcagcaaaagtcagccagacaaagggcactgtcaagg

SEQ ID NO: 918416 - DNA, 120 bp, Artificial Sequence
  ENSG00000233967_15 (sequence is synthesized)
ccatcatatggctctaagcatcccttttcccacctcctcaagagcaccaagaaagacaccaacatccattgccaatttccttctccttgccagtagggaggctgaaaaaaaacagatact

SEQ ID NO: 918417 - DNA, 120 bp, Artificial Sequence
  ENSG00000233967_16 (sequence is synthesized)
ctctttctattaatatatcttccttatagagtaggatggatatttggctaagtattgatcaataagataaagtggaatttgctgggtggtgggcgggggtcctttgtgtaataattttgt

SEQ ID NO: 918418 - DNA, 120 bp, Artificial Sequence
  ENSG00000233967_17 (sequence is synthesized)
gtcttgataaagtaggaatatggctgggaccatccctgactctcttttttccttgaatgtgaacacatgagtgaagcatacatccattgtccatggggcaagaaacatgaggatgaaaag

SEQ ID NO: 918419 - DNA, 120 bp, Artificial Sequence
  ENSG00000233967_18 (sequence is synthesized)
ccaatatgttaaggacatgaagtgaaaagcgggaagagcttcttattcatgttatcactgagcagcgggaactgggggctctgctcattatagttgcccacggcctccagtcaatgaaat

SEQ ID NO: 918420 - DNA, 120 bp, Artificial Sequence
  ENSG00000233967_19 (sequence is synthesized)
ttccggccaatgaaatgctctactgtgactgaagcagcaaagagaagatgggtggctttgaaatcagaattggatgcagagggagtcccagaggccaacactgtgaacataagaagggaa

SEQ ID NO: 918421 - DNA, 120 bp, Artificial Sequence
  ENSG00000233967_20 (sequence is synthesized)
agaccagttctgcaagcacagatgtaattttgagaagcagagctacagttctgccggaggcctctccagattgtgatgcactgggagcaagccaccatgaacatatcctcaggtctccag

SEQ ID NO: 918422 - DNA, 120 bp, Artificial Sequence
  ENSG00000233967_21 (sequence is synthesized)
tcttctgccatcgcatgaaaaatggagcttgtcaaacacagagcagagctgaactttctgaattccacaggacagttcagagtgcttggaatgacacccacctgcaatttaaacaaaaaa

SEQ ID NO: 918423 - DNA, 120 bp, Artificial Sequence
  ENSG00000233967_22 (sequence is synthesized)
aaaattgcatgtttccctaaattagatttatttgtaagctttaagtaagtgcaaacatatttcgaattatctgttatgaattgtggttttgttattaaatagacattttgtttaattctt

SEQ ID NO: 918424 - DNA, 120 bp, Artificial Sequence
  ENSG00000233967_23 (sequence is synthesized)
taaaggatactccatgtgagttcaagctgtgttagggtttggctacatatttttctttggcaatgaaaagtatgtttgattcttatgacttggtagacttcaaacaggctcacacacaaa

SEQ ID NO: 918425 - DNA, 120 bp, Artificial Sequence
  ENSG00000233967_24 (sequence is synthesized)
ctgttgtccttataaggtagatgtggaggaaaccaacatatgagagtgaaatttatctcaaagcaaagaagtgaggagtttaaaagatagagaaatgcctttgattagattctctgaggt

SEQ ID NO: 918426 - DNA, 120 bp, Artificial Sequence
  ENSG00000233967_25 (sequence is synthesized)
tttgagcttctaatattttgattttcaatatacttttttttttccaaaatttgaaaggttctgggatttcttagcccttgttgtttgtttaaagttcctatccataactaatagaaagaa

SEQ ID NO: 918427 - DNA, 120 bp, Artificial Sequence
  ENSG00000233967_26 (sequence is synthesized)
agtggtttggctatgttcaaggcttaaaagaaaaacagctaccacccataagcatctattatatgccataacattgaacacatattgtctcatttaattttcctggcctcgtcacactac

SEQ ID NO: 918428 - DNA, 120 bp, Artificial Sequence
  ENSG00000233967_27 (sequence is synthesized)
agtattatcttcctcactttacatatgggaataatgaaactcagacaggtaaagtgatgtacacaaaggcatgcagttagtaagttttgggccttgtccatctgctgttccctatgtctg

SEQ ID NO: 918429 - DNA, 120 bp, Artificial Sequence
  ENSG00000233967_28 (sequence is synthesized)
aaatattgtgtccagcattcccttgggctcattcctcctaccttccctactttctttgaataactcctatatccttcaaagcacagtctctggttttccaccaccactccagtcttagtt

SEQ ID NO: 918430 - DNA, 120 bp, Artificial Sequence
  ENSG00000233967_29 (sequence is synthesized)
tgccctcccactttctacccgaccgagtctgcctgcatcaaacacagattacaagtgcattgagtctctctcatctttaaatctttattattattattattcttttgaagtggagtctca

SEQ ID NO: 918431 - DNA, 120 bp, Artificial Sequence
  ENSG00000233967_30 (sequence is synthesized)
tgcaggtgtgagccactgcacccagcctcatctttaaatctttagtgattcacttagctctactaattattatttgtgaaataaaattttaaattagtaacttccttagaatttctatga

SEQ ID NO: 918432 - DNA, 120 bp, Artificial Sequence
  ENSG00000233967_31 (sequence is synthesized)
ataattgctcaattgccttatctgaaaagaaaaccttaatatctaataaaaattcctctcctcagtcttgcccaatggaggccattcactgaacagttgaaaggagactgcttgcccttt

SEQ ID NO: 918433 - DNA, 120 bp, Artificial Sequence
  ENSG00000233967_32 (sequence is synthesized)
attcctcacacttctttcatactattcttccaacataaccattaaatttcacctcagaagaaaggccacaatattcattatactgctcttccacatttgcagtacatcttagtttctgta

SEQ ID NO: 918434 - DNA, 120 bp, Artificial Sequence
  ENSG00000233967_33 (sequence is synthesized)
ttctaggatagtgaagatagagcctcaggtaagaattaagtgctagtgctttattgggagttaaatcccaggagagtgagaacaagagaaaaggtaagtggtgcagccaagaaaggtgaa

SEQ ID NO: 918435 - DNA, 120 bp, Artificial Sequence
  ENSG00000233967_34 (sequence is synthesized)
gcattacccctccattggcttcttcacaaagcagggcaaagagcacctactgttatttggtaggtgcctacactcagtcatacaggacttctttatgcaggctgattggagaaagtaaga

SEQ ID NO: 918436 - DNA, 120 bp, Artificial Sequence
  ENSG00000233967_35 (sequence is synthesized)
cagaggaaattgagctgcccaggtttttttccctgcctctctttggccaagatagcaccagagagtgttaactaccttgcattccagtttgggtcattcagctcctttagcagcctcctg

SEQ ID NO: 918437 - DNA, 120 bp, Artificial Sequence
  ENSG00000233967_36 (sequence is synthesized)
ggaagccagatgcactccctgtggtggcatttccccaaatgtagaagagatgagaggagtcagagactgtgggcttaaagtggttagttttaaaaggctgactgcatagccctgcattgg

SEQ ID NO: 918438 - DNA, 120 bp, Artificial Sequence
  ENSG00000233967_37 (sequence is synthesized)
tagtggaagtgaagtaagctgctgaaaattgaaacaggtaaacctgagaaactcagaaggggcatatgaatccatacagacatacttccacctcgtacatctgatttatttctcttttta

SEQ ID NO: 918439 - DNA, 120 bp, Artificial Sequence
  ENSG00000233967_38 (sequence is synthesized)
caccattttctgtcacaaatctcacagctttccaaactatagtacaactggtcaaaatgtctgaatgttgtataccaggaaaatatgctggcaactcaaccacagcacaagtctaaaatc

SEQ ID NO: 918440 - DNA, 120 bp, Artificial Sequence
  ENSG00000233967_39 (sequence is synthesized)
aaattttctaatactgttctgtcaaaacattttccttctctgatttttgtcatttctcttcatggagacatgaatgcttgtattaacttaggttgaaacatcagaacttcagagttatct

SEQ ID NO: 918441 - DNA, 120 bp, Artificial Sequence
  ENSG00000233967_40 (sequence is synthesized)
ctgattccatccctccttccacccgtaggcaaagcacatcatgtaaacatattagcaatctctcagtagtggtgaggatactctctggcacaaattgcacatttagcaagagtttgaata

SEQ ID NO: 918442 - DNA, 120 bp, Artificial Sequence
  ENSG00000233967_41 (sequence is synthesized)
aaataaataaatctgtttgcttttcagtttgctgctacatttgtgtgggaagtgctgcttgccgatagggaagtaggagaggaaataaggaaaacaataaaccaagtacagttttgcaaa

SEQ ID NO: 918443 - DNA, 120 bp, Artificial Sequence
  ENSG00000233967_42 (sequence is synthesized)
tacccagacacattggatggacacagaagctttcactgggagattatgaagggtagatgctttgtgtctccattgcctcctgtgatgtgacctcacattacaagccactgtggttggaac

SEQ ID NO: 918444 - DNA, 120 bp, Artificial Sequence
  ENSG00000233967_43 (sequence is synthesized)
tgctggcaaaatggaaagaaccaggaagaacatcaaaggagagttttaaaaggatatgaaatgtattaatttgtcgtaattatctacttttgatagaagaatctcagaggtacttaagtt

SEQ ID NO: 918445 - DNA, 120 bp, Artificial Sequence
  ENSG00000233967_44 (sequence is synthesized)
gatgtcttggaccttcagtccagtgctgacatcttgtaaaatgtcttaagttcctaccaggtaatttctgctttctgtcacaaagcaggagagaagttccaggaggaagtcatgtatttt

SEQ ID NO: 918446 - DNA, 120 bp, Artificial Sequence
  ENSG00000233967_45 (sequence is synthesized)
ggaagtcatgtatttttctcatctttaggtatattatatgtataccccatatttccctatattatacttacacatatatttatgttacactttctatttctcttatttacgtacattatt

SEQ ID NO: 918447 - DNA, 120 bp, Artificial Sequence
  ENSG00000233967_46 (sequence is synthesized)
caccttgcctatagttaataaaaatatattatacatttgaagttttctaagagagtagatttaaaattttctcactatacacacacacaatatatatataactatgttaggtgattaacg

SEQ ID NO: 918448 - DNA, 120 bp, Artificial Sequence
  ENSG00000233967_47 (sequence is synthesized)
ttagcttgattatggtaatcatttcacaacatagacatatatcaaaacatcacattgtatgctttgaatacataccatttttatttgtcaaccattccccaataaagctggaaaaaacaa

SEQ ID NO: 918449 - DNA, 120 bp, Artificial Sequence
  ENSG00000233968_0 (sequence is synthesized)
aggagctgaagggaccagcttggccgtcagttgcaagggtgtgaggcagaagcaacacaaaagatcttgatatgaagcaattatttttggtcttaaactgctgggactccagatgaccca

SEQ ID NO: 918450 - DNA, 120 bp, Artificial Sequence
  ENSG00000233968_1 (sequence is synthesized)
cccagaccacggtcagcaggcagaagccagatgctattgtcaacagaattgccttcaagattccttttctgattgttcattgctgagatgacatctcactatattgcccaggctggtctt

SEQ ID NO: 918451 - DNA, 120 bp, Artificial Sequence
  ENSG00000233968_2 (sequence is synthesized)
ttctagcctcaagcaatcctcccacctcagcctctgaacgtactggaattacagatggagcaactgagattcttccccaactagactataagttctctgagggataaggaacatgtctgg

SEQ ID NO: 918452 - DNA, 120 bp, Artificial Sequence
  ENSG00000233968_3 (sequence is synthesized)
atagtctaaaggtttagtgatgaaatgaagtccactaacttctctctgcttacttccaccctcaataacatatttcctcaaaccccacagaggaaagacaattcattttttactattgtt

SEQ ID NO: 918453 - DNA, 120 bp, Artificial Sequence
  ENSG00000233968_4 (sequence is synthesized)
taatagagccatgtttgtatgtagcttcctgttccgcttagcccaagacattaagtgggtcaggagtaaactctgccctctgtttttttccattcctttgtcacctgctcaagtggcagc

SEQ ID NO: 918454 - DNA, 120 bp, Artificial Sequence
  ENSG00000233968_5 (sequence is synthesized)
ccagagccgcttggcggcttccctgaagatgagcagagtgcagtagattaggcatggcctttctatctatttctactatggagaagctgaaaaagctatatggctggaaaaaaatcacct

SEQ ID NO: 918455 - DNA, 120 bp, Artificial Sequence
  ENSG00000233968_6 (sequence is synthesized)
tggtactaatttgctattttacaatatttgaaaataaagacctgtggtcttcctatgtatttctttttaaacaatgaggggtatggaacatctatgaataaacatcaaggtcttcaagtg

SEQ ID NO: 918456 - DNA, 120 bp, Artificial Sequence
  ENSG00000233968_7 (sequence is synthesized)
tgtgcgaagtggcattctgaatgtgtgacaagagacctagatcaatgcagaactaagataattctgatggcagtttccaattttaatttagcgagcatatttatacttctaatggaattc

SEQ ID NO: 918457 - DNA, 120 bp, Artificial Sequence
  ENSG00000233968_8 (sequence is synthesized)
acttattaactgacaacattgttttagtgttgataaaagcatggaagtgtttataatagtctgaaactattacaaatgggaaaggagaaaaaaagaataaaacaaaaaccaatctatgtt

SEQ ID NO: 918458 - DNA, 120 bp, Artificial Sequence
  ENSG00000233968_9 (sequence is synthesized)
acatccagtaaacatgacttcgaggtgaatattttgtatttttatttttaacagctttatggagctataaatcacatgccatacaattcacaaacttaaagtacacaattcaatggtttt

SEQ ID NO: 918459 - DNA, 120 bp, Artificial Sequence
  ENSG00000233968_10 (sequence is synthesized)
cagtaatgttacttttattaatttttaatttttaaaacagtggtatatatcacataaaatttgccattttaaccatttcaagtatacaattcaatgccattaattccactcacagtgttg

SEQ ID NO: 918460 - DNA, 120 bp, Artificial Sequence
  ENSG00000233968_11 (sequence is synthesized)
tgctaccattaccactatttccaaaatgtttttataactctgaactgaagctccatggccagtgagcattaacaccccattcccctccaaccaatcccaggtaaattctgatttaccttc

SEQ ID NO: 918461 - DNA, 120 bp, Artificial Sequence
  ENSG00000233968_12 (sequence is synthesized)
aatcccaggtaaattctgatttaccttctgtctttatgagactcgaggtacctcacctaagtggaatcatacagtatttgtccttttgtgtttggcttatttcacttagcataatgtttt

SEQ ID NO: 918462 - DNA, 120 bp, Artificial Sequence
  ENSG00000233968_13 (sequence is synthesized)
cagaagtttaatcatttttattgctgaataatattcccttgcatgtatatgtcacattttgtttattcattcacctgttgatggaaatttgggtagtttccatcttttcactattgtgaa

SEQ ID NO: 918463 - DNA, 120 bp, Artificial Sequence
  ENSG00000233968_14 (sequence is synthesized)
tactgctatggggaacattgctgcatgaatatctgtttaagtctctattttgattcttcgaggtatataactaggagttgaattgatagaacacacggtaactcttttttaacttttgag

SEQ ID NO: 918464 - DNA, 120 bp, Artificial Sequence
  ENSG00000233968_15 (sequence is synthesized)
gaactgccaaactgtttttgatagtgctgcaccatcttacattcccaccaacaatgtgtgagggtttctatttctcctcatcctcatcaacacttgttattttcagtttttaaattatta

SEQ ID NO: 918465 - DNA, 120 bp, Artificial Sequence
  ENSG00000233968_16 (sequence is synthesized)
ttattattgctatctcagtggatgtgaattggtatgtaattgtggtactgattttcatttccctaatgactagtgatgttgaacatctttttatgttcaactatatgtaatcttctttga

SEQ ID NO: 918466 - DNA, 120 bp, Artificial Sequence
  ENSG00000233968_17 (sequence is synthesized)
agaaatgactattctagtcctttgcccattttgaaattgggttgtctttttgttcttaagttgtatggatttttatatattctggatattaaacttttatcagatacgtacttttgaata

SEQ ID NO: 918467 - DNA, 120 bp, Artificial Sequence
  ENSG00000233968_18 (sequence is synthesized)
ttttctaccattttgtagattgtcttttcactttcttgataatgtcttttgttgcacaaaagtttttgattttgataaagtccaatttacttatttattttttgttgttgcttgtgcttt

SEQ ID NO: 918468 - DNA, 120 bp, Artificial Sequence
  ENSG00000233968_19 (sequence is synthesized)
tggtgtcatatttaagaaagaatcaatttccaaatccaagatcatgaagatttaccactatgttttcttttaaatgcattatggcttttgctcttacatgtagctccttgatccattttg

SEQ ID NO: 918469 - DNA, 120 bp, Artificial Sequence
  ENSG00000233968_20 (sequence is synthesized)
aaatccagttgtcccaatatcatctactgaagagactatttgatccccattggatggacttggcattgttgtcaagcatcaattcatgacagatgtataggattatatttgaattttcaa

SEQ ID NO: 918470 - DNA, 120 bp, Artificial Sequence
  ENSG00000233968_21 (sequence is synthesized)
ttcagttcaattcaattgatctatatgtctgttctcatgcctcatgccgataccacactgttttgtttactgtacttttgtagtaaattctgaaatttggaagtttgagttctccaacat

SEQ ID NO: 918471 - DNA, 120 bp, Artificial Sequence
  ENSG00000233968_22 (sequence is synthesized)
tgttttggctatttggtacccttgcaatttataaatttgagaagaggtttttcacttttgcaaaaatggctgttggaattttcgatagagattgccttgaatctgcaggttgctgtatta

SEQ ID NO: 918472 - DNA, 73 bp, Artificial Sequence
  ENSG00000233968_23 (sequence is synthesized)
ttcgatagagattgccttgaatctgcaggttgctgtattagtctgttctcatgctgctgtgaagaaatacctg

SEQ ID NO: 918473 - DNA, 120 bp, Artificial Sequence
  ENSG00000233968_24 (sequence is synthesized)
agaaggggaagcaaatatgcccttcttcacacagtggcagccagaagtgcagagcaaaagccggaaaagccccgtctaaagccatcagaccttgtgagaacttactcactatcctgagaa

SEQ ID NO: 918474 - DNA, 120 bp, Artificial Sequence
  ENSG00000233968_25 (sequence is synthesized)
ctatcctgagaatagcagcatgagggtaaccacccccatgcttagattacctcccactaggtccctcccacggcttgtggggattatggaaactagaattcaagatgagatttgggtggg

SEQ ID NO: 918475 - DNA, 120 bp, Artificial Sequence
  ENSG00000233968_26 (sequence is synthesized)
aaccatatgagttgctttagttagtattaacgtctcgacaatattgtcctcctttccatgaacttagtgtgtcattccatttagttaggtcttatttaatttctttcaataatgctttgt

SEQ ID NO: 918476 - DNA, 120 bp, Artificial Sequence
  ENSG00000233968_27 (sequence is synthesized)
ggtcagcatctgacatactgcataaatcactgaaccaatattttctaaatgtaacatgcatgatggtacaaaatcacacatagatgaaaatcaactggtctttgaagaactttgattcat

SEQ ID NO: 918477 - DNA, 120 bp, Artificial Sequence
  ENSG00000233968_28 (sequence is synthesized)
tagtgagcttgaaaacccaacacaataaacagatagtggaagtggaaggagtatccctaaggatgcatttaaggagaaatgatgtgacagaagatttgaaagcaaaaaagaatctatcag

SEQ ID NO: 918478 - DNA, 120 bp, Artificial Sequence
  ENSG00000233968_29 (sequence is synthesized)
acactagtcaaaagtgctgaataatttgctacatgccattggaaaactatataacttactactaataaaacacctcacttctttttactgtctttcttcatttacccaagtcacctcttt

SEQ ID NO: 918479 - DNA, 120 bp, Artificial Sequence
  ENSG00000233968_30 (sequence is synthesized)
taagagccatctttgatttgcctacaacacattcatctacactgattgcttgtacaagaaaacaatgcaacccagcaatgtcagagactgaaaggttgtcttcttgctgtgtaagattta

SEQ ID NO: 918480 - DNA, 120 bp, Artificial Sequence
  ENSG00000233968_31 (sequence is synthesized)
ctgtgaatagagggaggatgtggaaaaacgctacaaccattgctccagggactatctctgccaaacagagatattatactgacgaaatgataatggtgaaatagctgtcagaccaaataa

SEQ ID NO: 918481 - DNA, 120 bp, Artificial Sequence
  ENSG00000233968_32 (sequence is synthesized)
ttagaatatggagccgtaatacagtaaagtagtcttcatatattttatacagtttgtattgttctataggttgcttggagtttgtgtccagtgaaaatggatttagaacaacctgggata

SEQ ID NO: 918482 - DNA, 120 bp, Artificial Sequence
  ENSG00000233968_33 (sequence is synthesized)
cttagtaataacaacgcacaaacatgtgtatacacaccaaagaagtgtgcattattcaataaatgtgttcctgatatgttgcatgtaaactgattttgtatggtcaaataatatcttaaa

SEQ ID NO: 918483 - DNA, 120 bp, Artificial Sequence
  ENSG00000233968_34 (sequence is synthesized)
atcttaaatgatcaaggaattgattaaagaaatatgagatattagttacaaaaggaaatcattttgaaatacacgtgaaattttaaatcatgtttcatcaataaatatgattattacttt

SEQ ID NO: 918484 - DNA, 120 bp, Artificial Sequence
  ENSG00000285239_0 (sequence is synthesized)
agtgctgatgggaatatgagggcagctagtgattgctttcatcgccatctgcctgttgctgctgttttttcacttcatcctgtctaggccagattctgttttggtcagcaggattgtgac

SEQ ID NO: 918485 - DNA, 120 bp, Artificial Sequence
  ENSG00000285239_1 (sequence is synthesized)
cagaacacaagccctgcccatctcctgcctcggaaaataagcttctgttgtcagacaccaatattccattttccacatttggaggtgtgcatttgttaggtataatgcactgagggactg

SEQ ID NO: 918486 - DNA, 120 bp, Artificial Sequence
  ENSG00000285239_2 (sequence is synthesized)
tctccctctgcttccaagattgcagtgagacagggtttcaccatgttgtacaggctggtctcgacctcctgggctcaagcgatctgctcacctaggactcccaaagtgctgggattacag

SEQ ID NO: 918487 - DNA, 120 bp, Artificial Sequence
  ENSG00000285239_3 (sequence is synthesized)
gtgtgagccaccacacctggcccagtataacatctttattaaataataagaacaaaagctctggcagaactaataaagacaaagcaaacacaaatatacaatattacatataataaacat

SEQ ID NO: 918488 - DNA, 120 bp, Artificial Sequence
  ENSG00000284418_0 (sequence is synthesized)
caacctgtgtcaaagtttaggtggagaaaaagtagctgtgggagcagatctcagaggattattatgcttgatgctgctgttagagatatttgctgtcttacaggcaaaggagagattgtg

SEQ ID NO: 918489 - DNA, 120 bp, Artificial Sequence
  ENSG00000284418_1 (sequence is synthesized)
gaaaaagaatgggatagaggtctctaacccaggctggagttcattggcacaatctcagctcattacagccttgacctcctggactcaagccatcctcccacctcggcctcccaagtagct

SEQ ID NO: 918490 - DNA, 120 bp, Artificial Sequence
  ENSG00000284418_2 (sequence is synthesized)
gaaaccacagctcacaattctctgatgggcttgcctactcatttagcccttcatgaagtccctgagctgcctttttcatctggagtctccatgcacaacggtgaaaagtgcatcttttat

SEQ ID NO: 918491 - DNA, 120 bp, Artificial Sequence
  ENSG00000284418_3 (sequence is synthesized)
ctcacctgagacagtgtcttgctgtatcacaaagccagatccagtgctgggatcacagcttgttgcagcctccaactcctgggctcatggaatcctcttgcctcagcttccctagcagct

SEQ ID NO: 918492 - DNA, 120 bp, Artificial Sequence
  ENSG00000284418_4 (sequence is synthesized)
cctggtaaatagccatctagcaagtcctgatcctgattctcagcctctattaaggtccagatcagcaactatcctcatggaaaaatgttttggaatatttctgagaaggctcaagatttt

SEQ ID NO: 918493 - DNA, 120 bp, Artificial Sequence
  ENSG00000284418_5 (sequence is synthesized)
gttctcatcaattcaacttcaagggagagggaagaggagtagcctgttaggaaaagcaaattcttagagcaagacatgaacacatctctttcagaaacgcgattttacttgctctaatga

SEQ ID NO: 918494 - DNA, 120 bp, Artificial Sequence
  ENSG00000284418_6 (sequence is synthesized)
agaaatggtggtgacaattctagaaaagaaaatgccaaagatggaaaacctttaaaatataacttaaaggtgaagaagaccacctggaccggccaccatgcaagatcaaagaaaaggccc

SEQ ID NO: 918495 - DNA, 120 bp, Artificial Sequence
  ENSG00000284418_7 (sequence is synthesized)
atcaaagaaaaggcccaaaatatggcaaaagtctccatttccatttgctgccatcctgaaaaatcttataaatgactgatcaataagtgattcaaacatcacaattaaaagaactagaaa

SEQ ID NO: 918496 - DNA, 120 bp, Artificial Sequence
  ENSG00000284418_8 (sequence is synthesized)
cccaagcaactgttaaaggaattgaggaatgctctgtgagaagaaaatcatgagagcagaaggatgttctgctctcaagggaggccaatgaaagagaaatcaatcacgtgaattaagagc

SEQ ID NO: 918497 - DNA, 120 bp, Artificial Sequence
  ENSG00000284418_9 (sequence is synthesized)
ttttgatgaataaataattagcatacacactaaattaattagccaatttccaagtcaggcttagtattgcatgctagagctagcaagcattgcatcagttgaaatgtaactgtttggctt

SEQ ID NO: 918498 - DNA, 120 bp, Artificial Sequence
  ENSG00000284418_10 (sequence is synthesized)
tgcttcataagattttcaaatgcaaaatgactgtgcctggttaaaggctaccatttaagagaataaatggccaaaaccaggtggttaagccctcacttcccaatgcacaaccaaagacta

SEQ ID NO: 918499 - DNA, 120 bp, Artificial Sequence
  ENSG00000284418_11 (sequence is synthesized)
tataaacagcttctgaccactgtatttaatagtgttgacatttacataaatggaatgcagtgtagttgctgaacatatactgggatgattccataatcctgttttaattagatggatgtt

SEQ ID NO: 918500 - DNA, 120 bp, Artificial Sequence
  ENSG00000284418_12 (sequence is synthesized)
gcgagcatacaaaaatcacaagctgcactccctgtggtgatgccatactggcaaggaatcaatcaccacggctctggttgccatagaaactgatagctcctgcaccaccatctaaatggc

SEQ ID NO: 918501 - DNA, 120 bp, Artificial Sequence
  ENSG00000284418_13 (sequence is synthesized)
aaatgattggtggtgtactcataacacagggagagcaatgagtttttctatcctgtccagcagctgtgccagagagttaattaaaagcagagaacatgaaataaatctaaatctgtgaag

SEQ ID NO: 918502 - DNA, 120 bp, Artificial Sequence
  ENSG00000284418_14 (sequence is synthesized)
aaatgaaatgtacagtacaaattgaattcccgtgtcggacagaaattaatatgcagcgcaaaccacagagctgcctgaacaagcagcagctgggaatcttgggaaatgttgcttctcagg

SEQ ID NO: 918503 - DNA, 120 bp, Artificial Sequence
  ENSG00000284418_15 (sequence is synthesized)
cggtcagagctgaaatgtggagagggcacctccttatcttattacctaaacaagcactttgttcagcatttgtgttgactgatgcatgcaaattgcagcctcagatgttaagagttcctg

SEQ ID NO: 918504 - DNA, 120 bp, Artificial Sequence
  ENSG00000284418_16 (sequence is synthesized)
ttttcaagcaggaaggacaaagcttaactaagatttaattaacaaactgttagcaactgcagtttatcagctgtgaacacaatgtaagtaaatgtttctactcctgtactagaatacacc

SEQ ID NO: 918505 - DNA, 120 bp, Artificial Sequence
  ENSG00000284418_17 (sequence is synthesized)
agtcaacctccgtgaaagtcaatgtgtttttattgataagccacgaattcagaattcatatttcaaataccacaagtcgaggaacaagtacctgaaatgctttctccagaaataaaagaa

SEQ ID NO: 918506 - DNA, 120 bp, Artificial Sequence
  ENSG00000253310_0 (sequence is synthesized)
cactggtggaatctggaagagaaatgatacagcctaactgttctcagagccttttttacaaagcctctgaatttaccttcattgactctagcatgagctcagcccagcaggcttcaggac

SEQ ID NO: 918507 - DNA, 120 bp, Artificial Sequence
  ENSG00000253310_1 (sequence is synthesized)
ttagtggtaccctccatcaatacaaagaaaaatcataatcctcagggacacccttgtcagcacagtctccctcaaaatgaccaacctgagagccgaggagaaggccatgtattactgtga

SEQ ID NO: 918508 - DNA, 80 bp, Artificial Sequence
  ENSG00000253311_0 (sequence is synthesized)
cctgtaatcccagcattttgggaggccgacgtgggacggggcttcatcagattgccaaaggggtccgcgaaacaatggag

SEQ ID NO: 918509 - DNA, 120 bp, Artificial Sequence
  ENSG00000253311_1 (sequence is synthesized)
gcttcatcagattgccaaaggggtccgcgaaacaatggagccaaggaaccttggtgttaagacacagatccagaacacgtgagaccacacttgtggtgaagaaagcctgcggttccagag

SEQ ID NO: 918510 - DNA, 120 bp, Artificial Sequence
  ENSG00000253311_2 (sequence is synthesized)
aatcaaagccaggtgaccaagagcagatgctgatgccaggggaagacaagagggagctggaggagtgaagataaggaaagtcacaaggacagtaacgagtaaagcctggacttgaacttc

SEQ ID NO: 918511 - DNA, 120 bp, Artificial Sequence
  ENSG00000253311_3 (sequence is synthesized)
tgatgacaagcttccgctttgcctcacagcctcttagaccaagatccaaatgagtaaaacacacacaaaagagacaggtatcaccatgagctcgtgtggccaagaagcctttgtattgac

SEQ ID NO: 918512 - DNA, 120 bp, Artificial Sequence
  ENSG00000253311_4 (sequence is synthesized)
tgaacttaccttggaagtaaatgcatgtacagtaataagtttcaacttttttaagacactttattcctaaaacatggaaaggtcagcatcagccaatagattgagaatttgcattgtctg

SEQ ID NO: 918513 - DNA, 120 bp, Artificial Sequence
  ENSG00000253311_5 (sequence is synthesized)
agttaaggaaagcatcttgcattttctggagcactgagcatctcgtcttgaaccttctgagttctgggaagctccaaattcatttgctgaagcaagaaggaaaaacagttcttggaggga

SEQ ID NO: 918514 - DNA, 120 bp, Artificial Sequence
  ENSG00000253311_6 (sequence is synthesized)
gcctgtgcgactccacatgggtcctgtccatcacactctgctcatgagaaaatgcccaagaaatacccacaagttttaagcaaagaaactccgcttcactggagatatgctgttatttgt

SEQ ID NO: 918515 - DNA, 120 bp, Artificial Sequence
  ENSG00000253311_7 (sequence is synthesized)
gagaccaccatgccaacctaatattgctgaacaaaaatattgacttccagacaacactgaatagaagttttggtgatgggcatctgtgatggctgttattatacgctgcctagattcttt

SEQ ID NO: 918516 - DNA, 120 bp, Artificial Sequence
  ENSG00000253311_8 (sequence is synthesized)
ggaaatgaaggactcatgcctacagctactgagagtgctacctgaagacaaccctcagctttaagcccttttcagggatcgtcttgcttgaaaaaagctgtctcacacaagggaacctac

SEQ ID NO: 918517 - DNA, 120 bp, Artificial Sequence
  ENSG00000253311_9 (sequence is synthesized)
tctcagatgtgagctaattagtgagctgcacatcaaaagaagtgaagtgtatcttgtaaataggatttcatttaaaacagatcaaagaaagatctactgaatcactccctcatccactga

SEQ ID NO: 918518 - DNA, 120 bp, Artificial Sequence
  ENSG00000253311_10 (sequence is synthesized)
tttctccaagcatcaggcagacagtgaagagaacaacaagtcacgagaatgataaacatagctccaaagaacaactgtgatgctcaagtcaaatattaatgagaagagagaaccaaatat

SEQ ID NO: 918519 - DNA, 120 bp, Artificial Sequence
  ENSG00000253311_11 (sequence is synthesized)
atccaggggtggaattatacttcctgggacatgcatggttgggtttctgatgtaggccaggagggcagtaatctgtgtttgtgacccagtctacttctaaaaatacaaggttagaaataa

SEQ ID NO: 918520 - DNA, 120 bp, Artificial Sequence
  ENSG00000253311_12 (sequence is synthesized)
actgatttatttgtacataatttattatcattattaaccatgtaccaagccaagtactttacttgttttgcctttttgttttgtctttaccttatttattctttgcaatgaccctatgtg

SEQ ID NO: 918521 - DNA, 120 bp, Artificial Sequence
  ENSG00000253311_13 (sequence is synthesized)
gtaggtgtttacaatatcaccattttacatatgaggaaactgaggctgggaagttagtcatcttcctaaaattacatggtaagttggtgccagagctgggctcacaaattcttatagaac

SEQ ID NO: 918522 - DNA, 120 bp, Artificial Sequence
  ENSG00000253311_14 (sequence is synthesized)
agaggccatgattcttctctctcagtccctagaattttactttgtttgcaatgggtgtttaatagtttttttttctgttgcttatagacacagatccagaacacgtgagaccacacttgt

SEQ ID NO: 918523 - DNA, 120 bp, Artificial Sequence
  ENSG00000253311_15 (sequence is synthesized)
ggtgaagaaagcctgcggttccagagaatcaaagccaggtagataagctggcaattggatcaagcagagggaatgccgggtgctccaaagagaccgaagaagggatatgtttccccttgc

SEQ ID NO: 918524 - DNA, 120 bp, Artificial Sequence
  ENSG00000253311_16 (sequence is synthesized)
atccatagaactaggaggtgaactttggctgcctcacctgatgtccagataatgtcaagaccagagggaaggcagttggcctggggttttcagtgttcacagcaagaaacctagacccag

SEQ ID NO: 918525 - DNA, 120 bp, Artificial Sequence
  ENSG00000253311_17 (sequence is synthesized)
agcaaatcttcccagggacaaggggactcaattccacacatgtgtgtccaagatgacagtccctctggcagctgtgaaaagcagcttctgtgagagtgacaacggatggtgctgacaacc

SEQ ID NO: 918526 - DNA, 120 bp, Artificial Sequence
  ENSG00000253311_18 (sequence is synthesized)
ccctcagctactaagtttgcttctggagcaatgggatgcaagtgacatcggacttaatggcttgtgttcctggagacagttgaggtgtcatgattttgcaataatgcttcttcctttcct

SEQ ID NO: 918527 - DNA, 120 bp, Artificial Sequence
  ENSG00000253311_19 (sequence is synthesized)
ccagtcttggggaagaacgtcccagtcctcagccagggcttcccaggtgcttccaggggaggttcttactcagtctgagccaaagcccaggggtggtgcccaccctcactggccaactct

SEQ ID NO: 918528 - DNA, 120 bp, Artificial Sequence
  ENSG00000253311_20 (sequence is synthesized)
cccaggctacctttgattttcagcactaactcgtggttttcagctttggagaatagactgagacagcatgctaatatccactggggttcacactggtgaaccagagacagagcactcaat

SEQ ID NO: 918529 - DNA, 120 bp, Artificial Sequence
  ENSG00000253311_21 (sequence is synthesized)
agtcctgtttgtaaaatgaagccaatgaattagaccaggactttccaccctgtgctctgaggcaccctggatgttcctcacctgtgtctgtagatagtggaaggaggagacagggctttg

SEQ ID NO: 918530 - DNA, 120 bp, Artificial Sequence
  ENSG00000253311_22 (sequence is synthesized)
gtccttagatcaggcaactttctttaatctcttctacattttgaactttgttcataatatttcctttgaagaaagtttccccctttaaaaaaataattttaaaaagttttgtaaaacaaa

SEQ ID NO: 918531 - DNA, 120 bp, Artificial Sequence
  ENSG00000253311_23 (sequence is synthesized)
gaagccctaatcaacagaatctccttggtcctgcagcaacctttagaaggtttttcaacagaaaaggtgtttctattctacccacatcagactaggaatcacagttctgggaatgatgct

SEQ ID NO: 918532 - DNA, 120 bp, Artificial Sequence
  ENSG00000253311_24 (sequence is synthesized)
acaagtgagcagggagtgaaatagttattgattaccacaacaagatgcaaaaaaaacccgaaaacttagaggattaaaatgataaggaaagtcacaaggacagtaacgagtaaagcctgg

SEQ ID NO: 918533 - DNA, 120 bp, Artificial Sequence
  ENSG00000253311_25 (sequence is synthesized)
atacagacaacagagatgaagaaaaagaagtccagttacaaggagatgggtggggaggaagagtgagaaaatcctagaaagcaagccagacactttattcctaaaacatggaaaggtcag

SEQ ID NO: 918534 - DNA, 120 bp, Artificial Sequence
  ENSG00000253311_26 (sequence is synthesized)
tcaagacactccagcattagaatcaagatatcatccagtttttttccctgatctttactaatttcagagatgaacatattttaatccgggtcagatcagctccttgcagggaggaatttc

SEQ ID NO: 918535 - DNA, 120 bp, Artificial Sequence
  ENSG00000253311_27 (sequence is synthesized)
tatcattctctttcaaatgtacatccaagggcagagttcacatgaagacgtgggcaaaaaatgctcttctggcatgttctcaagtcaagaatctcattctgggaagagtcctgtggaacc

SEQ ID NO: 918536 - DNA, 120 bp, Artificial Sequence
  ENSG00000253311_28 (sequence is synthesized)
gttgcattaagtcatcgagtttgtggtgctttgttatgggagccttagagaccaatatagaccccaacttccagttataatgggccactgagctgtttcctgaatagcccagctgtttgc

SEQ ID NO: 918537 - DNA, 120 bp, Artificial Sequence
  ENSG00000253311_29 (sequence is synthesized)
tgacctcgggtttttaaccatgttgcattggacacattattatatttatatttaatgcaagcacagttaactatttagttggcaaaaaataacatgaatagactgagggaggctgagagc

SEQ ID NO: 918538 - DNA, 120 bp, Artificial Sequence
  ENSG00000253311_30 (sequence is synthesized)
agagcaaattgatggctaagctgctagggacagctctgtctgcttttccatgctgaatggtgagtgctgccctgcaggttgcaggaaacatggccacaactactcctcctcacctcttct

SEQ ID NO: 918539 - DNA, 120 bp, Artificial Sequence
  ENSG00000253311_31 (sequence is synthesized)
atggtcttcccacaggatgagcatctcatcacaacatgtgtgagtccaatgtggaagatttcatggttttcatacaacttggccccttaaagcaagctcacgaattcagctgaagcaaca

SEQ ID NO: 918540 - DNA, 120 bp, Artificial Sequence
  ENSG00000253311_32 (sequence is synthesized)
acaattgattttgggactacaggacacagtgactgtattggatttcttgagagacagtgtcattttccaacacagtctctcataagggattttcaagggaacttttgactatcctctatt

SEQ ID NO: 918541 - DNA, 120 bp, Artificial Sequence
  ENSG00000253311_33 (sequence is synthesized)
tatgactttttttggctttatgcattgattttagaacacaaatgctgaataagatttgattcctttgcgttcactttgcttagaatcccccagcatactttaacatgccactttttccaa

SEQ ID NO: 918542 - DNA, 120 bp, Artificial Sequence
  ENSG00000253311_34 (sequence is synthesized)
caacttctcccttcacacccggattggtgctgaatttctaacttcttcaaaattccatagcatttccctccatcactcccatgtatcttcacttacaggagtttatacacacatcagctt

SEQ ID NO: 918543 - DNA, 120 bp, Artificial Sequence
  ENSG00000253311_35 (sequence is synthesized)
cccttgcagaattttttgacattgggggctacatatctttgaatctcccataggccagtggatcattgaatgaatggttggatggatggatggatttattgatgtttatagatttcagag

SEQ ID NO: 918544 - DNA, 120 bp, Artificial Sequence
  ENSG00000253311_36 (sequence is synthesized)
aaaaattaaatggaatctaatagctaaagcaaagagagcttgtctacatttacactgccagtgtgagtcttgatgcacaaactgggaatcagattgccaggtgatgccacactcttgcag

SEQ ID NO: 918545 - DNA, 120 bp, Artificial Sequence
  ENSG00000253311_37 (sequence is synthesized)
atagatggcttgctttctctgtggacttaaaataagtcaagcgtgaggccactcctctaaatcactggtacagggatgcgtctatactgcaactcagcctaagtgtcagttcctcagaga

SEQ ID NO: 918546 - DNA, 120 bp, Artificial Sequence
  ENSG00000253311_38 (sequence is synthesized)
acccttccctgtacctccgagtctagatgagtctccttcctctctgttatatgctatcatggaattctcttttttcccttcatagcattgtcacattttgaaactatttgtttctgtgac

SEQ ID NO: 918547 - DNA, 120 bp, Artificial Sequence
  ENSG00000253311_39 (sequence is synthesized)
tttttgtttactgtcttttacaccctccaacctcttggctgactttaaactcaagaaacgtaggattgatgtctgttttcttaaccatggtaatccagtgtctagcccagtgcctgccat

SEQ ID NO: 918548 - DNA, 120 bp, Artificial Sequence
  ENSG00000253311_40 (sequence is synthesized)
tggctgcaatatattacagcagtaacatatcacatattactgctactaatgtctaatattaattgactatgtattatgtgccagacactgttcaaaactgctttacataaatcatctcct

SEQ ID NO: 918549 - DNA, 120 bp, Artificial Sequence
  ENSG00000253311_41 (sequence is synthesized)
tttatcttcacaataactctctgaagcaggagcgattattattcccattttgtagatgaggagactgagatacagggacactaactggttcaaggtatcacagctaggaagtagcacagt

SEQ ID NO: 918550 - DNA, 120 bp, Artificial Sequence
  ENSG00000253311_42 (sequence is synthesized)
ggagacttaaacccagggatgccagccccaaagtcaggaagtgttcactaatgtatgttgaataaatgaatgaatcatgatcaatattactgtgtatcttctggactaattgcctagcca

SEQ ID NO: 918551 - DNA, 120 bp, Artificial Sequence
  ENSG00000253311_43 (sequence is synthesized)
gtgcaaacatgtcttctacaactattctaagagttagttctccagatcgttctgaaatacttcttgcaatgggattcattagcttttccagtgagcaactctaataactaggatgatctt

SEQ ID NO: 918552 - DNA, 120 bp, Artificial Sequence
  ENSG00000253311_44 (sequence is synthesized)
cattacataaaactgaaatccacttctgtggtaattttacctgtggacacctgttctgctctcagtagtttaaaagaactttagttcctctcatatagctctgataagagttttcactta

SEQ ID NO: 918553 - DNA, 120 bp, Artificial Sequence
  ENSG00000253311_45 (sequence is synthesized)
gatgacagcctatgttccagctatatctccagattctggccaaaccatagtgtactgctatacctgttaaactgaggcatccacacctggatagaaggctttccaggaatggtttgtcca

SEQ ID NO: 918554 - DNA, 120 bp, Artificial Sequence
  ENSG00000253311_46 (sequence is synthesized)
gggtggaatagagtaggagtattcagctctgtaaccctggggactgacatgatgcttgttgaattgaaatgaaatgctttcatagtggtaataataatctctttactttgtagttgaaaa

SEQ ID NO: 918555 - DNA, 120 bp, Artificial Sequence
  ENSG00000253311_47 (sequence is synthesized)
ttacaaaatatgtatgtgtgcccgatttcagttggtttttctctacaatatgttgtttaatctctgctgcctttttgatttgaggcttcaggatattagagctataagcaacatgagaga

SEQ ID NO: 918556 - DNA, 120 bp, Artificial Sequence
  ENSG00000253311_48 (sequence is synthesized)
tgctctgaggtccagagaggttgaatggtttgcttagagtcaagttaagtttccttttaaaactgataatttctggaaactatgtccttcttcctatgatctcccatgaacctgatgggt

SEQ ID NO: 918557 - DNA, 120 bp, Artificial Sequence
  ENSG00000253311_49 (sequence is synthesized)
ttcctgccctctggtccttttcagtatattgactgtggtcaaaatagtgttggcaatgaactttctatcattggaggtgtatgaactgataatgagttggcttttgagtaaggatgttgt

SEQ ID NO: 918558 - DNA, 120 bp, Artificial Sequence
  ENSG00000253311_50 (sequence is synthesized)
acctacaacaacagctgagacatctaatgagtattggtctaaatgatctttcaggtaatgtaacctctggccttacaaaaactatgccacccatagactgcatagggatcaggtagagtt

SEQ ID NO: 918559 - DNA, 120 bp, Artificial Sequence
  ENSG00000253311_51 (sequence is synthesized)
gatcatcatccttcaatactgaaacactaccaaaaatatacaagttttcaacactgattctcaataccttgtggaaacttcccaagaccttttgtcccaatcctatttattcttcacacc

SEQ ID NO: 918560 - DNA, 120 bp, Artificial Sequence
  ENSG00000253311_52 (sequence is synthesized)
tagctcaactcttgtttactctgagtatcctttctcaatcctctcaattagaatgaatccttccctcccatatttccccataggaaattgtaactctcctataaaacttatcaaagtctg

SEQ ID NO: 918561 - DNA, 120 bp, Artificial Sequence
  ENSG00000253311_53 (sequence is synthesized)
gtagatctatgggaatacttccctgttttgttctgctgagaaatctctctcagttctgctggctgctcactggttcctgagataactaacccggcttatccctccaatatcagaaccgca

SEQ ID NO: 918562 - DNA, 120 bp, Artificial Sequence
  ENSG00000253311_54 (sequence is synthesized)
gtttgtgaccaagagcagatgctgatgccaggggaagacaagagggagctggaggagtgaaggcaaaaagatgaattattaataatttctaagagtatgaagtgttagggtacagaagtt

SEQ ID NO: 918563 - DNA, 120 bp, Artificial Sequence
  ENSG00000253311_55 (sequence is synthesized)
gagaaacagctgttctttatagcaaccaaagccagaaaataagcattaatgacagcaggaagatataaaagatacagagttatattaactgcagaagagggtgggaaatagaatttattc

SEQ ID NO: 918564 - DNA, 120 bp, Artificial Sequence
  ENSG00000253311_56 (sequence is synthesized)
atgcagtcattcaacaaacatttattgagcacccagtatgcagcaagcactgtgctaggtgctgggagggtaaagatcaaagccaaatcctgtgcccccaagtggctcacagagccatgt

SEQ ID NO: 918565 - DNA, 120 bp, Artificial Sequence
  ENSG00000253311_57 (sequence is synthesized)
gtctgctggactgtaagcccctccagggcaggggcgcatgagccaggccactacatccccagatatgtgccttcctcctactagatgcctaatatagatttgttgcataaacgattgaat

SEQ ID NO: 918566 - DNA, 120 bp, Artificial Sequence
  ENSG00000253311_58 (sequence is synthesized)
taaggttgaaccagaaggaaagacaaagatgccatctggtaatcatagatccttgtatgtagcctgatgctgatttatttctgcctggcagcaggaggggagttgacagagatctatatt

SEQ ID NO: 918567 - DNA, 120 bp, Artificial Sequence
  ENSG00000253311_59 (sequence is synthesized)
cccttgaaaactacgtgtctttagtcttccttggtgtgctgtattttggagaaagttgcctggtctttggagaaggtcaaattgcacaagtcagaccggaaagtccaccaaccctccgag

SEQ ID NO: 918568 - DNA, 120 bp, Artificial Sequence
  ENSG00000253311_60 (sequence is synthesized)
tcaagttcttggcccgagagtttatatttaattacatattgtcaccagtcatctgctgttccaagaacacagaacactccttccaaagcagataccttttttggacctccacttctcaaa

SEQ ID NO: 918569 - DNA, 120 bp, Artificial Sequence
  ENSG00000253311_61 (sequence is synthesized)
tcttgtccgttggagtcaaaagagctcctggcagtgtaactgacaactgcacatctgcgaatggcacgagtcactcagctcccagaaagaagtggaaggcttctgtttccttgcctgctc

SEQ ID NO: 918570 - DNA, 120 bp, Artificial Sequence
  ENSG00000253311_62 (sequence is synthesized)
ttggtggaaagagatggatgaggcgaggtcgtcacaaagccccttatacaccgtttgcatatggctgggcgtccacagggtagagttggctctgtctgtgcgaatcccaaactcttttct

SEQ ID NO: 918571 - DNA, 120 bp, Artificial Sequence
  ENSG00000253311_63 (sequence is synthesized)
gctcatccaaagctgtgcccgattcccttgaagcccactgaatgacgcccacacaaaggcctgtctgctctgaggagctcctccctgttgctttccttcacatctcaataaacccttctc

SEQ ID NO: 918572 - DNA, 120 bp, Artificial Sequence
  ENSG00000253311_64 (sequence is synthesized)
atcttatatttatcaaatgcaatcacaaagggaccacttaattaacaggctgccattgtatggaggatgatttggaaacttaaaggcatttgagaaacctcatactgttccagacgacaa

SEQ ID NO: 918573 - DNA, 120 bp, Artificial Sequence
  ENSG00000253311_65 (sequence is synthesized)
aaacagtgggatgcaccatctgggagggagcttcctccgaaacagatgccagtgtttccgtgataaagaacctaatattataacatcatagtatgttgtgccatttggtgaggagaggca

SEQ ID NO: 918574 - DNA, 120 bp, Artificial Sequence
  ENSG00000253311_66 (sequence is synthesized)
gtcctcctctgagcgaatgttctcaggtttcgccaaatcattcagcaccaaaatatttgctctggcaaagggcgctggtttattcttctcttgggtctatttcccctatggagcccttgc

SEQ ID NO: 918575 - DNA, 120 bp, Artificial Sequence
  ENSG00000253311_67 (sequence is synthesized)
agggctggacacattgaaggagctcaaataaaatttgtggaggaatctgttggctgggagggtggcatatggtcagagtgtggtcactacatgctatgaaggaaacagcaggtgaattca

SEQ ID NO: 918576 - DNA, 120 bp, Artificial Sequence
  ENSG00000253311_68 (sequence is synthesized)
gttccaagggcttatttcaagactaatggatttttgacacataggcttgaactttgcttcaaaacaaaatgctggacttggccttctatcattctgcctctcctaacccttatctccaac

SEQ ID NO: 918577 - DNA, 120 bp, Artificial Sequence
  ENSG00000253311_69 (sequence is synthesized)
tacttcattgtttagtttacttttattgagcaccttcctatgtgccaggcattgtgctgagcttggtaggaggatgaaaaaataaatacaatatagacactgcctgcaaggacttaaaaa

SEQ ID NO: 918578 - DNA, 120 bp, Artificial Sequence
  ENSG00000253314_0 (sequence is synthesized)
acagagagcggtttgatatgtcactgaaaccagcatccaggtggtattgctccatatgcctgagaccctaacaaaagcctaattacaactcatatgcctggagccaggacatgtgcagga

SEQ ID NO: 918579 - DNA, 120 bp, Artificial Sequence
  ENSG00000253314_1 (sequence is synthesized)
tggtgatgtaactttcctctctggaatgggtcctgcacaaaggaatgatagtaacatattgcaaagccagacacacagggaaattttgacctattgcacccagatgatgttactcttctg

SEQ ID NO: 918580 - DNA, 120 bp, Artificial Sequence
  ENSG00000253314_2 (sequence is synthesized)
atagagtcctgaaaaaagagggaattattgcatactggtgggcccagctgctgatgatgctacagtccttcctgtgccagagccacagacagtattttgacataatttcggcccatttgc

SEQ ID NO: 918581 - DNA, 120 bp, Artificial Sequence
  ENSG00000253314_3 (sequence is synthesized)
tcatccctaagcttaggacaatagactctgccaagagaggggattattacatattgcagagcccagcacctaggtggagtgactctcatctttttcttctaccccgtatatagccagctt

SEQ ID NO: 918582 - DNA, 120 bp, Artificial Sequence
  ENSG00000253314_4 (sequence is synthesized)
ggtgacctactatttgagtctatacccaggcccagaccacagatgaaattgtgcaatatgtggaacaaacacctaaacaatatataacaccttccttggctctgtctacaaagggcactt

SEQ ID NO: 918583 - DNA, 120 bp, Artificial Sequence
  ENSG00000253314_5 (sequence is synthesized)
ttatatatcactgggaccatcaaccaggtgatgttaattatcttcctgaaacctgtctacaaagagagttgtgtcgtatacctaggcccgtcatgtaagtgatgtcagtcccttctactg

SEQ ID NO: 918584 - DNA, 120 bp, Artificial Sequence
  ENSG00000253314_6 (sequence is synthesized)
ccttggccctgcacttacagtgcattgtgacacataacaaggtactgcacacagacgatgtgattctcctttttgggttctgccaaaaggaagcattgtaataaatcgcttggctcagta

SEQ ID NO: 918585 - DNA, 120 bp, Artificial Sequence
  ENSG00000253314_7 (sequence is synthesized)
ctttcatgccttctcactggccacaggtgatgttgtgccatataactgagaccgtatcaaaagcctaataacaagacgtatgtctggagccccgatatgcacaggatggtgatataaccc

SEQ ID NO: 918586 - DNA, 120 bp, Artificial Sequence
  ENSG00000253314_8 (sequence is synthesized)
tcttctctggaatgggccccacacaaaggaaggatagtgacatattgcaagcccaggcacacaggcccagagcacagttgaaattgtgacatatgtacaccaagcaaccaagcaatgtat

SEQ ID NO: 918587 - DNA, 120 bp, Artificial Sequence
  ENSG00000253314_9 (sequence is synthesized)
aacacctcatttggcaatggaatcgagggcacttttacatatcactgagaccagcgcccagctgatgtgaaatattggcctgaaccctgcctacaaaagcattgtggcttttatctagct

SEQ ID NO: 918588 - DNA, 120 bp, Artificial Sequence
  ENSG00000253314_10 (sequence is synthesized)
ccattacataagtgatgtgacttccttctactgccttggccctgcacttatggtgaatcgtgacacaaaattgggtagagcaaccagcctgggccctgaccagcacagagattgaggcat

SEQ ID NO: 918589 - DNA, 120 bp, Artificial Sequence
  ENSG00000253314_11 (sequence is synthesized)
attgctgaacccaggaccaagatgaagtcactctcctgccttgatcctgcacacagggacccttgtgacatatatacaggccaattgcctaggtgatgttgtgcaatatacctgagacca

SEQ ID NO: 918590 - DNA, 120 bp, Artificial Sequence
  ENSG00000253314_12 (sequence is synthesized)
aggacatgtgcaggatggtaactctcatccctgaacctttccacaggtgttattgtcacatataccttttccagctccaaagtgatttaataatccagcctagttatagcccacagataa

SEQ ID NO: 918591 - DNA, 120 bp, Artificial Sequence
  ENSG00000253314_13 (sequence is synthesized)
aggacaataggaacattgtgacattgctggacgtagcatctaggaaatgtactctcctctcctgcctaggccctgcccactaaaggaattgtgacataccactgagtgcaaaacctagac

SEQ ID NO: 918592 - DNA, 120 bp, Artificial Sequence
  ENSG00000253314_14 (sequence is synthesized)
tctcctgcctgaaccctgcttccagtgaagagtgttgcatttctaagcactgcatccaaatgacatgagtttcttgcctgggccgtttcaacagaaggcattgtgacatatctctaggtc

SEQ ID NO: 918593 - DNA, 120 bp, Artificial Sequence
  ENSG00000253314_15 (sequence is synthesized)
tatcatttaggtgatatgactctcctctcctgcctggacactctccacaaggggcattatgccatagagctagagctagcaaccaagttttgtgaattttctgttagggccttgcctaca

SEQ ID NO: 918594 - DNA, 120 bp, Artificial Sequence
  ENSG00000253314_16 (sequence is synthesized)
aagagaattttggaatatttctggcttagaatttaagtaatgtggttgttctgcctgttcagtaaccacagaggagaaggtgaaatatatctaggcaccgcaaacaggcatgataatgag

SEQ ID NO: 918595 - DNA, 120 bp, Artificial Sequence
  ENSG00000253314_17 (sequence is synthesized)
tcttgtatgtggacccagcaaataggagaaattttgactcttataactaggtttaggaacatgagtgatgtccaggatctccttctggtaagaaggtcacagaagattgcaacactcaca

SEQ ID NO: 918596 - DNA, 120 bp, Artificial Sequence
  ENSG00000253314_18 (sequence is synthesized)
attattttgtaacacctttgggttgtatagggagtgtcgtaacagggccaaacacacagaggaaattgtgacagtcatatgcacacctacctgacagtaaagactttcacaatcacaaat

SEQ ID NO: 918597 - DNA, 120 bp, Artificial Sequence
  ENSG00000253314_19 (sequence is synthesized)
ggatgaaggcaactgtcctacatgaaaacaggacatgtgtggtattgtacatctaaaacctagaattttattccattgtgactgtgatataaatcaatgccaagcacctgcgtgatttca

SEQ ID NO: 918598 - DNA, 120 bp, Artificial Sequence
  ENSG00000253314_20 (sequence is synthesized)
aagccctgtccagggggaattttgatgtatcacaaaaaccagcatccagttgatgtgactcttcttccagggtcctgcccacaagaaagattgtgacatctcactggacaagcacccacc

SEQ ID NO: 918599 - DNA, 120 bp, Artificial Sequence
  ENSG00000253314_21 (sequence is synthesized)
gtatctaggccaattgcctaggtgaagtgagtttcctctcttgccaaagtcctgcccacagagggggttttgatatgtcactgaaatcagcattcaggtgatgtgactcttctgccaggg

SEQ ID NO: 918600 - DNA, 120 bp, Artificial Sequence
  ENSG00000253314_22 (sequence is synthesized)
acagatcctggcctgctcttgcacacatatctcaagccccacaccccgggttcctggatcatcaatttgtctaagcctccagagcctccaccggctcatggcctgagaatgggatctgtc

SEQ ID NO: 918601 - DNA, 120 bp, Artificial Sequence
  ENSG00000253314_23 (sequence is synthesized)
tggcaatcaatctttttcagcagtgctgaagatctaacctcacagaaaagagtctaaggcaaaaaacgaaagccagcttttgccaggcaaagcaccttgtgcctctcccaggcatctagc

SEQ ID NO: 918602 - DNA, 120 bp, Artificial Sequence
  ENSG00000253314_24 (sequence is synthesized)
gccaccgttcaacttcacagagaggccacattcttgccctggtcttgaaagaatcccagactgtaatggaaaaggatcgacgtgggagaaagaggtttgctcactttctgacttgttctc

SEQ ID NO: 918603 - DNA, 120 bp, Artificial Sequence
  ENSG00000253314_25 (sequence is synthesized)
tcgtgctcacctaaatctctgtctttggacatcgccctcagtgctgtcaggagtctggatgcacaattggggtcctctgcaccaattctcccctgggcagacacctggaaatatctgggt

SEQ ID NO: 918604 - DNA, 120 bp, Artificial Sequence
  ENSG00000253314_26 (sequence is synthesized)
ttgctcagggcctgctcctcctactgcagcaagtgttcctgccaggaccctgtaaacagagaaggcatgcatcctctgcagggactcctggtgccacatgtcccatgagtcaacagatgt

SEQ ID NO: 918605 - DNA, 120 bp, Artificial Sequence
  ENSG00000253314_27 (sequence is synthesized)
atatgatatttacttggagccaacacaagattctgttctcccaactcttggtcatgagccctatgtcctacaggctgcatgctcagctttgtctcttagtttaactgggaagtccatcat

SEQ ID NO: 918606 - DNA, 120 bp, Artificial Sequence
  ENSG00000253314_28 (sequence is synthesized)
tattgtccacagcaatgcgtgtctggagcacacattattgaattcctgcagacctgggttcgagttctcattctgcagtttattagctagaccacccaataaaaccactgttactctaaa

SEQ ID NO: 918607 - DNA, 120 bp, Artificial Sequence
  ENSG00000253314_29 (sequence is synthesized)
tgatatgactctttttccagagtcttgtgacatttcactggaccagcacccactcaggtgatgtgactttcctttcttctccccacccacaggtgatgttgtgcaatatacctgagacca

SEQ ID NO: 918608 - DNA, 120 bp, Artificial Sequence
  ENSG00000253314_30 (sequence is synthesized)
aattttctgacagtacgattgtgatacaaattttttccaagcaactgtgtaatttgaccctacagagtttttccagcacatatatgggattgtgatgtctacctaggccaatctcaaggt

SEQ ID NO: 918609 - DNA, 120 bp, Artificial Sequence
  ENSG00000253314_31 (sequence is synthesized)
tttctactacttgggaggtccacaatgccaattgccctttagtattgactcaagcctttgtcaagtaaacattcctgaataaatgtgagtctcactggctggtcagggctgcaaatgttt

SEQ ID NO: 918610 - DNA, 120 bp, Artificial Sequence
  ENSG00000253314_32 (sequence is synthesized)
ctctgcccagctcctgaattaattattctgcctaggtatcgcccacaaatgagaatttgacaaataacagagccaagcaccttgatgatttgaccgcgttatcttaacaatgtcctctgg

SEQ ID NO: 918611 - DNA, 120 bp, Artificial Sequence
  ENSG00000253314_33 (sequence is synthesized)
agggattgtaacatatttctggacccattttctaggttacatgactctcccctcctgcctgtgccctgattccttggtaactacagcatttctgagcactgcatccaaatgatatgactg

SEQ ID NO: 918612 - DNA, 120 bp, Artificial Sequence
  ENSG00000253314_34 (sequence is synthesized)
tcttgcctgggccctgtcaacaggaggcattgtgacatattttggggcccatcatttaggggataagactctcctctcctgcttggacactgcccacaagggacattgtgccacagcgct

SEQ ID NO: 918613 - DNA, 120 bp, Artificial Sequence
  ENSG00000253314_35 (sequence is synthesized)
ggacctagcacacaagttatgtgacgtttctgacaggtctgcctaaaaagaggattttggaatatttctggcccagcatttaggtgatgtggctgtcctgcctgcttcataaccacagag

SEQ ID NO: 918614 - DNA, 120 bp, Artificial Sequence
  ENSG00000253314_36 (sequence is synthesized)
gggattgtaacatatgcctaggcacagctcacaggcatgataatgactcttatatatggattcagccaatagaggatattttgacttttataaccagatttacatacatgcatgatgtct

SEQ ID NO: 918615 - DNA, 120 bp, Artificial Sequence
  ENSG00000253314_37 (sequence is synthesized)
tggatcacattcctgtacaaaggtcacaaaagattacaacactcacacatattttacaaagtctttcggtaatacagacagagccaaagcagggctcagcacacacgtgaaattgttagt

SEQ ID NO: 918616 - DNA, 120 bp, Artificial Sequence
  ENSG00000253314_38 (sequence is synthesized)
acacaggggccattgtgacatatatccaggccaattgcctaggtgaagtttgtctcctttcctgcctaagccctgcccacggggaagatttagatatatcactaaaaccagcacccaagt

SEQ ID NO: 918617 - DNA, 120 bp, Artificial Sequence
  ENSG00000253314_39 (sequence is synthesized)
aaaggggactggtgaatgtctcagtacccaggaccaggtgggtctccagcctggtttcttcagcctggtttctgcccacatattcaactgtgacatatatctaaagaagcacccaggaat

SEQ ID NO: 918618 - DNA, 120 bp, Artificial Sequence
  ENSG00000253314_40 (sequence is synthesized)
ggtccaagttatattgggattcagccaatagaagatattttgcctgtcatccctaagcttaggacaatagggtcctgcccacaagaaagattgtgacatctcactggacaagcacccacc

SEQ ID NO: 918619 - DNA, 120 bp, Artificial Sequence
  ENSG00000253314_41 (sequence is synthesized)
acatggagcaatgtgacatatgggtagaacctgcacctatttgttgtagctctcttcacatgttagattgtgtcatatacctagggaagcatgtaggtgataggtctctgccaacaatgg

SEQ ID NO: 918620 - DNA, 120 bp, Artificial Sequence
  ENSG00000253314_42 (sequence is synthesized)
atattatcacttatctctgggtttataagctaggtaatttgtgtctcctgcctgtgccctgtccccagaggacattgtgacatgttgtttggcttaacatctagactctgccaagagagg

SEQ ID NO: 918621 - DNA, 120 bp, Artificial Sequence
  ENSG00000253314_43 (sequence is synthesized)
acagaacagacattgtgacatatatctaggcaaattgcctagaagtgaatcccctctcctgcttaagtccttcccacagagagcggtttgatatgtcactgaaaccagcatccaggtgat

SEQ ID NO: 918622 - DNA, 120 bp, Artificial Sequence
  ENSG00000253314_44 (sequence is synthesized)
aggtctatcacataagtgatgtcactcccttctactgccttagccctgcacttacagtgcattgtgacacacaactgggcacttcacacaggtggtattgctccatatgcctgagaccct

SEQ ID NO: 918623 - DNA, 120 bp, Artificial Sequence
  ENSG00000253314_45 (sequence is synthesized)
agaaataattgacactcatagccagtctcgtggccatgggtaaagtcctcagtttttcacttgtataaagttcatgaagggttaagagtgtcataacagagaccagcaactaagtgagaa

SEQ ID NO: 918624 - DNA, 120 bp, Artificial Sequence
  ENSG00000253314_46 (sequence is synthesized)
gaggtgatgtgactcttctgacatggccctgtctgcaaaggagattataatgtatcctgagcccagaatccagatgatgagactctcctgccttgtttctgctcacaggtgctgaactcc

SEQ ID NO: 918625 - DNA, 120 bp, Artificial Sequence
  ENSG00000253314_47 (sequence is synthesized)
ttagttctggaactaaatgtgaattctggactccggaatgccagttggctttcacatgccagaggagtgaggaggcccaggtgggcctaaaaatgtggctgttggttggccttccacaca

SEQ ID NO: 918626 - DNA, 120 bp, Artificial Sequence
  ENSG00000253314_48 (sequence is synthesized)
acatcgctggatgtagcatctacgaaatgtgactctcctctcctgcttaggtcctgcccacaaaaggaattgtgacatatcactgagtgcaaaacctagtaaatgcaactctcctcttta

SEQ ID NO: 918627 - DNA, 120 bp, Artificial Sequence
  ENSG00000253314_49 (sequence is synthesized)
gtttgaaccatgattcagcaaatctgtattgcttttactcccctactggaacacaatcttcaaggggcattggggcttttatacatggatcttgcctattgttgagattgcgactcctgt

SEQ ID NO: 918628 - DNA, 120 bp, Artificial Sequence
  ENSG00000253314_50 (sequence is synthesized)
attttgacccaactcataggaggtgttatctctcatacctgaagccaggacttttgttggactgtgaaacttatttctgaacatttttgagtgtgtgattgagaagtatgactttgccca

SEQ ID NO: 918629 - DNA, 120 bp, Artificial Sequence
  ENSG00000253314_51 (sequence is synthesized)
ttcaccagagtcctgcccacaaggaggattgtgacatttcactggaccagcacccactcaggaatcaaatccgagttcgtctacagctgattcggcaggtaccagggcgtccgcgatggt

SEQ ID NO: 918630 - DNA, 120 bp, Artificial Sequence
  ENSG00000253314_52 (sequence is synthesized)
aaccagagagattgtgacatattgctgtacccaagcccagaatattcaatttaagctcagcttctacgattgatttggcaggaatcaaatccgagttcgtctacagctgattcggcaggt

SEQ ID NO: 918631 - DNA, 120 bp, Artificial Sequence
  ENSG00000253314_53 (sequence is synthesized)
gggtgctgtcctaagagagccttgtgacatatctcaacacccagcactcaaatgatatggctcttctgcccagtttctgcccacatattaaattgtgacatatttctagggaagcatcta

SEQ ID NO: 918632 - DNA, 120 bp, Artificial Sequence
  ENSG00000253314_54 (sequence is synthesized)
ggtgatatgactctcctcatctgcctgagttctgcctactggggacatggggacatatctgtgatcccatgacctaagtgatatgcctctcttcctctgcctgggcctttaaaatggtgg

SEQ ID NO: 918633 - DNA, 120 bp, Artificial Sequence
  ENSG00000253314_55 (sequence is synthesized)
caggtaatgtgactctacattcctgcctgggtcctgctcaccaaagaaattgtgacttaccgctgattgcaaaccctaaatgatgtgactgtccttcatattctagactctgccaagaga

SEQ ID NO: 918634 - DNA, 120 bp, Artificial Sequence
  ENSG00000253314_56 (sequence is synthesized)
cttactcataatgtataaacttgggtggtacagacagtttcataacaaggcccggcaaaaagttaagattgtgactctcaattacacacccaggtgaaagtaaaatctgtcaccatccca

SEQ ID NO: 918635 - DNA, 120 bp, Artificial Sequence
  ENSG00000253314_57 (sequence is synthesized)
cttccactggggactgtagcatttccaagctctgcatccaaatgataagactctcttgcctggtcctttcaacaggagatattgtgacatatctctgggtgatatgagtctcctcttctg

SEQ ID NO: 918636 - DNA, 120 bp, Artificial Sequence
  ENSG00000253314_58 (sequence is synthesized)
tctgccaggaacttgcctgcaaggagaatattggaaaattctggctcagcatttaggtgacatggctgtcatacctgtttcattactacagagtaaattgtgacacacaccttagcacag

SEQ ID NO: 918637 - DNA, 120 bp, Artificial Sequence
  ENSG00000240801_0 (sequence is synthesized)
gagcccacagagcaggagagctgccaggtctgcccatcgaccaggtttgcagctctcccctgggccactaaccatcctggcccgggctgcctgtctgacctccgtgcctagtcgtggctc

SEQ ID NO: 918638 - DNA, 120 bp, Artificial Sequence
  ENSG00000240801_1 (sequence is synthesized)
ctccccgtgtccccaatgtcttcagtggggggccccctcttgggtcccctcctctgccatcacctgaagacccccacgccaaacactgaatgtcacctgtgcctgccgcctcggtccacc

SEQ ID NO: 918639 - DNA, 120 bp, Artificial Sequence
  ENSG00000240801_2 (sequence is synthesized)
ttgcggcccgtgtttgactcaactcaactcctttaacgctaatatttccggcaaaatcccatgcttgggttttgtctttaaccttgtaacgcttgcaatcccaataaagcattaaaagtc

SEQ ID NO: 918640 - DNA, 120 bp, Artificial Sequence
  ENSG00000253317_0 (sequence is synthesized)
atagatcattcacctccatatcacctaaaagaagaaagttaaaggcagcagtatatttatttgttgagggttgtcaccgtgttccctttccttgctgtgggtgagtggaaggaagctgca

SEQ ID NO: 918641 - DNA, 120 bp, Artificial Sequence
  ENSG00000253317_1 (sequence is synthesized)
agaagaccactcacagagcttggcatatgcccattagtattcggaggaggaagcgactggtacctgatgcctacctgaaaatgtctaatgggaaagatctggccaaccactctgaaggca

SEQ ID NO: 918642 - DNA, 120 bp, Artificial Sequence
  ENSG00000253317_2 (sequence is synthesized)
tgaaggcagagcaagaggagtgtactacattcagaggaagccactcttctaccaaaagcaaggacaaggcccctaggcagaaggacttcccttgtctcagatgaaactttggacttggac

SEQ ID NO: 918643 - DNA, 120 bp, Artificial Sequence
  ENSG00000253317_3 (sequence is synthesized)
tttgacaggggccagggctggaatgacatggttagggtttgtgtttccacctaaatctcatcttgaattataatccccataatccccataatgcccacatgtcaaggcagagaccaggtg

SEQ ID NO: 918644 - DNA, 88 bp, Artificial Sequence
  ENSG00000253317_4 (sequence is synthesized)
aatggttttataagtgtttggtagttcctcttgcattcattctccttcctgctgcctgtgagaaggtgccttgcttcccctttgcctt

SEQ ID NO: 918645 - DNA, 85 bp, Artificial Sequence
  ENSG00000253317_5 (sequence is synthesized)
tcattctccttcctgctgcctgtgaatcgtaagtttcctgaggtctcccaagccatgtgcaactgtgagtcaattaaacctcttt

SEQ ID NO: 918646 - DNA, 120 bp, Artificial Sequence
  ENSG00000257400_0 (sequence is synthesized)
ggtgataagggtcatctctatgaatagctttcttcctggaactgactggacttcacaaccaattttgggctagtgtggagagatcagctgtgagaaacatccattgatttgctcaggctg

SEQ ID NO: 918647 - DNA, 120 bp, Artificial Sequence
  ENSG00000257400_1 (sequence is synthesized)
tcataagttttttagatacaattttattgccaataattaaagagtgagaatgagcggcaatgggctggtatggttgcattcaaactccaaagttcacattttggaatattgatttttgct

SEQ ID NO: 918648 - DNA, 120 bp, Artificial Sequence
  ENSG00000257400_2 (sequence is synthesized)
tgagaacaacttacctaaaaaccatgggaatttggcagggagggatgtgatggggcatatgttgagttctttcaaggaatttaactttcatttctgaagaagtaaaaactgtggcatggt

SEQ ID NO: 918649 - DNA, 120 bp, Artificial Sequence
  ENSG00000257407_0 (sequence is synthesized)
gcgccctgcggaatccctccaggaattactccctggtcctctcacagtggctgtggtctcagcctgagataaaaggccagaagcaggaaggtacacatatagactacatttcccagcctc

SEQ ID NO: 918650 - DNA, 120 bp, Artificial Sequence
  ENSG00000257407_1 (sequence is synthesized)
gcttgcagttaagtgagggtcgtgtgatggagttctggccaatggaagatgagaaacttgaaggagtcagtccacaataatttctggagcatctactttgtactacctgctgttctaggc

SEQ ID NO: 918651 - DNA, 120 bp, Artificial Sequence
  ENSG00000257407_2 (sequence is synthesized)
gatgggaggacacagattaggaacacagaaacaaatgagacagggtcttgctctgtctcccaagctggagtgtagcagcatgatcatggctcactgtgcagcctcaacctcctgggctca

SEQ ID NO: 918652 - DNA, 120 bp, Artificial Sequence
  ENSG00000257407_3 (sequence is synthesized)
ttctaattggtggatgggaggacacagattaggaacacagaaacaaatgaggtaacttctgtcactgtcaccaccatgacaacaccctctactggaaaggtatgagtcatcccagctgag

SEQ ID NO: 918653 - DNA, 120 bp, Artificial Sequence
  ENSG00000257407_4 (sequence is synthesized)
ataggttgagaggtcattcttaccaagagcagcaaagaccaactcatagaatcagcaatgaatcttcgtgtttcagcagagggaaaataaccgcctttagctcacctcgcaattgctgta

SEQ ID NO: 918654 - DNA, 120 bp, Artificial Sequence
  ENSG00000277999_0 (sequence is synthesized)
gagctcatgagtcaagactccccggcctatttttaggccatttcttcagatcacacggtgggcagagtttgtttactctggatcagagctgctctgggaactctccatgcagccaccaga

SEQ ID NO: 918655 - DNA, 120 bp, Artificial Sequence
  ENSG00000277999_1 (sequence is synthesized)
cactagaacaaagaccagtgaggaaggatgactgaagtccagacattgagcgtgtctggtgtgtgtcccggtgacaaaggcagccgaacagaccacagggactggggctagagcagtaca

SEQ ID NO: 918656 - DNA, 120 bp, Artificial Sequence
  ENSG00000277999_2 (sequence is synthesized)
ggacgcatcgcctgggcgccatgcaaagattattggacacaggaaggtcagccagtgctcaaaggtccctcgtgcagccatcagctctggccccaagcccctggagggcctcattcattt

SEQ ID NO: 918657 - DNA, 120 bp, Artificial Sequence
  ENSG00000277999_3 (sequence is synthesized)
cttctttgctccccatgatgttctgagagcaagccaagggcaggagctccgccttgcccatgttcataacccaactctaccaccagaaaagactcagtaaagtctgtgttcattcactta

SEQ ID NO: 918658 - DNA, 72 bp, Artificial Sequence
  ENSG00000277991_0 (sequence is synthesized)
ggagcagaatgaaaatgaggcccagtggagaagtgatatttccaagatcaccctggcagacaccaggcctgt

SEQ ID NO: 918659 - DNA, 120 bp, Artificial Sequence
  ENSG00000277991_1 (sequence is synthesized)
tctctaagtgtatgcattatctacaggtaacttcttagaccaagtctagaaacagtctgaggacaataacaattccattctaaaaagaatctcccaacatttcttctatctcaacctcaa

SEQ ID NO: 918660 - DNA, 120 bp, Artificial Sequence
  ENSG00000277991_2 (sequence is synthesized)
ctgcatctgcctgtgaacttccagcttaccaaggctctatatcttctggcagtgacaaaggctccttccatgatatgtattcatttcctaccaccgtagtggaagagagattttccctat

SEQ ID NO: 918661 - DNA, 120 bp, Artificial Sequence
  ENSG00000277991_3 (sequence is synthesized)
ctttacaactgatagcatttccaacagtaagctgtgagattctgcttgaaatcacctctcaaacaaataaaaaacagacctgggagacatgctacactcattctgctgaggaaatagggc

SEQ ID NO: 918662 - DNA, 120 bp, Artificial Sequence
  ENSG00000277991_4 (sequence is synthesized)
cagatatgcgatggggcaaatcctgaagcgtacatggctatctctcacagctaaagcacccctcacccctatccagcgcttcttacccctggcgcaagagagtcacctgcggggaggaaa

SEQ ID NO: 918663 - DNA, 120 bp, Artificial Sequence
  ENSG00000277991_5 (sequence is synthesized)
actatcaaaatcccttaaacccaagttgtaaccgcacaactaaatcagaatccttggagctggatctgaaaaaaatacggttgaaagttgtgcaggtgattacaatgtgtaggcaagcca

SEQ ID NO: 918664 - DNA, 120 bp, Artificial Sequence
  ENSG00000277991_6 (sequence is synthesized)
gaaaaccatggctttaacgagcagcttttgttagaaatgatttctcaaatgaatgtaaaaacgtttgctgctgaattgtgacctttcaattttacctgcttttcctgcaaagtatatttt

SEQ ID NO: 918665 - DNA, 120 bp, Artificial Sequence
  ENSG00000277991_7 (sequence is synthesized)
gcagacccaggctggcttgtccttctgttcatggttcacccagtgccgtgtgtgctcagtgcatcctgtgcacgggtcactgtgctgtgtgcgctggccggggtgagcatcattcttcgg

SEQ ID NO: 918666 - DNA, 120 bp, Artificial Sequence
  ENSG00000277991_8 (sequence is synthesized)
gagattatgatcaggtggcacagaaacctgggatggtgaaaaaaccaggttgcccctgcagattcggtgtctgaggtagaacgtatgccaggggtcttgtaggcacatgtgtgggttttt

SEQ ID NO: 918667 - DNA, 120 bp, Artificial Sequence
  ENSG00000277991_9 (sequence is synthesized)
ggtgggaaagtctatgaggaaaggtagcatgggcaacaatcttgatgccaaagccttgtcctgagaggggcttggccacatcaacatgcagtgtgtatgttcagtgggtgaaaaacctgt

SEQ ID NO: 918668 - DNA, 120 bp, Artificial Sequence
  ENSG00000277991_10 (sequence is synthesized)
ggtggcctcaggttggcaggagggtagaaggcatctgttctcagaacttcttccctcagagtcgtcggtccttcttaccatgggagaatgcctggaaccacagggcagtgcatggtgtag

SEQ ID NO: 918669 - DNA, 120 bp, Artificial Sequence
  ENSG00000277991_11 (sequence is synthesized)
cagcctgtgtgcagagcagagcctaccttccccgagacacctggagtctctctccagcagaggcccccacattgtctttctccttacaacacttttgatcctaaatgtgtaaagttccct

SEQ ID NO: 918670 - DNA, 120 bp, Artificial Sequence
  ENSG00000277991_12 (sequence is synthesized)
gaaaacccactgcttctccaacacccatttgttgccccaaaatttaattctgacacaacttagagttcacacagatcccagaaattcagggctcagtcccacatcacccctctcactgta

SEQ ID NO: 918671 - DNA, 120 bp, Artificial Sequence
  ENSG00000277991_13 (sequence is synthesized)
gaggagagttacacatccctgaagcccatctacacttctgagctacctcctataaatctgagactagcataaaccccttttcaagttaaataatttgatagaattactaaaaagaaaacc

SEQ ID NO: 918672 - DNA, 120 bp, Artificial Sequence
  ENSG00000277991_14 (sequence is synthesized)
tcaacaaataactgtaattatatttactactttattataaaaatataactcagaaacagccaaatggaagagatgtctagggcaaggaacagttgtgggtgaaggcaatcctggaaatag

SEQ ID NO: 918673 - DNA, 120 bp, Artificial Sequence
  ENSG00000277991_15 (sequence is synthesized)
ctatatttaaagaaattcccccattctttgcattctcaaagaacagcttagtgaagagaaacgtgcttcccctgatgactttgaggatgctccctgctgtttttttaacctatcacaaaa

SEQ ID NO: 918674 - DNA, 120 bp, Artificial Sequence
  ENSG00000277991_16 (sequence is synthesized)
tagtcttcagtggtccaaataacatactcttaaagaaactttgcttgtttctcttcttccaaccagcccctgaactttgactcacccacagcttcagcaaacctacaacccttatttata

SEQ ID NO: 918675 - DNA, 120 bp, Artificial Sequence
  ENSG00000277991_17 (sequence is synthesized)
catacccctcctaagaacaggctgagttcaaggtgaaacattatcttatctgggatcgcattttgctaccctccatcgtgtgcttcctttccaaccttctttgtaaacttgttttctcct

SEQ ID NO: 918676 - DNA, 120 bp, Artificial Sequence
  ENSG00000277991_18 (sequence is synthesized)
aaaggctccttccatggttggtgtgagtaggcttggacacctgcagggcagacacccaggaataatcaactgggccttcagtggtcctcttttgcagggtcaaggtgggccttagctttt

SEQ ID NO: 918677 - DNA, 120 bp, Artificial Sequence
  ENSG00000277991_19 (sequence is synthesized)
agtcaatggtctaagacttctatttaccagttagtcattcagttagttttcaattcaaaaaatacttcatgtttgaagaatccagcaaaaattattcaaatctaagatataaaagagagg

SEQ ID NO: 918678 - DNA, 120 bp, Artificial Sequence
  ENSG00000277991_20 (sequence is synthesized)
tctaagatataaaagagaggaaattacagccgggcatggtgactcatgcctgtaatccctacattttgggaggcctaggtgatccacctgcttcggcttcccaaattgctgggattacag

SEQ ID NO: 918679 - DNA, 120 bp, Artificial Sequence
  ENSG00000277991_21 (sequence is synthesized)
cctgagaattttttcatacttctaagaaagtacaaatccatagggcacatgagaactgcaatgtctatctacagtaaatacagtttgataaataaaatgaaaggcaattgacctaaggtg

SEQ ID NO: 918680 - DNA, 120 bp, Artificial Sequence
  ENSG00000277991_22 (sequence is synthesized)
aaaaaagagaaatgaagctcaaccagtcagaagtagccaacaaccttatataaatagaaactgtccaacaaggtaaacagacaaacaaaaaacaataaaaaaagttgtgctaccaccaaa

SEQ ID NO: 918681 - DNA, 120 bp, Artificial Sequence
  ENSG00000277991_23 (sequence is synthesized)
tttcacaagttctctcttttgaaaaaaagaataacttatgtgataaatttatgtaatttgacaattaatctacctcatgtgcttgcagatatgtattcatttcctaccaccgtagtggaa

SEQ ID NO: 918682 - DNA, 120 bp, Artificial Sequence
  ENSG00000277991_24 (sequence is synthesized)
ttgtattccctattattcttgggcactctactccaagtaggaaaaggccaggaggtcctgttaaaggatgcactcagagcccgggctccctaacatatgagagtgctaaccagcaggtgt

SEQ ID NO: 918683 - DNA, 120 bp, Artificial Sequence
  ENSG00000277991_25 (sequence is synthesized)
agacttttcaggagtgaagaatgaggcaggcattccaaacctggaccttcatcaccttttgtttcatctcaagacaattctgagggactgttttggagcgtgtctggaaggtgaaccttg

SEQ ID NO: 918684 - DNA, 120 bp, Artificial Sequence
  ENSG00000277991_26 (sequence is synthesized)
aagaagagtgtgggctttgatgtgactcagttgagatctttcatggggaggcaggaattcaatgcccagaatctgggctggtgtctttgaggtcagtaggttgcgtctttgtatccaagt

SEQ ID NO: 918685 - DNA, 120 bp, Artificial Sequence
  ENSG00000277991_27 (sequence is synthesized)
tctaaatggcttccagaccatctctctgattctctttgggagatggggtctgaaagacaatgtcagtagttttgggaaattctagaaagtgtgcttggaaacgtgggaagagctcttgcc

SEQ ID NO: 918686 - DNA, 120 bp, Artificial Sequence
  ENSG00000277991_28 (sequence is synthesized)
tagtgcctaaatgctccatttgcagctctagccaagtagatacttggtaggtatagagccgggtttgcgtttatatcagcaaaacctatgtcagagttgaagaagtagtcaggaaaaagc

SEQ ID NO: 918687 - DNA, 120 bp, Artificial Sequence
  ENSG00000277991_29 (sequence is synthesized)
gtcttggtcgcaggccggggaacatcttaaaagcaaacttctagcctgctgactcttggcaatgagtgttggatcctggctaaagtgccttgaatgcagcatgaggccaatccatgaatc

SEQ ID NO: 918688 - DNA, 120 bp, Artificial Sequence
  ENSG00000277991_30 (sequence is synthesized)
caacttctcatggagaaatgttaatattttttcagtttgaatcaatcagggtgaaactaccatgctattggtttgcttactttttattatttcatgtaaaatctaagacaaaatacatta

SEQ ID NO: 918689 - DNA, 120 bp, Artificial Sequence
  ENSG00000277991_31 (sequence is synthesized)
aatgcttattgacatatgtatttattcttcaccaggctgataatatctgcctaattttaaactttcttccattttgtaggtttcaacttattctattgtaagatactgttaaatctaata

SEQ ID NO: 918690 - DNA, 120 bp, Artificial Sequence
  ENSG00000277991_32 (sequence is synthesized)
gaggcattgtcacttttacgtataattttattttatttcatatatttcctattggctttttacatttaaattatggagcacttcatcatataaaaaacttcaattatatttaaacagtaa

SEQ ID NO: 918691 - DNA, 120 bp, Artificial Sequence
  ENSG00000277991_33 (sequence is synthesized)
atgagccactgtactgagctgtgcctacttcaaaagactgaaaataaaaaatcaataaatctttgccaaattaaaaaacaaaacaatagtttccaggtcttagacaaagacaattctgtg

SEQ ID NO: 918692 - DNA, 120 bp, Artificial Sequence
  ENSG00000277991_34 (sequence is synthesized)
tcatgaagagtggcaaaaggcttatttagctgttaaaatgatttgcttatatttcaaagaagcagagaaaaaaagatacatataaaagttttccaggccaggcacggctgttcatgcctg

SEQ ID NO: 918693 - DNA, 120 bp, Artificial Sequence
  ENSG00000277991_35 (sequence is synthesized)
taatcccaacatttggggaggccaaggcaggaggatctcttgaagccaaatgtttgagtccagtacaggcaacatggtgaaattctgtcaccataaaaaaataaataaaataaatatggc

SEQ ID NO: 918694 - DNA, 120 bp, Artificial Sequence
  ENSG00000277991_36 (sequence is synthesized)
caccataaaaaaataaataaaataaatatggctggacatggtggttcacgcttgtaataccagcactttgggagtcggaggcaggtggataatgaggtcaggggttcgagaccagcctgg

SEQ ID NO: 918695 - DNA, 120 bp, Artificial Sequence
  ENSG00000277991_37 (sequence is synthesized)
aaccctttctctcctaaaaataataacaataaaaaattagccaggcatggtgctgtgcgcctgtaatgccagctactcaaaaggttgaagcaagagaattgcttgaacttgggaggcgga

SEQ ID NO: 918696 - DNA, 84 bp, Artificial Sequence
  ENSG00000277991_38 (sequence is synthesized)
gcttgaacttgggaggcggaggttgcattgagctaagatcatgccactacactctagcctggcccacagagcaagacactgtct

SEQ ID NO: 918697 - DNA, 120 bp, Artificial Sequence
  ENSG00000277991_39 (sequence is synthesized)
tgcctatagtcctaggtaattaagaggttgaggcaggaggactgctcaaacccaagaagttaaggttatagtgagctatgattatgccattgcacttcagactaagcaaaagagtaagat

SEQ ID NO: 918698 - DNA, 120 bp, Artificial Sequence
  ENSG00000277991_40 (sequence is synthesized)
tccatttcaaaaaattactaaaaaaagttctctaaattacattgtttaagaaaagggaaaagaaaaaatatcttttttaattttcaaatgggagaatagagcctctcatttctaatatgt

SEQ ID NO: 918699 - DNA, 120 bp, Artificial Sequence
  ENSG00000277991_41 (sequence is synthesized)
atttccttctgcaaaaacatggtctaggcccatggtcttgaactactggacatctgaattttagtaggtgctggattcaggcaactgaggggtggcttggacacactaagtgcacgtaaa

SEQ ID NO: 918700 - DNA, 120 bp, Artificial Sequence
  ENSG00000277991_42 (sequence is synthesized)
taaaaggtttgaggtgaactaaaaggtaaaagaggggaaggtgctattaagaacccacagttgggagacagtacagggttggtggaaggactggttcatgctacagatactgacccaggt

SEQ ID NO: 918701 - DNA, 84 bp, Artificial Sequence
  ENSG00000277991_43 (sequence is synthesized)
agatataaaagagaggaaattacagccgggcatggtgactcatgcctgtaatccctacattttgggaggcctaggcgggcagat

SEQ ID NO: 918702 - DNA, 120 bp, Artificial Sequence
  ENSG00000277991_44 (sequence is synthesized)
ggcaagaagagtgaaactacatctaaaaaataacagaataaaataaaataaaaacattataaggggcttatatcttataattcatcaagaaaagccaaagtatctatccctttcagaaaa

SEQ ID NO: 918703 - DNA, 120 bp, Artificial Sequence
  ENSG00000277991_45 (sequence is synthesized)
taaacatgtaatttaattatgttcaaaacaaatcatttagtaaacaattaatcatatgtgaacacttccaggaggtgcaaagtcccagctcctaaaacttaacattaccctcaaacaccc

SEQ ID NO: 918704 - DNA, 120 bp, Artificial Sequence
  ENSG00000277991_46 (sequence is synthesized)
tatcttggaacattaatatacacctgacgatgtcctgagtgaacacgccccactttaaaacaaaacaaaacattactattattctaaaatattaatttaggattgttatgcaaatatgta

SEQ ID NO: 918705 - DNA, 120 bp, Artificial Sequence
  ENSG00000277991_47 (sequence is synthesized)
ctatttaaatatttattgatgaataacatgcatacagcaatataggaacaaaatatttatggaatgcttgatgaattattactaaataaatacacttgtgtatgtaagaatcagatttgc

SEQ ID NO: 918706 - DNA, 120 bp, Artificial Sequence
  ENSG00000277991_48 (sequence is synthesized)
tcatgcccttgacactttctccttcccaaaggtaaccaagaccttaagagctaagtgtagataaactttgtcattttctacacgtgttttattacagaacattaaaaacgtatacataat

SEQ ID NO: 918707 - DNA, 120 bp, Artificial Sequence
  ENSG00000277991_49 (sequence is synthesized)
acaaaaaaaggataacagaccagtcacccagatttaacagctactagtcatgtgtcatttttgtttcacctatacttccagccatttccaccccaatttcattattttttagcctttttg

SEQ ID NO: 918708 - DNA, 120 bp, Artificial Sequence
  ENSG00000277991_50 (sequence is synthesized)
ttagcctttttggataaaatgtatattcattgcaaggtacaatgtgaactgtgaatagtagagagatggggtttcaccatgttgaccatgctagtcttgaactcctgtcctcaggtgatc

SEQ ID NO: 918709 - DNA, 120 bp, Artificial Sequence
  ENSG00000277991_51 (sequence is synthesized)
aaaccagttttatcgttttaatagccgaaattggcaaaatttctagtttttctttcataggaatgctctttgcaagaaaaaattttcatatagtgagagcaaaaatggcaaccatttgca

SEQ ID NO: 918710 - DNA, 120 bp, Artificial Sequence
  ENSG00000277991_52 (sequence is synthesized)
agtaaatgtcttatgaaattaagtagcagatatcaagctcatgaccttcagatagttacccctaactcaatcacttacatagcaagtgcagataattttcatagctccctattaaaatta

SEQ ID NO: 918711 - DNA, 120 bp, Artificial Sequence
  ENSG00000277991_53 (sequence is synthesized)
tatttgaatgcccttacaaattgtgactgtttttaaataaagttgaccaactaaaattttgtatatgacatatgataaattccccttcaagtcaccttacatttacttaattttattagg

SEQ ID NO: 918712 - DNA, 120 bp, Artificial Sequence
  ENSG00000277991_54 (sequence is synthesized)
tccccttcaagtcaccttacatttacttaattttattaggcagtgtctgtctaccacccaataatacttgacgattctccctccatttgcacaggcatcatagctgggaaacggattcac

SEQ ID NO: 918713 - DNA, 120 bp, Artificial Sequence; identical to SEQ ID NO: 868088
  ENSG00000277991_55 (sequence is synthesized)

SEQ ID NO: 918714 - DNA, 120 bp, Artificial Sequence; identical to SEQ ID NO: 868089
  ENSG00000277991_56 (sequence is synthesized)

SEQ ID NO: 918715 - DNA, 120 bp, Artificial Sequence; identical to SEQ ID NO: 868090
  ENSG00000277991_57 (sequence is synthesized)

SEQ ID NO: 918716 - DNA, 120 bp, Artificial Sequence; identical to SEQ ID NO: 868093
  ENSG00000277991_58 (sequence is synthesized)

SEQ ID NO: 918717 - DNA, 120 bp, Artificial Sequence
  ENSG00000277997_0 (sequence is synthesized)
gctgctgttcccatggccccgctgtgctgcggaacagtccctcgaggtaacaggttggctgcctcacacttgaggttttgtttttccagccctcaggtggagtcttcattattcttctgt

SEQ ID NO: 918718 - DNA, 120 bp, Artificial Sequence
  ENSG00000277997_1 (sequence is synthesized)
tggacatgtagcgtgtggcacttccaatcaaggcctccaccaaggcaggtgtgacttgctgaagggcagttggcttcccttgaggcttgcagggcagtggactggcataaccatgcctgg

SEQ ID NO: 918719 - DNA, 120 bp, Artificial Sequence
  ENSG00000277997_2 (sequence is synthesized)
tccccatgagagcacttcacttcatctgaattcctggaatgtgagctaaaagcagtaggtgggtgagagttttgtgaggcgttgaggtctggcagtaggtggtctgtggaagagaagcgg

SEQ ID NO: 918720 - DNA, 120 bp, Artificial Sequence
  ENSG00000241101_0 (sequence is synthesized)
tcaagaacaggctgaggctatctatagtgatacagaagtgaaatgtttttgagagcatcctgcttgtgaacagattcctatttccgtgaggaggtgacctcgaagaagagcagcttctat

SEQ ID NO: 918721 - DNA, 120 bp, Artificial Sequence
  ENSG00000241101_1 (sequence is synthesized)
tctgctgggaggtgtactgccttctggtatcaggcttctgcatcccgggaaagctcgggataacctgaggcacccccttgaaaaacaaaagagcttgatcagagcaggagggtcctgttg

SEQ ID NO: 918722 - DNA, 120 bp, Artificial Sequence
  ENSG00000241101_2 (sequence is synthesized)
actatcagtttcacctaaatcagctgatactgtccccaagatggaactgtactgtcacaggtcacactccaacttgagaagcactcctttcccctctaactacgaacagaactggagagc

SEQ ID NO: 918723 - DNA, 120 bp, Artificial Sequence
  ENSG00000241101_3 (sequence is synthesized)
tactttctggctgggtgacttggggaaatttgtaaacctcttgagatgcatcagtaagatgggcataatgacaggaaatcagcagctccaagagggcagaaactgtgctcctgtttgcta

SEQ ID NO: 918724 - DNA, 120 bp, Artificial Sequence
  ENSG00000178107_0 (sequence is synthesized)
aagaagactgcttttggtgtttgctttaacctgatgtccccattataataattcagaaggaaaggcctgctcatataatttcctacggcctcaggccagagacagccatacttacaggac

SEQ ID NO: 918725 - DNA, 120 bp, Artificial Sequence
  ENSG00000178107_1 (sequence is synthesized)
agcatctggcattgttcaatcaagatgttagctgggacagaagacataagtcagaacgctggaagaaactgggtcccaatattataataatcaataaagacaaaatatatttatagttta

SEQ ID NO: 918726 - DNA, 120 bp, Artificial Sequence
  ENSG00000287402_0 (sequence is synthesized)
tttatttcagcaaatgctcataacagctgtattgctgtgcgaaaagcgctgtgctttaatcctgttaccttaaatttaggtcgaactctaccttgtcacactgctcagccttctgagcct

SEQ ID NO: 918727 - DNA, 120 bp, Artificial Sequence
  ENSG00000287402_1 (sequence is synthesized)
ttctccatctcagacagagacacgaaggcttcttagaacaactgcttcttattgttatgaaggttaaatgagttactttgggaaggcagattgttaaccacagtgctctataaaaggtgt

SEQ ID NO: 918728 - DNA, 120 bp, Artificial Sequence
  ENSG00000287402_2 (sequence is synthesized)
gatcaggtattaacttgctggcttcccctctgttagagtggggagcaccctttacatgttaattcatcttgaaagggaggtgtagacttcaggtaggtcaggtgcatataaacttcttgt

SEQ ID NO: 918729 - DNA, 120 bp, Artificial Sequence
  ENSG00000287402_3 (sequence is synthesized)
ggtgcaacctcagaccaactcttcctcctcgtaagaactgctgcactccaactgcaggaggtgtatgtctacaccttgcctcttgcattaagttgtaaatattagtgaaggtaccaaacc

SEQ ID NO: 918730 - DNA, 120 bp, Artificial Sequence
  ENSG00000287402_4 (sequence is synthesized)
tcattcattaaacttagcacagtgcctggtacatggcaggcactcaatgaacacccgtaatcttgtcttatctccttatacctgcagttaatgtcatatacaatagatatttgattaaag

SEQ ID NO: 918731 - DNA, 80 bp, Artificial Sequence
  ENSG00000287402_5 (sequence is synthesized)
taagcaggtggattatttgagctcagaagttcgagaccagcctggctaacatgtgaaaccccgtctctattaaaaataca

SEQ ID NO: 918732 - DNA, 76 bp, Artificial Sequence
  ENSG00000287402_6 (sequence is synthesized)
tgtggtggcgcacacctgtaatcctagctactcaagaggtggaggcaggagaattgctggaatcttaagaggtgga

SEQ ID NO: 918733 - DNA, 120 bp, Artificial Sequence
  ENSG00000287402_7 (sequence is synthesized)
aacgtagaataagttaggaaattatttgttaaatatctggaaaagctcttttaccagatatccaaatggcttctttgcctacttcagatctttgctcaaatgttgccttcttaaggaggc

SEQ ID NO: 918734 - DNA, 120 bp, Artificial Sequence
  ENSG00000287402_8 (sequence is synthesized)
cttccctgcacatcctactgaaaatatgcagattcctccagcatctccgaggaatccaaaagcctggcatactggcaaaaggcttacagctgcaggcttctttggcctcccatggcagcg

SEQ ID NO: 918735 - DNA, 120 bp, Artificial Sequence
  ENSG00000287402_9 (sequence is synthesized)
gcgcagccgaatggatggggcgtgtctctggaatgtgtgtccttgcatagcgtttatatcagaaagagctcctgagaagatccaaaaatgtttttatctcttacttccctgacaggttga

SEQ ID NO: 918736 - DNA, 120 bp, Artificial Sequence
  ENSG00000287402_10 (sequence is synthesized)
agccccaccccaatgtggctatttggagatgaggcctttgggagataattggggttggatgaggtcatgaaggtggaaccctcgtgatgggataatggcttgataagaagaggaagaggg

SEQ ID NO: 918737 - DNA, 120 bp, Artificial Sequence
  ENSG00000287402_11 (sequence is synthesized)
agaggtcgctgtccctttccgccatgtaagcacacagcaggaaagcgactgtctacaagccaggaagagggcccttatcaggaaccaaatcggccaccactgtgatctgggactttgcag

SEQ ID NO: 918738 - DNA, 120 bp, Artificial Sequence
  ENSG00000287858_0 (sequence is synthesized)
ttcggccatcttggctcctcccccaggaatgcttatttttacactcagcacttttcccattgacatatcggtaagagttagcttttgttgaaatgtaacagccaaaaacctaaggcctgt

SEQ ID NO: 918739 - DNA, 120 bp, Artificial Sequence
  ENSG00000287858_1 (sequence is synthesized)
tgaaatgtaacagccaaaaacctaaggcctgttcctctctgcttttacttcgtttctttgttctattttcttcatgtgttcaactggcagctcctttgaaggctgacgtaggggactgtg

SEQ ID NO: 918740 - DNA, 120 bp, Artificial Sequence
  ENSG00000287858_2 (sequence is synthesized)
tcttatccttctttgtattgcagtgttttctactcataggtgctctataagtacttgttaaattagttaaatgaagaaatagcaatgtcttttatatggctactgttttaaacatttaaa

SEQ ID NO: 918741 - DNA, 120 bp, Artificial Sequence
  ENSG00000287858_3 (sequence is synthesized)
gaagaaagaaaaagaattatgatggaggttgcaaatgcaaacatttagagtcagaatgaaatggagtgagaaaagccaggaagaactggggcagaacagagagcaatgcccagtcaatgg

SEQ ID NO: 918742 - DNA, 120 bp, Artificial Sequence
  ENSG00000287858_4 (sequence is synthesized)
gggcaacttaattcactcagctccagcttgtgaggcaggagaattctgagagcggggagagagtgtgggtgtgtggagctaggacaagggactggagctggtgaaacagcatttgttcct

SEQ ID NO: 918743 - DNA, 120 bp, Artificial Sequence
  ENSG00000287858_5 (sequence is synthesized)
atgaattaacatattgagattgtaaccatttaaaacaaccacaaattttcctttatatcagttgtcctgggagagaagaagagggagggatagagatatggcatattctgcaggtagaaa

SEQ ID NO: 918744 - DNA, 120 bp, Artificial Sequence
  ENSG00000287858_6 (sequence is synthesized)
tgggtgcatttaccgtcagtgcttcctctaggtcttgttagttgatttgagtgaaaagatgcagaaaaacttttttctattactaggaacttttatctggaaaggactggtaacaaataa

SEQ ID NO: 918745 - DNA, 120 bp, Artificial Sequence
  ENSG00000287859_0 (sequence is synthesized)
aagtgctgggattacaggcatgaggtttgttagattcttttgtaagtacttgatattatctgttgatgtggatctcattgccaggtagctcttctagctgcttctgtttattctcctttt

SEQ ID NO: 918746 - DNA, 120 bp, Artificial Sequence
  ENSG00000287859_1 (sequence is synthesized)
ctccttttctcttagcagagtattggaatgaggctgttgagagctgggctgaaggaatgttttgggaatggatggtctggcccatttgctgttgcctgagcaagctgaatgctaaggaga

SEQ ID NO: 918747 - DNA, 120 bp, Artificial Sequence
  ENSG00000287859_2 (sequence is synthesized)
ggagccgtcattgcaatgtgaatagaggcaactgggaattgcattaaagggacttcaaggatctcccagcttcattctgcggacagccaatgtagaaccctgcctcagtcccaatctatg

SEQ ID NO: 918748 - DNA, 120 bp, Artificial Sequence
  ENSG00000287859_3 (sequence is synthesized)
taacattcatctctaaccctttcttggcctcgtggtagctttcctccaatactccaattggggcctttgccatgatgacatcaggatattttttaagttccccttggattgcatcgaggc

SEQ ID NO: 918749 - DNA, 120 bp, Artificial Sequence
  ENSG00000287859_4 (sequence is synthesized)
ttctctatgttgcttgagaggggctgcccatcttgcaaactttaaagcacagtgaaaacaaccttccacaagctcccggaaactccctgatgcctttctctgaggtaaaggtctttagat

SEQ ID NO: 918750 - DNA, 120 bp, Artificial Sequence
  ENSG00000287859_5 (sequence is synthesized)
ggtacctagttttgtgttagaagctttcacaccaagcagccaaaaaggctccatcctcacctgatttgtggtccccagaaaggagcctgcattaggccgataagtcatcatccagagagg

SEQ ID NO: 918751 - DNA, 120 bp, Artificial Sequence
  ENSG00000287859_6 (sequence is synthesized)
tgatgacagtcgtctccatgaccattgattaatgaaaacagggctagttggacccagagtagatggttataaatggtgctgtcagagaaaaataattattgtattaataaggaaacagtc

SEQ ID NO: 918752 - DNA, 120 bp, Artificial Sequence
  ENSG00000287859_7 (sequence is synthesized)
gggaggttgggggaaggtattctagctcccccaccacccgcctctccagaaggcagcccctccttgcctgtgcacgtgcccacgtccacgcgtggatgcgcggtgggtgcgctcgacctg

SEQ ID NO: 918753 - DNA, 120 bp, Artificial Sequence
  ENSG00000287859_8 (sequence is synthesized)
acccagctctcccgggatgcggcagatgagccggggttgcgtggaggctttcggtaccacttccagcaggaacggagaaaaacgagcatatcttattgtacctgaaacactctatgatat

SEQ ID NO: 918754 - DNA, 120 bp, Artificial Sequence
  ENSG00000287859_9 (sequence is synthesized)
gtactaaatattatgactactcggggccttgcaataattgattcacccacacagccatttagtctgcgagctgttcgttttacaaattctacaatcttttagaaattctttcagtgcgga

SEQ ID NO: 918755 - DNA, 120 bp, Artificial Sequence
  ENSG00000287859_10 (sequence is synthesized)
agattgctgcctggcctcagattcattatggtgattgaatcctcttcaatagagaacggtttaaagagagcacaggccccgtgcgtctcactcagagttaaggcgcataggttaaaagct

SEQ ID NO: 918756 - DNA, 120 bp, Artificial Sequence
  ENSG00000287859_11 (sequence is synthesized)
tgtctggtggcataattcactgccgctatgccaaacaatcacgtcttattgtgaccttcataagatacaaaaaggcaacaggatagagcttggcttttttttaaacccactcacagattt

SEQ ID NO: 918757 - DNA, 120 bp, Artificial Sequence
  ENSG00000287859_12 (sequence is synthesized)
agcttcccaacatctgaagcttggagaattcctaattaaataaccaattaataatgtagaatagaaaaagctattttttttctgaaatgcaaaatcataattaatcagagtacaaaaagc

SEQ ID NO: 918758 - DNA, 120 bp, Artificial Sequence
  ENSG00000287859_13 (sequence is synthesized)
tgcctgtctttatatcagaaaaatatagactaggtatttaaatattccaccacacctgaaccctggccatccgtcattgctatgacttaaaacatctcagactaaattaggttttgtttg

SEQ ID NO: 918759 - DNA, 120 bp, Artificial Sequence
  ENSG00000287859_14 (sequence is synthesized)
tatagagcagtgaaagtcagatggcttgaatgacaaaattagaacatgctcaaatcactgagacaaaaccgcataaagagaaagatgtgcaggaaaagggctgccagtatgaagcagaaa

SEQ ID NO: 918760 - DNA, 120 bp, Artificial Sequence
  ENSG00000287859_15 (sequence is synthesized)
gagccattcacattgacagaatgctcatgacaaatgaacaaccacagaggcaaagccaggctaaaaatcgtcacaaaacagaacagatgttcccaccctctgaagacagagttgtagttt

SEQ ID NO: 918761 - DNA, 120 bp, Artificial Sequence
  ENSG00000287859_16 (sequence is synthesized)
cataggcctcaagatggaaagattcatccggggagcataaactaaggggacactgagcagtgccgcttctggggctttgagaaactgagtactacttgttcccttctatggcagaatgct

SEQ ID NO: 918762 - DNA, 120 bp, Artificial Sequence
  ENSG00000256757_0 (sequence is synthesized)
tcttgggtccaccttccttgctcattgcatgccacatcaccacgccctacttgtttctgtgttccatccagtcctctcttagtgccctggtgtctggagctcagagggtgcttcctccct

SEQ ID NO: 918763 - DNA, 120 bp, Artificial Sequence
  ENSG00000256757_1 (sequence is synthesized)
gcttgctgaatcggattacaggcagcaggggtttttgctgtaaggaaaggaaagggagactctccttcagtgccttggtgtaggctgagacaccgaggccccctgggaaacacctacgga

SEQ ID NO: 918764 - DNA, 120 bp, Artificial Sequence
  ENSG00000256757_2 (sequence is synthesized)
tgtacatggaatgccctacaggcacaggaggcatccctggagactgaatggtgtctgggaagagtagggccacagagctgagcccctatggactgcagcagagggcctggctccaatcct

SEQ ID NO: 918765 - DNA, 120 bp, Artificial Sequence
  ENSG00000256757_3 (sequence is synthesized)
agcctaccatatcccagtcccatgatcctctggtcccatggagtcttgtttgagtgcaagtgaactgaatttcccaattcctcaaaaagagcaatagtaataaaaaccataatagtgaca

SEQ ID NO: 918766 - DNA, 68 bp, Artificial Sequence
  ENSG00000287853_0 (sequence is synthesized)
agatgtggggagcgcaccccatctgggagtctacaggtgtaaccagcagctccgaagagacagtaacc

SEQ ID NO: 918767 - DNA, 120 bp, Artificial Sequence
  ENSG00000287853_1 (sequence is synthesized)
gtctacaggtgtaaccagcagctccgaagagacagtaaccatcaagaacaggccataatgaagatggcggttttgtcaaaagaaaagggggaagtgtgaggaaaagaaaaagagatcaga

SEQ ID NO: 918768 - DNA, 73 bp, Artificial Sequence
  ENSG00000287853_2 (sequence is synthesized)
agaaaagggggaagtgtgaggaaaagaaaaagagatcagattgttactgtgtctatctaggaaaaggaagaca

SEQ ID NO: 918769 - DNA, 77 bp, Artificial Sequence
  ENSG00000287853_3 (sequence is synthesized)
agatgctgttaatctgtaactcttgtcccaaccctgtgctcgcaaaaacatgtgctgtattgactcaaggtttaagg

SEQ ID NO: 918770 - DNA, 120 bp, Artificial Sequence
  ENSG00000287853_4 (sequence is synthesized)
ttctccattctctgttaaccagggacacaatgcactgtggaagtctgcagggacccctgcccaagaaagcctgggtattgtccaggtttcccccgactgagacagcctgagatatggcct

SEQ ID NO: 918771 - DNA, 120 bp, Artificial Sequence
  ENSG00000287853_5 (sequence is synthesized)
ccgtaaagggtctgtgctaaggaggattagtgaaagaggaaggcctctatgcggttgagataagagcgtggcatctgtctcctgcacgtccctgggattggatgtctcagcataaaaccg

SEQ ID NO: 918772 - DNA, 120 bp, Artificial Sequence
  ENSG00000287853_6 (sequence is synthesized)
accatatattctattctgagacaggagaaaaccaccttatggctggaggtgagacatcatggcggcaatactgctctgttactctttactgcactgagttgtttatgtaagcttaaacat

SEQ ID NO: 918773 - DNA, 120 bp, Artificial Sequence
  ENSG00000287853_7 (sequence is synthesized)
aaatctagcgattgtgcacatccaggcacagcaccttttcttaaacttatttatgacagagtctttgctcacatgttcctctgctgaccctctccccaccttcaccctatagccccgcca

SEQ ID NO: 918774 - DNA, 120 bp, Artificial Sequence
  ENSG00000287853_8 (sequence is synthesized)
cactcccctcgcagagatagtaaagatagtgatcaataaatatggagggaaccagagaccagtgccagtgcaggtcctcacttgctgagtgccggtcccctgggcccacttttcttcctc

SEQ ID NO: 918775 - DNA, 120 bp, Artificial Sequence
  ENSG00000287851_0 (sequence is synthesized)
ggtcgtgctgcaagcgttccaggtccaggctgggcgacccctcgcgctgctgagaggctcctatgcccggtgggagttgaagtcgggctccgggagcagcagtcatcctgatcctcccac

SEQ ID NO: 918776 - DNA, 120 bp, Artificial Sequence
  ENSG00000287851_1 (sequence is synthesized)
ccgcgagctccaagcacttctggatccaggtcccgccttgggcggaaatgtgcagtcagttgactgcccaggagccaccttccccgctcccgcgttagtctcttggaatgagaatctaga

SEQ ID NO: 918777 - DNA, 120 bp, Artificial Sequence
  ENSG00000287851_2 (sequence is synthesized)
aacctaggatctgattccggctctgttagagattagtagttacttctctgagcctcagtttcctcatttctagaaaacgatggtattggggcaggcgcggtggctcacgtctgtaatccc

SEQ ID NO: 918778 - DNA, 120 bp, Artificial Sequence
  ENSG00000287851_3 (sequence is synthesized)
agcctgggcaacatggcgagaccccctcttctactaaaaatatgaaaattagccagcgtcgtggcacaaaaaaaaaaaaagaaaagatttttttttttggagatggagtctctctctgtc

SEQ ID NO: 918779 - DNA, 120 bp, Artificial Sequence
  ENSG00000287851_4 (sequence is synthesized)
gcccggccacaaaagtgctttataaagcattacctggaatgggggcgggggggagccctcagacaacctaaatgttcatcaataaatgaccacttaactgatggattccataaaatagaa

SEQ ID NO: 918780 - DNA, 120 bp, Artificial Sequence
  ENSG00000287857_0 (sequence is synthesized)
gcagagaacgctgaaggagattccagggagagacaacagcacctacaaagaggaagcaggaaggatagaagaaactgaagaaggtaagtgactaggcacagagaacaatggagaacgtgg

SEQ ID NO: 918781 - DNA, 120 bp, Artificial Sequence
  ENSG00000287857_1 (sequence is synthesized)
gacaaaatgagaacaaacatacagatgggatcagtcttgtaagtcatggtaaagatttatatctttatcctaagaaaaatgggaagttatatggagaatgaagggcaagtctcaaagata

SEQ ID NO: 918782 - DNA, 120 bp, Artificial Sequence
  ENSG00000287857_2 (sequence is synthesized)
tttcaaactaaactcataaccttctcctccaaatatgaccttttcagtgtttcctgtcactgcatggcaccatcatccatccaattatagaagcaaaaaaccagtctaggacatctctgt

SEQ ID NO: 918783 - DNA, 120 bp, Artificial Sequence
  ENSG00000287857_3 (sequence is synthesized)
agtaatcaatcagcccactctcatcatccatacttaatccacaatcaagtcctattgctcttatcagctatgactagtttcaagttgttatcctattcacagagagcacaacagccttgt

SEQ ID NO: 918784 - DNA, 120 bp, Artificial Sequence
  ENSG00000287857_4 (sequence is synthesized)
cacagatttcccatatccattcttgcccaccaagtagttatccatcctgaagtcactgatcttttaaaaacacaaatctgatcatgtcaccttgttgcagaaaatccttcattggctttc

SEQ ID NO: 918785 - DNA, 120 bp, Artificial Sequence
  ENSG00000287857_5 (sequence is synthesized)
aattgttcctagtataacaaatctcatctctccagtatcttctccacactcttttcctcctgcagtatattctaggacttcctttggttcctcaataatattattccttttgctttatag

SEQ ID NO: 918786 - DNA, 120 bp, Artificial Sequence
  ENSG00000287857_6 (sequence is synthesized)
ggttggcatacagtgttaaagcaagaggaacaatgatacttaggaactgaaggaaagccagggaggctagaacagccttgaggaaggatgagaagggtgtggaaaagatgctggagaggg

SEQ ID NO: 918787 - DNA, 120 bp, Artificial Sequence
  ENSG00000287857_7 (sequence is synthesized)
aaaattttcgtttttatactaagaacaatggaaacataaaaatgaaaggatcaaaatcgctgaacactaaattgggaaataaatgagaagcaaatttgaaagccaatcaaacactgatat

SEQ ID NO: 918788 - DNA, 120 bp, Artificial Sequence
  ENSG00000287857_8 (sequence is synthesized)
caggctgttgtccacactaaacatctgaaaatgtgccataaattggcaatgttttcatagtactttatttaagaacatagaataaatagacaaactactgaataaagaaaatataaagtg

SEQ ID NO: 918789 - DNA, 120 bp, Artificial Sequence
  ENSG00000287857_9 (sequence is synthesized)
tgtgcagaaagagttaacatagtagccctgactgctatcctttaaaaggtgtgcaaacaagattggctcttgcctggcttctgggagcttagatttcgggagggttttcaccattcctag

SEQ ID NO: 918790 - DNA, 120 bp, Artificial Sequence
  ENSG00000287857_10 (sequence is synthesized)
aacaatacagcttatactgaatacctgctttccttctgagaatctgaacttttgaaacatgacagcaggcagaagctgcctacatgaccagcccccaataaaagccttggttatttctaa

SEQ ID NO: 918791 - DNA, 120 bp, Artificial Sequence
  ENSG00000287857_11 (sequence is synthesized)
gcttctctggttggcaacatcccaaatgtgctgtcacaacacatggctgaggaaattaagagcaccttgggttgactccactgaaagaagactctagaatcttgtacctggtctcccttc

SEQ ID NO: 918792 - DNA, 120 bp, Artificial Sequence
  ENSG00000287857_12 (sequence is synthesized)
aactcagccccatgcatcttttccctttcctgattctgcttggtatctttttgctataatatagtcatgagtacaattatatgctgaatcttgtgagtactcctaatgaaaactatcaaa

SEQ ID NO: 918793 - DNA, 120 bp, Artificial Sequence
  ENSG00000287857_13 (sequence is synthesized)
cctggtgaaggagccgggggtggaggcggggaggcgggcaggcgaggtttgagaacaatgacacaaagtgaaattatatatagacttatttaaaggcttattttactataaaattaaaag

SEQ ID NO: 918794 - DNA, 120 bp, Artificial Sequence
  ENSG00000287857_14 (sequence is synthesized)
aaagtgcattcttctaatttttaataaagtataaaacagaaaaaagcatatactatatgataatactagcatttactcaatagtaataagaaattcagatttttagaagtctgacttagt

SEQ ID NO: 918795 - DNA, 120 bp, Artificial Sequence
  ENSG00000287857_15 (sequence is synthesized)
cattaacatacacctagcaatcacattaaaatacacaaggctttcctaatagaagttttcttataaaacaaaagtgcttttccttagataatagccattatgttcaatttcagtactaca

SEQ ID NO: 918796 - DNA, 120 bp, Artificial Sequence
  ENSG00000287857_16 (sequence is synthesized)
gtactacataataacataccattaatgtatacaccataaataaaaaacttagaagttctcaagtagaaaatggtaaaatatcacttgcagtttaacataaatatgtactaagttattatt

SEQ ID NO: 918797 - DNA, 120 bp, Artificial Sequence
  ENSG00000287857_17 (sequence is synthesized)
acaatcttagggcatagttgcttctttaaaaatgtttaaacatcagaacaattcattcctattaagtaggttttgctttttgctttcaaacttcttggcatttgcgatttctcatttgcg

SEQ ID NO: 918798 - DNA, 120 bp, Artificial Sequence
  ENSG00000287857_18 (sequence is synthesized)
actgtgaaagtggcactggcccctattacaaacctgcatttaaaagctgatttagaggaagcaagttgattatgaaattgggcctctttcaaggttttgaattaataaacacttccttat

SEQ ID NO: 918799 - DNA, 120 bp, Artificial Sequence
  ENSG00000287857_19 (sequence is synthesized)
tcagtggagcatttttggctttatggtaaaatgagcagaacatttcatggaattttaaatatactgccaaatgtcacttcgagaacataaatagcactgctgcagatacattcagaagta

SEQ ID NO: 918800 - DNA, 120 bp, Artificial Sequence
  ENSG00000287857_20 (sequence is synthesized)
catcaaatagtaatgggagaagatatttaactacaaaaaagcaaattcaatttagtgacttagtgacagcttattgagctgccatgtgatcatttctggttatgtctgcttttatgaata

SEQ ID NO: 918801 - DNA, 120 bp, Artificial Sequence
  ENSG00000256751_0 (sequence is synthesized)
ggtggcagaagttgcaagagaggctcctggcctactcaggggcgccgcctctccgagttttgcggcccaaggcttgggcgaatcagttcacatcaacacccctactagcctctccctccg

SEQ ID NO: 918802 - DNA, 120 bp, Artificial Sequence
  ENSG00000256751_1 (sequence is synthesized)
aagctccctggaacaactgctggaataaggttccagagtggaaggtggaagctccctcttgggataaaggatccacagtggaaaaaaaaaaagttgccctctgctggaaaacagcatctt

SEQ ID NO: 918803 - DNA, 120 bp, Artificial Sequence
  ENSG00000256751_2 (sequence is synthesized)
tgtcctctgagaaaaacagtctcccttcttacggaggccagtggattccatcctagaggctgtgttgaccgtatctccaaatagacaataacgaggcatcttgattcccacaactccagc

SEQ ID NO: 918804 - DNA, 120 bp, Artificial Sequence
  ENSG00000256751_3 (sequence is synthesized)
gagttcacccaggaaccagacgcccgctggacgtcaactcggccggacgcggggcacgggcgctaacaggctcctaggagcctccccgggcgccccccgcccagggcgcgctctgctcac

SEQ ID NO: 918805 - DNA, 120 bp, Artificial Sequence
  ENSG00000256751_4 (sequence is synthesized)
ctgcaggtttcggcggctccgcggtgactaacaacagcggcagcagcagcagcagcagcagaagcggtggcggctgtggcagccccgggcgcccgcccggaccgccgcgggtcatcgctc

SEQ ID NO: 918806 - DNA, 120 bp, Artificial Sequence
  ENSG00000256751_5 (sequence is synthesized)
cacggccgcgaccttcctctgcgggatcaggcggccgcggtggcccgcggtggcagaagttgcaagagaggctcctggcctactcaggggcgccgcctctccgaggtggggcgtcctcaa

SEQ ID NO: 918807 - DNA, 120 bp, Artificial Sequence
  ENSG00000256751_6 (sequence is synthesized)
ctttcctctttcttgagcccggcctgctccgggctctgaggggcgaggacgcttcacgtggtggcctggggcccaccccgcctaggaaaggcggatcctttacgtctgaccctctagcaa

SEQ ID NO: 918808 - DNA, 120 bp, Artificial Sequence
  ENSG00000256751_7 (sequence is synthesized)
cccctgggccggtctgggaaagttccccagctgcacttctgggaaatgcagaggctgcctgccgctttctttcgcagttttgcggcccaaggcttgggcgaatcagttcacatcaacacc

SEQ ID NO: 918809 - DNA, 120 bp, Artificial Sequence
  ENSG00000256751_8 (sequence is synthesized)
ggcataactttccgccttggatattcaggaagatggggaagatttggaggtatgctgactgcaacaaaggaggtgggctctcccggaaagaaaacaaccaatcaaccacaaagatttcta

SEQ ID NO: 918810 - DNA, 120 bp, Artificial Sequence
  ENSG00000256751_9 (sequence is synthesized)
acactcatttggagaacctccagagtatccggagaaacctttttaattggtgcaatgacaaaacttggaacctttgaaaaacattcctttggtgtggcttggattcctaggtacacgact

SEQ ID NO: 918811 - DNA, 120 bp, Artificial Sequence
  ENSG00000256751_10 (sequence is synthesized)
ggagtggttgttcttgacatgccctgtataaagtgcatagtattttggaggctgcatagatgcaatgacaaaattggatattctgccatatttgcaattcattgtactgcttatatctga

SEQ ID NO: 918812 - DNA, 120 bp, Artificial Sequence
  ENSG00000256751_11 (sequence is synthesized)
aaagtcacatgagtttggtgatatggtttggctccgtgtccccacccaaatctcatgctgaattgtaatccccaatgttaagggagggacctggtgggaggtgatgggatcatgggtgca

SEQ ID NO: 918813 - DNA, 120 bp, Artificial Sequence
  ENSG00000256751_12 (sequence is synthesized)
gatttccccattgctgttcctgtgttagtgagttctcatgagatctagttgtttgaacgtgtgtggcacctccccctttgctctctctctctcttcctgccatgcgaagaaggtgcttgc

SEQ ID NO: 918814 - DNA, 120 bp, Artificial Sequence
  ENSG00000256751_13 (sequence is synthesized)
ttccccttcactcttccaccatggttgtacatttcctgaggcctccccagccatgcttcttgaacaccctgtggaactgtgagttatttaaacctcctttcctcataaattacctagtct

SEQ ID NO: 918815 - DNA, 120 bp, Artificial Sequence
  ENSG00000256751_14 (sequence is synthesized)
cgggtagttctttataatagggtgagaatggactattacacttggaaaatagtgtgttatccagagagagaaactcatgttgtaaataaacgaaggaagggctgggagttaacatgatga

SEQ ID NO: 918816 - DNA, 120 bp, Artificial Sequence
  ENSG00000256751_15 (sequence is synthesized)
catgatgagctttgataacaggttgttgctgacatagataaaattagtatacagagtagatctcttagaaagtcttcccagaagaaaaaacttctggccaggcacagtggctcacacctg

SEQ ID NO: 918817 - DNA, 120 bp, Artificial Sequence
  ENSG00000256751_16 (sequence is synthesized)
agtggaggcaatagaaattgcagagtagagtgaagacaggtggcatttctgggattggtgccatgacaatggaagacagaagacaagacaaaggcataactttccgtaagcatttcatgg

SEQ ID NO: 918818 - DNA, 120 bp, Artificial Sequence
  ENSG00000256751_17 (sequence is synthesized)
accaggcgaatgcagctggatggggaagcctgtggcacaaggaggttccaacaagcagaacaaaagcccaggctagactatgcgctgtggcatattaggtaggaaataagggttattcag

SEQ ID NO: 918819 - DNA, 120 bp, Artificial Sequence
  ENSG00000256751_18 (sequence is synthesized)
tcatgtatttgcatagaatgactgagtgcaaggtgttaacagtttcagaagttaaagattaactcaaaaactgcaaagctgagttttaagcaatgcctggctaaagattcatctagatga

SEQ ID NO: 918820 - DNA, 120 bp, Artificial Sequence
  ENSG00000256751_19 (sequence is synthesized)
cttctgagttcctctcttacaggtgttttttctataacacctgtaactcatctcaaaccttgatgttcaaggctgttgaattaaactaagtttggcctgaggctgcctcttaggggtccc

SEQ ID NO: 918821 - DNA, 120 bp, Artificial Sequence
  ENSG00000256751_20 (sequence is synthesized)
tacaaaacaaactgcaacctagcttggtacataaacaaactaaaagcctaactagggtatacttacgttatagatagctgagtctcagccaatcgcagtagctgagcttcagccagtcac

SEQ ID NO: 918822 - DNA, 120 bp, Artificial Sequence
  ENSG00000256751_21 (sequence is synthesized)
aggctgtcaactgatgggactttgaccaaatcaggggaacacagaggtttgaccaatcaagttgtttctgtccctcacttctgttttctgtctataaacattgcccgcccaccttgccca

SEQ ID NO: 918823 - DNA, 120 bp, Artificial Sequence
  ENSG00000256751_22 (sequence is synthesized)
ttgaagctctctgaacctcttctggttttaagggccatctgatttgaaaattattctttgctcaatcaaactgtgttaaatttaatatgcataagcttttcttttaacaaggctatgtaa

SEQ ID NO: 918824 - DNA, 120 bp, Artificial Sequence
  ENSG00000256751_23 (sequence is synthesized)
ctttcatggtctttgaaagtgactcatgtactttctgtataactgcagtggcagggaagggagggggtataaatattatagaaatttcaccatctgttctttatttccccttgtagataa

SEQ ID NO: 918825 - DNA, 120 bp, Artificial Sequence
  ENSG00000256751_24 (sequence is synthesized)
atattttagtgggaaaatatattgaagttgggggtggggagaaagggaatggggaggaaataaatgaaatcataggtatggtgatttaaataggagtccaaagcttcttgttttcgtaca

SEQ ID NO: 918826 - DNA, 120 bp, Artificial Sequence
  ENSG00000256751_25 (sequence is synthesized)
tgtttggtgtttatcatgtcagcagtcagtggtgccctcaaaggtcttgttcttagagttctctaggaactgggtctaaatatctcaggatgcatagtgggacctcacatttggcaaaaa

SEQ ID NO: 918827 - DNA, 120 bp, Artificial Sequence
  ENSG00000256751_26 (sequence is synthesized)
gaattaagagtaaaaattatgtgaggtcgatcacacttgaagaccttttatcctttctgatttagttggtgcacagcagtacatatggttcccaatttgctaagatgctcaactccatac

SEQ ID NO: 918828 - DNA, 120 bp, Artificial Sequence
  ENSG00000256751_27 (sequence is synthesized)
cagagtgaactccaatgcgaatccatattgggaggccaggaagatgctccagctcaaaggtccccatgaagctgaggatttccaaggccatcttggcaatgtctattgcatgccgattgc

SEQ ID NO: 918829 - DNA, 120 bp, Artificial Sequence
  ENSG00000256751_28 (sequence is synthesized)
catttctcttaggcaaaccactagccaccatgtacgcatcaccgatggtttccacctgtggaaacagtttctcatgagtgcctctgcccctttgaaaagtatagaaagtaaacagaagca

SEQ ID NO: 918830 - DNA, 120 bp, Artificial Sequence
  ENSG00000256751_29 (sequence is synthesized)
gttaatcacatgtcaaacacaaaaagtgatttgggaacacagtatgagcatagccctttacactttttctggggccagttggatcagttctatgctgatttcttcagggtttttatagtc

SEQ ID NO: 918831 - DNA, 120 bp, Artificial Sequence
  ENSG00000256751_30 (sequence is synthesized)
cagttaatgggtgataaaatagctataaaggaatttagccatttaaaagtacttcataattatataaattgtccagatgtggtgacagttctagaaatgttcaaataaataatctgaatg

SEQ ID NO: 918832 - DNA, 120 bp, Artificial Sequence
  ENSG00000256751_31 (sequence is synthesized)
gttttatgtaatttgaggaacacccttagtttcctgaaaattaatcctttagcaaatgtcaacatactatttaacagaatattgtactttgtaatatgtaattgtatacattcttgtagt

SEQ ID NO: 918833 - DNA, 120 bp, Artificial Sequence
  ENSG00000256751_32 (sequence is synthesized)
atgattttctatttattataaccccagtgtcttctctgcttcatttgcagtcagcctaaacactgcccattttttggaggtgatttaagagtatgccattttgtctaaatttaatacttc

SEQ ID NO: 918834 - DNA, 120 bp, Artificial Sequence
  ENSG00000256751_33 (sequence is synthesized)
aaattaattcctgctgaacttcctgttgtatcttttttgctgcttcttaaagttgaatggtaattttgacttctcactcctctaatccttctacttctcttcacttttagctcagattca

SEQ ID NO: 918835 - DNA, 120 bp, Artificial Sequence
  ENSG00000256751_34 (sequence is synthesized)
accaccaattcactaaatgtgaaactagagcggtcaagagtagtaacagaaacaaccaattcaggctctgatgaccttgagttgtacaattaatggtttcagcctgttaggtgatgtggt

SEQ ID NO: 918836 - DNA, 120 bp, Artificial Sequence
  ENSG00000256751_35 (sequence is synthesized)
taccttgtagacatcatgatgatcaacaatgtggtcaaaactcttatagatgtcattaagcatgtccaccacttccatgggggtgctgtatttgcagatagtagtgaaacctacaatgtc

SEQ ID NO: 918837 - DNA, 120 bp, Artificial Sequence
  ENSG00000256751_36 (sequence is synthesized)
actgaagtagattgtaacttcctcatatagttccggctccacaaagcctttctccttcagagactttaccactagcctagatgaacgaagggaaaaaaaatgccttcaacttcagcaaat

SEQ ID NO: 918838 - DNA, 120 bp, Artificial Sequence
  ENSG00000256751_37 (sequence is synthesized)
ttcttcttgtttcacataaatctttcaggtagtagtgattgtctaccaagaattctagaatttgagacttccagtgaattgagtgaatcggaaacagaggttgtgtatatcatatacatg

SEQ ID NO: 918839 - DNA, 120 bp, Artificial Sequence
  ENSG00000256751_38 (sequence is synthesized)
aacatattacacaaatacacatataatgcatgttgtgaacacagatgaatacaagcaggttcaacattaacttagtgtttgattattaatcctaatacacataaatagataactttaata

SEQ ID NO: 918840 - DNA, 120 bp, Artificial Sequence
  ENSG00000256751_39 (sequence is synthesized)
tcctcaaaactctcatacatatacatacttgtccactttttgcttctctattgataatcaacctcttacagatgtggctctacatgcagaagctgaggagagtgtggtattacttaaatc

SEQ ID NO: 918841 - DNA, 120 bp, Artificial Sequence
  ENSG00000256751_40 (sequence is synthesized)
accacaggtatcagatctgaatttctcaacaaagttgatagttttactttcctggcatatgtaatatggcattgcttaatattactatgaaataatgatgcatttaaatataaattttga

SEQ ID NO: 918842 - DNA, 120 bp, Artificial Sequence
  ENSG00000256750_0 (sequence is synthesized)
gtgtgatgtcatcagaggagggtggagctttgtggctagggcagtcctccacttccggagatccaggctccagaaacagaggaatttcaggcttcaggatttcagaggccaaattccatc

SEQ ID NO: 918843 - DNA, 120 bp, Artificial Sequence
  ENSG00000256750_1 (sequence is synthesized)
tggcctagtctgcctggctcacgataagaaaaccgaagttcaccaaagtaaagtgacttgtccaagacctcacagctatcaagtagagaaactgggatttggatgcaggtctgtctgact

SEQ ID NO: 918844 - DNA, 120 bp, Artificial Sequence
  ENSG00000256750_2 (sequence is synthesized)
ccagacaccgcgatcttaaccatcgaggcagagtttctaccttttaggaatttccaaatagaggagacaacctcaggacttgaacaatgcagaaacacagtcaaaaatacaaagagctag

SEQ ID NO: 918845 - DNA, 120 bp, Artificial Sequence
  ENSG00000256750_3 (sequence is synthesized)
acacagtagtgatcgcaactggggagaagagcaaccaggaagaggatatatcataagcaaaagcactggtgtgggaaagaatagggatttggtgggaagtgtgaacgataccactggttg

SEQ ID NO: 918846 - DNA, 120 bp, Artificial Sequence
  ENSG00000256750_4 (sequence is synthesized)
gtgtgaaaatacaggcaaacccgaatagctcatgtcctctcaaatgtttgttcagaagccaccatctcagtgatgcctaagctgacaatcccatttacagatgcatcaaaatttgccctc

SEQ ID NO: 918847 - DNA, 120 bp, Artificial Sequence
  ENSG00000256750_5 (sequence is synthesized)
cttgttcctcttttctgctctattttttctccaaagaacttttcacctctaatagacaatgtaccttccctgcccatcccctgccccccaattcttaaatatctccacccactagaacat

SEQ ID NO: 918848 - DNA, 120 bp, Artificial Sequence
  ENSG00000256750_6 (sequence is synthesized)
aagctttaagaaggcaggaatttttgtcagcttcactccttgaattgccagggtgtatcacaggaccttgagtgtgttgaggggtgataggtgctcaataaatatctatcaaaatttgaa

SEQ ID NO: 918849 - DNA, 120 bp, Artificial Sequence
  ENSG00000287408_0 (sequence is synthesized)
gggaagggaccgtgtgaggacacagaagacagccatctgcaagccaaggagagaggtctcaggagaaaccaaccctgttgacaccttgatctctgacttcctgcctccagaacggtcact

SEQ ID NO: 918850 - DNA, 120 bp, Artificial Sequence
  ENSG00000287408_1 (sequence is synthesized)
gatttgctgaagagtcacactgtgtggggagaagttgaggcagaagcaagctgcgagtcagaggtgccttctccacatcctttctcatcagttctcctgagatttggggctataaagctc

SEQ ID NO: 918851 - DNA, 120 bp, Artificial Sequence
  ENSG00000287408_2 (sequence is synthesized)
cccccgacccttccttcacctgccacatctcctgcacacctgcctgaaaagcttctcctctgaccccacctgccctgccactctgaaatgaggaaaagagaaggggtcacccctgctgct

SEQ ID NO: 918852 - DNA, 120 bp, Artificial Sequence
  ENSG00000287408_3 (sequence is synthesized)
cacacatggcccctagatgctgccattccaagctccaccatttggccattcaggaccaaaaccttcttcttttaggaaagtcttaaccctctaggactgttctagtcctctccttccctt

SEQ ID NO: 918853 - DNA, 120 bp, Artificial Sequence
  ENSG00000287408_4 (sequence is synthesized)
tagttcaaatatcactgcatttgacagccactcttcatagctagtgatttttgactatggctctttcctggtttcagtaatttaaattctattttactcttatttgcttgggttgatttt

SEQ ID NO: 918854 - DNA, 120 bp, Artificial Sequence
  ENSG00000287408_5 (sequence is synthesized)
aaggaactggatgtcgggggaagacagggatcttcctttttacttcagaagcccaagataattagtttagaacagttactcttaagctattagttctattaatttgctattagctaatag

SEQ ID NO: 918855 - DNA, 120 bp, Artificial Sequence
  ENSG00000287408_6 (sequence is synthesized)
caaattaagttctactaatttgctatggtctgtgaggctactctggatttgtgataatcttatcaaaccacaaatgcttaggaggatatgttttccccaatttcttagagctgaggtgag

SEQ ID NO: 918856 - DNA, 120 bp, Artificial Sequence
  ENSG00000287408_7 (sequence is synthesized)
tgcatatatattaataaagttggttttgattcaaaccatgtttgaaggagaatctacctgagtacagccctgttttacttagtttgaaatattatattgtcatttgaggactctttccta

SEQ ID NO: 918857 - DNA, 120 bp, Artificial Sequence
  ENSG00000287408_8 (sequence is synthesized)
ctaattctaattctcacagtagctttaaacaaagggtgtgggggcctcagccaccaggagtctatattgaaaaaaggtagccaagccattactgtttcctgtgcactactgaaagctgaa

SEQ ID NO: 918858 - DNA, 120 bp, Artificial Sequence
  ENSG00000287408_9 (sequence is synthesized)
aatagcccaacaaaacatgtgaaagtcttatcaagttcttgaacgatttctccaggatgtgatcaaaagtgtaaaagtagttactggtgcagaagccatatctgaagactatttcttcct

SEQ ID NO: 918859 - DNA, 120 bp, Artificial Sequence
  ENSG00000287408_10 (sequence is synthesized)
atggtcaaatattgaactgaaaaacacaaacctgcagaaggaaaatagccttaaactatgttagcatctccagaattataatggctcagtagttttgagggcatacaaacgcttatgtct

SEQ ID NO: 918860 - DNA, 120 bp, Artificial Sequence
  ENSG00000287408_11 (sequence is synthesized)
agcgttatattaggaaaaagacagttgctttctacataacctaaaagttccagtttgcagtttggtggtgagcagggaggagttaacaacattctagtctgtcactgccaccagagctgg

SEQ ID NO: 918861 - DNA, 120 bp, Artificial Sequence
  ENSG00000287408_12 (sequence is synthesized)
aaaaacaggttctccccaaacttgctccatatcctgtcattcaactgtgttagattttgcttgcctatgagtttgaccaagaatgttctatcagcattcttacaattttgcttaaataaa

SEQ ID NO: 918862 - DNA, 120 bp, Artificial Sequence
  ENSG00000287408_13 (sequence is synthesized)
agcacagatgcactccgacttttggttctttggagatgaatgtcctagaatacacagagtttaaagactgtcccactgcaagcaggcagtcagaatggagtgcaagagaaggatttatgc

SEQ ID NO: 918863 - DNA, 120 bp, Artificial Sequence
  ENSG00000287408_14 (sequence is synthesized)
aaatgtcaaagcacagaggaagcaaaccaggcgagatggaacactgggcagtcaggggccattcattcctgcacagactgggaataaagtggccacaggcttcacctcagctatgttttt

SEQ ID NO: 918864 - DNA, 120 bp, Artificial Sequence
  ENSG00000287408_15 (sequence is synthesized)
ccctaaggctggagaggaggtgagcctgaaagtttggaaatgacgaagttaaattgctagactccatgtcccacatcatacaatatggaagcccagaatacatcataaacactagatcag

SEQ ID NO: 918865 - DNA, 120 bp, Artificial Sequence
  ENSG00000287408_16 (sequence is synthesized)
atgacttttgttcagaatgtcacccagctgtgctccaggagggagatattaatccatgggaaatcacaaccaggtaggtccgtgggcctggaaggaggccaccatgagacacttacagct

SEQ ID NO: 918866 - DNA, 120 bp, Artificial Sequence
  ENSG00000287408_17 (sequence is synthesized)
gaatgataagcgagaatgggcctgccggttttaccttgtctggaaagcagcccgccttgccccagcatactggccaagcctctcagaaggcaacatcttcctgatggcaataaactatgg

SEQ ID NO: 918867 - DNA, 120 bp, Artificial Sequence
  ENSG00000287408_18 (sequence is synthesized)
gactattgctggagggttgcccttaagagaaaaaccaagtctttaacatgtcttagtgggaggaagattctggtaaaataatagcttgaatgtgccccaattgccctctactcccacttt

SEQ ID NO: 918868 - DNA, 120 bp, Artificial Sequence
  ENSG00000287408_19 (sequence is synthesized)
taactcatccacctcaccaggctgaagagtttcgcattggccagatggcctgtgtgagcgaggcatcaccacatctgagagttttgaagcagctgtacaggattgtctcccttggagcct

SEQ ID NO: 918869 - DNA, 120 bp, Artificial Sequence
  ENSG00000287408_20 (sequence is synthesized)
gatgggcaatcctgtctgctgctctcaattaatacagttattaattctatccattgatgatggcggtatctacctgctctatcattccctccattggttcctttaacatcagtatgtaat

SEQ ID NO: 918870 - DNA, 120 bp, Artificial Sequence
  ENSG00000287408_21 (sequence is synthesized)
cttcctgttcagtacgatagtttgccttgaattctattttgtcagatgctacggctattgcctcacttttcatttggttatttccctggaaagtctttttcatccttttctttcttattt

SEQ ID NO: 918871 - DNA, 87 bp, Artificial Sequence
  ENSG00000287408_22 (sequence is synthesized)
tttccctggaaagtctttttcatccttttctttcttatttatgtatttatttatttttgagacaaggtcttgctttcttacacagca

SEQ ID NO: 918872 - DNA, 120 bp, Artificial Sequence
  ENSG00000287408_23 (sequence is synthesized)
ttccacagtgtataagagttcccttttctctgcatcctcaccagtatttgttattttttgtctttttcaaaatagccatcctaactggggtgagatgataccttgttgtggttttgattt

SEQ ID NO: 918873 - DNA, 120 bp, Artificial Sequence
  ENSG00000287408_24 (sequence is synthesized)
ttctctgataattagtgatgttgagcatattttcatatattttgtcggccatttatatgtcttcttttgagaaatattcattcagattgtttgtccattgtttaattggatttatttttt

SEQ ID NO: 918874 - DNA, 120 bp, Artificial Sequence
  ENSG00000287408_25 (sequence is synthesized)
ttttatctttgatatgtttgagttccttgtacagtctggatattaatcctttatctgatgaatacttcgaaaatattttctcctgttcttcagattgtctcttcactctgtgtcttttgc

SEQ ID NO: 918875 - DNA, 120 bp, Artificial Sequence
  ENSG00000248927_0 (sequence is synthesized)
attcatggctgaagcgtctgaaacaagactaacaagactaacgagattaacaagagaaaaacatacaaatttttaaaatataagttgtatgtgacatagaagcatttataaagaaaagaa

SEQ ID NO: 918876 - DNA, 120 bp, Artificial Sequence
  ENSG00000248927_1 (sequence is synthesized)
gaccagaagaaacgggtagacctgggtatttttatgctacttttgatgaaaatgggaatgcttttggagacgcatgagtgaataaaaaaatatgatctaatggtaataaactagaggaaa

SEQ ID NO: 918877 - DNA, 120 bp, Artificial Sequence
  ENSG00000248927_2 (sequence is synthesized)
cagagcaaagtctgttcagattcttctctgtgatgctttgtcttcagagctccttcaggttggaaggaatacctttacttgggggcatgtcaattcgtttttctcacttgattcatcttt

SEQ ID NO: 918878 - DNA, 120 bp, Artificial Sequence
  ENSG00000248927_3 (sequence is synthesized)
atgacttcctgaggacagatctaattctaaagtaaccagaagcctggccatctcagagcagcaaatccctcaaccttggagcacaaatgatcgctgatagagtctgcataaaatcatctt

SEQ ID NO: 918879 - DNA, 120 bp, Artificial Sequence
  ENSG00000248927_4 (sequence is synthesized)
gtaaaaaaagccacagccttaaatctcttcactcagaaattaccatgaagataaaataaataaatggaaaggactatcaagaagccaacaaaacataaacaccaaaccaactcatcttgt

SEQ ID NO: 918880 - DNA, 120 bp, Artificial Sequence
  ENSG00000248927_5 (sequence is synthesized)
ttcactttggaaataaactgttcccagatgtgagaccaacaaaattaatattaagcaattaaaccagtaaattataaactgatttatcatttgggaagtttaaagtacagagagatgagg

SEQ ID NO: 918881 - DNA, 120 bp, Artificial Sequence
  ENSG00000248927_6 (sequence is synthesized)
tacctgtagccagaattacacatcatttcaaaatatgtagacaaaaagaaaactgaatgaacagagaaacattgcagcaatgcacagtcttaggacgaatgttgctgtttgcagacagag

SEQ ID NO: 918882 - DNA, 120 bp, Artificial Sequence
  ENSG00000248927_7 (sequence is synthesized)
aatgtttgccatcttgtgtatagcctcaaagccatactgagataatagcattgttgtcaattgcttgaaaaattttcacattcaatccttcatgctatattggttggaagaggagggaag

SEQ ID NO: 918883 - DNA, 120 bp, Artificial Sequence
  ENSG00000248927_8 (sequence is synthesized)
tcagttcttactgattacttctcagtgaacttctaatatttgcactgtcacttccattcagggtaatgatgtgtgctgttatttgcacagatggtcccatgagttttgagaccacagcaa

SEQ ID NO: 918884 - DNA, 120 bp, Artificial Sequence
  ENSG00000248925_0 (sequence is synthesized)
gcggggagggcggggtctgggcgcctggaggaagccagagctttggcgcaggccgcctgcgcgctgtgccaggaaagcgcttggagaaaatgtccggccccgcgacctgggacaggaagt

SEQ ID NO: 918885 - DNA, 120 bp, Artificial Sequence
  ENSG00000248925_1 (sequence is synthesized)
gatggagcacggacttagtttgcctttcagttcttgtataaatagttttgagggttgtctctgaattttcactcagttgtctaccaagatgttgaatggacccagagccaaggacgtggt

SEQ ID NO: 918886 - DNA, 120 bp, Artificial Sequence
  ENSG00000248925_2 (sequence is synthesized)
aatccattattcagcactctgggcacagctacagatctgatcagctatccattctccaaactatctcatcctctgtcccatttttctgtctctcttgtccacaaggcatatacctgagag

SEQ ID NO: 918887 - DNA, 120 bp, Artificial Sequence
  ENSG00000248925_3 (sequence is synthesized)
ttttcaaattcctcagagaaatttagatattctgtggctttggcattcacctaatgtgttaatctacaaaccttttttacagtgtggattttttttcatgatgtgaattcaagtggtttc

SEQ ID NO: 918888 - DNA, 83 bp, Artificial Sequence
  ENSG00000241860_0 (sequence is synthesized)
caccatgccctgctgttttgtatttttgagaaatggaatcatcgtatcgctgatctaacatgaacttatgaattcaacaggtg

SEQ ID NO: 918889 - DNA, 85 bp, Artificial Sequence
  ENSG00000241860_1 (sequence is synthesized)
ctgagtcaaggtgggagcagggtcggtagcttccgaggctctgcgggagaatccgtttcctggccgtagaggtggcctgcactcc

SEQ ID NO: 918890 - DNA, 83 bp, Artificial Sequence
  ENSG00000241860_2 (sequence is synthesized)
aatatggtatgtctaaactggaaaagtcttgtaatcttaggttcatgggcgtttacacatcccagggctgccggcgagtcatg

SEQ ID NO: 918891 - DNA, 63 bp, Artificial Sequence
  ENSG00000241860_3 (sequence is synthesized)
ctgttcatcatgggggtaccgtggacaatcccagggctgccggcgagtcatgccatccttaca

SEQ ID NO: 918892 - DNA, 60 bp, Artificial Sequence
  ENSG00000241860_4 (sequence is synthesized)
cctgggcttccaaagttggagagagctgccaggctcaggtctgaaggccagaattctaca

SEQ ID NO: 918893 - DNA, 120 bp, Artificial Sequence
  ENSG00000277332_0 (sequence is synthesized)
cgcttcacaggaagcgtcccccggtggccatgaccccagtggccatgtggctgaggccctgggcagtggcttcgtgaccgaaaggccctgaacccaccccgaggccccacagctttttct

SEQ ID NO: 918894 - DNA, 120 bp, Artificial Sequence
  ENSG00000277332_1 (sequence is synthesized)
ccagctcagacactttctggggctcagtcttgctgcggcccttgtggcatttggcaggcagtgggtggaccatgagtgagttaggaggccgaactgcccacctctacaatgggttcccag

SEQ ID NO: 918895 - DNA, 120 bp, Artificial Sequence
  ENSG00000277332_2 (sequence is synthesized)
ctccaggcctcagccccactctggaatgagttcaacagcaaggtacggtgagagctggcggcttcatttttggaaccagggagagagagagagagagaggtttatgagagacctcatgag

SEQ ID NO: 918896 - DNA, 120 bp, Artificial Sequence
  ENSG00000277332_3 (sequence is synthesized)
acagctcatgatggaagtgagactgagttgcagtgaaccctgtcactgaagagacagccttcacactgtgtcttgcaggggaaaatacaactctttattaaaatttattgccctgaaaaa

SEQ ID NO: 918897 - DNA, 120 bp, Artificial Sequence
  ENSG00000274976_0 (sequence is synthesized)
gcagtatggagttggaaaggccatctgtgcttttgtgtcccagaaattcaactacaaaataaagagctgatcctctttccagatgcacttactttatagcagcaaagtcaaaataattaa

SEQ ID NO: 918898 - DNA, 120 bp, Artificial Sequence
  ENSG00000274976_1 (sequence is synthesized)
agtatttaatgatttaaactaagcttgtattctttgccttggtcatgaaacgattagaataaactccccccaaatagctcattgtctgtctagtctccaattatctctgtagagaaaagt

SEQ ID NO: 918899 - DNA, 120 bp, Artificial Sequence
  ENSG00000274976_2 (sequence is synthesized)
actattgtaagtagcaaaaaatatttatgttttacttgagaaaccatatttattctttaatatgtgtgtttacacagaagcttgttctctgaataaaattgtgaaatgctaaaaccaata

SEQ ID NO: 918900 - DNA, 120 bp, Artificial Sequence
  ENSG00000274979_0 (sequence is synthesized)
ttggtgcccactcaaagttaccaagttctgggggaagttgggtcaagctgagttttcatcatgggaccacagttattagcacagcagaaacattatatgaaagtattaaaacagttactt

SEQ ID NO: 918901 - DNA, 120 bp, Artificial Sequence
  ENSG00000274979_1 (sequence is synthesized)
aaggctagcggagcctcagtttcacaggctcaattaagggacctaatcatccatgctagacaaactgttgcaatgcaaactcttgtgatcccaagcccgtggttcccggaagaaggaacg

SEQ ID NO: 918902 - DNA, 120 bp, Artificial Sequence
  ENSG00000274979_2 (sequence is synthesized)
ctagacgtagaactctgggaacaaatggggagaaatcttaacatgtgcaaaggcaacaggtcccagtaacagctttaacgttataggctttaattagagcagccttagctctgttacacg

SEQ ID NO: 918903 - DNA, 120 bp, Artificial Sequence
  ENSG00000274979_3 (sequence is synthesized)
cagaagagcctaaaaagagcaaggaggagaaaatgtcacctgccttatcacctcctcttccctccaccctaatatcaccgggccgaaataacagaggaaacgggggtttatacctgagcc

SEQ ID NO: 918904 - DNA, 120 bp, Artificial Sequence
  ENSG00000274979_4 (sequence is synthesized)
tcctcctccaatagataggaaaaaagacctaggatatgctacagctatcagtccctgtcttaagcgggcagcattagaagcagagctcttactctgcccagtaatgcagaatcggcaagg

SEQ ID NO: 918905 - DNA, 120 bp, Artificial Sequence
  ENSG00000274979_5 (sequence is synthesized)
caatcaggtgtatgtttataaaaagataagaaaaaaggcattaggagccgaaagccgtgcagccgagcaagcagtaaataaaaagaaaggctcggcagcccggaagttcacagaaacaga

SEQ ID NO: 918906 - DNA, 120 bp, Artificial Sequence
  ENSG00000274979_6 (sequence is synthesized)
gccagcacaggcaaaaggcagcgcttttacaagagtaaaacagctaccgcccagggacccgccggctcagctctctagctctgcaggtgacccaaggcaagtgctccttgtttacaagcg

SEQ ID NO: 918907 - DNA, 120 bp, Artificial Sequence
  ENSG00000274979_7 (sequence is synthesized)
acatcccagattataattctctgctaaaatttaagtaaaatgtaagaatttgaaaaacctcttttctgataatggccactgttgctctctctctcctacccctgacgtagctctccaaat

SEQ ID NO: 918908 - DNA, 120 bp, Artificial Sequence
  ENSG00000274979_8 (sequence is synthesized)
ccaatttaggtaaaacagtaacctctgaagggagagagattacagaaggccgatgaattagttaaagagtagttaaaagctaggcatgtaaaaccacacattaccctttaaaggagaact

SEQ ID NO: 918909 - DNA, 120 bp, Artificial Sequence
  ENSG00000274979_9 (sequence is synthesized)
ttaaacctaactaaatcatatttgttaaattagaagaaaagttgtatgtaagtgtagtgaaagcatatgcatgaatgactgtcgtaacccactgattagatagtcttttgatttctactt

SEQ ID NO: 918910 - DNA, 120 bp, Artificial Sequence
  ENSG00000274979_10 (sequence is synthesized)
gctaaaagagtcctgaattcagtttcccaactactgggtcactgttttcaagactgttggccagattaaagtccataaacttgatcagcttgaaaactcaattgcaagatttaagctgtt

SEQ ID NO: 918911 - DNA, 120 bp, Artificial Sequence
  ENSG00000274979_11 (sequence is synthesized)
ctgcctgtggctttaagcacatggttaaagtatattatttaagtttctgcttctagagatgctttcagattttctttttaaatttcatgttacttatttcaacttgccatcttaatgatt

SEQ ID NO: 918912 - DNA, 120 bp, Artificial Sequence
  ENSG00000274979_12 (sequence is synthesized)
aatgcagtcaattgctaagttataaccctgatatcatcaggattcctttaagtaaaaggtaattcgaagcggtattgcacttccccatacctaatgctttaacactgtttactgatgggt

SEQ ID NO: 918913 - DNA, 120 bp, Artificial Sequence
  ENSG00000274979_13 (sequence is synthesized)
ctggtaaacatggaaaagcggcagtctagtagagaccacacaattccatcactcagagtttactagcactcagagagctgaggttactctgtttatttattaaagaacttttacagcatg

SEQ ID NO: 918914 - DNA, 120 bp, Artificial Sequence
  ENSG00000274979_14 (sequence is synthesized)
aagttagctctggagaccactctgtgtgctctttttctccgacttcagcaattgctacaccaacgtacacatcctgtttttattacacacattcgagcccacagctctctgcctggccca

SEQ ID NO: 918915 - DNA, 120 bp, Artificial Sequence
  ENSG00000274979_15 (sequence is synthesized)
ttggcttatggcaatgatcaagcagctcttcaggttgtaacatcactgctagaccaagccacccaattgcatcaatttttctactaaaattagagaaactcatcttaaacaacttcaact

SEQ ID NO: 918916 - DNA, 120 bp, Artificial Sequence
  ENSG00000274979_16 (sequence is synthesized)
tatacagagattggctaaacaaattatctgacggtgcccagattgccagctcacaggcacagcccctctttcaacaggtgttaaccctagaggattggaacctaatcagttgtggcaaac

SEQ ID NO: 918917 - DNA, 120 bp, Artificial Sequence
  ENSG00000274979_17 (sequence is synthesized)
agatgttacatccctaaatttgggaaactaagatatatacatgtatccgttaataccaacactcacctaattagtgcacattaaaaagagaaataaagggaaagaatgagtaagaaagag

SEQ ID NO: 918918 - DNA, 120 bp, Artificial Sequence
  ENSG00000274979_18 (sequence is synthesized)
actagaaaagacagatcagagacagacacaaaaagactaaggagagaaagtaggaagaaaggaaagaaatattaaagttacagatataagaatgcacctttagtaaggaaggttataaaa

SEQ ID NO: 918919 - DNA, 120 bp, Artificial Sequence
  ENSG00000274979_19 (sequence is synthesized)
catagtcagaaagttaagccatgttaaagattgtctgtgaaagttgtgaagaatgttatgaaaaggaatttatgcaggaaatatataatttttgttttgaaggtctaaacaagttttaaa

SEQ ID NO: 918920 - DNA, 120 bp, Artificial Sequence
  ENSG00000274979_20 (sequence is synthesized)
acgttaattgtaaaaaaaattctgtgtgtaaacatattggctaaaataaaaaaggtatcatccagtttttctgtaaactagacattaaagtacaacaagtttttcttaaaacactaacct

SEQ ID NO: 918921 - DNA, 120 bp, Artificial Sequence
  ENSG00000274979_21 (sequence is synthesized)
gctctttaaagactgtaaaaagtctctcagcacaggcaccacccctagaatttccagtacaccagcaccagcctggagactacattcttatcaaaggatggaaagaagaaaaaactcaag

SEQ ID NO: 918922 - DNA, 120 bp, Artificial Sequence
  ENSG00000274979_22 (sequence is synthesized)
cagcctcaacaatgtggcttccgaagacaacacaggtcccaggcattatgctaaagaaggaaaagtctaagccagataatttattcattttaaattctctcactttacctactacctata

SEQ ID NO: 918923 - DNA, 120 bp, Artificial Sequence
  ENSG00000274979_23 (sequence is synthesized)
cctgctacactctattaagctcatcccttaaatctgccttttttcagtcctatcatctaggcagacactccctttccagcttctaacaatatctacgtgtcaatgtatgttttattcttc

SEQ ID NO: 918924 - DNA, 120 bp, Artificial Sequence
  ENSG00000274979_24 (sequence is synthesized)
tgtcatttgggtcagggtctgagggcagacccctgcagctaatgccctcaagtgtgaggagcaatacctcagaaaactatcccaaaacctactttactccacctgttgctacttttctga

SEQ ID NO: 918925 - DNA, 120 bp, Artificial Sequence
  ENSG00000274979_25 (sequence is synthesized)
ggaaaaagtactgagtaattatgatgaactgtcacttaaaaagtcaagtttggttgaattatatacatctactttagcattatgcttatgaatattaacatctgaagcaaaatgcatata

SEQ ID NO: 918926 - DNA, 120 bp, Artificial Sequence
  ENSG00000274979_26 (sequence is synthesized)
tgttgttaattataattataaacataaagcattgtgatgtaaatctacacttacgggaaatgatcattacaaagcaaaaaggcaggaaccgaaaaccatgggactgatagcaaaacatcc

SEQ ID NO: 918927 - DNA, 120 bp, Artificial Sequence
  ENSG00000274979_27 (sequence is synthesized)
tttctgaaaattaggggaattctaactatttatgtacagttaacattgcacgcagccagacttctttgtaggatactaatttagagtaatcactaaaccctattaatgtgctaattttag

SEQ ID NO: 918928 - DNA, 120 bp, Artificial Sequence
  ENSG00000274979_28 (sequence is synthesized)
tttattaaaacaaattttcagtaatccttaataactcacagacaattaggtttgggagacaactagtttgggaggaggaagtcagagccaactaagaattcctgaaaaaataacaagagc

SEQ ID NO: 918929 - DNA, 120 bp, Artificial Sequence
  ENSG00000274979_29 (sequence is synthesized)
aactctgtatttataatttaaaattctttgtgaaatttccactgcctattttcttgaaattatgttttacatatccgtgtttctccttaccagtctctctcgttaaatcatggaatttga

SEQ ID NO: 918930 - DNA, 120 bp, Artificial Sequence
  ENSG00000274979_30 (sequence is synthesized)
gtgtctgttcatttatttattttttttacttttcattggtgtattatatttactaagttaacacattttaaatgtacagttgaaagaatttttacatactccccgtgtaactcctgtgtt

SEQ ID NO: 918931 - DNA, 120 bp, Artificial Sequence
  ENSG00000274979_31 (sequence is synthesized)
aaccatctataagagaaacacagatgtgtaaaacgtaatatcaacatacagaatatatccagtaacccaaagtctccctatgcctccttccaatcaacatttcttcaaaggtaggcagta

SEQ ID NO: 918932 - DNA, 120 bp, Artificial Sequence
  ENSG00000274979_32 (sequence is synthesized)
cccgagtagctgggactacaggcgcccagtagacagtatttttatctctgtcaccattagttttttcctgttctgggtgtcataataatggaatcagagagtatgttttcttcatgtcag

SEQ ID NO: 918933 - DNA, 120 bp, Artificial Sequence
  ENSG00000274979_33 (sequence is synthesized)
tcagcttgtctcactcaacattatgtctctgaaattcctccatgtgttgccactttgtagcagtggctcatttttttctgtgtagtattactttgtatgaatatgccagaatttatcaat

SEQ ID NO: 918934 - DNA, 120 bp, Artificial Sequence
  ENSG00000274979_34 (sequence is synthesized)
tcaactactgatgaatttttttcattcctttggtaaatatgaatagttactatggatattcttataggtgtttttggtagacatatgcactcatgtctcttgactatagtccaagcaatg

SEQ ID NO: 918935 - DNA, 120 bp, Artificial Sequence
  ENSG00000274979_35 (sequence is synthesized)
gaattgttgggtcataggataggtgtttgtttagctgcagtaaattctgctagttttccaaagtaattgggcgtatttagactcctaccagcaatgatgaaagttctgtttctccatacc

SEQ ID NO: 918936 - DNA, 120 bp, Artificial Sequence
  ENSG00000274979_36 (sequence is synthesized)
tttagtattgcccatacttttaattgtagtctatctggtgtgtaggaagtagtatgttattgttttttttaaactagctcattgagatataacatatatatataaaataaaccgcatata

SEQ ID NO: 918937 - DNA, 84 bp, Artificial Sequence
  ENSG00000274979_37 (sequence is synthesized)
attgagatataacatatatatataaaataaaccgcatatatttaaagtatacaaattgtagcccagcctggagtgcagtggcgc

SEQ ID NO: 918938 - DNA, 87 bp, Artificial Sequence
  ENSG00000274979_38 (sequence is synthesized)
caaattgatgttttaaaatatgtatacacacctgaaatgatcaccaccaaaacaatgaacatacccattatctccaaaagttttctg

SEQ ID NO: 918939 - DNA, 120 bp, Artificial Sequence
  ENSG00000274979_39 (sequence is synthesized)
caaaacaatgaacatacccattatctccaaaagttttctgtgcccctttgtaattcctccctttctttagcctcactcccccattcccaagcagccactgatatgctttccgtgatgata

SEQ ID NO: 918940 - DNA, 120 bp, Artificial Sequence
  ENSG00000274979_40 (sequence is synthesized)
gtttgcattttctagttttaaataaacagaatcacatagtatctactctttgttgtctagcttaactctgcataattattttaagattcacccatgtcattgcatgtatcaaaagtccat

SEQ ID NO: 918941 - DNA, 120 bp, Artificial Sequence
  ENSG00000274979_41 (sequence is synthesized)
ttttttgctgagtactattccattgtacagctgtactacaatttgttattccagtcatctgttgatggacatttggtttgtttccattttggggctattacaaataaagctgttacaaac

SEQ ID NO: 918942 - DNA, 120 bp, Artificial Sequence
  ENSG00000243593_0 (sequence is synthesized)
agaagaatgtagaactttcataacagaaagaaaagattttaggcatctattttaccatctcagaggaagatagctgcagttgtgtaaaacagatttatttattcaaaaatcaactattta

SEQ ID NO: 918943 - DNA, 120 bp, Artificial Sequence
  ENSG00000243593_1 (sequence is synthesized)
tggaatacctactttgtcttgagccctgatgtgagagctggagatcccaagatgaataagacaccgtcgctactctcaaggaactcacagcccagtgaaagacacagagaagaaactaga

SEQ ID NO: 918944 - DNA, 120 bp, Artificial Sequence
  ENSG00000243593_2 (sequence is synthesized)
cagttgtagttgtatcagacacctgtagttgccatctacctttccagaaattgtcctttcccacctacacagtcacaaaaggcaatatgattctaccctcactttcccaagatgattggt

SEQ ID NO: 918945 - DNA, 120 bp, Artificial Sequence
  ENSG00000243593_3 (sequence is synthesized)
attctacattgttattgaagtgatgattcttctgaccagtgaagcagggtcatatttcctgcatttagaattttatttggttcccagcaagacaatagcagttagagtgaataactcagt

SEQ ID NO: 918946 - DNA, 120 bp, Artificial Sequence
  ENSG00000243593_4 (sequence is synthesized)
aatgggagcactgattgaaaaagaaagatgagaagaacctctgggacttgaacaagatttaatctctattgttctcaaagaaaactggtctgcataaaagagctcaaactgaattgttct

SEQ ID NO: 918947 - DNA, 120 bp, Artificial Sequence
  ENSG00000243593_5 (sequence is synthesized)
aaactggaggggaaggggacttctaaacagcctattatttgagattatccagattatataacttaattccagatacttaggaatcattttattttcaataaattctatcttttcatcttc

SEQ ID NO: 918948 - DNA, 120 bp, Artificial Sequence
  ENSG00000231613_0 (sequence is synthesized)
gagtgcagaatgaagttttgccatgaacgtagatcctcccttacaaatccctccattttcaaacccgaggtcagagcttctctgggcagccagccccagccctcaggtgaactcagcaca

SEQ ID NO: 918949 - DNA, 120 bp, Artificial Sequence
  ENSG00000231613_1 (sequence is synthesized)
gcccttctgacttacccaggaagatgggaaaaggcgagagtgaagaagcaagagagaatgaaatgaagaagccaagtcttctccttcttcctttcccctccagaggaaaaccatctcaag

SEQ ID NO: 918950 - DNA, 120 bp, Artificial Sequence
  ENSG00000231613_2 (sequence is synthesized)
agctttttcaagctccacttctaatgctccatgccttaaaaagtatgacccaagactgtccctgaacatggctgatccacggtaacatccttcctcctgggatagtctcagaggtgcgtg

SEQ ID NO: 918951 - DNA, 120 bp, Artificial Sequence
  ENSG00000231613_3 (sequence is synthesized)
aggggagcaccatgaactttctcaacctacaggccaacatattttattttatattcttatgtcactatctcagaacttaatagccactgtatggcaaaataaataattgggtttttgtga

SEQ ID NO: 918952 - DNA, 120 bp, Artificial Sequence
  ENSG00000231612_0 (sequence is synthesized)
cagaaggtttcaagtcaaaatcctaaccaatctgctttgatctcattgaacaagactcgcttgcaatgaatgactgaagtggatataaaacatgagttcacttatatgtgtcccatgaaa

SEQ ID NO: 918953 - DNA, 120 bp, Artificial Sequence
  ENSG00000231612_1 (sequence is synthesized)
ccagatattctcattcttaagttctgctcaggaagtgtatattcatgccaaggccatggcactcagggacttttaaataattctcaggaagaaagaaactgcagagcccaagtggaattc

SEQ ID NO: 918954 - DNA, 120 bp, Artificial Sequence
  ENSG00000231612_2 (sequence is synthesized)
tggatataatgaaatcctgccccagcctggtggcttctctcagatctttcctcccggcttgccgcttcatcgtctctgaacctcctgtgtctccttcgtgataaacttgcatttttagaa

SEQ ID NO: 918955 - DNA, 120 bp, Artificial Sequence
  ENSG00000231616_0 (sequence is synthesized)
ttttctatgttctgtgatttcagacgagaaaccccagctgaggaggcaaatatactcaaggaaagtaatagtttccaaatgcctggcagtgccaggaaggggccatgtccatggaccact

SEQ ID NO: 918956 - DNA, 120 bp, Artificial Sequence
  ENSG00000231616_1 (sequence is synthesized)
atgtaaggatatctcagtctctagtccagcgtggtttatggtgccaaataagtgccaggtgaactcactacatctgacaaaatctcaaggaaccaagtttaccagataatatttatgatt

SEQ ID NO: 918957 - DNA, 120 bp, Artificial Sequence
  ENSG00000231616_2 (sequence is synthesized)
ccaaagaatactgacttacttcagctgtactggtctggagctgcacattcttttcagacaactcttgttccagctagagtgcaatggtgcaacctcagctcactgcaacctccgcttccc

SEQ ID NO: 918958 - DNA, 62 bp, Artificial Sequence
  ENSG00000231616_3 (sequence is synthesized)
tcaagcgattctcctgcttcagcctccctggttgctgggattacaggtgctcatcaccatgt

SEQ ID NO: 918959 - DNA, 83 bp, Artificial Sequence
  ENSG00000231616_4 (sequence is synthesized)
tctgagattacagacgtgagacactgcacccgaccggggtgttcattttctaaaatcttaagttgaatgccttttaaaaaaaa

SEQ ID NO: 918960 - DNA, 69 bp, Artificial Sequence
  ENSG00000231616_5 (sequence is synthesized)
caggctggagtgcagtggtgtgaccacagccactgcaggctcaacctctggggcttcttccagatccct

SEQ ID NO: 918961 - DNA, 120 bp, Artificial Sequence
  ENSG00000231616_6 (sequence is synthesized)
gtagctgggactacaggttgcttcttccagatcccttttgatctactttcagctatggattcatgagaatcaagactaagcagcctgaattgaaggagtaacagtatcacctaacaatga

SEQ ID NO: 918962 - DNA, 120 bp, Artificial Sequence
  ENSG00000231616_7 (sequence is synthesized)
ttttgctgccatagtagctgtttgtatactggccatatgcctaggtaaaatgaggccagatcactctcaagagttttctatcagagttggtggtgaactactgctcacggataatgacga

SEQ ID NO: 918963 - DNA, 120 bp, Artificial Sequence
  ENSG00000231616_8 (sequence is synthesized)
aactttctctacttcttcatctaaccatttcttttgctcatccaatttctacattaaaattaaaaaaaaagttacttgtttttccttctgccataaaaattatatggtaataatagaatt

SEQ ID NO: 918964 - DNA, 120 bp, Artificial Sequence
  ENSG00000231616_9 (sequence is synthesized)
tcagattggctgaaatctcttaaatgaacatttaaaaactatcactcagagtaactcaggtagccgtctgagatcctaaagacatcagtggttctagtcaagatgtagctatgttgtttt

SEQ ID NO: 918965 - DNA, 120 bp, Artificial Sequence
  ENSG00000231616_10 (sequence is synthesized)
ataaagaattaaaatttactccccagatatgttaaacagtctaggattttttagcctgacgaagaaagggctgataattttctatgcctatattaagaacatgctggaatcttttactct

SEQ ID NO: 918966 - DNA, 120 bp, Artificial Sequence
  ENSG00000231616_11 (sequence is synthesized)
gttgtagtggtgcacagttccatcacagcacttacactggtggctgccctacgtatctatctccccagcttgagctccttgattgattgcaggggctgtagtttttacccgtctatccac

SEQ ID NO: 918967 - DNA, 120 bp, Artificial Sequence
  ENSG00000231616_12 (sequence is synthesized)
atggctggtatattgcctgggccacagtaggcattcaataaaatgttaaatgaatgagtgaatgaatgcctgattcagtcagtcaatgaagtgaataaatgaatacacacagtggaagac

SEQ ID NO: 918968 - DNA, 120 bp, Artificial Sequence
  ENSG00000231616_13 (sequence is synthesized)
gaataaatgaatacacacagtggaagacacagatgatggaggatggaaggaaagccaatttgcattgtagcttgtcaacctcaaataattatttttaaaaaagaaaaaaaacaaaaataa

SEQ ID NO: 918969 - DNA, 120 bp, Artificial Sequence
  ENSG00000231616_14 (sequence is synthesized)
agtcagtgggctggggaaggcagatccaacctcaatctggtgcgccatctaataagctgccaatgaatataaagcaggcagaaaaacataagaaggtgagactggcctagcctcccagcc

SEQ ID NO: 918970 - DNA, 120 bp, Artificial Sequence
  ENSG00000231616_15 (sequence is synthesized)
tctttcttggcttacattctacattgtagaattatgttacaatttactaggggttgagatgtggtgtgtttaaacatatgattggttggcttaaacatataatttgtttttacttgtatt

SEQ ID NO: 918971 - DNA, 120 bp, Artificial Sequence
  ENSG00000231616_16 (sequence is synthesized)
catccacattgtgtctgcgtttctggagctgatccttttctttctggaggacttcaacttgttctgaaatctttgttttctcctcagctgtactggtctggagctgcacattcttttcag

SEQ ID NO: 918972 - DNA, 120 bp, Artificial Sequence
  ENSG00000231616_17 (sequence is synthesized)
acaactcttgttccagtaagttcaggtgactcttctcctgtaacagagcctccttcttagaaactatggcctcccgtttctttaagtctgcttccagctcctctaattcttggcgttggt

SEQ ID NO: 918973 - DNA, 120 bp, Artificial Sequence
  ENSG00000231616_18 (sequence is synthesized)
atcctggatcattgtgggaaatgaaaggaactggtttttagcaaggagaccaagaaactctactccctaggggctagcaatgagagaaaggaagccttaagtctttgagcacagggtgac

SEQ ID NO: 918974 - DNA, 120 bp, Artificial Sequence
  ENSG00000231616_19 (sequence is synthesized)
agtttgggtcctatgtgagatgatcaaatccacagcaacagaggaaaggacaaaaggaaaagatacttcgatggaatcagcagccattgatccaatgccaactccaagactggaacgtcg

SEQ ID NO: 918975 - DNA, 120 bp, Artificial Sequence
  ENSG00000231616_20 (sequence is synthesized)
caatgatagttccaaggcggaaatttgacgtaattcttttcgacacagttttacagctggaacaccgttgccactgaccatttagatgactgctgcagtccccactgctcactctggttc

SEQ ID NO: 918976 - DNA, 120 bp, Artificial Sequence
  ENSG00000231616_21 (sequence is synthesized)
agagtattaatttctcaagggaaacataatactttgggttttttttttttttttttgcttcttctatcttctatagagcttagtaatagtcaccggcaggcagaattccttaaatatttg

SEQ ID NO: 918977 - DNA, 120 bp, Artificial Sequence
  ENSG00000231616_22 (sequence is synthesized)
aattctgctgtatcttaggctctcatgtcttcaaatctataacccttaggctccaatttaataccttgggaggacagcctggctctctgttcctctgcacagctacccagcttaagttat

SEQ ID NO: 918978 - DNA, 120 bp, Artificial Sequence
  ENSG00000231616_23 (sequence is synthesized)
aaaacagggcaacagaggtctataatgttcctttcaactgccacttagcccccaatcaaggattgatttgtaagtcaatcctttcatcaattctcagtgagcaacaatctaatgttatcc

SEQ ID NO: 918979 - DNA, 120 bp, Artificial Sequence
  ENSG00000231616_24 (sequence is synthesized)
ttgctcctatttcttaactagcccctataacttcctgtcacttgctccaaactaaaacattacaagattcaccactgtgtgtgattctcagctattcaccttctcttagcaattttccct

SEQ ID NO: 918980 - DNA, 120 bp, Artificial Sequence
  ENSG00000231616_25 (sequence is synthesized)
tggtttggtaatgatgagacaccaacaataaatatttgcagaggaagttcagattcaaaaattcatctttctctgatgaagtaaggtaaaggtaccactgccaactgactgaaaattttg

SEQ ID NO: 918981 - DNA, 120 bp, Artificial Sequence
  ENSG00000231616_26 (sequence is synthesized)
aaaaaagacaaagtctggggcaatttgacagcccataaatgaatcatcttctacatagttttaaaaaactataactaaaactatagttttaaaaaaactgtataactaaaaggtctttta

SEQ ID NO: 918982 - DNA, 120 bp, Artificial Sequence
  ENSG00000231616_27 (sequence is synthesized)
tggaattttgtgcatctatttggctggacatagtatggacactgggccttctaaaccaaggtttcatggaaagaattaacccctaattccttaggcatctcttgtatgtaataaattacc

SEQ ID NO: 918983 - DNA, 120 bp, Artificial Sequence
  ENSG00000237612_0 (sequence is synthesized)
acagctgtgcccatccctgccccagtgaaagctatggatttaatccccaagcgtactcaatgaatcaaatgcaggtatggattgtggatcccagtaagcccgtccatgtactccagccgt

SEQ ID NO: 918984 - DNA, 120 bp, Artificial Sequence
  ENSG00000237612_1 (sequence is synthesized)
ccttgaaaatggatatttggggcatgaggagcagattgaggtgaagaaatgcagagctaggatggcggagggaagaagagggagactgagagcccaggggattcggaaatccggaggact

SEQ ID NO: 918985 - DNA, 120 bp, Artificial Sequence
  ENSG00000237612_2 (sequence is synthesized)
accctcaaggaaataattcacctccagtaacatcagagctgtcctttaggttctgaagttagcacaggcccttatgagtggaggggcagctgttcattatccttacctactccgcttcac

SEQ ID NO: 918986 - DNA, 120 bp, Artificial Sequence
  ENSG00000237612_3 (sequence is synthesized)
cccaaggtggtcccctgtctcactggtgtcaatcaacagcaaagatcctgtcctctaactacctgcaaaaacactacttaaggtgtcgccccctcttcatgggagtagacatattctcct

SEQ ID NO: 918987 - DNA, 120 bp, Artificial Sequence
  ENSG00000237614_0 (sequence is synthesized)
atgacaggtgtgagccaccgcacccggccacgtctgtgacttttctaaagctttaagatgatgtcacccataggcagaaaggcccactcatttcgtgcatctgcagtcactcttctgacg

SEQ ID NO: 918988 - DNA, 120 bp, Artificial Sequence
  ENSG00000237614_1 (sequence is synthesized)
actcttctgacgaggtgcggctctcttttgttctatcaaagagaaagccagtctaaattaatgggaaactagagaattaggtcatttttcaagatgaaattgctggtagcttaaggaatc

SEQ ID NO: 918989 - DNA, 120 bp, Artificial Sequence
  ENSG00000237614_2 (sequence is synthesized)
agctacttgaatcccatgctaaaaaagtgtaactcctgaggagtgagctcttctttcttccttccataatgtcaggcactaagggaggttcagaaacacagagcagcatctactcctttc

SEQ ID NO: 918990 - DNA, 120 bp, Artificial Sequence
  ENSG00000237614_3 (sequence is synthesized)
tcaacgagcgtggggtccagtgcagttggccctcatttaacaaataattacacccatgcgtgaaaggtccagtggggaaacagtgcggggagcctcaggcagagctgattcaggcctggg

SEQ ID NO: 918991 - DNA, 120 bp, Artificial Sequence
  ENSG00000237614_4 (sequence is synthesized)
gaggcacgggagccacatgttcagggtccacaggcccagcggagtgatacggaagtttccaagatggtaagcctctctcctggcccatgctcaccaacgggaccccattcctaaccaggc

SEQ ID NO: 918992 - DNA, 120 bp, Artificial Sequence
  ENSG00000237614_5 (sequence is synthesized)
tttccctctctctcttttaagtgttccaggaatgttcctacccctgcgtctttgctgaagcccctcttgcctgggatgccctctgtcctctctttctgcccacacacatcctgccagtcc

SEQ ID NO: 918993 - DNA, 120 bp, Artificial Sequence
  ENSG00000237614_6 (sequence is synthesized)
cctcacgggcataggacctgagcagtttcacagggccctatgcacagaaggatcccaagctcggttgattgctccgatcttgccatcttgaaactctttgataattttatcttttatctt

SEQ ID NO: 918994 - DNA, 120 bp, Artificial Sequence
  ENSG00000237614_7 (sequence is synthesized)
gtgttttgggagtgaaatccaatgggatattggggcctgcaaaggagaagaggagatccgcacaaacccgttcctggctgctgcattcacctccagcgtttgtgatgccccagagcacag

SEQ ID NO: 918995 - DNA, 120 bp, Artificial Sequence
  ENSG00000237614_8 (sequence is synthesized)
aactccagggagcccacgatgcaggagagttcagcgacattcactgagtacaagagaagactgttgggaggcaccaatggactttgcaactggagatctcccaactggaccatgtcactg

SEQ ID NO: 918996 - DNA, 120 bp, Artificial Sequence
  ENSG00000237614_9 (sequence is synthesized)
ttatgtttaatttgcactgtgcacagtaggtacccagtcaacgtttgtcgaattccatggactgggccttatacctccgaggatttttcacagcagtagcatgtgcacatgcacagaacg

SEQ ID NO: 918997 - DNA, 120 bp, Artificial Sequence
  ENSG00000237614_10 (sequence is synthesized)
agaacacaaccaatgcttgtttgctggtgaagacctggtctcagtattttgcccaggaaaccctttcttcatggacagcatgaggcaagctatggcccttgctgtggtctcagtggttca

SEQ ID NO: 918998 - DNA, 120 bp, Artificial Sequence
  ENSG00000237614_11 (sequence is synthesized)
gcacggaagatgaagatgacgggcagtctcagaatattagctttagaagggactttggatccttttgattttggtaggtgaaatactttttaaaaataaagaaaacggactttggacaaa

SEQ ID NO: 918999 - DNA, 120 bp, Artificial Sequence
  ENSG00000237614_12 (sequence is synthesized)
acgatgcaggagagttcagcgacattcactgagtacaagagaacgcagacagaaggccgtggcattctgagaaacacacatgatgaaggagccctgtcatatcctctcttccttgcatcg

SEQ ID NO: 919000 - DNA, 120 bp, Artificial Sequence
  ENSG00000237614_13 (sequence is synthesized)
cttccccgtgtgagcaaccacttgtgctggaaatgatgacaaggaaggaccgggaaagacagggccacccgcagttccttttccttgacgtctttccttcctcatcagcgagctgaggtg

SEQ ID NO: 919001 - DNA, 120 bp, Artificial Sequence
  ENSG00000237614_14 (sequence is synthesized)
gagagcgttggtagaatgtgtgcataataagaagtgaaataaaaacagtcgagttagtattctactgtttccactgttctggtgagaacaaaacacatatgctgtatatgctttgaaata

SEQ ID NO: 919002 - DNA, 120 bp, Artificial Sequence
  ENSG00000237614_15 (sequence is synthesized)
caaagtgtgtaattttagtgattctgcataggagttaaatgtttttatatttgcatttaaaactgccattgtatactataaagataaagagtaaaatgtattctaatagtttaactttac

SEQ ID NO: 919003 - DNA, 120 bp, Artificial Sequence
  ENSG00000259833_0 (sequence is synthesized)
ggtcagagtgctgcaatctgagaactcaacctggctttgaacacagaagaaggaaactttgaacaaagaagaaggaatccaggaatgtgagccgcctcagaaagccaaaaaagggcttgc

SEQ ID NO: 919004 - DNA, 120 bp, Artificial Sequence
  ENSG00000259833_1 (sequence is synthesized)
cccaagggagacctcagcttgtagatggagggaggtcttgctagcagttaccagaataagagaaactgccatggtaattaacaacctgctgctgtgggaatccaaatagagtcagagcaa

SEQ ID NO: 919005 - DNA, 120 bp, Artificial Sequence
  ENSG00000259833_2 (sequence is synthesized)
tggccagcgactctgaagccaaactgcctgggttcaaatctcagctttgccattgacttactagctctgtaaccttggacaatctacttagtttctctgtgctccagtttccccatgtgt

SEQ ID NO: 919006 - DNA, 120 bp, Artificial Sequence
  ENSG00000259833_3 (sequence is synthesized)
aaaatgtaagtactactaacttctcatattgctgtaaaattaaatttattaatttatgtaatttttagaatagtgcttggcaaatagtgcttaaaaatgacagagactgttatgttttcg

SEQ ID NO: 919007 - DNA, 120 bp, Artificial Sequence
  ENSG00000248210_0 (sequence is synthesized)
gaactttatccttttcagtatccttcttccaccaggaggaagaagaactgtgtctctgaagtttgggaagtatacgtagacatggagtctggccttgagctttctgtagtagaaaggccc

SEQ ID NO: 919008 - DNA, 120 bp, Artificial Sequence
  ENSG00000248210_1 (sequence is synthesized)
atgtcagcagcccttaaagggacagggtgaggtgtactcgggggaaagatggtagtaaccatactcctcccaattttccgtgatacaccacagtgtaaaagaggaccccagtggtttcca

SEQ ID NO: 919009 - DNA, 120 bp, Artificial Sequence
  ENSG00000248210_2 (sequence is synthesized)
cggctacacagaaaattcatggagggtagcagaagaagatgagccatggagctgccaggtggctgccagtccaatcttttaaggttcaatttagggaaaaggactttttctcagtaagcc

SEQ ID NO: 919010 - DNA, 120 bp, Artificial Sequence
  ENSG00000248210_3 (sequence is synthesized)
ctgataccttgatgtgagaaggccaagaagaagcctatagagatgcccacaagaggagactaaagctgagagaaactgaggcccctggccctagagctttcactgagctccagctgacaa

SEQ ID NO: 919011 - DNA, 120 bp, Artificial Sequence
  ENSG00000248210_4 (sequence is synthesized)
ccatcatcaaatcaccagccatgtgactgtgccatgatgggagggaatcacccagtgtccaaatgatctgatgccacatgtaaaagagaagagccttcccctttgagccctgcccagatt

SEQ ID NO: 919012 - DNA, 120 bp, Artificial Sequence
  ENSG00000248210_5 (sequence is synthesized)
tttctctgttacttgggccacttcttcctggcttgtcactgcttctgcttcttctcctttttcatttggcaggcccagcgtttgtattcaggctccttggctcagatttttttctgatat

SEQ ID NO: 919013 - DNA, 120 bp, Artificial Sequence
  ENSG00000248210_6 (sequence is synthesized)
ttttatcaactttctggaaaatgggaggggctctttattgtgtctcactcaagactgttttttgttttgttttgttttggagggaaaataattggcttcttatctccagaaaagaaacac

SEQ ID NO: 919014 - DNA, 120 bp, Artificial Sequence
  ENSG00000248210_7 (sequence is synthesized)
gcaagaaactaacaacccaaccacccttagctctgggacttcctactcccagcctttaagactcatctactgtgaagtgaaggtataaatggtgcttcagaacctcttgccctttaactt

SEQ ID NO: 919015 - DNA, 120 bp, Artificial Sequence
  ENSG00000248210_8 (sequence is synthesized)
tcaatgatcagaataggctctgaagtggaaataacagtgagattatgagttatcatctgggcccacaatagacttctaagaatgggataatttatcatttggggaaaaggtaaacttata

SEQ ID NO: 919016 - DNA, 120 bp, Artificial Sequence
  ENSG00000248210_9 (sequence is synthesized)
ataaaaaatgcctcatctcatgcagtactttccacgcagacataaatgtaatatttatgtctcagagaaatcagggccacaaaaataaagtgagtagagagtattgttgagactcaaaaa

SEQ ID NO: 919017 - DNA, 120 bp, Artificial Sequence
  ENSG00000248210_10 (sequence is synthesized)
tttgttctttactcccagcctaatggatgaaatgaaacttggtgagctcccagagttggacaaccttcagaatgctgagacatactaaatgaaggaagaaagtccttttgtgagttctcc

SEQ ID NO: 919018 - DNA, 120 bp, Artificial Sequence
  ENSG00000248210_11 (sequence is synthesized)
aaaactcagacctcccagtgactacagcaaggtcctgttgtttcagtgaaaagctgttcaacttggtgaaccagacagagaagagaccctgggccgtaagaggctttaaaaaatatttat

SEQ ID NO: 919019 - DNA, 120 bp, Artificial Sequence
  ENSG00000248210_12 (sequence is synthesized)
ccaatgaatgaggagtgatggaagtgaagaacactaaactcaatttagtggttaccactgcataaaggagagaaataaaactgcaagaggaacacgaggcaccacctgtatctgcaatat

SEQ ID NO: 919020 - DNA, 120 bp, Artificial Sequence
  ENSG00000248210_13 (sequence is synthesized)
tgtgtcaccataagaaaactctgatataaaacatgccaaaatactgagctctggcaaaaaacaaaaagcaaacaaattcagccacagctaaaggctctgcatgaattctgtggtctctat

SEQ ID NO: 919021 - DNA, 120 bp, Artificial Sequence
  ENSG00000248210_14 (sequence is synthesized)
aggaagtagtaaaatgatctatggtaccccaaaagcagtcttcaggggatttcacagagcaagtatcagaacatgttacaactcatttctaaggaagttcctctaaacttcctgtctgta

SEQ ID NO: 919022 - DNA, 120 bp, Artificial Sequence
  ENSG00000248210_15 (sequence is synthesized)
ccataaaccatggtctgctggtctcctcttcattcattcattcattcatccaagatactttctggatgtccctgtcttcaggaagaagggcttaatagtggaatgttatgtgggcattgc

SEQ ID NO: 919023 - DNA, 120 bp, Artificial Sequence
  ENSG00000248210_16 (sequence is synthesized)
cactggacagaaacattcttctctttgcataaagtcacatgagtctaagataataatctggccttgttcctctacagaatgacctcattgttggctcatgaaagaaatgaaataatacta

SEQ ID NO: 919024 - DNA, 120 bp, Artificial Sequence
  ENSG00000248210_17 (sequence is synthesized)
ataattcatgctcttttaatttcctaccacaaaataaaattacaaaagcaaaataaaatagaataaataaaaattttaaaagattacacacgagaagtacttcaaaatggattattaact

SEQ ID NO: 919025 - DNA, 120 bp, Artificial Sequence
  ENSG00000248210_18 (sequence is synthesized)
aactcagaacattccacaaactattatatacttctaaaataaaagcaaatttttaaaaagtctatatcacagtttaaaacatagagatctacttcttttatctaatcaaagaacttataa

SEQ ID NO: 919026 - DNA, 120 bp, Artificial Sequence
  ENSG00000248210_19 (sequence is synthesized)
tatcagaacagggtcttaagaaaatggcagcttttattctcgttcaatggaatacaggagccattctgtgaggaagcccaaactgggttgtggagaggtttatctggagaagaatcaaca

SEQ ID NO: 919027 - DNA, 120 bp, Artificial Sequence
  ENSG00000248210_20 (sequence is synthesized)
gacaacactaatttgccagccatttgaggagcagtattgaaagtggatcctccatctctaggtcttcagtttcagaggagctgtgactgaggaaccacatttgcacctggacctgagtac

SEQ ID NO: 919028 - DNA, 120 bp, Artificial Sequence
  ENSG00000248210_21 (sequence is synthesized)
tgtgtgtacatttactgagaagacagaggatttccaagcaatacaagaattctgtcacataaacgatctgatgggaaacatatcaaagttgctggattgctggttctgtatgcgtgctgg

SEQ ID NO: 919029 - DNA, 120 bp, Artificial Sequence
  ENSG00000248210_22 (sequence is synthesized)
gaaacaatcacactctaactgtagctgcctaggtcttctgatgccatgttacagatggcctgtgacctgggagcacccaaagcaacatgctgagactgaatacaactccctttacttcac

SEQ ID NO: 919030 - DNA, 120 bp, Artificial Sequence
  ENSG00000248210_23 (sequence is synthesized)
agttctcatttccagagatatttgcaaggaaaggggacatctgcaatgtttgacataacatcttgtcagccatgtggctgcttctgcatttctagaaaaagcaatatgaatggaggctgg

SEQ ID NO: 919031 - DNA, 120 bp, Artificial Sequence
  ENSG00000248210_24 (sequence is synthesized)
ccagaagtcaagggaagacaaaggatccagctggcttcagcagctcctgtaatgcagcacaagtcacagtgtggaaaatgcagagaaatggtaaattactgtagaaagacagactgccag

SEQ ID NO: 919032 - DNA, 120 bp, Artificial Sequence
  ENSG00000248210_25 (sequence is synthesized)
gctaccttgattgccactgcactgggattacatacaaactttattgcacaggtcatatcgataatttactaaattgaaatttgagcaacaaaagattaaaaaccacttaaaaaatagaaa

SEQ ID NO: 919033 - DNA, 120 bp, Artificial Sequence
  ENSG00000259831_0 (sequence is synthesized)
gagcgcgtcgtgtggagggcgtcgtgacggggacgtcgtgaggggcgcgctgtgaggcgagtctctgccccctccccctggagctcccgctcctcagctgccccccgccgtcaggggctc

SEQ ID NO: 919034 - DNA, 120 bp, Artificial Sequence
  ENSG00000259831_1 (sequence is synthesized)
ttcctgtcagtgcctcatgggccctgcattcgcctcccccaggcagcgcggtcctcctgggggagtcagcctgtctcgcctgagcccgaaggccgcctccccttctgccacagccccctt

SEQ ID NO: 919035 - DNA, 120 bp, Artificial Sequence
  ENSG00000259831_2 (sequence is synthesized)
tggctcccggctctggagatctgccctccagtggatctgtctgaaaccgccctcccttagccgggcgggaggcagcaagcgcgcgcgctgcgggcaggagcggtttctgcaggagggacc

SEQ ID NO: 919036 - DNA, 120 bp, Artificial Sequence
  ENSG00000259831_3 (sequence is synthesized)
ctgcccgagctaaacaccgagaagacggcaggaggcagaaggcgagatgggggaaaggaagataatctggaaagttccactgcaggaaagacagtcccggtggccagctggcctctcaga

SEQ ID NO: 919037 - DNA, 120 bp, Artificial Sequence
  ENSG00000259831_4 (sequence is synthesized)
ggccccttagtaagccgaggacccgaacccttacggaaatgtaattgagacaagcccgaagcagagcggaacgaaacagaacagaggagacgcgggcacaggagagcgcagagggagctc

SEQ ID NO: 919038 - DNA, 120 bp, Artificial Sequence
  ENSG00000259831_5 (sequence is synthesized)
tgggcgcttaaggaatggagactgcagcgggccagcgggggctaagtcccggggtcgcagatgcctgtgtgcgggggcaggtgcttgcgtgcggggcctgccccagcccctgcctggcag

SEQ ID NO: 919039 - DNA, 120 bp, Artificial Sequence
  ENSG00000259831_6 (sequence is synthesized)
aaagccccagaatccaggggcctctgcccagaggaggtctcgtcatgtgtcaaaggaccagggcgagggcgctgggcttccctgggcttcgccgaaggccctggcactcacactgcgggc

SEQ ID NO: 919040 - DNA, 120 bp, Artificial Sequence
  ENSG00000259831_7 (sequence is synthesized)
ctggccgtggagggaagggctcggggagtaagtgcacgctcctggcactgtcatgcgtgcagtggccccggcacccgtgagtgtgtcggccaggcagtggggcggcagggagcacgtttg

SEQ ID NO: 919041 - DNA, 120 bp, Artificial Sequence
  ENSG00000259831_8 (sequence is synthesized)
cggccctggcttcaaccgacctgggcttcaattccgagttccaccgctttggagctctgtggccatggataatggctcaaccttcccgaatgattttttttttcatctgcaaccatggag

SEQ ID NO: 919042 - DNA, 120 bp, Artificial Sequence
  ENSG00000259831_9 (sequence is synthesized)
aaaattataacagccacatgaaaggattgttgaggggatgcagtgagttctttcaaagcactaagtaaacatcctacacagttctcaggccccggctaaatggggaaagccccttgagga

SEQ ID NO: 919043 - DNA, 120 bp, Artificial Sequence
  ENSG00000259831_10 (sequence is synthesized)
tggggccgtgttagcaggttactctcagtcctcagcacttccgcatccattatttctcttaatgaattaatatctgtgaggcgtgtgttataaataatattccctaactggatttaaaag

SEQ ID NO: 919044 - DNA, 120 bp, Artificial Sequence
  ENSG00000259831_11 (sequence is synthesized)
gggagcttcctgggaatttcaggctctttaaggagtgtggcccttgtcaccctggggaccagggccactgcggccagaggtgtcagccagggtgaggacctcttccttttctttgagagc

SEQ ID NO: 919045 - DNA, 120 bp, Artificial Sequence
  ENSG00000259831_12 (sequence is synthesized)
aggactaaattaacaagctgaagccagcttaccttggatgtggatcattctggcagtgttcaactttgagacaaggaagtgtgtgacattattgtcagcggagagaggccccaggcagaa

SEQ ID NO: 919046 - DNA, 120 bp, Artificial Sequence
  ENSG00000259831_13 (sequence is synthesized)
ggtcacttcctgaggtgtctggggagcactgcggcaagagacccccatttcccagcaaatgcttccttactcaatctttcggctacctggactttactaccacatctacagagccatcat

SEQ ID NO: 919047 - DNA, 120 bp, Artificial Sequence
  ENSG00000259831_14 (sequence is synthesized)
gagccagatgaaattgtgtgttattgagacgtgctgttcccatctttgcaaagaggccatggatgcatgcaatgaaagcttttgctgagccgaatacgctgttagcacgaccgtctcccc

SEQ ID NO: 919048 - DNA, 120 bp, Artificial Sequence
  ENSG00000259831_15 (sequence is synthesized)
actgacgtattgcaccagacaaacaccagacgtcaaggtcattgggaaagcaccaacatattcagccaggcagtgtggggatgcacccccagtcccgagatgaaaacctccagccagccc

SEQ ID NO: 919049 - DNA, 120 bp, Artificial Sequence
  ENSG00000259831_16 (sequence is synthesized)
agcgcttcccagcagggagcacagaacaccatgaagcctcaagatgttgctttcctaaaacagaccagcgtggttcatggatttggggctctaagtgccccccatttcccttctcctaga

SEQ ID NO: 919050 - DNA, 120 bp, Artificial Sequence
  ENSG00000259831_17 (sequence is synthesized)
cctcgtccccagcatcgcgacgctattggggctggagcacccagctgggaggttaaactttcctaacctgggctcaaccttggtttcgtctctcagtcttaattttgcttcagcctggtc

SEQ ID NO: 919051 - DNA, 120 bp, Artificial Sequence
  ENSG00000259831_18 (sequence is synthesized)
tgtcttgctggtttatgctgtcatctaacacagggccagcaatgaagatgcttagtaaaagctgttgaaaggataaatttaaaggttttaattgttttattttactattttatttatttt

SEQ ID NO: 919052 - DNA, 120 bp, Artificial Sequence
  ENSG00000259831_19 (sequence is synthesized)
tttcatttcttgaatatataacatgcactggcatgcccctctattcctccagcacttacttctaccattcagagatgagcacgcttaccagtttcttggcaatgcaagtattatataatg

SEQ ID NO: 919053 - DNA, 120 bp, Artificial Sequence
  ENSG00000259831_20 (sequence is synthesized)
cattatctgcataaatatatgtcatatatacacatacatacgtgtatacacatatacaatatattatatgagtgacagtatcctaaacatacctcacattgtttttgtttgttgttcttt

SEQ ID NO: 919054 - DNA, 120 bp, Artificial Sequence
  ENSG00000259831_21 (sequence is synthesized)
tttttttctttttacttcttcacattagtttttttaactttctatattggaaattgtttcatttcagcacatatagcgcatcctcactctttgaaatggcttcatagcattttattgtat

SEQ ID NO: 919055 - DNA, 120 bp, Artificial Sequence
  ENSG00000259831_22 (sequence is synthesized)
ggcagtacaaatatttgttgaaccatccccactaacagacattaaattatttccgttatcttgctttgacaaataccaccgtgctcagtgcacttgtgcaggagtcgttctgcacccttg

SEQ ID NO: 919056 - DNA, 120 bp, Artificial Sequence
  ENSG00000259831_23 (sequence is synthesized)
gggtagatccataggctaaacacctagagttgctgggttgaagacgtcatgcgtattaaattttgttagctgtcgtcaaagaaccttccatggaaattttacctgtttacagttccagca

SEQ ID NO: 919057 - DNA, 120 bp, Artificial Sequence
  ENSG00000259831_24 (sequence is synthesized)
gcaaagataaactgcgcatttccccccacccccccgccccaaccatctttacaaatacagtgtgggaacaaactttatttgtactattccttgccaatctgataagcaaacaaaattgta

SEQ ID NO: 919058 - DNA, 120 bp, Artificial Sequence
  ENSG00000259831_25 (sequence is synthesized)
tttcagtgttgttttagtttgcgttcttattgtaaggagtttgagcaccaaggaactggttatgtatgtgtgtacagttttcaggtactttttaaattaagttactgtcctttttaaata

SEQ ID NO: 919059 - DNA, 120 bp, Artificial Sequence
  ENSG00000259831_26 (sequence is synthesized)
ttgatttttaggaatcaatatttaaaacacacaacacaattaactgttttggccgttttcctttgatgtgaagtacatgaatttttcctaatttattatcatttaattttgtttctggtg

SEQ ID NO: 919060 - DNA, 120 bp, Artificial Sequence
  ENSG00000259831_27 (sequence is synthesized)
atgtttgccattcaggaatatcttagtttgaggggtggggagttgatcaaatttctcaatcttttcttttctggcttaaagattttgtgtcagaattaaaaaggtcctttctgaatcaga

SEQ ID NO: 919061 - DNA, 72 bp, Artificial Sequence
  ENSG00000248215_0 (sequence is synthesized)
aggttctccttctctcctctatcctgccactttgtgaagaaggtgcttgcttctccttcaccttccaccatg

SEQ ID NO: 919062 - DNA, 80 bp, Artificial Sequence
  ENSG00000248215_1 (sequence is synthesized)
aaaatagaatataaaaacttctctactcctgactcaccaacgcaccagaacaacttttagtcctgcaatcatgaccatcc

SEQ ID NO: 919063 - DNA, 120 bp, Artificial Sequence
  ENSG00000248215_2 (sequence is synthesized)
cgcaccagaacaacttttagtcctgcaatcatgaccatccttccttctctaatattctgaccacatgtatcagtattcagaaaaaagcaagagcttcttctcgcaggcgggattgccatt

SEQ ID NO: 919064 - DNA, 120 bp, Artificial Sequence
  ENSG00000248215_3 (sequence is synthesized)
gaagaggatgtcaagaaagatgagtcactgttaggattgattcatgatactttattgccaagctgcatttgctgatagagtcatctatatcctggtatccatggaacacagtggaaggga

SEQ ID NO: 919065 - DNA, 120 bp, Artificial Sequence
  ENSG00000248215_4 (sequence is synthesized)
gctcagggctctgaaagaggataacttatttggattagaaaatttgtcatgttgagctcaagtagcattaatttgtttagaagagataatgatatttcattattattcccaaccctgaag

SEQ ID NO: 919066 - DNA, 120 bp, Artificial Sequence
  ENSG00000248215_5 (sequence is synthesized)
ttagtcaagaaataactaaaataaataccttgtaaatactgactacacataatacttatactctatagcaacatggccacactcagtaatcttgacaagtttaggaaagcatttaaataa

SEQ ID NO: 919067 - DNA, 120 bp, Artificial Sequence
  ENSG00000248215_6 (sequence is synthesized)
aataaaacttgagccagataaactctggaagatctttaaaattaaatataatagttactgggtaaagcgaatggaaaactagatcagaaatagaaattgtgccttactcttataatttca

SEQ ID NO: 919068 - DNA, 120 bp, Artificial Sequence
  ENSG00000248215_7 (sequence is synthesized)
accatgacaatataaataaatagtatgctgttaaaaaataatttgaccattgggagcatttaagatttctacatgctttacctattttacagagagaataaatttttaaagaaggcagaa

SEQ ID NO: 919069 - DNA, 120 bp, Artificial Sequence
  ENSG00000248215_8 (sequence is synthesized)
caccaccctagacactacaacaacaaagaagtcaatactagtttcaatttgtggaaagctggaaatgcgatgattcccatgccctgagtttctgctccagacaccaggtgggggcatggc

SEQ ID NO: 919070 - DNA, 120 bp, Artificial Sequence
  ENSG00000248215_9 (sequence is synthesized)
aattgtgactggagagagtggaggggtcatcttatccaccacatcagaagctgaggttaggatattgtggcaagagatgaaaagtgaagtgatgtgaggaaacttcatcctgaattcaac

SEQ ID NO: 919071 - DNA, 120 bp, Artificial Sequence
  ENSG00000248215_10 (sequence is synthesized)
tattttgtagtccctggataaagaggcctaaatggtatcctgtaaagttatgcagagtactatctgcatagatctagtcaatgaccttggctagtagcatcatttggtttccagctttat

SEQ ID NO: 919072 - DNA, 120 bp, Artificial Sequence
  ENSG00000248215_11 (sequence is synthesized)
gtgcatcaattcttctttatatgcagtagttaatttaatgcaccatatatcttatctctaactccttgggaaacatttgaatttagttattttccattctactattgagaatctgtcttc

SEQ ID NO: 919073 - DNA, 120 bp, Artificial Sequence
  ENSG00000248215_12 (sequence is synthesized)
acaagtcacatagcactgttacaaacacaaatcacttggcgtacacaatccaaattaagtatacattttgcctgtgttgctatttcatggtaaattttattttccattttcttattttca

SEQ ID NO: 919074 - DNA, 120 bp, Artificial Sequence
  ENSG00000248215_13 (sequence is synthesized)
ttttctgtcttttattaccttctgatgacactgaaatgcctaaagaagtagataaatatcttgttctaactttgctgattaaaaagaaaacagttaagccttgtacatttcacagtaatg

SEQ ID NO: 919075 - DNA, 120 bp, Artificial Sequence
  ENSG00000248215_14 (sequence is synthesized)
aagaaagactcacaaacattttatcaggtctgaaaatttgtcaccagatgtatgtggaaactgtcttggtgaacctgccttcatgcaaatttgaaacatcttattaaacttaaaaataaa

SEQ ID NO: 919076 - DNA, 120 bp, Artificial Sequence
  ENSG00000248215_15 (sequence is synthesized)
agcaggaagaatacgttcaaacttctgtggcaaaggagataaggtcaaaatgaaaaatagaatataaaaacttctctactcctgactcaccaacgcaccagaacaacttttagtcctgca

SEQ ID NO: 919077 - DNA, 120 bp, Artificial Sequence
  ENSG00000259834_0 (sequence is synthesized)
cttaagtacccagattttcttatgcaggaaagaaacatgaagtaagatttaagccttgaaagtatcataaatatatcattcttcaaattgattgtgatgaaaggaaataggattctttct

SEQ ID NO: 919078 - DNA, 120 bp, Artificial Sequence
  ENSG00000259834_1 (sequence is synthesized)
ccttagaattttcactgatctataatgggatcaaaaaagtagaaaaatcagtctgcagaatgaaaacagattaatgaaatagctagaaaggaggggagagcatttgtttagttaaatgtt

SEQ ID NO: 919079 - DNA, 120 bp, Artificial Sequence
  ENSG00000259834_2 (sequence is synthesized)
aaggtaacttgaaaattgtctatgaaatgctaaaactgtaccagagccttattgcacactcaacattttaagcctgggagcaggggaaggtgggaaaaggttggagtgatagaagtgttt

SEQ ID NO: 919080 - DNA, 120 bp, Artificial Sequence
  ENSG00000259834_3 (sequence is synthesized)
gccttatgatctcttgactccttttacacaagaagcagattggtagagcttaagcaggtgtctgtgctgtggtgctggctctgccaaaaactctcatatgccctaggaaagttcctttaa

SEQ ID NO: 919081 - DNA, 120 bp, Artificial Sequence
  ENSG00000259834_4 (sequence is synthesized)
cttctctgagcccgagtttatctgtaaagtgaagactttttaaatttagtaatctgtatgtctcatctctgagaattctataatgttttcacattgttatatgtgtatatgtacatgttg

SEQ ID NO: 919082 - DNA, 120 bp, Artificial Sequence
  ENSG00000259834_5 (sequence is synthesized)
ctcccctctagtcactaagatgccacatatttctacttgagtgaacagattgcaagtccaaatgttcttgtttctaatactaataattgatctcagcaagacataaaaaagtaaaaaaaa

SEQ ID NO: 919083 - DNA, 120 bp, Artificial Sequence
  ENSG00000259834_6 (sequence is synthesized)
aagtaatcttaccttttattttgaccttggctttaaattattatgatttatcatttcatctttgaatgctgagtgaattacctaaacagaatgtctgttccagttaatcttctctttaaa

SEQ ID NO: 919084 - DNA, 120 bp, Artificial Sequence
  ENSG00000259834_7 (sequence is synthesized)
tttttgtagtttaataaacatgtaacaaatcagaagcaagtatatcatgcttatcgatgaactgtagcagattgtaatggtgcatttttgtcacattaaaaagttaatgtccttttggtc

SEQ ID NO: 919085 - DNA, 120 bp, Artificial Sequence
  ENSG00000259834_8 (sequence is synthesized)
ccagaagcaattactataatttaaaataatattcacaaaattttgtgaatgtttttgaatacaaaggaggcctaatacagccatattgtagttcattttgctcaggagtgagaaacaaaa

SEQ ID NO: 919086 - DNA, 120 bp, Artificial Sequence
  ENSG00000259834_9 (sequence is synthesized)
ttcagggataacccaaacatgtctgtttggcaatagtggatagttaggtaaagaagggttatagcttttgcacatcacagataagaggcgactatacctattgaaaaacagcagtatatt

SEQ ID NO: 919087 - DNA, 120 bp, Artificial Sequence
  ENSG00000259834_10 (sequence is synthesized)
ctggttcttggttttatgatggaaagatattagaatgatactaaaatttggatgcttgggaaattgaataatacagaaatattttgtcatactgagattatttgtccagaagtttagtct

SEQ ID NO: 919088 - DNA, 120 bp, Artificial Sequence
  ENSG00000259834_11 (sequence is synthesized)
tatatcccttccattcagaaaagggggcagtttttaaaggcctctgtcataaaaggaaatgtatattttgactagtggagcaattagttaaaacatttaatctgatcattttggttttat

SEQ ID NO: 919089 - DNA, 120 bp, Artificial Sequence
  ENSG00000259834_12 (sequence is synthesized)
gaatctgaattttcactttaggtgtaattgagtcgcttatgtattactgtgatctttgtgagaagtgatttcgtccatttttttaaatctgatgaaacttgataaatggtgattctagca

SEQ ID NO: 919090 - DNA, 120 bp, Artificial Sequence
  ENSG00000259834_13 (sequence is synthesized)
tattgtgttaatactgtatcttacaacaatttgtgaactgaccatcataaacgaatcatagtagtatctcttctggtaagttgtttctatatgtgatctcttaatgctgggtttgggggt

SEQ ID NO: 919091 - DNA, 120 bp, Artificial Sequence
  ENSG00000259834_14 (sequence is synthesized)
gggatggggttaagtatttagtttactttaaactgtcaaagtgtttttcttaaatgccataaaattgtatgactataagccaaataagaatattctcttttttcacttttaagggcactg

SEQ ID NO: 919092 - DNA, 120 bp, Artificial Sequence
  ENSG00000259834_15 (sequence is synthesized)
tatagaccatttttgaaactatcccacagaatggtataatttcagtttaaaagctcttacacacatacacacacacaaatataaatatatatatatacacattcaagggaaagcaaacag

SEQ ID NO: 919093 - DNA, 120 bp, Artificial Sequence
  ENSG00000259834_16 (sequence is synthesized)
tgtatgtagtatttctaagtgacatgctacacgttataagaatctatttttgaaatcttatacagattatgcagaagtcagaataacaaatacaacacctcaatttttttatagagtcta

SEQ ID NO: 919094 - DNA, 120 bp, Artificial Sequence
  ENSG00000259834_17 (sequence is synthesized)
gcgttagtttactataagatttgcttacatcatacttgcaaagatcattcacataatttatttagcattgaaaatctttatatgaagtactaatgtcatctgaagtttagagattaaaca

SEQ ID NO: 919095 - DNA, 120 bp, Artificial Sequence
  ENSG00000259834_18 (sequence is synthesized)
accaaggtttagaaagatcaaatgactagtccaagataatatggccaataaatggctctaaacctcctatgttctttatactattcactttttgtcatgttatttttatcctgtcactgc

SEQ ID NO: 919096 - DNA, 120 bp, Artificial Sequence
  ENSG00000259834_19 (sequence is synthesized)
cattatctttaaaactttgacaaaaatttaattttaaaagttacattgggaattttcagattttagtgcaaagacattgttgctgttcttgtcagaccttttcagatacctccagactat

SEQ ID NO: 919097 - DNA, 120 bp, Artificial Sequence
  ENSG00000259834_20 (sequence is synthesized)
agcccttccacagggtgatattcaaacattttccacctaaacatataagtttgcacaccctgaccacagacactgaattcacttgatgtcagaatgctagactaaaagttgatcttcttg

SEQ ID NO: 919098 - DNA, 120 bp, Artificial Sequence
  ENSG00000259834_21 (sequence is synthesized)
actgacatttctaatctccctttttaaaaatccatcataaggactgacttctgaacagttgaataaagcagtaatcaatccaagaaactgcatccattctgattcagaggaaaaaaaaat

SEQ ID NO: 919099 - DNA, 120 bp, Artificial Sequence
  ENSG00000259834_22 (sequence is synthesized)
ccaacctagtgaccatttttcagcatactgtatttcatcacatttattctgtgattagtggaggacagagaagagggactggggagaaaaactgcctttattttaagaaagctcattttc

SEQ ID NO: 919100 - DNA, 120 bp, Artificial Sequence
  ENSG00000259834_23 (sequence is synthesized)
tgcctttattttaagaaagctcattttcctgtaactattcaaaaagaattgattatcaagtgttagataacaatattactaacatttatcatcattcaaatatttagtaaaatttctcca

SEQ ID NO: 919101 - DNA, 120 bp, Artificial Sequence
  ENSG00000259834_24 (sequence is synthesized)
cccagttaaaatatgactgcttagtttgaataaggaagacattcctttcaattcatgacacaatagtacatttttattcttttctcagacagcagagagacactgttactgctttccctt

SEQ ID NO: 919102 - DNA, 120 bp, Artificial Sequence
  ENSG00000259834_25 (sequence is synthesized)
gtaagtcaacagtctgtgatacatgctgtacttttactgattagcaatgcaatgttactgtgaatatttaactagaacttattatattggaatttaaaattttctaacattgaatttagt

SEQ ID NO: 919103 - DNA, 120 bp, Artificial Sequence
  ENSG00000259834_26 (sequence is synthesized)
tctcttcatcaaataagcaagcattatttttatgaaatgaaataatcattcttaagcagtgatgataatggaattctgaatacgatgtaaaatcaaacattctattttttctgtttatcc

SEQ ID NO: 919104 - DNA, 120 bp, Artificial Sequence
  ENSG00000259834_27 (sequence is synthesized)
tttgacattgagttgttttaatttattacatattattaagttgaaataagctttataccatgttctctgatgttcttgtcataataattttgggtcttttgttaagtaaatatcagaaaa

SEQ ID NO: 919105 - DNA, 120 bp, Artificial Sequence
  ENSG00000259834_28 (sequence is synthesized)
tatctgtgagttttgattatgtgatattttcatctgattgattttttaaatttctcattggatttaaagtgttttctttgctaatgttatatacagaattcaataaaagaccaaaaaaaa

SEQ ID NO: 919106 - DNA, 120 bp, Artificial Sequence
  ENSG00000272468_0 (sequence is synthesized)
tacaggtgtgagccactgcgcctggccagagctggttctttttctttagagcgactttttatagctgtcaaggtagaaaacagagaatttctttataacttgcaatttctacagttggca

SEQ ID NO: 919107 - DNA, 120 bp, Artificial Sequence
  ENSG00000272468_1 (sequence is synthesized)
ttataacttgcaatttctacagttggcagcctcctctgctcaggccttgtcaatgtctggttttcccaccctcccagaaatggggtctcgatctatcacccaggctggagtgcagtggcg

SEQ ID NO: 919108 - DNA, 120 bp, Artificial Sequence
  ENSG00000272468_2 (sequence is synthesized)
ttagagacgaggtctcgctatgtttcctaggctaatctcaaattcctggcctgaagtggtcctcctgcttgggcctcctgagtcgctgggattacaatactgtctagtatgaaggaagtt

SEQ ID NO: 919109 - DNA, 120 bp, Artificial Sequence
  ENSG00000272468_3 (sequence is synthesized)
tgtcttgatatgtttcctgctcaaaacaaaatgcaacttgtcattttcaaactctaaaattcttctggtgtgttttaaaatgtctatactgtaatagcaaataaattaacttttatgaca

SEQ ID NO: 919110 - DNA, 120 bp, Artificial Sequence
  ENSG00000272465_0 (sequence is synthesized)
aaggtctagatgtttcattaaacatttatcacttttttggaggcaaagaaactttattttcctctcttggggaattacccagaagccataaaatgctgttttataactgaatatcccagt

SEQ ID NO: 919111 - DNA, 120 bp, Artificial Sequence
  ENSG00000272465_1 (sequence is synthesized)
ttacatctcatggaacgaagcaaaataaatacaaactttaaaaatatggtcacagcccatatattttaaaaaacattgtcaccacggaccaacacagctcaaatgtttctttcatgttta

SEQ ID NO: 919112 - DNA, 120 bp, Artificial Sequence
  ENSG00000272465_2 (sequence is synthesized)
cttatgtcttatttacaaagtaaaatgttaccaaaatctgagaataattcctagggatgaatttcttttctcctttccccactgggcccttcaaatttttcttcagtagctttacttttg

SEQ ID NO: 919113 - DNA, 120 bp, Artificial Sequence
  ENSG00000272465_3 (sequence is synthesized)
cttttctttaagttttactttcccttggagtttatatgaaggaaatggaatgaggtctgggatttgcttcagaaccgcccagtggggcgagctagtaggggatgcaggtaagggtctagg

SEQ ID NO: 919114 - DNA, 120 bp, Artificial Sequence
  ENSG00000272465_4 (sequence is synthesized)
tgagaccggcttgggtgtgagctaactgttattgaagctacgtgttgggcacagggaggtttattagattactctgttttgccatatgtttgaaaatttccattaaaatgtcttcctcaa

SEQ ID NO: 919115 - DNA, 120 bp, Artificial Sequence
  ENSG00000272463_0 (sequence is synthesized)
gaacatttcagagaaacacaacggagggaaggagcccggccctgccttgtcagcgccctggaagacctggcttcctccctgacactcactctggggagggaagacacccgtgcgcctcgc

SEQ ID NO: 919116 - DNA, 120 bp, Artificial Sequence
  ENSG00000272463_1 (sequence is synthesized)
tccctcgtggccagtggcttccccggtgggctagggcgtgtcagcagggcgtgcccaccgagggagcaacagcgattcccaggcctaacgcttttcaaatcaaaagcgcctgacgctttt

SEQ ID NO: 919117 - DNA, 120 bp, Artificial Sequence
  ENSG00000272463_2 (sequence is synthesized)
tacaaccgagcagaatagggctgttccaggtggctgacgcttcccgtggcggggagggggttatggagaacgtggatgaagctcatcgtgtaagacgggaaatgccactggaagtgagcg

SEQ ID NO: 919118 - DNA, 120 bp, Artificial Sequence
  ENSG00000272463_3 (sequence is synthesized)
tccctgcaccaggccgcgtcccgcccagagtgaggcacggccgccccctcgctcagaacctgcagcccggccgggctgatgcgggaagccggccccgcctgtgagcgcgcagttctccct

SEQ ID NO: 919119 - DNA, 120 bp, Artificial Sequence
  ENSG00000272463_4 (sequence is synthesized)
ggagacgggccaccctcaccctgtgcctgcgtcccctcccagccctcgtccctgctctctacccacgacccggcctggggtgcctcggacggatctcctgccatttcctgcattctgcag

SEQ ID NO: 919120 - DNA, 120 bp, Artificial Sequence
  ENSG00000272463_5 (sequence is synthesized)
gagcactcattgaaaatttgggtggccttgcttatttattttcctggaatgcagtgggttctatttccgtggtattttctcagcagtgcagcgtttccatttcaaactacaagaagaaga

SEQ ID NO: 919121 - DNA, 120 bp, Artificial Sequence
  ENSG00000272463_6 (sequence is synthesized)
agaaaagccagtccccgtcagcacgcaaacacacaacagaaaaaaacgtcccgggtttgactcgcagtcctgcctttataaattgtaactaaatataagccaccagagttgcctgctttt

SEQ ID NO: 919122 - DNA, 120 bp, Artificial Sequence
  ENSG00000272463_7 (sequence is synthesized)
gtcatgagactaaaaagacaagtttacttcttcagggaaaaggggaaaacacagtgatgtgctcagttgctgtgaaaagcaaaagacaaatcagaggtaatataaaaagttatttggtac

SEQ ID NO: 919123 - DNA, 120 bp, Artificial Sequence
  ENSG00000272463_8 (sequence is synthesized)
catggaacaattgatgccgagtgtctaaaatcatcataaaatggactgaatctaaattttggtcagattaatataaaaaaactaaaattaaaaaagagcttgcttcatcactgtagcact

SEQ ID NO: 919124 - DNA, 120 bp, Artificial Sequence
  ENSG00000272463_9 (sequence is synthesized)
ggggcttcacacaaatttcaaaatgtgcgtgttacactagcattgttaggaatatgaaggttgacggtgaaatattttattttctcaagatgctataccacgtcgctctaataatctacc

SEQ ID NO: 919125 - DNA, 120 bp, Artificial Sequence
  ENSG00000272463_10 (sequence is synthesized)
accgctataaattttgtattgcctaccattcacagaaggctctatttcaatggattcatgtaaaaacacaattttggcaaaaattaaatttatatacctggcttagataatttacacctt

SEQ ID NO: 919126 - DNA, 120 bp, Artificial Sequence
  ENSG00000272463_11 (sequence is synthesized)
tgtagagagaataaattgttaaaatctgatgcattttgcatgatacatatttttaaaaagatttagaatggttgaaaatatgtacacgtttggtagacttagttatcaaagacggttact

SEQ ID NO: 919127 - DNA, 120 bp, Artificial Sequence
  ENSG00000272463_12 (sequence is synthesized)
tttattcaataccctgaaagtgtgtccattgaaaggcaaatacatttccatttttctgtctttaaaatgagactgaacttaggtcattttcttaatcttgagagctactttctcttggtt

SEQ ID NO: 919128 - DNA, 120 bp, Artificial Sequence
  ENSG00000272463_13 (sequence is synthesized)
tatatgcatttctgctattggtgtaactgatgagcatggtaattgcacatcaatttaccttgaaacggaaaatgataagaactttctgtggagcaaaaggtggccatgtctgtgagctga

SEQ ID NO: 919129 - DNA, 120 bp, Artificial Sequence
  ENSG00000272463_14 (sequence is synthesized)
aagtaaaagctagaaaaacatttgatctctcatgtgggcaactgatttaagaaagaaaagaaacttcatctgtacatattaatcaaaaaattaatggtataaatttgctatttttcatta

SEQ ID NO: 919130 - DNA, 120 bp, Artificial Sequence
  ENSG00000272463_15 (sequence is synthesized)
ctttttataaattggtgatagcactaaactgtcaatcaaattttatctttacatttaacaaaacatgtaaaggtatctgacttcttggctgaaataacttattaatgccttactgtaatt

SEQ ID NO: 919131 - DNA, 120 bp, Artificial Sequence
  ENSG00000272463_16 (sequence is synthesized)
cataaatagaattttttcatacatattttgccctaaaattaaaggtgtcaaagaggggaaaaaaatctgtttggactatgcaaatattgctaagctgagccacttattttgaatatgccc

SEQ ID NO: 919132 - DNA, 120 bp, Artificial Sequence
  ENSG00000272463_17 (sequence is synthesized)
atgtgagctaaataagataattagggtttttcacatgatactgattctgcatttgaaatgcagaatcataagaaatgctgcacatataataatggcaatactttatgtttttatagatct

SEQ ID NO: 919133 - DNA, 120 bp, Artificial Sequence
  ENSG00000272463_18 (sequence is synthesized)
tcatagactatgaaagtatttttacatatgcaattgagattcataataattctctgaggctcacttgtttaaaaagtatattaaactaaataagaaaaagataaaggaaaataagtttgt

SEQ ID NO: 919134 - DNA, 120 bp, Artificial Sequence
  ENSG00000272463_19 (sequence is synthesized)
ttattaaaaatatacacacagtaatagaaccgagtatgaagaaaaggaaatgtgctgcagtttaaataaagaagagacttaaccttggatggccctgcagaatatttaatccagtacaga

SEQ ID NO: 919135 - DNA, 120 bp, Artificial Sequence
  ENSG00000272463_20 (sequence is synthesized)
ggagggttcttacagcaattccactcttctgagcagtttagaaaacaagctagaaagcattcattcacttggtagattaaaatatatttagcattttttcttttcatttagccgttctaa

SEQ ID NO: 919136 - DNA, 120 bp, Artificial Sequence
  ENSG00000272463_21 (sequence is synthesized)
aattaaaagttaaatgcaaatcacactattcatggccatatcattttcttcctggtagtgaacctctggctctttctgtcttgttacattaaatgatatcttaagaaaataaatgacacc

SEQ ID NO: 919137 - DNA, 120 bp, Artificial Sequence
  ENSG00000272463_22 (sequence is synthesized)
tgggttgttatagtccatttggctgcctgggcttttgtgggtaagtctgaactgatatggggaaaggcatgttttactatttgtacaaagtctcaaaaaataaaaattatacctctctaa

SEQ ID NO: 919138 - DNA, 120 bp, Artificial Sequence
  ENSG00000272462_0 (sequence is synthesized)
gaggcttgttttctagcgcctctggtgggccgcctcccgcaggcctggtgtgagcctggggtccgttctcacagctggatctggggtctgaatgccgcgccctctggagagccacagatg

SEQ ID NO: 919139 - DNA, 120 bp, Artificial Sequence
  ENSG00000272462_1 (sequence is synthesized)
ggtctccgctgatgcttctctcaatttcctctaagagcgagagctccgggaaaggagccgatcctggtggaagactacaggtctgagtccactggacgaaaaacgaggctctcctcttgg

SEQ ID NO: 919140 - DNA, 120 bp, Artificial Sequence
  ENSG00000272462_2 (sequence is synthesized)
ggaaataaaacaatcctgccaaccaaagacccctctggatcctcaaacacgccatcagcatggaaggccgctatggcatagcgagagataaataggattcaggcagtgctgtccttacat

SEQ ID NO: 919141 - DNA, 120 bp, Artificial Sequence
  ENSG00000272462_3 (sequence is synthesized)
cgcaatcattcaggctccttggattagagaccatcctgaggacatccttgggagccatgtgctgaagatggccaagccacaggatgaaaggagctgcatctttgagtcaccactggagaa

SEQ ID NO: 919142 - DNA, 120 bp, Artificial Sequence
  ENSG00000272462_4 (sequence is synthesized)
aggtctctctaaatggatttgcagagacgtcttctcgaatactccccttctaagttccacttgtaatccacttcttctattctcccagcaatcaatgtggtttggggaaattccagaatc

SEQ ID NO: 919143 - DNA, 120 bp, Artificial Sequence
  ENSG00000272462_5 (sequence is synthesized)
tcataataccttggtcatgggtaaataaggaaaggacctttacatacatgtgatgcaaagcagatcaaaacaagcagagcagcctaagagcagcaagaccccaaaggataagggaagtcc

SEQ ID NO: 919144 - DNA, 120 bp, Artificial Sequence
  ENSG00000272462_6 (sequence is synthesized)
tgcagaagagcagagcggtgctgcaaaggcaggcaggtaaggtaagcagacagggccatcaggatggatcctttgggcatgccagcatccaccagggactggtagagctatttagagaaa

SEQ ID NO: 919145 - DNA, 120 bp, Artificial Sequence
  ENSG00000272462_7 (sequence is synthesized)
ctgataaaaagctctgccaactacagtcacaaaagatggagctcagaatgatgagtagatgcctaaaacatctccattttgttgatgaagaaagtaaagtttatagagcttagattattt

SEQ ID NO: 919146 - DNA, 120 bp, Artificial Sequence
  ENSG00000272462_8 (sequence is synthesized)
gcttttgtacctagcacagtacttagtttatagtagatgcacaataagtatttgtttaatgagtgaatgagtcactagcctaagacctttaatataacatgcttaaacctgctaccaggg

SEQ ID NO: 919147 - DNA, 120 bp, Artificial Sequence
  ENSG00000272462_9 (sequence is synthesized)
attgggaactcacctatttagtagtgagtagaggggtgtggtactggtacttaagacagatgcattgtggttgggtatggtgtgtttttgtttttgttttgagacaggttctccctctgt

SEQ ID NO: 919148 - DNA, 120 bp, Artificial Sequence
  ENSG00000272462_10 (sequence is synthesized)
caagcgatcctcccacctcagcctctgagtagctgggaccacaggtacgcatcaccgtgcctggctaattttgttttttgtttgtttgttttgtagggacgggattttgccatgttgccc

SEQ ID NO: 919149 - DNA, 120 bp, Artificial Sequence
  ENSG00000272462_11 (sequence is synthesized)
aggttggtctcgaactcctgggctcaagctacacccgcccgcctcggcctcccaaagttgtaggattaaggtgtgagccactgtgtccagcagatataatgtttttaaaagtttgagagt

SEQ ID NO: 919150 - DNA, 120 bp, Artificial Sequence
  ENSG00000272462_12 (sequence is synthesized)
ctgtgtccagcagatataatgtttttaaaagtttgagagttaatatgctctctggtgtgccctaggtcccactactcctattgccttaaaactcacgcagtacacatttgtcttccatgg

SEQ ID NO: 919151 - DNA, 120 bp, Artificial Sequence
  ENSG00000272462_13 (sequence is synthesized)
gcttcagttgtaagagaaccctttctactctttgctgttcacaagtctccttttaaacagagcttgttcccaatgctgttttgttttgccctctgccatgttcttccggccatcacctcc

SEQ ID NO: 919152 - DNA, 65 bp, Artificial Sequence
  ENSG00000272462_14 (sequence is synthesized)
ttgttttgccctctgccatgttcttccggccatcacctcctgtggggaaaagagagagagatcac

SEQ ID NO: 919153 - DNA, 60 bp, Artificial Sequence
  ENSG00000272462_15 (sequence is synthesized)
ttctgccttgagatgctgttaatctaaccctagccccaaccctgtgctccctgagacata

SEQ ID NO: 919154 - DNA, 86 bp, Artificial Sequence
  ENSG00000272462_16 (sequence is synthesized)
tgtgctttgttaaagaatccactccctaatctcaagtactcagggacacaaaacactgaggaaggccacagggacctctgcctagg

SEQ ID NO: 919155 - DNA, 90 bp, Artificial Sequence
  ENSG00000272462_17 (sequence is synthesized)
tcctgaggagttttcttctggaattcctgctgggtttttgtagtcagtcctctccccatttcccacattggctcttgcagaccttccttt

SEQ ID NO: 919156 - DNA, 120 bp, Artificial Sequence
  ENSG00000272462_18 (sequence is synthesized)
tctccccatttcccacattggctcttgcagaccttccttttccccatttctatttgctaccatgtcagacatgacttttgccataggatctctattctactatagaggaaaccaaagcca

SEQ ID NO: 919157 - DNA, 120 bp, Artificial Sequence
  ENSG00000272462_19 (sequence is synthesized)
tcagtagaaatttcactaacatggaatcagatttatagaagaaagggggaggaaagttttgccttaacacctggaagggtttcgtttcttttagtagctgggagacagaaacataagaaa

SEQ ID NO: 919158 - DNA, 120 bp, Artificial Sequence
  ENSG00000272462_20 (sequence is synthesized)
gtagcttagtaagctttctgctgttcaactgatgatgtgtgagctgtcagtagttcaaactagtcattatctttatgaattaattatgtaataacttaaacaatgtcataaaccttcaaa

SEQ ID NO: 919159 - DNA, 67 bp, Artificial Sequence
  ENSG00000272462_21 (sequence is synthesized)
atactaagggaactcagaggccggtgggatcctccgtatgctgaacaccggtcccctggacccctat

SEQ ID NO: 919160 - DNA, 120 bp, Artificial Sequence
  ENSG00000272462_22 (sequence is synthesized)
gaaacaaccacaggtgtggaggggcagcccaacccttcaacctacctatcttatctcttccattatctatccacatatgtcctctgtatttttttgagtaacatttataagcataagtcc

SEQ ID NO: 919161 - DNA, 120 bp, Artificial Sequence
  ENSG00000272462_23 (sequence is synthesized)
ttaggtagctatgccacttacataatgaactagaaaaggtaaccaaacagaatagggttgtactcagatataccttctacaagtttgtgttacacatatttacacatatttaaaaatata

SEQ ID NO: 919162 - DNA, 120 bp, Artificial Sequence
  ENSG00000272462_24 (sequence is synthesized)
tacatattattattgtgctgtgtggttattaggcaaactcaataagcagttcttataaagtatactcaatgtaacttttataaacttaccatattttatagttattctgtttttattagc

SEQ ID NO: 919163 - DNA, 86 bp, Artificial Sequence
  ENSG00000272462_25 (sequence is synthesized)
gcaaaggcaggcaggccttgacggaatcctgtctctccataatgttgcttttcgaggagactgattgattgagatggcgtctcact

SEQ ID NO: 919164 - DNA, 120 bp, Artificial Sequence
  ENSG00000272462_26 (sequence is synthesized)
tgttgaatgaggagttagaaggcatcatctttaaggagctttacaggtacatgtccagggctcaataattttattattatttcctggacagataaaacctaagcaggtgaaggggaaaga

SEQ ID NO: 919165 - DNA, 120 bp, Artificial Sequence
  ENSG00000272462_27 (sequence is synthesized)
ataaaagtgcagggtggaagttgcttgaatgctaactgggtcaacgatctcccagaaaacccctgtaaaagaaacctaagaacctacatcaccaggagaccattgggaccagttcctctg

SEQ ID NO: 919166 - DNA, 120 bp, Artificial Sequence
  ENSG00000272462_28 (sequence is synthesized)
gaatccctgaggccagataatcagctgaagctttacattctgtccctttctggtcatgactttctccacagtctgcttggtgcctcctcctctgtgactctaaattcttaggatcaaccc

SEQ ID NO: 919167 - DNA, 120 bp, Artificial Sequence
  ENSG00000272461_0 (sequence is synthesized)
gtgccagacagtgggcgcaggtgcaaattcttccttcatcagcaaagacaatttgctctgggacacggctccaaattgcctgcatgctcatttatgctgtgggagaacagcataaatgct

SEQ ID NO: 919168 - DNA, 120 bp, Artificial Sequence
  ENSG00000272461_1 (sequence is synthesized)
cagagagcgcaaacaacttgttcaaggtcattggactgaaagtgacagagccaggactctgtcccacatgcaaagactccacgcatcatgcctatgatactcagagaagaaggctatcat

SEQ ID NO: 919169 - DNA, 120 bp, Artificial Sequence
  ENSG00000272461_2 (sequence is synthesized)
tataaagacctatacttgatgctagaaattcaagacgagcctgggcaacatagcaaggctctcatctccacaaaaaagaaaaaaaattaaaaataggcatagtgaagcacactggtggta

SEQ ID NO: 919170 - DNA, 120 bp, Artificial Sequence
  ENSG00000272461_3 (sequence is synthesized)
gtcttagctactcaggagactaaggtgggaggatccccgagccaaggagtttgaggctgcagtgagctatgcaaataccactgcactccaacctgtgcaacagagaaagaccccgtctct

SEQ ID NO: 919171 - DNA, 120 bp, Artificial Sequence
  ENSG00000275202_0 (sequence is synthesized)
gttgttaaaaccgggcgaggactgcagcctcgagtccacctcccgactgaacaggtggttaactcgcccggggagaggaactgccagctcccgctttctgtttcacccgagggaccacga

SEQ ID NO: 919172 - DNA, 120 bp, Artificial Sequence
  ENSG00000275202_1 (sequence is synthesized)
gaccacgaacgccgccgccgccatgcttactacggagccgggaggaggagcccgaagtcggcgcgccgagtgcggctgcgcgggccccgccgacggagcccgcggccgggaccccgaacc

SEQ ID NO: 919173 - DNA, 120 bp, Artificial Sequence
  ENSG00000275202_2 (sequence is synthesized)
ccgccgcgccggggctctctcaccggaacgcgagtccccgcggggccaccggcgcgtggcggctgagcggccgcgtttggctcccggagcgcccacaccctctcgggcttccggctttct

SEQ ID NO: 919174 - DNA, 120 bp, Artificial Sequence
  ENSG00000275202_3 (sequence is synthesized)
ttctcccgaggcccggctgcgcctggcttgtggtagcatccgctgtggccaggctcggagctacactcaggaaaagtggagttaatggaggttcctagagacactcacacaattctcaat

SEQ ID NO: 919175 - DNA, 120 bp, Artificial Sequence
  ENSG00000275202_4 (sequence is synthesized)
tgagacgcaccctgtcggcccctttccgaaagcacgcgaacttaaggctggcaggtgctttaaaagacactcctcccaaggactaggaagcctctgaaatgggcttggaagtttctaatc

SEQ ID NO: 919176 - DNA, 120 bp, Artificial Sequence
  ENSG00000275202_5 (sequence is synthesized)
ccaaagacttcgaacccaggatctggatagcaagcaaaaatatttagatatttactcagttgaaaacgtggggggtggcttcgtggtctcttcgccagccaaatcgcgtggaaaaccacg

SEQ ID NO: 919177 - DNA, 120 bp, Artificial Sequence
  ENSG00000275202_6 (sequence is synthesized)
acctcaatttttacaacagcacgaagacttacaagtgagcgtagcagcgacttcctggaacctcaaacaatgtgggacgctgcaataatgcctgagggcttttgacttacagttgccgcc

SEQ ID NO: 919178 - DNA, 120 bp, Artificial Sequence
  ENSG00000275202_7 (sequence is synthesized)
ggagacctggggagggggtagtacttgggccggtgagtccagcctcaggaactgtcctttcaaaaatggtgatggatgtaacaagttgcatgtctgggctttatttcagtgtattaattg

SEQ ID NO: 919179 - DNA, 120 bp, Artificial Sequence
  ENSG00000275202_8 (sequence is synthesized)
tgcgatcttttaaaatagctgtatttttaaaactgttttacagaaatctctttaaaatgtgattattctctatattcttaaagaatacaatggctaattaaatcctttgttgataactga

SEQ ID NO: 919180 - DNA, 120 bp, Artificial Sequence
  ENSG00000236052_0 (sequence is synthesized)
gagcgaggaaacagggccagagaattggaacaaaatacaaggctgcctctgaaaggaatatctttgtgctgatgtgtccatcaagagaacatacacagaagtgacacttgccagtaattt

SEQ ID NO: 919181 - DNA, 120 bp, Artificial Sequence
  ENSG00000236052_1 (sequence is synthesized)
gcaagcagatggaacttcaatatggcaatagagaaagaatcaattagaccagagtctcctcaggaagactttctataggttaaacaagtgtttgtggttgctgtggagcatgtgagaatg

SEQ ID NO: 919182 - DNA, 120 bp, Artificial Sequence
  ENSG00000236052_2 (sequence is synthesized)
atggaaggagttcggcagtcaccactgatgattgagcacaccctgcatgcatggtcctgtgcaggatgaagctgtccctggtcagggagctgcagaaccacagctcctgcagaatgggtg

SEQ ID NO: 919183 - DNA, 120 bp, Artificial Sequence
  ENSG00000236052_3 (sequence is synthesized)
aaagctgagctcatcatatggaactgtccaaggtggacggtcccctggagagcccgctgtgttggaagatgtagaatattcatatatctggtgagcatctgctagatgccagggttgggg

SEQ ID NO: 919184 - DNA, 120 bp, Artificial Sequence
  ENSG00000236052_4 (sequence is synthesized)
agagtcaagttgaagcaagcatgaaccctcaaggacctaccatttcaaggcaagaaatagatacaaatacagcgtaattatctctccaattaaagagcaaccaagggacaactgaactgg

SEQ ID NO: 919185 - DNA, 120 bp, Artificial Sequence
  ENSG00000236052_5 (sequence is synthesized)
gcacgcagccgaggaatctactcagctttgatctcttatcgctctgcacacacagccctttctctgtaaggctagctgctctcagcatcactgtgtctaatcaaacgtgtcacacctcca

SEQ ID NO: 919186 - DNA, 120 bp, Artificial Sequence
  ENSG00000236052_6 (sequence is synthesized)
ctgagaaaatatttactggatagctactagacataaggatgcagaaatgaattagaaaaattcctcgcccttgttcaaagctatgctggctcttagaacatctgagcccccactgtttca

SEQ ID NO: 919187 - DNA, 120 bp, Artificial Sequence
  ENSG00000236052_7 (sequence is synthesized)
tctttagaggatcccagctgctggggtgtgaggccagtgctggagccagcagtctctgacccagaagggacctgaggtgctaaagaaaattctggaggctgagaagtccaaaaccaagtc

SEQ ID NO: 919188 - DNA, 120 bp, Artificial Sequence
  ENSG00000236052_8 (sequence is synthesized)
accagcagattcagcgtctggtaatggtccacttcttggttcacagatggctatcttttcactgtgtcctcacatggtggaagggccaagggagctctatggggtctcttctataacagc

SEQ ID NO: 919189 - DNA, 120 bp, Artificial Sequence
  ENSG00000236052_9 (sequence is synthesized)
attaaccccgttcgtgagggctccatcctcatgacctgatcacataccaaagttgttttcacttcccaaagaccccacctccaaatactatcacaattggggttagatttcaacctatga

SEQ ID NO: 919190 - DNA, 120 bp, Artificial Sequence
  ENSG00000236052_10 (sequence is synthesized)
atttgtggggggcacacaatctttagtcagggtttgtgggaacaatatgaccttggtcaggtccctttatctttgcaccttattttctctttgcccaaataaagaatacttgatattcca

SEQ ID NO: 919191 - DNA, 120 bp, Artificial Sequence
  ENSG00000236052_11 (sequence is synthesized)
gccaagtgtccatcactgattcccagagatgccctttgtgtggtaggcacttccatgtggactcgctacagaggtcataagaccctaattccagagggccctaccctataaccagaagga

SEQ ID NO: 919192 - DNA, 120 bp, Artificial Sequence
  ENSG00000236052_12 (sequence is synthesized)
agaactattgcacagagaatctaagaagaatctagacagacagcccttgctggatttctccactctgttagcattcgatcatttgccttttgtccagtcatatttctgcatggctgtcca

SEQ ID NO: 919193 - DNA, 120 bp, Artificial Sequence
  ENSG00000236052_13 (sequence is synthesized)
tactttgttgaacctaagcacaaaatggaaagttttccctgtatctttgggtcgtcattctgaaggctcccatgttatgtaaaactatgatcaaataaatatgcatgccttttctcctat

SEQ ID NO: 919194 - DNA, 120 bp, Artificial Sequence
  ENSG00000236052_14 (sequence is synthesized)
ccatgtggactcgctacagaggtacatgcataggtccaagataggcgtccctcagctcatggcctatattccagcttgtagacttttgctaaggatgacccctcaccagtaaccagctct

SEQ ID NO: 919195 - DNA, 120 bp, Artificial Sequence
  ENSG00000236052_15 (sequence is synthesized)
ggtcccaagctcctggctgcagtctttagtgtccacaaacccacagaggctcatcatcctcaactgtgggagtgcaccttttcctgctggttcctcctcgttgccctggtatttctccaa

SEQ ID NO: 919196 - DNA, 120 bp, Artificial Sequence
  ENSG00000236052_16 (sequence is synthesized)
atgttgttctccctctgctcaaataggcatggagcaggggcagatcagaaagtatgatgtccagccatcctccaaccaaagaacaaagtgctagactatcatcattgcacgtacccccag

SEQ ID NO: 919197 - DNA, 120 bp, Artificial Sequence
  ENSG00000236052_17 (sequence is synthesized)
tctctactggggatgcctaagagtcttcctttcatgttgtgaaatgaggagtgactcttctgctcccattgtggggaggaagggaataaatagacccccacacatgtcattgtcctgctg

SEQ ID NO: 919198 - DNA, 120 bp, Artificial Sequence
  ENSG00000236052_18 (sequence is synthesized)
gagcgaggaaacagggccagagaattggaacaaaatacaaggctgcctctgaaagtaatttgcaagcagatggaacttcaatatggcaatagagaaagaatcaattagaccagagtctcc

SEQ ID NO: 919199 - DNA, 120 bp, Artificial Sequence
  ENSG00000236052_19 (sequence is synthesized)
ggtaggcacttccatgtggactcgctacagagtttggagttcctgaacaacatggacagtgttaatttggattccatgcttcatggcacagaattggagcactaactactcagtgatgac

SEQ ID NO: 919200 - DNA, 120 bp, Artificial Sequence
  ENSG00000236052_20 (sequence is synthesized)
ccatttcaaggcaagaaatagatacaaatacagttgagagccatctgtgaagttaatttcagcactgtttactctttcctcctaaatcactaatgaagatgaaacattcaatggaattga

SEQ ID NO: 919201 - DNA, 120 bp, Artificial Sequence
  ENSG00000236052_21 (sequence is synthesized)
gctttgcacccctttctgggaaattccaccgaggcttgctcttgtttcagttttcaagcagcaaaagcagtttgtggcaatttgcaagactctggcaaaccacctgcacctttcaaacta

SEQ ID NO: 919202 - DNA, 120 bp, Artificial Sequence
  ENSG00000236052_22 (sequence is synthesized)
caagttctcatttgcctgtgccctgctttcccaagagcctagtgactgattgcagacccttgatttctgtgagcttagactaataggtattgcaggcatacattctgggctgaagataac

SEQ ID NO: 919203 - DNA, 120 bp, Artificial Sequence
  ENSG00000236052_23 (sequence is synthesized)
agggacctgaggtgctaaagaaaagcatacattctgggctgaagataaccagaaagccagcaacctgatgggaggaacattcattgcacaagctgagagtgaaatgagcttctacatcag

SEQ ID NO: 919204 - DNA, 120 bp, Artificial Sequence
  ENSG00000236052_24 (sequence is synthesized)
gagcgaggaaacagggccagagaattggaacaaaatacaaggctgcctctgaaagctcttccaggagtcatgtgcattgcccaagctaccctgccaagtgatgagaaagatgcggcctag

SEQ ID NO: 919205 - DNA, 120 bp, Artificial Sequence
  ENSG00000236052_25 (sequence is synthesized)
tgatcctcatcaccctcaaccagtagacagtcaatgcccagaagcagagctgctttagctcatttacaagtgaccatagacaagagtgaggccagccaagacaagaagaactgaccattt

SEQ ID NO: 919206 - DNA, 120 bp, Artificial Sequence
  ENSG00000236052_26 (sequence is synthesized)
cttgataccctgaagggggtgtgtgtggcctcctaatactctcattttcctttagaatgtgggtgactagaggctactttgccatttgctttgagttttagtagctaattctgggttaac

SEQ ID NO: 919207 - DNA, 120 bp, Artificial Sequence
  ENSG00000236052_27 (sequence is synthesized)
agtgaaagtcctatttgatatcctgctactcttgttactttaacctaattagatattatataagttgataaaatgtgcatgtacgaggaaatagagcagtgtctccaagaaactaagtga

SEQ ID NO: 919208 - DNA, 120 bp, Artificial Sequence
  ENSG00000236052_28 (sequence is synthesized)
aattagttggagaagcttgaaaaagctaagttatttaaaaatgctgtgccatcagatgtatgtgaggtaatactaagcagttggaaaacaatggtaaaatgggaagtgattgttcactca

SEQ ID NO: 919209 - DNA, 120 bp, Artificial Sequence
  ENSG00000236053_0 (sequence is synthesized)
gcggtgtgctctaaagagctaacgtttatcttaactgttttgaattcagctcagtaggagatctcactgaaggaacaggcaaacagcgcaacttcctctgataaggctggagtgcagtgg

SEQ ID NO: 919210 - DNA, 73 bp, Artificial Sequence
  ENSG00000236053_1 (sequence is synthesized)
gtggcgtgatctcggctcgctaattgcagcctctgcccggccgccatcccgtctgggaagtgaggagcgtctc

SEQ ID NO: 919211 - DNA, 88 bp, Artificial Sequence
  ENSG00000236053_2 (sequence is synthesized)
cggccgaactgccaccccgtctgggaggtgaggagtgtctctgcccggccaccctgtcccagaagtgaggagcccctccgcccagcag

SEQ ID NO: 919212 - DNA, 120 bp, Artificial Sequence
  ENSG00000236051_0 (sequence is synthesized)
atctaactccagtccaatatcccctaagaagccttctctgaccactccagggcacaatgatctcaaggttcagcatctccagagatgagctttccaaatacctgatgaagatatgcatgt

SEQ ID NO: 919213 - DNA, 120 bp, Artificial Sequence
  ENSG00000236051_1 (sequence is synthesized)
aatatcatggagagaagtggtttggatgacattacacagaagccagttgaaagcctgaagaaatgacggttaaatgagttcaagaataaaatacatgagtttaaaaagtactcagaaata

SEQ ID NO: 919214 - DNA, 120 bp, Artificial Sequence
  ENSG00000236051_2 (sequence is synthesized)
gattacaggttgttggctatttaaactactccttataggagcatgttctttggaaagttcaggatgaaactttaggaaagaagaacaagccattgcatcatgtactatgccttcatgcca

SEQ ID NO: 919215 - DNA, 120 bp, Artificial Sequence
  ENSG00000236051_3 (sequence is synthesized)
ccacagaaggagacatggcttgcttggctggctctaaaggcttggatccatctcctttgaaaagaaaactcgatttttcttttttgggcctggtgtgtctattagcacattttcgactta

SEQ ID NO: 919216 - DNA, 120 bp, Artificial Sequence
  ENSG00000236051_4 (sequence is synthesized)
ttttgggagatgctctcatttcctgttcatctttcagtggtgcttttccaatgctaaaatgaactttatttgaaccttcatccacactcttaaattcactgctgtcatcgcaggtgctgt

SEQ ID NO: 919217 - DNA, 120 bp, Artificial Sequence
  ENSG00000236051_5 (sequence is synthesized)
ctgttagactatttgtttttaaagtacttgaggtgcagacttcgaccacctcactgtggaggttttcctgtaccacatggggagagggagctctattttcagatccaggggaatctgtag

SEQ ID NO: 919218 - DNA, 120 bp, Artificial Sequence
  ENSG00000236051_6 (sequence is synthesized)
tggccagaggactcattagctgattccgcaggaatagctttaactcgtgcaggtaaaatggagtgttgtttatcatattcggaagcaacaactgagtatgatctttggaagacagttctc

SEQ ID NO: 919219 - DNA, 120 bp, Artificial Sequence
  ENSG00000236051_7 (sequence is synthesized)
tttgcaagatcagtatcagttatgggactggtttctaaactgtacatggaacaatgcaacagatacaaactcagaagagctgaatgaaatgtaactatacttataatgatgcaaaatatg

SEQ ID NO: 919220 - DNA, 120 bp, Artificial Sequence
  ENSG00000236051_8 (sequence is synthesized)
aaatgcagtaacattttgactgatttcagcattgtaccttaaaacttatggttttcttaaatctactttgtattttaaatgaaaaagaagaaaggtttccaagctccttttagaatcaaa

SEQ ID NO: 919221 - DNA, 120 bp, Artificial Sequence
  ENSG00000236051_9 (sequence is synthesized)
agcactggggtggaattcatgtatcataatattcaggaaaaacagtcagatataatcgtaagtgcaccaaatagaaagaaaatggatatgtacacatgaaaacctaataaaacaggaagc

SEQ ID NO: 919222 - DNA, 120 bp, Artificial Sequence
  ENSG00000236051_10 (sequence is synthesized)
tggccagaggactcattagctgattccgcaggacaaccaggataataactgaaatgactgacctgactcatagcttcaaagccagactgtatactgatgctaaaactctcttcactatcg

SEQ ID NO: 919223 - DNA, 120 bp, Artificial Sequence
  ENSG00000236051_11 (sequence is synthesized)
gatgaaggaactggtgatcagattgcttgaatttgagactccagcacctaaaaaggcgatatataagcaatatacgaaataattattttccaggaacatctaaggaactcttagatgagt

SEQ ID NO: 919224 - DNA, 120 bp, Artificial Sequence
  ENSG00000236051_12 (sequence is synthesized)
actctgtagctaatatctcaagaaattttaatgttctagtaacagacattttaaaaattcagggaagaaaatcattcctattgtttttgtttttgagaaataaaggtaacttctttggaa

SEQ ID NO: 919225 - DNA, 120 bp, Artificial Sequence
  ENSG00000236051_13 (sequence is synthesized)
cattaacactatattggccagaggactcattagctgattccgcaggttttataatatgctactcttgctaatatacaccactatttttcttaattacaaatgcaacatggaactcaggtg

SEQ ID NO: 919226 - DNA, 120 bp, Artificial Sequence
  ENSG00000236051_14 (sequence is synthesized)
tttagggctatgaaaagaaaaaatgggcaacatttatagccagaaatttctgtaataagtttcacaaaatattttgttacactcttaaaatatattacatcaattatcctgtgctagaat

SEQ ID NO: 919227 - DNA, 120 bp, Artificial Sequence
  ENSG00000236051_15 (sequence is synthesized)
tttcaccatctttccagcccaggactttgacttgtcgaactctcagtgtattttctgggccttttaattcaatttttatgatgtgattatcccctcctggaagttcacttgttacccagc

SEQ ID NO: 919228 - DNA, 120 bp, Artificial Sequence
  ENSG00000236051_16 (sequence is synthesized)
caatgtgcctggaatccagatcaacctggttgagtagaaaagaggcaggaacctgattcagctggatcacttttatcactgtgctggacttagcattgataccagcaagctcaaataaca

SEQ ID NO: 919229 - DNA, 120 bp, Artificial Sequence
  ENSG00000236051_17 (sequence is synthesized)
aagaattgcacagagtaaaggttatgaggttatttcacactgattttcttatttcaaccaggtgaagataagtaatattatttatagtagctattacacagatgaagaaactaaggttaa

SEQ ID NO: 919230 - DNA, 120 bp, Artificial Sequence
  ENSG00000236051_18 (sequence is synthesized)
tggccagaggactcattagctgattccgcagttaactcacctgggggaaaaaagctttggaagtccatgaaaatacgtccaaatccctgactccttggctagcattaaagatattctgag

SEQ ID NO: 919231 - DNA, 120 bp, Artificial Sequence
  ENSG00000236051_19 (sequence is synthesized)
caacaaagtttaagaaagaaaaatatcaacaaagaaagggaacaggatatcatctgcagaagatgcgtgcacagtaacaacatttttctgtactctagcaccaacatggaaatattattt

SEQ ID NO: 919232 - DNA, 120 bp, Artificial Sequence
  ENSG00000236051_20 (sequence is synthesized)
ctaaagagaaactgaagccatctgagtaaacaacacaccgaagaaattctgtctgataagtaagtttttgtcagaagctctccatggatatagtgtgtcatgccatttactaaaattaag

SEQ ID NO: 919233 - DNA, 120 bp, Artificial Sequence
  ENSG00000236051_21 (sequence is synthesized)
agccagacgttgttataaagcttaagatactcaatgcaagaaagaaaccttaaaattctttaaatgaggatgtatttgttctaatacaagccagatttgttttatgacagaaaccagtct

SEQ ID NO: 919234 - DNA, 120 bp, Artificial Sequence
  ENSG00000236051_22 (sequence is synthesized)
gctgttttataataaaaatggaaatgatatcgattgtatagaaaatgcaattatcattatgaataataatggcatgtagtttacgtgaacttatcactttttgaagtacaaaaataaaaa

SEQ ID NO: 919235 - DNA, 120 bp, Artificial Sequence
  ENSG00000236051_23 (sequence is synthesized)
tcgcagcggggctcggccctgcccctccgccgttacctgctgccgggggcggcttcccccacacaccaccccgtgctccggggacggcggcggctgcaggtcccgcggctctcacatgag

SEQ ID NO: 919236 - DNA, 120 bp, Artificial Sequence
  ENSG00000236051_24 (sequence is synthesized)
ccccgcttcgcgctcccgcagccgcggccccccgcgctccgcccgcatccgaggcgctggtcccgcggagggcgccaacgcggctccacctttgcggctctggctgcccagaaagaagct

SEQ ID NO: 919237 - DNA, 120 bp, Artificial Sequence
  ENSG00000236051_25 (sequence is synthesized)
ttatatgactgtactttatctatatcatctgtaagtggaaacctcacaagatcagaaaagggttctttttttgtgcatcctcacattaaagtaccatttaaagataagggactttaaagt

SEQ ID NO: 919238 - DNA, 120 bp, Artificial Sequence
  ENSG00000236051_26 (sequence is synthesized)
gcagttacttaatatgttttacttttgaacaaaaattacataatatgtaacttcacacttgtgattccttatttcactaattttcattgagaatatgactttttttttcaaggattaaat

SEQ ID NO: 919239 - DNA, 120 bp, Artificial Sequence
  ENSG00000236054_0 (sequence is synthesized)
ccaagattccagagatgtggctggtttcacttccaggaagcttgctggaagactgccctgtgccccacgcctcagtagggcagggggcctcccctggttttaggatcatgcttctcctgc

SEQ ID NO: 919240 - DNA, 120 bp, Artificial Sequence
  ENSG00000236054_1 (sequence is synthesized)
atgccaaccagtttgaaaacaaccacagaggaatcgaatcagcacgagaatgcagtttcttcatttccctgtcccatgactttactctgcactctttgaccaatcaataatcctggacct

SEQ ID NO: 919241 - DNA, 120 bp, Artificial Sequence
  ENSG00000236054_2 (sequence is synthesized)
tggcccacttcaaaccccttgaaatctctagctccaactccctggaggggtggatttgaggtttcctcctgtttccttgtttggctgccgtatgattattaaactctttctttgctgcaa

SEQ ID NO: 919242 - DNA, 120 bp, Artificial Sequence
  ENSG00000235501_0 (sequence is synthesized)
gcttcccagccacaggccattcacgtcaacctccaggcatcctccgcggcgggccggaccgggccggcggaggggagcggaagcccaccggggctggcccgccgctgacccgccgcctcc

SEQ ID NO: 919243 - DNA, 120 bp, Artificial Sequence
  ENSG00000235501_1 (sequence is synthesized)
cccgccgcctccgtctgcctcctcccgggctctgggcccagcgcgcccagatgccgggcaggacccctccgcccgctgctggaacaccaatagcagcgttggagcctctgggccggagga

SEQ ID NO: 919244 - DNA, 120 bp, Artificial Sequence
  ENSG00000235501_2 (sequence is synthesized)
actggggcctccaccgacacctgcttcttccctcacctcgcagccttccacacctgttgatctgacctctgccccgctgccgcccaggagtaacctaaggcttttggcctgattcgagct

SEQ ID NO: 919245 - DNA, 120 bp, Artificial Sequence
  ENSG00000235501_3 (sequence is synthesized)
cactccgtctaaacctctaaatgcggtgcgaaaaaatcctggggaatgtgccatgcaaagcctgggcatttcaagtgcttttctggattcgcatcaactcctctttacaggcatctttat

SEQ ID NO: 919246 - DNA, 120 bp, Artificial Sequence
  ENSG00000235501_4 (sequence is synthesized)
ccggaattcagctcgtcccaaaccccacgtggtgtagctctgcttgtgtttttgaatcccggggcctctttgaatcagaagccctttgtatagagataagtatcctttaggccagaatca

SEQ ID NO: 919247 - DNA, 120 bp, Artificial Sequence
  ENSG00000235501_5 (sequence is synthesized)
gcctccatttttttcgcagtcccatttcctacccgtaatactttcttctgattttaaagccatttgatagagaagggacagggaacagaaccttcgccccccgcctgagcagctggtaga

SEQ ID NO: 919248 - DNA, 120 bp, Artificial Sequence
  ENSG00000235501_6 (sequence is synthesized)
gatttcatgtccgttgaggggtgagaaagctgaaactttgagacttaagaatcctggccgaggtcagcctcctccgaagcttcatctcttgccaccactttctggtgcacacctaggaca

SEQ ID NO: 919249 - DNA, 120 bp, Artificial Sequence
  ENSG00000235501_7 (sequence is synthesized)
gatttcaatccctgagatcccaggatgaaacctatgtttgccaaataccagctactgtgccagaagagatcatggaaccaggtgtggaaagctgcttgagaagaggagccaaaacatcat

SEQ ID NO: 919250 - DNA, 120 bp, Artificial Sequence
  ENSG00000235501_8 (sequence is synthesized)
agttgaaccgtcctggaatagaaactcgccctgaattctttcttgtgtgaaatccaagagccctctcttggggttggatcgggaccctgttcctgtaacaagtccacaatgccagagaat

SEQ ID NO: 919251 - DNA, 120 bp, Artificial Sequence
  ENSG00000235501_9 (sequence is synthesized)
taaagagaaccacaaagctgaacctcaaaaagttagcctggcgaggggaggatgatgagatttcccctgttgtcacataaacaaggaagtaaagggggccccttgtgctctcagaactcc

SEQ ID NO: 919252 - DNA, 120 bp, Artificial Sequence
  ENSG00000235501_10 (sequence is synthesized)
aagcatgaaacgatagcaaagggaaaaacagctaagtgtttcctggctgaattttattttgctttcagtttctgccatttcagttcctgttatcgtgctttgaggtgcactgaactgcag

SEQ ID NO: 919253 - DNA, 120 bp, Artificial Sequence
  ENSG00000235501_11 (sequence is synthesized)
caaacccaggggatccaaggctacgttgaaaagcctttgaccacagtgcagggagcagaagacattaatgacgtgatgtcgacacagcccgcactcaggatcctccaggaaaagaacaca

SEQ ID NO: 919254 - DNA, 120 bp, Artificial Sequence
  ENSG00000235501_12 (sequence is synthesized)
gagataaccccggatcgatggtactttttgaaaatgctttattgcaaaagagtggctagggttttacaagggctatgaagaaacatattaaggttaataaagctttttattgagtgttta

SEQ ID NO: 919255 - DNA, 120 bp, Artificial Sequence
  ENSG00000235501_13 (sequence is synthesized)
gcacagtgaagtgcagtggcctgcccaggtaaaaagcaagacagaatttgaacccaggcagcctgaccccagggtccaggtattaaaccattctgctatagtgcctctaagataacagag

SEQ ID NO: 919256 - DNA, 120 bp, Artificial Sequence
  ENSG00000235501_14 (sequence is synthesized)
aaacttgatgaattactgggttactgaattttagtttacataggttgtttttttccccttaagagtagaacaaaacatacctgaagtatggaaaataacatttattttattttatttatt

SEQ ID NO: 919257 - DNA, 90 bp, Artificial Sequence
  ENSG00000235501_15 (sequence is synthesized)
cagacggttaaggcattctaagtcacagaatgagttaggaggtcagcacaaggtacaggtcataaagactttgctgataaaacaggtttc

SEQ ID NO: 919258 - DNA, 68 bp, Artificial Sequence
  ENSG00000235501_16 (sequence is synthesized)
gcggcaagagcaaatgccatggcaacatcaggaagttgccctatatgatctaaaaaaaggaggcatga

SEQ ID NO: 919259 - DNA, 120 bp, Artificial Sequence
  ENSG00000235501_17 (sequence is synthesized)
caggaagttgccctatatgatctaaaaaaaggaggcatgaataagccaccccttgtttagcgtatcatcaagaaataactataaataagggcaaccggcagcccaaggggctgctcagtc

SEQ ID NO: 919260 - DNA, 120 bp, Artificial Sequence
  ENSG00000232732_0 (sequence is synthesized)
ccctgtaggagacacctccagagaaagtaacagctctcaattgattagctgaggagaccgattttgtaaatcactacttttctaacaacactggcacagatggccaagcattctcccttt

SEQ ID NO: 919261 - DNA, 120 bp, Artificial Sequence
  ENSG00000232732_1 (sequence is synthesized)
gaaagaggtcttacatatacaaagttactctaatcagttgtagagcagagaagaggagaagcagctggatgtcagagactgcagtttgacgttggagaaaagcagcttgacttcagaggg

SEQ ID NO: 919262 - DNA, 120 bp, Artificial Sequence
  ENSG00000232732_2 (sequence is synthesized)
acagcttgacagcatggattcagagaggagaagatcaccttcctgctccgtcccctttccagctccctttcccactgagagccacttacacaggcaataaaatcctctgcattcaccacc

SEQ ID NO: 919263 - DNA, 120 bp, Artificial Sequence
  ENSG00000232732_3 (sequence is synthesized)
aggtcgccgttcaataatacgtaatgtatagacttttgagtatacgaagctccctgtttctctaggttcacctgagatttatctggtctttcagggcttaaaagggagacattcccaaag

SEQ ID NO: 919264 - DNA, 120 bp, Artificial Sequence
  ENSG00000232732_4 (sequence is synthesized)
aagattccgtgggaagtctcctacaagccccgaaggaagggaatctctctcctcataccttgagtttcctgagtacaattattatagatatacgaagatctctgtgctcatggagaattt

SEQ ID NO: 919265 - DNA, 120 bp, Artificial Sequence
  ENSG00000232732_5 (sequence is synthesized)
cacaaatgaagtatctataaggagcagcagagtcaaggtggtgatcctgtggatgaataactgaaacctgatatacttgacagcagaaaatataaagcaaattgaaaaggagagagtgtg

SEQ ID NO: 919266 - DNA, 120 bp, Artificial Sequence
  ENSG00000232732_6 (sequence is synthesized)
gagataaataagaaaatgaaagaactgataaagtcacttggattaaaaaacctgggagtaagggctttgtttatgattgaacttaagagagaattgagggaccacctacctttgatgtta

SEQ ID NO: 919267 - DNA, 120 bp, Artificial Sequence
  ENSG00000232732_7 (sequence is synthesized)
acgagaaagtaaagaggaaacatatttagagataccctttggtgaaaaacagaaatggatgtgtcatttgatgcatcacattatttattcaacaaactcttagtgagaacttactgtgta

SEQ ID NO: 919268 - DNA, 120 bp, Artificial Sequence
  ENSG00000232732_8 (sequence is synthesized)
acagatgcttttacagctcgccttggcgggaagatctggcacaaatgaagtatctataaggagcagcagagtcaaggaagacaccagacaaatgagttacactgttttggactccccaac

SEQ ID NO: 919269 - DNA, 120 bp, Artificial Sequence
  ENSG00000232732_9 (sequence is synthesized)
acaacccagccaccggctgaatgccaccaaattaccttctagttaaaggtttatggagcaaacgaatcacctattcaatatctgcttgaatttctgactcaaaatacatcaggagcatgg

SEQ ID NO: 919270 - DNA, 120 bp, Artificial Sequence
  ENSG00000232732_10 (sequence is synthesized)
tcatataaattgttatttattcaaattatggaatattataaagcagtgaaaaacaagttaactataaccagatggaataactttgaagcctcaggggctggatcctgacatgaaccagac

SEQ ID NO: 919271 - DNA, 120 bp, Artificial Sequence
  ENSG00000232732_11 (sequence is synthesized)
attctatcccaagcaaaagattatttcaaggccagaactcactccctgctggagactgactacaagatccactgagattgatgtgtaacctgattgggcccacagtgatgctagcccctt

SEQ ID NO: 919272 - DNA, 120 bp, Artificial Sequence
  ENSG00000232732_12 (sequence is synthesized)
tccatcccggaaagaggtcttacatatacaaagttactctaatcagttgtgagctgataccatcagcattcttactgaagaactccttagtgaaatagggaagttcataaaatgcttgtg

SEQ ID NO: 919273 - DNA, 120 bp, Artificial Sequence
  ENSG00000232732_13 (sequence is synthesized)
atttataaaacaaactgaagaagactctgaaagatagagaggagaaagcagaccacctagggacctcaggactcaaggaacaaaatggtagtgataccttgggtattctttttgcgtcat

SEQ ID NO: 919274 - DNA, 120 bp, Artificial Sequence
  ENSG00000232732_14 (sequence is synthesized)
atattgcagaattggagctgaagaagccagcaactcagaaatgccactaggcatagaccaaaaacagaaagaaaaagaaaatcctcaaaaagagcttgtaagccaggcacagtggctcct

SEQ ID NO: 919275 - DNA, 120 bp, Artificial Sequence
  ENSG00000232732_15 (sequence is synthesized)
acccctctctttaaaatccccatgttccctccgtaaactgggcagtgccaattgttggaaagaattctggcactcttttccttcttagcatggataaaaagattcaccctctttttatca

SEQ ID NO: 919276 - DNA, 120 bp, Artificial Sequence
  ENSG00000232732_16 (sequence is synthesized)
caaagttctacagatggctttcaaaggaatttgaattagacatcatttgatgttgcaaaaaacaatgacatcttttatagctctaaacatcagtttttaaattagagattgatctataaa

SEQ ID NO: 919277 - DNA, 120 bp, Artificial Sequence
  ENSG00000232732_17 (sequence is synthesized)
cacaaatgaagtatctataaggagcagcagagtcaagggtcttcatgttgcagaactcacggagttggattctatgtgaattgtaaatcgggtacaaggtgcataatgccctatttacct

SEQ ID NO: 919278 - DNA, 120 bp, Artificial Sequence
  ENSG00000232732_18 (sequence is synthesized)
ggtcttggaagtaacatctaattttgactgaggtatcatctctaaccagtgatctataaagcagtttgggatctctagcctgcccgtgatcatatatatatatacacacacacacataaa

SEQ ID NO: 919279 - DNA, 120 bp, Artificial Sequence
  ENSG00000232732_19 (sequence is synthesized)
catatataacatatatataaacatatatatgcatgtatgtgccccatagttaggtaagtcaatttacaatgatgaagtaaatcgaattcataataataacggttaggtttagtgataaat

SEQ ID NO: 919280 - DNA, 120 bp, Artificial Sequence
  ENSG00000232732_20 (sequence is synthesized)
atcgaattcataataataacggttaggtttagtgataaattttgtaattactgctgttatgtttgtggattttttttctttctttgagacacgttcttgctttgtcacccaggctggagt

SEQ ID NO: 919281 - DNA, 120 bp, Artificial Sequence
  ENSG00000232732_21 (sequence is synthesized)
atggtttaagaaaaactagttttacatttgcaacttgaatatattagatattattaaaagcaccacaattgttaagtactgcagtaccttttcatctttgaaagccctttagaacatttg

SEQ ID NO: 919282 - DNA, 120 bp, Artificial Sequence
  ENSG00000232732_22 (sequence is synthesized)
aaaactccactggcatagttgatacctttctggctgtcttttcccactccccattgggagcacctaccataatattgatagagtcaggagacagggaaattcttagcagaagagggtggg

SEQ ID NO: 919283 - DNA, 120 bp, Artificial Sequence
  ENSG00000232732_23 (sequence is synthesized)
tatctggtgagggccccactctcaagcctggaacctggcccaaagtgtgaacatgcattcctgttttcctgctcaaatgttgccttttccaaaaccacccatggcctgccccacccccat

SEQ ID NO: 919284 - DNA, 120 bp, Artificial Sequence
  ENSG00000232732_24 (sequence is synthesized)
ggttaaaaacaagtagaggttagttatacaataattagtatataatgacatttaggcaacctgacgtcactctgttttgccaattgcaaacatgttactttccattgttagatagaggat

SEQ ID NO: 919285 - DNA, 120 bp, Artificial Sequence
  ENSG00000232732_25 (sequence is synthesized)
tgctgaaatgttatctaaaagtccaaacatgtacatgaattgcaaatgcagcttttgatttgtggtcttgtttttagcttgaccttataatgaaatctatttttatttttaagtttattt

SEQ ID NO: 919286 - DNA, 77 bp, Artificial Sequence
  ENSG00000232732_26 (sequence is synthesized)
ccccagattcaagcgattcacttgcctcagcctccctagtagctgagatcacaggcatgtgccaccacgcccggcta

SEQ ID NO: 919287 - DNA, 120 bp, Artificial Sequence
  ENSG00000232732_27 (sequence is synthesized)
gggattacaggcaggagccaccatgccctgccttaatgaaatctattcttattgaagagagtggagaatgtgttttataaggaaaattgtagcaaatattaaatgccacaaagttgtctc

SEQ ID NO: 919288 - DNA, 120 bp, Artificial Sequence
  ENSG00000232732_28 (sequence is synthesized)
cacaaagttgtctcagtatcgctaagataattaaggtctttgagaaatacaagtaagaatttaaagagtagagtaaagaaacagactaaagtaagcacaaatgtttccttacagtcaagg

SEQ ID NO: 919289 - DNA, 120 bp, Artificial Sequence
  ENSG00000232732_29 (sequence is synthesized)
gatttgtacagccctgtaggagacacctccagagaaagtaacagctctcaattgattagctgagccagaattagcttctgttacttacaactgtgagtcctgactgaaaacatatttctt

SEQ ID NO: 919290 - DNA, 120 bp, Artificial Sequence
  ENSG00000232732_30 (sequence is synthesized)
ggagctaagtttgcataatcattattcattttaagataataatatatgataggtactaaattatatagtagttttgtgtagagatttatacatattttctgattgccatcatcacatcat

SEQ ID NO: 919291 - DNA, 120 bp, Artificial Sequence
  ENSG00000232732_31 (sequence is synthesized)
ttagaaatttcattttcagaaccttggattttggacatagagctttgaaaaatattgtactttattttgagatgaaaatgtggtcattcacattttcacagacctgcgtggagcaatctg

SEQ ID NO: 919292 - DNA, 120 bp, Artificial Sequence
  ENSG00000232732_32 (sequence is synthesized)
cagggtgggggtgagatttgggagtagaggggaggtggtaatagacacacacaaaacttgttaattgctatacaagaagcatgtgctttaaaaatgacaataacaatcacaaaaccagtt

SEQ ID NO: 919293 - DNA, 120 bp, Artificial Sequence
  ENSG00000232732_33 (sequence is synthesized)
agcagagtcaagactggatttagtgacttgcttcatcaatggaatacactcaaataacattttggaatttctgagactgtcataaaaagctgaagggcttctattgggcttcctgaaatg

SEQ ID NO: 919294 - DNA, 120 bp, Artificial Sequence
  ENSG00000232732_34 (sequence is synthesized)
ctcccttttggatccctgagcagccatgtgagtttaactactctgcaggagagagtatgtgaaaaggaacctacctaagcccagcctccttgtcatccacaggaagacaccagacaaatg

SEQ ID NO: 919295 - DNA, 120 bp, Artificial Sequence
  ENSG00000232732_35 (sequence is synthesized)
gagacacctccagagaaagtaacagctctcaattgattagctgagagagcagagaagaggagaagcagctggatgtcagagactgcagtttgacgttggagaaaagcagcttgacttcag

SEQ ID NO: 919296 - DNA, 65 bp, Artificial Sequence
  ENSG00000232732_36 (sequence is synthesized)
agcactttgggattgtgaaatcatgtctctaccaaaaaaattaaaaaatcagttgggcatggtgg

SEQ ID NO: 919297 - DNA, 120 bp, Artificial Sequence
  ENSG00000232732_37 (sequence is synthesized)
actcccagctatagcaagcggcagttatggagcatgcgcagcagcaggggcggccgcagtcaagggatttgtacagccctgtaggagacacctccagagaaagtaacagctctcaattga

SEQ ID NO: 919298 - DNA, 120 bp, Artificial Sequence
  ENSG00000232732_38 (sequence is synthesized)
tataattgaggaaacaaatacaaatcacttctgcaaagtagcagagacacagatgaggaattgtaatgtttgtaaaatcaaagtggtgggagtagtcaaaaaagtgtttacagaatggta

SEQ ID NO: 919299 - DNA, 120 bp, Artificial Sequence
  ENSG00000232732_39 (sequence is synthesized)
aggagacacctccagagaaagtaacagctctcaattgattagctgaggtccttattttttcaggtctcaatttgcacctgtctaaagtctttcctgacttttctatttaaggaagacacc

SEQ ID NO: 919300 - DNA, 120 bp, Artificial Sequence
  ENSG00000232732_40 (sequence is synthesized)
cagccctgtaggagacacctccagagaaagtaacagctctcaattgattagctgagatttgtactttttgtttctgtgcatgtttttgtatgtgcaatctcacaattacctgatggacaa

SEQ ID NO: 919301 - DNA, 120 bp, Artificial Sequence
  ENSG00000232732_41 (sequence is synthesized)
ggggaagagccggcgaagagcaaagagataatacagtactcccagctatagcaagcggcagttatggagcatgcgcagcagcaggggcggccgcaggtcgccgttcaataatactcaagg

SEQ ID NO: 919302 - DNA, 120 bp, Artificial Sequence
  ENSG00000232732_42 (sequence is synthesized)
atagcctcagaatgtgctgtgaacctccactgccttccctttcccactttatgctcctatgccttatgcatatttattaacccaaatgcttgttaacgcacaccatgctcacttacctgg

SEQ ID NO: 919303 - DNA, 120 bp, Artificial Sequence
  ENSG00000232732_43 (sequence is synthesized)
aagacaattcagggctagtaacatcctttctgagccccagctttcccttcactaaaatagagttaaatatctatttttgtgagcattaagtaatgtgatttaaagcatctgacacttagc

SEQ ID NO: 919304 - DNA, 120 bp, Artificial Sequence
  ENSG00000232732_44 (sequence is synthesized)
atatactcttaactaaaattgattttctcctgtagtaaacattttcatattttctggtagctcaggatgttttgaatatatttgctatgtttagggaatttccaatcttaatataagtgt

SEQ ID NO: 919305 - DNA, 120 bp, Artificial Sequence
  ENSG00000232732_45 (sequence is synthesized)
tgcttccccaaggtaagctctgaaaatttttccagactctcaaagctagggccagcacgcctgcagaagactgatttggaagttagcagcttgagaaaggaaaaattctgctttgaaaac

SEQ ID NO: 919306 - DNA, 120 bp, Artificial Sequence
  ENSG00000232732_46 (sequence is synthesized)
atttgctgataaaggcatatgacatttgggatggcagtgcttgcaaggccacaactagtgcagtagtggccttgctgggcagtgggagtggcagcagttacatttagtgtttggtagggc

SEQ ID NO: 919307 - DNA, 120 bp, Artificial Sequence
  ENSG00000232732_47 (sequence is synthesized)
attaataagttgtggcggtgactttgtcattggaccagttttatgggatagttttaagcattgttcctggaagcctaattccatacctgttcctctagcctcccattgattctctgagtc

SEQ ID NO: 919308 - DNA, 120 bp, Artificial Sequence
  ENSG00000232732_48 (sequence is synthesized)
ttcccatctccttttaacaaattcttttctgctcactcagccagaattagcttctgttacttacaactgtgagtcctgactgaaaacatatttcttcctttgaagaactgttacctgtaa

SEQ ID NO: 919309 - DNA, 120 bp, Artificial Sequence
  ENSG00000232732_49 (sequence is synthesized)
acctcactcttgttattttggcttctttctacaagtggtgagcaaccgggccccctttgctggttatagtatgaactattttattttttttaatctacaataaaataaaatacattcatt

SEQ ID NO: 919310 - DNA, 120 bp, Artificial Sequence
  ENSG00000232732_50 (sequence is synthesized)
ggaaggaatctgagaaaggctaatttacaatggaaaggacagcattaaaaggcacaaactccaatatctacaggggccaggtctatattataaatagtaaaattggccacaaataaacaa

SEQ ID NO: 919311 - DNA, 120 bp, Artificial Sequence
  ENSG00000232732_51 (sequence is synthesized)
tagggaatgtaaacactggcaaactagagagatgtcatatttgaagaaggcagtcactattcactgctagccagttgtaaaatgaaggcaacattttgccaaaccttcaaacttgttaag

SEQ ID NO: 919312 - DNA, 120 bp, Artificial Sequence
  ENSG00000232732_52 (sequence is synthesized)
agatttctcgacacaaatcagatacagatttttatgtttcatttgccaacttgtaaatgttgacaactaattaaatttgcttgtaaaacaccgtattaaattaaatgcacacataggcca

SEQ ID NO: 919313 - DNA, 120 bp, Artificial Sequence
  ENSG00000235503_0 (sequence is synthesized)
gtactacaagtagactctctgggctgaacattgagtgaggggcatagacagatattagagtaacttactaccagagattttgggggttgagtcatcaagatcttgagagaaaatgtttgg

SEQ ID NO: 919314 - DNA, 120 bp, Artificial Sequence
  ENSG00000235503_1 (sequence is synthesized)
tcacggctgaccggaagacttgagtattcatgaattttggtatacatgggagccctggacctaatcccctgtgtataccaactgtatttctgaaagaataaatgcttgtattaaactaca

SEQ ID NO: 919315 - DNA, 120 bp, Artificial Sequence
  ENSG00000232739_0 (sequence is synthesized)
acagcttggttgttctcccatgggcaggaccagtgctacccggccttcctgcactccattggagaacaggagtggtacagagccactgcgatgctgagtccacagtggcaacagacacca

SEQ ID NO: 919316 - DNA, 120 bp, Artificial Sequence
  ENSG00000232739_1 (sequence is synthesized)
actggcatctccatgaaaagtcacaactgaccgcctggctgccaagatctttgagtttgaggtctggccctacaatgaaggtgctgtcactctgagtatcagttgtcaactctggcaaaa

SEQ ID NO: 919317 - DNA, 120 bp, Artificial Sequence
  ENSG00000232739_2 (sequence is synthesized)
tacaggggagctgtcagctaacaggaaatatggacattggggctgtctgggcaccccagtttgctcctgtagagtgtggaatacactggcactgtaatattagaatggaaagaacttctg

SEQ ID NO: 919318 - DNA, 120 bp, Artificial Sequence
  ENSG00000232739_3 (sequence is synthesized)
tatttttggtttgtggggatataagtttctgttgcaatgattcaaccctgcgttgtagtgcaaaagcactcacagacaatatgccagcagatgggcctggcaaggttccagtgaaacttt

SEQ ID NO: 919319 - DNA, 120 bp, Artificial Sequence
  ENSG00000232739_4 (sequence is synthesized)
atttagggatgcttacgtataaatttcatgtaattttcgacccatgagatattctccttttgattcatttcccccatatttattgacgtacagttgaaaaacaaaaattttatgtactta

SEQ ID NO: 919320 - DNA, 120 bp, Artificial Sequence
  ENSG00000232739_5 (sequence is synthesized)
agatgtctgacctgatgttttgatatatacatcaagctaattaacatatccatcactttacagttaccattgttttttcatcttctttctcttggtggtgagaacactttgaatccaccc

SEQ ID NO: 919321 - DNA, 120 bp, Artificial Sequence
  ENSG00000232738_0 (sequence is synthesized)
ggtttacactctgggtgacattaaggaacttctcaaggattccatcctacatgatggaagaacaggaagaataaacagcattccatgggcacagcaaatccacctgtcagtcaccaccca

SEQ ID NO: 919322 - DNA, 120 bp, Artificial Sequence
  ENSG00000232738_1 (sequence is synthesized)
ggagacctacacaagttttgtgcttccttttattactggagatgaaaacatgacccagcctcctttaggagtctctgcaagcaaggccgactcatctgagtcgtgaccgctatttcttcc

SEQ ID NO: 919323 - DNA, 120 bp, Artificial Sequence
  ENSG00000232738_2 (sequence is synthesized)
ctcagctggaaatccaaatgtgattggtacactctaagagtaccgttctaaagacacaggcacctccgtcttttcagagaaatgttgtatttttaatcaagtgaacgttttaattactaa

SEQ ID NO: 919324 - DNA, 78 bp, Artificial Sequence
  ENSG00000274159_0 (sequence is synthesized)
gaggtctaagagtgaaactcggtctcaaaaaaatgaatagataaataaataacttttctagattcaggcaagttggac

SEQ ID NO: 919325 - DNA, 120 bp, Artificial Sequence
  ENSG00000274159_1 (sequence is synthesized)
ataaataacttttctagattcaggcaagttggacaagaatagaaagtctttataccacagaaatgtataggggaaataatgaaaaggttagctttgcttcctgcatcagctaattgaagt

SEQ ID NO: 919326 - DNA, 120 bp, Artificial Sequence
  ENSG00000274159_2 (sequence is synthesized)
tcgtcagtgctttgaatgtgtcttctgcaactctagaatgctccttctagtataaagttctaagattttgttaccttcaaactgtgaattgagtctattcaataaaatatgtaaataata

SEQ ID NO: 919327 - DNA, 120 bp, Artificial Sequence
  ENSG00000265474_0 (sequence is synthesized)
cctgcacaggacgcttcctttgaagaggcagccaatcagcctgctcaatcccaggctgtccctggggctctgcttcctttcccctggtggagggatactggccctcagccacaggtctgg

SEQ ID NO: 919328 - DNA, 120 bp, Artificial Sequence
  ENSG00000265474_1 (sequence is synthesized)
cttgccaccggaaggggagggaacacttcttgcgggcacagagcagctctgtgcacccctacaggctgggcattgtgcatgccctccagggcaaacaggggcctcgtttgcaaactggcc

SEQ ID NO: 919329 - DNA, 120 bp, Artificial Sequence
  ENSG00000265474_2 (sequence is synthesized)
ccaaggcttttggttgacactggccctgagcccactggctgccagcagctccggcctccaagggcaacagactgtgcttgggcttcttcctggcagtgtggactcaccttggcatagtcc

SEQ ID NO: 919330 - DNA, 120 bp, Artificial Sequence
  ENSG00000265474_3 (sequence is synthesized)
agaggaagctggtcctcagggcacttgaagactccttcactgaaatgggggaggggcaggaaaaaggtttctcattaggggaaagggagtgggagaggaagaggggatttccgggagggg

SEQ ID NO: 919331 - DNA, 120 bp, Artificial Sequence
  ENSG00000265477_0 (sequence is synthesized)
ggagcttcctgcacataaaagtctggaatttcatagcaatgtgggggcaaaagctatgatagcatttccccctttctaaattatatactgcttagtgttaatgtgagcagagggctggat

SEQ ID NO: 919332 - DNA, 120 bp, Artificial Sequence
  ENSG00000265477_1 (sequence is synthesized)
tggaaggagcaagagactgtcttctaggatgagagagatgagagagatggcattaaagcttgacatcagatgagcccttcagctctctcaacctgcataattctcttttgggaaggagag

SEQ ID NO: 919333 - DNA, 120 bp, Artificial Sequence
  ENSG00000265477_2 (sequence is synthesized)
agagactggtctccaagcacttcttacacctcctctgaaccaggaaccatatcagcacattctgactgagttaaccttaattgtaaaagactgggaaaaaaaaacaaaacaaaaaaaaac

SEQ ID NO: 919334 - DNA, 120 bp, Artificial Sequence
  ENSG00000265478_0 (sequence is synthesized)
cacccaacacaaccccaaatcctttaaaaagcccttcccagcaccctcatactgaggcaccccatggttccccatggtgtgtgatctctcttgtgtaaaagtgtgctgataaacccaact

SEQ ID NO: 919335 - DNA, 120 bp, Artificial Sequence
  ENSG00000265478_1 (sequence is synthesized)
cgattcaactgcagatctgttcctcatgatctctgacgggtggacattgacaataattttttgagcttagattataactccattttatatttttgttgtagatctgcagtacttgatttg

SEQ ID NO: 919336 - DNA, 120 bp, Artificial Sequence
  ENSG00000265478_2 (sequence is synthesized)
ctcaaaaatgcaattaccagttaagtgagggaaggtcgtagtctttgttcagtacgtaaccaagagttttctatcattttaaaaactgtcactagtggcaacattgctcatggcatttga

SEQ ID NO: 919337 - DNA, 120 bp, Artificial Sequence
  ENSG00000265478_3 (sequence is synthesized)
gttccaggtcaaaactactgcagtagtctgcatttgtagtgggcacattaatggtaattatatgtacatgtgcaagcatctaatgattgtgtcatcaggagttttggccatctccagttt

SEQ ID NO: 919338 - DNA, 120 bp, Artificial Sequence
  ENSG00000265478_4 (sequence is synthesized)
tccttttatttgtctgttacattacagttagatattaaagatacctttaatcatgatagatgatttaaaaatatgcctcacgtaagttatattgtttgtgttttagaataataaaacatg

SEQ ID NO: 919339 - DNA, 120 bp, Artificial Sequence
  ENSG00000265478_5 (sequence is synthesized)
tttaaaaatatttctgataaaaagtggctgtgggcctgaaggggtgaaaaccattagtctacagtcattgatgaacagtctgtcccttaggccctcttagttggagctgaagagtgtata

SEQ ID NO: 919340 - DNA, 120 bp, Artificial Sequence
  ENSG00000265478_6 (sequence is synthesized)
gatacgaacttgaactctggtgttctaatattctgtgttgcttactgaaggtagatgccatgtgctttggaaaccagcatggacattctatgaaatttgagaagagaagcagttttctca

SEQ ID NO: 919341 - DNA, 120 bp, Artificial Sequence
  ENSG00000265478_7 (sequence is synthesized)
tttagatggtctatcatgggtggtaatatctagtgttctaagtgaatgtagtagatgctgcttatattaatttaagagaaatcctatatatcccattaaaaaaaatcgtagagaaacatt

SEQ ID NO: 919342 - DNA, 120 bp, Artificial Sequence
  ENSG00000274156_0 (sequence is synthesized)
tttcctagttcacatatatgttaccatgtagttctctgcaggttcccaagatggtttcctttagaaacaaaataataccttgcacattgctggttcattatttactttgccctttgttca

SEQ ID NO: 919343 - DNA, 120 bp, Artificial Sequence
  ENSG00000274156_1 (sequence is synthesized)
ggtgacctctgctccgtttctctggcactgggattaaccagtggctccacagttcaacagggaattctttttattttttaatgtagcctaatgcttctggttttaaatattgagagagtt

SEQ ID NO: 919344 - DNA, 120 bp, Artificial Sequence
  ENSG00000274156_2 (sequence is synthesized)
ggtttgctatgattcatcagacttttaattactttaacagataaacaagaatttcagttatgttaagttctgtgttttctaaaccaagacgaaaggggaaggcttatggtacgatcaaga

SEQ ID NO: 919345 - DNA, 120 bp, Artificial Sequence
  ENSG00000274156_3 (sequence is synthesized)
gtacaaaaggaactattaggcaatgtctgctttactttctattcaagtttgaactatgtaggaattcagatgaaacaatttgaatattagaacacttgggaataaaaaatgtttcagaat

SEQ ID NO: 919346 - DNA, 120 bp, Artificial Sequence
  ENSG00000269155_0 (sequence is synthesized)
gaacaaagggagccgacagctccacaacactcagcccatggggactgcagcaggtgagtctccacccagcctccctcctttggaccaacacgaactccggagacgtctgggtgcagctgc

SEQ ID NO: 919347 - DNA, 120 bp, Artificial Sequence
  ENSG00000269155_1 (sequence is synthesized)
ctcaggccctgctgtcttcaacggggactgaggttgcagtttagctggctttcctgttcctgcttccccgggtccccctcaaagaagccgcctgcaccccgtgccacctcactctggcat

SEQ ID NO: 919348 - DNA, 120 bp, Artificial Sequence
  ENSG00000269155_2 (sequence is synthesized)
agccctacttctccaaaccaccaggcctgccctcccttgtccacgcagatctgacaatctccacagtgctgtgcagacttcagctccaagaagttgcaagtgatggagataaaatccctt

SEQ ID NO: 919349 - DNA, 120 bp, Artificial Sequence
  ENSG00000269155_3 (sequence is synthesized)
cctgagagagtcatgaaccgtggcctgtttgaggtcaaaagaagaaatgagaacaaagccaagccaaggcttcggagtgagccctgagacacctctcagctggccgggtggccagagatc

SEQ ID NO: 919350 - DNA, 120 bp, Artificial Sequence
  ENSG00000269155_4 (sequence is synthesized)
caccctgcaggagccgccccgaggcaggtgggccacatctcccaacaagcggcacacaagaaggcccctcgcaagaggaggcatctgtggtcttcccagagcaaaggcagcagccccggg

SEQ ID NO: 919351 - DNA, 120 bp, Artificial Sequence
  ENSG00000269155_5 (sequence is synthesized)
agcccagccagtcactggccacctgcacgcctctacacagcagacctggccaggcgggcagtgcccctggccccttgcgaatagaacgttgtggaacaggcggaacctgggcagctgtcc

SEQ ID NO: 919352 - DNA, 120 bp, Artificial Sequence
  ENSG00000269155_6 (sequence is synthesized)
tgcactctggccagccagtccgtggatgctcctgccaggcaggactgagccactgccagtctggccggtgccagccttttctcagatccagccacgccctctctggatacggtctggaca

SEQ ID NO: 919353 - DNA, 120 bp, Artificial Sequence
  ENSG00000269155_7 (sequence is synthesized)
ccggcagaccaagcaggcagttgcctccctggctggctctgacctcctgcagcacaaggagaggatgcactgcactgccaggcctctgggcaccgagggccgctgctccgccgtttcttt

SEQ ID NO: 919354 - DNA, 120 bp, Artificial Sequence
  ENSG00000269155_8 (sequence is synthesized)
ctgctaccgctaattcaaaacagggcagggagcagctaggcagcagctgggagagctgcgggctcctccacccggttgctggtgggctccatccggccgcaccgcccgcacctgctcacc

SEQ ID NO: 919355 - DNA, 120 bp, Artificial Sequence
  ENSG00000269155_9 (sequence is synthesized)
tccagctgcctcggccccagcggcacggacggactcaacggcgaccaccgcggcagctccccggggactcctcgcaggtcagctgagctttgctttcagtcggcgtgcacggttcccaaa

SEQ ID NO: 919356 - DNA, 120 bp, Artificial Sequence
  ENSG00000269155_10 (sequence is synthesized)
cgtcggtggtgatttttgtaagtgaggtgggggtcaccacaggaagagaggggaggcaaacctcccttcccgctgtgtcccgcctttcctcctggcggttgcgtttccacgtgtcctgcc

SEQ ID NO: 919357 - DNA, 120 bp, Artificial Sequence
  ENSG00000269155_11 (sequence is synthesized)
gtggtgccattgcccccggcctagcttctgtttgatcattagtttcaattcaagaaaacgttcttttgagggaattttaaaaatgaatcacgtgcacctcttaagaaaaccgagtgtcac

SEQ ID NO: 919358 - DNA, 120 bp, Artificial Sequence
  ENSG00000269155_12 (sequence is synthesized)
aatcgttgttaccacgcaggtgagaggagaggagggaggacgggaaagggaaggggcatgagaaaggcggatgggactgagcttctacggctccctggccgcggcgcacgcgctggccct

SEQ ID NO: 919359 - DNA, 120 bp, Artificial Sequence
  ENSG00000269155_13 (sequence is synthesized)
ccccgtccacagcagcagcggcatcctccccaccctacagcgaggaggtggacgttgccccgaggggaggagcgtgtcagggtggcttccaggtgcaggttctcgcgcaggcctcagcct

SEQ ID NO: 919360 - DNA, 120 bp, Artificial Sequence
  ENSG00000269155_14 (sequence is synthesized)
tcataggtgcattccgctctagaacattcctgttcatgcgtggtcgtcgctcactggtggccgcttaggtgcacttctcaatggcagtgcccagcacggagcaatgcctcggagtggcag

SEQ ID NO: 919361 - DNA, 120 bp, Artificial Sequence
  ENSG00000269155_15 (sequence is synthesized)
tttcttcagtacggtccccacggcctctcccaaggcggaggatgctgccgccaaggaaactggctcaccacggacgctggtgagctatggagctatcagtgaggtgtggatttctcaggc

SEQ ID NO: 919362 - DNA, 120 bp, Artificial Sequence
  ENSG00000269155_16 (sequence is synthesized)
ctctggcgggagccggagtaaaggccctgagtgtctagaccagccagagtgtctgcgtgtaggtcagcaaatgtgggcaaatgtctaggcggtggtgtcctgcagggagccgaaggcccg

SEQ ID NO: 919363 - DNA, 77 bp, Artificial Sequence
  ENSG00000269155_17 (sequence is synthesized)
atgtctaggcggtggtgtcctgcagggagccgaaggcccgtgggggacgtgaccaactcagcattccgctggaggct

SEQ ID NO: 919364 - DNA, 120 bp, Artificial Sequence
  ENSG00000269155_18 (sequence is synthesized)
cactccctagctccgggctccttaaagttatctgcctaaaaaatctagtgcctattgtccaaaaaatgcaagactactgtgaaccaaacggcagactgacaatcacccccctcccccagc

SEQ ID NO: 919365 - DNA, 120 bp, Artificial Sequence
  ENSG00000269155_19 (sequence is synthesized)
gtgtaaagctcagggcccttgtccactaaaggcaaggtgcccctaaccccttcttccaaatatactctgttgtctcttgtcttttattcccgtgttgcccgcctttgttcagtccagtag

SEQ ID NO: 919366 - DNA, 120 bp, Artificial Sequence
  ENSG00000269155_20 (sequence is synthesized)
cttttattcccgtgttgcccgcctttgttcagtccagtaggtccccaacaatgtcctgagggtatgaatcctgaaagactactctccatgaagcaggtatttaccaggttagtgcatgtt

SEQ ID NO: 919367 - DNA, 120 bp, Artificial Sequence
  ENSG00000269155_21 (sequence is synthesized)
tcctgggtattaagggaaaacagtaaaatgttctgtacgggggtcccggttctgtgtcgcacgagaagagtgtgtgtctttttacttttttaatatggctcaataaaattttaaatcaca

SEQ ID NO: 919368 - DNA, 120 bp, Artificial Sequence
  ENSG00000269151_0 (sequence is synthesized)
agccccagcctagccccaccatggggctataggaggggaggcgcaggctgtgcccccagccccagctgctccacctccttcctctctgtccagggagcagaccctctggccagcccctga

SEQ ID NO: 919369 - DNA, 120 bp, Artificial Sequence
  ENSG00000223554_0 (sequence is synthesized)
aagaagctcccaggtgaagactctcctgctggtccagatttttattcaatacttctggtgttcaactaaagaaactattttaattagcacgtggatgaatgagacttcttgtgaatctac

SEQ ID NO: 919370 - DNA, 120 bp, Artificial Sequence
  ENSG00000223554_1 (sequence is synthesized)
ggaggcatctgacaactcctctgcaggtggtgattcttgcaaatgagatgttactaatttgaaccaattggagggactgtaattgagattctattagtgatctgcccacaaactgaatga

SEQ ID NO: 919371 - DNA, 120 bp, Artificial Sequence
  ENSG00000223552_0 (sequence is synthesized)
gtaggtaacaggtaccagctactgtcagcagggaggaaggtatgtggtgaccacgagtccagacctgagggtcctgaccctctaatgcggcctctcaccagtgttcgcagaaacccaccc

SEQ ID NO: 919372 - DNA, 120 bp, Artificial Sequence
  ENSG00000223552_1 (sequence is synthesized)
tctcaccagtgttcgcagaaacccacccgctgattcaatacggggaccaggaacctgccatgacagtcacgactcagtctgcctgcacctacatgattaaaaagctttattgctcacaca

SEQ ID NO: 919373 - DNA, 87 bp, Artificial Sequence
  ENSG00000223552_2 (sequence is synthesized)
tacgacctcaggtcctcaccgggcttccctcttgtctggaggaaaaagaaaaaagagaaccagacttagacacaacttcttgtgggc

SEQ ID NO: 919374 - DNA, 120 bp, Artificial Sequence
  ENSG00000223552_3 (sequence is synthesized)
gaaaaaagagaaccagacttagacacaacttcttgtgggcacatattcagaaggcatctcactggagagggtttagttctccttagcagaagataagatttcaagatttcagctaagact

SEQ ID NO: 919375 - DNA, 120 bp, Artificial Sequence
  ENSG00000223552_4 (sequence is synthesized)
catctctctgcaaatctttcttttgagagcatcttcaccaggaggagattccatctcaagagaccactttcactgctcatatgtaagaagcaactcttcatctgttcaagtttgatcatg

SEQ ID NO: 919376 - DNA, 120 bp, Artificial Sequence
  ENSG00000237476_0 (sequence is synthesized)
atgtaccgcgtgacgtgagagcggagcccgggtctgcccgggcgcgggcccgcggccacggcgtttggatcccagatcccagcccccgcgctcagtccgggcttcctgaccggcgctctc

SEQ ID NO: 919377 - DNA, 120 bp, Artificial Sequence
  ENSG00000237476_1 (sequence is synthesized)
cgcgtcccttctcgcgcgcccttacctggggctggggaggtggggacagagccgggcgcagtcgggggcacagccctgaggcggggctgagggccaggccgccacgtccctggaccctga

SEQ ID NO: 919378 - DNA, 120 bp, Artificial Sequence
  ENSG00000237476_2 (sequence is synthesized)
ccagacctttactcatgtccccgcatcgccaggccgagctgcaccttcggtccccgcccgcggcagccgaggagaggagagcaaggcccagaccggggaggaacccacacagcctctgtg

SEQ ID NO: 919379 - DNA, 120 bp, Artificial Sequence
  ENSG00000237476_3 (sequence is synthesized)
ctccagcctgcttgaaagacaaggtctacctacaacgcagagatgcacacattaaggacaatgaaacacccaagtgttaggaaccagaataatcagccctaatagaggggaggctgatca

SEQ ID NO: 919380 - DNA, 120 bp, Artificial Sequence
  ENSG00000237476_4 (sequence is synthesized)
gggagggcctcctggaggaggaggcacaacatcagggtgcactgtgatttctggagacccaaggagttctggtaaatgacaggtgagaaaaagaaaatgtaataaaatataattgaaaac

SEQ ID NO: 919381 - DNA, 120 bp, Artificial Sequence
  ENSG00000224687_0 (sequence is synthesized)
ctgctgctcaaagtaaagaccgtttgagaaggcggggagatcgaagaagctgctttatcttacagtcacccaagggggagcgccttcttccttcccagagtggagtggcagtgggtccgg

SEQ ID NO: 919382 - DNA, 120 bp, Artificial Sequence
  ENSG00000224687_1 (sequence is synthesized)
tcattggtttgcaacagcatggtgaagaagtgtggtgtggatggacggacgggcctctcaggcacatgaaatactcaaagcccagtattaaccaaacatgtttctctgttttgtctttga

SEQ ID NO: 919383 - DNA, 120 bp, Artificial Sequence
  ENSG00000224687_2 (sequence is synthesized)
gcctgaggaggggtagggggcggtggccccgggttctagcccgcctgtcctcggcccccacttctggaatgagcctgcccgccccctgactctcaggccacagctccggccacagctctg

SEQ ID NO: 919384 - DNA, 120 bp, Artificial Sequence
  ENSG00000224687_3 (sequence is synthesized)
cggcggatcccacaaacccggcagccacggcggtggcggtggcggtggcggtggcggtggcggcggcggcggcggcggcagcggcaggcggcatcccagggtgataggctgaagcaatcg

SEQ ID NO: 919385 - DNA, 120 bp, Artificial Sequence
  ENSG00000224687_4 (sequence is synthesized)
ctgaagcaatcgagggccgagagcccggccgcgtgtgcactcgagtaacgaagccggggagggactgcgccgcaggcaggaaaagtcggacaccgaattattcatccggcctgtcccgcc

SEQ ID NO: 919386 - DNA, 120 bp, Artificial Sequence
  ENSG00000224687_5 (sequence is synthesized)
tgatgtcacttgtattttatttttggtttatttgtagactgtctccctccttggccatggctttacttttatgtccacccaaggagagtttcaccagtttaggtttaagaaattactgac

SEQ ID NO: 919387 - DNA, 120 bp, Artificial Sequence
  ENSG00000224687_6 (sequence is synthesized)
aagttaacaataataatttcaaaattgaacagtaataacttaaaccgtgccttggacatagtagatctccaacagtttttcttgaatgtggctacctaatgtggaacaagatttttcata

SEQ ID NO: 919388 - DNA, 120 bp, Artificial Sequence
  ENSG00000224687_7 (sequence is synthesized)
attacatgttgctatttttaataccttttgggaggttctttagtcccccccgccctttctccctacgttgcacaaagagactggtctacaaggggtcctgttagttttctggttttgtgg

SEQ ID NO: 919389 - DNA, 120 bp, Artificial Sequence
  ENSG00000224687_8 (sequence is synthesized)
tgtgagtttctccaaagtcttatttagagtaatagtatttcaaagcaagaagtgttttagagagaacatcattctgcctcttgtttaacaggtgaggaaactgaggaaaaaccagcttac

SEQ ID NO: 919390 - DNA, 120 bp, Artificial Sequence
  ENSG00000224687_9 (sequence is synthesized)
ctggctaatcaaccacaagtacagatagttccacaatgactcaatggatattacttcaactttgttccctcaagaaacttttgtgattaagcttgttgatttgtggcttgatggtttaca

SEQ ID NO: 919391 - DNA, 120 bp, Artificial Sequence
  ENSG00000224687_10 (sequence is synthesized)
ggaatggtcatttttaatatctaggaccctgcttgcttgcttgcttgcttgcttactagactggctgcatagtcagtcttccacgtgtaaacaacagtgtgtgctttagtggataagaga

SEQ ID NO: 919392 - DNA, 120 bp, Artificial Sequence
  ENSG00000224687_11 (sequence is synthesized)
tgttgagtgctgagatttcaaggctcagcactgagtagacctagagcatttttatttatactaaattaatgccatggtaacataagttagacagcaagtgaatatggcatcaaatgtaca

SEQ ID NO: 919393 - DNA, 120 bp, Artificial Sequence
  ENSG00000224687_12 (sequence is synthesized)
aagttgagtatctctttactagtcaatgtataaggaatttatttacccaagcaattatcttaaaaacagcattacaagtggtatgcgaaacatttccagaatttatttccacatctgctc

SEQ ID NO: 919394 - DNA, 120 bp, Artificial Sequence
  ENSG00000224687_13 (sequence is synthesized)
ccacatctgctctttcagtggcatcatccattcctgagctcaagaaaaggcctctgccaaccgccagtaatcctgcttttttagtaatcctactattttttttttaactttaagttctgg

SEQ ID NO: 919395 - DNA, 90 bp, Artificial Sequence
  ENSG00000224687_14 (sequence is synthesized)
aggtttgttacataggtatacatgtgcctatgtatacctatgtaacatggtggttacagtaaacatggtggtttactgcattgcattcat

SEQ ID NO: 919396 - DNA, 83 bp, Artificial Sequence
  ENSG00000224687_15 (sequence is synthesized)
ctaggttttaagccctgcattccccacgccccgacaggccccagtatgtgatattaccctccctgtgtccatgtgttctcatc

SEQ ID NO: 919397 - DNA, 87 bp, Artificial Sequence
  ENSG00000224687_16 (sequence is synthesized)
tgtgttctcatcgttcaactcccacttataagtgagaatatgcagagtttggttttctgttgtgttactttgcttagaatgatggct

SEQ ID NO: 919398 - DNA, 61 bp, Artificial Sequence
  ENSG00000224687_17 (sequence is synthesized)
tcctgactttttaataatcaccattctcactggcactttttttcatatgtttattggctgc

SEQ ID NO: 919399 - DNA, 73 bp, Artificial Sequence
  ENSG00000224687_18 (sequence is synthesized)
gtttttttcttgtaaatttgtctaagttccttgtagattctggacattagacctttgtcggatgggtagattg

SEQ ID NO: 919400 - DNA, 68 bp, Artificial Sequence
  ENSG00000224687_19 (sequence is synthesized)
tttcaataatcctactttttaaatccaaacgttccagatactggtccctgcttcacctccctatcctg

SEQ ID NO: 919401 - DNA, 120 bp, Artificial Sequence
  ENSG00000224687_20 (sequence is synthesized)
acgttccagatactggtccctgcttcacctccctatcctgaccccagactagcagcaggtcattatctaattgcctaagtaatagtatgtctgaaatttatctagtgttcataacttaaa

SEQ ID NO: 919402 - DNA, 120 bp, Artificial Sequence
  ENSG00000266036_0 (sequence is synthesized)
gttcggacccttctccaggcagcagagccggggcaggggcgccccggccgctgcgtccgcgctcatctcgccctgcgacgggtcagcggcgcgacttggggttccgatggggacgggacg

SEQ ID NO: 919403 - DNA, 120 bp, Artificial Sequence
  ENSG00000266036_1 (sequence is synthesized)
ggacggcccagcccttcttcccgtccagcgaaccgggagcgcagcagagaagccctgagccgccggacgggccaagcaagcaggtgtcccaggaaccgtcggccgccgcgagccgcgagg

SEQ ID NO: 919404 - DNA, 120 bp, Artificial Sequence
  ENSG00000266036_2 (sequence is synthesized)
ggggccgcgctgaggaaaaatgattaggactgtaaagccttctagctccctcttgccaaagagaggctggtcacagaggcgggagacagtctgttgagcggggagctgaccatctgagga

SEQ ID NO: 919405 - DNA, 120 bp, Artificial Sequence
  ENSG00000266036_3 (sequence is synthesized)
cagacactgaggaaggaggatggaatgattttggcagtgaatgacaattccttcaacaagaccccccccccccactcacttcaaagaaacagtggacaggatgtgctttccaaaatactg

SEQ ID NO: 919406 - DNA, 120 bp, Artificial Sequence
  ENSG00000261382_0 (sequence is synthesized)
atctcctagaatcttggtgggcctgtgactacaaggaccagaagaatatggtagaagtggtttcagttctggaatcaaccctcaaccagtcaggtggcttctgcttccttttttggacca

SEQ ID NO: 919407 - DNA, 120 bp, Artificial Sequence
  ENSG00000261382_1 (sequence is synthesized)
ctcaattttgcgatgctccctctgagaagccagccaacatgctgtgacatgcacaaccacacggagagaccctgtggaggcactcttggcaactgccagcttcaactgtcagtcatggga

SEQ ID NO: 919408 - DNA, 120 bp, Artificial Sequence
  ENSG00000261382_2 (sequence is synthesized)
ggcaaccatcttggatgcccagcccagtggagccttcaggtgactgcatcccagccaccatctgactgcaacctcaccagcaagcccacaggagatccacctagctgagcccaatcaacc

SEQ ID NO: 919409 - DNA, 120 bp, Artificial Sequence
  ENSG00000261382_3 (sequence is synthesized)
cacagaaacatgaaagaagataaattgcggctttgagtcactgaaatttggggacatttattatggagcaatagataaccagatacccctcttctaatttgtcatgtatgtgaaccagac

SEQ ID NO: 919410 - DNA, 120 bp, Artificial Sequence
  ENSG00000261382_4 (sequence is synthesized)
cagacctggccactaagtgagtaactgtctccatgaaggaaccattagaaatgtcctgcttttctttgggtctccattttcccatctgggaaaaaagaggtagggctagatcagcagtca

SEQ ID NO: 919411 - DNA, 120 bp, Artificial Sequence
  ENSG00000261382_5 (sequence is synthesized)
cagtctagagtctatgatgggtagtcaatagttagaaacaatatttctaaaaacctgatgaaagccacacatttacatgtgatgaagccactctggctaactaaaaaccaagtttccttg

SEQ ID NO: 919412 - DNA, 120 bp, Artificial Sequence
  ENSG00000261382_6 (sequence is synthesized)
ttttgggttgaaattacatcaactccgtgtatcagcactgttccttctgctagtcagaagctggttagcagtcccagatggctttgatagctaaaaatgaaataaagaattaaatgctgc

SEQ ID NO: 919413 - DNA, 120 bp, Artificial Sequence
  ENSG00000261382_7 (sequence is synthesized)
aagatggtaatgcctgggaaacatgacctataataatgttaatagctatcacatactgaccacttactatcgactaggccatatactgtgctgagtgagtcacaagtagtggctcatctg

SEQ ID NO: 919414 - DNA, 120 bp, Artificial Sequence
  ENSG00000261382_8 (sequence is synthesized)
atccttcaaataacccatgaggtgaacactatttttttttatttgacatagaaaaactgaggcacagagaggcaaactaccatgtgtaaagctatacaactaggaaacaacggaaatgac

SEQ ID NO: 919415 - DNA, 120 bp, Artificial Sequence
  ENSG00000261382_9 (sequence is synthesized)
agagccaggattaaaacccatcagattataaagcctacatagtactaccttttaaaagtatatatttgtatctaactcaaattaaatgtcccctaaaattgttccttccacctttcctcc

SEQ ID NO: 919416 - DNA, 120 bp, Artificial Sequence
  ENSG00000261382_10 (sequence is synthesized)
ttataaataatatgtgtcgagaagactgttggcgtttgaatagtagtccaggccttggtcatggcatgaagaagtgagactgtgtgtttcacaggactggccaacatcactggagaatga

SEQ ID NO: 919417 - DNA, 120 bp, Artificial Sequence
  ENSG00000261382_11 (sequence is synthesized)
gctctcacacactgccttatggggtacaaattggtagcaacccattagaaacttgtctcaacatttaataactttgaagatgtgactataccatgtcctagcaatctcattcttaggtat

SEQ ID NO: 919418 - DNA, 120 bp, Artificial Sequence
  ENSG00000261382_12 (sequence is synthesized)
atgcaccagaaaacctgatgcacatgtagcagtacttacgtggaagtttatcacagcatgttggttatagcaaaaactcagaaacaacctcaacatccatcaacaagaaaattaaaagta

SEQ ID NO: 919419 - DNA, 120 bp, Artificial Sequence
  ENSG00000261382_13 (sequence is synthesized)
actgcaaattattgtcattcaaggaattaccacattttaaaatgaatcaactagaaatgtatgtttcaacatggatgcatgtcaaaaacaatattaaaagaaaaaggtaaattgcaaaaa

SEQ ID NO: 919420 - DNA, 120 bp, Artificial Sequence
  ENSG00000261386_0 (sequence is synthesized)
taaatgatagattgtgcttcattagcagtttatatgaggcactggagtccttcccaagcttaccctcctgtatcacccaggcccagaaaagccaggccttgcagccaagccaagagcctt

SEQ ID NO: 919421 - DNA, 120 bp, Artificial Sequence
  ENSG00000261386_1 (sequence is synthesized)
ctgtccatgggagatggatggcctgaaagggacactccaggattgtctggggtggggaggggggtatggagggaaaggagggtcatgtcatatgtctggggttcagcaaattgtacccac

SEQ ID NO: 919422 - DNA, 120 bp, Artificial Sequence
  ENSG00000261386_2 (sequence is synthesized)
cgctctgtgggcgagacaaagcagcaatcctcttcccacatgccaacccatctttttctttgccttcacaaacgtgccttttttctttcttctttttttggtcctctgcagcttggaata

SEQ ID NO: 919423 - DNA, 120 bp, Artificial Sequence
  ENSG00000261386_3 (sequence is synthesized)
catgaggaagaagagtgggagacaggaggaaaggtaaggttgggagagggcaagaggaaaggaggagagtagagggaacactccatcgattgccagcacaataaactgtatcatggacta

SEQ ID NO: 919424 - DNA, 120 bp, Artificial Sequence
  ENSG00000261386_4 (sequence is synthesized)
aattacaacatcaaccctcatatttcatcgcatgggcaaattaccagtcgagtcaagaataaactcattctgccctactggcgctctagatcgagttgcacaatcctggggcagaaccgc

SEQ ID NO: 919425 - DNA, 120 bp, Artificial Sequence
  ENSG00000261386_5 (sequence is synthesized)
cttcacctagccctagagcatcaggtactaagttagtgtgaggacattttaaagcgggagggaaactcaagggacttagcccatactcccaaattcagaaatttgtcacgtcacttgaga

SEQ ID NO: 919426 - DNA, 120 bp, Artificial Sequence
  ENSG00000261386_6 (sequence is synthesized)
tcagaatgaaatttaagtttcagtccctttgagatctctgagcgcacaaagtcaggctgctatcactcggctggggagtccgaacccggctggataaaaactacttggtgcggaactcgc

SEQ ID NO: 919427 - DNA, 120 bp, Artificial Sequence
  ENSG00000261386_7 (sequence is synthesized)
ggggcggcgagcgcgcgtccccccgcccgctcaggcagcgtagaggtgcgagcagctcagccagccttgcagagggagctctcggcagctctggggtccctctgctcgcagccgctgcag

SEQ ID NO: 919428 - DNA, 120 bp, Artificial Sequence
  ENSG00000261384_0 (sequence is synthesized)
cccacacccaggatggggtctgcagcctggtgaggccgacagcagagcagtcagacccggcctccactcctcagcaccacctggtggcagacccctcctctcacctgcatagctcttgca

SEQ ID NO: 919429 - DNA, 120 bp, Artificial Sequence
  ENSG00000261384_1 (sequence is synthesized)
ctccgaagctgtgtgaccttggataaatcactccacctctctgctcctgtctcctcattgttaagtagagggaacactgtcaccctgtccacctcttgagactatggggaggattaacaa

SEQ ID NO: 919430 - DNA, 120 bp, Artificial Sequence
  ENSG00000261384_2 (sequence is synthesized)
gagaatgaggggcaatgtgttggaaactgtaaagggctgtccactttgcaggagacttaatagtcactgtgttcctggggccctgcgatcaaggcggagaataaaaaggaagcaaaaatc

SEQ ID NO: 919431 - DNA, 120 bp, Artificial Sequence
  ENSG00000261385_0 (sequence is synthesized)
ttgtgctcaaacattttaatcatttctgccctgttactcccaccccagatccaagcgccagcccagttccggtgggggctcagtcctccggagtccaggagtcagggctcgggggcgctc

SEQ ID NO: 919432 - DNA, 120 bp, Artificial Sequence
  ENSG00000261385_1 (sequence is synthesized)
gctggtccatggtgggtgaggggccagaggctctggccattgctacaggcagtaaaactcctgactctcagtgatggtcccaaaaagcacacccagaagaatgggctcaaagatcaagat

SEQ ID NO: 919433 - DNA, 120 bp, Artificial Sequence
  ENSG00000277050_0 (sequence is synthesized)
cacaaataaatgtccctgagtttcgagacaagccagccattaaaatcttttagggggatccagagaagatgagttaaattggaatggacttgaaaaaactgatttagttggatttatgga

SEQ ID NO: 919434 - DNA, 120 bp, Artificial Sequence
  ENSG00000277050_1 (sequence is synthesized)
tcacagtcatgaaaaggtaaagataccaacttgttttgtgaatttaatctttattccttacttttttgcccctactgtttgtaattcctactttataatgaaatccttcttgtgacttat

SEQ ID NO: 919435 - DNA, 120 bp, Artificial Sequence
  ENSG00000277050_2 (sequence is synthesized)
agaaattaactggggaaaatgtttttctgttctccatttcctttaagtttgtttttagatacactgcattgcaagtatgtgtggtacagtaaaatgttgctaattgtatctgcgctgata

SEQ ID NO: 919436 - DNA, 120 bp, Artificial Sequence
  ENSG00000277050_3 (sequence is synthesized)
tgtatctgcgctgataagatgccatttgctctaggtcagtttcctaccccctcccccaactattcctagccagtggtagcatgcttcttacttccaaatatatgtgtgtgtgtgtgtgtg

SEQ ID NO: 919437 - DNA, 120 bp, Artificial Sequence
  ENSG00000277050_4 (sequence is synthesized)
tgcctgtgtgtatcaacaatgtgatcctaaaataaaagaatgacatatatttgacattatttacatactaaatatgggagcacataaatcaattacagaataaaatcaatttttcaagga

SEQ ID NO: 919438 - DNA, 120 bp, Artificial Sequence
  ENSG00000234362_0 (sequence is synthesized)
agcttcccaaggagggtggaactgataacttccctaaagcaaggaagagggtcattctcctgtctcagttactactgttgtgcccgtcggagtggataaagcatatttcttagagaggac

SEQ ID NO: 919439 - DNA, 120 bp, Artificial Sequence
  ENSG00000234362_1 (sequence is synthesized)
cacagaagcgagggctttggggagggaggtgatcttgaggagggtaggagaagtggagtgaagacattttttctttctgattcttccagaagaggactaaattggttggtggatgatagt

SEQ ID NO: 919440 - DNA, 120 bp, Artificial Sequence
  ENSG00000234362_2 (sequence is synthesized)
tgtcctttgtatggaggctggatgtagaaggtgctgcaagctctgcaagctgattagttaatgtggaagctgaaacctgccttgggaagctgaccattgaccattgtcttgcttttacct

SEQ ID NO: 919441 - DNA, 120 bp, Artificial Sequence
  ENSG00000234362_3 (sequence is synthesized)
gggttgcttccttgtttctctttaggtttttaagaaaggataaaggctgaacagatctctgcagttacaattattcatactagaagatactgctaacctctttgttatttgagcagctgg

SEQ ID NO: 919442 - DNA, 120 bp, Artificial Sequence
  ENSG00000234362_4 (sequence is synthesized)
ttccataatctgtacctggaggtttatacaggagaggatcactggggcagacttgaaccatggtgcccacaagtggggagggtgctccagcggccatggaaagaacttccttctgcagtt

SEQ ID NO: 919443 - DNA, 120 bp, Artificial Sequence
  ENSG00000234362_5 (sequence is synthesized)
ggagacagccttctgtgtgggctgaaggacagagtgtgattttctacttggaagagactccagggctctgcagagagggaagccctgctgacccatttcagcagactgtgacacttcagc

SEQ ID NO: 919444 - DNA, 120 bp, Artificial Sequence
  ENSG00000234362_6 (sequence is synthesized)
gacctgcaaattctacacattagagttcatattttatacaaactccgtacacctaagatgtggacttaacatttctaccaacaacatccaacttccaacaaaagatgcaggcccatcaga

SEQ ID NO: 919445 - DNA, 120 bp, Artificial Sequence
  ENSG00000234362_7 (sequence is synthesized)
agatgaaagctactaatgaagatgcattaaagatgatatttatggccaccccttagggaaaaaaagattcataaataatttcatggaaattacacccaaaatagagtcataatttcctca

SEQ ID NO: 919446 - DNA, 120 bp, Artificial Sequence
  ENSG00000234361_0 (sequence is synthesized)
gtagcacctgtcctcagatccaagatacccaggaaacccaagctgtgcaactaaaatccacacatggacacactacagtcaaactgcaaaatactaaaactgagaaagttaaaaacagcc

SEQ ID NO: 919447 - DNA, 120 bp, Artificial Sequence
  ENSG00000234361_1 (sequence is synthesized)
agtgaggagtcacaccacggacaaaggaacaataattagctaactggcttcccagcagcaaatgtcaaagccagtagaaaacaaaggaagaataccttcattgtactaggagaaaatgct

SEQ ID NO: 919448 - DNA, 120 bp, Artificial Sequence
  ENSG00000234361_2 (sequence is synthesized)
caatggaaattccaattcattttagatggaagggaaattatctcaagaaaagactgaaatgtgaaacataaaagctgactgtatgctgggaataaagttagcctcaacaaatttccaggt

SEQ ID NO: 919449 - DNA, 120 bp, Artificial Sequence
  ENSG00000234361_3 (sequence is synthesized)
acagtattgattttaattaggctccctgatcacaatgcaatcaagttagaaatcaccaacaagaaagagaaaaacccaatacatttggaaattaaagacaattctgacaacttgtaggtt

SEQ ID NO: 919450 - DNA, 120 bp, Artificial Sequence
  ENSG00000234361_4 (sequence is synthesized)
aaagacaactctttaaagtctcagaaatatgaagcttgttccaactaccttaaaacatcaggcaatttctcatgtaatcattagtaaaattgattatgttttaaaaaatataattgccaa

SEQ ID NO: 919451 - DNA, 120 bp, Artificial Sequence
  ENSG00000239508_0 (sequence is synthesized)
cagcatttctccaccaaagcatggctccatgactcggtagatgaaatgaaatgttgccagaagcgtcgtgtgctatctcgtgtttgactctctacctgctcttcccctgcagtagtaatc

SEQ ID NO: 919452 - DNA, 120 bp, Artificial Sequence
  ENSG00000239508_1 (sequence is synthesized)
gtgggagcatgtatatttacggaggtgtcataagatcaaacagcctggaaggaagagccaatgcctgaaaaacagctgctgtgacgagctgcctgaaccctcagccaactttgttacttt

SEQ ID NO: 919453 - DNA, 120 bp, Artificial Sequence
  ENSG00000239508_2 (sequence is synthesized)
gtgaaatggaactaccatccgccaagatattcaagagagaaaaaaatacattttctgcataaatggtgaaatcttttgtttccttcccactccttagtagaccctttcaacccctttccc

SEQ ID NO: 919454 - DNA, 120 bp, Artificial Sequence
  ENSG00000239508_3 (sequence is synthesized)
acctttttcacctggaaaatttctactcatccttcacaaatcaatttgagcatcatcgctgcctccaggcaaggtggccacataatttgggtggcccagtgcaaaataaaaaacgaaaat

SEQ ID NO: 919455 - DNA, 120 bp, Artificial Sequence
  ENSG00000239508_4 (sequence is synthesized)
ctcacaggtggaattcaacatatcccttccacaggaggtcatcccaatccaaaatatttagactttgcacagggaaacacttggcatctgatttgggaacaggcgagaagtccctgctga

SEQ ID NO: 919456 - DNA, 120 bp, Artificial Sequence
  ENSG00000239508_5 (sequence is synthesized)
ctgtggcccctgctggggaaaaagagtgatggccaaacctgaccttgaacctccatgcttctatgctgtggcctctgctgggaaaaaggaggatgatggcctcctcctgccctagagttc

SEQ ID NO: 919457 - DNA, 120 bp, Artificial Sequence
  ENSG00000239508_6 (sequence is synthesized)
tagcaggctgtaaatgggccagggaggagggaggcagccaaaagtgaatagcacaagatgagcagaggcttcaagtgcccatcatgtgctccattgtcccattggacttcatttacaaaa

SEQ ID NO: 919458 - DNA, 120 bp, Artificial Sequence
  ENSG00000239508_7 (sequence is synthesized)
cacaaattcaaagatgaaactaaaaatttcaaaagggggccacagagcattaagccccaagcactaacaattctgagggtaaggccctaagctacctgattgcatgcctctgtagttggt

SEQ ID NO: 919459 - DNA, 120 bp, Artificial Sequence
  ENSG00000239508_8 (sequence is synthesized)
cctgcctccagaaaattttccctgaccaggcccctcaaaccaagctagctgcccctttctgttcttcctatttaacccatgcttgcctttgtcgctgcacttagtacattatattaatat

SEQ ID NO: 919460 - DNA, 120 bp, Artificial Sequence
  ENSG00000239508_9 (sequence is synthesized)
tatctatttatgtgtatgtttcacaaaatattttataacttcataaggtcaaggaattcggttaaatcttttttctccaatttctaaatcttaatactatattaaaattgcttcttcata

SEQ ID NO: 919461 - DNA, 120 bp, Artificial Sequence
  ENSG00000224028_0 (sequence is synthesized)
tttctactacagaaagcaaaaaaaaagtaagagaagaagtctgagaagtcaaaagacttgcagattatctgactaggacactctgtggaggactttgatacaaatggattgatttttcag

SEQ ID NO: 919462 - DNA, 120 bp, Artificial Sequence
  ENSG00000224028_1 (sequence is synthesized)
cagtctgctgaagcacctgatgtttggccttcctgaatgtcatgtaatacgtattcattttttccagctgaaaataaatagaattggaaaaaaaagaaattatgtaacgtgagaggaaaa

SEQ ID NO: 919463 - DNA, 120 bp, Artificial Sequence
  ENSG00000224028_2 (sequence is synthesized)
agcctttgaagtgaactcttctggaagttttatgttcattgctatcctttagctttcccaaaatgcccataagccaaagatttcatgtgttatttctgtaatttggtagttttcatttaa

SEQ ID NO: 919464 - DNA, 120 bp, Artificial Sequence
  ENSG00000224029_0 (sequence is synthesized)
aattttttttttctcagttgtcaccacagtcggcctcacttcaacaacagcaggcagtgttggctggtgtctctgatgaggaaagtgaagcctagaaataaggaattcacttcaaaggca

SEQ ID NO: 919465 - DNA, 120 bp, Artificial Sequence
  ENSG00000224029_1 (sequence is synthesized)
ccttgtacgaatttcatacttgaaatccagtttggctgaaataaaagcctgtgatttttttcataacaactaagtataatggataaaatttggttaattaaagatttttttaggccaggc

SEQ ID NO: 919466 - DNA, 120 bp, Artificial Sequence
  ENSG00000224029_2 (sequence is synthesized)
ggattacaggcatgagccatcatgcccagtcttcaatcatctctttaaagaccctagttccaaataaagttacattctcatttaccaggggctaggacttcaacatatgaatttggggga

SEQ ID NO: 919467 - DNA, 120 bp, Artificial Sequence
  ENSG00000224029_3 (sequence is synthesized)
ccaggggctaggacttcaacatatgaatttgggggaggcacacttcagcccatgacagacacaactggatattagatgatgttatggaattcttggtacttttttcaggtatcataatgg

SEQ ID NO: 919468 - DNA, 120 bp, Artificial Sequence
  ENSG00000224029_4 (sequence is synthesized)
cttgtggttctgtaggaagatgtcatggggggatgcatgatgaaatatgttgggatgaggagtgatagagaattgcacattaatttcaaaggttccataccagcagaagtgtttgtgggg

SEQ ID NO: 919469 - DNA, 120 bp, Artificial Sequence
  ENSG00000224020_0 (sequence is synthesized)
cctcgtctagcctgggttccagtatctaattttttttttgttttaactgacaaactcatttctctactgggacaggatgctgtgctggctggaagttccatttctacagcaagaatccta

SEQ ID NO: 919470 - DNA, 120 bp, Artificial Sequence
  ENSG00000224020_1 (sequence is synthesized)
tctggaaacacagaagttgtcctctagccacagcagctcgaacttttttgattgtcgttgctgctttctcccatcacccccatccccttttgacaaagatccaactgtaaaaagtcttac

SEQ ID NO: 919471 - DNA, 120 bp, Artificial Sequence
  ENSG00000224020_2 (sequence is synthesized)
catgtattaaaaaaaaagaaaaaggaaaaacaaagatttcttttagatgcagaatctacctacattcggctgaaaatcagatggaagaatccacagaggaaaggaaggaaaggcgaactg

SEQ ID NO: 919472 - DNA, 120 bp, Artificial Sequence
  ENSG00000224020_3 (sequence is synthesized)
tcctgtggaaagcacagctgcagggatagtagaaagtaacaggctctcgatccgtgggaggtggtcactttggaggacagataagtcatcctcagagaacgaacacaatgaaggaaattc

SEQ ID NO: 919473 - DNA, 120 bp, Artificial Sequence
  ENSG00000224020_4 (sequence is synthesized)
cagcctattcatgttctcctctcaggctgtacctcaacaagatccaactggactttgtgatctcataacctgtcaaggggcctggcatggagtagataataaatgttttttttaatcaaa

SEQ ID NO: 919474 - DNA, 120 bp, Artificial Sequence
  ENSG00000224023_0 (sequence is synthesized)
taggctccgccctctgcacgccgctcacggaagtggagccagaatccacagatgtcattatccatctgcacactttgtttactacccagaaggcaagaatattgcattttaaaagtgccc

SEQ ID NO: 919475 - DNA, 120 bp, Artificial Sequence
  ENSG00000224023_1 (sequence is synthesized)
ggacttttgttctttcttatcacaaatgacttgggaagctccgaccactcatgtttaccccgagtgaaagtcccattcaaagccttgcttcctggagagctttgagattctggtacaaaa

SEQ ID NO: 919476 - DNA, 120 bp, Artificial Sequence
  ENSG00000224023_2 (sequence is synthesized)
tataagcacaaagtggaaaagcatcattcatattcatttgctgctgcggcatttctccctggaatcttcctcttgtctgtcaacattgggcaaaaggactggcctcatctacattacaga

SEQ ID NO: 919477 - DNA, 120 bp, Artificial Sequence
  ENSG00000224023_3 (sequence is synthesized)
tatccttgtgatggtctggaggtaggaaaaggacacccagcacaagagtgagaagggaaactcaagctctcctgttggagagtctcaggcttctttatccataaaactgattggacataa

SEQ ID NO: 919478 - DNA, 120 bp, Artificial Sequence
  ENSG00000224023_4 (sequence is synthesized)
acttctcgcggtatctgactcctaggctccgccctctgcacgccgctcacggtatctgacgctcaggctccgccccctgcatgtctttgttggcaaacagttctgggggtcgtccgatcc

SEQ ID NO: 919479 - DNA, 120 bp, Artificial Sequence
  ENSG00000224023_5 (sequence is synthesized)
aactcttctgggcagaggatggtctgcactggcctccaccacgcaggaaggcttccagagtggagaaatgtccactaacatggcttctgtgaggtatcattctgatcattgttgttacag

SEQ ID NO: 919480 - DNA, 120 bp, Artificial Sequence
  ENSG00000224023_6 (sequence is synthesized)
gagagatgagaggaagttagaggggctagaagaaccaggagacctgttgaaaatcatgaatacaaagagaggtcgtttgcttctgtgcttcaattctataataaaatgagtacaatgtca

SEQ ID NO: 919481 - DNA, 120 bp, Artificial Sequence
  ENSG00000224023_7 (sequence is synthesized)
gtgggcagctcttttcttggtgtggggctctgtttggtgtgatgtaagaggtatcacagggctttcctgtcccagaagatcttagtggatgacacctatgggggttgccagctggattag

SEQ ID NO: 919482 - DNA, 120 bp, Artificial Sequence
  ENSG00000224023_8 (sequence is synthesized)
gtgaggcagagcacacagctctacctaaggggtcccattctcatctgggaatattctaggacataggacactacccaagaggcagagcctggagtggcattatacgggtgaaagatctga

SEQ ID NO: 919483 - DNA, 120 bp, Artificial Sequence
  ENSG00000224023_9 (sequence is synthesized)
gtgccaggtccatataaatgagtggggttggggggatcgaggtgcttagagaacaggagagctgccacaggaagggatggtacccacagggaggaagaaccatgtctcagattccttcct

SEQ ID NO: 919484 - DNA, 120 bp, Artificial Sequence
  ENSG00000224023_10 (sequence is synthesized)
ttcatcacaaaaaattttcagtgtaaacctaagtagagagaacagtaaaaggaacccccaggggccgtcaccatcacccaccatcaacagcgatcaatgggccgtctaagtccgttttcc

SEQ ID NO: 919485 - DNA, 120 bp, Artificial Sequence
  ENSG00000224023_11 (sequence is synthesized)
ctactttcatccccgctccagattattatcaaaagtagctcatccctagttatatttcatttaatcctctcagttgcatttttttctggccacgttcttctgtctgtcaatcatggtctt

SEQ ID NO: 919486 - DNA, 120 bp, Artificial Sequence
  ENSG00000224023_12 (sequence is synthesized)
aagtcagacagtctgctgggttggctaggaaaagactctttctttctcaagaaagagttgtaagtaattttgagagaaatgttgcagattgaccaaacaaggtatgcttaatttagttca

SEQ ID NO: 919487 - DNA, 120 bp, Artificial Sequence
  ENSG00000224023_13 (sequence is synthesized)
attcatcagttacttattgagtcctaggcttagtgctggattcaacatatcagtcaatcatggtttctggcctacagggttcagtgctctagttctgggtgtgcgacgaggaccacagca

SEQ ID NO: 919488 - DNA, 120 bp, Artificial Sequence
  ENSG00000224023_14 (sequence is synthesized)
agtattcactcaggaaaggcagaatgtggccacagggaaaggaaaggtacaaggtgtggtggaggttacaaggcatgacaaacacactgggctgggaatggtaacagtggaagaggatca

SEQ ID NO: 919489 - DNA, 120 bp, Artificial Sequence
  ENSG00000224023_15 (sequence is synthesized)
ggaagggtcgtgaagcctgaggcattggagagggacttggaaacctgggcagacagtgggacggtgactgcaaaacactcaagtgtgcaggtgggaatggcagtgggggacaggcgagcc

SEQ ID NO: 919490 - DNA, 120 bp, Artificial Sequence
  ENSG00000224023_16 (sequence is synthesized)
tagcagcgagaacacatggtgcaaggggccccatgggggttctggggtggaggaggtaggcaattgggctctcaaagaaacccttgggctttttctagcttaataataaacaattattat

SEQ ID NO: 919491 - DNA, 120 bp, Artificial Sequence
  ENSG00000224023_17 (sequence is synthesized)
ttctaaggaaaaagaaaactggatttctagaagcatggctattaaaaaaaaaacaactccagaccccaattaggaaactgaaaggaaatcaaagtgggcctaatggaaattaggtagtag

SEQ ID NO: 919492 - DNA, 120 bp, Artificial Sequence
  ENSG00000224023_18 (sequence is synthesized)
gggcaataaaagaaaatgcaggtagctgcctaaaatccagtggactccaggtccaccagccaggcaccacattgttttaacctataaatgaagtatgtccatgactctcactacataaaa

SEQ ID NO: 919493 - DNA, 120 bp, Artificial Sequence
  ENSG00000224023_19 (sequence is synthesized)
tggaagttaagccatagtccttttccaatgtgatctgaaaatgtactgtttttgcctctagcaaagcaaatatatagacagaaaattcctagcactgctttcacgcgagggatgacaaag

SEQ ID NO: 919494 - DNA, 120 bp, Artificial Sequence
  ENSG00000224023_20 (sequence is synthesized)
gtgacagactcgggcaaaatgttcatattctatacgtgaaatggaatggtaacttgatttttcaaaaggataagattcttgttacaaatttaagcatatttattaaagaaaactcaaatt

SEQ ID NO: 919495 - DNA, 120 bp, Artificial Sequence
  ENSG00000224023_21 (sequence is synthesized)
agttctgggggtcgtccgatcctgcagagaccgtccaggctggacttgaactccttcctcggctgaagtgatcctcctgcctcagcgtcctgaataggtaggactacaactgtgagtcac

SEQ ID NO: 919496 - DNA, 120 bp, Artificial Sequence
  ENSG00000224023_22 (sequence is synthesized)
tttactcaaccagaaatggtgaatgataaaaaatgtttatagatcattgcttctaaaaagactatattagacacactgtggtacccaaaaccaaatgctagctactttttaactcaaaaa

SEQ ID NO: 919497 - DNA, 120 bp, Artificial Sequence
  ENSG00000224023_23 (sequence is synthesized)
cctttcaccctctgaaggtttgctgaaaatgaactgaaaaaggcagagcaacaggagaaaaggcatgcgtttattttaacgtgcataccatggggaattgcagaagagtaatggcctaat

SEQ ID NO: 919498 - DNA, 120 bp, Artificial Sequence
  ENSG00000224023_24 (sequence is synthesized)
aacccagcagggtccagatgcctgtctaccctctcttcttagggaaggcggggatgaggtgtgtaggagtaaatgacaaaagttcctctgagctctgggggaggtgttgggaaggtgagg

SEQ ID NO: 919499 - DNA, 120 bp, Artificial Sequence
  ENSG00000264404_0 (sequence is synthesized)
ttctcttccaggtgcagctcagttgccgtgatgctccttgagtcaatgagctctttggtctgctcttctgctcaagcagaaaaggattggcacttcacccttgagaagctgacaagaacc

SEQ ID NO: 919500 - DNA, 120 bp, Artificial Sequence
  ENSG00000264404_1 (sequence is synthesized)
acaggcttcttcaggcaggtggtggaacatgggtgtatcctgcaggctctagcctgattttctggctcataaggccaaagggagctggaaaagtccccacggcaggactcatggtggaga

SEQ ID NO: 919501 - DNA, 120 bp, Artificial Sequence
  ENSG00000264404_2 (sequence is synthesized)
attcaggcctctgcatactgtgtctgggtccctccttaaagaatgataaagacaagtaaagagcttgaagcagcctggagtccagccagaaacctttaactgagctttaaaggagatggt

SEQ ID NO: 919502 - DNA, 120 bp, Artificial Sequence
  ENSG00000264404_3 (sequence is synthesized)
cacaacacttttcagaatactggcaaaggcctcctgtggccaggtttgtcctgggatgagcaaaatttaatgttaacctgctgtatctttgcttttaatatatctgcttgcccatcacaa

SEQ ID NO: 919503 - DNA, 120 bp, Artificial Sequence
  ENSG00000264404_4 (sequence is synthesized)
gctccactggttcacccatggctgctctcacataccaagctagagttcaattagaaagttggagatcagtaactccagaacactggccagagggtcagaagagctgactcgtggacattc

SEQ ID NO: 919504 - DNA, 86 bp, Artificial Sequence
  ENSG00000264404_5 (sequence is synthesized)
atatatctgcttgcccatcacaatgatgttatggttaatttcaccaatttggtaacctgcctcttgggaagtacgaaagtaagcaa

SEQ ID NO: 919505 - DNA, 120 bp, Artificial Sequence; identical to SEQ ID NO: 886228
  ENSG00000264404_6 (sequence is synthesized)

SEQ ID NO: 919506 - DNA, 69 bp, Artificial Sequence
  ENSG00000264404_7 (sequence is synthesized)
atcacaccactgcattccagcctgggcaatcagtgagggtgtcctgtgaatcaaatctttgaatggatg

SEQ ID NO: 919507 - DNA, 120 bp, Artificial Sequence; identical to SEQ ID NO: 886230
  ENSG00000264404_8 (sequence is synthesized)

SEQ ID NO: 919508 - DNA, 120 bp, Artificial Sequence
  ENSG00000264404_9 (sequence is synthesized)
agccttgcttgttttctctgaaccgcaataggatggtgttcacagcgattcaaagggtggcattgggttggacgttttggttacgagccagcctattcccacattgtacgtgaatgttta

SEQ ID NO: 919509 - DNA, 120 bp, Artificial Sequence
  ENSG00000264404_10 (sequence is synthesized)
atgtgctctcaaaacatggaaaataagtttagtgcacatagctaaatcacaaaacatccgatttctgtttcctcaggaagtcattactgcgccaccacatcacgtgaccttaacatgatc

SEQ ID NO: 919510 - DNA, 120 bp, Artificial Sequence
  ENSG00000264404_11 (sequence is synthesized)
aatgtatttctctgccttgacatttaaataaactatataaattaagataagtagattagaaaatcattcaaattataccataatctgtacaaatattgtgtcccctgccaggcaagggac

SEQ ID NO: 919511 - DNA, 120 bp, Artificial Sequence
  ENSG00000264404_12 (sequence is synthesized)
agggtgccggcgacggccgcgtggccaaggccccgcaggaaagctcccaggtctccctcactctccaggtgccctttgcacccaacagtgcgtgtgaggaacgaactgctgtttgaacgt

SEQ ID NO: 919512 - DNA, 120 bp, Artificial Sequence
  ENSG00000264404_13 (sequence is synthesized)
cccctgagattgtgcgtagccccgtgtaaatgtaatagcctccatggcttaattggctatcaagcgaattttcccagatgaaagcaatgttgggttaggggacgacggtgcagccaccca

SEQ ID NO: 919513 - DNA, 120 bp, Artificial Sequence
  ENSG00000264404_14 (sequence is synthesized)
tgacggaggcttggggttttccagctcttgacctaaaattcctgaatgattgttttcaaatttcttaatgaataataggatgaacttgccacccctgtcaggggggaatggggttcctga

SEQ ID NO: 919514 - DNA, 120 bp, Artificial Sequence
  ENSG00000264404_15 (sequence is synthesized)
ccctgtcaggggggaatggggttcctgaaagctgagaggccaggatccagatcctgagcctcttcaccaagcagatgctgtagagcaaaggcagcaactatctatctatctatctatcta

SEQ ID NO: 919515 - DNA, 120 bp, Artificial Sequence
  ENSG00000264404_16 (sequence is synthesized)
ctatctttccccttccctttaaggaaatcctcaggactaggtgagatcttagatctagtggagaatctgagctgctccaagcaaaacctcaggatcctgcaatctgaaaaggtagaacca

SEQ ID NO: 919516 - DNA, 120 bp, Artificial Sequence
  ENSG00000264404_17 (sequence is synthesized)
aggcaaatgtgggcagcaatacccagaagttgggtactgagcctgttagggagcatttttttcaggggagtgaagtaaacaatgaggtgtagagagcagcgagaatgagaagccaaatca

SEQ ID NO: 919517 - DNA, 120 bp, Artificial Sequence
  ENSG00000264404_18 (sequence is synthesized)
cagcatctgtcctttctccctgggcagagagagtatgatgggtagtctccaatatagaaagcccattgtgtccttcagctcccccatacagtcgcagaacaagcctgattctgaaatttc

SEQ ID NO: 919518 - DNA, 120 bp, Artificial Sequence
  ENSG00000272168_0 (sequence is synthesized)
ttttttttttttttttttttgaaatttgattttaactcttgcttttttttatggtttgtgtctgttttttccacccccgctggcgccgagctgcgctgttttgtgtttcttttttttttt

SEQ ID NO: 919519 - DNA, 120 bp, Artificial Sequence
  ENSG00000272168_1 (sequence is synthesized)
ttttttctattttttttttttaaattctgaagccagaccgtctttcctcacagctccacggctgcatctccgtgggcacgcaagcttcccctggttacctgagctgctcctgccgtctcc

SEQ ID NO: 919520 - DNA, 120 bp, Artificial Sequence
  ENSG00000272168_2 (sequence is synthesized)
cgcctgggcttcgccgtggtgcacccgatcccggaatcgtgcgtctgcgccctgcgaaagaaggacctgctggcggagctccggccggggtctcctgcctcgcagctgggcgaggggact

SEQ ID NO: 919521 - DNA, 120 bp, Artificial Sequence
  ENSG00000272168_3 (sequence is synthesized)
tggaggacagggtgaagctgcagaagacctggggtgggatggctagagaggacgccaaggactggggaaggggaagttaggaataccttacatccaatgcccacccgtgctccgcagggc

SEQ ID NO: 919522 - DNA, 120 bp, Artificial Sequence
  ENSG00000272168_4 (sequence is synthesized)
aagggcagccgtcgcctcggccgcgtgcacccagctcaggctgttcccagggatttagtctggggggacaacccatggcgagatgtggtggcattttacctcagagtggagctgaagatg

SEQ ID NO: 919523 - DNA, 120 bp, Artificial Sequence
  ENSG00000272168_5 (sequence is synthesized)
gataaacaaggtatctgatgtatctgcctgagaaggcagagctggagaaaggcggagcgagggagcgcgtgaaaagaaagagatgccgaatgccgggtgattgtctgccgcttgctgtgc

SEQ ID NO: 919524 - DNA, 120 bp, Artificial Sequence
  ENSG00000272168_6 (sequence is synthesized)
attctcattctagggaggatggcataatttataacccagcacatggatagaggaactgtaaattgtagtctggatgtccccggcgctgtcgacgaaggaactgatgggctaggctcacag

SEQ ID NO: 919525 - DNA, 120 bp, Artificial Sequence
  ENSG00000272168_7 (sequence is synthesized)
gcagaaggaattttccttgtcttggatgagacttttgacttggacttttgggttaaggatttacagaaagcgtggtgctggcatctgatcagcttctggggtggcctcaggaagcttaca

SEQ ID NO: 919526 - DNA, 120 bp, Artificial Sequence
  ENSG00000272168_8 (sequence is synthesized)
atcatggtggcatttgaagtggaagcgagagagagaagaggagatgcaacacacttttaaacaagatttcaggagaactcattcactatgttctggagaccagaaggccaaaatcaaaag

SEQ ID NO: 919527 - DNA, 120 bp, Artificial Sequence
  ENSG00000272168_9 (sequence is synthesized)
tatgggcaggcttgatttctttagaagactccagcggagaactgtgtctccttgcttctgattctacatctccatccatgggccactgtttcagcaacctcagccagtgcaacacaacct

SEQ ID NO: 919528 - DNA, 120 bp, Artificial Sequence
  ENSG00000272168_10 (sequence is synthesized)
cagccaagaagagtatgcagagaaaggagtcccctacctgccacaaaactgttgtctgaaaactgtctcatattgtctcaagttgtcattcattgtgaattagacctgtttaacatgtaa

SEQ ID NO: 919529 - DNA, 120 bp, Artificial Sequence
  ENSG00000272168_11 (sequence is synthesized)
tctgcaacatgcttcactgtctaattttccagagcccctcatataaggaactgtattattggtataatcatcatggtgaagaagttggtatgtgggggagagatgacagaaacagagagt

SEQ ID NO: 919530 - DNA, 120 bp, Artificial Sequence
  ENSG00000272168_12 (sequence is synthesized)
aagtcagagctggctgcctgacagataaaaaggaaatgaccaaaaaaaaaaaaaaagacacagaagaatactttgttgtccacacagaaaagggaagtgtaggtaagacagcagtagact

SEQ ID NO: 919531 - DNA, 120 bp, Artificial Sequence
  ENSG00000272168_13 (sequence is synthesized)
aagattcttaagactcaagttctagtcttatttattagctatgggaggccttgagggagttctagaattaagtgatctctctttataaaataggaacagtaataacttcctggctaactc

SEQ ID NO: 919532 - DNA, 120 bp, Artificial Sequence
  ENSG00000272168_14 (sequence is synthesized)
cctggctgtctcacaatgctgtagtagtaagaaataattttataattaaagactattttagggctgattacatttttgggcagtggctcatacatgtaatttcaacattttgggaggcca

SEQ ID NO: 919533 - DNA, 90 bp, Artificial Sequence
  ENSG00000272168_15 (sequence is synthesized)
gctgggcaacacagaccttgtcactacaaaagaaaaaaacattagctaggcgtggtgatgtatgcctgtggtcccagctactcaggaagc

SEQ ID NO: 919534 - DNA, 75 bp, Artificial Sequence
  ENSG00000272168_16 (sequence is synthesized)
cagctactcaggaagctgagacaggaggatcacctgagcctgggaggtcgaggctacagtgagccatgatcacac

SEQ ID NO: 919535 - DNA, 120 bp, Artificial Sequence
  ENSG00000272168_17 (sequence is synthesized)
atacaaatgtaaaatatcattctattacttatttataatgctgattattctttaaatgactttaaaatgttaatctctgcttgagcctacggagaagtatgtaacaaatttgtgaaggat

SEQ ID NO: 919536 - DNA, 120 bp, Artificial Sequence
  ENSG00000272168_18 (sequence is synthesized)
tggcattaaacatagtcaaaataaaacatagaaattatggtaaataatttaactggtaaaataatctaagtggtagttctcaggtaagtggaaattcgattagctgattgtttaggattc

SEQ ID NO: 919537 - DNA, 120 bp, Artificial Sequence
  ENSG00000272168_19 (sequence is synthesized)
ttggttataagtgacagagacctgactaaaagtacatgaagcacataactgagaaggttgtggtatggctcagcagaaatgggaaaatcttgggactggttcgtgttttatttacattat

SEQ ID NO: 919538 - DNA, 120 bp, Artificial Sequence
  ENSG00000272168_20 (sequence is synthesized)
ctttgttcccaggcagtctctgcatgtaagtggcaaagatgactgtctgaaaatatatacctacttttttaaagggctatctcaagccattctggagaagcaccaaaagccactttgctt

SEQ ID NO: 919539 - DNA, 120 bp, Artificial Sequence
  ENSG00000272168_21 (sequence is synthesized)
atactgggagaatagtttgctttccctaatttgtgatgagtgaaacactgaacagagacatagaataatattctgtagttcagggttggtgtaatatggccagtgggcggaatctggtcc

SEQ ID NO: 919540 - DNA, 120 bp, Artificial Sequence
  ENSG00000272168_22 (sequence is synthesized)
tcagactgattttgcaaataatcttatagaaacacagcaacacccattcattacatgttgtttatggttgctttggggttacaatggcagagttgagtagttgtgacagagatcactagg

SEQ ID NO: 919541 - DNA, 120 bp, Artificial Sequence
  ENSG00000272168_23 (sequence is synthesized)
ctcaccacatctgagatatgtactgactgaccctgtacagaaagtttgctgctcttagaggaatgtgtgtttctagtgtcagcaataaacttcttggatttgttttgttttctcatcttt

SEQ ID NO: 919542 - DNA, 120 bp, Artificial Sequence
  ENSG00000272168_24 (sequence is synthesized)
acatgatagttgcagactagttgatccttgtgacctgtttttgaatgccactgtgtattctgtcagggccctctgattctgtttcttatggtgctgaatgcacaatttaatgccctggaa

SEQ ID NO: 919543 - DNA, 120 bp, Artificial Sequence
  ENSG00000272168_25 (sequence is synthesized)
tttccttctgtcttctgctaaactcatgcctcttcagatagttaaaatcctgttctaccttagaagtctccagagttattttcctaaattaagaagaactggctttgaagttactcatta

SEQ ID NO: 919544 - DNA, 120 bp, Artificial Sequence
  ENSG00000272168_26 (sequence is synthesized)
tgccacacacaatggttgaaaagagcatctcttatgtactgtgtatatttcagcatccactcagcttcttaggtagaaaaggaagagtcttccacagtgtattttatccatatttgggtc

SEQ ID NO: 919545 - DNA, 120 bp, Artificial Sequence
  ENSG00000272168_27 (sequence is synthesized)
agaaactcttctttaccacggagcgtgatggaagaaagatatgggatggtaacagtaggccagggatgtaataatcacaaaatttgagatattttgtgactggtgactcacgcctgtgat

SEQ ID NO: 919546 - DNA, 120 bp, Artificial Sequence
  ENSG00000272168_28 (sequence is synthesized)
aagattcctcgcctaagatgaggttcctgagcttccagtaggcgactgactgcccaagagacccagggctccgcaaggagacggcgcaggtgtcggggctccccgcaggccgggaaaaag

SEQ ID NO: 919547 - DNA, 120 bp, Artificial Sequence
  ENSG00000272168_29 (sequence is synthesized)
tgtccgaacgcctcgtggactgcagcgggggaaatgtcccttaaaagtgcgacgaagtggggaagaaggtgtaattactattatcagcatctagaaagcatcatgaatttgctggagtac

SEQ ID NO: 919548 - DNA, 120 bp, Artificial Sequence
  ENSG00000272168_30 (sequence is synthesized)
ttcctagcactgacctccttcattctgcgttgttcttactggatctttccatcagccaacaatatggaagtaccaatacaaggtcaaatcattcctggattcatctggagttgcttaaaa

SEQ ID NO: 919549 - DNA, 120 bp, Artificial Sequence
  ENSG00000272168_31 (sequence is synthesized)
gaatttttgatgataccttttctatatggattacaatttgatcgctgggaattctccaccttaaagaagacgcaatttcaccatgttacccaggctggtctggcactccttggctcaagc

SEQ ID NO: 919550 - DNA, 120 bp, Artificial Sequence
  ENSG00000272168_32 (sequence is synthesized)
aatagcagtctgcctgctgcagctctccaagtgctgggattacagttacagggcttgacgtttctaggactaaccaaggaagatgcagttggttgtgaatcacttcttcccatgctgaaa

SEQ ID NO: 919551 - DNA, 120 bp, Artificial Sequence
  ENSG00000272168_33 (sequence is synthesized)
tggcaagtttatgacactaaagatgcagtccaacagagtagtcactgtgctcagcatcagtatttttttttgcctccatcatcttgctgaaacagcattggtgtaataaaaatgaacctc

SEQ ID NO: 919552 - DNA, 80 bp, Artificial Sequence
  ENSG00000272168_34 (sequence is synthesized)
gaaggaactgatgggctaggctcacaggcagaaggaattttccttgtcttggatgagacttttgacttggacttttgggt

SEQ ID NO: 919553 - DNA, 120 bp, Artificial Sequence
  ENSG00000272168_35 (sequence is synthesized)
ggatgcaatggagaacatttacagaggactgtgggtaaagcaaagtcttcaagggaagataacaaaggatgaaacaatggtgttgtgtgacttcctagtgtgaatcatggcaatacagtg

SEQ ID NO: 919554 - DNA, 120 bp, Artificial Sequence
  ENSG00000272168_36 (sequence is synthesized)
aaagacagtgatttactgcttttgagggcgtgcatgtatatgattaacggatggaagtgcaggactccaagatttacttccttccctttccagcagaattacctgagacgagtaaaatct

SEQ ID NO: 919555 - DNA, 120 bp, Artificial Sequence
  ENSG00000272168_37 (sequence is synthesized)
actggtggagtcactccattattcttatctgtggagatctagatcttgatttgaaagtttctgagaaaatcttcagctcagacttgagggtcaactttaccagctgaagtgactacatcc

SEQ ID NO: 919556 - DNA, 120 bp, Artificial Sequence
  ENSG00000272168_38 (sequence is synthesized)
tgcctgctttcagctccagtggaaaatgcattaatcccagagtctccgtgaggtttcctgtttgatgacataatcagaaaatcctcctcacattgcccttggggttgctgtctggatgtt

SEQ ID NO: 919557 - DNA, 120 bp, Artificial Sequence
  ENSG00000272168_39 (sequence is synthesized)
atgttgtcttggatctgcatttactgctcaaccacatctaatttgatgtcctctgcagatttaaaatgtgtgccttcttttccgtcaccaagtcatccctgggttactactgaacatcct

SEQ ID NO: 919558 - DNA, 120 bp, Artificial Sequence
  ENSG00000272168_40 (sequence is synthesized)
tctcaattccccccgacccatggatggctgttctccattgtctgtttcaccagatgtcctcaaaacaaacagacagaagaaggaagtggctaatggagctgtggagtccaagtgtgactg

SEQ ID NO: 919559 - DNA, 120 bp, Artificial Sequence
  ENSG00000272168_41 (sequence is synthesized)
cccagaggaaatgagtgaggatcaatgggaagaagagagccagccaggttcgatgccttctccatccgtcagtgagggtgtggagagcctgcaggcgtgtgcctccctctgtaacttgct

SEQ ID NO: 919560 - DNA, 120 bp, Artificial Sequence
  ENSG00000272168_42 (sequence is synthesized)
attccttgtgtaatgtcaagtggaagtgtgaagcaccacaaactgctctgagcagagcccacttcccttcacccacggagagcgtgaagcagttacaccaacatcaatcaaggaaaaccc

SEQ ID NO: 919561 - DNA, 120 bp, Artificial Sequence
  ENSG00000272168_43 (sequence is synthesized)
acaggctgagctcacacggttgaagcaggaagttgaagatttgtccaggagcagatagctgaagagagagagagagaagagagaacggcttacagctcaggtcctctctccatgcttagg

SEQ ID NO: 919562 - DNA, 120 bp, Artificial Sequence
  ENSG00000272168_44 (sequence is synthesized)
gtctttgtgactggcactcatggacagacagtggtgttcagggacagaacagattttggagggggtggggaggccaataaaccaagaaacgtcagaaataaaagtcgcatgaagtactct

SEQ ID NO: 919563 - DNA, 120 bp, Artificial Sequence
  ENSG00000272168_45 (sequence is synthesized)
cagaaggaattttccttgtcttggatgagacttttgacttggacttttgggttaagttctggagaccagaaggccaaaatcaaaagtatgggcaggcttgatttctttagaagactccag

SEQ ID NO: 919564 - DNA, 120 bp, Artificial Sequence
  ENSG00000272168_46 (sequence is synthesized)
accaatggcagaggccacatgtgcaagcaagatgggagtctggagagcctcaggctaaatcacgagtgctcagccctctcctctttgtaagggcaaccgggtcatatctgccagcataga

SEQ ID NO: 919565 - DNA, 120 bp, Artificial Sequence
  ENSG00000272168_47 (sequence is synthesized)
actgctctgtccacagccctaaaatctaatacctagaacaataaatgcacttaagcacgtcaaactctctcaaccagtgatgaaatctgtcactagcgaagggacttgtcccaagggagc

SEQ ID NO: 919566 - DNA, 120 bp, Artificial Sequence
  ENSG00000272168_48 (sequence is synthesized)
tgaacacctgccgctgcaccctgacaatgtataagaaacaagcaccactgtggatgcagccccagaggcctagtgtcatgggggtgcaaggccctgcttcaggctgggggcctggggagg

SEQ ID NO: 919567 - DNA, 120 bp, Artificial Sequence
  ENSG00000272168_49 (sequence is synthesized)
ggctggtacctctctacctcctgcagctcctgttcctctggctcctggtgaaaatctgggtctgaacccatagcaagtgagggccacaaggcttcaccttctgagatgcagctagaagaa

SEQ ID NO: 919568 - DNA, 120 bp, Artificial Sequence
  ENSG00000272168_50 (sequence is synthesized)
acagctggtataatatatggtcatgcactacctaactacgtttcctcaacatgggactgcatatatgacaatggtctgtcccgtgagattataataaagctgaaaaatttctatcaccca

SEQ ID NO: 919569 - DNA, 120 bp, Artificial Sequence
  ENSG00000272168_51 (sequence is synthesized)
gtcatatcatagccatagtaatgtcaaggcccaaggtattgtgtgtctgtggtgatgccggtgtaaacaaacttgccacactgccagtcatatgaatagagcacaaacaattatgtaata

SEQ ID NO: 919570 - DNA, 120 bp, Artificial Sequence
  ENSG00000272168_52 (sequence is synthesized)
gtttatgtatttactatactatacttttaatcattattttagagtgtactccttctgcatctatgtgtcaactgcaaaacaacctcaggcaggtccttcaggaggtattccagaggaagg

SEQ ID NO: 919571 - DNA, 120 bp, Artificial Sequence
  ENSG00000272168_53 (sequence is synthesized)
tcaggcaggtccttcaggaggtattccagaggaaggcaatgtaatcacagatgacagctctatgcaggttatcacccctgaagaccttctactgggacaagatgtggaggtagaagacag

SEQ ID NO: 919572 - DNA, 120 bp, Artificial Sequence
  ENSG00000272168_54 (sequence is synthesized)
taatattgatgatcctgaccctgtgtaagcctaggctaatgcatatgtgtgctgtgtcttagtttttaccaaaaagtttaaaaagtaaaataaaaataggaaatagcttatggaataagg

SEQ ID NO: 919573 - DNA, 120 bp, Artificial Sequence
  ENSG00000272168_55 (sequence is synthesized)
aagtaaaaagatttcagtaaagtacagtaaggttaatttatggttgaagaaaaacattttaaaaataaatttagtgtagcctaagtgtccagtgtttctaaagtctacagtagcgtgcag

SEQ ID NO: 919574 - DNA, 86 bp, Artificial Sequence
  ENSG00000272168_56 (sequence is synthesized)
tgactcacccagagcaaattcctacaggtgtaccattttaaccttttacatcatatttttattgtactttaaacatatctacattt

SEQ ID NO: 919575 - DNA, 120 bp, Artificial Sequence
  ENSG00000272168_57 (sequence is synthesized)
tacatcatatttttattgtactttaaacatatctacatttacatgtttagatacataggtgtttaccattgtgctacaattgcctatggtattcagtacagtaacacgctgtacaggttt

SEQ ID NO: 919576 - DNA, 120 bp, Artificial Sequence
  ENSG00000272168_58 (sequence is synthesized)
gtagcctaggagtgatagcctataccatacagactaggtgtggtaggttgtaccatctaggtttaagtaagtatactctatgatgttcccacaacaacagaattgctgaatgaagcattt

SEQ ID NO: 919577 - DNA, 120 bp, Artificial Sequence
  ENSG00000272168_59 (sequence is synthesized)
ctcagaatatatccccatggttaagcaaccaatgagtgtattttctgtctacctttcacctccataatatatatatttttctacatttctcatggtagagggaaagagcaacaggacttc

SEQ ID NO: 919578 - DNA, 120 bp, Artificial Sequence
  ENSG00000272168_60 (sequence is synthesized)
cagaaaaaaaactaatgtgtcttcagacttctgcttgtatgtggctcatgttatatctgagcgtatgctactggacaaagtgagtcacatagccaaggcttacaatgggatggggaagca

SEQ ID NO: 919579 - DNA, 120 bp, Artificial Sequence
  ENSG00000272168_61 (sequence is synthesized)
tacttcatttctgtgaaggcactctaagtcacatggcatcagtggggtcatcttgttcttttatagtgaagaggggagtaaataatagaggacaataatacagtccaccaaagatactga

SEQ ID NO: 919580 - DNA, 120 bp, Artificial Sequence
  ENSG00000272168_62 (sequence is synthesized)
ggccaattatatccaaaaagcaagatcagtttggtggaatgacttactaatgcactgagatgcccatatgcccatattccctgccaaacagtctaaatggaaaactagaatcctaattaa

SEQ ID NO: 919581 - DNA, 120 bp, Artificial Sequence
  ENSG00000272168_63 (sequence is synthesized)
aatgagaaaaggcgtgtcacaaagcttcctttattgtagagcagttgagttgtgatgttcgttactagattttttttattagcctgttgttagttgtatgtatgccttctatttattaag

SEQ ID NO: 919582 - DNA, 120 bp, Artificial Sequence
  ENSG00000272168_64 (sequence is synthesized)
cacttattatgagccaagcatagtagtaaacctttttctgaccttatttaaacctatcaacagtctcaagttggaactaggtctctttccatttacagataaaaatattaaaggacagaa

SEQ ID NO: 919583 - DNA, 120 bp, Artificial Sequence
  ENSG00000272168_65 (sequence is synthesized)
taactaagcaacttgcccaaagtcacaggtccctgctcttatctgctatattttctttctctatttttctttttcgtgtaatacagaaagcccatgatcatcctgatgcctcctctgtgt

SEQ ID NO: 919584 - DNA, 120 bp, Artificial Sequence
  ENSG00000272168_66 (sequence is synthesized)
ggatatcgcaggaatggcaacttacgaccttatgaagtagtttattctaatttagggtagctcaaattactagaacaaatatttaatgggcctttaatcttctacccctaaaattttttc

SEQ ID NO: 919585 - DNA, 120 bp, Artificial Sequence
  ENSG00000272168_67 (sequence is synthesized)
cagttggttctagttttatcttatggagctaaatgtatggaaaatgattcaaagaaccttccttcaagtagtagaaatcatcttctagattttatctttcccaatctaaaaatacattgt

SEQ ID NO: 919586 - DNA, 120 bp, Artificial Sequence
  ENSG00000272168_68 (sequence is synthesized)
tgtttcaacaattccatgaataacatggattgtggatttttatcatcctggttacttttctcttggactgccaaacatttaagtgcggaacaagaactgtctgcaataaaacataatgaa

SEQ ID NO: 919587 - DNA, 120 bp, Artificial Sequence
  ENSG00000272168_69 (sequence is synthesized)
ggaaggaggacaacccaagccatctgctgcacatcacgatgaggggaatgaccaaacgctagttgaacagatgaaataactgagaggcagccaagctgtctggtggtacaagactgcaca

SEQ ID NO: 919588 - DNA, 120 bp, Artificial Sequence
  ENSG00000272168_70 (sequence is synthesized)
gatcaaattctgggagtttacatttctgaaacttgggtcaaggtcctggccagtcctcaacaagagcaaccgtgtggacatctgtggcaatgtcagattcactcgatcccaagacaagat

SEQ ID NO: 919589 - DNA, 120 bp, Artificial Sequence
  ENSG00000272168_71 (sequence is synthesized)
gctctttgataatggactagaggaaagggtgaaagaatggtttagagccaattcaagaaagaacaatctgattcacacttggaggaggacacaggagctgaatcagatggggctgtggtg

SEQ ID NO: 919590 - DNA, 120 bp, Artificial Sequence
  ENSG00000272168_72 (sequence is synthesized)
cctggggaggaaattttttattttgggatcctagaacgaagagacaatgaagatgacatggaattcatcaacatgctttccttgatctacacaaccgcctgccccatgctgctggcagag

SEQ ID NO: 919591 - DNA, 120 bp, Artificial Sequence
  ENSG00000272168_73 (sequence is synthesized)
cagtctgttctcttggcctatgcagatgccatagtatacaagtgttaaaattgtggtggatcccagaagcgtgcagacatgttcagatgtgtccagagttcctttcttctggtgggttcg

SEQ ID NO: 919592 - DNA, 88 bp, Artificial Sequence
  ENSG00000272168_74 (sequence is synthesized)
gttcagatgtgtccagagttcctttcttctggtgggttcgtggtctccctgacttcaggagtgaagctgcagatcttcatgagatagt

SEQ ID NO: 919593 - DNA, 120 bp, Artificial Sequence
  ENSG00000272168_75 (sequence is synthesized)
caaatgatccttccatcttagccgccagagtaggttggactacagacatgcaccatgatactcagctaatttttaattttttttatagagacggagttctcactacgttttccatgctga

SEQ ID NO: 919594 - DNA, 120 bp, Artificial Sequence
  ENSG00000272168_76 (sequence is synthesized)
gtgtgagctcttggcctcaagtgatcctcccacttctgcctcctaaagtgctgggataacagaaaagcagtaagaaatttgaagcattgaaaacaacagggccgggcgcggtggctcatg

SEQ ID NO: 919595 - DNA, 120 bp, Artificial Sequence
  ENSG00000272168_77 (sequence is synthesized)
aacaacaacaacaacaacaacaacaggatttgcctattatgttactctgttgattcagattctgttactgttactttatgatcatgtctctagagaaatctgatttgctttactctatgg

SEQ ID NO: 919596 - DNA, 120 bp, Artificial Sequence
  ENSG00000272168_78 (sequence is synthesized)
tttactctatggtaccaggctttgccagaatactgaaactgtttcaagtcctaggactcaggctaggacacaatgacgctctcaattgcactgaaccttggggcaaagaagagagtgagg

SEQ ID NO: 919597 - DNA, 120 bp, Artificial Sequence
  ENSG00000272168_79 (sequence is synthesized)
caagatagtggtcaagccaacagtgaggaagaatgaagagcgaattgcatgaacaccaccactccccgcagtgtgttcactgtgaggagtttgtgagaagggaaggaacctcaggtttat

SEQ ID NO: 919598 - DNA, 120 bp, Artificial Sequence
  ENSG00000272168_80 (sequence is synthesized)
acttcaggattatataggtattcctagggtactggttatagaaataccatagaaatcagagagagactttggccatatgggtcactgtggtgattcatattcacattctacctatattta

SEQ ID NO: 919599 - DNA, 120 bp, Artificial Sequence
  ENSG00000272168_81 (sequence is synthesized)
ttgatataagaatctatgcccatgtagctctggacaatttgatggcttgagaaattttactgacaagatgagggaagaggaagagagtatatagattgtaatatttacccaatgggcagc

SEQ ID NO: 919600 - DNA, 120 bp, Artificial Sequence
  ENSG00000272168_82 (sequence is synthesized)
agttggccccgggtagcaaaagatatagttctctagagtctcctagcttattcaacctgcccacaggctgcatgcggccaaggatggctttgaatgtggctcaacacaaattcataaact

SEQ ID NO: 919601 - DNA, 120 bp, Artificial Sequence
  ENSG00000272168_83 (sequence is synthesized)
cacaaattcataaactttgttaaaacattatataagatttatttgtgagtattactttttagctaattagttattgttagtgctagtgtatgttatgtgtggcccaagacaattcttctt

SEQ ID NO: 919602 - DNA, 120 bp, Artificial Sequence
  ENSG00000272168_84 (sequence is synthesized)
caaaagattggacacccctgctctagactctcctgatgaaccccctgccctatgcccgctggtaatcaaccacaaaagttacctttaaatatgcttctgaagaaaacataatatatgttt

SEQ ID NO: 919603 - DNA, 120 bp, Artificial Sequence
  ENSG00000272168_85 (sequence is synthesized)
gttttagagataatagatgtagatcattgttagccatcttctttaattttggaaaaacaaatttaattcaccaaaattcacccctacttctgtgaaactgttcaagacttagcaccacag

SEQ ID NO: 919604 - DNA, 120 bp, Artificial Sequence
  ENSG00000272168_86 (sequence is synthesized)
gctacaggaaagtaggaagttatgctgaaaaatgccttggattttctctatactgttgaaagttggaaagttattaccaaaggtgagaactgagcttctcattatggtagtcacatgcag

SEQ ID NO: 919605 - DNA, 120 bp, Artificial Sequence
  ENSG00000272168_87 (sequence is synthesized)
tggtgggtattggcaatccttggagttccttggcttgtaggcacatcgcttcaatctctgcttctgctttcacgtggggctcctccctgtatgtgtctgtgttgcctccttttctgactc

SEQ ID NO: 919606 - DNA, 120 bp, Artificial Sequence
  ENSG00000272168_88 (sequence is synthesized)
tcataagaacacttgttattggatatagagccctccctaatccaggatggtctcatcttgagatctttatcttggttatgtctacaaagacccttattccaaataaagtcacattttgag

SEQ ID NO: 919607 - DNA, 120 bp, Artificial Sequence
  ENSG00000272168_89 (sequence is synthesized)
tttgtttccctctggaaaccacatgtgtaccttgtttgcaacagtatgggtatggatgttttggtagttcttacacatttattttaaaatttaaagaagtagtgccataaagctttatca

SEQ ID NO: 919608 - DNA, 120 bp, Artificial Sequence
  ENSG00000272168_90 (sequence is synthesized)
aagatgacccatctctaaacaaagcaaactgactaggattctctcatgcttaacatgcatcttactggttctttatgaagagctttctcttggatttacagaaagcgtggtgctggcatc

SEQ ID NO: 919609 - DNA, 120 bp, Artificial Sequence
  ENSG00000272168_91 (sequence is synthesized)
agttggagaaaatcactgccgaacagtgcactaaagcctctgccttggccattctgccttggaggaggagccgagagtgagactgggtggtttacagacgtgttcctgccaaatgccttg

SEQ ID NO: 919610 - DNA, 120 bp, Artificial Sequence
  ENSG00000272168_92 (sequence is synthesized)
aaaaatgtttactttggcagaaatacctagaaaatatagtgactgcaggccttgtttcaagttcacatattgaatctcaacatgtttacttatttgcaagtggttcaaatgaacaaatcg

SEQ ID NO: 919611 - DNA, 120 bp, Artificial Sequence
  ENSG00000272168_93 (sequence is synthesized)
aattgtctgttatcctaagaaatgctaaattgtccagaatagacctgcattaacaaagtgtaaagtgaaacaagagaccagttggcagagagagaaaagagagagatttcgactaaagcc

SEQ ID NO: 919612 - DNA, 120 bp, Artificial Sequence
  ENSG00000272168_94 (sequence is synthesized)
atcagcacaggccataaactcaggacctgaaatgcattaatataatgttaaacgaaataacgctgtgggtatgtctgcagcactggtagggaatttcattaaactgcagattctccctgg

SEQ ID NO: 919613 - DNA, 120 bp, Artificial Sequence
  ENSG00000272168_95 (sequence is synthesized)
ttccggtaggagactttctggatggggaagatttccaggaattggcaacaagctcatttcactggtgggtttgctgaagcattatcacaagacagtcagaatgactgatgagtgctcttc

SEQ ID NO: 919614 - DNA, 120 bp, Artificial Sequence
  ENSG00000272168_96 (sequence is synthesized)
gggagagaggaagaaggggtgagagggagaaacctgccgccgctcgccgcctctttgtctgctccgggacttggaacaaaagggggaactctgatgaactctctttcctcccctctcccc

SEQ ID NO: 919615 - DNA, 120 bp, Artificial Sequence
  ENSG00000272168_97 (sequence is synthesized)
ttccctctggaaaccacatgtgtaccttgtttgcaacagtatggagccagaggcagtatgtcacattaaccttcattaactgcccaagaaatgagttctggagaccagaaggccaaaatc

SEQ ID NO: 919616 - DNA, 120 bp, Artificial Sequence
  ENSG00000272168_98 (sequence is synthesized)
ctttataggctgggaggtcacagctctatccccgttcaagactgcacctccttttttctctcttccttcccaggagctgtggagtccaagtgtgactgccaagaggaatccagcaaagcc

SEQ ID NO: 919617 - DNA, 120 bp, Artificial Sequence
  ENSG00000272168_99 (sequence is synthesized)
ggtgccgaaaaggttagggaccagcggctcaagccacccagcctgtggtactttgttacggtagccctggcaaatgaatacaacacgttttagactatgatgttacacatgcagtgtgtt

SEQ ID NO: 919618 - DNA, 120 bp, Artificial Sequence
  ENSG00000272168_100 (sequence is synthesized)
gagagccaaagaacccaaatgattcgtggtatctgcccttgaagagtttttaatctttttgggcatgatgaaacatacacatggaaaataaaatagcatataaccaagtgcccaaatcag

SEQ ID NO: 919619 - DNA, 120 bp, Artificial Sequence
  ENSG00000272168_101 (sequence is synthesized)
taataaatacagttgactccataaacatttaggaaccttctatcccatgtttccacattctatcccagtggcttttgccactaaatttcttcacccactattagactgatgttttcatct

SEQ ID NO: 919620 - DNA, 120 bp, Artificial Sequence
  ENSG00000272168_102 (sequence is synthesized)
ttcagtatcagactcaagctttaatctagaaagagggggtggggggataaatgctatactttggaaccagtccggatattttaagtatgtttttaaaaagtataatcctcacaacatgaa

SEQ ID NO: 919621 - DNA, 120 bp, Artificial Sequence
  ENSG00000272168_103 (sequence is synthesized)
agttattagttctatttttcaggtgagaagagttaaggtcaaacagacgaaagctagttagtggagggactggtattccaagcccattctggttaaactaaatcttgtgttctttccact

SEQ ID NO: 919622 - DNA, 120 bp, Artificial Sequence
  ENSG00000272168_104 (sequence is synthesized)
agaaaactgctttttgtcttaattataattttgtgacaaggatgtatagtccattaaggaatatatacaacagaagaagcatttaagtggacttgaggtttgtgaatctgaactagtttc

SEQ ID NO: 919623 - DNA, 120 bp, Artificial Sequence
  ENSG00000272168_105 (sequence is synthesized)
tatcgactttcacatcagcagctcctattctggggaaagagaatggaggctgggagtgatcctgacaaaccttgatgtgcaggcttgtggagaaactggattcacacccaggctcgtgga

SEQ ID NO: 919624 - DNA, 120 bp, Artificial Sequence
  ENSG00000272168_106 (sequence is synthesized)
gtgtgggagaggctggcctgtcacaatatcaggacagcctctcttaataacactgcagaaggaatcgagggccctgtggtttgcggtcagtgtgcctcttgtgccaactttggcactaca

SEQ ID NO: 919625 - DNA, 120 bp, Artificial Sequence
  ENSG00000272168_107 (sequence is synthesized)
atgtcttcaatcacattatcttccaaaccggctcttcatcctatgtccttatttctgctaatggtattcatttctcttattcatggactctgggaatcttggtggtattaaaacctgtct

SEQ ID NO: 919626 - DNA, 120 bp, Artificial Sequence
  ENSG00000272168_108 (sequence is synthesized)
cttctttccccctcgatcttccacattccatttcctttcagcagaatcccaagccttcaccatttttcatttttggtgctgtttcagagttgctgtgaactttacctgggtcctctatca

SEQ ID NO: 919627 - DNA, 120 bp, Artificial Sequence
  ENSG00000272168_109 (sequence is synthesized)
ccttacccagccatttgtcattctgcctggtaaagggttgagcagatttatctatatgaatgatcttatttaagctattctgtacaccttctgctacttaaacaggctctatgcttccac

SEQ ID NO: 919628 - DNA, 120 bp, Artificial Sequence
  ENSG00000272168_110 (sequence is synthesized)
atctgctctctatctgcctatgtgactcaaacttcaattgtccatctcagacatcacatcctccatgaagccctcttgggttatttgaagtaatctctcttctgggctctcatagcatta

SEQ ID NO: 919629 - DNA, 120 bp, Artificial Sequence
  ENSG00000272168_111 (sequence is synthesized)
ctgcttgtaactctttcaaaagatgaattttgtgctgttgtttacttaatgagtacaaatttagtgataaatttgaaaaacttgtgtccatgtttgataaatatgaaaatctcatcattt

SEQ ID NO: 919630 - DNA, 120 bp, Artificial Sequence
  ENSG00000272168_112 (sequence is synthesized)
tcaatatttcttagaatttcaaaatgtactaaatattattaaaaaccaatcatggcaattttaacattgagtattcttttttgaaatatgaatgctcctctctcaagactggtatacttt

SEQ ID NO: 919631 - DNA, 120 bp, Artificial Sequence
  ENSG00000272168_113 (sequence is synthesized)
ctactcccttttcaagtgcccttatcgaactttgctgatgaaatcatcttttcttagtttgttagactttggatggtggagacctgtgcctgctacttctctcatctcctgatacctaat

SEQ ID NO: 919632 - DNA, 120 bp, Artificial Sequence
  ENSG00000272168_114 (sequence is synthesized)
gcatagtgttcagtaagtatttatttggtgataacaatatcaaaaactagataatgcttagaagatccaacaccttccaaaatctctgttaaccaggtactgaaatatggtcaaccagat

SEQ ID NO: 919633 - DNA, 120 bp, Artificial Sequence
  ENSG00000272168_115 (sequence is synthesized)
gagctgaaatgtcaagaacttatagacacacatggtttcatggttgtgaaactagaagatgtggcatattttacacaatggagggaagagcaaaggttatgcatgtgcggaggcagagcc

SEQ ID NO: 919634 - DNA, 120 bp, Artificial Sequence
  ENSG00000272168_116 (sequence is synthesized)
cctaggcaggtttccctcttttccttcctgtgcactgatttttattttggtgaactgaaacaggggtctaacaaactggtatctcatttgtctttataaacagaactgccagattggctt

SEQ ID NO: 919635 - DNA, 120 bp, Artificial Sequence
  ENSG00000272168_117 (sequence is synthesized)
tgcaattcagggccctgtagggtgcccacctcctcagtttgggcagcagcattacatctgagtcttagaataaaaatggaaagcaatggctcaacccattggtttgtcaccatccacatg

SEQ ID NO: 919636 - DNA, 120 bp, Artificial Sequence
  ENSG00000272168_118 (sequence is synthesized)
aaggatctctattggtaaaaaaacagactcccgtgttcaaggccctggggctggaatcaaatccatcattcatttatttcggttttttaaggctaaatacatagggaagaaaatgaaatg

SEQ ID NO: 919637 - DNA, 120 bp, Artificial Sequence
  ENSG00000272168_119 (sequence is synthesized)
tgagaaagctgtgcattttcaatgtcatcttgaaagtgagtatctttagacacataaagtagatgagtggttaacttgggctgggagagggagtgaggagtggttgtacatggcacaagg

SEQ ID NO: 919638 - DNA, 120 bp, Artificial Sequence
  ENSG00000272168_120 (sequence is synthesized)
aaggtttctatttagtgtgattgaaatgttctataatttgattgatgattgtacagttctgtaaataaactaaaatgtattgaattgtataattaaaacatgcagattttatatttaaaa

SEQ ID NO: 919639 - DNA, 120 bp, Artificial Sequence
  ENSG00000272168_121 (sequence is synthesized)
ctttgataaaagtgttttaaaaatgaatatctcatagggtagaatgaaatgaataagagaaacagtgaggcatccaggggactttctgcacagtgggtctgtcattaggcaggtacgttg

SEQ ID NO: 919640 - DNA, 120 bp, Artificial Sequence
  ENSG00000272168_122 (sequence is synthesized)
ccacagccagttctaatgcccactcataggccaatgcctaggacaattgctcagatatcgcctctgacaggcaagtgttccatcagtaacagcaggcatcggaagatgatgccattccct

SEQ ID NO: 919641 - DNA, 120 bp, Artificial Sequence
  ENSG00000272168_123 (sequence is synthesized)
gctgttagtatgattatattgacttaggtttttaattttctttcttgctgtgttttttttttttcaccttcttagcctctaaagcatgaacatctgtgtttttcagctgccttttcagaa

SEQ ID NO: 919642 - DNA, 120 bp, Artificial Sequence
  ENSG00000272168_124 (sequence is synthesized)
ggcaataaaaagggtttgttcgatttctctcttctggatcttctggattatcagcgctccttactggcttaaccaaacacaaacatgaaacaacttggaaaggatcacaaaataaaagat

SEQ ID NO: 919643 - DNA, 120 bp, Artificial Sequence
  ENSG00000272168_125 (sequence is synthesized)
tgcagtgtgtctgctgtggactgaaccctcctcatcatttggcaatccattgctgacagtcgttctgggcttcccaatcactgctggagtacttcagccctttatgcctaaggctgcagc

SEQ ID NO: 919644 - DNA, 120 bp, Artificial Sequence
  ENSG00000272168_126 (sequence is synthesized)
gtggttggttgtggtgcgttcaagattcctcgcctaagatgaggttcctgagcttccagtaggcgactgactgcccaagagacccagggctccgcaaggagacggcgcaggtgtcggggc

SEQ ID NO: 919645 - DNA, 120 bp, Artificial Sequence
  ENSG00000272168_127 (sequence is synthesized)
aggaaaaatggatgaatcgacggaccatatcaccctggcacctatatcagctcaaaaactgaaggaaatacccctttcctgccctctctttgactaatgctatagactctgagtcagtag

SEQ ID NO: 919646 - DNA, 120 bp, Artificial Sequence
  ENSG00000272168_128 (sequence is synthesized)
ttcctggtgggacctgagagtccacattcctgatgagctccaggtgttcccatgctgctgcccctctgaccacacttagaataagaaggcttgaaatgaaatctgagaaatcagcctctt

SEQ ID NO: 919647 - DNA, 120 bp, Artificial Sequence
  ENSG00000272168_129 (sequence is synthesized)
gattccaattttaaacatgcaattgattcttgtaatttttcattcttgtcaaaatgcataccagtaagtttgtaatcagtattggcatgcttaaaagaatttaagacttgttatatttgt

SEQ ID NO: 919648 - DNA, 120 bp, Artificial Sequence
  ENSG00000272168_130 (sequence is synthesized)
cattttaatttatttaaactttaaagatttgttcagaacttggaaagattttgcttaagctcataaatttacccactcaggcatatgagatagggtactttgatttataaatgaagttta

SEQ ID NO: 919649 - DNA, 120 bp, Artificial Sequence
  ENSG00000272168_131 (sequence is synthesized)
aaattaagggaatttaattaagttttcaaaatgagattggttgttttaaggggaatttactttgtgtaacttgagttcatcaaacgctaatccaagttccctgcaaaacctgttctgttt

SEQ ID NO: 919650 - DNA, 120 bp, Artificial Sequence
  ENSG00000272168_132 (sequence is synthesized)
ctcgcagcatggatttaaatgcatgtgcatgcatgtagagacatgaaaaaaggtttctgaccattttacacaggaagtctgtcactttgctggatcgggcttgattgcagcttgtgtttt

SEQ ID NO: 919651 - DNA, 120 bp, Artificial Sequence
  ENSG00000272168_133 (sequence is synthesized)
cagctccagttcaacacccatttcctgactagtgagacagcatggccaaagcagctgcatgcagaattttctttttactgtgaaagcaagccccctctgttttaactccttccagttctg

SEQ ID NO: 919652 - DNA, 120 bp, Artificial Sequence
  ENSG00000272168_134 (sequence is synthesized)
aatgctctgtgctttgctaggaccgattgtggggttttgttttcttcttctacaaatccctgtaaacacagctgtattcagtaatggcaaaaaaattctatcctgtaaatagaaatctga

SEQ ID NO: 919653 - DNA, 120 bp, Artificial Sequence
  ENSG00000272168_135 (sequence is synthesized)
tcaatttaatcaaaataaatgtatcccagatgactttgagaccagctggctaccacaggcttcagatgctaaatgctcagtggagatgaatacagtgttatatttacatgtttcagagtg

SEQ ID NO: 919654 - DNA, 120 bp, Artificial Sequence
  ENSG00000272168_136 (sequence is synthesized)
ccgggatcagcctataatttgcaaaaagaaattattttctaaagacgagaggtggtcctaccagctcacagctgatggttaggtacaggtgtaaatgctgttcatgtgatttggagattt

SEQ ID NO: 919655 - DNA, 120 bp, Artificial Sequence
  ENSG00000272168_137 (sequence is synthesized)
gcagtgttgcatttcaaaaggcatgtgccatgaggcagagtatggctgttgttagtatggagaatgcttgcttctaacttgctgttatggagagccgaatgccctctgaatagcttctag

SEQ ID NO: 919656 - DNA, 120 bp, Artificial Sequence
  ENSG00000272168_138 (sequence is synthesized)
tgaggttgagggcaggcacttgaggcttgttgtagattcagatgtgagagctggggttctccaaccccagctcagtggagtcagctcaaccctgggggtgaggaggtttcccagttgtca

SEQ ID NO: 919657 - DNA, 120 bp, Artificial Sequence
  ENSG00000272168_139 (sequence is synthesized)
tggggagctcttctgggacgcctgtctggcccttccactgtttgttactaattctacaaaggcagctctgtgtgttggattatgtttggccagctgttgatgcattcctgcggatggggc

SEQ ID NO: 919658 - DNA, 120 bp, Artificial Sequence
  ENSG00000272168_140 (sequence is synthesized)
tgggtgaggatcttattactgtactttcaaactgtagatctgtgtgcagggatagtacagaaggaaaggaaaagcaataagttacagaatctgatcattcttacctctttctccagatag

SEQ ID NO: 919659 - DNA, 120 bp, Artificial Sequence
  ENSG00000272168_141 (sequence is synthesized)
tcctagagtgaatccagaaaggctttaaagtgaaaagaggaaagagagagtaagtgattgggggtgggtggcatgaggagaagagaatgaaacagagcaagcgcacaagagaaaaacagc

SEQ ID NO: 919660 - DNA, 120 bp, Artificial Sequence
  ENSG00000272168_142 (sequence is synthesized)
cttagaacttcaaagctgcatagacaagcagaatgtcaccagcttgtaattagcggttcatggttgcgtcagtgactgtatctatccaagaataactatgtgatatgtgccacaaagtga

SEQ ID NO: 919661 - DNA, 120 bp, Artificial Sequence
  ENSG00000272168_143 (sequence is synthesized)
agaagatagtcataactaagttatcaaacccagttcaaacaagggcaaatggattaagaaattttctgtttgtaaatcaaatactgatggattacacagataagacttaactgaattctg

SEQ ID NO: 919662 - DNA, 120 bp, Artificial Sequence
  ENSG00000272168_144 (sequence is synthesized)
cgtaattgaaggctgaattatcaatttgtcaggggggatatgttcattaaatgaaactgtgaacgcttaaacatgcaaattaatcatgcgagaaaatatcagtgcaagctctatcaatac

SEQ ID NO: 919663 - DNA, 120 bp, Artificial Sequence
  ENSG00000272168_145 (sequence is synthesized)
aagatgttttactaaatagccaaaaatggcactgccagtctcctatctctgtatccacacataaatttttttgtttgtttttgtgcatttcaatagagagaagtcaaaagttacattcga

SEQ ID NO: 919664 - DNA, 120 bp, Artificial Sequence
  ENSG00000272168_146 (sequence is synthesized)
gtaaatagggtaaattaaattctaaaattcccactttagaatttaaaaaacaactaaggagttttgatttttggtgatctcccgagtttaaaccttgaaggagcttttgctgtcttgaag

SEQ ID NO: 919665 - DNA, 120 bp, Artificial Sequence
  ENSG00000272168_147 (sequence is synthesized)
ccaaacagcagctagtcagtaatcgttatgggaagtcagggtaccacagttgttgagatttcaaggccacgttcacttccctcccttgtctcttgtgcttggagatttgggtgctactac

SEQ ID NO: 919666 - DNA, 120 bp, Artificial Sequence
  ENSG00000272168_148 (sequence is synthesized)
agcctccacaaagagacagtgggaggagctgattggtccgtaggcttagaatgtttactcttatttgttttcagtgctcctccatggcattcattttctgtttgtatttgtgttcatgct

SEQ ID NO: 919667 - DNA, 120 bp, Artificial Sequence
  ENSG00000272168_149 (sequence is synthesized)
tttgtttctctgcccaaagagaagtcaattttagttcagctctgtgtgtttagcttgctgggtaatatgtgcatatgtattgcattacccatgtatgcatttttctttttttaaaatgtg

SEQ ID NO: 919668 - DNA, 120 bp, Artificial Sequence
  ENSG00000272168_150 (sequence is synthesized)
gattagggaaaattgtagcatggaaagctgcatatattaaatcaatagctttttgaatcacatgtaatataatttaaatatactcactttgaggttgccaaaactgacattgtctgagcc

SEQ ID NO: 919669 - DNA, 120 bp, Artificial Sequence
  ENSG00000272168_151 (sequence is synthesized)
cgtttaatttacatcttcgatttagtcaagaagcggaacctgccagatcagaatagtgtattctgtgcacccaacagggtggaagacattattttgtttgtgttagttcaaacagctggt

SEQ ID NO: 919670 - DNA, 120 bp, Artificial Sequence
  ENSG00000272168_152 (sequence is synthesized)
cattaatgcagtccccatttctagagcgaagtgctgctggacatgaatgcccgcctgattaatgctgcccctccgagggtccttcacccagcagtcatgctcgcagcagaataatgtagc

SEQ ID NO: 919671 - DNA, 120 bp, Artificial Sequence
  ENSG00000272168_153 (sequence is synthesized)
atgatgtgattgcactctaacaggatagtatgtcattgtgtcaccaagcaattgaggttattatggggcagggcagacagacgggacagtggggttactagaccgtagcatttttagaaa

SEQ ID NO: 919672 - DNA, 120 bp, Artificial Sequence
  ENSG00000272168_154 (sequence is synthesized)
tacaggcctgacctacttagagttattctctctggctggcagctgcatggtacataaagtctcctgataggctgagtctgttgctagggggaattagcatgaatttttccacacacagac

SEQ ID NO: 919673 - DNA, 120 bp, Artificial Sequence
  ENSG00000272168_155 (sequence is synthesized)
tcagtggctgaatgataaaagctgactggaattaaagagatttggtttagtattatacagatttatgtgcctccttttctttctcaagtgcagagaaagagtgcaaaacacagattttgt

SEQ ID NO: 919674 - DNA, 120 bp, Artificial Sequence
  ENSG00000272168_156 (sequence is synthesized)
ttccatttgttctttgaccttcttgttctctccccctcccctcaagatgcatgaggggaggagggcagggcagttatgaaattttggttaatctctcactgttggggtcactgaaacgat

SEQ ID NO: 919675 - DNA, 120 bp, Artificial Sequence
  ENSG00000272168_157 (sequence is synthesized)
gtcgcaaattgcaagatatttaagcttaaaaactgttgggaatgactaacagaaggttagattatttttcctcttctgtgcactaagctgttttgaagttgggcatgcatctttcatgca

SEQ ID NO: 919676 - DNA, 120 bp, Artificial Sequence
  ENSG00000272168_158 (sequence is synthesized)
ctgtatatttaaactctctttcccttttgggcttgaacaaaacatttatataaattcttttctatccaaacagattgaagcttgcaatctctgtcttgtttaaaacaaggtggtcaggat

SEQ ID NO: 919677 - DNA, 120 bp, Artificial Sequence
  ENSG00000272168_159 (sequence is synthesized)
tccagatttagataggaaaaaaatatatataccatttttgttattacaaaatattattttctggggtattgtgggtttggctcccttttcaaaaaccagcctgatgtggatgcttatgga

SEQ ID NO: 919678 - DNA, 120 bp, Artificial Sequence
  ENSG00000272168_160 (sequence is synthesized)
tgaaactgaactgctcctaccctaccctgttggcttcacaatgtataggaaaacataggtttttctccagaagaaaatctgcctgcagaatgtatctggaggttgttttccttgttgctg

SEQ ID NO: 919679 - DNA, 120 bp, Artificial Sequence
  ENSG00000272168_161 (sequence is synthesized)
acatatgcactgcatgtagacaactcacataatcaactgtataagatgacccatttttttccttctcatggatctccaagtgtctgtggcttttaatagatcttttctagaggaggagtc

SEQ ID NO: 919680 - DNA, 120 bp, Artificial Sequence
  ENSG00000272168_162 (sequence is synthesized)
ttgatagatctttttaaggtaatctgaaaagccatcaggagaaaaattaaagcaacacatatttaagaatactttaatttttcttgttcttaattatatgctaactgtgcttaaactgca

SEQ ID NO: 919681 - DNA, 120 bp, Artificial Sequence
  ENSG00000272168_163 (sequence is synthesized)
atttctttctgttaccttttactgctgaaagtagtgattatccttgccttttagatttgaaattaattttcgtgagaacaccctgggatatcacaagtaaaaaagaaactgggctacata

SEQ ID NO: 919682 - DNA, 120 bp, Artificial Sequence
  ENSG00000272168_164 (sequence is synthesized)
aaggaaaagaataatagagattcttgtaaacttgtcacattagttttttttgcccacgtgaaaaaggcaagagaaaatttaggtgtagatttttcttttcatttacattttaaaaaatat

SEQ ID NO: 919683 - DNA, 120 bp, Artificial Sequence
  ENSG00000272168_165 (sequence is synthesized)
ttggaactatttagatacataatgctttaaaacagtgattcctacttatagcggagactacagtcaaaacaaaataaaacaaatcctctaatgctatcagagccaagaaatctatcaatc

SEQ ID NO: 919684 - DNA, 120 bp, Artificial Sequence
  ENSG00000272168_166 (sequence is synthesized)
atatatacattttttaaatccaggagtgtttacatttcagcatataaatcttatcaagctaaaatagagtatatattctgatgttgtaattgatcgatcataccctcactggctttgaga

SEQ ID NO: 919685 - DNA, 120 bp, Artificial Sequence
  ENSG00000272168_167 (sequence is synthesized)
gtccccaaacatttattgtaaaggtttccaactacactagcaatcttttgtaattgaataaaatgccaatttatatttgttgaataaaagattatctggggtactgctccttccgaaatg

SEQ ID NO: 919686 - DNA, 120 bp, Artificial Sequence
  ENSG00000272168_168 (sequence is synthesized)
caatgggaagaagagagccagccagctctgtattctaagaacctggaaacaatctttattcacactgttaagacgattgagaaaaatggatggatagagtttatttgctaagagaaaaac

SEQ ID NO: 919687 - DNA, 120 bp, Artificial Sequence
  ENSG00000272168_169 (sequence is synthesized)
tgggaattctccaccttaaagaaggtctgtaatatagcaatatgcattgccttctgagtgattatttagttcaaggaagagtatattcattttatctttaggaagtttcagataggaatg

SEQ ID NO: 919688 - DNA, 120 bp, Artificial Sequence
  ENSG00000272168_170 (sequence is synthesized)
cagataggaatgttaaggtattatttctcatttgtaatttactagcagatatttgcctagatatgataatgttaggaataaaaatatggaattaatcaatattaaaataggaaaatatct

SEQ ID NO: 919689 - DNA, 120 bp, Artificial Sequence
  ENSG00000272168_171 (sequence is synthesized)
ggagaacatttacagaggactgtgggtaaagcaaagtcttcaagggaagataacaaaggatgaaacaatggtgttgtgtgacttcctatgatgtttactcttctgcatgtgtgtgagtca

SEQ ID NO: 919690 - DNA, 120 bp, Artificial Sequence
  ENSG00000272168_172 (sequence is synthesized)
tggctggtttaaggccagcacaagaatggatcatgcaggggaggtggaagctctcaggagaaatctacaagaccacaggttggagacagagctcagagacagaaaagcatttttccttta

SEQ ID NO: 919691 - DNA, 120 bp, Artificial Sequence
  ENSG00000272168_173 (sequence is synthesized)
gaacatagaagtaccattcacaagagtactgtgctcctggcggtattttccaacagagaagggaaagtcctgtcttcagttcgtttttaaacttaagctgctagaggacctcaggtgtga

SEQ ID NO: 919692 - DNA, 120 bp, Artificial Sequence
  ENSG00000272168_174 (sequence is synthesized)
aatggagaacatttacagaggactgtgggtaaagcaaagtcttcaagggaagataacaaaggatgaaacaatggtgttgtgtgacttcctaagaaaaatcaagacaagactttgttctat

SEQ ID NO: 919693 - DNA, 120 bp, Artificial Sequence
  ENSG00000272168_175 (sequence is synthesized)
agtgtgaggataaaaataaagcaaatttcgaagttgaaagagagctaaaagataatcaagcccaacctcctcattttatcagtgagaaaatgaacctcgctcaaggcaactgagcccgat

SEQ ID NO: 919694 - DNA, 120 bp, Artificial Sequence
  ENSG00000272168_176 (sequence is synthesized)
gctactgccttgagtctcattttgtttccctctggaaaccacatgtgtaccttgtttgcaacagtatggttggaaaactttaatatgagattgaagatatgatttgctttctggattgtt

SEQ ID NO: 919695 - DNA, 120 bp, Artificial Sequence
  ENSG00000272168_177 (sequence is synthesized)
ttatgtatctttttatactttaataaagaaaaataaaataaatttgaaacacaaataactctaactggccctttttatgtaaaaagaagtccttgaataaaatttaccttgacagcacta

SEQ ID NO: 919696 - DNA, 120 bp, Artificial Sequence
  ENSG00000272168_178 (sequence is synthesized)
aagtcagaagatgctagcggaagaaacaggacccagaactccattggaaaatggggtatacagacttcgaggatgccagacaaaaagatcatttgaaatattgttgtcactaagccttct

SEQ ID NO: 919697 - DNA, 120 bp, Artificial Sequence
  ENSG00000272168_179 (sequence is synthesized)
ttgatcaagacaccatgagctcatggcaggattgagctttcagctgctctgtagattctcatcagaggtgcagactcttctttgtggatcatacctacattttatttttcctgaaaatat

SEQ ID NO: 919698 - DNA, 120 bp, Artificial Sequence
  ENSG00000272168_180 (sequence is synthesized)
agtatgtattcagggcacacaggcatcttctattcacttcatcatcaacacttgtcaaacaaaaactgctattcatgctacagactcatgcagctccctgcattttgaaagaattgcctc

SEQ ID NO: 919699 - DNA, 120 bp, Artificial Sequence
  ENSG00000272168_181 (sequence is synthesized)
cctcttctgagcctggctcaaggtcctctgaaagaatctggaggaaatgatgatgctcaggagacaattcatgatcactcggaatttctgacaaccatgtgaccttggaagccaagtgct

SEQ ID NO: 919700 - DNA, 120 bp, Artificial Sequence
  ENSG00000272168_182 (sequence is synthesized)
aaagataatggagctatgacaataaagagcttgagtcttgaatcattacatggcagaccatccactcagcactctcatcgaacagttatgtaaacgtttctggagaaaataacagaagac

SEQ ID NO: 919701 - DNA, 120 bp, Artificial Sequence
  ENSG00000272168_183 (sequence is synthesized)
atggcaggagaaatgattgagagcttttccagtttggcatggaaacaaagcaaagcaatttcagtgtggtaacaagactaaggaggagacagatgctgtgcgggcaacagtaccagagct

SEQ ID NO: 919702 - DNA, 120 bp, Artificial Sequence
  ENSG00000272168_184 (sequence is synthesized)
aagggatgagaaacttctccataagatgtccctttattgctccagcagctattatgggctgcgtctccccaagcatggcagctcaccactgtggaaccctaaatagaatgacactcagtg

SEQ ID NO: 919703 - DNA, 120 bp, Artificial Sequence
  ENSG00000272168_185 (sequence is synthesized)
ttgaatggcaaggcctctggtcataaataagataagccgaaagacatttgatggttatcacagaaatggactttccttacttggaattttcctgcctaaacatccacagggaaaagctac

SEQ ID NO: 919704 - DNA, 120 bp, Artificial Sequence
  ENSG00000272168_186 (sequence is synthesized)
atgttgggacttcataattcatttcaagcattttgtttgcaaatctcaaagcttgattttttttctaagtttgcaggtacttcaatatttgtatttccatttcagatttttaaaattcat

SEQ ID NO: 919705 - DNA, 120 bp, Artificial Sequence
  ENSG00000272168_187 (sequence is synthesized)
atattatcgtgaagttaaattagcttcttcaacagtgagctctgtggaatagatgcacctttccttctagtgtgaccatttgagatggaacagaccagaggattttccatcccattgcta

SEQ ID NO: 919706 - DNA, 120 bp, Artificial Sequence
  ENSG00000272168_188 (sequence is synthesized)
gaatatgtttctgtgacaaagttctagcaagttttagtccgtaatccatttcaagagaaattcccatttctgtttttttttcaattatgtcttttaacttatattttctggatcttattc

SEQ ID NO: 919707 - DNA, 120 bp, Artificial Sequence
  ENSG00000272168_189 (sequence is synthesized)
catttgagtgaaatgtgaatagatgaagagatgtggtatcagagctcattaaacaaaacttttctggtaacatgtttcatcctatttagttatttgaattcagataagcttaaaggaaaa

SEQ ID NO: 919708 - DNA, 120 bp, Artificial Sequence
  ENSG00000272168_190 (sequence is synthesized)
gaacaaaacaaagctataaagaaaattggaagttattcattgtcattcatcataaacaagctcagaggctgggatatttggcacgatgacaatgaaactgcaggaaattgagcacactcc

SEQ ID NO: 919709 - DNA, 120 bp, Artificial Sequence
  ENSG00000272168_191 (sequence is synthesized)
aatgttggtgaggacggtccatccattctgcatatgtctgcgtctttgggacttagagtctggcaagtagaagagggatttcatcttgttggaaaatataagttggaaaatcaacccaca

SEQ ID NO: 919710 - DNA, 120 bp, Artificial Sequence
  ENSG00000272168_192 (sequence is synthesized)
tgaaattgcagaagccaaggggtttcactgatggaaaaatggagaaggaagatctgatgaaacagcaagtccttaagagtgggagccagaagtttaagttgtaacaggttttggataaga

SEQ ID NO: 919711 - DNA, 120 bp, Artificial Sequence
  ENSG00000272168_193 (sequence is synthesized)
ttcagaacttagaggataacgaactgcagaaaaattctttggaagataatgactagagaaaaattctgggtcaaaggcagctattgtggtgcatagttattcagatttcaaatttgaaaa

SEQ ID NO: 919712 - DNA, 120 bp, Artificial Sequence
  ENSG00000272168_194 (sequence is synthesized)
gaaatcattgtttcataggccgaaaggtgagccactggtatctgtcatcagcaaacaggaaacatgaagaagaagtacatttattctataggttgcaacacacagtacaaatataccatt

SEQ ID NO: 919713 - DNA, 120 bp, Artificial Sequence
  ENSG00000272168_195 (sequence is synthesized)
agaatacctaaaatgcaagatgaatcagtcccgtgaattgaaactttgattttgttcttgagctagtaaagtttacagagttctatgaggaaggacatctgtaaaatatcttacaatacg

SEQ ID NO: 919714 - DNA, 120 bp, Artificial Sequence
  ENSG00000272168_196 (sequence is synthesized)
ttgtcttctattttgagagaaagggaaagtatctttgcactgtgaatataccctttgtattattaactgtgaggacatgacaaggctaaacaattgcttctttcttgtcaaagtttcgtt

SEQ ID NO: 919715 - DNA, 120 bp, Artificial Sequence
  ENSG00000272168_197 (sequence is synthesized)
aaagaagactcttttgctatctggaaacccatgtccacctctgacttccactcaaaattgctttcctcacagtctgactgcgagagttgtgaaaaattgggatgtgcttctgaggtgggc

SEQ ID NO: 919716 - DNA, 120 bp, Artificial Sequence
  ENSG00000272168_198 (sequence is synthesized)
tgcttctgaggtgggctgtggaatgccattattgacagggtttcactatgtttgtcaggctagtcgtgaactcctgaccttgtgatccgccaggcctcccaaagtgctgggattacagac

SEQ ID NO: 919717 - DNA, 120 bp, Artificial Sequence
  ENSG00000272168_199 (sequence is synthesized)
ccaaaatggggaaggcagttaccaacccctgtggacaggaatcgcttttgaaggtagggctgaggtgatcatcaaccaagttgtaaagatcaaaactgaccagcctgccggagactacct

SEQ ID NO: 919718 - DNA, 120 bp, Artificial Sequence
  ENSG00000272168_200 (sequence is synthesized)
aaccctgttcctgtttctgccgtatcaagtgaggactttctgttccctctggcgatgctactctgtgtgactcatgattccacgtaggcttgaaggaatggtctttattcagtgcctgtt

SEQ ID NO: 919719 - DNA, 120 bp, Artificial Sequence
  ENSG00000272168_201 (sequence is synthesized)
aggtgtgaagcaaggtattagaaattgtatatacattatcacattgatgtatcacaatcatctgctggaggtggtattatccctaatttttagacaaaaaaagtgagattctgagaggga

SEQ ID NO: 919720 - DNA, 120 bp, Artificial Sequence
  ENSG00000272168_202 (sequence is synthesized)
aagtgtagtctccaagctcacacgtgtagcagttcagagaattcaaacccagatctctgtttttgaactccttgaccttgtctttataatgtcattgcctcaaattttgtatccacccaa

SEQ ID NO: 919721 - DNA, 120 bp, Artificial Sequence
  ENSG00000272168_203 (sequence is synthesized)
gctaaatggaaggaagaatttagtaccttagacttggtatattgtttttcaggggaaataagtataagaaataggatttcgtttggcatggagtatttcattcatatatgagatttttag

SEQ ID NO: 919722 - DNA, 120 bp, Artificial Sequence
  ENSG00000272168_204 (sequence is synthesized)
tgggaacccacttggtgctagacgttgtttgtaggcattggtgagccatatctctgtgcaagacaggcgtagtccttgctctcagggaataataaattatgccatagctgtgtaaaccca

SEQ ID NO: 919723 - DNA, 120 bp, Artificial Sequence
  ENSG00000272168_205 (sequence is synthesized)
ctgtccttccagctgccaccagtttctgggttgtcgagtgataccctgaaagtttacagtcaacactccttgtgtggggtcagtcctagaaatggcgacgctgctctccgaagataggaa

SEQ ID NO: 919724 - DNA, 120 bp, Artificial Sequence
  ENSG00000272168_206 (sequence is synthesized)
ctgtggtgcttgtaaatatcctaaatgtacaactaaaattgaattgtctttttgaaacttttaaattgtttttgaacagagggtgctattctcaacattacataaagtacagaagaagtc

SEQ ID NO: 919725 - DNA, 120 bp, Artificial Sequence
  ENSG00000272168_207 (sequence is synthesized)
aaagaaaacactgctattctgatctgagagcaatctttaggaaaagcctgtacattacaagagagagacagacacacatggaaacagagaaacacacacgcagatcaaggcagagagagg

SEQ ID NO: 919726 - DNA, 120 bp, Artificial Sequence
  ENSG00000272168_208 (sequence is synthesized)
cagacagaaatggagactgagaaggagagaggagggtggagttgtatattctgtgaagtgtaggccttttggaaaaatcaagacccaaaacagagttgaaatttactcttcttataaata

SEQ ID NO: 919727 - DNA, 120 bp, Artificial Sequence
  ENSG00000272168_209 (sequence is synthesized)
taccttcctactgaggaaacaatgatgaaagaacttccagaagtaattttttgcggacaataaaatgtggagggaaaaatcctgtacatcatctttactgtcatacattgtcacaggatt

SEQ ID NO: 919728 - DNA, 120 bp, Artificial Sequence
  ENSG00000272168_210 (sequence is synthesized)
tagaggggaaatatgcttttatctggggaattagggctctattgctaagcagctgagtacaggtattttcactttccctgcacagttatctccaaacaatatttgcaaataaaatagtta

SEQ ID NO: 919729 - DNA, 120 bp, Artificial Sequence
  ENSG00000272168_211 (sequence is synthesized)
tttcatttttcaatatccaaatataatttttaactatatagtaagtcatacttagtatagaaaatttggaaaaatacagaaagacctccagaaaaaaataaaaataacctgcaatcatat

SEQ ID NO: 919730 - DNA, 120 bp, Artificial Sequence
  ENSG00000272168_212 (sequence is synthesized)
aatctagaggtaatttgaatgtatttccttttagaatgtgtttctatgtgcttatgtctatatgtattttttatataagtggaatcacactgcacatacattttagattcttcacttctc

SEQ ID NO: 919731 - DNA, 120 bp, Artificial Sequence
  ENSG00000272168_213 (sequence is synthesized)
agacaagcctgccactattcgtaatccttcttgcttctgctggcgaatccttccaaggcaggcaggcaggcagcagcagctggggtggagggactgctgtcctgatgaaggggagctgag

SEQ ID NO: 919732 - DNA, 120 bp, Artificial Sequence
  ENSG00000272168_214 (sequence is synthesized)
actattcaaaaaaggatgcaatggagaacatttacagaggactgtgggtaaagcaaagtcttcaagggaagataacaaaggatgaaacaatggtgttgtgtgacttcctagtaaaatcta

SEQ ID NO: 919733 - DNA, 120 bp, Artificial Sequence
  ENSG00000272168_215 (sequence is synthesized)
gagagcggcgtgggctggtgcgagtgaagcgcggggcgggggaggcgaggacagaagctctcctcgcggcgtctttgttctgctctggaggagagaccttggcaaggagtcgccgggcgg

SEQ ID NO: 919734 - DNA, 120 bp, Artificial Sequence
  ENSG00000272168_216 (sequence is synthesized)
gtgcagggacctaccgccaccacattccggacccagcgggagccctcctcttaatgcccctccccccgcaagccaacccaggacatagcccccaggtccccaaggttccgtctacctcat

SEQ ID NO: 919735 - DNA, 120 bp, Artificial Sequence
  ENSG00000272168_217 (sequence is synthesized)
ccttctacccccaaacttcaccaacccgaaaggattccaagtctgggatggggagaaaggaaagagggtggaggcaaaggtgcgcgacgggctggataccaactggagggccgggaaaaa

SEQ ID NO: 919736 - DNA, 120 bp, Artificial Sequence
  ENSG00000272168_218 (sequence is synthesized)
gctatagcctgctgcctgcccttccatgggctgccgcagacttcctgatggccactgctgccttcctccttctccttttttgcattgattgattggttccttatctatgctatttttcta

SEQ ID NO: 919737 - DNA, 120 bp, Artificial Sequence
  ENSG00000272168_219 (sequence is synthesized)
atttttaagtattcatacgtgtacactgttaatgatataaaacatgcatggagtggtaagccctaacttcaggataaggcttaccctctgaggagggaggctggggcacttggccaatgt

SEQ ID NO: 919738 - DNA, 120 bp, Artificial Sequence
  ENSG00000272168_220 (sequence is synthesized)
caattctgtctccaatgttttaaacttttttccccaatatgtatctcttaaaaagaagaatttctttccttttcatttctttctttctttctttttttttaagacagagtctcgctctgt

SEQ ID NO: 919739 - DNA, 71 bp, Artificial Sequence
  ENSG00000272168_221 (sequence is synthesized)
agttgacccgccagccttagcctcccaaaatgcttgggattacaggtgtgagccaccacaccgggccagaa

SEQ ID NO: 919740 - DNA, 120 bp, Artificial Sequence
  ENSG00000272168_222 (sequence is synthesized)
gcttgggattacaggtgtgagccaccacaccgggccagaactccttatttttatttaaaacataactgtagtgtcacttttgctcttaaaacagtagttaaggctagatgtggtagctca

SEQ ID NO: 919741 - DNA, 85 bp, Artificial Sequence
  ENSG00000272168_223 (sequence is synthesized)
gtagctcaagatcgcttgagcccaggagtttgagaaccagcctgggcaacacagcgagaaccccatctctaccaaaaaaaaaaaa

SEQ ID NO: 919742 - DNA, 120 bp, Artificial Sequence
  ENSG00000272168_224 (sequence is synthesized)
acaagcgaacgagcctgggctggccttgtggaagcctagccgaggcctcagaatatggatgagatcatctgagaccatccaccccaggaagccagcaaagtggctagaacccgccatacc

SEQ ID NO: 919743 - DNA, 120 bp, Artificial Sequence
  ENSG00000272168_225 (sequence is synthesized)
tctgccttatatttatttttaagtgagaagagttgtatgttgcaacattctgaggtcacgtgtaccatggaacaggacagcaggactagacaattttcactcaacaatcttgccttcttt

SEQ ID NO: 919744 - DNA, 120 bp, Artificial Sequence
  ENSG00000272168_226 (sequence is synthesized)
ggctatgcatatgcctgtggacatctatttcaaatggaagaggctgtgtgcctatgaacatggactctggactcatatagcccttgtatataatccatcttcattactcactagctctgt

SEQ ID NO: 919745 - DNA, 120 bp, Artificial Sequence
  ENSG00000272168_227 (sequence is synthesized)
aaccataggcaagcctcagttcctcatccataaaatgccattaaaaataatgcctacctcatagtgctgcaatgaggattaatagagacaatgctggaaatgcatttcagagaagaacca

SEQ ID NO: 919746 - DNA, 120 bp, Artificial Sequence
  ENSG00000272168_228 (sequence is synthesized)
gaacaaaacaaatgcttgcttaacaaatgctcatctcatatataaccatgctatagatttccttatcataaagttacaacaggagaacatcctcaggcaaaaccaactgtccagctgagt

SEQ ID NO: 919747 - DNA, 120 bp, Artificial Sequence
  ENSG00000272168_229 (sequence is synthesized)
tgtaaagactatttaatcttgcccaaagaaagtctggcttttgcccttgtctcatgggaggtaatctctaaatccttgggatatcctatctgataaatgtatctctgtcacatgcaggct

SEQ ID NO: 919748 - DNA, 120 bp, Artificial Sequence
  ENSG00000272168_230 (sequence is synthesized)
aggggttttggttatgcaatatctgctggacttctggaagggctggagactgaaatcagccatgtgggcagtcagtcatgcctgtgtaagagagtctcaataaaatctctggacaccaag

SEQ ID NO: 919749 - DNA, 120 bp, Artificial Sequence
  ENSG00000272168_231 (sequence is synthesized)
gcttggatgaactcccttgtttggaaatgctctgtgcatattgtcacgcgttgatgctgggaaagtaacactattcataattccatggggagagggcaactagaagctccatgttttgtg

SEQ ID NO: 919750 - DNA, 120 bp, Artificial Sequence
  ENSG00000272168_232 (sequence is synthesized)
atttccaggactgtgtcctatatgccttttcccttggctgattttaatctgtattctttagctgtaataagctgcaaccatgagcataacagccttcagagagttccatgaatcgttcta

SEQ ID NO: 919751 - DNA, 120 bp, Artificial Sequence
  ENSG00000272168_233 (sequence is synthesized)
gctaattatcaaatccaagagtcattgtggaggcccctgaatttgcatttgattgtcagaagtgagtgcagttttgtggactgttctttctaaactttgcatcaacaaaacatctttttc

SEQ ID NO: 919752 - DNA, 120 bp, Artificial Sequence
  ENSG00000272168_234 (sequence is synthesized)
cttgcatccataggggttgatgtttttccgttggccaacttgagttttgtgataatttgtccaggaactcaacaattaactctatctttcctagtaatagcacacatggaggagaattgc

SEQ ID NO: 919753 - DNA, 120 bp, Artificial Sequence
  ENSG00000272168_235 (sequence is synthesized)
ttctcctgactgacaatcaaggaagaacctggaaatgctcagtggtaaatgttcctcatgcagctggcagagtaccttggcttccagtcatccccacagggcactcaacaaggatgaaga

SEQ ID NO: 919754 - DNA, 120 bp, Artificial Sequence
  ENSG00000272168_236 (sequence is synthesized)
actgagttacccttgacaagtcagtgtccacactggcatgattaagtgggaaaaagtttgtcactttctctatcccttccatactagtgaaggtggtgcaggaagcatagatatcccatt

SEQ ID NO: 919755 - DNA, 120 bp, Artificial Sequence
  ENSG00000272168_237 (sequence is synthesized)
ccaaattgagtgatgcgtggatggtagtgtattccacttagcttcaaagttcctttctaaaatcttggacatgctttttatgtctttagacactcactttactccacctgcttgcattta

SEQ ID NO: 919756 - DNA, 120 bp, Artificial Sequence
  ENSG00000272168_238 (sequence is synthesized)
gtaggcactgtaagttgggagttgtgatggttaacttacgcatccacttgcacttggctagtcagtggtgtgtagttgtcaaacaccagtctagatgttgtagtgaaagtatttttctta

SEQ ID NO: 919757 - DNA, 120 bp, Artificial Sequence
  ENSG00000272168_239 (sequence is synthesized)
gttcctttccaggagataagtgatacggcagaaagacgggtcagatgaggccaagggattggagccagagtcttaccaaactcgcaggcagcttgtgactgcgggcatgctgtgctgatg

SEQ ID NO: 919758 - DNA, 120 bp, Artificial Sequence
  ENSG00000272168_240 (sequence is synthesized)
gaggaggggaggcctgggggctccatgctgtcgggattcctcccttgataaacagagtcaaggagctgtggagtccaagtgtgactgccaagaggaatccagcaaagccaaaaagcccaa

SEQ ID NO: 919759 - DNA, 120 bp, Artificial Sequence
  ENSG00000272168_241 (sequence is synthesized)
tcccacttctgcctcctaaagtgctgggataacagtgaataacataaggacaacaaccaatcaccaaaagactttgaaagatgcccataaattcttaacgtagtgatttgttgactgaag

SEQ ID NO: 919760 - DNA, 120 bp, Artificial Sequence
  ENSG00000272168_242 (sequence is synthesized)
agctagctgtgacgtttgaccttcaagtattactcccagttaatacattgtagtcattgaaatttgaatcatactgttggagactgatgttgtttaaataaatcatggaatcattccgcc

SEQ ID NO: 919761 - DNA, 120 bp, Artificial Sequence
  ENSG00000272168_243 (sequence is synthesized)
cttcttctgtaaataaattaatacctggtgagatgtaaaagcccacttgaacggaaaacaacatgtttgatgaaattctgagagaagatacaacccaaggtatgaaaaattcagaacaaa

SEQ ID NO: 919762 - DNA, 120 bp, Artificial Sequence
  ENSG00000272168_244 (sequence is synthesized)
aagatttcaactggaagaatacaacttttgataatttctggatatacctcttaattgcaagcaggagagtcttcagagttttcctgtggtggtggttgttgttgttgttgttgttgttgt

SEQ ID NO: 919763 - DNA, 120 bp, Artificial Sequence
  ENSG00000272168_245 (sequence is synthesized)
aaagagtacttgctgtttcgggaaatttggttcctgtctccttctctgatctgaattgttatgttgataaatttgccatattctgctgaagaacaaattctggcatcttcactgaggaat

SEQ ID NO: 919764 - DNA, 120 bp, Artificial Sequence
  ENSG00000272168_246 (sequence is synthesized)
cagtgtctgcctctaatacttctttctgtgaaatcctgacctgaagtctcctctatcatcccaaagatttaaaaaagattaaaggtgaggcatgggtttctctggcctgctttggtaaat

SEQ ID NO: 919765 - DNA, 120 bp, Artificial Sequence
  ENSG00000272168_247 (sequence is synthesized)
ttatgtgctcacataactcattaattgtttaggtttaattcaagacaaatacctgcacgtttatgtttgacactagtatttatcaaatcccaaagctgatctgaaccctaaacaaaccat

SEQ ID NO: 919766 - DNA, 120 bp, Artificial Sequence
  ENSG00000272168_248 (sequence is synthesized)
attcttggcagctcctccaaataacacacatagcaaatatattgacatcagttgtactttaaaatgtcaactctgcttttccttttctcatggtgctaataaaagattttatttaaaaac

SEQ ID NO: 919767 - DNA, 120 bp, Artificial Sequence
  ENSG00000272168_249 (sequence is synthesized)
gcatgcaactgattctttcaatttggtttggttagtcagaatcttaccagaagtctgtccaggtgataggttagttgagagcatcaagaccaaccaaaataaaacaaaaacaatagccta

SEQ ID NO: 919768 - DNA, 120 bp, Artificial Sequence
  ENSG00000272168_250 (sequence is synthesized)
ggctcctccccctctgtattagttctttgaaagtttggtagaattcagcagtgaagccctctctccctaggcttttctttgttgggagtgagttttttttgtttttttttttaaattact

SEQ ID NO: 919769 - DNA, 120 bp, Artificial Sequence
  ENSG00000272168_251 (sequence is synthesized)
tgagattggaaatgggtataatagattccagagtctgcggctccacagggagttttctgtcccctttcaccaagttgctcttacactctaggattgcaatgtgggttcaggagctgtgga

SEQ ID NO: 919770 - DNA, 120 bp, Artificial Sequence
  ENSG00000272168_252 (sequence is synthesized)
cacagatgtcggttgcgatgactgtgtggggctgtgcccattccctgcagagccgagcctgtcatgcttgtgggacacagtgggtgcagctcttggcagctcagtggggtgagcaggtca

SEQ ID NO: 919771 - DNA, 120 bp, Artificial Sequence
  ENSG00000272168_253 (sequence is synthesized)
ggtagttctgaagtaggcttctttgctgtttactcacttgtttaatggtgaggagaagaatccaggagaaatagtgttttattttctttcagtggtgttttgcagtgagaacacccctgg

SEQ ID NO: 919772 - DNA, 120 bp, Artificial Sequence
  ENSG00000272168_254 (sequence is synthesized)
gattactcctttaaaacagtaaacaagaggccgggtgtggtggctcaggtctataataccagctctttgagaggccgaagcaggaagattgtttgagcccaggagttcaagatcagcctg

SEQ ID NO: 919773 - DNA, 120 bp, Artificial Sequence
  ENSG00000272168_255 (sequence is synthesized)
ggcaacatctctaaaagacaccatctctaaaagaattttttattttttaatttgccttgtgtggtggtgtccccttgttctcccagctacttggaggcagaggtggaaggatcccttaag

SEQ ID NO: 919774 - DNA, 69 bp, Artificial Sequence
  ENSG00000272168_256 (sequence is synthesized)
tcccagctacttggaggcagaggtggaaggatcccttaagcctgggaggtcgaaactgcagtgagccat

SEQ ID NO: 919775 - DNA, 76 bp, Artificial Sequence
  ENSG00000272168_257 (sequence is synthesized)
tctccaagattcaatcatctaattatttcttttaaaaatgagaaaaatgactcctggtcagcttttaccttctttt

SEQ ID NO: 919776 - DNA, 120 bp, Artificial Sequence
  ENSG00000272168_258 (sequence is synthesized)
aatgagaaaaatgactcctggtcagcttttaccttctttttccaactgtcttgacaatactttcatattgggcttttaaagtctcaagtaataggtttttaaaacctcagctgataaaag

SEQ ID NO: 919777 - DNA, 120 bp, Artificial Sequence
  ENSG00000272168_259 (sequence is synthesized)
tataaaaataaagttaaaacatattaaagacaaaacccaagaatcagcttcctcttccttcattactcttgcatgggtgttggctctaatttctccatctagttaggcagtcctttgctt

SEQ ID NO: 919778 - DNA, 120 bp, Artificial Sequence
  ENSG00000272168_260 (sequence is synthesized)
tttattgcttgtttattgatgacatttgccatttgtagcaatagtaatagaatcatctatatatttgtggccttgttgaatgtagaaaaaggatagtggcattttctaattgtgtaaccc

SEQ ID NO: 919779 - DNA, 120 bp, Artificial Sequence
  ENSG00000272168_261 (sequence is synthesized)
tataacaccttgacgggggactacagttcatatgctggaccttttgtgtttgttcatggcgggtgggttgctttaatatacttagcacattgtcctaattgccatccttttggggagggc

SEQ ID NO: 919780 - DNA, 120 bp, Artificial Sequence
  ENSG00000272168_262 (sequence is synthesized)
tatatatccaagctaatatggtagcatttttgttttaacatagagctgacccaaggtagacgtaagtgttgttcatttttgcctaatactaataaaattacctaattgttgaagcttgga

SEQ ID NO: 919781 - DNA, 120 bp, Artificial Sequence
  ENSG00000272168_263 (sequence is synthesized)
aggtgtaggctatggattatttcatttgaccttcttgctgtttacctggttataatatgtgaaaatacaaaatttaaagtctccattatgctatgggaacgtaaaacttttttatttttt

SEQ ID NO: 919782 - DNA, 120 bp, Artificial Sequence
  ENSG00000272168_264 (sequence is synthesized)
aagagaatctgtaaatatgtacatttcagagctaccacaactagaattatctttactgttaattaattaatcaaaaatatggtggacattattaacaataagccctgaagcaacattttt

SEQ ID NO: 919783 - DNA, 120 bp, Artificial Sequence
  ENSG00000272168_265 (sequence is synthesized)
aatccttgaggcggccattttgctgaaaggcagttaaagaaacagtctgtcagcctggtctgattcttgctgaaaaagcgtcatttctgtacccaatgtgtgaatcatggcaatacagtg

SEQ ID NO: 919784 - DNA, 120 bp, Artificial Sequence
  ENSG00000272168_266 (sequence is synthesized)
aagcagttcctcacatgtcatctgaaatgagtatcaatgtggacttctgacatactggtttagccttttttgagctgtggagtccaagtgtgactgccaagaggaatccagcaaagccaa

SEQ ID NO: 919785 - DNA, 120 bp, Artificial Sequence
  ENSG00000223462_0 (sequence is synthesized)
gagcattttgtatatgaagaacagagtgacaggaagaagaaagagcaccaggctgagcaccattcgacctccactaatacacgtctgaccttgttcaagccccttcgcatctctggctca

SEQ ID NO: 919786 - DNA, 120 bp, Artificial Sequence
  ENSG00000223462_1 (sequence is synthesized)
gacatctcaacaacatgtgattgtacccaggcatttccccctgggagcaccaaagggaagaaggtaatttttcggtcttttggaagctgtgccctggtgccaagatgcctcaagccaaaa

SEQ ID NO: 919787 - DNA, 120 bp, Artificial Sequence
  ENSG00000223462_2 (sequence is synthesized)
ccacacagagcagcctgcctgacagatgggcccagtagcctttatcaagctcttaggctcttatgagcttccctacttgcgaattaaacataaatttatcctttgcggctctttcataaa

SEQ ID NO: 919788 - DNA, 120 bp, Artificial Sequence
  ENSG00000225649_0 (sequence is synthesized)
gatcttccatccaggatagtcctggaaatgatcttgatgctatctgttcctcgttacagcagacctgctcaacttcagcagctagaaggaggattgtctttcaccagctgcaggagcctg

SEQ ID NO: 919789 - DNA, 120 bp, Artificial Sequence
  ENSG00000225649_1 (sequence is synthesized)
ttcccactacaagcctggtggagtcttcggagcagatgtgactgtcctacttgtatagagaagagaaactgaggctcagaagagatgcctggctgagtttaataggactgcaacaacaat

SEQ ID NO: 919790 - DNA, 120 bp, Artificial Sequence
  ENSG00000225649_2 (sequence is synthesized)
tttgcctttctactttctggtacagtggtctttcctttgccatcatgcctcagcatatccatgttagtaaattctcccagttggggaaaagcttggcagcaatgaaagttaatgtgatga

SEQ ID NO: 919791 - DNA, 120 bp, Artificial Sequence
  ENSG00000225649_3 (sequence is synthesized)
atcatttagatggacagattggaaaaatgttgttccttttgcatgtgatgttcttgccagaaatcaagtaggtggagtttttgaagcgtgatcagttagataagtatggtggttttaaat

SEQ ID NO: 919792 - DNA, 120 bp, Artificial Sequence
  ENSG00000225649_4 (sequence is synthesized)
aatcaagcatggagccataccggttatgtttaatttataacaaaatcagacaattcaggcatgatgttgaactcattgagcttggctcactactacatttctctcaccaaaagcaatgac

SEQ ID NO: 919793 - DNA, 120 bp, Artificial Sequence
  ENSG00000225649_5 (sequence is synthesized)
tataaagagttacaaataccatgaccttatatcataaagcataaattattccaggaagttttccatttaagtcaacttctcaaaatcttaggagaaaactaccaatattcagttcaaacc

SEQ ID NO: 919794 - DNA, 120 bp, Artificial Sequence
  ENSG00000225649_6 (sequence is synthesized)
ccagaggcttaaggaaaaatattaatgttgaaatagcaagtaagtggtagtatcctcgctgtatgcacaattgcatctgctcgggggttagtctttctttagctcctgtctacaactcac

SEQ ID NO: 919795 - DNA, 120 bp, Artificial Sequence
  ENSG00000225649_7 (sequence is synthesized)
accagtctccataaaagaaatgaggtctcactgataccatctagcttaatgagataaaaatcctggtgatctctgcaagaaaataaaactaagataaactagtatctgctactgataaat

SEQ ID NO: 919796 - DNA, 120 bp, Artificial Sequence
  ENSG00000225649_8 (sequence is synthesized)
atttaacagatgtggtccaaatccctctgccagctggaggaaggaaaaaagttctattttactgcttggatataattattggccacatttctccaagcaaagacagtgacattggctcac

SEQ ID NO: 919797 - DNA, 120 bp, Artificial Sequence
  ENSG00000225649_9 (sequence is synthesized)
tccccaggagaactttcttctgatcttggcactaggatttgcttttctttaacagattgcagcaatatacccttcatttgacccagtttattcattcaaaagatacctggagccaaaacc

SEQ ID NO: 919798 - DNA, 120 bp, Artificial Sequence
  ENSG00000225649_10 (sequence is synthesized)
atgtatgagaaatagcaaaggaagaggcaggcacaagctgtgtttatatacccaccaaaggactacagcaaaacacatatattctagtcagctctgagtgcacctgtctgtgtcaacagt

SEQ ID NO: 919799 - DNA, 120 bp, Artificial Sequence
  ENSG00000225649_11 (sequence is synthesized)
ggaacttttcccagaccctgaaagtcacctttttagacaacttcgcaaacagccatccttgttcacggtatcatgccccttgtcactgctaaacagaccgtttgcaaagaaatttcctaa

SEQ ID NO: 919800 - DNA, 120 bp, Artificial Sequence
  ENSG00000225649_12 (sequence is synthesized)
acatcaccactgaggctccttccagcaatgactctggtccatcattgggattgctgagcagctgtttcataacatgaacaaggatgttttaaccatgtttcttgacctggccatttggat

SEQ ID NO: 919801 - DNA, 120 bp, Artificial Sequence
  ENSG00000225649_13 (sequence is synthesized)
cccaaggatgttttggtccaagaataaattccagagcttaggtaggttacataccacaactatattcatttcctacttctattctttctctgtgcaatccttttcctagcactgtaactg

SEQ ID NO: 919802 - DNA, 120 bp, Artificial Sequence
  ENSG00000225649_14 (sequence is synthesized)
aaagtatttttctaaaacattaatgtgatcatactatgtctctgctgaaaagccatcaatcactatctacctattactgacaaaaacatgacattctgatcccacctgatctgctctttc

SEQ ID NO: 919803 - DNA, 120 bp, Artificial Sequence
  ENSG00000225649_15 (sequence is synthesized)
tcatcaacaactcttctccttatgtaatttctcacctggtgaccaaccacaccctgcatgtgctatacattcatttatgctttttcacctgctcaaggcccccagaattattttcaagta

SEQ ID NO: 919804 - DNA, 120 bp, Artificial Sequence
  ENSG00000225649_16 (sequence is synthesized)
ttatttttcccaacacaaagcatcagtcgatacctgtagtaagtctgaagcatctcagaagcatttattgacaacccagtcttctactctcctctgcctccaaacacacagcacatacat

SEQ ID NO: 919805 - DNA, 120 bp, Artificial Sequence
  ENSG00000225649_17 (sequence is synthesized)
tttgtcccaaacatttgtaggccatcattgtcttttgcctggcatttctttactaattaatatatatttttattcatgtgtgtatatttatctcaccaatatttgggagcagagcctatg

SEQ ID NO: 919806 - DNA, 120 bp, Artificial Sequence
  ENSG00000225649_18 (sequence is synthesized)
tgttattttagttatacaggttgttgggtgatatggctgtgaacctgatatgctatagattataaggggaggtggaacctgtcacacttcctcttcctccatcactggttgtctgtctca

SEQ ID NO: 919807 - DNA, 120 bp, Artificial Sequence
  ENSG00000225649_19 (sequence is synthesized)
aagctcaccgaagaagacaggaaaacttgtcagatggggaaggatgtgtcaagagcatgcacacagatttactcttcagctagaagctccaattcctagatgatctgaatccaactcaga

SEQ ID NO: 919808 - DNA, 120 bp, Artificial Sequence
  ENSG00000225649_20 (sequence is synthesized)
gtgcttgcacctgtttcctgccacacagctagagctggtgagtctgatttaagtaattctacaggaagacaaggcttacataagaataagtagtcgagtagacagatatttcctccatgg

SEQ ID NO: 919809 - DNA, 120 bp, Artificial Sequence
  ENSG00000225649_21 (sequence is synthesized)
aatctgccttgttcagaaacaagtttaatcagttactgacttatagtaagaatgtgaatgtcataattttattaaaagtttttataaataatttcattgtaatttaagcatcgatgaaaa

SEQ ID NO: 919810 - DNA, 120 bp, Artificial Sequence
  ENSG00000225649_22 (sequence is synthesized)
tgtgtccctctaggttctctgattggctgaagctactctaagccaagagatcaaagaagctgataatgtagaatgtaagtttgtctcctgggccacaatggaaagcagagactgtagctg

SEQ ID NO: 919811 - DNA, 120 bp, Artificial Sequence
  ENSG00000225649_23 (sequence is synthesized)
gaggagtgaatagaggatatgcagctctggtaattctcagtacaattcccagtggtccactctgcagaatgaaccaagttccattttgcccaacttctggcagtccacatttggactgtg

SEQ ID NO: 919812 - DNA, 120 bp, Artificial Sequence
  ENSG00000225649_24 (sequence is synthesized)
agctcacctacagataaatcgtacgtggattgatgcagtaactggatttgtagctgctaaatcttatttaagtgaggacctgtccagtacatgtgaagaccacccatccactgaaagtga

SEQ ID NO: 919813 - DNA, 120 bp, Artificial Sequence
  ENSG00000225649_25 (sequence is synthesized)
taagtgaagctgaatcaatactagactgaatcaatactgagctgaatcaatactttcccaattttgaggaaatcttggaaaatctctgagaaatgtggtagtaattattttgaagaattg

SEQ ID NO: 919814 - DNA, 120 bp, Artificial Sequence
  ENSG00000225649_26 (sequence is synthesized)
tataagagagagaagacaatatccttgctgtgtccagaaggctttagccggggtgtcctactgagagatgacaaacttaaggtttttctcttcccagacattactggacaactagctatg

SEQ ID NO: 919815 - DNA, 120 bp, Artificial Sequence
  ENSG00000225649_27 (sequence is synthesized)
taattaggtcttatgccgaaaagactgaaaggaaaacatctcagatctaggaatgtgatcaagaaagaaggctggttaaagaataacatggggaaaatgaatgcagtgaaatggttcacg

SEQ ID NO: 919816 - DNA, 120 bp, Artificial Sequence
  ENSG00000225649_28 (sequence is synthesized)
cacaagttctaggaattcagagtgcaacagcagaaatgcgatttttgttagatatttcagaaagtgatgtgagtccctgaggtcatactgcagcgttcaggttctgtttggcctcctgca

SEQ ID NO: 919817 - DNA, 120 bp, Artificial Sequence
  ENSG00000225649_29 (sequence is synthesized)
cgaagctttccttgattggaaaagctgcatactctgaagcacatcgcatgtgtcctgtctgtagttcatttcatttccccagatttgttatcatccaccatcactcatacaagcctacct

SEQ ID NO: 919818 - DNA, 120 bp, Artificial Sequence
  ENSG00000225649_30 (sequence is synthesized)
tcttcatgccaacctttgtaatctttctaccttgctaacctggtcatgtcaaggaccagctaataaatagcaaagttgtaccttgagccaaggtatcttgactcttagtccagtgctctt

SEQ ID NO: 919819 - DNA, 120 bp, Artificial Sequence
  ENSG00000225649_31 (sequence is synthesized)
tatatacctctgaagtcttatttgagcttcaaaattatgagtctgtgctctcaagatttttttgaaaatgtacttaatgttgcccctaagcttttatgagaaataataaagttctttcca

SEQ ID NO: 919820 - DNA, 120 bp, Artificial Sequence
  ENSG00000225649_32 (sequence is synthesized)
agacacagctgttggaggaaaaaagtttatgtcaattaaaatcctgaatttctctgatctggaaagaaaaactgctatgaactctttagcattgtgctttacatatgacagacacactcc

SEQ ID NO: 919821 - DNA, 120 bp, Artificial Sequence
  ENSG00000225649_33 (sequence is synthesized)
acaatatctgagaaatagaataactggggatgaatgaatgagaaaattaatgaagaaatgaaggaagttacctggtcaaactgctaagaagtaacaaggcaaaggaaagaactatgtttc

SEQ ID NO: 919822 - DNA, 120 bp, Artificial Sequence
  ENSG00000225649_34 (sequence is synthesized)
ctttcttcaactcagcccttattcctacatcccgtgtctgtggttcatgttacaaaccacaccaataagaactttgtcatactatttgtcactgtgatccgttccatggaagaaaatggt

SEQ ID NO: 919823 - DNA, 120 bp, Artificial Sequence
  ENSG00000225649_35 (sequence is synthesized)
tcattttgctcattaatattaattaagatacatattaagtaacatagttgagcttcgttacggtagatactatggctttttctccttttgttctgttattatctgacacttactatgtcc

SEQ ID NO: 919824 - DNA, 120 bp, Artificial Sequence
  ENSG00000225649_36 (sequence is synthesized)
ttttgtttgtttatttgacaaccatatttttgcacctgagataaatctggcattctattcaacttcaatttcaaagagaatctgagaatgtactggtagaacgatatttgaatactaata

SEQ ID NO: 919825 - DNA, 120 bp, Artificial Sequence
  ENSG00000225649_37 (sequence is synthesized)
tcttggaaatacagaaataagtatcatacattttgttacattctgtttgtgtacaaataatataaaaatcaatgaatgagaatttcatatttgaattgtatatggattgatgcaataact

SEQ ID NO: 919826 - DNA, 120 bp, Artificial Sequence
  ENSG00000225649_38 (sequence is synthesized)
taaacaggaaccctgacttacagcataggactacaggactggggagagaatcatgctacaactgcagtcgaggtaagatgtaccttttgccttccaccacgattgtgaggccttcccagc

SEQ ID NO: 919827 - DNA, 120 bp, Artificial Sequence
  ENSG00000225649_39 (sequence is synthesized)
ctttttctttatacattacccagtctcagatgccaacacaagtgctgaagaggatgttacatgagagaaagatggattcatatgtggaaaagccttctaaggataaagtctaccatatac

SEQ ID NO: 919828 - DNA, 120 bp, Artificial Sequence
  ENSG00000225649_40 (sequence is synthesized)
ttcatgccacaccactttatcagtaaaccctccaggatggaactatttactgaaatgccagtactccccctcattttttaaactacatgacctgttcagtgctgtctgttctggaatgaa

SEQ ID NO: 919829 - DNA, 120 bp, Artificial Sequence
  ENSG00000225649_41 (sequence is synthesized)
aggccaatatccaagtgttcagaaagacccgggagatgggacaaagaggatgaagctggggctggaaggcgactctgggaacggctcataaagatgtcccacagaatgactgaggctttg

SEQ ID NO: 919830 - DNA, 120 bp, Artificial Sequence
  ENSG00000225649_42 (sequence is synthesized)
tttcatgaataggtgtctccattcggccttgatggctaaccagccaactgaacaagtgtaaagggcccaagaaaggcccgtaaaacccatgacatgaaagaacaatttaggaaaataaca

SEQ ID NO: 919831 - DNA, 120 bp, Artificial Sequence
  ENSG00000225649_43 (sequence is synthesized)
actaaggtaaaaatatcatttttattgcataaattgcatgaggagttgtgaaattaaaaccatttatttataaaagttatttcctcaaaaaataaataatattaggtatatctcctaatg

SEQ ID NO: 919832 - DNA, 120 bp, Artificial Sequence
  ENSG00000244247_0 (sequence is synthesized)
attcagccttcagatggaagggacagccttgaagatgcataagttttgatacttaaacttttggaggattaaatttgcgaaaacagaagctgaggaccaaagcagctacaggactgacct

SEQ ID NO: 919833 - DNA, 120 bp, Artificial Sequence
  ENSG00000244247_1 (sequence is synthesized)
gcccaaaaccacacagtgagtctgcagcccggcttcggaccagagtttcttctgacaagcggcaagctcactgatggccacacccgctcatcctggataacagtattccccagtggaatt

SEQ ID NO: 919834 - DNA, 120 bp, Artificial Sequence
  ENSG00000244247_2 (sequence is synthesized)
gtatcatttttactttaagatttaaaagcaagcaagcaaattaaatagtcatttaaatcatatttatattaagcctaacatggccatattgtagagcaaaccatcgggatttaataaaca

SEQ ID NO: 919835 - DNA, 120 bp, Artificial Sequence
  ENSG00000244247_3 (sequence is synthesized)
aaacaggaaacttcaaagaatgctttttcttggaaagaaggcaggagagcaagaaaagcgactgcctcagcctttatcactctccagaccagtgccaaggagccaaagagaagaaatgag

SEQ ID NO: 919836 - DNA, 120 bp, Artificial Sequence
  ENSG00000244247_4 (sequence is synthesized)
aataaccaaggtatgctgtgtccaattaattaactattagcaaacaaaggaccaaacaatgtgactgtaagcttcatgacagcagggagtttgtatatcttttcacctgtgtatcggcag

SEQ ID NO: 919837 - DNA, 120 bp, Artificial Sequence
  ENSG00000244247_5 (sequence is synthesized)
gggagagctgagtgggagacatgggctgagttgctggcatcaggaaagggtacacaaaggtaccagctgaaagtgtcttcaaaactggaagctttgggtcaccattcacttgcgatttat

SEQ ID NO: 919838 - DNA, 120 bp, Artificial Sequence
  ENSG00000244247_6 (sequence is synthesized)
tcagcaactatcagtacagcctgggaattacccatgtgatgtcttcatgcctagcatagctgtgcctgatgcaaagcagatacttggttttgatacttaaacttttggaggattaaattt

SEQ ID NO: 919839 - DNA, 120 bp, Artificial Sequence
  ENSG00000225640_0 (sequence is synthesized)
tctgacaaggactcccacgtccctccccggctaacctggatcctgctcaacccaacacctgccttctctcggtccctgggttcccgcaggccttggggccccacagtcatatctgctgtt

SEQ ID NO: 919840 - DNA, 120 bp, Artificial Sequence
  ENSG00000225640_1 (sequence is synthesized)
gaacggcacagccatccacctttcaactcctgagtttccatctgcacccttcaacacttattaggacttacatgaaactatgtgacatctttttatttctattaaacaaaatacagcttt

SEQ ID NO: 919841 - DNA, 120 bp, Artificial Sequence
  ENSG00000229153_0 (sequence is synthesized)
ctgaggagtgaagagctccagggatttcactcttctttgtgtgtgtgaaggaaggcaggtttatttgcaagatgggtttgagggaattaaggataaagtctgctgaaagtagcaccagcc

SEQ ID NO: 919842 - DNA, 120 bp, Artificial Sequence
  ENSG00000229153_1 (sequence is synthesized)
tctggattaaaagggatgtttggatgaagcttcaatctcaagaagaggcaagagaaaactaaagaaaaagagacaagaaggtagttgacaagctgtgaacctgcattgcattctagtgat

SEQ ID NO: 919843 - DNA, 120 bp, Artificial Sequence
  ENSG00000229153_2 (sequence is synthesized)
cacgtggaaggggaagctgaagttgaagggtggatggtagcagccacagggagtgagatgggctcgtttctggagctgttgggagagaaaaagggagtcaaacgggaattcacacagggt

SEQ ID NO: 919844 - DNA, 120 bp, Artificial Sequence
  ENSG00000229153_3 (sequence is synthesized)
tgtgcattatatccaagtgtgtattcagatacaagcctttatctcaataccttccttacccccattccgcacatatctcataccaaagtacaaataaaaccattcccaattgttctaata

SEQ ID NO: 919845 - DNA, 120 bp, Artificial Sequence
  ENSG00000229153_4 (sequence is synthesized)
gggagaaaaagggctcaggactgaggagtgaagagctccagggatttcactcttctttgtgtgtgtgaaggaaggtttatttgcaagatgggtttgagggaattaaggataaagtctgct

SEQ ID NO: 919846 - DNA, 120 bp, Artificial Sequence
  ENSG00000229153_5 (sequence is synthesized)
tggagataacatggacctccatgatgagagctggaatgaagtaccagggcaagggagctgcctggatgaggaaaccaaggctatctcagtactgccaaggtgttttcatcattcatcaaa

SEQ ID NO: 919847 - DNA, 120 bp, Artificial Sequence
  ENSG00000229153_6 (sequence is synthesized)
atgcaaaagtaaacactggtgagaaaaacgatgttgatctcccaggcaagccactttccaggagtgtggctgattattttcaaatgctgcatcggaaagttgcaggccccttggaaaatc

SEQ ID NO: 919848 - DNA, 120 bp, Artificial Sequence
  ENSG00000229153_7 (sequence is synthesized)
tgtcacccctgagagtgatattattctacagaaacaacacatcactggatgcctctcaccatgcaatcctctgtgcacttgagaagaagacaagactctcctatttttagatgggaaagc

SEQ ID NO: 919849 - DNA, 120 bp, Artificial Sequence
  ENSG00000229153_8 (sequence is synthesized)
tgaggcaaaacggatgcacttgggcaaaatcatttgataaaaatggaagctgaacctccaagtcctggcatcggtagctgcctcatgttcctcccgcctcactccacctcagtgtacccg

SEQ ID NO: 919850 - DNA, 120 bp, Artificial Sequence
  ENSG00000229153_9 (sequence is synthesized)
cgactggagggtgccacaggctggagcacacaaaacactgtgtgcttcgtgattctgatgtggggcgccagatccggtggaaggagggtggctgcgtgggaacagatgctcgtgtcacaa

SEQ ID NO: 919851 - DNA, 120 bp, Artificial Sequence
  ENSG00000229153_10 (sequence is synthesized)
ggagttgtctcttgtgggcaaagcaagctggaaagtgtttcgatttctttattttcatgctctactcttggtgcttccttctcctttgcccaccaatccccccaatgccaggcttctcct

SEQ ID NO: 919852 - DNA, 120 bp, Artificial Sequence
  ENSG00000229153_11 (sequence is synthesized)
tacctgggtgcagagagaggaacaacttggaggtgggcagagagggactcagttcatggtgcttggaggtgggagagctcccaggcaaaatagagaggagactgtggagatgccgtgggc

SEQ ID NO: 919853 - DNA, 120 bp, Artificial Sequence
  ENSG00000229153_12 (sequence is synthesized)
aggtgtggaggagagggagagcttgaacggtgaaaaacaagagatggagagtctgggagaagggtgagcagccagaatggggatttccacagtagcttctgatgagctatgtctggtcag

SEQ ID NO: 919854 - DNA, 120 bp, Artificial Sequence
  ENSG00000229153_13 (sequence is synthesized)
aactataaccttagcttcctttatttccctggaggggtggggagataggaaggagaggagtatactagtctcttccaaagggagggccagagcaaaagcgtcctgtgattaattactcac

SEQ ID NO: 919855 - DNA, 120 bp, Artificial Sequence
  ENSG00000229153_14 (sequence is synthesized)
cacaaaaaccctcttcaaggctggagacctaggaggggcttggcacacagacaactcctctgcagctgttcagagaaaaacagctcttcccatctcaagccgcccacctgcccagtgtgc

SEQ ID NO: 919856 - DNA, 120 bp, Artificial Sequence
  ENSG00000229153_15 (sequence is synthesized)
tgtctgtcccactggtcacacactttccctagagtgcttcttgcttctctcacagcaattcccacctccgcatgctggaccaggcggccccctctagatcccatggtgaagcatcaggtg

SEQ ID NO: 919857 - DNA, 120 bp, Artificial Sequence
  ENSG00000229153_16 (sequence is synthesized)
cccacaggtctaagatgtcttcatttgttcaatggctagagcaggcagctggctgtccagatgcatgaatgaattccctaactctcacatgtctgcaggaaactgctgtaggaagcctgc

SEQ ID NO: 919858 - DNA, 120 bp, Artificial Sequence
  ENSG00000229153_17 (sequence is synthesized)
accagtggattgccattcgggcagatcctctcaactttgagagcttaaggcttgcttttgagtatgtgattatgatcctgcctgtgtgtatgtatgtcagaatcatagaactctagaggt

SEQ ID NO: 919859 - DNA, 120 bp, Artificial Sequence
  ENSG00000229153_18 (sequence is synthesized)
catgttttaattaatttattcattcattgattcattaacaaatgcttattgagtacctactatgtgtcaggctgtgatctggatactgaggcacagatcagtgagcaaaacagaccaaaa

SEQ ID NO: 919860 - DNA, 120 bp, Artificial Sequence
  ENSG00000229153_19 (sequence is synthesized)
gctctgtcatcatgaagcttatattctagagagaagagatatactatcatcaaattaagtcagttatgtagcatattagaaagtgataagtccagtggggtaaaataaaggaggatgatg

SEQ ID NO: 919861 - DNA, 120 bp, Artificial Sequence
  ENSG00000229153_20 (sequence is synthesized)
gggaatgtgaggggcggcatgcaattttaaatagaatgtttgaggaaggctttcatgggaaagtgatatttggtgcaaaacgtgaaggcggtaaagaggtgaattatgtggctatgtcgg

SEQ ID NO: 919862 - DNA, 120 bp, Artificial Sequence
  ENSG00000229153_21 (sequence is synthesized)
ggatggacattacaggcagaagaattagttagtcggggctctgagcagggagcaggtctggcatgttcccatcccagcaagtaggccagtgtggctctggtggagtaagcaaggatggaa

SEQ ID NO: 919863 - DNA, 120 bp, Artificial Sequence
  ENSG00000229153_22 (sequence is synthesized)
ttgcagcaggtgagtccagaagagtgataatggacagccagttgggggtgccttccaggtgattgtgggaactaggctttattctgagtgtgatgggtagccacttggggctttcaggac

SEQ ID NO: 919864 - DNA, 120 bp, Artificial Sequence
  ENSG00000229153_23 (sequence is synthesized)
gggaaaacgtgacttgaataagattcactgtagaagtggtgagatataagtggattctggatataataaaaatatagagccagcaggattttctgatggattagctaaggagtgtaaaga

SEQ ID NO: 919865 - DNA, 120 bp, Artificial Sequence
  ENSG00000229153_24 (sequence is synthesized)
aatagaggagtcagagtgactttttttttccttgagcaacaggaagtggagaggtatcattacctgaaaggaggaaagcctcaggtagagaaagttttagaggaggtaagatcagaggtt

SEQ ID NO: 919866 - DNA, 120 bp, Artificial Sequence
  ENSG00000229153_25 (sequence is synthesized)
tagtgcaagacatgctaagtttgagatgtctattagatacccaagtggatctgtctaatgggtatttagacagatccacttggatatctgtctcaatggacatgtgatctacatgtagtt

SEQ ID NO: 919867 - DNA, 120 bp, Artificial Sequence
  ENSG00000229153_26 (sequence is synthesized)
cacaggataagtccagtttagagtaccaatttgaagtcatcaaatgtaggtggcatttaaagtggtaaaactggactgagcacagtggcttatgcctgtaacccctgcattttgggaggc

SEQ ID NO: 919868 - DNA, 120 bp, Artificial Sequence
  ENSG00000229153_27 (sequence is synthesized)
aaataaataaataaataaataaataaaacaaaaataaaaaataaagtgataaaactggagatcactatgagaatgaggatagctagagaaaagaaggggtccagaaggttatccttgctg

SEQ ID NO: 919869 - DNA, 120 bp, Artificial Sequence
  ENSG00000229153_28 (sequence is synthesized)
tgctccaaggtgcttgagtttggaaacatgagacaaaaccagaaacagagaccctgggagagtctgtggtctccatttttccgctgagcaaaccacaggcttgtgttctgcctatctccc

SEQ ID NO: 919870 - DNA, 120 bp, Artificial Sequence
  ENSG00000229153_29 (sequence is synthesized)
acttcgcacatgtacagcattgtagaatatttacatggaaaaggattctatgatatagtagagtgacttcccctattgataacaaacaattatgtcagtccctacacaactcttatgcta

SEQ ID NO: 919871 - DNA, 120 bp, Artificial Sequence
  ENSG00000229153_30 (sequence is synthesized)
aaggtaatggggagggttgaatggtactcatttgggcagcttttttttggctatgtatactttcagaaagaatttacctcacctagatcacatgactaaaatataggaatattaataccc

SEQ ID NO: 919872 - DNA, 120 bp, Artificial Sequence
  ENSG00000229153_31 (sequence is synthesized)
actgtgtctaattggcagattgttttgagattttaaatgagatctattcatgaaaacattttgttaatcttaaagcaccacaccaatatcacctattatattgtacagccatgatcaaca

SEQ ID NO: 919873 - DNA, 120 bp, Artificial Sequence
  ENSG00000229153_32 (sequence is synthesized)
caatttccaatctagaagtccctctcaacttttcctgggactgagctttcaggacttagagttccttctccttctcattctttttctgcgcatagtctcccggtaaagtgaaaaccagct

SEQ ID NO: 919874 - DNA, 120 bp, Artificial Sequence
  ENSG00000229153_33 (sequence is synthesized)
gagaaaagattcgggctggacaggcctccgtggcgattaagagtcacgaatgtgatgatattattcgcaaacagcagtgtagtcatggttcagaattttggaaacagtgccaggaggatc

SEQ ID NO: 919875 - DNA, 120 bp, Artificial Sequence
  ENSG00000229153_34 (sequence is synthesized)
ttggacataattttcagggtgtataagccctgcactaaagtaaagtttaccagtgccaagagtttgacgttttcttcttcatgttttctttggctggagcctggctttagttgaagagtt

SEQ ID NO: 919876 - DNA, 120 bp, Artificial Sequence
  ENSG00000229153_35 (sequence is synthesized)
ctgtcaacaaatggaattctctatttgggactgggattcttgattggtggtgcttctgtctcctcttgctgtgagtttcctcaaacttagagtcctgtgggatctgtgtttgaacagaga

SEQ ID NO: 919877 - DNA, 120 bp, Artificial Sequence
  ENSG00000229153_36 (sequence is synthesized)
ctggaaatgcttacctcatctccacatttcttagccatttgtcaccagactgtagattgactggtgggatgcctgtttctagagagaaaagatactgcttttctctgactccagctgaga

SEQ ID NO: 919878 - DNA, 120 bp, Artificial Sequence
  ENSG00000229153_37 (sequence is synthesized)
agaggttggttaaattacgaatctgatgactatctatgaacctaaggaggaaaagttaatttcttttgagggtttgcataatgttttaaaacaaatttatagaaatatagatgatggaaa

SEQ ID NO: 919879 - DNA, 120 bp, Artificial Sequence
  ENSG00000229153_38 (sequence is synthesized)
aaagcaatagggtaaacctaaattattaaaaataaataatacataggaaataaacagcatagaaaagaaacaaaaaagagattgttaccaaaaaccataagtttttttttttttgaaaat

SEQ ID NO: 919880 - DNA, 120 bp, Artificial Sequence
  ENSG00000229153_39 (sequence is synthesized)
tctaagaaggtggataaatttctggaattttcaatgagcaaaaaagtgaaaagatacaaatgaataaaaaatgaaaaggtagaaattaaaataggtctagtagagattaaaaataataaa

SEQ ID NO: 919881 - DNA, 120 bp, Artificial Sequence
  ENSG00000229153_40 (sequence is synthesized)
agaatattattaaaaagtattggtggataaaataggcacatatctgaagataaaagccgaattgaccccctaaaaagcagaaaacttacaataacaatcattaatggctttgaatggcta

SEQ ID NO: 919882 - DNA, 120 bp, Artificial Sequence
  ENSG00000229153_41 (sequence is synthesized)
tgaaaaaataatatctctgccctcttcactactcccatgtaaaataattttacgggtagattttaccaacgtttcaagagagacatgattcccaaatattatgtaagttttttcagaaaa

SEQ ID NO: 919883 - DNA, 120 bp, Artificial Sequence
  ENSG00000229152_0 (sequence is synthesized)
gatacctcacttgaggttgacaggagtggccagcagttagtgcctatggtcatgtaatacactaagtcaatacctgtggagtgaaatccggtctctataaaaaatacaaaaaaaatggcg

SEQ ID NO: 919884 - DNA, 120 bp, Artificial Sequence
  ENSG00000229152_1 (sequence is synthesized)
tgagccaccgtgcccagcatggtatttatgattctaagtgccatttcaaaaatctgtttgctcttttttattctctggtccactaaagagtaatctttactgtgggctttatttcatatt

SEQ ID NO: 919885 - DNA, 120 bp, Artificial Sequence
  ENSG00000229152_2 (sequence is synthesized)
tttatttgtcctaatactaagtggtagcttctcatttctctgtttcttgattttggagagcaagtctatgcttatctatagaaataatcagtttgtaaacttatgttctccttgaagagt

SEQ ID NO: 919886 - DNA, 120 bp, Artificial Sequence
  ENSG00000229152_3 (sequence is synthesized)
atatcttttgaaagtgaaatataccattaaaaaaaagtccagctatatgatgaagctgtcacgtaatattagtatattttctatttcaataacaaggtgatctgattttgtacaaagtat

SEQ ID NO: 919887 - DNA, 120 bp, Artificial Sequence
  ENSG00000229152_4 (sequence is synthesized)
aattaatgtaatacaatctgcccaaactttggtgcttccttttcatttaattcatatatcaaaataaaaatattatgcaatactagaaaatactcatggccattcatagccatgcagtct

SEQ ID NO: 919888 - DNA, 120 bp, Artificial Sequence
  ENSG00000229152_5 (sequence is synthesized)
taataaggctaataaaaatagtgactttagtctgtaatagtcctgcacatagccgccttatatttttaagaattttgttggtttctgagattctcaattctcttttatctctgatcagat

SEQ ID NO: 919889 - DNA, 120 bp, Artificial Sequence
  ENSG00000229151_0 (sequence is synthesized)
aaactgcagttgtaatccaggattcacgggcctgtaggggctcagacttcaaattgaaccgcgcctcggcggcagccacaggtgtaatacacgaggcccaggtaccagaaggtgtccagc

SEQ ID NO: 919890 - DNA, 120 bp, Artificial Sequence
  ENSG00000229151_1 (sequence is synthesized)
agggccttggcggcgccctagcagctgaggtccagccgctgcgcgcccaggttcatctcattagtggacgccgcgggcccgcgagttcggagcagcgcgtgtatctgtgggtctttgggg

SEQ ID NO: 919891 - DNA, 120 bp, Artificial Sequence
  ENSG00000229151_2 (sequence is synthesized)
ctggcctcgctagcctaccagcttcctttcggtgatgctctttgctaccgccaggctcctgaccccagcttggacagcaggccgccgagcgcccctgacgcccgttaccgagatggctgc

SEQ ID NO: 919892 - DNA, 120 bp, Artificial Sequence
  ENSG00000229151_3 (sequence is synthesized)
gcagaaggagtggctgtggggctgtgatctctcctagaacctcagaggcatgaagctagaatatcttccccttcaaggagaataagccaagaacacaagaagatcagaggctgtaaggag

SEQ ID NO: 919893 - DNA, 120 bp, Artificial Sequence
  ENSG00000229151_4 (sequence is synthesized)
ctgctataaggccttctcccagtcacttccctctctctcctgagaggctgtcttgaatgaatttctcatcacttaccagattctgatgagggtatatgagacaaggacctggggagttgg

SEQ ID NO: 919894 - DNA, 120 bp, Artificial Sequence
  ENSG00000229151_5 (sequence is synthesized)
cctctttggttcattctttgtactgtttatctatggttgttgcggcctttgttgatgacattcagcattgacttcttgggtaaggtattcagtagttaagattcaatgactccagtgaaa

SEQ ID NO: 919895 - DNA, 120 bp, Artificial Sequence
  ENSG00000229151_6 (sequence is synthesized)
ggtatgtttccatcgtgatgttcttcttctggacaataagtgaaaagagcatgatgcatacagaactgctacttttgtgatgttgcaagtaatggtatagatgtgcacaaatcatggatg

SEQ ID NO: 919896 - DNA, 120 bp, Artificial Sequence
  ENSG00000229151_7 (sequence is synthesized)
tggtcccagtgatccatggaaatgtgaagtccaggaaggtatgtggcccttcctgaggtgtgttctaagttggtctcctagggtcctgaaggggactcctggatggtctgtggaaggtgt

SEQ ID NO: 919897 - DNA, 120 bp, Artificial Sequence
  ENSG00000229151_8 (sequence is synthesized)
tctacctagaggcagcctcttatgggggtggctcctgcccacctctgctgcttatgctgcagttactggtgttgcttggaagctgcctccaggacgtccttcacctttctgttctcctca

SEQ ID NO: 919898 - DNA, 120 bp, Artificial Sequence
  ENSG00000229151_9 (sequence is synthesized)
cctcaactcctcccttcagcttcccttcattgtgctgtggaagaagagctcttcgctgaatgcagagtggatgtttccatagaacagctggctcatttgactccgcaagtcctcctactt

SEQ ID NO: 919899 - DNA, 120 bp, Artificial Sequence
  ENSG00000229151_10 (sequence is synthesized)
tacctgtcggtttatcatcagcttctctttggaagctcatacgtgaaaggaactcatctccagatgagactttggacgtggaacttgggacttgggacttttgaagtaatgctggaatgg

SEQ ID NO: 919900 - DNA, 120 bp, Artificial Sequence
  ENSG00000229151_11 (sequence is synthesized)
gttaagtctttgggggactattatgaaggcatgattgtattttgcaatgtgagaaagacttaaaatttgggggtctaggaatgtaataatatggtttggttgtttgtccccttcaaatct

SEQ ID NO: 919901 - DNA, 120 bp, Artificial Sequence
  ENSG00000229151_12 (sequence is synthesized)
catgttgaaatatcatcccgtgttggaggtggggcctggtggaaggtgtttggatcatggggatagatccctcatgaatggtttagtgccatccccttggtgatgagtgagttctcatta

SEQ ID NO: 919902 - DNA, 120 bp, Artificial Sequence
  ENSG00000229151_13 (sequence is synthesized)
ttgcagttcgtgtgacatctggttgtttaaaagagtgtggcgcctcccccagcccccactcctgctctcaccctgggccatgcctactccttcattttctactatgattggaagcttcct

SEQ ID NO: 919903 - DNA, 120 bp, Artificial Sequence
  ENSG00000229151_14 (sequence is synthesized)
tgattggaagcttcctaaggtcctcacaagcagcagatactgccaccacacttcctgtacagcctgcagaaccatcagcccaaataaaccattttctttataaattacccagtctcaggt

SEQ ID NO: 919904 - DNA, 120 bp, Artificial Sequence
  ENSG00000229151_15 (sequence is synthesized)
acaaaacagactaacacaattgtgataatcatttcacaatatatacatatatcgaatcatcacattacataccttaaatatatataattttgtcaattatacctcaatacagctgaaaaa

SEQ ID NO: 919905 - DNA, 120 bp, Artificial Sequence
  ENSG00000229151_16 (sequence is synthesized)
aatctaacaatttgcagatgcttttctattttttatgtacacaatcgtatcatttgcaaatactgatgttagttttgtcttttcaacactttccccttgtatttatttttaatgtattat

SEQ ID NO: 919906 - DNA, 120 bp, Artificial Sequence
  ENSG00000229151_17 (sequence is synthesized)
ttcttttccttggatctccaatacaatgctaaatatgaacaatgacagaatccttgtgttgttcctgacctcaagaggaaatatttaaatatttatccaaaagtgttatgtgtgttgtat

SEQ ID NO: 919907 - DNA, 120 bp, Artificial Sequence
  ENSG00000229154_0 (sequence is synthesized)
gtgaaagtggaaaagaaacagtgggaggaatgagaggcaagaagcagcgggtagcacttttctcggtatcaaagagacgtgaaactaggctacttaattttttttcttgtaaaaaaagaa

SEQ ID NO: 919908 - DNA, 120 bp, Artificial Sequence
  ENSG00000229154_1 (sequence is synthesized)
cttccagtttcccaagacgcaacattgaattcaatcagaggtaaagattctggactattggattaaatgaggaggcaggagctactatctcttgcagtgtgaaaccagggccggggatga

SEQ ID NO: 919909 - DNA, 120 bp, Artificial Sequence
  ENSG00000229154_2 (sequence is synthesized)
agatatggacacatctcagctttccagggatgctgtgatgtgggtgagcatgagctttgtctatgggctgaattgcatccctccaaaattcatatgttatggtcctaacccctagtacct

SEQ ID NO: 919910 - DNA, 120 bp, Artificial Sequence
  ENSG00000229154_3 (sequence is synthesized)
ccgaatgcgactgtttggagatagggtctttagagatgttattaaattaaaatgaggttattagagtggctcctaatccaatatgattggtatccttataagtagaggaaatttgcacat

SEQ ID NO: 919911 - DNA, 120 bp, Artificial Sequence
  ENSG00000229154_4 (sequence is synthesized)
tatgtaaagactcagggagaagaccatctaaagccaagaagaaagccttcagaaggaaccaaccctgctgacaccttaaacttggccttctagcctctagactgtgagaaaataaatttt

SEQ ID NO: 919912 - DNA, 120 bp, Artificial Sequence
  ENSG00000229154_5 (sequence is synthesized)
tgttgtttaaggcatctagtactttgttatagcagcttgagcaaactaatacaagttccatttgtagtagaagctattaaacatcattacatagtctatgtctgcactcaacaaagactg

SEQ ID NO: 919913 - DNA, 120 bp, Artificial Sequence
  ENSG00000229154_6 (sequence is synthesized)
gttcccaccattaagacaagctgctccttctaccacttgggaggaaatcagcttaaggaaaggtgttagaaatattaggaaatacagattaaaaaatgaagaaacaaaatataactgtga

SEQ ID NO: 919914 - DNA, 120 bp, Artificial Sequence
  ENSG00000229154_7 (sequence is synthesized)
tctcaccactcaaagaaaggatgtacccatttatattcagcaagcctattttgagtgcaacataaagccctgtcactggtaactcttgactcagctgctcaagggctttcagccaaaatc

SEQ ID NO: 919915 - DNA, 120 bp, Artificial Sequence
  ENSG00000229154_8 (sequence is synthesized)
ctaggaggagagtgaggaaactagaggacactgaaaagctgtgccacaagtgactcagatcctgcaagtggctcgatggaggagtgtcccgtgttggtggcggaggtttttccttcctta

SEQ ID NO: 919916 - DNA, 120 bp, Artificial Sequence
  ENSG00000229154_9 (sequence is synthesized)
gatcctgcaagtggctcgatggaggagtgtcccgtgttggtggcggaggtttttccttccttagcacaggacaggctgcggggaagcatggcaggatcagccgtcttgcgcccatatggg

SEQ ID NO: 919917 - DNA, 120 bp, Artificial Sequence
  ENSG00000229154_10 (sequence is synthesized)
acctgcaagctccgccaggaggagccacgtcagtgcagccactaggggtcgccctgaagagcatggcacccacaggggtgtggagtgaggcgtgaagaggtgacttgtgttgctcacttg

SEQ ID NO: 919918 - DNA, 120 bp, Artificial Sequence
  ENSG00000229154_11 (sequence is synthesized)
agcgtggaagagatatccctgaggacctttgagtaagctgagagggacccgtggactgcggttccagggacttcactgcagggatcctcagatcattgtgattatgacccctggttgtta

SEQ ID NO: 919919 - DNA, 120 bp, Artificial Sequence
  ENSG00000229154_12 (sequence is synthesized)
attttattcctcgagctttgagggcctgggaaaatacacgttatttaggaaaagggaacagaaggactgatagcctttgtagtttttatgcattaatgggaaatgctatttgattttggt

SEQ ID NO: 919920 - DNA, 120 bp, Artificial Sequence
  ENSG00000229154_13 (sequence is synthesized)
tccttgcccagtataagagatcccagggggcctagttaaaaggaaagccaagcttatcttaaatgaaaaataaaatattttattttataaacatgaaaattatgtggcactcaataaaat

SEQ ID NO: 919921 - DNA, 120 bp, Artificial Sequence
  ENSG00000229154_14 (sequence is synthesized)
gtgttggcaagtgaatgtctgctacataatatgataaataaaataggttaattcctcttgggagaagaacttgaattttacttatcattggaagacttcgaaataactttcaacaggaac

SEQ ID NO: 919922 - DNA, 120 bp, Artificial Sequence
  ENSG00000229154_15 (sequence is synthesized)
ctctctaaggaagataagcagtggtctctgatttgctggtagatggagtgtgtgagagagggaaagagcaccttcattgttgaccagaaatgatcatcctccttactgtgtttcaagata

SEQ ID NO: 919923 - DNA, 120 bp, Artificial Sequence
  ENSG00000229154_16 (sequence is synthesized)
ttcacagagcaagcacctggttgtccctgggtcttggacctttgctggtcagacgtcacaaatacatcagaatgacagtcccattgatcttaatgtggcccttgtctgagaaataaattt

SEQ ID NO: 919924 - DNA, 120 bp, Artificial Sequence
  ENSG00000229154_17 (sequence is synthesized)
gtagatacaagtgaagaattaacaacattttgtcagcttctttggaatgtaaatttagctgccaaagtggtttccaaaagtaaacttatgttctgtacatttgcccaaggcaatgaataa

SEQ ID NO: 919925 - DNA, 120 bp, Artificial Sequence
  ENSG00000229154_18 (sequence is synthesized)
acttccaataaaacaaacaaacaattctttctctggggttgttttcttctttcttcaagtggcactatggagaattaattacttcataatctcactcactatagcctatccaattaaaaa

SEQ ID NO: 919926 - DNA, 120 bp, Artificial Sequence
  ENSG00000229154_19 (sequence is synthesized)
tggttatggaaaaacagggcttaccatctatcactggttttggctgagaacttttgaggcgcagcgagggccggaagcgggttcggtcgttgaagctccagctcttctgcactttggtgg

SEQ ID NO: 919927 - DNA, 120 bp, Artificial Sequence
  ENSG00000229154_20 (sequence is synthesized)
gactgccctcggctgtgatgtcggtgcttggggacctcctgtcacctactgaggcttgtcggctcttaatactctggcccctggggctagccatgcgcactcgctccttaaaacttagct

SEQ ID NO: 919928 - DNA, 120 bp, Artificial Sequence
  ENSG00000229154_21 (sequence is synthesized)
tctgactgtggagaacagaggcatgattattccatttcaagcaatttcttccactttgcttggtgaaattatgccattcattagaaggtgatactgtcatcaatgtgagaggcccaggac

SEQ ID NO: 919929 - DNA, 120 bp, Artificial Sequence
  ENSG00000229154_22 (sequence is synthesized)
ctgcagggcctgaagaaatcctgggcaatgagtctgagggaagtctctcagagcagctactctgagagagtaaagccgcagcctttgtggggtatgaaagcagcgttctcatggataagg

SEQ ID NO: 919930 - DNA, 120 bp, Artificial Sequence
  ENSG00000229154_23 (sequence is synthesized)
cttatttgagacgaagtggaggccttgttttgtccacttaccgcaatgtccactgtccccaactgcagcatgccaacagcaaatgtgtttagtggatatgtgctttgtagctaacaagaa

SEQ ID NO: 919931 - DNA, 120 bp, Artificial Sequence
  ENSG00000229154_24 (sequence is synthesized)
acagtaacatttatttttccatgcctagttgcttaacaaacgatattctaaaagggcaccacgttttatgtgtgtttacatgaaaacaaatcaaatcatgaactggtggtcagggagttc

SEQ ID NO: 919932 - DNA, 120 bp, Artificial Sequence
  ENSG00000229154_25 (sequence is synthesized)
tggaaacaataaacaagttgaccatgcaactgacagctcccctctgaaatgcagacacagctaagtccagcatgactcgctgaaggcacatgcaaagaacaggcggggcagtttggtgat

SEQ ID NO: 919933 - DNA, 120 bp, Artificial Sequence
  ENSG00000229154_26 (sequence is synthesized)
gaggtcaggtgggttcaagagttctttacaacaatcccaacagtggaagagtttatctgtgcttgacacatgtgtgattaaatgatagattacattaaacaagagcaacaataacatcat

SEQ ID NO: 919934 - DNA, 120 bp, Artificial Sequence
  ENSG00000229154_27 (sequence is synthesized)
aaacctgcatcttttaattctcaggctaggttttccatgtcatcccaaagccttcaattatttaaacaaatctgtcaaagggatggtgcccaaaaatatctacttttctcaagctttttt

SEQ ID NO: 919935 - DNA, 120 bp, Artificial Sequence
  ENSG00000229154_28 (sequence is synthesized)
tttttttaaattgtaaaagtttcaaatctctttttagtttcaacacatctgttccataatttaaatttacaatgatctagttcaggaagcatatgctcacttctgcacctttattcagat

SEQ ID NO: 919936 - DNA, 120 bp, Artificial Sequence
  ENSG00000229154_29 (sequence is synthesized)
taatgaatagctcaagttgacatagatatcattacaattggtcctcactatatttgattttatctattaccttttctggaactaacagatgctaattactataaaaggttggttttagtt

SEQ ID NO: 919937 - DNA, 120 bp, Artificial Sequence
  ENSG00000229154_30 (sequence is synthesized)
ttggttttagttaatatcaaattattttctccaactttcaagatatatctcttttctatgtcaactaaatacataagaaatggataaaccatcataaaaacacttaatatgaaaaattaa

SEQ ID NO: 919938 - DNA, 120 bp, Artificial Sequence
  ENSG00000229154_31 (sequence is synthesized)
actaaaaaagtaaaaacatccaaaatgaaagtattagcattcaatccaccatagtttgtttataataaaagtattttaaaaatcatacctataaaaatatttttaaaaattgcctctatg

SEQ ID NO: 919939 - DNA, 120 bp, Artificial Sequence
  ENSG00000229154_32 (sequence is synthesized)
aaccattttgacattaccttatgaataaattggaaaatgtgaataatattctctaaatcttagtatcatttaaagcacttaaagttgacaaaaataaattctaagtaacatttccctttt

SEQ ID NO: 919940 - DNA, 120 bp, Artificial Sequence
  ENSG00000229154_33 (sequence is synthesized)
gtccttctcaactacatggatatttgctaatgtctattattttaaagattcccaagaattattttaaaataaactcggcatattacatgttaaattagaaaaaatgtaatgttttcactt

SEQ ID NO: 919941 - DNA, 120 bp, Artificial Sequence
  ENSG00000229154_34 (sequence is synthesized)
tctcttttgacataattatatgaaagttaagaataagattctaatcaagaactttttaaccaggcaaaattttcttttccaaggcaaagatctgttcttgtgtcctcttacaaaaagctc

SEQ ID NO: 919942 - DNA, 120 bp, Artificial Sequence
  ENSG00000229154_35 (sequence is synthesized)
actttattatttttctactttgtttccctttgaaaatcaacacagcgtcttgattagatgactattaagctgatcaggtgactgttactgaaaacacacattgaattgattaaaaatata

SEQ ID NO: 919943 - DNA, 120 bp, Artificial Sequence
  ENSG00000229154_36 (sequence is synthesized)
gggggaagccagctgcatgtcatatggacattcaggcaacctagggtgtgaataatgtggcaaggaaataaaaggcctgctagcaaatgctcagttgagcttggtaatgggtcctctccc

SEQ ID NO: 919944 - DNA, 120 bp, Artificial Sequence
  ENSG00000229154_37 (sequence is synthesized)
agcatctccagccaagagcttgactgcaacctcatatgagattttgagccataaccattcagctaaactgcttctggatacctgaccatagaaactgtgagattataagagaagcagatc

SEQ ID NO: 919945 - DNA, 120 bp, Artificial Sequence
  ENSG00000229154_38 (sequence is synthesized)
ttagggggacaagagtacatatgaaacacagcagaggagtaggatatgtctttgaatgaagatgcctgagggactgaataaagaacctggacaactaaagaaaaaagacacctatggatc

SEQ ID NO: 919946 - DNA, 120 bp, Artificial Sequence
  ENSG00000286275_0 (sequence is synthesized)
ctgctgcaaagtccatgctactggaagcctcgaagtaggggggattctgttctagtctttgtcaaatcccactgcccatggcagcaccaggacccagttggggctccttggaactggcag

SEQ ID NO: 919947 - DNA, 120 bp, Artificial Sequence
  ENSG00000286275_1 (sequence is synthesized)
gaaggaatcgggtggggagacaggcagagaagggggtctgtgcaaagaccaggagaaaccagagacaggtcgtggcgggggctgagaccttcacacagggcaggggccgccccggggggt

SEQ ID NO: 919948 - DNA, 120 bp, Artificial Sequence
  ENSG00000286275_2 (sequence is synthesized)
tctccttgtcttgcagcccctgtgcagggcatcctcagagcaggggcagcccagggcaccgggacgcccaggtggaaggtgacctgccatcctgcagcttcacttcctgccgggtgattc

SEQ ID NO: 919949 - DNA, 120 bp, Artificial Sequence
  ENSG00000286275_3 (sequence is synthesized)
tgctacttctgaacaccaggcactggctctgagacccccgggccttgctggacatctccccaggtgtactgggccaggggacaggggcctggccatcccaacacccaggagcaagcagcc

SEQ ID NO: 919950 - DNA, 120 bp, Artificial Sequence
  ENSG00000286275_4 (sequence is synthesized)
cgtcacctgcccaggtccccgaggcctggaacaccttcctgctgggcccacccagccctggacctgtcccgcttggtcacacgatgggaccctcggcccatcagcagcgccttcaactgt

SEQ ID NO: 919951 - DNA, 120 bp, Artificial Sequence
  ENSG00000286275_5 (sequence is synthesized)
gaagaggtgaactcttcaaacacgctgagcaaacaggcccgactcccagggccgcatccgggatgtctcaatagctgtggccttgacgtccacctcggacccctgccccggacccagccc

SEQ ID NO: 919952 - DNA, 120 bp, Artificial Sequence
  ENSG00000286275_6 (sequence is synthesized)
agttcccaatgggccctctgcccggggaggtgcctagtgggagggacgagggcaaagtcggggcccccacttgtttggtgtcactgtgtgccagcggccactggcgggcgaggctgttcc

SEQ ID NO: 919953 - DNA, 120 bp, Artificial Sequence
  ENSG00000286274_0 (sequence is synthesized)
ctatgtgtgtctttgcacatgaccgggtctcctgaatacagcacttcgatgggtcttgactctttatctaatttgccagtctgtatctttttattggggcatttagctcatttacattta

SEQ ID NO: 919954 - DNA, 64 bp, Artificial Sequence
  ENSG00000286274_1 (sequence is synthesized)
ttccttcaggaggtcttcttatttctcttttgcttttgaagcttagtttggctggatatgaaat

SEQ ID NO: 919955 - DNA, 120 bp, Artificial Sequence
  ENSG00000286274_2 (sequence is synthesized)
aagaatgttgaatattgccccccactcttttctggcttgtagggtttcagccaggagatccactgttagtctaatgggcttccccttttgcataacctgtcctttctctctggctgccct

SEQ ID NO: 919956 - DNA, 120 bp, Artificial Sequence
  ENSG00000286274_3 (sequence is synthesized)
cccttaacatttttttccttcatttcagccttggtgaatctgacgattatgtatcttggagttactcttctggaagagtatctttgtggcattctctatttcctgaatttgaacgttggc

SEQ ID NO: 919957 - DNA, 77 bp, Artificial Sequence
  ENSG00000286274_4 (sequence is synthesized)
gttactcttctggaagagtatctttgtggcattctctatttcctgaatttgaacgttggcctgtcttgctatgttgt

SEQ ID NO: 919958 - DNA, 120 bp, Artificial Sequence
  ENSG00000286274_5 (sequence is synthesized)
ttcttggaggctttgtttgttcctttacatcctttttttctctaatcttgtgttcacgctttatttcattaagttgatctttgatctctgatatcctttcttccgcttgatcgattcagc

SEQ ID NO: 919959 - DNA, 62 bp, Artificial Sequence
  ENSG00000286274_6 (sequence is synthesized)
ttttttctaaactggttattctagttagccatttatctaacctttttacaaggttcttagct

SEQ ID NO: 919960 - DNA, 73 bp, Artificial Sequence
  ENSG00000286274_7 (sequence is synthesized)
gctccatcaggtcatttgttttttctaaactggttattctagttagccatttatctaacctttttctcagagg

SEQ ID NO: 919961 - DNA, 81 bp, Artificial Sequence
  ENSG00000286274_8 (sequence is synthesized)
ccttctgaagcctacttctgtcagtttctcaaactcattctccatctagttttgttttcttgctggtgaggagttgtgatc

SEQ ID NO: 919962 - DNA, 74 bp, Artificial Sequence
  ENSG00000286274_9 (sequence is synthesized)
gctgcatgtctgctggagtttgctggagtgccactccagaccctgtttgcctgtgtatctccagcagaggctgc

SEQ ID NO: 919963 - DNA, 66 bp, Artificial Sequence
  ENSG00000286274_10 (sequence is synthesized)
ccctctgctgcatgtctgctggagtttgctggagtgccactccagaccctgtttgcctgtgtatcc

SEQ ID NO: 919964 - DNA, 65 bp, Artificial Sequence
  ENSG00000286274_11 (sequence is synthesized)
ccagctggagctctcctgtatgaggtatctgttggcccctgctgggaggtgtctcctagtgagga

SEQ ID NO: 919965 - DNA, 120 bp, Artificial Sequence
  ENSG00000286274_12 (sequence is synthesized)
agatccgctgctctcttcagagccaccaggcagggacgtttcagtcagctgaggctgagcccataactgctccttcccccaggtgttctgtcccagggagatgggggtttatctataagc

SEQ ID NO: 919966 - DNA, 120 bp, Artificial Sequence
  ENSG00000286274_13 (sequence is synthesized)
tgcctttttttcagagatgccctgccaagagaggagacatctagagaggcagtctggctaaagcggctttgtgtgtggatatttgttttcccagcactatttgtcagagagactattctg

SEQ ID NO: 919967 - DNA, 120 bp, Artificial Sequence
  ENSG00000286274_14 (sequence is synthesized)
cagagagactattctgttcacattgtatgttcttggtgtctttgaaaatttattgactttaaatgtgtggatttctctgttgtctattgtattctgttagtctatgtatctgtttttatt

SEQ ID NO: 919968 - DNA, 120 bp, Artificial Sequence
  ENSG00000286274_15 (sequence is synthesized)
ccaatgccttgatacttagtttactatacttgtgaaaaaatgtcactgggatattgttagaaattacattggatctgtagatcactttgggtagtatggatattttaacaatattattta

SEQ ID NO: 919969 - DNA, 120 bp, Artificial Sequence
  ENSG00000286274_16 (sequence is synthesized)
ttcaaagctatgaacatatgttttatttatgttcttctgattggataatttaatctatttacaccaaattcataggaaaacactgactactgtcattttgttaattattttctgtttttt

SEQ ID NO: 919970 - DNA, 120 bp, Artificial Sequence
  ENSG00000286274_17 (sequence is synthesized)
agatcctttattcctgttttgccgtcctcctttgtgattagaagattttctctaatgtgagagaatgttcaggagagaaaatcagaaatctacatttgaaaagtatcccactaacaggta

SEQ ID NO: 919971 - DNA, 120 bp, Artificial Sequence
  ENSG00000286274_18 (sequence is synthesized)
ggtgattcttatgtgcacgcaagtttcaggattaatggttgatttaaaaatcagtaaaatgcattccaagatatatacattctagaaagcagacaaaattaattacaatttcttgagagg

SEQ ID NO: 919972 - DNA, 120 bp, Artificial Sequence
  ENSG00000286274_19 (sequence is synthesized)
agatataaatgtttggacacttaatctggcaagattaatttggctacttcataaaggtgtctaagcagatacaataagcacagtaggaatgacaattagataatgcagtgggtaagtgta

SEQ ID NO: 919973 - DNA, 120 bp, Artificial Sequence
  ENSG00000286274_20 (sequence is synthesized)
gttgtaataaattttatttcttgtcttatttatttatatttgctattttggaatttactataatgtgtattgttggaaaacttaccagcaggtggtagcactgtttaacaaatatacccc

SEQ ID NO: 919974 - DNA, 120 bp, Artificial Sequence
  ENSG00000286274_21 (sequence is synthesized)
agatcacaaagcaagccattgtgaataatttattggctactagagcagtaacattcaaatatgtcagaatattggattgggattcagaaagcctgactcctggtcccagctgtattactt

SEQ ID NO: 919975 - DNA, 120 bp, Artificial Sequence
  ENSG00000286274_22 (sequence is synthesized)
actggcccaatcactttggaaagataatttaatcttagtgtttagataacattgtaagtaaaattgggataataactctcttggcttttgttgtttagggtagaaaaagaaaatgatttt

SEQ ID NO: 919976 - DNA, 120 bp, Artificial Sequence
  ENSG00000286274_23 (sequence is synthesized)
gaaatcatgggaggggtagaatgctaggtaaatgcaagctatcatctctcctttttcccccgctacgtttcttgttattcaggcatatattttaaaatgtgaccctattagcagtaaagg

SEQ ID NO: 919977 - DNA, 120 bp, Artificial Sequence
  ENSG00000286274_24 (sequence is synthesized)
tggccatcacagtggaacttaaaaggacagcactcataaatgtcaaatgacttcctgttgctcatgtgttcaactaatttttgacttttttttcagttttgtttttttcccatgtattct

SEQ ID NO: 919978 - DNA, 120 bp, Artificial Sequence
  ENSG00000286277_0 (sequence is synthesized)
gccatctgcagtgcctggaggtggggtggggagaagtgaagaatctcttcctttttaatagattttcaagatgggaaaatcatattgcaacccacaggcatttggaaacaatttgtgccg

SEQ ID NO: 919979 - DNA, 120 bp, Artificial Sequence
  ENSG00000286277_1 (sequence is synthesized)
aagacagaaagtacacctaacgttaagctgaaaaaactggacgctcccagcaaactcactttgcagactcctggttgtcagaagaaaacgccagaggatttcacttggcattgacctctt

SEQ ID NO: 919980 - DNA, 120 bp, Artificial Sequence
  ENSG00000286277_2 (sequence is synthesized)
actacttccagccacttaccctgggcagtagaaagaaggaacagaaagcagagtagattaagaggagcaagtacaaatggcgtgggacttcaaatcaccacctaagattacttctttgat

SEQ ID NO: 919981 - DNA, 120 bp, Artificial Sequence
  ENSG00000286277_3 (sequence is synthesized)
ttctgaaaaagtaggtcaaaggaagatgtcagtgctggagcagaggtactgaatgaggaagtggagtcttgggatacctttggagggatccagttaatggactggctgccataattggtc

SEQ ID NO: 919982 - DNA, 120 bp, Artificial Sequence
  ENSG00000286277_4 (sequence is synthesized)
tgagacactggtgcaagcatgagaatgggaatctacaggtctctatccctggtgagcccggaggttgagttttcacaagggcagcaagaagaatcccttctcctcttcctgtccaccttc

SEQ ID NO: 919983 - DNA, 120 bp, Artificial Sequence
  ENSG00000286277_5 (sequence is synthesized)
gaccccacagagaccaggaacaaacgttcttgcctttggacttcacttcttcacagagccagagttacaggccaacctgaagatggtatcatgactcacacacacttatttctcagcctc

SEQ ID NO: 919984 - DNA, 120 bp, Artificial Sequence
  ENSG00000286277_6 (sequence is synthesized)
agccaggctcaagagcaagactgctgaaggaggaagggcccttcatggcctcctctgcctcgtgactgctttacctgccactgatgaggcttccctgggatgagatggagacgagggcac

SEQ ID NO: 919985 - DNA, 120 bp, Artificial Sequence
  ENSG00000286277_7 (sequence is synthesized)
tgaatgactttgagttagggggactcaagagggtgagggcaccatgatcattaccccttcagtctcctgtctccctcttggcatctctgcaacacagaaggctggcaatggtgagatatt

SEQ ID NO: 919986 - DNA, 120 bp, Artificial Sequence
  ENSG00000286277_8 (sequence is synthesized)
atattgtcaattattcaaactttagaattttctgatgcctcaacatccctgcaaatgggctgtgagcaccttgcccaggtgaccaggtgcaccagtgtgctaaggctggtccgggccaca

SEQ ID NO: 919987 - DNA, 120 bp, Artificial Sequence
  ENSG00000286277_9 (sequence is synthesized)
ggttccccactttgtgctcccctgactgggacctagtgacatcaacaccaccagtgcaatcccctcacaccttttgcttgtggattcccctctgaagtccaataaaggcgcttgtctgag

SEQ ID NO: 919988 - DNA, 120 bp, Artificial Sequence
  ENSG00000286276_0 (sequence is synthesized)
gaacttcccttgcggcctgtggttggagacaaatagctgtgctggctccgttggcagagttggtgttggttttggtgccccaacctcctttttctggaatctgccccatattcagtcccc

SEQ ID NO: 919989 - DNA, 120 bp, Artificial Sequence
  ENSG00000286276_1 (sequence is synthesized)
agatggaagtaagctgatactcagatgatgaaactgaggtctggagaccgagttgcccagagtcacacaactgtcagtagtcatggaggaattagctttgaaatgcagatgtgtctgatt

SEQ ID NO: 919990 - DNA, 120 bp, Artificial Sequence
  ENSG00000286276_2 (sequence is synthesized)
ttgagcaatttttattctgtgatggagcgcagcctcaaaatagaacagaatgctcaactacctcatatagaatgtgagaaataacccaagaagtagaaagaatgagagggagctggaatg

SEQ ID NO: 919991 - DNA, 120 bp, Artificial Sequence
  ENSG00000286276_3 (sequence is synthesized)
gaaggttgctggccctgggagcaaggcccaggacccaaggaagaagggttggctggagccataggaagaagggatgcagccagaacagcaccgcagctgactgaggcaggtgcagaagaa

SEQ ID NO: 919992 - DNA, 120 bp, Artificial Sequence
  ENSG00000286276_4 (sequence is synthesized)
gctcaggcccgggcaggaaaggacctcgcttacttgtttagaacgttacacaaaatgcaatgcaccatcaattcttgggtcatcccctccctctgcattctttttagcaaaaggagttat

SEQ ID NO: 919993 - DNA, 120 bp, Artificial Sequence
  ENSG00000286276_5 (sequence is synthesized)
tatttccactttctatgaaaacattcatttcttcaaaatcagatatcctagatctagaagaaaaaagtgggtaaaatgaaccagctgtacagttcaaaggaaaatatagtgatgcgctct

SEQ ID NO: 919994 - DNA, 120 bp, Artificial Sequence
  ENSG00000286271_0 (sequence is synthesized)
acatttcttggttccctgaccaggaaacgaggtaactgatagacatagacggcagagctaacccgttaggcggcttaggcctgtcctgtggagcgtccctgcaggggactccagtcagcc

SEQ ID NO: 919995 - DNA, 120 bp, Artificial Sequence
  ENSG00000286271_1 (sequence is synthesized)
tgagtgacgcgatccaaagaacgctcccgggtaggaaattgccccggtggaatgccttgccagagcagcgcatagcaggcccctgcagaggattaacacggtggctgaacaccggaaaga

SEQ ID NO: 919996 - DNA, 120 bp, Artificial Sequence
  ENSG00000286271_2 (sequence is synthesized)
actggcacttggagtcgcgacatctgaaacttgctatatggaggaagcagcagagaagggcaaattttaaaaagtggaagaaaactggtatgcatattttcaaccaagtgaaaacgtcaa

SEQ ID NO: 919997 - DNA, 120 bp, Artificial Sequence
  ENSG00000286271_3 (sequence is synthesized)
ggaggttaaagtaatcaactgggtcaaatgctgctgagaggtcaaataagtcctcaagaataactgtagaatgtgctgggagtgcaacatcctaaaataaggaggaagtggctgaaacag

SEQ ID NO: 919998 - DNA, 120 bp, Artificial Sequence
  ENSG00000286271_4 (sequence is synthesized)
cctgggctgtattcctgtctccatctagcacaagatgtccttcaaccctttagcccagcgtgcaaggtaagctgcttattggggtccctcagctgtggtgcaagaagagcatgtgcagtt

SEQ ID NO: 919999 - DNA, 120 bp, Artificial Sequence
  ENSG00000286271_5 (sequence is synthesized)
aagacaccatctaccgtaggcagctttctgagttacaagggaccaacacacaatgaaccctagtcttgctatcccttgctgcctgtctgtaagtacaaatttgcttcatatagcttgctt

SEQ ID NO: 920000 - DNA, 120 bp, Artificial Sequence
  ENSG00000286271_6 (sequence is synthesized)
atgaatatcttatgtctcagctgattcaaagaagttggtaagcagtgcacagttaacctgcttcacacttacaattttctgatctttcacaaattactgggcattggtcttacatcactg

SEQ ID NO: 920001 - DNA, 82 bp, Artificial Sequence
  ENSG00000286271_7 (sequence is synthesized)
cctcgggatatggtagatacaaccattcagtttatatatttttttatttttgggacctgatctcgactcactgcaacctccg

SEQ ID NO: 920002 - DNA, 120 bp, Artificial Sequence
  ENSG00000286271_8 (sequence is synthesized)
ccaacactttgggaattaatctttagaactgggccattttccctaaccacctccaagctccctcccaaataatcctttgagcttccctcccattccccttcatcgcaaacaccacaccca

SEQ ID NO: 920003 - DNA, 120 bp, Artificial Sequence
  ENSG00000286271_9 (sequence is synthesized)
caccctgccttcagcccagtatccatcccaccaaacgcacacactctagctcaaagatacagacatacctctttcccacagccctggttctcggtctctcctgtagtactaccagaacgt

SEQ ID NO: 920004 - DNA, 120 bp, Artificial Sequence
  ENSG00000286271_10 (sequence is synthesized)
ttggggtcagaaatcggatatctacacttccccgtctcccaaaagagcttccctccttaggcgtccggaggtctcttggatttttcactgctaatcccatctgtcttcactagactcact

SEQ ID NO: 920005 - DNA, 120 bp, Artificial Sequence
  ENSG00000286271_11 (sequence is synthesized)
tcccacaacttgctccaggaggggcctatgtggacactgaaggcgactggggcggttcctcttctgatgtagttagctctcagttagctcaccgcccagttctccttgatctctccgggc

SEQ ID NO: 920006 - DNA, 120 bp, Artificial Sequence
  ENSG00000286271_12 (sequence is synthesized)
tggaccgcctcgtaagcaggaggagcatagaaggaggcgggctccacaagcttgatcttctgaatccccttgtctctgtaaacttcccctggaagaagcgatgcactggcgaagccatgt

SEQ ID NO: 920007 - DNA, 120 bp, Artificial Sequence
  ENSG00000286271_13 (sequence is synthesized)
gaggggggcttttggttccagagagacagcccgagagccccagtgggaaccatccggagacccagaagatcgaattcgcgggacggcgcgttaccttccaacaccgctgggccaccactc

SEQ ID NO: 920008 - DNA, 120 bp, Artificial Sequence
  ENSG00000286271_14 (sequence is synthesized)
agagcagcgcatagcaggcccctgcagaggattaacacggtggctgaacaccggaaagaactggcacttggagtcgcgacatctgaaacttgtttattctagtaggcccaacctctgaga

SEQ ID NO: 920009 - DNA, 120 bp, Artificial Sequence
  ENSG00000286271_15 (sequence is synthesized)
ggagctgtacgtggatgggagcagcttcgccaaccgctgcaaagtgactctgaagaagaccacaagccctgctccagtcacacacggaagctgactggttcacgcatggccgaagcatga

SEQ ID NO: 920010 - DNA, 76 bp, Artificial Sequence
  ENSG00000286271_16 (sequence is synthesized)
agaccacaagccctgctccagtcacacacggaagctgactggttcacgcatggccgaagcatgaggaaactcatcg

SEQ ID NO: 920011 - DNA, 120 bp, Artificial Sequence
  ENSG00000286271_17 (sequence is synthesized)
aactgggtcaaatgctgctgagaggtcaaataaggaatcatgtcttatcaagagggtattgtgacctgtgtcttggggacctagcctcctgtttgtcttgcaaaactagtcctgccaaac

SEQ ID NO: 920012 - DNA, 120 bp, Artificial Sequence
  ENSG00000286271_18 (sequence is synthesized)
ggaggcccaggcgcaggcaggagtggcggccgcagcctcgtcggaggagcccggtcactgcgctccgcggccgccacacgcgccgcgatcggccctcttcgaagactggtcgcgggaacc

SEQ ID NO: 920013 - DNA, 120 bp, Artificial Sequence
  ENSG00000286271_19 (sequence is synthesized)
agagaggtctgacgatggggacctctcggagtgtcgtcgccctgctactgagccttggcggccaccgggctcagcctggaggcttccttgtgcagcataggccgcctgtccgccaagaag

SEQ ID NO: 920014 - DNA, 120 bp, Artificial Sequence
  ENSG00000286270_0 (sequence is synthesized)
aaggaggagaaagagccagctgcagaaagccaacaagaggggtgtttgatgcaaagaaaatcataaaccgacccccagctggaaatgatcctaacctgtggaagctcctgaattgagtga

SEQ ID NO: 920015 - DNA, 73 bp, Artificial Sequence
  ENSG00000286270_1 (sequence is synthesized)
ggaaatgatcctaacctgtggaagctcctgaattgagtgagggactggccggcaggagagagtctcactctag

SEQ ID NO: 920016 - DNA, 120 bp, Artificial Sequence
  ENSG00000286270_2 (sequence is synthesized)
aagtagctgggattacagggtgcagatctgcgtagtgaaactacccacagcaaggatgtatgcctgtgaggtggcacagaactgatggatcagacttggccttcaacctcctgttatcct

SEQ ID NO: 920017 - DNA, 120 bp, Artificial Sequence
  ENSG00000286270_3 (sequence is synthesized)
gatgaaattgcaagctccaaacaacagagacacaacattgaccaacagtaagatggcttgaagaaatatttctttcaggacaaactctgtgcattccatgagggtggatggatggactta

SEQ ID NO: 920018 - DNA, 120 bp, Artificial Sequence
  ENSG00000286270_4 (sequence is synthesized)
ctgcagcttcgaaatgtcaaacagcctcttccttgggtgacaactgctttctgactcaaaggaagaccttgctctccagcatcaggggctgtcagaaactttgcttttgagtaagtacaa

SEQ ID NO: 920019 - DNA, 120 bp, Artificial Sequence
  ENSG00000286270_5 (sequence is synthesized)
catcacactgcctggaggatctaggtccacctttacacagaagcacagagctacagagaaggggtttctggatggaacattcacatctggctggacttcatgggttctaaggacagagga

SEQ ID NO: 920020 - DNA, 120 bp, Artificial Sequence
  ENSG00000286270_6 (sequence is synthesized)
cctgggtccactttgcagaccagacttgacactggctgctttacacttaggactgctacgttgtgagtccatcactacagcctcaagaatccctccccacagtcttataataacctcttt

SEQ ID NO: 920021 - DNA, 120 bp, Artificial Sequence
  ENSG00000286270_7 (sequence is synthesized)
gctttgtttttttagtcatcccaggtttcttaatgtgaatttattccctttttgctacaagccaataatcctgagtctgttaactgcaaaatcagttttggtgactgaatgcactaggat

SEQ ID NO: 920022 - DNA, 120 bp, Artificial Sequence
  ENSG00000286270_8 (sequence is synthesized)
gtatattagtttctggaatttgggatgactgtagcatttttcagcattttaaagtgagtaatttgttgtgacttatttccttttcttaaataaacactaacttctgtgtttagtttcaaa

SEQ ID NO: 920023 - DNA, 120 bp, Artificial Sequence
  ENSG00000286273_0 (sequence is synthesized)
ataacgtcttcttttagtcagcaaacacgccttcactcctcctctgttaatgcgtctcccacgaggcatttacgatgctggagggcaatctcttacccagaggaatgaaagccttcttga

SEQ ID NO: 920024 - DNA, 120 bp, Artificial Sequence
  ENSG00000286273_1 (sequence is synthesized)
aaatgacctacacatgaaaaagtaaattattggatccaggcaaacattacacgcagacaagaaaagtgtaatttctttgcagtaatataggattttttgtgcagattcatctaaaagcct

SEQ ID NO: 920025 - DNA, 120 bp, Artificial Sequence
  ENSG00000286273_2 (sequence is synthesized)
gtctaagtgactaaaagtaaaaggaattctgcacaagtgatatggtagaaagcaggtaaaaaacacagccacaacaaccctgatgctctggttatgttttcgctttcggcttgactgact

SEQ ID NO: 920026 - DNA, 120 bp, Artificial Sequence
  ENSG00000286273_3 (sequence is synthesized)
tatgaattgcctgctggatttgtggatgtacctggatatggctatgtaacatccgatcagaatcaccagcacggccacaaacaagcagctgttcacataggtgactgccgtatgccattt

SEQ ID NO: 920027 - DNA, 120 bp, Artificial Sequence
  ENSG00000286273_4 (sequence is synthesized)
gacccccaaaggacttttaagttttgagcagtcatggatattgtcctctgttggctgaccatttgttaggatgatgtttggcaaagacaaaacagccatgatcacccaaacacaaacaga

SEQ ID NO: 920028 - DNA, 120 bp, Artificial Sequence
  ENSG00000286273_5 (sequence is synthesized)
gaaggttatgctgtacatccgagagtccccaaatggcttgaccaccttcagatagcgatcaatgcttatcagcccaaggaacacgatggaagtatacatgtttgcataaaacaaaactga

SEQ ID NO: 920029 - DNA, 120 bp, Artificial Sequence
  ENSG00000286273_6 (sequence is synthesized)
agtgtatctgcagagaataaacttgaagtaccaaggtccaaatcctgcatcatggactattcgaaatggaaatgtcagcgtcattatgaggtctgcaaccactatgtttttgagatagaa

SEQ ID NO: 920030 - DNA, 120 bp, Artificial Sequence
  ENSG00000286273_7 (sequence is synthesized)
tatgaagctggttttattcctaatgtggaagaagatccacactgctaaaccattcagcaagatgcttgccacaaatataatgagataaagcaccggcaagacaattgtgtcaaattcatt

SEQ ID NO: 920031 - DNA, 120 bp, Artificial Sequence
  ENSG00000286273_8 (sequence is synthesized)
gtgaagggtggtgttctttcctggcccgtcgctcctgttgcctgaattgtgactctcttggccgtgcagctcgttatctgtaggagaagtggggagataggacttcagtgcttggcaagc

SEQ ID NO: 920032 - DNA, 120 bp, Artificial Sequence
  ENSG00000286273_9 (sequence is synthesized)
atgcccacaggctactaggttcccttacagacccaactttttgttatttcaggtgaacttaaagatgtcatcaatgatttacagagtcaaggtagcacattgttaatgttttgagtggcc

SEQ ID NO: 920033 - DNA, 120 bp, Artificial Sequence
  ENSG00000286273_10 (sequence is synthesized)
aaagaattagtgaccttctctcactaccctgcctccctcatatcaggacccttgagtaaaaagtcccatttctgatcccctttgccagccttttgaaaataaacataccagtgtaaatta

SEQ ID NO: 920034 - DNA, 120 bp, Artificial Sequence
  ENSG00000286272_0 (sequence is synthesized)
cattaagtcaacagattgcacatgaatatcaacaatcctgcaaaaaaagccagtcccttaagaaacatcaagattgacagttgtcatcagagaaatgatgaggaccaggatcttcagggt

SEQ ID NO: 920035 - DNA, 120 bp, Artificial Sequence
  ENSG00000286272_1 (sequence is synthesized)
accatctggtgctgtgtttgaagaaaatgagaatgagagatatttcctcaatagatgaaactattggccccagctccaaattcacacttgttgcagcagttaattctgcaaaatcacaga

SEQ ID NO: 920036 - DNA, 76 bp, Artificial Sequence
  ENSG00000286272_2 (sequence is synthesized)
ttcacacttgttgcagcagttaattctgcaaaatcacagaaggaaaaaaagtcaggccaaggtaggtggactccca

SEQ ID NO: 920037 - DNA, 120 bp, Artificial Sequence
  ENSG00000286272_3 (sequence is synthesized)
aaaaaaaaaaaaaaaaaaactcaggaaaactcctcttcttttttctttttttttgtcccaggctaagcagaaatgtactgactcattttgtggttatatgcattattattctcgtctcag

SEQ ID NO: 920038 - DNA, 120 bp, Artificial Sequence
  ENSG00000286272_4 (sequence is synthesized)
gttatatgcattattattctcgtctcaggtcaggactgctagacttagaaagaattctgatatgaattgtgatatcattgtctaacagaaagtgtattggaagttgttcacaatctccag

SEQ ID NO: 920039 - DNA, 120 bp, Artificial Sequence
  ENSG00000286272_5 (sequence is synthesized)
gcaggtcacagagagaggtgcagagagctgccttttttctttcttttgggttcaggattgcatttctgaagtttgtcctttaccatttattgtacactgacttttgctgttagataactg

SEQ ID NO: 920040 - DNA, 120 bp, Artificial Sequence
  ENSG00000286272_6 (sequence is synthesized)
gtttccaaaattagtgtgtacacaaattacctgagtcatttattaaacatttcctggcctccccctagggcaatttatttgtagatttcaggtgaatcctagtcatcaacaatttagcta

SEQ ID NO: 920041 - DNA, 120 bp, Artificial Sequence
  ENSG00000286272_7 (sequence is synthesized)
ataccaccctttcccagagagatcctgagatgggtgatctgaaaacacctcatttgaaacattctaggttagtgaattgagtttattgttttacatataaattattttcactatgcttta

SEQ ID NO: 920042 - DNA, 120 bp, Artificial Sequence
  ENSG00000286272_8 (sequence is synthesized)
tcatagagcttgacctgttcccagaggaaatctataggcataaaatgaacacatgtgttctcaacggctttaattaaaagagtggcatgcatatttcattgctattaacaaaaacaaaat

SEQ ID NO: 920043 - DNA, 120 bp, Artificial Sequence
  ENSG00000286272_9 (sequence is synthesized)
tgatttgcttttctagataattgaatgtatgaaaatctcagtgccttccttctgtaacttaactctataaattctgcatcattttcattttataagtgctggcatgtattgtgaatttct

SEQ ID NO: 920044 - DNA, 120 bp, Artificial Sequence
  ENSG00000286272_10 (sequence is synthesized)
ttacagcaagaagaatgacttaatgttttagagttagttttgtttttttgttttgtcccattttttaccaaacataaaatggcctaaaatgagtgcacaataaaagtgtgacaccttaaa

SEQ ID NO: 920045 - DNA, 120 bp, Artificial Sequence
  ENSG00000286279_0 (sequence is synthesized)
agagtgatggtcatcagaattagctgaggcagaagaggaggcaaaatggtaatctggaaggtaacccttctgaggaaattagcagctttgacaatggaaagtactgtttcatctgtcttc

SEQ ID NO: 920046 - DNA, 120 bp, Artificial Sequence
  ENSG00000286279_1 (sequence is synthesized)
cctatgagaaggtaatctgtttgaatagaagaaacattggaatagggctccatttctaaacagatttaggtctacagaagttatatcacccctgaaatccttgggatgctgtgaggattt

SEQ ID NO: 920047 - DNA, 120 bp, Artificial Sequence
  ENSG00000286279_2 (sequence is synthesized)
ttttggttaaactgaaatatcaacatagaaatacaaaatataaaataaactgagaaaactaacagctcacattttcgaaaattaaatagcaaatttatcttttatatatggtttcaaatg

SEQ ID NO: 920048 - DNA, 120 bp, Artificial Sequence
  ENSG00000286279_3 (sequence is synthesized)
tgtatttcacctcacagtaaaacttcataaacatttattatttataagcctgtaataactagtctacaattaattaatatggcagaaatgtaagtaaaaactgtgtactttccagtgaag

SEQ ID NO: 920049 - DNA, 120 bp, Artificial Sequence
  ENSG00000286279_4 (sequence is synthesized)
tgttatataaacatgtaatgttcaaagccatttacagatttataaaccaaaagtcaggtgggctggaaatgaaaaaaaattaattttaacaactaattgtaccatgagaaaattatatta

SEQ ID NO: 920050 - DNA, 120 bp, Artificial Sequence
  ENSG00000286279_5 (sequence is synthesized)
ttttttggtaaattatgactgccaaatatgtcccaataagggttacttcttttttcctaggcttaattctttattcaattagttgtgcttgcaaaattgagtaagaaaataattttgcct

SEQ ID NO: 920051 - DNA, 120 bp, Artificial Sequence
  ENSG00000286279_6 (sequence is synthesized)
gaaattaattacgtcttttaatttgaatgtttgattatctaattcaacaattattatgcacatgtaaaaagggagatttagaaaaatttttaaatatgcactttataatcttttccctgc

SEQ ID NO: 920052 - DNA, 120 bp, Artificial Sequence
  ENSG00000286279_7 (sequence is synthesized)
ttatttctgatccctgtaggtggagaaaatgctattaattgaaccatttttgtgacatgatgtagcttcccttatgcttacaatgacaaaataagattaacattgcatttgtaaaagcta

SEQ ID NO: 920053 - DNA, 120 bp, Artificial Sequence
  ENSG00000286279_8 (sequence is synthesized)
ccaggattttagaaaattatttattatatgaaaagtttagtttttatctctgcctattcctttttatcgtatatcaggcattttaactcacttgaaatctcacagataggaatcctgagg

SEQ ID NO: 920054 - DNA, 120 bp, Artificial Sequence
  ENSG00000286279_9 (sequence is synthesized)
cacattatgatatgtttaactcttcaagtatctaattggatgtgtttttatctggaatgtgtgaaatgtcttcttctttacctaatagtaactggtatgtcttggctcagcatggaaaca

SEQ ID NO: 920055 - DNA, 120 bp, Artificial Sequence
  ENSG00000286279_10 (sequence is synthesized)
acaaatttaacagccaatagatggcactggaagtgttcaaaacattttctatatcttttctgttccattgagtataattatttttttaaagcaaatgacaatttatatagttaaattaaa

SEQ ID NO: 920056 - DNA, 120 bp, Artificial Sequence
  ENSG00000286279_11 (sequence is synthesized)
aatgaaggcacattcagaacgtccatgttgaagaaactcaaatatttcattgttgcacgaccattgaaaattctagcactttaacaatatgaaacgatgccttcattctctcccatgttg

SEQ ID NO: 920057 - DNA, 120 bp, Artificial Sequence
  ENSG00000286279_12 (sequence is synthesized)
taacttaactactgtgtcattcaagtatgttttaccaccacctgttaggatttctgaagtctgtaaactcaattggtatgtgtgatgtctgcagagatttcatttttggtactattctcc

SEQ ID NO: 920058 - DNA, 120 bp, Artificial Sequence
  ENSG00000286279_13 (sequence is synthesized)
tgattatgtgatcctggtaggataaggattacagccaaatgttattaaataatttcattattggttctcacttgcatttttctaaagccaacttcacaagtaacctttcattctctgtag

SEQ ID NO: 920059 - DNA, 120 bp, Artificial Sequence
  ENSG00000286279_14 (sequence is synthesized)
taaacaagcccataaaacattcaatgaatcaagcagagtaaaagaaaaaatgcaggacagtatttaaacacagattacagtgaacagagtaatccatttataggatgggactaattttcc

SEQ ID NO: 920060 - DNA, 120 bp, Artificial Sequence
  ENSG00000286279_15 (sequence is synthesized)
tctaaaattggttaacagtgtgcttggttatttagatgtggtagaaaacgatcccatgtggaattcaatgggaatgccacctacatagaaagccaaactactactatatctgtttctaag

SEQ ID NO: 920061 - DNA, 120 bp, Artificial Sequence
  ENSG00000286279_16 (sequence is synthesized)
tgaggtccagtaactatgctttaatctttgctttttgttattttttttttttatgtttgcagttacatcaagtgtttcacaataccaggtgatattttcagagaagtgttatcagcatga

SEQ ID NO: 920062 - DNA, 120 bp, Artificial Sequence
  ENSG00000286279_17 (sequence is synthesized)
tgcagcatcaaacattacagctattccatcttcagataacacccccctactttttcaaagctttgtgttaaaactgttgaaggagctattgctttcacctaaaacagttttaaatcattg

SEQ ID NO: 920063 - DNA, 120 bp, Artificial Sequence
  ENSG00000286279_18 (sequence is synthesized)
ttgctttcacctaaaacagttttaaatcattgctttatgataatttagaacctaattaaattatgcatagctatagaaagactactttttaatctatttgtgcataaaatataaaaacat

SEQ ID NO: 920064 - DNA, 120 bp, Artificial Sequence
  ENSG00000286279_19 (sequence is synthesized)
attatttctttcatataggatattaccatgaaataaatgcatgcatacatatatttatattcatatgcatattttcatgatgatgcctcttgtgtatgtacatataaaattaaataatgt

SEQ ID NO: 920065 - DNA, 120 bp, Artificial Sequence
  ENSG00000286279_20 (sequence is synthesized)
acctagaaggcctactagaggcctggctatttcttgagtgcctaccataatatattgctggataaacaatcggctgaaacaatctgttgcctgttcaaatactaaatatgtgtttttggt

SEQ ID NO: 920066 - DNA, 120 bp, Artificial Sequence
  ENSG00000286279_21 (sequence is synthesized)
aataatggtagtacaacttcccccatcacattttactaaaaccatccttctttaatatctggctttaagaaattttctacatattattccacataggaatactcactgccctagaaatca

SEQ ID NO: 920067 - DNA, 120 bp, Artificial Sequence
  ENSG00000286279_22 (sequence is synthesized)
ttgtgtaagtgtgatcatattcctcaagcttcctataagcacactagctttatatatatatatacaaggagtaagtcagttttttaattcttctcaacaaggttagatgtattttcttga

SEQ ID NO: 920068 - DNA, 120 bp, Artificial Sequence
  ENSG00000286279_23 (sequence is synthesized)
gctctgtgacacctgcaactgaactaagacaattccttaatgcgtccaaggatgtttgaagttaatgtgtaaagcggggcagggagtcggggaggaggtacacaaaagaagtgttcacaa

SEQ ID NO: 920069 - DNA, 120 bp, Artificial Sequence
  ENSG00000286279_24 (sequence is synthesized)
gtaatcctcagaaacttttagaattctgtaagggaaaactcctatggagtactgcactgtggcctgcagacacttttatctttaatacaacagtgtgactttgatgccttggggggccat

SEQ ID NO: 920070 - DNA, 120 bp, Artificial Sequence
  ENSG00000286279_25 (sequence is synthesized)
aatgacaacattcatcttgatgtctgcattttcctctcaatgatattttgttttctctaaaatcattaagttctcttttccagtaaagaaaaaaacagaccacaactactctcttatttt

SEQ ID NO: 920071 - DNA, 120 bp, Artificial Sequence
  ENSG00000286279_26 (sequence is synthesized)
acaaatcaggtacattttttagagcaaaggatgtggaattgtatgaaagtttaacagtgattattcagctatcatactgcaagattgttaaataagggttgcaaatgaatgaatggatgc

SEQ ID NO: 920072 - DNA, 120 bp, Artificial Sequence
  ENSG00000286279_27 (sequence is synthesized)
aaaactggttagtaagaagtaactcatactaagagaatataggaaatttgattcagaatgtttaattcagtttaagagaacaatgaaatcaatgtcaaaatcaagctgtaggccttcttc

SEQ ID NO: 920073 - DNA, 120 bp, Artificial Sequence
  ENSG00000286279_28 (sequence is synthesized)
atatcacaaggaagaaaaaactcgtgtcaggaatgttttttctgtctgtgtttttatggactcagccttttggttgatgggtcttatggttgatgaacattaaatgagggaatcaacaaa

SEQ ID NO: 920074 - DNA, 120 bp, Artificial Sequence
  ENSG00000286279_29 (sequence is synthesized)
ttataggtggtaaccttgagtaagttccctaacttctcaaggcctcagccatcttattagtgtaataatttctacctacgacaggagtgtcttaaaaacttcattttaaaattcatgtgc

SEQ ID NO: 920075 - DNA, 60 bp, Artificial Sequence
  ENSG00000286279_30 (sequence is synthesized)
tgggaggccgaggcaggtggcaaaaatataaaaaattagccagacgtggtggtgtgcacc

SEQ ID NO: 920076 - DNA, 80 bp, Artificial Sequence
  ENSG00000286279_31 (sequence is synthesized)
aaaataaaataaaataaatttcatgtgctgaatataaactagtctgaccactgttgataaccatttgttgatatctcaat

SEQ ID NO: 920077 - DNA, 120 bp, Artificial Sequence
  ENSG00000286279_32 (sequence is synthesized)
tgaccactgttgataaccatttgttgatatctcaataagttaaagatagatttaccatatgactcaataattccactcctagatatttacccagaataactgaaaacagatactcaaaca

SEQ ID NO: 920078 - DNA, 120 bp, Artificial Sequence
  ENSG00000286279_33 (sequence is synthesized)
ataacttgtacatgagtcttcatagcaccatttttcataatagtcaaaaatagaaacaacccaaatgtccaccaactgaggaatggataaataatatatgatatatacatacaatggaaa

SEQ ID NO: 920079 - DNA, 120 bp, Artificial Sequence
  ENSG00000286279_34 (sequence is synthesized)
attattcaggaataaaaagaatgaggtattgacacctgctatagcatggatgagttttgaaaatatgctaagtggaggaagtcagacacatattgtatgatcttatttatgggaactatc

SEQ ID NO: 920080 - DNA, 120 bp, Artificial Sequence
  ENSG00000286279_35 (sequence is synthesized)
cataatacataaatccatggagacagaaagcagattagtagctcataggaactgaaggcagaaaggagggggaagagagaatgggagaagagggaatgggaagtgatggataatggatgc

SEQ ID NO: 920081 - DNA, 120 bp, Artificial Sequence
  ENSG00000286279_36 (sequence is synthesized)
agttttcattttcgatgatgaagttatagaaccagatcatagtgatagttgttaaaacattctaaatgtactgaatgccactgaatggtatactttagagtcgttaaaatggtaaattta

SEQ ID NO: 920082 - DNA, 120 bp, Artificial Sequence
  ENSG00000286279_37 (sequence is synthesized)
tgttttgtctatacataacaattgtgaaaataataagataaataaaaataaacactgataagtaaaagttctgagctctcaacattgaccaatggacacagttttgagcttgccagaatt

SEQ ID NO: 920083 - DNA, 120 bp, Artificial Sequence
  ENSG00000286279_38 (sequence is synthesized)
ttttataatatgtggcatatgtgaagattaggaaacactcaaagacatattgataaaagactctagtttgggtaaaccacaatgaggttatagttgcagattcaatgtatatatcatcta

SEQ ID NO: 920084 - DNA, 120 bp, Artificial Sequence
  ENSG00000286279_39 (sequence is synthesized)
attagtgaaagcagcattgtagagttcaaggtctagtctggtagattttgggtggctgttgataatattattattatcattattgctaataaatatgctgtggcagaaaagacattttgt

SEQ ID NO: 920085 - DNA, 120 bp, Artificial Sequence
  ENSG00000286279_40 (sequence is synthesized)
ccatcagggccatgtaaaaagtggactttctggagaacacacaggatccagttgtgttttgttcaccttaaaacaattattgttttgcaggctgttagagctaaagagaattagagataa

SEQ ID NO: 920086 - DNA, 120 bp, Artificial Sequence
  ENSG00000286279_41 (sequence is synthesized)
tttatcccgagtacttcaatttttaaatgagaaaaccaaaactcagaatggtcaaataacttgcctaaaatcagtaaaagacggtgtatgacattttgatgctgcctaaatactttattg

SEQ ID NO: 920087 - DNA, 120 bp, Artificial Sequence
  ENSG00000286279_42 (sequence is synthesized)
tcaaaaatattgtcaagtaacagatacctccctacctattcccaacctgcaactacccactattcaatcgggtttgcagataaagatgctgcccagagaggtttgttccaaacacattac

SEQ ID NO: 920088 - DNA, 120 bp, Artificial Sequence
  ENSG00000286279_43 (sequence is synthesized)
ttggaaagaaattccaaaacttttacactttgatgagaaaacactcatgccaaaatatcacactttacactataattggtggcagattgaataagaaatatgtttcccaattctcaaatg

SEQ ID NO: 920089 - DNA, 120 bp, Artificial Sequence
  ENSG00000286279_44 (sequence is synthesized)
attttcccacatttcaaaaacttttgtaaaacatagtcttatgatcattgtatgctttttgtccttctccctaattcctacacccttgtaaccccacctgttttaatatattgcatacta

SEQ ID NO: 920090 - DNA, 120 bp, Artificial Sequence
  ENSG00000286279_45 (sequence is synthesized)
agccttcttcttagagttgactcatttagaatactattgctttatatcacttcttaatggaagaagctctcagataacatctcaaggacatccaacgttgttttcactacactgggactt

SEQ ID NO: 920091 - DNA, 120 bp, Artificial Sequence
  ENSG00000286279_46 (sequence is synthesized)
ttattgatagaaatgtgtaataacatattatgatccactctctgattggcaagtactaataactggatgattttaaaagaactgtgtagtctgcccatgtcatcaccaaggcaatgggtc

SEQ ID NO: 920092 - DNA, 120 bp, Artificial Sequence
  ENSG00000286279_47 (sequence is synthesized)
atttctgaataaacataggtcgcagagtaaaggtgttcctacacctcccaccggccccgcctgctggcattgctttggggcctgacagcttgccttgtacatgctgtccctcagtaaatg

SEQ ID NO: 920093 - DNA, 120 bp, Artificial Sequence
  ENSG00000286279_48 (sequence is synthesized)
gctgcataataaacaattgaactctgcatagggaatcccctctgtaaatgaatacaaagaatatagtctctgattgtgtctctcacctaaaagccatatcccaattttcactgagtatgc

SEQ ID NO: 920094 - DNA, 120 bp, Artificial Sequence
  ENSG00000286279_49 (sequence is synthesized)
agtgctcataactgcacacccttctgactctgtcttgaaagctattcattaggtacagttagataataatatatgaccagtgttcatttcaactatggccatattcctggtgctggtgaa

SEQ ID NO: 920095 - DNA, 120 bp, Artificial Sequence
  ENSG00000286279_50 (sequence is synthesized)
tctgagcttgagaaaatacttgctcatctttagctctaagtaaaatctgttgacttaatttgatttgttttcattgtttcctgctgaaaattaggctaagcaaaactcaggaatacattg

SEQ ID NO: 920096 - DNA, 120 bp, Artificial Sequence
  ENSG00000286279_51 (sequence is synthesized)
atggatagtttttggagtaacaacccattaatttagaagctaggtcactcatatttttctaaattatttggctttgaatgaaaatatggaatgcctgcaatcccagcattttgagaggct

SEQ ID NO: 920097 - DNA, 90 bp, Artificial Sequence
  ENSG00000286279_52 (sequence is synthesized)
ggccaggagtttgagaccagcctgggcaagaaggcaggacctccttctctacacaaaatacatctgtagtctgagctattcaggaggcta

SEQ ID NO: 920098 - DNA, 120 bp, Artificial Sequence
  ENSG00000286279_53 (sequence is synthesized)
ctgagctattcaggaggctaaggaagggggactacttgggccatggagttcaagaccacagtgaatttacagtgaattataattgcatcactctcactccaggctgggtgacagagcaag

SEQ ID NO: 920099 - DNA, 120 bp, Artificial Sequence
  ENSG00000286278_0 (sequence is synthesized)
gcgcggagctaggctgcgaggcgtgcaagacggaacgcgacgagaagccgcgtgcgacaagtccctaggagaggacgccgcccttccccgcaaccggaagttccctgcccagggcgcctc

SEQ ID NO: 920100 - DNA, 120 bp, Artificial Sequence
  ENSG00000286278_1 (sequence is synthesized)
cttgagccttccgggtgcggtaggcgttgctgtcggctgctccttctgcctcagtttatggagcgactcttcagcctcctcgctcaccctgcctgctttcttttaagacatttctttttc

SEQ ID NO: 920101 - DNA, 120 bp, Artificial Sequence
  ENSG00000286278_2 (sequence is synthesized)
tttcttatccagaatatccaatttgggatgtattgagaaggattcgatttcttctttgggatcagaataatagactttgagtaagaagaaatttagaaatcatctgatactccaagtccc

SEQ ID NO: 920102 - DNA, 120 bp, Artificial Sequence
  ENSG00000286278_3 (sequence is synthesized)
tcatttttaagtgaagagattaagaatcagagagatgaaatgactcgccccaaaaatccagaaattatttacaaagctggatctcacagtcatatctcccgaacacttacttactcgatg

SEQ ID NO: 920103 - DNA, 120 bp, Artificial Sequence
  ENSG00000286278_4 (sequence is synthesized)
atcagtgattcttatgattcaaggttaacgaagaagcctttagtgggggtgattgggagttcaagcgctgaaaagttagggttgacttttttgattctgttattacaaattttacctcat

SEQ ID NO: 920104 - DNA, 120 bp, Artificial Sequence
  ENSG00000226009_0 (sequence is synthesized)
actgacctactttctatggagattcttgtaataggtgggctcattacatctgcctaacccaggcttggttcggtaaagacaccattccaaggagctcagctcacccctctgccttgaatc

SEQ ID NO: 920105 - DNA, 120 bp, Artificial Sequence
  ENSG00000226009_1 (sequence is synthesized)
attttcccctaatcccatttaaaatgtaatcattcgttcattccttcattcagtagacatctatagagcttgcctcgtgctgggctctagaacactatgagctcacagtacggtggtgga

SEQ ID NO: 920106 - DNA, 120 bp, Artificial Sequence
  ENSG00000226009_2 (sequence is synthesized)
gacaagccaccacacacgcagttcccacaaggtgtccccaagaacttcggagctcagaacaggtgatactcactcctcctttggggagaggccgtgggcatggcttcacttttcagctgg

SEQ ID NO: 920107 - DNA, 120 bp, Artificial Sequence
  ENSG00000226009_3 (sequence is synthesized)
attataaaggatgtgaagttagcctgactgagcagaaggggagggaagacagcactccaggaaagtggaacgaacaacagagtccaaagggccctccagcctacccactcccaagtacct

SEQ ID NO: 920108 - DNA, 120 bp, Artificial Sequence
  ENSG00000226009_4 (sequence is synthesized)
ggaagaagctctccacgtgttcccttggggcctcctcccggagtgcagggtcatacaggttgaaggcccaattaagcctgtcatctacagttccccgaagaatcacggacaaaccagcca

SEQ ID NO: 920109 - DNA, 120 bp, Artificial Sequence
  ENSG00000226009_5 (sequence is synthesized)
tcctcgggtactcttcacccaactccttctctgggtttggcctggagatcctggccctgaactccaggaaacaggcttccctggcccacctcgcccagctcacctcaaaactgaccgagc

SEQ ID NO: 920110 - DNA, 120 bp, Artificial Sequence
  ENSG00000226009_6 (sequence is synthesized)
catcatggttggtgtcaaaggcattgaagagaaaagtggcataggtgctggagtctgcagggtgagtgtggagaagttggcttccacacaggagaggacttcctccctctaaggagctcc

SEQ ID NO: 920111 - DNA, 120 bp, Artificial Sequence
  ENSG00000226009_7 (sequence is synthesized)
ccataccccccatcaccttggcattcccagctcctccagaatccctccctccctcagcctagagaaggacaactgcttccccttgggccttgtcccctcacctccttgaggaaagaactg

SEQ ID NO: 920112 - DNA, 120 bp, Artificial Sequence
  ENSG00000226009_8 (sequence is synthesized)
ggagtaaatctgcttgaagttctcctcattgacaattccgctgggacattcctggaaggagagggcaccaggctgagggcagagacaaaatccccttccgttcaccgcccccaccctcca

SEQ ID NO: 920113 - DNA, 120 bp, Artificial Sequence
  ENSG00000226009_9 (sequence is synthesized)
tggcccaagactcccagggagggggataatcttcaagcctccagaggactcaccacgtggctcatgtgatgggagggaagacttctttcccagtgcacaaataaaaaacatggaacgaaa

SEQ ID NO: 920114 - DNA, 120 bp, Artificial Sequence
  ENSG00000188660_0 (sequence is synthesized)
cattgccctctgccccgcagcctgcccgttcccaggccagcgagggcgctcccaggccggtctgcagccagaacacagcccgttccatgtgcttgtcctcgggacacattaggaatgaac

SEQ ID NO: 920115 - DNA, 120 bp, Artificial Sequence
  ENSG00000188660_1 (sequence is synthesized)
ccaggcctcagtcctggcctcctcctcaaggctgggtgctcagacgtccccctcagcccctttctctagaccttccggctgaacaaacgagaacatctcacagccctgcaacagccagga

SEQ ID NO: 920116 - DNA, 120 bp, Artificial Sequence
  ENSG00000188660_2 (sequence is synthesized)
gctgctcgtggagctccacgcccggctggagagagaggaggcaccctgggcagcccgccagcacccaggctctcacagtggaagcccacgtcttcttgggctctattttgaaagctgttc

SEQ ID NO: 920117 - DNA, 120 bp, Artificial Sequence
  ENSG00000188660_3 (sequence is synthesized)
tttccacgacggctttgacaagaatcgatttgagtgagccggcgtgtcaatacaggccagcacaggactggcctcagggccacattggggagggtggcgaccaggccctggctgcagccc

SEQ ID NO: 920118 - DNA, 120 bp, Artificial Sequence
  ENSG00000188660_4 (sequence is synthesized)
acgtgggcaaaagcatggccaggcaggaggtggggcctgtgagcttggctacagcgaccgtgggcgctgggcccggggctcctcagccctgaggggagacccaggcccaggcaggctccc

SEQ ID NO: 920119 - DNA, 120 bp, Artificial Sequence
  ENSG00000188660_5 (sequence is synthesized)
aggcgggctcccgggctcccagccttccgatcttctccctttgagaccttgccttctgcacagtgacaggaaagagccctgagtcccactttgcagggatgtattgcatttccagaaagt

SEQ ID NO: 920120 - DNA, 120 bp, Artificial Sequence
  ENSG00000188660_6 (sequence is synthesized)
tccttccgggtgcagagtgatacatgaaccctggggactcactccaacttggtattgattttctccacggaggacccagcagtcacggcccgtgtctgcacagccccttggatcctgcgg

SEQ ID NO: 920121 - DNA, 120 bp, Artificial Sequence
  ENSG00000188660_7 (sequence is synthesized)
aggaattcagccggcccctccccctgtgccgaaaaccacggaggcaaagccaggccagggtacagtgagaacacgggagaggactgagagaccgctggctgccgagggaggaagagcagg

SEQ ID NO: 920122 - DNA, 120 bp, Artificial Sequence
  ENSG00000188660_8 (sequence is synthesized)
attcgcacccccgtcatcgctgggcccacacgccgccgacagcttccgcgtgtggccatctgtctttcagaaaccctctggcagagggacccagcagatgacacgggggccgttcacact

SEQ ID NO: 920123 - DNA, 120 bp, Artificial Sequence
  ENSG00000188660_9 (sequence is synthesized)
ctgaaacctgcctggagtcaaaacactgctggcgagcctccaccgcaaacccaatccagatggtcttccctggtggccctcggggtggcgggcaccctgcccactccctgccagcccctg

SEQ ID NO: 920124 - DNA, 120 bp, Artificial Sequence
  ENSG00000188660_10 (sequence is synthesized)
cccgctggactccaggcccggccgagcccccgaccggtctcctgacccagcatgctgctctcccctgggcccggctttctcgcccgctgggactcccaggcccctccagcccagccccga

SEQ ID NO: 920125 - DNA, 120 bp, Artificial Sequence
  ENSG00000188660_11 (sequence is synthesized)
gagcaggagccccaagggaggcttggcggctgtggaggcgagtgggccacgtgtagctgggaggccggcaggaccaggagcccctcacagcgcagcacccacagcatcacgagccacttc

SEQ ID NO: 920126 - DNA, 120 bp, Artificial Sequence
  ENSG00000188660_12 (sequence is synthesized)
cctgggggcccccaccctgctctgagctgccccttgttgtgacctggggtcccccgtggtgggcccgccccttgagcctgggatccagcctcagcgaggctccagaagtgtcgtctccgc

SEQ ID NO: 920127 - DNA, 120 bp, Artificial Sequence
  ENSG00000188660_13 (sequence is synthesized)
cggccaggcgtcagcgcctccacccaggatcacacactcctatctctgcacttctgccctccatcctgctccacgccgcctctgcttgttattccagcacattccagggtgatgcctgct

SEQ ID NO: 920128 - DNA, 120 bp, Artificial Sequence
  ENSG00000188660_14 (sequence is synthesized)
gaagccacgcagccagtgcctccaccctaccccccatctgacccaccggccccttccgcacgctggaagcctgcccggcctgaagtgtcctcacctgtcgccctatcctcccctccactc

SEQ ID NO: 920129 - DNA, 120 bp, Artificial Sequence
  ENSG00000188660_15 (sequence is synthesized)
cagcccaccggtgactcagccctcacagctctctcctccccgagggagccggtgacttggctctgatggtgccgggacccagccccggcatgttcagaatccttgtcctttaacctgcgt

SEQ ID NO: 920130 - DNA, 120 bp, Artificial Sequence
  ENSG00000188660_16 (sequence is synthesized)
ccacatgtagtcgcctccacctccctgcctgaacctccaggccctgcagagcaaacactgctgcctgcaggagacccctggggccttctccgtcccctcatcctcctaaggagcctcccc

SEQ ID NO: 920131 - DNA, 120 bp, Artificial Sequence
  ENSG00000188660_17 (sequence is synthesized)
tgccaccgtgccagaatgtgccggaggaacagaggcccgagcctcccgtggccccagcgaggcttcctctggggaagacagtgagcccaacgccctggctctcgaggggtggacggagtc

SEQ ID NO: 920132 - DNA, 120 bp, Artificial Sequence
  ENSG00000188660_18 (sequence is synthesized)
cagctggcatcgaccgggtgcccctcttcaccggtgtccacagtccttgagagcaaagggttcccagaggcgacctccctcctgcacaggcatttgtcatccttaccctctaggacagct

SEQ ID NO: 920133 - DNA, 120 bp, Artificial Sequence
  ENSG00000188660_19 (sequence is synthesized)
ttgccatgtgcagtgaacccctggacagtgttgcgtgccactttgccggatttggactgtatacagaccgaagcatgtggcatgaagccttctgctgtcagcaagttccttgtccctcga

SEQ ID NO: 920134 - DNA, 120 bp, Artificial Sequence
  ENSG00000188660_20 (sequence is synthesized)
cagtatgtgcccaggctgcccttcaaggtggcagtgatggcagttgtctcttgcacgctgcgtacagttctgtcactgactcttacacacagccctggagacgggagagtgccgggagca

SEQ ID NO: 920135 - DNA, 120 bp, Artificial Sequence
  ENSG00000188660_21 (sequence is synthesized)
ttctatgcaagtgtcctggcctttgcgggcgtctccacagcacaaacacgagtcagggaccacccctcttctgcttccatgattccaccaactgggtggggcagagcagtgccagggccg

SEQ ID NO: 920136 - DNA, 120 bp, Artificial Sequence
  ENSG00000188660_22 (sequence is synthesized)
gaggcacgccccaggtgagggcaggtggccatgccagtgagtgcactgcgttctcagttaattcatccgaaatatttctaagtttcttgattattgcagttgcatccccaagataatgcc

SEQ ID NO: 920137 - DNA, 120 bp, Artificial Sequence
  ENSG00000188660_23 (sequence is synthesized)
gccctcaccaagtagaaggcacatgtgctctgatggcccctcccacactggggtcagggcacagcaacttagcgaggcgacgtgggggctcagaggacctcggaccaggctcggcacatg

SEQ ID NO: 920138 - DNA, 120 bp, Artificial Sequence
  ENSG00000188660_24 (sequence is synthesized)
gggcttctccagccagccagggggaagcaccctgcagactgctaacttttgcaaaatagagtaaaaaagatcagctagaaaaataaaacaaaaaaggaaagatatacaaaatacaaggcc

SEQ ID NO: 920139 - DNA, 120 bp, Artificial Sequence
  ENSG00000188660_25 (sequence is synthesized)
gtttagattaggttggaagtcacctgggctgagctgatggctgattccgtcagcaaaaagaactgtggaacatactggcacttgggccggtgtgaagccacccccctgccatgaaaaatg

SEQ ID NO: 920140 - DNA, 120 bp, Artificial Sequence
  ENSG00000188660_26 (sequence is synthesized)
gctcttccctgccacagccggcccagcgggagccaggtcagggcctggagacacagcgccccccaccggagccactgcccggcccagcagcacctgcggagaatcccaccagctcccacg

SEQ ID NO: 920141 - DNA, 120 bp, Artificial Sequence
  ENSG00000188660_27 (sequence is synthesized)
cctcccgccgcgccaccgccccggctttctgcaaatccaccttatggaagccggataagcacctcctcctctgatgcgtcacagtcacaggtcctggtgaggagggagccacgccaagca

SEQ ID NO: 920142 - DNA, 120 bp, Artificial Sequence
  ENSG00000188660_28 (sequence is synthesized)
cagcggctggaacaggggcaagtgggtgcccaccccgaagtgcaggcaatgaacttgtgctgtagcccatggtgagctgtggggctgtttgtgactgcagcgtagccaagcccatcccgc

SEQ ID NO: 920143 - DNA, 120 bp, Artificial Sequence
  ENSG00000188660_29 (sequence is synthesized)
ctgatgcggcctcttcatccagagtgggggtgacgtgccagcccccacctcaccggaatgctgggaggagcgtctccacggaaggagctcactttgtcagctgtaatgtgctgtgactat

SEQ ID NO: 920144 - DNA, 120 bp, Artificial Sequence
  ENSG00000188660_30 (sequence is synthesized)
gcatcgaccgggtgcccctcttcaccggtgtccacagtccttgagagcaaaggtggtcccagcagtggagcagagggcaagggtggggcatgtagagtctccagggagccactgttggtt

SEQ ID NO: 920145 - DNA, 120 bp, Artificial Sequence
  ENSG00000188660_31 (sequence is synthesized)
agagagggagcccgaagtgggctccggaccccagcagggacagcgtccccttccagcgggggcagccgattgatctgggcacacgagcaggaggagcggcgccacccagggctgacctca

SEQ ID NO: 920146 - DNA, 120 bp, Artificial Sequence
  ENSG00000188660_32 (sequence is synthesized)
cggccctgctcacgtctcggggcattttggcagacccacctagacctgggggacagcctgatttcctgcagccatgacctacaagggtggcagctctctcaggcttgagtaaccaggaca

SEQ ID NO: 920147 - DNA, 120 bp, Artificial Sequence
  ENSG00000188660_33 (sequence is synthesized)
cagacctgggccatttaatgcgcaggcagccccaagtcccggcagggccagaagcagagacggcggctggggatgaaagtgcacgctggtcccagatggggctgggggtgaaagctgcat

SEQ ID NO: 920148 - DNA, 120 bp, Artificial Sequence
  ENSG00000188660_34 (sequence is synthesized)
gctgatccctgggccccctcactctatgagctcctgaaaggagggaagcccccacaccctactgagtggagtgctccttggcctgggaccccgtccagtgtctgctgctgtgggggcggg

SEQ ID NO: 920149 - DNA, 120 bp, Artificial Sequence
  ENSG00000188660_35 (sequence is synthesized)
ctctgggcagagagaggccagacaggcacccaggaaagctggaacacatccctcctgcttcccccagggttcccagaggcgacctccctcctgcacaggcatttgtcatccttaccctct

SEQ ID NO: 920150 - DNA, 120 bp, Artificial Sequence
  ENSG00000188660_36 (sequence is synthesized)
cctgtgccgaaaaccacggaggcaaagccaggccaggttcaggttccacgcaaagcgccctcctgtagccaagcccagccccatgagggtacagtgagaacacgggagaggactgagaga

SEQ ID NO: 920151 - DNA, 79 bp, Artificial Sequence; identical to SEQ ID NO: 860447
  ENSG00000260419_0 (sequence is synthesized)

SEQ ID NO: 920152 - DNA, 120 bp, Artificial Sequence; identical to SEQ ID NO: 846606
  ENSG00000260419_1 (sequence is synthesized)

SEQ ID NO: 920153 - DNA, 120 bp, Artificial Sequence
  ENSG00000260418_0 (sequence is synthesized)
caaactccgctcccgctctttcttctctgctgtgacaccctccaaggctgcaactttcatccgtaatggattcgtttacacttggtcaaggctctcgacaacagtgggaccaaaacccag

SEQ ID NO: 920154 - DNA, 120 bp, Artificial Sequence
  ENSG00000260418_1 (sequence is synthesized)
tacaatagtcaccgtgagtcaggccagtctgcccagaggatggcctgcaggactgcccacagcatttggaggccaggcctcagctgcatctctgaagcccaggcaaaggcggccctgggg

SEQ ID NO: 920155 - DNA, 120 bp, Artificial Sequence
  ENSG00000260418_2 (sequence is synthesized)
aaggtggaacaccagcatttctactgatgctctggggtcctgcagaaccctgactgtgccacagaccttctgtaccgtgtccatttccatataatctaataaatccttcttacaaaggaa

SEQ ID NO: 920156 - DNA, 120 bp, Artificial Sequence
  ENSG00000260417_0 (sequence is synthesized)
gggattacaggcgtgagccactctgcccggcctgtgcatattttcttcactgacgctgtttccaagtcacagaggccttcacacgtgtctgggagggttttgcccgggcacttgcagggg

SEQ ID NO: 920157 - DNA, 120 bp, Artificial Sequence
  ENSG00000260417_1 (sequence is synthesized)
ctgggagggttttgcccgggcacttgcaggggtggggtgggaggagcatttctacccgtggccccttcttctgcttaaacacacggcagatccagaaatttctctccagcagaatgcagc

SEQ ID NO: 920158 - DNA, 120 bp, Artificial Sequence
  ENSG00000260417_2 (sequence is synthesized)
ccctcaaggatgggggccttggttacatcggtttttatgtttaacttccacccagagcttggcgtttcaggggagcctgagttgaaggcacaaatgcgtgacagttcctgctctgccctt

SEQ ID NO: 920159 - DNA, 120 bp, Artificial Sequence
  ENSG00000260417_3 (sequence is synthesized)
tacaagctgtgtgaccttgggcaagttactgaacctctctgtgcctcagtcaatagggatgatgacggcaccccttgcagaccttttggaaggcttaactggatgagtcaccctaagcat

SEQ ID NO: 920160 - DNA, 120 bp, Artificial Sequence
  ENSG00000260417_4 (sequence is synthesized)
tcggagcagtgtgggtgggggcgctctgggtggaggagaccagctctaggcgagggtgcctggactccctcatggctgcctctctctccaggccccgccacctctgttcagccagctctg

SEQ ID NO: 920161 - DNA, 120 bp, Artificial Sequence
  ENSG00000260417_5 (sequence is synthesized)
ggagacttggattgcatttggctattggagagtgtcaccccatcttttaaagctgcagggaagtgaaggaatcatcctctctagtccttttgtttggaaactgagcccagagaccacaag

SEQ ID NO: 920162 - DNA, 120 bp, Artificial Sequence
  ENSG00000260417_6 (sequence is synthesized)
caaactggctggggtcacacagctgctgggtcagtcacagagctgggggcaaccgtgggcatcctggtctatcgagtgggtcattgtggtggctgccgcctacctaaccaaacctggtcc

SEQ ID NO: 920163 - DNA, 120 bp, Artificial Sequence
  ENSG00000260417_7 (sequence is synthesized)
cacgggccagctctcactgtggggcagccagctggagggacggggccagcttgccccaccccgcccctcccctccacagcagagagtgccctggctccatggggcccagcacaagctctg

SEQ ID NO: 920164 - DNA, 120 bp, Artificial Sequence
  ENSG00000260417_8 (sequence is synthesized)
gaggccacaggagtgcctcccctccagggcctggcaaggctggctctctgcagggctggtcaggtcagctgccttgatttccctctcccaggggcctgatgtcatcattcaggggcagcc

SEQ ID NO: 920165 - DNA, 120 bp, Artificial Sequence
  ENSG00000260417_9 (sequence is synthesized)
tggggacttgagggaggatgcagttcccactgccttctcccgtcctcccctccccttcccttgcttctccttctccttcctgcttccacgtcctgaccccctggccctccccagcccggc

SEQ ID NO: 920166 - DNA, 120 bp, Artificial Sequence
  ENSG00000260417_10 (sequence is synthesized)
cccttagcctcccctccctcccggcccctcactccccccctaccagggctgccctgtgctagcgcctgcctgtgtgaatgtctaatctccaattttattcgctgggctccagcccatttg

SEQ ID NO: 920167 - DNA, 120 bp, Artificial Sequence
  ENSG00000260417_11 (sequence is synthesized)
cataatccacacagtcaccctggttttaattgcccacaactctgcagaaagatcatgtggttaagtggtaaatcataattagataaataattggtttggccacagcaagctgcttttgtt

SEQ ID NO: 920168 - DNA, 120 bp, Artificial Sequence
  ENSG00000260417_12 (sequence is synthesized)
acacctgccatctgctggacccgttttttcttctggccagaacaatgcggttctgatgacagagcatgctgcttctctcttctgggggggccggagggggctgaatggaggggctcggaa

SEQ ID NO: 920169 - DNA, 120 bp, Artificial Sequence
  ENSG00000260417_13 (sequence is synthesized)
ccggcttggttaatgcatcagagtggcaaatttgacttctttgcagaaaagggagggaggaaaggggcctggaggaggagggggaccagccagggctgcccaaggcctggcctgcctgcc

SEQ ID NO: 920170 - DNA, 120 bp, Artificial Sequence
  ENSG00000260417_14 (sequence is synthesized)
caggaggcctgctgtggagggcctgggcccgatccctggggggttggggggggggggcggaggggacaggcgggcaggggttggaaccgccagacctccctgccccaccgcggtcagctt

SEQ ID NO: 920171 - DNA, 120 bp, Artificial Sequence
  ENSG00000260417_15 (sequence is synthesized)
gacctccctgccccaccgcggtcagcttctccatctgctctccaccgaagcctcctttattttccatgccccaggccccatctgtgagccctgagtctccaggggaattgtggctccctg

SEQ ID NO: 920172 - DNA, 120 bp, Artificial Sequence
  ENSG00000260417_16 (sequence is synthesized)
gctggacggtcgcctggccagggccttccttggggctgctggcctgcctttcatgctgtccttccagcaagctcttagctcctagacttcaggaacggtttcaaattgtccttccttcac

SEQ ID NO: 920173 - DNA, 120 bp, Artificial Sequence
  ENSG00000260417_17 (sequence is synthesized)
tcgctccctcacgcatacacgcacacattcattcattcagcaaacgcccgtggagcctcttcctacatcagagtgcaggttcgaacttggtctccgtgggtcagatggccgctgtgggat

SEQ ID NO: 920174 - DNA, 120 bp, Artificial Sequence
  ENSG00000260417_18 (sequence is synthesized)
gtgagcaagtttctcagcctctcagagcaggtttcttcctctgtaacacaggagtcattattgtccctgccttctgggcctattaggaggatcaaaggacagaatgtggataaagtctgt

SEQ ID NO: 920175 - DNA, 120 bp, Artificial Sequence
  ENSG00000260417_19 (sequence is synthesized)
cgagtgacacctgcacgaaacacaggcccagtgtctgtggctggtgagtgcgtgactgctggtcatgcccgctcccggggagggcgccagcgccgctcaccttgggcatcattggaggcc

SEQ ID NO: 920176 - DNA, 120 bp, Artificial Sequence
  ENSG00000260417_20 (sequence is synthesized)
cacgaggctgtgctgaacatgctgaaggaagaggtaccagtgccatgggaagggcccaggaatgaggagccttggaaagaaaccagggggccaggggaacaggcagaggggcggtaagga

SEQ ID NO: 920177 - DNA, 120 bp, Artificial Sequence
  ENSG00000260417_21 (sequence is synthesized)
agggcaggttctctggggcctgcacaggccaggacgttcctgtctctgttgagttcggactggcaggttctctggagcccacacaggccaggacgttcctgtctctgttgagtacagacc

SEQ ID NO: 920178 - DNA, 120 bp, Artificial Sequence
  ENSG00000260417_22 (sequence is synthesized)
ggcaggttctctggggcccgcacaggctgggacattcctgtctctctcgagtacagaccagcacatggtcctgctctctggcccctgcatcccctccagactgcgttctggaagccctgc

SEQ ID NO: 920179 - DNA, 120 bp, Artificial Sequence
  ENSG00000260417_23 (sequence is synthesized)
ccaggcctcacacgctgccccaagggtctttattacctggggtcttctagcattttcctctggagaaactcaggaagcatcctttctctgcatcctttctctttgggggcccagcttctc

SEQ ID NO: 920180 - DNA, 120 bp, Artificial Sequence
  ENSG00000260417_24 (sequence is synthesized)
cttttcagtttgacagacacagcctgaatgcccaaggcccctctgcggagacttagagacttaggctggtggagagggttgtgcctcctggctgagaacccctcagggcagatagctggc

SEQ ID NO: 920181 - DNA, 120 bp, Artificial Sequence
  ENSG00000260417_25 (sequence is synthesized)
tcagagtcctcatggtcttgttgatcaggaaacactggtatgttccttcctgaaaaccctctgatgcctgttgaggagcctctaggacacgttccatgtggttgggactttgtaatgcca

SEQ ID NO: 920182 - DNA, 120 bp, Artificial Sequence
  ENSG00000260417_26 (sequence is synthesized)
gatcttttctgtgttttaacattcctccatccatcatctacccatctacctttcatctatttctctccctccctcccttccttcctcccatccactcacccacccattcattcatgcacc

SEQ ID NO: 920183 - DNA, 120 bp, Artificial Sequence
  ENSG00000260416_0 (sequence is synthesized)
ttaggaaggtgaccattttccctgggtctgtctgtagatgcacatcagtgccagcaaagtccagtgggggagagtgagagagagagattgattttagaagccaattctaaaatgtacaga

SEQ ID NO: 920184 - DNA, 120 bp, Artificial Sequence
  ENSG00000260416_1 (sequence is synthesized)
gaagtacagaaaggctgggagcagcccagaccctcctgaggagcaggtggacggtgcaacagcggatggcaagtgggacgtgttatggggccgcagttgcccagagcacgaggagctgct

SEQ ID NO: 920185 - DNA, 120 bp, Artificial Sequence
  ENSG00000260416_2 (sequence is synthesized)
ggcggggggcttggccgctgacccacgaggtaggacaccgcctgggcaccgaggggggcctgtgctcgtgcccacgcacgcggatgtgtgatgaagggagtggcgttgcaggttattggg

SEQ ID NO: 920186 - DNA, 120 bp, Artificial Sequence
  ENSG00000260416_3 (sequence is synthesized)
ggaaggttggactcttgttctggtgccaggaaagtcaggtgcccacgtgggaaaaaaggaaagtagactcccacggcattcagatccccccaggtggatgcccagagggcagcacttttg

SEQ ID NO: 920187 - DNA, 120 bp, Artificial Sequence
  ENSG00000260416_4 (sequence is synthesized)
acccagagccccatcctgatgacctcacagacaaggcccccaagagcctttgctgcagcggaagcgggtaacatcagcacacatgactttgtttctcagaagacacgggagagggtgaag

SEQ ID NO: 920188 - DNA, 120 bp, Artificial Sequence
  ENSG00000260416_5 (sequence is synthesized)
gtgcggtcattcataaaactcacaggaactcaaaaccagaatatgaaggactctgaatcagcaagaaaaagaggactccttagaaaaacgggtggcacagctgaacaggcgcctccccac

SEQ ID NO: 920189 - DNA, 120 bp, Artificial Sequence
  ENSG00000260416_6 (sequence is synthesized)
acacggggcaacactcgtgaacactgccgtgggatgccgctgcgcgcccgtcaggacagcccggttagaacgaccgacagcattgcgtgtccgaggacgcgggggccgacgggcccatgt

SEQ ID NO: 920190 - DNA, 120 bp, Artificial Sequence
  ENSG00000260416_7 (sequence is synthesized)
gcttctgggggagggcactacagaaaggccctgcacacactctggcgaagggtgcccctgcctgcagagtcctggaaaataggccaggtgtctgcagcgggcagatcaatacgtggcggc

SEQ ID NO: 920191 - DNA, 120 bp, Artificial Sequence
  ENSG00000260416_8 (sequence is synthesized)
agagtcacacgtgcagtgaggacggagtttagaactgagatggcaggaaagcagcaaatcagaagaacacactgagaatagtccttttacagagagttcacgaacaggcaaagctgcaga

SEQ ID NO: 920192 - DNA, 120 bp, Artificial Sequence
  ENSG00000260416_9 (sequence is synthesized)
ctatggtatctaggaggcatataaagaggtaaaagaaagcagagatccagaaaccccccttttgggtcaatctccagagaattggaagcaggaacatgaaaaaatactggcacacctgtg

SEQ ID NO: 920193 - DNA, 120 bp, Artificial Sequence
  ENSG00000260416_10 (sequence is synthesized)
ttcacaggggctagagggtggaggccacctgcgtgtccgtcgacagatggacggagaagcgaatgtgtccgtccatccagcggaaaatgattcagccttaaagaggaaggggagcctgtc

SEQ ID NO: 920194 - DNA, 120 bp, Artificial Sequence
  ENSG00000260416_11 (sequence is synthesized)
gcccttgacagcacggatgaagctcgaggacgttatgctaaatgaaatgagcgtcacaaaaggacaagtaccaatggaatgcatattccactggaactggaattccaatgataagaaaca

SEQ ID NO: 920195 - DNA, 120 bp, Artificial Sequence
  ENSG00000260416_12 (sequence is synthesized)
cgagagtcatcaaattcacagagaagatagacaggcgtctcccgggcttgaggggaggggatggggagtcggtgttgaatggggacagagctgtagtttgggaaggtggaaaagttctgg

SEQ ID NO: 920196 - DNA, 120 bp, Artificial Sequence
  ENSG00000260416_13 (sequence is synthesized)
aaatggatggtggcgacggctgcacagccatgggaatgtccttgatgctcctgaactgggtgcttatgagtggcaagaatggtcagctatgaatggtcatatacgttatgttacgtatat

SEQ ID NO: 920197 - DNA, 120 bp, Artificial Sequence
  ENSG00000260416_14 (sequence is synthesized)
tttatcacaattaaaaaactgaggaaaaaaataaagtcaggaacaatgataggaaagacatggatggcgttcctctctggagggagggacgcagagggcccctagagggctgacaacatt

SEQ ID NO: 920198 - DNA, 120 bp, Artificial Sequence
  ENSG00000260416_15 (sequence is synthesized)
tggcctctgattcatagtcacttagacacacgcacttttgcactttctcctgtgatatgatattccatgataaaaatggtaaaaaattaaaacaagccaacaggcacccacctctgccca

SEQ ID NO: 920199 - DNA, 120 bp, Artificial Sequence
  ENSG00000260412_0 (sequence is synthesized)
agagggtgttttctggtactttggcaaacacttgacatgaatctctcagtgatgctccccttttcaccttcaaaagccattcccaaaagagccttctcatttacattccagctgggaaag

SEQ ID NO: 920200 - DNA, 120 bp, Artificial Sequence
  ENSG00000260412_1 (sequence is synthesized)
gacagctttacaacataggtgtacaggataaaatgatagctgattgctgtgctctttagctcaattaacctaataaacactgggtccaggggccatatgtctaggcttgcaaggtttagc

SEQ ID NO: 920201 - DNA, 120 bp, Artificial Sequence
  ENSG00000260412_2 (sequence is synthesized)
caagtaaacaaggttttaaatcaacaattaatgacaggttttcgactctgaagttggtttgcctgtttggagaacagtatgtgtaactgcatgtcttctcaaaaaggtagggactagaac

SEQ ID NO: 920202 - DNA, 120 bp, Artificial Sequence
  ENSG00000260412_3 (sequence is synthesized)
ttccttatcttatgtgagatttttaacaaatggtctaggataaaatgtgtccaacaacaacaaaatacataattaagatgtttgtaaaaggtttatttttctaaaataggattggggctg

SEQ ID NO: 920203 - DNA, 120 bp, Artificial Sequence
  ENSG00000260412_4 (sequence is synthesized)
atgttactctttccaaatttgggagtttgatcaggacaagcttgcatgtgccccagactgccctttctcaagtttaccaaggtctttaatacctcttctccctccctgatccccttctcc

SEQ ID NO: 920204 - DNA, 120 bp, Artificial Sequence
  ENSG00000260412_5 (sequence is synthesized)
ctggagaacatcctgaataggaaggagaaaaagagcaggaactaaagtcccctgagacagcccacagaaggagaaaagctttggtattcccccacattcttgcctcctttcctgatgcag

SEQ ID NO: 920205 - DNA, 120 bp, Artificial Sequence
  ENSG00000260412_6 (sequence is synthesized)
caattgaaatgatccttcactctctgcctacttaccactgtcacttctcagctgctgccatcctcatcaatgaacgctctctccagggataagtcttctttcattggtaactgagattct

SEQ ID NO: 920206 - DNA, 120 bp, Artificial Sequence
  ENSG00000260412_7 (sequence is synthesized)
tgggtaattgttaaactggaaattgctttaaaaaaaaaaaaccctccagctatctcacataacactttaaaagttaagacttaccattcacataatcacaagctgacagcaatctgcagg

SEQ ID NO: 920207 - DNA, 120 bp, Artificial Sequence
  ENSG00000260412_8 (sequence is synthesized)
ttgagtgattctgattttttttcctctcccttccagaagcaggtgggttgatataatgccagccttaaatagaaagctttatttatagccttagcagaatgagaaaagagctggcataat

SEQ ID NO: 920208 - DNA, 120 bp, Artificial Sequence
  ENSG00000260412_9 (sequence is synthesized)
caagagagtacttcacattttaaagaagactttacctttaatatgcaaaatagtcattagaagacaacaaaaatgcaaatttatgttttactaaattgcttaactatattccaataaagt

SEQ ID NO: 920209 - DNA, 120 bp, Artificial Sequence
  ENSG00000260412_10 (sequence is synthesized)
tcaaaagataactgtccatactgaagatgggtcagccaaagactttatgcctgttctaaaaggaccaaaaaaaagcagaaatttggttgccatgttaactttatgttgttgcacacctcc

SEQ ID NO: 920210 - DNA, 120 bp, Artificial Sequence
  ENSG00000260412_11 (sequence is synthesized)
tattctaaattgctttaatatctttacactgcaatatattgagtaaaatcaacaatataagataaataataaacaggagattaattcagacttgcaaaaaaaatttttcattctttacaa

SEQ ID NO: 920211 - DNA, 120 bp, Artificial Sequence
  ENSG00000260412_12 (sequence is synthesized)
tgtatgtccagcagcaaaatgatgtatatacatatctgtgtgataacaagagattggaattggcatgaacaaactttgcatagaggctgtttggaagaaaacatgctgtttttctcccca

SEQ ID NO: 920212 - DNA, 120 bp, Artificial Sequence
  ENSG00000260412_13 (sequence is synthesized)
gttacaaaatcaggtatatcataaaaacctgagttgcttcataacaagacagttgttttcaggttttttccatgtggtatagaataccccaaatcataattaatttctattgtttatata

SEQ ID NO: 920213 - DNA, 120 bp, Artificial Sequence
  ENSG00000260412_14 (sequence is synthesized)
tacatatataaatatgtggggaagggtggttagatttttttgtgtttaaattataaccgttttaaaagttgataagcctgagcaggagaaaaagagacagaatgtgtatctgtgttttcc

SEQ ID NO: 920214 - DNA, 120 bp, Artificial Sequence
  ENSG00000260412_15 (sequence is synthesized)
tttaatgtcttttatcaaaatcctattttgagaatatcccatgattgaaagttaataaccaagaacctaacaaaacttttcgtaaaaaatgcctgaaagtttttgttttcaaaaaattaa

SEQ ID NO: 920215 - DNA, 120 bp, Artificial Sequence
  ENSG00000260412_16 (sequence is synthesized)
tgctaatgacaaaagtatcttgatttaggtttgcatctctttagctattggttaattgttgtgggcatgttttttttaacatgtaaaaacaaattaacttattaacatgtaaaataagtt

SEQ ID NO: 920216 - DNA, 120 bp, Artificial Sequence
  ENSG00000260412_17 (sequence is synthesized)
aagaaaacatgttttcttttcggatgaaagggcttaagcatctgacatctcagttaaattcactgaagtattaataagaaatgcaatatgagacaatcggagtcgtataaaaatattttc

SEQ ID NO: 920217 - DNA, 120 bp, Artificial Sequence
  ENSG00000260412_18 (sequence is synthesized)
ttattgagagaagtaggttatatgagtctcacagggaacgtgaggtatcactgtattaattagtaatccccaatactgtcagagatgaagcaggtccagtggaatctcattcaaatgcta

SEQ ID NO: 920218 - DNA, 120 bp, Artificial Sequence
  ENSG00000260412_19 (sequence is synthesized)
aggtgagtggagataactcacagaggaatcaaaagacaggctatccagttacataaagttacaaaggggtcatagttcaacctgatgggcatccaaatttatgtaatatcaaccacactc

SEQ ID NO: 920219 - DNA, 120 bp, Artificial Sequence
  ENSG00000260412_20 (sequence is synthesized)
taaagatattctacttttgtggagttaaatcctgtatcacttgcaaaagtatcccaaattcatgtgacttaataacataagcaagtaatgggcataacttaaggcgtaagatctatttga

SEQ ID NO: 920220 - DNA, 120 bp, Artificial Sequence
  ENSG00000260412_21 (sequence is synthesized)
gcaagaactgaagggttcagcaagccatacatacaacaccaccctctagtttttctttctgagttagccttcactcagccaaatgattcaaaacattgtgtcaagtaggaagccacaaaa

SEQ ID NO: 920221 - DNA, 120 bp, Artificial Sequence
  ENSG00000260412_22 (sequence is synthesized)
aaaataaaaagagaaacaactttagtcttcaagcaaattgaaaaaagggaaagagaaaattgtctagtgttaaagaggaaatgaattgaaaatttttaaactcctcttgggctgagagtg

SEQ ID NO: 920222 - DNA, 120 bp, Artificial Sequence
  ENSG00000260412_23 (sequence is synthesized)
aaggtgccctctctttacctttcgtacttgagggaatgggctttagagagatgtgttcaggcaggtgtcatcatctagggtatcatctttactccctgtggctcattagatggcttccag

SEQ ID NO: 920223 - DNA, 120 bp, Artificial Sequence
  ENSG00000260412_24 (sequence is synthesized)
tgaaggaggaggaggtagagaaggaagcagaaagctgacagtcatggtacctgaaagtcacattgttagagaacaagaaagtccgggattcatctccaggaagcaataaacacacaaata

SEQ ID NO: 920224 - DNA, 120 bp, Artificial Sequence
  ENSG00000260412_25 (sequence is synthesized)
cacaaatactgagactgttagcaagaaaccagaaaaggtccctttgctattcttcttttcttttcttttcttttttgagtctcactctgtcaacaggctggagtacagtggcacaatctc

SEQ ID NO: 920225 - DNA, 90 bp, Artificial Sequence
  ENSG00000260412_26 (sequence is synthesized)
agggattacagacatgagtcactgcacccggcctgctgctatttaattgcaaaatgaaaagcttgcccctagagagagaatttcttgaaa

SEQ ID NO: 920226 - DNA, 120 bp, Artificial Sequence
  ENSG00000260412_27 (sequence is synthesized)
tgttctgttaatgccagagctgctctggtcagagtcacatctctaacagtgggcttttattttatgctagtaaatcagtaagactaaaacaaagggccatttcccataagcatagttttg

SEQ ID NO: 920227 - DNA, 120 bp, Artificial Sequence
  ENSG00000260412_28 (sequence is synthesized)
aatgtgttgggtagacatctcgccaattaatattaggagttagcttgtccagtaaactcaccaatcagggataagatgatcccaatacttcagaacttgtacttaaacaatgggaagaag

SEQ ID NO: 920228 - DNA, 120 bp, Artificial Sequence
  ENSG00000260412_29 (sequence is synthesized)
ataatataatgaactcgaagctaaacatacttttaactcagtggcctggcttctagctctgcaccttaaagactttctggtcatgtattacttcataaatttagaagttcttcatagttc

SEQ ID NO: 920229 - DNA, 120 bp, Artificial Sequence
  ENSG00000260412_30 (sequence is synthesized)
tgtgtttctgtttctgtttggtttcttcttcctttcatttttctcagtcatgagcatactgcccttgctagatggctgttaatgtttttgtgttgtttgatacagtcgaaataaaaatta

SEQ ID NO: 920230 - DNA, 120 bp, Artificial Sequence
  ENSG00000260412_31 (sequence is synthesized)
ggagtttctaccgactcccttcaaggcagataagcttattgtacaaccctatattcttttcttaattacttcattatcagacctaaaacacaggacatgaagattaatgtggaataaagc

SEQ ID NO: 920231 - DNA, 120 bp, Artificial Sequence
  ENSG00000260412_32 (sequence is synthesized)
caagttaaggagaaaagtgagaaacctgaggggaaatttacctactatttctgccactgactggtggaaaatctgaaaacactggcttctagggcttgtcacactggtgcctttcatcaa

SEQ ID NO: 920232 - DNA, 120 bp, Artificial Sequence
  ENSG00000260412_33 (sequence is synthesized)
ctcttataaataactaaatgcaaaaattatgaccctctatcaaaaaataaaggattgggaaggagatcgcttattacagctatgcaggtattgttttattctataacgctgtcattggca

SEQ ID NO: 920233 - DNA, 120 bp, Artificial Sequence
  ENSG00000260412_34 (sequence is synthesized)
aatcaggacatgtcaataaatctctcaaagtagtatatgtatattaatggcagaatgacacgtatatacatatctattactaagaaccatctggggaaaaaaataagaaaatttaaaaaa

SEQ ID NO: 920234 - DNA, 120 bp, Artificial Sequence
  ENSG00000260412_35 (sequence is synthesized)
taaaaaaagataaggcaggtggaaaatatgtggattctccctattctatttgtctgctaaaaaaactaagacctcacctgaatcaccagagtcagggtctcagaaatgaaaacccaagga

SEQ ID NO: 920235 - DNA, 120 bp, Artificial Sequence
  ENSG00000260412_36 (sequence is synthesized)
gagtctctacaaaaagaacagactgctagagaggatacctctttgattaaaatacctaaatcttttatgtgattgtgaaagttatatctatagtgaataattttgtattgtcacattggg

SEQ ID NO: 920236 - DNA, 120 bp, Artificial Sequence
  ENSG00000260412_37 (sequence is synthesized)
agataaatttgtttaccagatccccatctaaggcagaaataacatttatgtgaacccttttctaactgcagcatcactattcatattatttccaagcacaagagatcaagtatgctagta

SEQ ID NO: 920237 - DNA, 120 bp, Artificial Sequence
  ENSG00000260412_38 (sequence is synthesized)
ccatagcacagaggcaattcaccacatctagcctattcctttagccatgggctattagctggatgtacaaaagactaacaggttacatccattctatacatgcagggatttcataaaagt

SEQ ID NO: 920238 - DNA, 120 bp, Artificial Sequence
  ENSG00000260412_39 (sequence is synthesized)
taaacacttcttcaaacctgcacacacaaatccatactgtggcatccagagtttctttaagcctcacactgtatcagtacaaacatcctacagggaattaattcactgagcacagaacaa

SEQ ID NO: 920239 - DNA, 120 bp, Artificial Sequence
  ENSG00000260412_40 (sequence is synthesized)
atgtgtaatgcaaagagattaccaagtcacctccaccaccttgatttatataagctcttctgttttagcaacacctggagaatccagtggtctgtgcttcagtggtctcaagagctcttc

SEQ ID NO: 920240 - DNA, 120 bp, Artificial Sequence
  ENSG00000260412_41 (sequence is synthesized)
atggcagttctgtaagaaagttgctggctttaacgcagggctggtttcaatatagggcagctgttttctgctgtgagtcttctggaggaaaaagaatgggttcacggaaactgaaagtaa

SEQ ID NO: 920241 - DNA, 120 bp, Artificial Sequence
  ENSG00000260412_42 (sequence is synthesized)
ctgaaaaatgtatcctggctggtgagtgtaggaagagtagttcattgttctaatggttgaatatatttcaaaagaacatttaataagaattggagaacacaagcatttcaaataaatggc

SEQ ID NO: 920242 - DNA, 120 bp, Artificial Sequence
  ENSG00000260412_43 (sequence is synthesized)
aatgatcatatgagcatgtgtaagagaatttaattgcagaggaaaatggatgattatgcatatcacactgcctctaatattgatcttgagttggtttccaaattgataagtaaatacatt

SEQ ID NO: 920243 - DNA, 120 bp, Artificial Sequence
  ENSG00000260412_44 (sequence is synthesized)
ctatattgaaaatcattttaaatgtctatttatatcttttaaatattgccaataattagcttaaatacatgccctcaaaatattcaggaatctactcggtcctttccttctcatccttga

SEQ ID NO: 920244 - DNA, 120 bp, Artificial Sequence
  ENSG00000260412_45 (sequence is synthesized)
ttagaagttaaaaatcagatttctctagctttgttttaaaagatacagaaaatttaattttccaattatccaagcacaatctcctttcattcatttactcatttaattatgcaacatcta

SEQ ID NO: 920245 - DNA, 120 bp, Artificial Sequence
  ENSG00000260412_46 (sequence is synthesized)
ctgagtatccattatcatagtaatcgagctgcccgtcactgaagtcattatcaaactgtggtttaaaccttagctctgtgtttctccacattaactcctttggcttccatattgattgca

SEQ ID NO: 920246 - DNA, 120 bp, Artificial Sequence
  ENSG00000260412_47 (sequence is synthesized)
acttgtgtctcattctgtcatctaaatcatgtggtttagagataggccttagtgtccacctggccaggcacaagtctggcgttaaggacctacctgctttaatgatccactctcagggag

SEQ ID NO: 920247 - DNA, 120 bp, Artificial Sequence
  ENSG00000260412_48 (sequence is synthesized)
tcagaacagttaagtactaaaaagacaaggatctggagtgagagtccctagggctatgtcactggattcatgtttctttatgggcaagctacttaacatctctgcatccccatctctcaa

SEQ ID NO: 920248 - DNA, 120 bp, Artificial Sequence
  ENSG00000260412_49 (sequence is synthesized)
aataaccataacactacctacctcacaagggtgctgtgaggcttaccatgaaaagcatgaggaaatggtatatagaattggggacctagtagaaaggtgctacaggattagagtaactag

SEQ ID NO: 920249 - DNA, 120 bp, Artificial Sequence
  ENSG00000260412_50 (sequence is synthesized)
atatcattgagtatgaaccctgctttccctgggagccccaggtttgccagaatatgtctaatctctttacggctagaatctaaaatggtgttggccatcgattggcttaggttatcttta

SEQ ID NO: 920250 - DNA, 120 bp, Artificial Sequence
  ENSG00000260412_51 (sequence is synthesized)
atgtcattgacttttacaaaattcgtaacgacacctctttctcagagagatgctggattggaaaaattattaaattaattttaacaaaggagaacaaaaatgattcacttccaggtgctg

SEQ ID NO: 920251 - DNA, 120 bp, Artificial Sequence
  ENSG00000260412_52 (sequence is synthesized)
ggtgtggcggaacagttatttatttcaatatgaaacaagagtttgaatggatatcttcaaggggatgcattttattggagacatttattgcctggggctttctgttttcagtctgactcc

SEQ ID NO: 920252 - DNA, 120 bp, Artificial Sequence
  ENSG00000260412_53 (sequence is synthesized)
ccagctttctgtatcattgttttaacatacatccccttttctcctttattggaagagaagctataattctcctcatttcatgataatccttttcagtctgttttgctcaaaggacaaatt

SEQ ID NO: 920253 - DNA, 120 bp, Artificial Sequence
  ENSG00000260412_54 (sequence is synthesized)
cttttcaacaactattgtaattattttcttagagggccatttttaattgccgtattgtttagctaagccctattgtcttggtgtccttcaaaactgtcagttgcattaaaatataggggt

SEQ ID NO: 920254 - DNA, 120 bp, Artificial Sequence
  ENSG00000260412_55 (sequence is synthesized)
gggaggggagctgataagcacattgttgtaattgatttgtatgtttgaattgtcttatcagaaaacaaggttatgaatttcatctgttgagacacaaaaataaaatactttcttaaaaaa

SEQ ID NO: 920255 - DNA, 120 bp, Artificial Sequence
  ENSG00000251161_0 (sequence is synthesized)
aggttgggagggggctcgaggccatcaggctccaggccgcacttggcgctgccccctggcgccagggaaacaaagtgacgggggtcttgctaggttgccaaggctggtcttgaactcctg

SEQ ID NO: 920256 - DNA, 88 bp, Artificial Sequence
  ENSG00000251161_1 (sequence is synthesized)
cctatcacgatatccataagatgccaggatgcccaggaaccgagtttgaaagacattgtgctgctgatcccacctcctgactttacag

SEQ ID NO: 920257 - DNA, 120 bp, Artificial Sequence
  ENSG00000251161_2 (sequence is synthesized)
aaagacattgtgctgctgatcccacctcctgactttacagctgctgaattgcagaagacaaattggtagctaacaggaggctccatcctggatcctgcccctgtccgtgagattcagcct

SEQ ID NO: 920258 - DNA, 120 bp, Artificial Sequence
  ENSG00000251161_3 (sequence is synthesized)
tgattaactgtgttcccatgctggtcgtgagcagggcaccatcctaggtccttctttatactcattttccatctccagccaaaatgggttgaaccgaggaacaaggacataatctgtaaa

SEQ ID NO: 920259 - DNA, 120 bp, Artificial Sequence
  ENSG00000251161_4 (sequence is synthesized)
gagcaagtgcaagtctctgctctgccattaccagcatcaggctaatcaagcccttggaaactcaatttcttctcctgtaaaatgtgaataactgttacagacctggaaaggctcttgtga

SEQ ID NO: 920260 - DNA, 120 bp, Artificial Sequence
  ENSG00000251161_5 (sequence is synthesized)
ggctgaaatgagagcggtgccgcccatctgtcaaggtagcccagggcctggcgcccaagcagccctgggcacttgcccctcttcccttttactctgcacctcctttctgtaggcgtagga

SEQ ID NO: 920261 - DNA, 120 bp, Artificial Sequence
  ENSG00000251161_6 (sequence is synthesized)
cctcacaaggccctctgacttcttcagatatcagagtggaattggaagaaagaagcttgcttgagtaggtttttctggtttcttgaacaatggcgattctaaggaaaagaggttcaggat

SEQ ID NO: 920262 - DNA, 120 bp, Artificial Sequence
  ENSG00000251161_7 (sequence is synthesized)
gagaatgagaggaagcccacaggcatgtagaatatggccacaggtgggacaagagtgcttccttgggatgggggtcctggttccctgaaggaaaggagacagggcactactccagctcca

SEQ ID NO: 920263 - DNA, 120 bp, Artificial Sequence
  ENSG00000251161_8 (sequence is synthesized)
ggagtctcataggacaggccaagagggctgggcagacaccatgctggccgctgatcaggcatgactcctctgccagcctgccctcgcaggccagcccagaacttgcacaacagtcggcct

SEQ ID NO: 920264 - DNA, 120 bp, Artificial Sequence
  ENSG00000251161_9 (sequence is synthesized)
ggctggcactctcccgggagcttcaggaagtcccccttgtcctccccttgacctttgaccccttgggcctgctgccgaccagaataccaggcagatgttctctcttttaccttttgttcc

SEQ ID NO: 920265 - DNA, 120 bp, Artificial Sequence
  ENSG00000251161_10 (sequence is synthesized)
tggtctttccctctaaggctggaactcagagataccccaaacccccagcttccagctcatccttccccatgctctcagtgcggaccagctggagcctccactgggccgctctccatgtga

SEQ ID NO: 920266 - DNA, 120 bp, Artificial Sequence
  ENSG00000251161_11 (sequence is synthesized)
gccagtgtggatccttggccacagccggcaggacgcttgcaagtgccccgactccagacatcctcccaggtgtccttcccgactagctccctgtcccaggccccagcaggtgaagcagga

SEQ ID NO: 920267 - DNA, 120 bp, Artificial Sequence
  ENSG00000251161_12 (sequence is synthesized)
acagcagacagagcctccttccctccccggcatcctctgaacagtcaaagttggaagaaccctagatattgttccacattaaactatgcacgcctcgtggcactcagtttcacaatcaaa

SEQ ID NO: 920268 - DNA, 120 bp, Artificial Sequence
  ENSG00000251161_13 (sequence is synthesized)
gggggctcgaggccatcaggctccaggccgcacttggcgctgccccctggcgccagggaaacaaaggccaggacctaaaccgttcacaactcccagcaggccagagctgcagagacctca

SEQ ID NO: 920269 - DNA, 120 bp, Artificial Sequence
  ENSG00000251165_0 (sequence is synthesized)
agtgcagaggaacacacacttgctccggtaggggcagaacacgagttttctctctgccctccaaccttcttagctgagactccctgtaacaaagaccgagtaagaagagaaaaacaaaca

SEQ ID NO: 920270 - DNA, 120 bp, Artificial Sequence
  ENSG00000251165_1 (sequence is synthesized)
gaagtttattagtatgtgtagctcgtgtgcacttgggaggcacccagagaactgagtatgtctctggagttgatctcaaacaggtagtttaaacttcaggcttagaaaccttctccatgg

SEQ ID NO: 920271 - DNA, 120 bp, Artificial Sequence
  ENSG00000251165_2 (sequence is synthesized)
ttcaggagtctagagatctagtcgttcttctctctctggtgcagagaggaaggcacccttacaaatggacagttcctttattgacggacatttcctttacaaaatgtgattttgtatatc

SEQ ID NO: 920272 - DNA, 120 bp, Artificial Sequence
  ENSG00000251165_3 (sequence is synthesized)
aaccctgagagtgaaagttagaaaaatctacgtgaatcacagaggcatttgccaagatcggctcagagaaaagaacatcatggtggctcactcctgtaatcccagtgctttgggaggctg

SEQ ID NO: 920273 - DNA, 120 bp, Artificial Sequence
  ENSG00000251165_4 (sequence is synthesized)
tgcttgaggccaggagttcgagaccagcttgacaacatagcaagactccgtctctacacaaatggctatagccccagctacttggaaggccgaggtgggagaatcgcttgagcccaggag

SEQ ID NO: 920274 - DNA, 87 bp, Artificial Sequence
  ENSG00000251165_5 (sequence is synthesized)
cccaggaggttgaggttgcagtgagccataactgcaccaccgcactccagcctgagcagaattaaaaaaaggacatcaggttcagca

SEQ ID NO: 920275 - DNA, 120 bp, Artificial Sequence
  ENSG00000251165_6 (sequence is synthesized)
gttaccttctcaacatggcgagcttgctggacgtcacgtcgccttcgccttttccgctgcggactctgctcaccgacctcctcagtagagccggccctgctcactaccgcgcccacgtgt

SEQ ID NO: 920276 - DNA, 120 bp, Artificial Sequence
  ENSG00000251165_7 (sequence is synthesized)
cctgttgtgcttcattcccacaggccgcataagcaattctacatctggactttatcctacaaatgttcctgcgtgtgtatgaaagagggaaagattgaaaacaacccaagtgtccgtcca

SEQ ID NO: 920277 - DNA, 120 bp, Artificial Sequence
  ENSG00000251165_8 (sequence is synthesized)
cggggactctggttaaatgaagtgtggaatccctgcagtgaacaccagccttccataatggacagaggcagcccttctctacgcatcagaaataacccaagatagaggaagctctctcgg

SEQ ID NO: 920278 - DNA, 120 bp, Artificial Sequence
  ENSG00000251165_9 (sequence is synthesized)
tacccatcagaaatatccccagacagagagagccctctgcgtgtcaatcagaagtgtgcccagacagaacttttcatctttcatcgaacaaatctatttatggtggcttcttttaccagt

SEQ ID NO: 920279 - DNA, 120 bp, Artificial Sequence
  ENSG00000251165_10 (sequence is synthesized)
tccatagaagcgtgatcaaaaacaaagagactgaatgctcaaacaaactacaacgatcatagaacgggagttttggacataacaacttgtgacagtttgttttcttctagcattttctta

SEQ ID NO: 920280 - DNA, 120 bp, Artificial Sequence
  ENSG00000251165_11 (sequence is synthesized)
caaacaccaagccccttcagcgtgttactgtggaggaagcatgctggcacagtgaactcaacaccctctcccagcaaatcctgggtccttcagggactccaatggcccctgggaacccat

SEQ ID NO: 920281 - DNA, 120 bp, Artificial Sequence
  ENSG00000251165_12 (sequence is synthesized)
tcacactgcttgagttttctccagaatccagtccacgtactcgaccacgttggtgtaaacacctggccgctccctttgagcacagccttcgccccagctcgtgatgcctaccagatgcca

SEQ ID NO: 920282 - DNA, 120 bp, Artificial Sequence
  ENSG00000251165_13 (sequence is synthesized)
gacctcattgtgtttgcaggacagagggcctcccgaatctccctagaacgaggggagacaagaaaaggttcagcacgatatcgcacatgtgccaggatgagagggcgagagagagacaag

SEQ ID NO: 920283 - DNA, 120 bp, Artificial Sequence
  ENSG00000251165_14 (sequence is synthesized)
cctcaccctcaccgctaactcctcatccaactcactttgatcctgcacaagttgcttaattgttctaaccttcaatccttcatccctaaattatctttaataaattatctttagactaaa

SEQ ID NO: 920284 - DNA, 120 bp, Artificial Sequence
  ENSG00000251165_15 (sequence is synthesized)
cctgttgtgcttcattcccacaggccgcataagaagtgggtgccgaggctcccttcccactgccattccactggcccagaggaagcttctgttgtgttcagatgggcaggcactcttcct

SEQ ID NO: 920285 - DNA, 120 bp, Artificial Sequence
  ENSG00000251165_16 (sequence is synthesized)
cgagaagttaagtagccggaatatctaaatgcctctccttggcgattactcgatgagcgcctgtccttcctccactcttccagcagacctgccttttggggctgatggaaatatgcatat

SEQ ID NO: 920286 - DNA, 120 bp, Artificial Sequence
  ENSG00000251165_17 (sequence is synthesized)
tagattatctgcagaaactggctcagcactacaaggaggctgccaacatgaagacactggatgcggaatcaggaggagatgtatacagctcagtctccaaagccaggacaagccagctcc

SEQ ID NO: 920287 - DNA, 120 bp, Artificial Sequence
  ENSG00000251165_18 (sequence is synthesized)
aacacactactggctgaatctcaccaatcgttatagttttgttttttgtttttttaaatgtatttaagcatttttaggtgttttaaattttatgtgtgtattctaggaatatgtactcag

SEQ ID NO: 920288 - DNA, 120 bp, Artificial Sequence
  ENSG00000251165_19 (sequence is synthesized)
attctttcattaggcatgtgttattaacaacattcatcttcttaaaggctgaaccaactttgcgcgttttatcaacagatattcactgagcacctaatattgccaggctgtgctcaaggc

SEQ ID NO: 920289 - DNA, 120 bp, Artificial Sequence
  ENSG00000251165_20 (sequence is synthesized)
cattcaaagattctgtggtggaaaagaagttagaaatctttcagctgcaaaacataagccaaaatacaactcacctttggaatcagagaacttacaggttcataaaattgcgaagcccag

SEQ ID NO: 920290 - DNA, 120 bp, Artificial Sequence
  ENSG00000251165_21 (sequence is synthesized)
atgtgcacctgaggtgagacttcgtccagcttctgtctgtgtcactaatctttcctgctttcagcggcatccctcgcaggcccgtgttgttcccaactggtgttcccacctggcggcaaa

SEQ ID NO: 920291 - DNA, 120 bp, Artificial Sequence
  ENSG00000251165_22 (sequence is synthesized)
ctggtgactgtagttacagatcttcaacatcacactcaggagaagaaggagattgcttttcaggagctcctgcaagccggagaataaaagctcttatttattcagaagccctaaaacata

SEQ ID NO: 920292 - DNA, 120 bp, Artificial Sequence
  ENSG00000251165_23 (sequence is synthesized)
ccaccttggctatagactatttggacatttctaagcaaatctgtctgcaaaggtgctgagctgtgttgatcaactgaagcccgtgacgtctcatccttgcagttggagcaaatctcaaag

SEQ ID NO: 920293 - DNA, 120 bp, Artificial Sequence
  ENSG00000251165_24 (sequence is synthesized)
gcaaagccagtgttaaggagagggaaatcagacttcatctttcgatgggagaagaaaagagtttgcaactgtctctattctgccactggcagagaatccataggtttgctaaggatacag

SEQ ID NO: 920294 - DNA, 120 bp, Artificial Sequence
  ENSG00000251165_25 (sequence is synthesized)
agccacattgaaaagataaaccttgctatgctggagattacttaggtgggccaggatttcttgaaaccaaaactttactgaatcacctcttcaccatctgtatgccgtgcatttgctgag

SEQ ID NO: 920295 - DNA, 120 bp, Artificial Sequence
  ENSG00000251165_26 (sequence is synthesized)
aaacagctgcctctgttaccttgactcgtctcagattttgtcgacccgagacgggtcctggcactaggaatgtaaaactgtctattatttcagcttgctccaggctgccaacatgaagac

SEQ ID NO: 920296 - DNA, 120 bp, Artificial Sequence
  ENSG00000251165_27 (sequence is synthesized)
tccttgcagttggagataaaccttgctatgctggagattacttaggtgggccaggatttcttgaaaccaaaactttactgaatcacctcttcaccatctgtatgccgtgcatttgctgag

SEQ ID NO: 920297 - DNA, 120 bp, Artificial Sequence
  ENSG00000259319_0 (sequence is synthesized)
ggtgcaggagcgctcgagaaagcaggacgcggcgagcggttatgtaagcgcaccccccgcgcaccgccgcccggcttgtgcccgccaggcagcagcagccgcagccctaggagagagacg

SEQ ID NO: 920298 - DNA, 120 bp, Artificial Sequence
  ENSG00000259319_1 (sequence is synthesized)
cgagaggccggagccgggggaaaagtcaaaagccccttcacgcacagcctgtgttaaccatgtacctcagtcccggcgcttcccccacaaactgagagcgacagggagaatttccgcaca

SEQ ID NO: 920299 - DNA, 120 bp, Artificial Sequence
  ENSG00000259319_2 (sequence is synthesized)
gtttcatccttggacacttcaggactgagcgggtgaggaggcgatctcgccagcctgctttatttttcggtggagaaggatgggctgagatgaaggcatttggggactcctacccctacc

SEQ ID NO: 920300 - DNA, 120 bp, Artificial Sequence
  ENSG00000259319_3 (sequence is synthesized)
caccggcccccgccagcgcccttaggccccgagacggctggctgcaccagcctgacctctgctagggctgcagcctgagaccgcggcttgctctactgctggcgcagtttgacccttggg

SEQ ID NO: 920301 - DNA, 120 bp, Artificial Sequence
  ENSG00000259319_4 (sequence is synthesized)
cttgtaccctgctccagcgggcttctcctttccactccggacacagcagtgagcagacccagccctcagcagaccccaagtggccttcttccccgttccagcttcaatagccaaccccac

SEQ ID NO: 920302 - DNA, 120 bp, Artificial Sequence
  ENSG00000259319_5 (sequence is synthesized)
tcccaccttccatccttctagagaggaaatggtgaaggggactccagagggaaggcgacatccatggtgccctccagtatacaaaggcagagacacagagccctcaggtagaacggggtt

SEQ ID NO: 920303 - DNA, 120 bp, Artificial Sequence
  ENSG00000259319_6 (sequence is synthesized)
ccctagatggcatctcctacctccagagctcctgggtacccatcgagccccctaccttctgcctaagccagataggagtgacgatttttatactcagcgactttcggcctccttctgaga

SEQ ID NO: 920304 - DNA, 120 bp, Artificial Sequence
  ENSG00000259319_7 (sequence is synthesized)
gtgatgtcaggtcatcacccatagaagaaaggaagtgaaagaaaaagttcatgccttcttggagtgcagatgctcagagtgaaagaaacaacaagacttgagacagatgggtgccattga

SEQ ID NO: 920305 - DNA, 120 bp, Artificial Sequence
  ENSG00000259319_8 (sequence is synthesized)
gcaaacccgaacatgcatgtctctctcatgtgagtgagtgcatgagactttattctccttatttccccagtgcagtgaaatctttctggataaaagaagtgggctaatggaaggagagac

SEQ ID NO: 920306 - DNA, 120 bp, Artificial Sequence
  ENSG00000259319_9 (sequence is synthesized)
agaccaagtcccaatgacattgcctgaccattttcaccttcgccatcagcagtctccctcacagcattggtgtgggcaggtaagaagaaagcaaggccctgaaagaatatacattggaaa

SEQ ID NO: 920307 - DNA, 120 bp, Artificial Sequence
  ENSG00000259319_10 (sequence is synthesized)
atgagcagtaatttgatactcttgtggaagagcatgactcttcgccccagaaaggccaatgacacctttactacagcgtaaagatcaaagccagggactgtgaaactgcctcatgatgtt

SEQ ID NO: 920308 - DNA, 120 bp, Artificial Sequence
  ENSG00000259319_11 (sequence is synthesized)
tctcccatgagacctgtgtctggatgtttatatggaacaaaacatggaacagaggcaatagtacttgatgtgtcttcagctggggctttggataaactaaactgatctatattcagggac

SEQ ID NO: 920309 - DNA, 120 bp, Artificial Sequence
  ENSG00000259319_12 (sequence is synthesized)
taataattagggtgtgtggttagagcgcgtcctctctagggcctgttttggactgtggctgggccaccagcagtcctactgggcctttgcttcccccacaaattaaatatgttacagggg

SEQ ID NO: 920310 - DNA, 120 bp, Artificial Sequence
  ENSG00000259319_13 (sequence is synthesized)
tggcaccaaggggtgacttgggaggcctttagtcccctctacctctctataatctccattagatcttctctgttatttgctattgatgcttttcagtttcatataggacgctataagaac

SEQ ID NO: 920311 - DNA, 120 bp, Artificial Sequence
  ENSG00000259319_14 (sequence is synthesized)
acagcttcaaggcctcccttccgccacatactccctactaggcccctctacgtagtcactgcctctgggagtggctagagggagaagccataaactgggtcctttatgcagacattggat

SEQ ID NO: 920312 - DNA, 120 bp, Artificial Sequence
  ENSG00000259319_15 (sequence is synthesized)
gctggatggagctgatttaccactggctcttagggacagacaagtgactcagcctaaggcagtttgaatttaagtttcctatcacaactagaaaagtcctgattaacacgcccagcccta

SEQ ID NO: 920313 - DNA, 120 bp, Artificial Sequence
  ENSG00000259319_16 (sequence is synthesized)
acgtgaaagggaactactgagagtgaagctaatgggaggaaaagtagagccaagccacggagggaaagacagatcaagttccaatgacattgcctgagttcctgaattcagtcatgcctg

SEQ ID NO: 920314 - DNA, 120 bp, Artificial Sequence
  ENSG00000259319_17 (sequence is synthesized)
acatcatcctgacctctgcaggttttagctataggaatcagtaaattatgtcttacccaaggcagtttgaatttgggtttcctattacttgcaattagaaaagtcctaattaatacagtg

SEQ ID NO: 920315 - DNA, 120 bp, Artificial Sequence
  ENSG00000259319_18 (sequence is synthesized)
ggttttgcatctctgacttatgtggactatttcattttgaagtttaatggagattgatgaatcccgagctctttgtaaagaggggaaaactgaaatggtgaggtaaaataatgaattccc

SEQ ID NO: 920316 - DNA, 120 bp, Artificial Sequence
  ENSG00000259319_19 (sequence is synthesized)
cagacctgctcctccaaaatcaaaggagaaagtgatagttctgagtaatcagccaatcaattagtctttatcctagtatatactgaaaacctattgtgcacctttaaggtacacaaagtt

SEQ ID NO: 920317 - DNA, 120 bp, Artificial Sequence
  ENSG00000259319_20 (sequence is synthesized)
taagacatgatttctcacctgttctatgtcccatctaattaggaaaaatgatttacaaactaatgaatagcaagacaaagagtagctaagagctaatgatgcgacacaggctataagcac

SEQ ID NO: 920318 - DNA, 120 bp, Artificial Sequence
  ENSG00000259319_21 (sequence is synthesized)
tgtaggagttcagacaggattgctgctccagtctctactcaaattgtatagaccaaaattgcaaacgcgtagctggcaggctgaaaatctggcttttctggcttcaaccttaaatttgtt

SEQ ID NO: 920319 - DNA, 120 bp, Artificial Sequence
  ENSG00000259319_22 (sequence is synthesized)
ctgtagtcccagctactcaggagactgaagcagaaggatcatttgagcccaggagttcaagtctggcctaggcaacatagcaagacccccatctcaaaaaaataattgtagaaaaaaata

SEQ ID NO: 920320 - DNA, 120 bp, Artificial Sequence
  ENSG00000259319_23 (sequence is synthesized)
ccatctcaaaaaaataattgtagaaaaaaatatttttttaatatagcaaagatttcatataaaaaaatctagatttcaaacttctcttttaaaaatatcaaagtcaggcaacattgggca

SEQ ID NO: 920321 - DNA, 120 bp, Artificial Sequence
  ENSG00000259319_24 (sequence is synthesized)
tatgtaatagtcaggataagctaggttttgctgcagtaacaaatatccccccaaactcattggcttaacaaaagaaaggctacttcccactcacacaagacaactgtggattgaggtgat

SEQ ID NO: 920322 - DNA, 120 bp, Artificial Sequence
  ENSG00000259319_25 (sequence is synthesized)
tctccagggcagctgtcttatagatgatgcctcagtatttataccttcatatcaacaagtgcatttacagccaccatggcagagaaaaagaagtagagagggccgaacactagcagtgaa

SEQ ID NO: 920323 - DNA, 120 bp, Artificial Sequence
  ENSG00000259319_26 (sequence is synthesized)
atctttcctcctgaagtgacatacatcactttagcttacgtttcattggccaaagcaagtcacatggccatccttaatttcaaagatgcaaggaatctcagtcctcccatggaccatgga

SEQ ID NO: 920324 - DNA, 120 bp, Artificial Sequence
  ENSG00000259319_27 (sequence is synthesized)
ggagaaaggaaccagaaaatagcaaacaattaatatctgccacggcacgcgcttccttatggcaacaataggctggagcccattagaagctgccccttgaaatgggacttaaacacccag

SEQ ID NO: 920325 - DNA, 120 bp, Artificial Sequence
  ENSG00000259319_28 (sequence is synthesized)
tttgacagtctccacccagcctgcctagcccttgggggcatttgattttgcaagtcctggtaaagataaagccaatctcaatatcagtctttcagatgtccctggtgatccgtggagtta

SEQ ID NO: 920326 - DNA, 120 bp, Artificial Sequence
  ENSG00000259319_29 (sequence is synthesized)
tcacacagttttcaaaaacaaatgttttgctctgcttgagacaaaaacttatgacatgcagaattcttacaatgaaaagcaggatggtatcatgaaatcaaacatgaagttgaaactagc

SEQ ID NO: 920327 - DNA, 120 bp, Artificial Sequence
  ENSG00000259319_30 (sequence is synthesized)
tgttattgtagtctgcaaattacataaacctgtttatggtgatttcttcctgttgctcttccctccatcaatcaaacacccaccaggagaaacaagcctcccaagctcttccctggagtg

SEQ ID NO: 920328 - DNA, 120 bp, Artificial Sequence
  ENSG00000259319_31 (sequence is synthesized)
gtagtgacttgggaaggggggcggggggatgtctaatttaacattttgaagcatttatatatatatatgaatatacatatatatagatgtgtgtgtctatataaatattcaaggctaaaa

SEQ ID NO: 920329 - DNA, 120 bp, Artificial Sequence
  ENSG00000259319_32 (sequence is synthesized)
tatttgagaagaaaacttgtgagctaggaatgggaaggcttctcttccaatgaccaccaatgagaatgttataaaatatgtctaaaggtttaagaataaatcagcatccatacaaatgca

SEQ ID NO: 920330 - DNA, 120 bp, Artificial Sequence
  ENSG00000251168_0 (sequence is synthesized)
tgggactactggtgtgtgccaccgagcccagctcatgacccattttcaattctcatcttccaaaagaaaaagatttctggactcacgaatctgtagcaagatccaggactcaggagagag

SEQ ID NO: 920331 - DNA, 120 bp, Artificial Sequence
  ENSG00000251168_1 (sequence is synthesized)
tcaattttaatggagcatgaagatttacctacatattagaggcattctacaaccttggatgaaaaaaagaaaaacacattctctgcttcaattccataataaatttggatttttcagtcg

SEQ ID NO: 920332 - DNA, 120 bp, Artificial Sequence
  ENSG00000259314_0 (sequence is synthesized)
aaggtattgaaaggttatgtccactaatcagcatcccactccaatataggtaggtaaaatcagttcataccttccccatgtccattattctcaccatcacagaaacctagcgggaaagga

SEQ ID NO: 920333 - DNA, 120 bp, Artificial Sequence
  ENSG00000259314_1 (sequence is synthesized)
aaaagaaaaaaagaaaacacttttatgtggtactttcattttcatgaatttatgaatcagtaactctttatgatttgaaatagaattttgaaaattctaaggcacttttgatacactgat

SEQ ID NO: 920334 - DNA, 120 bp, Artificial Sequence
  ENSG00000259314_2 (sequence is synthesized)
tttcatttaaggtgctttatcatttatactaaaaataggtatagctaatttgaaactaaatttggttcctttttcttttcctttaaaattgtctgtctgaaattttcttactgtcactgt

SEQ ID NO: 920335 - DNA, 120 bp, Artificial Sequence
  ENSG00000259314_3 (sequence is synthesized)
tgcttcatcatggggttaagagcagcacggcgggcttccccagcggccacgtgaggtgtgatgcccccaccgctgagcgcaggcacagaccacccagctgccttggagggatttgtaaaa

SEQ ID NO: 920336 - DNA, 120 bp, Artificial Sequence
  ENSG00000259314_4 (sequence is synthesized)
ggaaacaacccatgtacctgttaagtgcagatgtcagcctgaacccaggatgcttttcgtctttccaaggaggctgctgcctttaaaaaccagaacaacataaaaggaaaagaagtcaat

SEQ ID NO: 920337 - DNA, 120 bp, Artificial Sequence
  ENSG00000259314_5 (sequence is synthesized)
ccacagacagcaaaggagggcctcagcacttgcatttgagaactggctcttctactcacctcgctctgcaagagttacttaaaaataccccacacctcgctcattttgctcatcattgtt

SEQ ID NO: 920338 - DNA, 120 bp, Artificial Sequence
  ENSG00000259312_0 (sequence is synthesized)
aatctagctgccgtgaaacactgaggtactatccaccacttggatgccaaggtgttgtatgggtggagattgaagacttccattggaaatacatttgtgggtacagtcaaatggaagttg

SEQ ID NO: 920339 - DNA, 120 bp, Artificial Sequence
  ENSG00000259312_1 (sequence is synthesized)
tctatgaggaccacgtattcttctttccaggctcctatattctctcctgacaccctaagaaatgaaagcctgctccttcagtgctgattgagccttctaagtaaaacaagtgaatttctg

SEQ ID NO: 920340 - DNA, 120 bp, Artificial Sequence
  ENSG00000259312_2 (sequence is synthesized)
atggttcctcgttgctgtgtactccagagaggacaaacgctgtgtcctcacatgacagaaggggaaaagggatggagagctctctgaagcctcttttctaagggcactgatcacattcac

SEQ ID NO: 920341 - DNA, 120 bp, Artificial Sequence
  ENSG00000259312_3 (sequence is synthesized)
aagtgcagagccctcatgacttaatcatttccccaaaggccccacctcttaatactgttgcattggggattaagtcttaacatgagttttgaagggacacagacattcaaatgatagcaa

SEQ ID NO: 920342 - DNA, 120 bp, Artificial Sequence
  ENSG00000266711_0 (sequence is synthesized)
ggctgaggagaacctcgagagcagcaacactggaggacagggagggggtgcaggcgacatgaggaaagccgcaaggattgggaagagagcacccaactcctctgagagatggtgaggttg

SEQ ID NO: 920343 - DNA, 120 bp, Artificial Sequence
  ENSG00000266711_1 (sequence is synthesized)
aggacactcagcacacccaggatgaggatacgcggtcacgagctaggcggaggcctgggtctccctcctgtacatctggacgggtgaagactgagctccctggcatcccgtgggctgcct

SEQ ID NO: 920344 - DNA, 120 bp, Artificial Sequence
  ENSG00000266711_2 (sequence is synthesized)
tgttgtgtccgtcacgctctccctggctcagccctgacagcccccgcagtacgcgtgcaccccacactgccttcatccactgcccagcccacgcctgggcaaggcccaccccttccctat

SEQ ID NO: 920345 - DNA, 120 bp, Artificial Sequence
  ENSG00000266711_3 (sequence is synthesized)
gacccctcccagccagaggaagtgccatgggagcggccagttgcacccctatgtaaggtggtggagcctggactgggagatgcactcaggaactgcttaggataagcacgctcgtgcaga

SEQ ID NO: 920346 - DNA, 120 bp, Artificial Sequence
  ENSG00000266718_0 (sequence is synthesized)
atgaaggcggcttcagccgggcgtccggccgggctccaggtcgggtgcagaggcggaagctgtgctcttcctgctggacagagcccgagcccgagcccttcctccagctcctcacacgac

SEQ ID NO: 920347 - DNA, 120 bp, Artificial Sequence
  ENSG00000266718_1 (sequence is synthesized)
gctgaacatgctaagaagctgctgctggttttaaaagcagagacacttgtcgcgataggctggcaccccaatgtttgctcacacaggcagcacaatcccacgctgtacctcagcttgtgc

SEQ ID NO: 920348 - DNA, 120 bp, Artificial Sequence
  ENSG00000266718_2 (sequence is synthesized)
cttgtcagctctgagctgggaggggagaggagaaaggaggaagcctcctgacctcggagcctccagtcaggactggctggctctgctccgtatgccgaaagccctgggaatttttcactg

SEQ ID NO: 920349 - DNA, 120 bp, Artificial Sequence
  ENSG00000266718_3 (sequence is synthesized)
ctctcgggatggcgtctggggcgtgggcaggttggtcccgctttgaacgctctgctggacttacggagctgctcttagtgctgggcagtgaacgccaagctgtcgtgtccacacggccag

SEQ ID NO: 920350 - DNA, 120 bp, Artificial Sequence
  ENSG00000266718_4 (sequence is synthesized)
gggaacgccagggccaaggccagcatgcgctgagcttctgcccagcctggagtcgccttcaccaggccatgagcacgtgaggcactttctaagcactggttgcccgggaggcgcaactgc

SEQ ID NO: 920351 - DNA, 120 bp, Artificial Sequence
  ENSG00000266718_5 (sequence is synthesized)
tcagacgccgaggcagctcaaagggctccgacgtgcggtggctccacggggtcagcgtgcccagagtaatgggtgtcactagagcacctggcccagcacacgctttctgaggacacctgg

SEQ ID NO: 920352 - DNA, 120 bp, Artificial Sequence
  ENSG00000266718_6 (sequence is synthesized)
tgggcgcgccccacagcaggccccaaagtttcagaggtcctgtggagtacttgctgcctgggggaggcccttcctcagggagtgtccagcagagggaagagcagaccacgctctggaagg

SEQ ID NO: 920353 - DNA, 120 bp, Artificial Sequence
  ENSG00000266718_7 (sequence is synthesized)
tccaagccgatcatgcacgagtcaacagtgctcccactgccgggccagcccctcttccccacccgaggccaccactctgctgaaatgaaggttcttgaatagcaagaaggaaggcagaag

SEQ ID NO: 920354 - DNA, 120 bp, Artificial Sequence
  ENSG00000266718_8 (sequence is synthesized)
ttggacactggatccttctgggttgtggatgtggatgagctagctgtgggcccctttccctctccctgtcctacttctgctgtgccagccccacagctgctcagtcccctccctggtggt

SEQ ID NO: 920355 - DNA, 120 bp, Artificial Sequence
  ENSG00000266718_9 (sequence is synthesized)
gggtactgtcccgggacagccagttggtcctctccttcccgttggcaattctggctttccggcattccacaccaccggcccagcccctggggcttggcggaggcagtgttcctgctagct

SEQ ID NO: 920356 - DNA, 120 bp, Artificial Sequence
  ENSG00000266718_10 (sequence is synthesized)
gggcctgtctctgtcccctctcggggacctgtccctctcctggaccacggatattgatctgaggcaaacatctaattcccacttccccagaacatcccccaactgaacaaaaatcagtga

SEQ ID NO: 920357 - DNA, 120 bp, Artificial Sequence
  ENSG00000266718_11 (sequence is synthesized)
cacttcaggaaagaaaaggtggtatttagtggcggtccccacactgcccctcccaggactgttttctaagcccacgtgagatctctcctgatccctttgaggtcttaatacaagagccgg

SEQ ID NO: 920358 - DNA, 120 bp, Artificial Sequence
  ENSG00000266718_12 (sequence is synthesized)
gcctacgggtgggagagtctggattctgtcctggccttgccatgcttcctggcttcatgaccttgttcaagtcacttaaacctctgtctggcttttacaaccatcaaaccatctaccctc

SEQ ID NO: 920359 - DNA, 120 bp, Artificial Sequence
  ENSG00000266718_13 (sequence is synthesized)
caggtgctccacaaggactgactccaccccgggcactgtgtcggcactggaaacatgaaacccgagctgggagccagacaggggttcttcctgagagcctgggaagccgcctgccctcgt

SEQ ID NO: 920360 - DNA, 120 bp, Artificial Sequence
  ENSG00000266718_14 (sequence is synthesized)
ggaatttacggtctaaggagtgatgcacgtgaggcactttgaaagatgtgaaggactgtgtgtaaaacatgtgccaatttctcgcttcgcagaaggaatttccactgctttctcagttaa

SEQ ID NO: 920361 - DNA, 120 bp, Artificial Sequence
  ENSG00000266718_15 (sequence is synthesized)
gtgtcaagaacctccaaaagagatggttcaagagagctatattattgaatcagattatgttctttacacattttagcatagctcacaaaaccatatgaatgtttctgttttgaatattct

SEQ ID NO: 920362 - DNA, 120 bp, Artificial Sequence
  ENSG00000266718_16 (sequence is synthesized)
cttcctaaatgttttacatcctgtggggaggggcttggattctgattctgtgtttaaatcctacaagcaggccgggtgcgtagctcacacctataatccctgcactttgggaggctgagg

SEQ ID NO: 920363 - DNA, 71 bp, Artificial Sequence
  ENSG00000266718_17 (sequence is synthesized)
ggagattgccaaaataaaacaaaaaacatcctacaagtgtcaagcatggtggtgcacacctgtagtcccag

SEQ ID NO: 920364 - DNA, 72 bp, Artificial Sequence
  ENSG00000266718_18 (sequence is synthesized)
tgaggtgggaggatcacttgagcctaaaattaaaaaggcggccgggtgcagttgctcacgcctgtaatccca

SEQ ID NO: 920365 - DNA, 89 bp, Artificial Sequence
  ENSG00000266718_19 (sequence is synthesized)
attactgtctctacaaaaaaaaaaattaaaaagtagctgggtgtggtggcatgggcctgtagtcctagctacttgggagactgaggtgg

SEQ ID NO: 920366 - DNA, 120 bp, Artificial Sequence
  ENSG00000266718_20 (sequence is synthesized)
tctacaaaaaaaaaaattaaaaagtagctgggtgtggtggcatgggcctgtagtcctagctacttgggagactgaggtggaagaatcgctggagcctgggaggcggaggctgcagtgagc

SEQ ID NO: 920367 - DNA, 120 bp, Artificial Sequence
  ENSG00000266718_21 (sequence is synthesized)
aataaaataaaaataaaaaataaacaaccctacaagtttaatggagcattcacaccacatgtactggtctccactttcagaatgcaaggtcctggcggggaggggaggcgtcttacacag

SEQ ID NO: 920368 - DNA, 120 bp, Artificial Sequence
  ENSG00000266718_22 (sequence is synthesized)
ggggaggggaggcgtcttacacagctgcatgcgtggtgctgccctgcacacaggagatgctcccaggtgctgatgggcaacactggctgggccacaggttctggacgtgctggggccgcg

SEQ ID NO: 920369 - DNA, 120 bp, Artificial Sequence
  ENSG00000266718_23 (sequence is synthesized)
taaggctgcaggcctcagtccatctgctgtgtaaatggctctctcccagtaacacaacttcatctgctcacttcatcaacttcgcacactcactgcagcctcatgaatgaggaagacaat

SEQ ID NO: 920370 - DNA, 120 bp, Artificial Sequence
  ENSG00000266718_24 (sequence is synthesized)
gggcacaactggtcaagagcctcctgggatggagactcacccagtccatgaagttccttctaaacacaaagtggccagatacctgtgaaccagacctgggaaggaggtctgctccttagc

SEQ ID NO: 920371 - DNA, 120 bp, Artificial Sequence
  ENSG00000266718_25 (sequence is synthesized)
agagagatactctgttttgccgccttaagtgacagttgcctgggttactacttttttccttggcacagacctgggcagccctggcctgcctgactcccagcctgtttgtgtggtgctgct

SEQ ID NO: 920372 - DNA, 120 bp, Artificial Sequence
  ENSG00000266718_26 (sequence is synthesized)
gtgacgtttgggcagaagagggggttgagtgactacgtgtgttgagctcaccaccgaacaacaagggcaagaagaaccagccttctgctctgaagttcggctgagcactgcccagctgac

SEQ ID NO: 920373 - DNA, 120 bp, Artificial Sequence
  ENSG00000266718_27 (sequence is synthesized)
ctgctctgaagttcggctgagcactgcccagctgacgccatctacacactgccatcagcagataacgaagtcagaaaatgtggattgaggggccaggcgcagtggctcacgccggtaatc

SEQ ID NO: 920374 - DNA, 120 bp, Artificial Sequence
  ENSG00000227646_0 (sequence is synthesized)
agagcaccgagggggagccagcagtgagtgcactggggagctccacacacgcggctccgcagctttgcgcgcccttctaccgcgagcggctgagtatccgcctggctcccctgcggggtt

SEQ ID NO: 920375 - DNA, 120 bp, Artificial Sequence
  ENSG00000227646_1 (sequence is synthesized)
cctccgtggtcttccggagattctttctgaagcagctttagaatagtcaagcctatttttctactccatttctttttgtaatgtggggtcacctttccgctctagaaattgcttttctta

SEQ ID NO: 920376 - DNA, 120 bp, Artificial Sequence
  ENSG00000227646_2 (sequence is synthesized)
gggccctggttctcatctccccagtcttagcttctgacaagcctccaagaaactgcgcttttttcttttctggagatgcagagtatgaaaatgattttgcaagacttttccaggtcatga

SEQ ID NO: 920377 - DNA, 120 bp, Artificial Sequence
  ENSG00000227646_3 (sequence is synthesized)
ggtgctctctgagaaatctcttctgttccctaaagtagttgctcatgctgggggaagctagccatcacgtcatgccgacactcaagtaactcataaagaggaacttttccaaccagcacc

SEQ ID NO: 920378 - DNA, 120 bp, Artificial Sequence
  ENSG00000227646_4 (sequence is synthesized)
atggcagagagctgtcttatgtgcagattttccagaccaagtcaagtcttctgatgcctgcagaaatggctgacatcctgactgcaacatcttaagtgatcctatggcagaaccacccag

SEQ ID NO: 920379 - DNA, 120 bp, Artificial Sequence
  ENSG00000227646_5 (sequence is synthesized)
ataactttagagtggtagttcccaaaatgtgtgactttaggcactagtttgcctaaatgctgctctagcaagtcattcacttcaaaaatattgagccacttctatatgccctggctggca

SEQ ID NO: 920380 - DNA, 120 bp, Artificial Sequence
  ENSG00000227646_6 (sequence is synthesized)
ctctaggaacagtggtgaagaagacagatatatttacctgtcctgatagaagttacagtttggtgaaaacgataaattagtaacaagtgcaaataagatttatgcagatttatttacaca

SEQ ID NO: 920381 - DNA, 120 bp, Artificial Sequence
  ENSG00000227646_7 (sequence is synthesized)
aaataaatgtaagtcgtgatgtaaatagtagattttgagataaacaataagagaaatctcttcattttagagatccacaatgtatgttaataaattaaaggctctgaaaattcctatggt

SEQ ID NO: 920382 - DNA, 120 bp, Artificial Sequence
  ENSG00000227646_8 (sequence is synthesized)
aaaaacattttacctaacctattccccaaacccccaaatttgttttgaacaaatttgtttgtaagcagtgcttataataaaatagaataatttttgtgaaatgctgctttgttttaaaac

SEQ ID NO: 920383 - DNA, 120 bp, Artificial Sequence
  ENSG00000227640_0 (sequence is synthesized)
tcttcttggctccgggcagggtgcgccgatgggaaacccccaatcggctgggtgattttttttttttggaggggggagctgtcccccgcagcacctgcctctcgagtcttcctctcccgc

SEQ ID NO: 920384 - DNA, 120 bp, Artificial Sequence
  ENSG00000227640_1 (sequence is synthesized)
tgctggactgacgggtggggcgaggaaggagggtggatgaggcttgagcaagcgttggtcgcccggcctcagaggaagttctcccggctcgccgaggagccgcgtccggccgtcccctgg

SEQ ID NO: 920385 - DNA, 120 bp, Artificial Sequence
  ENSG00000227640_2 (sequence is synthesized)
gccatgccggctctgttcgctccgagccccttcaggcgcgcctgccgacttagggctcccggagctcgccggccgcggagggcagcgcagcctccacgcggcgccgcaggcctggcaccg

SEQ ID NO: 920386 - DNA, 120 bp, Artificial Sequence
  ENSG00000227640_3 (sequence is synthesized)
gccgcgtccccgcctcgctcttctcggcagccgcctggcacttgcaactaacttcgcccaagtttcctgcgccgcggcgcccctctcggcgcgctcctgggagcgtgcgcccgcgagtcc

SEQ ID NO: 920387 - DNA, 120 bp, Artificial Sequence
  ENSG00000227640_4 (sequence is synthesized)
gccgcgcccggggcccctctgtcctcgctgctgtggccagagccgagccggcgcaggggcggaggtgctgcaggagagttaaggaaaacgggccatcacctcagttcgcaggtccgcgct

SEQ ID NO: 920388 - DNA, 120 bp, Artificial Sequence
  ENSG00000227640_5 (sequence is synthesized)
gtggcacctcccgctctccccactcccgcggcgcagggggccccttcccagcccaggccgccctctgcaccggctcaggtttaggcgagtggagagtccggagcgcgccggggagtctgc

SEQ ID NO: 920389 - DNA, 120 bp, Artificial Sequence
  ENSG00000227640_6 (sequence is synthesized)
gccctgtttggcgttggcaaaccctggtgtcatcccggctacccaggccggcctggcgtgcagctgccctggttgtggccctggaatcctcgccgggaggaagaaggcggcgggcacgag

SEQ ID NO: 920390 - DNA, 120 bp, Artificial Sequence
  ENSG00000227640_7 (sequence is synthesized)
taggagagcctctccagctacggaggaagagggttaaacctggagaaggggagactcacccttgaaaatgtttgagactgttcctagcaagaaagtgctcattttccttggaggtccagg

SEQ ID NO: 920391 - DNA, 120 bp, Artificial Sequence
  ENSG00000227640_8 (sequence is synthesized)
tgttgcttgcaacagaaacagaggcttctcgcattttcttgcactggcgatgcacctagtcagaggtagtggagtgaaaaataactctggagggaataaggacattcttggcaacctttc

SEQ ID NO: 920392 - DNA, 120 bp, Artificial Sequence
  ENSG00000227640_9 (sequence is synthesized)
caaaaaagagctagcccagactgagagtatgcatccttgactgactattcagctctttaaaaattctgtgttgtttgtcttttgttgtaatcttggtcgccagaaccatctatatactga

SEQ ID NO: 920393 - DNA, 120 bp, Artificial Sequence
  ENSG00000227640_10 (sequence is synthesized)
tctctttaaggtacagttaacttacagtgtctcacttacatgcgctgctgaggtgaaggtgtttaaaatcaataagtgtaagtagtttccctggaagagagaagtaaaacgtaccaatca

SEQ ID NO: 920394 - DNA, 120 bp, Artificial Sequence
  ENSG00000227640_11 (sequence is synthesized)
ctcagtgctggaatatttttatgctaagcataatttccttctttagtagttagagcagttttttaaaaaaaatagttaacacgatgcagaagtcaaacagcatgattctgtttccgtatt

SEQ ID NO: 920395 - DNA, 120 bp, Artificial Sequence
  ENSG00000227640_12 (sequence is synthesized)
ttcctcactttttggtatgctgcggcacatttagaacatgatctgtctggaggttttattcacatggtggcctgcccttcagggagaacttgcttgccttctttctttggcagtttggat

SEQ ID NO: 920396 - DNA, 78 bp, Artificial Sequence
  ENSG00000227640_13 (sequence is synthesized)
ttgattgtaattatgaacgtgaattaaaactgtttcaggccatcagatttatgtaaaagttaggcttgttttgttcat

SEQ ID NO: 920397 - DNA, 120 bp, Artificial Sequence
  ENSG00000227640_14 (sequence is synthesized)
gccatcagatttatgtaaaagttaggcttgttttgttcattttaataaaagaatagtgacttaaaaattacagtcgtgataacaaaactgtgaacagcagtggcatctatgtgggttttt

SEQ ID NO: 920398 - DNA, 120 bp, Artificial Sequence
  ENSG00000227640_15 (sequence is synthesized)
gtttttctgaagatgtcgtattgacaagcttattttgtatcggttatgcccttgcattgttaaaataattggactgatttctccagaaccatattcctttacaggctctgtaaagacact

SEQ ID NO: 920399 - DNA, 120 bp, Artificial Sequence
  ENSG00000227640_16 (sequence is synthesized)
cttgtcattcacagactctggctggagcaatgggaaaacactagcatgtgtaattacatagactggaatattaaatatactgttttgtgatgataaactacaaaattatcgtccctgagc

SEQ ID NO: 920400 - DNA, 120 bp, Artificial Sequence
  ENSG00000227640_17 (sequence is synthesized)
ttttcacctactgacttataggtttgagacaaaaatactatacactggaacataaagaacatatgtatatataggccacaaaacatgaaatctgttattcactaaatattgtgaataaag

SEQ ID NO: 920401 - DNA, 120 bp, Artificial Sequence
  ENSG00000227640_18 (sequence is synthesized)
ttaaatttaatcgtgaaaattattttgacacataaaaagggagaaggattgtgaaaatgtgttttatattagtgagttaagtgattttatactattcaaatttaagtgtaaaaatctact

SEQ ID NO: 920402 - DNA, 120 bp, Artificial Sequence
  ENSG00000227640_19 (sequence is synthesized)
gcaataaattattacattagaaatgtttgtatatatgattgaaatgtatgcttacatgtgcaatgtcttataggaataatatatgtaaggttccttggctatagttttttccagtataca

SEQ ID NO: 920403 - DNA, 120 bp, Artificial Sequence
  ENSG00000227640_20 (sequence is synthesized)
tttacaatattgtctgtctagtgatattaaatgagccaaatttgaacactctcaagtccaagaatgttgaactgtgggaaacaaaggtgtcataagaagaaaatgactatttgtgtgctt

SEQ ID NO: 920404 - DNA, 120 bp, Artificial Sequence
  ENSG00000227640_21 (sequence is synthesized)
gtctattcaccaaatgaaacttcccacatttcaaaataggaaagatttggttttagttcttggcttctaggggatcaatattcttggcctaacccttcacaaccaaagaaagagccctca

SEQ ID NO: 920405 - DNA, 120 bp, Artificial Sequence
  ENSG00000227640_22 (sequence is synthesized)
taatcggccattcattaaagaaaggcaatgtggcattgctgttattaaccagccttcacacctcttgcctgaatctggttgagcttttaacaaagtaaattttcaagccattttcattca

SEQ ID NO: 920406 - DNA, 120 bp, Artificial Sequence
  ENSG00000227640_23 (sequence is synthesized)
tatgtaccaaaatgtaaatttgcttttaatttcctcatatcttgtgtttgaattgatagaggtatatttttattcttgctcagttttgtcctaaagattaaaaaaatcccagcatatagg

SEQ ID NO: 920407 - DNA, 120 bp, Artificial Sequence
  ENSG00000227640_24 (sequence is synthesized)
aaatggaatagtctgtgtgagtgaatagtgaaggaaaataaattgaaagagaattgtaagtttgatgagctttattttgtcaactcttgattgtaaacacctaaagaacagtatagattt

SEQ ID NO: 920408 - DNA, 120 bp, Artificial Sequence
  ENSG00000227640_25 (sequence is synthesized)
gatcggtagaattcgtgtgggtctgtatttcccttgcggccacagtgatatatgtgatcgcaaatgtatctagtcggaaactgagtgacactccctcagaaaaagttgtgggcctgtgta

SEQ ID NO: 920409 - DNA, 120 bp, Artificial Sequence
  ENSG00000227640_26 (sequence is synthesized)
aattgagtttcctcttttcccccttcaattctccccagaaaatagtctcttttcaattctaaaactttcactaggaggcagcaatgagattgttggggaataaaaaataccttggcaaca

SEQ ID NO: 920410 - DNA, 120 bp, Artificial Sequence
  ENSG00000227640_27 (sequence is synthesized)
tctcttctcccagggaggaactttgcggaggggtcagtgttgggaaccctggggtcctccgccgcctcctgatcttccgccagtcccgccactcctccgccctgggcgtgccttccgcag

SEQ ID NO: 920411 - DNA, 120 bp, Artificial Sequence
  ENSG00000227640_28 (sequence is synthesized)
gtgaacctgaagaggagaaaatatataatagagcctgaagatgtagttgtattgcttcagtctcatgataaaacttgagtggatgaggagttgcttcttatgaacgagcaaagaaagtgg

SEQ ID NO: 920412 - DNA, 120 bp, Artificial Sequence
  ENSG00000227640_29 (sequence is synthesized)
ttacgtgagagggaatctactcctaatgaagatcctctggatttatagtgacaaggccctagggtgtggcagatccacagatggcataaggctgagttcttgaatcactgcatagaggaa

SEQ ID NO: 920413 - DNA, 120 bp, Artificial Sequence
  ENSG00000227640_30 (sequence is synthesized)
cggcaccaggaatgctcaccttggccgatgtgtgaatgggaaataaacttgcattgtatgaagaccctgaactttcggagtttattcgttttagcaggaggaaaaaagcacgttttgcgt

SEQ ID NO: 920414 - DNA, 120 bp, Artificial Sequence
  ENSG00000227640_31 (sequence is synthesized)
ttccctttggcttgatgtagcagctaatggttgatgatgcttggtggggaataatggagacaaggaagatgcgtgtgaatcctgaactccaactggagctggtgtgtcagttggacatgc

SEQ ID NO: 920415 - DNA, 120 bp, Artificial Sequence
  ENSG00000227640_32 (sequence is synthesized)
taaaggctaaaagggaagtacctccagcttgcactgcatgacaccatcatcatcatattaaccacatcgtcgcagccagtgtgaccgtgcatcttggtctgaccgggaaaattccagttt

SEQ ID NO: 920416 - DNA, 120 bp, Artificial Sequence
  ENSG00000227640_33 (sequence is synthesized)
taaggtgctgccatcattcttaataacacacctttttactctcaaagctgtcccaatgtgatgataaatgatatagccactgaagtcataaataatatttagtgagcacttgttatacac

SEQ ID NO: 920417 - DNA, 120 bp, Artificial Sequence
  ENSG00000227640_34 (sequence is synthesized)
taggcatttacttcatatactgtttgttttgtcttcccaacaactttatgaattaggtgttccttttagccccagtttacagatgatgaaattgaggcagcatttaagaaacttcccatg

SEQ ID NO: 920418 - DNA, 120 bp, Artificial Sequence
  ENSG00000227640_35 (sequence is synthesized)
cttatccagcttgaacccagcagtctggctccagaacccaaaatcttaaacattttactgcttcttgcagagaaaatacggggatctgctccacatgatccccttctatcaggtccatca

SEQ ID NO: 920419 - DNA, 120 bp, Artificial Sequence
  ENSG00000227640_36 (sequence is synthesized)
taaaatactatcaccccagtggaaatacctgaatctctgacagttttttaccctggagccatgtgtcggaaaatgggaatctagttaattttagccattttaatcttgttctccaattta

SEQ ID NO: 920420 - DNA, 120 bp, Artificial Sequence
  ENSG00000227640_37 (sequence is synthesized)
acttataaacgagcttcttttcctcttaagagtctggctagagagtgcccaatttagttaaaccccaagtttaggattagaaaggactgcaaaagctgcagattgttcgagttagcacac

SEQ ID NO: 920421 - DNA, 120 bp, Artificial Sequence
  ENSG00000227640_38 (sequence is synthesized)
aagagttgctctgccacactgtcatttgttaaaaaccaactttgtcacttaggcaaattgcctcattttgactttatttgtcacccgcatgccatgagttgtattatgatccacatttta

SEQ ID NO: 920422 - DNA, 120 bp, Artificial Sequence
  ENSG00000227640_39 (sequence is synthesized)
aaaatgaaaaaatataccgaagagtttaactgacccgtgatcacttagctagtatgcctcaatgctggaattttaaaccaggtatctgactccaaagtttataattttttgacctactac

SEQ ID NO: 920423 - DNA, 120 bp, Artificial Sequence
  ENSG00000223946_0 (sequence is synthesized)
ctgagtcatctgcccctcacctgacttcacccacccctaactgccatgacaacgggagccggtcaccccagagtcacctggatacttcacaactttactggtggcccaggacttgcaggg

SEQ ID NO: 920424 - DNA, 120 bp, Artificial Sequence
  ENSG00000223947_0 (sequence is synthesized)
aacttccgggtcgccaggcaagggggtgtggctagggaaggggagaggcgagctatgatgtaagcggcgcgcgccgaagtggggccagctagcaggcgtcgtggcggggccgcgcttttg

SEQ ID NO: 920425 - DNA, 120 bp, Artificial Sequence
  ENSG00000223947_1 (sequence is synthesized)
ggccgcgagcttgaggtcccgcttctcgacggattccttctggctccgcgaaggaacttgcgtcccttctctaagtcttcggataaaaccaagacctaggcctacagatgtatgggagca

SEQ ID NO: 920426 - DNA, 120 bp, Artificial Sequence
  ENSG00000223947_2 (sequence is synthesized)
gggccagggagagagagacttcgtttttcccattcattcatgcatccgaccaacactgactgagcctgcgtcgggcgcggtgcctggctggcggtcccagggtcactaagacgcaacccg

SEQ ID NO: 920427 - DNA, 120 bp, Artificial Sequence
  ENSG00000223947_3 (sequence is synthesized)
gcgctggaggtgcttgcgtcgagcagggccggcacaggattgccagtcgtggctgtcctgtgcggtggagccacagggctgtcgcgtcgtccctgtgcgtgggtggcccagtgtgttgga

SEQ ID NO: 920428 - DNA, 120 bp, Artificial Sequence
  ENSG00000223947_4 (sequence is synthesized)
tatgacctgagagatgacagatgtgagatgacacgacagggagatctgaggaggtccccagagaactgggaactgcgtgtcaccagtctagagattcggagacagttggatctatggacc

SEQ ID NO: 920429 - DNA, 120 bp, Artificial Sequence
  ENSG00000223947_5 (sequence is synthesized)
catgtcttcctttttcttgtcgaactcccttctttcacaggagcacaccatttttagtggtttcttaagatgagtacactagctaaaaagtttatgagccctcaaatacctgagtattta

SEQ ID NO: 920430 - DNA, 120 bp, Artificial Sequence
  ENSG00000223947_6 (sequence is synthesized)
ttcaaccctcaaatttaaattctggcttgtatggaattctagattgaaaagaatttctccccagcattttgaaggcaggcttcattgtcttcagtttttcagtgtggtgagaagtgatgc

SEQ ID NO: 920431 - DNA, 120 bp, Artificial Sequence
  ENSG00000223947_7 (sequence is synthesized)
gtcatttttttctctctgaaagattttaggatcttctctttaaagttcagaaatttcatgacgatggtaccttgaatttaaggaaatttcccagaacgaaggagcttgatgttccaagtt

SEQ ID NO: 920432 - DNA, 120 bp, Artificial Sequence
  ENSG00000223947_8 (sequence is synthesized)
gaaagggcccacttaatgcctggcactttggtgaatgggaaaatgcccggaccaagtcacccctaacctactaacagggttttcagcaatggacatgtttcaagacctcacagacgagac

SEQ ID NO: 920433 - DNA, 120 bp, Artificial Sequence
  ENSG00000223947_9 (sequence is synthesized)
tggaggcaggcaatttcagggctggaacagggactctgatctcatgaggaatctttgcatcctgtatcaggatctctgacccagtccttctccaatacaaaggaaagacgatcaagagcg

SEQ ID NO: 920434 - DNA, 120 bp, Artificial Sequence
  ENSG00000223947_10 (sequence is synthesized)
tgaaggccagctagcgcagatgggcgggccgcaggtggctagagcaaccggtgtactctcgggggatgcagcgagatgcgccatctctgacggcaaaccgaccgacgatgcctacacggg

SEQ ID NO: 920435 - DNA, 120 bp, Artificial Sequence
  ENSG00000223947_11 (sequence is synthesized)
gcacctggttcctgtccagtatggctatagagtgtgcccaagaacctcggaggcaagagaaacacggtcagtattcctgatcatttccactgcagcaagcgctgcactccagagatggtt

SEQ ID NO: 920436 - DNA, 120 bp, Artificial Sequence
  ENSG00000223947_12 (sequence is synthesized)
accatccaggagttctgaaacgtatgcagtgtgcacaaaagccaggggtttagttcagactcctctccccatctcctgtggccacccccctcatccattggttaaagctgattgtgtccc

SEQ ID NO: 920437 - DNA, 120 bp, Artificial Sequence
  ENSG00000223947_13 (sequence is synthesized)
gacttcagtgccggggcattatcggggcggctgctggaggcctgacgactcagacagactgctgacccttcggggaggacgtaggggctggggctgtgctgggggtggttgggggtagcc

SEQ ID NO: 920438 - DNA, 120 bp, Artificial Sequence
  ENSG00000223947_14 (sequence is synthesized)
tccctggctgttgtgagtaggtggagagaagtagcgagtcctgctgctcactgtgcaaagaggttggtgcctgtacctagaaaaaaaagaacaaagggcttcagaggtggttctgatgtc

SEQ ID NO: 920439 - DNA, 120 bp, Artificial Sequence
  ENSG00000223947_15 (sequence is synthesized)
cgctcctcaactgtcttacaaggcagtgcggggcatgctgcaggttgagttagactacagggctgtctttcttggggggtcatgtggggagaggtggctctggcaagacctgggggtgtg

SEQ ID NO: 920440 - DNA, 120 bp, Artificial Sequence
  ENSG00000223947_16 (sequence is synthesized)
gtggggatggggactaagggaaccttagggtgaattctgaagctaagttctccgccaatagtgggggcaccttctggcccaatcgactgaggcctgtggctatggctatggggaatggtt

SEQ ID NO: 920441 - DNA, 120 bp, Artificial Sequence
  ENSG00000223947_17 (sequence is synthesized)
tcgtaaacacgtgcacatgatctacatgtagccacaatgtttttggatgatggaacctgaggccacatgcaggtagttgacagggcagaatccaaacacacatacagtttgtacactttt

SEQ ID NO: 920442 - DNA, 120 bp, Artificial Sequence
  ENSG00000223947_18 (sequence is synthesized)
cactgctggtccctgatcccgtagctacctccagattcaccagcacctactaggagcatcttgattggaagtttagaagctttgactgaccaaagcctgactttggaaacttcagtctta

SEQ ID NO: 920443 - DNA, 120 bp, Artificial Sequence
  ENSG00000223947_19 (sequence is synthesized)
tcacccactattcccttccatgaaatctcctcctgcaagtaacccagcacccccctgctctcaaagctgcccaggcacagctgccctgaacttttgctcaggctgtctggctggaacact

SEQ ID NO: 920444 - DNA, 120 bp, Artificial Sequence
  ENSG00000223947_20 (sequence is synthesized)
gtccctttatcttcaccctcacccacatttcgggcatttcctggacatcagactctgcagtgggtgccttctgagccctccctctcctcaagtcccttcctccacaaaggcttccccacc

SEQ ID NO: 920445 - DNA, 120 bp, Artificial Sequence
  ENSG00000223947_21 (sequence is synthesized)
acagcactcccactgttcccaaatccgagcctgactgcattctgtgctaacccacctctctgcaccccaccccaagcccctaagggcagtgagtgggccgaagcgctctctgtattcata

SEQ ID NO: 920446 - DNA, 120 bp, Artificial Sequence
  ENSG00000223947_22 (sequence is synthesized)
gcctgcatcttgtctgcaacaggtgcatgcaaacttgtctgttgctcatttcccatccaaaatcacttctgggtctcgagaactgacaagatctgcaaagccaaagtctgagttgactcc

SEQ ID NO: 920447 - DNA, 120 bp, Artificial Sequence
  ENSG00000223947_23 (sequence is synthesized)
cactatgtgtggggtcagggagatctgaaaattatagcacagatggcttagcggcactggaattaaattacgttctagaacttcaaggacagctatcttcatcactatctacagtactca

SEQ ID NO: 920448 - DNA, 120 bp, Artificial Sequence
  ENSG00000223947_24 (sequence is synthesized)
agaggtctcagctactgctcattctccatggctttgcaggtgcaggtggggctgcaggccagggaggaagcccccccaggacagggaagggctggggtgaagaggggcaccctgcacatg

SEQ ID NO: 920449 - DNA, 120 bp, Artificial Sequence
  ENSG00000223947_25 (sequence is synthesized)
ggtgagggaaggccaggcccttctgcagcttggcagacgcagacgtgtggctcccacgtgaacctgcggaccagtggctctcaccctccctgcttttgacatacttggcacttgcttgaa

SEQ ID NO: 920450 - DNA, 120 bp, Artificial Sequence
  ENSG00000223947_26 (sequence is synthesized)
gtaatttttgccttcgaagtagtgaccacatgtaaatgagctccaaattttcctggcaagcccaatttcacacatcactgtatttatgaaggcaggttaatggatctttaactaaatgtg

SEQ ID NO: 920451 - DNA, 120 bp, Artificial Sequence
  ENSG00000223947_27 (sequence is synthesized)
atttaactttatgtttatataggactttataaacacactgaaaagtccaacatagtcatcaatgtttttcgacttttgctctaaaaactgtgaacatatcaagatgcaaatccttgagta

SEQ ID NO: 920452 - DNA, 120 bp, Artificial Sequence
  ENSG00000223947_28 (sequence is synthesized)
gaaactacttttttaaaaaagaacctttttagcacataaccacataaggcataatagccgactcgtaatttcatgtactctgtagacatagacttcataaactttaagcatgaaaaacaa

SEQ ID NO: 920453 - DNA, 120 bp, Artificial Sequence
  ENSG00000223944_0 (sequence is synthesized)
agactgaatgggagagtgtgactgctccctgcaaatcctccccatgtctggactgaggaaatagctcgaagcaccatccgtctcctggtggagcagcagcagcgtccagaggctgggggc

SEQ ID NO: 920454 - DNA, 120 bp, Artificial Sequence
  ENSG00000223944_1 (sequence is synthesized)
tgaggctccttgtttccaacaagctcctaggtgatggatgctgctggcaggtgcaccacactgagttgcaagactcgtccctccaggcacccccttcacaggttcagcatcctcgctgcc

SEQ ID NO: 920455 - DNA, 120 bp, Artificial Sequence
  ENSG00000223944_2 (sequence is synthesized)
atctcctcacaaatgcggcctctgaagacatacccattccttttcttctgagcccgcagaagacaaccctgcctagcttctttgcagctacgtggagacatgtgactagtttggccaatg

SEQ ID NO: 920456 - DNA, 120 bp, Artificial Sequence
  ENSG00000223944_3 (sequence is synthesized)
ggatgtgagaagagatgatgaaactcggaggagaacttgtgagatcgccgtgactgcttttcccctgccacagtggctaagaggataaggctatcaagggtggagcctctctaggcctgg

SEQ ID NO: 920457 - DNA, 120 bp, Artificial Sequence
  ENSG00000223944_4 (sequence is synthesized)
gttcctgggtgcctgtgtggagccgagaccccaggctaactcacaatgaacacgccgtgtgaggaagacgtaaagctttatgtattaagccactggagcttagggtttaatttgttactg

SEQ ID NO: 920458 - DNA, 120 bp, Artificial Sequence
  ENSG00000223944_5 (sequence is synthesized)
tggtgtagcctaccctattctaaccaatacaaggatctttggatgactctcctccaggaattcatatacaaaaacatcctccctgcatgagaactccctatatggttccagcagtatctc

SEQ ID NO: 920459 - DNA, 120 bp, Artificial Sequence
  ENSG00000223944_6 (sequence is synthesized)
tcacctgcaatagtgactaaagtcaagactctctgctggctatttcgtttctactgaactagaatataaatttgagcaggacatggaccttttcaatcttgcctaccctcatatcccagt

SEQ ID NO: 920460 - DNA, 120 bp, Artificial Sequence
  ENSG00000223944_7 (sequence is synthesized)
aacaagtggctagcagagtacctgacacatcatggatgctcaaaaaatatttcttgactaactggatgaataaatgagtgaatcatcatcaggattgctgctcgtgaacccctcctcttg

SEQ ID NO: 920461 - DNA, 120 bp, Artificial Sequence
  ENSG00000223944_8 (sequence is synthesized)
cttccgtagagttcaagacaacactgctcctcctatgaaccaaaagaaagtgccagcggctgttggtgacgaagctcttcttttctaggcaataaagccccctccagttgtagcagtttt

SEQ ID NO: 920462 - DNA, 120 bp, Artificial Sequence
  ENSG00000223944_9 (sequence is synthesized)
ctctggaatggtaagtccctcagatctgggagttaattgttactgtggcagaggccaggccaccctgactgatagaagaccttttgggagattcttctttccctggatgaggttgtaccc

SEQ ID NO: 920463 - DNA, 120 bp, Artificial Sequence
  ENSG00000223944_10 (sequence is synthesized)
tgtttatgttggataaacaactcaaaaccagtagcatagaatgttagtgccagaggggaactgagagactaacatgttttccttttgcaaatgaggaaactgaggcagagagaagggagg

SEQ ID NO: 920464 - DNA, 120 bp, Artificial Sequence
  ENSG00000223944_11 (sequence is synthesized)
gaaattgattaaggcctttggcttattggttcattcctttgatcgctgtgatggatgtttccctgtctttttaacccccctggcttgtgtaccctgttccaaggaattctccaactcatg

SEQ ID NO: 920465 - DNA, 120 bp, Artificial Sequence
  ENSG00000223944_12 (sequence is synthesized)
aattctccaactcatgactctccaacttatgatgggaaacagagcccacctcccactcaagaaaaaaacaatgcttgcagcactattctcaattgcaaagacatggaatcaacccaaatg

SEQ ID NO: 920466 - DNA, 62 bp, Artificial Sequence
  ENSG00000223944_13 (sequence is synthesized)
gcagtcataaaaaggaggaatgggatcacgtcctttacagggacatggatgaagctggaagc

SEQ ID NO: 920467 - DNA, 80 bp, Artificial Sequence
  ENSG00000223944_14 (sequence is synthesized)
ttataagttcaacacactctggggtctgttgggggacgggaagaaagcatcaggaaagatagctaatgcatgctatgctt

SEQ ID NO: 920468 - DNA, 82 bp, Artificial Sequence
  ENSG00000223944_15 (sequence is synthesized)
ggaggagatcaacacactctggggtctgttgggggacgggaagaaagcatcaggaaagatagctaatgcatgctatgcttat

SEQ ID NO: 920469 - DNA, 120 bp, Artificial Sequence
  ENSG00000223944_16 (sequence is synthesized)
gtaaatgtgcagccatcccgcgtccccgcgctgccgcagcccctcactcggggccctcaaagagcacgcttataaaaacattcttcccgtgatggagtgcttcctttgggcttcttcggc

SEQ ID NO: 920470 - DNA, 120 bp, Artificial Sequence
  ENSG00000223944_17 (sequence is synthesized)
ttgtaacagattaaaggcgaacaggcatttgtcatggggaagtgtacccagttgtgctggaaaatggacttttcgatgagcgtgagagcttgaacctgtcacagaggggagagcctgtgt

SEQ ID NO: 920471 - DNA, 120 bp, Artificial Sequence
  ENSG00000223944_18 (sequence is synthesized)
aagactctctgctggctatttcgtttctactgaactaggtattgtatttgctctgttattaccttgctgccctgacaatcctacaatccacacagcagccaaagcgatcttttgaaaaga

SEQ ID NO: 920472 - DNA, 120 bp, Artificial Sequence
  ENSG00000223944_19 (sequence is synthesized)
atgcaaaatcaaatcagatcatgccattctcttgcttaaagccggccgattcaccatccctgcaaaccatgatactcagaatcaaatgcagattccttgctatggcttaaagactctctg

SEQ ID NO: 920473 - DNA, 120 bp, Artificial Sequence
  ENSG00000223944_20 (sequence is synthesized)
ggctgttccctctgcctggcttgctcttcttccctcttgttatttagagctcagcttaaatgtcaactcaagggtatcttccctgaccattgcaactaaaatgcccctcactcacacatg

SEQ ID NO: 920474 - DNA, 120 bp, Artificial Sequence
  ENSG00000223944_21 (sequence is synthesized)
tgtcattccattgtaccactctgattaatgtctttataacactgatcaacatctgaaagtattttgcttaattatttacttactcatttttttctcctttttccccactagaatataaat

SEQ ID NO: 920475 - DNA, 120 bp, Artificial Sequence
  ENSG00000223944_22 (sequence is synthesized)
ggacaggcagctagcctcccctggggcaggcagggaccagaagagccccagagggtcttgtagaacagaggcggaggaggagaggacagaaaggacagggagacaaccaaggaggccctg

SEQ ID NO: 920476 - DNA, 120 bp, Artificial Sequence
  ENSG00000223944_23 (sequence is synthesized)
tttgaagtttacagatttcttggatatagcagtgaaaggtttgtattttttatctgtaaggaaaaattgtgaagtttacatcattgcaaaataaacagaactgtgacttctgtttcacaa

SEQ ID NO: 920477 - DNA, 120 bp, Artificial Sequence
  ENSG00000223942_0 (sequence is synthesized)
cttgataatgtagctgggataaactagaaaacaagtttccccatggtcagctggaaatactcatattgcacttggacggagcagattgtttctgaagagggccagtgatgagcaccagtt

SEQ ID NO: 920478 - DNA, 120 bp, Artificial Sequence
  ENSG00000223942_1 (sequence is synthesized)
caaatcattgttcctccatatcatattcagagctagtgctttcatgctgatgtggaaacatctaagaggactcataatgtcaacatgcatttccccaataagtaaacaagagaaatgaca

SEQ ID NO: 920479 - DNA, 120 bp, Artificial Sequence
  ENSG00000223942_2 (sequence is synthesized)
ttcttaaagaggctagtgtcacacatgtggaaacatctaagaggactcataatgtcaacatgcatttccccaataagtaaacaagagaaatgacactgacaagaacaagaaatgattatt

SEQ ID NO: 920480 - DNA, 120 bp, Artificial Sequence
  ENSG00000223942_3 (sequence is synthesized)
tcttctgccaaagttggaagcgaccagatacggatgtgcgtattttaagatcatggtttgtgctgttggagtaggaataagtaaaagctctttaatttgaatctgaaaagaaaatgaaaa

SEQ ID NO: 920481 - DNA, 120 bp, Artificial Sequence
  ENSG00000223941_0 (sequence is synthesized)
cgttcctctgcttacgacattttcatgaataagccagaagatagtcagcacagaagcctccctacaacctggaaaaagaaatgagctttcactttgaatatcacacagacatactgaggg

SEQ ID NO: 920482 - DNA, 120 bp, Artificial Sequence
  ENSG00000223941_1 (sequence is synthesized)
tcacttgaccacgtacatctgaacctgcaagaccctcgcacagccttcactgaggtgtgaaaactgacagtttccttctcctgccactggttctgcagtaattaaagcttttttgctatc

SEQ ID NO: 920483 - DNA, 120 bp, Artificial Sequence
  ENSG00000223941_2 (sequence is synthesized)
atgtttgttttactcactgcctctcgttcctctgcttacgacattttcatgaataagccagaagatagtcagcacagaagcctccctacaacctggaaaaagaaatgagctttcactttg

SEQ ID NO: 920484 - DNA, 120 bp, Artificial Sequence
  ENSG00000223941_3 (sequence is synthesized)
aatatcacacagacatactgaggtgggaaactacatgtgcgtgcttgacacaacttgaaaacaatacaaaacaacaaatcacaattgcaaaatcatacaacacaaatggaatcacagtcc

SEQ ID NO: 920485 - DNA, 120 bp, Artificial Sequence
  ENSG00000257642_0 (sequence is synthesized)
agatcacaccacttagctgtcattttcattcttccaaacagaactgatctggcatgaaggagagagaagaggtgtatgagtgaaattcatctgacaagaaaaagaaagcaagagtgccac

SEQ ID NO: 920486 - DNA, 120 bp, Artificial Sequence
  ENSG00000257642_1 (sequence is synthesized)
tgggttagggtctccccgaccgagctggtctcggcaagtggcgtccatcgtgggggctcgaatccaagtcaaaggattgctggagcgacggttggaatggaaaactagctggaggacacc

SEQ ID NO: 920487 - DNA, 120 bp, Artificial Sequence
  ENSG00000242973_0 (sequence is synthesized)
gggcccaaggagcttgttgggacgttcaggagaccccgaggtgggaggttttggacacaacctgcatctcctcagagcgccttcgactctggaggccgccgtgtgacggcctgacacagg

SEQ ID NO: 920488 - DNA, 120 bp, Artificial Sequence
  ENSG00000242973_1 (sequence is synthesized)
aaatcagattctccacgttacctactcaagtcataagcgtctgaagaaagtgctctgtaaattctcagcagaatatgcttttaacaattctttaaaaacaataaagtcataataaaaatc

SEQ ID NO: 920489 - DNA, 120 bp, Artificial Sequence
  ENSG00000242973_2 (sequence is synthesized)
aggcccccggcgccggcattccgggcgtcgagcacatcttgacggcgcggcgcggcccccacttccggaaattaagggccgcgcctcagggcctcgaaatcctccgcgccgcctgaaggc

SEQ ID NO: 920490 - DNA, 120 bp, Artificial Sequence
  ENSG00000242973_3 (sequence is synthesized)
ctaggttcaaaggacccagtggaggggaagaatgccggcgaggccttttctcggcaactcccccgtcgagggtcctccgggactcccgccacggactgggagaacatactatttcatatc

SEQ ID NO: 920491 - DNA, 120 bp, Artificial Sequence
  ENSG00000250692_0 (sequence is synthesized)
cggcggcgggggcgcgcactcctgcgtggtctcgtactcgtcgtcctcggggatgcggaaggggctggcaggcaggctgcccaggctgccgccgagcgcgcaggtcccgcgccgcggtcc

SEQ ID NO: 920492 - DNA, 120 bp, Artificial Sequence
  ENSG00000250692_1 (sequence is synthesized)
ggcttctgcagagtggcctggtagctgcaaagaaccttggtgggccaagaggagttgttcttcctggcagtgatcatgggaatgcctttgtttacccctgcagcctggtcagggagtggc

SEQ ID NO: 920493 - DNA, 120 bp, Artificial Sequence
  ENSG00000250692_2 (sequence is synthesized)
cctggccccctccaggcctgctatctctgcttgtgagaagcccgccagtggcaccatggacccctggcatctaggaaagtgctggtgtgcaaggaacagcccccaccgttgctgaggagc

SEQ ID NO: 920494 - DNA, 120 bp, Artificial Sequence
  ENSG00000250694_0 (sequence is synthesized)
agaagctgttttcagagattcagaggcaggcagatgaccacagcaagaagaacagacagaaatccgtaaggataattcgtctaagctaattatagttaaagcattactgacttataaaaa

SEQ ID NO: 920495 - DNA, 120 bp, Artificial Sequence
  ENSG00000250694_1 (sequence is synthesized)
ggattatgctctcaaaggcaatcacatttatattatttttatttaaaatatatattacatgtaatataaactatacacacaatatattgaactatatggaaattgaaactgtgaaatccc

SEQ ID NO: 920496 - DNA, 120 bp, Artificial Sequence
  ENSG00000250694_2 (sequence is synthesized)
ctgggctgcacctcttttattgactactattttcttaccacatttggtgacacagcatacgtgctcccaatcacattcaatgattcttaatcagttctcctaccactctcctccacacac

SEQ ID NO: 920497 - DNA, 120 bp, Artificial Sequence
  ENSG00000250694_3 (sequence is synthesized)
tgacatatgcatcaattattcatggctattatcctttattggcaaaacctgattcagacaagaagcagcacatagtttcttctatgtggaaaaaataaactatttttttaatatcaataa

SEQ ID NO: 920498 - DNA, 120 bp, Artificial Sequence
  ENSG00000250696_0 (sequence is synthesized)
atagaccctgtgattccccgtggagacctgatggctgagttgcttccagtcccttttgtgctcacacctagaacttctctaagaggcaagatggagcgaagctgtgggaaacttccagct

SEQ ID NO: 920499 - DNA, 120 bp, Artificial Sequence
  ENSG00000250696_1 (sequence is synthesized)
ccactttcctatgtacctgtgcctatgacaggactaacagacagaatgacctttcaggaaagattaaaaatccaatgctttcagttttcttccacttctggattcaggattatgaccatc

SEQ ID NO: 920500 - DNA, 120 bp, Artificial Sequence
  ENSG00000250696_2 (sequence is synthesized)
aaaaccacagggaagagacgtccgcgtcggagaccaccctcctacctgcaaacttccagaaacaaaacagacaaaactttgtgatgataaatatcacagttgccacacaggccagcagaa

SEQ ID NO: 920501 - DNA, 120 bp, Artificial Sequence
  ENSG00000250696_3 (sequence is synthesized)
acccaatcacatccaaagagtggtactggaaccaggcacctatgatgttgagacaagttcatccagaaagctttactgatttgcttgtcataaggcagacatcatctgctctaatagttt

SEQ ID NO: 920502 - DNA, 120 bp, Artificial Sequence
  ENSG00000250696_4 (sequence is synthesized)
gcttcaaatgtcagacataactaatctctttttcccttcttcccttttctagcaaacttccagaaacaaaacagacaaaactttgtgatgataaatatcacagttgccacacaggccagc

SEQ ID NO: 920503 - DNA, 120 bp, Artificial Sequence
  ENSG00000250696_5 (sequence is synthesized)
agaaacccaatcacatccaaagagtggtactggaaccaggcatatgagtacatgctcagcatcatgagccattttaagtgctgtaagaaagactatgaaaatgcgatgtgagaattatca

SEQ ID NO: 920504 - DNA, 120 bp, Artificial Sequence
  ENSG00000250696_6 (sequence is synthesized)
tctgtaagttcctaaaaaggaattttatcaaggcacctatgatgttgagacaagttcatccagaaagctttactgatttgcttgtcataaggcagacatcatctgctctaatagttttag

SEQ ID NO: 920505 - DNA, 120 bp, Artificial Sequence
  ENSG00000250696_7 (sequence is synthesized)
ttaaagatgtaggataaacttcaaatttaagagtggatgcatcattgggatcaaaaagaatggaagctgaagatgccagtacagtcacctcatgacctctctgaacaagctctttcagga

SEQ ID NO: 920506 - DNA, 120 bp, Artificial Sequence
  ENSG00000250696_8 (sequence is synthesized)
ttgtcttcatattcatccaatggctgtattctgcggcccacaccagcacttttccacaactcccagagctaaagtaacaactgagatgtatcagcagaagaactgaagtccatttcagag

SEQ ID NO: 920507 - DNA, 120 bp, Artificial Sequence
  ENSG00000250696_9 (sequence is synthesized)
tcatcctggtgcaatgcgatcattcttttccagtcactgtttctttctcatacttatatacagagataaatcaatcaagttaaaatataactcctccaatccaaagtaaatatattatag

SEQ ID NO: 920508 - DNA, 120 bp, Artificial Sequence
  ENSG00000250696_10 (sequence is synthesized)
gagcatcctgagtacatggatggcaaggagacaaacaaagttcgattacttcatatttactcaaggatgttttatgtttcttttatgtttatattcactgtcatccacctaagattaatg

SEQ ID NO: 920509 - DNA, 120 bp, Artificial Sequence
  ENSG00000250696_11 (sequence is synthesized)
accttgcaagtaccctgttttatgtaacctactttataatagtgtcaagaacagtggcaagtgagagagtcctgcagagcccttgacacagaataagagatgaaatgattgtacaatgca

SEQ ID NO: 920510 - DNA, 120 bp, Artificial Sequence
  ENSG00000250696_12 (sequence is synthesized)
aacagcatttttgaatatcgtggttcaatgaatatcttgtaaatctttgttggagtataattcaaataccatatgattcatcaattagtatttaaaattaagtatttcctagtaaattca

SEQ ID NO: 920511 - DNA, 120 bp, Artificial Sequence
  ENSG00000250696_13 (sequence is synthesized)
cagacttgtgcatccaacgtaacaatcagttttatctaaaaaaacaaaaaactcctgtgtattagttctcatctccccaccaaatttctgcatccaccctgcactaggcaaccagtaatc

SEQ ID NO: 920512 - DNA, 120 bp, Artificial Sequence
  ENSG00000250696_14 (sequence is synthesized)
taatttctgcctctagaaacacacctattcaggatctttttaaaagtaaacggaacaatatagtatgtggtcttttgtggctggcttcttttatttagtttaatgtttttaaaggaccat

SEQ ID NO: 920513 - DNA, 120 bp, Artificial Sequence
  ENSG00000250696_15 (sequence is synthesized)
tagtgtaaataaggacttcatttttattgccaaattgtatcagatgctatttataaacacaatttatttattcatttataagttgatagatattgattttcttccacttttggccattat

SEQ ID NO: 920514 - DNA, 120 bp, Artificial Sequence
  ENSG00000250696_16 (sequence is synthesized)
gaatagcattgattaacattgatgtgcatgaattctgtggacatgtttttatttttcttggggatatgcctagaaaggcaattactgaattatgtggtaaatgtaaatataaccttttga

SEQ ID NO: 920515 - DNA, 120 bp, Artificial Sequence
  ENSG00000250696_17 (sequence is synthesized)
ggaattgctagactttttcagagtgagtgaataattttctattctcaccaacaatgtatgagggtttcaatgtctccacaaccttgcccacccttgtctttcacataaccaaaaaagtta

SEQ ID NO: 920516 - DNA, 120 bp, Artificial Sequence
  ENSG00000250696_18 (sequence is synthesized)
ttttttattttaatttataaacacactccaacagacccaaaaaaggaaggtttccttccacatattggagggaaaagtgaataaattaaataataacttacctaatacttcactgtaaaa

SEQ ID NO: 920517 - DNA, 120 bp, Artificial Sequence
  ENSG00000250696_19 (sequence is synthesized)
ctaatctcacttctttttgttaaaaatctcaaatgcaaagtcaaaatgaagaaaatgcaacagatttttcacctttctacaaatgtgttttggtactaagttctgatatgacaacagtta

SEQ ID NO: 920518 - DNA, 120 bp, Artificial Sequence
  ENSG00000250696_20 (sequence is synthesized)
catcagaaggaggtaatgtaagtcctccacagagttcttggtacatactgccagttgtaaatggatgatagtagaccaaatgtataacaaatgtttaacagactaagctgttcagataac

SEQ ID NO: 920519 - DNA, 120 bp, Artificial Sequence
  ENSG00000250696_21 (sequence is synthesized)
agctcactactgagaactgacatctgcaagaatgacataaattctggaatcttgttgttcctcataattttcttgttcaaaacagcatactcaatgagcttttgaacagtatcagaacat

SEQ ID NO: 920520 - DNA, 120 bp, Artificial Sequence
  ENSG00000250696_22 (sequence is synthesized)
tcatgatatgtagtttttgcatctttgaatcatatgccaacaatgtactctttggaaacttatatgtccacatcttgatcaatttcataaatatgaaatcaagttccttctgagtaaaag

SEQ ID NO: 920521 - DNA, 120 bp, Artificial Sequence
  ENSG00000250696_23 (sequence is synthesized)
atgtgggataaacctcaaatttaacagcagattgttggaatcaatgaggatggaagctgaaggtgacaagcacagttacctcatggtgttctgagcaagttcatcaagtatcaacattaa

SEQ ID NO: 920522 - DNA, 120 bp, Artificial Sequence
  ENSG00000250696_24 (sequence is synthesized)
attgatacaaagactgtatttcatcggccacaccagcacattctcgcaggattcagggctaaaatacaactgtcagcataagaaacaaaaaagcccatttcttagacaacttgttaaaat

SEQ ID NO: 920523 - DNA, 120 bp, Artificial Sequence
  ENSG00000250696_25 (sequence is synthesized)
gctatctttctttataactttctctaacttggtacatatcaatatcaatcaatgtcacaatgatttaagtattgacaatagaggttttggaaagcaagtgaataaagaaaaggatgaatg

SEQ ID NO: 920524 - DNA, 120 bp, Artificial Sequence
  ENSG00000250697_0 (sequence is synthesized)
attatgctccaagacactgaatctgaaaggatgcatccagtcttgccaagtggtttcactaccaaggccagtctccatctatgatagacccaaggaagatcatttacaactagaatctag

SEQ ID NO: 920525 - DNA, 120 bp, Artificial Sequence
  ENSG00000250697_1 (sequence is synthesized)
cttgaatatcagcaccaggaagagcagtacaaactggagaagctgggtgtcagcccagaacgggaactaaataagcactcgtagcttgaatgaataaacaagcagctcccacttggatag

SEQ ID NO: 920526 - DNA, 120 bp, Artificial Sequence
  ENSG00000250697_2 (sequence is synthesized)
tatttccacacatcaggacttgagaggtaagtgggtagagctcggtgcctattacttatcttctggaattaacatggattgtgctgagaactcaagcaaaaataaaataacttttagact

SEQ ID NO: 920527 - DNA, 120 bp, Artificial Sequence
  ENSG00000250697_3 (sequence is synthesized)
gactccagggagctccctcagttgggctcagaacctgcgaggatggcagcggtgtccagcagtgaagactgaaggtgtccacagctgtgataggggcttctgggtcctcttgcttgcttt

SEQ ID NO: 920528 - DNA, 120 bp, Artificial Sequence
  ENSG00000250697_4 (sequence is synthesized)
tatgaagagatccatgtgaagaaccaaggcttcctgccaacagccagtgagaaactgaggtctccagtgaacagctatgtgagtgagcccttgtggaagtggatcatccagccccagtca

SEQ ID NO: 920529 - DNA, 120 bp, Artificial Sequence
  ENSG00000250697_5 (sequence is synthesized)
agccttcggaagactgcagacccacttgacatcctggctgcaacttcatgaaagactaagctgcacctagattcttgattctcttaaagtgttgggaataataaatatttgttgttttaa

SEQ ID NO: 920530 - DNA, 120 bp, Artificial Sequence
  ENSG00000250697_6 (sequence is synthesized)
gcagggtgcgccagcagggtgcgccagcagggtgcgccagcagggtgcgccagcagggtgcgcgatagcagaagcaggaagagagccgggggaagacacctaccctggccggaagacacg

SEQ ID NO: 920531 - DNA, 120 bp, Artificial Sequence
  ENSG00000250697_7 (sequence is synthesized)
aagatccagaaaaaggccatccgggtacaacgtagcagttacatcggactgtgacacttactgtttacaggagactataaaactttgcccagtcgtcacttggggcccgcctgcacccag

SEQ ID NO: 920532 - DNA, 120 bp, Artificial Sequence
  ENSG00000250697_8 (sequence is synthesized)
gccgtcattaaaacagcatgttgctccacaccgcctcgtgttgtctgttggtgtgctctcagggtggaaacgatacaagaacgttacacttacaggctttagtttatattattctcatag

SEQ ID NO: 920533 - DNA, 120 bp, Artificial Sequence
  ENSG00000250697_9 (sequence is synthesized)
ctggggtatgtaggcaatggcttcaacccacgtattatatgtattcaattactcagaagaccctgtactccacttattttggttgaataagcagactgtaaaaccaacaaaaaatagaaa

SEQ ID NO: 920534 - DNA, 120 bp, Artificial Sequence
  ENSG00000250697_10 (sequence is synthesized)
tgagaccagcctgggcaacatagcaagacaccatctctaaaaaaagtagccaggcagagtggtggcaaatacctgtagtcccagctgttcaggagtctgaggtgggaggattggattgct

SEQ ID NO: 920535 - DNA, 85 bp, Artificial Sequence
  ENSG00000250697_11 (sequence is synthesized)
aaaaagtagccaggcagagtggtggcaaatacctgtagtcccagctgttcaggagtctgaggtgggaggattggattgcttgaca

SEQ ID NO: 920536 - DNA, 120 bp, Artificial Sequence
  ENSG00000250697_12 (sequence is synthesized)
tcaaaaaaaaagttttgaacaaaactttgtaaatttttaaagtaaaaattcactttaatatttagctaagtgaataagaattagcttagatgaccctcaagaacgaaagtgtagttctcc

SEQ ID NO: 920537 - DNA, 120 bp, Artificial Sequence
  ENSG00000250697_13 (sequence is synthesized)
actcttttaatgccttttggagcttattatacaatattttaaatatgaaaaatatataaagaataatacagcaaacttttcctgaggttaagggtctttagggaactcagctttaatctg

SEQ ID NO: 920538 - DNA, 120 bp, Artificial Sequence
  ENSG00000250697_14 (sequence is synthesized)
gtccaattccacatcttgttaccccttttaatacctacacctttaatacccaagactctgggcatagaaattgtcaaattccctgaaggcagctaaataattagctgcagttttccattc

SEQ ID NO: 920539 - DNA, 120 bp, Artificial Sequence
  ENSG00000250697_15 (sequence is synthesized)
tactttctttgtgagtataaatgagttttacattttaaaaggcatgtacaatatttcattgagcactctgtttttagtgggaagtttttttcagggtacctaacctccttcattttttat

SEQ ID NO: 920540 - DNA, 120 bp, Artificial Sequence
  ENSG00000250697_16 (sequence is synthesized)
caaaatgtactcgctattatgagtttaaaatgtttttaattttattttatttacgcagttgtctctgtcctcactattaaaattggaatgcaaataaaaacaaaatggccaagaacagaa

SEQ ID NO: 920541 - DNA, 120 bp, Artificial Sequence
  ENSG00000250697_17 (sequence is synthesized)
aaccaaaggaatcttcttgaatatcagcaccaggaagagcagtacaaactggagaagctggggtcacactacgccagtcctgattcagtgtaagggatgacagacctacaagaattacag

SEQ ID NO: 920542 - DNA, 120 bp, Artificial Sequence
  ENSG00000250697_18 (sequence is synthesized)
gacacttgtgaatatgggcaccatgtcttctctttcttggtttcagacacacagaagaattacatttctctactcccatgcaggcagatggggacatctgagtactaatggccaactgat

SEQ ID NO: 920543 - DNA, 120 bp, Artificial Sequence
  ENSG00000250697_19 (sequence is synthesized)
tatgagtagaagtaacaccaaagcctttgtctgtgaaagatctgcaattctctcttctattgcagcaatggaggtcacatacttcaaatggtacacagctagtaaggtggtaaagccttc

SEQ ID NO: 920544 - DNA, 120 bp, Artificial Sequence
  ENSG00000250697_20 (sequence is synthesized)
atcagactgggtccttgagtgactatgtaacggatgcaagaaacaaaacttttatgtgtgtcttaaactgctgagattttggagttgttagttaacagaatgtagcctagactattctga

SEQ ID NO: 920545 - DNA, 120 bp, Artificial Sequence
  ENSG00000250697_21 (sequence is synthesized)
ttttcaaagtgttcttccatgaaaaataagttctaaactgaattgttggcagtcaacccaaatctttcttttatagccactgctggttgatcccataatataaattaattcataattgtt

SEQ ID NO: 920546 - DNA, 120 bp, Artificial Sequence
  ENSG00000250697_22 (sequence is synthesized)
tctgaccttcagtttcttggacaattcaatttattctccagttctgttcccacctttagtcactagaagatgcagtgttgtcaccacttattagtaaatcacaaaacgaacatttataaa

SEQ ID NO: 920547 - DNA, 120 bp, Artificial Sequence
  ENSG00000250698_0 (sequence is synthesized)
agtgcctcacagacagcatcccagcacatcatggagagctaagtgacagaacaggcagctcctcttctccctggaggggagaacagagatggatttctatcaaaaggagccactatgtgc

SEQ ID NO: 920548 - DNA, 120 bp, Artificial Sequence
  ENSG00000250698_1 (sequence is synthesized)
tgttacatgccatatacatgggaggttgtgacagttgtattaaaacctccaggactggctatctatgactggctccacagtgctcagggcaagaagagtcaactgcaggtcttttgtggc

SEQ ID NO: 920549 - DNA, 120 bp, Artificial Sequence
  ENSG00000250698_2 (sequence is synthesized)
ttaggaagtacggggaaagtaaaaccagaaatacttcccctaactttgactcgtataaacacattaaggaaaggaaaggttgaaaggatgttcccacactcaaggaacttgtacaaccaa

SEQ ID NO: 920550 - DNA, 120 bp, Artificial Sequence
  ENSG00000250698_3 (sequence is synthesized)
gtcaagcgaggcaagtcaagaagaaaacagaaccccaatcatttctccagatgctctgaatcacctccagggcacaggcatagatgttccccaaccctgaatgctacagcaagtgcatat

SEQ ID NO: 920551 - DNA, 120 bp, Artificial Sequence
  ENSG00000250698_4 (sequence is synthesized)
ctacttacagcagatttgtaaacagatctattctccacttaaaaacattttttcaagaccagtgattaaaaatgtaaaaactaaagcctgaaaaaatatcagttccccttgcagagccca

SEQ ID NO: 920552 - DNA, 120 bp, Artificial Sequence
  ENSG00000250699_0 (sequence is synthesized)
tcgctcccttccccgccgcccaacccctccctcgatgaggtcctcaactatcccccaccccggaaggctccgggcgaggctccgggcgaggctctgggcgaggcgcagctcccccaacgc

SEQ ID NO: 920553 - DNA, 120 bp, Artificial Sequence
  ENSG00000250699_1 (sequence is synthesized)
cacccaacacccacccgctcccccagcttccagggacgccggggtgttgccctgcagcgcgcaacaaacacttccggaaaaggtcagaaaccactattagaactttttcttacaactcaa

SEQ ID NO: 920554 - DNA, 120 bp, Artificial Sequence
  ENSG00000250699_2 (sequence is synthesized)
ttagaactttttcttacaactcaacagccaaaacaagagaaaaaaaaccaaataaccggatttttaaaatgggcaaactgccttaaaagacatttctcaaaagaagatatacaaatggcc

SEQ ID NO: 920555 - DNA, 120 bp, Artificial Sequence
  ENSG00000250699_3 (sequence is synthesized)
gggtgctccttccatgctgaaagaaagactgacagacgggaggtgtgcccctctccatccgtctggcccttcccgccagggccttgcagggcggactccacctcggcagagggcatccca

SEQ ID NO: 920556 - DNA, 120 bp, Artificial Sequence
  ENSG00000249628_0 (sequence is synthesized)
acagcctttgtggggcctacggggcagtaggagacaggacgcttgtcctgcggaatggcaaggaatcagctctccatttcagggcaaagtggggcctggattgtgggccttgaacatgaa

SEQ ID NO: 920557 - DNA, 120 bp, Artificial Sequence
  ENSG00000249628_1 (sequence is synthesized)
ggcaggtgggcgagggactaggggaccgcgtgaggcccgacgtgcacacggcagggcccggcacccatggttgcgttcggtcggccttggccggctggctcctgcttggaaacttgctgg

SEQ ID NO: 920558 - DNA, 120 bp, Artificial Sequence
  ENSG00000249628_2 (sequence is synthesized)
gtggtgtctgcgggaaacagtactgagtctggtgaggaggcaaacgctcagaatctactgcaggtgttagttctgcagaggagtcttcctgcttaagggctcatttgatgttctggaaat

SEQ ID NO: 920559 - DNA, 120 bp, Artificial Sequence
  ENSG00000249628_3 (sequence is synthesized)
gagtcttcctgcttaagggctcatttgatgttctggaaatttgccaggtactgaaatacagccagtcttcccaaagattcctccgctcctctgagtgcacgtgtgtgtgtgtgtgtgtgt

SEQ ID NO: 920560 - DNA, 120 bp, Artificial Sequence
  ENSG00000249628_4 (sequence is synthesized)
ggccctggccaagtgtgagggtctccacgtgacgaaggaaatgagtaaacaacttcaacattgttgtttccctctgaggcttgcaaagaaggtgttaagagcacaagatttaaatcataa

SEQ ID NO: 920561 - DNA, 120 bp, Artificial Sequence
  ENSG00000249628_5 (sequence is synthesized)
actttattaaaagccaaacagcccaatgtgcgattcttgccaacttggacagagtctttggggtaatgctacacggagctaatccagaaggaatcgagtggaggaagacagcagggtggg

SEQ ID NO: 920562 - DNA, 120 bp, Artificial Sequence
  ENSG00000249628_6 (sequence is synthesized)
ggtgagcccacgcgtccagccaggagaggcagagggaggcacagccccgacacagccacccaccccgtggccagagcagggtggcgcaggagctggcaagacctctaagctgttcctgct

SEQ ID NO: 920563 - DNA, 120 bp, Artificial Sequence
  ENSG00000249628_7 (sequence is synthesized)
tctgctctcctcacactgtttccttagcaaatggagcctccttcacgcctaaagggcccagagcaaggcagggggaggagggccgacccctgcaagactgagaactggccagaattgccc

SEQ ID NO: 920564 - DNA, 120 bp, Artificial Sequence
  ENSG00000249628_8 (sequence is synthesized)
acttgctagactagcaagagagcgaagtcccagtgggtacccccgacgaaggacacccgttccttaccccccacccagaggcacccttcctcctccaaacacaagatgctgctccagcag

SEQ ID NO: 920565 - DNA, 120 bp, Artificial Sequence
  ENSG00000249628_9 (sequence is synthesized)
ttgtgagggcgccacacccagggcaggaatcagaatgaagacacgactccacagtgagcacggggctcaggacaggacccagcgtggcagaccagccagagaagctttcacactgcaaac

SEQ ID NO: 920566 - DNA, 120 bp, Artificial Sequence
  ENSG00000249628_10 (sequence is synthesized)
agcccgctccacctacaccccgactgggctccacgactccccgcaagtgccctgccacctcaggcacctgcccccacgcccactcagcgtcaccccctcggcggttcatctccagaaggc

SEQ ID NO: 920567 - DNA, 120 bp, Artificial Sequence
  ENSG00000249628_11 (sequence is synthesized)
ttggaattgatgacgtttccgcaccacgaggggcttttgcgattctgcgtcactgaacttgcatctcatccccacgatccgacataagcttgccaaggacaggacctcgtggcacccggg

SEQ ID NO: 920568 - DNA, 120 bp, Artificial Sequence
  ENSG00000249628_12 (sequence is synthesized)
acaggggccaccccatcctacatgtgacaaagctgtccctccgtggagctggcgtctctgatttcctcggcctgagggaggcagtgaagatgaaggaaggagggagggcgccttggtggt

SEQ ID NO: 920569 - DNA, 120 bp, Artificial Sequence
  ENSG00000249628_13 (sequence is synthesized)
ttggtggtgggtgcagctctgtgctggtctttctctggccacctagacttcagtggccaaatggcttcaggagacccactggtctttcctgttttattttattttttactttttttttat

SEQ ID NO: 920570 - DNA, 120 bp, Artificial Sequence
  ENSG00000249628_14 (sequence is synthesized)
tattttttttttttttttagtagagatagggatgagccaccgcgcccagccagtctttcctgtattaacaaaagtattggtagtagcattaggtgttaaaaattatcagcacagcttggg

SEQ ID NO: 920571 - DNA, 120 bp, Artificial Sequence
  ENSG00000249628_15 (sequence is synthesized)
tagtagcattaggtgttaaaaattatcagcacagcttgggactggccacaaaattcttctaaatctccccaggataatctcatgagagcacggatgctttgcccagaatctctgcaaccg

SEQ ID NO: 920572 - DNA, 120 bp, Artificial Sequence
  ENSG00000249628_16 (sequence is synthesized)
aggaaggtctgtggcacggggtgggccctgagagacttcacctaaaaactttgggttcattccccacccgtgtgtgtatgtaggtgtctctgtagacagtgattaaaaatactcctgact

SEQ ID NO: 920573 - DNA, 120 bp, Artificial Sequence
  ENSG00000183674_0 (sequence is synthesized)
tagtgaatttggctaaaatggtagagctccctgattctaacctccctgcaggttttccaccacatccactcacctctacatggcgaaaaccaagggttcactctctgtcttcagggagct

SEQ ID NO: 920574 - DNA, 120 bp, Artificial Sequence
  ENSG00000183674_1 (sequence is synthesized)
ccacccagcagcagcgtttgacagagctgttcacttcctcttcctggagctgtggcttccagagcccatgctcagcagttcccctccttcttcgactgctcctctcttaggctcagagcc

SEQ ID NO: 920575 - DNA, 120 bp, Artificial Sequence
  ENSG00000183674_2 (sequence is synthesized)
actcagacattgggaagcaagtttgtcaagatgacagagaaccgaggtaatggattcgagtgatgaaacaggaagttcattcatgagtttttggccacacctccaaagtgacgacttagc

SEQ ID NO: 920576 - DNA, 120 bp, Artificial Sequence
  ENSG00000183674_3 (sequence is synthesized)
cagaaatgggataactgggtttccctacttctcttttatcatcctcaatgagagtgaccaaatattagagctagatggaaccttagtgaaaatctggctactcgtcccgtcccaccagcc

SEQ ID NO: 920577 - DNA, 120 bp, Artificial Sequence
  ENSG00000183674_4 (sequence is synthesized)
tgccacccatttcaagtttgaagagacaaagacacatggaccttatgtaattactggggattaccccaggagtctgtggcaaaagtcagcttcttccctccctgcttccccgccctgtct

SEQ ID NO: 920578 - DNA, 120 bp, Artificial Sequence
  ENSG00000183674_5 (sequence is synthesized)
acatgatttagctttaacactcagttttctaaagggacacgtgggggcagcaaatgtttaggcaaaaacaattccagttctagcctctactgtctacatatgtgtatacatttgggaaac

SEQ ID NO: 920579 - DNA, 120 bp, Artificial Sequence
  ENSG00000183674_6 (sequence is synthesized)
gtttgggaaagggatatttgagagcttctttttcttttttgtggtttagttatttgatgatattgagattgtttctgagccatgtgcttcaacatcggattggggatttcagaaaaagtt

SEQ ID NO: 920580 - DNA, 120 bp, Artificial Sequence
  ENSG00000183674_7 (sequence is synthesized)
ttagtcactgtgattccatttagcttccaaatgtgtctctgctaagagacttaaaagcactcataaatagcacgtgtgtcttctttgcagtgtttgctaattttgagtcacatcttttta

SEQ ID NO: 920581 - DNA, 120 bp, Artificial Sequence
  ENSG00000183674_8 (sequence is synthesized)
gaaaatcatgagatttggtgtcacagagactggaataaatatagtcaaacttattggtgaagatttcctttagctgttttcataatccatttccattgttatgattattgatgaataaaa

SEQ ID NO: 920582 - DNA, 120 bp, Artificial Sequence
  ENSG00000183674_9 (sequence is synthesized)
cattttctttaggtagatacttcttttttccccccaccttgatttaatgtttccactcttattgtcaagtttcttattactccctaataactctcaataaaataatgattcctgggagat

SEQ ID NO: 920583 - DNA, 120 bp, Artificial Sequence
  ENSG00000183674_10 (sequence is synthesized)
tcagagagtcctctctctcggcatggacacaaaagaaaagccatgtgaggacacagagagaaggtggctgtctacgagctaggaagaaaggcctcaccggaaaccaaccctcacagcagc

SEQ ID NO: 920584 - DNA, 120 bp, Artificial Sequence
  ENSG00000183674_11 (sequence is synthesized)
tccatcttggacttccagcctccggaactgtgagaaaataaatgtttgcaattcaggtcggttgtattttgtgaaggccatcctagcaaatgaatactcctaacattgtctctttaagag

SEQ ID NO: 920585 - DNA, 120 bp, Artificial Sequence
  ENSG00000183674_12 (sequence is synthesized)
acaggattatgaagccataatcctcaatgtgactatatttggagcaggggcctttacagacataattaaattaaatgaggtcataagagtggggccctagtctgataggactggtgtcct

SEQ ID NO: 920586 - DNA, 120 bp, Artificial Sequence
  ENSG00000183674_13 (sequence is synthesized)
ctgaataactgaatggcaccatgttgcctcacctaaggataatgactaagaataggaaaaatttactgtgcaaagatcagttcttaatagctgtctacatctcagaacaaaaaaaattag

SEQ ID NO: 920587 - DNA, 120 bp, Artificial Sequence
  ENSG00000250348_0 (sequence is synthesized)
cctcacaatcaaggacaaattcctgaatgcaacatttgcttttccgtcttcccgcttcacctcactcatccctgcagaagtacaagtattcctggcttcttcaagtctacgcctaagaat

SEQ ID NO: 920588 - DNA, 120 bp, Artificial Sequence
  ENSG00000250348_1 (sequence is synthesized)
taagagccttggggagaagggcactgcatcgaccactgcatctcaatcattgtggcagacgtaccacagcactgggaagctggccttggcaagaatctcaggctattactacagagttgg

SEQ ID NO: 920589 - DNA, 120 bp, Artificial Sequence
  ENSG00000250348_2 (sequence is synthesized)
cttggcaagaatctcaggctattactacagagttgggaagaaggtttaggatcaagatagaggtgactgaccaagcatttctccttgttgccgccatgtgaagaaggacgtgtttgcttc

SEQ ID NO: 920590 - DNA, 120 bp, Artificial Sequence
  ENSG00000250348_3 (sequence is synthesized)
gtgttgaggattctctggggagaagactcaccgtgaagaccttctcaggctgaccccgggctctcatgttggtgtcatgaattaacttcagaatcatccaagcttcatcatgttttccaa

SEQ ID NO: 920591 - DNA, 120 bp, Artificial Sequence
  ENSG00000250348_4 (sequence is synthesized)
cctaagaaatgagagtggacagtgaagcgctaggagtgacacacttaccctccctgattttccaatagccgtcttgcattgtcagatcaaatgaggtgtaattgtgcaaatgtatctcag

SEQ ID NO: 920592 - DNA, 120 bp, Artificial Sequence
  ENSG00000250348_5 (sequence is synthesized)
tacatcccattggaacatacagactatttggatatcactgaatacatgagcagttcaaataatatggttataactagaaatagtatctccagatggtaaaatttcgctataaaacaataa

SEQ ID NO: 920593 - DNA, 120 bp, Artificial Sequence
  ENSG00000250343_0 (sequence is synthesized)
cctgggtgagcgccagacgcctggggtccgtttgccgcctgctgagactagacaaggaccccgggagggcgacgttgggggagagggctacggatggaggtcccgccgcgcttgggccgg

SEQ ID NO: 920594 - DNA, 120 bp, Artificial Sequence
  ENSG00000250343_1 (sequence is synthesized)
gtccggagccaccaggacgcacagcgggtttccctcattctcagtcaggtggttgagttatccaagccttcataaccagagggtctgagcacttgttggactgtgcttactgcagcttct

SEQ ID NO: 920595 - DNA, 120 bp, Artificial Sequence
  ENSG00000250343_2 (sequence is synthesized)
catttacaattaccactgcacctgagagtaccaagagattcctgagccagagattacgatttccaacttccagctcctcaagatggagaaacagagggaagaagagacttggaatcactc

SEQ ID NO: 920596 - DNA, 120 bp, Artificial Sequence
  ENSG00000250343_3 (sequence is synthesized)
aaagaatgtggcctactgctaaatacattgattttgaagctagatagctctggttttggggagcaagtgatttgatctctcagagactcagctacttcatcagtaaacagagattaccat

SEQ ID NO: 920597 - DNA, 120 bp, Artificial Sequence
  ENSG00000250343_4 (sequence is synthesized)
atccaccagtaatggctataggagcagtaatagggatgatataggtgaaagcactgatcactgaatgattccaaagacaggtgcagagaggttcaggcatcagacaggctacctggatcc

SEQ ID NO: 920598 - DNA, 120 bp, Artificial Sequence
  ENSG00000250343_5 (sequence is synthesized)
aaatcccagctccatcatttactactttcatggcctttacaaaccactaaacttctctctgagcttcaattttcccatctgtaacatgggaactaataaaatgaaaccttcctaataaag

SEQ ID NO: 920599 - DNA, 120 bp, Artificial Sequence
  ENSG00000250343_6 (sequence is synthesized)
ttgccaggaagattcattgagacattgaatgtaaagtatttaactcaatatagagcacaggggagcaccaaataaaattcaggtgttacatttttaagcacgtgttcaccaaggctccca

SEQ ID NO: 920600 - DNA, 120 bp, Artificial Sequence
  ENSG00000250340_0 (sequence is synthesized)
ccaaatcttaactgtctgcacacagaaaagcactgtcacaggaaccaaaaatcagtgacaagcagtgttaagatgttttgggtacttcagtcaacaagctgccatcttcaacatggggca

SEQ ID NO: 920601 - DNA, 120 bp, Artificial Sequence
  ENSG00000250340_1 (sequence is synthesized)
atagtgatatgtgtactcccaaggtagctgtcaatgctcctactcggaaatactcatatgttgcttctgacttgaagcagaggaactcacaacctaagaagccacaggcttgaagatggc

SEQ ID NO: 920602 - DNA, 120 bp, Artificial Sequence
  ENSG00000250340_2 (sequence is synthesized)
agagcacaagatggcagaagtttggaatgaattactacttgaaagagaagctcttatttaccaagaaatatattttggaatttgcatgagtaagaaataaatccaattatgctaacatta

SEQ ID NO: 920603 - DNA, 120 bp, Artificial Sequence
  ENSG00000250341_0 (sequence is synthesized)
agaatgctaatctttgtctctccatgattcccacatagcctgggtcctggataggatttagattccacagatactctcacagtgccatttggctgtagaaaagaactaaatgtgaagaaa

SEQ ID NO: 920604 - DNA, 120 bp, Artificial Sequence
  ENSG00000250341_1 (sequence is synthesized)
agcaggatataaaacatttatttgctggcatgtatagaaatataactggtgtcattctgctgtcagcatgtcagaagattttagacttttctgcagtggttatgaaagctttaaccatgt

SEQ ID NO: 920605 - DNA, 120 bp, Artificial Sequence
  ENSG00000250341_2 (sequence is synthesized)
tacaggggcagactgatactggagtttgaaagctactcttggagacatgggctgcctactattttggccttccaacaattttataagaaactcaatagataacgataaataccttcaagc

SEQ ID NO: 920606 - DNA, 120 bp, Artificial Sequence
  ENSG00000250341_3 (sequence is synthesized)
ttaaaatcgcgattatgatttctgctgtgcgcaatgaaactctgagtgaaacagtcctccaggattttgaagtcctctgcatccgggcagtggaacagaagtgtggagaagattcatcat

SEQ ID NO: 920607 - DNA, 120 bp, Artificial Sequence
  ENSG00000250341_4 (sequence is synthesized)
ctgcttcttaaatgccctagtcagaaaggggtactcatcatttctgttcatattttatacggctacaaatagatgtgagaagagcaagaaaacatagtcctggcaaggcagttgccttct

SEQ ID NO: 920608 - DNA, 120 bp, Artificial Sequence
  ENSG00000250341_5 (sequence is synthesized)
gatgacaactctgcactctggaggtagacaaattttggtcaatagctggcagttttagccatattagtccagtactcaccttcacaaatgaggaaacttaagactcggccattgttgatc

SEQ ID NO: 920609 - DNA, 120 bp, Artificial Sequence
  ENSG00000250341_6 (sequence is synthesized)
ttttttattgtgttttcttgatctaatggtattttgaaacacaatgggtaggactaaaatatggaccatttgaaaggaggaaatgttagattattatactaggcaaataatgttgccaat

SEQ ID NO: 920610 - DNA, 120 bp, Artificial Sequence
  ENSG00000250341_7 (sequence is synthesized)
atatttgcacaattatgggacatagactttcattttcctgtttaaaataagtatgtagtattaaagaattaacataaaatatggcattattaagaagatctatgattttggtgcctggtc

SEQ ID NO: 920611 - DNA, 120 bp, Artificial Sequence
  ENSG00000250341_8 (sequence is synthesized)
cttatttaggagtttagcaccctggttacatatatcataataatgaaaaagcattattctgttttatgctgcctgcagaaaaaaaaaggatgaaaaatagatactgtctgtgcagtatga

SEQ ID NO: 920612 - DNA, 120 bp, Artificial Sequence
  ENSG00000250341_9 (sequence is synthesized)
gccacagtataaatgtgcagaatatgatctaagtggaggataataaaaattttgaaagcagtatttgcaaaacttgttccaaacttcctcattaatcagcacaaatatttttctaagtat

SEQ ID NO: 920613 - DNA, 120 bp, Artificial Sequence
  ENSG00000250341_10 (sequence is synthesized)
acattggaaggcctttgcacttaactcaattattgaagtagtaggaaaattatgctctactgtgtataaaatatttctaagctattcaaagaagacactacaaagatatttaaagaagat

SEQ ID NO: 920614 - DNA, 120 bp, Artificial Sequence
  ENSG00000250341_11 (sequence is synthesized)
actataatatagaaaaacacttcatgcagatgtatcaattattagtatctcatcactgtatggcgttcttaactaagttgaaattgttttcaaatactggttgaataagtgaagaaggaa

SEQ ID NO: 920615 - DNA, 120 bp, Artificial Sequence
  ENSG00000250341_12 (sequence is synthesized)
aattgtattgtgttaacagaaatatgtgttcattcacccacccactgaacacctattttgtgccagacgttgttctggacactagggatccagcagggaataaaatacatgagtttccca

SEQ ID NO: 920616 - DNA, 120 bp, Artificial Sequence
  ENSG00000250344_0 (sequence is synthesized)
accaagaactcgtgcgctgcctggacctctagcttttcgccctacacgcagacgccctctgcaaaaccccagtcccgcagactttccctagcggcgggcggagggcatgaacctggaaag

SEQ ID NO: 920617 - DNA, 120 bp, Artificial Sequence
  ENSG00000250344_1 (sequence is synthesized)
ggaggcaacagccctcttggcaggcgggcaaaatgagacaatgaggtgagaaaagtcctcattgtatctccacttaggagatacgatctagagcagatccctgggtcattcattaacaaa

SEQ ID NO: 920618 - DNA, 120 bp, Artificial Sequence
  ENSG00000250344_2 (sequence is synthesized)
taccagatgagaaaacggaggtttatggccatcagtggctgagcagggatcggagtctcattctgtcaaactctaaagcctgcgttctgaaccaactcaagctgccccaggatattcctt

SEQ ID NO: 920619 - DNA, 120 bp, Artificial Sequence
  ENSG00000250344_3 (sequence is synthesized)
ggagcctctatcaactaatttcacagattctttttttttcctttttgctgctgtcatgttaatgggcattatttaaaaagggatcttaccacagaatttgatttggtgtctccttgttga

SEQ ID NO: 920620 - DNA, 120 bp, Artificial Sequence
  ENSG00000250344_4 (sequence is synthesized)
caccatataagagcaaatctaaccacatgtagtgttttcacaaaagtgtacctatccatcaattctagccacaaacctctaaggtcagaaatctcaaagattaagccagagggaggtgga

SEQ ID NO: 920621 - DNA, 120 bp, Artificial Sequence
  ENSG00000258197_0 (sequence is synthesized)
taaaaaaaggaagaaattctctgtatttttaaagtgttctccacttgctttagaagacggctgacaatatcgctactcacacaaacatattttacaaaatgcacgaaagcaggggtgggg

SEQ ID NO: 920622 - DNA, 120 bp, Artificial Sequence
  ENSG00000258197_1 (sequence is synthesized)
ggtcggtctttttctcgttttcaagtgacgacattaacgctgggacggtttggtccccccggggagaggcaaagaagcgaagctgcgcaaacattctgtaaacacggcgtagagttcagc

SEQ ID NO: 920623 - DNA, 120 bp, Artificial Sequence
  ENSG00000258197_2 (sequence is synthesized)
tggggggtgtgctgtcgggtactggggggtgctggccgagctgtactgggcgttgtactgcatgtgctgcagcgactgcgcgctgtaggcagaaaagggaatgcccgcctggaaggtggc

SEQ ID NO: 920624 - DNA, 120 bp, Artificial Sequence
  ENSG00000258197_3 (sequence is synthesized)
ggctgccaggtcctgggctttgagcgcgtgacatggtttgccgtccctgaccaagacgggcacggccacccggcgcggcgagggcaggggcgtcacctccatacctttctcggcccgggc

SEQ ID NO: 920625 - DNA, 120 bp, Artificial Sequence
  ENSG00000258197_4 (sequence is synthesized)
gcgcttcatcttgtagcggtggttctggaaccagatcttgacctgcgtgggcgtgaggcggatgaggctggccaggtgttcgcgctcgggcgccgacaggtaccgctgctgccgaaagcg

SEQ ID NO: 920626 - DNA, 120 bp, Artificial Sequence
  ENSG00000258196_0 (sequence is synthesized)
gagaagagctgcactggttcataacttttcagttcctggttccagttcataatgaggttcaaccggacttcctatccttagggtctgatggaaggctttctcatttcacagctgacagca

SEQ ID NO: 920627 - DNA, 120 bp, Artificial Sequence
  ENSG00000258196_1 (sequence is synthesized)
tcatcttgtgaaatgccctgtggaaaagcccatgtagcaaaggacagccaatagccaacagaaagctgatgccctcagtccaacagcctgcaagaaactgaattctgccagcaaccatgt

SEQ ID NO: 920628 - DNA, 120 bp, Artificial Sequence
  ENSG00000258196_2 (sequence is synthesized)
gagattggaagcagattcttccgtgcagtcttgtgagagattatgaagcaaaggactcaagttgtgcccagattcctgacccacagataccgtgtgataataaatgcatattgtcttaaa

SEQ ID NO: 920629 - DNA, 120 bp, Artificial Sequence
  ENSG00000258199_0 (sequence is synthesized)
gggtaccggccccgacacacacacacctgaggactccccacccctcggttccttacctcctatctacgccacccaaagaaaaagagtcggatggactgggtgacccagggagggagggtc

SEQ ID NO: 920630 - DNA, 120 bp, Artificial Sequence
  ENSG00000258199_1 (sequence is synthesized)
ctacttaggaggcgacagcgaggcctgcggaggaagcagttgagggaaggcaggtgtgactccaggctctgcactggttcttcttggttcctcccaccaggccctttgttcctcatgtcc

SEQ ID NO: 920631 - DNA, 120 bp, Artificial Sequence; identical to SEQ ID NO: 354379
  ENSG00000258199_2 (sequence is synthesized)

SEQ ID NO: 920632 - DNA, 120 bp, Artificial Sequence
  ENSG00000255482_0 (sequence is synthesized)
ggtcaaggtcatccagagacctgtcctcctgcatagccttgttgggaaggaccaacaggtggcttgctggtgcctgagacacaagagactggtgagatgagctgaaaatgggaggtattt

SEQ ID NO: 920633 - DNA, 120 bp, Artificial Sequence
  ENSG00000255482_1 (sequence is synthesized)
aacgggtgcttactctgtgtcatgtgcccttcttgctgctgaacaaagtggataaattccttgcctgaaagtaattaaggaagaggagaatggatactggagaaaatagtgatccatcac

SEQ ID NO: 920634 - DNA, 120 bp, Artificial Sequence
  ENSG00000255482_2 (sequence is synthesized)
gccctccatgtagccaggctcaccattttttctcagcagtggagcgtaatcaccacataccaacaacccaaagtcctgtctgggtgctgcatccatctccaagtccaggatctctgggtg

SEQ ID NO: 920635 - DNA, 120 bp, Artificial Sequence
  ENSG00000255482_3 (sequence is synthesized)
atgtgctgtcctctccatcaagtgacagggtggctcttgcctcccacacctacatccagtatgtaatgatgttgtagaatggtatatctgcaataaaatctctctttcacaaatggaaaa

SEQ ID NO: 920636 - DNA, 120 bp, Artificial Sequence
  ENSG00000276807_0 (sequence is synthesized)
ttttttttttatgttttgggtttacactgtttttgtgagttgtaacgcttatcacgaaagtctgcagtttcagtcttgaggttagcgagactacaaaaccaccaggaagaacgaacgatt

SEQ ID NO: 920637 - DNA, 120 bp, Artificial Sequence
  ENSG00000276807_1 (sequence is synthesized)
ccagacgcgctaccttgagaactgtaacactcacggagaaagtctgtagcttcgtttctgaacgagcgagaccaccgaatccaccggacggaaaaaactctcaacacatccgaatatggg

SEQ ID NO: 920638 - DNA, 120 bp, Artificial Sequence
  ENSG00000276807_2 (sequence is synthesized)
aaggagcaaactccagaaacgcgcctttaagaactaagtaacactcaactgcgagggtctgcggcttcatttttgaagtcagaccgagaacctacggattccggacacaagtccagctcg

SEQ ID NO: 920639 - DNA, 120 bp, Artificial Sequence
  ENSG00000276807_3 (sequence is synthesized)
tgaggtggggaaggggaagggggaggggagggaggaggttcatatagtaagagtaacctgggagtgtggggaggggatagaaccctgctcactgccccctgcccatagtgaacaatcggc

SEQ ID NO: 920640 - DNA, 120 bp, Artificial Sequence
  ENSG00000276807_4 (sequence is synthesized)
actatctattttgccctccagacactaccgtttccgtagagacagtactaagaggaggcttatttcctcctgtagacctagcgggagggcggaggcttaaatctagaaaaccaaccattg

SEQ ID NO: 920641 - DNA, 120 bp, Artificial Sequence
  ENSG00000276807_5 (sequence is synthesized)
agagcaggtgaattctaggtatgatgagctcattttctgacctgcagggggtgagggtggttaggggtaaacctgtgatcccaaaggcaccaaggggagcgtcagcaggtctctgggata

SEQ ID NO: 920642 - DNA, 120 bp, Artificial Sequence
  ENSG00000276807_6 (sequence is synthesized)
ctgcagtgtcctggtacttaagagctgccagcccctctcaagacagacttttcactccaatgcctggtgtaaacgagaaaaagtttttcaggatggtgccccagacatggagttcagtct

SEQ ID NO: 920643 - DNA, 120 bp, Artificial Sequence
  ENSG00000276807_7 (sequence is synthesized)
tcccagtcaacatatgggcctcccagagggttccagtctttcctctggcttcctaaaaaaaaaatgcggtcccttgtgcttgggctggaggctggcggtggtgtcagggaaactgcagat

SEQ ID NO: 920644 - DNA, 120 bp, Artificial Sequence
  ENSG00000276807_8 (sequence is synthesized)
ggtccttctacccggggtgggtggggacgtcctgagaactctagcccagagaacaccctttttcaggtcgggctaaccctgctcacctttcggttccttggatatttatttctcttatcc

SEQ ID NO: 920645 - DNA, 120 bp, Artificial Sequence
  ENSG00000276807_9 (sequence is synthesized)
acaggttgcagactggtggcctgcatacctgttttgcttcctacagtagtttaaaaacagcattttacgtaaaatttcagatttcttagaaaaaatcagtagctgtgacaacactgggct

SEQ ID NO: 920646 - DNA, 120 bp, Artificial Sequence
  ENSG00000276807_10 (sequence is synthesized)
ggcatttccgcacagaaccagtcagcaggaactgagcagcagggcccttctgggtgggacaggcactcaccagtgtccccacactggcccagggactcatttattcgcactggcacctgc

SEQ ID NO: 920647 - DNA, 120 bp, Artificial Sequence
  ENSG00000276807_11 (sequence is synthesized)
aggcatatgaggctgattcctgccaattcagcctaccccaaactcttgtttcgccgtgtcttttcctttctgccttgctgcgtcttaagtgtgcctctgacccaccctcatcactgcact

SEQ ID NO: 920648 - DNA, 120 bp, Artificial Sequence
  ENSG00000276807_12 (sequence is synthesized)
gaggtttatcttcccccatacagctgtctcctccagttgactgcaagcccgagggcagaaacaatgcttccataaggttctcagtgaatgtacattgaataaacacacgtcttgcctttg

SEQ ID NO: 920649 - DNA, 120 bp, Artificial Sequence
  ENSG00000255487_0 (sequence is synthesized)
tcggggagatggggaggaagaaggagaagtgcccaacattttttgccttctcttcatttgttgacgcacatgccgactggcaggaaagaaaggatcatagtttcaaacatcacagacagt

SEQ ID NO: 920650 - DNA, 120 bp, Artificial Sequence
  ENSG00000255487_1 (sequence is synthesized)
aggaaaaccctgcaaccttgcattcatttaaattcatctgttgtacaattacctaaaaacatcaggaggccttatgctgcaacaaatactataacaaaaataaagttttgttttcactga

SEQ ID NO: 920651 - DNA, 120 bp, Artificial Sequence
  ENSG00000255484_0 (sequence is synthesized)
agtcagcacatggaaggggaactggaggagaacattaagctgagaggaggtcctggtgggctggggccaactccccaggagcagaggaagcagccagcagcctggatgggcagaggtgag

SEQ ID NO: 920652 - DNA, 120 bp, Artificial Sequence
  ENSG00000255484_1 (sequence is synthesized)
accagggctccgactccctctctcccagaagctgcccgccccctcttcccccctgcttttgcaaagttttctgagttccatctgcagtactctgacctgagggcacctctacagctgggc

SEQ ID NO: 920653 - DNA, 120 bp, Artificial Sequence
  ENSG00000255484_2 (sequence is synthesized)
ccagagggactgaagctgctactagcatggcacggtcctgggagctttgaggacacccacagagacagacggtgcacaccgagggttccgctgctcaggaacaggcatggagaagaaagt

SEQ ID NO: 920654 - DNA, 120 bp, Artificial Sequence
  ENSG00000255484_3 (sequence is synthesized)
tgcacttagaagcccaacaggagttttgcaagacaaaagtttaatgaaaggagagaagagcacagaaactgaagttgaccacctgcactcctccttggccaacctcgacagaaatctaga

SEQ ID NO: 920655 - DNA, 120 bp, Artificial Sequence
  ENSG00000255484_4 (sequence is synthesized)
attcaaggaaccattgctgtgatccatcaagtcagccccaggaaagagagcagagctgagagggctggagagagaatctggaggagcaaacggaaaatacctgactgggtaccaacatcc

SEQ ID NO: 920656 - DNA, 120 bp, Artificial Sequence
  ENSG00000255484_5 (sequence is synthesized)
aggagaggatccctgtgtgtcaaggatcctcagagggacaactaatgcataacaacagataatgggtccacactcctttctgcctcctcctgatcgcaaaacccactacacacatgtaaa

SEQ ID NO: 920657 - DNA, 120 bp, Artificial Sequence
  ENSG00000255484_6 (sequence is synthesized)
tgcaccacacacacacatgcccactacacacagatatatatatatagatacacatccacacacatagggatacacatacatagggatacacatacacacatacatacatgcacacattgc

SEQ ID NO: 920658 - DNA, 120 bp, Artificial Sequence
  ENSG00000255484_7 (sequence is synthesized)
acatgtgcacaatgcaacatacatgcatgtacacatataagcacacatacatatgtgaacacatgcacacacacatacccacacttaatcatagtctgcacatggtatcactgcacactg

SEQ ID NO: 920659 - DNA, 120 bp, Artificial Sequence
  ENSG00000255484_8 (sequence is synthesized)
ttataggagataaaaccaacagaatttaaacaaagacaagaaagacctggaatgatgtgcagacttgtctaattattgctatttttagaactcatactgcaagtggtagaaaagaatggg

SEQ ID NO: 920660 - DNA, 120 bp, Artificial Sequence
  ENSG00000255484_9 (sequence is synthesized)
ggtgggggctgctgaccaaagagattgcttcattattggaaacagaagataagtaggctgaagagggtgattggaaagttgagaacagggaggcagttcttcccctctcccctccacccc

SEQ ID NO: 920661 - DNA, 120 bp, Artificial Sequence
  ENSG00000255484_10 (sequence is synthesized)
catgtctccctctcccattccaggagctgagcactaggagaaagaagggcacatgagaccagatgatggaagctgacctggctttccactctggctacagactttctggatgtgtgacct

SEQ ID NO: 920662 - DNA, 120 bp, Artificial Sequence
  ENSG00000255484_11 (sequence is synthesized)
cgaatatgttcctgagggccacctctagcctataaggtgtctttgtgcaaatagaagacacccctttgcacaagtaaataagagaatattctggttggatgcagcatctcatagttcctg

SEQ ID NO: 920663 - DNA, 120 bp, Artificial Sequence
  ENSG00000255484_12 (sequence is synthesized)
atctggcaaacagtgcatggctgaatttccaccctcccaacagtacatttgtgcagcatcccagctacccaaccacatgcagcaagcaggtgtcacttcacatctgtagacccctgcttg

SEQ ID NO: 920664 - DNA, 120 bp, Artificial Sequence
  ENSG00000255484_13 (sequence is synthesized)
tcctctccataagtgaagataatatctgcaaaacagggagatccaacacaggagacaaaatgcaaggcgagaaccaataattaaaaaaaagaaaaagtcattcaaggtcttagggtgcag

SEQ ID NO: 920665 - DNA, 120 bp, Artificial Sequence
  ENSG00000255484_14 (sequence is synthesized)
gccacccaggacaaagactgggaggagcatgggttctctgccacatgtgagggggcagtgaagaccaattctgattgatatcttagagtaggaagttggaggatttagggatacccagtg

SEQ ID NO: 920666 - DNA, 120 bp, Artificial Sequence
  ENSG00000255484_15 (sequence is synthesized)
actgaattctaggttacatcatcgctatcattaatttcttgacatagaagctgaccagctctcagcatttcgtaatcattgcagagtgcaggctaggggctctggggctccagccctgcc

SEQ ID NO: 920667 - DNA, 120 bp, Artificial Sequence
  ENSG00000255484_16 (sequence is synthesized)
agtctgtaattgatgtaggttaactctattctccagtttcctcatctgtagaatcaggtaactgatgtacttctttcacagaggaattacaaaaataaaacagaataatatctgtgaaaa

SEQ ID NO: 920668 - DNA, 120 bp, Artificial Sequence
  ENSG00000234527_0 (sequence is synthesized)
atcataagctatcatatgagaagcaagatttcagaaccttttttaaacacaagtgcttgagattgtttgaacaatgtgtgtcaagacagactactaacacagaaacacctcactgaaaga

SEQ ID NO: 920669 - DNA, 120 bp, Artificial Sequence
  ENSG00000234527_1 (sequence is synthesized)
aacaacaaaaataacaacaaagaggtttgatgactggcttacagagaagaataaggaaatgtacctctaagaatcgtttgaaatgagtcttcatatcctcccaaatatttttcaagaacg

SEQ ID NO: 920670 - DNA, 120 bp, Artificial Sequence
  ENSG00000234527_2 (sequence is synthesized)
aagaggggaattgcagttgcacttaaactagaaacttccacttggtgaattgaattattaaggaataatggcagaagaaagagtaagtcgtttataggcaataataagcaataaaaatat

SEQ ID NO: 920671 - DNA, 120 bp, Artificial Sequence
  ENSG00000234527_3 (sequence is synthesized)
atgtatatgtgcatgcaaaaagttatggcaaaactaataagattttaaaaaatcattgtgttcctgaagaaacaaagaactggttttcttctaaggaattaaagagttttgtttctttgg

SEQ ID NO: 920672 - DNA, 120 bp, Artificial Sequence
  ENSG00000276809_0 (sequence is synthesized)
aagcattcggaaccttgattccacaggacagaagataaaagaatattatcaggcaggtaacacaagaaatacaaattcaaaatcagtgcatacagtgcgcagtcttccaaatgaagagat

SEQ ID NO: 920673 - DNA, 120 bp, Artificial Sequence
  ENSG00000276809_1 (sequence is synthesized)
gaatgttaaaactattcagagaccactggtcattaagttgagcaaaaatcaagacgtattttacagcgtaatattgataggtcttaaaggaaatgttttcagtcatataatatgttgaca

SEQ ID NO: 920674 - DNA, 120 bp, Artificial Sequence
  ENSG00000276809_2 (sequence is synthesized)
ctgcaaacataagcagagcttttgcggtacagtctggcattaagtattacgagagaaaaacattttgcccagagacacttactggggctctatttgctctggaaactattagagaatgtt

SEQ ID NO: 920675 - DNA, 120 bp, Artificial Sequence
  ENSG00000276809_3 (sequence is synthesized)
ctctggaaactattagagaatgttgtatctatataatagaataatattcattaataagaattatttaaggtttggtttataaacttgggcatacataataatgtcaattaaatggcaata

SEQ ID NO: 920676 - DNA, 120 bp, Artificial Sequence
  ENSG00000276809_4 (sequence is synthesized)
agttgtcagaatcaaaatgaagtcacttgtattaaattctaacaaaaaataaataaagccaggaggttaagaagggagctctcacacacgtctatcgtaagaactgctacaaagcatctc

SEQ ID NO: 920677 - DNA, 120 bp, Artificial Sequence
  ENSG00000276809_5 (sequence is synthesized)
tgaagggctcttctgcacatatgcctgtaataagaacttttgccagcagtccctgcatctctacatccatggagccccattgacattccccacctgcagcggccactgcagctcaaactg

SEQ ID NO: 920678 - DNA, 120 bp, Artificial Sequence
  ENSG00000276809_6 (sequence is synthesized)
cagcttgctacgtgagtcacaaggatagctagctggatgcataagaacatttgactgacacagtctcccctgtatccaatgttctctttgttttcaaacaaattccttatgcttttccct

SEQ ID NO: 920679 - DNA, 120 bp, Artificial Sequence
  ENSG00000276809_7 (sequence is synthesized)
tttgcctttaaaagcttctcctggcttcaacctgtttggatatgcctgtggtccctatagccctcatatgctggatttgcaaatcccctgcacactccagaataaactcagttcaataaa

SEQ ID NO: 920680 - DNA, 120 bp, Artificial Sequence
  ENSG00000256597_0 (sequence is synthesized)
aaatcatgagtcagtatgtgccagctgtatttaagaccaaaggcttaatgtatccacatctggggtaggagtcagatgtaaaacaagcccaacattgccttggaagttctataggcaatg

SEQ ID NO: 920681 - DNA, 120 bp, Artificial Sequence
  ENSG00000256597_1 (sequence is synthesized)
caaatgcgttgtttggccacaatgaagaatccttattgaaatatcccttgaatggcataattgaatagacgtaattgcaaagctctgcaccatgtaaaattagaaatggactcttgtgta

SEQ ID NO: 920682 - DNA, 120 bp, Artificial Sequence
  ENSG00000256597_2 (sequence is synthesized)
tgtagatgagaagaactgagcatgagagggtgctgataacaggggatatgggcaccgcataacctaaacagactttgacaccacaacaaaagagagacagatactgtagaacaatgacag

SEQ ID NO: 920683 - DNA, 120 bp, Artificial Sequence
  ENSG00000256597_3 (sequence is synthesized)
gaaatcatgagtcagtatgtgccagctgtatttaagaccaaaggcttaatgtatccacatctggggtaggagtcagatgtaaaacaagcccaacattgccttggaagttctataggttgc

SEQ ID NO: 920684 - DNA, 120 bp, Artificial Sequence
  ENSG00000256597_4 (sequence is synthesized)
catggagaccaggtgatgcacacatgcaaattcagtggccgtgcagaagtttcaagatcagggcgagggaaaagacagacagtaaatgacactgcagaggcaacactaacaagcaaggtt

SEQ ID NO: 920685 - DNA, 120 bp, Artificial Sequence
  ENSG00000256597_5 (sequence is synthesized)
ctgcaggggctgaacatcatattcatcaaactttggagtttgccctcagagatccccctcctggagcaggggaattcctgatctatcgacttctgtgtcaatattcagaactacagtcag

SEQ ID NO: 920686 - DNA, 120 bp, Artificial Sequence
  ENSG00000256597_6 (sequence is synthesized)
gaggaccggcttgttttcccttcttctccatactcaagatgacactataatgagagagttggctgcaaaatcccttacaagagatgatggtcatcacagtcagagatatgtcaaagcaca

SEQ ID NO: 920687 - DNA, 120 bp, Artificial Sequence
  ENSG00000256597_7 (sequence is synthesized)
ggcagtgcagcctgggtggaaatgtggtttggaaattcagaaggagtttaccactttgataacagatgcattgtgtcatttcttctggtggtcattttgacatcgaagcattaaccttgg

SEQ ID NO: 920688 - DNA, 120 bp, Artificial Sequence
  ENSG00000256597_8 (sequence is synthesized)
attttgctatttctttttaattttaattcccttctatttggccttattattaatcctgagaaggcttttttttctttttcaaaaaacacaaatatttggtattgatcttaccagggagaa

SEQ ID NO: 920689 - DNA, 120 bp, Artificial Sequence
  ENSG00000256597_9 (sequence is synthesized)
cagaagagtatggccatgttacctgagaggagttagtgctattgcagcatagggtggaacaattgaggcttcatttgtgcagggagagaattcagtcttcttcaaagctgatctctctgt

SEQ ID NO: 920690 - DNA, 120 bp, Artificial Sequence
  ENSG00000256597_10 (sequence is synthesized)
gtgaactaatggattaatattattagtctgtcacctatagacaaaaagagagtcttcggtgatcagaaatcaacttaatatactctaagcacttttaacatcttacaccatttaaaccac

SEQ ID NO: 920691 - DNA, 120 bp, Artificial Sequence
  ENSG00000256597_11 (sequence is synthesized)
acagacacacgcatggggtgagtgtaaaaacaaatagacacatcatagaagacaattagcaattttgtcagaagtcttaaaatatatttccactatgcattcatatttcacttctaaaaa

SEQ ID NO: 920692 - DNA, 120 bp, Artificial Sequence
  ENSG00000256597_12 (sequence is synthesized)
tatatcctaaggaaataatttcaatgctgcagttaactattgcttctgcctgccctggaaaggttgttccttctgctactggcacccaaattccctttgggaatgtctctcttgcccact

SEQ ID NO: 920693 - DNA, 120 bp, Artificial Sequence
  ENSG00000256597_13 (sequence is synthesized)
ctccatccatgtgtttaggtggggccaatgccttcctctgctcagagagcagccccagtgtcaggtctaagaaattagtgaatttcatcgttttgcattgtaatctgttcaaagctgaga

SEQ ID NO: 920694 - DNA, 120 bp, Artificial Sequence
  ENSG00000256597_14 (sequence is synthesized)
ataaggatcagttaaattctaagccagggatgtcccagaacgttaatagaactgtggaaataaggtctctttttaattacatgtattgctggaaggatatgagcttggaaaggtagggta

SEQ ID NO: 920695 - DNA, 120 bp, Artificial Sequence
  ENSG00000256597_15 (sequence is synthesized)
ccaccacacggagagaacctagctaaaaatgtatctgtcacagaaaatagtagggctgagcacgtgaacctaggatggactccaggcctctctcaccgtcagctagaatcttggcttgag

SEQ ID NO: 920696 - DNA, 120 bp, Artificial Sequence
  ENSG00000256597_16 (sequence is synthesized)
gaagacagactttctatgtgcaatgctgtgtctctgctaccaagaatgtcacttgggaaatgctcataaatgtctgtgggataaagactttggggaacaaaatcctgatgaggccccttg

SEQ ID NO: 920697 - DNA, 120 bp, Artificial Sequence
  ENSG00000256597_17 (sequence is synthesized)
agtacctcaacgaagccatttctgaagccaatgtactcctttccagttatgacagttaacatattcttgtgtgggtgtgtgtttgttttctagcttaagccagcttgaattgggttcata

SEQ ID NO: 920698 - DNA, 120 bp, Artificial Sequence
  ENSG00000256597_18 (sequence is synthesized)
tatttaagaccaaaggcttaatgtatccacatctggggtaggagtcagatgtaaaacaagcccaacattgccttggaagttctataggctccctcccaggatccttgatctgatctgtca

SEQ ID NO: 920699 - DNA, 120 bp, Artificial Sequence
  ENSG00000256596_0 (sequence is synthesized)
aagcaaacttgcagttctcaacaaagtgttttccactgatgtctgctaaaatggtacttaggaggtaaagtatgtaagaatatccttctgatgcaattacatttaataacaatatcagtg

SEQ ID NO: 920700 - DNA, 120 bp, Artificial Sequence
  ENSG00000256596_1 (sequence is synthesized)
tgggccactttcttagctaccaccagttctttaatgtttttgaaaattaacttccagtcttggccacagcagcctaagagtccccagaagtagccagttttaggcatatttgaaaggaat

SEQ ID NO: 920701 - DNA, 120 bp, Artificial Sequence
  ENSG00000256596_2 (sequence is synthesized)
ctgtcttttctacttgggaggttgaggaactttcaccttctttctcattcttctcatttctgttaacttcttcctcaatctttctttgtgctttcaggatcttctgttttattgactgtc

SEQ ID NO: 920702 - DNA, 120 bp, Artificial Sequence
  ENSG00000256596_3 (sequence is synthesized)
tgtatctttggtcccatgtgttgactgctttctgcaatgattcaaaactttttattttgggaattctaccctagcctggtccttgtcccactgtgtcatgtccctgttgattgcagtagt

SEQ ID NO: 920703 - DNA, 120 bp, Artificial Sequence
  ENSG00000256596_4 (sequence is synthesized)
gggaagtctgtgctctggggctaaattaggtaagacacataagacatttagaacagtgcctggaacataggagacgctcctggaaggactgtagttgtttccaaaaactattgggtcatc

SEQ ID NO: 920704 - DNA, 120 bp, Artificial Sequence
  ENSG00000256596_5 (sequence is synthesized)
gtggaggattgctaattcatgagtagggctgacttctgtgcattttctgggtccttttcttttttctttttctatagaacttttcattagggtcagctttcccccctcatgagatcagat

SEQ ID NO: 920705 - DNA, 120 bp, Artificial Sequence
  ENSG00000256596_6 (sequence is synthesized)
ttccttgcaattattttctgatcccacaaggccagttccactagtgcctgcgttgaattcttccacatactcatctgatggaaaggggtgggtttggggctgaggagggtttatggggat

SEQ ID NO: 920706 - DNA, 120 bp, Artificial Sequence
  ENSG00000256596_7 (sequence is synthesized)
gttgaattaccagatctaagcccactctgtcaacctgagatctggaaagctgaccactcgagacaactagagatcccttctcctctcttctttaatgtttttgctgttgaagtttcagca

SEQ ID NO: 920707 - DNA, 120 bp, Artificial Sequence
  ENSG00000256596_8 (sequence is synthesized)
cctgagaagggttttagcacagagaggattaagaactggataatcctggatttgaaagtagaatggtgagccagcctgaaataatgcccccatttccatcttgcctaattccccttcttg

SEQ ID NO: 920708 - DNA, 120 bp, Artificial Sequence
  ENSG00000256596_9 (sequence is synthesized)
tctggcttttggaacatgaatcccatgtcacaaaggaagctatgacataggcacagagctacaagatagtgtgatatctttggtgccactctgatgggcaggttgttccagcaaagcatg

SEQ ID NO: 920709 - DNA, 120 bp, Artificial Sequence
  ENSG00000256596_10 (sequence is synthesized)
acagtgtgaagatgctgtgaagttggctcggacagccgggtggaagccaggacttccagaattccaactggccccaggggaagaactgggtttgggggagatgttgatttgcatgtgatt

SEQ ID NO: 920710 - DNA, 120 bp, Artificial Sequence
  ENSG00000256596_11 (sequence is synthesized)
tgcacaagactgaaactctgcaagtgacggtggcaccaacgaggtctttctcacctcggtatcgctggcacttacgtgctgggggctcaatacacgttcctggaaggaacagagggaagg

SEQ ID NO: 920711 - DNA, 120 bp, Artificial Sequence
  ENSG00000256596_12 (sequence is synthesized)
aggagcttttcatttctctgctatcttgactttctcaacacttcaacgcgttgatctcattcgattcttacaagtggagggagaaaggatggtttgtcatcacccttactttatggataa

SEQ ID NO: 920712 - DNA, 120 bp, Artificial Sequence
  ENSG00000256596_13 (sequence is synthesized)
ggaaaccaagatagcatggcttggcaatttatccagagaagcaaaatgaccgacaacaacgcacggtgaaacgcagtgttgggaatcgcagatggaagccgagcatttcctctacctgtg

SEQ ID NO: 920713 - DNA, 120 bp, Artificial Sequence
  ENSG00000256596_14 (sequence is synthesized)
ggacctgcacttttcctaatgctctttcccatgtgttctctgcaggtcctcaggcaaatcctgtggaggagaaagggcaaagtcatcccagtgtctcgtttttgagggaacttgtggctg

SEQ ID NO: 920714 - DNA, 120 bp, Artificial Sequence
  ENSG00000256596_15 (sequence is synthesized)
ccatgtggacagtaccaggggatatgtctcagcagccggccgggaactcttggctgcagacagttgcacagctcgttatcttgatgccaaaacaagaaccaaggacccttttccactagg

SEQ ID NO: 920715 - DNA, 120 bp, Artificial Sequence
  ENSG00000256596_16 (sequence is synthesized)
agaactctcggcaagcaggacttgagacgagcggagtccagctcccctggagtatgaaaaattgcagatgcagccacccactcataagtagctggaagaagccgcagggttcgaataatc

SEQ ID NO: 920716 - DNA, 120 bp, Artificial Sequence
  ENSG00000256596_17 (sequence is synthesized)
ttttcggaaaactgtggatgcaccacgtagcctctggaaactccaccgtacactcgtgagagaatgagagccagaaagacaattcctttagtattaatataaaaatagatttgtaaaata

SEQ ID NO: 920717 - DNA, 120 bp, Artificial Sequence
  ENSG00000230102_0 (sequence is synthesized)
gcctatgatctacagtgcccattccaactcagagaatctttacatctggagatctatagcagggctatccctagtgacatgcgtgaagaagcttggaaatggtgctgggtaggagctgag

SEQ ID NO: 920718 - DNA, 120 bp, Artificial Sequence
  ENSG00000230102_1 (sequence is synthesized)
tgtgcagaatgtggaaaggcattctaaaccaaaggaagaacacgagtaaagatgatgaagcagggataaggctaaaatgaaatttgtgatctgatccacatacaagcacagtgtagtaca

SEQ ID NO: 920719 - DNA, 120 bp, Artificial Sequence
  ENSG00000230102_2 (sequence is synthesized)
actcttggaggctctgcaaccacagtttgagaaactccgcgttcaaagttaaaaactgtcacctgaatagttaataacatcaaagattgtgaaagcaagtataaataacacagagattaa

SEQ ID NO: 920720 - DNA, 120 bp, Artificial Sequence
  ENSG00000230102_3 (sequence is synthesized)
aataatgaggcaggatcagaaattgctgacctccataacagcagacaaaattggaagcaagagtgattttggaggagtcacacttagatgtttcccttacctatttctgttctggaaatt

SEQ ID NO: 920721 - DNA, 120 bp, Artificial Sequence
  ENSG00000230102_4 (sequence is synthesized)
taaaaatcttacttctcgtgacagtcctacatgaaaaattaaaaatcacaaggattcatggatggaaaactgagactcagagaatgatcacattcacatcgtaataaatcagcaatagag

SEQ ID NO: 920722 - DNA, 120 bp, Artificial Sequence
  ENSG00000230102_5 (sequence is synthesized)
aatacagtcacacggggagctagggcttcaacctatggcttttgggggatacagttcagtccatagcagtggggaaaggatgtgactcagtctagagagactcaaggagggaatgcttag

SEQ ID NO: 920723 - DNA, 120 bp, Artificial Sequence
  ENSG00000230102_6 (sequence is synthesized)
ataggagcatggagggcgtgcctggtgaagggaacagtatggcacagcttcagaggcaagggtgagccagcagcaaggggctggctatggccggtacaaaaagcatgtgctcgtgggaaa

SEQ ID NO: 920724 - DNA, 120 bp, Artificial Sequence
  ENSG00000230102_7 (sequence is synthesized)
taggcaccaaagaaggcccagagaggtttaacaacttcctcagaatcacacagcttccaaatggttgggttgggtttacatttaggcggtcttgctccagagccagtgctcctaaccttt

SEQ ID NO: 920725 - DNA, 120 bp, Artificial Sequence
  ENSG00000230102_8 (sequence is synthesized)
gcaagccacgaacctcaagaaagtggagaaggaaacgctgggaaatctggaagtcagacatggcaaatgatgaaggtttaagaagcagcatcatcagcgaactgtgttttgaagatttga

SEQ ID NO: 920726 - DNA, 120 bp, Artificial Sequence
  ENSG00000230102_9 (sequence is synthesized)
atcctccccacaaggatgccctggcctgagtggcacagagatcaatgcagcagtcatttcctgggcggggaaagcccatccacagtggccctggaatgatgctggtcttaccttctattc

SEQ ID NO: 920727 - DNA, 120 bp, Artificial Sequence
  ENSG00000230102_10 (sequence is synthesized)
ctaggaaggccctatctcaagtggctctggtccatgcaaacagatggaaacgggtgtggggaagcacaggcctcctactcatgttaagagagctgctcagaggcaggaatccagaaccag

SEQ ID NO: 920728 - DNA, 120 bp, Artificial Sequence
  ENSG00000230102_11 (sequence is synthesized)
gaatgtccccagtggctgcccaaggtacaagtggcaggcagcggggagaatggcatgtgaagtcatttgtaacctggccccagcttggtttccaagtctcagaggagattatggatatgg

SEQ ID NO: 920729 - DNA, 120 bp, Artificial Sequence
  ENSG00000230102_12 (sequence is synthesized)
tagtgcctggctcagtgcttaaaatccattctcctgctatttccctcacctacactcagccccacaagccgagatgtttgctggacatttcaggcactgccacccagttctgtctacctt

SEQ ID NO: 920730 - DNA, 120 bp, Artificial Sequence
  ENSG00000230102_13 (sequence is synthesized)
acctgctaacacctgttgaccatccttcatgtgaaggcttccccaaatacttcccaatcaaaacactaaaaggcagacctgaaattaataaaaatgttaattaaatctgtacaacagaaa

SEQ ID NO: 920731 - DNA, 120 bp, Artificial Sequence
  ENSG00000230102_14 (sequence is synthesized)
caactgccctgaggccaccaggctggagagaccatgtatggataggttctctgatcaacagtttctatcaagcccagccttctagccatcaagcccagccttctagccatgtccaccaat

SEQ ID NO: 920732 - DNA, 120 bp, Artificial Sequence
  ENSG00000230102_15 (sequence is synthesized)
gtgcctgacatgtgagtgaagccatcacagacccttcagaccagcccacctgccagctgaatacttgtccttggaacaggagaaagggttggaaaacaaagatcacttttctctggccaa

SEQ ID NO: 920733 - DNA, 120 bp, Artificial Sequence
  ENSG00000230102_16 (sequence is synthesized)
gagctcccaacaaaacggttccatctttggctaggcctttggtatttcaaggcgctgccggtggggagagatgccgcgtgcctgagaggctctgggagatgttatgtggtcaacagggac

SEQ ID NO: 920734 - DNA, 120 bp, Artificial Sequence
  ENSG00000230102_17 (sequence is synthesized)
tcagacatggcaacctagtttatctcccgggagctgacttcatttctaaacgtataggggtttcttagaggagcttcagaatactaatcatcgctagtgagggcacttggacactttgct

SEQ ID NO: 920735 - DNA, 120 bp, Artificial Sequence
  ENSG00000230102_18 (sequence is synthesized)
ggcgggggaaacccgagctcccaacaaaacggttccatctttggctaggcctttgatgttatgtggtcaacagggactgaggctctttaagcccttaaatctctaagggctaaatctcct

SEQ ID NO: 920736 - DNA, 120 bp, Artificial Sequence
  ENSG00000230102_19 (sequence is synthesized)
catggcaaagagctaatgctggcagctgttgggatgtcctcttccaggaatggtgatgagtttccctggatccagccctggcttggctgaggtccttggaacaggagaaagggttggaaa

SEQ ID NO: 920737 - DNA, 120 bp, Artificial Sequence
  ENSG00000230102_20 (sequence is synthesized)
taaaacaagaaggaagatctcccatagattttcaaggtgctgagaaaacagcttctagacatatctcgaaagccaagtttctgagatgtaatcagaaagctgtagtggaaggaaatttga

SEQ ID NO: 920738 - DNA, 120 bp, Artificial Sequence
  ENSG00000230102_21 (sequence is synthesized)
accagaagactgcagtcctgtctatgaacgttaaacctgtgtggcttaggaaacgagtctaacctcgtctgagcctcagtttgttcacctaaaagatggagatgagagctcatttgtctc

SEQ ID NO: 920739 - DNA, 120 bp, Artificial Sequence
  ENSG00000230102_22 (sequence is synthesized)
attctcaggggttatggtggccatccagacataaagaaattagaacgttcattcatctgcagatgctcacacattcctacaggatgactgaaacccacagcaaacaatcctcatgaaata

SEQ ID NO: 920740 - DNA, 120 bp, Artificial Sequence
  ENSG00000230102_23 (sequence is synthesized)
cagctcagctcatcctgaagaataagtgggaggtcagcctcacgggaaattcgatatctccacatgcagctgtcatgccacatggaaacagtcatgcatagggtcctgtcacctggtaga

SEQ ID NO: 920741 - DNA, 120 bp, Artificial Sequence
  ENSG00000230102_24 (sequence is synthesized)
ctgaccccaggtccactgacccctgacaatcatcaaccgcttctgagggctccatgattgagatttgtccccaggaactcaggggaaactatatattgattaaaatgaactatcaaaatc

SEQ ID NO: 920742 - DNA, 120 bp, Artificial Sequence
  ENSG00000230102_25 (sequence is synthesized)
acaccccttctgcttctcaggggacgctggtccacagaccgaggccccgttgcgcgcggccgccttcggagcgccgccctcctcccgaaaccggccggggcgagtggctgcaagaagctg

SEQ ID NO: 920743 - DNA, 120 bp, Artificial Sequence
  ENSG00000230102_26 (sequence is synthesized)
cggtttggcccgcgggagaggggggcttccccgctggggttgtctgacgcgaacgccttcctggccccagccaggcgccctgagatgatgaaggtttaagaagcagcatcatcagcgaac

SEQ ID NO: 920744 - DNA, 120 bp, Artificial Sequence
  ENSG00000230102_27 (sequence is synthesized)
gaaatgtagcattcatataaatttcattgcttttgaaaacaatctatggctagattctcctgggtttgtatgatgattactgaaaactgtagaaaatctaaaatcaagcaagttgtttat

SEQ ID NO: 920745 - DNA, 120 bp, Artificial Sequence
  ENSG00000230102_28 (sequence is synthesized)
aggcaattactttcagaagcaaaaattataaaagaaccatgagatttttaaagagaaaaaattacatttgatatgagataatcatgcattttaagatgtttaaaatgacatggagtgggg

SEQ ID NO: 920746 - DNA, 120 bp, Artificial Sequence
  ENSG00000230102_29 (sequence is synthesized)
tccccagaccaggagagctgagggcttatgaaggacctaagggagtgagacctgttatgtaataagcccccattctgggggcagcaccacagaggcgggaccccagaagtagaagaagag

SEQ ID NO: 920747 - DNA, 120 bp, Artificial Sequence
  ENSG00000230102_30 (sequence is synthesized)
ccctcctgcactgggtggtgaagttggtatcagcccctagtttgtgaccctggacagatttctctgctctccagccctcagagtcctcaataaaacaaaaacatatgcaaatatacaaaa

SEQ ID NO: 920748 - DNA, 120 bp, Artificial Sequence
  ENSG00000230102_31 (sequence is synthesized)
ggggagagatgccgcgtgcctgagaggctctgggaggtcgccgcagctttcgcttcccgggttttacatttccgaaggggctgaacgtctgcagaggaaccggagctgatgctggggctg

SEQ ID NO: 920749 - DNA, 120 bp, Artificial Sequence
  ENSG00000230102_32 (sequence is synthesized)
gggctggggccggggcgggaacctaacgaatgcacctctggggaggctagagggagcgcggctcagcctcctccctgggtgggtccttcagcgctctttccttctttttttcttttctgc

SEQ ID NO: 920750 - DNA, 120 bp, Artificial Sequence
  ENSG00000230102_33 (sequence is synthesized)
gaagtcagacatgcctagtttatctcccgggagctgacttcatttctaaacgtataggggtttcttagaggagcttcagaatactaatcatcgctagtgagggcacttggacactttgct

SEQ ID NO: 920751 - DNA, 120 bp, Artificial Sequence
  ENSG00000230102_34 (sequence is synthesized)
tacaaagcactttgagcttctctgaagacagacgcatataaatggaaggtggtattataaggtggggtaatcactggttacctcccccccttttttatttaattaggagaaaaccagtaa

SEQ ID NO: 920752 - DNA, 120 bp, Artificial Sequence
  ENSG00000230102_35 (sequence is synthesized)
ttaggaagcatggccttgttaaagctgtggcctgggaaatagttctcttggcacctaatcagaactgtgacatggcgcaaatttttgcaaaatgtgggcagcaggggaccttccccaagg

SEQ ID NO: 920753 - DNA, 120 bp, Artificial Sequence
  ENSG00000230102_36 (sequence is synthesized)
ctcagactgtgagaaatttgcgtctaggggccagatcctgaggtggctgagctggctggggaggcttctaaggagatcttcactcaggtctgcaagggggctctgccctgcctcagtagc

SEQ ID NO: 920754 - DNA, 120 bp, Artificial Sequence
  ENSG00000230102_37 (sequence is synthesized)
cctcatctctgggggccccaaagtcattctcatctgcaggttagagcttgctgcaggcccagaaccaagcttgtccaccacgtggccttcttggacccactggggcaacttcagggttct

SEQ ID NO: 920755 - DNA, 120 bp, Artificial Sequence
  ENSG00000230102_38 (sequence is synthesized)
gaaaagcacctcagatctagtctggtctctgattcagtagcagagacaaagaaatcccctgcctgttccccttaaaatgggccattgtggagtaggtgctggggccctagcttgctcccc

SEQ ID NO: 920756 - DNA, 120 bp, Artificial Sequence
  ENSG00000230102_39 (sequence is synthesized)
actgtgcctttgttagagcattagcctccagcggaacccactgtctctctccttgcgagtcccagtttgcccattctcccggatcctgcttaaaggccgcctctgccaggaggccttccc

SEQ ID NO: 920757 - DNA, 120 bp, Artificial Sequence
  ENSG00000230102_40 (sequence is synthesized)
ttcctcctctagactctgtgtttggtacagtgtggtttttgtgtttgtcctgtcttctctcacatttgactctgagccactggaagaaagggaaggaaagtaagagaaatgaagtattcc

SEQ ID NO: 920758 - DNA, 120 bp, Artificial Sequence
  ENSG00000230102_41 (sequence is synthesized)
cattcccaggcacctggccagttgttgcagacagaatgaccagcactgttgtattgattccccctcaatacgttgaaaaagcaaacgggaggcatctggaaaatcttgagataagcagct

SEQ ID NO: 920759 - DNA, 120 bp, Artificial Sequence
  ENSG00000230102_42 (sequence is synthesized)
tcattttcaatgatgagtcttttaaaatacacagaaatggtataacaatcatgtatccaccacttagactaccaatggttacttttgtcatattcactttaaatgtctttttattatgta

SEQ ID NO: 920760 - DNA, 120 bp, Artificial Sequence
  ENSG00000230102_43 (sequence is synthesized)
tttaaaagaagtgaaacttgtagatacagctagggctccccgtgtccactcactgaagtcccttcccttttgtcatattcactttaaatgtctttttattatgtatttaaaagaagtgaa

SEQ ID NO: 920761 - DNA, 120 bp, Artificial Sequence
  ENSG00000230102_44 (sequence is synthesized)
acttgtagatatagctagggctccccgtgtccactcactgaagtcccttccctctcccttctagggtccaccactttccttgtcatctggtaaaggaccctgcatccatggatggacaga

SEQ ID NO: 920762 - DNA, 120 bp, Artificial Sequence
  ENSG00000230102_45 (sequence is synthesized)
ggggattgctaaagtgctgaatcgcgtgtgaaattctacgtgtgcctctttctcacacatgccacatccattgcagagatgctcttgactcaaccttccagcagtctccactgcaaccac

SEQ ID NO: 920763 - DNA, 120 bp, Artificial Sequence
  ENSG00000230102_46 (sequence is synthesized)
gctcttgactcaaccttccagcagtctccactgcaaccactctggccaaggccaccattttcttttcttttctttttctctctcgccatggttggagtgcagtggtgcgatctaggctca

SEQ ID NO: 920764 - DNA, 120 bp, Artificial Sequence
  ENSG00000230102_47 (sequence is synthesized)
gggaagggctgacctcaggattttatactaggtttgtgtaaacacacaggattctttttctctctgtcccaaatttaatcatcgcactcattcaaatgaaatatgaagtcataagtatta

SEQ ID NO: 920765 - DNA, 120 bp, Artificial Sequence
  ENSG00000230102_48 (sequence is synthesized)
aaatatgcatgagattttgaacatgtgtattgagagaaagcattttgttttctagaaaactcatttctgctggacagtgggggtcaccaatacgttggaagggagagtgctaagctaaat

SEQ ID NO: 920766 - DNA, 120 bp, Artificial Sequence
  ENSG00000230102_49 (sequence is synthesized)
ttcagagtttcactcaccatccatgggagctatctcagggatggagaaagagaattcagatcaggtgaatccctgagtggtgagcctcagccacggcttcatcttgacagacatttgccc

SEQ ID NO: 920767 - DNA, 120 bp, Artificial Sequence
  ENSG00000230102_50 (sequence is synthesized)
tctagaaacagacttaaggtcaatccctttgccaagaagtcaagaaactgccttctcaacgaggccagtaaaatcggcataaaagacctccagagacatcaagtctccctagagagactt

SEQ ID NO: 920768 - DNA, 120 bp, Artificial Sequence
  ENSG00000230102_51 (sequence is synthesized)
tctaaactttctgaacatgttgtctatgtgctggcctgaacccagaatgtactgaagggagaaaaaatacaaaagacgatgatagacccaaggattatcttcctggcattccctagaaca

SEQ ID NO: 920769 - DNA, 120 bp, Artificial Sequence
  ENSG00000230102_52 (sequence is synthesized)
gctgtctggcaaatgttacaccacgtctgagattattttagaaactttgtcttgaagaagaacaaggagagagaataccagacagatttgccctcattttttgtcacagaataagaattt

SEQ ID NO: 920770 - DNA, 120 bp, Artificial Sequence
  ENSG00000230102_53 (sequence is synthesized)
caaggacatttttactttcagtgagatcatcctggcaatgctcttttcattttttgaaacttaaatcgtgtcacatctaataaatttatagctgtgtgtggttacagcaatgagttggta

SEQ ID NO: 920771 - DNA, 120 bp, Artificial Sequence
  ENSG00000230102_54 (sequence is synthesized)
agccctccctcaccatgcctgctatttccttacacctccaagaaccagtcatcctctcattcatgagacgcaatatgaagttgtccttaagccagaaggatttgaatttcaactctgccc

SEQ ID NO: 920772 - DNA, 120 bp, Artificial Sequence
  ENSG00000230102_55 (sequence is synthesized)
cagcacttagcaaatggtcacagaagaagtacttaatcatgcctccaggaagcccaccctaactgcctgaggcagttacctccctctctctgtcctgccttcacagaggcctgcatgcct

SEQ ID NO: 920773 - DNA, 120 bp, Artificial Sequence
  ENSG00000230102_56 (sequence is synthesized)
cccaggcagagaacttgtcatttgtgagagctgcgccctatctgagaccctgtgatgcgtgccatgcctagcccggccctgacacatggtagatcctaatatgaagctgtggagggagtg

SEQ ID NO: 920774 - DNA, 120 bp, Artificial Sequence
  ENSG00000230102_57 (sequence is synthesized)
aatggcctgcagcactgcacggaggacctctttgtggcacggccaccaacgcgtgttgggtgactgaccacagagactcctttactccttcgtttcccagaaataaaatggacaactggc

SEQ ID NO: 920775 - DNA, 120 bp, Artificial Sequence
  ENSG00000230102_58 (sequence is synthesized)
tattaagtgtctaggagcactggttttgctgataaggcaaactctatggggctgacttattggttaactagtcattgtctagatgaagaaactgaggcttggaaagaataaaaactgcct

SEQ ID NO: 920776 - DNA, 120 bp, Artificial Sequence
  ENSG00000230102_59 (sequence is synthesized)
gaagccacacagatggtaagtggcagagctggttgactgcagctccatctggcttcaatatctgtacacttcccacccctgacgctgacactgggcctgtgtgacacttggatatcggaa

SEQ ID NO: 920777 - DNA, 120 bp, Artificial Sequence
  ENSG00000230102_60 (sequence is synthesized)
ggagctgcagctggcctgaggcacctcaaggaggggcggctggtttctgtgcagtgaagacaacttcctgaagagctatgtgactgtgctgaacccgcttctgtaaaatgggttcaccaa

SEQ ID NO: 920778 - DNA, 120 bp, Artificial Sequence
  ENSG00000230102_61 (sequence is synthesized)
tggggatacgttctgggaaatgcattgttaggtgatttcatcattgtgtgaacacaccatagagggcacttacacacacctggatggtatggcctactacacacctaggctatattgtac

SEQ ID NO: 920779 - DNA, 120 bp, Artificial Sequence
  ENSG00000230102_62 (sequence is synthesized)
gttccttggtaagaaatcaactctaaactcagttggaaacctttgccaatattacttaacacatgacaatctggtgtgactcatttttcttgacattatgcaaataaaggaaacaagact

SEQ ID NO: 920780 - DNA, 120 bp, Artificial Sequence
  ENSG00000230102_63 (sequence is synthesized)
gcagaactgcctctgagctgatactcagggcacacagcatatagagtattcttgttccgcaaaaaacagtacctctgctgctgctgtacactctgctgcttcagagtcgctgtttaacac

SEQ ID NO: 920781 - DNA, 120 bp, Artificial Sequence
  ENSG00000230102_64 (sequence is synthesized)
tgtgggttcacccttgaattcttcctggatgaagccaagaaccctcctgggctaagcctcaattttggggcttgcctgtcctgcgtcagcatgagtacggactttggggttacaaatagg

SEQ ID NO: 920782 - DNA, 120 bp, Artificial Sequence
  ENSG00000230102_65 (sequence is synthesized)
tgcatttgcaaatatggaatccacgaatgatgaagatagactatcactgggtaccaccggaattctctgacctgataacttcatatgcaaatcctggctggtccttggaacaggagaaag

SEQ ID NO: 920783 - DNA, 120 bp, Artificial Sequence
  ENSG00000230102_66 (sequence is synthesized)
atagactggtggcttaaacaatagtcatttattttctcctggctctggaggctgggagatccaagatcaagatgatggcgaattaggttgttagtgagggtgctcttcctggcttgcaga

SEQ ID NO: 920784 - DNA, 120 bp, Artificial Sequence
  ENSG00000230102_67 (sequence is synthesized)
aggctgtctgctcactgtgtcgtcatgtgaccacagagagagagcaagtctgttcttatgaagacaccaatcctatcagattagggccccacccttatgatctcagttaaccttaattac

SEQ ID NO: 920785 - DNA, 120 bp, Artificial Sequence
  ENSG00000230102_68 (sequence is synthesized)
aacaggagtctttctgttggcagccaggagagatacaagagggggaggacagattctgcagctccatttcgtccttggaacaggagaaagggttggaaaacaaagatcacttttctctgg

SEQ ID NO: 920786 - DNA, 120 bp, Artificial Sequence
  ENSG00000230102_69 (sequence is synthesized)
ccacctgccagctgaatacttgggttatggtggccatccagacataaagaaattagaacgttcattcatctgcagatgctcacacattcctacaggatgactgaaacccacagcaaacaa

SEQ ID NO: 920787 - DNA, 120 bp, Artificial Sequence
  ENSG00000230102_70 (sequence is synthesized)
gcaagcaatttcatgcatttttacattaagtcattaagtaaaatcttttgtctgttttgtatggttgagattatttataagtaacaggtaaaggccaaaggtccccagcattgcttgacc

SEQ ID NO: 920788 - DNA, 120 bp, Artificial Sequence
  ENSG00000230102_71 (sequence is synthesized)
tgtttgaatatcagtccataccaaagatgtttggagaaatcactgttccgaccacagtgtcaactaacaccaaaggtagtgtttcattcaccttaaacatgtcaccagaggctgagtgaa

SEQ ID NO: 920789 - DNA, 120 bp, Artificial Sequence
  ENSG00000230102_72 (sequence is synthesized)
tgagtggagaatgatttctcggtgttgtatttgctctgaagagtctgaattcttggggaggcagaagctggaagtgagtgagtcagagctcagatgggaagtcagaggcctgcagctggg

SEQ ID NO: 920790 - DNA, 120 bp, Artificial Sequence
  ENSG00000230102_73 (sequence is synthesized)
aacctcaagggtggcccttggttacacaaagtcttataaatgcttccaaagcacagaggcttcctccttctcaggatgcgggctggagatgaagtcccccattccctgctcttgctcagg

SEQ ID NO: 920791 - DNA, 120 bp, Artificial Sequence
  ENSG00000230102_74 (sequence is synthesized)
ccatttttaccaaggttccctctcacacaggtccctcacagctggcctcatggtgtgggaaggggcccagacagctaaagtcagatctggccaggcaaagccttgaggtcccagaaggcc

SEQ ID NO: 920792 - DNA, 120 bp, Artificial Sequence
  ENSG00000230102_75 (sequence is synthesized)
ctgcccagagccaggtgtcctcacagtgaggccttgggcttacagacctgagtacttcccatgggagatacctggtcccagaggtaactcttgataagggcttatggattctccctctgg

SEQ ID NO: 920793 - DNA, 120 bp, Artificial Sequence
  ENSG00000230102_76 (sequence is synthesized)
ctttgagctgtgttgcacccgtaggtgctgatttacgtgaggattaggaaaatgctacactttgaggtagccttagggaggggctagacatctttatcacctctgaaggtggctcaagaa

SEQ ID NO: 920794 - DNA, 120 bp, Artificial Sequence
  ENSG00000230102_77 (sequence is synthesized)
tcagagtaagggtttgaacagtatttccacaggtcaaggggcaactctcttccttccaatcacccccacagatctctgtttcacctcaaaataaatgctgaacaaaaatttcaagaagaa

SEQ ID NO: 920795 - DNA, 120 bp, Artificial Sequence
  ENSG00000230102_78 (sequence is synthesized)
ggactggagtgcaaagttgaacttgactcagataaatgcattgatccttccctggggaaaaaagtttagacatcactaatagtagttaacttttgagtgcttcctctgtgctaagcacgg

SEQ ID NO: 920796 - DNA, 120 bp, Artificial Sequence
  ENSG00000230102_79 (sequence is synthesized)
atcccttgagttactttaagagaagaagggaaggggtctggtctctgtgattcagaaaaagaacagaagttcagaaacaagatgatgaaggtttaagaagcagcatcatcagcgaactgt

SEQ ID NO: 920797 - DNA, 120 bp, Artificial Sequence
  ENSG00000230102_80 (sequence is synthesized)
gaggctctgggagcctagtttatctcccgggagctgacttcatttctaaacgtataggggtttcttagaggagcttcagaatactaatcatcgctagtgagggcacttggacactttgct

SEQ ID NO: 920798 - DNA, 75 bp, Artificial Sequence
  ENSG00000230102_81 (sequence is synthesized)
tttttttttttttttttttgcgatggagtttcactcttgttgccaaggcattggagttcagtggtgtaatctcgg

SEQ ID NO: 920799 - DNA, 120 bp, Artificial Sequence
  ENSG00000230102_82 (sequence is synthesized)
tgctgggatgacaggtgtgagccaccatccccggccccttccttacttctaacccaatctggatgttgtacttttacatacttctaccattgagggtttggatctaagtctcttcccctt

SEQ ID NO: 920800 - DNA, 120 bp, Artificial Sequence
  ENSG00000230102_83 (sequence is synthesized)
attgagggtttggatctaagtctcttccccttgaatctggttgggcttgtgactgctttgacaagcagtacagcagaagtgactctatgtgatttcaaagctaggtcataaaaaaccatg

SEQ ID NO: 920801 - DNA, 68 bp, Artificial Sequence
  ENSG00000230100_0 (sequence is synthesized)
actgtcgcccgttcaagcgattctcctgcccaaacctctcgagtagctggggctacaggcacgtgaca

SEQ ID NO: 920802 - DNA, 120 bp, Artificial Sequence
  ENSG00000230100_1 (sequence is synthesized)
gcacgtgacaacatccccggctaatttttttcttttgatttgtttagctggtggcccttaggcttgggatcttagttcaaaatcattgtacaaactaaatttattctactattgctaatt

SEQ ID NO: 920803 - DNA, 120 bp, Artificial Sequence
  ENSG00000230107_0 (sequence is synthesized)
aggcaagccagtcccatccttcccagcaactgggactttccgggcagggctccccagcgcgggttcagctaattaaggaagcaattagcctcccctgaggctattcatgcttcctcaccc

SEQ ID NO: 920804 - DNA, 120 bp, Artificial Sequence
  ENSG00000230107_1 (sequence is synthesized)
acagttctcaggttctgtgagaccagagcctcagtctcccgtgagcagagggtgtgtgtgtggctgccactattctgcagacacgctggctccaccccagagagttgcagggccaggaaa

SEQ ID NO: 920805 - DNA, 120 bp, Artificial Sequence
  ENSG00000230107_2 (sequence is synthesized)
atctcttgaatgaatgcatgaaggtggagccctttcccttaatgcgcaggtgaaaagggcacctcggtggattctactaaatttaatagaagacccaagacggggtgggggagacgtgct

SEQ ID NO: 920806 - DNA, 120 bp, Artificial Sequence
  ENSG00000230107_3 (sequence is synthesized)
ttgtgctcacctggctggttcatgggcaggtggcctggaggacccagccctggcagctgtggggtagctccagcctgggccggacagcttctttcatcgcaggcaccactgcggacattg

SEQ ID NO: 920807 - DNA, 120 bp, Artificial Sequence
  ENSG00000230105_0 (sequence is synthesized)
acacaacgaaggagaggaagaagggaggaaggcacttcacaagcagagctgagccagcagggcagcaaggcagaaagggactgagattgtacctggaagtatcccagtggctggatattc

SEQ ID NO: 920808 - DNA, 120 bp, Artificial Sequence
  ENSG00000230105_1 (sequence is synthesized)
aagatcattatgtccatgccagagaaatcaagttataccaccacttcttggccttttgcctaagatcaagtgtagaaatcaagttaaaccaaaccaagtgaggatttcagttatttctct

SEQ ID NO: 920809 - DNA, 120 bp, Artificial Sequence
  ENSG00000230105_2 (sequence is synthesized)
caacttcatcaaagtctcaggatctaaaatcaatgtgcaagaatcacaaggatttatttacatcaacaataggcaagcagaaagccaaatcataggtgaactcccatttataattgctac

SEQ ID NO: 920810 - DNA, 120 bp, Artificial Sequence
  ENSG00000230105_3 (sequence is synthesized)
agagagaataaagtacctaagaatacagctaaaaagggacatgaaggacctcttcagggagaactacaaaacactggtcaaagatataagagaggacacaaagaaatggaaaaacatttc

SEQ ID NO: 920811 - DNA, 120 bp, Artificial Sequence
  ENSG00000230109_0 (sequence is synthesized)
attgtcccaacaaggctgtgcaagaaacaatcaggaaagctcagcagcataaaactatgagaaaactgggtctgagaatccagatgtcctgagtgagtaaagggaaaattttcacttctt

SEQ ID NO: 920812 - DNA, 120 bp, Artificial Sequence
  ENSG00000230109_1 (sequence is synthesized)
ctcacggagctggagaacctttcaagtgattggcctaagaacaggcaggagacgcgatctggaccaatcagaaacttacattgagatggtgggccttgctatgttgctcaggctggtctt

SEQ ID NO: 920813 - DNA, 120 bp, Artificial Sequence
  ENSG00000230109_2 (sequence is synthesized)
tcctcctgcctcagcctccttgagtaactggaattacagggctcattccagtggtctaggctgcagctcctggttggagtcacatccagccatgctttctgtgccctgatcagctggatt

SEQ ID NO: 920814 - DNA, 120 bp, Artificial Sequence
  ENSG00000229971_0 (sequence is synthesized)
gatgaggaaatgaagaccgacggaagctatctcttgagctcgtcatgcagctggcgaagggtggagcagggcttcaaatgcagacctttccaactccattgtccctgctctcctgcgtgc

SEQ ID NO: 920815 - DNA, 120 bp, Artificial Sequence
  ENSG00000229971_1 (sequence is synthesized)
gattttcttctccacggcaactgaagtgttgactttgacagtgaaagctacagagtgtatgatgtttccctttttgccttgcttgccaggaagcttgtgctttttgtcaaactgcttact

SEQ ID NO: 920816 - DNA, 120 bp, Artificial Sequence
  ENSG00000229971_2 (sequence is synthesized)
tcccctttccatggttttggtcttctacctttgacagacttttattcataagtcttactgtaagctgttctactcatagaataagctgaataaatagaaattgaattgaatggaaaagga

SEQ ID NO: 920817 - DNA, 120 bp, Artificial Sequence
  ENSG00000204960_0 (sequence is synthesized)
cgggagagatgggggtctcgccatgttgtccaggctggtgttgaactcctgagttcaagtgatcctcctgctttggctccccaaagtgctgggattacagggagcttcacaaatcataca

SEQ ID NO: 920818 - DNA, 120 bp, Artificial Sequence
  ENSG00000204960_1 (sequence is synthesized)
ttaaccagagctcctgaaacagaaggccagacgggacatattacagcaggaactggctcaccaccatccagggtcccgcatcccaggaggctgtttaaatcaacacacagactatgcagg

SEQ ID NO: 920819 - DNA, 120 bp, Artificial Sequence
  ENSG00000204960_2 (sequence is synthesized)
tgtctttcccccagcgaacttcccagctcctcggtgggagggtctaacctgccctctccccagtgcgatatttcatgtcaccttctgggaactgcctggctgtggctcgacgcacggtga

SEQ ID NO: 920820 - DNA, 120 bp, Artificial Sequence
  ENSG00000204960_3 (sequence is synthesized)
tggggacctcaccactgtcctgcccatgtgtcagaggaggagcagaggcacagagagacacccagagaagatagccatgcaacagcagaggggaggctggagccaaggacccccgggatt

SEQ ID NO: 920821 - DNA, 120 bp, Artificial Sequence
  ENSG00000204960_4 (sequence is synthesized)
gccggccacaccagaactgggccaggtgcagggcgatcctccctgcagacttcagagggggtgcccgcagtgcagagaccacaggggtccccgcgccgccggatgcccgaggatgtgaga

SEQ ID NO: 920822 - DNA, 120 bp, Artificial Sequence
  ENSG00000204960_5 (sequence is synthesized)
ctgtgcaccatctgcccgctgcccgctgccacgtccgtgtgctcggggcagggaagagctcaagccagtgaccttgaaagagggaacacagctgagaaacgtgtcagatgcccttccggg

SEQ ID NO: 920823 - DNA, 120 bp, Artificial Sequence
  ENSG00000204960_6 (sequence is synthesized)
ctggcggcgctggctgcacatctgtctggagtgcgtggatgccagaagtcactgtccatggggtgacagcgcagcctggagctgatgagaggctgggtgcgcgctgcacgtctccagcag

SEQ ID NO: 920824 - DNA, 120 bp, Artificial Sequence
  ENSG00000204960_7 (sequence is synthesized)
gtccccacagcaggctctgctgcaggcatctgggcggaactgagactggacagaccgaggctgccagcagagggaggggcaggaggcctgtcccagggaggcacagagggggtgcggcag

SEQ ID NO: 920825 - DNA, 120 bp, Artificial Sequence
  ENSG00000204960_8 (sequence is synthesized)
ggcctcccccagcctctccctcgcctggcacccccaccttccctcctttcctcgtgatcgccttcccttccctttcctttcttcttcccttcagaaggaggagctgtgggcagagggact

SEQ ID NO: 920826 - DNA, 120 bp, Artificial Sequence
  ENSG00000204960_9 (sequence is synthesized)
tgcgaatgatgaaagacatcatccctgcctccagctgggcctcggaagagagcactgatttacagaacgggagctttccccttagcgtggcccccaggtcagagtttcccagacggaggg

SEQ ID NO: 920827 - DNA, 120 bp, Artificial Sequence
  ENSG00000204960_10 (sequence is synthesized)
ccttggaagattggcttctctcggtgtttctggcagaccaggcagaaagtgaggggcagctcgtgttggaaagagttcgggacacgccgccacccgtgacctctcctagaggtgacggca

SEQ ID NO: 920828 - DNA, 120 bp, Artificial Sequence
  ENSG00000204960_11 (sequence is synthesized)
tatgtgtgagcagagggaaggctccgagcagccccggaggaagtacacatgcgtggctttatctaaccagacatttcccttggagtcctttcccccacggagggtggactgacacctcag

SEQ ID NO: 920829 - DNA, 120 bp, Artificial Sequence
  ENSG00000204960_12 (sequence is synthesized)
aaccctgtgttctggagaccctggggggatcctccctggcagccctgcggggaaacagtctctgggtgcagagcagcggtgcctgtgctttttgtgtttatgagtcactcatcgagcagt

SEQ ID NO: 920830 - DNA, 120 bp, Artificial Sequence
  ENSG00000204960_13 (sequence is synthesized)
ctttgcccaatgaaaggtttgaggagctgttacttgggccaagtcctggggaagtgatgaaatagagacggtttgtcttcagtgctggcaacctcccctttttagtcacttctttcctgt

SEQ ID NO: 920831 - DNA, 120 bp, Artificial Sequence
  ENSG00000204960_14 (sequence is synthesized)
ctccagagagggtttcctctctggtcatccacttgctcaggcatcagtgttctgattctgcccaaactttcctctcttttaaattatccttcatggctaggatgggagtacttgtttata

SEQ ID NO: 920832 - DNA, 120 bp, Artificial Sequence
  ENSG00000204960_15 (sequence is synthesized)
ctaatgtgtaaatgactaaccagctaatattgcttatattctgtgtgggcaggaggctttgcataggcctctcacatgtcccgaggtttgcctttaggcagaggaccgtctcctctgaca

SEQ ID NO: 920833 - DNA, 120 bp, Artificial Sequence
  ENSG00000204960_16 (sequence is synthesized)
gcgttaacttaatgcacctgctacgcttaatgaatacttaggcttgatgaatacgcagatgcgccagatcagttctgggtaaaggacaaacaccgtgagcaggacaggtggggtctggag

SEQ ID NO: 920834 - DNA, 120 bp, Artificial Sequence
  ENSG00000204960_17 (sequence is synthesized)
ggggaggcagatgcaccaaggcaaggggaaatacctaaagactgttagtgtcagcacagcgtcgcttcaggccgagtaagcaatgcccatccagaaagtggcagatggtggcgtgtggag

SEQ ID NO: 920835 - DNA, 120 bp, Artificial Sequence
  ENSG00000204960_18 (sequence is synthesized)
caagacatggagagagaagatgaaagatgctcagatcggggctcggcaaactttctctacaaaggccagatgacaaataaaggaacggtggctgtgtgggccacccagggcctgcctgaa

SEQ ID NO: 920836 - DNA, 120 bp, Artificial Sequence
  ENSG00000285212_0 (sequence is synthesized)
acggcgaccaccgcggcagctccccggggactcctcgcaggatatatatgatcacattttaacttagtctgcaacatgtactgaataaaaagaagatagtgcaaagcaattctccaacac

SEQ ID NO: 920837 - DNA, 120 bp, Artificial Sequence
  ENSG00000285212_1 (sequence is synthesized)
agtaaaagaggctgtgaaaattggggcaggaaaaggtttatttcatgtggctggtctcagaacctggttttcataatatttcgaaaaaaattttaaagaatcctgaattttctctttagt

SEQ ID NO: 920838 - DNA, 120 bp, Artificial Sequence
  ENSG00000285212_2 (sequence is synthesized)
gatgctacacatacttactttggacatcagcaatctaactgccggctttgcaaactcattcttcaagaggcaagtcattcttggtaacagcgtcctcaggaatgaagctcctgcagttga

SEQ ID NO: 920839 - DNA, 120 bp, Artificial Sequence
  ENSG00000285212_3 (sequence is synthesized)
gtccatcgggaagcccaggaactgaaaggcataaagaaaccgagtgctagaacacgaagatgacatttagacacagatgcttttctgcaagtcaccacactttaattttaagaaaggaga

SEQ ID NO: 920840 - DNA, 120 bp, Artificial Sequence
  ENSG00000285212_4 (sequence is synthesized)
ctagcgatctattgaataattcattccctcatggcactggttcaacaccccaggctcctctgctgagaagcctccttatgtagctgtactggacaagtgcggtagaaaagacagaaccca

SEQ ID NO: 920841 - DNA, 120 bp, Artificial Sequence
  ENSG00000285212_5 (sequence is synthesized)
gtggggatgacagaattctttaattgtctgcaaaagaggaaatccagttggtggagagaaaaattatttccacattggaaaaaaaagtaatgacaaaaataaaaaggctttgtcaaatat

SEQ ID NO: 920842 - DNA, 120 bp, Artificial Sequence
  ENSG00000285210_0 (sequence is synthesized)
tccaatcaaggctcgtggaacagggtgtcagttagtgagcatctggtggaactcctaaagaagaaatcatccattcagtgagagcaaatgaacactccaacagactgaaacaaagcatct

SEQ ID NO: 920843 - DNA, 120 bp, Artificial Sequence
  ENSG00000285210_1 (sequence is synthesized)
actatgggcagctcccatactcttcgcagatcaacaagccagcatataacccagggagatagataatagtgatgctgtgctctgtagagggtagtggcaacagtgggatttcttctggaa

SEQ ID NO: 920844 - DNA, 120 bp, Artificial Sequence
  ENSG00000285210_2 (sequence is synthesized)
taaatctgtagtgagccagatgtttctgctgactatattacttctgacagtgtataatccaaaattgtttccttggccttccaaaaagttttataagctccctaacggctgcaataaatc

SEQ ID NO: 920845 - DNA, 120 bp, Artificial Sequence
  ENSG00000285210_3 (sequence is synthesized)
ggataaagaaaaacattttagaaaaccacttgtagagtaccatgaaccagtctctcttctccattttaaaaaatttattgactcactttttttccataactttttgagatattatttcaa

SEQ ID NO: 920846 - DNA, 120 bp, Artificial Sequence
  ENSG00000285210_4 (sequence is synthesized)
ccactttgcatttagagaaaaagagtcagagagtgattaagaaatctgcccaatgctatactgatagaagctgggagaactgggatttgagcttacataggctagttctagcatttgtga

SEQ ID NO: 920847 - DNA, 120 bp, Artificial Sequence
  ENSG00000285210_5 (sequence is synthesized)
agttctcgcctaataaaaattatctgtaatcataaccagagcaagtcatttctaacctcctgtctatagacacgcggatacatttgtaatgtttttgtttgtttgtttttagcacgacag

SEQ ID NO: 920848 - DNA, 120 bp, Artificial Sequence
  ENSG00000285210_6 (sequence is synthesized)
atcaattcctgctggcattatagttctttaactatcatagcttctctgatttttcaacacatctgtcatccgtattctgcaggcatagccaactctgtcagtgtctcctcaggcaatcag

SEQ ID NO: 920849 - DNA, 120 bp, Artificial Sequence
  ENSG00000285210_7 (sequence is synthesized)
aatcaacagacagaatgtaggacagaaaactggctgcaaacatgttggaagggctggaggagcgaaagagggaagatctgttacctagagatagtaacttccagaagttaccactatact

SEQ ID NO: 920850 - DNA, 120 bp, Artificial Sequence
  ENSG00000285210_8 (sequence is synthesized)
agtgcaggagaagcagaaaggaagatgctgctacccagagcccacagtcattgtgcccctgatgccgctggaaccccactgcagctgctttacaggaagcagggaattagcgctcttgct

SEQ ID NO: 920851 - DNA, 120 bp, Artificial Sequence
  ENSG00000285210_9 (sequence is synthesized)
gatgctacaggtatccaggatccaaaagtcatcagccgctgtccctgttgcagcctagggaaactgtcccactgaggttgttggggtacctgctactgcatctactgtctgaaccatgtt

SEQ ID NO: 920852 - DNA, 120 bp, Artificial Sequence
  ENSG00000285210_10 (sequence is synthesized)
gcctgagcagatgtccagggctcaggcttgcctgctgctgttactgctgccaccatgtttatcagagctacttcaagaagagaagaaatcctcctcatttccagttttttccagtgcctc

SEQ ID NO: 920853 - DNA, 120 bp, Artificial Sequence
  ENSG00000285210_11 (sequence is synthesized)
agcagattctgcttccctgcaatagggggaaagcatagggtggaactggagctgagagctaatcacgaatgagcaaatcagtcttcaagacatttacctttccttgaaacgtttcccttc

SEQ ID NO: 920854 - DNA, 120 bp, Artificial Sequence
  ENSG00000285210_12 (sequence is synthesized)
ttttaccgtgttttccatgtcattatttttccacaattctgcatcatattctgttaactattaatgccctggataagtttatttgctctttcttagggttaatttttctccttttcttcg

SEQ ID NO: 920855 - DNA, 120 bp, Artificial Sequence
  ENSG00000285210_13 (sequence is synthesized)
aagctttagtttgcaggttcagcttgtgtgggaattttcatctccctcctcttcaagactccttggatatcagttttttggttgccttcaccaactctccccccaccatctctagaccag

SEQ ID NO: 920856 - DNA, 120 bp, Artificial Sequence
  ENSG00000285210_14 (sequence is synthesized)
ggcatggtcttagttggtggcttggactcctgtggcttggagtctttggggatattagagatccagtcactgagctggcaaagggaacactgtccttgcttccagctttatgaagaacgc

SEQ ID NO: 920857 - DNA, 120 bp, Artificial Sequence
  ENSG00000285210_15 (sequence is synthesized)
tttgctctgtcaccccacgtaaataatcatgttattcaaggataatgaatgcagccaccatgtaatcatcactgactccatggccatgagaaaagagacctaagaaatgatgcccatcca

SEQ ID NO: 920858 - DNA, 120 bp, Artificial Sequence
  ENSG00000285210_16 (sequence is synthesized)
gaagagtgaagacttcctgaaaatgttcttttaacctaagatgtaggttaagaggagtgaaaaaatgttctgtttctgactgatgatggagcaacaaaggaactcctaaagaagaaatca

SEQ ID NO: 920859 - DNA, 120 bp, Artificial Sequence
  ENSG00000285210_17 (sequence is synthesized)
tttttactttgagatttttgtgaataaccatagaaaaatctatttcacctggcaataaataggaaaaggcacagcataatgtttaaatacagagaatattgttacatgtaagatgttgat

SEQ ID NO: 920860 - DNA, 120 bp, Artificial Sequence
  ENSG00000285210_18 (sequence is synthesized)
tgaatgttctaaatacaatttgaaaactgcgtgagaggaggaaaacgtatattcagaaggacttaggtgaatccagatgaatattttcatgacaggatgttggctattgatatgaagaaa

SEQ ID NO: 920861 - DNA, 120 bp, Artificial Sequence
  ENSG00000285210_19 (sequence is synthesized)
gtagaggaatagacttgctaaaagttagaggagtctagtttatcttccaagaagctttgcaaccctgtaatactgtagaaatcacaaatttggcaataattttaagataatttatgttca

SEQ ID NO: 920862 - DNA, 120 bp, Artificial Sequence
  ENSG00000285210_20 (sequence is synthesized)
caaatttggcaataattttaagataatttatgttcattttttatggaatgccatgtttatctttttatatatgacattttctggtcagtagtaatatatatatcctttattaaaattgga

SEQ ID NO: 920863 - DNA, 90 bp, Artificial Sequence
  ENSG00000285210_21 (sequence is synthesized)
gacttctgggctcaagctgttctcccctctcagcctctcaagtagctaggtctgtgagcaaatgctaccacgcccaggccatgagaaaag

SEQ ID NO: 920864 - DNA, 120 bp, Artificial Sequence
  ENSG00000285219_0 (sequence is synthesized)
ggtaatcagctggggtttccttagggaggttggaaggtttgttctttctctctttgcagtaaatcttgcaggtgtgtgttttttgggttcatgctgcttgtatgagctgtgatgattacc

SEQ ID NO: 920865 - DNA, 120 bp, Artificial Sequence
  ENSG00000285219_1 (sequence is synthesized)
atgaaaatttgcagcttcacttttaaaaccagtgagagcacaaacccaccgggaggaacaagcaattccagacgtactgctttaggaggtgtaacactcaccggcgaggtttgtagcttc

SEQ ID NO: 920866 - DNA, 120 bp, Artificial Sequence
  ENSG00000285219_2 (sequence is synthesized)
actcctgagccagtgagaccacgaatccaccagcaggaaaaaaagattccaaacatgtctgaatgtcagaagaaacaatttccaaacacactgcctttaagaactgtaacactccctgtg

SEQ ID NO: 920867 - DNA, 120 bp, Artificial Sequence
  ENSG00000285219_3 (sequence is synthesized)
agggtctatggcttcattctttaagtcagtgagactaagacgccaccaattcggggcacattgggactatagttactgccaccatgcacatctaaacaacgttctggaatatcttcttgc

SEQ ID NO: 920868 - DNA, 120 bp, Artificial Sequence
  ENSG00000285219_4 (sequence is synthesized)
tttggtcaaccaccaggcatgggaaaatggcttcatcggttgtctttccacaaacaagatttggctactgctgtttgaggacagagacaaccaagaggaacatagacacatctggagtac

SEQ ID NO: 920869 - DNA, 120 bp, Artificial Sequence
  ENSG00000285219_5 (sequence is synthesized)
aaaacacaaaacaaaacatcagcatcttctgtaggttcatgggagatgaatatattccaccaggattgtattctaactcaaatagctcaaaggacaccttctccgggaaaccttccctga

SEQ ID NO: 920870 - DNA, 120 bp, Artificial Sequence
  ENSG00000285219_6 (sequence is synthesized)
cttccgacgctgtttcctgttacccatgatgtacattagaacacagcaactatttgagtgaaataagtatttttatttatttcaagaggaaagcaaagtcgaagggtgttcagggctaca

SEQ ID NO: 920871 - DNA, 120 bp, Artificial Sequence
  ENSG00000285219_7 (sequence is synthesized)
tctcctggctatcagctaaagggtgttgtatttgtaagcattgagaacttctatctactgctattgtattttgcatatttgtattttctgagttctatttgagagagacggaattacgca

SEQ ID NO: 920872 - DNA, 120 bp, Artificial Sequence
  ENSG00000285219_8 (sequence is synthesized)
tttccatatggatcatcctcttccctatgtatgttgctttattgccttttggaagaaaaaaagtgagagttgcagtctgtatttaggccatttctatgttctttattgggttacgtttga

SEQ ID NO: 920873 - DNA, 120 bp, Artificial Sequence
  ENSG00000285219_9 (sequence is synthesized)
atgcccaatttgatctcaatggcacgtcctttgtaacataaaataaaacatggtgctcaggaaaagtaacgacacacacatccaggccctttcatagcagttggtaaagcttaagccttg

SEQ ID NO: 920874 - DNA, 120 bp, Artificial Sequence
  ENSG00000285219_10 (sequence is synthesized)
cctctctgtgtggtagtttcccttccctttcttttcgttccctgtgacaagcagccattgtccccttggtgagatctgcaatattactttgaccccagcccatcaatctgcctcaattgg

SEQ ID NO: 920875 - DNA, 120 bp, Artificial Sequence
  ENSG00000285219_11 (sequence is synthesized)
ataatgatctgtaatcacgttctttcaggggagtctataaatttgccaaggccccattctcttctgaaggactccttatgttcactcccatttgtgcaaatgtgctctcttttacagggc

SEQ ID NO: 920876 - DNA, 120 bp, Artificial Sequence
  ENSG00000285219_12 (sequence is synthesized)
taaatagccatgcacatggtccattctgtgaggaggcaccgggcggttctctgttgattttccacgctctagtctcttaaaggagactaaggctgacatgcagggacacagtgggggggt

SEQ ID NO: 920877 - DNA, 120 bp, Artificial Sequence
  ENSG00000285219_13 (sequence is synthesized)
ggcccgagccaggccacatcacaggcagccgcttttctcattaagactgacccatcattaggtcactttgtgccatccttgtaatcaatgagcttaatgtttagtgcaaaaaaaaaaaaa

SEQ ID NO: 920878 - DNA, 120 bp, Artificial Sequence
  ENSG00000285219_14 (sequence is synthesized)
ggggtagagacgctaggccggcactgcctaggtgggccgggcggtgcgagggtcgcctttcagcctttacctctacccactgaaatggagtaggtcggtgagcgccgatctgctggagaa

SEQ ID NO: 920879 - DNA, 120 bp, Artificial Sequence
  ENSG00000285219_15 (sequence is synthesized)
tctcattatcccatcggcgctctgcctgctcctggcctccaagcctctgaagcccctcgggtttcagctgccggctaccctcgagcccgtggtgcccacgagagaggcgactttacgtca

SEQ ID NO: 920880 - DNA, 120 bp, Artificial Sequence
  ENSG00000285219_16 (sequence is synthesized)
gcggccctgggctgagatttgagaacgcgaccaagtggagaatgttggagccagattttaaaatccttgtcttccttctgcgtgctacttgatctaaatgagatacggcaaagtcacaga

SEQ ID NO: 920881 - DNA, 120 bp, Artificial Sequence
  ENSG00000285219_17 (sequence is synthesized)
acctgtttttatgtttttgcctgattcatacgggcttctccggtgaagatgggcctgaagtaacgcttgggttgcttctgacgttataactcatcctgtagctgcagcaaccgtggtcct

SEQ ID NO: 920882 - DNA, 120 bp, Artificial Sequence
  ENSG00000285219_18 (sequence is synthesized)
tgcaacctcataaaaatgttgccagcattgtttcgatagtgctgcttaattcttggaaggttcttcggacttcacacattccagcagtagctctctcagctcctgtcctgcacagctttg

SEQ ID NO: 920883 - DNA, 120 bp, Artificial Sequence
  ENSG00000285219_19 (sequence is synthesized)
aagtgctgaaacagagaagagtatgagaagtgttacagaacatgaagatacccttgtggctcaaacatacttatttttaaaaactctaaaagtctaaatgtgtctgtatctggatatatt

SEQ ID NO: 920884 - DNA, 120 bp, Artificial Sequence
  ENSG00000285219_20 (sequence is synthesized)
actatcaccagcattacacgataagatttgttataggttcagttcttctagttgaatccaatcatgcacagttaatgtagcccatttctgttctccataataatttatcttagttttggg

SEQ ID NO: 920885 - DNA, 120 bp, Artificial Sequence
  ENSG00000285219_21 (sequence is synthesized)
caactctttatagtcaggataactctgcagagtggatgaaattctaatgagtggaatttgttttctagtgctttactgataaggttaaccagatggtgaaatgtaatagcttggaagatg

SEQ ID NO: 920886 - DNA, 120 bp, Artificial Sequence
  ENSG00000285219_22 (sequence is synthesized)
tagttttgatatacagtacatcatttctggaatgatcatgaaaaagcaaaatcaacagagctttttagattctcttttttggtcatgaaattgaaaatatacctttttagagagaaatat

SEQ ID NO: 920887 - DNA, 120 bp, Artificial Sequence
  ENSG00000285219_23 (sequence is synthesized)
ctcatcatagttctcctgacatttaaactgcttggctatatatttttaaaagaagacaaacttttgaaaatgttgctataaatttttatgtattgtagatttaaaaaatctcatttaaaa

SEQ ID NO: 920888 - DNA, 120 bp, Artificial Sequence
  ENSG00000285219_24 (sequence is synthesized)
aatgaaagattatgaaattttttatgtcacctgaaggaatgtctatgatgtgaatttcaaataaaatagattttcttcaatatttttagtaatgatatcaattaattcactaagaaactc

SEQ ID NO: 920889 - DNA, 120 bp, Artificial Sequence
  ENSG00000285219_25 (sequence is synthesized)
acatttcttccaagacattgaattttgatgaaaccacaaatcagtgattatcaaaatattagaattaagcaaccctgaacattattttgctataacatttgctaatttggcacagatatt

SEQ ID NO: 920890 - DNA, 120 bp, Artificial Sequence
  ENSG00000285219_26 (sequence is synthesized)
ctttgaagatggacaatatacattttttcatctgttttgatttttgctgatatggattatgttaattatggaaatctacaagtatctcacaaataaattatgtggatgcatttaactata

SEQ ID NO: 920891 - DNA, 120 bp, Artificial Sequence
  ENSG00000285219_27 (sequence is synthesized)
ctgtaaagacttcttcagactgtcaataggaagactgataaactcaggtgtctttgtgaagcttcctatctttgcttttcaactaagatgaaacagcatttaaaagaaaatgccatgtga

SEQ ID NO: 920892 - DNA, 120 bp, Artificial Sequence
  ENSG00000285219_28 (sequence is synthesized)
tttcctgttggatgtggtcttggaaaaattgctactttttgaagtcttgaagtctcaatttctttacctgcccccccgccccaaaagtcattgaaatctgttgtgaagatgacaggaaat

SEQ ID NO: 920893 - DNA, 120 bp, Artificial Sequence
  ENSG00000285219_29 (sequence is synthesized)
aaagggtaaccagaacatgagttccacagtaactggaacatgagaggtagagccagaagaaattggaactctgagtctcagaggctatctacattcaactggtagaagacgtgagaagat

SEQ ID NO: 920894 - DNA, 120 bp, Artificial Sequence
  ENSG00000285219_30 (sequence is synthesized)
gaaaagaattagagacagaggagggtgacttagtcatataaatggtgacgcattgaaaacaaatagcaacaaagtatgtttgtggggtttaaacaaaagagcctaattcaaacaacatac

SEQ ID NO: 920895 - DNA, 120 bp, Artificial Sequence
  ENSG00000285219_31 (sequence is synthesized)
cttactatctcacagtttttgtgggtcaagagcctggcactgtttgtatagttctctctgcctcagaggctcatgtgagaatcgcaatcaaggtgtccaatggagttgcagcctcatctc

SEQ ID NO: 920896 - DNA, 120 bp, Artificial Sequence
  ENSG00000285219_32 (sequence is synthesized)
aatgtttgactggggaaggatttacttccaagatcacacccttcttggcatagttctctttcttgcaggctgttagatcaaggtccctagcttcttgttgcctattagctagaggtcaac

SEQ ID NO: 920897 - DNA, 120 bp, Artificial Sequence
  ENSG00000285219_33 (sequence is synthesized)
ctcattttagcctcagttgttagtctcagtttcttctcacatgggcctttccaacagggctgctttcttcatcaaaatcacaaagcgaaagtgactggatgatacaatcttataatccta

SEQ ID NO: 920898 - DNA, 120 bp, Artificial Sequence
  ENSG00000285219_34 (sequence is synthesized)
atccaccagcattcaagtggagagaattacgtaagggtttgattatcagggggcaaggataattgaaggccgtcttttactatgtcccccacaaacacagttacccatctgatctaattg

SEQ ID NO: 920899 - DNA, 120 bp, Artificial Sequence
  ENSG00000285219_35 (sequence is synthesized)
acatcagaatactgcatccaatgacaacagagcacacatggaacatttagcaaaattgaccacatgctggatcataaagcaaagctcgacacatttcaaagattttaagacattcaaaat

SEQ ID NO: 920900 - DNA, 120 bp, Artificial Sequence
  ENSG00000285219_36 (sequence is synthesized)
atattctttgaccacagtgaaattaagttagaaatcagtaagaagaaaactaaaaaatccccccaacagcttggagattaaacaaagcacttttaagtaatgcataattttttaaaaaaa

SEQ ID NO: 920901 - DNA, 120 bp, Artificial Sequence
  ENSG00000285219_37 (sequence is synthesized)
aaaagaatagacattagaaaaactttgattaaatgtcagaaaaaaatataaagtatcaaacctttaggaatgcagctatctgcttagaagaaaatttatagccttaaatttctatcttaa

SEQ ID NO: 920902 - DNA, 120 bp, Artificial Sequence
  ENSG00000285219_38 (sequence is synthesized)
aaaaagaagaatggataaaaatcagttatccaatttcccctttcaagcaggaagagaaagaacacatatcaaactttcagttggcagacaataaaataatgaaatttaaaataaatgtta

SEQ ID NO: 920903 - DNA, 120 bp, Artificial Sequence
  ENSG00000285219_39 (sequence is synthesized)
aatagagacagtccaaaaaagttatcaccctcattagtcatcagaagaatacaacacacatacacacacacaataagggaccactatatagaggagctaacattaaaatgatagctacac

SEQ ID NO: 920904 - DNA, 120 bp, Artificial Sequence
  ENSG00000285219_40 (sequence is synthesized)
tgttgatgatgagagtttaaaattttacaatcacaatttatcatttgttcatagtacttactaacgttgagcacaaccgtaccctttgacccagcagttccactctgaaatatgtagtca

SEQ ID NO: 920905 - DNA, 120 bp, Artificial Sequence
  ENSG00000285219_41 (sequence is synthesized)
gcagaaatttatgcatatagtctctaaaagatgcaggcatgttctagcagcattcttaaagtagttaaaaatagcaaaagcctaaatggcttttaagagttgatgagttaataaattata

SEQ ID NO: 920906 - DNA, 120 bp, Artificial Sequence
  ENSG00000285219_42 (sequence is synthesized)
ccagctggatgaatcttataaatagaatttgggcaaaagaagccaaacacacaaaaaatacagattctttatataactttttgaaatcatataattttatatataataaacataataaat

SEQ ID NO: 920907 - DNA, 120 bp, Artificial Sequence
  ENSG00000285219_43 (sequence is synthesized)
attataaacaaacatgtaaatattaaacccaggtgtaactgatgtatgttggtggctttacctttggggaggaactgatagtaactggaagtgtcatttggggaagtatctatggagcac

SEQ ID NO: 920908 - DNA, 120 bp, Artificial Sequence
  ENSG00000285219_44 (sequence is synthesized)
tatttcttactctgaatggtatttacaaaggttaactttactcacttaatgaaaattcattgatctgtatacatgtaatgtttcaaattccttatgtttatgtaaaattttaattaaaat

SEQ ID NO: 920909 - DNA, 120 bp, Artificial Sequence
  ENSG00000285219_45 (sequence is synthesized)
agtctttctggggttctaagtagcgtcttcaaagtgtcttctgtaaagacttcttcagactgtcaataggaagactgataaactcagcaacagtatcagagaaaagtatcaaggaaggac

SEQ ID NO: 920910 - DNA, 120 bp, Artificial Sequence
  ENSG00000285219_46 (sequence is synthesized)
tagaaccttgtctgtcacttgctgtaccccacctatcttcaaatccagttgactccaagtgaactctgcaaaattcccaggctggagtgcgatggcgcgatctctactcactgcaacctc

SEQ ID NO: 920911 - DNA, 120 bp, Artificial Sequence
  ENSG00000285219_47 (sequence is synthesized)
ctcttgagtaactgggattacagttttcctggtttcttggcttctcttatcttcttcaccagatcaggaagactggagcatttccatgcatgcccttgtctctcctgagtgctctgtgga

SEQ ID NO: 920912 - DNA, 120 bp, Artificial Sequence
  ENSG00000285219_48 (sequence is synthesized)
ctgcacctagctacaagacaaggtcttactctgtcacccagcctggagttcagtggcgtgatcatggcttactgcaatctctgcctcccgggttcaagggaccttcctacttcagcctcc

SEQ ID NO: 920913 - DNA, 88 bp, Artificial Sequence
  ENSG00000285219_49 (sequence is synthesized)
catgcgccaccacatggtggagacaaggtttttccatgttggccaggatggtcttgaactcttggcctcaagtgattcacctgcctca

SEQ ID NO: 920914 - DNA, 72 bp, Artificial Sequence
  ENSG00000285219_50 (sequence is synthesized)
cgagtcactgcatctgtcctgtgactgactttttcaagtcagatctttatttatgatatgaaaaaatctatc

SEQ ID NO: 920915 - DNA, 82 bp, Artificial Sequence
  ENSG00000285219_51 (sequence is synthesized)
acaccctcctgagtagctgggattacaggtgatgtcattgaactcttaagtgcaagatgaaacaagtctttctggggttcta

SEQ ID NO: 920916 - DNA, 74 bp, Artificial Sequence
  ENSG00000285219_52 (sequence is synthesized)
gccatgcccaggtgtctttgtgaagcttcctatctttgcttttcaactaagatgaaacagcatttaaaagaaaa

SEQ ID NO: 920917 - DNA, 120 bp, Artificial Sequence
  ENSG00000285219_53 (sequence is synthesized)
tagctcaaaggacaccttctccgggaaaccttccctgacttccgacgctgtttcctgttgggcatctatgtaaatcatttggagtttttgcctttcctcttagaagaaaaatatgaatga

SEQ ID NO: 920918 - DNA, 120 bp, Artificial Sequence
  ENSG00000285219_54 (sequence is synthesized)
tttgactgaacaggcctatagccaaacccaagatgatctttccaagcgtgaactccatcttcaaacttctaatcttaaaccttaaagaagaaactatggcaatgtctcttccaccactct

SEQ ID NO: 920919 - DNA, 120 bp, Artificial Sequence
  ENSG00000285219_55 (sequence is synthesized)
tgactagcatgatgtgttgccaaaagacttcagatcataagtgcgaaataaaaaatcaaaaattgactgcatcttttctcattgctcaacaactgtcaaacaactgagaaatttgttttg

SEQ ID NO: 920920 - DNA, 120 bp, Artificial Sequence
  ENSG00000285219_56 (sequence is synthesized)
acgtagtctgcagttcctcactgaccactgattgatgtcaacgtgcaaactctcagacagaagacaagaaatatgtcctgggttttctggttcctcaagcttctgactaggaccagagcc

SEQ ID NO: 920921 - DNA, 120 bp, Artificial Sequence
  ENSG00000285219_57 (sequence is synthesized)
agcaattacacacacttatccctattctttccatgaatgcagagaaagaaagaccttcttgggctgtaagaaatactctattcctcacacataataactaaggctcagcagcttgtaaaa

SEQ ID NO: 920922 - DNA, 120 bp, Artificial Sequence
  ENSG00000285219_58 (sequence is synthesized)
aggcatggtccagggcatgtcaggacaaggaagagcggtaagttgtttctctgtctttcctctgtattctttcataattgggacaaggcctcagctgacaaggagctggcagaacactgg

SEQ ID NO: 920923 - DNA, 120 bp, Artificial Sequence
  ENSG00000285219_59 (sequence is synthesized)
ggacagctggtatgtaagaaccaacaccgtcccatcagtcatttattcaacacatgtttattgagtatctgcaacgtgactgcaccgttatagagtctgcattgttgtaggtcctgagaa

SEQ ID NO: 920924 - DNA, 120 bp, Artificial Sequence
  ENSG00000285219_60 (sequence is synthesized)
aaaaactgcaaagcaaaagtacacacaggcttgccctcctgaaatgtacagtcaggtggagatggcagatattaagaaactaacttgtgctattgaagtttaaaagaaagggatcttact

SEQ ID NO: 920925 - DNA, 120 bp, Artificial Sequence
  ENSG00000285219_61 (sequence is synthesized)
gagtctgaggagagggatgaatcaatgcagacttcctagaagaactggcatataaaccaagaactgaaagaggaatagacattaaaccagaaaacagaatggaagaaaaatagatttacg

SEQ ID NO: 920926 - DNA, 120 bp, Artificial Sequence
  ENSG00000285219_62 (sequence is synthesized)
atgcaaaaaccgtaaaggaaagagttcagtatgactggaatatatagacagaagataatggtttatgataagactgaaaaggaatgcagggtctagataaagagactcttcaaattagta

SEQ ID NO: 920927 - DNA, 120 bp, Artificial Sequence
  ENSG00000285219_63 (sequence is synthesized)
agaatttttttgagacaataaaagaccattttgctttggcaaaataataataataataacactcagtgtagtgtgaactataaatttaggagagcaagagtaattgtggggaaatcagtt

SEQ ID NO: 920928 - DNA, 120 bp, Artificial Sequence
  ENSG00000285219_64 (sequence is synthesized)
aagagacttgctttagccaagaaaacagttgatgttggattaaaccatggagaagataatggagataatgacaagtggacagattttggaaatcaatatcttttggtaattaattgaaca

SEQ ID NO: 920929 - DNA, 120 bp, Artificial Sequence
  ENSG00000285219_65 (sequence is synthesized)
taggagaaagaagaaaagatggggttacataggactctgaaatttctgaacaatcagctgggaagatgatagcattatttgttgtgtaaagaacatgagaagaggctcgggattggaagg

SEQ ID NO: 920930 - DNA, 120 bp, Artificial Sequence
  ENSG00000285219_66 (sequence is synthesized)
acacatgaggagctctggttttgacacagtgagtgtggtatatgggctctcacttacgtgggtctagagctaagaagagaagtcatgggttggacgcaaaagtgtgggttttggcagcat

SEQ ID NO: 920931 - DNA, 120 bp, Artificial Sequence
  ENSG00000285219_67 (sequence is synthesized)
ttaggtagtaaaaatttggcaaatggttaagagtatattacaggaaaagaaaataatttaggtcagagtccagaggaaagcatacatttaacacagaagaataaaacctgagaaataact

SEQ ID NO: 920932 - DNA, 120 bp, Artificial Sequence
  ENSG00000285219_68 (sequence is synthesized)
ggtaaacgagattaggaagcagtcagagaggaagaaagccaggaggatacggtgtggcatggaagccaatggagagattgtttcaagaagaagaagatagttaacagtagggaattatca

SEQ ID NO: 920933 - DNA, 120 bp, Artificial Sequence
  ENSG00000285219_69 (sequence is synthesized)
gttgccagcattgtttcgatagtgctgcttaattcttggaaggcctctttgctttcttccctgaggttcttcggacttcacacattccagcagtagctctctcagctcctgtcctgcaca

SEQ ID NO: 920934 - DNA, 120 bp, Artificial Sequence
  ENSG00000285219_70 (sequence is synthesized)
gctttgaagtgctgcaaggccccaatctgcaagccaggaagagtcgtcacgagaaccagaccatgcaggaactctgatcgtggacatttcaacctccagaactgtgatccaaaatgcata

SEQ ID NO: 920935 - DNA, 120 bp, Artificial Sequence
  ENSG00000285219_71 (sequence is synthesized)
tgtatctttggaagaaactctgaagtaaaggccggaatattctttgtttaaaacattaaaaacaaaacagaccaaagcatcaagcaagaagtttcctggcaataaactaagcacagcatt

SEQ ID NO: 920936 - DNA, 120 bp, Artificial Sequence
  ENSG00000285219_72 (sequence is synthesized)
attttttaaggaacacaaattaagtgttcaacctgtggcaaatttgtactttctccctgaattatgttgttatcaaagaaaaaaattgggaagcatggcaaaatatcatcaaaactgaaa

SEQ ID NO: 920937 - DNA, 120 bp, Artificial Sequence
  ENSG00000285219_73 (sequence is synthesized)
gctcctgtcctgcacagctttgaagtgctgagatggggtctccctatattgcccaggctgggcttgaactcctggacttgaacgatcctccagctttggcctcccaaaatgctgagatta

SEQ ID NO: 920938 - DNA, 120 bp, Artificial Sequence
  ENSG00000285219_74 (sequence is synthesized)
agctgaagacacagccctggtgatggctttctgaggatgacacgatggaggcttctccaatagctctaaaactgcggtgtggaaaacattcggcagcctcaaagagcggtcttgttgacc

SEQ ID NO: 920939 - DNA, 120 bp, Artificial Sequence
  ENSG00000285219_75 (sequence is synthesized)
ccaactatatcatttttcatcaaaatcattcttgtaaagaatgaccaggcaacactctttgaaaattggaggccatttgcagctgctctctgttgaggaaagtgaataatagggtgccct

SEQ ID NO: 920940 - DNA, 120 bp, Artificial Sequence
  ENSG00000285219_76 (sequence is synthesized)
caaggaattgcaaaggtatcactcaacagaaactttcgtgtctgaagaaaactagatcattttatcatggtaggcatgctgatatgtttgctttaataaaatgccatatttctgccttta

SEQ ID NO: 920941 - DNA, 120 bp, Artificial Sequence
  ENSG00000285219_77 (sequence is synthesized)
atctcttgtcaacccgctattaaaaagccccaaagtgcatgtgtgcagcgcatgtaaacacttgtggttttgaggttaccacagaacatactaataaagcatgtaatttgtgttttgtgc

SEQ ID NO: 920942 - DNA, 120 bp, Artificial Sequence
  ENSG00000285219_78 (sequence is synthesized)
gtaaagacttcttcagactgtcaataggaagactgataaactcagagtctagccctgtcgcccaggctggagtgccatggtttgaactctactcaccgcaacctccacctcccaggttca

SEQ ID NO: 920943 - DNA, 120 bp, Artificial Sequence
  ENSG00000285219_79 (sequence is synthesized)
gaggtaaaagcaaaaaaaaaaaaaaaaaattgtcaagaggcaagaacagaacttgaaagagaataccaggaaaccatggaaagtgaagatagacttagagagtatggtcaaaagttagga

SEQ ID NO: 920944 - DNA, 120 bp, Artificial Sequence
  ENSG00000285219_80 (sequence is synthesized)
cagagaaatcagatgagctgatctgaaatccagaaactattcatggagaacacaccccaggcgagtgacttttgaaagtcctttcctttatacttacctatattaattgctgaatgtaaa

SEQ ID NO: 920945 - DNA, 120 bp, Artificial Sequence
  ENSG00000285219_81 (sequence is synthesized)
tcatattttaattatttattaccaaaataatgtatttccttgtggaataacttaaaaaatgtagaagagtaaagaaatgatccatattcttcgcataaaaagaaaaacaatattgatgtt

SEQ ID NO: 920946 - DNA, 120 bp, Artificial Sequence
  ENSG00000285219_82 (sequence is synthesized)
tgtttgctctttccatcagaattgtccaaataaataatcattctatacacattactttgaaatatgttttctttgcataatattttagcataaccaattatattttattataagttgggt

SEQ ID NO: 920947 - DNA, 120 bp, Artificial Sequence
  ENSG00000285219_83 (sequence is synthesized)
aaggacaccttctccgggaaaccttccctgacttccgacgctgtttcctgttgctttctgtctgtgggtgttacatatttttcccttcttcaactaaccgtgtctgagcaggacagctga

SEQ ID NO: 920948 - DNA, 120 bp, Artificial Sequence
  ENSG00000285219_84 (sequence is synthesized)
tgggatgttgatgttgttttttaatggatgctcaagcttcggatacatgaacgaaaatcattttaaataaaaacaaaaagaaaggggtttttccatctctacactacacattggattttc

SEQ ID NO: 920949 - DNA, 120 bp, Artificial Sequence
  ENSG00000285219_85 (sequence is synthesized)
tacacagaagctgtacgtgaaggatcaaagctcattcctgcattccagcaagcaatttctacaagtgcatctacatttctgtgacaatccgcttctcctaacccttcccatcatccagtg

SEQ ID NO: 920950 - DNA, 120 bp, Artificial Sequence
  ENSG00000285219_86 (sequence is synthesized)
aagtattagcatgtgaaaaattgcatctgtcagaaatgtaaaaataatcatgcccaccttggtcttttctatttaataatttgggccatggattggtaacctttgttttgcttactgtgc

SEQ ID NO: 920951 - DNA, 120 bp, Artificial Sequence
  ENSG00000285219_87 (sequence is synthesized)
agtcacaaattacttttatagatcaagagaacttgaactttcaaaagtgctgttttagcttaaaatgttatgatttagatattctgtttatatatgaagaaactagtgacgaatatagta

SEQ ID NO: 920952 - DNA, 120 bp, Artificial Sequence
  ENSG00000285219_88 (sequence is synthesized)
agcattttttttcattcttcacttaaattgttgccttaacatagggtttcttcttttaaaatagtagcaaacttatagaagactgtttaactgcatatgtgggtactatgcagtcaatta

SEQ ID NO: 920953 - DNA, 120 bp, Artificial Sequence
  ENSG00000285219_89 (sequence is synthesized)
gccatagaagaaataatacaggacttccaaagtaatgccaatggtctataatctcgtcacgttacaatgtctatcacttaatgtatgtggattttaggggactcatttgggatctttaaa

SEQ ID NO: 920954 - DNA, 120 bp, Artificial Sequence
  ENSG00000285219_90 (sequence is synthesized)
tcatattcaattctctattatgatacttgggaagttaaataatcatgttgttttccattaaactagaaaaagctaatgtattttcaaatagcaatggaaaggtgacatgagataagcctt

SEQ ID NO: 920955 - DNA, 120 bp, Artificial Sequence
  ENSG00000285219_91 (sequence is synthesized)
ttagattactattgtttttcctaggttactggcctaaaaagaaatagaaagtttatacaaatgtggaaagaatgcctaccagataaactattgttcatatctacagtttattatttgata

SEQ ID NO: 920956 - DNA, 120 bp, Artificial Sequence
  ENSG00000285219_92 (sequence is synthesized)
atttccaatttaacttagtcttttgacttagctttttttagtcattgcaggctttaatatttgataactggttcagtgtcacaaaatagtttcttcatataaaagcaattttatatgata

SEQ ID NO: 920957 - DNA, 120 bp, Artificial Sequence
  ENSG00000285219_93 (sequence is synthesized)
gtgtgattcagccagattcctctgtacaatagacatcctgaacagtccctgggctccaacccatcatcaaagtcccctctgtcaaaaacttcacctgttgactttcaaagactaggacag

SEQ ID NO: 920958 - DNA, 120 bp, Artificial Sequence
  ENSG00000285219_94 (sequence is synthesized)
gatcaactgtgttctacagacttggaaatatgatcgcaacgcattgccttccctgcaaaatttttacagttgctgcagagacaacaaaggtgtgccacaaatgttgatgtaggtgcagga

SEQ ID NO: 920959 - DNA, 120 bp, Artificial Sequence
  ENSG00000285219_95 (sequence is synthesized)
aatgaaaagcacacaactaaaagaaaaatgcaaaaggctttcttgaaaagaaaatctgtatgtgctttataagtttcatctgaaagccaatgttaacctgctgctttatttaaccctctg

SEQ ID NO: 920960 - DNA, 120 bp, Artificial Sequence
  ENSG00000285219_96 (sequence is synthesized)
ctgagcactgcatatgggacattgcaaaccgatgtcatttgagatgtgttaggaccatcacctagtgattaccttccttagaagataatattttatgttaaataaacaatggtctccaga

SEQ ID NO: 920961 - DNA, 120 bp, Artificial Sequence
  ENSG00000285219_97 (sequence is synthesized)
gaatacttgtttttagaaagaattgggagagagcagtgcagtaatcaaaaggtgaaagagtccagaaaatgaatacagtgtgtcaaagtattaattaaagtattttctctctttctggat

SEQ ID NO: 920962 - DNA, 120 bp, Artificial Sequence
  ENSG00000285219_98 (sequence is synthesized)
gagatgagtggggaagagaagggttgtcattggcctttagttttttgttgctgagtaagtgaaaagaaatggaaaatgagattcttccagtttcaaactgttacaatatggtgacttaca

SEQ ID NO: 920963 - DNA, 120 bp, Artificial Sequence
  ENSG00000285219_99 (sequence is synthesized)
tgccctacagagaattcctgaaggcacgaacccagtcacaaattggcgcacatcagcattttgcataaaaggaaagcatccatatctgactcaagcaacaatgaaatcaatacagaaaca

SEQ ID NO: 920964 - DNA, 120 bp, Artificial Sequence
  ENSG00000285219_100 (sequence is synthesized)
tttccagagaagtcctgcaggttttttatgcatttatagctagtatattgtgcaaaaaatcttctgactgtttaataaatcaactttagatccacaattcctaaacttccatgattttct

SEQ ID NO: 920965 - DNA, 120 bp, Artificial Sequence
  ENSG00000285219_101 (sequence is synthesized)
ttatcatcagctagagagcaccctgaagataggaagtcacatttgtttcccctactgtttctatccttattagatggcttatctctctgctggttttttgataggtttggatacaggagt

SEQ ID NO: 920966 - DNA, 120 bp, Artificial Sequence
  ENSG00000285219_102 (sequence is synthesized)
taaattcatatcttatagtctctctaccacagcctcctccaaagcttgcagaatatcgtgaaaagagtatctggcaactccagggccaaaacgctgccctcagctctctgcctcggccca

SEQ ID NO: 920967 - DNA, 120 bp, Artificial Sequence
  ENSG00000285219_103 (sequence is synthesized)
gacctgtctgtcaatagaattatgcccatccctggaattgtatttgattttatttaccattgaatatctgagctacctgcttgagttaagtaattattttaggtaatccaaaaaacatac

SEQ ID NO: 920968 - DNA, 120 bp, Artificial Sequence
  ENSG00000285219_104 (sequence is synthesized)
gcaagtgctctacccacatggaagtctttgggacctgcacttcaatgagcgcagagaggaaaaggagagaagaaccaacacaactgaagcacctacgagcgtcaggcactggcccagctg

SEQ ID NO: 920969 - DNA, 120 bp, Artificial Sequence
  ENSG00000285219_105 (sequence is synthesized)
ccatggacccccgagttgaaggtcgtataacctcagcctgcccaaatgaaccaagcacacaaccacagggggaacccaagagttccagtgggagagctggaagaggagggaccaatgtga

SEQ ID NO: 920970 - DNA, 120 bp, Artificial Sequence
  ENSG00000285219_106 (sequence is synthesized)
gaagtggacaccatatggcaggatccaggatccaatcagactgagccctggggtcaccccatggaaggatccagttggatcatgcctcctggcatcacctactgcaagatccaatcagat

SEQ ID NO: 920971 - DNA, 120 bp, Artificial Sequence
  ENSG00000285219_107 (sequence is synthesized)
cacacctccttaccctatgcttataaaaccccacccagcccccagcccgaagatacagatttgagtatttcctcctgtttccttaccagtcgatttgcaataaagcttttttttttttcc

SEQ ID NO: 920972 - DNA, 120 bp, Artificial Sequence
  ENSG00000285219_108 (sequence is synthesized)
ggttggttatactttgcccaaagggtaggatgaactcaaatatgctacatgtgattcctcaaacaaccgcttccagtcctgtttgttttctgtaaaacgtaaatattcttagacgcaaca

SEQ ID NO: 920973 - DNA, 120 bp, Artificial Sequence
  ENSG00000285219_109 (sequence is synthesized)
tttcccccaggggccccgcacttctcatgaagtcagatgaagtgctctgtctataaccgaggctgaatctgcatttgctgggaaccctgtagtggtgaagagagaggtggtcaaagtccg

SEQ ID NO: 920974 - DNA, 120 bp, Artificial Sequence
  ENSG00000285219_110 (sequence is synthesized)
tgagcaattggggtggttttggaggggtaattggattttgtttattgttggatcccaaagagtttcatgaccacagccaaatacagcaaataaaaaagaaaaaatatattaaattaaaaa

SEQ ID NO: 920975 - DNA, 120 bp, Artificial Sequence
  ENSG00000285219_111 (sequence is synthesized)
taagtaggacacaggactgggctgtggcccttggcgagcctcccaagctattcagtgatgttagacaacccacttaccttctctgaaatttacttttcttatatgtaaaatgcagctatt

SEQ ID NO: 920976 - DNA, 120 bp, Artificial Sequence
  ENSG00000285219_112 (sequence is synthesized)
tgtgatccagtaagtgttgtttaagccacccagtctttgttattttttatagcagcctaagcggactgagacacgtgaaggtggactgagacacatgaagcagtcagtgtggggctgttc

SEQ ID NO: 920977 - DNA, 120 bp, Artificial Sequence
  ENSG00000285219_113 (sequence is synthesized)
cttcactatctggtgctgaagctttaagtccacggggcaggaagttgggagaaaagagggcgtgaaatagagaggggttcgaacaatctggaactcttgaggctgagctggttcccacaa

SEQ ID NO: 920978 - DNA, 120 bp, Artificial Sequence
  ENSG00000285219_114 (sequence is synthesized)
ggaccaactgggacccattagcccctcttaccacctgttagcctccatctttgattatggaatcgatttgctggagaagctggagcttttcctcatggagctaaatctgctgctgccatg

SEQ ID NO: 920979 - DNA, 120 bp, Artificial Sequence
  ENSG00000285219_115 (sequence is synthesized)
ccaaccagttgaactggcactgggacaaccatgtatgctgtctgaagcacagcctgacgcccctgtggacctttatagaatgcaaagagtatggctgctacttcacttttacctttcaaa

SEQ ID NO: 920980 - DNA, 120 bp, Artificial Sequence
  ENSG00000285219_116 (sequence is synthesized)
tcttgtgcaaattcacttatgctccacccccaacccagaactctgcggataaaggaattctgggaaatgtagttccagtttgtctgaattgacctattgcaaatccacaacacagcacca

SEQ ID NO: 920981 - DNA, 120 bp, Artificial Sequence
  ENSG00000285219_117 (sequence is synthesized)
acagtgtgtgctgtgagaatgtcgcagacgtgtgctgctactctggcactcacacttgtccaggctgtttcttaggtggtcatcttgcctgtggtatcagaaaaagggatttctacttag

SEQ ID NO: 920982 - DNA, 120 bp, Artificial Sequence
  ENSG00000285219_118 (sequence is synthesized)
tattaagaagttgaaaccaaagtagaaaatattcatcctttgctttccccaaacaattcttctgcctagaaatgtcaacaacttaaccacatgcaaatacccatttgtggacaaatgtgt

SEQ ID NO: 920983 - DNA, 120 bp, Artificial Sequence
  ENSG00000285219_119 (sequence is synthesized)
acaaaagacatttggggttcccctctttgagactagattaaagctgaccatatagatagggaagaaaactgtttttctctgtagcatcatattgctgctttgtatattttctgatagagt

SEQ ID NO: 920984 - DNA, 120 bp, Artificial Sequence
  ENSG00000285219_120 (sequence is synthesized)
gatttcagtgacttgtatcaccaagaggaggaccatcagcatgcagtggaggtctaggcttcagacatgtgaggcacactgaggagcagctttatttgcaagaggtattaggaatcttcc

SEQ ID NO: 920985 - DNA, 120 bp, Artificial Sequence
  ENSG00000285219_121 (sequence is synthesized)
taacaaagttgaccttcaggatgggagaaatcaaagcacagaccatagatccaaaaaaaatggcttctggtcagaaaaggtgatctgagattaggggaagatgtgtcatcaatatcatcc

SEQ ID NO: 920986 - DNA, 120 bp, Artificial Sequence
  ENSG00000285219_122 (sequence is synthesized)
cctggtccagccctgtgaaatcacacctgagtggtagagaaatatctatgaaaaaatagtaaaacagaaacaaatgtttctgtctggcagacaggcagctgcatggctttcagggccagg

SEQ ID NO: 920987 - DNA, 120 bp, Artificial Sequence
  ENSG00000285219_123 (sequence is synthesized)
tagaggggacatcacatgtacatggtggcagcgggatgtccccaggtagcagaaagtcgcaggtggctcatcagagaccctaaagaactagccccctacttgtaggtgtcagtggctgtg

SEQ ID NO: 920988 - DNA, 120 bp, Artificial Sequence
  ENSG00000285219_124 (sequence is synthesized)
gtaggagtggccatagatagtttctggttacacaagattggtgtgggaacagcatgaccacgagaaaaatctgggttgacggccccagggagctggagcagaatattaacaatagtagct

SEQ ID NO: 920989 - DNA, 120 bp, Artificial Sequence
  ENSG00000285219_125 (sequence is synthesized)
agcatttgagtgctgcccatgtgcttgaaaatgttctaggtgatttacctttattagctcctataattctcaaaacgacctcgagttaggtctttctattattcctattttatagacaaa

SEQ ID NO: 920990 - DNA, 120 bp, Artificial Sequence
  ENSG00000285219_126 (sequence is synthesized)
gcagtggagccacagagaggttaagtaacttgcccaatgtcacacagcaaaaagtggcagagccacaattttaatttgggttgaagaggaaaatagataatgcatattcctaggatctga

SEQ ID NO: 920991 - DNA, 120 bp, Artificial Sequence
  ENSG00000285219_127 (sequence is synthesized)
gagatgtttgaggtgagggggaatgagaggctctcctttgaaagaagcagcagggggtactgaaacagagtagaagagtgtgaaagctggtggggttgttgttgttgttgtttttagtcc

SEQ ID NO: 920992 - DNA, 120 bp, Artificial Sequence
  ENSG00000285219_128 (sequence is synthesized)
gtgatgtcattgaactcttaagtgcaagatgaaacaagtctttctggggttctaagtaggcatggtgtaaggaacttgagctcaaaatgaactaagacacagtcttgttcacacagtgga

SEQ ID NO: 920993 - DNA, 120 bp, Artificial Sequence
  ENSG00000285219_129 (sequence is synthesized)
agagtactgagctgtctccgaagaattcagattattgaatgtaggcacccttttctgatttccttcatcaattcaattcaggagatgtgatgcaatgtgatgtgtcaatgtatgtatgat

SEQ ID NO: 920994 - DNA, 120 bp, Artificial Sequence
  ENSG00000285219_130 (sequence is synthesized)
cgaagtgtcagtctctataagtactccgctccatgatcctggggtgaagtgctacaaaacacatttttggtggagcagaaatagtgctgcctttcctgtgcttcccacggctgttgtaga

SEQ ID NO: 920995 - DNA, 120 bp, Artificial Sequence
  ENSG00000285219_131 (sequence is synthesized)
tagaaagcaatgaattcagaattctcaagtcggccaggccatcttctcagtgagctttgcctcaggcaccctagatattaccacatgagagctatatttcatctgttcttaaatttttgc

SEQ ID NO: 920996 - DNA, 120 bp, Artificial Sequence
  ENSG00000285219_132 (sequence is synthesized)
agctaaaggaccacatttgagggtcgaaatccctgccacaaaaccaaccttaccaccttctactactcataagaaaaatccatcagaatttactggaatttattgcaagaatgaccttcc

SEQ ID NO: 920997 - DNA, 120 bp, Artificial Sequence
  ENSG00000285219_133 (sequence is synthesized)
atttcatgagttgacaatgatgtgaagcctggttttatcaactatccaagtaaagtagtaacttcaagtctttaatagtacacaagaatcatttacaggtcaagtatggaacctctaatt

SEQ ID NO: 920998 - DNA, 120 bp, Artificial Sequence
  ENSG00000285219_134 (sequence is synthesized)
atgaaaaactgattctcagagcatattttaccagatattgtgagaaacagagaaaaagcagttaacaatgaaagtaattactggccttcaaattcattattaacagcaagtcaaattgaa

SEQ ID NO: 920999 - DNA, 120 bp, Artificial Sequence
  ENSG00000285219_135 (sequence is synthesized)
aaggtactggttctgttctctgtcattgacgtgagagaatatggtagaagtaagcggagaaagagacttggaggccatctgctcaggccctttcacttttcttcagaagcaaagttgtta

SEQ ID NO: 921000 - DNA, 120 bp, Artificial Sequence
  ENSG00000285219_136 (sequence is synthesized)
tccccacattccgtctctttccgtagaacatacatgtgccagtatccagatttcttcacatattcttctttccatgtctcccatttcaaagaagtgttccttctcaggtgtaaagagtga

SEQ ID NO: 921001 - DNA, 120 bp, Artificial Sequence
  ENSG00000285219_137 (sequence is synthesized)
ggctaattgccctgtcttttcccgctaactcagctcttcctgaaacaagtacctttcctcatttctgtaatttttcttctgcttgccataaaaggaaatcaagttgcataccattcaaat

SEQ ID NO: 921002 - DNA, 120 bp, Artificial Sequence
  ENSG00000285219_138 (sequence is synthesized)
ctcccatcagctttgtgatctttggaaatgtttttttcacattttctaatagaaaatttcatatacagtatgtacgaaatggagtgaaatgataaggtcccatttatacgacactcaact

SEQ ID NO: 921003 - DNA, 120 bp, Artificial Sequence
  ENSG00000285219_139 (sequence is synthesized)
tcaatagtttctaactcatagtaatcttgtttcatctatacttgcactcgctgccattctgtcagataattttaaaacaaatatcagatattatatcattctctagtatttatcactaac

SEQ ID NO: 921004 - DNA, 120 bp, Artificial Sequence
  ENSG00000285219_140 (sequence is synthesized)
tcactaacatttaagagctattttattaaacataagagtaatgtcagggtctggggtgttggctcacgtctgtaatctcagcattttgggaagtcgaggcaggcagatcacttgaggtta

SEQ ID NO: 921005 - DNA, 86 bp, Artificial Sequence
  ENSG00000285219_141 (sequence is synthesized)
ctgtctctactaagaatcggtcccagctacttggaggctgacatgggaggatggtttaagcccaggaggtggaggttgcagtgagc

SEQ ID NO: 921006 - DNA, 120 bp, Artificial Sequence
  ENSG00000285219_142 (sequence is synthesized)
tgagatcgcaccactgcactccagcatgagtgacagaactagactctgtctaaaatttttttaaaaagtaatgtcgttatcacatgtaaaaattaacaatgatgctttaataccatcaaa

SEQ ID NO: 921007 - DNA, 120 bp, Artificial Sequence
  ENSG00000285219_143 (sequence is synthesized)
ttaacaatgatgctttaataccatcaaatagctagtcagtgtttatatcttctcaattgtctcagataatttgttaaaagtgttgaatcaagattcaaataagaccatagtttgccatca

SEQ ID NO: 921008 - DNA, 120 bp, Artificial Sequence
  ENSG00000285219_144 (sequence is synthesized)
caagattcaaataagaccatagtttgccatcagttgatgtatctcttaagtctcctctctccttctgcaatatttgttgaaaaatctgtgtcgagacgggcggatcacgaggtcaggaga

SEQ ID NO: 921009 - DNA, 120 bp, Artificial Sequence
  ENSG00000285219_145 (sequence is synthesized)
gatgtgatgcaatgtgatgtgtcaatcacaggggaacaaatgacatgatatttactctgcatctgatagcctatcactttacaaaacaatgtttgagcctgggtgcagtggctcacacct

SEQ ID NO: 921010 - DNA, 120 bp, Artificial Sequence
  ENSG00000285219_146 (sequence is synthesized)
aatgtgtctgtatctggatatattttcagtcaacttatgctgtgttgggtaaagggtcttgctccgttgtccagattggagtgcaatggcatgatcatggctcactgcagtcttgacctc

SEQ ID NO: 921011 - DNA, 120 bp, Artificial Sequence
  ENSG00000285219_147 (sequence is synthesized)
ttaacgttctgagtagctgaaccacaggtgtacgccaccacacctggctataaataactgcacgagactgggtaacttaaaaaggaaagaggtttaattgactcataattcagcatggct

SEQ ID NO: 921012 - DNA, 120 bp, Artificial Sequence
  ENSG00000285219_148 (sequence is synthesized)
ctcaggaaacttacagtcatggtggaatgcgaaggaaaagaaaggcgccttcttcacaagtcagtaggaagaagtgccgagtgaagggggaagagccccttataaacccgttagatcttg

SEQ ID NO: 921013 - DNA, 120 bp, Artificial Sequence
  ENSG00000285219_149 (sequence is synthesized)
agatcttgtgagaactcagtcgctatcacgagaacagcatgggggaaattgcccccatgattcaattaccaccacctggtctctctcttcacatgtagggattatggggcttatggggat

SEQ ID NO: 921014 - DNA, 90 bp, Artificial Sequence
  ENSG00000285219_150 (sequence is synthesized)
aagcttagccatatcacctggctaattaaacaaatatttgtagagatggtattttgccataatggccaggctggtctcaaactcctggcc

SEQ ID NO: 921015 - DNA, 120 bp, Artificial Sequence
  ENSG00000285219_151 (sequence is synthesized)
aggcatgagccaccacgcctggcccacaggattctttatatattctctatataagattttttcaataatgtgtcacaaatatcttcttttagcttggagtttatgtttttactctatggt

SEQ ID NO: 921016 - DNA, 120 bp, Artificial Sequence
  ENSG00000285219_152 (sequence is synthesized)
ttagcttggagtttatgtttttactctatggtaacttttaatgaccggacatctttctttttaatgtagctgaatttatcaatattttctttatagattcatgttgtgtcttgcttaaga

SEQ ID NO: 921017 - DNA, 120 bp, Artificial Sequence
  ENSG00000285219_153 (sequence is synthesized)
aatactttctaccttaggtcataaggatgctttcttatattatcttttaaagactttatgtttttgcctttcatattgattgtcaatcaaccagtaactatttgtttctttttgatatat

SEQ ID NO: 921018 - DNA, 120 bp, Artificial Sequence
  ENSG00000285219_154 (sequence is synthesized)
gcatggtgtgatgtaggaatcagataacagtttttgacaagggtaattaaaatgcctagtagctttggaatacctcatctttttcccagtgatctgaagtttcctatgtattatatgtca

SEQ ID NO: 921019 - DNA, 120 bp, Artificial Sequence
  ENSG00000285219_155 (sequence is synthesized)
ttacaaaccatttttgcatgcatttgtttctgggctttctattccattcatgggtctatttatctgtgcatatatatagactacagttcttagttatatagctttatagtaaatcttaaa

SEQ ID NO: 921020 - DNA, 120 bp, Artificial Sequence
  ENSG00000285219_156 (sequence is synthesized)
atccatttgcttaacattcctctccaacttggtggctatttgggggcttttgttcttacaaataaattataaaatcaactttaatttcaaaaataataataacaatggcacatcctgttg

SEQ ID NO: 921021 - DNA, 120 bp, Artificial Sequence
  ENSG00000285219_157 (sequence is synthesized)
ggattcaatttgaattctctacagattaattttgggagaatatacatattcatgatagggtctactcaacaacaggggatatctgtctatttgcttaggaatctttaatgtctctcaata

SEQ ID NO: 921022 - DNA, 120 bp, Artificial Sequence
  ENSG00000285219_158 (sequence is synthesized)
aaaccttataatttaatccataaaggcatgcctgtattttgttgaatttatttcttgatacatgttattttaatttctattgtacacattaaaaagttatgtttttgattgttgctggtg

SEQ ID NO: 921023 - DNA, 120 bp, Artificial Sequence
  ENSG00000285219_159 (sequence is synthesized)
taaacatttgcatttgaattttttgcactgattttttgtccccaaattgtttgtgccatcaccaatataaaacttatttgtagatgtctttggattttcttgaagaaaataaaacagtca

SEQ ID NO: 921024 - DNA, 120 bp, Artificial Sequence
  ENSG00000285219_160 (sequence is synthesized)
gaagagccatttgtccaaagaagacatacaagcggccaacagacatatgaaaaaatgctcaacatcactaatcgtcagggaaatgcaaatcaaaaccacagtgagatatcacttcacacc

SEQ ID NO: 921025 - DNA, 120 bp, Artificial Sequence
  ENSG00000285219_161 (sequence is synthesized)
gaaaccctaatctccagtgtgatggtatttggaggtggggcctttgggaggtaactgggcttggatgaggtcatgggggtggaactcatgatggaattggagcctttacaagggaatgaa

SEQ ID NO: 921026 - DNA, 120 bp, Artificial Sequence
  ENSG00000285219_162 (sequence is synthesized)
gcatcttggcagccaatatttttgtctctagggcataaattatgcatcaggtacctctgaaactcagagaccaaggaaaaaggaggtaatttggaaggtgaaataaatgtaaacattctg

SEQ ID NO: 921027 - DNA, 120 bp, Artificial Sequence
  ENSG00000285219_163 (sequence is synthesized)
aagaaagaatcaaatctgtacttcagggtcaaagatgaaattcaaaaggggttgacaatgcatagaaaaaagtgctgaatttaaagttggttttattattatcattgttatttgaaccaa

SEQ ID NO: 921028 - DNA, 120 bp, Artificial Sequence
  ENSG00000285219_164 (sequence is synthesized)
ccaataattaaatccagtaagtctagagcaatgatcataattctgtactgttgtttttctattttagaatccagtgtactgtttccaagagcttggcaaaaaaaaaaaaaaaaaaaaaaa

SEQ ID NO: 921029 - DNA, 120 bp, Artificial Sequence
  ENSG00000285219_165 (sequence is synthesized)
gaaaagaccttgtccaaagctttctccaaggcaggtcatgctgagtgaaggttccttgttggaaaagaaaggaattccccacggggtcctgtcgtctcactccagctgacggctctattg

SEQ ID NO: 921030 - DNA, 120 bp, Artificial Sequence
  ENSG00000285219_166 (sequence is synthesized)
tgtctacaagccctccgggtgtgaccggtgaagatgcgttctctgggaatcctgatctcagatctgatggatatttttgctgtggaagaaccagttataggatttcaagttccagagaaa

SEQ ID NO: 921031 - DNA, 120 bp, Artificial Sequence
  ENSG00000285219_167 (sequence is synthesized)
aggctctctcctagacaacatcgctcataatggacggttcaagccaaattatccattattgttcccaaagtttacaattaaactatcgatcaaaactggcagtgatttctccagcagcct

SEQ ID NO: 921032 - DNA, 120 bp, Artificial Sequence
  ENSG00000285219_168 (sequence is synthesized)
gagcttagaagcagctgaattacatcagaacacgagtgtgtggagccagaaggtgacacagacagacagataccagacagacagtggcaccttctaccaaccaccctgggatccagcctt

SEQ ID NO: 921033 - DNA, 120 bp, Artificial Sequence
  ENSG00000285219_169 (sequence is synthesized)
tggtaattttccttgagccgagaagcaggctgccaccccagctatgtagagtgggtttgcggttttaatagccagaggtgcccgcaatttgcgacctctatccctggctgtaaaaattgg

SEQ ID NO: 921034 - DNA, 120 bp, Artificial Sequence
  ENSG00000285219_170 (sequence is synthesized)
agtttaacaggttcggctccatggggaaccaacctcagcttttaggctccttcagacactgcagaatgcatcttttctggggaattccacaataaaatgactgttatttatcattacaaa

SEQ ID NO: 921035 - DNA, 84 bp, Artificial Sequence
  ENSG00000285219_171 (sequence is synthesized)
tgtcttctgtaaagacttcttcagactgtcaataggaagactgataaactcagagactgcatctcaccatgttgctcaggctgt

SEQ ID NO: 921036 - DNA, 120 bp, Artificial Sequence
  ENSG00000285219_172 (sequence is synthesized)
caaacccaagatgatctttccaagcgtgaactccatcttcaaacttctagtgagtctgaggccgcaactggaaaaatttagaaataatttctaattcttgaaatctttgaaatgtcaaaa

SEQ ID NO: 921037 - DNA, 120 bp, Artificial Sequence
  ENSG00000285219_173 (sequence is synthesized)
cattaaaactttaagtttttgtatcttgtttaatgtttaacaattttctgaaactttggaaattatgtaggtattctattttgttagtttggcttagcatatataaatagagctatgtct

SEQ ID NO: 921038 - DNA, 120 bp, Artificial Sequence
  ENSG00000285219_174 (sequence is synthesized)
acatattaatagtagtcttgttttaccttacctttgtttttttgttgttgttgtatgccatctagatcttaaaccttaaagaagaaactatggcaatgtctcttccaccactcttgacta

SEQ ID NO: 921039 - DNA, 120 bp, Artificial Sequence
  ENSG00000285219_175 (sequence is synthesized)
ttatgattacatcatgtttaaaaagcattagggagcctgcataacaaaatgggacaaaacataaattcattttgcacatacggaagacattctatcaagcatgctaatgttcctcctata

SEQ ID NO: 921040 - DNA, 120 bp, Artificial Sequence
  ENSG00000285219_176 (sequence is synthesized)
agctgatcagctgggaggtgtggcatatattcttccacaaagggtgtgtgtttgtgtgtgtgtgtgtgtgcatgtttgtgtgcgtgttgagcactgacaatacattagcagagtatagat

SEQ ID NO: 921041 - DNA, 120 bp, Artificial Sequence
  ENSG00000285219_177 (sequence is synthesized)
caagtaagttcaagtaaattaagacgaataataatagcaagaacttttataaactttaccaactttatccccagtccccctgggggaggagggcagagaacaatgttgttccttctttta

SEQ ID NO: 921042 - DNA, 120 bp, Artificial Sequence
  ENSG00000285219_178 (sequence is synthesized)
tatggaataacaaaacgtataatggttgggtcacttctagagggtcctagaagagctcattgccagactacagcttccaccatgattgtttgggtagccaatttatctgtttatgtaaga

SEQ ID NO: 921043 - DNA, 120 bp, Artificial Sequence
  ENSG00000285219_179 (sequence is synthesized)
tccttacaggtaagaaccatcaggttgtataccacttagctttttgctttcacttcttcccttgtgaggttccttgcacacaacaaatcatccacacagatgcataatttgaaaggaaag

SEQ ID NO: 921044 - DNA, 120 bp, Artificial Sequence
  ENSG00000285219_180 (sequence is synthesized)
gtcttgagcttatggaagaaatacataccagtttctggaaaattctgtgaaattctgtagttggaaaataattctgtgaaattctatgctttatttactcaaacaaaaaacacattcagt

SEQ ID NO: 921045 - DNA, 120 bp, Artificial Sequence
  ENSG00000285219_181 (sequence is synthesized)
ttagaaataacgtctgtgcccagaagaaataggtgttagatactcaaaacgtgtttattccaaaaagatgcaagatttctctcctggaaagcaattcaccactctctatgcttctttttc

SEQ ID NO: 921046 - DNA, 120 bp, Artificial Sequence
  ENSG00000285219_182 (sequence is synthesized)
tttctgagaagtcttatacacataacagttttcaatgcacagatggatcttctgtggttcacaaccttttacatttgagggctaattaaaatgaatcctttgtgccacctctaagataca

SEQ ID NO: 921047 - DNA, 120 bp, Artificial Sequence
  ENSG00000285219_183 (sequence is synthesized)
actcactccttcatgttgttcattgactaagatctaataaaccagttccaattcataactagggattattgaacttcttgtggccattggctatcatagaggcattgtgaaaatctctaa

SEQ ID NO: 921048 - DNA, 120 bp, Artificial Sequence
  ENSG00000285219_184 (sequence is synthesized)
ggagacaagtgcacagcagcctggcccggagggtcctcttatttgaagtagaactcaagttgcacccaattatgtaaggctgatccaacccagaaaagagttttctgcaagagattaagc

SEQ ID NO: 921049 - DNA, 120 bp, Artificial Sequence
  ENSG00000285219_185 (sequence is synthesized)
caattctccagaactctaaggaggaaatcaagatccttgtggctgtttgatcacttctgtgatttgaatgtctccacggtttaatcatttgcttacataatgaggacattacagagagaa

SEQ ID NO: 921050 - DNA, 120 bp, Artificial Sequence
  ENSG00000285219_186 (sequence is synthesized)
tggtaatcagctggggtttccttagggaggttggaagattctaactcaaatagctcaaaggacaccttctccgggaaaccttccctgacttccgacgctgtttcctgtttaacttcagaa

SEQ ID NO: 921051 - DNA, 120 bp, Artificial Sequence
  ENSG00000285219_187 (sequence is synthesized)
actgggggtgtctaatgtctgcaacataacaggactattgtaggaaattctgagactctataagcacttttaaatgtgaaaattaagaaggcatcccagaaatgaatgggtccagtgctc

SEQ ID NO: 921052 - DNA, 120 bp, Artificial Sequence
  ENSG00000285219_188 (sequence is synthesized)
aggtatcctgagtttaggattccccagctgtatgtgttgattgcctcacacaaaccaactgtatgtgaaagatccaccagggcccttcagtattaccctctaggatttggaaggcaagag

SEQ ID NO: 921053 - DNA, 120 bp, Artificial Sequence
  ENSG00000285219_189 (sequence is synthesized)
gcaatatgattcagcacagacatgatgcccatgctgcttgctgtactgtgagtcataaagtccttgtctctgaaccaggagtctcacgtcttctgctagcaaccaagaaactatggcagg

SEQ ID NO: 921054 - DNA, 120 bp, Artificial Sequence
  ENSG00000285219_190 (sequence is synthesized)
ctaatttgttcatgtccaaataggataaaaatctcagacatattgcagttcttcacaatccttccccattaatttgcttatattttttatgggtttccttcctaggggcatctatgtaaa

SEQ ID NO: 921055 - DNA, 120 bp, Artificial Sequence
  ENSG00000285219_191 (sequence is synthesized)
gagtgcaatgacatgatcatggttcaccgcagcctggctcactactgcttcacctcctgggctcaaatgatcctctcacctaagcctcctgaggagctgggactacaggcacacaccacc

SEQ ID NO: 921056 - DNA, 120 bp, Artificial Sequence
  ENSG00000285219_192 (sequence is synthesized)
acaggcacacaccaccacacccagataatatatttttaaaatttattattgggacggggtcatcctatgttgcccaagttagtctcaaactcttgagctcaagtgatcctcccaccttgg

SEQ ID NO: 921057 - DNA, 120 bp, Artificial Sequence
  ENSG00000285219_193 (sequence is synthesized)
catgacatctggccatttctaaattcttaatgtggaatatttacattttatcgttggaaagacagccttcaaagattaatacttattaaataatagaatgttcttagcaaacaaacagtt

SEQ ID NO: 921058 - DNA, 120 bp, Artificial Sequence
  ENSG00000285219_194 (sequence is synthesized)
taaatttagtatcttcatatattaacataagaagtaataaaatgcaatcacaaaaatagccctggaattgaattgcatgttgggagtgatggtttgatggcaactcggaatacaaaatga

SEQ ID NO: 921059 - DNA, 120 bp, Artificial Sequence
  ENSG00000285219_195 (sequence is synthesized)
gcagattgaagaggttctaatgtattcagggccagagaaattattctttaaacttttcttcctcttagctgtctccattaatgttcatggtcaggttggcctttcggataaaagtgagat

SEQ ID NO: 921060 - DNA, 120 bp, Artificial Sequence
  ENSG00000285219_196 (sequence is synthesized)
gatgaacatcaaaatgcacagaaccctatgggaccacatggtggttactcaatacatgtttctgaatctgattctgataaatataagtctagtctttgaaaaattaactatcagggaaag

SEQ ID NO: 921061 - DNA, 120 bp, Artificial Sequence
  ENSG00000285219_197 (sequence is synthesized)
aaagggtcagtaagttttctctatggtgagcccatcttttccttatttacttattatgtattaaacagctcctaggtgacagggcctgtgctaagtgctcagttcctacccttaattaaa

SEQ ID NO: 921062 - DNA, 120 bp, Artificial Sequence
  ENSG00000285219_198 (sequence is synthesized)
gacaggcatgcaaggctataattgtacccacattcctcttgaggtcacaccagagctctctccagtgggaagaactttaaatagccaatctctaataagcacaagggagccacatcatag

SEQ ID NO: 921063 - DNA, 120 bp, Artificial Sequence
  ENSG00000285219_199 (sequence is synthesized)
gaaaaaatgtgaaaagacaatggcattttccacttctttacaccaccaacaaggggaaatggctgagcagtgcgtcttcctcaagaaaacgttccttcaactttgatatcactgtcaatt

SEQ ID NO: 921064 - DNA, 120 bp, Artificial Sequence
  ENSG00000285219_200 (sequence is synthesized)
gaaaaatatgaccatagatttcttccactctagaatccactcccttttgtcatatgtctttgctgcttcattcagtggtgaggttgctgtcccacttcttgaatctgggatggctttctg

SEQ ID NO: 921065 - DNA, 120 bp, Artificial Sequence
  ENSG00000285219_201 (sequence is synthesized)
gctttctgatggctttggcagatagaatatgacagaagtggggacgagggttcatgcctataacaccagcactttgggaggctgggggaggggggaggatcacttgaggtcaggagttca

SEQ ID NO: 921066 - DNA, 120 bp, Artificial Sequence
  ENSG00000285219_202 (sequence is synthesized)
ctgggattacaggccaaagattattaatgcatgatgtgtaacaatttcaggcaaagcctaggaagagagagaatgccgaaagacttctaatgtatggagtttaaacatcagatggtgatt

SEQ ID NO: 921067 - DNA, 120 bp, Artificial Sequence
  ENSG00000285219_203 (sequence is synthesized)
gattgctattaatttatgtcagcaaaggaggagaagaaatacgtaaaactgcctctgaagaatttacattaaacaccaaaagaatctgactctgaaaatgaagaaacaaggaatattgtt

SEQ ID NO: 921068 - DNA, 120 bp, Artificial Sequence
  ENSG00000285219_204 (sequence is synthesized)
tgttttgggaatcaaaaaaaaaaaaaacttcccatttgagtacacaatttcctaaacaagatacatgataattccatacactatgctttccgaagaaactttgtaaaacgtattttcatt

SEQ ID NO: 921069 - DNA, 120 bp, Artificial Sequence
  ENSG00000285219_205 (sequence is synthesized)
tccactaagataattcattttaacatccatatattcattattatgtaaaatacctatcagtatgtgggtatatctttgtgtgtatattttaacaaaacaaaattcaataaaaattgaaat

SEQ ID NO: 921070 - DNA, 120 bp, Artificial Sequence
  ENSG00000285219_206 (sequence is synthesized)
aaatgacaaaaacacacaaaaaatataaattatttccattgtagcatatattacctttttcacctaacattatactgtaggaatatattctttcatcattcaatgcttttgaaaatataa

SEQ ID NO: 921071 - DNA, 120 bp, Artificial Sequence
  ENSG00000285219_207 (sequence is synthesized)
taatattccattttaaggacatgctataatttagttcattagtttttaaacttttagattatctcattttgtcatcatttaaaaaaagtgttcctggatgtccttttgcatagacttttg

SEQ ID NO: 921072 - DNA, 120 bp, Artificial Sequence
  ENSG00000285219_208 (sequence is synthesized)
aatgtatttctgactattttcttaacctgtcctgtacttctgcaagtagaactgcttgagcagagattaggagcaattttaaggtttttcaaaaatcttgacaaactattctgcaggaaa

SEQ ID NO: 921073 - DNA, 120 bp, Artificial Sequence
  ENSG00000285219_209 (sequence is synthesized)
aatgtatcttgttaccatcagcatttttaagtaactagtgactaattgtaaaaataattgtgtttccttgtatttaagccttgcgctatagattttaaaaatttgtcctttttttttttt

SEQ ID NO: 921074 - DNA, 120 bp, Artificial Sequence
  ENSG00000285219_210 (sequence is synthesized)
catttgtaaaaaaaagccatctaaaagaccttagaacctggtatcagctgaagcttactaaaccatatcaagaagatcatgtcattctcaagaaaagcatgtttcaaataaaaaggaaat

SEQ ID NO: 921075 - DNA, 120 bp, Artificial Sequence
  ENSG00000285219_211 (sequence is synthesized)
gtcagccctgagcgtttttattaaccatctccccatctgacttcagagacagctttagctgaccacttcctctctcgggtttatttgtattagaaataagtggattcattaactgtgcca

SEQ ID NO: 921076 - DNA, 120 bp, Artificial Sequence
  ENSG00000285219_212 (sequence is synthesized)
cttggtggtcaggccaggcctgccagtgtccaataacaggtaatggttgtatttttcacggggtgactgatgtttactttgttgatggccccaggagctcatgtaatctgagataggtct

SEQ ID NO: 921077 - DNA, 120 bp, Artificial Sequence
  ENSG00000285219_213 (sequence is synthesized)
ttgtttacttcttgttttactgatatgctgacccatttgaaactagcgagaaagaaaaataaacattctggaatatggtacctgaagtcactcttccttagtggctttattgtaacctct

SEQ ID NO: 921078 - DNA, 120 bp, Artificial Sequence
  ENSG00000285219_214 (sequence is synthesized)
tcaaaggcttttgttaacccactcttttcccagcaaaaaaccctgatctggtctcttttccaattaaaccaaaagcaatatcacaccaaataagcaaacagaaaatattgaaattaccac

SEQ ID NO: 921079 - DNA, 120 bp, Artificial Sequence
  ENSG00000285219_215 (sequence is synthesized)
ttaaagagagttttatctggggtttaattgtgtgtgtactcaagcgtttagtgtaggtcatttgctaatgacatctagtaatttttaaaaactggataaaactgatactgagcctgtcta

SEQ ID NO: 921080 - DNA, 120 bp, Artificial Sequence
  ENSG00000285219_216 (sequence is synthesized)
cagcaatttaactattttgggggagtataaagttagatttgtctatactgacttgtttgctccattttaaaaactgtgttggaatgatttattatggatgatccaaaataaacgtgaagt

SEQ ID NO: 921081 - DNA, 120 bp, Artificial Sequence
  ENSG00000285219_217 (sequence is synthesized)
caatggcacctcatgttagcctgccatggcaacaagctcattgattgagtaaaagaactttcagatgcactagctggtctttaacgggttgctgaaagcacagataagacgactgaggga

SEQ ID NO: 921082 - DNA, 120 bp, Artificial Sequence
  ENSG00000285219_218 (sequence is synthesized)
gccgactgaatttccatggatatatacaaagggaatggaaaatcacagtacgatttttcattggctcctgatagagctaggtccttgtataattctaaaactggtgtataaaacaatgtc

SEQ ID NO: 921083 - DNA, 120 bp, Artificial Sequence
  ENSG00000285219_219 (sequence is synthesized)
cacgccattcattttggttataactattaaggggaagggagatgatgtctgtggaattgcaaagtagtttgcactagaattttctattacatatgctctaataggagtattttcctctgt

SEQ ID NO: 921084 - DNA, 120 bp, Artificial Sequence
  ENSG00000285219_220 (sequence is synthesized)
tacattatgacttatgtaataataatagctaaggattactgagggtttttattttcttttctgcatgatcttgaccgtttttcgaaacagtccttgttgctggatactatttatgtcacc

SEQ ID NO: 921085 - DNA, 120 bp, Artificial Sequence
  ENSG00000285219_221 (sequence is synthesized)
attttacaaatgagaatgccaaagttcagagtgacatccatctaaaagaggccagtttcagccttgaacccattatactctaatcccattttcaaagtaactcttggttttctcaaaagg

SEQ ID NO: 921086 - DNA, 120 bp, Artificial Sequence
  ENSG00000285219_222 (sequence is synthesized)
cctttaaatgtatggataagccaatatgagggcagcaatgttgtggttaagtgtgtgcactttggttggactctgccgaaggccagcaccaccatttagtagctatgtgaaccagtgagt

SEQ ID NO: 921087 - DNA, 120 bp, Artificial Sequence
  ENSG00000285219_223 (sequence is synthesized)
tacctccacttcctcatctgcaaaatggggttgtggtaaggctggaataagttaatgcatgtagcatgttgagaaggcactgtctaagcgcatggcacatggtaagcatgtaggaaacag

SEQ ID NO: 921088 - DNA, 120 bp, Artificial Sequence
  ENSG00000285219_224 (sequence is synthesized)
caacacatgcctgggtctgagttctgctctgtcatgatgattggtgcccaacgggaaaagctcttccgcaccagcgttttacaagcctagctcctccttttccaaaacaagttcccaggc

SEQ ID NO: 921089 - DNA, 120 bp, Artificial Sequence
  ENSG00000285219_225 (sequence is synthesized)
catggtcaatatcaacattcaggggaaatacattctgttcattgtagatatgacagtgagaatatttgctgaataacaattaagctatctgattgcgtaatagttaaaaggtttgttttt

SEQ ID NO: 921090 - DNA, 120 bp, Artificial Sequence
  ENSG00000285219_226 (sequence is synthesized)
accatctgtgaattaaagccaaaaataacaaccaattcatagaatattgtgacggttataggagatgcagcttgtcagctgctcagctcagcggcctgggcatgattagaattccacaca

SEQ ID NO: 921091 - DNA, 120 bp, Artificial Sequence
  ENSG00000285219_227 (sequence is synthesized)
taatagtgattaccatcagtattattattattaaggcaacacagtgatcgtagtaatggtaaaacagagagatctacctaatccaaaattctattcaacaagggagtttctacatatagc

SEQ ID NO: 921092 - DNA, 120 bp, Artificial Sequence
  ENSG00000285219_228 (sequence is synthesized)
cactatggtttctaattttcaaagaatcagcatataataaaatgctctcaataataaagctgaactgaatatattataataacttaatgaggcagaagacatttgagatgcctcaattat

SEQ ID NO: 921093 - DNA, 120 bp, Artificial Sequence
  ENSG00000285219_229 (sequence is synthesized)
caatgtgtttcacagattcaaaagtgtaactttatacatttattcaatagataaaacactgactaggtccgcttaaagttgaaatagatttttggattctctcaaagtatagggcaataa

SEQ ID NO: 921094 - DNA, 120 bp, Artificial Sequence
  ENSG00000285219_230 (sequence is synthesized)
aaataagcaaaatagaaatagtactattattagttttaaaatattataaaagaattttaaatgagacaaaaataatatgatggcaatatatggccttttacaaagagaggaactgaggca

SEQ ID NO: 921095 - DNA, 120 bp, Artificial Sequence
  ENSG00000285219_231 (sequence is synthesized)
tttacaaagagaggaactgaggcagggaggagaaataattctagaatgacatgctggttagaggtatgatgtgtcggaccacaagaatgatgtgattctgacttttcctttatttacaaa

SEQ ID NO: 921096 - DNA, 120 bp, Artificial Sequence
  ENSG00000285219_232 (sequence is synthesized)
tcactttggataaaccgatggctcttgctgagcccctgggttggtggaggagtaacatgcctgggagtcgagcatcctaagacgtgcaccctgaggactgcaggaaaagtgcagaaatta

SEQ ID NO: 921097 - DNA, 120 bp, Artificial Sequence
  ENSG00000285219_233 (sequence is synthesized)
ggtagaaatagggcttgtttagcattcatgatggctaggtgtcttactgcaggtgtcttaagaaactacccagtaactcactgaaccagcaactctgtgcatggcctcctgagaggtgag

SEQ ID NO: 921098 - DNA, 120 bp, Artificial Sequence
  ENSG00000285219_234 (sequence is synthesized)
ggacacaaagattttatcaagagtgaagcatgtgtctgtgttcaagtatcttgcaaaatgaagacaaaagaagtagtttgcaattagctcttagttcctacctttcaaagaagcatccgc

SEQ ID NO: 921099 - DNA, 120 bp, Artificial Sequence
  ENSG00000285219_235 (sequence is synthesized)
cagtcaggtgagatgaaactgaccatgaagagaagcttgtatctgtataaaatgcaaacctgtttggacagcggaatggggtttgcttcaaacttcagggtgcatttatataaagcaaca

SEQ ID NO: 921100 - DNA, 120 bp, Artificial Sequence
  ENSG00000285219_236 (sequence is synthesized)
caaaatctgcagccagcaagcaggagacccaggagagcgaatgttgtagctccagtctgaagatcgtccagcctgagacccaggaggagccaatgtttcagtttgaatctgaaggcagga

SEQ ID NO: 921101 - DNA, 120 bp, Artificial Sequence
  ENSG00000285219_237 (sequence is synthesized)
aaagactgatgtaccagctcatggcagtcaggcaggagcagttcctcttactagcaggaaagttggcctttttgttttattctggccttcaactgattggttcaggcccacccacattaa

SEQ ID NO: 921102 - DNA, 120 bp, Artificial Sequence
  ENSG00000285219_238 (sequence is synthesized)
ggagggcaacaatctggtttacttggtctcctgattaaaacattaatctcatccaaaaatgctttcacagacacacttagagtaatgttcaaccaaatatcttggcacccttggtccagt

SEQ ID NO: 921103 - DNA, 120 bp, Artificial Sequence
  ENSG00000285219_239 (sequence is synthesized)
actgagctctagtggtcccgtttgctaaagtataacattagtgttttattctaaacaagtttaggcttttctctttgctaagataaattcacatttttaagctttgaaaatgccatatat

SEQ ID NO: 921104 - DNA, 120 bp, Artificial Sequence
  ENSG00000285219_240 (sequence is synthesized)
tttatttatttatttatttttgaggcagggtctcactgtctggctcaggttggagtacagtggtgtgaccatggttcactgcagctttgacctctcaggctcaagctgttctcctgccgc

SEQ ID NO: 921105 - DNA, 85 bp, Artificial Sequence
  ENSG00000285219_241 (sequence is synthesized)
aggctcatgccaccacacactcctatgttgcccagggtggtcttgaactcctaggctcaagtgatccacccacctcagtctcccc

SEQ ID NO: 921106 - DNA, 80 bp, Artificial Sequence
  ENSG00000285219_242 (sequence is synthesized)
aaaatgctattctgttaatagcttcttagagtttttgttttttgttatgtggccttaaagcagagcagatccatgtgtat

SEQ ID NO: 921107 - DNA, 120 bp, Artificial Sequence
  ENSG00000285219_243 (sequence is synthesized)
tttgttatgtggccttaaagcagagcagatccatgtgtatagggaccagtcacaaatacattatagaggttgccctcaaacttcatttgtacctttctggcattagctttctctttcaaa

SEQ ID NO: 921108 - DNA, 120 bp, Artificial Sequence
  ENSG00000285219_244 (sequence is synthesized)
tgatataaggaggcagcagcatgatgtctttgttccctgacagagggaaatctaggaatcggttatctgccttcagagaagtctggaatgagagtacaaggaaactatgaatctcaccac

SEQ ID NO: 921109 - DNA, 120 bp, Artificial Sequence
  ENSG00000285219_245 (sequence is synthesized)
tttgagagcccatttaccaggaggaaatgaatgagaaagagtatgagttcagatcagcttgggaactaaagccatggccatgcctgggagaaaggaacttaaggtgaagacaaaaatcag

SEQ ID NO: 921110 - DNA, 120 bp, Artificial Sequence
  ENSG00000285219_246 (sequence is synthesized)
tggggaagtatacactctattatcaacaaaaatcagatgatcaatttgtatttattacaggaccagagtgtacagaactgagtggccttcaaggcagctcagggcattgaactctgccct

SEQ ID NO: 921111 - DNA, 120 bp, Artificial Sequence
  ENSG00000285219_247 (sequence is synthesized)
tgattcttttgggtgaagacattcagtgccacactaccagtatgtaatgtttgcacctggcaaaagtggtggtcaagatctaccctgaatttactgaaaaatgtctcctcttttctttct

SEQ ID NO: 921112 - DNA, 120 bp, Artificial Sequence
  ENSG00000285219_248 (sequence is synthesized)
caactactgtggttattaggctatattctttcagtaccttcacactttaagaattgttaattattcttgttttttctgttatcatttatactgataaaatgaattataagcctaaaataa

SEQ ID NO: 921113 - DNA, 120 bp, Artificial Sequence
  ENSG00000285219_249 (sequence is synthesized)
agagagagagagagagtgagagaggggagtcagccccgtcacccaggctggatgaggtgtagtgacgtgagcataactcacagcaacctcaaaaactccagggttcaagagatcctcctg

SEQ ID NO: 921114 - DNA, 120 bp, Artificial Sequence
  ENSG00000285219_250 (sequence is synthesized)
ctggaagtattttagctctgaatctgctgttagagggtctatcattctttgtcatttttttctctcagatactgctctttttagtttagttttatttattaatatcttcctactgtggtg

SEQ ID NO: 921115 - DNA, 120 bp, Artificial Sequence
  ENSG00000285219_251 (sequence is synthesized)
cttaacgtctcctttccccctcctccaagggtgagaggtctggttgaaagatctctactagctacgcagtaatttttttataattcttccttccttcaaatgtgtctttttgtgacccaa

SEQ ID NO: 921116 - DNA, 120 bp, Artificial Sequence
  ENSG00000285219_252 (sequence is synthesized)
tcgaacgctggcaatgaagttccttatctccatttgacttgtgcatgaagccaacactcagaaatcctacttcatcccttaccttttctctttgtagctaacccaaaatgtgttcagttt

SEQ ID NO: 921117 - DNA, 120 bp, Artificial Sequence
  ENSG00000285219_253 (sequence is synthesized)
tactaaaagctgaagctctccacaaacttctgagtatagtgtactctggccgaaatggcagccactttttcaatatttttcatgttaattacatttaactacacttagtttcatgaaatt

SEQ ID NO: 921118 - DNA, 120 bp, Artificial Sequence
  ENSG00000285219_254 (sequence is synthesized)
gaaatttacaaaaaaggaggaaaaaaccatggggtgggggtggggaaatgtggtaaattatatttttagagaaataccagaagtagttttgttttatttcaaaaaaaagtaattaaaaat

SEQ ID NO: 921119 - DNA, 120 bp, Artificial Sequence
  ENSG00000285219_255 (sequence is synthesized)
tttctagcttctgtttgacataaaaataacaagataatgagtcgtgggcccggggaaccagaaatcttggctgttgatctggtatttgtggctctattgctgattggtatagaagtgaac

SEQ ID NO: 921120 - DNA, 120 bp, Artificial Sequence
  ENSG00000285219_256 (sequence is synthesized)
ttatgtgaccataaaggtgaatgcagtcaaaatggtcagacatgcagtcaactctaaagatgttgtgataggggccgaaagtcaagaaataaactttagtagattactgtgtgatggaga

SEQ ID NO: 921121 - DNA, 120 bp, Artificial Sequence
  ENSG00000285219_257 (sequence is synthesized)
agaaattatgagaagaaatgcacctgaagtggtctcagggatttgtttcacattaaaaaaatatactttattttttagagcagtttgaggttcacagcaaagtgaaatagaaaatacaga

SEQ ID NO: 921122 - DNA, 120 bp, Artificial Sequence
  ENSG00000285219_258 (sequence is synthesized)
gatgtctcacctaccccctacccccgccatgcacagtttcctccattatcatcatccctagccatagtgagaatttgttacaattagggaacctgctttggcacatcattatctctcaaa

SEQ ID NO: 921123 - DNA, 120 bp, Artificial Sequence
  ENSG00000285219_259 (sequence is synthesized)
gcacacagtttacattagggttttctcttggtattgtacattctctgttttttgacaaatgtataatgtcatgtgtctaccgttatagtatcatacagaatagtttcactgccctaaaaa

SEQ ID NO: 921124 - DNA, 120 bp, Artificial Sequence
  ENSG00000285219_260 (sequence is synthesized)
tcttctgtattctgcctattcatctctctttttctttccccaaacccctgacaaccattgatctttttactctctccatagttttgtcttctccaaaatgtcatatagttggaatcgtac

SEQ ID NO: 921125 - DNA, 120 bp, Artificial Sequence
  ENSG00000285219_261 (sequence is synthesized)
agtagtaggtagcattttagagcagcttcttttacttagtaataagcatttgtgtcattcatgtattttcatagtctgatggctcacatctttttggcattgaatgatatttcattgtct

SEQ ID NO: 921126 - DNA, 120 bp, Artificial Sequence
  ENSG00000285219_262 (sequence is synthesized)
agttgtaccacagtctacttatccagccatctactggaggacatcttggttgcttccaagttatggcaattataaataaagcagctatacgtgtccatgtgaaagttttgtgtgggtgta

SEQ ID NO: 921127 - DNA, 120 bp, Artificial Sequence
  ENSG00000285219_263 (sequence is synthesized)
ggttttcaactcactttgaaaaataccagagtgtgattgctggattgtatttcacttttcagttctgtttgtgagtgttattttaaaaagatgctataggatatgctgccctgcacagaa

SEQ ID NO: 921128 - DNA, 120 bp, Artificial Sequence
  ENSG00000285219_264 (sequence is synthesized)
taggtagataggaaccaggcaaacggaatgttatctgaggctcattcatgtcagtgttcactcctgcaatgcagagtaaaatctctagtatatagttatagtttacaataactggaagta

SEQ ID NO: 921129 - DNA, 120 bp, Artificial Sequence
  ENSG00000285219_265 (sequence is synthesized)
ggtttccaggaataggacaggattgacatggatttttgatgctgctattactcctctacatttctagcagaaaaggggaaaattatgtctggctgggcactggaattgctttaacaacct

SEQ ID NO: 921130 - DNA, 120 bp, Artificial Sequence
  ENSG00000285219_266 (sequence is synthesized)
catagtctttctgaggcttcataaattacaaataagctcttgatggtttgatatcctgacctttggaaatgttatttcttctattaaaatattaaataaaacaatgttttatttgatcta

SEQ ID NO: 921131 - DNA, 120 bp, Artificial Sequence
  ENSG00000285219_267 (sequence is synthesized)
agccaggagaggacactattggaaaacagagatgtgagaaaaccctaaaacatggtgtactcatgcctgaacttagcctgtctttcacagcaaggctcatcatttctgggtttactacag

SEQ ID NO: 921132 - DNA, 120 bp, Artificial Sequence
  ENSG00000285219_268 (sequence is synthesized)
gttttgagggggagccctgccctcgcaaactgccaggtgtatactggacacaccagtcatgaatctagattcactgggagggaagaatgattaccagtttttgccatcttgagggttaac

SEQ ID NO: 921133 - DNA, 120 bp, Artificial Sequence
  ENSG00000285219_269 (sequence is synthesized)
cccaggttgcttttaattttagaagtttaaatatgcatggtttataggaaccctgcaacaaattttgaaagtctggactgtttgttcatcaaagcctgaggtttcctgagatcttcgcat

SEQ ID NO: 921134 - DNA, 120 bp, Artificial Sequence
  ENSG00000285219_270 (sequence is synthesized)
ctttgaatcttcggtatagtcaacaggcctgaaacacagaagacgtcaaatgctcgatgaatcgaattgggataagaaataatttactataaataacgataaaagaaatgacaaaagtga

SEQ ID NO: 921135 - DNA, 120 bp, Artificial Sequence
  ENSG00000285219_271 (sequence is synthesized)
catttattagcattattaaaagttgcagttctgggttttcgtgatcataaattgccagccagccaaaggcaagcatcaacttcactcataaaattttcttcaaagaagcttatccccaaa

SEQ ID NO: 921136 - DNA, 120 bp, Artificial Sequence
  ENSG00000285219_272 (sequence is synthesized)
caacatttctgtcggattacctccagcataattacagtccttgtctccttcctatagtcaggaacttttctcccttgttggactttgggcagaaagtgaggccctttatgatcacagcac

SEQ ID NO: 921137 - DNA, 120 bp, Artificial Sequence
  ENSG00000285219_273 (sequence is synthesized)
tcttcccaggaaacctttttaatctaggcccattacagcacaaggaagcatttatatttcttctggtctcagagccacatgttctgccgaccttgcctgagtaacgtcttcccagaagca

SEQ ID NO: 921138 - DNA, 120 bp, Artificial Sequence
  ENSG00000285219_274 (sequence is synthesized)
aatcttctggctgctctatgccacagcttactctctgtaaaatggagataacagtgctgttctaacctactgatgtatatgtaaattggatgtttaccttggcagggaactgaaggtatg

SEQ ID NO: 921139 - DNA, 120 bp, Artificial Sequence
  ENSG00000285219_275 (sequence is synthesized)
aatggggcagaagaagcaagttgtcattgtcccttccatgtgggctctttcgtagctcgtttccttttgcttctcatcctctgtggctgacattttgtggtctcacttatttctccaatg

SEQ ID NO: 921140 - DNA, 120 bp, Artificial Sequence
  ENSG00000285219_276 (sequence is synthesized)
tgggtggagttgtaggtgtgaatgaatgtaagatgagatcgtaaatgtatctgtgcccacacaggctgatatgtgaccttcagtaagtctggacctcagtttatttatccatgaaacggc

SEQ ID NO: 921141 - DNA, 120 bp, Artificial Sequence
  ENSG00000285219_277 (sequence is synthesized)
agggtcagaacaggtgacctctaaggaattctgctatggtctataaattaaataaaactgattgcattgatggaaaagagattcaattaggtttgtccacttctctgaaatcaaaagcag

SEQ ID NO: 921142 - DNA, 120 bp, Artificial Sequence
  ENSG00000285219_278 (sequence is synthesized)
ctgaaaccaaacttttctaaagaggaaaaaatatatgctgcccatctttctggattctctaaaaaacattttaatattccccacttcccccaaactatgcatgggattaactttaccatg

SEQ ID NO: 921143 - DNA, 120 bp, Artificial Sequence
  ENSG00000285219_279 (sequence is synthesized)
ttctgtgtctgtgtatccaacctgttaacttttctttttaaggccaaatttgcgtgacaaaaggtaaaatgtgtattacccctccatgcaaggctcgtagaagagagaataatggctgaa

SEQ ID NO: 921144 - DNA, 120 bp, Artificial Sequence
  ENSG00000285219_280 (sequence is synthesized)
tggcccattctggatcctctcaaatgacattataacagaagtcctaactaaatgccctaacgtgtaaatttcctgtgacatatcgcttgagtctctgcttttgtcacatttttcattagt

SEQ ID NO: 921145 - DNA, 89 bp, Artificial Sequence
  ENSG00000285219_281 (sequence is synthesized)
tatcgcttgagtctctgcttttgtcacatttttcattagtcaacacttttcaagtacagatcttcaaccaatttggatctgcctatcta

SEQ ID NO: 921146 - DNA, 61 bp, Artificial Sequence
  ENSG00000285219_282 (sequence is synthesized)
tgcagtggcatgatctcagctcaccgcaatgtctgcctcccaggctcaagtgactcttctg

SEQ ID NO: 921147 - DNA, 77 bp, Artificial Sequence
  ENSG00000285219_283 (sequence is synthesized)
gagcgtgagccaccgcacccggccctatattctattctttagttaacacaagaggactttgttctgcacctgctact

SEQ ID NO: 921148 - DNA, 120 bp, Artificial Sequence
  ENSG00000285219_284 (sequence is synthesized)
tttagttaacacaagaggactttgttctgcacctgctactgtatacatcagatgctgtgtccaaacatctcacatgtattatctctgctcaaagtccagagtaggaagggtcatttctca

SEQ ID NO: 921149 - DNA, 120 bp, Artificial Sequence
  ENSG00000285219_285 (sequence is synthesized)
atattacctcaaaaataccatgaatgcttcatcaatatatcttttctctcagaggcattcaattctaggcttgatttttaattttggagtgaaaagccttatttcatggtaaagagatga

SEQ ID NO: 921150 - DNA, 120 bp, Artificial Sequence
  ENSG00000285219_286 (sequence is synthesized)
ctgctatctgaagagaatcgggagtttgggaagggctaagggaccctttctaatgtgctgggtattaagcagcatagattctttcctttgccaaaggccaaacagtatccaacagagaaa

SEQ ID NO: 921151 - DNA, 120 bp, Artificial Sequence
  ENSG00000285219_287 (sequence is synthesized)
agtgttgcctggcaccatacaatcccattaaaaacaataaatataaacacatccaactaatatctgaatagtattctcaaatttgagtccaaaggacagcatggtggattttcataacaa

SEQ ID NO: 921152 - DNA, 120 bp, Artificial Sequence
  ENSG00000285219_288 (sequence is synthesized)
attgctgatttgagaatttcctagggaatccattgtgtatcttaagttgatggttcgacctgtggacggaacagccaggctggctggcttacaaattgcagcattatttttcctaaatcc

SEQ ID NO: 921153 - DNA, 120 bp, Artificial Sequence
  ENSG00000285219_289 (sequence is synthesized)
ccaacattcatgatttcatttcagtaaaacagtaatttaaacaatgactaagtgtgtaagaaaaaatatattgaaggctatggaacaatttattaataatggtaggacattttctgcagt

SEQ ID NO: 921154 - DNA, 120 bp, Artificial Sequence
  ENSG00000285219_290 (sequence is synthesized)
acttctaatgtatcacttaggactgtattgattcagcatcagagttcttggaaacaagcctcttaccaatatctaagatcctggtgttgtaattgaactagaaaatgtaagatttccact

SEQ ID NO: 921155 - DNA, 120 bp, Artificial Sequence
  ENSG00000285219_291 (sequence is synthesized)
agatcattttatcatgtcctaagttagtggcatgaaagcactgccctggaagcgatggagcagcaagtgctctacccacatggaagtctttgggacctgcacttcaatgagcgcagagag

SEQ ID NO: 921156 - DNA, 120 bp, Artificial Sequence
  ENSG00000285219_292 (sequence is synthesized)
tttctagggctacatgaatcatctgaagcctcttccggatgctataagcagccatggatgggcggagaaaagatccttgggccagcgtctcccttagggtccttcctgccatgatattgt

SEQ ID NO: 921157 - DNA, 120 bp, Artificial Sequence
  ENSG00000285219_293 (sequence is synthesized)
cgtcttcaaagtgtcttctgtaaagacttcttcagactgtcaataggaagactgataaactcagggaaatagtgctatgatagatcagtgattctcatacttgagcctacatcagaaccc

SEQ ID NO: 921158 - DNA, 120 bp, Artificial Sequence
  ENSG00000285219_294 (sequence is synthesized)
cctggagaacccgtgaaaacacagattgctgggccaacccccagagtatccaactagaaaccaggaaccttcagttactccagcatgaaggaatcaactgctatagagaccacattccct

SEQ ID NO: 921159 - DNA, 120 bp, Artificial Sequence
  ENSG00000285219_295 (sequence is synthesized)
tgttcaacttcaatgcatacctttcatattcgaagtaatcattaattctgaaggagcattaaaaaataatcctacggtctgtcagactttgagcctaactagttcaaagtatcagtaaat

SEQ ID NO: 921160 - DNA, 120 bp, Artificial Sequence
  ENSG00000285219_296 (sequence is synthesized)
tgaaatacaaaacctactaaattctgatatcgagaaaacttcattaattcttacattcattcagtcagtcgtccatgtagacttggtaggttctaaataaatatatgctaaatggaagaa

SEQ ID NO: 921161 - DNA, 120 bp, Artificial Sequence
  ENSG00000285219_297 (sequence is synthesized)
tgaatgaatgaataaacttttatgtatctagtgcatagctctcatatgttaaatggtcactaactctgagtgaacattaaacaaaaacattctagttgctggtgatcgtgtagtaagcat

SEQ ID NO: 921162 - DNA, 120 bp, Artificial Sequence
  ENSG00000285219_298 (sequence is synthesized)
gacagattaagtttcttaccctcatggagcttacattctaatgatgaaatttcatcaaaactatttattcatttcaaaccaaacaccaaggcaattgggcaaatattcttttctcatttt

SEQ ID NO: 921163 - DNA, 80 bp, Artificial Sequence
  ENSG00000285219_299 (sequence is synthesized)
ttttcacactttgttagcctcactgctataattagtttcaatctcctagattgcatagcacaacttatgccagtaacacc

SEQ ID NO: 921164 - DNA, 120 bp, Artificial Sequence
  ENSG00000285219_300 (sequence is synthesized)
acaacataaacacatgtaaatgtaactaaaacctaccagaaatcatatatcttgttcagaagtgttttaataagtcaaatgcatgaaaaatagctaattatataaaatttatctttttaa

SEQ ID NO: 921165 - DNA, 120 bp, Artificial Sequence
  ENSG00000285219_301 (sequence is synthesized)
aattgcattgaaatggctgatagaagaggatacaaagggaccctccccacattgatcctccccacctcccagcctttacccagagatagttgtagaattagtcctatagggcaggaatgg

SEQ ID NO: 921166 - DNA, 120 bp, Artificial Sequence
  ENSG00000285219_302 (sequence is synthesized)
aaaggccaggctcatccatgtgaggagagagcaggtaagttgtgggttttttgaggggaatctactgtttcatttaaaaaatgtcaacataaaacaaacaaacaaagactatatagggga

SEQ ID NO: 921167 - DNA, 120 bp, Artificial Sequence
  ENSG00000285219_303 (sequence is synthesized)
catttcacattttatctgcacctacctaaagcatttgagtattattgtccagaacttgctgtatattctttagttgtttcttttccatgcatcctttttctttgaggttttcctcaagag

SEQ ID NO: 921168 - DNA, 120 bp, Artificial Sequence
  ENSG00000285219_304 (sequence is synthesized)
cagaatgcttctaagttgctagacaaattcttgataacccaataaggccaccagtcagtatgtttcctgtctccctactaggagcagtttgaacatctttgtccaatttctggaataaaa

SEQ ID NO: 921169 - DNA, 120 bp, Artificial Sequence
  ENSG00000285219_305 (sequence is synthesized)
catctgagaaatgacagttcacagtatatgttaaaacaaataaattttctgtccaattcctggaataaaacatgagaaatgacagttcacagtatccgttaaaacaaataaatttacagg

SEQ ID NO: 921170 - DNA, 120 bp, Artificial Sequence
  ENSG00000285219_306 (sequence is synthesized)
gactgtcaataggaagactgataaactcagaaaccaggaaccttcagttactccagcatgaaggaatcaactgctatagagaccacattccctggagttttataaactatgctggtcatc

SEQ ID NO: 921171 - DNA, 120 bp, Artificial Sequence
  ENSG00000285219_307 (sequence is synthesized)
agatcacttttagacatcatgtaaggatgccactctgaatgccaccatgtaaggaagcctgtccagtctatcaggggaaaaggcgccacgtggatagaaatcaaaccaaaatgccacagc

SEQ ID NO: 921172 - DNA, 120 bp, Artificial Sequence
  ENSG00000285219_308 (sequence is synthesized)
caaaggctggcaccaaggccaggcatgtgaccaaggcatcttaaacctcccagcctcaagctactgtacgtagccacatgagtgagcacaagcagaatcagcaaagggacactccagcaa

SEQ ID NO: 921173 - DNA, 120 bp, Artificial Sequence
  ENSG00000285219_309 (sequence is synthesized)
acccacagaatgaacctgtattctttcccatgagatggtcacaatgacagaacataatcaagaaggatattgggagatttatcattcctcatcttttaaaaaaattgatgtttgattgac

SEQ ID NO: 921174 - DNA, 120 bp, Artificial Sequence
  ENSG00000285219_310 (sequence is synthesized)
atttatcaaagctttgctgcatcagtaaaggctcaagtttattcatatgtattgatccccttggttgttcagctaaataaagttttgaacagatttggaatacaaatcttcaaaaatgct

SEQ ID NO: 921175 - DNA, 120 bp, Artificial Sequence
  ENSG00000285219_311 (sequence is synthesized)
tttcacctgcagcgtgaaacttgaagctcatccctttggctcaaagtccagctgaattatgtacttttcctgaaattttaactttgactatctaagagtcttactgtaagacttcacttc

SEQ ID NO: 921176 - DNA, 120 bp, Artificial Sequence
  ENSG00000285219_312 (sequence is synthesized)
tataacacatttatgttttgtagaggcctagatatcaatgcaaatttcaaagcaagtgatcatgagtcctgataaggagataatatgctttgaaataggaagaaatgagactattttaag

SEQ ID NO: 921177 - DNA, 120 bp, Artificial Sequence
  ENSG00000285219_313 (sequence is synthesized)
aatgactgatggtgccctggcattccttctcccctgtgcccttggagggtatttagtgctacctagaatgtgagtcagagaaggtacagataggaagaactgttctcacaccacaggaga

SEQ ID NO: 921178 - DNA, 120 bp, Artificial Sequence
  ENSG00000285219_314 (sequence is synthesized)
agtaacagctcaagggcctagctagtcagagcagtgtggcactgctgctccagaagtctggcttcatcagcagtgatgcatggctctgagctctgaacaggaagcatggttgatctgtgc

SEQ ID NO: 921179 - DNA, 120 bp, Artificial Sequence
  ENSG00000285219_315 (sequence is synthesized)
tgaaggcttggttgatctcttgaataaactgagagatgatggaatggtgcacagtgaatctcctctgaagactgaacatcttccttggaccatgatcagtgaacatactggaacatactg

SEQ ID NO: 921180 - DNA, 120 bp, Artificial Sequence
  ENSG00000285219_316 (sequence is synthesized)
gaacattctgacaccattttccatcccaacccctgttctcccttagttttctggtcttagggttacaacttgaagtgagtaccttccattgtagcactcatttctaaaagcattaaagcc

SEQ ID NO: 921181 - DNA, 120 bp, Artificial Sequence
  ENSG00000285219_317 (sequence is synthesized)
aattttctgactcatctgtatttcaagtctaaatgtttacttcatttagttggattaatagccccatagtttcttattagtgaaacttatttaaatatgataatgaactagtatttcttg

SEQ ID NO: 921182 - DNA, 120 bp, Artificial Sequence
  ENSG00000285219_318 (sequence is synthesized)
tggtaatttctgatgctggatatgtgaacacataatatgctctctttagtgggatcctacatgaggacagtaattgtagttcagcaggatgtagctgaaaacacctggctccgctccact

SEQ ID NO: 921183 - DNA, 120 bp, Artificial Sequence
  ENSG00000285219_319 (sequence is synthesized)
ctttacattgaattttcttcaaaattaaattacattttgggaagatttccatttgtccatatacatgtttgaaaattgttggacagcataaaatcatttaaaagattgtcctatttccca

SEQ ID NO: 921184 - DNA, 120 bp, Artificial Sequence
  ENSG00000285219_320 (sequence is synthesized)
tattgtctcaagtgtgtattactgttcagttctaaattattgtttaaatggatcgctgtttttatatggctgaaaagcaaatcatgttagtttgggcatacattcaatgcaatgaagagg

SEQ ID NO: 921185 - DNA, 120 bp, Artificial Sequence
  ENSG00000285219_321 (sequence is synthesized)
cacttgaacacacatcataggtgtacttttgttgcagatatagaacacaaatataaaatgcacaagttaaatctgccccaggataattctaattgtcccaaaatacatttatacacaaat

SEQ ID NO: 921186 - DNA, 120 bp, Artificial Sequence
  ENSG00000285219_322 (sequence is synthesized)
atgacattgaatgctctctactggcagggccatgttaatgttctattaacaacatgttaatttgttatttcactaaactaagattacagcttttagttgcttatctattcatatgctgta

SEQ ID NO: 921187 - DNA, 120 bp, Artificial Sequence
  ENSG00000285219_323 (sequence is synthesized)
ttaattgcatggcacaatagataaacatgttttagccatacgttagttatagagagcatgcttgatggattgtggacctgttatgacatcaaaaatataggcaaatagaaaacattcaat

SEQ ID NO: 921188 - DNA, 120 bp, Artificial Sequence
  ENSG00000285219_324 (sequence is synthesized)
aaatgaagctcaaatggcacaagagtctccttatatttaaaatggttctcgtaaagtaacattttgatgatttaaatggaaatgaatcagaacatatagattaaatttccttgaaaaaca

SEQ ID NO: 921189 - DNA, 75 bp, Artificial Sequence
  ENSG00000285219_325 (sequence is synthesized)
gcactcggagcggcaggccggcctcgacggccccgggcagtgaggggcttagcacccaccgacgattctaactca

SEQ ID NO: 921190 - DNA, 120 bp, Artificial Sequence
  ENSG00000285219_326 (sequence is synthesized)
ctgaatatctgggattacagctcaggggcacaggtgcaggatgtgcagctttgttacataggtaaaggtgtgccatggaggtttgccgcacaaatcatcccatcccccagcctaggaaga

SEQ ID NO: 921191 - DNA, 120 bp, Artificial Sequence
  ENSG00000285219_327 (sequence is synthesized)
agaaactttcgtgtctgaagaaaactagatcattttatcatgttagagatttcagtgacttgtatcaccaagaggaggaccatcagcatgcagtggaggtctaggcttcagacatgtgag

SEQ ID NO: 921192 - DNA, 120 bp, Artificial Sequence
  ENSG00000285219_328 (sequence is synthesized)
attgctcaagatctcacagaataatccagcttgtctggaagtgaactgcacttaagacattggtattgctgccaagaaaaaaggatcccatgctgagctaaggaagaataataatgaagg

SEQ ID NO: 921193 - DNA, 120 bp, Artificial Sequence
  ENSG00000285219_329 (sequence is synthesized)
ggggacggggtggataatccatgcaaagtgtttccaatttaattggccaaagagtatttcttcaagaaatatcttaaagatgcagtgtttagcagaataatgttgagaaagctgtcaaca

SEQ ID NO: 921194 - DNA, 120 bp, Artificial Sequence
  ENSG00000285219_330 (sequence is synthesized)
accccttcacaactcggcatcctattttttgtattcatgctttacatttgtgctgtttaatttttttaatctttgtgtttaatctcctcttctaagtgtaagtgatttcctgacacccat

SEQ ID NO: 921195 - DNA, 120 bp, Artificial Sequence
  ENSG00000285219_331 (sequence is synthesized)
tttttttacacccctggaataatgtatattcgtcagtttcagaatcctaaatggtgtaagaaaatcaggtagattcaacattttaaaacatgctggttggttatttccactttgtctttt

SEQ ID NO: 921196 - DNA, 120 bp, Artificial Sequence
  ENSG00000285219_332 (sequence is synthesized)
gtgaactccctgatcattttgtttctaggttttttttaactctacacattaaaatataattcaaaatgtggcaatagttatatatagagaagtgaatatatcagcatttataataaaaaa

SEQ ID NO: 921197 - DNA, 120 bp, Artificial Sequence
  ENSG00000285219_333 (sequence is synthesized)
agtaaacaaacacatgcatgcattaggtatttgtcctaataccctccctcctgtctgccctcaacccctacaggcgctggttgtgctattcctctccctgtgtccatgcgttcttcccct

SEQ ID NO: 921198 - DNA, 120 bp, Artificial Sequence
  ENSG00000285219_334 (sequence is synthesized)
ccctgtgtccatgtgttctcactattcaactcccacttatgtgtgaaaacatgtggtatttgcttttctgtttctgtgttagtttgctgagtttgaaggcttccagcttcatctatgtct

SEQ ID NO: 921199 - DNA, 80 bp, Artificial Sequence
  ENSG00000285219_335 (sequence is synthesized)
agtttgctgagtttgaaggcttccagcttcatctatgtctgtgcaaaggaccacattttctttgttcagtctaacattga

SEQ ID NO: 921200 - DNA, 120 bp, Artificial Sequence
  ENSG00000285219_336 (sequence is synthesized)
tacagtttgaatctactaaagaaggaaattgagcattaagcatagcaccttgctcttgctccaccgtaccttctaagggctcgcatgcagagaatacctgtgatccagtgccagctttca

SEQ ID NO: 921201 - DNA, 120 bp, Artificial Sequence
  ENSG00000285219_337 (sequence is synthesized)
tcaccgctttgcatagccagcttacattaacttgaaagagagttccaggtgcattcaagttctgctgaagaaatggaaatttggaagctctattattagcttaggccattttcaaatcac

SEQ ID NO: 921202 - DNA, 120 bp, Artificial Sequence
  ENSG00000285219_338 (sequence is synthesized)
ggatatagtggaagtcaggctgtgttggtatcctgaccaaggctttaggatactggaagcttttgctttctgtctcttgaaacacttgaccttgaattccacctgccatgctgtttggaa

SEQ ID NO: 921203 - DNA, 120 bp, Artificial Sequence
  ENSG00000285219_339 (sequence is synthesized)
gcccaagctgcactgtggagcaacccatgtgaaaaggaatggaggctctggctgaacttctcgttgacagacaacaccaaattgccagccatgtgagccagccaccttggaagtatcatc

SEQ ID NO: 921204 - DNA, 120 bp, Artificial Sequence
  ENSG00000285219_340 (sequence is synthesized)
tccagccccagtctagctgctgtcattgtatgggggagaactaagttttccttgttaagcccttttcaaattgctgatttgtgagccaaataaatgattgtttttgctttaagccaaaaa

SEQ ID NO: 921205 - DNA, 120 bp, Artificial Sequence
  ENSG00000285219_341 (sequence is synthesized)
gcctatcgaatacagaacctttaggagtgggacccaggagctctgttaacaaggcctccaggtgatttggaacacagaaaccaggaaccttcagttactccagcatgaaggaatcaactg

SEQ ID NO: 921206 - DNA, 120 bp, Artificial Sequence
  ENSG00000285219_342 (sequence is synthesized)
ctatagagaccacattccctggagttttataaactatgctggtcatcagatcacttttagacatcatgtaagtgttgttttcacgtataaccaaccaatgactttcatgatagtcacaaa

SEQ ID NO: 921207 - DNA, 120 bp, Artificial Sequence
  ENSG00000285219_343 (sequence is synthesized)
tcaggagaatggattctttctttcatctgaatagagagctgctgttcgagcctagctcttatcttctaggattctgaggaactagctggtcatcagtaaacttgattctaactcaaatag

SEQ ID NO: 921208 - DNA, 120 bp, Artificial Sequence
  ENSG00000285219_344 (sequence is synthesized)
ctcaaaggacaccttctccgggaaaccttccctgacttccgacgctgtttcctgttaaaatacacaagagaaagaggaaatggatttttccttcaatgaagttgaagcttcatcaactaa

SEQ ID NO: 921209 - DNA, 120 bp, Artificial Sequence
  ENSG00000285219_345 (sequence is synthesized)
ctgacctgacactgaccttgaaaacctcattgacactaccctctgattctgcccctctgggacttgagagaaaaggttggaggggcatccagaggaaggcttgcagtgcctgtcttgacg

SEQ ID NO: 921210 - DNA, 120 bp, Artificial Sequence
  ENSG00000285219_346 (sequence is synthesized)
ataaactctatgcttccagttgcaggaaagaatacacaagctcagaatctcttgggctgagtgacaaaggaggaaaagggatggttccaagtaggattggagcttctgcttcctcacttc

SEQ ID NO: 921211 - DNA, 120 bp, Artificial Sequence
  ENSG00000285219_347 (sequence is synthesized)
ctcacgtagctccatctgcctcttcagagagctcccatctcccactgtgtgcagctgagttccaagcactcctggcggcataatgactgggacaaagatatttcctgcagttgtcaatgg

SEQ ID NO: 921212 - DNA, 120 bp, Artificial Sequence
  ENSG00000285219_348 (sequence is synthesized)
tgctcctatactgaaactctcctaggaacttggccaaatcttcctgctccccatccctgatttctgtgaacaagagggaagactttgtcacacttctcattggtgatcatattaatttct

SEQ ID NO: 921213 - DNA, 120 bp, Artificial Sequence
  ENSG00000285219_349 (sequence is synthesized)
aggccatgtgtatctagatatgaaataatatttctgttattttaaaatataagatccttggaagatgtcatctattggaacatgtaactatatagccagaagaggagatcactagagcca

SEQ ID NO: 921214 - DNA, 120 bp, Artificial Sequence
  ENSG00000285219_350 (sequence is synthesized)
taaaatgtctgatgcatgttgctgcctgaagcaaacccacaatctggaacccagtcatcttgttgctctagaaagcatcaagagaaaatggaagaaggcttaaaaggcccatcacatttt

SEQ ID NO: 921215 - DNA, 120 bp, Artificial Sequence
  ENSG00000285219_351 (sequence is synthesized)
aatctctatggttggattaatcaaaagttttcatagttttactaaagaaaaatgagtggtcatttatacttcatctctaacaagaaacttttttgtccagtgctcaaaaatacatatgct

SEQ ID NO: 921216 - DNA, 120 bp, Artificial Sequence
  ENSG00000285219_352 (sequence is synthesized)
attatgctatagtttccttatgacttgttttgttttctatagttgattgtgagcctccaaagggcatggagctatatggtatgattctttgctcctcaggcattttcttgctcaggagac

SEQ ID NO: 921217 - DNA, 120 bp, Artificial Sequence
  ENSG00000285219_353 (sequence is synthesized)
atacctaacatgtttttacttaatgataaaggtggtatgaatgcatcatcaataacagaagcttagagctagaagtaaatgtttaatcatttacttttgcttgtttttcttttccttttt

SEQ ID NO: 921218 - DNA, 120 bp, Artificial Sequence
  ENSG00000285219_354 (sequence is synthesized)
tttttgcattgtctactttaagacccacatattacaaataagaagcattaaaagtcgttagtgtcaagatcggggacatgaattaggtctcttgattctaaagatgattacagtaataac

SEQ ID NO: 921219 - DNA, 120 bp, Artificial Sequence
  ENSG00000285219_355 (sequence is synthesized)
agaaaaggctttctcatcaagcagtgtaactcagtggaacaagcttcagattgagcagtggcaatgtggtttcgtggacaggcactggctgggagcttggatctcattattgtgggttca

SEQ ID NO: 921220 - DNA, 120 bp, Artificial Sequence
  ENSG00000285219_356 (sequence is synthesized)
tctcagtcatgtgttgacctgaggtgcaggtggctctattgggagtcagccagctgtggatggtaaccacacatgaccaaaatgagtcttcagaagctatcacttgaacacagcaacgac

SEQ ID NO: 921221 - DNA, 120 bp, Artificial Sequence
  ENSG00000285219_357 (sequence is synthesized)
actgggcactactaagaaggagggaggaagtggaccaagggctgaaaaactaactattgggtcctatgcttagttcctgggtgacagaatcaattgtaccctaaacctcagcatcacaca

SEQ ID NO: 921222 - DNA, 120 bp, Artificial Sequence
  ENSG00000285219_358 (sequence is synthesized)
atatacccaggtaacaacctgcacatgtacccactaaatctaaaataggagttaaaattgtattttaaaaaagaagttaccactatcattgagctcttttcctgaggaaatctagggctt

SEQ ID NO: 921223 - DNA, 120 bp, Artificial Sequence
  ENSG00000285219_359 (sequence is synthesized)
ctgtcaaaacttcgctaatttaaatgagtatttccttcttttgtatttatagggaagtcaacaaaagtacagctgcccctgtcttattatatattgcatatatactaattctgagctctc

SEQ ID NO: 921224 - DNA, 120 bp, Artificial Sequence
  ENSG00000285219_360 (sequence is synthesized)
agggttgggaaagagagtataggaagactccttctgagggcttgtcttgacgcagaatggcctaaaattcgcactagagacagactgatttatagggattttttttttatctcttggacc

SEQ ID NO: 921225 - DNA, 120 bp, Artificial Sequence
  ENSG00000285219_361 (sequence is synthesized)
ttgttctaaaaaaaagtaatggaaaattcagaatatttgactcaactaaatctaatctctatgatcacatccagagcccttcccttgttggtgcctctgccctcctccctttatttgtta

SEQ ID NO: 921226 - DNA, 120 bp, Artificial Sequence
  ENSG00000285219_362 (sequence is synthesized)
ataagatctgacctacatcaggaactttttgggctagatccaggaatttttcaccttaaatttctttctaaagaaattgaggtttcagaaacagaagaagcctaacctgttaaaaaagaa

SEQ ID NO: 921227 - DNA, 120 bp, Artificial Sequence
  ENSG00000285219_363 (sequence is synthesized)
tccacagcattacatgagggtagcctcattattatcctgtatgagctgggaactaaaacaacagaaagagatttttggttaatcactaaggcctccattctatggttgccttctgtgtga

SEQ ID NO: 921228 - DNA, 120 bp, Artificial Sequence
  ENSG00000285219_364 (sequence is synthesized)
gcctgtgggatgtctcactttagaacattcgtgatgatgaaaatctccattctgcaagggctgtgtctatcacaaaaatcgtcttcaaagtgtcttctgtaaagacttcttcagactgtc

SEQ ID NO: 921229 - DNA, 88 bp, Artificial Sequence
  ENSG00000285219_365 (sequence is synthesized)
tgcttttatgagctgtaacactcaccatgaagatctgcagcttcgctcctgagccagcgagaccacgaaccttatcagaagggacaga

SEQ ID NO: 921230 - DNA, 65 bp, Artificial Sequence
  ENSG00000285219_366 (sequence is synthesized)
accttggtatctgaaatgttatcttgtttggaaatagggtttctgcaaatgtaatcaaattaaga

SEQ ID NO: 921231 - DNA, 120 bp, Artificial Sequence
  ENSG00000285219_367 (sequence is synthesized)
gtttggaaatagggtttctgcaaatgtaatcaaattaagatgaggtcatgcttgagtacggtcgcccttaatccaacatgactggtatctgtaagaagagagaaatgccaaatgaatgtg

SEQ ID NO: 921232 - DNA, 120 bp, Artificial Sequence
  ENSG00000285219_368 (sequence is synthesized)
gagacacacacaggaataccaggtgacaacagaagcagatattgaagagatgcagctgcaagccaagaaacactaaggattggaggccacctgcagaaactagaaaaaggctggagtgcg

SEQ ID NO: 921233 - DNA, 120 bp, Artificial Sequence
  ENSG00000285219_369 (sequence is synthesized)
tctagcaagatggagacttacaacatgaggcacatacaagagtgacctcccatcgtctttgaggcattctatttcttagcctccctctggagcgaagtggcataatctcggctcactgca

SEQ ID NO: 921234 - DNA, 120 bp, Artificial Sequence
  ENSG00000285219_370 (sequence is synthesized)
attctttctttcatctgaatagagagctgctgttcgaggtaactttcagcttttattttgtttggacacaattgtcaaaatgtttaactcttcctttccagaatttgtcatttgtgaaaa

SEQ ID NO: 921235 - DNA, 120 bp, Artificial Sequence
  ENSG00000285219_371 (sequence is synthesized)
aagattggtgactggcaaataattctactgatgttaatgaacacagatctgatgaagcaaactcagtattattttgagataatacaatcgtgcagaagtaaccaactagactttttacct

SEQ ID NO: 921236 - DNA, 120 bp, Artificial Sequence
  ENSG00000285219_372 (sequence is synthesized)
cctttttacagtggggagcagacacaaactacatcaatttggtctattgagccagaaatatgaaatatgacaaatagctgtgttttttaagcttgaaaccaaataaattacaaactccct

SEQ ID NO: 921237 - DNA, 120 bp, Artificial Sequence
  ENSG00000285219_373 (sequence is synthesized)
gaagaattatacacttgagctcttttaggtaacctctggatcctcagaacctattttatggctttggaagctgttaaaacaagtcatcaagtgtttttgggtcaaggcatatagttcaaa

SEQ ID NO: 921238 - DNA, 120 bp, Artificial Sequence
  ENSG00000285219_374 (sequence is synthesized)
catcaagtgtttttgggtcaaggcatatagttcaaagaaaacaaaaactatctggcttgcttgtgtaacagtgggaaacataagggaaaagtgtgttgggctgggcgcagtggctcatgc

SEQ ID NO: 921239 - DNA, 69 bp, Artificial Sequence
  ENSG00000285219_375 (sequence is synthesized)
caaaaatgagccgggcatggtggcaggcatctgtaatcccacctactcgggaggctaaggcaggagaat

SEQ ID NO: 921240 - DNA, 120 bp, Artificial Sequence
  ENSG00000280199_0 (sequence is synthesized)
gcatccctcctgctaagagtttccatcgtgtcccgtggaaggcggtggctgggaagtggctgcctggctattggatctgcagggctgtggccttattttggattgtttcttcgtctttct

SEQ ID NO: 921241 - DNA, 120 bp, Artificial Sequence
  ENSG00000280199_1 (sequence is synthesized)
ccctcaaccctccctcaccaaattctctcaaaatattctgctgagtgatgtagttcaaccacagagttcccttcctgttctaatttctggttttaaattagatcgactgtttcaggtttc

SEQ ID NO: 921242 - DNA, 120 bp, Artificial Sequence
  ENSG00000280199_2 (sequence is synthesized)
attttattaacagaatgaggtaaaagagtcaccttgtttaagtctttaatttgtgggaaaatgtgttcacgtctaccccaaaaatctcagatggttgctgcttttctatttgtgtaactg

SEQ ID NO: 921243 - DNA, 120 bp, Artificial Sequence
  ENSG00000280199_3 (sequence is synthesized)
aatcatggcttaattgattgttactggaaacgttttgggttatgacttttatgtgtctttgtcctgcatttgggttttttatcgtgtgtgtgttgttttggctgttgacactctggttta

SEQ ID NO: 921244 - DNA, 120 bp, Artificial Sequence
  ENSG00000280199_4 (sequence is synthesized)
ttgtgggaagaggatcctaggaatcgttttctggctcagtccagtctacgtttgctctccaggatctgaaggaggttctgaccattgcatgtacaagtccatacaagtcgggaaagcctg

SEQ ID NO: 921245 - DNA, 120 bp, Artificial Sequence
  ENSG00000280199_5 (sequence is synthesized)
tgctgcgtgcaaccccccaaaatctgcactatgggcagctgctggccttgcctgggcttggagacattcttcactatagctgtccactcaggtccaggattcgagttccacgattgcctg

SEQ ID NO: 921246 - DNA, 120 bp, Artificial Sequence
  ENSG00000280199_6 (sequence is synthesized)
cgtcctggctcacgggaggagtgggtcttaggggcacctggcatctggggtcccaggtgagtcacggcaaaagggaagtgtccggcaatggggaagaggaaggaggagtggagagaggca

SEQ ID NO: 921247 - DNA, 120 bp, Artificial Sequence
  ENSG00000280199_7 (sequence is synthesized)
ccctgctgttgctgaagtttgtccaactgctgattagttttggccagataatttttttctagtgaatcaagattttaaatcagatttcctttggaggcctccgaataccaatcaaaaatg

SEQ ID NO: 921248 - DNA, 120 bp, Artificial Sequence
  ENSG00000280199_8 (sequence is synthesized)
gctgtcccctgggcctgatcaaccctattcccttggtaaagttagggcgtttagaaagacaggtgcaagaattaggattgtaaggaaagtgcctctgagaagaaggggtgtttcccattg

SEQ ID NO: 921249 - DNA, 87 bp, Artificial Sequence
  ENSG00000280199_9 (sequence is synthesized)
taaggaaagtgcctctgagaagaaggggtgtttcccattggaggagagtggggaggccgagagcttcccggtggaggagaggaggga

SEQ ID NO: 921250 - DNA, 120 bp, Artificial Sequence
  ENSG00000203469_0 (sequence is synthesized)
ggtgtgagccactgcgcccggcctattgtgatatttctttacttaataactagcagatgaatctcttaacagtattctgttttcctctaagcatgcataaaaagtggtcaaataagtcca

SEQ ID NO: 921251 - DNA, 120 bp, Artificial Sequence
  ENSG00000203469_1 (sequence is synthesized)
aagcatgcataaaaagtggtcaaataagtccatgatgactcatcaccttttccctgcaaggagtgtactgtagattaccaaacctgcagaagccgtctgtgtggagacaggaggaggaca

SEQ ID NO: 921252 - DNA, 120 bp, Artificial Sequence
  ENSG00000280195_0 (sequence is synthesized)
caagagcgtatctagcgcccgaaaatgcggtgagcttgcaggacacaggcagagatacgagggaaccgtcgcttccacaccgacacgggaacgaaggaacagacagtaatattgcagact

SEQ ID NO: 921253 - DNA, 120 bp, Artificial Sequence
  ENSG00000280195_1 (sequence is synthesized)
aaaaaatagccgggaggtgtaaaacatagggtcagttcccaagacagggccgccgcacgggggaggctccaccccacaattgttttcagcggccataggcacttctttccccgcccgttt

SEQ ID NO: 921254 - DNA, 120 bp, Artificial Sequence
  ENSG00000280195_2 (sequence is synthesized)
cccagcagtgaaagtacacggattcaagactcaccaacgggcggggcggcggcccatggcgacaccaggatcttcagtggctgcaacgaaaaagagagagtcggaacggaagacgagaac

SEQ ID NO: 921255 - DNA, 120 bp, Artificial Sequence
  ENSG00000280195_3 (sequence is synthesized)
agacctaaaaggtgtgagaaccagcaacggcaccgcaagagacgacaactgcgcttactcaccacaccgaagggaaagaggcgctcctccgcctgcgcatggcttatataggcggtctgt

SEQ ID NO: 921256 - DNA, 120 bp, Artificial Sequence
  ENSG00000280195_4 (sequence is synthesized)
ctgcgcgcgtaagaaccatagagtcctgtcgaagacgggtggacgctctgtcagacgtcatgaccatagacgcagccgctcttggcgcttgcgcccgggcgtagcccagcacatgcgcag

SEQ ID NO: 921257 - DNA, 120 bp, Artificial Sequence
  ENSG00000280195_5 (sequence is synthesized)
atcagagaggtgaccgggtaccagggccgcgggcggccagctgacgaatggggcttcgccacatggtcgcgagaagcccgcttccggctggccatcttgggcgtagaactcttgccctag

SEQ ID NO: 921258 - DNA, 120 bp, Artificial Sequence
  ENSG00000280195_6 (sequence is synthesized)
gctttgccgttaactgtgacagacgtatatttctgagagtggaaaaaaggaaagtaccctaggtgggcctcccggcgaccgcgagagtgtccctgagcttgcacgggtctcggacacgcg

SEQ ID NO: 921259 - DNA, 120 bp, Artificial Sequence
  ENSG00000280195_7 (sequence is synthesized)
ctccgtgcctccttctaggctagaggccccggcggtgaagcgccatacggggatctgggcccgcgttcctttgtcaacccgggaggccggagggggagacccattcccctaccggagagg

SEQ ID NO: 921260 - DNA, 120 bp, Artificial Sequence
  ENSG00000280195_8 (sequence is synthesized)
gagccatgccccgtatccccgtttcctggagacccagggttcgcacattgccgcggggaagaggtcgaggagaaatctccacggagactcatggcctgggaaaccccggggcatctctag

SEQ ID NO: 921261 - DNA, 120 bp, Artificial Sequence
  ENSG00000280195_9 (sequence is synthesized)
ccccgctccgcccaccctgacccgcaccgtcccgaccagctgcgtctcgggcgccgcctcccatgagccgctctcgcctgggcaccgccccacctcgcccttcccactccactgtgctca

SEQ ID NO: 921262 - DNA, 120 bp, Artificial Sequence
  ENSG00000280195_10 (sequence is synthesized)
agagtccctccgggtgcgtctgggggtcgtggggaagcagggccgcccccacccgcccacggggcagcatccggggagaggtgcgcagagcaggcgggcgtcctgggggaagtggcatct

SEQ ID NO: 921263 - DNA, 120 bp, Artificial Sequence
  ENSG00000280195_11 (sequence is synthesized)
ggaggtatctgtccaccattctgcaggtggggcgcggtggggtaacaaagtcttcccgtcctttgacaggaaggacgggaggaaatcctgctcgagcgcacctgttttccaggatgatat

SEQ ID NO: 921264 - DNA, 120 bp, Artificial Sequence
  ENSG00000280195_12 (sequence is synthesized)
gtcgcttttataaatggctgcaggtccctttgagaaaagcttgggacgatttctggggtgcacttgcagcagtggtgcaaggtccttcccaggggaacctagcctccctttccatcatgg

SEQ ID NO: 921265 - DNA, 120 bp, Artificial Sequence
  ENSG00000280195_13 (sequence is synthesized)
gactctggatgccggcggtgacttaggtctggaaactgggttcgaggctgtaacaccactggggcagtacaagtcaggaattgcggcggagtgccgtggctcacgcctgtgatctcagca

SEQ ID NO: 921266 - DNA, 120 bp, Artificial Sequence
  ENSG00000280195_14 (sequence is synthesized)
ctttgaggggcggaggtgggcggatcacttgagcccaggaatttgagacctggacaacatggcgaaaaaccgcctctacaaaaattaaaaactaaaaattggctgggcgcagtggctcac

SEQ ID NO: 921267 - DNA, 120 bp, Artificial Sequence
  ENSG00000280191_0 (sequence is synthesized)
cccgtcgggagacacgttttgtcagttgcttcctctggagtccttttaaaagactactttttagagcagttttcattttaccgatacatcgatcagagagtacggagcttcccacattgc

SEQ ID NO: 921268 - DNA, 120 bp, Artificial Sequence
  ENSG00000280191_1 (sequence is synthesized)
ctgtttcagcaaaatgtccctgggtcttaatgattaagtccaggcactccaaggacgattaaatatttaaacagcagcttccctttgaagggaaggaaatgaccgcagaagggagtgcac

SEQ ID NO: 921269 - DNA, 120 bp, Artificial Sequence
  ENSG00000280191_2 (sequence is synthesized)
cgtgggggcaggaggtgctgcggccaatgggcagtgctgggagatgaaaccaacagcggcgattgccccagaaagaacttggcgctgctaaggcaatggcggcccgaaagaggcccctga

SEQ ID NO: 921270 - DNA, 120 bp, Artificial Sequence
  ENSG00000280191_3 (sequence is synthesized)
tgacacgcgccaccaggctccgcgctcatggcctggcctggcatctcaccaggcttttcaatggactagagtgcggggctgctctgcctgtggcaagggttgtcctgctgctgggcacag

SEQ ID NO: 921271 - DNA, 120 bp, Artificial Sequence
  ENSG00000280191_4 (sequence is synthesized)
gtttcagcaaaatgtccctgggaaggaaatgaccgcagaagggagtgcaccgtgggggcaggaggtgctgcggccaatgggcagtgctgggagatgaaaccaacagcggcgattgcccca

SEQ ID NO: 921272 - DNA, 120 bp, Artificial Sequence
  ENSG00000280191_5 (sequence is synthesized)
cactcacagtgcgctcactctgaacctctgtgcacacgatgggcctgcatctcttcccactatctgctaggaaacacgaggctgggggcaggggtaatggggccagggggtaatggcagg

SEQ ID NO: 921273 - DNA, 120 bp, Artificial Sequence
  ENSG00000280191_6 (sequence is synthesized)
tgaggccatggcctagagggttgccatgcttggtgcaggggaggagaggcccaggtgtggctgcagtggcagcaggagtcagtgtggctgtgcccagtgggatgttgtcagagaatggac

SEQ ID NO: 921274 - DNA, 120 bp, Artificial Sequence
  ENSG00000280191_7 (sequence is synthesized)
tttgtctgagccacactggactcttctctgaccagcaagcacattctggagatgcggggcagagacgaggcctccgtgagaacctttgaggtgtgagggccttgatctggggtgcagcct

SEQ ID NO: 921275 - DNA, 120 bp, Artificial Sequence
  ENSG00000280191_8 (sequence is synthesized)
ccagctttctgcttacagagcaggacctgcaggagctcgctgactgcctgcacagtggaaggaagacctgtttcttttactttccttgaggagaaaaaattaaagttctgagcaaacgca

SEQ ID NO: 921276 - DNA, 120 bp, Artificial Sequence
  ENSG00000280191_9 (sequence is synthesized)
ctagagagctggcgcacctcctgggcctgacgcgggcttcctggattgcataaaggctccttctccttacatagccagggcaaaggtgcatgacaactctgagcaagtcaaaacaaccgt

SEQ ID NO: 921277 - DNA, 120 bp, Artificial Sequence
  ENSG00000280191_10 (sequence is synthesized)
cagcagcgggaaacctcgatgaacaaacaccgggagagtgtttctgcagatcctgctttgtgacttcgagtgaagtgtggaagcgctggaagcacttagaccctgcctgtgccgcagacc

SEQ ID NO: 921278 - DNA, 120 bp, Artificial Sequence
  ENSG00000280191_11 (sequence is synthesized)
ggcctccctcccctgtgtttcccgcagccccctctggagtctctcccccgccccgcacgtgtagggagaccccgggaaagtgggccggttataattgcaaaaaataaaccgtcagtagcc

SEQ ID NO: 921279 - DNA, 120 bp, Artificial Sequence
  ENSG00000226899_0 (sequence is synthesized)
tcaaggctgcagtgagccatgattgcagcactgcactccagcctcgcgaccctgtctcaaaaaaataaataaaatgcaaagaggtacaaggatggctagtcgtctagtcaaaagtagtaa

SEQ ID NO: 921280 - DNA, 120 bp, Artificial Sequence
  ENSG00000226899_1 (sequence is synthesized)
gaggtacaaggatggctagtcgtctagtcaaaagtagtaaggatatgtagaaaaaggcaggaccaagaagaaataatgtcataaagacaaacatgttgattcatctaacttgtgtgtttc

SEQ ID NO: 921281 - DNA, 120 bp, Artificial Sequence
  ENSG00000226899_2 (sequence is synthesized)
tgaggtttagtgaccttcactgtgaggttaagaaccgtcacaatgaagtctagttcattttcatctataaacctacatgtactataacaccaccttgtagtccaagtattcatagtacac

SEQ ID NO: 921282 - DNA, 120 bp, Artificial Sequence
  ENSG00000226899_3 (sequence is synthesized)
aaaaaaaaaaaaaaaaaaaaaatgattttaagactgttccaaaggcatacaagcaattaaaagacaatcacacccaacataaaagctcacagatatgtaaagattccatttatatgaata

SEQ ID NO: 921283 - DNA, 120 bp, Artificial Sequence
  ENSG00000226899_4 (sequence is synthesized)
tttatatgaatatccagaataggtaaatccacagacaccaaaagcagactggcagttatcaagggttagcgggtaggggtagggggcagtaactgcttaatgggtacatagtttcctttt

SEQ ID NO: 921284 - DNA, 120 bp, Artificial Sequence
  ENSG00000226891_0 (sequence is synthesized)
aggctccaaaagcttgttacttgcttgtagtcaaacagaaggcagagctgcgaatcaaatccaggtttgtctcgacatgccactagctcatacttcccttggatcagccactaaatggct

SEQ ID NO: 921285 - DNA, 120 bp, Artificial Sequence
  ENSG00000226891_1 (sequence is synthesized)
ttcactccagtgagcagcgaccagcactcctggggacatcagggcactcacgctccttaacactggacaggagacctgcgcagtcattctagcaccagaattatggaacatttatcaaca

SEQ ID NO: 921286 - DNA, 120 bp, Artificial Sequence
  ENSG00000226891_2 (sequence is synthesized)
gcctaaaataaagacaacacgaggagaatttggttgcttatatagattcaaggtacaatcctgctggattctggaagaaatatcacagtgtgcatgcacagaagtacgaccatgtgaaga

SEQ ID NO: 921287 - DNA, 120 bp, Artificial Sequence
  ENSG00000226891_3 (sequence is synthesized)
caatctacaagccaaggaaagaggccacagaggaaaccaaccctgccagcatcttgatcttggacttccagcttccagaactaaccagggaccccactcccatgccgacagtatgggctg

SEQ ID NO: 921288 - DNA, 120 bp, Artificial Sequence
  ENSG00000226891_4 (sequence is synthesized)
ctgtcttcaggaccattgcaagtgtccttcacggttcggttcacatttcacaagccccatgaagtctatctggattttcgatggatgtcttgccttttcctctacacactacaggaagag

SEQ ID NO: 921289 - DNA, 120 bp, Artificial Sequence
  ENSG00000226891_5 (sequence is synthesized)
tggccacccctgccaagggcctagtatagtaccctatacatgtagctgatcagttgattgttactgatcatatgtatcctgcatcatgttataaaaaattaacacagtgcttggcacata

SEQ ID NO: 921290 - DNA, 120 bp, Artificial Sequence
  ENSG00000226891_6 (sequence is synthesized)
ggtacaatcctgctggattctgggattacaggactgtagacaaaagagaaatcatcatggactgttcactggacaaaatttcatggagaggagaagacctttggcggttcatggatgttc

SEQ ID NO: 921291 - DNA, 120 bp, Artificial Sequence
  ENSG00000226891_7 (sequence is synthesized)
cgtccatggcacacaggagaggacagagccaagaatgaatataggacaccagtgccccaactcttaaccactaccatacacggttttataaagtaaattttaaaagtcgactttaaaaca

SEQ ID NO: 921292 - DNA, 120 bp, Artificial Sequence
  ENSG00000226891_8 (sequence is synthesized)
aggctccaaaagcttgttacttgcttgtagtcaaacagaaggcagagctgcgaatcaaatccagcaccagaattatggaacatttatcaacagcctaaaataaagacaacacgaggagaa

SEQ ID NO: 921293 - DNA, 120 bp, Artificial Sequence
  ENSG00000226891_9 (sequence is synthesized)
atgtgtgggcaggtctgtagagtagtacaagaagagattatgttctgcattctcacttcaacaagaaagtcctggtccaccaataatacctttaagcttcaggataattgtgaaaaggcc

SEQ ID NO: 921294 - DNA, 120 bp, Artificial Sequence
  ENSG00000226891_10 (sequence is synthesized)
cccatgaagtctatctggattttcggtaatgtttcctgtctctgaaatcttatgacatttatgtctgtatcagccatttgatgcttgattatctatttttcagatggatgtcttgccttt

SEQ ID NO: 921295 - DNA, 120 bp, Artificial Sequence
  ENSG00000226891_11 (sequence is synthesized)
attataggcgtgagccaccacgcctggccttcagtgagtgctttgacagaattttacctgaatgtcaagagctaaaaaacaaaacaaacaaacaaacaaaaatacttttctcagtttttg

SEQ ID NO: 921296 - DNA, 120 bp, Artificial Sequence
  ENSG00000226891_12 (sequence is synthesized)
agtttttgccaattgggcgtgtactggggccctccttcaacacttagccaggctttcactgagcttaggaatcagctgtgatgaaacctgaagtttttaatcatgtcttttctgagcaag

SEQ ID NO: 921297 - DNA, 120 bp, Artificial Sequence
  ENSG00000226891_13 (sequence is synthesized)
catcttgccctgggcacatgcatggctggctaaattccctgcattcacaggtgcttctgattgtcctaacttcccaaagaaactctgttctcaaattttttgcccaagccttaggtggtt

SEQ ID NO: 921298 - DNA, 120 bp, Artificial Sequence
  ENSG00000226891_14 (sequence is synthesized)
tattgcatgtctcaactgtgaccttttgcctcaggccttgttcttctaccttatgatgattcaagcaatgcctgctgcttttccaatctgggttagttcagagttaggcaaacagaggtg

SEQ ID NO: 921299 - DNA, 120 bp, Artificial Sequence
  ENSG00000226891_15 (sequence is synthesized)
agcattttgtgccagtccttcacgtacagacaggttaaaaccgatctacacaataatttgcaaataaggtctgctttgctccctctagaaccagggaccccactcccatgccgacagtat

SEQ ID NO: 921300 - DNA, 88 bp, Artificial Sequence
  ENSG00000226891_16 (sequence is synthesized)
cagtagctaggactacagatgcatgccaccatgcccagctagtttttaaattttttatagagtccagggtctccctatgttgcccagg

SEQ ID NO: 921301 - DNA, 120 bp, Artificial Sequence
  ENSG00000226891_17 (sequence is synthesized)
ctggtcttgaactcctggcctcaagcattcctcccaccttagcctccaaaagtgctggagttacaggcgtgagccaccacccagcctatgcaaataatttttaaacaataaatattaaat

SEQ ID NO: 921302 - DNA, 120 bp, Artificial Sequence
  ENSG00000226891_18 (sequence is synthesized)
ccagcctatgcaaataatttttaaacaataaatattaaatggttttgtttcttttggagacagggtctcactctatcactcaggctggagtgcagtggtgggatcgtggctcatggcagc

SEQ ID NO: 921303 - DNA, 69 bp, Artificial Sequence
  ENSG00000226891_19 (sequence is synthesized)
tgcagcctaaactgtatattaaaacgactgctttagaacacagtcacagaaatgggattgagtcaaatg

SEQ ID NO: 921304 - DNA, 120 bp, Artificial Sequence
  ENSG00000226891_20 (sequence is synthesized)
gctttagaacacagtcacagaaatgggattgagtcaaatggactgtataattttagattaattcatagattagtattggcaagttactttctattcagtttccacaaatctacactgccc

SEQ ID NO: 921305 - DNA, 120 bp, Artificial Sequence
  ENSG00000226891_21 (sequence is synthesized)
cccttgaaggcacatgtagattgcctaaccatccacaccaggcaaacaattcttcaaatgtcatgccctttgcacttctgttcagatccagccttagagaagcttgtgaagcaatgactg

SEQ ID NO: 921306 - DNA, 120 bp, Artificial Sequence
  ENSG00000226891_22 (sequence is synthesized)
ttttaattggtctcctgggtacccaggcctaatcctttaccaagtcactagttatcccatgttccttatctgtctgtctatccatctatccttccatcctcatccaatacttacagaatg

SEQ ID NO: 921307 - DNA, 120 bp, Artificial Sequence
  ENSG00000226891_23 (sequence is synthesized)
taatcaaacattttcccaaacttaagaaaaacaccaagaaggaatataagtacaggggacattagaggataagctcataagggctggactaaatctttttttttttttttttttttgaga

SEQ ID NO: 921308 - DNA, 120 bp, Artificial Sequence
  ENSG00000226891_24 (sequence is synthesized)
cgtgagccaccgcgcctggcctaaatcttttaaggagactcagtctttgtggcctgacacttggggaacagtcagcttcaggaagttgggatgccacacctttgtttcttgaaccattta

SEQ ID NO: 921309 - DNA, 120 bp, Artificial Sequence
  ENSG00000226891_25 (sequence is synthesized)
cacctttgtttcttgaaccatttagggaggtgtttcttgaaccattttgaaatcagaagtgtgagtcctccagccctgacttttttttcaagattgttttggctatttcaggtcccttgc

SEQ ID NO: 921310 - DNA, 89 bp, Artificial Sequence
  ENSG00000226891_26 (sequence is synthesized)
ttttttttcaagattgttttggctatttcaggtcccttgcaatcccatatgaattttttattttttattttttgagaccgactgcatga

SEQ ID NO: 921311 - DNA, 90 bp, Artificial Sequence
  ENSG00000226891_27 (sequence is synthesized)
tgtgacgtgagccaccatgtccagctaattcttgtatttttagtagaggcgggctttcacgacgttggccaggctgatctcgaactcctg

SEQ ID NO: 921312 - DNA, 120 bp, Artificial Sequence
  ENSG00000226891_28 (sequence is synthesized)
ctcggcctcccaaagtgctgagattttggtgtgaaccaatgcgcctggccacaatcacatatgaatttgaggatatgctttttccattgagcaaaaaagctattgggatttttataggga

SEQ ID NO: 921313 - DNA, 120 bp, Artificial Sequence
  ENSG00000226891_29 (sequence is synthesized)
aagctattgggatttttatagggattgtgttgaatctgtacattgttttgggtattgtcatcttaacaatactaagtcttccagtttatgaatgtgggtaacttctaatttatttatttc

SEQ ID NO: 921314 - DNA, 120 bp, Artificial Sequence
  ENSG00000226891_30 (sequence is synthesized)
ttcattaatctctttcagcaatgtttttacagttttcagtgtataatatttacttctttggataaatttattcctaagtatcttatactttttgatgcgattgtaatgcagatagaattg

SEQ ID NO: 921315 - DNA, 120 bp, Artificial Sequence
  ENSG00000226891_31 (sequence is synthesized)
ctttatttccttttcaaatatccactgctgatgtatagacaactgatttttgtgtgttgattttataacctgcaactttgttgaattcatttattagttcaagtaggtttcttgtagatt

SEQ ID NO: 921316 - DNA, 120 bp, Artificial Sequence
  ENSG00000226891_32 (sequence is synthesized)
gatgctctttctttctgcttcctgtcaacttgctctggctagaattttcagtaggatgttgaatagcagttttgaaagcaggcatctgcattcctggtgatcaaactaattaaattaaaa

SEQ ID NO: 921317 - DNA, 120 bp, Artificial Sequence
  ENSG00000226891_33 (sequence is synthesized)
tacatgtaattatttagtttgagacaattagatttaaatggctaggttagggccttaatccaatatgattggtttctgtataagaagaagaaatatcacagtgtgcatgcacagaagtac

SEQ ID NO: 921318 - DNA, 120 bp, Artificial Sequence
  ENSG00000226891_34 (sequence is synthesized)
agggtctaaaacagtggacattataatttttcaaatagtttgtacctttaatgttttaaaaatgtatcttgtagctttaatttgaatttttacatttattaaagaagttaatgattttct

SEQ ID NO: 921319 - DNA, 64 bp, Artificial Sequence
  ENSG00000226891_35 (sequence is synthesized)
tacaggcacatgctaccactgatttcgaactcctgatctcaggcaatccgcctgcctctgcctg

SEQ ID NO: 921320 - DNA, 87 bp, Artificial Sequence
  ENSG00000226891_36 (sequence is synthesized)
tgcctggcccatattttcttttattgaagtatactttcctgtttctttgtgtaccttcttgtgattttttttgttgttgtttttgaa

SEQ ID NO: 921321 - DNA, 120 bp, Artificial Sequence
  ENSG00000226891_37 (sequence is synthesized)
tgtgtaccttcttgtgattttttttgttgttgtttttgaaaactggacttttgaatagtatattgtggcaactctgaaaataagattcttctccttctttggggtttactgttttatttt

SEQ ID NO: 921322 - DNA, 120 bp, Artificial Sequence
  ENSG00000226891_38 (sequence is synthesized)
atttatttttttgtgtgtgtggttgtttttgttttcattgttgagacctgtaatagtcttgttctagtaacttttcctatttttgcagagacttttctttgtcatgtgtggttgctgaag

SEQ ID NO: 921323 - DNA, 84 bp, Artificial Sequence
  ENSG00000226891_39 (sequence is synthesized)
ttttgcagagacttttctttgtcatgtgtggttgctgaagtctctgtcccttagcttgtattcagtgagtggggtttgctctgt

SEQ ID NO: 921324 - DNA, 71 bp, Artificial Sequence
  ENSG00000226891_40 (sequence is synthesized)
agtgaactggcctgatgtcagctcactgcagattgcaggcacatgccaccacacccagctaaattttgtat

SEQ ID NO: 921325 - DNA, 120 bp, Artificial Sequence
  ENSG00000226891_41 (sequence is synthesized)
ctgtcttcaggaccattgcaagatgtcagagctgcagcatgatctggaggctttcctcgctttcttctgcttcccctcccttgatccttcacaggcattttcctcaatacatctcttgcc

SEQ ID NO: 921326 - DNA, 120 bp, Artificial Sequence
  ENSG00000226891_42 (sequence is synthesized)
tggctaatcctgtctgatgagtttccagatggacctgaattaagtatgttctccagctagctgctagctagttaaaggcagatccatgtgccatactatggtagggatggttagtttata

SEQ ID NO: 921327 - DNA, 120 bp, Artificial Sequence
  ENSG00000226891_43 (sequence is synthesized)
tataccttcttatctaactttcataatcatttactgaggtaaatgggctgggtagtatgattgcaattttatgtataaggaaacaggattaatttaggaacttgcctgggatatacacta

SEQ ID NO: 921328 - DNA, 120 bp, Artificial Sequence
  ENSG00000226891_44 (sequence is synthesized)
gtaagtggcagagctgagctgaaatttaaacttaagttggtattactccaaagttaccttaactactcatctgtggggcagttagactgagagtgaagttgacatcttatgagagttgaa

SEQ ID NO: 921329 - DNA, 120 bp, Artificial Sequence
  ENSG00000226891_45 (sequence is synthesized)
gtatctgaggaagataaacttgatgttctacagaagttgggggaggaagttctccaaatcagaatcaagtttttttctcaagcaatgattttaggacaataccaaatgtgtgatacccat

SEQ ID NO: 921330 - DNA, 120 bp, Artificial Sequence
  ENSG00000226891_46 (sequence is synthesized)
accaaatgtgtgatacctatgtattgaatttatgacagagttaccaacgttctactttggacaattaactgaaaattttcagtctaaaaacataatgtggacatttataattatatatac

SEQ ID NO: 921331 - DNA, 120 bp, Artificial Sequence
  ENSG00000226891_47 (sequence is synthesized)
atacatgattcatttgcttttcatcttttttctttactgaattatagctttagcaaatatctattgaatttttattatatgtcatgcatgatacctttaaggaaaaatatatatattccc

SEQ ID NO: 921332 - DNA, 120 bp, Artificial Sequence
  ENSG00000226891_48 (sequence is synthesized)
tttccttcccattatatttaatccgatttttttcttactttctgtcattatgaataagtattttagacagcctactgtttgcatggtactaagcaatagaaaagggcctccttcctgtaa

SEQ ID NO: 921333 - DNA, 120 bp, Artificial Sequence
  ENSG00000226891_49 (sequence is synthesized)
gtctaatcacaccccaccttagatggaagctgattcaatgggttagtgagcatgtagagaaagatctgctcagtcagtgtcaaagtttatttcagcggtaggttgtaagaggttcaacat

SEQ ID NO: 921334 - DNA, 120 bp, Artificial Sequence
  ENSG00000226891_50 (sequence is synthesized)
aactgccttgttcttctaccttatgatgattcaagcaatgcctgctgcttttccaatctgggttagttcagagttaggcaaacagagaaccagggaccccactcccatgccgacagtatg

SEQ ID NO: 921335 - DNA, 120 bp, Artificial Sequence
  ENSG00000226891_51 (sequence is synthesized)
tagaacttgggaagaagtcacatctaattcttttctatttttatttcattttatttcttttttttagaagtgaggtctcactctgtcacccattctggggtgcaatggcatgagcatagc

SEQ ID NO: 921336 - DNA, 120 bp, Artificial Sequence
  ENSG00000226891_52 (sequence is synthesized)
tcactacagcctcgaactcctggggtcaagcaatcctcccacctcagcttccaagtagttgcagctatagctgcacaccattgtacatggctaatttttatttattcatttttttttata

SEQ ID NO: 921337 - DNA, 69 bp, Artificial Sequence
  ENSG00000226891_53 (sequence is synthesized)
tggagccactgtgcctggccagttcttgttcagctacaatttattttcctattgctttttggaatgtaa

SEQ ID NO: 921338 - DNA, 120 bp, Artificial Sequence
  ENSG00000226891_54 (sequence is synthesized)
tcagctacaatttattttcctattgctttttggaatgtaatttaaactttacacttcagttatcccacttgtcaaatgcatacatgatttcgtggccaataacctgtacgtggacacagt

SEQ ID NO: 921339 - DNA, 120 bp, Artificial Sequence
  ENSG00000226891_55 (sequence is synthesized)
aaagttaaaacaataaagatgcacggaattttgatgctgataggtatcataaaataatgtgatccaaactaaggagatatctgagctcagagacagtaaaaagaccaccctaagtttttt

SEQ ID NO: 921340 - DNA, 120 bp, Artificial Sequence
  ENSG00000226891_56 (sequence is synthesized)
tttttttttaatctatcaaagagctcatccagcatgcaagtgtcctgctttctgatccagcagcctttctagcaccccggccttgattgtcagaatagcatctgcttataaggtttttaa

SEQ ID NO: 921341 - DNA, 120 bp, Artificial Sequence
  ENSG00000226891_57 (sequence is synthesized)
attattaatacagtatactaaatcccaggagtagaataagccttgttattacggctagtaagtcagcccagagcaatctgatattcctgtaaaactgaatggattttgaagtaaagcatc

SEQ ID NO: 921342 - DNA, 120 bp, Artificial Sequence
  ENSG00000226891_58 (sequence is synthesized)
cttgggctcactggcctcagaggaggccatcatctcatttacctatttaagaaaaaccccataaaagagtgttctatatggacattcattatgtcttaagctttattgattctgttatgt

SEQ ID NO: 921343 - DNA, 120 bp, Artificial Sequence
  ENSG00000226891_59 (sequence is synthesized)
tgccgttaattataggaaccacgaaagccttcaattagattaaagccataataaataagattagtaacacttattctgctctgtatgttaagtgtttttataataaactaatgtttatct

SEQ ID NO: 921344 - DNA, 120 bp, Artificial Sequence
  ENSG00000226890_0 (sequence is synthesized)
cagcccctcgaagaaggtgttcttgtcctctgtgctccacgactcccactgccgccggacctttttgccttcttccttctcgccaccagaagaccctaagttccgggaggaggagcgcga

SEQ ID NO: 921345 - DNA, 120 bp, Artificial Sequence
  ENSG00000226890_1 (sequence is synthesized)
aaaaggagcaagattttatgtggaaccatgtaacagcacaatgacgctgcagcctaagacgccctgtccacaatggagacagagatcccttccctctgcaaaatgaagcctcacatcaca

SEQ ID NO: 921346 - DNA, 120 bp, Artificial Sequence
  ENSG00000237453_0 (sequence is synthesized)
agggggtattccccctctatcctggagaataaagttgctgtgaaacctcttatggctgcaaggaattcagttacagagtttatgactcccagaggcaagatgtttggaggcagcctggga

SEQ ID NO: 921347 - DNA, 120 bp, Artificial Sequence
  ENSG00000237453_1 (sequence is synthesized)
ccagggcagaagtgccaggattcaagttcagatctgcctccctccaatgcccctgttgtttccacctcatcatgctgactctgtgaaggctgacactgcagaaataaaagtcacaaggtg

SEQ ID NO: 921348 - DNA, 120 bp, Artificial Sequence
  ENSG00000237457_0 (sequence is synthesized)
agcttaagaattatccgcctcactctcttttttagaaataggagggaaaggtagagtggaaattgatttcttgcagagactgaggcgctgaatgatagagggaataaacatttgccctgg

SEQ ID NO: 921349 - DNA, 120 bp, Artificial Sequence
  ENSG00000237457_1 (sequence is synthesized)
ataaaaatgttcttggctgttgtccagctctaatgatgtcctagagcagaagtgtttcttctgatgtctcattttaacaagaggatgatgtctgtgtatgtctctgtgttttagagaggc

SEQ ID NO: 921350 - DNA, 120 bp, Artificial Sequence
  ENSG00000237457_2 (sequence is synthesized)
aaattctgaattactttcattgcaaataaaccttaacaattgtgagagttagagagcatacttttcacataagactttggtatgctgcctaaagctacttacataatttgctattcagag

SEQ ID NO: 921351 - DNA, 120 bp, Artificial Sequence
  ENSG00000237457_3 (sequence is synthesized)
aaatgcatttgtttattgaggacccacccggacttaaattggaaaaatgtaacattcagatttttattttatatgtgaaataaatgtgtgattgctgttcttaaaaatttgaaaaaaaaa

SEQ ID NO: 921352 - DNA, 120 bp, Artificial Sequence
  ENSG00000263970_0 (sequence is synthesized)
aaaaatgattgtcactcactgtgcttcacaaaaatttcttttaatgaataaataatttgatgaaatcaaaaatatttacaatataaacacatggaaaagctctgggtccgtgaatctgat

SEQ ID NO: 921353 - DNA, 120 bp, Artificial Sequence
  ENSG00000285960_0 (sequence is synthesized)
ttccacaaggccatgatgcaaaagggatgtgcccagagaaattcccatggaggaaggcaattaattatcagctggtgtgttcatctcattctgagaatcaggctgaaggaacaacctcta

SEQ ID NO: 921354 - DNA, 120 bp, Artificial Sequence
  ENSG00000285960_1 (sequence is synthesized)
tctggaacatgctttacatatcagaaggagaagaaagaaagcagggaaagaaaacaggcatcatgatggcaactaaagggtgatgagcttgtttcccacttcactggaaaacaaaatggg

SEQ ID NO: 921355 - DNA, 120 bp, Artificial Sequence
  ENSG00000285960_2 (sequence is synthesized)
aatattcagaagataagttccacagctcccatagcatcttcctatctaccaggatttggaccttctacaccctgctcccattaaggaattagccttgctcttgtccaaaactagcctttg

SEQ ID NO: 921356 - DNA, 120 bp, Artificial Sequence
  ENSG00000285960_3 (sequence is synthesized)
cgtatgccttagatcctatcccccttgcttgctcacaggctttgctccagcaattctccctatttttcccctataccatcagcttcctctctctactaggtcatttccaccagcacacaa

SEQ ID NO: 921357 - DNA, 120 bp, Artificial Sequence
  ENSG00000285960_4 (sequence is synthesized)
caatactgtctctctcatcttagaaatggaaactaacaaaattgagttcacttttccttctgacactatcccttttctacctcccccactttacagcaaaactctttgaaagctgcctga

SEQ ID NO: 921358 - DNA, 120 bp, Artificial Sequence
  ENSG00000285960_5 (sequence is synthesized)
gactccaccacctcaccagacccctgcttgtcaatatcatcaatgacttccatcttgctaaatccatttcttgtccccattgaacttgaccctcagtaacaccttgtcaaattaaccact

SEQ ID NO: 921359 - DNA, 120 bp, Artificial Sequence
  ENSG00000285960_6 (sequence is synthesized)
cccttctcatggaaatgatttcttgttttctaagacactacacatttcgttttccttcaacacccctggatgctgcttcccagtcttgtcccttaacctcctagcactgaagtgatgcag

SEQ ID NO: 921360 - DNA, 120 bp, Artificial Sequence
  ENSG00000285960_7 (sequence is synthesized)
ggctcagtccacagatctcttcatctttcctgttcactccatactcaccctcttggtaattcccttccagtttcatcgtttaaatggcatctgtctgcaaatgattatcaaatgtatgcc

SEQ ID NO: 921361 - DNA, 120 bp, Artificial Sequence
  ENSG00000285960_8 (sequence is synthesized)
tccagccatggccactgctctcaacgttagcttatccatctaactgtcaactctgtatctctacctggacgcctgatggaggtctccaatgtaccatgccctaaactgaaattttgatct

SEQ ID NO: 921362 - DNA, 120 bp, Artificial Sequence
  ENSG00000285960_9 (sequence is synthesized)
tctttatccacagaatctgctcgaccctatctcagttaaaggtatctatgccctggtctagaaggccttcagtaattagaaagcatgtattttgtgtgtatgccttgataagtgttgact

SEQ ID NO: 921363 - DNA, 120 bp, Artificial Sequence
  ENSG00000285960_10 (sequence is synthesized)
gtagctatagcaagggataattcatcatcaggaaatggtcaggagagtgtctccaaatcttttaagcatgcgctaaccttcatatatagggtccttgtattaccttttctcaagttgtac

SEQ ID NO: 921364 - DNA, 120 bp, Artificial Sequence
  ENSG00000285961_0 (sequence is synthesized)
agtactcaaatgggaaggaggaggatcaagagggttttgtgattgactgggttcagctggattcctggaagaggtctctcattcaattgcagtcaaattgtagctgagactacaatatga

SEQ ID NO: 921365 - DNA, 120 bp, Artificial Sequence
  ENSG00000285961_1 (sequence is synthesized)
agactcagttggattcggatagcttattcacatggttgattgttgatattggctattgactagttgctcaaattgggctgttaactggagaacctacaagtcttttcgccatatggccag

SEQ ID NO: 921366 - DNA, 120 bp, Artificial Sequence
  ENSG00000285961_2 (sequence is synthesized)
gtttcttaaagcatgccagctcggtgctaaaagagaattccaaatgcctcagccgtaagaatcattaataacctgaaaatgtggaggttatctctcaccatacacaaagagacggggttt

SEQ ID NO: 921367 - DNA, 87 bp, Artificial Sequence
  ENSG00000285961_3 (sequence is synthesized)
gtggaggttatctctcaccatacacaaagagacggggtttcaccgtgttggccagactcttctcgaactcctgacatcaggcaatca

SEQ ID NO: 921368 - DNA, 120 bp, Artificial Sequence
  ENSG00000285961_4 (sequence is synthesized)
aagattattctgaagcagtgtggagaatacactggaggaaaccgggaagttccatgtgaaggttactgtgataccctaggtgagcagcgttggagaattggatgagaacacaagaggaga

SEQ ID NO: 921369 - DNA, 120 bp, Artificial Sequence
  ENSG00000285961_5 (sequence is synthesized)
gacagacagtaatagagtcaagaaatataaagcagaataataaagcttgctgatggattggagaacattcttagcgtatgacccgggcatagggtaccggttaagttctccattctggaa

SEQ ID NO: 921370 - DNA, 120 bp, Artificial Sequence
  ENSG00000285961_6 (sequence is synthesized)
agatgagacgaaagattcactgttgcagagtctgtctaaggtatgagtgtcccctctctgggacagattccactgccattcttccgaccacaagaaggaaacttcagacaccaaagaaga

SEQ ID NO: 921371 - DNA, 120 bp, Artificial Sequence
  ENSG00000285961_7 (sequence is synthesized)
ggcaccagtcaactaattaaacgggaggatttttttctataaaatataaaattatatgagtttaagttttcttagtttctgttttcttctaccagttctaatagtttaaaagttgtgtat

SEQ ID NO: 921372 - DNA, 120 bp, Artificial Sequence
  ENSG00000285961_8 (sequence is synthesized)
tttatttatattccagtagttactcataaaacattacctaacatactaaaattattgtttcctattaattatagaacattttattgagattgtctttgtagagatgctttggcattcttg

SEQ ID NO: 921373 - DNA, 120 bp, Artificial Sequence
  ENSG00000285961_9 (sequence is synthesized)
tcatcgacatttttaaatcatttggaatttaattgcatattctcatttgaaaatacaatttttgaaatcaatatttatttaaaaatatatattactaacttttttgccttagagcttctt

SEQ ID NO: 921374 - DNA, 120 bp, Artificial Sequence
  ENSG00000285961_10 (sequence is synthesized)
agagagaagttctctgtatggtaaatattctgagtccttctatgtctggacatttcttttactctcattcttgagtgatctttaactgagttgagaattcttgtttcagcactttgaagc

SEQ ID NO: 921375 - DNA, 120 bp, Artificial Sequence
  ENSG00000285961_11 (sequence is synthesized)
gctttatttttccctaataatggcagtttctgagtgttctcttttttgtcttagaaatttattatatatctctctattcagttgtgtgaattttttgtctattattttctcaaatagtat

SEQ ID NO: 921376 - DNA, 120 bp, Artificial Sequence
  ENSG00000285961_12 (sequence is synthesized)
ctttttttaaatcttcctcttcccatcttcctattaaaaatgaagatgatttgactcttgccttctatgtgttcattttactcatgtttctcatctctttatcctttgcatcaggtatgt

SEQ ID NO: 921377 - DNA, 120 bp, Artificial Sequence
  ENSG00000285961_13 (sequence is synthesized)
tgagacatttctccagctcaacactgaagcttacaatttccaatccaccaaaacttttctttatattttaaactggctttgcattgtctttttgatagtgttttctatcaatcccaacat

SEQ ID NO: 921378 - DNA, 120 bp, Artificial Sequence
  ENSG00000285961_14 (sequence is synthesized)
ttgttaatggggataaactgcctcatgtgtcaaatccactgtcttaaatccagccccattgcttttttcttctgtctctcattctatcaagatataactggagttgaacagaaacataga

SEQ ID NO: 921379 - DNA, 120 bp, Artificial Sequence
  ENSG00000285961_15 (sequence is synthesized)
aaaaatagaataatgtggttttattgttaaaatacaatctgttgtaaactttattttacttgtagcaatattcagtaagtgactgttactacagtatgccagacactgttttaggcattt

SEQ ID NO: 921380 - DNA, 120 bp, Artificial Sequence
  ENSG00000285961_16 (sequence is synthesized)
aggatatactagtgaacaaaagaggaaaaaagaaaatatccttgcccaccttaggacattccaatgtcttttctagtattttgctaacacagttcctgtgatactaagttttttaaataa

SEQ ID NO: 921381 - DNA, 120 bp, Artificial Sequence
  ENSG00000285961_17 (sequence is synthesized)
tctggagcctgtacaataacacatatgacaattgctcatttttacatacttattgatcaacagtatttgctgaatattcacatataagtcactgtgcaatttttttgtgtgtggggctat

SEQ ID NO: 921382 - DNA, 120 bp, Artificial Sequence
  ENSG00000285961_18 (sequence is synthesized)
agagatcctcaaagaaaactaagggatctcatcaaaaactcaaaccttaatacatcttaaaactatggtaaaaaataaacagatactttcaacctaccattggatatttctagaaatatt

SEQ ID NO: 921383 - DNA, 120 bp, Artificial Sequence
  ENSG00000285961_19 (sequence is synthesized)
tcctgtctgtgactcttaccccatactctccggatctctgttctcatgtattcttctaatggtgccatcaccaggagcctgtttttcgtggaccagagccctcgtcctgacctctaccat

SEQ ID NO: 921384 - DNA, 120 bp, Artificial Sequence
  ENSG00000285961_20 (sequence is synthesized)
ctggggtttgttgcttgcatgcttccagcccactgaaatgtatatcatctcctctaaactctgtgtcagcattctgatcttgcaaattattaactatctaatgtgataaactaatctgta

SEQ ID NO: 921385 - DNA, 120 bp, Artificial Sequence
  ENSG00000285961_21 (sequence is synthesized)
ctgatgggatagggttacaaggagcaactactgaatgattcctaacattgactttctagattagatgcccttgtcttttataaagtcactctaagagtggaaattgaacgcaaaatttaa

SEQ ID NO: 921386 - DNA, 120 bp, Artificial Sequence
  ENSG00000285963_0 (sequence is synthesized)
gagtgcgctgactaccataccctgcaggaactgaacgcaggagatgccgcacatgccacaggagttggaagcgctctgctacaaattcactgcgtgggaggggagggttgctggaaagag

SEQ ID NO: 921387 - DNA, 120 bp, Artificial Sequence
  ENSG00000285963_1 (sequence is synthesized)
ctactggctgctgagtgctactgactactgtagactgcagaaactggacattggtgatgcttgagtgcatcgatgattctaaacatcatttggccagctgtggaggaagaattcgtgaga

SEQ ID NO: 921388 - DNA, 120 bp, Artificial Sequence
  ENSG00000285963_2 (sequence is synthesized)
agccgtctgagtagctttcagaagcaagcatgaagttccagacaattttaattttatatagtagttttcttaacaacccatgggacgttatttatactttaaatttagagaaactgattt

SEQ ID NO: 921389 - DNA, 120 bp, Artificial Sequence
  ENSG00000285963_3 (sequence is synthesized)
tcagaaggttttaataacctttaccatatattcaactcagcttatggtagggctaattattagtatatattaaatttggggacataaaaacaatggttcttaaacttccaaaaatgttat

SEQ ID NO: 921390 - DNA, 120 bp, Artificial Sequence
  ENSG00000285963_4 (sequence is synthesized)
tttcattttcaagtataatatacaagcatattttaactgcacaacttgatgaattttcaaaaactgaacccacttgtgtgactagtacacagtttcataaatgattaaggtgctagaagc

SEQ ID NO: 921391 - DNA, 120 bp, Artificial Sequence
  ENSG00000285963_5 (sequence is synthesized)
tcttttcagaatccaaagaaagttgaagcctcttgttctaaaatagacactaacacaaaacaattagcttgaaatttcaaaatttccacagaatagcaggaaagaatgcctgtgtttatt

SEQ ID NO: 921392 - DNA, 120 bp, Artificial Sequence
  ENSG00000285963_6 (sequence is synthesized)
taataataaaaacaaagtagattttccctatgagaatacaacagcctaactcatttggttttagtttcttagttcaaagaacaggaacaaatgctaatacggtactaacctcattgattt

SEQ ID NO: 921393 - DNA, 120 bp, Artificial Sequence
  ENSG00000285963_7 (sequence is synthesized)
ttgaaatcactaaataatttatgttgagttttacattttaattggtaatacatattaaataataaattggtactaattatattgccttgattaaaaagtaatggattttgttgccgtttt

SEQ ID NO: 921394 - DNA, 120 bp, Artificial Sequence
  ENSG00000285963_8 (sequence is synthesized)
atttttctcagaagatagttgggaaattatcttcatttttctaaactagatttttggctctttttcaacttcaacttacagtttattaatcatatacactttggaagaaattaatcacag

SEQ ID NO: 921395 - DNA, 120 bp, Artificial Sequence
  ENSG00000285963_9 (sequence is synthesized)
gtagcaactgtaaccgtctatagattaaatatataagaatttaggattatattctaaattcttcaatatttggacccaatcggacattttcaattcaagaaagcacagtgtattaatcat

SEQ ID NO: 921396 - DNA, 120 bp, Artificial Sequence
  ENSG00000285963_10 (sequence is synthesized)
aaacacattattgactgggaattattactttggccaccagatggagccagtattgtttcagaaatgcaatgaatcctgatatttttcacattttcccactctaacccaaactaaaagttt

SEQ ID NO: 921397 - DNA, 120 bp, Artificial Sequence
  ENSG00000285963_11 (sequence is synthesized)
ggaattacagagctactattattaataaaatatattattattattaaaagctattatcactattatctataaacaaacacctaaatttcctaagtgtaaaatgaaggaactgttttcggt

SEQ ID NO: 921398 - DNA, 120 bp, Artificial Sequence
  ENSG00000285963_12 (sequence is synthesized)
taaaatgaaggaactgttttcggtacctattagatctcttcctaatttagaattctctaatacatgctgagaatatttttgtagtaccatttaaattccattatgctaccttgatggcat

SEQ ID NO: 921399 - DNA, 120 bp, Artificial Sequence
  ENSG00000285963_13 (sequence is synthesized)
tctttgatattttattattcacaatcatggaagtcattaccgatattataaatgagaacttaaagcatgcattaggtaataagatggggagaaacagaggtggaatagaaaagattctta

SEQ ID NO: 921400 - DNA, 120 bp, Artificial Sequence
  ENSG00000285963_14 (sequence is synthesized)
ctggtatttattatgaaagtccactgaatatctaaacaaagttcaaaatgtagagccacctggtccaagagaatgtaaatttgtgtgtctatcgtcccagtctgaggcctctgcaagttc

SEQ ID NO: 921401 - DNA, 120 bp, Artificial Sequence
  ENSG00000285963_15 (sequence is synthesized)
tgcataacccaatgtcaattctcatcagaaagatctagggaggtaacactgaaatgttaaagttatttgcgaaagttggaatgtttaaacattatcctctgttcaaattggatttttaaa

SEQ ID NO: 921402 - DNA, 120 bp, Artificial Sequence
  ENSG00000285964_0 (sequence is synthesized)
agttcttgaagctaaagggggttaagctcaaatgtagttaatgacagagtaaaattaaataggtatctttactacaggacttttctgagcatttaatatgctaatgtgcatgattatggc

SEQ ID NO: 921403 - DNA, 120 bp, Artificial Sequence
  ENSG00000285964_1 (sequence is synthesized)
ttggagcctcaaatcactttgtgattcaagatggcaactggaagaaagaggagataacaaaaagagacccaaagtgacaccaagtctgagcacaccattggagaacctaggaagctctac

SEQ ID NO: 921404 - DNA, 120 bp, Artificial Sequence
  ENSG00000285964_2 (sequence is synthesized)
ggaggaggaggaggaggaggaagaggcacagaagcaggaggtggggagcctgagacagagatcatcctgtctgcccttcccacttcaggctaccacctcttgcagacctacgttaaatga

SEQ ID NO: 921405 - DNA, 120 bp, Artificial Sequence
  ENSG00000285964_3 (sequence is synthesized)
aatgagaagcctcaactttgactactattaaggtattacatagaagtagacattttaggggccaaaataaaactttctgggtgactagaagagcacaaaggatctctcattttctgaaag

SEQ ID NO: 921406 - DNA, 120 bp, Artificial Sequence
  ENSG00000285964_4 (sequence is synthesized)
tggagtgatcgaaaaaagccactgtgccattcctggaattcattcaagaacagaaaaaaatttgtcctactgagtgggctaaaagaaataggggaaagattaaagctgtcatgtgatttc

SEQ ID NO: 921407 - DNA, 120 bp, Artificial Sequence
  ENSG00000285966_0 (sequence is synthesized)
aagacagagggagccaggaagggagggaggcggcagggggggaggcctctcctccctccttcagccacaggctctggaaggccctgcggtgtggactgagggacaggcaggagagcactc

SEQ ID NO: 921408 - DNA, 120 bp, Artificial Sequence
  ENSG00000285966_1 (sequence is synthesized)
atcacttgaacccaggaggtggaggtcagtgagccaagactgtgaaactgcactctagcctgggcagagactagagactctagcctggacagaatgagactgtctcaaaaacaaacaaac

SEQ ID NO: 921409 - DNA, 120 bp, Artificial Sequence
  ENSG00000285966_2 (sequence is synthesized)
ctggacagaatgagactgtctcaaaaacaaacaaacaaaaaaattctgtgtatgactatgatcccttaacttgatttcatgacccacgaatggatctcaacctacaactggaaaaaccca

SEQ ID NO: 921410 - DNA, 120 bp, Artificial Sequence
  ENSG00000285966_3 (sequence is synthesized)
ctactctggaggagctgattccgtactctgctggatcttcaattcctgaccgctggaaattggctgcaattttcctggtgagttcctccctccatgttctcctcactaatacaccctaca

SEQ ID NO: 921411 - DNA, 120 bp, Artificial Sequence
  ENSG00000285966_4 (sequence is synthesized)
ccagacctccagtcctaaaagccaccacctgcttcacgtcaccacacctgtgccaatcagatttcctctgttccctcttggaccttcagggacctccaggataaatgccaggatcccagt

SEQ ID NO: 921412 - DNA, 120 bp, Artificial Sequence
  ENSG00000285966_5 (sequence is synthesized)
tactggcagactgagagaaggatgacagccccaaaagatcacgaggttcctatctgttcatatttggtgggcagctttcgtctgcaagaacaaaatacaagccgggtgaggcggctcaca

SEQ ID NO: 921413 - DNA, 120 bp, Artificial Sequence
  ENSG00000285966_6 (sequence is synthesized)
aaaataaataaataaataaataaataaatcaataacaaaatacataactcaagcaatttaaacagtgaggggtaaaactgaaatcacataccaggaagcccagaggtctgcggttccagg

SEQ ID NO: 921414 - DNA, 120 bp, Artificial Sequence
  ENSG00000285966_7 (sequence is synthesized)
cagaggtctgcggttccagggttggtaaatgaagtgaccactctatgtctatttctctcttgtcattgacaccctttggaagtgtctttttctaccttagtctcagtatgacaagagtgc

SEQ ID NO: 921415 - DNA, 120 bp, Artificial Sequence
  ENSG00000285966_8 (sequence is synthesized)
ctgggcccctttagccccatgtaaggacaggctgcagccacccactgcccgccccaactgtgtctggacagaaatggacatgtctgctttgcagcagccacgcctcatgctgggataaac

SEQ ID NO: 921416 - DNA, 120 bp, Artificial Sequence
  ENSG00000285966_9 (sequence is synthesized)
ctatgaatcaggaaggccacagatgctatcacccgtttctctccaccagttacaggccccgaaagcagaaatggctgtggcctcacctacgaatcctgaatggcgaacccagcatcctgt

SEQ ID NO: 921417 - DNA, 120 bp, Artificial Sequence
  ENSG00000285966_10 (sequence is synthesized)
ctctagctcagtgctggattccctggagcaggagtgccaaatgtggcagtgagggaaactctttggttctcccttccactttgggctcattctaagtctattctctaggcactgagaccc

SEQ ID NO: 921418 - DNA, 120 bp, Artificial Sequence
  ENSG00000285966_11 (sequence is synthesized)
ctcatgttgatttcttctgcctacatgggcctgttgtctgtcggttttcccaggaagagctgggaacttgagggttggggtgggtgggtataatggtggcagagtctcccccggtttctg

SEQ ID NO: 921419 - DNA, 120 bp, Artificial Sequence
  ENSG00000285966_12 (sequence is synthesized)
tgtctatggtagtacctgatagcacagaccttgccttaacctaggtctagtagcatgtgggactgtgtgtgaactggaaggaacatgagtgccacttcccttactatgtagatgtggagc

SEQ ID NO: 921420 - DNA, 120 bp, Artificial Sequence
  ENSG00000285966_13 (sequence is synthesized)
cccaggctcagaaggggatagtgatttgcccaaggccacacggctccttagcagcagaggcatacactggggtttcctggacttcaagcctccactcttttgccactcccacctgtgggg

SEQ ID NO: 921421 - DNA, 120 bp, Artificial Sequence
  ENSG00000285966_14 (sequence is synthesized)
atccctgctttgccccctaattggctccacctcccaaagtcatcataaatggcccaggtgagagtggtgccctgttgctaggggctaccgggtccaggcagtaactcagatgcctgcccc

SEQ ID NO: 921422 - DNA, 120 bp, Artificial Sequence
  ENSG00000285966_15 (sequence is synthesized)
aggaaaaccctgacagtggaggaaacgcctgtgtttctatcccaagctggtttgcctcgctcctgctgaacacagtaaaaagaaggtagaatccacactgcaggccctgagacaacaaat

SEQ ID NO: 921423 - DNA, 120 bp, Artificial Sequence
  ENSG00000285966_16 (sequence is synthesized)
gctcacccttctgaggaaagctgcctttaacaaaggggagtagggcttggctggccctggaaagaatttgctacgggtgctggtgttagggagggtatggtaccagccagtgtgtaggag

SEQ ID NO: 921424 - DNA, 120 bp, Artificial Sequence
  ENSG00000285966_17 (sequence is synthesized)
ttctgctcatgggagggtgtaccgggtgtgtgctgattcctctgtgtgtgcccaggaagacggcagctagtgtagacaaccagggagtgcctgactggcagctggaatgccagggttctc

SEQ ID NO: 921425 - DNA, 120 bp, Artificial Sequence
  ENSG00000285966_18 (sequence is synthesized)
tcagccacctgtcggtcctgtgaccttgggacttaacctcccagtctcagtttttctcagctgcaaaatggggatgctaagaatctccttcacaagattgctaaagaggtaaaacgaatg

SEQ ID NO: 921426 - DNA, 120 bp, Artificial Sequence
  ENSG00000285966_19 (sequence is synthesized)
ctaaagaggtaaaacgaatggatgtgcatattctcccagcggctggacaaagtggcttatgcctataattccaggacttcagtaggcagacgcaggaggatcacttgagcccaggagttc

SEQ ID NO: 921427 - DNA, 120 bp, Artificial Sequence
  ENSG00000285967_0 (sequence is synthesized)
cacttgggctcgcgtcctcggccgcgccgcgcggcacccgggcccagcagccgggaggcggcagctctcctctacgcccgtcccctcagggcggctgtggatgttgccagtattgtcgat

SEQ ID NO: 921428 - DNA, 120 bp, Artificial Sequence
  ENSG00000285967_1 (sequence is synthesized)
gcttcagagcgacgtttgccctgcgacacaggcgggccggctctcctctgtctttattttcctggaggccgacaggagcggggcccgagttcggtggtggtcgtgagcgtggggggcact

SEQ ID NO: 921429 - DNA, 120 bp, Artificial Sequence
  ENSG00000285967_2 (sequence is synthesized)
caggcccggacgggctctcaggtcgccgacggcggcggctggaggccgcgctggctgtcccaggtcgtcgttagctttagggagccgatctccgggcggccccacagaggacgcccgcga

SEQ ID NO: 921430 - DNA, 120 bp, Artificial Sequence
  ENSG00000285967_3 (sequence is synthesized)
ttcgatggcgatgatgcccgttttaaatggtgtccctgcagccgggtggatggatggatcgtacaccttgccttttgagagccgggaccttacgcccgactgcgtgttatttctgcgaat

SEQ ID NO: 921431 - DNA, 120 bp, Artificial Sequence
  ENSG00000285967_4 (sequence is synthesized)
aagaacgcaacctttggaggtgaagacgactgtcggctggattgaattggaatcgtgtttgtgatgatgcgtttatttctggaaatacgcggtctccgctgcttttgctttttgtcggca

SEQ ID NO: 921432 - DNA, 120 bp, Artificial Sequence
  ENSG00000285967_5 (sequence is synthesized)
gaggtttgggttcttctctaacggtcaggataaaggcctgtaggcgacgctgcgcgagcgagaagctcgcccgcggctgcccgggcgcccccctctaggtgtgggtggagccgagcgcgc

SEQ ID NO: 921433 - DNA, 120 bp, Artificial Sequence
  ENSG00000285967_6 (sequence is synthesized)
ggggagaaccgccggccccgactcagccaccggtgactgcgggcgacccgcgggcctgcggccagctgatttcaaacatcgttttcctctttaggttcggaaaactgaggcgctggacaa

SEQ ID NO: 921434 - DNA, 120 bp, Artificial Sequence
  ENSG00000285967_7 (sequence is synthesized)
ggctggaatacaatatgtgattatacgtacagtactatggttgttgtagtttttaaattgtaaaacaagaagtaaccattgttccaccgttctctattaagtttgtgtaaattaaaaagg

SEQ ID NO: 921435 - DNA, 120 bp, Artificial Sequence
  ENSG00000285967_8 (sequence is synthesized)
gtttgtgtaaattaaaaaggggctattttcggtaaaaagtgcagtaggtgtggtggtgtcgacctgtcatcccagctacttgagaggctgaagggggaggatcgcttgagcccaggaggt

SEQ ID NO: 921436 - DNA, 120 bp, Artificial Sequence
  ENSG00000285967_9 (sequence is synthesized)
ggtgacagagtgagagcctgtctcaacaaccagaaaaaaagtatttagttttacagtattacaaagtagtgtcacattagtttaatgaggtttatttatacaaaggtgtaaaattatggg

SEQ ID NO: 921437 - DNA, 120 bp, Artificial Sequence
  ENSG00000285967_10 (sequence is synthesized)
gtatataacggatcaaactttgttcaagaaccaaaggctattgttcaacgaatggtgctgagacaactgcaaaagactaggacccttacctcacatgcaaaagactgggacccttacctc

SEQ ID NO: 921438 - DNA, 120 bp, Artificial Sequence
  ENSG00000285967_11 (sequence is synthesized)
acaccattttgcaaaaattagctcaaaatggatcaatgacctaaatgtaagagaaaacctataaaattctcagaaaaaaacagaaggataaatttgtataaccttggatttgacaggatt

SEQ ID NO: 921439 - DNA, 120 bp, Artificial Sequence
  ENSG00000285967_12 (sequence is synthesized)
cttagctatgacaacaaaaacacaagcctccagaagcaagcaaacaaaaacaccataaactggacttcatcaaaattgaaaactttagtggttcaaaagacaccatcaagaaagtgaaaa

SEQ ID NO: 921440 - DNA, 120 bp, Artificial Sequence
  ENSG00000285967_13 (sequence is synthesized)
aatccacagaataggaaagatatttgcaaatcatgtatctgataagggatctatgtctataatatgtaacgaactcttaataaaaaataaccccacttaaaatgggcaatgaatctaaat

SEQ ID NO: 921441 - DNA, 120 bp, Artificial Sequence
  ENSG00000285967_14 (sequence is synthesized)
agacatttctccaaagaagaaatgcaaatggccaataagtacatgaaaagatgcttgacatcaccagagaaaagcaaataaagaaactgcaaggttttcattcttcttcacttacaaggc

SEQ ID NO: 921442 - DNA, 120 bp, Artificial Sequence
  ENSG00000285967_15 (sequence is synthesized)
ttcattctcactatgatagccagaataaaaaagtcagataacaacaattattggcaaagatatagaggaaaactgcaaaccttatacattctgataggagtgtaaaatggtgcagccact

SEQ ID NO: 921443 - DNA, 120 bp, Artificial Sequence
  ENSG00000285967_16 (sequence is synthesized)
ttggaaaacagtctggcagttcctcaagtgattaaacatctagttactatatgacccagcaattctactactaggtatatacccaagagaaatgaaaccatatgtccacacagaaacttg

SEQ ID NO: 921444 - DNA, 120 bp, Artificial Sequence
  ENSG00000285967_17 (sequence is synthesized)
tacacatttgtttacagaagcattattcagaatcaccaaaaggtggaaacaacccaaatgtccatcaactgacacatgcaaaagtaaaatatggtatccatataatggtatattatggta

SEQ ID NO: 921445 - DNA, 120 bp, Artificial Sequence
  ENSG00000285967_18 (sequence is synthesized)
tataaaagaatgaagtactgatacatgctgcaacatgaatggatcctgaaatcattatgttaagtgaaggaagctagtcacaaaagaccatatgttatatgattgcattcaaatgaatgg

SEQ ID NO: 921446 - DNA, 120 bp, Artificial Sequence
  ENSG00000285967_19 (sequence is synthesized)
aatatggaaatctatgcagacagaaagtagattactggctgtttaaagctgagggtgggagcatgggtgggcaggggaatagctaaagggtacagagtttctttccgaggtaatgaaaat

SEQ ID NO: 921447 - DNA, 120 bp, Artificial Sequence
  ENSG00000285967_20 (sequence is synthesized)
gctctaaaattgactgtagtgatgattgcacatatctgtgaatatactaaaaaccactgaattgtacactttaaatgggtgaattgtatggtatgtgaattctatttcaatgaaactgtt

SEQ ID NO: 921448 - DNA, 120 bp, Artificial Sequence
  ENSG00000285967_21 (sequence is synthesized)
caggcgtgagccactgtgcctggccttactgtttatgttttcatgcatctataccttatgttactaaatcaaagtgaccagttccacattatactacaagtttcactgtgtaatgcataa

SEQ ID NO: 921449 - DNA, 120 bp, Artificial Sequence
  ENSG00000285967_22 (sequence is synthesized)
atgcataagaattacacagagggaagggcctcaaaaaatgcacttctgaagtattttaatgtaaaattatttaagaccataaagtttcatgaaagcctaatctttctggaacctacacat

SEQ ID NO: 921450 - DNA, 120 bp, Artificial Sequence
  ENSG00000285967_23 (sequence is synthesized)
actctgcatgtgaaccagagttaaactagtcaagtattttaatactgaactaatctggaaaaacatcatttaaaaaattactgtatttatgaaggaagaatataaaatctgttaaaaact

SEQ ID NO: 921451 - DNA, 120 bp, Artificial Sequence
  ENSG00000285967_24 (sequence is synthesized)
taaaacatctaaaataggtatgaagagaggcttatggtgctcattttaacagcattcttgagtaggttaccttgcagtcaaagcatctgctccagaccagtgttttaaactgtggattat

SEQ ID NO: 921452 - DNA, 120 bp, Artificial Sequence
  ENSG00000285967_25 (sequence is synthesized)
attgtgtatttgtgtgtgtaccagtgcgctaaaagtaagtaggaaaacttgcttagattattccttttgcctcaggccactcagggggccaagatcctgtcactccttttctctaggccc

SEQ ID NO: 921453 - DNA, 120 bp, Artificial Sequence
  ENSG00000285967_26 (sequence is synthesized)
tgcgaatggcttcccgtcttgaggggagtgagccaaagccttgactgcggcagaagtccccgcgcgccgttgagggtgggggcgggcctgccctggcatccttgcgagtaggactcttcc

SEQ ID NO: 921454 - DNA, 120 bp, Artificial Sequence
  ENSG00000285967_27 (sequence is synthesized)
ctgagcgtcgtccacagggcttgctccttcaccttcaggattttgctcgtgtcactcggtgcttccgcggctacttttaaactgaaagttccctagcccccttctcattttatcctttgg

SEQ ID NO: 921455 - DNA, 120 bp, Artificial Sequence
  ENSG00000285967_28 (sequence is synthesized)
acagtctacatatccatacttgtttatcttcttatctctccttccccagtgcaatgtaagctctaagaggacaagaggttgtgtttttctgcactggtgttacggcccccgcctagaatg

SEQ ID NO: 921456 - DNA, 120 bp, Artificial Sequence
  ENSG00000285967_29 (sequence is synthesized)
ccacacagtagatgcgtagtatgtggttaaggaatgaatgcgattataagggccttgatgctcccccatttctgtctttaatatgtacttatatgctacagagagctttataaaagattt

SEQ ID NO: 921457 - DNA, 120 bp, Artificial Sequence
  ENSG00000285967_30 (sequence is synthesized)
aaaacacgtttattacagaattctataaaaatatattgcttctaaacattggaaagccctccacaacaccagaaacccacaaatgagggataaaatttgtttttaggcttctgtaaatga

SEQ ID NO: 921458 - DNA, 120 bp, Artificial Sequence
  ENSG00000285967_31 (sequence is synthesized)
gcatgcccgaggacagtgcatcaaatgatcatatccatactgggccgattatgtttgctcttctgagtctcaaactgcattcttcatcttgtcgtcctctgtctttcaaaatacattaaa

SEQ ID NO: 921459 - DNA, 120 bp, Artificial Sequence
  ENSG00000285967_32 (sequence is synthesized)
agtgagaatttggttggctcagagcaaatccagcactattggaaaagttcattcagcaagtatttattgggcacaaatgggtaccaggcacgctaattcaaaaggtgtgtgtttctgagg

SEQ ID NO: 921460 - DNA, 120 bp, Artificial Sequence
  ENSG00000285967_33 (sequence is synthesized)
ctagaaggccttacataaaggaccacatgtggctactttggttgctactcaattatgctgtcaagcaaagcaaatgctagtgaaatttatttttagttttcttctgaagaaaaggttcaa

SEQ ID NO: 921461 - DNA, 120 bp, Artificial Sequence
  ENSG00000285967_34 (sequence is synthesized)
tgaaagctgaggtcaggcttggtgtggatattttaattcaccatttagtttgctgtttgcttacacttaggttagcattagatatacttaatcatgatttttgagtactataaaacgtga

SEQ ID NO: 921462 - DNA, 120 bp, Artificial Sequence
  ENSG00000285967_35 (sequence is synthesized)
gaaatcttatttcctagtggctggaaaaacaggctttttaaattaaaataagtaaatatatcagtaagctagaagctatgcaataaggctttggctatggtattacaaattttcatattt

SEQ ID NO: 921463 - DNA, 120 bp, Artificial Sequence
  ENSG00000285967_36 (sequence is synthesized)
catgtattgaatttttggacaagaaaagacagccttgataggtattttataaccattaatacaattaatcaaacattgtttagtaaatccaatcgtctattcattattatttttcccatt

SEQ ID NO: 921464 - DNA, 120 bp, Artificial Sequence
  ENSG00000285967_37 (sequence is synthesized)
aatcttcagaacagctttaagttaatacagatgactcagaatgtgtttttcactcagtttcaaaataccattatttcaattcgctaatagaagcacaattatcttcttgtctgctttctt

SEQ ID NO: 921465 - DNA, 120 bp, Artificial Sequence
  ENSG00000285967_38 (sequence is synthesized)
caatctgctttggaaagtcttggcattattgtgtcatttaatttaaaatttttaagtttttttagtttcttcccttattgaggacttattaggcgctaattagctttatgctagacatct

SEQ ID NO: 921466 - DNA, 120 bp, Artificial Sequence
  ENSG00000285967_39 (sequence is synthesized)
catgcatggcagtgaatgaaaacaacactgcctttgagggttttaacttgtatatagtttataccattttttttccaggttatagaatcaaagaaattgtttcaattcatatcacagtat

SEQ ID NO: 921467 - DNA, 120 bp, Artificial Sequence
  ENSG00000285967_40 (sequence is synthesized)
ttctctattaaatcaaatggtattttgcttgcataaatttaagtatccaagttgagatcttacatagaatctgttaatctaatattagtgttttcttcatttcattgtcttgggtttttt

SEQ ID NO: 921468 - DNA, 120 bp, Artificial Sequence
  ENSG00000285967_41 (sequence is synthesized)
tttcttaataattatttttcccaataccatccatttgttttgctcttacatttttaagtcttttatgttccaaatcaggtgacttacatcctccacttgtccattgaggatagcccagta

SEQ ID NO: 921469 - DNA, 120 bp, Artificial Sequence
  ENSG00000285967_42 (sequence is synthesized)
aacctttattctgactttaaattgcctccttgcttcaagaactgagttgcatgactcagttttctttgctagaaatatccctggatagtctcgtatgtattcttgatcaatgaattgcag

SEQ ID NO: 921470 - DNA, 120 bp, Artificial Sequence
  ENSG00000285967_43 (sequence is synthesized)
aagatttgattaaaaattttaaatggatttcagggataaactatttgtatcaaatgtcatcaccaggaatttctacaactgaaaaatttgaattgttatttttattgaagaatatttatc

SEQ ID NO: 921471 - DNA, 120 bp, Artificial Sequence
  ENSG00000285967_44 (sequence is synthesized)
tttaagataaatgcaacttgctataaaatgatagaaatgaaaaattttagaaaatcattttctactcactattttatgcctgccagttatcctttgttagtgataaaattgtcttttatg

SEQ ID NO: 921472 - DNA, 120 bp, Artificial Sequence
  ENSG00000285967_45 (sequence is synthesized)
ggaacgaatttgttaaaggtagaaaaaaaactggtagtgtatgtatgttttatagattagacactaccaaaattatttaacatttagaataattaacttgctttcaggatgacagatgac

SEQ ID NO: 921473 - DNA, 120 bp, Artificial Sequence
  ENSG00000285967_46 (sequence is synthesized)
ttaagaaactgatgaagggttaattaaggatattgatttttagggcagaactacaaaattatcaaatcacttaacactgtaaatatgttcctgtttcaggttttcaaagtaaatacctta

SEQ ID NO: 921474 - DNA, 120 bp, Artificial Sequence
  ENSG00000285967_47 (sequence is synthesized)
atcaaatttggaaatagtatttatggattttattcaacatagattatctattttgttaaaattatagaaatgaacagttcttttcccatggatgccttttttcatcttggcctattctga

SEQ ID NO: 921475 - DNA, 120 bp, Artificial Sequence
  ENSG00000285967_48 (sequence is synthesized)
tcctttaagaacaagctttgtcctttcattaatacttctcacctataattacgaattttctctaaacttgtagattttattatccatgccatctatttataatcctatgacactcctata

SEQ ID NO: 921476 - DNA, 120 bp, Artificial Sequence
  ENSG00000285967_49 (sequence is synthesized)
gaaaataaaagcgtacatcacagatggtaagggtatgtgtttttaagtaaacatttgttcatgtgtatatgtgttagattaccttgtaaaacatattccttattgtgggttacaggccaa

SEQ ID NO: 921477 - DNA, 120 bp, Artificial Sequence
  ENSG00000285967_50 (sequence is synthesized)
aaaaagtgtttgtttttgtttttaaaaatctacagttcagattttccttagaaaatggggaaaaaaggaatgttagaaagatctgactgcctatgaactagtgaaggattttagaggaag

SEQ ID NO: 921478 - DNA, 120 bp, Artificial Sequence
  ENSG00000285967_51 (sequence is synthesized)
taccaggctattttagagatctgatactggtttcagaaaggtaatcttaaggcaaagggtaggaaataaagttatgttgttagtagaaatgtcaaatacggttaaagttgtgaggaggaa

SEQ ID NO: 921479 - DNA, 120 bp, Artificial Sequence
  ENSG00000285967_52 (sequence is synthesized)
ttattttcctagtggacctacatttgttgtgtgtagatctgtgactattactgatctgttgtagcacattttccaatctaaaatgtccgatacagcacaataataaacatggggcagaat

SEQ ID NO: 921480 - DNA, 120 bp, Artificial Sequence
  ENSG00000285969_0 (sequence is synthesized)
ccgcttgcagggtttggatgcactccctgccttctcaccttgcacccaggtactcgggcttaggaacagcagcaagttgtgccctctgtcccctgggactttccatggcacgacccccag

SEQ ID NO: 921481 - DNA, 120 bp, Artificial Sequence
  ENSG00000285969_1 (sequence is synthesized)
ctctgtgcaccatgtcctctgtccctctcagcagccttggaatgtgaggaaacagagatgacgagaccggctgaggtcacctggcaaaccggtggctgacccaggatgataagatgacag

SEQ ID NO: 921482 - DNA, 120 bp, Artificial Sequence
  ENSG00000285969_2 (sequence is synthesized)
ggatgccagatggggacattgaggcagagagaagcaaaaggcttttggaaggtcacacagcaagtcagtggcaaagctagaagtcaagcccagaggatttcactctacacttgtcaaaag

SEQ ID NO: 921483 - DNA, 120 bp, Artificial Sequence
  ENSG00000285969_3 (sequence is synthesized)
ccacaggctaggccaatgtgggcagaggggcaaggctgctggaacctctgagatggctggcgcagcccctccttgccggcccggggtggccacaaatgcaagaaccgggaagggccctct

SEQ ID NO: 921484 - DNA, 120 bp, Artificial Sequence
  ENSG00000285969_4 (sequence is synthesized)
tggcacctgaccctcacctggcactgtcagcccttgaccacttccccggtgggtaggcatgccacctgtgtctgcaccctccagcgaccaggggctcagctgttcccctggatgcctgtg

SEQ ID NO: 921485 - DNA, 120 bp, Artificial Sequence
  ENSG00000285969_5 (sequence is synthesized)
tctccctgctctgccctgcctgagcggaatctcctcctgccctttgaatccaccccgcagtgggatctggcatcaccctgtggacctccagacctgcctgttccccagctctgggacagc

SEQ ID NO: 921486 - DNA, 120 bp, Artificial Sequence
  ENSG00000285969_6 (sequence is synthesized)
acatgtgactccttaagtcttctcggctgtagcccctctgacctctacagatctagtaacttttctgaagtccacaatctgtggctgtggcccaaggagctctaagggcagtttgaggaa

SEQ ID NO: 921487 - DNA, 120 bp, Artificial Sequence
  ENSG00000285969_7 (sequence is synthesized)
ttaaaatgaagacagtcctgcagccacctgtgtatgtgtgtcagggctggcagggaagcggtggcttcagggctctacttccatccagcctccgccacctttgcccccacggtgaaggca

SEQ ID NO: 921488 - DNA, 120 bp, Artificial Sequence
  ENSG00000285969_8 (sequence is synthesized)
gcctagtgcactgtttccagggtctggcccttttaaatttagctgcggggaaaaagcagtttgtgcaggtctggaacttggagacaatcagcaacaggaaaaagtcatccgaggggagct

SEQ ID NO: 921489 - DNA, 120 bp, Artificial Sequence
  ENSG00000285969_9 (sequence is synthesized)
ttcagtgaattatggaggtattgttcctgcgcccaaggagccagggctgctggtccaaacctcgctgacccagcccaggcctttggggcaaaacattgcctggagctgcgtcaggacaac

SEQ ID NO: 921490 - DNA, 120 bp, Artificial Sequence
  ENSG00000249502_0 (sequence is synthesized)
gtagtaggcgtggtcacgtgacaggaccgagcgatgggaggattctggtgcaccccggaaggaggatttttaattcttctgttttcttgtctatcgcaaaacagagtttacatgtatttt

SEQ ID NO: 921491 - DNA, 120 bp, Artificial Sequence
  ENSG00000249502_1 (sequence is synthesized)
ccttttttcttagcttaagaattgaagactttggccggattagacctggttgtgtggagaggagaattaataactacagtggagcgagccctcctgcgagagtcaggatactactatgct

SEQ ID NO: 921492 - DNA, 120 bp, Artificial Sequence
  ENSG00000249502_2 (sequence is synthesized)
agtcccgactctgccccaaatgcctggagagactttggctaagtcactttttctttccgcgggctgtttaccgttggtaaaaggagagggtcacccactcactccacaaacatttgttga

SEQ ID NO: 921493 - DNA, 120 bp, Artificial Sequence
  ENSG00000249502_3 (sequence is synthesized)
gtcattggttatagcgggaacaagacaggcaaagttcttcctgaattctggtcggagatggataacggaaacaactttgttgagggtctcgttctgtcgccctggccggagtgcagtgtc

SEQ ID NO: 921494 - DNA, 120 bp, Artificial Sequence
  ENSG00000249502_4 (sequence is synthesized)
atgatcagggctcgacctcccgggctcaaacaatccccctacttcagccacccaagtagctaggaccacagatatttctacaattttaatttaaagatgaagttagaaggccgggtgcgg

SEQ ID NO: 921495 - DNA, 90 bp, Artificial Sequence
  ENSG00000249502_5 (sequence is synthesized)
tgagagaattgcttcaaaagtgaaactgtctctaaaacaaataaggctaggagcacaaaagggctttgtattgatttctggccacggtaa

SEQ ID NO: 921496 - DNA, 120 bp, Artificial Sequence
  ENSG00000249502_6 (sequence is synthesized)
gagcacaaaagggctttgtattgatttctggccacggtaactaggccaagaaagaaattctatcctcctgcagaccagcaacaaccacagccaaggaatgctcctccggcatttgccatc

SEQ ID NO: 921497 - DNA, 120 bp, Artificial Sequence
  ENSG00000249502_7 (sequence is synthesized)
cacttgttaaaatgattaaactaggactgcatcatggtgggatgaccagcacacttcaaagggaaaaaaattttaaatcggaagatgaaacagttttaaaaatcacttcaaaaaaaaaaa

SEQ ID NO: 921498 - DNA, 120 bp, Artificial Sequence
  ENSG00000249502_8 (sequence is synthesized)
aagaactgcctgtgtttctctgatatacactgacctacaatggagagtgcttagcgcggctatgtctcagtttaacgagtcataccccacccatgcgtcctgcctggtctctgctgaact

SEQ ID NO: 921499 - DNA, 120 bp, Artificial Sequence
  ENSG00000249502_9 (sequence is synthesized)
cttttccctttgctcggctacaagttttgcagcttcctcacctgaactgtcctgccccactctcttgtactgtaacttctaagcaacctgcaggactctccttaggctccagtctttttt

SEQ ID NO: 921500 - DNA, 66 bp, Artificial Sequence
  ENSG00000249502_10 (sequence is synthesized)
tgtgcctcagcttcccgagtagctgggatcacaggcacgcaccaccactcccagctaagttttgta

SEQ ID NO: 921501 - DNA, 120 bp, Artificial Sequence
  ENSG00000249502_11 (sequence is synthesized)
tacagtcatgagccaccatgcctggcctagactccatattcttattaaaatttttattttagagatgggtcttgctatgttccctaggctggccttgaacttctggacttgacagaccct

SEQ ID NO: 921502 - DNA, 120 bp, Artificial Sequence
  ENSG00000249502_12 (sequence is synthesized)
ggacttgacagaccctcctgcctgcctcttgagtagctgcaaatagaggtgtgcacaatcgcaccagcagcttcatattctttggcagtccccctcatccctctgatcctgcagtaccct

SEQ ID NO: 921503 - DNA, 120 bp, Artificial Sequence
  ENSG00000249502_13 (sequence is synthesized)
ctgcaaatgccatttacctccctattccttcttacaacatcctcactttctgcaaggacaaggaccacttcatgcatctttgtatgataaattccaggcacaccagaggggctgtcataa

SEQ ID NO: 921504 - DNA, 120 bp, Artificial Sequence
  ENSG00000249502_14 (sequence is synthesized)
ccactatttggtgaccaaaaagatacttttatagaacctaaacattgctatagattaaacatatactaaccattccagaaattttatcaagctctaagtactgtgctttctacagactat

SEQ ID NO: 921505 - DNA, 120 bp, Artificial Sequence
  ENSG00000249502_15 (sequence is synthesized)
taatttttcttcactctgtctaaaccatagatgctttcctgaaaaacacgaactctaatcacaattaagtactaaagaattcttttaaatggaagtacccttgggaaacaactttgacaa

SEQ ID NO: 921506 - DNA, 120 bp, Artificial Sequence
  ENSG00000249500_0 (sequence is synthesized)
ggtgtttgtttcagtggtcactgaagtaatctctccgcaggcccatgccagccatactgcccagacttgaattctctccagagaagtttctcatccaagatccccagtaaagaaaggact

SEQ ID NO: 921507 - DNA, 120 bp, Artificial Sequence
  ENSG00000249500_1 (sequence is synthesized)
actgaaggaaaaaggaaagaaaatagagcttctttcatctttattctggggttttctgcaatttttttaaagagaaaggtaagctacataaaaaggagtttgcttggtgagcaatggtgg

SEQ ID NO: 921508 - DNA, 120 bp, Artificial Sequence
  ENSG00000249500_2 (sequence is synthesized)
agtgaggctcatgatttgagtatttcaagatgtcaactaagggcacctcaaccaaatgcacctcatgcccactgactcaacaggtcgagaccttaaggaaatgcggcattccattgcata

SEQ ID NO: 921509 - DNA, 120 bp, Artificial Sequence
  ENSG00000249500_3 (sequence is synthesized)
atgcttcaatatgagttaacaagacaaatgagcagagaaactatgactctccatgctgcagaaggaaaatgctcctagcgaacatctgctttgggaccaaggacagaacccagagggcta

SEQ ID NO: 921510 - DNA, 120 bp, Artificial Sequence
  ENSG00000249500_4 (sequence is synthesized)
acaaagaagcaccatggagttggtacacagacctctgagaacggatcctaaatggctatcgctgctacctggcatctcaccagagaactggttctggaagctctcaaggaaggttgaagc

SEQ ID NO: 921511 - DNA, 80 bp, Artificial Sequence
  ENSG00000249500_5 (sequence is synthesized)
cagagaactggttctggaagctctcaaggaaggttgaagcttttaactgctactgaccaatacaggaaaaacagaaatgt

SEQ ID NO: 921512 - DNA, 89 bp, Artificial Sequence
  ENSG00000249500_6 (sequence is synthesized)
cttcagctggaaatagcatttactttagagtgtgattgtaaagattagtgtgataatatgtacagaacatcttatattcatggagggca

SEQ ID NO: 921513 - DNA, 120 bp, Artificial Sequence
  ENSG00000249500_7 (sequence is synthesized)
gtgataatatgtacagaacatcttatattcatggagggcacacatttgttcaatgaattgtactgatgagatcacaaatcacatttcctcacccttcaaccactgcgcatccaatatcat

SEQ ID NO: 921514 - DNA, 120 bp, Artificial Sequence
  ENSG00000249500_8 (sequence is synthesized)
caagtaggtatgatttctgaatcataatagaaactaacacttcttgggtatttctgttttgtgcctagcaccactataagtgttttacctatattaactcaattaattctcccaagaatt

SEQ ID NO: 921515 - DNA, 120 bp, Artificial Sequence
  ENSG00000249500_9 (sequence is synthesized)
tatgaagtaaatgcttttatttttccaattttaccgaagaggaaattaaggcagagaaagttaaaagaaaaaaaaaaaccttatattacgtagctagaaagtgtcagagctagggtttga

SEQ ID NO: 921516 - DNA, 120 bp, Artificial Sequence
  ENSG00000249500_10 (sequence is synthesized)
acccaagcaatctggctccagagtcttagccactggtacagtgattctttaataggactactaataactatattcttattgctaactattctataagacttctgggtatttacaggactg

SEQ ID NO: 921517 - DNA, 120 bp, Artificial Sequence
  ENSG00000249500_11 (sequence is synthesized)
tcttgtgtaattattaatagggcactttacccaattcagccaaaattcctaaggagaatcattgacttagaaaaaccacatctgattgaattgagcacgccaagaatgaggagagatggt

SEQ ID NO: 921518 - DNA, 120 bp, Artificial Sequence
  ENSG00000249500_12 (sequence is synthesized)
gtctcctttcacaagggtatctggacagagcttaaagtgtcaatctaattataaactgttattctcctattatggaaaaaccctgtaattggatactagaaaattctctgtaaaaccttg

SEQ ID NO: 921519 - DNA, 120 bp, Artificial Sequence
  ENSG00000249500_13 (sequence is synthesized)
tccctcaggcaaggcttaatactggtctcagaagcccagttaagtatgttttaaaaaattggttatccttaaaaatactgaagggaaatacttcccattaatgcagttgtcattggatgg

SEQ ID NO: 921520 - DNA, 120 bp, Artificial Sequence
  ENSG00000249500_14 (sequence is synthesized)
atgcagttgtcattggatggtaacataataggtaatatatatttttttcttttttaaaagtcttttattcaaaatttttcttaagaggaagaattgttataaaaacaatgtatttcttaa

SEQ ID NO: 921521 - DNA, 120 bp, Artificial Sequence
  ENSG00000249500_15 (sequence is synthesized)
ttttagataagtaaaaataaaatgaattatacataattaattacaccattgcatgttaaaaatctgctatattttccaaattgttctaatgtaaggatattcataaattgtgtgagtctg

SEQ ID NO: 921522 - DNA, 120 bp, Artificial Sequence
  ENSG00000249500_16 (sequence is synthesized)
tgtgtgagtctgtataaaagatggaatcatattcttcatgttgctttctattctgttgtgcttttcacttacaagaatactgtgaatatacttcactatgaataaatgcacatgtatgtc

SEQ ID NO: 921523 - DNA, 120 bp, Artificial Sequence
  ENSG00000205704_0 (sequence is synthesized)
catgtctatggctgcctgtcctgaggctccggagccctcatttcttcgtgaagtccccagctcccctgcctccactcaatggcaccggccctgcaactttaggcaggtcgaagccaaccc

SEQ ID NO: 921524 - DNA, 120 bp, Artificial Sequence
  ENSG00000205704_1 (sequence is synthesized)
gtgagggtgtgtggtgggggtatgcagagggataagaccgtggtagaggagagggttggtgaggagagagagagagagagagagagagtctggggggagcgggcaagcatggggagatga

SEQ ID NO: 921525 - DNA, 120 bp, Artificial Sequence
  ENSG00000205704_2 (sequence is synthesized)
agggtgctgagccagtccaggactgccccctcctggcccactcagagcccctgggtgtgagaagctcgtctcccgtgggttgcattggctctgccctatctctgcctccagcacccaggg

SEQ ID NO: 921526 - DNA, 120 bp, Artificial Sequence
  ENSG00000205704_3 (sequence is synthesized)
cggccgcagatggcagtgtctctggggacagcagctgcgaatgagtccacgggccaatgctgagctgctcaggctgaggcggtgtgctcagcacagagcccccggaactggcatctgcag

SEQ ID NO: 921527 - DNA, 120 bp, Artificial Sequence
  ENSG00000205704_4 (sequence is synthesized)
ggcgtgagccaaggccgccgcgatgccgcacttcctggactggttcgtgccggtctacttggtcatctcggtcctcattctggtgggcttcggcgcctgcatctactacttcgagccggg

SEQ ID NO: 921528 - DNA, 120 bp, Artificial Sequence
  ENSG00000205704_5 (sequence is synthesized)
cctgcaggaggcgcacaagtggcgcatgcagcgccccctggtggaccgcgacctccgcaagacgctaatggtgcgcgacaacctggccttcggcggcccggaggtctgagccgacttgca

SEQ ID NO: 921529 - DNA, 120 bp, Artificial Sequence
  ENSG00000205704_6 (sequence is synthesized)
gacttgcaaaggggataggcgggcggcaccgggcgccctcccccagcccgccccgcccgcccagcccggagacccccaaggcagagggaggccggcctgttggccctccacgctatccct

SEQ ID NO: 921530 - DNA, 120 bp, Artificial Sequence
  ENSG00000205704_7 (sequence is synthesized)
tgggccctcccgacagaggccccaggtgcgctggcagtggaggtggggcacttaggtgcctggctggcccagggcttgctctccgtgtcaagccgactcacccagagcccaccctcccaa

SEQ ID NO: 921531 - DNA, 120 bp, Artificial Sequence
  ENSG00000205704_8 (sequence is synthesized)
caggcagggcaggaggtggtggaaacggggtgaactccgtgggctgtgtgaggactgtccatagtgggtcccaaccccctccctctgctggagtttcctagcccttccccctccccaaga

SEQ ID NO: 921532 - DNA, 120 bp, Artificial Sequence
  ENSG00000205704_9 (sequence is synthesized)
ctgtggcagcaggcaggagcccctgccctccctccctgtcctgtgccacacttctggggccaaacccagcccccttgagccaggccctgccagactccaagcccaccctagaaccctcct

SEQ ID NO: 921533 - DNA, 120 bp, Artificial Sequence
  ENSG00000205704_10 (sequence is synthesized)
cctgtgtggagactctgttgccccactttggacacagattggcaacctgcctcaccccgccccccttcgctggggcttccatcttaatttattctcaataataaagacttcatgatgatc

SEQ ID NO: 921534 - DNA, 120 bp, Artificial Sequence
  ENSG00000281248_0 (sequence is synthesized)
ggaggcaaagaataattgacagaaggtatagaattacaaccttgacagccaacattatctacagaagaaggagaaacaggaatttcctgctgagataatttaccaccttcagagtataga

SEQ ID NO: 921535 - DNA, 120 bp, Artificial Sequence
  ENSG00000281248_1 (sequence is synthesized)
cttgtcttctattaatctatagaggaaagctatgcatccctccagcaaactatgaatatgtccaaaaagtgttttcaggttgttctgtattttttttcaacatattagctgtccaaggga

SEQ ID NO: 921536 - DNA, 120 bp, Artificial Sequence
  ENSG00000281248_2 (sequence is synthesized)
agcaaatgaaaaaatttaaaaatatatatttatagtaacaaggtctaaattgggagaatatctggttttccaaaatgaatacaagggactctagaaaaataatgaaaaacattcaacaat

SEQ ID NO: 921537 - DNA, 120 bp, Artificial Sequence
  ENSG00000281248_3 (sequence is synthesized)
aacagtcagctgatggtaactgaaaatatattatacacaggatgtgaaatcttcatgtatggacgatcagctttttgtatacacagatttagcaggtcagactgtgggatttgagtaagc

SEQ ID NO: 921538 - DNA, 120 bp, Artificial Sequence
  ENSG00000281248_4 (sequence is synthesized)
atggagtttggtatatgtgggtggtcctggaaccaattcaccaagtatattgagggattactttattatttgattttctgtaagtataattaccatctacttcaaagaaaatttctgtat

SEQ ID NO: 921539 - DNA, 120 bp, Artificial Sequence
  ENSG00000249509_0 (sequence is synthesized)
gtcctcttcctccttcaactccaaggtctcggatttgacgaacatcctaccgaagagagaaaggggaaaaaggcagtgaggtgtaaggaaagaaacagaggcgcgatcttcgtgtcacag

SEQ ID NO: 921540 - DNA, 120 bp, Artificial Sequence
  ENSG00000249509_1 (sequence is synthesized)
cagttcagagatgtctgaagtgggactcagtggtcagcagaaacctgatgacagcagagtggtccagcttgtttctcctgggggcgttcttccgaggatatttgggctgcctccagaatc

SEQ ID NO: 921541 - DNA, 120 bp, Artificial Sequence
  ENSG00000249509_2 (sequence is synthesized)
gcagtgtcttgggccgccgcaaggatgacaacgaagcaagaaggcccctgccaaatgcaggtccccaggtcttagacttctcagcctccagaactataagaaataaatctctgttctcta

SEQ ID NO: 921542 - DNA, 120 bp, Artificial Sequence
  ENSG00000249509_3 (sequence is synthesized)
attacccattgcagttcttcaaacttcagacttccttctgtcttggaattacttgaaaactatcatgatttccactttgctctttgatgtttgtgttttcatattctccctttttaaagc

SEQ ID NO: 921543 - DNA, 120 bp, Artificial Sequence
  ENSG00000249509_4 (sequence is synthesized)
aaattcccaaaatataaaagcatcatttgccagtttcctcctcgactattttagaacagctaaatttcatgtgttagaagtgcagaaatgaaaatgaaagaagaaaagagagacactttc

SEQ ID NO: 921544 - DNA, 120 bp, Artificial Sequence
  ENSG00000249509_5 (sequence is synthesized)
aatgtttctagcacacaacacctgcctctcacatatctttgggtttctgtctatcatgaacctgcagaatcagaacctcataaaaagtctgaccaagcaaaaattatgctagaagtgctt

SEQ ID NO: 921545 - DNA, 120 bp, Artificial Sequence
  ENSG00000255102_0 (sequence is synthesized)
aaaccaggaagccaccaccaaataagactctatttatttatttatgtattactgcatctctacctcagctgttctacagtggctcagaagaggctctgaagcaattccgatgtttaacca

SEQ ID NO: 921546 - DNA, 120 bp, Artificial Sequence
  ENSG00000255102_1 (sequence is synthesized)
ttccccttgataaatcaaatcacaaggacaggtaatggcttcctagagaggctgactttggaaagaagagaagcatgagcagtaaagtattgataaagtgatactcttgtaaattgctag

SEQ ID NO: 921547 - DNA, 120 bp, Artificial Sequence
  ENSG00000255102_2 (sequence is synthesized)
aaagatgatatatgtatctgcaaaatccaaggaagttgcaatttgaaataaaaaattcttgaacagcaaaattgaagacaaaagaaccaaagaccctatttcagggtagactgaatcaag

SEQ ID NO: 921548 - DNA, 120 bp, Artificial Sequence
  ENSG00000255102_3 (sequence is synthesized)
tcttcttgcactcactaaagaaaagacttgcagccatatgaagacaacagcaaagtgaccctgaccattttcttgtagtgacacctccgcatagtgacagatgggctcccagaggagtgg

SEQ ID NO: 921549 - DNA, 120 bp, Artificial Sequence
  ENSG00000255101_0 (sequence is synthesized)
agtccatcagcttttgggggagctgatgcatccttctgctccaggcctgcctctcagacctgcccactgtgattttcagggacaacaggcaaccaaatcagagttggcaagacaccacag

SEQ ID NO: 921550 - DNA, 120 bp, Artificial Sequence
  ENSG00000255101_1 (sequence is synthesized)
ggcttctgagaccactggaaaagagaccaactccatcagatgttccggagactgaggaatcaaagccttagaagaccagggttaggaaattatacagcaacaggactaacaggagaacag

SEQ ID NO: 921551 - DNA, 120 bp, Artificial Sequence
  ENSG00000255101_2 (sequence is synthesized)
cggctcctagaacagtgactgtcacccagcagctgttgagctaatggctattgagtggacaaccactcgagcaacaatgcagtcagcttcgtggactttgttttactgaggggcatctgg

SEQ ID NO: 921552 - DNA, 120 bp, Artificial Sequence
  ENSG00000255101_3 (sequence is synthesized)
agagttgggaccagaggtgaattgctcaagagaagagggaagcagtgaggacacagctgtcctcctccatctatccccaggtcaggcagccccctcctctaaggcagagaatattgtttg

SEQ ID NO: 921553 - DNA, 120 bp, Artificial Sequence
  ENSG00000255101_4 (sequence is synthesized)
aaaggcacttgtcttcacttattttgtgctgctacaacaggataccacaacctgaggaatttataatgaacagaaatttattggcttatggttctagagactgggaagtccaagatcatg

SEQ ID NO: 921554 - DNA, 120 bp, Artificial Sequence
  ENSG00000255100_0 (sequence is synthesized)
cgccccagcaatctaagcagatggccgcactgtcgggaacatctggaggtcgccggagtacgtgcctgtagtgaaagaggttcagggactaccgggagcaagaaaccaagaatctgaagc

SEQ ID NO: 921555 - DNA, 120 bp, Artificial Sequence
  ENSG00000255100_1 (sequence is synthesized)
gaaaagctggcaggagaggagagagaaagtcaacagattgagtttttcttttaggaggaaaccattggcttctggttagagttctaagaagggaaactggcgtgtgagtaggcagcagtt

SEQ ID NO: 921556 - DNA, 120 bp, Artificial Sequence
  ENSG00000255100_2 (sequence is synthesized)
gcgccccagcaatctaagcagatggccgcactgtcgggaacatctggaggtcgccggagtacgtgcctgtgtatgtagtgaaagaggttcagggactaccgggagcaagaaaccaagaat

SEQ ID NO: 921557 - DNA, 120 bp, Artificial Sequence
  ENSG00000255100_3 (sequence is synthesized)
gcgcgccccagcaatctaagcagatggccgcactgtcgggaacatctggaggtcgccggaagtgaaagaggttcagggactaccgggagcaagaaaccaagaatctgaagcagagaaaga

SEQ ID NO: 921558 - DNA, 120 bp, Artificial Sequence
  ENSG00000276786_0 (sequence is synthesized)
gtgaagcgcccccagtggggaggactttccagagtcctggggacacaaaggctggcatcctggggacagcagaggtaggcagcatggcccatagggccttgtagaccccgggataggagc

SEQ ID NO: 921559 - DNA, 120 bp, Artificial Sequence
  ENSG00000276786_1 (sequence is synthesized)
ggggttttattctggtgttccaggacctggtgggaaggtttctgagccatgcagggccccagcctggcctgccagggctgcatcctgtgtctactgctggtcagagaactgactggggtt

SEQ ID NO: 921560 - DNA, 120 bp, Artificial Sequence
  ENSG00000276786_2 (sequence is synthesized)
gggggaagggaggccctgcttttagccaggtggcagctgatggaggccttccccgagggtgggtggccctgggaagttgtgcgtagggaggagccaggtcaaggagggccctgttctttc

SEQ ID NO: 921561 - DNA, 120 bp, Artificial Sequence
  ENSG00000276786_3 (sequence is synthesized)
acactgagctcctggctggccctgggggtggctgttgcctgtgaaggtagagtgctgggctggacctctgcatgccttcaaggagctcccggctctgggatccatgcagaggagagtggt

SEQ ID NO: 921562 - DNA, 120 bp, Artificial Sequence
  ENSG00000276786_4 (sequence is synthesized)
gaggagccaggtggtccctgggcatgcagggggctttgcaaccccgaccacggcctcctccctcagtctgtggcctcctccctctccccagtgccgctgagtgagtggtggtcattattc

SEQ ID NO: 921563 - DNA, 120 bp, Artificial Sequence
  ENSG00000276786_5 (sequence is synthesized)
ccaccaagtccaggggtttcctcctctatagacagggagtatcagttgcttctaaggattaaactggaaaaggattcaagccagcactgccaggaagggcttttgacatgcctgcattaa

SEQ ID NO: 921564 - DNA, 120 bp, Artificial Sequence
  ENSG00000276786_6 (sequence is synthesized)
gggaagacatatcattccagtgagcatttaaatactgattacatcttttgctttgtaaataactcaatggtaaatttttacaatattgtttttacagagactgtaatgaggaggcaattt

SEQ ID NO: 921565 - DNA, 120 bp, Artificial Sequence
  ENSG00000276786_7 (sequence is synthesized)
ttctcccctgtcacttggatattaagctttttaatgagagtacacaaatgactatataaaacttgggatggtgagagctgagttgggacttaatgcgaaattaaagttgtgcaggctcca

SEQ ID NO: 921566 - DNA, 120 bp, Artificial Sequence
  ENSG00000255109_0 (sequence is synthesized)
tcctcagatgatcacacccactttgcttcactttcatgtccagagctgcttagactgatttctgcaaagtgcacaggcattttcatgctgaggataaaggaccatgatcgcttgtctgga

SEQ ID NO: 921567 - DNA, 120 bp, Artificial Sequence
  ENSG00000255109_1 (sequence is synthesized)
cccagaaaatatttcccatttgctacacagatgccgtctcatccttccagagttcaagacttcagcagaaaaaaaaatcacctcattaaaggaaaattgtgccttatccccactactcga

SEQ ID NO: 921568 - DNA, 120 bp, Artificial Sequence
  ENSG00000255109_2 (sequence is synthesized)
tggggcaggggataaggggaataatctctctccagtataagaagggatcaagaagcaacaggactgcgggatgggatagaaaataattttcatcttagcaatattgagtattccagtaca

SEQ ID NO: 921569 - DNA, 120 bp, Artificial Sequence
  ENSG00000255109_3 (sequence is synthesized)
tgagtattgtatgtttctcaattcacttagatccttaatttcccttagtcatgttttgtgattttcagtatacaaatcttgtactctgtattaaaccattcttgcattgctgtaaagaaa

SEQ ID NO: 921570 - DNA, 120 bp, Artificial Sequence
  ENSG00000255109_4 (sequence is synthesized)
gccttctttctgctatgcgaggatacaagaggaattcaacaatctgcaatctggaagataaccctcccagaacccaatcatgctggcaccctgattttgaactttcagcctccagaactg

SEQ ID NO: 921571 - DNA, 120 bp, Artificial Sequence
  ENSG00000255109_5 (sequence is synthesized)
tgagacatcaatgtattttgtttttgcagttttttatgaagttgaacatacacatatcctaagagccagttatttcgatcttctttatcaaagggaaataaaaacatatttcttcaaaaa

SEQ ID NO: 921572 - DNA, 120 bp, Artificial Sequence
  ENSG00000255109_6 (sequence is synthesized)
ttttttttttcctcagatgatcacacccactttgcttcactttcatgtccagagctgcttagactgatttctgcaaagtgcacaggcattttcatgctgaggataaagatacagattttt

SEQ ID NO: 921573 - DNA, 120 bp, Artificial Sequence
  ENSG00000255109_7 (sequence is synthesized)
aaaacatattcttatgcaaggaaggaaaaagtgtcggtgaatgacttcatatttctattgtgacttctatgtgctctgcacggttgctggagttcagaaaacattggaaagagttaaatg

SEQ ID NO: 921574 - DNA, 120 bp, Artificial Sequence
  ENSG00000255109_8 (sequence is synthesized)
actttagaaagatggtgtgacagaaacaacaaagtcgagacagttactacttaagatatgtgactgaattcctgaggtgctagaatctgattctcagtatctgattccctttctaaaatg

SEQ ID NO: 921575 - DNA, 120 bp, Artificial Sequence
  ENSG00000255109_9 (sequence is synthesized)
gtaagaggaattttgttgttttcttgtttttggctgtctgtttttgaaagggaaagaatatctcacatcatcctgttctgatcaataacataataaaatcacatttctgaaaacttcaaa

SEQ ID NO: 921576 - DNA, 120 bp, Artificial Sequence
  ENSG00000255109_10 (sequence is synthesized)
tttctcactccatcgtatgtgtgtgtggtggggcaggggataaggggaataatctctctccagtataagaaggtaatgattcaaagatttaaatgctaaacttctgggacttcgggactt

SEQ ID NO: 921577 - DNA, 120 bp, Artificial Sequence
  ENSG00000255109_11 (sequence is synthesized)
actataaaactagataagatcaacaacaacaaaaacaatgctttctattgaaatttgtacagttttgcaagttcatttctgctcttcgtctgttgaagcatcaataaagtccaagaaaaa

SEQ ID NO: 921578 - DNA, 120 bp, Artificial Sequence
  ENSG00000255109_12 (sequence is synthesized)
cacagccacttttttcctttttttctcactccatcgtatgtgtgtgtggtggggcaggggataaggggaataatctctctccagtataagaaggagatagaagttcatgaagcagaagca

SEQ ID NO: 921579 - DNA, 120 bp, Artificial Sequence
  ENSG00000255109_13 (sequence is synthesized)
gaagaatggacacaatagaatttgctatcccttcgtatgtcttgagatctagtacaaagattctgggacaagaatattcgtgctttgtttagggaacagcaagagaagtcacagttactg

SEQ ID NO: 921580 - DNA, 120 bp, Artificial Sequence
  ENSG00000255109_14 (sequence is synthesized)
gagcagagtgacagataaagggagagttttgcagttttttatgaagttgaacatacacatatcctaagagccagttatttcgatcttctttatcaaagggaaataaaaacatatttcttc

SEQ ID NO: 921581 - DNA, 120 bp, Artificial Sequence
  ENSG00000255109_15 (sequence is synthesized)
gcttcactttcatgtccagagctgcttagactgatttctgcaaagtgcacaggcattttcatgctgaggataaagtgacagctgctaaaaagggttggaagaaaatttcttaaagcttac

SEQ ID NO: 921582 - DNA, 120 bp, Artificial Sequence
  ENSG00000255109_16 (sequence is synthesized)
gattgactgggctagaagaccaaagtttaaagcgcaagttaatctgagacagagaaatgaaagagaagatgagaaagaaaagtggcctcaaaataagaggaactagggtcctggctcaga

SEQ ID NO: 921583 - DNA, 120 bp, Artificial Sequence
  ENSG00000255108_0 (sequence is synthesized)
ccctcccgcggcggcgggcgctcggcaggtctgaacccgcgtgggtgtaggcgctgggggtcgacctggcactgcggaggccgggcgagctgcagccctgggggcgccaatagcccagca

SEQ ID NO: 921584 - DNA, 120 bp, Artificial Sequence
  ENSG00000255108_1 (sequence is synthesized)
agggcccatcccgtccaaggacggaggagctgggcgggaggcgggcccggaggcccgcgcgttccaggtcctgctcgcggctctgcagctccagctccagacggcttctccgctccccgc

SEQ ID NO: 921585 - DNA, 120 bp, Artificial Sequence
  ENSG00000255108_2 (sequence is synthesized)
tgcaaaagaggtgcgcaccctcattgagccgggcgggcaggtgctccaggatgtgatcttctccgggcagctgcgagtaatcctccgcttgggcgctctccactgcctggtccttgtcct

SEQ ID NO: 921586 - DNA, 120 bp, Artificial Sequence
  ENSG00000255108_3 (sequence is synthesized)
ctgggccgtgggggcgggcggggggcaacgccagcaaggggttgggccggttcaggaggcctggggttggggagagaagggattctcagttcatcagcgcggccgcggcccgcagggggt

SEQ ID NO: 921587 - DNA, 120 bp, Artificial Sequence
  ENSG00000255108_4 (sequence is synthesized)
agcgcgtcccccagcgagaggttgttgcgcatccagccgggcagtgcctctctgtaggcggcgcaggacagcggcacggacggcagcgactggacgcggcgcagctccacctgctccggc

SEQ ID NO: 921588 - DNA, 120 bp, Artificial Sequence
  ENSG00000267341_0 (sequence is synthesized)
gatctgcgatggtgacatcaataggtcaccatgttggcagctgtataatcagcaatgaaagctgaatattatcaccagataaccaaattatgaaatatctatattaacttcaagattcag

SEQ ID NO: 921589 - DNA, 120 bp, Artificial Sequence
  ENSG00000267341_1 (sequence is synthesized)
agaaagagatagaaggctgtccgctgctggaggggaagaaaggaggggaggctttttcaaggctctgtggctcagtggaccttcaataaattggaccttcaataaattaattgaaaaaca

SEQ ID NO: 921590 - DNA, 120 bp, Artificial Sequence
  ENSG00000239653_0 (sequence is synthesized)
tgtttgcaaataaaccattctgataaattatttttgttgcttaaaataagaggaggaaccgctgtgtgttagcaagaatgtccatacctgatatgaaagagtcatgttggcttcagttcc

SEQ ID NO: 921591 - DNA, 120 bp, Artificial Sequence
  ENSG00000239653_1 (sequence is synthesized)
tactgccctgtggacttcccattccctccttacttgagtcaaccatccactcagtactttccacaaatctaataatgaggtgctctctgtaggtaaatcctttcactatggcttgtcctc

SEQ ID NO: 921592 - DNA, 120 bp, Artificial Sequence
  ENSG00000239653_2 (sequence is synthesized)
aaacctcccaagaaaaggttcaactgctcaatctcttaacctttttaattccattcccttgcaggtatcccggccctgcataacaagatgatcccaactcaaggaaaggggtttagcagt

SEQ ID NO: 921593 - DNA, 120 bp, Artificial Sequence
  ENSG00000239653_3 (sequence is synthesized)
gttggatcttggcgtatgtgggatttaaccaggcagaaaggcagacaagagtaagattctaggcagagagagcaaatgcgtcgagcatgggtatgaacatgtgagggatagagaataatt

SEQ ID NO: 921594 - DNA, 120 bp, Artificial Sequence
  ENSG00000239653_4 (sequence is synthesized)
ctgcaggaagtttgctggatggaagggccttatagggttagaaaagctggtgtcagattgtcaaggactttgaatgtcatggggcttctcttccaggaacacatgggatcaggcttagat

SEQ ID NO: 921595 - DNA, 120 bp, Artificial Sequence
  ENSG00000239653_5 (sequence is synthesized)
taacccaaatgtaattgtcagagcccagagatatttcatggtccagtcctagcactgtgcagctgccaaaagtcaaagccattcaaatctgtactgaaaactgtggaaaagcaaaggagc

SEQ ID NO: 921596 - DNA, 120 bp, Artificial Sequence
  ENSG00000239653_6 (sequence is synthesized)
acttaagtctctttccccatgtcttgcattctcactctcttttgcttcaaagatctgtctttacctgcccctgtccccagtcctaacaaaaagcactcccctaaatcaactcttaagttc

SEQ ID NO: 921597 - DNA, 120 bp, Artificial Sequence
  ENSG00000239653_7 (sequence is synthesized)
ctctcccttctcactcctttcttagtctcctctttctgtaagaagttcttgctcctgttgttaatggaagttaattaaagtagtatttcaccttgtaaggctgtaattcttggcacttgt

SEQ ID NO: 921598 - DNA, 120 bp, Artificial Sequence
  ENSG00000239653_8 (sequence is synthesized)
tatcctcattttctacatccaaagaccatggaccagaatatctcttaggaggtaagggagagtgaggctatcagccaaagaaaaagtctccagggggaaggggagaatcacttataattt

SEQ ID NO: 921599 - DNA, 120 bp, Artificial Sequence
  ENSG00000239653_9 (sequence is synthesized)
aatactttgtggaaaaaacatctctgccacctatggccctccaataacaatggaagacagaatcaacaggtgagaaccttgggacaaaaataagttacaaagctgttgtaatccaggtaa

SEQ ID NO: 921600 - DNA, 120 bp, Artificial Sequence
  ENSG00000239653_10 (sequence is synthesized)
gaaatctttaaaaagtagaaccaacaagccttgaggtctaactctgttcaacattaaagggaagagtgagtctaagaagacttcaggtttctagcttggccaaaccaattgagctttaag

SEQ ID NO: 921601 - DNA, 120 bp, Artificial Sequence
  ENSG00000239653_11 (sequence is synthesized)
tgaaatgtgcgatatggtaacagagaaggaaaaagacataacgatagatttgagctgctggtgggaaattctggtttagtgcccagctggctgtacaggctggttggactttaggaggga

SEQ ID NO: 921602 - DNA, 120 bp, Artificial Sequence
  ENSG00000239653_12 (sequence is synthesized)
ggtttgagctggaaaataaagatggagagttgtctttcagttttagatcatcagtgaggtcataagggtagatggagtttacctgggaaaattaagtagctattcgatttggcttattat

SEQ ID NO: 921603 - DNA, 120 bp, Artificial Sequence
  ENSG00000239653_13 (sequence is synthesized)
tatgttaaaataatacttctctagtgaagtacttaatatgccagatactgtgccaagcattttatatacatcctctcttttactaagccctcatagggcaggtattttgattccaatcat

SEQ ID NO: 921604 - DNA, 120 bp, Artificial Sequence
  ENSG00000239653_14 (sequence is synthesized)
actgattggaactcctaagaaggtatcttgcttaaggtcccacaacgaataggtggcagatccagggtaattcaggtctgtcagaacagtgattcttaattttttccctcctcagactcc

SEQ ID NO: 921605 - DNA, 120 bp, Artificial Sequence
  ENSG00000239653_15 (sequence is synthesized)
aggagtcacatgaagttatgcatcctgtctgaccgaggcacaggcacaccacatttttatattccgcttccaggatatcacaaacctgaagcccatcctccatggcccagagagaaaacc

SEQ ID NO: 921606 - DNA, 120 bp, Artificial Sequence
  ENSG00000239653_16 (sequence is synthesized)
caggacaaaaccttggagaagactattttcatgaagacaaatggagaaggagcagtagagtaaaaagagagcaaatccagctgcctgtacaatccatgccaccgaatgccgtaagtgaga

SEQ ID NO: 921607 - DNA, 120 bp, Artificial Sequence
  ENSG00000239653_17 (sequence is synthesized)
cgtaaaagttacgatactgaagagacgtaacctgaccaaggccacagagctggaaaaagaagcaaagccaagccgtttttctcatgcactgctcacaacaagcccctccttccactgact

SEQ ID NO: 921608 - DNA, 120 bp, Artificial Sequence
  ENSG00000239653_18 (sequence is synthesized)
catgaaaaacacactcataatgcccagcccgcaccctaatgaacagccctcttaagagtggtcatcagacttcaatttcacagactagaattgagaaatggaacaaaaccttgggatacc

SEQ ID NO: 921609 - DNA, 120 bp, Artificial Sequence
  ENSG00000239653_19 (sequence is synthesized)
agccttccattttggtagggatcatttaaaaaatggtagggatcatttaaaaaatgtgttggtgtctgaaacttactttgaagtggttaaaaaacataaaatgtatagattgtaacaagc

SEQ ID NO: 921610 - DNA, 120 bp, Artificial Sequence
  ENSG00000271065_0 (sequence is synthesized)
ttctatttgcagctgcacctgacccttgaaaactgggaaagtgtcggttttgcctattctgatttcattccttgggagatgatgtttaaattccgggcaaacatccttcgcgattgcagg

SEQ ID NO: 921611 - DNA, 120 bp, Artificial Sequence
  ENSG00000271065_1 (sequence is synthesized)
gagaacctatgtatcgtgccctatgttaggtgttgggaaaacagcaattaagacagtgtccttggcctcataagccttacaatcaagtgggagaaagtaaacaagtcatcaaacaagata

SEQ ID NO: 921612 - DNA, 120 bp, Artificial Sequence; identical to SEQ ID NO: 753118
  ENSG00000282600_0 (sequence is synthesized)

SEQ ID NO: 921613 - DNA, 120 bp, Artificial Sequence
  ENSG00000282602_0 (sequence is synthesized)
aaagtccggactgtccggctggagtctggagtcgggacatgcctcagccagcacgtcctcggcctcgtctggggcctgaatcctagggaagccatagcagctcctccacccttcctctca

SEQ ID NO: 921614 - DNA, 120 bp, Artificial Sequence
  ENSG00000282602_1 (sequence is synthesized)
tgggggcttcacactttaaatcgctgttgagcggggcgcgggggcgctgcaacctaaaggtgggagctactcaaatggaggggcatctgttaaaatggccggcctgtcattttcaaaaac

SEQ ID NO: 921615 - DNA, 120 bp, Artificial Sequence
  ENSG00000286738_0 (sequence is synthesized)
ttagcatccattggtgccgttgaagggcaagagaatgaactttgatgagaaagaagtagttatcctggttaataactgacttggagcactagaaccctttgctgctgagaagtggtccca

SEQ ID NO: 921616 - DNA, 120 bp, Artificial Sequence
  ENSG00000286738_1 (sequence is synthesized)
gttccagggctgggtatttgaaatcctgagctggactctgacatcttggtcatccaccctccatggccatgcctgtctcccagggctgtccgtcagggctccctgaagtcctcttctcca

SEQ ID NO: 921617 - DNA, 120 bp, Artificial Sequence
  ENSG00000286738_2 (sequence is synthesized)
ggaacacagacccatacctgctccctatcactgacatgacatggtgtctgggaccctcactgcctctgtcactcatctaggaagcggctgattgaagcctctcctcaggagtgtctcctg

SEQ ID NO: 921618 - DNA, 120 bp, Artificial Sequence
  ENSG00000286738_3 (sequence is synthesized)
gtggtgacttgtatgtgtcaacttgcccaggccatcgagtgcccagacatttggtctatgattaggttgggtgttttagatatgattgaccttgacactggtggactgcaggcagcagat

SEQ ID NO: 921619 - DNA, 120 bp, Artificial Sequence
  ENSG00000286738_4 (sequence is synthesized)
tccctcccttatgtgaatggaggcctgaatggaacaaaatggtggattctgtccagagcaagagaattcttcctgcctgatggccttcaaacagaaaggtcagcttcttcctgccttcag

SEQ ID NO: 921620 - DNA, 120 bp, Artificial Sequence
  ENSG00000286738_5 (sequence is synthesized)
acttgaacggaaacatcagctcttcctgactctcaagcctgctgaccttcagattggagcttacattactggcttctctgggtcttcacactgccctgaccctgcagagctcagaacttc

SEQ ID NO: 921621 - DNA, 120 bp, Artificial Sequence
  ENSG00000286738_6 (sequence is synthesized)
tccgccaccataatcatgacttaagcactgagtggccagcttcacacagctccatgaggtcacaggagaatactgagcccaggatgtgaacggacacccagctgggcagaagggagccag

SEQ ID NO: 921622 - DNA, 120 bp, Artificial Sequence
  ENSG00000286739_0 (sequence is synthesized)
ttggtgaccctggccagcttgataggctgcacacggctggtgttcatgatggcggcgcagcgacgatgtggcggagaggaactgtgatccatgagggaaggatttttctccctttctttc

SEQ ID NO: 921623 - DNA, 87 bp, Artificial Sequence
  ENSG00000286739_1 (sequence is synthesized)
actgtgatccatgagggaaggatttttctccctttctttctttttttttttatttttatactttaagttctagggtacatgacacca

SEQ ID NO: 921624 - DNA, 68 bp, Artificial Sequence
  ENSG00000286739_2 (sequence is synthesized)
tgcacccatcccaccccacgacaggccctggtgtgtgatattccctaccctgtgtccaagtgttctca

SEQ ID NO: 921625 - DNA, 120 bp, Artificial Sequence
  ENSG00000286739_3 (sequence is synthesized)
gcagcatgatttttaaagcatttttctttcttcctcactgaaggagacattttcaatttacattctgacccatagaaaatagaaggtttctaaatgagcttattttgtatctggctgcct

SEQ ID NO: 921626 - DNA, 120 bp, Artificial Sequence
  ENSG00000286739_4 (sequence is synthesized)
aagaactcttcctacctattcctccattgaagaatcacaaacaagtgccttgggaggaggcgcaagtctcagggatccagaccataatctcagagctagaatgtaagggagctcatggaa

SEQ ID NO: 921627 - DNA, 120 bp, Artificial Sequence
  ENSG00000286739_5 (sequence is synthesized)
gagatgagtagccgaccataactttggggatttggtgttataggaattgctccctcacttgctacggggaaaaatgaatactatatgaccataatagtttgctgaaaattgtctctgcta

SEQ ID NO: 921628 - DNA, 120 bp, Artificial Sequence
  ENSG00000286739_6 (sequence is synthesized)
ttcctgccaaaaatggatggagaagattatttgagagaagaaaatatgaaaatggatccccttgaagaaatatgagagaaggaagctaatccttggtgacagaataagagacactcaaac

SEQ ID NO: 921629 - DNA, 120 bp, Artificial Sequence
  ENSG00000286739_7 (sequence is synthesized)
tgacattaagaacacacaagtagtccagagagtggaaaaatagctaaacttatatgaaggtgcttgatacaagggtatgtcatgttctgaggcctgacctttcctgagaagctgacaggc

SEQ ID NO: 921630 - DNA, 120 bp, Artificial Sequence
  ENSG00000286739_8 (sequence is synthesized)
atggcatttatgatggaaaaacaaccctggaggcacagaaaagctgatggccacagactgcaaagggatcaattagagagaaaactgctctctggtacagaaagagtgtttagaagagaa

SEQ ID NO: 921631 - DNA, 120 bp, Artificial Sequence
  ENSG00000286739_9 (sequence is synthesized)
atgggcatcttggtgttgctgtaattatcccctctcttttctgagtcaccaatttctcattctgtgcagcaattctgctgttttacaaacatgtcataatgtctcatcttaaaaacaaac

SEQ ID NO: 921632 - DNA, 120 bp, Artificial Sequence
  ENSG00000286734_0 (sequence is synthesized)
agccggctccggccttggccagcccagcaaggcgctcccacagtgcaacggcgggctgaaggggctcctcaagtgccgccaaagcgggagcccaggcagaggagacgcccagagccagcg

SEQ ID NO: 921633 - DNA, 120 bp, Artificial Sequence
  ENSG00000286734_1 (sequence is synthesized)
gaggactgccagcacactgtcacctctcagtaacatgttgtagaggctgggaagtccaaggtcatggtgccaacagacttggtgtctggagagggctgctctctgcttccaacatggtgt

SEQ ID NO: 921634 - DNA, 120 bp, Artificial Sequence
  ENSG00000286734_2 (sequence is synthesized)
gggctgctctctgcttccaacatggtgtcttctcgcagtgtcatgtcctcctgacggaaggaatgctgtgtctcacatggtgacaggaattgaaggacaaaaatggctgaacactttgtg

SEQ ID NO: 921635 - DNA, 120 bp, Artificial Sequence
  ENSG00000286734_3 (sequence is synthesized)
aagcctcatttataaatgtcttaatctcattcgtgaggactctaccctcatgaaaacttaatcacttcctaaaggacttgcctcttaatactatcacattatcaattaagtttcaacaca

SEQ ID NO: 921636 - DNA, 120 bp, Artificial Sequence
  ENSG00000286734_4 (sequence is synthesized)
tgacttgagggacattcagaccatagtacttccctagttaggagactaaacaaagacaggagcaagaagaggagtctcatttgcagaagaaatgtctgtttctcacttggcattgcataa

SEQ ID NO: 921637 - DNA, 120 bp, Artificial Sequence
  ENSG00000286734_5 (sequence is synthesized)
gacttatctgagagtgcccaatgtcacacatctatggtaagaagagaagatactgatcagaagggcctggaggctttatgaagcaacagtctgaaaagtccttgcaggaaataggcaagg

SEQ ID NO: 921638 - DNA, 120 bp, Artificial Sequence
  ENSG00000286734_6 (sequence is synthesized)
tcctacagaccattggcatgacagcagacagatcactggcaggcaagatttgatggaagaaccatgtatccgccgcaaacgcaagactcatccgaggagcactagtagcctagagccctg

SEQ ID NO: 921639 - DNA, 120 bp, Artificial Sequence
  ENSG00000286734_7 (sequence is synthesized)
aattcatcctgtgcctgatgtgaaagtcacccaaaatcaacatttctgtaccattctggtggcccaatctcatataatcacttgaaaggaatagcacactgactaatcaaagccatcagc

SEQ ID NO: 921640 - DNA, 120 bp, Artificial Sequence
  ENSG00000286734_8 (sequence is synthesized)
tcatcagccactgttccggaatcgaggtccacccatggactcccagaagaaccccttaagtattagtactggaactcctctatgcacttgatccacataaagtacgtgtgtgtgggcagg

SEQ ID NO: 921641 - DNA, 120 bp, Artificial Sequence
  ENSG00000286734_9 (sequence is synthesized)
gagggcttgtagaggatcagaaagtgccttacaggagagaaacagagaccaagactagggaaccctttctgctggaggggcatctagacattttgaagaaacacacgaaagaatagagcc

SEQ ID NO: 921642 - DNA, 120 bp, Artificial Sequence
  ENSG00000286734_10 (sequence is synthesized)
cctgaggtcacatccagatttcagtttctcttcgggagtctaagagactgttgtgagcccagattttcacattttcttcctctggctgaaatggttggatttagacagtgtggaggcaaa

SEQ ID NO: 921643 - DNA, 120 bp, Artificial Sequence
  ENSG00000286734_11 (sequence is synthesized)
cttactgtatggattaataacttttgtgcaagtaacagatatttgtctagccttccttaagtcaaataagaatgtatcataagagtgtagagatatctaataaaaatccaagggcagaaa

SEQ ID NO: 921644 - DNA, 120 bp, Artificial Sequence
  ENSG00000286735_0 (sequence is synthesized)
gggattcacctcatccatcactggtctgcaactgccttttgagggccacagcaggggatggagaaatgtttcttaaccagggctacatcagccagtgaagggggatacgctctcaaatgc

SEQ ID NO: 921645 - DNA, 120 bp, Artificial Sequence
  ENSG00000286735_1 (sequence is synthesized)
aaaccctggaaaaccagatggataagaagcagacctggagttcaagatgggctccaaagatcagatgtatttggagaaaacaaaaaacccacaacccaaaggatgggatttcacatctca

SEQ ID NO: 921646 - DNA, 120 bp, Artificial Sequence
  ENSG00000286735_2 (sequence is synthesized)
agacatctcccagctatatttctcctgggaaacctacctaaatctttaaccagcaacttcaacctggatggtcttacctcaggagtttagaaatagctcaccattatttgggcaagtcct

SEQ ID NO: 921647 - DNA, 120 bp, Artificial Sequence
  ENSG00000286735_3 (sequence is synthesized)
agcaaaaatataactgagcaatttcttgagggggagataacttctatagtatgtaaataacctcatttgcttccccgtcacagaacttgcacagcaactttcagtacaaatcttaacttt

SEQ ID NO: 921648 - DNA, 120 bp, Artificial Sequence
  ENSG00000286735_4 (sequence is synthesized)
ctaacagaaggaatatgacttttgtctaattcaaaggttgtaaagaggtacttttcataaggaagatgataaagaaaagagatttcatatgagaaaggatcttgcatggtaaattattgt

SEQ ID NO: 921649 - DNA, 120 bp, Artificial Sequence
  ENSG00000286735_5 (sequence is synthesized)
cctaaagtaaaatgactggttctttaaaaagagggatatttaggacaagtcagaaagtccaagcctgtcatagatgatctgtgtaaattgtgaaaaatttgtgaaagggaatttatgaaa

SEQ ID NO: 921650 - DNA, 120 bp, Artificial Sequence
  ENSG00000286735_6 (sequence is synthesized)
ttagacctactaaataaatgctttatagactgccactttgacttttaactgtacaacttgactattttaaagctaggcatggcctggggacttacagagttagccattcccccaggtatg

SEQ ID NO: 921651 - DNA, 120 bp, Artificial Sequence
  ENSG00000286735_7 (sequence is synthesized)
ctggaaagagaccttatatgcacttctgtctagtgaatcgcttacttatcaggtttttcgcaaaagtaaaagttgtgaacagttagccatgtaacatgttcttgagactactggaaaagc

SEQ ID NO: 921652 - DNA, 120 bp, Artificial Sequence
  ENSG00000286735_8 (sequence is synthesized)
agtcttacatgtaaggtacgcaaggaaagtagaatgtgcttttgttaaaagattgtaagaaggtatgggaatgtaagttttgcctagtttggagggttaaaggattgttttatgttagat

SEQ ID NO: 921653 - DNA, 120 bp, Artificial Sequence
  ENSG00000286735_9 (sequence is synthesized)
aggataaagctgaaggtttgagcaagttgtggaaggtttgtgaaaaattaatcctataaaagaaattctatgtgtgaaaattacccaaaattaaaggacttttattcagtttattcataa

SEQ ID NO: 921654 - DNA, 120 bp, Artificial Sequence
  ENSG00000286735_10 (sequence is synthesized)
acactggaattaaagcacaacatagttttattaaagtattaatctgcttttgattaaagtgttatcagtacatgttccaaaattatgtgaaactcctataattctaatgtaacatagtat

SEQ ID NO: 921655 - DNA, 120 bp, Artificial Sequence
  ENSG00000286735_11 (sequence is synthesized)
acattattaggaataattataattatgtttaattgttttgtgcctcaggggtaataaatttctttgtcaattgtgtctttgattgtggctaccctaagactttttgtcattaacagataa

SEQ ID NO: 921656 - DNA, 120 bp, Artificial Sequence
  ENSG00000286736_0 (sequence is synthesized)
caggcatgagccaccgcgcccagccaaaatagtttctttaacataaccatgcttataccaatgcagtactaaaatataatttgtatatattttcatgaaggaagggacccacaaaggcaa

SEQ ID NO: 921657 - DNA, 120 bp, Artificial Sequence
  ENSG00000286736_1 (sequence is synthesized)
gtgcctaggacccacacaaatcacagtgtggctcttgctccaaccatgggagaagccacagaagagcattccaggcagagggcacggcaagtgcaaaggttctgaggtgggaatgagctg

SEQ ID NO: 921658 - DNA, 120 bp, Artificial Sequence
  ENSG00000286736_2 (sequence is synthesized)
gacatgtttgagaaacagcaagaaggacctcaagtgagcccacattggcagtgacaatcagaatgtcaaaatgtctcagaggatttctaggaaatctgtggcacttcacgaagaggctgc

SEQ ID NO: 921659 - DNA, 120 bp, Artificial Sequence
  ENSG00000286736_3 (sequence is synthesized)
taatacacttcccaggaagggggattcttctgaaatgctaatacaatcaactgcaaggcaaacttcaagcttctttttcagtgatcagagaggccctcccagagcaaggatgctctccac

SEQ ID NO: 921660 - DNA, 120 bp, Artificial Sequence
  ENSG00000286736_4 (sequence is synthesized)
tgtgcaagctaaaggccctactttctcacccagccttttctggggaggagaaacacatcctcaccacattgcagctgccctgcgagggctgcaggtattgtgtgtccccaccagccaggg

SEQ ID NO: 921661 - DNA, 120 bp, Artificial Sequence
  ENSG00000286736_5 (sequence is synthesized)
cagttcccagacagactctggctgcctggacccaggtctgctccaaggaagcagcacgtttctggaggaggcttagccaagaaaccattacggagtgagagaggagttatctggataaat

SEQ ID NO: 921662 - DNA, 120 bp, Artificial Sequence
  ENSG00000286736_6 (sequence is synthesized)
gcggaactgcccaactcctagcatttgttcctgggacccaggctgtaacatcctctggagccaaactgcctctgttcaaacccttgtccccgcactccacctcctagctgtgtggcactg

SEQ ID NO: 921663 - DNA, 120 bp, Artificial Sequence
  ENSG00000286737_0 (sequence is synthesized)
attctctctaatgactgtctccctcgctggatgtgatgaagtaggctacattatgcagcaccccatgaaacaaagaattgagtgtgaccaccaggcaacatctggcaaggaactgagttc

SEQ ID NO: 921664 - DNA, 120 bp, Artificial Sequence
  ENSG00000286737_1 (sequence is synthesized)
caacagtgcacaaggaagtgaatcctgacaacagtcccaagagcttaggagtgaatccttctccactccagcctcagataagtcttgcccttaattgcagcctcatgaaagactctgaaa

SEQ ID NO: 921665 - DNA, 120 bp, Artificial Sequence
  ENSG00000286737_2 (sequence is synthesized)
ccttgggcccaggtaacccatgccaagattcctgacctgcagaaactgtgggtcatcaagcatgttctttcaagtctctacatgtgtagtaatttgttatgcagctttagataaccaaga

SEQ ID NO: 921666 - DNA, 120 bp, Artificial Sequence
  ENSG00000286737_3 (sequence is synthesized)
gatggaacaattggaactgccctacagttacggtggggcataaaatgacacaagcattttggaaaacagttgggcagtttcttataaaattaaacagacacttaccctaacacccagcat

SEQ ID NO: 921667 - DNA, 120 bp, Artificial Sequence
  ENSG00000286737_4 (sequence is synthesized)
tgtgctctaggtatttacctaagaaaaataaaacgtgtttatacaaagacttatacatgaatatttatagcagttttatacataatagcctacaagtagaaacaactcaaatgtccatcc

SEQ ID NO: 921668 - DNA, 120 bp, Artificial Sequence
  ENSG00000286737_5 (sequence is synthesized)
tgttgaggaaaagaccccagacataaaagaatatattatatattagtccatttatattaaactctagaaagcacaaatctaatctttgatcatagaaaatagatctgtggtcatctaaaa

SEQ ID NO: 921669 - DNA, 120 bp, Artificial Sequence
  ENSG00000286737_6 (sequence is synthesized)
ctgggggtgtgaggtcaggattgacagcaaaggctcacaagcctgacttttgggggtggtgggcaagttctacatcttgattgtgacagtatttacaatcaactgtcaaaactcatggag

SEQ ID NO: 921670 - DNA, 120 bp, Artificial Sequence
  ENSG00000286737_7 (sequence is synthesized)
ctgttcacttaaagttggtaaattatattttatgtaaatttttccttgataaagtttttttaaatgatctcaaggtggattaaagacttaaactgtaaaactcccaggagaaaacataca

SEQ ID NO: 921671 - DNA, 120 bp, Artificial Sequence
  ENSG00000286737_8 (sequence is synthesized)
gaggatccttcattatattggtattggcagtgatttattggatatgatgccaaaagcacagtacacaaaaacaaaaacagaatacagcaacggaacaattaacagagtgaaaaagtaacc

SEQ ID NO: 921672 - DNA, 120 bp, Artificial Sequence
  ENSG00000286737_9 (sequence is synthesized)
aacctgtggaatgggaaaatgggaatgctgttctgcatagcaacggaacaattggcagagtgaaaagtttcttgcagcttggtgtggtggatctcacctgtaatcccaggactttgggag

SEQ ID NO: 921673 - DNA, 84 bp, Artificial Sequence
  ENSG00000286737_10 (sequence is synthesized)
aggcaagaggattgcttgagaccaggagatgcacaaaaataaaataaaataaaataaagataaaaataaaaaatttaaaaataa

SEQ ID NO: 921674 - DNA, 63 bp, Artificial Sequence
  ENSG00000286730_0 (sequence is synthesized)
agactcagtctcaactctatcctcaagaaccacaaaaaaagaagtgcctttcacctcccgctg

SEQ ID NO: 921675 - DNA, 90 bp, Artificial Sequence
  ENSG00000286730_1 (sequence is synthesized)
ggcatgaggctttataagggaagcagggcgtaaaactttggaaaattcgccacctgactatacaatagaaaagaaaaacccattttctga

SEQ ID NO: 921676 - DNA, 86 bp, Artificial Sequence
  ENSG00000286730_2 (sequence is synthesized)
agcctaatgttaatccccaacaccctcatggcagcccctcccatcataggcctggaggcccaagaggaaaaagtggttttgtgggc

SEQ ID NO: 921677 - DNA, 120 bp, Artificial Sequence
  ENSG00000286730_3 (sequence is synthesized)
taggcctggaggcccaagaggaaaaagtggttttgtgggcaggctcagggtccccatgctgtgtgtagcctagggactcagtgccctgcatccctgccactctagtcatggctgaaaggg

SEQ ID NO: 921678 - DNA, 120 bp, Artificial Sequence
  ENSG00000286730_4 (sequence is synthesized)
ctatatttcagaagacatatggaaatgcctggatgcccatgcaaaagtttgctgcaggggcagggacttcatagagaacctctgctagggaagtgtagaagggaaatgtgggttctgcat

SEQ ID NO: 921679 - DNA, 120 bp, Artificial Sequence
  ENSG00000286731_0 (sequence is synthesized)
ggcaaccagcttgggtctgctcccacgctgttggggcgggggcggggggggggttgttcttttgctccttgggtccacactgcgtttatgagctgtaatattcaccgcaaaggtctgcag

SEQ ID NO: 921680 - DNA, 120 bp, Artificial Sequence
  ENSG00000286731_1 (sequence is synthesized)
cttcactactaagccaacgagaccacaaacccaccaggaggaacgacaattccagacgcgtggctttaacagctgttaacactcaccgcgaaggtctgtagcttcatttctgagtcagcg

SEQ ID NO: 921681 - DNA, 75 bp, Artificial Sequence
  ENSG00000286731_2 (sequence is synthesized)
cgaaggtctgtagcttcatttctgagcccgaacctcagaaggaacaaattccggacacgccgcctttaagaactg

SEQ ID NO: 921682 - DNA, 120 bp, Artificial Sequence
  ENSG00000286731_3 (sequence is synthesized)
cagtgagaccaagaacccactaattccggacacactttgaccagcagagcaggcagaagtaaagccacggttcacagaagtggctgccccggctggacacaggctcaatcttgctggaat

SEQ ID NO: 921683 - DNA, 120 bp, Artificial Sequence
  ENSG00000286731_4 (sequence is synthesized)
gctggaatctgtcctcttactcccctaccccagcccagtgccccaccagcgtgctccactcagcatcctgattttccctggaatgtgccactttgccaccatttccctttcaacagatgg

SEQ ID NO: 921684 - DNA, 120 bp, Artificial Sequence
  ENSG00000286731_5 (sequence is synthesized)
cgacatcaagcagagccagcctgtgtagtcgcaaaggggtcgggtgttcttccactgccgagcaggcaggtgccactacctcgtcctcaactgtcaggagtcccacccacttgggggccc

SEQ ID NO: 921685 - DNA, 120 bp, Artificial Sequence
  ENSG00000286731_6 (sequence is synthesized)
caagccagcggccccaacctgctcttagctccacagggtagcacggaggtcatgtgatttatctggatcctctgcaggaacccttccccagaccacagctttaacagccgatcttcagaa

SEQ ID NO: 921686 - DNA, 120 bp, Artificial Sequence
  ENSG00000286731_7 (sequence is synthesized)
gccagagacaggaggtcctgacaaagggcagtccagctctgcattcatctaacagcaaaagctggttgcacagccacccagggcttccacaggtgcaggctcagcccatcttcaaggagc

SEQ ID NO: 921687 - DNA, 120 bp, Artificial Sequence
  ENSG00000286731_8 (sequence is synthesized)
tcacaccttactccaagatcacttcctcccactgccctcctcagggcaggaccacgttcaatgatctcatgagaatctcagcgctttctaacctatctcattatccctcacaataaccct

SEQ ID NO: 921688 - DNA, 120 bp, Artificial Sequence
  ENSG00000286731_9 (sequence is synthesized)
gtgcagttcatatttttatcaacatgttatagaagaggcccagggaagtccagtggcttgccattgtcacacagctaaaaagtagcagttgccaggcttcaaacccaagtctgtctggct

SEQ ID NO: 921689 - DNA, 120 bp, Artificial Sequence
  ENSG00000286731_10 (sequence is synthesized)
ctgcagtcagcaccattccccatgcagctataatgtattctttgcctttcagctgagggtcttcctccataattctgctcaaaagtcctcaatataagtgctttgtgatatctaccttaa

SEQ ID NO: 921690 - DNA, 120 bp, Artificial Sequence
  ENSG00000286732_0 (sequence is synthesized)
gctctggctccacaccggcacgtcttgcgcggttccccgcccttccccagtagaggattaggagacaaaggaatacactcaacaccaaaactgaaccaaatccactgtgggctttggaaa

SEQ ID NO: 921691 - DNA, 120 bp, Artificial Sequence
  ENSG00000286732_1 (sequence is synthesized)
aatggaatattgggaaaatctcaacaccagccatagccttgagtgaccagaccctcagtctccctgttccctaaattgcagtaattcctccttgacaggattgatgtggtgaagctcact

SEQ ID NO: 921692 - DNA, 120 bp, Artificial Sequence
  ENSG00000286732_2 (sequence is synthesized)
caatgtagcccctgcatcaggagaattcaagcagcacaatatcagtcctcaaccctctgaaagtctcaacagcccaagacaatgttggacacttccttcttcaaactcaatcttccagga

SEQ ID NO: 921693 - DNA, 120 bp, Artificial Sequence
  ENSG00000286732_3 (sequence is synthesized)
tgggtttaaacacatggtgatgccactcaaattgaaatctccagccccacccttcctgaagagctccaggctctggtcaatttcctattcaacatctccacttagcctttctaaaggaag

SEQ ID NO: 921694 - DNA, 120 bp, Artificial Sequence
  ENSG00000286732_4 (sequence is synthesized)
tgcaacagcttacaaaacagtcttcccacatacacccttactccacttacatgcctggaaatctttcccagacctctctgacagggtcgaatgccctttgatatgcagttaccttaccag

SEQ ID NO: 921695 - DNA, 120 bp, Artificial Sequence
  ENSG00000286732_5 (sequence is synthesized)
aacgtcctctgtgtaccttaccctgtatgatcatttgctttattgcccatctcctctaagccagaagctcccgtgcctttctgctctccatgtactagcacagtgcctgctggcgcacgg

SEQ ID NO: 921696 - DNA, 120 bp, Artificial Sequence
  ENSG00000286732_6 (sequence is synthesized)
ttgacgctcaataaataatgattgactgaatgagtgagtggatgaatgaatgaatgatggccaacatttaatttcattctaggattctttttgtattcatgttcataagtcaaattggct

SEQ ID NO: 921697 - DNA, 120 bp, Artificial Sequence
  ENSG00000286732_7 (sequence is synthesized)
gcagtttttccttttcttactgcctttgtctggttatactggtctcataaaatgaaccggtaaatgttccttcttttttcattttctggaacagtgtgtgtaagattggaattatgtgtt

SEQ ID NO: 921698 - DNA, 120 bp, Artificial Sequence
  ENSG00000286733_0 (sequence is synthesized)
agtggcccataggcttagaaacatgtagagtgtgtcccaggcagggggccagccttaaaaaatgccagcccatctcctccatccacgatgacatcaccggtacgggcttgtgtgtaggtg

SEQ ID NO: 921699 - DNA, 120 bp, Artificial Sequence
  ENSG00000286733_1 (sequence is synthesized)
acctttggtggcctgatcctcctgccctctgcctggctccctgggctctggtggaacacagctgcccttcctaatttggtcttaatcaggctgagctaagccagtctgtatttgaggagt

SEQ ID NO: 921700 - DNA, 120 bp, Artificial Sequence
  ENSG00000286733_2 (sequence is synthesized)
tggaagcaggtgattcgggcacaaatttgaaggctgataaacggcagccgtcacccgtgcactcagagcggccagaagtcctgctcctggggaaggaggaagggcgcaagggcaatgagc

SEQ ID NO: 921701 - DNA, 120 bp, Artificial Sequence
  ENSG00000286733_3 (sequence is synthesized)
atgtcgccttgccctcggggtgtgcggtttctgctcagcctcctcttgcagccttgtttcaagtgtgggaatggcctcctgactcccaatccgaaacaactgctgagcacagaaggcaga

SEQ ID NO: 921702 - DNA, 120 bp, Artificial Sequence
  ENSG00000286733_4 (sequence is synthesized)
gcagggccctgagagtcagaggaaaatgctgctgcggggactggggagccccatcgggtgactccccagagatgtgagcaggtgcagaggctggaacaacagtgctgcaggaaagtctct

SEQ ID NO: 921703 - DNA, 120 bp, Artificial Sequence
  ENSG00000286733_5 (sequence is synthesized)
cccgtggatgctgtggcctggggcttgggtgacgacgtgcacggctgcctcctcgctgtcacgtgctctgctggctcgtctccaagctgtgctgctcatgttccaaagtctccctggagg

SEQ ID NO: 921704 - DNA, 120 bp, Artificial Sequence
  ENSG00000286733_6 (sequence is synthesized)
ctttagtgaaaagccctttccccggtgacctggagtgtcttgctagatggagctggccaagcctgacgtcttttcctggccgatgcctcagtccttatgcaaagtgtgaacttggccttt

SEQ ID NO: 921705 - DNA, 120 bp, Artificial Sequence
  ENSG00000286733_7 (sequence is synthesized)
acatccttctccgcagagcactgcaagcagccagtcccactggaacataagatgaagcttttgttcccatggctggatacactttggatcttggaatgcaataattacttcagctggatc

SEQ ID NO: 921706 - DNA, 120 bp, Artificial Sequence
  ENSG00000286733_8 (sequence is synthesized)
tggttcgtggagtacttggccagggctctgcctcatgccatggtcctacaagatatgtgaggaggtggacatctttgcgtagccctcctccagaggcaagtggattccttccataaccca

SEQ ID NO: 921707 - DNA, 120 bp, Artificial Sequence
  ENSG00000286733_9 (sequence is synthesized)
gagaaggccgcttgggaatgaggctgagaagccagactttttggcacacaaagaaaaagggagttttcaaagttgccgcaaatcatgcaggaagagaaaacaggacattagtggacactg

SEQ ID NO: 921708 - DNA, 120 bp, Artificial Sequence
  ENSG00000286733_10 (sequence is synthesized)
attcttcccctctgctgaactctgagtccagtttaaatctttaataacataacacatggagaaaattgcttatataaaatgatcacctttcttttaaaaaaaaaaaattatagagactgg

SEQ ID NO: 921709 - DNA, 120 bp, Artificial Sequence
  ENSG00000286733_11 (sequence is synthesized)
agtgcagtggcttgatcatagctcactgcagctttgaactgttaggctcatatgatccccatgtctctgtctcctgaatagctgggactacaggtggacactaccatgcctaatttttta

SEQ ID NO: 921710 - DNA, 120 bp, Artificial Sequence
  ENSG00000286733_12 (sequence is synthesized)
gacactaccatgcctaattttttagttttttttttttttgagataggatcttgctatgttgcccacgctggtcttgaactcctggtctcaagcagttattctgcctcagcctcccaaagt

SEQ ID NO: 921711 - DNA, 120 bp, Artificial Sequence
  ENSG00000286733_13 (sequence is synthesized)
gctgggattacaggcataaaacaccacactcagccagaagaaattatcatctttctaaaatcaaacttctcttatattctgggaacctactgaggaaggcacagatttatcctctagatg

SEQ ID NO: 921712 - DNA, 120 bp, Artificial Sequence
  ENSG00000286733_14 (sequence is synthesized)
ccagaaggctagaattgggaaagcttcgaagcttaaacagggcaaagcgtaggtcatagaagaatgtattatctattgctatgcaacaaattactctaaaactttaaaaacacaaacatt

SEQ ID NO: 921713 - DNA, 120 bp, Artificial Sequence
  ENSG00000286733_15 (sequence is synthesized)
tattatctctcagtttttctgggtgagaatctgggtatggctttgcttgctgcttctgactcaaggtctctcacctgtcaaggctgcaatcaaagtgtcggcgggggctgcagtctcatc

SEQ ID NO: 921714 - DNA, 120 bp, Artificial Sequence
  ENSG00000286733_16 (sequence is synthesized)
tgacatcaagaggcctgggagctgaggagaaaagactaaggagcctgaggaatggatgtgggtctggaagagagctggaagagtacatggtcctgggagcctcctggggaaagtgcttta

SEQ ID NO: 921715 - DNA, 120 bp, Artificial Sequence
  ENSG00000286733_17 (sequence is synthesized)
agtaggaggcagagaccaactggttcccatggtgccaatgagtcatgtgagataaggactgagagttgacattaggagtggcagtggaggggcatgtagtgactttgactagagctattt

SEQ ID NO: 921716 - DNA, 120 bp, Artificial Sequence
  ENSG00000286733_18 (sequence is synthesized)
ccatgggatgaggagggtgagggaagctgactagtgtgggctcagtttatgctggaggagaggactgggagaataatgctccttcatgttcctcagttatgctgtaaaggggaacgagaa

SEQ ID NO: 921717 - DNA, 120 bp, Artificial Sequence
  ENSG00000286733_19 (sequence is synthesized)
gcagtagccggagaggactgggggaaggggcatctaggtttcatccatgcatctgatgggaatgatcctgcaaaggggaaatgaacaatgcaggcgagagaagcaagccctgctggacac

SEQ ID NO: 921718 - DNA, 120 bp, Artificial Sequence
  ENSG00000286733_20 (sequence is synthesized)
atccttgagtaggcagaagccaatgtctggtgcataggcagagggctggctttaggtgggaaggatgggtgggaagatgagccggcatagaaggggtagagggggcttgcagaagcactt

SEQ ID NO: 921719 - DNA, 120 bp, Artificial Sequence
  ENSG00000286733_21 (sequence is synthesized)
tctgatggtgtctgtctcttcactgaaatgggaagccaggttgtcattgtagccacctcccagtggggcaaagaggagggagtgagatgcctcatgaaaagcaatgcttggggtctggtg

SEQ ID NO: 921720 - DNA, 120 bp, Artificial Sequence
  ENSG00000286733_22 (sequence is synthesized)
tagagtaataactcagtaaatccattgtcttcttgcttacctctaagttatagtgatcacattttccagaccaaatatctgaacctggaatctggcaggtgccttaggggccaatgggtg

SEQ ID NO: 921721 - DNA, 120 bp, Artificial Sequence
  ENSG00000286733_23 (sequence is synthesized)
tgactgattgaaaaatcagaatgtctcagaaacacctagacttttaatttccaaacaacagacatgataagcatccagggcctgtcatgtatattatggaacgtaatgccactttctttg

SEQ ID NO: 921722 - DNA, 120 bp, Artificial Sequence
  ENSG00000286733_24 (sequence is synthesized)
gcccttttccaaagcagatgatatcccagcaccagggaaaatggtttcaatatcaagttgggtcagcagcatctttctacctatttctgtcttcgtggtctttatatttgaaataatcat

SEQ ID NO: 921723 - DNA, 120 bp, Artificial Sequence
  ENSG00000286733_25 (sequence is synthesized)
tactattttatgcattctctccccatcctgcattacagaaggaacgttcctaacaaatgttttatgtttcaactgctaggagattgtatttttgaaataaaattttagttatcctttcat

SEQ ID NO: 921724 - DNA, 120 bp, Artificial Sequence
  ENSG00000286733_26 (sequence is synthesized)
tttttgatcctgtagatacatacaaatttagaaactctgaaagaacaccttaatttatattctgtgcctatgtgggtgagggaagaagaggctgtttggtatatattatatttttaggtt

SEQ ID NO: 921725 - DNA, 120 bp, Artificial Sequence
  ENSG00000286733_27 (sequence is synthesized)
tttaaatctctcttcttttttgcaaatgtgatggaatgtaacatttaccagaaactgagaattcccgaggcagtagccacagcagcaacagtaactctaagctggagatggtctgctctg

SEQ ID NO: 921726 - DNA, 120 bp, Artificial Sequence
  ENSG00000286733_28 (sequence is synthesized)
gtgccagagaggccaacccttgactctactctctcgtgatcaatcagctggaaaatcaccaatccatggtcctcccttcccataagtcacagtctgagtatggcgcctgtggctggaacc

SEQ ID NO: 921727 - DNA, 120 bp, Artificial Sequence
  ENSG00000286733_29 (sequence is synthesized)
cttacgctctcctttggggtgtctgggtaccactctgtctgacccatgctcctgggcattctggaagtcgggactctgccttccttacctgtctgtgcttggaactcagaggatccttgt

SEQ ID NO: 921728 - DNA, 120 bp, Artificial Sequence
  ENSG00000286733_30 (sequence is synthesized)
tatgtagtaggtgtagtggacattggtcagtagggaggcctatcatctttttacaagtgttctagacgttttcccaaccccccactttgtcaaccctgcctttcacactgacatcttttc

SEQ ID NO: 921729 - DNA, 120 bp, Artificial Sequence
  ENSG00000286733_31 (sequence is synthesized)
ccagcctgatttggcacctgcccatcagacaccatgtgagtctgtggctcagaatggggtccgggacgcaccacacagggtgggcatccatgtggaggatgcaggaacagcatggtggag

SEQ ID NO: 921730 - DNA, 120 bp, Artificial Sequence
  ENSG00000286733_32 (sequence is synthesized)
gcagggtggccttgagggcagtaaggccagctttgccattctgtggttcgaggcacagcccagagctgagtccttcaatcctccccgacagaactgtgagatttctcaaactaatcaata

SEQ ID NO: 921731 - DNA, 120 bp, Artificial Sequence
  ENSG00000286733_33 (sequence is synthesized)
ggcatcaggcccaccctcaccgcacaggtggggcctcaggcctgggagcgtgaccgactggcccccagtctttccaccagccaggagtaaggtcgggactagactcctgactcgctgacc

SEQ ID NO: 921732 - DNA, 120 bp, Artificial Sequence
  ENSG00000286733_34 (sequence is synthesized)
accatacctacagccattccctcactctccttcaatgacctcaagtgggggcaaaagagcggctgccatgacctcaaggactctcagatgcatggcaaacggcaggtctgaccgtgccgg

SEQ ID NO: 921733 - DNA, 120 bp, Artificial Sequence
  ENSG00000286733_35 (sequence is synthesized)
aaagggtccaggggaaggctgctgcctccatcctcgggccaggacatgaaggggcatcaacgtcagggcagaaaacaggagcaatgggaggtcctgagtgaatcctgcaacagagaaact

SEQ ID NO: 921734 - DNA, 120 bp, Artificial Sequence
  ENSG00000286733_36 (sequence is synthesized)
cttgcctgcaccctctcctctgtcccccctccaccgccccatctcaatgccacaggctgaaccggagacctgtcttgatgccagagggggccagcaattgcccaaagaatgcggagctcc

SEQ ID NO: 921735 - DNA, 120 bp, Artificial Sequence
  ENSG00000286733_37 (sequence is synthesized)
ccctggtttgttgctgggggcccttaatcccagtgctgtgctggagctggcttgtaacattcaatagaaccaagcgttaaatgtgctcagattttgtgagccagttgtaaatataggcat

SEQ ID NO: 921736 - DNA, 120 bp, Artificial Sequence
  ENSG00000286733_38 (sequence is synthesized)
tattcacaattaatcatatgaacttataatcaaatatgttaacaaacaccccttcccaatgagttttactacttttgctattttctatgctttgagggttacttgcatctattatatcaa

SEQ ID NO: 921737 - DNA, 120 bp, Artificial Sequence
  ENSG00000286733_39 (sequence is synthesized)
tgccgtgggaagagtatatagtgacagctactgggcatctcttcccaagcccacaatctgtgacgtcacattgaaagcttgggattggccatgataggagtatttacaccatggaagttg

SEQ ID NO: 921738 - DNA, 120 bp, Artificial Sequence
  ENSG00000286733_40 (sequence is synthesized)
gcaaacactgcaaatcagagcttgtgttattgttttgttgattttctaggcttaagaaagtaataaaaaattgttaatagtacagattcaacttataagtgggtcatgtctggggccatt

SEQ ID NO: 921739 - DNA, 120 bp, Artificial Sequence
  ENSG00000286733_41 (sequence is synthesized)
tgtagcagtctggctctaatcgggagacagaaatcacacagcaggttaaacaggggaaatttaagttaaaattattaacagttgtaaaacagtaagataggccgggcgcggtggcttatg

SEQ ID NO: 921740 - DNA, 120 bp, Artificial Sequence
  ENSG00000286733_42 (sequence is synthesized)
gcaagactctgtctcaaaaaaaaagagtaagataaaaagaagctctatgcagtatcctagggctgagggagctcccaaagtaaaaatgaagttgtttggggttcagacatagctggagag

SEQ ID NO: 921741 - DNA, 120 bp, Artificial Sequence
  ENSG00000286733_43 (sequence is synthesized)
agagggtgtggttcagccactggatagcaatgaagtttagcccagagcacacagctacagctggtttggagttggtggacacacaataggcaccctctggagggcaggcagggaacaggt

SEQ ID NO: 921742 - DNA, 120 bp, Artificial Sequence
  ENSG00000286733_44 (sequence is synthesized)
gattagtaaccaaaggcgtgaactgcagtgggaaactgagtgcccccagggcagaaggccttctgggtgctgaggttgcttggcgggtggagaggttgcagaggaagtggcaggctgcgt

SEQ ID NO: 921743 - DNA, 120 bp, Artificial Sequence
  ENSG00000286733_45 (sequence is synthesized)
agtgaggtcggaggccagctgctgtgtagacagtcaccgccaggcatggccacagagtcattgtgttctggctctgaggctccgtccgactccacgggatagtctccgcttggctgacct

SEQ ID NO: 921744 - DNA, 120 bp, Artificial Sequence
  ENSG00000286733_46 (sequence is synthesized)
cacatcctgttcactttaaattcaaaatggttaaaaggttccaatctttgtcctaaagcacatattgaaaggtgcattcagagctgagatgcaatagattaaaaactgcctgtgtgagtt

SEQ ID NO: 921745 - DNA, 120 bp, Artificial Sequence
  ENSG00000286733_47 (sequence is synthesized)
tcctgtggctgctgtaacaaattaccaaaaacctggtgcttacaacaaggcacatttgttctcttacagttttggaggtcagaagtcccaaatcagtttcagcaggatggaatcagggtg

SEQ ID NO: 921746 - DNA, 120 bp, Artificial Sequence
  ENSG00000286733_48 (sequence is synthesized)
ccatgagggccgctccctccagaggctccaggggggtctgtttccttgccttttccagcttctagagctgcattccttggctcgtggccccttcctccgccttcaaaggcagtggcttag

SEQ ID NO: 921747 - DNA, 120 bp, Artificial Sequence
  ENSG00000286733_49 (sequence is synthesized)
cgtcttcaaaattctctccacgctgtcttctcatggccttctcttctatgtcagatttccctctatcctctcttatcaggacatttgtgattgcatttgggacccacccatgtaatccag

SEQ ID NO: 921748 - DNA, 120 bp, Artificial Sequence
  ENSG00000286733_50 (sequence is synthesized)
gataatgtctccttctcaagatcctcaactcaatcacatctgcaaagtcccttttgccacataagatacatttgcaggcttcatagattcagatctgcgtatattatttgagggccatta

SEQ ID NO: 921749 - DNA, 120 bp, Artificial Sequence
  ENSG00000286733_51 (sequence is synthesized)
tttaacctactacactgatgcacccctatattgtgacaagcaaaaaaattgaggatttattcttccagtgcttaaaaactgtggcctgattgattcagcaaggaagtcacttgtgacatt

SEQ ID NO: 921750 - DNA, 120 bp, Artificial Sequence
  ENSG00000286733_52 (sequence is synthesized)
gatgaataagtgaacttctgatattcgccttcattgtctcacttttacttgttaacataaatgaaaatatcagcctcatgagaatgaaacgaaatgaaaatagccaaccctcatgtgtaa

SEQ ID NO: 921751 - DNA, 120 bp, Artificial Sequence
  ENSG00000286733_53 (sequence is synthesized)
agcacacttagtcatcatatgcaaacagacataggctgtagatacaagagtttggaaaaactcaacaaaggcattctgtgaggatcaaccaactatatgcagcttataataaaggatatt

SEQ ID NO: 921752 - DNA, 120 bp, Artificial Sequence
  ENSG00000286733_54 (sequence is synthesized)
ataaaggatattgtatcattatgttttgttgtacattctttatatcagtaacatttataataaattatctcttcatttatatgtgtatgtacaccccacacacacacacacacacacaca

SEQ ID NO: 921753 - DNA, 120 bp, Artificial Sequence
  ENSG00000286733_55 (sequence is synthesized)
cacacacacacaatctttccctccagagggccagctgttgagcatttatcagcccaccactgcttaatacttatttccagtagggaggtagagggagcctaaggcccccgaaaaggtaaa

SEQ ID NO: 921754 - DNA, 120 bp, Artificial Sequence
  ENSG00000286733_56 (sequence is synthesized)
gtgctctttgcacctgagggtggaccttgcagtcccgagctctatggtgagcctgtcacccaccgtggtcagctacctccatccacagatggttaaatggatctggatcaaccacctccg

SEQ ID NO: 921755 - DNA, 120 bp, Artificial Sequence
  ENSG00000286733_57 (sequence is synthesized)
ttcccagggataggctatcccagcaggaccgcagcacctgctgatgcccctgcagctgccagatcctgggaggtggcatcactgtgcctgccattaaggtggacgtgaggcaggacttca

SEQ ID NO: 921756 - DNA, 120 bp, Artificial Sequence
  ENSG00000268170_0 (sequence is synthesized)
cagcatcaacataatgcggtcaccagtggggagtgttttgcccctggcccactcagccccatagatggccgtgatgaagccactcccaaggatgccagtgatgcactctattccggagac

SEQ ID NO: 921757 - DNA, 120 bp, Artificial Sequence
  ENSG00000268170_1 (sequence is synthesized)
caccaaagtgaaggtgaccttgaacttggatatgtctttatctgtggcatctgtgttcaccgttgccattctctttgatcctgactttcaggtttctgcgccaagaatgggtaactgctc

SEQ ID NO: 921758 - DNA, 120 bp, Artificial Sequence
  ENSG00000268170_2 (sequence is synthesized)
tgcaatcttctgacccttgctcaatgttataatttctgccgccctcattaatggttatttccaatttttctccatttgtttatcacatgactacaagttagaggcttcacatgcaaataa

SEQ ID NO: 921759 - DNA, 120 bp, Artificial Sequence
  ENSG00000268170_3 (sequence is synthesized)
tgagaggatctggttactgggtctgtctcaatttttcataaagatacatttgtcttgggctttcagaagctcactggaaataatttgagacatgtttctagctcaacaccttcttacctt

SEQ ID NO: 921760 - DNA, 120 bp, Artificial Sequence
  ENSG00000268170_4 (sequence is synthesized)
atttactttaagtccacatttacctgataagcaatgaatacaaggcctttttacttgtctcacaagatctctgttacctgctaaattatttgtaaaagctcatacagcttttaaaatctg

SEQ ID NO: 921761 - DNA, 120 bp, Artificial Sequence
  ENSG00000268170_5 (sequence is synthesized)
ttttccccacttcttttcttgtctctcttattttgggagagagttttattttgatagttaccatgtttgtgaataagaaattcccataagctcatatatgaacatcttttacttagaatt

SEQ ID NO: 921762 - DNA, 120 bp, Artificial Sequence
  ENSG00000268170_6 (sequence is synthesized)
gagtttcttccaaaaaggcctgctattataatgtcctcgaatagtatatagaaaagccaaaattggatgctattcgagttggagagaaggaagtctccatagtcccagtttttattgttt

SEQ ID NO: 921763 - DNA, 120 bp, Artificial Sequence
  ENSG00000268170_7 (sequence is synthesized)
gtgtatgtgtcatcaatttcagcttactgagatcccacatgactatttgagctcagaatcaggtagaatgagcctggggagaattcagtgttctggacatggtgttgaagtttggaaatg

SEQ ID NO: 921764 - DNA, 120 bp, Artificial Sequence
  ENSG00000268170_8 (sequence is synthesized)
tgataaggtactatgacttgaaatttaatttcctactttttaaccctggctgtgaaccagaatgaactctggcactttacaagaatatgtagatgcccaggactcgtccaaatctaggaa

SEQ ID NO: 921765 - DNA, 120 bp, Artificial Sequence
  ENSG00000268170_9 (sequence is synthesized)
atcagaactggactagggctcaggcatgctatcttttaaaaaagccgaaaggtcttgttgctcatagtcaggattgagatccaaaatcttagctggaaaccaatgagccttgggtcagat

SEQ ID NO: 921766 - DNA, 120 bp, Artificial Sequence
  ENSG00000268170_10 (sequence is synthesized)
ttggcctgtagtcattttaccttgcattggttaatgctgtacagcattaatccaccagtgtgtaacttttctttttgaggggttctattggcaaacatttaaacttaggagattacttat

SEQ ID NO: 921767 - DNA, 120 bp, Artificial Sequence
  ENSG00000268170_11 (sequence is synthesized)
atgcatgcacaaaaaatctatcttctcttgaaaaattagaagatttggcagtattgggtcttcatagtgaactggctgaagctgagtaatggctgcccattttaaacaaggtatatactt

SEQ ID NO: 921768 - DNA, 120 bp, Artificial Sequence
  ENSG00000268170_12 (sequence is synthesized)
ttcagtttgttgacaatactaattcctagtgtcttcttgacacagaagctgagtgccagttatcattttccagtgtgcttaccctgttatttttatttgattatttttctttttgagact

SEQ ID NO: 921769 - DNA, 89 bp, Artificial Sequence
  ENSG00000268170_13 (sequence is synthesized)
atcatggctcactgcagccttgacctccatagctcaggtgatccccacacttcagccaacacacctggctaagttttgtattttttgta

SEQ ID NO: 921770 - DNA, 82 bp, Artificial Sequence
  ENSG00000268170_14 (sequence is synthesized)
actacagatgcatgccaacacacctggctaaggctaggctgatcttgaattcttgggctcaagcaatcctcccatctcagcc

SEQ ID NO: 921771 - DNA, 120 bp, Artificial Sequence
  ENSG00000270332_0 (sequence is synthesized)
gaaggctggaatgtcacagaataaggtgtgtctagggaggggtgctttctctttagtggatagcaccttctggctctgtcctcgcatggtggagaggcagaggccctcgcttgggcctat

SEQ ID NO: 921772 - DNA, 120 bp, Artificial Sequence
  ENSG00000270332_1 (sequence is synthesized)
tttataaggaccttaatcccattcctcacttcccaagatgccacttgctaaaaccgtcagttcgggagttaggatttcaaaatgtgcattttgagggacacatttagaccatagcgtagg

SEQ ID NO: 921773 - DNA, 120 bp, Artificial Sequence
  ENSG00000270332_2 (sequence is synthesized)
gaatgggcttatattttgaaaatatttctcgataagggagtaaaataagttgtatgggttttttgtttaagaaaggattcctttgtttactctggtatgcttatccacttctgtgatgtc

SEQ ID NO: 921774 - DNA, 120 bp, Artificial Sequence
  ENSG00000270332_3 (sequence is synthesized)
aaccatgggtagtgacctaacattaatttaattcaacagatatctttgtctgccttgattcctgcatcccctgggctccacagctattcacttgtattgattctgttaactcttacacat

SEQ ID NO: 921775 - DNA, 120 bp, Artificial Sequence
  ENSG00000270332_4 (sequence is synthesized)
taactttgagctgtgtctccttccttttatcattttgtgagtaaagaattttaatttgccaacaaatcctaatgtggactttgtcacgttgtgaaataaagtgattttttggtatggaaa

SEQ ID NO: 921776 - DNA, 120 bp, Artificial Sequence
  ENSG00000270332_5 (sequence is synthesized)
agtaccagcaaggacacacatacagccacaaagcaagacctaggagaaatatttggtgctctactctcctagggaactggaaggaacctgctctctcctgggtatacttttctaatttta

SEQ ID NO: 921777 - DNA, 120 bp, Artificial Sequence
  ENSG00000270332_6 (sequence is synthesized)
gagtgctaaagaagctcttctcacagggacccgagtgaatcctttctccttggaacaaaggacaagaaaaaaagaaaggactttaccgcagaaatgatgaagatcatgtctccaagtctt

SEQ ID NO: 921778 - DNA, 120 bp, Artificial Sequence
  ENSG00000270332_7 (sequence is synthesized)
ttctgccgttgccagtattctctcccaatctcctgtgggcaacttcttcgggaaaacactcatgcaatttcataaggacaagcgaaaatatgaagaagctggatcttggaactaggcttt

SEQ ID NO: 921779 - DNA, 120 bp, Artificial Sequence
  ENSG00000270332_8 (sequence is synthesized)
gatcacagagcggagctgagatgaaagtccatccactcattcaacaaataattgagtacttacaaaaatttctgctgtatggagcttatatagtagtgaatatcaattcttattttatgg

SEQ ID NO: 921780 - DNA, 120 bp, Artificial Sequence
  ENSG00000270332_9 (sequence is synthesized)
attataaaacagaactttttgcaacaattttacactaccctaggggtacctatgagtcttcatgcctcaagtaattgtcctgtccatgtgactatggaagccctgaaatctttgaaaccc

SEQ ID NO: 921781 - DNA, 120 bp, Artificial Sequence
  ENSG00000270332_10 (sequence is synthesized)
cagatgacccatttcaccagacgcttggacattctccgtcgagtttggatttatagtgggtacccagatttaggtcaaggacataaaatctgaaccactttaggcactgctcataaggag

SEQ ID NO: 921782 - DNA, 120 bp, Artificial Sequence
  ENSG00000270332_11 (sequence is synthesized)
taaattcctagtgaaaaagcaatgtccctcaggaatgattgctatagcaggctaaaaggtagatttataaatgtttataaaaagcagattggatttagcagaggtagcagtgatgaccag

SEQ ID NO: 921783 - DNA, 120 bp, Artificial Sequence
  ENSG00000270332_12 (sequence is synthesized)
gagcaataggaggaaatgttcttaatagtgctgtttggtggcatcttctttttatacaaagaagtcttgcaagcatttctacttgaatgactaatttggagtaatttttagtttctgtat

SEQ ID NO: 921784 - DNA, 120 bp, Artificial Sequence
  ENSG00000270332_13 (sequence is synthesized)
ttttattagttaataggatctaggaatataataacctggtgagaatttcttcgtgaatggcaatcaaatttgtcttattcatgaaactcataaataagctataatccagcattttataac

SEQ ID NO: 921785 - DNA, 120 bp, Artificial Sequence
  ENSG00000270332_14 (sequence is synthesized)
tagggaaaataaaactggggtcctgctgtttaagaggctaaggcaatttaacagaacactgggggatttatagtagatttatgatgaagatacattctaactggaagcttaattgtgatt

SEQ ID NO: 921786 - DNA, 120 bp, Artificial Sequence
  ENSG00000270332_15 (sequence is synthesized)
gttttctttttagggggaaatctttagagagttagagtgtgcttgtttaaagaggaaacagaccaaatgagaaaacagattgcattttctgtttttcttttaaaatttcaagctgcttta

SEQ ID NO: 921787 - DNA, 120 bp, Artificial Sequence
  ENSG00000270332_16 (sequence is synthesized)
agtcaaattgcccctgagttcctgatgatggctgtggtgaaattgccttgttttactttcttgccttcttttccagagcagttattttacctgaaaataacaaaaagatataggcagcat

SEQ ID NO: 921788 - DNA, 120 bp, Artificial Sequence
  ENSG00000270332_17 (sequence is synthesized)
atcagccagaaaactaatatggaaaccagagataaagtatactcaacctgcctagaattgtgacatcctataattttaggctgagttgtataaaattagcaagtaatatggatgaaaggg

SEQ ID NO: 921789 - DNA, 120 bp, Artificial Sequence
  ENSG00000270332_18 (sequence is synthesized)
cctttgaaaaatttttgccactcattttgcaaatgggaaaattgaggcttctagtggttttcctaaattttttatctcaagtactttaaggtctcatgaggaaataaaatttatgtacaa

SEQ ID NO: 921790 - DNA, 120 bp, Artificial Sequence
  ENSG00000270332_19 (sequence is synthesized)
ataattttaattaaaagtataaaaagttgtttccctgaaaaataaaacttaaaacagataacaaaaggttgattctgtaaggaggatttctattgggaaaaggacagttagatttgacag

SEQ ID NO: 921791 - DNA, 120 bp, Artificial Sequence
  ENSG00000270332_20 (sequence is synthesized)
cccagatgcttactctctaacatttccctaccccttggcagaatccttcaataattaacaccaggacaaccacatagacttcagccatgggtgtgtcaggggcatttgaaccagagcaac

SEQ ID NO: 921792 - DNA, 82 bp, Artificial Sequence
  ENSG00000270332_21 (sequence is synthesized)
taaaataatatggtacgaaagtaacctctggtagtcttcactgctcattatgtgctaattataatgcattagcatgctaaaa

SEQ ID NO: 921793 - DNA, 120 bp, Artificial Sequence
  ENSG00000270332_22 (sequence is synthesized)
agcatgctaaaagacactcctaccagtgccatgacagtttacaaatgccatagcaatgtcaggaagttatactatatggtctaaaaagaggaggaactctcagttctgggaattgcccac

SEQ ID NO: 921794 - DNA, 120 bp, Artificial Sequence
  ENSG00000270332_23 (sequence is synthesized)
ctctttcctggaaaactcaggaataatacaccccttgtttagcatataatcaaataactataagtataatcagtcaagcagcctatgccactgctctgtctatggagtagccattcttct

SEQ ID NO: 921795 - DNA, 120 bp, Artificial Sequence
  ENSG00000270332_24 (sequence is synthesized)
attttaatttgccaacaaatcctaatgtggactttgtcacgttgtgaaataaagtgattttttggtatggaaatatgtgttaagacagactgttagtctttgcactttaacaactagctg

SEQ ID NO: 921796 - DNA, 120 bp, Artificial Sequence
  ENSG00000270332_25 (sequence is synthesized)
atacacttacgtcacatggatgaaaacatacacaagtgcactgttgttggataaggactcctgggtggttagaagaatgtgcagatctaactactcccattaagaccattgattaaaatg

SEQ ID NO: 921797 - DNA, 120 bp, Artificial Sequence
  ENSG00000270332_26 (sequence is synthesized)
aaaaatgcttataaaggtggagatctctcagttttagtcttattgcgtgccagaagcactaaggaattgctgctaaatataagacaaatggacttgaggaaatcactgatgactaacttg

SEQ ID NO: 921798 - DNA, 120 bp, Artificial Sequence
  ENSG00000270332_27 (sequence is synthesized)
tgtggactcaccccaaattctttcttgcatgaggtccaagaaccctcacttaaagtcttgatcaggacccttttctggtaacatcttcctggtgaccacaatgagattaaactaaggaga

SEQ ID NO: 921799 - DNA, 120 bp, Artificial Sequence
  ENSG00000270332_28 (sequence is synthesized)
ctccctacccaaaagaaatagattagatcaccaattgtatgactttgggtaagtgataggaaccattttacctggttaaaggatggaattgggttagaggcccaacttaggagagttaga

SEQ ID NO: 921800 - DNA, 120 bp, Artificial Sequence
  ENSG00000270332_29 (sequence is synthesized)
gcctctcctaagacagagagcttaaaggcccctcttaataaaaggcaaggacgcttgatggaacttaggttcaaggcccaaactaggaaggttagagtccttcctaagattaagggggtt

SEQ ID NO: 921801 - DNA, 120 bp, Artificial Sequence
  ENSG00000270332_30 (sequence is synthesized)
agaagctcctctcagtaaagtccttcttggttaaaaatggatttcacattatgggatattaaccattattctctttgtattaatctgccttgcactgtttgctgatgtctgtgggtgaca

SEQ ID NO: 921802 - DNA, 120 bp, Artificial Sequence
  ENSG00000270332_31 (sequence is synthesized)
ggattaggtgtatataggatcactggatatggggagcattttctccctaaaggggaaatttgagagctgatgagacaattggccacctgaactttagattcagtgttgctgcaatggatc

SEQ ID NO: 921803 - DNA, 120 bp, Artificial Sequence
  ENSG00000270332_32 (sequence is synthesized)
ggtcttgtctggcctccctgagctcctcattttcctcaccctgctgcaggcaatgcttttctccctttctttctttcctttctcttttctatcttttctgttactcagggcaactgtcta

SEQ ID NO: 921804 - DNA, 120 bp, Artificial Sequence
  ENSG00000270332_33 (sequence is synthesized)
cggtttcagtttgcccagaaaccacatgtggaaactcctggtcagaagatcattccacaccaatttgagtggatcaaagatgaaaaggcccaactagaatcatgtttgagccttcccagt

SEQ ID NO: 921805 - DNA, 120 bp, Artificial Sequence
  ENSG00000270332_34 (sequence is synthesized)
tggctggtttggaagatgttaattgggttaccccatgcaatctcttgggtgacatcttgcaaaattgagaggcttttgcctatggtttcatgaaatggaaaaaggtgattttcctttgtg

SEQ ID NO: 921806 - DNA, 120 bp, Artificial Sequence
  ENSG00000270332_35 (sequence is synthesized)
ttgtggtttggcccctagggctatggtgccacaagacaggtcactagggctgctcagggaaagggaacccagaagcctggcatgccagcaaaagggtaagaatttcttaccattcagact

SEQ ID NO: 921807 - DNA, 120 bp, Artificial Sequence
  ENSG00000270332_36 (sequence is synthesized)
tctggcctctctgtgcaaacgagttataggaatggtaaacatccctctttattcctgtgtaaagttttaattaataggaaaaagaattttcccattaagttagtcttaagctgtagtgaa

SEQ ID NO: 921808 - DNA, 120 bp, Artificial Sequence
  ENSG00000270332_37 (sequence is synthesized)
tttgctgtactttgtgctataaatttgtctttccagattgttctgtcagaaggagggttaccttaggatagaatacaggcttaagcccccatttggtggttaatactgagtatcaaattg

SEQ ID NO: 921809 - DNA, 83 bp, Artificial Sequence
  ENSG00000270332_38 (sequence is synthesized)
ggtggactgggagaggctgacccaccctcaatctggatgggtaccatctattcagctgccagcttggctaggataaaagcagg

SEQ ID NO: 921810 - DNA, 120 bp, Artificial Sequence
  ENSG00000270332_39 (sequence is synthesized)
ccatctattcagctgccagcttggctaggataaaagcaggcagagaaatgtggaaagactaaactggctgagtcttctggcctccatgtttctcccatgctggatgcttcctggccttga

SEQ ID NO: 921811 - DNA, 120 bp, Artificial Sequence
  ENSG00000270332_40 (sequence is synthesized)
acatcagactccaagttctttagtttaggattcttggacttaaaccaatgatttgccagtggctcttgggtcttcagctacagactgaaggctgcactattagcttccctacttttcagg

SEQ ID NO: 921812 - DNA, 120 bp, Artificial Sequence
  ENSG00000270332_41 (sequence is synthesized)
gatggcctattgtgggacttcaccttgtaatcatgtgagacaattctcctaataaatttcccattcatttattcatctatctgctagttctgtcccttcagagaaccctgactaatacac

SEQ ID NO: 921813 - DNA, 120 bp, Artificial Sequence
  ENSG00000270332_42 (sequence is synthesized)
ctgctagttctgtcccttcagagaaccctgactaatacaccctataagactgctgttcaagacagcccatcaaactggtcacttacaaactttgcttcagatccctgaaacaaaacaaaa

SEQ ID NO: 921814 - DNA, 120 bp, Artificial Sequence
  ENSG00000270332_43 (sequence is synthesized)
caaaacaaaaacaaaactgaagttcccctcttgtcttgttttatgttcttgggagcttgaccttataaccatgtggcagtacttcctctttgtctctgccattcagagaacaggaacttt

SEQ ID NO: 921815 - DNA, 120 bp, Artificial Sequence
  ENSG00000270332_44 (sequence is synthesized)
ggggttcatatcatagttagccctaaaaattatattgagcagttaaaaggctttgcaagctcaaaattggctgctctagactccttctgggaagggcaatggagactgcccagtgccgta

SEQ ID NO: 921816 - DNA, 120 bp, Artificial Sequence
  ENSG00000270332_45 (sequence is synthesized)
gaacaacttctgacttcctttcttgaattttcctttttctgagtacctgggaggttacctttggtaaagttcaaaagctacaagtatttgctgttttgcctggctagagtctgataatga

SEQ ID NO: 921817 - DNA, 120 bp, Artificial Sequence
  ENSG00000270332_46 (sequence is synthesized)
gattttttttttttaaaagaatgctatggttaaaagtcagcttaattaaaagtggatattcaagctctaacagcctgggactccttgggaaaaacaggaggcactacagaccctgtttga

SEQ ID NO: 921818 - DNA, 120 bp, Artificial Sequence
  ENSG00000270332_47 (sequence is synthesized)
ggaaaaacctctgctttcttcatgaaaacccagaaattgaaatcagatagatccctctcaaaatctaaggctctcctctgttttgcactgtgatgtctgacagtattgacttttaggggt

SEQ ID NO: 921819 - DNA, 120 bp, Artificial Sequence
  ENSG00000270332_48 (sequence is synthesized)
tggtgtgtaataactaggtaggaaatatacttttggggatggctaatggcagttatagggagatacttggcattttgcatgtttggattagagaatcatgttcttggccacctagaaagt

SEQ ID NO: 921820 - DNA, 120 bp, Artificial Sequence
  ENSG00000270332_49 (sequence is synthesized)
tagagaatcatgttcttggccacctagaaagtatgaaaatgtccccattccccactgagagatgagactcctatgggagatgggttgattccctcttttttaaaatttaactttaagttc

SEQ ID NO: 921821 - DNA, 89 bp, Artificial Sequence
  ENSG00000270332_50 (sequence is synthesized)
gatgtgcaggtttgttacataggtaagcatatgccatggaggtttgctgcacctatcaacctatcatctaggtattaaacctccccgac

SEQ ID NO: 921822 - DNA, 120 bp, Artificial Sequence
  ENSG00000270332_51 (sequence is synthesized)
ttgctgaggataatggcttccagcttcagccatgtccctgcaaaggacattatctcattcctgattccctcttttctttggggatccaggatctaatataaaaatgagacccttaatttt

SEQ ID NO: 921823 - DNA, 120 bp, Artificial Sequence
  ENSG00000270332_52 (sequence is synthesized)
ttttggggctctgctttgccttccagctgtgcctgcttattaggccctggaaactgcatgctttcccagtcctgttcctccaagggctccaccctaaagccagcaatccaattaagaaac

SEQ ID NO: 921824 - DNA, 120 bp, Artificial Sequence
  ENSG00000270332_53 (sequence is synthesized)
ttaatggattgtaagcaaatggaaaatcttccaagtactggattttctgtctgtctgcatatttacatgtgttgtgtgtgtggtgtttatatataaaagagctctgattaattggtttaa

SEQ ID NO: 921825 - DNA, 120 bp, Artificial Sequence
  ENSG00000270332_54 (sequence is synthesized)
ttaaagataataggcaattaaatcaaatattatcagaaaaataaaaacaaatgccttttacttcacgtgactttaataatctttaggaattagagacagttttaaagattattggtaaaa

SEQ ID NO: 921826 - DNA, 120 bp, Artificial Sequence
  ENSG00000270332_55 (sequence is synthesized)
gacatttggtctaaattgcgccagtcagatttaggtttgccaaatgctttaatatcataaagtgcttttttaacttgataattgttcaacttacctgctttggagccattagattccagg

SEQ ID NO: 921827 - DNA, 120 bp, Artificial Sequence
  ENSG00000270332_56 (sequence is synthesized)
taaggcatgggaacatgtggagttagccatgcccccggctatgctgaaaaaggaccttatctggacttatgtctagtgtcttaggctccacacctgatagataattaaaatccttactta

SEQ ID NO: 921828 - DNA, 120 bp, Artificial Sequence
  ENSG00000270332_57 (sequence is synthesized)
ccagatttttcaccaaaaataaaagttgctcagttagcattgtaacgtttaattgagtctactgaataagcagttttacatacaaggtgtgtaaggacagtgacgtgtttttggtaaaaa

SEQ ID NO: 921829 - DNA, 120 bp, Artificial Sequence
  ENSG00000270332_58 (sequence is synthesized)
attataagaaggcatgggaatacggatttttttggcctagtttagaggcttaaaaacttttttcaagctagatagaaaaaagctgaaggtttaaacaagttgtggaaggtttgtgaacaa

SEQ ID NO: 921830 - DNA, 120 bp, Artificial Sequence
  ENSG00000270332_59 (sequence is synthesized)
ttaatcttataaaagaaattctgtgtgtgaacatattagctaaaattaaaggaggtattattcagtttttttcataaattgaacattggaataaaagcacaacagggttttcttagagca

SEQ ID NO: 921831 - DNA, 120 bp, Artificial Sequence
  ENSG00000270332_60 (sequence is synthesized)
gtgatctactctttaagaaaaaattgtaaagggttataaaaggtttatgagaatcttaccttatgatctaactgattaagattggatagattagtctataaggttttttttttaagaatt

SEQ ID NO: 921832 - DNA, 120 bp, Artificial Sequence
  ENSG00000270332_61 (sequence is synthesized)
aggtttggcatcaatactgcattaatgcaaaggtgaaatttggctttctctgttgaacaaggttttcatgttatattaaaaaatacgaaaatgtttttgtttgccttttaaataaactat

SEQ ID NO: 921833 - DNA, 120 bp, Artificial Sequence
  ENSG00000224897_0 (sequence is synthesized)
aggtacatgtgcaaggaatatatgaaaaagaatgttatactggaggactttctctttggaattgctgtgcaaataaggtcactgggtaataggatgtaaagaggagttctcaaaacaacc

SEQ ID NO: 921834 - DNA, 120 bp, Artificial Sequence
  ENSG00000224897_1 (sequence is synthesized)
tcacagacccagaataatcaaaacaattgaagacttaacttcaatttcaaaacttaccacagagcaagagtaatcaagacagtatggtacttccctaaggacaaacatatatgaatgaaa

SEQ ID NO: 921835 - DNA, 120 bp, Artificial Sequence
  ENSG00000224897_2 (sequence is synthesized)
gagaaaccagattttggaaattttaaagagtgtcaagaccattcagcaaggaatgaatagtcttttcaacaaattgtgagacaatagatattcacatgcaaaaaatgtacctggactcct

SEQ ID NO: 921836 - DNA, 120 bp, Artificial Sequence
  ENSG00000224897_3 (sequence is synthesized)
cagtgattatccctaacttgccctgcaggaagaccaaattgaacaactatccacaaaggaaagcaccatcatatgaggcaaaaatcagatatgtcctgagagtttctgaagttatttaac

SEQ ID NO: 921837 - DNA, 120 bp, Artificial Sequence
  ENSG00000224897_4 (sequence is synthesized)
tggttcaatgagaatttaatcaaggtctgctttatatcaaaatttatgatttttattcaatgccatacatagaatttgttcacagttatcatcaaacacactcatcctttttgtgccaag

SEQ ID NO: 921838 - DNA, 120 bp, Artificial Sequence
  ENSG00000224897_5 (sequence is synthesized)
atggagaacctggctgagaagatatgtacctataaaaaggtccacttagaggcaactctttacattgactacaaagataaagaacaatgagcaattaaagaacattggttttggggaaaa

SEQ ID NO: 921839 - DNA, 120 bp, Artificial Sequence
  ENSG00000224897_6 (sequence is synthesized)
tgggcatagtcgcttgttctccgcccgcggtggaccagctgcgtaacggttcacacactgatggcgcctggaggtttggcgaaatactgacaggatgcgacgtcaacgggagcgcagggc

SEQ ID NO: 921840 - DNA, 120 bp, Artificial Sequence
  ENSG00000224897_7 (sequence is synthesized)
caagataccctttatatcaaaccgtctatcctggagcagaaaaatcctgtcttcattgctatagctacagattcagaaatgagcatgtaacaaattcaggccaaagagaggcaatggaaa

SEQ ID NO: 921841 - DNA, 120 bp, Artificial Sequence
  ENSG00000224897_8 (sequence is synthesized)
tcagagaaacactgttcctgaaagcttctgtcactcaagaatccatgaaacattcatgaacttcacatcagattttaatgcaacttgttacacaagatgaacccaaacatatttgacttt

SEQ ID NO: 921842 - DNA, 120 bp, Artificial Sequence
  ENSG00000224897_9 (sequence is synthesized)
ctcaggcagatcaattttagaaagagaacattgacttggaaaactgaagagtaattattctaaaacggttgtaacagtttactccttttatgtttgcaaacttccaggattagtgagttg

SEQ ID NO: 921843 - DNA, 120 bp, Artificial Sequence
  ENSG00000224897_10 (sequence is synthesized)
tgcaaaagtaattgtggtttttgccattaacaaaaccgcaattacttttgcatcagcctaatataagtgaataaattaatattagaacacaggtctaattaaaaggttctgctgtgttgt

SEQ ID NO: 921844 - DNA, 120 bp, Artificial Sequence
  ENSG00000224897_11 (sequence is synthesized)
gtctaattaaaaggttctgctgtgttgtgtcctgtgataacacagaaaacaaacaaatggataattacagaaaaattttggatataaaattagcaggtaattttctccctcctttccttc

SEQ ID NO: 921845 - DNA, 120 bp, Artificial Sequence
  ENSG00000224897_12 (sequence is synthesized)
gctgttatttgttctggatattgaacagtgacaaggattcagtgggagagaaagaggcgaggattttaatgcaacttgttacacaagatgaacccaaacatatttgactttttattttca

SEQ ID NO: 921846 - DNA, 120 bp, Artificial Sequence
  ENSG00000224897_13 (sequence is synthesized)
tctgtcactcaagaatccatgaaacattcatgaacttcacatcagaaataaaatccagtgagattcaacaaattgtcaagttacacacttctgaatgacagatttgggaccagaagctag

SEQ ID NO: 921847 - DNA, 120 bp, Artificial Sequence
  ENSG00000224897_14 (sequence is synthesized)
acctcagaatcctctgtttcctcggggtgctcagcagcttggagtcctgcaacagattcttcttttcctgaataagtcattttcagagtcatctggatttttagaatcagatgaatcctc

SEQ ID NO: 921848 - DNA, 120 bp, Artificial Sequence
  ENSG00000224897_15 (sequence is synthesized)
cactaaagccaagttcacagtgtcatctgtcccttcctgaaaattgactattgacacctggctgatattgaaactccagttcctcatcaattttcttgtcttcttccccttttcagaagt

SEQ ID NO: 921849 - DNA, 120 bp, Artificial Sequence
  ENSG00000224897_16 (sequence is synthesized)
aagatattgatttttgatctcctgtaacaagacggccagtttgttctttcttttctacacccatgtctaaagaatgtttactttctttcttcattacctaagtttgctaattacaaattg

SEQ ID NO: 921850 - DNA, 120 bp, Artificial Sequence
  ENSG00000224897_17 (sequence is synthesized)
ctaggtccaagattgttgtctgtgaagactgaacacttcaccctgtgaggataggactcccatggtggtgctcatcattttgggatctggaaggaaaacgctaaacctacttgtggttct

SEQ ID NO: 921851 - DNA, 120 bp, Artificial Sequence
  ENSG00000224897_18 (sequence is synthesized)
tagcagtgttgccagcagcctgccatctgccagggctgaagtagcccactcgagaatgctcttcacaattcattcatttttaaggggttataaaaaaaaatcatgtaaaggaaaaggaaa

SEQ ID NO: 921852 - DNA, 120 bp, Artificial Sequence
  ENSG00000224897_19 (sequence is synthesized)
ttctgtcactcaagaatccatgaaacattcatgaacttcacatcaggaccccagttattccagctgttaaatggagtggatcaaaaggctgattaaatgtaacggattccaaagaatggc

SEQ ID NO: 921853 - DNA, 120 bp, Artificial Sequence
  ENSG00000224897_20 (sequence is synthesized)
tggcacatagtaagtaccatataattagacttaaactgctaagattaattatattttttattatttaaaaatctataaaactctacctattaaattagcatggtattcagtctttttcaa

SEQ ID NO: 921854 - DNA, 120 bp, Artificial Sequence
  ENSG00000224897_21 (sequence is synthesized)
gagttttattccaaatatagttctgaggatatccagggttacttatatttgtaattgaatcagttttctcatggtctcctgggataacctgccaggaaattaagtgtcctgattaggcta

SEQ ID NO: 921855 - DNA, 120 bp, Artificial Sequence
  ENSG00000224897_22 (sequence is synthesized)
ggccgtctgatctcatttcccttcatccttccggcctcattctcaggacagaacaagacaagccattaaccctgaaacccagtggttcccacatgacggccacttctgatacttgtttat

SEQ ID NO: 921856 - DNA, 120 bp, Artificial Sequence
  ENSG00000224897_23 (sequence is synthesized)
ttatgtggataaacatggttccttgaggaatgaataataatactcttttcggtataatactcagggagggcgacagagacgtcccttgtgttataactttttatagttaatcatcgtcaa

SEQ ID NO: 921857 - DNA, 120 bp, Artificial Sequence
  ENSG00000224897_24 (sequence is synthesized)
gtctttggtgtgttactaatgctcaaatggtatttatattttttctcaggggtggggtgggaggcactttttctgcattagctgcactctttgtagagaaccaacaccttagttttatat

SEQ ID NO: 921858 - DNA, 120 bp, Artificial Sequence
  ENSG00000224897_25 (sequence is synthesized)
cctagactctgaaattgaatttgattactctaggaaactctcattttctgtatgatgagattccccttaggaaaaaaaatgctaacttaattcctacctatagctgattgaggccatatg

SEQ ID NO: 921859 - DNA, 120 bp, Artificial Sequence
  ENSG00000224897_26 (sequence is synthesized)
agatacatttaaataaggaatatttgaatatgtttattttttgccttacatttagtcctttacaggaggaaaagcaatgatgtcctaccatgtagtttcccagccactaattacaatggt

SEQ ID NO: 921860 - DNA, 120 bp, Artificial Sequence
  ENSG00000224897_27 (sequence is synthesized)
tgtatgcggggagggagcacagctgagagaagggatctaactccttgtgatgaagtacgaggccaaactgtcctgttaaataattaaattcatagtgtgttgcattttgtagatttgagc

SEQ ID NO: 921861 - DNA, 120 bp, Artificial Sequence
  ENSG00000224897_28 (sequence is synthesized)
ccagccatgtggaactgtgagtcaattgaacctctttataaattaatcagtctcagttatttcttcatagcatcacaagcatagtgtctgaaaggacaaccagtttgcagcacaagagat

SEQ ID NO: 921862 - DNA, 120 bp, Artificial Sequence
  ENSG00000224897_29 (sequence is synthesized)
tccatacaagtcacctctaaaattatcttttcccattcgttgactgagcaaaatggacttcaaggacctaaaggaggttaaataccacaagatggaggagcttgagtctctgaatcattg

SEQ ID NO: 921863 - DNA, 120 bp, Artificial Sequence
  ENSG00000224897_30 (sequence is synthesized)
cattaggacaactaaagaaactgagagattttggcaagaaatagtcattccaatatcaatgactacggaggaaatgcaattacttttctttgcttaagttttccagggcctttctctgtt

SEQ ID NO: 921864 - DNA, 120 bp, Artificial Sequence
  ENSG00000224897_31 (sequence is synthesized)
tgagccactgtgccctgccaacttgttaaatttttaatcattctgctcaccttttgcaaccttactgacttttgtgtctaccttatctagcagtggctgaaatttccttctatgattata

SEQ ID NO: 921865 - DNA, 120 bp, Artificial Sequence
  ENSG00000224897_32 (sequence is synthesized)
tccttctatgattatagatttgtctgttatttcttatagatttctcaatattgcttgtattattattttaagttaataccattaggcataaaaattcaaaattgttatcgcttactgaat

SEQ ID NO: 921866 - DNA, 120 bp, Artificial Sequence
  ENSG00000224897_33 (sequence is synthesized)
aaactaagacaaatgacttcaaagcctttctgaaatgccacagagggtcaggattacaatctgcctattctgattcttctactatgggaaaaaatctttttcagaattgatgtaaagcct

SEQ ID NO: 921867 - DNA, 120 bp, Artificial Sequence
  ENSG00000224897_34 (sequence is synthesized)
aagaatccatgaaacattcatgaacttcacatcagaagccaagcccagaaaatatgggtttaaggtttgcctatatgtccaatacaagagaaaaaagaacattccacttctttagaaggt

SEQ ID NO: 921868 - DNA, 120 bp, Artificial Sequence
  ENSG00000224897_35 (sequence is synthesized)
cttaggaatttgagaacttttgcaaaatgatatctttcataaaaaataaatgttgtaaaactatatatatttaataaacccattgcagtaaccagcaaaaataaatttagctttctgaaa

SEQ ID NO: 921869 - DNA, 120 bp, Artificial Sequence
  ENSG00000224897_36 (sequence is synthesized)
caaacataaaagcagccaggatggggactgcaccttgcaaagccacaggtgtggagcttcccaaggctgtgggagcccactacttgcatcagtgtgacctggatgcgagacatggagaca

SEQ ID NO: 921870 - DNA, 120 bp, Artificial Sequence
  ENSG00000224897_37 (sequence is synthesized)
gtgtgaagtcatctgccaattacataaattgaattcttgggaattcttggtatgataggacatgaaagctgagagaaaacccttctacctaggaactccggagtttcaactaccagagac

SEQ ID NO: 921871 - DNA, 120 bp, Artificial Sequence
  ENSG00000224897_38 (sequence is synthesized)
ttgctcagcttgaccttgtgcacaatatattgtaacattaaaaaatacatttggagtattctagactggcttctgaaaaaccaaattgattgtaatattgaatgaaaattctagaaacca

SEQ ID NO: 921872 - DNA, 120 bp, Artificial Sequence
  ENSG00000224897_39 (sequence is synthesized)
atgttctctaatgcgacagccatggtcaaatggtaatgtgaattcaaattgctgcttccctagaatttcacttgagccatgtacttatcactttatcttctcacacctcatctacatatg

SEQ ID NO: 921873 - DNA, 120 bp, Artificial Sequence
  ENSG00000224897_40 (sequence is synthesized)
attgcaaaaacagtgtaaagtgaaaattagcaaaacagtttgaaatatagctgaaatgtcagggagacagcagcaaatgaactgtgacaacaattgagtgtaaatttattgatgttgaaa

SEQ ID NO: 921874 - DNA, 120 bp, Artificial Sequence
  ENSG00000224897_41 (sequence is synthesized)
aggatagcatttcaaggaaaacaagacagaaatgcttgcagagagccgcaaatgaagccttaatagctcatggaaaatagaagaaagctcaaaggaaaatgctactgctgaaatgagccc

SEQ ID NO: 921875 - DNA, 120 bp, Artificial Sequence
  ENSG00000224897_42 (sequence is synthesized)
atgaagaagaggactgtaattgagataacaggcaaatgactcaaacgtgctgaagctgaagcataaagagttttgtaaaatgtagggtacacagagaaggttatagtaactcttcacata

SEQ ID NO: 921876 - DNA, 120 bp, Artificial Sequence
  ENSG00000224897_43 (sequence is synthesized)
ccctagaatgagtaaaggactcaagagcggaccttactatgaggaagaagaagggagagaaaaagaatatatctctctgaagtatttcagcagaagataacaaatattactggaaagagt

SEQ ID NO: 921877 - DNA, 120 bp, Artificial Sequence
  ENSG00000224897_44 (sequence is synthesized)
tgatgtgaaacctgtgtacaattttagacggttccccagggcatgttcactgacatcaaggtgcagaacttactttaagtagcactacgtatgagggctgtacatctcacaaacaaaaca

SEQ ID NO: 921878 - DNA, 120 bp, Artificial Sequence
  ENSG00000224897_45 (sequence is synthesized)
gaaagacaataactttagtaaaaagatggataccattcaagcccaaggaaaaccaatgcttcttttcatctatggactcaagtctcagaaagcagagaagtgagtgtaccaagtgcaaca

SEQ ID NO: 921879 - DNA, 120 bp, Artificial Sequence
  ENSG00000224897_46 (sequence is synthesized)
tgctgccaatattgaagacagccactgctttgaagtgtggggaggagagctagagcatatttgcctgccacagttagttttgtgtttccatggaatttgagcaaaactgatgcacttgtc

SEQ ID NO: 921880 - DNA, 120 bp, Artificial Sequence
  ENSG00000224897_47 (sequence is synthesized)
ctaatacactcctaccatttcaattaattagttctactgtatgtttaatgggatgaaatgtatgtatatgtttttattctctattttctattgttatgcatagcatataaatttctaaca

SEQ ID NO: 921881 - DNA, 80 bp, Artificial Sequence
  ENSG00000224897_48 (sequence is synthesized)
aggttcctctttgccttcaaccatgagtaacagctccctgaggcctccccagaagctgagtaatgctggtgccattctta

SEQ ID NO: 921882 - DNA, 120 bp, Artificial Sequence
  ENSG00000224897_49 (sequence is synthesized)
caagaacagcctaactacagtgcacatggagaatttattgcaaactatgtggtatacagactatttttgtttttgtcactcagtgacattcaatcatctcttaaatcatccacagacaag

SEQ ID NO: 921883 - DNA, 120 bp, Artificial Sequence
  ENSG00000224897_50 (sequence is synthesized)
aaattgtggcggtagtcaatgatcgtaattaaaagcaaggatcctactttcaggacagtggcatcaagtataccactttgaaagtgattttttttggtttgagatttttgtaatgattgc

SEQ ID NO: 921884 - DNA, 120 bp, Artificial Sequence
  ENSG00000224897_51 (sequence is synthesized)
atgtttacatcctaaaattattccatatggcttgtaggaaacaaacatgccatttaggtctgctgtagccttatttaaaggtttccctctcaacactacagtatatagcaaagaaaaaaa

SEQ ID NO: 921885 - DNA, 120 bp, Artificial Sequence
  ENSG00000224897_52 (sequence is synthesized)
aactcaggttgctattttttatttttaacaggcatatgcatagtcctacttcttttcattgagtcatttttgttggtttaacttttaaatagtatatacatttttcctctggaacagttc

SEQ ID NO: 921886 - DNA, 120 bp, Artificial Sequence
  ENSG00000224897_53 (sequence is synthesized)
ttggctagtttgacagccttggcagtgttttctgggtgagaagtagtttatagcactgccttttaatagtgagaaccaaatgaacagcatatctaggcagtgaataatcttagcacatag

SEQ ID NO: 921887 - DNA, 120 bp, Artificial Sequence
  ENSG00000224897_54 (sequence is synthesized)
cactcaaatgacacgcagtctgaggaaaatgtgtaggagaaactaagtcttacagggctccacagctcagagataaaaacatagaacatttgagattgtacaaaactttctagtgtatgg

SEQ ID NO: 921888 - DNA, 120 bp, Artificial Sequence
  ENSG00000224897_55 (sequence is synthesized)
tgattattgagtgtttgtgaatggttatgtagcagatgtgtaaataaatgtatcttgttgagtagaagatgtcacagaagagaattcatgaaaatgaaagccacaggcattgcaaaaaat

SEQ ID NO: 921889 - DNA, 120 bp, Artificial Sequence
  ENSG00000224897_56 (sequence is synthesized)
gaaatgatttaactcttatatttgtctatggatagtattatcataattatacacaattagatctgatgttctgaaatactcttcaagaacaatttaaaacatcacactagatgtccagag

SEQ ID NO: 921890 - DNA, 120 bp, Artificial Sequence
  ENSG00000224897_57 (sequence is synthesized)
gttatcaactagaagcctgttgacaggttattagaaacacattgtttgacaatttctatttgattggctatagtcaggatacatattctcccacctgctgtagttctcaccaattgctat

SEQ ID NO: 921891 - DNA, 120 bp, Artificial Sequence
  ENSG00000224897_58 (sequence is synthesized)
agtttccttagtcatactccaaccacattgagacatactctccttgtcctttaattgtttataatttaattttcttctgcttgaaattttgtccattataagctattttcatatttgtga

SEQ ID NO: 921892 - DNA, 120 bp, Artificial Sequence
  ENSG00000224897_59 (sequence is synthesized)
agaattgttttgaaacctaccacaggtatttctacacaggaagatttctgtatttgtcttcttaactcttgagttttgttgttgctaatattggatgaagaggagacaaaatgattggat

SEQ ID NO: 921893 - DNA, 120 bp, Artificial Sequence
  ENSG00000224897_60 (sequence is synthesized)
ctagaggagcaccgacaagcaaatggcagattcctaggccctcaccagaggctgagcagatgttggtgccatgcttgtacaagtctacggaaccatgagctaaaataaaccttttttctt

SEQ ID NO: 921894 - DNA, 120 bp, Artificial Sequence
  ENSG00000224897_61 (sequence is synthesized)
atactctcttgcaatgccggggggcagcaactgaagctaccagtcaggccacaagattatgagggtaaacaactgatattctgcagtgcactgtattgccagaagattttgcccaaatgt

SEQ ID NO: 921895 - DNA, 120 bp, Artificial Sequence
  ENSG00000224897_62 (sequence is synthesized)
aggctaatcgatgtaaagagcaaattctgagtataaacttctttgtaagtgcttacttgttcttttgcaaagtccaaaataatcatcgggagaagaatggcctcttcttcaacaaaaaca

SEQ ID NO: 921896 - DNA, 120 bp, Artificial Sequence
  ENSG00000224897_63 (sequence is synthesized)
ccacaaaacagttggtaccattaaacacagttcctccatctagaaaacaaggaccccagttattccagctgttaaatggagtggatcaaaaggctgattaaatgtaacggattccaaaga

SEQ ID NO: 921897 - DNA, 120 bp, Artificial Sequence
  ENSG00000224897_64 (sequence is synthesized)
atggctggcacatagttcagggtatgtgtggaggtttgttacataggtaaatggcatgacacgaaggtttgatgtaaagactatttcatcccctagatccagtgattaatcaatatgtct

SEQ ID NO: 921898 - DNA, 120 bp, Artificial Sequence
  ENSG00000224897_65 (sequence is synthesized)
atgagtggctaaattttattgcaccattctgaagaatacaaaatttgtcactcctccgagagacacttaatatttgacctggttcacatgagagaattctaaatggataaagaaatccct

SEQ ID NO: 921899 - DNA, 120 bp, Artificial Sequence
  ENSG00000224897_66 (sequence is synthesized)
gaggaaggctgcagaaggctgtggatgtcttctctggaacatgtagttttatgtaacaacataccacagtaatggaccttcttctataattcatagaaagccattaaatgatttaatatc

SEQ ID NO: 921900 - DNA, 120 bp, Artificial Sequence
  ENSG00000224897_67 (sequence is synthesized)
agagtcctcagaagggaagatagtgttaatgtagaattgataacacagaatgcaccactgctgtgatccttatatcttggctggccattacccctccacttggaaatgaaaaagataaac

SEQ ID NO: 921901 - DNA, 120 bp, Artificial Sequence
  ENSG00000224897_68 (sequence is synthesized)
taattgaagcagtgagaagagaaaaagggagaggaaggtgctattgtggaggtgcatacccaacagtttgataatgtagaggaagtgatagctttgtctcgtggaatctgggtcgacctc

SEQ ID NO: 921902 - DNA, 120 bp, Artificial Sequence
  ENSG00000224897_69 (sequence is synthesized)
gttttccaggtatattctatagtcagcagtatcctggtgactcataagagaagattcagccaagctcggtggctcccgcctataatcctagtactttgggaggccaaggcgggtggattg

SEQ ID NO: 921903 - DNA, 120 bp, Artificial Sequence
  ENSG00000224897_70 (sequence is synthesized)
atgatgaaaccccgtctctactaaaacacacacacaaaaacaagtagccgggattggggcgtgctactcaggaggctgaggcaggtgaatcgcttgaatccaccaggtggagattgcagt

SEQ ID NO: 921904 - DNA, 77 bp, Artificial Sequence
  ENSG00000224897_71 (sequence is synthesized)
cgggattggggcgtgctactcaggaggctgaggcaggtgaatcgcttgaatccaccaggtggaggacagagcaagat

SEQ ID NO: 921905 - DNA, 120 bp, Artificial Sequence
  ENSG00000224897_72 (sequence is synthesized)
aaacaaaagaagactcataaaacaaactttcagttctgctaataaattcaagggactggaattactacttgttgaacatcaccatactattttgtcctcaatttatcttgattgagagat

SEQ ID NO: 921906 - DNA, 120 bp, Artificial Sequence
  ENSG00000224897_73 (sequence is synthesized)
atggtctttaaggaaacatgctttagttatttgggaagattcttcagcagctcagtgtttgctatgaagcttctatactcgccatgcctgtattctttctaaataattgaaaacagtaat

SEQ ID NO: 921907 - DNA, 120 bp, Artificial Sequence
  ENSG00000224897_74 (sequence is synthesized)
cacgtgtcaagggtaggagcaggtggagataattgaatcattggggtggtttcctccatgctgttctcttgatagcgattgagttatcctgtgagctaatggttttgtaaggggcttccc

SEQ ID NO: 921908 - DNA, 120 bp, Artificial Sequence
  ENSG00000224897_75 (sequence is synthesized)
gagttatcctgtgagctaatggttttgtaaggggcttcccccttcactcagcactcattctctctgccgccacactgtgaagaggtgccttttgccatgattctaagtttcctgaggcct

SEQ ID NO: 921909 - DNA, 120 bp, Artificial Sequence
  ENSG00000224897_76 (sequence is synthesized)
cccagtcttgggtatttcttcatagcggtgagaaactaaacctattttagttaataagatcgaactaaagtaggtttcaataaatatgtttctttaaaatgagtcatgactagctgtaaa

SEQ ID NO: 921910 - DNA, 120 bp, Artificial Sequence
  ENSG00000224897_77 (sequence is synthesized)
actagctgtaaacaatgacttttttggcatggcattctttttgtgaaatattatataatttggtaagatttctattgatttttaatttgttgcctttcttttagtacttgtcttcacctt

SEQ ID NO: 921911 - DNA, 120 bp, Artificial Sequence
  ENSG00000224897_78 (sequence is synthesized)
taatttttcttaataaatgcggaattgaaatgagctaaattattcagacactttgggatcaacatctatttcattgttcatctcagttagttgcatcaggactatcgcatatcttcattc

SEQ ID NO: 921912 - DNA, 120 bp, Artificial Sequence
  ENSG00000224897_79 (sequence is synthesized)
tcctatgacatgtcttaaaacaatttgatttctaactcattttgttaactgtaatgaattcctttttttggatatgctaataatttcccttaaagcagtaactgatacaacaaaatcttt

SEQ ID NO: 921913 - DNA, 120 bp, Artificial Sequence
  ENSG00000224897_80 (sequence is synthesized)
tgtcttctctctcatcccaattaaagtgtatatgtttccttttctgaggaagattgctaagtgttattgaatacttctttttcctcttcgtttttctaggaaagtagtgctatgctgtga

SEQ ID NO: 921914 - DNA, 120 bp, Artificial Sequence
  ENSG00000224897_81 (sequence is synthesized)
ttttactaaagtttaactgagcagaattgacttaattatatataatgggacttagttgtgtttttttctctgacgtattttcactttcttgaaatctggaagagatttttctctgattat

SEQ ID NO: 921915 - DNA, 120 bp, Artificial Sequence
  ENSG00000224897_82 (sequence is synthesized)
atccagagtgtgaagagaaatgaatttaaaaattcattttggaaagtagaaatgaagactgaaggcttattctgcaagttttcctgaaataccaaaaatagaaatgtagttgccaattaa

SEQ ID NO: 921916 - DNA, 120 bp, Artificial Sequence
  ENSG00000224897_83 (sequence is synthesized)
ctgggctaagaaattatatttttacatagttgctagtcatgatcaaaattataatattagttgttgtctaccattttagattgtctttagtaaggtaattttagataaatgtgaacttat

SEQ ID NO: 921917 - DNA, 120 bp, Artificial Sequence
  ENSG00000224897_84 (sequence is synthesized)
ttacaatgtccttcagaaatactagtaacttttatttaagaataaaagtttactttaatcacttggtttagatggtatcttccagttttatataatgtgaagctagtatttttccttttg

SEQ ID NO: 921918 - DNA, 120 bp, Artificial Sequence
  ENSG00000224897_85 (sequence is synthesized)
taatgaataaatgtttcatggggagatattttgagactatgaaaatatcttttttctcctagaatcactctctttagacactatcatttattcttgcctaattaacttacttctgtgata

SEQ ID NO: 921919 - DNA, 120 bp, Artificial Sequence
  ENSG00000224897_86 (sequence is synthesized)
gtttccaaacggtgattttctactttcatcattaaatttatgtataacagttttattctgttttaaaaaaggatttttaattcctaattatgtattcatttttgtcacaggtacttatag

SEQ ID NO: 921920 - DNA, 120 bp, Artificial Sequence
  ENSG00000224897_87 (sequence is synthesized)
tttttttttttttttttttttgcaatttggagaaggaagtactttaaaagaaaagttaaaaggcagacatagatagcatgaagcctaattgcaagatctttttcaaacatattagtttta

SEQ ID NO: 921921 - DNA, 120 bp, Artificial Sequence
  ENSG00000224897_88 (sequence is synthesized)
tctttttcaaacatattagttttaggaaatagcacctgaatttaagtcccttaaaattgtctatgtcttcacgtccaagtctctatatttgcagggctgtgtacaatctagactgaacat

SEQ ID NO: 921922 - DNA, 120 bp, Artificial Sequence
  ENSG00000224897_89 (sequence is synthesized)
gcttgacctaaaaacagaagtaatacctggggcaaagcacgatgtgcaccacagtcttctctctttagtgtgttaagataaagttgattcccagagtagcctgccatcactaactctgag

SEQ ID NO: 921923 - DNA, 120 bp, Artificial Sequence
  ENSG00000224897_90 (sequence is synthesized)
agaatggcttaattggaattgatagtgggaacttggaaatcaatacatatgcactgaacagaaaatggtatgctataatctactatacactgtatgtgaaacccaagctccaaatttttc

SEQ ID NO: 921924 - DNA, 120 bp, Artificial Sequence
  ENSG00000224897_91 (sequence is synthesized)
ggcccatgcaatgtccagtaaaatttctcttagttacattataattgcaatgtacatgtatttgaggaaaaaaaaagtgaaagaaaaagtaactaaagaaaagtggaaatgcaaaacttt

SEQ ID NO: 921925 - DNA, 120 bp, Artificial Sequence
  ENSG00000224897_92 (sequence is synthesized)
gtttttattaatgttaaaatttattttgatcaacttgctattcttaaaattgaccaatcttcttcccttccttgcctcttccatggtttataggattatttttcagggctgatcagttgg

SEQ ID NO: 921926 - DNA, 120 bp, Artificial Sequence
  ENSG00000224897_93 (sequence is synthesized)
tgttacatgtgactactatgcttaatgctatctggcttctaactttaagcactgaaaaaaagtccttcgtatttctcagtgtgtgattgaactgagatgaccatcctaagcctcctcatt

SEQ ID NO: 921927 - DNA, 120 bp, Artificial Sequence
  ENSG00000224897_94 (sequence is synthesized)
acataaatccttaccttctccagaagcaacgaatggtgttgagaatagcatatgttactactcagccatattccatagccttttctccaagatatttttccaaagttgccccttttctga

SEQ ID NO: 921928 - DNA, 120 bp, Artificial Sequence
  ENSG00000224897_95 (sequence is synthesized)
atcccttgcaagcaaacaaacaacaaaacaatgggtaataaaataattgtttaactttcatttatatgctctgagattgatgtgattttgataaataactatattaaaagacaaatggga

SEQ ID NO: 921929 - DNA, 120 bp, Artificial Sequence
  ENSG00000224897_96 (sequence is synthesized)
gtggtgattttgtgaaaagcccatgcctctgcccatggaatatgtggcttggcctggagctcttattttacttatatatttctaagcagaattattcaagaatgtctcttattacaggtc

SEQ ID NO: 921930 - DNA, 120 bp, Artificial Sequence
  ENSG00000224897_97 (sequence is synthesized)
ttgaaacttggacagccaacagaaaggaagctaataaataaatttgtcagaacacgattctcagtttcacttattttgaattaaaggtaacctggaaaatggattaggaaaacagcctat

SEQ ID NO: 921931 - DNA, 120 bp, Artificial Sequence
  ENSG00000224897_98 (sequence is synthesized)
aatcagaggagtgaccccagtgagaccctgtcattaaaactttagtgttgagcctgcaaacctctgttcctctgattaggcaatttactccatttccacctttctgtctgccaaaacatt

SEQ ID NO: 921932 - DNA, 120 bp, Artificial Sequence
  ENSG00000224897_99 (sequence is synthesized)
tagtggcaaaacattttctaattctctagactcataaaatgttgttttgaaaaaaagtaaaacagaatggattacctttttaagctgtctatcataatgtaatcagaaaacatgagggat

SEQ ID NO: 921933 - DNA, 120 bp, Artificial Sequence
  ENSG00000224897_100 (sequence is synthesized)
taatagataatattgtaaagaggcaaaggcagcagatgttatttagatgagcagaaggtcacagacctctgttgaggattgaaagcttgaggtacgtgcctttgttcctcagtgtgtgtg

SEQ ID NO: 921934 - DNA, 120 bp, Artificial Sequence
  ENSG00000224897_101 (sequence is synthesized)
gatcagagtgattactgatatcagttagcaacatggtggaggggacaaactggggctgcattttcactatgtttattattgctcaaggtcaaaaagtgactgtgtagtgcctcagttttt

SEQ ID NO: 921935 - DNA, 120 bp, Artificial Sequence
  ENSG00000224897_102 (sequence is synthesized)
acatctttgtgttatcaatatttttttctattaccttacaagtttattttgatgctgtaatgatgagacagtgttttgaaaagttctaaataaataaaagggtattctctaacttttaaa

SEQ ID NO: 921936 - DNA, 87 bp, Artificial Sequence
  ENSG00000224897_103 (sequence is synthesized)
gggcagaatgatactgtttggctgtgtccccaccaaaattttgtcttgaattctagttgccataatctccacatgttgtgggaggga

SEQ ID NO: 921937 - DNA, 120 bp, Artificial Sequence
  ENSG00000224897_104 (sequence is synthesized)
gaattctagttgccataatctccacatgttgtgggagggacctgatgggaggtaattgaatcacgggggtggggagttatccccatgctattttgagtgagttctcacaagatctgatgg

SEQ ID NO: 921938 - DNA, 120 bp, Artificial Sequence
  ENSG00000224897_105 (sequence is synthesized)
ccttttaacattgttccatatggttatgtaacaacattttaatgcttaatagtaatgaagaaaggagttcacagtcatagtttatcttgttcttaagttttcatctatgtattcaagtga

SEQ ID NO: 921939 - DNA, 120 bp, Artificial Sequence
  ENSG00000224897_106 (sequence is synthesized)
cgggatgctaactccagttcttgccacataaagtgcaatatctttaaaagttacttgatcaaccaattgtacttctaaatcacttagtggttttatctgaataaaagatgtgtgtgtccc

SEQ ID NO: 921940 - DNA, 72 bp, Artificial Sequence
  ENSG00000224897_107 (sequence is synthesized)
aggtcctaagcttccctgatggtatttggcatctgtttttaagaaaaggatgaaggccggtcacatggactt

SEQ ID NO: 921941 - DNA, 120 bp, Artificial Sequence
  ENSG00000224897_108 (sequence is synthesized)
cactgtactccagcctgagcaacagagcatccaagaggatgctgatgctcttggcaatggaaatcagagaaacactgttcctgaaagcttctgtcactcaagaatccatgaaacattcat

SEQ ID NO: 921942 - DNA, 120 bp, Artificial Sequence
  ENSG00000224897_109 (sequence is synthesized)
attcttacacagcctgcagaaccaggccaaggacaatttgatgccaccatttcttctggatcagttaccattagtgacctataaatatggtgaaataagttactattaccctgaggcagc

SEQ ID NO: 921943 - DNA, 120 bp, Artificial Sequence
  ENSG00000224897_110 (sequence is synthesized)
aaggattttaggactcagactccgtctttctgcccttcgtcctatctcaccttaatggaacggaatgcctcagtacattttgtgacaacctatatagcttgatgggtctgggatacacgt

SEQ ID NO: 921944 - DNA, 120 bp, Artificial Sequence
  ENSG00000224897_111 (sequence is synthesized)
tacataggtatacatgtgccatggtggttgctgaacctatcaacccatcatctacattaggtgctattgtggaggtgcatacccaacagtttgataatgtagaggaagtgatagctttgt

SEQ ID NO: 921945 - DNA, 120 bp, Artificial Sequence
  ENSG00000224897_112 (sequence is synthesized)
ttcagaaaagcttaatacatagttttgaatatgaaataaaatccagtgagattcaacaaattgtcaagttacacacttctgaatgacagatttgggaccagaagctagacctcaggttgt

SEQ ID NO: 921946 - DNA, 120 bp, Artificial Sequence
  ENSG00000224897_113 (sequence is synthesized)
gacagatttgggaccagaagctagacctcaggttgtctttgcaaatgacacaatcctgtatctagaaaactccattgtatcagcccaaaagcttcttaagcaacttcagcaaagtctcag

SEQ ID NO: 921947 - DNA, 74 bp, Artificial Sequence
  ENSG00000224897_114 (sequence is synthesized)
tcatgaatgaactcccattcacaattactgcaaagagagtaagatacctaggaatacagctcttaggaaaatca

SEQ ID NO: 921948 - DNA, 120 bp, Artificial Sequence
  ENSG00000224897_115 (sequence is synthesized)
ttatagattcaatgctattcccataaaattactgatgcttagcacttttgagtgactagaccaactagcttcattaaacatgatgttttttgaaaacatattaagtgtgagcattactag

SEQ ID NO: 921949 - DNA, 120 bp, Artificial Sequence
  ENSG00000224897_116 (sequence is synthesized)
taaaacaataaaagtgactctattttagccctttgttttgcagtggaaaacactgaagttgtggcatatgaaaaaggtgcttttcaattgcgacaaaagcaaaaattgacaaatgggatc

SEQ ID NO: 921950 - DNA, 120 bp, Artificial Sequence
  ENSG00000224897_117 (sequence is synthesized)
aaaagaaactatcaactgagtaaacagacaacttacagaatgggagataatttttgcaaactatatgtgtgacaaaggtctaatatccagcagctataaggaacttaaacaaatttacaa

SEQ ID NO: 921951 - DNA, 90 bp, Artificial Sequence
  ENSG00000224897_118 (sequence is synthesized)
aaaggacatgaacagatacttttcaaaatagacatacatgtggccaaaaatcatatgaaaaagtaaattaaaactgcaatgagacatcat

SEQ ID NO: 921952 - DNA, 120 bp, Artificial Sequence
  ENSG00000224897_119 (sequence is synthesized)
agaatggctattattaaaaagttaaaaaataataggtgctggcaagttgttgagaaagaggaatgcttattcatcattggtgggagtgtaaattagtttagtcattgtggaagacagtgt

SEQ ID NO: 921953 - DNA, 85 bp, Artificial Sequence
  ENSG00000224897_120 (sequence is synthesized)
gtcttattactgggtatatacctaaaggaatacaatcattctattataaagacacatgccacatatatgttccttgcagcactat

SEQ ID NO: 921954 - DNA, 120 bp, Artificial Sequence
  ENSG00000224897_121 (sequence is synthesized)
ctgggtatatacctaaaggaatacaatcattctattataaagacacatgccacatatatgttccttgcagcactatacacaatagcaaagttatggaatcaacctaaatgtccatcaatg

SEQ ID NO: 921955 - DNA, 120 bp, Artificial Sequence
  ENSG00000224897_122 (sequence is synthesized)
atggaatactatgcagccattaagaacaagattatgtcctgtgccaagatatggatggaactgggggacattaatcttagaaaactaacacagaaaaagaaaaccaaatactgcatgttc

SEQ ID NO: 921956 - DNA, 120 bp, Artificial Sequence
  ENSG00000224897_123 (sequence is synthesized)
tcataagtgggagctaaatcatgagaacacatggacacatagaggggagtaacacacattaggtccttttggagggtggaagttaggagcagggagagggtcaggaaaaataactaatgg

SEQ ID NO: 921957 - DNA, 120 bp, Artificial Sequence
  ENSG00000224897_124 (sequence is synthesized)
gtactagcttaatacctcagtgattaaataatctgtacaacaaaaccccgtgacacgagttaacctatgtaacaaacctgcatttgtacccctaaacttaaaataaaagttaaaaaaggt

SEQ ID NO: 921958 - DNA, 120 bp, Artificial Sequence
  ENSG00000224897_125 (sequence is synthesized)
gagtcatccctagagggatccagagggaacatggccctgctgacaacttaatttcagtcgagtgaaacttatttgggacttctgacttcagaactgtaaaattataaatttgtcttgtct

SEQ ID NO: 921959 - DNA, 120 bp, Artificial Sequence
  ENSG00000224897_126 (sequence is synthesized)
taaaccactaaatagatttgttacagagaaaataggaaactaattcaccgtccaacagcacattttgttcaatctgatatcattttggttaaaaatgtttttcacaggaaaaaatactgg

SEQ ID NO: 921960 - DNA, 120 bp, Artificial Sequence
  ENSG00000224897_127 (sequence is synthesized)
gagaatatacattgaaggatgtataatatttattactgggtaagattttgctcatgtcgttttctagattatctataataaatgtatttttctacaacaaataaatttgtaaagaaggaa

SEQ ID NO: 921961 - DNA, 120 bp, Artificial Sequence
  ENSG00000272862_0 (sequence is synthesized)
acatctattaacttttatggataattctttttgaacaaaactaatctcatattttggattcttaaaatggctttggtttcaactcgttttaggcaagcctgatcaaaacttctcaggttt

SEQ ID NO: 921962 - DNA, 120 bp, Artificial Sequence
  ENSG00000272862_1 (sequence is synthesized)
tatttttaatttgtgcgataggattattatttttattttgtttagctgtactaatcatttttagaagaaaatgttcctttcttgataaaacttttaaaaaaaatacattttgtgcagagt

SEQ ID NO: 921963 - DNA, 120 bp, Artificial Sequence
  ENSG00000272862_2 (sequence is synthesized)
gcccacctgatgtgtaaaatatgttggtgcacagtaaaatttcacagtgtgtgctttcctgtccttctttttcctggtatagttggggtgtaacttgacttagacactactaattgttat

SEQ ID NO: 921964 - DNA, 120 bp, Artificial Sequence
  ENSG00000272862_3 (sequence is synthesized)
aaacctccagtacccttgatttgccaaataagtttgaagaacaaagtgtatcattttctgttaccttaactctcacaatgctgtatcacataataaagcctcaacagacttggattaaaa

SEQ ID NO: 921965 - DNA, 120 bp, Artificial Sequence
  ENSG00000272861_0 (sequence is synthesized)
tgccgtggccaccagcctccacctttcaacagccagagcattgaaactaccttctttcctttaatgtaatcaaattcttgggcagagttgatcgtaatcagtgttgactgtttgttattt

SEQ ID NO: 921966 - DNA, 120 bp, Artificial Sequence
  ENSG00000272861_1 (sequence is synthesized)
agttcatctccttgtggctccagattttcagtctagttattttatgtcttccaccatttgtgtctgaaaggttaaatgtggtgcctttttttccttaccgcatgcataaatgcatgtatt

SEQ ID NO: 921967 - DNA, 120 bp, Artificial Sequence
  ENSG00000272861_2 (sequence is synthesized)
ttctgtatttggacgtagaactctgtgtgttgggggctgggataaagaaagaggcaaccatctttggctgatgtgttagagatatgcttactttacaataaacaaaggctctttgtgaaa

SEQ ID NO: 921968 - DNA, 120 bp, Artificial Sequence
  ENSG00000272866_0 (sequence is synthesized)
cctactgttctcaagtatacatcagtgatgattttaattagactagctttttctaaacacactcattacacacttgagttgcttcaatactattcaatgtccaacttttattctcacttg

SEQ ID NO: 921969 - DNA, 120 bp, Artificial Sequence
  ENSG00000272866_1 (sequence is synthesized)
tcactttttaatctgatttcatgatgaaagaccagttctggcaaactctcctttaaattaaaagcgaatgcattatgatttcatttatatgaagtttaaagcaaaacaaatctaattgta

SEQ ID NO: 921970 - DNA, 120 bp, Artificial Sequence
  ENSG00000272866_2 (sequence is synthesized)
ccctaagggttgagggttgatcagaaagagatatgaggaagttatctgggaagttatctgggaagagagaattgttttatatcataataaagatgtggcttactctggtgtactcatttg

SEQ ID NO: 921971 - DNA, 120 bp, Artificial Sequence
  ENSG00000272866_3 (sequence is synthesized)
tcaaaattgtaaagctaatatgtaggcatttcaaggtatgttatatatgtagtgatagatataggtatatagtgataaatgagagatacaggtgaaaaaagaatgacaaaaataatgata

SEQ ID NO: 921972 - DNA, 120 bp, Artificial Sequence
  ENSG00000272866_4 (sequence is synthesized)
gccattgcagttgtataatgtaggacatgaggattctttatactgttttgtttactttgtacatatttgaaattttcataataaacagtttttcataataaagagcttttaaaagccaaa

SEQ ID NO: 921973 - DNA, 120 bp, Artificial Sequence
  ENSG00000272865_0 (sequence is synthesized)
aatgcaaagcagtgagattgctgggtcatacagggaggacaaatggattcctgaggtgcagggcaatcaacagatgagatccaagagtcagaaccctggaatggaccaccagaactttcc

SEQ ID NO: 921974 - DNA, 120 bp, Artificial Sequence
  ENSG00000272865_1 (sequence is synthesized)
catggagccccaggacttcttcccccaattcctgctgtttctcctcctccctgtagcaggcttcttaaagcaggatgaaaaagcctcacagcttgcggtgttgacagtattctagaagac

SEQ ID NO: 921975 - DNA, 120 bp, Artificial Sequence
  ENSG00000272865_2 (sequence is synthesized)
cttggcaacaatcccaattcattacccatgtcctagcccagagtgtggaggaaaagtgataccatcaatttcttggcaattatcccatgacggatcattcaagtattttaaataaaatat

SEQ ID NO: 921976 - DNA, 120 bp, Artificial Sequence
  ENSG00000272865_3 (sequence is synthesized)
caattcaattttaatatattggttgctcatatactacaggctataggcactattctgaattctgtaaggaatgaagagagatatatatatatatacttttttttttcttttttgagatgg

SEQ ID NO: 921977 - DNA, 120 bp, Artificial Sequence
  ENSG00000272865_4 (sequence is synthesized)
gagatccattcatgctgttgtgcaaaacagtagtttgtttctttttattgctgagtaaggattttattgtatggaatgtaccagtttgtttatccattctccagttgagaaacatttggg

SEQ ID NO: 921978 - DNA, 120 bp, Artificial Sequence
  ENSG00000272865_5 (sequence is synthesized)
tagtttttagttcctggtgatgacagataaagctgctgcaaacattcatgtgcatattttcgtgaggatgtagttttcatttcacttgagtaaatgcaaagcagtgagattgctgggtca

SEQ ID NO: 921979 - DNA, 120 bp, Artificial Sequence
  ENSG00000272865_6 (sequence is synthesized)
tacaatctcgtccagaagtaatatacgtcaagaaagaagagattataaatgtctagcagggactgttagaaatatatttggtgcccttgatgatttctcaatcaagacagggaacactga

SEQ ID NO: 921980 - DNA, 120 bp, Artificial Sequence
  ENSG00000272865_7 (sequence is synthesized)
ggtacaaccacatagagcatcggagctgctacggtaaaggggaaggagagattcctactctggttgatgacactggatccttgcaagctggacatctcggaacaacagacacagctgttc

SEQ ID NO: 921981 - DNA, 120 bp, Artificial Sequence
  ENSG00000272865_8 (sequence is synthesized)
aacctcagagcaaacaccaaaatcctagtttcgccatgaacactgaaattatgaactacttcaaaataatagcttccgtggtgaccagagcaacaaattttactaggtttgccttgaaga

SEQ ID NO: 921982 - DNA, 120 bp, Artificial Sequence
  ENSG00000272865_9 (sequence is synthesized)
tttgaaatatccacagcacctacgtgaatttgctgtggtgccccaggctctacctcactgcacagtttggaaaccacagctttcagttgtcttctttttttaaaattatttttatttttt

SEQ ID NO: 921983 - DNA, 75 bp, Artificial Sequence
  ENSG00000272865_10 (sequence is synthesized)
ggttacaggagcccaccgcactgtcggccaggctagtctcgaactcctgtcctcaagtgatccacccacctcagc

SEQ ID NO: 921984 - DNA, 120 bp, Artificial Sequence
  ENSG00000272865_11 (sequence is synthesized)
cagcctcccaaagtgctgggattacaatgtgagctaccgtgcccagcctcagttgtcttctgactctgagaagttaagattcaactgatttttaaacttgaggtttgaaattccttacta

SEQ ID NO: 921985 - DNA, 120 bp, Artificial Sequence
  ENSG00000272865_12 (sequence is synthesized)
taaacttgaggtttgaaattccttactatccacttttgggacccactgcactatcagagaaaagcaagagtatcagaaacacaggtgactgtggatggaagagcagtaagcagttgaagt

SEQ ID NO: 921986 - DNA, 120 bp, Artificial Sequence
  ENSG00000272865_13 (sequence is synthesized)
ggtgacttaccaagacagctggctgcctatgtttatggcatttggaatccaccgggaacacatacatttgtcacagtgtgttcccgaaataaatgaggctgtctcccaactggccccata

SEQ ID NO: 921987 - DNA, 120 bp, Artificial Sequence
  ENSG00000272865_14 (sequence is synthesized)
taatcaacgcagcccagccccacatagctactccaatgaataatgctttgtttgccaaatgcaatgggaacctaccacaggccagggtgcttccaacaacaacaacaacaagaaactaaa

SEQ ID NO: 921988 - DNA, 120 bp, Artificial Sequence
  ENSG00000272865_15 (sequence is synthesized)
agctagcaaggcctccagacaggggatttccactgatcctttgtcactactgagcccaaaagtgcacgggcagcaagttaccaaatcgccttccacaaggtctacaaacccatctgggac

SEQ ID NO: 921989 - DNA, 120 bp, Artificial Sequence
  ENSG00000272865_16 (sequence is synthesized)
ccaagtccacttctgccggcagaatagaaacctcgtcagttatcacaactcagtatccttctaattaaaatatctgaccatgtccccatcagccacttgcctcatttgggacaccaccaa

SEQ ID NO: 921990 - DNA, 120 bp, Artificial Sequence
  ENSG00000272865_17 (sequence is synthesized)
ccatcctgcacggctgcccatgtttctgtttctccagcccaagcatgcagtttcagtaggtccttcagaggctgcctgaaagcatcccgcctccagagccctgtgggttgaagaccgctg

SEQ ID NO: 921991 - DNA, 120 bp, Artificial Sequence
  ENSG00000272864_0 (sequence is synthesized)
tatttttattttttttgaaataataaattgtcctttgaaaatattccattttattttcaaaagataaagtatccttcaggtgatgagaactattcttggggaaaactttgtgtttgcatt

SEQ ID NO: 921992 - DNA, 120 bp, Artificial Sequence
  ENSG00000272864_1 (sequence is synthesized)
tctagaaatgaactctcagacttaactcatagttaatacaaaacccaaaatgaacttgggcttattgatttgctttggatgtttattttgattgtagcatcacatttgaaatccaattgt

SEQ ID NO: 921993 - DNA, 120 bp, Artificial Sequence
  ENSG00000272864_2 (sequence is synthesized)
attattttgcttaggaattaacactgtaattctgtttcacagtttatccatgtaatttcagtttttacatgtcttgcagtttctttcatcctagagtagcttttgagtttattagctggt

SEQ ID NO: 921994 - DNA, 120 bp, Artificial Sequence
  ENSG00000272864_3 (sequence is synthesized)
ttcacttagtcttgtttataggcctatcactatagcttctaagtgcttctcagattatgttcccttttatgtctatcaaactgtgtttccacataaataaaaactcttcaattgctggaa

SEQ ID NO: 921995 - DNA, 120 bp, Artificial Sequence
  ENSG00000288071_0 (sequence is synthesized)
atttagtcaatgggaaccccttcaagttggctcttttgtctttttggcatgtcccatcatatttggagtcttaagaatttacatcttggttatctgctttcggcattccactctcctagc

SEQ ID NO: 921996 - DNA, 120 bp, Artificial Sequence
  ENSG00000288071_1 (sequence is synthesized)
gacggcttcagtataaaatgggattaatagtacaacagaagattgttgttgtaaggactaaatcagctaatacttatataatgttcagaacaatgcccagcattacagatatattacttc

SEQ ID NO: 921997 - DNA, 120 bp, Artificial Sequence
  ENSG00000288071_2 (sequence is synthesized)
tgtgtttaaataagttctgaggaatttctgctatgcttcttcatttgggaagtgatggatactcctgcagaagcagatctctgcccctggacagatggggaaaggctactgggaaggcag

SEQ ID NO: 921998 - DNA, 87 bp, Artificial Sequence
  ENSG00000288071_3 (sequence is synthesized)
aatgctctggaaagatgattgcggcaagagcttcacctaaaggactagtgaggacaggattgtatcaataggtggagccaagatgga

SEQ ID NO: 921999 - DNA, 120 bp, Artificial Sequence
  ENSG00000288071_4 (sequence is synthesized)
ctgaggcacactcctttacaatatgactgtcacttctcccattaagaggtgaagtctgtctgtccaagctttgaatctgatattgactatctgactgctttggccaatgagacattagca

SEQ ID NO: 922000 - DNA, 120 bp, Artificial Sequence
  ENSG00000288071_5 (sequence is synthesized)
aataaaaggtattggttcctaataaacatcttgcacctcaaattccatcccagaatctgcttccagagaaccccatctataccaagaccctgatgatcccagtcatctcagttattcctg

SEQ ID NO: 922001 - DNA, 120 bp, Artificial Sequence
  ENSG00000288071_6 (sequence is synthesized)
ctgaagttccactcgtgagtgaggccatcctggatcagcagaccagctgcgccagctccaacataaaaaacaaccaactcagataatcctgaaaaataacaaatacctgttgttttaaaa

SEQ ID NO: 922002 - DNA, 120 bp, Artificial Sequence
  ENSG00000288071_7 (sequence is synthesized)
gggggatccccagctcaccagcatgtgttgtcacctaggaacttgttagacatgcagattttcagacctactaattagaaactctgagtggggtttggggggttcgcaatctgtgttttg

SEQ ID NO: 922003 - DNA, 120 bp, Artificial Sequence
  ENSG00000288071_8 (sequence is synthesized)
tttgttttgtcttttgagacagggtttggcactgttgtccagtctggaatgcagtagtgggatcttagctcactgcagtctcaaactgctgggctcaaggatcctccaccttcagcttcc

SEQ ID NO: 922004 - DNA, 120 bp, Artificial Sequence
  ENSG00000288071_9 (sequence is synthesized)
tgagtagctaggactataggctcacatccccacaccctgctaactaaaaaaaaaaaattttttagagatggggtctcactatgctgtgttacccaggctggtctagaactcctggactca

SEQ ID NO: 922005 - DNA, 120 bp, Artificial Sequence
  ENSG00000288071_10 (sequence is synthesized)
gatgttcagctgatgttcagttctagagcaacccatttcctacctccaattgctgattctacctcattgaggacaaaggaaccagatacttcgttcaatccagagacacttcaaccttac

SEQ ID NO: 922006 - DNA, 120 bp, Artificial Sequence
  ENSG00000288071_11 (sequence is synthesized)
agcagtgcaaagataccaaagacaagctgcctgggttcaaatactcttttcaccaccattaactcattgttttgctttgtctatgtaatttaacctctttatgcctcattttcttaggta

SEQ ID NO: 922007 - DNA, 120 bp, Artificial Sequence
  ENSG00000288070_0 (sequence is synthesized)
gcagtagccaagccaccagctttcacagatgatggctcacactgaaataacttgttcctagggtagttggtgatcaatgactcaaattaaaccttagaaaagttttttttcttcctgaca

SEQ ID NO: 922008 - DNA, 120 bp, Artificial Sequence
  ENSG00000288070_1 (sequence is synthesized)
ctttataggtttctctacttatctcctccctggatggctgtataagccagatgacggctacctgaacactctagaaaaagtgaattcacagaggctttcacagggcttgatctgcagtcc

SEQ ID NO: 922009 - DNA, 120 bp, Artificial Sequence
  ENSG00000288070_2 (sequence is synthesized)
tttcatctcaaagagaatggccagcaaggagcccattcatggagccttgttggacaactccacctacacagtcttcagtggtgctctggagaacagaagctgacaacaggctatggtgat

SEQ ID NO: 922010 - DNA, 120 bp, Artificial Sequence
  ENSG00000288070_3 (sequence is synthesized)
gggctccacttcaaaggtaaccacctgtctccttctgctataacagggctgacctcagtgcagcagagggcagagcttggaggcagctgctgagaatttgcactctaaagacatccacct

SEQ ID NO: 922011 - DNA, 120 bp, Artificial Sequence
  ENSG00000288070_4 (sequence is synthesized)
aaatcacaagctttatatctgggcactcagccagacctcctgaccatatcctggactgcggactttggatggtggaacgggggtggaattgaacattaaatgagcaacatgctaattcca

SEQ ID NO: 922012 - DNA, 120 bp, Artificial Sequence
  ENSG00000288070_5 (sequence is synthesized)
tgcaaatgaatatctattttgaatcaacagcttgggcactttttctaggagggctgaggcagcaggaatctaaagagaggatgagagggggaggggtttctctcagaggtggcagagagt

SEQ ID NO: 922013 - DNA, 120 bp, Artificial Sequence
  ENSG00000288070_6 (sequence is synthesized)
gcaaagggggctccaggctgggcagagccacctcctgcccacagttcctaatgctatttgattggctcattagcaagtatgaaacatgggaagtccaaaaaaaaggaataaagaaaaaaa

SEQ ID NO: 922014 - DNA, 120 bp, Artificial Sequence
  ENSG00000288073_0 (sequence is synthesized)
aataggcaagatgttatctgttaatagactaaagaacagagaagtgatttctgtgactatagagcaatttaaaggaagagctgagattaaacagtcccacatctgcttcactgctttggc

SEQ ID NO: 922015 - DNA, 120 bp, Artificial Sequence
  ENSG00000288073_1 (sequence is synthesized)
ctgcatgaactctctaaaatagagatctgctgtgcttaagatccttcaatggtttctcccaagatattgggatctctgaagacaaggactgtgtccccagaaactcatcgactctctggt

SEQ ID NO: 922016 - DNA, 120 bp, Artificial Sequence
  ENSG00000288073_2 (sequence is synthesized)
gtctctgggtctacgcacatgatgtctccaaggccaggtatcattatttatctaaatctccggagccattgaggaccaagatcatacttgctgaataaatgcacggagcaggatcagagg

SEQ ID NO: 922017 - DNA, 120 bp, Artificial Sequence
  ENSG00000288073_3 (sequence is synthesized)
ccaaggacatccacaaaccagggcaagaaggaccatccgtaattctttcccataaatagtgacaggaagaaaataaacgccctattcttcaatgatttgaaccacctctggagcacaaac

SEQ ID NO: 922018 - DNA, 120 bp, Artificial Sequence
  ENSG00000288073_4 (sequence is synthesized)
tttctctaaattcacagggcaaatatccatcatggggcaggtatctatgctgccatggaaagtaacataaaatgtactaagtcatcacagggagttttaattttgtttttaaggtcaatt

SEQ ID NO: 922019 - DNA, 120 bp, Artificial Sequence
  ENSG00000288073_5 (sequence is synthesized)
gccatgctggggtaaaaagcattgatccttgccttttatcaccggaaaaattcttcaccagtactttgtgaaaatctcgcctcatcagggctgccaaggtcaatgcaacctaagtaacca

SEQ ID NO: 922020 - DNA, 120 bp, Artificial Sequence
  ENSG00000288072_0 (sequence is synthesized)
gcccattcagatcctgtcccaatgcccacctgtggtaacaccttcctttctctcaacctggcctttctcacccacaaggtgggaatggtgatttccacctctcgggagaagagagaatgg

SEQ ID NO: 922021 - DNA, 120 bp, Artificial Sequence
  ENSG00000288072_1 (sequence is synthesized)
gcccggatctgaggggcattaacaggggagcagagtcttactgtgtcaaattctatcttgtccgtgacctttggcgggctatgtgctggcacggagaggaagttggagcgaggtgtctgg

SEQ ID NO: 922022 - DNA, 120 bp, Artificial Sequence
  ENSG00000288072_2 (sequence is synthesized)
accatggcgaggaaatggatcaattcttgccctcgtgttcactgaatgaagtaacttacagccccagctttgcagccagacagagccctgggcaagttaccctggcctcggagcccccac

SEQ ID NO: 922023 - DNA, 120 bp, Artificial Sequence
  ENSG00000288072_3 (sequence is synthesized)
ccactggcagatgcacaggaaatggctctctctgctgaactgagcacctctggggctccttcctggcctggggtttctttgagacaggcccaggagagtgacagccgggcctgagaggga

SEQ ID NO: 922024 - DNA, 120 bp, Artificial Sequence
  ENSG00000288072_4 (sequence is synthesized)
aggacaggctgtgactcacaaaggtgcaggagtcctctccccgggttcaccgggagctgacgggctaggccgtgggaggccttgagaccaagctccgactttggagatgggccaggcttg

SEQ ID NO: 922025 - DNA, 120 bp, Artificial Sequence
  ENSG00000288072_5 (sequence is synthesized)
gctgggcgcctccagtggttttgaacagggggcgccatgagttaactggtgctttcagaaagctaaacctggcagcaagtggcttcttcagagaagggactcacccaacatcagaatgtt

SEQ ID NO: 922026 - DNA, 120 bp, Artificial Sequence
  ENSG00000288072_6 (sequence is synthesized)
taccaaaatcaatcacgcggtgggccatagagaaagtctccttacactgcaaagaatctgtgtggttataccgtgtctgcgatcacagtgaaatacaactagatattaaaagcaaaagaa

SEQ ID NO: 922027 - DNA, 120 bp, Artificial Sequence
  ENSG00000288075_0 (sequence is synthesized)
gggcgttggagaggccgccctttttgcaaggcccgagacggcgggacctgcacaagccgccctattccatgccctcagggcgtcagtatccgcctcaggccagataacccctctgggccc

SEQ ID NO: 922028 - DNA, 120 bp, Artificial Sequence
  ENSG00000288075_1 (sequence is synthesized)
cgggtgcccccgctgggcccggagcatcctcggcgctgccctcccagagccccgcagaggctgaggtggcacgggttggagggcctggctctgcgagaagcggcggcagcgagggctgga

SEQ ID NO: 922029 - DNA, 120 bp, Artificial Sequence
  ENSG00000288075_2 (sequence is synthesized)
ggacccgggctacgtggctctggggcgtctggcctgggtgggactgagcccatccagggactgggactccggggttctggtgtaggtggatccggggcaggctcaggaccaagtccctct

SEQ ID NO: 922030 - DNA, 120 bp, Artificial Sequence
  ENSG00000288075_3 (sequence is synthesized)
ccttccaccaaggagcacccagaggccggcgggagctccaggttcacctcctcttcctccaggaaatcccacttccaactggatgtctggatgaactactgaaagctgctgagtgtcctg

SEQ ID NO: 922031 - DNA, 120 bp, Artificial Sequence
  ENSG00000288075_4 (sequence is synthesized)
cagcagaaactcctagagggcagaggcatgcctgccatcttcatcattgcattaccatcacccaacactatcaggggacctgccctgataatcagtctacagttgtatccagcagctcca

SEQ ID NO: 922032 - DNA, 120 bp, Artificial Sequence
  ENSG00000288075_5 (sequence is synthesized)
ctgataatcagtctacagttgtatccagcagctccagagagacagcgaccagcaagaaggggccatgatgatggtggtggttttttcaaaacgaaaagggggatatgtagggaaaagaaa

SEQ ID NO: 922033 - DNA, 120 bp, Artificial Sequence
  ENSG00000288075_6 (sequence is synthesized)
atcaaggtttaaggcatgtagggctgtgcaggatgtgccttgttaaccaaatgtttgcaagcagtatacttggtaaaagtcatcaccattctcttgtctcaataaaccaggggcacaatg

SEQ ID NO: 922034 - DNA, 76 bp, Artificial Sequence
  ENSG00000288075_7 (sequence is synthesized)
ggtattattcaaagtttcgcctgacggtcccctagcccgacacccataaaaggtctgtgctgaggtggattagtca

SEQ ID NO: 922035 - DNA, 84 bp, Artificial Sequence
  ENSG00000288075_8 (sequence is synthesized)
cctcgtgggatgagaaaggcctgacggtcccctagcccgacacccataaaactcttgcatttgagatagaggaaggccactgtc

SEQ ID NO: 922036 - DNA, 78 bp, Artificial Sequence
  ENSG00000288075_9 (sequence is synthesized)
tataaaacccctatggtgggaggtgagacatgtttacagcaatactgccttgatattctttactccactgagatgttt

SEQ ID NO: 922037 - DNA, 69 bp, Artificial Sequence
  ENSG00000288075_10 (sequence is synthesized)
aagaagagaaatatggttctgttctgcccggctcaccagcagtcagagtttttatcctgttcttttttc

SEQ ID NO: 922038 - DNA, 120 bp, Artificial Sequence
  ENSG00000288075_11 (sequence is synthesized)
aaatcaggatgaatagataaatacacggataggcactttgaactacagatgagattaaatactttgtgtttttcttagtcaatgtttttcttagtcaaacgtgtaattaagcatgtgata

SEQ ID NO: 922039 - DNA, 120 bp, Artificial Sequence
  ENSG00000288075_12 (sequence is synthesized)
aaatgagcgcaagatctgacaaaaaaaaaaggttcatcttttattcttccaaacactttcatttaaatcaagaggatgggatgtggttattactgtgtttttagacaaaatcaatggttt

SEQ ID NO: 922040 - DNA, 120 bp, Artificial Sequence
  ENSG00000288075_13 (sequence is synthesized)
ctggctctgagatgttgcatacaccctctcagtccctgtatcctgagatggagtcacctgagaatccacagcaagtcctaaccagggatgggtctgggtgattaaggaagattggcttca

SEQ ID NO: 922041 - DNA, 120 bp, Artificial Sequence
  ENSG00000288075_14 (sequence is synthesized)
accaaatgagcgcaagatctgacaaaaaaaaaaggcgcaggaatgggaggcagcagctgtggaagccagggtctctggcagtccttgtctctgggcggtgatccagaaagagagagaaca

SEQ ID NO: 922042 - DNA, 120 bp, Artificial Sequence
  ENSG00000288075_15 (sequence is synthesized)
atccagaaagagagagaacacgattgtctcagcactgggtcttcttctgagtcatcttgaaggagcaattccagagcgtctcggtgttaaacatcatgttgtgaatgactcagtgatctc

SEQ ID NO: 922043 - DNA, 120 bp, Artificial Sequence
  ENSG00000288075_16 (sequence is synthesized)
tgacccagagaccttggggataaaggaggggaggtacggagaagctcttcgaatggatgttaccggcgtgtcagtgttctttgaggccacaggctatgtgtcaccaaattgaaggggtgg

SEQ ID NO: 922044 - DNA, 89 bp, Artificial Sequence
  ENSG00000288075_17 (sequence is synthesized)
atgagagacacagggaaacaacagtgggtccaggggactggcactcagcacaccaggacctgcacgagcactggcctctgagttccctc

SEQ ID NO: 922045 - DNA, 73 bp, Artificial Sequence
  ENSG00000288075_18 (sequence is synthesized)
ataggagagcagggtgataataagcagaatgtcaacaaaaaacatgtgagcaaaataatctatatcataatta

SEQ ID NO: 922046 - DNA, 87 bp, Artificial Sequence
  ENSG00000288075_19 (sequence is synthesized)
gaatgtaataggagagcagggtgataataagcagaatgtcaacaaaaaacatgtgagcaaaattatgactggacttgcatgtagtcg

SEQ ID NO: 922047 - DNA, 85 bp, Artificial Sequence
  ENSG00000288075_20 (sequence is synthesized)
actgatcctagctcagacttgaacaaatgtacaatcgggtttacaccgagacattcaattcccaggggcaagcaggagacagtgg

SEQ ID NO: 922048 - DNA, 120 bp, Artificial Sequence
  ENSG00000288075_21 (sequence is synthesized)
ctatcacatggggagaaaccttggacaaaaccctgctttcaagggcagggctccctgcggctctccactgtgcattgtgcccctggtttattgtgactagagaatggcaatgacttttac

SEQ ID NO: 922049 - DNA, 83 bp, Artificial Sequence
  ENSG00000288075_22 (sequence is synthesized)
gcggctctccactgtgcattgtgcccctggtttattgtgactagagaatggcaatgacttttaccaactttactgcttgtaaa

SEQ ID NO: 922050 - DNA, 62 bp, Artificial Sequence
  ENSG00000288075_23 (sequence is synthesized)
tcccttaaaccttgattttagacaacacatgtttttgtgaactccaagttgggtcaaagtga

SEQ ID NO: 922051 - DNA, 120 bp, Artificial Sequence
  ENSG00000288075_24 (sequence is synthesized)
atagacacagtgacagtctgatctctctcttttccctacatttcccccttttctttttaacaaaaccgccatcgtcatcatggccccttctcactggtcgctgtctctccggagctgctg

SEQ ID NO: 922052 - DNA, 120 bp, Artificial Sequence
  ENSG00000288075_25 (sequence is synthesized)
ccggagctgctggatacacctgtagactaacaatagagaggacagacatacaaaaattaatacaaaatttgcaatagtggaatttccaatggttttaacccaagtgacagggttaagatt

SEQ ID NO: 922053 - DNA, 120 bp, Artificial Sequence
  ENSG00000288075_26 (sequence is synthesized)
tgtgaggctatcaacagcttttaccattgcctccgtttctgacaccagatttaactgggcttttgaggtttcaaaaatttgttctttcaatttagaaatatctaaggtaagattatcttc

SEQ ID NO: 922054 - DNA, 74 bp, Artificial Sequence
  ENSG00000288075_27 (sequence is synthesized)
tgacgtattccagtcacactgtaactgaaaaagatattctaagctcatgagcctatctcccatccaaatatttg

SEQ ID NO: 922055 - DNA, 84 bp, Artificial Sequence
  ENSG00000288075_28 (sequence is synthesized)
aaagacccacaatcactgcaatcaaagtaaaaatggatcttttagatctagttagaactccttttaatacttaagatatgtacg

SEQ ID NO: 922056 - DNA, 120 bp, Artificial Sequence
  ENSG00000288075_29 (sequence is synthesized)
gatctagttagaactccttttaatacttaagatatgtacggatggagaagcgtcccatggtcgatccatggacaaagggatccacacgccttctcttgcccttactaacagaataccatt

SEQ ID NO: 922057 - DNA, 77 bp, Artificial Sequence
  ENSG00000288075_30 (sequence is synthesized)
cattctaccaatgcttgtagtttgggaatctggtttaatagctatgtttcctacaactagcatataagggggtttta

SEQ ID NO: 922058 - DNA, 120 bp, Artificial Sequence
  ENSG00000288075_31 (sequence is synthesized)
actttgcaaaggaattttcagattgtaatttaggttaatagtataatatggcttatggtttcttgttcccataacttgatttccagacaaaattctaatgtggtacgaggccacagtgag

SEQ ID NO: 922059 - DNA, 120 bp, Artificial Sequence
  ENSG00000288075_32 (sequence is synthesized)
cttccataattctgggtgttcaggaccaacaacaggactaactaactttggtcggggtgatgaaatcctcttttcaccccatttccatggatagggtgattctcaccttctataaaccta

SEQ ID NO: 922060 - DNA, 120 bp, Artificial Sequence
  ENSG00000288075_33 (sequence is synthesized)
gtctagccttttagttaaatcactatcataggccggattagtgggccaggcagatggagcctgtgaacatgagtgggtctggcccatagagtcataatataattggcctcgaggggccta

SEQ ID NO: 922061 - DNA, 120 bp, Artificial Sequence
  ENSG00000288075_34 (sequence is synthesized)
gtctataatagttccaaatttattgttttgtagtaccactgcagtatcagccacacattcttcccaaactaagacttctgggtcttttgattcttttggaatttccttggggcatggttt

SEQ ID NO: 922062 - DNA, 120 bp, Artificial Sequence
  ENSG00000288075_35 (sequence is synthesized)
cctttaggcctaaattttaatgatctttgataggaagaattctgtaaatgattcatttgtgacccgagtgacattccacttatcatatgataagtaaatttactggtggcactgacagta

SEQ ID NO: 922063 - DNA, 120 bp, Artificial Sequence
  ENSG00000288075_36 (sequence is synthesized)
gataagtaaatttactggtggcactgacagtaggtacttctatcaaccaattttggattgtaggcattaagcatcctggtgcttttcccaggcaaataggaggataatgatacccaatgg

SEQ ID NO: 922064 - DNA, 120 bp, Artificial Sequence
  ENSG00000288075_37 (sequence is synthesized)
tgggcagggccacggtcatctgtggggcctggtacccattcactgttattaacatatactttaataggattatctatccaagtgactgcccgaattaagggtgggaaaatcacataggcc

SEQ ID NO: 922065 - DNA, 120 bp, Artificial Sequence
  ENSG00000288075_38 (sequence is synthesized)
cagtaagtatagttagctgtagcggctcctgaagacatagggagacttaaccaccgttgatacaatcattaaagctgcaagaagcatattctctggagtctgtgttacccttgtgttttc

SEQ ID NO: 922066 - DNA, 84 bp, Artificial Sequence
  ENSG00000288075_39 (sequence is synthesized)
gtgtcagcttctttagctgggcccaggtcggcggccccactttcttggtggatggcaacttcatctgtcttgatgttcgattgc

SEQ ID NO: 922067 - DNA, 120 bp, Artificial Sequence
  ENSG00000288075_40 (sequence is synthesized)
agtcgttgatgttcgattgcgggttctctgtctctgcggaggcgccttcccttgcatctctgatgggttcattatagaacttcaaatgtctagtgggtagccaaacaggaagctgatttt

SEQ ID NO: 922068 - DNA, 71 bp, Artificial Sequence
  ENSG00000288075_41 (sequence is synthesized)
gtgggtacccccatgttatcaccttacctatttcccatgttttattttgttgtctttccaccaaatcagtt

SEQ ID NO: 922069 - DNA, 120 bp, Artificial Sequence
  ENSG00000288075_42 (sequence is synthesized)
ccagaggccggcgggagctccaggttcacctcctcttcctccaggaaatcccacttccaactggatgtctggatgaactactgaaagctgctgagtgtcctgcagcaggtgagctgtggc

SEQ ID NO: 922070 - DNA, 120 bp, Artificial Sequence
  ENSG00000288075_43 (sequence is synthesized)
cagagcccaaggatgaagggggctccctcactctgtgactgtgaagaggaagcctgaggtgtagcaggccctggccccagaagtatggaaaaaatgaggtagggagggaggggacctcag

SEQ ID NO: 922071 - DNA, 120 bp, Artificial Sequence
  ENSG00000288075_44 (sequence is synthesized)
gagaagactgaggtctacagaatcccaggatcaaggggatggtacggtgtcctggcactgtccttgatgttccaagaggggtgagaatccatctcctgagtaaaaacttcacatagggtg

SEQ ID NO: 922072 - DNA, 120 bp, Artificial Sequence
  ENSG00000288075_45 (sequence is synthesized)
aggagtggaggccaagacagcgatcagccttacagcaattttaaccagaaatggacacagaccctggaccccatcacaggagtgcaggcctaggactgtctccaggtgaggcatagctcc

SEQ ID NO: 922073 - DNA, 120 bp, Artificial Sequence
  ENSG00000288075_46 (sequence is synthesized)
cttgtcaggttagtgggtgcagggattgtggcgtctgcaggggtgtggaaggctgggcaacgggagcagattactgggctggacaagaaatactgaacttcttttccatcagtgaaatct

SEQ ID NO: 922074 - DNA, 120 bp, Artificial Sequence
  ENSG00000288075_47 (sequence is synthesized)
gcttctgggtcagaaaaaactgcgagttctagaggggcagggcctaggaggaggtcaggtcctgagccttcctggtttgaccccctcctaccccctgtgtttctgggtatgtcctcactt

SEQ ID NO: 922075 - DNA, 120 bp, Artificial Sequence
  ENSG00000288075_48 (sequence is synthesized)
ggccgggctgcttcatccactgcaagttaaatgcttccaatactttctggccaaagcttagagttgtcagaccactgactttgaatgttgatctggttccttgtggaacagagtggtagc

SEQ ID NO: 922076 - DNA, 120 bp, Artificial Sequence
  ENSG00000288075_49 (sequence is synthesized)
tattgaagtttaaagtcactttcgtgcgtggatggtaaagaggcaggctgttcaggcataactgccctcaggcctggagggctgtggaggtcaccgtgggcattgggtggatccggaacc

SEQ ID NO: 922077 - DNA, 120 bp, Artificial Sequence
  ENSG00000288075_50 (sequence is synthesized)
tctgtgtctctagactttcaactatttcattttttcttttgtagtttttgtttgttgcttgcttttttacaatgggaagtagaatgtaagatgccaaactcagcctgtggggaacacgaa

SEQ ID NO: 922078 - DNA, 120 bp, Artificial Sequence
  ENSG00000288075_51 (sequence is synthesized)
ttttcacaacagcaaccacagagcgtggtttccatttctattccctgttcatgtgggaggcagagaaggaaatcaggtgctcagttccagggacatcacaggactaggacatgtgcagtg

SEQ ID NO: 922079 - DNA, 120 bp, Artificial Sequence
  ENSG00000288075_52 (sequence is synthesized)
agggtggaaggcggaggcattgctttaggagaataaaattactgcatgcacacacatatgtatgtatatggatgtatgtacacaaacatgcatatttatagattctgttctccctctgtc

SEQ ID NO: 922080 - DNA, 120 bp, Artificial Sequence
  ENSG00000288075_53 (sequence is synthesized)
tatataattttctttaacacttgatattatttctaaatttaaatacctttgagacaaatgtgaattgtgaagggacttaaaaatgtcagtgaaaaatggaattaacaacaaaaatataaa

SEQ ID NO: 922081 - DNA, 120 bp, Artificial Sequence
  ENSG00000288075_54 (sequence is synthesized)
cagcaggacattttcaatccagaggaagaccttctaaaagaggtgatgggtgggagagtgctgacatactatgtgaagctactatttggagttggacagtagtgcatgtgactttgtgtc

SEQ ID NO: 922082 - DNA, 120 bp, Artificial Sequence
  ENSG00000288075_55 (sequence is synthesized)
acagcgggaatcttgactaccacacaaatgaatccattcaaatgttggcaagtggagcagagtcccaggacaggtacagaaacacccccagttcaaggatcttcacacctggatttaggc

SEQ ID NO: 922083 - DNA, 120 bp, Artificial Sequence
  ENSG00000288075_56 (sequence is synthesized)
ctacacctgcaactaccccaggccagttatccaggcagtgactttctgtacagctacagtcacctctggacacctgcggagactttaaaaatttccagaaggtcaggaatttgtggagac

SEQ ID NO: 922084 - DNA, 120 bp, Artificial Sequence
  ENSG00000288075_57 (sequence is synthesized)
ctttctcatggctacgttgcttgcaaaggtgaatcaataagcttctgaactgacttagaaaatgttgcagtctcttgtgaacagatagaccctctcctgccactccagatacacatatct

SEQ ID NO: 922085 - DNA, 80 bp, Artificial Sequence
  ENSG00000288075_58 (sequence is synthesized)
acagatagaccctctcctgccactccagatacacatatctgggtcacacacacacctgatttaacaacatctcattatct

SEQ ID NO: 922086 - DNA, 88 bp, Artificial Sequence
  ENSG00000288075_59 (sequence is synthesized)
cacgtgccaccacaccctgctaatttttttgtactgacctcgtgatcccaaagtgctgggattacagtgcctcggcctcccaaagtgc

SEQ ID NO: 922087 - DNA, 120 bp, Artificial Sequence
  ENSG00000288075_60 (sequence is synthesized)
ggtaagatcagatggagagcaggagaactacctgagacacttttgagggacaggcatgtaggaactgctgcaatttgaggtcagagcaaggtaaaggtctcactgtgagaatcgcggtaa

SEQ ID NO: 922088 - DNA, 120 bp, Artificial Sequence
  ENSG00000288075_61 (sequence is synthesized)
accctctgttactggggagtgggttggggagctgagagaaacccccttcactctctgttctcacaggtgcataagaagagaggcctgatgaggtctgaaggcaggggagggcaggtagct

SEQ ID NO: 922089 - DNA, 120 bp, Artificial Sequence
  ENSG00000288075_62 (sequence is synthesized)
gagagaagtagattctctggtctttcactgagtgtgaggcagctactgcccgaggttgggcaagggatggaagccctgagagattcttgaggtgcagagatagaggcttgctgaggatga

SEQ ID NO: 922090 - DNA, 120 bp, Artificial Sequence
  ENSG00000288075_63 (sequence is synthesized)
aagtggacaggaaagctaagagaggctccaatgctgaccatggcactctgcaagaagataaaaatctgtatgtagaggtttatgagggaaaatcttgagttcagttttggatatatgtta

SEQ ID NO: 922091 - DNA, 120 bp, Artificial Sequence
  ENSG00000288075_64 (sequence is synthesized)
cttttgaaatcaagtgtccaagtagatacaccattatgcagttgggtaatttattataagcctggagttcaaaaggaggtccaaaaggagaattgaaagggatgagacttgctgagcccc

SEQ ID NO: 922092 - DNA, 120 bp, Artificial Sequence
  ENSG00000288075_65 (sequence is synthesized)
tccaaagagtgtgtggtgagggagaagagaagaggaccaggaactgagctctcgagctctcctataggaggtgtgatgcaaaagatgaggaagaaacaaaggaagccgaagtggtagctc

SEQ ID NO: 922093 - DNA, 120 bp, Artificial Sequence
  ENSG00000288075_66 (sequence is synthesized)
cagtgagacaggctgagaatcaagtgaatgtgccgtcctggaagccaactgaagaaagtatactgtgaagaaggtagtgattatctgtgtcaaatgctgctaataggccaattaaagttg

SEQ ID NO: 922094 - DNA, 120 bp, Artificial Sequence
  ENSG00000288075_67 (sequence is synthesized)
tagtggaaaatgatcattggatctagcaatatagggattattcgtaactttgacaaaagtggtgtcaatagcatgatcgaaaaagggggagagagcctgattgggatatatttaagaaac

SEQ ID NO: 922095 - DNA, 120 bp, Artificial Sequence
  ENSG00000288075_68 (sequence is synthesized)
aatgagaagagaggaattgaagacacagagtatggacaactattttaagatgttttgctgaaaagtagagcaaaaattgggatgacagctggcatcagaagaaatgcaaggacattcttt

SEQ ID NO: 922096 - DNA, 120 bp, Artificial Sequence
  ENSG00000288075_69 (sequence is synthesized)
ttcttaaatcagaaaaacaacagcatatttgtttgctggtggtaataatttactagcatcaaaattgatgacacagtcatgatatagtgaactgcaacaggaaaatccccaagtacacag

SEQ ID NO: 922097 - DNA, 120 bp, Artificial Sequence
  ENSG00000288075_70 (sequence is synthesized)
cgaagagggaatataatacacaaatttaaaaactatttggatctctgaaacatctgttttgatattagcctttcattcctgcaatagttattttaagcatgttctcattttctcttgttc

SEQ ID NO: 922098 - DNA, 120 bp, Artificial Sequence
  ENSG00000288075_71 (sequence is synthesized)
gggtcaggccttgggctaacgtaggcactctcgcagttcctccgccttcaggaaggtctttttagcaggggccttacgggtgcatgcttcggtcctggaggacttaggctagcctcctct

SEQ ID NO: 922099 - DNA, 120 bp, Artificial Sequence
  ENSG00000288075_72 (sequence is synthesized)
ccatcagcgccacccgtctggggcccgaaaggagggagctttccctctgtcccccagcctttggactgtcaccaaacaagccattcgttcaccaaatactttttaagcgcctaccatgtg

SEQ ID NO: 922100 - DNA, 120 bp, Artificial Sequence
  ENSG00000288075_73 (sequence is synthesized)
cctgacaagggatatgtaacggtgagaaaaactaggtgtggtccaggcccttcagggactcaggggctcgtggaagaagtggatattgaagtacttatcacacaaaggaggataaaagta

SEQ ID NO: 922101 - DNA, 120 bp, Artificial Sequence
  ENSG00000288074_0 (sequence is synthesized)
gagaaaaaagaggaagcaagagaatgagagaaagagaacgagaaggggagaaaagatgaaagaaaagaagagaaaataagggagagaatgagagtgagaaaggaagataaaatgaaagta

SEQ ID NO: 922102 - DNA, 120 bp, Artificial Sequence
  ENSG00000288074_1 (sequence is synthesized)
ttggatggtatttgaagggcagacttatgggcatgaaagagactattaaattatagttgaaattagagagcatggggtgggggtaaaagcggaatgttagttcttgccttactaaaaatc

SEQ ID NO: 922103 - DNA, 120 bp, Artificial Sequence
  ENSG00000288074_2 (sequence is synthesized)
agttattcatacttcattttgactttgtgttttctcaagcaagtgacttatcttttatgtgggtgtttttatattgccttggaagggaaatgtttattagctacctttctcttactttta

SEQ ID NO: 922104 - DNA, 120 bp, Artificial Sequence
  ENSG00000288074_3 (sequence is synthesized)
atcaaccccaaaaccccatcagcattctttcttctgatgcctcatttgtctactgtagcctgaaaatgaaatatctgcagacagaactatattaaaacgcaatgaatactcctctgtcag

SEQ ID NO: 922105 - DNA, 120 bp, Artificial Sequence
  ENSG00000288074_4 (sequence is synthesized)
aaggccttgagctgagtttttctggtgtctgggggaagctatgaccccgtcatccatgcttctgccctcagtctcctttttatgcatgcatatacttggatatgggacgtagacaaacag

SEQ ID NO: 922106 - DNA, 120 bp, Artificial Sequence
  ENSG00000288074_5 (sequence is synthesized)
tttcagcagctgacatcctctgagttcaggggaaaagttatgattattctgggtgattgtagctttttgcagcagaagagtcatattatgcaaaacttacaaatgaagagaactggcagt

SEQ ID NO: 922107 - DNA, 120 bp, Artificial Sequence
  ENSG00000288074_6 (sequence is synthesized)
tgtgattagtggttcttctcttctgtggtatgaaaaggagtcaacctgggtacatcccctatttccagaagacagaaagaagaatcagaagcagtgtgtgttcatatgggaagggcagca

SEQ ID NO: 922108 - DNA, 120 bp, Artificial Sequence
  ENSG00000288074_7 (sequence is synthesized)
tataatggttttgccctgtgctatgttaactaaggctctttttcctgtagaacattatcttggtccactgtctcaatgacatcatgttaattggactggatgaggaagaaatggcaagtg

SEQ ID NO: 922109 - DNA, 120 bp, Artificial Sequence
  ENSG00000288074_8 (sequence is synthesized)
cattggaggttttggtaagacacatacatgtactccaaagaacagaagatgcatctaatgaagattcaaggacctgacatatccgtttttaggaatatagccatttgggacatgccagaa

SEQ ID NO: 922110 - DNA, 120 bp, Artificial Sequence
  ENSG00000288074_9 (sequence is synthesized)
cagctttttgaaagaaaaggacagtctaatgcctctcatattgtgcacccctaagaaagaagcacagctttttaaaggcttctttgggttctagggacagcatatttcatacttggaaat

SEQ ID NO: 922111 - DNA, 120 bp, Artificial Sequence
  ENSG00000288074_10 (sequence is synthesized)
actgtttcaactcattcgccaagtgacacaaaagattaccaacttcatttgagacttcaagcaaaaaagagctctgctacgtgatttgccaccggaacttggtagatggaaaatatgaga

SEQ ID NO: 922112 - DNA, 120 bp, Artificial Sequence
  ENSG00000288074_11 (sequence is synthesized)
gctcaactgaccatgcagccagaactgcccatcctaacttaggtatttccaacctccatcaaatcataaggttgagctaaaccaatagcaatccactgtaagatcgaagtgatatatctg

SEQ ID NO: 922113 - DNA, 120 bp, Artificial Sequence
  ENSG00000288074_12 (sequence is synthesized)
gaattgggaattggcagagacaaaaggcagaagttaagtttcagagggcacggacctccaaataacctaccattgttatgctatcacctttccctaagctcacccctgttatactgtcac

SEQ ID NO: 922114 - DNA, 120 bp, Artificial Sequence
  ENSG00000288074_13 (sequence is synthesized)
ctttccctaagctcacccctgttatactgtcacctttccctaagctcaccgttatactgttgcctttccctatagccacgtaggcatcccttttgactgactgacaaaggaagaaaaagt

SEQ ID NO: 922115 - DNA, 120 bp, Artificial Sequence
  ENSG00000288074_14 (sequence is synthesized)
tacacctgggtcatgaatgggttggctctctatgggggtccaagctgagaaagcactgttgctactctacagttccacctttggtgtgagtagatattccataatatttctgtaaacctt

SEQ ID NO: 922116 - DNA, 120 bp, Artificial Sequence
  ENSG00000288074_15 (sequence is synthesized)
aataaataggaacttacaggaagtaacctctcgtttggctgattggatgggggcttggaagaagagcgatagaaagatcatagaaaaaaagatctgggaaagaggcatgtgcctctgcct

SEQ ID NO: 922117 - DNA, 120 bp, Artificial Sequence
  ENSG00000288074_16 (sequence is synthesized)
gtggctgtagattggaagtttgaatatctttgcatctcatggcactgcccgcaaggaaacattcaccaagaatgaggcattaaacagccgtgtagacagcatgactcagccagttgatgt

SEQ ID NO: 922118 - DNA, 120 bp, Artificial Sequence
  ENSG00000288074_17 (sequence is synthesized)
catcagcatttcattgcccaatgctggcctgatggatgcatgaagaaactgatcattgctgagggatgggctcagtggcatttgtcctcactaaccaaggctgatttaggtattgttctc

SEQ ID NO: 922119 - DNA, 120 bp, Artificial Sequence
  ENSG00000288074_18 (sequence is synthesized)
caactccatctagctgctgattccccaaattgctagcaaaagagatcattactgagtctctggtacagcaaaatccctcagggaaaccaaccagccgctcagtggcaagttgattacact

SEQ ID NO: 922120 - DNA, 120 bp, Artificial Sequence
  ENSG00000288074_19 (sequence is synthesized)
ggaacctttctatcctggaaaaggtagtgattcatctcgactggaaaagtcacatattgtggtatgagtttccttttcctaccacaaggcctcagctagcaccatcagaagaacggaata

SEQ ID NO: 922121 - DNA, 120 bp, Artificial Sequence
  ENSG00000288074_20 (sequence is synthesized)
tctacccacaccatatatggtgtaacatagcctcagaccaaacaacaatgttgtaggagtgtacacataaccatgtatctattggttctgttacattctgcaccactctgaagttgcagg

SEQ ID NO: 922122 - DNA, 120 bp, Artificial Sequence
  ENSG00000288074_21 (sequence is synthesized)
tctgaaagataatggaattgacttttgaaggagcagcttagatactggcttgcagatgataccttgcacagatgaggcattatctttcaggatgtaatatataccctaaatcaaagaccc

SEQ ID NO: 922123 - DNA, 120 bp, Artificial Sequence
  ENSG00000288074_22 (sequence is synthesized)
ttttacagttctattctccagtgggtccaggatggctctacttatcatcactaccagtgaatgactcagttgagaaatgtttcctcaataatgcatgttttggttctgtggattctaaac

SEQ ID NO: 922124 - DNA, 120 bp, Artificial Sequence
  ENSG00000288074_23 (sequence is synthesized)
taggttctggattctaaagtggaaattgttttaccagggggcccagtaagagtcccattaaactttaaactatggctactgtagggtcatttaagtttcttcatgtcaagagtccagtaa

SEQ ID NO: 922125 - DNA, 120 bp, Artificial Sequence
  ENSG00000288074_24 (sequence is synthesized)
gcaataaaagaaaacaatgttggtagaggtaattgattccggccattaggaggccatcctcctaatggcctcctaggggtactcagtggggtctggaaagcataagtttggttgtcaggt

SEQ ID NO: 922126 - DNA, 120 bp, Artificial Sequence
  ENSG00000288074_25 (sequence is synthesized)
tatctactggatcatgtcttgatactttcctgattttttcaagaaatggacaagtacagcagccacagtatggtgtggttaccagaagcctaggcactcagggatgactgtctgggtaac

SEQ ID NO: 922127 - DNA, 120 bp, Artificial Sequence
  ENSG00000288074_26 (sequence is synthesized)
cccaccaggtaagccatctagatcatcagaggtgctaaattagggtcaaaacaatctggaataggttgcagaggagggagaaaatgagtttcagtttcagctgtaaaaccagctatattg

SEQ ID NO: 922128 - DNA, 120 bp, Artificial Sequence
  ENSG00000288074_27 (sequence is synthesized)
gcaaaagctatatatatagttcatgctactcatctttcttttgtaaagtttcccagaaaaagagaccaaccagaaacttgaaggagttcttcccagatggaataaatttaccgtgtgaat

SEQ ID NO: 922129 - DNA, 120 bp, Artificial Sequence
  ENSG00000288074_28 (sequence is synthesized)
cacgtgaatccaagggatgcaaggattggcctatactggattggatgctctggtatactactcagatttcctcttcagaactaatgcatttatcccccagctatgaaattgttggctgct

SEQ ID NO: 922130 - DNA, 120 bp, Artificial Sequence
  ENSG00000288074_29 (sequence is synthesized)
ggcagtctatagctaatgcagtcactggaaattatccttggttgaagggacctaacttgtccaagtctacacctatttccaggaatagttcaatccattgacttgttgatgcaggactac

SEQ ID NO: 922131 - DNA, 120 bp, Artificial Sequence
  ENSG00000288074_30 (sequence is synthesized)
acaggtcaagccttcttgttttgatgtggacaaatctgaagggatatcccagctccagacctcgcataggtctgagctaaagagacctcataggtctgtgtcaatttctgtctttaccca

SEQ ID NO: 922132 - DNA, 120 bp, Artificial Sequence
  ENSG00000288077_0 (sequence is synthesized)
agggatccagaggcaaagacatctacctgtttggggcagtgccaaggctcccaccagccctggagcacttcacatccgctgtcccatcccaaaaccttggtgggcagagaaatagaggcg

SEQ ID NO: 922133 - DNA, 120 bp, Artificial Sequence
  ENSG00000288077_1 (sequence is synthesized)
aaaaatgactcttggagaagttaagtcacttgatctggaccacatagcaagtacagaattggggtcagagttccaaaggcaccttgcacacagccctaggaggaggtgacctcctgtggt

SEQ ID NO: 922134 - DNA, 120 bp, Artificial Sequence
  ENSG00000288077_2 (sequence is synthesized)
catctgacgctgacccttggtgatggctcactggttcccaaccacttccaaccttcctgctgtcctcactgctctagtctggtggggcagtttccgggttagctggctgcctcctctact

SEQ ID NO: 922135 - DNA, 120 bp, Artificial Sequence
  ENSG00000288077_3 (sequence is synthesized)
aactcccagccactgacttcccatcagaggaccttctctgagttgagactgtgtggaaaaggctaacattccctccaaaatgtgtgctccctcttccataggccagagtgagccctgtga

SEQ ID NO: 922136 - DNA, 120 bp, Artificial Sequence
  ENSG00000288077_4 (sequence is synthesized)
agtagctgcatttcccagccctctgcagtatagagagatgggggcatgtcattattcttgccaatgattctgcctgggtgcacagactcaattcctgggggacagtggagccacgggatg

SEQ ID NO: 922137 - DNA, 120 bp, Artificial Sequence
  ENSG00000288077_5 (sequence is synthesized)
gccagaatggaggtgcactgcccccaaccagggacatggactgttaggtgagcaaaaaataaattttgattaggataagccactaaaatgctcacctgttacagcagatagcattgccct

SEQ ID NO: 922138 - DNA, 120 bp, Artificial Sequence
  ENSG00000288077_6 (sequence is synthesized)
aacccagtagtgaggtgccaacaatgggacacattccgtgatgttccccattcaatcctttgatccccgcaacagccccacaaggtatatattagtactgtcatcctcattttcaggtaa

SEQ ID NO: 922139 - DNA, 120 bp, Artificial Sequence
  ENSG00000288077_7 (sequence is synthesized)
ggctcagggagattaagggatgcacccaaggtcaaacacaaccagtaggcagtaggccaggattgaatctggatgtctgactccagagacttctggaggttcagttaccagcacacggtg

SEQ ID NO: 922140 - DNA, 120 bp, Artificial Sequence
  ENSG00000288077_8 (sequence is synthesized)
gagatcttcctccaccaccaccacctagagagaatgagcaggaaacctcagaagaaatggcacccaaaagagccagaagtgtcgcctcagccagctaaggttggaaccacttaccaacgc

SEQ ID NO: 922141 - DNA, 120 bp, Artificial Sequence
  ENSG00000288077_9 (sequence is synthesized)
ccagaatcacgtctttccaatcaaacccaatgactgttcatctctgggtttcagtttcctggtttgtaaactcccatgagtaaacaatctctgattatcccgaccacagagagggttcaa

SEQ ID NO: 922142 - DNA, 120 bp, Artificial Sequence
  ENSG00000288076_0 (sequence is synthesized)
gcagaatgaagctttgcatagctatcaccaggagctgcctggacttttttcaccccctcctgaggttgaacaagaaggagaagaaccaaatggcaacagtgtttggtggaggctgcaaga

SEQ ID NO: 922143 - DNA, 120 bp, Artificial Sequence
  ENSG00000288076_1 (sequence is synthesized)
agcttcaccctgtccctacctgcgttgtcacgaggcgttcctcctgtatctgtcttcacatgaccgtcctcttataaagacatctgtcacattagattaggggcccactccactccagta

SEQ ID NO: 922144 - DNA, 120 bp, Artificial Sequence
  ENSG00000288076_2 (sequence is synthesized)
tgaccctatcttaactgattacaactgcaatggccctacttccgaagacggtcacgtgctgagggcatttaggacttcaacatgaattttcggagaacaaaattcaactcataacaagga

SEQ ID NO: 922145 - DNA, 120 bp, Artificial Sequence
  ENSG00000288076_3 (sequence is synthesized)
ccttcaaagaagtgacaaatttatgaagagttgcatgctactaattatatcttagccataatccagagaacaggacaacatgccatgatctgcagaacctgcacctgtgaaaccgtggcc

SEQ ID NO: 922146 - DNA, 120 bp, Artificial Sequence
  ENSG00000288076_4 (sequence is synthesized)
aagggtccctcataatggagctgctttgctgcttaactttgtctagaaaaacccacattgctaagctttatgcaatttatacagctgttcttcttcacctgtttcatatactgtttaata

SEQ ID NO: 922147 - DNA, 120 bp, Artificial Sequence
  ENSG00000288076_5 (sequence is synthesized)
ttagttaagattgtgtaatgaggctggcattgagattaatcaggaaaataggtcttcctgctgcttccaacccaggtggctctcttgagctcagacccaaacatgcaataggaaaactct

SEQ ID NO: 922148 - DNA, 120 bp, Artificial Sequence
  ENSG00000288076_6 (sequence is synthesized)
aaccggaagtctcatagccaatttaaactgaatgtgtgcaagctgcatgcattgcctctctgctagctctccccttccgagcccttgagaatcctatctgtgcagctgccaggccagaaa

SEQ ID NO: 922149 - DNA, 120 bp, Artificial Sequence
  ENSG00000288076_7 (sequence is synthesized)
ctgcagaaccagtaattcttgacttccctcttactgctttatctcatcattttatttatcctgtttgtcattttttgccgtttttcgaatctgtaacttgatatctttcatcactttggg

SEQ ID NO: 922150 - DNA, 120 bp, Artificial Sequence
  ENSG00000288076_8 (sequence is synthesized)
aaaagcttcagtgactatctccctggatattgcctgccctgttctctctcccttcttctggaatttggatggactttgtcagacactcttcctccatcctgcaggtcttccttcactttc

SEQ ID NO: 922151 - DNA, 120 bp, Artificial Sequence
  ENSG00000288076_9 (sequence is synthesized)
tctcctggtccttatctcgtctctctgtcctacacctgggatgactcgttttcacttatctttcagcttcaggtgtgtctaatcttgttaaacatgactctgaattataaattccaacca

SEQ ID NO: 922152 - DNA, 120 bp, Artificial Sequence
  ENSG00000288076_10 (sequence is synthesized)
tcgtatttttcatgtctataagttttcattttaaatctgcaagattttcttctttagttttctgtcccctttaggtgttttcaaaattttactttcatctttaaacatcgtaagtgttat

SEQ ID NO: 922153 - DNA, 120 bp, Artificial Sequence
  ENSG00000288076_11 (sequence is synthesized)
ggatagaattacattcctgatagaaagatgtaagtcctaagccacagcaactcagcatgtgggcttatttggaagtagcgtcactgcaggtttaactagttgagaggaggtcctcctgga

SEQ ID NO: 922154 - DNA, 120 bp, Artificial Sequence
  ENSG00000288076_12 (sequence is synthesized)
gtggggtgggctcttaatccaatgtgactgcatctttataaaaagacggccgtgtagacagggagaataccatgagacgatgaggccagcaacaccagaagctaggatgggacagggaag

SEQ ID NO: 922155 - DNA, 120 bp, Artificial Sequence
  ENSG00000288076_13 (sequence is synthesized)
ctgatgcctcaattacagacttctagcctccagagctgtgagaataaattcccattgttttaggcacccggtttgtggcacattgtaccgcagccttagcaaaccaatacagcagggata

SEQ ID NO: 922156 - DNA, 120 bp, Artificial Sequence
  ENSG00000288076_14 (sequence is synthesized)
gatgtttttggctggtctgtttttactatttcttctttctgctgatttttgctaatagcactatgttttcttgtgtgtttatttttgtctgtgagttgcccattattcttgggaaattgt

SEQ ID NO: 922157 - DNA, 120 bp, Artificial Sequence
  ENSG00000288076_15 (sequence is synthesized)
aagaatgttttgagacccatgatgaaagtgcattctcccagaaaggattttcatttgcttcttccacaaacctaggggaataagatgatcagcctgggaccaccttagaacaattcattg

SEQ ID NO: 922158 - DNA, 120 bp, Artificial Sequence
  ENSG00000288076_16 (sequence is synthesized)
tggttttttctggccaccttatgtgtactgtaaaacccaaaagggtgagcttgtagttaaattctcagggatgggctcccctcttttagttctgtttaacatccaggcatgttttcttgt

SEQ ID NO: 922159 - DNA, 120 bp, Artificial Sequence
  ENSG00000288076_17 (sequence is synthesized)
ctgctctggagagtggggtgggcaggtttacttctgcttccctgacactggggtagagccttcctggaaggaggtatctcatcagatgctcccatttctttaggtcctggcctttgtctt

SEQ ID NO: 922160 - DNA, 120 bp, Artificial Sequence
  ENSG00000288076_18 (sequence is synthesized)
ctgtctgaaccactcaggccttgaagtaggcttaagttggccaggtttggcaaatgacttgatggcaaagctctttaatagttcacaggattcctgccttcacataagtttgagcagaat

SEQ ID NO: 922161 - DNA, 120 bp, Artificial Sequence
  ENSG00000288076_19 (sequence is synthesized)
atgtgtttattatcttgtcattttacagatgctttaaaaactattgccaagttattttattttagcatttttaagtgtaagagtcagtcccagtaccagaccaatcccattcctggactc

SEQ ID NO: 922162 - DNA, 120 bp, Artificial Sequence
  ENSG00000288076_20 (sequence is synthesized)
cctgtattccatccatctagaaggcctattgatcacccctctttaacatcatgagcctgatgttaatattctagcacaggccactataatatctaacctgaattactgtagcagcttctg

SEQ ID NO: 922163 - DNA, 120 bp, Artificial Sequence
  ENSG00000288076_21 (sequence is synthesized)
ctctggtctctctgcctctactcacacctcctctaagcccttctgcacacagcactccacagtcctttctcagtcacatcaggacactcccccgccccaaatgctttatgtccagggtac

SEQ ID NO: 922164 - DNA, 120 bp, Artificial Sequence
  ENSG00000288076_22 (sequence is synthesized)
aaccccaattcctaagcagactcttcagcagctagttccagaccgcatctccgactcacccatctcctccctcttggctcaattattgttaatttattttaacttccgtggtctcgcctt

SEQ ID NO: 922165 - DNA, 120 bp, Artificial Sequence
  ENSG00000288076_23 (sequence is synthesized)
ttatttatttattttttaagtgcacaggcaattttctcagcctggaatataatttccctcagttttggtctttcttcagggagggagaaagggcagagtatgttcttcttaaataagtaa

SEQ ID NO: 922166 - DNA, 120 bp, Artificial Sequence
  ENSG00000288076_24 (sequence is synthesized)
cagtgtggatctaaataaacagtgaaactattcttgctgttcacgtagcccttacgtggtttgggaggcttcccgtgtgggggctccctcctgcactacccagggccttaggcagcagtg

SEQ ID NO: 922167 - DNA, 120 bp, Artificial Sequence
  ENSG00000288076_25 (sequence is synthesized)
cttgtgcatccagatgggacatctgttcacctcgttagactgtaagcttggggtgaacaggactgggtctctaaattggctccttatggagacagacagtacagacctctttttctgctg

SEQ ID NO: 922168 - DNA, 120 bp, Artificial Sequence
  ENSG00000288076_26 (sequence is synthesized)
ttgtaatagtagtaaccttatcacctgaggatacagagacagctcctaggtctatgtatgctaaatgaatgcctaaaaatattttttcactgtgtgtgtgcacgtcggtctttaacatct

SEQ ID NO: 922169 - DNA, 120 bp, Artificial Sequence
  ENSG00000288079_0 (sequence is synthesized)
ggaagccctgttgtttctgtgaaaggattgatgtccctttgattacaatattagactatgaactctttaggggcgtggaccgagttttgttcctgtctgtgtcccctgaacctaacccag

SEQ ID NO: 922170 - DNA, 120 bp, Artificial Sequence
  ENSG00000288079_1 (sequence is synthesized)
gtcctggcccaagtacacacttggcaagtgttgaatgaataaatgaatgaatgttaatgaatgaacgaatgaatatcttggaagctgagccccacgagttaggtacaagatgcccattat

SEQ ID NO: 922171 - DNA, 120 bp, Artificial Sequence
  ENSG00000288079_2 (sequence is synthesized)
gctgcctagaaactcatagttgaactcataaattcatagttgaagttggtctacattttgaacaaacagacaagagcctagcataacaaatgttctgtgaacattatatctaagtgtggc

SEQ ID NO: 922172 - DNA, 120 bp, Artificial Sequence
  ENSG00000288079_3 (sequence is synthesized)
caatggaagctattttgcaaatacaatgtttcttgagacgttatgtgggatctgaagaaagaagtgaaatgggtctaataaatgtgctgtaagaaatacatgctattcaaggagtgatgt

SEQ ID NO: 922173 - DNA, 120 bp, Artificial Sequence
  ENSG00000288079_4 (sequence is synthesized)
tgctgtaagaaatacatgctattcaaggagtgatgtgttaaaaacagtgacaggatggatattccattctccatgatgtgcttatttcacactgcatgcctgtatcaaaacatctcatgt

SEQ ID NO: 922174 - DNA, 120 bp, Artificial Sequence
  ENSG00000288079_5 (sequence is synthesized)
acacacacaaaacttaacaaaaaacagagattggctgtctgattcctttctattgccccatttcactttccaggctgaacaagcatgatgcctgcgggtcaaggcgagatctctcataga
